United States Patent Application Publication US 2005/0244851 A1 - sequence listing, part 25

SEQ ID NO: 958650 - DNA, 25 bp, Homo sapien
ggcataattatagatcaagagaata

SEQ ID NO: 958651 - DNA, 25 bp, Homo sapien
ccacaatggagcattttttggcatt

SEQ ID NO: 958652 - DNA, 25 bp, Homo sapien
taaaggtataagttggactaggagc

SEQ ID NO: 958653 - DNA, 25 bp, Homo sapien
gagattggatggatacgcacaccaa

SEQ ID NO: 958654 - DNA, 25 bp, Homo sapien
caaccatactcttttaggctaagtg

SEQ ID NO: 958655 - DNA, 25 bp, Homo sapien
gactaggagcagaacaaaggtgatt

SEQ ID NO: 958656 - DNA, 25 bp, Homo sapien
aagaggatattcagtaagcctgtca

SEQ ID NO: 958657 - DNA, 25 bp, Homo sapien
tcagtaagcctgtcattcataatca

SEQ ID NO: 958658 - DNA, 25 bp, Homo sapien
ggatattcagtaagcctgtcattca

SEQ ID NO: 958659 - DNA, 25 bp, Homo sapien
tattcagtaagcctgtcattcataa

SEQ ID NO: 958660 - DNA, 25 bp, Homo sapien
tcctaatcactccttgctattttgc

SEQ ID NO: 958661 - DNA, 25 bp, Homo sapien
aagaacacgtattttcaggtgatca

SEQ ID NO: 958662 - DNA, 25 bp, Homo sapien
ggttaataagacaacttcctaatca

SEQ ID NO: 958663 - DNA, 25 bp, Homo sapien
ttcaggtgatcactgtactattctt

SEQ ID NO: 958664 - DNA, 25 bp, Homo sapien
tcgtcatcattaaaaggcccaggta

SEQ ID NO: 958665 - DNA, 25 bp, Homo sapien
catgggatctcctaaccgtagccaa

SEQ ID NO: 958666 - DNA, 25 bp, Homo sapien
gaatccagcgatctgtcaccaaagt

SEQ ID NO: 958667 - DNA, 25 bp, Homo sapien
gatacgtacggcagaaaactccatt

SEQ ID NO: 958668 - DNA, 25 bp, Homo sapien
tggcctgtttcgtcagggcgctgat

SEQ ID NO: 958669 - DNA, 25 bp, Homo sapien
gtagagccgagtggcctgtttcgtc

SEQ ID NO: 958670 - DNA, 25 bp, Homo sapien
ccgagtggcctgtttcgtcagggcg

SEQ ID NO: 958671 - DNA, 25 bp, Homo sapien
ggtagagccgagtggcctgtttcgt

SEQ ID NO: 958672 - DNA, 25 bp, Homo sapien
tgtcacctctcggtctggctattct

SEQ ID NO: 958673 - DNA, 25 bp, Homo sapien
atgctgtcacctctcggtctggcta

SEQ ID NO: 958674 - DNA, 25 bp, Homo sapien
cacctctcggtctggctattcttaa

SEQ ID NO: 958675 - DNA, 25 bp, Homo sapien
ccagatggcccgcaagtgcagcaca

SEQ ID NO: 958676 - DNA, 25 bp, Homo sapien
gagaggtgagagaaatgatgatcat

SEQ ID NO: 958677 - DNA, 25 bp, Homo sapien
aatgcaaaaagtcatctcccgttcc

SEQ ID NO: 958678 - DNA, 25 bp, Homo sapien
tcatctcccgttccaaagatgagag

SEQ ID NO: 958679 - DNA, 25 bp, Homo sapien
gtttcaatgcaaaaagtcatctccc

SEQ ID NO: 958680 - DNA, 25 bp, Homo sapien
cagccatagtagtgcatgtctgtaa

SEQ ID NO: 958681 - DNA, 25 bp, Homo sapien
tataatccagtatggcacacacctg

SEQ ID NO: 958682 - DNA, 25 bp, Homo sapien
ctgaaattccttaactcagtggttt

SEQ ID NO: 958683 - DNA, 25 bp, Homo sapien
cagtggtttttaagcttaattgtgg

SEQ ID NO: 958684 - DNA, 25 bp, Homo sapien
atttcaaactgaaactacatcttac

SEQ ID NO: 958685 - DNA, 25 bp, Homo sapien
caatgtagaattgccacaaagacgg

SEQ ID NO: 958686 - DNA, 25 bp, Homo sapien
gtctctgtgagcataggaaaaaatc

SEQ ID NO: 958687 - DNA, 25 bp, Homo sapien
gatactagtatggagtcacctgggc

SEQ ID NO: 958688 - DNA, 25 bp, Homo sapien
gcaagaccgccagctaatcctgtct

SEQ ID NO: 958689 - DNA, 25 bp, Homo sapien
aagatagcacacaaagcaagaccgc

SEQ ID NO: 958690 - DNA, 25 bp, Homo sapien
cagcctgtgcccctgtttggttggg

SEQ ID NO: 958691 - DNA, 25 bp, Homo sapien
tctgggtatggagcttttacaggag

SEQ ID NO: 958692 - DNA, 25 bp, Homo sapien
ctctgggtatggagcttttacagga

SEQ ID NO: 958693 - DNA, 25 bp, Homo sapien
gaagaaaagcgcgatgcgcctccct

SEQ ID NO: 958694 - DNA, 25 bp, Homo sapien
gtctactcggaccttgctattattt

SEQ ID NO: 958695 - DNA, 25 bp, Homo sapien
acttctgtctactcggaccttgcta

SEQ ID NO: 958696 - DNA, 25 bp, Homo sapien
agactgaagaaaagcgcgatgcgcc

SEQ ID NO: 958697 - DNA, 25 bp, Homo sapien
ggttctgctggggaaccaccgcgcc

SEQ ID NO: 958698 - DNA, 25 bp, Homo sapien
accgcgcctgcagttcgtgcacctc

SEQ ID NO: 958699 - DNA, 25 bp, Homo sapien
cgatgcagagtggttctgctgggga

SEQ ID NO: 958700 - DNA, 25 bp, Homo sapien
ggaaccaccgcgcctgcagttcgtg

SEQ ID NO: 958701 - DNA, 25 bp, Homo sapien
gcgccagggaattacagacgaactg

SEQ ID NO: 958702 - DNA, 25 bp, Homo sapien
cagatttgggatcctccccggggag

SEQ ID NO: 958703 - DNA, 25 bp, Homo sapien
aggccccgcagggccgcttagacgg

SEQ ID NO: 958704 - DNA, 25 bp, Homo sapien
aagccttttcgctttttcagatttg

SEQ ID NO: 958705 - DNA, 25 bp, Homo sapien
ggcgggaagattgcagcggctttgg

SEQ ID NO: 958706 - DNA, 25 bp, Homo sapien
gggcgggaagattgcagcggctttg

SEQ ID NO: 958707 - DNA, 25 bp, Homo sapien
tggggcgggaagattgcagcggctt

SEQ ID NO: 958708 - DNA, 25 bp, Homo sapien
cgggaagattgcagcggctttgggc

SEQ ID NO: 958709 - DNA, 25 bp, Homo sapien
gactagcggacctcctggtcgtcat

SEQ ID NO: 958710 - DNA, 25 bp, Homo sapien
cgagccgttgactagcggacctcct

SEQ ID NO: 958711 - DNA, 25 bp, Homo sapien
gagccgttgactagcggacctcctg

SEQ ID NO: 958712 - DNA, 25 bp, Homo sapien
ctagcggacctcctggtcgtcatgg

SEQ ID NO: 958713 - DNA, 25 bp, Homo sapien
ccccgagcgtgcagcttccggtgag

SEQ ID NO: 958714 - DNA, 25 bp, Homo sapien
ccgcgcttccccgagcgtgcagctt

SEQ ID NO: 958715 - DNA, 25 bp, Homo sapien
gcgcttccccgagcgtgcagcttcc

SEQ ID NO: 958716 - DNA, 25 bp, Homo sapien
cttccccgagcgtgcagcttccggt

SEQ ID NO: 958717 - DNA, 25 bp, Homo sapien
cagccccactggcgcagaacccatc

SEQ ID NO: 958718 - DNA, 25 bp, Homo sapien
ccagccccactggcgcagaacccat

SEQ ID NO: 958719 - DNA, 25 bp, Homo sapien
tcacgcgcttcattgggagtgcagc

SEQ ID NO: 958720 - DNA, 25 bp, Homo sapien
acgcgcttcattgggagtgcagccc

SEQ ID NO: 958721 - DNA, 25 bp, Homo sapien
cttcacgcgcttcattgggagtgca

SEQ ID NO: 958722 - DNA, 25 bp, Homo sapien
cgcttcattgggagtgcagccccca

SEQ ID NO: 958723 - DNA, 25 bp, Homo sapien
cgggccataaccttgctggcgacta

SEQ ID NO: 958724 - DNA, 25 bp, Homo sapien
cataaccttgctggcgactaagtct

SEQ ID NO: 958725 - DNA, 25 bp, Homo sapien
tgcaccgcttcgggccataaccttg

SEQ ID NO: 958726 - DNA, 25 bp, Homo sapien
gcttcgggccataaccttgctggcg

SEQ ID NO: 958727 - DNA, 25 bp, Homo sapien
tgctccgggcattaggaacgtctct

SEQ ID NO: 958728 - DNA, 25 bp, Homo sapien
gtgtgtcagggaagccaacggaacc

SEQ ID NO: 958729 - DNA, 25 bp, Homo sapien
tctgctctcctacgatcgctgaggt

SEQ ID NO: 958730 - DNA, 25 bp, Homo sapien
tgaggtatcggacagtcagtgcccg

SEQ ID NO: 958731 - DNA, 25 bp, Homo sapien
aggccaaagcggctggcacagatgc

SEQ ID NO: 958732 - DNA, 25 bp, Homo sapien
tgctggagcccacaccgcttcactt

SEQ ID NO: 958733 - DNA, 25 bp, Homo sapien
ttccatgtcctctgtcacgggccac

SEQ ID NO: 958734 - DNA, 25 bp, Homo sapien
ctgtcacgggccacatgctggagcc

SEQ ID NO: 958735 - DNA, 25 bp, Homo sapien
ttcaagaacctctcatgccacgctt

SEQ ID NO: 958736 - DNA, 25 bp, Homo sapien
gggaatcacgagtctattctccatc

SEQ ID NO: 958737 - DNA, 25 bp, Homo sapien
tgtgtacattcgtgtaactagcagc

SEQ ID NO: 958738 - DNA, 25 bp, Homo sapien
cacagttgaaatagagaatggtccc

SEQ ID NO: 958739 - DNA, 25 bp, Homo sapien
catgccacagcttatcaaaatactg

SEQ ID NO: 958740 - DNA, 25 bp, Homo sapien
gacggacaattttgggaccaactga

SEQ ID NO: 958741 - DNA, 25 bp, Homo sapien
caaaatactgcacttggacggacaa

SEQ ID NO: 958742 - DNA, 25 bp, Homo sapien
gaacgtgagcgtggagtaatcctta

SEQ ID NO: 958743 - DNA, 25 bp, Homo sapien
ccaaacatgcaggtgacttcagaag

SEQ ID NO: 958744 - DNA, 25 bp, Homo sapien
tagtagaacgtgcaagaaaagggca

SEQ ID NO: 958745 - DNA, 25 bp, Homo sapien
tatttcttgagaaccaacttcgtcc

SEQ ID NO: 958746 - DNA, 25 bp, Homo sapien
gagaagcacatagggagccataaga

SEQ ID NO: 958747 - DNA, 25 bp, Homo sapien
caaagcgaagtgttctttcgtgttg

SEQ ID NO: 958748 - DNA, 25 bp, Homo sapien
tagagcaaagcgaagtgttctttcg

SEQ ID NO: 958749 - DNA, 25 bp, Homo sapien
gcgaagtgttctttcgtgttgtaaa

SEQ ID NO: 958750 - DNA, 25 bp, Homo sapien
taatattagagcaaagcgaagtgtt

SEQ ID NO: 958751 - DNA, 25 bp, Homo sapien
tggctcttgcagacttgggcttaag

SEQ ID NO: 958752 - DNA, 25 bp, Homo sapien
tttgaaactgccttggaaatgggac

SEQ ID NO: 958753 - DNA, 25 bp, Homo sapien
tgtacatggcaggaagtgcactctg

SEQ ID NO: 958754 - DNA, 25 bp, Homo sapien
gagacttgttagatgggtcctcaac

SEQ ID NO: 958755 - DNA, 25 bp, Homo sapien
aataaagtttatctgtgtatccagc

SEQ ID NO: 958756 - DNA, 25 bp, Homo sapien
gattcaactgattgtcttgccttag

SEQ ID NO: 958757 - DNA, 25 bp, Homo sapien
ccctgttcctgagttctgatagcag

SEQ ID NO: 958758 - DNA, 25 bp, Homo sapien
cctgagttctgatagcagagcatgg

SEQ ID NO: 958759 - DNA, 25 bp, Homo sapien
cattggtctgttgatgaaaactgtc

SEQ ID NO: 958760 - DNA, 25 bp, Homo sapien
gctctacaaaatgagaaagctgtgc

SEQ ID NO: 958761 - DNA, 25 bp, Homo sapien
gctttgcaacaccaaggaaataggt

SEQ ID NO: 958762 - DNA, 25 bp, Homo sapien
cattttttgctagtttggatcccag

SEQ ID NO: 958763 - DNA, 25 bp, Homo sapien
ggatgacaagatgcctttggcgcac

SEQ ID NO: 958764 - DNA, 25 bp, Homo sapien
gaagctgttggttgggcacatccag

SEQ ID NO: 958765 - DNA, 25 bp, Homo sapien
tgtctcatggttgcaaacacgctga

SEQ ID NO: 958766 - DNA, 25 bp, Homo sapien
gctgattggcaactgggatcgctct

SEQ ID NO: 958767 - DNA, 25 bp, Homo sapien
tgaggttgcacgagccagaaatctt

SEQ ID NO: 958768 - DNA, 25 bp, Homo sapien
ggcatcatcattcttaggtcattaa

SEQ ID NO: 958769 - DNA, 25 bp, Homo sapien
tacaagtgtcacagaaagtgaggtt

SEQ ID NO: 958770 - DNA, 25 bp, Homo sapien
ccacgttttttaggatgcgactctg

SEQ ID NO: 958771 - DNA, 25 bp, Homo sapien
catttggaaatttgaattaaatact

SEQ ID NO: 958772 - DNA, 25 bp, Homo sapien
tgagaaattatgttggaagcagcat

SEQ ID NO: 958773 - DNA, 25 bp, Homo sapien
ggttgttttgtattaatggtcagtc

SEQ ID NO: 958774 - DNA, 25 bp, Homo sapien
aatactgtatcatactttcaaagga

SEQ ID NO: 958775 - DNA, 25 bp, Homo sapien
aaaaatgcacacacaacaaagattg

SEQ ID NO: 958776 - DNA, 25 bp, Homo sapien
tataaaaatgcacacacaacaaaga

SEQ ID NO: 958777 - DNA, 25 bp, Homo sapien
ttcagttttattataaaaatgcaca

SEQ ID NO: 958778 - DNA, 25 bp, Homo sapien
tttcagttttattataaaaatgcac

SEQ ID NO: 958779 - DNA, 25 bp, Homo sapien
cattcagcacttgttcttgagcagc

SEQ ID NO: 958780 - DNA, 25 bp, Homo sapien
ggctctacttgcattcagcacttgt

SEQ ID NO: 958781 - DNA, 25 bp, Homo sapien
ttgcttttaccatctcgacaagttc

SEQ ID NO: 958782 - DNA, 25 bp, Homo sapien
tcttggctctacttgcattcagcac

SEQ ID NO: 958783 - DNA, 25 bp, Homo sapien
ttgaccccataactactggttttga

SEQ ID NO: 958784 - DNA, 25 bp, Homo sapien
tcaagcaactaagatagatagtact

SEQ ID NO: 958785 - DNA, 25 bp, Homo sapien
taatctagtgtttggtgtaaagaat

SEQ ID NO: 958786 - DNA, 25 bp, Homo sapien
atctataaacgcttaagtctgcaac

SEQ ID NO: 958787 - DNA, 25 bp, Homo sapien
ccatctttcaggtgtatttactggg

SEQ ID NO: 958788 - DNA, 25 bp, Homo sapien
cttgtatcgtttcatgcagtccttc

SEQ ID NO: 958789 - DNA, 25 bp, Homo sapien
gccaggcaccgcttctgctattttt

SEQ ID NO: 958790 - DNA, 25 bp, Homo sapien
ttcatgcagtccttctttgtcctgc

SEQ ID NO: 958791 - DNA, 25 bp, Homo sapien
gtccaaggggtgaagtctgtatatg

SEQ ID NO: 958792 - DNA, 25 bp, Homo sapien
gttgtccaaggggtgaagtctgtat

SEQ ID NO: 958793 - DNA, 25 bp, Homo sapien
ctgttgtccaaggggtgaagtctgt

SEQ ID NO: 958794 - DNA, 25 bp, Homo sapien
caaggggtgaagtctgtatatggac

SEQ ID NO: 958795 - DNA, 25 bp, Homo sapien
gagatacatatagccctctgagtgt

SEQ ID NO: 958796 - DNA, 25 bp, Homo sapien
aacttttgctggatagaaaccctgg

SEQ ID NO: 958797 - DNA, 25 bp, Homo sapien
aaatttcagatagctcacatcccag

SEQ ID NO: 958798 - DNA, 25 bp, Homo sapien
tgtggtccacaagtattcgctaagt

SEQ ID NO: 958799 - DNA, 25 bp, Homo sapien
gaggcaaaggagtcatacccacata

SEQ ID NO: 958800 - DNA, 25 bp, Homo sapien
atacccacatagcactactgccagt

SEQ ID NO: 958801 - DNA, 25 bp, Homo sapien
aaaggagtcatacccacatagcact

SEQ ID NO: 958802 - DNA, 25 bp, Homo sapien
agtcactcttgccttcacagggtca

SEQ ID NO: 958803 - DNA, 25 bp, Homo sapien
gaaagaatccctgtatactctgcct

SEQ ID NO: 958804 - DNA, 25 bp, Homo sapien
taatggcatctgaaatggaacaact

SEQ ID NO: 958805 - DNA, 25 bp, Homo sapien
cagacatactttgaaccataagtta

SEQ ID NO: 958806 - DNA, 25 bp, Homo sapien
gcaattatcccgatataacactatt

SEQ ID NO: 958807 - DNA, 25 bp, Homo sapien
cgttgcgttgtctgcttgaggtacc

SEQ ID NO: 958808 - DNA, 25 bp, Homo sapien
tcaaatcgttctgaaggcgttgcgt

SEQ ID NO: 958809 - DNA, 25 bp, Homo sapien
tgtctgcttgaggtaccactccatg

SEQ ID NO: 958810 - DNA, 25 bp, Homo sapien
ggtaccactccatgttcttttttga

SEQ ID NO: 958811 - DNA, 25 bp, Homo sapien
aacaaatggacttctcaaaactcac

SEQ ID NO: 958812 - DNA, 25 bp, Homo sapien
aaatttaatacttaacagatcatca

SEQ ID NO: 958813 - DNA, 25 bp, Homo sapien
ctttcattaaattgcataagttatt

SEQ ID NO: 958814 - DNA, 25 bp, Homo sapien
gtaacaaatggacttctcaaaactc

SEQ ID NO: 958815 - DNA, 25 bp, Homo sapien
tatgttcatgtaattagcaataact

SEQ ID NO: 958816 - DNA, 25 bp, Homo sapien
tgccaataacatctttggcagttct

SEQ ID NO: 958817 - DNA, 25 bp, Homo sapien
tcatgtaattagcaataacttccca

SEQ ID NO: 958818 - DNA, 25 bp, Homo sapien
catctttggcagttcttttgactcc

SEQ ID NO: 958819 - DNA, 25 bp, Homo sapien
aacagcctcggtttcatctatagaa

SEQ ID NO: 958820 - DNA, 25 bp, Homo sapien
cagaatgagctcagattggtggtct

SEQ ID NO: 958821 - DNA, 25 bp, Homo sapien
gctggatctctagggctttcttgca

SEQ ID NO: 958822 - DNA, 25 bp, Homo sapien
tctatagaattagggacgctggatc

SEQ ID NO: 958823 - DNA, 25 bp, Homo sapien
cttgaatttgttccagcagggaaca

SEQ ID NO: 958824 - DNA, 25 bp, Homo sapien
gaacagattcacagctttaattagt

SEQ ID NO: 958825 - DNA, 25 bp, Homo sapien
tagtaattgtagatcatcttctgac

SEQ ID NO: 958826 - DNA, 25 bp, Homo sapien
tgcttgtcgcatacgagcctcagct

SEQ ID NO: 958827 - DNA, 25 bp, Homo sapien
catgtgacttccattagccttggac

SEQ ID NO: 958828 - DNA, 25 bp, Homo sapien
tcctggctagggctttgtggtcctc

SEQ ID NO: 958829 - DNA, 25 bp, Homo sapien
tgcacaaatatcataagtcagggac

SEQ ID NO: 958830 - DNA, 25 bp, Homo sapien
tgagttattcatccacaaggccatt

SEQ ID NO: 958831 - DNA, 25 bp, Homo sapien
gagccaccacgctcatagtgcagat

SEQ ID NO: 958832 - DNA, 25 bp, Homo sapien
ggtgaaggcatagcaaaatggcctc

SEQ ID NO: 958833 - DNA, 25 bp, Homo sapien
ccacaaacgtcagattagtagtaca

SEQ ID NO: 958834 - DNA, 25 bp, Homo sapien
gaaccagtaaagtcccaataatgct

SEQ ID NO: 958835 - DNA, 25 bp, Homo sapien
ttccctggtcactaaaacttgtggc

SEQ ID NO: 958836 - DNA, 25 bp, Homo sapien
tctccaaaagaacctaggcatagtg

SEQ ID NO: 958837 - DNA, 25 bp, Homo sapien
ggtgcaacagcattaggcatttctc

SEQ ID NO: 958838 - DNA, 25 bp, Homo sapien
cagcatgtcctttgtggtgcaacag

SEQ ID NO: 958839 - DNA, 25 bp, Homo sapien
gtgcatgatgtgagtgtttcattca

SEQ ID NO: 958840 - DNA, 25 bp, Homo sapien
ttttgtgcatgatgtgagtgtttca

SEQ ID NO: 958841 - DNA, 25 bp, Homo sapien
tttgtgcatgatgtgagtgtttcat

SEQ ID NO: 958842 - DNA, 25 bp, Homo sapien
tgtgcatgatgtgagtgtttcattc

SEQ ID NO: 958843 - DNA, 25 bp, Homo sapien
aagacttcaatagcagttccatagg

SEQ ID NO: 958844 - DNA, 25 bp, Homo sapien
taagctcaagtgaagacttcaatag

SEQ ID NO: 958845 - DNA, 25 bp, Homo sapien
ttcaatagcagttccataggtatac

SEQ ID NO: 958846 - DNA, 25 bp, Homo sapien
cctaagctcaagtgaagacttcaat

SEQ ID NO: 958847 - DNA, 25 bp, Homo sapien
cagttcaagccgatcacaaagtttt

SEQ ID NO: 958848 - DNA, 25 bp, Homo sapien
tcttccatcattttaacccgctctg

SEQ ID NO: 958849 - DNA, 25 bp, Homo sapien
cttgccagttcaagccgatcacaaa

SEQ ID NO: 958850 - DNA, 25 bp, Homo sapien
ttaacccgctctgcctcattatcag

SEQ ID NO: 958851 - DNA, 25 bp, Homo sapien
aatacatttatgcttggccaggtgc

SEQ ID NO: 958852 - DNA, 25 bp, Homo sapien
atacatttatgcttggccaggtgca

SEQ ID NO: 958853 - DNA, 25 bp, Homo sapien
tgcatgagtttcgaagtttttgcct

SEQ ID NO: 958854 - DNA, 25 bp, Homo sapien
ctttctccttagctaaccgagcagc

SEQ ID NO: 958855 - DNA, 25 bp, Homo sapien
tagctaaccgagcagcttctaattc

SEQ ID NO: 958856 - DNA, 25 bp, Homo sapien
cttgcatgagtttcgaagtttttgc

SEQ ID NO: 958857 - DNA, 25 bp, Homo sapien
ccttggatcacagctgtatgcattg

SEQ ID NO: 958858 - DNA, 25 bp, Homo sapien
ttcttgctccttccgtttagcttct

SEQ ID NO: 958859 - DNA, 25 bp, Homo sapien
cttggatcacagctgtatgcattgt

SEQ ID NO: 958860 - DNA, 25 bp, Homo sapien
ccttccgtttagcttctgcttttgc

SEQ ID NO: 958861 - DNA, 25 bp, Homo sapien
tctaacatttaggggacttaaatca

SEQ ID NO: 958862 - DNA, 25 bp, Homo sapien
cttgttgctctgttctgcttttcaa

SEQ ID NO: 958863 - DNA, 25 bp, Homo sapien
tgttcttattctgttcatttcttct

SEQ ID NO: 958864 - DNA, 25 bp, Homo sapien
ttcaatccatctcctctcatcacga

SEQ ID NO: 958865 - DNA, 25 bp, Homo sapien
tctttgtgctcttgttgctctgttc

SEQ ID NO: 958866 - DNA, 25 bp, Homo sapien
gcctaaacagtggttctatttaata

SEQ ID NO: 958867 - DNA, 25 bp, Homo sapien
cagcacgcccggcctaaacagtggt

SEQ ID NO: 958868 - DNA, 25 bp, Homo sapien
cgcccggcctaaacagtggttctat

SEQ ID NO: 958869 - DNA, 25 bp, Homo sapien
cacgcccggcctaaacagtggttct

SEQ ID NO: 958870 - DNA, 25 bp, Homo sapien
taaataagaaaattctctccaagaa

SEQ ID NO: 958871 - DNA, 25 bp, Homo sapien
tctaaataagaaaattctctccaag

SEQ ID NO: 958872 - DNA, 25 bp, Homo sapien
ctaaataagaaaattctctccaaga

SEQ ID NO: 958873 - DNA, 25 bp, Homo sapien
ttccttcccttctagtattgaacta

SEQ ID NO: 958874 - DNA, 25 bp, Homo sapien
tatcactccataatcaaaaccacac

SEQ ID NO: 958875 - DNA, 25 bp, Homo sapien
tgaactaaggtcaagtctttctcct

SEQ ID NO: 958876 - DNA, 25 bp, Homo sapien
acatatcactccataatcaaaacca

SEQ ID NO: 958877 - DNA, 25 bp, Homo sapien
cagtgaaggttctgcaatttgtcca

SEQ ID NO: 958878 - DNA, 25 bp, Homo sapien
ttagtgaattagttacagagacaaa

SEQ ID NO: 958879 - DNA, 25 bp, Homo sapien
tcacataggtaacagagtgcttttg

SEQ ID NO: 958880 - DNA, 25 bp, Homo sapien
gccactaactattgcgcatattaaa

SEQ ID NO: 958881 - DNA, 25 bp, Homo sapien
tatatctacatcttcaaatgatgaa

SEQ ID NO: 958882 - DNA, 25 bp, Homo sapien
aaatatatctacatcttcaaatgat

SEQ ID NO: 958883 - DNA, 25 bp, Homo sapien
caaatgatgaattcatatcaccaag

SEQ ID NO: 958884 - DNA, 25 bp, Homo sapien
catatcaccaagtttaggaacattt

SEQ ID NO: 958885 - DNA, 25 bp, Homo sapien
ctgggagccttaaaaatccccacag

SEQ ID NO: 958886 - DNA, 25 bp, Homo sapien
tgggagccttaaaaatccccacaga

SEQ ID NO: 958887 - DNA, 25 bp, Homo sapien
taaacaagccaacagggcactatga

SEQ ID NO: 958888 - DNA, 25 bp, Homo sapien
gaaagagcagaaacctggaagacta

SEQ ID NO: 958889 - DNA, 25 bp, Homo sapien
cactatgatcaaaagggatgcctta

SEQ ID NO: 958890 - DNA, 25 bp, Homo sapien
cagaagggctgaatattgcagagaa

SEQ ID NO: 958891 - DNA, 25 bp, Homo sapien
ttatcaaaagtaggatctacactgt

SEQ ID NO: 958892 - DNA, 25 bp, Homo sapien
tatcaaaagtaggatctacactgtt

SEQ ID NO: 958893 - DNA, 25 bp, Homo sapien
gagttatcaaaagtaggatctacac

SEQ ID NO: 958894 - DNA, 25 bp, Homo sapien
gttatcaaaagtaggatctacactg

SEQ ID NO: 958895 - DNA, 25 bp, Homo sapien
actggatcagataacatttcataag

SEQ ID NO: 958896 - DNA, 25 bp, Homo sapien
tcactggatcagataacatttcata

SEQ ID NO: 958897 - DNA, 25 bp, Homo sapien
cactggatcagataacatttcataa

SEQ ID NO: 958898 - DNA, 25 bp, Homo sapien
gatcacatcaccataactttaccta

SEQ ID NO: 958899 - DNA, 25 bp, Homo sapien
aattgttaagatcacatcaccataa

SEQ ID NO: 958900 - DNA, 25 bp, Homo sapien
aaaaattgttaagatcacatcacca

SEQ ID NO: 958901 - DNA, 25 bp, Homo sapien
tgttaagatcacatcaccataactt

SEQ ID NO: 958902 - DNA, 25 bp, Homo sapien
atgaattaactgtaggatgagcttc

SEQ ID NO: 958903 - DNA, 25 bp, Homo sapien
gaattaactgtaggatgagcttctg

SEQ ID NO: 958904 - DNA, 25 bp, Homo sapien
aattaactgtaggatgagcttctga

SEQ ID NO: 958905 - DNA, 25 bp, Homo sapien
tgaattaactgtaggatgagcttct

SEQ ID NO: 958906 - DNA, 25 bp, Homo sapien
tcaccagctgctttccgtttgtctg

SEQ ID NO: 958907 - DNA, 25 bp, Homo sapien
gctgctttccgtttgtctgggtgat

SEQ ID NO: 958908 - DNA, 25 bp, Homo sapien
gctttccgtttgtctgggtgatgtt

SEQ ID NO: 958909 - DNA, 25 bp, Homo sapien
cagctgctttccgtttgtctgggtg

SEQ ID NO: 958910 - DNA, 25 bp, Homo sapien
ctacaaaaccagtcagattgagata

SEQ ID NO: 958911 - DNA, 25 bp, Homo sapien
caaaaccagtcagattgagataatt

SEQ ID NO: 958912 - DNA, 25 bp, Homo sapien
ccagtcagattgagataatttgtca

SEQ ID NO: 958913 - DNA, 25 bp, Homo sapien
aaaccagtcagattgagataatttg

SEQ ID NO: 958914 - DNA, 25 bp, Homo sapien
cagaggagacgttatgtagccacta

SEQ ID NO: 958915 - DNA, 25 bp, Homo sapien
ggccaagtcggctctagtccagaca

SEQ ID NO: 958916 - DNA, 25 bp, Homo sapien
tgactcctcagcctgcgtctgtatg

SEQ ID NO: 958917 - DNA, 25 bp, Homo sapien
tgtgattatcgctggtggtcaacaa

SEQ ID NO: 958918 - DNA, 25 bp, Homo sapien
cgttttgagtatcctgtatctgaaa

SEQ ID NO: 958919 - DNA, 25 bp, Homo sapien
gccaccatgattagctctttctgta

SEQ ID NO: 958920 - DNA, 25 bp, Homo sapien
tttctgtatttcactacgttttgag

SEQ ID NO: 958921 - DNA, 25 bp, Homo sapien
tacttactgggtgagcatccattcc

SEQ ID NO: 958922 - DNA, 25 bp, Homo sapien
taaaaaggcagtatccactaagtgc

SEQ ID NO: 958923 - DNA, 25 bp, Homo sapien
tatggctgcagactatgatactgta

SEQ ID NO: 958924 - DNA, 25 bp, Homo sapien
ttaaaaagcatagccagcctgttcc

SEQ ID NO: 958925 - DNA, 25 bp, Homo sapien
tgtccacaggattgcaaagcatagg

SEQ ID NO: 958926 - DNA, 25 bp, Homo sapien
ctttgatctgtctctgtgtagcctt

SEQ ID NO: 958927 - DNA, 25 bp, Homo sapien
gccaagtccaagaactgcataatga

SEQ ID NO: 958928 - DNA, 25 bp, Homo sapien
caagaactgcataatgatcttggtt

SEQ ID NO: 958929 - DNA, 25 bp, Homo sapien
gtgtagccttgtatctcacatggcc

SEQ ID NO: 958930 - DNA, 25 bp, Homo sapien
caagtgttttcagcatgggaaactc

SEQ ID NO: 958931 - DNA, 25 bp, Homo sapien
cccacaggttcaacttgacagagtg

SEQ ID NO: 958932 - DNA, 25 bp, Homo sapien
ttcatcttctgattcctcggataac

SEQ ID NO: 958933 - DNA, 25 bp, Homo sapien
tctgattcctcggataactctttct

SEQ ID NO: 958934 - DNA, 25 bp, Homo sapien
ccgtccgcggcgcttggcagaagca

SEQ ID NO: 958935 - DNA, 25 bp, Homo sapien
gagcgtgggtgatggcggtgccccg

SEQ ID NO: 958936 - DNA, 25 bp, Homo sapien
gtgccccggccgtccgcggcgcttg

SEQ ID NO: 958937 - DNA, 25 bp, Homo sapien
aggtcagagcgtgggtgatggcggt

SEQ ID NO: 958938 - DNA, 25 bp, Homo sapien
ttggctctaagacgcccaggaaccg

SEQ ID NO: 958939 - DNA, 25 bp, Homo sapien
cacttccgggatggatctttcgtgg

SEQ ID NO: 958940 - DNA, 25 bp, Homo sapien
ggagacgaccagtaagcacttccgg

SEQ ID NO: 958941 - DNA, 25 bp, Homo sapien
tggtgtggaggccagtctcacaccc

SEQ ID NO: 958942 - DNA, 25 bp, Homo sapien
gctggcattcaaaccctgtccacct

SEQ ID NO: 958943 - DNA, 25 bp, Homo sapien
ggcattcaaaccctgtccacctggc

SEQ ID NO: 958944 - DNA, 25 bp, Homo sapien
actgcttggattacacggcatttcc

SEQ ID NO: 958945 - DNA, 25 bp, Homo sapien
ctgcttggattacacggcatttccc

SEQ ID NO: 958946 - DNA, 25 bp, Homo sapien
gaggcaatattaaagtgctgatggc

SEQ ID NO: 958947 - DNA, 25 bp, Homo sapien
acaatgttggaactgatcaatcagc

SEQ ID NO: 958948 - DNA, 25 bp, Homo sapien
gctgatggccactaacagacctgat

SEQ ID NO: 958949 - DNA, 25 bp, Homo sapien
gatggttttgatcctagaggcaata

SEQ ID NO: 958950 - DNA, 25 bp, Homo sapien
gatttgaactgttagcacgactgtg

SEQ ID NO: 958951 - DNA, 25 bp, Homo sapien
caatgagtgttgaaagagatatcag

SEQ ID NO: 958952 - DNA, 25 bp, Homo sapien
aagattcacgctcgttcaatgagtg

SEQ ID NO: 958953 - DNA, 25 bp, Homo sapien
cccacatatttaagattcacgctcg

SEQ ID NO: 958954 - DNA, 25 bp, Homo sapien
gacatacaactgaaccctgaaggct

SEQ ID NO: 958955 - DNA, 25 bp, Homo sapien
tcagagcacggcgaaaaattgctac

SEQ ID NO: 958956 - DNA, 25 bp, Homo sapien
agaaggatttcttggaagctgtaaa

SEQ ID NO: 958957 - DNA, 25 bp, Homo sapien
cagtgctactcctcgttacatgaca

SEQ ID NO: 958958 - DNA, 25 bp, Homo sapien
gatttcacatcatacaaagcgcttg

SEQ ID NO: 958959 - DNA, 25 bp, Homo sapien
cacttaggcgtatgaccacatgcat

SEQ ID NO: 958960 - DNA, 25 bp, Homo sapien
ttctgtcccgcaacaaagtagctca

SEQ ID NO: 958961 - DNA, 25 bp, Homo sapien
gctggccgggtgctctacatataaa

SEQ ID NO: 958962 - DNA, 25 bp, Homo sapien
aaaatgctgctttgcactgaaatac

SEQ ID NO: 958963 - DNA, 25 bp, Homo sapien
ttttcttgaggaattaaatagagca

SEQ ID NO: 958964 - DNA, 25 bp, Homo sapien
gaagttcgatattcataaataagtt

SEQ ID NO: 958965 - DNA, 25 bp, Homo sapien
tttttattgaagttcgatattcata

SEQ ID NO: 958966 - DNA, 25 bp, Homo sapien
cagggtggaaaaacatagaagatac

SEQ ID NO: 958967 - DNA, 25 bp, Homo sapien
gcccattttgataggacaatatgaa

SEQ ID NO: 958968 - DNA, 25 bp, Homo sapien
gaagatacagtagcagctattaagg

SEQ ID NO: 958969 - DNA, 25 bp, Homo sapien
gattatgtagattatgcccattttg

SEQ ID NO: 958970 - DNA, 25 bp, Homo sapien
ttgacattccatgtttctgtggaat

SEQ ID NO: 958971 - DNA, 25 bp, Homo sapien
tgagtaagatgagcattatgcttac

SEQ ID NO: 958972 - DNA, 25 bp, Homo sapien
taatgaactgatagctgttatgaac

SEQ ID NO: 958973 - DNA, 25 bp, Homo sapien
tcctaggctgaacactgagtttgat

SEQ ID NO: 958974 - DNA, 25 bp, Homo sapien
tacatcttgctaggcgtcattcacc

SEQ ID NO: 958975 - DNA, 25 bp, Homo sapien
atgcaggcaacaggccaatttatct

SEQ ID NO: 958976 - DNA, 25 bp, Homo sapien
ggactactagtattcacccttagaa

SEQ ID NO: 958977 - DNA, 25 bp, Homo sapien
gaacttcatgagaggcttataaccc

SEQ ID NO: 958978 - DNA, 25 bp, Homo sapien
aggagtggcattgggctccaagtcc

SEQ ID NO: 958979 - DNA, 25 bp, Homo sapien
ccatagggcaggattttcaaaaaat

SEQ ID NO: 958980 - DNA, 25 bp, Homo sapien
gctcccatagggcaggattttcaaa

SEQ ID NO: 958981 - DNA, 25 bp, Homo sapien
tggcaggagtggcattgggctccaa

SEQ ID NO: 958982 - DNA, 25 bp, Homo sapien
aatgatggcttattggctcctttcc

SEQ ID NO: 958983 - DNA, 25 bp, Homo sapien
ttcaggagggttgtcacaagtaact

SEQ ID NO: 958984 - DNA, 25 bp, Homo sapien
taaaattaaggacatttccaagtgc

SEQ ID NO: 958985 - DNA, 25 bp, Homo sapien
tgtaatatgaatgcctccatgtggc

SEQ ID NO: 958986 - DNA, 25 bp, Homo sapien
aagtatacatatataccgacgtctc

SEQ ID NO: 958987 - DNA, 25 bp, Homo sapien
tatataccgacgtctccatattctt

SEQ ID NO: 958988 - DNA, 25 bp, Homo sapien
actgcatcctgctaagtatacatat

SEQ ID NO: 958989 - DNA, 25 bp, Homo sapien
tgcatcctgctaagtatacatatat

SEQ ID NO: 958990 - DNA, 25 bp, Homo sapien
cacttgagctactttgcttcaataa

SEQ ID NO: 958991 - DNA, 25 bp, Homo sapien
gaagacactctaattcattcacttg

SEQ ID NO: 958992 - DNA, 25 bp, Homo sapien
ttaccaatgtttttcgtgatagaag

SEQ ID NO: 958993 - DNA, 25 bp, Homo sapien
tcgtgatagaagacactctaattca

SEQ ID NO: 958994 - DNA, 25 bp, Homo sapien
atgactcgttcaagaggatgcttac

SEQ ID NO: 958995 - DNA, 25 bp, Homo sapien
ttatgctgatagtacgacaccaggc

SEQ ID NO: 958996 - DNA, 25 bp, Homo sapien
caggcatagaggtattaaatgactc

SEQ ID NO: 958997 - DNA, 25 bp, Homo sapien
gatagtacgacaccaggcatagagg

SEQ ID NO: 958998 - DNA, 25 bp, Homo sapien
ccaaaatgacagtgtggacgttatc

SEQ ID NO: 958999 - DNA, 25 bp, Homo sapien
ttcaggcttggtagcatcctctcca

SEQ ID NO: 959000 - DNA, 25 bp, Homo sapien
aaaattgacttgagtgaaatccaaa

SEQ ID NO: 959001 - DNA, 25 bp, Homo sapien
gacagtgtggacgttatcccctggg

SEQ ID NO: 959002 - DNA, 25 bp, Homo sapien
gtacttccgcatggcctttctcctt

SEQ ID NO: 959003 - DNA, 25 bp, Homo sapien
tgcatttccgacttccttagcgtac

SEQ ID NO: 959004 - DNA, 25 bp, Homo sapien
tgctttgacaacagttgcgttggcc

SEQ ID NO: 959005 - DNA, 25 bp, Homo sapien
tctccttgctcccatgatgactgct

SEQ ID NO: 959006 - DNA, 25 bp, Homo sapien
ctatttgcatagtaaattggtgcat

SEQ ID NO: 959007 - DNA, 25 bp, Homo sapien
tacaagtcgctatttgcatagtaaa

SEQ ID NO: 959008 - DNA, 25 bp, Homo sapien
ctttcgttttaatgcattgctatac

SEQ ID NO: 959009 - DNA, 25 bp, Homo sapien
cattgctatacaagtcgctatttgc

SEQ ID NO: 959010 - DNA, 25 bp, Homo sapien
ctcctcatatgcgtctatatcaata

SEQ ID NO: 959011 - DNA, 25 bp, Homo sapien
gcgtctatatcaatatacacatcag

SEQ ID NO: 959012 - DNA, 25 bp, Homo sapien
cctcatatgcgtctatatcaatata

SEQ ID NO: 959013 - DNA, 25 bp, Homo sapien
catatgcgtctatatcaatatacac

SEQ ID NO: 959014 - DNA, 25 bp, Homo sapien
aaagtgccctttcaacacatcacag

SEQ ID NO: 959015 - DNA, 25 bp, Homo sapien
agcttacagaaggtgccgccaggac

SEQ ID NO: 959016 - DNA, 25 bp, Homo sapien
catgtgatttgcaaccataggcaaa

SEQ ID NO: 959017 - DNA, 25 bp, Homo sapien
caggacctgactaaagtccaggcta

SEQ ID NO: 959018 - DNA, 25 bp, Homo sapien
tcatgtcagtacttggtgccaaaac

SEQ ID NO: 959019 - DNA, 25 bp, Homo sapien
tgggctcagcttcctactagggaga

SEQ ID NO: 959020 - DNA, 25 bp, Homo sapien
catagcactagaccaggaatggcag

SEQ ID NO: 959021 - DNA, 25 bp, Homo sapien
gaatgcatacgataacttggtgtca

SEQ ID NO: 959022 - DNA, 25 bp, Homo sapien
ccatagtccaatcccaggaacaagg

SEQ ID NO: 959023 - DNA, 25 bp, Homo sapien
gcagagcaatgatcacagcagtgat

SEQ ID NO: 959024 - DNA, 25 bp, Homo sapien
agcagagcaatgatcacagcagtga

SEQ ID NO: 959025 - DNA, 25 bp, Homo sapien
gcagtgatcaaaccatagtccaatc

SEQ ID NO: 959026 - DNA, 25 bp, Homo sapien
ggttgacaatcacaatggccgacag

SEQ ID NO: 959027 - DNA, 25 bp, Homo sapien
gagatctgagaactgcataaacatt

SEQ ID NO: 959028 - DNA, 25 bp, Homo sapien
gaactgcataaacattcccttcagg

SEQ ID NO: 959029 - DNA, 25 bp, Homo sapien
aacattcccttcaggttgacaatca

SEQ ID NO: 959030 - DNA, 25 bp, Homo sapien
agagcacatcccccatgcctctcct

SEQ ID NO: 959031 - DNA, 25 bp, Homo sapien
gcctctcctcttgtgtccacagagt

SEQ ID NO: 959032 - DNA, 25 bp, Homo sapien
cctctcctcttgtgtccacagagtg

SEQ ID NO: 959033 - DNA, 25 bp, Homo sapien
tgcctctcctcttgtgtccacagag

SEQ ID NO: 959034 - DNA, 25 bp, Homo sapien
agaggaatccagttgctaatatgac

SEQ ID NO: 959035 - DNA, 25 bp, Homo sapien
gttgctaatatgaccagcagaatca

SEQ ID NO: 959036 - DNA, 25 bp, Homo sapien
gggcaatgattcaaagaggaatcca

SEQ ID NO: 959037 - DNA, 25 bp, Homo sapien
gattcaaagaggaatccagttgcta

SEQ ID NO: 959038 - DNA, 25 bp, Homo sapien
gagagaagacacatggaaggggctt

SEQ ID NO: 959039 - DNA, 25 bp, Homo sapien
gaagacacatggaaggggcttttag

SEQ ID NO: 959040 - DNA, 25 bp, Homo sapien
ctgaatgagagaagacacatggaag

SEQ ID NO: 959041 - DNA, 25 bp, Homo sapien
gagaagacacatggaaggggctttt

SEQ ID NO: 959042 - DNA, 25 bp, Homo sapien
cttcgagacaaggagcatgaaattg

SEQ ID NO: 959043 - DNA, 25 bp, Homo sapien
ctgaacaaggcttcgagacaaggag

SEQ ID NO: 959044 - DNA, 25 bp, Homo sapien
tccctcctgaacaaggcttcgagac

SEQ ID NO: 959045 - DNA, 25 bp, Homo sapien
caaggcttcgagacaaggagcatga

SEQ ID NO: 959046 - DNA, 25 bp, Homo sapien
caatggaattgcacagtcccagggc

SEQ ID NO: 959047 - DNA, 25 bp, Homo sapien
tgagccaatggaattgcacagtccc

SEQ ID NO: 959048 - DNA, 25 bp, Homo sapien
gaagagtgagccaatggaattgcac

SEQ ID NO: 959049 - DNA, 25 bp, Homo sapien
ctggaagagtgagccaatggaattg

SEQ ID NO: 959050 - DNA, 25 bp, Homo sapien
ctgattgccgtcaacctggtagcca

SEQ ID NO: 959051 - DNA, 25 bp, Homo sapien
caacctggtagccatgtttatttgc

SEQ ID NO: 959052 - DNA, 25 bp, Homo sapien
tgctaaggtcttggccatggagatg

SEQ ID NO: 959053 - DNA, 25 bp, Homo sapien
ccaacgatggctatggcaatggcat

SEQ ID NO: 959054 - DNA, 25 bp, Homo sapien
ctggtgtccggattggctggaggta

SEQ ID NO: 959055 - DNA, 25 bp, Homo sapien
gagataaaagtgtgactcctggaat

SEQ ID NO: 959056 - DNA, 25 bp, Homo sapien
atggagaacccagcttttgtggtac

SEQ ID NO: 959057 - DNA, 25 bp, Homo sapien
tcctggaatcccacaatggagaacc

SEQ ID NO: 959058 - DNA, 25 bp, Homo sapien
gtacatacttgtagtctgggatcct

SEQ ID NO: 959059 - DNA, 25 bp, Homo sapien
ggaagtgttccaacgacatccacat

SEQ ID NO: 959060 - DNA, 25 bp, Homo sapien
tagaggaagtgttccaacgacatcc

SEQ ID NO: 959061 - DNA, 25 bp, Homo sapien
aacccagctgaaatgccagttccca

SEQ ID NO: 959062 - DNA, 25 bp, Homo sapien
tatgattctttcaagttaaacccag

SEQ ID NO: 959063 - DNA, 25 bp, Homo sapien
aataggcgccggcaatttctcttta

SEQ ID NO: 959064 - DNA, 25 bp, Homo sapien
attaaactccttgccacccaacagc

SEQ ID NO: 959065 - DNA, 25 bp, Homo sapien
aagaactctaaaggaataggcgccg

SEQ ID NO: 959066 - DNA, 25 bp, Homo sapien
tctaaaggaataggcgccggcaatt

SEQ ID NO: 959067 - DNA, 25 bp, Homo sapien
acgttgaggtttttaacattctgca

SEQ ID NO: 959068 - DNA, 25 bp, Homo sapien
cacgttgaggtttttaacattctgc

SEQ ID NO: 959069 - DNA, 25 bp, Homo sapien
cgttgaggtttttaacattctgcaa

SEQ ID NO: 959070 - DNA, 25 bp, Homo sapien
cacacgttgaggtttttaacattct

SEQ ID NO: 959071 - DNA, 25 bp, Homo sapien
cagaacgtcaggtagtttcttactt

SEQ ID NO: 959072 - DNA, 25 bp, Homo sapien
tgcacagctgctgcggtggtaaacc

SEQ ID NO: 959073 - DNA, 25 bp, Homo sapien
tattttaacatggaggtgaagacat

SEQ ID NO: 959074 - DNA, 25 bp, Homo sapien
gattccactgtaccgctttgtttta

SEQ ID NO: 959075 - DNA, 25 bp, Homo sapien
caccacggaaaagattccactgtac

SEQ ID NO: 959076 - DNA, 25 bp, Homo sapien
gaagcttgcttgctcgtcactcata

SEQ ID NO: 959077 - DNA, 25 bp, Homo sapien
tgaatatggcatgcagttggtctgc

SEQ ID NO: 959078 - DNA, 25 bp, Homo sapien
gaccagccaagagcactcagtagat

SEQ ID NO: 959079 - DNA, 25 bp, Homo sapien
tgaccccatccaccgtgtagtaaga

SEQ ID NO: 959080 - DNA, 25 bp, Homo sapien
gattcctgaaagtaaggtcacagac

SEQ ID NO: 959081 - DNA, 25 bp, Homo sapien
gcctctgtgccattggttgcattta

SEQ ID NO: 959082 - DNA, 25 bp, Homo sapien
tatcatctggtactaatcgaacagc

SEQ ID NO: 959083 - DNA, 25 bp, Homo sapien
gacatggcgactttcactctcaagg

SEQ ID NO: 959084 - DNA, 25 bp, Homo sapien
gaaaacaatacatgataacagggta

SEQ ID NO: 959085 - DNA, 25 bp, Homo sapien
gagtacaggccaaatattggaggca

SEQ ID NO: 959086 - DNA, 25 bp, Homo sapien
gccaaatattggaggcacagctgcc

SEQ ID NO: 959087 - DNA, 25 bp, Homo sapien
tgtgtctggaggttccaagaaaaca

SEQ ID NO: 959088 - DNA, 25 bp, Homo sapien
aggaagctgaagcacccctgtgctt

SEQ ID NO: 959089 - DNA, 25 bp, Homo sapien
ggtaggaacatataaatgatatttc

SEQ ID NO: 959090 - DNA, 25 bp, Homo sapien
gccatttagttatgggtaggaacat

SEQ ID NO: 959091 - DNA, 25 bp, Homo sapien
gcacccctgtgcttatgcctgagac

SEQ ID NO: 959092 - DNA, 25 bp, Homo sapien
gcctgtttcagcttatccgcaatgg

SEQ ID NO: 959093 - DNA, 25 bp, Homo sapien
cacatagtacctctgggttgctgca

SEQ ID NO: 959094 - DNA, 25 bp, Homo sapien
ggatgactaaagataggcctttcca

SEQ ID NO: 959095 - DNA, 25 bp, Homo sapien
tctttcctggaggaccggatgacta

SEQ ID NO: 959096 - DNA, 25 bp, Homo sapien
tattccttaacagccggagacaagc

SEQ ID NO: 959097 - DNA, 25 bp, Homo sapien
ccttaacagccggagacaagcattt

SEQ ID NO: 959098 - DNA, 25 bp, Homo sapien
acagccggagacaagcatttcctga

SEQ ID NO: 959099 - DNA, 25 bp, Homo sapien
taacagccggagacaagcatttcct

SEQ ID NO: 959100 - DNA, 25 bp, Homo sapien
gctccaggcttatccagtgtttcaa

SEQ ID NO: 959101 - DNA, 25 bp, Homo sapien
gccctctgtgttgctagaagtgcca

SEQ ID NO: 959102 - DNA, 25 bp, Homo sapien
gatctgaatgagtcagcttcgccct

SEQ ID NO: 959103 - DNA, 25 bp, Homo sapien
aacttcatcattcaacactctaggg

SEQ ID NO: 959104 - DNA, 25 bp, Homo sapien
aatcagtaactggttgtataaatca

SEQ ID NO: 959105 - DNA, 25 bp, Homo sapien
tcagtaactggttgtataaatcagt

SEQ ID NO: 959106 - DNA, 25 bp, Homo sapien
agaaatcagtaactggttgtataaa

SEQ ID NO: 959107 - DNA, 25 bp, Homo sapien
aaatcagtaactggttgtataaatc

SEQ ID NO: 959108 - DNA, 25 bp, Homo sapien
gaaatcagtaactggttgtgatcaa

SEQ ID NO: 959109 - DNA, 25 bp, Homo sapien
gtaaacaccactggacttggaccag

SEQ ID NO: 959110 - DNA, 25 bp, Homo sapien
gaagcagtggaaatgaaggaacaaa

SEQ ID NO: 959111 - DNA, 25 bp, Homo sapien
caagtgaagcagtggaaatgaagga

SEQ ID NO: 959112 - DNA, 25 bp, Homo sapien
tgtgcagcacaaaagtcgggacagg

SEQ ID NO: 959113 - DNA, 25 bp, Homo sapien
caggggacaagatcccccgctggga

SEQ ID NO: 959114 - DNA, 25 bp, Homo sapien
agatccaatgtgcagcacaaaagtc

SEQ ID NO: 959115 - DNA, 25 bp, Homo sapien
caatgtgcagcacaaaagtcgggac

SEQ ID NO: 959116 - DNA, 25 bp, Homo sapien
ccaaactggaaacggcgaagggctg

SEQ ID NO: 959117 - DNA, 25 bp, Homo sapien
taggctctgagcagtcccttcgtga

SEQ ID NO: 959118 - DNA, 25 bp, Homo sapien
caaattttagggctgttaggctctg

SEQ ID NO: 959119 - DNA, 25 bp, Homo sapien
tcgtgaccggataagtcagagaccc

SEQ ID NO: 959120 - DNA, 25 bp, Homo sapien
ttagcaccgaagggattcgaggagg

SEQ ID NO: 959121 - DNA, 25 bp, Homo sapien
caccgaagggattcgaggaggcaaa

SEQ ID NO: 959122 - DNA, 25 bp, Homo sapien
tagcaccgaagggattcgaggaggc

SEQ ID NO: 959123 - DNA, 25 bp, Homo sapien
gattcgaggaggcaaacgggaagta

SEQ ID NO: 959124 - DNA, 25 bp, Homo sapien
caggggttgcaaaggaaagagcttc

SEQ ID NO: 959125 - DNA, 25 bp, Homo sapien
ggacaggggttgcaaaggaaagagc

SEQ ID NO: 959126 - DNA, 25 bp, Homo sapien
aggggttgcaaaggaaagagcttcg

SEQ ID NO: 959127 - DNA, 25 bp, Homo sapien
acaggggttgcaaaggaaagagctt

SEQ ID NO: 959128 - DNA, 25 bp, Homo sapien
tcagccctgtcaccggttcgtttag

SEQ ID NO: 959129 - DNA, 25 bp, Homo sapien
cttcccggcgtagggaccagcagag

SEQ ID NO: 959130 - DNA, 25 bp, Homo sapien
gtagggaccagcagagtgcgggcag

SEQ ID NO: 959131 - DNA, 25 bp, Homo sapien
cgtttagggaaaaagcgcgacatgg

SEQ ID NO: 959132 - DNA, 25 bp, Homo sapien
ttcgacgcgcgcgctgcctccaggt

SEQ ID NO: 959133 - DNA, 25 bp, Homo sapien
gccgctgcctcttcgacgcgcgcgc

SEQ ID NO: 959134 - DNA, 25 bp, Homo sapien
cacagccgctgcctcttcgacgcgc

SEQ ID NO: 959135 - DNA, 25 bp, Homo sapien
ctgcctcttcgacgcgcgcgctgcc

SEQ ID NO: 959136 - DNA, 25 bp, Homo sapien
gaatttaacaccttggtcgtcgatc

SEQ ID NO: 959137 - DNA, 25 bp, Homo sapien
caaagcgtgcttggaatttaacacc

SEQ ID NO: 959138 - DNA, 25 bp, Homo sapien
cgatccccgcaaatatactctgatg

SEQ ID NO: 959139 - DNA, 25 bp, Homo sapien
gaactttccaaagcgtgcttggaat

SEQ ID NO: 959140 - DNA, 25 bp, Homo sapien
tatgagagttggttaatctgtagga

SEQ ID NO: 959141 - DNA, 25 bp, Homo sapien
agagttggttaatctgtaggactgg

SEQ ID NO: 959142 - DNA, 25 bp, Homo sapien
aatctgtaggactggggatgaaagc

SEQ ID NO: 959143 - DNA, 25 bp, Homo sapien
tgagagttggttaatctgtaggact

SEQ ID NO: 959144 - DNA, 25 bp, Homo sapien
tatagcttggttcaccctagagtgc

SEQ ID NO: 959145 - DNA, 25 bp, Homo sapien
ttttctgcagaatataagtagcccc

SEQ ID NO: 959146 - DNA, 25 bp, Homo sapien
tgtacactcggtcttgagaagggct

SEQ ID NO: 959147 - DNA, 25 bp, Homo sapien
tatgacccgcagaaaaaacaatcca

SEQ ID NO: 959148 - DNA, 25 bp, Homo sapien
tgttgtcgtgaaaaattcatcatgt

SEQ ID NO: 959149 - DNA, 25 bp, Homo sapien
tagaaatgtctgagcccatgttgtc

SEQ ID NO: 959150 - DNA, 25 bp, Homo sapien
catgggtatcgcctaagtgaccttc

SEQ ID NO: 959151 - DNA, 25 bp, Homo sapien
gcctaagtgaccttcgtcttctgtt

SEQ ID NO: 959152 - DNA, 25 bp, Homo sapien
gtaagtcccatcattgaacgtgcaa

SEQ ID NO: 959153 - DNA, 25 bp, Homo sapien
taaaggctgggacctatactcactg

SEQ ID NO: 959154 - DNA, 25 bp, Homo sapien
tcagggttaataggtcatgctcaca

SEQ ID NO: 959155 - DNA, 25 bp, Homo sapien
cccagggtcagaggaactaaaggct

SEQ ID NO: 959156 - DNA, 25 bp, Homo sapien
catcaatatgctagtaaggtgtaaa

SEQ ID NO: 959157 - DNA, 25 bp, Homo sapien
tgagctataacatcactgaaaggat

SEQ ID NO: 959158 - DNA, 25 bp, Homo sapien
ggatcctgtaggaaactgtacaata

SEQ ID NO: 959159 - DNA, 25 bp, Homo sapien
tgtggtttatgagagtgagcctatc

SEQ ID NO: 959160 - DNA, 25 bp, Homo sapien
tgaaacttccctgcatagaggatgc

SEQ ID NO: 959161 - DNA, 25 bp, Homo sapien
gaattggtaagtcaagggaccctca

SEQ ID NO: 959162 - DNA, 25 bp, Homo sapien
ccaataatgtgcacctcagggagct

SEQ ID NO: 959163 - DNA, 25 bp, Homo sapien
taaaggccatgcattttcaggaagg

SEQ ID NO: 959164 - DNA, 25 bp, Homo sapien
gactgactccgaatttacatggaaa

SEQ ID NO: 959165 - DNA, 25 bp, Homo sapien
tagggacttatctcaatttgactga

SEQ ID NO: 959166 - DNA, 25 bp, Homo sapien
cactctggtctatgctgttgtgccc

SEQ ID NO: 959167 - DNA, 25 bp, Homo sapien
gatgaaatgctgactagcactctgg

SEQ ID NO: 959168 - DNA, 25 bp, Homo sapien
taaaagtctgatcaggtttagacgc

SEQ ID NO: 959169 - DNA, 25 bp, Homo sapien
ttagtcataaaagtctgatcaggtt

SEQ ID NO: 959170 - DNA, 25 bp, Homo sapien
catgcagcactgtgattagtcataa

SEQ ID NO: 959171 - DNA, 25 bp, Homo sapien
tagacgcaatataggatttttcatc

SEQ ID NO: 959172 - DNA, 25 bp, Homo sapien
tcttaggatagaagtatgagtgccc

SEQ ID NO: 959173 - DNA, 25 bp, Homo sapien
gacttagacacgtacacaggaaatg

SEQ ID NO: 959174 - DNA, 25 bp, Homo sapien
tatcctaagaagaacctcaccagca

SEQ ID NO: 959175 - DNA, 25 bp, Homo sapien
catggatcttgtgagggatctgccc

SEQ ID NO: 959176 - DNA, 25 bp, Homo sapien
ccctgccatgcttgaggagttaaca

SEQ ID NO: 959177 - DNA, 25 bp, Homo sapien
tcatgacatgaaccttggctctagc

SEQ ID NO: 959178 - DNA, 25 bp, Homo sapien
cctaagtgaaatgtatgccccaacc

SEQ ID NO: 959179 - DNA, 25 bp, Homo sapien
tgcacatgcacagaagcgaaactat

SEQ ID NO: 959180 - DNA, 25 bp, Homo sapien
gacttggagtaaaattcaaagcata

SEQ ID NO: 959181 - DNA, 25 bp, Homo sapien
tacaacaccatgcaaatgtagcaat

SEQ ID NO: 959182 - DNA, 25 bp, Homo sapien
taaaattcaaagcatacaacaccat

SEQ ID NO: 959183 - DNA, 25 bp, Homo sapien
caaagcatacaacaccatgcaaatg

SEQ ID NO: 959184 - DNA, 25 bp, Homo sapien
atttaaagccccatccaaagggatg

SEQ ID NO: 959185 - DNA, 25 bp, Homo sapien
gaaatctctctatggccttactgta

SEQ ID NO: 959186 - DNA, 25 bp, Homo sapien
tctgctggaataacgtagtctgagg

SEQ ID NO: 959187 - DNA, 25 bp, Homo sapien
atagattcatttcagcacccaggtt

SEQ ID NO: 959188 - DNA, 25 bp, Homo sapien
cgtcgagacataagcattccagttc

SEQ ID NO: 959189 - DNA, 25 bp, Homo sapien
tctccttgccaaccacttggagcca

SEQ ID NO: 959190 - DNA, 25 bp, Homo sapien
tccgaacccgtcgagacataagcat

SEQ ID NO: 959191 - DNA, 25 bp, Homo sapien
tggagccatcagtccgaacccgtcg

SEQ ID NO: 959192 - DNA, 25 bp, Homo sapien
taagggtcatgctatatcaaaggaa

SEQ ID NO: 959193 - DNA, 25 bp, Homo sapien
cagatctgccttaagacatggtttc

SEQ ID NO: 959194 - DNA, 25 bp, Homo sapien
ttctcatcaaaaacggatcttactg

SEQ ID NO: 959195 - DNA, 25 bp, Homo sapien
ttgcagttgcaaaagagtgtaagcc

SEQ ID NO: 959196 - DNA, 25 bp, Homo sapien
ccagcgcagtaagactcctttcatc

SEQ ID NO: 959197 - DNA, 25 bp, Homo sapien
gatcatgacctgttccattgtggcg

SEQ ID NO: 959198 - DNA, 25 bp, Homo sapien
gtggttgccaccagcgcagtaagac

SEQ ID NO: 959199 - DNA, 25 bp, Homo sapien
cctgttccattgtggcgtggttgcc

SEQ ID NO: 959200 - DNA, 25 bp, Homo sapien
gaaatcggcaaaaactgcccttgcg

SEQ ID NO: 959201 - DNA, 25 bp, Homo sapien
aatttcaaactagcacaccagcaga

SEQ ID NO: 959202 - DNA, 25 bp, Homo sapien
gtcctaatcgaaaacagtaacagca

SEQ ID NO: 959203 - DNA, 25 bp, Homo sapien
gaagctgggcttacaatgcaaagca

SEQ ID NO: 959204 - DNA, 25 bp, Homo sapien
cactctctgagcttgtgtgaagtcc

SEQ ID NO: 959205 - DNA, 25 bp, Homo sapien
caggtgatcccgttgttgacgctgt

SEQ ID NO: 959206 - DNA, 25 bp, Homo sapien
tgggcgatgacatgccaggtgatcc

SEQ ID NO: 959207 - DNA, 25 bp, Homo sapien
cactgttgcagctgtccgtctgcga

SEQ ID NO: 959208 - DNA, 25 bp, Homo sapien
accaaagactgatcctcccctgttg

SEQ ID NO: 959209 - DNA, 25 bp, Homo sapien
ctcttcacccacacgcagctttggg

SEQ ID NO: 959210 - DNA, 25 bp, Homo sapien
ttgaccaaagactgatcctcccctg

SEQ ID NO: 959211 - DNA, 25 bp, Homo sapien
caaagactgatcctcccctgttggg

SEQ ID NO: 959212 - DNA, 25 bp, Homo sapien
cttgcctgtgctcaacattaaatta

SEQ ID NO: 959213 - DNA, 25 bp, Homo sapien
gaaacataattctgagttgtgaaac

SEQ ID NO: 959214 - DNA, 25 bp, Homo sapien
ctctaataaatttaagcgaaacata

SEQ ID NO: 959215 - DNA, 25 bp, Homo sapien
gaaacatatatgcttccttgtccca

SEQ ID NO: 959216 - DNA, 25 bp, Homo sapien
tttcactgcttagtgacatctgtgc

SEQ ID NO: 959217 - DNA, 25 bp, Homo sapien
gtctggactaaaatatggaggtttg

SEQ ID NO: 959218 - DNA, 25 bp, Homo sapien
attctatgtctggactaaaatatgg

SEQ ID NO: 959219 - DNA, 25 bp, Homo sapien
actaattctatgtctggactaaaat

SEQ ID NO: 959220 - DNA, 25 bp, Homo sapien
tatgtctggactaaaatatggaggt

SEQ ID NO: 959221 - DNA, 25 bp, Homo sapien
gccattaaagtacagtgagtctcca

SEQ ID NO: 959222 - DNA, 25 bp, Homo sapien
cttgctcgagtgagatccagaggct

SEQ ID NO: 959223 - DNA, 25 bp, Homo sapien
tataactgggaaggtcgtgactgaa

SEQ ID NO: 959224 - DNA, 25 bp, Homo sapien
gcctcggtgactcttgcggactcaa

SEQ ID NO: 959225 - DNA, 25 bp, Homo sapien
taaatctctcagccatgagtgacag

SEQ ID NO: 959226 - DNA, 25 bp, Homo sapien
aatctctcagccatgagtgacagca

SEQ ID NO: 959227 - DNA, 25 bp, Homo sapien
ctctcagccatgagtgacagcaagg

SEQ ID NO: 959228 - DNA, 25 bp, Homo sapien
tatctgggggaaattgtgttaactc

SEQ ID NO: 959229 - DNA, 25 bp, Homo sapien
cgcagatgcagatggcaccggtcgt

SEQ ID NO: 959230 - DNA, 25 bp, Homo sapien
cttggaagctctcgtcgcagatgca

SEQ ID NO: 959231 - DNA, 25 bp, Homo sapien
cttctggatccagcggaactgtgtt

SEQ ID NO: 959232 - DNA, 25 bp, Homo sapien
aatgtacacgtggtcaattgcccag

SEQ ID NO: 959233 - DNA, 25 bp, Homo sapien
atggtgattcttttccagcttgagc

SEQ ID NO: 959234 - DNA, 25 bp, Homo sapien
ccagcttgagctgttgacagagttg

SEQ ID NO: 959235 - DNA, 25 bp, Homo sapien
agctgttgacagagttgtagatggt

SEQ ID NO: 959236 - DNA, 25 bp, Homo sapien
ctagaggagacatggtcaggcagct

SEQ ID NO: 959237 - DNA, 25 bp, Homo sapien
aaggcactgggtctgtacgagctgc

SEQ ID NO: 959238 - DNA, 25 bp, Homo sapien
tctgtacgagctgccaggaatccga

SEQ ID NO: 959239 - DNA, 25 bp, Homo sapien
gaaaggggagcagccaatgctgtta

SEQ ID NO: 959240 - DNA, 25 bp, Homo sapien
ctgggtctgtacgagctgccaggaa

SEQ ID NO: 959241 - DNA, 25 bp, Homo sapien
tccagcattacggaatgaaggtcac

SEQ ID NO: 959242 - DNA, 25 bp, Homo sapien
tccttagtgtattccagcattacgg

SEQ ID NO: 959243 - DNA, 25 bp, Homo sapien
gaagtggcttcacaacccaccacaa

SEQ ID NO: 959244 - DNA, 25 bp, Homo sapien
tgaaggtcaccacaagaagtggctt

SEQ ID NO: 959245 - DNA, 25 bp, Homo sapien
ccccaaaggagagtttaacatagag

SEQ ID NO: 959246 - DNA, 25 bp, Homo sapien
tccccaaaggagagtttaacataga

SEQ ID NO: 959247 - DNA, 25 bp, Homo sapien
cagtccccaaaggagagtttaacat

SEQ ID NO: 959248 - DNA, 25 bp, Homo sapien
atcatacttgaataaaggtctttgc

SEQ ID NO: 959249 - DNA, 25 bp, Homo sapien
tctgactaaccattctccctcgagg

SEQ ID NO: 959250 - DNA, 25 bp, Homo sapien
ggtctttgcaaaagatgacctcttt

SEQ ID NO: 959251 - DNA, 25 bp, Homo sapien
cagtcatttccttatagttgtctga

SEQ ID NO: 959252 - DNA, 25 bp, Homo sapien
taaactgcatcatgtatcctggctg

SEQ ID NO: 959253 - DNA, 25 bp, Homo sapien
gagagagcattgtgagtcttgtcct

SEQ ID NO: 959254 - DNA, 25 bp, Homo sapien
aatagaggtgaaaggatggattgcc

SEQ ID NO: 959255 - DNA, 25 bp, Homo sapien
tataatgagttctcgggaggagaga

SEQ ID NO: 959256 - DNA, 25 bp, Homo sapien
ttgctgatcacaaaaggctgccacc

SEQ ID NO: 959257 - DNA, 25 bp, Homo sapien
caccccagagaccacaattccattg

SEQ ID NO: 959258 - DNA, 25 bp, Homo sapien
ttggtgagggcatcttcaggaagaa

SEQ ID NO: 959259 - DNA, 25 bp, Homo sapien
caccagcgaagtcgagttgtgttgg

SEQ ID NO: 959260 - DNA, 25 bp, Homo sapien
ctaacagaaatgtatttctggtaat

SEQ ID NO: 959261 - DNA, 25 bp, Homo sapien
aacagaaatgtatttctggtaatcc

SEQ ID NO: 959262 - DNA, 25 bp, Homo sapien
cagaaatgtatttctggtaatccat

SEQ ID NO: 959263 - DNA, 25 bp, Homo sapien
acagaaatgtatttctggtaatcca

SEQ ID NO: 959264 - DNA, 25 bp, Homo sapien
ctcatggagcaaagtccaggtaatt

SEQ ID NO: 959265 - DNA, 25 bp, Homo sapien
tcatggagcaaagtccaggtaattc

SEQ ID NO: 959266 - DNA, 25 bp, Homo sapien
tgttgttctcactaccgatgcgccc

SEQ ID NO: 959267 - DNA, 25 bp, Homo sapien
cttccggcagatgggacgatggcaa

SEQ ID NO: 959268 - DNA, 25 bp, Homo sapien
gatgcgcccccagtattgcaggaac

SEQ ID NO: 959269 - DNA, 25 bp, Homo sapien
agtagtccaacagcacgccttcctt

SEQ ID NO: 959270 - DNA, 25 bp, Homo sapien
gcaagtacttccaccttctaaggac

SEQ ID NO: 959271 - DNA, 25 bp, Homo sapien
taaccgcttgtctcacagtggatcc

SEQ ID NO: 959272 - DNA, 25 bp, Homo sapien
cactgtcaaagcgttccttcaggaa

SEQ ID NO: 959273 - DNA, 25 bp, Homo sapien
aaaatagagtgcagtgtcctcggca

SEQ ID NO: 959274 - DNA, 25 bp, Homo sapien
ttcagagtgtgggtcaagtagcagt

SEQ ID NO: 959275 - DNA, 25 bp, Homo sapien
acagatgcactgttcccttaagcaa

SEQ ID NO: 959276 - DNA, 25 bp, Homo sapien
gcagtttggccctgagtatcccgga

SEQ ID NO: 959277 - DNA, 25 bp, Homo sapien
tagaaattatcgattgcccactgca

SEQ ID NO: 959278 - DNA, 25 bp, Homo sapien
agagagctgagtatgccgccagtgc

SEQ ID NO: 959279 - DNA, 25 bp, Homo sapien
gataaggaggaacgctgtccctgaa

SEQ ID NO: 959280 - DNA, 25 bp, Homo sapien
gacgtaagtacggaagcatcctgcc

SEQ ID NO: 959281 - DNA, 25 bp, Homo sapien
tgttcaatagcaaaaccagcctgag

SEQ ID NO: 959282 - DNA, 25 bp, Homo sapien
gaagtgggtaggtgatccttttcca

SEQ ID NO: 959283 - DNA, 25 bp, Homo sapien
tcacaccgaagtcagtagaatactg

SEQ ID NO: 959284 - DNA, 25 bp, Homo sapien
gggcaattttttcagacaccttaca

SEQ ID NO: 959285 - DNA, 25 bp, Homo sapien
cattttgggtcagcaggcaagcact

SEQ ID NO: 959286 - DNA, 25 bp, Homo sapien
cttgaattgcataatccagccttca

SEQ ID NO: 959287 - DNA, 25 bp, Homo sapien
agcatcacaccatcaggggagtcac

SEQ ID NO: 959288 - DNA, 25 bp, Homo sapien
atgactgccacagagcatcacacca

SEQ ID NO: 959289 - DNA, 25 bp, Homo sapien
gactgccacagagcatcacaccatc

SEQ ID NO: 959290 - DNA, 25 bp, Homo sapien
gtcacagaatctttctactgtacaa

SEQ ID NO: 959291 - DNA, 25 bp, Homo sapien
ccagcggaagcgagtggcaatctct

SEQ ID NO: 959292 - DNA, 25 bp, Homo sapien
caggccgtcatgtcttggctgccac

SEQ ID NO: 959293 - DNA, 25 bp, Homo sapien
cagcataacggtcctttggtcagca

SEQ ID NO: 959294 - DNA, 25 bp, Homo sapien
ccagtcgttctgatccaggccgtca

SEQ ID NO: 959295 - DNA, 25 bp, Homo sapien
tgtggggaagaacccttgtcaaata

SEQ ID NO: 959296 - DNA, 25 bp, Homo sapien
ctataggaaaatgatggggaagggt

SEQ ID NO: 959297 - DNA, 25 bp, Homo sapien
taggaaaatgatggggaagggtgtg

SEQ ID NO: 959298 - DNA, 25 bp, Homo sapien
ggaagaacccttgtcaaatatcttc

SEQ ID NO: 959299 - DNA, 25 bp, Homo sapien
tgcgggtactggcagctgggagaca

SEQ ID NO: 959300 - DNA, 25 bp, Homo sapien
ctgtgcgggtactggcagctgggag

SEQ ID NO: 959301 - DNA, 25 bp, Homo sapien
tgtgcgggtactggcagctgggaga

SEQ ID NO: 959302 - DNA, 25 bp, Homo sapien
gcgggtactggcagctgggagacat

SEQ ID NO: 959303 - DNA, 25 bp, Homo sapien
tagtgaggcataagtctgaggtccc

SEQ ID NO: 959304 - DNA, 25 bp, Homo sapien
tgctggtagcaatctctgctcgatg

SEQ ID NO: 959305 - DNA, 25 bp, Homo sapien
tctcccgtgactgattgctggtagc

SEQ ID NO: 959306 - DNA, 25 bp, Homo sapien
gtactcgttattagatatcaaatcg

SEQ ID NO: 959307 - DNA, 25 bp, Homo sapien
tgtaatcaggcacccatacatgaag

SEQ ID NO: 959308 - DNA, 25 bp, Homo sapien
catgagcaggttccaggtaatgcct

SEQ ID NO: 959309 - DNA, 25 bp, Homo sapien
gatccacagtgactaataatcgact

SEQ ID NO: 959310 - DNA, 25 bp, Homo sapien
cagcattagtgaggtttagatccac

SEQ ID NO: 959311 - DNA, 25 bp, Homo sapien
tgggaccacagttgtgtgctaccac

SEQ ID NO: 959312 - DNA, 25 bp, Homo sapien
ttttgagacagtctggctggagtgc

SEQ ID NO: 959313 - DNA, 25 bp, Homo sapien
ccacagttgtgtgctaccacacccg

SEQ ID NO: 959314 - DNA, 25 bp, Homo sapien
ggaccacagttgtgtgctaccacac

SEQ ID NO: 959315 - DNA, 25 bp, Homo sapien
cgttcacagtcagccagttctgact

SEQ ID NO: 959316 - DNA, 25 bp, Homo sapien
tggatggagctcgattgaagttgtc

SEQ ID NO: 959317 - DNA, 25 bp, Homo sapien
aaatggagagccattcccgacgcca

SEQ ID NO: 959318 - DNA, 25 bp, Homo sapien
gtctcggggtcatcacagtacaggc

SEQ ID NO: 959319 - DNA, 25 bp, Homo sapien
tgtcaaaaggagctggttgatgcca

SEQ ID NO: 959320 - DNA, 25 bp, Homo sapien
gcagtttccctggatgcatctccca

SEQ ID NO: 959321 - DNA, 25 bp, Homo sapien
catggccactgcacatgtctatgca

SEQ ID NO: 959322 - DNA, 25 bp, Homo sapien
cagccatccccgatatagacattat

SEQ ID NO: 959323 - DNA, 25 bp, Homo sapien
caaagccctcgtcaccttgtattaa

SEQ ID NO: 959324 - DNA, 25 bp, Homo sapien
tgttgctggcacctacagatggagc

SEQ ID NO: 959325 - DNA, 25 bp, Homo sapien
caagagatgtcctgtagggtagatg

SEQ ID NO: 959326 - DNA, 25 bp, Homo sapien
ggaagatcaaaacaccctacaagag

SEQ ID NO: 959327 - DNA, 25 bp, Homo sapien
gatgcttccctgtcagtaaaccagg

SEQ ID NO: 959328 - DNA, 25 bp, Homo sapien
tactttccgcctcacaagggtgttg

SEQ ID NO: 959329 - DNA, 25 bp, Homo sapien
gatggccaccatcagctgctacttc

SEQ ID NO: 959330 - DNA, 25 bp, Homo sapien
ggagttcctcggcaggtgttatcat

SEQ ID NO: 959331 - DNA, 25 bp, Homo sapien
gatccgttgcagatgatagcgactg

SEQ ID NO: 959332 - DNA, 25 bp, Homo sapien
caatgggtgccatgacaatccaaga

SEQ ID NO: 959333 - DNA, 25 bp, Homo sapien
gcattccacattggtaggcagacag

SEQ ID NO: 959334 - DNA, 25 bp, Homo sapien
gagaggcagagtgattctagtccac

SEQ ID NO: 959335 - DNA, 25 bp, Homo sapien
taatcttcgtgaaatacatcatgtc

SEQ ID NO: 959336 - DNA, 25 bp, Homo sapien
cttcattggctctggagctaatctt

SEQ ID NO: 959337 - DNA, 25 bp, Homo sapien
acccctctgcacttgtactctcttg

SEQ ID NO: 959338 - DNA, 25 bp, Homo sapien
tgtcacccctctgcacttgtactct

SEQ ID NO: 959339 - DNA, 25 bp, Homo sapien
cacgtaacgggtgctggccttttca

SEQ ID NO: 959340 - DNA, 25 bp, Homo sapien
aagaccagggcatcaccagtagagc

SEQ ID NO: 959341 - DNA, 25 bp, Homo sapien
gaaggaatcctcattcacggcaacg

SEQ ID NO: 959342 - DNA, 25 bp, Homo sapien
tagagccacacacgggcatcttggt

SEQ ID NO: 959343 - DNA, 25 bp, Homo sapien
tgtggcaccaatgctaatttgcaca

SEQ ID NO: 959344 - DNA, 25 bp, Homo sapien
gaattataaccttgtatcacgcttg

SEQ ID NO: 959345 - DNA, 25 bp, Homo sapien
taaagtccctctatccatatggcag

SEQ ID NO: 959346 - DNA, 25 bp, Homo sapien
tatggcagaatcctctatgagcagg

SEQ ID NO: 959347 - DNA, 25 bp, Homo sapien
tgaagaagactccacgagaggccac

SEQ ID NO: 959348 - DNA, 25 bp, Homo sapien
gaatactgtaggagcacgggttgac

SEQ ID NO: 959349 - DNA, 25 bp, Homo sapien
gaacgggctttcaagggtatctcca

SEQ ID NO: 959350 - DNA, 25 bp, Homo sapien
ccagcgaaggcgagtagaaccagaa

SEQ ID NO: 959351 - DNA, 25 bp, Homo sapien
tggggtcaggaacgcctttaccaca

SEQ ID NO: 959352 - DNA, 25 bp, Homo sapien
gtcaggaacgcctttaccacatccc

SEQ ID NO: 959353 - DNA, 25 bp, Homo sapien
ggtcaggaacgcctttaccacatcc

SEQ ID NO: 959354 - DNA, 25 bp, Homo sapien
gggtcaggaacgcctttaccacatc

SEQ ID NO: 959355 - DNA, 25 bp, Homo sapien
catgtgataaatccaggtctcgtgt

SEQ ID NO: 959356 - DNA, 25 bp, Homo sapien
ttccacactttcgagatggtttccc

SEQ ID NO: 959357 - DNA, 25 bp, Homo sapien
ttccactagaaaggattccacactt

SEQ ID NO: 959358 - DNA, 25 bp, Homo sapien
tcgtgtcatcaacatgcgcaagcca

SEQ ID NO: 959359 - DNA, 25 bp, Homo sapien
ttttacaggttggacctgagtagcc

SEQ ID NO: 959360 - DNA, 25 bp, Homo sapien
cagggtcacatatacatttggttcc

SEQ ID NO: 959361 - DNA, 25 bp, Homo sapien
ccgatgtagacattatcaatggccc

SEQ ID NO: 959362 - DNA, 25 bp, Homo sapien
catttggttccattgatacagctcc

SEQ ID NO: 959363 - DNA, 25 bp, Homo sapien
agagccggcagggtaaaatccctgg

SEQ ID NO: 959364 - DNA, 25 bp, Homo sapien
ctgagagccggcagggtaaaatccc

SEQ ID NO: 959365 - DNA, 25 bp, Homo sapien
tgagagccggcagggtaaaatccct

SEQ ID NO: 959366 - DNA, 25 bp, Homo sapien
gagagccggcagggtaaaatccctg

SEQ ID NO: 959367 - DNA, 25 bp, Homo sapien
aatctccaggattttgccaataaag

SEQ ID NO: 959368 - DNA, 25 bp, Homo sapien
gaaaacatttgccatttcaggaaca

SEQ ID NO: 959369 - DNA, 25 bp, Homo sapien
aaaactccattcctcaatctccagg

SEQ ID NO: 959370 - DNA, 25 bp, Homo sapien
ctatgctcaacacccaagaaataga

SEQ ID NO: 959371 - DNA, 25 bp, Homo sapien
gtctctgtgacgctggagcactccc

SEQ ID NO: 959372 - DNA, 25 bp, Homo sapien
gcctctgactggcaggtctttgtca

SEQ ID NO: 959373 - DNA, 25 bp, Homo sapien
ttcactcagtgcctctgactggcag

SEQ ID NO: 959374 - DNA, 25 bp, Homo sapien
gctgagcgaggtggtctctgtgacg

SEQ ID NO: 959375 - DNA, 25 bp, Homo sapien
cactgatctgcttgagaacagagga

SEQ ID NO: 959376 - DNA, 25 bp, Homo sapien
tgtgaaccccactacagggtgcagc

SEQ ID NO: 959377 - DNA, 25 bp, Homo sapien
tagtagttatgtcagctccgtgtcc

SEQ ID NO: 959378 - DNA, 25 bp, Homo sapien
tgcatgacagacataggcaggtgtt

SEQ ID NO: 959379 - DNA, 25 bp, Homo sapien
gataaagtggcaagtgaacgatgac

SEQ ID NO: 959380 - DNA, 25 bp, Homo sapien
tggaaatttccccatgataaagtgg

SEQ ID NO: 959381 - DNA, 25 bp, Homo sapien
caagtgaacgatgacttcaggaata

SEQ ID NO: 959382 - DNA, 25 bp, Homo sapien
ggaaatttccccatgataaagtggc

SEQ ID NO: 959383 - DNA, 25 bp, Homo sapien
aaatgtggcgtcaagcagcgggtcc

SEQ ID NO: 959384 - DNA, 25 bp, Homo sapien
aatgtggcgtcaagcagcgggtcct

SEQ ID NO: 959385 - DNA, 25 bp, Homo sapien
atgtggcgtcaagcagcgggtcctt

SEQ ID NO: 959386 - DNA, 25 bp, Homo sapien
gtggcgtcaagcagcgggtccttac

SEQ ID NO: 959387 - DNA, 25 bp, Homo sapien
ggtggtgctcggtggagcataaaga

SEQ ID NO: 959388 - DNA, 25 bp, Homo sapien
tggttcctgcgtagtaggtgctgct

SEQ ID NO: 959389 - DNA, 25 bp, Homo sapien
gcttcccaaagtgcacgacctccct

SEQ ID NO: 959390 - DNA, 25 bp, Homo sapien
gcataaagagctgacgtggctgctg

SEQ ID NO: 959391 - DNA, 25 bp, Homo sapien
gaaggtgccaggtcgccccgaagtc

SEQ ID NO: 959392 - DNA, 25 bp, Homo sapien
gcagaaggtgccaggtcgccccgaa

SEQ ID NO: 959393 - DNA, 25 bp, Homo sapien
tgaaaattccagtctcactggatcc

SEQ ID NO: 959394 - DNA, 25 bp, Homo sapien
cagtctcactggatccgcggatgag

SEQ ID NO: 959395 - DNA, 25 bp, Homo sapien
ctatcagtcgaacagccaacgttga

SEQ ID NO: 959396 - DNA, 25 bp, Homo sapien
tatcagtcgaacagccaacgttgat

SEQ ID NO: 959397 - DNA, 25 bp, Homo sapien
tcatttgaaacaaacaccatagctg

SEQ ID NO: 959398 - DNA, 25 bp, Homo sapien
ttcacatttaggtcacgggtggtaa

SEQ ID NO: 959399 - DNA, 25 bp, Homo sapien
gggtggtaatggaatgctcaccaac

SEQ ID NO: 959400 - DNA, 25 bp, Homo sapien
caaacaccatagctgaatcttcttc

SEQ ID NO: 959401 - DNA, 25 bp, Homo sapien
tgaagaatatggacaataaagaccg

SEQ ID NO: 959402 - DNA, 25 bp, Homo sapien
gaccgatgttaccaccaggatagaa

SEQ ID NO: 959403 - DNA, 25 bp, Homo sapien
tatggacaataaagaccgatgttac

SEQ ID NO: 959404 - DNA, 25 bp, Homo sapien
caataaagaccgatgttaccaccag

SEQ ID NO: 959405 - DNA, 25 bp, Homo sapien
tatttccatcgataatgaagtcatc

SEQ ID NO: 959406 - DNA, 25 bp, Homo sapien
attatttccatcgataatgaagtca

SEQ ID NO: 959407 - DNA, 25 bp, Homo sapien
ttacattatttccatcgataatgaa

SEQ ID NO: 959408 - DNA, 25 bp, Homo sapien
acattatttccatcgataatgaagt

SEQ ID NO: 959409 - DNA, 25 bp, Homo sapien
taaaattcatccatcaggtgccaag

SEQ ID NO: 959410 - DNA, 25 bp, Homo sapien
cagagtctgaatcttgtagcattgg

SEQ ID NO: 959411 - DNA, 25 bp, Homo sapien
cattggtttgggcagtgtatggcaa

SEQ ID NO: 959412 - DNA, 25 bp, Homo sapien
tccactgatggagaattgtaacaga

SEQ ID NO: 959413 - DNA, 25 bp, Homo sapien
aatctaagtgaaaactggacataca

SEQ ID NO: 959414 - DNA, 25 bp, Homo sapien
tctaagtgaaaactggacatacatt

SEQ ID NO: 959415 - DNA, 25 bp, Homo sapien
taagtgaaaactggacatacattgt

SEQ ID NO: 959416 - DNA, 25 bp, Homo sapien
tttttgctataaatctaagtgaaaa

SEQ ID NO: 959417 - DNA, 25 bp, Homo sapien
ctaaggtccagacaggtcttttagt

SEQ ID NO: 959418 - DNA, 25 bp, Homo sapien
tccagacaggtcttttagtttttca

SEQ ID NO: 959419 - DNA, 25 bp, Homo sapien
ccagacaggtcttttagtttttcag

SEQ ID NO: 959420 - DNA, 25 bp, Homo sapien
gacgtgactctttacggatgcacgg

SEQ ID NO: 959421 - DNA, 25 bp, Homo sapien
ccatttgtgttgagcagtgactgaa

SEQ ID NO: 959422 - DNA, 25 bp, Homo sapien
atattatgtcatttgaagagattca

SEQ ID NO: 959423 - DNA, 25 bp, Homo sapien
ttatgtcatttgaagagattcagaa

SEQ ID NO: 959424 - DNA, 25 bp, Homo sapien
taaaagtcaataactatgtattaaa

SEQ ID NO: 959425 - DNA, 25 bp, Homo sapien
agagatgttccagatttgatggttt

SEQ ID NO: 959426 - DNA, 25 bp, Homo sapien
agatgttccagatttgatggtttca

SEQ ID NO: 959427 - DNA, 25 bp, Homo sapien
ttaaaaattagagatgttccagatt

SEQ ID NO: 959428 - DNA, 25 bp, Homo sapien
aattagagatgttccagatttgatg

SEQ ID NO: 959429 - DNA, 25 bp, Homo sapien
gaacacaatagggtccaccaaagcc

SEQ ID NO: 959430 - DNA, 25 bp, Homo sapien
tgtaaattcccattgaaatcgtctt

SEQ ID NO: 959431 - DNA, 25 bp, Homo sapien
tgcaccatacacttcaggccaaagg

SEQ ID NO: 959432 - DNA, 25 bp, Homo sapien
cgtctttaagaatcgagggcagagg

SEQ ID NO: 959433 - DNA, 25 bp, Homo sapien
cctgaggccagtacaacattatcaa

SEQ ID NO: 959434 - DNA, 25 bp, Homo sapien
agcatcacaaatccctcgtcctgag

SEQ ID NO: 959435 - DNA, 25 bp, Homo sapien
tggcctgaatccatctgaaccgggt

SEQ ID NO: 959436 - DNA, 25 bp, Homo sapien
ccccacagtgtagttggcctgaatc

SEQ ID NO: 959437 - DNA, 25 bp, Homo sapien
tcccaggtctcagcataacgaggtt

SEQ ID NO: 959438 - DNA, 25 bp, Homo sapien
gaactttccgtgtaatgcagacagc

SEQ ID NO: 959439 - DNA, 25 bp, Homo sapien
ggttggaggaacacactcttcggtg

SEQ ID NO: 959440 - DNA, 25 bp, Homo sapien
tcttcggtgacaagatgccagtcct

SEQ ID NO: 959441 - DNA, 25 bp, Homo sapien
aacttgacctccttggattcgatac

SEQ ID NO: 959442 - DNA, 25 bp, Homo sapien
gagacagtcaatatcaacttgacct

SEQ ID NO: 959443 - DNA, 25 bp, Homo sapien
accagttggcttgcaaatctataga

SEQ ID NO: 959444 - DNA, 25 bp, Homo sapien
tcagagcagtatccatagagagaca

SEQ ID NO: 959445 - DNA, 25 bp, Homo sapien
tcaatggaaatgatctgtggttcca

SEQ ID NO: 959446 - DNA, 25 bp, Homo sapien
tcttcgcgtcctgtggcaggtcaat

SEQ ID NO: 959447 - DNA, 25 bp, Homo sapien
tgaagtccaactctcgaagcaaatg

SEQ ID NO: 959448 - DNA, 25 bp, Homo sapien
ggttgccaccatcgaaatgccgttg

SEQ ID NO: 959449 - DNA, 25 bp, Homo sapien
gagttaaaagacataaatccagtta

SEQ ID NO: 959450 - DNA, 25 bp, Homo sapien
tgagttaaaagacataaatccagtt

SEQ ID NO: 959451 - DNA, 25 bp, Homo sapien
agttaaaagacataaatccagttat

SEQ ID NO: 959452 - DNA, 25 bp, Homo sapien
tgcaggtaatgcctgaagttttgct

SEQ ID NO: 959453 - DNA, 25 bp, Homo sapien
ttcttggtttgatgcaggtaatgcc

SEQ ID NO: 959454 - DNA, 25 bp, Homo sapien
gcctgaagttttgcttccaatttgt

SEQ ID NO: 959455 - DNA, 25 bp, Homo sapien
ttctagttcttggtttgatgcaggt

SEQ ID NO: 959456 - DNA, 25 bp, Homo sapien
tagcgactgacagagagtacctgct

SEQ ID NO: 959457 - DNA, 25 bp, Homo sapien
cagtcagtacgatgtaaattatgcc

SEQ ID NO: 959458 - DNA, 25 bp, Homo sapien
tcagtccatagcgactgacagagag

SEQ ID NO: 959459 - DNA, 25 bp, Homo sapien
taaattatgcctcagtccatagcga

SEQ ID NO: 959460 - DNA, 25 bp, Homo sapien
tgatattcctggtgtccagagggac

SEQ ID NO: 959461 - DNA, 25 bp, Homo sapien
ctgatattcctggtgtccagaggga

SEQ ID NO: 959462 - DNA, 25 bp, Homo sapien
cagggccattgaagtagagagattt

SEQ ID NO: 959463 - DNA, 25 bp, Homo sapien
tcgttaagtgttccacagccagttc

SEQ ID NO: 959464 - DNA, 25 bp, Homo sapien
tccaacctgggcacctgttatcttg

SEQ ID NO: 959465 - DNA, 25 bp, Homo sapien
tgagcttcccctcaaacctatcgaa

SEQ ID NO: 959466 - DNA, 25 bp, Homo sapien
ttgttggaatcattcaaaacgaggt

SEQ ID NO: 959467 - DNA, 25 bp, Homo sapien
agaaatagagaggagagatgctttg

SEQ ID NO: 959468 - DNA, 25 bp, Homo sapien
gaggagagatgctttgttggaatca

SEQ ID NO: 959469 - DNA, 25 bp, Homo sapien
gagatgctttgttggaatcattcaa

SEQ ID NO: 959470 - DNA, 25 bp, Homo sapien
cagtaactgggacaaggctcggata

SEQ ID NO: 959471 - DNA, 25 bp, Homo sapien
tctcctggatccatcggaatctggt

SEQ ID NO: 959472 - DNA, 25 bp, Homo sapien
cagtatatcccaggtcacagaaaca

SEQ ID NO: 959473 - DNA, 25 bp, Homo sapien
caaatggaggcacgtttttctgtga

SEQ ID NO: 959474 - DNA, 25 bp, Homo sapien
ctcttccttctcagttccgctataa

SEQ ID NO: 959475 - DNA, 25 bp, Homo sapien
gctgccaatatttatagacttttga

SEQ ID NO: 959476 - DNA, 25 bp, Homo sapien
cagttccgctataatcaaaggatga

SEQ ID NO: 959477 - DNA, 25 bp, Homo sapien
gatgaagatgtattggtgtatccac

SEQ ID NO: 959478 - DNA, 25 bp, Homo sapien
ctgttctcttctcagtggcaaaatc

SEQ ID NO: 959479 - DNA, 25 bp, Homo sapien
caattgatttagcaacctcagggtt

SEQ ID NO: 959480 - DNA, 25 bp, Homo sapien
tggcaaaatcttgggattgaacaca

SEQ ID NO: 959481 - DNA, 25 bp, Homo sapien
tgggattgaacacaattgatttagc

SEQ ID NO: 959482 - DNA, 25 bp, Homo sapien
agaaaacctatggaaaactctcctg

SEQ ID NO: 959483 - DNA, 25 bp, Homo sapien
tccaacaagggaccaatataatagg

SEQ ID NO: 959484 - DNA, 25 bp, Homo sapien
aaagctgacaagaacttacactggg

SEQ ID NO: 959485 - DNA, 25 bp, Homo sapien
taaagagacaacctatgggatcgga

SEQ ID NO: 959486 - DNA, 25 bp, Homo sapien
caaagtcccctgtgtgatacatggt

SEQ ID NO: 959487 - DNA, 25 bp, Homo sapien
ctttgcctgcagaagccgggtaaca

SEQ ID NO: 959488 - DNA, 25 bp, Homo sapien
gcagtactgctgaattgattggcac

SEQ ID NO: 959489 - DNA, 25 bp, Homo sapien
tggtgggctcacttagttctctgga

SEQ ID NO: 959490 - DNA, 25 bp, Homo sapien
gagttactgcaaatcgatctccatc

SEQ ID NO: 959491 - DNA, 25 bp, Homo sapien
caggtttcagggtcaaatctcgagt

SEQ ID NO: 959492 - DNA, 25 bp, Homo sapien
ttcatagggtaatcaaaagctggct

SEQ ID NO: 959493 - DNA, 25 bp, Homo sapien
tttaaccattccttcattagccaac

SEQ ID NO: 959494 - DNA, 25 bp, Homo sapien
ccaccagcggaacctggtgcaaggg

SEQ ID NO: 959495 - DNA, 25 bp, Homo sapien
tgcttctcggacagaatgatgatgt

SEQ ID NO: 959496 - DNA, 25 bp, Homo sapien
gttggattgataactgggatgatct

SEQ ID NO: 959497 - DNA, 25 bp, Homo sapien
gatgatgtcatcgactgcccactgg

SEQ ID NO: 959498 - DNA, 25 bp, Homo sapien
gaaaatctgagctctatacacttac

SEQ ID NO: 959499 - DNA, 25 bp, Homo sapien
gcccttggtgcagccatgtgaaaca

SEQ ID NO: 959500 - DNA, 25 bp, Homo sapien
ctcatacactgtttagggatagccc

SEQ ID NO: 959501 - DNA, 25 bp, Homo sapien
tagtattaaacacgagtcatctccc

SEQ ID NO: 959502 - DNA, 25 bp, Homo sapien
ggaaaatgagcgtggaacatcccca

SEQ ID NO: 959503 - DNA, 25 bp, Homo sapien
aactaatgcgaggaccatcaggtgg

SEQ ID NO: 959504 - DNA, 25 bp, Homo sapien
ctttctgtccagtcacttaagtgaa

SEQ ID NO: 959505 - DNA, 25 bp, Homo sapien
tatactgggctatcattcatgttaa

SEQ ID NO: 959506 - DNA, 25 bp, Homo sapien
tgaagtctgaaaagtacatctctgc

SEQ ID NO: 959507 - DNA, 25 bp, Homo sapien
tgctgtactgaaggaggacgccctc

SEQ ID NO: 959508 - DNA, 25 bp, Homo sapien
aagtccacccaagaagtatccaggt

SEQ ID NO: 959509 - DNA, 25 bp, Homo sapien
gaagcactctctccgcctatctgga

SEQ ID NO: 959510 - DNA, 25 bp, Homo sapien
cttgctgaagtacagagatgatcca

SEQ ID NO: 959511 - DNA, 25 bp, Homo sapien
ggcattcagtgccttggtacccctg

SEQ ID NO: 959512 - DNA, 25 bp, Homo sapien
taattgtggacggaagggcagcttc

SEQ ID NO: 959513 - DNA, 25 bp, Homo sapien
ggcagcttctgggtggcattcagtg

SEQ ID NO: 959514 - DNA, 25 bp, Homo sapien
gctccagcggaaacgggtagcactg

SEQ ID NO: 959515 - DNA, 25 bp, Homo sapien
tgcatatgccatgatcgcatgagcc

SEQ ID NO: 959516 - DNA, 25 bp, Homo sapien
tcttgagctgtgtaatagctctggc

SEQ ID NO: 959517 - DNA, 25 bp, Homo sapien
aaagcccactcgtcttgagctgtgt

SEQ ID NO: 959518 - DNA, 25 bp, Homo sapien
tagaaacacggtatagtataacaaa

SEQ ID NO: 959519 - DNA, 25 bp, Homo sapien
ctagaaacacggtatagtataacaa

SEQ ID NO: 959520 - DNA, 25 bp, Homo sapien
ggggaagaagcactatgactctcct

SEQ ID NO: 959521 - DNA, 25 bp, Homo sapien
tggggaagaagcactatgactctcc

SEQ ID NO: 959522 - DNA, 25 bp, Homo sapien
gcatggtaaatacttgctgatgtaa

SEQ ID NO: 959523 - DNA, 25 bp, Homo sapien
tggcatggtaaatacttgctgatgt

SEQ ID NO: 959524 - DNA, 25 bp, Homo sapien
aacttggcatacttggaaggcattc

SEQ ID NO: 959525 - DNA, 25 bp, Homo sapien
aaattcctgacaacttggcatactt

SEQ ID NO: 959526 - DNA, 25 bp, Homo sapien
cttaactatttgtgatatggaaaca

SEQ ID NO: 959527 - DNA, 25 bp, Homo sapien
gacctcagagaaatctaatgtcata

SEQ ID NO: 959528 - DNA, 25 bp, Homo sapien
aatgtcataatcttaactatttgtg

SEQ ID NO: 959529 - DNA, 25 bp, Homo sapien
tccatgaagctaaaacttcatagaa

SEQ ID NO: 959530 - DNA, 25 bp, Homo sapien
gaggcaagtttagaatctcctgtaa

SEQ ID NO: 959531 - DNA, 25 bp, Homo sapien
taaggccgtggttggttgagtactc

SEQ ID NO: 959532 - DNA, 25 bp, Homo sapien
cagcttcacctggttgtccatgtgt

SEQ ID NO: 959533 - DNA, 25 bp, Homo sapien
ccacatagcgcatacttgaggcaag

SEQ ID NO: 959534 - DNA, 25 bp, Homo sapien
gagatggtttcgtgtcctcataatt

SEQ ID NO: 959535 - DNA, 25 bp, Homo sapien
tcccttctgagatggtttcgtgtcc

SEQ ID NO: 959536 - DNA, 25 bp, Homo sapien
ttctcccttctgagatggtttcgtg

SEQ ID NO: 959537 - DNA, 25 bp, Homo sapien
catgaacagtatttccccacctgag

SEQ ID NO: 959538 - DNA, 25 bp, Homo sapien
taacctgatccacatttataccact

SEQ ID NO: 959539 - DNA, 25 bp, Homo sapien
tctatttccttgaacatcacttcct

SEQ ID NO: 959540 - DNA, 25 bp, Homo sapien
taccacttctcattaggatttgccc

SEQ ID NO: 959541 - DNA, 25 bp, Homo sapien
gcctggcctaacctgatccacattt

SEQ ID NO: 959542 - DNA, 25 bp, Homo sapien
tctcacttcacagcaaacatattaa

SEQ ID NO: 959543 - DNA, 25 bp, Homo sapien
aaaatgcacctatgtctcatgttaa

SEQ ID NO: 959544 - DNA, 25 bp, Homo sapien
tatttagagcatactcaaacagagc

SEQ ID NO: 959545 - DNA, 25 bp, Homo sapien
taagacttttgtaggacctcgatac

SEQ ID NO: 959546 - DNA, 25 bp, Homo sapien
aaatgacagcttgttttaggactat

SEQ ID NO: 959547 - DNA, 25 bp, Homo sapien
tttctgaaaaacatccccaaggtga

SEQ ID NO: 959548 - DNA, 25 bp, Homo sapien
tacttaataagacaatatgctccaa

SEQ ID NO: 959549 - DNA, 25 bp, Homo sapien
tcttggacaatgtattcctcaacag

SEQ ID NO: 959550 - DNA, 25 bp, Homo sapien
tagaaaatgtgtcgtttgagcccgg

SEQ ID NO: 959551 - DNA, 25 bp, Homo sapien
tagtctcattatcaccaccagggta

SEQ ID NO: 959552 - DNA, 25 bp, Homo sapien
taaaactcctatggtgctgctcaag

SEQ ID NO: 959553 - DNA, 25 bp, Homo sapien
aatgtatctccaccaattaaagcgg

SEQ ID NO: 959554 - DNA, 25 bp, Homo sapien
gactgagtgacctccacaagattgg

SEQ ID NO: 959555 - DNA, 25 bp, Homo sapien
tctctgggaagaatgatacggttgc

SEQ ID NO: 959556 - DNA, 25 bp, Homo sapien
cagtcgtggccacagtatggctgaa

SEQ ID NO: 959557 - DNA, 25 bp, Homo sapien
tccaaggtagaatcccagagactga

SEQ ID NO: 959558 - DNA, 25 bp, Homo sapien
ctgggctcatgatagctgagatatg

SEQ ID NO: 959559 - DNA, 25 bp, Homo sapien
gaacagatttgctccccagtctcag

SEQ ID NO: 959560 - DNA, 25 bp, Homo sapien
caggagtttccaagttatcccatta

SEQ ID NO: 959561 - DNA, 25 bp, Homo sapien
gctctgcacgtgctcagaacagatt

SEQ ID NO: 959562 - DNA, 25 bp, Homo sapien
caagacaccacaaccaaagctgact

SEQ ID NO: 959563 - DNA, 25 bp, Homo sapien
caaggaaagatgtaattagctgacg

SEQ ID NO: 959564 - DNA, 25 bp, Homo sapien
tgacgccgcccatctttgttgaaaa

SEQ ID NO: 959565 - DNA, 25 bp, Homo sapien
ttcagcaccacggatagagtaaaag

SEQ ID NO: 959566 - DNA, 25 bp, Homo sapien
tgggccagaaaatccagggtcacac

SEQ ID NO: 959567 - DNA, 25 bp, Homo sapien
ctgggccagaaaatccagggtcaca

SEQ ID NO: 959568 - DNA, 25 bp, Homo sapien
ccatgtctagtgcactgtcctctgc

SEQ ID NO: 959569 - DNA, 25 bp, Homo sapien
gcaaccatgtctagtgcactgtcct

SEQ ID NO: 959570 - DNA, 25 bp, Homo sapien
ttgcaaccatgtctagtgcactgtc

SEQ ID NO: 959571 - DNA, 25 bp, Homo sapien
agaatttgagacatgacgggccaat

SEQ ID NO: 959572 - DNA, 25 bp, Homo sapien
cgaatcctggtgttccgggttagtg

SEQ ID NO: 959573 - DNA, 25 bp, Homo sapien
tgtttccaaggattggtcctgtttg

SEQ ID NO: 959574 - DNA, 25 bp, Homo sapien
tatcaattgcccacatgtttccaag

SEQ ID NO: 959575 - DNA, 25 bp, Homo sapien
tgtttgtctccagcgaatcctggtg

SEQ ID NO: 959576 - DNA, 25 bp, Homo sapien
ctgcgttaggaaggggaattgttat

SEQ ID NO: 959577 - DNA, 25 bp, Homo sapien
tgaaggagggaccaggagcgcccat

SEQ ID NO: 959578 - DNA, 25 bp, Homo sapien
cagtgtgaaggagggaccaggagcg

SEQ ID NO: 959579 - DNA, 25 bp, Homo sapien
gtgtgaaggagggaccaggagcgcc

SEQ ID NO: 959580 - DNA, 25 bp, Homo sapien
ttcagtgtgaaggagggaccaggag

SEQ ID NO: 959581 - DNA, 25 bp, Homo sapien
ccagaacaagcacacacaaaaggtg

SEQ ID NO: 959582 - DNA, 25 bp, Homo sapien
taataaaaccagaacaagcacacac

SEQ ID NO: 959583 - DNA, 25 bp, Homo sapien
tctggttaagtacattaaacaactg

SEQ ID NO: 959584 - DNA, 25 bp, Homo sapien
gagggtaaagataacaaatcaaatg

SEQ ID NO: 959585 - DNA, 25 bp, Homo sapien
caaaatttggtagcaggagtctgaa

SEQ ID NO: 959586 - DNA, 25 bp, Homo sapien
cccagattgatggaaaactgtatca

SEQ ID NO: 959587 - DNA, 25 bp, Homo sapien
tgttaccaggctgatgcgttccaca

SEQ ID NO: 959588 - DNA, 25 bp, Homo sapien
tatcatgtgagacattgtagaaggg

SEQ ID NO: 959589 - DNA, 25 bp, Homo sapien
ccagggtggtctgaggtggtctatt

SEQ ID NO: 959590 - DNA, 25 bp, Homo sapien
ttgccacacagactggcatgtgtac

SEQ ID NO: 959591 - DNA, 25 bp, Homo sapien
tctgcatctggagtggtctttgtgg

SEQ ID NO: 959592 - DNA, 25 bp, Homo sapien
tctggcctgtcagaacagggatgta

SEQ ID NO: 959593 - DNA, 25 bp, Homo sapien
tttttgcatacaggattatgtcatt

SEQ ID NO: 959594 - DNA, 25 bp, Homo sapien
gcatacaggattatgtcattttcat

SEQ ID NO: 959595 - DNA, 25 bp, Homo sapien
cttccttcaatttttgcatacagga

SEQ ID NO: 959596 - DNA, 25 bp, Homo sapien
tcaatttttgcatacaggattatgt

SEQ ID NO: 959597 - DNA, 25 bp, Homo sapien
ttgaggaagaccattgataagcctg

SEQ ID NO: 959598 - DNA, 25 bp, Homo sapien
tccacattctgtaccaatgacagct

SEQ ID NO: 959599 - DNA, 25 bp, Homo sapien
taaccggtagtgtccatggatggag

SEQ ID NO: 959600 - DNA, 25 bp, Homo sapien
gataagcctgattctatcgttccac

SEQ ID NO: 959601 - DNA, 25 bp, Homo sapien
tcttgttgctctatatgcaaatttg

SEQ ID NO: 959602 - DNA, 25 bp, Homo sapien
tgtgttagattcattggttctctct

SEQ ID NO: 959603 - DNA, 25 bp, Homo sapien
ggctacaatggagattgttcttgtt

SEQ ID NO: 959604 - DNA, 25 bp, Homo sapien
caaaagggctacaatggagattgtt

SEQ ID NO: 959605 - DNA, 25 bp, Homo sapien
gagcagatgtgcccttgggtgagga

SEQ ID NO: 959606 - DNA, 25 bp, Homo sapien
agatgtgcccttgggtgaggattcc

SEQ ID NO: 959607 - DNA, 25 bp, Homo sapien
gtgaggattcccatgagggcacagt

SEQ ID NO: 959608 - DNA, 25 bp, Homo sapien
catgagggcacagtgccctgcttct

SEQ ID NO: 959609 - DNA, 25 bp, Homo sapien
gactcacataaattatcagtgtatc

SEQ ID NO: 959610 - DNA, 25 bp, Homo sapien
taaattatcagtgtatctattaaag

SEQ ID NO: 959611 - DNA, 25 bp, Homo sapien
tcacataaattatcagtgtatctat

SEQ ID NO: 959612 - DNA, 25 bp, Homo sapien
cataaattatcagtgtatctattaa

SEQ ID NO: 959613 - DNA, 25 bp, Homo sapien
gcctgcagaggtcaataggccctga

SEQ ID NO: 959614 - DNA, 25 bp, Homo sapien
tcagaaaaggccgtgtgggctaaag

SEQ ID NO: 959615 - DNA, 25 bp, Homo sapien
gagggggtggagtcattcagagtct

SEQ ID NO: 959616 - DNA, 25 bp, Homo sapien
gctaaaggactgagccttggtgctg

SEQ ID NO: 959617 - DNA, 25 bp, Homo sapien
tggagttcccatctgactgacagct

SEQ ID NO: 959618 - DNA, 25 bp, Homo sapien
tctgtggaaagatctacatccctgg

SEQ ID NO: 959619 - DNA, 25 bp, Homo sapien
ggtggcaaaattgaactcgctgcct

SEQ ID NO: 959620 - DNA, 25 bp, Homo sapien
tgctcttgaatatcttctgtggaaa

SEQ ID NO: 959621 - DNA, 25 bp, Homo sapien
aaatcatcaacaggaaacatcagtg

SEQ ID NO: 959622 - DNA, 25 bp, Homo sapien
tcaacaggaaacatcagtgcaaatt

SEQ ID NO: 959623 - DNA, 25 bp, Homo sapien
cctttacttgagaagcagaacacag

SEQ ID NO: 959624 - DNA, 25 bp, Homo sapien
acttgagaagcagaacacagagtaa

SEQ ID NO: 959625 - DNA, 25 bp, Homo sapien
tttgttggaatgagggtattgggca

SEQ ID NO: 959626 - DNA, 25 bp, Homo sapien
agctggaagaccatttttgatagcc

SEQ ID NO: 959627 - DNA, 25 bp, Homo sapien
catttattctttgacgatatccttt

SEQ ID NO: 959628 - DNA, 25 bp, Homo sapien
agcccacccagctggaagaccattt

SEQ ID NO: 959629 - DNA, 25 bp, Homo sapien
cagctccaggctgacgctctgaaaa

SEQ ID NO: 959630 - DNA, 25 bp, Homo sapien
ctttgcagctcttgatgataacttg

SEQ ID NO: 959631 - DNA, 25 bp, Homo sapien
ggctgacgctctgaaaacttacatc

SEQ ID NO: 959632 - DNA, 25 bp, Homo sapien
gatgataacttgtggaaagcaggca

SEQ ID NO: 959633 - DNA, 25 bp, Homo sapien
ttatgatggtaattagaagcaggat

SEQ ID NO: 959634 - DNA, 25 bp, Homo sapien
acactgtaagatgagtcaggcaagg

SEQ ID NO: 959635 - DNA, 25 bp, Homo sapien
gataggaatgtggtacaccttttct

SEQ ID NO: 959636 - DNA, 25 bp, Homo sapien
tgaacaaaaggctgcttagggattt

SEQ ID NO: 959637 - DNA, 25 bp, Homo sapien
catttgtagttaataaaactagtat

SEQ ID NO: 959638 - DNA, 25 bp, Homo sapien
aaatagcttacccaagaccacatgg

SEQ ID NO: 959639 - DNA, 25 bp, Homo sapien
ggtggatactagtattattcctgtt

SEQ ID NO: 959640 - DNA, 25 bp, Homo sapien
atttcgtcatgacaacatgaggtgg

SEQ ID NO: 959641 - DNA, 25 bp, Homo sapien
aatcaatgccagctcacaataatac

SEQ ID NO: 959642 - DNA, 25 bp, Homo sapien
gaatcaatgccagctcacaataata

SEQ ID NO: 959643 - DNA, 25 bp, Homo sapien
tccaaccctggaggattaaggatct

SEQ ID NO: 959644 - DNA, 25 bp, Homo sapien
accctggaggattaaggatctgaaa

SEQ ID NO: 959645 - DNA, 25 bp, Homo sapien
cagatccaaccctggaggattaagg

SEQ ID NO: 959646 - DNA, 25 bp, Homo sapien
cttccagatccaaccctggaggatt

SEQ ID NO: 959647 - DNA, 25 bp, Homo sapien
tttcattctcagatggtggaaccaa

SEQ ID NO: 959648 - DNA, 25 bp, Homo sapien
tagaattccaaatcacttggcaaaa

SEQ ID NO: 959649 - DNA, 25 bp, Homo sapien
ctttcattctcagatggtggaacca

SEQ ID NO: 959650 - DNA, 25 bp, Homo sapien
tatttctagaattccaaatcacttg

SEQ ID NO: 959651 - DNA, 25 bp, Homo sapien
gcttatgagtaggatgagggaccac

SEQ ID NO: 959652 - DNA, 25 bp, Homo sapien
gacataggtcactcggcaagtctca

SEQ ID NO: 959653 - DNA, 25 bp, Homo sapien
aaaatgatgtgaatcccaggccccg

SEQ ID NO: 959654 - DNA, 25 bp, Homo sapien
tgccataaagggtactcagaccaaa

SEQ ID NO: 959655 - DNA, 25 bp, Homo sapien
catattccatgcactctccgggcag

SEQ ID NO: 959656 - DNA, 25 bp, Homo sapien
tgaatccccactcataaggctaatg

SEQ ID NO: 959657 - DNA, 25 bp, Homo sapien
gcaggcaagcccatgatttgaatcc

SEQ ID NO: 959658 - DNA, 25 bp, Homo sapien
gatgttctgtaagccgtgagacaca

SEQ ID NO: 959659 - DNA, 25 bp, Homo sapien
cactgggtcgagactatcttctaaa

SEQ ID NO: 959660 - DNA, 25 bp, Homo sapien
aacgacttgtctgtgagctgaattg

SEQ ID NO: 959661 - DNA, 25 bp, Homo sapien
gatcaagatgttatctaaggcccag

SEQ ID NO: 959662 - DNA, 25 bp, Homo sapien
aattggacattctcccctttggcgt

SEQ ID NO: 959663 - DNA, 25 bp, Homo sapien
ttggcatataacacgatgatgctgg

SEQ ID NO: 959664 - DNA, 25 bp, Homo sapien
aataactaaagcgacatgaacctga

SEQ ID NO: 959665 - DNA, 25 bp, Homo sapien
ttctctagctgaatccagtccgcag

SEQ ID NO: 959666 - DNA, 25 bp, Homo sapien
agagttattcttggcatataacacg

SEQ ID NO: 959667 - DNA, 25 bp, Homo sapien
aaacattagtttttgttgaatgcat

SEQ ID NO: 959668 - DNA, 25 bp, Homo sapien
ccagctagtgttgccagtgctcttt

SEQ ID NO: 959669 - DNA, 25 bp, Homo sapien
cacccagctagtgttgccagtgctc

SEQ ID NO: 959670 - DNA, 25 bp, Homo sapien
cccagctagtgttgccagtgctctt

SEQ ID NO: 959671 - DNA, 25 bp, Homo sapien
cagctagtgttgccagtgctctttc

SEQ ID NO: 959672 - DNA, 25 bp, Homo sapien
aatgtcttaaatcacaggtcccaga

SEQ ID NO: 959673 - DNA, 25 bp, Homo sapien
tataagcttcaaaggtggacccaca

SEQ ID NO: 959674 - DNA, 25 bp, Homo sapien
tctcttaaggcaggtttgactcaat

SEQ ID NO: 959675 - DNA, 25 bp, Homo sapien
gcttagcacggcacaatcaaatgta

SEQ ID NO: 959676 - DNA, 25 bp, Homo sapien
taatcagcaatgtttactgccatac

SEQ ID NO: 959677 - DNA, 25 bp, Homo sapien
ttaatcagcaatgtttactgccata

SEQ ID NO: 959678 - DNA, 25 bp, Homo sapien
attggggcagcgtcttaggctttgc

SEQ ID NO: 959679 - DNA, 25 bp, Homo sapien
ctatttgataatgaacttctcaaag

SEQ ID NO: 959680 - DNA, 25 bp, Homo sapien
cattgctcatagctaccaggcccag

SEQ ID NO: 959681 - DNA, 25 bp, Homo sapien
ctcaagaacctcattaggcactgcc

SEQ ID NO: 959682 - DNA, 25 bp, Homo sapien
tctaggagggcacgcatgttcccct

SEQ ID NO: 959683 - DNA, 25 bp, Homo sapien
ttcaagtgacttgggttgttggcag

SEQ ID NO: 959684 - DNA, 25 bp, Homo sapien
ctggggacatatacacagacccacc

SEQ ID NO: 959685 - DNA, 25 bp, Homo sapien
tggaaaattggaggacagaagctgt

SEQ ID NO: 959686 - DNA, 25 bp, Homo sapien
aaattggaggacagaagctgttgtt

SEQ ID NO: 959687 - DNA, 25 bp, Homo sapien
caatggaaaattggaggacagaagc

SEQ ID NO: 959688 - DNA, 25 bp, Homo sapien
acagaagctgttgttgtattaaggc

SEQ ID NO: 959689 - DNA, 25 bp, Homo sapien
cacagaaggtgacggcattgccatg

SEQ ID NO: 959690 - DNA, 25 bp, Homo sapien
tctcgtgggccatatggttcacaga

SEQ ID NO: 959691 - DNA, 25 bp, Homo sapien
atggttcacagaaggtgacggcatt

SEQ ID NO: 959692 - DNA, 25 bp, Homo sapien
gttctcgtgggccatatggttcaca

SEQ ID NO: 959693 - DNA, 25 bp, Homo sapien
agtctcacagttgttacattcaacc

SEQ ID NO: 959694 - DNA, 25 bp, Homo sapien
tgttgatgaacacctgggatgattc

SEQ ID NO: 959695 - DNA, 25 bp, Homo sapien
tgttgcgactgacaataattcattc

SEQ ID NO: 959696 - DNA, 25 bp, Homo sapien
tatcactgtggtgtatccatcctcc

SEQ ID NO: 959697 - DNA, 25 bp, Homo sapien
ttccccattcacataaaatactggc

SEQ ID NO: 959698 - DNA, 25 bp, Homo sapien
aattgcagttggtggtaggagtcaa

SEQ ID NO: 959699 - DNA, 25 bp, Homo sapien
tcatctctcaggataatgctgtcac

SEQ ID NO: 959700 - DNA, 25 bp, Homo sapien
gataatgctgtcactatgtatttca

SEQ ID NO: 959701 - DNA, 25 bp, Homo sapien
tggtaggagtcaaagtcatctctca

SEQ ID NO: 959702 - DNA, 25 bp, Homo sapien
ctagatgtgggtgcacagtgacatc

SEQ ID NO: 959703 - DNA, 25 bp, Homo sapien
gatgtgggtgcacagtgacatctgt

SEQ ID NO: 959704 - DNA, 25 bp, Homo sapien
gggtgcacagtgacatctgttggag

SEQ ID NO: 959705 - DNA, 25 bp, Homo sapien
gtgggtgcacagtgacatctgttgg

SEQ ID NO: 959706 - DNA, 25 bp, Homo sapien
gaaggacagttattgcaggtacaca

SEQ ID NO: 959707 - DNA, 25 bp, Homo sapien
cacatattattcaggagaaggacag

SEQ ID NO: 959708 - DNA, 25 bp, Homo sapien
gatatgtatgcaagatgcatgcccc

SEQ ID NO: 959709 - DNA, 25 bp, Homo sapien
gaggtacagactggctggcaattaa

SEQ ID NO: 959710 - DNA, 25 bp, Homo sapien
gacagatcagggaagtcctgaaatc

SEQ ID NO: 959711 - DNA, 25 bp, Homo sapien
cagatcagggaagtcctgaaatcca

SEQ ID NO: 959712 - DNA, 25 bp, Homo sapien
ctaaatgtggagatgacgttggaga

SEQ ID NO: 959713 - DNA, 25 bp, Homo sapien
gatgggtgtggaaagatctaaatgt

SEQ ID NO: 959714 - DNA, 25 bp, Homo sapien
ctgctgggctaaagcatctttgaaa

SEQ ID NO: 959715 - DNA, 25 bp, Homo sapien
ctgggctaaagcatctttgaaaata

SEQ ID NO: 959716 - DNA, 25 bp, Homo sapien
gctgggctaaagcatctttgaaaat

SEQ ID NO: 959717 - DNA, 25 bp, Homo sapien
gggctaaagcatctttgaaaataac

SEQ ID NO: 959718 - DNA, 25 bp, Homo sapien
ctggccccggtgtgttgctgtagcc

SEQ ID NO: 959719 - DNA, 25 bp, Homo sapien
tgtcttctggttttactatataaag

SEQ ID NO: 959720 - DNA, 25 bp, Homo sapien
tctggtatattagttgacttgtcca

SEQ ID NO: 959721 - DNA, 25 bp, Homo sapien
ctactgctttgttaatgaggtctgg

SEQ ID NO: 959722 - DNA, 25 bp, Homo sapien
gctttgttaatgaggtctggtatat

SEQ ID NO: 959723 - DNA, 25 bp, Homo sapien
tatctactgctttgttaatgaggtc

SEQ ID NO: 959724 - DNA, 25 bp, Homo sapien
tggaagagcattcgttaatcagcat

SEQ ID NO: 959725 - DNA, 25 bp, Homo sapien
cagctggaagagcattcgttaatca

SEQ ID NO: 959726 - DNA, 25 bp, Homo sapien
ttacagctggaagagcattcgttaa

SEQ ID NO: 959727 - DNA, 25 bp, Homo sapien
ctggaagagcattcgttaatcagca

SEQ ID NO: 959728 - DNA, 25 bp, Homo sapien
gaactcatttattacatcaattttc

SEQ ID NO: 959729 - DNA, 25 bp, Homo sapien
cctattatgaactcatttattacat

SEQ ID NO: 959730 - DNA, 25 bp, Homo sapien
tatgaactcatttattacatcaatt

SEQ ID NO: 959731 - DNA, 25 bp, Homo sapien
tattatgaactcatttattacatca

SEQ ID NO: 959732 - DNA, 25 bp, Homo sapien
gataaatcccaaatgttgtctgaag

SEQ ID NO: 959733 - DNA, 25 bp, Homo sapien
cccaaatgttgtctgaagttgctgg

SEQ ID NO: 959734 - DNA, 25 bp, Homo sapien
ctgcatgattgataacaaagccaaa

SEQ ID NO: 959735 - DNA, 25 bp, Homo sapien
caaaatattaatgaggataaatccc

SEQ ID NO: 959736 - DNA, 25 bp, Homo sapien
agtaacttgcaattgttgctcatca

SEQ ID NO: 959737 - DNA, 25 bp, Homo sapien
tcatggatgagtaacttgcaattgt

SEQ ID NO: 959738 - DNA, 25 bp, Homo sapien
gggacttgcgtttcatgaaataatt

SEQ ID NO: 959739 - DNA, 25 bp, Homo sapien
taatttaatatctaatcgggtatct

SEQ ID NO: 959740 - DNA, 25 bp, Homo sapien
atgtcacatattgggctgtcctgcc

SEQ ID NO: 959741 - DNA, 25 bp, Homo sapien
tctatgtcacatattgggctgtcct

SEQ ID NO: 959742 - DNA, 25 bp, Homo sapien
ccctcaactcagaatcctgcttttt

SEQ ID NO: 959743 - DNA, 25 bp, Homo sapien
gagtctatgtcacatattgggctgt

SEQ ID NO: 959744 - DNA, 25 bp, Homo sapien
gctttaatgtgcatccttgcacctc

SEQ ID NO: 959745 - DNA, 25 bp, Homo sapien
gcagaaaataggacattgagtccat

SEQ ID NO: 959746 - DNA, 25 bp, Homo sapien
ggttgatgtgtaggctttaatgtgc

SEQ ID NO: 959747 - DNA, 25 bp, Homo sapien
ccacctcttcgtggttgatgtgtag

SEQ ID NO: 959748 - DNA, 25 bp, Homo sapien
cttgagggttataaaatgtgcagca

SEQ ID NO: 959749 - DNA, 25 bp, Homo sapien
gcatcttgagggttataaaatgtgc

SEQ ID NO: 959750 - DNA, 25 bp, Homo sapien
aaggcatcttgagggttataaaatg

SEQ ID NO: 959751 - DNA, 25 bp, Homo sapien
ctgttatcacatattacaaaaggca

SEQ ID NO: 959752 - DNA, 25 bp, Homo sapien
cttagcaaataaggatgccatctca

SEQ ID NO: 959753 - DNA, 25 bp, Homo sapien
taaggatgccatctcaaatctgagc

SEQ ID NO: 959754 - DNA, 25 bp, Homo sapien
tttgcacttagcaaataaggatgcc

SEQ ID NO: 959755 - DNA, 25 bp, Homo sapien
tgtaaccatctttgcacttagcaaa

SEQ ID NO: 959756 - DNA, 25 bp, Homo sapien
ctgtctttgcgagtttttgaagctc

SEQ ID NO: 959757 - DNA, 25 bp, Homo sapien
gaagctcttgcttcaaataataggt

SEQ ID NO: 959758 - DNA, 25 bp, Homo sapien
agctcttgcttcaaataataggtgg

SEQ ID NO: 959759 - DNA, 25 bp, Homo sapien
ctcttgcttcaaataataggtggtt

SEQ ID NO: 959760 - DNA, 25 bp, Homo sapien
ttaactggaccacaatatgtaggat

SEQ ID NO: 959761 - DNA, 25 bp, Homo sapien
actggaccacaatatgtaggatata

SEQ ID NO: 959762 - DNA, 25 bp, Homo sapien
tcagaagattaactggaccacaata

SEQ ID NO: 959763 - DNA, 25 bp, Homo sapien
agattaactggaccacaatatgtag

SEQ ID NO: 959764 - DNA, 25 bp, Homo sapien
gatgaaactgaggttggttgtgggc

SEQ ID NO: 959765 - DNA, 25 bp, Homo sapien
gaggttggttgtgggcaggtgactc

SEQ ID NO: 959766 - DNA, 25 bp, Homo sapien
aaactgaggttggttgtgggcaggt

SEQ ID NO: 959767 - DNA, 25 bp, Homo sapien
cctgtgcccgcaggtggagcaatcc

SEQ ID NO: 959768 - DNA, 25 bp, Homo sapien
ggttaccaaactggtggtcagacat

SEQ ID NO: 959769 - DNA, 25 bp, Homo sapien
aactggttaccaaactggtggtcag

SEQ ID NO: 959770 - DNA, 25 bp, Homo sapien
ccaaactggtggtcagacatgatcc

SEQ ID NO: 959771 - DNA, 25 bp, Homo sapien
gtgagaggctaccacactgcacata

SEQ ID NO: 959772 - DNA, 25 bp, Homo sapien
gcacatgctctgctttcaatacagc

SEQ ID NO: 959773 - DNA, 25 bp, Homo sapien
aacttctatgtgctcttcaaggcaa

SEQ ID NO: 959774 - DNA, 25 bp, Homo sapien
ttcaaggcaaggctcaatgtagtct

SEQ ID NO: 959775 - DNA, 25 bp, Homo sapien
tctctactaggctaacttctatgtg

SEQ ID NO: 959776 - DNA, 25 bp, Homo sapien
gcccagtcctcaaagacttccctca

SEQ ID NO: 959777 - DNA, 25 bp, Homo sapien
cttactatgctaggcctaatgatac

SEQ ID NO: 959778 - DNA, 25 bp, Homo sapien
gagagaaatcacttactatgctagg

SEQ ID NO: 959779 - DNA, 25 bp, Homo sapien
gaaatcacttactatgctaggccta

SEQ ID NO: 959780 - DNA, 25 bp, Homo sapien
tgtactcagacatttcaacaaagcc

SEQ ID NO: 959781 - DNA, 25 bp, Homo sapien
ggtcaatgtactcagacatttcaac

SEQ ID NO: 959782 - DNA, 25 bp, Homo sapien
cagacatttcaacaaagccaaacat

SEQ ID NO: 959783 - DNA, 25 bp, Homo sapien
ctttcctaggtcaatgtactcagac

SEQ ID NO: 959784 - DNA, 25 bp, Homo sapien
tagataatcacttcgcactgcctgc

SEQ ID NO: 959785 - DNA, 25 bp, Homo sapien
tgtcctgatccaatagaaaccctgt

SEQ ID NO: 959786 - DNA, 25 bp, Homo sapien
tgcctgtctgtaatggaagctctct

SEQ ID NO: 959787 - DNA, 25 bp, Homo sapien
tcaaactaacggcaacatgctggct

SEQ ID NO: 959788 - DNA, 25 bp, Homo sapien
catcaccttgattactcaggcttga

SEQ ID NO: 959789 - DNA, 25 bp, Homo sapien
atttcatcaccttgattactcaggc

SEQ ID NO: 959790 - DNA, 25 bp, Homo sapien
caccttgattactcaggcttgaaca

SEQ ID NO: 959791 - DNA, 25 bp, Homo sapien
cttgattactcaggcttgaacacac

SEQ ID NO: 959792 - DNA, 25 bp, Homo sapien
ggaagcatgaccactttgcctcagt

SEQ ID NO: 959793 - DNA, 25 bp, Homo sapien
tgtttactggcatactgcagaccat

SEQ ID NO: 959794 - DNA, 25 bp, Homo sapien
ccaagaatgtatttcccaagcaaga

SEQ ID NO: 959795 - DNA, 25 bp, Homo sapien
catttgccgtattaataggacagtc

SEQ ID NO: 959796 - DNA, 25 bp, Homo sapien
tactattacgcaaagtaaaccaatg

SEQ ID NO: 959797 - DNA, 25 bp, Homo sapien
taaaccaatgagatataatgctaat

SEQ ID NO: 959798 - DNA, 25 bp, Homo sapien
cttacattctatctacagtatatga

SEQ ID NO: 959799 - DNA, 25 bp, Homo sapien
taatgctaattattcacatgatcac

SEQ ID NO: 959800 - DNA, 25 bp, Homo sapien
cacaggccagttttctttaggacat

SEQ ID NO: 959801 - DNA, 25 bp, Homo sapien
cagtggtagctagaacagatggccc

SEQ ID NO: 959802 - DNA, 25 bp, Homo sapien
gatggcccagtctgcaacatacgca

SEQ ID NO: 959803 - DNA, 25 bp, Homo sapien
tactaacaaagtgaacctcaggctg

SEQ ID NO: 959804 - DNA, 25 bp, Homo sapien
gtggtcagacatgagatcaacacag

SEQ ID NO: 959805 - DNA, 25 bp, Homo sapien
atatgagtaagagatttctgtggtc

SEQ ID NO: 959806 - DNA, 25 bp, Homo sapien
tatatgagtaagagatttctgtggt

SEQ ID NO: 959807 - DNA, 25 bp, Homo sapien
ttctgtggtcagacatgagatcaac

SEQ ID NO: 959808 - DNA, 25 bp, Homo sapien
gctaattagcattagagggctgtac

SEQ ID NO: 959809 - DNA, 25 bp, Homo sapien
ttaaaatatacatggcggttgttga

SEQ ID NO: 959810 - DNA, 25 bp, Homo sapien
gcattagagggctgtacatcttctg

SEQ ID NO: 959811 - DNA, 25 bp, Homo sapien
taaacttggctaattagcattagag

SEQ ID NO: 959812 - DNA, 25 bp, Homo sapien
gctccacgtacattagctatttgtc

SEQ ID NO: 959813 - DNA, 25 bp, Homo sapien
tttaagctccacgtacattagctat

SEQ ID NO: 959814 - DNA, 25 bp, Homo sapien
taggttttaagctccacgtacatta

SEQ ID NO: 959815 - DNA, 25 bp, Homo sapien
tctagatccttaggggatcgccaca

SEQ ID NO: 959816 - DNA, 25 bp, Homo sapien
tgatgcctgaacacttgtagatgtg

SEQ ID NO: 959817 - DNA, 25 bp, Homo sapien
gctctgtgatgcctgaacacttgta

SEQ ID NO: 959818 - DNA, 25 bp, Homo sapien
tgtagatgtgtatagtcctgtcacc

SEQ ID NO: 959819 - DNA, 25 bp, Homo sapien
gccgtcaaaaaaggtgcttgttgaa

SEQ ID NO: 959820 - DNA, 25 bp, Homo sapien
actaccacccctgaaggcagtcaaa

SEQ ID NO: 959821 - DNA, 25 bp, Homo sapien
ctccactaccacccctgaaggcagt

SEQ ID NO: 959822 - DNA, 25 bp, Homo sapien
cacccctgaaggcagtcaaaggcat

SEQ ID NO: 959823 - DNA, 25 bp, Homo sapien
ccactaccacccctgaaggcagtca

SEQ ID NO: 959824 - DNA, 25 bp, Homo sapien
tcatcgcttacatccacaacctggt

SEQ ID NO: 959825 - DNA, 25 bp, Homo sapien
ggagaaccctttagtgtctgcctca

SEQ ID NO: 959826 - DNA, 25 bp, Homo sapien
aagtttcctgtgacatcggcccctg

SEQ ID NO: 959827 - DNA, 25 bp, Homo sapien
cagccctcggttaatctgcccaagt

SEQ ID NO: 959828 - DNA, 25 bp, Homo sapien
tcattttatatggatctgtgctgtt

SEQ ID NO: 959829 - DNA, 25 bp, Homo sapien
gagaatgccgtgcaaatgctttgca

SEQ ID NO: 959830 - DNA, 25 bp, Homo sapien
caagcggagaatgccgtgcaaatgc

SEQ ID NO: 959831 - DNA, 25 bp, Homo sapien
gcggagaatgccgtgcaaatgcttt

SEQ ID NO: 959832 - DNA, 25 bp, Homo sapien
ggagaatgccgtgcaaatgctttgc

SEQ ID NO: 959833 - DNA, 25 bp, Homo sapien
cttaatgaccgatgaaaacaccttc

SEQ ID NO: 959834 - DNA, 25 bp, Homo sapien
tgcaaaacttaatgaccgatgaaaa

SEQ ID NO: 959835 - DNA, 25 bp, Homo sapien
caggaattctagcaggtgcaggaca

SEQ ID NO: 959836 - DNA, 25 bp, Homo sapien
ctgagcaagatccaggaattctagc

SEQ ID NO: 959837 - DNA, 25 bp, Homo sapien
tcaataaatagagagaaccacaggg

SEQ ID NO: 959838 - DNA, 25 bp, Homo sapien
cacacgaagggttctgtggcaccct

SEQ ID NO: 959839 - DNA, 25 bp, Homo sapien
cagccaaaaatcttcggttcttgtt

SEQ ID NO: 959840 - DNA, 25 bp, Homo sapien
ggagcagagggttccttcgctaaaa

SEQ ID NO: 959841 - DNA, 25 bp, Homo sapien
ctttttaggacagttggtgaccaca

SEQ ID NO: 959842 - DNA, 25 bp, Homo sapien
caaatctttttaggacagttggtga

SEQ ID NO: 959843 - DNA, 25 bp, Homo sapien
atctttttaggacagttggtgacca

SEQ ID NO: 959844 - DNA, 25 bp, Homo sapien
ccaaatctttttaggacagttggtg

SEQ ID NO: 959845 - DNA, 25 bp, Homo sapien
gatacactttatcctttgccaggag

SEQ ID NO: 959846 - DNA, 25 bp, Homo sapien
taagccatagccagaaacccaaatc

SEQ ID NO: 959847 - DNA, 25 bp, Homo sapien
tacctggtgtcctctgtaaaatctc

SEQ ID NO: 959848 - DNA, 25 bp, Homo sapien
gattatctaggcatttgtctcccac

SEQ ID NO: 959849 - DNA, 25 bp, Homo sapien
actaaaatatattgtgcccccacac

SEQ ID NO: 959850 - DNA, 25 bp, Homo sapien
catggagggtccatgtaatcattgt

SEQ ID NO: 959851 - DNA, 25 bp, Homo sapien
atcacaacttccaaggctgacatgg

SEQ ID NO: 959852 - DNA, 25 bp, Homo sapien
agcctcagaatcacaacttccaagg

SEQ ID NO: 959853 - DNA, 25 bp, Homo sapien
ttgctaggcaaccatgctgattggc

SEQ ID NO: 959854 - DNA, 25 bp, Homo sapien
ttccacctagtgatggaagcagcac

SEQ ID NO: 959855 - DNA, 25 bp, Homo sapien
catgctgattggcagcacatgctcc

SEQ ID NO: 959856 - DNA, 25 bp, Homo sapien
tgttattccacctagtgatggaagc

SEQ ID NO: 959857 - DNA, 25 bp, Homo sapien
gcacttcactgatgttggattccca

SEQ ID NO: 959858 - DNA, 25 bp, Homo sapien
agcaaagggcacttcactgatgttg

SEQ ID NO: 959859 - DNA, 25 bp, Homo sapien
agcagcaaagggcacttcactgatg

SEQ ID NO: 959860 - DNA, 25 bp, Homo sapien
caaagggcacttcactgatgttgga

SEQ ID NO: 959861 - DNA, 25 bp, Homo sapien
ccttcatggtgctaaattcaacggc

SEQ ID NO: 959862 - DNA, 25 bp, Homo sapien
gacagaaccacactaggaagggtcc

SEQ ID NO: 959863 - DNA, 25 bp, Homo sapien
tagcagctaaagtgcaaagccaaag

SEQ ID NO: 959864 - DNA, 25 bp, Homo sapien
caaagacatctccaatcactgtggc

SEQ ID NO: 959865 - DNA, 25 bp, Homo sapien
tactgaattgagattaaagtatttt

SEQ ID NO: 959866 - DNA, 25 bp, Homo sapien
ctgaattgagattaaagtattttag

SEQ ID NO: 959867 - DNA, 25 bp, Homo sapien
ttgagattaaagtattttagcttct

SEQ ID NO: 959868 - DNA, 25 bp, Homo sapien
gaattgagattaaagtattttagct

SEQ ID NO: 959869 - DNA, 25 bp, Homo sapien
gaatacctgtcatatatattacaag

SEQ ID NO: 959870 - DNA, 25 bp, Homo sapien
tccatataaacgaaacaactgatag

SEQ ID NO: 959871 - DNA, 25 bp, Homo sapien
tgatagatttgactacccaaaaatt

SEQ ID NO: 959872 - DNA, 25 bp, Homo sapien
gagatcatactattacacactgtca

SEQ ID NO: 959873 - DNA, 25 bp, Homo sapien
catgagattaagttttcctattggc

SEQ ID NO: 959874 - DNA, 25 bp, Homo sapien
aaagtacatgagattaagttttcct

SEQ ID NO: 959875 - DNA, 25 bp, Homo sapien
tggcagttcaattctaacagaagct

SEQ ID NO: 959876 - DNA, 25 bp, Homo sapien
taagttttcctattggcagttcaat

SEQ ID NO: 959877 - DNA, 25 bp, Homo sapien
gggttaggtctggttgccatcacag

SEQ ID NO: 959878 - DNA, 25 bp, Homo sapien
aacctgacagtcacgcctttgagac

SEQ ID NO: 959879 - DNA, 25 bp, Homo sapien
tcactgagagatcataccgggcaag

SEQ ID NO: 959880 - DNA, 25 bp, Homo sapien
acttttgctaagagtcgcacggagc

SEQ ID NO: 959881 - DNA, 25 bp, Homo sapien
tatcttaagtgctagcaccccgtag

SEQ ID NO: 959882 - DNA, 25 bp, Homo sapien
gaaactattaacaggagcctactgg

SEQ ID NO: 959883 - DNA, 25 bp, Homo sapien
ttatctcccgccatgccaatgattg

SEQ ID NO: 959884 - DNA, 25 bp, Homo sapien
ccacaaggaagttgtaaaagcactg

SEQ ID NO: 959885 - DNA, 25 bp, Homo sapien
ttttccacatactcgatgtactagc

SEQ ID NO: 959886 - DNA, 25 bp, Homo sapien
cacatactcgatgtactagcttaaa

SEQ ID NO: 959887 - DNA, 25 bp, Homo sapien
tactcgatgtactagcttaaaatac

SEQ ID NO: 959888 - DNA, 25 bp, Homo sapien
tatttttccacatactcgatgtact

SEQ ID NO: 959889 - DNA, 25 bp, Homo sapien
tgggcgcttcaatctgtcaccagcc

SEQ ID NO: 959890 - DNA, 25 bp, Homo sapien
tcaggagggctgtatgacactgaat

SEQ ID NO: 959891 - DNA, 25 bp, Homo sapien
ggtctgaaatccaagtcctaggagt

SEQ ID NO: 959892 - DNA, 25 bp, Homo sapien
gaagcagccgctccctttcaggagg

SEQ ID NO: 959893 - DNA, 25 bp, Homo sapien
cctccaagaattctcaggcgtttag

SEQ ID NO: 959894 - DNA, 25 bp, Homo sapien
cattaccaggagatgcgttcgggga

SEQ ID NO: 959895 - DNA, 25 bp, Homo sapien
gaatcccaacttgtgactccattct

SEQ ID NO: 959896 - DNA, 25 bp, Homo sapien
caggcgtttagcacaagcaccagct

SEQ ID NO: 959897 - DNA, 25 bp, Homo sapien
gggaaatgagcacctcgccctgctc

SEQ ID NO: 959898 - DNA, 25 bp, Homo sapien
gggttgcccgcaatatgcagggaaa

SEQ ID NO: 959899 - DNA, 25 bp, Homo sapien
catggtattcttgtcccggaacgta

SEQ ID NO: 959900 - DNA, 25 bp, Homo sapien
caacagcgctaggaggaaagtctgc

SEQ ID NO: 959901 - DNA, 25 bp, Homo sapien
cgccgagaagttccgcgggagacgg

SEQ ID NO: 959902 - DNA, 25 bp, Homo sapien
cattcagttttggagacgccgggac

SEQ ID NO: 959903 - DNA, 25 bp, Homo sapien
tcgggagcgggcctgggagcgggcc

SEQ ID NO: 959904 - DNA, 25 bp, Homo sapien
agagaaggcgagaagaaggcggacg

SEQ ID NO: 959905 - DNA, 25 bp, Homo sapien
agaattgaccacaatctgtagaagg

SEQ ID NO: 959906 - DNA, 25 bp, Homo sapien
gaattgaccacaatctgtagaagga

SEQ ID NO: 959907 - DNA, 25 bp, Homo sapien
atcctcttccggcagtttgttttat

SEQ ID NO: 959908 - DNA, 25 bp, Homo sapien
cctaatcctcttccggcagtttgtt

SEQ ID NO: 959909 - DNA, 25 bp, Homo sapien
tagcagccctaatcctcttccggca

SEQ ID NO: 959910 - DNA, 25 bp, Homo sapien
agccctaatcctcttccggcagttt

SEQ ID NO: 959911 - DNA, 25 bp, Homo sapien
caggaagatatggaattggttggac

SEQ ID NO: 959912 - DNA, 25 bp, Homo sapien
ttagtttttccacgcccttgatctc

SEQ ID NO: 959913 - DNA, 25 bp, Homo sapien
ctaaggacgtgaagaaaggacagga

SEQ ID NO: 959914 - DNA, 25 bp, Homo sapien
tggacgaaattattctggagggcct

SEQ ID NO: 959915 - DNA, 25 bp, Homo sapien
ttacagctcttggataggattctgt

SEQ ID NO: 959916 - DNA, 25 bp, Homo sapien
gctcttggataggattctgttttaa

SEQ ID NO: 959917 - DNA, 25 bp, Homo sapien
tttaaaaccagaagatcctcttgta

SEQ ID NO: 959918 - DNA, 25 bp, Homo sapien
taaaatgccagggtttgccaatgtc

SEQ ID NO: 959919 - DNA, 25 bp, Homo sapien
cttcagtacctaagtcacaggtcac

SEQ ID NO: 959920 - DNA, 25 bp, Homo sapien
cagtacctaagtcacaggtcaccat

SEQ ID NO: 959921 - DNA, 25 bp, Homo sapien
cattttcccttcaaatcgtaccagt

SEQ ID NO: 959922 - DNA, 25 bp, Homo sapien
caaatcgtaccagttcttcagtacc

SEQ ID NO: 959923 - DNA, 25 bp, Homo sapien
tgtgcccactccctcggacagtttt

SEQ ID NO: 959924 - DNA, 25 bp, Homo sapien
gagatcacagtctgcaaggctacac

SEQ ID NO: 959925 - DNA, 25 bp, Homo sapien
tctccataccatcctggaatgagat

SEQ ID NO: 959926 - DNA, 25 bp, Homo sapien
tgcaaggctacacttgtgcccactc

SEQ ID NO: 959927 - DNA, 25 bp, Homo sapien
aaactcctctacatcataatcttcc

SEQ ID NO: 959928 - DNA, 25 bp, Homo sapien
aaaaaactcctctacatcataatct

SEQ ID NO: 959929 - DNA, 25 bp, Homo sapien
tcaaaaaactcctctacatcataat

SEQ ID NO: 959930 - DNA, 25 bp, Homo sapien
tgcctcacccccatgtattctcttt

SEQ ID NO: 959931 - DNA, 25 bp, Homo sapien
cacaaggccctttcttctgcccaag

SEQ ID NO: 959932 - DNA, 25 bp, Homo sapien
aggccctttcttctgcccaaggctc

SEQ ID NO: 959933 - DNA, 25 bp, Homo sapien
acaaggccctttcttctgcccaagg

SEQ ID NO: 959934 - DNA, 25 bp, Homo sapien
cttctttagtgaaacacaaggccct

SEQ ID NO: 959935 - DNA, 25 bp, Homo sapien
aaaatacagactggttccgcttatc

SEQ ID NO: 959936 - DNA, 25 bp, Homo sapien
tggttccgcttatccgtgacaggct

SEQ ID NO: 959937 - DNA, 25 bp, Homo sapien
tacagactggttccgcttatccgtg

SEQ ID NO: 959938 - DNA, 25 bp, Homo sapien
ccgcttatccgtgacaggctgcaca

SEQ ID NO: 959939 - DNA, 25 bp, Homo sapien
tttggcaagcgactgcagaggctcc

SEQ ID NO: 959940 - DNA, 25 bp, Homo sapien
gggtccctggtaaatagtcttctgc

SEQ ID NO: 959941 - DNA, 25 bp, Homo sapien
gctgctggcacgttcaaagcgcagg

SEQ ID NO: 959942 - DNA, 25 bp, Homo sapien
tagaacagattgtgctcaaaccctg

SEQ ID NO: 959943 - DNA, 25 bp, Homo sapien
tgtttggacaaatccaatagagcca

SEQ ID NO: 959944 - DNA, 25 bp, Homo sapien
caatagagccaaagaactcctctcc

SEQ ID NO: 959945 - DNA, 25 bp, Homo sapien
tgaacacagcttggcttagtcattg

SEQ ID NO: 959946 - DNA, 25 bp, Homo sapien
cttggccagctaagtagctggatga

SEQ ID NO: 959947 - DNA, 25 bp, Homo sapien
tcacaagaaatcatacaagtatttt

SEQ ID NO: 959948 - DNA, 25 bp, Homo sapien
gtattttattatgtcaaagttcacc

SEQ ID NO: 959949 - DNA, 25 bp, Homo sapien
caagtattttattatgtcaaagttc

SEQ ID NO: 959950 - DNA, 25 bp, Homo sapien
ttttattatgtcaaagttcaccgtc

SEQ ID NO: 959951 - DNA, 25 bp, Homo sapien
gctattgtggtacctaatgttggac

SEQ ID NO: 959952 - DNA, 25 bp, Homo sapien
tgaacattgtttatcttccgagaca

SEQ ID NO: 959953 - DNA, 25 bp, Homo sapien
taacgctggctgacctgtgtgtgta

SEQ ID NO: 959954 - DNA, 25 bp, Homo sapien
tggaatgggaaactatagatactgc

SEQ ID NO: 959955 - DNA, 25 bp, Homo sapien
gatataccagcaatattaagggaga

SEQ ID NO: 959956 - DNA, 25 bp, Homo sapien
tctaatggactagtactagaagagc

SEQ ID NO: 959957 - DNA, 25 bp, Homo sapien
tgtgacggctgcagagaaatgtttg

SEQ ID NO: 959958 - DNA, 25 bp, Homo sapien
taattgcaagtaagttgtgacggct

SEQ ID NO: 959959 - DNA, 25 bp, Homo sapien
cctctatctcttcaaggaatggtta

SEQ ID NO: 959960 - DNA, 25 bp, Homo sapien
tcagctccttccaatgaatgtttaa

SEQ ID NO: 959961 - DNA, 25 bp, Homo sapien
tgtccaaacctttccactgtagtct

SEQ ID NO: 959962 - DNA, 25 bp, Homo sapien
gcttaactgaaactaggctcccctc

SEQ ID NO: 959963 - DNA, 25 bp, Homo sapien
cacaggtgtggctcaagttgcctag

SEQ ID NO: 959964 - DNA, 25 bp, Homo sapien
gagcctagggccaagcctaaaggaa

SEQ ID NO: 959965 - DNA, 25 bp, Homo sapien
ggactcaaatttcaggcctgggtaa

SEQ ID NO: 959966 - DNA, 25 bp, Homo sapien
cagccgagactaacaaaggttctgg

SEQ ID NO: 959967 - DNA, 25 bp, Homo sapien
gctgatcgtcatggccaaccagggt

SEQ ID NO: 959968 - DNA, 25 bp, Homo sapien
gatgaagtctagagacactgtgcat

SEQ ID NO: 959969 - DNA, 25 bp, Homo sapien
caaccagggttaacagctgaagggt

SEQ ID NO: 959970 - DNA, 25 bp, Homo sapien
cttgcaatagctctgatgaagtcta

SEQ ID NO: 959971 - DNA, 25 bp, Homo sapien
gctttaaaacttattgctgatcgtg

SEQ ID NO: 959972 - DNA, 25 bp, Homo sapien
caccagaaggattattagtaaaagc

SEQ ID NO: 959973 - DNA, 25 bp, Homo sapien
taagaaaggaagctgatccaagagc

SEQ ID NO: 959974 - DNA, 25 bp, Homo sapien
gctgaaattctttgagcgcccattg

SEQ ID NO: 959975 - DNA, 25 bp, Homo sapien
gttcagctggcaatttggatggaga

SEQ ID NO: 959976 - DNA, 25 bp, Homo sapien
tacagttcaggttcagctggcaatt

SEQ ID NO: 959977 - DNA, 25 bp, Homo sapien
aggtacagttcaggttcagctggca

SEQ ID NO: 959978 - DNA, 25 bp, Homo sapien
aggttcagctggcaatttggatgga

SEQ ID NO: 959979 - DNA, 25 bp, Homo sapien
gaacagtaatatgtccacaccaggg

SEQ ID NO: 959980 - DNA, 25 bp, Homo sapien
gaatctcatttactgcaccagtgga

SEQ ID NO: 959981 - DNA, 25 bp, Homo sapien
agtaggtatctactgcagagtggtc

SEQ ID NO: 959982 - DNA, 25 bp, Homo sapien
gcggtgatgctcttagaatctagaa

SEQ ID NO: 959983 - DNA, 25 bp, Homo sapien
cgaagtaggcattaagtaaggctcc

SEQ ID NO: 959984 - DNA, 25 bp, Homo sapien
gaagtaggcattaagtaaggctcct

SEQ ID NO: 959985 - DNA, 25 bp, Homo sapien
agcgaagtaggcattaagtaaggct

SEQ ID NO: 959986 - DNA, 25 bp, Homo sapien
gtaggcattaagtaaggctccttta

SEQ ID NO: 959987 - DNA, 25 bp, Homo sapien
ctgtccacgatactatataatattg

SEQ ID NO: 959988 - DNA, 25 bp, Homo sapien
atatttgctgttggagcaactctgc

SEQ ID NO: 959989 - DNA, 25 bp, Homo sapien
ataatctgtctagtggaaatggttt

SEQ ID NO: 959990 - DNA, 25 bp, Homo sapien
tctgctgtccacgatactatataat

SEQ ID NO: 959991 - DNA, 25 bp, Homo sapien
tggttttcttgatttttccatgatg

SEQ ID NO: 959992 - DNA, 25 bp, Homo sapien
ttggttttcttgatttttccatgat

SEQ ID NO: 959993 - DNA, 25 bp, Homo sapien
agttggttttcttgatttttccatg

SEQ ID NO: 959994 - DNA, 25 bp, Homo sapien
gttggttttcttgatttttccatga

SEQ ID NO: 959995 - DNA, 25 bp, Homo sapien
tatgaagcaaggtatgcagcaatta

SEQ ID NO: 959996 - DNA, 25 bp, Homo sapien
ttgtcagttcttgctggattgtatg

SEQ ID NO: 959997 - DNA, 25 bp, Homo sapien
acttagagtaatatggaagttccac

SEQ ID NO: 959998 - DNA, 25 bp, Homo sapien
gaagttccacatgagtatgcgctga

SEQ ID NO: 959999 - DNA, 25 bp, Homo sapien
aacataaccaccaaagtgcatatcc

SEQ ID NO: 960000 - DNA, 25 bp, Homo sapien
tgaatccaaagtagtagttttctta

SEQ ID NO: 960001 - DNA, 25 bp, Homo sapien
caaaatagcattatagcttgaaaag

SEQ ID NO: 960002 - DNA, 25 bp, Homo sapien
agtgcatatcccaaaccgattaaca

SEQ ID NO: 960003 - DNA, 25 bp, Homo sapien
gaagtatctccggtaactgtctcaa

SEQ ID NO: 960004 - DNA, 25 bp, Homo sapien
gaatgctctttagtattaactttag

SEQ ID NO: 960005 - DNA, 25 bp, Homo sapien
gtatcttgataattagctgaagaag

SEQ ID NO: 960006 - DNA, 25 bp, Homo sapien
gtaactgtctcaatacttcctctga

SEQ ID NO: 960007 - DNA, 25 bp, Homo sapien
ctttcagttgccccggatctgtgtc

SEQ ID NO: 960008 - DNA, 25 bp, Homo sapien
ttgccccggatctgtgtcatctttc

SEQ ID NO: 960009 - DNA, 25 bp, Homo sapien
agttgccccggatctgtgtcatctt

SEQ ID NO: 960010 - DNA, 25 bp, Homo sapien
tcagttgccccggatctgtgtcatc

SEQ ID NO: 960011 - DNA, 25 bp, Homo sapien
cacccaaggacatttagccagtcaa

SEQ ID NO: 960012 - DNA, 25 bp, Homo sapien
aggctcaaagattaagtcacccaag

SEQ ID NO: 960013 - DNA, 25 bp, Homo sapien
taggtatcacaccagaaaactgagg

SEQ ID NO: 960014 - DNA, 25 bp, Homo sapien
ctctatagcaatccctcaaagtagg

SEQ ID NO: 960015 - DNA, 25 bp, Homo sapien
tttgtgaatactcttatcttggttt

SEQ ID NO: 960016 - DNA, 25 bp, Homo sapien
tgattaacatggaaatagcttgaac

SEQ ID NO: 960017 - DNA, 25 bp, Homo sapien
gggactatcactacacataaaagtt

SEQ ID NO: 960018 - DNA, 25 bp, Homo sapien
tagcttgaactaatgactagccttg

SEQ ID NO: 960019 - DNA, 25 bp, Homo sapien
gcctaatgcctcagttttcgtaaga

SEQ ID NO: 960020 - DNA, 25 bp, Homo sapien
gtcttgatggcctacaaaagcaatg

SEQ ID NO: 960021 - DNA, 25 bp, Homo sapien
caatcatactgcaagaggtttttct

SEQ ID NO: 960022 - DNA, 25 bp, Homo sapien
tattccatgtaaccagaaaagttcc

SEQ ID NO: 960023 - DNA, 25 bp, Homo sapien
ttcccataaggagaagcaatcatac

SEQ ID NO: 960024 - DNA, 25 bp, Homo sapien
ttgcttttgaagtcctctgattatc

SEQ ID NO: 960025 - DNA, 25 bp, Homo sapien
atatttttgacctagaactaacttg

SEQ ID NO: 960026 - DNA, 25 bp, Homo sapien
tttcacatctttgatagacctccct

SEQ ID NO: 960027 - DNA, 25 bp, Homo sapien
tccaggtaactttctatattgcttt

SEQ ID NO: 960028 - DNA, 25 bp, Homo sapien
tccacagtttgcgagtatcacgttc

SEQ ID NO: 960029 - DNA, 25 bp, Homo sapien
agtttgcgagtatcacgttcacttg

SEQ ID NO: 960030 - DNA, 25 bp, Homo sapien
cacagtttgcgagtatcacgttcac

SEQ ID NO: 960031 - DNA, 25 bp, Homo sapien
tttctccacagtttgcgagtatcac

SEQ ID NO: 960032 - DNA, 25 bp, Homo sapien
tcacaatatttaggaaaattaagta

SEQ ID NO: 960033 - DNA, 25 bp, Homo sapien
caatatttaggaaaattaagtactg

SEQ ID NO: 960034 - DNA, 25 bp, Homo sapien
gttttccatgaatcaacactggaat

SEQ ID NO: 960035 - DNA, 25 bp, Homo sapien
tactaagtgtagagaagaagaatca

SEQ ID NO: 960036 - DNA, 25 bp, Homo sapien
agaaattattcgctttagccaaact

SEQ ID NO: 960037 - DNA, 25 bp, Homo sapien
gaattctactgaacagcagtttaag

SEQ ID NO: 960038 - DNA, 25 bp, Homo sapien
aattttagattttcagatctaagca

SEQ ID NO: 960039 - DNA, 25 bp, Homo sapien
taattttagattttcagatctaagc

SEQ ID NO: 960040 - DNA, 25 bp, Homo sapien
attttagattttcagatctaagcat

SEQ ID NO: 960041 - DNA, 25 bp, Homo sapien
cttaattttagattttcagatctaa

SEQ ID NO: 960042 - DNA, 25 bp, Homo sapien
cacagatcaaaaacagtactcaggg

SEQ ID NO: 960043 - DNA, 25 bp, Homo sapien
tcataatgttaacagcaactggtac

SEQ ID NO: 960044 - DNA, 25 bp, Homo sapien
ggtgtaataacactaaagtgtcata

SEQ ID NO: 960045 - DNA, 25 bp, Homo sapien
caactggtacacaatttggctaatc

SEQ ID NO: 960046 - DNA, 25 bp, Homo sapien
aatgaatatcaaagtagtacttcat

SEQ ID NO: 960047 - DNA, 25 bp, Homo sapien
taaatgaatatcaaagtagtacttc

SEQ ID NO: 960048 - DNA, 25 bp, Homo sapien
aaatgaatatcaaagtagtacttca

SEQ ID NO: 960049 - DNA, 25 bp, Homo sapien
ctaaatgaatatcaaagtagtactt

SEQ ID NO: 960050 - DNA, 25 bp, Homo sapien
tctatacaaagattaccagctcagg

SEQ ID NO: 960051 - DNA, 25 bp, Homo sapien
taatgaaagacctgcaatgaaagct

SEQ ID NO: 960052 - DNA, 25 bp, Homo sapien
ccaggaaagaccgaggaggattatc

SEQ ID NO: 960053 - DNA, 25 bp, Homo sapien
gattcccacaggattcgagtgctaa

SEQ ID NO: 960054 - DNA, 25 bp, Homo sapien
tcaaatctcgacaaacagtgtagaa

SEQ ID NO: 960055 - DNA, 25 bp, Homo sapien
taatgtaggcagcatagaaatcagc

SEQ ID NO: 960056 - DNA, 25 bp, Homo sapien
gatgtctgagctctttcaaatctcg

SEQ ID NO: 960057 - DNA, 25 bp, Homo sapien
gaaatcagctgaatactctggagga

SEQ ID NO: 960058 - DNA, 25 bp, Homo sapien
tatgctgtaatcagggaaatataag

SEQ ID NO: 960059 - DNA, 25 bp, Homo sapien
catccagtatttggacgaaactttt

SEQ ID NO: 960060 - DNA, 25 bp, Homo sapien
caaacggctcaaagcatccagtatt

SEQ ID NO: 960061 - DNA, 25 bp, Homo sapien
ctatgctgtaatcagggaaatataa

SEQ ID NO: 960062 - DNA, 25 bp, Homo sapien
caattcttgtaatctaagaaatcca

SEQ ID NO: 960063 - DNA, 25 bp, Homo sapien
ttgtaatctaagaaatccaggcaaa

SEQ ID NO: 960064 - DNA, 25 bp, Homo sapien
attcttgtaatctaagaaatccagg

SEQ ID NO: 960065 - DNA, 25 bp, Homo sapien
tcttgtaatctaagaaatccaggca

SEQ ID NO: 960066 - DNA, 25 bp, Homo sapien
cacaggttatttcagtagaacatcc

SEQ ID NO: 960067 - DNA, 25 bp, Homo sapien
aaagcagcctcaatgtaaagcattc

SEQ ID NO: 960068 - DNA, 25 bp, Homo sapien
aacaagcgaacaaagtcattaaatg

SEQ ID NO: 960069 - DNA, 25 bp, Homo sapien
tgtggttacttgtttaaacaagcga

SEQ ID NO: 960070 - DNA, 25 bp, Homo sapien
tatgaatagtgtcttgcttacggca

SEQ ID NO: 960071 - DNA, 25 bp, Homo sapien
gcatattctaagtgcctgtctgagt

SEQ ID NO: 960072 - DNA, 25 bp, Homo sapien
gaacaaaagtccacaacatctctgt

SEQ ID NO: 960073 - DNA, 25 bp, Homo sapien
gcttacggcatttgtaccatccatg

SEQ ID NO: 960074 - DNA, 25 bp, Homo sapien
ctttccactagcagtatgtccataa

SEQ ID NO: 960075 - DNA, 25 bp, Homo sapien
ttttcaacaacgtttgtgttacata

SEQ ID NO: 960076 - DNA, 25 bp, Homo sapien
ggtctttccactagcagtatgtcca

SEQ ID NO: 960077 - DNA, 25 bp, Homo sapien
ttcaacaacgtttgtgttacatagg

SEQ ID NO: 960078 - DNA, 25 bp, Homo sapien
tcacaggccacctcaaattgccatg

SEQ ID NO: 960079 - DNA, 25 bp, Homo sapien
gctggagtgatctgcgttccataga

SEQ ID NO: 960080 - DNA, 25 bp, Homo sapien
taagtttactcatccctatttgcca

SEQ ID NO: 960081 - DNA, 25 bp, Homo sapien
tacttttccactaatgcttcacagg

SEQ ID NO: 960082 - DNA, 25 bp, Homo sapien
gcgacaaagcaccacgttttccaag

SEQ ID NO: 960083 - DNA, 25 bp, Homo sapien
gactcgcgacaaagcaccacgtttt

SEQ ID NO: 960084 - DNA, 25 bp, Homo sapien
ttgagactcgcgacaaagcaccacg

SEQ ID NO: 960085 - DNA, 25 bp, Homo sapien
ggacacttgagactcgcgacaaagc

SEQ ID NO: 960086 - DNA, 25 bp, Homo sapien
gacccttgcacaagacggagcctct

SEQ ID NO: 960087 - DNA, 25 bp, Homo sapien
gcacaagacggagcctctcccgagt

SEQ ID NO: 960088 - DNA, 25 bp, Homo sapien
aggcaccaccgcagaggccagtgca

SEQ ID NO: 960089 - DNA, 25 bp, Homo sapien
acaggacccttgcacaagacggagc

SEQ ID NO: 960090 - DNA, 25 bp, Homo sapien
gctgcggcgtgacggcagcgcgtac

SEQ ID NO: 960091 - DNA, 25 bp, Homo sapien
cagcgtcgtgggaggagcctgcgct

SEQ ID NO: 960092 - DNA, 25 bp, Homo sapien
cgccgctctagtctcagggccggaa

SEQ ID NO: 960093 - DNA, 25 bp, Homo sapien
gtctcagggccggaaccatcctctt

SEQ ID NO: 960094 - DNA, 25 bp, Homo sapien
tgtgcgcgccgaggttttgcccatt

SEQ ID NO: 960095 - DNA, 25 bp, Homo sapien
ggatttcgggctgacgctttttcca

SEQ ID NO: 960096 - DNA, 25 bp, Homo sapien
tcgggctgacgctttttccactcaa

SEQ ID NO: 960097 - DNA, 25 bp, Homo sapien
ctgtgcgcgccgaggttttgcccat

SEQ ID NO: 960098 - DNA, 25 bp, Homo sapien
tcattttccaaaggagaggtttcca

SEQ ID NO: 960099 - DNA, 25 bp, Homo sapien
catttctcagtttccaacattttcc

SEQ ID NO: 960100 - DNA, 25 bp, Homo sapien
ctcagtttccaacattttcccacat

SEQ ID NO: 960101 - DNA, 25 bp, Homo sapien
ttccactccttttcttccagacttg

SEQ ID NO: 960102 - DNA, 25 bp, Homo sapien
catctggagacagcatgccaaatta

SEQ ID NO: 960103 - DNA, 25 bp, Homo sapien
tggagacagcatgccaaattaggaa

SEQ ID NO: 960104 - DNA, 25 bp, Homo sapien
cccattcttgaacagtattgacgtg

SEQ ID NO: 960105 - DNA, 25 bp, Homo sapien
aacagtattgacgtgagctttccct

SEQ ID NO: 960106 - DNA, 25 bp, Homo sapien
catttccttgggtgttcgtaggcag

SEQ ID NO: 960107 - DNA, 25 bp, Homo sapien
tttccttgggtgttcgtaggcagct

SEQ ID NO: 960108 - DNA, 25 bp, Homo sapien
ccatttccttgggtgttcgtaggca

SEQ ID NO: 960109 - DNA, 25 bp, Homo sapien
tccttgggtgttcgtaggcagctgc

SEQ ID NO: 960110 - DNA, 25 bp, Homo sapien
atccacccaaccctggtgccgccct

SEQ ID NO: 960111 - DNA, 25 bp, Homo sapien
catccacccaaccctggtgccgccc

SEQ ID NO: 960112 - DNA, 25 bp, Homo sapien
tagcagagagccagaggattcctac

SEQ ID NO: 960113 - DNA, 25 bp, Homo sapien
cgctagcagagagccagaggattcc

SEQ ID NO: 960114 - DNA, 25 bp, Homo sapien
cagcgctagcagagagccagaggat

SEQ ID NO: 960115 - DNA, 25 bp, Homo sapien
ctagcagagagccagaggattccta

SEQ ID NO: 960116 - DNA, 25 bp, Homo sapien
tcaaagcagggagcacacttcttac

SEQ ID NO: 960117 - DNA, 25 bp, Homo sapien
gggcttggtcgtctgcttcatccgc

SEQ ID NO: 960118 - DNA, 25 bp, Homo sapien
cctggtcgtgtctgtttggactgga

SEQ ID NO: 960119 - DNA, 25 bp, Homo sapien
tttcccgctccaggggggtcgctga

SEQ ID NO: 960120 - DNA, 25 bp, Homo sapien
tgctaaatcttgacagttcatcacg

SEQ ID NO: 960121 - DNA, 25 bp, Homo sapien
tggtcttttgctaaatcttgacagt

SEQ ID NO: 960122 - DNA, 25 bp, Homo sapien
ttggtcttttgctaaatcttgacag

SEQ ID NO: 960123 - DNA, 25 bp, Homo sapien
tcttgacagttcatcacgactccct

SEQ ID NO: 960124 - DNA, 25 bp, Homo sapien
gggatagctgcagggatgtatacac

SEQ ID NO: 960125 - DNA, 25 bp, Homo sapien
tcaagtgcacatattcatcattttc

SEQ ID NO: 960126 - DNA, 25 bp, Homo sapien
gatgtatacacatccttcaagtgca

SEQ ID NO: 960127 - DNA, 25 bp, Homo sapien
aaaatacagtgagttatgggatagc

SEQ ID NO: 960128 - DNA, 25 bp, Homo sapien
tcttgtttatttcggcctgcctggt

SEQ ID NO: 960129 - DNA, 25 bp, Homo sapien
gcagcctgcttgagaacgtgtccat

SEQ ID NO: 960130 - DNA, 25 bp, Homo sapien
ctccattagactgcagcctgcttga

SEQ ID NO: 960131 - DNA, 25 bp, Homo sapien
tttcttgtttatttcggcctgcctg

SEQ ID NO: 960132 - DNA, 25 bp, Homo sapien
tcttttctctaagtcgatatgcttt

SEQ ID NO: 960133 - DNA, 25 bp, Homo sapien
ggtattcgtggcacatacatgaata

SEQ ID NO: 960134 - DNA, 25 bp, Homo sapien
ttcagagattccaagtaggtaaact

SEQ ID NO: 960135 - DNA, 25 bp, Homo sapien
taggtaaacttggtattcgtggcac

SEQ ID NO: 960136 - DNA, 25 bp, Homo sapien
gcatcaaggtcacgtactgctgatc

SEQ ID NO: 960137 - DNA, 25 bp, Homo sapien
aagtagttcatgtttggcatctcca

SEQ ID NO: 960138 - DNA, 25 bp, Homo sapien
tgatcttgcttaagaatttgcattg

SEQ ID NO: 960139 - DNA, 25 bp, Homo sapien
atctccaaatagcatcaaggtcacg

SEQ ID NO: 960140 - DNA, 25 bp, Homo sapien
caaacagcagtcttccttagagtat

SEQ ID NO: 960141 - DNA, 25 bp, Homo sapien
ctcacaaagtgggtagcaatcagat

SEQ ID NO: 960142 - DNA, 25 bp, Homo sapien
gtagaccatgaagcaaggagcatgt

SEQ ID NO: 960143 - DNA, 25 bp, Homo sapien
cttgtgaaacaaccgaagcagggct

SEQ ID NO: 960144 - DNA, 25 bp, Homo sapien
ttggtattgcagaagactgaaggga

SEQ ID NO: 960145 - DNA, 25 bp, Homo sapien
tagtgggatgtttggtattgcagaa

SEQ ID NO: 960146 - DNA, 25 bp, Homo sapien
tccaccgggctttaatagtgggatg

SEQ ID NO: 960147 - DNA, 25 bp, Homo sapien
ccgggctttaatagtgggatgtttg

SEQ ID NO: 960148 - DNA, 25 bp, Homo sapien
tggagttctacacagaccaaggtgc

SEQ ID NO: 960149 - DNA, 25 bp, Homo sapien
gaaagcctggcatttctatttccca

SEQ ID NO: 960150 - DNA, 25 bp, Homo sapien
tagatggtcagccttatgagaaaag

SEQ ID NO: 960151 - DNA, 25 bp, Homo sapien
gctgcaccttgagtgggaaacttca

SEQ ID NO: 960152 - DNA, 25 bp, Homo sapien
gagagactacttcatacaaccaggt

SEQ ID NO: 960153 - DNA, 25 bp, Homo sapien
gctgtaaagctatctctgcccctgg

SEQ ID NO: 960154 - DNA, 25 bp, Homo sapien
gagagtctacaaccacacttgctag

SEQ ID NO: 960155 - DNA, 25 bp, Homo sapien
cctgggacgcatggcctgccaaatg

SEQ ID NO: 960156 - DNA, 25 bp, Homo sapien
ggttatgacccttctaccatagaat

SEQ ID NO: 960157 - DNA, 25 bp, Homo sapien
gacttagggtccaattctatcagaa

SEQ ID NO: 960158 - DNA, 25 bp, Homo sapien
gaatagccgttgatatagccaatta

SEQ ID NO: 960159 - DNA, 25 bp, Homo sapien
caattaagcattctggtttcatggc

SEQ ID NO: 960160 - DNA, 25 bp, Homo sapien
cagcacgaagggcaggtgtacaaca

SEQ ID NO: 960161 - DNA, 25 bp, Homo sapien
gatgcagaggtcgaagcacgtttct

SEQ ID NO: 960162 - DNA, 25 bp, Homo sapien
gaaaaacgcaaagaggacgcaagct

SEQ ID NO: 960163 - DNA, 25 bp, Homo sapien
tctgtgcggtgatgaaatgctcgct

SEQ ID NO: 960164 - DNA, 25 bp, Homo sapien
ttccgggagcgaggatgcagactct

SEQ ID NO: 960165 - DNA, 25 bp, Homo sapien
aactatgtgcggaactcgcgggcca

SEQ ID NO: 960166 - DNA, 25 bp, Homo sapien
tcaacgtggtgtgcttcatccagcc

SEQ ID NO: 960167 - DNA, 25 bp, Homo sapien
tgagtgtgtctcctgcgcgctgaga

SEQ ID NO: 960168 - DNA, 25 bp, Homo sapien
tcaggtccagactcattttctccct

SEQ ID NO: 960169 - DNA, 25 bp, Homo sapien
cagggtcaggtccagactcattttc

SEQ ID NO: 960170 - DNA, 25 bp, Homo sapien
ggtccagactcattttctccctgac

SEQ ID NO: 960171 - DNA, 25 bp, Homo sapien
gggtcaggtccagactcattttctc

SEQ ID NO: 960172 - DNA, 25 bp, Homo sapien
aaatccgaaagttgagcaaggtggg

SEQ ID NO: 960173 - DNA, 25 bp, Homo sapien
actataaaatccgaaagttgagcaa

SEQ ID NO: 960174 - DNA, 25 bp, Homo sapien
aggcttcagggtagcaactataaaa

SEQ ID NO: 960175 - DNA, 25 bp, Homo sapien
gcaactataaaatccgaaagttgag

SEQ ID NO: 960176 - DNA, 25 bp, Homo sapien
tctgatgtcacctttcttccctggt

SEQ ID NO: 960177 - DNA, 25 bp, Homo sapien
tcttccctggttctattacatctgc

SEQ ID NO: 960178 - DNA, 25 bp, Homo sapien
attacatctgcttttgagtcagtag

SEQ ID NO: 960179 - DNA, 25 bp, Homo sapien
tctgcttttgagtcagtagagccca

SEQ ID NO: 960180 - DNA, 25 bp, Homo sapien
tgtgggaaggatccaggtataacca

SEQ ID NO: 960181 - DNA, 25 bp, Homo sapien
cagtggaggacagttcacgtgacct

SEQ ID NO: 960182 - DNA, 25 bp, Homo sapien
tagtctgaaggaaagatctcaacgc

SEQ ID NO: 960183 - DNA, 25 bp, Homo sapien
ttaccacgagcattttgtagtctga

SEQ ID NO: 960184 - DNA, 25 bp, Homo sapien
tatcgtaggtttccagctggacaag

SEQ ID NO: 960185 - DNA, 25 bp, Homo sapien
cagatttagggtgctagaataagca

SEQ ID NO: 960186 - DNA, 25 bp, Homo sapien
tgatgtcctcttacttcccttgata

SEQ ID NO: 960187 - DNA, 25 bp, Homo sapien
caaggccctggtgcagatttagggt

SEQ ID NO: 960188 - DNA, 25 bp, Homo sapien
gctgggatccacgaatgaggtgtaa

SEQ ID NO: 960189 - DNA, 25 bp, Homo sapien
gacttgaaccagcaacacatctttg

SEQ ID NO: 960190 - DNA, 25 bp, Homo sapien
tgccaattgacagcttcctggtgag

SEQ ID NO: 960191 - DNA, 25 bp, Homo sapien
catagtcgcttcctctaatttcaag

SEQ ID NO: 960192 - DNA, 25 bp, Homo sapien
tgagcaacacgtgattgcgcccaga

SEQ ID NO: 960193 - DNA, 25 bp, Homo sapien
gaaagcattctgtagaaggacaaca

SEQ ID NO: 960194 - DNA, 25 bp, Homo sapien
tcaggatccctagcagagcaatttc

SEQ ID NO: 960195 - DNA, 25 bp, Homo sapien
gacaacatcgttaggctcttcatag

SEQ ID NO: 960196 - DNA, 25 bp, Homo sapien
gtggaaggcacttttctgggtcttc

SEQ ID NO: 960197 - DNA, 25 bp, Homo sapien
tctgggtcttcttctaggaggtaca

SEQ ID NO: 960198 - DNA, 25 bp, Homo sapien
acaaccaaagcagggtggaaggcac

SEQ ID NO: 960199 - DNA, 25 bp, Homo sapien
tagtccacaaccaaagcagggtgga

SEQ ID NO: 960200 - DNA, 25 bp, Homo sapien
ccagcagtgcaatagtggtaacagc

SEQ ID NO: 960201 - DNA, 25 bp, Homo sapien
ctaataggagacattgttccattgt

SEQ ID NO: 960202 - DNA, 25 bp, Homo sapien
tgttccattgttggaggattgggaa

SEQ ID NO: 960203 - DNA, 25 bp, Homo sapien
gctggctttccattaggttctgcta

SEQ ID NO: 960204 - DNA, 25 bp, Homo sapien
gggatttccaggattcatggtgttc

SEQ ID NO: 960205 - DNA, 25 bp, Homo sapien
taacagtggtagaattctgtttccg

SEQ ID NO: 960206 - DNA, 25 bp, Homo sapien
gtggtagaattctgtttccgaataa

SEQ ID NO: 960207 - DNA, 25 bp, Homo sapien
caggattcatggtgttctctccttc

SEQ ID NO: 960208 - DNA, 25 bp, Homo sapien
aggaaaaatggttatcagagaaact

SEQ ID NO: 960209 - DNA, 25 bp, Homo sapien
ggttatcagagaaacttgaatccat

SEQ ID NO: 960210 - DNA, 25 bp, Homo sapien
aatggttatcagagaaacttgaatc

SEQ ID NO: 960211 - DNA, 25 bp, Homo sapien
aggagtccaggaaaaatggttatca

SEQ ID NO: 960212 - DNA, 25 bp, Homo sapien
gaaagatatatggtctgccagtttc

SEQ ID NO: 960213 - DNA, 25 bp, Homo sapien
gatggaaagatatatggtctgccag

SEQ ID NO: 960214 - DNA, 25 bp, Homo sapien
tggatggaaagatatatggtctgcc

SEQ ID NO: 960215 - DNA, 25 bp, Homo sapien
tatatggtctgccagtttctgggtc

SEQ ID NO: 960216 - DNA, 25 bp, Homo sapien
tctttgaatgatacagtgtgttcca

SEQ ID NO: 960217 - DNA, 25 bp, Homo sapien
ggccagtggcttatcctttcacttc

SEQ ID NO: 960218 - DNA, 25 bp, Homo sapien
gtgaagatccctggatcttctttga

SEQ ID NO: 960219 - DNA, 25 bp, Homo sapien
tggggaacaagcaaagccttgagct

SEQ ID NO: 960220 - DNA, 25 bp, Homo sapien
aagttgcccagtgtgccatatgcca

SEQ ID NO: 960221 - DNA, 25 bp, Homo sapien
tgaacagtgagcagatttagaaccc

SEQ ID NO: 960222 - DNA, 25 bp, Homo sapien
cactgcaggtgttctccctcttgac

SEQ ID NO: 960223 - DNA, 25 bp, Homo sapien
gaagatactgcctttctcggttttg

SEQ ID NO: 960224 - DNA, 25 bp, Homo sapien
gcttttggatggcttccaagagaag

SEQ ID NO: 960225 - DNA, 25 bp, Homo sapien
tgcttttggatggcttccaagagaa

SEQ ID NO: 960226 - DNA, 25 bp, Homo sapien
cttttggatggcttccaagagaaga

SEQ ID NO: 960227 - DNA, 25 bp, Homo sapien
aggatgttcagacagtgtagagcat

SEQ ID NO: 960228 - DNA, 25 bp, Homo sapien
tggtcaagggataagagtaagttca

SEQ ID NO: 960229 - DNA, 25 bp, Homo sapien
gggatgtcatttggtcaagggataa

SEQ ID NO: 960230 - DNA, 25 bp, Homo sapien
gtaagttcagctgaccatgaaggag

SEQ ID NO: 960231 - DNA, 25 bp, Homo sapien
cttttgcatcagcaatcagatgacc

SEQ ID NO: 960232 - DNA, 25 bp, Homo sapien
tcaagctggttatctctcgaatgga

SEQ ID NO: 960233 - DNA, 25 bp, Homo sapien
gttatctctcgaatggatctgttca

SEQ ID NO: 960234 - DNA, 25 bp, Homo sapien
tggatctgttcaagacatgtcagac

SEQ ID NO: 960235 - DNA, 25 bp, Homo sapien
tgagtttcaagctggttatctctcg

SEQ ID NO: 960236 - DNA, 25 bp, Homo sapien
tctgctgttactatggttaccatcc

SEQ ID NO: 960237 - DNA, 25 bp, Homo sapien
caggtacacatataacgtgagggga

SEQ ID NO: 960238 - DNA, 25 bp, Homo sapien
acgtgaggggatatatgcagtaaag

SEQ ID NO: 960239 - DNA, 25 bp, Homo sapien
ccaactggaatccacatgagaagtc

SEQ ID NO: 960240 - DNA, 25 bp, Homo sapien
cacagcgcctagccagaaacagttt

SEQ ID NO: 960241 - DNA, 25 bp, Homo sapien
ccttggcaataagaatgcttagaaa

SEQ ID NO: 960242 - DNA, 25 bp, Homo sapien
ttcccttggcaataagaatgcttag

SEQ ID NO: 960243 - DNA, 25 bp, Homo sapien
ccacagcgcctagccagaaacagtt

SEQ ID NO: 960244 - DNA, 25 bp, Homo sapien
gatagtcactcatgcctcttctgga

SEQ ID NO: 960245 - DNA, 25 bp, Homo sapien
gaacagctgcagtcacttgggagca

SEQ ID NO: 960246 - DNA, 25 bp, Homo sapien
cagttagtgctctatacagttgcta

SEQ ID NO: 960247 - DNA, 25 bp, Homo sapien
tctatcccctaaacataatggtgag

SEQ ID NO: 960248 - DNA, 25 bp, Homo sapien
tgagatttgctaggcctgctctggc

SEQ ID NO: 960249 - DNA, 25 bp, Homo sapien
tcagaactcatgctgagtgcactga

SEQ ID NO: 960250 - DNA, 25 bp, Homo sapien
tttcagctaggattggggcctttga

SEQ ID NO: 960251 - DNA, 25 bp, Homo sapien
caaagatttcctggaaataacaaca

SEQ ID NO: 960252 - DNA, 25 bp, Homo sapien
gtgaaagaaatagtcagctggttcc

SEQ ID NO: 960253 - DNA, 25 bp, Homo sapien
agtgaaagaaatagtcagctggttc

SEQ ID NO: 960254 - DNA, 25 bp, Homo sapien
tgttaaagtagtcatccctctttct

SEQ ID NO: 960255 - DNA, 25 bp, Homo sapien
tggcacagtcagtacagctctccca

SEQ ID NO: 960256 - DNA, 25 bp, Homo sapien
tgtgtgctcattggcacagtcagta

SEQ ID NO: 960257 - DNA, 25 bp, Homo sapien
cattggcacagtcagtacagctctc

SEQ ID NO: 960258 - DNA, 25 bp, Homo sapien
tgctcattggcacagtcagtacagc

SEQ ID NO: 960259 - DNA, 25 bp, Homo sapien
cttgggccttgggctctatctccat

SEQ ID NO: 960260 - DNA, 25 bp, Homo sapien
tcttgggccttgggctctatctcca

SEQ ID NO: 960261 - DNA, 25 bp, Homo sapien
tcctactgtctgccctctagcccga

SEQ ID NO: 960262 - DNA, 25 bp, Homo sapien
actgtctgccctctagcccgacgct

SEQ ID NO: 960263 - DNA, 25 bp, Homo sapien
ctcctactgtctgccctctagcccg

SEQ ID NO: 960264 - DNA, 25 bp, Homo sapien
ctactgtctgccctctagcccgacg

SEQ ID NO: 960265 - DNA, 25 bp, Homo sapien
ctcgattggtcaacacattctccat

SEQ ID NO: 960266 - DNA, 25 bp, Homo sapien
agtgatgtcaaatggtcctcgattg

SEQ ID NO: 960267 - DNA, 25 bp, Homo sapien
ggtcctcgattggtcaacacattct

SEQ ID NO: 960268 - DNA, 25 bp, Homo sapien
caaatggtcctcgattggtcaacac

SEQ ID NO: 960269 - DNA, 25 bp, Homo sapien
gacagatcgcttaatcatattgccg

SEQ ID NO: 960270 - DNA, 25 bp, Homo sapien
cagggagttgacagatcgcttaatc

SEQ ID NO: 960271 - DNA, 25 bp, Homo sapien
gaggtgctgacatggacacctttcc

SEQ ID NO: 960272 - DNA, 25 bp, Homo sapien
ccagagcttccaaacagaggtgctg

SEQ ID NO: 960273 - DNA, 25 bp, Homo sapien
cttgcagtatttatagagtaggtag

SEQ ID NO: 960274 - DNA, 25 bp, Homo sapien
gtatttatagagtaggtagcagcac

SEQ ID NO: 960275 - DNA, 25 bp, Homo sapien
gcagtatttatagagtaggtagcag

SEQ ID NO: 960276 - DNA, 25 bp, Homo sapien
cagtatttatagagtaggtagcagc

SEQ ID NO: 960277 - DNA, 25 bp, Homo sapien
agatagagtgtctgtgttccagctc

SEQ ID NO: 960278 - DNA, 25 bp, Homo sapien
tcttgatgcccttttcacccggaaa

SEQ ID NO: 960279 - DNA, 25 bp, Homo sapien
tgtttccaaccctgcagagctaatg

SEQ ID NO: 960280 - DNA, 25 bp, Homo sapien
gagctaatgctacaccaagcctggc

SEQ ID NO: 960281 - DNA, 25 bp, Homo sapien
taatctgacctaatacaggcctaca

SEQ ID NO: 960282 - DNA, 25 bp, Homo sapien
aggcctacacatctccaactcaggg

SEQ ID NO: 960283 - DNA, 25 bp, Homo sapien
cccgaatttggcttgagctagtgat

SEQ ID NO: 960284 - DNA, 25 bp, Homo sapien
cagctctgcactgggtacccgaatt

SEQ ID NO: 960285 - DNA, 25 bp, Homo sapien
tcacttggcatcacttagctgctgc

SEQ ID NO: 960286 - DNA, 25 bp, Homo sapien
atcatgatccaggagttgagagagg

SEQ ID NO: 960287 - DNA, 25 bp, Homo sapien
catgatccaggagttgagagagggt

SEQ ID NO: 960288 - DNA, 25 bp, Homo sapien
acatcatgatccaggagttgagaga

SEQ ID NO: 960289 - DNA, 25 bp, Homo sapien
cttaggatagctggccggaatgcat

SEQ ID NO: 960290 - DNA, 25 bp, Homo sapien
gaaatatgtttgtgcgcagccctgg

SEQ ID NO: 960291 - DNA, 25 bp, Homo sapien
caaggtgctcgaaggattaacgatc

SEQ ID NO: 960292 - DNA, 25 bp, Homo sapien
gaatgcatcgtaagctgtgtgaacc

SEQ ID NO: 960293 - DNA, 25 bp, Homo sapien
catgcaatttacaacttagaggagt

SEQ ID NO: 960294 - DNA, 25 bp, Homo sapien
tatggttggattagccaatcttcct

SEQ ID NO: 960295 - DNA, 25 bp, Homo sapien
taaagcctccatagctggatccact

SEQ ID NO: 960296 - DNA, 25 bp, Homo sapien
tctgggtgatgaacttatggttgga

SEQ ID NO: 960297 - DNA, 25 bp, Homo sapien
gtcaattaaggaattctttcgagga

SEQ ID NO: 960298 - DNA, 25 bp, Homo sapien
ggaaacctaccctatgatgttacag

SEQ ID NO: 960299 - DNA, 25 bp, Homo sapien
ggttatgctgaatttgaggacctgg

SEQ ID NO: 960300 - DNA, 25 bp, Homo sapien
gcagtgcgtttaccacgtgaaccca

SEQ ID NO: 960301 - DNA, 25 bp, Homo sapien
taaggaggaagattgccactctcca

SEQ ID NO: 960302 - DNA, 25 bp, Homo sapien
agcagcaatcccctacaagtggtgg

SEQ ID NO: 960303 - DNA, 25 bp, Homo sapien
gatcagcccctaaaggtaatgccag

SEQ ID NO: 960304 - DNA, 25 bp, Homo sapien
tagctccagctcaaccatctgagga

SEQ ID NO: 960305 - DNA, 25 bp, Homo sapien
taattggtgtggattggccagtagc

SEQ ID NO: 960306 - DNA, 25 bp, Homo sapien
taatgaaaagctagggtttgccctc

SEQ ID NO: 960307 - DNA, 25 bp, Homo sapien
taatgtcccgctcctgaatacatgt

SEQ ID NO: 960308 - DNA, 25 bp, Homo sapien
ccagtagctaagaagtgggctttta

SEQ ID NO: 960309 - DNA, 25 bp, Homo sapien
tcaaatactagtgcttcccctgagg

SEQ ID NO: 960310 - DNA, 25 bp, Homo sapien
tgtagcttgcagactttaccccaga

SEQ ID NO: 960311 - DNA, 25 bp, Homo sapien
taaggaactcttacctggatgcctc

SEQ ID NO: 960312 - DNA, 25 bp, Homo sapien
tgctcagtccgctgggcatacatcc

SEQ ID NO: 960313 - DNA, 25 bp, Homo sapien
ccatccttgaagtatgagatttagc

SEQ ID NO: 960314 - DNA, 25 bp, Homo sapien
ttctaattgggagctaaatccatcc

SEQ ID NO: 960315 - DNA, 25 bp, Homo sapien
gttgtctgcgtatcaaaagtcctca

SEQ ID NO: 960316 - DNA, 25 bp, Homo sapien
ttatcacctttagctgagtggctcc

SEQ ID NO: 960317 - DNA, 25 bp, Homo sapien
tgatgtctgatcctttccgtctgag

SEQ ID NO: 960318 - DNA, 25 bp, Homo sapien
caaagcatcgtgttccgtcagtgat

SEQ ID NO: 960319 - DNA, 25 bp, Homo sapien
gcttagaggtatagaataatgctca

SEQ ID NO: 960320 - DNA, 25 bp, Homo sapien
tgtatgagtgacaataattctcccg

SEQ ID NO: 960321 - DNA, 25 bp, Homo sapien
tgtgaccgtagtttcttccatcttg

SEQ ID NO: 960322 - DNA, 25 bp, Homo sapien
tatgtgaccgtagtttcttccatct

SEQ ID NO: 960323 - DNA, 25 bp, Homo sapien
gcatatgtgaccgtagtttcttcca

SEQ ID NO: 960324 - DNA, 25 bp, Homo sapien
tttgcatatgtgaccgtagtttctt

SEQ ID NO: 960325 - DNA, 25 bp, Homo sapien
ctgaaggacgaaaattagtaggagt

SEQ ID NO: 960326 - DNA, 25 bp, Homo sapien
tcaattcttatagatgcttgttctg

SEQ ID NO: 960327 - DNA, 25 bp, Homo sapien
tgcccaactggtctcgcgaagtcct

SEQ ID NO: 960328 - DNA, 25 bp, Homo sapien
aagtgctgggacatataatcaattc

SEQ ID NO: 960329 - DNA, 25 bp, Homo sapien
gttgctttcaacttgatcagtccac

SEQ ID NO: 960330 - DNA, 25 bp, Homo sapien
gcatttaagaatgaggaatagcctt

SEQ ID NO: 960331 - DNA, 25 bp, Homo sapien
tagcctttgaaagctatactcttac

SEQ ID NO: 960332 - DNA, 25 bp, Homo sapien
tgaagtaagatcaggaagcccagaa

SEQ ID NO: 960333 - DNA, 25 bp, Homo sapien
cataaggtcatagtgaactgcctgt

SEQ ID NO: 960334 - DNA, 25 bp, Homo sapien
tggttggctgacacttcccaactcc

SEQ ID NO: 960335 - DNA, 25 bp, Homo sapien
aattgtccgcaggagtcggctgcag

SEQ ID NO: 960336 - DNA, 25 bp, Homo sapien
ggccaacaaattgtccgcaggagtc

SEQ ID NO: 960337 - DNA, 25 bp, Homo sapien
tggtggttggctgacacttcccaac

SEQ ID NO: 960338 - DNA, 25 bp, Homo sapien
attcatatgcttcagctactaaggg

SEQ ID NO: 960339 - DNA, 25 bp, Homo sapien
aatgtgtagtcctgtattagttcag

SEQ ID NO: 960340 - DNA, 25 bp, Homo sapien
tcagtcagaaatcactagcccaagc

SEQ ID NO: 960341 - DNA, 25 bp, Homo sapien
ttcaggtacccaatccagagctgcc

SEQ ID NO: 960342 - DNA, 25 bp, Homo sapien
tgaccacgctcgagtgtaccttcac

SEQ ID NO: 960343 - DNA, 25 bp, Homo sapien
tcctcaatgaccacgctcgagtgta

SEQ ID NO: 960344 - DNA, 25 bp, Homo sapien
tcaatgaccacgctcgagtgtacct

SEQ ID NO: 960345 - DNA, 25 bp, Homo sapien
aatgaccacgctcgagtgtaccttc

SEQ ID NO: 960346 - DNA, 25 bp, Homo sapien
tgacacattattatcaaccaaatat

SEQ ID NO: 960347 - DNA, 25 bp, Homo sapien
gagcaaagtaaagagagttcccaca

SEQ ID NO: 960348 - DNA, 25 bp, Homo sapien
caatatcttacatcagtgtggtcca

SEQ ID NO: 960349 - DNA, 25 bp, Homo sapien
gagcagtttaggtgtacagcaaaac

SEQ ID NO: 960350 - DNA, 25 bp, Homo sapien
caccagtccaaatggccattaataa

SEQ ID NO: 960351 - DNA, 25 bp, Homo sapien
cacaccagtccaaatggccattaat

SEQ ID NO: 960352 - DNA, 25 bp, Homo sapien
accagtccaaatggccattaataaa

SEQ ID NO: 960353 - DNA, 25 bp, Homo sapien
ctcacaccagtccaaatggccatta

SEQ ID NO: 960354 - DNA, 25 bp, Homo sapien
tcttggatttttccgcagaagttca

SEQ ID NO: 960355 - DNA, 25 bp, Homo sapien
ctcttggatttttccgcagaagttc

SEQ ID NO: 960356 - DNA, 25 bp, Homo sapien
cttggatttttccgcagaagttcag

SEQ ID NO: 960357 - DNA, 25 bp, Homo sapien
tactgtgtgaacaaggactcacatc

SEQ ID NO: 960358 - DNA, 25 bp, Homo sapien
cttactgtgtgaacaaggactcaca

SEQ ID NO: 960359 - DNA, 25 bp, Homo sapien
acttactgtgtgaacaaggactcac

SEQ ID NO: 960360 - DNA, 25 bp, Homo sapien
tgtgtgaacaaggactcacatcatc

SEQ ID NO: 960361 - DNA, 25 bp, Homo sapien
tcaaagcttccccctgtcgtttgcc

SEQ ID NO: 960362 - DNA, 25 bp, Homo sapien
ctcaaagcttccccctgtcgtttgc

SEQ ID NO: 960363 - DNA, 25 bp, Homo sapien
tctcaaagcttccccctgtcgtttg

SEQ ID NO: 960364 - DNA, 25 bp, Homo sapien
ctctgtactctggtgctggtttcag

SEQ ID NO: 960365 - DNA, 25 bp, Homo sapien
gtgctggtttcagaggaactgatgg

SEQ ID NO: 960366 - DNA, 25 bp, Homo sapien
gaggaactgatggaagaaggtttgg

SEQ ID NO: 960367 - DNA, 25 bp, Homo sapien
aggaactgatggaagaaggtttggg

SEQ ID NO: 960368 - DNA, 25 bp, Homo sapien
cgtacagttcataaacgcaggatcc

SEQ ID NO: 960369 - DNA, 25 bp, Homo sapien
ttcttcaaatacatagcctgccgga

SEQ ID NO: 960370 - DNA, 25 bp, Homo sapien
aagcaagtagaacagtcgtagagtg

SEQ ID NO: 960371 - DNA, 25 bp, Homo sapien
catttgatttgactcagaagcaagt

SEQ ID NO: 960372 - DNA, 25 bp, Homo sapien
tgtcgagctttgttggtatcttggc

SEQ ID NO: 960373 - DNA, 25 bp, Homo sapien
ccatcatttgttcctgagttggcac

SEQ ID NO: 960374 - DNA, 25 bp, Homo sapien
tttctgtggatggtaatgtcgagct

SEQ ID NO: 960375 - DNA, 25 bp, Homo sapien
ccatatgatgatacggaatgatcct

SEQ ID NO: 960376 - DNA, 25 bp, Homo sapien
actgtcacgatcagagcagctccgg

SEQ ID NO: 960377 - DNA, 25 bp, Homo sapien
acactgtgaatgctagaggatctgc

SEQ ID NO: 960378 - DNA, 25 bp, Homo sapien
gaatgagctccgaaagacactgtga

SEQ ID NO: 960379 - DNA, 25 bp, Homo sapien
tctgtagtctgctaggttagtgccc

SEQ ID NO: 960380 - DNA, 25 bp, Homo sapien
caaagtatagtaccaaatccacggg

SEQ ID NO: 960381 - DNA, 25 bp, Homo sapien
ggtatcccatttgctaatccctaag

SEQ ID NO: 960382 - DNA, 25 bp, Homo sapien
aatccacgggttggcttgagaacaa

SEQ ID NO: 960383 - DNA, 25 bp, Homo sapien
gatatcatgtgatccacagaaggca

SEQ ID NO: 960384 - DNA, 25 bp, Homo sapien
catgttctatgtcgtttgcaagtac

SEQ ID NO: 960385 - DNA, 25 bp, Homo sapien
ttcatgttctatgtcgtttgcaagt

SEQ ID NO: 960386 - DNA, 25 bp, Homo sapien
tctatgtcgtttgcaagtacagtga

SEQ ID NO: 960387 - DNA, 25 bp, Homo sapien
tcgtttgcaagtacagtgacctggt

SEQ ID NO: 960388 - DNA, 25 bp, Homo sapien
cacagccattggatagtatgagtga

SEQ ID NO: 960389 - DNA, 25 bp, Homo sapien
ttccatcggaatgaaacagccctct

SEQ ID NO: 960390 - DNA, 25 bp, Homo sapien
gaacaccagcttagtcttcctgcaa

SEQ ID NO: 960391 - DNA, 25 bp, Homo sapien
aactttgttgccaccttccatcgga

SEQ ID NO: 960392 - DNA, 25 bp, Homo sapien
aaacatagctgagttacttgcctgc

SEQ ID NO: 960393 - DNA, 25 bp, Homo sapien
ggctctaagaggctgacactcattt

SEQ ID NO: 960394 - DNA, 25 bp, Homo sapien
ccatggagggatgtattatatgacc

SEQ ID NO: 960395 - DNA, 25 bp, Homo sapien
cagcctggtacgagatattctggaa

SEQ ID NO: 960396 - DNA, 25 bp, Homo sapien
ggcaggctgcgctagactgcactgc

SEQ ID NO: 960397 - DNA, 25 bp, Homo sapien
gaaagggcaggctgcgctagactgc

SEQ ID NO: 960398 - DNA, 25 bp, Homo sapien
caggctgcgctagactgcactgctg

SEQ ID NO: 960399 - DNA, 25 bp, Homo sapien
ggctgcgctagactgcactgctgct

SEQ ID NO: 960400 - DNA, 25 bp, Homo sapien
acccagaacctgacagggcagtgag

SEQ ID NO: 960401 - DNA, 25 bp, Homo sapien
cccagaacctgacagggcagtgagg

SEQ ID NO: 960402 - DNA, 25 bp, Homo sapien
cagaacctgacagggcagtgagggg

SEQ ID NO: 960403 - DNA, 25 bp, Homo sapien
ccagaacctgacagggcagtgaggg

SEQ ID NO: 960404 - DNA, 25 bp, Homo sapien
actgaaattatatgcccacactgat

SEQ ID NO: 960405 - DNA, 25 bp, Homo sapien
caaagaatggtataacgccagtggg

SEQ ID NO: 960406 - DNA, 25 bp, Homo sapien
caaagtcatccaggctccgactgaa

SEQ ID NO: 960407 - DNA, 25 bp, Homo sapien
cactgaagcttcattgtggtgaaca

SEQ ID NO: 960408 - DNA, 25 bp, Homo sapien
gatgcagggagcaaaagtatagccc

SEQ ID NO: 960409 - DNA, 25 bp, Homo sapien
tacaacacgcaggatgtgaggattc

SEQ ID NO: 960410 - DNA, 25 bp, Homo sapien
tctgggagcctcaagatgcctggaa

SEQ ID NO: 960411 - DNA, 25 bp, Homo sapien
gattcagattgcagggctgggctac

SEQ ID NO: 960412 - DNA, 25 bp, Homo sapien
gacgcccaggatgcctcttggttag

SEQ ID NO: 960413 - DNA, 25 bp, Homo sapien
tggctaaagcccctagctggaactc

SEQ ID NO: 960414 - DNA, 25 bp, Homo sapien
tggttgatctgcaagactccgtcgc

SEQ ID NO: 960415 - DNA, 25 bp, Homo sapien
tcagcactgatatgcgctggccact

SEQ ID NO: 960416 - DNA, 25 bp, Homo sapien
cacttgtgagtgaggtctagtgcag

SEQ ID NO: 960417 - DNA, 25 bp, Homo sapien
gagtgaggtctagtgcagaagcttc

SEQ ID NO: 960418 - DNA, 25 bp, Homo sapien
tgtgagtgaggtctagtgcagaagc

SEQ ID NO: 960419 - DNA, 25 bp, Homo sapien
tgagtgaggtctagtgcagaagctt

SEQ ID NO: 960420 - DNA, 25 bp, Homo sapien
ctgactctagccctgaagtcagata

SEQ ID NO: 960421 - DNA, 25 bp, Homo sapien
aagtcagataaaccaagctcatcat

SEQ ID NO: 960422 - DNA, 25 bp, Homo sapien
tcagataaaccaagctcatcatctt

SEQ ID NO: 960423 - DNA, 25 bp, Homo sapien
cttcccatttctgcccaaccagttc

SEQ ID NO: 960424 - DNA, 25 bp, Homo sapien
tgtcgttcactgctctacttccggt

SEQ ID NO: 960425 - DNA, 25 bp, Homo sapien
gccagccatctccataggtgcagtt

SEQ ID NO: 960426 - DNA, 25 bp, Homo sapien
cataggtgcagttgactgtcgttca

SEQ ID NO: 960427 - DNA, 25 bp, Homo sapien
actgtcgttcactgctctacttccg

SEQ ID NO: 960428 - DNA, 25 bp, Homo sapien
agttcattctccacactagtgtcag

SEQ ID NO: 960429 - DNA, 25 bp, Homo sapien
ctctgtttgctcgtccaagaagttc

SEQ ID NO: 960430 - DNA, 25 bp, Homo sapien
tttgctcgtccaagaagttcattct

SEQ ID NO: 960431 - DNA, 25 bp, Homo sapien
tctccacactagtgtcagatttttc

SEQ ID NO: 960432 - DNA, 25 bp, Homo sapien
tgcattctcactgctcactaacaga

SEQ ID NO: 960433 - DNA, 25 bp, Homo sapien
cagatctcatttacatctctagtgc

SEQ ID NO: 960434 - DNA, 25 bp, Homo sapien
tctctagtgccaccggtataattcc

SEQ ID NO: 960435 - DNA, 25 bp, Homo sapien
catgcattctcactgctcactaaca

SEQ ID NO: 960436 - DNA, 25 bp, Homo sapien
cagtacagtaatgtggcctcaaaca

SEQ ID NO: 960437 - DNA, 25 bp, Homo sapien
taagtaggcctagttgcaatctgaa

SEQ ID NO: 960438 - DNA, 25 bp, Homo sapien
agcccagcattgttaagaaccgaca

SEQ ID NO: 960439 - DNA, 25 bp, Homo sapien
tattgtgccctctgtataagtaggc

SEQ ID NO: 960440 - DNA, 25 bp, Homo sapien
tccagtaaccaagttatcaccattg

SEQ ID NO: 960441 - DNA, 25 bp, Homo sapien
gtaaccaagttatcaccattgtgtg

SEQ ID NO: 960442 - DNA, 25 bp, Homo sapien
ctgattcctctccagtaaccaagtt

SEQ ID NO: 960443 - DNA, 25 bp, Homo sapien
cttgttggtataattggaactgttt

SEQ ID NO: 960444 - DNA, 25 bp, Homo sapien
gagagatattggatctttaagaagt

SEQ ID NO: 960445 - DNA, 25 bp, Homo sapien
ctttaagaagttcaaaacagcaagg

SEQ ID NO: 960446 - DNA, 25 bp, Homo sapien
tggatctttaagaagttcaaaacag

SEQ ID NO: 960447 - DNA, 25 bp, Homo sapien
taaggttatggagagatattggatc

SEQ ID NO: 960448 - DNA, 25 bp, Homo sapien
tccgtgagtccagactctattacag

SEQ ID NO: 960449 - DNA, 25 bp, Homo sapien
gactctattacagatgaattaatta

SEQ ID NO: 960450 - DNA, 25 bp, Homo sapien
ccgtgagtccagactctattacaga

SEQ ID NO: 960451 - DNA, 25 bp, Homo sapien
ctctattacagatgaattaattatc

SEQ ID NO: 960452 - DNA, 25 bp, Homo sapien
gaaaaggcagccagtaaggtacgga

SEQ ID NO: 960453 - DNA, 25 bp, Homo sapien
gagtcaagggctaccaatcaggcag

SEQ ID NO: 960454 - DNA, 25 bp, Homo sapien
taaccagaagtccaaaggtaggcag

SEQ ID NO: 960455 - DNA, 25 bp, Homo sapien
tgctaggtcttagaaaacccggctc

SEQ ID NO: 960456 - DNA, 25 bp, Homo sapien
ctatgctttctcgcacacatccagg

SEQ ID NO: 960457 - DNA, 25 bp, Homo sapien
gctttctcgcacacatccagggaaa

SEQ ID NO: 960458 - DNA, 25 bp, Homo sapien
tgctttctcgcacacatccagggaa

SEQ ID NO: 960459 - DNA, 25 bp, Homo sapien
tatgctttctcgcacacatccaggg

SEQ ID NO: 960460 - DNA, 25 bp, Homo sapien
tggcacatgataggattgtacctcc

SEQ ID NO: 960461 - DNA, 25 bp, Homo sapien
gcctaaattaatggtcagcatggag

SEQ ID NO: 960462 - DNA, 25 bp, Homo sapien
gcatgggccactgtgatcatcacta

SEQ ID NO: 960463 - DNA, 25 bp, Homo sapien
ggcacatgtcaccatcaggctagaa

SEQ ID NO: 960464 - DNA, 25 bp, Homo sapien
ataccttagtctgtccttgataaaa

SEQ ID NO: 960465 - DNA, 25 bp, Homo sapien
aatataccttagtctgtccttgata

SEQ ID NO: 960466 - DNA, 25 bp, Homo sapien
actatagacaacataggctaggtgt

SEQ ID NO: 960467 - DNA, 25 bp, Homo sapien
attccaatataccttagtctgtcct

SEQ ID NO: 960468 - DNA, 25 bp, Homo sapien
attagaaattcatctgtggaaaaaa

SEQ ID NO: 960469 - DNA, 25 bp, Homo sapien
ttagaaattcatctgtggaaaaaat

SEQ ID NO: 960470 - DNA, 25 bp, Homo sapien
gattagaaattcatctgtggaaaaa

SEQ ID NO: 960471 - DNA, 25 bp, Homo sapien
tcctaacaatcaggcctgggagaga

SEQ ID NO: 960472 - DNA, 25 bp, Homo sapien
gatgctcgggccaacaaagtcagga

SEQ ID NO: 960473 - DNA, 25 bp, Homo sapien
tcacgacatagtagaggaagcatgc

SEQ ID NO: 960474 - DNA, 25 bp, Homo sapien
gagagatgtgttccaaagctcccaa

SEQ ID NO: 960475 - DNA, 25 bp, Homo sapien
gattaatgcccttcatgacttgcct

SEQ ID NO: 960476 - DNA, 25 bp, Homo sapien
cttgattaatgcccttcatgacttg

SEQ ID NO: 960477 - DNA, 25 bp, Homo sapien
atgcccttcatgacttgccttccca

SEQ ID NO: 960478 - DNA, 25 bp, Homo sapien
tgcccttcatgacttgccttcccat

SEQ ID NO: 960479 - DNA, 25 bp, Homo sapien
gcaagtgccagatctcaggtctagg

SEQ ID NO: 960480 - DNA, 25 bp, Homo sapien
caagcctattgggagcaggagtctt

SEQ ID NO: 960481 - DNA, 25 bp, Homo sapien
actgcccaagcacgcgttcagctgt

SEQ ID NO: 960482 - DNA, 25 bp, Homo sapien
ggatctctaggagttgttttccatc

SEQ ID NO: 960483 - DNA, 25 bp, Homo sapien
cagcttcaaaagctgcgctgactcc

SEQ ID NO: 960484 - DNA, 25 bp, Homo sapien
tccacattgcttgatctttctaaaa

SEQ ID NO: 960485 - DNA, 25 bp, Homo sapien
atccacattgcttgatctttctaaa

SEQ ID NO: 960486 - DNA, 25 bp, Homo sapien
catccacattgcttgatctttctaa

SEQ ID NO: 960487 - DNA, 25 bp, Homo sapien
ctcctaaagggcaagaaccacatgt

SEQ ID NO: 960488 - DNA, 25 bp, Homo sapien
tcctaaagggcaagaaccacatgtg

SEQ ID NO: 960489 - DNA, 25 bp, Homo sapien
cctaaagggcaagaaccacatgtgt

SEQ ID NO: 960490 - DNA, 25 bp, Homo sapien
tactttcagtcttggacttcacatc

SEQ ID NO: 960491 - DNA, 25 bp, Homo sapien
tcaacaaatagcatcaagactcaac

SEQ ID NO: 960492 - DNA, 25 bp, Homo sapien
cacatcttagcagacagaggcagca

SEQ ID NO: 960493 - DNA, 25 bp, Homo sapien
tggttctccttctgctatgttactt

SEQ ID NO: 960494 - DNA, 25 bp, Homo sapien
tctcgctccgcttcaaagagtacac

SEQ ID NO: 960495 - DNA, 25 bp, Homo sapien
tgacggagcctttcaatttctcgct

SEQ ID NO: 960496 - DNA, 25 bp, Homo sapien
caattggtctgtgaatgaatgagct

SEQ ID NO: 960497 - DNA, 25 bp, Homo sapien
cacatttgctgatatggccactaag

SEQ ID NO: 960498 - DNA, 25 bp, Homo sapien
ctggcccaaatcctagcaccatgga

SEQ ID NO: 960499 - DNA, 25 bp, Homo sapien
cattctagccaaggaaagtctgctg

SEQ ID NO: 960500 - DNA, 25 bp, Homo sapien
ccttagaacatagaggcagggctcc

SEQ ID NO: 960501 - DNA, 25 bp, Homo sapien
ggaggatactacctgcccactgaat

SEQ ID NO: 960502 - DNA, 25 bp, Homo sapien
tcttattcttcaacctcaggagtgg

SEQ ID NO: 960503 - DNA, 25 bp, Homo sapien
gctatgcagagaatttatcctgggt

SEQ ID NO: 960504 - DNA, 25 bp, Homo sapien
cacttatgaacctgtcaccaaggtt

SEQ ID NO: 960505 - DNA, 25 bp, Homo sapien
gaaaatggctcacttcacatgatgt

SEQ ID NO: 960506 - DNA, 25 bp, Homo sapien
tagaaagtataaagtgctatgcaga

SEQ ID NO: 960507 - DNA, 25 bp, Homo sapien
ccccagagtagatgaaagcaggtag

SEQ ID NO: 960508 - DNA, 25 bp, Homo sapien
gacacagaacagtgagaccgtcaag

SEQ ID NO: 960509 - DNA, 25 bp, Homo sapien
cagggagcttaactaaccttcaagg

SEQ ID NO: 960510 - DNA, 25 bp, Homo sapien
caggttcctagtaggctgtgagaca

SEQ ID NO: 960511 - DNA, 25 bp, Homo sapien
gcagcggcacaatcgcgactattac

SEQ ID NO: 960512 - DNA, 25 bp, Homo sapien
caatcgcgactattacaccctcagg

SEQ ID NO: 960513 - DNA, 25 bp, Homo sapien
tattacaccctcaggttcaagcctc

SEQ ID NO: 960514 - DNA, 25 bp, Homo sapien
gcgactattacaccctcaggttcaa

SEQ ID NO: 960515 - DNA, 25 bp, Homo sapien
tcctaggagcatggataaggacatt

SEQ ID NO: 960516 - DNA, 25 bp, Homo sapien
taaggacattgcatcctcgtttgtg

SEQ ID NO: 960517 - DNA, 25 bp, Homo sapien
tatgtagctaagacagaaccttcct

SEQ ID NO: 960518 - DNA, 25 bp, Homo sapien
agtccacgttctgcataaagcccat

SEQ ID NO: 960519 - DNA, 25 bp, Homo sapien
caaaaagcgtaactgcctctatctc

SEQ ID NO: 960520 - DNA, 25 bp, Homo sapien
gcttgtctcctcaacacaaaaagcg

SEQ ID NO: 960521 - DNA, 25 bp, Homo sapien
gatgtggcattgcttgtctcctcaa

SEQ ID NO: 960522 - DNA, 25 bp, Homo sapien
gcctctatctcttctgtcaaaataa

SEQ ID NO: 960523 - DNA, 25 bp, Homo sapien
tgcaagttgataatgccagataatg

SEQ ID NO: 960524 - DNA, 25 bp, Homo sapien
tgattccaaagcaagataatgactt

SEQ ID NO: 960525 - DNA, 25 bp, Homo sapien
tgttgtggaaccaaatgcaagttga

SEQ ID NO: 960526 - DNA, 25 bp, Homo sapien
gataatgccagataatgattccaaa

SEQ ID NO: 960527 - DNA, 25 bp, Homo sapien
tctaagtccttgactttcacttctt

SEQ ID NO: 960528 - DNA, 25 bp, Homo sapien
tctctctaagtccttgactttcact

SEQ ID NO: 960529 - DNA, 25 bp, Homo sapien
ttctctctaagtccttgactttcac

SEQ ID NO: 960530 - DNA, 25 bp, Homo sapien
tctctaagtccttgactttcacttc

SEQ ID NO: 960531 - DNA, 25 bp, Homo sapien
agtgctactattggcccgttttacg

SEQ ID NO: 960532 - DNA, 25 bp, Homo sapien
caccaaaacatggtgaggtaagtgc

SEQ ID NO: 960533 - DNA, 25 bp, Homo sapien
catgtggtcattcattccatccgca

SEQ ID NO: 960534 - DNA, 25 bp, Homo sapien
ggtcattcattccatccgcaccaaa

SEQ ID NO: 960535 - DNA, 25 bp, Homo sapien
caaactaaggtagtgtgagaccaca

SEQ ID NO: 960536 - DNA, 25 bp, Homo sapien
tcagctctgttttgtgcgcttctgc

SEQ ID NO: 960537 - DNA, 25 bp, Homo sapien
tgcttaaggcaaactaaggtagtgt

SEQ ID NO: 960538 - DNA, 25 bp, Homo sapien
gaccacaccatgtaagtgtgagcat

SEQ ID NO: 960539 - DNA, 25 bp, Homo sapien
tgtcacccggtttgtcagattgcca

SEQ ID NO: 960540 - DNA, 25 bp, Homo sapien
ctctgtcacccggtttgtcagattg

SEQ ID NO: 960541 - DNA, 25 bp, Homo sapien
tctgtcacccggtttgtcagattgc

SEQ ID NO: 960542 - DNA, 25 bp, Homo sapien
ctgtcacccggtttgtcagattgcc

SEQ ID NO: 960543 - DNA, 25 bp, Homo sapien
ccagaaatgtgcagcctgctgcccc

SEQ ID NO: 960544 - DNA, 25 bp, Homo sapien
tgcccccagcagtggggatcaggac

SEQ ID NO: 960545 - DNA, 25 bp, Homo sapien
ctgctgcccccagcagtggggatca

SEQ ID NO: 960546 - DNA, 25 bp, Homo sapien
tgctgcccccagcagtggggatcag

SEQ ID NO: 960547 - DNA, 25 bp, Homo sapien
gaggaggagggccatgctgaaagta

SEQ ID NO: 960548 - DNA, 25 bp, Homo sapien
aagtagggcagtagtaaagagaaga

SEQ ID NO: 960549 - DNA, 25 bp, Homo sapien
agagagcaaagccagtcttcacaga

SEQ ID NO: 960550 - DNA, 25 bp, Homo sapien
ctgtcctggttggttaggaagaatc

SEQ ID NO: 960551 - DNA, 25 bp, Homo sapien
ctcctgcccccagggccagctccat

SEQ ID NO: 960552 - DNA, 25 bp, Homo sapien
ctgtcctttgctcctgcccccaggg

SEQ ID NO: 960553 - DNA, 25 bp, Homo sapien
tgtcctttgctcctgcccccagggc

SEQ ID NO: 960554 - DNA, 25 bp, Homo sapien
ttgctcctgcccccagggccagctc

SEQ ID NO: 960555 - DNA, 25 bp, Homo sapien
ggtctgtgacaacgggagcttcacc

SEQ ID NO: 960556 - DNA, 25 bp, Homo sapien
ctgtgtggcatcagggaggtcacct

SEQ ID NO: 960557 - DNA, 25 bp, Homo sapien
cccaaaatctgccagagtaaaggat

SEQ ID NO: 960558 - DNA, 25 bp, Homo sapien
ccaaacatgctggaatgtaggacat

SEQ ID NO: 960559 - DNA, 25 bp, Homo sapien
gataatcccagatgatccagctcca

SEQ ID NO: 960560 - DNA, 25 bp, Homo sapien
caggttattagagcccatctgggtg

SEQ ID NO: 960561 - DNA, 25 bp, Homo sapien
gatagtgttacattcctcccagata

SEQ ID NO: 960562 - DNA, 25 bp, Homo sapien
ggtaagccccatgcataatactgag

SEQ ID NO: 960563 - DNA, 25 bp, Homo sapien
tcctggcacatcctctttatccttg

SEQ ID NO: 960564 - DNA, 25 bp, Homo sapien
ctctttatccttggagccccaatgc

SEQ ID NO: 960565 - DNA, 25 bp, Homo sapien
agactatcagctcctcctggcacat

SEQ ID NO: 960566 - DNA, 25 bp, Homo sapien
gcacatcctctttatccttggagcc

SEQ ID NO: 960567 - DNA, 25 bp, Homo sapien
cacatggacacaggaaggggaacat

SEQ ID NO: 960568 - DNA, 25 bp, Homo sapien
gaacaatgagaacacatggacacag

SEQ ID NO: 960569 - DNA, 25 bp, Homo sapien
gaacacatggacacaggaaggggaa

SEQ ID NO: 960570 - DNA, 25 bp, Homo sapien
atgttctcactaataggtggaaatt

SEQ ID NO: 960571 - DNA, 25 bp, Homo sapien
ctgacccaagcttcaaggggagact

SEQ ID NO: 960572 - DNA, 25 bp, Homo sapien
tctgacccaagcttcaaggggagac

SEQ ID NO: 960573 - DNA, 25 bp, Homo sapien
tgacccaagcttcaaggggagactt

SEQ ID NO: 960574 - DNA, 25 bp, Homo sapien
ctctgacccaagcttcaaggggaga

SEQ ID NO: 960575 - DNA, 25 bp, Homo sapien
caaaacttgttatactggcagccat

SEQ ID NO: 960576 - DNA, 25 bp, Homo sapien
tgtgacttgtttcccacgtctgaaa

SEQ ID NO: 960577 - DNA, 25 bp, Homo sapien
tgtttcccacgtctgaaaggaaaga

SEQ ID NO: 960578 - DNA, 25 bp, Homo sapien
gccaaaacttgttatactggcagcc

SEQ ID NO: 960579 - DNA, 25 bp, Homo sapien
gctccacggtgaataacagaaggct

SEQ ID NO: 960580 - DNA, 25 bp, Homo sapien
cagaaggctaaatgattcccttgta

SEQ ID NO: 960581 - DNA, 25 bp, Homo sapien
gggtacatcagcattagctccacgg

SEQ ID NO: 960582 - DNA, 25 bp, Homo sapien
ggctaaatgattcccttgtaggaaa

SEQ ID NO: 960583 - DNA, 25 bp, Homo sapien
ttcacagggaggtctaagaaactgc

SEQ ID NO: 960584 - DNA, 25 bp, Homo sapien
cacatctaggaagtagccaacccag

SEQ ID NO: 960585 - DNA, 25 bp, Homo sapien
tccagggaggttcacaggccataat

SEQ ID NO: 960586 - DNA, 25 bp, Homo sapien
caaatatgcaggtgatcgagatcca

SEQ ID NO: 960587 - DNA, 25 bp, Homo sapien
tggtttccggatgtttctgctgcat

SEQ ID NO: 960588 - DNA, 25 bp, Homo sapien
ggtttccggatgtttctgctgcatc

SEQ ID NO: 960589 - DNA, 25 bp, Homo sapien
ttttcttggagcatgcgcacctggt

SEQ ID NO: 960590 - DNA, 25 bp, Homo sapien
ttcttgccgcgtcctcagatggctt

SEQ ID NO: 960591 - DNA, 25 bp, Homo sapien
gtcacaagagctggattctaacccc

SEQ ID NO: 960592 - DNA, 25 bp, Homo sapien
caaggtgtgacaggttcgatttctc

SEQ ID NO: 960593 - DNA, 25 bp, Homo sapien
actgtactgtgggttgaatggaaca

SEQ ID NO: 960594 - DNA, 25 bp, Homo sapien
cattggtatagtttttccgtgacaa

SEQ ID NO: 960595 - DNA, 25 bp, Homo sapien
ctctaatcttgacccagatggaggg

SEQ ID NO: 960596 - DNA, 25 bp, Homo sapien
tcagtgatacttgggaacagtccac

SEQ ID NO: 960597 - DNA, 25 bp, Homo sapien
tctagatcagcagagatgggagtga

SEQ ID NO: 960598 - DNA, 25 bp, Homo sapien
tcataggagccgtgacctttggttc

SEQ ID NO: 960599 - DNA, 25 bp, Homo sapien
tagccaagaggctgatcaagcgtca

SEQ ID NO: 960600 - DNA, 25 bp, Homo sapien
cattggatgagatcagaaaacgttc

SEQ ID NO: 960601 - DNA, 25 bp, Homo sapien
tatctcggaaaatctccctgctgtt

SEQ ID NO: 960602 - DNA, 25 bp, Homo sapien
ttgtccagtgatctggtgacagctg

SEQ ID NO: 960603 - DNA, 25 bp, Homo sapien
gtggtgtggtacatatttggtgcat

SEQ ID NO: 960604 - DNA, 25 bp, Homo sapien
tggttccactgaagtaactatctcg

SEQ ID NO: 960605 - DNA, 25 bp, Homo sapien
atcaggtgtccgtgctaaattcagc

SEQ ID NO: 960606 - DNA, 25 bp, Homo sapien
cgtgctaaattcagcatcaagaggg

SEQ ID NO: 960607 - DNA, 25 bp, Homo sapien
tgcactgtgcccatcaggtgtccgt

SEQ ID NO: 960608 - DNA, 25 bp, Homo sapien
tcagcatcaagagggtgacctccct

SEQ ID NO: 960609 - DNA, 25 bp, Homo sapien
tgcaccacctgcaaaggaataattt

SEQ ID NO: 960610 - DNA, 25 bp, Homo sapien
actcccgtgctgatcctttgcacca

SEQ ID NO: 960611 - DNA, 25 bp, Homo sapien
ctttgcaccacctgcaaaggaataa

SEQ ID NO: 960612 - DNA, 25 bp, Homo sapien
gctgatcctttgcaccacctgcaaa

SEQ ID NO: 960613 - DNA, 25 bp, Homo sapien
cttgtgcaggggacctcttgttttt

SEQ ID NO: 960614 - DNA, 25 bp, Homo sapien
caggaaatcgggaccaccgtggcta

SEQ ID NO: 960615 - DNA, 25 bp, Homo sapien
gaaatcgggaccaccgtggctaaca

SEQ ID NO: 960616 - DNA, 25 bp, Homo sapien
aggtcaggaaatcgggaccaccgtg

SEQ ID NO: 960617 - DNA, 25 bp, Homo sapien
gaatggtcgaatgaagagcaaaagc

SEQ ID NO: 960618 - DNA, 25 bp, Homo sapien
cagtatgaatagctgacagttgtga

SEQ ID NO: 960619 - DNA, 25 bp, Homo sapien
tgtgaaagaaatgaatggtcgaatg

SEQ ID NO: 960620 - DNA, 25 bp, Homo sapien
gaaaggcaatgcagcagtcaaggtg

SEQ ID NO: 960621 - DNA, 25 bp, Homo sapien
gcatgggtgacagagtaaaagcctg

SEQ ID NO: 960622 - DNA, 25 bp, Homo sapien
catgggtgacagagtaaaagcctgt

SEQ ID NO: 960623 - DNA, 25 bp, Homo sapien
aatggcttttcggatacactttggc

SEQ ID NO: 960624 - DNA, 25 bp, Homo sapien
gatggagccgcgtgatgaaagcact

SEQ ID NO: 960625 - DNA, 25 bp, Homo sapien
tattctgatagcaccgtggagtgta

SEQ ID NO: 960626 - DNA, 25 bp, Homo sapien
gaggctgagtgatgcccttcattag

SEQ ID NO: 960627 - DNA, 25 bp, Homo sapien
cagtgagccgtgttttaccccactg

SEQ ID NO: 960628 - DNA, 25 bp, Homo sapien
atagcttgagccaagagatcgaggc

SEQ ID NO: 960629 - DNA, 25 bp, Homo sapien
gagccgtgttttaccccactgcact

SEQ ID NO: 960630 - DNA, 25 bp, Homo sapien
aggatagcttgagccaagagatcga

SEQ ID NO: 960631 - DNA, 25 bp, Homo sapien
cagtcttcttgttttccttaggcca

SEQ ID NO: 960632 - DNA, 25 bp, Homo sapien
cagggaatatcattcagtcttcttg

SEQ ID NO: 960633 - DNA, 25 bp, Homo sapien
gtcttcttgttttccttaggccatc

SEQ ID NO: 960634 - DNA, 25 bp, Homo sapien
gggaatatcattcagtcttcttgtt

SEQ ID NO: 960635 - DNA, 25 bp, Homo sapien
gaccacatccagaggacaaggatag

SEQ ID NO: 960636 - DNA, 25 bp, Homo sapien
tagtggccaggatgcaccaggaact

SEQ ID NO: 960637 - DNA, 25 bp, Homo sapien
gacaaggatagtggccaggatgcac

SEQ ID NO: 960638 - DNA, 25 bp, Homo sapien
gaactcaaaggagaccttccgagct

SEQ ID NO: 960639 - DNA, 25 bp, Homo sapien
aatgtgctgggagatactgagaaag

SEQ ID NO: 960640 - DNA, 25 bp, Homo sapien
attgagaagagagggataaactggg

SEQ ID NO: 960641 - DNA, 25 bp, Homo sapien
tgggttggagtgtggaatgtgctgg

SEQ ID NO: 960642 - DNA, 25 bp, Homo sapien
gagtgtggaatgtgctgggagatac

SEQ ID NO: 960643 - DNA, 25 bp, Homo sapien
aacggggcctcaaacctcagcagtt

SEQ ID NO: 960644 - DNA, 25 bp, Homo sapien
tgtagctagtgagcagcaaaacggg

SEQ ID NO: 960645 - DNA, 25 bp, Homo sapien
gcccaagatcatgtagctagtgagc

SEQ ID NO: 960646 - DNA, 25 bp, Homo sapien
gccatgaggtagtagtccactttca

SEQ ID NO: 960647 - DNA, 25 bp, Homo sapien
tctgggctccagagtactgcacatc

SEQ ID NO: 960648 - DNA, 25 bp, Homo sapien
ttgtctgaaagcagttgccctctgg

SEQ ID NO: 960649 - DNA, 25 bp, Homo sapien
gatgtctccttgaaactccactctg

SEQ ID NO: 960650 - DNA, 25 bp, Homo sapien
cacattgggtggagcatgacaggaa

SEQ ID NO: 960651 - DNA, 25 bp, Homo sapien
tacttttcctaagtgcttgcttgtt

SEQ ID NO: 960652 - DNA, 25 bp, Homo sapien
acttttcctaagtgcttgcttgttt

SEQ ID NO: 960653 - DNA, 25 bp, Homo sapien
ttggtcctgtacttttcctaagtgc

SEQ ID NO: 960654 - DNA, 25 bp, Homo sapien
tcctgtacttttcctaagtgcttgc

SEQ ID NO: 960655 - DNA, 25 bp, Homo sapien
aaagccctatagctaatctttatac

SEQ ID NO: 960656 - DNA, 25 bp, Homo sapien
tacttagaactacagttactattta

SEQ ID NO: 960657 - DNA, 25 bp, Homo sapien
tttacatagtatacagccatagctt

SEQ ID NO: 960658 - DNA, 25 bp, Homo sapien
ctatttacatagtatacagccatag

SEQ ID NO: 960659 - DNA, 25 bp, Homo sapien
aagtgttctccagaacctgctccag

SEQ ID NO: 960660 - DNA, 25 bp, Homo sapien
tcggttaatgctggcactgaagtgt

SEQ ID NO: 960661 - DNA, 25 bp, Homo sapien
cagcccagcagctaatcggttaatg

SEQ ID NO: 960662 - DNA, 25 bp, Homo sapien
gctccagcacaatcttgacctccaa

SEQ ID NO: 960663 - DNA, 25 bp, Homo sapien
actggttgttacatgtttttcaagt

SEQ ID NO: 960664 - DNA, 25 bp, Homo sapien
gtttttcaagttcatccctgcttgg

SEQ ID NO: 960665 - DNA, 25 bp, Homo sapien
tatccttgacagatgatttgctttg

SEQ ID NO: 960666 - DNA, 25 bp, Homo sapien
tcctagcccattcttaccaatggga

SEQ ID NO: 960667 - DNA, 25 bp, Homo sapien
tgttgccctcctactacaaaactct

SEQ ID NO: 960668 - DNA, 25 bp, Homo sapien
aaactctcaagggatgccctttgcc

SEQ ID NO: 960669 - DNA, 25 bp, Homo sapien
aatggctggtcagccacacagggcg

SEQ ID NO: 960670 - DNA, 25 bp, Homo sapien
gcgtgggccagtagttggtccacct

SEQ ID NO: 960671 - DNA, 25 bp, Homo sapien
gctccaatgagccaagcggaatggc

SEQ ID NO: 960672 - DNA, 25 bp, Homo sapien
gggccagtagttggtccacctgaca

SEQ ID NO: 960673 - DNA, 25 bp, Homo sapien
aaagcccatcgctggctgcctcctc

SEQ ID NO: 960674 - DNA, 25 bp, Homo sapien
tcaaagcccatcgctggctgcctcc

SEQ ID NO: 960675 - DNA, 25 bp, Homo sapien
caaagcccatcgctggctgcctcct

SEQ ID NO: 960676 - DNA, 25 bp, Homo sapien
gataggttgatggttgggctggagc

SEQ ID NO: 960677 - DNA, 25 bp, Homo sapien
tggcttgtgagaaccggcttgaaga

SEQ ID NO: 960678 - DNA, 25 bp, Homo sapien
ccggcttgaagaagattgataggtt

SEQ ID NO: 960679 - DNA, 25 bp, Homo sapien
ctccgatctctaaccagtgctggct

SEQ ID NO: 960680 - DNA, 25 bp, Homo sapien
cagaggcctttgatatggttgccaa

SEQ ID NO: 960681 - DNA, 25 bp, Homo sapien
acaggccttgaacggcccttgggct

SEQ ID NO: 960682 - DNA, 25 bp, Homo sapien
cccttgggctttgcggtctggtgat

SEQ ID NO: 960683 - DNA, 25 bp, Homo sapien
gaacaatgccatcaagggccacagc

SEQ ID NO: 960684 - DNA, 25 bp, Homo sapien
taagtgaggaagtgtctgctggttg

SEQ ID NO: 960685 - DNA, 25 bp, Homo sapien
ctaagtgaggaagtgtctgctggtt

SEQ ID NO: 960686 - DNA, 25 bp, Homo sapien
ctcccctcgggtggccttgtgagga

SEQ ID NO: 960687 - DNA, 25 bp, Homo sapien
tgtgaggaagccaggaagtactgtg

SEQ ID NO: 960688 - DNA, 25 bp, Homo sapien
cccgaggaatgactagtgggtttct

SEQ ID NO: 960689 - DNA, 25 bp, Homo sapien
tccggggaagtattcacttcaactc

SEQ ID NO: 960690 - DNA, 25 bp, Homo sapien
tccctgtaaacagtggagcctggga

SEQ ID NO: 960691 - DNA, 25 bp, Homo sapien
gctgagctatgcatctccagttcct

SEQ ID NO: 960692 - DNA, 25 bp, Homo sapien
ctcttcctgtaccaccctcttcacc

SEQ ID NO: 960693 - DNA, 25 bp, Homo sapien
ttcctgtaccaccctcttcaccacc

SEQ ID NO: 960694 - DNA, 25 bp, Homo sapien
tgtactgtaatatagcctaaagatg

SEQ ID NO: 960695 - DNA, 25 bp, Homo sapien
tacccatcttctcggtatgtagatg

SEQ ID NO: 960696 - DNA, 25 bp, Homo sapien
ttcccgaggtttgatgtccaaggtc

SEQ ID NO: 960697 - DNA, 25 bp, Homo sapien
gctgccataagaagcaccacacact

SEQ ID NO: 960698 - DNA, 25 bp, Homo sapien
tccctttatttatcataatctccca

SEQ ID NO: 960699 - DNA, 25 bp, Homo sapien
acattctcttttgggcagatactaa

SEQ ID NO: 960700 - DNA, 25 bp, Homo sapien
taatctcccatatctgaatgtactc

SEQ ID NO: 960701 - DNA, 25 bp, Homo sapien
gatactaatccctttatttatcata

SEQ ID NO: 960702 - DNA, 25 bp, Homo sapien
ttttctggtcaatatattcaacctc

SEQ ID NO: 960703 - DNA, 25 bp, Homo sapien
ctcttcttcaacaaaggactataat

SEQ ID NO: 960704 - DNA, 25 bp, Homo sapien
tgagctagtccaacttgatacctga

SEQ ID NO: 960705 - DNA, 25 bp, Homo sapien
acctcatttaacacctttgcgtcca

SEQ ID NO: 960706 - DNA, 25 bp, Homo sapien
cttaggctccaggaataagatgttg

SEQ ID NO: 960707 - DNA, 25 bp, Homo sapien
gacagcagttagctgaacttaggct

SEQ ID NO: 960708 - DNA, 25 bp, Homo sapien
agttgttgtggaagtaaccctgaag

SEQ ID NO: 960709 - DNA, 25 bp, Homo sapien
taagatgttggtgaagcctgggaaa

SEQ ID NO: 960710 - DNA, 25 bp, Homo sapien
gatcttgtgtccttttgcatcccca

SEQ ID NO: 960711 - DNA, 25 bp, Homo sapien
tcagtcacgtggacctaatccagtg

SEQ ID NO: 960712 - DNA, 25 bp, Homo sapien
cactgctaggaattggtgaatccag

SEQ ID NO: 960713 - DNA, 25 bp, Homo sapien
gctactactttcaggctgtgctgag

SEQ ID NO: 960714 - DNA, 25 bp, Homo sapien
taggatttgtagaccctggaggtaa

SEQ ID NO: 960715 - DNA, 25 bp, Homo sapien
tagaccctggaggtaaacagcttcc

SEQ ID NO: 960716 - DNA, 25 bp, Homo sapien
agaaccttgttctgcctcttagtag

SEQ ID NO: 960717 - DNA, 25 bp, Homo sapien
aagccagactcatgtagaagttagg

SEQ ID NO: 960718 - DNA, 25 bp, Homo sapien
cagcctgctaggcctggcagggtcg

SEQ ID NO: 960719 - DNA, 25 bp, Homo sapien
gagccttccgaagttctttctagag

SEQ ID NO: 960720 - DNA, 25 bp, Homo sapien
ccgaagttctttctagagcagtcat

SEQ ID NO: 960721 - DNA, 25 bp, Homo sapien
ccttccgaagttctttctagagcag

SEQ ID NO: 960722 - DNA, 25 bp, Homo sapien
ggcaagggcatacaacttcattcaa

SEQ ID NO: 960723 - DNA, 25 bp, Homo sapien
tcccaactacttgaggagtgctgag

SEQ ID NO: 960724 - DNA, 25 bp, Homo sapien
tactcccctacttggcaagggcata

SEQ ID NO: 960725 - DNA, 25 bp, Homo sapien
gtgaactgcagcctacatgtacgga

SEQ ID NO: 960726 - DNA, 25 bp, Homo sapien
ctcagttgtcgctgttccttcaggg

SEQ ID NO: 960727 - DNA, 25 bp, Homo sapien
ttgcatcacgtgtcccaaatgtgtt

SEQ ID NO: 960728 - DNA, 25 bp, Homo sapien
tccactccctcagttgtcgctgttc

SEQ ID NO: 960729 - DNA, 25 bp, Homo sapien
ctttgcatcacgtgtcccaaatgtg

SEQ ID NO: 960730 - DNA, 25 bp, Homo sapien
agcaacttcttaatagaaattttga

SEQ ID NO: 960731 - DNA, 25 bp, Homo sapien
gcaacttcttaatagaaattttgaa

SEQ ID NO: 960732 - DNA, 25 bp, Homo sapien
tctcgtctctatcaccacagattag

SEQ ID NO: 960733 - DNA, 25 bp, Homo sapien
aactctccattatcccaacaggcag

SEQ ID NO: 960734 - DNA, 25 bp, Homo sapien
ttgagtagttaacagaatacccatc

SEQ ID NO: 960735 - DNA, 25 bp, Homo sapien
tcagtgctgcctcaaaacgaactgc

SEQ ID NO: 960736 - DNA, 25 bp, Homo sapien
ggaatcagataacttgactccagtg

SEQ ID NO: 960737 - DNA, 25 bp, Homo sapien
tatgggccacccagtcttaagggcc

SEQ ID NO: 960738 - DNA, 25 bp, Homo sapien
tatcactgagtctgttatgggccac

SEQ ID NO: 960739 - DNA, 25 bp, Homo sapien
gaattgtggttactgatggtatcac

SEQ ID NO: 960740 - DNA, 25 bp, Homo sapien
tcaagactaagtggatcataaatgg

SEQ ID NO: 960741 - DNA, 25 bp, Homo sapien
taaaaggagaaagttctattactca

SEQ ID NO: 960742 - DNA, 25 bp, Homo sapien
gaagttcataactcagcctaaaagg

SEQ ID NO: 960743 - DNA, 25 bp, Homo sapien
gcacagataactactggagtcatca

SEQ ID NO: 960744 - DNA, 25 bp, Homo sapien
taagatgtacttgggaagatgtttc

SEQ ID NO: 960745 - DNA, 25 bp, Homo sapien
gctgtcagctggcagtctaagatgt

SEQ ID NO: 960746 - DNA, 25 bp, Homo sapien
ccaagagctggggagcattatggct

SEQ ID NO: 960747 - DNA, 25 bp, Homo sapien
tggtccccaaaccagctgtccatga

SEQ ID NO: 960748 - DNA, 25 bp, Homo sapien
acacaggacaatgaacaggcgggct

SEQ ID NO: 960749 - DNA, 25 bp, Homo sapien
taaaagccagtcctatagcagggcc

SEQ ID NO: 960750 - DNA, 25 bp, Homo sapien
tgtctcagcgagaaaagtcgggagc

SEQ ID NO: 960751 - DNA, 25 bp, Homo sapien
aatttaccgaagatggccgctgtgc

SEQ ID NO: 960752 - DNA, 25 bp, Homo sapien
tagggatacgccctgtaccatgccg

SEQ ID NO: 960753 - DNA, 25 bp, Homo sapien
tctgtgtaaagtgatcggcaggcct

SEQ ID NO: 960754 - DNA, 25 bp, Homo sapien
tcttccagaggagcgaacgttcgga

SEQ ID NO: 960755 - DNA, 25 bp, Homo sapien
tatggtcctagccagactactccag

SEQ ID NO: 960756 - DNA, 25 bp, Homo sapien
tgaacccaccatgcagataattaac

SEQ ID NO: 960757 - DNA, 25 bp, Homo sapien
gactatgaaatctcagctgtgatgc

SEQ ID NO: 960758 - DNA, 25 bp, Homo sapien
caagtgaattctccctggcccaaat

SEQ ID NO: 960759 - DNA, 25 bp, Homo sapien
gaccagggttcacaggatactaatg

SEQ ID NO: 960760 - DNA, 25 bp, Homo sapien
taaaatgtttacacctcactgaaga

SEQ ID NO: 960761 - DNA, 25 bp, Homo sapien
tagcaagcatgatgtaggcctcagc

SEQ ID NO: 960762 - DNA, 25 bp, Homo sapien
gcattagaactgtaacttagtgcca

SEQ ID NO: 960763 - DNA, 25 bp, Homo sapien
ttggcataggagtcaaaagctgccc

SEQ ID NO: 960764 - DNA, 25 bp, Homo sapien
gactatgtgacacttctaagaaggc

SEQ ID NO: 960765 - DNA, 25 bp, Homo sapien
tatgggtaaagagccctaaactcca

SEQ ID NO: 960766 - DNA, 25 bp, Homo sapien
taaaaatcctaccagagtatgtact

SEQ ID NO: 960767 - DNA, 25 bp, Homo sapien
ggctgactagtacgtaagattatgt

SEQ ID NO: 960768 - DNA, 25 bp, Homo sapien
taaactgccccaatatactgtgtct

SEQ ID NO: 960769 - DNA, 25 bp, Homo sapien
tacttatggagcaagctacaagtcc

SEQ ID NO: 960770 - DNA, 25 bp, Homo sapien
tcagctgttaggcaagccaatgggt

SEQ ID NO: 960771 - DNA, 25 bp, Homo sapien
ggatattgtcttccgtcctagggac

SEQ ID NO: 960772 - DNA, 25 bp, Homo sapien
tcaataaagtgagggtaacagggag

SEQ ID NO: 960773 - DNA, 25 bp, Homo sapien
agatgactttcaaggtagccaaatg

SEQ ID NO: 960774 - DNA, 25 bp, Homo sapien
agtaaagatgactttcaaggtagcc

SEQ ID NO: 960775 - DNA, 25 bp, Homo sapien
tccaaactaatatgtgatttctgcc

SEQ ID NO: 960776 - DNA, 25 bp, Homo sapien
agttagaaggagtaagttctactat

SEQ ID NO: 960777 - DNA, 25 bp, Homo sapien
tgcttatattaagtggggtggggga

SEQ ID NO: 960778 - DNA, 25 bp, Homo sapien
ggagggatgtatagaagttggttaa

SEQ ID NO: 960779 - DNA, 25 bp, Homo sapien
aggagtaagttctactattttacag

SEQ ID NO: 960780 - DNA, 25 bp, Homo sapien
tactcatagctaggcttcaaagtgc

SEQ ID NO: 960781 - DNA, 25 bp, Homo sapien
ttgtgtctgcccctcatttaaaaaa

SEQ ID NO: 960782 - DNA, 25 bp, Homo sapien
aatctttaggcaactcctctaggcc

SEQ ID NO: 960783 - DNA, 25 bp, Homo sapien
tcaaagtgcctgatttcaaggtgac

SEQ ID NO: 960784 - DNA, 25 bp, Homo sapien
ggattactagccatgagtcatcata

SEQ ID NO: 960785 - DNA, 25 bp, Homo sapien
atacagggattactagccatgagtc

SEQ ID NO: 960786 - DNA, 25 bp, Homo sapien
gattactagccatgagtcatcatac

SEQ ID NO: 960787 - DNA, 25 bp, Homo sapien
aatacagggattactagccatgagt

SEQ ID NO: 960788 - DNA, 25 bp, Homo sapien
gaagagataatagtacaggttgcgt

SEQ ID NO: 960789 - DNA, 25 bp, Homo sapien
tgggatgcaagtctaaacataagct

SEQ ID NO: 960790 - DNA, 25 bp, Homo sapien
gcttcaccttatgcacactgcctga

SEQ ID NO: 960791 - DNA, 25 bp, Homo sapien
cagttaagcgctataatagagctgg

SEQ ID NO: 960792 - DNA, 25 bp, Homo sapien
tcattattctatagcaaagtgagaa

SEQ ID NO: 960793 - DNA, 25 bp, Homo sapien
caaaatgaatgttggataacttttc

SEQ ID NO: 960794 - DNA, 25 bp, Homo sapien
taaaatcagacagccgagatacatg

SEQ ID NO: 960795 - DNA, 25 bp, Homo sapien
taagaacaatgtagccaggttttaa

SEQ ID NO: 960796 - DNA, 25 bp, Homo sapien
gagatacccgccacttgctctggga

SEQ ID NO: 960797 - DNA, 25 bp, Homo sapien
taaggattacccatgagagcaagac

SEQ ID NO: 960798 - DNA, 25 bp, Homo sapien
actagaactagagaggtgggacacc

SEQ ID NO: 960799 - DNA, 25 bp, Homo sapien
gagacgggcgcttttcgacgagata

SEQ ID NO: 960800 - DNA, 25 bp, Homo sapien
tgccaggaactgtgcacttcagcca

SEQ ID NO: 960801 - DNA, 25 bp, Homo sapien
tcagatgaaggacctggcacgtcac

SEQ ID NO: 960802 - DNA, 25 bp, Homo sapien
caagcagcgttcatgatgttcctaa

SEQ ID NO: 960803 - DNA, 25 bp, Homo sapien
ggattattctagttccaagcagcgt

SEQ ID NO: 960804 - DNA, 25 bp, Homo sapien
gacctagcatataagaattcaagtg

SEQ ID NO: 960805 - DNA, 25 bp, Homo sapien
aaccatgtcatgagctcacccatca

SEQ ID NO: 960806 - DNA, 25 bp, Homo sapien
cattggaagtagtagcaacctggtt

SEQ ID NO: 960807 - DNA, 25 bp, Homo sapien
tagttgccaaattctgacctagcat

SEQ ID NO: 960808 - DNA, 25 bp, Homo sapien
actttcaaatgctatctatcatttg

SEQ ID NO: 960809 - DNA, 25 bp, Homo sapien
tctatcatttgtgggcattacataa

SEQ ID NO: 960810 - DNA, 25 bp, Homo sapien
caccatgcctataatcagccagcaa

SEQ ID NO: 960811 - DNA, 25 bp, Homo sapien
taatcagccagcaattactttcaaa

SEQ ID NO: 960812 - DNA, 25 bp, Homo sapien
caagtataagcgctctgccaagaag

SEQ ID NO: 960813 - DNA, 25 bp, Homo sapien
gaggccctcaaggactcctagttga

SEQ ID NO: 960814 - DNA, 25 bp, Homo sapien
gaaagtaatcgatcctccttgacgt

SEQ ID NO: 960815 - DNA, 25 bp, Homo sapien
agttgattccgagtcccacgtcagg

SEQ ID NO: 960816 - DNA, 25 bp, Homo sapien
cagcgccatcttgccctgacgcagt

SEQ ID NO: 960817 - DNA, 25 bp, Homo sapien
tgcgctgcggcggtggacgtgcctc

SEQ ID NO: 960818 - DNA, 25 bp, Homo sapien
cgcagttacaaaagtcacgggagaa

SEQ ID NO: 960819 - DNA, 25 bp, Homo sapien
cccaaagttttgcagaggccgagcc

SEQ ID NO: 960820 - DNA, 25 bp, Homo sapien
ggcagcaacgatcaccatcgtcact

SEQ ID NO: 960821 - DNA, 25 bp, Homo sapien
tgcttgggttccatatcggccgcgg

SEQ ID NO: 960822 - DNA, 25 bp, Homo sapien
tgcgattcccttcgccactgcttgg

SEQ ID NO: 960823 - DNA, 25 bp, Homo sapien
tcgcgcagggacagtagaaaatggt

SEQ ID NO: 960824 - DNA, 25 bp, Homo sapien
tacctttgcaacagcctccccctac

SEQ ID NO: 960825 - DNA, 25 bp, Homo sapien
ctacctttgcaacagcctcccccta

SEQ ID NO: 960826 - DNA, 25 bp, Homo sapien
ttggccccacccgctgctgcaggat

SEQ ID NO: 960827 - DNA, 25 bp, Homo sapien
ggccccacccgctgctgcaggatga

SEQ ID NO: 960828 - DNA, 25 bp, Homo sapien
ggctttggccccacccgctgctgca

SEQ ID NO: 960829 - DNA, 25 bp, Homo sapien
ccccacccgctgctgcaggatgagg

SEQ ID NO: 960830 - DNA, 25 bp, Homo sapien
tcatcgccagccaaccacgacgcgc

SEQ ID NO: 960831 - DNA, 25 bp, Homo sapien
agccaaccacgacgcgcccgacagg

SEQ ID NO: 960832 - DNA, 25 bp, Homo sapien
cgccagccaaccacgacgcgcccga

SEQ ID NO: 960833 - DNA, 25 bp, Homo sapien
accacgacgcgcccgacaggacaca

SEQ ID NO: 960834 - DNA, 25 bp, Homo sapien
tccccactccgcttcccccagcgct

SEQ ID NO: 960835 - DNA, 25 bp, Homo sapien
ctccccactccgcttcccccagcgc

SEQ ID NO: 960836 - DNA, 25 bp, Homo sapien
ccaaaacaagagccggaatcgccgt

SEQ ID NO: 960837 - DNA, 25 bp, Homo sapien
cccaaaacaagagccggaatcgccg

SEQ ID NO: 960838 - DNA, 25 bp, Homo sapien
caaaacaagagccggaatcgccgtg

SEQ ID NO: 960839 - DNA, 25 bp, Homo sapien
tccctcgtttaatcaccgccatata

SEQ ID NO: 960840 - DNA, 25 bp, Homo sapien
tcttcgagatcactgtctgtccctc

SEQ ID NO: 960841 - DNA, 25 bp, Homo sapien
ttttttcttcgagatcactgtctgt

SEQ ID NO: 960842 - DNA, 25 bp, Homo sapien
tttaatcaccgccatataaaggaat

SEQ ID NO: 960843 - DNA, 25 bp, Homo sapien
taggaggcagcgacggcaactgcac

SEQ ID NO: 960844 - DNA, 25 bp, Homo sapien
aagtataggaggcagcgacggcaac

SEQ ID NO: 960845 - DNA, 25 bp, Homo sapien
atccttccccgaggccaagagaagt

SEQ ID NO: 960846 - DNA, 25 bp, Homo sapien
ccccgaggccaagagaagtatagga

SEQ ID NO: 960847 - DNA, 25 bp, Homo sapien
ggcggcgttgacggtggctgcattt

SEQ ID NO: 960848 - DNA, 25 bp, Homo sapien
aggcggcgttgacggtggctgcatt

SEQ ID NO: 960849 - DNA, 25 bp, Homo sapien
tttcttgctcctccatcgagacagc

SEQ ID NO: 960850 - DNA, 25 bp, Homo sapien
ctagtgggcgtcgagtgacacccca

SEQ ID NO: 960851 - DNA, 25 bp, Homo sapien
gcttttatccggtgcccggagcctg

SEQ ID NO: 960852 - DNA, 25 bp, Homo sapien
tagactcgccagctccgcttttatc

SEQ ID NO: 960853 - DNA, 25 bp, Homo sapien
tgcacccaatactggcatgcccaag

SEQ ID NO: 960854 - DNA, 25 bp, Homo sapien
gctgtccttgttcgtgcacccaata

SEQ ID NO: 960855 - DNA, 25 bp, Homo sapien
atcgctttcggagggtgacgggagg

SEQ ID NO: 960856 - DNA, 25 bp, Homo sapien
gagggagttcgttcccaagccctgc

SEQ ID NO: 960857 - DNA, 25 bp, Homo sapien
gtcagaaagacagagattccgtccc

SEQ ID NO: 960858 - DNA, 25 bp, Homo sapien
agaaagacagagattccgtccccct

SEQ ID NO: 960859 - DNA, 25 bp, Homo sapien
aaagacagagattccgtccccctca

SEQ ID NO: 960860 - DNA, 25 bp, Homo sapien
ctgttgtcagaaagacagagattcc

SEQ ID NO: 960861 - DNA, 25 bp, Homo sapien
gcaaaatggcgccgggcagcttcat

SEQ ID NO: 960862 - DNA, 25 bp, Homo sapien
gcctccgcggagaggcaacggcggg

SEQ ID NO: 960863 - DNA, 25 bp, Homo sapien
cgggcggcagcccacaagcaaaatg

SEQ ID NO: 960864 - DNA, 25 bp, Homo sapien
gcctccagtttgctatcttcgagcc

SEQ ID NO: 960865 - DNA, 25 bp, Homo sapien
ccattttcccagagcgagaggcagt

SEQ ID NO: 960866 - DNA, 25 bp, Homo sapien
cgttcctgttgactgcctggctgcc

SEQ ID NO: 960867 - DNA, 25 bp, Homo sapien
cctactcctcggttcctggtgaaga

SEQ ID NO: 960868 - DNA, 25 bp, Homo sapien
agcggcaacagagtgggcatagaca

SEQ ID NO: 960869 - DNA, 25 bp, Homo sapien
ttccatttcttgacgggcagtctct

SEQ ID NO: 960870 - DNA, 25 bp, Homo sapien
tctctttgtgggagagcgagacagc

SEQ ID NO: 960871 - DNA, 25 bp, Homo sapien
tttgtgtcgaagtggtcccaggagc

SEQ ID NO: 960872 - DNA, 25 bp, Homo sapien
caaccgcgtcttgttcaggtgctga

SEQ ID NO: 960873 - DNA, 25 bp, Homo sapien
gctgagggagaatgagtcttaaaca

SEQ ID NO: 960874 - DNA, 25 bp, Homo sapien
ggctgagggagaatgagtcttaaac

SEQ ID NO: 960875 - DNA, 25 bp, Homo sapien
cggctgagggagaatgagtcttaaa

SEQ ID NO: 960876 - DNA, 25 bp, Homo sapien
gcggctgagggagaatgagtcttaa

SEQ ID NO: 960877 - DNA, 25 bp, Homo sapien
ttggattcacccaagttgttgcctg

SEQ ID NO: 960878 - DNA, 25 bp, Homo sapien
ggtcggttttgttagtgcagtttca

SEQ ID NO: 960879 - DNA, 25 bp, Homo sapien
aataatcagaggaaacgcaattcag

SEQ ID NO: 960880 - DNA, 25 bp, Homo sapien
cgcaattcagatgttctggagtgag

SEQ ID NO: 960881 - DNA, 25 bp, Homo sapien
gataccaatgcataggactccatag

SEQ ID NO: 960882 - DNA, 25 bp, Homo sapien
tgttatagtgtgactgttgcttttt

SEQ ID NO: 960883 - DNA, 25 bp, Homo sapien
taatcgaatttaccagaggcgaacg

SEQ ID NO: 960884 - DNA, 25 bp, Homo sapien
tgtggatgcacttagatgtttgcaa

SEQ ID NO: 960885 - DNA, 25 bp, Homo sapien
agtgatcccattgggggttgataca

SEQ ID NO: 960886 - DNA, 25 bp, Homo sapien
cattgggggttgatacagcagagac

SEQ ID NO: 960887 - DNA, 25 bp, Homo sapien
gcagagacgtcatacttggaaatgg

SEQ ID NO: 960888 - DNA, 25 bp, Homo sapien
tacagcagagacgtcatacttggaa

SEQ ID NO: 960889 - DNA, 25 bp, Homo sapien
ccccagaccagaatccgtagaagct

SEQ ID NO: 960890 - DNA, 25 bp, Homo sapien
cttatgacacataatctagatggga

SEQ ID NO: 960891 - DNA, 25 bp, Homo sapien
ttatctatagtgtatccacctgctg

SEQ ID NO: 960892 - DNA, 25 bp, Homo sapien
tagccctgtggtagttgagaaatcc

SEQ ID NO: 960893 - DNA, 25 bp, Homo sapien
ggaagcgcagagtacttacgcagtg

SEQ ID NO: 960894 - DNA, 25 bp, Homo sapien
gaatttcctgggtctggtcattatg

SEQ ID NO: 960895 - DNA, 25 bp, Homo sapien
tgaaagttactgagtttatcccctg

SEQ ID NO: 960896 - DNA, 25 bp, Homo sapien
tacgcagtgcattgtagagagcaag

SEQ ID NO: 960897 - DNA, 25 bp, Homo sapien
tggaaggctctattctaactttacg

SEQ ID NO: 960898 - DNA, 25 bp, Homo sapien
gaaggaccagttcacagtttttgga

SEQ ID NO: 960899 - DNA, 25 bp, Homo sapien
cacagtagcagttagtttggtacag

SEQ ID NO: 960900 - DNA, 25 bp, Homo sapien
ttcttttgatataacggcgatggtc

SEQ ID NO: 960901 - DNA, 25 bp, Homo sapien
aattaatgaatcacagccgggcatg

SEQ ID NO: 960902 - DNA, 25 bp, Homo sapien
tcagcctaggtaagttgcacatatc

SEQ ID NO: 960903 - DNA, 25 bp, Homo sapien
tctatgtgaacgttgtcagcctagg

SEQ ID NO: 960904 - DNA, 25 bp, Homo sapien
gataggcagcatattcctgatacat

SEQ ID NO: 960905 - DNA, 25 bp, Homo sapien
tattttcttggccattcactgtggc

SEQ ID NO: 960906 - DNA, 25 bp, Homo sapien
ttttcttggccattcactgtggctc

SEQ ID NO: 960907 - DNA, 25 bp, Homo sapien
cttggccattcactgtggctcacat

SEQ ID NO: 960908 - DNA, 25 bp, Homo sapien
tggtagcacatgcccggaaccccag

SEQ ID NO: 960909 - DNA, 25 bp, Homo sapien
taaaacgtagttctgaatccatgga

SEQ ID NO: 960910 - DNA, 25 bp, Homo sapien
cagagtgccctgttctaaaacgtag

SEQ ID NO: 960911 - DNA, 25 bp, Homo sapien
tactttggattgtgaaggaacgacc

SEQ ID NO: 960912 - DNA, 25 bp, Homo sapien
tcaatagtggttatgagaccagacg

SEQ ID NO: 960913 - DNA, 25 bp, Homo sapien
tcgagtttagattatatagcacagg

SEQ ID NO: 960914 - DNA, 25 bp, Homo sapien
taggtaccatatacatggctgtgtc

SEQ ID NO: 960915 - DNA, 25 bp, Homo sapien
tatgtaatggtgactagaaaagctg

SEQ ID NO: 960916 - DNA, 25 bp, Homo sapien
gagtcagctctaactacctcaaaga

SEQ ID NO: 960917 - DNA, 25 bp, Homo sapien
ggagtaggactcacattggacagca

SEQ ID NO: 960918 - DNA, 25 bp, Homo sapien
cgtcggagacacagaactgtcagca

SEQ ID NO: 960919 - DNA, 25 bp, Homo sapien
tcagcatgtgttcagatatccagcc

SEQ ID NO: 960920 - DNA, 25 bp, Homo sapien
gatcctatgggagtttcagcttgag

SEQ ID NO: 960921 - DNA, 25 bp, Homo sapien
aaatccctggtctgagatgtaggct

SEQ ID NO: 960922 - DNA, 25 bp, Homo sapien
ttactgcaccgccatagcttaagca

SEQ ID NO: 960923 - DNA, 25 bp, Homo sapien
caaagtcgcaggtttcattagagac

SEQ ID NO: 960924 - DNA, 25 bp, Homo sapien
ctgcagtcctaggaatggagttcta

SEQ ID NO: 960925 - DNA, 25 bp, Homo sapien
tctctagcacttggttaatgaatgg

SEQ ID NO: 960926 - DNA, 25 bp, Homo sapien
gcaaccatatgttttgttctacaaa

SEQ ID NO: 960927 - DNA, 25 bp, Homo sapien
agcctgatgacagagatatcttgtc

SEQ ID NO: 960928 - DNA, 25 bp, Homo sapien
ctggtattagaatattcaagggaga

SEQ ID NO: 960929 - DNA, 25 bp, Homo sapien
cagttgctagattcggtttactcag

SEQ ID NO: 960930 - DNA, 25 bp, Homo sapien
cgcctccacggataaaatcagatga

SEQ ID NO: 960931 - DNA, 25 bp, Homo sapien
catcttgttgatatacacagtagac

SEQ ID NO: 960932 - DNA, 25 bp, Homo sapien
cctcctttaacaactagtgtgctga

SEQ ID NO: 960933 - DNA, 25 bp, Homo sapien
tcagtgaactccaacttgagggacc

SEQ ID NO: 960934 - DNA, 25 bp, Homo sapien
taggactcgatgcagttgagccaac

SEQ ID NO: 960935 - DNA, 25 bp, Homo sapien
taaagactattggttatacgagccc

SEQ ID NO: 960936 - DNA, 25 bp, Homo sapien
tgtcagaccttcagctaggactcga

SEQ ID NO: 960937 - DNA, 25 bp, Homo sapien
caaccagggttagtgcttcttcaga

SEQ ID NO: 960938 - DNA, 25 bp, Homo sapien
gagcacgggctttcaagtaagacct

SEQ ID NO: 960939 - DNA, 25 bp, Homo sapien
tctgaagaaactagcaataactgcc

SEQ ID NO: 960940 - DNA, 25 bp, Homo sapien
agtgtatcaccccatgcaagtggaa

SEQ ID NO: 960941 - DNA, 25 bp, Homo sapien
cacataccccagttgcaagctaagg

SEQ ID NO: 960942 - DNA, 25 bp, Homo sapien
tttcccagtagatcaaaagccttgg

SEQ ID NO: 960943 - DNA, 25 bp, Homo sapien
cctctattctagtggtgtccaggaa

SEQ ID NO: 960944 - DNA, 25 bp, Homo sapien
taacattgacctttcgatgggttcc

SEQ ID NO: 960945 - DNA, 25 bp, Homo sapien
tgtaattcctgctcaagcacacggg

SEQ ID NO: 960946 - DNA, 25 bp, Homo sapien
gcctccataattgacgtatccagga

SEQ ID NO: 960947 - DNA, 25 bp, Homo sapien
tagtgcatccgaagctgaaaatggt

SEQ ID NO: 960948 - DNA, 25 bp, Homo sapien
caaaatggtttgagggagcaagttc

SEQ ID NO: 960949 - DNA, 25 bp, Homo sapien
taggatctccctacaggcctcatca

SEQ ID NO: 960950 - DNA, 25 bp, Homo sapien
gctgccttctgtgccaacaaagttg

SEQ ID NO: 960951 - DNA, 25 bp, Homo sapien
cacacgttcgtaattcatctgagca

SEQ ID NO: 960952 - DNA, 25 bp, Homo sapien
tcaagttggaacacctcagcgagag

SEQ ID NO: 960953 - DNA, 25 bp, Homo sapien
caacttctggaacattatttacaca

SEQ ID NO: 960954 - DNA, 25 bp, Homo sapien
tcagcaggcaacttctggaacatta

SEQ ID NO: 960955 - DNA, 25 bp, Homo sapien
cttccagccaatactcagcaggcaa

SEQ ID NO: 960956 - DNA, 25 bp, Homo sapien
tatttacacagacaccctcaggaca

SEQ ID NO: 960957 - DNA, 25 bp, Homo sapien
tgctcatccaactgtaccaccgtat

SEQ ID NO: 960958 - DNA, 25 bp, Homo sapien
ccagtgttttggcttctgggcatca

SEQ ID NO: 960959 - DNA, 25 bp, Homo sapien
tcaaaacaattaccatgggtcaggg

SEQ ID NO: 960960 - DNA, 25 bp, Homo sapien
catcataccactttgggaccgggac

SEQ ID NO: 960961 - DNA, 25 bp, Homo sapien
gcgactactacctcagcaacaggag

SEQ ID NO: 960962 - DNA, 25 bp, Homo sapien
tatggtccaggtatgggaagaagca

SEQ ID NO: 960963 - DNA, 25 bp, Homo sapien
tacattaacgcagctcacttagggc

SEQ ID NO: 960964 - DNA, 25 bp, Homo sapien
tttgcaggagccataggaaactact

SEQ ID NO: 960965 - DNA, 25 bp, Homo sapien
agccagctcctgtatctgctataaa

SEQ ID NO: 960966 - DNA, 25 bp, Homo sapien
tataaacacatatgtgatccactgc

SEQ ID NO: 960967 - DNA, 25 bp, Homo sapien
cagctcctgtatctgctataaacac

SEQ ID NO: 960968 - DNA, 25 bp, Homo sapien
taaacacatatgtgatccactgctt

SEQ ID NO: 960969 - DNA, 25 bp, Homo sapien
tcaacaagccgccaagaatctgata

SEQ ID NO: 960970 - DNA, 25 bp, Homo sapien
taatgtttagcataaccagtggttc

SEQ ID NO: 960971 - DNA, 25 bp, Homo sapien
taggctgttttatcataagggacac

SEQ ID NO: 960972 - DNA, 25 bp, Homo sapien
tcaattgaagtcagagagctagtta

SEQ ID NO: 960973 - DNA, 25 bp, Homo sapien
gaaatcacggatagcatcaccagtc

SEQ ID NO: 960974 - DNA, 25 bp, Homo sapien
gagctgtgagaagtattctgcccac

SEQ ID NO: 960975 - DNA, 25 bp, Homo sapien
tttttaagacaactgcaagcacctc

SEQ ID NO: 960976 - DNA, 25 bp, Homo sapien
aaacaaaactgtgtgcaacctgcaa

SEQ ID NO: 960977 - DNA, 25 bp, Homo sapien
taaagtccgctacatgcaacatagg

SEQ ID NO: 960978 - DNA, 25 bp, Homo sapien
ggctacaaagcactcaagacttggt

SEQ ID NO: 960979 - DNA, 25 bp, Homo sapien
actccttggagcagttaaagtccgc

SEQ ID NO: 960980 - DNA, 25 bp, Homo sapien
gagcttaacttacagcgcccagagg

SEQ ID NO: 960981 - DNA, 25 bp, Homo sapien
tcttggttccaacttgataatttct

SEQ ID NO: 960982 - DNA, 25 bp, Homo sapien
actataatacaggaatgatgtccct

SEQ ID NO: 960983 - DNA, 25 bp, Homo sapien
tgtccctttgccagaagataaaatt

SEQ ID NO: 960984 - DNA, 25 bp, Homo sapien
tgtacatttccttgctatttcttgg

SEQ ID NO: 960985 - DNA, 25 bp, Homo sapien
gacatgttattgtttccagaagaaa

SEQ ID NO: 960986 - DNA, 25 bp, Homo sapien
acatttgaatgtcacacaacacaag

SEQ ID NO: 960987 - DNA, 25 bp, Homo sapien
cagtaaactacttagctgaagacaa

SEQ ID NO: 960988 - DNA, 25 bp, Homo sapien
ccaggatcacagtgcacaaaaagca

SEQ ID NO: 960989 - DNA, 25 bp, Homo sapien
ggatgaagccagctcacttgtaatc

SEQ ID NO: 960990 - DNA, 25 bp, Homo sapien
tgaggatgaagccagctcacttgta

SEQ ID NO: 960991 - DNA, 25 bp, Homo sapien
aggatgaagccagctcacttgtaat

SEQ ID NO: 960992 - DNA, 25 bp, Homo sapien
gaggatgaagccagctcacttgtaa

SEQ ID NO: 960993 - DNA, 25 bp, Homo sapien
ttaggtccaatgtactgggaacatt

SEQ ID NO: 960994 - DNA, 25 bp, Homo sapien
gctcagaatgcaatattggtagaat

SEQ ID NO: 960995 - DNA, 25 bp, Homo sapien
gctagctcagaatgcaatattggta

SEQ ID NO: 960996 - DNA, 25 bp, Homo sapien
aagaatgagagtcaccgtttaggtc

SEQ ID NO: 960997 - DNA, 25 bp, Homo sapien
ccaaggatgccgaaggcattcgcca

SEQ ID NO: 960998 - DNA, 25 bp, Homo sapien
gcattcgccagctgaggctcgtttt

SEQ ID NO: 960999 - DNA, 25 bp, Homo sapien
ggaaatctgtaaactgtgcagcatc

SEQ ID NO: 961000 - DNA, 25 bp, Homo sapien
tctaacatcgggatcaggaaatctg

SEQ ID NO: 961001 - DNA, 25 bp, Homo sapien
caagagccccttaggcttctgaatt

SEQ ID NO: 961002 - DNA, 25 bp, Homo sapien
gcaaacatgagcctggcagccaatt

SEQ ID NO: 961003 - DNA, 25 bp, Homo sapien
ccaattgtgtggtccccaagagccc

SEQ ID NO: 961004 - DNA, 25 bp, Homo sapien
agcctggcagccaattgtgtggtcc

SEQ ID NO: 961005 - DNA, 25 bp, Homo sapien
tgacagcaactgtactggccagtcc

SEQ ID NO: 961006 - DNA, 25 bp, Homo sapien
gtgacagcaactgtactggccagtc

SEQ ID NO: 961007 - DNA, 25 bp, Homo sapien
gacagcaactgtactggccagtcct

SEQ ID NO: 961008 - DNA, 25 bp, Homo sapien
agggctggaaagcttctggggacca

SEQ ID NO: 961009 - DNA, 25 bp, Homo sapien
gctggaaagcttctggggaccaccc

SEQ ID NO: 961010 - DNA, 25 bp, Homo sapien
ggctggaaagcttctggggaccacc

SEQ ID NO: 961011 - DNA, 25 bp, Homo sapien
tggaaagcttctggggaccacccac

SEQ ID NO: 961012 - DNA, 25 bp, Homo sapien
ccagccatttatggccacacgcagg

SEQ ID NO: 961013 - DNA, 25 bp, Homo sapien
ggagcaaggttgctgacaggcccac

SEQ ID NO: 961014 - DNA, 25 bp, Homo sapien
cgcaggccgctctcactgaaaggaa

SEQ ID NO: 961015 - DNA, 25 bp, Homo sapien
gatgatggcagtaacctggagatac

SEQ ID NO: 961016 - DNA, 25 bp, Homo sapien
cctgcaggccgctgacaggccctgc

SEQ ID NO: 961017 - DNA, 25 bp, Homo sapien
gcctgcaggccgctgacaggccctg

SEQ ID NO: 961018 - DNA, 25 bp, Homo sapien
gaaaattagtgttgcataaataccg

SEQ ID NO: 961019 - DNA, 25 bp, Homo sapien
tgcccaatcacgaatgcacaatttc

SEQ ID NO: 961020 - DNA, 25 bp, Homo sapien
ttgagagctttcttcggaagaattc

SEQ ID NO: 961021 - DNA, 25 bp, Homo sapien
tccccagttgtgaaactccagatct

SEQ ID NO: 961022 - DNA, 25 bp, Homo sapien
attttcgagggactttccccagcag

SEQ ID NO: 961023 - DNA, 25 bp, Homo sapien
catagcgtattttcgagggactttc

SEQ ID NO: 961024 - DNA, 25 bp, Homo sapien
tattttcgagggactttccccagca

SEQ ID NO: 961025 - DNA, 25 bp, Homo sapien
aacatagcgtattttcgagggactt

SEQ ID NO: 961026 - DNA, 25 bp, Homo sapien
gaaacacacgacagtttaatcagta

SEQ ID NO: 961027 - DNA, 25 bp, Homo sapien
gaaacagagcgcaacttgaatgacc

SEQ ID NO: 961028 - DNA, 25 bp, Homo sapien
aaaagtacaggccttcctcgcgttg

SEQ ID NO: 961029 - DNA, 25 bp, Homo sapien
taatcagtacactgcatgcagacac

SEQ ID NO: 961030 - DNA, 25 bp, Homo sapien
tgcgattgaagaattcccgagaata

SEQ ID NO: 961031 - DNA, 25 bp, Homo sapien
ctctgcgattgaagaattcccgaga

SEQ ID NO: 961032 - DNA, 25 bp, Homo sapien
cccgagaatattttccagatagagc

SEQ ID NO: 961033 - DNA, 25 bp, Homo sapien
gatagagcaaagtgccttggaatac

SEQ ID NO: 961034 - DNA, 25 bp, Homo sapien
taatctcccgttgccagctcaaatg

SEQ ID NO: 961035 - DNA, 25 bp, Homo sapien
atagtcttccccagaatgtggttca

SEQ ID NO: 961036 - DNA, 25 bp, Homo sapien
tcgtctctggaatagtcttccccag

SEQ ID NO: 961037 - DNA, 25 bp, Homo sapien
atgtggttcaaacaaataatctccc

SEQ ID NO: 961038 - DNA, 25 bp, Homo sapien
tcaatgaccaaacgatgccaggcag

SEQ ID NO: 961039 - DNA, 25 bp, Homo sapien
tagaagaagaggcttctgccgccct

SEQ ID NO: 961040 - DNA, 25 bp, Homo sapien
gagtttacagacaatgcaactgtgc

SEQ ID NO: 961041 - DNA, 25 bp, Homo sapien
gccgtcatctcaaccactctgggaa

SEQ ID NO: 961042 - DNA, 25 bp, Homo sapien
tctgctagctcttgctttataaggg

SEQ ID NO: 961043 - DNA, 25 bp, Homo sapien
tttcagaagaggctagacatcctag

SEQ ID NO: 961044 - DNA, 25 bp, Homo sapien
gccagaatatctgctagctcttgct

SEQ ID NO: 961045 - DNA, 25 bp, Homo sapien
agaataagccagaatatctgctagc

SEQ ID NO: 961046 - DNA, 25 bp, Homo sapien
aggaacgagccaattcccatggcag

SEQ ID NO: 961047 - DNA, 25 bp, Homo sapien
catccagagtgtgaaaggaacgagc

SEQ ID NO: 961048 - DNA, 25 bp, Homo sapien
tgaaaggaacgagccaattcccatg

SEQ ID NO: 961049 - DNA, 25 bp, Homo sapien
aaaggaacgagccaattcccatggc

SEQ ID NO: 961050 - DNA, 25 bp, Homo sapien
ctatggagcggtactgacgcgtctg

SEQ ID NO: 961051 - DNA, 25 bp, Homo sapien
agcggtactgacgcgtctggatgtc

SEQ ID NO: 961052 - DNA, 25 bp, Homo sapien
ctctatggagcggtactgacgcgtc

SEQ ID NO: 961053 - DNA, 25 bp, Homo sapien
aaacctctatggagcggtactgacg

SEQ ID NO: 961054 - DNA, 25 bp, Homo sapien
tttatctgcattccgcggatccagg

SEQ ID NO: 961055 - DNA, 25 bp, Homo sapien
taattttatctgcattccgcggatc

SEQ ID NO: 961056 - DNA, 25 bp, Homo sapien
ccaggtcagcaatttttactctaat

SEQ ID NO: 961057 - DNA, 25 bp, Homo sapien
tactctaattttatctgcattccgc

SEQ ID NO: 961058 - DNA, 25 bp, Homo sapien
aacaagtcagctgcccgggtttttg

SEQ ID NO: 961059 - DNA, 25 bp, Homo sapien
accaacaagtcagctgcccgggttt

SEQ ID NO: 961060 - DNA, 25 bp, Homo sapien
caacaagtcagctgcccgggttttt

SEQ ID NO: 961061 - DNA, 25 bp, Homo sapien
tcaccaacaagtcagctgcccgggt

SEQ ID NO: 961062 - DNA, 25 bp, Homo sapien
gggccagccttgcaacttgccgtaa

SEQ ID NO: 961063 - DNA, 25 bp, Homo sapien
tcagcaagccccataagaggaagga

SEQ ID NO: 961064 - DNA, 25 bp, Homo sapien
actgctgaaatgaactaaacctctg

SEQ ID NO: 961065 - DNA, 25 bp, Homo sapien
catacgagctgtgaaaccagggtgc

SEQ ID NO: 961066 - DNA, 25 bp, Homo sapien
gccagtgcgtaacaaagccagctta

SEQ ID NO: 961067 - DNA, 25 bp, Homo sapien
ttaggaggattcatcatagccagtg

SEQ ID NO: 961068 - DNA, 25 bp, Homo sapien
ggattcatcatagccagtgcgtaac

SEQ ID NO: 961069 - DNA, 25 bp, Homo sapien
atcatagccagtgcgtaacaaagcc

SEQ ID NO: 961070 - DNA, 25 bp, Homo sapien
tcggcgtgcaattccagactgctgg

SEQ ID NO: 961071 - DNA, 25 bp, Homo sapien
cagggctggctcatcaattttactc

SEQ ID NO: 961072 - DNA, 25 bp, Homo sapien
gactgctggaaccaaaggggctgca

SEQ ID NO: 961073 - DNA, 25 bp, Homo sapien
gctgcagaatgtcgggctgtttgca

SEQ ID NO: 961074 - DNA, 25 bp, Homo sapien
cagacagttgatgggaagaaacact

SEQ ID NO: 961075 - DNA, 25 bp, Homo sapien
acgtccctggagtcagcgatggcag

SEQ ID NO: 961076 - DNA, 25 bp, Homo sapien
cttcttcaggagtataaaagtaata

SEQ ID NO: 961077 - DNA, 25 bp, Homo sapien
gcatttgttaaaggcacgtccctgg

SEQ ID NO: 961078 - DNA, 25 bp, Homo sapien
gagaatgggccattctcaatatggc

SEQ ID NO: 961079 - DNA, 25 bp, Homo sapien
ctgtcatgggatggactgctctcct

SEQ ID NO: 961080 - DNA, 25 bp, Homo sapien
ggaattttatgtcgtccatttggca

SEQ ID NO: 961081 - DNA, 25 bp, Homo sapien
caggatttgggcagtcttcttcatc

SEQ ID NO: 961082 - DNA, 25 bp, Homo sapien
tttttagtttcacctctgggcagta

SEQ ID NO: 961083 - DNA, 25 bp, Homo sapien
ttttagtttcacctctgggcagtat

SEQ ID NO: 961084 - DNA, 25 bp, Homo sapien
agccgcctcctctaatcctgttgtt

SEQ ID NO: 961085 - DNA, 25 bp, Homo sapien
aaaatgaaacaggtgcccgagcagg

SEQ ID NO: 961086 - DNA, 25 bp, Homo sapien
catggttacctgacttgcaaagcac

SEQ ID NO: 961087 - DNA, 25 bp, Homo sapien
taaattcaagcagctcaagccaggg

SEQ ID NO: 961088 - DNA, 25 bp, Homo sapien
ctatgttaaggaaagaccacaggtc

SEQ ID NO: 961089 - DNA, 25 bp, Homo sapien
ggtttctgctgtggagccgtactca

SEQ ID NO: 961090 - DNA, 25 bp, Homo sapien
aggtttctgctgtggagccgtactc

SEQ ID NO: 961091 - DNA, 25 bp, Homo sapien
gaggaggagcacctgctttctgcca

SEQ ID NO: 961092 - DNA, 25 bp, Homo sapien
ggagcacctgctttctgccactcag

SEQ ID NO: 961093 - DNA, 25 bp, Homo sapien
aggagcacctgctttctgccactca

SEQ ID NO: 961094 - DNA, 25 bp, Homo sapien
ggaggagcacctgctttctgccact

SEQ ID NO: 961095 - DNA, 25 bp, Homo sapien
cacacacatcaagatattttccggc

SEQ ID NO: 961096 - DNA, 25 bp, Homo sapien
catccacacacatcaagatattttc

SEQ ID NO: 961097 - DNA, 25 bp, Homo sapien
tccacacacatcaagatattttccg

SEQ ID NO: 961098 - DNA, 25 bp, Homo sapien
cacacatcaagatattttccggctt

SEQ ID NO: 961099 - DNA, 25 bp, Homo sapien
acacacaaggcaggtcccaccaact

SEQ ID NO: 961100 - DNA, 25 bp, Homo sapien
aacactgagggttccactagatttc

SEQ ID NO: 961101 - DNA, 25 bp, Homo sapien
cagaggggttctccgcaagcctaga

SEQ ID NO: 961102 - DNA, 25 bp, Homo sapien
tgttaaactcaatggaggagcttgg

SEQ ID NO: 961103 - DNA, 25 bp, Homo sapien
taactggtgagaattaatgagaaaa

SEQ ID NO: 961104 - DNA, 25 bp, Homo sapien
ctaactggtgagaattaatgagaaa

SEQ ID NO: 961105 - DNA, 25 bp, Homo sapien
tgcactaccatgctgaacaaaccca

SEQ ID NO: 961106 - DNA, 25 bp, Homo sapien
gagtcaagggctcaacatcctgagg

SEQ ID NO: 961107 - DNA, 25 bp, Homo sapien
ccaagtcaatacagcatcgtgtgca

SEQ ID NO: 961108 - DNA, 25 bp, Homo sapien
ttcctgagtcaagggctcaacatcc

SEQ ID NO: 961109 - DNA, 25 bp, Homo sapien
caaattatgcattactatttcgagt

SEQ ID NO: 961110 - DNA, 25 bp, Homo sapien
ttcttaatctccacaatcaaactac

SEQ ID NO: 961111 - DNA, 25 bp, Homo sapien
ggctaagtaactgatcaggagtaca

SEQ ID NO: 961112 - DNA, 25 bp, Homo sapien
gtcagaatttcgctattgtcaccca

SEQ ID NO: 961113 - DNA, 25 bp, Homo sapien
tacaggcaatgagtagaatacatac

SEQ ID NO: 961114 - DNA, 25 bp, Homo sapien
ttttcttctggcagggcaactgaac

SEQ ID NO: 961115 - DNA, 25 bp, Homo sapien
ggaggagttcttccatctacgcata

SEQ ID NO: 961116 - DNA, 25 bp, Homo sapien
tctctaagcctgaccctagctgagg

SEQ ID NO: 961117 - DNA, 25 bp, Homo sapien
tgtaattgtaccatgtcacatacct

SEQ ID NO: 961118 - DNA, 25 bp, Homo sapien
aattacatgttgttcccttcacaac

SEQ ID NO: 961119 - DNA, 25 bp, Homo sapien
cctaatgaactaagtggatgtttta

SEQ ID NO: 961120 - DNA, 25 bp, Homo sapien
caaaaaacgtatgcctgacaattac

SEQ ID NO: 961121 - DNA, 25 bp, Homo sapien
taaatactgacttaataagagttca

SEQ ID NO: 961122 - DNA, 25 bp, Homo sapien
taggggctgccgtcaaaagtctcac

SEQ ID NO: 961123 - DNA, 25 bp, Homo sapien
ggcctaggggctgccgtcaaaagtc

SEQ ID NO: 961124 - DNA, 25 bp, Homo sapien
tgaaagcctaaccaattaggtacta

SEQ ID NO: 961125 - DNA, 25 bp, Homo sapien
ctgtcgaatgatactcttcacacaa

SEQ ID NO: 961126 - DNA, 25 bp, Homo sapien
aagtacttcgaagaccatgcagaca

SEQ ID NO: 961127 - DNA, 25 bp, Homo sapien
agatggtggccaagtacttcgaaga

SEQ ID NO: 961128 - DNA, 25 bp, Homo sapien
gatccacttgaggagatggtggcca

SEQ ID NO: 961129 - DNA, 25 bp, Homo sapien
tgatagttggatttgatgatccact

SEQ ID NO: 961130 - DNA, 25 bp, Homo sapien
ctgggacacagttaaggatcgtttg

SEQ ID NO: 961131 - DNA, 25 bp, Homo sapien
gacacagttaaggatcgtttgtgga

SEQ ID NO: 961132 - DNA, 25 bp, Homo sapien
taaggatcgtttgtggatgcactgc

SEQ ID NO: 961133 - DNA, 25 bp, Homo sapien
acagttaaggatcgtttgtggatgc

SEQ ID NO: 961134 - DNA, 25 bp, Homo sapien
gagtgaggcagttattgaaagcagc

SEQ ID NO: 961135 - DNA, 25 bp, Homo sapien
tagatggatcaattatggccagacc

SEQ ID NO: 961136 - DNA, 25 bp, Homo sapien
gtattttcgatcaagcactggctta

SEQ ID NO: 961137 - DNA, 25 bp, Homo sapien
ggccagaccatgacaattattaaac

SEQ ID NO: 961138 - DNA, 25 bp, Homo sapien
cactggcttatgtcagatttatcaa

SEQ ID NO: 961139 - DNA, 25 bp, Homo sapien
tatttgaaaggctcagttgtatcat

SEQ ID NO: 961140 - DNA, 25 bp, Homo sapien
gtggaccacttcataatacttgaca

SEQ ID NO: 961141 - DNA, 25 bp, Homo sapien
cattttcacatggtgctttgcagcc

SEQ ID NO: 961142 - DNA, 25 bp, Homo sapien
cacacagattgtccttatgcactgg

SEQ ID NO: 961143 - DNA, 25 bp, Homo sapien
caagcgccaccttgggatgtggaca

SEQ ID NO: 961144 - DNA, 25 bp, Homo sapien
tgaaatcttgaagtcgtcaatgagc

SEQ ID NO: 961145 - DNA, 25 bp, Homo sapien
aatcttgaagtcgtcaatgagctgg

SEQ ID NO: 961146 - DNA, 25 bp, Homo sapien
ttgaagtcgtcaatgagctggacca

SEQ ID NO: 961147 - DNA, 25 bp, Homo sapien
gtcgtcaatgagctggaccaccatg

SEQ ID NO: 961148 - DNA, 25 bp, Homo sapien
tccgtataatgctgggcacttttta

SEQ ID NO: 961149 - DNA, 25 bp, Homo sapien
aaggctgtctccgtataatgctggg

SEQ ID NO: 961150 - DNA, 25 bp, Homo sapien
ggctgtctccgtataatgctgggca

SEQ ID NO: 961151 - DNA, 25 bp, Homo sapien
tgtctccgtataatgctgggcactt

SEQ ID NO: 961152 - DNA, 25 bp, Homo sapien
cacagccagacagtagagaagtgcc

SEQ ID NO: 961153 - DNA, 25 bp, Homo sapien
acagccagacagtagagaagtgccc

SEQ ID NO: 961154 - DNA, 25 bp, Homo sapien
cagccagacagtagagaagtgcccc

SEQ ID NO: 961155 - DNA, 25 bp, Homo sapien
catgataccggccattgaagaggtc

SEQ ID NO: 961156 - DNA, 25 bp, Homo sapien
aataacatgataccggccattgaag

SEQ ID NO: 961157 - DNA, 25 bp, Homo sapien
taacatgataccggccattgaagag

SEQ ID NO: 961158 - DNA, 25 bp, Homo sapien
aacatgataccggccattgaagagg

SEQ ID NO: 961159 - DNA, 25 bp, Homo sapien
cagctgctgccaaggggctcagtac

SEQ ID NO: 961160 - DNA, 25 bp, Homo sapien
tcagctgctgccaaggggctcagta

SEQ ID NO: 961161 - DNA, 25 bp, Homo sapien
atccagcaacttgcactgcatccaa

SEQ ID NO: 961162 - DNA, 25 bp, Homo sapien
cagcccctgaattcgcctgcatcta

SEQ ID NO: 961163 - DNA, 25 bp, Homo sapien
cactatgaacgaggtgaccgtcaca

SEQ ID NO: 961164 - DNA, 25 bp, Homo sapien
acactggggagaggccctcacttca

SEQ ID NO: 961165 - DNA, 25 bp, Homo sapien
ctgctgcatcaacagtaggtcctgc

SEQ ID NO: 961166 - DNA, 25 bp, Homo sapien
gctgcatcaacagtaggtcctgccc

SEQ ID NO: 961167 - DNA, 25 bp, Homo sapien
tcaacagtaggtcctgccctgtcca

SEQ ID NO: 961168 - DNA, 25 bp, Homo sapien
tgcatcaacagtaggtcctgccctg

SEQ ID NO: 961169 - DNA, 25 bp, Homo sapien
gacggtacctccataacattgtttg

SEQ ID NO: 961170 - DNA, 25 bp, Homo sapien
ctgattattccaggacttagaagtg

SEQ ID NO: 961171 - DNA, 25 bp, Homo sapien
gccctccatactcaacagattgttg

SEQ ID NO: 961172 - DNA, 25 bp, Homo sapien
gaatgagacactctatctctatggg

SEQ ID NO: 961173 - DNA, 25 bp, Homo sapien
catgcatgagcaagtaactttttta

SEQ ID NO: 961174 - DNA, 25 bp, Homo sapien
actgcatccatgctaacatctatta

SEQ ID NO: 961175 - DNA, 25 bp, Homo sapien
tctaggtagatactcagttagtggg

SEQ ID NO: 961176 - DNA, 25 bp, Homo sapien
agattttctcctacgctttcggttg

SEQ ID NO: 961177 - DNA, 25 bp, Homo sapien
tagtaaccagacctttagagcaagc

SEQ ID NO: 961178 - DNA, 25 bp, Homo sapien
caagcattgaccaaaagagggatgg

SEQ ID NO: 961179 - DNA, 25 bp, Homo sapien
tcttctcgataaatggtgctgcagc

SEQ ID NO: 961180 - DNA, 25 bp, Homo sapien
tacaggccacgtggttggtgcataa

SEQ ID NO: 961181 - DNA, 25 bp, Homo sapien
tataaggagggaaccttactatctc

SEQ ID NO: 961182 - DNA, 25 bp, Homo sapien
gggaaccttactatctctaatgacc

SEQ ID NO: 961183 - DNA, 25 bp, Homo sapien
gctggcacgggtataaggagggaac

SEQ ID NO: 961184 - DNA, 25 bp, Homo sapien
ctctaatgaccttactgatgctgac

SEQ ID NO: 961185 - DNA, 25 bp, Homo sapien
acaaattactacacagcccaatggg

SEQ ID NO: 961186 - DNA, 25 bp, Homo sapien
ttgctcctcatcatctgatcccagg

SEQ ID NO: 961187 - DNA, 25 bp, Homo sapien
tcctcctctggctccgggggtgtgg

SEQ ID NO: 961188 - DNA, 25 bp, Homo sapien
cctcatcatctgatcccaggatctc

SEQ ID NO: 961189 - DNA, 25 bp, Homo sapien
ctttgcagtagtccgcagggtcctc

SEQ ID NO: 961190 - DNA, 25 bp, Homo sapien
aaaggagctttctgttgaggctccg

SEQ ID NO: 961191 - DNA, 25 bp, Homo sapien
taaaggagctttctgttgaggctcc

SEQ ID NO: 961192 - DNA, 25 bp, Homo sapien
aggagctttctgttgaggctccggc

SEQ ID NO: 961193 - DNA, 25 bp, Homo sapien
ctaaaggagctttctgttgaggctc

SEQ ID NO: 961194 - DNA, 25 bp, Homo sapien
tgaaatgaaagcgtattccatggta

SEQ ID NO: 961195 - DNA, 25 bp, Homo sapien
aagtgaaatgaaagcgtattccatg

SEQ ID NO: 961196 - DNA, 25 bp, Homo sapien
agtgaaatgaaagcgtattccatgg

SEQ ID NO: 961197 - DNA, 25 bp, Homo sapien
aaatgaaagcgtattccatggtata

SEQ ID NO: 961198 - DNA, 25 bp, Homo sapien
cactgaatgcgtgcgctgaagatga

SEQ ID NO: 961199 - DNA, 25 bp, Homo sapien
tgagggtcagttgcccgacatgtga

SEQ ID NO: 961200 - DNA, 25 bp, Homo sapien
gacggctgctgtggaaaggttgctc

SEQ ID NO: 961201 - DNA, 25 bp, Homo sapien
aatgcgtgcgctgaagatgacggct

SEQ ID NO: 961202 - DNA, 25 bp, Homo sapien
gctgcctacatggatgaccctcaaa

SEQ ID NO: 961203 - DNA, 25 bp, Homo sapien
ctgctgagctgcctacatggatgac

SEQ ID NO: 961204 - DNA, 25 bp, Homo sapien
gaccctgcagtctaagtgtgtaggc

SEQ ID NO: 961205 - DNA, 25 bp, Homo sapien
taagtgtgtaggcacttctcattcc

SEQ ID NO: 961206 - DNA, 25 bp, Homo sapien
tgaaaatgtcctaatgtggtgatgg

SEQ ID NO: 961207 - DNA, 25 bp, Homo sapien
ggatcctccaaaaccttatgctggg

SEQ ID NO: 961208 - DNA, 25 bp, Homo sapien
cagtcagaaaagaccgcaggttgta

SEQ ID NO: 961209 - DNA, 25 bp, Homo sapien
gaaaaccccaatacagctatagata

SEQ ID NO: 961210 - DNA, 25 bp, Homo sapien
tcttaaaacacacgagctaaaacat

SEQ ID NO: 961211 - DNA, 25 bp, Homo sapien
tctcatgataaaaagccccaatctt

SEQ ID NO: 961212 - DNA, 25 bp, Homo sapien
ccaaactgtcagttaaaatacatca

SEQ ID NO: 961213 - DNA, 25 bp, Homo sapien
ccttactgagctttcattaatcagg

SEQ ID NO: 961214 - DNA, 25 bp, Homo sapien
cattgtactcatcagtaaagccatc

SEQ ID NO: 961215 - DNA, 25 bp, Homo sapien
tggtattgccaaaggaagtgttccc

SEQ ID NO: 961216 - DNA, 25 bp, Homo sapien
actcattctcgttcatgtcagttag

SEQ ID NO: 961217 - DNA, 25 bp, Homo sapien
tcacttctacgttgtctgggattgt

SEQ ID NO: 961218 - DNA, 25 bp, Homo sapien
taatactgtcaggatagaaagggca

SEQ ID NO: 961219 - DNA, 25 bp, Homo sapien
tacaaggacaaataactgagtgcag

SEQ ID NO: 961220 - DNA, 25 bp, Homo sapien
tcctttttgcatactgggcccaaag

SEQ ID NO: 961221 - DNA, 25 bp, Homo sapien
taaattcagtgtcgtggcttgaggg

SEQ ID NO: 961222 - DNA, 25 bp, Homo sapien
atttctttaatcataattaactgcg

SEQ ID NO: 961223 - DNA, 25 bp, Homo sapien
tttctttaatcataattaactgcgt

SEQ ID NO: 961224 - DNA, 25 bp, Homo sapien
gatttctttaatcataattaactgc

SEQ ID NO: 961225 - DNA, 25 bp, Homo sapien
gtcacctttactagttgcacagcaa

SEQ ID NO: 961226 - DNA, 25 bp, Homo sapien
tccttagtatggctgtcaagaagct

SEQ ID NO: 961227 - DNA, 25 bp, Homo sapien
gctgtcaagaagcttaaagccaatt

SEQ ID NO: 961228 - DNA, 25 bp, Homo sapien
tctgcgtgtgcatctgactatcctc

SEQ ID NO: 961229 - DNA, 25 bp, Homo sapien
taagtcaggacagcataatggccat

SEQ ID NO: 961230 - DNA, 25 bp, Homo sapien
gacaggatatagtgttacaagccat

SEQ ID NO: 961231 - DNA, 25 bp, Homo sapien
tggactggtgaacaaggaatttaag

SEQ ID NO: 961232 - DNA, 25 bp, Homo sapien
tgtaaggtgttaaattcctggacag

SEQ ID NO: 961233 - DNA, 25 bp, Homo sapien
caataccagcatgcaggacaatacg

SEQ ID NO: 961234 - DNA, 25 bp, Homo sapien
tggctagccacaaaccaaaagttag

SEQ ID NO: 961235 - DNA, 25 bp, Homo sapien
tgtcacacatgaaccagcggtctgc

SEQ ID NO: 961236 - DNA, 25 bp, Homo sapien
tcacaaggctgaagactgtttctca

SEQ ID NO: 961237 - DNA, 25 bp, Homo sapien
gacgacttctcagagttaactgaca

SEQ ID NO: 961238 - DNA, 25 bp, Homo sapien
aagaggacgacttctcagagttaac

SEQ ID NO: 961239 - DNA, 25 bp, Homo sapien
tctgaagaggacgacttctcagagt

SEQ ID NO: 961240 - DNA, 25 bp, Homo sapien
ctttctgaagaggacgacttctcag

SEQ ID NO: 961241 - DNA, 25 bp, Homo sapien
agcagctcaatcttctgcttgattt

SEQ ID NO: 961242 - DNA, 25 bp, Homo sapien
cagcagctcaatcttctgcttgatt

SEQ ID NO: 961243 - DNA, 25 bp, Homo sapien
tattcacaaccaagattgcctgccc

SEQ ID NO: 961244 - DNA, 25 bp, Homo sapien
aatattcacaaccaagattgcctgc

SEQ ID NO: 961245 - DNA, 25 bp, Homo sapien
gaaaatattcacaaccaagattgcc

SEQ ID NO: 961246 - DNA, 25 bp, Homo sapien
aaatattcacaaccaagattgcctg

SEQ ID NO: 961247 - DNA, 25 bp, Homo sapien
atgaggccacaagattcgcagtact

SEQ ID NO: 961248 - DNA, 25 bp, Homo sapien
tgggattcaatggtgctataaaggg

SEQ ID NO: 961249 - DNA, 25 bp, Homo sapien
cttctgttaggactgggattcaatg

SEQ ID NO: 961250 - DNA, 25 bp, Homo sapien
gattcaatggtgctataaagggaaa

SEQ ID NO: 961251 - DNA, 25 bp, Homo sapien
gctgatactgatttggaagggagat

SEQ ID NO: 961252 - DNA, 25 bp, Homo sapien
tactgatttggaagggagataacag

SEQ ID NO: 961253 - DNA, 25 bp, Homo sapien
taattgctgatactgatttggaagg

SEQ ID NO: 961254 - DNA, 25 bp, Homo sapien
taaaagataattgctgatactgatt

SEQ ID NO: 961255 - DNA, 25 bp, Homo sapien
ggcacatggcgccacagtgagccct

SEQ ID NO: 961256 - DNA, 25 bp, Homo sapien
gatcaggcacatggcgccacagtga

SEQ ID NO: 961257 - DNA, 25 bp, Homo sapien
ggcgccacagtgagccctcagcagg

SEQ ID NO: 961258 - DNA, 25 bp, Homo sapien
ttgaggatcaggcacatggcgccac

SEQ ID NO: 961259 - DNA, 25 bp, Homo sapien
tgacatgcacgtgtggttcagctac

SEQ ID NO: 961260 - DNA, 25 bp, Homo sapien
cccaacaattaaggagcccaaggca

SEQ ID NO: 961261 - DNA, 25 bp, Homo sapien
caggtgttcagtgggatggttctcc

SEQ ID NO: 961262 - DNA, 25 bp, Homo sapien
gcaggcttcaaaaccacacgcttct

SEQ ID NO: 961263 - DNA, 25 bp, Homo sapien
ttccctgatatggtggccatctggc

SEQ ID NO: 961264 - DNA, 25 bp, Homo sapien
ctggcccctcagatgtatcaacatc

SEQ ID NO: 961265 - DNA, 25 bp, Homo sapien
agcccatcgccttggttgttcactc

SEQ ID NO: 961266 - DNA, 25 bp, Homo sapien
tggctttccctgatatggtggccat

SEQ ID NO: 961267 - DNA, 25 bp, Homo sapien
gttagcagtaggagacagcagaggc

SEQ ID NO: 961268 - DNA, 25 bp, Homo sapien
agtaggagacagcagaggcacaggg

SEQ ID NO: 961269 - DNA, 25 bp, Homo sapien
gtaggagacagcagaggcacagggc

SEQ ID NO: 961270 - DNA, 25 bp, Homo sapien
agcagtaggagacagcagaggcaca

SEQ ID NO: 961271 - DNA, 25 bp, Homo sapien
taacggtcccatcacctcacaagaa

SEQ ID NO: 961272 - DNA, 25 bp, Homo sapien
gatacttccaagtaaaggatctacc

SEQ ID NO: 961273 - DNA, 25 bp, Homo sapien
gacactggagagatataacggtccc

SEQ ID NO: 961274 - DNA, 25 bp, Homo sapien
taccttaaggcttctttcggatatc

SEQ ID NO: 961275 - DNA, 25 bp, Homo sapien
ggagagtcagtgttgaattacccaa

SEQ ID NO: 961276 - DNA, 25 bp, Homo sapien
aatgaagcacactgttggagaggaa

SEQ ID NO: 961277 - DNA, 25 bp, Homo sapien
ctttgagggaggtacaaatcatggg

SEQ ID NO: 961278 - DNA, 25 bp, Homo sapien
cagtttacctatgcatgcaatgtgc

SEQ ID NO: 961279 - DNA, 25 bp, Homo sapien
ctttgaaatctcatgaaggaaagca

SEQ ID NO: 961280 - DNA, 25 bp, Homo sapien
cccttgaagcagcaggatgtactcc

SEQ ID NO: 961281 - DNA, 25 bp, Homo sapien
ctacccttgaagcagcaggatgtac

SEQ ID NO: 961282 - DNA, 25 bp, Homo sapien
tacccttgaagcagcaggatgtact

SEQ ID NO: 961283 - DNA, 25 bp, Homo sapien
cttgaagcagcaggatgtactccac

SEQ ID NO: 961284 - DNA, 25 bp, Homo sapien
cttcgatgtgcttgtgatcactccc

SEQ ID NO: 961285 - DNA, 25 bp, Homo sapien
caccactgcagaatcctgcttaggg

SEQ ID NO: 961286 - DNA, 25 bp, Homo sapien
taatcctcaacccacaccactgcag

SEQ ID NO: 961287 - DNA, 25 bp, Homo sapien
gctgcttcatttcctatggccccag

SEQ ID NO: 961288 - DNA, 25 bp, Homo sapien
cagatgtcttattagctagtctata

SEQ ID NO: 961289 - DNA, 25 bp, Homo sapien
tcatattatgtgaatataacctcaa

SEQ ID NO: 961290 - DNA, 25 bp, Homo sapien
catggtccccactaaaactctaaag

SEQ ID NO: 961291 - DNA, 25 bp, Homo sapien
tagtctatacaatctccacttcggc

SEQ ID NO: 961292 - DNA, 25 bp, Homo sapien
taatcatggattgctctgctcagga

SEQ ID NO: 961293 - DNA, 25 bp, Homo sapien
tatccctcataaatgaaaactgcta

SEQ ID NO: 961294 - DNA, 25 bp, Homo sapien
cagtagtagttactttctgctccct

SEQ ID NO: 961295 - DNA, 25 bp, Homo sapien
ctgctcaggattatgttcaactgta

SEQ ID NO: 961296 - DNA, 25 bp, Homo sapien
cactatcttggccacactgatttca

SEQ ID NO: 961297 - DNA, 25 bp, Homo sapien
tgtgccccgcagatttttaagataa

SEQ ID NO: 961298 - DNA, 25 bp, Homo sapien
ataatatgaaagtccaacctaaggg

SEQ ID NO: 961299 - DNA, 25 bp, Homo sapien
tatgaaagtccaacctaagggtctc

SEQ ID NO: 961300 - DNA, 25 bp, Homo sapien
gtacaaggccacagcagattttctt

SEQ ID NO: 961301 - DNA, 25 bp, Homo sapien
gtaggtgggaacactagcacacacc

SEQ ID NO: 961302 - DNA, 25 bp, Homo sapien
aactcagttgcccaagctcccaagt

SEQ ID NO: 961303 - DNA, 25 bp, Homo sapien
catcactgctcaacacagcttctat

SEQ ID NO: 961304 - DNA, 25 bp, Homo sapien
tgggtgatcacctgataccaggagt

SEQ ID NO: 961305 - DNA, 25 bp, Homo sapien
ccaacactctccacaaagacattaa

SEQ ID NO: 961306 - DNA, 25 bp, Homo sapien
ctcccaacactctccacaaagacat

SEQ ID NO: 961307 - DNA, 25 bp, Homo sapien
caaagacattaaactcaacacatac

SEQ ID NO: 961308 - DNA, 25 bp, Homo sapien
acaaagacattaaactcaacacata

SEQ ID NO: 961309 - DNA, 25 bp, Homo sapien
cagaatccaccttgttctcgctctc

SEQ ID NO: 961310 - DNA, 25 bp, Homo sapien
tccagaatccaccttgttctcgctc

SEQ ID NO: 961311 - DNA, 25 bp, Homo sapien
aatccaccttgttctcgctctcctc

SEQ ID NO: 961312 - DNA, 25 bp, Homo sapien
gaatccaccttgttctcgctctcct

SEQ ID NO: 961313 - DNA, 25 bp, Homo sapien
taaagccattcaggttcacccacac

SEQ ID NO: 961314 - DNA, 25 bp, Homo sapien
tacctgggctatgcactgaaatctg

SEQ ID NO: 961315 - DNA, 25 bp, Homo sapien
cacatgacaggctatatctggccag

SEQ ID NO: 961316 - DNA, 25 bp, Homo sapien
ctctgggaaatgaacaattaggcat

SEQ ID NO: 961317 - DNA, 25 bp, Homo sapien
acctctgcatggtgactggaacaca

SEQ ID NO: 961318 - DNA, 25 bp, Homo sapien
gaacacagagggtactcaaacaact

SEQ ID NO: 961319 - DNA, 25 bp, Homo sapien
cagaaagttctgttcggtagcaaag

SEQ ID NO: 961320 - DNA, 25 bp, Homo sapien
taccaggtgacagtctttctacagg

SEQ ID NO: 961321 - DNA, 25 bp, Homo sapien
gaggcacacagatagcttaaacatg

SEQ ID NO: 961322 - DNA, 25 bp, Homo sapien
ttagggtaagaagccacgtctgcca

SEQ ID NO: 961323 - DNA, 25 bp, Homo sapien
ggctattaagccattacacagcagg

SEQ ID NO: 961324 - DNA, 25 bp, Homo sapien
agtttacagagcctatcttacgcgc

SEQ ID NO: 961325 - DNA, 25 bp, Homo sapien
aaataacccagtctcagaaattcag

SEQ ID NO: 961326 - DNA, 25 bp, Homo sapien
aataaataacccagtctcagaaatt

SEQ ID NO: 961327 - DNA, 25 bp, Homo sapien
gaaataaataacccagtctcagaaa

SEQ ID NO: 961328 - DNA, 25 bp, Homo sapien
agaagaaataaataacccagtctca

SEQ ID NO: 961329 - DNA, 25 bp, Homo sapien
tcaaagggcagaacctgaactctcc

SEQ ID NO: 961330 - DNA, 25 bp, Homo sapien
tccctcttgatgaagccagctgaca

SEQ ID NO: 961331 - DNA, 25 bp, Homo sapien
tctaacaaacgtggcagaagtggca

SEQ ID NO: 961332 - DNA, 25 bp, Homo sapien
tataaaaatgtaaccgcagcttcct

SEQ ID NO: 961333 - DNA, 25 bp, Homo sapien
aacagatgcagcgttcaggccagaa

SEQ ID NO: 961334 - DNA, 25 bp, Homo sapien
tcgaggagcagccagtatgtatgtg

SEQ ID NO: 961335 - DNA, 25 bp, Homo sapien
cacaacagatgcagcgttcaggcca

SEQ ID NO: 961336 - DNA, 25 bp, Homo sapien
ggccttcgaggagcagccagtatgt

SEQ ID NO: 961337 - DNA, 25 bp, Homo sapien
ctgtccaggacagctatggggcaaa

SEQ ID NO: 961338 - DNA, 25 bp, Homo sapien
tctccccatgtatggtgggaccaca

SEQ ID NO: 961339 - DNA, 25 bp, Homo sapien
caaattccaccttatccttaagact

SEQ ID NO: 961340 - DNA, 25 bp, Homo sapien
tgacatggtaacaggaccagtcaca

SEQ ID NO: 961341 - DNA, 25 bp, Homo sapien
tgtgcgtggctcttgcccggcagct

SEQ ID NO: 961342 - DNA, 25 bp, Homo sapien
ttcccctaacgaatcactccaggta

SEQ ID NO: 961343 - DNA, 25 bp, Homo sapien
gctcatccaccctgtactcagagat

SEQ ID NO: 961344 - DNA, 25 bp, Homo sapien
ccctgtactcagagatgcttttttc

SEQ ID NO: 961345 - DNA, 25 bp, Homo sapien
tgggtaccacaaataatctgcagca

SEQ ID NO: 961346 - DNA, 25 bp, Homo sapien
ggcagcctggcacaatttactggga

SEQ ID NO: 961347 - DNA, 25 bp, Homo sapien
taagcattacgatccaaagcacaag

SEQ ID NO: 961348 - DNA, 25 bp, Homo sapien
ggtctctacctgctggctgggaaca

SEQ ID NO: 961349 - DNA, 25 bp, Homo sapien
taaaataggccgtgctccatcctgg

SEQ ID NO: 961350 - DNA, 25 bp, Homo sapien
tctgggtgggctctccaactgaaaa

SEQ ID NO: 961351 - DNA, 25 bp, Homo sapien
aaactgaggcccatttcgactagga

SEQ ID NO: 961352 - DNA, 25 bp, Homo sapien
tgaaagaccctgagacagctagtac

SEQ ID NO: 961353 - DNA, 25 bp, Homo sapien
taaaacaccgaaagcgcctggcaac

SEQ ID NO: 961354 - DNA, 25 bp, Homo sapien
ccatcagagtgaacacgcactacag

SEQ ID NO: 961355 - DNA, 25 bp, Homo sapien
catcagagtgaacacgcactacaga

SEQ ID NO: 961356 - DNA, 25 bp, Homo sapien
acaccgaaagcgcctggcaacaaaa

SEQ ID NO: 961357 - DNA, 25 bp, Homo sapien
cacagggatacttccaacacttgag

SEQ ID NO: 961358 - DNA, 25 bp, Homo sapien
caaatagtgccgtgtacagtctgta

SEQ ID NO: 961359 - DNA, 25 bp, Homo sapien
ggagacaagctacccacatggagat

SEQ ID NO: 961360 - DNA, 25 bp, Homo sapien
ccagttacagggcatcacagggata

SEQ ID NO: 961361 - DNA, 25 bp, Homo sapien
gacacaactattcaacaatataaag

SEQ ID NO: 961362 - DNA, 25 bp, Homo sapien
caatataaaggaattaagtactaat

SEQ ID NO: 961363 - DNA, 25 bp, Homo sapien
aatgtggcatattgacacaactatt

SEQ ID NO: 961364 - DNA, 25 bp, Homo sapien
ggaattaagtactaatacgtgccat

SEQ ID NO: 961365 - DNA, 25 bp, Homo sapien
tttgggtttctcgaatacttccagc

SEQ ID NO: 961366 - DNA, 25 bp, Homo sapien
ggtttctcgaatacttccagcccat

SEQ ID NO: 961367 - DNA, 25 bp, Homo sapien
gtttctcgaatacttccagcccatt

SEQ ID NO: 961368 - DNA, 25 bp, Homo sapien
tgggtttctcgaatacttccagccc

SEQ ID NO: 961369 - DNA, 25 bp, Homo sapien
aaaagtgagcgtgctgcgacgtacc

SEQ ID NO: 961370 - DNA, 25 bp, Homo sapien
cacagtaccaaagatgccacacaga

SEQ ID NO: 961371 - DNA, 25 bp, Homo sapien
taacgatgtcgaacgctggtaaatc

SEQ ID NO: 961372 - DNA, 25 bp, Homo sapien
gataatgctggattctcgttcccca

SEQ ID NO: 961373 - DNA, 25 bp, Homo sapien
tgtttctctcttttcggcctccgct

SEQ ID NO: 961374 - DNA, 25 bp, Homo sapien
gatgtttctctcttttcggcctccg

SEQ ID NO: 961375 - DNA, 25 bp, Homo sapien
cgctttcgggcctgaatggccagca

SEQ ID NO: 961376 - DNA, 25 bp, Homo sapien
tttcggcctccgctttcgggcctga

SEQ ID NO: 961377 - DNA, 25 bp, Homo sapien
agcctccactcgctccgccggccgg

SEQ ID NO: 961378 - DNA, 25 bp, Homo sapien
ggctgcagcctccactcgctccgcc

SEQ ID NO: 961379 - DNA, 25 bp, Homo sapien
cgggcgccgagacgagctgggctgc

SEQ ID NO: 961380 - DNA, 25 bp, Homo sapien
gggcttcgcgacggcgacgcgggcg

SEQ ID NO: 961381 - DNA, 25 bp, Homo sapien
ctgtgcagaagtggccgccgcccat

SEQ ID NO: 961382 - DNA, 25 bp, Homo sapien
gctcctctacatccttgcaacccca

SEQ ID NO: 961383 - DNA, 25 bp, Homo sapien
gggtctcgcaccacctctcttcccg

SEQ ID NO: 961384 - DNA, 25 bp, Homo sapien
atgcgcccgtccttggccggcgcct

SEQ ID NO: 961385 - DNA, 25 bp, Homo sapien
ctttgctcctctacatccttgcaac

SEQ ID NO: 961386 - DNA, 25 bp, Homo sapien
cctgtcagcttcagtccagtagttt

SEQ ID NO: 961387 - DNA, 25 bp, Homo sapien
cagtccagtagtttgactccagtag

SEQ ID NO: 961388 - DNA, 25 bp, Homo sapien
gactccagtagttgagtccagcctg

SEQ ID NO: 961389 - DNA, 25 bp, Homo sapien
cagtagtttgactccagtagttgag

SEQ ID NO: 961390 - DNA, 25 bp, Homo sapien
gagcagtttagctggtgagtcaaga

SEQ ID NO: 961391 - DNA, 25 bp, Homo sapien
gcttgacggaggctgaaagacctgt

SEQ ID NO: 961392 - DNA, 25 bp, Homo sapien
tgcacggaccccttcataggactgc

SEQ ID NO: 961393 - DNA, 25 bp, Homo sapien
aagatgtcacttgaggccgcagtca

SEQ ID NO: 961394 - DNA, 25 bp, Homo sapien
ggaagtaaacatgctgtgaagtctt

SEQ ID NO: 961395 - DNA, 25 bp, Homo sapien
gaggaagtaaacatgctgtgaagtc

SEQ ID NO: 961396 - DNA, 25 bp, Homo sapien
gaagtaaacatgctgtgaagtcttc

SEQ ID NO: 961397 - DNA, 25 bp, Homo sapien
ggagaggaagtaaacatgctgtgaa

SEQ ID NO: 961398 - DNA, 25 bp, Homo sapien
agccttctagacacttcccataatc

SEQ ID NO: 961399 - DNA, 25 bp, Homo sapien
ctaatcacagccttctagacacttc

SEQ ID NO: 961400 - DNA, 25 bp, Homo sapien
cacagccttctagacacttcccata

SEQ ID NO: 961401 - DNA, 25 bp, Homo sapien
taatcacagccttctagacacttcc

SEQ ID NO: 961402 - DNA, 25 bp, Homo sapien
agtagcagatgtcgttggatatcta

SEQ ID NO: 961403 - DNA, 25 bp, Homo sapien
tcatgtaccagttccaaaccaactc

SEQ ID NO: 961404 - DNA, 25 bp, Homo sapien
cctttgtcatgtaccagttccaaac

SEQ ID NO: 961405 - DNA, 25 bp, Homo sapien
gcagatgtcgttggatatctaccca

SEQ ID NO: 961406 - DNA, 25 bp, Homo sapien
tgagccgggtcatccctccataggc

SEQ ID NO: 961407 - DNA, 25 bp, Homo sapien
gagccgggtcatccctccataggca

SEQ ID NO: 961408 - DNA, 25 bp, Homo sapien
aacctgagccgggtcatccctccat

SEQ ID NO: 961409 - DNA, 25 bp, Homo sapien
cctgagccgggtcatccctccatag

SEQ ID NO: 961410 - DNA, 25 bp, Homo sapien
tgaccgtgggtttgccagttgccag

SEQ ID NO: 961411 - DNA, 25 bp, Homo sapien
tgggctaagtgcaacttcctcttct

SEQ ID NO: 961412 - DNA, 25 bp, Homo sapien
ttattacataccatgtgttgggcta

SEQ ID NO: 961413 - DNA, 25 bp, Homo sapien
ttttctccatggataggattccacc

SEQ ID NO: 961414 - DNA, 25 bp, Homo sapien
caattattcgtagcatttgactcag

SEQ ID NO: 961415 - DNA, 25 bp, Homo sapien
ggtgtcaccaccatttctgatgagg

SEQ ID NO: 961416 - DNA, 25 bp, Homo sapien
gattatcctcatacttcacagctga

SEQ ID NO: 961417 - DNA, 25 bp, Homo sapien
gattccaataacctggagtccagtc

SEQ ID NO: 961418 - DNA, 25 bp, Homo sapien
taatcccaggagttagcctcggcaa

SEQ ID NO: 961419 - DNA, 25 bp, Homo sapien
cactggtgacaaagggtaaacgcta

SEQ ID NO: 961420 - DNA, 25 bp, Homo sapien
ttttgagcaaataccagtccagtgg

SEQ ID NO: 961421 - DNA, 25 bp, Homo sapien
gacatggaaataccaaagccactgg

SEQ ID NO: 961422 - DNA, 25 bp, Homo sapien
gaacctcaggatttgtgtacatgta

SEQ ID NO: 961423 - DNA, 25 bp, Homo sapien
aagattgagaattgcaggattgcac

SEQ ID NO: 961424 - DNA, 25 bp, Homo sapien
tttactctgatttaagcacctgaag

SEQ ID NO: 961425 - DNA, 25 bp, Homo sapien
tgggcctatcaatgcaacgttcctg

SEQ ID NO: 961426 - DNA, 25 bp, Homo sapien
aactaagacaaaaatgcacagggag

SEQ ID NO: 961427 - DNA, 25 bp, Homo sapien
atccatatatgagtctgaactaaga

SEQ ID NO: 961428 - DNA, 25 bp, Homo sapien
aatccatatatgagtctgaactaag

SEQ ID NO: 961429 - DNA, 25 bp, Homo sapien
tttctaatctgtggacaaggtactg

SEQ ID NO: 961430 - DNA, 25 bp, Homo sapien
ttctaatctgtggacaaggtactgc

SEQ ID NO: 961431 - DNA, 25 bp, Homo sapien
gttcttgatactggtatccattttt

SEQ ID NO: 961432 - DNA, 25 bp, Homo sapien
ttcagctgcgtctggttcttgatac

SEQ ID NO: 961433 - DNA, 25 bp, Homo sapien
tttttagcacttctcgaatggccat

SEQ ID NO: 961434 - DNA, 25 bp, Homo sapien
agcacttctcgaatggccatggtgg

SEQ ID NO: 961435 - DNA, 25 bp, Homo sapien
ccacatctgtgttgaaaagtggaat

SEQ ID NO: 961436 - DNA, 25 bp, Homo sapien
gggatcatcatatgcaacgacttcc

SEQ ID NO: 961437 - DNA, 25 bp, Homo sapien
tcccttctaggttgtccacatctgt

SEQ ID NO: 961438 - DNA, 25 bp, Homo sapien
agcaaaaactggtggtgtcttccct

SEQ ID NO: 961439 - DNA, 25 bp, Homo sapien
aatatcaagattgtcagctgtgagc

SEQ ID NO: 961440 - DNA, 25 bp, Homo sapien
gaataatgatctttcggtaggcccc

SEQ ID NO: 961441 - DNA, 25 bp, Homo sapien
cagctaacattctgaggacgaataa

SEQ ID NO: 961442 - DNA, 25 bp, Homo sapien
cgaattttgtgtctcatgttgtcaa

SEQ ID NO: 961443 - DNA, 25 bp, Homo sapien
cagtctacaaatggccatcctggct

SEQ ID NO: 961444 - DNA, 25 bp, Homo sapien
cgggtaccaggtatgcatgtgttac

SEQ ID NO: 961445 - DNA, 25 bp, Homo sapien
aaatattggctagaacaggtccctc

SEQ ID NO: 961446 - DNA, 25 bp, Homo sapien
tcaatcaagcactgtcgggtaccag

SEQ ID NO: 961447 - DNA, 25 bp, Homo sapien
tggaaccacaggtgtgcactaccag

SEQ ID NO: 961448 - DNA, 25 bp, Homo sapien
gctggaaccacaggtgtgcactacc

SEQ ID NO: 961449 - DNA, 25 bp, Homo sapien
agctggaaccacaggtgtgcactac

SEQ ID NO: 961450 - DNA, 25 bp, Homo sapien
gaaccacaggtgtgcactaccaggc

SEQ ID NO: 961451 - DNA, 25 bp, Homo sapien
cacatcatggatagagtaattatta

SEQ ID NO: 961452 - DNA, 25 bp, Homo sapien
tcttcctcaatataggtggctgtgg

SEQ ID NO: 961453 - DNA, 25 bp, Homo sapien
agataacatcgaaaccaggcaaggg

SEQ ID NO: 961454 - DNA, 25 bp, Homo sapien
tatgctttgggtagataacatcgaa

SEQ ID NO: 961455 - DNA, 25 bp, Homo sapien
gctttggtagctatgaatatacatt

SEQ ID NO: 961456 - DNA, 25 bp, Homo sapien
tagtccatagtcttctatcctcttg

SEQ ID NO: 961457 - DNA, 25 bp, Homo sapien
tcctttgagaacgaggtcccctgga

SEQ ID NO: 961458 - DNA, 25 bp, Homo sapien
tcttgcttaccatgttattccacac

SEQ ID NO: 961459 - DNA, 25 bp, Homo sapien
gccaaaaagtgctgtactttctaag

SEQ ID NO: 961460 - DNA, 25 bp, Homo sapien
agaaacttctactgtacttatttat

SEQ ID NO: 961461 - DNA, 25 bp, Homo sapien
tcgtagtaataagaaacttctactg

SEQ ID NO: 961462 - DNA, 25 bp, Homo sapien
gcttgttagtggtaatcgtagtaat

SEQ ID NO: 961463 - DNA, 25 bp, Homo sapien
ccaaatgcagagactatattcttca

SEQ ID NO: 961464 - DNA, 25 bp, Homo sapien
tctgcatttaaccaagtagcccttt

SEQ ID NO: 961465 - DNA, 25 bp, Homo sapien
ttttgaaagtcctcgaagcagctgc

SEQ ID NO: 961466 - DNA, 25 bp, Homo sapien
ttccacacaccttttgacaggtagt

SEQ ID NO: 961467 - DNA, 25 bp, Homo sapien
cttctctgcatttaaccaagtagcc

SEQ ID NO: 961468 - DNA, 25 bp, Homo sapien
agcggggtttcaatattaaatccat

SEQ ID NO: 961469 - DNA, 25 bp, Homo sapien
ctccagagcggggtttcaatattaa

SEQ ID NO: 961470 - DNA, 25 bp, Homo sapien
cagagcggggtttcaatattaaatc

SEQ ID NO: 961471 - DNA, 25 bp, Homo sapien
gagcggggtttcaatattaaatcca

SEQ ID NO: 961472 - DNA, 25 bp, Homo sapien
gacttctgtccaggaattttgtagt

SEQ ID NO: 961473 - DNA, 25 bp, Homo sapien
ctgtccaggaattttgtagtatagc

SEQ ID NO: 961474 - DNA, 25 bp, Homo sapien
tgtccaggaattttgtagtatagct

SEQ ID NO: 961475 - DNA, 25 bp, Homo sapien
ttctgtccaggaattttgtagtata

SEQ ID NO: 961476 - DNA, 25 bp, Homo sapien
cagatttcctattgctggccaccac

SEQ ID NO: 961477 - DNA, 25 bp, Homo sapien
tcaatccaataatgtaattacatca

SEQ ID NO: 961478 - DNA, 25 bp, Homo sapien
tcaacagatttcctattgctggcca

SEQ ID NO: 961479 - DNA, 25 bp, Homo sapien
aacagatttcctattgctggccacc

SEQ ID NO: 961480 - DNA, 25 bp, Homo sapien
cctctcaaagcctaagtttgctaac

SEQ ID NO: 961481 - DNA, 25 bp, Homo sapien
aaagcctaagtttgctaacatgaag

SEQ ID NO: 961482 - DNA, 25 bp, Homo sapien
tcaaagcctaagtttgctaacatga

SEQ ID NO: 961483 - DNA, 25 bp, Homo sapien
gcagacctctcaaagcctaagtttg

SEQ ID NO: 961484 - DNA, 25 bp, Homo sapien
tcttaaattccatgtcactaatttt

SEQ ID NO: 961485 - DNA, 25 bp, Homo sapien
attcttaaattccatgtcactaatt

SEQ ID NO: 961486 - DNA, 25 bp, Homo sapien
gatgggattcccactgtaggttacc

SEQ ID NO: 961487 - DNA, 25 bp, Homo sapien
taggaacccaactatttattgatgg

SEQ ID NO: 961488 - DNA, 25 bp, Homo sapien
catggtgaaattcccgccactacta

SEQ ID NO: 961489 - DNA, 25 bp, Homo sapien
atggtgaaattcccgccactactaa

SEQ ID NO: 961490 - DNA, 25 bp, Homo sapien
gttcatagcttgctgtacttggtca

SEQ ID NO: 961491 - DNA, 25 bp, Homo sapien
tccaaatctttgcattccatagtag

SEQ ID NO: 961492 - DNA, 25 bp, Homo sapien
acctgatacgtagggacagctgtgg

SEQ ID NO: 961493 - DNA, 25 bp, Homo sapien
cttccaacctgatacgtagggacag

SEQ ID NO: 961494 - DNA, 25 bp, Homo sapien
gaaattccctagcttaaagttcatc

SEQ ID NO: 961495 - DNA, 25 bp, Homo sapien
tgatagctgaaattccctagcttaa

SEQ ID NO: 961496 - DNA, 25 bp, Homo sapien
tcaggtgggcaagtctttgtgcagt

SEQ ID NO: 961497 - DNA, 25 bp, Homo sapien
aaagttcatcaagcacttattcagg

SEQ ID NO: 961498 - DNA, 25 bp, Homo sapien
gcttcgtgggcttacaaagtctcca

SEQ ID NO: 961499 - DNA, 25 bp, Homo sapien
agtggagtgcactagtgtgatctag

SEQ ID NO: 961500 - DNA, 25 bp, Homo sapien
ccactgcacctatccaggtgctata

SEQ ID NO: 961501 - DNA, 25 bp, Homo sapien
gcaacctctgcttcgtgggcttaca

SEQ ID NO: 961502 - DNA, 25 bp, Homo sapien
cacgggaaaggccaatctgcctggc

SEQ ID NO: 961503 - DNA, 25 bp, Homo sapien
tcccacgggaaaggccaatctgcct

SEQ ID NO: 961504 - DNA, 25 bp, Homo sapien
tggcagagtgggtttctcctgttca

SEQ ID NO: 961505 - DNA, 25 bp, Homo sapien
ctgtgtggcagagtgggtttctcct

SEQ ID NO: 961506 - DNA, 25 bp, Homo sapien
cacagcgagaaaatgaaaccaggcc

SEQ ID NO: 961507 - DNA, 25 bp, Homo sapien
ggttcaacaactacattatttcagg

SEQ ID NO: 961508 - DNA, 25 bp, Homo sapien
gccactgtctcaaggtcaaggaaga

SEQ ID NO: 961509 - DNA, 25 bp, Homo sapien
taaacattacgatacaaccggttca

SEQ ID NO: 961510 - DNA, 25 bp, Homo sapien
tagctctcgggtgtacaacaaaaca

SEQ ID NO: 961511 - DNA, 25 bp, Homo sapien
gacaggcatacattaacatccaaag

SEQ ID NO: 961512 - DNA, 25 bp, Homo sapien
cattctttgctatcataactgggca

SEQ ID NO: 961513 - DNA, 25 bp, Homo sapien
gagttgctactgctacatagtgggt

SEQ ID NO: 961514 - DNA, 25 bp, Homo sapien
caatttcttgaactgttatagccct

SEQ ID NO: 961515 - DNA, 25 bp, Homo sapien
ttggttcccatgtaggagaatatat

SEQ ID NO: 961516 - DNA, 25 bp, Homo sapien
tgagaacagcaatttcttgaactgt

SEQ ID NO: 961517 - DNA, 25 bp, Homo sapien
tctttggttcccatgtaggagaata

SEQ ID NO: 961518 - DNA, 25 bp, Homo sapien
tttggagagtacattaatagcatcc

SEQ ID NO: 961519 - DNA, 25 bp, Homo sapien
taagtatttggagagtacattaata

SEQ ID NO: 961520 - DNA, 25 bp, Homo sapien
cttaagtatttggagagtacattaa

SEQ ID NO: 961521 - DNA, 25 bp, Homo sapien
tggagagtacattaatagcatccat

SEQ ID NO: 961522 - DNA, 25 bp, Homo sapien
ccttatatagtacgaagtggcagta

SEQ ID NO: 961523 - DNA, 25 bp, Homo sapien
agtggcagtaacttcccctagattt

SEQ ID NO: 961524 - DNA, 25 bp, Homo sapien
tatatagtacgaagtggcagtaact

SEQ ID NO: 961525 - DNA, 25 bp, Homo sapien
tttccttatatagtacgaagtggca

SEQ ID NO: 961526 - DNA, 25 bp, Homo sapien
ttatagatgtaagagctcatttttc

SEQ ID NO: 961527 - DNA, 25 bp, Homo sapien
tatagatgtaagagctcatttttcg

SEQ ID NO: 961528 - DNA, 25 bp, Homo sapien
atagatgtaagagctcatttttcgc

SEQ ID NO: 961529 - DNA, 25 bp, Homo sapien
tagatgtaagagctcatttttcgct

SEQ ID NO: 961530 - DNA, 25 bp, Homo sapien
gatttaagagacgacttaagaggct

SEQ ID NO: 961531 - DNA, 25 bp, Homo sapien
gcaataggtatgtgataggaagaaa

SEQ ID NO: 961532 - DNA, 25 bp, Homo sapien
caatgagtgcaatgttctgaccttg

SEQ ID NO: 961533 - DNA, 25 bp, Homo sapien
tagaaaacagctaagttctttatag

SEQ ID NO: 961534 - DNA, 25 bp, Homo sapien
ttctgagggcctaacaaggcagtcc

SEQ ID NO: 961535 - DNA, 25 bp, Homo sapien
tgcaaatgcacagaattcccaggct

SEQ ID NO: 961536 - DNA, 25 bp, Homo sapien
gagtatgagttttggctcacaagca

SEQ ID NO: 961537 - DNA, 25 bp, Homo sapien
ccaggctgggtaatatggttcctat

SEQ ID NO: 961538 - DNA, 25 bp, Homo sapien
ggaagggtggttcacatcgcacagc

SEQ ID NO: 961539 - DNA, 25 bp, Homo sapien
tatcaggatctggtagtaatacagc

SEQ ID NO: 961540 - DNA, 25 bp, Homo sapien
tactgaaggtgtccaaacgaaaatg

SEQ ID NO: 961541 - DNA, 25 bp, Homo sapien
acaagctgtcgctggtagagggcca

SEQ ID NO: 961542 - DNA, 25 bp, Homo sapien
tgctttggcctgcaaatgccctcca

SEQ ID NO: 961543 - DNA, 25 bp, Homo sapien
caaaacccggcatcctaagaaatga

SEQ ID NO: 961544 - DNA, 25 bp, Homo sapien
gagacctggcgctgtgtttaatgaa

SEQ ID NO: 961545 - DNA, 25 bp, Homo sapien
aaaggctgtaatggctgctttggcc

SEQ ID NO: 961546 - DNA, 25 bp, Homo sapien
gcactatagtagcccttgaacacga

SEQ ID NO: 961547 - DNA, 25 bp, Homo sapien
ggcaaggctaacgaggagcggggcc

SEQ ID NO: 961548 - DNA, 25 bp, Homo sapien
cttgaacacgaacgggcaaggctaa

SEQ ID NO: 961549 - DNA, 25 bp, Homo sapien
cccttgaacacgaacgggcaaggct

SEQ ID NO: 961550 - DNA, 25 bp, Homo sapien
tttttgtctctaatcctggaaacag

SEQ ID NO: 961551 - DNA, 25 bp, Homo sapien
ctccctatcctctgtttttgtctct

SEQ ID NO: 961552 - DNA, 25 bp, Homo sapien
agagatttgatagcctgatggatga

SEQ ID NO: 961553 - DNA, 25 bp, Homo sapien
tcccagctgcgtggtaggctacaat

SEQ ID NO: 961554 - DNA, 25 bp, Homo sapien
cattacgattacaggtaaatgactt

SEQ ID NO: 961555 - DNA, 25 bp, Homo sapien
tcttcatagcaaaaagtgagtctag

SEQ ID NO: 961556 - DNA, 25 bp, Homo sapien
aaaatccaccaaactacattacgat

SEQ ID NO: 961557 - DNA, 25 bp, Homo sapien
tgcgcccagcaacttaatgatactt

SEQ ID NO: 961558 - DNA, 25 bp, Homo sapien
ggtactctgggattctaaacaacat

SEQ ID NO: 961559 - DNA, 25 bp, Homo sapien
cattgtggtataattggtactctgg

SEQ ID NO: 961560 - DNA, 25 bp, Homo sapien
cagcaaatggtggtcctgttacaac

SEQ ID NO: 961561 - DNA, 25 bp, Homo sapien
atatgtcgctgttcatttgtggtcc

SEQ ID NO: 961562 - DNA, 25 bp, Homo sapien
gctggagctcttccaatcgctgctt

SEQ ID NO: 961563 - DNA, 25 bp, Homo sapien
agctggagctcttccaatcgctgct

SEQ ID NO: 961564 - DNA, 25 bp, Homo sapien
gagctcttccaatcgctgcttttct

SEQ ID NO: 961565 - DNA, 25 bp, Homo sapien
gtttaataaagctctatatttctaa

SEQ ID NO: 961566 - DNA, 25 bp, Homo sapien
tttaataaagctctatatttctaaa

SEQ ID NO: 961567 - DNA, 25 bp, Homo sapien
aagtttaataaagctctatatttct

SEQ ID NO: 961568 - DNA, 25 bp, Homo sapien
agtttaataaagctctatatttcta

SEQ ID NO: 961569 - DNA, 25 bp, Homo sapien
aagtcattcaaatggctgatccgtc

SEQ ID NO: 961570 - DNA, 25 bp, Homo sapien
tccactggaatggacaagtcattca

SEQ ID NO: 961571 - DNA, 25 bp, Homo sapien
ccgtccatcttttcctatttcatga

SEQ ID NO: 961572 - DNA, 25 bp, Homo sapien
caaatggctgatccgtccatctttt

SEQ ID NO: 961573 - DNA, 25 bp, Homo sapien
gtgcaaaatcacatggagttaattt

SEQ ID NO: 961574 - DNA, 25 bp, Homo sapien
gccttactattatgcaaaacaagga

SEQ ID NO: 961575 - DNA, 25 bp, Homo sapien
agttgatcaacagcaagccttacta

SEQ ID NO: 961576 - DNA, 25 bp, Homo sapien
taaaaaatcttcagtgcaaaatcac

SEQ ID NO: 961577 - DNA, 25 bp, Homo sapien
caaacttggtgatgcctacgtcagc

SEQ ID NO: 961578 - DNA, 25 bp, Homo sapien
aagattcccgagaacccttgatgag

SEQ ID NO: 961579 - DNA, 25 bp, Homo sapien
gccgaggcacgtcttcactgatgga

SEQ ID NO: 961580 - DNA, 25 bp, Homo sapien
gacctttggttagactgcattccga

SEQ ID NO: 961581 - DNA, 25 bp, Homo sapien
ccgtgctcccgctggcacgatccat

SEQ ID NO: 961582 - DNA, 25 bp, Homo sapien
cgccgaagcgcaggacccactgggt

SEQ ID NO: 961583 - DNA, 25 bp, Homo sapien
tgggttccaaccgtgctcccgctgg

SEQ ID NO: 961584 - DNA, 25 bp, Homo sapien
aagcgcaggacccactgggttccaa

SEQ ID NO: 961585 - DNA, 25 bp, Homo sapien
gcggcgaaggccacttggatgagcc

SEQ ID NO: 961586 - DNA, 25 bp, Homo sapien
gcaaaagcagcgctttccgcgcgga

SEQ ID NO: 961587 - DNA, 25 bp, Homo sapien
aggtggccagcgctctggttgggac

SEQ ID NO: 961588 - DNA, 25 bp, Homo sapien
tggttgggacgcaagagagcggcga

SEQ ID NO: 961589 - DNA, 25 bp, Homo sapien
cggcggccgggctcgcacacgtgcg

SEQ ID NO: 961590 - DNA, 25 bp, Homo sapien
gggctcgcacacgtgcggcgcagcg

SEQ ID NO: 961591 - DNA, 25 bp, Homo sapien
acgtgcggcgcagcgacgcgccgcg

SEQ ID NO: 961592 - DNA, 25 bp, Homo sapien
gctcgcacacgtgcggcgcagcgac

SEQ ID NO: 961593 - DNA, 25 bp, Homo sapien
acatcacatgtcagacggctgggca

SEQ ID NO: 961594 - DNA, 25 bp, Homo sapien
tgaacacgactgtgagccgttggac

SEQ ID NO: 961595 - DNA, 25 bp, Homo sapien
caggacagtcatcagaggctctcaa

SEQ ID NO: 961596 - DNA, 25 bp, Homo sapien
gttggaccctcaagcaggagactcg

SEQ ID NO: 961597 - DNA, 25 bp, Homo sapien
tcacccagacctgaagcctaggagt

SEQ ID NO: 961598 - DNA, 25 bp, Homo sapien
ggtttgtttccctaatgaccacaga

SEQ ID NO: 961599 - DNA, 25 bp, Homo sapien
gataatggcaccactatttgcctgt

SEQ ID NO: 961600 - DNA, 25 bp, Homo sapien
tgatctgcccgaaagtggatcttgg

SEQ ID NO: 961601 - DNA, 25 bp, Homo sapien
ttaataagttttctcggcctggcac

SEQ ID NO: 961602 - DNA, 25 bp, Homo sapien
tattaataagttttctcggcctggc

SEQ ID NO: 961603 - DNA, 25 bp, Homo sapien
taataagttttctcggcctggcacg

SEQ ID NO: 961604 - DNA, 25 bp, Homo sapien
attaataagttttctcggcctggca

SEQ ID NO: 961605 - DNA, 25 bp, Homo sapien
cagaacgcataaacagagaactagg

SEQ ID NO: 961606 - DNA, 25 bp, Homo sapien
tttcaagtgtgtccagatgagtcac

SEQ ID NO: 961607 - DNA, 25 bp, Homo sapien
cataatctcagaggaccttcagaac

SEQ ID NO: 961608 - DNA, 25 bp, Homo sapien
cagggtgcccttaggttaagaatca

SEQ ID NO: 961609 - DNA, 25 bp, Homo sapien
tatatccccatattaaagagtattt

SEQ ID NO: 961610 - DNA, 25 bp, Homo sapien
ttggatatatccccatattaaagag

SEQ ID NO: 961611 - DNA, 25 bp, Homo sapien
tatccccatattaaagagtatttga

SEQ ID NO: 961612 - DNA, 25 bp, Homo sapien
tggatatatccccatattaaagagt

SEQ ID NO: 961613 - DNA, 25 bp, Homo sapien
tctgatagagcttttaatgttaggc

SEQ ID NO: 961614 - DNA, 25 bp, Homo sapien
tgtccagttcggcttgcccgttgct

SEQ ID NO: 961615 - DNA, 25 bp, Homo sapien
catttacttcagttggagcagcagc

SEQ ID NO: 961616 - DNA, 25 bp, Homo sapien
gctgacgttacgagaccatttactt

SEQ ID NO: 961617 - DNA, 25 bp, Homo sapien
gataattcttgctaatcacttcaat

SEQ ID NO: 961618 - DNA, 25 bp, Homo sapien
gaatagactgtttttgggctgtgat

SEQ ID NO: 961619 - DNA, 25 bp, Homo sapien
taccaagaagtaagtaagaatagac

SEQ ID NO: 961620 - DNA, 25 bp, Homo sapien
agctgcagtttgatatgactcggaa

SEQ ID NO: 961621 - DNA, 25 bp, Homo sapien
ttaatgtatcaaattgttacaggag

SEQ ID NO: 961622 - DNA, 25 bp, Homo sapien
tattttaaacagtaagctcaacatt

SEQ ID NO: 961623 - DNA, 25 bp, Homo sapien
tttgggtgggataagatcagttgaa

SEQ ID NO: 961624 - DNA, 25 bp, Homo sapien
tactgtatgcttacagcacaatggg

SEQ ID NO: 961625 - DNA, 25 bp, Homo sapien
tgtttaatacctaataggccaggcc

SEQ ID NO: 961626 - DNA, 25 bp, Homo sapien
gctatgatcgtgcagtttcactcca

SEQ ID NO: 961627 - DNA, 25 bp, Homo sapien
gaacgtcggttctgcactactgctg

SEQ ID NO: 961628 - DNA, 25 bp, Homo sapien
agatgtactgcagtcagcttcaggg

SEQ ID NO: 961629 - DNA, 25 bp, Homo sapien
ttatcttggatttatggtgttatta

SEQ ID NO: 961630 - DNA, 25 bp, Homo sapien
tcttggatttatggtgttattaaaa

SEQ ID NO: 961631 - DNA, 25 bp, Homo sapien
tatcttggatttatggtgttattaa

SEQ ID NO: 961632 - DNA, 25 bp, Homo sapien
ttattatcttggatttatggtgtta

SEQ ID NO: 961633 - DNA, 25 bp, Homo sapien
tacaagtataaatgctgagtatgtc

SEQ ID NO: 961634 - DNA, 25 bp, Homo sapien
tatgtctgttgaagacgagcagaga

SEQ ID NO: 961635 - DNA, 25 bp, Homo sapien
ctgtgctaattaagggaaattctgt

SEQ ID NO: 961636 - DNA, 25 bp, Homo sapien
ctgttgtggataatcaaacatagcc

SEQ ID NO: 961637 - DNA, 25 bp, Homo sapien
ctccttgaatttatccaaagttatt

SEQ ID NO: 961638 - DNA, 25 bp, Homo sapien
tatactgcacaaatgatatggtgcc

SEQ ID NO: 961639 - DNA, 25 bp, Homo sapien
gcacaaatgatatggtgcctctgcc

SEQ ID NO: 961640 - DNA, 25 bp, Homo sapien
ctgcacaaatgatatggtgcctctg

SEQ ID NO: 961641 - DNA, 25 bp, Homo sapien
tactgcacaaatgatatggtgcctc

SEQ ID NO: 961642 - DNA, 25 bp, Homo sapien
gaaacgccacgcctgttacttttgc

SEQ ID NO: 961643 - DNA, 25 bp, Homo sapien
gccacaatgttagagttatccataa

SEQ ID NO: 961644 - DNA, 25 bp, Homo sapien
tttgcaattctcagtcgttccaata

SEQ ID NO: 961645 - DNA, 25 bp, Homo sapien
tctcagtcgttccaatagagatatt

SEQ ID NO: 961646 - DNA, 25 bp, Homo sapien
tttctagagctcacggttcagggca

SEQ ID NO: 961647 - DNA, 25 bp, Homo sapien
tgctaggcgactgcctggcgtctca

SEQ ID NO: 961648 - DNA, 25 bp, Homo sapien
gctgcgacccggacctggaatttct

SEQ ID NO: 961649 - DNA, 25 bp, Homo sapien
tccgcgtcccgctgttgctaggcga

SEQ ID NO: 961650 - DNA, 25 bp, Homo sapien
taataaaaaccccatgctgcataga

SEQ ID NO: 961651 - DNA, 25 bp, Homo sapien
ggcaaaaagcaagcacttaaggtct

SEQ ID NO: 961652 - DNA, 25 bp, Homo sapien
aataaagtgcttaaaaatctcatct

SEQ ID NO: 961653 - DNA, 25 bp, Homo sapien
gttctatttatctggtcaacgggca

SEQ ID NO: 961654 - DNA, 25 bp, Homo sapien
ctcgggagcagacgaattctcagct

SEQ ID NO: 961655 - DNA, 25 bp, Homo sapien
ggttttctgggcatctgcgttggta

SEQ ID NO: 961656 - DNA, 25 bp, Homo sapien
gctcagcctcgggagcagacgaatt

SEQ ID NO: 961657 - DNA, 25 bp, Homo sapien
atctgcgttggtaattgaagttgct

SEQ ID NO: 961658 - DNA, 25 bp, Homo sapien
ggagcattctccgatccctcggtct

SEQ ID NO: 961659 - DNA, 25 bp, Homo sapien
aggacccctatgacgtggatagcgt

SEQ ID NO: 961660 - DNA, 25 bp, Homo sapien
gatctgctgcatatttaccgccttg

SEQ ID NO: 961661 - DNA, 25 bp, Homo sapien
gaactcgaacaccaccaggatctgt

SEQ ID NO: 961662 - DNA, 25 bp, Homo sapien
ggcgccgccgatgtgaggccgcccg

SEQ ID NO: 961663 - DNA, 25 bp, Homo sapien
gcgccgccgatgtgaggccgcccgg

SEQ ID NO: 961664 - DNA, 25 bp, Homo sapien
ggtgtcggcggcgctgagggcgggg

SEQ ID NO: 961665 - DNA, 25 bp, Homo sapien
gtgtcggcggcgctgagggcggggg

SEQ ID NO: 961666 - DNA, 25 bp, Homo sapien
tggtgtcggcggcgctgagggcggg

SEQ ID NO: 961667 - DNA, 25 bp, Homo sapien
tgtcggcggcgctgagggcgggggc

SEQ ID NO: 961668 - DNA, 25 bp, Homo sapien
tgctcattggttgcggtgatggaga

SEQ ID NO: 961669 - DNA, 25 bp, Homo sapien
ctcattggttgcggtgatggagact

SEQ ID NO: 961670 - DNA, 25 bp, Homo sapien
cattggttgcggtgatggagactgg

SEQ ID NO: 961671 - DNA, 25 bp, Homo sapien
attggttgcggtgatggagactggg

SEQ ID NO: 961672 - DNA, 25 bp, Homo sapien
ttagcggccagtacagcagaggcga

SEQ ID NO: 961673 - DNA, 25 bp, Homo sapien
cggctctggctctgcttagcggcca

SEQ ID NO: 961674 - DNA, 25 bp, Homo sapien
gggttgaccaaagctgtatgatcgc

SEQ ID NO: 961675 - DNA, 25 bp, Homo sapien
gtatgatcgcttgggaaagcggctc

SEQ ID NO: 961676 - DNA, 25 bp, Homo sapien
tcttgccaagtttctggttgttttc

SEQ ID NO: 961677 - DNA, 25 bp, Homo sapien
cttgccaagtttctggttgttttct

SEQ ID NO: 961678 - DNA, 25 bp, Homo sapien
ctcttgccaagtttctggttgtttt

SEQ ID NO: 961679 - DNA, 25 bp, Homo sapien
tcaggagtccacaagagtttgagag

SEQ ID NO: 961680 - DNA, 25 bp, Homo sapien
gagtttgagagtacacagcttctgc

SEQ ID NO: 961681 - DNA, 25 bp, Homo sapien
agagtttgagagtacacagcttctg

SEQ ID NO: 961682 - DNA, 25 bp, Homo sapien
aaatgcagcatatcccactgcttca

SEQ ID NO: 961683 - DNA, 25 bp, Homo sapien
atgcagcatatcccactgcttcatt

SEQ ID NO: 961684 - DNA, 25 bp, Homo sapien
aatgcagcatatcccactgcttcat

SEQ ID NO: 961685 - DNA, 25 bp, Homo sapien
cagagagtctgataaaattgctttg

SEQ ID NO: 961686 - DNA, 25 bp, Homo sapien
gctttgctctgaaagtaggagtgtg

SEQ ID NO: 961687 - DNA, 25 bp, Homo sapien
aaaggaaaatgcagtgtctgctccc

SEQ ID NO: 961688 - DNA, 25 bp, Homo sapien
aggaaaatgcagtgtctgctccctc

SEQ ID NO: 961689 - DNA, 25 bp, Homo sapien
tatgcctgatgctatttaggaactg

SEQ ID NO: 961690 - DNA, 25 bp, Homo sapien
cctcaggagcatcgatggtgtctct

SEQ ID NO: 961691 - DNA, 25 bp, Homo sapien
gcataccactagctccttcattgtt

SEQ ID NO: 961692 - DNA, 25 bp, Homo sapien
gctgctagcttgatattagccatgg

SEQ ID NO: 961693 - DNA, 25 bp, Homo sapien
cctgacagctttggctccgagtggc

SEQ ID NO: 961694 - DNA, 25 bp, Homo sapien
ttgctctgctcttcgggcactccaa

SEQ ID NO: 961695 - DNA, 25 bp, Homo sapien
aaatcgccttagtttgcctgacagc

SEQ ID NO: 961696 - DNA, 25 bp, Homo sapien
ttcactcgggactgaagcaaaatgg

SEQ ID NO: 961697 - DNA, 25 bp, Homo sapien
tttaaatcaccctgtatgagtctgt

SEQ ID NO: 961698 - DNA, 25 bp, Homo sapien
ttaaatcaccctgtatgagtctgtt

SEQ ID NO: 961699 - DNA, 25 bp, Homo sapien
tcaggagaaccacatgggagaaacc

SEQ ID NO: 961700 - DNA, 25 bp, Homo sapien
gggagaaaccgtctccatgattcaa

SEQ ID NO: 961701 - DNA, 25 bp, Homo sapien
gcgaagggtaagcaagacacattct

SEQ ID NO: 961702 - DNA, 25 bp, Homo sapien
caagaaggagacgtgccgagcgaat

SEQ ID NO: 961703 - DNA, 25 bp, Homo sapien
gcctgcttccgatcttcactaaaca

SEQ ID NO: 961704 - DNA, 25 bp, Homo sapien
gacaactccacccaaactaattgct

SEQ ID NO: 961705 - DNA, 25 bp, Homo sapien
cattctctcaggtaatcacaacaat

SEQ ID NO: 961706 - DNA, 25 bp, Homo sapien
aactaattgctctaccagagacctg

SEQ ID NO: 961707 - DNA, 25 bp, Homo sapien
tatcacaggcatggaatgaactcta

SEQ ID NO: 961708 - DNA, 25 bp, Homo sapien
ggaaccatggcagtatcaatagata

SEQ ID NO: 961709 - DNA, 25 bp, Homo sapien
tggagaatatttccaggcctggtga

SEQ ID NO: 961710 - DNA, 25 bp, Homo sapien
gctaatacatagaggtgcgggacga

SEQ ID NO: 961711 - DNA, 25 bp, Homo sapien
gaccagctacgtaaaacccacagag

SEQ ID NO: 961712 - DNA, 25 bp, Homo sapien
tgttaaagtgccatgggccgacagc

SEQ ID NO: 961713 - DNA, 25 bp, Homo sapien
gaaatcatccgaactaatgtcctgg

SEQ ID NO: 961714 - DNA, 25 bp, Homo sapien
taatataccccatgactgaccagct

SEQ ID NO: 961715 - DNA, 25 bp, Homo sapien
ctttgaagaccagtgaggacccaga

SEQ ID NO: 961716 - DNA, 25 bp, Homo sapien
gatccatgggtgtgctgatcccacc

SEQ ID NO: 961717 - DNA, 25 bp, Homo sapien
taggtaaaccacatcactaaacggc

SEQ ID NO: 961718 - DNA, 25 bp, Homo sapien
gagcttcagagcatgccaacctgga

SEQ ID NO: 961719 - DNA, 25 bp, Homo sapien
ggaaaacacaaggacgaatgccgcg

SEQ ID NO: 961720 - DNA, 25 bp, Homo sapien
gacccaatagcaaatgaggtgacgg

SEQ ID NO: 961721 - DNA, 25 bp, Homo sapien
gatccatgcatgtaaggcagtcaca

SEQ ID NO: 961722 - DNA, 25 bp, Homo sapien
aatgccgcggacattcctgggagtc

SEQ ID NO: 961723 - DNA, 25 bp, Homo sapien
gaaactgcatcctgaatggtggctg

SEQ ID NO: 961724 - DNA, 25 bp, Homo sapien
tacccggagctatgggcacatgcag

SEQ ID NO: 961725 - DNA, 25 bp, Homo sapien
gctgacggcctgagtataaatgtgc

SEQ ID NO: 961726 - DNA, 25 bp, Homo sapien
tcaaaatggtgaggagactctccct

SEQ ID NO: 961727 - DNA, 25 bp, Homo sapien
ttgagataggatctcgctctgttgc

SEQ ID NO: 961728 - DNA, 25 bp, Homo sapien
ttttttgagataggatctcgctctg

SEQ ID NO: 961729 - DNA, 25 bp, Homo sapien
ttttgagataggatctcgctctgtt

SEQ ID NO: 961730 - DNA, 25 bp, Homo sapien
accatgtgggcaaggctagtctcaa

SEQ ID NO: 961731 - DNA, 25 bp, Homo sapien
tgtgcgtacgctcatacagctggta

SEQ ID NO: 961732 - DNA, 25 bp, Homo sapien
aggtttgaatcagggtctgacccca

SEQ ID NO: 961733 - DNA, 25 bp, Homo sapien
cacacagctaactagaaggcctagg

SEQ ID NO: 961734 - DNA, 25 bp, Homo sapien
gcctaggtttggaagccaggtagcc

SEQ ID NO: 961735 - DNA, 25 bp, Homo sapien
gtcctgggctggatatacttgaagg

SEQ ID NO: 961736 - DNA, 25 bp, Homo sapien
tgtcctgggctggatatacttgaag

SEQ ID NO: 961737 - DNA, 25 bp, Homo sapien
ctggattgtgacaaagctaggctgc

SEQ ID NO: 961738 - DNA, 25 bp, Homo sapien
caaagctaggctgctatttttccca

SEQ ID NO: 961739 - DNA, 25 bp, Homo sapien
gattgtgacaaagctaggctgctat

SEQ ID NO: 961740 - DNA, 25 bp, Homo sapien
gacaaagctaggctgctatttttcc

SEQ ID NO: 961741 - DNA, 25 bp, Homo sapien
aaagacaccattgaagccccactca

SEQ ID NO: 961742 - DNA, 25 bp, Homo sapien
gaagggcccgccgatgccacatgtt

SEQ ID NO: 961743 - DNA, 25 bp, Homo sapien
ctgggaagggcccgccgatgccaca

SEQ ID NO: 961744 - DNA, 25 bp, Homo sapien
cccactcagacacacgagccagcct

SEQ ID NO: 961745 - DNA, 25 bp, Homo sapien
gatacaattaaatggatccccaaat

SEQ ID NO: 961746 - DNA, 25 bp, Homo sapien
tcaaagcaaaggtttatcttggatt

SEQ ID NO: 961747 - DNA, 25 bp, Homo sapien
ttcagtttaatagccctgtggcaac

SEQ ID NO: 961748 - DNA, 25 bp, Homo sapien
tggccttatatcaaccagatacaat

SEQ ID NO: 961749 - DNA, 25 bp, Homo sapien
gacaagcaccgaggtatcacctgcg

SEQ ID NO: 961750 - DNA, 25 bp, Homo sapien
tcacctgcgttagagaaccaatgct

SEQ ID NO: 961751 - DNA, 25 bp, Homo sapien
ggcctttgcctttactgaatacttg

SEQ ID NO: 961752 - DNA, 25 bp, Homo sapien
tgaccatatccaaggcagccgttaa

SEQ ID NO: 961753 - DNA, 25 bp, Homo sapien
tggcattgaacacttctttgccagc

SEQ ID NO: 961754 - DNA, 25 bp, Homo sapien
tacacactcctatctgcaccatggc

SEQ ID NO: 961755 - DNA, 25 bp, Homo sapien
gcaccatggcattgaacacttcttt

SEQ ID NO: 961756 - DNA, 25 bp, Homo sapien
tatctgcaccatggcattgaacact

SEQ ID NO: 961757 - DNA, 25 bp, Homo sapien
aaagataaaactgaccgatgtggag

SEQ ID NO: 961758 - DNA, 25 bp, Homo sapien
tgataactgcactcactgcactggg

SEQ ID NO: 961759 - DNA, 25 bp, Homo sapien
catagtgagcgtggtatcaagtact

SEQ ID NO: 961760 - DNA, 25 bp, Homo sapien
aataaccgtaaagtgccgagaacag

SEQ ID NO: 961761 - DNA, 25 bp, Homo sapien
ttacctgtcggagccgcccggctaa

SEQ ID NO: 961762 - DNA, 25 bp, Homo sapien
aagcagagggtgaaaactgccttcg

SEQ ID NO: 961763 - DNA, 25 bp, Homo sapien
ctgccttcggggaaaacgagaacag

SEQ ID NO: 961764 - DNA, 25 bp, Homo sapien
acaggaatcaagcttgtgttacctg

SEQ ID NO: 961765 - DNA, 25 bp, Homo sapien
ttttgtgaacgctattcataccagg

SEQ ID NO: 961766 - DNA, 25 bp, Homo sapien
caggctttgctactagaactcgagt

SEQ ID NO: 961767 - DNA, 25 bp, Homo sapien
acacagcattgtgtgaggccagaga

SEQ ID NO: 961768 - DNA, 25 bp, Homo sapien
ccttctgatttgtcaaaagagaggg

SEQ ID NO: 961769 - DNA, 25 bp, Homo sapien
ccattgtttgagttgtgcacagaca

SEQ ID NO: 961770 - DNA, 25 bp, Homo sapien
tgcacagacaggctgttatagggag

SEQ ID NO: 961771 - DNA, 25 bp, Homo sapien
cctgagggctccagtttggcactga

SEQ ID NO: 961772 - DNA, 25 bp, Homo sapien
tgtctcactatgtccgcggggccgc

SEQ ID NO: 961773 - DNA, 25 bp, Homo sapien
cagtggagacgagagggatgtctgc

SEQ ID NO: 961774 - DNA, 25 bp, Homo sapien
ctgacagtggagacgagagggatgt

SEQ ID NO: 961775 - DNA, 25 bp, Homo sapien
gtggagacgagagggatgtctgcaa

SEQ ID NO: 961776 - DNA, 25 bp, Homo sapien
gacagtggagacgagagggatgtct

SEQ ID NO: 961777 - DNA, 25 bp, Homo sapien
ggtccggcgatgtcacgaaagctgc

SEQ ID NO: 961778 - DNA, 25 bp, Homo sapien
taagaagaggtgagcctcgagctga

SEQ ID NO: 961779 - DNA, 25 bp, Homo sapien
tcgtcgctacgggtggacaggtctt

SEQ ID NO: 961780 - DNA, 25 bp, Homo sapien
ccttgaaggttgagtccatgatgct

SEQ ID NO: 961781 - DNA, 25 bp, Homo sapien
tggttgcaagtaagaaatgtgagga

SEQ ID NO: 961782 - DNA, 25 bp, Homo sapien
cctggttgcaagtaagaaatgtgag

SEQ ID NO: 961783 - DNA, 25 bp, Homo sapien
ctggttgcaagtaagaaatgtgagg

SEQ ID NO: 961784 - DNA, 25 bp, Homo sapien
ggttgcaagtaagaaatgtgaggac

SEQ ID NO: 961785 - DNA, 25 bp, Homo sapien
cacaggggccggagcttcccctctc

SEQ ID NO: 961786 - DNA, 25 bp, Homo sapien
ctggacacaggggccggagcttccc

SEQ ID NO: 961787 - DNA, 25 bp, Homo sapien
caggggccggagcttcccctctcca

SEQ ID NO: 961788 - DNA, 25 bp, Homo sapien
gacacaggggccggagcttcccctc

SEQ ID NO: 961789 - DNA, 25 bp, Homo sapien
tgcccagagactctcggggctttcc

SEQ ID NO: 961790 - DNA, 25 bp, Homo sapien
cagcatcctctcgcctttgctgtct

SEQ ID NO: 961791 - DNA, 25 bp, Homo sapien
gcatcctctcgcctttgctgtctgc

SEQ ID NO: 961792 - DNA, 25 bp, Homo sapien
ttctgcccagagactctcggggctt

SEQ ID NO: 961793 - DNA, 25 bp, Homo sapien
cagagagccatttccacactgactc

SEQ ID NO: 961794 - DNA, 25 bp, Homo sapien
atttccacactgactcgcggctgct

SEQ ID NO: 961795 - DNA, 25 bp, Homo sapien
gagccatttccacactgactcgcgg

SEQ ID NO: 961796 - DNA, 25 bp, Homo sapien
ttccacactgactcgcggctgctgg

SEQ ID NO: 961797 - DNA, 25 bp, Homo sapien
tggtgagatggcaagttgcccattc

SEQ ID NO: 961798 - DNA, 25 bp, Homo sapien
ccattcccaggactagctttgtttt

SEQ ID NO: 961799 - DNA, 25 bp, Homo sapien
cattcccaggactagctttgttttt

SEQ ID NO: 961800 - DNA, 25 bp, Homo sapien
tggcaagttgcccattcccaggact

SEQ ID NO: 961801 - DNA, 25 bp, Homo sapien
caagaccagcactaggctgtggctt

SEQ ID NO: 961802 - DNA, 25 bp, Homo sapien
ccaagaccagcactaggctgtggct

SEQ ID NO: 961803 - DNA, 25 bp, Homo sapien
agccaagaccagcactaggctgtgg

SEQ ID NO: 961804 - DNA, 25 bp, Homo sapien
agaccagcactaggctgtggcttac

SEQ ID NO: 961805 - DNA, 25 bp, Homo sapien
ccatcttctgatttgcgctgggagt

SEQ ID NO: 961806 - DNA, 25 bp, Homo sapien
tctgatttgcgctgggagtgactcc

SEQ ID NO: 961807 - DNA, 25 bp, Homo sapien
gaggcacacggccacagggacgttt

SEQ ID NO: 961808 - DNA, 25 bp, Homo sapien
ggacgtttgttcgtgattttgcagg

SEQ ID NO: 961809 - DNA, 25 bp, Homo sapien
actctcccagctgtagcatcaggac

SEQ ID NO: 961810 - DNA, 25 bp, Homo sapien
cactctcccagctgtagcatcagga

SEQ ID NO: 961811 - DNA, 25 bp, Homo sapien
ccactctcccagctgtagcatcagg

SEQ ID NO: 961812 - DNA, 25 bp, Homo sapien
tgtagcatcaggaccaggtgccagc

SEQ ID NO: 961813 - DNA, 25 bp, Homo sapien
tgttggcggctcctgatgcagagtt

SEQ ID NO: 961814 - DNA, 25 bp, Homo sapien
gaatactgtgttggcggctcctgat

SEQ ID NO: 961815 - DNA, 25 bp, Homo sapien
gatgcagagttaaatgcttgttaaa

SEQ ID NO: 961816 - DNA, 25 bp, Homo sapien
aagagaatactgtgttggcggctcc

SEQ ID NO: 961817 - DNA, 25 bp, Homo sapien
tgggcagcgaggttgagagggtagc

SEQ ID NO: 961818 - DNA, 25 bp, Homo sapien
tgacagcagattggttaggcaagtc

SEQ ID NO: 961819 - DNA, 25 bp, Homo sapien
tgccatccctccaggttcgggcccg

SEQ ID NO: 961820 - DNA, 25 bp, Homo sapien
gggtgctacgctctccagagttgac

SEQ ID NO: 961821 - DNA, 25 bp, Homo sapien
tgatgccctgtggctcgggtttctg

SEQ ID NO: 961822 - DNA, 25 bp, Homo sapien
atgccctgtggctcgggtttctgtg

SEQ ID NO: 961823 - DNA, 25 bp, Homo sapien
gatgccctgtggctcgggtttctgt

SEQ ID NO: 961824 - DNA, 25 bp, Homo sapien
ctgatgccctgtggctcgggtttct

SEQ ID NO: 961825 - DNA, 25 bp, Homo sapien
cacattccttccacgtgtccgggat

SEQ ID NO: 961826 - DNA, 25 bp, Homo sapien
gagcaaagagctgcgaggatcacca

SEQ ID NO: 961827 - DNA, 25 bp, Homo sapien
tgtccgggattgacacttccataac

SEQ ID NO: 961828 - DNA, 25 bp, Homo sapien
gaggctcaatcaccaagtaactgag

SEQ ID NO: 961829 - DNA, 25 bp, Homo sapien
caatagcattcttccagattaaggc

SEQ ID NO: 961830 - DNA, 25 bp, Homo sapien
ggcttcttccctgtttatgaatccc

SEQ ID NO: 961831 - DNA, 25 bp, Homo sapien
aggcttcttccctgtttatgaatcc

SEQ ID NO: 961832 - DNA, 25 bp, Homo sapien
tagcattcttccagattaaggcttc

SEQ ID NO: 961833 - DNA, 25 bp, Homo sapien
attaaaatgtaagtacactgggaag

SEQ ID NO: 961834 - DNA, 25 bp, Homo sapien
cactgggaagtggatagtaaaggaa

SEQ ID NO: 961835 - DNA, 25 bp, Homo sapien
taaaatgtaagtacactgggaagtg

SEQ ID NO: 961836 - DNA, 25 bp, Homo sapien
aatgtaagtacactgggaagtggat

SEQ ID NO: 961837 - DNA, 25 bp, Homo sapien
catttaggagattaccaacacaaaa

SEQ ID NO: 961838 - DNA, 25 bp, Homo sapien
gattctctaggagcaataaaaaggc

SEQ ID NO: 961839 - DNA, 25 bp, Homo sapien
caaagcatgtaacacatcattcgtg

SEQ ID NO: 961840 - DNA, 25 bp, Homo sapien
tcataagtgtgtgtcattacaccca

SEQ ID NO: 961841 - DNA, 25 bp, Homo sapien
agcttggatcttatattgcacaaaa

SEQ ID NO: 961842 - DNA, 25 bp, Homo sapien
tggatcttatattgcacaaaagctg

SEQ ID NO: 961843 - DNA, 25 bp, Homo sapien
tttcaggtaactgtggggcagcttg

SEQ ID NO: 961844 - DNA, 25 bp, Homo sapien
agtttcaggtaactgtggggcagct

SEQ ID NO: 961845 - DNA, 25 bp, Homo sapien
tgaggcgactcccaaatgagcaaaa

SEQ ID NO: 961846 - DNA, 25 bp, Homo sapien
catggagtttagtgcgaatcgaaaa

SEQ ID NO: 961847 - DNA, 25 bp, Homo sapien
tcaaacacatagtaccctcgtccca

SEQ ID NO: 961848 - DNA, 25 bp, Homo sapien
aaacgatcccatcttctatcaaaca

SEQ ID NO: 961849 - DNA, 25 bp, Homo sapien
acacacaaagggaattttccgacat

SEQ ID NO: 961850 - DNA, 25 bp, Homo sapien
agctgttccaggtctagacatcatt

SEQ ID NO: 961851 - DNA, 25 bp, Homo sapien
gctgttccaggtctagacatcattt

SEQ ID NO: 961852 - DNA, 25 bp, Homo sapien
aattttccgacatagaagctggtcc

SEQ ID NO: 961853 - DNA, 25 bp, Homo sapien
taatgtatcaactggccatgagaga

SEQ ID NO: 961854 - DNA, 25 bp, Homo sapien
agctgtagatcctcactgcgtgggc

SEQ ID NO: 961855 - DNA, 25 bp, Homo sapien
gagtttagcgaatccactgcagcct

SEQ ID NO: 961856 - DNA, 25 bp, Homo sapien
ttccgtacagatgcgaggctaggcc

SEQ ID NO: 961857 - DNA, 25 bp, Homo sapien
caaagcacaggcgaagaacgcatgg

SEQ ID NO: 961858 - DNA, 25 bp, Homo sapien
aagaacgcatggcaaggaacggaag

SEQ ID NO: 961859 - DNA, 25 bp, Homo sapien
cacaggcgaagaacgcatggcaagg

SEQ ID NO: 961860 - DNA, 25 bp, Homo sapien
tggcaaggaacggaaggaggcctac

SEQ ID NO: 961861 - DNA, 25 bp, Homo sapien
agtctagcttctcggattcgtcggc

SEQ ID NO: 961862 - DNA, 25 bp, Homo sapien
tagcttctcggattcgtcggctccg

SEQ ID NO: 961863 - DNA, 25 bp, Homo sapien
tctcggattcgtcggctccgtccat

SEQ ID NO: 961864 - DNA, 25 bp, Homo sapien
actgacagtctagcttctcggattc

SEQ ID NO: 961865 - DNA, 25 bp, Homo sapien
ctccccttcatcactggacagtcgg

SEQ ID NO: 961866 - DNA, 25 bp, Homo sapien
gagtgtggccgctatgatttgaaga

SEQ ID NO: 961867 - DNA, 25 bp, Homo sapien
tggagtgtggccgctatgatttgaa

SEQ ID NO: 961868 - DNA, 25 bp, Homo sapien
tctggagtgtggccgctatgatttg

SEQ ID NO: 961869 - DNA, 25 bp, Homo sapien
gctctggagtgtggccgctatgatt

SEQ ID NO: 961870 - DNA, 25 bp, Homo sapien
aaaatcgcttgaatccgtgaggtgg

SEQ ID NO: 961871 - DNA, 25 bp, Homo sapien
caggaaaatcgcttgaatccgtgag

SEQ ID NO: 961872 - DNA, 25 bp, Homo sapien
gcaggaaaatcgcttgaatccgtga

SEQ ID NO: 961873 - DNA, 25 bp, Homo sapien
ggaaaatcgcttgaatccgtgaggt

SEQ ID NO: 961874 - DNA, 25 bp, Homo sapien
tcggccataatgacagagggactct

SEQ ID NO: 961875 - DNA, 25 bp, Homo sapien
tgtcaacggtgacagtaacgccacg

SEQ ID NO: 961876 - DNA, 25 bp, Homo sapien
taggtcaggcttgcaccaacatgga

SEQ ID NO: 961877 - DNA, 25 bp, Homo sapien
taacgccacgatggtgagcatgatg

SEQ ID NO: 961878 - DNA, 25 bp, Homo sapien
gaagtatttccctcgtggaagtcag

SEQ ID NO: 961879 - DNA, 25 bp, Homo sapien
ccggcccggattggcttggaagtat

SEQ ID NO: 961880 - DNA, 25 bp, Homo sapien
cctagcagagaatcctgtgccggcc

SEQ ID NO: 961881 - DNA, 25 bp, Homo sapien
gatgcaacttttggttctggcccag

SEQ ID NO: 961882 - DNA, 25 bp, Homo sapien
tcaaattgctttttccggcctggga

SEQ ID NO: 961883 - DNA, 25 bp, Homo sapien
ctgggactgccctccgatggcttag

SEQ ID NO: 961884 - DNA, 25 bp, Homo sapien
ccctccgatggcttagcgaatgtgt

SEQ ID NO: 961885 - DNA, 25 bp, Homo sapien
ctgccaggaggaggtcaaattgctt

SEQ ID NO: 961886 - DNA, 25 bp, Homo sapien
ggcaggcactctgctaccatggacg

SEQ ID NO: 961887 - DNA, 25 bp, Homo sapien
caggcactctgctaccatggacgag

SEQ ID NO: 961888 - DNA, 25 bp, Homo sapien
tctgctaccatggacgagaagaaag

SEQ ID NO: 961889 - DNA, 25 bp, Homo sapien
cactctgctaccatggacgagaaga

SEQ ID NO: 961890 - DNA, 25 bp, Homo sapien
gagagtggcatgcaaacatttcgac

SEQ ID NO: 961891 - DNA, 25 bp, Homo sapien
acaccctgccgtgtgcagagagtgg

SEQ ID NO: 961892 - DNA, 25 bp, Homo sapien
aacatttcgacaaaggccccagcga

SEQ ID NO: 961893 - DNA, 25 bp, Homo sapien
ccccagcgagagcaggaagtatttt

SEQ ID NO: 961894 - DNA, 25 bp, Homo sapien
caaggtttctttgtctcgggatcca

SEQ ID NO: 961895 - DNA, 25 bp, Homo sapien
gatcttgtgcaaggtttctttgtct

SEQ ID NO: 961896 - DNA, 25 bp, Homo sapien
cttgcaggtgagggatcttgtgcaa

SEQ ID NO: 961897 - DNA, 25 bp, Homo sapien
tttgtctcgggatccaatactccac

SEQ ID NO: 961898 - DNA, 25 bp, Homo sapien
gtctgtcagagtcaggcctgtgcct

SEQ ID NO: 961899 - DNA, 25 bp, Homo sapien
tgccaccacctctgaagagtgaaac

SEQ ID NO: 961900 - DNA, 25 bp, Homo sapien
tgcttctgctatggcgaggagccct

SEQ ID NO: 961901 - DNA, 25 bp, Homo sapien
gcaaaagacccgacgaaacaagaca

SEQ ID NO: 961902 - DNA, 25 bp, Homo sapien
gtctatggtggttggcagaattcct

SEQ ID NO: 961903 - DNA, 25 bp, Homo sapien
tgtctatggtggttggcagaattcc

SEQ ID NO: 961904 - DNA, 25 bp, Homo sapien
ttgtctatggtggttggcagaattc

SEQ ID NO: 961905 - DNA, 25 bp, Homo sapien
acatcaggacaggcttaattaaagg

SEQ ID NO: 961906 - DNA, 25 bp, Homo sapien
catctgccttcactaggttaggaat

SEQ ID NO: 961907 - DNA, 25 bp, Homo sapien
accatctgccttcactaggttagga

SEQ ID NO: 961908 - DNA, 25 bp, Homo sapien
ccatctgccttcactaggttaggaa

SEQ ID NO: 961909 - DNA, 25 bp, Homo sapien
tcggacggcttctggatcactctca

SEQ ID NO: 961910 - DNA, 25 bp, Homo sapien
tcaaattgagtgagccgccatgtag

SEQ ID NO: 961911 - DNA, 25 bp, Homo sapien
gccatgtagcattatccaatattcc

SEQ ID NO: 961912 - DNA, 25 bp, Homo sapien
cacggcgtgctgtcggacggcttct

SEQ ID NO: 961913 - DNA, 25 bp, Homo sapien
gtatacacgctagccatcgggccag

SEQ ID NO: 961914 - DNA, 25 bp, Homo sapien
ctttctttactacagctggcaacag

SEQ ID NO: 961915 - DNA, 25 bp, Homo sapien
ctacagctggcaacagccccaaagt

SEQ ID NO: 961916 - DNA, 25 bp, Homo sapien
tcctcttccccagtatacacgctag

SEQ ID NO: 961917 - DNA, 25 bp, Homo sapien
ctaatatgctgggagtagttctctc

SEQ ID NO: 961918 - DNA, 25 bp, Homo sapien
ttgttcacttgggatgaactctttc

SEQ ID NO: 961919 - DNA, 25 bp, Homo sapien
cctcatcatctctgtacctctgtct

SEQ ID NO: 961920 - DNA, 25 bp, Homo sapien
gggaaagatgagtctccactcttcc

SEQ ID NO: 961921 - DNA, 25 bp, Homo sapien
aaacatggttctcttggcatcaagt

SEQ ID NO: 961922 - DNA, 25 bp, Homo sapien
ggcatcaagtagattcccctccctg

SEQ ID NO: 961923 - DNA, 25 bp, Homo sapien
tgtgcttggcctgtctgaatttatc

SEQ ID NO: 961924 - DNA, 25 bp, Homo sapien
tatctttctagatcaaggcgggtcc

SEQ ID NO: 961925 - DNA, 25 bp, Homo sapien
agggagttctctgcaccgcctgatg

SEQ ID NO: 961926 - DNA, 25 bp, Homo sapien
gcttatgctttcttggccagtaggg

SEQ ID NO: 961927 - DNA, 25 bp, Homo sapien
acggtccagtatgggttggcactgc

SEQ ID NO: 961928 - DNA, 25 bp, Homo sapien
taaatctaatctaagggccacggtc

SEQ ID NO: 961929 - DNA, 25 bp, Homo sapien
ccagtgttgcgggtagggccgtggt

SEQ ID NO: 961930 - DNA, 25 bp, Homo sapien
tgggacccagtgttgcgggtagggc

SEQ ID NO: 961931 - DNA, 25 bp, Homo sapien
ggtagggccgtggtcttgctccaca

SEQ ID NO: 961932 - DNA, 25 bp, Homo sapien
agggccgtggtcttgctccacacca

SEQ ID NO: 961933 - DNA, 25 bp, Homo sapien
gctgagacaggcttttgttttcacc

SEQ ID NO: 961934 - DNA, 25 bp, Homo sapien
tgttttcacctgtactagtgatgtc

SEQ ID NO: 961935 - DNA, 25 bp, Homo sapien
gtttatcccttgatcctttcgcagg

SEQ ID NO: 961936 - DNA, 25 bp, Homo sapien
tgctgctggaggtaagtagattgtc

SEQ ID NO: 961937 - DNA, 25 bp, Homo sapien
aggtctacacattgaaccgtgtctt

SEQ ID NO: 961938 - DNA, 25 bp, Homo sapien
ctacacattgaaccgtgtcttctct

SEQ ID NO: 961939 - DNA, 25 bp, Homo sapien
aaggtctacacattgaaccgtgtct

SEQ ID NO: 961940 - DNA, 25 bp, Homo sapien
gaaggtctacacattgaaccgtgtc

SEQ ID NO: 961941 - DNA, 25 bp, Homo sapien
aggaatctgaaagagccagcgggac

SEQ ID NO: 961942 - DNA, 25 bp, Homo sapien
tctgaaagagccagcgggacctctc

SEQ ID NO: 961943 - DNA, 25 bp, Homo sapien
taggaggaatctgaaagagccagcg

SEQ ID NO: 961944 - DNA, 25 bp, Homo sapien
ctacagataggaggaatctgaaaga

SEQ ID NO: 961945 - DNA, 25 bp, Homo sapien
tatgagccctgggttattacagtga

SEQ ID NO: 961946 - DNA, 25 bp, Homo sapien
gctgtcactgctagacctttgtcat

SEQ ID NO: 961947 - DNA, 25 bp, Homo sapien
tgatgatacaataggttgctgtcac

SEQ ID NO: 961948 - DNA, 25 bp, Homo sapien
agacctttgtcatcagagggcttcc

SEQ ID NO: 961949 - DNA, 25 bp, Homo sapien
tgctgcccgaaggacctgagtctgc

SEQ ID NO: 961950 - DNA, 25 bp, Homo sapien
aaggacctgagtctgccggactcca

SEQ ID NO: 961951 - DNA, 25 bp, Homo sapien
ggctcgctgccacagttgtcactct

SEQ ID NO: 961952 - DNA, 25 bp, Homo sapien
acgcggccctcagaaggcaagctgc

SEQ ID NO: 961953 - DNA, 25 bp, Homo sapien
tggagccagaaccacgatcctcttc

SEQ ID NO: 961954 - DNA, 25 bp, Homo sapien
cagaaccacgatcctcttcataaca

SEQ ID NO: 961955 - DNA, 25 bp, Homo sapien
cctcttcataacatgaggcctttta

SEQ ID NO: 961956 - DNA, 25 bp, Homo sapien
gagccagaaccacgatcctcttcat

SEQ ID NO: 961957 - DNA, 25 bp, Homo sapien
ttgccctggtgccttgagctaaggc

SEQ ID NO: 961958 - DNA, 25 bp, Homo sapien
tgccttgagctaaggcctcatggct

SEQ ID NO: 961959 - DNA, 25 bp, Homo sapien
caacgctgtcttgaggcagcatcag

SEQ ID NO: 961960 - DNA, 25 bp, Homo sapien
tgaacagctggaccgaatcttccca

SEQ ID NO: 961961 - DNA, 25 bp, Homo sapien
tgctaagctcatggtgtcgctcaga

SEQ ID NO: 961962 - DNA, 25 bp, Homo sapien
taagctcatggtgtcgctcagagcc

SEQ ID NO: 961963 - DNA, 25 bp, Homo sapien
agctcatggtgtcgctcagagccac

SEQ ID NO: 961964 - DNA, 25 bp, Homo sapien
catggtgtcgctcagagccactcac

SEQ ID NO: 961965 - DNA, 25 bp, Homo sapien
agtggcagttggcagcggcaaacag

SEQ ID NO: 961966 - DNA, 25 bp, Homo sapien
cacagactgtcgtggtcccacagca

SEQ ID NO: 961967 - DNA, 25 bp, Homo sapien
gaagttgtcttgaagtagggtgtgg

SEQ ID NO: 961968 - DNA, 25 bp, Homo sapien
cacagcagccactaataacggaacc

SEQ ID NO: 961969 - DNA, 25 bp, Homo sapien
ccagtcactcgcttgtggcatttag

SEQ ID NO: 961970 - DNA, 25 bp, Homo sapien
gagccctagctagaaaccagccaga

SEQ ID NO: 961971 - DNA, 25 bp, Homo sapien
gacacgctgcccagcatcctagtga

SEQ ID NO: 961972 - DNA, 25 bp, Homo sapien
gatttaagatcaaccatcactacca

SEQ ID NO: 961973 - DNA, 25 bp, Homo sapien
cagtcgcctgcgttgattcagggcc

SEQ ID NO: 961974 - DNA, 25 bp, Homo sapien
ctgtgggccagtcgcctgcgttgat

SEQ ID NO: 961975 - DNA, 25 bp, Homo sapien
tgtgcatgcactggacaaggaccat

SEQ ID NO: 961976 - DNA, 25 bp, Homo sapien
cctgcgttgattcagggcctgcagt

SEQ ID NO: 961977 - DNA, 25 bp, Homo sapien
gaacatgtcttaacacaaagtacat

SEQ ID NO: 961978 - DNA, 25 bp, Homo sapien
ggtgctagtttcaaacaatttgtac

SEQ ID NO: 961979 - DNA, 25 bp, Homo sapien
aaccagggtgctagtttcaaacaat

SEQ ID NO: 961980 - DNA, 25 bp, Homo sapien
tgtacagtttgaatagaaaggaccc

SEQ ID NO: 961981 - DNA, 25 bp, Homo sapien
tctttctgaggcagctactctcccc

SEQ ID NO: 961982 - DNA, 25 bp, Homo sapien
ctgtctatgctaacactcattttgc

SEQ ID NO: 961983 - DNA, 25 bp, Homo sapien
cccacagccggagagcactgtctat

SEQ ID NO: 961984 - DNA, 25 bp, Homo sapien
ggagagcactgtctatgctaacact

SEQ ID NO: 961985 - DNA, 25 bp, Homo sapien
tgcgcccagccccacgccgtcctgt

SEQ ID NO: 961986 - DNA, 25 bp, Homo sapien
cagccccacgccgtcctgtgtggcc

SEQ ID NO: 961987 - DNA, 25 bp, Homo sapien
tctgttccgtgacctgcgcccagcc

SEQ ID NO: 961988 - DNA, 25 bp, Homo sapien
atctctgttccgtgacctgcgccca

SEQ ID NO: 961989 - DNA, 25 bp, Homo sapien
ggaggctgccttgccgtttggataa

SEQ ID NO: 961990 - DNA, 25 bp, Homo sapien
tttggataaggaggctgacacacgc

SEQ ID NO: 961991 - DNA, 25 bp, Homo sapien
cgactcgtggtagtagatgtttcct

SEQ ID NO: 961992 - DNA, 25 bp, Homo sapien
ctgacacacgctgggcaacgcgact

SEQ ID NO: 961993 - DNA, 25 bp, Homo sapien
ggcagatgaacttgggtattcctga

SEQ ID NO: 961994 - DNA, 25 bp, Homo sapien
gcccggaacagtcagggttgtatcc

SEQ ID NO: 961995 - DNA, 25 bp, Homo sapien
tcttgataggcagagtccacttcat

SEQ ID NO: 961996 - DNA, 25 bp, Homo sapien
tcagaggagtatcagagccagcgct

SEQ ID NO: 961997 - DNA, 25 bp, Homo sapien
tcgttcatccctgatacagccgcca

SEQ ID NO: 961998 - DNA, 25 bp, Homo sapien
ctgatcgttcatccctgatacagcc

SEQ ID NO: 961999 - DNA, 25 bp, Homo sapien
gatcgttcatccctgatacagccgc

SEQ ID NO: 962000 - DNA, 25 bp, Homo sapien
cgttcatccctgatacagccgccat

SEQ ID NO: 962001 - DNA, 25 bp, Homo sapien
tgaaggaaatgtagatattggcagc

SEQ ID NO: 962002 - DNA, 25 bp, Homo sapien
aggaaatgtagatattggcagctga

SEQ ID NO: 962003 - DNA, 25 bp, Homo sapien
cttgaaggaaatgtagatattggca

SEQ ID NO: 962004 - DNA, 25 bp, Homo sapien
gaaatgtagatattggcagctgaag

SEQ ID NO: 962005 - DNA, 25 bp, Homo sapien
gagctactgtgtctgaccgagtgag

SEQ ID NO: 962006 - DNA, 25 bp, Homo sapien
tgggtggacttaaatctaatgcccc

SEQ ID NO: 962007 - DNA, 25 bp, Homo sapien
tgtctgaccgagtgagaaattttaa

SEQ ID NO: 962008 - DNA, 25 bp, Homo sapien
ttaaattgctgggtggacttaaatc

SEQ ID NO: 962009 - DNA, 25 bp, Homo sapien
ggctatgtgatttggccagggccac

SEQ ID NO: 962010 - DNA, 25 bp, Homo sapien
ccctctatggcgcttccagagaaaa

SEQ ID NO: 962011 - DNA, 25 bp, Homo sapien
aaaggccaatggagttgtttgactc

SEQ ID NO: 962012 - DNA, 25 bp, Homo sapien
aagtaaactgggatttggagaggct

SEQ ID NO: 962013 - DNA, 25 bp, Homo sapien
ggtgatctgatagcgcccaaggaca

SEQ ID NO: 962014 - DNA, 25 bp, Homo sapien
tggcacgtggctccgtagtaacaga

SEQ ID NO: 962015 - DNA, 25 bp, Homo sapien
tgtggcttctaggtccccgatgtag

SEQ ID NO: 962016 - DNA, 25 bp, Homo sapien
gagctatagctcgatccaactgtgg

SEQ ID NO: 962017 - DNA, 25 bp, Homo sapien
taggctaaacaggaagcgtgactgg

SEQ ID NO: 962018 - DNA, 25 bp, Homo sapien
tgtaggctaaacaggaagcgtgact

SEQ ID NO: 962019 - DNA, 25 bp, Homo sapien
tctgtaggctaaacaggaagcgtga

SEQ ID NO: 962020 - DNA, 25 bp, Homo sapien
ctgtaggctaaacaggaagcgtgac

SEQ ID NO: 962021 - DNA, 25 bp, Homo sapien
tagaactgaaagacactgctcgatg

SEQ ID NO: 962022 - DNA, 25 bp, Homo sapien
tcaggttggcacacaccaagacagc

SEQ ID NO: 962023 - DNA, 25 bp, Homo sapien
tcaagtgtccatgcggctgctgaga

SEQ ID NO: 962024 - DNA, 25 bp, Homo sapien
cagcggagcgaggtcaaaacccttt

SEQ ID NO: 962025 - DNA, 25 bp, Homo sapien
ggaatattactcacgaagcagacag

SEQ ID NO: 962026 - DNA, 25 bp, Homo sapien
gacagtcacgcacaggcttgaaaga

SEQ ID NO: 962027 - DNA, 25 bp, Homo sapien
gagtgttcactagagcactgccaat

SEQ ID NO: 962028 - DNA, 25 bp, Homo sapien
gcttgaaagatacctaagttgaatg

SEQ ID NO: 962029 - DNA, 25 bp, Homo sapien
taaacatcattgaccagaccaggcc

SEQ ID NO: 962030 - DNA, 25 bp, Homo sapien
tcccttcctgatagagtgcctgaca

SEQ ID NO: 962031 - DNA, 25 bp, Homo sapien
tttggagtttcttacgtgatggagc

SEQ ID NO: 962032 - DNA, 25 bp, Homo sapien
gctggtgaaataattctatgggaac

SEQ ID NO: 962033 - DNA, 25 bp, Homo sapien
cattcttaagccttcctcaggacca

SEQ ID NO: 962034 - DNA, 25 bp, Homo sapien
gcacccggcggttgctccattctta

SEQ ID NO: 962035 - DNA, 25 bp, Homo sapien
aggtccaagttcacgcggctgggct

SEQ ID NO: 962036 - DNA, 25 bp, Homo sapien
agtgagaaccctaagccccagaaag

SEQ ID NO: 962037 - DNA, 25 bp, Homo sapien
gagtaagcatgctctgtcctacagg

SEQ ID NO: 962038 - DNA, 25 bp, Homo sapien
catcggagcaataaccagtggcaat

SEQ ID NO: 962039 - DNA, 25 bp, Homo sapien
tgagggcttactctgggcaggcact

SEQ ID NO: 962040 - DNA, 25 bp, Homo sapien
tcttaacccgcagttgagatgcctg

SEQ ID NO: 962041 - DNA, 25 bp, Homo sapien
tcccctacttcacactgcatggcca

SEQ ID NO: 962042 - DNA, 25 bp, Homo sapien
agctgaccagttcccgagctgccct

SEQ ID NO: 962043 - DNA, 25 bp, Homo sapien
atggccacgcaatgcaagaagctgc

SEQ ID NO: 962044 - DNA, 25 bp, Homo sapien
tggaaggaaaggtcctcagagacca

SEQ ID NO: 962045 - DNA, 25 bp, Homo sapien
tacctctgccacttgaaactctctg

SEQ ID NO: 962046 - DNA, 25 bp, Homo sapien
gcagggcacactaaagtaaactttc

SEQ ID NO: 962047 - DNA, 25 bp, Homo sapien
caggtggtctcatgaggcagcaggg

SEQ ID NO: 962048 - DNA, 25 bp, Homo sapien
ggcccaccccggagataaggagatc

SEQ ID NO: 962049 - DNA, 25 bp, Homo sapien
cactcctttggcaagcggcttttcc

SEQ ID NO: 962050 - DNA, 25 bp, Homo sapien
actggcttctctcatagctcctgca

SEQ ID NO: 962051 - DNA, 25 bp, Homo sapien
agccttccacgatctggttccaatg

SEQ ID NO: 962052 - DNA, 25 bp, Homo sapien
gaaccatgtgtagactgcaggcact

SEQ ID NO: 962053 - DNA, 25 bp, Homo sapien
gcctccttcggtagatagcaatcct

SEQ ID NO: 962054 - DNA, 25 bp, Homo sapien
tagagacagggagccgtcagctctg

SEQ ID NO: 962055 - DNA, 25 bp, Homo sapien
gaacacaaggattaatacagtacag

SEQ ID NO: 962056 - DNA, 25 bp, Homo sapien
gcctttccatggatcaaaatcactg

SEQ ID NO: 962057 - DNA, 25 bp, Homo sapien
caggacaggcagtcgggaagaacaa

SEQ ID NO: 962058 - DNA, 25 bp, Homo sapien
tgacctcgatggtacaaatgtcctg

SEQ ID NO: 962059 - DNA, 25 bp, Homo sapien
catggagctaaatgcacacacctgg

SEQ ID NO: 962060 - DNA, 25 bp, Homo sapien
cagaaggtggaacagttgcaggccc

SEQ ID NO: 962061 - DNA, 25 bp, Homo sapien
aactcacaggacagggaattctagg

SEQ ID NO: 962062 - DNA, 25 bp, Homo sapien
gaaatgtagttcaccctagtctagg

SEQ ID NO: 962063 - DNA, 25 bp, Homo sapien
tctatgacccaaaacgtgctgtgca

SEQ ID NO: 962064 - DNA, 25 bp, Homo sapien
gatgtgaactttgagactgccccaa

SEQ ID NO: 962065 - DNA, 25 bp, Homo sapien
tcaccgtggtctacatcgtgcagca

SEQ ID NO: 962066 - DNA, 25 bp, Homo sapien
tcgtgcagcattagtagtacagtgg

SEQ ID NO: 962067 - DNA, 25 bp, Homo sapien
tatcaacaagtttaggccaggtcca

SEQ ID NO: 962068 - DNA, 25 bp, Homo sapien
catcgccggtttccagagtcatact

SEQ ID NO: 962069 - DNA, 25 bp, Homo sapien
caggtaaccgtcatgcaggtggaga

SEQ ID NO: 962070 - DNA, 25 bp, Homo sapien
cacgcgtgtatcgtcagaggctgca

SEQ ID NO: 962071 - DNA, 25 bp, Homo sapien
tatgatgtcatcacccacgcgtgta

SEQ ID NO: 962072 - DNA, 25 bp, Homo sapien
gggcactgaacaccacacgaaagag

SEQ ID NO: 962073 - DNA, 25 bp, Homo sapien
taggcgagggcctaaatgagcacat

SEQ ID NO: 962074 - DNA, 25 bp, Homo sapien
taaattatatgctccagagctacgg

SEQ ID NO: 962075 - DNA, 25 bp, Homo sapien
cattagttgtacagtcacgaaaggg

SEQ ID NO: 962076 - DNA, 25 bp, Homo sapien
gagctacggcacctacatgatggac

SEQ ID NO: 962077 - DNA, 25 bp, Homo sapien
agttgctctgtttcaaggctaagta

SEQ ID NO: 962078 - DNA, 25 bp, Homo sapien
cagttgctctgtttcaaggctaagt

SEQ ID NO: 962079 - DNA, 25 bp, Homo sapien
gccctggtacacagttgctctgttt

SEQ ID NO: 962080 - DNA, 25 bp, Homo sapien
gttgctctgtttcaaggctaagtac

SEQ ID NO: 962081 - DNA, 25 bp, Homo sapien
caaaacccctcatggactgctctct

SEQ ID NO: 962082 - DNA, 25 bp, Homo sapien
caggccctctctggatcactaggaa

SEQ ID NO: 962083 - DNA, 25 bp, Homo sapien
cttgtccctcttccgagtccctact

SEQ ID NO: 962084 - DNA, 25 bp, Homo sapien
tcactaggaattccatagttcttcc

SEQ ID NO: 962085 - DNA, 25 bp, Homo sapien
ccaattttatcagccacgtttggag

SEQ ID NO: 962086 - DNA, 25 bp, Homo sapien
cacgtttggagtaatgggttgatga

SEQ ID NO: 962087 - DNA, 25 bp, Homo sapien
gggttgatgaatgttgatacagtca

SEQ ID NO: 962088 - DNA, 25 bp, Homo sapien
aatccaggtacccaattttatcagc

SEQ ID NO: 962089 - DNA, 25 bp, Homo sapien
tgggctcagatccagcttgggccac

SEQ ID NO: 962090 - DNA, 25 bp, Homo sapien
tcagagtgacctatcccaggtggat

SEQ ID NO: 962091 - DNA, 25 bp, Homo sapien
gaggcttaaacctcctcgctggagg

SEQ ID NO: 962092 - DNA, 25 bp, Homo sapien
aacagaccagcttgatcagggccca

SEQ ID NO: 962093 - DNA, 25 bp, Homo sapien
tactagatcctgacaccagagtgtg

SEQ ID NO: 962094 - DNA, 25 bp, Homo sapien
taggtctcaaaccacaaggccctgt

SEQ ID NO: 962095 - DNA, 25 bp, Homo sapien
gcagcagctggagtaatcttaccaa

SEQ ID NO: 962096 - DNA, 25 bp, Homo sapien
taagagcaaagggaagccacaagtc

SEQ ID NO: 962097 - DNA, 25 bp, Homo sapien
tcacacctgatgcttctctatggct

SEQ ID NO: 962098 - DNA, 25 bp, Homo sapien
gatcctgcttggagacgatgctcca

SEQ ID NO: 962099 - DNA, 25 bp, Homo sapien
tatggtcaccagcattagtagcctg

SEQ ID NO: 962100 - DNA, 25 bp, Homo sapien
tagtagcctgtgtaagaatccgatc

SEQ ID NO: 962101 - DNA, 25 bp, Homo sapien
taagaatccgatccatgctcaacag

SEQ ID NO: 962102 - DNA, 25 bp, Homo sapien
cagtctttctgaagacgtgtgcagc

SEQ ID NO: 962103 - DNA, 25 bp, Homo sapien
ccagtggattcaaagacgcttgctc

SEQ ID NO: 962104 - DNA, 25 bp, Homo sapien
gggaaccagcttccgtgccaggagc

SEQ ID NO: 962105 - DNA, 25 bp, Homo sapien
catcccagtctaaggccacattttg

SEQ ID NO: 962106 - DNA, 25 bp, Homo sapien
gggagtttcaagagggtccacctga

SEQ ID NO: 962107 - DNA, 25 bp, Homo sapien
tatccatccagctacgatccttgct

SEQ ID NO: 962108 - DNA, 25 bp, Homo sapien
tgagcaaaacccggccctccataag

SEQ ID NO: 962109 - DNA, 25 bp, Homo sapien
ctccataagcccctatactcgccag

SEQ ID NO: 962110 - DNA, 25 bp, Homo sapien
agctggagcacaacactacgcctgg

SEQ ID NO: 962111 - DNA, 25 bp, Homo sapien
gtagctggagcacaacactacgcct

SEQ ID NO: 962112 - DNA, 25 bp, Homo sapien
agtagctggagcacaacactacgcc

SEQ ID NO: 962113 - DNA, 25 bp, Homo sapien
tagctggagcacaacactacgcctg

SEQ ID NO: 962114 - DNA, 25 bp, Homo sapien
gtgtggagacccctaatttgtagcc

SEQ ID NO: 962115 - DNA, 25 bp, Homo sapien
agccaattattgaacataaggaggg

SEQ ID NO: 962116 - DNA, 25 bp, Homo sapien
gacctcaccctattatctctgactg

SEQ ID NO: 962117 - DNA, 25 bp, Homo sapien
gcacttaggactcttccagacctca

SEQ ID NO: 962118 - DNA, 25 bp, Homo sapien
gcacagaagcactggtcacggagct

SEQ ID NO: 962119 - DNA, 25 bp, Homo sapien
gtgtaagccattgaacccagtccca

SEQ ID NO: 962120 - DNA, 25 bp, Homo sapien
tcacggagcttctatgcctggtcac

SEQ ID NO: 962121 - DNA, 25 bp, Homo sapien
tattcaggatgatgtagcctctgcg

SEQ ID NO: 962122 - DNA, 25 bp, Homo sapien
gcttcagtctagtcccatcgaccga

SEQ ID NO: 962123 - DNA, 25 bp, Homo sapien
gatttcagcagaaggactacagctc

SEQ ID NO: 962124 - DNA, 25 bp, Homo sapien
catcgaccgagacaagttgcaggtt

SEQ ID NO: 962125 - DNA, 25 bp, Homo sapien
tctgacaggactgcggatttcagca

SEQ ID NO: 962126 - DNA, 25 bp, Homo sapien
ggagcccaggggaaggcgactgtcc

SEQ ID NO: 962127 - DNA, 25 bp, Homo sapien
ctgagacaagacatggcgagaccct

SEQ ID NO: 962128 - DNA, 25 bp, Homo sapien
agctgcagatgtggccgacggtgca

SEQ ID NO: 962129 - DNA, 25 bp, Homo sapien
gcgagaccctgtcggggagcccagg

SEQ ID NO: 962130 - DNA, 25 bp, Homo sapien
aaaacctgtggcttgacgacctggt

SEQ ID NO: 962131 - DNA, 25 bp, Homo sapien
tacgagatagaagtcgtcatgtgct

SEQ ID NO: 962132 - DNA, 25 bp, Homo sapien
caggcactgcacactacgagataga

SEQ ID NO: 962133 - DNA, 25 bp, Homo sapien
ctgggtaatggccaaataagtgcat

SEQ ID NO: 962134 - DNA, 25 bp, Homo sapien
gataccagcttgtgagagccaatca

SEQ ID NO: 962135 - DNA, 25 bp, Homo sapien
gccaatcatacatgtcgttttccaa

SEQ ID NO: 962136 - DNA, 25 bp, Homo sapien
tcggtgcacagttaaaaacagtggt

SEQ ID NO: 962137 - DNA, 25 bp, Homo sapien
ccaatttcatgtttagtgtcgtcat

SEQ ID NO: 962138 - DNA, 25 bp, Homo sapien
cattttaatcacttaacggtgcatg

SEQ ID NO: 962139 - DNA, 25 bp, Homo sapien
cagcagaatgttgagctcccctcta

SEQ ID NO: 962140 - DNA, 25 bp, Homo sapien
agggctccattgtgagagattcaaa

SEQ ID NO: 962141 - DNA, 25 bp, Homo sapien
caagttggtgtctgaaaatgacctc

SEQ ID NO: 962142 - DNA, 25 bp, Homo sapien
taatgaagaacttgatgtccgccat

SEQ ID NO: 962143 - DNA, 25 bp, Homo sapien
tgattccagcagcttcgtagtgtaa

SEQ ID NO: 962144 - DNA, 25 bp, Homo sapien
cagccacagaatccagaggaactgc

SEQ ID NO: 962145 - DNA, 25 bp, Homo sapien
gctgggtatctctggatggtcccat

SEQ ID NO: 962146 - DNA, 25 bp, Homo sapien
cagaggcatgacctgtctctatggg

SEQ ID NO: 962147 - DNA, 25 bp, Homo sapien
ctggcagtggcatctaccctgaagg

SEQ ID NO: 962148 - DNA, 25 bp, Homo sapien
ctacaagaaactttgcctacgtggg

SEQ ID NO: 962149 - DNA, 25 bp, Homo sapien
agaagctctcaagacccatggactc

SEQ ID NO: 962150 - DNA, 25 bp, Homo sapien
ggtttgctgtaagtacctggcagtg

SEQ ID NO: 962151 - DNA, 25 bp, Homo sapien
caaaccctccggtatgtgatggaag

SEQ ID NO: 962152 - DNA, 25 bp, Homo sapien
tgcaaagtgagtatatccgcctggg

SEQ ID NO: 962153 - DNA, 25 bp, Homo sapien
tatgaatggccaagaatcaccagac

SEQ ID NO: 962154 - DNA, 25 bp, Homo sapien
taaattgagcaggacgaagacaggc

SEQ ID NO: 962155 - DNA, 25 bp, Homo sapien
tgccatcgaggacaaaggtatgaaa

SEQ ID NO: 962156 - DNA, 25 bp, Homo sapien
agaaggaagagctgatacggtttgc

SEQ ID NO: 962157 - DNA, 25 bp, Homo sapien
agcagggaccacctgaactacaggt

SEQ ID NO: 962158 - DNA, 25 bp, Homo sapien
cagagtaaggccaccttggattcca

SEQ ID NO: 962159 - DNA, 25 bp, Homo sapien
taatgtatgcagaacggaaggcgag

SEQ ID NO: 962160 - DNA, 25 bp, Homo sapien
tagtcatatgtcagttcagggcaga

SEQ ID NO: 962161 - DNA, 25 bp, Homo sapien
gagacatgaaactcgcctgcacaga

SEQ ID NO: 962162 - DNA, 25 bp, Homo sapien
cattatataacaccccagcagtcgg

SEQ ID NO: 962163 - DNA, 25 bp, Homo sapien
tgctgcataggccacacccctaggg

SEQ ID NO: 962164 - DNA, 25 bp, Homo sapien
cacactcggaggcacttgacattat

SEQ ID NO: 962165 - DNA, 25 bp, Homo sapien
cggaggcacttgacattatccttgg

SEQ ID NO: 962166 - DNA, 25 bp, Homo sapien
gcacttgacattatccttggaaacc

SEQ ID NO: 962167 - DNA, 25 bp, Homo sapien
ggcctgtgcagaaatcggttagatt

SEQ ID NO: 962168 - DNA, 25 bp, Homo sapien
tggcctgtgcagaaatcggttagat

SEQ ID NO: 962169 - DNA, 25 bp, Homo sapien
tcaatgtgtaatcctcaatggtgtg

SEQ ID NO: 962170 - DNA, 25 bp, Homo sapien
gctgctctgaatactggtgtacaag

SEQ ID NO: 962171 - DNA, 25 bp, Homo sapien
tctctacggattgccctattctgaa

SEQ ID NO: 962172 - DNA, 25 bp, Homo sapien
caatggtgtgtagctactaccacta

SEQ ID NO: 962173 - DNA, 25 bp, Homo sapien
tcttaagggcaagagggtcaagcct

SEQ ID NO: 962174 - DNA, 25 bp, Homo sapien
cagagtccgtccctacgtagtgata

SEQ ID NO: 962175 - DNA, 25 bp, Homo sapien
ccttctgacagacctgagatgcgca

SEQ ID NO: 962176 - DNA, 25 bp, Homo sapien
tgcctctcttacagggtggtgccgt

SEQ ID NO: 962177 - DNA, 25 bp, Homo sapien
agtccctctcaggagctcccggttt

SEQ ID NO: 962178 - DNA, 25 bp, Homo sapien
agactctgcaaatgccctcagtggg

SEQ ID NO: 962179 - DNA, 25 bp, Homo sapien
gcaagagagtccctctcaggagctc

SEQ ID NO: 962180 - DNA, 25 bp, Homo sapien
ccagactctgcaaatgccctcagtg

SEQ ID NO: 962181 - DNA, 25 bp, Homo sapien
catctgtggacacgcggcggtctaa

SEQ ID NO: 962182 - DNA, 25 bp, Homo sapien
ggcggtctaagcaccgactggctga

SEQ ID NO: 962183 - DNA, 25 bp, Homo sapien
aaggtgccacatcgatttaaacatc

SEQ ID NO: 962184 - DNA, 25 bp, Homo sapien
cataatacttcccacaagcgcttga

SEQ ID NO: 962185 - DNA, 25 bp, Homo sapien
tgcttgaacccacaagctccaggtc

SEQ ID NO: 962186 - DNA, 25 bp, Homo sapien
tcagaagaatcaaaccaccagctgg

SEQ ID NO: 962187 - DNA, 25 bp, Homo sapien
gggtctggggcccatcgaaggtcac

SEQ ID NO: 962188 - DNA, 25 bp, Homo sapien
aaaggtgcttgaacccacaagctcc

SEQ ID NO: 962189 - DNA, 25 bp, Homo sapien
gtttcatcattagttcaagcgcctc

SEQ ID NO: 962190 - DNA, 25 bp, Homo sapien
cctcagcccacttgcaagaagggat

SEQ ID NO: 962191 - DNA, 25 bp, Homo sapien
ggatttcctgaggtttcatcattag

SEQ ID NO: 962192 - DNA, 25 bp, Homo sapien
tagttcaagcgcctcagggtccaaa

SEQ ID NO: 962193 - DNA, 25 bp, Homo sapien
ttgggccacccagaattagaacctg

SEQ ID NO: 962194 - DNA, 25 bp, Homo sapien
ccaatgcgatgtggtacttttgaca

SEQ ID NO: 962195 - DNA, 25 bp, Homo sapien
gactggactccaaggtttggaagag

SEQ ID NO: 962196 - DNA, 25 bp, Homo sapien
tcattaccagaattgatgctttggg

SEQ ID NO: 962197 - DNA, 25 bp, Homo sapien
aatgtaggaagctgactcaaagtgc

SEQ ID NO: 962198 - DNA, 25 bp, Homo sapien
tgggttcagaggtctcaaagggacc

SEQ ID NO: 962199 - DNA, 25 bp, Homo sapien
tgaaacgacttccaaagggcataga

SEQ ID NO: 962200 - DNA, 25 bp, Homo sapien
gaccttagaggacattcagttccac

SEQ ID NO: 962201 - DNA, 25 bp, Homo sapien
catatgtgtttgatgcccaattgca

SEQ ID NO: 962202 - DNA, 25 bp, Homo sapien
gacctatctactcagtgtgtcccat

SEQ ID NO: 962203 - DNA, 25 bp, Homo sapien
catatcttggtctgggatgacctat

SEQ ID NO: 962204 - DNA, 25 bp, Homo sapien
tatgtgtttgatgcccaattgcagc

SEQ ID NO: 962205 - DNA, 25 bp, Homo sapien
tatattcgaaatcctgtgaagattc

SEQ ID NO: 962206 - DNA, 25 bp, Homo sapien
acacatgctaacactaaaatgccag

SEQ ID NO: 962207 - DNA, 25 bp, Homo sapien
gattctgccacacatgctaacacta

SEQ ID NO: 962208 - DNA, 25 bp, Homo sapien
tcctgtgaagattctgccacacatg

SEQ ID NO: 962209 - DNA, 25 bp, Homo sapien
taagcctcataacctccctgctttt

SEQ ID NO: 962210 - DNA, 25 bp, Homo sapien
tctttattaagcctcataacctccc

SEQ ID NO: 962211 - DNA, 25 bp, Homo sapien
tattaagcctcataacctccctgct

SEQ ID NO: 962212 - DNA, 25 bp, Homo sapien
tttattaagcctcataacctccctg

SEQ ID NO: 962213 - DNA, 25 bp, Homo sapien
atccagtgtcgccattgctcttcct

SEQ ID NO: 962214 - DNA, 25 bp, Homo sapien
aaacgcctccggactgggcactttg

SEQ ID NO: 962215 - DNA, 25 bp, Homo sapien
taatttggcggcgtcgatccaggag

SEQ ID NO: 962216 - DNA, 25 bp, Homo sapien
cagggtttgcccagaaacgcctccg

SEQ ID NO: 962217 - DNA, 25 bp, Homo sapien
acacgggattcgagaacgctccgac

SEQ ID NO: 962218 - DNA, 25 bp, Homo sapien
gagagacacgggattcgagaacgct

SEQ ID NO: 962219 - DNA, 25 bp, Homo sapien
gggattcgagaacgctccgacgtca

SEQ ID NO: 962220 - DNA, 25 bp, Homo sapien
gcagcagccgagagacacgggattc

SEQ ID NO: 962221 - DNA, 25 bp, Homo sapien
cttcggaacgttccgacattgagtg

SEQ ID NO: 962222 - DNA, 25 bp, Homo sapien
tcggaacgttccgacattgagtgtt

SEQ ID NO: 962223 - DNA, 25 bp, Homo sapien
ttcggaacgttccgacattgagtgt

SEQ ID NO: 962224 - DNA, 25 bp, Homo sapien
tggtctttcccgcagagttgccgct

SEQ ID NO: 962225 - DNA, 25 bp, Homo sapien
gaccgaaagttttgcaggcagccct

SEQ ID NO: 962226 - DNA, 25 bp, Homo sapien
gccgctggaggaccgaaagttttgc

SEQ ID NO: 962227 - DNA, 25 bp, Homo sapien
cgcgtgcgggagagcgaaggctgca

SEQ ID NO: 962228 - DNA, 25 bp, Homo sapien
ggagattctgcagttgttgctctag

SEQ ID NO: 962229 - DNA, 25 bp, Homo sapien
gagattctgcagttgttgctctagg

SEQ ID NO: 962230 - DNA, 25 bp, Homo sapien
aacgcaggtgagtttggagcgctac

SEQ ID NO: 962231 - DNA, 25 bp, Homo sapien
gctgcggggcgtgcaaaactcaaaa

SEQ ID NO: 962232 - DNA, 25 bp, Homo sapien
cgttctgaaacgcaggtgagtttgg

SEQ ID NO: 962233 - DNA, 25 bp, Homo sapien
ggagcgctacgagctaccttcccat

SEQ ID NO: 962234 - DNA, 25 bp, Homo sapien
tctttcgccagcacccttttagctc

SEQ ID NO: 962235 - DNA, 25 bp, Homo sapien
ctttcgccagcacccttttagctct

SEQ ID NO: 962236 - DNA, 25 bp, Homo sapien
ttcgccagcacccttttagctctca

SEQ ID NO: 962237 - DNA, 25 bp, Homo sapien
tttcgccagcacccttttagctctc

SEQ ID NO: 962238 - DNA, 25 bp, Homo sapien
tttgtactgactgagttctgccctg

SEQ ID NO: 962239 - DNA, 25 bp, Homo sapien
gaaccatctaataatttccctgagc

SEQ ID NO: 962240 - DNA, 25 bp, Homo sapien
cactgctgtttcccaagttgtcaca

SEQ ID NO: 962241 - DNA, 25 bp, Homo sapien
acagctgaagcgcactgattggaag

SEQ ID NO: 962242 - DNA, 25 bp, Homo sapien
gaatgttagctctctcatttgagga

SEQ ID NO: 962243 - DNA, 25 bp, Homo sapien
ttaacttgaataacacctggttctg

SEQ ID NO: 962244 - DNA, 25 bp, Homo sapien
tacctagactgttgggagttacctg

SEQ ID NO: 962245 - DNA, 25 bp, Homo sapien
tgaggcatccctggaattatttgat

SEQ ID NO: 962246 - DNA, 25 bp, Homo sapien
cacgggagtgtgttatctcaaggga

SEQ ID NO: 962247 - DNA, 25 bp, Homo sapien
caacaggagtgggaacgaaaataga

SEQ ID NO: 962248 - DNA, 25 bp, Homo sapien
tagacaactttacctgcctctttcc

SEQ ID NO: 962249 - DNA, 25 bp, Homo sapien
cctggctaaccgtggactctattaa

SEQ ID NO: 962250 - DNA, 25 bp, Homo sapien
tggccagttggtgctccctggaact

SEQ ID NO: 962251 - DNA, 25 bp, Homo sapien
ctgtgactttggccagttggtgctc

SEQ ID NO: 962252 - DNA, 25 bp, Homo sapien
tttggccagttggtgctccctggaa

SEQ ID NO: 962253 - DNA, 25 bp, Homo sapien
actgctctggtgctgaaggttgagg

SEQ ID NO: 962254 - DNA, 25 bp, Homo sapien
tccagccccattcctgaccactatc

SEQ ID NO: 962255 - DNA, 25 bp, Homo sapien
agatccagccccattcctgaccact

SEQ ID NO: 962256 - DNA, 25 bp, Homo sapien
ttccccagaatgtggcagatccagc

SEQ ID NO: 962257 - DNA, 25 bp, Homo sapien
tccccagaatgtggcagatccagcc

SEQ ID NO: 962258 - DNA, 25 bp, Homo sapien
tttgcaaggacgagacaggagagat

SEQ ID NO: 962259 - DNA, 25 bp, Homo sapien
ctttgcaaggacgagacaggagaga

SEQ ID NO: 962260 - DNA, 25 bp, Homo sapien
agatgatagcttctctttaggattc

SEQ ID NO: 962261 - DNA, 25 bp, Homo sapien
gagagatgatagcttctctttagga

SEQ ID NO: 962262 - DNA, 25 bp, Homo sapien
ttaataccctgcaaaggaggaaatc

SEQ ID NO: 962263 - DNA, 25 bp, Homo sapien
gaaacaggatagcctgtgagaagat

SEQ ID NO: 962264 - DNA, 25 bp, Homo sapien
ttaggaaacaggatagcctgtgaga

SEQ ID NO: 962265 - DNA, 25 bp, Homo sapien
taggaaacaggatagcctgtgagaa

SEQ ID NO: 962266 - DNA, 25 bp, Homo sapien
agatgctgatctgatgtgcaggtag

SEQ ID NO: 962267 - DNA, 25 bp, Homo sapien
ttgccaagtcaaagtggatgcacat

SEQ ID NO: 962268 - DNA, 25 bp, Homo sapien
tgccaagtcaaagtggatgcacatt

SEQ ID NO: 962269 - DNA, 25 bp, Homo sapien
gccaagtcaaagtggatgcacattt

SEQ ID NO: 962270 - DNA, 25 bp, Homo sapien
cacaagtgcacatcctgctctagct

SEQ ID NO: 962271 - DNA, 25 bp, Homo sapien
gtcaggagggcctgccccacaagtg

SEQ ID NO: 962272 - DNA, 25 bp, Homo sapien
atggtcaggagggcctgccccacaa

SEQ ID NO: 962273 - DNA, 25 bp, Homo sapien
agtgcacatcctgctctagctagga

SEQ ID NO: 962274 - DNA, 25 bp, Homo sapien
ggaaaccagttatgctaaaggagtc

SEQ ID NO: 962275 - DNA, 25 bp, Homo sapien
tcagatggccaccagttatgaagag

SEQ ID NO: 962276 - DNA, 25 bp, Homo sapien
gctaaaggagtcatagacccattct

SEQ ID NO: 962277 - DNA, 25 bp, Homo sapien
ttctgtatccctcccaataggtatt

SEQ ID NO: 962278 - DNA, 25 bp, Homo sapien
cattccaggcagtgtagacagtgca

SEQ ID NO: 962279 - DNA, 25 bp, Homo sapien
agggaacctggtgtatcagcaggac

SEQ ID NO: 962280 - DNA, 25 bp, Homo sapien
tccaggcagtgtagacagtgcaaag

SEQ ID NO: 962281 - DNA, 25 bp, Homo sapien
cctggtgtatcagcaggactgaaca

SEQ ID NO: 962282 - DNA, 25 bp, Homo sapien
ccacagctgattggagtgggaaagt

SEQ ID NO: 962283 - DNA, 25 bp, Homo sapien
tgaccatgggattctgccaccctgg

SEQ ID NO: 962284 - DNA, 25 bp, Homo sapien
aggctgaccatgggattctgccacc

SEQ ID NO: 962285 - DNA, 25 bp, Homo sapien
acagctgattggagtgggaaagtac

SEQ ID NO: 962286 - DNA, 25 bp, Homo sapien
tctggagtgaaagcctgcccatgaa

SEQ ID NO: 962287 - DNA, 25 bp, Homo sapien
agtgccaaatggagctgatgagatg

SEQ ID NO: 962288 - DNA, 25 bp, Homo sapien
tgagccgtggccataacgtggtctg

SEQ ID NO: 962289 - DNA, 25 bp, Homo sapien
ggagtttgaaggagaacccaagtga

SEQ ID NO: 962290 - DNA, 25 bp, Homo sapien
ggcagcccagtagataaacaggcaa

SEQ ID NO: 962291 - DNA, 25 bp, Homo sapien
gggatggatgacctctgttcccagt

SEQ ID NO: 962292 - DNA, 25 bp, Homo sapien
tgaagacccatatagcgctagagag

SEQ ID NO: 962293 - DNA, 25 bp, Homo sapien
cagtatggctgaatgcttaagagcc

SEQ ID NO: 962294 - DNA, 25 bp, Homo sapien
cattgtgcccggacaccacaatcgg

SEQ ID NO: 962295 - DNA, 25 bp, Homo sapien
ttgtgcccggacaccacaatcggtt

SEQ ID NO: 962296 - DNA, 25 bp, Homo sapien
tgtgcccggacaccacaatcggttt

SEQ ID NO: 962297 - DNA, 25 bp, Homo sapien
ccattgtgcccggacaccacaatcg

SEQ ID NO: 962298 - DNA, 25 bp, Homo sapien
ggctgggaggatttgcattcagttt

SEQ ID NO: 962299 - DNA, 25 bp, Homo sapien
tgcttcggcaaggatggaagggctg

SEQ ID NO: 962300 - DNA, 25 bp, Homo sapien
tcttcctcccttcttgcttcggcaa

SEQ ID NO: 962301 - DNA, 25 bp, Homo sapien
ttcagtttctcatgcaaagagctcc

SEQ ID NO: 962302 - DNA, 25 bp, Homo sapien
cctttgcatatgctggacaagacca

SEQ ID NO: 962303 - DNA, 25 bp, Homo sapien
tcacggaattcctgccctttgcata

SEQ ID NO: 962304 - DNA, 25 bp, Homo sapien
agattttccaggtcgctgcttgcag

SEQ ID NO: 962305 - DNA, 25 bp, Homo sapien
aggtcgctgcttgcagttgtattca

SEQ ID NO: 962306 - DNA, 25 bp, Homo sapien
catcaattgacggtcactagaagca

SEQ ID NO: 962307 - DNA, 25 bp, Homo sapien
gataatagctaacatcaattgacgg

SEQ ID NO: 962308 - DNA, 25 bp, Homo sapien
gctaacatcaattgacggtcactag

SEQ ID NO: 962309 - DNA, 25 bp, Homo sapien
caattgacggtcactagaagcattt

SEQ ID NO: 962310 - DNA, 25 bp, Homo sapien
ccagagcccgggtcttctttgctac

SEQ ID NO: 962311 - DNA, 25 bp, Homo sapien
actccagagcccgggtcttctttgc

SEQ ID NO: 962312 - DNA, 25 bp, Homo sapien
tccagagcccgggtcttctttgcta

SEQ ID NO: 962313 - DNA, 25 bp, Homo sapien
gagactccagagcccgggtcttctt

SEQ ID NO: 962314 - DNA, 25 bp, Homo sapien
cctccagggacatgcggagacatct

SEQ ID NO: 962315 - DNA, 25 bp, Homo sapien
agggacatgcggagacatctccaca

SEQ ID NO: 962316 - DNA, 25 bp, Homo sapien
tccagggacatgcggagacatctcc

SEQ ID NO: 962317 - DNA, 25 bp, Homo sapien
cagggacatgcggagacatctccac

SEQ ID NO: 962318 - DNA, 25 bp, Homo sapien
aggaccacgtgggatgacataaccc

SEQ ID NO: 962319 - DNA, 25 bp, Homo sapien
gaggaccacgtgggatgacataacc

SEQ ID NO: 962320 - DNA, 25 bp, Homo sapien
ggaccacgtgggatgacataaccca

SEQ ID NO: 962321 - DNA, 25 bp, Homo sapien
gaccacgtgggatgacataacccat

SEQ ID NO: 962322 - DNA, 25 bp, Homo sapien
ctggagtaactagtggcatggtgca

SEQ ID NO: 962323 - DNA, 25 bp, Homo sapien
cagagctgtgcttgaggtgctccct

SEQ ID NO: 962324 - DNA, 25 bp, Homo sapien
aaaccctatcagtcctgatactgct

SEQ ID NO: 962325 - DNA, 25 bp, Homo sapien
gaggtgctccctaaaccctatcagt

SEQ ID NO: 962326 - DNA, 25 bp, Homo sapien
tggagccgtatgctttacccgtggg

SEQ ID NO: 962327 - DNA, 25 bp, Homo sapien
taggaccaacagatttccgctcagg

SEQ ID NO: 962328 - DNA, 25 bp, Homo sapien
ccaacattctggagggctagttact

SEQ ID NO: 962329 - DNA, 25 bp, Homo sapien
tgacagctgagcctttgacaaatct

SEQ ID NO: 962330 - DNA, 25 bp, Homo sapien
tcgcagaaggcctaatgttctgccc

SEQ ID NO: 962331 - DNA, 25 bp, Homo sapien
aatgccaaggaattggagcacagca

SEQ ID NO: 962332 - DNA, 25 bp, Homo sapien
cacagcatcataggggcaatcgcag

SEQ ID NO: 962333 - DNA, 25 bp, Homo sapien
gggcaatcgcagaaggcctaatgtt

SEQ ID NO: 962334 - DNA, 25 bp, Homo sapien
ccactgggtagctgacaaattttcc

SEQ ID NO: 962335 - DNA, 25 bp, Homo sapien
gacagggccctgacttattcttctg

SEQ ID NO: 962336 - DNA, 25 bp, Homo sapien
gaagatgtaacgactgccacgaaga

SEQ ID NO: 962337 - DNA, 25 bp, Homo sapien
cagcagcagaaggagtcatgggttt

SEQ ID NO: 962338 - DNA, 25 bp, Homo sapien
gccaagatgtacctgacatgtagta

SEQ ID NO: 962339 - DNA, 25 bp, Homo sapien
gatgtacctgacatgtagtatgtgt

SEQ ID NO: 962340 - DNA, 25 bp, Homo sapien
ggctgccaagatgtacctgacatgt

SEQ ID NO: 962341 - DNA, 25 bp, Homo sapien
tacctgacatgtagtatgtgttcaa

SEQ ID NO: 962342 - DNA, 25 bp, Homo sapien
gcaaggttcgacttctacaccacgc

SEQ ID NO: 962343 - DNA, 25 bp, Homo sapien
accgcctctaccaagcaaggttcga

SEQ ID NO: 962344 - DNA, 25 bp, Homo sapien
cccagatgggcccttaacagtgtac

SEQ ID NO: 962345 - DNA, 25 bp, Homo sapien
ctctccatcgccagggtcctcaaag

SEQ ID NO: 962346 - DNA, 25 bp, Homo sapien
gatgaggaagaacaaatcttgcgga

SEQ ID NO: 962347 - DNA, 25 bp, Homo sapien
tgaggaagaacaaatcttgcggagt

SEQ ID NO: 962348 - DNA, 25 bp, Homo sapien
gaggaagaacaaatcttgcggagtg

SEQ ID NO: 962349 - DNA, 25 bp, Homo sapien
ggaagaacaaatcttgcggagtgtt

SEQ ID NO: 962350 - DNA, 25 bp, Homo sapien
tgtgctacctggagccacttgcggg

SEQ ID NO: 962351 - DNA, 25 bp, Homo sapien
gtgctacctggagccacttgcgggc

SEQ ID NO: 962352 - DNA, 25 bp, Homo sapien
tggcctgcagcgtgtctggcctctt

SEQ ID NO: 962353 - DNA, 25 bp, Homo sapien
ctggcctgcagcgtgtctggcctct

SEQ ID NO: 962354 - DNA, 25 bp, Homo sapien
ggcctgcagcgtgtctggcctctta

SEQ ID NO: 962355 - DNA, 25 bp, Homo sapien
gcctgcagcgtgtctggcctcttac

SEQ ID NO: 962356 - DNA, 25 bp, Homo sapien
tcacctagaactggcttgagccctt

SEQ ID NO: 962357 - DNA, 25 bp, Homo sapien
gttccaggtgtgagtatctccgtaa

SEQ ID NO: 962358 - DNA, 25 bp, Homo sapien
ccccagttgatgagacaaacatggt

SEQ ID NO: 962359 - DNA, 25 bp, Homo sapien
gtatctccgtaatactcgggcacga

SEQ ID NO: 962360 - DNA, 25 bp, Homo sapien
gattggacaaaactctggaccacct

SEQ ID NO: 962361 - DNA, 25 bp, Homo sapien
caggttctgtggagtaaaaatgaga

SEQ ID NO: 962362 - DNA, 25 bp, Homo sapien
tggacaaaactctggaccacctcct

SEQ ID NO: 962363 - DNA, 25 bp, Homo sapien
cctatgattggacaaaactctggac

SEQ ID NO: 962364 - DNA, 25 bp, Homo sapien
ctggatgaggaaagataagccccat

SEQ ID NO: 962365 - DNA, 25 bp, Homo sapien
tctggatgaggaaagataagcccca

SEQ ID NO: 962366 - DNA, 25 bp, Homo sapien
atctggatgaggaaagataagcccc

SEQ ID NO: 962367 - DNA, 25 bp, Homo sapien
tgcccagatagcaagcaatttaacc

SEQ ID NO: 962368 - DNA, 25 bp, Homo sapien
agcaagcaatttaacctggatacca

SEQ ID NO: 962369 - DNA, 25 bp, Homo sapien
ttttcagcacggaattcatatccat

SEQ ID NO: 962370 - DNA, 25 bp, Homo sapien
tggataccaagccttttcagcacgg

SEQ ID NO: 962371 - DNA, 25 bp, Homo sapien
tccatccacatcctccctggcttct

SEQ ID NO: 962372 - DNA, 25 bp, Homo sapien
tggcttctggacaaacagataaagc

SEQ ID NO: 962373 - DNA, 25 bp, Homo sapien
ctggacaaacagataaagccctcag

SEQ ID NO: 962374 - DNA, 25 bp, Homo sapien
ttctggacaaacagataaagccctc

SEQ ID NO: 962375 - DNA, 25 bp, Homo sapien
taagcttacctgtataacagatggg

SEQ ID NO: 962376 - DNA, 25 bp, Homo sapien
tagagctggagaaaccggattttga

SEQ ID NO: 962377 - DNA, 25 bp, Homo sapien
cattgaccagatgggtgcctttgga

SEQ ID NO: 962378 - DNA, 25 bp, Homo sapien
tttgaattaaggtcaggagaaccca

SEQ ID NO: 962379 - DNA, 25 bp, Homo sapien
ccctgagtggagcttagcaagtccc

SEQ ID NO: 962380 - DNA, 25 bp, Homo sapien
gagcatggcttctctacagtcccca

SEQ ID NO: 962381 - DNA, 25 bp, Homo sapien
ttcttcgtgttgttccagaaacagc

SEQ ID NO: 962382 - DNA, 25 bp, Homo sapien
tccccaaaggagctgcactaaggtt

SEQ ID NO: 962383 - DNA, 25 bp, Homo sapien
caggagtccctttagtgaagtatca

SEQ ID NO: 962384 - DNA, 25 bp, Homo sapien
ggtttccgggatgccagatgcttcc

SEQ ID NO: 962385 - DNA, 25 bp, Homo sapien
tccagtcaattgcatcagaaggtct

SEQ ID NO: 962386 - DNA, 25 bp, Homo sapien
tctttcctaggaaacgcagcatcac

SEQ ID NO: 962387 - DNA, 25 bp, Homo sapien
gagtccccagaattctaggttgtag

SEQ ID NO: 962388 - DNA, 25 bp, Homo sapien
cactaaccttggagcaggaaacact

SEQ ID NO: 962389 - DNA, 25 bp, Homo sapien
gcaagtataaccaccaatcctcagg

SEQ ID NO: 962390 - DNA, 25 bp, Homo sapien
gaagcctcttagttgttccctggga

SEQ ID NO: 962391 - DNA, 25 bp, Homo sapien
cacagggacttgttaggccctccct

SEQ ID NO: 962392 - DNA, 25 bp, Homo sapien
gcatcgaattcaccttacacaactt

SEQ ID NO: 962393 - DNA, 25 bp, Homo sapien
ttaggatcagtgaataggaactccc

SEQ ID NO: 962394 - DNA, 25 bp, Homo sapien
taatagacgtttgagacttaggatc

SEQ ID NO: 962395 - DNA, 25 bp, Homo sapien
gctgccatgcagttaaggagtgttc

SEQ ID NO: 962396 - DNA, 25 bp, Homo sapien
ccaatgaggcatcgtggagactcca

SEQ ID NO: 962397 - DNA, 25 bp, Homo sapien
gaagtgtatgctccaagaaccagat

SEQ ID NO: 962398 - DNA, 25 bp, Homo sapien
caaggctgggcaagtcatcagatca

SEQ ID NO: 962399 - DNA, 25 bp, Homo sapien
acatgttctctgtagaaaatataga

SEQ ID NO: 962400 - DNA, 25 bp, Homo sapien
tacatgttctctgtagaaaatatag

SEQ ID NO: 962401 - DNA, 25 bp, Homo sapien
atttttttaagagaccatgtctcgc

SEQ ID NO: 962402 - DNA, 25 bp, Homo sapien
atacatatatgcataggtatttttt

SEQ ID NO: 962403 - DNA, 25 bp, Homo sapien
ttttaagagaccatgtctcgctctg

SEQ ID NO: 962404 - DNA, 25 bp, Homo sapien
catatatgcataggtattttttatt

SEQ ID NO: 962405 - DNA, 25 bp, Homo sapien
agaccccatacgtgactgcccaaag

SEQ ID NO: 962406 - DNA, 25 bp, Homo sapien
cagtatgagtcataaagcatattag

SEQ ID NO: 962407 - DNA, 25 bp, Homo sapien
cccccaattcctgactacagtatga

SEQ ID NO: 962408 - DNA, 25 bp, Homo sapien
atctagcagcccctatgcttcctgg

SEQ ID NO: 962409 - DNA, 25 bp, Homo sapien
cctcctcctagtagaagctgcaccc

SEQ ID NO: 962410 - DNA, 25 bp, Homo sapien
tgctgactcatctgtcccctttctt

SEQ ID NO: 962411 - DNA, 25 bp, Homo sapien
cctcctagtagaagctgcacccctg

SEQ ID NO: 962412 - DNA, 25 bp, Homo sapien
ctcctcctcctagtagaagctgcac

SEQ ID NO: 962413 - DNA, 25 bp, Homo sapien
tacctggtcgtcctattggccaaag

SEQ ID NO: 962414 - DNA, 25 bp, Homo sapien
tgcccctgcaagactgggaagaaca

SEQ ID NO: 962415 - DNA, 25 bp, Homo sapien
tccatctgcatggtacgtgccgttt

SEQ ID NO: 962416 - DNA, 25 bp, Homo sapien
ccgtttgtcatcactttgggctcca

SEQ ID NO: 962417 - DNA, 25 bp, Homo sapien
ggtaagaaatcctcgagcatctgct

SEQ ID NO: 962418 - DNA, 25 bp, Homo sapien
ccaagtttagctctatgcccaagta

SEQ ID NO: 962419 - DNA, 25 bp, Homo sapien
gagttctaggatctctcaatggcaa

SEQ ID NO: 962420 - DNA, 25 bp, Homo sapien
ttcacagatgagtcccaatgagttc

SEQ ID NO: 962421 - DNA, 25 bp, Homo sapien
gactgcagagagagacgtcgtggtg

SEQ ID NO: 962422 - DNA, 25 bp, Homo sapien
cgaagactgcagagagagacgtcgt

SEQ ID NO: 962423 - DNA, 25 bp, Homo sapien
acgaagactgcagagagagacgtcg

SEQ ID NO: 962424 - DNA, 25 bp, Homo sapien
aagactgcagagagagacgtcgtgg

SEQ ID NO: 962425 - DNA, 25 bp, Homo sapien
ctatccagatgaacactatctttga

SEQ ID NO: 962426 - DNA, 25 bp, Homo sapien
gaaactatccagatgaacactatct

SEQ ID NO: 962427 - DNA, 25 bp, Homo sapien
gatgaacactatctttgatggagaa

SEQ ID NO: 962428 - DNA, 25 bp, Homo sapien
tccagatgaacactatctttgatgg

SEQ ID NO: 962429 - DNA, 25 bp, Homo sapien
agatgaacataaggtagagctggcc

SEQ ID NO: 962430 - DNA, 25 bp, Homo sapien
gaatttcctcttggtcggcaagatg

SEQ ID NO: 962431 - DNA, 25 bp, Homo sapien
tagctcctttacactcatccctctg

SEQ ID NO: 962432 - DNA, 25 bp, Homo sapien
acccccgtgaaatcagctccaaatt

SEQ ID NO: 962433 - DNA, 25 bp, Homo sapien
ctcatatgcaaacggcaccggtcct

SEQ ID NO: 962434 - DNA, 25 bp, Homo sapien
ccactcatgctgtatggaaaagaca

SEQ ID NO: 962435 - DNA, 25 bp, Homo sapien
gcttgccttaaacctgatcttccag

SEQ ID NO: 962436 - DNA, 25 bp, Homo sapien
tgtgcccacattagcataagtgctg

SEQ ID NO: 962437 - DNA, 25 bp, Homo sapien
catgaacagggcttaccccaaacca

SEQ ID NO: 962438 - DNA, 25 bp, Homo sapien
tatcagatttcagaactacctgtgc

SEQ ID NO: 962439 - DNA, 25 bp, Homo sapien
gatcacatagttgcgtgttctgaaa

SEQ ID NO: 962440 - DNA, 25 bp, Homo sapien
agggtggcaagctgggcaacccaaa

SEQ ID NO: 962441 - DNA, 25 bp, Homo sapien
tacaacgttgcaacgaagactcggc

SEQ ID NO: 962442 - DNA, 25 bp, Homo sapien
tctcagtccaaataccccttggagg

SEQ ID NO: 962443 - DNA, 25 bp, Homo sapien
tcatggaaatgaagtagtggaccac

SEQ ID NO: 962444 - DNA, 25 bp, Homo sapien
aaatgaagacagcaaccgtcgtgga

SEQ ID NO: 962445 - DNA, 25 bp, Homo sapien
gtccagtgaatggtccaggaacacc

SEQ ID NO: 962446 - DNA, 25 bp, Homo sapien
ctatttgccatttagcgtccagtga

SEQ ID NO: 962447 - DNA, 25 bp, Homo sapien
atttgccatttagcgtccagtgaat

SEQ ID NO: 962448 - DNA, 25 bp, Homo sapien
gcgtccagtgaatggtccaggaaca

SEQ ID NO: 962449 - DNA, 25 bp, Homo sapien
cttctcccgagcctttcagggtatg

SEQ ID NO: 962450 - DNA, 25 bp, Homo sapien
ccgagcctttcagggtatgtgtcct

SEQ ID NO: 962451 - DNA, 25 bp, Homo sapien
caccttctcccgagcctttcagggt

SEQ ID NO: 962452 - DNA, 25 bp, Homo sapien
tcccgagcctttcagggtatgtgtc

SEQ ID NO: 962453 - DNA, 25 bp, Homo sapien
gggcatcctgggccaagattccacc

SEQ ID NO: 962454 - DNA, 25 bp, Homo sapien
agagcagccacagggcatcctgggc

SEQ ID NO: 962455 - DNA, 25 bp, Homo sapien
cacagggcatcctgggccaagattc

SEQ ID NO: 962456 - DNA, 25 bp, Homo sapien
cagggcatcctgggccaagattcca

SEQ ID NO: 962457 - DNA, 25 bp, Homo sapien
gctgtgtgcgcccacagggtgaggc

SEQ ID NO: 962458 - DNA, 25 bp, Homo sapien
ttcacagcgacacctagtggtctcc

SEQ ID NO: 962459 - DNA, 25 bp, Homo sapien
gtgaggccgcgcttgcacaggttca

SEQ ID NO: 962460 - DNA, 25 bp, Homo sapien
cttgcacaggttcacagcgacacct

SEQ ID NO: 962461 - DNA, 25 bp, Homo sapien
cacagggtgactgggttcctggagg

SEQ ID NO: 962462 - DNA, 25 bp, Homo sapien
aactgtccaccctccaactgtgtga

SEQ ID NO: 962463 - DNA, 25 bp, Homo sapien
gtcagcacgcatattttgcacaact

SEQ ID NO: 962464 - DNA, 25 bp, Homo sapien
caactgtgtgaaacatgtcggtatt

SEQ ID NO: 962465 - DNA, 25 bp, Homo sapien
tatgtcccactcgtcagctgtctct

SEQ ID NO: 962466 - DNA, 25 bp, Homo sapien
tgtcccactcgtcagctgtctctgg

SEQ ID NO: 962467 - DNA, 25 bp, Homo sapien
cacttcttcctatgtcccactcgtc

SEQ ID NO: 962468 - DNA, 25 bp, Homo sapien
ttcctatgtcccactcgtcagctgt

SEQ ID NO: 962469 - DNA, 25 bp, Homo sapien
tagcagaaacatcataggggggcat

SEQ ID NO: 962470 - DNA, 25 bp, Homo sapien
ctgggtggcccacactttggagccc

SEQ ID NO: 962471 - DNA, 25 bp, Homo sapien
tgggtggcccacactttggagccct

SEQ ID NO: 962472 - DNA, 25 bp, Homo sapien
aggtgggggtagcagaaacatcata

SEQ ID NO: 962473 - DNA, 25 bp, Homo sapien
taagtagcacccgtaatgccaccat

SEQ ID NO: 962474 - DNA, 25 bp, Homo sapien
aactgtcggtgactgtaagtagcac

SEQ ID NO: 962475 - DNA, 25 bp, Homo sapien
cagaggcacaaagccgagacagagc

SEQ ID NO: 962476 - DNA, 25 bp, Homo sapien
ccatgtgacgtggatcagaggccct

SEQ ID NO: 962477 - DNA, 25 bp, Homo sapien
tggctgctgtcagggtgtttgcttc

SEQ ID NO: 962478 - DNA, 25 bp, Homo sapien
caagttgcccgttgactctgcagag

SEQ ID NO: 962479 - DNA, 25 bp, Homo sapien
tgctgcaagattcaagttgcccgtt

SEQ ID NO: 962480 - DNA, 25 bp, Homo sapien
tgcccgttgactctgcagagcctgc

SEQ ID NO: 962481 - DNA, 25 bp, Homo sapien
ggagcactagcttgtacccagtgac

SEQ ID NO: 962482 - DNA, 25 bp, Homo sapien
ggtagggggtagattaggagcacta

SEQ ID NO: 962483 - DNA, 25 bp, Homo sapien
ttaggagcactagcttgtacccagt

SEQ ID NO: 962484 - DNA, 25 bp, Homo sapien
tagggggtagattaggagcactagc

SEQ ID NO: 962485 - DNA, 25 bp, Homo sapien
gttagcctttaagagcctcaacagg

SEQ ID NO: 962486 - DNA, 25 bp, Homo sapien
ttcctggttagcctttaagagcctc

SEQ ID NO: 962487 - DNA, 25 bp, Homo sapien
tgaaagcatgtcctgaaatgcctga

SEQ ID NO: 962488 - DNA, 25 bp, Homo sapien
ctttaagagcctcaacaggcagctg

SEQ ID NO: 962489 - DNA, 25 bp, Homo sapien
acagacgtgaccctaaaaccagtga

SEQ ID NO: 962490 - DNA, 25 bp, Homo sapien
ccacagcaacagacgtgaccctaaa

SEQ ID NO: 962491 - DNA, 25 bp, Homo sapien
tcaggctagtgtggagcccagcaga

SEQ ID NO: 962492 - DNA, 25 bp, Homo sapien
agatgtgccatttgcctccacagca

SEQ ID NO: 962493 - DNA, 25 bp, Homo sapien
tctccactcttccatcacgctctgt

SEQ ID NO: 962494 - DNA, 25 bp, Homo sapien
atgacctggcggctgctcaggatgg

SEQ ID NO: 962495 - DNA, 25 bp, Homo sapien
ttccatcacgctctgtccagcaggg

SEQ ID NO: 962496 - DNA, 25 bp, Homo sapien
agggagccatgagcatgcgatgacc

SEQ ID NO: 962497 - DNA, 25 bp, Homo sapien
gcctctgttctgggaaccaggccag

SEQ ID NO: 962498 - DNA, 25 bp, Homo sapien
cactgggccggcgaacagttgtttc

SEQ ID NO: 962499 - DNA, 25 bp, Homo sapien
ggccagcattcatagcctttcccct

SEQ ID NO: 962500 - DNA, 25 bp, Homo sapien
tgtgctccgcggctcaccgtttggc

SEQ ID NO: 962501 - DNA, 25 bp, Homo sapien
tcaactgaggcgcaaatctgcagca

SEQ ID NO: 962502 - DNA, 25 bp, Homo sapien
tggctggccatggtgctcgccatcc

SEQ ID NO: 962503 - DNA, 25 bp, Homo sapien
catggtgctcgccatcctggaacaa

SEQ ID NO: 962504 - DNA, 25 bp, Homo sapien
tgctcgccatcctggaacaaatcaa

SEQ ID NO: 962505 - DNA, 25 bp, Homo sapien
ggtggttcctccgtgagcacatgcc

SEQ ID NO: 962506 - DNA, 25 bp, Homo sapien
cacgtgcggagcaatttatgaaacc

SEQ ID NO: 962507 - DNA, 25 bp, Homo sapien
gctcagttggcaggatatcagaacc

SEQ ID NO: 962508 - DNA, 25 bp, Homo sapien
tggcctgtgcgtcatgctcagttgg

SEQ ID NO: 962509 - DNA, 25 bp, Homo sapien
tggggccagcaatggccacctttgc

SEQ ID NO: 962510 - DNA, 25 bp, Homo sapien
ctggggccagcaatggccacctttg

SEQ ID NO: 962511 - DNA, 25 bp, Homo sapien
gggccagcaatggccacctttgcat

SEQ ID NO: 962512 - DNA, 25 bp, Homo sapien
ggccagcaatggccacctttgcatc

SEQ ID NO: 962513 - DNA, 25 bp, Homo sapien
cttgccttctgccaatactgtccct

SEQ ID NO: 962514 - DNA, 25 bp, Homo sapien
gccttctgccaatactgtccctttc

SEQ ID NO: 962515 - DNA, 25 bp, Homo sapien
tgccttctgccaatactgtcccttt

SEQ ID NO: 962516 - DNA, 25 bp, Homo sapien
ttgccttctgccaatactgtccctt

SEQ ID NO: 962517 - DNA, 25 bp, Homo sapien
tatgacactttcagtactagtgtgg

SEQ ID NO: 962518 - DNA, 25 bp, Homo sapien
cactttcagtactagtgtggtaagt

SEQ ID NO: 962519 - DNA, 25 bp, Homo sapien
gagctatgacactttcagtactagt

SEQ ID NO: 962520 - DNA, 25 bp, Homo sapien
cactctgagctatgacactttcagt

SEQ ID NO: 962521 - DNA, 25 bp, Homo sapien
cgagaatggaagctggtttggagtt

SEQ ID NO: 962522 - DNA, 25 bp, Homo sapien
aatcccgagaatggaagctggtttg

SEQ ID NO: 962523 - DNA, 25 bp, Homo sapien
caatcccgagaatggaagctggttt

SEQ ID NO: 962524 - DNA, 25 bp, Homo sapien
tcccgagaatggaagctggtttgga

SEQ ID NO: 962525 - DNA, 25 bp, Homo sapien
cacttcagatcctacagctactaca

SEQ ID NO: 962526 - DNA, 25 bp, Homo sapien
tacacttcagatcctacagctacta

SEQ ID NO: 962527 - DNA, 25 bp, Homo sapien
agctactacacttcggatccattgt

SEQ ID NO: 962528 - DNA, 25 bp, Homo sapien
tcagatcctacagctactacacttc

SEQ ID NO: 962529 - DNA, 25 bp, Homo sapien
tcacatgtgtgtattagaggaaaag

SEQ ID NO: 962530 - DNA, 25 bp, Homo sapien
tacaaggcaaacagtacatcacact

SEQ ID NO: 962531 - DNA, 25 bp, Homo sapien
tcaactaggtcagaaagcaagtttc

SEQ ID NO: 962532 - DNA, 25 bp, Homo sapien
aatactgcatatcaaaaacttgtgg

SEQ ID NO: 962533 - DNA, 25 bp, Homo sapien
acattaaaactgtgattctatttcc

SEQ ID NO: 962534 - DNA, 25 bp, Homo sapien
cattaaaactgtgattctatttcct

SEQ ID NO: 962535 - DNA, 25 bp, Homo sapien
aacattaaaactgtgattctatttc

SEQ ID NO: 962536 - DNA, 25 bp, Homo sapien
gaataagaaacctgaatccctgtac

SEQ ID NO: 962537 - DNA, 25 bp, Homo sapien
ggcaacagcaagatgtgcttcacat

SEQ ID NO: 962538 - DNA, 25 bp, Homo sapien
ttcttgtcatgaataaaagcatcaa

SEQ ID NO: 962539 - DNA, 25 bp, Homo sapien
gaagcaaaatgtgaataagcttgta

SEQ ID NO: 962540 - DNA, 25 bp, Homo sapien
tcaaggctctttaagcaaagacagg

SEQ ID NO: 962541 - DNA, 25 bp, Homo sapien
tacaaagaggctgggtctcagcctg

SEQ ID NO: 962542 - DNA, 25 bp, Homo sapien
gatatctagttgagccacgttctac

SEQ ID NO: 962543 - DNA, 25 bp, Homo sapien
tacacctattaagtaccacgggtca

SEQ ID NO: 962544 - DNA, 25 bp, Homo sapien
tagtatcaacatatacttcatacag

SEQ ID NO: 962545 - DNA, 25 bp, Homo sapien
ggcaacatgtcatagtatcaacata

SEQ ID NO: 962546 - DNA, 25 bp, Homo sapien
tgtcatagtatcaacatatacttca

SEQ ID NO: 962547 - DNA, 25 bp, Homo sapien
caacatatacttcatacagtgtatt

SEQ ID NO: 962548 - DNA, 25 bp, Homo sapien
tgtatttgatggactgtgtaggctg

SEQ ID NO: 962549 - DNA, 25 bp, Homo sapien
gatgtatttgatggactgtgtaggc

SEQ ID NO: 962550 - DNA, 25 bp, Homo sapien
tgtgtaggctggtctccttgtacac

SEQ ID NO: 962551 - DNA, 25 bp, Homo sapien
gtaggctggtctccttgtacacaaa

SEQ ID NO: 962552 - DNA, 25 bp, Homo sapien
ccagtctgagcgacatagcgaaact

SEQ ID NO: 962553 - DNA, 25 bp, Homo sapien
agtctgagcgacatagcgaaactcc

SEQ ID NO: 962554 - DNA, 25 bp, Homo sapien
actccagtctgagcgacatagcgaa

SEQ ID NO: 962555 - DNA, 25 bp, Homo sapien
gcactccagtctgagcgacatagcg

SEQ ID NO: 962556 - DNA, 25 bp, Homo sapien
gatacatttagggatcccatactgg

SEQ ID NO: 962557 - DNA, 25 bp, Homo sapien
aatatctgtcagagctttagcccag

SEQ ID NO: 962558 - DNA, 25 bp, Homo sapien
tcttacaaggcggaagttcatcaat

SEQ ID NO: 962559 - DNA, 25 bp, Homo sapien
ggtcacagagccaaagtaacacagt

SEQ ID NO: 962560 - DNA, 25 bp, Homo sapien
gctgttagtgttacaagcacagtgc

SEQ ID NO: 962561 - DNA, 25 bp, Homo sapien
caggaccataccttagaccttgtca

SEQ ID NO: 962562 - DNA, 25 bp, Homo sapien
gattacattcaaccttatggtgctg

SEQ ID NO: 962563 - DNA, 25 bp, Homo sapien
gcacagtgcctgagttacaacagta

SEQ ID NO: 962564 - DNA, 25 bp, Homo sapien
tatgcgtacactcaaggataggagc

SEQ ID NO: 962565 - DNA, 25 bp, Homo sapien
gctatatagcttgcccacttggtca

SEQ ID NO: 962566 - DNA, 25 bp, Homo sapien
gaaacaccttagcacagaattgaga

SEQ ID NO: 962567 - DNA, 25 bp, Homo sapien
gtcacactgcactctaagcgaatgg

SEQ ID NO: 962568 - DNA, 25 bp, Homo sapien
tatcataggaagtttacgactatcc

SEQ ID NO: 962569 - DNA, 25 bp, Homo sapien
gcaatgcagtacaggaacacaaaga

SEQ ID NO: 962570 - DNA, 25 bp, Homo sapien
gatacagactcgtgtagccaacata

SEQ ID NO: 962571 - DNA, 25 bp, Homo sapien
gaagggcagcaatgcagtacaggaa

SEQ ID NO: 962572 - DNA, 25 bp, Homo sapien
aattgtgcagaagaagagtaatcgc

SEQ ID NO: 962573 - DNA, 25 bp, Homo sapien
agaattgtgcagaagaagagtaatc

SEQ ID NO: 962574 - DNA, 25 bp, Homo sapien
gaattgtgcagaagaagagtaatcg

SEQ ID NO: 962575 - DNA, 25 bp, Homo sapien
tctttccaatttacatcacatatgt

SEQ ID NO: 962576 - DNA, 25 bp, Homo sapien
ctatgaggacgtaatctttccaatt

SEQ ID NO: 962577 - DNA, 25 bp, Homo sapien
ggtggctgaaatgatgcctcattca

SEQ ID NO: 962578 - DNA, 25 bp, Homo sapien
tcacatatgtttacacctggaggtg

SEQ ID NO: 962579 - DNA, 25 bp, Homo sapien
tctcagtaactgcaggaggacaatt

SEQ ID NO: 962580 - DNA, 25 bp, Homo sapien
gagaatgcatttaagcaactgagtt

SEQ ID NO: 962581 - DNA, 25 bp, Homo sapien
ttcattcagcctactaaaatctggc

SEQ ID NO: 962582 - DNA, 25 bp, Homo sapien
gtcttcactttcttaccacacattc

SEQ ID NO: 962583 - DNA, 25 bp, Homo sapien
atcttcacagtcaaacagcggttta

SEQ ID NO: 962584 - DNA, 25 bp, Homo sapien
taccttgaatatgctaatggcaacg

SEQ ID NO: 962585 - DNA, 25 bp, Homo sapien
cattctattgcaccttacgttttgg

SEQ ID NO: 962586 - DNA, 25 bp, Homo sapien
gatatctgctatatctgcagcccaa

SEQ ID NO: 962587 - DNA, 25 bp, Homo sapien
caacgaagtcagaaagacagcagtc

SEQ ID NO: 962588 - DNA, 25 bp, Homo sapien
cccttcagtcctactgaaactaatt

SEQ ID NO: 962589 - DNA, 25 bp, Homo sapien
ttctagcctttccaattcatccttt

SEQ ID NO: 962590 - DNA, 25 bp, Homo sapien
taattttaggccctcataattcctc

SEQ ID NO: 962591 - DNA, 25 bp, Homo sapien
gccctcataattcctcaatcaacag

SEQ ID NO: 962592 - DNA, 25 bp, Homo sapien
cataccctgcacatatgcattttcc

SEQ ID NO: 962593 - DNA, 25 bp, Homo sapien
cgtaccctccaacctagcatatatt

SEQ ID NO: 962594 - DNA, 25 bp, Homo sapien
gaagcagccgacctctgaaatcttt

SEQ ID NO: 962595 - DNA, 25 bp, Homo sapien
tcagaacaatctcaaaccgtaccct

SEQ ID NO: 962596 - DNA, 25 bp, Homo sapien
tgttctctcagctatgaagtcctcc

SEQ ID NO: 962597 - DNA, 25 bp, Homo sapien
tccctagttcctccaagcaaatgct

SEQ ID NO: 962598 - DNA, 25 bp, Homo sapien
tagaaagccactccccaagtgaacc

SEQ ID NO: 962599 - DNA, 25 bp, Homo sapien
gaaccagtacccatccttcaagtgt

SEQ ID NO: 962600 - DNA, 25 bp, Homo sapien
tatttatgcgtctttcaagtagtca

SEQ ID NO: 962601 - DNA, 25 bp, Homo sapien
gattagcctcgttaatgagattttc

SEQ ID NO: 962602 - DNA, 25 bp, Homo sapien
tgtgtgaagtcagcactacttcagt

SEQ ID NO: 962603 - DNA, 25 bp, Homo sapien
gcctcttcatttaagtggaaatcta

SEQ ID NO: 962604 - DNA, 25 bp, Homo sapien
cgaagtttgaaggaagcccgcagtg

SEQ ID NO: 962605 - DNA, 25 bp, Homo sapien
ggaaatcacattaggtacccatcag

SEQ ID NO: 962606 - DNA, 25 bp, Homo sapien
ttgccaaggtcgaattaataagcgt

SEQ ID NO: 962607 - DNA, 25 bp, Homo sapien
cagaaatatgtagtgggccgcgaag

SEQ ID NO: 962608 - DNA, 25 bp, Homo sapien
gggacgtaaccgctgagcctctccg

SEQ ID NO: 962609 - DNA, 25 bp, Homo sapien
tagaccgcagcaggaagttttccct

SEQ ID NO: 962610 - DNA, 25 bp, Homo sapien
gccgaggagctcgtgattcgacgcc

SEQ ID NO: 962611 - DNA, 25 bp, Homo sapien
gccgggtttcggttagaccgcagca

SEQ ID NO: 962612 - DNA, 25 bp, Homo sapien
cggctcgcaggtccccgtctccccg

SEQ ID NO: 962613 - DNA, 25 bp, Homo sapien
ggcgccgcgccgagcggcaggcggg

SEQ ID NO: 962614 - DNA, 25 bp, Homo sapien
tctccccgcctagggcgccgcgccg

SEQ ID NO: 962615 - DNA, 25 bp, Homo sapien
gcctcaaagcccgcgcggcagggct

SEQ ID NO: 962616 - DNA, 25 bp, Homo sapien
ttgaggttgatctggaagccggaca

SEQ ID NO: 962617 - DNA, 25 bp, Homo sapien
atgaagccgagtggctccttgagcg

SEQ ID NO: 962618 - DNA, 25 bp, Homo sapien
tgaggttgatctggaagccggacat

SEQ ID NO: 962619 - DNA, 25 bp, Homo sapien
ggaccttgatgaagccgagtggctc

SEQ ID NO: 962620 - DNA, 25 bp, Homo sapien
aggaggggaccgacgagaccagagc

SEQ ID NO: 962621 - DNA, 25 bp, Homo sapien
agcccggtggcgaggaagggcaggc

SEQ ID NO: 962622 - DNA, 25 bp, Homo sapien
gagagagtcaggacgacggggcgga

SEQ ID NO: 962623 - DNA, 25 bp, Homo sapien
cagagcagcccggtggcgaggaagg

SEQ ID NO: 962624 - DNA, 25 bp, Homo sapien
tccctgcggttcagcccctggcact

SEQ ID NO: 962625 - DNA, 25 bp, Homo sapien
tgcgcacgcgtgtacgcgtgcgctc

SEQ ID NO: 962626 - DNA, 25 bp, Homo sapien
cccttccctgcggttcagcccctgg

SEQ ID NO: 962627 - DNA, 25 bp, Homo sapien
ctggcactcggtcttcccctgcgca

SEQ ID NO: 962628 - DNA, 25 bp, Homo sapien
tgaacgtccttgtagtaagcgaacc

SEQ ID NO: 962629 - DNA, 25 bp, Homo sapien
tacttgccactgaggttattccgtc

SEQ ID NO: 962630 - DNA, 25 bp, Homo sapien
tattccgtcagggttgacaactgtt

SEQ ID NO: 962631 - DNA, 25 bp, Homo sapien
tcaagcacgaatatgatttgcaggc

SEQ ID NO: 962632 - DNA, 25 bp, Homo sapien
tgtccagagagtgcaaaaaatacat

SEQ ID NO: 962633 - DNA, 25 bp, Homo sapien
ctgtccagagagtgcaaaaaataca

SEQ ID NO: 962634 - DNA, 25 bp, Homo sapien
gtccagagagtgcaaaaaatacatt

SEQ ID NO: 962635 - DNA, 25 bp, Homo sapien
ctaggtgagtggaaggtgaccatac

SEQ ID NO: 962636 - DNA, 25 bp, Homo sapien
gagtggaaggtgaccatacactgct

SEQ ID NO: 962637 - DNA, 25 bp, Homo sapien
gtggaaggtgaccatacactgctac

SEQ ID NO: 962638 - DNA, 25 bp, Homo sapien
ggtgagtggaaggtgaccatacact

SEQ ID NO: 962639 - DNA, 25 bp, Homo sapien
gagaccacgatgagcggtgctccag

SEQ ID NO: 962640 - DNA, 25 bp, Homo sapien
ctggtgcgtctgagaccacgatgag

SEQ ID NO: 962641 - DNA, 25 bp, Homo sapien
ctctcattctgttgcggtcttctgg

SEQ ID NO: 962642 - DNA, 25 bp, Homo sapien
tctgttgcggtcttctgggtaggca

SEQ ID NO: 962643 - DNA, 25 bp, Homo sapien
gtaagactatttagcttgagcttca

SEQ ID NO: 962644 - DNA, 25 bp, Homo sapien
ggacggagtagtgaatagtaagact

SEQ ID NO: 962645 - DNA, 25 bp, Homo sapien
aatagtaagactatttagcttgagc

SEQ ID NO: 962646 - DNA, 25 bp, Homo sapien
gacggagtagtgaatagtaagacta

SEQ ID NO: 962647 - DNA, 25 bp, Homo sapien
ttaatttgaatggcagacagcttgt

SEQ ID NO: 962648 - DNA, 25 bp, Homo sapien
atggcagacagcttgtgtcagtggc

SEQ ID NO: 962649 - DNA, 25 bp, Homo sapien
cagacagcttgtgtcagtggctgct

SEQ ID NO: 962650 - DNA, 25 bp, Homo sapien
taatttgaatggcagacagcttgtg

SEQ ID NO: 962651 - DNA, 25 bp, Homo sapien
ttgtttttggtttgaacacaactgc

SEQ ID NO: 962652 - DNA, 25 bp, Homo sapien
cttgtttttggtttgaacacaactg

SEQ ID NO: 962653 - DNA, 25 bp, Homo sapien
ctgtggtagggcattcaccactctt

SEQ ID NO: 962654 - DNA, 25 bp, Homo sapien
tgtggtagggcattcaccactcttc

SEQ ID NO: 962655 - DNA, 25 bp, Homo sapien
gctgtggtagggcattcaccactct

SEQ ID NO: 962656 - DNA, 25 bp, Homo sapien
tggtagggcattcaccactcttccc

SEQ ID NO: 962657 - DNA, 25 bp, Homo sapien
ttacagaggccaaatatggggagaa

SEQ ID NO: 962658 - DNA, 25 bp, Homo sapien
tgttacagaggccaaatatggggag

SEQ ID NO: 962659 - DNA, 25 bp, Homo sapien
tacagaggccaaatatggggagaaa

SEQ ID NO: 962660 - DNA, 25 bp, Homo sapien
acagaggccaaatatggggagaaac

SEQ ID NO: 962661 - DNA, 25 bp, Homo sapien
acaccactagtgcttatcctcaaag

SEQ ID NO: 962662 - DNA, 25 bp, Homo sapien
caaagctttggccaattcctggtac

SEQ ID NO: 962663 - DNA, 25 bp, Homo sapien
gctggaatgtcgctgccaacaccac

SEQ ID NO: 962664 - DNA, 25 bp, Homo sapien
tcctcaaagctttggccaattcctg

SEQ ID NO: 962665 - DNA, 25 bp, Homo sapien
ctgccactcttccagtgacctactc

SEQ ID NO: 962666 - DNA, 25 bp, Homo sapien
gccactcttccagtgacctactcct

SEQ ID NO: 962667 - DNA, 25 bp, Homo sapien
cactcttccagtgacctactcctca

SEQ ID NO: 962668 - DNA, 25 bp, Homo sapien
actcttccagtgacctactcctcat

SEQ ID NO: 962669 - DNA, 25 bp, Homo sapien
cagtctgacggtatgcaacccctga

SEQ ID NO: 962670 - DNA, 25 bp, Homo sapien
cactgataagcatttccagaggtgg

SEQ ID NO: 962671 - DNA, 25 bp, Homo sapien
caggatggtttcagcccacagtctg

SEQ ID NO: 962672 - DNA, 25 bp, Homo sapien
tgcttataagcaaaccctttcaggg

SEQ ID NO: 962673 - DNA, 25 bp, Homo sapien
tctccagctccatgggaatactcat

SEQ ID NO: 962674 - DNA, 25 bp, Homo sapien
ccttgcttctccagctccatgggaa

SEQ ID NO: 962675 - DNA, 25 bp, Homo sapien
ttgcttctccagctccatgggaata

SEQ ID NO: 962676 - DNA, 25 bp, Homo sapien
gcttctccagctccatgggaatact

SEQ ID NO: 962677 - DNA, 25 bp, Homo sapien
cacaaaggtctctgagtatccagtt

SEQ ID NO: 962678 - DNA, 25 bp, Homo sapien
catgtggagtgtccggctgactgct

SEQ ID NO: 962679 - DNA, 25 bp, Homo sapien
gtgagggctccctcttttgtgcctc

SEQ ID NO: 962680 - DNA, 25 bp, Homo sapien
tgttcttgaggctcagacccacaaa

SEQ ID NO: 962681 - DNA, 25 bp, Homo sapien
ttccaggtgattgtgtctggcagtg

SEQ ID NO: 962682 - DNA, 25 bp, Homo sapien
tgacttccaggtgattgtgtctggc

SEQ ID NO: 962683 - DNA, 25 bp, Homo sapien
gtcatcttctaggtgagtgtatctg

SEQ ID NO: 962684 - DNA, 25 bp, Homo sapien
gtatctggcagtggatgttgcggtg

SEQ ID NO: 962685 - DNA, 25 bp, Homo sapien
tcttcagttactttgcacattaatt

SEQ ID NO: 962686 - DNA, 25 bp, Homo sapien
gcaggtaattgtgggcagcattctc

SEQ ID NO: 962687 - DNA, 25 bp, Homo sapien
cacggactgcagataggcaggtaat

SEQ ID NO: 962688 - DNA, 25 bp, Homo sapien
cagacatcaggagatctgctctcac

SEQ ID NO: 962689 - DNA, 25 bp, Homo sapien
gggagtcctgagcaaatgcagaggc

SEQ ID NO: 962690 - DNA, 25 bp, Homo sapien
gttcccggcacgctctcataggtgc

SEQ ID NO: 962691 - DNA, 25 bp, Homo sapien
ccttgttcccggcacgctctcatag

SEQ ID NO: 962692 - DNA, 25 bp, Homo sapien
agggagtcctgagcaaatgcagagg

SEQ ID NO: 962693 - DNA, 25 bp, Homo sapien
tcttcccatgaacagtatttgtggg

SEQ ID NO: 962694 - DNA, 25 bp, Homo sapien
cttcccatgaacagtatttgtggga

SEQ ID NO: 962695 - DNA, 25 bp, Homo sapien
aaaaccagctactgtcaacagcttc

SEQ ID NO: 962696 - DNA, 25 bp, Homo sapien
taggacatgggcttggcccattggg

SEQ ID NO: 962697 - DNA, 25 bp, Homo sapien
ccaagctccccaggagtaggacatg

SEQ ID NO: 962698 - DNA, 25 bp, Homo sapien
taatccacttggcaaaaaccagcta

SEQ ID NO: 962699 - DNA, 25 bp, Homo sapien
gcattaggtagatctgtgttaggtt

SEQ ID NO: 962700 - DNA, 25 bp, Homo sapien
ggtatacgtttgatgactataagca

SEQ ID NO: 962701 - DNA, 25 bp, Homo sapien
cacttctgaggtatacgtttgatga

SEQ ID NO: 962702 - DNA, 25 bp, Homo sapien
gtgttaggttgaaatccaggtgccc

SEQ ID NO: 962703 - DNA, 25 bp, Homo sapien
ctggagcatgacagagcaaagccat

SEQ ID NO: 962704 - DNA, 25 bp, Homo sapien
ttttggctagagttgctttaagcaa

SEQ ID NO: 962705 - DNA, 25 bp, Homo sapien
ctttttggctagagttgctttaagc

SEQ ID NO: 962706 - DNA, 25 bp, Homo sapien
tttttggctagagttgctttaagca

SEQ ID NO: 962707 - DNA, 25 bp, Homo sapien
ggtactatgtacgtacaccagaaaa

SEQ ID NO: 962708 - DNA, 25 bp, Homo sapien
tcccatggtactatgtacgtacacc

SEQ ID NO: 962709 - DNA, 25 bp, Homo sapien
ctaagcatgttcctcccagtttccc

SEQ ID NO: 962710 - DNA, 25 bp, Homo sapien
tcccagtttcccatggtactatgta

SEQ ID NO: 962711 - DNA, 25 bp, Homo sapien
cagcctccgatgaccaaggtggcaa

SEQ ID NO: 962712 - DNA, 25 bp, Homo sapien
cgatgaccaaggtggcaagctccat

SEQ ID NO: 962713 - DNA, 25 bp, Homo sapien
ccgcagcctccgatgaccaaggtgg

SEQ ID NO: 962714 - DNA, 25 bp, Homo sapien
cctccgatgaccaaggtggcaagct

SEQ ID NO: 962715 - DNA, 25 bp, Homo sapien
gaatagacttaacatacaacttggg

SEQ ID NO: 962716 - DNA, 25 bp, Homo sapien
tctccactgaatgggttaaaaagga

SEQ ID NO: 962717 - DNA, 25 bp, Homo sapien
ttataacttgatgttgagtacatat

SEQ ID NO: 962718 - DNA, 25 bp, Homo sapien
taagtgtgagttctaaattatggca

SEQ ID NO: 962719 - DNA, 25 bp, Homo sapien
tagactgatttaagggtgacacaca

SEQ ID NO: 962720 - DNA, 25 bp, Homo sapien
tcagttccaagtgactaagagccaa

SEQ ID NO: 962721 - DNA, 25 bp, Homo sapien
ctcagaatggagatggccaaatacc

SEQ ID NO: 962722 - DNA, 25 bp, Homo sapien
tctagtggacattcgtgttaaccgt

SEQ ID NO: 962723 - DNA, 25 bp, Homo sapien
tgggctttgcgattctcatttggct

SEQ ID NO: 962724 - DNA, 25 bp, Homo sapien
cagctgtttaccttaggctggagta

SEQ ID NO: 962725 - DNA, 25 bp, Homo sapien
ccttttcttagaacagagatcagga

SEQ ID NO: 962726 - DNA, 25 bp, Homo sapien
tccagtatcggattcttaagtgaga

SEQ ID NO: 962727 - DNA, 25 bp, Homo sapien
ataactgtacagtgcctagacattc

SEQ ID NO: 962728 - DNA, 25 bp, Homo sapien
aataactgtacagtgcctagacatt

SEQ ID NO: 962729 - DNA, 25 bp, Homo sapien
gggcagtaaggttagtaattctata

SEQ ID NO: 962730 - DNA, 25 bp, Homo sapien
tctacaaggggcagtaaggttagta

SEQ ID NO: 962731 - DNA, 25 bp, Homo sapien
ggcagtaaggttagtaattctatag

SEQ ID NO: 962732 - DNA, 25 bp, Homo sapien
attctacaaggggcagtaaggttag

SEQ ID NO: 962733 - DNA, 25 bp, Homo sapien
tcttacacaatcttgtttgtacaaa

SEQ ID NO: 962734 - DNA, 25 bp, Homo sapien
tatatcttacacaatcttgtttgta

SEQ ID NO: 962735 - DNA, 25 bp, Homo sapien
tatcttacacaatcttgtttgtaca

SEQ ID NO: 962736 - DNA, 25 bp, Homo sapien
aaatatatcttacacaatcttgttt

SEQ ID NO: 962737 - DNA, 25 bp, Homo sapien
taccagattgaatgactacctattg

SEQ ID NO: 962738 - DNA, 25 bp, Homo sapien
taaaccaacaaataatttggctgta

SEQ ID NO: 962739 - DNA, 25 bp, Homo sapien
catggtaattttatgcaaatctgtt

SEQ ID NO: 962740 - DNA, 25 bp, Homo sapien
tgagatcacctaaacactggaaaag

SEQ ID NO: 962741 - DNA, 25 bp, Homo sapien
catcaaatgaatagctttttgtcac

SEQ ID NO: 962742 - DNA, 25 bp, Homo sapien
cttgccattcttgaagacagtatgg

SEQ ID NO: 962743 - DNA, 25 bp, Homo sapien
gaatagctttttgtcaccttgccat

SEQ ID NO: 962744 - DNA, 25 bp, Homo sapien
accttgccattcttgaagacagtat

SEQ ID NO: 962745 - DNA, 25 bp, Homo sapien
tgcctagggagaactgtaatcattg

SEQ ID NO: 962746 - DNA, 25 bp, Homo sapien
ctggtaaaccctgccttgttcctgg

SEQ ID NO: 962747 - DNA, 25 bp, Homo sapien
cattgtgagtgtgcagcaaaaaagc

SEQ ID NO: 962748 - DNA, 25 bp, Homo sapien
gttcctggccaacaaactcaacagt

SEQ ID NO: 962749 - DNA, 25 bp, Homo sapien
tactcaaataattgcctaacaggct

SEQ ID NO: 962750 - DNA, 25 bp, Homo sapien
tgaagtgactttagctcatctagga

SEQ ID NO: 962751 - DNA, 25 bp, Homo sapien
taggaagtaatagtgcactcatgtt

SEQ ID NO: 962752 - DNA, 25 bp, Homo sapien
ctaacaggctatataaagggatcta

SEQ ID NO: 962753 - DNA, 25 bp, Homo sapien
tcttattttggtaggccaggtcagc

SEQ ID NO: 962754 - DNA, 25 bp, Homo sapien
tttggtgagccaacctactattgct

SEQ ID NO: 962755 - DNA, 25 bp, Homo sapien
caggccccgtgtttatgacgtagac

SEQ ID NO: 962756 - DNA, 25 bp, Homo sapien
ccaggtcagcaattggacattttat

SEQ ID NO: 962757 - DNA, 25 bp, Homo sapien
agtgtaacaaaattccctgctggcg

SEQ ID NO: 962758 - DNA, 25 bp, Homo sapien
tggaccttttgttgggatcagcaac

SEQ ID NO: 962759 - DNA, 25 bp, Homo sapien
tccctgctggcgtcctatgtaaaga

SEQ ID NO: 962760 - DNA, 25 bp, Homo sapien
cctatgtaaagataatcggcccttt

SEQ ID NO: 962761 - DNA, 25 bp, Homo sapien
tataactgaaccaatccacatctgg

SEQ ID NO: 962762 - DNA, 25 bp, Homo sapien
catgctgttgaagaaaagcccaact

SEQ ID NO: 962763 - DNA, 25 bp, Homo sapien
cacacacaatctttggagagggaac

SEQ ID NO: 962764 - DNA, 25 bp, Homo sapien
gcattctaacatgtgacccttaagg

SEQ ID NO: 962765 - DNA, 25 bp, Homo sapien
acaacatagctacacttgaaggaac

SEQ ID NO: 962766 - DNA, 25 bp, Homo sapien
caccagaaccgaaggcaatattttc

SEQ ID NO: 962767 - DNA, 25 bp, Homo sapien
gtagcaaacctccaccagaaccgaa

SEQ ID NO: 962768 - DNA, 25 bp, Homo sapien
tgaaggaacaattcaagagatctct

SEQ ID NO: 962769 - DNA, 25 bp, Homo sapien
ccaaaccttaatttggaagagaatg

SEQ ID NO: 962770 - DNA, 25 bp, Homo sapien
caaaccttaatttggaagagaatgg

SEQ ID NO: 962771 - DNA, 25 bp, Homo sapien
gcaacacaagcaatgggagccaatt

SEQ ID NO: 962772 - DNA, 25 bp, Homo sapien
tattctggctgatataccagtgcca

SEQ ID NO: 962773 - DNA, 25 bp, Homo sapien
ggagccaatttactagactctagga

SEQ ID NO: 962774 - DNA, 25 bp, Homo sapien
ccagctagagagacctgtatgaaca

SEQ ID NO: 962775 - DNA, 25 bp, Homo sapien
taacaacggtgcaaaagtgattcgc

SEQ ID NO: 962776 - DNA, 25 bp, Homo sapien
ggtttacactgtcaacctcatggga

SEQ ID NO: 962777 - DNA, 25 bp, Homo sapien
tgaggctgacgtcaaggaagaaaac

SEQ ID NO: 962778 - DNA, 25 bp, Homo sapien
cccatgctaagttgagaggaacatc

SEQ ID NO: 962779 - DNA, 25 bp, Homo sapien
ctgaacacccaacttgaactccgtt

SEQ ID NO: 962780 - DNA, 25 bp, Homo sapien
cttgaactccgttcaacttgcctga

SEQ ID NO: 962781 - DNA, 25 bp, Homo sapien
gcctgaacaatccaacagctgactg

SEQ ID NO: 962782 - DNA, 25 bp, Homo sapien
tcaacttgcctgaacaatccaacag

SEQ ID NO: 962783 - DNA, 25 bp, Homo sapien
gattgctatgtgtaaggtcctcccc

SEQ ID NO: 962784 - DNA, 25 bp, Homo sapien
tacaagagatctattccggacgcct

SEQ ID NO: 962785 - DNA, 25 bp, Homo sapien
tggaacaaggaaaggtaggcacagc

SEQ ID NO: 962786 - DNA, 25 bp, Homo sapien
caccaaggtaagagactgtcagttc

SEQ ID NO: 962787 - DNA, 25 bp, Homo sapien
tcagctacagacttaagaatatatt

SEQ ID NO: 962788 - DNA, 25 bp, Homo sapien
gaatggtgaaccctttcagctacag

SEQ ID NO: 962789 - DNA, 25 bp, Homo sapien
taggctgtcgaacggacgttgtgtt

SEQ ID NO: 962790 - DNA, 25 bp, Homo sapien
ttactctttgatggataggctgtcg

SEQ ID NO: 962791 - DNA, 25 bp, Homo sapien
tagacggcaccttcttccaatggaa

SEQ ID NO: 962792 - DNA, 25 bp, Homo sapien
acagaattgaaacgagggccttgct

SEQ ID NO: 962793 - DNA, 25 bp, Homo sapien
gaaaactcagacctatgccagcaga

SEQ ID NO: 962794 - DNA, 25 bp, Homo sapien
gagagttagcatgtcctttcaaagc

SEQ ID NO: 962795 - DNA, 25 bp, Homo sapien
aacttgtaaccctttgagttctcag

SEQ ID NO: 962796 - DNA, 25 bp, Homo sapien
gataaggtggcagcaacttgtaacc

SEQ ID NO: 962797 - DNA, 25 bp, Homo sapien
ccatccccttgaataactctaagat

SEQ ID NO: 962798 - DNA, 25 bp, Homo sapien
aataactctaagataaggtggcagc

SEQ ID NO: 962799 - DNA, 25 bp, Homo sapien
ctatatggaaaaatacacatgcaac

SEQ ID NO: 962800 - DNA, 25 bp, Homo sapien
catgcaacacaaataactaaagctg

SEQ ID NO: 962801 - DNA, 25 bp, Homo sapien
cacaaataactaaagctgaaaacaa

SEQ ID NO: 962802 - DNA, 25 bp, Homo sapien
gaaaaatacacatgcaacacaaata

SEQ ID NO: 962803 - DNA, 25 bp, Homo sapien
tattgcaggctaagacaagactttc

SEQ ID NO: 962804 - DNA, 25 bp, Homo sapien
gacctacactggatatctgactcct

SEQ ID NO: 962805 - DNA, 25 bp, Homo sapien
gacttattctgcttgtgcccaatga

SEQ ID NO: 962806 - DNA, 25 bp, Homo sapien
caaatggtgtggtcaagtagcaagg

SEQ ID NO: 962807 - DNA, 25 bp, Homo sapien
tattaaatgtcttagatcttcaccc

SEQ ID NO: 962808 - DNA, 25 bp, Homo sapien
gctgaccacagatacaggcactgat

SEQ ID NO: 962809 - DNA, 25 bp, Homo sapien
ggtctgattattagtggtgcctgtg

SEQ ID NO: 962810 - DNA, 25 bp, Homo sapien
tttaacacagtgtcaagagggtttc

SEQ ID NO: 962811 - DNA, 25 bp, Homo sapien
taggcagacacttgatctatccctg

SEQ ID NO: 962812 - DNA, 25 bp, Homo sapien
caaaccatcaacatcacagagaagg

SEQ ID NO: 962813 - DNA, 25 bp, Homo sapien
gcaaatgaagtagctgggtcaacca

SEQ ID NO: 962814 - DNA, 25 bp, Homo sapien
tgttaggcaatgagagcacctggct

SEQ ID NO: 962815 - DNA, 25 bp, Homo sapien
tcaagtggctagtaataggaagtca

SEQ ID NO: 962816 - DNA, 25 bp, Homo sapien
ggctgccagtagctatgatgtcaat

SEQ ID NO: 962817 - DNA, 25 bp, Homo sapien
tactacccgaatccaaaattgagag

SEQ ID NO: 962818 - DNA, 25 bp, Homo sapien
tacgaattaatatatgcccagggaa

SEQ ID NO: 962819 - DNA, 25 bp, Homo sapien
ggccacccactatgtcagccggaag

SEQ ID NO: 962820 - DNA, 25 bp, Homo sapien
caatgctcataaacgtcagctgaat

SEQ ID NO: 962821 - DNA, 25 bp, Homo sapien
tgtatgtacatctaaggccaaacta

SEQ ID NO: 962822 - DNA, 25 bp, Homo sapien
tgaaataaccatcaacgaagagtct

SEQ ID NO: 962823 - DNA, 25 bp, Homo sapien
tacgaggagttaaccaacagagcag

SEQ ID NO: 962824 - DNA, 25 bp, Homo sapien
taacccttgttgcacccagtagact

SEQ ID NO: 962825 - DNA, 25 bp, Homo sapien
cattcagtgtcaaaatatgagcgcc

SEQ ID NO: 962826 - DNA, 25 bp, Homo sapien
tatgagcgcccttactaacctgaac

SEQ ID NO: 962827 - DNA, 25 bp, Homo sapien
tggctctgcagttaggtaaaatgtc

SEQ ID NO: 962828 - DNA, 25 bp, Homo sapien
ctggctctgcagttaggtaaaatgt

SEQ ID NO: 962829 - DNA, 25 bp, Homo sapien
gatgtactgtaggtacctggctctg

SEQ ID NO: 962830 - DNA, 25 bp, Homo sapien
tgtactgtaggtacctggctctgca

SEQ ID NO: 962831 - DNA, 25 bp, Homo sapien
tggaacaggatctttcgttccataa

SEQ ID NO: 962832 - DNA, 25 bp, Homo sapien
gaacaggatctttcgttccataata

SEQ ID NO: 962833 - DNA, 25 bp, Homo sapien
caagtcctgctactgtatctgttcc

SEQ ID NO: 962834 - DNA, 25 bp, Homo sapien
ttagagcaagtcctgctactgtatc

SEQ ID NO: 962835 - DNA, 25 bp, Homo sapien
aaatcatgtaacttgtattccagac

SEQ ID NO: 962836 - DNA, 25 bp, Homo sapien
tcatgtaacttgtattccagaccat

SEQ ID NO: 962837 - DNA, 25 bp, Homo sapien
gataccaggactgaacaagaatagt

SEQ ID NO: 962838 - DNA, 25 bp, Homo sapien
ctgtgattggataccaggactgaac

SEQ ID NO: 962839 - DNA, 25 bp, Homo sapien
aatgtggacttggatcaaatagggc

SEQ ID NO: 962840 - DNA, 25 bp, Homo sapien
caaatagggcatgaaccagcattgg

SEQ ID NO: 962841 - DNA, 25 bp, Homo sapien
cacaccaggtccacatagcagagaa

SEQ ID NO: 962842 - DNA, 25 bp, Homo sapien
agaagttgttcgtttactcctcgag

SEQ ID NO: 962843 - DNA, 25 bp, Homo sapien
ttaacggtcatctactgtccatggg

SEQ ID NO: 962844 - DNA, 25 bp, Homo sapien
gaaccctcagctaaatgcagatgcc

SEQ ID NO: 962845 - DNA, 25 bp, Homo sapien
taacagatggtagatcctaagacct

SEQ ID NO: 962846 - DNA, 25 bp, Homo sapien
gaagaaacctcttctggagtgagac

SEQ ID NO: 962847 - DNA, 25 bp, Homo sapien
taagtttgctctaaaataatacaca

SEQ ID NO: 962848 - DNA, 25 bp, Homo sapien
tcgtaagttactagaaatgtgctgt

SEQ ID NO: 962849 - DNA, 25 bp, Homo sapien
tgaattagatgaaagccaactaggt

SEQ ID NO: 962850 - DNA, 25 bp, Homo sapien
tgaagaaagtagttactagaagttg

SEQ ID NO: 962851 - DNA, 25 bp, Homo sapien
tctgtgttttccaccgtgaagagaa

SEQ ID NO: 962852 - DNA, 25 bp, Homo sapien
tccaccgtgaagagaacatttcctc

SEQ ID NO: 962853 - DNA, 25 bp, Homo sapien
gtaagccagtaacactctggatctg

SEQ ID NO: 962854 - DNA, 25 bp, Homo sapien
ctcaatccaatttgtaagccagtaa

SEQ ID NO: 962855 - DNA, 25 bp, Homo sapien
tctttgtagacatctttggcttcct

SEQ ID NO: 962856 - DNA, 25 bp, Homo sapien
tcccttttcattaaagacatcatct

SEQ ID NO: 962857 - DNA, 25 bp, Homo sapien
tcatcttggaaatgttctttgtaga

SEQ ID NO: 962858 - DNA, 25 bp, Homo sapien
tcaagaatgtagttccatccctttt

SEQ ID NO: 962859 - DNA, 25 bp, Homo sapien
caattactaaatgtctgccccccaa

SEQ ID NO: 962860 - DNA, 25 bp, Homo sapien
ttacatccaaatgaaacgtctcact

SEQ ID NO: 962861 - DNA, 25 bp, Homo sapien
cagtaatttccacaattactaaatg

SEQ ID NO: 962862 - DNA, 25 bp, Homo sapien
ttcgtaaagaatgtggcatctttag

SEQ ID NO: 962863 - DNA, 25 bp, Homo sapien
gattgctaccataattcaaaaggag

SEQ ID NO: 962864 - DNA, 25 bp, Homo sapien
tagtataagactatctgaactgcct

SEQ ID NO: 962865 - DNA, 25 bp, Homo sapien
tatgcatttgcaactaagtccagag

SEQ ID NO: 962866 - DNA, 25 bp, Homo sapien
gtataacaaacaagattagcctcca

SEQ ID NO: 962867 - DNA, 25 bp, Homo sapien
acttattaagaatgtactgcaaccc

SEQ ID NO: 962868 - DNA, 25 bp, Homo sapien
aaatactgtttcctcatatttcacc

SEQ ID NO: 962869 - DNA, 25 bp, Homo sapien
gaatgtactgcaacccataaaatac

SEQ ID NO: 962870 - DNA, 25 bp, Homo sapien
ctgtcttcttttcacggcattcaaa

SEQ ID NO: 962871 - DNA, 25 bp, Homo sapien
actgaggatgatcacttttagcctt

SEQ ID NO: 962872 - DNA, 25 bp, Homo sapien
ctgaggatgatcacttttagccttc

SEQ ID NO: 962873 - DNA, 25 bp, Homo sapien
tactgaggatgatcacttttagcct

SEQ ID NO: 962874 - DNA, 25 bp, Homo sapien
cacttttagccttcacagtgacact

SEQ ID NO: 962875 - DNA, 25 bp, Homo sapien
taatacccaataggtcaccaacatt

SEQ ID NO: 962876 - DNA, 25 bp, Homo sapien
caaaatactacttatctttgtcttc

SEQ ID NO: 962877 - DNA, 25 bp, Homo sapien
aatatgctgaattctagataaccag

SEQ ID NO: 962878 - DNA, 25 bp, Homo sapien
tgaattcctaatcaccatatataaa

SEQ ID NO: 962879 - DNA, 25 bp, Homo sapien
agccaggggcgagcgcgccgggctg

SEQ ID NO: 962880 - DNA, 25 bp, Homo sapien
ttcagggaagggcatgcgctcgccg

SEQ ID NO: 962881 - DNA, 25 bp, Homo sapien
gctcgccggcgacgcccaagccccg

SEQ ID NO: 962882 - DNA, 25 bp, Homo sapien
tcactctccactgcgggtccccggg

SEQ ID NO: 962883 - DNA, 25 bp, Homo sapien
caggaggatgttgaactcggcttct

SEQ ID NO: 962884 - DNA, 25 bp, Homo sapien
aactcggcttctgccgcaggattca

SEQ ID NO: 962885 - DNA, 25 bp, Homo sapien
cttgtaggagtcggtggccaggagg

SEQ ID NO: 962886 - DNA, 25 bp, Homo sapien
ggatgttgaactcggcttctgccgc

SEQ ID NO: 962887 - DNA, 25 bp, Homo sapien
ggccggaggacaggggccgcgcgcc

SEQ ID NO: 962888 - DNA, 25 bp, Homo sapien
ctcgggccggaggacaggggccgcg

SEQ ID NO: 962889 - DNA, 25 bp, Homo sapien
gccgcgcgccgcgagctccctggcg

SEQ ID NO: 962890 - DNA, 25 bp, Homo sapien
gcgcgccgcgagctccctggcgcgg

SEQ ID NO: 962891 - DNA, 25 bp, Homo sapien
tcgcgtgctcgcagtctgggagctc

SEQ ID NO: 962892 - DNA, 25 bp, Homo sapien
ttaagtcactgctcggtcggcggag

SEQ ID NO: 962893 - DNA, 25 bp, Homo sapien
gaaaaatgagcttcaccgcgctccg

SEQ ID NO: 962894 - DNA, 25 bp, Homo sapien
tcaccgcgctccgttgcttaagtca

SEQ ID NO: 962895 - DNA, 25 bp, Homo sapien
taaggatccagcctttcgcctccat

SEQ ID NO: 962896 - DNA, 25 bp, Homo sapien
gaacatagccatgaggttgccaacc

SEQ ID NO: 962897 - DNA, 25 bp, Homo sapien
ggaacatagccatgaggttgccaac

SEQ ID NO: 962898 - DNA, 25 bp, Homo sapien
agggaacatagccatgaggttgcca

SEQ ID NO: 962899 - DNA, 25 bp, Homo sapien
acatagccatgaggttgccaaccat

SEQ ID NO: 962900 - DNA, 25 bp, Homo sapien
taaagcctggccagtaacttggtct

SEQ ID NO: 962901 - DNA, 25 bp, Homo sapien
tggcaccatcaaaattcattgcagc

SEQ ID NO: 962902 - DNA, 25 bp, Homo sapien
tagaggaatccccttgccttagcac

SEQ ID NO: 962903 - DNA, 25 bp, Homo sapien
tctctgttaccattggagcctggct

SEQ ID NO: 962904 - DNA, 25 bp, Homo sapien
gaatcactattaatcactttcagac

SEQ ID NO: 962905 - DNA, 25 bp, Homo sapien
tatgaatcactattaatcactttca

SEQ ID NO: 962906 - DNA, 25 bp, Homo sapien
ttatgaatcactattaatcactttc

SEQ ID NO: 962907 - DNA, 25 bp, Homo sapien
tgaatcactattaatcactttcaga

SEQ ID NO: 962908 - DNA, 25 bp, Homo sapien
ttctgcagtgagagttaagtgactg

SEQ ID NO: 962909 - DNA, 25 bp, Homo sapien
tgcagtgagagttaagtgactgagc

SEQ ID NO: 962910 - DNA, 25 bp, Homo sapien
cagtgagagttaagtgactgagctg

SEQ ID NO: 962911 - DNA, 25 bp, Homo sapien
ggactgagggactgtgggcctgttc

SEQ ID NO: 962912 - DNA, 25 bp, Homo sapien
gggctgtgtctgtataacaggctca

SEQ ID NO: 962913 - DNA, 25 bp, Homo sapien
aatgatgtgtactcaaaaaggcccc

SEQ ID NO: 962914 - DNA, 25 bp, Homo sapien
caggttgctgcaaaccaagtggtta

SEQ ID NO: 962915 - DNA, 25 bp, Homo sapien
gacactcattgtttggcttatcccc

SEQ ID NO: 962916 - DNA, 25 bp, Homo sapien
cttagaaaaaccagggagaagcaga

SEQ ID NO: 962917 - DNA, 25 bp, Homo sapien
aaccagggagaagcagaaatttata

SEQ ID NO: 962918 - DNA, 25 bp, Homo sapien
aaaccagggagaagcagaaatttat

SEQ ID NO: 962919 - DNA, 25 bp, Homo sapien
cagggagaagcagaaatttatattt

SEQ ID NO: 962920 - DNA, 25 bp, Homo sapien
gggtctggcatgacaactctgcaac

SEQ ID NO: 962921 - DNA, 25 bp, Homo sapien
gacagtgtcctgtatgtaagtcccc

SEQ ID NO: 962922 - DNA, 25 bp, Homo sapien
gaaatggccagtccaaagattcatt

SEQ ID NO: 962923 - DNA, 25 bp, Homo sapien
gatgcaccgagagtaataacttaag

SEQ ID NO: 962924 - DNA, 25 bp, Homo sapien
tgaggcatacggcttctgtgatcga

SEQ ID NO: 962925 - DNA, 25 bp, Homo sapien
ggttggtattgtccttcgtgaggca

SEQ ID NO: 962926 - DNA, 25 bp, Homo sapien
tccttcgtgaggcatacggcttctg

SEQ ID NO: 962927 - DNA, 25 bp, Homo sapien
atacggcttctgtgatcgaggcccc

SEQ ID NO: 962928 - DNA, 25 bp, Homo sapien
tgctgacaaccaaggcagccttaga

SEQ ID NO: 962929 - DNA, 25 bp, Homo sapien
ggagcacagtggaggtgcccaccac

SEQ ID NO: 962930 - DNA, 25 bp, Homo sapien
gagagcagcacgtctatgctggagc

SEQ ID NO: 962931 - DNA, 25 bp, Homo sapien
gacaaccaaggcagccttagagagc

SEQ ID NO: 962932 - DNA, 25 bp, Homo sapien
tgctcttgccccctgcttcctgtaa

SEQ ID NO: 962933 - DNA, 25 bp, Homo sapien
gacactgacatcagcctggcttttg

SEQ ID NO: 962934 - DNA, 25 bp, Homo sapien
caaggacactgacatcagcctggct

SEQ ID NO: 962935 - DNA, 25 bp, Homo sapien
ctgcacagggtcaaggacactgaca

SEQ ID NO: 962936 - DNA, 25 bp, Homo sapien
gagtcatcagctgagtatggaaagg

SEQ ID NO: 962937 - DNA, 25 bp, Homo sapien
tggtggtgaattgagtcatcagctg

SEQ ID NO: 962938 - DNA, 25 bp, Homo sapien
tcatcagctgagtatggaaaggagt

SEQ ID NO: 962939 - DNA, 25 bp, Homo sapien
tgagtcatcagctgagtatggaaag

SEQ ID NO: 962940 - DNA, 25 bp, Homo sapien
taaggccttcatacctgcagctggg

SEQ ID NO: 962941 - DNA, 25 bp, Homo sapien
gagccacttcatgtcagcatcagag

SEQ ID NO: 962942 - DNA, 25 bp, Homo sapien
gtgagaatgtgaactgccagggtat

SEQ ID NO: 962943 - DNA, 25 bp, Homo sapien
tgggtcaagtatctggaaacacgtg

SEQ ID NO: 962944 - DNA, 25 bp, Homo sapien
tgtgccttgcatgcctccttcctct

SEQ ID NO: 962945 - DNA, 25 bp, Homo sapien
cttgctgtgtgccttgcatgcctcc

SEQ ID NO: 962946 - DNA, 25 bp, Homo sapien
tcctcttcctttaggaggggataga

SEQ ID NO: 962947 - DNA, 25 bp, Homo sapien
ctcttcctttaggaggggatagaag

SEQ ID NO: 962948 - DNA, 25 bp, Homo sapien
tcagggtccgctgactctgacacct

SEQ ID NO: 962949 - DNA, 25 bp, Homo sapien
tgtcgactcccaattcccagtgaag

SEQ ID NO: 962950 - DNA, 25 bp, Homo sapien
tacctcacactgataatccacagtg

SEQ ID NO: 962951 - DNA, 25 bp, Homo sapien
gggtgatgttaatacctcacactga

SEQ ID NO: 962952 - DNA, 25 bp, Homo sapien
acagtgtgtggacctggtccatact

SEQ ID NO: 962953 - DNA, 25 bp, Homo sapien
gttccacacaggattgccgaccttc

SEQ ID NO: 962954 - DNA, 25 bp, Homo sapien
acaggattgccgaccttcacacggg

SEQ ID NO: 962955 - DNA, 25 bp, Homo sapien
tcatgtcctcatcaacttgttccac

SEQ ID NO: 962956 - DNA, 25 bp, Homo sapien
aacactttatttttagtgtctctgc

SEQ ID NO: 962957 - DNA, 25 bp, Homo sapien
tagtgtctctgcgtttatatttaga

SEQ ID NO: 962958 - DNA, 25 bp, Homo sapien
tctgcgtttatatttagaaggaagg

SEQ ID NO: 962959 - DNA, 25 bp, Homo sapien
cactttatttttagtgtctctgcgt

SEQ ID NO: 962960 - DNA, 25 bp, Homo sapien
ggatcatgggggggccacaaggtgg

SEQ ID NO: 962961 - DNA, 25 bp, Homo sapien
tggatcatgggggggccacaaggtg

SEQ ID NO: 962962 - DNA, 25 bp, Homo sapien
gatcatgggggggccacaaggtggg

SEQ ID NO: 962963 - DNA, 25 bp, Homo sapien
aaagtatatccccatgaaagagaga

SEQ ID NO: 962964 - DNA, 25 bp, Homo sapien
atatctcccggtatgatgctctgag

SEQ ID NO: 962965 - DNA, 25 bp, Homo sapien
gaaaccgtaccttaactatgtgatc

SEQ ID NO: 962966 - DNA, 25 bp, Homo sapien
cctagatgggaggatactaaggtga

SEQ ID NO: 962967 - DNA, 25 bp, Homo sapien
actgcttgagctgaggagttcaagt

SEQ ID NO: 962968 - DNA, 25 bp, Homo sapien
ctgcttgagctgaggagttcaagtc

SEQ ID NO: 962969 - DNA, 25 bp, Homo sapien
gaggactgcttgagctgaggagttc

SEQ ID NO: 962970 - DNA, 25 bp, Homo sapien
ggactgcttgagctgaggagttcaa

SEQ ID NO: 962971 - DNA, 25 bp, Homo sapien
aactcatagctgctgggaatctgca

SEQ ID NO: 962972 - DNA, 25 bp, Homo sapien
ggtaaggttgatgctgagtaactca

SEQ ID NO: 962973 - DNA, 25 bp, Homo sapien
caactgtgatgtggatgagaagcct

SEQ ID NO: 962974 - DNA, 25 bp, Homo sapien
tctttatatagctcagattcatgct

SEQ ID NO: 962975 - DNA, 25 bp, Homo sapien
catggtcggctctgacgtgtaggaa

SEQ ID NO: 962976 - DNA, 25 bp, Homo sapien
taggaaggcaactcgagtggctgca

SEQ ID NO: 962977 - DNA, 25 bp, Homo sapien
tcaacagtgacagggcttatgggca

SEQ ID NO: 962978 - DNA, 25 bp, Homo sapien
tatgggcacgagaaaagaagacacc

SEQ ID NO: 962979 - DNA, 25 bp, Homo sapien
aactgtggtatcaattctagcatgg

SEQ ID NO: 962980 - DNA, 25 bp, Homo sapien
gacaatgggacttgcactgctggcc

SEQ ID NO: 962981 - DNA, 25 bp, Homo sapien
ccagtcttatggctaggttactttc

SEQ ID NO: 962982 - DNA, 25 bp, Homo sapien
cctctctcactggtgccagtcttat

SEQ ID NO: 962983 - DNA, 25 bp, Homo sapien
gttgggaatctatttaacacacagt

SEQ ID NO: 962984 - DNA, 25 bp, Homo sapien
tcctcagggcattcagatgttttgg

SEQ ID NO: 962985 - DNA, 25 bp, Homo sapien
aacacacagtattcctccatgaacc

SEQ ID NO: 962986 - DNA, 25 bp, Homo sapien
gaacccatcacctggaatcatcaag

SEQ ID NO: 962987 - DNA, 25 bp, Homo sapien
tcctgggtctaaatgaagaagcaca

SEQ ID NO: 962988 - DNA, 25 bp, Homo sapien
gaatcaatcagaaaaccgtcagcca

SEQ ID NO: 962989 - DNA, 25 bp, Homo sapien
tcatggttgagaggaggtcagaaca

SEQ ID NO: 962990 - DNA, 25 bp, Homo sapien
ggcctgggctttaaatcgctcaatc

SEQ ID NO: 962991 - DNA, 25 bp, Homo sapien
tattcctgattaaagctcgtcccgt

SEQ ID NO: 962992 - DNA, 25 bp, Homo sapien
tacagcatggtttctattcctgatt

SEQ ID NO: 962993 - DNA, 25 bp, Homo sapien
taaaatcgacccaagtacagcatgg

SEQ ID NO: 962994 - DNA, 25 bp, Homo sapien
gtcccgtatctccaactgttggcaa

SEQ ID NO: 962995 - DNA, 25 bp, Homo sapien
tgccagcagacctatgctataagga

SEQ ID NO: 962996 - DNA, 25 bp, Homo sapien
gccagcagacctatgctataaggaa

SEQ ID NO: 962997 - DNA, 25 bp, Homo sapien
ccaccccttctcatgatcagtctca

SEQ ID NO: 962998 - DNA, 25 bp, Homo sapien
tatttgatttgtcacactgtctcat

SEQ ID NO: 962999 - DNA, 25 bp, Homo sapien
gaccaacatcacttgccccaaactc

SEQ ID NO: 963000 - DNA, 25 bp, Homo sapien
tatcacaattgaaacttcttcaagt

SEQ ID NO: 963001 - DNA, 25 bp, Homo sapien
gatccttcatgtggttgcactcagc

SEQ ID NO: 963002 - DNA, 25 bp, Homo sapien
ggcccaaactggcacagtgtaactt

SEQ ID NO: 963003 - DNA, 25 bp, Homo sapien
gctcacctagggcttgaatgttcaa

SEQ ID NO: 963004 - DNA, 25 bp, Homo sapien
cagcactaggttgtgtcagctatga

SEQ ID NO: 963005 - DNA, 25 bp, Homo sapien
gcttgtgcagggagactcccccttg

SEQ ID NO: 963006 - DNA, 25 bp, Homo sapien
gaggagcaagttacatcttaggtgg

SEQ ID NO: 963007 - DNA, 25 bp, Homo sapien
ttgtgcagggagactcccccttgtt

SEQ ID NO: 963008 - DNA, 25 bp, Homo sapien
agcaagttacatcttaggtggatga

SEQ ID NO: 963009 - DNA, 25 bp, Homo sapien
tccacgcatgaagtagcatcccaga

SEQ ID NO: 963010 - DNA, 25 bp, Homo sapien
caccttaaaccctagctggatgtgt

SEQ ID NO: 963011 - DNA, 25 bp, Homo sapien
caagtatgtttttgactgcaagaga

SEQ ID NO: 963012 - DNA, 25 bp, Homo sapien
tagcttattagaagtgatcacactc

SEQ ID NO: 963013 - DNA, 25 bp, Homo sapien
acagtcatggcagatggtgaaagaa

SEQ ID NO: 963014 - DNA, 25 bp, Homo sapien
agagcaaagtcatgtctcacatggc

SEQ ID NO: 963015 - DNA, 25 bp, Homo sapien
tggtgaaagaagagcaaagtcatgt

SEQ ID NO: 963016 - DNA, 25 bp, Homo sapien
gtcatggcagatggtgaaagaagag

SEQ ID NO: 963017 - DNA, 25 bp, Homo sapien
cctccaagggtaatgccgacggctg

SEQ ID NO: 963018 - DNA, 25 bp, Homo sapien
gacagaatgcaaggtggtcagaact

SEQ ID NO: 963019 - DNA, 25 bp, Homo sapien
taatgccgacggctggtattgagcc

SEQ ID NO: 963020 - DNA, 25 bp, Homo sapien
ggctggtattgagcccttgtaggaa

SEQ ID NO: 963021 - DNA, 25 bp, Homo sapien
gaagcccgatcaaaatgccttgctt

SEQ ID NO: 963022 - DNA, 25 bp, Homo sapien
taaaagaagcccgatcaaaatgcct

SEQ ID NO: 963023 - DNA, 25 bp, Homo sapien
agattaaaagaagcccgatcaaaat

SEQ ID NO: 963024 - DNA, 25 bp, Homo sapien
cggacaggagattggggagcagtga

SEQ ID NO: 963025 - DNA, 25 bp, Homo sapien
tccttttgtctcctgtcatgattct

SEQ ID NO: 963026 - DNA, 25 bp, Homo sapien
ggtatttcccgtgctcctctcgtga

SEQ ID NO: 963027 - DNA, 25 bp, Homo sapien
tgagacctcttcagacacgtggaac

SEQ ID NO: 963028 - DNA, 25 bp, Homo sapien
cggactaatacaagtagctaataag

SEQ ID NO: 963029 - DNA, 25 bp, Homo sapien
taccctgaaccttccttatctggca

SEQ ID NO: 963030 - DNA, 25 bp, Homo sapien
tttgactggatatgggtccttttct

SEQ ID NO: 963031 - DNA, 25 bp, Homo sapien
agatggttgtcggagatccaaatgg

SEQ ID NO: 963032 - DNA, 25 bp, Homo sapien
agggaagcctgtgatttgactggat

SEQ ID NO: 963033 - DNA, 25 bp, Homo sapien
ttgctgcatatcctggggtgttgag

SEQ ID NO: 963034 - DNA, 25 bp, Homo sapien
tatgcttctctaattcaggttcctc

SEQ ID NO: 963035 - DNA, 25 bp, Homo sapien
tatcctggggtgttgagttcttcat

SEQ ID NO: 963036 - DNA, 25 bp, Homo sapien
cggagatgttaacctatgtgtacag

SEQ ID NO: 963037 - DNA, 25 bp, Homo sapien
agggtaaagagagggccacgcaggg

SEQ ID NO: 963038 - DNA, 25 bp, Homo sapien
tgagggtaaagagagggccacgcag

SEQ ID NO: 963039 - DNA, 25 bp, Homo sapien
gagggtaaagagagggccacgcagg

SEQ ID NO: 963040 - DNA, 25 bp, Homo sapien
gggtaaagagagggccacgcagggc

SEQ ID NO: 963041 - DNA, 25 bp, Homo sapien
tggtgtctgcccacttacacagaac

SEQ ID NO: 963042 - DNA, 25 bp, Homo sapien
tgctgatacaggacacgaggaaccc

SEQ ID NO: 963043 - DNA, 25 bp, Homo sapien
agacatcccaccattcctcatttgg

SEQ ID NO: 963044 - DNA, 25 bp, Homo sapien
tggtagggagccacattaagaatgg

SEQ ID NO: 963045 - DNA, 25 bp, Homo sapien
tacatgtcccctaaactcagagaac

SEQ ID NO: 963046 - DNA, 25 bp, Homo sapien
gcaatggcgattttcacttctgcaa

SEQ ID NO: 963047 - DNA, 25 bp, Homo sapien
ggatctcttgtgtggccattgccca

SEQ ID NO: 963048 - DNA, 25 bp, Homo sapien
caagagagtcgctaaacatttcacc

SEQ ID NO: 963049 - DNA, 25 bp, Homo sapien
taagccactgcttggttgatgagca

SEQ ID NO: 963050 - DNA, 25 bp, Homo sapien
tgggaatccctccaaatcatttggt

SEQ ID NO: 963051 - DNA, 25 bp, Homo sapien
agctctctgtacttagataatccca

SEQ ID NO: 963052 - DNA, 25 bp, Homo sapien
tggcaaccaatctcaacaacctaat

SEQ ID NO: 963053 - DNA, 25 bp, Homo sapien
tttatgctgcctgcgatggcatggc

SEQ ID NO: 963054 - DNA, 25 bp, Homo sapien
gagaactagttagaactcctcagtg

SEQ ID NO: 963055 - DNA, 25 bp, Homo sapien
tgttgactcacctcgagcttactgt

SEQ ID NO: 963056 - DNA, 25 bp, Homo sapien
ggcatggcatttttggccaccactg

SEQ ID NO: 963057 - DNA, 25 bp, Homo sapien
tgtgcggcagaaccacggtgacagt

SEQ ID NO: 963058 - DNA, 25 bp, Homo sapien
gacagtttgtatagggctttccctc

SEQ ID NO: 963059 - DNA, 25 bp, Homo sapien
agatgacccatagctctgtgcggca

SEQ ID NO: 963060 - DNA, 25 bp, Homo sapien
gaagactcagtctctcccagatgac

SEQ ID NO: 963061 - DNA, 25 bp, Homo sapien
gagtccaagccaattctggctcctg

SEQ ID NO: 963062 - DNA, 25 bp, Homo sapien
ttctggacagaaggtgtttggccca

SEQ ID NO: 963063 - DNA, 25 bp, Homo sapien
tgacagacagatgagccatcagaga

SEQ ID NO: 963064 - DNA, 25 bp, Homo sapien
ttttctggacagaaggtgtttggcc

SEQ ID NO: 963065 - DNA, 25 bp, Homo sapien
ttaaaacggggagccaatcagctga

SEQ ID NO: 963066 - DNA, 25 bp, Homo sapien
aatcagctgaaggtcattggtgtca

SEQ ID NO: 963067 - DNA, 25 bp, Homo sapien
atcagctgaaggtcattggtgtcat

SEQ ID NO: 963068 - DNA, 25 bp, Homo sapien
gagactgtgataacatcttctgtag

SEQ ID NO: 963069 - DNA, 25 bp, Homo sapien
tcttggctcagacaatgacaggccc

SEQ ID NO: 963070 - DNA, 25 bp, Homo sapien
gataccacctggcttaacaaagtag

SEQ ID NO: 963071 - DNA, 25 bp, Homo sapien
acaaagtaggtcagagagggctctt

SEQ ID NO: 963072 - DNA, 25 bp, Homo sapien
gataccaacgactggcccctagaat

SEQ ID NO: 963073 - DNA, 25 bp, Homo sapien
tctggataccaacgactggccccta

SEQ ID NO: 963074 - DNA, 25 bp, Homo sapien
tgcctctggataccaacgactggcc

SEQ ID NO: 963075 - DNA, 25 bp, Homo sapien
ctgcctctggataccaacgactggc

SEQ ID NO: 963076 - DNA, 25 bp, Homo sapien
ctaagtgcaatgtgttctgatattt

SEQ ID NO: 963077 - DNA, 25 bp, Homo sapien
ctttactaagtgcaatgtgttctga

SEQ ID NO: 963078 - DNA, 25 bp, Homo sapien
tttactaagtgcaatgtgttctgat

SEQ ID NO: 963079 - DNA, 25 bp, Homo sapien
tactaagtgcaatgtgttctgatat

SEQ ID NO: 963080 - DNA, 25 bp, Homo sapien
cttggtaactttaatctgtcagtga

SEQ ID NO: 963081 - DNA, 25 bp, Homo sapien
acttggtaactttaatctgtcagtg

SEQ ID NO: 963082 - DNA, 25 bp, Homo sapien
taggccaaacgtgtgactgcagaag

SEQ ID NO: 963083 - DNA, 25 bp, Homo sapien
ctctgctaggccaaacgtgtgactg

SEQ ID NO: 963084 - DNA, 25 bp, Homo sapien
taagagcaatgatggcccctttggc

SEQ ID NO: 963085 - DNA, 25 bp, Homo sapien
gcagtcctcaatgcactagcatgca

SEQ ID NO: 963086 - DNA, 25 bp, Homo sapien
ccctttggcagtcctcaatgcacta

SEQ ID NO: 963087 - DNA, 25 bp, Homo sapien
ttaagcatgagtaagagcaatgatg

SEQ ID NO: 963088 - DNA, 25 bp, Homo sapien
ggaacagggctggtatctttgccag

SEQ ID NO: 963089 - DNA, 25 bp, Homo sapien
aagacttcgtttcctcattgggtat

SEQ ID NO: 963090 - DNA, 25 bp, Homo sapien
ggtatctttgccagcggtctctgtc

SEQ ID NO: 963091 - DNA, 25 bp, Homo sapien
tagacattggcattactcagagcag

SEQ ID NO: 963092 - DNA, 25 bp, Homo sapien
gagcacatgaccctggctggagccg

SEQ ID NO: 963093 - DNA, 25 bp, Homo sapien
tggctggagccgccaagagggtgga

SEQ ID NO: 963094 - DNA, 25 bp, Homo sapien
gaagagcacatgaccctggctggag

SEQ ID NO: 963095 - DNA, 25 bp, Homo sapien
gcaggaagagcacatgaccctggct

SEQ ID NO: 963096 - DNA, 25 bp, Homo sapien
tgacatactggaagaacctgttttt

SEQ ID NO: 963097 - DNA, 25 bp, Homo sapien
ttgacatactggaagaacctgtttt

SEQ ID NO: 963098 - DNA, 25 bp, Homo sapien
tctaagtgagtagagaccagggact

SEQ ID NO: 963099 - DNA, 25 bp, Homo sapien
tggttagatcctgtggaagtctcca

SEQ ID NO: 963100 - DNA, 25 bp, Homo sapien
ctgagaagcctcatgtggacagtgg

SEQ ID NO: 963101 - DNA, 25 bp, Homo sapien
agggactgctccttcatctccacga

SEQ ID NO: 963102 - DNA, 25 bp, Homo sapien
taggagcagccatttgtgaccttgg

SEQ ID NO: 963103 - DNA, 25 bp, Homo sapien
ggtaggagcagccatttgtgacctt

SEQ ID NO: 963104 - DNA, 25 bp, Homo sapien
acaattctgggtaggagcagccatt

SEQ ID NO: 963105 - DNA, 25 bp, Homo sapien
gagcagccatttgtgaccttggctc

SEQ ID NO: 963106 - DNA, 25 bp, Homo sapien
tgagtgggcagtgacttcctatacc

SEQ ID NO: 963107 - DNA, 25 bp, Homo sapien
gtgggcagtgacttcctatacccat

SEQ ID NO: 963108 - DNA, 25 bp, Homo sapien
ctgtgagtgggcagtgacttcctat

SEQ ID NO: 963109 - DNA, 25 bp, Homo sapien
gagtgggcagtgacttcctataccc

SEQ ID NO: 963110 - DNA, 25 bp, Homo sapien
ccaagccaaagcagaacgtttaaca

SEQ ID NO: 963111 - DNA, 25 bp, Homo sapien
aagccaaagcagaacgtttaacatg

SEQ ID NO: 963112 - DNA, 25 bp, Homo sapien
gccaaagcagaacgtttaacatgga

SEQ ID NO: 963113 - DNA, 25 bp, Homo sapien
ccaaagcagaacgtttaacatggag

SEQ ID NO: 963114 - DNA, 25 bp, Homo sapien
tgcaaaactccgagttgtctgctgg

SEQ ID NO: 963115 - DNA, 25 bp, Homo sapien
tccgagttgtctgctgggcattctt

SEQ ID NO: 963116 - DNA, 25 bp, Homo sapien
aaactccgagttgtctgctgggcat

SEQ ID NO: 963117 - DNA, 25 bp, Homo sapien
caaaactccgagttgtctgctgggc

SEQ ID NO: 963118 - DNA, 25 bp, Homo sapien
tgcttccacaattccaacctctcct

SEQ ID NO: 963119 - DNA, 25 bp, Homo sapien
ccaacctctgcttctaccattccaa

SEQ ID NO: 963120 - DNA, 25 bp, Homo sapien
catctgcctccatcattccaacctc

SEQ ID NO: 963121 - DNA, 25 bp, Homo sapien
tctgcttctaccattccaacctctg

SEQ ID NO: 963122 - DNA, 25 bp, Homo sapien
aacctctgcttctatcattccaacc

SEQ ID NO: 963123 - DNA, 25 bp, Homo sapien
ccaacctctgcttctatcattccaa

SEQ ID NO: 963124 - DNA, 25 bp, Homo sapien
caacctctgcttctatcattccaac

SEQ ID NO: 963125 - DNA, 25 bp, Homo sapien
tgcttccatcattccaacctctgct

SEQ ID NO: 963126 - DNA, 25 bp, Homo sapien
tcttcttccctcattccaacctctg

SEQ ID NO: 963127 - DNA, 25 bp, Homo sapien
tgcttccatcattccaacctcttct

SEQ ID NO: 963128 - DNA, 25 bp, Homo sapien
tgcttccctcattccaacctctcct

SEQ ID NO: 963129 - DNA, 25 bp, Homo sapien
cctctccttacctcattccaacctc

SEQ ID NO: 963130 - DNA, 25 bp, Homo sapien
ctctccttacctcattccaacctct

SEQ ID NO: 963131 - DNA, 25 bp, Homo sapien
tctccttacctcattccaacctctg

SEQ ID NO: 963132 - DNA, 25 bp, Homo sapien
acctctccttacctcattccaacct

SEQ ID NO: 963133 - DNA, 25 bp, Homo sapien
tgcttccatcaatccaacctctgct

SEQ ID NO: 963134 - DNA, 25 bp, Homo sapien
tctgcttccatcagtcctacttctt

SEQ ID NO: 963135 - DNA, 25 bp, Homo sapien
tctgcttctataattccaacctctg

SEQ ID NO: 963136 - DNA, 25 bp, Homo sapien
gcttccatcattccaacccctgctt

SEQ ID NO: 963137 - DNA, 25 bp, Homo sapien
aacctctgcttctatcattccaacc

SEQ ID NO: 963138 - DNA, 25 bp, Homo sapien
caacctctgcttctatcattccaac

SEQ ID NO: 963139 - DNA, 25 bp, Homo sapien
ccaacctctgcttctatcattccaa

SEQ ID NO: 963140 - DNA, 25 bp, Homo sapien
catcagagggaagtcatgtgctgtc

SEQ ID NO: 963141 - DNA, 25 bp, Homo sapien
gaagtcatgtgctgtctcggagttt

SEQ ID NO: 963142 - DNA, 25 bp, Homo sapien
cttacgtcatcagagggaagtcatg

SEQ ID NO: 963143 - DNA, 25 bp, Homo sapien
gctgtctcggagtttacttcttcat

SEQ ID NO: 963144 - DNA, 25 bp, Homo sapien
aacataatttcaagtgaaagaagct

SEQ ID NO: 963145 - DNA, 25 bp, Homo sapien
aaaataatggttatcttgggcaaga

SEQ ID NO: 963146 - DNA, 25 bp, Homo sapien
gctagacacatgaccaataattcca

SEQ ID NO: 963147 - DNA, 25 bp, Homo sapien
taatctgagtgctagttccatgagc

SEQ ID NO: 963148 - DNA, 25 bp, Homo sapien
tacaaactatagcttggttctatgc

SEQ ID NO: 963149 - DNA, 25 bp, Homo sapien
ggtgtttcaagcacagctattgtac

SEQ ID NO: 963150 - DNA, 25 bp, Homo sapien
ttttgtaagttcttggatcaacagc

SEQ ID NO: 963151 - DNA, 25 bp, Homo sapien
gcaacacttactgagcttactctaa

SEQ ID NO: 963152 - DNA, 25 bp, Homo sapien
gactgaggcttactagaaaactggc

SEQ ID NO: 963153 - DNA, 25 bp, Homo sapien
tagtactatcatttgcacacagcag

SEQ ID NO: 963154 - DNA, 25 bp, Homo sapien
cagcagatcaataggtgtcagtcac

SEQ ID NO: 963155 - DNA, 25 bp, Homo sapien
caaaaagttatgtgaggtgccggtc

SEQ ID NO: 963156 - DNA, 25 bp, Homo sapien
caagttccagcccagtatggatcgt

SEQ ID NO: 963157 - DNA, 25 bp, Homo sapien
ttcacatgtcaagttccagcccagt

SEQ ID NO: 963158 - DNA, 25 bp, Homo sapien
ggatcgtttcatggcagaatactta

SEQ ID NO: 963159 - DNA, 25 bp, Homo sapien
tgaaataatagtggtacaaaaacac

SEQ ID NO: 963160 - DNA, 25 bp, Homo sapien
cacactgggccatatggtataaaca

SEQ ID NO: 963161 - DNA, 25 bp, Homo sapien
ttcctgccacaaatgaccaaaggca

SEQ ID NO: 963162 - DNA, 25 bp, Homo sapien
cctttaggtattgcagtaaaagctg

SEQ ID NO: 963163 - DNA, 25 bp, Homo sapien
caaaggcacttggataatcaagaat

SEQ ID NO: 963164 - DNA, 25 bp, Homo sapien
gctgtcaaagacctagaactgcaaa

SEQ ID NO: 963165 - DNA, 25 bp, Homo sapien
aatcatctccagtcggattccagtg

SEQ ID NO: 963166 - DNA, 25 bp, Homo sapien
gatttgtatgttagaccaggacagg

SEQ ID NO: 963167 - DNA, 25 bp, Homo sapien
gattcctgtggtcttcagctgtcaa

SEQ ID NO: 963168 - DNA, 25 bp, Homo sapien
tttttttaatcacacaccatatggt

SEQ ID NO: 963169 - DNA, 25 bp, Homo sapien
tttttaatcacacaccatatggttt

SEQ ID NO: 963170 - DNA, 25 bp, Homo sapien
ttttttttaatcacacaccatatgg

SEQ ID NO: 963171 - DNA, 25 bp, Homo sapien
ttttttaatcacacaccatatggtt

SEQ ID NO: 963172 - DNA, 25 bp, Homo sapien
agaataccctgagcacaaactagtg

SEQ ID NO: 963173 - DNA, 25 bp, Homo sapien
tgcactactaacagtcacaagcttg

SEQ ID NO: 963174 - DNA, 25 bp, Homo sapien
cactgagcccatacaaatccttgca

SEQ ID NO: 963175 - DNA, 25 bp, Homo sapien
gaaacgagtgggcttcagaataccc

SEQ ID NO: 963176 - DNA, 25 bp, Homo sapien
taatgtcttcggaggacttccagac

SEQ ID NO: 963177 - DNA, 25 bp, Homo sapien
ttccagaccagtgaggtagagtcca

SEQ ID NO: 963178 - DNA, 25 bp, Homo sapien
tacacaagcacgaaaccaaattcct

SEQ ID NO: 963179 - DNA, 25 bp, Homo sapien
gtagagtccaacagtgagaaaacgg

SEQ ID NO: 963180 - DNA, 25 bp, Homo sapien
ctccgcaggccgggtacgggaggca

SEQ ID NO: 963181 - DNA, 25 bp, Homo sapien
tcctggccggatctgtaaacactcg

SEQ ID NO: 963182 - DNA, 25 bp, Homo sapien
taaacactcgactgacacttgttca

SEQ ID NO: 963183 - DNA, 25 bp, Homo sapien
ttcttcgcgcgtaaagtgcattggg

SEQ ID NO: 963184 - DNA, 25 bp, Homo sapien
ttgttcattcctccgggcggaaggc

SEQ ID NO: 963185 - DNA, 25 bp, Homo sapien
cggcaggaggcgccctggaggccgc

SEQ ID NO: 963186 - DNA, 25 bp, Homo sapien
ctgtcccaaggtcggggccggcagg

SEQ ID NO: 963187 - DNA, 25 bp, Homo sapien
ggccggcaggaggcgccctggaggc

SEQ ID NO: 963188 - DNA, 25 bp, Homo sapien
gcaggaggcgccctggaggccgcac

SEQ ID NO: 963189 - DNA, 25 bp, Homo sapien
gcaccgggaagcggcggagcctcac

SEQ ID NO: 963190 - DNA, 25 bp, Homo sapien
ggcaccgggaagcggcggagcctca

SEQ ID NO: 963191 - DNA, 25 bp, Homo sapien
tccaggttcactcgcaggacctggc

SEQ ID NO: 963192 - DNA, 25 bp, Homo sapien
ggttccaggttcactcgcaggacct

SEQ ID NO: 963193 - DNA, 25 bp, Homo sapien
catgggttccaggttcactcgcagg

SEQ ID NO: 963194 - DNA, 25 bp, Homo sapien
aggttcactcgcaggacctggcgcg

SEQ ID NO: 963195 - DNA, 25 bp, Homo sapien
ggaaggtggtcagcgtcggggtggc

SEQ ID NO: 963196 - DNA, 25 bp, Homo sapien
tcagcgtcggggtggccgccctcca

SEQ ID NO: 963197 - DNA, 25 bp, Homo sapien
caaggtgcggcccccgaagcagggc

SEQ ID NO: 963198 - DNA, 25 bp, Homo sapien
gtcggggtggccgccctccagatct

SEQ ID NO: 963199 - DNA, 25 bp, Homo sapien
gcggaaccggccggcgcgcctggcc

SEQ ID NO: 963200 - DNA, 25 bp, Homo sapien
ggaagctccagagctccgcgtccga

SEQ ID NO: 963201 - DNA, 25 bp, Homo sapien
cgcgtccgagctcatgaactccgtg

SEQ ID NO: 963202 - DNA, 25 bp, Homo sapien
tagacgtccttgctgcgcaggatgt

SEQ ID NO: 963203 - DNA, 25 bp, Homo sapien
gagtagccgtagacgtccttgctgc

SEQ ID NO: 963204 - DNA, 25 bp, Homo sapien
gcatgaagagcttgaaggcgtcgcc

SEQ ID NO: 963205 - DNA, 25 bp, Homo sapien
gggcatgaagagcttgaaggcgtcg

SEQ ID NO: 963206 - DNA, 25 bp, Homo sapien
gcttgaaggcgtcgcccagcgcctt

SEQ ID NO: 963207 - DNA, 25 bp, Homo sapien
gaagagcttgaaggcgtcgcccagc

SEQ ID NO: 963208 - DNA, 25 bp, Homo sapien
cagcgacagttgcgaccgcgagtac

SEQ ID NO: 963209 - DNA, 25 bp, Homo sapien
gttgcgaccgcgagtacaccacctt

SEQ ID NO: 963210 - DNA, 25 bp, Homo sapien
agttgcgaccgcgagtacaccacct

SEQ ID NO: 963211 - DNA, 25 bp, Homo sapien
cgacagttgcgaccgcgagtacacc

SEQ ID NO: 963212 - DNA, 25 bp, Homo sapien
ggcgccggcgccgccgcctcttcat

SEQ ID NO: 963213 - DNA, 25 bp, Homo sapien
ggcgaccgggcgccggcgccgccgc

SEQ ID NO: 963214 - DNA, 25 bp, Homo sapien
cgggcgccggcgccgccgcctcttc

SEQ ID NO: 963215 - DNA, 25 bp, Homo sapien
accgggcgccggcgccgccgcctct

SEQ ID NO: 963216 - DNA, 25 bp, Homo sapien
cgccgcatcgaaggccgctccgggc

SEQ ID NO: 963217 - DNA, 25 bp, Homo sapien
catcgaaggccgctccgggccactc

SEQ ID NO: 963218 - DNA, 25 bp, Homo sapien
atcgaaggccgctccgggccactca

SEQ ID NO: 963219 - DNA, 25 bp, Homo sapien
actgcgccgcatcgaaggccgctcc

SEQ ID NO: 963220 - DNA, 25 bp, Homo sapien
tggcgtctctcgctacttttctcgc

SEQ ID NO: 963221 - DNA, 25 bp, Homo sapien
tcgccgggtcccactactgccgccg

SEQ ID NO: 963222 - DNA, 25 bp, Homo sapien
gtcccagtccgcgttggctccgcgg

SEQ ID NO: 963223 - DNA, 25 bp, Homo sapien
gccgccgtcccagtccgcgttggct

SEQ ID NO: 963224 - DNA, 25 bp, Homo sapien
ggctttgtcattggacggcgcctcg

SEQ ID NO: 963225 - DNA, 25 bp, Homo sapien
cattggacggcgcctcgcccccctg

SEQ ID NO: 963226 - DNA, 25 bp, Homo sapien
attggacggcgcctcgcccccctgg

SEQ ID NO: 963227 - DNA, 25 bp, Homo sapien
tttgtcattggacggcgcctcgccc

SEQ ID NO: 963228 - DNA, 25 bp, Homo sapien
actggcggggatgggttgtatctct

SEQ ID NO: 963229 - DNA, 25 bp, Homo sapien
tggcggggatgggttgtatctctca

SEQ ID NO: 963230 - DNA, 25 bp, Homo sapien
cggggatgggttgtatctctcaatt

SEQ ID NO: 963231 - DNA, 25 bp, Homo sapien
gaaccactgttactggcggggatgg

SEQ ID NO: 963232 - DNA, 25 bp, Homo sapien
agaataattgtgaatcatctagatt

SEQ ID NO: 963233 - DNA, 25 bp, Homo sapien
cacagtaatgctgtgttctattcat

SEQ ID NO: 963234 - DNA, 25 bp, Homo sapien
tcatctagattataaattccctcac

SEQ ID NO: 963235 - DNA, 25 bp, Homo sapien
tataaattccctcacagtaatgctg

SEQ ID NO: 963236 - DNA, 25 bp, Homo sapien
acctcaaatcaaccctgagactgtc

SEQ ID NO: 963237 - DNA, 25 bp, Homo sapien
tgagagatcacgatcagcaacgttg

SEQ ID NO: 963238 - DNA, 25 bp, Homo sapien
ggacttgagaatgagagatcacgat

SEQ ID NO: 963239 - DNA, 25 bp, Homo sapien
gatcagcaacgttgttaaacctcaa

SEQ ID NO: 963240 - DNA, 25 bp, Homo sapien
tattttccccaaattgtgcccagga

SEQ ID NO: 963241 - DNA, 25 bp, Homo sapien
ccaaattgtgcccaggaatacattt

SEQ ID NO: 963242 - DNA, 25 bp, Homo sapien
caaagatttgtatctagatttactg

SEQ ID NO: 963243 - DNA, 25 bp, Homo sapien
tgtatctagatttactggaattatt

SEQ ID NO: 963244 - DNA, 25 bp, Homo sapien
gaatccctggttttcatcacagtgc

SEQ ID NO: 963245 - DNA, 25 bp, Homo sapien
ctttgttctcaagcataacttgggc

SEQ ID NO: 963246 - DNA, 25 bp, Homo sapien
ggcttcaagcataacggaatattct

SEQ ID NO: 963247 - DNA, 25 bp, Homo sapien
tctcaagcataacttgggcttcaag

SEQ ID NO: 963248 - DNA, 25 bp, Homo sapien
acttgggcttcaagcataacggaat

SEQ ID NO: 963249 - DNA, 25 bp, Homo sapien
gggagcacccaaagtaatgcacaat

SEQ ID NO: 963250 - DNA, 25 bp, Homo sapien
ccttatgggcatagctgtcaatcaa

SEQ ID NO: 963251 - DNA, 25 bp, Homo sapien
tctgagtggccagtatccagtgatc

SEQ ID NO: 963252 - DNA, 25 bp, Homo sapien
catttctgctaggcccatggtctcc

SEQ ID NO: 963253 - DNA, 25 bp, Homo sapien
tgactgtgtctgttccatcagtgat

SEQ ID NO: 963254 - DNA, 25 bp, Homo sapien
gcgtttttctttcaggagcccatat

SEQ ID NO: 963255 - DNA, 25 bp, Homo sapien
cgtttttctttcaggagcccatatc

SEQ ID NO: 963256 - DNA, 25 bp, Homo sapien
gtgtttgactgtgtctgttccatca

SEQ ID NO: 963257 - DNA, 25 bp, Homo sapien
tagggcaacccatgttctatgtcct

SEQ ID NO: 963258 - DNA, 25 bp, Homo sapien
catgaagcgatatagagaggtgaaa

SEQ ID NO: 963259 - DNA, 25 bp, Homo sapien
tgatgacatcgaaggaaacagaaag

SEQ ID NO: 963260 - DNA, 25 bp, Homo sapien
tctttactcatcaataagctgaggg

SEQ ID NO: 963261 - DNA, 25 bp, Homo sapien
gcagtggctttctgacgtggaagac

SEQ ID NO: 963262 - DNA, 25 bp, Homo sapien
tgacgtggaagacatagcagctgcc

SEQ ID NO: 963263 - DNA, 25 bp, Homo sapien
tgtggcatccttgccagtcctgcat

SEQ ID NO: 963264 - DNA, 25 bp, Homo sapien
gatcatagcataggctgaggttcca

SEQ ID NO: 963265 - DNA, 25 bp, Homo sapien
ggtgacaccattttgctgtgtggtt

SEQ ID NO: 963266 - DNA, 25 bp, Homo sapien
ttttgctgtgtggttttcagagtca

SEQ ID NO: 963267 - DNA, 25 bp, Homo sapien
tttgctgtgtggttttcagagtcat

SEQ ID NO: 963268 - DNA, 25 bp, Homo sapien
gacaccattttgctgtgtggttttc

SEQ ID NO: 963269 - DNA, 25 bp, Homo sapien
tctgtatcattcaggccactccctg

SEQ ID NO: 963270 - DNA, 25 bp, Homo sapien
tccagtctgtatcattcaggccact

SEQ ID NO: 963271 - DNA, 25 bp, Homo sapien
aactccagtctgtatcattcaggcc

SEQ ID NO: 963272 - DNA, 25 bp, Homo sapien
ctatgaactccagtctgtatcattc

SEQ ID NO: 963273 - DNA, 25 bp, Homo sapien
tccttctgctgcttctgcaaccctc

SEQ ID NO: 963274 - DNA, 25 bp, Homo sapien
agtcccttctccatcatccctcctt

SEQ ID NO: 963275 - DNA, 25 bp, Homo sapien
agagtcccttctccatcatccctcc

SEQ ID NO: 963276 - DNA, 25 bp, Homo sapien
tcagagtcccttctccatcatccct

SEQ ID NO: 963277 - DNA, 25 bp, Homo sapien
gccaaggggacacttagcaggaact

SEQ ID NO: 963278 - DNA, 25 bp, Homo sapien
ggacacttagcaggaactgtcagag

SEQ ID NO: 963279 - DNA, 25 bp, Homo sapien
gcagaatgcagagctaaccccaagc

SEQ ID NO: 963280 - DNA, 25 bp, Homo sapien
gagctaaccccaagcagaggatcag

SEQ ID NO: 963281 - DNA, 25 bp, Homo sapien
ctctctgcaatagacccatgactaa

SEQ ID NO: 963282 - DNA, 25 bp, Homo sapien
tctctgcaatagacccatgactaac

SEQ ID NO: 963283 - DNA, 25 bp, Homo sapien
ggaagaggtgtcagccgttctaatt

SEQ ID NO: 963284 - DNA, 25 bp, Homo sapien
gtcagccgttctaattgttctgtta

SEQ ID NO: 963285 - DNA, 25 bp, Homo sapien
aattcgccttttcgggcctgctctc

SEQ ID NO: 963286 - DNA, 25 bp, Homo sapien
caagtccactctcagcaagcagcta

SEQ ID NO: 963287 - DNA, 25 bp, Homo sapien
tcttcaagtccactctcagcaagca

SEQ ID NO: 963288 - DNA, 25 bp, Homo sapien
ccaaattcgccttttcgggcctgct

SEQ ID NO: 963289 - DNA, 25 bp, Homo sapien
tctcttccctgttccaattggtgac

SEQ ID NO: 963290 - DNA, 25 bp, Homo sapien
aaactctcgctccacaggatgtgtg

SEQ ID NO: 963291 - DNA, 25 bp, Homo sapien
gatgtgtgttggagccggctcacac

SEQ ID NO: 963292 - DNA, 25 bp, Homo sapien
tgaccccacgttggtcatgtggcat

SEQ ID NO: 963293 - DNA, 25 bp, Homo sapien
ccacaactgctttcccacagaagga

SEQ ID NO: 963294 - DNA, 25 bp, Homo sapien
ccatgttcccgtacttcattaggct

SEQ ID NO: 963295 - DNA, 25 bp, Homo sapien
catgttcccgtacttcattaggctg

SEQ ID NO: 963296 - DNA, 25 bp, Homo sapien
cacagaaggatgattgcaagctcca

SEQ ID NO: 963297 - DNA, 25 bp, Homo sapien
aacttctgttaatacaaattctatc

SEQ ID NO: 963298 - DNA, 25 bp, Homo sapien
caaaacttctgttaatacaaattct

SEQ ID NO: 963299 - DNA, 25 bp, Homo sapien
gacttcaaaacttctgttaatacaa

SEQ ID NO: 963300 - DNA, 25 bp, Homo sapien
ttctgttaatacaaattctatccca

SEQ ID NO: 963301 - DNA, 25 bp, Homo sapien
aaaaaggtaggcttcctatgagcaa

SEQ ID NO: 963302 - DNA, 25 bp, Homo sapien
cctatgagcaatgatatgaaataat

SEQ ID NO: 963303 - DNA, 25 bp, Homo sapien
ttcacactcactaccaagcaaaaag

SEQ ID NO: 963304 - DNA, 25 bp, Homo sapien
taatgtcataggtaaatcaaaataa

SEQ ID NO: 963305 - DNA, 25 bp, Homo sapien
cattcttgaaatttgtctgggatta

SEQ ID NO: 963306 - DNA, 25 bp, Homo sapien
taacacaaagctaaggccagttttc

SEQ ID NO: 963307 - DNA, 25 bp, Homo sapien
tcttacctgttggtttgtgatacaa

SEQ ID NO: 963308 - DNA, 25 bp, Homo sapien
tgacctcgtgacctatacatttttt

SEQ ID NO: 963309 - DNA, 25 bp, Homo sapien
ctaggaagtgcccttaggattagta

SEQ ID NO: 963310 - DNA, 25 bp, Homo sapien
taggaagtgcccttaggattagtac

SEQ ID NO: 963311 - DNA, 25 bp, Homo sapien
tgctctaaggtgagggtagccttga

SEQ ID NO: 963312 - DNA, 25 bp, Homo sapien
tgtgctgtgcggtcctgctctaagg

SEQ ID NO: 963313 - DNA, 25 bp, Homo sapien
tgtgctaagcgctggcctttctgtg

SEQ ID NO: 963314 - DNA, 25 bp, Homo sapien
gctgctccatatgcctggtgtgcta

SEQ ID NO: 963315 - DNA, 25 bp, Homo sapien
tctttagcagcttgttcagtgagaa

SEQ ID NO: 963316 - DNA, 25 bp, Homo sapien
gagaaaaacatgctcaggtagcttt

SEQ ID NO: 963317 - DNA, 25 bp, Homo sapien
tgcaagttctggcttatcaaagaga

SEQ ID NO: 963318 - DNA, 25 bp, Homo sapien
ttctggcttatcaaagagaagcaga

SEQ ID NO: 963319 - DNA, 25 bp, Homo sapien
aacagcatccctctttctacttgaa

SEQ ID NO: 963320 - DNA, 25 bp, Homo sapien
cagtctcctttactaatcaaagcct

SEQ ID NO: 963321 - DNA, 25 bp, Homo sapien
tcctttactaatcaaagcctccaaa

SEQ ID NO: 963322 - DNA, 25 bp, Homo sapien
aaaacagcatccctctttctacttg

SEQ ID NO: 963323 - DNA, 25 bp, Homo sapien
aatcctctagactcctgcactctcc

SEQ ID NO: 963324 - DNA, 25 bp, Homo sapien
ggtgacagtgaccagaatgatgacc

SEQ ID NO: 963325 - DNA, 25 bp, Homo sapien
gcatttctcgtgaaaaacgggcctg

SEQ ID NO: 963326 - DNA, 25 bp, Homo sapien
aggatctgctgcacactccacccgc

SEQ ID NO: 963327 - DNA, 25 bp, Homo sapien
tcctcctgccagtatgggagaaatg

SEQ ID NO: 963328 - DNA, 25 bp, Homo sapien
cttcctcctgccagtatgggagaaa

SEQ ID NO: 963329 - DNA, 25 bp, Homo sapien
cctcctgccagtatgggagaaatgt

SEQ ID NO: 963330 - DNA, 25 bp, Homo sapien
ctgtggtttctgctggcttccctct

SEQ ID NO: 963331 - DNA, 25 bp, Homo sapien
gtggtttctgctggcttccctctca

SEQ ID NO: 963332 - DNA, 25 bp, Homo sapien
cctgcccacattgccttgctgtggt

SEQ ID NO: 963333 - DNA, 25 bp, Homo sapien
gcccacattgccttgctgtggtttc

SEQ ID NO: 963334 - DNA, 25 bp, Homo sapien
ctcccaggaattcaatcaaaactcc

SEQ ID NO: 963335 - DNA, 25 bp, Homo sapien
ggttttctaccatctaaatgccaag

SEQ ID NO: 963336 - DNA, 25 bp, Homo sapien
tgttagctcaggttggttgcttccc

SEQ ID NO: 963337 - DNA, 25 bp, Homo sapien
ttgtctgaccttgaatattctggtt

SEQ ID NO: 963338 - DNA, 25 bp, Homo sapien
tgaacaagataggactagaagagga

SEQ ID NO: 963339 - DNA, 25 bp, Homo sapien
tgggtccatgaagccttttaggagg

SEQ ID NO: 963340 - DNA, 25 bp, Homo sapien
cattgaggtcctctgccttgaggag

SEQ ID NO: 963341 - DNA, 25 bp, Homo sapien
agaggatactggaaatttgggtcca

SEQ ID NO: 963342 - DNA, 25 bp, Homo sapien
tgagtctcagctcataaacctgcaa

SEQ ID NO: 963343 - DNA, 25 bp, Homo sapien
tttgtatgactccagtacctggcag

SEQ ID NO: 963344 - DNA, 25 bp, Homo sapien
gagtctcagctcataaacctgcaac

SEQ ID NO: 963345 - DNA, 25 bp, Homo sapien
atctttgtatgactccagtacctgg

SEQ ID NO: 963346 - DNA, 25 bp, Homo sapien
agctggccttgtcctgccatgggag

SEQ ID NO: 963347 - DNA, 25 bp, Homo sapien
tggccttgtcctgccatgggagtag

SEQ ID NO: 963348 - DNA, 25 bp, Homo sapien
cctgccatgggagtagttccttgtc

SEQ ID NO: 963349 - DNA, 25 bp, Homo sapien
ttgtcctgccatgggagtagttcct

SEQ ID NO: 963350 - DNA, 25 bp, Homo sapien
agaaatggagatgcccttgccctaa

SEQ ID NO: 963351 - DNA, 25 bp, Homo sapien
aatggagatgcccttgccctaattt

SEQ ID NO: 963352 - DNA, 25 bp, Homo sapien
gaaatggagatgcccttgccctaat

SEQ ID NO: 963353 - DNA, 25 bp, Homo sapien
aaatggagatgcccttgccctaatt

SEQ ID NO: 963354 - DNA, 25 bp, Homo sapien
accaaggaaaccaggaatattagct

SEQ ID NO: 963355 - DNA, 25 bp, Homo sapien
accaggaatattagctagagatgga

SEQ ID NO: 963356 - DNA, 25 bp, Homo sapien
aagagtctggcagtcccgattcaga

SEQ ID NO: 963357 - DNA, 25 bp, Homo sapien
gtcccgattcagaccaagggcctcg

SEQ ID NO: 963358 - DNA, 25 bp, Homo sapien
ggcctctttgacctccttatgggcc

SEQ ID NO: 963359 - DNA, 25 bp, Homo sapien
tgccttcaagcactggcatctgccc

SEQ ID NO: 963360 - DNA, 25 bp, Homo sapien
tgagggccactactgttcagtgttg

SEQ ID NO: 963361 - DNA, 25 bp, Homo sapien
tgttcagtgttgagccctcactgcc

SEQ ID NO: 963362 - DNA, 25 bp, Homo sapien
tgttctaggcgtcttccaggttttc

SEQ ID NO: 963363 - DNA, 25 bp, Homo sapien
gctgtggtatagtcaacagataaga

SEQ ID NO: 963364 - DNA, 25 bp, Homo sapien
gcggttatacaattcaaagctgtgg

SEQ ID NO: 963365 - DNA, 25 bp, Homo sapien
cattatgttatctgctggttagctc

SEQ ID NO: 963366 - DNA, 25 bp, Homo sapien
aaaacttgtttttgtctgagcatgg

SEQ ID NO: 963367 - DNA, 25 bp, Homo sapien
gtcccagtatgaaaatgcggaatgt

SEQ ID NO: 963368 - DNA, 25 bp, Homo sapien
tgtcccagtatgaaaatgcggaatg

SEQ ID NO: 963369 - DNA, 25 bp, Homo sapien
tatgaaacctgatagaggctgagcc

SEQ ID NO: 963370 - DNA, 25 bp, Homo sapien
taaaaatcccctgggtctgacagat

SEQ ID NO: 963371 - DNA, 25 bp, Homo sapien
tctgacagataaaagatggctggca

SEQ ID NO: 963372 - DNA, 25 bp, Homo sapien
ttctggcaaatgtacaaactatgtg

SEQ ID NO: 963373 - DNA, 25 bp, Homo sapien
tcccctacttctaaacttggatgtg

SEQ ID NO: 963374 - DNA, 25 bp, Homo sapien
ttcgatagccttccctatctcggtc

SEQ ID NO: 963375 - DNA, 25 bp, Homo sapien
acttctaaacttggatgtgatcaca

SEQ ID NO: 963376 - DNA, 25 bp, Homo sapien
gcagcagttacaacagtggcagctt

SEQ ID NO: 963377 - DNA, 25 bp, Homo sapien
tcaggtaatgcgcctggcttggcct

SEQ ID NO: 963378 - DNA, 25 bp, Homo sapien
gtgtgcaccactaggcccggttaat

SEQ ID NO: 963379 - DNA, 25 bp, Homo sapien
tgacctcaggtaatgcgcctggctt

SEQ ID NO: 963380 - DNA, 25 bp, Homo sapien
aggtgtgcaccactaggcccggtta

SEQ ID NO: 963381 - DNA, 25 bp, Homo sapien
ttttagtccaaatgtctgtaagatt

SEQ ID NO: 963382 - DNA, 25 bp, Homo sapien
tgtctgtaagattttcaggctatga

SEQ ID NO: 963383 - DNA, 25 bp, Homo sapien
aagattttcaggctatgaggtgacc

SEQ ID NO: 963384 - DNA, 25 bp, Homo sapien
caggctatgaggtgaccatctttta

SEQ ID NO: 963385 - DNA, 25 bp, Homo sapien
agatcaaggccatagcttgccgacc

SEQ ID NO: 963386 - DNA, 25 bp, Homo sapien
tgcagatcaaggccatagcttgccg

SEQ ID NO: 963387 - DNA, 25 bp, Homo sapien
cagatcaaggccatagcttgccgac

SEQ ID NO: 963388 - DNA, 25 bp, Homo sapien
gcagatcaaggccatagcttgccga

SEQ ID NO: 963389 - DNA, 25 bp, Homo sapien
gtttcgaattctgtgaagaaggtca

SEQ ID NO: 963390 - DNA, 25 bp, Homo sapien
agttgtttcgaattctgtgaagaag

SEQ ID NO: 963391 - DNA, 25 bp, Homo sapien
gttgtttcgaattctgtgaagaagg

SEQ ID NO: 963392 - DNA, 25 bp, Homo sapien
tgtttcgaattctgtgaagaaggtc

SEQ ID NO: 963393 - DNA, 25 bp, Homo sapien
ggaggaggcccctcgtgtactctct

SEQ ID NO: 963394 - DNA, 25 bp, Homo sapien
taaaatataccacatgtgcagtagg

SEQ ID NO: 963395 - DNA, 25 bp, Homo sapien
tagtattactacataggcattaggt

SEQ ID NO: 963396 - DNA, 25 bp, Homo sapien
tctccggagataaccaccaccatga

SEQ ID NO: 963397 - DNA, 25 bp, Homo sapien
acagtttaaagagttcagtgagcgc

SEQ ID NO: 963398 - DNA, 25 bp, Homo sapien
gcctgtcagaataaagccttagaga

SEQ ID NO: 963399 - DNA, 25 bp, Homo sapien
cagctttttgccttagcctgtcaga

SEQ ID NO: 963400 - DNA, 25 bp, Homo sapien
taagacagtgccttgcatcatgaag

SEQ ID NO: 963401 - DNA, 25 bp, Homo sapien
gagtccctcttgtgtgtcaggtaca

SEQ ID NO: 963402 - DNA, 25 bp, Homo sapien
gactcatagtgtagtaaatgccgta

SEQ ID NO: 963403 - DNA, 25 bp, Homo sapien
agcaaacatttaccgagtccctctt

SEQ ID NO: 963404 - DNA, 25 bp, Homo sapien
tacgaagtgcgcagtctagcaggga

SEQ ID NO: 963405 - DNA, 25 bp, Homo sapien
tataacataggttttacgaggacta

SEQ ID NO: 963406 - DNA, 25 bp, Homo sapien
aacatacagtttttccagggcctgc

SEQ ID NO: 963407 - DNA, 25 bp, Homo sapien
tacgaggactataaggagagagact

SEQ ID NO: 963408 - DNA, 25 bp, Homo sapien
tgcctcacaggaagggtactatttg

SEQ ID NO: 963409 - DNA, 25 bp, Homo sapien
gaacagattcttgaggccgggcatg

SEQ ID NO: 963410 - DNA, 25 bp, Homo sapien
tctacgtattaaaagtgtctctgtg

SEQ ID NO: 963411 - DNA, 25 bp, Homo sapien
tacctaactcacaagatgattgttg

SEQ ID NO: 963412 - DNA, 25 bp, Homo sapien
gtaatgaaacagtagataacccatg

SEQ ID NO: 963413 - DNA, 25 bp, Homo sapien
caggactgcagagcttgacatgaag

SEQ ID NO: 963414 - DNA, 25 bp, Homo sapien
gttagtcagaaggatgacacccagg

SEQ ID NO: 963415 - DNA, 25 bp, Homo sapien
aacgagaggtgtcagtcttgagcaa

SEQ ID NO: 963416 - DNA, 25 bp, Homo sapien
gactgggacctaaggaggttctctg

SEQ ID NO: 963417 - DNA, 25 bp, Homo sapien
ggagccacagcgtgccctcactatc

SEQ ID NO: 963418 - DNA, 25 bp, Homo sapien
tatgccgtggctctcggaggagcac

SEQ ID NO: 963419 - DNA, 25 bp, Homo sapien
tgccctcactatctttcagatccca

SEQ ID NO: 963420 - DNA, 25 bp, Homo sapien
tttcagtgggagcaccatggagtgg

SEQ ID NO: 963421 - DNA, 25 bp, Homo sapien
tttgagccctgttaggaatctctcc

SEQ ID NO: 963422 - DNA, 25 bp, Homo sapien
tcgccactgcagttccacattttac

SEQ ID NO: 963423 - DNA, 25 bp, Homo sapien
tctgattctctcttgcggccagcta

SEQ ID NO: 963424 - DNA, 25 bp, Homo sapien
tccatatggtgaggagcatcgccac

SEQ ID NO: 963425 - DNA, 25 bp, Homo sapien
tgattctactaaacctatgccacag

SEQ ID NO: 963426 - DNA, 25 bp, Homo sapien
cagagagcacaagcacaaaggagct

SEQ ID NO: 963427 - DNA, 25 bp, Homo sapien
tctactaaacctatgccacagagag

SEQ ID NO: 963428 - DNA, 25 bp, Homo sapien
caaaggagctgcgtgcacattccac

SEQ ID NO: 963429 - DNA, 25 bp, Homo sapien
ttaaagctccattgataaccttggg

SEQ ID NO: 963430 - DNA, 25 bp, Homo sapien
tgtagcctgtaaccgagtggattat

SEQ ID NO: 963431 - DNA, 25 bp, Homo sapien
tgacatgaacatcgctggtctggga

SEQ ID NO: 963432 - DNA, 25 bp, Homo sapien
tacatgtctgggatggtttagaacc

SEQ ID NO: 963433 - DNA, 25 bp, Homo sapien
tggtcaaactcaacatcttcaagtt

SEQ ID NO: 963434 - DNA, 25 bp, Homo sapien
tttttatttggtcaaactcaacatc

SEQ ID NO: 963435 - DNA, 25 bp, Homo sapien
ttatttggtcaaactcaacatcttc

SEQ ID NO: 963436 - DNA, 25 bp, Homo sapien
tttggtcaaactcaacatcttcaag

SEQ ID NO: 963437 - DNA, 25 bp, Homo sapien
aggaaagaggtcctcatccagaccc

SEQ ID NO: 963438 - DNA, 25 bp, Homo sapien
caggaaagaggtcctcatccagacc

SEQ ID NO: 963439 - DNA, 25 bp, Homo sapien
agctcacacagggacccaaggaggg

SEQ ID NO: 963440 - DNA, 25 bp, Homo sapien
aggaggggacgaaaactgcttcctg

SEQ ID NO: 963441 - DNA, 25 bp, Homo sapien
gctgttccacaaaaagatgccagag

SEQ ID NO: 963442 - DNA, 25 bp, Homo sapien
ggcttcatcttcaaccttggctgct

SEQ ID NO: 963443 - DNA, 25 bp, Homo sapien
gagattatgggatcccgccatcaca

SEQ ID NO: 963444 - DNA, 25 bp, Homo sapien
tttttatgcatatactatttggttg

SEQ ID NO: 963445 - DNA, 25 bp, Homo sapien
atttggttgtagtctttagttatag

SEQ ID NO: 963446 - DNA, 25 bp, Homo sapien
gtagtctttagttatagttttatca

SEQ ID NO: 963447 - DNA, 25 bp, Homo sapien
taaattgattggtaactactctgca

SEQ ID NO: 963448 - DNA, 25 bp, Homo sapien
tcttacctagccacgaggtcaggag

SEQ ID NO: 963449 - DNA, 25 bp, Homo sapien
ccagtataaaaggatgctcttggtg

SEQ ID NO: 963450 - DNA, 25 bp, Homo sapien
tggctgtgctcatgtgccccacatc

SEQ ID NO: 963451 - DNA, 25 bp, Homo sapien
gtcaataggctttaacatcactttc

SEQ ID NO: 963452 - DNA, 25 bp, Homo sapien
ccccatgtaagagggcacttggcaa

SEQ ID NO: 963453 - DNA, 25 bp, Homo sapien
tggcaattaaacatgctacacagca

SEQ ID NO: 963454 - DNA, 25 bp, Homo sapien
ttgtactccacaaaattatgactga

SEQ ID NO: 963455 - DNA, 25 bp, Homo sapien
tttgaccaaggctataaatgccacg

SEQ ID NO: 963456 - DNA, 25 bp, Homo sapien
cattgatatgctcagtatgctgcca

SEQ ID NO: 963457 - DNA, 25 bp, Homo sapien
tacatgatttctaggccccatgacc

SEQ ID NO: 963458 - DNA, 25 bp, Homo sapien
taatgtgggatccttatcagcatgc

SEQ ID NO: 963459 - DNA, 25 bp, Homo sapien
tagaagttgcaaagagacgttagtg

SEQ ID NO: 963460 - DNA, 25 bp, Homo sapien
cttcatttaaggagttttgggatgg

SEQ ID NO: 963461 - DNA, 25 bp, Homo sapien
tactatacttggtgaatgttggaaa

SEQ ID NO: 963462 - DNA, 25 bp, Homo sapien
tgggatggtggttgataactaagac

SEQ ID NO: 963463 - DNA, 25 bp, Homo sapien
gagggatataggcagatagcatcca

SEQ ID NO: 963464 - DNA, 25 bp, Homo sapien
tgggctatgtgtcaagaacgctgta

SEQ ID NO: 963465 - DNA, 25 bp, Homo sapien
gaacgctgtatctagcaatctaaaa

SEQ ID NO: 963466 - DNA, 25 bp, Homo sapien
taaagcagtgcccaggctaagggtt

SEQ ID NO: 963467 - DNA, 25 bp, Homo sapien
tatggatcactcctaggtgaggtac

SEQ ID NO: 963468 - DNA, 25 bp, Homo sapien
gacataccagaaactacttaccgtg

SEQ ID NO: 963469 - DNA, 25 bp, Homo sapien
caaagtgatcctacccaatctggca

SEQ ID NO: 963470 - DNA, 25 bp, Homo sapien
cagaattggcaaatatcgcgaccag

SEQ ID NO: 963471 - DNA, 25 bp, Homo sapien
tggttacactaagcttaaatgctgt

SEQ ID NO: 963472 - DNA, 25 bp, Homo sapien
taaagagttcagagttggttacact

SEQ ID NO: 963473 - DNA, 25 bp, Homo sapien
gaaagaaatggataggacgccctgc

SEQ ID NO: 963474 - DNA, 25 bp, Homo sapien
ggctgctctctgctataaaaagtgt

SEQ ID NO: 963475 - DNA, 25 bp, Homo sapien
taagcatgggcctaaagacgtggga

SEQ ID NO: 963476 - DNA, 25 bp, Homo sapien
catcaccattggaaggaggaaacac

SEQ ID NO: 963477 - DNA, 25 bp, Homo sapien
tcttcttcgaagagtgaaccagcct

SEQ ID NO: 963478 - DNA, 25 bp, Homo sapien
taagttatccacctataagcatggg

SEQ ID NO: 963479 - DNA, 25 bp, Homo sapien
cttcccttgatttgtgtagcatggc

SEQ ID NO: 963480 - DNA, 25 bp, Homo sapien
taggcctggtacttgactgcccgca

SEQ ID NO: 963481 - DNA, 25 bp, Homo sapien
cgatgagcaaaagcagtagcgagca

SEQ ID NO: 963482 - DNA, 25 bp, Homo sapien
gacacattgggttagttcctgacat

SEQ ID NO: 963483 - DNA, 25 bp, Homo sapien
aattctcgggtcatggtttacagag

SEQ ID NO: 963484 - DNA, 25 bp, Homo sapien
tagactggttaagggagatgatgcc

SEQ ID NO: 963485 - DNA, 25 bp, Homo sapien
tcaaggttctgttgtaagtagccca

SEQ ID NO: 963486 - DNA, 25 bp, Homo sapien
ggactgctccaagcaaattctcggg

SEQ ID NO: 963487 - DNA, 25 bp, Homo sapien
gataagttatatttgtgccactaga

SEQ ID NO: 963488 - DNA, 25 bp, Homo sapien
tggaccgccctcattcctttggctg

SEQ ID NO: 963489 - DNA, 25 bp, Homo sapien
cctgacgtaatactgattgctaagc

SEQ ID NO: 963490 - DNA, 25 bp, Homo sapien
tgcaaacctagaaagcagacattgt

SEQ ID NO: 963491 - DNA, 25 bp, Homo sapien
cactgcctttcccaaccatttgttt

SEQ ID NO: 963492 - DNA, 25 bp, Homo sapien
taagttcctttagccacatttaaca

SEQ ID NO: 963493 - DNA, 25 bp, Homo sapien
cagtgctgtgatctgcctccctggt

SEQ ID NO: 963494 - DNA, 25 bp, Homo sapien
catgtgctgccacgcctagctgatt

SEQ ID NO: 963495 - DNA, 25 bp, Homo sapien
ggacctggtggtcaagactttgcaa

SEQ ID NO: 963496 - DNA, 25 bp, Homo sapien
tgttaagtagtatggctcgccagcg

SEQ ID NO: 963497 - DNA, 25 bp, Homo sapien
tcgccagcgtcgtgcatctttgtct

SEQ ID NO: 963498 - DNA, 25 bp, Homo sapien
aaactgtggctcacctggatcatca

SEQ ID NO: 963499 - DNA, 25 bp, Homo sapien
gcaatttgtagcaagctgccagagt

SEQ ID NO: 963500 - DNA, 25 bp, Homo sapien
caaaacggtgaacttaagagctgtc

SEQ ID NO: 963501 - DNA, 25 bp, Homo sapien
cctgagtcaactatggattgtacgg

SEQ ID NO: 963502 - DNA, 25 bp, Homo sapien
gctgaatccctctcaaaccagtcaa

SEQ ID NO: 963503 - DNA, 25 bp, Homo sapien
cattgagggccatcagatatcacct

SEQ ID NO: 963504 - DNA, 25 bp, Homo sapien
gacatctagaaacaggattcacgtc

SEQ ID NO: 963505 - DNA, 25 bp, Homo sapien
tcttccccgccagtagttgagaatg

SEQ ID NO: 963506 - DNA, 25 bp, Homo sapien
gcattgctcccatgtgatatactgg

SEQ ID NO: 963507 - DNA, 25 bp, Homo sapien
tcctactgtggatgactgagatggt

SEQ ID NO: 963508 - DNA, 25 bp, Homo sapien
tcacaacgtccagcccaaaaattgg

SEQ ID NO: 963509 - DNA, 25 bp, Homo sapien
tacacttgtaggagagcttctgtgg

SEQ ID NO: 963510 - DNA, 25 bp, Homo sapien
ataaatgtttcgcaagtgccacccc

SEQ ID NO: 963511 - DNA, 25 bp, Homo sapien
tatttttatagtaggagggctggcc

SEQ ID NO: 963512 - DNA, 25 bp, Homo sapien
gctgctgatacggaacaatggatta

SEQ ID NO: 963513 - DNA, 25 bp, Homo sapien
aactatttgataggttacgggcaca

SEQ ID NO: 963514 - DNA, 25 bp, Homo sapien
tagcatggcaagtcgaaatctcagg

SEQ ID NO: 963515 - DNA, 25 bp, Homo sapien
gaaaattgatatcctgtggtgctaa

SEQ ID NO: 963516 - DNA, 25 bp, Homo sapien
gacttaagaagatcaaggtctcacc

SEQ ID NO: 963517 - DNA, 25 bp, Homo sapien
gggctcacaacaacattaaaccagg

SEQ ID NO: 963518 - DNA, 25 bp, Homo sapien
caattcgtgtgaccataagatactg

SEQ ID NO: 963519 - DNA, 25 bp, Homo sapien
tgggagtcggcctttcctctagtaa

SEQ ID NO: 963520 - DNA, 25 bp, Homo sapien
tgctgagttgatgcaccaggtggca

SEQ ID NO: 963521 - DNA, 25 bp, Homo sapien
taggcgctcctagtctggtcagtgc

SEQ ID NO: 963522 - DNA, 25 bp, Homo sapien
catctgtgccaaacataggcgctcc

SEQ ID NO: 963523 - DNA, 25 bp, Homo sapien
ggcaaattcctaacactgctaatta

SEQ ID NO: 963524 - DNA, 25 bp, Homo sapien
agatggaaaacataaggcaaattcc

SEQ ID NO: 963525 - DNA, 25 bp, Homo sapien
ggaggctgctgataggattttaaaa

SEQ ID NO: 963526 - DNA, 25 bp, Homo sapien
caatgttaatagtggaacaagagcc

SEQ ID NO: 963527 - DNA, 25 bp, Homo sapien
ccaactatgaatgggttagcacaaa

SEQ ID NO: 963528 - DNA, 25 bp, Homo sapien
taatgtggagtgcaagttgggcatc

SEQ ID NO: 963529 - DNA, 25 bp, Homo sapien
cccctggtgattggtatgaatgtgc

SEQ ID NO: 963530 - DNA, 25 bp, Homo sapien
cttgtatcttagcttgggatgtgcc

SEQ ID NO: 963531 - DNA, 25 bp, Homo sapien
gcagctgaaccattatgggataaac

SEQ ID NO: 963532 - DNA, 25 bp, Homo sapien
tacttctcactgattgaacataagc

SEQ ID NO: 963533 - DNA, 25 bp, Homo sapien
gcagacatagccttttgaagcagct

SEQ ID NO: 963534 - DNA, 25 bp, Homo sapien
tcactgattgaacataagcttccag

SEQ ID NO: 963535 - DNA, 25 bp, Homo sapien
tgaagacaccggcaacggaatgggc

SEQ ID NO: 963536 - DNA, 25 bp, Homo sapien
gggccctttggcacattcggtaaca

SEQ ID NO: 963537 - DNA, 25 bp, Homo sapien
tgaaaggcacgctcaagagtacaag

SEQ ID NO: 963538 - DNA, 25 bp, Homo sapien
ggcatttgtgcctactcccagagct

SEQ ID NO: 963539 - DNA, 25 bp, Homo sapien
gacttagtaggatccggcactttgg

SEQ ID NO: 963540 - DNA, 25 bp, Homo sapien
gacaccaaggtgtatgtatcagcgt

SEQ ID NO: 963541 - DNA, 25 bp, Homo sapien
tatctcttaggactcggcttcaatg

SEQ ID NO: 963542 - DNA, 25 bp, Homo sapien
cacaggtttgtgaaacgatctcacc

SEQ ID NO: 963543 - DNA, 25 bp, Homo sapien
cacagaactgataggtagctagtga

SEQ ID NO: 963544 - DNA, 25 bp, Homo sapien
aaaaagattaagctgccctcccaca

SEQ ID NO: 963545 - DNA, 25 bp, Homo sapien
tagctagtgacatggtaccaggagg

SEQ ID NO: 963546 - DNA, 25 bp, Homo sapien
agtcaggccaagtgttatgtaacag

SEQ ID NO: 963547 - DNA, 25 bp, Homo sapien
gcatctgagggagcacacgtgtctg

SEQ ID NO: 963548 - DNA, 25 bp, Homo sapien
tgatgcaggctgaacacatacaact

SEQ ID NO: 963549 - DNA, 25 bp, Homo sapien
acgtgtctggagcacctgcctgatg

SEQ ID NO: 963550 - DNA, 25 bp, Homo sapien
tcatttaagctccagaaagcatctg

SEQ ID NO: 963551 - DNA, 25 bp, Homo sapien
ttaaagagcaatactcaccctcggt

SEQ ID NO: 963552 - DNA, 25 bp, Homo sapien
tataggcttagcaacagcactgctg

SEQ ID NO: 963553 - DNA, 25 bp, Homo sapien
tgatgtacacacagcaggacaactg

SEQ ID NO: 963554 - DNA, 25 bp, Homo sapien
ttttgaaaccctgaaggacagctca

SEQ ID NO: 963555 - DNA, 25 bp, Homo sapien
caggaacattcaccggggctggtaa

SEQ ID NO: 963556 - DNA, 25 bp, Homo sapien
ccgagggcagattttaccaggaaca

SEQ ID NO: 963557 - DNA, 25 bp, Homo sapien
gtaacctctcccatttctgtgtcag

SEQ ID NO: 963558 - DNA, 25 bp, Homo sapien
tccaaagcctttcccgagggcagat

SEQ ID NO: 963559 - DNA, 25 bp, Homo sapien
gctaacaaaggatcactgggtgcag

SEQ ID NO: 963560 - DNA, 25 bp, Homo sapien
tgtgggtaccaagcttgagggctca

SEQ ID NO: 963561 - DNA, 25 bp, Homo sapien
tagcaagtttactgggccaaggccc

SEQ ID NO: 963562 - DNA, 25 bp, Homo sapien
tcccctgggagagttgagaatgact

SEQ ID NO: 963563 - DNA, 25 bp, Homo sapien
cagcacccgtgcctaggcagtgagg

SEQ ID NO: 963564 - DNA, 25 bp, Homo sapien
ttcaaaggtacaaatgcatggtcct

SEQ ID NO: 963565 - DNA, 25 bp, Homo sapien
ggtccttagggttgcatgggacaca

SEQ ID NO: 963566 - DNA, 25 bp, Homo sapien
gggacacaggattgcacatcaggga

SEQ ID NO: 963567 - DNA, 25 bp, Homo sapien
agccactgagagaagcgtgtgtggg

SEQ ID NO: 963568 - DNA, 25 bp, Homo sapien
cttttcagatggatggtcatccagc

SEQ ID NO: 963569 - DNA, 25 bp, Homo sapien
agaagcgtgtgtgggaccactctgc

SEQ ID NO: 963570 - DNA, 25 bp, Homo sapien
ccttttcagatggatggtcatccag

SEQ ID NO: 963571 - DNA, 25 bp, Homo sapien
ggtgctctcgtgaacaaaaactgaa

SEQ ID NO: 963572 - DNA, 25 bp, Homo sapien
gactactggctacatgttcacttgc

SEQ ID NO: 963573 - DNA, 25 bp, Homo sapien
tcagttcagcgggtgctctcgtgaa

SEQ ID NO: 963574 - DNA, 25 bp, Homo sapien
tgatgctgaacggaatcacatcccc

SEQ ID NO: 963575 - DNA, 25 bp, Homo sapien
cggagctgtggacattgaatcccaa

SEQ ID NO: 963576 - DNA, 25 bp, Homo sapien
catgtaaaacggcactgtatcctgg

SEQ ID NO: 963577 - DNA, 25 bp, Homo sapien
gacgactaaggtcttatggccacac

SEQ ID NO: 963578 - DNA, 25 bp, Homo sapien
gaatcccaagtagtaagatggcagc

SEQ ID NO: 963579 - DNA, 25 bp, Homo sapien
agtgtaataagaagtccctccaccg

SEQ ID NO: 963580 - DNA, 25 bp, Homo sapien
tccaccgggtcacaagttcatattg

SEQ ID NO: 963581 - DNA, 25 bp, Homo sapien
tcatattgtaggtctggtgtgccca

SEQ ID NO: 963582 - DNA, 25 bp, Homo sapien
ctcgtgtttgagctattgcagggaa

SEQ ID NO: 963583 - DNA, 25 bp, Homo sapien
gctgtccctggttgtcgtgttcagc

SEQ ID NO: 963584 - DNA, 25 bp, Homo sapien
tccattagagcccattctttgctca

SEQ ID NO: 963585 - DNA, 25 bp, Homo sapien
cagcagtacattggtcctgtgagtt

SEQ ID NO: 963586 - DNA, 25 bp, Homo sapien
cctggttgtcgtgttcagcagtaca

SEQ ID NO: 963587 - DNA, 25 bp, Homo sapien
gctcctgtgtccacatctaacatca

SEQ ID NO: 963588 - DNA, 25 bp, Homo sapien
gaccactaagtatgcgtactgaggt

SEQ ID NO: 963589 - DNA, 25 bp, Homo sapien
cctgagacagatataggcatcattc

SEQ ID NO: 963590 - DNA, 25 bp, Homo sapien
taacatcagtggtatcctgagacag

SEQ ID NO: 963591 - DNA, 25 bp, Homo sapien
agggatttgggctgacattctctaa

SEQ ID NO: 963592 - DNA, 25 bp, Homo sapien
tgttccttgtgtactgtctgggagc

SEQ ID NO: 963593 - DNA, 25 bp, Homo sapien
aggcagggatttgggctgacattct

SEQ ID NO: 963594 - DNA, 25 bp, Homo sapien
gcatacatttggctgagtgttcctt

SEQ ID NO: 963595 - DNA, 25 bp, Homo sapien
ctgggtgcgcttagcactgccaaag

SEQ ID NO: 963596 - DNA, 25 bp, Homo sapien
caaaacaactaagtccaagatggtg

SEQ ID NO: 963597 - DNA, 25 bp, Homo sapien
gccaaagttgtagcaaagagcaaca

SEQ ID NO: 963598 - DNA, 25 bp, Homo sapien
aacaaaacaactaagtccaagatgg

SEQ ID NO: 963599 - DNA, 25 bp, Homo sapien
gatactcgtctacagaatggaccca

SEQ ID NO: 963600 - DNA, 25 bp, Homo sapien
tcagcatccgataggactttcctaa

SEQ ID NO: 963601 - DNA, 25 bp, Homo sapien
aatcagatactcgtctacagaatgg

SEQ ID NO: 963602 - DNA, 25 bp, Homo sapien
tttcctaaatcagatactcgtctac

SEQ ID NO: 963603 - DNA, 25 bp, Homo sapien
tcaacagctctttgggcaatagcct

SEQ ID NO: 963604 - DNA, 25 bp, Homo sapien
tgtgcaaaatcagcagcaagtcgca

SEQ ID NO: 963605 - DNA, 25 bp, Homo sapien
taactctggcaatgaaaccttgtag

SEQ ID NO: 963606 - DNA, 25 bp, Homo sapien
tggcatggcggataaaaagttcaac

SEQ ID NO: 963607 - DNA, 25 bp, Homo sapien
gaacatcaggttttcctgagctgga

SEQ ID NO: 963608 - DNA, 25 bp, Homo sapien
gtacagagaacaaggaacatcaggt

SEQ ID NO: 963609 - DNA, 25 bp, Homo sapien
aacaaggaacatcaggttttcctga

SEQ ID NO: 963610 - DNA, 25 bp, Homo sapien
aggttttcctgagctggataatgac

SEQ ID NO: 963611 - DNA, 25 bp, Homo sapien
ggtgatgattatggcctctatagca

SEQ ID NO: 963612 - DNA, 25 bp, Homo sapien
ccacagaagtgagtaagggttgcac

SEQ ID NO: 963613 - DNA, 25 bp, Homo sapien
tctatagcatctcccacagaagtga

SEQ ID NO: 963614 - DNA, 25 bp, Homo sapien
gagtaagggttgcacagcattttcc

SEQ ID NO: 963615 - DNA, 25 bp, Homo sapien
agttctattcaacactgtactgcag

SEQ ID NO: 963616 - DNA, 25 bp, Homo sapien
gttctattcaacactgtactgcaga

SEQ ID NO: 963617 - DNA, 25 bp, Homo sapien
tctattcaacactgtactgcagatc

SEQ ID NO: 963618 - DNA, 25 bp, Homo sapien
cagttctattcaacactgtactgca

SEQ ID NO: 963619 - DNA, 25 bp, Homo sapien
acaggcataaagatcagaaagtaag

SEQ ID NO: 963620 - DNA, 25 bp, Homo sapien
taaaaatccctatttgcataagata

SEQ ID NO: 963621 - DNA, 25 bp, Homo sapien
gatatggtggtttacatagaaaact

SEQ ID NO: 963622 - DNA, 25 bp, Homo sapien
tccctatttgcataagatatggtgg

SEQ ID NO: 963623 - DNA, 25 bp, Homo sapien
ctttagagctgaaattatagtttgc

SEQ ID NO: 963624 - DNA, 25 bp, Homo sapien
tgggaatgagctctgactggaaaca

SEQ ID NO: 963625 - DNA, 25 bp, Homo sapien
ggaatgagctctgactggaaacaac

SEQ ID NO: 963626 - DNA, 25 bp, Homo sapien
ctgccagtgggaatgagctctgact

SEQ ID NO: 963627 - DNA, 25 bp, Homo sapien
cagtgggaatgagctctgactggaa

SEQ ID NO: 963628 - DNA, 25 bp, Homo sapien
gaggcccaatcacctgacttgcatc

SEQ ID NO: 963629 - DNA, 25 bp, Homo sapien
tcacctgacttgcatctccttgtgt

SEQ ID NO: 963630 - DNA, 25 bp, Homo sapien
aagaggcccaatcacctgacttgca

SEQ ID NO: 963631 - DNA, 25 bp, Homo sapien
caatcacctgacttgcatctccttg

SEQ ID NO: 963632 - DNA, 25 bp, Homo sapien
cacaattggtcttgcacgggaagaa

SEQ ID NO: 963633 - DNA, 25 bp, Homo sapien
ggtgtgacccaaatgccccatgtgt

SEQ ID NO: 963634 - DNA, 25 bp, Homo sapien
tcacagctgatggactcttgaggca

SEQ ID NO: 963635 - DNA, 25 bp, Homo sapien
tttagggaaacggacatggaatgct

SEQ ID NO: 963636 - DNA, 25 bp, Homo sapien
gagaggctcctgaataaggcactct

SEQ ID NO: 963637 - DNA, 25 bp, Homo sapien
gaggctcctgaataaggcactctgg

SEQ ID NO: 963638 - DNA, 25 bp, Homo sapien
ggctcctgaataaggcactctggaa

SEQ ID NO: 963639 - DNA, 25 bp, Homo sapien
aggctcctgaataaggcactctgga

SEQ ID NO: 963640 - DNA, 25 bp, Homo sapien
gttgatgactttgctgtatatttcc

SEQ ID NO: 963641 - DNA, 25 bp, Homo sapien
tctcagttgatgactttgctgtata

SEQ ID NO: 963642 - DNA, 25 bp, Homo sapien
tattctcagttgatgactttgctgt

SEQ ID NO: 963643 - DNA, 25 bp, Homo sapien
cagttgatgactttgctgtatattt

SEQ ID NO: 963644 - DNA, 25 bp, Homo sapien
gctgcctggagttacagagtaggtt

SEQ ID NO: 963645 - DNA, 25 bp, Homo sapien
caaaacgctagtgaagctgcctgga

SEQ ID NO: 963646 - DNA, 25 bp, Homo sapien
agtaggttttgctccatttgggttg

SEQ ID NO: 963647 - DNA, 25 bp, Homo sapien
tcttgtataaagtaggcacctcaac

SEQ ID NO: 963648 - DNA, 25 bp, Homo sapien
tacgacaagataaactgctttggtt

SEQ ID NO: 963649 - DNA, 25 bp, Homo sapien
catcaaggtactttttaatctaccg

SEQ ID NO: 963650 - DNA, 25 bp, Homo sapien
taatctaccgatctgtgacacagac

SEQ ID NO: 963651 - DNA, 25 bp, Homo sapien
aaaggatgcaatctctatctctgaa

SEQ ID NO: 963652 - DNA, 25 bp, Homo sapien
tggtgattttacgagtccttcctag

SEQ ID NO: 963653 - DNA, 25 bp, Homo sapien
agtgggaaaccagaggactaaccat

SEQ ID NO: 963654 - DNA, 25 bp, Homo sapien
taaagccgggagactttcctatgag

SEQ ID NO: 963655 - DNA, 25 bp, Homo sapien
gtaacatcaatctagcagttcagag

SEQ ID NO: 963656 - DNA, 25 bp, Homo sapien
ggttttcagtgataccttgtataca

SEQ ID NO: 963657 - DNA, 25 bp, Homo sapien
catattttgccaaattattcctaga

SEQ ID NO: 963658 - DNA, 25 bp, Homo sapien
tctgtttgtagctggtagatagaaa

SEQ ID NO: 963659 - DNA, 25 bp, Homo sapien
taatactgagtcatctaatacatga

SEQ ID NO: 963660 - DNA, 25 bp, Homo sapien
cactaggttgatacctatagtggcc

SEQ ID NO: 963661 - DNA, 25 bp, Homo sapien
gtagttcttgagcatgttttggcct

SEQ ID NO: 963662 - DNA, 25 bp, Homo sapien
gttccatttgcaaggcaatcttgct

SEQ ID NO: 963663 - DNA, 25 bp, Homo sapien
tcttgctgtttgtcacactaggttg

SEQ ID NO: 963664 - DNA, 25 bp, Homo sapien
cagtaaatgcaggttttctttcgat

SEQ ID NO: 963665 - DNA, 25 bp, Homo sapien
taggattcaagtagggagcgtccat

SEQ ID NO: 963666 - DNA, 25 bp, Homo sapien
acaaacacaccattaggattcaagt

SEQ ID NO: 963667 - DNA, 25 bp, Homo sapien
caatgaaggtggtgtcaaatgacat

SEQ ID NO: 963668 - DNA, 25 bp, Homo sapien
tggcaatgaaggtggtgtcaaatga

SEQ ID NO: 963669 - DNA, 25 bp, Homo sapien
actgtataactggatggtctttgcc

SEQ ID NO: 963670 - DNA, 25 bp, Homo sapien
tgaggtttgtatcaacagcagcaac

SEQ ID NO: 963671 - DNA, 25 bp, Homo sapien
ttttacactgtataactggatggtc

SEQ ID NO: 963672 - DNA, 25 bp, Homo sapien
atgtgaggtttgtatcaacagcagc

SEQ ID NO: 963673 - DNA, 25 bp, Homo sapien
taccatcaagttcatcagaggaagg

SEQ ID NO: 963674 - DNA, 25 bp, Homo sapien
taagcagcctcatagggttgtagtg

SEQ ID NO: 963675 - DNA, 25 bp, Homo sapien
ggatcgaagagtcgagataaggatt

SEQ ID NO: 963676 - DNA, 25 bp, Homo sapien
ggaaaaaccaagttgataggatcga

SEQ ID NO: 963677 - DNA, 25 bp, Homo sapien
tgtatctgctgctaagctggccaag

SEQ ID NO: 963678 - DNA, 25 bp, Homo sapien
ggccgtgacctttctcaacgtggca

SEQ ID NO: 963679 - DNA, 25 bp, Homo sapien
ccctaagagaaaaccactggccgtg

SEQ ID NO: 963680 - DNA, 25 bp, Homo sapien
aagacagtttactggcactggcagc

SEQ ID NO: 963681 - DNA, 25 bp, Homo sapien
gcccagcacgagtcagaacttccat

SEQ ID NO: 963682 - DNA, 25 bp, Homo sapien
cagagcttctaactatactggacac

SEQ ID NO: 963683 - DNA, 25 bp, Homo sapien
aacaactgtttaaacagcacccatg

SEQ ID NO: 963684 - DNA, 25 bp, Homo sapien
gataagaaactgctactgctttagc

SEQ ID NO: 963685 - DNA, 25 bp, Homo sapien
cccaagggatgagtacattctgcct

SEQ ID NO: 963686 - DNA, 25 bp, Homo sapien
tacaaatacccaagggatgagtaca

SEQ ID NO: 963687 - DNA, 25 bp, Homo sapien
aaacttgagcttcccaatgggtcct

SEQ ID NO: 963688 - DNA, 25 bp, Homo sapien
taacctagagatgatgtgcataggt

SEQ ID NO: 963689 - DNA, 25 bp, Homo sapien
catcttccatgtgttgtaggtcaac

SEQ ID NO: 963690 - DNA, 25 bp, Homo sapien
gaggtctgtagttccacttgcatta

SEQ ID NO: 963691 - DNA, 25 bp, Homo sapien
gactgtattgttgaagacgcttcca

SEQ ID NO: 963692 - DNA, 25 bp, Homo sapien
aattcccttggatatgctgactgta

SEQ ID NO: 963693 - DNA, 25 bp, Homo sapien
cttaggatcaataaaagatgcctga

SEQ ID NO: 963694 - DNA, 25 bp, Homo sapien
taaaagatgcctgaacatgctctct

SEQ ID NO: 963695 - DNA, 25 bp, Homo sapien
aagatgcctgaacatgctctctcat

SEQ ID NO: 963696 - DNA, 25 bp, Homo sapien
aaagatgcctgaacatgctctctca

SEQ ID NO: 963697 - DNA, 25 bp, Homo sapien
tagggatccatctcaacagaacgtt

SEQ ID NO: 963698 - DNA, 25 bp, Homo sapien
tcagataagctagtagatgagccat

SEQ ID NO: 963699 - DNA, 25 bp, Homo sapien
ggctaagtgctgaaatcgggtacat

SEQ ID NO: 963700 - DNA, 25 bp, Homo sapien
taataatcaccactaatgctcctgc

SEQ ID NO: 963701 - DNA, 25 bp, Homo sapien
gtagcaggctattcctaaggtgaaa

SEQ ID NO: 963702 - DNA, 25 bp, Homo sapien
gaactgaaaacatacgctggcaatt

SEQ ID NO: 963703 - DNA, 25 bp, Homo sapien
caagacagataggtcccataagata

SEQ ID NO: 963704 - DNA, 25 bp, Homo sapien
cagccagattacacctagttgagaa

SEQ ID NO: 963705 - DNA, 25 bp, Homo sapien
aataaaatgatagccaccccaaggt

SEQ ID NO: 963706 - DNA, 25 bp, Homo sapien
catagcacctggccgccaatggctt

SEQ ID NO: 963707 - DNA, 25 bp, Homo sapien
agattcctgtcatattgagagacga

SEQ ID NO: 963708 - DNA, 25 bp, Homo sapien
tattgagagacgaaatattcaaagt

SEQ ID NO: 963709 - DNA, 25 bp, Homo sapien
ctggaatcagtaagaatggcagact

SEQ ID NO: 963710 - DNA, 25 bp, Homo sapien
gctgtctggaaattgccaggtagaa

SEQ ID NO: 963711 - DNA, 25 bp, Homo sapien
ggcagactatatattgattcccatt

SEQ ID NO: 963712 - DNA, 25 bp, Homo sapien
gctgcggtgattttagcgttcaatt

SEQ ID NO: 963713 - DNA, 25 bp, Homo sapien
aagaagatctatttcattgtctagt

SEQ ID NO: 963714 - DNA, 25 bp, Homo sapien
ttgcaggttaggttggtcagtaaaa

SEQ ID NO: 963715 - DNA, 25 bp, Homo sapien
gaagatctatttcattgtctagtat

SEQ ID NO: 963716 - DNA, 25 bp, Homo sapien
attgcaggttaggttggtcagtaaa

SEQ ID NO: 963717 - DNA, 25 bp, Homo sapien
tttattccaaaaactgagactttca

SEQ ID NO: 963718 - DNA, 25 bp, Homo sapien
ggtttcaaagggcttccataagtga

SEQ ID NO: 963719 - DNA, 25 bp, Homo sapien
ttattccaaaaactgagactttcat

SEQ ID NO: 963720 - DNA, 25 bp, Homo sapien
taagactggcaaagtcagaggacac

SEQ ID NO: 963721 - DNA, 25 bp, Homo sapien
tactgtgacgaaaaccctgttgtac

SEQ ID NO: 963722 - DNA, 25 bp, Homo sapien
aatcccaggagtcaattattggagg

SEQ ID NO: 963723 - DNA, 25 bp, Homo sapien
taggaggactttgactactgtgacg

SEQ ID NO: 963724 - DNA, 25 bp, Homo sapien
attgagaagaaagtgcctgagtaac

SEQ ID NO: 963725 - DNA, 25 bp, Homo sapien
ttgagaagaaagtgcctgagtaact

SEQ ID NO: 963726 - DNA, 25 bp, Homo sapien
tgagaagaaagtgcctgagtaactg

SEQ ID NO: 963727 - DNA, 25 bp, Homo sapien
tttgagcaagcagcctaatctggta

SEQ ID NO: 963728 - DNA, 25 bp, Homo sapien
gaaaagcctattactctgacagaat

SEQ ID NO: 963729 - DNA, 25 bp, Homo sapien
tgttgcacaaccgagagcatcagag

SEQ ID NO: 963730 - DNA, 25 bp, Homo sapien
tatatgcccacctaagagtatgtca

SEQ ID NO: 963731 - DNA, 25 bp, Homo sapien
cactctataaggtagtagtaacaca

SEQ ID NO: 963732 - DNA, 25 bp, Homo sapien
aatgatgctgactcatatattcctg

SEQ ID NO: 963733 - DNA, 25 bp, Homo sapien
ctgatatgtagccactctataaggt

SEQ ID NO: 963734 - DNA, 25 bp, Homo sapien
ctgttttgtacaagaaagatgtaaa

SEQ ID NO: 963735 - DNA, 25 bp, Homo sapien
tcttcttggccaatactttttgtag

SEQ ID NO: 963736 - DNA, 25 bp, Homo sapien
tgaaacaaatgtgagaaacaggatc

SEQ ID NO: 963737 - DNA, 25 bp, Homo sapien
gagaaacaggatctctcttcttggc

SEQ ID NO: 963738 - DNA, 25 bp, Homo sapien
tcttggccaatactttttgtagatg

SEQ ID NO: 963739 - DNA, 25 bp, Homo sapien
taaatatgatccataagtttctcca

SEQ ID NO: 963740 - DNA, 25 bp, Homo sapien
tattggtccagaatgaggcacgcaa

SEQ ID NO: 963741 - DNA, 25 bp, Homo sapien
ttctccatattggtccagaatgagg

SEQ ID NO: 963742 - DNA, 25 bp, Homo sapien
ggtccagaatgaggcacgcaaagct

SEQ ID NO: 963743 - DNA, 25 bp, Homo sapien
gggttggcatggtagatcgtccagg

SEQ ID NO: 963744 - DNA, 25 bp, Homo sapien
gttggcatggtagatcgtccaggtc

SEQ ID NO: 963745 - DNA, 25 bp, Homo sapien
ctggggttggcatggtagatcgtcc

SEQ ID NO: 963746 - DNA, 25 bp, Homo sapien
ggcatggtagatcgtccaggtcccc

SEQ ID NO: 963747 - DNA, 25 bp, Homo sapien
caatctcctgtgtagtggttgtgtt

SEQ ID NO: 963748 - DNA, 25 bp, Homo sapien
tcacactcatgaatgcgactgtcaa

SEQ ID NO: 963749 - DNA, 25 bp, Homo sapien
tggttgtgttagatactcaacagct

SEQ ID NO: 963750 - DNA, 25 bp, Homo sapien
tcaacagctgtgagccattcactct

SEQ ID NO: 963751 - DNA, 25 bp, Homo sapien
taccagttggccagttcaattcact

SEQ ID NO: 963752 - DNA, 25 bp, Homo sapien
cagtttatggatctttatctagaag

SEQ ID NO: 963753 - DNA, 25 bp, Homo sapien
cattagattgctttgaaacatgagt

SEQ ID NO: 963754 - DNA, 25 bp, Homo sapien
gtttcctctcaaccaaatgacgcta

SEQ ID NO: 963755 - DNA, 25 bp, Homo sapien
ggaaggctgagtcaaaacttttatg

SEQ ID NO: 963756 - DNA, 25 bp, Homo sapien
ccacaacactggtaatagtatcctt

SEQ ID NO: 963757 - DNA, 25 bp, Homo sapien
tgaagagctgttccgacttgagttg

SEQ ID NO: 963758 - DNA, 25 bp, Homo sapien
ttctaaagtagcacaatatccatcc

SEQ ID NO: 963759 - DNA, 25 bp, Homo sapien
aatcctaatatttatgaagaacact

SEQ ID NO: 963760 - DNA, 25 bp, Homo sapien
taataaatccataacaccatacatg

SEQ ID NO: 963761 - DNA, 25 bp, Homo sapien
cccctgggtagaatatgtatttaat

SEQ ID NO: 963762 - DNA, 25 bp, Homo sapien
gaacagtaccttaatcatgtacaat

SEQ ID NO: 963763 - DNA, 25 bp, Homo sapien
gaccagtaagagtcggtggctgtta

SEQ ID NO: 963764 - DNA, 25 bp, Homo sapien
ctgctgaccagtaagagtcggtggc

SEQ ID NO: 963765 - DNA, 25 bp, Homo sapien
cctgggctgctgaccagtaagagtc

SEQ ID NO: 963766 - DNA, 25 bp, Homo sapien
gagtcggtggctgttaggaactggg

SEQ ID NO: 963767 - DNA, 25 bp, Homo sapien
aaaataattcttagcactgcggcaa

SEQ ID NO: 963768 - DNA, 25 bp, Homo sapien
taggctttgcacactacgtatgctg

SEQ ID NO: 963769 - DNA, 25 bp, Homo sapien
tgacacatcgtaaaagaggaaaggg

SEQ ID NO: 963770 - DNA, 25 bp, Homo sapien
gaaatgccgtatggtaattgacaca

SEQ ID NO: 963771 - DNA, 25 bp, Homo sapien
gacaacggacacctttttaatatga

SEQ ID NO: 963772 - DNA, 25 bp, Homo sapien
tctctcaggctctgagtaaaatgag

SEQ ID NO: 963773 - DNA, 25 bp, Homo sapien
ccacatggcaaaaggataagcagct

SEQ ID NO: 963774 - DNA, 25 bp, Homo sapien
tcaagagagtcccaccttcatgacc

SEQ ID NO: 963775 - DNA, 25 bp, Homo sapien
tcattcatgaatgcaatagtacttc

SEQ ID NO: 963776 - DNA, 25 bp, Homo sapien
gctaagagcctataaactaagtgcg

SEQ ID NO: 963777 - DNA, 25 bp, Homo sapien
gcctataaactaagtgcgtaatcat

SEQ ID NO: 963778 - DNA, 25 bp, Homo sapien
tactgaacatctattcaggctaaga

SEQ ID NO: 963779 - DNA, 25 bp, Homo sapien
tgctgtagatgagttaacagactga

SEQ ID NO: 963780 - DNA, 25 bp, Homo sapien
gaaaaccatcgagtagtaaagacat

SEQ ID NO: 963781 - DNA, 25 bp, Homo sapien
gagttaacagactgatgggttcatt

SEQ ID NO: 963782 - DNA, 25 bp, Homo sapien
gacatgaggttgacagagtagaaaa

SEQ ID NO: 963783 - DNA, 25 bp, Homo sapien
ttcatccttacagggagacctagag

SEQ ID NO: 963784 - DNA, 25 bp, Homo sapien
gatttagaggcttaagaacagcaca

SEQ ID NO: 963785 - DNA, 25 bp, Homo sapien
cctagagttaaaacataattgacca

SEQ ID NO: 963786 - DNA, 25 bp, Homo sapien
ggtaaagaaactctaggagtactga

SEQ ID NO: 963787 - DNA, 25 bp, Homo sapien
ctctagtaggcgcttagcttgattt

SEQ ID NO: 963788 - DNA, 25 bp, Homo sapien
caaaccctgctctagtaggcgctta

SEQ ID NO: 963789 - DNA, 25 bp, Homo sapien
gtaggcgcttagcttgattttccac

SEQ ID NO: 963790 - DNA, 25 bp, Homo sapien
cctgctctagtaggcgcttagcttg

SEQ ID NO: 963791 - DNA, 25 bp, Homo sapien
attccagaaagatctattccttgag

SEQ ID NO: 963792 - DNA, 25 bp, Homo sapien
aagtcgggctcttgcaataaaaagt

SEQ ID NO: 963793 - DNA, 25 bp, Homo sapien
ttcaagtcgggctcttgcaataaaa

SEQ ID NO: 963794 - DNA, 25 bp, Homo sapien
cagaaagatctattccttgagaaag

SEQ ID NO: 963795 - DNA, 25 bp, Homo sapien
tgggaggtaatccaattatggggac

SEQ ID NO: 963796 - DNA, 25 bp, Homo sapien
cagggactacaggactgtgtctggc

SEQ ID NO: 963797 - DNA, 25 bp, Homo sapien
agtcctactgtttcaacctccagag

SEQ ID NO: 963798 - DNA, 25 bp, Homo sapien
gtcctactgtttcaacctccagagt

SEQ ID NO: 963799 - DNA, 25 bp, Homo sapien
tcctacctggaaactagattcaacg

SEQ ID NO: 963800 - DNA, 25 bp, Homo sapien
gaaactagattcaacgcctgaagat

SEQ ID NO: 963801 - DNA, 25 bp, Homo sapien
aagataaagcaatcttactgaggcc

SEQ ID NO: 963802 - DNA, 25 bp, Homo sapien
tgaagataaagcaatcttactgagg

SEQ ID NO: 963803 - DNA, 25 bp, Homo sapien
cagtctctcctacagccaaattgat

SEQ ID NO: 963804 - DNA, 25 bp, Homo sapien
caaaaatgaattagacgcctacctc

SEQ ID NO: 963805 - DNA, 25 bp, Homo sapien
tgtaaatgactttgctgacagccca

SEQ ID NO: 963806 - DNA, 25 bp, Homo sapien
tattctctaccgtcttctaggtgag

SEQ ID NO: 963807 - DNA, 25 bp, Homo sapien
aaatatatgtggataccagtctatt

SEQ ID NO: 963808 - DNA, 25 bp, Homo sapien
catgtatacgtgcacgttctccaca

SEQ ID NO: 963809 - DNA, 25 bp, Homo sapien
tgaaaacacctgcagaccatacatg

SEQ ID NO: 963810 - DNA, 25 bp, Homo sapien
actgtagtacgaaaatcaaacacca

SEQ ID NO: 963811 - DNA, 25 bp, Homo sapien
aaatcactggtaaatatgggattgc

SEQ ID NO: 963812 - DNA, 25 bp, Homo sapien
cactggtaaatatgggattgctatg

SEQ ID NO: 963813 - DNA, 25 bp, Homo sapien
caagtaggttgaaatcactggtaaa

SEQ ID NO: 963814 - DNA, 25 bp, Homo sapien
gtaaatatgggattgctatggtgcc

SEQ ID NO: 963815 - DNA, 25 bp, Homo sapien
ctctgggagttgcaggctgcaccat

SEQ ID NO: 963816 - DNA, 25 bp, Homo sapien
ggagaccccatatctactgggaaaa

SEQ ID NO: 963817 - DNA, 25 bp, Homo sapien
ggatccttgagaccagcagtttaag

SEQ ID NO: 963818 - DNA, 25 bp, Homo sapien
aaaaagccaggtactgtggtacaca

SEQ ID NO: 963819 - DNA, 25 bp, Homo sapien
aacctaaggagaccccatatctact

SEQ ID NO: 963820 - DNA, 25 bp, Homo sapien
tgtgatagcaccactgtactcctgc

SEQ ID NO: 963821 - DNA, 25 bp, Homo sapien
cctgcctgggtgatgcagcaagatt

SEQ ID NO: 963822 - DNA, 25 bp, Homo sapien
gtactcctgcctgggtgatgcagca

SEQ ID NO: 963823 - DNA, 25 bp, Homo sapien
ctgtgatagcaccactgtactcctg

SEQ ID NO: 963824 - DNA, 25 bp, Homo sapien
ggctagagaagattgtacaatacta

SEQ ID NO: 963825 - DNA, 25 bp, Homo sapien
caatactatcattaacttgacctgt

SEQ ID NO: 963826 - DNA, 25 bp, Homo sapien
tatcattaacttgacctgtttgaca

SEQ ID NO: 963827 - DNA, 25 bp, Homo sapien
cagtaaaaacattatcggtaaggct

SEQ ID NO: 963828 - DNA, 25 bp, Homo sapien
accacgtaggatggcgaattgagca

SEQ ID NO: 963829 - DNA, 25 bp, Homo sapien
caggaccacgtaggatggcgaattg

SEQ ID NO: 963830 - DNA, 25 bp, Homo sapien
cacaggaccacgtaggatggcgaat

SEQ ID NO: 963831 - DNA, 25 bp, Homo sapien
cccacaggaccacgtaggatggcga

SEQ ID NO: 963832 - DNA, 25 bp, Homo sapien
taaccaaggcactatttgagaagct

SEQ ID NO: 963833 - DNA, 25 bp, Homo sapien
tctaaaccagcccataagagccctg

SEQ ID NO: 963834 - DNA, 25 bp, Homo sapien
taaacaagagcattcgctactggtc

SEQ ID NO: 963835 - DNA, 25 bp, Homo sapien
taacaggcaggtcgttaggagactc

SEQ ID NO: 963836 - DNA, 25 bp, Homo sapien
gttagaatcatatctagtgcttagt

SEQ ID NO: 963837 - DNA, 25 bp, Homo sapien
tgcacaagtgtgagtgttactacgg

SEQ ID NO: 963838 - DNA, 25 bp, Homo sapien
tataaaggttatattaattgcacaa

SEQ ID NO: 963839 - DNA, 25 bp, Homo sapien
gctctcctaggttagtatataaagg

SEQ ID NO: 963840 - DNA, 25 bp, Homo sapien
tactcagttgcgaaagactgaaagc

SEQ ID NO: 963841 - DNA, 25 bp, Homo sapien
gaagagcaccccaactcaacaccat

SEQ ID NO: 963842 - DNA, 25 bp, Homo sapien
cacagctaacaaaatactcagttgc

SEQ ID NO: 963843 - DNA, 25 bp, Homo sapien
tataccacattaataggatgaaagg

SEQ ID NO: 963844 - DNA, 25 bp, Homo sapien
tttagtacacctatcacacaagtag

SEQ ID NO: 963845 - DNA, 25 bp, Homo sapien
gttttttatcccacattctcaatac

SEQ ID NO: 963846 - DNA, 25 bp, Homo sapien
cacaagtagtgtactttgtacctaa

SEQ ID NO: 963847 - DNA, 25 bp, Homo sapien
aagtccattttatcactctaagtct

SEQ ID NO: 963848 - DNA, 25 bp, Homo sapien
tctagttgatatgcataggggtgtt

SEQ ID NO: 963849 - DNA, 25 bp, Homo sapien
tatcagggtaataccggcttcaaag

SEQ ID NO: 963850 - DNA, 25 bp, Homo sapien
taccggcttcaaagaatgattcaga

SEQ ID NO: 963851 - DNA, 25 bp, Homo sapien
aaatgatctattgcgttctgtggca

SEQ ID NO: 963852 - DNA, 25 bp, Homo sapien
tgacgcttaatctcattcccctgtg

SEQ ID NO: 963853 - DNA, 25 bp, Homo sapien
tggccgaggaagctctcagtgaaac

SEQ ID NO: 963854 - DNA, 25 bp, Homo sapien
tagctcccttgtcaggctggcagaa

SEQ ID NO: 963855 - DNA, 25 bp, Homo sapien
ggcttcaggccaatacaggaggtgt

SEQ ID NO: 963856 - DNA, 25 bp, Homo sapien
tctacctggagatgatgtaatggac

SEQ ID NO: 963857 - DNA, 25 bp, Homo sapien
tcaggaatgggcagggccataaagc

SEQ ID NO: 963858 - DNA, 25 bp, Homo sapien
ccagctgcagtagttaacagtggta

SEQ ID NO: 963859 - DNA, 25 bp, Homo sapien
tgtgttaaactaccagggtggctgg

SEQ ID NO: 963860 - DNA, 25 bp, Homo sapien
taatgggtccctattgtatggcaag

SEQ ID NO: 963861 - DNA, 25 bp, Homo sapien
tagctacaataagaacatcagtgga

SEQ ID NO: 963862 - DNA, 25 bp, Homo sapien
caccaactgcaacatattatagaca

SEQ ID NO: 963863 - DNA, 25 bp, Homo sapien
tatacataagtgagaaacgtttgcc

SEQ ID NO: 963864 - DNA, 25 bp, Homo sapien
tattctagctattcgagatcctctg

SEQ ID NO: 963865 - DNA, 25 bp, Homo sapien
catttaggacacgaattcattctga

SEQ ID NO: 963866 - DNA, 25 bp, Homo sapien
tcaaatcaggtagggttattcctcc

SEQ ID NO: 963867 - DNA, 25 bp, Homo sapien
cactgttttgcatattgagatccaa

SEQ ID NO: 963868 - DNA, 25 bp, Homo sapien
tgcagctggttaatagtcaaaacca

SEQ ID NO: 963869 - DNA, 25 bp, Homo sapien
actttgcagctggttaatagtcaaa

SEQ ID NO: 963870 - DNA, 25 bp, Homo sapien
accatgaacattaaactcttgactg

SEQ ID NO: 963871 - DNA, 25 bp, Homo sapien
gactgtcaaggtcctgcaataaatg

SEQ ID NO: 963872 - DNA, 25 bp, Homo sapien
taatcctccgaagcaaatcacaggc

SEQ ID NO: 963873 - DNA, 25 bp, Homo sapien
gaataatcctccgaagcaaatcaca

SEQ ID NO: 963874 - DNA, 25 bp, Homo sapien
gttatctctctacttcccccttgca

SEQ ID NO: 963875 - DNA, 25 bp, Homo sapien
tcctccgaagcaaatcacaggcaac

SEQ ID NO: 963876 - DNA, 25 bp, Homo sapien
agagtagcagccaatacttaacatt

SEQ ID NO: 963877 - DNA, 25 bp, Homo sapien
gagagtagcagccaatacttaacat

SEQ ID NO: 963878 - DNA, 25 bp, Homo sapien
cagaagagagtagcagccaatactt

SEQ ID NO: 963879 - DNA, 25 bp, Homo sapien
gaagagagtagcagccaatacttaa

SEQ ID NO: 963880 - DNA, 25 bp, Homo sapien
ccttgctataagagttggtgttttg

SEQ ID NO: 963881 - DNA, 25 bp, Homo sapien
gctataagagttggtgttttgaata

SEQ ID NO: 963882 - DNA, 25 bp, Homo sapien
accatgccttgctataagagttggt

SEQ ID NO: 963883 - DNA, 25 bp, Homo sapien
taagagttggtgttttgaatagata

SEQ ID NO: 963884 - DNA, 25 bp, Homo sapien
gctagacatcttaaggctttttagt

SEQ ID NO: 963885 - DNA, 25 bp, Homo sapien
agatttgtattttttgagctagaca

SEQ ID NO: 963886 - DNA, 25 bp, Homo sapien
agttaataaacaattatacactgca

SEQ ID NO: 963887 - DNA, 25 bp, Homo sapien
tattttttgagctagacatcttaag

SEQ ID NO: 963888 - DNA, 25 bp, Homo sapien
tccaaactcatactcttaaattttg

SEQ ID NO: 963889 - DNA, 25 bp, Homo sapien
tcttaaattttgtccacttatgaaa

SEQ ID NO: 963890 - DNA, 25 bp, Homo sapien
gtcttgctagttgtgcagtccgggc

SEQ ID NO: 963891 - DNA, 25 bp, Homo sapien
caactatcttattgtatggttcaac

SEQ ID NO: 963892 - DNA, 25 bp, Homo sapien
tgcagtccgggcaactatcttattg

SEQ ID NO: 963893 - DNA, 25 bp, Homo sapien
tagttgtgcagtccgggcaactatc

SEQ ID NO: 963894 - DNA, 25 bp, Homo sapien
ggaaaagagaggagtgagaataaaa

SEQ ID NO: 963895 - DNA, 25 bp, Homo sapien
aaaagagaggagtgagaataaaatc

SEQ ID NO: 963896 - DNA, 25 bp, Homo sapien
caggaaaagagaggagtgagaataa

SEQ ID NO: 963897 - DNA, 25 bp, Homo sapien
acaggaaaagagaggagtgagaata

SEQ ID NO: 963898 - DNA, 25 bp, Homo sapien
aaagccccaattctcgtctgcatca

SEQ ID NO: 963899 - DNA, 25 bp, Homo sapien
ccaattctcgtctgcatcatctgaa

SEQ ID NO: 963900 - DNA, 25 bp, Homo sapien
acagctccctgtaaagccccaattc

SEQ ID NO: 963901 - DNA, 25 bp, Homo sapien
cctgtaaagccccaattctcgtctg

SEQ ID NO: 963902 - DNA, 25 bp, Homo sapien
tcatattctctccacaacccagtct

SEQ ID NO: 963903 - DNA, 25 bp, Homo sapien
atattctctccacaacccagtctca

SEQ ID NO: 963904 - DNA, 25 bp, Homo sapien
tattctctccacaacccagtctcaa

SEQ ID NO: 963905 - DNA, 25 bp, Homo sapien
atcatattctctccacaacccagtc

SEQ ID NO: 963906 - DNA, 25 bp, Homo sapien
ctcaatcccagttgcttgtgccagt

SEQ ID NO: 963907 - DNA, 25 bp, Homo sapien
caacgactcaatcccagttgcttgt

SEQ ID NO: 963908 - DNA, 25 bp, Homo sapien
gttgcttgtgccagtaaatcttcat

SEQ ID NO: 963909 - DNA, 25 bp, Homo sapien
ttccaacgactcaatcccagttgct

SEQ ID NO: 963910 - DNA, 25 bp, Homo sapien
gtttcagctagtaataaaggtcctg

SEQ ID NO: 963911 - DNA, 25 bp, Homo sapien
tgtttcagctagtaataaaggtcct

SEQ ID NO: 963912 - DNA, 25 bp, Homo sapien
tttcagctagtaataaaggtcctga

SEQ ID NO: 963913 - DNA, 25 bp, Homo sapien
tctttacatcaaagtcttcgtttaa

SEQ ID NO: 963914 - DNA, 25 bp, Homo sapien
ctgtccaactgactgattccttggg

SEQ ID NO: 963915 - DNA, 25 bp, Homo sapien
tttgctagttgttcagcaattacag

SEQ ID NO: 963916 - DNA, 25 bp, Homo sapien
tacagcttgatgaatagattgagaa

SEQ ID NO: 963917 - DNA, 25 bp, Homo sapien
aagcctatcaatccgatactctgtc

SEQ ID NO: 963918 - DNA, 25 bp, Homo sapien
agcctatcaatccgatactctgtca

SEQ ID NO: 963919 - DNA, 25 bp, Homo sapien
gcctatcaatccgatactctgtcat

SEQ ID NO: 963920 - DNA, 25 bp, Homo sapien
caagcctatcaatccgatactctgt

SEQ ID NO: 963921 - DNA, 25 bp, Homo sapien
gctgccaacgcggtccacagggttt

SEQ ID NO: 963922 - DNA, 25 bp, Homo sapien
tacaccccttcgtcaagaactgcgg

SEQ ID NO: 963923 - DNA, 25 bp, Homo sapien
tcgtcaagaactgcggcagcagccg

SEQ ID NO: 963924 - DNA, 25 bp, Homo sapien
tgccaacgcggtccacagggtttgg

SEQ ID NO: 963925 - DNA, 25 bp, Homo sapien
gagcctcgagctccgaggccagcta

SEQ ID NO: 963926 - DNA, 25 bp, Homo sapien
cagaagttcccggactgtagctgca

SEQ ID NO: 963927 - DNA, 25 bp, Homo sapien
gaggccagctacagcgacgctgccg

SEQ ID NO: 963928 - DNA, 25 bp, Homo sapien
ttcccggactgtagctgcagccgct

SEQ ID NO: 963929 - DNA, 25 bp, Homo sapien
tggtgacgcagaatcccggcgccgc

SEQ ID NO: 963930 - DNA, 25 bp, Homo sapien
cgggttgatgtcgtcagcagcagaa

SEQ ID NO: 963931 - DNA, 25 bp, Homo sapien
agcagaacggctccgcccaggtggt

SEQ ID NO: 963932 - DNA, 25 bp, Homo sapien
acggctccgcccaggtggtgacgca

SEQ ID NO: 963933 - DNA, 25 bp, Homo sapien
gctaagcctggctaggagccgcgca

SEQ ID NO: 963934 - DNA, 25 bp, Homo sapien
gtcgggccggcgctttcagctgtct

SEQ ID NO: 963935 - DNA, 25 bp, Homo sapien
gccgcagcgcttatctgtgaagcaa

SEQ ID NO: 963936 - DNA, 25 bp, Homo sapien
tgggctggcgtcgtgccctagccaa

SEQ ID NO: 963937 - DNA, 25 bp, Homo sapien
gccaaaacatagaagcactaggtct

SEQ ID NO: 963938 - DNA, 25 bp, Homo sapien
taaatttgaggtcttgtgtaggaac

SEQ ID NO: 963939 - DNA, 25 bp, Homo sapien
cctttgttgtcaatagtgaaatagc

SEQ ID NO: 963940 - DNA, 25 bp, Homo sapien
tcatctgtgacagtactttcatggg

SEQ ID NO: 963941 - DNA, 25 bp, Homo sapien
ccattttagtcagttaatgttagca

SEQ ID NO: 963942 - DNA, 25 bp, Homo sapien
taatgttagcattaagatttgtgtg

SEQ ID NO: 963943 - DNA, 25 bp, Homo sapien
aatgttagcattaagatttgtgtgc

SEQ ID NO: 963944 - DNA, 25 bp, Homo sapien
tgaaataccattttagtcagttaat

SEQ ID NO: 963945 - DNA, 25 bp, Homo sapien
tagtgaaagaatatccccataccca

SEQ ID NO: 963946 - DNA, 25 bp, Homo sapien
gtgacatacagttgatcctaggttc

SEQ ID NO: 963947 - DNA, 25 bp, Homo sapien
tacacgcacagtttgaaaagctgga

SEQ ID NO: 963948 - DNA, 25 bp, Homo sapien
gaacgcctacggaatatgttgtgac

SEQ ID NO: 963949 - DNA, 25 bp, Homo sapien
ttgccaataaacgtggtcgcgccgc

SEQ ID NO: 963950 - DNA, 25 bp, Homo sapien
tcctcctgaagaagttgcgctccga

SEQ ID NO: 963951 - DNA, 25 bp, Homo sapien
tgacctgccgccaattagaaaacaa

SEQ ID NO: 963952 - DNA, 25 bp, Homo sapien
aagcgcgttcgctgaatttgcacca

SEQ ID NO: 963953 - DNA, 25 bp, Homo sapien
tgcagtaatatcaccctagcacaga

SEQ ID NO: 963954 - DNA, 25 bp, Homo sapien
cattgcatttagtggaaaaaccttc

SEQ ID NO: 963955 - DNA, 25 bp, Homo sapien
aaaaaccttctgatgtccaaagaga

SEQ ID NO: 963956 - DNA, 25 bp, Homo sapien
agtaatatcaccctagcacagacat

SEQ ID NO: 963957 - DNA, 25 bp, Homo sapien
actgagtgtaaagacctattatggg

SEQ ID NO: 963958 - DNA, 25 bp, Homo sapien
aagtaattcagtcgttgtaaagtca

SEQ ID NO: 963959 - DNA, 25 bp, Homo sapien
ttatgggtacctaagtattagcagc

SEQ ID NO: 963960 - DNA, 25 bp, Homo sapien
taaaaagtgtgcctcttgaggataa

SEQ ID NO: 963961 - DNA, 25 bp, Homo sapien
catgcgcagctaagttgggtatttt

SEQ ID NO: 963962 - DNA, 25 bp, Homo sapien
gatagttacagatcctctatggtaa

SEQ ID NO: 963963 - DNA, 25 bp, Homo sapien
gcttgagaagcaaaagatagttaca

SEQ ID NO: 963964 - DNA, 25 bp, Homo sapien
gtgctttaatgttcgtctgagccct

SEQ ID NO: 963965 - DNA, 25 bp, Homo sapien
ttcccttggttgtgagagtaactaa

SEQ ID NO: 963966 - DNA, 25 bp, Homo sapien
tagtaaccactctactgtttcaagt

SEQ ID NO: 963967 - DNA, 25 bp, Homo sapien
tataactgctataccactgaactga

SEQ ID NO: 963968 - DNA, 25 bp, Homo sapien
tacatacactggtatcacacagtct

SEQ ID NO: 963969 - DNA, 25 bp, Homo sapien
ttgcagtgtattagccggctgtggc

SEQ ID NO: 963970 - DNA, 25 bp, Homo sapien
tgatagttagattcagggccaggct

SEQ ID NO: 963971 - DNA, 25 bp, Homo sapien
gggccaggctgtaagtctagaattt

SEQ ID NO: 963972 - DNA, 25 bp, Homo sapien
gataccgctcttctggttatacaca

SEQ ID NO: 963973 - DNA, 25 bp, Homo sapien
ctaggctttgtcgcctgtggctccc

SEQ ID NO: 963974 - DNA, 25 bp, Homo sapien
taggctttgtcgcctgtggctccca

SEQ ID NO: 963975 - DNA, 25 bp, Homo sapien
aggctttgtcgcctgtggctcccag

SEQ ID NO: 963976 - DNA, 25 bp, Homo sapien
aataatctgaatggaggcggcaaac

SEQ ID NO: 963977 - DNA, 25 bp, Homo sapien
tgttgcttagcttcgggtcaccagc

SEQ ID NO: 963978 - DNA, 25 bp, Homo sapien
taaagagtctctcagataggaggtg

SEQ ID NO: 963979 - DNA, 25 bp, Homo sapien
gaagacccgcaggatccttgtgcct

SEQ ID NO: 963980 - DNA, 25 bp, Homo sapien
cagcccctaggggtgtccacaacca

SEQ ID NO: 963981 - DNA, 25 bp, Homo sapien
ttgcacactgctccggggacacatg

SEQ ID NO: 963982 - DNA, 25 bp, Homo sapien
ttccctgtaaatggaaatgtgctct

SEQ ID NO: 963983 - DNA, 25 bp, Homo sapien
gtgttctgttccctgtaaatggaaa

SEQ ID NO: 963984 - DNA, 25 bp, Homo sapien
gacagaagcttgattgagtcttcaa

SEQ ID NO: 963985 - DNA, 25 bp, Homo sapien
tggcatgtggccaaaggtggctgga

SEQ ID NO: 963986 - DNA, 25 bp, Homo sapien
gagtccagtgggcacaagcaagctg

SEQ ID NO: 963987 - DNA, 25 bp, Homo sapien
gctggattgtgtcatagccctcaga

SEQ ID NO: 963988 - DNA, 25 bp, Homo sapien
gcgtcacaccactcttgaatgcatc

SEQ ID NO: 963989 - DNA, 25 bp, Homo sapien
gtcacaccactcttgaatgcatcca

SEQ ID NO: 963990 - DNA, 25 bp, Homo sapien
cttggctttggtgctacttgtgtcc

SEQ ID NO: 963991 - DNA, 25 bp, Homo sapien
ttgtgtccttcagccatacctgggc

SEQ ID NO: 963992 - DNA, 25 bp, Homo sapien
taatgccagctacttcagggactga

SEQ ID NO: 963993 - DNA, 25 bp, Homo sapien
tgccattattggctcgacatagtgg

SEQ ID NO: 963994 - DNA, 25 bp, Homo sapien
aatgccagctacttcagggactgag

SEQ ID NO: 963995 - DNA, 25 bp, Homo sapien
tattggctcgacatagtggcacagg

SEQ ID NO: 963996 - DNA, 25 bp, Homo sapien
tgtagcacacgtagtcactcaaaag

SEQ ID NO: 963997 - DNA, 25 bp, Homo sapien
gcccaataagttgctcagagaagaa

SEQ ID NO: 963998 - DNA, 25 bp, Homo sapien
tatactatttatgtccctagggagc

SEQ ID NO: 963999 - DNA, 25 bp, Homo sapien
tcaaaagcatagatactctgtcagg

SEQ ID NO: 964000 - DNA, 25 bp, Homo sapien
gatgaggtaggatagctccagctcc

SEQ ID NO: 964001 - DNA, 25 bp, Homo sapien
tagcatctccctaggtgtgacaacc

SEQ ID NO: 964002 - DNA, 25 bp, Homo sapien
caagggagtttgtcttacactgcaa

SEQ ID NO: 964003 - DNA, 25 bp, Homo sapien
ggttgccttataaagcccaagtgag

SEQ ID NO: 964004 - DNA, 25 bp, Homo sapien
ggtgagttcgccctgaagatgccca

SEQ ID NO: 964005 - DNA, 25 bp, Homo sapien
cgaacaggctgctcggaaaacagga

SEQ ID NO: 964006 - DNA, 25 bp, Homo sapien
gagatttcagaacgcggacagcgcc

SEQ ID NO: 964007 - DNA, 25 bp, Homo sapien
tcgcaacccttgagattagtaacgg

SEQ ID NO: 964008 - DNA, 25 bp, Homo sapien
agctacatggtgtcgcggccggtct

SEQ ID NO: 964009 - DNA, 25 bp, Homo sapien
caggcggcaggtcggagccgccgca

SEQ ID NO: 964010 - DNA, 25 bp, Homo sapien
ggccggtctacagcgagctcgcttt

SEQ ID NO: 964011 - DNA, 25 bp, Homo sapien
gcagctccccgagtacagctgcagc

SEQ ID NO: 964012 - DNA, 25 bp, Homo sapien
tgggatcagcaacatcttctcagga

SEQ ID NO: 964013 - DNA, 25 bp, Homo sapien
tacttcctgaaatactcagcgaagg

SEQ ID NO: 964014 - DNA, 25 bp, Homo sapien
cagcgaaggtcttgcaaagattcaa

SEQ ID NO: 964015 - DNA, 25 bp, Homo sapien
ttgtaggatcgttgtcatccagtct

SEQ ID NO: 964016 - DNA, 25 bp, Homo sapien
cactctcctggcatgagtttggcag

SEQ ID NO: 964017 - DNA, 25 bp, Homo sapien
catataattggcaagtaggtggcca

SEQ ID NO: 964018 - DNA, 25 bp, Homo sapien
tatagtggccaaaatgagccttggc

SEQ ID NO: 964019 - DNA, 25 bp, Homo sapien
cctcccataattggagactcattat

SEQ ID NO: 964020 - DNA, 25 bp, Homo sapien
gcaatgcctgaaagtaagagatgtc

SEQ ID NO: 964021 - DNA, 25 bp, Homo sapien
tcttgatgcaccataaaatgccaac

SEQ ID NO: 964022 - DNA, 25 bp, Homo sapien
gggtaaatacagaccacagatgcta

SEQ ID NO: 964023 - DNA, 25 bp, Homo sapien
aattcaaggcaaccacaattaaggg

SEQ ID NO: 964024 - DNA, 25 bp, Homo sapien
taacacatcgctacacatactttat

SEQ ID NO: 964025 - DNA, 25 bp, Homo sapien
tttgcaattcagtaccatgaaaaca

SEQ ID NO: 964026 - DNA, 25 bp, Homo sapien
aacacatcgctacacatactttatt

SEQ ID NO: 964027 - DNA, 25 bp, Homo sapien
attcagtaccatgaaaacatttctc

SEQ ID NO: 964028 - DNA, 25 bp, Homo sapien
ttcgagaggttcgtagcgtcacaag

SEQ ID NO: 964029 - DNA, 25 bp, Homo sapien
ccaagaactggaactaggtactgct

SEQ ID NO: 964030 - DNA, 25 bp, Homo sapien
aatgatgtcgtcaccaagggaggac

SEQ ID NO: 964031 - DNA, 25 bp, Homo sapien
caaatgagccaagtccgcaaggtgg

SEQ ID NO: 964032 - DNA, 25 bp, Homo sapien
gagtggcagtcaagcattataaacg

SEQ ID NO: 964033 - DNA, 25 bp, Homo sapien
ctagaaagtgagtggcagtcaagca

SEQ ID NO: 964034 - DNA, 25 bp, Homo sapien
gcattataaacgtgtttcaactgta

SEQ ID NO: 964035 - DNA, 25 bp, Homo sapien
ttaagagatgggaaccggggcatat

SEQ ID NO: 964036 - DNA, 25 bp, Homo sapien
caagttagctctgcgtgggtctagg

SEQ ID NO: 964037 - DNA, 25 bp, Homo sapien
gggtctaggtagctcgtcacgacaa

SEQ ID NO: 964038 - DNA, 25 bp, Homo sapien
tccggagcgcgcgtgtttacacttt

SEQ ID NO: 964039 - DNA, 25 bp, Homo sapien
tgagactttccttctagctccgagt

SEQ ID NO: 964040 - DNA, 25 bp, Homo sapien
ggtggggccagcgcaacggccgagc

SEQ ID NO: 964041 - DNA, 25 bp, Homo sapien
gggtggggccagcgcaacggccgag

SEQ ID NO: 964042 - DNA, 25 bp, Homo sapien
aataccgaagttcttcgcgcgctcg

SEQ ID NO: 964043 - DNA, 25 bp, Homo sapien
gaagccttagcaacctcaataccga

SEQ ID NO: 964044 - DNA, 25 bp, Homo sapien
tcttgaagcacatgaggagaagcct

SEQ ID NO: 964045 - DNA, 25 bp, Homo sapien
gagtccctcacaggagttggatagt

SEQ ID NO: 964046 - DNA, 25 bp, Homo sapien
cggcctccggaaggcagtgcgcacg

SEQ ID NO: 964047 - DNA, 25 bp, Homo sapien
tcccggcctccggaaggcagtgcgc

SEQ ID NO: 964048 - DNA, 25 bp, Homo sapien
tccggaaggcagtgcgcacgcgctc

SEQ ID NO: 964049 - DNA, 25 bp, Homo sapien
gcctccggaaggcagtgcgcacgcg

SEQ ID NO: 964050 - DNA, 25 bp, Homo sapien
ggcaacaaccgctcctactctggtt

SEQ ID NO: 964051 - DNA, 25 bp, Homo sapien
ctccgagcccggaccagtgggcgat

SEQ ID NO: 964052 - DNA, 25 bp, Homo sapien
tccgagtcgcggaatcctctttacg

SEQ ID NO: 964053 - DNA, 25 bp, Homo sapien
cctacgttatggagactggcgggta

SEQ ID NO: 964054 - DNA, 25 bp, Homo sapien
ttactgtaggtacttggactggtgc

SEQ ID NO: 964055 - DNA, 25 bp, Homo sapien
ggtacttggactggtgcaaacttga

SEQ ID NO: 964056 - DNA, 25 bp, Homo sapien
ggactggtgcaaacttgattccttt

SEQ ID NO: 964057 - DNA, 25 bp, Homo sapien
tgtaggtacttggactggtgcaaac

SEQ ID NO: 964058 - DNA, 25 bp, Homo sapien
tgtcatagtcagatgaagatccttc

SEQ ID NO: 964059 - DNA, 25 bp, Homo sapien
gtggcgccactatactgctaaacct

SEQ ID NO: 964060 - DNA, 25 bp, Homo sapien
tatgagattcaaaacagtggcgcca

SEQ ID NO: 964061 - DNA, 25 bp, Homo sapien
ggatggaaatctgtcagtgctacaa

SEQ ID NO: 964062 - DNA, 25 bp, Homo sapien
gaattggcaactcactctagtaagg

SEQ ID NO: 964063 - DNA, 25 bp, Homo sapien
cattgcttgactgggcactgtgcta

SEQ ID NO: 964064 - DNA, 25 bp, Homo sapien
ttacagggccagaataagagcattg

SEQ ID NO: 964065 - DNA, 25 bp, Homo sapien
tctacaatgaaatgggactctccag

SEQ ID NO: 964066 - DNA, 25 bp, Homo sapien
ctcatatacccgattacgtaatcct

SEQ ID NO: 964067 - DNA, 25 bp, Homo sapien
atatacccgattacgtaatcctcca

SEQ ID NO: 964068 - DNA, 25 bp, Homo sapien
tacgtaatcctccatttgtatttat

SEQ ID NO: 964069 - DNA, 25 bp, Homo sapien
catatacccgattacgtaatcctcc

SEQ ID NO: 964070 - DNA, 25 bp, Homo sapien
aaatattgagcttttcacttcacca

SEQ ID NO: 964071 - DNA, 25 bp, Homo sapien
tgactgggattaaactttgaagtac

SEQ ID NO: 964072 - DNA, 25 bp, Homo sapien
aaattcataccggttaagcttctca

SEQ ID NO: 964073 - DNA, 25 bp, Homo sapien
gcaaaacagcatcatggattgttaa

SEQ ID NO: 964074 - DNA, 25 bp, Homo sapien
tccaacgatatacacatctaccttg

SEQ ID NO: 964075 - DNA, 25 bp, Homo sapien
cacatctaccttgatcctgataaat

SEQ ID NO: 964076 - DNA, 25 bp, Homo sapien
ccttgatcctgataaattcttgcaa

SEQ ID NO: 964077 - DNA, 25 bp, Homo sapien
catcagttccaacgatatacacatc

SEQ ID NO: 964078 - DNA, 25 bp, Homo sapien
ctgctgaaaagtcaagaatgaggct

SEQ ID NO: 964079 - DNA, 25 bp, Homo sapien
gctgaaaagtcaagaatgaggctgt

SEQ ID NO: 964080 - DNA, 25 bp, Homo sapien
tgctgaaaagtcaagaatgaggctg

SEQ ID NO: 964081 - DNA, 25 bp, Homo sapien
ctgaaaagtcaagaatgaggctgtg

SEQ ID NO: 964082 - DNA, 25 bp, Homo sapien
ctcaatgttgagaggaagatcatca

SEQ ID NO: 964083 - DNA, 25 bp, Homo sapien
cattccagtcaatgtggaaaggcag

SEQ ID NO: 964084 - DNA, 25 bp, Homo sapien
tgttgtccagctcttcgtcagaatc

SEQ ID NO: 964085 - DNA, 25 bp, Homo sapien
gctggtccagtacttctatctgatt

SEQ ID NO: 964086 - DNA, 25 bp, Homo sapien
tggtgtcacttgtagcaagccttgc

SEQ ID NO: 964087 - DNA, 25 bp, Homo sapien
tcctcaaagctttgttgcgcttgcg

SEQ ID NO: 964088 - DNA, 25 bp, Homo sapien
tagaattcgaagtggactaaagcca

SEQ ID NO: 964089 - DNA, 25 bp, Homo sapien
tgcagttttcggattttcctcaaag

SEQ ID NO: 964090 - DNA, 25 bp, Homo sapien
catctgttctgggacgtgggacaaa

SEQ ID NO: 964091 - DNA, 25 bp, Homo sapien
tgtttctgaagttgatgcccaaaga

SEQ ID NO: 964092 - DNA, 25 bp, Homo sapien
gatgtggtcaaatattaaatgctcc

SEQ ID NO: 964093 - DNA, 25 bp, Homo sapien
taaaagctagcagcccaaaacttgg

SEQ ID NO: 964094 - DNA, 25 bp, Homo sapien
gataggagatggacatctgaaaatt

SEQ ID NO: 964095 - DNA, 25 bp, Homo sapien
ataggagatggacatctgaaaattt

SEQ ID NO: 964096 - DNA, 25 bp, Homo sapien
tccaatattagccagcgtgctgcat

SEQ ID NO: 964097 - DNA, 25 bp, Homo sapien
tcttccaatattagccagcgtgctg

SEQ ID NO: 964098 - DNA, 25 bp, Homo sapien
gttcttccaatattagccagcgtgc

SEQ ID NO: 964099 - DNA, 25 bp, Homo sapien
atattagccagcgtgctgcattttg

SEQ ID NO: 964100 - DNA, 25 bp, Homo sapien
cgatggttagcagttgaaatgccac

SEQ ID NO: 964101 - DNA, 25 bp, Homo sapien
attgggtcctgaacacgatggttag

SEQ ID NO: 964102 - DNA, 25 bp, Homo sapien
actagctgccaggcctaacccgagt

SEQ ID NO: 964103 - DNA, 25 bp, Homo sapien
cgagtcccaggacaatggtgaagat

SEQ ID NO: 964104 - DNA, 25 bp, Homo sapien
gtcctttcgccacaatctgcctatt

SEQ ID NO: 964105 - DNA, 25 bp, Homo sapien
ctatttcagcaaactgcatcagcat

SEQ ID NO: 964106 - DNA, 25 bp, Homo sapien
tcagcattccctttaagtttcccaa

SEQ ID NO: 964107 - DNA, 25 bp, Homo sapien
ccaatgctaaagctgccaggacgga

SEQ ID NO: 964108 - DNA, 25 bp, Homo sapien
ttgtagaggcgccaggagaaatcca

SEQ ID NO: 964109 - DNA, 25 bp, Homo sapien
gatgatggcaccaataagcccagca

SEQ ID NO: 964110 - DNA, 25 bp, Homo sapien
gagaaatccaatggctagaacgaca

SEQ ID NO: 964111 - DNA, 25 bp, Homo sapien
gctagaacgacaatcagcacgatga

SEQ ID NO: 964112 - DNA, 25 bp, Homo sapien
tgtgctctcctgaactgctgatctg

SEQ ID NO: 964113 - DNA, 25 bp, Homo sapien
tgctgatctggagagggcagtactc

SEQ ID NO: 964114 - DNA, 25 bp, Homo sapien
cctctgaatactccacagactatgt

SEQ ID NO: 964115 - DNA, 25 bp, Homo sapien
gaatactccacagactatgttaccc

SEQ ID NO: 964116 - DNA, 25 bp, Homo sapien
gccatcaagtggataatcgtatttg

SEQ ID NO: 964117 - DNA, 25 bp, Homo sapien
gatgccgaagcaatctcctacggtg

SEQ ID NO: 964118 - DNA, 25 bp, Homo sapien
tggaaagtctccacgtcaggtgtaa

SEQ ID NO: 964119 - DNA, 25 bp, Homo sapien
tagacgctggcaactgaaaaggcca

SEQ ID NO: 964120 - DNA, 25 bp, Homo sapien
ctgtttttaaagtcacagccgtagg

SEQ ID NO: 964121 - DNA, 25 bp, Homo sapien
aagtcacagccgtaggatacacctg

SEQ ID NO: 964122 - DNA, 25 bp, Homo sapien
aggatacacctgctgcaatcacggt

SEQ ID NO: 964123 - DNA, 25 bp, Homo sapien
ccaggattcatgtccccaaccacag

SEQ ID NO: 964124 - DNA, 25 bp, Homo sapien
cactatccttgtctcacgtggaaaa

SEQ ID NO: 964125 - DNA, 25 bp, Homo sapien
taaaacttcctgagctacaaatggt

SEQ ID NO: 964126 - DNA, 25 bp, Homo sapien
agagatggcctctgccccactaaaa

SEQ ID NO: 964127 - DNA, 25 bp, Homo sapien
cagtagagtagctatgacagagtct

SEQ ID NO: 964128 - DNA, 25 bp, Homo sapien
tttgtgagaatacagagtatagtac

SEQ ID NO: 964129 - DNA, 25 bp, Homo sapien
caggtctgcaatattagtcttctct

SEQ ID NO: 964130 - DNA, 25 bp, Homo sapien
gaagtttgtctttgaagcgctgatt

SEQ ID NO: 964131 - DNA, 25 bp, Homo sapien
taatgaattcgattggaatgggcac

SEQ ID NO: 964132 - DNA, 25 bp, Homo sapien
ttgaaactggatcagtgtgtgacgg

SEQ ID NO: 964133 - DNA, 25 bp, Homo sapien
tatcactacaaatccaatccgcaga

SEQ ID NO: 964134 - DNA, 25 bp, Homo sapien
tgagggactcagacaggtatatcac

SEQ ID NO: 964135 - DNA, 25 bp, Homo sapien
tgtgtgacgggactgtcaactgaaa

SEQ ID NO: 964136 - DNA, 25 bp, Homo sapien
cgagttgttaggcaatcccaaagta

SEQ ID NO: 964137 - DNA, 25 bp, Homo sapien
tagttgcattgcgatctgggactgc

SEQ ID NO: 964138 - DNA, 25 bp, Homo sapien
ccaccatcatactcagaatcggaaa

SEQ ID NO: 964139 - DNA, 25 bp, Homo sapien
cctctcgtcatccagtagtgaagaa

SEQ ID NO: 964140 - DNA, 25 bp, Homo sapien
tggaagtgccgaagaaaaggtagat

SEQ ID NO: 964141 - DNA, 25 bp, Homo sapien
ccacggatatgtgtctggaagtgcc

SEQ ID NO: 964142 - DNA, 25 bp, Homo sapien
gggaatgtcgaccagcagagcaaat

SEQ ID NO: 964143 - DNA, 25 bp, Homo sapien
ggatgcatacaacccatagactggg

SEQ ID NO: 964144 - DNA, 25 bp, Homo sapien
tgagcaaccattctttaagccggta

SEQ ID NO: 964145 - DNA, 25 bp, Homo sapien
ttgtagtacggccacaatccctgtg

SEQ ID NO: 964146 - DNA, 25 bp, Homo sapien
taagccggtatgctggcaaccaaga

SEQ ID NO: 964147 - DNA, 25 bp, Homo sapien
cctgtgctgataccagaaacaatat

SEQ ID NO: 964148 - DNA, 25 bp, Homo sapien
gggaacaaagagaggacaattctct

SEQ ID NO: 964149 - DNA, 25 bp, Homo sapien
ttctcttggccttttgtggggaaca

SEQ ID NO: 964150 - DNA, 25 bp, Homo sapien
ggacaattctcttggccttttgtgg

SEQ ID NO: 964151 - DNA, 25 bp, Homo sapien
gaacaaagagaggacaattctcttg

SEQ ID NO: 964152 - DNA, 25 bp, Homo sapien
cagaaatgtcttatgatgtcttcct

SEQ ID NO: 964153 - DNA, 25 bp, Homo sapien
tgtcttatgatgtcttcctgtcttt

SEQ ID NO: 964154 - DNA, 25 bp, Homo sapien
ctacaacacactttgagatgatcca

SEQ ID NO: 964155 - DNA, 25 bp, Homo sapien
tacaacacactttgagatgatccag

SEQ ID NO: 964156 - DNA, 25 bp, Homo sapien
aatatactgattcccaaagggttca

SEQ ID NO: 964157 - DNA, 25 bp, Homo sapien
cactggcctggccacaatatactga

SEQ ID NO: 964158 - DNA, 25 bp, Homo sapien
tgtagaatacactggcctggccaca

SEQ ID NO: 964159 - DNA, 25 bp, Homo sapien
ggccacaatatactgattcccaaag

SEQ ID NO: 964160 - DNA, 25 bp, Homo sapien
gatttttctgttggctgtggcaagt

SEQ ID NO: 964161 - DNA, 25 bp, Homo sapien
tgaagacctttgcaactatgtggtg

SEQ ID NO: 964162 - DNA, 25 bp, Homo sapien
tgcaactatgtggtgaacacttctt

SEQ ID NO: 964163 - DNA, 25 bp, Homo sapien
gctgtggcaagttgaagacctttgc

SEQ ID NO: 964164 - DNA, 25 bp, Homo sapien
gctgtcctgccagtaaaagcctcct

SEQ ID NO: 964165 - DNA, 25 bp, Homo sapien
tctgaggatggctatggctgtctct

SEQ ID NO: 964166 - DNA, 25 bp, Homo sapien
tggctgtcctgccagtaaaagcctc

SEQ ID NO: 964167 - DNA, 25 bp, Homo sapien
tctttagtgggctttcttatacctc

SEQ ID NO: 964168 - DNA, 25 bp, Homo sapien
ccagaggtaagccagccctatttca

SEQ ID NO: 964169 - DNA, 25 bp, Homo sapien
catgaattagtccttggacaatggg

SEQ ID NO: 964170 - DNA, 25 bp, Homo sapien
cagcgtcctgataactatacttggg

SEQ ID NO: 964171 - DNA, 25 bp, Homo sapien
ggaacaagcagaataattgctccag

SEQ ID NO: 964172 - DNA, 25 bp, Homo sapien
tcagatttgagtggagaattaaagg

SEQ ID NO: 964173 - DNA, 25 bp, Homo sapien
gatgcctacaaccatttacttgtta

SEQ ID NO: 964174 - DNA, 25 bp, Homo sapien
gctagcgctccagacatacatgcat

SEQ ID NO: 964175 - DNA, 25 bp, Homo sapien
tgaaaaggctatttaagacttaatg

SEQ ID NO: 964176 - DNA, 25 bp, Homo sapien
tgaggagcttctgcaacagtggtac

SEQ ID NO: 964177 - DNA, 25 bp, Homo sapien
tgcaacagtggtacattttcaagat

SEQ ID NO: 964178 - DNA, 25 bp, Homo sapien
gagcttctgcaacagtggtacattt

SEQ ID NO: 964179 - DNA, 25 bp, Homo sapien
agataaagttctaagttctagttct

SEQ ID NO: 964180 - DNA, 25 bp, Homo sapien
cacggccatcattgcttctgtctgc

SEQ ID NO: 964181 - DNA, 25 bp, Homo sapien
cacattgtccttgaacacggccatc

SEQ ID NO: 964182 - DNA, 25 bp, Homo sapien
cctgtatgccttcatcatggtgaca

SEQ ID NO: 964183 - DNA, 25 bp, Homo sapien
accaatgctgccgttgtagccatca

SEQ ID NO: 964184 - DNA, 25 bp, Homo sapien
ttttttagcttgtcgcactttatcc

SEQ ID NO: 964185 - DNA, 25 bp, Homo sapien
tcaaaccccttaacatccatccttg

SEQ ID NO: 964186 - DNA, 25 bp, Homo sapien
cacagtcaaaccccttaacatccat

SEQ ID NO: 964187 - DNA, 25 bp, Homo sapien
cagtcaaaccccttaacatccatcc

SEQ ID NO: 964188 - DNA, 25 bp, Homo sapien
tcccacagtcaaaccccttaacatc

SEQ ID NO: 964189 - DNA, 25 bp, Homo sapien
ctggtgatatcattcaggaaggtca

SEQ ID NO: 964190 - DNA, 25 bp, Homo sapien
tggtgatatcattcaggaaggtcag

SEQ ID NO: 964191 - DNA, 25 bp, Homo sapien
ctcccagtataaatcaaccgccaac

SEQ ID NO: 964192 - DNA, 25 bp, Homo sapien
acaccacactcctcccagtataaat

SEQ ID NO: 964193 - DNA, 25 bp, Homo sapien
accacaccacactcctcccagtata

SEQ ID NO: 964194 - DNA, 25 bp, Homo sapien
ctcctcccagtataaatcaaccgcc

SEQ ID NO: 964195 - DNA, 25 bp, Homo sapien
atagaggtttttggatcaccccagg

SEQ ID NO: 964196 - DNA, 25 bp, Homo sapien
gagccccgtgcttggaaatgtactg

SEQ ID NO: 964197 - DNA, 25 bp, Homo sapien
catttcccagtaacatagaggtttt

SEQ ID NO: 964198 - DNA, 25 bp, Homo sapien
gcccccagatcttgggtgcatctgt

SEQ ID NO: 964199 - DNA, 25 bp, Homo sapien
gaaccgtacaagaatcaccctcact

SEQ ID NO: 964200 - DNA, 25 bp, Homo sapien
gaaacgtctggcatcctttgctgtc

SEQ ID NO: 964201 - DNA, 25 bp, Homo sapien
caccctcacttattgagatgctgtt

SEQ ID NO: 964202 - DNA, 25 bp, Homo sapien
gaattccagacgttaacaaacgcag

SEQ ID NO: 964203 - DNA, 25 bp, Homo sapien
ctctcataatccatgctccagtcaa

SEQ ID NO: 964204 - DNA, 25 bp, Homo sapien
agtcaaagtgagttattgtcctcat

SEQ ID NO: 964205 - DNA, 25 bp, Homo sapien
ttcctcttcagttatctccctctca

SEQ ID NO: 964206 - DNA, 25 bp, Homo sapien
tccatgctccagtcaaagtgagtta

SEQ ID NO: 964207 - DNA, 25 bp, Homo sapien
caggctctcggtgagaaaacctcat

SEQ ID NO: 964208 - DNA, 25 bp, Homo sapien
ctggagcaggctctcggtgagaaaa

SEQ ID NO: 964209 - DNA, 25 bp, Homo sapien
ggagcaggctctcggtgagaaaacc

SEQ ID NO: 964210 - DNA, 25 bp, Homo sapien
cactcctgacttcttgtctgctctc

SEQ ID NO: 964211 - DNA, 25 bp, Homo sapien
ccctggaataagcaccgaatggttt

SEQ ID NO: 964212 - DNA, 25 bp, Homo sapien
gatgcttgttggcagcaggtacctg

SEQ ID NO: 964213 - DNA, 25 bp, Homo sapien
catattctgagtgcagaaaccccgg

SEQ ID NO: 964214 - DNA, 25 bp, Homo sapien
tgtagaaacgctctcatattggccc

SEQ ID NO: 964215 - DNA, 25 bp, Homo sapien
ctgctcccgggtgatgacgtaggct

SEQ ID NO: 964216 - DNA, 25 bp, Homo sapien
cgtgtgtactgctccttggccaagg

SEQ ID NO: 964217 - DNA, 25 bp, Homo sapien
gacaggaacgcctcgtgcggtagaa

SEQ ID NO: 964218 - DNA, 25 bp, Homo sapien
cattgtagctcgacattttggcacc

SEQ ID NO: 964219 - DNA, 25 bp, Homo sapien
caagtcatgcttttagggagcggcg

SEQ ID NO: 964220 - DNA, 25 bp, Homo sapien
ttatgcagtgggcaggtaaccctgg

SEQ ID NO: 964221 - DNA, 25 bp, Homo sapien
gtgtaagccacccatgtcccgtata

SEQ ID NO: 964222 - DNA, 25 bp, Homo sapien
gaatggtttagatccagtcagctcc

SEQ ID NO: 964223 - DNA, 25 bp, Homo sapien
tcaatgcccctgaatttaaatagct

SEQ ID NO: 964224 - DNA, 25 bp, Homo sapien
aaagctacttattgtagcatcctgg

SEQ ID NO: 964225 - DNA, 25 bp, Homo sapien
cctggaatatctccgtcaactcata

SEQ ID NO: 964226 - DNA, 25 bp, Homo sapien
ctaatgtgtaagacaaaaagctact

SEQ ID NO: 964227 - DNA, 25 bp, Homo sapien
gctcatgagtgacataatgaccctg

SEQ ID NO: 964228 - DNA, 25 bp, Homo sapien
caaagtactaaatgctaagtaggct

SEQ ID NO: 964229 - DNA, 25 bp, Homo sapien
ttttccttggctgggttaatgactg

SEQ ID NO: 964230 - DNA, 25 bp, Homo sapien
gaggcagttaacttggctgaacacc

SEQ ID NO: 964231 - DNA, 25 bp, Homo sapien
aaaaagggattcatcaacaatcagt

SEQ ID NO: 964232 - DNA, 25 bp, Homo sapien
aaaaaagggattcatcaacaatcag

SEQ ID NO: 964233 - DNA, 25 bp, Homo sapien
atcaacaatcagtgaaagtaacaag

SEQ ID NO: 964234 - DNA, 25 bp, Homo sapien
aacaatcagtgaaagtaacaagtac

SEQ ID NO: 964235 - DNA, 25 bp, Homo sapien
atttaactccatacaaaatgtgatt

SEQ ID NO: 964236 - DNA, 25 bp, Homo sapien
tatttaactccatacaaaatgtgat

SEQ ID NO: 964237 - DNA, 25 bp, Homo sapien
ttatttaactccatacaaaatgtga

SEQ ID NO: 964238 - DNA, 25 bp, Homo sapien
gttttaccttgttcacctcagccat

SEQ ID NO: 964239 - DNA, 25 bp, Homo sapien
tagttgttttaccttgttcacctca

SEQ ID NO: 964240 - DNA, 25 bp, Homo sapien
taggtgatgttttattttgaagagc

SEQ ID NO: 964241 - DNA, 25 bp, Homo sapien
gttgttttaccttgttcacctcagc

SEQ ID NO: 964242 - DNA, 25 bp, Homo sapien
taggagtgaacggacttctccttcc

SEQ ID NO: 964243 - DNA, 25 bp, Homo sapien
tccttccagtcttgctaattcttga

SEQ ID NO: 964244 - DNA, 25 bp, Homo sapien
tgtgctatacacagcaactttctgg

SEQ ID NO: 964245 - DNA, 25 bp, Homo sapien
cttatatcctttaggagtgaacgga

SEQ ID NO: 964246 - DNA, 25 bp, Homo sapien
tgcttgagctaaaagagtttttgct

SEQ ID NO: 964247 - DNA, 25 bp, Homo sapien
ctttgagcagttgcagcttgctatt

SEQ ID NO: 964248 - DNA, 25 bp, Homo sapien
agcatttcggctttccttctggcat

SEQ ID NO: 964249 - DNA, 25 bp, Homo sapien
gtagcatttcggctttccttctggc

SEQ ID NO: 964250 - DNA, 25 bp, Homo sapien
tatagttccacatttagacagaaag

SEQ ID NO: 964251 - DNA, 25 bp, Homo sapien
catttagacagaaagaagtggtaat

SEQ ID NO: 964252 - DNA, 25 bp, Homo sapien
ttagacagaaagaagtggtaatgtt

SEQ ID NO: 964253 - DNA, 25 bp, Homo sapien
ccacatttagacagaaagaagtggt

SEQ ID NO: 964254 - DNA, 25 bp, Homo sapien
tagagaagcccatattgaagaagtg

SEQ ID NO: 964255 - DNA, 25 bp, Homo sapien
catgcattctggattaagggccacc

SEQ ID NO: 964256 - DNA, 25 bp, Homo sapien
gagttgcagcaaatccttagggcta

SEQ ID NO: 964257 - DNA, 25 bp, Homo sapien
catagagaagcgcagatttttcaaa

SEQ ID NO: 964258 - DNA, 25 bp, Homo sapien
ttttcaatatattctgcctccccgg

SEQ ID NO: 964259 - DNA, 25 bp, Homo sapien
cattcctctctaactcgctgatgcg

SEQ ID NO: 964260 - DNA, 25 bp, Homo sapien
tgcctccccggagttttgggcagct

SEQ ID NO: 964261 - DNA, 25 bp, Homo sapien
cacattcctctctaactcgctgatg

SEQ ID NO: 964262 - DNA, 25 bp, Homo sapien
ttgaacaaggtttcctcagaagctg

SEQ ID NO: 964263 - DNA, 25 bp, Homo sapien
ggacgcgttgaacaaggtttcctca

SEQ ID NO: 964264 - DNA, 25 bp, Homo sapien
gaacaaggtttcctcagaagctgct

SEQ ID NO: 964265 - DNA, 25 bp, Homo sapien
cgcgttgaacaaggtttcctcagaa

SEQ ID NO: 964266 - DNA, 25 bp, Homo sapien
gctaattactgaagacatggagact

SEQ ID NO: 964267 - DNA, 25 bp, Homo sapien
tatggtctgggaacgttacagctgt

SEQ ID NO: 964268 - DNA, 25 bp, Homo sapien
cagttgagcccatgacaaaagaatc

SEQ ID NO: 964269 - DNA, 25 bp, Homo sapien
tggtgaggatccacatctgatctcc

SEQ ID NO: 964270 - DNA, 25 bp, Homo sapien
catgcccgcccaagaatagaagttt

SEQ ID NO: 964271 - DNA, 25 bp, Homo sapien
acgtaatggtccagtgtctgaatca

SEQ ID NO: 964272 - DNA, 25 bp, Homo sapien
tcatgtaatgattgtgtatgcctac

SEQ ID NO: 964273 - DNA, 25 bp, Homo sapien
catccatgctaacggagtagtttag

SEQ ID NO: 964274 - DNA, 25 bp, Homo sapien
cttctctgctgcgacctgggccttt

SEQ ID NO: 964275 - DNA, 25 bp, Homo sapien
ctctgctgcgacctgggccttttct

SEQ ID NO: 964276 - DNA, 25 bp, Homo sapien
tgccttctctgctgcgacctgggcc

SEQ ID NO: 964277 - DNA, 25 bp, Homo sapien
ttctctgctgcgacctgggcctttt

SEQ ID NO: 964278 - DNA, 25 bp, Homo sapien
aataagccccttagatgccatgtct

SEQ ID NO: 964279 - DNA, 25 bp, Homo sapien
gacagtatattgttgctgaacatga

SEQ ID NO: 964280 - DNA, 25 bp, Homo sapien
tactttttactccatgatagataca

SEQ ID NO: 964281 - DNA, 25 bp, Homo sapien
gactcgcataggtccttcttagaag

SEQ ID NO: 964282 - DNA, 25 bp, Homo sapien
tgctcttttagcttcttctaacaac

SEQ ID NO: 964283 - DNA, 25 bp, Homo sapien
ttgctcttttagcttcttctaacaa

SEQ ID NO: 964284 - DNA, 25 bp, Homo sapien
cttgctcttttagcttcttctaaca

SEQ ID NO: 964285 - DNA, 25 bp, Homo sapien
tagcaactgcttcaatgctgtccaa

SEQ ID NO: 964286 - DNA, 25 bp, Homo sapien
cagcactatgctgaagaataacctc

SEQ ID NO: 964287 - DNA, 25 bp, Homo sapien
aaaggctttcaactcgttcacgtat

SEQ ID NO: 964288 - DNA, 25 bp, Homo sapien
gaataacctctacttgagaaaggct

SEQ ID NO: 964289 - DNA, 25 bp, Homo sapien
gggagatgagacctacacacacaaa

SEQ ID NO: 964290 - DNA, 25 bp, Homo sapien
catctactatggactagcatggtgg

SEQ ID NO: 964291 - DNA, 25 bp, Homo sapien
tgcagacaattgagtactactagaa

SEQ ID NO: 964292 - DNA, 25 bp, Homo sapien
gagacactaacttcctgtttaagag

SEQ ID NO: 964293 - DNA, 25 bp, Homo sapien
gacaggaacggcagagtatgttacg

SEQ ID NO: 964294 - DNA, 25 bp, Homo sapien
gaaaaccatagagggccagagctta

SEQ ID NO: 964295 - DNA, 25 bp, Homo sapien
ttaattgaggttggacgaatagctc

SEQ ID NO: 964296 - DNA, 25 bp, Homo sapien
taagcttcaaatacgtcagatcctc

SEQ ID NO: 964297 - DNA, 25 bp, Homo sapien
gatgcaaggaataggtggtctcttc

SEQ ID NO: 964298 - DNA, 25 bp, Homo sapien
gacccaggaagctatcctgctactg

SEQ ID NO: 964299 - DNA, 25 bp, Homo sapien
tgaaaagtatgtgggtcgcagaccc

SEQ ID NO: 964300 - DNA, 25 bp, Homo sapien
gaactttggcagctaccttgtaacc

SEQ ID NO: 964301 - DNA, 25 bp, Homo sapien
tcttcaacagaatgtcttcagcact

SEQ ID NO: 964302 - DNA, 25 bp, Homo sapien
tttggtagcatttgtcttcaacaga

SEQ ID NO: 964303 - DNA, 25 bp, Homo sapien
gctcctcattgctcttgtccatttt

SEQ ID NO: 964304 - DNA, 25 bp, Homo sapien
gatttgcttgattagatttctcagc

SEQ ID NO: 964305 - DNA, 25 bp, Homo sapien
tatagagtttttgtcatacagctgg

SEQ ID NO: 964306 - DNA, 25 bp, Homo sapien
tggaatcatatgtctgggaaacaac

SEQ ID NO: 964307 - DNA, 25 bp, Homo sapien
taaccctggagtcagaaaagtaaga

SEQ ID NO: 964308 - DNA, 25 bp, Homo sapien
tgcaagtattcagtatagagattcc

SEQ ID NO: 964309 - DNA, 25 bp, Homo sapien
cattcagtctcggaacaggaggccc

SEQ ID NO: 964310 - DNA, 25 bp, Homo sapien
ccatggctttctgccaggcgttgtg

SEQ ID NO: 964311 - DNA, 25 bp, Homo sapien
tgtgtgcaacagtaaccagaccacc

SEQ ID NO: 964312 - DNA, 25 bp, Homo sapien
agttctgcagtttggcccgccacat

SEQ ID NO: 964313 - DNA, 25 bp, Homo sapien
tcaggcacaatacttcggatagtga

SEQ ID NO: 964314 - DNA, 25 bp, Homo sapien
ctgcaacaagccaaggatcaggcac

SEQ ID NO: 964315 - DNA, 25 bp, Homo sapien
tacttcggatagtgaatctgctgca

SEQ ID NO: 964316 - DNA, 25 bp, Homo sapien
caagccaaggatcaggcacaatact

SEQ ID NO: 964317 - DNA, 25 bp, Homo sapien
gaatgtgtaggtggtcctcagcaag

SEQ ID NO: 964318 - DNA, 25 bp, Homo sapien
gagaatgtgtaggtggtcctcagca

SEQ ID NO: 964319 - DNA, 25 bp, Homo sapien
agagaatgtgtaggtggtcctcagc

SEQ ID NO: 964320 - DNA, 25 bp, Homo sapien
agaatgtgtaggtggtcctcagcaa

SEQ ID NO: 964321 - DNA, 25 bp, Homo sapien
caatggaagtttacaactcatcaat

SEQ ID NO: 964322 - DNA, 25 bp, Homo sapien
aacaatggaagtttacaactcatca

SEQ ID NO: 964323 - DNA, 25 bp, Homo sapien
tgcttatttccaaggaaacaatgga

SEQ ID NO: 964324 - DNA, 25 bp, Homo sapien
acctgcttatttccaaggaaacaat

SEQ ID NO: 964325 - DNA, 25 bp, Homo sapien
cataagtgtaaaacctcggttgctt

SEQ ID NO: 964326 - DNA, 25 bp, Homo sapien
ggctgagcagggagaaaattgcatt

SEQ ID NO: 964327 - DNA, 25 bp, Homo sapien
tattctgcatgctgtaaaacatgag

SEQ ID NO: 964328 - DNA, 25 bp, Homo sapien
tctgacagcacacatagaagatctg

SEQ ID NO: 964329 - DNA, 25 bp, Homo sapien
aatttacacattgctctaagccttc

SEQ ID NO: 964330 - DNA, 25 bp, Homo sapien
tgtctcctgttagctgcaatttaca

SEQ ID NO: 964331 - DNA, 25 bp, Homo sapien
catgcttcataactttgtctcctgt

SEQ ID NO: 964332 - DNA, 25 bp, Homo sapien
aggaaggaatcaatgctgaagggaa

SEQ ID NO: 964333 - DNA, 25 bp, Homo sapien
gaaggctggaaacccatatgctgct

SEQ ID NO: 964334 - DNA, 25 bp, Homo sapien
tctgggctaagagaacacaaacctt

SEQ ID NO: 964335 - DNA, 25 bp, Homo sapien
ggaagccccttctagaatgactctg

SEQ ID NO: 964336 - DNA, 25 bp, Homo sapien
taatgagtatgaaacctagcaggca

SEQ ID NO: 964337 - DNA, 25 bp, Homo sapien
tttgcttggcaccatagcagtaagg

SEQ ID NO: 964338 - DNA, 25 bp, Homo sapien
ttgcttggcaccatagcagtaaggc

SEQ ID NO: 964339 - DNA, 25 bp, Homo sapien
gttcatcaaggaggcgagcctgctc

SEQ ID NO: 964340 - DNA, 25 bp, Homo sapien
tttcggcagcggctgaaaggtctag

SEQ ID NO: 964341 - DNA, 25 bp, Homo sapien
gctttgtagcttgcctgccagttca

SEQ ID NO: 964342 - DNA, 25 bp, Homo sapien
tctcatgagggctgactgctccaca

SEQ ID NO: 964343 - DNA, 25 bp, Homo sapien
tttgtcccattagcacctactccag

SEQ ID NO: 964344 - DNA, 25 bp, Homo sapien
taacctcatcatactaggcttcctc

SEQ ID NO: 964345 - DNA, 25 bp, Homo sapien
gaatatgttttgtcccattagcacc

SEQ ID NO: 964346 - DNA, 25 bp, Homo sapien
caagcagtgtctatatttggtgtct

SEQ ID NO: 964347 - DNA, 25 bp, Homo sapien
ggatccactcaaatgactaatatag

SEQ ID NO: 964348 - DNA, 25 bp, Homo sapien
tatttgtaggttccacatatgtgga

SEQ ID NO: 964349 - DNA, 25 bp, Homo sapien
aactgtggatggaaagcatttggaa

SEQ ID NO: 964350 - DNA, 25 bp, Homo sapien
actaatatagtagccctccatattt

SEQ ID NO: 964351 - DNA, 25 bp, Homo sapien
cacagtgttgtctaggctttcggct

SEQ ID NO: 964352 - DNA, 25 bp, Homo sapien
gttgtctaggctttcggcttctgtc

SEQ ID NO: 964353 - DNA, 25 bp, Homo sapien
ggaagttgtgtcagataatttcact

SEQ ID NO: 964354 - DNA, 25 bp, Homo sapien
ctacttgagccatcatttctgtaac

SEQ ID NO: 964355 - DNA, 25 bp, Homo sapien
cctgttggtcagctcggcaatgatc

SEQ ID NO: 964356 - DNA, 25 bp, Homo sapien
gagtccacagtctcacggtaaggcc

SEQ ID NO: 964357 - DNA, 25 bp, Homo sapien
tgcacttgtcacagcgtggaccctc

SEQ ID NO: 964358 - DNA, 25 bp, Homo sapien
tggtcacactgtggcgtctcaatgc

SEQ ID NO: 964359 - DNA, 25 bp, Homo sapien
cacagatgtgggaactcagagatca

SEQ ID NO: 964360 - DNA, 25 bp, Homo sapien
gagactgtagcagcttcctctagca

SEQ ID NO: 964361 - DNA, 25 bp, Homo sapien
catgaacctcagtgacaagatgtgg

SEQ ID NO: 964362 - DNA, 25 bp, Homo sapien
tgaccaatggctcaggtagagactg

SEQ ID NO: 964363 - DNA, 25 bp, Homo sapien
tcctgataatgtgccacctggcatc

SEQ ID NO: 964364 - DNA, 25 bp, Homo sapien
agctctttacgtacctgactctatc

SEQ ID NO: 964365 - DNA, 25 bp, Homo sapien
gtacaaacaatccaggttacatcct

SEQ ID NO: 964366 - DNA, 25 bp, Homo sapien
catcggatacatcacaaatgagaag

SEQ ID NO: 964367 - DNA, 25 bp, Homo sapien
tcctttcaacccagaggtgtgtgtt

SEQ ID NO: 964368 - DNA, 25 bp, Homo sapien
gaaccagttatactgagggtcctga

SEQ ID NO: 964369 - DNA, 25 bp, Homo sapien
tgagccactcttgggtcaatagctg

SEQ ID NO: 964370 - DNA, 25 bp, Homo sapien
tgagatctgctataacatcaccatc

SEQ ID NO: 964371 - DNA, 25 bp, Homo sapien
agcattatggttaagagcatgaact

SEQ ID NO: 964372 - DNA, 25 bp, Homo sapien
ttatgtgaccctgggtaatcaggaa

SEQ ID NO: 964373 - DNA, 25 bp, Homo sapien
ccttctccacacatgttatgtgacc

SEQ ID NO: 964374 - DNA, 25 bp, Homo sapien
cggactgaggtggtaaatcctgcct

SEQ ID NO: 964375 - DNA, 25 bp, Homo sapien
acatgtaatttccttagcgcctggg

SEQ ID NO: 964376 - DNA, 25 bp, Homo sapien
ttttcgtgtccctacaagtgtctgg

SEQ ID NO: 964377 - DNA, 25 bp, Homo sapien
gaagtcaatgccagtgacacccaag

SEQ ID NO: 964378 - DNA, 25 bp, Homo sapien
gaagagcatctggtctatagcaagc

SEQ ID NO: 964379 - DNA, 25 bp, Homo sapien
tttatctggccgagggaaattagcc

SEQ ID NO: 964380 - DNA, 25 bp, Homo sapien
gggtaagagttccaatgagctagca

SEQ ID NO: 964381 - DNA, 25 bp, Homo sapien
tgagctagcagagcttcggctctct

SEQ ID NO: 964382 - DNA, 25 bp, Homo sapien
tctctccagaagtcaacaaccagtt

SEQ ID NO: 964383 - DNA, 25 bp, Homo sapien
cttcctgtgcccactgaacaaagtc

SEQ ID NO: 964384 - DNA, 25 bp, Homo sapien
tcctgtgcccactgaacaaagtcta

SEQ ID NO: 964385 - DNA, 25 bp, Homo sapien
acaaagtctacccttaatggcccag

SEQ ID NO: 964386 - DNA, 25 bp, Homo sapien
ttaatggcccagcaccgaaggcttc

SEQ ID NO: 964387 - DNA, 25 bp, Homo sapien
gcgccatctcacctgattaattttc

SEQ ID NO: 964388 - DNA, 25 bp, Homo sapien
gtgcgccatctcacctgattaattt

SEQ ID NO: 964389 - DNA, 25 bp, Homo sapien
ccatctcacctgattaattttcgta

SEQ ID NO: 964390 - DNA, 25 bp, Homo sapien
gtgtgcgccatctcacctgattaat

SEQ ID NO: 964391 - DNA, 25 bp, Homo sapien
ttcctccattaactaaatttctatg

SEQ ID NO: 964392 - DNA, 25 bp, Homo sapien
tgctgccctcgtgccaccgggattg

SEQ ID NO: 964393 - DNA, 25 bp, Homo sapien
cgggattggccagcataataggcaa

SEQ ID NO: 964394 - DNA, 25 bp, Homo sapien
gccagcataataggcaaaccataaa

SEQ ID NO: 964395 - DNA, 25 bp, Homo sapien
caggatctaacttttgacccaaaca

SEQ ID NO: 964396 - DNA, 25 bp, Homo sapien
aaagaagttggcgaacaatgatgcc

SEQ ID NO: 964397 - DNA, 25 bp, Homo sapien
cttttgacccaaacaagttgacaag

SEQ ID NO: 964398 - DNA, 25 bp, Homo sapien
gaacaatgatgccatgaatctcact

SEQ ID NO: 964399 - DNA, 25 bp, Homo sapien
taagaggtccatacaaacccttctg

SEQ ID NO: 964400 - DNA, 25 bp, Homo sapien
tttctgctgttaaggaacacatggg

SEQ ID NO: 964401 - DNA, 25 bp, Homo sapien
ggtttgcaccctgaaggaacacagt

SEQ ID NO: 964402 - DNA, 25 bp, Homo sapien
cctgaccttctgtaggagatattga

SEQ ID NO: 964403 - DNA, 25 bp, Homo sapien
tctctgatcaagtcaatgcgagaac

SEQ ID NO: 964404 - DNA, 25 bp, Homo sapien
agaaggctcttgtagaaccccagtt

SEQ ID NO: 964405 - DNA, 25 bp, Homo sapien
gaaggctcttgtagaaccccagttc

SEQ ID NO: 964406 - DNA, 25 bp, Homo sapien
caagtcaatgcgagaacgcccacaa

SEQ ID NO: 964407 - DNA, 25 bp, Homo sapien
ggcactccacgtcggggtctcccca

SEQ ID NO: 964408 - DNA, 25 bp, Homo sapien
ctcggcactccacgtcggggtctcc

SEQ ID NO: 964409 - DNA, 25 bp, Homo sapien
cactccacgtcggggtctccccaga

SEQ ID NO: 964410 - DNA, 25 bp, Homo sapien
tcggcactccacgtcggggtctccc

SEQ ID NO: 964411 - DNA, 25 bp, Homo sapien
ggcatgcactggcactgccccgtga

SEQ ID NO: 964412 - DNA, 25 bp, Homo sapien
tcgctgcaggtgcggcctccaaacc

SEQ ID NO: 964413 - DNA, 25 bp, Homo sapien
gcatgcactggcactgccccgtgaa

SEQ ID NO: 964414 - DNA, 25 bp, Homo sapien
gctgcaggtgcggcctccaaaccca

SEQ ID NO: 964415 - DNA, 25 bp, Homo sapien
tcaatcgtaggtgtcgagagcccca

SEQ ID NO: 964416 - DNA, 25 bp, Homo sapien
gcatctaagtgctcttttgcaacag

SEQ ID NO: 964417 - DNA, 25 bp, Homo sapien
agaaggtctccattgactaggaaaa

SEQ ID NO: 964418 - DNA, 25 bp, Homo sapien
cttcaatcgtaggtgtcgagagccc

SEQ ID NO: 964419 - DNA, 25 bp, Homo sapien
gcacggtgcccaggtaattacagac

SEQ ID NO: 964420 - DNA, 25 bp, Homo sapien
caagatggcccgaaggaatgagcag

SEQ ID NO: 964421 - DNA, 25 bp, Homo sapien
tggctttgtcgcactggcagtcaga

SEQ ID NO: 964422 - DNA, 25 bp, Homo sapien
agttctgcccgatcacattaggaag

SEQ ID NO: 964423 - DNA, 25 bp, Homo sapien
tgggcagagcataccatcagtaccc

SEQ ID NO: 964424 - DNA, 25 bp, Homo sapien
taataaacgtgttggacatagcagg

SEQ ID NO: 964425 - DNA, 25 bp, Homo sapien
gaaatgctagttgatctcggtaaga

SEQ ID NO: 964426 - DNA, 25 bp, Homo sapien
tcaaactcttggcagagaacagccg

SEQ ID NO: 964427 - DNA, 25 bp, Homo sapien
gaactgacagtgttccccttccgtg

SEQ ID NO: 964428 - DNA, 25 bp, Homo sapien
tatccaaaccggcagaactgacagt

SEQ ID NO: 964429 - DNA, 25 bp, Homo sapien
tgctggagggcatcaccatagtatc

SEQ ID NO: 964430 - DNA, 25 bp, Homo sapien
cccttccgtgtggtacaggcacttg

SEQ ID NO: 964431 - DNA, 25 bp, Homo sapien
atgttgttgtgacactggcaaggct

SEQ ID NO: 964432 - DNA, 25 bp, Homo sapien
gaggcacagtcgtcacatctggaac

SEQ ID NO: 964433 - DNA, 25 bp, Homo sapien
gcttctgggtctgtcgtgtcaatgt

SEQ ID NO: 964434 - DNA, 25 bp, Homo sapien
tggattgccaaagtatcctgaggca

SEQ ID NO: 964435 - DNA, 25 bp, Homo sapien
agagctgatcgtggcggtgcttcat

SEQ ID NO: 964436 - DNA, 25 bp, Homo sapien
cagtgcaccgacactcatgcctaga

SEQ ID NO: 964437 - DNA, 25 bp, Homo sapien
actcatgcctagagagagctgatcg

SEQ ID NO: 964438 - DNA, 25 bp, Homo sapien
gatcgtggcggtgcttcatcttcac

SEQ ID NO: 964439 - DNA, 25 bp, Homo sapien
tttaaagagcccagggtgatcacat

SEQ ID NO: 964440 - DNA, 25 bp, Homo sapien
ctgtttaaagagcccagggtgatca

SEQ ID NO: 964441 - DNA, 25 bp, Homo sapien
gtttaaagagcccagggtgatcaca

SEQ ID NO: 964442 - DNA, 25 bp, Homo sapien
tgtttaaagagcccagggtgatcac

SEQ ID NO: 964443 - DNA, 25 bp, Homo sapien
aaactggcgtccactgtcgggacca

SEQ ID NO: 964444 - DNA, 25 bp, Homo sapien
gtaaagtaacaggatcttggtagca

SEQ ID NO: 964445 - DNA, 25 bp, Homo sapien
ctcctggcaaactggcgtccactgt

SEQ ID NO: 964446 - DNA, 25 bp, Homo sapien
aagtaacaggatcttggtagcagct

SEQ ID NO: 964447 - DNA, 25 bp, Homo sapien
caatgatggggtcgccatagtaacc

SEQ ID NO: 964448 - DNA, 25 bp, Homo sapien
gtcgccatagtaaccagccaagcac

SEQ ID NO: 964449 - DNA, 25 bp, Homo sapien
gatggggtcgccatagtaaccagcc

SEQ ID NO: 964450 - DNA, 25 bp, Homo sapien
tcctgacccaatgatggggtcgcca

SEQ ID NO: 964451 - DNA, 25 bp, Homo sapien
cactggccagtgacgggattgcaga

SEQ ID NO: 964452 - DNA, 25 bp, Homo sapien
tatgacccatggtgtagtcctggca

SEQ ID NO: 964453 - DNA, 25 bp, Homo sapien
aggtaagcaccgatcacactgccga

SEQ ID NO: 964454 - DNA, 25 bp, Homo sapien
cagtcactgggtcgcagtcatcggc

SEQ ID NO: 964455 - DNA, 25 bp, Homo sapien
tgtccccaattcagaatgctcatgg

SEQ ID NO: 964456 - DNA, 25 bp, Homo sapien
gctctgcagcaatggaaccctgcca

SEQ ID NO: 964457 - DNA, 25 bp, Homo sapien
cttttataagcaccctgtccccaat

SEQ ID NO: 964458 - DNA, 25 bp, Homo sapien
ctcattcaatggaaacatgctcctt

SEQ ID NO: 964459 - DNA, 25 bp, Homo sapien
caaagccaaaagttccaggtgcaca

SEQ ID NO: 964460 - DNA, 25 bp, Homo sapien
gaaccctgagggtcgcattcacaag

SEQ ID NO: 964461 - DNA, 25 bp, Homo sapien
ttgggatcacacacggaacttaacg

SEQ ID NO: 964462 - DNA, 25 bp, Homo sapien
tggcactggcctccgttgggatcac

SEQ ID NO: 964463 - DNA, 25 bp, Homo sapien
ggtgttttcacaacgcttctgctgt

SEQ ID NO: 964464 - DNA, 25 bp, Homo sapien
tcctgaacctcccacggtgaagatg

SEQ ID NO: 964465 - DNA, 25 bp, Homo sapien
caggcctgtctggtgtaacagggca

SEQ ID NO: 964466 - DNA, 25 bp, Homo sapien
tgttggtgaccaccccatctcctga

SEQ ID NO: 964467 - DNA, 25 bp, Homo sapien
tccaacctcaccgtgtagtttgttc

SEQ ID NO: 964468 - DNA, 25 bp, Homo sapien
agctccaacctcaccgtgtagtttg

SEQ ID NO: 964469 - DNA, 25 bp, Homo sapien
gaatcgatcagcgtgtaggggctct

SEQ ID NO: 964470 - DNA, 25 bp, Homo sapien
ggctctccacgtcgctatcagagga

SEQ ID NO: 964471 - DNA, 25 bp, Homo sapien
tgtgatgacagctttttcccagtgg

SEQ ID NO: 964472 - DNA, 25 bp, Homo sapien
ggtgataatgacaccacctggttgt

SEQ ID NO: 964473 - DNA, 25 bp, Homo sapien
gaatccttccaggtcgctgcactgt

SEQ ID NO: 964474 - DNA, 25 bp, Homo sapien
catcggctgctggttggaatccttc

SEQ ID NO: 964475 - DNA, 25 bp, Homo sapien
aaataagccccttcaggcactcgga

SEQ ID NO: 964476 - DNA, 25 bp, Homo sapien
gaattaggatgtcgtactccatgga

SEQ ID NO: 964477 - DNA, 25 bp, Homo sapien
gatatattgccgctccactatgcta

SEQ ID NO: 964478 - DNA, 25 bp, Homo sapien
gctccagtccaggagggaatccggt

SEQ ID NO: 964479 - DNA, 25 bp, Homo sapien
gacgtccaatcatgtgaggccggca

SEQ ID NO: 964480 - DNA, 25 bp, Homo sapien
gatccagggtggcaaagtagtaacc

SEQ ID NO: 964481 - DNA, 25 bp, Homo sapien
aagttggcttcctccgcttcataga

SEQ ID NO: 964482 - DNA, 25 bp, Homo sapien
agtaaccaggttccacttcgttgca

SEQ ID NO: 964483 - DNA, 25 bp, Homo sapien
gtcacagtcacatggtcgacatcca

SEQ ID NO: 964484 - DNA, 25 bp, Homo sapien
catccaaatcattgcttaagcccca

SEQ ID NO: 964485 - DNA, 25 bp, Homo sapien
acatggtcgacatccatccaaatca

SEQ ID NO: 964486 - DNA, 25 bp, Homo sapien
atccatccaaatcattgcttaagcc

SEQ ID NO: 964487 - DNA, 25 bp, Homo sapien
taagagagccgttcacaatcacagg

SEQ ID NO: 964488 - DNA, 25 bp, Homo sapien
acctgagctgtaggcactggcgtaa

SEQ ID NO: 964489 - DNA, 25 bp, Homo sapien
taaagcttgtttcggctgttccacc

SEQ ID NO: 964490 - DNA, 25 bp, Homo sapien
atcacaggatcgtgccaggtcaaag

SEQ ID NO: 964491 - DNA, 25 bp, Homo sapien
tcccacgtaatgaggatttacttac

SEQ ID NO: 964492 - DNA, 25 bp, Homo sapien
cacccatcccacgtaatgaggattt

SEQ ID NO: 964493 - DNA, 25 bp, Homo sapien
cccatcccacgtaatgaggatttac

SEQ ID NO: 964494 - DNA, 25 bp, Homo sapien
aaccacccatcccacgtaatgagga

SEQ ID NO: 964495 - DNA, 25 bp, Homo sapien
gacctgtctcggaatcacaaggatt

SEQ ID NO: 964496 - DNA, 25 bp, Homo sapien
caccagacgcttgcagtagcagtga

SEQ ID NO: 964497 - DNA, 25 bp, Homo sapien
tgctgtcctgtcaccagacgcttgc

SEQ ID NO: 964498 - DNA, 25 bp, Homo sapien
gttcccagaggattgcaagcacaag

SEQ ID NO: 964499 - DNA, 25 bp, Homo sapien
tcagtatagctgtcacaaattccct

SEQ ID NO: 964500 - DNA, 25 bp, Homo sapien
tttacaccgacactggccagcaatg

SEQ ID NO: 964501 - DNA, 25 bp, Homo sapien
agagccagctgggtcacacgtacat

SEQ ID NO: 964502 - DNA, 25 bp, Homo sapien
gccagcaatgagaccagtagaaaaa

SEQ ID NO: 964503 - DNA, 25 bp, Homo sapien
ttccccgtggccaggtaaacagcca

SEQ ID NO: 964504 - DNA, 25 bp, Homo sapien
cagaaattaggatctcggatgtccc

SEQ ID NO: 964505 - DNA, 25 bp, Homo sapien
tagtaaaacggcttgcactgctcac

SEQ ID NO: 964506 - DNA, 25 bp, Homo sapien
acagttgcgccccatggtgttgtgc

SEQ ID NO: 964507 - DNA, 25 bp, Homo sapien
caggcgttgctgtttcggccttcag

SEQ ID NO: 964508 - DNA, 25 bp, Homo sapien
tggtgttatgcctgcacatgcagtg

SEQ ID NO: 964509 - DNA, 25 bp, Homo sapien
gctgtttcggccttcagcaggtctc

SEQ ID NO: 964510 - DNA, 25 bp, Homo sapien
gcccttggtgttatgcctgcacatg

SEQ ID NO: 964511 - DNA, 25 bp, Homo sapien
atgcagttagcagaagactaaagtc

SEQ ID NO: 964512 - DNA, 25 bp, Homo sapien
ttcaggaacaggacagacaggtccc

SEQ ID NO: 964513 - DNA, 25 bp, Homo sapien
cctggacccaccttggtgggaatgc

SEQ ID NO: 964514 - DNA, 25 bp, Homo sapien
attcaggaacaggacagacaggtcc

SEQ ID NO: 964515 - DNA, 25 bp, Homo sapien
gaatccagaaggttatctcccaaag

SEQ ID NO: 964516 - DNA, 25 bp, Homo sapien
ttcttcattgaatccatccacaggg

SEQ ID NO: 964517 - DNA, 25 bp, Homo sapien
gggcacattcgctggcatgaccata

SEQ ID NO: 964518 - DNA, 25 bp, Homo sapien
gaccatagcagaagcaatttcctcg

SEQ ID NO: 964519 - DNA, 25 bp, Homo sapien
ctttcattccaacatttggaactag

SEQ ID NO: 964520 - DNA, 25 bp, Homo sapien
tttcattccaacatttggaactagt

SEQ ID NO: 964521 - DNA, 25 bp, Homo sapien
ttcattccaacatttggaactagtc

SEQ ID NO: 964522 - DNA, 25 bp, Homo sapien
ccatacatgcctcccaagaagatta

SEQ ID NO: 964523 - DNA, 25 bp, Homo sapien
atacatgcctcccaagaagattaaa

SEQ ID NO: 964524 - DNA, 25 bp, Homo sapien
ttaccatacatgcctcccaagaaga

SEQ ID NO: 964525 - DNA, 25 bp, Homo sapien
aataagagcagttgttgaatgtggt

SEQ ID NO: 964526 - DNA, 25 bp, Homo sapien
tggaatttgcttgcctcgtcttccc

SEQ ID NO: 964527 - DNA, 25 bp, Homo sapien
taaatggaatttgcttgcctcgtct

SEQ ID NO: 964528 - DNA, 25 bp, Homo sapien
aatttgcttgcctcgtcttccctct

SEQ ID NO: 964529 - DNA, 25 bp, Homo sapien
aatggaatttgcttgcctcgtcttc

SEQ ID NO: 964530 - DNA, 25 bp, Homo sapien
gaccctctggtcaggtaacacagag

SEQ ID NO: 964531 - DNA, 25 bp, Homo sapien
tcacataggacatggttataccaac

SEQ ID NO: 964532 - DNA, 25 bp, Homo sapien
ccacaaatattgcatgagacacact

SEQ ID NO: 964533 - DNA, 25 bp, Homo sapien
aacatggatggccttataactaggg

SEQ ID NO: 964534 - DNA, 25 bp, Homo sapien
caggatctaaagcacgaaatatcac

SEQ ID NO: 964535 - DNA, 25 bp, Homo sapien
tgtatccttgggctataaggatctt

SEQ ID NO: 964536 - DNA, 25 bp, Homo sapien
tatccttgggctataaggatcttct

SEQ ID NO: 964537 - DNA, 25 bp, Homo sapien
aaagcaggatctaaagcacgaaata

SEQ ID NO: 964538 - DNA, 25 bp, Homo sapien
cggacgatcgttctatcagcatagc

SEQ ID NO: 964539 - DNA, 25 bp, Homo sapien
gaagtatctatacacaccccaggtt

SEQ ID NO: 964540 - DNA, 25 bp, Homo sapien
gttgaaatgcctggaaacgaggcct

SEQ ID NO: 964541 - DNA, 25 bp, Homo sapien
cctcacagtcataggcgaagtatct

SEQ ID NO: 964542 - DNA, 25 bp, Homo sapien
tagccatctctatggcgaacttggg

SEQ ID NO: 964543 - DNA, 25 bp, Homo sapien
cctcaaaggcagttaacagcagaga

SEQ ID NO: 964544 - DNA, 25 bp, Homo sapien
ttttaaagtatccaaatgactgccc

SEQ ID NO: 964545 - DNA, 25 bp, Homo sapien
tcctgatttcactactgtcagtggc

SEQ ID NO: 964546 - DNA, 25 bp, Homo sapien
ggtcaacactgccttactctatggg

SEQ ID NO: 964547 - DNA, 25 bp, Homo sapien
cagtgctctcatgtgtcatttgtga

SEQ ID NO: 964548 - DNA, 25 bp, Homo sapien
tgttaaatgcagttattcatgctcg

SEQ ID NO: 964549 - DNA, 25 bp, Homo sapien
tgaattaccttagaatagaggctct

SEQ ID NO: 964550 - DNA, 25 bp, Homo sapien
cagttggatagttacattttccaca

SEQ ID NO: 964551 - DNA, 25 bp, Homo sapien
tccagttggatagttacattttcca

SEQ ID NO: 964552 - DNA, 25 bp, Homo sapien
ccagttggatagttacattttccac

SEQ ID NO: 964553 - DNA, 25 bp, Homo sapien
tatcctcgcattctaccttaagctg

SEQ ID NO: 964554 - DNA, 25 bp, Homo sapien
tgaaactaaataataatcccatggg

SEQ ID NO: 964555 - DNA, 25 bp, Homo sapien
cacaaatcattctggagttcaacag

SEQ ID NO: 964556 - DNA, 25 bp, Homo sapien
tgctcactggaacaagacatctggc

SEQ ID NO: 964557 - DNA, 25 bp, Homo sapien
agagatggaaagcacctcctcccca

SEQ ID NO: 964558 - DNA, 25 bp, Homo sapien
gctctcaagcctgcctgttcagcaa

SEQ ID NO: 964559 - DNA, 25 bp, Homo sapien
aaaaggccactggaattccagagat

SEQ ID NO: 964560 - DNA, 25 bp, Homo sapien
ccacgcttcttgtgtttgagagagc

SEQ ID NO: 964561 - DNA, 25 bp, Homo sapien
aaagaaatctagtagtctccaggct

SEQ ID NO: 964562 - DNA, 25 bp, Homo sapien
tgtgaaactcatctgggcttcatgt

SEQ ID NO: 964563 - DNA, 25 bp, Homo sapien
cagaatgatagatggctgcagcggc

SEQ ID NO: 964564 - DNA, 25 bp, Homo sapien
gcctgcccaggtgtactgcatagaa

SEQ ID NO: 964565 - DNA, 25 bp, Homo sapien
gagcaaatgtagtgaccacattttc

SEQ ID NO: 964566 - DNA, 25 bp, Homo sapien
cacattttcaatgagatggctgtca

SEQ ID NO: 964567 - DNA, 25 bp, Homo sapien
gattgccaccaaatcttaaggcggt

SEQ ID NO: 964568 - DNA, 25 bp, Homo sapien
caggattcagggtctcatgataagg

SEQ ID NO: 964569 - DNA, 25 bp, Homo sapien
gcaggctaacctgcaaattgctcag

SEQ ID NO: 964570 - DNA, 25 bp, Homo sapien
tttgggaaccacagaacaagatttc

SEQ ID NO: 964571 - DNA, 25 bp, Homo sapien
cctgcccgagcagtgaatcaatggt

SEQ ID NO: 964572 - DNA, 25 bp, Homo sapien
tcaataaacagctagagaagcttac

SEQ ID NO: 964573 - DNA, 25 bp, Homo sapien
caacatgggcatgaactaggatgaa

SEQ ID NO: 964574 - DNA, 25 bp, Homo sapien
tacttcctgtgcattccatcaaggc

SEQ ID NO: 964575 - DNA, 25 bp, Homo sapien
gactgaaatacatagagacccacat

SEQ ID NO: 964576 - DNA, 25 bp, Homo sapien
tataaggacacaattaactgaccgt

SEQ ID NO: 964577 - DNA, 25 bp, Homo sapien
cttcttctcaaaaggatttggagac

SEQ ID NO: 964578 - DNA, 25 bp, Homo sapien
tcttctcaaaaggatttggagactg

SEQ ID NO: 964579 - DNA, 25 bp, Homo sapien
ttctcaaaaggatttggagactggc

SEQ ID NO: 964580 - DNA, 25 bp, Homo sapien
tttggagactggcaagatgtactgt

SEQ ID NO: 964581 - DNA, 25 bp, Homo sapien
gatgcattaggagcctggataaaac

SEQ ID NO: 964582 - DNA, 25 bp, Homo sapien
gcattaggagcctggataaaacaag

SEQ ID NO: 964583 - DNA, 25 bp, Homo sapien
ggatgcattaggagcctggataaaa

SEQ ID NO: 964584 - DNA, 25 bp, Homo sapien
tgcattaggagcctggataaaacaa

SEQ ID NO: 964585 - DNA, 25 bp, Homo sapien
gagcctggctccagttgcttttttt

SEQ ID NO: 964586 - DNA, 25 bp, Homo sapien
accagagagcctggctccagttgct

SEQ ID NO: 964587 - DNA, 25 bp, Homo sapien
cagagagcctggctccagttgcttt

SEQ ID NO: 964588 - DNA, 25 bp, Homo sapien
gagagcctggctccagttgcttttt

SEQ ID NO: 964589 - DNA, 25 bp, Homo sapien
gaaatcatcactgagaggatagtct

SEQ ID NO: 964590 - DNA, 25 bp, Homo sapien
agaccgctgcacctcttttttgtgg

SEQ ID NO: 964591 - DNA, 25 bp, Homo sapien
caggagagaccgctgcacctctttt

SEQ ID NO: 964592 - DNA, 25 bp, Homo sapien
actcaggagagaccgctgcacctct

SEQ ID NO: 964593 - DNA, 25 bp, Homo sapien
acctggaagcaaatgaacggaatcc

SEQ ID NO: 964594 - DNA, 25 bp, Homo sapien
ctggcctctcaagtaagtgttagca

SEQ ID NO: 964595 - DNA, 25 bp, Homo sapien
gattcatttacaggatgtcctggcc

SEQ ID NO: 964596 - DNA, 25 bp, Homo sapien
tacagcctcccttctaatcaggagg

SEQ ID NO: 964597 - DNA, 25 bp, Homo sapien
ttaagggatctgctgtgcaaaccac

SEQ ID NO: 964598 - DNA, 25 bp, Homo sapien
gtgactccattttaagggatctgct

SEQ ID NO: 964599 - DNA, 25 bp, Homo sapien
taagggatctgctgtgcaaaccaca

SEQ ID NO: 964600 - DNA, 25 bp, Homo sapien
actccattttaagggatctgctgtg

SEQ ID NO: 964601 - DNA, 25 bp, Homo sapien
aaactgatactttctgcttttgtta

SEQ ID NO: 964602 - DNA, 25 bp, Homo sapien
caaccagggcatttcgtaaaagcaa

SEQ ID NO: 964603 - DNA, 25 bp, Homo sapien
tcctgtatcagggtaccatggcaac

SEQ ID NO: 964604 - DNA, 25 bp, Homo sapien
attgctggaaggatgcggagtcccc

SEQ ID NO: 964605 - DNA, 25 bp, Homo sapien
tgagctacaagcctaatcccgggac

SEQ ID NO: 964606 - DNA, 25 bp, Homo sapien
aaagcttctgtgctcggccgatgag

SEQ ID NO: 964607 - DNA, 25 bp, Homo sapien
tgcaagtggctgacgatacagtagg

SEQ ID NO: 964608 - DNA, 25 bp, Homo sapien
cacgtcgaggtcaccgaaagcttct

SEQ ID NO: 964609 - DNA, 25 bp, Homo sapien
ctgaactcgggttcctgagcgcgca

SEQ ID NO: 964610 - DNA, 25 bp, Homo sapien
gaggacagtccattcggaagaaagc

SEQ ID NO: 964611 - DNA, 25 bp, Homo sapien
gtgggtgcggagagaggacagtcca

SEQ ID NO: 964612 - DNA, 25 bp, Homo sapien
cacacgtcatcaggtctgtccagca

SEQ ID NO: 964613 - DNA, 25 bp, Homo sapien
gactccgaaaggagaaggacacgga

SEQ ID NO: 964614 - DNA, 25 bp, Homo sapien
ggcagcccgcgcatcctcggtgtga

SEQ ID NO: 964615 - DNA, 25 bp, Homo sapien
tctggagtggtttcaaggcttctcc

SEQ ID NO: 964616 - DNA, 25 bp, Homo sapien
cggtggacgccgctttccggagcta

SEQ ID NO: 964617 - DNA, 25 bp, Homo sapien
cgtggagatctgtgagcttgggaag

SEQ ID NO: 964618 - DNA, 25 bp, Homo sapien
ctgaaagctagcaactggagaagcc

SEQ ID NO: 964619 - DNA, 25 bp, Homo sapien
agaaactgaaagctagcaactggag

SEQ ID NO: 964620 - DNA, 25 bp, Homo sapien
gaaactgaaagctagcaactggaga

SEQ ID NO: 964621 - DNA, 25 bp, Homo sapien
aactgaaagctagcaactggagaag

SEQ ID NO: 964622 - DNA, 25 bp, Homo sapien
tccctgcagccacggggacgcggca

SEQ ID NO: 964623 - DNA, 25 bp, Homo sapien
agaggagtggagaagacgcccgccg

SEQ ID NO: 964624 - DNA, 25 bp, Homo sapien
gagtggagaagacgcccgccgagcc

SEQ ID NO: 964625 - DNA, 25 bp, Homo sapien
cagccacggggacgcggcagaggag

SEQ ID NO: 964626 - DNA, 25 bp, Homo sapien
gagagaagaggcgcccttccatttc

SEQ ID NO: 964627 - DNA, 25 bp, Homo sapien
agaagaggcgcccttccatttcctg

SEQ ID NO: 964628 - DNA, 25 bp, Homo sapien
gggaaaatcgtgcagccactttgtt

SEQ ID NO: 964629 - DNA, 25 bp, Homo sapien
atttcctgtcgctcccacggaagcg

SEQ ID NO: 964630 - DNA, 25 bp, Homo sapien
tgctcatgcgcatacggagagccgg

SEQ ID NO: 964631 - DNA, 25 bp, Homo sapien
gcgggcggccgcaactctgcgagga

SEQ ID NO: 964632 - DNA, 25 bp, Homo sapien
ccgaatctgcgatcgctgcggggct

SEQ ID NO: 964633 - DNA, 25 bp, Homo sapien
ccgcaactctgcgaggaccgggtga

SEQ ID NO: 964634 - DNA, 25 bp, Homo sapien
cgtggaagagttgacacagccagga

SEQ ID NO: 964635 - DNA, 25 bp, Homo sapien
tggaaatctctcatgagaggcactt

SEQ ID NO: 964636 - DNA, 25 bp, Homo sapien
tccgtttcccatctcgccgtggaag

SEQ ID NO: 964637 - DNA, 25 bp, Homo sapien
tcgacgattctccatggtgtgcaaa

SEQ ID NO: 964638 - DNA, 25 bp, Homo sapien
ggacaatctagtacatgccatacat

SEQ ID NO: 964639 - DNA, 25 bp, Homo sapien
tgagcaggtgtctaataaggacagg

SEQ ID NO: 964640 - DNA, 25 bp, Homo sapien
gaaggaaggtagaagacattgtcag

SEQ ID NO: 964641 - DNA, 25 bp, Homo sapien
tttcacaggttcaacagagccccag

SEQ ID NO: 964642 - DNA, 25 bp, Homo sapien
ttgatcttccaatattctcagttga

SEQ ID NO: 964643 - DNA, 25 bp, Homo sapien
ttttaatggcaacaacttgatcttc

SEQ ID NO: 964644 - DNA, 25 bp, Homo sapien
ttttgcttgtctacttagattcaaa

SEQ ID NO: 964645 - DNA, 25 bp, Homo sapien
ctagctatagcacctagcatatttt

SEQ ID NO: 964646 - DNA, 25 bp, Homo sapien
tatgcccacgcatgctttctgtttc

SEQ ID NO: 964647 - DNA, 25 bp, Homo sapien
gaataaatgactgagacaactccac

SEQ ID NO: 964648 - DNA, 25 bp, Homo sapien
gactgacaccaagttctgtggaagg

SEQ ID NO: 964649 - DNA, 25 bp, Homo sapien
tttcttgctgggaccccgactgaca

SEQ ID NO: 964650 - DNA, 25 bp, Homo sapien
tcaacattgttgctgccaagggctc

SEQ ID NO: 964651 - DNA, 25 bp, Homo sapien
tgctgccaagggctccatactggga

SEQ ID NO: 964652 - DNA, 25 bp, Homo sapien
cactctctcaacattgttgctgcca

SEQ ID NO: 964653 - DNA, 25 bp, Homo sapien
caagggctccatactgggatccagg

SEQ ID NO: 964654 - DNA, 25 bp, Homo sapien
gggaagacagccaaatcaatgtctc

SEQ ID NO: 964655 - DNA, 25 bp, Homo sapien
gcacagccttgtggttccgcccctt

SEQ ID NO: 964656 - DNA, 25 bp, Homo sapien
gccccttctcaagtggcagcatggg

SEQ ID NO: 964657 - DNA, 25 bp, Homo sapien
gacagccaaatcaatgtctcatttt

SEQ ID NO: 964658 - DNA, 25 bp, Homo sapien
ttggcaggatggataaaagaacaga

SEQ ID NO: 964659 - DNA, 25 bp, Homo sapien
aattggcaggatggataaaagaaca

SEQ ID NO: 964660 - DNA, 25 bp, Homo sapien
caaattggcaggatggataaaagaa

SEQ ID NO: 964661 - DNA, 25 bp, Homo sapien
tggcaggatggataaaagaacagat

SEQ ID NO: 964662 - DNA, 25 bp, Homo sapien
ttttctgccgcatcttttagctgtt

SEQ ID NO: 964663 - DNA, 25 bp, Homo sapien
tcttcttatcttggcctctgtatct

SEQ ID NO: 964664 - DNA, 25 bp, Homo sapien
cctaatgtctcctttgttagtcctg

SEQ ID NO: 964665 - DNA, 25 bp, Homo sapien
cctgtagtgcttgtcttacgttgga

SEQ ID NO: 964666 - DNA, 25 bp, Homo sapien
ttgatgcctttgcaacttggtctgc

SEQ ID NO: 964667 - DNA, 25 bp, Homo sapien
ggcagattcagcctgaactttcgca

SEQ ID NO: 964668 - DNA, 25 bp, Homo sapien
gcattgacagcgtggtcttgatgcc

SEQ ID NO: 964669 - DNA, 25 bp, Homo sapien
tgatcgctgctttgctaactccagc

SEQ ID NO: 964670 - DNA, 25 bp, Homo sapien
gctgtgtaatggtagagtttgcccg

SEQ ID NO: 964671 - DNA, 25 bp, Homo sapien
ccgtccttgagtgatttgagcttgt

SEQ ID NO: 964672 - DNA, 25 bp, Homo sapien
tatttttgttatattggcagtcagc

SEQ ID NO: 964673 - DNA, 25 bp, Homo sapien
tgagcttgttgtaactggttcaatg

SEQ ID NO: 964674 - DNA, 25 bp, Homo sapien
gaattggtaggtgaatgtcaagcac

SEQ ID NO: 964675 - DNA, 25 bp, Homo sapien
tctcgatgtcttctggaggcacgtt

SEQ ID NO: 964676 - DNA, 25 bp, Homo sapien
tgtcaagcacaccattcgcaacctt

SEQ ID NO: 964677 - DNA, 25 bp, Homo sapien
gtaatcctcacagagttgcatatgt

SEQ ID NO: 964678 - DNA, 25 bp, Homo sapien
ttctgcctgttcacttatactttcg

SEQ ID NO: 964679 - DNA, 25 bp, Homo sapien
ttttggagacttctgcctgttcact

SEQ ID NO: 964680 - DNA, 25 bp, Homo sapien
ctgcctgttcacttatactttcgat

SEQ ID NO: 964681 - DNA, 25 bp, Homo sapien
gagacttctgcctgttcacttatac

SEQ ID NO: 964682 - DNA, 25 bp, Homo sapien
agagcaccgccacagggcaagggca

SEQ ID NO: 964683 - DNA, 25 bp, Homo sapien
ccaaattacgaataatggattttgc

SEQ ID NO: 964684 - DNA, 25 bp, Homo sapien
cattcgttgagagggtcagggagcc

SEQ ID NO: 964685 - DNA, 25 bp, Homo sapien
cacgaacctgtttgtccaaattacg

SEQ ID NO: 964686 - DNA, 25 bp, Homo sapien
taagtcattccttgtatttgcagag

SEQ ID NO: 964687 - DNA, 25 bp, Homo sapien
tggatatctggtatcttaatctgct

SEQ ID NO: 964688 - DNA, 25 bp, Homo sapien
cagaggtattaatggtggaactagt

SEQ ID NO: 964689 - DNA, 25 bp, Homo sapien
tgaggttagtgtatctaagatggta

SEQ ID NO: 964690 - DNA, 25 bp, Homo sapien
cctgaaggtcttcaagtaagaggtc

SEQ ID NO: 964691 - DNA, 25 bp, Homo sapien
tctattgtatctttcagatcttgaa

SEQ ID NO: 964692 - DNA, 25 bp, Homo sapien
tcatacactgctttcagttgttcat

SEQ ID NO: 964693 - DNA, 25 bp, Homo sapien
caatgcttgcattaaggacactgga

SEQ ID NO: 964694 - DNA, 25 bp, Homo sapien
tatttcagacacgttccctctgagg

SEQ ID NO: 964695 - DNA, 25 bp, Homo sapien
ttaacccttgcaccgctttggagag

SEQ ID NO: 964696 - DNA, 25 bp, Homo sapien
tttgaagtctgcctcacagacaggc

SEQ ID NO: 964697 - DNA, 25 bp, Homo sapien
ggtgtggtcccactgatcaaagcac

SEQ ID NO: 964698 - DNA, 25 bp, Homo sapien
caggtggatcaccataataattttc

SEQ ID NO: 964699 - DNA, 25 bp, Homo sapien
tcactgcaacgtttcccgccgtaac

SEQ ID NO: 964700 - DNA, 25 bp, Homo sapien
taacctaatttacacggacactggc

SEQ ID NO: 964701 - DNA, 25 bp, Homo sapien
ggcactcactgcaacgtttcccgcc

SEQ ID NO: 964702 - DNA, 25 bp, Homo sapien
catcccctgtaaggccaatcctgtt

SEQ ID NO: 964703 - DNA, 25 bp, Homo sapien
taggtcttccctatggttacatgta

SEQ ID NO: 964704 - DNA, 25 bp, Homo sapien
catgctcactttgagtgcactagta

SEQ ID NO: 964705 - DNA, 25 bp, Homo sapien
aaaactgaagtaggcgaagctgaac

SEQ ID NO: 964706 - DNA, 25 bp, Homo sapien
ctagggtcacagtcacatgactgac

SEQ ID NO: 964707 - DNA, 25 bp, Homo sapien
tttgagaggtcctagggtcacagtc

SEQ ID NO: 964708 - DNA, 25 bp, Homo sapien
ccatgggactcacgccggaagcatg

SEQ ID NO: 964709 - DNA, 25 bp, Homo sapien
tccagtatccatcagcacaacggtc

SEQ ID NO: 964710 - DNA, 25 bp, Homo sapien
cacaacggtcacaggccaggcctgt

SEQ ID NO: 964711 - DNA, 25 bp, Homo sapien
cattcggcagacaaggacatgcacc

SEQ ID NO: 964712 - DNA, 25 bp, Homo sapien
cacatttccccctgggagttttgca

SEQ ID NO: 964713 - DNA, 25 bp, Homo sapien
tcagctgacacatttccccctggga

SEQ ID NO: 964714 - DNA, 25 bp, Homo sapien
gctgacacatttccccctgggagtt

SEQ ID NO: 964715 - DNA, 25 bp, Homo sapien
tccccctgggagttttgcagactta

SEQ ID NO: 964716 - DNA, 25 bp, Homo sapien
gctgcaggactctggatcggttaca

SEQ ID NO: 964717 - DNA, 25 bp, Homo sapien
tccatagtgacctggtttgcagagc

SEQ ID NO: 964718 - DNA, 25 bp, Homo sapien
gcaggtctgattgagggctgatcca

SEQ ID NO: 964719 - DNA, 25 bp, Homo sapien
gcagagctggcagtttgcgccctga

SEQ ID NO: 964720 - DNA, 25 bp, Homo sapien
ctaacactctttacccttgcaacca

SEQ ID NO: 964721 - DNA, 25 bp, Homo sapien
ttctctctaacactctttacccttg

SEQ ID NO: 964722 - DNA, 25 bp, Homo sapien
taacactctttacccttgcaaccat

SEQ ID NO: 964723 - DNA, 25 bp, Homo sapien
tctctaacactctttacccttgcaa

SEQ ID NO: 964724 - DNA, 25 bp, Homo sapien
ccgtataaccttgaagacaattgca

SEQ ID NO: 964725 - DNA, 25 bp, Homo sapien
cttgaagacaattgcagattacatc

SEQ ID NO: 964726 - DNA, 25 bp, Homo sapien
cacaggcaaggacgacagggctgtc

SEQ ID NO: 964727 - DNA, 25 bp, Homo sapien
gattgcttgagggatcatctggaca

SEQ ID NO: 964728 - DNA, 25 bp, Homo sapien
ctaaaaattaaagtgcatatgaatt

SEQ ID NO: 964729 - DNA, 25 bp, Homo sapien
aaaattaaagtgcatatgaattcca

SEQ ID NO: 964730 - DNA, 25 bp, Homo sapien
aattaaagtgcatatgaattccata

SEQ ID NO: 964731 - DNA, 25 bp, Homo sapien
attaaagtgcatatgaattccatac

SEQ ID NO: 964732 - DNA, 25 bp, Homo sapien
cagtttctgccagttgtaaagcctc

SEQ ID NO: 964733 - DNA, 25 bp, Homo sapien
aagcctccacaattgaagcatgacc

SEQ ID NO: 964734 - DNA, 25 bp, Homo sapien
ccacaattgaagcatgaccctgtct

SEQ ID NO: 964735 - DNA, 25 bp, Homo sapien
caaacctattacaagggcaagggtg

SEQ ID NO: 964736 - DNA, 25 bp, Homo sapien
acagtgtcctttgatccttgaggat

SEQ ID NO: 964737 - DNA, 25 bp, Homo sapien
gcactgtcctgttacttggtcacat

SEQ ID NO: 964738 - DNA, 25 bp, Homo sapien
tgttacttggtcacatacagtgtcc

SEQ ID NO: 964739 - DNA, 25 bp, Homo sapien
caggcagcgatcacagcggcggcca

SEQ ID NO: 964740 - DNA, 25 bp, Homo sapien
gtgacagccgtgatgccccaaatca

SEQ ID NO: 964741 - DNA, 25 bp, Homo sapien
cagcgcccgaccacaagaggtttac

SEQ ID NO: 964742 - DNA, 25 bp, Homo sapien
tcggctgcagctggatccgactgag

SEQ ID NO: 964743 - DNA, 25 bp, Homo sapien
acaagaggtttacactggcactggc

SEQ ID NO: 964744 - DNA, 25 bp, Homo sapien
cacagttgtgaagctgatactcatc

SEQ ID NO: 964745 - DNA, 25 bp, Homo sapien
gatactcatctaagtcctgcttgct

SEQ ID NO: 964746 - DNA, 25 bp, Homo sapien
cacttgaggtcccattgctgaggca

SEQ ID NO: 964747 - DNA, 25 bp, Homo sapien
tgctgaggcaatttcaacacagttg

SEQ ID NO: 964748 - DNA, 25 bp, Homo sapien
atgtgaatgagcgtgggactctcct

SEQ ID NO: 964749 - DNA, 25 bp, Homo sapien
gaatattgtacatctggttctaaac

SEQ ID NO: 964750 - DNA, 25 bp, Homo sapien
aatagacatctatggaatattgtac

SEQ ID NO: 964751 - DNA, 25 bp, Homo sapien
gtccaccaggacatgtgaatgagcg

SEQ ID NO: 964752 - DNA, 25 bp, Homo sapien
gagtcttgggtatgcagtgctcact

SEQ ID NO: 964753 - DNA, 25 bp, Homo sapien
tcgtagccgctggtaaggcaaaaga

SEQ ID NO: 964754 - DNA, 25 bp, Homo sapien
tgaggctttgactgtagagtcttgg

SEQ ID NO: 964755 - DNA, 25 bp, Homo sapien
gggttcaccacaatctggacagtcc

SEQ ID NO: 964756 - DNA, 25 bp, Homo sapien
cagtccatgtaacagggttcccagg

SEQ ID NO: 964757 - DNA, 25 bp, Homo sapien
taaaacaacgtgaacagcaggactc

SEQ ID NO: 964758 - DNA, 25 bp, Homo sapien
ggcaatggtgaagtccacaggaaag

SEQ ID NO: 964759 - DNA, 25 bp, Homo sapien
aggactctggccaaacgtctccgag

SEQ ID NO: 964760 - DNA, 25 bp, Homo sapien
tctctctggtccaatatatatcatg

SEQ ID NO: 964761 - DNA, 25 bp, Homo sapien
tatatcatgtactgctgccaaccaa

SEQ ID NO: 964762 - DNA, 25 bp, Homo sapien
tgctgcaatagtctcttggtgctgc

SEQ ID NO: 964763 - DNA, 25 bp, Homo sapien
cctcttcttgttacttttgcctgtg

SEQ ID NO: 964764 - DNA, 25 bp, Homo sapien
gacttcagattgtggagagccactt

SEQ ID NO: 964765 - DNA, 25 bp, Homo sapien
tttcaggtggacttcagattgtgga

SEQ ID NO: 964766 - DNA, 25 bp, Homo sapien
gtggacttcagattgtggagagcca

SEQ ID NO: 964767 - DNA, 25 bp, Homo sapien
cagattgtggagagccacttctagc

SEQ ID NO: 964768 - DNA, 25 bp, Homo sapien
cagtattatcttttctttgtcaatt

SEQ ID NO: 964769 - DNA, 25 bp, Homo sapien
tctttgtcaattatgaaatcacttc

SEQ ID NO: 964770 - DNA, 25 bp, Homo sapien
ctcactctgctcatcagcatgtaag

SEQ ID NO: 964771 - DNA, 25 bp, Homo sapien
tgtaagctttgcttctgatttctct

SEQ ID NO: 964772 - DNA, 25 bp, Homo sapien
tacacatcacattccatgcaaagct

SEQ ID NO: 964773 - DNA, 25 bp, Homo sapien
cacatcacattccatgcaaagctgt

SEQ ID NO: 964774 - DNA, 25 bp, Homo sapien
catcacattccatgcaaagctgttg

SEQ ID NO: 964775 - DNA, 25 bp, Homo sapien
acacatcacattccatgcaaagctg

SEQ ID NO: 964776 - DNA, 25 bp, Homo sapien
gtttgtaagaacactgaggatggcc

SEQ ID NO: 964777 - DNA, 25 bp, Homo sapien
tgaacctctggcctatcctatggaa

SEQ ID NO: 964778 - DNA, 25 bp, Homo sapien
ggaatctgggagtagccaacctgga

SEQ ID NO: 964779 - DNA, 25 bp, Homo sapien
tgtgtttagagttcccagctaagga

SEQ ID NO: 964780 - DNA, 25 bp, Homo sapien
tcaaacacagtctgtagggaaagta

SEQ ID NO: 964781 - DNA, 25 bp, Homo sapien
caaacacagtctgtagggaaagtaa

SEQ ID NO: 964782 - DNA, 25 bp, Homo sapien
tggttcagagcagctacggccagtg

SEQ ID NO: 964783 - DNA, 25 bp, Homo sapien
ccagtgacatgtgggcggcattcac

SEQ ID NO: 964784 - DNA, 25 bp, Homo sapien
agcagctacggccagtgacatgtgg

SEQ ID NO: 964785 - DNA, 25 bp, Homo sapien
attcacactgcccattcttgggtga

SEQ ID NO: 964786 - DNA, 25 bp, Homo sapien
gtcacagggagaacacccatggaga

SEQ ID NO: 964787 - DNA, 25 bp, Homo sapien
gcacctccaatatcacagtcacagg

SEQ ID NO: 964788 - DNA, 25 bp, Homo sapien
tcacagggagaacacccatggagat

SEQ ID NO: 964789 - DNA, 25 bp, Homo sapien
catcacaggtcaagaatggcagact

SEQ ID NO: 964790 - DNA, 25 bp, Homo sapien
gcattggcctgtatccacatcacag

SEQ ID NO: 964791 - DNA, 25 bp, Homo sapien
gtgcattcttcgcagtgtgctccgg

SEQ ID NO: 964792 - DNA, 25 bp, Homo sapien
gctccggtgacatatgacaggcaca

SEQ ID NO: 964793 - DNA, 25 bp, Homo sapien
tctctggcagatgcatctggaatcc

SEQ ID NO: 964794 - DNA, 25 bp, Homo sapien
gcaggagtttctgggagtcatggtt

SEQ ID NO: 964795 - DNA, 25 bp, Homo sapien
tattactgatcgctccttctctggc

SEQ ID NO: 964796 - DNA, 25 bp, Homo sapien
ctctacccgtagacatttctgagcc

SEQ ID NO: 964797 - DNA, 25 bp, Homo sapien
ttgcactggtcgcatttggctcctt

SEQ ID NO: 964798 - DNA, 25 bp, Homo sapien
ggtcggtggcgcttagtccgtagtg

SEQ ID NO: 964799 - DNA, 25 bp, Homo sapien
gcatttggctccttccacgttctct

SEQ ID NO: 964800 - DNA, 25 bp, Homo sapien
tagtccgtagtggttgggtttgcac

SEQ ID NO: 964801 - DNA, 25 bp, Homo sapien
ctaaggcaggatcagagtggctcac

SEQ ID NO: 964802 - DNA, 25 bp, Homo sapien
cagatatggtcccatcggggtcaca

SEQ ID NO: 964803 - DNA, 25 bp, Homo sapien
gagtggctcacacaaatgccaccag

SEQ ID NO: 964804 - DNA, 25 bp, Homo sapien
gtcccatcggggtcacattcacaag

SEQ ID NO: 964805 - DNA, 25 bp, Homo sapien
gacagcggctggagtggctattaca

SEQ ID NO: 964806 - DNA, 25 bp, Homo sapien
agatggtcttgagcgggtccctgta

SEQ ID NO: 964807 - DNA, 25 bp, Homo sapien
gaatgcacgcgtagggatctgagat

SEQ ID NO: 964808 - DNA, 25 bp, Homo sapien
gcttgccaggtacgtagtcatgtca

SEQ ID NO: 964809 - DNA, 25 bp, Homo sapien
tctcacagttcggaccatctgtatt

SEQ ID NO: 964810 - DNA, 25 bp, Homo sapien
caagcgttgtcctggaggtctgcag

SEQ ID NO: 964811 - DNA, 25 bp, Homo sapien
accatctgtattgtgctgacacaca

SEQ ID NO: 964812 - DNA, 25 bp, Homo sapien
ggaagaagtccttgcatctctcaca

SEQ ID NO: 964813 - DNA, 25 bp, Homo sapien
ctgcattgtgcaataaatagagcgt

SEQ ID NO: 964814 - DNA, 25 bp, Homo sapien
aataaatagagcgttgaaagagggc

SEQ ID NO: 964815 - DNA, 25 bp, Homo sapien
gagcgttgaaagagggcttgtcctt

SEQ ID NO: 964816 - DNA, 25 bp, Homo sapien
cattgtgcaataaatagagcgttga

SEQ ID NO: 964817 - DNA, 25 bp, Homo sapien
gcgacattcgctagcatggccattg

SEQ ID NO: 964818 - DNA, 25 bp, Homo sapien
catcttctgcatagggcgacattcg

SEQ ID NO: 964819 - DNA, 25 bp, Homo sapien
gaacaatcatctcgtacagagcata

SEQ ID NO: 964820 - DNA, 25 bp, Homo sapien
tatcctcaggtttgtcaatgtcaca

SEQ ID NO: 964821 - DNA, 25 bp, Homo sapien
tcaatttcaaaactgggatccaaaa

SEQ ID NO: 964822 - DNA, 25 bp, Homo sapien
caactaacattgcagcaggccgaaa

SEQ ID NO: 964823 - DNA, 25 bp, Homo sapien
tccatagtctgtggaacgttcaact

SEQ ID NO: 964824 - DNA, 25 bp, Homo sapien
tatccgagtatttggagtcacaaac

SEQ ID NO: 964825 - DNA, 25 bp, Homo sapien
ggaagtggcacagtcttttgcaaaa

SEQ ID NO: 964826 - DNA, 25 bp, Homo sapien
cagtctgatgctgacatgatcaaga

SEQ ID NO: 964827 - DNA, 25 bp, Homo sapien
ggataaggtggctgaaccgaaataa

SEQ ID NO: 964828 - DNA, 25 bp, Homo sapien
taatgcctctaagtccagtctgatg

SEQ ID NO: 964829 - DNA, 25 bp, Homo sapien
gctgaaccgaaataatgcctctaag

SEQ ID NO: 964830 - DNA, 25 bp, Homo sapien
cattttcagattgccaccatttctt

SEQ ID NO: 964831 - DNA, 25 bp, Homo sapien
tttctctgtctggttcaaaacttac

SEQ ID NO: 964832 - DNA, 25 bp, Homo sapien
tttcagattgccaccatttcttttc

SEQ ID NO: 964833 - DNA, 25 bp, Homo sapien
ttcttttctctgtctggttcaaaac

SEQ ID NO: 964834 - DNA, 25 bp, Homo sapien
gctgttgggttggtcatacggatca

SEQ ID NO: 964835 - DNA, 25 bp, Homo sapien
cattctcaatggtgtggctgttggg

SEQ ID NO: 964836 - DNA, 25 bp, Homo sapien
gggttggtcatacggatcatatgga

SEQ ID NO: 964837 - DNA, 25 bp, Homo sapien
atcatatggaaatctagagtcacag

SEQ ID NO: 964838 - DNA, 25 bp, Homo sapien
tagaagtataatctttgatgaggtt

SEQ ID NO: 964839 - DNA, 25 bp, Homo sapien
tcagaggatgctaagttgtggccac

SEQ ID NO: 964840 - DNA, 25 bp, Homo sapien
ttgtggccactaaatgtgagttcca

SEQ ID NO: 964841 - DNA, 25 bp, Homo sapien
taacttcagggcttgtggaccattt

SEQ ID NO: 964842 - DNA, 25 bp, Homo sapien
agaagaagccataagctgcgtgttc

SEQ ID NO: 964843 - DNA, 25 bp, Homo sapien
ctgctcagcccacaggtagaagaag

SEQ ID NO: 964844 - DNA, 25 bp, Homo sapien
tagaagaagccataagctgcgtgtt

SEQ ID NO: 964845 - DNA, 25 bp, Homo sapien
atcaccagtggtgggatgacaggca

SEQ ID NO: 964846 - DNA, 25 bp, Homo sapien
caggagatcaccagtggtgggatga

SEQ ID NO: 964847 - DNA, 25 bp, Homo sapien
tgacaggcacccctgttgcagtcat

SEQ ID NO: 964848 - DNA, 25 bp, Homo sapien
gagatcaccagtggtgggatgacag

SEQ ID NO: 964849 - DNA, 25 bp, Homo sapien
ttgagcttttgagtaactgagccac

SEQ ID NO: 964850 - DNA, 25 bp, Homo sapien
tgagcttttgagtaactgagccacc

SEQ ID NO: 964851 - DNA, 25 bp, Homo sapien
cttgagcttttgagtaactgagcca

SEQ ID NO: 964852 - DNA, 25 bp, Homo sapien
caaggtgcaaaaaaagggtcagttg

SEQ ID NO: 964853 - DNA, 25 bp, Homo sapien
aaaaaagggtcagttgaaattgcat

SEQ ID NO: 964854 - DNA, 25 bp, Homo sapien
tttgtcaggagatgattaaattcaa

SEQ ID NO: 964855 - DNA, 25 bp, Homo sapien
tcttttgtcaggagatgattaaatt

SEQ ID NO: 964856 - DNA, 25 bp, Homo sapien
tgtcaggagatgattaaattcaatt

SEQ ID NO: 964857 - DNA, 25 bp, Homo sapien
cttttgtcaggagatgattaaattc

SEQ ID NO: 964858 - DNA, 25 bp, Homo sapien
ggagtctttgtggagaggttcaggc

SEQ ID NO: 964859 - DNA, 25 bp, Homo sapien
tttgtggagaggttcaggcagcaaa

SEQ ID NO: 964860 - DNA, 25 bp, Homo sapien
tctttgtggagaggttcaggcagca

SEQ ID NO: 964861 - DNA, 25 bp, Homo sapien
tctgggagtctttgtggagaggttc

SEQ ID NO: 964862 - DNA, 25 bp, Homo sapien
ctgaatgaagctaagatcccagggc

SEQ ID NO: 964863 - DNA, 25 bp, Homo sapien
cagtgaacctgaatgaagctaagat

SEQ ID NO: 964864 - DNA, 25 bp, Homo sapien
atcccagggcttgaggcagctgacg

SEQ ID NO: 964865 - DNA, 25 bp, Homo sapien
aagatcccagggcttgaggcagctg

SEQ ID NO: 964866 - DNA, 25 bp, Homo sapien
gatagatacagataccagccaattg

SEQ ID NO: 964867 - DNA, 25 bp, Homo sapien
caaacgactcttgtccatggaaatg

SEQ ID NO: 964868 - DNA, 25 bp, Homo sapien
gaaatgccagtcgtgtcctgtagag

SEQ ID NO: 964869 - DNA, 25 bp, Homo sapien
gatcaaggatcagcactctacaacc

SEQ ID NO: 964870 - DNA, 25 bp, Homo sapien
gtgttcgggtagaggcagtgaagac

SEQ ID NO: 964871 - DNA, 25 bp, Homo sapien
cagtgaagacaagcttgctggggct

SEQ ID NO: 964872 - DNA, 25 bp, Homo sapien
ggaagtgttcgggtagaggcagtga

SEQ ID NO: 964873 - DNA, 25 bp, Homo sapien
aagtgttcgggtagaggcagtgaag

SEQ ID NO: 964874 - DNA, 25 bp, Homo sapien
gaggaaagccaaggggtcacgtcac

SEQ ID NO: 964875 - DNA, 25 bp, Homo sapien
gggtcacgtcacattcagtaatcaa

SEQ ID NO: 964876 - DNA, 25 bp, Homo sapien
tcacttccggaaggtatcattggtg

SEQ ID NO: 964877 - DNA, 25 bp, Homo sapien
ccggaggccagttctgctttctcag

SEQ ID NO: 964878 - DNA, 25 bp, Homo sapien
ctaggatacaggatgctgtttaaga

SEQ ID NO: 964879 - DNA, 25 bp, Homo sapien
taggatacaggatgctgtttaagac

SEQ ID NO: 964880 - DNA, 25 bp, Homo sapien
gtagcttttgtgattatcttcatat

SEQ ID NO: 964881 - DNA, 25 bp, Homo sapien
tcttcatatactttttccagtatta

SEQ ID NO: 964882 - DNA, 25 bp, Homo sapien
gcttttgtgattatcttcatatact

SEQ ID NO: 964883 - DNA, 25 bp, Homo sapien
cagtagcttttgtgattatcttcat

SEQ ID NO: 964884 - DNA, 25 bp, Homo sapien
acctcccgggccacaatcattaaga

SEQ ID NO: 964885 - DNA, 25 bp, Homo sapien
cgacttgcagccgtgatagggatgc

SEQ ID NO: 964886 - DNA, 25 bp, Homo sapien
agcttaacaaggctcacagggacac

SEQ ID NO: 964887 - DNA, 25 bp, Homo sapien
tagggatgcttagtaggacccagga

SEQ ID NO: 964888 - DNA, 25 bp, Homo sapien
gaggccctgaagtgctgttctgaag

SEQ ID NO: 964889 - DNA, 25 bp, Homo sapien
tgatgaggacaaagctatggactgt

SEQ ID NO: 964890 - DNA, 25 bp, Homo sapien
gggtcaagattgcatttctccagac

SEQ ID NO: 964891 - DNA, 25 bp, Homo sapien
ctttttgctaaagagccccaggact

SEQ ID NO: 964892 - DNA, 25 bp, Homo sapien
ttgcctgtaccattacatacaccat

SEQ ID NO: 964893 - DNA, 25 bp, Homo sapien
gagatcaagactgtttaatagttac

SEQ ID NO: 964894 - DNA, 25 bp, Homo sapien
ttttttgagggaaatccagtcacat

SEQ ID NO: 964895 - DNA, 25 bp, Homo sapien
accattacttggacattcacactca

SEQ ID NO: 964896 - DNA, 25 bp, Homo sapien
gataaatttcgcatctaccagtatg

SEQ ID NO: 964897 - DNA, 25 bp, Homo sapien
ctgttgcactattacagaagtgacc

SEQ ID NO: 964898 - DNA, 25 bp, Homo sapien
taccaaatctgttgcactattacag

SEQ ID NO: 964899 - DNA, 25 bp, Homo sapien
aagtgaccctttcatgcacagataa

SEQ ID NO: 964900 - DNA, 25 bp, Homo sapien
gagacaggtggatctgtgaaaaatg

SEQ ID NO: 964901 - DNA, 25 bp, Homo sapien
gacaggtggatctgtgaaaaatgaa

SEQ ID NO: 964902 - DNA, 25 bp, Homo sapien
acaggtggatctgtgaaaaatgaat

SEQ ID NO: 964903 - DNA, 25 bp, Homo sapien
agacaggtggatctgtgaaaaatga

SEQ ID NO: 964904 - DNA, 25 bp, Homo sapien
aggttactaggcctactgtgcccca

SEQ ID NO: 964905 - DNA, 25 bp, Homo sapien
cgaaaaatctgctgtcaatacgtag

SEQ ID NO: 964906 - DNA, 25 bp, Homo sapien
gtgccccataggcaaagctctgaag

SEQ ID NO: 964907 - DNA, 25 bp, Homo sapien
tgagcattccttcaaccataggttg

SEQ ID NO: 964908 - DNA, 25 bp, Homo sapien
ggcacaaatgccgaaatgcactgca

SEQ ID NO: 964909 - DNA, 25 bp, Homo sapien
agaagcctacggagtaacaggagcc

SEQ ID NO: 964910 - DNA, 25 bp, Homo sapien
gacaatgacagtaatctaggaccca

SEQ ID NO: 964911 - DNA, 25 bp, Homo sapien
tatgagagggctgacaaacaagtgc

SEQ ID NO: 964912 - DNA, 25 bp, Homo sapien
ttaaacaaaggaattcatggcgttg

SEQ ID NO: 964913 - DNA, 25 bp, Homo sapien
aattcatggcgttgacaggagaagg

SEQ ID NO: 964914 - DNA, 25 bp, Homo sapien
ggaattcatggcgttgacaggagaa

SEQ ID NO: 964915 - DNA, 25 bp, Homo sapien
caaaggaattcatggcgttgacagg

SEQ ID NO: 964916 - DNA, 25 bp, Homo sapien
aaccccttctccatagtcaactagg

SEQ ID NO: 964917 - DNA, 25 bp, Homo sapien
cagtcctgtctgaaggagttcgact

SEQ ID NO: 964918 - DNA, 25 bp, Homo sapien
caactaggctgtcgtcactatcttc

SEQ ID NO: 964919 - DNA, 25 bp, Homo sapien
tcctcattgaactggccattaaccc

SEQ ID NO: 964920 - DNA, 25 bp, Homo sapien
caatgcaggccagactgtaaacttc

SEQ ID NO: 964921 - DNA, 25 bp, Homo sapien
tcaggttgactccaatgacgaggat

SEQ ID NO: 964922 - DNA, 25 bp, Homo sapien
ccatgcatgcaaattatgagaaagc

SEQ ID NO: 964923 - DNA, 25 bp, Homo sapien
agtcttcagtagagtggatggctcc

SEQ ID NO: 964924 - DNA, 25 bp, Homo sapien
ctttcaagagacctacaaaattcca

SEQ ID NO: 964925 - DNA, 25 bp, Homo sapien
tttcaagagacctacaaaattccat

SEQ ID NO: 964926 - DNA, 25 bp, Homo sapien
taaaaggatgcagaagaaacaaatg

SEQ ID NO: 964927 - DNA, 25 bp, Homo sapien
gatgcagaagaaacaaatgaaaaca

SEQ ID NO: 964928 - DNA, 25 bp, Homo sapien
tgcagaagaaacaaatgaaaacagc

SEQ ID NO: 964929 - DNA, 25 bp, Homo sapien
aaaggatgcagaagaaacaaatgaa

SEQ ID NO: 964930 - DNA, 25 bp, Homo sapien
tcttccttgtgtgttatgcagcctg

SEQ ID NO: 964931 - DNA, 25 bp, Homo sapien
tctgaggagtgtactttaatacgac

SEQ ID NO: 964932 - DNA, 25 bp, Homo sapien
gttgaacccgtaagcacaatttctg

SEQ ID NO: 964933 - DNA, 25 bp, Homo sapien
gcagcctgactatactggatgggaa

SEQ ID NO: 964934 - DNA, 25 bp, Homo sapien
tgcaggcttccaacagagggtaact

SEQ ID NO: 964935 - DNA, 25 bp, Homo sapien
ggttctatccctctttgcactatga

SEQ ID NO: 964936 - DNA, 25 bp, Homo sapien
tttggccaccagtgaggttctatcc

SEQ ID NO: 964937 - DNA, 25 bp, Homo sapien
taaggatgcagatcctactgtctgt

SEQ ID NO: 964938 - DNA, 25 bp, Homo sapien
taacacattgcctagagggctacga

SEQ ID NO: 964939 - DNA, 25 bp, Homo sapien
tgtttgaccatgagggacatgtaaa

SEQ ID NO: 964940 - DNA, 25 bp, Homo sapien
gctcatagtagcatattggctttgc

SEQ ID NO: 964941 - DNA, 25 bp, Homo sapien
tgctagattgatcaatacagcatgg

SEQ ID NO: 964942 - DNA, 25 bp, Homo sapien
catcatcttccttcataggctggat

SEQ ID NO: 964943 - DNA, 25 bp, Homo sapien
ctggatttcagggtcagcatgggca

SEQ ID NO: 964944 - DNA, 25 bp, Homo sapien
tgtattctccaaatgtcccatcatc

SEQ ID NO: 964945 - DNA, 25 bp, Homo sapien
agggtcagcatgggcatcttccttt

SEQ ID NO: 964946 - DNA, 25 bp, Homo sapien
gagtctaagaaagtaggctcactaa

SEQ ID NO: 964947 - DNA, 25 bp, Homo sapien
taccttatagggaaagcaatgttac

SEQ ID NO: 964948 - DNA, 25 bp, Homo sapien
tcagcatccataacctatgtggagt

SEQ ID NO: 964949 - DNA, 25 bp, Homo sapien
gaactgattgatttactcctccaaa

SEQ ID NO: 964950 - DNA, 25 bp, Homo sapien
gccctgagttgcaatatccacctgc

SEQ ID NO: 964951 - DNA, 25 bp, Homo sapien
ctggatatttaccacccttgtttct

SEQ ID NO: 964952 - DNA, 25 bp, Homo sapien
attaagataaggagagcaacagcac

SEQ ID NO: 964953 - DNA, 25 bp, Homo sapien
gagttgcaatatccacctgccggct

SEQ ID NO: 964954 - DNA, 25 bp, Homo sapien
ggctaaactgtccttgcaaggctgt

SEQ ID NO: 964955 - DNA, 25 bp, Homo sapien
cattaaatgctaaaaacccctggtg

SEQ ID NO: 964956 - DNA, 25 bp, Homo sapien
aaaaaattgccacgttatgtgagct

SEQ ID NO: 964957 - DNA, 25 bp, Homo sapien
cccaaaccaattaaagtattcactg

SEQ ID NO: 964958 - DNA, 25 bp, Homo sapien
aaagcatcagtttaggcagtttccc

SEQ ID NO: 964959 - DNA, 25 bp, Homo sapien
tttggacccttaccataggctaggc

SEQ ID NO: 964960 - DNA, 25 bp, Homo sapien
gagctgtatcatagccacacacaag

SEQ ID NO: 964961 - DNA, 25 bp, Homo sapien
taaacatgactacgcatatcccagg

SEQ ID NO: 964962 - DNA, 25 bp, Homo sapien
tgggtagcggagtaaaagagaatct

SEQ ID NO: 964963 - DNA, 25 bp, Homo sapien
agtttcagtgggtggatatcaccca

SEQ ID NO: 964964 - DNA, 25 bp, Homo sapien
gacaatctaaaatcacctgggacat

SEQ ID NO: 964965 - DNA, 25 bp, Homo sapien
taccccacagagagagaattaaacc

SEQ ID NO: 964966 - DNA, 25 bp, Homo sapien
ccacagcaccaactcgaactttgta

SEQ ID NO: 964967 - DNA, 25 bp, Homo sapien
taacccaaagaagctccgagaacca

SEQ ID NO: 964968 - DNA, 25 bp, Homo sapien
gaactttgtatgctgttcctggcat

SEQ ID NO: 964969 - DNA, 25 bp, Homo sapien
tcctggcattagaccctttaaccca

SEQ ID NO: 964970 - DNA, 25 bp, Homo sapien
gctgcagcagtaagattgctgatcc

SEQ ID NO: 964971 - DNA, 25 bp, Homo sapien
ttcccaactgatattggcataggtc

SEQ ID NO: 964972 - DNA, 25 bp, Homo sapien
gcctgctacaccatattcaacataa

SEQ ID NO: 964973 - DNA, 25 bp, Homo sapien
gctgatcctgggatttactgcttga

SEQ ID NO: 964974 - DNA, 25 bp, Homo sapien
tcatcatggaatgtcagagacgcca

SEQ ID NO: 964975 - DNA, 25 bp, Homo sapien
aatcccagggacagacgtcatcatg

SEQ ID NO: 964976 - DNA, 25 bp, Homo sapien
aatttagggttcactcatgctttgc

SEQ ID NO: 964977 - DNA, 25 bp, Homo sapien
tgttgtccattagatacagtcccgg

SEQ ID NO: 964978 - DNA, 25 bp, Homo sapien
tgtccactgcataggaaacaaggcc

SEQ ID NO: 964979 - DNA, 25 bp, Homo sapien
tatcaagtctaagctcacaggagtt

SEQ ID NO: 964980 - DNA, 25 bp, Homo sapien
gaagtaagtttacatcgctctgtga

SEQ ID NO: 964981 - DNA, 25 bp, Homo sapien
tacttctaacgtgacaagtccactg

SEQ ID NO: 964982 - DNA, 25 bp, Homo sapien
ggcaggtactccactgctctctaaa

SEQ ID NO: 964983 - DNA, 25 bp, Homo sapien
acagtgcccagtggcaggtactcca

SEQ ID NO: 964984 - DNA, 25 bp, Homo sapien
gcatgccacgtgaaaacagtgccca

SEQ ID NO: 964985 - DNA, 25 bp, Homo sapien
tctctaaaaagctgactggtcaacc

SEQ ID NO: 964986 - DNA, 25 bp, Homo sapien
gcaatggcagccgagtgtacactgt

SEQ ID NO: 964987 - DNA, 25 bp, Homo sapien
cccaaaccagttggagggcattgct

SEQ ID NO: 964988 - DNA, 25 bp, Homo sapien
ggcattgctacgctgtaattccaaa

SEQ ID NO: 964989 - DNA, 25 bp, Homo sapien
cacatttgagaagagcatatgggtc

SEQ ID NO: 964990 - DNA, 25 bp, Homo sapien
ctttgcctgcacctacatcaggtgg

SEQ ID NO: 964991 - DNA, 25 bp, Homo sapien
agaactcgaattacatatatttgtg

SEQ ID NO: 964992 - DNA, 25 bp, Homo sapien
aatcaggaccagaactcgaattaca

SEQ ID NO: 964993 - DNA, 25 bp, Homo sapien
aatgtaaattgatatgtgaactaga

SEQ ID NO: 964994 - DNA, 25 bp, Homo sapien
gatatgtgaactagaaaattttttc

SEQ ID NO: 964995 - DNA, 25 bp, Homo sapien
gtccaatatgaactaaatagctgat

SEQ ID NO: 964996 - DNA, 25 bp, Homo sapien
gacagacgttccatagcaagaagga

SEQ ID NO: 964997 - DNA, 25 bp, Homo sapien
cacatggagttgaaaaatatcagtc

SEQ ID NO: 964998 - DNA, 25 bp, Homo sapien
caaataagtgtttgcgttaatcagg

SEQ ID NO: 964999 - DNA, 25 bp, Homo sapien
gaaataaaacttatatcgagtgctg

SEQ ID NO: 965000 - DNA, 25 bp, Homo sapien
tttcaaatctaccagagggcctaat

SEQ ID NO: 965001 - DNA, 25 bp, Homo sapien
ctctgtaatttgacttcctgatcct

SEQ ID NO: 965002 - DNA, 25 bp, Homo sapien
taaaacttatatcgagtgctgaaat

SEQ ID NO: 965003 - DNA, 25 bp, Homo sapien
caaaatgccattcgggtggctcggt

SEQ ID NO: 965004 - DNA, 25 bp, Homo sapien
cacaatcttcaaagacgagggagca

SEQ ID NO: 965005 - DNA, 25 bp, Homo sapien
ggctgatactttaaggtgtactctg

SEQ ID NO: 965006 - DNA, 25 bp, Homo sapien
actctgtcaaaatgccattcgggtg

SEQ ID NO: 965007 - DNA, 25 bp, Homo sapien
cattagtacaaacctgtgacaggca

SEQ ID NO: 965008 - DNA, 25 bp, Homo sapien
cagaggctggcaaatcaccagagga

SEQ ID NO: 965009 - DNA, 25 bp, Homo sapien
catgcccaggtgcagaaacgttctt

SEQ ID NO: 965010 - DNA, 25 bp, Homo sapien
tctggtggtgaatggacaaaagccc

SEQ ID NO: 965011 - DNA, 25 bp, Homo sapien
gatcttagagacacgtccattccat

SEQ ID NO: 965012 - DNA, 25 bp, Homo sapien
tctgaagccttctatgtacacttag

SEQ ID NO: 965013 - DNA, 25 bp, Homo sapien
tgccatatgttcctgagatcttaga

SEQ ID NO: 965014 - DNA, 25 bp, Homo sapien
tatactttgatcagtagcccttctg

SEQ ID NO: 965015 - DNA, 25 bp, Homo sapien
ttttctcaatgtgacgtctgtttct

SEQ ID NO: 965016 - DNA, 25 bp, Homo sapien
tcagtgtgtagtggctaaagggctc

SEQ ID NO: 965017 - DNA, 25 bp, Homo sapien
tcccattgaccactcggacattcag

SEQ ID NO: 965018 - DNA, 25 bp, Homo sapien
taaagggctctagccccggcaacat

SEQ ID NO: 965019 - DNA, 25 bp, Homo sapien
tgcagcccttactaaataaagccac

SEQ ID NO: 965020 - DNA, 25 bp, Homo sapien
gacaagtggcattcgctgcagccct

SEQ ID NO: 965021 - DNA, 25 bp, Homo sapien
gtggtatgcatgacaagtggcattc

SEQ ID NO: 965022 - DNA, 25 bp, Homo sapien
tcgctgcagcccttactaaataaag

SEQ ID NO: 965023 - DNA, 25 bp, Homo sapien
cttttcagaggtactgggtcccagt

SEQ ID NO: 965024 - DNA, 25 bp, Homo sapien
cgatagccttgtaggtgtcctcgga

SEQ ID NO: 965025 - DNA, 25 bp, Homo sapien
gtcccagtgcacctcggctaaggta

SEQ ID NO: 965026 - DNA, 25 bp, Homo sapien
tgttcaccacattcacacgcacgtt

SEQ ID NO: 965027 - DNA, 25 bp, Homo sapien
ggcccattagattcgaaaccattca

SEQ ID NO: 965028 - DNA, 25 bp, Homo sapien
tcaggtatggaacaaaggttggcgt

SEQ ID NO: 965029 - DNA, 25 bp, Homo sapien
tgtcccatgactacagctggctcgg

SEQ ID NO: 965030 - DNA, 25 bp, Homo sapien
ttctggcgccagctaactttgtact

SEQ ID NO: 965031 - DNA, 25 bp, Homo sapien
ggccccaggtggttctttatgataa

SEQ ID NO: 965032 - DNA, 25 bp, Homo sapien
tttgagcatgtgtatatgctaggca

SEQ ID NO: 965033 - DNA, 25 bp, Homo sapien
tatgataacactagctagcattttt

SEQ ID NO: 965034 - DNA, 25 bp, Homo sapien
gtgaaattggttctattattactcc

SEQ ID NO: 965035 - DNA, 25 bp, Homo sapien
tccacgtaatcaccaaattatcagg

SEQ ID NO: 965036 - DNA, 25 bp, Homo sapien
cttccacgtaatcaccaaattatca

SEQ ID NO: 965037 - DNA, 25 bp, Homo sapien
gtaatcaccaaattatcaggctctg

SEQ ID NO: 965038 - DNA, 25 bp, Homo sapien
cacgtaatcaccaaattatcaggct

SEQ ID NO: 965039 - DNA, 25 bp, Homo sapien
tcttcccaatgctgttcactgccat

SEQ ID NO: 965040 - DNA, 25 bp, Homo sapien
agacgcctcgctgggcaagctcttc

SEQ ID NO: 965041 - DNA, 25 bp, Homo sapien
catcacgcggaaggagtagttcacg

SEQ ID NO: 965042 - DNA, 25 bp, Homo sapien
gaggctttcgtcaaatactgctcag

SEQ ID NO: 965043 - DNA, 25 bp, Homo sapien
tagctgccagcaataactaacaggg

SEQ ID NO: 965044 - DNA, 25 bp, Homo sapien
acacaccaaacccaagaccgtgaat

SEQ ID NO: 965045 - DNA, 25 bp, Homo sapien
tttcagagttgtcattatcctcaac

SEQ ID NO: 965046 - DNA, 25 bp, Homo sapien
gaccgtgaattcagtcaactcaggg

SEQ ID NO: 965047 - DNA, 25 bp, Homo sapien
ggtccatgacagctgaacacttttg

SEQ ID NO: 965048 - DNA, 25 bp, Homo sapien
tgtcaagttgatctgtcagttctaa

SEQ ID NO: 965049 - DNA, 25 bp, Homo sapien
tattgttgtcatcgcctggggtcca

SEQ ID NO: 965050 - DNA, 25 bp, Homo sapien
tcagttctaagtcaaagggaggatt

SEQ ID NO: 965051 - DNA, 25 bp, Homo sapien
taaacgggagctggagttggagtag

SEQ ID NO: 965052 - DNA, 25 bp, Homo sapien
aacgggagctggagttggagtagga

SEQ ID NO: 965053 - DNA, 25 bp, Homo sapien
cgtaaacgggagctggagttggagt

SEQ ID NO: 965054 - DNA, 25 bp, Homo sapien
acgggagctggagttggagtaggag

SEQ ID NO: 965055 - DNA, 25 bp, Homo sapien
tccagagtggtgttggccacacacg

SEQ ID NO: 965056 - DNA, 25 bp, Homo sapien
tgtcatcgtcactgacatcagctac

SEQ ID NO: 965057 - DNA, 25 bp, Homo sapien
aacaacgctaagcacagcgctggcg

SEQ ID NO: 965058 - DNA, 25 bp, Homo sapien
tagatgatccttgtcaacagtgaac

SEQ ID NO: 965059 - DNA, 25 bp, Homo sapien
ggctgtttaacgatccatgtaggat

SEQ ID NO: 965060 - DNA, 25 bp, Homo sapien
tgcacaactgcatattcgggctgtt

SEQ ID NO: 965061 - DNA, 25 bp, Homo sapien
gagggataaggtgtgatcatgtttc

SEQ ID NO: 965062 - DNA, 25 bp, Homo sapien
tcatcactgggcagttccctgttgt

SEQ ID NO: 965063 - DNA, 25 bp, Homo sapien
catccctaatttattccttgcaaca

SEQ ID NO: 965064 - DNA, 25 bp, Homo sapien
ccttgcaacacacgtataagttcct

SEQ ID NO: 965065 - DNA, 25 bp, Homo sapien
cattcttcgccatccctaatttatt

SEQ ID NO: 965066 - DNA, 25 bp, Homo sapien
tgcaacacacgtataagttcctgta

SEQ ID NO: 965067 - DNA, 25 bp, Homo sapien
taaagcaggcctgtttgcaatgacc

SEQ ID NO: 965068 - DNA, 25 bp, Homo sapien
gaaggcacagtctagtaaagcaggc

SEQ ID NO: 965069 - DNA, 25 bp, Homo sapien
caatgacctggtagagtgtgtttgc

SEQ ID NO: 965070 - DNA, 25 bp, Homo sapien
cactcgatggttgggagaggagacc

SEQ ID NO: 965071 - DNA, 25 bp, Homo sapien
tggtatcgccatctatttttctgct

SEQ ID NO: 965072 - DNA, 25 bp, Homo sapien
catattcattagaggcattgcactg

SEQ ID NO: 965073 - DNA, 25 bp, Homo sapien
tgcgtttgccagtaaatatccatat

SEQ ID NO: 965074 - DNA, 25 bp, Homo sapien
cattgcactgatagactgcacttga

SEQ ID NO: 965075 - DNA, 25 bp, Homo sapien
tgtttggatgtaaaaatagaaagta

SEQ ID NO: 965076 - DNA, 25 bp, Homo sapien
ctgtttggatgtaaaaatagaaagt

SEQ ID NO: 965077 - DNA, 25 bp, Homo sapien
tgcattttgctaaaagaacccttct

SEQ ID NO: 965078 - DNA, 25 bp, Homo sapien
attgcattttgctaaaagaaccctt

SEQ ID NO: 965079 - DNA, 25 bp, Homo sapien
ttcaggtcttaaatgcagtcacaga

SEQ ID NO: 965080 - DNA, 25 bp, Homo sapien
gtcacagatcaataacattgcattt

SEQ ID NO: 965081 - DNA, 25 bp, Homo sapien
tatttatgtgcactcggcagccaga

SEQ ID NO: 965082 - DNA, 25 bp, Homo sapien
cagtatttatgtgcactcggcagcc

SEQ ID NO: 965083 - DNA, 25 bp, Homo sapien
tttatgtgcactcggcagccagagc

SEQ ID NO: 965084 - DNA, 25 bp, Homo sapien
tttacagtatttatgtgcactcggc

SEQ ID NO: 965085 - DNA, 25 bp, Homo sapien
gacagtcagtgtccttaggtgctcg

SEQ ID NO: 965086 - DNA, 25 bp, Homo sapien
acagtcagtgtccttaggtgctcgc

SEQ ID NO: 965087 - DNA, 25 bp, Homo sapien
ctgcagaggcgaaaggagacagtca

SEQ ID NO: 965088 - DNA, 25 bp, Homo sapien
ggagacagtcagtgtccttaggtgc

SEQ ID NO: 965089 - DNA, 25 bp, Homo sapien
agtcaggagtggggaggctgtgtac

SEQ ID NO: 965090 - DNA, 25 bp, Homo sapien
caagtcaggagtggggaggctgtgt

SEQ ID NO: 965091 - DNA, 25 bp, Homo sapien
tgcaagtcaggagtggggaggctgt

SEQ ID NO: 965092 - DNA, 25 bp, Homo sapien
ctgcaagtcaggagtggggaggctg

SEQ ID NO: 965093 - DNA, 25 bp, Homo sapien
caacagtagttcagaagcacagctg

SEQ ID NO: 965094 - DNA, 25 bp, Homo sapien
gtttcctgtgcctcacccgcagcag

SEQ ID NO: 965095 - DNA, 25 bp, Homo sapien
ctggcagtatggtcccctgactgta

SEQ ID NO: 965096 - DNA, 25 bp, Homo sapien
cagtatggtcccctgactgtatctc

SEQ ID NO: 965097 - DNA, 25 bp, Homo sapien
agcttgtgctcccagctcacttctg

SEQ ID NO: 965098 - DNA, 25 bp, Homo sapien
tgtgctcccagctcacttctggcgc

SEQ ID NO: 965099 - DNA, 25 bp, Homo sapien
ttgtgctcccagctcacttctggcg

SEQ ID NO: 965100 - DNA, 25 bp, Homo sapien
ctgtcagcaagccagcttgtgctcc

SEQ ID NO: 965101 - DNA, 25 bp, Homo sapien
gggtcatcgtgcagaaagctgtgca

SEQ ID NO: 965102 - DNA, 25 bp, Homo sapien
ggtcatcgtgcagaaagctgtgcag

SEQ ID NO: 965103 - DNA, 25 bp, Homo sapien
gtcatcgtgcagaaagctgtgcaga

SEQ ID NO: 965104 - DNA, 25 bp, Homo sapien
agggtcatcgtgcagaaagctgtgc

SEQ ID NO: 965105 - DNA, 25 bp, Homo sapien
gaccctggatctataggagctatgg

SEQ ID NO: 965106 - DNA, 25 bp, Homo sapien
ttggccaccagatgtcgagaaagac

SEQ ID NO: 965107 - DNA, 25 bp, Homo sapien
tggtgccgggctccttgctttgctg

SEQ ID NO: 965108 - DNA, 25 bp, Homo sapien
cagggaagcttcacagtaccttggt

SEQ ID NO: 965109 - DNA, 25 bp, Homo sapien
gcagtgaggtgcaacatccatttaa

SEQ ID NO: 965110 - DNA, 25 bp, Homo sapien
gatttagcagattaatgggagggcc

SEQ ID NO: 965111 - DNA, 25 bp, Homo sapien
cacgctgggaagcatagtggtagct

SEQ ID NO: 965112 - DNA, 25 bp, Homo sapien
aagctggcctttgctatgatttagc

SEQ ID NO: 965113 - DNA, 25 bp, Homo sapien
cagacgaaatattgccaagtaccag

SEQ ID NO: 965114 - DNA, 25 bp, Homo sapien
cactgtcgggatgtatatatgctct

SEQ ID NO: 965115 - DNA, 25 bp, Homo sapien
gtaccagtcatcacatgccattatg

SEQ ID NO: 965116 - DNA, 25 bp, Homo sapien
tactgcaattagaaccactcaaggc

SEQ ID NO: 965117 - DNA, 25 bp, Homo sapien
gtttggggttgccattagctctgca

SEQ ID NO: 965118 - DNA, 25 bp, Homo sapien
gctctgcagatcaaggtcccatcct

SEQ ID NO: 965119 - DNA, 25 bp, Homo sapien
tattgggactccatttgttaaccag

SEQ ID NO: 965120 - DNA, 25 bp, Homo sapien
tctattgggactccatttgttaacc

SEQ ID NO: 965121 - DNA, 25 bp, Homo sapien
ggggctgtgatccagtatggagccg

SEQ ID NO: 965122 - DNA, 25 bp, Homo sapien
ctggggacagcacaagattttgagg

SEQ ID NO: 965123 - DNA, 25 bp, Homo sapien
cacaagattttgaggggctgtgatc

SEQ ID NO: 965124 - DNA, 25 bp, Homo sapien
gaggggctgtgatccagtatggagc

SEQ ID NO: 965125 - DNA, 25 bp, Homo sapien
gcttctgaaacatgaatgatctgca

SEQ ID NO: 965126 - DNA, 25 bp, Homo sapien
gatggctcctaatgcgttttttgct

SEQ ID NO: 965127 - DNA, 25 bp, Homo sapien
gatctgcaaggttttctcaaagttc

SEQ ID NO: 965128 - DNA, 25 bp, Homo sapien
cagaaatggtatggtggatggctcc

SEQ ID NO: 965129 - DNA, 25 bp, Homo sapien
ccagtgaaagcacatttcctcttaa

SEQ ID NO: 965130 - DNA, 25 bp, Homo sapien
tgcattgccttctggagttaaaaat

SEQ ID NO: 965131 - DNA, 25 bp, Homo sapien
aatgcactccagtgaaagcacattt

SEQ ID NO: 965132 - DNA, 25 bp, Homo sapien
tcctctttgttacttgcattgcctt

SEQ ID NO: 965133 - DNA, 25 bp, Homo sapien
gagagttactgacagaggtcttgca

SEQ ID NO: 965134 - DNA, 25 bp, Homo sapien
gatcttagggatagttacacaggcc

SEQ ID NO: 965135 - DNA, 25 bp, Homo sapien
gaaatggttctttacacgcaaacag

SEQ ID NO: 965136 - DNA, 25 bp, Homo sapien
catcatggaaaatgctctagtggca

SEQ ID NO: 965137 - DNA, 25 bp, Homo sapien
gctatagtgtcattcaattcatcca

SEQ ID NO: 965138 - DNA, 25 bp, Homo sapien
ctcaaattagcagctatagtgtcat

SEQ ID NO: 965139 - DNA, 25 bp, Homo sapien
ccataaaactcagtgtcactcaaat

SEQ ID NO: 965140 - DNA, 25 bp, Homo sapien
gtgtcactcaaattagcagctatag

SEQ ID NO: 965141 - DNA, 25 bp, Homo sapien
ggtggcttcctgataatgaacctgt

SEQ ID NO: 965142 - DNA, 25 bp, Homo sapien
catatgcagctatcctgaccgagtg

SEQ ID NO: 965143 - DNA, 25 bp, Homo sapien
catttaacttaagctgcaggaccgc

SEQ ID NO: 965144 - DNA, 25 bp, Homo sapien
caacactttagtgagcattcatggg

SEQ ID NO: 965145 - DNA, 25 bp, Homo sapien
gcttctgctgtatggtttgagtatg

SEQ ID NO: 965146 - DNA, 25 bp, Homo sapien
taaatctagcataacagatatagtc

SEQ ID NO: 965147 - DNA, 25 bp, Homo sapien
tggtttgagtatgattaaatctagc

SEQ ID NO: 965148 - DNA, 25 bp, Homo sapien
aacagatatagtcttcgcgggtgtc

SEQ ID NO: 965149 - DNA, 25 bp, Homo sapien
ccttgagaaactctctcactttgtg

SEQ ID NO: 965150 - DNA, 25 bp, Homo sapien
ttcaaaccttgagaaactctctcac

SEQ ID NO: 965151 - DNA, 25 bp, Homo sapien
aaccttgagaaactctctcactttg

SEQ ID NO: 965152 - DNA, 25 bp, Homo sapien
cattcaaaccttgagaaactctctc

SEQ ID NO: 965153 - DNA, 25 bp, Homo sapien
tataggtggtggtaatccaattggg

SEQ ID NO: 965154 - DNA, 25 bp, Homo sapien
taaagactgaccactttgaagtgtg

SEQ ID NO: 965155 - DNA, 25 bp, Homo sapien
ttttctttggtccacaatggtgatc

SEQ ID NO: 965156 - DNA, 25 bp, Homo sapien
gtctgcagggaagtactaaagactg

SEQ ID NO: 965157 - DNA, 25 bp, Homo sapien
aaatgagtcccattacgggtccagg

SEQ ID NO: 965158 - DNA, 25 bp, Homo sapien
ccagagggtctttatcgatgtcaaa

SEQ ID NO: 965159 - DNA, 25 bp, Homo sapien
aattatgagcgttcctgtgccaggc

SEQ ID NO: 965160 - DNA, 25 bp, Homo sapien
ccttgctgtacactgatagactcct

SEQ ID NO: 965161 - DNA, 25 bp, Homo sapien
aatattctcccgagggtcaataatg

SEQ ID NO: 965162 - DNA, 25 bp, Homo sapien
ggattacaatattctcccgagggtc

SEQ ID NO: 965163 - DNA, 25 bp, Homo sapien
ttctcccgagggtcaataatgtaat

SEQ ID NO: 965164 - DNA, 25 bp, Homo sapien
ttacaatattctcccgagggtcaat

SEQ ID NO: 965165 - DNA, 25 bp, Homo sapien
ttggagactgttgggtgatggttgg

SEQ ID NO: 965166 - DNA, 25 bp, Homo sapien
gttgggtgatggttggaggctgtac

SEQ ID NO: 965167 - DNA, 25 bp, Homo sapien
agactgttgggtgatggttggaggc

SEQ ID NO: 965168 - DNA, 25 bp, Homo sapien
actgttgggtgatggttggaggctg

SEQ ID NO: 965169 - DNA, 25 bp, Homo sapien
ggctcatatagttttcttgcaggac

SEQ ID NO: 965170 - DNA, 25 bp, Homo sapien
caccctcagcatatgacgggaaaga

SEQ ID NO: 965171 - DNA, 25 bp, Homo sapien
ggcagcttgcacaactcaatccttc

SEQ ID NO: 965172 - DNA, 25 bp, Homo sapien
ctaaagagccgcctgttgggaagat

SEQ ID NO: 965173 - DNA, 25 bp, Homo sapien
gagaatcaggggcactctgcccgca

SEQ ID NO: 965174 - DNA, 25 bp, Homo sapien
tctgcccgcagataagcgcttcttt

SEQ ID NO: 965175 - DNA, 25 bp, Homo sapien
gatcaagaggtacttccagtgcact

SEQ ID NO: 965176 - DNA, 25 bp, Homo sapien
gcactaatcatctggcacaggaaga

SEQ ID NO: 965177 - DNA, 25 bp, Homo sapien
ctgagactcacacactgaatttcct

SEQ ID NO: 965178 - DNA, 25 bp, Homo sapien
cgttgtgtgcaacgtttaagtaatt

SEQ ID NO: 965179 - DNA, 25 bp, Homo sapien
tgtgaaacgttgtgtgcaacgttta

SEQ ID NO: 965180 - DNA, 25 bp, Homo sapien
tgagactcacacactgaatttcctt

SEQ ID NO: 965181 - DNA, 25 bp, Homo sapien
caaagaaaaaccaccgctttgcact

SEQ ID NO: 965182 - DNA, 25 bp, Homo sapien
tcagtaggagtccatctgccttgta

SEQ ID NO: 965183 - DNA, 25 bp, Homo sapien
tctcgatgagagtaatgtactctgc

SEQ ID NO: 965184 - DNA, 25 bp, Homo sapien
tattgacgtcaattctttgactcag

SEQ ID NO: 965185 - DNA, 25 bp, Homo sapien
agctatctgatgacagttgtcagga

SEQ ID NO: 965186 - DNA, 25 bp, Homo sapien
ggcttgtccagccagctatctgatg

SEQ ID NO: 965187 - DNA, 25 bp, Homo sapien
caggcttgtccagccagctatctga

SEQ ID NO: 965188 - DNA, 25 bp, Homo sapien
cttgtccagccagctatctgatgac

SEQ ID NO: 965189 - DNA, 25 bp, Homo sapien
atcacaattcactaaacagagtggg

SEQ ID NO: 965190 - DNA, 25 bp, Homo sapien
tccaatccaatcacaattcactaaa

SEQ ID NO: 965191 - DNA, 25 bp, Homo sapien
ggaggagactgctccactctgaatg

SEQ ID NO: 965192 - DNA, 25 bp, Homo sapien
ggagactgctccactctgaatgcct

SEQ ID NO: 965193 - DNA, 25 bp, Homo sapien
atgagagcgttcacacccttctctt

SEQ ID NO: 965194 - DNA, 25 bp, Homo sapien
tctggaaactcctaaagtgcaaaac

SEQ ID NO: 965195 - DNA, 25 bp, Homo sapien
ggttcaccttgcagatggatcccaa

SEQ ID NO: 965196 - DNA, 25 bp, Homo sapien
tgtcctcacccttgacttcatggtg

SEQ ID NO: 965197 - DNA, 25 bp, Homo sapien
cagtttaacagtgggtagagtcctc

SEQ ID NO: 965198 - DNA, 25 bp, Homo sapien
tcatatatgaaaagggccattccac

SEQ ID NO: 965199 - DNA, 25 bp, Homo sapien
cacttctattcaggttggcatggcc

SEQ ID NO: 965200 - DNA, 25 bp, Homo sapien
tgtctccaaaggtaatcagccactg

SEQ ID NO: 965201 - DNA, 25 bp, Homo sapien
tgagctgttcttacccagatgaggc

SEQ ID NO: 965202 - DNA, 25 bp, Homo sapien
tcccaacaggcgaatgaacttagaa

SEQ ID NO: 965203 - DNA, 25 bp, Homo sapien
tggctcctttcaccagaacaagctg

SEQ ID NO: 965204 - DNA, 25 bp, Homo sapien
gaatcctgtaggttaaaagctggcc

SEQ ID NO: 965205 - DNA, 25 bp, Homo sapien
tagaagcgctagcaattctggctcc

SEQ ID NO: 965206 - DNA, 25 bp, Homo sapien
caacccacttggactttcaggaaca

SEQ ID NO: 965207 - DNA, 25 bp, Homo sapien
tcctgcccagaagggctaactgctt

SEQ ID NO: 965208 - DNA, 25 bp, Homo sapien
ttttgagacagcagctcttgagtga

SEQ ID NO: 965209 - DNA, 25 bp, Homo sapien
ttcaggaacaagctcatgggctcct

SEQ ID NO: 965210 - DNA, 25 bp, Homo sapien
caaagcctgtgtttgtcagtaggat

SEQ ID NO: 965211 - DNA, 25 bp, Homo sapien
taacaatggaaagccacaataccct

SEQ ID NO: 965212 - DNA, 25 bp, Homo sapien
gcattagtcacaagccaaaggccca

SEQ ID NO: 965213 - DNA, 25 bp, Homo sapien
gctgtgtcgattaagagcctcctct

SEQ ID NO: 965214 - DNA, 25 bp, Homo sapien
tgtgttaaactagggacaccattga

SEQ ID NO: 965215 - DNA, 25 bp, Homo sapien
taaggtaatgataaaggcatcaggc

SEQ ID NO: 965216 - DNA, 25 bp, Homo sapien
catccctgggtaagttgagatcctt

SEQ ID NO: 965217 - DNA, 25 bp, Homo sapien
gcttagggcatatttgattattcgc

SEQ ID NO: 965218 - DNA, 25 bp, Homo sapien
ggcacctgggaagtcattagcacca

SEQ ID NO: 965219 - DNA, 25 bp, Homo sapien
aagtacatacgaattccctctgagg

SEQ ID NO: 965220 - DNA, 25 bp, Homo sapien
taatgaagaattggtaccaggcacc

SEQ ID NO: 965221 - DNA, 25 bp, Homo sapien
caacaaggcgtgaccggtatgagct

SEQ ID NO: 965222 - DNA, 25 bp, Homo sapien
attctacttgcatggagtccccgag

SEQ ID NO: 965223 - DNA, 25 bp, Homo sapien
aattgtgcacattctaggtccctca

SEQ ID NO: 965224 - DNA, 25 bp, Homo sapien
tacagctagttctcttggagatgac

SEQ ID NO: 965225 - DNA, 25 bp, Homo sapien
cactgctgccaaccctgttttgtga

SEQ ID NO: 965226 - DNA, 25 bp, Homo sapien
tattaataaagatggccaccagaca

SEQ ID NO: 965227 - DNA, 25 bp, Homo sapien
gtaccaatgagacccaaatgacttc

SEQ ID NO: 965228 - DNA, 25 bp, Homo sapien
ggttcaactataaacaatgttccca

SEQ ID NO: 965229 - DNA, 25 bp, Homo sapien
gttcccagcactcattcaatgatta

SEQ ID NO: 965230 - DNA, 25 bp, Homo sapien
gcaacatactgcattaccagcaggg

SEQ ID NO: 965231 - DNA, 25 bp, Homo sapien
tcctcctgggtagttccctagataa

SEQ ID NO: 965232 - DNA, 25 bp, Homo sapien
gcagccagggatgaaatggccagat

SEQ ID NO: 965233 - DNA, 25 bp, Homo sapien
gtcaggattcgactccctccaaaag

SEQ ID NO: 965234 - DNA, 25 bp, Homo sapien
tgctgatactagtattgtactggta

SEQ ID NO: 965235 - DNA, 25 bp, Homo sapien
tactgctgatactagtattgtactg

SEQ ID NO: 965236 - DNA, 25 bp, Homo sapien
actagtattgtactggtaagccacc

SEQ ID NO: 965237 - DNA, 25 bp, Homo sapien
cttactgctgatactagtattgtac

SEQ ID NO: 965238 - DNA, 25 bp, Homo sapien
aaccaaacgtcttcttagcattgct

SEQ ID NO: 965239 - DNA, 25 bp, Homo sapien
taaaccaaacgtcttcttagcattg

SEQ ID NO: 965240 - DNA, 25 bp, Homo sapien
aaaccaaacgtcttcttagcattgc

SEQ ID NO: 965241 - DNA, 25 bp, Homo sapien
gcatgctggaaatcatgttgtcata

SEQ ID NO: 965242 - DNA, 25 bp, Homo sapien
tgtcagcatgctggaaatcatgttg

SEQ ID NO: 965243 - DNA, 25 bp, Homo sapien
cagcatgctggaaatcatgttgtca

SEQ ID NO: 965244 - DNA, 25 bp, Homo sapien
gctggaaatcatgttgtcatataca

SEQ ID NO: 965245 - DNA, 25 bp, Homo sapien
caacaggctctgcatcacagaatgg

SEQ ID NO: 965246 - DNA, 25 bp, Homo sapien
ggctctgcatcacagaatggatgaa

SEQ ID NO: 965247 - DNA, 25 bp, Homo sapien
atggaagcctccctgtccagtcggg

SEQ ID NO: 965248 - DNA, 25 bp, Homo sapien
acatggaagcctccctgtccagtcg

SEQ ID NO: 965249 - DNA, 25 bp, Homo sapien
caataggagtgaaacctccctccac

SEQ ID NO: 965250 - DNA, 25 bp, Homo sapien
ctctagaaaggtagcggcaagggct

SEQ ID NO: 965251 - DNA, 25 bp, Homo sapien
caagggctactactcaaagggaaga

SEQ ID NO: 965252 - DNA, 25 bp, Homo sapien
gtaatcagacaccacgtaccaggca

SEQ ID NO: 965253 - DNA, 25 bp, Homo sapien
tccatttcctcccagtagcaaaggg

SEQ ID NO: 965254 - DNA, 25 bp, Homo sapien
catttcctcccagtagcaaagggaa

SEQ ID NO: 965255 - DNA, 25 bp, Homo sapien
ttacaaatgaagttatcttactgct

SEQ ID NO: 965256 - DNA, 25 bp, Homo sapien
atgaagttatcttactgctttccat

SEQ ID NO: 965257 - DNA, 25 bp, Homo sapien
tagcaggcctttataatggcccaag

SEQ ID NO: 965258 - DNA, 25 bp, Homo sapien
ggcctttataatggcccaagttcac

SEQ ID NO: 965259 - DNA, 25 bp, Homo sapien
gcaggcctttataatggcccaagtt

SEQ ID NO: 965260 - DNA, 25 bp, Homo sapien
tatttagcaggcctttataatggcc

SEQ ID NO: 965261 - DNA, 25 bp, Homo sapien
gtctgttccttgctactagaataaa

SEQ ID NO: 965262 - DNA, 25 bp, Homo sapien
tggagtagttagagctacaggcatg

SEQ ID NO: 965263 - DNA, 25 bp, Homo sapien
gctactagaataaagtcttcatgaa

SEQ ID NO: 965264 - DNA, 25 bp, Homo sapien
cttcccgcttcaaccttctgaagtg

SEQ ID NO: 965265 - DNA, 25 bp, Homo sapien
tacagcctgccgaaatacagctatg

SEQ ID NO: 965266 - DNA, 25 bp, Homo sapien
gcaaggatacaactagaagaccgct

SEQ ID NO: 965267 - DNA, 25 bp, Homo sapien
actccatagaggttgacggtaccca

SEQ ID NO: 965268 - DNA, 25 bp, Homo sapien
ttttacaaatgtcccaacagcagga

SEQ ID NO: 965269 - DNA, 25 bp, Homo sapien
tcccatgactggtaatgcacagagc

SEQ ID NO: 965270 - DNA, 25 bp, Homo sapien
gaagcttcgccaatgtcaggtgatg

SEQ ID NO: 965271 - DNA, 25 bp, Homo sapien
aaacgaactgagtactgcctctggg

SEQ ID NO: 965272 - DNA, 25 bp, Homo sapien
caataactgcataactgctggcgct

SEQ ID NO: 965273 - DNA, 25 bp, Homo sapien
aggacctggctgacaaccaccagag

SEQ ID NO: 965274 - DNA, 25 bp, Homo sapien
ccagcagttaaagggctgtagcagg

SEQ ID NO: 965275 - DNA, 25 bp, Homo sapien
gcttatctaggtcctatgggagaca

SEQ ID NO: 965276 - DNA, 25 bp, Homo sapien
tatgtctataagctcaggacctggc

SEQ ID NO: 965277 - DNA, 25 bp, Homo sapien
aaaatggctggggttcatccatttc

SEQ ID NO: 965278 - DNA, 25 bp, Homo sapien
gcaagagaacacctgttgttcctgc

SEQ ID NO: 965279 - DNA, 25 bp, Homo sapien
ctgtcatcctgaccagctggctcct

SEQ ID NO: 965280 - DNA, 25 bp, Homo sapien
tgctctctggaggtaacctggttcc

SEQ ID NO: 965281 - DNA, 25 bp, Homo sapien
cactgggctagacacctcccaaatg

SEQ ID NO: 965282 - DNA, 25 bp, Homo sapien
tttctgaagctatccttttctcagg

SEQ ID NO: 965283 - DNA, 25 bp, Homo sapien
ttctgatttctgaagctatcctttt

SEQ ID NO: 965284 - DNA, 25 bp, Homo sapien
ggtccactgggctagacacctccca

SEQ ID NO: 965285 - DNA, 25 bp, Homo sapien
tttgtcgaagtcttcagcaaacagg

SEQ ID NO: 965286 - DNA, 25 bp, Homo sapien
caaacaggggataaagaatgctgag

SEQ ID NO: 965287 - DNA, 25 bp, Homo sapien
ctaagaccagcttttgtcgaagtct

SEQ ID NO: 965288 - DNA, 25 bp, Homo sapien
accagcttttgtcgaagtcttcagc

SEQ ID NO: 965289 - DNA, 25 bp, Homo sapien
aggatagtttgagccagtgaggagg

SEQ ID NO: 965290 - DNA, 25 bp, Homo sapien
atcttcaatcctcttaagagaagta

SEQ ID NO: 965291 - DNA, 25 bp, Homo sapien
caatcctcttaagagaagtatccat

SEQ ID NO: 965292 - DNA, 25 bp, Homo sapien
tcaatcctcttaagagaagtatcca

SEQ ID NO: 965293 - DNA, 25 bp, Homo sapien
cttcaatcctcttaagagaagtatc

SEQ ID NO: 965294 - DNA, 25 bp, Homo sapien
tgaatttcacgccatctctgatgac

SEQ ID NO: 965295 - DNA, 25 bp, Homo sapien
tgtagacccattaggtgccacaaga

SEQ ID NO: 965296 - DNA, 25 bp, Homo sapien
tctgatgaccattgagaggcctttc

SEQ ID NO: 965297 - DNA, 25 bp, Homo sapien
tgcaaagactctaagacttggcagc

SEQ ID NO: 965298 - DNA, 25 bp, Homo sapien
ctatttggtggtcatggattctcta

SEQ ID NO: 965299 - DNA, 25 bp, Homo sapien
caagaatgtgagaaaagctgtcccg

SEQ ID NO: 965300 - DNA, 25 bp, Homo sapien
gctgggcacaggctttttagcaaga

SEQ ID NO: 965301 - DNA, 25 bp, Homo sapien
ccaggaggttttgctctatttgcca

SEQ ID NO: 965302 - DNA, 25 bp, Homo sapien
agccagcacaaccacaacagtgggc

SEQ ID NO: 965303 - DNA, 25 bp, Homo sapien
aaccacaacagtgggcgtggtaagg

SEQ ID NO: 965304 - DNA, 25 bp, Homo sapien
gtttccctgaacagaggggcttgct

SEQ ID NO: 965305 - DNA, 25 bp, Homo sapien
tgaaggacattgggtttccctgaac

SEQ ID NO: 965306 - DNA, 25 bp, Homo sapien
tgtgagccaacagcacaaggaatct

SEQ ID NO: 965307 - DNA, 25 bp, Homo sapien
gagccaacagcacaaggaatctggg

SEQ ID NO: 965308 - DNA, 25 bp, Homo sapien
tcttggccctgagccttctggtttc

SEQ ID NO: 965309 - DNA, 25 bp, Homo sapien
aagaaacaaggtcttcttggccctg

SEQ ID NO: 965310 - DNA, 25 bp, Homo sapien
agagagcccggtgagtcacagacag

SEQ ID NO: 965311 - DNA, 25 bp, Homo sapien
tgccattctgtgatggaggatctct

SEQ ID NO: 965312 - DNA, 25 bp, Homo sapien
acatgcatattcgtgattggcccca

SEQ ID NO: 965313 - DNA, 25 bp, Homo sapien
gccacgagtcatccattccaagtaa

SEQ ID NO: 965314 - DNA, 25 bp, Homo sapien
gcaggtgcaggtagccacaacacag

SEQ ID NO: 965315 - DNA, 25 bp, Homo sapien
caggcagtaactggtttcccaagat

SEQ ID NO: 965316 - DNA, 25 bp, Homo sapien
cattttccaggcagtaactggtttc

SEQ ID NO: 965317 - DNA, 25 bp, Homo sapien
gcaggtagccacaacacagcctatt

SEQ ID NO: 965318 - DNA, 25 bp, Homo sapien
ctttagaggtaatgagtctgatcat

SEQ ID NO: 965319 - DNA, 25 bp, Homo sapien
tctgctgtttaatgaaccccctcat

SEQ ID NO: 965320 - DNA, 25 bp, Homo sapien
gtaatgagtctgatcatgaactcac

SEQ ID NO: 965321 - DNA, 25 bp, Homo sapien
tctctgctgtttaatgaaccccctc

SEQ ID NO: 965322 - DNA, 25 bp, Homo sapien
gaggtacttagggtcatcagattca

SEQ ID NO: 965323 - DNA, 25 bp, Homo sapien
tttgctgccccatttaaagacaacc

SEQ ID NO: 965324 - DNA, 25 bp, Homo sapien
gaaggatttacagttgctgacgctg

SEQ ID NO: 965325 - DNA, 25 bp, Homo sapien
tacagagttacaatttgggaaggca

SEQ ID NO: 965326 - DNA, 25 bp, Homo sapien
ggatgagattccaatagctgctgat

SEQ ID NO: 965327 - DNA, 25 bp, Homo sapien
tggtaggtactctttgaaaatgagg

SEQ ID NO: 965328 - DNA, 25 bp, Homo sapien
tgttagaagctctacattccagtta

SEQ ID NO: 965329 - DNA, 25 bp, Homo sapien
tatgggttaccgagcttctcagatg

SEQ ID NO: 965330 - DNA, 25 bp, Homo sapien
tgtaaggccgacaaagcccccgcaa

SEQ ID NO: 965331 - DNA, 25 bp, Homo sapien
gtgtctctctcgttccgcctcgatt

SEQ ID NO: 965332 - DNA, 25 bp, Homo sapien
ctggagaagcgaagtcggcctcgcc

SEQ ID NO: 965333 - DNA, 25 bp, Homo sapien
gccctctccaggcagcgactggaga

SEQ ID NO: 965334 - DNA, 25 bp, Homo sapien
cgcgtctgaggctcggactgcggcg

SEQ ID NO: 965335 - DNA, 25 bp, Homo sapien
tcagctctggcgcgactgcccagga

SEQ ID NO: 965336 - DNA, 25 bp, Homo sapien
caggaccctggaccgccggtgtcct

SEQ ID NO: 965337 - DNA, 25 bp, Homo sapien
tcgacgaagctatcccctctggctg

SEQ ID NO: 965338 - DNA, 25 bp, Homo sapien
tgaatgccactctcatgggtttagc

SEQ ID NO: 965339 - DNA, 25 bp, Homo sapien
gcataaggcggatgctatctatccg

SEQ ID NO: 965340 - DNA, 25 bp, Homo sapien
tatccgcggtagaaactgggtcttc

SEQ ID NO: 965341 - DNA, 25 bp, Homo sapien
gatttagctacaaaagatgttccag

SEQ ID NO: 965342 - DNA, 25 bp, Homo sapien
gcaagcactggccttgttataaaat

SEQ ID NO: 965343 - DNA, 25 bp, Homo sapien
ggtaggtgccatgctacgtggttta

SEQ ID NO: 965344 - DNA, 25 bp, Homo sapien
tatctcaggtgaattacagttcttc

SEQ ID NO: 965345 - DNA, 25 bp, Homo sapien
ctggtgcaccacacaactgggtttg

SEQ ID NO: 965346 - DNA, 25 bp, Homo sapien
acagaagggttcttgcagcaaaggc

SEQ ID NO: 965347 - DNA, 25 bp, Homo sapien
aatgagatatgcaaagcctacagac

SEQ ID NO: 965348 - DNA, 25 bp, Homo sapien
gcaatatgactatctgggcaacagg

SEQ ID NO: 965349 - DNA, 25 bp, Homo sapien
taagccaagcacaaataagggacat

SEQ ID NO: 965350 - DNA, 25 bp, Homo sapien
tgcgccaggcaactaacttcttatt

SEQ ID NO: 965351 - DNA, 25 bp, Homo sapien
tactgcgccaggcaactaacttctt

SEQ ID NO: 965352 - DNA, 25 bp, Homo sapien
aaatgacattagccttttaacaaca

SEQ ID NO: 965353 - DNA, 25 bp, Homo sapien
ctaaaggggagctacattatgaaca

SEQ ID NO: 965354 - DNA, 25 bp, Homo sapien
tataacagggaagaataagctagtg

SEQ ID NO: 965355 - DNA, 25 bp, Homo sapien
taagctagtgttagatctggaaaag

SEQ ID NO: 965356 - DNA, 25 bp, Homo sapien
atagcattatcttgaaatttcaggg

SEQ ID NO: 965357 - DNA, 25 bp, Homo sapien
aaagtggttgactggaacttcacct

SEQ ID NO: 965358 - DNA, 25 bp, Homo sapien
tattctctgtgctatgcaagctggt

SEQ ID NO: 965359 - DNA, 25 bp, Homo sapien
caaagttaactcatgtcgaacccca

SEQ ID NO: 965360 - DNA, 25 bp, Homo sapien
taaaatctactagcacagtaagggt

SEQ ID NO: 965361 - DNA, 25 bp, Homo sapien
gcaagctggttgaagcaccgtcttt

SEQ ID NO: 965362 - DNA, 25 bp, Homo sapien
tgaaaagaatggaagtccttcatac

SEQ ID NO: 965363 - DNA, 25 bp, Homo sapien
tttgaaaagaatggaagtccttcat

SEQ ID NO: 965364 - DNA, 25 bp, Homo sapien
ttttgaaaagaatggaagtccttca

SEQ ID NO: 965365 - DNA, 25 bp, Homo sapien
ttgaaaagaatggaagtccttcata

SEQ ID NO: 965366 - DNA, 25 bp, Homo sapien
tcatttcgactttcatctagaggta

SEQ ID NO: 965367 - DNA, 25 bp, Homo sapien
ttcatttcgactttcatctagaggt

SEQ ID NO: 965368 - DNA, 25 bp, Homo sapien
tttcgactttcatctagaggtatgt

SEQ ID NO: 965369 - DNA, 25 bp, Homo sapien
catttcgactttcatctagaggtat

SEQ ID NO: 965370 - DNA, 25 bp, Homo sapien
gcatatatcaatagttcctttcttt

SEQ ID NO: 965371 - DNA, 25 bp, Homo sapien
tagctactagaaataacccgattat

SEQ ID NO: 965372 - DNA, 25 bp, Homo sapien
tagcatatatcaatagttcctttct

SEQ ID NO: 965373 - DNA, 25 bp, Homo sapien
tcagtttttagctactagaaataac

SEQ ID NO: 965374 - DNA, 25 bp, Homo sapien
tggagggtccttttcagtgccgtaa

SEQ ID NO: 965375 - DNA, 25 bp, Homo sapien
tgcaaagggtcaaggtcaacgctgt

SEQ ID NO: 965376 - DNA, 25 bp, Homo sapien
tattagccatgaacgactgtgatgc

SEQ ID NO: 965377 - DNA, 25 bp, Homo sapien
gatacaggtatctaatagtcccgga

SEQ ID NO: 965378 - DNA, 25 bp, Homo sapien
tgctatccagctttaggtacttctc

SEQ ID NO: 965379 - DNA, 25 bp, Homo sapien
ggtagcactatctctcaaatggaaa

SEQ ID NO: 965380 - DNA, 25 bp, Homo sapien
cagagtctccaacaaaatgttgtgc

SEQ ID NO: 965381 - DNA, 25 bp, Homo sapien
ggtacttctccaacagtaagtgggc

SEQ ID NO: 965382 - DNA, 25 bp, Homo sapien
tgaagtattttaaagcagcaaacaa

SEQ ID NO: 965383 - DNA, 25 bp, Homo sapien
aagtattttaaagcagcaaacaaga

SEQ ID NO: 965384 - DNA, 25 bp, Homo sapien
gaagtattttaaagcagcaaacaag

SEQ ID NO: 965385 - DNA, 25 bp, Homo sapien
taatgccgaagggttattcagaagc

SEQ ID NO: 965386 - DNA, 25 bp, Homo sapien
tatgcactctaacggcacatctggc

SEQ ID NO: 965387 - DNA, 25 bp, Homo sapien
gtatgttaccgtgtttctcacatca

SEQ ID NO: 965388 - DNA, 25 bp, Homo sapien
ctctcataacgtccagtgcccaggg

SEQ ID NO: 965389 - DNA, 25 bp, Homo sapien
cagaccttggaattaccctagttca

SEQ ID NO: 965390 - DNA, 25 bp, Homo sapien
catgccagttaaccgtccgctgagt

SEQ ID NO: 965391 - DNA, 25 bp, Homo sapien
gctgagtacacggaaaggcatttct

SEQ ID NO: 965392 - DNA, 25 bp, Homo sapien
tgctgagaattgtaacagaccttgg

SEQ ID NO: 965393 - DNA, 25 bp, Homo sapien
cagcagttaaggtttctgggctcac

SEQ ID NO: 965394 - DNA, 25 bp, Homo sapien
tgtaaccattaaggaatcactcccc

SEQ ID NO: 965395 - DNA, 25 bp, Homo sapien
ggtagttcctgtagaccacatcctg

SEQ ID NO: 965396 - DNA, 25 bp, Homo sapien
tagttagcctactcttgtcagatgg

SEQ ID NO: 965397 - DNA, 25 bp, Homo sapien
tgtcatttgaagtgaaaaatatccc

SEQ ID NO: 965398 - DNA, 25 bp, Homo sapien
tattcccatcaatcttctgagttgt

SEQ ID NO: 965399 - DNA, 25 bp, Homo sapien
taaaatattcccatcaatcttctga

SEQ ID NO: 965400 - DNA, 25 bp, Homo sapien
ctgagttgtcatttgaagtgaaaaa

SEQ ID NO: 965401 - DNA, 25 bp, Homo sapien
tggaaaacacaagatccccaaatgt

SEQ ID NO: 965402 - DNA, 25 bp, Homo sapien
ctgcaagtttgtagcactattaagg

SEQ ID NO: 965403 - DNA, 25 bp, Homo sapien
taaaaatgtctaagcgtgaacagaa

SEQ ID NO: 965404 - DNA, 25 bp, Homo sapien
gactttcactaattggcataactgc

SEQ ID NO: 965405 - DNA, 25 bp, Homo sapien
ccacccaaactgtcaagcagactgg

SEQ ID NO: 965406 - DNA, 25 bp, Homo sapien
tgtgatgctagtccagttacttaac

SEQ ID NO: 965407 - DNA, 25 bp, Homo sapien
tctggcacacagctaacttaatgag

SEQ ID NO: 965408 - DNA, 25 bp, Homo sapien
taactctacctcgtaagtagcaagg

SEQ ID NO: 965409 - DNA, 25 bp, Homo sapien
gaaagtctcctaggttgatccttct

SEQ ID NO: 965410 - DNA, 25 bp, Homo sapien
tatgtttgcatgtcagaggcttgtt

SEQ ID NO: 965411 - DNA, 25 bp, Homo sapien
gatccttctgaagatcaatgacatt

SEQ ID NO: 965412 - DNA, 25 bp, Homo sapien
tatcataatgggctacgaatcacac

SEQ ID NO: 965413 - DNA, 25 bp, Homo sapien
ttactatggtacttacagcagctac

SEQ ID NO: 965414 - DNA, 25 bp, Homo sapien
aaagctttgggtgttatccctctat

SEQ ID NO: 965415 - DNA, 25 bp, Homo sapien
ccaaataatgagagttgattccagg

SEQ ID NO: 965416 - DNA, 25 bp, Homo sapien
aatgaccatagtttctgaacacaaa

SEQ ID NO: 965417 - DNA, 25 bp, Homo sapien
tttcttgctgtttcaatcatcagtg

SEQ ID NO: 965418 - DNA, 25 bp, Homo sapien
tgtttcaatcatcagtgcagatccc

SEQ ID NO: 965419 - DNA, 25 bp, Homo sapien
gggtttcttgctgtttcaatcatca

SEQ ID NO: 965420 - DNA, 25 bp, Homo sapien
tgctgtttcaatcatcagtgcagat

SEQ ID NO: 965421 - DNA, 25 bp, Homo sapien
tttgtacgaaaataaatccacagag

SEQ ID NO: 965422 - DNA, 25 bp, Homo sapien
gatgggaagctttcacgattggaaa

SEQ ID NO: 965423 - DNA, 25 bp, Homo sapien
tatgccaaggttcaacaactaaatc

SEQ ID NO: 965424 - DNA, 25 bp, Homo sapien
catacaatgataatggatgggaagc

SEQ ID NO: 965425 - DNA, 25 bp, Homo sapien
aatatgcacatactacctatataat

SEQ ID NO: 965426 - DNA, 25 bp, Homo sapien
acctatataatcagaagatttaaaa

SEQ ID NO: 965427 - DNA, 25 bp, Homo sapien
tgcacatactacctatataatcaga

SEQ ID NO: 965428 - DNA, 25 bp, Homo sapien
tatgcacatactacctatataatca

SEQ ID NO: 965429 - DNA, 25 bp, Homo sapien
tgaaaatacatctgatcctaatttt

SEQ ID NO: 965430 - DNA, 25 bp, Homo sapien
ttcgataaagttcctcacattcatc

SEQ ID NO: 965431 - DNA, 25 bp, Homo sapien
ttcatccaagggcatatgaaacaac

SEQ ID NO: 965432 - DNA, 25 bp, Homo sapien
tgttttcccatgtttgactgtcata

SEQ ID NO: 965433 - DNA, 25 bp, Homo sapien
tctgagtaagttcaactaattttcg

SEQ ID NO: 965434 - DNA, 25 bp, Homo sapien
tagggtctggagagcaaccacgccc

SEQ ID NO: 965435 - DNA, 25 bp, Homo sapien
caactaattttcgtagggtctggag

SEQ ID NO: 965436 - DNA, 25 bp, Homo sapien
tgatgaactggcttctgagtaagtt

SEQ ID NO: 965437 - DNA, 25 bp, Homo sapien
gcacccggccaccagtcagattttt

SEQ ID NO: 965438 - DNA, 25 bp, Homo sapien
tgcacccggccaccagtcagatttt

SEQ ID NO: 965439 - DNA, 25 bp, Homo sapien
tctcaataacttcaggttaaccctc

SEQ ID NO: 965440 - DNA, 25 bp, Homo sapien
caggttaaccctctatattaatggt

SEQ ID NO: 965441 - DNA, 25 bp, Homo sapien
tcctccaccatcaattgagagaatt

SEQ ID NO: 965442 - DNA, 25 bp, Homo sapien
catccttaatttgtctcagtcgtaa

SEQ ID NO: 965443 - DNA, 25 bp, Homo sapien
tccacatagccaattagggccaaaa

SEQ ID NO: 965444 - DNA, 25 bp, Homo sapien
gagagaattcggattcctctccctt

SEQ ID NO: 965445 - DNA, 25 bp, Homo sapien
gcatatgggattcaaggttgcctca

SEQ ID NO: 965446 - DNA, 25 bp, Homo sapien
taacaaaggtaactgaggtgagaag

SEQ ID NO: 965447 - DNA, 25 bp, Homo sapien
gcaggccactacaattaaataatca

SEQ ID NO: 965448 - DNA, 25 bp, Homo sapien
taagaggctaaaactgattcacagt

SEQ ID NO: 965449 - DNA, 25 bp, Homo sapien
gattctctagcttctgtacacagaa

SEQ ID NO: 965450 - DNA, 25 bp, Homo sapien
ctctagcttctgtacacagaagcat

SEQ ID NO: 965451 - DNA, 25 bp, Homo sapien
aagattctctagcttctgtacacag

SEQ ID NO: 965452 - DNA, 25 bp, Homo sapien
caaagattctctagcttctgtacac

SEQ ID NO: 965453 - DNA, 25 bp, Homo sapien
aaacaggctcggtgaggctgggagc

SEQ ID NO: 965454 - DNA, 25 bp, Homo sapien
tagaaacaggctcggtgaggctggg

SEQ ID NO: 965455 - DNA, 25 bp, Homo sapien
ggtggctcacgcctgtaatcccagc

SEQ ID NO: 965456 - DNA, 25 bp, Homo sapien
atagaaacaggctcggtgaggctgg

SEQ ID NO: 965457 - DNA, 25 bp, Homo sapien
ggcaacagggaggaccagatcaaca

SEQ ID NO: 965458 - DNA, 25 bp, Homo sapien
caaattgtcttctccacgaggtgga

SEQ ID NO: 965459 - DNA, 25 bp, Homo sapien
tcctgtggcccttcaaattgtcttc

SEQ ID NO: 965460 - DNA, 25 bp, Homo sapien
aagaggcaaataacttcctgtggcc

SEQ ID NO: 965461 - DNA, 25 bp, Homo sapien
tcttcaaccctagtaatgcagagct

SEQ ID NO: 965462 - DNA, 25 bp, Homo sapien
tgttatcaatactcacccttgcgat

SEQ ID NO: 965463 - DNA, 25 bp, Homo sapien
cccgggtcctgttatcaatactcac

SEQ ID NO: 965464 - DNA, 25 bp, Homo sapien
cagagctttgggtcagttgttcttc

SEQ ID NO: 965465 - DNA, 25 bp, Homo sapien
tataaatttgacaaaaagtaataga

SEQ ID NO: 965466 - DNA, 25 bp, Homo sapien
tctcgctgaagagataaacgctttt

SEQ ID NO: 965467 - DNA, 25 bp, Homo sapien
cgtgggacgagaaagaaagttagca

SEQ ID NO: 965468 - DNA, 25 bp, Homo sapien
aagcttgtacaccttccgtgggacg

SEQ ID NO: 965469 - DNA, 25 bp, Homo sapien
gatcagttttagcaggctcttcctg

SEQ ID NO: 965470 - DNA, 25 bp, Homo sapien
gacttgtaggcttgtccaccgtatg

SEQ ID NO: 965471 - DNA, 25 bp, Homo sapien
tcaggtatcgcagaaggacttgtag

SEQ ID NO: 965472 - DNA, 25 bp, Homo sapien
gattctgagcctggcttataagcca

SEQ ID NO: 965473 - DNA, 25 bp, Homo sapien
gttttaaccagccactatccgatac

SEQ ID NO: 965474 - DNA, 25 bp, Homo sapien
aacagcctttgaaacagagttcaaa

SEQ ID NO: 965475 - DNA, 25 bp, Homo sapien
ttcattttgattgccaaaaacagcc

SEQ ID NO: 965476 - DNA, 25 bp, Homo sapien
ttgattgccaaaaacagcctttgaa

SEQ ID NO: 965477 - DNA, 25 bp, Homo sapien
acagcctttgaaacagagttcaaag

SEQ ID NO: 965478 - DNA, 25 bp, Homo sapien
taaaccatggttgcttggagagtaa

SEQ ID NO: 965479 - DNA, 25 bp, Homo sapien
aaacctctttgtagactgatgtggc

SEQ ID NO: 965480 - DNA, 25 bp, Homo sapien
gatgtggcttatcctccagtaatgc

SEQ ID NO: 965481 - DNA, 25 bp, Homo sapien
cacttttgtaagtcccttgggagca

SEQ ID NO: 965482 - DNA, 25 bp, Homo sapien
ctcacttcttgaacgcttcatttaa

SEQ ID NO: 965483 - DNA, 25 bp, Homo sapien
cttcttgaacgcttcatttaagaaa

SEQ ID NO: 965484 - DNA, 25 bp, Homo sapien
acttcttgaacgcttcatttaagaa

SEQ ID NO: 965485 - DNA, 25 bp, Homo sapien
tcacttcttgaacgcttcatttaag

SEQ ID NO: 965486 - DNA, 25 bp, Homo sapien
gattccagctgtataacactctaga

SEQ ID NO: 965487 - DNA, 25 bp, Homo sapien
gctgtataacactctagaaaggcaa

SEQ ID NO: 965488 - DNA, 25 bp, Homo sapien
attcggaccatagcagtatgattcc

SEQ ID NO: 965489 - DNA, 25 bp, Homo sapien
cactttagcggttatgatttccaca

SEQ ID NO: 965490 - DNA, 25 bp, Homo sapien
acttcaggtaatcatgtagaccttg

SEQ ID NO: 965491 - DNA, 25 bp, Homo sapien
cgctagaagtttgggtctacccgcg

SEQ ID NO: 965492 - DNA, 25 bp, Homo sapien
ccccagcggaagtgacgcgctagaa

SEQ ID NO: 965493 - DNA, 25 bp, Homo sapien
aacacaaacactggcgcagcagcta

SEQ ID NO: 965494 - DNA, 25 bp, Homo sapien
caaccggcctgcatcagctgagctt

SEQ ID NO: 965495 - DNA, 25 bp, Homo sapien
cgttgaggtcgggaaaacagatcag

SEQ ID NO: 965496 - DNA, 25 bp, Homo sapien
ccgcaggttctgctgtactaggagc

SEQ ID NO: 965497 - DNA, 25 bp, Homo sapien
tactaggagctaaaaatgggtttca

SEQ ID NO: 965498 - DNA, 25 bp, Homo sapien
gaagtgaccttgcaattacgttgag

SEQ ID NO: 965499 - DNA, 25 bp, Homo sapien
aactggactcagcaggcctaagaca

SEQ ID NO: 965500 - DNA, 25 bp, Homo sapien
tttataaccagcaagcagactgagg

SEQ ID NO: 965501 - DNA, 25 bp, Homo sapien
gaagacaggcggagatgatcaatta

SEQ ID NO: 965502 - DNA, 25 bp, Homo sapien
ctaagaagtgatatcaagggtcggg

SEQ ID NO: 965503 - DNA, 25 bp, Homo sapien
ccacggtaatcttttgaaagtgcaa

SEQ ID NO: 965504 - DNA, 25 bp, Homo sapien
cagtctcttctgtgcaaccacggta

SEQ ID NO: 965505 - DNA, 25 bp, Homo sapien
tgtaactaacctctgacccagtcag

SEQ ID NO: 965506 - DNA, 25 bp, Homo sapien
gcaagtccaatcgtgttttcccgaa

SEQ ID NO: 965507 - DNA, 25 bp, Homo sapien
gggcttgcaagaatgtgttccctct

SEQ ID NO: 965508 - DNA, 25 bp, Homo sapien
taagttggatagcaataaggctcac

SEQ ID NO: 965509 - DNA, 25 bp, Homo sapien
tgggctttacggcttcaacacatga

SEQ ID NO: 965510 - DNA, 25 bp, Homo sapien
cacgtcctgaggtactgggctttac

SEQ ID NO: 965511 - DNA, 25 bp, Homo sapien
ttgacagaggtaagctcctgctcgt

SEQ ID NO: 965512 - DNA, 25 bp, Homo sapien
tgctcgtagtagtggcagagaacct

SEQ ID NO: 965513 - DNA, 25 bp, Homo sapien
agagaaccttgctgaggattgccag

SEQ ID NO: 965514 - DNA, 25 bp, Homo sapien
cagacatagggtaatttgacagagg

SEQ ID NO: 965515 - DNA, 25 bp, Homo sapien
tagatcttcaagtagcctcatttac

SEQ ID NO: 965516 - DNA, 25 bp, Homo sapien
tttacattactagtatccagagagg

SEQ ID NO: 965517 - DNA, 25 bp, Homo sapien
tgactatggtaagcaatttcagtgc

SEQ ID NO: 965518 - DNA, 25 bp, Homo sapien
agaaatgactatggtaagcaatttc

SEQ ID NO: 965519 - DNA, 25 bp, Homo sapien
tagtctgtttctggtgtatgtcccc

SEQ ID NO: 965520 - DNA, 25 bp, Homo sapien
tgtgactcagagaaatcatcttttc

SEQ ID NO: 965521 - DNA, 25 bp, Homo sapien
catacctaacttccttattcttcac

SEQ ID NO: 965522 - DNA, 25 bp, Homo sapien
tctgaagtgtactgtcactttttca

SEQ ID NO: 965523 - DNA, 25 bp, Homo sapien
ctttcagaaaattactacaatgtac

SEQ ID NO: 965524 - DNA, 25 bp, Homo sapien
ttcagaaaattactacaatgtacac

SEQ ID NO: 965525 - DNA, 25 bp, Homo sapien
tttcagaaaattactacaatgtaca

SEQ ID NO: 965526 - DNA, 25 bp, Homo sapien
actttcagaaaattactacaatgta

SEQ ID NO: 965527 - DNA, 25 bp, Homo sapien
tgtaataactctatcatctccccat

SEQ ID NO: 965528 - DNA, 25 bp, Homo sapien
ccatcgtcacctaagacatttctaa

SEQ ID NO: 965529 - DNA, 25 bp, Homo sapien
gttgactcactttcatatagtacca

SEQ ID NO: 965530 - DNA, 25 bp, Homo sapien
tgcaaaatgcaacataggaatactt

SEQ ID NO: 965531 - DNA, 25 bp, Homo sapien
tgcccaagtcatatgccagtggtag

SEQ ID NO: 965532 - DNA, 25 bp, Homo sapien
caaattagggactgaggcacaatca

SEQ ID NO: 965533 - DNA, 25 bp, Homo sapien
tgaagtacctctcctaagaactggg

SEQ ID NO: 965534 - DNA, 25 bp, Homo sapien
aggccacacctactaagaaacagat

SEQ ID NO: 965535 - DNA, 25 bp, Homo sapien
gatgtttccaaggtagattctggtt

SEQ ID NO: 965536 - DNA, 25 bp, Homo sapien
caaagacttcaatctacctagagtt

SEQ ID NO: 965537 - DNA, 25 bp, Homo sapien
gaatgtagcttagagactttctgcc

SEQ ID NO: 965538 - DNA, 25 bp, Homo sapien
cctgctttagctgccttataagagc

SEQ ID NO: 965539 - DNA, 25 bp, Homo sapien
gggcacatctgtgttaactatattt

SEQ ID NO: 965540 - DNA, 25 bp, Homo sapien
gagctggtggctttaccaaggaaga

SEQ ID NO: 965541 - DNA, 25 bp, Homo sapien
cttctgacttggcttttgggcatac

SEQ ID NO: 965542 - DNA, 25 bp, Homo sapien
gaatgaagtaattctggatgttgat

SEQ ID NO: 965543 - DNA, 25 bp, Homo sapien
taacttaataatgtatatctcttgc

SEQ ID NO: 965544 - DNA, 25 bp, Homo sapien
aataaaactcatgaacttgtgttaa

SEQ ID NO: 965545 - DNA, 25 bp, Homo sapien
aagcacaaattagtgctcccttttt

SEQ ID NO: 965546 - DNA, 25 bp, Homo sapien
tccaagtatctgtttacccaagtta

SEQ ID NO: 965547 - DNA, 25 bp, Homo sapien
tgctcagcattacccctctcccata

SEQ ID NO: 965548 - DNA, 25 bp, Homo sapien
ctcagcattacccctctcccatact

SEQ ID NO: 965549 - DNA, 25 bp, Homo sapien
gctcagcattacccctctcccatac

SEQ ID NO: 965550 - DNA, 25 bp, Homo sapien
tgttttaaatatcgaataccccatc

SEQ ID NO: 965551 - DNA, 25 bp, Homo sapien
gagagtcaggagtaaaatggtcact

SEQ ID NO: 965552 - DNA, 25 bp, Homo sapien
taaatatcgaataccccatctgatg

SEQ ID NO: 965553 - DNA, 25 bp, Homo sapien
tctgatgtcaagagagtcaggagta

SEQ ID NO: 965554 - DNA, 25 bp, Homo sapien
tgggaacccatgaatctcgcttcat

SEQ ID NO: 965555 - DNA, 25 bp, Homo sapien
tttccagtctttctttgtcatgtag

SEQ ID NO: 965556 - DNA, 25 bp, Homo sapien
gtctttctttgtcatgtagaggaaa

SEQ ID NO: 965557 - DNA, 25 bp, Homo sapien
ccacttttccagtctttctttgtca

SEQ ID NO: 965558 - DNA, 25 bp, Homo sapien
cagtctttctttgtcatgtagagga

SEQ ID NO: 965559 - DNA, 25 bp, Homo sapien
agtccttcaggtctaaagtaaaatg

SEQ ID NO: 965560 - DNA, 25 bp, Homo sapien
gccgaatcattaatgaataagtcct

SEQ ID NO: 965561 - DNA, 25 bp, Homo sapien
gaaagcagccgaatcattaatgaat

SEQ ID NO: 965562 - DNA, 25 bp, Homo sapien
taaaatactggaaagcagccgaatc

SEQ ID NO: 965563 - DNA, 25 bp, Homo sapien
tgttaacacccaaacaggctcctgg

SEQ ID NO: 965564 - DNA, 25 bp, Homo sapien
gcagtcctcgcgcaagaagggcatt

SEQ ID NO: 965565 - DNA, 25 bp, Homo sapien
cagaagcccgcgcaaactttactgt

SEQ ID NO: 965566 - DNA, 25 bp, Homo sapien
gaagggcattgctagctaaactgaa

SEQ ID NO: 965567 - DNA, 25 bp, Homo sapien
ttctgccgggaaagccgcctcgtct

SEQ ID NO: 965568 - DNA, 25 bp, Homo sapien
gacggatgcagggcggccctcctca

SEQ ID NO: 965569 - DNA, 25 bp, Homo sapien
ctgaggatgcgccacaggtccaggc

SEQ ID NO: 965570 - DNA, 25 bp, Homo sapien
tgcgcctgcgctagcattctgccgg

SEQ ID NO: 965571 - DNA, 25 bp, Homo sapien
gatttcatggatctagcaagcactg

SEQ ID NO: 965572 - DNA, 25 bp, Homo sapien
tatgacatctgtgacttgcgttgca

SEQ ID NO: 965573 - DNA, 25 bp, Homo sapien
ggtggttccagtagacaaaggcatc

SEQ ID NO: 965574 - DNA, 25 bp, Homo sapien
gaaaatcatttccagacacgccagg

SEQ ID NO: 965575 - DNA, 25 bp, Homo sapien
tttctgtgcaaccttactatgtgca

SEQ ID NO: 965576 - DNA, 25 bp, Homo sapien
actccatatgagtattaatcctatg

SEQ ID NO: 965577 - DNA, 25 bp, Homo sapien
aaaaccagccagtaatttctgtgca

SEQ ID NO: 965578 - DNA, 25 bp, Homo sapien
gtgcttttgttttcggatagactta

SEQ ID NO: 965579 - DNA, 25 bp, Homo sapien
cccaaggatgcctctggtcgagtct

SEQ ID NO: 965580 - DNA, 25 bp, Homo sapien
gctttgaatttgaaactactggcct

SEQ ID NO: 965581 - DNA, 25 bp, Homo sapien
caactgatgctgttgaggtcccaag

SEQ ID NO: 965582 - DNA, 25 bp, Homo sapien
tactggcctttagggagtcaaatct

SEQ ID NO: 965583 - DNA, 25 bp, Homo sapien
tgactttagaccagtgaggcccact

SEQ ID NO: 965584 - DNA, 25 bp, Homo sapien
tgatgacagatgtggactaagggcc

SEQ ID NO: 965585 - DNA, 25 bp, Homo sapien
caatgcgggcaacagcaagaggatc

SEQ ID NO: 965586 - DNA, 25 bp, Homo sapien
atttctcagagggatggcaggtgca

SEQ ID NO: 965587 - DNA, 25 bp, Homo sapien
actgatgtattagcatttgtgacac

SEQ ID NO: 965588 - DNA, 25 bp, Homo sapien
taatatctattactggactaaacga

SEQ ID NO: 965589 - DNA, 25 bp, Homo sapien
gactaaacgaatgaattaagtagcc

SEQ ID NO: 965590 - DNA, 25 bp, Homo sapien
taattggtgtatagctttggaacag

SEQ ID NO: 965591 - DNA, 25 bp, Homo sapien
tgccagtccaatgaccagaaacagg

SEQ ID NO: 965592 - DNA, 25 bp, Homo sapien
ttgccagtccaatgaccagaaacag

SEQ ID NO: 965593 - DNA, 25 bp, Homo sapien
agctgccaagtttaacagcagttgc

SEQ ID NO: 965594 - DNA, 25 bp, Homo sapien
ccagctgccaagtttaacagcagtt

SEQ ID NO: 965595 - DNA, 25 bp, Homo sapien
cagccatccataggctggccagtgt

SEQ ID NO: 965596 - DNA, 25 bp, Homo sapien
ttgagtgtatcgaggatgagcatca

SEQ ID NO: 965597 - DNA, 25 bp, Homo sapien
aggcagccatccataggctggccag

SEQ ID NO: 965598 - DNA, 25 bp, Homo sapien
gatgagcatcatcagtctccaaggc

SEQ ID NO: 965599 - DNA, 25 bp, Homo sapien
tggcacagcattcctgttttctgct

SEQ ID NO: 965600 - DNA, 25 bp, Homo sapien
tgttttctgctttgtttggaattcc

SEQ ID NO: 965601 - DNA, 25 bp, Homo sapien
tttctgctttgtttggaattcccat

SEQ ID NO: 965602 - DNA, 25 bp, Homo sapien
cattcctgttttctgctttgtttgg

SEQ ID NO: 965603 - DNA, 25 bp, Homo sapien
taaggagcacgttggagcaaacatc

SEQ ID NO: 965604 - DNA, 25 bp, Homo sapien
tcagagccccagttgctacagcaag

SEQ ID NO: 965605 - DNA, 25 bp, Homo sapien
tgtgcacattaggaagaaatctcca

SEQ ID NO: 965606 - DNA, 25 bp, Homo sapien
catttgcaagggtattcagagcccc

SEQ ID NO: 965607 - DNA, 25 bp, Homo sapien
tcctcttctgaggaacgttccatca

SEQ ID NO: 965608 - DNA, 25 bp, Homo sapien
gggataactcccacttccaaaagca

SEQ ID NO: 965609 - DNA, 25 bp, Homo sapien
aacgttccatcagacttcttgcggg

SEQ ID NO: 965610 - DNA, 25 bp, Homo sapien
gcactgctgagcactttctactgct

SEQ ID NO: 965611 - DNA, 25 bp, Homo sapien
ctgcagtaggacaattgttccttca

SEQ ID NO: 965612 - DNA, 25 bp, Homo sapien
gcagtaggacaattgttccttcagg

SEQ ID NO: 965613 - DNA, 25 bp, Homo sapien
gtaggacaattgttccttcaggatc

SEQ ID NO: 965614 - DNA, 25 bp, Homo sapien
cagtaggacaattgttccttcagga

SEQ ID NO: 965615 - DNA, 25 bp, Homo sapien
tatgacatacaatccactggactgt

SEQ ID NO: 965616 - DNA, 25 bp, Homo sapien
ggtcagttattacaaaggcatgctt

SEQ ID NO: 965617 - DNA, 25 bp, Homo sapien
caatccactggactgttaggtcagt

SEQ ID NO: 965618 - DNA, 25 bp, Homo sapien
ccatatagctttgccccagtgtcaa

SEQ ID NO: 965619 - DNA, 25 bp, Homo sapien
ttgtgttgaaccattcctgagactc

SEQ ID NO: 965620 - DNA, 25 bp, Homo sapien
ctttcctcttgtgttgaaccattcc

SEQ ID NO: 965621 - DNA, 25 bp, Homo sapien
cctcttgtgttgaaccattcctgag

SEQ ID NO: 965622 - DNA, 25 bp, Homo sapien
tcttgtgttgaaccattcctgagac

SEQ ID NO: 965623 - DNA, 25 bp, Homo sapien
tcttcattagggagatttgaattga

SEQ ID NO: 965624 - DNA, 25 bp, Homo sapien
tgtggtcctccaaagtttaactcta

SEQ ID NO: 965625 - DNA, 25 bp, Homo sapien
acagtatttcaaaggtctgtggtcc

SEQ ID NO: 965626 - DNA, 25 bp, Homo sapien
aaaaatcttcattagggagatttga

SEQ ID NO: 965627 - DNA, 25 bp, Homo sapien
tataatggcggcagctccttcaaca

SEQ ID NO: 965628 - DNA, 25 bp, Homo sapien
cctgatcctatataatggcggcagc

SEQ ID NO: 965629 - DNA, 25 bp, Homo sapien
tctccctgatcctatataatggcgg

SEQ ID NO: 965630 - DNA, 25 bp, Homo sapien
gatcctatataatggcggcagctcc

SEQ ID NO: 965631 - DNA, 25 bp, Homo sapien
caaaggtctttagggctctttctag

SEQ ID NO: 965632 - DNA, 25 bp, Homo sapien
gactttgagcactgaaaatgccaga

SEQ ID NO: 965633 - DNA, 25 bp, Homo sapien
tggctattggagttgcacttgggca

SEQ ID NO: 965634 - DNA, 25 bp, Homo sapien
gccagaggccacatgttgcaatatt

SEQ ID NO: 965635 - DNA, 25 bp, Homo sapien
gttcccatcagccagggcttcttgc

SEQ ID NO: 965636 - DNA, 25 bp, Homo sapien
tggaaaagtttgtaagttcccatca

SEQ ID NO: 965637 - DNA, 25 bp, Homo sapien
tctaaagctttttctggatgtcctg

SEQ ID NO: 965638 - DNA, 25 bp, Homo sapien
tttgtaagttcccatcagccagggc

SEQ ID NO: 965639 - DNA, 25 bp, Homo sapien
tagaacaaggtgaaaattggttctg

SEQ ID NO: 965640 - DNA, 25 bp, Homo sapien
tgcctgcttaaaaggcaatccaggg

SEQ ID NO: 965641 - DNA, 25 bp, Homo sapien
caatccaggggatgctcctagaaca

SEQ ID NO: 965642 - DNA, 25 bp, Homo sapien
aggtgcctgcttaaaaggcaatcca

SEQ ID NO: 965643 - DNA, 25 bp, Homo sapien
ggcttgcttcacttctaggtaggga

SEQ ID NO: 965644 - DNA, 25 bp, Homo sapien
ggcaatctctaccatttggccttga

SEQ ID NO: 965645 - DNA, 25 bp, Homo sapien
tgctgtgcacttcataggaccctta

SEQ ID NO: 965646 - DNA, 25 bp, Homo sapien
cataggacccttacgggcttgcttc

SEQ ID NO: 965647 - DNA, 25 bp, Homo sapien
agggagtctgaggagtcacacttgc

SEQ ID NO: 965648 - DNA, 25 bp, Homo sapien
tatttcatatagatgagtaatgaag

SEQ ID NO: 965649 - DNA, 25 bp, Homo sapien
cttgagggagtctgaggagtcacac

SEQ ID NO: 965650 - DNA, 25 bp, Homo sapien
agaaccattgtcttgatcagcaggg

SEQ ID NO: 965651 - DNA, 25 bp, Homo sapien
tttgcaccccgttggcttcagtttc

SEQ ID NO: 965652 - DNA, 25 bp, Homo sapien
aagccacatagcttcttctgaggca

SEQ ID NO: 965653 - DNA, 25 bp, Homo sapien
caagcctgagcatcaaacctacaat

SEQ ID NO: 965654 - DNA, 25 bp, Homo sapien
tcatgcttcgcctggctatgggaag

SEQ ID NO: 965655 - DNA, 25 bp, Homo sapien
ctgcctttcagatgtgaatattgct

SEQ ID NO: 965656 - DNA, 25 bp, Homo sapien
atgcatcatctgctatgtctgtggc

SEQ ID NO: 965657 - DNA, 25 bp, Homo sapien
ggaagcctgctaacaatgcatcatc

SEQ ID NO: 965658 - DNA, 25 bp, Homo sapien
catgggtattgtaaaggattctgga

SEQ ID NO: 965659 - DNA, 25 bp, Homo sapien
tcctttctagctctcagctcttctt

SEQ ID NO: 965660 - DNA, 25 bp, Homo sapien
cttccatttggctttcccagtcttc

SEQ ID NO: 965661 - DNA, 25 bp, Homo sapien
ttccatttggctttcccagtcttca

SEQ ID NO: 965662 - DNA, 25 bp, Homo sapien
tgctctcctttctagctctcagctc

SEQ ID NO: 965663 - DNA, 25 bp, Homo sapien
cttatctgtcactgtattctgccta

SEQ ID NO: 965664 - DNA, 25 bp, Homo sapien
tatctgtcactgtattctgcctaac

SEQ ID NO: 965665 - DNA, 25 bp, Homo sapien
ttatctgtcactgtattctgcctaa

SEQ ID NO: 965666 - DNA, 25 bp, Homo sapien
gcttatctgtcactgtattctgcct

SEQ ID NO: 965667 - DNA, 25 bp, Homo sapien
tgctgagggctgctagtatgaatga

SEQ ID NO: 965668 - DNA, 25 bp, Homo sapien
tgaactgggactgttgcttgctcat

SEQ ID NO: 965669 - DNA, 25 bp, Homo sapien
tgaatgaccacactgaactgggact

SEQ ID NO: 965670 - DNA, 25 bp, Homo sapien
tgagggctgctagtatgaatgacca

SEQ ID NO: 965671 - DNA, 25 bp, Homo sapien
tcattgccatgctccggattcctgg

SEQ ID NO: 965672 - DNA, 25 bp, Homo sapien
ttgtccatcagccacccggtactgt

SEQ ID NO: 965673 - DNA, 25 bp, Homo sapien
catgctccttgattattcttctaaa

SEQ ID NO: 965674 - DNA, 25 bp, Homo sapien
atcagccacccggtactgtcatgct

SEQ ID NO: 965675 - DNA, 25 bp, Homo sapien
ttagctgttagagccagaggaggaa

SEQ ID NO: 965676 - DNA, 25 bp, Homo sapien
cttcttagctgttagagccagagga

SEQ ID NO: 965677 - DNA, 25 bp, Homo sapien
tcttagctgttagagccagaggagg

SEQ ID NO: 965678 - DNA, 25 bp, Homo sapien
gcttcttagctgttagagccagagg

SEQ ID NO: 965679 - DNA, 25 bp, Homo sapien
cactggatgcaatgggtccagggca

SEQ ID NO: 965680 - DNA, 25 bp, Homo sapien
gtagatatgcacctttcacttgaga

SEQ ID NO: 965681 - DNA, 25 bp, Homo sapien
gagaattcctctgacatcactggat

SEQ ID NO: 965682 - DNA, 25 bp, Homo sapien
ccatcatgtgacgatattgagctga

SEQ ID NO: 965683 - DNA, 25 bp, Homo sapien
catgacatttgtggtgcagaaagaa

SEQ ID NO: 965684 - DNA, 25 bp, Homo sapien
ggcatgacatttgtggtgcagaaag

SEQ ID NO: 965685 - DNA, 25 bp, Homo sapien
aaggcatgacatttgtggtgcagaa

SEQ ID NO: 965686 - DNA, 25 bp, Homo sapien
agaaggcatgacatttgtggtgcag

SEQ ID NO: 965687 - DNA, 25 bp, Homo sapien
tgagtgagatgaggtacagagagtt

SEQ ID NO: 965688 - DNA, 25 bp, Homo sapien
tctgatgagtgagatgaggtacaga

SEQ ID NO: 965689 - DNA, 25 bp, Homo sapien
gtctctgatgagtgagatgaggtac

SEQ ID NO: 965690 - DNA, 25 bp, Homo sapien
gatgagtgagatgaggtacagagag

SEQ ID NO: 965691 - DNA, 25 bp, Homo sapien
gcaaggtttatatggatgtcattgc

SEQ ID NO: 965692 - DNA, 25 bp, Homo sapien
ctaataagtgcatcgctagtttgga

SEQ ID NO: 965693 - DNA, 25 bp, Homo sapien
ttttgaccctaataagtgcatcgct

SEQ ID NO: 965694 - DNA, 25 bp, Homo sapien
gaccctaataagtgcatcgctagtt

SEQ ID NO: 965695 - DNA, 25 bp, Homo sapien
gtgcatcgctagtttggataacttc

SEQ ID NO: 965696 - DNA, 25 bp, Homo sapien
gaaaagacttgctgcttctaagtgg

SEQ ID NO: 965697 - DNA, 25 bp, Homo sapien
tagggtaatacaaattgagttgacc

SEQ ID NO: 965698 - DNA, 25 bp, Homo sapien
tgcacagaaaccttatgctcatatg

SEQ ID NO: 965699 - DNA, 25 bp, Homo sapien
taatacaaattgagttgaccacatt

SEQ ID NO: 965700 - DNA, 25 bp, Homo sapien
acatttcccctaataagccagtcag

SEQ ID NO: 965701 - DNA, 25 bp, Homo sapien
tttagcactaaagccagcgtccaca

SEQ ID NO: 965702 - DNA, 25 bp, Homo sapien
gccagtcagttaagtctgcaagtaa

SEQ ID NO: 965703 - DNA, 25 bp, Homo sapien
catgcatctctgaatatggactaaa

SEQ ID NO: 965704 - DNA, 25 bp, Homo sapien
agtgaagaactttgcctgagagtgt

SEQ ID NO: 965705 - DNA, 25 bp, Homo sapien
acatataaattggatctaagggttg

SEQ ID NO: 965706 - DNA, 25 bp, Homo sapien
catataaattggatctaagggttgt

SEQ ID NO: 965707 - DNA, 25 bp, Homo sapien
gaactttgcctgagagtgttggcaa

SEQ ID NO: 965708 - DNA, 25 bp, Homo sapien
tagaagctcaaacactaactcagct

SEQ ID NO: 965709 - DNA, 25 bp, Homo sapien
taactcagctaaatttgcttcaggg

SEQ ID NO: 965710 - DNA, 25 bp, Homo sapien
gtactcacctagaagctcaaacact

SEQ ID NO: 965711 - DNA, 25 bp, Homo sapien
tcagggggccaatctccatttgtct

SEQ ID NO: 965712 - DNA, 25 bp, Homo sapien
catggctttgcctgagtttacagct

SEQ ID NO: 965713 - DNA, 25 bp, Homo sapien
tttgcctgagtttacagctgagctt

SEQ ID NO: 965714 - DNA, 25 bp, Homo sapien
gctgagctttggtccgaaaagctct

SEQ ID NO: 965715 - DNA, 25 bp, Homo sapien
cagctgagctttggtccgaaaagct

SEQ ID NO: 965716 - DNA, 25 bp, Homo sapien
gtgcactgaagtgcccaaagtggtt

SEQ ID NO: 965717 - DNA, 25 bp, Homo sapien
tcaatgtgcactgaagtgcccaaag

SEQ ID NO: 965718 - DNA, 25 bp, Homo sapien
ctctctgacaaccaggctagagtca

SEQ ID NO: 965719 - DNA, 25 bp, Homo sapien
aggctagagtcaatgtgcactgaag

SEQ ID NO: 965720 - DNA, 25 bp, Homo sapien
tcggagtggattcctgcattcccct

SEQ ID NO: 965721 - DNA, 25 bp, Homo sapien
tttcggagtggattcctgcattccc

SEQ ID NO: 965722 - DNA, 25 bp, Homo sapien
tcatttcggagtggattcctgcatt

SEQ ID NO: 965723 - DNA, 25 bp, Homo sapien
ggagtggattcctgcattccccttt

SEQ ID NO: 965724 - DNA, 25 bp, Homo sapien
tctgctcctaaggcagcatcccaag

SEQ ID NO: 965725 - DNA, 25 bp, Homo sapien
ttgacagccaaagggtgagtttctc

SEQ ID NO: 965726 - DNA, 25 bp, Homo sapien
agcattgacagccaaagggtgagtt

SEQ ID NO: 965727 - DNA, 25 bp, Homo sapien
tctctgaaaggtacagcattgacag

SEQ ID NO: 965728 - DNA, 25 bp, Homo sapien
tttgagtgaagttgtaaacagtcca

SEQ ID NO: 965729 - DNA, 25 bp, Homo sapien
aattgcttcctcagtgcagttgtaa

SEQ ID NO: 965730 - DNA, 25 bp, Homo sapien
cgagttttacaaaaaggatgtatct

SEQ ID NO: 965731 - DNA, 25 bp, Homo sapien
gcaccatcactagctaatcgagttt

SEQ ID NO: 965732 - DNA, 25 bp, Homo sapien
tcgttaacaatattctgctgagagt

SEQ ID NO: 965733 - DNA, 25 bp, Homo sapien
tgagagggcttaatgtacacaggca

SEQ ID NO: 965734 - DNA, 25 bp, Homo sapien
cacaggcactcgtactcgttaacaa

SEQ ID NO: 965735 - DNA, 25 bp, Homo sapien
tggtattgtcttcactgagagggct

SEQ ID NO: 965736 - DNA, 25 bp, Homo sapien
ggtgcacttgggttttgtttctgcc

SEQ ID NO: 965737 - DNA, 25 bp, Homo sapien
cacttgggttttgtttctgcctctg

SEQ ID NO: 965738 - DNA, 25 bp, Homo sapien
gcacttgggttttgtttctgcctct

SEQ ID NO: 965739 - DNA, 25 bp, Homo sapien
tgcacttgggttttgtttctgcctc

SEQ ID NO: 965740 - DNA, 25 bp, Homo sapien
tatggggtaccaatggaactggcac

SEQ ID NO: 965741 - DNA, 25 bp, Homo sapien
cacctatggcaaatgtattatggat

SEQ ID NO: 965742 - DNA, 25 bp, Homo sapien
tgcttatggggtaccaatggaactg

SEQ ID NO: 965743 - DNA, 25 bp, Homo sapien
aggcaagtgatgcaatgcttatggg

SEQ ID NO: 965744 - DNA, 25 bp, Homo sapien
ttcaactgccactccgccttctata

SEQ ID NO: 965745 - DNA, 25 bp, Homo sapien
cctcagggcttgggccaagtattca

SEQ ID NO: 965746 - DNA, 25 bp, Homo sapien
gtattcaactgccactccgccttct

SEQ ID NO: 965747 - DNA, 25 bp, Homo sapien
ggcttgggccaagtattcaactgcc

SEQ ID NO: 965748 - DNA, 25 bp, Homo sapien
tgcacgtaatccatgttccataagc

SEQ ID NO: 965749 - DNA, 25 bp, Homo sapien
cacgtaatccatgttccataagccc

SEQ ID NO: 965750 - DNA, 25 bp, Homo sapien
cgtaatccatgttccataagcccca

SEQ ID NO: 965751 - DNA, 25 bp, Homo sapien
gtaatccatgttccataagccccac

SEQ ID NO: 965752 - DNA, 25 bp, Homo sapien
aacactctgcagcccgctgttctca

SEQ ID NO: 965753 - DNA, 25 bp, Homo sapien
caacactctgcagcccgctgttctc

SEQ ID NO: 965754 - DNA, 25 bp, Homo sapien
aatcagctggtctccaggcactgag

SEQ ID NO: 965755 - DNA, 25 bp, Homo sapien
ctccaggcactgagaaggtatctac

SEQ ID NO: 965756 - DNA, 25 bp, Homo sapien
ctggtctccaggcactgagaaggta

SEQ ID NO: 965757 - DNA, 25 bp, Homo sapien
ggtctccaggcactgagaaggtatc

SEQ ID NO: 965758 - DNA, 25 bp, Homo sapien
taaccatcacgttcacttccggaca

SEQ ID NO: 965759 - DNA, 25 bp, Homo sapien
aaccatcacgttcacttccggacag

SEQ ID NO: 965760 - DNA, 25 bp, Homo sapien
tttcaattgatgatctagtcctctc

SEQ ID NO: 965761 - DNA, 25 bp, Homo sapien
tcaattgatgatctagtcctctcca

SEQ ID NO: 965762 - DNA, 25 bp, Homo sapien
aattgatgatctagtcctctccagg

SEQ ID NO: 965763 - DNA, 25 bp, Homo sapien
attgatgatctagtcctctccaggc

SEQ ID NO: 965764 - DNA, 25 bp, Homo sapien
tgagagcaagcgctattacctaagc

SEQ ID NO: 965765 - DNA, 25 bp, Homo sapien
gtacctgagcgcatggacctgagag

SEQ ID NO: 965766 - DNA, 25 bp, Homo sapien
tattacctaagcacatgttctgcac

SEQ ID NO: 965767 - DNA, 25 bp, Homo sapien
gccagtgtgctggtacctgagcgca

SEQ ID NO: 965768 - DNA, 25 bp, Homo sapien
gcttgagctcattagaactggtcat

SEQ ID NO: 965769 - DNA, 25 bp, Homo sapien
tgaggaaatgacaacctcgggtggc

SEQ ID NO: 965770 - DNA, 25 bp, Homo sapien
aaatgacaacctcgggtggctgggt

SEQ ID NO: 965771 - DNA, 25 bp, Homo sapien
cagcttgagctcattagaactggtc

SEQ ID NO: 965772 - DNA, 25 bp, Homo sapien
atttgaggtccgcttctcagtgaaa

SEQ ID NO: 965773 - DNA, 25 bp, Homo sapien
aggatttgaggtccgcttctcagtg

SEQ ID NO: 965774 - DNA, 25 bp, Homo sapien
ttgaggtccgcttctcagtgaaatc

SEQ ID NO: 965775 - DNA, 25 bp, Homo sapien
ttttaggatttgaggtccgcttctc

SEQ ID NO: 965776 - DNA, 25 bp, Homo sapien
cttgggaccacttcccacatcatgt

SEQ ID NO: 965777 - DNA, 25 bp, Homo sapien
cctgagagcagcctgatatttggct

SEQ ID NO: 965778 - DNA, 25 bp, Homo sapien
tgagagcagcctgatatttggcttg

SEQ ID NO: 965779 - DNA, 25 bp, Homo sapien
ggccctgagagcagcctgatatttg

SEQ ID NO: 965780 - DNA, 25 bp, Homo sapien
tgcatctggaaggacgggactccat

SEQ ID NO: 965781 - DNA, 25 bp, Homo sapien
taaaggtctttactgcatctggaag

SEQ ID NO: 965782 - DNA, 25 bp, Homo sapien
caggatacagttctgtataaaggtc

SEQ ID NO: 965783 - DNA, 25 bp, Homo sapien
ccaggatacagttctgtataaaggt

SEQ ID NO: 965784 - DNA, 25 bp, Homo sapien
attttggatctcactaaaatcttgg

SEQ ID NO: 965785 - DNA, 25 bp, Homo sapien
ctctgattctaagtattttccttct

SEQ ID NO: 965786 - DNA, 25 bp, Homo sapien
aagtttctcatgttcgttttccatg

SEQ ID NO: 965787 - DNA, 25 bp, Homo sapien
ccatgtttgtgaaactgcaaatgct

SEQ ID NO: 965788 - DNA, 25 bp, Homo sapien
ccagtatctagaattagcaaatata

SEQ ID NO: 965789 - DNA, 25 bp, Homo sapien
cccagtatctagaattagcaaatat

SEQ ID NO: 965790 - DNA, 25 bp, Homo sapien
tcccagtatctagaattagcaaata

SEQ ID NO: 965791 - DNA, 25 bp, Homo sapien
ctttcatttgctgaactctcagatt

SEQ ID NO: 965792 - DNA, 25 bp, Homo sapien
tgactcgaaccaagtccccaagagg

SEQ ID NO: 965793 - DNA, 25 bp, Homo sapien
cctaaggttaggcacatgactcgaa

SEQ ID NO: 965794 - DNA, 25 bp, Homo sapien
ggactaagggcaatagactcaaggg

SEQ ID NO: 965795 - DNA, 25 bp, Homo sapien
gatcagatatcctacccctaaggtt

SEQ ID NO: 965796 - DNA, 25 bp, Homo sapien
agttgtagcctaaccaacaggttgg

SEQ ID NO: 965797 - DNA, 25 bp, Homo sapien
ccagcatcagcaagccactgatgga

SEQ ID NO: 965798 - DNA, 25 bp, Homo sapien
ggcatagttgtagcctaaccaacag

SEQ ID NO: 965799 - DNA, 25 bp, Homo sapien
tggagcaactgcactatcaactcac

SEQ ID NO: 965800 - DNA, 25 bp, Homo sapien
gcatagtctggctgcggtccctccg

SEQ ID NO: 965801 - DNA, 25 bp, Homo sapien
cataaactggggctgaatactggaa

SEQ ID NO: 965802 - DNA, 25 bp, Homo sapien
gctgatgcctggagactggaatgca

SEQ ID NO: 965803 - DNA, 25 bp, Homo sapien
ctccgcagtgaactcttgaccatca

SEQ ID NO: 965804 - DNA, 25 bp, Homo sapien
ataggagcttcaaggtgccggtgtt

SEQ ID NO: 965805 - DNA, 25 bp, Homo sapien
tcaaggtgccggtgttagacctact

SEQ ID NO: 965806 - DNA, 25 bp, Homo sapien
taaatatccccgagctcaccaaggg

SEQ ID NO: 965807 - DNA, 25 bp, Homo sapien
cgagctcaccaagggataggagctt

SEQ ID NO: 965808 - DNA, 25 bp, Homo sapien
ttaaatattattgatgtggatgttg

SEQ ID NO: 965809 - DNA, 25 bp, Homo sapien
gtggatgttgaggtgagatgtgcaa

SEQ ID NO: 965810 - DNA, 25 bp, Homo sapien
atgtgcaaagcagaacaacaggcac

SEQ ID NO: 965811 - DNA, 25 bp, Homo sapien
tgagatgtgcaaagcagaacaacag

SEQ ID NO: 965812 - DNA, 25 bp, Homo sapien
attgctttgctctttgacatcagag

SEQ ID NO: 965813 - DNA, 25 bp, Homo sapien
caagaggagttctactttgaaatcc

SEQ ID NO: 965814 - DNA, 25 bp, Homo sapien
gccgtttctgcataggtgtggtcaa

SEQ ID NO: 965815 - DNA, 25 bp, Homo sapien
catcagagcctcagtcaaatttgag

SEQ ID NO: 965816 - DNA, 25 bp, Homo sapien
ttcatctctctggcggtagagccct

SEQ ID NO: 965817 - DNA, 25 bp, Homo sapien
tttcatctctctggcggtagagccc

SEQ ID NO: 965818 - DNA, 25 bp, Homo sapien
gaagctgtttgggtaaaggccacac

SEQ ID NO: 965819 - DNA, 25 bp, Homo sapien
ggaaactttagcagggcacatgcat

SEQ ID NO: 965820 - DNA, 25 bp, Homo sapien
actgccagtgatctttgaagctgtt

SEQ ID NO: 965821 - DNA, 25 bp, Homo sapien
tcttttgagagaccacaagaccaag

SEQ ID NO: 965822 - DNA, 25 bp, Homo sapien
ctggaatattccctgtaagtgacaa

SEQ ID NO: 965823 - DNA, 25 bp, Homo sapien
tccctgtaagtgacaacattttcat

SEQ ID NO: 965824 - DNA, 25 bp, Homo sapien
tccacagcaatttttgggcttgtct

SEQ ID NO: 965825 - DNA, 25 bp, Homo sapien
tttgggcttgtctctggaatattcc

SEQ ID NO: 965826 - DNA, 25 bp, Homo sapien
tcagtatattctggaacttaacaac

SEQ ID NO: 965827 - DNA, 25 bp, Homo sapien
tatattctggaacttaacaacaaca

SEQ ID NO: 965828 - DNA, 25 bp, Homo sapien
gaatgcaaattgagttctagcaata

SEQ ID NO: 965829 - DNA, 25 bp, Homo sapien
gagttctagcaatagcccacaatat

SEQ ID NO: 965830 - DNA, 25 bp, Homo sapien
gaaaaccattttgccgtctaacatg

SEQ ID NO: 965831 - DNA, 25 bp, Homo sapien
catttgctaaatgtggaagcccttg

SEQ ID NO: 965832 - DNA, 25 bp, Homo sapien
taacatggccttccagttgtgtaac

SEQ ID NO: 965833 - DNA, 25 bp, Homo sapien
aactttgctaaacaatagggaggag

SEQ ID NO: 965834 - DNA, 25 bp, Homo sapien
taacatgccttagctcagtccagtc

SEQ ID NO: 965835 - DNA, 25 bp, Homo sapien
agcaggaaagacactcagcctcggg

SEQ ID NO: 965836 - DNA, 25 bp, Homo sapien
tctagaacatggctattaacatgcc

SEQ ID NO: 965837 - DNA, 25 bp, Homo sapien
cagcagaggagttcatagatcgttt

SEQ ID NO: 965838 - DNA, 25 bp, Homo sapien
actgtgtttcaatccagaagtgtga

SEQ ID NO: 965839 - DNA, 25 bp, Homo sapien
tgtgaaagcttgaaattgttgcttg

SEQ ID NO: 965840 - DNA, 25 bp, Homo sapien
aactgtgtttcaatccagaagtgtg

SEQ ID NO: 965841 - DNA, 25 bp, Homo sapien
taaactgtgtttcaatccagaagtg

SEQ ID NO: 965842 - DNA, 25 bp, Homo sapien
cacactgagccttttcggacaggac

SEQ ID NO: 965843 - DNA, 25 bp, Homo sapien
acactgagccttttcggacaggacc

SEQ ID NO: 965844 - DNA, 25 bp, Homo sapien
ctgagccttttcggacaggaccaaa

SEQ ID NO: 965845 - DNA, 25 bp, Homo sapien
cactgagccttttcggacaggacca

SEQ ID NO: 965846 - DNA, 25 bp, Homo sapien
tgactgctgcttaccatagtactta

SEQ ID NO: 965847 - DNA, 25 bp, Homo sapien
catacctgactgctgcttaccatag

SEQ ID NO: 965848 - DNA, 25 bp, Homo sapien
cctgactgctgcttaccatagtact

SEQ ID NO: 965849 - DNA, 25 bp, Homo sapien
tacctgactgctgcttaccatagta

SEQ ID NO: 965850 - DNA, 25 bp, Homo sapien
aggaatttgtgtttgtaatctccat

SEQ ID NO: 965851 - DNA, 25 bp, Homo sapien
gcctgagtcatgcaggaatttgtgt

SEQ ID NO: 965852 - DNA, 25 bp, Homo sapien
ctgcctgagtcatgcaggaatttgt

SEQ ID NO: 965853 - DNA, 25 bp, Homo sapien
gcaggaatttgtgtttgtaatctcc

SEQ ID NO: 965854 - DNA, 25 bp, Homo sapien
tgtacttcagaccacaggttaaaac

SEQ ID NO: 965855 - DNA, 25 bp, Homo sapien
ccaaggatggtgttccgttgtactt

SEQ ID NO: 965856 - DNA, 25 bp, Homo sapien
tagattggagcactgtaaatttccc

SEQ ID NO: 965857 - DNA, 25 bp, Homo sapien
ggagcactgtaaatttccccacaat

SEQ ID NO: 965858 - DNA, 25 bp, Homo sapien
cccagcagcgccagtagctctgcag

SEQ ID NO: 965859 - DNA, 25 bp, Homo sapien
ctggcaaggtttgtggaaaactagc

SEQ ID NO: 965860 - DNA, 25 bp, Homo sapien
gcaaggtttgtggaaaactagctct

SEQ ID NO: 965861 - DNA, 25 bp, Homo sapien
tcccagcagcgccagtagctctgca

SEQ ID NO: 965862 - DNA, 25 bp, Homo sapien
tccagtttgcctcacagctttctac

SEQ ID NO: 965863 - DNA, 25 bp, Homo sapien
gggcttatcttgcataattgccaag

SEQ ID NO: 965864 - DNA, 25 bp, Homo sapien
tctactgctgatagtgtgcccatca

SEQ ID NO: 965865 - DNA, 25 bp, Homo sapien
cataattgccaagggtacttggaga

SEQ ID NO: 965866 - DNA, 25 bp, Homo sapien
actgtcttgacattgactggtgtcc

SEQ ID NO: 965867 - DNA, 25 bp, Homo sapien
caatccctgaggtagaacaatccca

SEQ ID NO: 965868 - DNA, 25 bp, Homo sapien
cactcatagtcgtaattgtcataca

SEQ ID NO: 965869 - DNA, 25 bp, Homo sapien
gtccacaccttttgacacagcatgg

SEQ ID NO: 965870 - DNA, 25 bp, Homo sapien
actttagcagttgagcaggcaggca

SEQ ID NO: 965871 - DNA, 25 bp, Homo sapien
tctcactcttcttacacagcaggtg

SEQ ID NO: 965872 - DNA, 25 bp, Homo sapien
ggcagagagaatcactcccattata

SEQ ID NO: 965873 - DNA, 25 bp, Homo sapien
gaaacacagtccagttcttgctggt

SEQ ID NO: 965874 - DNA, 25 bp, Homo sapien
tggacttatcctccgcagtaagagt

SEQ ID NO: 965875 - DNA, 25 bp, Homo sapien
gggttggacttatcctccgcagtaa

SEQ ID NO: 965876 - DNA, 25 bp, Homo sapien
gaaggggttggacttatcctccgca

SEQ ID NO: 965877 - DNA, 25 bp, Homo sapien
tgtagcctaggaatagtcaggaaaa

SEQ ID NO: 965878 - DNA, 25 bp, Homo sapien
gactgatctcccaagtgcggtcccc

SEQ ID NO: 965879 - DNA, 25 bp, Homo sapien
tgcggtcccccaattcaagtcacag

SEQ ID NO: 965880 - DNA, 25 bp, Homo sapien
ccaaatgtcacacatgtccatgtga

SEQ ID NO: 965881 - DNA, 25 bp, Homo sapien
aggacacgggactgatctcccaagt

SEQ ID NO: 965882 - DNA, 25 bp, Homo sapien
accccaatcatacagctgcaatgtg

SEQ ID NO: 965883 - DNA, 25 bp, Homo sapien
tctcttttggtcctgtgtcaagggc

SEQ ID NO: 965884 - DNA, 25 bp, Homo sapien
caatgtggcggtgatagctgatcta

SEQ ID NO: 965885 - DNA, 25 bp, Homo sapien
ggatcactatggttgttgttgatgc

SEQ ID NO: 965886 - DNA, 25 bp, Homo sapien
ttttttgatgcattcaaagtaagct

SEQ ID NO: 965887 - DNA, 25 bp, Homo sapien
tctaccctacgtggctgcttgagtc

SEQ ID NO: 965888 - DNA, 25 bp, Homo sapien
ccctcatcacttctttgattcccat

SEQ ID NO: 965889 - DNA, 25 bp, Homo sapien
tctctaccctacgtggctgcttgag

SEQ ID NO: 965890 - DNA, 25 bp, Homo sapien
taccctacgtggctgcttgagtctc

SEQ ID NO: 965891 - DNA, 25 bp, Homo sapien
tttagttcagcatacctttccccga

SEQ ID NO: 965892 - DNA, 25 bp, Homo sapien
tactgccgtggagaagactgttagt

SEQ ID NO: 965893 - DNA, 25 bp, Homo sapien
gactgttagttttgacctctcttaa

SEQ ID NO: 965894 - DNA, 25 bp, Homo sapien
tcttttatcctggtggttgccatta

SEQ ID NO: 965895 - DNA, 25 bp, Homo sapien
actggccatctttatagccctttgc

SEQ ID NO: 965896 - DNA, 25 bp, Homo sapien
tactggccatctttatagccctttg

SEQ ID NO: 965897 - DNA, 25 bp, Homo sapien
tcagcaagatgttaaatgctttcaa

SEQ ID NO: 965898 - DNA, 25 bp, Homo sapien
tattggtgttaacagagctatcatg

SEQ ID NO: 965899 - DNA, 25 bp, Homo sapien
ccaaatggtatattggaagcatatg

SEQ ID NO: 965900 - DNA, 25 bp, Homo sapien
aaatggtatattggaagcatatggg

SEQ ID NO: 965901 - DNA, 25 bp, Homo sapien
ttccaaatggtatattggaagcata

SEQ ID NO: 965902 - DNA, 25 bp, Homo sapien
tttccttccaaatggtatattggaa

SEQ ID NO: 965903 - DNA, 25 bp, Homo sapien
ctgtgagtataaggctgtttcttcc

SEQ ID NO: 965904 - DNA, 25 bp, Homo sapien
gtttcttcctgaagcattggctgta

SEQ ID NO: 965905 - DNA, 25 bp, Homo sapien
tcttcctgaagcattggctgtaggg

SEQ ID NO: 965906 - DNA, 25 bp, Homo sapien
ctgtaggggcaatctggttgtgtca

SEQ ID NO: 965907 - DNA, 25 bp, Homo sapien
gatcttctcaaatgcgttctaacag

SEQ ID NO: 965908 - DNA, 25 bp, Homo sapien
cattgtgcttttggttcatacagtc

SEQ ID NO: 965909 - DNA, 25 bp, Homo sapien
gctagtctctgttcagatcttctca

SEQ ID NO: 965910 - DNA, 25 bp, Homo sapien
cgacaacccttggactactagagtt

SEQ ID NO: 965911 - DNA, 25 bp, Homo sapien
ttttcagttgtgaaatagcagctgc

SEQ ID NO: 965912 - DNA, 25 bp, Homo sapien
tctgaccttagtgtcagcagttttc

SEQ ID NO: 965913 - DNA, 25 bp, Homo sapien
ttctgaccttagtgtcagcagtttt

SEQ ID NO: 965914 - DNA, 25 bp, Homo sapien
ctgaccttagtgtcagcagttttca

SEQ ID NO: 965915 - DNA, 25 bp, Homo sapien
tctttggggttgacagctgagcatt

SEQ ID NO: 965916 - DNA, 25 bp, Homo sapien
cctctttggggttgacagctgagca

SEQ ID NO: 965917 - DNA, 25 bp, Homo sapien
gggttgacagctgagcattgcaaaa

SEQ ID NO: 965918 - DNA, 25 bp, Homo sapien
ttgacagctgagcattgcaaaactg

SEQ ID NO: 965919 - DNA, 25 bp, Homo sapien
tagctagctatcacatcgtaggata

SEQ ID NO: 965920 - DNA, 25 bp, Homo sapien
gctccttgcaggaaagccttcagta

SEQ ID NO: 965921 - DNA, 25 bp, Homo sapien
ggaggcaacattttactccagaaga

SEQ ID NO: 965922 - DNA, 25 bp, Homo sapien
gaagaataagtcagaatttgcccta

SEQ ID NO: 965923 - DNA, 25 bp, Homo sapien
taggcacctcactgtaagttgcaaa

SEQ ID NO: 965924 - DNA, 25 bp, Homo sapien
caaaactatctcctgtcattaagaa

SEQ ID NO: 965925 - DNA, 25 bp, Homo sapien
tcaattaactaacactgatggccac

SEQ ID NO: 965926 - DNA, 25 bp, Homo sapien
gatggccaccctaatagccaggcaa

SEQ ID NO: 965927 - DNA, 25 bp, Homo sapien
tactacaattgattgctgctgtatg

SEQ ID NO: 965928 - DNA, 25 bp, Homo sapien
aaatactacaattgattgctgctgt

SEQ ID NO: 965929 - DNA, 25 bp, Homo sapien
tacaattgattgctgctgtatgttc

SEQ ID NO: 965930 - DNA, 25 bp, Homo sapien
aattgattgctgctgtatgttctac

SEQ ID NO: 965931 - DNA, 25 bp, Homo sapien
tcaacccttgataagattgtctgcc

SEQ ID NO: 965932 - DNA, 25 bp, Homo sapien
tgacagacccataggctctcaactc

SEQ ID NO: 965933 - DNA, 25 bp, Homo sapien
gctgcaaaataatttagctctaccc

SEQ ID NO: 965934 - DNA, 25 bp, Homo sapien
tagctctaccctagtaggatgcctg

SEQ ID NO: 965935 - DNA, 25 bp, Homo sapien
gaagtagtagattatggttgtaacc

SEQ ID NO: 965936 - DNA, 25 bp, Homo sapien
tgtaggttgaagtagtagattatgg

SEQ ID NO: 965937 - DNA, 25 bp, Homo sapien
tcaaagtactgtaggttgaagtagt

SEQ ID NO: 965938 - DNA, 25 bp, Homo sapien
agattatggttgtaaccatcctcac

SEQ ID NO: 965939 - DNA, 25 bp, Homo sapien
caacactgttgataggtccaaagtg

SEQ ID NO: 965940 - DNA, 25 bp, Homo sapien
gaaggcaacactgttgataggtcca

SEQ ID NO: 965941 - DNA, 25 bp, Homo sapien
ggaaggcaacactgttgataggtcc

SEQ ID NO: 965942 - DNA, 25 bp, Homo sapien
ggcaacactgttgataggtccaaag

SEQ ID NO: 965943 - DNA, 25 bp, Homo sapien
gctgatggggctttctgttcagaaa

SEQ ID NO: 965944 - DNA, 25 bp, Homo sapien
gacaaacacgatcatgtccctggat

SEQ ID NO: 965945 - DNA, 25 bp, Homo sapien
tgtctttggatgcagtgacaaacac

SEQ ID NO: 965946 - DNA, 25 bp, Homo sapien
tctgatgttgaagagtcatagagtc

SEQ ID NO: 965947 - DNA, 25 bp, Homo sapien
ccatggagaacgtgatgatattgcc

SEQ ID NO: 965948 - DNA, 25 bp, Homo sapien
gcccaaagatggttgtcagctgaat

SEQ ID NO: 965949 - DNA, 25 bp, Homo sapien
gagctttccactctcatggcctgca

SEQ ID NO: 965950 - DNA, 25 bp, Homo sapien
gcaagggatcttcaggtagcactca

SEQ ID NO: 965951 - DNA, 25 bp, Homo sapien
ttcacagttatacttcacctgccta

SEQ ID NO: 965952 - DNA, 25 bp, Homo sapien
gtctccttcacagttatacttcacc

SEQ ID NO: 965953 - DNA, 25 bp, Homo sapien
gataggttccttggccacggtgaag

SEQ ID NO: 965954 - DNA, 25 bp, Homo sapien
acctgcctaatgacctgctcatggc

SEQ ID NO: 965955 - DNA, 25 bp, Homo sapien
gagtgaaaccttgtagattctccat

SEQ ID NO: 965956 - DNA, 25 bp, Homo sapien
catcaaaatccagagtgaaaccttg

SEQ ID NO: 965957 - DNA, 25 bp, Homo sapien
actgtttaaggcatcaaaatccaga

SEQ ID NO: 965958 - DNA, 25 bp, Homo sapien
cttactgtttaaggcatcaaaatcc

SEQ ID NO: 965959 - DNA, 25 bp, Homo sapien
catggtctggaagtggtcacggcca

SEQ ID NO: 965960 - DNA, 25 bp, Homo sapien
tccatggtctggaagtggtcacggc

SEQ ID NO: 965961 - DNA, 25 bp, Homo sapien
ggtctggaagtggtcacggccaaac

SEQ ID NO: 965962 - DNA, 25 bp, Homo sapien
tggtctggaagtggtcacggccaaa

SEQ ID NO: 965963 - DNA, 25 bp, Homo sapien
aacagtgttgatgaacttaaggtca

SEQ ID NO: 965964 - DNA, 25 bp, Homo sapien
gcaggacgcttggtctgcaccatca

SEQ ID NO: 965965 - DNA, 25 bp, Homo sapien
tggaaacagtgttgatgaacttaag

SEQ ID NO: 965966 - DNA, 25 bp, Homo sapien
tgcaccatcaaaggcttgcggaggt

SEQ ID NO: 965967 - DNA, 25 bp, Homo sapien
attgttcatttcattatagtggaca

SEQ ID NO: 965968 - DNA, 25 bp, Homo sapien
tgttcatttcattatagtggacaaa

SEQ ID NO: 965969 - DNA, 25 bp, Homo sapien
tcatttcattatagtggacaaagcc

SEQ ID NO: 965970 - DNA, 25 bp, Homo sapien
ttcatttcattatagtggacaaagc

SEQ ID NO: 965971 - DNA, 25 bp, Homo sapien
tcatccttcgtaaggtagccatggc

SEQ ID NO: 965972 - DNA, 25 bp, Homo sapien
cttgttattctcagtgcagtgatgg

SEQ ID NO: 965973 - DNA, 25 bp, Homo sapien
ttattctcagtgcagtgatggtagc

SEQ ID NO: 965974 - DNA, 25 bp, Homo sapien
tggccaatgttacagattttcttgt

SEQ ID NO: 965975 - DNA, 25 bp, Homo sapien
taaggagccttacacagcctttggt

SEQ ID NO: 965976 - DNA, 25 bp, Homo sapien
gccttacacagcctttggtgggtct

SEQ ID NO: 965977 - DNA, 25 bp, Homo sapien
tcctgatataaggagccttacacag

SEQ ID NO: 965978 - DNA, 25 bp, Homo sapien
cctttggtgggtcttgtgggtcagc

SEQ ID NO: 965979 - DNA, 25 bp, Homo sapien
tcacatgatgtaggccataccagcc

SEQ ID NO: 965980 - DNA, 25 bp, Homo sapien
cacaactaccatgggcggtgtctcc

SEQ ID NO: 965981 - DNA, 25 bp, Homo sapien
caagccagggaacagtgaacttcca

SEQ ID NO: 965982 - DNA, 25 bp, Homo sapien
gaagcaggcacatctaagtatgggc

SEQ ID NO: 965983 - DNA, 25 bp, Homo sapien
tcccaccaacgatgttcaagcttct

SEQ ID NO: 965984 - DNA, 25 bp, Homo sapien
cacagacatttctatgaggtgctga

SEQ ID NO: 965985 - DNA, 25 bp, Homo sapien
cattcatccactagtgaacacaggt

SEQ ID NO: 965986 - DNA, 25 bp, Homo sapien
tgtcgcgaatggcaggatctccttt

SEQ ID NO: 965987 - DNA, 25 bp, Homo sapien
gaaaagtcttgtcaacacctctgta

SEQ ID NO: 965988 - DNA, 25 bp, Homo sapien
tcttgtcaacacctctgtaagtcca

SEQ ID NO: 965989 - DNA, 25 bp, Homo sapien
tgtcaacacctctgtaagtccacca

SEQ ID NO: 965990 - DNA, 25 bp, Homo sapien
aaagtcttgtcaacacctctgtaag

SEQ ID NO: 965991 - DNA, 25 bp, Homo sapien
tccacactagaggacttccaaagac

SEQ ID NO: 965992 - DNA, 25 bp, Homo sapien
agcagagtagcaggagaatagacat

SEQ ID NO: 965993 - DNA, 25 bp, Homo sapien
ctggtagcagagtagcaggagaata

SEQ ID NO: 965994 - DNA, 25 bp, Homo sapien
ctccaagtatacaacaggtgttttc

SEQ ID NO: 965995 - DNA, 25 bp, Homo sapien
tcagactagggtggttgggatatcc

SEQ ID NO: 965996 - DNA, 25 bp, Homo sapien
tgatacttatagacagtgtgaaata

SEQ ID NO: 965997 - DNA, 25 bp, Homo sapien
gatattttgatacttatagacagtg

SEQ ID NO: 965998 - DNA, 25 bp, Homo sapien
ccaacatgtgtagacccaagagaag

SEQ ID NO: 965999 - DNA, 25 bp, Homo sapien
aacctgttaattcagcttgacttct

SEQ ID NO: 966000 - DNA, 25 bp, Homo sapien
aaacctgttaattcagcttgacttc

SEQ ID NO: 966001 - DNA, 25 bp, Homo sapien
tctttccgcggcataacaaacagaa

SEQ ID NO: 966002 - DNA, 25 bp, Homo sapien
acctctggagtttatacatgctgcc

SEQ ID NO: 966003 - DNA, 25 bp, Homo sapien
catttgatattgtgaacctctggag

SEQ ID NO: 966004 - DNA, 25 bp, Homo sapien
caaaaggctctcagaacggaattgg

SEQ ID NO: 966005 - DNA, 25 bp, Homo sapien
cctcagtgttcagttaattggacag

SEQ ID NO: 966006 - DNA, 25 bp, Homo sapien
tgtctagagcaggtaaatctccaag

SEQ ID NO: 966007 - DNA, 25 bp, Homo sapien
tgtagccgctaaagtctgtacccag

SEQ ID NO: 966008 - DNA, 25 bp, Homo sapien
gaattctatccccatcccaaggttg

SEQ ID NO: 966009 - DNA, 25 bp, Homo sapien
gaatccataaccgttgatttgtgca

SEQ ID NO: 966010 - DNA, 25 bp, Homo sapien
tgatttgtgcaatggcgggacctta

SEQ ID NO: 966011 - DNA, 25 bp, Homo sapien
cataaccgttgatttgtgcaatggc

SEQ ID NO: 966012 - DNA, 25 bp, Homo sapien
tggcgggaccttatcacatgggctg

SEQ ID NO: 966013 - DNA, 25 bp, Homo sapien
aaattatgatcaagtatagaaagta

SEQ ID NO: 966014 - DNA, 25 bp, Homo sapien
tcgtacacaaggttgattgaaatgt

SEQ ID NO: 966015 - DNA, 25 bp, Homo sapien
tgtcgtacacaaggttgattgaaat

SEQ ID NO: 966016 - DNA, 25 bp, Homo sapien
ctcttgtcgtacacaaggttgattg

SEQ ID NO: 966017 - DNA, 25 bp, Homo sapien
tacagcataactagcttctacttca

SEQ ID NO: 966018 - DNA, 25 bp, Homo sapien
tagtcactagagaaaaccgctgtta

SEQ ID NO: 966019 - DNA, 25 bp, Homo sapien
gtaattcaactacagcataactagc

SEQ ID NO: 966020 - DNA, 25 bp, Homo sapien
gagatagtaaaaactggatagtcac

SEQ ID NO: 966021 - DNA, 25 bp, Homo sapien
cttttctttctttgactgcttcagc

SEQ ID NO: 966022 - DNA, 25 bp, Homo sapien
ttttctttctttgactgcttcagcc

SEQ ID NO: 966023 - DNA, 25 bp, Homo sapien
tttctttctttgactgcttcagcca

SEQ ID NO: 966024 - DNA, 25 bp, Homo sapien
ttctttctttgactgcttcagccat

SEQ ID NO: 966025 - DNA, 25 bp, Homo sapien
gatatgtcagccgtctgtagatgct

SEQ ID NO: 966026 - DNA, 25 bp, Homo sapien
ggatgccaagcaacaccagtatgtc

SEQ ID NO: 966027 - DNA, 25 bp, Homo sapien
tgtgtgatactaaaaggatgccaag

SEQ ID NO: 966028 - DNA, 25 bp, Homo sapien
tacttttatctcaagggtagaagca

SEQ ID NO: 966029 - DNA, 25 bp, Homo sapien
gattattcttgactttataggaagg

SEQ ID NO: 966030 - DNA, 25 bp, Homo sapien
acttcagagatgtcatgggaaaatc

SEQ ID NO: 966031 - DNA, 25 bp, Homo sapien
aaatcatcagtagtaatcaaattgg

SEQ ID NO: 966032 - DNA, 25 bp, Homo sapien
catcagtagtaatcaaattggaaag

SEQ ID NO: 966033 - DNA, 25 bp, Homo sapien
ttagactctttcttgcccaagatat

SEQ ID NO: 966034 - DNA, 25 bp, Homo sapien
ttcttgcccaagatatagcatagtt

SEQ ID NO: 966035 - DNA, 25 bp, Homo sapien
tagcatagtttcttggtcatggtag

SEQ ID NO: 966036 - DNA, 25 bp, Homo sapien
catagtttcttggtcatggtagtta

SEQ ID NO: 966037 - DNA, 25 bp, Homo sapien
tcaccttcacttgtcttacactgac

SEQ ID NO: 966038 - DNA, 25 bp, Homo sapien
tctcttcaccttcacttgtcttaca

SEQ ID NO: 966039 - DNA, 25 bp, Homo sapien
cttcaccttcacttgtcttacactg

SEQ ID NO: 966040 - DNA, 25 bp, Homo sapien
cttcacttgtcttacactgaccaaa

SEQ ID NO: 966041 - DNA, 25 bp, Homo sapien
cctgtgctttgtaccaatgtctttt

SEQ ID NO: 966042 - DNA, 25 bp, Homo sapien
ttcttcgcattctagttcttacaaa

SEQ ID NO: 966043 - DNA, 25 bp, Homo sapien
tcacttcctatgatgcttttcattt

SEQ ID NO: 966044 - DNA, 25 bp, Homo sapien
taccaatgtcttttactacagtact

SEQ ID NO: 966045 - DNA, 25 bp, Homo sapien
cacactcttaataggctcttccaga

SEQ ID NO: 966046 - DNA, 25 bp, Homo sapien
tcaaaagggtaatgagtgtccaggt

SEQ ID NO: 966047 - DNA, 25 bp, Homo sapien
cctcccattatagctggccaggtga

SEQ ID NO: 966048 - DNA, 25 bp, Homo sapien
cattgacccctgtaggatcaaggga

SEQ ID NO: 966049 - DNA, 25 bp, Homo sapien
taataggcccttcattcttgtgctg

SEQ ID NO: 966050 - DNA, 25 bp, Homo sapien
atctaataggcccttcattcttgtg

SEQ ID NO: 966051 - DNA, 25 bp, Homo sapien
ggcccttcattcttgtgctgaacat

SEQ ID NO: 966052 - DNA, 25 bp, Homo sapien
taggcccttcattcttgtgctgaac

SEQ ID NO: 966053 - DNA, 25 bp, Homo sapien
cattctgaggacagtcaagaacaca

SEQ ID NO: 966054 - DNA, 25 bp, Homo sapien
cagtctctatgttttagcagacaca

SEQ ID NO: 966055 - DNA, 25 bp, Homo sapien
gagacttatgactctccagattagt

SEQ ID NO: 966056 - DNA, 25 bp, Homo sapien
gatagagttattacacagcctcctc

SEQ ID NO: 966057 - DNA, 25 bp, Homo sapien
tacttggtactccatactactgtgg

SEQ ID NO: 966058 - DNA, 25 bp, Homo sapien
cttcaggatggtgcatttccctagg

SEQ ID NO: 966059 - DNA, 25 bp, Homo sapien
tcctagcgctctacaatcagaaggt

SEQ ID NO: 966060 - DNA, 25 bp, Homo sapien
cctaggccctgggtccagaagtgcg

SEQ ID NO: 966061 - DNA, 25 bp, Homo sapien
gcttcaatcagctcacattagcagt

SEQ ID NO: 966062 - DNA, 25 bp, Homo sapien
aaattctaggtgtgggagacaggta

SEQ ID NO: 966063 - DNA, 25 bp, Homo sapien
catgatttcccctgatatttgacct

SEQ ID NO: 966064 - DNA, 25 bp, Homo sapien
taatggagccaactggataaggctt

SEQ ID NO: 966065 - DNA, 25 bp, Homo sapien
gagttacttgagacttgataagaaa

SEQ ID NO: 966066 - DNA, 25 bp, Homo sapien
atttagggacaacaagttgtcaaca

SEQ ID NO: 966067 - DNA, 25 bp, Homo sapien
aagttgtcaacaagagttacttgag

SEQ ID NO: 966068 - DNA, 25 bp, Homo sapien
gtcaacaagagttacttgagacttg

SEQ ID NO: 966069 - DNA, 25 bp, Homo sapien
cacaatcacctgtcagtgatgccat

SEQ ID NO: 966070 - DNA, 25 bp, Homo sapien
agcacaatcacctgtcagtgatgcc

SEQ ID NO: 966071 - DNA, 25 bp, Homo sapien
gcacaatcacctgtcagtgatgcca

SEQ ID NO: 966072 - DNA, 25 bp, Homo sapien
cagcacaatcacctgtcagtgatgc

SEQ ID NO: 966073 - DNA, 25 bp, Homo sapien
tggtttccagcagcgacagcgggca

SEQ ID NO: 966074 - DNA, 25 bp, Homo sapien
ctcaggccaaactgtataatagtgg

SEQ ID NO: 966075 - DNA, 25 bp, Homo sapien
aaactgtataatagtggtttccagc

SEQ ID NO: 966076 - DNA, 25 bp, Homo sapien
ggccaaactgtataatagtggtttc

SEQ ID NO: 966077 - DNA, 25 bp, Homo sapien
catttgtcattagtgatccccagga

SEQ ID NO: 966078 - DNA, 25 bp, Homo sapien
tgtcattagtgatccccaggaaata

SEQ ID NO: 966079 - DNA, 25 bp, Homo sapien
ttttcatttgtcattagtgatcccc

SEQ ID NO: 966080 - DNA, 25 bp, Homo sapien
tttgtcattagtgatccccaggaaa

SEQ ID NO: 966081 - DNA, 25 bp, Homo sapien
gaaattgtctattgtaagtcactgg

SEQ ID NO: 966082 - DNA, 25 bp, Homo sapien
ggcaacattcagcattgtccactac

SEQ ID NO: 966083 - DNA, 25 bp, Homo sapien
aagtcactggtgttacaactgtgca

SEQ ID NO: 966084 - DNA, 25 bp, Homo sapien
cttggacttgagtatgtatggcaac

SEQ ID NO: 966085 - DNA, 25 bp, Homo sapien
gcagcttgatgtaggcagttggtgt

SEQ ID NO: 966086 - DNA, 25 bp, Homo sapien
cttgatgtaggcagttggtgttcat

SEQ ID NO: 966087 - DNA, 25 bp, Homo sapien
gcttgatgtaggcagttggtgttca

SEQ ID NO: 966088 - DNA, 25 bp, Homo sapien
cagcttgatgtaggcagttggtgtt

SEQ ID NO: 966089 - DNA, 25 bp, Homo sapien
tcctggctctttcttaaatcttgct

SEQ ID NO: 966090 - DNA, 25 bp, Homo sapien
cttctgatgcttttatgcaggtcct

SEQ ID NO: 966091 - DNA, 25 bp, Homo sapien
gcttctgatgcttttatgcaggtcc

SEQ ID NO: 966092 - DNA, 25 bp, Homo sapien
ctgatgcttttatgcaggtcctttc

SEQ ID NO: 966093 - DNA, 25 bp, Homo sapien
tagacatacaaggaccagcataact

SEQ ID NO: 966094 - DNA, 25 bp, Homo sapien
agatctctttgcctaggattagaca

SEQ ID NO: 966095 - DNA, 25 bp, Homo sapien
tacagaactcccatctgtgtagcct

SEQ ID NO: 966096 - DNA, 25 bp, Homo sapien
taatacactctttctatgccagatc

SEQ ID NO: 966097 - DNA, 25 bp, Homo sapien
ttaatataattcaggcagagatagg

SEQ ID NO: 966098 - DNA, 25 bp, Homo sapien
caaaccgatacattggctgaatctg

SEQ ID NO: 966099 - DNA, 25 bp, Homo sapien
aagttaatataattcaggcagagat

SEQ ID NO: 966100 - DNA, 25 bp, Homo sapien
ccaaaatcttccgtgacaaaccgat

SEQ ID NO: 966101 - DNA, 25 bp, Homo sapien
gccatagatgattggtgcagagtaa

SEQ ID NO: 966102 - DNA, 25 bp, Homo sapien
catagatgattggtgcagagtaagg

SEQ ID NO: 966103 - DNA, 25 bp, Homo sapien
ctgccatagatgattggtgcagagt

SEQ ID NO: 966104 - DNA, 25 bp, Homo sapien
ccatagatgattggtgcagagtaag

SEQ ID NO: 966105 - DNA, 25 bp, Homo sapien
tctatagctattggctccaaaatca

SEQ ID NO: 966106 - DNA, 25 bp, Homo sapien
ggaagccatgtctatagctattggc

SEQ ID NO: 966107 - DNA, 25 bp, Homo sapien
catgtctatagctattggctccaaa

SEQ ID NO: 966108 - DNA, 25 bp, Homo sapien
gccatgtctatagctattggctcca

SEQ ID NO: 966109 - DNA, 25 bp, Homo sapien
ctctgtgcttaaaagaatatcctcc

SEQ ID NO: 966110 - DNA, 25 bp, Homo sapien
tatacataactaaagggaagtcagc

SEQ ID NO: 966111 - DNA, 25 bp, Homo sapien
taaccatgattctattctctgctag

SEQ ID NO: 966112 - DNA, 25 bp, Homo sapien
tcaactgttcaatgttaggtataca

SEQ ID NO: 966113 - DNA, 25 bp, Homo sapien
ttgaaaagaggccatggaccctctg

SEQ ID NO: 966114 - DNA, 25 bp, Homo sapien
tgccttgttagcctcttggtggtat

SEQ ID NO: 966115 - DNA, 25 bp, Homo sapien
ggtggtatagatttcaagatgcagt

SEQ ID NO: 966116 - DNA, 25 bp, Homo sapien
tgaaaagaggccatggaccctctgc

SEQ ID NO: 966117 - DNA, 25 bp, Homo sapien
gctgctgatgtatttccctgatgtc

SEQ ID NO: 966118 - DNA, 25 bp, Homo sapien
catagctgctgatgtatttccctga

SEQ ID NO: 966119 - DNA, 25 bp, Homo sapien
tgctgatgtatttccctgatgtcat

SEQ ID NO: 966120 - DNA, 25 bp, Homo sapien
agctgctgatgtatttccctgatgt

SEQ ID NO: 966121 - DNA, 25 bp, Homo sapien
cttttgaatgttccctgtcagctcc

SEQ ID NO: 966122 - DNA, 25 bp, Homo sapien
tgtcagctccctcatgatgatgagc

SEQ ID NO: 966123 - DNA, 25 bp, Homo sapien
gttccctgtcagctccctcatgatg

SEQ ID NO: 966124 - DNA, 25 bp, Homo sapien
gagcaccaggagcacataaggatct

SEQ ID NO: 966125 - DNA, 25 bp, Homo sapien
tctactctcttctgcccatgttggg

SEQ ID NO: 966126 - DNA, 25 bp, Homo sapien
tctgcccatgttggggaggcacctt

SEQ ID NO: 966127 - DNA, 25 bp, Homo sapien
tctctctactctcttctgcccatgt

SEQ ID NO: 966128 - DNA, 25 bp, Homo sapien
cttctgcccatgttggggaggcacc

SEQ ID NO: 966129 - DNA, 25 bp, Homo sapien
cccacattgccaagactaacctaag

SEQ ID NO: 966130 - DNA, 25 bp, Homo sapien
ccacattgccaagactaacctaagc

SEQ ID NO: 966131 - DNA, 25 bp, Homo sapien
agcccacattgccaagactaaccta

SEQ ID NO: 966132 - DNA, 25 bp, Homo sapien
agagcccacattgccaagactaacc

SEQ ID NO: 966133 - DNA, 25 bp, Homo sapien
cagcaaactattgccaacgaccaaa

SEQ ID NO: 966134 - DNA, 25 bp, Homo sapien
accaaacaccgcatgttctcactca

SEQ ID NO: 966135 - DNA, 25 bp, Homo sapien
aaaaccaaacaccgcatgttctcac

SEQ ID NO: 966136 - DNA, 25 bp, Homo sapien
tcagcaaactattgccaacgaccaa

SEQ ID NO: 966137 - DNA, 25 bp, Homo sapien
ctcctccaagctgtgtagtagaagg

SEQ ID NO: 966138 - DNA, 25 bp, Homo sapien
ctctcctccaagctgtgtagtagaa

SEQ ID NO: 966139 - DNA, 25 bp, Homo sapien
tctcctccaagctgtgtagtagaag

SEQ ID NO: 966140 - DNA, 25 bp, Homo sapien
tcctccaagctgtgtagtagaaggt

SEQ ID NO: 966141 - DNA, 25 bp, Homo sapien
tcttgttgcaaggtcctttccgtta

SEQ ID NO: 966142 - DNA, 25 bp, Homo sapien
tccatgagttcttgttgcaaggtcc

SEQ ID NO: 966143 - DNA, 25 bp, Homo sapien
cagatattgtgagaagcatccatga

SEQ ID NO: 966144 - DNA, 25 bp, Homo sapien
tattgtgagaagcatccatgagttc

SEQ ID NO: 966145 - DNA, 25 bp, Homo sapien
cgatgaggtagaatataattgaccc

SEQ ID NO: 966146 - DNA, 25 bp, Homo sapien
cattcagcttagtttcctccctgtt

SEQ ID NO: 966147 - DNA, 25 bp, Homo sapien
ccttacgacttttgcaatatactca

SEQ ID NO: 966148 - DNA, 25 bp, Homo sapien
aaatctctgttgaactaacggcttc

SEQ ID NO: 966149 - DNA, 25 bp, Homo sapien
gtgggagataggaactatccccaac

SEQ ID NO: 966150 - DNA, 25 bp, Homo sapien
taaaactctttgtgggagataggaa

SEQ ID NO: 966151 - DNA, 25 bp, Homo sapien
tctttgtgggagataggaactatcc

SEQ ID NO: 966152 - DNA, 25 bp, Homo sapien
aactctttgtgggagataggaacta

SEQ ID NO: 966153 - DNA, 25 bp, Homo sapien
tcaatgccctgggagtcataacctc

SEQ ID NO: 966154 - DNA, 25 bp, Homo sapien
ggagcacgtgcagcttttacttcaa

SEQ ID NO: 966155 - DNA, 25 bp, Homo sapien
tttgtccctggaactagattaggag

SEQ ID NO: 966156 - DNA, 25 bp, Homo sapien
gaactagattaggagcacgtgcagc

SEQ ID NO: 966157 - DNA, 25 bp, Homo sapien
cctgtgatgaattgtgggctatttt

SEQ ID NO: 966158 - DNA, 25 bp, Homo sapien
cagcttttgatggttctgatacttc

SEQ ID NO: 966159 - DNA, 25 bp, Homo sapien
tcctcttcttgaatcctgtgatgaa

SEQ ID NO: 966160 - DNA, 25 bp, Homo sapien
gttctttgctatttgtaggttcctc

SEQ ID NO: 966161 - DNA, 25 bp, Homo sapien
cagacctgataaaaagtgatcctca

SEQ ID NO: 966162 - DNA, 25 bp, Homo sapien
cctgataaaaagtgatcctcaacaa

SEQ ID NO: 966163 - DNA, 25 bp, Homo sapien
gacctgataaaaagtgatcctcaac

SEQ ID NO: 966164 - DNA, 25 bp, Homo sapien
acctgataaaaagtgatcctcaaca

SEQ ID NO: 966165 - DNA, 25 bp, Homo sapien
aaggccatattgtgtcccccgttca

SEQ ID NO: 966166 - DNA, 25 bp, Homo sapien
caaactcccacggagatctagccat

SEQ ID NO: 966167 - DNA, 25 bp, Homo sapien
ggataatattctcgctttcatctcc

SEQ ID NO: 966168 - DNA, 25 bp, Homo sapien
catgtgcggatcaaggtcacaccgt

SEQ ID NO: 966169 - DNA, 25 bp, Homo sapien
agaagctccatagccttccgggcca

SEQ ID NO: 966170 - DNA, 25 bp, Homo sapien
aaaaacatggagaatgttgagcaac

SEQ ID NO: 966171 - DNA, 25 bp, Homo sapien
gagaatgttgagcaactcagaagct

SEQ ID NO: 966172 - DNA, 25 bp, Homo sapien
gcaactcagaagctccatagccttc

SEQ ID NO: 966173 - DNA, 25 bp, Homo sapien
gatgttagcatgagactgagacttc

SEQ ID NO: 966174 - DNA, 25 bp, Homo sapien
cagatgttagcatgagactgagact

SEQ ID NO: 966175 - DNA, 25 bp, Homo sapien
ctgaactgccttagcaattgactga

SEQ ID NO: 966176 - DNA, 25 bp, Homo sapien
ttagcaattgactgagcctggatct

SEQ ID NO: 966177 - DNA, 25 bp, Homo sapien
cacccagtgtctacggccactgcag

SEQ ID NO: 966178 - DNA, 25 bp, Homo sapien
gccactgcagctagatctgtgttct

SEQ ID NO: 966179 - DNA, 25 bp, Homo sapien
tgccatcaacccagagggtgacaga

SEQ ID NO: 966180 - DNA, 25 bp, Homo sapien
agtgtctacggccactgcagctaga

SEQ ID NO: 966181 - DNA, 25 bp, Homo sapien
cctgccaagcatagctccatcaaag

SEQ ID NO: 966182 - DNA, 25 bp, Homo sapien
ccaatgcagctggtcccatgggacg

SEQ ID NO: 966183 - DNA, 25 bp, Homo sapien
aatgtatgaactctgtcagacatcc

SEQ ID NO: 966184 - DNA, 25 bp, Homo sapien
cagttcccacgggcttctaagctac

SEQ ID NO: 966185 - DNA, 25 bp, Homo sapien
ttctcttgttcttccactttccaag

SEQ ID NO: 966186 - DNA, 25 bp, Homo sapien
gcttctcttgttcttccactttcca

SEQ ID NO: 966187 - DNA, 25 bp, Homo sapien
ttactgcttctcttgttcttccact

SEQ ID NO: 966188 - DNA, 25 bp, Homo sapien
actgcttctcttgttcttccacttt

SEQ ID NO: 966189 - DNA, 25 bp, Homo sapien
gtgttaccagcatgagagcagagct

SEQ ID NO: 966190 - DNA, 25 bp, Homo sapien
agtagtggtgttaccagcatgagag

SEQ ID NO: 966191 - DNA, 25 bp, Homo sapien
agcagagctcccagttgggtgccat

SEQ ID NO: 966192 - DNA, 25 bp, Homo sapien
gagcagagctcccagttgggtgcca

SEQ ID NO: 966193 - DNA, 25 bp, Homo sapien
tccagggcattgtttgacattcaga

SEQ ID NO: 966194 - DNA, 25 bp, Homo sapien
attccccaaggaaatgtaacagcct

SEQ ID NO: 966195 - DNA, 25 bp, Homo sapien
ggaaacctagaaacatttgtcctga

SEQ ID NO: 966196 - DNA, 25 bp, Homo sapien
taaaattgggtatatggtacctctg

SEQ ID NO: 966197 - DNA, 25 bp, Homo sapien
agtaacctgacttttctctctggct

SEQ ID NO: 966198 - DNA, 25 bp, Homo sapien
tgagtaacctgacttttctctctgg

SEQ ID NO: 966199 - DNA, 25 bp, Homo sapien
aggctttgttcatttcttctctttt

SEQ ID NO: 966200 - DNA, 25 bp, Homo sapien
gttctaccttaacagcaagtgacaa

SEQ ID NO: 966201 - DNA, 25 bp, Homo sapien
gtttactgttcttcctaactggcag

SEQ ID NO: 966202 - DNA, 25 bp, Homo sapien
taactggcagttactcctttgtaga

SEQ ID NO: 966203 - DNA, 25 bp, Homo sapien
tttgtagatagtacaaatcacaatg

SEQ ID NO: 966204 - DNA, 25 bp, Homo sapien
caaataatctgaaattcagccccat

SEQ ID NO: 966205 - DNA, 25 bp, Homo sapien
gaaattcagccccattaagacatgt

SEQ ID NO: 966206 - DNA, 25 bp, Homo sapien
cccattaagacatgtgggtgcaata

SEQ ID NO: 966207 - DNA, 25 bp, Homo sapien
aatcaaaacccaacaatcaatataa

SEQ ID NO: 966208 - DNA, 25 bp, Homo sapien
tttctcgcacagcatcatattgtca

SEQ ID NO: 966209 - DNA, 25 bp, Homo sapien
taatacagatcgttttaatgtgctg

SEQ ID NO: 966210 - DNA, 25 bp, Homo sapien
agtaactggcctcccaatgccagca

SEQ ID NO: 966211 - DNA, 25 bp, Homo sapien
cagcaactcaggtagattcatgcag

SEQ ID NO: 966212 - DNA, 25 bp, Homo sapien
cttctctctgtactggtaagcgctc

SEQ ID NO: 966213 - DNA, 25 bp, Homo sapien
atatgtgtggcatgggcatgcagaa

SEQ ID NO: 966214 - DNA, 25 bp, Homo sapien
tggtaagcgctctggaggaagaaca

SEQ ID NO: 966215 - DNA, 25 bp, Homo sapien
ccacaggatatgtgtggcatgggca

SEQ ID NO: 966216 - DNA, 25 bp, Homo sapien
gaatcattattaatagcttgaaagc

SEQ ID NO: 966217 - DNA, 25 bp, Homo sapien
gtaaacaccttttgtagccattgaa

SEQ ID NO: 966218 - DNA, 25 bp, Homo sapien
gcatttttctaggtgctattgtata

SEQ ID NO: 966219 - DNA, 25 bp, Homo sapien
gcttgaaagcagaatttaatccagg

SEQ ID NO: 966220 - DNA, 25 bp, Homo sapien
actcgaagacggaactggatgtcag

SEQ ID NO: 966221 - DNA, 25 bp, Homo sapien
ttctatttgctatcacatgaattca

SEQ ID NO: 966222 - DNA, 25 bp, Homo sapien
aaaatcacattgtctagggactcga

SEQ ID NO: 966223 - DNA, 25 bp, Homo sapien
aactggacttccacagagattaaca

SEQ ID NO: 966224 - DNA, 25 bp, Homo sapien
tcattgatgatcctgtccgaatcac

SEQ ID NO: 966225 - DNA, 25 bp, Homo sapien
ggcacaaaatatcggtgcatctcat

SEQ ID NO: 966226 - DNA, 25 bp, Homo sapien
caagttccatcaaatcaggaggcac

SEQ ID NO: 966227 - DNA, 25 bp, Homo sapien
tctggagtcccagcaagctgccttg

SEQ ID NO: 966228 - DNA, 25 bp, Homo sapien
agactcacgcactatcacaacaaaa

SEQ ID NO: 966229 - DNA, 25 bp, Homo sapien
aaaagcatgagggtgattgacccca

SEQ ID NO: 966230 - DNA, 25 bp, Homo sapien
gcccaaccacatggtagctgccaag

SEQ ID NO: 966231 - DNA, 25 bp, Homo sapien
tttggcaattaacactgggctcctc

SEQ ID NO: 966232 - DNA, 25 bp, Homo sapien
taattcaagccattgaaggatcagg

SEQ ID NO: 966233 - DNA, 25 bp, Homo sapien
tcataagcttgacccatgcaatgtg

SEQ ID NO: 966234 - DNA, 25 bp, Homo sapien
ggatcaggaagagagacaggttctc

SEQ ID NO: 966235 - DNA, 25 bp, Homo sapien
gagagtaatctagtgagtaattcaa

SEQ ID NO: 966236 - DNA, 25 bp, Homo sapien
gaattcagtgcccatcaaatcttga

SEQ ID NO: 966237 - DNA, 25 bp, Homo sapien
cacataccctgaacaagttccatac

SEQ ID NO: 966238 - DNA, 25 bp, Homo sapien
agaaaagacgcatagcctggcattc

SEQ ID NO: 966239 - DNA, 25 bp, Homo sapien
caggaaccatcacagtattatgccc

SEQ ID NO: 966240 - DNA, 25 bp, Homo sapien
cccaggcttgcattgagacatttct

SEQ ID NO: 966241 - DNA, 25 bp, Homo sapien
gacggatgggtaattatgtcattag

SEQ ID NO: 966242 - DNA, 25 bp, Homo sapien
catttctgtggtatgagagtaaagg

SEQ ID NO: 966243 - DNA, 25 bp, Homo sapien
tatcggaaagctcactggaagtaga

SEQ ID NO: 966244 - DNA, 25 bp, Homo sapien
tggccttgtgtccatctggatgctt

SEQ ID NO: 966245 - DNA, 25 bp, Homo sapien
cttgatagtctatggccttgtgtcc

SEQ ID NO: 966246 - DNA, 25 bp, Homo sapien
caacacatgccttgatagtctatgg

SEQ ID NO: 966247 - DNA, 25 bp, Homo sapien
gtctatggccttgtgtccatctgga

SEQ ID NO: 966248 - DNA, 25 bp, Homo sapien
cagctgtcagcggagtgtcaaacag

SEQ ID NO: 966249 - DNA, 25 bp, Homo sapien
atagatttccaatgaagggtgaggt

SEQ ID NO: 966250 - DNA, 25 bp, Homo sapien
gacatggtaatcgtttttatagatt

SEQ ID NO: 966251 - DNA, 25 bp, Homo sapien
tgaggtgctttgacagctgtcagcg

SEQ ID NO: 966252 - DNA, 25 bp, Homo sapien
tagtcctcacaaagattggcacaaa

SEQ ID NO: 966253 - DNA, 25 bp, Homo sapien
taactactgcaatccccgtagtcct

SEQ ID NO: 966254 - DNA, 25 bp, Homo sapien
aatattcaggccgtaactactgcaa

SEQ ID NO: 966255 - DNA, 25 bp, Homo sapien
ggccgtaactactgcaatccccgta

SEQ ID NO: 966256 - DNA, 25 bp, Homo sapien
gccaggtctcctggtcaataacctc

SEQ ID NO: 966257 - DNA, 25 bp, Homo sapien
tgtttgaccagtagtcagatattac

SEQ ID NO: 966258 - DNA, 25 bp, Homo sapien
tcaataacctcctgccagcctagat

SEQ ID NO: 966259 - DNA, 25 bp, Homo sapien
cagatattacccatagccaggtctc

SEQ ID NO: 966260 - DNA, 25 bp, Homo sapien
cttatcagaagctctccagtgttca

SEQ ID NO: 966261 - DNA, 25 bp, Homo sapien
ttatcagaagctctccagtgttcat

SEQ ID NO: 966262 - DNA, 25 bp, Homo sapien
aagttagtgtggctttctacctgaa

SEQ ID NO: 966263 - DNA, 25 bp, Homo sapien
gatcctgccctatatatgactctac

SEQ ID NO: 966264 - DNA, 25 bp, Homo sapien
caaaagtaatgtcagagccaatgcc

SEQ ID NO: 966265 - DNA, 25 bp, Homo sapien
gacaattattagctagatcctgccc

SEQ ID NO: 966266 - DNA, 25 bp, Homo sapien
ggtatcatacacctgtgagtggcgt

SEQ ID NO: 966267 - DNA, 25 bp, Homo sapien
tgttaaaacctgcacgaccttgact

SEQ ID NO: 966268 - DNA, 25 bp, Homo sapien
taaatatggttcttagctcctcagc

SEQ ID NO: 966269 - DNA, 25 bp, Homo sapien
tagacagataaaatgaagcggtacc

SEQ ID NO: 966270 - DNA, 25 bp, Homo sapien
acaagggtggcagtagaccattcat

SEQ ID NO: 966271 - DNA, 25 bp, Homo sapien
gacaagggtggcagtagaccattca

SEQ ID NO: 966272 - DNA, 25 bp, Homo sapien
tgacaagggtggcagtagaccattc

SEQ ID NO: 966273 - DNA, 25 bp, Homo sapien
tctgagtccatggattagaggctgg

SEQ ID NO: 966274 - DNA, 25 bp, Homo sapien
tctgattgggagaattgcaaaaggc

SEQ ID NO: 966275 - DNA, 25 bp, Homo sapien
ccatggattagaggctggtttattc

SEQ ID NO: 966276 - DNA, 25 bp, Homo sapien
aggctggtttattctgattgggaga

SEQ ID NO: 966277 - DNA, 25 bp, Homo sapien
ttgtgatggctaatatccagtgtca

SEQ ID NO: 966278 - DNA, 25 bp, Homo sapien
tgggaatctattgaacattatgagg

SEQ ID NO: 966279 - DNA, 25 bp, Homo sapien
ctattgaacattatgaggtaaaatc

SEQ ID NO: 966280 - DNA, 25 bp, Homo sapien
catgaaagattttcatgttaagagt

SEQ ID NO: 966281 - DNA, 25 bp, Homo sapien
tgtagtggcatgttcacagttcacc

SEQ ID NO: 966282 - DNA, 25 bp, Homo sapien
tagtggcatgttcacagttcaccgc

SEQ ID NO: 966283 - DNA, 25 bp, Homo sapien
gttcaccgcagcctcaaacttcagg

SEQ ID NO: 966284 - DNA, 25 bp, Homo sapien
gggtgtagtggcatgttcacagttc

SEQ ID NO: 966285 - DNA, 25 bp, Homo sapien
catggcagttgatgttcctgaagtt

SEQ ID NO: 966286 - DNA, 25 bp, Homo sapien
actgtactgtgttcttatttgggca

SEQ ID NO: 966287 - DNA, 25 bp, Homo sapien
aacgttcctattgagcagatctgca

SEQ ID NO: 966288 - DNA, 25 bp, Homo sapien
cacaggaaggtatcgaagactgtac

SEQ ID NO: 966289 - DNA, 25 bp, Homo sapien
tgcaggttaatctgtccaggagggc

SEQ ID NO: 966290 - DNA, 25 bp, Homo sapien
tcattacgtatcaggtgcagggaca

SEQ ID NO: 966291 - DNA, 25 bp, Homo sapien
taaactattttctgctggagctcca

SEQ ID NO: 966292 - DNA, 25 bp, Homo sapien
gacaaaatgttcacaacccgcctgg

SEQ ID NO: 966293 - DNA, 25 bp, Homo sapien
cagggatgcatacttcttaagactg

SEQ ID NO: 966294 - DNA, 25 bp, Homo sapien
ttgtgcaactaccacaggagcccag

SEQ ID NO: 966295 - DNA, 25 bp, Homo sapien
cttgtgcaactaccacaggagccca

SEQ ID NO: 966296 - DNA, 25 bp, Homo sapien
tgcatacttcttaagactgcattct

SEQ ID NO: 966297 - DNA, 25 bp, Homo sapien
ttaagtagaattgactccacctctg

SEQ ID NO: 966298 - DNA, 25 bp, Homo sapien
tcagggacaggcatatgacctaagc

SEQ ID NO: 966299 - DNA, 25 bp, Homo sapien
tctccagggataatcactgatagcc

SEQ ID NO: 966300 - DNA, 25 bp, Homo sapien
taataagagcatcctaaccctctgg

SEQ ID NO: 966301 - DNA, 25 bp, Homo sapien
attggcaggattgggctctctctgc

SEQ ID NO: 966302 - DNA, 25 bp, Homo sapien
gacatcaattcccaatgaaacagag

SEQ ID NO: 966303 - DNA, 25 bp, Homo sapien
taatcaaagtcaggctaccagaggg

SEQ ID NO: 966304 - DNA, 25 bp, Homo sapien
tattttttctaacacgcctggccta

SEQ ID NO: 966305 - DNA, 25 bp, Homo sapien
aaagggttataatcatgctgctata

SEQ ID NO: 966306 - DNA, 25 bp, Homo sapien
tatatacccaaagggttataatcat

SEQ ID NO: 966307 - DNA, 25 bp, Homo sapien
tacccaaagggttataatcatgctg

SEQ ID NO: 966308 - DNA, 25 bp, Homo sapien
ccaaagggttataatcatgctgcta

SEQ ID NO: 966309 - DNA, 25 bp, Homo sapien
gctgacagcatatacatgggcctta

SEQ ID NO: 966310 - DNA, 25 bp, Homo sapien
ttctagaagctcaggttctccaaag

SEQ ID NO: 966311 - DNA, 25 bp, Homo sapien
cctttttagcaatagtgaggctcct

SEQ ID NO: 966312 - DNA, 25 bp, Homo sapien
ttcactttcctgtggaccgcttcct

SEQ ID NO: 966313 - DNA, 25 bp, Homo sapien
atatgcggtatggcagtgcttttta

SEQ ID NO: 966314 - DNA, 25 bp, Homo sapien
ttttatagactctgaaatttttgtc

SEQ ID NO: 966315 - DNA, 25 bp, Homo sapien
cttggaaagctgccaagaaggtctc

SEQ ID NO: 966316 - DNA, 25 bp, Homo sapien
tgcggtatggcagtgctttttatag

SEQ ID NO: 966317 - DNA, 25 bp, Homo sapien
taattacatttacacccagggcaac

SEQ ID NO: 966318 - DNA, 25 bp, Homo sapien
tcccaatgggtcactgactttgcag

SEQ ID NO: 966319 - DNA, 25 bp, Homo sapien
gctgaaatgaacattgtaattacat

SEQ ID NO: 966320 - DNA, 25 bp, Homo sapien
aatctttcttcacatgcctcacatt

SEQ ID NO: 966321 - DNA, 25 bp, Homo sapien
acagaggcttgagttcgggtccaca

SEQ ID NO: 966322 - DNA, 25 bp, Homo sapien
gaccagatggtgtgctgtaacataa

SEQ ID NO: 966323 - DNA, 25 bp, Homo sapien
gaacataattagctcctctgcactg

SEQ ID NO: 966324 - DNA, 25 bp, Homo sapien
gatatattcaactcggaaggcctgg

SEQ ID NO: 966325 - DNA, 25 bp, Homo sapien
tgtcctctatcctaccatggctatt

SEQ ID NO: 966326 - DNA, 25 bp, Homo sapien
aaaatccctctgttaccaagccctg

SEQ ID NO: 966327 - DNA, 25 bp, Homo sapien
aatccttgtgtttggcattactcta

SEQ ID NO: 966328 - DNA, 25 bp, Homo sapien
aaggtctcctcaaactactgtctag

SEQ ID NO: 966329 - DNA, 25 bp, Homo sapien
gcaagcatatgtaaagacgtccaac

SEQ ID NO: 966330 - DNA, 25 bp, Homo sapien
accacacgcctatcaggagggccaa

SEQ ID NO: 966331 - DNA, 25 bp, Homo sapien
catcaaaggcacaacccatgaaaga

SEQ ID NO: 966332 - DNA, 25 bp, Homo sapien
gagaatcagacaataagccacagac

SEQ ID NO: 966333 - DNA, 25 bp, Homo sapien
gaatgactcatcattaaccttgatg

SEQ ID NO: 966334 - DNA, 25 bp, Homo sapien
taaacagcagtggtcttaagaggca

SEQ ID NO: 966335 - DNA, 25 bp, Homo sapien
ctcagtagtttaggcttcctaaatg

SEQ ID NO: 966336 - DNA, 25 bp, Homo sapien
gatgagatggcttggtgttcattaa

SEQ ID NO: 966337 - DNA, 25 bp, Homo sapien
ggagaggggtcttacctccagatga

SEQ ID NO: 966338 - DNA, 25 bp, Homo sapien
cctgttaatgaccataggccagaaa

SEQ ID NO: 966339 - DNA, 25 bp, Homo sapien
agggtcttgcgtcggctgcactcag

SEQ ID NO: 966340 - DNA, 25 bp, Homo sapien
ggtcttacctccagatgacagtttt

SEQ ID NO: 966341 - DNA, 25 bp, Homo sapien
atttcagtgcctataaagatctctg

SEQ ID NO: 966342 - DNA, 25 bp, Homo sapien
gacatttgtacagcgaacagccttg

SEQ ID NO: 966343 - DNA, 25 bp, Homo sapien
gtctatagatatgtgctcccaggcc

SEQ ID NO: 966344 - DNA, 25 bp, Homo sapien
gaccccgagcagctgtgtctataga

SEQ ID NO: 966345 - DNA, 25 bp, Homo sapien
gcatactggcagacttacatggaag

SEQ ID NO: 966346 - DNA, 25 bp, Homo sapien
gcaatgagccataggtcccagacag

SEQ ID NO: 966347 - DNA, 25 bp, Homo sapien
tatcaatactctctcaagatggtgg

SEQ ID NO: 966348 - DNA, 25 bp, Homo sapien
tagaatccatgatccaatggctggc

SEQ ID NO: 966349 - DNA, 25 bp, Homo sapien
ttctgttgttgttatcaaaatcacc

SEQ ID NO: 966350 - DNA, 25 bp, Homo sapien
gttttctgttgttgttatcaaaatc

SEQ ID NO: 966351 - DNA, 25 bp, Homo sapien
catgctcccttttgaagttttctgt

SEQ ID NO: 966352 - DNA, 25 bp, Homo sapien
tcatgctcccttttgaagttttctg

SEQ ID NO: 966353 - DNA, 25 bp, Homo sapien
ggcactgtgctacagcagtgaacca

SEQ ID NO: 966354 - DNA, 25 bp, Homo sapien
tagtaggtgcctattatgagccagc

SEQ ID NO: 966355 - DNA, 25 bp, Homo sapien
tctgaaccagaaggcatcgcgagtg

SEQ ID NO: 966356 - DNA, 25 bp, Homo sapien
ggatctagctaggacaaaaggcctt

SEQ ID NO: 966357 - DNA, 25 bp, Homo sapien
ttcaaggttgaactgactaatgcct

SEQ ID NO: 966358 - DNA, 25 bp, Homo sapien
cacttgtccttaagtcgaaatccta

SEQ ID NO: 966359 - DNA, 25 bp, Homo sapien
gaattctttcttgctagatatcact

SEQ ID NO: 966360 - DNA, 25 bp, Homo sapien
agtcgaaatcctatcttttcttcaa

SEQ ID NO: 966361 - DNA, 25 bp, Homo sapien
tagtagtatttattatcatcattgc

SEQ ID NO: 966362 - DNA, 25 bp, Homo sapien
gtagtatttattatcatcattgcaa

SEQ ID NO: 966363 - DNA, 25 bp, Homo sapien
agtagtatttattatcatcattgca

SEQ ID NO: 966364 - DNA, 25 bp, Homo sapien
ttagtagtatttattatcatcattg

SEQ ID NO: 966365 - DNA, 25 bp, Homo sapien
actgtcaaaactgtgtccatgatga

SEQ ID NO: 966366 - DNA, 25 bp, Homo sapien
agaattactgtcaaaactgtgtcca

SEQ ID NO: 966367 - DNA, 25 bp, Homo sapien
aattactgtcaaaactgtgtccatg

SEQ ID NO: 966368 - DNA, 25 bp, Homo sapien
gatgtgaccacgggggactttgaca

SEQ ID NO: 966369 - DNA, 25 bp, Homo sapien
atagatactgttaatctgttgactt

SEQ ID NO: 966370 - DNA, 25 bp, Homo sapien
gatactgttaatctgttgacttctg

SEQ ID NO: 966371 - DNA, 25 bp, Homo sapien
tagatactgttaatctgttgacttc

SEQ ID NO: 966372 - DNA, 25 bp, Homo sapien
atactgttaatctgttgacttctgt

SEQ ID NO: 966373 - DNA, 25 bp, Homo sapien
agctatcttgtatagtaagaagttt

SEQ ID NO: 966374 - DNA, 25 bp, Homo sapien
ctaagctatcttgtatagtaagaag

SEQ ID NO: 966375 - DNA, 25 bp, Homo sapien
taagctatcttgtatagtaagaagt

SEQ ID NO: 966376 - DNA, 25 bp, Homo sapien
tatcttgtatagtaagaagtttaca

SEQ ID NO: 966377 - DNA, 25 bp, Homo sapien
tttcctacactacttccttcctcca

SEQ ID NO: 966378 - DNA, 25 bp, Homo sapien
ttcctacactacttccttcctccat

SEQ ID NO: 966379 - DNA, 25 bp, Homo sapien
cacctggccccagaaataggatttc

SEQ ID NO: 966380 - DNA, 25 bp, Homo sapien
actgcacctggccccagaaatagga

SEQ ID NO: 966381 - DNA, 25 bp, Homo sapien
tgcacctggccccagaaataggatt

SEQ ID NO: 966382 - DNA, 25 bp, Homo sapien
cactgcacctggccccagaaatagg

SEQ ID NO: 966383 - DNA, 25 bp, Homo sapien
gcaatgcgggtatgctttcaagcac

SEQ ID NO: 966384 - DNA, 25 bp, Homo sapien
gagactctacttgttttcaggatca

SEQ ID NO: 966385 - DNA, 25 bp, Homo sapien
ttatactgagtctatgccaaccaag

SEQ ID NO: 966386 - DNA, 25 bp, Homo sapien
tcaagcaccctaaagttgacaagtg

SEQ ID NO: 966387 - DNA, 25 bp, Homo sapien
ctaaagtctggatgtaatgtttttc

SEQ ID NO: 966388 - DNA, 25 bp, Homo sapien
gatgtgtaacaagataaaacctggg

SEQ ID NO: 966389 - DNA, 25 bp, Homo sapien
cagattgattgtcaagaccttcatt

SEQ ID NO: 966390 - DNA, 25 bp, Homo sapien
aagtggtggactctgattgattttc

SEQ ID NO: 966391 - DNA, 25 bp, Homo sapien
ctctggaggttccatttcagcgcta

SEQ ID NO: 966392 - DNA, 25 bp, Homo sapien
cagcgctacctttgccaacggagtc

SEQ ID NO: 966393 - DNA, 25 bp, Homo sapien
ggttccatttcagcgctacctttgc

SEQ ID NO: 966394 - DNA, 25 bp, Homo sapien
catttcagcgctacctttgccaacg

SEQ ID NO: 966395 - DNA, 25 bp, Homo sapien
aagaatctgcaaagctaaataacta

SEQ ID NO: 966396 - DNA, 25 bp, Homo sapien
tctgcaaagctaaataactatccat

SEQ ID NO: 966397 - DNA, 25 bp, Homo sapien
aatctgcaaagctaaataactatcc

SEQ ID NO: 966398 - DNA, 25 bp, Homo sapien
gaatctgcaaagctaaataactatc

SEQ ID NO: 966399 - DNA, 25 bp, Homo sapien
gcctgtgggctctaactttttagaa

SEQ ID NO: 966400 - DNA, 25 bp, Homo sapien
tattccaggctgtataggctgttgg

SEQ ID NO: 966401 - DNA, 25 bp, Homo sapien
gaatatcctactcacacaacagaga

SEQ ID NO: 966402 - DNA, 25 bp, Homo sapien
ttaatccatggataatgcctgtggg

SEQ ID NO: 966403 - DNA, 25 bp, Homo sapien
tgatggcagtattatggctattcag

SEQ ID NO: 966404 - DNA, 25 bp, Homo sapien
catcccatattcagggatattctgt

SEQ ID NO: 966405 - DNA, 25 bp, Homo sapien
ctgttgatggcagtattatggctat

SEQ ID NO: 966406 - DNA, 25 bp, Homo sapien
tattcagggatattctgttgatggc

SEQ ID NO: 966407 - DNA, 25 bp, Homo sapien
aagggtttctccagcaatgctggca

SEQ ID NO: 966408 - DNA, 25 bp, Homo sapien
tctcctccaagggtttctccagcaa

SEQ ID NO: 966409 - DNA, 25 bp, Homo sapien
tccaagggtttctccagcaatgctg

SEQ ID NO: 966410 - DNA, 25 bp, Homo sapien
agtttcacgctgtcccaactccaga

SEQ ID NO: 966411 - DNA, 25 bp, Homo sapien
cgactttgagatttgtgatctagaa

SEQ ID NO: 966412 - DNA, 25 bp, Homo sapien
gaagacgactttgagatttgtgatc

SEQ ID NO: 966413 - DNA, 25 bp, Homo sapien
gacgactttgagatttgtgatctag

SEQ ID NO: 966414 - DNA, 25 bp, Homo sapien
aagacgactttgagatttgtgatct

SEQ ID NO: 966415 - DNA, 25 bp, Homo sapien
tcaattcgcagactttacacatggg

SEQ ID NO: 966416 - DNA, 25 bp, Homo sapien
tacatgatagaggtgtaccaaaggg

SEQ ID NO: 966417 - DNA, 25 bp, Homo sapien
gacagatagacccatatgaccctgg

SEQ ID NO: 966418 - DNA, 25 bp, Homo sapien
gaggcagaccttttacatcatccaa

SEQ ID NO: 966419 - DNA, 25 bp, Homo sapien
gatcaagcattgcagtttcacattg

SEQ ID NO: 966420 - DNA, 25 bp, Homo sapien
ttcacattgttgactgttcagctag

SEQ ID NO: 966421 - DNA, 25 bp, Homo sapien
tataaaatggatcccttggtattcc

SEQ ID NO: 966422 - DNA, 25 bp, Homo sapien
tcagctagtgaccaataatgatcca

SEQ ID NO: 966423 - DNA, 25 bp, Homo sapien
tagtcaaagcattttggctaccaca

SEQ ID NO: 966424 - DNA, 25 bp, Homo sapien
gaaagtagttttaatctcataggcc

SEQ ID NO: 966425 - DNA, 25 bp, Homo sapien
taaatacgacattactaaaggctgc

SEQ ID NO: 966426 - DNA, 25 bp, Homo sapien
taccacattgtataggcctggctac

SEQ ID NO: 966427 - DNA, 25 bp, Homo sapien
tcatatccttttcagttttctccca

SEQ ID NO: 966428 - DNA, 25 bp, Homo sapien
catatccttttcagttttctcccat

SEQ ID NO: 966429 - DNA, 25 bp, Homo sapien
tatccttttcagttttctcccatct

SEQ ID NO: 966430 - DNA, 25 bp, Homo sapien
atatccttttcagttttctcccatc

SEQ ID NO: 966431 - DNA, 25 bp, Homo sapien
tctatattccttacaacctgaaagg

SEQ ID NO: 966432 - DNA, 25 bp, Homo sapien
ctccaaaactttggccctcatggac

SEQ ID NO: 966433 - DNA, 25 bp, Homo sapien
tatcctatacttcacaattaaagaa

SEQ ID NO: 966434 - DNA, 25 bp, Homo sapien
gctcactaaagatgtaccagctcat

SEQ ID NO: 966435 - DNA, 25 bp, Homo sapien
ttcaagagcaatcactctcttaatg

SEQ ID NO: 966436 - DNA, 25 bp, Homo sapien
caagagcaatcactctcttaatgat

SEQ ID NO: 966437 - DNA, 25 bp, Homo sapien
tccttcaagagcaatcactctctta

SEQ ID NO: 966438 - DNA, 25 bp, Homo sapien
ccttcaagagcaatcactctcttaa

SEQ ID NO: 966439 - DNA, 25 bp, Homo sapien
cactctagaagtctggtctgtcctg

SEQ ID NO: 966440 - DNA, 25 bp, Homo sapien
ttcatggatcactctagaagtctgg

SEQ ID NO: 966441 - DNA, 25 bp, Homo sapien
catctctttcatggatcactctaga

SEQ ID NO: 966442 - DNA, 25 bp, Homo sapien
ccaacatctctttcatggatcactc

SEQ ID NO: 966443 - DNA, 25 bp, Homo sapien
agcattgtaaaggtttggtcaactt

SEQ ID NO: 966444 - DNA, 25 bp, Homo sapien
atagactatatttaagccctctaat

SEQ ID NO: 966445 - DNA, 25 bp, Homo sapien
acaagaaaagcattgtaaaggtttg

SEQ ID NO: 966446 - DNA, 25 bp, Homo sapien
gaaaagcattgtaaaggtttggtca

SEQ ID NO: 966447 - DNA, 25 bp, Homo sapien
aacacagcttactcgccagtttgcc

SEQ ID NO: 966448 - DNA, 25 bp, Homo sapien
tgtagccacctggagaatgttattg

SEQ ID NO: 966449 - DNA, 25 bp, Homo sapien
gatattgtagggtatgagatgccaa

SEQ ID NO: 966450 - DNA, 25 bp, Homo sapien
acagcagtcagcttgtgcccaacac

SEQ ID NO: 966451 - DNA, 25 bp, Homo sapien
cttgctttttccagcacaatgccca

SEQ ID NO: 966452 - DNA, 25 bp, Homo sapien
ctgccatctgtttgccttgcttttt

SEQ ID NO: 966453 - DNA, 25 bp, Homo sapien
catctgtttgccttgctttttccag

SEQ ID NO: 966454 - DNA, 25 bp, Homo sapien
ttgctttttccagcacaatgcccat

SEQ ID NO: 966455 - DNA, 25 bp, Homo sapien
caaaagctagaccctgctgcgtcat

SEQ ID NO: 966456 - DNA, 25 bp, Homo sapien
ccaaaagctagaccctgctgcgtca

SEQ ID NO: 966457 - DNA, 25 bp, Homo sapien
tttcttgacccactctctggtattc

SEQ ID NO: 966458 - DNA, 25 bp, Homo sapien
ccttttcttgacccactctctggta

SEQ ID NO: 966459 - DNA, 25 bp, Homo sapien
tacccttttcttgacccactctctg

SEQ ID NO: 966460 - DNA, 25 bp, Homo sapien
atacccttttcttgacccactctct

SEQ ID NO: 966461 - DNA, 25 bp, Homo sapien
tgctcatgtactgcagggacaccaa

SEQ ID NO: 966462 - DNA, 25 bp, Homo sapien
caaagatagatgctcatgtactgca

SEQ ID NO: 966463 - DNA, 25 bp, Homo sapien
cagggacaccaagctggtcgctgtc

SEQ ID NO: 966464 - DNA, 25 bp, Homo sapien
tgcagggacaccaagctggtcgctg

SEQ ID NO: 966465 - DNA, 25 bp, Homo sapien
aaaaagtgtgcattaagtggaccca

SEQ ID NO: 966466 - DNA, 25 bp, Homo sapien
gaaaaagtgtgcattaagtggaccc

SEQ ID NO: 966467 - DNA, 25 bp, Homo sapien
catctgtggtatccatgcgccttgg

SEQ ID NO: 966468 - DNA, 25 bp, Homo sapien
cagaactgggtcagttgaaagcaca

SEQ ID NO: 966469 - DNA, 25 bp, Homo sapien
ggcattcaataagcactcactggat

SEQ ID NO: 966470 - DNA, 25 bp, Homo sapien
tgtccactgggagcaatacagtaaa

SEQ ID NO: 966471 - DNA, 25 bp, Homo sapien
agaaggcagagctctcatagcttgg

SEQ ID NO: 966472 - DNA, 25 bp, Homo sapien
aaggcagagctctcatagcttggct

SEQ ID NO: 966473 - DNA, 25 bp, Homo sapien
ctggcacactgatgcaggaagcctg

SEQ ID NO: 966474 - DNA, 25 bp, Homo sapien
ccttacttcctctttggaagcctgt

SEQ ID NO: 966475 - DNA, 25 bp, Homo sapien
tacatcaagagaccacagagaatac

SEQ ID NO: 966476 - DNA, 25 bp, Homo sapien
catacatcaagagaccacagagaat

SEQ ID NO: 966477 - DNA, 25 bp, Homo sapien
catacatacatcaagagaccacaga

SEQ ID NO: 966478 - DNA, 25 bp, Homo sapien
tacatacatcaagagaccacagaga

SEQ ID NO: 966479 - DNA, 25 bp, Homo sapien
tgaactcaactgatccaaccgcctt

SEQ ID NO: 966480 - DNA, 25 bp, Homo sapien
catgcacaaccatgcactgctaatt

SEQ ID NO: 966481 - DNA, 25 bp, Homo sapien
aggcatgcacaaccatgcactgcta

SEQ ID NO: 966482 - DNA, 25 bp, Homo sapien
ctcctgaactcaactgatccaaccg

SEQ ID NO: 966483 - DNA, 25 bp, Homo sapien
agcagcagtgtcatagaacagacag

SEQ ID NO: 966484 - DNA, 25 bp, Homo sapien
ctaagcagcagtgtcatagaacaga

SEQ ID NO: 966485 - DNA, 25 bp, Homo sapien
tctgaagcgattggctcctctctgg

SEQ ID NO: 966486 - DNA, 25 bp, Homo sapien
tattaatgaccgctgagcaggcagc

SEQ ID NO: 966487 - DNA, 25 bp, Homo sapien
cgagtgctacatcttggctgtctga

SEQ ID NO: 966488 - DNA, 25 bp, Homo sapien
gactggagcagctgcgagtgctaca

SEQ ID NO: 966489 - DNA, 25 bp, Homo sapien
gtgtgacaactgatcgggtgaacga

SEQ ID NO: 966490 - DNA, 25 bp, Homo sapien
gtcagtgtgacaactgatcgggtga

SEQ ID NO: 966491 - DNA, 25 bp, Homo sapien
acaactgatcgggtgaacgatgcac

SEQ ID NO: 966492 - DNA, 25 bp, Homo sapien
aactgatcgggtgaacgatgcacca

SEQ ID NO: 966493 - DNA, 25 bp, Homo sapien
tgttttgaaatcaacccaccaaatg

SEQ ID NO: 966494 - DNA, 25 bp, Homo sapien
cgggtgatggggtgcaattttcctt

SEQ ID NO: 966495 - DNA, 25 bp, Homo sapien
gcagatcacacattattctctgttt

SEQ ID NO: 966496 - DNA, 25 bp, Homo sapien
aaaagcagatcacacattattctct

SEQ ID NO: 966497 - DNA, 25 bp, Homo sapien
tcagaaagctctataaccggagttt

SEQ ID NO: 966498 - DNA, 25 bp, Homo sapien
tattacttaattagcagcccctgaa

SEQ ID NO: 966499 - DNA, 25 bp, Homo sapien
gcctcagtaaggatgctcctctaaa

SEQ ID NO: 966500 - DNA, 25 bp, Homo sapien
gaagaaacactagacatgtgtacag

SEQ ID NO: 966501 - DNA, 25 bp, Homo sapien
ccaaggtatgacggaggcacatctc

SEQ ID NO: 966502 - DNA, 25 bp, Homo sapien
ccctcctgagattgataaaagcatt

SEQ ID NO: 966503 - DNA, 25 bp, Homo sapien
ggcagcatacttgtgcctgttcata

SEQ ID NO: 966504 - DNA, 25 bp, Homo sapien
tcctcccatgtataaggccctagag

SEQ ID NO: 966505 - DNA, 25 bp, Homo sapien
gccctagagagtagtgcttgcaaga

SEQ ID NO: 966506 - DNA, 25 bp, Homo sapien
tcaacaatacctctgggatatggaa

SEQ ID NO: 966507 - DNA, 25 bp, Homo sapien
gaaagtgaggtatcctgtccccagt

SEQ ID NO: 966508 - DNA, 25 bp, Homo sapien
tgtccccagttacaaaatcatccag

SEQ ID NO: 966509 - DNA, 25 bp, Homo sapien
gatcaagtcttacaacaagggaata

SEQ ID NO: 966510 - DNA, 25 bp, Homo sapien
aatcactatcacacagaggctgacg

SEQ ID NO: 966511 - DNA, 25 bp, Homo sapien
ccatagagcatataccaacgaaggg

SEQ ID NO: 966512 - DNA, 25 bp, Homo sapien
ggcaggtgactacatctccggctaa

SEQ ID NO: 966513 - DNA, 25 bp, Homo sapien
taactaggtcgttgcttgggagaac

SEQ ID NO: 966514 - DNA, 25 bp, Homo sapien
gcatgctgatagacaggcctgcaca

SEQ ID NO: 966515 - DNA, 25 bp, Homo sapien
gagatattctgttgacgcatgcata

SEQ ID NO: 966516 - DNA, 25 bp, Homo sapien
tcctaaagtgacagtgcaacgcttg

SEQ ID NO: 966517 - DNA, 25 bp, Homo sapien
tcttacaatatgacaggcatgctga

SEQ ID NO: 966518 - DNA, 25 bp, Homo sapien
taatcttaaccaattctattttaga

SEQ ID NO: 966519 - DNA, 25 bp, Homo sapien
tgaatctaatctacatcccataggg

SEQ ID NO: 966520 - DNA, 25 bp, Homo sapien
catggtagcctgagatatttgtttc

SEQ ID NO: 966521 - DNA, 25 bp, Homo sapien
tcccatagggcagccctgcaagtta

SEQ ID NO: 966522 - DNA, 25 bp, Homo sapien
gaagcaaagccagctgtaaacggac

SEQ ID NO: 966523 - DNA, 25 bp, Homo sapien
gatgtggctaacagcatcatcaata

SEQ ID NO: 966524 - DNA, 25 bp, Homo sapien
taaccaaattcctgcactattttca

SEQ ID NO: 966525 - DNA, 25 bp, Homo sapien
tctacttgatcccaaatgatgtggc

SEQ ID NO: 966526 - DNA, 25 bp, Homo sapien
taaatgttggcttgtgtctattatc

SEQ ID NO: 966527 - DNA, 25 bp, Homo sapien
ttggcttgtgtctattatcagctgc

SEQ ID NO: 966528 - DNA, 25 bp, Homo sapien
aatgttggcttgtgtctattatcag

SEQ ID NO: 966529 - DNA, 25 bp, Homo sapien
cttgtgtctattatcagctgctctt

SEQ ID NO: 966530 - DNA, 25 bp, Homo sapien
tgcaaacatctctggtctactatag

SEQ ID NO: 966531 - DNA, 25 bp, Homo sapien
catcctctgtatcattgtgggttta

SEQ ID NO: 966532 - DNA, 25 bp, Homo sapien
gaacacacgtgctcaatcaatcata

SEQ ID NO: 966533 - DNA, 25 bp, Homo sapien
caatcatatttaaccaggagctaga

SEQ ID NO: 966534 - DNA, 25 bp, Homo sapien
aaaggcagtgccctcaattagatga

SEQ ID NO: 966535 - DNA, 25 bp, Homo sapien
agatgaacaactctcacggtcccaa

SEQ ID NO: 966536 - DNA, 25 bp, Homo sapien
caattagatgaacaactctcacggt

SEQ ID NO: 966537 - DNA, 25 bp, Homo sapien
ggcagtgccctcaattagatgaaca

SEQ ID NO: 966538 - DNA, 25 bp, Homo sapien
tgaggccaagatcacagatagagta

SEQ ID NO: 966539 - DNA, 25 bp, Homo sapien
tagttcctctaagtgcttcatgtgg

SEQ ID NO: 966540 - DNA, 25 bp, Homo sapien
gaatgttcaaagctattctatgagg

SEQ ID NO: 966541 - DNA, 25 bp, Homo sapien
ggttgggactatcattaaccatagg

SEQ ID NO: 966542 - DNA, 25 bp, Homo sapien
cagtgcagtagtttgtcttacaaca

SEQ ID NO: 966543 - DNA, 25 bp, Homo sapien
aactgggcctatcttttcatggtaa

SEQ ID NO: 966544 - DNA, 25 bp, Homo sapien
gggtaatcttaactttgcagccttc

SEQ ID NO: 966545 - DNA, 25 bp, Homo sapien
caaagcaaggccttatacctactaa

SEQ ID NO: 966546 - DNA, 25 bp, Homo sapien
tcattgcagtagtgtgtgtcgttac

SEQ ID NO: 966547 - DNA, 25 bp, Homo sapien
gggctggtaatgcaagccttgagaa

SEQ ID NO: 966548 - DNA, 25 bp, Homo sapien
gataataacattcaactctggctgc

SEQ ID NO: 966549 - DNA, 25 bp, Homo sapien
ccttgagaataccagagcagcaaca

SEQ ID NO: 966550 - DNA, 25 bp, Homo sapien
ctattgcagggagtgctgacaacaa

SEQ ID NO: 966551 - DNA, 25 bp, Homo sapien
tattgcagggagtgctgacaacaag

SEQ ID NO: 966552 - DNA, 25 bp, Homo sapien
ggagtgctgacaacaaggtagagct

SEQ ID NO: 966553 - DNA, 25 bp, Homo sapien
gacaacaaggtagagctctgggaaa

SEQ ID NO: 966554 - DNA, 25 bp, Homo sapien
cacttggcataatggcctgagggtc

SEQ ID NO: 966555 - DNA, 25 bp, Homo sapien
tacagtagcatatgtccgaactttc

SEQ ID NO: 966556 - DNA, 25 bp, Homo sapien
ggttgcttctgcattttggcgattc

SEQ ID NO: 966557 - DNA, 25 bp, Homo sapien
cctgagggtccatctatacagtagc

SEQ ID NO: 966558 - DNA, 25 bp, Homo sapien
agtaggatgaaattcacaggttctg

SEQ ID NO: 966559 - DNA, 25 bp, Homo sapien
tgtctccttcataaagatacctgtc

SEQ ID NO: 966560 - DNA, 25 bp, Homo sapien
catttgatttagagcccacctggat

SEQ ID NO: 966561 - DNA, 25 bp, Homo sapien
gatacctgtcatttgatttagagcc

SEQ ID NO: 966562 - DNA, 25 bp, Homo sapien
tctgctctgcgaaaaatgaccatac

SEQ ID NO: 966563 - DNA, 25 bp, Homo sapien
tggactgtttttatgggttccctgc

SEQ ID NO: 966564 - DNA, 25 bp, Homo sapien
caccataaagaagcagtctgctctg

SEQ ID NO: 966565 - DNA, 25 bp, Homo sapien
tttttatgggttccctgctgactcc

SEQ ID NO: 966566 - DNA, 25 bp, Homo sapien
ttatagtcaccctatcgtgctaggg

SEQ ID NO: 966567 - DNA, 25 bp, Homo sapien
ggtattcagctatctatcacctcaa

SEQ ID NO: 966568 - DNA, 25 bp, Homo sapien
tacattcatggagtacaatgttaca

SEQ ID NO: 966569 - DNA, 25 bp, Homo sapien
taatacattgctgctaattatagtc

SEQ ID NO: 966570 - DNA, 25 bp, Homo sapien
aaatcattgctaaaacaactttcta

SEQ ID NO: 966571 - DNA, 25 bp, Homo sapien
cactgaatcacttgtgcacacttgg

SEQ ID NO: 966572 - DNA, 25 bp, Homo sapien
gaagtgttgcagtcattggaagatt

SEQ ID NO: 966573 - DNA, 25 bp, Homo sapien
ttttaatcacctgaatcactgaatc

SEQ ID NO: 966574 - DNA, 25 bp, Homo sapien
aaatatctgtcgttcactgttctgt

SEQ ID NO: 966575 - DNA, 25 bp, Homo sapien
aatatctgtcgttcactgttctgtt

SEQ ID NO: 966576 - DNA, 25 bp, Homo sapien
taagaaaatcacaagcaaatatctg

SEQ ID NO: 966577 - DNA, 25 bp, Homo sapien
gtcaacatcaacccttctcataaat

SEQ ID NO: 966578 - DNA, 25 bp, Homo sapien
tgtcaacatcaacccttctcataaa

SEQ ID NO: 966579 - DNA, 25 bp, Homo sapien
tattacctatagcttctcaatgatc

SEQ ID NO: 966580 - DNA, 25 bp, Homo sapien
ttcattggatgaataccagtcctca

SEQ ID NO: 966581 - DNA, 25 bp, Homo sapien
ttctcaatgatcttccaggtatgaa

SEQ ID NO: 966582 - DNA, 25 bp, Homo sapien
tcagcacaacaaacacttgagtaga

SEQ ID NO: 966583 - DNA, 25 bp, Homo sapien
aagcaactagaaccattgttattaa

SEQ ID NO: 966584 - DNA, 25 bp, Homo sapien
cttttagtccatgaagcaactagaa

SEQ ID NO: 966585 - DNA, 25 bp, Homo sapien
acatgtatagatcttttagtccatg

SEQ ID NO: 966586 - DNA, 25 bp, Homo sapien
tttagtccatgaagcaactagaacc

SEQ ID NO: 966587 - DNA, 25 bp, Homo sapien
aaaaagcaactcctcgtctgttaag

SEQ ID NO: 966588 - DNA, 25 bp, Homo sapien
gaaaaccataaagtctgccctatta

SEQ ID NO: 966589 - DNA, 25 bp, Homo sapien
aacaatcatctgagcgttcggccag

SEQ ID NO: 966590 - DNA, 25 bp, Homo sapien
gctgctgactaatcacggtgatgga

SEQ ID NO: 966591 - DNA, 25 bp, Homo sapien
tacaggctgcgattaacaaagtgcc

SEQ ID NO: 966592 - DNA, 25 bp, Homo sapien
gtttcaagtcaattcatggtgctcc

SEQ ID NO: 966593 - DNA, 25 bp, Homo sapien
tccacggcttgtgacagtctctgtc

SEQ ID NO: 966594 - DNA, 25 bp, Homo sapien
tatagcttgccagtctaccgctcct

SEQ ID NO: 966595 - DNA, 25 bp, Homo sapien
tatacaaacaggtagagatctggaa

SEQ ID NO: 966596 - DNA, 25 bp, Homo sapien
gaacttgatagctatgtcagtcact

SEQ ID NO: 966597 - DNA, 25 bp, Homo sapien
tgtgaagtaggtttcaagaaaggga

SEQ ID NO: 966598 - DNA, 25 bp, Homo sapien
agtcactacattttcgaactgcatt

SEQ ID NO: 966599 - DNA, 25 bp, Homo sapien
gaattagattcatgatgctacttgt

SEQ ID NO: 966600 - DNA, 25 bp, Homo sapien
cacactatagaactgctgaatggac

SEQ ID NO: 966601 - DNA, 25 bp, Homo sapien
tcaagaccattacattggttaccct

SEQ ID NO: 966602 - DNA, 25 bp, Homo sapien
ggaagggacataggtttgatacaac

SEQ ID NO: 966603 - DNA, 25 bp, Homo sapien
ccatcccaatgtacactcagaaagg

SEQ ID NO: 966604 - DNA, 25 bp, Homo sapien
tgagacaaatcctgctgtgattagt

SEQ ID NO: 966605 - DNA, 25 bp, Homo sapien
caacaatgtttcaacgactgagaca

SEQ ID NO: 966606 - DNA, 25 bp, Homo sapien
cactgatgcaaatgtctcatgagag

SEQ ID NO: 966607 - DNA, 25 bp, Homo sapien
aaattacaatatgaactacaagggc

SEQ ID NO: 966608 - DNA, 25 bp, Homo sapien
catgagagctctagccttatgactt

SEQ ID NO: 966609 - DNA, 25 bp, Homo sapien
gagccaatttcctaactcctcagga

SEQ ID NO: 966610 - DNA, 25 bp, Homo sapien
catacatcaataagtgaagcccttc

SEQ ID NO: 966611 - DNA, 25 bp, Homo sapien
tcagttccattgaacgtcacaggac

SEQ ID NO: 966612 - DNA, 25 bp, Homo sapien
tcatttaattatgccctggcccaga

SEQ ID NO: 966613 - DNA, 25 bp, Homo sapien
aaaagccttctttcagaggttcaca

SEQ ID NO: 966614 - DNA, 25 bp, Homo sapien
tttagagtacacacggatgggaggc

SEQ ID NO: 966615 - DNA, 25 bp, Homo sapien
tatctccctggtaccaaaggaagag

SEQ ID NO: 966616 - DNA, 25 bp, Homo sapien
tgggcctgaaggttcgggtcagtaa

SEQ ID NO: 966617 - DNA, 25 bp, Homo sapien
tcagatattcttgatctctaggcct

SEQ ID NO: 966618 - DNA, 25 bp, Homo sapien
tgactcagatattcttgatctctag

SEQ ID NO: 966619 - DNA, 25 bp, Homo sapien
gatattcttgatctctaggcctcat

SEQ ID NO: 966620 - DNA, 25 bp, Homo sapien
aagaagattgaaatcctgtttaatg

SEQ ID NO: 966621 - DNA, 25 bp, Homo sapien
agattgaaatcctgtttaatgttgc

SEQ ID NO: 966622 - DNA, 25 bp, Homo sapien
gaagattgaaatcctgtttaatgtt

SEQ ID NO: 966623 - DNA, 25 bp, Homo sapien
aaagaagattgaaatcctgtttaat

SEQ ID NO: 966624 - DNA, 25 bp, Homo sapien
aatatatgatattaagaatgttcag

SEQ ID NO: 966625 - DNA, 25 bp, Homo sapien
aaaatatatgatattaagaatgttc

SEQ ID NO: 966626 - DNA, 25 bp, Homo sapien
atatatgatattaagaatgttcagc

SEQ ID NO: 966627 - DNA, 25 bp, Homo sapien
aaatatatgatattaagaatgttca

SEQ ID NO: 966628 - DNA, 25 bp, Homo sapien
tatcagatcacccacaaataggcac

SEQ ID NO: 966629 - DNA, 25 bp, Homo sapien
tatgatcatacccttctgcctgaag

SEQ ID NO: 966630 - DNA, 25 bp, Homo sapien
tttctaatataaacctgaggctggc

SEQ ID NO: 966631 - DNA, 25 bp, Homo sapien
gaggaggtcccaagtagatattcat

SEQ ID NO: 966632 - DNA, 25 bp, Homo sapien
aaattaatgtcttcctcctgaaaga

SEQ ID NO: 966633 - DNA, 25 bp, Homo sapien
atttctgtgcacttccttttaaact

SEQ ID NO: 966634 - DNA, 25 bp, Homo sapien
caattcttataaatgtcatatttct

SEQ ID NO: 966635 - DNA, 25 bp, Homo sapien
tcttatgaaaattaatgtcttcctc

SEQ ID NO: 966636 - DNA, 25 bp, Homo sapien
tacacactgtaagccaacaattctg

SEQ ID NO: 966637 - DNA, 25 bp, Homo sapien
tgaggttagctagatctgacatgga

SEQ ID NO: 966638 - DNA, 25 bp, Homo sapien
gataccacagatggactgcaaaggc

SEQ ID NO: 966639 - DNA, 25 bp, Homo sapien
taacctgcaatgaacccaactctgt

SEQ ID NO: 966640 - DNA, 25 bp, Homo sapien
gcttattggtatttagtgccagcac

SEQ ID NO: 966641 - DNA, 25 bp, Homo sapien
tattctgtagctaaaatttctcccc

SEQ ID NO: 966642 - DNA, 25 bp, Homo sapien
tgtagcaccatctcgcaaagtaaat

SEQ ID NO: 966643 - DNA, 25 bp, Homo sapien
cttacaatgtgaactcagcaacaga

SEQ ID NO: 966644 - DNA, 25 bp, Homo sapien
cattgatggccttggacagtggctc

SEQ ID NO: 966645 - DNA, 25 bp, Homo sapien
caggtctgccagtgactaatttttt

SEQ ID NO: 966646 - DNA, 25 bp, Homo sapien
tctttcagtacaggtctgccagtga

SEQ ID NO: 966647 - DNA, 25 bp, Homo sapien
ttttcactaggtataaaattccaca

SEQ ID NO: 966648 - DNA, 25 bp, Homo sapien
aatactgaggcacttgaaattgtcc

SEQ ID NO: 966649 - DNA, 25 bp, Homo sapien
ttgtagactaaactgtcacagatcc

SEQ ID NO: 966650 - DNA, 25 bp, Homo sapien
tttaaattagccattattctctctg

SEQ ID NO: 966651 - DNA, 25 bp, Homo sapien
tgtcctacagttcactgattgtctc

SEQ ID NO: 966652 - DNA, 25 bp, Homo sapien
gttttactgccaactctgatcaatt

SEQ ID NO: 966653 - DNA, 25 bp, Homo sapien
tgcctgtgttttactgccaactctg

SEQ ID NO: 966654 - DNA, 25 bp, Homo sapien
tactgccaactctgatcaatttggc

SEQ ID NO: 966655 - DNA, 25 bp, Homo sapien
ctgtgttttactgccaactctgatc

SEQ ID NO: 966656 - DNA, 25 bp, Homo sapien
tcttctaagaatgactgcaaatatc

SEQ ID NO: 966657 - DNA, 25 bp, Homo sapien
tcaaactgtgcaccaatccttggag

SEQ ID NO: 966658 - DNA, 25 bp, Homo sapien
tattttaaagcatatcttcccacag

SEQ ID NO: 966659 - DNA, 25 bp, Homo sapien
tcacaagcacaacattgacagctgc

SEQ ID NO: 966660 - DNA, 25 bp, Homo sapien
ttccagactctgttgaagaagcagt

SEQ ID NO: 966661 - DNA, 25 bp, Homo sapien
tggataaagggctaaatctcccaga

SEQ ID NO: 966662 - DNA, 25 bp, Homo sapien
cagggatactagatatggaaacagc

SEQ ID NO: 966663 - DNA, 25 bp, Homo sapien
cagaagtgaagttttggtacccaca

SEQ ID NO: 966664 - DNA, 25 bp, Homo sapien
tgcatcatcagaatacgcatggtct

SEQ ID NO: 966665 - DNA, 25 bp, Homo sapien
cagaatacgcatggtctcaaacata

SEQ ID NO: 966666 - DNA, 25 bp, Homo sapien
atacaaatgcatcatcagaatacgc

SEQ ID NO: 966667 - DNA, 25 bp, Homo sapien
taatacaaatgcatcatcagaatac

SEQ ID NO: 966668 - DNA, 25 bp, Homo sapien
aacaggcttcagctatgtggtggca

SEQ ID NO: 966669 - DNA, 25 bp, Homo sapien
ggagtaggatattaggatgcaacca

SEQ ID NO: 966670 - DNA, 25 bp, Homo sapien
taacattgtgtgaagtctcacaggg

SEQ ID NO: 966671 - DNA, 25 bp, Homo sapien
aagacaaacttcacctagctcatgg

SEQ ID NO: 966672 - DNA, 25 bp, Homo sapien
tgccctagctggtctaaaacccctg

SEQ ID NO: 966673 - DNA, 25 bp, Homo sapien
ccaccagcctttccaatagctggga

SEQ ID NO: 966674 - DNA, 25 bp, Homo sapien
tgtagaaatgcaacctcaccctgtt

SEQ ID NO: 966675 - DNA, 25 bp, Homo sapien
gcatgaacggggctcactaaagcct

SEQ ID NO: 966676 - DNA, 25 bp, Homo sapien
tatgtgtttgctatatactatggac

SEQ ID NO: 966677 - DNA, 25 bp, Homo sapien
taagccaaatcaagtatatatcatc

SEQ ID NO: 966678 - DNA, 25 bp, Homo sapien
gactctccagaaacagtgccacttt

SEQ ID NO: 966679 - DNA, 25 bp, Homo sapien
tattatattgtctcatcatgctaag

SEQ ID NO: 966680 - DNA, 25 bp, Homo sapien
tgtgctaggtagtggacaaataaac

SEQ ID NO: 966681 - DNA, 25 bp, Homo sapien
agtatgaggatctccactgttctgg

SEQ ID NO: 966682 - DNA, 25 bp, Homo sapien
gaagcgtgacagatcaacttctggc

SEQ ID NO: 966683 - DNA, 25 bp, Homo sapien
tctggtctcccgtgaaactggttaa

SEQ ID NO: 966684 - DNA, 25 bp, Homo sapien
caagcacatgtggaacactgctcca

SEQ ID NO: 966685 - DNA, 25 bp, Homo sapien
tgtggtaaatgcaagaatgggagct

SEQ ID NO: 966686 - DNA, 25 bp, Homo sapien
gagttgacactaattctacctagga

SEQ ID NO: 966687 - DNA, 25 bp, Homo sapien
catggcctggccaataactcacttt

SEQ ID NO: 966688 - DNA, 25 bp, Homo sapien
cctagtagtgaagttaacactctct

SEQ ID NO: 966689 - DNA, 25 bp, Homo sapien
tattatctggtagtgtcttctcccc

SEQ ID NO: 966690 - DNA, 25 bp, Homo sapien
tctccagcctcagtatacctactgt

SEQ ID NO: 966691 - DNA, 25 bp, Homo sapien
cctcacggaaattttgatgttgaca

SEQ ID NO: 966692 - DNA, 25 bp, Homo sapien
gagtgatacgtgctctgcataatac

SEQ ID NO: 966693 - DNA, 25 bp, Homo sapien
catttactagtttcaggactgtggc

SEQ ID NO: 966694 - DNA, 25 bp, Homo sapien
tttcacagcacaatggtaaaggcca

SEQ ID NO: 966695 - DNA, 25 bp, Homo sapien
caagagagctcattcctctatagaa

SEQ ID NO: 966696 - DNA, 25 bp, Homo sapien
gagatcccatgtactctctagccac

SEQ ID NO: 966697 - DNA, 25 bp, Homo sapien
tctagccacattgtcatagtagtga

SEQ ID NO: 966698 - DNA, 25 bp, Homo sapien
gactccgggcaaccatttcataatt

SEQ ID NO: 966699 - DNA, 25 bp, Homo sapien
tatataaaggtattcacttgtgacc

SEQ ID NO: 966700 - DNA, 25 bp, Homo sapien
tcaatagccgtataccaagtgccag

SEQ ID NO: 966701 - DNA, 25 bp, Homo sapien
ggatccacgaacttcgccagattgg

SEQ ID NO: 966702 - DNA, 25 bp, Homo sapien
caagtgccagagacaagaatgactg

SEQ ID NO: 966703 - DNA, 25 bp, Homo sapien
gcagattttacatcgccctgacagt

SEQ ID NO: 966704 - DNA, 25 bp, Homo sapien
tgaagtcactatggccattacagac

SEQ ID NO: 966705 - DNA, 25 bp, Homo sapien
gaagaggttggttccacaataaagc

SEQ ID NO: 966706 - DNA, 25 bp, Homo sapien
gaggaaactggagttcaaggctctg

SEQ ID NO: 966707 - DNA, 25 bp, Homo sapien
ccatataagaaagctagtgaggctg

SEQ ID NO: 966708 - DNA, 25 bp, Homo sapien
ttcatggagaccaagagcagttcag

SEQ ID NO: 966709 - DNA, 25 bp, Homo sapien
catggagaccaagagcagttcagga

SEQ ID NO: 966710 - DNA, 25 bp, Homo sapien
gccttcatggagaccaagagcagtt

SEQ ID NO: 966711 - DNA, 25 bp, Homo sapien
ccttcatggagaccaagagcagttc

SEQ ID NO: 966712 - DNA, 25 bp, Homo sapien
cacaaacgagagcagagaggagtta

SEQ ID NO: 966713 - DNA, 25 bp, Homo sapien
acaaacgagagcagagaggagttaa

SEQ ID NO: 966714 - DNA, 25 bp, Homo sapien
acagaaactagtcttgataaggtaa

SEQ ID NO: 966715 - DNA, 25 bp, Homo sapien
taaaccaaataagtgaaaatagtgc

SEQ ID NO: 966716 - DNA, 25 bp, Homo sapien
gaataaggtaaagtggcttaacaga

SEQ ID NO: 966717 - DNA, 25 bp, Homo sapien
tatttatactgaataaggtaaagtg

SEQ ID NO: 966718 - DNA, 25 bp, Homo sapien
ggttcatttagcaccagccatgaag

SEQ ID NO: 966719 - DNA, 25 bp, Homo sapien
ttgtcccaggagtcaataactacct

SEQ ID NO: 966720 - DNA, 25 bp, Homo sapien
tacactacaagtgagctcctctgga

SEQ ID NO: 966721 - DNA, 25 bp, Homo sapien
gtttaaaaggtcactggatgtcaga

SEQ ID NO: 966722 - DNA, 25 bp, Homo sapien
taaagacaggaaggtcacatgaggg

SEQ ID NO: 966723 - DNA, 25 bp, Homo sapien
caaaagtcatctgggtaaagacagg

SEQ ID NO: 966724 - DNA, 25 bp, Homo sapien
tacatggaccaatactctggaaaag

SEQ ID NO: 966725 - DNA, 25 bp, Homo sapien
gcagcaatgaattcagcagagcaat

SEQ ID NO: 966726 - DNA, 25 bp, Homo sapien
cagctgaatctgatttggttacaac

SEQ ID NO: 966727 - DNA, 25 bp, Homo sapien
caacagaatggcacttgacagagaa

SEQ ID NO: 966728 - DNA, 25 bp, Homo sapien
tcatggacacaaacatcagaagcat

SEQ ID NO: 966729 - DNA, 25 bp, Homo sapien
gcttcccattaacacaacaaatata

SEQ ID NO: 966730 - DNA, 25 bp, Homo sapien
tactgtgaggtcctttaaagcactg

SEQ ID NO: 966731 - DNA, 25 bp, Homo sapien
ttagataacgcttgccatcccctgg

SEQ ID NO: 966732 - DNA, 25 bp, Homo sapien
cacagcagccgcatggtatcggtga

SEQ ID NO: 966733 - DNA, 25 bp, Homo sapien
ggcattggacctgtagcactctgat

SEQ ID NO: 966734 - DNA, 25 bp, Homo sapien
tacataagttatgaatagaaaacac

SEQ ID NO: 966735 - DNA, 25 bp, Homo sapien
tagtcagctatatatgttacataag

SEQ ID NO: 966736 - DNA, 25 bp, Homo sapien
gctgcctacatagggtcctctgaca

SEQ ID NO: 966737 - DNA, 25 bp, Homo sapien
gatagacaccataaacatagtcagc

SEQ ID NO: 966738 - DNA, 25 bp, Homo sapien
tcctggagaagtgtacaatgagaag

SEQ ID NO: 966739 - DNA, 25 bp, Homo sapien
gtaacatgagtcaagagcaattctg

SEQ ID NO: 966740 - DNA, 25 bp, Homo sapien
gctaatcctctgctatcatgatgca

SEQ ID NO: 966741 - DNA, 25 bp, Homo sapien
gaaactgttcactaagtagatgaga

SEQ ID NO: 966742 - DNA, 25 bp, Homo sapien
caacttacagggcaaataaacctag

SEQ ID NO: 966743 - DNA, 25 bp, Homo sapien
cctggagcaccttgctatgccaaaa

SEQ ID NO: 966744 - DNA, 25 bp, Homo sapien
tcagggctagatagagaaggtacac

SEQ ID NO: 966745 - DNA, 25 bp, Homo sapien
tacataaccaaagctgaaggatgaa

SEQ ID NO: 966746 - DNA, 25 bp, Homo sapien
aatgatgagcatggtacaggatggc

SEQ ID NO: 966747 - DNA, 25 bp, Homo sapien
gcaaggatgataagaaacactagtt

SEQ ID NO: 966748 - DNA, 25 bp, Homo sapien
aattacggaggattaagagacttgc

SEQ ID NO: 966749 - DNA, 25 bp, Homo sapien
cactggaggaaggaacctataaaat

SEQ ID NO: 966750 - DNA, 25 bp, Homo sapien
ggaagtcggaaatgcttaccaactc

SEQ ID NO: 966751 - DNA, 25 bp, Homo sapien
tgtctgggaagcaattggatgtcat

SEQ ID NO: 966752 - DNA, 25 bp, Homo sapien
tgataaggtcaagggtccaagacag

SEQ ID NO: 966753 - DNA, 25 bp, Homo sapien
cagaaatgcctacgctgaagctaga

SEQ ID NO: 966754 - DNA, 25 bp, Homo sapien
tgacaaactaaaatgtgcactaagt

SEQ ID NO: 966755 - DNA, 25 bp, Homo sapien
tatttccctgttggcttctatacat

SEQ ID NO: 966756 - DNA, 25 bp, Homo sapien
cacttttatatgttcaagcccatga

SEQ ID NO: 966757 - DNA, 25 bp, Homo sapien
taaataatgcatcagtccagaatcc

SEQ ID NO: 966758 - DNA, 25 bp, Homo sapien
tcttatggtccattagctcctgctg

SEQ ID NO: 966759 - DNA, 25 bp, Homo sapien
cttctcatgcggtgtgacagaaaaa

SEQ ID NO: 966760 - DNA, 25 bp, Homo sapien
tctcatgcggtgtgacagaaaaagt

SEQ ID NO: 966761 - DNA, 25 bp, Homo sapien
caacaaatttccctcttatggtcca

SEQ ID NO: 966762 - DNA, 25 bp, Homo sapien
gatgacattgagcactgcccgcctt

SEQ ID NO: 966763 - DNA, 25 bp, Homo sapien
ccttgacctcagatatgcacttctt

SEQ ID NO: 966764 - DNA, 25 bp, Homo sapien
actctccagatgggattcctgccct

SEQ ID NO: 966765 - DNA, 25 bp, Homo sapien
tgcacttcttcaatcttaggctaac

SEQ ID NO: 966766 - DNA, 25 bp, Homo sapien
cattactggtgcattaaaagtacca

SEQ ID NO: 966767 - DNA, 25 bp, Homo sapien
ggtgcattaaaagtaccacaaatga

SEQ ID NO: 966768 - DNA, 25 bp, Homo sapien
gaggtaaatctagtgaggtctggaa

SEQ ID NO: 966769 - DNA, 25 bp, Homo sapien
gaagggtccagagcatagtagcttt

SEQ ID NO: 966770 - DNA, 25 bp, Homo sapien
tgatgacatcaacatcatcaacatc

SEQ ID NO: 966771 - DNA, 25 bp, Homo sapien
tatacaatgctagtctgtagtttgt

SEQ ID NO: 966772 - DNA, 25 bp, Homo sapien
tacaatactatcataacaatataca

SEQ ID NO: 966773 - DNA, 25 bp, Homo sapien
caaacccgtacgttttgcatatgta

SEQ ID NO: 966774 - DNA, 25 bp, Homo sapien
aacaaacccgtacgttttgcatatg

SEQ ID NO: 966775 - DNA, 25 bp, Homo sapien
gacaatattataggagcactttcaa

SEQ ID NO: 966776 - DNA, 25 bp, Homo sapien
tcgaaaacatgatttttgaatggct

SEQ ID NO: 966777 - DNA, 25 bp, Homo sapien
tactggaattatagtatacatcatt

SEQ ID NO: 966778 - DNA, 25 bp, Homo sapien
aatattcatagtcttcgaaaacatg

SEQ ID NO: 966779 - DNA, 25 bp, Homo sapien
gatcagccatctatatctgtagtct

SEQ ID NO: 966780 - DNA, 25 bp, Homo sapien
ccttaaggcttttctatggatcagc

SEQ ID NO: 966781 - DNA, 25 bp, Homo sapien
tatctgtagtctgaacaacagtgca

SEQ ID NO: 966782 - DNA, 25 bp, Homo sapien
gccatctatatctgtagtctgaaca

SEQ ID NO: 966783 - DNA, 25 bp, Homo sapien
tgcttaggacaaacctgtctcccgt

SEQ ID NO: 966784 - DNA, 25 bp, Homo sapien
tcctgtagctctgtttctctgatta

SEQ ID NO: 966785 - DNA, 25 bp, Homo sapien
ttcttacctaagaggatttggagct

SEQ ID NO: 966786 - DNA, 25 bp, Homo sapien
cctgactgttacacttttactaaag

SEQ ID NO: 966787 - DNA, 25 bp, Homo sapien
tctaagttgtgactctgtgagcact

SEQ ID NO: 966788 - DNA, 25 bp, Homo sapien
gcacctgcaccacaataagaatgta

SEQ ID NO: 966789 - DNA, 25 bp, Homo sapien
ttcagcctgaattgaaaagtgcttc

SEQ ID NO: 966790 - DNA, 25 bp, Homo sapien
tcagtttgagactatgaaaacattc

SEQ ID NO: 966791 - DNA, 25 bp, Homo sapien
aaatcaaggaggcaatcccacttcc

SEQ ID NO: 966792 - DNA, 25 bp, Homo sapien
taagatctagtatctagagaaccct

SEQ ID NO: 966793 - DNA, 25 bp, Homo sapien
taacgacctagccaagaaccaaatc

SEQ ID NO: 966794 - DNA, 25 bp, Homo sapien
aacacacctgggaatatatttaaca

SEQ ID NO: 966795 - DNA, 25 bp, Homo sapien
ttactgtgagactgtttctatcctt

SEQ ID NO: 966796 - DNA, 25 bp, Homo sapien
ttatagaaactctgcatgatgtctc

SEQ ID NO: 966797 - DNA, 25 bp, Homo sapien
tgcttccagcaatgacagacagttg

SEQ ID NO: 966798 - DNA, 25 bp, Homo sapien
cagttatttaatagtccatgtctaa

SEQ ID NO: 966799 - DNA, 25 bp, Homo sapien
tcactaagagagtatgatgccacct

SEQ ID NO: 966800 - DNA, 25 bp, Homo sapien
cccttgcaatagaaaggacagtctg

SEQ ID NO: 966801 - DNA, 25 bp, Homo sapien
tattatgaaagaacctctgtcccga

SEQ ID NO: 966802 - DNA, 25 bp, Homo sapien
ggaaggccatcacacaggttaacga

SEQ ID NO: 966803 - DNA, 25 bp, Homo sapien
gcttacaagcttttctctatttatg

SEQ ID NO: 966804 - DNA, 25 bp, Homo sapien
tgacttgtaatgataatgtctttct

SEQ ID NO: 966805 - DNA, 25 bp, Homo sapien
tataccacctaccaccaagctatct

SEQ ID NO: 966806 - DNA, 25 bp, Homo sapien
gagcatacaactctggtatcagtac

SEQ ID NO: 966807 - DNA, 25 bp, Homo sapien
ctttccagtggttcaaaagcaccac

SEQ ID NO: 966808 - DNA, 25 bp, Homo sapien
agatgactggctccccccaggattc

SEQ ID NO: 966809 - DNA, 25 bp, Homo sapien
accaatgatacaatgtcaccacggt

SEQ ID NO: 966810 - DNA, 25 bp, Homo sapien
tgatacaatgtcaccacggtgtact

SEQ ID NO: 966811 - DNA, 25 bp, Homo sapien
tatggtagcataagtccaaagggct

SEQ ID NO: 966812 - DNA, 25 bp, Homo sapien
gctttcacaagggtatgctctctat

SEQ ID NO: 966813 - DNA, 25 bp, Homo sapien
ggaatggagcttttgtcatcacaac

SEQ ID NO: 966814 - DNA, 25 bp, Homo sapien
gagtgaactgcgctaccttatttgg

SEQ ID NO: 966815 - DNA, 25 bp, Homo sapien
aaatcaattagtggaatttccaaag

SEQ ID NO: 966816 - DNA, 25 bp, Homo sapien
tttttgagatcgagcactttgcagg

SEQ ID NO: 966817 - DNA, 25 bp, Homo sapien
tatgcattataatcactcccttgtc

SEQ ID NO: 966818 - DNA, 25 bp, Homo sapien
gcaggtaattaacacattttagtgg

SEQ ID NO: 966819 - DNA, 25 bp, Homo sapien
accagtttgctttgggctggtgatc

SEQ ID NO: 966820 - DNA, 25 bp, Homo sapien
gctggtgatccactatggagagaac

SEQ ID NO: 966821 - DNA, 25 bp, Homo sapien
taagtgaccagtttgctttgggctg

SEQ ID NO: 966822 - DNA, 25 bp, Homo sapien
ttttggcattcaaagtaagtgacca

SEQ ID NO: 966823 - DNA, 25 bp, Homo sapien
gaagcctttacaaaaggccttgatg

SEQ ID NO: 966824 - DNA, 25 bp, Homo sapien
caggcaccgccacaaagaagccttt

SEQ ID NO: 966825 - DNA, 25 bp, Homo sapien
gcgacccgatccaagaaagtcactg

SEQ ID NO: 966826 - DNA, 25 bp, Homo sapien
tgcatcgatgctccttctactcttg

SEQ ID NO: 966827 - DNA, 25 bp, Homo sapien
gcttttcctttgatcagggttggga

SEQ ID NO: 966828 - DNA, 25 bp, Homo sapien
tcagggttgggagtaaggagtagga

SEQ ID NO: 966829 - DNA, 25 bp, Homo sapien
ttcctttgatcagggttgggagtaa

SEQ ID NO: 966830 - DNA, 25 bp, Homo sapien
ggagtaggaaggcttctcaaaagaa

SEQ ID NO: 966831 - DNA, 25 bp, Homo sapien
tgagagaaaggtatttcactgaaac

SEQ ID NO: 966832 - DNA, 25 bp, Homo sapien
tgaatataccttctgatgcagaaac

SEQ ID NO: 966833 - DNA, 25 bp, Homo sapien
gatcaacgatattcaacataccatt

SEQ ID NO: 966834 - DNA, 25 bp, Homo sapien
tatggatgcaaagatatgatcaacg

SEQ ID NO: 966835 - DNA, 25 bp, Homo sapien
ggttttgattcaaccaagagcaagt

SEQ ID NO: 966836 - DNA, 25 bp, Homo sapien
ggaggctgagcataccaacgaagaa

SEQ ID NO: 966837 - DNA, 25 bp, Homo sapien
gaaagctatgctggttcatacacaa

SEQ ID NO: 966838 - DNA, 25 bp, Homo sapien
tttccccagtacatgaaggttttga

SEQ ID NO: 966839 - DNA, 25 bp, Homo sapien
caaggagggagttaatagtgctcgt

SEQ ID NO: 966840 - DNA, 25 bp, Homo sapien
caacagatcaatatcctagagcaga

SEQ ID NO: 966841 - DNA, 25 bp, Homo sapien
aaaccagggtttcaagctaagactg

SEQ ID NO: 966842 - DNA, 25 bp, Homo sapien
tagatgactttaaggacctacaaca

SEQ ID NO: 966843 - DNA, 25 bp, Homo sapien
taggatcagatacaccaggtgaacc

SEQ ID NO: 966844 - DNA, 25 bp, Homo sapien
ggtgtcagtcctcgtcccagaaatt

SEQ ID NO: 966845 - DNA, 25 bp, Homo sapien
tcaagctgacactctttatccaagg

SEQ ID NO: 966846 - DNA, 25 bp, Homo sapien
ccaaggctgtggaatgatctgataa

SEQ ID NO: 966847 - DNA, 25 bp, Homo sapien
gtgccctcgcccaatttggccaaaa

SEQ ID NO: 966848 - DNA, 25 bp, Homo sapien
ctttctcccgctcttcctcggtgag

SEQ ID NO: 966849 - DNA, 25 bp, Homo sapien
gtaagtggttattttgtgccctcgc

SEQ ID NO: 966850 - DNA, 25 bp, Homo sapien
tattttgtgccctcgcccaatttgg

SEQ ID NO: 966851 - DNA, 25 bp, Homo sapien
acacatgctcgcgatcacgcaggac

SEQ ID NO: 966852 - DNA, 25 bp, Homo sapien
gccggtttctcaacctagttagcca

SEQ ID NO: 966853 - DNA, 25 bp, Homo sapien
gttgttcaagcctgacgctctccca

SEQ ID NO: 966854 - DNA, 25 bp, Homo sapien
cggactaggcccctttgtgaggact

SEQ ID NO: 966855 - DNA, 25 bp, Homo sapien
cagctcagcccgggggaagtccccg

SEQ ID NO: 966856 - DNA, 25 bp, Homo sapien
tttcttggtccagacatttatttat

SEQ ID NO: 966857 - DNA, 25 bp, Homo sapien
cgttttcttggtccagacatttatt

SEQ ID NO: 966858 - DNA, 25 bp, Homo sapien
cttggtccagacatttatttatcct

SEQ ID NO: 966859 - DNA, 25 bp, Homo sapien
gcgttttcttggtccagacatttat

SEQ ID NO: 966860 - DNA, 25 bp, Homo sapien
cagatctttcttcatctctcatatc

SEQ ID NO: 966861 - DNA, 25 bp, Homo sapien
catctctcatatcttcttctctctg

SEQ ID NO: 966862 - DNA, 25 bp, Homo sapien
gatctttcttcatctctcatatctt

SEQ ID NO: 966863 - DNA, 25 bp, Homo sapien
ttcatctctcatatcttcttctctc

SEQ ID NO: 966864 - DNA, 25 bp, Homo sapien
ccatttttgccagcgttatttcctg

SEQ ID NO: 966865 - DNA, 25 bp, Homo sapien
gatgtgtttcactaggtctgttttc

SEQ ID NO: 966866 - DNA, 25 bp, Homo sapien
tcctgccttcctttcgactacagga

SEQ ID NO: 966867 - DNA, 25 bp, Homo sapien
tttcgactacaggacttacaaacat

SEQ ID NO: 966868 - DNA, 25 bp, Homo sapien
ctctgtatcatctttcacatccata

SEQ ID NO: 966869 - DNA, 25 bp, Homo sapien
tactatggcccaaagagaactgaca

SEQ ID NO: 966870 - DNA, 25 bp, Homo sapien
gatcacaagatgttggcacacccag

SEQ ID NO: 966871 - DNA, 25 bp, Homo sapien
tgaaacacacaagggctagcagcag

SEQ ID NO: 966872 - DNA, 25 bp, Homo sapien
tactctgtaaaggtgagcctccctg

SEQ ID NO: 966873 - DNA, 25 bp, Homo sapien
tcttcctgggtagatcattccattc

SEQ ID NO: 966874 - DNA, 25 bp, Homo sapien
cctgggtagatcattccattccttg

SEQ ID NO: 966875 - DNA, 25 bp, Homo sapien
ttgcataggaacgagtcctcttcat

SEQ ID NO: 966876 - DNA, 25 bp, Homo sapien
attccttgcataggaacgagtcctc

SEQ ID NO: 966877 - DNA, 25 bp, Homo sapien
tctgaatacagtaaagacacctggg

SEQ ID NO: 966878 - DNA, 25 bp, Homo sapien
aagggctcggaattcctacctagag

SEQ ID NO: 966879 - DNA, 25 bp, Homo sapien
tgaggactttttgatcagactgaga

SEQ ID NO: 966880 - DNA, 25 bp, Homo sapien
cagccaatgagaaggatgaacggtt

SEQ ID NO: 966881 - DNA, 25 bp, Homo sapien
gaggaagccgtatgagacaggatca

SEQ ID NO: 966882 - DNA, 25 bp, Homo sapien
gacaggatcaatgcatgagtagaga

SEQ ID NO: 966883 - DNA, 25 bp, Homo sapien
taaattgtgtattgaggcagaaggc

SEQ ID NO: 966884 - DNA, 25 bp, Homo sapien
gagtagagagctcaactctgaagag

SEQ ID NO: 966885 - DNA, 25 bp, Homo sapien
tcactataataagatcaagagccgc

SEQ ID NO: 966886 - DNA, 25 bp, Homo sapien
tgttccctatggcataagtgagccg

SEQ ID NO: 966887 - DNA, 25 bp, Homo sapien
agtgtgaaatgcatctacgtggcag

SEQ ID NO: 966888 - DNA, 25 bp, Homo sapien
gaatggtcagccaaccacgtaaatg

SEQ ID NO: 966889 - DNA, 25 bp, Homo sapien
tccttcaagagaaagacgacaggtc

SEQ ID NO: 966890 - DNA, 25 bp, Homo sapien
taaacgggcaaagaatgcatcgcag

SEQ ID NO: 966891 - DNA, 25 bp, Homo sapien
taagtatactgtcttgctcgcctgc

SEQ ID NO: 966892 - DNA, 25 bp, Homo sapien
tacagtagataccacggtgtcaggg

SEQ ID NO: 966893 - DNA, 25 bp, Homo sapien
aagcctgaggtttccgacgtgctgc

SEQ ID NO: 966894 - DNA, 25 bp, Homo sapien
gctgcaccggctgagagaagaaatc

SEQ ID NO: 966895 - DNA, 25 bp, Homo sapien
gagtccgctcgtagacgctgtacgg

SEQ ID NO: 966896 - DNA, 25 bp, Homo sapien
actgctgtagctgcccgacaagaca

SEQ ID NO: 966897 - DNA, 25 bp, Homo sapien
agagggggtgaaagactgcacagag

SEQ ID NO: 966898 - DNA, 25 bp, Homo sapien
agaaggaaacgagagggagacacag

SEQ ID NO: 966899 - DNA, 25 bp, Homo sapien
aggaaacgagagggagacacagcat

SEQ ID NO: 966900 - DNA, 25 bp, Homo sapien
aaggaaacgagagggagacacagca

SEQ ID NO: 966901 - DNA, 25 bp, Homo sapien
ggagaaggaaacgagagggagacac

SEQ ID NO: 966902 - DNA, 25 bp, Homo sapien
cttcaatggagatcgcccggcaggc

SEQ ID NO: 966903 - DNA, 25 bp, Homo sapien
ttcaatggagatcgcccggcaggcg

SEQ ID NO: 966904 - DNA, 25 bp, Homo sapien
gggatactgatgtcgtgtgtcttgc

SEQ ID NO: 966905 - DNA, 25 bp, Homo sapien
tgatgtcgtgtgtcttgctggtgaa

SEQ ID NO: 966906 - DNA, 25 bp, Homo sapien
gaacagctgttgactttggcgtgag

SEQ ID NO: 966907 - DNA, 25 bp, Homo sapien
gactattgacaggttcccaaactga

SEQ ID NO: 966908 - DNA, 25 bp, Homo sapien
caaactgatccaatgtcctttccgt

SEQ ID NO: 966909 - DNA, 25 bp, Homo sapien
tggcgtgagcaccaatgggaacacc

SEQ ID NO: 966910 - DNA, 25 bp, Homo sapien
ctcactagattttcaagtcctacac

SEQ ID NO: 966911 - DNA, 25 bp, Homo sapien
tcatcgtggccaagaagagtgaact

SEQ ID NO: 966912 - DNA, 25 bp, Homo sapien
tctctatggatttcatcatcgtggc

SEQ ID NO: 966913 - DNA, 25 bp, Homo sapien
tcccattatcccctggtggtgggtc

SEQ ID NO: 966914 - DNA, 25 bp, Homo sapien
ccactatccgacatgttcttggctt

SEQ ID NO: 966915 - DNA, 25 bp, Homo sapien
gggagagataagtttcccactatcc

SEQ ID NO: 966916 - DNA, 25 bp, Homo sapien
cttcccactgtccaggctccagctg

SEQ ID NO: 966917 - DNA, 25 bp, Homo sapien
cagtctgtgtgggtcttggagggac

SEQ ID NO: 966918 - DNA, 25 bp, Homo sapien
cattccaggactgaccatggggctg

SEQ ID NO: 966919 - DNA, 25 bp, Homo sapien
acattccaggactgaccatggggct

SEQ ID NO: 966920 - DNA, 25 bp, Homo sapien
tccaggactgaccatggggctggcc

SEQ ID NO: 966921 - DNA, 25 bp, Homo sapien
aggactgaccatggggctggcctta

SEQ ID NO: 966922 - DNA, 25 bp, Homo sapien
atttgggtcactgcgtggcaaggcc

SEQ ID NO: 966923 - DNA, 25 bp, Homo sapien
tttcaggtgcagagagatttgggtc

SEQ ID NO: 966924 - DNA, 25 bp, Homo sapien
tctccaatatgattaaacagcatcc

SEQ ID NO: 966925 - DNA, 25 bp, Homo sapien
tggcaaggccccgtctccaatatga

SEQ ID NO: 966926 - DNA, 25 bp, Homo sapien
caggtgttggatagatggcactgca

SEQ ID NO: 966927 - DNA, 25 bp, Homo sapien
caggcaagagttttctcgggaatgt

SEQ ID NO: 966928 - DNA, 25 bp, Homo sapien
ctctcttggtgacaggcaagagttt

SEQ ID NO: 966929 - DNA, 25 bp, Homo sapien
ctccacaggtgttggatagatggca

SEQ ID NO: 966930 - DNA, 25 bp, Homo sapien
tgcacctgtttggaggcgagagcct

SEQ ID NO: 966931 - DNA, 25 bp, Homo sapien
cagcatggtagtggtgctgcacctg

SEQ ID NO: 966932 - DNA, 25 bp, Homo sapien
agcctgaacgtgtggcagctggcca

SEQ ID NO: 966933 - DNA, 25 bp, Homo sapien
agttcccaggactagaaggttctct

SEQ ID NO: 966934 - DNA, 25 bp, Homo sapien
gaactcaagcttgaggtagatggac

SEQ ID NO: 966935 - DNA, 25 bp, Homo sapien
gaagccgagtgagtagaactcaagc

SEQ ID NO: 966936 - DNA, 25 bp, Homo sapien
tctggcactcgatggagcagaactt

SEQ ID NO: 966937 - DNA, 25 bp, Homo sapien
tgtcacattaggtgaagccgagtga

SEQ ID NO: 966938 - DNA, 25 bp, Homo sapien
gagattttgactcctgccaaaggaa

SEQ ID NO: 966939 - DNA, 25 bp, Homo sapien
aaaggcttcccacgacactgacgta

SEQ ID NO: 966940 - DNA, 25 bp, Homo sapien
aatgccttcgtgttagattcagcta

SEQ ID NO: 966941 - DNA, 25 bp, Homo sapien
gattcagctatacactgtgacttcg

SEQ ID NO: 966942 - DNA, 25 bp, Homo sapien
cctgtaatattgcttacttcagcag

SEQ ID NO: 966943 - DNA, 25 bp, Homo sapien
cagcagaagcttgtgaggacagtga

SEQ ID NO: 966944 - DNA, 25 bp, Homo sapien
ggaagaatatcggttgacagctggg

SEQ ID NO: 966945 - DNA, 25 bp, Homo sapien
gcttacttcagcagaagcttgtgag

SEQ ID NO: 966946 - DNA, 25 bp, Homo sapien
cattaggaaaatggacaggactggc

SEQ ID NO: 966947 - DNA, 25 bp, Homo sapien
agtttctacacacacgagggcttcc

SEQ ID NO: 966948 - DNA, 25 bp, Homo sapien
gcgtctaggaattaccctggtacca

SEQ ID NO: 966949 - DNA, 25 bp, Homo sapien
cctggtaccatctgggctcacagaa

SEQ ID NO: 966950 - DNA, 25 bp, Homo sapien
tggtcaaccagctttttgtgaaggg

SEQ ID NO: 966951 - DNA, 25 bp, Homo sapien
tgtatccctaagctcgacttcatca

SEQ ID NO: 966952 - DNA, 25 bp, Homo sapien
gggtctcatatcttgaggtacaaac

SEQ ID NO: 966953 - DNA, 25 bp, Homo sapien
tgcacggccaaaccaaattccagaa

SEQ ID NO: 966954 - DNA, 25 bp, Homo sapien
catcttcagggtgacttaagatata

SEQ ID NO: 966955 - DNA, 25 bp, Homo sapien
aatcgtgcaattttctccccatctt

SEQ ID NO: 966956 - DNA, 25 bp, Homo sapien
taatcgtgcaattttctccccatct

SEQ ID NO: 966957 - DNA, 25 bp, Homo sapien
cttaagatatattctttgacaaaga

SEQ ID NO: 966958 - DNA, 25 bp, Homo sapien
gacactgactaatcagagtcttcag

SEQ ID NO: 966959 - DNA, 25 bp, Homo sapien
tgcatctgtcttgtctgacactgac

SEQ ID NO: 966960 - DNA, 25 bp, Homo sapien
tcttgatacctggaaacgccaccat

SEQ ID NO: 966961 - DNA, 25 bp, Homo sapien
agcatctataactccattcaggcac

SEQ ID NO: 966962 - DNA, 25 bp, Homo sapien
taatgacgttctctccacccagaga

SEQ ID NO: 966963 - DNA, 25 bp, Homo sapien
gagatgccaggcaaactctgcacca

SEQ ID NO: 966964 - DNA, 25 bp, Homo sapien
gccaggcaaactctgcaccaagtat

SEQ ID NO: 966965 - DNA, 25 bp, Homo sapien
tctgcaccaagtataatgacgttct

SEQ ID NO: 966966 - DNA, 25 bp, Homo sapien
gggctcgcagtctatctgaggagtt

SEQ ID NO: 966967 - DNA, 25 bp, Homo sapien
tcgcagtctatctgaggagttagca

SEQ ID NO: 966968 - DNA, 25 bp, Homo sapien
tctatctgaggagttagcatgtaat

SEQ ID NO: 966969 - DNA, 25 bp, Homo sapien
tgccccaaggggctcgcagtctatc

SEQ ID NO: 966970 - DNA, 25 bp, Homo sapien
tgtgattcactttatagaagctttt

SEQ ID NO: 966971 - DNA, 25 bp, Homo sapien
tggtcggtcatagcggaatttccag

SEQ ID NO: 966972 - DNA, 25 bp, Homo sapien
ctctggaatgggagtcacagcatat

SEQ ID NO: 966973 - DNA, 25 bp, Homo sapien
gcttttgatgttgtccggaacaccc

SEQ ID NO: 966974 - DNA, 25 bp, Homo sapien
aactccatggaagtctggcttgggc

SEQ ID NO: 966975 - DNA, 25 bp, Homo sapien
tccatggaagtctggcttgggctga

SEQ ID NO: 966976 - DNA, 25 bp, Homo sapien
caaactccatggaagtctggcttgg

SEQ ID NO: 966977 - DNA, 25 bp, Homo sapien
tggcaaactccatggaagtctggct

SEQ ID NO: 966978 - DNA, 25 bp, Homo sapien
ttcccacatctgtgataactgctgt

SEQ ID NO: 966979 - DNA, 25 bp, Homo sapien
catctgtgataactgctgtcccaaa

SEQ ID NO: 966980 - DNA, 25 bp, Homo sapien
gattatctgtgtccctagccttccc

SEQ ID NO: 966981 - DNA, 25 bp, Homo sapien
ttatctgtgtgattatctgtgtccc

SEQ ID NO: 966982 - DNA, 25 bp, Homo sapien
tgagtccagcccttgtaggtgcgga

SEQ ID NO: 966983 - DNA, 25 bp, Homo sapien
agtccagcccttgtaggtgcggata

SEQ ID NO: 966984 - DNA, 25 bp, Homo sapien
gtccagcccttgtaggtgcggatac

SEQ ID NO: 966985 - DNA, 25 bp, Homo sapien
gagtccagcccttgtaggtgcggat

SEQ ID NO: 966986 - DNA, 25 bp, Homo sapien
cgtagtcatgccctcgacacacaaa

SEQ ID NO: 966987 - DNA, 25 bp, Homo sapien
tctgcctggaagatggtctcatcgg

SEQ ID NO: 966988 - DNA, 25 bp, Homo sapien
ctcatcgggctggttggcgtgctgc

SEQ ID NO: 966989 - DNA, 25 bp, Homo sapien
catgggggaactcgttcagcattct

SEQ ID NO: 966990 - DNA, 25 bp, Homo sapien
ttgtgaccgcccactacactgtgtg

SEQ ID NO: 966991 - DNA, 25 bp, Homo sapien
caggattctgaagagtgtagtgccc

SEQ ID NO: 966992 - DNA, 25 bp, Homo sapien
gtcgtgtctagaccctgctgcgcaa

SEQ ID NO: 966993 - DNA, 25 bp, Homo sapien
gcaaatgccatttatacccaggaaa

SEQ ID NO: 966994 - DNA, 25 bp, Homo sapien
gaagaactctggttcaagacgttgc

SEQ ID NO: 966995 - DNA, 25 bp, Homo sapien
acgttgctggtccataattttgtca

SEQ ID NO: 966996 - DNA, 25 bp, Homo sapien
tctgaagaactctggttcaagacgt

SEQ ID NO: 966997 - DNA, 25 bp, Homo sapien
ttcaagacgttgctggtccataatt

SEQ ID NO: 966998 - DNA, 25 bp, Homo sapien
tcataataactctcatactgctctg

SEQ ID NO: 966999 - DNA, 25 bp, Homo sapien
tactgctctgcaatcttccggcaca

SEQ ID NO: 967000 - DNA, 25 bp, Homo sapien
ctcaggtttctgtagtcataataac

SEQ ID NO: 967001 - DNA, 25 bp, Homo sapien
aatcttccggcacaagataatgcca

SEQ ID NO: 967002 - DNA, 25 bp, Homo sapien
gggccgatcagaccattccagtagc

SEQ ID NO: 967003 - DNA, 25 bp, Homo sapien
ttccagtagctcgtcatataagagg

SEQ ID NO: 967004 - DNA, 25 bp, Homo sapien
gcctctgtcaaagttctggatgatg

SEQ ID NO: 967005 - DNA, 25 bp, Homo sapien
caggtgctctttgcgctgccattct

SEQ ID NO: 967006 - DNA, 25 bp, Homo sapien
aatgtagcgtatatacatctcctcc

SEQ ID NO: 967007 - DNA, 25 bp, Homo sapien
tgagatgcagatcatagagtttgtg

SEQ ID NO: 967008 - DNA, 25 bp, Homo sapien
agtttgtgaatgtagcgtatataca

SEQ ID NO: 967009 - DNA, 25 bp, Homo sapien
gagatgcagatcatagagtttgtga

SEQ ID NO: 967010 - DNA, 25 bp, Homo sapien
tctaagacatacaggtaaggatgag

SEQ ID NO: 967011 - DNA, 25 bp, Homo sapien
caaaaatctctaagacatacaggta

SEQ ID NO: 967012 - DNA, 25 bp, Homo sapien
tattctgcatttcctatgcgttgga

SEQ ID NO: 967013 - DNA, 25 bp, Homo sapien
ttcctatgcgttggacttcaaatgt

SEQ ID NO: 967014 - DNA, 25 bp, Homo sapien
aaaaatacctccagtcagcagatga

SEQ ID NO: 967015 - DNA, 25 bp, Homo sapien
ccacagcaggtttttatatgactaa

SEQ ID NO: 967016 - DNA, 25 bp, Homo sapien
ccccgatcttgtaaaggatgtcaca

SEQ ID NO: 967017 - DNA, 25 bp, Homo sapien
acaagtctaacaactccacagcagg

SEQ ID NO: 967018 - DNA, 25 bp, Homo sapien
taaagacggataccatcataggctc

SEQ ID NO: 967019 - DNA, 25 bp, Homo sapien
gctttgaagacgaactgtgacagga

SEQ ID NO: 967020 - DNA, 25 bp, Homo sapien
caagcacgaatgtgggagaaactca

SEQ ID NO: 967021 - DNA, 25 bp, Homo sapien
taatggcctgcaggttaccgttggg

SEQ ID NO: 967022 - DNA, 25 bp, Homo sapien
cccaggacagctttggattagcctg

SEQ ID NO: 967023 - DNA, 25 bp, Homo sapien
tatataaatgttggcttgcccagga

SEQ ID NO: 967024 - DNA, 25 bp, Homo sapien
taaatgtagggccactcctttgctc

SEQ ID NO: 967025 - DNA, 25 bp, Homo sapien
ttcagatctgattgaaggaacttat

SEQ ID NO: 967026 - DNA, 25 bp, Homo sapien
gctaggacagcaacaagactctagg

SEQ ID NO: 967027 - DNA, 25 bp, Homo sapien
gatacagtgctttttgctaggacag

SEQ ID NO: 967028 - DNA, 25 bp, Homo sapien
ccacacgggtctcctattagggctg

SEQ ID NO: 967029 - DNA, 25 bp, Homo sapien
aatgtctgggactgaggatttcctg

SEQ ID NO: 967030 - DNA, 25 bp, Homo sapien
tgtgcagccaatctttttgccatct

SEQ ID NO: 967031 - DNA, 25 bp, Homo sapien
agccaatctttttgccatctacctc

SEQ ID NO: 967032 - DNA, 25 bp, Homo sapien
gaaggctaactgtgcagccaatctt

SEQ ID NO: 967033 - DNA, 25 bp, Homo sapien
taactgtgcagccaatctttttgcc

SEQ ID NO: 967034 - DNA, 25 bp, Homo sapien
taatgaaacgccactttcccgccat

SEQ ID NO: 967035 - DNA, 25 bp, Homo sapien
tccattagacgagttacagtagcaa

SEQ ID NO: 967036 - DNA, 25 bp, Homo sapien
agtagcaattaatgaaacgccactt

SEQ ID NO: 967037 - DNA, 25 bp, Homo sapien
tgtaatctaacaacctctccattag

SEQ ID NO: 967038 - DNA, 25 bp, Homo sapien
ttcccgctcaattttctttagtaga

SEQ ID NO: 967039 - DNA, 25 bp, Homo sapien
taggatagggaccaaatagtggaat

SEQ ID NO: 967040 - DNA, 25 bp, Homo sapien
ctaggatagggaccaaatagtggaa

SEQ ID NO: 967041 - DNA, 25 bp, Homo sapien
aggatagggaccaaatagtggaatt

SEQ ID NO: 967042 - DNA, 25 bp, Homo sapien
caggaagcattgacaaagcaaattg

SEQ ID NO: 967043 - DNA, 25 bp, Homo sapien
aaatatacaagcatctcacagctca

SEQ ID NO: 967044 - DNA, 25 bp, Homo sapien
tcaaaatatacaagcatctcacagc

SEQ ID NO: 967045 - DNA, 25 bp, Homo sapien
aatccaggaagcattgacaaagcaa

SEQ ID NO: 967046 - DNA, 25 bp, Homo sapien
ttttactgcaatgcaactgctacag

SEQ ID NO: 967047 - DNA, 25 bp, Homo sapien
gcaattttactgcaatgcaactgct

SEQ ID NO: 967048 - DNA, 25 bp, Homo sapien
aaatccttgtacagctggtatgacg

SEQ ID NO: 967049 - DNA, 25 bp, Homo sapien
tacagctggtatgacgttttgcgtt

SEQ ID NO: 967050 - DNA, 25 bp, Homo sapien
ggtttgattctcatgtcgaggtaca

SEQ ID NO: 967051 - DNA, 25 bp, Homo sapien
gaggcactaaagaactatgtcagta

SEQ ID NO: 967052 - DNA, 25 bp, Homo sapien
caaaccaaggactagtaactgaaat

SEQ ID NO: 967053 - DNA, 25 bp, Homo sapien
tgtgtacactagaatgaatgaggtc

SEQ ID NO: 967054 - DNA, 25 bp, Homo sapien
tcagctaccgtggtgcagagaggct

SEQ ID NO: 967055 - DNA, 25 bp, Homo sapien
tggacctggccatcaatactaaagc

SEQ ID NO: 967056 - DNA, 25 bp, Homo sapien
gatcagattctatgggtagggcaac

SEQ ID NO: 967057 - DNA, 25 bp, Homo sapien
gacaaagccctcctgtgagacctaa

SEQ ID NO: 967058 - DNA, 25 bp, Homo sapien
gacatcaggctatccagtttgtcaa

SEQ ID NO: 967059 - DNA, 25 bp, Homo sapien
tatgtttcgtcacctttgccttctg

SEQ ID NO: 967060 - DNA, 25 bp, Homo sapien
ctttgccttctgacatcaggctatc

SEQ ID NO: 967061 - DNA, 25 bp, Homo sapien
tactgttgaagagctcgcggtatgt

SEQ ID NO: 967062 - DNA, 25 bp, Homo sapien
gcaggcaaccctttggaattctaag

SEQ ID NO: 967063 - DNA, 25 bp, Homo sapien
tgcttgcagcccagtttaaacgttt

SEQ ID NO: 967064 - DNA, 25 bp, Homo sapien
caagtaggatttctaggcaagttaa

SEQ ID NO: 967065 - DNA, 25 bp, Homo sapien
cagctacggttaatagcaggcaacc

SEQ ID NO: 967066 - DNA, 25 bp, Homo sapien
ccacgtacagatggtagatccatag

SEQ ID NO: 967067 - DNA, 25 bp, Homo sapien
tacagatggtagatccatagcaata

SEQ ID NO: 967068 - DNA, 25 bp, Homo sapien
cacgtacagatggtagatccatagc

SEQ ID NO: 967069 - DNA, 25 bp, Homo sapien
cgtacagatggtagatccatagcaa

SEQ ID NO: 967070 - DNA, 25 bp, Homo sapien
aaaacttctctatggccagagagag

SEQ ID NO: 967071 - DNA, 25 bp, Homo sapien
cagagagagttaaaacgattaggga

SEQ ID NO: 967072 - DNA, 25 bp, Homo sapien
aatgaaaaacttctctatggccaga

SEQ ID NO: 967073 - DNA, 25 bp, Homo sapien
ggaacttgaatatcaggaatggaaa

SEQ ID NO: 967074 - DNA, 25 bp, Homo sapien
caataggagggttccatgtctgcag

SEQ ID NO: 967075 - DNA, 25 bp, Homo sapien
cagattgcttgactggttgacaacc

SEQ ID NO: 967076 - DNA, 25 bp, Homo sapien
cacccatgcttttggcaataggagg

SEQ ID NO: 967077 - DNA, 25 bp, Homo sapien
taaatgtgtataccgatacaggtga

SEQ ID NO: 967078 - DNA, 25 bp, Homo sapien
gaccactgagagctcaatgagttta

SEQ ID NO: 967079 - DNA, 25 bp, Homo sapien
acaggatctgagaagtatccacggc

SEQ ID NO: 967080 - DNA, 25 bp, Homo sapien
agtctctgcaagttcttaaatacag

SEQ ID NO: 967081 - DNA, 25 bp, Homo sapien
aggctggaatctaggtctgctgacc

SEQ ID NO: 967082 - DNA, 25 bp, Homo sapien
ttccgaagatctggctggggtatca

SEQ ID NO: 967083 - DNA, 25 bp, Homo sapien
atgacattccgaagatctggctggg

SEQ ID NO: 967084 - DNA, 25 bp, Homo sapien
ctgtttaaagttgccactccgcctc

SEQ ID NO: 967085 - DNA, 25 bp, Homo sapien
tttaaagttgccactccgcctctgc

SEQ ID NO: 967086 - DNA, 25 bp, Homo sapien
gggcagggataaaatgaagcttgtg

SEQ ID NO: 967087 - DNA, 25 bp, Homo sapien
gcagggataaaatgaagcttgtgct

SEQ ID NO: 967088 - DNA, 25 bp, Homo sapien
cagggataaaatgaagcttgtgctc

SEQ ID NO: 967089 - DNA, 25 bp, Homo sapien
gggataaaatgaagcttgtgctctc

SEQ ID NO: 967090 - DNA, 25 bp, Homo sapien
aaactattgctagaaatatattcaa

SEQ ID NO: 967091 - DNA, 25 bp, Homo sapien
tatagtcgtctcctcaagcaagaaa

SEQ ID NO: 967092 - DNA, 25 bp, Homo sapien
gtcgtctcctcaagcaagaaaatat

SEQ ID NO: 967093 - DNA, 25 bp, Homo sapien
tatattcaattatagtcgtctcctc

SEQ ID NO: 967094 - DNA, 25 bp, Homo sapien
ccacttagaatttacaagttgggag

SEQ ID NO: 967095 - DNA, 25 bp, Homo sapien
cacttagaatttacaagttgggagg

SEQ ID NO: 967096 - DNA, 25 bp, Homo sapien
cagcatcatggctgaaagcacatgc

SEQ ID NO: 967097 - DNA, 25 bp, Homo sapien
agcacatgctactgagagcatccac

SEQ ID NO: 967098 - DNA, 25 bp, Homo sapien
taacctcctgacctcattaactgcc

SEQ ID NO: 967099 - DNA, 25 bp, Homo sapien
acaggcgcccatcaacacgctgggc

SEQ ID NO: 967100 - DNA, 25 bp, Homo sapien
aggcgcccatcaacacgctgggcta

SEQ ID NO: 967101 - DNA, 25 bp, Homo sapien
gcgcccatcaacacgctgggctaat

SEQ ID NO: 967102 - DNA, 25 bp, Homo sapien
acaacccattgttacccgcatgtca

SEQ ID NO: 967103 - DNA, 25 bp, Homo sapien
tcacaacccattgttacccgcatgt

SEQ ID NO: 967104 - DNA, 25 bp, Homo sapien
cattgttacccgcatgtcaccatac

SEQ ID NO: 967105 - DNA, 25 bp, Homo sapien
atttcacaacccattgttacccgca

SEQ ID NO: 967106 - DNA, 25 bp, Homo sapien
aaaatgactgcgaggtaaaagtagg

SEQ ID NO: 967107 - DNA, 25 bp, Homo sapien
aaaaatgactgcgaggtaaaagtag

SEQ ID NO: 967108 - DNA, 25 bp, Homo sapien
caaagaaccaccattgaggaagaaa

SEQ ID NO: 967109 - DNA, 25 bp, Homo sapien
gaaagatgcccaaaacaaagaacca

SEQ ID NO: 967110 - DNA, 25 bp, Homo sapien
aaagccaagataggcactgctcatc

SEQ ID NO: 967111 - DNA, 25 bp, Homo sapien
agtatatcaagaatttgtaggcacc

SEQ ID NO: 967112 - DNA, 25 bp, Homo sapien
tgcatctgagaggtatagaactgtt

SEQ ID NO: 967113 - DNA, 25 bp, Homo sapien
tctgagaggtatagaactgttgtaa

SEQ ID NO: 967114 - DNA, 25 bp, Homo sapien
ctgagaggtatagaactgttgtaat

SEQ ID NO: 967115 - DNA, 25 bp, Homo sapien
catctgagaggtatagaactgttgt

SEQ ID NO: 967116 - DNA, 25 bp, Homo sapien
gtccacagtttcagcttagattgac

SEQ ID NO: 967117 - DNA, 25 bp, Homo sapien
tgacgttcagacacaatacctctgg

SEQ ID NO: 967118 - DNA, 25 bp, Homo sapien
ttcagcttagattgacgttcagaca

SEQ ID NO: 967119 - DNA, 25 bp, Homo sapien
cgttcagacacaatacctctggtgt

SEQ ID NO: 967120 - DNA, 25 bp, Homo sapien
taacacacaggtctctaagctagcc

SEQ ID NO: 967121 - DNA, 25 bp, Homo sapien
ccaaaaatatgactgctcagggcta

SEQ ID NO: 967122 - DNA, 25 bp, Homo sapien
gcagttcccagagctttctatggta

SEQ ID NO: 967123 - DNA, 25 bp, Homo sapien
taacattcagcccaagccatcaagg

SEQ ID NO: 967124 - DNA, 25 bp, Homo sapien
tttggaaacatctccgggcgtatca

SEQ ID NO: 967125 - DNA, 25 bp, Homo sapien
tattcggaacacagtaaatatctgc

SEQ ID NO: 967126 - DNA, 25 bp, Homo sapien
ttgttagcaaccaagcgcataacag

SEQ ID NO: 967127 - DNA, 25 bp, Homo sapien
gcaaccaagcgcataacagtccagt

SEQ ID NO: 967128 - DNA, 25 bp, Homo sapien
tgcttgccatgcttgagttgctcaa

SEQ ID NO: 967129 - DNA, 25 bp, Homo sapien
gcctggttacatccctagtgcgtgg

SEQ ID NO: 967130 - DNA, 25 bp, Homo sapien
cctacaggaacagggtatcttgtgc

SEQ ID NO: 967131 - DNA, 25 bp, Homo sapien
tagtgcgtggtgcacagtgcttgcc

SEQ ID NO: 967132 - DNA, 25 bp, Homo sapien
tatctgtcatttgtcgtaataggga

SEQ ID NO: 967133 - DNA, 25 bp, Homo sapien
tattaaaactatcaagaagctgttg

SEQ ID NO: 967134 - DNA, 25 bp, Homo sapien
tgtcgtaatagggacaggagacaag

SEQ ID NO: 967135 - DNA, 25 bp, Homo sapien
gctgttgataatgtctatctgtcat

SEQ ID NO: 967136 - DNA, 25 bp, Homo sapien
caatcatggtgcttacagagcactg

SEQ ID NO: 967137 - DNA, 25 bp, Homo sapien
tgggaggctgggtaacaatcatggt

SEQ ID NO: 967138 - DNA, 25 bp, Homo sapien
gcagacgccagtgctcatgctggtg

SEQ ID NO: 967139 - DNA, 25 bp, Homo sapien
gttatctggaactatgatacagcag

SEQ ID NO: 967140 - DNA, 25 bp, Homo sapien
acattgtgggatctgcgtttactca

SEQ ID NO: 967141 - DNA, 25 bp, Homo sapien
cattgtgggatctgcgtttactcac

SEQ ID NO: 967142 - DNA, 25 bp, Homo sapien
cacattgtgggatctgcgtttactc

SEQ ID NO: 967143 - DNA, 25 bp, Homo sapien
ggcacattgtgggatctgcgtttac

SEQ ID NO: 967144 - DNA, 25 bp, Homo sapien
tgtgtctacttgtcatgggcacttt

SEQ ID NO: 967145 - DNA, 25 bp, Homo sapien
tctacttgtcatgggcacttttcca

SEQ ID NO: 967146 - DNA, 25 bp, Homo sapien
gaaaaggtgctcaatgtagtactgc

SEQ ID NO: 967147 - DNA, 25 bp, Homo sapien
gtactgccatgtgaagactccctat

SEQ ID NO: 967148 - DNA, 25 bp, Homo sapien
cagggcatatttctcgccatagaat

SEQ ID NO: 967149 - DNA, 25 bp, Homo sapien
caacaacaatacctgaagcacgtct

SEQ ID NO: 967150 - DNA, 25 bp, Homo sapien
caatcatgatatgactgtgacttct

SEQ ID NO: 967151 - DNA, 25 bp, Homo sapien
tgctgctaccacaatgactaacggt

SEQ ID NO: 967152 - DNA, 25 bp, Homo sapien
tgacatcctggaactggaaccgcat

SEQ ID NO: 967153 - DNA, 25 bp, Homo sapien
tgatctccaatatggtcctcagcag

SEQ ID NO: 967154 - DNA, 25 bp, Homo sapien
gaaccgcattgctgagctggatggc

SEQ ID NO: 967155 - DNA, 25 bp, Homo sapien
gctgaggtcggctggtgatctccaa

SEQ ID NO: 967156 - DNA, 25 bp, Homo sapien
taaggatacgtgcacacatgatcag

SEQ ID NO: 967157 - DNA, 25 bp, Homo sapien
gacaaaatacgttgctaaggatacg

SEQ ID NO: 967158 - DNA, 25 bp, Homo sapien
tgtaacacgacaggcagaagaatgt

SEQ ID NO: 967159 - DNA, 25 bp, Homo sapien
ttcttgcaagtgaatgtggaggtga

SEQ ID NO: 967160 - DNA, 25 bp, Homo sapien
agtcaccaagagcgcgaggtctgtg

SEQ ID NO: 967161 - DNA, 25 bp, Homo sapien
tcaacaagctttagacagggatcct

SEQ ID NO: 967162 - DNA, 25 bp, Homo sapien
ctatcaacaagctttagacagggat

SEQ ID NO: 967163 - DNA, 25 bp, Homo sapien
aacaagctttagacagggatccttg

SEQ ID NO: 967164 - DNA, 25 bp, Homo sapien
caagggttggccgttacattccaca

SEQ ID NO: 967165 - DNA, 25 bp, Homo sapien
attccacaaactgggctctagcatg

SEQ ID NO: 967166 - DNA, 25 bp, Homo sapien
tacattccacaaactgggctctagc

SEQ ID NO: 967167 - DNA, 25 bp, Homo sapien
gcacacaagggttggccgttacatt

SEQ ID NO: 967168 - DNA, 25 bp, Homo sapien
ggcggcctcagtacggggagattgt

SEQ ID NO: 967169 - DNA, 25 bp, Homo sapien
gaggggcggcctcagtacggggaga

SEQ ID NO: 967170 - DNA, 25 bp, Homo sapien
cctcagtacggggagattgtaaaca

SEQ ID NO: 967171 - DNA, 25 bp, Homo sapien
cagtacggggagattgtaaacaagg

SEQ ID NO: 967172 - DNA, 25 bp, Homo sapien
agcctcgggactagctggggcttca

SEQ ID NO: 967173 - DNA, 25 bp, Homo sapien
cagcctcgggactagctggggcttc

SEQ ID NO: 967174 - DNA, 25 bp, Homo sapien
ggcttcaggtgcagtccactgcacc

SEQ ID NO: 967175 - DNA, 25 bp, Homo sapien
tggggcttcaggtgcagtccactgc

SEQ ID NO: 967176 - DNA, 25 bp, Homo sapien
cttgcaagccacggcagctgcctgt

SEQ ID NO: 967177 - DNA, 25 bp, Homo sapien
aagccacggcagctgcctgtgacac

SEQ ID NO: 967178 - DNA, 25 bp, Homo sapien
gccacggcagctgcctgtgacacac

SEQ ID NO: 967179 - DNA, 25 bp, Homo sapien
tgcaagccacggcagctgcctgtga

SEQ ID NO: 967180 - DNA, 25 bp, Homo sapien
ccctggaattgctagacagagttaa

SEQ ID NO: 967181 - DNA, 25 bp, Homo sapien
cagttcttatgggtctccagcgtac

SEQ ID NO: 967182 - DNA, 25 bp, Homo sapien
cagcgtactgactgcagatatgaga

SEQ ID NO: 967183 - DNA, 25 bp, Homo sapien
tcttcctgatggtcttcgagctagg

SEQ ID NO: 967184 - DNA, 25 bp, Homo sapien
tccaccctgtggaccagtaggataa

SEQ ID NO: 967185 - DNA, 25 bp, Homo sapien
cccttgtcatttggatacagttatc

SEQ ID NO: 967186 - DNA, 25 bp, Homo sapien
gattactgtcacagcagcaatggga

SEQ ID NO: 967187 - DNA, 25 bp, Homo sapien
taccttaatttcagcccattgagaa

SEQ ID NO: 967188 - DNA, 25 bp, Homo sapien
taatcattctccatgtgtgggacct

SEQ ID NO: 967189 - DNA, 25 bp, Homo sapien
ctaaggattctgttgatcgtgagcc

SEQ ID NO: 967190 - DNA, 25 bp, Homo sapien
attctccatgtgtgggaccttccca

SEQ ID NO: 967191 - DNA, 25 bp, Homo sapien
ttctgttgatcgtgagccactgttg

SEQ ID NO: 967192 - DNA, 25 bp, Homo sapien
tctcttccagggcactggcacagac

SEQ ID NO: 967193 - DNA, 25 bp, Homo sapien
cctctcttccagggcactggcacag

SEQ ID NO: 967194 - DNA, 25 bp, Homo sapien
gcttccctacgctggccctgagcct

SEQ ID NO: 967195 - DNA, 25 bp, Homo sapien
cagcttccctacgctggccctgagc

SEQ ID NO: 967196 - DNA, 25 bp, Homo sapien
atttcttgggtctcatgagtccttc

SEQ ID NO: 967197 - DNA, 25 bp, Homo sapien
tcaacatttcttgggtctcatgagt

SEQ ID NO: 967198 - DNA, 25 bp, Homo sapien
acatttcttgggtctcatgagtcct

SEQ ID NO: 967199 - DNA, 25 bp, Homo sapien
catttcttgggtctcatgagtcctt

SEQ ID NO: 967200 - DNA, 25 bp, Homo sapien
tctttatcccgcatcacagcaggtt

SEQ ID NO: 967201 - DNA, 25 bp, Homo sapien
tagtacatactctcatcaattccca

SEQ ID NO: 967202 - DNA, 25 bp, Homo sapien
tatcccgcatcacagcaggttcttc

SEQ ID NO: 967203 - DNA, 25 bp, Homo sapien
catactctcatcaattcccacggga

SEQ ID NO: 967204 - DNA, 25 bp, Homo sapien
catctctgaaggagtgttaaatccc

SEQ ID NO: 967205 - DNA, 25 bp, Homo sapien
gagtcactgaccacttgctcttggg

SEQ ID NO: 967206 - DNA, 25 bp, Homo sapien
aaataaggatcctatcaggtacctg

SEQ ID NO: 967207 - DNA, 25 bp, Homo sapien
caagaggcaatggaacttactaaca

SEQ ID NO: 967208 - DNA, 25 bp, Homo sapien
cagggtgtcctggaccaagttggct

SEQ ID NO: 967209 - DNA, 25 bp, Homo sapien
catgcaggatggtcggcagactgcc

SEQ ID NO: 967210 - DNA, 25 bp, Homo sapien
caagttggctacttcccggacatca

SEQ ID NO: 967211 - DNA, 25 bp, Homo sapien
cacggttttgccaatgcactgcagt

SEQ ID NO: 967212 - DNA, 25 bp, Homo sapien
tgagtacacggcagggaaagagctc

SEQ ID NO: 967213 - DNA, 25 bp, Homo sapien
ctgagtacacggcagggaaagagct

SEQ ID NO: 967214 - DNA, 25 bp, Homo sapien
taggaccaggatgcatacatctgtg

SEQ ID NO: 967215 - DNA, 25 bp, Homo sapien
cagtaggaccaggatgcatacatct

SEQ ID NO: 967216 - DNA, 25 bp, Homo sapien
gtaggaccaggatgcatacatctgt

SEQ ID NO: 967217 - DNA, 25 bp, Homo sapien
ccagtaggaccaggatgcatacatc

SEQ ID NO: 967218 - DNA, 25 bp, Homo sapien
gtttgccctgagttgtagcccacat

SEQ ID NO: 967219 - DNA, 25 bp, Homo sapien
gataatgctccagaccctttgctct

SEQ ID NO: 967220 - DNA, 25 bp, Homo sapien
gaaacggactgacatgagaagctcc

SEQ ID NO: 967221 - DNA, 25 bp, Homo sapien
ggcaagggaaaacagccttcgagat

SEQ ID NO: 967222 - DNA, 25 bp, Homo sapien
tcctcttcgttttgcccaccagtgg

SEQ ID NO: 967223 - DNA, 25 bp, Homo sapien
tgtctgtgtagaggaaccaattagt

SEQ ID NO: 967224 - DNA, 25 bp, Homo sapien
tcagcatgcaacagctttgttagac

SEQ ID NO: 967225 - DNA, 25 bp, Homo sapien
tagtttaagcatcagcatgcaacag

SEQ ID NO: 967226 - DNA, 25 bp, Homo sapien
tgttagactctgctgttatcaacag

SEQ ID NO: 967227 - DNA, 25 bp, Homo sapien
tctgtgatccggtccacgtaccatt

SEQ ID NO: 967228 - DNA, 25 bp, Homo sapien
cggtccacgtaccatttgagcactt

SEQ ID NO: 967229 - DNA, 25 bp, Homo sapien
tctgcttctgtgatccggtccacgt

SEQ ID NO: 967230 - DNA, 25 bp, Homo sapien
gatccggtccacgtaccatttgagc

SEQ ID NO: 967231 - DNA, 25 bp, Homo sapien
tgtgcccagccagttcttggtttct

SEQ ID NO: 967232 - DNA, 25 bp, Homo sapien
tgtccattacaggtttaaaatgatg

SEQ ID NO: 967233 - DNA, 25 bp, Homo sapien
aatgtaagtgtccattacaggttta

SEQ ID NO: 967234 - DNA, 25 bp, Homo sapien
gtatgcaagtgccccagcaaaatga

SEQ ID NO: 967235 - DNA, 25 bp, Homo sapien
atgcaagtgccccagcaaaatgact

SEQ ID NO: 967236 - DNA, 25 bp, Homo sapien
aggtatccagtgtatcctgcagaaa

SEQ ID NO: 967237 - DNA, 25 bp, Homo sapien
aaataaggtatccagtgtatcctgc

SEQ ID NO: 967238 - DNA, 25 bp, Homo sapien
ttccaaataaggtatccagtgtatc

SEQ ID NO: 967239 - DNA, 25 bp, Homo sapien
caaagaatcaaacactttagaccca

SEQ ID NO: 967240 - DNA, 25 bp, Homo sapien
gggttctccatttcaaaagatcaag

SEQ ID NO: 967241 - DNA, 25 bp, Homo sapien
gatcttgtctgggtgggttctccat

SEQ ID NO: 967242 - DNA, 25 bp, Homo sapien
ttttaatttagagagacagccagtg

SEQ ID NO: 967243 - DNA, 25 bp, Homo sapien
tctgagccatcaatttcttttaatt

SEQ ID NO: 967244 - DNA, 25 bp, Homo sapien
gcaaaagaagactgtacagatctga

SEQ ID NO: 967245 - DNA, 25 bp, Homo sapien
taagatggtcatagtcagagagatg

SEQ ID NO: 967246 - DNA, 25 bp, Homo sapien
taggtttacctgtgtggtaggcaga

SEQ ID NO: 967247 - DNA, 25 bp, Homo sapien
gaatgcaggtggcttctaaagctag

SEQ ID NO: 967248 - DNA, 25 bp, Homo sapien
cacacacacctaatccacatagaat

SEQ ID NO: 967249 - DNA, 25 bp, Homo sapien
gaatgcaaactctactacccacaca

SEQ ID NO: 967250 - DNA, 25 bp, Homo sapien
gttacagctgcaataaataagtaat

SEQ ID NO: 967251 - DNA, 25 bp, Homo sapien
taaggatctcaataagaggttgatt

SEQ ID NO: 967252 - DNA, 25 bp, Homo sapien
gggtgctagccagaagtcttatatg

SEQ ID NO: 967253 - DNA, 25 bp, Homo sapien
taactactgaatgctgataaaacct

SEQ ID NO: 967254 - DNA, 25 bp, Homo sapien
taacaagcacacctgtttaggcaca

SEQ ID NO: 967255 - DNA, 25 bp, Homo sapien
ttttcatagcaatttgccaaggaga

SEQ ID NO: 967256 - DNA, 25 bp, Homo sapien
aggactcctttgtggccttcatggc

SEQ ID NO: 967257 - DNA, 25 bp, Homo sapien
agaaaagatgtaatacaaaaggact

SEQ ID NO: 967258 - DNA, 25 bp, Homo sapien
ttgaggtagcgggtagtatcctgaa

SEQ ID NO: 967259 - DNA, 25 bp, Homo sapien
gaagtttgaggtagcgggtagtatc

SEQ ID NO: 967260 - DNA, 25 bp, Homo sapien
acacaagagatagagcaacatgttg

SEQ ID NO: 967261 - DNA, 25 bp, Homo sapien
caacttccatatcacaggaaacaca

SEQ ID NO: 967262 - DNA, 25 bp, Homo sapien
agagatagagcaacatgttgagcaa

SEQ ID NO: 967263 - DNA, 25 bp, Homo sapien
gaaacacaagagatagagcaacatg

SEQ ID NO: 967264 - DNA, 25 bp, Homo sapien
ctcagcagctggaacttgagtttct

SEQ ID NO: 967265 - DNA, 25 bp, Homo sapien
tctcagcagctggaacttgagtttc

SEQ ID NO: 967266 - DNA, 25 bp, Homo sapien
tcagcagctggaacttgagtttctt

SEQ ID NO: 967267 - DNA, 25 bp, Homo sapien
taaaccccgctacaggaagcagatt

SEQ ID NO: 967268 - DNA, 25 bp, Homo sapien
ttgaatgccttggattaggaagcca

SEQ ID NO: 967269 - DNA, 25 bp, Homo sapien
gaagcagattctctactaagcaaaa

SEQ ID NO: 967270 - DNA, 25 bp, Homo sapien
cttgtttgagttgggcacttctgcc

SEQ ID NO: 967271 - DNA, 25 bp, Homo sapien
cttatgcacgatgagctcatgagtg

SEQ ID NO: 967272 - DNA, 25 bp, Homo sapien
tctggaagagtcctaccatcttctt

SEQ ID NO: 967273 - DNA, 25 bp, Homo sapien
agtgccatctggaagagtcctacca

SEQ ID NO: 967274 - DNA, 25 bp, Homo sapien
tgagctcatgagtgccatctggaag

SEQ ID NO: 967275 - DNA, 25 bp, Homo sapien
caaacaacttcttctctcctttctc

SEQ ID NO: 967276 - DNA, 25 bp, Homo sapien
ccaaacaacttcttctctcctttct

SEQ ID NO: 967277 - DNA, 25 bp, Homo sapien
aacaacttcttctctcctttctcct

SEQ ID NO: 967278 - DNA, 25 bp, Homo sapien
aacttcttctctcctttctcctttg

SEQ ID NO: 967279 - DNA, 25 bp, Homo sapien
tactgctcccaaagctagattcacc

SEQ ID NO: 967280 - DNA, 25 bp, Homo sapien
gcagtgctaagatatactcagggac

SEQ ID NO: 967281 - DNA, 25 bp, Homo sapien
aaagcccctattccttccagactgg

SEQ ID NO: 967282 - DNA, 25 bp, Homo sapien
ggtcacaatgtacactggcagtgct

SEQ ID NO: 967283 - DNA, 25 bp, Homo sapien
gtttcagcagttcagaccacctggg

SEQ ID NO: 967284 - DNA, 25 bp, Homo sapien
aaactcgaagcggatgtgtgcaccc

SEQ ID NO: 967285 - DNA, 25 bp, Homo sapien
ccccagagccgaaggagataaaatc

SEQ ID NO: 967286 - DNA, 25 bp, Homo sapien
gtgcaccccggaatttatccacagg

SEQ ID NO: 967287 - DNA, 25 bp, Homo sapien
tactgtctacaatgaacatcgtaac

SEQ ID NO: 967288 - DNA, 25 bp, Homo sapien
tctcccctttcaatagtgatatata

SEQ ID NO: 967289 - DNA, 25 bp, Homo sapien
cagggtttggccactactgtctaca

SEQ ID NO: 967290 - DNA, 25 bp, Homo sapien
tgaacatcgtaacttccacatttct

SEQ ID NO: 967291 - DNA, 25 bp, Homo sapien
tcctttcgggttacagcgtgtctct

SEQ ID NO: 967292 - DNA, 25 bp, Homo sapien
taatctctatacagcaaccacagtg

SEQ ID NO: 967293 - DNA, 25 bp, Homo sapien
cctgtggcaatgtaaagcagtgtca

SEQ ID NO: 967294 - DNA, 25 bp, Homo sapien
tagtgcagtggagaacaaagactcg

SEQ ID NO: 967295 - DNA, 25 bp, Homo sapien
tggagagattacgactgacccactc

SEQ ID NO: 967296 - DNA, 25 bp, Homo sapien
gaatctggcattcatgtcacactgt

SEQ ID NO: 967297 - DNA, 25 bp, Homo sapien
taagttgtagatgaacacactcaga

SEQ ID NO: 967298 - DNA, 25 bp, Homo sapien
taggatatcctctaagcatcttcac

SEQ ID NO: 967299 - DNA, 25 bp, Homo sapien
gcaatagctgtaaggaaactgctaa

SEQ ID NO: 967300 - DNA, 25 bp, Homo sapien
ttgttcaatgtctccgtgcaatagc

SEQ ID NO: 967301 - DNA, 25 bp, Homo sapien
caatgtctccgtgcaatagctgtaa

SEQ ID NO: 967302 - DNA, 25 bp, Homo sapien
ccgtgcaatagctgtaaggaaactg

SEQ ID NO: 967303 - DNA, 25 bp, Homo sapien
gccagatctagtacatgataacagt

SEQ ID NO: 967304 - DNA, 25 bp, Homo sapien
tgagcaatgctttccagtacagaat

SEQ ID NO: 967305 - DNA, 25 bp, Homo sapien
ggaatactagtgtttgccagatcta

SEQ ID NO: 967306 - DNA, 25 bp, Homo sapien
tcctgacgtactatatgagcaatgc

SEQ ID NO: 967307 - DNA, 25 bp, Homo sapien
atgtgtaacataagtaattgactta

SEQ ID NO: 967308 - DNA, 25 bp, Homo sapien
taacataagtaattgacttaaatac

SEQ ID NO: 967309 - DNA, 25 bp, Homo sapien
cataagtaattgacttaaatactaa

SEQ ID NO: 967310 - DNA, 25 bp, Homo sapien
tgtaacataagtaattgacttaaat

SEQ ID NO: 967311 - DNA, 25 bp, Homo sapien
ttttttcacagggatcccatgcatc

SEQ ID NO: 967312 - DNA, 25 bp, Homo sapien
tttaggctatacaactgggaccagg

SEQ ID NO: 967313 - DNA, 25 bp, Homo sapien
gcgacgatatggagtgggttacaca

SEQ ID NO: 967314 - DNA, 25 bp, Homo sapien
catcataggtgtggaagcgacgata

SEQ ID NO: 967315 - DNA, 25 bp, Homo sapien
cactgaggataacccaaagggtctg

SEQ ID NO: 967316 - DNA, 25 bp, Homo sapien
tcactgaggataacccaaagggtct

SEQ ID NO: 967317 - DNA, 25 bp, Homo sapien
ctgaggataacccaaagggtctgac

SEQ ID NO: 967318 - DNA, 25 bp, Homo sapien
actgaggataacccaaagggtctga

SEQ ID NO: 967319 - DNA, 25 bp, Homo sapien
aactctgtccattgggatgactacc

SEQ ID NO: 967320 - DNA, 25 bp, Homo sapien
tgggtaactctgtccattgggatga

SEQ ID NO: 967321 - DNA, 25 bp, Homo sapien
tcttcgaagtgggtaactctgtcca

SEQ ID NO: 967322 - DNA, 25 bp, Homo sapien
tcttcctgagatcttcgaagtgggt

SEQ ID NO: 967323 - DNA, 25 bp, Homo sapien
gctctggaatccctatctgctggcc

SEQ ID NO: 967324 - DNA, 25 bp, Homo sapien
gagaaaacagcggaagtcaacatta

SEQ ID NO: 967325 - DNA, 25 bp, Homo sapien
gacagtttaaacattaggcacccta

SEQ ID NO: 967326 - DNA, 25 bp, Homo sapien
ccccactatcttgaggtaagccatg

SEQ ID NO: 967327 - DNA, 25 bp, Homo sapien
tttattggacctcactaaaaattgc

SEQ ID NO: 967328 - DNA, 25 bp, Homo sapien
ttcgtttcaacaagaatagaataca

SEQ ID NO: 967329 - DNA, 25 bp, Homo sapien
taacaacttaggagtatgaagactt

SEQ ID NO: 967330 - DNA, 25 bp, Homo sapien
atcatagcataggaagacataccag

SEQ ID NO: 967331 - DNA, 25 bp, Homo sapien
gggagttataagtacaaccctatca

SEQ ID NO: 967332 - DNA, 25 bp, Homo sapien
caagttataacgtgcattcagcttt

SEQ ID NO: 967333 - DNA, 25 bp, Homo sapien
gttctcatggatttggtaccactca

SEQ ID NO: 967334 - DNA, 25 bp, Homo sapien
ctcatggatttggtaccactcactc

SEQ ID NO: 967335 - DNA, 25 bp, Homo sapien
ggagccagtcaagttataacgtgca

SEQ ID NO: 967336 - DNA, 25 bp, Homo sapien
acagtgggatatctaaatgagcgcc

SEQ ID NO: 967337 - DNA, 25 bp, Homo sapien
aatgagcgccgaatcttaagagggc

SEQ ID NO: 967338 - DNA, 25 bp, Homo sapien
gatggatgtccctctgcctggtaac

SEQ ID NO: 967339 - DNA, 25 bp, Homo sapien
tgaatgcatcctcccaagaggcctg

SEQ ID NO: 967340 - DNA, 25 bp, Homo sapien
ttgtctctcctgttagcaggtcagc

SEQ ID NO: 967341 - DNA, 25 bp, Homo sapien
gtcggtactggacactacaggcatt

SEQ ID NO: 967342 - DNA, 25 bp, Homo sapien
atgctaagaactgcacagccaaagg

SEQ ID NO: 967343 - DNA, 25 bp, Homo sapien
cagccaaagggtcgtcggtactgga

SEQ ID NO: 967344 - DNA, 25 bp, Homo sapien
atgtgcacggtgatataaatgtcct

SEQ ID NO: 967345 - DNA, 25 bp, Homo sapien
cggataatgtgcacggtgatataaa

SEQ ID NO: 967346 - DNA, 25 bp, Homo sapien
ttcggataatgtgcacggtgatata

SEQ ID NO: 967347 - DNA, 25 bp, Homo sapien
taatgtgcacggtgatataaatgtc

SEQ ID NO: 967348 - DNA, 25 bp, Homo sapien
cacaaagagggagcaatgtcgttcc

SEQ ID NO: 967349 - DNA, 25 bp, Homo sapien
agcaatgtcgttccggtttatcagg

SEQ ID NO: 967350 - DNA, 25 bp, Homo sapien
agcccgtttctattcagcctcaaga

SEQ ID NO: 967351 - DNA, 25 bp, Homo sapien
tttgggaagcccgtttctattcagc

SEQ ID NO: 967352 - DNA, 25 bp, Homo sapien
tacagtgccacctagatttaatgaa

SEQ ID NO: 967353 - DNA, 25 bp, Homo sapien
tgaaaatacagtgccaccgggagct

SEQ ID NO: 967354 - DNA, 25 bp, Homo sapien
taagtctccaatctgtaacacaagt

SEQ ID NO: 967355 - DNA, 25 bp, Homo sapien
tggtcaacaaacgaacagaagatct

SEQ ID NO: 967356 - DNA, 25 bp, Homo sapien
tctcatatgagaaagggcagccaat

SEQ ID NO: 967357 - DNA, 25 bp, Homo sapien
taagtatcctcaattgaagctaaag

SEQ ID NO: 967358 - DNA, 25 bp, Homo sapien
cataaacagatctctaaggaagcac

SEQ ID NO: 967359 - DNA, 25 bp, Homo sapien
gatacgtttaacagaatcaactacc

SEQ ID NO: 967360 - DNA, 25 bp, Homo sapien
ttaatacccattctacactgagtag

SEQ ID NO: 967361 - DNA, 25 bp, Homo sapien
taactacgctgtttgaagagtgtga

SEQ ID NO: 967362 - DNA, 25 bp, Homo sapien
agtgtgaggataacaattaataccc

SEQ ID NO: 967363 - DNA, 25 bp, Homo sapien
gctgatatctgggataacagaatga

SEQ ID NO: 967364 - DNA, 25 bp, Homo sapien
gaagagctaagaggatggttccagg

SEQ ID NO: 967365 - DNA, 25 bp, Homo sapien
gtggtaagatggacgaaggaataat

SEQ ID NO: 967366 - DNA, 25 bp, Homo sapien
gagctaagaggatggttccagggtg

SEQ ID NO: 967367 - DNA, 25 bp, Homo sapien
tggacgaaggaataatgagaagagc

SEQ ID NO: 967368 - DNA, 25 bp, Homo sapien
gaatacaaacgtaaggtgatctgaa

SEQ ID NO: 967369 - DNA, 25 bp, Homo sapien
caaacgtaaggtgatctgaattgtt

SEQ ID NO: 967370 - DNA, 25 bp, Homo sapien
cgtaaggtgatctgaattgtttcta

SEQ ID NO: 967371 - DNA, 25 bp, Homo sapien
gcttctcctgcattctgtcaaatgt

SEQ ID NO: 967372 - DNA, 25 bp, Homo sapien
taagtactaacaggcctggccttgc

SEQ ID NO: 967373 - DNA, 25 bp, Homo sapien
acaggcctggccttgcttagtttct

SEQ ID NO: 967374 - DNA, 25 bp, Homo sapien
accatgtaagtactaacaggcctgg

SEQ ID NO: 967375 - DNA, 25 bp, Homo sapien
catgtaagtactaacaggcctggcc

SEQ ID NO: 967376 - DNA, 25 bp, Homo sapien
cctgggagctacaaagcttaactga

SEQ ID NO: 967377 - DNA, 25 bp, Homo sapien
acagacctgtctcctaggtgcatgc

SEQ ID NO: 967378 - DNA, 25 bp, Homo sapien
caggtgcttttttaacctgggagct

SEQ ID NO: 967379 - DNA, 25 bp, Homo sapien
gcttttactgatggacacaacatct

SEQ ID NO: 967380 - DNA, 25 bp, Homo sapien
ggagtgcctttcaacaggaggcccg

SEQ ID NO: 967381 - DNA, 25 bp, Homo sapien
aagcaggagtgcctttcaacaggag

SEQ ID NO: 967382 - DNA, 25 bp, Homo sapien
agtgcctttcaacaggaggcccgag

SEQ ID NO: 967383 - DNA, 25 bp, Homo sapien
caggagtgcctttcaacaggaggcc

SEQ ID NO: 967384 - DNA, 25 bp, Homo sapien
gaatgccgtctccatctatttttgt

SEQ ID NO: 967385 - DNA, 25 bp, Homo sapien
aagttgtactccctgcacgtctggc

SEQ ID NO: 967386 - DNA, 25 bp, Homo sapien
tgctctgggccatatggaatagatg

SEQ ID NO: 967387 - DNA, 25 bp, Homo sapien
acaatccaaggagggtgtctgaatg

SEQ ID NO: 967388 - DNA, 25 bp, Homo sapien
tcacacggcagggtattccaacaga

SEQ ID NO: 967389 - DNA, 25 bp, Homo sapien
cctcacacggcagggtattccaaca

SEQ ID NO: 967390 - DNA, 25 bp, Homo sapien
acaaccagaaaggacatctacaccg

SEQ ID NO: 967391 - DNA, 25 bp, Homo sapien
acggcagggtattccaacagacctg

SEQ ID NO: 967392 - DNA, 25 bp, Homo sapien
ttccagcttgggaatgtgagccaaa

SEQ ID NO: 967393 - DNA, 25 bp, Homo sapien
cagtctagtggtgggttctttagcc

SEQ ID NO: 967394 - DNA, 25 bp, Homo sapien
gtgagccaaagattttagactcagg

SEQ ID NO: 967395 - DNA, 25 bp, Homo sapien
tcaggaaattgcctcctcagtgatg

SEQ ID NO: 967396 - DNA, 25 bp, Homo sapien
tcctcattttatgacgcagggcagg

SEQ ID NO: 967397 - DNA, 25 bp, Homo sapien
gatgtcatcgtatctattgttgtaa

SEQ ID NO: 967398 - DNA, 25 bp, Homo sapien
gcttccactggcttaaccaaagctc

SEQ ID NO: 967399 - DNA, 25 bp, Homo sapien
gacgattagttcaatgggatccatg

SEQ ID NO: 967400 - DNA, 25 bp, Homo sapien
tagtggacacatcccctttgccaca

SEQ ID NO: 967401 - DNA, 25 bp, Homo sapien
gccaacagcctcttctcttgctttg

SEQ ID NO: 967402 - DNA, 25 bp, Homo sapien
ttagtggacacatcccctttgccac

SEQ ID NO: 967403 - DNA, 25 bp, Homo sapien
cctgggccaacagcctcttctcttg

SEQ ID NO: 967404 - DNA, 25 bp, Homo sapien
aaggcctgaatgaacgggtcaatcg

SEQ ID NO: 967405 - DNA, 25 bp, Homo sapien
ccaaggcctgaatgaacgggtcaat

SEQ ID NO: 967406 - DNA, 25 bp, Homo sapien
ggcctgaatgaacgggtcaatcgca

SEQ ID NO: 967407 - DNA, 25 bp, Homo sapien
caaggcctgaatgaacgggtcaatc

SEQ ID NO: 967408 - DNA, 25 bp, Homo sapien
ggggatggctctttgccacagcaac

SEQ ID NO: 967409 - DNA, 25 bp, Homo sapien
gggggatggctctttgccacagcaa

SEQ ID NO: 967410 - DNA, 25 bp, Homo sapien
atgtactgtctaatgccaacattct

SEQ ID NO: 967411 - DNA, 25 bp, Homo sapien
tggatgtactgtctaatgccaacat

SEQ ID NO: 967412 - DNA, 25 bp, Homo sapien
actgtctaatgccaacattcttagg

SEQ ID NO: 967413 - DNA, 25 bp, Homo sapien
gctggatgtactgtctaatgccaac

SEQ ID NO: 967414 - DNA, 25 bp, Homo sapien
caggggtgagggccaccttcttcct

SEQ ID NO: 967415 - DNA, 25 bp, Homo sapien
tttcaagacagcaggggtgagggcc

SEQ ID NO: 967416 - DNA, 25 bp, Homo sapien
tttttcaagacagcaggggtgaggg

SEQ ID NO: 967417 - DNA, 25 bp, Homo sapien
tgctttttcaagacagcaggggtga

SEQ ID NO: 967418 - DNA, 25 bp, Homo sapien
taaagtctatcgtatcattcctatg

SEQ ID NO: 967419 - DNA, 25 bp, Homo sapien
tttccctggagttcataaagtctat

SEQ ID NO: 967420 - DNA, 25 bp, Homo sapien
tctatcgtatcattcctatgccttt

SEQ ID NO: 967421 - DNA, 25 bp, Homo sapien
ttttatctctaatcaccctcccacc

SEQ ID NO: 967422 - DNA, 25 bp, Homo sapien
caccatcaactgcagagacaagagc

SEQ ID NO: 967423 - DNA, 25 bp, Homo sapien
taaccaaatgcattgaggagaagca

SEQ ID NO: 967424 - DNA, 25 bp, Homo sapien
tactcattacctacaccaggtggga

SEQ ID NO: 967425 - DNA, 25 bp, Homo sapien
tcagatctgtgcatcctaaggcctc

SEQ ID NO: 967426 - DNA, 25 bp, Homo sapien
tacagcatgctgactgtgataagca

SEQ ID NO: 967427 - DNA, 25 bp, Homo sapien
tacagcttgccaatcacaaatatcc

SEQ ID NO: 967428 - DNA, 25 bp, Homo sapien
agaaacatccaaagaacaggcagct

SEQ ID NO: 967429 - DNA, 25 bp, Homo sapien
tctgagactttaatgggaaggtttc

SEQ ID NO: 967430 - DNA, 25 bp, Homo sapien
cccaggttggaacacatgaggctct

SEQ ID NO: 967431 - DNA, 25 bp, Homo sapien
ctttactgtcaaagagtgagaagat

SEQ ID NO: 967432 - DNA, 25 bp, Homo sapien
gggtgtctttcttccgatgtcgatg

SEQ ID NO: 967433 - DNA, 25 bp, Homo sapien
gattggccggttctctttactgtca

SEQ ID NO: 967434 - DNA, 25 bp, Homo sapien
tgacaccccccaacaaaaacatgat

SEQ ID NO: 967435 - DNA, 25 bp, Homo sapien
ccaacaaaaacatgatcagcatgga

SEQ ID NO: 967436 - DNA, 25 bp, Homo sapien
ccccaacaaaaacatgatcagcatg

SEQ ID NO: 967437 - DNA, 25 bp, Homo sapien
aatgacaccccccaacaaaaacatg

SEQ ID NO: 967438 - DNA, 25 bp, Homo sapien
gatgtcttccggatccaccattgcg

SEQ ID NO: 967439 - DNA, 25 bp, Homo sapien
tctttcctaggcaccaggtccagtc

SEQ ID NO: 967440 - DNA, 25 bp, Homo sapien
caccattgcgtactctttcctaggc

SEQ ID NO: 967441 - DNA, 25 bp, Homo sapien
caatcggtagagctcagtaatgctg

SEQ ID NO: 967442 - DNA, 25 bp, Homo sapien
tagacaatataactccgctggacac

SEQ ID NO: 967443 - DNA, 25 bp, Homo sapien
tataactccgctggacactgggcaa

SEQ ID NO: 967444 - DNA, 25 bp, Homo sapien
cttgttaccacagttggggtagaca

SEQ ID NO: 967445 - DNA, 25 bp, Homo sapien
gggtagacaatataactccgctgga

SEQ ID NO: 967446 - DNA, 25 bp, Homo sapien
tgttttcaaaatgtccatgttcccc

SEQ ID NO: 967447 - DNA, 25 bp, Homo sapien
aataaacactgtgatttgttttcaa

SEQ ID NO: 967448 - DNA, 25 bp, Homo sapien
catgttcccccttgctacatctcac

SEQ ID NO: 967449 - DNA, 25 bp, Homo sapien
taaacactgtgatttgttttcaaaa

SEQ ID NO: 967450 - DNA, 25 bp, Homo sapien
attcccttctgaaagagaaccaccg

SEQ ID NO: 967451 - DNA, 25 bp, Homo sapien
ccaccgtactacagtgtaagtcagc

SEQ ID NO: 967452 - DNA, 25 bp, Homo sapien
gaaagagaaccaccgtactacagtg

SEQ ID NO: 967453 - DNA, 25 bp, Homo sapien
ccttctgaaagagaaccaccgtact

SEQ ID NO: 967454 - DNA, 25 bp, Homo sapien
ccgggcagtaatgtggcgcttcacg

SEQ ID NO: 967455 - DNA, 25 bp, Homo sapien
cagccggtggaagagatcgccttca

SEQ ID NO: 967456 - DNA, 25 bp, Homo sapien
tcattcatgatgtgccacagccggt

SEQ ID NO: 967457 - DNA, 25 bp, Homo sapien
tccttcatccggtcgtgggtgaggt

SEQ ID NO: 967458 - DNA, 25 bp, Homo sapien
aacacaatactcttgtaattaactg

SEQ ID NO: 967459 - DNA, 25 bp, Homo sapien
gtaacacaatactcttgtaattaac

SEQ ID NO: 967460 - DNA, 25 bp, Homo sapien
tgtaacacaatactcttgtaattaa

SEQ ID NO: 967461 - DNA, 25 bp, Homo sapien
acacaatactcttgtaattaactgc

SEQ ID NO: 967462 - DNA, 25 bp, Homo sapien
tcttcagtgggaataaccatttcaa

SEQ ID NO: 967463 - DNA, 25 bp, Homo sapien
gagttgtttccacatggttccccag

SEQ ID NO: 967464 - DNA, 25 bp, Homo sapien
gtcttcagtgggaataaccatttca

SEQ ID NO: 967465 - DNA, 25 bp, Homo sapien
cacatggttccccagtctcttaatg

SEQ ID NO: 967466 - DNA, 25 bp, Homo sapien
cagggaaacctgacatactacttaa

SEQ ID NO: 967467 - DNA, 25 bp, Homo sapien
tacacgcaattcagtctgtgagaag

SEQ ID NO: 967468 - DNA, 25 bp, Homo sapien
tcgcagtgctgctaaaatacttgcc

SEQ ID NO: 967469 - DNA, 25 bp, Homo sapien
cattatttcatcctagtgggccata

SEQ ID NO: 967470 - DNA, 25 bp, Homo sapien
gtcagagcatatgatgccctttgca

SEQ ID NO: 967471 - DNA, 25 bp, Homo sapien
tgacatcatctttgctagcacagca

SEQ ID NO: 967472 - DNA, 25 bp, Homo sapien
ttgattaagtggagagatgcttgac

SEQ ID NO: 967473 - DNA, 25 bp, Homo sapien
cttccttggtcagagcatatgatgc

SEQ ID NO: 967474 - DNA, 25 bp, Homo sapien
ctttacacaggcatttttcaagtga

SEQ ID NO: 967475 - DNA, 25 bp, Homo sapien
tttttcaagtgaacgtagctggaag

SEQ ID NO: 967476 - DNA, 25 bp, Homo sapien
gaacgtagctggaaggaaatatacc

SEQ ID NO: 967477 - DNA, 25 bp, Homo sapien
gttctttacacaggcatttttcaag

SEQ ID NO: 967478 - DNA, 25 bp, Homo sapien
tttaaggcaaatcctctgtaccagc

SEQ ID NO: 967479 - DNA, 25 bp, Homo sapien
ttttaaggcaaatcctctgtaccag

SEQ ID NO: 967480 - DNA, 25 bp, Homo sapien
tttttaaggcaaatcctctgtacca

SEQ ID NO: 967481 - DNA, 25 bp, Homo sapien
ggccatatggaacggttcctcggaa

SEQ ID NO: 967482 - DNA, 25 bp, Homo sapien
acttctccaggatctgaactgtatc

SEQ ID NO: 967483 - DNA, 25 bp, Homo sapien
tttccaatgacaggccatatggaac

SEQ ID NO: 967484 - DNA, 25 bp, Homo sapien
tgacaggccatatggaacggttcct

SEQ ID NO: 967485 - DNA, 25 bp, Homo sapien
aaaatgataaagaatatatgaagac

SEQ ID NO: 967486 - DNA, 25 bp, Homo sapien
aaaaaatgataaagaatatatgaag

SEQ ID NO: 967487 - DNA, 25 bp, Homo sapien
aatatatgaagacaatcatgtccat

SEQ ID NO: 967488 - DNA, 25 bp, Homo sapien
agaatatatgaagacaatcatgtcc

SEQ ID NO: 967489 - DNA, 25 bp, Homo sapien
tgcttctgtcacactcgccagcctt

SEQ ID NO: 967490 - DNA, 25 bp, Homo sapien
tcttgaacacagcagtactactaat

SEQ ID NO: 967491 - DNA, 25 bp, Homo sapien
tcaatgtggccacactcattttgcc

SEQ ID NO: 967492 - DNA, 25 bp, Homo sapien
tgctttactaagatctccagtcccc

SEQ ID NO: 967493 - DNA, 25 bp, Homo sapien
ttggtgtgatccaagtttcattctc

SEQ ID NO: 967494 - DNA, 25 bp, Homo sapien
ggttggtgtgatccaagtttcattc

SEQ ID NO: 967495 - DNA, 25 bp, Homo sapien
taaaggttggtgtgatccaagtttc

SEQ ID NO: 967496 - DNA, 25 bp, Homo sapien
cttaaaggttggtgtgatccaagtt

SEQ ID NO: 967497 - DNA, 25 bp, Homo sapien
taatcactgcctgtgatcaagtgga

SEQ ID NO: 967498 - DNA, 25 bp, Homo sapien
tgcctgtgatcaagtggacacttgt

SEQ ID NO: 967499 - DNA, 25 bp, Homo sapien
aagtggacacttgtctccacctgca

SEQ ID NO: 967500 - DNA, 25 bp, Homo sapien
ttgtctgtgtaatcactgcctgtga

SEQ ID NO: 967501 - DNA, 25 bp, Homo sapien
agaagagacagcctgctctcagcat

SEQ ID NO: 967502 - DNA, 25 bp, Homo sapien
ctgataatgcagaagagacagcctg

SEQ ID NO: 967503 - DNA, 25 bp, Homo sapien
tgcagaagagacagcctgctctcag

SEQ ID NO: 967504 - DNA, 25 bp, Homo sapien
gataatgcagaagagacagcctgct

SEQ ID NO: 967505 - DNA, 25 bp, Homo sapien
tggtaataggctgtgcccacaggcc

SEQ ID NO: 967506 - DNA, 25 bp, Homo sapien
gaatagagaaatgctgtgttccatc

SEQ ID NO: 967507 - DNA, 25 bp, Homo sapien
gaagaatagagaaatgctgtgttcc

SEQ ID NO: 967508 - DNA, 25 bp, Homo sapien
gccttcatctggtaataggctgtgc

SEQ ID NO: 967509 - DNA, 25 bp, Homo sapien
cacttgacatgtgggcctcttactc

SEQ ID NO: 967510 - DNA, 25 bp, Homo sapien
tcccagtgctgacttcttaagaggt

SEQ ID NO: 967511 - DNA, 25 bp, Homo sapien
aagcatcctcctcggtcacacgtgt

SEQ ID NO: 967512 - DNA, 25 bp, Homo sapien
taccaatttttaccggctctggcca

SEQ ID NO: 967513 - DNA, 25 bp, Homo sapien
ccttttccccaagggaacatagctg

SEQ ID NO: 967514 - DNA, 25 bp, Homo sapien
gaacatagctgcactgagaacacca

SEQ ID NO: 967515 - DNA, 25 bp, Homo sapien
caagggaacatagctgcactgagaa

SEQ ID NO: 967516 - DNA, 25 bp, Homo sapien
tgagaacaccaatctctcaaccaca

SEQ ID NO: 967517 - DNA, 25 bp, Homo sapien
ggatctgggtcaagcccaggtcagc

SEQ ID NO: 967518 - DNA, 25 bp, Homo sapien
agccttttctacgtatccttcatga

SEQ ID NO: 967519 - DNA, 25 bp, Homo sapien
cttttctacgtatccttcatgaatg

SEQ ID NO: 967520 - DNA, 25 bp, Homo sapien
tgagaagccttttctacgtatcctt

SEQ ID NO: 967521 - DNA, 25 bp, Homo sapien
tcaagcggtttttcagcgattctcc

SEQ ID NO: 967522 - DNA, 25 bp, Homo sapien
actgagacatccttcacatagtcgt

SEQ ID NO: 967523 - DNA, 25 bp, Homo sapien
ttcacatagtcgttccactccctgt

SEQ ID NO: 967524 - DNA, 25 bp, Homo sapien
gacatccttcacatagtcgttccac

SEQ ID NO: 967525 - DNA, 25 bp, Homo sapien
ctgctgggtttcagtggagttgagc

SEQ ID NO: 967526 - DNA, 25 bp, Homo sapien
tgactgcttgaccagctttcatggt

SEQ ID NO: 967527 - DNA, 25 bp, Homo sapien
tatgactgcttgaccagctttcatg

SEQ ID NO: 967528 - DNA, 25 bp, Homo sapien
tttcttgacttcatgggttatgact

SEQ ID NO: 967529 - DNA, 25 bp, Homo sapien
cttcatgggttatgactgcttgacc

SEQ ID NO: 967530 - DNA, 25 bp, Homo sapien
tctaggcctaggaaatggtgcatac

SEQ ID NO: 967531 - DNA, 25 bp, Homo sapien
gctacataattggatcagggctgaa

SEQ ID NO: 967532 - DNA, 25 bp, Homo sapien
cataacctttggagccagctagagc

SEQ ID NO: 967533 - DNA, 25 bp, Homo sapien
cactggctgtggagcttcaactgca

SEQ ID NO: 967534 - DNA, 25 bp, Homo sapien
tatatgggctagagtagagtcgcag

SEQ ID NO: 967535 - DNA, 25 bp, Homo sapien
cccgagccagctttacctaggtata

SEQ ID NO: 967536 - DNA, 25 bp, Homo sapien
cggaatgatgaatgtaggaaagcct

SEQ ID NO: 967537 - DNA, 25 bp, Homo sapien
gagtcgcagacatctcctgtttgga

SEQ ID NO: 967538 - DNA, 25 bp, Homo sapien
aacgaggatattctgagtgtcttgc

SEQ ID NO: 967539 - DNA, 25 bp, Homo sapien
tctgcctaaggataggaagatcatc

SEQ ID NO: 967540 - DNA, 25 bp, Homo sapien
tagtccagaggaatcagtgaccagg

SEQ ID NO: 967541 - DNA, 25 bp, Homo sapien
tgaccaggagacgaagacattgtgc

SEQ ID NO: 967542 - DNA, 25 bp, Homo sapien
gagtttgaccactgtaaaaaggcaa

SEQ ID NO: 967543 - DNA, 25 bp, Homo sapien
tgtcactaaatgctccttggctgag

SEQ ID NO: 967544 - DNA, 25 bp, Homo sapien
aaatgttagctctatgagactaggg

SEQ ID NO: 967545 - DNA, 25 bp, Homo sapien
tattcactgctataaacccacagcc

SEQ ID NO: 967546 - DNA, 25 bp, Homo sapien
agggtcatagacagaatatgagcag

SEQ ID NO: 967547 - DNA, 25 bp, Homo sapien
tcttataagggtcatagacagaata

SEQ ID NO: 967548 - DNA, 25 bp, Homo sapien
tgtttgctgtcttataagggtcata

SEQ ID NO: 967549 - DNA, 25 bp, Homo sapien
tcagggcttcaatgaagcaagagcc

SEQ ID NO: 967550 - DNA, 25 bp, Homo sapien
tcacactgtcctgaaaactggtctt

SEQ ID NO: 967551 - DNA, 25 bp, Homo sapien
gacatctgtggcttcctagtgcaag

SEQ ID NO: 967552 - DNA, 25 bp, Homo sapien
agtcatatgtcaaagctctggagga

SEQ ID NO: 967553 - DNA, 25 bp, Homo sapien
aaccactcgggaaattcagaggcaa

SEQ ID NO: 967554 - DNA, 25 bp, Homo sapien
gctttgacttctttccagtcagtac

SEQ ID NO: 967555 - DNA, 25 bp, Homo sapien
ggctttgacttctttccagtcagta

SEQ ID NO: 967556 - DNA, 25 bp, Homo sapien
agggcgactacgtccaatcccagac

SEQ ID NO: 967557 - DNA, 25 bp, Homo sapien
tatgcatgtctcacacaacaaggga

SEQ ID NO: 967558 - DNA, 25 bp, Homo sapien
taagaatgttcatctcaaagcaggt

SEQ ID NO: 967559 - DNA, 25 bp, Homo sapien
gaataacttagactgcagggcgact

SEQ ID NO: 967560 - DNA, 25 bp, Homo sapien
tcatcttcctgcaaaccaatgtgaa

SEQ ID NO: 967561 - DNA, 25 bp, Homo sapien
tttctgagtcataacctgtttgaac

SEQ ID NO: 967562 - DNA, 25 bp, Homo sapien
gaactcatcttcctgcaaaccaatg

SEQ ID NO: 967563 - DNA, 25 bp, Homo sapien
ttctgagtcataacctgtttgaaca

SEQ ID NO: 967564 - DNA, 25 bp, Homo sapien
tgacaagccacaacaagctgagagt

SEQ ID NO: 967565 - DNA, 25 bp, Homo sapien
caatataactttagtaccaaggcca

SEQ ID NO: 967566 - DNA, 25 bp, Homo sapien
taaaaatcctgctgtactctacttg

SEQ ID NO: 967567 - DNA, 25 bp, Homo sapien
caaaactcagctaatccatgggtca

SEQ ID NO: 967568 - DNA, 25 bp, Homo sapien
tggatgcagaaacggacgcagagcc

SEQ ID NO: 967569 - DNA, 25 bp, Homo sapien
ctggatgcagaaacggacgcagagc

SEQ ID NO: 967570 - DNA, 25 bp, Homo sapien
ggacgcagagcccaatccgaaaaga

SEQ ID NO: 967571 - DNA, 25 bp, Homo sapien
gcccaatccgaaaagaattcaagat

SEQ ID NO: 967572 - DNA, 25 bp, Homo sapien
cttcctcagcctcctaaagtgctgg

SEQ ID NO: 967573 - DNA, 25 bp, Homo sapien
cataagccacaatgtctggctaatt

SEQ ID NO: 967574 - DNA, 25 bp, Homo sapien
ataggcataagccacaatgtctggc

SEQ ID NO: 967575 - DNA, 25 bp, Homo sapien
ccttcctcagcctcctaaagtgctg

SEQ ID NO: 967576 - DNA, 25 bp, Homo sapien
tttcgaccttgagtttataagaatg

SEQ ID NO: 967577 - DNA, 25 bp, Homo sapien
tgcaaaagaacaatgagtatcactt

SEQ ID NO: 967578 - DNA, 25 bp, Homo sapien
cgaccttgagtttataagaatgaga

SEQ ID NO: 967579 - DNA, 25 bp, Homo sapien
tatgcaaaagaacaatgagtatcac

SEQ ID NO: 967580 - DNA, 25 bp, Homo sapien
ccacatggtgaacacgatcttcagg

SEQ ID NO: 967581 - DNA, 25 bp, Homo sapien
agtgccctgacattgggcctgtcca

SEQ ID NO: 967582 - DNA, 25 bp, Homo sapien
cacgatcttcaggtcacattcatca

SEQ ID NO: 967583 - DNA, 25 bp, Homo sapien
catggtgaacacgatcttcaggtca

SEQ ID NO: 967584 - DNA, 25 bp, Homo sapien
ggacccctagactccaccttgagag

SEQ ID NO: 967585 - DNA, 25 bp, Homo sapien
tcaagcagaatttgggctctcccag

SEQ ID NO: 967586 - DNA, 25 bp, Homo sapien
aaaaagatgtgaacccgagggactg

SEQ ID NO: 967587 - DNA, 25 bp, Homo sapien
cactaagtagccagaagttttccca

SEQ ID NO: 967588 - DNA, 25 bp, Homo sapien
tgcctcataagtactgtggttttgt

SEQ ID NO: 967589 - DNA, 25 bp, Homo sapien
taaagtttttggatgttgcgtctgt

SEQ ID NO: 967590 - DNA, 25 bp, Homo sapien
ggatgttgcgtctgtttgcctcata

SEQ ID NO: 967591 - DNA, 25 bp, Homo sapien
tgttgtgttattgtatggcatggtg

SEQ ID NO: 967592 - DNA, 25 bp, Homo sapien
tcctcttgagaccttttataaaaga

SEQ ID NO: 967593 - DNA, 25 bp, Homo sapien
cctgctgcttacttgggctatattc

SEQ ID NO: 967594 - DNA, 25 bp, Homo sapien
gaataacaacagaaccatggagaca

SEQ ID NO: 967595 - DNA, 25 bp, Homo sapien
cacaaaaatctctgatcttcttgca

SEQ ID NO: 967596 - DNA, 25 bp, Homo sapien
taaagggcaaatatgtccagggcaa

SEQ ID NO: 967597 - DNA, 25 bp, Homo sapien
gatggcttcagatctacagtgctgt

SEQ ID NO: 967598 - DNA, 25 bp, Homo sapien
tattggcccaaacgtctaacactga

SEQ ID NO: 967599 - DNA, 25 bp, Homo sapien
aggaaagagtagttctggcccgcca

SEQ ID NO: 967600 - DNA, 25 bp, Homo sapien
gagaattcctaattagtccccttgc

SEQ ID NO: 967601 - DNA, 25 bp, Homo sapien
tgcctcaaagcctacatacaaacac

SEQ ID NO: 967602 - DNA, 25 bp, Homo sapien
ccttgcctcaaagcctacatacaaa

SEQ ID NO: 967603 - DNA, 25 bp, Homo sapien
caaacaccaacattactaaacaaat

SEQ ID NO: 967604 - DNA, 25 bp, Homo sapien
caatctgagttttaaccctctagtg

SEQ ID NO: 967605 - DNA, 25 bp, Homo sapien
tagaggtgggtcattatgttttaag

SEQ ID NO: 967606 - DNA, 25 bp, Homo sapien
tataaacagtatttagttggatttc

SEQ ID NO: 967607 - DNA, 25 bp, Homo sapien
caagtgcatttattgagaggatgat

SEQ ID NO: 967608 - DNA, 25 bp, Homo sapien
ggagcagggattaactcagacatta

SEQ ID NO: 967609 - DNA, 25 bp, Homo sapien
cagaagcttctatgccttcctggca

SEQ ID NO: 967610 - DNA, 25 bp, Homo sapien
tgtggttacatcttggtctaataag

SEQ ID NO: 967611 - DNA, 25 bp, Homo sapien
ctggattttaggcagataaagaact

SEQ ID NO: 967612 - DNA, 25 bp, Homo sapien
cccagactgggatactgtggcgtga

SEQ ID NO: 967613 - DNA, 25 bp, Homo sapien
cagcagcccagagaattgggtatta

SEQ ID NO: 967614 - DNA, 25 bp, Homo sapien
tctctgggtgcataccataatcaag

SEQ ID NO: 967615 - DNA, 25 bp, Homo sapien
ttatcatgcttagtcctcacagcag

SEQ ID NO: 967616 - DNA, 25 bp, Homo sapien
aatgaagaagcaaatgcattaacat

SEQ ID NO: 967617 - DNA, 25 bp, Homo sapien
tgaagaagcaaatgcattaacatat

SEQ ID NO: 967618 - DNA, 25 bp, Homo sapien
atgaagaagcaaatgcattaacata

SEQ ID NO: 967619 - DNA, 25 bp, Homo sapien
ctgtacacctggttagcttgaggct

SEQ ID NO: 967620 - DNA, 25 bp, Homo sapien
tacacctggttagcttgaggctcta

SEQ ID NO: 967621 - DNA, 25 bp, Homo sapien
acctggttagcttgaggctctacag

SEQ ID NO: 967622 - DNA, 25 bp, Homo sapien
tgtacacctggttagcttgaggctc

SEQ ID NO: 967623 - DNA, 25 bp, Homo sapien
ccctcaggcctcctatcacccctct

SEQ ID NO: 967624 - DNA, 25 bp, Homo sapien
cattattccacccaactccctactt

SEQ ID NO: 967625 - DNA, 25 bp, Homo sapien
tcaggcctcctatcacccctctgct

SEQ ID NO: 967626 - DNA, 25 bp, Homo sapien
aggcctcctatcacccctctgctca

SEQ ID NO: 967627 - DNA, 25 bp, Homo sapien
cctccacactcccactgcttgatgt

SEQ ID NO: 967628 - DNA, 25 bp, Homo sapien
tctgtgtcttgctttcacagcatcc

SEQ ID NO: 967629 - DNA, 25 bp, Homo sapien
ctgtgtcttgctttcacagcatcca

SEQ ID NO: 967630 - DNA, 25 bp, Homo sapien
ttgatgttctctgctttctgtgtct

SEQ ID NO: 967631 - DNA, 25 bp, Homo sapien
agtaaattgtcgctgaatcaacatc

SEQ ID NO: 967632 - DNA, 25 bp, Homo sapien
aaattgtcgctgaatcaacatcttc

SEQ ID NO: 967633 - DNA, 25 bp, Homo sapien
tggaagtctgtgtagacggcattgt

SEQ ID NO: 967634 - DNA, 25 bp, Homo sapien
ctagtaaattgtcgctgaatcaaca

SEQ ID NO: 967635 - DNA, 25 bp, Homo sapien
gaaagcctcctcctttaagacatat

SEQ ID NO: 967636 - DNA, 25 bp, Homo sapien
gtcaagattataatagggattccag

SEQ ID NO: 967637 - DNA, 25 bp, Homo sapien
gcctttcaaagccacatctcagctc

SEQ ID NO: 967638 - DNA, 25 bp, Homo sapien
cagtgattgatgctgggcctttcaa

SEQ ID NO: 967639 - DNA, 25 bp, Homo sapien
caaaatgtctaacgcaactgcactg

SEQ ID NO: 967640 - DNA, 25 bp, Homo sapien
gaaacatccgtcaagaatgagcact

SEQ ID NO: 967641 - DNA, 25 bp, Homo sapien
taccattcacagatcttccccgagg

SEQ ID NO: 967642 - DNA, 25 bp, Homo sapien
tcaaaagcaagtcaatcctggtctg

SEQ ID NO: 967643 - DNA, 25 bp, Homo sapien
taagcaagcaatgtgtgcaaggcat

SEQ ID NO: 967644 - DNA, 25 bp, Homo sapien
tgtgtgaaggacacattgtcccagc

SEQ ID NO: 967645 - DNA, 25 bp, Homo sapien
taccaagcccagttattgaataagc

SEQ ID NO: 967646 - DNA, 25 bp, Homo sapien
taatttggtggaccactctgggaac

SEQ ID NO: 967647 - DNA, 25 bp, Homo sapien
tgtaatggaacatggtgaaccaacc

SEQ ID NO: 967648 - DNA, 25 bp, Homo sapien
acttgtcagggatttgaagttcact

SEQ ID NO: 967649 - DNA, 25 bp, Homo sapien
taccaaaaacctgcacaaatctggg

SEQ ID NO: 967650 - DNA, 25 bp, Homo sapien
cataggtgtactctatacagcataa

SEQ ID NO: 967651 - DNA, 25 bp, Homo sapien
ttctatcacgaaaaggtatgtggag

SEQ ID NO: 967652 - DNA, 25 bp, Homo sapien
gctgacattctatcacgaaaaggta

SEQ ID NO: 967653 - DNA, 25 bp, Homo sapien
atgtggagtcatcttgcacaaaatc

SEQ ID NO: 967654 - DNA, 25 bp, Homo sapien
cacttaattcaagggtaagctgctg

SEQ ID NO: 967655 - DNA, 25 bp, Homo sapien
acatttttaacttgacatcttaatc

SEQ ID NO: 967656 - DNA, 25 bp, Homo sapien
tttttaacttgacatcttaatcatt

SEQ ID NO: 967657 - DNA, 25 bp, Homo sapien
catttttaacttgacatcttaatca

SEQ ID NO: 967658 - DNA, 25 bp, Homo sapien
tttaacttgacatcttaatcatttc

SEQ ID NO: 967659 - DNA, 25 bp, Homo sapien
cttcttgagcaagtgagtatgagca

SEQ ID NO: 967660 - DNA, 25 bp, Homo sapien
gccagcacagttcgggaccagactg

SEQ ID NO: 967661 - DNA, 25 bp, Homo sapien
cagagatatgaacccacgtgtaatt

SEQ ID NO: 967662 - DNA, 25 bp, Homo sapien
tagtatgcatcccatttgacccaga

SEQ ID NO: 967663 - DNA, 25 bp, Homo sapien
tgtagttgtcatgagcacggaatga

SEQ ID NO: 967664 - DNA, 25 bp, Homo sapien
atgtagttgtcatgagcacggaatg

SEQ ID NO: 967665 - DNA, 25 bp, Homo sapien
gtagttgtcatgagcacggaatgaa

SEQ ID NO: 967666 - DNA, 25 bp, Homo sapien
caaatgtctttgtctgtgcaacagc

SEQ ID NO: 967667 - DNA, 25 bp, Homo sapien
gaagagtgtgcttttgcgctcagaa

SEQ ID NO: 967668 - DNA, 25 bp, Homo sapien
caaccagtcgatggaatctgaccaa

SEQ ID NO: 967669 - DNA, 25 bp, Homo sapien
ttagtggagtaaatgcaaccagtcg

SEQ ID NO: 967670 - DNA, 25 bp, Homo sapien
ttatgtagcaaatgttatactaaga

SEQ ID NO: 967671 - DNA, 25 bp, Homo sapien
taagagcagaggatacaataaaaat

SEQ ID NO: 967672 - DNA, 25 bp, Homo sapien
ggtaggtttcttcatgacatagcag

SEQ ID NO: 967673 - DNA, 25 bp, Homo sapien
tcactgaaattcagcggttggtggt

SEQ ID NO: 967674 - DNA, 25 bp, Homo sapien
gcaaagtcggacagtttcaaaacag

SEQ ID NO: 967675 - DNA, 25 bp, Homo sapien
gattatacatcctggacaaccttgt

SEQ ID NO: 967676 - DNA, 25 bp, Homo sapien
caagggcttccctacactgtagcaa

SEQ ID NO: 967677 - DNA, 25 bp, Homo sapien
aactacaacacgctgagctttgggc

SEQ ID NO: 967678 - DNA, 25 bp, Homo sapien
cttggacaggtaggacagggcttct

SEQ ID NO: 967679 - DNA, 25 bp, Homo sapien
tgagagaaagaattgcccagcacgg

SEQ ID NO: 967680 - DNA, 25 bp, Homo sapien
ccagcacgggatgagattgcagaca

SEQ ID NO: 967681 - DNA, 25 bp, Homo sapien
gaagcatttcagcagttgcagaggc

SEQ ID NO: 967682 - DNA, 25 bp, Homo sapien
gtccatcctcactcaaagacgcaca

SEQ ID NO: 967683 - DNA, 25 bp, Homo sapien
gcacacatttattcccttcacgtca

SEQ ID NO: 967684 - DNA, 25 bp, Homo sapien
cctcactcaaagacgcacacattta

SEQ ID NO: 967685 - DNA, 25 bp, Homo sapien
catcctcactcaaagacgcacacat

SEQ ID NO: 967686 - DNA, 25 bp, Homo sapien
aagggaccacatgcttcaggctggg

SEQ ID NO: 967687 - DNA, 25 bp, Homo sapien
gctggagtatgtgcacagggccaat

SEQ ID NO: 967688 - DNA, 25 bp, Homo sapien
ggtaagcattcatcctaaagctggg

SEQ ID NO: 967689 - DNA, 25 bp, Homo sapien
gattctggccctaagtcgtatgtac

SEQ ID NO: 967690 - DNA, 25 bp, Homo sapien
taactataatcaccacgccgtacca

SEQ ID NO: 967691 - DNA, 25 bp, Homo sapien
aatcaccacgccgtaccactgaaaa

SEQ ID NO: 967692 - DNA, 25 bp, Homo sapien
cctgccttagggaaatttcacgtga

SEQ ID NO: 967693 - DNA, 25 bp, Homo sapien
cctgtagtgagaatacttaaatcta

SEQ ID NO: 967694 - DNA, 25 bp, Homo sapien
tagacatattgtatcaaacataact

SEQ ID NO: 967695 - DNA, 25 bp, Homo sapien
tccctcgtactagctaccataacag

SEQ ID NO: 967696 - DNA, 25 bp, Homo sapien
aaatttgtataatctccctcgtact

SEQ ID NO: 967697 - DNA, 25 bp, Homo sapien
catattgtatcaaacataactcaga

SEQ ID NO: 967698 - DNA, 25 bp, Homo sapien
cacatcacctaaatcactagacctg

SEQ ID NO: 967699 - DNA, 25 bp, Homo sapien
atttagaacataagcagatatctac

SEQ ID NO: 967700 - DNA, 25 bp, Homo sapien
taaatcactagacctgtcctcaatt

SEQ ID NO: 967701 - DNA, 25 bp, Homo sapien
taagcagatatctacacatcaccta

SEQ ID NO: 967702 - DNA, 25 bp, Homo sapien
ataattgcatttggccggctgcagc

SEQ ID NO: 967703 - DNA, 25 bp, Homo sapien
tacaccagtcggcagaacagggcat

SEQ ID NO: 967704 - DNA, 25 bp, Homo sapien
gggcgacccagctgaaatcaaacaa

SEQ ID NO: 967705 - DNA, 25 bp, Homo sapien
gccttgtcggagagcctggcttctt

SEQ ID NO: 967706 - DNA, 25 bp, Homo sapien
cataaatccgggatcgcagagaggg

SEQ ID NO: 967707 - DNA, 25 bp, Homo sapien
tccgaacgccagtgtcagggtatgc

SEQ ID NO: 967708 - DNA, 25 bp, Homo sapien
gaatgtcgatccgagccagagggaa

SEQ ID NO: 967709 - DNA, 25 bp, Homo sapien
ccgagcggcgcagatgttgaaattt

SEQ ID NO: 967710 - DNA, 25 bp, Homo sapien
tgtcccggcgcttcgggaaccagtg

SEQ ID NO: 967711 - DNA, 25 bp, Homo sapien
gcggtgcggggcgagagcctggtgc

SEQ ID NO: 967712 - DNA, 25 bp, Homo sapien
agcctggtgcgcagccctctgcctg

SEQ ID NO: 967713 - DNA, 25 bp, Homo sapien
gagctggctcggcaaagccccgtac

SEQ ID NO: 967714 - DNA, 25 bp, Homo sapien
cggagcgagaggggcgcgggggcaa

SEQ ID NO: 967715 - DNA, 25 bp, Homo sapien
ttaggcattttcaaccgggcggagc

SEQ ID NO: 967716 - DNA, 25 bp, Homo sapien
aggcattttcaaccgggcggagcga

SEQ ID NO: 967717 - DNA, 25 bp, Homo sapien
cagctgcgcgatgccaggattaggc

SEQ ID NO: 967718 - DNA, 25 bp, Homo sapien
cagaataaaagttcgccccgcggag

SEQ ID NO: 967719 - DNA, 25 bp, Homo sapien
ccgtatttctcgtgctccgtaggta

SEQ ID NO: 967720 - DNA, 25 bp, Homo sapien
tctcgtgctccgtaggtatccacat

SEQ ID NO: 967721 - DNA, 25 bp, Homo sapien
cacgccgtatttctcgtgctccgta

SEQ ID NO: 967722 - DNA, 25 bp, Homo sapien
tatttctcgtgctccgtaggtatcc

SEQ ID NO: 967723 - DNA, 25 bp, Homo sapien
caggatctgcgctggaggctcccga

SEQ ID NO: 967724 - DNA, 25 bp, Homo sapien
tacccggcggcgcagtcattgttct

SEQ ID NO: 967725 - DNA, 25 bp, Homo sapien
gattcactgaactaagcgaacacgc

SEQ ID NO: 967726 - DNA, 25 bp, Homo sapien
tctccggctcacaacaatgcacagt

SEQ ID NO: 967727 - DNA, 25 bp, Homo sapien
tccatattgtaatattctgtcaaag

SEQ ID NO: 967728 - DNA, 25 bp, Homo sapien
gattctggaccttattatctgatga

SEQ ID NO: 967729 - DNA, 25 bp, Homo sapien
gagaacttactatctcatgtgtgat

SEQ ID NO: 967730 - DNA, 25 bp, Homo sapien
ggtgtttagtagttgatgattttgc

SEQ ID NO: 967731 - DNA, 25 bp, Homo sapien
atactgtggtgaatagaggtgctga

SEQ ID NO: 967732 - DNA, 25 bp, Homo sapien
gggttttctgtatataagagtatgt

SEQ ID NO: 967733 - DNA, 25 bp, Homo sapien
gttagcaaggccttattcagagaca

SEQ ID NO: 967734 - DNA, 25 bp, Homo sapien
gattgtgatggcttatccttgtcta

SEQ ID NO: 967735 - DNA, 25 bp, Homo sapien
gatacttagtcttccactggagtgc

SEQ ID NO: 967736 - DNA, 25 bp, Homo sapien
cctttgttctgtgcaactgataaat

SEQ ID NO: 967737 - DNA, 25 bp, Homo sapien
gataaatccaaggtcacccttatca

SEQ ID NO: 967738 - DNA, 25 bp, Homo sapien
caaggtcacccttatcaaaattttg

SEQ ID NO: 967739 - DNA, 25 bp, Homo sapien
ggatattttggctcatggaccttca

SEQ ID NO: 967740 - DNA, 25 bp, Homo sapien
gaatgccagttgaagctgcaaccac

SEQ ID NO: 967741 - DNA, 25 bp, Homo sapien
ggtaaaggtgacagagaatgccagt

SEQ ID NO: 967742 - DNA, 25 bp, Homo sapien
gacagcagtcagcacgtacattgtt

SEQ ID NO: 967743 - DNA, 25 bp, Homo sapien
caggcttcatgaaagttcaggccct

SEQ ID NO: 967744 - DNA, 25 bp, Homo sapien
tcaggcttcatgaaagttcaggccc

SEQ ID NO: 967745 - DNA, 25 bp, Homo sapien
cagtgtcttttgttacattggccat

SEQ ID NO: 967746 - DNA, 25 bp, Homo sapien
gcagaacttgcttggcaaactgcag

SEQ ID NO: 967747 - DNA, 25 bp, Homo sapien
cctgttcaccatcaaagggcttttg

SEQ ID NO: 967748 - DNA, 25 bp, Homo sapien
tctcccagcagcttatggcctttgc

SEQ ID NO: 967749 - DNA, 25 bp, Homo sapien
tacacactcagataccgttgagaag

SEQ ID NO: 967750 - DNA, 25 bp, Homo sapien
taacttgtctacatattcaataagg

SEQ ID NO: 967751 - DNA, 25 bp, Homo sapien
tgtaacttgtctacatattcaataa

SEQ ID NO: 967752 - DNA, 25 bp, Homo sapien
cttgtctacatattcaataaggtaa

SEQ ID NO: 967753 - DNA, 25 bp, Homo sapien
cactgtaacttgtctacatattcaa

SEQ ID NO: 967754 - DNA, 25 bp, Homo sapien
gcatactgtgtgtattcttctgcct

SEQ ID NO: 967755 - DNA, 25 bp, Homo sapien
tgtcaaattatggaatggtgtttaa

SEQ ID NO: 967756 - DNA, 25 bp, Homo sapien
taattttgtgtgaaacgtagcatac

SEQ ID NO: 967757 - DNA, 25 bp, Homo sapien
aatactccatttcctcaaggtcata

SEQ ID NO: 967758 - DNA, 25 bp, Homo sapien
atacagggcacggatttgatgtggc

SEQ ID NO: 967759 - DNA, 25 bp, Homo sapien
atttcctgggcatcaagtagggtag

SEQ ID NO: 967760 - DNA, 25 bp, Homo sapien
gattgtgctgctcatacagggcacg

SEQ ID NO: 967761 - DNA, 25 bp, Homo sapien
catttcctgggcatcaagtagggta

SEQ ID NO: 967762 - DNA, 25 bp, Homo sapien
actctgccagcgcaacaatgatggg

SEQ ID NO: 967763 - DNA, 25 bp, Homo sapien
gaacatccagggtatccgtagcaag

SEQ ID NO: 967764 - DNA, 25 bp, Homo sapien
caagatacactctaataggcagcag

SEQ ID NO: 967765 - DNA, 25 bp, Homo sapien
gagcaaatggacagagaggctgcat

SEQ ID NO: 967766 - DNA, 25 bp, Homo sapien
aaaccaaatgtgcacttcttactcc

SEQ ID NO: 967767 - DNA, 25 bp, Homo sapien
aaaaccaaatgtgcacttcttactc

SEQ ID NO: 967768 - DNA, 25 bp, Homo sapien
caaaaccaaatgtgcacttcttact

SEQ ID NO: 967769 - DNA, 25 bp, Homo sapien
gcaaaaccaaatgtgcacttcttac

SEQ ID NO: 967770 - DNA, 25 bp, Homo sapien
tgaaaaaccatcagtactagggtct

SEQ ID NO: 967771 - DNA, 25 bp, Homo sapien
gtcttaacttgttgagtcccacaaa

SEQ ID NO: 967772 - DNA, 25 bp, Homo sapien
ggatatcattgtgagctagttagac

SEQ ID NO: 967773 - DNA, 25 bp, Homo sapien
gagctagttagacatagactttctg

SEQ ID NO: 967774 - DNA, 25 bp, Homo sapien
ttatcttcatcaagggtaaagagac

SEQ ID NO: 967775 - DNA, 25 bp, Homo sapien
aaggtgtctagccaggaattttatc

SEQ ID NO: 967776 - DNA, 25 bp, Homo sapien
taaagagacgatgggaaacaggatc

SEQ ID NO: 967777 - DNA, 25 bp, Homo sapien
tcatcaagggtaaagagacgatggg

SEQ ID NO: 967778 - DNA, 25 bp, Homo sapien
tggactataaccatgacctaatgat

SEQ ID NO: 967779 - DNA, 25 bp, Homo sapien
ataaccatgacctaatgatatgaaa

SEQ ID NO: 967780 - DNA, 25 bp, Homo sapien
tattccacatggactataaccatga

SEQ ID NO: 967781 - DNA, 25 bp, Homo sapien
aaccatcattgtacttcaactgtaa

SEQ ID NO: 967782 - DNA, 25 bp, Homo sapien
gagaaagcattcccgcttcaccgtc

SEQ ID NO: 967783 - DNA, 25 bp, Homo sapien
gggagaaagcattcccgcttcaccg

SEQ ID NO: 967784 - DNA, 25 bp, Homo sapien
ggagaaagcattcccgcttcaccgt

SEQ ID NO: 967785 - DNA, 25 bp, Homo sapien
gaacagctcacccaattccctgagg

SEQ ID NO: 967786 - DNA, 25 bp, Homo sapien
gagagccccatagcttcatcaacag

SEQ ID NO: 967787 - DNA, 25 bp, Homo sapien
taggcaccaagtcccatatgcaaat

SEQ ID NO: 967788 - DNA, 25 bp, Homo sapien
cagtcatcagaatggagtcctctta

SEQ ID NO: 967789 - DNA, 25 bp, Homo sapien
gcctcagaaacaccgggcacgcgtc

SEQ ID NO: 967790 - DNA, 25 bp, Homo sapien
agaaacaccgggcacgcgcccgcct

SEQ ID NO: 967791 - DNA, 25 bp, Homo sapien
gcgcccgcctcagaaacaccgggca

SEQ ID NO: 967792 - DNA, 25 bp, Homo sapien
accgggcacgcgtccgcctctgaaa

SEQ ID NO: 967793 - DNA, 25 bp, Homo sapien
ttagagccaccgggcatgcgtccgc

SEQ ID NO: 967794 - DNA, 25 bp, Homo sapien
gagccaccgggcatgcgtccgcctc

SEQ ID NO: 967795 - DNA, 25 bp, Homo sapien
cgccttagagccaccgggcatgcgt

SEQ ID NO: 967796 - DNA, 25 bp, Homo sapien
gccttagagccaccgggcatgcgtc

SEQ ID NO: 967797 - DNA, 25 bp, Homo sapien
accgggcacgcgtccgcctctgaaa

SEQ ID NO: 967798 - DNA, 25 bp, Homo sapien
gcgcccgcctcagaaacaccgggca

SEQ ID NO: 967799 - DNA, 25 bp, Homo sapien
gcctctgaaacaccgggcccgcggc

SEQ ID NO: 967800 - DNA, 25 bp, Homo sapien
agaaacaccgggcacgcgcccgcct

SEQ ID NO: 967801 - DNA, 25 bp, Homo sapien
tattgaccatcccacaatgacatca

SEQ ID NO: 967802 - DNA, 25 bp, Homo sapien
taggcatgtgtattgaccatcccac

SEQ ID NO: 967803 - DNA, 25 bp, Homo sapien
gagaggataggcatgtgtattgacc

SEQ ID NO: 967804 - DNA, 25 bp, Homo sapien
catcccacaatgacatcacacagtg

SEQ ID NO: 967805 - DNA, 25 bp, Homo sapien
tcaattgtgacatcctgaagatggc

SEQ ID NO: 967806 - DNA, 25 bp, Homo sapien
tgacatcctgaagatggctgaatgg

SEQ ID NO: 967807 - DNA, 25 bp, Homo sapien
tgtgacatcctgaagatggctgaat

SEQ ID NO: 967808 - DNA, 25 bp, Homo sapien
attgtgacatcctgaagatggctga

SEQ ID NO: 967809 - DNA, 25 bp, Homo sapien
gactccagtggccttgctttggtac

SEQ ID NO: 967810 - DNA, 25 bp, Homo sapien
tgtctgggactccagtggccttgct

SEQ ID NO: 967811 - DNA, 25 bp, Homo sapien
gccttgctttggtactgttgaccat

SEQ ID NO: 967812 - DNA, 25 bp, Homo sapien
agtggccttgctttggtactgttga

SEQ ID NO: 967813 - DNA, 25 bp, Homo sapien
tcccctctggtcctattccaaagtc

SEQ ID NO: 967814 - DNA, 25 bp, Homo sapien
tggccctctgtgatgtcaatttggt

SEQ ID NO: 967815 - DNA, 25 bp, Homo sapien
ggcatcctcttgagcagggtcctct

SEQ ID NO: 967816 - DNA, 25 bp, Homo sapien
ctctgaagatggttctggtctgatg

SEQ ID NO: 967817 - DNA, 25 bp, Homo sapien
ggtccatggaaagcaaacacccttg

SEQ ID NO: 967818 - DNA, 25 bp, Homo sapien
tgctggctcagccatagttctctgt

SEQ ID NO: 967819 - DNA, 25 bp, Homo sapien
ctgctggctcagccatagttctctg

SEQ ID NO: 967820 - DNA, 25 bp, Homo sapien
ctggctcagccatagttctctgttc

SEQ ID NO: 967821 - DNA, 25 bp, Homo sapien
gctggctcagccatagttctctgtt

SEQ ID NO: 967822 - DNA, 25 bp, Homo sapien
cttgtcccaacctccataatctgtt

SEQ ID NO: 967823 - DNA, 25 bp, Homo sapien
tgcaatactgggagggaaacatcca

SEQ ID NO: 967824 - DNA, 25 bp, Homo sapien
tatctgcattgatgaccaaaggtca

SEQ ID NO: 967825 - DNA, 25 bp, Homo sapien
ccaaaggtcataggggttactctct

SEQ ID NO: 967826 - DNA, 25 bp, Homo sapien
aatggcactgaagcattgtgcatac

SEQ ID NO: 967827 - DNA, 25 bp, Homo sapien
gcctgttggttaattcagtgactca

SEQ ID NO: 967828 - DNA, 25 bp, Homo sapien
gtgttctgtgcccaagaataaacca

SEQ ID NO: 967829 - DNA, 25 bp, Homo sapien
tcgattatgacccaacccctggagc

SEQ ID NO: 967830 - DNA, 25 bp, Homo sapien
tcaactcttacacctcactggctag

SEQ ID NO: 967831 - DNA, 25 bp, Homo sapien
taaatgtgataagcctggtacggtc

SEQ ID NO: 967832 - DNA, 25 bp, Homo sapien
cggcactcggtcacaaaagcctttc

SEQ ID NO: 967833 - DNA, 25 bp, Homo sapien
tacggtcaattcagtttggcatagg

SEQ ID NO: 967834 - DNA, 25 bp, Homo sapien
taaatcttttagcagtctcagcagt

SEQ ID NO: 967835 - DNA, 25 bp, Homo sapien
gaagctcatgacgagatgggaagat

SEQ ID NO: 967836 - DNA, 25 bp, Homo sapien
tctgcttctctctacagtcctgttt

SEQ ID NO: 967837 - DNA, 25 bp, Homo sapien
ggaagtggaagctcatgacgagatg

SEQ ID NO: 967838 - DNA, 25 bp, Homo sapien
tcatgacgagatgggaagatccatt

SEQ ID NO: 967839 - DNA, 25 bp, Homo sapien
tggtttgctgaagcaatgagacatt

SEQ ID NO: 967840 - DNA, 25 bp, Homo sapien
tctgaagagcactctagatgaaggc

SEQ ID NO: 967841 - DNA, 25 bp, Homo sapien
ggccataaacgctccagtaccacat

SEQ ID NO: 967842 - DNA, 25 bp, Homo sapien
gaagcaatgagacatttgtcacaat

SEQ ID NO: 967843 - DNA, 25 bp, Homo sapien
tgaggatgcgaccttagaatggaga

SEQ ID NO: 967844 - DNA, 25 bp, Homo sapien
gaggagctgttgcaagtcttaagtg

SEQ ID NO: 967845 - DNA, 25 bp, Homo sapien
aattgaatatctaagtgccacgtac

SEQ ID NO: 967846 - DNA, 25 bp, Homo sapien
gaagctcgggttgatcatatcaggc

SEQ ID NO: 967847 - DNA, 25 bp, Homo sapien
cctgccgcagaacgactaagtggat

SEQ ID NO: 967848 - DNA, 25 bp, Homo sapien
taaatagcatctttgagtaggccgt

SEQ ID NO: 967849 - DNA, 25 bp, Homo sapien
aatgcaaagcacacgtttccagggc

SEQ ID NO: 967850 - DNA, 25 bp, Homo sapien
tgtataggccctgtcactgagttgc

SEQ ID NO: 967851 - DNA, 25 bp, Homo sapien
tattgctacttaaggcgtcgtggcc

SEQ ID NO: 967852 - DNA, 25 bp, Homo sapien
gactctcgtcatagggcatactcgc

SEQ ID NO: 967853 - DNA, 25 bp, Homo sapien
tcccgcgctagagagaaacatgtat

SEQ ID NO: 967854 - DNA, 25 bp, Homo sapien
gttttcgatcacagctcttcacggg

SEQ ID NO: 967855 - DNA, 25 bp, Homo sapien
taaaaagtgcagctccatcggctga

SEQ ID NO: 967856 - DNA, 25 bp, Homo sapien
ggctgatcctcgctaagctccgact

SEQ ID NO: 967857 - DNA, 25 bp, Homo sapien
ggcgtcccacgatgccgaagaacaa

SEQ ID NO: 967858 - DNA, 25 bp, Homo sapien
gagtcttccatgcttcggcacggtg

SEQ ID NO: 967859 - DNA, 25 bp, Homo sapien
tttagatctggcgtgcgaaccggac

SEQ ID NO: 967860 - DNA, 25 bp, Homo sapien
tgggcgctgctcctcgcgcgattta

SEQ ID NO: 967861 - DNA, 25 bp, Homo sapien
gaacgggtccttgggcctgagagtg

SEQ ID NO: 967862 - DNA, 25 bp, Homo sapien
actacaattcccagcgtgccctggg

SEQ ID NO: 967863 - DNA, 25 bp, Homo sapien
gagttgagcccgtgccgtcactggc

SEQ ID NO: 967864 - DNA, 25 bp, Homo sapien
gcgatctcgcccgatctctccccga

SEQ ID NO: 967865 - DNA, 25 bp, Homo sapien
gtcagagttcctttctcggcggcga

SEQ ID NO: 967866 - DNA, 25 bp, Homo sapien
cgatctctccccgaccacgggtggg

SEQ ID NO: 967867 - DNA, 25 bp, Homo sapien
agaaacgcgttctcctttgtgctgc

SEQ ID NO: 967868 - DNA, 25 bp, Homo sapien
tctagcacctctgcgaccacccgag

SEQ ID NO: 967869 - DNA, 25 bp, Homo sapien
accacccgaggcgacctcctgctca

SEQ ID NO: 967870 - DNA, 25 bp, Homo sapien
tcctgctcacggggggaagaaacgc

SEQ ID NO: 967871 - DNA, 25 bp, Homo sapien
tgatctagtaagcacctgtaaagca

SEQ ID NO: 967872 - DNA, 25 bp, Homo sapien
gagcttgagctgaaacgcacttcct

SEQ ID NO: 967873 - DNA, 25 bp, Homo sapien
ggatagttcaccctttcagaatgct

SEQ ID NO: 967874 - DNA, 25 bp, Homo sapien
gaagactgaagaggaacagaatcac

SEQ ID NO: 967875 - DNA, 25 bp, Homo sapien
tgtgaccttaagcatctcaccctgt

SEQ ID NO: 967876 - DNA, 25 bp, Homo sapien
tgtgttaggttcaaacaggctgttc

SEQ ID NO: 967877 - DNA, 25 bp, Homo sapien
tataatgagtgttccagtgacttct

SEQ ID NO: 967878 - DNA, 25 bp, Homo sapien
ccctgtctgcctaaacttttctgga

SEQ ID NO: 967879 - DNA, 25 bp, Homo sapien
cttgtgcattgaaagatactttgca

SEQ ID NO: 967880 - DNA, 25 bp, Homo sapien
gggaggtaagatcatccccagttga

SEQ ID NO: 967881 - DNA, 25 bp, Homo sapien
gtcagatgttcaatgggaggtaaga

SEQ ID NO: 967882 - DNA, 25 bp, Homo sapien
ccaaaaatgtctcagacatagtcag

SEQ ID NO: 967883 - DNA, 25 bp, Homo sapien
gtagcagtggttatattgcttataa

SEQ ID NO: 967884 - DNA, 25 bp, Homo sapien
tactattgaaactggtgagttctga

SEQ ID NO: 967885 - DNA, 25 bp, Homo sapien
tttatcctggattaacttagataac

SEQ ID NO: 967886 - DNA, 25 bp, Homo sapien
ctctagacacagtttttatcctgga

SEQ ID NO: 967887 - DNA, 25 bp, Homo sapien
cattcagttcagctattgggagttc

SEQ ID NO: 967888 - DNA, 25 bp, Homo sapien
ttaacatctgagagcagtaacactg

SEQ ID NO: 967889 - DNA, 25 bp, Homo sapien
gatctagttcccctggaaaagctgc

SEQ ID NO: 967890 - DNA, 25 bp, Homo sapien
ccatgagaccttatagctgtactta

SEQ ID NO: 967891 - DNA, 25 bp, Homo sapien
tactcttgctgtaggtcgccgtgag

SEQ ID NO: 967892 - DNA, 25 bp, Homo sapien
caaatccgtagacttgtttctttga

SEQ ID NO: 967893 - DNA, 25 bp, Homo sapien
ttgatactcttgctgtaggtcgccg

SEQ ID NO: 967894 - DNA, 25 bp, Homo sapien
gtttctttgatactcttgctgtagg

SEQ ID NO: 967895 - DNA, 25 bp, Homo sapien
tggtaactgctagacaagggtggct

SEQ ID NO: 967896 - DNA, 25 bp, Homo sapien
tagtaaacgccccaaaatgaggcag

SEQ ID NO: 967897 - DNA, 25 bp, Homo sapien
catcttttatgtacagcagagggca

SEQ ID NO: 967898 - DNA, 25 bp, Homo sapien
catggctcaaggcagatcaggtagt

SEQ ID NO: 967899 - DNA, 25 bp, Homo sapien
cagtcaaggtataagaaagggttct

SEQ ID NO: 967900 - DNA, 25 bp, Homo sapien
caaaggatttgaggcatctcaccag

SEQ ID NO: 967901 - DNA, 25 bp, Homo sapien
gaaggacttacatgccatatggagg

SEQ ID NO: 967902 - DNA, 25 bp, Homo sapien
taaagcctcctgcaattagaatggt

SEQ ID NO: 967903 - DNA, 25 bp, Homo sapien
tctgttgtgctagagatacatctcc

SEQ ID NO: 967904 - DNA, 25 bp, Homo sapien
atgatgaccctttcaccgcttccaa

SEQ ID NO: 967905 - DNA, 25 bp, Homo sapien
cagcttgaaggtctttatctagcct

SEQ ID NO: 967906 - DNA, 25 bp, Homo sapien
tcctccctccttacagcttgaaggt

SEQ ID NO: 967907 - DNA, 25 bp, Homo sapien
tgatgaccctttcaccgcttccaat

SEQ ID NO: 967908 - DNA, 25 bp, Homo sapien
agcatcagctgagcaccaacatggg

SEQ ID NO: 967909 - DNA, 25 bp, Homo sapien
caattcactggataggcaacttcag

SEQ ID NO: 967910 - DNA, 25 bp, Homo sapien
tggcaccaagagattgtaaaaacaa

SEQ ID NO: 967911 - DNA, 25 bp, Homo sapien
tctggcatgcatggatatgggaaca

SEQ ID NO: 967912 - DNA, 25 bp, Homo sapien
cctgggctaagggcttgacccacag

SEQ ID NO: 967913 - DNA, 25 bp, Homo sapien
tgggctaagggcttgacccacaggg

SEQ ID NO: 967914 - DNA, 25 bp, Homo sapien
ctaagggcttgacccacagggtgca

SEQ ID NO: 967915 - DNA, 25 bp, Homo sapien
ctgggctaagggcttgacccacagg

SEQ ID NO: 967916 - DNA, 25 bp, Homo sapien
ggctgttggatcttggagctacctg

SEQ ID NO: 967917 - DNA, 25 bp, Homo sapien
tggcttctagtaaggccactgagct

SEQ ID NO: 967918 - DNA, 25 bp, Homo sapien
tcttggagctacctggaactaggag

SEQ ID NO: 967919 - DNA, 25 bp, Homo sapien
gccctggcttctagtaaggccactg

SEQ ID NO: 967920 - DNA, 25 bp, Homo sapien
gaatccattgcttagtggactctga

SEQ ID NO: 967921 - DNA, 25 bp, Homo sapien
gcttagtggactctgatgatgcagc

SEQ ID NO: 967922 - DNA, 25 bp, Homo sapien
ctttgtggaggaatccattgcttag

SEQ ID NO: 967923 - DNA, 25 bp, Homo sapien
atgcagctcgtccagtcaaggtcca

SEQ ID NO: 967924 - DNA, 25 bp, Homo sapien
aaacttcccatatccttgtaagagt

SEQ ID NO: 967925 - DNA, 25 bp, Homo sapien
tgagccccctaaatggcctgtttct

SEQ ID NO: 967926 - DNA, 25 bp, Homo sapien
gagatgagccccctaaatggcctgt

SEQ ID NO: 967927 - DNA, 25 bp, Homo sapien
tccttgcaggcacgggctggccaag

SEQ ID NO: 967928 - DNA, 25 bp, Homo sapien
cttgagggttcgtagagcatctttg

SEQ ID NO: 967929 - DNA, 25 bp, Homo sapien
tctttgtggggctgaaattcctgcc

SEQ ID NO: 967930 - DNA, 25 bp, Homo sapien
tagtttttgaggactcctcttgagg

SEQ ID NO: 967931 - DNA, 25 bp, Homo sapien
gagaacctgtgggatagtttttgag

SEQ ID NO: 967932 - DNA, 25 bp, Homo sapien
tattaacaggatatcatcgtagaca

SEQ ID NO: 967933 - DNA, 25 bp, Homo sapien
tcatcgtagacaaaagccagggcag

SEQ ID NO: 967934 - DNA, 25 bp, Homo sapien
aatattaacaggatatcatcgtaga

SEQ ID NO: 967935 - DNA, 25 bp, Homo sapien
caggatatcatcgtagacaaaagcc

SEQ ID NO: 967936 - DNA, 25 bp, Homo sapien
cctgatgggctggagtcattgccag

SEQ ID NO: 967937 - DNA, 25 bp, Homo sapien
ctgtggtgcacacactacagtgaca

SEQ ID NO: 967938 - DNA, 25 bp, Homo sapien
ggggcaggtgctctggcccggccgc

SEQ ID NO: 967939 - DNA, 25 bp, Homo sapien
tgacagccttggcctgatgggctgg

SEQ ID NO: 967940 - DNA, 25 bp, Homo sapien
aaaagctgaggcctgttgtactact

SEQ ID NO: 967941 - DNA, 25 bp, Homo sapien
tcttccttagactatcttcaaaagc

SEQ ID NO: 967942 - DNA, 25 bp, Homo sapien
gtcccactatctttgagaataaaat

SEQ ID NO: 967943 - DNA, 25 bp, Homo sapien
tatttgatagggaactgtgatttga

SEQ ID NO: 967944 - DNA, 25 bp, Homo sapien
tctgctctgatgagctccacattcc

SEQ ID NO: 967945 - DNA, 25 bp, Homo sapien
aggctgctgtatccctctgctctga

SEQ ID NO: 967946 - DNA, 25 bp, Homo sapien
ccagaaggaggcaggtccaacttca

SEQ ID NO: 967947 - DNA, 25 bp, Homo sapien
ttcatgcccaggctgctgtatccct

SEQ ID NO: 967948 - DNA, 25 bp, Homo sapien
ctgtctccccctcaattatgctatt

SEQ ID NO: 967949 - DNA, 25 bp, Homo sapien
tgtctccccctcaattatgctattt

SEQ ID NO: 967950 - DNA, 25 bp, Homo sapien
caattatgctatttctatcagtgcc

SEQ ID NO: 967951 - DNA, 25 bp, Homo sapien
ttgatccacagggatgggctaccga

SEQ ID NO: 967952 - DNA, 25 bp, Homo sapien
tttgagaactctctcttgatccaca

SEQ ID NO: 967953 - DNA, 25 bp, Homo sapien
ttcatttgagaactctctcttgatc

SEQ ID NO: 967954 - DNA, 25 bp, Homo sapien
cacagggatgggctaccgatagcca

SEQ ID NO: 967955 - DNA, 25 bp, Homo sapien
tctgtgtcactattgctgcccttgt

SEQ ID NO: 967956 - DNA, 25 bp, Homo sapien
taatatgtgtgaccattcacagctc

SEQ ID NO: 967957 - DNA, 25 bp, Homo sapien
gcctgaggtcctagagaagttctca

SEQ ID NO: 967958 - DNA, 25 bp, Homo sapien
catttctggacacaaccttgcttgg

SEQ ID NO: 967959 - DNA, 25 bp, Homo sapien
catggcatgctttttcatttgtgtc

SEQ ID NO: 967960 - DNA, 25 bp, Homo sapien
gaccatggcatgctttttcatttgt

SEQ ID NO: 967961 - DNA, 25 bp, Homo sapien
acgatattgattattgattcttcct

SEQ ID NO: 967962 - DNA, 25 bp, Homo sapien
cagtggtagtttaatggggatagta

SEQ ID NO: 967963 - DNA, 25 bp, Homo sapien
tcgggatggtcaacagagctcttct

SEQ ID NO: 967964 - DNA, 25 bp, Homo sapien
ctctttgtgagtcagattttgaatc

SEQ ID NO: 967965 - DNA, 25 bp, Homo sapien
agtcattttcctatacagatcatca

SEQ ID NO: 967966 - DNA, 25 bp, Homo sapien
tggcttgttattaaagctgagtgag

SEQ ID NO: 967967 - DNA, 25 bp, Homo sapien
agatctctttgctcctcatgtgcaa

SEQ ID NO: 967968 - DNA, 25 bp, Homo sapien
gtgttagacccggagccatctgctt

SEQ ID NO: 967969 - DNA, 25 bp, Homo sapien
tgtttgagcatgtccccatctcctc

SEQ ID NO: 967970 - DNA, 25 bp, Homo sapien
aaactgacatgtttgagcatgtccc

SEQ ID NO: 967971 - DNA, 25 bp, Homo sapien
ttgtagagtaataaacctatctttc

SEQ ID NO: 967972 - DNA, 25 bp, Homo sapien
tgtagagtaataaacctatctttcc

SEQ ID NO: 967973 - DNA, 25 bp, Homo sapien
tgaggatacacggacttcatcttgt

SEQ ID NO: 967974 - DNA, 25 bp, Homo sapien
tgggctctatggtgatgtgactgat

SEQ ID NO: 967975 - DNA, 25 bp, Homo sapien
tcttgtaatggaagatgtctcccag

SEQ ID NO: 967976 - DNA, 25 bp, Homo sapien
gaaccatgtgtagtgagctcctgtc

SEQ ID NO: 967977 - DNA, 25 bp, Homo sapien
agctcacaccttccaagcccaggag

SEQ ID NO: 967978 - DNA, 25 bp, Homo sapien
catttgcctggacggtgttgtggct

SEQ ID NO: 967979 - DNA, 25 bp, Homo sapien
aggactggccagagctcacaccttc

SEQ ID NO: 967980 - DNA, 25 bp, Homo sapien
cccaggagccatttgcctggacggt

SEQ ID NO: 967981 - DNA, 25 bp, Homo sapien
atttcatctacgtagaaagggaggt

SEQ ID NO: 967982 - DNA, 25 bp, Homo sapien
tcagtggaagttctcttgttagcta

SEQ ID NO: 967983 - DNA, 25 bp, Homo sapien
cagtggaagttctcttgttagctaa

SEQ ID NO: 967984 - DNA, 25 bp, Homo sapien
ttcagtggaagttctcttgttagct

SEQ ID NO: 967985 - DNA, 25 bp, Homo sapien
ctacttgaattcccatgtctatatt

SEQ ID NO: 967986 - DNA, 25 bp, Homo sapien
tacaaagaataacggcaagcactgg

SEQ ID NO: 967987 - DNA, 25 bp, Homo sapien
cagcattgatcttggtgaacacgac

SEQ ID NO: 967988 - DNA, 25 bp, Homo sapien
gagcagctacatgggacaggaccag

SEQ ID NO: 967989 - DNA, 25 bp, Homo sapien
tgaacacgacgagcagtccaggaaa

SEQ ID NO: 967990 - DNA, 25 bp, Homo sapien
ctcctattctggagattgcctgtcc

SEQ ID NO: 967991 - DNA, 25 bp, Homo sapien
aattttggctttcgtcacaatttct

SEQ ID NO: 967992 - DNA, 25 bp, Homo sapien
ctattctggagattgcctgtccacc

SEQ ID NO: 967993 - DNA, 25 bp, Homo sapien
caattttggctttcgtcacaatttc

SEQ ID NO: 967994 - DNA, 25 bp, Homo sapien
gcttactgggtaaggcaatacccca

SEQ ID NO: 967995 - DNA, 25 bp, Homo sapien
tgggtaaggcaataccccaccctgc

SEQ ID NO: 967996 - DNA, 25 bp, Homo sapien
acaggaacaaagagacgttgtagca

SEQ ID NO: 967997 - DNA, 25 bp, Homo sapien
tgttgataataagagtgactgacag

SEQ ID NO: 967998 - DNA, 25 bp, Homo sapien
aattcattattaagggctacatgaa

SEQ ID NO: 967999 - DNA, 25 bp, Homo sapien
caaagagacgttgtagcagctccaa

SEQ ID NO: 968000 - DNA, 25 bp, Homo sapien
caagtcagaaacaagggcacttaca

SEQ ID NO: 968001 - DNA, 25 bp, Homo sapien
tacaaagtaatcaatagaagggcac

SEQ ID NO: 968002 - DNA, 25 bp, Homo sapien
tctacattgccttgatttaagagat

SEQ ID NO: 968003 - DNA, 25 bp, Homo sapien
atccatgacaaaagtttcaaagtcc

SEQ ID NO: 968004 - DNA, 25 bp, Homo sapien
tgggcttcttgcctccactgtgggc

SEQ ID NO: 968005 - DNA, 25 bp, Homo sapien
gagcatgggcttcttgcctccactg

SEQ ID NO: 968006 - DNA, 25 bp, Homo sapien
catgggcttcttgcctccactgtgg

SEQ ID NO: 968007 - DNA, 25 bp, Homo sapien
ggcttcttgcctccactgtgggcca

SEQ ID NO: 968008 - DNA, 25 bp, Homo sapien
taagagtaatatttggccctatagc

SEQ ID NO: 968009 - DNA, 25 bp, Homo sapien
tatttggccctatagcccatgaggt

SEQ ID NO: 968010 - DNA, 25 bp, Homo sapien
gactgccctagacatgaggtaagag

SEQ ID NO: 968011 - DNA, 25 bp, Homo sapien
tccaaaccatggaagtgactgccct

SEQ ID NO: 968012 - DNA, 25 bp, Homo sapien
aaagacctgaagtttcatatcagct

SEQ ID NO: 968013 - DNA, 25 bp, Homo sapien
aagacctgaagtttcatatcagctg

SEQ ID NO: 968014 - DNA, 25 bp, Homo sapien
tttgcaaagtactctattagaatag

SEQ ID NO: 968015 - DNA, 25 bp, Homo sapien
tcatttgcaaagtactctattagaa

SEQ ID NO: 968016 - DNA, 25 bp, Homo sapien
tgcaaagtactctattagaatagaa

SEQ ID NO: 968017 - DNA, 25 bp, Homo sapien
aatcatttgcaaagtactctattag

SEQ ID NO: 968018 - DNA, 25 bp, Homo sapien
cctggttccggtgatgtgttggtaa

SEQ ID NO: 968019 - DNA, 25 bp, Homo sapien
ccctgcaaaatcaatggggcacctg

SEQ ID NO: 968020 - DNA, 25 bp, Homo sapien
aaatcaatggggcacctggttccgg

SEQ ID NO: 968021 - DNA, 25 bp, Homo sapien
atgtgttggtaagaagtacgtccta

SEQ ID NO: 968022 - DNA, 25 bp, Homo sapien
tcaaagtaaatgcaccccaacagtc

SEQ ID NO: 968023 - DNA, 25 bp, Homo sapien
aagtaaatgcaccccaacagtcctt

SEQ ID NO: 968024 - DNA, 25 bp, Homo sapien
caaagtaaatgcaccccaacagtcc

SEQ ID NO: 968025 - DNA, 25 bp, Homo sapien
aatcaaagtaaatgcaccccaacag

SEQ ID NO: 968026 - DNA, 25 bp, Homo sapien
ggctactctgcatataaggaaatct

SEQ ID NO: 968027 - DNA, 25 bp, Homo sapien
taagccagggtcaatattatacctt

SEQ ID NO: 968028 - DNA, 25 bp, Homo sapien
cccaaggcattactttggaactttg

SEQ ID NO: 968029 - DNA, 25 bp, Homo sapien
tctccaacagtttgttaagccaaat

SEQ ID NO: 968030 - DNA, 25 bp, Homo sapien
cttttgcagaggatctctgttgctg

SEQ ID NO: 968031 - DNA, 25 bp, Homo sapien
ttttgcagaggatctctgttgctga

SEQ ID NO: 968032 - DNA, 25 bp, Homo sapien
ccaacttttgcagaggatctctgtt

SEQ ID NO: 968033 - DNA, 25 bp, Homo sapien
aacttttgcagaggatctctgttgc

SEQ ID NO: 968034 - DNA, 25 bp, Homo sapien
acaccaagtcgcctggtgcttctgc

SEQ ID NO: 968035 - DNA, 25 bp, Homo sapien
gcttctcacaccaagtcgcctggtg

SEQ ID NO: 968036 - DNA, 25 bp, Homo sapien
accaagtcgcctggtgcttctgcat

SEQ ID NO: 968037 - DNA, 25 bp, Homo sapien
tctcacaccaagtcgcctggtgctt

SEQ ID NO: 968038 - DNA, 25 bp, Homo sapien
gctcatcgaagatgcgcacaatctg

SEQ ID NO: 968039 - DNA, 25 bp, Homo sapien
tgttcatccaagtcagccactctga

SEQ ID NO: 968040 - DNA, 25 bp, Homo sapien
tgctcactaaacaggtccaagtggt

SEQ ID NO: 968041 - DNA, 25 bp, Homo sapien
aacataaacagttaggccacttgcc

SEQ ID NO: 968042 - DNA, 25 bp, Homo sapien
cactggttacaagcaggcttataaa

SEQ ID NO: 968043 - DNA, 25 bp, Homo sapien
cccaccactggttacaagcaggctt

SEQ ID NO: 968044 - DNA, 25 bp, Homo sapien
ccaccactggttacaagcaggctta

SEQ ID NO: 968045 - DNA, 25 bp, Homo sapien
accactggttacaagcaggcttata

SEQ ID NO: 968046 - DNA, 25 bp, Homo sapien
gagaaaggactaatatactcctata

SEQ ID NO: 968047 - DNA, 25 bp, Homo sapien
agagaaaggactaatatactcctat

SEQ ID NO: 968048 - DNA, 25 bp, Homo sapien
tagtaggaaaatacaactaatatac

SEQ ID NO: 968049 - DNA, 25 bp, Homo sapien
acttttatcgtatccagggcaaagt

SEQ ID NO: 968050 - DNA, 25 bp, Homo sapien
atgaagttctataagggaagacttt

SEQ ID NO: 968051 - DNA, 25 bp, Homo sapien
cttttatcgtatccagggcaaagtt

SEQ ID NO: 968052 - DNA, 25 bp, Homo sapien
atggccctgcagttggcaggcccag

SEQ ID NO: 968053 - DNA, 25 bp, Homo sapien
ggccctgcagttggcaggcccagtg

SEQ ID NO: 968054 - DNA, 25 bp, Homo sapien
tcagagattggtacatggccctgca

SEQ ID NO: 968055 - DNA, 25 bp, Homo sapien
agagattggtacatggccctgcagt

SEQ ID NO: 968056 - DNA, 25 bp, Homo sapien
aaatggtcattctcattactacagt

SEQ ID NO: 968057 - DNA, 25 bp, Homo sapien
aatggtcattctcattactacagtg

SEQ ID NO: 968058 - DNA, 25 bp, Homo sapien
ggaaatggtcattctcattactaca

SEQ ID NO: 968059 - DNA, 25 bp, Homo sapien
tgagctctggtctggtgtaaacaaa

SEQ ID NO: 968060 - DNA, 25 bp, Homo sapien
tatggacccttgagtgcagcagact

SEQ ID NO: 968061 - DNA, 25 bp, Homo sapien
ttctgaagctactgagcctgcctct

SEQ ID NO: 968062 - DNA, 25 bp, Homo sapien
gaaaagtgacttccaaggtagctgt

SEQ ID NO: 968063 - DNA, 25 bp, Homo sapien
gagtggtgccccttgactgtgaaac

SEQ ID NO: 968064 - DNA, 25 bp, Homo sapien
gactttgtgtggaataaccaaggcc

SEQ ID NO: 968065 - DNA, 25 bp, Homo sapien
gaagagtcctgcatattaactagca

SEQ ID NO: 968066 - DNA, 25 bp, Homo sapien
taggagtaggtcatggttcccctca

SEQ ID NO: 968067 - DNA, 25 bp, Homo sapien
acagaaggccatgtggggaccgctc

SEQ ID NO: 968068 - DNA, 25 bp, Homo sapien
ggccatgcagctctgcttacagctc

SEQ ID NO: 968069 - DNA, 25 bp, Homo sapien
gccatgcagctctgcttacagctct

SEQ ID NO: 968070 - DNA, 25 bp, Homo sapien
cttactgtttcacagatgttggcca

SEQ ID NO: 968071 - DNA, 25 bp, Homo sapien
cccaccagctgtaaggctctcccct

SEQ ID NO: 968072 - DNA, 25 bp, Homo sapien
ctccccaccagctgtaaggctctcc

SEQ ID NO: 968073 - DNA, 25 bp, Homo sapien
gtaaggctctcccctctacctgcca

SEQ ID NO: 968074 - DNA, 25 bp, Homo sapien
taaggctctcccctctacctgccat

SEQ ID NO: 968075 - DNA, 25 bp, Homo sapien
cagaagtacttaccacagtgctaga

SEQ ID NO: 968076 - DNA, 25 bp, Homo sapien
tgggaggattcaacgaaatcagtac

SEQ ID NO: 968077 - DNA, 25 bp, Homo sapien
tgctagaacctagcgaacaataagt

SEQ ID NO: 968078 - DNA, 25 bp, Homo sapien
gtatatctaccataaaaggtgggtg

SEQ ID NO: 968079 - DNA, 25 bp, Homo sapien
cattaacatgcaatattgggtccaa

SEQ ID NO: 968080 - DNA, 25 bp, Homo sapien
caaacttgtttagagtgtcattaac

SEQ ID NO: 968081 - DNA, 25 bp, Homo sapien
tatttgtactccaagtcaaaagaca

SEQ ID NO: 968082 - DNA, 25 bp, Homo sapien
ggcatctatctgaaattctatgtat

SEQ ID NO: 968083 - DNA, 25 bp, Homo sapien
gaggtcatcatacaagatgactggt

SEQ ID NO: 968084 - DNA, 25 bp, Homo sapien
tgtcatactcatttgtcccttgcac

SEQ ID NO: 968085 - DNA, 25 bp, Homo sapien
gagtgaacactgcttgtctaggaag

SEQ ID NO: 968086 - DNA, 25 bp, Homo sapien
cagtcaactttggtctaagtaataa

SEQ ID NO: 968087 - DNA, 25 bp, Homo sapien
gcaacatcagctatgttttcattca

SEQ ID NO: 968088 - DNA, 25 bp, Homo sapien
tctggtaaatttccaatctgtctag

SEQ ID NO: 968089 - DNA, 25 bp, Homo sapien
gatattagagtcatgatggaaatgg

SEQ ID NO: 968090 - DNA, 25 bp, Homo sapien
aaatggactcaactcacaaaaagcc

SEQ ID NO: 968091 - DNA, 25 bp, Homo sapien
taggagaattcatcaaagtggacat

SEQ ID NO: 968092 - DNA, 25 bp, Homo sapien
tgttagctttgtgataccatcccaa

SEQ ID NO: 968093 - DNA, 25 bp, Homo sapien
tttgtggctgtcaaactgtcagctg

SEQ ID NO: 968094 - DNA, 25 bp, Homo sapien
ggttaacaaattggctcaagtcaca

SEQ ID NO: 968095 - DNA, 25 bp, Homo sapien
ttctactaccctactgctgaacaga

SEQ ID NO: 968096 - DNA, 25 bp, Homo sapien
tctactaccctactgctgaacagag

SEQ ID NO: 968097 - DNA, 25 bp, Homo sapien
acctataatggaaacttccaaacat

SEQ ID NO: 968098 - DNA, 25 bp, Homo sapien
acttccaaacatgaactctaaaaca

SEQ ID NO: 968099 - DNA, 25 bp, Homo sapien
tattcaatatttgcacatcattaaa

SEQ ID NO: 968100 - DNA, 25 bp, Homo sapien
tatactaaaatattcaatatttgca

SEQ ID NO: 968101 - DNA, 25 bp, Homo sapien
aatattcaatatttgcacatcatta

SEQ ID NO: 968102 - DNA, 25 bp, Homo sapien
ctaaaatattcaatatttgcacatc

SEQ ID NO: 968103 - DNA, 25 bp, Homo sapien
gcttcaatggtgagaaggcaaacca

SEQ ID NO: 968104 - DNA, 25 bp, Homo sapien
taggagataccctgatcagtgcctg

SEQ ID NO: 968105 - DNA, 25 bp, Homo sapien
tgaccaacgcatggaagagcaactt

SEQ ID NO: 968106 - DNA, 25 bp, Homo sapien
catagatagtggtatacaagttccc

SEQ ID NO: 968107 - DNA, 25 bp, Homo sapien
tcagaccgcataaccaatttgccaa

SEQ ID NO: 968108 - DNA, 25 bp, Homo sapien
catcgcttcccgttggcaaatgcag

SEQ ID NO: 968109 - DNA, 25 bp, Homo sapien
ggaaagtgtaacatccagtgcttgg

SEQ ID NO: 968110 - DNA, 25 bp, Homo sapien
gagtgtagtcactccaccgttttga

SEQ ID NO: 968111 - DNA, 25 bp, Homo sapien
gcgtcccttttcagtccagcagatg

SEQ ID NO: 968112 - DNA, 25 bp, Homo sapien
tctaatacgataataagccgggaac

SEQ ID NO: 968113 - DNA, 25 bp, Homo sapien
tgtgtcaaggcgtagtgtatctcca

SEQ ID NO: 968114 - DNA, 25 bp, Homo sapien
taaagtcacctagctgtggcgggtc

SEQ ID NO: 968115 - DNA, 25 bp, Homo sapien
tggaaatgaactatggcctaaaacc

SEQ ID NO: 968116 - DNA, 25 bp, Homo sapien
gcagcaactacaactcatgggccag

SEQ ID NO: 968117 - DNA, 25 bp, Homo sapien
tataccgtctatggctgctattgct

SEQ ID NO: 968118 - DNA, 25 bp, Homo sapien
tggccctgtctcaatggtacactga

SEQ ID NO: 968119 - DNA, 25 bp, Homo sapien
gaggactacgtctaaagcaggccag

SEQ ID NO: 968120 - DNA, 25 bp, Homo sapien
caagtatgcgagatgcctcaggcca

SEQ ID NO: 968121 - DNA, 25 bp, Homo sapien
cttttctgggcctggttcaacctga

SEQ ID NO: 968122 - DNA, 25 bp, Homo sapien
gcagaatcagcccttgaggactacg

SEQ ID NO: 968123 - DNA, 25 bp, Homo sapien
aagcagtgttggctgaccatcagga

SEQ ID NO: 968124 - DNA, 25 bp, Homo sapien
tctcctgtaccatgggtgtgcccac

SEQ ID NO: 968125 - DNA, 25 bp, Homo sapien
aatatacgtatcatgtctgggtcca

SEQ ID NO: 968126 - DNA, 25 bp, Homo sapien
gggtccatccactgtccgaagttcg

SEQ ID NO: 968127 - DNA, 25 bp, Homo sapien
taacaaagaactagacctccagcct

SEQ ID NO: 968128 - DNA, 25 bp, Homo sapien
tcagagtagttatagtgtaccaaag

SEQ ID NO: 968129 - DNA, 25 bp, Homo sapien
agacagataataaggttcagagtag

SEQ ID NO: 968130 - DNA, 25 bp, Homo sapien
cattcctgtcagatgaacagaagag

SEQ ID NO: 968131 - DNA, 25 bp, Homo sapien
ctgcagaagttggtgggaatcacaa

SEQ ID NO: 968132 - DNA, 25 bp, Homo sapien
agttacccaattcatggaagagccc

SEQ ID NO: 968133 - DNA, 25 bp, Homo sapien
agttggtgggaatcacaatagcata

SEQ ID NO: 968134 - DNA, 25 bp, Homo sapien
tcctcctaaacagttacccaattca

SEQ ID NO: 968135 - DNA, 25 bp, Homo sapien
gattccaatggcaaaacgattagaa

SEQ ID NO: 968136 - DNA, 25 bp, Homo sapien
ggattccaatggcaaaacgattaga

SEQ ID NO: 968137 - DNA, 25 bp, Homo sapien
taaatcacttgtaaagaccaaatgg

SEQ ID NO: 968138 - DNA, 25 bp, Homo sapien
gactctgtgactaccttaatgctgt

SEQ ID NO: 968139 - DNA, 25 bp, Homo sapien
aaataccatcatctatacgcacagc

SEQ ID NO: 968140 - DNA, 25 bp, Homo sapien
tgcttacagtttgccattacaccaa

SEQ ID NO: 968141 - DNA, 25 bp, Homo sapien
cagctttgtctaatgttatgtttgc

SEQ ID NO: 968142 - DNA, 25 bp, Homo sapien
taaagtttccagtgtactaccatta

SEQ ID NO: 968143 - DNA, 25 bp, Homo sapien
taccattatgtcctgatctctcctt

SEQ ID NO: 968144 - DNA, 25 bp, Homo sapien
gcaacttagcatgatggttttctgt

SEQ ID NO: 968145 - DNA, 25 bp, Homo sapien
cagagagctgcggacattacgagtc

SEQ ID NO: 968146 - DNA, 25 bp, Homo sapien
taccttctcctagaggcaatctgtt

SEQ ID NO: 968147 - DNA, 25 bp, Homo sapien
gaaagcaagttcatgagagggctat

SEQ ID NO: 968148 - DNA, 25 bp, Homo sapien
actttaggcctaggataatgatacc

SEQ ID NO: 968149 - DNA, 25 bp, Homo sapien
accgcattgagtcttttcatcccag

SEQ ID NO: 968150 - DNA, 25 bp, Homo sapien
tgccactcttgaggggaccaaaagt

SEQ ID NO: 968151 - DNA, 25 bp, Homo sapien
atttccaggctattacattttatat

SEQ ID NO: 968152 - DNA, 25 bp, Homo sapien
tgcaaggcaccgcattgagtctttt

SEQ ID NO: 968153 - DNA, 25 bp, Homo sapien
cacctacagctaaagggattctcaa

SEQ ID NO: 968154 - DNA, 25 bp, Homo sapien
aaaccacaatgctatcacctacagc

SEQ ID NO: 968155 - DNA, 25 bp, Homo sapien
actttaggaaagagtagaatggaag

SEQ ID NO: 968156 - DNA, 25 bp, Homo sapien
caagtagatcaactttaggaaagag

SEQ ID NO: 968157 - DNA, 25 bp, Homo sapien
gaagctagcattttattacacgtca

SEQ ID NO: 968158 - DNA, 25 bp, Homo sapien
tattgaagctagcattttattacac

SEQ ID NO: 968159 - DNA, 25 bp, Homo sapien
tattacacgtcattggggttgctgg

SEQ ID NO: 968160 - DNA, 25 bp, Homo sapien
tagcattttattacacgtcattggg

SEQ ID NO: 968161 - DNA, 25 bp, Homo sapien
ctgccaggaaactgctcccaaaatc

SEQ ID NO: 968162 - DNA, 25 bp, Homo sapien
tgccaggaaactgctcccaaaatcg

SEQ ID NO: 968163 - DNA, 25 bp, Homo sapien
tcaagcaaaaatggcgcatcccttt

SEQ ID NO: 968164 - DNA, 25 bp, Homo sapien
catttaatttggtatggaatcccca

SEQ ID NO: 968165 - DNA, 25 bp, Homo sapien
tgtctctaagtttgaatgcggaaag

SEQ ID NO: 968166 - DNA, 25 bp, Homo sapien
aataccagaggtgagtgtctctaag

SEQ ID NO: 968167 - DNA, 25 bp, Homo sapien
ggccgatgacggacataaccagaaa

SEQ ID NO: 968168 - DNA, 25 bp, Homo sapien
ccaacatagttgtgctggcaatggc

SEQ ID NO: 968169 - DNA, 25 bp, Homo sapien
gctaaatagccaagataccgcactg

SEQ ID NO: 968170 - DNA, 25 bp, Homo sapien
tcaaggaaaggatcagttatcaggc

SEQ ID NO: 968171 - DNA, 25 bp, Homo sapien
tgactaaagcaataacgcagtgatt

SEQ ID NO: 968172 - DNA, 25 bp, Homo sapien
atgactaaagcaataacgcagtgat

SEQ ID NO: 968173 - DNA, 25 bp, Homo sapien
ctaaagcaataacgcagtgatttac

SEQ ID NO: 968174 - DNA, 25 bp, Homo sapien
gactaaagcaataacgcagtgattt

SEQ ID NO: 968175 - DNA, 25 bp, Homo sapien
aaccagcaatgtgggcttttccctc

SEQ ID NO: 968176 - DNA, 25 bp, Homo sapien
gtaaccagcaatgtgggcttttccc

SEQ ID NO: 968177 - DNA, 25 bp, Homo sapien
taaccagcaatgtgggcttttccct

SEQ ID NO: 968178 - DNA, 25 bp, Homo sapien
ccagcaatgtgggcttttccctcac

SEQ ID NO: 968179 - DNA, 25 bp, Homo sapien
tatatccaatgtatccgcaactcct

SEQ ID NO: 968180 - DNA, 25 bp, Homo sapien
tcatccagtatatccaatgtatccg

SEQ ID NO: 968181 - DNA, 25 bp, Homo sapien
tccgcaactcctatttcaacatttt

SEQ ID NO: 968182 - DNA, 25 bp, Homo sapien
tgtatttcatccagtatatccaatg

SEQ ID NO: 968183 - DNA, 25 bp, Homo sapien
catactaggctaaatggtgccactc

SEQ ID NO: 968184 - DNA, 25 bp, Homo sapien
gctgtacactaaaaggctcaagaga

SEQ ID NO: 968185 - DNA, 25 bp, Homo sapien
agactactgaacactgctggacggg

SEQ ID NO: 968186 - DNA, 25 bp, Homo sapien
caactcttagtactcatctggctgg

SEQ ID NO: 968187 - DNA, 25 bp, Homo sapien
ctggaatacaatggagcgatctcgg

SEQ ID NO: 968188 - DNA, 25 bp, Homo sapien
gctggaatacaatggagcgatctcg

SEQ ID NO: 968189 - DNA, 25 bp, Homo sapien
aattacaggcatgtgccaccatgcc

SEQ ID NO: 968190 - DNA, 25 bp, Homo sapien
gaattacaggcatgtgccaccatgc

SEQ ID NO: 968191 - DNA, 25 bp, Homo sapien
ctctctacttaagtgcacacatata

SEQ ID NO: 968192 - DNA, 25 bp, Homo sapien
ttctctaagcaatgtcatttatttc

SEQ ID NO: 968193 - DNA, 25 bp, Homo sapien
caacccatcctttggatgttcaacc

SEQ ID NO: 968194 - DNA, 25 bp, Homo sapien
tggatgttcaaccccaaacctaggc

SEQ ID NO: 968195 - DNA, 25 bp, Homo sapien
aatcaacatggcagattgtttttaa

SEQ ID NO: 968196 - DNA, 25 bp, Homo sapien
cttcctatggaccaaaatcaacatg

SEQ ID NO: 968197 - DNA, 25 bp, Homo sapien
tttacaaaactcttccccattctga

SEQ ID NO: 968198 - DNA, 25 bp, Homo sapien
cctatggaccaaaatcaacatggca

SEQ ID NO: 968199 - DNA, 25 bp, Homo sapien
ccttgcgaaatacggagaggcgctc

SEQ ID NO: 968200 - DNA, 25 bp, Homo sapien
tctagggaatggcttgaggcatacc

SEQ ID NO: 968201 - DNA, 25 bp, Homo sapien
cagtgactagcaaaaatccggcatc

SEQ ID NO: 968202 - DNA, 25 bp, Homo sapien
gaaaagctaaccaatcactgccaga

SEQ ID NO: 968203 - DNA, 25 bp, Homo sapien
tcccaaccctcggagtcagttccaa

SEQ ID NO: 968204 - DNA, 25 bp, Homo sapien
tacgcgctaatacaggccagtgtcg

SEQ ID NO: 968205 - DNA, 25 bp, Homo sapien
ttcagcctgcgactgagaacaggga

SEQ ID NO: 968206 - DNA, 25 bp, Homo sapien
gccagtgtcggcgtaaactttctcc

SEQ ID NO: 968207 - DNA, 25 bp, Homo sapien
gccatgtttccgccgccgaaatccg

SEQ ID NO: 968208 - DNA, 25 bp, Homo sapien
cggcccggccgcgaccgccatgttt

SEQ ID NO: 968209 - DNA, 25 bp, Homo sapien
cgccgccgaaatccgcgacggtacg

SEQ ID NO: 968210 - DNA, 25 bp, Homo sapien
ggcccggccgcgaccgccatgtttc

SEQ ID NO: 968211 - DNA, 25 bp, Homo sapien
gactgccacgcgtgggctgtaaata

SEQ ID NO: 968212 - DNA, 25 bp, Homo sapien
acaggactgccacgcgtgggctgta

SEQ ID NO: 968213 - DNA, 25 bp, Homo sapien
tgacagtgcccatcaagcatctagg

SEQ ID NO: 968214 - DNA, 25 bp, Homo sapien
tcaagccaaagtcgactcctgggac

SEQ ID NO: 968215 - DNA, 25 bp, Homo sapien
aaaaccaaagcatcggggactggct

SEQ ID NO: 968216 - DNA, 25 bp, Homo sapien
ctgtgtatcttggtctaggcccttc

SEQ ID NO: 968217 - DNA, 25 bp, Homo sapien
caagaccacataatgatgtgctccc

SEQ ID NO: 968218 - DNA, 25 bp, Homo sapien
agcatcggggactggcttgccattt

SEQ ID NO: 968219 - DNA, 25 bp, Homo sapien
gagagtggtatcacgttcttgcatc

SEQ ID NO: 968220 - DNA, 25 bp, Homo sapien
tccacctggatcctgagagtggtat

SEQ ID NO: 968221 - DNA, 25 bp, Homo sapien
ttcttgcatcggaaggacataggca

SEQ ID NO: 968222 - DNA, 25 bp, Homo sapien
tatcacgttcttgcatcggaaggac

SEQ ID NO: 968223 - DNA, 25 bp, Homo sapien
gcatagctagagtggcattagctaa

SEQ ID NO: 968224 - DNA, 25 bp, Homo sapien
acaacaggcatagctagagtggcat

SEQ ID NO: 968225 - DNA, 25 bp, Homo sapien
tctttttccttgtagaagacaacag

SEQ ID NO: 968226 - DNA, 25 bp, Homo sapien
tttttccttgtagaagacaacaggc

SEQ ID NO: 968227 - DNA, 25 bp, Homo sapien
tagtgcggcacctccttaacggaaa

SEQ ID NO: 968228 - DNA, 25 bp, Homo sapien
tacatgatctggcatcaagctgcaa

SEQ ID NO: 968229 - DNA, 25 bp, Homo sapien
ggtactacggcaattcacaataagc

SEQ ID NO: 968230 - DNA, 25 bp, Homo sapien
cacactttggagcataagcagaatc

SEQ ID NO: 968231 - DNA, 25 bp, Homo sapien
gaatctgagtcatatggcgcatcag

SEQ ID NO: 968232 - DNA, 25 bp, Homo sapien
ggcgcatcagggagttctgtgaaac

SEQ ID NO: 968233 - DNA, 25 bp, Homo sapien
tctgatcgaacatagcaggaagggt

SEQ ID NO: 968234 - DNA, 25 bp, Homo sapien
tagaaaggaatagagctggcttgac

SEQ ID NO: 968235 - DNA, 25 bp, Homo sapien
tgccatcagatgcatatgtgaaaat

SEQ ID NO: 968236 - DNA, 25 bp, Homo sapien
gtgtgatgattagtaataaaccatt

SEQ ID NO: 968237 - DNA, 25 bp, Homo sapien
catagcatgacggttctgatgggag

SEQ ID NO: 968238 - DNA, 25 bp, Homo sapien
tgaagcgtttaaagcccagggactc

SEQ ID NO: 968239 - DNA, 25 bp, Homo sapien
aaagcccagggactctatagcaatc

SEQ ID NO: 968240 - DNA, 25 bp, Homo sapien
tcatgggctttcttgcagcaaatcc

SEQ ID NO: 968241 - DNA, 25 bp, Homo sapien
tcctgtgcaagctggagtggttgct

SEQ ID NO: 968242 - DNA, 25 bp, Homo sapien
gaatcaatagggtttttcagctgct

SEQ ID NO: 968243 - DNA, 25 bp, Homo sapien
gcaaatccatcgctggtaaggagat

SEQ ID NO: 968244 - DNA, 25 bp, Homo sapien
tgcactgactctatacagacagggt

SEQ ID NO: 968245 - DNA, 25 bp, Homo sapien
gactccaacaatccacttgcctagg

SEQ ID NO: 968246 - DNA, 25 bp, Homo sapien
gattggttgctgctagtatatacac

SEQ ID NO: 968247 - DNA, 25 bp, Homo sapien
aaatagatgatcgatgacacctgtg

SEQ ID NO: 968248 - DNA, 25 bp, Homo sapien
agtgacatctatgcattttgatatc

SEQ ID NO: 968249 - DNA, 25 bp, Homo sapien
tgctttgagactgttacctaataaa

SEQ ID NO: 968250 - DNA, 25 bp, Homo sapien
tactacttttgtgactttagtgaca

SEQ ID NO: 968251 - DNA, 25 bp, Homo sapien
cattgtgaattcttcgccaagtgtt

SEQ ID NO: 968252 - DNA, 25 bp, Homo sapien
atccaagtatatggagggccaagta

SEQ ID NO: 968253 - DNA, 25 bp, Homo sapien
catgccctgccgcaaatatttttga

SEQ ID NO: 968254 - DNA, 25 bp, Homo sapien
tctctcatgtcaccctttatgctac

SEQ ID NO: 968255 - DNA, 25 bp, Homo sapien
tatgctactgtcataaatgttcatt

SEQ ID NO: 968256 - DNA, 25 bp, Homo sapien
aatgcctttaacacaaactcttggc

SEQ ID NO: 968257 - DNA, 25 bp, Homo sapien
ggcatcacatgattaaggtaaaaga

SEQ ID NO: 968258 - DNA, 25 bp, Homo sapien
aaatatactaggcactcttctaggt

SEQ ID NO: 968259 - DNA, 25 bp, Homo sapien
taatgtgcctactttagagttatct

SEQ ID NO: 968260 - DNA, 25 bp, Homo sapien
tacagcaggtacaatatctatgcca

SEQ ID NO: 968261 - DNA, 25 bp, Homo sapien
cagctgccaacatcaagtaatctga

SEQ ID NO: 968262 - DNA, 25 bp, Homo sapien
tctatgccaacagttagaaattctt

SEQ ID NO: 968263 - DNA, 25 bp, Homo sapien
cttcagaaatgggttaaagcagctg

SEQ ID NO: 968264 - DNA, 25 bp, Homo sapien
ccaataatgggggattgctgagtct

SEQ ID NO: 968265 - DNA, 25 bp, Homo sapien
cagcactgtattagcattccccttt

SEQ ID NO: 968266 - DNA, 25 bp, Homo sapien
gctgagtctagtggtaattttgttt

SEQ ID NO: 968267 - DNA, 25 bp, Homo sapien
aatagccattctgatgcctgtgaga

SEQ ID NO: 968268 - DNA, 25 bp, Homo sapien
tggccaacttctaacgagtacacca

SEQ ID NO: 968269 - DNA, 25 bp, Homo sapien
gccaacttctaacgagtacaccagc

SEQ ID NO: 968270 - DNA, 25 bp, Homo sapien
caacttctaacgagtacaccagcat

SEQ ID NO: 968271 - DNA, 25 bp, Homo sapien
tgtggccaacttctaacgagtacac

SEQ ID NO: 968272 - DNA, 25 bp, Homo sapien
caagaaaactacgtgatgtaaaaat

SEQ ID NO: 968273 - DNA, 25 bp, Homo sapien
aaataccagcttagcagcactgacc

SEQ ID NO: 968274 - DNA, 25 bp, Homo sapien
tctcaaataatgttcctgtacaaga

SEQ ID NO: 968275 - DNA, 25 bp, Homo sapien
agcactgacctctgcatatcttttt

SEQ ID NO: 968276 - DNA, 25 bp, Homo sapien
ctgcctgcggctacacagcagttgc

SEQ ID NO: 968277 - DNA, 25 bp, Homo sapien
taagctctctccatcccctaatttt

SEQ ID NO: 968278 - DNA, 25 bp, Homo sapien
tcttctaagctctctccatccccta

SEQ ID NO: 968279 - DNA, 25 bp, Homo sapien
tctctccatcccctaattttgttaa

SEQ ID NO: 968280 - DNA, 25 bp, Homo sapien
agctctctccatcccctaattttgt

SEQ ID NO: 968281 - DNA, 25 bp, Homo sapien
ctccaaactgttctgacgtctgcct

SEQ ID NO: 968282 - DNA, 25 bp, Homo sapien
ttgcataggatgagtgacccttact

SEQ ID NO: 968283 - DNA, 25 bp, Homo sapien
tgcataggatgagtgacccttactc

SEQ ID NO: 968284 - DNA, 25 bp, Homo sapien
tcagttataaattcagggtttgtaa

SEQ ID NO: 968285 - DNA, 25 bp, Homo sapien
ttcagggtttgtaaagctgaggttg

SEQ ID NO: 968286 - DNA, 25 bp, Homo sapien
ttgtaaagctgaggttggttaaatg

SEQ ID NO: 968287 - DNA, 25 bp, Homo sapien
tataaattcagggtttgtaaagctg

SEQ ID NO: 968288 - DNA, 25 bp, Homo sapien
ggcaagtacagctcttttttcatct

SEQ ID NO: 968289 - DNA, 25 bp, Homo sapien
ctggagtggtcttagtggcaagtac

SEQ ID NO: 968290 - DNA, 25 bp, Homo sapien
cttcaagttgagaagactcatgcat

SEQ ID NO: 968291 - DNA, 25 bp, Homo sapien
catatttaaggctggagtggtctta

SEQ ID NO: 968292 - DNA, 25 bp, Homo sapien
aaggcagcaacagcactggtggctg

SEQ ID NO: 968293 - DNA, 25 bp, Homo sapien
cagtagtatgcctcattttgtgttt

SEQ ID NO: 968294 - DNA, 25 bp, Homo sapien
tgttacaggggaactatttggttca

SEQ ID NO: 968295 - DNA, 25 bp, Homo sapien
aacagtcagatttataaccatcttc

SEQ ID NO: 968296 - DNA, 25 bp, Homo sapien
aacagcaatagtactgatttcctga

SEQ ID NO: 968297 - DNA, 25 bp, Homo sapien
tcttcagacttggtagggctggctt

SEQ ID NO: 968298 - DNA, 25 bp, Homo sapien
cttcccatgtcagagtaaaaatcaa

SEQ ID NO: 968299 - DNA, 25 bp, Homo sapien
gcattaatcctagtacactgtcctg

SEQ ID NO: 968300 - DNA, 25 bp, Homo sapien
tcataatcactaaaatgtgtgcccc

SEQ ID NO: 968301 - DNA, 25 bp, Homo sapien
tcctcacagtgttctcgccagatct

SEQ ID NO: 968302 - DNA, 25 bp, Homo sapien
gccctcacaagtttttgcccaatga

SEQ ID NO: 968303 - DNA, 25 bp, Homo sapien
gcccaatgattatctgccaaatttt

SEQ ID NO: 968304 - DNA, 25 bp, Homo sapien
tcattgcaacggcatattcacaaag

SEQ ID NO: 968305 - DNA, 25 bp, Homo sapien
actgcaaggcggcagcgagactggg

SEQ ID NO: 968306 - DNA, 25 bp, Homo sapien
tgcaaggcggcagcgagactggggg

SEQ ID NO: 968307 - DNA, 25 bp, Homo sapien
caaggcggcagcgagactgggggag

SEQ ID NO: 968308 - DNA, 25 bp, Homo sapien
caaactgcaaggcggcagcgagact

SEQ ID NO: 968309 - DNA, 25 bp, Homo sapien
acacaaggtaagtaaagaaactcat

SEQ ID NO: 968310 - DNA, 25 bp, Homo sapien
tctctaacacaaggtaagtaaagaa

SEQ ID NO: 968311 - DNA, 25 bp, Homo sapien
ttctctaacacaaggtaagtaaaga

SEQ ID NO: 968312 - DNA, 25 bp, Homo sapien
taaagataccataatgagtgtaagg

SEQ ID NO: 968313 - DNA, 25 bp, Homo sapien
cgtacccagctcactattaccattt

SEQ ID NO: 968314 - DNA, 25 bp, Homo sapien
gacatacattatacccactacaaca

SEQ ID NO: 968315 - DNA, 25 bp, Homo sapien
tttattaccaacatacagagagaca

SEQ ID NO: 968316 - DNA, 25 bp, Homo sapien
agctatctacattttcccgggaaag

SEQ ID NO: 968317 - DNA, 25 bp, Homo sapien
tactactgtgttggtacccagcaca

SEQ ID NO: 968318 - DNA, 25 bp, Homo sapien
gattcctcctactacaatagctgtg

SEQ ID NO: 968319 - DNA, 25 bp, Homo sapien
cataaatggcggcagatacagttct

SEQ ID NO: 968320 - DNA, 25 bp, Homo sapien
ttttaaagcagctgtgtttaaagcc

SEQ ID NO: 968321 - DNA, 25 bp, Homo sapien
ttaaagcagctgtgtttaaagccca

SEQ ID NO: 968322 - DNA, 25 bp, Homo sapien
tcaaaattttaaagcagctgtgttt

SEQ ID NO: 968323 - DNA, 25 bp, Homo sapien
aattttaaagcagctgtgtttaaag

SEQ ID NO: 968324 - DNA, 25 bp, Homo sapien
agtggtgaaacaaggcaggccataa

SEQ ID NO: 968325 - DNA, 25 bp, Homo sapien
attggcacagcatctcttaagtggt

SEQ ID NO: 968326 - DNA, 25 bp, Homo sapien
gggctttatcggcaggtgtctttag

SEQ ID NO: 968327 - DNA, 25 bp, Homo sapien
taggaggcttccaatacaaacggta

SEQ ID NO: 968328 - DNA, 25 bp, Homo sapien
tcagaacctgcccagatctcttcct

SEQ ID NO: 968329 - DNA, 25 bp, Homo sapien
tccatggaagccgagggtgggcttt

SEQ ID NO: 968330 - DNA, 25 bp, Homo sapien
ggaaggctcggcatggttgtaggaa

SEQ ID NO: 968331 - DNA, 25 bp, Homo sapien
cctggaagccaatgcgaggaaggct

SEQ ID NO: 968332 - DNA, 25 bp, Homo sapien
gtgaagtccagtcagctaaaaggcc

SEQ ID NO: 968333 - DNA, 25 bp, Homo sapien
gcatggttgtaggaatgaagtacta

SEQ ID NO: 968334 - DNA, 25 bp, Homo sapien
ggacgctcttcaccacaccggagag

SEQ ID NO: 968335 - DNA, 25 bp, Homo sapien
ttctcggtacttcttgcggagccgc

SEQ ID NO: 968336 - DNA, 25 bp, Homo sapien
cggagccgccggtggacgctcttca

SEQ ID NO: 968337 - DNA, 25 bp, Homo sapien
tcggtacttcttgcggagccgccgg

SEQ ID NO: 968338 - DNA, 25 bp, Homo sapien
acgagcagtatttcggccgccggcc

SEQ ID NO: 968339 - DNA, 25 bp, Homo sapien
tctgcgcacgagcagtatttcggcc

SEQ ID NO: 968340 - DNA, 25 bp, Homo sapien
gccctctgcgcacgagcagtatttc

SEQ ID NO: 968341 - DNA, 25 bp, Homo sapien
tgcgcacgagcagtatttcggccgc

SEQ ID NO: 968342 - DNA, 25 bp, Homo sapien
cgccgcccctcaggcccccgcagac

SEQ ID NO: 968343 - DNA, 25 bp, Homo sapien
ccgccgcccctcaggcccccgcaga

SEQ ID NO: 968344 - DNA, 25 bp, Homo sapien
cagacgctccccagatggaggaggt

SEQ ID NO: 968345 - DNA, 25 bp, Homo sapien
ccgcagacgctccccagatggagga

SEQ ID NO: 968346 - DNA, 25 bp, Homo sapien
aggaggcagaggaaccggagcgaca

SEQ ID NO: 968347 - DNA, 25 bp, Homo sapien
agaggaggcagaggaaccggagcga

SEQ ID NO: 968348 - DNA, 25 bp, Homo sapien
ggaggcagaggaaccggagcgacag

SEQ ID NO: 968349 - DNA, 25 bp, Homo sapien
ccagaggaggcagaggaaccggagc

SEQ ID NO: 968350 - DNA, 25 bp, Homo sapien
aactgattggtggattttgagggct

SEQ ID NO: 968351 - DNA, 25 bp, Homo sapien
gaaaaggctaagggccaatgggcag

SEQ ID NO: 968352 - DNA, 25 bp, Homo sapien
ccggttgtttgggaaggcgagcagc

SEQ ID NO: 968353 - DNA, 25 bp, Homo sapien
aatgggcagaaagcgccggcggcga

SEQ ID NO: 968354 - DNA, 25 bp, Homo sapien
gaagctttttaggatgttcagcatc

SEQ ID NO: 968355 - DNA, 25 bp, Homo sapien
gcagcagaagctttttaggatgttc

SEQ ID NO: 968356 - DNA, 25 bp, Homo sapien
cagaagctttttaggatgttcagca

SEQ ID NO: 968357 - DNA, 25 bp, Homo sapien
cagcagaagctttttaggatgttca

SEQ ID NO: 968358 - DNA, 25 bp, Homo sapien
gcgctgtgatcaacacattaactga

SEQ ID NO: 968359 - DNA, 25 bp, Homo sapien
tgacttggagagtaataaatgtacc

SEQ ID NO: 968360 - DNA, 25 bp, Homo sapien
aaatgtaccattatagtgaaggagg

SEQ ID NO: 968361 - DNA, 25 bp, Homo sapien
ttagctctatcaacatagcgctgtg

SEQ ID NO: 968362 - DNA, 25 bp, Homo sapien
cactcttcagccatagttgattgaa

SEQ ID NO: 968363 - DNA, 25 bp, Homo sapien
ccccagaagccatatttattccaaa

SEQ ID NO: 968364 - DNA, 25 bp, Homo sapien
tgattgaaacaggagcgaacacttg

SEQ ID NO: 968365 - DNA, 25 bp, Homo sapien
tgagatcgacgattcacaggaatgg

SEQ ID NO: 968366 - DNA, 25 bp, Homo sapien
aatatactatgctcctctctttgac

SEQ ID NO: 968367 - DNA, 25 bp, Homo sapien
tctgactggtgtgagtcggtgtcac

SEQ ID NO: 968368 - DNA, 25 bp, Homo sapien
tcccggaatcatcgatctttttgtc

SEQ ID NO: 968369 - DNA, 25 bp, Homo sapien
tgacttcttaattgacggtccctct

SEQ ID NO: 968370 - DNA, 25 bp, Homo sapien
aataatttactctgcttagctggac

SEQ ID NO: 968371 - DNA, 25 bp, Homo sapien
cccagaacccattccaaaggagtgg

SEQ ID NO: 968372 - DNA, 25 bp, Homo sapien
ttaaaaatcatgtacctctagtgac

SEQ ID NO: 968373 - DNA, 25 bp, Homo sapien
ttactctgcttagctggacccagaa

SEQ ID NO: 968374 - DNA, 25 bp, Homo sapien
gacctctttgcttctatcatgagca

SEQ ID NO: 968375 - DNA, 25 bp, Homo sapien
gctgtaagtctgacaacataatcta

SEQ ID NO: 968376 - DNA, 25 bp, Homo sapien
tattctaggttttcgattgagctgt

SEQ ID NO: 968377 - DNA, 25 bp, Homo sapien
cataatctaattgggctattagcct

SEQ ID NO: 968378 - DNA, 25 bp, Homo sapien
tttcagaagtgaagggactgagccc

SEQ ID NO: 968379 - DNA, 25 bp, Homo sapien
taatgagaacagcaattttcagaag

SEQ ID NO: 968380 - DNA, 25 bp, Homo sapien
gactgagcccaaggttgctgtgtta

SEQ ID NO: 968381 - DNA, 25 bp, Homo sapien
tccaccaaataggtctataatgaga

SEQ ID NO: 968382 - DNA, 25 bp, Homo sapien
tgtcgccctccataatcgagataac

SEQ ID NO: 968383 - DNA, 25 bp, Homo sapien
cagactgtgggacttgtcgccctcc

SEQ ID NO: 968384 - DNA, 25 bp, Homo sapien
tgtgggacttgtcgccctccataat

SEQ ID NO: 968385 - DNA, 25 bp, Homo sapien
cctccataatcgagataacaaattc

SEQ ID NO: 968386 - DNA, 25 bp, Homo sapien
catagagacattgtaactaaaatcc

SEQ ID NO: 968387 - DNA, 25 bp, Homo sapien
tattgcgcttgtaatttccatttca

SEQ ID NO: 968388 - DNA, 25 bp, Homo sapien
cttctgtaatattgcgcttgtaatt

SEQ ID NO: 968389 - DNA, 25 bp, Homo sapien
tcatagagacattgtaactaaaatc

SEQ ID NO: 968390 - DNA, 25 bp, Homo sapien
gtcttcacaaattgggtcctcaggc

SEQ ID NO: 968391 - DNA, 25 bp, Homo sapien
tcaggcctacaggaggattcctctt

SEQ ID NO: 968392 - DNA, 25 bp, Homo sapien
gggtcctcaggcctacaggaggatt

SEQ ID NO: 968393 - DNA, 25 bp, Homo sapien
gttgttattactccaagagactggg

SEQ ID NO: 968394 - DNA, 25 bp, Homo sapien
tagttcccagagttgcatgctctct

SEQ ID NO: 968395 - DNA, 25 bp, Homo sapien
tgggtgcttttttaggtagtccaca

SEQ ID NO: 968396 - DNA, 25 bp, Homo sapien
tctgctgtaccaaatcctgttctgt

SEQ ID NO: 968397 - DNA, 25 bp, Homo sapien
tccttttccatagttcccagagttg

SEQ ID NO: 968398 - DNA, 25 bp, Homo sapien
ggctttctgctgaattctccagaga

SEQ ID NO: 968399 - DNA, 25 bp, Homo sapien
gaatggctggattgtcacagtggtt

SEQ ID NO: 968400 - DNA, 25 bp, Homo sapien
gattgtcacagtggttgcctttaag

SEQ ID NO: 968401 - DNA, 25 bp, Homo sapien
cctttaaggccttaagcataagcca

SEQ ID NO: 968402 - DNA, 25 bp, Homo sapien
tacttctaagtgtcctgaaaaacca

SEQ ID NO: 968403 - DNA, 25 bp, Homo sapien
tcctgcttgatatgcaagttacttc

SEQ ID NO: 968404 - DNA, 25 bp, Homo sapien
taaaatgatgtgatgatataagcgc

SEQ ID NO: 968405 - DNA, 25 bp, Homo sapien
gcaatgtagcgctctgcagagttca

SEQ ID NO: 968406 - DNA, 25 bp, Homo sapien
gcatccagagtgattctttcagaac

SEQ ID NO: 968407 - DNA, 25 bp, Homo sapien
agttcacatcctgtaaacttggcat

SEQ ID NO: 968408 - DNA, 25 bp, Homo sapien
gctccccattcaatttccagtagtt

SEQ ID NO: 968409 - DNA, 25 bp, Homo sapien
cagtagttcacatcctgtaaacttg

SEQ ID NO: 968410 - DNA, 25 bp, Homo sapien
ttccagtagttcacatcctgtaaac

SEQ ID NO: 968411 - DNA, 25 bp, Homo sapien
gcaagctccatctgaactaccatat

SEQ ID NO: 968412 - DNA, 25 bp, Homo sapien
gaactaccatatttgaccaagccat

SEQ ID NO: 968413 - DNA, 25 bp, Homo sapien
gctgtgcaagctccatctgaactac

SEQ ID NO: 968414 - DNA, 25 bp, Homo sapien
ctgaactaccatatttgaccaagcc

SEQ ID NO: 968415 - DNA, 25 bp, Homo sapien
tgagacttagctctcttagcctcga

SEQ ID NO: 968416 - DNA, 25 bp, Homo sapien
cttggtgtggaaacaatcatattta

SEQ ID NO: 968417 - DNA, 25 bp, Homo sapien
tgtaggagccatgtgttaatgcaga

SEQ ID NO: 968418 - DNA, 25 bp, Homo sapien
catagttgaattgacagataaggca

SEQ ID NO: 968419 - DNA, 25 bp, Homo sapien
catgtgcactgaattaggatgctta

SEQ ID NO: 968420 - DNA, 25 bp, Homo sapien
gtccccaagattcatgtgcactgaa

SEQ ID NO: 968421 - DNA, 25 bp, Homo sapien
cactgaattaggatgcttataatgg

SEQ ID NO: 968422 - DNA, 25 bp, Homo sapien
gatgcttataatggtgagtcactga

SEQ ID NO: 968423 - DNA, 25 bp, Homo sapien
cttggtgtaggaagtgaccaaggag

SEQ ID NO: 968424 - DNA, 25 bp, Homo sapien
aaatagtttggtgctacttctactg

SEQ ID NO: 968425 - DNA, 25 bp, Homo sapien
ccaaggagcctgaattaagaattca

SEQ ID NO: 968426 - DNA, 25 bp, Homo sapien
cccacttcagggcaagaactttttg

SEQ ID NO: 968427 - DNA, 25 bp, Homo sapien
aacattctgcggttgtgtgaaaagc

SEQ ID NO: 968428 - DNA, 25 bp, Homo sapien
gagcgggatccttggatcctactga

SEQ ID NO: 968429 - DNA, 25 bp, Homo sapien
tgaagtcctggtattgactccaaca

SEQ ID NO: 968430 - DNA, 25 bp, Homo sapien
cctactgatggagtgattatggtgc

SEQ ID NO: 968431 - DNA, 25 bp, Homo sapien
tcctgttgcattggtcactttacca

SEQ ID NO: 968432 - DNA, 25 bp, Homo sapien
tcctcttagtcccaagctgagttca

SEQ ID NO: 968433 - DNA, 25 bp, Homo sapien
ctattaggtcctcttagtcccaagc

SEQ ID NO: 968434 - DNA, 25 bp, Homo sapien
taggtcctcttagtcccaagctgag

SEQ ID NO: 968435 - DNA, 25 bp, Homo sapien
caaaggcataaacggtatttttctg

SEQ ID NO: 968436 - DNA, 25 bp, Homo sapien
aggcataaacggtatttttctggat

SEQ ID NO: 968437 - DNA, 25 bp, Homo sapien
tttctttaggaagatggggacatgc

SEQ ID NO: 968438 - DNA, 25 bp, Homo sapien
gatggggacatgcttttgatttcat

SEQ ID NO: 968439 - DNA, 25 bp, Homo sapien
agatggggacatgcttttgatttca

SEQ ID NO: 968440 - DNA, 25 bp, Homo sapien
caagctgaacttggaacctaggtct

SEQ ID NO: 968441 - DNA, 25 bp, Homo sapien
tgagcagctaatggacatcatccct

SEQ ID NO: 968442 - DNA, 25 bp, Homo sapien
gatgttgtcctacgtccccagaagg

SEQ ID NO: 968443 - DNA, 25 bp, Homo sapien
caattactcagagggaaacacagtc

SEQ ID NO: 968444 - DNA, 25 bp, Homo sapien
ttaaaggccgttcagctcagatgtg

SEQ ID NO: 968445 - DNA, 25 bp, Homo sapien
gaaatagtacagacgtatccacgca

SEQ ID NO: 968446 - DNA, 25 bp, Homo sapien
gcaaatgccaagttagtcaggagta

SEQ ID NO: 968447 - DNA, 25 bp, Homo sapien
tatagacaatcctggtgagaaatcc

SEQ ID NO: 968448 - DNA, 25 bp, Homo sapien
caaatttctatggtactatgctcca

SEQ ID NO: 968449 - DNA, 25 bp, Homo sapien
ggtacacatctctaaatactactgg

SEQ ID NO: 968450 - DNA, 25 bp, Homo sapien
gagccaattaactaagcaggtacac

SEQ ID NO: 968451 - DNA, 25 bp, Homo sapien
taaagctagtcttcctagtttgtgc

SEQ ID NO: 968452 - DNA, 25 bp, Homo sapien
ggtaccattaatgttgcctcccaga

SEQ ID NO: 968453 - DNA, 25 bp, Homo sapien
cacttttagatgcatgaccatgacc

SEQ ID NO: 968454 - DNA, 25 bp, Homo sapien
tatactgctttggaatgctccccag

SEQ ID NO: 968455 - DNA, 25 bp, Homo sapien
ggtagcacaccgtagaagaaaatct

SEQ ID NO: 968456 - DNA, 25 bp, Homo sapien
atataacacagtaaggttcccttgg

SEQ ID NO: 968457 - DNA, 25 bp, Homo sapien
catataacacagtaaggttcccttg

SEQ ID NO: 968458 - DNA, 25 bp, Homo sapien
tcatataacacagtaaggttccctt

SEQ ID NO: 968459 - DNA, 25 bp, Homo sapien
gcaagtcagagtcccataagtccag

SEQ ID NO: 968460 - DNA, 25 bp, Homo sapien
gaatgagtaagtgcccacgtctaaa

SEQ ID NO: 968461 - DNA, 25 bp, Homo sapien
gaatcattagccctgaaggagcggt

SEQ ID NO: 968462 - DNA, 25 bp, Homo sapien
gatccaacaggaagtagtaaggtgc

SEQ ID NO: 968463 - DNA, 25 bp, Homo sapien
aaatggagatcaggaggttgcccac

SEQ ID NO: 968464 - DNA, 25 bp, Homo sapien
aatggagatcaggaggttgcccacc

SEQ ID NO: 968465 - DNA, 25 bp, Homo sapien
tggagatcaggaggttgcccaccac

SEQ ID NO: 968466 - DNA, 25 bp, Homo sapien
atggagatcaggaggttgcccacca

SEQ ID NO: 968467 - DNA, 25 bp, Homo sapien
gctgttagaggcgagagattttgca

SEQ ID NO: 968468 - DNA, 25 bp, Homo sapien
ttcagaaaggctgttagaggcgaga

SEQ ID NO: 968469 - DNA, 25 bp, Homo sapien
aaaggctgttagaggcgagagattt

SEQ ID NO: 968470 - DNA, 25 bp, Homo sapien
cagtttcagaaaggctgttagaggc

SEQ ID NO: 968471 - DNA, 25 bp, Homo sapien
tccacttgttttgccatcagaatat

SEQ ID NO: 968472 - DNA, 25 bp, Homo sapien
atggatggaggataaggatacagcc

SEQ ID NO: 968473 - DNA, 25 bp, Homo sapien
catgatctagatataagaacaagga

SEQ ID NO: 968474 - DNA, 25 bp, Homo sapien
agatagatccatacattttactgaa

SEQ ID NO: 968475 - DNA, 25 bp, Homo sapien
gtgctaacaaagctgttcacttatg

SEQ ID NO: 968476 - DNA, 25 bp, Homo sapien
ttaacaagcaatgatgtcagacagt

SEQ ID NO: 968477 - DNA, 25 bp, Homo sapien
tgatgtcagacagtgctaacaaagc

SEQ ID NO: 968478 - DNA, 25 bp, Homo sapien
cctatcagttcttaagttaacaagc

SEQ ID NO: 968479 - DNA, 25 bp, Homo sapien
cccggaatatgctggtggaagccca

SEQ ID NO: 968480 - DNA, 25 bp, Homo sapien
catcctcgggtaaataccgatcgca

SEQ ID NO: 968481 - DNA, 25 bp, Homo sapien
gcccaggcaaaactgcgttcgatga

SEQ ID NO: 968482 - DNA, 25 bp, Homo sapien
actgcgttcgatgattttaatttcc

SEQ ID NO: 968483 - DNA, 25 bp, Homo sapien
cattacgaaacctgaaatccgccac

SEQ ID NO: 968484 - DNA, 25 bp, Homo sapien
tgcaacattacgaaacctgaaatcc

SEQ ID NO: 968485 - DNA, 25 bp, Homo sapien
caacattacgaaacctgaaatccgc

SEQ ID NO: 968486 - DNA, 25 bp, Homo sapien
catgcaacattacgaaacctgaaat

SEQ ID NO: 968487 - DNA, 25 bp, Homo sapien
ttctgtgctgcaaaggaaccgttcc

SEQ ID NO: 968488 - DNA, 25 bp, Homo sapien
tgatattcctcagtcttgtaaggct

SEQ ID NO: 968489 - DNA, 25 bp, Homo sapien
gattcgcagtctgatattcctcagt

SEQ ID NO: 968490 - DNA, 25 bp, Homo sapien
gaaccgttcccggtgattcgcagtc

SEQ ID NO: 968491 - DNA, 25 bp, Homo sapien
tgaatgtacttccattatgcagttt

SEQ ID NO: 968492 - DNA, 25 bp, Homo sapien
gcattgtctgaatgtacttccatta

SEQ ID NO: 968493 - DNA, 25 bp, Homo sapien
ctgaagatgcattgtctgaatgtac

SEQ ID NO: 968494 - DNA, 25 bp, Homo sapien
agatgcattgtctgaatgtacttcc

SEQ ID NO: 968495 - DNA, 25 bp, Homo sapien
agggctctttctcggtgaacctgca

SEQ ID NO: 968496 - DNA, 25 bp, Homo sapien
gggctctttctcggtgaacctgcag

SEQ ID NO: 968497 - DNA, 25 bp, Homo sapien
ttagtgccttgactgagcatccagg

SEQ ID NO: 968498 - DNA, 25 bp, Homo sapien
gcagcgcacgaggaagtcacagtgc

SEQ ID NO: 968499 - DNA, 25 bp, Homo sapien
ttggatatcccgacagactatagct

SEQ ID NO: 968500 - DNA, 25 bp, Homo sapien
tttgtcccttcgtggctgcttctga

SEQ ID NO: 968501 - DNA, 25 bp, Homo sapien
agttctcctacccaaaactagcaga

SEQ ID NO: 968502 - DNA, 25 bp, Homo sapien
ttaggaatgcctctagaatcatgca

SEQ ID NO: 968503 - DNA, 25 bp, Homo sapien
tccaaacggtcggatgataccacag

SEQ ID NO: 968504 - DNA, 25 bp, Homo sapien
ccacaaagcctgacacgtgggtgct

SEQ ID NO: 968505 - DNA, 25 bp, Homo sapien
gctaccgcaatcagttaacacaagg

SEQ ID NO: 968506 - DNA, 25 bp, Homo sapien
caaaaagtcttatcaagtgcctgga

SEQ ID NO: 968507 - DNA, 25 bp, Homo sapien
taacttgggctttggaaacgaatgc

SEQ ID NO: 968508 - DNA, 25 bp, Homo sapien
caaccaggagaaagaccagggaatc

SEQ ID NO: 968509 - DNA, 25 bp, Homo sapien
tgtttgttgccatttcatggaaaca

SEQ ID NO: 968510 - DNA, 25 bp, Homo sapien
cagccatcttacttctttgactacc

SEQ ID NO: 968511 - DNA, 25 bp, Homo sapien
tgcctgactctctgatatctaaata

SEQ ID NO: 968512 - DNA, 25 bp, Homo sapien
cctaactagcaaattataggctgca

SEQ ID NO: 968513 - DNA, 25 bp, Homo sapien
aaagcgcaaaggttttcagggtgag

SEQ ID NO: 968514 - DNA, 25 bp, Homo sapien
cagggtgaggtttgactcagtaggc

SEQ ID NO: 968515 - DNA, 25 bp, Homo sapien
gaggtttgactcagtaggcctttca

SEQ ID NO: 968516 - DNA, 25 bp, Homo sapien
ctaaagcgcaaaggttttcagggtg

SEQ ID NO: 968517 - DNA, 25 bp, Homo sapien
gtccatttctttttcgtgcatatac

SEQ ID NO: 968518 - DNA, 25 bp, Homo sapien
caggcagcaccaaaagcagtgacat

SEQ ID NO: 968519 - DNA, 25 bp, Homo sapien
gacagtaatttgaggttcatctccc

SEQ ID NO: 968520 - DNA, 25 bp, Homo sapien
gtacattttcttagggtctctccca

SEQ ID NO: 968521 - DNA, 25 bp, Homo sapien
aagcacgagccactaacttggaaac

SEQ ID NO: 968522 - DNA, 25 bp, Homo sapien
ggaattttccacgataatgccaaca

SEQ ID NO: 968523 - DNA, 25 bp, Homo sapien
tatagaattctatctgacttgaaat

SEQ ID NO: 968524 - DNA, 25 bp, Homo sapien
cctggagctccggatgctgagatta

SEQ ID NO: 968525 - DNA, 25 bp, Homo sapien
attaagaggttccacgtgacacgac

SEQ ID NO: 968526 - DNA, 25 bp, Homo sapien
tccggatgctgagattaagaggttc

SEQ ID NO: 968527 - DNA, 25 bp, Homo sapien
ttttaaagaggcagctagagtcagt

SEQ ID NO: 968528 - DNA, 25 bp, Homo sapien
cgtggaggccatatggacggtaggg

SEQ ID NO: 968529 - DNA, 25 bp, Homo sapien
agctagagtcagtgcagagcgtgga

SEQ ID NO: 968530 - DNA, 25 bp, Homo sapien
gagcgtggaggccatatggacggta

SEQ ID NO: 968531 - DNA, 25 bp, Homo sapien
tggtgcaacctaagtatcctttgga

SEQ ID NO: 968532 - DNA, 25 bp, Homo sapien
gcaaggtccaaatttgctcctgttt

SEQ ID NO: 968533 - DNA, 25 bp, Homo sapien
tatcctttggagacgagttcgtaca

SEQ ID NO: 968534 - DNA, 25 bp, Homo sapien
ttttacaaatacactggtgcaacct

SEQ ID NO: 968535 - DNA, 25 bp, Homo sapien
aggagggcggagtctccaaactaca

SEQ ID NO: 968536 - DNA, 25 bp, Homo sapien
cttctaggaagcagccattacagga

SEQ ID NO: 968537 - DNA, 25 bp, Homo sapien
ggcggagtctccaaactacatttcc

SEQ ID NO: 968538 - DNA, 25 bp, Homo sapien
cagccattacaggaatggcgaggag

SEQ ID NO: 968539 - DNA, 25 bp, Homo sapien
gtttactcaaggaggttgccagatt

SEQ ID NO: 968540 - DNA, 25 bp, Homo sapien
tactcaaggaggttgccagattttc

SEQ ID NO: 968541 - DNA, 25 bp, Homo sapien
aagtttactcaaggaggttgccaga

SEQ ID NO: 968542 - DNA, 25 bp, Homo sapien
ataagtttactcaaggaggttgcca

SEQ ID NO: 968543 - DNA, 25 bp, Homo sapien
cagctggttgagctacctctgtgtc

SEQ ID NO: 968544 - DNA, 25 bp, Homo sapien
tgccccaaccctaattccctgaatc

SEQ ID NO: 968545 - DNA, 25 bp, Homo sapien
ttgtacagcagctaacttctcctgc

SEQ ID NO: 968546 - DNA, 25 bp, Homo sapien
tctcctgctctgtactttcagctgg

SEQ ID NO: 968547 - DNA, 25 bp, Homo sapien
tggttgtggcggagacagtgggagg

SEQ ID NO: 968548 - DNA, 25 bp, Homo sapien
aggcactgttgaaaggtattgtgtg

SEQ ID NO: 968549 - DNA, 25 bp, Homo sapien
agggcagaagtggccaagctttttg

SEQ ID NO: 968550 - DNA, 25 bp, Homo sapien
tattgtgtggttgtggcggagacag

SEQ ID NO: 968551 - DNA, 25 bp, Homo sapien
tgcatctgtggacctactggtgtct

SEQ ID NO: 968552 - DNA, 25 bp, Homo sapien
gcatctgtggacctactggtgtctc

SEQ ID NO: 968553 - DNA, 25 bp, Homo sapien
gattccagccatggtcatggagaac

SEQ ID NO: 968554 - DNA, 25 bp, Homo sapien
tttactagcatgaattttgcatctc

SEQ ID NO: 968555 - DNA, 25 bp, Homo sapien
tccatctttatcttgccagagcctc

SEQ ID NO: 968556 - DNA, 25 bp, Homo sapien
gaacaattctgcacagatgtccatc

SEQ ID NO: 968557 - DNA, 25 bp, Homo sapien
cagtttttgcacgttcactgcaaca

SEQ ID NO: 968558 - DNA, 25 bp, Homo sapien
cagcttaggacatcgccagtttttg

SEQ ID NO: 968559 - DNA, 25 bp, Homo sapien
aggacatcgccagtttttgcacgtt

SEQ ID NO: 968560 - DNA, 25 bp, Homo sapien
ttgcacgttcactgcaacaggacag

SEQ ID NO: 968561 - DNA, 25 bp, Homo sapien
gaatgataagacgtgggctccttta

SEQ ID NO: 968562 - DNA, 25 bp, Homo sapien
tcttccttccagaatgataagacgt

SEQ ID NO: 968563 - DNA, 25 bp, Homo sapien
gacgtgggctcctttaaagtagcta

SEQ ID NO: 968564 - DNA, 25 bp, Homo sapien
gctcctttaaagtagctatagccat

SEQ ID NO: 968565 - DNA, 25 bp, Homo sapien
ctgacctgtttcagttcccccgatt

SEQ ID NO: 968566 - DNA, 25 bp, Homo sapien
cctatagcgtatgtgttatctgaaa

SEQ ID NO: 968567 - DNA, 25 bp, Homo sapien
ctagaagttatcgtagccattctga

SEQ ID NO: 968568 - DNA, 25 bp, Homo sapien
aagttttcttctcctatagcgtatg

SEQ ID NO: 968569 - DNA, 25 bp, Homo sapien
taagagaatgggtagctaaatggga

SEQ ID NO: 968570 - DNA, 25 bp, Homo sapien
ctgtgataagaaggcttgtctgtgc

SEQ ID NO: 968571 - DNA, 25 bp, Homo sapien
gggagatagattggtagtcatgcat

SEQ ID NO: 968572 - DNA, 25 bp, Homo sapien
tgtgccggcgttgggtaagagaatg

SEQ ID NO: 968573 - DNA, 25 bp, Homo sapien
tttattatttgcccatatggctaga

SEQ ID NO: 968574 - DNA, 25 bp, Homo sapien
gtttattatttgcccatatggctag

SEQ ID NO: 968575 - DNA, 25 bp, Homo sapien
agtttattatttgcccatatggcta

SEQ ID NO: 968576 - DNA, 25 bp, Homo sapien
cgccctccttactctaacaatagtt

SEQ ID NO: 968577 - DNA, 25 bp, Homo sapien
caagtcaactacatttctacatctc

SEQ ID NO: 968578 - DNA, 25 bp, Homo sapien
ggtcacattttagttgaactcatga

SEQ ID NO: 968579 - DNA, 25 bp, Homo sapien
gtaatatgattaggagctggcacta

SEQ ID NO: 968580 - DNA, 25 bp, Homo sapien
aacatccctttcttctgctgagtct

SEQ ID NO: 968581 - DNA, 25 bp, Homo sapien
tctgctgagtctcctttctttccat

SEQ ID NO: 968582 - DNA, 25 bp, Homo sapien
ttggttgttgtggccaaacatccct

SEQ ID NO: 968583 - DNA, 25 bp, Homo sapien
ctttggttgttgtggccaaacatcc

SEQ ID NO: 968584 - DNA, 25 bp, Homo sapien
tctgtctttcaaggaccctgtactc

SEQ ID NO: 968585 - DNA, 25 bp, Homo sapien
tgtctttcaaggaccctgtactcac

SEQ ID NO: 968586 - DNA, 25 bp, Homo sapien
tctctgtctttcaaggaccctgtac

SEQ ID NO: 968587 - DNA, 25 bp, Homo sapien
aatctctgtctttcaaggaccctgt

SEQ ID NO: 968588 - DNA, 25 bp, Homo sapien
attcagccgcacagagatgaccgga

SEQ ID NO: 968589 - DNA, 25 bp, Homo sapien
cagacttgcagttgtgcaggagatc

SEQ ID NO: 968590 - DNA, 25 bp, Homo sapien
tgaagcatgactgcaacagacttgc

SEQ ID NO: 968591 - DNA, 25 bp, Homo sapien
gatgaccggaaaaatggctggcgca

SEQ ID NO: 968592 - DNA, 25 bp, Homo sapien
cactaaggacttctaacattgcaac

SEQ ID NO: 968593 - DNA, 25 bp, Homo sapien
cattgcaactatcaagatgatgatg

SEQ ID NO: 968594 - DNA, 25 bp, Homo sapien
tccattgcatcggttcttctggtgt

SEQ ID NO: 968595 - DNA, 25 bp, Homo sapien
tctgtgccaaatgcgaggctgccct

SEQ ID NO: 968596 - DNA, 25 bp, Homo sapien
gagcacttagaactataatcatttg

SEQ ID NO: 968597 - DNA, 25 bp, Homo sapien
tctttgagcacttagaactataatc

SEQ ID NO: 968598 - DNA, 25 bp, Homo sapien
ctgccaaaaccagagactcaaaatg

SEQ ID NO: 968599 - DNA, 25 bp, Homo sapien
aaccagagactcaaaatgaggtgaa

SEQ ID NO: 968600 - DNA, 25 bp, Homo sapien
taagttagcaatatcgatgatgcca

SEQ ID NO: 968601 - DNA, 25 bp, Homo sapien
gttagcaatatcgatgatgccaatg

SEQ ID NO: 968602 - DNA, 25 bp, Homo sapien
aattttaagttagcaatatcgatga

SEQ ID NO: 968603 - DNA, 25 bp, Homo sapien
aaaggatatgatttaccattgagta

SEQ ID NO: 968604 - DNA, 25 bp, Homo sapien
gaacagacttggtgggagggatatc

SEQ ID NO: 968605 - DNA, 25 bp, Homo sapien
ccagaacagacttggtgggagggat

SEQ ID NO: 968606 - DNA, 25 bp, Homo sapien
tacctatctgtttgtatcccagctg

SEQ ID NO: 968607 - DNA, 25 bp, Homo sapien
gtttgtatcccagctgtgaatccag

SEQ ID NO: 968608 - DNA, 25 bp, Homo sapien
ggatttccaaccctggttggctgcc

SEQ ID NO: 968609 - DNA, 25 bp, Homo sapien
ggcttgatgcgaaccacgaattgga

SEQ ID NO: 968610 - DNA, 25 bp, Homo sapien
aaatatatttgctggcttgatgcga

SEQ ID NO: 968611 - DNA, 25 bp, Homo sapien
tccaactgggcttgatattgagatg

SEQ ID NO: 968612 - DNA, 25 bp, Homo sapien
ttcttgttggtcttgaagtttcagc

SEQ ID NO: 968613 - DNA, 25 bp, Homo sapien
gttggtcttgaagtttcagcattac

SEQ ID NO: 968614 - DNA, 25 bp, Homo sapien
cttgaagtttcagcattacttctct

SEQ ID NO: 968615 - DNA, 25 bp, Homo sapien
ggtcttgaagtttcagcattacttc

SEQ ID NO: 968616 - DNA, 25 bp, Homo sapien
agtgtttcctggtaaggggatgcct

SEQ ID NO: 968617 - DNA, 25 bp, Homo sapien
aatgcaggttggatcagttttggga

SEQ ID NO: 968618 - DNA, 25 bp, Homo sapien
gaaggagtcatggagcagaatgcag

SEQ ID NO: 968619 - DNA, 25 bp, Homo sapien
tcatgtgactgtgcctagaagtgtt

SEQ ID NO: 968620 - DNA, 25 bp, Homo sapien
gggagtaaggctatttgttctgcag

SEQ ID NO: 968621 - DNA, 25 bp, Homo sapien
tccgttaatttcgagaaccatctgg

SEQ ID NO: 968622 - DNA, 25 bp, Homo sapien
tatgaaggataggaatcctggcact

SEQ ID NO: 968623 - DNA, 25 bp, Homo sapien
taagaatcacaaacccactgtcagt

SEQ ID NO: 968624 - DNA, 25 bp, Homo sapien
aggatctctggggacctcagaaggg

SEQ ID NO: 968625 - DNA, 25 bp, Homo sapien
ccatggggaggatctctggggacct

SEQ ID NO: 968626 - DNA, 25 bp, Homo sapien
gatctctggggacctcagaagggca

SEQ ID NO: 968627 - DNA, 25 bp, Homo sapien
gggaggatctctggggacctcagaa

SEQ ID NO: 968628 - DNA, 25 bp, Homo sapien
tttggttgtagcatcaggatcctca

SEQ ID NO: 968629 - DNA, 25 bp, Homo sapien
ctttggttgtagcatcaggatcctc

SEQ ID NO: 968630 - DNA, 25 bp, Homo sapien
tacagagatctctatcaggtacagg

SEQ ID NO: 968631 - DNA, 25 bp, Homo sapien
gttgaataacaacgaggcacagttg

SEQ ID NO: 968632 - DNA, 25 bp, Homo sapien
ccttgtaggccagtgagaaatgtac

SEQ ID NO: 968633 - DNA, 25 bp, Homo sapien
cagttgcatgcatcttggccctcca

SEQ ID NO: 968634 - DNA, 25 bp, Homo sapien
ctctgttttggctacatcaacatca

SEQ ID NO: 968635 - DNA, 25 bp, Homo sapien
acagagacagagtaatcaaaagctc

SEQ ID NO: 968636 - DNA, 25 bp, Homo sapien
gatatttggacaaggtggtaatcac

SEQ ID NO: 968637 - DNA, 25 bp, Homo sapien
aaagctcctctgttttggctacatc

SEQ ID NO: 968638 - DNA, 25 bp, Homo sapien
gatgcagaagttacgagatggctta

SEQ ID NO: 968639 - DNA, 25 bp, Homo sapien
aacatctgagatcttcaactttgga

SEQ ID NO: 968640 - DNA, 25 bp, Homo sapien
tcttcaactttggaggatgcagaag

SEQ ID NO: 968641 - DNA, 25 bp, Homo sapien
tacaccaaaagtatctaaacatctg

SEQ ID NO: 968642 - DNA, 25 bp, Homo sapien
tagatagactaaaactggctcagag

SEQ ID NO: 968643 - DNA, 25 bp, Homo sapien
gatgccagtcgcaactcctgtgaag

SEQ ID NO: 968644 - DNA, 25 bp, Homo sapien
gaaattggtgggattgcctcagctc

SEQ ID NO: 968645 - DNA, 25 bp, Homo sapien
ggtacaagtctcctgtcactcttag

SEQ ID NO: 968646 - DNA, 25 bp, Homo sapien
tataaggcagtagttccataagcgt

SEQ ID NO: 968647 - DNA, 25 bp, Homo sapien
tttatggctggtacagcatgccccg

SEQ ID NO: 968648 - DNA, 25 bp, Homo sapien
gcatgccccgcataaagacagttta

SEQ ID NO: 968649 - DNA, 25 bp, Homo sapien
ccataagcgtacgatggcggtggct

SEQ ID NO: 968650 - DNA, 25 bp, Homo sapien
ttcatctggaagcagtatggggctg

SEQ ID NO: 968651 - DNA, 25 bp, Homo sapien
gacaatctctatgggatcctctggt

SEQ ID NO: 968652 - DNA, 25 bp, Homo sapien
gcggcagtgggcgaagacaatctct

SEQ ID NO: 968653 - DNA, 25 bp, Homo sapien
ggcgaagacaatctctatgggatcc

SEQ ID NO: 968654 - DNA, 25 bp, Homo sapien
tgtggatcggtgcacatatctgatc

SEQ ID NO: 968655 - DNA, 25 bp, Homo sapien
tctgcctgtgctctgattaaactgc

SEQ ID NO: 968656 - DNA, 25 bp, Homo sapien
aaactgcttgtactcgtactgaact

SEQ ID NO: 968657 - DNA, 25 bp, Homo sapien
ccttccttgttctgagttggctctc

SEQ ID NO: 968658 - DNA, 25 bp, Homo sapien
cacagtgtctctgccatgtcctcca

SEQ ID NO: 968659 - DNA, 25 bp, Homo sapien
cattacattgcacccacagtgtctc

SEQ ID NO: 968660 - DNA, 25 bp, Homo sapien
tacattgcacccacagtgtctctgc

SEQ ID NO: 968661 - DNA, 25 bp, Homo sapien
acagtgtctctgccatgtcctccat

SEQ ID NO: 968662 - DNA, 25 bp, Homo sapien
ctgcccttgacttagcaagtcccat

SEQ ID NO: 968663 - DNA, 25 bp, Homo sapien
cctgcccttgacttagcaagtccca

SEQ ID NO: 968664 - DNA, 25 bp, Homo sapien
tgattacgtcgtggttctctgcaaa

SEQ ID NO: 968665 - DNA, 25 bp, Homo sapien
caaaatagttccacttagcagagca

SEQ ID NO: 968666 - DNA, 25 bp, Homo sapien
ttagcagagcacatagctcagagcc

SEQ ID NO: 968667 - DNA, 25 bp, Homo sapien
caaatggggcgttggtgcatgtaaa

SEQ ID NO: 968668 - DNA, 25 bp, Homo sapien
agagtttcccatcaagtgtgtgttc

SEQ ID NO: 968669 - DNA, 25 bp, Homo sapien
gtttcccatcaagtgtgtgttctgt

SEQ ID NO: 968670 - DNA, 25 bp, Homo sapien
gagtttcccatcaagtgtgtgttct

SEQ ID NO: 968671 - DNA, 25 bp, Homo sapien
cagagtttcccatcaagtgtgtgtt

SEQ ID NO: 968672 - DNA, 25 bp, Homo sapien
gccctgtggttgaatggtcttttcc

SEQ ID NO: 968673 - DNA, 25 bp, Homo sapien
tttggaaaccacttgcagctatact

SEQ ID NO: 968674 - DNA, 25 bp, Homo sapien
aatagttattttgaggtgccctgtg

SEQ ID NO: 968675 - DNA, 25 bp, Homo sapien
acagcagctgagagaagtattttct

SEQ ID NO: 968676 - DNA, 25 bp, Homo sapien
gaagaaagtcgcttcttctcattat

SEQ ID NO: 968677 - DNA, 25 bp, Homo sapien
agaagaaagtcgcttcttctcatta

SEQ ID NO: 968678 - DNA, 25 bp, Homo sapien
caaagaagaaagtcgcttcttctca

SEQ ID NO: 968679 - DNA, 25 bp, Homo sapien
agaaagtcgcttcttctcattattt

SEQ ID NO: 968680 - DNA, 25 bp, Homo sapien
aagtctggaaatagagaactgcagt

SEQ ID NO: 968681 - DNA, 25 bp, Homo sapien
cagtgacttcgaagcaacatatctt

SEQ ID NO: 968682 - DNA, 25 bp, Homo sapien
aggatataagactcagctttaacct

SEQ ID NO: 968683 - DNA, 25 bp, Homo sapien
gctttaacctcatcacttagagaat

SEQ ID NO: 968684 - DNA, 25 bp, Homo sapien
cccaggaacttcagacttgtagaat

SEQ ID NO: 968685 - DNA, 25 bp, Homo sapien
aggaacttcagacttgtagaattac

SEQ ID NO: 968686 - DNA, 25 bp, Homo sapien
ccaggaacttcagacttgtagaatt

SEQ ID NO: 968687 - DNA, 25 bp, Homo sapien
caggaacttcagacttgtagaatta

SEQ ID NO: 968688 - DNA, 25 bp, Homo sapien
tcaaagataaatagttggccagaga

SEQ ID NO: 968689 - DNA, 25 bp, Homo sapien
agttactgcagctgagcaatcaaag

SEQ ID NO: 968690 - DNA, 25 bp, Homo sapien
gaaacttacaattacctcagtgata

SEQ ID NO: 968691 - DNA, 25 bp, Homo sapien
tcagtgatacaaagacaatgctcct

SEQ ID NO: 968692 - DNA, 25 bp, Homo sapien
tttagacatcaatgggatttcacta

SEQ ID NO: 968693 - DNA, 25 bp, Homo sapien
tgaaccagaaggaacctcggcaaat

SEQ ID NO: 968694 - DNA, 25 bp, Homo sapien
tcagctgagagtgttccctttttag

SEQ ID NO: 968695 - DNA, 25 bp, Homo sapien
ccctttttagcatggcaagctgttt

SEQ ID NO: 968696 - DNA, 25 bp, Homo sapien
taaatgtccacatgctccactttat

SEQ ID NO: 968697 - DNA, 25 bp, Homo sapien
aatgtccacatgctccactttatct

SEQ ID NO: 968698 - DNA, 25 bp, Homo sapien
aaatgtccacatgctccactttatc

SEQ ID NO: 968699 - DNA, 25 bp, Homo sapien
ctaaatgtccacatgctccacttta

SEQ ID NO: 968700 - DNA, 25 bp, Homo sapien
tgatttcattgttaatttgcatgcc

SEQ ID NO: 968701 - DNA, 25 bp, Homo sapien
gtgatttcattgttaatttgcatgc

SEQ ID NO: 968702 - DNA, 25 bp, Homo sapien
tggtgatttcattgttaatttgcat

SEQ ID NO: 968703 - DNA, 25 bp, Homo sapien
aaatggtgatttcattgttaatttg

SEQ ID NO: 968704 - DNA, 25 bp, Homo sapien
aatgtggtcacttccactatcatgg

SEQ ID NO: 968705 - DNA, 25 bp, Homo sapien
caatgtggtcacttccactatcatg

SEQ ID NO: 968706 - DNA, 25 bp, Homo sapien
gtcacttccactatcatggtcattt

SEQ ID NO: 968707 - DNA, 25 bp, Homo sapien
cacttccactatcatggtcatttcc

SEQ ID NO: 968708 - DNA, 25 bp, Homo sapien
cctgagaaattctaactcagcagat

SEQ ID NO: 968709 - DNA, 25 bp, Homo sapien
gaccctgagaaattctaactcagca

SEQ ID NO: 968710 - DNA, 25 bp, Homo sapien
tagaccctgagaaattctaactcag

SEQ ID NO: 968711 - DNA, 25 bp, Homo sapien
ccctgagaaattctaactcagcaga

SEQ ID NO: 968712 - DNA, 25 bp, Homo sapien
tctgaatttcgcatttgttctgtcc

SEQ ID NO: 968713 - DNA, 25 bp, Homo sapien
ttttagtgttcaaatcaggcctccc

SEQ ID NO: 968714 - DNA, 25 bp, Homo sapien
ttcgcatttgttctgtcccacagcc

SEQ ID NO: 968715 - DNA, 25 bp, Homo sapien
tccaaatgatcaaaactgccactcc

SEQ ID NO: 968716 - DNA, 25 bp, Homo sapien
caaaactgcattggttgacaaggac

SEQ ID NO: 968717 - DNA, 25 bp, Homo sapien
aaggactagagccaactgatcccag

SEQ ID NO: 968718 - DNA, 25 bp, Homo sapien
gcccaatcccttgttgctgatggaa

SEQ ID NO: 968719 - DNA, 25 bp, Homo sapien
ccttttgccctgcatagttgccatg

SEQ ID NO: 968720 - DNA, 25 bp, Homo sapien
ttgccaagctttgagtaagaactga

SEQ ID NO: 968721 - DNA, 25 bp, Homo sapien
cctaggagagcattataaagacagc

SEQ ID NO: 968722 - DNA, 25 bp, Homo sapien
taaagacagcagcatgcagaaaggc

SEQ ID NO: 968723 - DNA, 25 bp, Homo sapien
gcaaggaggtgggtaacctgtggcc

SEQ ID NO: 968724 - DNA, 25 bp, Homo sapien
cttctccagcattgtccagaattct

SEQ ID NO: 968725 - DNA, 25 bp, Homo sapien
ttctccagcattgtccagaattctt

SEQ ID NO: 968726 - DNA, 25 bp, Homo sapien
atgatgatagctgatggactttact

SEQ ID NO: 968727 - DNA, 25 bp, Homo sapien
tatcccttcaatggaggtggatgga

SEQ ID NO: 968728 - DNA, 25 bp, Homo sapien
tgtttctaatccatacagcaaggct

SEQ ID NO: 968729 - DNA, 25 bp, Homo sapien
cactggcaagcctcttcgtgagaag

SEQ ID NO: 968730 - DNA, 25 bp, Homo sapien
gagaggaaactttggtgttcctata

SEQ ID NO: 968731 - DNA, 25 bp, Homo sapien
ctataaatatgggaattctctctga

SEQ ID NO: 968732 - DNA, 25 bp, Homo sapien
ataaatatgggaattctctctgagc

SEQ ID NO: 968733 - DNA, 25 bp, Homo sapien
taaatatgggaattctctctgagct

SEQ ID NO: 968734 - DNA, 25 bp, Homo sapien
cagtaatcctagattgtcatctgcc

SEQ ID NO: 968735 - DNA, 25 bp, Homo sapien
catttgcaccagtggtgaagttcac

SEQ ID NO: 968736 - DNA, 25 bp, Homo sapien
gcatgcagtaatcctagattgtcat

SEQ ID NO: 968737 - DNA, 25 bp, Homo sapien
tggccatttgcaccagtggtgaagt

SEQ ID NO: 968738 - DNA, 25 bp, Homo sapien
aatgccaagggtccataagctttca

SEQ ID NO: 968739 - DNA, 25 bp, Homo sapien
tagacgaagccgtgtatgaagagtt

SEQ ID NO: 968740 - DNA, 25 bp, Homo sapien
tttacccagaggacagtactggagg

SEQ ID NO: 968741 - DNA, 25 bp, Homo sapien
gaatgattacagtgccatggcagga

SEQ ID NO: 968742 - DNA, 25 bp, Homo sapien
gacaaatatattgcttgcagcctag

SEQ ID NO: 968743 - DNA, 25 bp, Homo sapien
tgcagcctagaaggagctcaatcag

SEQ ID NO: 968744 - DNA, 25 bp, Homo sapien
ctcaagccaggtaagatgtaggaca

SEQ ID NO: 968745 - DNA, 25 bp, Homo sapien
tctgaatctagactttactgctgac

SEQ ID NO: 968746 - DNA, 25 bp, Homo sapien
aggatacttccaaaagacagggtct

SEQ ID NO: 968747 - DNA, 25 bp, Homo sapien
tccatagcaaagtgtgcagaactgg

SEQ ID NO: 968748 - DNA, 25 bp, Homo sapien
agaagtagagataaccgaacgtgtc

SEQ ID NO: 968749 - DNA, 25 bp, Homo sapien
aagagagaagtagagataaccgaac

SEQ ID NO: 968750 - DNA, 25 bp, Homo sapien
gcaaatcatatgttggaggcatcac

SEQ ID NO: 968751 - DNA, 25 bp, Homo sapien
gaagcggatgtgtgatgcacctcta

SEQ ID NO: 968752 - DNA, 25 bp, Homo sapien
gcagggaggcatacatgaacagtca

SEQ ID NO: 968753 - DNA, 25 bp, Homo sapien
gatccacttttcttgctcggcatag

SEQ ID NO: 968754 - DNA, 25 bp, Homo sapien
tatgaacgccctgactttgtagcta

SEQ ID NO: 968755 - DNA, 25 bp, Homo sapien
tgaaggagcaaacttattcgcgtcc

SEQ ID NO: 968756 - DNA, 25 bp, Homo sapien
tagcctgctaaggagcaacagctgt

SEQ ID NO: 968757 - DNA, 25 bp, Homo sapien
caggccacccacagaatttttcaga

SEQ ID NO: 968758 - DNA, 25 bp, Homo sapien
caaagattcgttgccttgagcttga

SEQ ID NO: 968759 - DNA, 25 bp, Homo sapien
caaaacgtagaatgtcaagccaatc

SEQ ID NO: 968760 - DNA, 25 bp, Homo sapien
gaagtgtatagtgattgcccagagc

SEQ ID NO: 968761 - DNA, 25 bp, Homo sapien
tgagcttgactttcctcaacaggaa

SEQ ID NO: 968762 - DNA, 25 bp, Homo sapien
tgtttcctttacctcgatgggcctg

SEQ ID NO: 968763 - DNA, 25 bp, Homo sapien
tgccatgatcagctagagaagacag

SEQ ID NO: 968764 - DNA, 25 bp, Homo sapien
tgcacaatggcatccgagtctgttt

SEQ ID NO: 968765 - DNA, 25 bp, Homo sapien
gactcaggataagggtgcttctcaa

SEQ ID NO: 968766 - DNA, 25 bp, Homo sapien
gccaggtctctgttactagctccaa

SEQ ID NO: 968767 - DNA, 25 bp, Homo sapien
gaccagttatccctcctaaagcgct

SEQ ID NO: 968768 - DNA, 25 bp, Homo sapien
taaagcgctgccttcactagtcaaa

SEQ ID NO: 968769 - DNA, 25 bp, Homo sapien
tcgctcagcagagtagccaggtctc

SEQ ID NO: 968770 - DNA, 25 bp, Homo sapien
gccgacgtatctgaatggaaatctc

SEQ ID NO: 968771 - DNA, 25 bp, Homo sapien
tgatgaacttggagacagagacctt

SEQ ID NO: 968772 - DNA, 25 bp, Homo sapien
cctttacggagctttctgctgatga

SEQ ID NO: 968773 - DNA, 25 bp, Homo sapien
gattctttgagacatgccgacgtat

SEQ ID NO: 968774 - DNA, 25 bp, Homo sapien
cacaatgggtgacaactttgtagtt

SEQ ID NO: 968775 - DNA, 25 bp, Homo sapien
ggagcaaagtaaattgcatacttta

SEQ ID NO: 968776 - DNA, 25 bp, Homo sapien
cagctccgcgatcactatagaaaag

SEQ ID NO: 968777 - DNA, 25 bp, Homo sapien
catactttagtgatgcagctccgcg

SEQ ID NO: 968778 - DNA, 25 bp, Homo sapien
ataccgtggcaaccagaacacttac

SEQ ID NO: 968779 - DNA, 25 bp, Homo sapien
tattagttgaagctattgaaaggca

SEQ ID NO: 968780 - DNA, 25 bp, Homo sapien
ggattcatcttctctaataccgtgg

SEQ ID NO: 968781 - DNA, 25 bp, Homo sapien
tttgcaaattatattagttgaagct

SEQ ID NO: 968782 - DNA, 25 bp, Homo sapien
cattatgttcatcatgttccctgtt

SEQ ID NO: 968783 - DNA, 25 bp, Homo sapien
tcatgttccctgtttacatctttta

SEQ ID NO: 968784 - DNA, 25 bp, Homo sapien
catttcgattactggcttccaaatc

SEQ ID NO: 968785 - DNA, 25 bp, Homo sapien
caaatgattgttgggatataggtat

SEQ ID NO: 968786 - DNA, 25 bp, Homo sapien
tgatgttactgatgattcttcttta

SEQ ID NO: 968787 - DNA, 25 bp, Homo sapien
ctttggattctcaaagttattttct

SEQ ID NO: 968788 - DNA, 25 bp, Homo sapien
attttcttctgatgttactgatgat

SEQ ID NO: 968789 - DNA, 25 bp, Homo sapien
ctgtattctttggattctcaaagtt

SEQ ID NO: 968790 - DNA, 25 bp, Homo sapien
tcatggcaagctctgataacagata

SEQ ID NO: 968791 - DNA, 25 bp, Homo sapien
taaagggacttccttgctgcggtca

SEQ ID NO: 968792 - DNA, 25 bp, Homo sapien
tctgataacagataaagggacttcc

SEQ ID NO: 968793 - DNA, 25 bp, Homo sapien
tctctctaacactcatggcaagctc

SEQ ID NO: 968794 - DNA, 25 bp, Homo sapien
tatgtaaatgttcttctgttccttc

SEQ ID NO: 968795 - DNA, 25 bp, Homo sapien
agtatatttatactgtatgtaaatg

SEQ ID NO: 968796 - DNA, 25 bp, Homo sapien
tctccacattcacaaattttaccat

SEQ ID NO: 968797 - DNA, 25 bp, Homo sapien
ctgtgcattcatctccataagtata

SEQ ID NO: 968798 - DNA, 25 bp, Homo sapien
ttgacatcaaaagcggctgtaatcc

SEQ ID NO: 968799 - DNA, 25 bp, Homo sapien
ccagtttcatcaagagttaccttga

SEQ ID NO: 968800 - DNA, 25 bp, Homo sapien
ctgatgaggcagcattagtagtgaa

SEQ ID NO: 968801 - DNA, 25 bp, Homo sapien
tcaagagttaccttgaaaagtctga

SEQ ID NO: 968802 - DNA, 25 bp, Homo sapien
tcagattatagaggattttttaagt

SEQ ID NO: 968803 - DNA, 25 bp, Homo sapien
tttaagtttgatagggccctgggca

SEQ ID NO: 968804 - DNA, 25 bp, Homo sapien
gggcaatcggatccacttcagatat

SEQ ID NO: 968805 - DNA, 25 bp, Homo sapien
cattatttcctgttgaggggtaggg

SEQ ID NO: 968806 - DNA, 25 bp, Homo sapien
ctttaagcagccttttatttgtctg

SEQ ID NO: 968807 - DNA, 25 bp, Homo sapien
ttccatggttttacaggctccggct

SEQ ID NO: 968808 - DNA, 25 bp, Homo sapien
tggttttacaggctccggctcttgt

SEQ ID NO: 968809 - DNA, 25 bp, Homo sapien
catggttttacaggctccggctctt

SEQ ID NO: 968810 - DNA, 25 bp, Homo sapien
gttttacaggctccggctcttgttc

SEQ ID NO: 968811 - DNA, 25 bp, Homo sapien
aatgtccgtccctaagtcaaaagtg

SEQ ID NO: 968812 - DNA, 25 bp, Homo sapien
caagaagagactcagttgactccag

SEQ ID NO: 968813 - DNA, 25 bp, Homo sapien
ggttgaagcactcggtaattcccag

SEQ ID NO: 968814 - DNA, 25 bp, Homo sapien
aatgtcataatgtgtctgccagtca

SEQ ID NO: 968815 - DNA, 25 bp, Homo sapien
gggtatccaggtatatgtcttcaga

SEQ ID NO: 968816 - DNA, 25 bp, Homo sapien
tcagaagaatcagaacctcgtctac

SEQ ID NO: 968817 - DNA, 25 bp, Homo sapien
cagaacctcgtctacttggttgagg

SEQ ID NO: 968818 - DNA, 25 bp, Homo sapien
tatctttgctaatctgactaggtac

SEQ ID NO: 968819 - DNA, 25 bp, Homo sapien
cattgaactttgctgattaatggca

SEQ ID NO: 968820 - DNA, 25 bp, Homo sapien
caaatggtgcctcgctgttgtcatg

SEQ ID NO: 968821 - DNA, 25 bp, Homo sapien
catggattgccatgacaaatggtgc

SEQ ID NO: 968822 - DNA, 25 bp, Homo sapien
taatggcatttataccatggattgc

SEQ ID NO: 968823 - DNA, 25 bp, Homo sapien
cactggaatctgagcaaggaaattg

SEQ ID NO: 968824 - DNA, 25 bp, Homo sapien
gtccttcaacactggaatctgagca

SEQ ID NO: 968825 - DNA, 25 bp, Homo sapien
gaagtctggatcctccagtctccca

SEQ ID NO: 968826 - DNA, 25 bp, Homo sapien
cttctccaatacagcaagtgggtgt

SEQ ID NO: 968827 - DNA, 25 bp, Homo sapien
ctattcatagtatttgttattgtat

SEQ ID NO: 968828 - DNA, 25 bp, Homo sapien
ctcacattccttgtcccgaactgtt

SEQ ID NO: 968829 - DNA, 25 bp, Homo sapien
ctggccctcacattccttgtcccga

SEQ ID NO: 968830 - DNA, 25 bp, Homo sapien
cacattccttgtcccgaactgttac

SEQ ID NO: 968831 - DNA, 25 bp, Homo sapien
gacctctatggtattaagacttgaa

SEQ ID NO: 968832 - DNA, 25 bp, Homo sapien
gagtgactgatattaggagcctgaa

SEQ ID NO: 968833 - DNA, 25 bp, Homo sapien
ccaaatatagatagaagagtgactg

SEQ ID NO: 968834 - DNA, 25 bp, Homo sapien
tgaatataactaaaccatgtgacct

SEQ ID NO: 968835 - DNA, 25 bp, Homo sapien
tactgcccgttattaactttctgcg

SEQ ID NO: 968836 - DNA, 25 bp, Homo sapien
ttcatgttgtgcctggactgtccag

SEQ ID NO: 968837 - DNA, 25 bp, Homo sapien
gggtccactctgagattactgcccg

SEQ ID NO: 968838 - DNA, 25 bp, Homo sapien
tcatccacatgctctactaaatcag

SEQ ID NO: 968839 - DNA, 25 bp, Homo sapien
gaatgtgacagcttgtctgtttagc

SEQ ID NO: 968840 - DNA, 25 bp, Homo sapien
cttggttgacagaggaagagcccta

SEQ ID NO: 968841 - DNA, 25 bp, Homo sapien
cacacagagcacattatacagatgc

SEQ ID NO: 968842 - DNA, 25 bp, Homo sapien
tattcagctagaatgaatgtgacag

SEQ ID NO: 968843 - DNA, 25 bp, Homo sapien
accaggcctggctgctttggcatct

SEQ ID NO: 968844 - DNA, 25 bp, Homo sapien
caccaggcctggctgctttggcatc

SEQ ID NO: 968845 - DNA, 25 bp, Homo sapien
ccaggcctggctgctttggcatctt

SEQ ID NO: 968846 - DNA, 25 bp, Homo sapien
ccaccaggcctggctgctttggcat

SEQ ID NO: 968847 - DNA, 25 bp, Homo sapien
ttggctacggaaatgaaatcgcgct

SEQ ID NO: 968848 - DNA, 25 bp, Homo sapien
tattagccacaataacagagcctgg

SEQ ID NO: 968849 - DNA, 25 bp, Homo sapien
tagtttcaagggtcaggtatccagg

SEQ ID NO: 968850 - DNA, 25 bp, Homo sapien
gggagttctccaaaaggcactgtag

SEQ ID NO: 968851 - DNA, 25 bp, Homo sapien
ggaagctttgatgtccacttggtga

SEQ ID NO: 968852 - DNA, 25 bp, Homo sapien
aactttcgtgaggaagctttgatgt

SEQ ID NO: 968853 - DNA, 25 bp, Homo sapien
tttgatgtccacttggtgaaactcc

SEQ ID NO: 968854 - DNA, 25 bp, Homo sapien
taaactttcgtgaggaagctttgat

SEQ ID NO: 968855 - DNA, 25 bp, Homo sapien
gagccgttgaactttcttctggaac

SEQ ID NO: 968856 - DNA, 25 bp, Homo sapien
tcttctggaacctctttaaatgact

SEQ ID NO: 968857 - DNA, 25 bp, Homo sapien
taaatgacttttgccgatccacgtg

SEQ ID NO: 968858 - DNA, 25 bp, Homo sapien
attcacccagttgagccgttgaact

SEQ ID NO: 968859 - DNA, 25 bp, Homo sapien
ccgaggcgaacaaagcctgcagtgt

SEQ ID NO: 968860 - DNA, 25 bp, Homo sapien
acagagcgctaaaccccggccagtt

SEQ ID NO: 968861 - DNA, 25 bp, Homo sapien
tatattttatgaccacccatcaaca

SEQ ID NO: 968862 - DNA, 25 bp, Homo sapien
tggtggacgagttcaaggaattgca

SEQ ID NO: 968863 - DNA, 25 bp, Homo sapien
gggcctgaactttcacctctcgaac

SEQ ID NO: 968864 - DNA, 25 bp, Homo sapien
cggagaggcgaagcgagctgcgagc

SEQ ID NO: 968865 - DNA, 25 bp, Homo sapien
gaggggtccaccgagggcagcggct

SEQ ID NO: 968866 - DNA, 25 bp, Homo sapien
ccgggccgtgtctgcagtgtggcca

SEQ ID NO: 968867 - DNA, 25 bp, Homo sapien
ctgcgggatgggttggtggcccggg

SEQ ID NO: 968868 - DNA, 25 bp, Homo sapien
gatgtcctttcgcacctcttggcta

SEQ ID NO: 968869 - DNA, 25 bp, Homo sapien
tcagtttcactgagaaaaaggcccc

SEQ ID NO: 968870 - DNA, 25 bp, Homo sapien
tctccagaaaggaacgttagaggct

SEQ ID NO: 968871 - DNA, 25 bp, Homo sapien
gaagggtacgcgtccactctataaa

SEQ ID NO: 968872 - DNA, 25 bp, Homo sapien
tctcctcgttgggaacttgatcttc

SEQ ID NO: 968873 - DNA, 25 bp, Homo sapien
gatcttccaagtggccctagctctt

SEQ ID NO: 968874 - DNA, 25 bp, Homo sapien
gtggccctagctcttttacaataaa

SEQ ID NO: 968875 - DNA, 25 bp, Homo sapien
tttcccgctcacttactcggtacac

SEQ ID NO: 968876 - DNA, 25 bp, Homo sapien
gaagctgtccaccttttgattgttc

SEQ ID NO: 968877 - DNA, 25 bp, Homo sapien
tattcagaatccgtttttattgagg

SEQ ID NO: 968878 - DNA, 25 bp, Homo sapien
tattgaggtttcctagtgaagcata

SEQ ID NO: 968879 - DNA, 25 bp, Homo sapien
cagttttccaaggatttccacgtcg

SEQ ID NO: 968880 - DNA, 25 bp, Homo sapien
ccatttggggctggcgttttctaat

SEQ ID NO: 968881 - DNA, 25 bp, Homo sapien
taaaagattcggattatttgtccac

SEQ ID NO: 968882 - DNA, 25 bp, Homo sapien
caaaagggcgaggtagggccatttg

SEQ ID NO: 968883 - DNA, 25 bp, Homo sapien
tcggattatttgtccactgttcagc

SEQ ID NO: 968884 - DNA, 25 bp, Homo sapien
acagcacttgaggactgccggagtt

SEQ ID NO: 968885 - DNA, 25 bp, Homo sapien
ggactgccggagttgaaaagctcag

SEQ ID NO: 968886 - DNA, 25 bp, Homo sapien
gagtgagaacacagtctgtaggcac

SEQ ID NO: 968887 - DNA, 25 bp, Homo sapien
gctcagggaaagaaccgcaattcaa

SEQ ID NO: 968888 - DNA, 25 bp, Homo sapien
gaggaaagtttcagcgcctctcgga

SEQ ID NO: 968889 - DNA, 25 bp, Homo sapien
tgacttgcgagcaaagcagcgggct

SEQ ID NO: 968890 - DNA, 25 bp, Homo sapien
ctattggccgcagctatttggagga

SEQ ID NO: 968891 - DNA, 25 bp, Homo sapien
ggaacgccacgctttgcgactgact

SEQ ID NO: 968892 - DNA, 25 bp, Homo sapien
agtcactgataggacccttcccgaa

SEQ ID NO: 968893 - DNA, 25 bp, Homo sapien
gttacttttgctcccctcagtcact

SEQ ID NO: 968894 - DNA, 25 bp, Homo sapien
tcactgataggacccttcccgaaaa

SEQ ID NO: 968895 - DNA, 25 bp, Homo sapien
gactctctaagtcccagcttggcgg

SEQ ID NO: 968896 - DNA, 25 bp, Homo sapien
ctgcgcgaccacgaggaagcccgag

SEQ ID NO: 968897 - DNA, 25 bp, Homo sapien
gcatacggttttgttctcgcctccc

SEQ ID NO: 968898 - DNA, 25 bp, Homo sapien
ggctttgccaatacagcatacggtt

SEQ ID NO: 968899 - DNA, 25 bp, Homo sapien
gaagcagcagacacaactcggcttt

SEQ ID NO: 968900 - DNA, 25 bp, Homo sapien
acaactcggctttgccaatacagca

SEQ ID NO: 968901 - DNA, 25 bp, Homo sapien
agcctccgagaaagcgcgagacacg

SEQ ID NO: 968902 - DNA, 25 bp, Homo sapien
gcctccgagaaagcgcgagacacgc

SEQ ID NO: 968903 - DNA, 25 bp, Homo sapien
aaagcgcgagacacgccggcgcgtg

SEQ ID NO: 968904 - DNA, 25 bp, Homo sapien
ccgagaaagcgcgagacacgccggc

SEQ ID NO: 968905 - DNA, 25 bp, Homo sapien
gctgcccggactcgcgcgtgggtgt

SEQ ID NO: 968906 - DNA, 25 bp, Homo sapien
tgcccggactcgcgcgtgggtgtgt

SEQ ID NO: 968907 - DNA, 25 bp, Homo sapien
cagctgcccggactcgcgcgtgggt

SEQ ID NO: 968908 - DNA, 25 bp, Homo sapien
gcccggactcgcgcgtgggtgtgtt

SEQ ID NO: 968909 - DNA, 25 bp, Homo sapien
ctgcccacggcgtccccggtcgcgg

SEQ ID NO: 968910 - DNA, 25 bp, Homo sapien
cgctgcccacggcgtccccggtcgc

SEQ ID NO: 968911 - DNA, 25 bp, Homo sapien
gctgcccacggcgtccccggtcgcg

SEQ ID NO: 968912 - DNA, 25 bp, Homo sapien
cccaccctgtcccagccacctccac

SEQ ID NO: 968913 - DNA, 25 bp, Homo sapien
caccctgtcccagccacctccacgc

SEQ ID NO: 968914 - DNA, 25 bp, Homo sapien
ccctgtcccagccacctccacgctg

SEQ ID NO: 968915 - DNA, 25 bp, Homo sapien
cctgtcccagccacctccacgctgg

SEQ ID NO: 968916 - DNA, 25 bp, Homo sapien
caaaggcagcgccctgcttgccggg

SEQ ID NO: 968917 - DNA, 25 bp, Homo sapien
tcccgcggtggcgacaaagtttcgc

SEQ ID NO: 968918 - DNA, 25 bp, Homo sapien
tgcgactttactctgctccgcgctc

SEQ ID NO: 968919 - DNA, 25 bp, Homo sapien
tgtgtcaaatttgggctcggcgttg

SEQ ID NO: 968920 - DNA, 25 bp, Homo sapien
accacttgttgttctctttcatttt

SEQ ID NO: 968921 - DNA, 25 bp, Homo sapien
ccacttgttgttctctttcattttg

SEQ ID NO: 968922 - DNA, 25 bp, Homo sapien
caccacttgttgttctctttcattt

SEQ ID NO: 968923 - DNA, 25 bp, Homo sapien
ttgccccttaaatgcccagtgtcct

SEQ ID NO: 968924 - DNA, 25 bp, Homo sapien
cccttgccccttaaatgcccagtgt

SEQ ID NO: 968925 - DNA, 25 bp, Homo sapien
tcccttgccccttaaatgcccagtg

SEQ ID NO: 968926 - DNA, 25 bp, Homo sapien
tagaattttatgctgagccatcata

SEQ ID NO: 968927 - DNA, 25 bp, Homo sapien
gaagaatgcttgtataactcttgtg

SEQ ID NO: 968928 - DNA, 25 bp, Homo sapien
tttcaatagatgaggtgtcccaaac

SEQ ID NO: 968929 - DNA, 25 bp, Homo sapien
tgtttcttgccatgtatgtcacttc

SEQ ID NO: 968930 - DNA, 25 bp, Homo sapien
acacagtaggtaccataacatgtag

SEQ ID NO: 968931 - DNA, 25 bp, Homo sapien
ggtaccataacatgtagttaatcag

SEQ ID NO: 968932 - DNA, 25 bp, Homo sapien
taatcagtatcacttctggaagctc

SEQ ID NO: 968933 - DNA, 25 bp, Homo sapien
caaagctgtttatatggttgagcct

SEQ ID NO: 968934 - DNA, 25 bp, Homo sapien
ggagtcgacaacatgtctactttgg

SEQ ID NO: 968935 - DNA, 25 bp, Homo sapien
gaacatgcctgtgggatcttaacct

SEQ ID NO: 968936 - DNA, 25 bp, Homo sapien
tgcagcaggatttccaggcactgga

SEQ ID NO: 968937 - DNA, 25 bp, Homo sapien
ttgatccacggaacagaacatgcct

SEQ ID NO: 968938 - DNA, 25 bp, Homo sapien
ttattgggatattaattctcagagg

SEQ ID NO: 968939 - DNA, 25 bp, Homo sapien
tttattgggatattaattctcagag

SEQ ID NO: 968940 - DNA, 25 bp, Homo sapien
aggtgctaatctcatcaagatttgt

SEQ ID NO: 968941 - DNA, 25 bp, Homo sapien
taatctcatcaagatttgtaggcat

SEQ ID NO: 968942 - DNA, 25 bp, Homo sapien
gcacattgtactgagatgtctgagg

SEQ ID NO: 968943 - DNA, 25 bp, Homo sapien
ttggaaagcacattgtactgagatg

SEQ ID NO: 968944 - DNA, 25 bp, Homo sapien
aaagcacattgtactgagatgtctg

SEQ ID NO: 968945 - DNA, 25 bp, Homo sapien
tataattggaaagcacattgtactg

SEQ ID NO: 968946 - DNA, 25 bp, Homo sapien
cttttactgctttctcttgattatc

SEQ ID NO: 968947 - DNA, 25 bp, Homo sapien
caatccttttactgctttctcttga

SEQ ID NO: 968948 - DNA, 25 bp, Homo sapien
ctgctttctcttgattatctccttc

SEQ ID NO: 968949 - DNA, 25 bp, Homo sapien
tactgctttctcttgattatctcct

SEQ ID NO: 968950 - DNA, 25 bp, Homo sapien
tttccattgaggtagcatgaaaatc

SEQ ID NO: 968951 - DNA, 25 bp, Homo sapien
ccattgaggtagcatgaaaatctag

SEQ ID NO: 968952 - DNA, 25 bp, Homo sapien
ttttgacctgaaggccaatagacat

SEQ ID NO: 968953 - DNA, 25 bp, Homo sapien
aaatctagatattttgacctgaagg

SEQ ID NO: 968954 - DNA, 25 bp, Homo sapien
attctctttgatgtcctccatactg

SEQ ID NO: 968955 - DNA, 25 bp, Homo sapien
gggtgacattctctttgatgtcctc

SEQ ID NO: 968956 - DNA, 25 bp, Homo sapien
tttgatgtcctccatactgcactta

SEQ ID NO: 968957 - DNA, 25 bp, Homo sapien
attgggtgacattctctttgatgtc

SEQ ID NO: 968958 - DNA, 25 bp, Homo sapien
ggatatttaatttggaagtattcat

SEQ ID NO: 968959 - DNA, 25 bp, Homo sapien
caggatatttaatttggaagtattc

SEQ ID NO: 968960 - DNA, 25 bp, Homo sapien
aggatatttaatttggaagtattca

SEQ ID NO: 968961 - DNA, 25 bp, Homo sapien
tttaaactgttcttctctggcaata

SEQ ID NO: 968962 - DNA, 25 bp, Homo sapien
aaactgttcttctctggcaataatc

SEQ ID NO: 968963 - DNA, 25 bp, Homo sapien
ctgttcttctctggcaataatcact

SEQ ID NO: 968964 - DNA, 25 bp, Homo sapien
ctgatgatgattcagttaaccaaac

SEQ ID NO: 968965 - DNA, 25 bp, Homo sapien
gttttatgtctacatagtatcccct

SEQ ID NO: 968966 - DNA, 25 bp, Homo sapien
tgtctacatagtatcccctctctgc

SEQ ID NO: 968967 - DNA, 25 bp, Homo sapien
ttatgtctacatagtatcccctctc

SEQ ID NO: 968968 - DNA, 25 bp, Homo sapien
agttttatgtctacatagtatcccc

SEQ ID NO: 968969 - DNA, 25 bp, Homo sapien
ttcctttggcctcctataccatcct

SEQ ID NO: 968970 - DNA, 25 bp, Homo sapien
tttggcctcctataccatcctgcat

SEQ ID NO: 968971 - DNA, 25 bp, Homo sapien
ctcctataccatcctgcattgtctc

SEQ ID NO: 968972 - DNA, 25 bp, Homo sapien
tcctataccatcctgcattgtctcc

SEQ ID NO: 968973 - DNA, 25 bp, Homo sapien
ctggtgattctgttgtttattgtta

SEQ ID NO: 968974 - DNA, 25 bp, Homo sapien
tggtgattctgttgtttattgttaa

SEQ ID NO: 968975 - DNA, 25 bp, Homo sapien
gtgattctgttgtttattgttaatc

SEQ ID NO: 968976 - DNA, 25 bp, Homo sapien
gattctgttgtttattgttaatcat

SEQ ID NO: 968977 - DNA, 25 bp, Homo sapien
taaggcttaggcatcttactgcaat

SEQ ID NO: 968978 - DNA, 25 bp, Homo sapien
gcatagaagaggtgatgagcttacc

SEQ ID NO: 968979 - DNA, 25 bp, Homo sapien
cagtctgttctaacctaggaaattg

SEQ ID NO: 968980 - DNA, 25 bp, Homo sapien
cccgtagaatgaattaagtccagtc

SEQ ID NO: 968981 - DNA, 25 bp, Homo sapien
tatcagccttcatagccaatcaaca

SEQ ID NO: 968982 - DNA, 25 bp, Homo sapien
tcagcagtagaattcaaaagacact

SEQ ID NO: 968983 - DNA, 25 bp, Homo sapien
tcatgaaattcaccaggctaaggat

SEQ ID NO: 968984 - DNA, 25 bp, Homo sapien
tattcaggaaaccatgtgctataca

SEQ ID NO: 968985 - DNA, 25 bp, Homo sapien
ttttgtggttaaaatctaatccagc

SEQ ID NO: 968986 - DNA, 25 bp, Homo sapien
gagttgttgctcaaacttactgatt

SEQ ID NO: 968987 - DNA, 25 bp, Homo sapien
tgttgctcaaacttactgattgttt

SEQ ID NO: 968988 - DNA, 25 bp, Homo sapien
ttgtggttaaaatctaatccagcag

SEQ ID NO: 968989 - DNA, 25 bp, Homo sapien
ctcatggcgcccagaacgtttctca

SEQ ID NO: 968990 - DNA, 25 bp, Homo sapien
tggcgcccagaacgtttctcagctc

SEQ ID NO: 968991 - DNA, 25 bp, Homo sapien
agcgactttcctcatggcgcccaga

SEQ ID NO: 968992 - DNA, 25 bp, Homo sapien
gactttcctcatggcgcccagaacg

SEQ ID NO: 968993 - DNA, 25 bp, Homo sapien
ccttttctcgatgaaacttgagggc

SEQ ID NO: 968994 - DNA, 25 bp, Homo sapien
ttctcgatgaaacttgagggcccgt

SEQ ID NO: 968995 - DNA, 25 bp, Homo sapien
ttttctcgatgaaacttgagggccc

SEQ ID NO: 968996 - DNA, 25 bp, Homo sapien
tttctcgatgaaacttgagggcccg

SEQ ID NO: 968997 - DNA, 25 bp, Homo sapien
ggtcaggcgcccgtggtggcggctg

SEQ ID NO: 968998 - DNA, 25 bp, Homo sapien
ggtgtgcttggtcaggcgcccgtgg

SEQ ID NO: 968999 - DNA, 25 bp, Homo sapien
tgtgcttggtcaggcgcccgtggtg

SEQ ID NO: 969000 - DNA, 25 bp, Homo sapien
ggcgcccgtggtggcggctgtgcct

SEQ ID NO: 969001 - DNA, 25 bp, Homo sapien
taggattttcagctatttgtttctg

SEQ ID NO: 969002 - DNA, 25 bp, Homo sapien
tcacctgctccagtttaagtttcaa

SEQ ID NO: 969003 - DNA, 25 bp, Homo sapien
tattaggacaaggacttgcagtgtc

SEQ ID NO: 969004 - DNA, 25 bp, Homo sapien
ttgcagtgtctgctgaaactttggt

SEQ ID NO: 969005 - DNA, 25 bp, Homo sapien
tgtttccatcactgatgcggatttc

SEQ ID NO: 969006 - DNA, 25 bp, Homo sapien
ttccatcactgatgcggatttcaga

SEQ ID NO: 969007 - DNA, 25 bp, Homo sapien
ctggaattctagataaagcatcctg

SEQ ID NO: 969008 - DNA, 25 bp, Homo sapien
ggagtcatactggaattctagataa

SEQ ID NO: 969009 - DNA, 25 bp, Homo sapien
ttaaacatcaatcaggaataagttt

SEQ ID NO: 969010 - DNA, 25 bp, Homo sapien
tctgcttctaccacggaaaatgtag

SEQ ID NO: 969011 - DNA, 25 bp, Homo sapien
gtttaaaagagttggtgatgctggc

SEQ ID NO: 969012 - DNA, 25 bp, Homo sapien
gctggctctgcttctaccacggaaa

SEQ ID NO: 969013 - DNA, 25 bp, Homo sapien
cataaaagcgtttctatggctgcag

SEQ ID NO: 969014 - DNA, 25 bp, Homo sapien
taatttagatccaaaagaatctgct

SEQ ID NO: 969015 - DNA, 25 bp, Homo sapien
gaatcaacatgcagatacataataa

SEQ ID NO: 969016 - DNA, 25 bp, Homo sapien
taatgggttgcacaaaggctggctt

SEQ ID NO: 969017 - DNA, 25 bp, Homo sapien
ggttcctgtcattaatgcattataa

SEQ ID NO: 969018 - DNA, 25 bp, Homo sapien
cttttttccattaccatggttcctg

SEQ ID NO: 969019 - DNA, 25 bp, Homo sapien
ttaccatggttcctgtcattaatgc

SEQ ID NO: 969020 - DNA, 25 bp, Homo sapien
ttttccattaccatggttcctgtca

SEQ ID NO: 969021 - DNA, 25 bp, Homo sapien
gggtccacaagggatgataagccaa

SEQ ID NO: 969022 - DNA, 25 bp, Homo sapien
ggagggtccacaagggatgataagc

SEQ ID NO: 969023 - DNA, 25 bp, Homo sapien
gagggtccacaagggatgataagcc

SEQ ID NO: 969024 - DNA, 25 bp, Homo sapien
ggtccacaagggatgataagccaat

SEQ ID NO: 969025 - DNA, 25 bp, Homo sapien
tttatcctttactgtctttcctcta

SEQ ID NO: 969026 - DNA, 25 bp, Homo sapien
ttatcctttactgtctttcctctac

SEQ ID NO: 969027 - DNA, 25 bp, Homo sapien
gttgtctactttgttcaaattcgtc

SEQ ID NO: 969028 - DNA, 25 bp, Homo sapien
tgttcaaattcgtctcccatagatt

SEQ ID NO: 969029 - DNA, 25 bp, Homo sapien
tttgttcaaattcgtctcccataga

SEQ ID NO: 969030 - DNA, 25 bp, Homo sapien
tctactttgttcaaattcgtctccc

SEQ ID NO: 969031 - DNA, 25 bp, Homo sapien
cacctccttctagtgaagataagag

SEQ ID NO: 969032 - DNA, 25 bp, Homo sapien
ccttctagtgaagataagagtatat

SEQ ID NO: 969033 - DNA, 25 bp, Homo sapien
cctccttctagtgaagataagagta

SEQ ID NO: 969034 - DNA, 25 bp, Homo sapien
ctccttctagtgaagataagagtat

SEQ ID NO: 969035 - DNA, 25 bp, Homo sapien
gatcatagtcagagccttaaccatg

SEQ ID NO: 969036 - DNA, 25 bp, Homo sapien
gctgcgttgatcatagtcagagcct

SEQ ID NO: 969037 - DNA, 25 bp, Homo sapien
cagagccttaaccatgggtgttatc

SEQ ID NO: 969038 - DNA, 25 bp, Homo sapien
cagttttggaggctgcgttgatcat

SEQ ID NO: 969039 - DNA, 25 bp, Homo sapien
cctagcctcgtttatgtaattgatg

SEQ ID NO: 969040 - DNA, 25 bp, Homo sapien
gcctcgtttatgtaattgatgtctg

SEQ ID NO: 969041 - DNA, 25 bp, Homo sapien
gttcctagcctcgtttatgtaattg

SEQ ID NO: 969042 - DNA, 25 bp, Homo sapien
ctgttcctagcctcgtttatgtaat

SEQ ID NO: 969043 - DNA, 25 bp, Homo sapien
gggagctaagttgcgagcaccatgt

SEQ ID NO: 969044 - DNA, 25 bp, Homo sapien
gggtgggagctaagttgcgagcacc

SEQ ID NO: 969045 - DNA, 25 bp, Homo sapien
gtgggagctaagttgcgagcaccat

SEQ ID NO: 969046 - DNA, 25 bp, Homo sapien
ggagctaagttgcgagcaccatgtt

SEQ ID NO: 969047 - DNA, 25 bp, Homo sapien
gcaatgggagtctcgccgtatcagg

SEQ ID NO: 969048 - DNA, 25 bp, Homo sapien
tcggcggtgggtctgcgacagtggc

SEQ ID NO: 969049 - DNA, 25 bp, Homo sapien
gaacccaggcacttaacgttgcagg

SEQ ID NO: 969050 - DNA, 25 bp, Homo sapien
gccgtatcaggagctcagcggacac

SEQ ID NO: 969051 - DNA, 25 bp, Homo sapien
gctttttgcaaagagacactagtgg

SEQ ID NO: 969052 - DNA, 25 bp, Homo sapien
tgacgtaccccgatgcagctttgtg

SEQ ID NO: 969053 - DNA, 25 bp, Homo sapien
aactgttgcctacagagatgggctc

SEQ ID NO: 969054 - DNA, 25 bp, Homo sapien
tcattgtaaccagccaaacttgacg

SEQ ID NO: 969055 - DNA, 25 bp, Homo sapien
tcagtaagttgttcattctgtctct

SEQ ID NO: 969056 - DNA, 25 bp, Homo sapien
gcttcagtaagttgttcattctgtc

SEQ ID NO: 969057 - DNA, 25 bp, Homo sapien
cagcttcagtaagttgttcattctg

SEQ ID NO: 969058 - DNA, 25 bp, Homo sapien
ctgtctctgtagctgtagtttttac

SEQ ID NO: 969059 - DNA, 25 bp, Homo sapien
ttcttctctgctagttgattcctgt

SEQ ID NO: 969060 - DNA, 25 bp, Homo sapien
tttgcatctgctgtgtacagacttg

SEQ ID NO: 969061 - DNA, 25 bp, Homo sapien
gctgtgtacagacttggctttgtac

SEQ ID NO: 969062 - DNA, 25 bp, Homo sapien
tctttcttctctgctagttgattcc

SEQ ID NO: 969063 - DNA, 25 bp, Homo sapien
aattgcagagcactggagctttacc

SEQ ID NO: 969064 - DNA, 25 bp, Homo sapien
catcctctgaatatgctggcagaga

SEQ ID NO: 969065 - DNA, 25 bp, Homo sapien
aaggctgaagcttgattaacatctg

SEQ ID NO: 969066 - DNA, 25 bp, Homo sapien
tgttgtggctgtgaaatgcttgtct

SEQ ID NO: 969067 - DNA, 25 bp, Homo sapien
tttgtcacccctcacgttgcacacc

SEQ ID NO: 969068 - DNA, 25 bp, Homo sapien
tggctcagtcttgaacctttgtcac

SEQ ID NO: 969069 - DNA, 25 bp, Homo sapien
gctcagtcttgaacctttgtcaccc

SEQ ID NO: 969070 - DNA, 25 bp, Homo sapien
ccctcacgttgcacaccaaagacat

SEQ ID NO: 969071 - DNA, 25 bp, Homo sapien
agtgactgcaattaacctgactttg

SEQ ID NO: 969072 - DNA, 25 bp, Homo sapien
aaatctgacagcaaatgacaggcat

SEQ ID NO: 969073 - DNA, 25 bp, Homo sapien
cgctgactctgtaagttgctggtga

SEQ ID NO: 969074 - DNA, 25 bp, Homo sapien
gccaattgttactgtgcgctgactc

SEQ ID NO: 969075 - DNA, 25 bp, Homo sapien
aaagcacactctatacaactacctc

SEQ ID NO: 969076 - DNA, 25 bp, Homo sapien
gtagtttgaattacaatctttgcct

SEQ ID NO: 969077 - DNA, 25 bp, Homo sapien
tgttggttatgtagtttgaattaca

SEQ ID NO: 969078 - DNA, 25 bp, Homo sapien
caaaagcacactctatacaactacc

SEQ ID NO: 969079 - DNA, 25 bp, Homo sapien
agttgatgtgcgttgtcttccctag

SEQ ID NO: 969080 - DNA, 25 bp, Homo sapien
gaagtgtacacttggcctgacatat

SEQ ID NO: 969081 - DNA, 25 bp, Homo sapien
tcttccctagacaaaacagatggta

SEQ ID NO: 969082 - DNA, 25 bp, Homo sapien
tatagagttgtcgtctaccacatga

SEQ ID NO: 969083 - DNA, 25 bp, Homo sapien
tatctgtagagcagctaaagcttta

SEQ ID NO: 969084 - DNA, 25 bp, Homo sapien
ccttcctgagcctctccggtttgta

SEQ ID NO: 969085 - DNA, 25 bp, Homo sapien
tgaactttggcatgttaacataacc

SEQ ID NO: 969086 - DNA, 25 bp, Homo sapien
caaattcagacatctctagttgatt

SEQ ID NO: 969087 - DNA, 25 bp, Homo sapien
caaatataaacgtggtattatagca

SEQ ID NO: 969088 - DNA, 25 bp, Homo sapien
tcaaatataaacgtggtattatagc

SEQ ID NO: 969089 - DNA, 25 bp, Homo sapien
gtaatcaaatataaacgtggtatta

SEQ ID NO: 969090 - DNA, 25 bp, Homo sapien
aatcaaatataaacgtggtattata

SEQ ID NO: 969091 - DNA, 25 bp, Homo sapien
tcaaagctgattgctagtgacattt

SEQ ID NO: 969092 - DNA, 25 bp, Homo sapien
aagctgattgctagtgacattttca

SEQ ID NO: 969093 - DNA, 25 bp, Homo sapien
ttgctagtgacattttcacagtggt

SEQ ID NO: 969094 - DNA, 25 bp, Homo sapien
gctgattgctagtgacattttcaca

SEQ ID NO: 969095 - DNA, 25 bp, Homo sapien
cttaaactggacctgaagttcccat

SEQ ID NO: 969096 - DNA, 25 bp, Homo sapien
tccaagatatgcttcattgcaattg

SEQ ID NO: 969097 - DNA, 25 bp, Homo sapien
cctgcagtccttaaatcacagtctg

SEQ ID NO: 969098 - DNA, 25 bp, Homo sapien
aatcacagtctgttccaagatatgc

SEQ ID NO: 969099 - DNA, 25 bp, Homo sapien
tatatcccctgcagtccttaaatca

SEQ ID NO: 969100 - DNA, 25 bp, Homo sapien
tgcacagattcctgggatataaatg

SEQ ID NO: 969101 - DNA, 25 bp, Homo sapien
aaagtggagactgacagagtcatgc

SEQ ID NO: 969102 - DNA, 25 bp, Homo sapien
tgcaaggttacacaatacagacggt

SEQ ID NO: 969103 - DNA, 25 bp, Homo sapien
cacactttaagtgatgaactaaaca

SEQ ID NO: 969104 - DNA, 25 bp, Homo sapien
ttcctgtagatctgcggtagcattt

SEQ ID NO: 969105 - DNA, 25 bp, Homo sapien
atgcagggtcataatctttgtcttg

SEQ ID NO: 969106 - DNA, 25 bp, Homo sapien
tctgcggtagcatttccttgccttg

SEQ ID NO: 969107 - DNA, 25 bp, Homo sapien
gcagggtcataatctttgtcttggg

SEQ ID NO: 969108 - DNA, 25 bp, Homo sapien
aggtgaatagagaaccgaagttttg

SEQ ID NO: 969109 - DNA, 25 bp, Homo sapien
aggaaggtgaatagagaaccgaagt

SEQ ID NO: 969110 - DNA, 25 bp, Homo sapien
aaggaaggtgaatagagaaccgaag

SEQ ID NO: 969111 - DNA, 25 bp, Homo sapien
gcatctcaatgcagtagttcaaaca

SEQ ID NO: 969112 - DNA, 25 bp, Homo sapien
cacaccagctggcagtgtaatgcca

SEQ ID NO: 969113 - DNA, 25 bp, Homo sapien
ccctgagggttaagacgtggcaact

SEQ ID NO: 969114 - DNA, 25 bp, Homo sapien
gcacatcttgtcaaagcaactgttg

SEQ ID NO: 969115 - DNA, 25 bp, Homo sapien
aaaattggtcgcattattgttcttg

SEQ ID NO: 969116 - DNA, 25 bp, Homo sapien
cttgttacatttacagccatgagac

SEQ ID NO: 969117 - DNA, 25 bp, Homo sapien
tagtttagatatgaaaattggtcgc

SEQ ID NO: 969118 - DNA, 25 bp, Homo sapien
tgttcttgttacatttacagccatg

SEQ ID NO: 969119 - DNA, 25 bp, Homo sapien
agcttttcctgacgccattgtgtag

SEQ ID NO: 969120 - DNA, 25 bp, Homo sapien
tcctgacgccattgtgtagactcca

SEQ ID NO: 969121 - DNA, 25 bp, Homo sapien
tcatcagcttttcctgacgccattg

SEQ ID NO: 969122 - DNA, 25 bp, Homo sapien
ttttcatcagcttttcctgacgcca

SEQ ID NO: 969123 - DNA, 25 bp, Homo sapien
catggaggggatctccatcatcact

SEQ ID NO: 969124 - DNA, 25 bp, Homo sapien
gaagattctacaggaatgactctga

SEQ ID NO: 969125 - DNA, 25 bp, Homo sapien
aatgactctgaatctctttattccc

SEQ ID NO: 969126 - DNA, 25 bp, Homo sapien
tcatcactacgaatagaagattcta

SEQ ID NO: 969127 - DNA, 25 bp, Homo sapien
gccactgagaccaacaccagataag

SEQ ID NO: 969128 - DNA, 25 bp, Homo sapien
tgccactgagaccaacaccagataa

SEQ ID NO: 969129 - DNA, 25 bp, Homo sapien
ttgggaatcttaggctgccagccaa

SEQ ID NO: 969130 - DNA, 25 bp, Homo sapien
tttgggaatcttaggctgccagcca

SEQ ID NO: 969131 - DNA, 25 bp, Homo sapien
gccaattccagtctgaacccacacc

SEQ ID NO: 969132 - DNA, 25 bp, Homo sapien
ggctgccagccaattccagtctgaa

SEQ ID NO: 969133 - DNA, 25 bp, Homo sapien
aagagtagcacaaggctgttgacaa

SEQ ID NO: 969134 - DNA, 25 bp, Homo sapien
cagtcttcatctgctagcatcaggt

SEQ ID NO: 969135 - DNA, 25 bp, Homo sapien
tgtatctaattatgcactggtgcca

SEQ ID NO: 969136 - DNA, 25 bp, Homo sapien
caaataaggttagcaagagtagcac

SEQ ID NO: 969137 - DNA, 25 bp, Homo sapien
tctcctttttgcagagtgtctggtt

SEQ ID NO: 969138 - DNA, 25 bp, Homo sapien
gagtgtctggttttctataacacat

SEQ ID NO: 969139 - DNA, 25 bp, Homo sapien
tgcagagtgtctggttttctataac

SEQ ID NO: 969140 - DNA, 25 bp, Homo sapien
ctggccccagatctcctttttgcag

SEQ ID NO: 969141 - DNA, 25 bp, Homo sapien
catgtgttctaaatgtgctctgagg

SEQ ID NO: 969142 - DNA, 25 bp, Homo sapien
ctggtggaaagcatgtgttctaaat

SEQ ID NO: 969143 - DNA, 25 bp, Homo sapien
tgttctaaatgtgctctgagggtgg

SEQ ID NO: 969144 - DNA, 25 bp, Homo sapien
gaaagcatgtgttctaaatgtgctc

SEQ ID NO: 969145 - DNA, 25 bp, Homo sapien
cttccgagatcagataagattgagt

SEQ ID NO: 969146 - DNA, 25 bp, Homo sapien
ccgagatcagataagattgagtgca

SEQ ID NO: 969147 - DNA, 25 bp, Homo sapien
gcacccactaccaccaggtggtctc

SEQ ID NO: 969148 - DNA, 25 bp, Homo sapien
cgtaccaagtagttaccaggcctga

SEQ ID NO: 969149 - DNA, 25 bp, Homo sapien
tgcaaccgcactgtctattatatga

SEQ ID NO: 969150 - DNA, 25 bp, Homo sapien
gagctctgttggttcatcactgcac

SEQ ID NO: 969151 - DNA, 25 bp, Homo sapien
tcactgcacccttaacagctatcag

SEQ ID NO: 969152 - DNA, 25 bp, Homo sapien
tacatgaacacaaggtgcaaccgca

SEQ ID NO: 969153 - DNA, 25 bp, Homo sapien
ttaatgagccgaacacttctggaat

SEQ ID NO: 969154 - DNA, 25 bp, Homo sapien
gcagttgaactttctaggatccaaa

SEQ ID NO: 969155 - DNA, 25 bp, Homo sapien
gagcacgttcaaagggacattagga

SEQ ID NO: 969156 - DNA, 25 bp, Homo sapien
taatgacgttatttgcatccccagc

SEQ ID NO: 969157 - DNA, 25 bp, Homo sapien
ctgtcataatatgcaagtgtctcat

SEQ ID NO: 969158 - DNA, 25 bp, Homo sapien
tgtcataatatgcaagtgtctcatt

SEQ ID NO: 969159 - DNA, 25 bp, Homo sapien
tttcccacctcaacttgtgttcctc

SEQ ID NO: 969160 - DNA, 25 bp, Homo sapien
acttgtgttcctcaccagtgttttt

SEQ ID NO: 969161 - DNA, 25 bp, Homo sapien
ttcccacctcaacttgtgttcctca

SEQ ID NO: 969162 - DNA, 25 bp, Homo sapien
gtcctgtagaaagcaaatgcgcctc

SEQ ID NO: 969163 - DNA, 25 bp, Homo sapien
tgttgcaaccatctaaaaccttagg

SEQ ID NO: 969164 - DNA, 25 bp, Homo sapien
aaccttaggcttccagtctgtgctg

SEQ ID NO: 969165 - DNA, 25 bp, Homo sapien
tgtgcaagcaccatagaaacatttg

SEQ ID NO: 969166 - DNA, 25 bp, Homo sapien
catacgttcccgttccatgtgatgg

SEQ ID NO: 969167 - DNA, 25 bp, Homo sapien
gctgctagagcttaacatacgttcc

SEQ ID NO: 969168 - DNA, 25 bp, Homo sapien
ggttcttgcaaactaagctcatcat

SEQ ID NO: 969169 - DNA, 25 bp, Homo sapien
cagcaaatagagttagagagatacc

SEQ ID NO: 969170 - DNA, 25 bp, Homo sapien
ggaagtctcagccacagaatgcata

SEQ ID NO: 969171 - DNA, 25 bp, Homo sapien
gaagggtggcctaagactacaatgc

SEQ ID NO: 969172 - DNA, 25 bp, Homo sapien
tgttggtggacccataaatgaccag

SEQ ID NO: 969173 - DNA, 25 bp, Homo sapien
tgcgagagttgtaccatcagaaggg

SEQ ID NO: 969174 - DNA, 25 bp, Homo sapien
tcaagaggcagatcgttttggtctc

SEQ ID NO: 969175 - DNA, 25 bp, Homo sapien
tagttgggcaactatctgtaccaga

SEQ ID NO: 969176 - DNA, 25 bp, Homo sapien
taagaatttggaccggtgccacggc

SEQ ID NO: 969177 - DNA, 25 bp, Homo sapien
ggtgccacggcttactgactcactt

SEQ ID NO: 969178 - DNA, 25 bp, Homo sapien
tgcctcccactcatagctgtctgtg

SEQ ID NO: 969179 - DNA, 25 bp, Homo sapien
tttgcataataacctctggcctcct

SEQ ID NO: 969180 - DNA, 25 bp, Homo sapien
tggtgaggaccgtggccaccttctc

SEQ ID NO: 969181 - DNA, 25 bp, Homo sapien
ctgctatggtgaggaccgtggccac

SEQ ID NO: 969182 - DNA, 25 bp, Homo sapien
aattcaaacggctgctgcccaaatc

SEQ ID NO: 969183 - DNA, 25 bp, Homo sapien
tgtatcctgggctttcagtccaggt

SEQ ID NO: 969184 - DNA, 25 bp, Homo sapien
gtccaggtcatccaggtaaaattca

SEQ ID NO: 969185 - DNA, 25 bp, Homo sapien
ctctgttgtatcctgggctttcagt

SEQ ID NO: 969186 - DNA, 25 bp, Homo sapien
tacctcatgagttgcctctttgctt

SEQ ID NO: 969187 - DNA, 25 bp, Homo sapien
tcaacgtagcagacctcaacagcat

SEQ ID NO: 969188 - DNA, 25 bp, Homo sapien
tccaggcttccatacctcatgagtt

SEQ ID NO: 969189 - DNA, 25 bp, Homo sapien
tctttgctttcagggggaatcaacg

SEQ ID NO: 969190 - DNA, 25 bp, Homo sapien
tgactttagtggtgtcctcgctctt

SEQ ID NO: 969191 - DNA, 25 bp, Homo sapien
ggaaggtgactttagtggtgtcctc

SEQ ID NO: 969192 - DNA, 25 bp, Homo sapien
tactctaaccaagttcccgttcaca

SEQ ID NO: 969193 - DNA, 25 bp, Homo sapien
tcttgcagaggtacaggttaacatc

SEQ ID NO: 969194 - DNA, 25 bp, Homo sapien
tggttttcctagaacgatacactga

SEQ ID NO: 969195 - DNA, 25 bp, Homo sapien
tatgtctcagagtgatgccaactag

SEQ ID NO: 969196 - DNA, 25 bp, Homo sapien
tcctagaacgatacactgaacaaat

SEQ ID NO: 969197 - DNA, 25 bp, Homo sapien
tgatgccaactagttctatgctgtt

SEQ ID NO: 969198 - DNA, 25 bp, Homo sapien
taagatatcccataatgatgttgga

SEQ ID NO: 969199 - DNA, 25 bp, Homo sapien
tcacaagatttaattgtaatgccgg

SEQ ID NO: 969200 - DNA, 25 bp, Homo sapien
taatgccggatatgcacagctctcc

SEQ ID NO: 969201 - DNA, 25 bp, Homo sapien
tggcttgcttcattagcatgtcatt

SEQ ID NO: 969202 - DNA, 25 bp, Homo sapien
tatttgtatgtcactctggaatgga

SEQ ID NO: 969203 - DNA, 25 bp, Homo sapien
tggattaactccatgacaggctagg

SEQ ID NO: 969204 - DNA, 25 bp, Homo sapien
ggctaggctcagtttttctgcattt

SEQ ID NO: 969205 - DNA, 25 bp, Homo sapien
acaggctaggctcagtttttctgca

SEQ ID NO: 969206 - DNA, 25 bp, Homo sapien
actatagtctgcctatcattggacg

SEQ ID NO: 969207 - DNA, 25 bp, Homo sapien
taacttctcccctctacaatggtgt

SEQ ID NO: 969208 - DNA, 25 bp, Homo sapien
tttaccagccatgaaaaatcacact

SEQ ID NO: 969209 - DNA, 25 bp, Homo sapien
tcattggacgtttggagtaatatcc

SEQ ID NO: 969210 - DNA, 25 bp, Homo sapien
ctgggagagcactgtgcggctgcat

SEQ ID NO: 969211 - DNA, 25 bp, Homo sapien
catattctcagctgttgaatgtgtt

SEQ ID NO: 969212 - DNA, 25 bp, Homo sapien
gctgcatattctcagctgttgaatg

SEQ ID NO: 969213 - DNA, 25 bp, Homo sapien
ggagagcactgtgcggctgcatatt

SEQ ID NO: 969214 - DNA, 25 bp, Homo sapien
ggtgcccataatggtacttgcaaat

SEQ ID NO: 969215 - DNA, 25 bp, Homo sapien
cgactttcaatattccagatggcaa

SEQ ID NO: 969216 - DNA, 25 bp, Homo sapien
cagtcgttgatgtatgggtgcaccg

SEQ ID NO: 969217 - DNA, 25 bp, Homo sapien
ctgggagaagtgtcacagtcgttga

SEQ ID NO: 969218 - DNA, 25 bp, Homo sapien
taatgtaggttatgctgattataga

SEQ ID NO: 969219 - DNA, 25 bp, Homo sapien
cagaaatgacgttttggagggcctt

SEQ ID NO: 969220 - DNA, 25 bp, Homo sapien
ttctccccttgcttaatgtaggtta

SEQ ID NO: 969221 - DNA, 25 bp, Homo sapien
tcagaaatgacgttttggagggcct

SEQ ID NO: 969222 - DNA, 25 bp, Homo sapien
tgggtgtttgtcattagcatcttcc

SEQ ID NO: 969223 - DNA, 25 bp, Homo sapien
gtttgtcattagcatcttcccctct

SEQ ID NO: 969224 - DNA, 25 bp, Homo sapien
tttcccccacaagcacggcagtggt

SEQ ID NO: 969225 - DNA, 25 bp, Homo sapien
tccatcatcctcatataaggcagtg

SEQ ID NO: 969226 - DNA, 25 bp, Homo sapien
gattgcaacaatggtggccacctgg

SEQ ID NO: 969227 - DNA, 25 bp, Homo sapien
agtgattgcaacaatggtggccacc

SEQ ID NO: 969228 - DNA, 25 bp, Homo sapien
tgcaacaatggtggccacctggcat

SEQ ID NO: 969229 - DNA, 25 bp, Homo sapien
caatggtggccacctggcatttcct

SEQ ID NO: 969230 - DNA, 25 bp, Homo sapien
ctaagtttcatgtctcctagaatac

SEQ ID NO: 969231 - DNA, 25 bp, Homo sapien
taagtttcatgtctcctagaatacc

SEQ ID NO: 969232 - DNA, 25 bp, Homo sapien
gggcatgcttatgggctaatacagc

SEQ ID NO: 969233 - DNA, 25 bp, Homo sapien
tgcttatgggctaatacagccctca

SEQ ID NO: 969234 - DNA, 25 bp, Homo sapien
agtcctcatgggcatgcttatgggc

SEQ ID NO: 969235 - DNA, 25 bp, Homo sapien
tgggctaatacagccctcaaaatca

SEQ ID NO: 969236 - DNA, 25 bp, Homo sapien
ggccagttgagtcgattccctggat

SEQ ID NO: 969237 - DNA, 25 bp, Homo sapien
ttctaaagcactggtaagtctgcag

SEQ ID NO: 969238 - DNA, 25 bp, Homo sapien
tcctccaggccagttgagtcgattc

SEQ ID NO: 969239 - DNA, 25 bp, Homo sapien
gcactggtaagtctgcagggacccc

SEQ ID NO: 969240 - DNA, 25 bp, Homo sapien
ggccaaaggactatctgctttctgg

SEQ ID NO: 969241 - DNA, 25 bp, Homo sapien
ccaaaggactatctgctttctggga

SEQ ID NO: 969242 - DNA, 25 bp, Homo sapien
caaaggactatctgctttctgggac

SEQ ID NO: 969243 - DNA, 25 bp, Homo sapien
caggccaaaggactatctgctttct

SEQ ID NO: 969244 - DNA, 25 bp, Homo sapien
ttaatggtgtcacaggaagctcaga

SEQ ID NO: 969245 - DNA, 25 bp, Homo sapien
attaatggtgtcacaggaagctcag

SEQ ID NO: 969246 - DNA, 25 bp, Homo sapien
aattaatggtgtcacaggaagctca

SEQ ID NO: 969247 - DNA, 25 bp, Homo sapien
ttgaaactggatcatggacacaacc

SEQ ID NO: 969248 - DNA, 25 bp, Homo sapien
tcttaatctgcatggttgaaactgg

SEQ ID NO: 969249 - DNA, 25 bp, Homo sapien
gcttgtttctcatgctcatccaggg

SEQ ID NO: 969250 - DNA, 25 bp, Homo sapien
gaagagcagaagtgcatatccgaca

SEQ ID NO: 969251 - DNA, 25 bp, Homo sapien
aatgcaagttgggagccagttgtgg

SEQ ID NO: 969252 - DNA, 25 bp, Homo sapien
gttggaatgcaagttgggagccagt

SEQ ID NO: 969253 - DNA, 25 bp, Homo sapien
tgcaagttgggagccagttgtggaa

SEQ ID NO: 969254 - DNA, 25 bp, Homo sapien
gagccagttgtggaattttccatca

SEQ ID NO: 969255 - DNA, 25 bp, Homo sapien
agtaggtctaacagctaactctgaa

SEQ ID NO: 969256 - DNA, 25 bp, Homo sapien
ctgaaacacagggatctgactgtcc

SEQ ID NO: 969257 - DNA, 25 bp, Homo sapien
aaattatttccggtgcccatgacag

SEQ ID NO: 969258 - DNA, 25 bp, Homo sapien
cccatgacagtggagtaggtctaac

SEQ ID NO: 969259 - DNA, 25 bp, Homo sapien
gacaatcattaacaggtcttctgaa

SEQ ID NO: 969260 - DNA, 25 bp, Homo sapien
ggtaagccatgtctgatccagttat

SEQ ID NO: 969261 - DNA, 25 bp, Homo sapien
tagccaatttgcactggtaagccat

SEQ ID NO: 969262 - DNA, 25 bp, Homo sapien
cctttcctggtgatatgtgacaatc

SEQ ID NO: 969263 - DNA, 25 bp, Homo sapien
gcctgaatccttgtatggcaatgta

SEQ ID NO: 969264 - DNA, 25 bp, Homo sapien
tgctgatagttcttgcctgaatcct

SEQ ID NO: 969265 - DNA, 25 bp, Homo sapien
tttgtgcccactgacacgataatca

SEQ ID NO: 969266 - DNA, 25 bp, Homo sapien
ggcaatgtacactctgtcatgtgac

SEQ ID NO: 969267 - DNA, 25 bp, Homo sapien
agtccattggttccctcttgacagc

SEQ ID NO: 969268 - DNA, 25 bp, Homo sapien
gcaatccatagtccattggttccct

SEQ ID NO: 969269 - DNA, 25 bp, Homo sapien
cctcttgacagcatgtatctgtgct

SEQ ID NO: 969270 - DNA, 25 bp, Homo sapien
ttctcagcaatccatagtccattgg

SEQ ID NO: 969271 - DNA, 25 bp, Homo sapien
ctttggagatggtaaagagttggtc

SEQ ID NO: 969272 - DNA, 25 bp, Homo sapien
ggtagagacatattcgacattcagg

SEQ ID NO: 969273 - DNA, 25 bp, Homo sapien
gcctttggtgaacatcatagcactg

SEQ ID NO: 969274 - DNA, 25 bp, Homo sapien
aattcataatggaatgcctttggtg

SEQ ID NO: 969275 - DNA, 25 bp, Homo sapien
ctgtcagcttcaaagatgaggaaga

SEQ ID NO: 969276 - DNA, 25 bp, Homo sapien
aatgccttaggtttgctgagtttgc

SEQ ID NO: 969277 - DNA, 25 bp, Homo sapien
tcaggaacttttaccctatacatac

SEQ ID NO: 969278 - DNA, 25 bp, Homo sapien
tagaaactgccacttcaggatacac

SEQ ID NO: 969279 - DNA, 25 bp, Homo sapien
gaggacatagatatgtaaaggtcca

SEQ ID NO: 969280 - DNA, 25 bp, Homo sapien
aggacactttcagccgccaatcttt

SEQ ID NO: 969281 - DNA, 25 bp, Homo sapien
atctttttctaatctcacttgtctt

SEQ ID NO: 969282 - DNA, 25 bp, Homo sapien
caaattgaggaaggtatgggatttc

SEQ ID NO: 969283 - DNA, 25 bp, Homo sapien
aagtaagttcatggccagatttatc

SEQ ID NO: 969284 - DNA, 25 bp, Homo sapien
cctgcaagtaagttcatggccagat

SEQ ID NO: 969285 - DNA, 25 bp, Homo sapien
tgcaagtaagttcatggccagattt

SEQ ID NO: 969286 - DNA, 25 bp, Homo sapien
gcaagtaagttcatggccagattta

SEQ ID NO: 969287 - DNA, 25 bp, Homo sapien
tcttcctgcgccctaagttttcttc

SEQ ID NO: 969288 - DNA, 25 bp, Homo sapien
taatagctcccttagctaatccctt

SEQ ID NO: 969289 - DNA, 25 bp, Homo sapien
tgacctaatagctcccttagctaat

SEQ ID NO: 969290 - DNA, 25 bp, Homo sapien
gtatcttccttgtctgtcagctgtc

SEQ ID NO: 969291 - DNA, 25 bp, Homo sapien
cctctagagtggctggctacaggag

SEQ ID NO: 969292 - DNA, 25 bp, Homo sapien
ggctccactcttatgacctaactac

SEQ ID NO: 969293 - DNA, 25 bp, Homo sapien
tcctagagtgctggcctcaaaagat

SEQ ID NO: 969294 - DNA, 25 bp, Homo sapien
acttactaacaccatgacattaggg

SEQ ID NO: 969295 - DNA, 25 bp, Homo sapien
ggccgagcccgggtcgcgccgctcc

SEQ ID NO: 969296 - DNA, 25 bp, Homo sapien
cggccgagcccgggtcgcgccgctc

SEQ ID NO: 969297 - DNA, 25 bp, Homo sapien
cgcagggcgcgagggatcgcgcggc

SEQ ID NO: 969298 - DNA, 25 bp, Homo sapien
ggcgcgagggatcgcgcggccgagc

SEQ ID NO: 969299 - DNA, 25 bp, Homo sapien
gaatgtagatgtgcgttcaaaagaa

SEQ ID NO: 969300 - DNA, 25 bp, Homo sapien
tgtagatgtgcgttcaaaagaaaac

SEQ ID NO: 969301 - DNA, 25 bp, Homo sapien
tagatgtgcgttcaaaagaaaactt

SEQ ID NO: 969302 - DNA, 25 bp, Homo sapien
tttgaatgtagatgtgcgttcaaaa

SEQ ID NO: 969303 - DNA, 25 bp, Homo sapien
tatccacacaatgtctctaatcaaa

SEQ ID NO: 969304 - DNA, 25 bp, Homo sapien
tctaatatccacacaatgtctctaa

SEQ ID NO: 969305 - DNA, 25 bp, Homo sapien
gcattctaatatccacacaatgtct

SEQ ID NO: 969306 - DNA, 25 bp, Homo sapien
ttagcattctaatatccacacaatg

SEQ ID NO: 969307 - DNA, 25 bp, Homo sapien
ccactcatagtacttcacagtccag

SEQ ID NO: 969308 - DNA, 25 bp, Homo sapien
tccagagagttggaacctttgccca

SEQ ID NO: 969309 - DNA, 25 bp, Homo sapien
gcttttggagtttgcccgtgctgtt

SEQ ID NO: 969310 - DNA, 25 bp, Homo sapien
cctttgcccaaacgtctgcttttgg

SEQ ID NO: 969311 - DNA, 25 bp, Homo sapien
ccactgtagcgcgagtttggctgaa

SEQ ID NO: 969312 - DNA, 25 bp, Homo sapien
tctctgagcaccgtggaagaagcgg

SEQ ID NO: 969313 - DNA, 25 bp, Homo sapien
tttggctgaatagagggatcatcag

SEQ ID NO: 969314 - DNA, 25 bp, Homo sapien
cacggaattgatgttagtgttccca

SEQ ID NO: 969315 - DNA, 25 bp, Homo sapien
ccagaagctggggagaaccatttca

SEQ ID NO: 969316 - DNA, 25 bp, Homo sapien
tgacacacttcttctcaggctccat

SEQ ID NO: 969317 - DNA, 25 bp, Homo sapien
cacttcttctcaggctccattattt

SEQ ID NO: 969318 - DNA, 25 bp, Homo sapien
cttctcaggctccattatttcatcc

SEQ ID NO: 969319 - DNA, 25 bp, Homo sapien
gcctttaaggagttagtgacaaatc

SEQ ID NO: 969320 - DNA, 25 bp, Homo sapien
ctttaaggagttagtgacaaatcca

SEQ ID NO: 969321 - DNA, 25 bp, Homo sapien
taaggagttagtgacaaatccatgc

SEQ ID NO: 969322 - DNA, 25 bp, Homo sapien
gagttagtgacaaatccatgctcca

SEQ ID NO: 969323 - DNA, 25 bp, Homo sapien
ctctgtccacttgtctagtattttc

SEQ ID NO: 969324 - DNA, 25 bp, Homo sapien
tttcccaggcttcactcatgttacc

SEQ ID NO: 969325 - DNA, 25 bp, Homo sapien
ccttttcccaggcttcactcatgtt

SEQ ID NO: 969326 - DNA, 25 bp, Homo sapien
cccaggcttcactcatgttacccat

SEQ ID NO: 969327 - DNA, 25 bp, Homo sapien
acaatcagttccttgtcctcattaa

SEQ ID NO: 969328 - DNA, 25 bp, Homo sapien
caatcagttccttgtcctcattaag

SEQ ID NO: 969329 - DNA, 25 bp, Homo sapien
aatcagttccttgtcctcattaagc

SEQ ID NO: 969330 - DNA, 25 bp, Homo sapien
tgtcactagtagcagccctgagctc

SEQ ID NO: 969331 - DNA, 25 bp, Homo sapien
ctgcacttcgggctgatgagtacta

SEQ ID NO: 969332 - DNA, 25 bp, Homo sapien
cttggaaaagtcaatgcctggatgg

SEQ ID NO: 969333 - DNA, 25 bp, Homo sapien
ttggaaaagtcaatgcctggatggg

SEQ ID NO: 969334 - DNA, 25 bp, Homo sapien
caggaatgttagcttcttggaaaag

SEQ ID NO: 969335 - DNA, 25 bp, Homo sapien
tcatagaggggtcaggaatgttagc

SEQ ID NO: 969336 - DNA, 25 bp, Homo sapien
gagtttttcagaatataccagaggg

SEQ ID NO: 969337 - DNA, 25 bp, Homo sapien
tctttttaggcttcgcttctttgtc

SEQ ID NO: 969338 - DNA, 25 bp, Homo sapien
gataatgcatactccccaccagtag

SEQ ID NO: 969339 - DNA, 25 bp, Homo sapien
agtaggagtacagccaagattctcc

SEQ ID NO: 969340 - DNA, 25 bp, Homo sapien
atgtagttcttgtgccacagtattc

SEQ ID NO: 969341 - DNA, 25 bp, Homo sapien
cttgtgccacagtattcagctccat

SEQ ID NO: 969342 - DNA, 25 bp, Homo sapien
ttcttgtgccacagtattcagctcc

SEQ ID NO: 969343 - DNA, 25 bp, Homo sapien
tagttcttgtgccacagtattcagc

SEQ ID NO: 969344 - DNA, 25 bp, Homo sapien
tccattcaaaggaggagatacagct

SEQ ID NO: 969345 - DNA, 25 bp, Homo sapien
ggaggagatacagctcttcctgttg

SEQ ID NO: 969346 - DNA, 25 bp, Homo sapien
cttccattcaaaggaggagatacag

SEQ ID NO: 969347 - DNA, 25 bp, Homo sapien
ttcaaaggaggagatacagctcttc

SEQ ID NO: 969348 - DNA, 25 bp, Homo sapien
tataatttcaatgtcatgctgtcct

SEQ ID NO: 969349 - DNA, 25 bp, Homo sapien
tttcaatgtcatgctgtcctgttca

SEQ ID NO: 969350 - DNA, 25 bp, Homo sapien
gtggcttgcaatagtgccttaaaat

SEQ ID NO: 969351 - DNA, 25 bp, Homo sapien
tctgtggcttgcaatagtgccttaa

SEQ ID NO: 969352 - DNA, 25 bp, Homo sapien
ttaattccataaataataggattta

SEQ ID NO: 969353 - DNA, 25 bp, Homo sapien
taattccataaataataggatttac

SEQ ID NO: 969354 - DNA, 25 bp, Homo sapien
ttgaaacgtgctttggtgtctcatt

SEQ ID NO: 969355 - DNA, 25 bp, Homo sapien
gtgcactgctttgaaacgtgctttg

SEQ ID NO: 969356 - DNA, 25 bp, Homo sapien
atttcgctgtaacatttcactctgc

SEQ ID NO: 969357 - DNA, 25 bp, Homo sapien
tgtctcatttcgctgtaacatttca

SEQ ID NO: 969358 - DNA, 25 bp, Homo sapien
tattcatgtaggtggattttagaga

SEQ ID NO: 969359 - DNA, 25 bp, Homo sapien
gacggagagacctgaaaactctcac

SEQ ID NO: 969360 - DNA, 25 bp, Homo sapien
taggtggattttagagatcccctga

SEQ ID NO: 969361 - DNA, 25 bp, Homo sapien
aaatgattggttactaccagaaatc

SEQ ID NO: 969362 - DNA, 25 bp, Homo sapien
caccatctgccaagtggagtgtatg

SEQ ID NO: 969363 - DNA, 25 bp, Homo sapien
gaacagtgtgtccttctacaaacac

SEQ ID NO: 969364 - DNA, 25 bp, Homo sapien
tcatatgtaaaagtgggcttggcac

SEQ ID NO: 969365 - DNA, 25 bp, Homo sapien
tgtttttccagtcgctgcatggacc

SEQ ID NO: 969366 - DNA, 25 bp, Homo sapien
gaccctttgcaacattgtcctggga

SEQ ID NO: 969367 - DNA, 25 bp, Homo sapien
tgttctgcgaattcctgaccctttg

SEQ ID NO: 969368 - DNA, 25 bp, Homo sapien
tggcatctgcacctcagaagcctgc

SEQ ID NO: 969369 - DNA, 25 bp, Homo sapien
cctgggacaagcgtcatgtggcatc

SEQ ID NO: 969370 - DNA, 25 bp, Homo sapien
aggaaacaaacccacataatagttg

SEQ ID NO: 969371 - DNA, 25 bp, Homo sapien
aacccacataatagttgggaaccag

SEQ ID NO: 969372 - DNA, 25 bp, Homo sapien
tgttcaacagactctgaatgccgac

SEQ ID NO: 969373 - DNA, 25 bp, Homo sapien
caacagactctgaatgccgactgtg

SEQ ID NO: 969374 - DNA, 25 bp, Homo sapien
cagactctgaatgccgactgtgtgg

SEQ ID NO: 969375 - DNA, 25 bp, Homo sapien
tctgaatgccgactgtgtggactct

SEQ ID NO: 969376 - DNA, 25 bp, Homo sapien
tccacaggaacatgagatttagcag

SEQ ID NO: 969377 - DNA, 25 bp, Homo sapien
acatgagatttagcagactaaggag

SEQ ID NO: 969378 - DNA, 25 bp, Homo sapien
tgtccacaggaacatgagatttagc

SEQ ID NO: 969379 - DNA, 25 bp, Homo sapien
caggaacatgagatttagcagacta

SEQ ID NO: 969380 - DNA, 25 bp, Homo sapien
tataattctggtaaacagctgtctt

SEQ ID NO: 969381 - DNA, 25 bp, Homo sapien
taaattttgggatctgaatataatt

SEQ ID NO: 969382 - DNA, 25 bp, Homo sapien
atataattctggtaaacagctgtct

SEQ ID NO: 969383 - DNA, 25 bp, Homo sapien
aattttgggatctgaatataattct

SEQ ID NO: 969384 - DNA, 25 bp, Homo sapien
tgtatttatgttcatagtacttttc

SEQ ID NO: 969385 - DNA, 25 bp, Homo sapien
tgttgaagtatatggctatcatgac

SEQ ID NO: 969386 - DNA, 25 bp, Homo sapien
ctatcatgactaagtgctagaattt

SEQ ID NO: 969387 - DNA, 25 bp, Homo sapien
aatttatagttacaggcggtgtcct

SEQ ID NO: 969388 - DNA, 25 bp, Homo sapien
tcaaatatggatccaagtctctgac

SEQ ID NO: 969389 - DNA, 25 bp, Homo sapien
catctgtaactgtggggaatttccc

SEQ ID NO: 969390 - DNA, 25 bp, Homo sapien
accattgggcaggatttttaacatc

SEQ ID NO: 969391 - DNA, 25 bp, Homo sapien
tttataactggaccattgggcagga

SEQ ID NO: 969392 - DNA, 25 bp, Homo sapien
catcacacccagtattaagcttgac

SEQ ID NO: 969393 - DNA, 25 bp, Homo sapien
tcacacccagtattaagcttgacaa

SEQ ID NO: 969394 - DNA, 25 bp, Homo sapien
cacaaatccgacatcacacccagta

SEQ ID NO: 969395 - DNA, 25 bp, Homo sapien
tcacacaaatccgacatcacaccca

SEQ ID NO: 969396 - DNA, 25 bp, Homo sapien
tttcttgaaaccagaggtcctctcc

SEQ ID NO: 969397 - DNA, 25 bp, Homo sapien
gagactgaacgtatcctgagccaac

SEQ ID NO: 969398 - DNA, 25 bp, Homo sapien
aatatccgattcattgccccactca

SEQ ID NO: 969399 - DNA, 25 bp, Homo sapien
gaactctgttctcctcaatatccga

SEQ ID NO: 969400 - DNA, 25 bp, Homo sapien
tgggctccctctgatcttgtgatgt

SEQ ID NO: 969401 - DNA, 25 bp, Homo sapien
gcatgctgtgaaaggatttttctag

SEQ ID NO: 969402 - DNA, 25 bp, Homo sapien
ttccctcggcattactctcatcatt

SEQ ID NO: 969403 - DNA, 25 bp, Homo sapien
gggatttttgttctatattgcatgc

SEQ ID NO: 969404 - DNA, 25 bp, Homo sapien
cttgggaaatatgttgacgtttgct

SEQ ID NO: 969405 - DNA, 25 bp, Homo sapien
ttgggaaatatgttgacgtttgctt

SEQ ID NO: 969406 - DNA, 25 bp, Homo sapien
tgggaaatatgttgacgtttgcttt

SEQ ID NO: 969407 - DNA, 25 bp, Homo sapien
gggaaatatgttgacgtttgctttc

SEQ ID NO: 969408 - DNA, 25 bp, Homo sapien
gttgcttcccaatctcctgtgtcag

SEQ ID NO: 969409 - DNA, 25 bp, Homo sapien
cctgtgtcagttagcgtctgctggg

SEQ ID NO: 969410 - DNA, 25 bp, Homo sapien
ctgttgcttcccaatctcctgtgtc

SEQ ID NO: 969411 - DNA, 25 bp, Homo sapien
tctgctggggttccgagtggggagc

SEQ ID NO: 969412 - DNA, 25 bp, Homo sapien
ctacagctgagttacctaccattgc

SEQ ID NO: 969413 - DNA, 25 bp, Homo sapien
gcttccagtaatacaaactttcctg

SEQ ID NO: 969414 - DNA, 25 bp, Homo sapien
gaatgcttccagtaatacaaacttt

SEQ ID NO: 969415 - DNA, 25 bp, Homo sapien
ccaactcccacactccataacttca

SEQ ID NO: 969416 - DNA, 25 bp, Homo sapien
ttccagtaatacaaactttcctgca

SEQ ID NO: 969417 - DNA, 25 bp, Homo sapien
tcacctcaaatccaaaagaagttca

SEQ ID NO: 969418 - DNA, 25 bp, Homo sapien
cctcaaatccaaaagaagttcaaag

SEQ ID NO: 969419 - DNA, 25 bp, Homo sapien
cacctcaaatccaaaagaagttcaa

SEQ ID NO: 969420 - DNA, 25 bp, Homo sapien
tcaaatccaaaagaagttcaaagaa

SEQ ID NO: 969421 - DNA, 25 bp, Homo sapien
taggaggagttaagtaatcaaagcc

SEQ ID NO: 969422 - DNA, 25 bp, Homo sapien
tcaaagccaacagttagaagagtca

SEQ ID NO: 969423 - DNA, 25 bp, Homo sapien
tagatttgtgacgagattggttcca

SEQ ID NO: 969424 - DNA, 25 bp, Homo sapien
accagagccccaaatcagattggaa

SEQ ID NO: 969425 - DNA, 25 bp, Homo sapien
tctgattctttgatactgtgggaaa

SEQ ID NO: 969426 - DNA, 25 bp, Homo sapien
ttctgattctttgatactgtgggaa

SEQ ID NO: 969427 - DNA, 25 bp, Homo sapien
gagcagaaaagcacgagtgtgttta

SEQ ID NO: 969428 - DNA, 25 bp, Homo sapien
gaaaagcacgagtgtgtttacattt

SEQ ID NO: 969429 - DNA, 25 bp, Homo sapien
tctcgaaagttgctctcatatctgg

SEQ ID NO: 969430 - DNA, 25 bp, Homo sapien
aagcattcatgcaaatctcgaaagt

SEQ ID NO: 969431 - DNA, 25 bp, Homo sapien
tcatgcaaatctcgaaagttgctct

SEQ ID NO: 969432 - DNA, 25 bp, Homo sapien
gaaagttgctctcatatctggccat

SEQ ID NO: 969433 - DNA, 25 bp, Homo sapien
gcttcaaagccatagttatttcctc

SEQ ID NO: 969434 - DNA, 25 bp, Homo sapien
ccttcaatctcagggagtagaaact

SEQ ID NO: 969435 - DNA, 25 bp, Homo sapien
gtagaaactcatgttgcttcaaagc

SEQ ID NO: 969436 - DNA, 25 bp, Homo sapien
tccttcaatctcagggagtagaaac

SEQ ID NO: 969437 - DNA, 25 bp, Homo sapien
catctagtctaatatcaggcatgtg

SEQ ID NO: 969438 - DNA, 25 bp, Homo sapien
gctgaacaattggaattttctgcca

SEQ ID NO: 969439 - DNA, 25 bp, Homo sapien
gagaacagtagtcatgtcatatttc

SEQ ID NO: 969440 - DNA, 25 bp, Homo sapien
cctgttatcaattcgttttgctgaa

SEQ ID NO: 969441 - DNA, 25 bp, Homo sapien
ggtaaagtcagaacgctgagaagga

SEQ ID NO: 969442 - DNA, 25 bp, Homo sapien
ccagggaggtaaagtcagaacgctg

SEQ ID NO: 969443 - DNA, 25 bp, Homo sapien
tcagagtgattgtctcccaaacaag

SEQ ID NO: 969444 - DNA, 25 bp, Homo sapien
gattgtctcccaaacaagtccaggg

SEQ ID NO: 969445 - DNA, 25 bp, Homo sapien
tctacagcatgggagagactttcat

SEQ ID NO: 969446 - DNA, 25 bp, Homo sapien
ggtaatttgcccacttggtatttgc

SEQ ID NO: 969447 - DNA, 25 bp, Homo sapien
tgggagagactttcatccaccctca

SEQ ID NO: 969448 - DNA, 25 bp, Homo sapien
tgcataggctccagtggccaacaca

SEQ ID NO: 969449 - DNA, 25 bp, Homo sapien
ggtagtacataagcccagggacaat

SEQ ID NO: 969450 - DNA, 25 bp, Homo sapien
catgtcttcttgtccagtggtagta

SEQ ID NO: 969451 - DNA, 25 bp, Homo sapien
aaattcactggctggtaactgatca

SEQ ID NO: 969452 - DNA, 25 bp, Homo sapien
tattgccagaacaattgtccgagtg

SEQ ID NO: 969453 - DNA, 25 bp, Homo sapien
gatgaaggtgcttcgtgtactctgc

SEQ ID NO: 969454 - DNA, 25 bp, Homo sapien
acattgcaccaactttctccctttt

SEQ ID NO: 969455 - DNA, 25 bp, Homo sapien
atctttggtcccttccaaaccatgg

SEQ ID NO: 969456 - DNA, 25 bp, Homo sapien
aaaccatgggacttgacacattgca

SEQ ID NO: 969457 - DNA, 25 bp, Homo sapien
atcaggttttttaccagctttggag

SEQ ID NO: 969458 - DNA, 25 bp, Homo sapien
ggagggggtgcagggtatgctctgt

SEQ ID NO: 969459 - DNA, 25 bp, Homo sapien
ttttaccagctttggagggggtgca

SEQ ID NO: 969460 - DNA, 25 bp, Homo sapien
ctgtgatcaggttttttaccagctt

SEQ ID NO: 969461 - DNA, 25 bp, Homo sapien
ttatggatgactgggtgctagagcc

SEQ ID NO: 969462 - DNA, 25 bp, Homo sapien
atggatgactgggtgctagagcctg

SEQ ID NO: 969463 - DNA, 25 bp, Homo sapien
tggatgactgggtgctagagcctga

SEQ ID NO: 969464 - DNA, 25 bp, Homo sapien
tatggatgactgggtgctagagcct

SEQ ID NO: 969465 - DNA, 25 bp, Homo sapien
aaagctggaccaattatcctttaat

SEQ ID NO: 969466 - DNA, 25 bp, Homo sapien
ttacttgacgtataaaaagctggac

SEQ ID NO: 969467 - DNA, 25 bp, Homo sapien
ttccttctttggagtcccctcttca

SEQ ID NO: 969468 - DNA, 25 bp, Homo sapien
cttctttggagtcccctcttcagag

SEQ ID NO: 969469 - DNA, 25 bp, Homo sapien
tttgatgacacgctgcctttgtaca

SEQ ID NO: 969470 - DNA, 25 bp, Homo sapien
acatctgtagagtacactatgggtg

SEQ ID NO: 969471 - DNA, 25 bp, Homo sapien
tctgtagagtacactatgggtgctt

SEQ ID NO: 969472 - DNA, 25 bp, Homo sapien
gacacgctgcctttgtacattgtaa

SEQ ID NO: 969473 - DNA, 25 bp, Homo sapien
aactgtgaaccatgtagtcttgatg

SEQ ID NO: 969474 - DNA, 25 bp, Homo sapien
taatctagccacttaccacatttcc

SEQ ID NO: 969475 - DNA, 25 bp, Homo sapien
tacttgaattgcctcaaaacattgg

SEQ ID NO: 969476 - DNA, 25 bp, Homo sapien
ggtataccttctcgtttattctgtc

SEQ ID NO: 969477 - DNA, 25 bp, Homo sapien
tcaaatgcaacagtggaagcggaga

SEQ ID NO: 969478 - DNA, 25 bp, Homo sapien
caaatgcaacagtggaagcggagaa

SEQ ID NO: 969479 - DNA, 25 bp, Homo sapien
aaactcaaagtactccttgtgttcg

SEQ ID NO: 969480 - DNA, 25 bp, Homo sapien
tcaaagtactccttgtgttcgcctt

SEQ ID NO: 969481 - DNA, 25 bp, Homo sapien
cagcagaaactcaaagtactccttg

SEQ ID NO: 969482 - DNA, 25 bp, Homo sapien
agtactccttgtgttcgcctttctc

SEQ ID NO: 969483 - DNA, 25 bp, Homo sapien
tctggaaaggcttaatgtacactga

SEQ ID NO: 969484 - DNA, 25 bp, Homo sapien
gatgtactcagaaactatgtgggtg

SEQ ID NO: 969485 - DNA, 25 bp, Homo sapien
tatgtgggtgtacttagcttcatgc

SEQ ID NO: 969486 - DNA, 25 bp, Homo sapien
cagattctagtactgcttgcaagcc

SEQ ID NO: 969487 - DNA, 25 bp, Homo sapien
tcactagaacatagtctgacattct

SEQ ID NO: 969488 - DNA, 25 bp, Homo sapien
cctgttaaatgctgatgcggtgtca

SEQ ID NO: 969489 - DNA, 25 bp, Homo sapien
cactggaatggcaggtaagtctggc

SEQ ID NO: 969490 - DNA, 25 bp, Homo sapien
tcgccactgtcaatgtcagaggaag

SEQ ID NO: 969491 - DNA, 25 bp, Homo sapien
tgagcaagatctgttggccatggga

SEQ ID NO: 969492 - DNA, 25 bp, Homo sapien
gtgcaaaccatcttgttgtggtggc

SEQ ID NO: 969493 - DNA, 25 bp, Homo sapien
tgcaaaccatcttgttgtggtggct

SEQ ID NO: 969494 - DNA, 25 bp, Homo sapien
tcagtgcaaaccatcttgttgtggt

SEQ ID NO: 969495 - DNA, 25 bp, Homo sapien
tgtgagtcacgtctttcttggtgac

SEQ ID NO: 969496 - DNA, 25 bp, Homo sapien
cctgacacttgaaaccatgaaatgg

SEQ ID NO: 969497 - DNA, 25 bp, Homo sapien
cttgaaaccatgaaatgggtagaca

SEQ ID NO: 969498 - DNA, 25 bp, Homo sapien
tggtgaccctgacacttgaaaccat

SEQ ID NO: 969499 - DNA, 25 bp, Homo sapien
tagtaggtgttgttatgctgtttgc

SEQ ID NO: 969500 - DNA, 25 bp, Homo sapien
tgtttgctatcctctgtgctgtggt

SEQ ID NO: 969501 - DNA, 25 bp, Homo sapien
gttatgctgtttgctatcctctgtg

SEQ ID NO: 969502 - DNA, 25 bp, Homo sapien
tcgggactactgttcctggtagtag

SEQ ID NO: 969503 - DNA, 25 bp, Homo sapien
taaggaggtatgatgaggccgatca

SEQ ID NO: 969504 - DNA, 25 bp, Homo sapien
aaggtgcttctaaggaggtatgatg

SEQ ID NO: 969505 - DNA, 25 bp, Homo sapien
tctgaaggtgcttctaaggaggtat

SEQ ID NO: 969506 - DNA, 25 bp, Homo sapien
tgaaggtgcttctaaggaggtatga

SEQ ID NO: 969507 - DNA, 25 bp, Homo sapien
ttttcaagatgtaaaactgagaaca

SEQ ID NO: 969508 - DNA, 25 bp, Homo sapien
ccttttcaagatgtaaaactgagaa

SEQ ID NO: 969509 - DNA, 25 bp, Homo sapien
tttcaagatgtaaaactgagaacat

SEQ ID NO: 969510 - DNA, 25 bp, Homo sapien
cttttcaagatgtaaaactgagaac

SEQ ID NO: 969511 - DNA, 25 bp, Homo sapien
ttgtaacaagaaaatagccgcaggc

SEQ ID NO: 969512 - DNA, 25 bp, Homo sapien
cctagcacgctagttggcacagaaa

SEQ ID NO: 969513 - DNA, 25 bp, Homo sapien
gacgggcggcttctttcattcgaca

SEQ ID NO: 969514 - DNA, 25 bp, Homo sapien
tattttcggatttgtgggccacgag

SEQ ID NO: 969515 - DNA, 25 bp, Homo sapien
ctacatccacaatcctggcaaatat

SEQ ID NO: 969516 - DNA, 25 bp, Homo sapien
tccatttgggtccactgatatgtag

SEQ ID NO: 969517 - DNA, 25 bp, Homo sapien
catttgggtccactgatatgtagtt

SEQ ID NO: 969518 - DNA, 25 bp, Homo sapien
tcactacatccacaatcctggcaaa

SEQ ID NO: 969519 - DNA, 25 bp, Homo sapien
ctgtctaacattcctcctcctcttt

SEQ ID NO: 969520 - DNA, 25 bp, Homo sapien
tcattatatagtgaaatgctactac

SEQ ID NO: 969521 - DNA, 25 bp, Homo sapien
atcattatatagtgaaatgctacta

SEQ ID NO: 969522 - DNA, 25 bp, Homo sapien
cctcctcctctttttatcattatat

SEQ ID NO: 969523 - DNA, 25 bp, Homo sapien
catcacctcctgaatgaagaccttc

SEQ ID NO: 969524 - DNA, 25 bp, Homo sapien
ttacatctaaaacatcatcacctcc

SEQ ID NO: 969525 - DNA, 25 bp, Homo sapien
tctccaatgtgcgttttctcctgga

SEQ ID NO: 969526 - DNA, 25 bp, Homo sapien
ccaggtaggcggcatatgggctcct

SEQ ID NO: 969527 - DNA, 25 bp, Homo sapien
catctgtgtagaactctctccaatg

SEQ ID NO: 969528 - DNA, 25 bp, Homo sapien
tctctaaccatctgtgtagaactct

SEQ ID NO: 969529 - DNA, 25 bp, Homo sapien
attccaggtgttgaccatatgttca

SEQ ID NO: 969530 - DNA, 25 bp, Homo sapien
atctgacttccttgtataagtgcaa

SEQ ID NO: 969531 - DNA, 25 bp, Homo sapien
ctctataaattccaggtgttgacca

SEQ ID NO: 969532 - DNA, 25 bp, Homo sapien
gacttccttgtataagtgcaacaaa

SEQ ID NO: 969533 - DNA, 25 bp, Homo sapien
tattgttagacaagtcaatactgct

SEQ ID NO: 969534 - DNA, 25 bp, Homo sapien
gaaagggattggtttccatagatga

SEQ ID NO: 969535 - DNA, 25 bp, Homo sapien
tcttaacaatgaggccacataagca

SEQ ID NO: 969536 - DNA, 25 bp, Homo sapien
ttagaaatgctctgtgtcggaagcc

SEQ ID NO: 969537 - DNA, 25 bp, Homo sapien
ctcaggccagtgcctttgaacttta

SEQ ID NO: 969538 - DNA, 25 bp, Homo sapien
gaagtgaatttcgtcagtggctttt

SEQ ID NO: 969539 - DNA, 25 bp, Homo sapien
tgcaccaatctcctcacactcatca

SEQ ID NO: 969540 - DNA, 25 bp, Homo sapien
taaacacttggaccactcaggccag

SEQ ID NO: 969541 - DNA, 25 bp, Homo sapien
tgtcttagagatattgcttctggta

SEQ ID NO: 969542 - DNA, 25 bp, Homo sapien
ggctcttagacaacatatgttcatt

SEQ ID NO: 969543 - DNA, 25 bp, Homo sapien
atttgccttgaagtactatcttttc

SEQ ID NO: 969544 - DNA, 25 bp, Homo sapien
tcagcctgaaggctcttagacaaca

SEQ ID NO: 969545 - DNA, 25 bp, Homo sapien
tctgagaaggtcctttgatagtagt

SEQ ID NO: 969546 - DNA, 25 bp, Homo sapien
tcattatggtgcctgtgacaggctc

SEQ ID NO: 969547 - DNA, 25 bp, Homo sapien
gacactctgcctgaataatgaccct

SEQ ID NO: 969548 - DNA, 25 bp, Homo sapien
taatgaccctcattatggtgcctgt

SEQ ID NO: 969549 - DNA, 25 bp, Homo sapien
tgagtaacttggaagtcactaagga

SEQ ID NO: 969550 - DNA, 25 bp, Homo sapien
tactgtttaaagataggtcgtgcaa

SEQ ID NO: 969551 - DNA, 25 bp, Homo sapien
tcttcagcatcaactctatactgtt

SEQ ID NO: 969552 - DNA, 25 bp, Homo sapien
gagaacctggatggttggtttgtca

SEQ ID NO: 969553 - DNA, 25 bp, Homo sapien
tcttcaggcatattagtgaggtctt

SEQ ID NO: 969554 - DNA, 25 bp, Homo sapien
tgtgagaagcatcagcgctccaggg

SEQ ID NO: 969555 - DNA, 25 bp, Homo sapien
caggcttccttattcactgaggaca

SEQ ID NO: 969556 - DNA, 25 bp, Homo sapien
aggtcttaaagactgtgtgagaagc

SEQ ID NO: 969557 - DNA, 25 bp, Homo sapien
ttcactttttgggctccactgaact

SEQ ID NO: 969558 - DNA, 25 bp, Homo sapien
tcactttttgggctccactgaactc

SEQ ID NO: 969559 - DNA, 25 bp, Homo sapien
cttcactttttgggctccactgaac

SEQ ID NO: 969560 - DNA, 25 bp, Homo sapien
ccattattgtcggtactctgtagtt

SEQ ID NO: 969561 - DNA, 25 bp, Homo sapien
ctatccattattgtcggtactctgt

SEQ ID NO: 969562 - DNA, 25 bp, Homo sapien
tattgtcggtactctgtagtttgag

SEQ ID NO: 969563 - DNA, 25 bp, Homo sapien
atccattattgtcggtactctgtag

SEQ ID NO: 969564 - DNA, 25 bp, Homo sapien
actttgttccactctacattctcag

SEQ ID NO: 969565 - DNA, 25 bp, Homo sapien
gggcataaattctaactttgttcca

SEQ ID NO: 969566 - DNA, 25 bp, Homo sapien
tctcagatgacagggctagaagtct

SEQ ID NO: 969567 - DNA, 25 bp, Homo sapien
ggtgcaattcagctaacaagagggc

SEQ ID NO: 969568 - DNA, 25 bp, Homo sapien
tcatagggtctgcttgttgaaatag

SEQ ID NO: 969569 - DNA, 25 bp, Homo sapien
catagggtctgcttgttgaaatagc

SEQ ID NO: 969570 - DNA, 25 bp, Homo sapien
acacttagagaatatccttcaatgg

SEQ ID NO: 969571 - DNA, 25 bp, Homo sapien
ttggctcttcgttacctacacttag

SEQ ID NO: 969572 - DNA, 25 bp, Homo sapien
caaggcagtgaggatgcgttttggc

SEQ ID NO: 969573 - DNA, 25 bp, Homo sapien
gacttaagatgtaaattcccaggac

SEQ ID NO: 969574 - DNA, 25 bp, Homo sapien
tctccatcccatgggcattagaaga

SEQ ID NO: 969575 - DNA, 25 bp, Homo sapien
ccatcccatgggcattagaagagag

SEQ ID NO: 969576 - DNA, 25 bp, Homo sapien
aaggaggtggagattctgtaatcag

SEQ ID NO: 969577 - DNA, 25 bp, Homo sapien
atcccatgggcattagaagagagtg

SEQ ID NO: 969578 - DNA, 25 bp, Homo sapien
gaagtagaaagcttggcatagcaaa

SEQ ID NO: 969579 - DNA, 25 bp, Homo sapien
gcctgcaattcgtcctcttttgtct

SEQ ID NO: 969580 - DNA, 25 bp, Homo sapien
ttcctagaagtagaaagcttggcat

SEQ ID NO: 969581 - DNA, 25 bp, Homo sapien
gtttgttgaatacctcgcttgcctg

SEQ ID NO: 969582 - DNA, 25 bp, Homo sapien
tccctggctcatcacggcttcaagg

SEQ ID NO: 969583 - DNA, 25 bp, Homo sapien
ctgtacatttgcagcgtctccctgg

SEQ ID NO: 969584 - DNA, 25 bp, Homo sapien
tggtggagcctgtacatttgcagcg

SEQ ID NO: 969585 - DNA, 25 bp, Homo sapien
gctcatcacggcttcaaggtcacag

SEQ ID NO: 969586 - DNA, 25 bp, Homo sapien
tggaaaagcttgatgttttcaacca

SEQ ID NO: 969587 - DNA, 25 bp, Homo sapien
ggaaaagcttgatgttttcaaccat

SEQ ID NO: 969588 - DNA, 25 bp, Homo sapien
tttagctattgaagaagggaaaatg

SEQ ID NO: 969589 - DNA, 25 bp, Homo sapien
tagctattgaagaagggaaaatggc

SEQ ID NO: 969590 - DNA, 25 bp, Homo sapien
agacacgtgccatcaactttggaat

SEQ ID NO: 969591 - DNA, 25 bp, Homo sapien
tttacaatctttggcaacagacacg

SEQ ID NO: 969592 - DNA, 25 bp, Homo sapien
ttggaattccttgcagtttgcagac

SEQ ID NO: 969593 - DNA, 25 bp, Homo sapien
tacaatctttggcaacagacacgtg

SEQ ID NO: 969594 - DNA, 25 bp, Homo sapien
aggtaaaaacatagagcgagaacat

SEQ ID NO: 969595 - DNA, 25 bp, Homo sapien
ttcaaggtaaaaacatagagcgaga

SEQ ID NO: 969596 - DNA, 25 bp, Homo sapien
tcaaggtaaaaacatagagcgagaa

SEQ ID NO: 969597 - DNA, 25 bp, Homo sapien
caaggtaaaaacatagagcgagaac

SEQ ID NO: 969598 - DNA, 25 bp, Homo sapien
tgatcctgatcgacattctctccat

SEQ ID NO: 969599 - DNA, 25 bp, Homo sapien
tctccattcccggtttggtgacgta

SEQ ID NO: 969600 - DNA, 25 bp, Homo sapien
gaacacagccttgatatcaatcact

SEQ ID NO: 969601 - DNA, 25 bp, Homo sapien
cacttctaaggtagattctgaaaag

SEQ ID NO: 969602 - DNA, 25 bp, Homo sapien
tctccaaatatcactctgctgcttg

SEQ ID NO: 969603 - DNA, 25 bp, Homo sapien
gggctgacttgcacagaaatttttt

SEQ ID NO: 969604 - DNA, 25 bp, Homo sapien
ttggaagaaccacgtccccagcacg

SEQ ID NO: 969605 - DNA, 25 bp, Homo sapien
gctgcttggaagaaccacgtcccca

SEQ ID NO: 969606 - DNA, 25 bp, Homo sapien
tgttggaaattgagttgagagttga

SEQ ID NO: 969607 - DNA, 25 bp, Homo sapien
tcattgttggaaattgagttgagag

SEQ ID NO: 969608 - DNA, 25 bp, Homo sapien
tgagagtgttgatgactgaaagagc

SEQ ID NO: 969609 - DNA, 25 bp, Homo sapien
tgatgactgaaagagccttggcacc

SEQ ID NO: 969610 - DNA, 25 bp, Homo sapien
ccttgaggtggacagatactttgcc

SEQ ID NO: 969611 - DNA, 25 bp, Homo sapien
gagtaagtggtcctgatgtactcat

SEQ ID NO: 969612 - DNA, 25 bp, Homo sapien
tggatttggagtaagtggtcctgat

SEQ ID NO: 969613 - DNA, 25 bp, Homo sapien
gctgtggggcccctagccttgaggt

SEQ ID NO: 969614 - DNA, 25 bp, Homo sapien
ttatcctgttcgaagtttattctga

SEQ ID NO: 969615 - DNA, 25 bp, Homo sapien
tcctgttcgaagtttattctgatgc

SEQ ID NO: 969616 - DNA, 25 bp, Homo sapien
tatcctgttcgaagtttattctgat

SEQ ID NO: 969617 - DNA, 25 bp, Homo sapien
ctgttcgaagtttattctgatgcag

SEQ ID NO: 969618 - DNA, 25 bp, Homo sapien
tgacaagccttgcattgtgtaagct

SEQ ID NO: 969619 - DNA, 25 bp, Homo sapien
tagtttgcacctgttaattgacaag

SEQ ID NO: 969620 - DNA, 25 bp, Homo sapien
tgcattgtgtaagctgatgtatgag

SEQ ID NO: 969621 - DNA, 25 bp, Homo sapien
cacctgttaattgacaagccttgca

SEQ ID NO: 969622 - DNA, 25 bp, Homo sapien
ttgcaaaatcattagaaccatccat

SEQ ID NO: 969623 - DNA, 25 bp, Homo sapien
gctttggcaacctatagagaacttc

SEQ ID NO: 969624 - DNA, 25 bp, Homo sapien
tgctttggcaacctatagagaactt

SEQ ID NO: 969625 - DNA, 25 bp, Homo sapien
tgagtgctttggcaacctatagaga

SEQ ID NO: 969626 - DNA, 25 bp, Homo sapien
agtgctttggcaacctatagagaac

SEQ ID NO: 969627 - DNA, 25 bp, Homo sapien
tatcctcaaattccattcccatgaa

SEQ ID NO: 969628 - DNA, 25 bp, Homo sapien
cttgtacatactgtcttctggcgta

SEQ ID NO: 969629 - DNA, 25 bp, Homo sapien
ctgtcttctggcgtacagttccttt

SEQ ID NO: 969630 - DNA, 25 bp, Homo sapien
attatcctcaaattccattcccatg

SEQ ID NO: 969631 - DNA, 25 bp, Homo sapien
agaaccatgccataaggctcaatgg

SEQ ID NO: 969632 - DNA, 25 bp, Homo sapien
tgctgcatgataatggctgctccct

SEQ ID NO: 969633 - DNA, 25 bp, Homo sapien
taggagcagttcagcgtgctgcaga

SEQ ID NO: 969634 - DNA, 25 bp, Homo sapien
caatggcttgtgatttgcaagttga

SEQ ID NO: 969635 - DNA, 25 bp, Homo sapien
gactgatcttccaagcatgtatgag

SEQ ID NO: 969636 - DNA, 25 bp, Homo sapien
tgaggtcaagcaaattattccctgg

SEQ ID NO: 969637 - DNA, 25 bp, Homo sapien
taggctttgctatcagaatctgtcc

SEQ ID NO: 969638 - DNA, 25 bp, Homo sapien
ttgtgggtcctcctagaagatgtga

SEQ ID NO: 969639 - DNA, 25 bp, Homo sapien
tagagccagcggcagataatcatgc

SEQ ID NO: 969640 - DNA, 25 bp, Homo sapien
ctgacctaagatcagtattggtccc

SEQ ID NO: 969641 - DNA, 25 bp, Homo sapien
agcggcagataatcatgctgaccta

SEQ ID NO: 969642 - DNA, 25 bp, Homo sapien
catgctgacctaagatcagtattgg

SEQ ID NO: 969643 - DNA, 25 bp, Homo sapien
ccttgtgatgcagtttggcagttga

SEQ ID NO: 969644 - DNA, 25 bp, Homo sapien
tctcgttccttgtgatgcagtttgg

SEQ ID NO: 969645 - DNA, 25 bp, Homo sapien
gatgcagtttggcagttgagaatga

SEQ ID NO: 969646 - DNA, 25 bp, Homo sapien
gtttggcagttgagaatgaggtcat

SEQ ID NO: 969647 - DNA, 25 bp, Homo sapien
caaatatcgtggagcatgtctgctt

SEQ ID NO: 969648 - DNA, 25 bp, Homo sapien
tggctgtggggtacttaattgatga

SEQ ID NO: 969649 - DNA, 25 bp, Homo sapien
acatgaccagtgcaaatatcgtgga

SEQ ID NO: 969650 - DNA, 25 bp, Homo sapien
tgcttttcaagtccaggttttcgta

SEQ ID NO: 969651 - DNA, 25 bp, Homo sapien
catactccggttcagttctgttgca

SEQ ID NO: 969652 - DNA, 25 bp, Homo sapien
gttctgttgcaagggactaaataca

SEQ ID NO: 969653 - DNA, 25 bp, Homo sapien
tcaataaatccatactccggttcag

SEQ ID NO: 969654 - DNA, 25 bp, Homo sapien
cactttcaataaatccatactccgg

SEQ ID NO: 969655 - DNA, 25 bp, Homo sapien
gaatggcagagcaatctacagtccg

SEQ ID NO: 969656 - DNA, 25 bp, Homo sapien
tgaggctcctccactttaagaaacg

SEQ ID NO: 969657 - DNA, 25 bp, Homo sapien
tacttcagtttatggccgagaccca

SEQ ID NO: 969658 - DNA, 25 bp, Homo sapien
tatcaaagttgaagacggcagagcc

SEQ ID NO: 969659 - DNA, 25 bp, Homo sapien
gactgcagaagcttttattaagaaa

SEQ ID NO: 969660 - DNA, 25 bp, Homo sapien
atgactgcagaagcttttattaaga

SEQ ID NO: 969661 - DNA, 25 bp, Homo sapien
ctgcagaagcttttattaagaaagg

SEQ ID NO: 969662 - DNA, 25 bp, Homo sapien
tgcagaagcttttattaagaaaggg

SEQ ID NO: 969663 - DNA, 25 bp, Homo sapien
gaagtctagtttggccagtgtgtca

SEQ ID NO: 969664 - DNA, 25 bp, Homo sapien
tgattatccccttaaactttgtgcc

SEQ ID NO: 969665 - DNA, 25 bp, Homo sapien
ttaattggcagggaggatagtcttg

SEQ ID NO: 969666 - DNA, 25 bp, Homo sapien
tacaaggaaggtgaagtttcatacc

SEQ ID NO: 969667 - DNA, 25 bp, Homo sapien
tttgaatatctagcatgtcctagga

SEQ ID NO: 969668 - DNA, 25 bp, Homo sapien
tcctgtagaagaagtacttgaagag

SEQ ID NO: 969669 - DNA, 25 bp, Homo sapien
gttgagttgctctgattgaagtaga

SEQ ID NO: 969670 - DNA, 25 bp, Homo sapien
aagtggatactggagcccacccaca

SEQ ID NO: 969671 - DNA, 25 bp, Homo sapien
tatctcttgaattccgccttctttt

SEQ ID NO: 969672 - DNA, 25 bp, Homo sapien
aatatctcttgaattccgccttctt

SEQ ID NO: 969673 - DNA, 25 bp, Homo sapien
ctcttgaattccgccttcttttctc

SEQ ID NO: 969674 - DNA, 25 bp, Homo sapien
atctcttgaattccgccttcttttc

SEQ ID NO: 969675 - DNA, 25 bp, Homo sapien
ctactgctgtccaactggaccatgc

SEQ ID NO: 969676 - DNA, 25 bp, Homo sapien
tgctgtccaactggaccatgccttc

SEQ ID NO: 969677 - DNA, 25 bp, Homo sapien
actgctgtccaactggaccatgcct

SEQ ID NO: 969678 - DNA, 25 bp, Homo sapien
tactgctgtccaactggaccatgcc

SEQ ID NO: 969679 - DNA, 25 bp, Homo sapien
cataagccaatagtagccacaggca

SEQ ID NO: 969680 - DNA, 25 bp, Homo sapien
cttttaccataagccaatagtagcc

SEQ ID NO: 969681 - DNA, 25 bp, Homo sapien
tgattgagaggcatttcctcgcatt

SEQ ID NO: 969682 - DNA, 25 bp, Homo sapien
ttctgtccttttaccataagccaat

SEQ ID NO: 969683 - DNA, 25 bp, Homo sapien
gcagaaggccagtgtaggttttagc

SEQ ID NO: 969684 - DNA, 25 bp, Homo sapien
tatgaggaacttgcttcaaactgct

SEQ ID NO: 969685 - DNA, 25 bp, Homo sapien
tgatactgaaaccacgtctgaaagt

SEQ ID NO: 969686 - DNA, 25 bp, Homo sapien
ttaaaagtatgaggaacttgcttca

SEQ ID NO: 969687 - DNA, 25 bp, Homo sapien
cttcagtattgatcaactcatctac

SEQ ID NO: 969688 - DNA, 25 bp, Homo sapien
taatcatgtaatctaactgtccacc

SEQ ID NO: 969689 - DNA, 25 bp, Homo sapien
taagatgctggtatgtatgaataat

SEQ ID NO: 969690 - DNA, 25 bp, Homo sapien
actgtccaccttcagtattgatcaa

SEQ ID NO: 969691 - DNA, 25 bp, Homo sapien
gatgtcttcttgctgttgctatact

SEQ ID NO: 969692 - DNA, 25 bp, Homo sapien
gtcttcttgctgttgctatactgac

SEQ ID NO: 969693 - DNA, 25 bp, Homo sapien
tgtcttcttgctgttgctatactga

SEQ ID NO: 969694 - DNA, 25 bp, Homo sapien
ctgatgtcttcttgctgttgctata

SEQ ID NO: 969695 - DNA, 25 bp, Homo sapien
aattgtttactctgtgcatagcgct

SEQ ID NO: 969696 - DNA, 25 bp, Homo sapien
acaattgtttactctgtgcatagcg

SEQ ID NO: 969697 - DNA, 25 bp, Homo sapien
ctgcaggcttctgaagttgggaaca

SEQ ID NO: 969698 - DNA, 25 bp, Homo sapien
tctgaagttgggaacaattgtttac

SEQ ID NO: 969699 - DNA, 25 bp, Homo sapien
ctaggctttattcggattctccatg

SEQ ID NO: 969700 - DNA, 25 bp, Homo sapien
ttctccatgcttgtgaattttagat

SEQ ID NO: 969701 - DNA, 25 bp, Homo sapien
tctccatgcttgtgaattttagatc

SEQ ID NO: 969702 - DNA, 25 bp, Homo sapien
ggctttattcggattctccatgctt

SEQ ID NO: 969703 - DNA, 25 bp, Homo sapien
cattcagttggccacagaaatgccc

SEQ ID NO: 969704 - DNA, 25 bp, Homo sapien
ggaactcaggatatacagactcatg

SEQ ID NO: 969705 - DNA, 25 bp, Homo sapien
gcatctgtgggcttactttacgtaa

SEQ ID NO: 969706 - DNA, 25 bp, Homo sapien
tgccagaaatttaccccagcactga

SEQ ID NO: 969707 - DNA, 25 bp, Homo sapien
gcagctttcaagcattgtcttcgtt

SEQ ID NO: 969708 - DNA, 25 bp, Homo sapien
gctctggctgtgaccggttagcaga

SEQ ID NO: 969709 - DNA, 25 bp, Homo sapien
aagtcacaacttacatgggctaaat

SEQ ID NO: 969710 - DNA, 25 bp, Homo sapien
tttggttccgtcattgctctggctg

SEQ ID NO: 969711 - DNA, 25 bp, Homo sapien
ttcatcaggtggcttctttccacag

SEQ ID NO: 969712 - DNA, 25 bp, Homo sapien
gaactctgatatccacaaacttctg

SEQ ID NO: 969713 - DNA, 25 bp, Homo sapien
cttcttgttcatcaggtggcttctt

SEQ ID NO: 969714 - DNA, 25 bp, Homo sapien
tgaactctgatatccacaaacttct

SEQ ID NO: 969715 - DNA, 25 bp, Homo sapien
caagtgtgcatcacccacaacacta

SEQ ID NO: 969716 - DNA, 25 bp, Homo sapien
tcgctgaaggtagaagaaatgccat

SEQ ID NO: 969717 - DNA, 25 bp, Homo sapien
taaaagctttcagatacaagtgtgc

SEQ ID NO: 969718 - DNA, 25 bp, Homo sapien
gaaaaactgcaaacaagatcagatg

SEQ ID NO: 969719 - DNA, 25 bp, Homo sapien
tagcactaagttcttctaagggaca

SEQ ID NO: 969720 - DNA, 25 bp, Homo sapien
tctctccagcttgtaaggaagagtc

SEQ ID NO: 969721 - DNA, 25 bp, Homo sapien
gaagagtctagatattcccacatag

SEQ ID NO: 969722 - DNA, 25 bp, Homo sapien
tctaagggacaatactggaaaaaga

SEQ ID NO: 969723 - DNA, 25 bp, Homo sapien
gccagcagagctctgattttcttct

SEQ ID NO: 969724 - DNA, 25 bp, Homo sapien
ttttcttctgagaagtcgtatccat

SEQ ID NO: 969725 - DNA, 25 bp, Homo sapien
tccatcttttctgccagcagagctc

SEQ ID NO: 969726 - DNA, 25 bp, Homo sapien
cttccatcttttctgccagcagagc

SEQ ID NO: 969727 - DNA, 25 bp, Homo sapien
tggagggacaactcagcctaggtag

SEQ ID NO: 969728 - DNA, 25 bp, Homo sapien
tagaggcacaccaaatagcatgagc

SEQ ID NO: 969729 - DNA, 25 bp, Homo sapien
gaaggtgctcatggttggtatctcc

SEQ ID NO: 969730 - DNA, 25 bp, Homo sapien
tggatactggtacaagccacagact

SEQ ID NO: 969731 - DNA, 25 bp, Homo sapien
tctttttcaccagattgacaccatt

SEQ ID NO: 969732 - DNA, 25 bp, Homo sapien
caccattacgggaagctattcttaa

SEQ ID NO: 969733 - DNA, 25 bp, Homo sapien
gcaactgactagctacttcctctga

SEQ ID NO: 969734 - DNA, 25 bp, Homo sapien
ttaacccccagatcaagtaagctgg

SEQ ID NO: 969735 - DNA, 25 bp, Homo sapien
gagtggagaatgaccaaagaaacct

SEQ ID NO: 969736 - DNA, 25 bp, Homo sapien
taaacactaccgcgcttggaccagc

SEQ ID NO: 969737 - DNA, 25 bp, Homo sapien
ggagtggagaatgaccaaagaaacc

SEQ ID NO: 969738 - DNA, 25 bp, Homo sapien
tagttgtaaacactaccgcgcttgg

SEQ ID NO: 969739 - DNA, 25 bp, Homo sapien
gacctggtgctgaatagaactttgg

SEQ ID NO: 969740 - DNA, 25 bp, Homo sapien
ggtgctgaatagaactttggaggtc

SEQ ID NO: 969741 - DNA, 25 bp, Homo sapien
cacatggagacctggtgctgaatag

SEQ ID NO: 969742 - DNA, 25 bp, Homo sapien
ctggtaattgccctcttgggcacat

SEQ ID NO: 969743 - DNA, 25 bp, Homo sapien
tatttttaagctgttgggcctgatg

SEQ ID NO: 969744 - DNA, 25 bp, Homo sapien
gcctgatgttgaaatctcccttgtc

SEQ ID NO: 969745 - DNA, 25 bp, Homo sapien
ccagttagacttactagttttaatg

SEQ ID NO: 969746 - DNA, 25 bp, Homo sapien
tcccttgtcaccagttagacttact

SEQ ID NO: 969747 - DNA, 25 bp, Homo sapien
ttaacacttctgaagaggtgagtaa

SEQ ID NO: 969748 - DNA, 25 bp, Homo sapien
tctgaagaggtgagtaaccagaagt

SEQ ID NO: 969749 - DNA, 25 bp, Homo sapien
aacacttctgaagaggtgagtaacc

SEQ ID NO: 969750 - DNA, 25 bp, Homo sapien
acttctgaagaggtgagtaaccaga

SEQ ID NO: 969751 - DNA, 25 bp, Homo sapien
gattcaccgcctctggttggaagca

SEQ ID NO: 969752 - DNA, 25 bp, Homo sapien
caccgcctctggttggaagcagatc

SEQ ID NO: 969753 - DNA, 25 bp, Homo sapien
gaagagattcaccgcctctggttgg

SEQ ID NO: 969754 - DNA, 25 bp, Homo sapien
gcctctggttggaagcagatctgca

SEQ ID NO: 969755 - DNA, 25 bp, Homo sapien
ctgattagactatcaacttgcaaag

SEQ ID NO: 969756 - DNA, 25 bp, Homo sapien
gtgatctgattagactatcaacttg

SEQ ID NO: 969757 - DNA, 25 bp, Homo sapien
gatctgattagactatcaacttgca

SEQ ID NO: 969758 - DNA, 25 bp, Homo sapien
tctgattagactatcaacttgcaaa

SEQ ID NO: 969759 - DNA, 25 bp, Homo sapien
ttctaggattgacagttcgagcttc

SEQ ID NO: 969760 - DNA, 25 bp, Homo sapien
taggattgacagttcgagcttcagt

SEQ ID NO: 969761 - DNA, 25 bp, Homo sapien
tgagttctaggattgacagttcgag

SEQ ID NO: 969762 - DNA, 25 bp, Homo sapien
ttgacagttcgagcttcagtataaa

SEQ ID NO: 969763 - DNA, 25 bp, Homo sapien
gaataatgcagggcggcttgtttat

SEQ ID NO: 969764 - DNA, 25 bp, Homo sapien
gatgaataatgcagggcggcttgtt

SEQ ID NO: 969765 - DNA, 25 bp, Homo sapien
ttgctctgaaatcttatcctgtttt

SEQ ID NO: 969766 - DNA, 25 bp, Homo sapien
atgaataatgcagggcggcttgttt

SEQ ID NO: 969767 - DNA, 25 bp, Homo sapien
tccaatttggtgttagcctcttcat

SEQ ID NO: 969768 - DNA, 25 bp, Homo sapien
tccactatcattcccgaggtaacga

SEQ ID NO: 969769 - DNA, 25 bp, Homo sapien
gatattttcataggcatggctagta

SEQ ID NO: 969770 - DNA, 25 bp, Homo sapien
tagtaatcaatatagacaagctctg

SEQ ID NO: 969771 - DNA, 25 bp, Homo sapien
cttctgtcagcagccacttccttca

SEQ ID NO: 969772 - DNA, 25 bp, Homo sapien
ctgccttctgtcagcagccacttcc

SEQ ID NO: 969773 - DNA, 25 bp, Homo sapien
gccttctgtcagcagccacttcctt

SEQ ID NO: 969774 - DNA, 25 bp, Homo sapien
ttctgtcagcagccacttccttcat

SEQ ID NO: 969775 - DNA, 25 bp, Homo sapien
tctgaacagttataacctcctgcat

SEQ ID NO: 969776 - DNA, 25 bp, Homo sapien
gccacagtcactggtcttctgaaca

SEQ ID NO: 969777 - DNA, 25 bp, Homo sapien
cctgcgatgccacagtcactggtct

SEQ ID NO: 969778 - DNA, 25 bp, Homo sapien
gctgcagctttcacctgcgatgcca

SEQ ID NO: 969779 - DNA, 25 bp, Homo sapien
aaagtacatacttacagagctgggt

SEQ ID NO: 969780 - DNA, 25 bp, Homo sapien
tttctatatgttttagccccaatgg

SEQ ID NO: 969781 - DNA, 25 bp, Homo sapien
tcctgtgaactcattataatctgac

SEQ ID NO: 969782 - DNA, 25 bp, Homo sapien
gttattgtcaaatgtgcttgatttc

SEQ ID NO: 969783 - DNA, 25 bp, Homo sapien
ccttattcccattccgacagcgatg

SEQ ID NO: 969784 - DNA, 25 bp, Homo sapien
ttcccattccgacagcgatgaacca

SEQ ID NO: 969785 - DNA, 25 bp, Homo sapien
catcctcacccttattcccattccg

SEQ ID NO: 969786 - DNA, 25 bp, Homo sapien
ttccgacagcgatgaaccaccaagt

SEQ ID NO: 969787 - DNA, 25 bp, Homo sapien
tcctttgtatttccttaggctcttc

SEQ ID NO: 969788 - DNA, 25 bp, Homo sapien
tcttctctttctgctcttagaaggg

SEQ ID NO: 969789 - DNA, 25 bp, Homo sapien
ttctctttctgctcttagaagggca

SEQ ID NO: 969790 - DNA, 25 bp, Homo sapien
ctctttctgctcttagaagggcatt

SEQ ID NO: 969791 - DNA, 25 bp, Homo sapien
tatttcagttgaccgggacacagca

SEQ ID NO: 969792 - DNA, 25 bp, Homo sapien
taaccgcacacctaagagacctgat

SEQ ID NO: 969793 - DNA, 25 bp, Homo sapien
gatttcaaggcccagtagttgtacc

SEQ ID NO: 969794 - DNA, 25 bp, Homo sapien
tctagggagagggtctataactcac

SEQ ID NO: 969795 - DNA, 25 bp, Homo sapien
tagttccagtagtacaccaccaagt

SEQ ID NO: 969796 - DNA, 25 bp, Homo sapien
tgtctactagacaatggagaaaggc

SEQ ID NO: 969797 - DNA, 25 bp, Homo sapien
tttgcctttcaaccacaagtgacag

SEQ ID NO: 969798 - DNA, 25 bp, Homo sapien
taagtggatttggactccgtagtca

SEQ ID NO: 969799 - DNA, 25 bp, Homo sapien
aaaaataagccaaagcaacatatga

SEQ ID NO: 969800 - DNA, 25 bp, Homo sapien
cagttgatgaattgggtctgtttat

SEQ ID NO: 969801 - DNA, 25 bp, Homo sapien
gcataattgcatagcaccagcatag

SEQ ID NO: 969802 - DNA, 25 bp, Homo sapien
catatgaaacacagagcataattgc

SEQ ID NO: 969803 - DNA, 25 bp, Homo sapien
tactgaattctgctcaggatggctc

SEQ ID NO: 969804 - DNA, 25 bp, Homo sapien
tatagcttgatcacagagctcaggg

SEQ ID NO: 969805 - DNA, 25 bp, Homo sapien
taaatcaaccgtgccaagtgaagcc

SEQ ID NO: 969806 - DNA, 25 bp, Homo sapien
cagggttggcagaccatgagtacga

SEQ ID NO: 969807 - DNA, 25 bp, Homo sapien
tgtaatttcaaacgaaaatcattaa

SEQ ID NO: 969808 - DNA, 25 bp, Homo sapien
ctgtaatttcaaacgaaaatcatta

SEQ ID NO: 969809 - DNA, 25 bp, Homo sapien
catattcagccatcttgatcctgga

SEQ ID NO: 969810 - DNA, 25 bp, Homo sapien
tgccttgaggcaatgaaatccatag

SEQ ID NO: 969811 - DNA, 25 bp, Homo sapien
aatgcaggaccttttcatggaaaca

SEQ ID NO: 969812 - DNA, 25 bp, Homo sapien
gatggttccatagtggctcagacta

SEQ ID NO: 969813 - DNA, 25 bp, Homo sapien
tgtgttccaattctcgggctctctg

SEQ ID NO: 969814 - DNA, 25 bp, Homo sapien
agcctgctctaatttcttctgtctg

SEQ ID NO: 969815 - DNA, 25 bp, Homo sapien
ttgtagccacttgatgtactccact

SEQ ID NO: 969816 - DNA, 25 bp, Homo sapien
ctgaatccgaagtagaagtcgcctg

SEQ ID NO: 969817 - DNA, 25 bp, Homo sapien
ctgtagaatggagagataacctttt

SEQ ID NO: 969818 - DNA, 25 bp, Homo sapien
tggagagataaccttttcacaattg

SEQ ID NO: 969819 - DNA, 25 bp, Homo sapien
ccttttcacaattgtgcatgtcagc

SEQ ID NO: 969820 - DNA, 25 bp, Homo sapien
caattgtgcatgtcagcagaattca

SEQ ID NO: 969821 - DNA, 25 bp, Homo sapien
tgtcaggtctcgtattctacaccaa

SEQ ID NO: 969822 - DNA, 25 bp, Homo sapien
catggctcacaaaaacacatatgga

SEQ ID NO: 969823 - DNA, 25 bp, Homo sapien
tacatgttgtagaagctcttcactc

SEQ ID NO: 969824 - DNA, 25 bp, Homo sapien
tgttaacaccggtcaagagattgtc

SEQ ID NO: 969825 - DNA, 25 bp, Homo sapien
catggagccagaccatggttctcag

SEQ ID NO: 969826 - DNA, 25 bp, Homo sapien
tcacgtagatgggtactccttagtc

SEQ ID NO: 969827 - DNA, 25 bp, Homo sapien
gaggatacactctggattcaatcat

SEQ ID NO: 969828 - DNA, 25 bp, Homo sapien
tctcaggtagagtcattttaagagg

SEQ ID NO: 969829 - DNA, 25 bp, Homo sapien
agctccttgattcggtaattaatat

SEQ ID NO: 969830 - DNA, 25 bp, Homo sapien
caagctccttgattcggtaattaat

SEQ ID NO: 969831 - DNA, 25 bp, Homo sapien
ccttgattcggtaattaatattata

SEQ ID NO: 969832 - DNA, 25 bp, Homo sapien
tggaataagagtgccaagctccttg

SEQ ID NO: 969833 - DNA, 25 bp, Homo sapien
aatcccttctctcaaccattagctc

SEQ ID NO: 969834 - DNA, 25 bp, Homo sapien
tctggaccaaagttatctgctctga

SEQ ID NO: 969835 - DNA, 25 bp, Homo sapien
ggactgttatgaccatgtgccagct

SEQ ID NO: 969836 - DNA, 25 bp, Homo sapien
gttatctgctctgacactaaagcct

SEQ ID NO: 969837 - DNA, 25 bp, Homo sapien
aggcaggtgctttatgaacagatgc

SEQ ID NO: 969838 - DNA, 25 bp, Homo sapien
gatgcaggtttcacaagtacgtgta

SEQ ID NO: 969839 - DNA, 25 bp, Homo sapien
caagtacgtgtatactcaatttcag

SEQ ID NO: 969840 - DNA, 25 bp, Homo sapien
caggtgctttatgaacagatgcagg

SEQ ID NO: 969841 - DNA, 25 bp, Homo sapien
tctctcttttgctaaagctctagtg

SEQ ID NO: 969842 - DNA, 25 bp, Homo sapien
tcttttgctaaagctctagtgtcag

SEQ ID NO: 969843 - DNA, 25 bp, Homo sapien
tgtctctcttttgctaaagctctag

SEQ ID NO: 969844 - DNA, 25 bp, Homo sapien
tttgctaaagctctagtgtcagttt

SEQ ID NO: 969845 - DNA, 25 bp, Homo sapien
gttcaccgctatacacatccaaaat

SEQ ID NO: 969846 - DNA, 25 bp, Homo sapien
tggacaagaagcacttgtaagcccc

SEQ ID NO: 969847 - DNA, 25 bp, Homo sapien
cttttcattggtagactacttggac

SEQ ID NO: 969848 - DNA, 25 bp, Homo sapien
tgtaagccccatgttaattggtgaa

SEQ ID NO: 969849 - DNA, 25 bp, Homo sapien
gaagtgtctataaccttcacaatag

SEQ ID NO: 969850 - DNA, 25 bp, Homo sapien
taactttgaagtgtctataaccttc

SEQ ID NO: 969851 - DNA, 25 bp, Homo sapien
gtctataaccttcacaatagcaatg

SEQ ID NO: 969852 - DNA, 25 bp, Homo sapien
caatagcaatggttttctctttctc

SEQ ID NO: 969853 - DNA, 25 bp, Homo sapien
cttagtctgggcaatttgttgtgga

SEQ ID NO: 969854 - DNA, 25 bp, Homo sapien
ttaatttagcctgactagaatccat

SEQ ID NO: 969855 - DNA, 25 bp, Homo sapien
catttgcttgggtaacgactactgc

SEQ ID NO: 969856 - DNA, 25 bp, Homo sapien
ttcttggttctcactcttagtctgg

SEQ ID NO: 969857 - DNA, 25 bp, Homo sapien
tagaaagggagatattagcattaat

SEQ ID NO: 969858 - DNA, 25 bp, Homo sapien
tatctagagaattagttttcatgtc

SEQ ID NO: 969859 - DNA, 25 bp, Homo sapien
aaattagaaagggagatattagcat

SEQ ID NO: 969860 - DNA, 25 bp, Homo sapien
tcatgtcactatggctacttgaaat

SEQ ID NO: 969861 - DNA, 25 bp, Homo sapien
tgcattagcagaggagagtctgctc

SEQ ID NO: 969862 - DNA, 25 bp, Homo sapien
gattatatcctcaataacgtcctcc

SEQ ID NO: 969863 - DNA, 25 bp, Homo sapien
ttgcattagcagaggagagtctgct

SEQ ID NO: 969864 - DNA, 25 bp, Homo sapien
aaacttgattccataccgattatat

SEQ ID NO: 969865 - DNA, 25 bp, Homo sapien
gttaaaagatccagatataatttca

SEQ ID NO: 969866 - DNA, 25 bp, Homo sapien
ttttgtatgatcagcacctctaaat

SEQ ID NO: 969867 - DNA, 25 bp, Homo sapien
tttgttacatttgcaatcagaatgt

SEQ ID NO: 969868 - DNA, 25 bp, Homo sapien
tctaaacacataccactattagtgt

SEQ ID NO: 969869 - DNA, 25 bp, Homo sapien
atttttataaccagccattagacat

SEQ ID NO: 969870 - DNA, 25 bp, Homo sapien
tatttttataaccagccattagaca

SEQ ID NO: 969871 - DNA, 25 bp, Homo sapien
tttttataaccagccattagacata

SEQ ID NO: 969872 - DNA, 25 bp, Homo sapien
ttttataaccagccattagacatac

SEQ ID NO: 969873 - DNA, 25 bp, Homo sapien
cactgtccagagttgtgtgtgcatg

SEQ ID NO: 969874 - DNA, 25 bp, Homo sapien
tctttcccaatagctagtaacttgg

SEQ ID NO: 969875 - DNA, 25 bp, Homo sapien
ctgcaggttgtgaccatttaagagt

SEQ ID NO: 969876 - DNA, 25 bp, Homo sapien
tgtgcatgctgcacaagaggcccac

SEQ ID NO: 969877 - DNA, 25 bp, Homo sapien
ttctgtagctgaggccttgcagaac

SEQ ID NO: 969878 - DNA, 25 bp, Homo sapien
gtagctgaggccttgcagaactttc

SEQ ID NO: 969879 - DNA, 25 bp, Homo sapien
tttctgtagctgaggccttgcagaa

SEQ ID NO: 969880 - DNA, 25 bp, Homo sapien
ctgtagctgaggccttgcagaactt

SEQ ID NO: 969881 - DNA, 25 bp, Homo sapien
cctctacaactactatttttgcaaa

SEQ ID NO: 969882 - DNA, 25 bp, Homo sapien
ttttctggtcccatgttacctctac

SEQ ID NO: 969883 - DNA, 25 bp, Homo sapien
tcttttatgaaatagagccatcttt

SEQ ID NO: 969884 - DNA, 25 bp, Homo sapien
ttatgaaatagagccatcttttctg

SEQ ID NO: 969885 - DNA, 25 bp, Homo sapien
caaagtaaacgatctagccgtgagt

SEQ ID NO: 969886 - DNA, 25 bp, Homo sapien
ccgtgagtaatgaatactttgggct

SEQ ID NO: 969887 - DNA, 25 bp, Homo sapien
catgccagaagggacaaccaaagta

SEQ ID NO: 969888 - DNA, 25 bp, Homo sapien
cccataacatatgcaccatgccaga

SEQ ID NO: 969889 - DNA, 25 bp, Homo sapien
gtttgaatgacttagccaactcccc

SEQ ID NO: 969890 - DNA, 25 bp, Homo sapien
cattagacgtttgaatgacttagcc

SEQ ID NO: 969891 - DNA, 25 bp, Homo sapien
cctgctgccattagacgtttgaatg

SEQ ID NO: 969892 - DNA, 25 bp, Homo sapien
gaatgacttagccaactccccttta

SEQ ID NO: 969893 - DNA, 25 bp, Homo sapien
tttggccattaacctgcagcattca

SEQ ID NO: 969894 - DNA, 25 bp, Homo sapien
tcctcttcggcctaataatgtgttt

SEQ ID NO: 969895 - DNA, 25 bp, Homo sapien
gtttggccattaacctgcagcattc

SEQ ID NO: 969896 - DNA, 25 bp, Homo sapien
tccacattcctcttcggcctaataa

SEQ ID NO: 969897 - DNA, 25 bp, Homo sapien
caaatgaagacttaattggtagaat

SEQ ID NO: 969898 - DNA, 25 bp, Homo sapien
gaagacttaattggtagaatttcag

SEQ ID NO: 969899 - DNA, 25 bp, Homo sapien
gacttaattggtagaatttcaggga

SEQ ID NO: 969900 - DNA, 25 bp, Homo sapien
ttaattggtagaatttcagggagtg

SEQ ID NO: 969901 - DNA, 25 bp, Homo sapien
tgcataaggttttggtgattttcct

SEQ ID NO: 969902 - DNA, 25 bp, Homo sapien
gtgcataaggttttggtgattttcc

SEQ ID NO: 969903 - DNA, 25 bp, Homo sapien
tgtggtcttgctgggacaagtctat

SEQ ID NO: 969904 - DNA, 25 bp, Homo sapien
tctatgcaacactggtttgtatgaa

SEQ ID NO: 969905 - DNA, 25 bp, Homo sapien
actctgttctatgggcactgatttc

SEQ ID NO: 969906 - DNA, 25 bp, Homo sapien
aaaggatggtaattgacttgaataa

SEQ ID NO: 969907 - DNA, 25 bp, Homo sapien
tctagggaactaaatcattgatagg

SEQ ID NO: 969908 - DNA, 25 bp, Homo sapien
ctagggaactaaatcattgatagga

SEQ ID NO: 969909 - DNA, 25 bp, Homo sapien
attttctctagggaactaaatcatt

SEQ ID NO: 969910 - DNA, 25 bp, Homo sapien
ttctctagggaactaaatcattgat

SEQ ID NO: 969911 - DNA, 25 bp, Homo sapien
tcaatgaccgtgtcaagcaggaacc

SEQ ID NO: 969912 - DNA, 25 bp, Homo sapien
caagcaggaacctctcttatcctat

SEQ ID NO: 969913 - DNA, 25 bp, Homo sapien
ggcaattatttcaatgaccgtgtca

SEQ ID NO: 969914 - DNA, 25 bp, Homo sapien
gaccgtgtcaagcaggaacctctct

SEQ ID NO: 969915 - DNA, 25 bp, Homo sapien
cagtcaggctttttctgcccattca

SEQ ID NO: 969916 - DNA, 25 bp, Homo sapien
cctagattttgacttggatggctct

SEQ ID NO: 969917 - DNA, 25 bp, Homo sapien
cagggagtcaaatgctttctagctt

SEQ ID NO: 969918 - DNA, 25 bp, Homo sapien
gaaaagtcactagttcagtcaggct

SEQ ID NO: 969919 - DNA, 25 bp, Homo sapien
gtttctctctggggtgacgaaaata

SEQ ID NO: 969920 - DNA, 25 bp, Homo sapien
cggagtttctctctggggtgacgaa

SEQ ID NO: 969921 - DNA, 25 bp, Homo sapien
ctgctaatggacacggagtttctct

SEQ ID NO: 969922 - DNA, 25 bp, Homo sapien
tgctaatggacacggagtttctctc

SEQ ID NO: 969923 - DNA, 25 bp, Homo sapien
actatttcagaggtcagggtgccaa

SEQ ID NO: 969924 - DNA, 25 bp, Homo sapien
ggctaaaagccctgattggtccaaa

SEQ ID NO: 969925 - DNA, 25 bp, Homo sapien
cattcagcattctgggaccaagaca

SEQ ID NO: 969926 - DNA, 25 bp, Homo sapien
aatgagtctgggatttgcctaagcc

SEQ ID NO: 969927 - DNA, 25 bp, Homo sapien
taatagaatctacattaatgtgtat

SEQ ID NO: 969928 - DNA, 25 bp, Homo sapien
tcagcttgcactatatttctcaaag

SEQ ID NO: 969929 - DNA, 25 bp, Homo sapien
tgtgacactgtatggatgaactttc

SEQ ID NO: 969930 - DNA, 25 bp, Homo sapien
tacacacaaatttatgtgacactgt

SEQ ID NO: 969931 - DNA, 25 bp, Homo sapien
tgttttattctctaccacatttgga

SEQ ID NO: 969932 - DNA, 25 bp, Homo sapien
ctacaaaatgagcacggtacagcat

SEQ ID NO: 969933 - DNA, 25 bp, Homo sapien
aaagcaatgtcacactctgatgacc

SEQ ID NO: 969934 - DNA, 25 bp, Homo sapien
catggttcaaaagttgtacgattac

SEQ ID NO: 969935 - DNA, 25 bp, Homo sapien
tcattccaggacgaaaagctgaatg

SEQ ID NO: 969936 - DNA, 25 bp, Homo sapien
gctgaatgaagtgcaacatgaaagg

SEQ ID NO: 969937 - DNA, 25 bp, Homo sapien
gaatgaagtgcaacatgaaagggac

SEQ ID NO: 969938 - DNA, 25 bp, Homo sapien
attccaggacgaaaagctgaatgaa

SEQ ID NO: 969939 - DNA, 25 bp, Homo sapien
aactctgatgtctttgcagtgccag

SEQ ID NO: 969940 - DNA, 25 bp, Homo sapien
aaggcaatttctcgctatgctacag

SEQ ID NO: 969941 - DNA, 25 bp, Homo sapien
attgggcctacagcaaacctgccag

SEQ ID NO: 969942 - DNA, 25 bp, Homo sapien
tctacctcagatggctaactcaaag

SEQ ID NO: 969943 - DNA, 25 bp, Homo sapien
ttttcacttatgacagttaacatgg

SEQ ID NO: 969944 - DNA, 25 bp, Homo sapien
gaatccgtgagactcaatctctcca

SEQ ID NO: 969945 - DNA, 25 bp, Homo sapien
tggctcaggcgaagaatccgtgaga

SEQ ID NO: 969946 - DNA, 25 bp, Homo sapien
ttgctggtggctcaggcgaagaatc

SEQ ID NO: 969947 - DNA, 25 bp, Homo sapien
gcgaagaatccgtgagactcaatct

SEQ ID NO: 969948 - DNA, 25 bp, Homo sapien
gtactggcaactttgtcacacaatg

SEQ ID NO: 969949 - DNA, 25 bp, Homo sapien
tatccttgactgagctgaagtccgg

SEQ ID NO: 969950 - DNA, 25 bp, Homo sapien
gagacatactctccctatcaagaat

SEQ ID NO: 969951 - DNA, 25 bp, Homo sapien
tatcaagaattgagactggttgttc

SEQ ID NO: 969952 - DNA, 25 bp, Homo sapien
tgtccaccagactcatatcctattg

SEQ ID NO: 969953 - DNA, 25 bp, Homo sapien
caccaaactggtcacccaaaataga

SEQ ID NO: 969954 - DNA, 25 bp, Homo sapien
ggccttgccaaatcaatacacacaa

SEQ ID NO: 969955 - DNA, 25 bp, Homo sapien
cctgccttaaggtgtgtgttatatc

SEQ ID NO: 969956 - DNA, 25 bp, Homo sapien
gtcaagtccaacattgactaaagca

SEQ ID NO: 969957 - DNA, 25 bp, Homo sapien
gaaaagtcaagtccaacattgacta

SEQ ID NO: 969958 - DNA, 25 bp, Homo sapien
caagtccaacattgactaaagcact

SEQ ID NO: 969959 - DNA, 25 bp, Homo sapien
aaaagtcaagtccaacattgactaa

SEQ ID NO: 969960 - DNA, 25 bp, Homo sapien
gaaagggcatctccacaacgcaata

SEQ ID NO: 969961 - DNA, 25 bp, Homo sapien
tcatcaaagcctgagcacgcgatag

SEQ ID NO: 969962 - DNA, 25 bp, Homo sapien
caggctaagacattaggcaggtccc

SEQ ID NO: 969963 - DNA, 25 bp, Homo sapien
caaatttctcgaggcaaggcagaca

SEQ ID NO: 969964 - DNA, 25 bp, Homo sapien
actgagcttgcccagcagggcgccg

SEQ ID NO: 969965 - DNA, 25 bp, Homo sapien
ccagagaatcccttcggagaccagg

SEQ ID NO: 969966 - DNA, 25 bp, Homo sapien
agagaatcccttcggagaccaggtc

SEQ ID NO: 969967 - DNA, 25 bp, Homo sapien
gaatcccttcggagaccaggtcagg

SEQ ID NO: 969968 - DNA, 25 bp, Homo sapien
tgcgtgcggcgctcggtgattggcg

SEQ ID NO: 969969 - DNA, 25 bp, Homo sapien
cgctcgggccgcgaaggtgcgtgcg

SEQ ID NO: 969970 - DNA, 25 bp, Homo sapien
cgctcggtgattggcggcggcccgg

SEQ ID NO: 969971 - DNA, 25 bp, Homo sapien
gcgaaggtgcgtgcggcgctcggtg

SEQ ID NO: 969972 - DNA, 25 bp, Homo sapien
gggacccataggacgcgttaacatg

SEQ ID NO: 969973 - DNA, 25 bp, Homo sapien
gtttcccgtgttcgcagcggagccg

SEQ ID NO: 969974 - DNA, 25 bp, Homo sapien
actgggcggcggaagttcgacggcg

SEQ ID NO: 969975 - DNA, 25 bp, Homo sapien
agctgaacccggccgtgggatcccg

SEQ ID NO: 969976 - DNA, 25 bp, Homo sapien
actcgggagcgacagaattggaagc

SEQ ID NO: 969977 - DNA, 25 bp, Homo sapien
tctccagtctcacggaatcccagtg

SEQ ID NO: 969978 - DNA, 25 bp, Homo sapien
cattacttgtctaccgaccgaggca

SEQ ID NO: 969979 - DNA, 25 bp, Homo sapien
gaggcagtgcctccctcttagggaa

SEQ ID NO: 969980 - DNA, 25 bp, Homo sapien
cttacaaacttcttgagagatgaat

SEQ ID NO: 969981 - DNA, 25 bp, Homo sapien
cttgcttacaaacttcttgagagat

SEQ ID NO: 969982 - DNA, 25 bp, Homo sapien
tacaaacttcttgagagatgaatcc

SEQ ID NO: 969983 - DNA, 25 bp, Homo sapien
caaacttcttgagagatgaatccat

SEQ ID NO: 969984 - DNA, 25 bp, Homo sapien
tttcctgtttgcagtcatagctaat

SEQ ID NO: 969985 - DNA, 25 bp, Homo sapien
taccacgtgtgctatagagggacag

SEQ ID NO: 969986 - DNA, 25 bp, Homo sapien
tatcagactacacgtttcaaagcag

SEQ ID NO: 969987 - DNA, 25 bp, Homo sapien
gtcatgtgacttccgtgttaaacga

SEQ ID NO: 969988 - DNA, 25 bp, Homo sapien
tccaaattcattccagccgggtcat

SEQ ID NO: 969989 - DNA, 25 bp, Homo sapien
gatttcagtggcctaactccacagc

SEQ ID NO: 969990 - DNA, 25 bp, Homo sapien
tactcagtaatttggcaacagttgc

SEQ ID NO: 969991 - DNA, 25 bp, Homo sapien
taggatcatcctgtggaccactgtt

SEQ ID NO: 969992 - DNA, 25 bp, Homo sapien
cagacatagatttggatcccacctt

SEQ ID NO: 969993 - DNA, 25 bp, Homo sapien
gggtttcaactgtctacctcacagg

SEQ ID NO: 969994 - DNA, 25 bp, Homo sapien
tgaatttgggaaagctacttagccc

SEQ ID NO: 969995 - DNA, 25 bp, Homo sapien
cacagggttgtaaggataatcgaga

SEQ ID NO: 969996 - DNA, 25 bp, Homo sapien
gccacttggtactttgttggacaca

SEQ ID NO: 969997 - DNA, 25 bp, Homo sapien
gaatcctaagcttggacctcaagag

SEQ ID NO: 969998 - DNA, 25 bp, Homo sapien
acttggatcagtagaatgtggtaga

SEQ ID NO: 969999 - DNA, 25 bp, Homo sapien
gagaaagcacttgattgaacactgc

SEQ ID NO: 970000 - DNA, 25 bp, Homo sapien
gaacactgcaacgtattgtggtccc

SEQ ID NO: 970001 - DNA, 25 bp, Homo sapien
ttggatgtccaagaatagtcatagc

SEQ ID NO: 970002 - DNA, 25 bp, Homo sapien
cctacaagatttggatgtccaagaa

SEQ ID NO: 970003 - DNA, 25 bp, Homo sapien
ttgtaggcagaaactaacctacaag

SEQ ID NO: 970004 - DNA, 25 bp, Homo sapien
caagaatagtcatagccttggctct

SEQ ID NO: 970005 - DNA, 25 bp, Homo sapien
taggactgcttccattgggttatag

SEQ ID NO: 970006 - DNA, 25 bp, Homo sapien
ccattgggttatagtaggagaaagt

SEQ ID NO: 970007 - DNA, 25 bp, Homo sapien
atattgccgtgacccattccactct

SEQ ID NO: 970008 - DNA, 25 bp, Homo sapien
taggagaaagtgtatcatattgccg

SEQ ID NO: 970009 - DNA, 25 bp, Homo sapien
tctgtgatgtttaaaagttccctca

SEQ ID NO: 970010 - DNA, 25 bp, Homo sapien
aggggcactttttccaggcagtcac

SEQ ID NO: 970011 - DNA, 25 bp, Homo sapien
ggcactttttccaggcagtcacaaa

SEQ ID NO: 970012 - DNA, 25 bp, Homo sapien
tctgtctgtgatgtttaaaagttcc

SEQ ID NO: 970013 - DNA, 25 bp, Homo sapien
gccctgtggctttcctctttaccag

SEQ ID NO: 970014 - DNA, 25 bp, Homo sapien
ctgtggctttcctctttaccagtct

SEQ ID NO: 970015 - DNA, 25 bp, Homo sapien
tcccctgttgccctgtggctttcct

SEQ ID NO: 970016 - DNA, 25 bp, Homo sapien
tggctttcctctttaccagtctctc

SEQ ID NO: 970017 - DNA, 25 bp, Homo sapien
ttcagttttgatacaattcttcagt

SEQ ID NO: 970018 - DNA, 25 bp, Homo sapien
ttttacaagacttaagcagctctcc

SEQ ID NO: 970019 - DNA, 25 bp, Homo sapien
attcttcagttttagggagctaaag

SEQ ID NO: 970020 - DNA, 25 bp, Homo sapien
gaaacctgctagaactgatacagtt

SEQ ID NO: 970021 - DNA, 25 bp, Homo sapien
gggcgtctaggttgattccaccatg

SEQ ID NO: 970022 - DNA, 25 bp, Homo sapien
tactactgtgataaacatacgggtg

SEQ ID NO: 970023 - DNA, 25 bp, Homo sapien
tcagaatgtacctgtgcagtgcagg

SEQ ID NO: 970024 - DNA, 25 bp, Homo sapien
tcagttgaaacgttatggtaccatc

SEQ ID NO: 970025 - DNA, 25 bp, Homo sapien
agccaagccacccatttgcttttaa

SEQ ID NO: 970026 - DNA, 25 bp, Homo sapien
ttttgtacccagagactatgattta

SEQ ID NO: 970027 - DNA, 25 bp, Homo sapien
gtttttgtacccagagactatgatt

SEQ ID NO: 970028 - DNA, 25 bp, Homo sapien
tagtttttgtacccagagactatga

SEQ ID NO: 970029 - DNA, 25 bp, Homo sapien
tagggccagattcgaagtacaaagc

SEQ ID NO: 970030 - DNA, 25 bp, Homo sapien
tatgatgacatttacgaaggctgct

SEQ ID NO: 970031 - DNA, 25 bp, Homo sapien
tgaagagtaagaaataccgggccca

SEQ ID NO: 970032 - DNA, 25 bp, Homo sapien
taataaacagggtcgagaggcaggc

SEQ ID NO: 970033 - DNA, 25 bp, Homo sapien
cacctgtttacagtaagttcaggaa

SEQ ID NO: 970034 - DNA, 25 bp, Homo sapien
caaatgtaagcatctgacagatcac

SEQ ID NO: 970035 - DNA, 25 bp, Homo sapien
tataagctagatgtatcaaactcac

SEQ ID NO: 970036 - DNA, 25 bp, Homo sapien
tagtgacgacatactgaatgaacgg

SEQ ID NO: 970037 - DNA, 25 bp, Homo sapien
ccatctggtcaagcattgagttcag

SEQ ID NO: 970038 - DNA, 25 bp, Homo sapien
cattactggtaagacacgcctggag

SEQ ID NO: 970039 - DNA, 25 bp, Homo sapien
tatatttagtactcccttggcaacc

SEQ ID NO: 970040 - DNA, 25 bp, Homo sapien
tatttagcactccttctgggacctc

SEQ ID NO: 970041 - DNA, 25 bp, Homo sapien
taaagacttggttgtgcacaaacag

SEQ ID NO: 970042 - DNA, 25 bp, Homo sapien
gacctccctggaaaagacttagtca

SEQ ID NO: 970043 - DNA, 25 bp, Homo sapien
ccctggactggaactttagctctgt

SEQ ID NO: 970044 - DNA, 25 bp, Homo sapien
gatgggacttgggtttcaacaccca

SEQ ID NO: 970045 - DNA, 25 bp, Homo sapien
tcatgtcagatcctcatttttctca

SEQ ID NO: 970046 - DNA, 25 bp, Homo sapien
cctctgtaacagaacgccagtctgg

SEQ ID NO: 970047 - DNA, 25 bp, Homo sapien
gttgaatctaaactccctctgtaac

SEQ ID NO: 970048 - DNA, 25 bp, Homo sapien
tgaattgactacaggttcacagata

SEQ ID NO: 970049 - DNA, 25 bp, Homo sapien
actctgaattgactacaggttcaca

SEQ ID NO: 970050 - DNA, 25 bp, Homo sapien
tcatgcagcaagagtctatatactc

SEQ ID NO: 970051 - DNA, 25 bp, Homo sapien
atgcagcaagagtctatatactcaa

SEQ ID NO: 970052 - DNA, 25 bp, Homo sapien
atcatgcagcaagagtctatatact

SEQ ID NO: 970053 - DNA, 25 bp, Homo sapien
catgcagcaagagtctatatactca

SEQ ID NO: 970054 - DNA, 25 bp, Homo sapien
taagattccccactcaagggaacta

SEQ ID NO: 970055 - DNA, 25 bp, Homo sapien
tcaatgtcaaattcccaagatcctg

SEQ ID NO: 970056 - DNA, 25 bp, Homo sapien
tttccacttctggtgcaattggttg

SEQ ID NO: 970057 - DNA, 25 bp, Homo sapien
gaacctgaattgcatcacttttcca

SEQ ID NO: 970058 - DNA, 25 bp, Homo sapien
cctgcattccgatgaacctgaattg

SEQ ID NO: 970059 - DNA, 25 bp, Homo sapien
tgcctcctttgagggcttgtaattg

SEQ ID NO: 970060 - DNA, 25 bp, Homo sapien
tgagggcttgtaattgggatgtttt

SEQ ID NO: 970061 - DNA, 25 bp, Homo sapien
cccctataataatggagctgcctcc

SEQ ID NO: 970062 - DNA, 25 bp, Homo sapien
ggcccctataataatggagctgcct

SEQ ID NO: 970063 - DNA, 25 bp, Homo sapien
atgctaatggatgctaccctctcag

SEQ ID NO: 970064 - DNA, 25 bp, Homo sapien
taatggatgctaccctctcagttcc

SEQ ID NO: 970065 - DNA, 25 bp, Homo sapien
tggatgctaccctctcagttcccat

SEQ ID NO: 970066 - DNA, 25 bp, Homo sapien
gctaatggatgctaccctctcagtt

SEQ ID NO: 970067 - DNA, 25 bp, Homo sapien
tccccatggcatcacaatatctatg

SEQ ID NO: 970068 - DNA, 25 bp, Homo sapien
cgatttccccatggcatcacaatat

SEQ ID NO: 970069 - DNA, 25 bp, Homo sapien
catggcatcacaatatctatggcca

SEQ ID NO: 970070 - DNA, 25 bp, Homo sapien
aatcgatttccccatggcatcacaa

SEQ ID NO: 970071 - DNA, 25 bp, Homo sapien
tcttcttgttgctaggaagttgttc

SEQ ID NO: 970072 - DNA, 25 bp, Homo sapien
atgtccccacttctacttctgattt

SEQ ID NO: 970073 - DNA, 25 bp, Homo sapien
tgtagtataattgttcataacacgt

SEQ ID NO: 970074 - DNA, 25 bp, Homo sapien
ttagtttatctagccaatgtttgtc

SEQ ID NO: 970075 - DNA, 25 bp, Homo sapien
tatggtaaacaacccctgccatggc

SEQ ID NO: 970076 - DNA, 25 bp, Homo sapien
gaacggaaacacagccatacaactg

SEQ ID NO: 970077 - DNA, 25 bp, Homo sapien
gcaaagtcaagttcacgctccggga

SEQ ID NO: 970078 - DNA, 25 bp, Homo sapien
cagcgagcagaccacaacttgggaa

SEQ ID NO: 970079 - DNA, 25 bp, Homo sapien
caacaagacagaaagtcaacaagga

SEQ ID NO: 970080 - DNA, 25 bp, Homo sapien
gacagatcaacaagacagaaagtca

SEQ ID NO: 970081 - DNA, 25 bp, Homo sapien
atcaacaagacagaaagtcaacaag

SEQ ID NO: 970082 - DNA, 25 bp, Homo sapien
caagacagaaagtcaacaaggatac

SEQ ID NO: 970083 - DNA, 25 bp, Homo sapien
tcctcatggcatttaagctactctg

SEQ ID NO: 970084 - DNA, 25 bp, Homo sapien
tgtatttatttctacaccgagcctt

SEQ ID NO: 970085 - DNA, 25 bp, Homo sapien
catggctaatataatctgagggcta

SEQ ID NO: 970086 - DNA, 25 bp, Homo sapien
gggctagaagagaaagtaagctcat

SEQ ID NO: 970087 - DNA, 25 bp, Homo sapien
ctggggaatacaagtatcttacatt

SEQ ID NO: 970088 - DNA, 25 bp, Homo sapien
gacaagcagctacagataccatacc

SEQ ID NO: 970089 - DNA, 25 bp, Homo sapien
cagatctggtggttcgtgtgataag

SEQ ID NO: 970090 - DNA, 25 bp, Homo sapien
taccatacccagatctggtggttcg

SEQ ID NO: 970091 - DNA, 25 bp, Homo sapien
cctttgcagggctgtatcaggaacc

SEQ ID NO: 970092 - DNA, 25 bp, Homo sapien
ttgtgaactatgcacctgacaaagg

SEQ ID NO: 970093 - DNA, 25 bp, Homo sapien
tgggcaacgaagaacaggcacttct

SEQ ID NO: 970094 - DNA, 25 bp, Homo sapien
tagataccctagaaaatgggagaaa

SEQ ID NO: 970095 - DNA, 25 bp, Homo sapien
tcccgaatctataagaaactcaagt

SEQ ID NO: 970096 - DNA, 25 bp, Homo sapien
gagcaataaaacaaggagaggttaa

SEQ ID NO: 970097 - DNA, 25 bp, Homo sapien
aggagaggttaaagatgtgttccag

SEQ ID NO: 970098 - DNA, 25 bp, Homo sapien
caggaagatatggagtttgtcaggc

SEQ ID NO: 970099 - DNA, 25 bp, Homo sapien
tgaaacatctggtagatgggagcaa

SEQ ID NO: 970100 - DNA, 25 bp, Homo sapien
tctgctgtccaagtaaacaactgct

SEQ ID NO: 970101 - DNA, 25 bp, Homo sapien
tacagacgtaaaacaggatcctggc

SEQ ID NO: 970102 - DNA, 25 bp, Homo sapien
gccacagtctagcaggcagatcacc

SEQ ID NO: 970103 - DNA, 25 bp, Homo sapien
cctagtatggtaatttgatgtgcaa

SEQ ID NO: 970104 - DNA, 25 bp, Homo sapien
tgtattgttatcctcacctagctgg

SEQ ID NO: 970105 - DNA, 25 bp, Homo sapien
tagtcttctagctgcgtcggccaag

SEQ ID NO: 970106 - DNA, 25 bp, Homo sapien
tccgaaggccacactatcaggtaga

SEQ ID NO: 970107 - DNA, 25 bp, Homo sapien
aatctgattatctcccaatgggccc

SEQ ID NO: 970108 - DNA, 25 bp, Homo sapien
gtaaatgtagctcccacaaggtaaa

SEQ ID NO: 970109 - DNA, 25 bp, Homo sapien
gacaccacttagatttaaaggcaga

SEQ ID NO: 970110 - DNA, 25 bp, Homo sapien
tcctacaggcctatttaacaagatg

SEQ ID NO: 970111 - DNA, 25 bp, Homo sapien
caggattgaatacttggaccccagg

SEQ ID NO: 970112 - DNA, 25 bp, Homo sapien
attgcagcatccttagatgggacgc

SEQ ID NO: 970113 - DNA, 25 bp, Homo sapien
tcctttcaaacagctattggcaagt

SEQ ID NO: 970114 - DNA, 25 bp, Homo sapien
gatgggacgcataatcattacctta

SEQ ID NO: 970115 - DNA, 25 bp, Homo sapien
cctttgaatacgctaataagtgaca

SEQ ID NO: 970116 - DNA, 25 bp, Homo sapien
cgggaacagggcaacatctacaagc

SEQ ID NO: 970117 - DNA, 25 bp, Homo sapien
gagaagcaagtgtacgacgcgcaca

SEQ ID NO: 970118 - DNA, 25 bp, Homo sapien
taaacacctcaacgatgacgtggtc

SEQ ID NO: 970119 - DNA, 25 bp, Homo sapien
tacaagcccaacaacaaggccatgg

SEQ ID NO: 970120 - DNA, 25 bp, Homo sapien
tttcccacctgagttcatggcttag

SEQ ID NO: 970121 - DNA, 25 bp, Homo sapien
gaagcttagccagttagaacaccag

SEQ ID NO: 970122 - DNA, 25 bp, Homo sapien
gaatgaagctgacaacatgcactag

SEQ ID NO: 970123 - DNA, 25 bp, Homo sapien
cccagggacaggcagacatcattct

SEQ ID NO: 970124 - DNA, 25 bp, Homo sapien
cactcatttatccaccagtgtccag

SEQ ID NO: 970125 - DNA, 25 bp, Homo sapien
tgccatccagcacatgaggagctcc

SEQ ID NO: 970126 - DNA, 25 bp, Homo sapien
catacttatgggcttaaattagcaa

SEQ ID NO: 970127 - DNA, 25 bp, Homo sapien
aaagcgtttacatagggttcagaat

SEQ ID NO: 970128 - DNA, 25 bp, Homo sapien
gcctccgtgtctcagtggttttagc

SEQ ID NO: 970129 - DNA, 25 bp, Homo sapien
gttcctcttaggctgtcagactgag

SEQ ID NO: 970130 - DNA, 25 bp, Homo sapien
ggccgatggcgggattcagttcctc

SEQ ID NO: 970131 - DNA, 25 bp, Homo sapien
ggttttagccagagccctctctcag

SEQ ID NO: 970132 - DNA, 25 bp, Homo sapien
ttgagattcagtgcatcagccgtgt

SEQ ID NO: 970133 - DNA, 25 bp, Homo sapien
gaagatgtgattgcagaaccagaag

SEQ ID NO: 970134 - DNA, 25 bp, Homo sapien
ggacacacagttttgacggcatttg

SEQ ID NO: 970135 - DNA, 25 bp, Homo sapien
tggcatcccgatggcactcatctgg

SEQ ID NO: 970136 - DNA, 25 bp, Homo sapien
tcataagtattatgtctcttctgag

SEQ ID NO: 970137 - DNA, 25 bp, Homo sapien
tttcataagtattatgtctcttctg

SEQ ID NO: 970138 - DNA, 25 bp, Homo sapien
tcaagttccaagttgctaatacagc

SEQ ID NO: 970139 - DNA, 25 bp, Homo sapien
agttccaagttgctaatacagcaac

SEQ ID NO: 970140 - DNA, 25 bp, Homo sapien
cgctttattggctgagatatgaaca

SEQ ID NO: 970141 - DNA, 25 bp, Homo sapien
aaccatcgctttattggctgagata

SEQ ID NO: 970142 - DNA, 25 bp, Homo sapien
tatttgcatgtggatcaaccatcgc

SEQ ID NO: 970143 - DNA, 25 bp, Homo sapien
tgcatgtggatcaaccatcgcttta

SEQ ID NO: 970144 - DNA, 25 bp, Homo sapien
taaagtggaccaatagggctgagct

SEQ ID NO: 970145 - DNA, 25 bp, Homo sapien
tcagcaactcgctttaggtcagcag

SEQ ID NO: 970146 - DNA, 25 bp, Homo sapien
tgtagataacaagacctcagtgcct

SEQ ID NO: 970147 - DNA, 25 bp, Homo sapien
aacctgagtcgtacagaaagctgcc

SEQ ID NO: 970148 - DNA, 25 bp, Homo sapien
tttggagctattgtctaatccaggg

SEQ ID NO: 970149 - DNA, 25 bp, Homo sapien
tgcggtttctgagccctaagccttt

SEQ ID NO: 970150 - DNA, 25 bp, Homo sapien
aaatcgtgtgtaggatatactgcta

SEQ ID NO: 970151 - DNA, 25 bp, Homo sapien
caaaatagatattgatggtcccatt

SEQ ID NO: 970152 - DNA, 25 bp, Homo sapien
tatatacaccctctaactagacaag

SEQ ID NO: 970153 - DNA, 25 bp, Homo sapien
tcaatggtagtcctttttatggtaa

SEQ ID NO: 970154 - DNA, 25 bp, Homo sapien
accagggttgccaatcatattgaca

SEQ ID NO: 970155 - DNA, 25 bp, Homo sapien
taaaaaggacttgtatgcctgagaa

SEQ ID NO: 970156 - DNA, 25 bp, Homo sapien
catcctctaaggtacccatttgaac

SEQ ID NO: 970157 - DNA, 25 bp, Homo sapien
taatgtcaaaacatgagtctctcta

SEQ ID NO: 970158 - DNA, 25 bp, Homo sapien
gaaaattttagcaaggactaccatg

SEQ ID NO: 970159 - DNA, 25 bp, Homo sapien
tttagcaaggactaccatggatgtt

SEQ ID NO: 970160 - DNA, 25 bp, Homo sapien
gttgacttcatcaattcctctctgc

SEQ ID NO: 970161 - DNA, 25 bp, Homo sapien
ccacatgttgatacagctattaagg

SEQ ID NO: 970162 - DNA, 25 bp, Homo sapien
gctgttgacttcatcaattcctctc

SEQ ID NO: 970163 - DNA, 25 bp, Homo sapien
catgttgatacagctattaaggaaa

SEQ ID NO: 970164 - DNA, 25 bp, Homo sapien
tacttcaaggatccatcatcctctg

SEQ ID NO: 970165 - DNA, 25 bp, Homo sapien
tcctacatttgttgtccatcctggt

SEQ ID NO: 970166 - DNA, 25 bp, Homo sapien
tctgactggctcaggctagatccag

SEQ ID NO: 970167 - DNA, 25 bp, Homo sapien
tggtccaatcagtggcagctaaggg

SEQ ID NO: 970168 - DNA, 25 bp, Homo sapien
tgcccaaggagacagtttgagatac

SEQ ID NO: 970169 - DNA, 25 bp, Homo sapien
cacaggagatgtttctcaagggaaa

SEQ ID NO: 970170 - DNA, 25 bp, Homo sapien
tccatggtcgcacagtgagtcagag

SEQ ID NO: 970171 - DNA, 25 bp, Homo sapien
taatcaggaattttccatggtcgca

SEQ ID NO: 970172 - DNA, 25 bp, Homo sapien
gcttcaccctgtcctatgaccagag

SEQ ID NO: 970173 - DNA, 25 bp, Homo sapien
gttgctgatactggctcacaaatac

SEQ ID NO: 970174 - DNA, 25 bp, Homo sapien
tactggccagtactagtgttgctga

SEQ ID NO: 970175 - DNA, 25 bp, Homo sapien
tactagtgttgctgatactggctca

SEQ ID NO: 970176 - DNA, 25 bp, Homo sapien
tggacttacgttccggctgcctgac

SEQ ID NO: 970177 - DNA, 25 bp, Homo sapien
gataagttttgcagcagtcatggca

SEQ ID NO: 970178 - DNA, 25 bp, Homo sapien
tattctccagcttaggaacactggg

SEQ ID NO: 970179 - DNA, 25 bp, Homo sapien
gaaagggaattccacaagcagtgac

SEQ ID NO: 970180 - DNA, 25 bp, Homo sapien
ttactccctcggagcatcaggttcc

SEQ ID NO: 970181 - DNA, 25 bp, Homo sapien
tccaccaaatcttactccctcggag

SEQ ID NO: 970182 - DNA, 25 bp, Homo sapien
aaatcttactccctcggagcatcag

SEQ ID NO: 970183 - DNA, 25 bp, Homo sapien
aacattccaccaaatcttactccct

SEQ ID NO: 970184 - DNA, 25 bp, Homo sapien
agagcattgacaaagtgaggaaact

SEQ ID NO: 970185 - DNA, 25 bp, Homo sapien
caagagcattgacaaagtgaggaaa

SEQ ID NO: 970186 - DNA, 25 bp, Homo sapien
aagagcattgacaaagtgaggaaac

SEQ ID NO: 970187 - DNA, 25 bp, Homo sapien
attgcttcaagagcattgacaaagt

SEQ ID NO: 970188 - DNA, 25 bp, Homo sapien
cagagctagccagtgctcctggtag

SEQ ID NO: 970189 - DNA, 25 bp, Homo sapien
tgaacaaccagaaagcgggcagctg

SEQ ID NO: 970190 - DNA, 25 bp, Homo sapien
tagtgcctcgaaagtggcaggccac

SEQ ID NO: 970191 - DNA, 25 bp, Homo sapien
tcttccacggctagagagcatcagc

SEQ ID NO: 970192 - DNA, 25 bp, Homo sapien
gaagagcagaaggtatctgctctct

SEQ ID NO: 970193 - DNA, 25 bp, Homo sapien
aggaagagcagaaggtatctgctct

SEQ ID NO: 970194 - DNA, 25 bp, Homo sapien
agagcagaaggtatctgctctcttc

SEQ ID NO: 970195 - DNA, 25 bp, Homo sapien
gtcaaggaagagcagaaggtatctg

SEQ ID NO: 970196 - DNA, 25 bp, Homo sapien
ccccggtgcgtgtgatggctgctta

SEQ ID NO: 970197 - DNA, 25 bp, Homo sapien
tggaggtttaatgccaccttcagtg

SEQ ID NO: 970198 - DNA, 25 bp, Homo sapien
taattgtctcttgaggtaatggagg

SEQ ID NO: 970199 - DNA, 25 bp, Homo sapien
tggctgcttagtaattgtctcttga

SEQ ID NO: 970200 - DNA, 25 bp, Homo sapien
tttcacacacaactgctacacctac

SEQ ID NO: 970201 - DNA, 25 bp, Homo sapien
cctgcagttctaatagcttggagta

SEQ ID NO: 970202 - DNA, 25 bp, Homo sapien
taggcctgcagttctaatagcttgg

SEQ ID NO: 970203 - DNA, 25 bp, Homo sapien
ttctaatagcttggagtagaggttg

SEQ ID NO: 970204 - DNA, 25 bp, Homo sapien
tctaaaggctgcaggcgaacaggct

SEQ ID NO: 970205 - DNA, 25 bp, Homo sapien
tgtgccccttgttccctgtctaaag

SEQ ID NO: 970206 - DNA, 25 bp, Homo sapien
ggctgctcattaactgcaaccaggg

SEQ ID NO: 970207 - DNA, 25 bp, Homo sapien
tcccagtcagtaaccaataaagtgg

SEQ ID NO: 970208 - DNA, 25 bp, Homo sapien
gaaggtagcgtcaaagatttcagtt

SEQ ID NO: 970209 - DNA, 25 bp, Homo sapien
cacagatggttcatttaaggaggaa

SEQ ID NO: 970210 - DNA, 25 bp, Homo sapien
tattaacaacttggaaagacgctaa

SEQ ID NO: 970211 - DNA, 25 bp, Homo sapien
ttctggacccagtaaatacacagat

SEQ ID NO: 970212 - DNA, 25 bp, Homo sapien
tcctaccacagacctcttatgatgc

SEQ ID NO: 970213 - DNA, 25 bp, Homo sapien
cacagacctcttatgatgccttctg

SEQ ID NO: 970214 - DNA, 25 bp, Homo sapien
gcaaagccctacttcaatgcatcct

SEQ ID NO: 970215 - DNA, 25 bp, Homo sapien
ctcctgtactctgcctatcttgcaa

SEQ ID NO: 970216 - DNA, 25 bp, Homo sapien
agaccaccgaaaggccaagtcaagt

SEQ ID NO: 970217 - DNA, 25 bp, Homo sapien
gaggtttgcagaccaccgaaaggcc

SEQ ID NO: 970218 - DNA, 25 bp, Homo sapien
gtttgcagaccaccgaaaggccaag

SEQ ID NO: 970219 - DNA, 25 bp, Homo sapien
atgagaggtttgcagaccaccgaaa

SEQ ID NO: 970220 - DNA, 25 bp, Homo sapien
ttacacacaagcaacgtgaacaacg

SEQ ID NO: 970221 - DNA, 25 bp, Homo sapien
caacgaagcgtgatggtaaaaacag

SEQ ID NO: 970222 - DNA, 25 bp, Homo sapien
gtgttattttacacgccttgatgtc

SEQ ID NO: 970223 - DNA, 25 bp, Homo sapien
aaacaggacgctccggctcccttca

SEQ ID NO: 970224 - DNA, 25 bp, Homo sapien
cattgaccttacaacacttgctgat

SEQ ID NO: 970225 - DNA, 25 bp, Homo sapien
cctcattgaccttacaacacttgct

SEQ ID NO: 970226 - DNA, 25 bp, Homo sapien
accctcattgaccttacaacacttg

SEQ ID NO: 970227 - DNA, 25 bp, Homo sapien
tcaccaccctcattgaccttacaac

SEQ ID NO: 970228 - DNA, 25 bp, Homo sapien
gaatagttgcaaatcgctctgacac

SEQ ID NO: 970229 - DNA, 25 bp, Homo sapien
gttgcaaatcgctctgacacagtaa

SEQ ID NO: 970230 - DNA, 25 bp, Homo sapien
ttaaatgaatagttgcaaatcgctc

SEQ ID NO: 970231 - DNA, 25 bp, Homo sapien
tgcaaatcgctctgacacagtaatg

SEQ ID NO: 970232 - DNA, 25 bp, Homo sapien
tctcctgtctctgatctggactcca

SEQ ID NO: 970233 - DNA, 25 bp, Homo sapien
cccgtttgtgtagcagactgtccca

SEQ ID NO: 970234 - DNA, 25 bp, Homo sapien
tgtagcagactgtcccagcgtctac

SEQ ID NO: 970235 - DNA, 25 bp, Homo sapien
tacctcacacagatctaaggcttca

SEQ ID NO: 970236 - DNA, 25 bp, Homo sapien
ctttcaaggccttccgtgcccccat

SEQ ID NO: 970237 - DNA, 25 bp, Homo sapien
gagctgctttcaaggccttccgtgc

SEQ ID NO: 970238 - DNA, 25 bp, Homo sapien
cctttcccttggtttggtcagagct

SEQ ID NO: 970239 - DNA, 25 bp, Homo sapien
cccttggtttggtcagagctgcttt

SEQ ID NO: 970240 - DNA, 25 bp, Homo sapien
tgcattcctccacagccatttgata

SEQ ID NO: 970241 - DNA, 25 bp, Homo sapien
cagtcatataaatccaatcctgagc

SEQ ID NO: 970242 - DNA, 25 bp, Homo sapien
tgatatctgctttcgataacagcag

SEQ ID NO: 970243 - DNA, 25 bp, Homo sapien
agcagaggaaactgatcagtcatat

SEQ ID NO: 970244 - DNA, 25 bp, Homo sapien
gaatttggatagaagaccctccagg

SEQ ID NO: 970245 - DNA, 25 bp, Homo sapien
gaaaccaagggctcagctactcctg

SEQ ID NO: 970246 - DNA, 25 bp, Homo sapien
tcagaatgattcagagcccagatat

SEQ ID NO: 970247 - DNA, 25 bp, Homo sapien
catgggttggcacagacactgattc

SEQ ID NO: 970248 - DNA, 25 bp, Homo sapien
tgccttgggaagcagtttactgcac

SEQ ID NO: 970249 - DNA, 25 bp, Homo sapien
tagacctagtctaatgttggagcag

SEQ ID NO: 970250 - DNA, 25 bp, Homo sapien
gcagacaaagtgtagctacccatat

SEQ ID NO: 970251 - DNA, 25 bp, Homo sapien
cttgctgagccatgttgacttccta

SEQ ID NO: 970252 - DNA, 25 bp, Homo sapien
tgtgctagattggaggtgaagaccc

SEQ ID NO: 970253 - DNA, 25 bp, Homo sapien
ggtcacctaaacatcccaagcaatg

SEQ ID NO: 970254 - DNA, 25 bp, Homo sapien
gaaggtaatgtgaacactcagtgcc

SEQ ID NO: 970255 - DNA, 25 bp, Homo sapien
ttttggaagccacccggtagagctg

SEQ ID NO: 970256 - DNA, 25 bp, Homo sapien
tgcctgagcgggacatggactcaac

SEQ ID NO: 970257 - DNA, 25 bp, Homo sapien
ggtaggaatctctaacagctggcat

SEQ ID NO: 970258 - DNA, 25 bp, Homo sapien
ggctggtgccacgacaaatgtgtgc

SEQ ID NO: 970259 - DNA, 25 bp, Homo sapien
aaatgtgtgcgatcggaggaatgcc

SEQ ID NO: 970260 - DNA, 25 bp, Homo sapien
tagtccctgaggagatatagtccag

SEQ ID NO: 970261 - DNA, 25 bp, Homo sapien
taacatcgcagccatgctaactgtg

SEQ ID NO: 970262 - DNA, 25 bp, Homo sapien
tattgagtgcataccatttagcagg

SEQ ID NO: 970263 - DNA, 25 bp, Homo sapien
tcctgtccgatgcatagatggtggc

SEQ ID NO: 970264 - DNA, 25 bp, Homo sapien
tggccagctggatgaattaattagt

SEQ ID NO: 970265 - DNA, 25 bp, Homo sapien
ggaaaatgatgtggttaaagccaga

SEQ ID NO: 970266 - DNA, 25 bp, Homo sapien
taggcactcatggtgtcttggccag

SEQ ID NO: 970267 - DNA, 25 bp, Homo sapien
tgccaacctggattacgtattaacc

SEQ ID NO: 970268 - DNA, 25 bp, Homo sapien
tactctgatctaatgaatgtgaaca

SEQ ID NO: 970269 - DNA, 25 bp, Homo sapien
tatagacattcctttggttggaaga

SEQ ID NO: 970270 - DNA, 25 bp, Homo sapien
aaaggttcattggttccaatcacag

SEQ ID NO: 970271 - DNA, 25 bp, Homo sapien
gtttgagaatgatgctactctgatc

SEQ ID NO: 970272 - DNA, 25 bp, Homo sapien
ttagaaaaggtatgtcagactggga

SEQ ID NO: 970273 - DNA, 25 bp, Homo sapien
gctactgtatagtgcatgtggtgta

SEQ ID NO: 970274 - DNA, 25 bp, Homo sapien
gatggaatagccaccctgagcagaa

SEQ ID NO: 970275 - DNA, 25 bp, Homo sapien
gaaaaaggcaattgaaaatcccagc

SEQ ID NO: 970276 - DNA, 25 bp, Homo sapien
gacagattgtgggagtaagtgattc

SEQ ID NO: 970277 - DNA, 25 bp, Homo sapien
gaactcggggaaacatcccatcaac

SEQ ID NO: 970278 - DNA, 25 bp, Homo sapien
cacttgtatatacattcttgagaac

SEQ ID NO: 970279 - DNA, 25 bp, Homo sapien
ttgtccttagattaatgtgtctgga

SEQ ID NO: 970280 - DNA, 25 bp, Homo sapien
gagaaacgtgcacaaggagcctgaa

SEQ ID NO: 970281 - DNA, 25 bp, Homo sapien
acagtgccagctttactaccagtaa

SEQ ID NO: 970282 - DNA, 25 bp, Homo sapien
ctctccagcttctaaccggttggag

SEQ ID NO: 970283 - DNA, 25 bp, Homo sapien
gagcctgaagatgataaaaggacag

SEQ ID NO: 970284 - DNA, 25 bp, Homo sapien
agactattaaaagacatcaccagga

SEQ ID NO: 970285 - DNA, 25 bp, Homo sapien
ccacagactgattgaagagattgac

SEQ ID NO: 970286 - DNA, 25 bp, Homo sapien
taatttacggcagtcgacagtcatc

SEQ ID NO: 970287 - DNA, 25 bp, Homo sapien
gaactactgacacatggaacaaggt

SEQ ID NO: 970288 - DNA, 25 bp, Homo sapien
ctggcagaggagcaaggtaaaacac

SEQ ID NO: 970289 - DNA, 25 bp, Homo sapien
gagaaaactgtttagcaaatgggac

SEQ ID NO: 970290 - DNA, 25 bp, Homo sapien
agattcttaaacagcctggcagagg

SEQ ID NO: 970291 - DNA, 25 bp, Homo sapien
gacagagaatgcagtttggagaaaa

SEQ ID NO: 970292 - DNA, 25 bp, Homo sapien
agtaagcctatcacatccaggtgga

SEQ ID NO: 970293 - DNA, 25 bp, Homo sapien
tttcatcactaggacaataggagtc

SEQ ID NO: 970294 - DNA, 25 bp, Homo sapien
gagaatccatactgaaaggaacatg

SEQ ID NO: 970295 - DNA, 25 bp, Homo sapien
aacagctagaaatgtaggacaggca

SEQ ID NO: 970296 - DNA, 25 bp, Homo sapien
ttttgcttttccagacaaataagaa

SEQ ID NO: 970297 - DNA, 25 bp, Homo sapien
tgcttttccagacaaataagaaggg

SEQ ID NO: 970298 - DNA, 25 bp, Homo sapien
tccctccaaccacatttcatctggt

SEQ ID NO: 970299 - DNA, 25 bp, Homo sapien
cacatttcatctggttcatcttttt

SEQ ID NO: 970300 - DNA, 25 bp, Homo sapien
aactatgtggtttattctctttatc

SEQ ID NO: 970301 - DNA, 25 bp, Homo sapien
tcacaacgtttatcctcgaaaggac

SEQ ID NO: 970302 - DNA, 25 bp, Homo sapien
atcttcttcacaacgtttatcctcg

SEQ ID NO: 970303 - DNA, 25 bp, Homo sapien
gtttatcctcgaaaggacacctgct

SEQ ID NO: 970304 - DNA, 25 bp, Homo sapien
gtaaggcaccactactccacaggat

SEQ ID NO: 970305 - DNA, 25 bp, Homo sapien
taaactctcacgttgtaccctcatg

SEQ ID NO: 970306 - DNA, 25 bp, Homo sapien
tccacaggatttagctacaagtagt

SEQ ID NO: 970307 - DNA, 25 bp, Homo sapien
gcctggttcatcagggtatcccata

SEQ ID NO: 970308 - DNA, 25 bp, Homo sapien
ccatcactgtggtaaatgttcggct

SEQ ID NO: 970309 - DNA, 25 bp, Homo sapien
tcccatcactgtggtaaatgttcgg

SEQ ID NO: 970310 - DNA, 25 bp, Homo sapien
actgtggtaaatgttcggcttctgc

SEQ ID NO: 970311 - DNA, 25 bp, Homo sapien
tcactgtggtaaatgttcggcttct

SEQ ID NO: 970312 - DNA, 25 bp, Homo sapien
cacgttgtatacaatctgagggcat

SEQ ID NO: 970313 - DNA, 25 bp, Homo sapien
tgtgaatgccgtaacaccagttagt

SEQ ID NO: 970314 - DNA, 25 bp, Homo sapien
tctttgccagcagcacgtcaagtgc

SEQ ID NO: 970315 - DNA, 25 bp, Homo sapien
cagttagtatcacttgccttggctc

SEQ ID NO: 970316 - DNA, 25 bp, Homo sapien
tcagagtcttgtagggattccaaag

SEQ ID NO: 970317 - DNA, 25 bp, Homo sapien
ggaatcacaaactaccaaatggcaa

SEQ ID NO: 970318 - DNA, 25 bp, Homo sapien
caaggagttctctacaggttgagga

SEQ ID NO: 970319 - DNA, 25 bp, Homo sapien
tcccaatttgtgtactaacaaggag

SEQ ID NO: 970320 - DNA, 25 bp, Homo sapien
cccgtaactcaaagttctgatcatt

SEQ ID NO: 970321 - DNA, 25 bp, Homo sapien
aatgtttatgttatcccgtaactca

SEQ ID NO: 970322 - DNA, 25 bp, Homo sapien
tatgttatcccgtaactcaaagttc

SEQ ID NO: 970323 - DNA, 25 bp, Homo sapien
tatcccgtaactcaaagttctgatc

SEQ ID NO: 970324 - DNA, 25 bp, Homo sapien
tctctcctgtgttgctattactggt

SEQ ID NO: 970325 - DNA, 25 bp, Homo sapien
tattactggtgtttgaagtgagcag

SEQ ID NO: 970326 - DNA, 25 bp, Homo sapien
ggtgacatcccaagtaagaagaaag

SEQ ID NO: 970327 - DNA, 25 bp, Homo sapien
tgtaaagccccacatcttaactgcg

SEQ ID NO: 970328 - DNA, 25 bp, Homo sapien
tagaattactgtggtggtcacccaa

SEQ ID NO: 970329 - DNA, 25 bp, Homo sapien
cacccaaggtggttttctaattcag

SEQ ID NO: 970330 - DNA, 25 bp, Homo sapien
tacaagaagcgcaatagaatggagc

SEQ ID NO: 970331 - DNA, 25 bp, Homo sapien
tgatgtgtgctcttctacaagaagc

SEQ ID NO: 970332 - DNA, 25 bp, Homo sapien
ttagtggcaaacagcactgcacaca

SEQ ID NO: 970333 - DNA, 25 bp, Homo sapien
attagtggcaaacagcactgcacac

SEQ ID NO: 970334 - DNA, 25 bp, Homo sapien
aattagtggcaaacagcactgcaca

SEQ ID NO: 970335 - DNA, 25 bp, Homo sapien
gtgtattataaacatcaactgctta

SEQ ID NO: 970336 - DNA, 25 bp, Homo sapien
tttttgccccatggatattgacagt

SEQ ID NO: 970337 - DNA, 25 bp, Homo sapien
tgacagtataacatttaacagtgac

SEQ ID NO: 970338 - DNA, 25 bp, Homo sapien
cagtataacatttaacagtgacatt

SEQ ID NO: 970339 - DNA, 25 bp, Homo sapien
gcaaacaaacccatctattggcatg

SEQ ID NO: 970340 - DNA, 25 bp, Homo sapien
ccttagccagctgaacattgagacc

SEQ ID NO: 970341 - DNA, 25 bp, Homo sapien
tataaagattgtagaagctgcagaa

SEQ ID NO: 970342 - DNA, 25 bp, Homo sapien
tgtctattggaatgcatgtccagtg

SEQ ID NO: 970343 - DNA, 25 bp, Homo sapien
taactgtaaccctaaaattgatgtc

SEQ ID NO: 970344 - DNA, 25 bp, Homo sapien
tgacagttacgcaaatcagcttgaa

SEQ ID NO: 970345 - DNA, 25 bp, Homo sapien
tacatatggtgtgcggttacagtct

SEQ ID NO: 970346 - DNA, 25 bp, Homo sapien
agtattctgaactgtcaagctgccc

SEQ ID NO: 970347 - DNA, 25 bp, Homo sapien
aagatcagataaggtcgggtgtgtt

SEQ ID NO: 970348 - DNA, 25 bp, Homo sapien
caagatcagataaggtcgggtgtgt

SEQ ID NO: 970349 - DNA, 25 bp, Homo sapien
tctaatacatagaaagtcaaatcac

SEQ ID NO: 970350 - DNA, 25 bp, Homo sapien
atcacttacggacagaaacagactt

SEQ ID NO: 970351 - DNA, 25 bp, Homo sapien
catagaaagtcaaatcacttacgga

SEQ ID NO: 970352 - DNA, 25 bp, Homo sapien
gcaatttcctcattaccatctaata

SEQ ID NO: 970353 - DNA, 25 bp, Homo sapien
tataaatggacccagaacgcgaggg

SEQ ID NO: 970354 - DNA, 25 bp, Homo sapien
taaggtaaactacgcagctgctgtg

SEQ ID NO: 970355 - DNA, 25 bp, Homo sapien
tgtggtaaacgctcaacttatgcgg

SEQ ID NO: 970356 - DNA, 25 bp, Homo sapien
attgtacggatcgtggagcagcgcc

SEQ ID NO: 970357 - DNA, 25 bp, Homo sapien
ttgtgtacagaggcgctgtcctttg

SEQ ID NO: 970358 - DNA, 25 bp, Homo sapien
cttttgtgtacagaggcgctgtcct

SEQ ID NO: 970359 - DNA, 25 bp, Homo sapien
tcttttgtgtacagaggcgctgtcc

SEQ ID NO: 970360 - DNA, 25 bp, Homo sapien
ttttgtgtacagaggcgctgtcctt

SEQ ID NO: 970361 - DNA, 25 bp, Homo sapien
caacggtactctgccagctcagttt

SEQ ID NO: 970362 - DNA, 25 bp, Homo sapien
ggcaacggtactctgccagctcagt

SEQ ID NO: 970363 - DNA, 25 bp, Homo sapien
caacttatgagctacctcttcatat

SEQ ID NO: 970364 - DNA, 25 bp, Homo sapien
ggtactctgccagctcagtttgttc

SEQ ID NO: 970365 - DNA, 25 bp, Homo sapien
ctggagttccatcttttcttcatct

SEQ ID NO: 970366 - DNA, 25 bp, Homo sapien
agggctggttttcaataaacttcat

SEQ ID NO: 970367 - DNA, 25 bp, Homo sapien
tcttttcttcatcttttaagggctg

SEQ ID NO: 970368 - DNA, 25 bp, Homo sapien
tcatcttttaagggctggttttcaa

SEQ ID NO: 970369 - DNA, 25 bp, Homo sapien
cagtccagcttctcatgaaccagct

SEQ ID NO: 970370 - DNA, 25 bp, Homo sapien
gcacagtccagcttctcatgaacca

SEQ ID NO: 970371 - DNA, 25 bp, Homo sapien
gtggctgggcgctcctgagcacagt

SEQ ID NO: 970372 - DNA, 25 bp, Homo sapien
cagcttctcatgaaccagctggatc

SEQ ID NO: 970373 - DNA, 25 bp, Homo sapien
ggttcaaggaggccacctcagcctc

SEQ ID NO: 970374 - DNA, 25 bp, Homo sapien
ctacggttcaaggaggccacctcag

SEQ ID NO: 970375 - DNA, 25 bp, Homo sapien
tcaaggaggccacctcagcctcagc

SEQ ID NO: 970376 - DNA, 25 bp, Homo sapien
tacggttcaaggaggccacctcagc

SEQ ID NO: 970377 - DNA, 25 bp, Homo sapien
ctgggaacacctttctccctcaact

SEQ ID NO: 970378 - DNA, 25 bp, Homo sapien
acacctttctccctcaacttctcac

SEQ ID NO: 970379 - DNA, 25 bp, Homo sapien
ttcctgggaacacctttctccctca

SEQ ID NO: 970380 - DNA, 25 bp, Homo sapien
gaacacctttctccctcaacttctc

SEQ ID NO: 970381 - DNA, 25 bp, Homo sapien
tggatattgcccttaaccgcctcga

SEQ ID NO: 970382 - DNA, 25 bp, Homo sapien
tattgcccttaaccgcctcgatggt

SEQ ID NO: 970383 - DNA, 25 bp, Homo sapien
tcagctactgctcgcactccgattc

SEQ ID NO: 970384 - DNA, 25 bp, Homo sapien
agaacctggatattgcccttaaccg

SEQ ID NO: 970385 - DNA, 25 bp, Homo sapien
tatgcaacgtcctgggcctttgggc

SEQ ID NO: 970386 - DNA, 25 bp, Homo sapien
ttatgcaacgtcctgggcctttggg

SEQ ID NO: 970387 - DNA, 25 bp, Homo sapien
tttgacgttctttgcctagtcccag

SEQ ID NO: 970388 - DNA, 25 bp, Homo sapien
gcatcacaccctgaacttcagacat

SEQ ID NO: 970389 - DNA, 25 bp, Homo sapien
ttctttgcctagtcccagattcttg

SEQ ID NO: 970390 - DNA, 25 bp, Homo sapien
tttggttcctgactctgcatcacac

SEQ ID NO: 970391 - DNA, 25 bp, Homo sapien
agtgcaagggccaatctcggctcac

SEQ ID NO: 970392 - DNA, 25 bp, Homo sapien
gcaattcttctgcttcagcctcctg

SEQ ID NO: 970393 - DNA, 25 bp, Homo sapien
gagtttttgctctagttgcccaggc

SEQ ID NO: 970394 - DNA, 25 bp, Homo sapien
tgctaactctgcctcccaggttcaa

SEQ ID NO: 970395 - DNA, 25 bp, Homo sapien
gtcctggaagaatggtctccttcag

SEQ ID NO: 970396 - DNA, 25 bp, Homo sapien
atcaagtcctggaagaatggtctcc

SEQ ID NO: 970397 - DNA, 25 bp, Homo sapien
tcaatcaagtcctggaagaatggtc

SEQ ID NO: 970398 - DNA, 25 bp, Homo sapien
cctggaagaatggtctccttcagaa

SEQ ID NO: 970399 - DNA, 25 bp, Homo sapien
ggacaatacatcctggctcctttga

SEQ ID NO: 970400 - DNA, 25 bp, Homo sapien
taaacacgctgaattaggacaatac

SEQ ID NO: 970401 - DNA, 25 bp, Homo sapien
gaattaggacaatacatcctggctc

SEQ ID NO: 970402 - DNA, 25 bp, Homo sapien
tcagcatccaacataaacacgctga

SEQ ID NO: 970403 - DNA, 25 bp, Homo sapien
gttggatcatacttaaatggactta

SEQ ID NO: 970404 - DNA, 25 bp, Homo sapien
tcagttggatcatacttaaatggac

SEQ ID NO: 970405 - DNA, 25 bp, Homo sapien
catacttaaatggacttaaactcca

SEQ ID NO: 970406 - DNA, 25 bp, Homo sapien
ggatcatacttaaatggacttaaac

SEQ ID NO: 970407 - DNA, 25 bp, Homo sapien
tacatgtaaaggacccaggatagtg

SEQ ID NO: 970408 - DNA, 25 bp, Homo sapien
taagagcattgctttggatccagac

SEQ ID NO: 970409 - DNA, 25 bp, Homo sapien
cacctgtgtgacctcgacaaagtat

SEQ ID NO: 970410 - DNA, 25 bp, Homo sapien
taagctaaagatcaagttaccctga

SEQ ID NO: 970411 - DNA, 25 bp, Homo sapien
gctttgagaagataacaatgaactc

SEQ ID NO: 970412 - DNA, 25 bp, Homo sapien
cacatacttgtgattgagtgtacaa

SEQ ID NO: 970413 - DNA, 25 bp, Homo sapien
tttatgtgcctagaatatatgtgta

SEQ ID NO: 970414 - DNA, 25 bp, Homo sapien
gatctgtcaatctaccataagcttt

SEQ ID NO: 970415 - DNA, 25 bp, Homo sapien
ttgtggagtaaatggttttgaggaa

SEQ ID NO: 970416 - DNA, 25 bp, Homo sapien
tgtggagtaaatggttttgaggaaa

SEQ ID NO: 970417 - DNA, 25 bp, Homo sapien
tttgtggagtaaatggttttgagga

SEQ ID NO: 970418 - DNA, 25 bp, Homo sapien
gcagttagccacctccctaatggtg

SEQ ID NO: 970419 - DNA, 25 bp, Homo sapien
ggctgtcagcccaaatgatgcagaa

SEQ ID NO: 970420 - DNA, 25 bp, Homo sapien
acctgggtgcatttgtggagtctga

SEQ ID NO: 970421 - DNA, 25 bp, Homo sapien
tactgtttggcaagcttactccgca

SEQ ID NO: 970422 - DNA, 25 bp, Homo sapien
catggaagtcgcatggacaaccgga

SEQ ID NO: 970423 - DNA, 25 bp, Homo sapien
gacaaccggagcagttgcctgagcc

SEQ ID NO: 970424 - DNA, 25 bp, Homo sapien
tctaggaatgctggcaatacaagtg

SEQ ID NO: 970425 - DNA, 25 bp, Homo sapien
cctgagccacgttttgtgaggcagt

SEQ ID NO: 970426 - DNA, 25 bp, Homo sapien
tttgagtgatttgtgtaaaaggata

SEQ ID NO: 970427 - DNA, 25 bp, Homo sapien
caatgatatcttctcttaatatgtc

SEQ ID NO: 970428 - DNA, 25 bp, Homo sapien
tatcttctcttaatatgtcttacag

SEQ ID NO: 970429 - DNA, 25 bp, Homo sapien
tccactcaatgatatcttctcttaa

SEQ ID NO: 970430 - DNA, 25 bp, Homo sapien
ggcaagccatttccgggctctcaac

SEQ ID NO: 970431 - DNA, 25 bp, Homo sapien
ctaaaaaccctagtctcctggcaag

SEQ ID NO: 970432 - DNA, 25 bp, Homo sapien
ctggcaagccatttccgggctctca

SEQ ID NO: 970433 - DNA, 25 bp, Homo sapien
tcagggcatcagaacaattgcacta

SEQ ID NO: 970434 - DNA, 25 bp, Homo sapien
cctttgaagcttttcagcatttcca

SEQ ID NO: 970435 - DNA, 25 bp, Homo sapien
tcagctctgttactcacggggatct

SEQ ID NO: 970436 - DNA, 25 bp, Homo sapien
tttttcgatgctctcgaaggtgcca

SEQ ID NO: 970437 - DNA, 25 bp, Homo sapien
acacggactactcttgttagggaag

SEQ ID NO: 970438 - DNA, 25 bp, Homo sapien
gagctgccaaatttgagctgcttta

SEQ ID NO: 970439 - DNA, 25 bp, Homo sapien
ccaaatttgagctgctttatcctca

SEQ ID NO: 970440 - DNA, 25 bp, Homo sapien
ctttgagctgccaaatttgagctgc

SEQ ID NO: 970441 - DNA, 25 bp, Homo sapien
gctgccaaatttgagctgctttatc

SEQ ID NO: 970442 - DNA, 25 bp, Homo sapien
tctggtcagaagtactgtggatctt

SEQ ID NO: 970443 - DNA, 25 bp, Homo sapien
gaggtatagatctaaacttgttctg

SEQ ID NO: 970444 - DNA, 25 bp, Homo sapien
atattaaatcagattcttggccagg

SEQ ID NO: 970445 - DNA, 25 bp, Homo sapien
gagaattatgtcatccctcagagac

SEQ ID NO: 970446 - DNA, 25 bp, Homo sapien
tgtttatgttcatctactctgtatg

SEQ ID NO: 970447 - DNA, 25 bp, Homo sapien
gcagcagtagcagtgccattcatgt

SEQ ID NO: 970448 - DNA, 25 bp, Homo sapien
tacaatagtttatcatgggtaagtt

SEQ ID NO: 970449 - DNA, 25 bp, Homo sapien
tctgtatgtcaaacattggatagaa

SEQ ID NO: 970450 - DNA, 25 bp, Homo sapien
caaatgaacctgtagcaatgacttt

SEQ ID NO: 970451 - DNA, 25 bp, Homo sapien
gtattattgtagctccagtgcctgg

SEQ ID NO: 970452 - DNA, 25 bp, Homo sapien
tagcaagcccttccagtgtgccaat

SEQ ID NO: 970453 - DNA, 25 bp, Homo sapien
gcctggtatttagttggccctcaac

SEQ ID NO: 970454 - DNA, 25 bp, Homo sapien
gtatcacatcttctgaatggcttac

SEQ ID NO: 970455 - DNA, 25 bp, Homo sapien
cctcagttggtatcattctatagta

SEQ ID NO: 970456 - DNA, 25 bp, Homo sapien
gatcaacatttgtcacgcctcaggc

SEQ ID NO: 970457 - DNA, 25 bp, Homo sapien
aatacagcatagatcagtgagtgag

SEQ ID NO: 970458 - DNA, 25 bp, Homo sapien
ttcagttagtatttttattcagctc

SEQ ID NO: 970459 - DNA, 25 bp, Homo sapien
cagttagtatttttattcagctcac

SEQ ID NO: 970460 - DNA, 25 bp, Homo sapien
tcagttagtatttttattcagctca

SEQ ID NO: 970461 - DNA, 25 bp, Homo sapien
tccttgcttagtgtcagggagccac

SEQ ID NO: 970462 - DNA, 25 bp, Homo sapien
gcttgtccagcttcaggcgtagatg

SEQ ID NO: 970463 - DNA, 25 bp, Homo sapien
tcctcctagcagagcaaggtcggtg

SEQ ID NO: 970464 - DNA, 25 bp, Homo sapien
aacattgcggctgcgcttcagtcag

SEQ ID NO: 970465 - DNA, 25 bp, Homo sapien
ccagcttccaggaatcaggaactaa

SEQ ID NO: 970466 - DNA, 25 bp, Homo sapien
tttcccagcttccaggaatcaggaa

SEQ ID NO: 970467 - DNA, 25 bp, Homo sapien
tcccagcttccaggaatcaggaact

SEQ ID NO: 970468 - DNA, 25 bp, Homo sapien
cagcttccaggaatcaggaactaac

SEQ ID NO: 970469 - DNA, 25 bp, Homo sapien
gttctcgtggaatgttgaacatttc

SEQ ID NO: 970470 - DNA, 25 bp, Homo sapien
tattgttctcgtggaatgttgaaca

SEQ ID NO: 970471 - DNA, 25 bp, Homo sapien
gtggatattgttctcgtggaatgtt

SEQ ID NO: 970472 - DNA, 25 bp, Homo sapien
gatattgttctcgtggaatgttgaa

SEQ ID NO: 970473 - DNA, 25 bp, Homo sapien
ctcctaaatctttgtagttctgtca

SEQ ID NO: 970474 - DNA, 25 bp, Homo sapien
cctaaatctttgtagttctgtcagg

SEQ ID NO: 970475 - DNA, 25 bp, Homo sapien
tcctaaatctttgtagttctgtcag

SEQ ID NO: 970476 - DNA, 25 bp, Homo sapien
tgtgtacctatacagatagctaacg

SEQ ID NO: 970477 - DNA, 25 bp, Homo sapien
catttttcagtgatacatgttacag

SEQ ID NO: 970478 - DNA, 25 bp, Homo sapien
tctaaactaaaatggagtgatcatt

SEQ ID NO: 970479 - DNA, 25 bp, Homo sapien
gaaactgtccttatgtttgtgtacc

SEQ ID NO: 970480 - DNA, 25 bp, Homo sapien
ttttggaactgtgtatatcacacca

SEQ ID NO: 970481 - DNA, 25 bp, Homo sapien
tttatgccattgagttttctatcca

SEQ ID NO: 970482 - DNA, 25 bp, Homo sapien
aacacaggtgttgtgggatacacaa

SEQ ID NO: 970483 - DNA, 25 bp, Homo sapien
gagaaaaagggtatgatgacttccc

SEQ ID NO: 970484 - DNA, 25 bp, Homo sapien
tgactgggcgttggatggtccttca

SEQ ID NO: 970485 - DNA, 25 bp, Homo sapien
taaaagggaacagatcgtctgagat

SEQ ID NO: 970486 - DNA, 25 bp, Homo sapien
ggtgccatgaagactgaacactgca

SEQ ID NO: 970487 - DNA, 25 bp, Homo sapien
gaaggttgacagatggcctccctcc

SEQ ID NO: 970488 - DNA, 25 bp, Homo sapien
gaatggaaccagtgtacccttcaac

SEQ ID NO: 970489 - DNA, 25 bp, Homo sapien
aagttccaggtccatttagttcgag

SEQ ID NO: 970490 - DNA, 25 bp, Homo sapien
cttgggtggcacgaaagaatggaac

SEQ ID NO: 970491 - DNA, 25 bp, Homo sapien
gattgcagatgaaataccacaggtc

SEQ ID NO: 970492 - DNA, 25 bp, Homo sapien
tattgagttaccactccatgccagg

SEQ ID NO: 970493 - DNA, 25 bp, Homo sapien
taatttggccaaggttatatagcag

SEQ ID NO: 970494 - DNA, 25 bp, Homo sapien
ccatgccaggtgtactatattaagc

SEQ ID NO: 970495 - DNA, 25 bp, Homo sapien
taattgatagccatatggatcaccc

SEQ ID NO: 970496 - DNA, 25 bp, Homo sapien
gactcccttctagatccatggtgtg

SEQ ID NO: 970497 - DNA, 25 bp, Homo sapien
gatccatggtgtgtaaatttatcat

SEQ ID NO: 970498 - DNA, 25 bp, Homo sapien
gggttatagactcccttctagatcc

SEQ ID NO: 970499 - DNA, 25 bp, Homo sapien
ctttcttcttttatgcaaaatccca

SEQ ID NO: 970500 - DNA, 25 bp, Homo sapien
cagtgtgtttcaagccatgatctgg

SEQ ID NO: 970501 - DNA, 25 bp, Homo sapien
ccatgatctggagtcaaggtgttag

SEQ ID NO: 970502 - DNA, 25 bp, Homo sapien
tggagtcaaggtgttagtgattcct

SEQ ID NO: 970503 - DNA, 25 bp, Homo sapien
tcaagccatgatctggagtcaaggt

SEQ ID NO: 970504 - DNA, 25 bp, Homo sapien
agacattctttacttgtgactcgga

SEQ ID NO: 970505 - DNA, 25 bp, Homo sapien
tgcgtcccgcagatgcaagtatgaa

SEQ ID NO: 970506 - DNA, 25 bp, Homo sapien
tatgacatgaatctctctgcccaag

SEQ ID NO: 970507 - DNA, 25 bp, Homo sapien
tgtgactcggaccatctgcgtcccg

SEQ ID NO: 970508 - DNA, 25 bp, Homo sapien
ggtgatattgcccaacaggtgacct

SEQ ID NO: 970509 - DNA, 25 bp, Homo sapien
cagtctatggtgatattgcccaaca

SEQ ID NO: 970510 - DNA, 25 bp, Homo sapien
gcttctgtattcagtctatggtgat

SEQ ID NO: 970511 - DNA, 25 bp, Homo sapien
tggaggctaatatctgcttctgtat

SEQ ID NO: 970512 - DNA, 25 bp, Homo sapien
tctagggagcaatccttaattgcct

SEQ ID NO: 970513 - DNA, 25 bp, Homo sapien
ccctctaaaagctctagggagcaat

SEQ ID NO: 970514 - DNA, 25 bp, Homo sapien
tctgacattcccttgtagctgcatt

SEQ ID NO: 970515 - DNA, 25 bp, Homo sapien
gcaatctctgacattcccttgtagc

SEQ ID NO: 970516 - DNA, 25 bp, Homo sapien
gcagtatgtctggagtgttcaagca

SEQ ID NO: 970517 - DNA, 25 bp, Homo sapien
catacagggcttattgatcacagta

SEQ ID NO: 970518 - DNA, 25 bp, Homo sapien
tggatagaacagaataagcccaggg

SEQ ID NO: 970519 - DNA, 25 bp, Homo sapien
gtgatgtattttcaaaggccctgag

SEQ ID NO: 970520 - DNA, 25 bp, Homo sapien
tgcatcaaattgctcgggtttgttc

SEQ ID NO: 970521 - DNA, 25 bp, Homo sapien
caaattgctcgggtttgttcatgat

SEQ ID NO: 970522 - DNA, 25 bp, Homo sapien
attgctcgggtttgttcatgatctc

SEQ ID NO: 970523 - DNA, 25 bp, Homo sapien
catcaaattgctcgggtttgttcat

SEQ ID NO: 970524 - DNA, 25 bp, Homo sapien
cttatagttaatgtaactctgaggc

SEQ ID NO: 970525 - DNA, 25 bp, Homo sapien
ttatagttaatgtaactctgaggca

SEQ ID NO: 970526 - DNA, 25 bp, Homo sapien
tatagttaatgtaactctgaggcat

SEQ ID NO: 970527 - DNA, 25 bp, Homo sapien
tctgttggaactgggtgagacctca

SEQ ID NO: 970528 - DNA, 25 bp, Homo sapien
ataatgcttgtacttgctatttacc

SEQ ID NO: 970529 - DNA, 25 bp, Homo sapien
aatgcttgtacttgctatttacctt

SEQ ID NO: 970530 - DNA, 25 bp, Homo sapien
ggaaaattggggatgttaatgatgc

SEQ ID NO: 970531 - DNA, 25 bp, Homo sapien
gcttgtacttgctatttaccttttc

SEQ ID NO: 970532 - DNA, 25 bp, Homo sapien
cacttcacgtctggtatgaaacttg

SEQ ID NO: 970533 - DNA, 25 bp, Homo sapien
tcaggtggaacaggcctgaaagcct

SEQ ID NO: 970534 - DNA, 25 bp, Homo sapien
agcctggtaccatccttgctccatg

SEQ ID NO: 970535 - DNA, 25 bp, Homo sapien
atgaaacttgcccatacgcaggccc

SEQ ID NO: 970536 - DNA, 25 bp, Homo sapien
taaagtagatgtaggcctgctctgg

SEQ ID NO: 970537 - DNA, 25 bp, Homo sapien
gaaaataacagatgggtgtgaccca

SEQ ID NO: 970538 - DNA, 25 bp, Homo sapien
tgaggtcccacccatagaggaggag

SEQ ID NO: 970539 - DNA, 25 bp, Homo sapien
cagtacccgttccttagcatgtcca

SEQ ID NO: 970540 - DNA, 25 bp, Homo sapien
gctcagaaaggagcccacgctggtg

SEQ ID NO: 970541 - DNA, 25 bp, Homo sapien
cctccatggaatagcccgtttgccg

SEQ ID NO: 970542 - DNA, 25 bp, Homo sapien
atgtggctcagaaaggagcccacgc

SEQ ID NO: 970543 - DNA, 25 bp, Homo sapien
ggaatagcccgtttgccgccttctc

SEQ ID NO: 970544 - DNA, 25 bp, Homo sapien
gcagatgctaaagactagcaggaag

SEQ ID NO: 970545 - DNA, 25 bp, Homo sapien
gctaaagactagcaggaagacctca

SEQ ID NO: 970546 - DNA, 25 bp, Homo sapien
gatgctaaagactagcaggaagacc

SEQ ID NO: 970547 - DNA, 25 bp, Homo sapien
gctggcagatgctaaagactagcag

SEQ ID NO: 970548 - DNA, 25 bp, Homo sapien
tgtggaccgcaagaaagcatgactt

SEQ ID NO: 970549 - DNA, 25 bp, Homo sapien
tgtgccaactccttgtggaccgcaa

SEQ ID NO: 970550 - DNA, 25 bp, Homo sapien
aaattcactgatgttcagttctatt

SEQ ID NO: 970551 - DNA, 25 bp, Homo sapien
ttaaaatgttcatggactattccat

SEQ ID NO: 970552 - DNA, 25 bp, Homo sapien
tcagaaaagaagaaagtcaaaaata

SEQ ID NO: 970553 - DNA, 25 bp, Homo sapien
aatggaatctcttgggttcaacagg

SEQ ID NO: 970554 - DNA, 25 bp, Homo sapien
acctggatctactgaatgccacatc

SEQ ID NO: 970555 - DNA, 25 bp, Homo sapien
gaggcttggaaaatggaatctcttg

SEQ ID NO: 970556 - DNA, 25 bp, Homo sapien
tctcttgggttcaacaggaccatca

SEQ ID NO: 970557 - DNA, 25 bp, Homo sapien
gtctgtggtagaacctgaccagttt

SEQ ID NO: 970558 - DNA, 25 bp, Homo sapien
tgagaaaactcctgataagaagccg

SEQ ID NO: 970559 - DNA, 25 bp, Homo sapien
taagaagccgcagacccaacagtct

SEQ ID NO: 970560 - DNA, 25 bp, Homo sapien
tcaacactgtagttccaggaatcct

SEQ ID NO: 970561 - DNA, 25 bp, Homo sapien
aggtctggatgccacttgcaggccc

SEQ ID NO: 970562 - DNA, 25 bp, Homo sapien
tccgacagccacaagcttttccagg

SEQ ID NO: 970563 - DNA, 25 bp, Homo sapien
tccagagcggatgtgccttcagaca

SEQ ID NO: 970564 - DNA, 25 bp, Homo sapien
cagcagggaatgtcacgtgagtcct

SEQ ID NO: 970565 - DNA, 25 bp, Homo sapien
ctctgggataaagagctccaaactc

SEQ ID NO: 970566 - DNA, 25 bp, Homo sapien
ctgggataaagagctccaaactcca

SEQ ID NO: 970567 - DNA, 25 bp, Homo sapien
tctgggataaagagctccaaactcc

SEQ ID NO: 970568 - DNA, 25 bp, Homo sapien
tgggataaagagctccaaactccaa

SEQ ID NO: 970569 - DNA, 25 bp, Homo sapien
caggggatttgagttccacgttgtg

SEQ ID NO: 970570 - DNA, 25 bp, Homo sapien
ctctggaccacaggggatttgagtt

SEQ ID NO: 970571 - DNA, 25 bp, Homo sapien
tctctctcccgctctactcctctgg

SEQ ID NO: 970572 - DNA, 25 bp, Homo sapien
tcccgctctactcctctggaccaca

SEQ ID NO: 970573 - DNA, 25 bp, Homo sapien
ctggggccttctaaccgcccatgga

SEQ ID NO: 970574 - DNA, 25 bp, Homo sapien
tggggccttctaaccgcccatggac

SEQ ID NO: 970575 - DNA, 25 bp, Homo sapien
gggccttctaaccgcccatggacac

SEQ ID NO: 970576 - DNA, 25 bp, Homo sapien
ccctggggccttctaaccgcccatg

SEQ ID NO: 970577 - DNA, 25 bp, Homo sapien
aggcctgagacccttgacaaatgag

SEQ ID NO: 970578 - DNA, 25 bp, Homo sapien
caaatgagaatcagattgtgtccaa

SEQ ID NO: 970579 - DNA, 25 bp, Homo sapien
tctgtagccatataaggagctggtc

SEQ ID NO: 970580 - DNA, 25 bp, Homo sapien
gtccaaaatacatctcagcctcttg

SEQ ID NO: 970581 - DNA, 25 bp, Homo sapien
tgggcaaacaatccagaggccagcg

SEQ ID NO: 970582 - DNA, 25 bp, Homo sapien
gtgaggagtgctcagtttcctgctc

SEQ ID NO: 970583 - DNA, 25 bp, Homo sapien
cctggacggggccagaagagacacc

SEQ ID NO: 970584 - DNA, 25 bp, Homo sapien
ggcccttggcatggccggtgaggag

SEQ ID NO: 970585 - DNA, 25 bp, Homo sapien
ggtcacactccctgagtcctagacg

SEQ ID NO: 970586 - DNA, 25 bp, Homo sapien
tagacgtggtccctgtgtcagactg

SEQ ID NO: 970587 - DNA, 25 bp, Homo sapien
ctctgcagaggaggcgacaaggatc

SEQ ID NO: 970588 - DNA, 25 bp, Homo sapien
ggcgacaaggatcaggtcacactcc

SEQ ID NO: 970589 - DNA, 25 bp, Homo sapien
ctttagaaaggtgcctagctgaaca

SEQ ID NO: 970590 - DNA, 25 bp, Homo sapien
tcttagtgaattgtccacgtgggca

SEQ ID NO: 970591 - DNA, 25 bp, Homo sapien
cacgtgggcagcttgtcttcgaagg

SEQ ID NO: 970592 - DNA, 25 bp, Homo sapien
tagctgaacagcatcagttggatga

SEQ ID NO: 970593 - DNA, 25 bp, Homo sapien
agggttgtcagcataagagaactca

SEQ ID NO: 970594 - DNA, 25 bp, Homo sapien
aagggttgtcagcataagagaactc

SEQ ID NO: 970595 - DNA, 25 bp, Homo sapien
taagggttgtcagcataagagaact

SEQ ID NO: 970596 - DNA, 25 bp, Homo sapien
gggttgtcagcataagagaactcac

SEQ ID NO: 970597 - DNA, 25 bp, Homo sapien
gaaggtgtgggcatcttgcaagata

SEQ ID NO: 970598 - DNA, 25 bp, Homo sapien
cagaacttgtttaccacattcagga

SEQ ID NO: 970599 - DNA, 25 bp, Homo sapien
acttgtttaccacattcaggaaggt

SEQ ID NO: 970600 - DNA, 25 bp, Homo sapien
tctctgcttgccagtacagccacag

SEQ ID NO: 970601 - DNA, 25 bp, Homo sapien
ctagtagggcattttggattttcat

SEQ ID NO: 970602 - DNA, 25 bp, Homo sapien
tcagggatctgcactggtaagagta

SEQ ID NO: 970603 - DNA, 25 bp, Homo sapien
ggtaagagtatacctgatctttgag

SEQ ID NO: 970604 - DNA, 25 bp, Homo sapien
tatgcccttgggacccaagtgtgag

SEQ ID NO: 970605 - DNA, 25 bp, Homo sapien
tatacctgatctttgagctagagtc

SEQ ID NO: 970606 - DNA, 25 bp, Homo sapien
catagtatgttgtttccgaatgaca

SEQ ID NO: 970607 - DNA, 25 bp, Homo sapien
caatcttatccatgaacttatggtc

SEQ ID NO: 970608 - DNA, 25 bp, Homo sapien
gggatttccctacttcacagttatg

SEQ ID NO: 970609 - DNA, 25 bp, Homo sapien
tgcttagccagggatttccctactt

SEQ ID NO: 970610 - DNA, 25 bp, Homo sapien
atcttcctatactgctatgtattat

SEQ ID NO: 970611 - DNA, 25 bp, Homo sapien
tcacttcagtcaatcttcctatact

SEQ ID NO: 970612 - DNA, 25 bp, Homo sapien
aatcttcctatactgctatgtatta

SEQ ID NO: 970613 - DNA, 25 bp, Homo sapien
tttcacttcagtcaatcttcctata

SEQ ID NO: 970614 - DNA, 25 bp, Homo sapien
attcatgactgaatctgcttgcacc

SEQ ID NO: 970615 - DNA, 25 bp, Homo sapien
cattcatgactgaatctgcttgcac

SEQ ID NO: 970616 - DNA, 25 bp, Homo sapien
gaagttgatgggtgtgagttagctg

SEQ ID NO: 970617 - DNA, 25 bp, Homo sapien
gaacgcaataatttgagaagttgat

SEQ ID NO: 970618 - DNA, 25 bp, Homo sapien
agggaacgcaataatttgagaagtt

SEQ ID NO: 970619 - DNA, 25 bp, Homo sapien
agaagttgatgggtgtgagttagct

SEQ ID NO: 970620 - DNA, 25 bp, Homo sapien
tctctgcctagataaggagaaggtc

SEQ ID NO: 970621 - DNA, 25 bp, Homo sapien
gtcaaaagacgcacagcttagctgt

SEQ ID NO: 970622 - DNA, 25 bp, Homo sapien
cagtgtggacctgacaaaagctatt

SEQ ID NO: 970623 - DNA, 25 bp, Homo sapien
taccagctttggaactggcaaggtt

SEQ ID NO: 970624 - DNA, 25 bp, Homo sapien
agagtttcagtgtatttcaggttcc

SEQ ID NO: 970625 - DNA, 25 bp, Homo sapien
tgtgccatatattccccttaaaagc

SEQ ID NO: 970626 - DNA, 25 bp, Homo sapien
ctctaccaagctctaaggcaaagga

SEQ ID NO: 970627 - DNA, 25 bp, Homo sapien
ggacattatcttggacctagaaaac

SEQ ID NO: 970628 - DNA, 25 bp, Homo sapien
gtcagatctaaacataccaggcata

SEQ ID NO: 970629 - DNA, 25 bp, Homo sapien
gatttcacagttcatccagcaggag

SEQ ID NO: 970630 - DNA, 25 bp, Homo sapien
tgatatgtgcaccaatcccttcgcc

SEQ ID NO: 970631 - DNA, 25 bp, Homo sapien
tccccaaactaaaggaagctgagat

SEQ ID NO: 970632 - DNA, 25 bp, Homo sapien
caggcacgagttagctctggaaacc

SEQ ID NO: 970633 - DNA, 25 bp, Homo sapien
gagtcccttaaacatagtctccaag

SEQ ID NO: 970634 - DNA, 25 bp, Homo sapien
gaaatatcctgttaatgtagcactg

SEQ ID NO: 970635 - DNA, 25 bp, Homo sapien
tctgcttattgtaaggccgccccag

SEQ ID NO: 970636 - DNA, 25 bp, Homo sapien
catagtaccaaaggacacacgtccc

SEQ ID NO: 970637 - DNA, 25 bp, Homo sapien
gcaaagcaatccctttctgaggctt

SEQ ID NO: 970638 - DNA, 25 bp, Homo sapien
taattcccttcggattctaagtgag

SEQ ID NO: 970639 - DNA, 25 bp, Homo sapien
tagttacagaatattgccagaccat

SEQ ID NO: 970640 - DNA, 25 bp, Homo sapien
caattacccctaagggtggtagctg

SEQ ID NO: 970641 - DNA, 25 bp, Homo sapien
agggtattgaaagccattcttctcc

SEQ ID NO: 970642 - DNA, 25 bp, Homo sapien
ggtagctgtaaaaccacttgatcag

SEQ ID NO: 970643 - DNA, 25 bp, Homo sapien
acttgatcagacaaaagtcttggtc

SEQ ID NO: 970644 - DNA, 25 bp, Homo sapien
ggcagttgattctgctttctttact

SEQ ID NO: 970645 - DNA, 25 bp, Homo sapien
ttcttaattgggaccatttgtggga

SEQ ID NO: 970646 - DNA, 25 bp, Homo sapien
aatttcttaattgggaccatttgtg

SEQ ID NO: 970647 - DNA, 25 bp, Homo sapien
tcttaattgggaccatttgtgggaa

SEQ ID NO: 970648 - DNA, 25 bp, Homo sapien
tccgttgagataaaggccacatgcc

SEQ ID NO: 970649 - DNA, 25 bp, Homo sapien
ttccaaagagaactcgccaggaggg

SEQ ID NO: 970650 - DNA, 25 bp, Homo sapien
caccaggagatggatagaatagggt

SEQ ID NO: 970651 - DNA, 25 bp, Homo sapien
tcccggctgaacagcctgtcatgct

SEQ ID NO: 970652 - DNA, 25 bp, Homo sapien
gcagtcctgacagcgcacggcgcag

SEQ ID NO: 970653 - DNA, 25 bp, Homo sapien
agtcagcgttcttgggggccttgca

SEQ ID NO: 970654 - DNA, 25 bp, Homo sapien
tgcatgtgtgcacatccagagcttc

SEQ ID NO: 970655 - DNA, 25 bp, Homo sapien
tcatgtagcggttgtccagtcagcg

SEQ ID NO: 970656 - DNA, 25 bp, Homo sapien
ccatgccccgggaagtcaggttgca

SEQ ID NO: 970657 - DNA, 25 bp, Homo sapien
gcacatgacttcacagctgtccatg

SEQ ID NO: 970658 - DNA, 25 bp, Homo sapien
ccacacttggtcatccgggtgacat

SEQ ID NO: 970659 - DNA, 25 bp, Homo sapien
gacatgggaggtgtcgtagcctctc

SEQ ID NO: 970660 - DNA, 25 bp, Homo sapien
tgggccaatcaggtaaattctctgt

SEQ ID NO: 970661 - DNA, 25 bp, Homo sapien
ttgtgctgggccaatcaggtaaatt

SEQ ID NO: 970662 - DNA, 25 bp, Homo sapien
gatcactattgccacttagttgctg

SEQ ID NO: 970663 - DNA, 25 bp, Homo sapien
aattctctgttgatttgtgattttg

SEQ ID NO: 970664 - DNA, 25 bp, Homo sapien
tgaggtctgtggactcgaggaggtc

SEQ ID NO: 970665 - DNA, 25 bp, Homo sapien
tggactcgaggaggtccacagaaaa

SEQ ID NO: 970666 - DNA, 25 bp, Homo sapien
gtctgtggactcgaggaggtccaca

SEQ ID NO: 970667 - DNA, 25 bp, Homo sapien
ggtgaggtctgtggactcgaggagg

SEQ ID NO: 970668 - DNA, 25 bp, Homo sapien
atctgatccaatatattggaactgg

SEQ ID NO: 970669 - DNA, 25 bp, Homo sapien
aatctgatccaatatattggaactg

SEQ ID NO: 970670 - DNA, 25 bp, Homo sapien
tctgatccaatatattggaactggc

SEQ ID NO: 970671 - DNA, 25 bp, Homo sapien
gaggtagagcatgaacatgtgtaaa

SEQ ID NO: 970672 - DNA, 25 bp, Homo sapien
acagagctgttctttgagggatgga

SEQ ID NO: 970673 - DNA, 25 bp, Homo sapien
gaacatgtgtaaacctgataggtgg

SEQ ID NO: 970674 - DNA, 25 bp, Homo sapien
gctcagggttgatcaagaggagtga

SEQ ID NO: 970675 - DNA, 25 bp, Homo sapien
aaacctctcgttagccacagtgaaa

SEQ ID NO: 970676 - DNA, 25 bp, Homo sapien
gtcctgagagtacatgagccgctca

SEQ ID NO: 970677 - DNA, 25 bp, Homo sapien
tctcggtccctgatacagtagtctg

SEQ ID NO: 970678 - DNA, 25 bp, Homo sapien
gatggccccattgtacttcctccag

SEQ ID NO: 970679 - DNA, 25 bp, Homo sapien
atgaaattcctcttcggaattacac

SEQ ID NO: 970680 - DNA, 25 bp, Homo sapien
ctgggcatctttaaaggatgtctta

SEQ ID NO: 970681 - DNA, 25 bp, Homo sapien
attcctcttcggaattacactgccc

SEQ ID NO: 970682 - DNA, 25 bp, Homo sapien
ctttaaaggatgtcttagaatgaaa

SEQ ID NO: 970683 - DNA, 25 bp, Homo sapien
tgcagtttggggctaccttcatctc

SEQ ID NO: 970684 - DNA, 25 bp, Homo sapien
ctgtactcaatcagagaggcagaga

SEQ ID NO: 970685 - DNA, 25 bp, Homo sapien
ccttgaagtggacaaaactgtactc

SEQ ID NO: 970686 - DNA, 25 bp, Homo sapien
tctatgtactgggtttgcagacttg

SEQ ID NO: 970687 - DNA, 25 bp, Homo sapien
aaatgagcaccgttgcatttccata

SEQ ID NO: 970688 - DNA, 25 bp, Homo sapien
aaaatgagcaccgttgcatttccat

SEQ ID NO: 970689 - DNA, 25 bp, Homo sapien
aatgagcaccgttgcatttccatac

SEQ ID NO: 970690 - DNA, 25 bp, Homo sapien
tagtcaatgttatcactgcagccac

SEQ ID NO: 970691 - DNA, 25 bp, Homo sapien
ttgcatccacaaatgcgcgggcaaa

SEQ ID NO: 970692 - DNA, 25 bp, Homo sapien
cgggcaaatttgatcccatagtcaa

SEQ ID NO: 970693 - DNA, 25 bp, Homo sapien
ccatagtcaatgttatcactgcagc

SEQ ID NO: 970694 - DNA, 25 bp, Homo sapien
tcttctttggatcacaggaacagga

SEQ ID NO: 970695 - DNA, 25 bp, Homo sapien
ccttggcgcttcccatcttctttgg

SEQ ID NO: 970696 - DNA, 25 bp, Homo sapien
tttgctgtccttggcgcttcccatc

SEQ ID NO: 970697 - DNA, 25 bp, Homo sapien
gcctttgctgtccttggcgcttccc

SEQ ID NO: 970698 - DNA, 25 bp, Homo sapien
taaacaaaggcagattcccgactac

SEQ ID NO: 970699 - DNA, 25 bp, Homo sapien
ctgaggagatggcataaacaaaggc

SEQ ID NO: 970700 - DNA, 25 bp, Homo sapien
gatggcaaatacaactccagctgag

SEQ ID NO: 970701 - DNA, 25 bp, Homo sapien
tggtgatggcaaatacaactccagc

SEQ ID NO: 970702 - DNA, 25 bp, Homo sapien
aacacaaaatcatcactgacagtca

SEQ ID NO: 970703 - DNA, 25 bp, Homo sapien
taaccaacacaaaatcatcactgac

SEQ ID NO: 970704 - DNA, 25 bp, Homo sapien
tcagccctcccataaccaacacaaa

SEQ ID NO: 970705 - DNA, 25 bp, Homo sapien
tcccataaccaacacaaaatcatca

SEQ ID NO: 970706 - DNA, 25 bp, Homo sapien
cacatctggatgtcggtgacacagc

SEQ ID NO: 970707 - DNA, 25 bp, Homo sapien
tgtccagggtgttgcaattccagcg

SEQ ID NO: 970708 - DNA, 25 bp, Homo sapien
gagtaggaccctgccaaaaaggctg

SEQ ID NO: 970709 - DNA, 25 bp, Homo sapien
tggctaatggcacgcatcacatctg

SEQ ID NO: 970710 - DNA, 25 bp, Homo sapien
tggccaatgcggtccccattccgat

SEQ ID NO: 970711 - DNA, 25 bp, Homo sapien
agaatccgagactgctgcggccgcg

SEQ ID NO: 970712 - DNA, 25 bp, Homo sapien
ggttcgggccagaatccgagactgc

SEQ ID NO: 970713 - DNA, 25 bp, Homo sapien
gaacgcagccaggaagggtctatgt

SEQ ID NO: 970714 - DNA, 25 bp, Homo sapien
ccagagccagattccaccgagaggg

SEQ ID NO: 970715 - DNA, 25 bp, Homo sapien
cagattccaccgagaggggcgttca

SEQ ID NO: 970716 - DNA, 25 bp, Homo sapien
agccagagccagattccaccgagag

SEQ ID NO: 970717 - DNA, 25 bp, Homo sapien
tcgggggtgagccaggtcaagagca

SEQ ID NO: 970718 - DNA, 25 bp, Homo sapien
gtgcccagagcagaagcgctcagct

SEQ ID NO: 970719 - DNA, 25 bp, Homo sapien
ggcgagactcgctgataaagtttca

SEQ ID NO: 970720 - DNA, 25 bp, Homo sapien
atcaggtcagactccgtgtgcgggc

SEQ ID NO: 970721 - DNA, 25 bp, Homo sapien
taaagtttcaaacgatgggcccagc

SEQ ID NO: 970722 - DNA, 25 bp, Homo sapien
cttgtaaatttggagctgccgcgtc

SEQ ID NO: 970723 - DNA, 25 bp, Homo sapien
gaacctttagggaagctccaggcca

SEQ ID NO: 970724 - DNA, 25 bp, Homo sapien
caaacaagtccctgagcgtgcaatg

SEQ ID NO: 970725 - DNA, 25 bp, Homo sapien
tatctgccaaagcacccaggaaaga

SEQ ID NO: 970726 - DNA, 25 bp, Homo sapien
agagacgccaaaaacctgaaagatg

SEQ ID NO: 970727 - DNA, 25 bp, Homo sapien
agcgtttctgctcgccgtgtgtgca

SEQ ID NO: 970728 - DNA, 25 bp, Homo sapien
gctgacccagatacatccccgtttg

SEQ ID NO: 970729 - DNA, 25 bp, Homo sapien
ggccgcgacccagggaagttctgct

SEQ ID NO: 970730 - DNA, 25 bp, Homo sapien
caaacctccttcccccgtgaagcag

SEQ ID NO: 970731 - DNA, 25 bp, Homo sapien
tgaagcaggggaataaacgaaagct

SEQ ID NO: 970732 - DNA, 25 bp, Homo sapien
atgcttatgctcacaaacctccttc

SEQ ID NO: 970733 - DNA, 25 bp, Homo sapien
cgtgaagcaggggaataaacgaaag

SEQ ID NO: 970734 - DNA, 25 bp, Homo sapien
gactcaatgacttgtctcttccaga

SEQ ID NO: 970735 - DNA, 25 bp, Homo sapien
ctagaggccgtctggactcaatgac

SEQ ID NO: 970736 - DNA, 25 bp, Homo sapien
tgtctagaggccgtctggactcaat

SEQ ID NO: 970737 - DNA, 25 bp, Homo sapien
ctgtctagaggccgtctggactcaa

SEQ ID NO: 970738 - DNA, 25 bp, Homo sapien
gctgcatgtagtgcattattgagag

SEQ ID NO: 970739 - DNA, 25 bp, Homo sapien
tgctgcatgtagtgcattattgaga

SEQ ID NO: 970740 - DNA, 25 bp, Homo sapien
ctgctgcatgtagtgcattattgag

SEQ ID NO: 970741 - DNA, 25 bp, Homo sapien
agttcaatcttggtacaccagagct

SEQ ID NO: 970742 - DNA, 25 bp, Homo sapien
tcaatcttggtacaccagagctaac

SEQ ID NO: 970743 - DNA, 25 bp, Homo sapien
aatcttggtacaccagagctaacca

SEQ ID NO: 970744 - DNA, 25 bp, Homo sapien
tttaagttcaatcttggtacaccag

SEQ ID NO: 970745 - DNA, 25 bp, Homo sapien
agttatattgtgctgcaaacagtta

SEQ ID NO: 970746 - DNA, 25 bp, Homo sapien
tgtgatttagatacgatcaaaccaa

SEQ ID NO: 970747 - DNA, 25 bp, Homo sapien
aagcaatgatttttggatggttcaa

SEQ ID NO: 970748 - DNA, 25 bp, Homo sapien
tacaaatcctgtacgattcactgac

SEQ ID NO: 970749 - DNA, 25 bp, Homo sapien
ggaaagttagcttgcaaatgaaaag

SEQ ID NO: 970750 - DNA, 25 bp, Homo sapien
tccgcatatggtaatagctgtcctc

SEQ ID NO: 970751 - DNA, 25 bp, Homo sapien
gagttggatcattttcccgttcatt

SEQ ID NO: 970752 - DNA, 25 bp, Homo sapien
cccttaattgtatatgagttggatc

SEQ ID NO: 970753 - DNA, 25 bp, Homo sapien
gtttgcagaccttttcactcaaatc

SEQ ID NO: 970754 - DNA, 25 bp, Homo sapien
cattattaaccaattcttcacaaac

SEQ ID NO: 970755 - DNA, 25 bp, Homo sapien
tttgcagaccttttcactcaaatct

SEQ ID NO: 970756 - DNA, 25 bp, Homo sapien
cactcaaatcttcaacattattaac

SEQ ID NO: 970757 - DNA, 25 bp, Homo sapien
tggggagaagcccattccagtgtta

SEQ ID NO: 970758 - DNA, 25 bp, Homo sapien
ggggagaagcccattccagtgttat

SEQ ID NO: 970759 - DNA, 25 bp, Homo sapien
ctggggagaagcccattccagtgtt

SEQ ID NO: 970760 - DNA, 25 bp, Homo sapien
tgtttaggataaatactgacaccaa

SEQ ID NO: 970761 - DNA, 25 bp, Homo sapien
ggtaaattcaatacacggatcagtt

SEQ ID NO: 970762 - DNA, 25 bp, Homo sapien
gctgcttttgcaggccacttccact

SEQ ID NO: 970763 - DNA, 25 bp, Homo sapien
cagctaattttcagctaggactaga

SEQ ID NO: 970764 - DNA, 25 bp, Homo sapien
tgagaatttacaggtaactcagtaa

SEQ ID NO: 970765 - DNA, 25 bp, Homo sapien
ttgagaatttacaggtaactcagta

SEQ ID NO: 970766 - DNA, 25 bp, Homo sapien
gtaataacattctgtacagctgtta

SEQ ID NO: 970767 - DNA, 25 bp, Homo sapien
tctgctggtctttactggtaattcc

SEQ ID NO: 970768 - DNA, 25 bp, Homo sapien
gatagctctccaaattgtatctctt

SEQ ID NO: 970769 - DNA, 25 bp, Homo sapien
cctgtagttctttaagagcagccag

SEQ ID NO: 970770 - DNA, 25 bp, Homo sapien
tttgtctcttcagatagctctccaa

SEQ ID NO: 970771 - DNA, 25 bp, Homo sapien
aaagatgtcttaacgttatatccct

SEQ ID NO: 970772 - DNA, 25 bp, Homo sapien
caaaagatgtcttaacgttatatcc

SEQ ID NO: 970773 - DNA, 25 bp, Homo sapien
tcaaaagatgtcttaacgttatatc

SEQ ID NO: 970774 - DNA, 25 bp, Homo sapien
gatgtcttaacgttatatccctttc

SEQ ID NO: 970775 - DNA, 25 bp, Homo sapien
tcatatgttcaagtccaagaccatg

SEQ ID NO: 970776 - DNA, 25 bp, Homo sapien
tagtaaatctgtcatatgttcaagt

SEQ ID NO: 970777 - DNA, 25 bp, Homo sapien
tcaagtccaagaccatgtaaaaata

SEQ ID NO: 970778 - DNA, 25 bp, Homo sapien
tgtaaaaatacttccagatctccaa

SEQ ID NO: 970779 - DNA, 25 bp, Homo sapien
agtgtcttctttagttagctgttga

SEQ ID NO: 970780 - DNA, 25 bp, Homo sapien
aatagtgtcttctttagttagctgt

SEQ ID NO: 970781 - DNA, 25 bp, Homo sapien
tcttctttagttagctgttgaagtt

SEQ ID NO: 970782 - DNA, 25 bp, Homo sapien
tgtcttctttagttagctgttgaag

SEQ ID NO: 970783 - DNA, 25 bp, Homo sapien
ttttatgaccctgacgtgctgccca

SEQ ID NO: 970784 - DNA, 25 bp, Homo sapien
caagttcaagcaacttcaaaactat

SEQ ID NO: 970785 - DNA, 25 bp, Homo sapien
ttctttttgcaatctcacttggcat

SEQ ID NO: 970786 - DNA, 25 bp, Homo sapien
agttcaagcaacttcaaaactatat

SEQ ID NO: 970787 - DNA, 25 bp, Homo sapien
tgggtgtgaccatctcgagcagcat

SEQ ID NO: 970788 - DNA, 25 bp, Homo sapien
cgagcagcatacatgattggggtca

SEQ ID NO: 970789 - DNA, 25 bp, Homo sapien
catcctgggtattaacttctgctcc

SEQ ID NO: 970790 - DNA, 25 bp, Homo sapien
tccatgagcaacaaggagagcaaca

SEQ ID NO: 970791 - DNA, 25 bp, Homo sapien
tctgttttaaaggaggtctgagact

SEQ ID NO: 970792 - DNA, 25 bp, Homo sapien
tacttgggctgaacataacatcatg

SEQ ID NO: 970793 - DNA, 25 bp, Homo sapien
caattttcctgagtcgtcctcaaga

SEQ ID NO: 970794 - DNA, 25 bp, Homo sapien
tgggcctattccaaggacaccagat

SEQ ID NO: 970795 - DNA, 25 bp, Homo sapien
ggagttcaggtctactaaagcactg

SEQ ID NO: 970796 - DNA, 25 bp, Homo sapien
tcttatggtgatggggaactccaac

SEQ ID NO: 970797 - DNA, 25 bp, Homo sapien
tgatggggaactccaacacaaaaac

SEQ ID NO: 970798 - DNA, 25 bp, Homo sapien
aactggagttcaggtctactaaagc

SEQ ID NO: 970799 - DNA, 25 bp, Homo sapien
caattcatttgactgaaggccacct

SEQ ID NO: 970800 - DNA, 25 bp, Homo sapien
tatgtcaagtttcaattcatttgac

SEQ ID NO: 970801 - DNA, 25 bp, Homo sapien
catttgactgaaggccaccttgttt

SEQ ID NO: 970802 - DNA, 25 bp, Homo sapien
caagtttcaattcatttgactgaag

SEQ ID NO: 970803 - DNA, 25 bp, Homo sapien
atgagcagaacatgcagttatcaaa

SEQ ID NO: 970804 - DNA, 25 bp, Homo sapien
cacttcaagatctgttcctctgagc

SEQ ID NO: 970805 - DNA, 25 bp, Homo sapien
tcttgaaagtagtagttctacacac

SEQ ID NO: 970806 - DNA, 25 bp, Homo sapien
agcatttcttgaaagtagtagttct

SEQ ID NO: 970807 - DNA, 25 bp, Homo sapien
aaaggacccgaaccagctctgcatt

SEQ ID NO: 970808 - DNA, 25 bp, Homo sapien
gcattagcacctctgtccaaaagga

SEQ ID NO: 970809 - DNA, 25 bp, Homo sapien
ccatactgaaagttggaatctacac

SEQ ID NO: 970810 - DNA, 25 bp, Homo sapien
gcaacactagcagcatacataaggg

SEQ ID NO: 970811 - DNA, 25 bp, Homo sapien
tcaatgggtaatagccttttcaatt

SEQ ID NO: 970812 - DNA, 25 bp, Homo sapien
acatctccgatggtcattgctttct

SEQ ID NO: 970813 - DNA, 25 bp, Homo sapien
ggagctcctggaccaatgaaacatc

SEQ ID NO: 970814 - DNA, 25 bp, Homo sapien
tggaccaatgaaacatctccgatgg

SEQ ID NO: 970815 - DNA, 25 bp, Homo sapien
agccatcatcctcgctctcgctact

SEQ ID NO: 970816 - DNA, 25 bp, Homo sapien
atcatcctcgctctcgctactctcg

SEQ ID NO: 970817 - DNA, 25 bp, Homo sapien
ctgagacgtccggtcgagataccca

SEQ ID NO: 970818 - DNA, 25 bp, Homo sapien
gatacccaatctcccagccatcatc

SEQ ID NO: 970819 - DNA, 25 bp, Homo sapien
aaggaagctccctgtcggcaccgcg

SEQ ID NO: 970820 - DNA, 25 bp, Homo sapien
agccaaggaagctccctgtcggcac

SEQ ID NO: 970821 - DNA, 25 bp, Homo sapien
caaggaagctccctgtcggcaccgc

SEQ ID NO: 970822 - DNA, 25 bp, Homo sapien
gccagccaaggaagctccctgtcgg

SEQ ID NO: 970823 - DNA, 25 bp, Homo sapien
tcttggtgatatcaaatgttgtttc

SEQ ID NO: 970824 - DNA, 25 bp, Homo sapien
aatttgtacagctttccacagtttt

SEQ ID NO: 970825 - DNA, 25 bp, Homo sapien
aaagagatagtaatagatacttttc

SEQ ID NO: 970826 - DNA, 25 bp, Homo sapien
ttttcctcttggtgatatcaaatgt

SEQ ID NO: 970827 - DNA, 25 bp, Homo sapien
aagggttcatcaggaggagttctag

SEQ ID NO: 970828 - DNA, 25 bp, Homo sapien
ttgatgtaagggttcatcaggagga

SEQ ID NO: 970829 - DNA, 25 bp, Homo sapien
aggagttctagggtatctttgctat

SEQ ID NO: 970830 - DNA, 25 bp, Homo sapien
ctggtttgatgtaagggttcatcag

SEQ ID NO: 970831 - DNA, 25 bp, Homo sapien
ggtatccagctatccacagtcactg

SEQ ID NO: 970832 - DNA, 25 bp, Homo sapien
gcggttacctcatggatgatatcta

SEQ ID NO: 970833 - DNA, 25 bp, Homo sapien
tgtacaggggtatccagctatccac

SEQ ID NO: 970834 - DNA, 25 bp, Homo sapien
tgcatgaacatctgccccttgtgcg

SEQ ID NO: 970835 - DNA, 25 bp, Homo sapien
gacccatgatggagtctgacctgca

SEQ ID NO: 970836 - DNA, 25 bp, Homo sapien
tagctggtcactcataggcctagaa

SEQ ID NO: 970837 - DNA, 25 bp, Homo sapien
tcacttgcctctacagacccaggag

SEQ ID NO: 970838 - DNA, 25 bp, Homo sapien
cagccttcctaacagccaatattgg

SEQ ID NO: 970839 - DNA, 25 bp, Homo sapien
ggagactaggcaattgcacagacat

SEQ ID NO: 970840 - DNA, 25 bp, Homo sapien
gctttttcactaagtaccaccactg

SEQ ID NO: 970841 - DNA, 25 bp, Homo sapien
cactaagtaccaccactgagttgct

SEQ ID NO: 970842 - DNA, 25 bp, Homo sapien
agttgctggagactaggcaattgca

SEQ ID NO: 970843 - DNA, 25 bp, Homo sapien
ccaccacggcttggctgttgtccag

SEQ ID NO: 970844 - DNA, 25 bp, Homo sapien
aggtgcagaaaggataaaggtttct

SEQ ID NO: 970845 - DNA, 25 bp, Homo sapien
cagtgccaagcacgaggcaggtgca

SEQ ID NO: 970846 - DNA, 25 bp, Homo sapien
cagcatgggactgggtgttccacca

SEQ ID NO: 970847 - DNA, 25 bp, Homo sapien
cgcttcaaagactgcttggcttcct

SEQ ID NO: 970848 - DNA, 25 bp, Homo sapien
cctttcggtggattagtcaagatgt

SEQ ID NO: 970849 - DNA, 25 bp, Homo sapien
gcttggcttcctttcggtggattag

SEQ ID NO: 970850 - DNA, 25 bp, Homo sapien
cttcgcttcaaagactgcttggctt

SEQ ID NO: 970851 - DNA, 25 bp, Homo sapien
tatacgaaaggcacattttccttcc

SEQ ID NO: 970852 - DNA, 25 bp, Homo sapien
ctgtattttgatatacgaaaggcac

SEQ ID NO: 970853 - DNA, 25 bp, Homo sapien
agacccacactgccgcggaactttt

SEQ ID NO: 970854 - DNA, 25 bp, Homo sapien
acttttcggctctctaaggctgtat

SEQ ID NO: 970855 - DNA, 25 bp, Homo sapien
ctgggtctggcggaccctgacgcga

SEQ ID NO: 970856 - DNA, 25 bp, Homo sapien
gttctcccgccggtggcttcttctg

SEQ ID NO: 970857 - DNA, 25 bp, Homo sapien
cttctgtcctccagcgttgccaact

SEQ ID NO: 970858 - DNA, 25 bp, Homo sapien
taacaggaacccgactaggatcatc

SEQ ID NO: 970859 - DNA, 25 bp, Homo sapien
taaagagaggccgcgactgtcgccc

SEQ ID NO: 970860 - DNA, 25 bp, Homo sapien
ctaaagagaggccgcgactgtcgcc

SEQ ID NO: 970861 - DNA, 25 bp, Homo sapien
aagagaggccgcgactgtcgcccac

SEQ ID NO: 970862 - DNA, 25 bp, Homo sapien
aaagagaggccgcgactgtcgccca

SEQ ID NO: 970863 - DNA, 25 bp, Homo sapien
tggtgctgggcggtaaggacacgga

SEQ ID NO: 970864 - DNA, 25 bp, Homo sapien
cctggtgctgggcggtaaggacacg

SEQ ID NO: 970865 - DNA, 25 bp, Homo sapien
ggcctggtgctgggcggtaaggaca

SEQ ID NO: 970866 - DNA, 25 bp, Homo sapien
ggtgctgggcggtaaggacacggac

SEQ ID NO: 970867 - DNA, 25 bp, Homo sapien
cagagtggctttacggctttactgt

SEQ ID NO: 970868 - DNA, 25 bp, Homo sapien
ggctttacggctttactgtagggca

SEQ ID NO: 970869 - DNA, 25 bp, Homo sapien
tagttgtttcagtgtgaaattagca

SEQ ID NO: 970870 - DNA, 25 bp, Homo sapien
ttacagagtggctttacggctttac

SEQ ID NO: 970871 - DNA, 25 bp, Homo sapien
caaagaaacagttaacctagtgctc

SEQ ID NO: 970872 - DNA, 25 bp, Homo sapien
gtttctgaaatcgagatgcctttta

SEQ ID NO: 970873 - DNA, 25 bp, Homo sapien
cctagtgctctaaagtaaaggctac

SEQ ID NO: 970874 - DNA, 25 bp, Homo sapien
taaaattttccatgggaccgcagtg

SEQ ID NO: 970875 - DNA, 25 bp, Homo sapien
ccactgggaagtctgaatccaatgc

SEQ ID NO: 970876 - DNA, 25 bp, Homo sapien
tccaatgccatgatgttctttgaat

SEQ ID NO: 970877 - DNA, 25 bp, Homo sapien
gaatccaatgccatgatgttctttg

SEQ ID NO: 970878 - DNA, 25 bp, Homo sapien
ctgggaagtctgaatccaatgccat

SEQ ID NO: 970879 - DNA, 25 bp, Homo sapien
agtcataaattcatagttgtcccag

SEQ ID NO: 970880 - DNA, 25 bp, Homo sapien
aagtcataaattcatagttgtccca

SEQ ID NO: 970881 - DNA, 25 bp, Homo sapien
gtcataaattcatagttgtcccaga

SEQ ID NO: 970882 - DNA, 25 bp, Homo sapien
gaagtcataaattcatagttgtccc

SEQ ID NO: 970883 - DNA, 25 bp, Homo sapien
ctgagagatcttcagagctttttcc

SEQ ID NO: 970884 - DNA, 25 bp, Homo sapien
gagatcttcagagctttttccaagg

SEQ ID NO: 970885 - DNA, 25 bp, Homo sapien
tcaggaatagtggtcatggtagtta

SEQ ID NO: 970886 - DNA, 25 bp, Homo sapien
acatcaggaatagtggtcatggtag

SEQ ID NO: 970887 - DNA, 25 bp, Homo sapien
gaaagctctcgtgctctcgaatttt

SEQ ID NO: 970888 - DNA, 25 bp, Homo sapien
ctgagaaagctctcgtgctctcgaa

SEQ ID NO: 970889 - DNA, 25 bp, Homo sapien
gagaaagctctcgtgctctcgaatt

SEQ ID NO: 970890 - DNA, 25 bp, Homo sapien
aaagctctcgtgctctcgaatttta

SEQ ID NO: 970891 - DNA, 25 bp, Homo sapien
ctgggtccacctgttctcaatgttc

SEQ ID NO: 970892 - DNA, 25 bp, Homo sapien
tgggtccacctgttctcaatgttca

SEQ ID NO: 970893 - DNA, 25 bp, Homo sapien
ggaaattagatctttgtcagatgga

SEQ ID NO: 970894 - DNA, 25 bp, Homo sapien
aattagatctttgtcagatggatag

SEQ ID NO: 970895 - DNA, 25 bp, Homo sapien
aaattagatctttgtcagatggata

SEQ ID NO: 970896 - DNA, 25 bp, Homo sapien
gaaattagatctttgtcagatggat

SEQ ID NO: 970897 - DNA, 25 bp, Homo sapien
tagttgccttgagaagctaagttca

SEQ ID NO: 970898 - DNA, 25 bp, Homo sapien
tgattttaaataccgctagtgctgg

SEQ ID NO: 970899 - DNA, 25 bp, Homo sapien
gaaattacatcaggtcacttggtct

SEQ ID NO: 970900 - DNA, 25 bp, Homo sapien
taataatgcctactctgtagcaaag

SEQ ID NO: 970901 - DNA, 25 bp, Homo sapien
aaggcggagttttcctgggtcagat

SEQ ID NO: 970902 - DNA, 25 bp, Homo sapien
ttgtatagcagagcaccattctggg

SEQ ID NO: 970903 - DNA, 25 bp, Homo sapien
gtggttaagtcttgctcagctctag

SEQ ID NO: 970904 - DNA, 25 bp, Homo sapien
gctgtcaagccgtgttctagataaa

SEQ ID NO: 970905 - DNA, 25 bp, Homo sapien
aaggccttcttccaggaatagtatt

SEQ ID NO: 970906 - DNA, 25 bp, Homo sapien
ttcctcaaaaggccttcttccagga

SEQ ID NO: 970907 - DNA, 25 bp, Homo sapien
ggccttcttccaggaatagtatttc

SEQ ID NO: 970908 - DNA, 25 bp, Homo sapien
cttcttccaggaatagtatttcata

SEQ ID NO: 970909 - DNA, 25 bp, Homo sapien
gaggtacccttagggcactacagaa

SEQ ID NO: 970910 - DNA, 25 bp, Homo sapien
cactacagaagcctagctgatggct

SEQ ID NO: 970911 - DNA, 25 bp, Homo sapien
tgaagtgctgagctagaggtaccct

SEQ ID NO: 970912 - DNA, 25 bp, Homo sapien
gctgatggcttttagcctggctaga

SEQ ID NO: 970913 - DNA, 25 bp, Homo sapien
caatatgttctctatgaagccccga

SEQ ID NO: 970914 - DNA, 25 bp, Homo sapien
tggtgccagcacaagaatccctcaa

SEQ ID NO: 970915 - DNA, 25 bp, Homo sapien
agaatccttgatggttaagcagctg

SEQ ID NO: 970916 - DNA, 25 bp, Homo sapien
gaagccccgatcaccaaatgcaaac

SEQ ID NO: 970917 - DNA, 25 bp, Homo sapien
tggtttatgagaatggaatgccaaa

SEQ ID NO: 970918 - DNA, 25 bp, Homo sapien
tccaaaattgttttactcacaactg

SEQ ID NO: 970919 - DNA, 25 bp, Homo sapien
gaacagagcacagatgatctaaata

SEQ ID NO: 970920 - DNA, 25 bp, Homo sapien
tctgtggtaaaggtatcatttggct

SEQ ID NO: 970921 - DNA, 25 bp, Homo sapien
tctgagttggcgctataagagcagt

SEQ ID NO: 970922 - DNA, 25 bp, Homo sapien
tagaagagtcagacatgagcgatga

SEQ ID NO: 970923 - DNA, 25 bp, Homo sapien
ggatttgcccacatttctagaagag

SEQ ID NO: 970924 - DNA, 25 bp, Homo sapien
tttatggaaatctgagacccacaga

SEQ ID NO: 970925 - DNA, 25 bp, Homo sapien
tttagtttgatcagctctctttagc

SEQ ID NO: 970926 - DNA, 25 bp, Homo sapien
tagttcggtctttaattccattcca

SEQ ID NO: 970927 - DNA, 25 bp, Homo sapien
gagttgggtctcataaatgtataga

SEQ ID NO: 970928 - DNA, 25 bp, Homo sapien
tctctttagcttctgtagttcggtc

SEQ ID NO: 970929 - DNA, 25 bp, Homo sapien
tgttctactgacactctctagctgt

SEQ ID NO: 970930 - DNA, 25 bp, Homo sapien
taaacatcagctatatctcagccct

SEQ ID NO: 970931 - DNA, 25 bp, Homo sapien
taacagctccagcagtatttatgcc

SEQ ID NO: 970932 - DNA, 25 bp, Homo sapien
caacatcttgccagagccaatttcc

SEQ ID NO: 970933 - DNA, 25 bp, Homo sapien
gtacgggaagcatagcagcatctgc

SEQ ID NO: 970934 - DNA, 25 bp, Homo sapien
tcaggctgtacgggaagcatagcag

SEQ ID NO: 970935 - DNA, 25 bp, Homo sapien
ctgtacgggaagcatagcagcatct

SEQ ID NO: 970936 - DNA, 25 bp, Homo sapien
cttcaggctgtacgggaagcatagc

SEQ ID NO: 970937 - DNA, 25 bp, Homo sapien
caggcacatcctgaccaatttggaa

SEQ ID NO: 970938 - DNA, 25 bp, Homo sapien
gctcaacctgaacaagccaaggagg

SEQ ID NO: 970939 - DNA, 25 bp, Homo sapien
gaggctcaactctttatggtgctgt

SEQ ID NO: 970940 - DNA, 25 bp, Homo sapien
ccaaggaggtgtattaaactcaggc

SEQ ID NO: 970941 - DNA, 25 bp, Homo sapien
gataactggaaacttcagcggttta

SEQ ID NO: 970942 - DNA, 25 bp, Homo sapien
gaaaggcagctctaaatgtcaatca

SEQ ID NO: 970943 - DNA, 25 bp, Homo sapien
tgtcaatcagcctagttgatcagct

SEQ ID NO: 970944 - DNA, 25 bp, Homo sapien
gaataccacaggaaccacaagactg

SEQ ID NO: 970945 - DNA, 25 bp, Homo sapien
gaagaagcaccaatcatgaattagt

SEQ ID NO: 970946 - DNA, 25 bp, Homo sapien
aatattgactttttatggcactagt

SEQ ID NO: 970947 - DNA, 25 bp, Homo sapien
gagagaatgagagacacactgaaga

SEQ ID NO: 970948 - DNA, 25 bp, Homo sapien
catgctgtctacactaagagagaat

SEQ ID NO: 970949 - DNA, 25 bp, Homo sapien
ccttggggctgatgcagttgttgcc

SEQ ID NO: 970950 - DNA, 25 bp, Homo sapien
cttggggctgatgcagttgttgccc

SEQ ID NO: 970951 - DNA, 25 bp, Homo sapien
tgttgcccacagctgtatgattccc

SEQ ID NO: 970952 - DNA, 25 bp, Homo sapien
ggccagtctgtggaccactgaagca

SEQ ID NO: 970953 - DNA, 25 bp, Homo sapien
cctctcttagagacccttgtaatta

SEQ ID NO: 970954 - DNA, 25 bp, Homo sapien
tgattgatgtctccaaatggccagt

SEQ ID NO: 970955 - DNA, 25 bp, Homo sapien
taatttaggtaaatggccagcgctc

SEQ ID NO: 970956 - DNA, 25 bp, Homo sapien
tcagctaggactagccaaatgaaat

SEQ ID NO: 970957 - DNA, 25 bp, Homo sapien
agctaggactagccaaatgaaatgt

SEQ ID NO: 970958 - DNA, 25 bp, Homo sapien
ggactagccaaatgaaatgtctctt

SEQ ID NO: 970959 - DNA, 25 bp, Homo sapien
taggactagccaaatgaaatgtctc

SEQ ID NO: 970960 - DNA, 25 bp, Homo sapien
tgttgcttttttgcactcgtgtcca

SEQ ID NO: 970961 - DNA, 25 bp, Homo sapien
ctcgtgtccacttttccggcttttg

SEQ ID NO: 970962 - DNA, 25 bp, Homo sapien
cacttcggttccagcaggtccttgg

SEQ ID NO: 970963 - DNA, 25 bp, Homo sapien
cacataacaacatgcacctgggggc

SEQ ID NO: 970964 - DNA, 25 bp, Homo sapien
tattcagtgtcaaagcatcttaact

SEQ ID NO: 970965 - DNA, 25 bp, Homo sapien
atctatatccacttaggtacaaaac

SEQ ID NO: 970966 - DNA, 25 bp, Homo sapien
tattatcagttgtgctactagaaat

SEQ ID NO: 970967 - DNA, 25 bp, Homo sapien
agttatctatatccacttaggtaca

SEQ ID NO: 970968 - DNA, 25 bp, Homo sapien
tatatacatgatgctaccaaatggc

SEQ ID NO: 970969 - DNA, 25 bp, Homo sapien
aaaaattgaatagtggtcccgcact

SEQ ID NO: 970970 - DNA, 25 bp, Homo sapien
caaatggcaatgtaaccactaagag

SEQ ID NO: 970971 - DNA, 25 bp, Homo sapien
cattctagtcattccccatcaagtg

SEQ ID NO: 970972 - DNA, 25 bp, Homo sapien
ccaattcacttcttttgagttgttg

SEQ ID NO: 970973 - DNA, 25 bp, Homo sapien
tctaggtgttcatttttgtgtaagt

SEQ ID NO: 970974 - DNA, 25 bp, Homo sapien
tgtgtaagttccaattcacttcttt

SEQ ID NO: 970975 - DNA, 25 bp, Homo sapien
catttttgtgtaagttccaattcac

SEQ ID NO: 970976 - DNA, 25 bp, Homo sapien
tgaaacacccaactcagtctttgat

SEQ ID NO: 970977 - DNA, 25 bp, Homo sapien
tgggaacactgggtgactttacttc

SEQ ID NO: 970978 - DNA, 25 bp, Homo sapien
ggtgactttacttctaggaacagga

SEQ ID NO: 970979 - DNA, 25 bp, Homo sapien
tgctgcattcagtagtttgatggct

SEQ ID NO: 970980 - DNA, 25 bp, Homo sapien
gttaattaatgccatggcccagagg

SEQ ID NO: 970981 - DNA, 25 bp, Homo sapien
tcagtgaatcaagtgctaaggcgtc

SEQ ID NO: 970982 - DNA, 25 bp, Homo sapien
tgatttgcccacagtgaacggagtg

SEQ ID NO: 970983 - DNA, 25 bp, Homo sapien
caaaatgggacttggtcatgggcct

SEQ ID NO: 970984 - DNA, 25 bp, Homo sapien
aattcttgggtcctagagactggcg

SEQ ID NO: 970985 - DNA, 25 bp, Homo sapien
gggatgggccctagactgttttcca

SEQ ID NO: 970986 - DNA, 25 bp, Homo sapien
ccagtgccgctaggtgatcagataa

SEQ ID NO: 970987 - DNA, 25 bp, Homo sapien
ccactgacgatgttccacaaggaat

SEQ ID NO: 970988 - DNA, 25 bp, Homo sapien
atcaatcaacatggtttggtgaaca

SEQ ID NO: 970989 - DNA, 25 bp, Homo sapien
tgttctgccctggatgtgaatcaac

SEQ ID NO: 970990 - DNA, 25 bp, Homo sapien
aaatttgcaggccattctaagtagc

SEQ ID NO: 970991 - DNA, 25 bp, Homo sapien
ggagatctcaacagacacccaaaat

SEQ ID NO: 970992 - DNA, 25 bp, Homo sapien
tagccctctaggttatcggattgaa

SEQ ID NO: 970993 - DNA, 25 bp, Homo sapien
ttgctgaaagtacagggttgtttcc

SEQ ID NO: 970994 - DNA, 25 bp, Homo sapien
attattaatagttgctgaaagtaca

SEQ ID NO: 970995 - DNA, 25 bp, Homo sapien
gggttgtttccagaactatcaaaca

SEQ ID NO: 970996 - DNA, 25 bp, Homo sapien
taatagttgctgaaagtacagggtt

SEQ ID NO: 970997 - DNA, 25 bp, Homo sapien
gatccaaattcaacgtcagtgatag

SEQ ID NO: 970998 - DNA, 25 bp, Homo sapien
gatctgcttcgtcatctgaacccag

SEQ ID NO: 970999 - DNA, 25 bp, Homo sapien
gctggagcacatgctctgaagttcc

SEQ ID NO: 971000 - DNA, 25 bp, Homo sapien
gatatcagactcagacttgctggag

SEQ ID NO: 971001 - DNA, 25 bp, Homo sapien
tcctgttacaattcagctgtgatat

SEQ ID NO: 971002 - DNA, 25 bp, Homo sapien
gctgtgatatagtcttatttttcat

SEQ ID NO: 971003 - DNA, 25 bp, Homo sapien
agctgtgatatagtcttatttttca

SEQ ID NO: 971004 - DNA, 25 bp, Homo sapien
cctgttacaattcagctgtgatata

SEQ ID NO: 971005 - DNA, 25 bp, Homo sapien
gaagcggccagacttcctgcgagga

SEQ ID NO: 971006 - DNA, 25 bp, Homo sapien
cctgcgaggactggtgttcaccttt

SEQ ID NO: 971007 - DNA, 25 bp, Homo sapien
tcagtgcttaggtctggcttattcc

SEQ ID NO: 971008 - DNA, 25 bp, Homo sapien
gaaatcagctgtatgctggtctagc

SEQ ID NO: 971009 - DNA, 25 bp, Homo sapien
gggacagccatgcagtacagcttta

SEQ ID NO: 971010 - DNA, 25 bp, Homo sapien
gcttcttgaactctgggtgcgatga

SEQ ID NO: 971011 - DNA, 25 bp, Homo sapien
ttagcagttgtctgcccaaagccag

SEQ ID NO: 971012 - DNA, 25 bp, Homo sapien
tatttagcaagatgctgagagcagc

SEQ ID NO: 971013 - DNA, 25 bp, Homo sapien
tcccaccaattagctgttataaaaa

SEQ ID NO: 971014 - DNA, 25 bp, Homo sapien
tagacttctgcccatggcaccagaa

SEQ ID NO: 971015 - DNA, 25 bp, Homo sapien
tatatgtctgttctcataagatgct

SEQ ID NO: 971016 - DNA, 25 bp, Homo sapien
ctggagttcggtggcttaatcaaag

SEQ ID NO: 971017 - DNA, 25 bp, Homo sapien
agctgacgccagacggacagagccc

SEQ ID NO: 971018 - DNA, 25 bp, Homo sapien
caatcttgcacacaggatcgcaggg

SEQ ID NO: 971019 - DNA, 25 bp, Homo sapien
ggacagagcccagtcgacaatcttg

SEQ ID NO: 971020 - DNA, 25 bp, Homo sapien
ggcatgcccaggaactacaggacaa

SEQ ID NO: 971021 - DNA, 25 bp, Homo sapien
tccttgcatgggctcgccatcccac

SEQ ID NO: 971022 - DNA, 25 bp, Homo sapien
agtccttgcatgggctcgccatccc

SEQ ID NO: 971023 - DNA, 25 bp, Homo sapien
tattcacaactttccttcgtaagaa

SEQ ID NO: 971024 - DNA, 25 bp, Homo sapien
gcagtccttgcatgggctcgccatc

SEQ ID NO: 971025 - DNA, 25 bp, Homo sapien
cagctgcacccagcggaaatgctgc

SEQ ID NO: 971026 - DNA, 25 bp, Homo sapien
ggttcccatcagaaagcagttctca

SEQ ID NO: 971027 - DNA, 25 bp, Homo sapien
aaagtaataacattcggacagtcca

SEQ ID NO: 971028 - DNA, 25 bp, Homo sapien
gagacaggccttggcgatggttccc

SEQ ID NO: 971029 - DNA, 25 bp, Homo sapien
gggctttcagtgctgcgattttcaa

SEQ ID NO: 971030 - DNA, 25 bp, Homo sapien
aaaagtccctcaataactccgacag

SEQ ID NO: 971031 - DNA, 25 bp, Homo sapien
gattttcaagaggtgccaaaaagtc

SEQ ID NO: 971032 - DNA, 25 bp, Homo sapien
ctgggagattgtttcactgggatca

SEQ ID NO: 971033 - DNA, 25 bp, Homo sapien
cccatgttacagctgcaggttcctt

SEQ ID NO: 971034 - DNA, 25 bp, Homo sapien
gctctgtgccacttcaaaacgctat

SEQ ID NO: 971035 - DNA, 25 bp, Homo sapien
gctatttctaaaaccagtctgctct

SEQ ID NO: 971036 - DNA, 25 bp, Homo sapien
ctttgtgaggctcagggctacatcc

SEQ ID NO: 971037 - DNA, 25 bp, Homo sapien
aactttataggctctctcagccctg

SEQ ID NO: 971038 - DNA, 25 bp, Homo sapien
gaacaggtctagtagctgttccttg

SEQ ID NO: 971039 - DNA, 25 bp, Homo sapien
tgaacaggtctagtagctgttcctt

SEQ ID NO: 971040 - DNA, 25 bp, Homo sapien
aacaggtctagtagctgttccttgg

SEQ ID NO: 971041 - DNA, 25 bp, Homo sapien
cttgcaagcttccttctgggccgtg

SEQ ID NO: 971042 - DNA, 25 bp, Homo sapien
ctgggccgtggaaaatgacattatg

SEQ ID NO: 971043 - DNA, 25 bp, Homo sapien
tactatgtagtcttgcaagcttcct

SEQ ID NO: 971044 - DNA, 25 bp, Homo sapien
gagtgcaagctgatgtactatgtag

SEQ ID NO: 971045 - DNA, 25 bp, Homo sapien
tcatcgaaattaaggcagcaagcaa

SEQ ID NO: 971046 - DNA, 25 bp, Homo sapien
agacttgcacaatcctggcttcatc

SEQ ID NO: 971047 - DNA, 25 bp, Homo sapien
gattgatctcatacacatcagagac

SEQ ID NO: 971048 - DNA, 25 bp, Homo sapien
cacttgctagatgcatgactttgag

SEQ ID NO: 971049 - DNA, 25 bp, Homo sapien
cacactactgagacagccttcttga

SEQ ID NO: 971050 - DNA, 25 bp, Homo sapien
ggcataagtcacactactgagacag

SEQ ID NO: 971051 - DNA, 25 bp, Homo sapien
ctgcatcatctggagagggatcatg

SEQ ID NO: 971052 - DNA, 25 bp, Homo sapien
actactgagacagccttcttgagga

SEQ ID NO: 971053 - DNA, 25 bp, Homo sapien
cgtcaccttagttagggacatcctt

SEQ ID NO: 971054 - DNA, 25 bp, Homo sapien
tcaccttagttagggacatccttac

SEQ ID NO: 971055 - DNA, 25 bp, Homo sapien
acgtcaccttagttagggacatcct

SEQ ID NO: 971056 - DNA, 25 bp, Homo sapien
gtcaccttagttagggacatcctta

SEQ ID NO: 971057 - DNA, 25 bp, Homo sapien
tcctcataaagtcccacggggactg

SEQ ID NO: 971058 - DNA, 25 bp, Homo sapien
cggggactgcgcgaagctctgaccc

SEQ ID NO: 971059 - DNA, 25 bp, Homo sapien
tgacccactgaccacggcacatttc

SEQ ID NO: 971060 - DNA, 25 bp, Homo sapien
gtcccacggggactgcgcgaagctc

SEQ ID NO: 971061 - DNA, 25 bp, Homo sapien
tcacaagggtaaacatatgctctct

SEQ ID NO: 971062 - DNA, 25 bp, Homo sapien
tacggaacacatatagggccacaca

SEQ ID NO: 971063 - DNA, 25 bp, Homo sapien
ttcagagctttaattgtcaaaggca

SEQ ID NO: 971064 - DNA, 25 bp, Homo sapien
tgtcaagggaagcttatgagtggtt

SEQ ID NO: 971065 - DNA, 25 bp, Homo sapien
tgccacaagtaagctttgaatgtgc

SEQ ID NO: 971066 - DNA, 25 bp, Homo sapien
aatcaggttatgaaacccacaaaca

SEQ ID NO: 971067 - DNA, 25 bp, Homo sapien
aagtttttcagcaccggcagctgcc

SEQ ID NO: 971068 - DNA, 25 bp, Homo sapien
tcaatgaactaagaatcaggttatg

SEQ ID NO: 971069 - DNA, 25 bp, Homo sapien
tttctctccgtcataggactgctga

SEQ ID NO: 971070 - DNA, 25 bp, Homo sapien
ctctccgtcataggactgctgatac

SEQ ID NO: 971071 - DNA, 25 bp, Homo sapien
tctctccgtcataggactgctgata

SEQ ID NO: 971072 - DNA, 25 bp, Homo sapien
cactttctctccgtcataggactgc

SEQ ID NO: 971073 - DNA, 25 bp, Homo sapien
tccaagtcatcagaaccatagttgc

SEQ ID NO: 971074 - DNA, 25 bp, Homo sapien
tgcactgaggccgatgttggaatca

SEQ ID NO: 971075 - DNA, 25 bp, Homo sapien
gatggatcgtatgcttcttgcactg

SEQ ID NO: 971076 - DNA, 25 bp, Homo sapien
tgttattgcaagtcacgtcttccag

SEQ ID NO: 971077 - DNA, 25 bp, Homo sapien
tgttagaagagtaaaagaattagga

SEQ ID NO: 971078 - DNA, 25 bp, Homo sapien
ctgttagaagagtaaaagaattagg

SEQ ID NO: 971079 - DNA, 25 bp, Homo sapien
acctcagcacccatggagcagacaa

SEQ ID NO: 971080 - DNA, 25 bp, Homo sapien
atgcctgaccatacaacattatttt

SEQ ID NO: 971081 - DNA, 25 bp, Homo sapien
gcacccatggagcagacaacagttg

SEQ ID NO: 971082 - DNA, 25 bp, Homo sapien
tggagcagacaacagttgggactac

SEQ ID NO: 971083 - DNA, 25 bp, Homo sapien
tatcccagccatgccaatatgcttc

SEQ ID NO: 971084 - DNA, 25 bp, Homo sapien
tgtttccagactctctataggttga

SEQ ID NO: 971085 - DNA, 25 bp, Homo sapien
tgcccaaaacatcaattgcgctgtc

SEQ ID NO: 971086 - DNA, 25 bp, Homo sapien
gccaatgtaaggtcaaaactactga

SEQ ID NO: 971087 - DNA, 25 bp, Homo sapien
cagtccgattgcacttgtctctcct

SEQ ID NO: 971088 - DNA, 25 bp, Homo sapien
agccctccgtgcctacacaagattt

SEQ ID NO: 971089 - DNA, 25 bp, Homo sapien
tggcaacatcatgcacagtccgatt

SEQ ID NO: 971090 - DNA, 25 bp, Homo sapien
caaatgcttgcagtcatcagtggca

SEQ ID NO: 971091 - DNA, 25 bp, Homo sapien
aatcgtagcccttacattcagcatg

SEQ ID NO: 971092 - DNA, 25 bp, Homo sapien
caaccaggagctctaaatacacatc

SEQ ID NO: 971093 - DNA, 25 bp, Homo sapien
acatctttagctatctccttctgga

SEQ ID NO: 971094 - DNA, 25 bp, Homo sapien
tccttctggatgaacaaatcgtagc

SEQ ID NO: 971095 - DNA, 25 bp, Homo sapien
agctgcatgatgaggccagctgcta

SEQ ID NO: 971096 - DNA, 25 bp, Homo sapien
gatgaggccagctgctaccagacac

SEQ ID NO: 971097 - DNA, 25 bp, Homo sapien
atgatgaggccagctgctaccagac

SEQ ID NO: 971098 - DNA, 25 bp, Homo sapien
gcatgatgaggccagctgctaccag

SEQ ID NO: 971099 - DNA, 25 bp, Homo sapien
cacattaccagtgtccacagctgcg

SEQ ID NO: 971100 - DNA, 25 bp, Homo sapien
caaagacacttgactcggactcctc

SEQ ID NO: 971101 - DNA, 25 bp, Homo sapien
ctttggaagcagcaatgtgggcagc

SEQ ID NO: 971102 - DNA, 25 bp, Homo sapien
gaagcttgaggctgtccacattacc

SEQ ID NO: 971103 - DNA, 25 bp, Homo sapien
caggtatagaggtgtctgtcctcca

SEQ ID NO: 971104 - DNA, 25 bp, Homo sapien
tttttacacttcgattggttccagc

SEQ ID NO: 971105 - DNA, 25 bp, Homo sapien
ttccaacaagagtttaatacattct

SEQ ID NO: 971106 - DNA, 25 bp, Homo sapien
catcagcagcatgattaatgttagc

SEQ ID NO: 971107 - DNA, 25 bp, Homo sapien
gcactcagcagcaatctcacacagt

SEQ ID NO: 971108 - DNA, 25 bp, Homo sapien
tgcactcagcagcaatctcacacag

SEQ ID NO: 971109 - DNA, 25 bp, Homo sapien
acacaagggtgtgaagccattttta

SEQ ID NO: 971110 - DNA, 25 bp, Homo sapien
ctgcactcagcagcaatctcacaca

SEQ ID NO: 971111 - DNA, 25 bp, Homo sapien
taagcagcattgataataaagtgac

SEQ ID NO: 971112 - DNA, 25 bp, Homo sapien
cacaggagtaattaatgtccagtcc

SEQ ID NO: 971113 - DNA, 25 bp, Homo sapien
tggccatcttcacaggagtaattaa

SEQ ID NO: 971114 - DNA, 25 bp, Homo sapien
tgtccagtccttcttcattaagcag

SEQ ID NO: 971115 - DNA, 25 bp, Homo sapien
gcaggaccaccactcattagcaaag

SEQ ID NO: 971116 - DNA, 25 bp, Homo sapien
aggaccaccactcattagcaaaggg

SEQ ID NO: 971117 - DNA, 25 bp, Homo sapien
cactcattagcaaaggggttaggga

SEQ ID NO: 971118 - DNA, 25 bp, Homo sapien
accactcattagcaaaggggttagg

SEQ ID NO: 971119 - DNA, 25 bp, Homo sapien
gaccctcgttagagagtaggagcaa

SEQ ID NO: 971120 - DNA, 25 bp, Homo sapien
catatgaacatgtgtccctagagga

SEQ ID NO: 971121 - DNA, 25 bp, Homo sapien
ggacaagagacagatattacccatt

SEQ ID NO: 971122 - DNA, 25 bp, Homo sapien
tagtcatgagtcttgcacaggtaag

SEQ ID NO: 971123 - DNA, 25 bp, Homo sapien
tgcatgtcctttcttagcagtggaa

SEQ ID NO: 971124 - DNA, 25 bp, Homo sapien
ctttcttagcagtggaatacaaggc

SEQ ID NO: 971125 - DNA, 25 bp, Homo sapien
ttcttagcagtggaatacaaggcag

SEQ ID NO: 971126 - DNA, 25 bp, Homo sapien
tgtcctttcttagcagtggaataca

SEQ ID NO: 971127 - DNA, 25 bp, Homo sapien
agagaaattataaacacgaaggcat

SEQ ID NO: 971128 - DNA, 25 bp, Homo sapien
gaaattataaacacgaaggcataaa

SEQ ID NO: 971129 - DNA, 25 bp, Homo sapien
taaacacgaaggcataaaacctcga

SEQ ID NO: 971130 - DNA, 25 bp, Homo sapien
tataaacacgaaggcataaaacctc

SEQ ID NO: 971131 - DNA, 25 bp, Homo sapien
catgagactatactgttcatctgaa

SEQ ID NO: 971132 - DNA, 25 bp, Homo sapien
cactcaagggttttcttacacagaa

SEQ ID NO: 971133 - DNA, 25 bp, Homo sapien
aattcccgacaatcataaaaatggt

SEQ ID NO: 971134 - DNA, 25 bp, Homo sapien
tggaaatattcaattgcagctgtaa

SEQ ID NO: 971135 - DNA, 25 bp, Homo sapien
caggtatgattactgcagccagcaa

SEQ ID NO: 971136 - DNA, 25 bp, Homo sapien
tctctagggtgatacttagaaaggg

SEQ ID NO: 971137 - DNA, 25 bp, Homo sapien
tggactaatcctgccttactatact

SEQ ID NO: 971138 - DNA, 25 bp, Homo sapien
tgaaaaagctaatggctcagaggga

SEQ ID NO: 971139 - DNA, 25 bp, Homo sapien
gagtagcaaaattcctctctgaggg

SEQ ID NO: 971140 - DNA, 25 bp, Homo sapien
tatggataaagcctctcaaagacct

SEQ ID NO: 971141 - DNA, 25 bp, Homo sapien
gcttctctgccgaaaccaaagggca

SEQ ID NO: 971142 - DNA, 25 bp, Homo sapien
ggcaaagcctcaaggtctcaaagta

SEQ ID NO: 971143 - DNA, 25 bp, Homo sapien
gatgaatcaccataccctggagcct

SEQ ID NO: 971144 - DNA, 25 bp, Homo sapien
actgtctgatcatgacccactgagg

SEQ ID NO: 971145 - DNA, 25 bp, Homo sapien
tatgttaaccatctgtgcccgagtg

SEQ ID NO: 971146 - DNA, 25 bp, Homo sapien
aagcacttagcatagcgaaaccgca

SEQ ID NO: 971147 - DNA, 25 bp, Homo sapien
ttaaaaagcgtataacatttcaatc

SEQ ID NO: 971148 - DNA, 25 bp, Homo sapien
taaaaagcgtataacatttcaatcc

SEQ ID NO: 971149 - DNA, 25 bp, Homo sapien
aaaagcgtataacatttcaatccct

SEQ ID NO: 971150 - DNA, 25 bp, Homo sapien
tgaggcacctggtctacaggatgag

SEQ ID NO: 971151 - DNA, 25 bp, Homo sapien
aaaggcaatggtggtaggaatgaca

SEQ ID NO: 971152 - DNA, 25 bp, Homo sapien
aacatgcaggttggttcagtccggg

SEQ ID NO: 971153 - DNA, 25 bp, Homo sapien
aggatgaggcactaacggggtttat

SEQ ID NO: 971154 - DNA, 25 bp, Homo sapien
tcttcccggttcagcttggcacgaa

SEQ ID NO: 971155 - DNA, 25 bp, Homo sapien
gaagcgccaatcaagtcaccatagg

SEQ ID NO: 971156 - DNA, 25 bp, Homo sapien
caaactggaaggagtcgaagccaca

SEQ ID NO: 971157 - DNA, 25 bp, Homo sapien
cagtttggccattacgtcttcgagc

SEQ ID NO: 971158 - DNA, 25 bp, Homo sapien
cttagcttcgctggatgcccggagt

SEQ ID NO: 971159 - DNA, 25 bp, Homo sapien
ccgtagcgctcctgcagtaagccat

SEQ ID NO: 971160 - DNA, 25 bp, Homo sapien
tgttctctctgcatgggattcccac

SEQ ID NO: 971161 - DNA, 25 bp, Homo sapien
gatcctgcttactcccttagcttcg

SEQ ID NO: 971162 - DNA, 25 bp, Homo sapien
taaggctcgttgcatccctgtcctc

SEQ ID NO: 971163 - DNA, 25 bp, Homo sapien
tgccacaccacaaaatactcttacg

SEQ ID NO: 971164 - DNA, 25 bp, Homo sapien
gaaagcagagtgcatatctgccaca

SEQ ID NO: 971165 - DNA, 25 bp, Homo sapien
catactcttgattgctctcccaaaa

SEQ ID NO: 971166 - DNA, 25 bp, Homo sapien
tcccccttgacaatggctctgcaat

SEQ ID NO: 971167 - DNA, 25 bp, Homo sapien
ccccttgacaatggctctgcaatgc

SEQ ID NO: 971168 - DNA, 25 bp, Homo sapien
ccttgacaatggctctgcaatgctc

SEQ ID NO: 971169 - DNA, 25 bp, Homo sapien
actcccccttgacaatggctctgca

SEQ ID NO: 971170 - DNA, 25 bp, Homo sapien
caatgaagttggctataaaggactc

SEQ ID NO: 971171 - DNA, 25 bp, Homo sapien
ggacccataggacagaaacaatttc

SEQ ID NO: 971172 - DNA, 25 bp, Homo sapien
aaaatgtagcactccctgtcagaga

SEQ ID NO: 971173 - DNA, 25 bp, Homo sapien
ccttcactgagacgacacagccaat

SEQ ID NO: 971174 - DNA, 25 bp, Homo sapien
gattaaatctcccataccgttcctg

SEQ ID NO: 971175 - DNA, 25 bp, Homo sapien
gccaggaacgggtcatttagattaa

SEQ ID NO: 971176 - DNA, 25 bp, Homo sapien
cctgcttcatagtctctctggagtg

SEQ ID NO: 971177 - DNA, 25 bp, Homo sapien
agctgtgcggacatcctttcttgca

SEQ ID NO: 971178 - DNA, 25 bp, Homo sapien
aggtgtggaaattgtcatgccagga

SEQ ID NO: 971179 - DNA, 25 bp, Homo sapien
tctggaggtgtggaaattgtcatgc

SEQ ID NO: 971180 - DNA, 25 bp, Homo sapien
catcataatctggaggtgtggaaat

SEQ ID NO: 971181 - DNA, 25 bp, Homo sapien
catagacatcataatctggaggtgt

SEQ ID NO: 971182 - DNA, 25 bp, Homo sapien
tcaagagtatgcaagagcaagcctg

SEQ ID NO: 971183 - DNA, 25 bp, Homo sapien
tatcactttaatcctttccactggg

SEQ ID NO: 971184 - DNA, 25 bp, Homo sapien
tctggtaaaaacatgcttaggcggt

SEQ ID NO: 971185 - DNA, 25 bp, Homo sapien
ggcatcagctggtatattctgggca

SEQ ID NO: 971186 - DNA, 25 bp, Homo sapien
ccaggagtccctgaatcatgtggat

SEQ ID NO: 971187 - DNA, 25 bp, Homo sapien
catggctatctaaagacctaagtcc

SEQ ID NO: 971188 - DNA, 25 bp, Homo sapien
tcatgactacacaaagatctcagca

SEQ ID NO: 971189 - DNA, 25 bp, Homo sapien
tccatccagtgtagagctcttaaca

SEQ ID NO: 971190 - DNA, 25 bp, Homo sapien
attttggaatttgcaatacaatacc

SEQ ID NO: 971191 - DNA, 25 bp, Homo sapien
ttttggaatttgcaatacaatacct

SEQ ID NO: 971192 - DNA, 25 bp, Homo sapien
tgctgtttttattcctgtaaaccac

SEQ ID NO: 971193 - DNA, 25 bp, Homo sapien
tcccattttgctgtttttattcctg

SEQ ID NO: 971194 - DNA, 25 bp, Homo sapien
ttattcctgtaaaccacttcaattc

SEQ ID NO: 971195 - DNA, 25 bp, Homo sapien
cattttgctgtttttattcctgtaa

SEQ ID NO: 971196 - DNA, 25 bp, Homo sapien
cataaatgcttcagcttggcattca

SEQ ID NO: 971197 - DNA, 25 bp, Homo sapien
catcagtccatacccctgtgccttc

SEQ ID NO: 971198 - DNA, 25 bp, Homo sapien
ggatagagcccataggaactcctac

SEQ ID NO: 971199 - DNA, 25 bp, Homo sapien
ataggaactcctactccatcagtcc

SEQ ID NO: 971200 - DNA, 25 bp, Homo sapien
tactttttaatgcatgagtttctaa

SEQ ID NO: 971201 - DNA, 25 bp, Homo sapien
tatctattaccagcaatatttttta

SEQ ID NO: 971202 - DNA, 25 bp, Homo sapien
cactgccctcacatacatgtaggat

SEQ ID NO: 971203 - DNA, 25 bp, Homo sapien
aattaacactttgaaggtatggata

SEQ ID NO: 971204 - DNA, 25 bp, Homo sapien
agctccccttccatcacgctgagga

SEQ ID NO: 971205 - DNA, 25 bp, Homo sapien
ccgcagctcggatttactgagagta

SEQ ID NO: 971206 - DNA, 25 bp, Homo sapien
cctcgatgacaaggtctctggcctc

SEQ ID NO: 971207 - DNA, 25 bp, Homo sapien
cgcagggcctcgatgacaaggtctc

SEQ ID NO: 971208 - DNA, 25 bp, Homo sapien
tgtaacacataaaaaaataaggcca

SEQ ID NO: 971209 - DNA, 25 bp, Homo sapien
taacacataaaaaaataaggccatg

SEQ ID NO: 971210 - DNA, 25 bp, Homo sapien
aacacataaaaaaataaggccatga

SEQ ID NO: 971211 - DNA, 25 bp, Homo sapien
cacataaaaaaataaggccatgaaa

SEQ ID NO: 971212 - DNA, 25 bp, Homo sapien
aattggctacgaaagttcttttcag

SEQ ID NO: 971213 - DNA, 25 bp, Homo sapien
gcaattggctacgaaagttcttttc

SEQ ID NO: 971214 - DNA, 25 bp, Homo sapien
tagcgcaattggctacgaaagttct

SEQ ID NO: 971215 - DNA, 25 bp, Homo sapien
gcgcaattggctacgaaagttcttt

SEQ ID NO: 971216 - DNA, 25 bp, Homo sapien
cttgttaacacagaaatctgcctgg

SEQ ID NO: 971217 - DNA, 25 bp, Homo sapien
gttaacacagaaatctgcctggcgt

SEQ ID NO: 971218 - DNA, 25 bp, Homo sapien
tgttaacacagaaatctgcctggcg

SEQ ID NO: 971219 - DNA, 25 bp, Homo sapien
ttaacacagaaatctgcctggcgtc

SEQ ID NO: 971220 - DNA, 25 bp, Homo sapien
ctggacacggccctctcccagtggg

SEQ ID NO: 971221 - DNA, 25 bp, Homo sapien
gcagcagcgcccacatctggacacg

SEQ ID NO: 971222 - DNA, 25 bp, Homo sapien
ctcccagtgggcctcccgaaggcac

SEQ ID NO: 971223 - DNA, 25 bp, Homo sapien
aaggcacaggaccagatgcacacaa

SEQ ID NO: 971224 - DNA, 25 bp, Homo sapien
tcgcactggacgcagacagggagct

SEQ ID NO: 971225 - DNA, 25 bp, Homo sapien
tgctctcccgggtccgctgagcggt

SEQ ID NO: 971226 - DNA, 25 bp, Homo sapien
aaattcgccaggaaacacgtcccag

SEQ ID NO: 971227 - DNA, 25 bp, Homo sapien
acgcgcgcagcgagaggtgaacaat

SEQ ID NO: 971228 - DNA, 25 bp, Homo sapien
gggcccgggacaagtcgggctcgca

SEQ ID NO: 971229 - DNA, 25 bp, Homo sapien
aagtcgggctcgcagctcgcgccgt

SEQ ID NO: 971230 - DNA, 25 bp, Homo sapien
cccgggacaagtcgggctcgcagct

SEQ ID NO: 971231 - DNA, 25 bp, Homo sapien
gacaagtcgggctcgcagctcgcgc

SEQ ID NO: 971232 - DNA, 25 bp, Homo sapien
cttcctgctctagcggatccgaatg

SEQ ID NO: 971233 - DNA, 25 bp, Homo sapien
ttcctgctctagcggatccgaatgc

SEQ ID NO: 971234 - DNA, 25 bp, Homo sapien
cgggcggcacttaacccgctgctgt

SEQ ID NO: 971235 - DNA, 25 bp, Homo sapien
gggcggcacttaacccgctgctgtc

SEQ ID NO: 971236 - DNA, 25 bp, Homo sapien
cggactcagccgtctccgcgcgggc

SEQ ID NO: 971237 - DNA, 25 bp, Homo sapien
gctccggactcagccgtctccgcgc

SEQ ID NO: 971238 - DNA, 25 bp, Homo sapien
ttctctcacagctggagcaggttcc

SEQ ID NO: 971239 - DNA, 25 bp, Homo sapien
gcttctctcacagctggagcaggtt

SEQ ID NO: 971240 - DNA, 25 bp, Homo sapien
agaaggagaagcttctctcacagct

SEQ ID NO: 971241 - DNA, 25 bp, Homo sapien
cacagatctccaagaaggagaagct

SEQ ID NO: 971242 - DNA, 25 bp, Homo sapien
caaattccaggaataaacagctctg

SEQ ID NO: 971243 - DNA, 25 bp, Homo sapien
catcagcatagatgtgtgggtcagc

SEQ ID NO: 971244 - DNA, 25 bp, Homo sapien
cactgaccatcagcatagatgtgtg

SEQ ID NO: 971245 - DNA, 25 bp, Homo sapien
caacagcacactgaccatcagcata

SEQ ID NO: 971246 - DNA, 25 bp, Homo sapien
tgttgaccaatgtaggagaaacaga

SEQ ID NO: 971247 - DNA, 25 bp, Homo sapien
ttgaccaatgtaggagaaacagaag

SEQ ID NO: 971248 - DNA, 25 bp, Homo sapien
tgaaattgttgaccaatgtaggaga

SEQ ID NO: 971249 - DNA, 25 bp, Homo sapien
aattgttgaccaatgtaggagaaac

SEQ ID NO: 971250 - DNA, 25 bp, Homo sapien
agatatcttgtcaataacttgtgtc

SEQ ID NO: 971251 - DNA, 25 bp, Homo sapien
ataacttgtgtcattagaaaccaac

SEQ ID NO: 971252 - DNA, 25 bp, Homo sapien
acttgtgtcattagaaaccaaccaa

SEQ ID NO: 971253 - DNA, 25 bp, Homo sapien
taacttgtgtcattagaaaccaacc

SEQ ID NO: 971254 - DNA, 25 bp, Homo sapien
aaatttcaacttcatggatcttcat

SEQ ID NO: 971255 - DNA, 25 bp, Homo sapien
gaaatttcaacttcatggatcttca

SEQ ID NO: 971256 - DNA, 25 bp, Homo sapien
ttttggtttcttggtgactcttcag

SEQ ID NO: 971257 - DNA, 25 bp, Homo sapien
tcttcagtggtgctacccatcgtta

SEQ ID NO: 971258 - DNA, 25 bp, Homo sapien
ctgatgtcagagcaagatgtttgaa

SEQ ID NO: 971259 - DNA, 25 bp, Homo sapien
tatgggacttgatttggtctctgtc

SEQ ID NO: 971260 - DNA, 25 bp, Homo sapien
ccccttctcttgggagactccttgt

SEQ ID NO: 971261 - DNA, 25 bp, Homo sapien
ccgtggccccttctcttgggagact

SEQ ID NO: 971262 - DNA, 25 bp, Homo sapien
tggccccttctcttgggagactcct

SEQ ID NO: 971263 - DNA, 25 bp, Homo sapien
cgtggccccttctcttgggagactc

SEQ ID NO: 971264 - DNA, 25 bp, Homo sapien
aattgttaggcaatacaacaaatgc

SEQ ID NO: 971265 - DNA, 25 bp, Homo sapien
cagctgtatacgagagtgtttgaaa

SEQ ID NO: 971266 - DNA, 25 bp, Homo sapien
ctgctcctggccctgtttggtgcac

SEQ ID NO: 971267 - DNA, 25 bp, Homo sapien
cccaaagcagctgtatacgagagtg

SEQ ID NO: 971268 - DNA, 25 bp, Homo sapien
tcctgaaggcaaatgccccttgcag

SEQ ID NO: 971269 - DNA, 25 bp, Homo sapien
tcttgaccactaagtgtgccactgt

SEQ ID NO: 971270 - DNA, 25 bp, Homo sapien
cgagagctatcagaccactcctgaa

SEQ ID NO: 971271 - DNA, 25 bp, Homo sapien
gtgtgccactgtcctcaccaacgag

SEQ ID NO: 971272 - DNA, 25 bp, Homo sapien
cagagtgacttaactttggcctaaa

SEQ ID NO: 971273 - DNA, 25 bp, Homo sapien
aagctcccctgatcacacttgctgg

SEQ ID NO: 971274 - DNA, 25 bp, Homo sapien
tttattaggtcagtctcaattctgc

SEQ ID NO: 971275 - DNA, 25 bp, Homo sapien
gaatcattagaagtctgcaaaccat

SEQ ID NO: 971276 - DNA, 25 bp, Homo sapien
ttaaactatgtttagctagcctccc

SEQ ID NO: 971277 - DNA, 25 bp, Homo sapien
ggctcaaagtccattgactcctaaa

SEQ ID NO: 971278 - DNA, 25 bp, Homo sapien
gaagaagagcaatgcctgctttcat

SEQ ID NO: 971279 - DNA, 25 bp, Homo sapien
caagatgagtagcttaacaatgcac

SEQ ID NO: 971280 - DNA, 25 bp, Homo sapien
ctctatctcccttaagttcttctct

SEQ ID NO: 971281 - DNA, 25 bp, Homo sapien
tctctatctcccttaagttcttctc

SEQ ID NO: 971282 - DNA, 25 bp, Homo sapien
tgaggaccaaagtggctgggcagaa

SEQ ID NO: 971283 - DNA, 25 bp, Homo sapien
accaaagtggctgggcagaattcca

SEQ ID NO: 971284 - DNA, 25 bp, Homo sapien
catgaggaccaaagtggctgggcag

SEQ ID NO: 971285 - DNA, 25 bp, Homo sapien
tccatgaggaccaaagtggctgggc

SEQ ID NO: 971286 - DNA, 25 bp, Homo sapien
ctcagctcaacctgaggctctgagc

SEQ ID NO: 971287 - DNA, 25 bp, Homo sapien
taccctcatgaagggtcatgtgatc

SEQ ID NO: 971288 - DNA, 25 bp, Homo sapien
tcagctcaacctgaggctctgagct

SEQ ID NO: 971289 - DNA, 25 bp, Homo sapien
ccctttctaccctcatgaagggtca

SEQ ID NO: 971290 - DNA, 25 bp, Homo sapien
cctgatagtggccatgtactggaca

SEQ ID NO: 971291 - DNA, 25 bp, Homo sapien
tcatcataagttgggtaccatgccc

SEQ ID NO: 971292 - DNA, 25 bp, Homo sapien
tgtacgcggctctgttgcacagtcc

SEQ ID NO: 971293 - DNA, 25 bp, Homo sapien
cccagtcatcatgttcagtctccaa

SEQ ID NO: 971294 - DNA, 25 bp, Homo sapien
ggtcatcacttggaagtgtaacttt

SEQ ID NO: 971295 - DNA, 25 bp, Homo sapien
tctgtccactgagaatcaacttctg

SEQ ID NO: 971296 - DNA, 25 bp, Homo sapien
catctggtcatcacttggaagtgta

SEQ ID NO: 971297 - DNA, 25 bp, Homo sapien
gaatcaacttctgtggcacttgcag

SEQ ID NO: 971298 - DNA, 25 bp, Homo sapien
ctgtagttgaaggtccaagtgaccc

SEQ ID NO: 971299 - DNA, 25 bp, Homo sapien
tagttgaaggtccaagtgacccaaa

SEQ ID NO: 971300 - DNA, 25 bp, Homo sapien
tgtagttgaaggtccaagtgaccca

SEQ ID NO: 971301 - DNA, 25 bp, Homo sapien
tctgtagttgaaggtccaagtgacc

SEQ ID NO: 971302 - DNA, 25 bp, Homo sapien
ggttttcaagggatgaaggtacaga

SEQ ID NO: 971303 - DNA, 25 bp, Homo sapien
tggttttcaagggatgaaggtacag

SEQ ID NO: 971304 - DNA, 25 bp, Homo sapien
ttggttttcaagggatgaaggtaca

SEQ ID NO: 971305 - DNA, 25 bp, Homo sapien
gttttcaagggatgaaggtacagaa

SEQ ID NO: 971306 - DNA, 25 bp, Homo sapien
ggactgtggaactccaaatggagga

SEQ ID NO: 971307 - DNA, 25 bp, Homo sapien
gtgctctctgcctgaactaaagttc

SEQ ID NO: 971308 - DNA, 25 bp, Homo sapien
taaatctggaccttgaggactgtgg

SEQ ID NO: 971309 - DNA, 25 bp, Homo sapien
gacatccagtaaggtgtattctgcc

SEQ ID NO: 971310 - DNA, 25 bp, Homo sapien
tctgggtgaaggggttgcggctatg

SEQ ID NO: 971311 - DNA, 25 bp, Homo sapien
tggaagcccccgcttctgccagtgg

SEQ ID NO: 971312 - DNA, 25 bp, Homo sapien
gttctgggtgaaggggttgcggcta

SEQ ID NO: 971313 - DNA, 25 bp, Homo sapien
tgccagtggggcaaagggttctggg

SEQ ID NO: 971314 - DNA, 25 bp, Homo sapien
gggagtaggaatcaatgtttcaggc

SEQ ID NO: 971315 - DNA, 25 bp, Homo sapien
ggcctggtcttttcagtctgaaggt

SEQ ID NO: 971316 - DNA, 25 bp, Homo sapien
gagtaggaatcaatgtttcaggcct

SEQ ID NO: 971317 - DNA, 25 bp, Homo sapien
tgtttcaggcctggtcttttcagtc

SEQ ID NO: 971318 - DNA, 25 bp, Homo sapien
tcctccctagcaccatctggaaacc

SEQ ID NO: 971319 - DNA, 25 bp, Homo sapien
tccctagcaccatctggaaacctca

SEQ ID NO: 971320 - DNA, 25 bp, Homo sapien
ccctagcaccatctggaaacctcac

SEQ ID NO: 971321 - DNA, 25 bp, Homo sapien
cctccctagcaccatctggaaacct

SEQ ID NO: 971322 - DNA, 25 bp, Homo sapien
cctcagaatgcaaggtgcatccttc

SEQ ID NO: 971323 - DNA, 25 bp, Homo sapien
tcagaatgcaaggtgcatccttctc

SEQ ID NO: 971324 - DNA, 25 bp, Homo sapien
caccctcagaatgcaaggtgcatcc

SEQ ID NO: 971325 - DNA, 25 bp, Homo sapien
gaatgcaaggtgcatccttctccac

SEQ ID NO: 971326 - DNA, 25 bp, Homo sapien
tggatgggctctgatgcagaagaat

SEQ ID NO: 971327 - DNA, 25 bp, Homo sapien
ctggatgggctctgatgcagaagaa

SEQ ID NO: 971328 - DNA, 25 bp, Homo sapien
ctacatttcagtcctccgtgcaatc

SEQ ID NO: 971329 - DNA, 25 bp, Homo sapien
acatttcagtcctccgtgcaatcca

SEQ ID NO: 971330 - DNA, 25 bp, Homo sapien
catttcagtcctccgtgcaatccac

SEQ ID NO: 971331 - DNA, 25 bp, Homo sapien
tacatttcagtcctccgtgcaatcc

SEQ ID NO: 971332 - DNA, 25 bp, Homo sapien
tccctgatataagcaccatctcgtt

SEQ ID NO: 971333 - DNA, 25 bp, Homo sapien
gaaatatagatgaagcggttggagc

SEQ ID NO: 971334 - DNA, 25 bp, Homo sapien
ttgcttccctgatataagcaccatc

SEQ ID NO: 971335 - DNA, 25 bp, Homo sapien
taagcaccatctcgtttatgcctct

SEQ ID NO: 971336 - DNA, 25 bp, Homo sapien
tgtcttgtgtgttacaggtgtactc

SEQ ID NO: 971337 - DNA, 25 bp, Homo sapien
tgcagttgactaccaagaactggtt

SEQ ID NO: 971338 - DNA, 25 bp, Homo sapien
gtgatgaacatctacctctcctatg

SEQ ID NO: 971339 - DNA, 25 bp, Homo sapien
ccccactatctttgtgatgaacatc

SEQ ID NO: 971340 - DNA, 25 bp, Homo sapien
agttggctgagtgcgatgttcctga

SEQ ID NO: 971341 - DNA, 25 bp, Homo sapien
gagtgcgatgttcctgattactcat

SEQ ID NO: 971342 - DNA, 25 bp, Homo sapien
tttcttgtactctaaatcagttggc

SEQ ID NO: 971343 - DNA, 25 bp, Homo sapien
aaatcagttggctgagtgcgatgtt

SEQ ID NO: 971344 - DNA, 25 bp, Homo sapien
aataacatatagactccccccaact

SEQ ID NO: 971345 - DNA, 25 bp, Homo sapien
atagtcagttgtattctacaggtgg

SEQ ID NO: 971346 - DNA, 25 bp, Homo sapien
ataacatatagactccccccaactc

SEQ ID NO: 971347 - DNA, 25 bp, Homo sapien
tagtcagttgtattctacaggtggc

SEQ ID NO: 971348 - DNA, 25 bp, Homo sapien
tatgcttaggcatagcacaaagttg

SEQ ID NO: 971349 - DNA, 25 bp, Homo sapien
ggaatagttcctgtatgcttaggca

SEQ ID NO: 971350 - DNA, 25 bp, Homo sapien
gaagggccacaaacctgttcacagc

SEQ ID NO: 971351 - DNA, 25 bp, Homo sapien
cacaaagttgatgaggactatgaag

SEQ ID NO: 971352 - DNA, 25 bp, Homo sapien
ggcccctggaattgcactcatcttc

SEQ ID NO: 971353 - DNA, 25 bp, Homo sapien
tggaattgcactcatcttccaccat

SEQ ID NO: 971354 - DNA, 25 bp, Homo sapien
ctggaattgcactcatcttccacca

SEQ ID NO: 971355 - DNA, 25 bp, Homo sapien
ctgggcccctggaattgcactcatc

SEQ ID NO: 971356 - DNA, 25 bp, Homo sapien
cggcgataggccaaaccaagaggaa

SEQ ID NO: 971357 - DNA, 25 bp, Homo sapien
caaatgctacgagaagtaacaagta

SEQ ID NO: 971358 - DNA, 25 bp, Homo sapien
tacgagaagtaacaagtaccaagcc

SEQ ID NO: 971359 - DNA, 25 bp, Homo sapien
agaagtaacaagtaccaagccagca

SEQ ID NO: 971360 - DNA, 25 bp, Homo sapien
gacaaacaaatgctacgagaagtaa

SEQ ID NO: 971361 - DNA, 25 bp, Homo sapien
ctgtgacttcccttggctgaaccta

SEQ ID NO: 971362 - DNA, 25 bp, Homo sapien
ccttggctgaacctaataggaagcc

SEQ ID NO: 971363 - DNA, 25 bp, Homo sapien
gcagggtttagcatcctgtaatata

SEQ ID NO: 971364 - DNA, 25 bp, Homo sapien
gggatgcataatctgcagggtttag

SEQ ID NO: 971365 - DNA, 25 bp, Homo sapien
agggagctcacacaagtgggcagca

SEQ ID NO: 971366 - DNA, 25 bp, Homo sapien
tgtagggagctcacacaagtgggca

SEQ ID NO: 971367 - DNA, 25 bp, Homo sapien
ggtgtagggagctcacacaagtggg

SEQ ID NO: 971368 - DNA, 25 bp, Homo sapien
aagggtgtagggagctcacacaagt

SEQ ID NO: 971369 - DNA, 25 bp, Homo sapien
tacccacctgcctgcctgcccacct

SEQ ID NO: 971370 - DNA, 25 bp, Homo sapien
ccacctgcctgcctgcccacctgct

SEQ ID NO: 971371 - DNA, 25 bp, Homo sapien
cctgcctgcctgcccacctgcttgc

SEQ ID NO: 971372 - DNA, 25 bp, Homo sapien
ctacccacctgcctgcctgcccacc

SEQ ID NO: 971373 - DNA, 25 bp, Homo sapien
ctcatctttgctcttccctcctcac

SEQ ID NO: 971374 - DNA, 25 bp, Homo sapien
tctcctgccccctcatctttgctct

SEQ ID NO: 971375 - DNA, 25 bp, Homo sapien
ctgccccctcatctttgctcttccc

SEQ ID NO: 971376 - DNA, 25 bp, Homo sapien
cccctcatctttgctcttccctcct

SEQ ID NO: 971377 - DNA, 25 bp, Homo sapien
cagaaattccgatctggtcccagca

SEQ ID NO: 971378 - DNA, 25 bp, Homo sapien
ccgcaagtaactaatgtaaggtggt

SEQ ID NO: 971379 - DNA, 25 bp, Homo sapien
taagcaagtccagcgtttgatagga

SEQ ID NO: 971380 - DNA, 25 bp, Homo sapien
tttgataggaaatcacccagggtgg

SEQ ID NO: 971381 - DNA, 25 bp, Homo sapien
cactgggcaggacatcaaaagatct

SEQ ID NO: 971382 - DNA, 25 bp, Homo sapien
gtttctagcttcagtcaccggttca

SEQ ID NO: 971383 - DNA, 25 bp, Homo sapien
tataaaactcctattgtgacctctg

SEQ ID NO: 971384 - DNA, 25 bp, Homo sapien
caccggttcaactgtccagacatta

SEQ ID NO: 971385 - DNA, 25 bp, Homo sapien
ggcacctgggaatccaaggcattgt

SEQ ID NO: 971386 - DNA, 25 bp, Homo sapien
taaatgtcaccaatactctggaggc

SEQ ID NO: 971387 - DNA, 25 bp, Homo sapien
aatccatctagtaccttgctgccag

SEQ ID NO: 971388 - DNA, 25 bp, Homo sapien
tctcaatagttgtgataggcagcct

SEQ ID NO: 971389 - DNA, 25 bp, Homo sapien
catggagtagtttgcacatacctgt

SEQ ID NO: 971390 - DNA, 25 bp, Homo sapien
taaggactcagccaaagctaaggct

SEQ ID NO: 971391 - DNA, 25 bp, Homo sapien
cactgaccatgataggacagcacag

SEQ ID NO: 971392 - DNA, 25 bp, Homo sapien
tatcaaaaatgatgccacccactga

SEQ ID NO: 971393 - DNA, 25 bp, Homo sapien
tgatctattagagctcttccagcaa

SEQ ID NO: 971394 - DNA, 25 bp, Homo sapien
ccacttcattgctaccacctagata

SEQ ID NO: 971395 - DNA, 25 bp, Homo sapien
gcagcaccttcaatataaatccata

SEQ ID NO: 971396 - DNA, 25 bp, Homo sapien
tctaggttctggctacatgctgtat

SEQ ID NO: 971397 - DNA, 25 bp, Homo sapien
gactttggaccgcagacttttgagt

SEQ ID NO: 971398 - DNA, 25 bp, Homo sapien
gggtggaactgctcatgaccatggg

SEQ ID NO: 971399 - DNA, 25 bp, Homo sapien
gactgccccacaggattacagtttt

SEQ ID NO: 971400 - DNA, 25 bp, Homo sapien
cagttttgtattaggcctgtagccc

SEQ ID NO: 971401 - DNA, 25 bp, Homo sapien
tggagtgtgaactgccctgatattt

SEQ ID NO: 971402 - DNA, 25 bp, Homo sapien
ttgctggagtgtgaactgccctgat

SEQ ID NO: 971403 - DNA, 25 bp, Homo sapien
catattaagatattgcctcctcgtt

SEQ ID NO: 971404 - DNA, 25 bp, Homo sapien
gcctcctcgttttagagtcagaata

SEQ ID NO: 971405 - DNA, 25 bp, Homo sapien
tcttagcgtcatacagcactgctcc

SEQ ID NO: 971406 - DNA, 25 bp, Homo sapien
tattctcaattggtgcaaaaaggag

SEQ ID NO: 971407 - DNA, 25 bp, Homo sapien
gacccagagactttgagctccaatt

SEQ ID NO: 971408 - DNA, 25 bp, Homo sapien
gcactgctcccctcttatgtctatt

SEQ ID NO: 971409 - DNA, 25 bp, Homo sapien
tcttcctaacagaggaatgttgttc

SEQ ID NO: 971410 - DNA, 25 bp, Homo sapien
cagagatcttggtgattctgactca

SEQ ID NO: 971411 - DNA, 25 bp, Homo sapien
atattttgcctaaggatgtcttgca

SEQ ID NO: 971412 - DNA, 25 bp, Homo sapien
tttcccatcccacagttcatatgtt

SEQ ID NO: 971413 - DNA, 25 bp, Homo sapien
cagaatagaaggaaggtgcgagata

SEQ ID NO: 971414 - DNA, 25 bp, Homo sapien
cagaactcagagaaataagaagacc

SEQ ID NO: 971415 - DNA, 25 bp, Homo sapien
gcagcagatgcataaacactcagat

SEQ ID NO: 971416 - DNA, 25 bp, Homo sapien
tactatttagcgtttgagaggtcat

SEQ ID NO: 971417 - DNA, 25 bp, Homo sapien
cagttctgcagtcctatcctgttgc

SEQ ID NO: 971418 - DNA, 25 bp, Homo sapien
taccttgtaataacatcagcactgc

SEQ ID NO: 971419 - DNA, 25 bp, Homo sapien
gactgtcagctcaacctttaaaaga

SEQ ID NO: 971420 - DNA, 25 bp, Homo sapien
ctataaaagggctctgatggtgcac

SEQ ID NO: 971421 - DNA, 25 bp, Homo sapien
caccaggccagggtaatagagatgg

SEQ ID NO: 971422 - DNA, 25 bp, Homo sapien
tcctgccttggcgtctaagaaactt

SEQ ID NO: 971423 - DNA, 25 bp, Homo sapien
ttcagttatcaggaactgttgccgt

SEQ ID NO: 971424 - DNA, 25 bp, Homo sapien
tgttgccgttattacatcagatggg

SEQ ID NO: 971425 - DNA, 25 bp, Homo sapien
tgaacctggtaagtagaggttggag

SEQ ID NO: 971426 - DNA, 25 bp, Homo sapien
taagtagaggttggagtgagtcaag

SEQ ID NO: 971427 - DNA, 25 bp, Homo sapien
ggtaagtagaggttggagtgagtca

SEQ ID NO: 971428 - DNA, 25 bp, Homo sapien
ctggtaagtagaggttggagtgagt

SEQ ID NO: 971429 - DNA, 25 bp, Homo sapien
gattctgcgcttgatttggggaata

SEQ ID NO: 971430 - DNA, 25 bp, Homo sapien
gggaatattcgagcagaacctttaa

SEQ ID NO: 971431 - DNA, 25 bp, Homo sapien
tgcagtcattggagaaatcgatgaa

SEQ ID NO: 971432 - DNA, 25 bp, Homo sapien
ttttagtgcagtcattggagaaatc

SEQ ID NO: 971433 - DNA, 25 bp, Homo sapien
tgggaaaccatgagacgtgcttagt

SEQ ID NO: 971434 - DNA, 25 bp, Homo sapien
cattcctctgtatagtgggaaacca

SEQ ID NO: 971435 - DNA, 25 bp, Homo sapien
gattttggaattttgtcagggacac

SEQ ID NO: 971436 - DNA, 25 bp, Homo sapien
tcttcataaatcgatgctgcctcct

SEQ ID NO: 971437 - DNA, 25 bp, Homo sapien
tgggctaaatttcccattagcaaac

SEQ ID NO: 971438 - DNA, 25 bp, Homo sapien
tgcaattgctaatgttattctccca

SEQ ID NO: 971439 - DNA, 25 bp, Homo sapien
acattttaatggaacgaactgaggt

SEQ ID NO: 971440 - DNA, 25 bp, Homo sapien
tgatacttcaacttgtgctaggttg

SEQ ID NO: 971441 - DNA, 25 bp, Homo sapien
tcacttacatgagccaaaacggttc

SEQ ID NO: 971442 - DNA, 25 bp, Homo sapien
gccatggagcatgtagagagagtct

SEQ ID NO: 971443 - DNA, 25 bp, Homo sapien
ggatccagcgatgcctaaagatgtg

SEQ ID NO: 971444 - DNA, 25 bp, Homo sapien
tactaagtatgtgtgagcctggagc

SEQ ID NO: 971445 - DNA, 25 bp, Homo sapien
ccagagtaggtactgcttatgtcaa

SEQ ID NO: 971446 - DNA, 25 bp, Homo sapien
gaaacactctctaaatagatgctga

SEQ ID NO: 971447 - DNA, 25 bp, Homo sapien
catggttaactgagatctgccttca

SEQ ID NO: 971448 - DNA, 25 bp, Homo sapien
agaagaacagacctgccagagtagg

SEQ ID NO: 971449 - DNA, 25 bp, Homo sapien
taagtaagggaccatagataccacc

SEQ ID NO: 971450 - DNA, 25 bp, Homo sapien
cctcaaagtagaagcatatgtaaca

SEQ ID NO: 971451 - DNA, 25 bp, Homo sapien
ggcataccctagtacccctgaaaga

SEQ ID NO: 971452 - DNA, 25 bp, Homo sapien
aaactaactgttctgtatgcgtacc

SEQ ID NO: 971453 - DNA, 25 bp, Homo sapien
catgtatgaaagtagaactctgacc

SEQ ID NO: 971454 - DNA, 25 bp, Homo sapien
cagaatggtcagtgactgccagtat

SEQ ID NO: 971455 - DNA, 25 bp, Homo sapien
aagttgccccatttctagtcagcca

SEQ ID NO: 971456 - DNA, 25 bp, Homo sapien
tatgtgtcagagagtgaatgtacaa

SEQ ID NO: 971457 - DNA, 25 bp, Homo sapien
cagcctataaggtggccggccattc

SEQ ID NO: 971458 - DNA, 25 bp, Homo sapien
cagggatataaaggcactcaagcac

SEQ ID NO: 971459 - DNA, 25 bp, Homo sapien
tagcaaagactgttagcaggcactt

SEQ ID NO: 971460 - DNA, 25 bp, Homo sapien
gaactttatgttgcacgggttggct

SEQ ID NO: 971461 - DNA, 25 bp, Homo sapien
gtgattatgacgattgaccgtggaa

SEQ ID NO: 971462 - DNA, 25 bp, Homo sapien
aacttagtgaaggtatctgcatggg

SEQ ID NO: 971463 - DNA, 25 bp, Homo sapien
cacattttgtggcttagggcagagc

SEQ ID NO: 971464 - DNA, 25 bp, Homo sapien
tatgagactaatggactgtaggtgc

SEQ ID NO: 971465 - DNA, 25 bp, Homo sapien
tagcagtattatagggctatgctgc

SEQ ID NO: 971466 - DNA, 25 bp, Homo sapien
gattaaatggaaacgactggatcca

SEQ ID NO: 971467 - DNA, 25 bp, Homo sapien
taacttggtaccttaattagcagta

SEQ ID NO: 971468 - DNA, 25 bp, Homo sapien
gtttaaagtttagaccatgccaatg

SEQ ID NO: 971469 - DNA, 25 bp, Homo sapien
cttcaagtggaatctaggacacctg

SEQ ID NO: 971470 - DNA, 25 bp, Homo sapien
gaagctatgctgcttttactaggaa

SEQ ID NO: 971471 - DNA, 25 bp, Homo sapien
gctggtgtattcaactagagggaac

SEQ ID NO: 971472 - DNA, 25 bp, Homo sapien
ttcacaaagggaagtcaagtgttcc

SEQ ID NO: 971473 - DNA, 25 bp, Homo sapien
ctttatctccattgagatcgcttca

SEQ ID NO: 971474 - DNA, 25 bp, Homo sapien
tctttatctccattgagatcgcttc

SEQ ID NO: 971475 - DNA, 25 bp, Homo sapien
ttctttatctccattgagatcgctt

SEQ ID NO: 971476 - DNA, 25 bp, Homo sapien
gttctttatctccattgagatcgct

SEQ ID NO: 971477 - DNA, 25 bp, Homo sapien
ctatggctaggcttgggggagcatg

SEQ ID NO: 971478 - DNA, 25 bp, Homo sapien
ttctatggctaggcttgggggagca

SEQ ID NO: 971479 - DNA, 25 bp, Homo sapien
tctatggctaggcttgggggagcat

SEQ ID NO: 971480 - DNA, 25 bp, Homo sapien
tttctatggctaggcttgggggagc

SEQ ID NO: 971481 - DNA, 25 bp, Homo sapien
ctgtaagcccttggttttagccagc

SEQ ID NO: 971482 - DNA, 25 bp, Homo sapien
cctgtaagcccttggttttagccag

SEQ ID NO: 971483 - DNA, 25 bp, Homo sapien
tcctgtaagcccttggttttagcca

SEQ ID NO: 971484 - DNA, 25 bp, Homo sapien
tgtgttgccaggatgtttcaaacgc

SEQ ID NO: 971485 - DNA, 25 bp, Homo sapien
ggatgtttcaaacgcttctgatgtc

SEQ ID NO: 971486 - DNA, 25 bp, Homo sapien
tgttgccaggatgtttcaaacgctt

SEQ ID NO: 971487 - DNA, 25 bp, Homo sapien
tgccaggatgtttcaaacgcttctg

SEQ ID NO: 971488 - DNA, 25 bp, Homo sapien
atctctatctttcagtggatctgtg

SEQ ID NO: 971489 - DNA, 25 bp, Homo sapien
ttgttccctaattagttgaagcaga

SEQ ID NO: 971490 - DNA, 25 bp, Homo sapien
tttgttccctaattagttgaagcag

SEQ ID NO: 971491 - DNA, 25 bp, Homo sapien
ctatctttcagtggatctgtgtcct

SEQ ID NO: 971492 - DNA, 25 bp, Homo sapien
cttgacagtggtttgaagggatctt

SEQ ID NO: 971493 - DNA, 25 bp, Homo sapien
cacgcaaatcttctgtgattcttgt

SEQ ID NO: 971494 - DNA, 25 bp, Homo sapien
tggtttgaagggatctttgctggct

SEQ ID NO: 971495 - DNA, 25 bp, Homo sapien
tgctggctcttccacgcaaatcttc

SEQ ID NO: 971496 - DNA, 25 bp, Homo sapien
gtgtcagcagaactttgctctctct

SEQ ID NO: 971497 - DNA, 25 bp, Homo sapien
gaatgatttcttgccgacatctggc

SEQ ID NO: 971498 - DNA, 25 bp, Homo sapien
catctggcttctaatggtggctagc

SEQ ID NO: 971499 - DNA, 25 bp, Homo sapien
gaattccttggttaaatcactccga

SEQ ID NO: 971500 - DNA, 25 bp, Homo sapien
ttggacagaaaacgtgggaggcaaa

SEQ ID NO: 971501 - DNA, 25 bp, Homo sapien
tgtaccgatgcctgatggtggattg

SEQ ID NO: 971502 - DNA, 25 bp, Homo sapien
gcaactttgccaggactactcctaa

SEQ ID NO: 971503 - DNA, 25 bp, Homo sapien
tggcagcacccatctgctgtaccga

SEQ ID NO: 971504 - DNA, 25 bp, Homo sapien
gttggtgtggatgcattgaacagtg

SEQ ID NO: 971505 - DNA, 25 bp, Homo sapien
ttggtgtggatgcattgaacagtga

SEQ ID NO: 971506 - DNA, 25 bp, Homo sapien
gcctttctcacgtctttttgccctg

SEQ ID NO: 971507 - DNA, 25 bp, Homo sapien
tgtcatctcaatatgcccagcagac

SEQ ID NO: 971508 - DNA, 25 bp, Homo sapien
acctgaagcatctgctggtgtcatc

SEQ ID NO: 971509 - DNA, 25 bp, Homo sapien
gcccagcagacatattcttcttatc

SEQ ID NO: 971510 - DNA, 25 bp, Homo sapien
ctagagtactgactagccttgcttt

SEQ ID NO: 971511 - DNA, 25 bp, Homo sapien
ttgtaggaactagagtactgactag

SEQ ID NO: 971512 - DNA, 25 bp, Homo sapien
taggaactagagtactgactagcct

SEQ ID NO: 971513 - DNA, 25 bp, Homo sapien
ggaactagagtactgactagccttg

SEQ ID NO: 971514 - DNA, 25 bp, Homo sapien
gacataggtttatgatgagcttcct

SEQ ID NO: 971515 - DNA, 25 bp, Homo sapien
cctctctgatacaactgggcagcta

SEQ ID NO: 971516 - DNA, 25 bp, Homo sapien
gctgacactgtcctgattgagtagt

SEQ ID NO: 971517 - DNA, 25 bp, Homo sapien
tggagactaatcttcccactggatc

SEQ ID NO: 971518 - DNA, 25 bp, Homo sapien
gtcactactgctactatccactggg

SEQ ID NO: 971519 - DNA, 25 bp, Homo sapien
tgggcccaacaatgcctctgctaag

SEQ ID NO: 971520 - DNA, 25 bp, Homo sapien
taaggctgctgtagatgcttccaag

SEQ ID NO: 971521 - DNA, 25 bp, Homo sapien
ccaagcttgcagacttacaaggtgc

SEQ ID NO: 971522 - DNA, 25 bp, Homo sapien
tggcgatgccggctgttttttcgtt

SEQ ID NO: 971523 - DNA, 25 bp, Homo sapien
gcgatgccggctgttttttcgttcc

SEQ ID NO: 971524 - DNA, 25 bp, Homo sapien
cttggcgatgccggctgttttttcg

SEQ ID NO: 971525 - DNA, 25 bp, Homo sapien
cgatgccggctgttttttcgttccg

SEQ ID NO: 971526 - DNA, 25 bp, Homo sapien
gcttctggatttggattatgagcaa

SEQ ID NO: 971527 - DNA, 25 bp, Homo sapien
tagacatgttcttgtctgagatgac

SEQ ID NO: 971528 - DNA, 25 bp, Homo sapien
tgttcttagcttccaacaaagatgt

SEQ ID NO: 971529 - DNA, 25 bp, Homo sapien
tggattatgagcaaatgaattgttc

SEQ ID NO: 971530 - DNA, 25 bp, Homo sapien
gccaggatggtcattaagcgctgtc

SEQ ID NO: 971531 - DNA, 25 bp, Homo sapien
gcatccgtaatagctgtcagccagg

SEQ ID NO: 971532 - DNA, 25 bp, Homo sapien
tgcagtcgagtcctgtgccagatgg

SEQ ID NO: 971533 - DNA, 25 bp, Homo sapien
aacagtagcagtgacgcatccgtaa

SEQ ID NO: 971534 - DNA, 25 bp, Homo sapien
aataatagtttgcttaagatgcctt

SEQ ID NO: 971535 - DNA, 25 bp, Homo sapien
aatagtttgcttaagatgccttttt

SEQ ID NO: 971536 - DNA, 25 bp, Homo sapien
tagtttgcttaagatgccttttttg

SEQ ID NO: 971537 - DNA, 25 bp, Homo sapien
caaaaataatagtttgcttaagatg

SEQ ID NO: 971538 - DNA, 25 bp, Homo sapien
acaggatgcgcatgttcagaacttg

SEQ ID NO: 971539 - DNA, 25 bp, Homo sapien
ctacttccggaacaggatgcgcatg

SEQ ID NO: 971540 - DNA, 25 bp, Homo sapien
tgttcagaacttgagagtcgttctg

SEQ ID NO: 971541 - DNA, 25 bp, Homo sapien
acttgagagtcgttctgtgtcttgg

SEQ ID NO: 971542 - DNA, 25 bp, Homo sapien
gtgccatgctctttcaccgttttgg

SEQ ID NO: 971543 - DNA, 25 bp, Homo sapien
aatcagcacggcatctgtgccatgc

SEQ ID NO: 971544 - DNA, 25 bp, Homo sapien
tgctctttcaccgttttgggcttcc

SEQ ID NO: 971545 - DNA, 25 bp, Homo sapien
ctatgttagggtggtcccaatcagc

SEQ ID NO: 971546 - DNA, 25 bp, Homo sapien
tcaatccccatgcaccttgccttgg

SEQ ID NO: 971547 - DNA, 25 bp, Homo sapien
caggctgaagcttctaattggtagc

SEQ ID NO: 971548 - DNA, 25 bp, Homo sapien
catgcaccttgccttgggccttgct

SEQ ID NO: 971549 - DNA, 25 bp, Homo sapien
ctgcaggctgaagcttctaattggt

SEQ ID NO: 971550 - DNA, 25 bp, Homo sapien
atgtactgttcacaaacacttcata

SEQ ID NO: 971551 - DNA, 25 bp, Homo sapien
gggagatgtttcctctaaattgtca

SEQ ID NO: 971552 - DNA, 25 bp, Homo sapien
gaagtgaaacatagtttatcctgcc

SEQ ID NO: 971553 - DNA, 25 bp, Homo sapien
caacaagaattaatgaggatgaaca

SEQ ID NO: 971554 - DNA, 25 bp, Homo sapien
ttggcaatgaagcttgcaactccat

SEQ ID NO: 971555 - DNA, 25 bp, Homo sapien
aatcttcctgtccatatggtaaagg

SEQ ID NO: 971556 - DNA, 25 bp, Homo sapien
gccagataaatcctgaataacttga

SEQ ID NO: 971557 - DNA, 25 bp, Homo sapien
tgccttccagtgattgttgagctgc

SEQ ID NO: 971558 - DNA, 25 bp, Homo sapien
gcttgccaacttgatttctgccttc

SEQ ID NO: 971559 - DNA, 25 bp, Homo sapien
ccagtgattgttgagctgccactgc

SEQ ID NO: 971560 - DNA, 25 bp, Homo sapien
gtcatagcccaaatcgagcctgttt

SEQ ID NO: 971561 - DNA, 25 bp, Homo sapien
tagcccaaatcgagcctgtttctga

SEQ ID NO: 971562 - DNA, 25 bp, Homo sapien
catagcccaaatcgagcctgtttct

SEQ ID NO: 971563 - DNA, 25 bp, Homo sapien
tggtcatagcccaaatcgagcctgt

SEQ ID NO: 971564 - DNA, 25 bp, Homo sapien
tcccttgttgttgggacagtttgaa

SEQ ID NO: 971565 - DNA, 25 bp, Homo sapien
gcattgttagcatctctgccagcct

SEQ ID NO: 971566 - DNA, 25 bp, Homo sapien
tacagcattgttagcatctctgcca

SEQ ID NO: 971567 - DNA, 25 bp, Homo sapien
cagcctcccttgttgttgggacagt

SEQ ID NO: 971568 - DNA, 25 bp, Homo sapien
tgttagtgagttggcatttctcctc

SEQ ID NO: 971569 - DNA, 25 bp, Homo sapien
cagctttgcgttgggctctatcttc

SEQ ID NO: 971570 - DNA, 25 bp, Homo sapien
tctttcaattcttgaaccagggcag

SEQ ID NO: 971571 - DNA, 25 bp, Homo sapien
gcagggaacgcctccatcagctttg

SEQ ID NO: 971572 - DNA, 25 bp, Homo sapien
tcacatattacatatagtcgattcc

SEQ ID NO: 971573 - DNA, 25 bp, Homo sapien
catattacatatagtcgattcctaa

SEQ ID NO: 971574 - DNA, 25 bp, Homo sapien
tttctcacatattacatatagtcga

SEQ ID NO: 971575 - DNA, 25 bp, Homo sapien
ttacatatagtcgattcctaacaga

SEQ ID NO: 971576 - DNA, 25 bp, Homo sapien
tgttctccagatccctgccacaagc

SEQ ID NO: 971577 - DNA, 25 bp, Homo sapien
gatccctgccacaagcctttttgct

SEQ ID NO: 971578 - DNA, 25 bp, Homo sapien
ccagggagaccttctggaagaacag

SEQ ID NO: 971579 - DNA, 25 bp, Homo sapien
gccacaagcctttttgctcccagct

SEQ ID NO: 971580 - DNA, 25 bp, Homo sapien
gcagcctatgccctgtttttcttct

SEQ ID NO: 971581 - DNA, 25 bp, Homo sapien
cagcctatgccctgtttttcttctc

SEQ ID NO: 971582 - DNA, 25 bp, Homo sapien
cttctctaagttctactgttctgac

SEQ ID NO: 971583 - DNA, 25 bp, Homo sapien
ctctaagttctactgttctgaccat

SEQ ID NO: 971584 - DNA, 25 bp, Homo sapien
aatccctgctacacagaatgctcag

SEQ ID NO: 971585 - DNA, 25 bp, Homo sapien
taaaaaatttcgcttggcggtgatg

SEQ ID NO: 971586 - DNA, 25 bp, Homo sapien
gtggtaggtagctcacacctaaagt

SEQ ID NO: 971587 - DNA, 25 bp, Homo sapien
atttttgtataagaggttgggtgtg

SEQ ID NO: 971588 - DNA, 25 bp, Homo sapien
tatcaccccagcctgttagcatggc

SEQ ID NO: 971589 - DNA, 25 bp, Homo sapien
taaggcctaagatacatcctggctg

SEQ ID NO: 971590 - DNA, 25 bp, Homo sapien
tggtacagccgtcatagaacagagt

SEQ ID NO: 971591 - DNA, 25 bp, Homo sapien
caaatcgcatatgctgcctggtcaa

SEQ ID NO: 971592 - DNA, 25 bp, Homo sapien
atgtactcaaaatcagtgtgatcca

SEQ ID NO: 971593 - DNA, 25 bp, Homo sapien
ttgtaatgctacaatgtactcaaaa

SEQ ID NO: 971594 - DNA, 25 bp, Homo sapien
cttgtaatgctacaatgtactcaaa

SEQ ID NO: 971595 - DNA, 25 bp, Homo sapien
tgtactcaaaatcagtgtgatccat

SEQ ID NO: 971596 - DNA, 25 bp, Homo sapien
gatgctattgctctgatcttaacag

SEQ ID NO: 971597 - DNA, 25 bp, Homo sapien
tcttcgtaacatttgatgaccatgc

SEQ ID NO: 971598 - DNA, 25 bp, Homo sapien
tgatcttaacagcatgtgaccttct

SEQ ID NO: 971599 - DNA, 25 bp, Homo sapien
taaattatcagttgttgacattatg

SEQ ID NO: 971600 - DNA, 25 bp, Homo sapien
aatagccttggccatgcgacactgg

SEQ ID NO: 971601 - DNA, 25 bp, Homo sapien
ttccatgtccgtctcatagccacag

SEQ ID NO: 971602 - DNA, 25 bp, Homo sapien
taattataattgagctggccagctg

SEQ ID NO: 971603 - DNA, 25 bp, Homo sapien
taggtgtgcctgaataagtgttaac

SEQ ID NO: 971604 - DNA, 25 bp, Homo sapien
tatatccacatccacaacacttacg

SEQ ID NO: 971605 - DNA, 25 bp, Homo sapien
ccctcttaatttattcaggccacct

SEQ ID NO: 971606 - DNA, 25 bp, Homo sapien
ggtatcctccttaatatctttggca

SEQ ID NO: 971607 - DNA, 25 bp, Homo sapien
cacttacgtgaggaatccttttggt

SEQ ID NO: 971608 - DNA, 25 bp, Homo sapien
gatttgtagagtaaacacagttgtg

SEQ ID NO: 971609 - DNA, 25 bp, Homo sapien
ttgtcagaatatgtacaacagcatg

SEQ ID NO: 971610 - DNA, 25 bp, Homo sapien
cagttgtgtaggttcttccagagac

SEQ ID NO: 971611 - DNA, 25 bp, Homo sapien
cagagacttctcttgtatgtcaaaa

SEQ ID NO: 971612 - DNA, 25 bp, Homo sapien
ccttgccgcttgctggatggatggg

SEQ ID NO: 971613 - DNA, 25 bp, Homo sapien
tgggtacagttgaatagtggttcat

SEQ ID NO: 971614 - DNA, 25 bp, Homo sapien
tcaccacaaaagaacacgctttttg

SEQ ID NO: 971615 - DNA, 25 bp, Homo sapien
tttgacatatagagcccgcatgggc

SEQ ID NO: 971616 - DNA, 25 bp, Homo sapien
tttttagatcacagctactagctgc

SEQ ID NO: 971617 - DNA, 25 bp, Homo sapien
tagctgcacaaacatatggcttgtc

SEQ ID NO: 971618 - DNA, 25 bp, Homo sapien
tgacaactcagatgttagtctcttg

SEQ ID NO: 971619 - DNA, 25 bp, Homo sapien
ggcttgtctgcagtatgatcaggac

SEQ ID NO: 971620 - DNA, 25 bp, Homo sapien
tcttgttggtcagcatgcaatcttg

SEQ ID NO: 971621 - DNA, 25 bp, Homo sapien
ctttctctcttgttggtcagcatgc

SEQ ID NO: 971622 - DNA, 25 bp, Homo sapien
ttgttggtcagcatgcaatcttgac

SEQ ID NO: 971623 - DNA, 25 bp, Homo sapien
ttctctcttgttggtcagcatgcaa

SEQ ID NO: 971624 - DNA, 25 bp, Homo sapien
tagcaggcggtacactggtgagtac

SEQ ID NO: 971625 - DNA, 25 bp, Homo sapien
taataggtattgaatatagcaggcg

SEQ ID NO: 971626 - DNA, 25 bp, Homo sapien
ggcggtacactggtgagtacctcat

SEQ ID NO: 971627 - DNA, 25 bp, Homo sapien
ttgaatatagcaggcggtacactgg

SEQ ID NO: 971628 - DNA, 25 bp, Homo sapien
taactcttgccatttgaagggaagg

SEQ ID NO: 971629 - DNA, 25 bp, Homo sapien
ctaaacagtgaatatggacataacc

SEQ ID NO: 971630 - DNA, 25 bp, Homo sapien
caaattccaagtactgtgggcctaa

SEQ ID NO: 971631 - DNA, 25 bp, Homo sapien
ttcaccgccgctgctgtaactcttg

SEQ ID NO: 971632 - DNA, 25 bp, Homo sapien
gtgaagtaactcttgactcttccaa

SEQ ID NO: 971633 - DNA, 25 bp, Homo sapien
tgttgacagttgtgaagtaactctt

SEQ ID NO: 971634 - DNA, 25 bp, Homo sapien
ctgttgacagttgtgaagtaactct

SEQ ID NO: 971635 - DNA, 25 bp, Homo sapien
cagttgtgaagtaactcttgactct

SEQ ID NO: 971636 - DNA, 25 bp, Homo sapien
gttgtagaatcaaagaacttggctg

SEQ ID NO: 971637 - DNA, 25 bp, Homo sapien
tgggctcaaacctgccagtcctgtt

SEQ ID NO: 971638 - DNA, 25 bp, Homo sapien
gatcttctgggagtgctatttaaca

SEQ ID NO: 971639 - DNA, 25 bp, Homo sapien
tctgtcacccagtatcacatggtca

SEQ ID NO: 971640 - DNA, 25 bp, Homo sapien
ggttggacactccactcttatggtc

SEQ ID NO: 971641 - DNA, 25 bp, Homo sapien
gcattatactggttggacactccac

SEQ ID NO: 971642 - DNA, 25 bp, Homo sapien
ctccagatgtggcattatactggtt

SEQ ID NO: 971643 - DNA, 25 bp, Homo sapien
tccactcttatggtctgtgatgatg

SEQ ID NO: 971644 - DNA, 25 bp, Homo sapien
tgctgtcaatctgccttaggtcctg

SEQ ID NO: 971645 - DNA, 25 bp, Homo sapien
gccttaggtcctgcagataaaagaa

SEQ ID NO: 971646 - DNA, 25 bp, Homo sapien
gaatatagtgatattgttcccaaag

SEQ ID NO: 971647 - DNA, 25 bp, Homo sapien
tttgagtagggccaactgcttccct

SEQ ID NO: 971648 - DNA, 25 bp, Homo sapien
gacagctaaatcagttttgagtagg

SEQ ID NO: 971649 - DNA, 25 bp, Homo sapien
acaggtctggacagctaaatcagtt

SEQ ID NO: 971650 - DNA, 25 bp, Homo sapien
acacattgacgatcatcccactggg

SEQ ID NO: 971651 - DNA, 25 bp, Homo sapien
tggtccacgtgggtgcccagcctct

SEQ ID NO: 971652 - DNA, 25 bp, Homo sapien
cagtcactgtccatgcagcacacag

SEQ ID NO: 971653 - DNA, 25 bp, Homo sapien
cagctgctgtatggtccacgtgggt

SEQ ID NO: 971654 - DNA, 25 bp, Homo sapien
ctgtggagaacgatgaggttcctgt

SEQ ID NO: 971655 - DNA, 25 bp, Homo sapien
gcagagaaaagattccacagtagcc

SEQ ID NO: 971656 - DNA, 25 bp, Homo sapien
tccacaggtaagcagaagggctggc

SEQ ID NO: 971657 - DNA, 25 bp, Homo sapien
aggttcctgtggttgggagcagaga

SEQ ID NO: 971658 - DNA, 25 bp, Homo sapien
gagtatgttttaaggagggccacag

SEQ ID NO: 971659 - DNA, 25 bp, Homo sapien
ttttaaggagggccacagtgtcctc

SEQ ID NO: 971660 - DNA, 25 bp, Homo sapien
gtatgttttaaggagggccacagtg

SEQ ID NO: 971661 - DNA, 25 bp, Homo sapien
atgttttaaggagggccacagtgtc

SEQ ID NO: 971662 - DNA, 25 bp, Homo sapien
ctcttccgtgttaggcttctctttc

SEQ ID NO: 971663 - DNA, 25 bp, Homo sapien
tgtctccacaggtatttctctcagc

SEQ ID NO: 971664 - DNA, 25 bp, Homo sapien
aatccagtctcttccgtgttaggct

SEQ ID NO: 971665 - DNA, 25 bp, Homo sapien
gtctccacaggtatttctctcagct

SEQ ID NO: 971666 - DNA, 25 bp, Homo sapien
tagaactcttcttgcgctaatctcc

SEQ ID NO: 971667 - DNA, 25 bp, Homo sapien
gctgtcaggacaagggtactgtgtt

SEQ ID NO: 971668 - DNA, 25 bp, Homo sapien
ggcaactacacaactattgatgctg

SEQ ID NO: 971669 - DNA, 25 bp, Homo sapien
tgacaatgggatatagaagtcctgg

SEQ ID NO: 971670 - DNA, 25 bp, Homo sapien
tagcctaagcctacaatggatcaag

SEQ ID NO: 971671 - DNA, 25 bp, Homo sapien
catcttctatgacaacaattctttc

SEQ ID NO: 971672 - DNA, 25 bp, Homo sapien
ctatcatagatttgcttaaaagcag

SEQ ID NO: 971673 - DNA, 25 bp, Homo sapien
taatgcttcactaacattcctctct

SEQ ID NO: 971674 - DNA, 25 bp, Homo sapien
tgaacaaggtccaagtgcaaacatt

SEQ ID NO: 971675 - DNA, 25 bp, Homo sapien
tcattgtcgcatccaagaaacactg

SEQ ID NO: 971676 - DNA, 25 bp, Homo sapien
cattgtgagaaacacgaggaacaga

SEQ ID NO: 971677 - DNA, 25 bp, Homo sapien
ggtccaagtgcaaacattgtgagaa

SEQ ID NO: 971678 - DNA, 25 bp, Homo sapien
tgtttttaagtagctcagtgcaatt

SEQ ID NO: 971679 - DNA, 25 bp, Homo sapien
taacaagttccattcagtggggctg

SEQ ID NO: 971680 - DNA, 25 bp, Homo sapien
atataacaagttccattcagtgggg

SEQ ID NO: 971681 - DNA, 25 bp, Homo sapien
caagttccattcagtggggctgttt

SEQ ID NO: 971682 - DNA, 25 bp, Homo sapien
tttactgtgattgattcaaaatttt

SEQ ID NO: 971683 - DNA, 25 bp, Homo sapien
tactgtgattgattcaaaattttct

SEQ ID NO: 971684 - DNA, 25 bp, Homo sapien
ttttgtatttactgtgattgattca

SEQ ID NO: 971685 - DNA, 25 bp, Homo sapien
tcttttgtatttactgtgattgatt

SEQ ID NO: 971686 - DNA, 25 bp, Homo sapien
atgcaaccttgcttaaagggaatat

SEQ ID NO: 971687 - DNA, 25 bp, Homo sapien
caaccttgcttaaagggaatattgt

SEQ ID NO: 971688 - DNA, 25 bp, Homo sapien
gcttaaagggaatattgtaataagc

SEQ ID NO: 971689 - DNA, 25 bp, Homo sapien
cttgcttaaagggaatattgtaata

SEQ ID NO: 971690 - DNA, 25 bp, Homo sapien
gaaaacttgtcttgattaacttcag

SEQ ID NO: 971691 - DNA, 25 bp, Homo sapien
aaacttgtcttgattaacttcagcc

SEQ ID NO: 971692 - DNA, 25 bp, Homo sapien
aacttgtcttgattaacttcagcca

SEQ ID NO: 971693 - DNA, 25 bp, Homo sapien
tagaaaacttgtcttgattaacttc

SEQ ID NO: 971694 - DNA, 25 bp, Homo sapien
aaatttatgcaagccaggttattca

SEQ ID NO: 971695 - DNA, 25 bp, Homo sapien
tattcagagtttctatggcagtggt

SEQ ID NO: 971696 - DNA, 25 bp, Homo sapien
tctatggcagtggtagtttcacaag

SEQ ID NO: 971697 - DNA, 25 bp, Homo sapien
gttttcacaagcaaacgtctctcaa

SEQ ID NO: 971698 - DNA, 25 bp, Homo sapien
aattccctcccgtagcatcagtaca

SEQ ID NO: 971699 - DNA, 25 bp, Homo sapien
tggtgcagatgaacctaaaattccc

SEQ ID NO: 971700 - DNA, 25 bp, Homo sapien
tacatcttatctatttttgcaccca

SEQ ID NO: 971701 - DNA, 25 bp, Homo sapien
tcttgatatgaatccttggtgcaga

SEQ ID NO: 971702 - DNA, 25 bp, Homo sapien
ctacaacttgggagcaatttcatga

SEQ ID NO: 971703 - DNA, 25 bp, Homo sapien
caacttgggagcaatttcatgagtg

SEQ ID NO: 971704 - DNA, 25 bp, Homo sapien
atttcatgagtgttcggcgcaggta

SEQ ID NO: 971705 - DNA, 25 bp, Homo sapien
gcaatttcatgagtgttcggcgcag

SEQ ID NO: 971706 - DNA, 25 bp, Homo sapien
cttcaaacctgtcaaagacatgcat

SEQ ID NO: 971707 - DNA, 25 bp, Homo sapien
ggttgttgactgacagctaacatct

SEQ ID NO: 971708 - DNA, 25 bp, Homo sapien
gttggttgttgactgacagctaaca

SEQ ID NO: 971709 - DNA, 25 bp, Homo sapien
ctctcaaatgttgtaactcctagta

SEQ ID NO: 971710 - DNA, 25 bp, Homo sapien
ctctctcaaatgttgtaactcctag

SEQ ID NO: 971711 - DNA, 25 bp, Homo sapien
tccaaaatgcgtaatataatagtga

SEQ ID NO: 971712 - DNA, 25 bp, Homo sapien
tatctacttccaaaatgcgtaatat

SEQ ID NO: 971713 - DNA, 25 bp, Homo sapien
gactatgatacagagtgaagtgtta

SEQ ID NO: 971714 - DNA, 25 bp, Homo sapien
tttacctggaaagactatgatacag

SEQ ID NO: 971715 - DNA, 25 bp, Homo sapien
tatggtttaaagtcacatgatgtga

SEQ ID NO: 971716 - DNA, 25 bp, Homo sapien
tgcctagacccttgtactgaagagt

SEQ ID NO: 971717 - DNA, 25 bp, Homo sapien
tttttctgcagtgtatgtccttgga

SEQ ID NO: 971718 - DNA, 25 bp, Homo sapien
caggtagggatccagtctcattcta

SEQ ID NO: 971719 - DNA, 25 bp, Homo sapien
tgttgttgtcatgtaaacttcgccc

SEQ ID NO: 971720 - DNA, 25 bp, Homo sapien
caaatagaactacaaaggttctatt

SEQ ID NO: 971721 - DNA, 25 bp, Homo sapien
tgttccaagatgcatttcactgtca

SEQ ID NO: 971722 - DNA, 25 bp, Homo sapien
tcatcacctctagcagaactggaat

SEQ ID NO: 971723 - DNA, 25 bp, Homo sapien
ggtgcctcaattccagtcttccaca

SEQ ID NO: 971724 - DNA, 25 bp, Homo sapien
caagttgtacatttggtagcagcag

SEQ ID NO: 971725 - DNA, 25 bp, Homo sapien
gtagcagcagttcagaaacacagta

SEQ ID NO: 971726 - DNA, 25 bp, Homo sapien
cattgctttctgttggcaagttgta

SEQ ID NO: 971727 - DNA, 25 bp, Homo sapien
tattgtctccctaggtcacatgcca

SEQ ID NO: 971728 - DNA, 25 bp, Homo sapien
ggccctcagtgccaagacattcaag

SEQ ID NO: 971729 - DNA, 25 bp, Homo sapien
caagtttacctaggacactagagca

SEQ ID NO: 971730 - DNA, 25 bp, Homo sapien
ggaaaactcccttagctgcctttgc

SEQ ID NO: 971731 - DNA, 25 bp, Homo sapien
agttagtattcccgcctttagctca

SEQ ID NO: 971732 - DNA, 25 bp, Homo sapien
tagtattcccgcctttagctcatcc

SEQ ID NO: 971733 - DNA, 25 bp, Homo sapien
gttagtattcccgcctttagctcat

SEQ ID NO: 971734 - DNA, 25 bp, Homo sapien
gtattcccgcctttagctcatccat

SEQ ID NO: 971735 - DNA, 25 bp, Homo sapien
ttatagcttcattaacaccatcatc

SEQ ID NO: 971736 - DNA, 25 bp, Homo sapien
tttatagcttcattaacaccatcat

SEQ ID NO: 971737 - DNA, 25 bp, Homo sapien
cacttgatattcagctgacttttaa

SEQ ID NO: 971738 - DNA, 25 bp, Homo sapien
tattattattccacttgatattcag

SEQ ID NO: 971739 - DNA, 25 bp, Homo sapien
ttaaagtgtatggctttattacttg

SEQ ID NO: 971740 - DNA, 25 bp, Homo sapien
aaagtgtatggctttattacttgaa

SEQ ID NO: 971741 - DNA, 25 bp, Homo sapien
taaagtgtatggctttattacttga

SEQ ID NO: 971742 - DNA, 25 bp, Homo sapien
agtgtatggctttattacttgaata

SEQ ID NO: 971743 - DNA, 25 bp, Homo sapien
ctttgtatattcaaagcggttgatg

SEQ ID NO: 971744 - DNA, 25 bp, Homo sapien
attctacgtactcttcaaggtccca

SEQ ID NO: 971745 - DNA, 25 bp, Homo sapien
agcccattttatcttgtggagcaga

SEQ ID NO: 971746 - DNA, 25 bp, Homo sapien
cagatttaggtggatgaaaggcact

SEQ ID NO: 971747 - DNA, 25 bp, Homo sapien
tatttaggactactggcaaggacag

SEQ ID NO: 971748 - DNA, 25 bp, Homo sapien
caatgtatacctggagagtgacttc

SEQ ID NO: 971749 - DNA, 25 bp, Homo sapien
ccagaaactcaagagtattccaggg

SEQ ID NO: 971750 - DNA, 25 bp, Homo sapien
actcaagagtattccaggggtttat

SEQ ID NO: 971751 - DNA, 25 bp, Homo sapien
caagagtattccaggggtttatata

SEQ ID NO: 971752 - DNA, 25 bp, Homo sapien
tccagaaactcaagagtattccagg

SEQ ID NO: 971753 - DNA, 25 bp, Homo sapien
catggtatctatgcaatagcttcca

SEQ ID NO: 971754 - DNA, 25 bp, Homo sapien
tacttgtttcctgtctggcttttgc

SEQ ID NO: 971755 - DNA, 25 bp, Homo sapien
gcagagatcattgtgattcttgtct

SEQ ID NO: 971756 - DNA, 25 bp, Homo sapien
ggcttttgctgctgacgtatcatgg

SEQ ID NO: 971757 - DNA, 25 bp, Homo sapien
ccctcagatattcttggatcaagat

SEQ ID NO: 971758 - DNA, 25 bp, Homo sapien
gatattcttggatcaagatatttca

SEQ ID NO: 971759 - DNA, 25 bp, Homo sapien
ctaaggcctactccctcagatattc

SEQ ID NO: 971760 - DNA, 25 bp, Homo sapien
ggcctactccctcagatattcttgg

SEQ ID NO: 971761 - DNA, 25 bp, Homo sapien
ctgggacagggacgttctgtgcaac

SEQ ID NO: 971762 - DNA, 25 bp, Homo sapien
ttgctgtttgccatttgcagctctg

SEQ ID NO: 971763 - DNA, 25 bp, Homo sapien
gacgttctgtgcaacctggcaggtg

SEQ ID NO: 971764 - DNA, 25 bp, Homo sapien
caggtgctgtatggcggaggttgct

SEQ ID NO: 971765 - DNA, 25 bp, Homo sapien
gatacaggtgaactttcggcaaatg

SEQ ID NO: 971766 - DNA, 25 bp, Homo sapien
ggtaaacatgtagatcccagctgag

SEQ ID NO: 971767 - DNA, 25 bp, Homo sapien
tgagtaattcacgtttgcctggagg

SEQ ID NO: 971768 - DNA, 25 bp, Homo sapien
gagtaatgacattatctgatgccct

SEQ ID NO: 971769 - DNA, 25 bp, Homo sapien
tgatgtagttcctggtttcccaatt

SEQ ID NO: 971770 - DNA, 25 bp, Homo sapien
tagttcctggtttcccaattgcgtc

SEQ ID NO: 971771 - DNA, 25 bp, Homo sapien
tgtagttcctggtttcccaattgcg

SEQ ID NO: 971772 - DNA, 25 bp, Homo sapien
gatgtagttcctggtttcccaattg

SEQ ID NO: 971773 - DNA, 25 bp, Homo sapien
caaacgcatcttacactgcaagctt

SEQ ID NO: 971774 - DNA, 25 bp, Homo sapien
cttttctcaagaacgtgaagttgta

SEQ ID NO: 971775 - DNA, 25 bp, Homo sapien
aggcaccacaaacaaacgcatctta

SEQ ID NO: 971776 - DNA, 25 bp, Homo sapien
ttacactgcaagcttttctcaagaa

SEQ ID NO: 971777 - DNA, 25 bp, Homo sapien
gaatgaattctgaatcctacatctt

SEQ ID NO: 971778 - DNA, 25 bp, Homo sapien
cttgatacccactattaaacttcat

SEQ ID NO: 971779 - DNA, 25 bp, Homo sapien
catagatcttgcaaaagtagcagag

SEQ ID NO: 971780 - DNA, 25 bp, Homo sapien
ggaaacaactgaacactccgttgag

SEQ ID NO: 971781 - DNA, 25 bp, Homo sapien
gcatctattataaccatcagtcagg

SEQ ID NO: 971782 - DNA, 25 bp, Homo sapien
ccgttgagatttgtgactgtcatcc

SEQ ID NO: 971783 - DNA, 25 bp, Homo sapien
catcaagaaaccatggtcaatgtct

SEQ ID NO: 971784 - DNA, 25 bp, Homo sapien
tgttaaatgtaattagcatcaagaa

SEQ ID NO: 971785 - DNA, 25 bp, Homo sapien
tatactcgttttaatgttgatgtta

SEQ ID NO: 971786 - DNA, 25 bp, Homo sapien
aaagaaacggtggactcagagccct

SEQ ID NO: 971787 - DNA, 25 bp, Homo sapien
cctatgttctctgctgagagtggcc

SEQ ID NO: 971788 - DNA, 25 bp, Homo sapien
tcagttgctttgagtgccttctatg

SEQ ID NO: 971789 - DNA, 25 bp, Homo sapien
gagtggcctggagagtgtcaactgc

SEQ ID NO: 971790 - DNA, 25 bp, Homo sapien
agttgctttgagtgccttctatgtg

SEQ ID NO: 971791 - DNA, 25 bp, Homo sapien
ggccaagatctagccttaatcgaca

SEQ ID NO: 971792 - DNA, 25 bp, Homo sapien
gatctagccttaatcgacaattgat

SEQ ID NO: 971793 - DNA, 25 bp, Homo sapien
ctggccaagatctagccttaatcga

SEQ ID NO: 971794 - DNA, 25 bp, Homo sapien
ccaagatctagccttaatcgacaat

SEQ ID NO: 971795 - DNA, 25 bp, Homo sapien
tggtaacatgggatgccactctggt

SEQ ID NO: 971796 - DNA, 25 bp, Homo sapien
tgccactctggtagagttcaaggca

SEQ ID NO: 971797 - DNA, 25 bp, Homo sapien
atcatcacttgtggtaacatgggat

SEQ ID NO: 971798 - DNA, 25 bp, Homo sapien
gttcaaggcattgagagaccaagtg

SEQ ID NO: 971799 - DNA, 25 bp, Homo sapien
gattgtgccatgattgtttaatgtc

SEQ ID NO: 971800 - DNA, 25 bp, Homo sapien
catcacagtagtgatgataacactg

SEQ ID NO: 971801 - DNA, 25 bp, Homo sapien
cacagtagtgatgataacactgatt

SEQ ID NO: 971802 - DNA, 25 bp, Homo sapien
gataacactgattgtgccatgattg

SEQ ID NO: 971803 - DNA, 25 bp, Homo sapien
tctcaagttctcctgcgcttttttg

SEQ ID NO: 971804 - DNA, 25 bp, Homo sapien
ctctcaagttctcctgcgctttttt

SEQ ID NO: 971805 - DNA, 25 bp, Homo sapien
ctcaagttctcctgcgcttttttgc

SEQ ID NO: 971806 - DNA, 25 bp, Homo sapien
agttctcctgcgcttttttgctttt

SEQ ID NO: 971807 - DNA, 25 bp, Homo sapien
gagtcgttcacgagcgctgaaattg

SEQ ID NO: 971808 - DNA, 25 bp, Homo sapien
tttacccaggagtcgttcacgagcg

SEQ ID NO: 971809 - DNA, 25 bp, Homo sapien
caggagtcgttcacgagcgctgaaa

SEQ ID NO: 971810 - DNA, 25 bp, Homo sapien
ttcacgagcgctgaaattgaatcag

SEQ ID NO: 971811 - DNA, 25 bp, Homo sapien
tttgggacccagaccatagcagatc

SEQ ID NO: 971812 - DNA, 25 bp, Homo sapien
gagaaagcttcgcacacatggcagg

SEQ ID NO: 971813 - DNA, 25 bp, Homo sapien
ggtgaagaccattaccactggagga

SEQ ID NO: 971814 - DNA, 25 bp, Homo sapien
caggcgctcactagaaagattggtc

SEQ ID NO: 971815 - DNA, 25 bp, Homo sapien
tctgggagacaaaacgtagataaca

SEQ ID NO: 971816 - DNA, 25 bp, Homo sapien
ttcctgacaatatgatgcacctcca

SEQ ID NO: 971817 - DNA, 25 bp, Homo sapien
gcagtaatctccaaagtgtagcacg

SEQ ID NO: 971818 - DNA, 25 bp, Homo sapien
tatgcttcatagcacacgcgtgtgc

SEQ ID NO: 971819 - DNA, 25 bp, Homo sapien
ttcgtgattcttaggactcatggaa

SEQ ID NO: 971820 - DNA, 25 bp, Homo sapien
gcaccagtctcacgctttcgtgatt

SEQ ID NO: 971821 - DNA, 25 bp, Homo sapien
cagaaacgtagagcaccagtctcac

SEQ ID NO: 971822 - DNA, 25 bp, Homo sapien
acttgagggcagaaacgtagagcac

SEQ ID NO: 971823 - DNA, 25 bp, Homo sapien
agtatttcagaggaccatctgaaag

SEQ ID NO: 971824 - DNA, 25 bp, Homo sapien
cgaccattctctcttgaaggtagcc

SEQ ID NO: 971825 - DNA, 25 bp, Homo sapien
tctctcttgaaggtagcctgaaacc

SEQ ID NO: 971826 - DNA, 25 bp, Homo sapien
ttcagaggaccatctgaaaggtgaa

SEQ ID NO: 971827 - DNA, 25 bp, Homo sapien
actggcagagcctctgtgctgactg

SEQ ID NO: 971828 - DNA, 25 bp, Homo sapien
ttgccctgtactggcagagcctctg

SEQ ID NO: 971829 - DNA, 25 bp, Homo sapien
ccttgccctgtactggcagagcctc

SEQ ID NO: 971830 - DNA, 25 bp, Homo sapien
gtactggcagagcctctgtgctgac

SEQ ID NO: 971831 - DNA, 25 bp, Homo sapien
acagttatacagtgtgtcttcttgc

SEQ ID NO: 971832 - DNA, 25 bp, Homo sapien
tacagttatacagtgtgtcttcttg

SEQ ID NO: 971833 - DNA, 25 bp, Homo sapien
atacagttatacagtgtgtcttctt

SEQ ID NO: 971834 - DNA, 25 bp, Homo sapien
tatacagttatacagtgtgtcttct

SEQ ID NO: 971835 - DNA, 25 bp, Homo sapien
tgttctcttttactttctcggccat

SEQ ID NO: 971836 - DNA, 25 bp, Homo sapien
tcactgttctcttttactttctcgg

SEQ ID NO: 971837 - DNA, 25 bp, Homo sapien
agccattgataatgattttcactgt

SEQ ID NO: 971838 - DNA, 25 bp, Homo sapien
cagccattgataatgattttcactg

SEQ ID NO: 971839 - DNA, 25 bp, Homo sapien
tttattgcaagacaaatctactgtc

SEQ ID NO: 971840 - DNA, 25 bp, Homo sapien
tcttacttgatacagaattgtaggt

SEQ ID NO: 971841 - DNA, 25 bp, Homo sapien
gcaaaattctgttatgattactgca

SEQ ID NO: 971842 - DNA, 25 bp, Homo sapien
tcactccgctctctttttggttgca

SEQ ID NO: 971843 - DNA, 25 bp, Homo sapien
cattacataagtctagtatttcaga

SEQ ID NO: 971844 - DNA, 25 bp, Homo sapien
gcttccagggcttcagatgatcttc

SEQ ID NO: 971845 - DNA, 25 bp, Homo sapien
gattcctctagggtgcctctatttg

SEQ ID NO: 971846 - DNA, 25 bp, Homo sapien
ttgtaaaaactctctttcagcagca

SEQ ID NO: 971847 - DNA, 25 bp, Homo sapien
cctgaagggcacagtagtaggtgct

SEQ ID NO: 971848 - DNA, 25 bp, Homo sapien
gaagggcacagtagtaggtgctgtg

SEQ ID NO: 971849 - DNA, 25 bp, Homo sapien
ctgaagggcacagtagtaggtgctg

SEQ ID NO: 971850 - DNA, 25 bp, Homo sapien
tagtaggtgctgtgtctacacactc

SEQ ID NO: 971851 - DNA, 25 bp, Homo sapien
gatagttgttcttggatcgccactg

SEQ ID NO: 971852 - DNA, 25 bp, Homo sapien
cccagcatgtagtgaaagagtgcgt

SEQ ID NO: 971853 - DNA, 25 bp, Homo sapien
acactggatattttgaacgggtacg

SEQ ID NO: 971854 - DNA, 25 bp, Homo sapien
taacgcaactctagctatactcagg

SEQ ID NO: 971855 - DNA, 25 bp, Homo sapien
tatatttagattgacgatgaataaa

SEQ ID NO: 971856 - DNA, 25 bp, Homo sapien
tagattgacgatgaataaaaataat

SEQ ID NO: 971857 - DNA, 25 bp, Homo sapien
ggaaattatatttagattgacgatg

SEQ ID NO: 971858 - DNA, 25 bp, Homo sapien
gaaattatatttagattgacgatga

SEQ ID NO: 971859 - DNA, 25 bp, Homo sapien
gtttactcatcatatagtagcctga

SEQ ID NO: 971860 - DNA, 25 bp, Homo sapien
caatgactgaatgtgtggttaaata

SEQ ID NO: 971861 - DNA, 25 bp, Homo sapien
tttaaagagaaagtaatcccatcca

SEQ ID NO: 971862 - DNA, 25 bp, Homo sapien
ttcagtccacaaaaatctcaggtgc

SEQ ID NO: 971863 - DNA, 25 bp, Homo sapien
caatcgcttaccatattccctagag

SEQ ID NO: 971864 - DNA, 25 bp, Homo sapien
tcttcaggaggacttaacaaaatca

SEQ ID NO: 971865 - DNA, 25 bp, Homo sapien
taagtatatataggcacacgtgcac

SEQ ID NO: 971866 - DNA, 25 bp, Homo sapien
tgacagttacttaaaaggagagacc

SEQ ID NO: 971867 - DNA, 25 bp, Homo sapien
tactttgtagaaggccttgctcacg

SEQ ID NO: 971868 - DNA, 25 bp, Homo sapien
tatttgagtttctgtactttgtaga

SEQ ID NO: 971869 - DNA, 25 bp, Homo sapien
gccttgctcacgtttgaagtctagt

SEQ ID NO: 971870 - DNA, 25 bp, Homo sapien
gagtttctgtactttgtagaaggcc

SEQ ID NO: 971871 - DNA, 25 bp, Homo sapien
ggggaagcaggcacatattacatgg

SEQ ID NO: 971872 - DNA, 25 bp, Homo sapien
ttctgcatggctgagaaggcatcag

SEQ ID NO: 971873 - DNA, 25 bp, Homo sapien
agttctgcatggctgagaaggcatc

SEQ ID NO: 971874 - DNA, 25 bp, Homo sapien
aaggggaagcaggcacatattacat

SEQ ID NO: 971875 - DNA, 25 bp, Homo sapien
ggtgtccagaatattgtttcctagg

SEQ ID NO: 971876 - DNA, 25 bp, Homo sapien
ttattgaatagggagcagccctttc

SEQ ID NO: 971877 - DNA, 25 bp, Homo sapien
tagaataccttcaaactgaatccag

SEQ ID NO: 971878 - DNA, 25 bp, Homo sapien
ggcttctctatcctgtcccattcgt

SEQ ID NO: 971879 - DNA, 25 bp, Homo sapien
attgtgaagatcagtatcattctaa

SEQ ID NO: 971880 - DNA, 25 bp, Homo sapien
tttaactttatgcttcattgtgaag

SEQ ID NO: 971881 - DNA, 25 bp, Homo sapien
tcattctaagttcatcatattcatc

SEQ ID NO: 971882 - DNA, 25 bp, Homo sapien
gatcagtatcattctaagttcatca

SEQ ID NO: 971883 - DNA, 25 bp, Homo sapien
tgacttctgttacgtattccaaatg

SEQ ID NO: 971884 - DNA, 25 bp, Homo sapien
ttctgttacgtattccaaatgcttc

SEQ ID NO: 971885 - DNA, 25 bp, Homo sapien
gacttctgttacgtattccaaatgc

SEQ ID NO: 971886 - DNA, 25 bp, Homo sapien
gttacgtattccaaatgcttctgtt

SEQ ID NO: 971887 - DNA, 25 bp, Homo sapien
gacgtggtcctgattctggcaaaca

SEQ ID NO: 971888 - DNA, 25 bp, Homo sapien
ctatcgtactgtgtgttggctttaa

SEQ ID NO: 971889 - DNA, 25 bp, Homo sapien
gtgcccagaaagtggctttttcaaa

SEQ ID NO: 971890 - DNA, 25 bp, Homo sapien
gtattaatattagtcatgcaccagc

SEQ ID NO: 971891 - DNA, 25 bp, Homo sapien
ttttgccaagacctagctcaatctg

SEQ ID NO: 971892 - DNA, 25 bp, Homo sapien
tcaatgtgctcagattctcattgtg

SEQ ID NO: 971893 - DNA, 25 bp, Homo sapien
gggatgttccctggtagatgataac

SEQ ID NO: 971894 - DNA, 25 bp, Homo sapien
cctagctcaatctgaagctttatca

SEQ ID NO: 971895 - DNA, 25 bp, Homo sapien
cttatccatcaggtatacattccaa

SEQ ID NO: 971896 - DNA, 25 bp, Homo sapien
tgttgaatcacatgcaatagtagtt

SEQ ID NO: 971897 - DNA, 25 bp, Homo sapien
cacatgcaatagtagttcctcctta

SEQ ID NO: 971898 - DNA, 25 bp, Homo sapien
tagtagttcctccttatccatcagg

SEQ ID NO: 971899 - DNA, 25 bp, Homo sapien
tcagcaaggttaggcatcatgcagc

SEQ ID NO: 971900 - DNA, 25 bp, Homo sapien
gttcttcagcaaggttaggcatcat

SEQ ID NO: 971901 - DNA, 25 bp, Homo sapien
ttaggagatagtagagtgttcttca

SEQ ID NO: 971902 - DNA, 25 bp, Homo sapien
taggagatagtagagtgttcttcag

SEQ ID NO: 971903 - DNA, 25 bp, Homo sapien
agccaacgtgggcttcctctttcct

SEQ ID NO: 971904 - DNA, 25 bp, Homo sapien
agccaaatcctaaaaagccaacgtg

SEQ ID NO: 971905 - DNA, 25 bp, Homo sapien
tacaaagccaaatcctaaaaagcca

SEQ ID NO: 971906 - DNA, 25 bp, Homo sapien
caacgtgggcttcctctttcctcat

SEQ ID NO: 971907 - DNA, 25 bp, Homo sapien
caattttttatggacagggggtgat

SEQ ID NO: 971908 - DNA, 25 bp, Homo sapien
tatggacagggggtgatcttacaaa

SEQ ID NO: 971909 - DNA, 25 bp, Homo sapien
tatactgtcaaaaggtcaattggtc

SEQ ID NO: 971910 - DNA, 25 bp, Homo sapien
gggagggtatactgtcaaaaggtca

SEQ ID NO: 971911 - DNA, 25 bp, Homo sapien
tgctgcaagtatgaggtaatatatc

SEQ ID NO: 971912 - DNA, 25 bp, Homo sapien
tttagttaggttggcatttccttca

SEQ ID NO: 971913 - DNA, 25 bp, Homo sapien
gatgttgagcacattgtcctataca

SEQ ID NO: 971914 - DNA, 25 bp, Homo sapien
tgtcctatacatgtcggccatttgt

SEQ ID NO: 971915 - DNA, 25 bp, Homo sapien
atcacggcgggaggcgaaagtcgct

SEQ ID NO: 971916 - DNA, 25 bp, Homo sapien
acggcgggaggcgaaagtcgcttct

SEQ ID NO: 971917 - DNA, 25 bp, Homo sapien
aatcacggcgggaggcgaaagtcgc

SEQ ID NO: 971918 - DNA, 25 bp, Homo sapien
tcacggcgggaggcgaaagtcgctt

SEQ ID NO: 971919 - DNA, 25 bp, Homo sapien
gggtgaaagtaagagtcctactctg

SEQ ID NO: 971920 - DNA, 25 bp, Homo sapien
taagagtcctactctggcaactgat

SEQ ID NO: 971921 - DNA, 25 bp, Homo sapien
ccaggccatctggtaaggctgtaag

SEQ ID NO: 971922 - DNA, 25 bp, Homo sapien
agataaaagcacagttgttgctgtc

SEQ ID NO: 971923 - DNA, 25 bp, Homo sapien
ctgacattatttctgcccagatctg

SEQ ID NO: 971924 - DNA, 25 bp, Homo sapien
cattatttctgcccagatctgaatt

SEQ ID NO: 971925 - DNA, 25 bp, Homo sapien
gacattatttctgcccagatctgaa

SEQ ID NO: 971926 - DNA, 25 bp, Homo sapien
ttatttctgcccagatctgaattac

SEQ ID NO: 971927 - DNA, 25 bp, Homo sapien
tcctttgaagtggatttgaaataat

SEQ ID NO: 971928 - DNA, 25 bp, Homo sapien
gctttgaaataaatccgtagatctg

SEQ ID NO: 971929 - DNA, 25 bp, Homo sapien
gaaataaatccgtagatctgactgg

SEQ ID NO: 971930 - DNA, 25 bp, Homo sapien
caaatgctgacctccgaattattaa

SEQ ID NO: 971931 - DNA, 25 bp, Homo sapien
tgtcaacactgtgccggtgtgtccg

SEQ ID NO: 971932 - DNA, 25 bp, Homo sapien
tgttataggtcttaaggcagagcct

SEQ ID NO: 971933 - DNA, 25 bp, Homo sapien
taatggcttcgttaggccctggcca

SEQ ID NO: 971934 - DNA, 25 bp, Homo sapien
taattgtcctagctgccagaaaccc

SEQ ID NO: 971935 - DNA, 25 bp, Homo sapien
tagatatcagtccttagaataaaca

SEQ ID NO: 971936 - DNA, 25 bp, Homo sapien
tcattttaagaagtaggtcaaagga

SEQ ID NO: 971937 - DNA, 25 bp, Homo sapien
tctctctgttctaaggtttgggatc

SEQ ID NO: 971938 - DNA, 25 bp, Homo sapien
tctctgttctaaggtttgggatcat

SEQ ID NO: 971939 - DNA, 25 bp, Homo sapien
cggagtacaatggataagcttcacc

SEQ ID NO: 971940 - DNA, 25 bp, Homo sapien
ccggagtacaatggataagcttcac

SEQ ID NO: 971941 - DNA, 25 bp, Homo sapien
ctgtagttgagtttcctacatctgg

SEQ ID NO: 971942 - DNA, 25 bp, Homo sapien
tagttgagtttcctacatctgggga

SEQ ID NO: 971943 - DNA, 25 bp, Homo sapien
tcaacggtaccatttggcatcttca

SEQ ID NO: 971944 - DNA, 25 bp, Homo sapien
tgcatttgtatctatgaattcataa

SEQ ID NO: 971945 - DNA, 25 bp, Homo sapien
taattcccaatacagcctggtactc

SEQ ID NO: 971946 - DNA, 25 bp, Homo sapien
gccaggcttctaattcccaatacag

SEQ ID NO: 971947 - DNA, 25 bp, Homo sapien
tcatctgccaggcttctaattccca

SEQ ID NO: 971948 - DNA, 25 bp, Homo sapien
ttaataagtgtatggtaaagatact

SEQ ID NO: 971949 - DNA, 25 bp, Homo sapien
ataagtgtatggtaaagatactgct

SEQ ID NO: 971950 - DNA, 25 bp, Homo sapien
taataagtgtatggtaaagatactg

SEQ ID NO: 971951 - DNA, 25 bp, Homo sapien
aataagtgtatggtaaagatactgc

SEQ ID NO: 971952 - DNA, 25 bp, Homo sapien
gacaatttactatggccatctgggc

SEQ ID NO: 971953 - DNA, 25 bp, Homo sapien
tccaaaagctaactcatcaagtcag

SEQ ID NO: 971954 - DNA, 25 bp, Homo sapien
ttaatgcatggcacttggtcatcag

SEQ ID NO: 971955 - DNA, 25 bp, Homo sapien
ggtttgcctctaacaacctctggaa

SEQ ID NO: 971956 - DNA, 25 bp, Homo sapien
aatcttcactaaactcggacaccat

SEQ ID NO: 971957 - DNA, 25 bp, Homo sapien
tcactaaactcggacaccatcatgt

SEQ ID NO: 971958 - DNA, 25 bp, Homo sapien
cactaaactcggacaccatcatgtc

SEQ ID NO: 971959 - DNA, 25 bp, Homo sapien
tcttcactaaactcggacaccatca

SEQ ID NO: 971960 - DNA, 25 bp, Homo sapien
ggcgtgcgcgcctgacctaaaattg

SEQ ID NO: 971961 - DNA, 25 bp, Homo sapien
caggcgtgcgcgcctgacctaaaat

SEQ ID NO: 971962 - DNA, 25 bp, Homo sapien
attacaggcgtgcgcgcctgaccta

SEQ ID NO: 971963 - DNA, 25 bp, Homo sapien
tacaggcgtgcgcgcctgacctaaa

SEQ ID NO: 971964 - DNA, 25 bp, Homo sapien
acttaatccattccccagctgagtg

SEQ ID NO: 971965 - DNA, 25 bp, Homo sapien
tactcctctccgtgttcatgactgc

SEQ ID NO: 971966 - DNA, 25 bp, Homo sapien
gatatgacgactcaagaagggtctg

SEQ ID NO: 971967 - DNA, 25 bp, Homo sapien
tcccatcaccttactctcaggagag

SEQ ID NO: 971968 - DNA, 25 bp, Homo sapien
tatacaattcgcttattctccattc

SEQ ID NO: 971969 - DNA, 25 bp, Homo sapien
taccatttgtatacaattcgcttat

SEQ ID NO: 971970 - DNA, 25 bp, Homo sapien
cacaggtgaaattcaacacgtttct

SEQ ID NO: 971971 - DNA, 25 bp, Homo sapien
ttcaacacgtttctcaacaccagtg

SEQ ID NO: 971972 - DNA, 25 bp, Homo sapien
tagaatttgggtgcatccacaatat

SEQ ID NO: 971973 - DNA, 25 bp, Homo sapien
ggtgattaccagcagctgccgtgca

SEQ ID NO: 971974 - DNA, 25 bp, Homo sapien
ttcaaacgctccgtgataatcagct

SEQ ID NO: 971975 - DNA, 25 bp, Homo sapien
gccgtgcacacttgctgataataag

SEQ ID NO: 971976 - DNA, 25 bp, Homo sapien
ggcacatagtgatgctgactggaga

SEQ ID NO: 971977 - DNA, 25 bp, Homo sapien
gatataaatctttatggttgggcac

SEQ ID NO: 971978 - DNA, 25 bp, Homo sapien
gagaataggcaagactaggcttcat

SEQ ID NO: 971979 - DNA, 25 bp, Homo sapien
taaatctttatggttgggcacatag

SEQ ID NO: 971980 - DNA, 25 bp, Homo sapien
tggctccaaaatgggaatcagcccc

SEQ ID NO: 971981 - DNA, 25 bp, Homo sapien
tccaaaatgggaatcagcccctctc

SEQ ID NO: 971982 - DNA, 25 bp, Homo sapien
gctccaaaatgggaatcagcccctc

SEQ ID NO: 971983 - DNA, 25 bp, Homo sapien
tctggctccaaaatgggaatcagcc

SEQ ID NO: 971984 - DNA, 25 bp, Homo sapien
tcagcactggacttccaagatcatg

SEQ ID NO: 971985 - DNA, 25 bp, Homo sapien
gacttccaagatcatgctggctttc

SEQ ID NO: 971986 - DNA, 25 bp, Homo sapien
acttccaagatcatgctggctttca

SEQ ID NO: 971987 - DNA, 25 bp, Homo sapien
cactggacttccaagatcatgctgg

SEQ ID NO: 971988 - DNA, 25 bp, Homo sapien
ctaggtacagtctaagcaggtggcc

SEQ ID NO: 971989 - DNA, 25 bp, Homo sapien
gccttggagacctgcaccaagagaa

SEQ ID NO: 971990 - DNA, 25 bp, Homo sapien
gactctcttgagtaggtgttcttca

SEQ ID NO: 971991 - DNA, 25 bp, Homo sapien
taatgcaataaggtagatttcccac

SEQ ID NO: 971992 - DNA, 25 bp, Homo sapien
tgaaacacatgtatccagagaggga

SEQ ID NO: 971993 - DNA, 25 bp, Homo sapien
gagactcctctcatctatggctttg

SEQ ID NO: 971994 - DNA, 25 bp, Homo sapien
gcttccttaatgttgagtctcaaga

SEQ ID NO: 971995 - DNA, 25 bp, Homo sapien
ttcccaccagcatgaatacgagttc

SEQ ID NO: 971996 - DNA, 25 bp, Homo sapien
cctcattagcgtatggtgttgtctg

SEQ ID NO: 971997 - DNA, 25 bp, Homo sapien
gatgacatatgatagagaccacatt

SEQ ID NO: 971998 - DNA, 25 bp, Homo sapien
tctagttgactctatgatgcttggc

SEQ ID NO: 971999 - DNA, 25 bp, Homo sapien
ggagggacaagccagaatatttagt

SEQ ID NO: 972000 - DNA, 25 bp, Homo sapien
taacaagaggaactagaggcaattt

SEQ ID NO: 972001 - DNA, 25 bp, Homo sapien
tttccaggctctgcaagttggcttg

SEQ ID NO: 972002 - DNA, 25 bp, Homo sapien
catggcaccctgcagcaaggattcc

SEQ ID NO: 972003 - DNA, 25 bp, Homo sapien
gtgcacacttgtccatggcaccctg

SEQ ID NO: 972004 - DNA, 25 bp, Homo sapien
caccctgcagcaaggattccttcat

SEQ ID NO: 972005 - DNA, 25 bp, Homo sapien
gtggtgcacacttgtccatggcacc

SEQ ID NO: 972006 - DNA, 25 bp, Homo sapien
aactgatcagttgccattgccgcta

SEQ ID NO: 972007 - DNA, 25 bp, Homo sapien
gaagcatctatggaattggctgcaa

SEQ ID NO: 972008 - DNA, 25 bp, Homo sapien
ttttccccgtgctagaggcttcctg

SEQ ID NO: 972009 - DNA, 25 bp, Homo sapien
tctcaatctgtgtaggcaccaactg

SEQ ID NO: 972010 - DNA, 25 bp, Homo sapien
cacacgtccctttgaaacagttctt

SEQ ID NO: 972011 - DNA, 25 bp, Homo sapien
caggttaaaggatgttgacaattcc

SEQ ID NO: 972012 - DNA, 25 bp, Homo sapien
gatagttctggccaactccacacgt

SEQ ID NO: 972013 - DNA, 25 bp, Homo sapien
tcctggaagcaaatgcaggttcccg

SEQ ID NO: 972014 - DNA, 25 bp, Homo sapien
aatggtactcctattttcaccttca

SEQ ID NO: 972015 - DNA, 25 bp, Homo sapien
ctaaatggtactcctattttcacct

SEQ ID NO: 972016 - DNA, 25 bp, Homo sapien
atggtactcctattttcaccttcat

SEQ ID NO: 972017 - DNA, 25 bp, Homo sapien
tagtacaaacatcgtagaccacatt

SEQ ID NO: 972018 - DNA, 25 bp, Homo sapien
ttccacagtcatttatgagctaggg

SEQ ID NO: 972019 - DNA, 25 bp, Homo sapien
taaatcctgtgccttacacaaggac

SEQ ID NO: 972020 - DNA, 25 bp, Homo sapien
tatccaaacagtaattgcatcagga

SEQ ID NO: 972021 - DNA, 25 bp, Homo sapien
agttacttcttctgagaactctctc

SEQ ID NO: 972022 - DNA, 25 bp, Homo sapien
ttctgctttggagtgcaatagccaa

SEQ ID NO: 972023 - DNA, 25 bp, Homo sapien
gtctcttgaaaggatcataaagtcc

SEQ ID NO: 972024 - DNA, 25 bp, Homo sapien
tatttatatcttatccccttttcca

SEQ ID NO: 972025 - DNA, 25 bp, Homo sapien
ttctgattcctggaaagttagctgc

SEQ ID NO: 972026 - DNA, 25 bp, Homo sapien
gacctcgatcgaggagagtctctga

SEQ ID NO: 972027 - DNA, 25 bp, Homo sapien
ggcaagttggacagatggcatatca

SEQ ID NO: 972028 - DNA, 25 bp, Homo sapien
gaaaaggagttgtgtcaagacctcg

SEQ ID NO: 972029 - DNA, 25 bp, Homo sapien
ggagagtctctgattttttggcaag

SEQ ID NO: 972030 - DNA, 25 bp, Homo sapien
tccgcgtcggagctttgcgggtctt

SEQ ID NO: 972031 - DNA, 25 bp, Homo sapien
agacaaccaattcctgcgcattccg

SEQ ID NO: 972032 - DNA, 25 bp, Homo sapien
tgcacttaaaaattccgcgtcggag

SEQ ID NO: 972033 - DNA, 25 bp, Homo sapien
ggagctttgcgggtcttgccttcca

SEQ ID NO: 972034 - DNA, 25 bp, Homo sapien
tccctttgttcatccgaggctcgct

SEQ ID NO: 972035 - DNA, 25 bp, Homo sapien
tccctcggtgacattttgcgccggg

SEQ ID NO: 972036 - DNA, 25 bp, Homo sapien
gccttgaaccgggactcgagaggca

SEQ ID NO: 972037 - DNA, 25 bp, Homo sapien
cagaagcaaggcacgggtccccttt

SEQ ID NO: 972038 - DNA, 25 bp, Homo sapien
gcggcgcgttctgcgcggaagcaga

SEQ ID NO: 972039 - DNA, 25 bp, Homo sapien
gagtgaaggggcgattgggcgaacg

SEQ ID NO: 972040 - DNA, 25 bp, Homo sapien
gagagtgaaggggcgattgggcgaa

SEQ ID NO: 972041 - DNA, 25 bp, Homo sapien
gcgttctgcgcggaagcagatgctg

SEQ ID NO: 972042 - DNA, 25 bp, Homo sapien
gctgtgaccgcatctcctgagctac

SEQ ID NO: 972043 - DNA, 25 bp, Homo sapien
tgagactcctttggcgggaagggct

SEQ ID NO: 972044 - DNA, 25 bp, Homo sapien
aacaggtcgcctttttgagactcct

SEQ ID NO: 972045 - DNA, 25 bp, Homo sapien
gagctacaacaacaggtcgcctttt

SEQ ID NO: 972046 - DNA, 25 bp, Homo sapien
gttgagggtgattgttaggacgttg

SEQ ID NO: 972047 - DNA, 25 bp, Homo sapien
tgattgttaggacgttgtattttgt

SEQ ID NO: 972048 - DNA, 25 bp, Homo sapien
agggtgattgttaggacgttgtatt

SEQ ID NO: 972049 - DNA, 25 bp, Homo sapien
ttaggacgttgtattttgttgccat

SEQ ID NO: 972050 - DNA, 25 bp, Homo sapien
catagttacataattggatagcagc

SEQ ID NO: 972051 - DNA, 25 bp, Homo sapien
tcctagtggaagaaaagtgacccat

SEQ ID NO: 972052 - DNA, 25 bp, Homo sapien
tataataattatcgggactgctgct

SEQ ID NO: 972053 - DNA, 25 bp, Homo sapien
ttctgaagaccctaaaacattatct

SEQ ID NO: 972054 - DNA, 25 bp, Homo sapien
tgaagtccaggtaaattgcggatgc

SEQ ID NO: 972055 - DNA, 25 bp, Homo sapien
ggtgaagtccaggtaaattgcggat

SEQ ID NO: 972056 - DNA, 25 bp, Homo sapien
gaacagtttgatttctggtgaagtc

SEQ ID NO: 972057 - DNA, 25 bp, Homo sapien
tggtgaagtccaggtaaattgcgga

SEQ ID NO: 972058 - DNA, 25 bp, Homo sapien
ccagttctttccagaggcctatttc

SEQ ID NO: 972059 - DNA, 25 bp, Homo sapien
cccagttctttccagaggcctattt

SEQ ID NO: 972060 - DNA, 25 bp, Homo sapien
tttgccctctagataactctgcatc

SEQ ID NO: 972061 - DNA, 25 bp, Homo sapien
atgaagacatttgccctctagataa

SEQ ID NO: 972062 - DNA, 25 bp, Homo sapien
tctaattgaattgttctggcaccca

SEQ ID NO: 972063 - DNA, 25 bp, Homo sapien
gttctgcttgaccagaggctgagga

SEQ ID NO: 972064 - DNA, 25 bp, Homo sapien
tgcccagtgcaaccagacatttaaa

SEQ ID NO: 972065 - DNA, 25 bp, Homo sapien
gaaggaagactctataacaaattct

SEQ ID NO: 972066 - DNA, 25 bp, Homo sapien
gagtctgctaatacgttgaaatgct

SEQ ID NO: 972067 - DNA, 25 bp, Homo sapien
gctaatacgttgaaatgctcttgaa

SEQ ID NO: 972068 - DNA, 25 bp, Homo sapien
tcactgcaccgagtctgctaatacg

SEQ ID NO: 972069 - DNA, 25 bp, Homo sapien
caccgagtctgctaatacgttgaaa

SEQ ID NO: 972070 - DNA, 25 bp, Homo sapien
catcagaaatcctatattgccttga

SEQ ID NO: 972071 - DNA, 25 bp, Homo sapien
tcatcagaaatcctatattgccttg

SEQ ID NO: 972072 - DNA, 25 bp, Homo sapien
tgtggtatatatctcaatcccacct

SEQ ID NO: 972073 - DNA, 25 bp, Homo sapien
gtggtatatatctcaatcccacctc

SEQ ID NO: 972074 - DNA, 25 bp, Homo sapien
tcaatcccacctcctccgtaaaaca

SEQ ID NO: 972075 - DNA, 25 bp, Homo sapien
tacttccatgcttgcagaacacctc

SEQ ID NO: 972076 - DNA, 25 bp, Homo sapien
tgcttgcagaacacctcagacatgt

SEQ ID NO: 972077 - DNA, 25 bp, Homo sapien
catgtccctatgatagcactgatgg

SEQ ID NO: 972078 - DNA, 25 bp, Homo sapien
gcagaacacctcagacatgtcccta

SEQ ID NO: 972079 - DNA, 25 bp, Homo sapien
catccttcccaacatttgttgcaga

SEQ ID NO: 972080 - DNA, 25 bp, Homo sapien
aagactgatgacatccttcccaaca

SEQ ID NO: 972081 - DNA, 25 bp, Homo sapien
aaaaaagactgatgacatccttccc

SEQ ID NO: 972082 - DNA, 25 bp, Homo sapien
tcccaacatttgttgcagatctgac

SEQ ID NO: 972083 - DNA, 25 bp, Homo sapien
tgtggatttacgtagggagtctgtt

SEQ ID NO: 972084 - DNA, 25 bp, Homo sapien
aatgtgacagtttaaccactgtgag

SEQ ID NO: 972085 - DNA, 25 bp, Homo sapien
tgacagtttaaccactgtgagtgct

SEQ ID NO: 972086 - DNA, 25 bp, Homo sapien
ttttccattgcaggaatccgatgat

SEQ ID NO: 972087 - DNA, 25 bp, Homo sapien
gaattgagaccctggctgtgtgaaa

SEQ ID NO: 972088 - DNA, 25 bp, Homo sapien
tatagggaagtttgtttatgccgca

SEQ ID NO: 972089 - DNA, 25 bp, Homo sapien
tatgccgcaggcttttagtaactca

SEQ ID NO: 972090 - DNA, 25 bp, Homo sapien
gctaaggttactcatctgggaaggg

SEQ ID NO: 972091 - DNA, 25 bp, Homo sapien
tccccatgaatctggtgccttttct

SEQ ID NO: 972092 - DNA, 25 bp, Homo sapien
tcagaactgaatagaaggatttaca

SEQ ID NO: 972093 - DNA, 25 bp, Homo sapien
ggtgccttttctgtggatccaataa

SEQ ID NO: 972094 - DNA, 25 bp, Homo sapien
ttacagctccccatgaatctggtgc

SEQ ID NO: 972095 - DNA, 25 bp, Homo sapien
tttcacaatttctaatctcatcttc

SEQ ID NO: 972096 - DNA, 25 bp, Homo sapien
cacaatttctaatctcatcttcatg

SEQ ID NO: 972097 - DNA, 25 bp, Homo sapien
ctttgttttagggccaagttctctg

SEQ ID NO: 972098 - DNA, 25 bp, Homo sapien
caatttctaatctcatcttcatgta

SEQ ID NO: 972099 - DNA, 25 bp, Homo sapien
tagcttgaaatagctgaccttcctc

SEQ ID NO: 972100 - DNA, 25 bp, Homo sapien
taaagtacagatctaaacaaagccg

SEQ ID NO: 972101 - DNA, 25 bp, Homo sapien
aaagccgcagtctcagggcttctga

SEQ ID NO: 972102 - DNA, 25 bp, Homo sapien
catgatttccttattagcttgaaat

SEQ ID NO: 972103 - DNA, 25 bp, Homo sapien
tactttgcagctgctaatctgctga

SEQ ID NO: 972104 - DNA, 25 bp, Homo sapien
ctgctgacattttccaaaggtggca

SEQ ID NO: 972105 - DNA, 25 bp, Homo sapien
taatctgctgacattttccaaaggt

SEQ ID NO: 972106 - DNA, 25 bp, Homo sapien
gctgctaatctgctgacattttcca

SEQ ID NO: 972107 - DNA, 25 bp, Homo sapien
aatactccaggatcaaagctctctg

SEQ ID NO: 972108 - DNA, 25 bp, Homo sapien
ggaacaggactgctaaatttagtac

SEQ ID NO: 972109 - DNA, 25 bp, Homo sapien
gactgctaaatttagtactgtcaaa

SEQ ID NO: 972110 - DNA, 25 bp, Homo sapien
tactgtcaaatactccaggatcaaa

SEQ ID NO: 972111 - DNA, 25 bp, Homo sapien
tcttcattgagctcttttcattcca

SEQ ID NO: 972112 - DNA, 25 bp, Homo sapien
ccttcactgtacaactgtagctcag

SEQ ID NO: 972113 - DNA, 25 bp, Homo sapien
tggcttatgcattggtttccagccg

SEQ ID NO: 972114 - DNA, 25 bp, Homo sapien
ggtttccagccgttcttcattgagc

SEQ ID NO: 972115 - DNA, 25 bp, Homo sapien
ttctttatgttaaagctactttcca

SEQ ID NO: 972116 - DNA, 25 bp, Homo sapien
tgctcccccagaactgccataagcc

SEQ ID NO: 972117 - DNA, 25 bp, Homo sapien
tccagaactgctcccccagaactgc

SEQ ID NO: 972118 - DNA, 25 bp, Homo sapien
ctcccccagaactgccataagccat

SEQ ID NO: 972119 - DNA, 25 bp, Homo sapien
cccagaactgccataagccatctct

SEQ ID NO: 972120 - DNA, 25 bp, Homo sapien
tgggaaattcagtatagacccagca

SEQ ID NO: 972121 - DNA, 25 bp, Homo sapien
gctgggaaattcagtatagacccag

SEQ ID NO: 972122 - DNA, 25 bp, Homo sapien
aattcagtatagacccagcaggatg

SEQ ID NO: 972123 - DNA, 25 bp, Homo sapien
gaaattcagtatagacccagcagga

SEQ ID NO: 972124 - DNA, 25 bp, Homo sapien
ttcttccttcatccacacagttatc

SEQ ID NO: 972125 - DNA, 25 bp, Homo sapien
tcctcaggagattggcgaagtcctc

SEQ ID NO: 972126 - DNA, 25 bp, Homo sapien
tttgcgctagttccaccctcaagtg

SEQ ID NO: 972127 - DNA, 25 bp, Homo sapien
tcatctgggtttgcgctagttccac

SEQ ID NO: 972128 - DNA, 25 bp, Homo sapien
tcagaaccttcttccgtctgccctc

SEQ ID NO: 972129 - DNA, 25 bp, Homo sapien
tgccctccacctcgctctgctttct

SEQ ID NO: 972130 - DNA, 25 bp, Homo sapien
tgtaaaacaggctcagaaccttctt

SEQ ID NO: 972131 - DNA, 25 bp, Homo sapien
tctctgggctttctcacccacagcc

SEQ ID NO: 972132 - DNA, 25 bp, Homo sapien
tcctgtattatgaaatttccctgat

SEQ ID NO: 972133 - DNA, 25 bp, Homo sapien
aaaccagaagggcattgataaactt

SEQ ID NO: 972134 - DNA, 25 bp, Homo sapien
taaacttcaccttcctgtattatga

SEQ ID NO: 972135 - DNA, 25 bp, Homo sapien
aatttccctgattagtctcgttgcc

SEQ ID NO: 972136 - DNA, 25 bp, Homo sapien
gaattagatgttggagagcagagat

SEQ ID NO: 972137 - DNA, 25 bp, Homo sapien
taaggcacatgctttggaaaccaga

SEQ ID NO: 972138 - DNA, 25 bp, Homo sapien
tttggtcattgaagttaaggcacat

SEQ ID NO: 972139 - DNA, 25 bp, Homo sapien
tagatgttggagagcagagattctg

SEQ ID NO: 972140 - DNA, 25 bp, Homo sapien
tgtgaactactaccaagttggcagc

SEQ ID NO: 972141 - DNA, 25 bp, Homo sapien
ttatggttatgccacactctgccca

SEQ ID NO: 972142 - DNA, 25 bp, Homo sapien
ggcagccagctaatatccaagaaag

SEQ ID NO: 972143 - DNA, 25 bp, Homo sapien
taactgacatccagggaggctcact

SEQ ID NO: 972144 - DNA, 25 bp, Homo sapien
ctcagtggaagcacgacctcaactg

SEQ ID NO: 972145 - DNA, 25 bp, Homo sapien
gtggaagcacgacctcaactgtcat

SEQ ID NO: 972146 - DNA, 25 bp, Homo sapien
tcagtggaagcacgacctcaactgt

SEQ ID NO: 972147 - DNA, 25 bp, Homo sapien
agtggaagcacgacctcaactgtca

SEQ ID NO: 972148 - DNA, 25 bp, Homo sapien
ttcttcttcccaaagtaaatgccag

SEQ ID NO: 972149 - DNA, 25 bp, Homo sapien
aagtaaatgccagtgtaaagacact

SEQ ID NO: 972150 - DNA, 25 bp, Homo sapien
taaatgccagtgtaaagacactttt

SEQ ID NO: 972151 - DNA, 25 bp, Homo sapien
cttcttcccaaagtaaatgccagtg

SEQ ID NO: 972152 - DNA, 25 bp, Homo sapien
ccgatagcaaggatggctggaggct

SEQ ID NO: 972153 - DNA, 25 bp, Homo sapien
caccgatagcaaggatggctggagg

SEQ ID NO: 972154 - DNA, 25 bp, Homo sapien
tcaccgatagcaaggatggctggag

SEQ ID NO: 972155 - DNA, 25 bp, Homo sapien
atagcaaggatggctggaggctgac

SEQ ID NO: 972156 - DNA, 25 bp, Homo sapien
tgagagcttggaccataaggaccag

SEQ ID NO: 972157 - DNA, 25 bp, Homo sapien
accataaggaccagcagatcagccc

SEQ ID NO: 972158 - DNA, 25 bp, Homo sapien
ccctgagagcttggaccataaggac

SEQ ID NO: 972159 - DNA, 25 bp, Homo sapien
agagcttggaccataaggaccagca

SEQ ID NO: 972160 - DNA, 25 bp, Homo sapien
ctagaataagattcagagcagtact

SEQ ID NO: 972161 - DNA, 25 bp, Homo sapien
gaataagattcagagcagtactggc

SEQ ID NO: 972162 - DNA, 25 bp, Homo sapien
ttcagagcagtactggctttaacca

SEQ ID NO: 972163 - DNA, 25 bp, Homo sapien
cagtactggctttaaccacagcgct

SEQ ID NO: 972164 - DNA, 25 bp, Homo sapien
gtcactctcacaggaaataatgtgt

SEQ ID NO: 972165 - DNA, 25 bp, Homo sapien
cgtcactctcacaggaaataatgtg

SEQ ID NO: 972166 - DNA, 25 bp, Homo sapien
cagtcaagcatgctacacaaattgg

SEQ ID NO: 972167 - DNA, 25 bp, Homo sapien
tgactgaagtaagatagagccagct

SEQ ID NO: 972168 - DNA, 25 bp, Homo sapien
gagccagctaaatagttcagcaaca

SEQ ID NO: 972169 - DNA, 25 bp, Homo sapien
cacaaattgggacagtatttatctg

SEQ ID NO: 972170 - DNA, 25 bp, Homo sapien
agtttttggtgaatgttgcttctgc

SEQ ID NO: 972171 - DNA, 25 bp, Homo sapien
ttttggtgaatgttgcttctgcttg

SEQ ID NO: 972172 - DNA, 25 bp, Homo sapien
gaatgttgcttctgcttgtagaatt

SEQ ID NO: 972173 - DNA, 25 bp, Homo sapien
tggtgaatgttgcttctgcttgtag

SEQ ID NO: 972174 - DNA, 25 bp, Homo sapien
ttaaatagggatctgtggccatatc

SEQ ID NO: 972175 - DNA, 25 bp, Homo sapien
cctcatggcccaagattatacagtt

SEQ ID NO: 972176 - DNA, 25 bp, Homo sapien
taatgtgttctttgcgatcctcatg

SEQ ID NO: 972177 - DNA, 25 bp, Homo sapien
tctgggccacagtactttcagatat

SEQ ID NO: 972178 - DNA, 25 bp, Homo sapien
gaacttgtaataccctcaaaagcca

SEQ ID NO: 972179 - DNA, 25 bp, Homo sapien
acttgtaataccctcaaaagccagc

SEQ ID NO: 972180 - DNA, 25 bp, Homo sapien
ttttgccgaacttgtaataccctca

SEQ ID NO: 972181 - DNA, 25 bp, Homo sapien
tgccgaacttgtaataccctcaaaa

SEQ ID NO: 972182 - DNA, 25 bp, Homo sapien
caattaaatcctagtattactgttt

SEQ ID NO: 972183 - DNA, 25 bp, Homo sapien
ttgcatactgccttgggagttcaga

SEQ ID NO: 972184 - DNA, 25 bp, Homo sapien
gctgatttcttgcaaggatatcaat

SEQ ID NO: 972185 - DNA, 25 bp, Homo sapien
agtcatctctgaagagagctttggg

SEQ ID NO: 972186 - DNA, 25 bp, Homo sapien
gcatcagagccacggaaggaacact

SEQ ID NO: 972187 - DNA, 25 bp, Homo sapien
cacggaaggaacactgaaaaacgag

SEQ ID NO: 972188 - DNA, 25 bp, Homo sapien
tcagagccacggaaggaacactgaa

SEQ ID NO: 972189 - DNA, 25 bp, Homo sapien
gagccacggaaggaacactgaaaaa

SEQ ID NO: 972190 - DNA, 25 bp, Homo sapien
gatcttggtctcagtggattgcata

SEQ ID NO: 972191 - DNA, 25 bp, Homo sapien
tggtctcagtggattgcataagcat

SEQ ID NO: 972192 - DNA, 25 bp, Homo sapien
ggaagcaccagataatctgagagca

SEQ ID NO: 972193 - DNA, 25 bp, Homo sapien
tctggaagcaccagataatctgaga

SEQ ID NO: 972194 - DNA, 25 bp, Homo sapien
cactccacgccataaccaataatta

SEQ ID NO: 972195 - DNA, 25 bp, Homo sapien
ttaggttcgttcagcactcatcatc

SEQ ID NO: 972196 - DNA, 25 bp, Homo sapien
accaataattacaggttctgcttgc

SEQ ID NO: 972197 - DNA, 25 bp, Homo sapien
cacgccataaccaataattacaggt

SEQ ID NO: 972198 - DNA, 25 bp, Homo sapien
tgtatttcatatactgtttctgctg

SEQ ID NO: 972199 - DNA, 25 bp, Homo sapien
gtatttcatatactgtttctgctgc

SEQ ID NO: 972200 - DNA, 25 bp, Homo sapien
taaatggagaaacagcttgcatctg

SEQ ID NO: 972201 - DNA, 25 bp, Homo sapien
tgtgtatttcatatactgtttctgc

SEQ ID NO: 972202 - DNA, 25 bp, Homo sapien
ctttgcagttacctgagatttctca

SEQ ID NO: 972203 - DNA, 25 bp, Homo sapien
gaagtcctgattggtcccacattta

SEQ ID NO: 972204 - DNA, 25 bp, Homo sapien
tagctctatggtactctgctttcac

SEQ ID NO: 972205 - DNA, 25 bp, Homo sapien
tttcttcactcccatactcaaagga

SEQ ID NO: 972206 - DNA, 25 bp, Homo sapien
gttattcactaatgtttcacaaatg

SEQ ID NO: 972207 - DNA, 25 bp, Homo sapien
atgttattcactaatgtttcacaaa

SEQ ID NO: 972208 - DNA, 25 bp, Homo sapien
ctctagtatcttcatttcagttgga

SEQ ID NO: 972209 - DNA, 25 bp, Homo sapien
tctagtatcttcatttcagttggag

SEQ ID NO: 972210 - DNA, 25 bp, Homo sapien
taaacattgggagttgataacaagg

SEQ ID NO: 972211 - DNA, 25 bp, Homo sapien
gaaactgcacttggctctaaaggtc

SEQ ID NO: 972212 - DNA, 25 bp, Homo sapien
caagggcatgtttcacggtattgac

SEQ ID NO: 972213 - DNA, 25 bp, Homo sapien
tcaggagttagtgacaagatgacct

SEQ ID NO: 972214 - DNA, 25 bp, Homo sapien
gacttatgcctctcataaccaggta

SEQ ID NO: 972215 - DNA, 25 bp, Homo sapien
gcttggcgctcatctctgtaactca

SEQ ID NO: 972216 - DNA, 25 bp, Homo sapien
tgtaactcaccagggacttatgcct

SEQ ID NO: 972217 - DNA, 25 bp, Homo sapien
gaccagtacagcctctgccaaactg

SEQ ID NO: 972218 - DNA, 25 bp, Homo sapien
gaggccaatatagaattccattcaa

SEQ ID NO: 972219 - DNA, 25 bp, Homo sapien
ctgctcacgtgtgaggccaatatag

SEQ ID NO: 972220 - DNA, 25 bp, Homo sapien
tgtggataaaggaaatcttcaaaaa

SEQ ID NO: 972221 - DNA, 25 bp, Homo sapien
cgtgtgaggccaatatagaattcca

SEQ ID NO: 972222 - DNA, 25 bp, Homo sapien
cccctgactccttggggagagccaa

SEQ ID NO: 972223 - DNA, 25 bp, Homo sapien
aatatttcttggctgtcagagttac

SEQ ID NO: 972224 - DNA, 25 bp, Homo sapien
ggctttgccagaaaccgatccactc

SEQ ID NO: 972225 - DNA, 25 bp, Homo sapien
cgatccactcatatggtctaaccat

SEQ ID NO: 972226 - DNA, 25 bp, Homo sapien
tcagagttactgaggctttgccaga

SEQ ID NO: 972227 - DNA, 25 bp, Homo sapien
tgtttttattgcttggtaatgcaga

SEQ ID NO: 972228 - DNA, 25 bp, Homo sapien
cagcctcacatctaccaaaagccat

SEQ ID NO: 972229 - DNA, 25 bp, Homo sapien
cttcacccacttggctattctcaga

SEQ ID NO: 972230 - DNA, 25 bp, Homo sapien
ttggctattctcagaacaactccag

SEQ ID NO: 972231 - DNA, 25 bp, Homo sapien
tattcagtatgttgtggcttcacag

SEQ ID NO: 972232 - DNA, 25 bp, Homo sapien
tgatgtcaggactcccaacccgatt

SEQ ID NO: 972233 - DNA, 25 bp, Homo sapien
tctctgagacatagcatggtttcta

SEQ ID NO: 972234 - DNA, 25 bp, Homo sapien
cagcctagtgtctcaattcatgatg

SEQ ID NO: 972235 - DNA, 25 bp, Homo sapien
gaagctgtgcatttgtcgtgtagtt

SEQ ID NO: 972236 - DNA, 25 bp, Homo sapien
tcagcagcaccatcatagacaccaa

SEQ ID NO: 972237 - DNA, 25 bp, Homo sapien
ccatcatagacaccaacattcaaac

SEQ ID NO: 972238 - DNA, 25 bp, Homo sapien
cagcaccatcatagacaccaacatt

SEQ ID NO: 972239 - DNA, 25 bp, Homo sapien
gcaccatcatagacaccaacattca

SEQ ID NO: 972240 - DNA, 25 bp, Homo sapien
tctgtaggtttggtgtgggtgggat

SEQ ID NO: 972241 - DNA, 25 bp, Homo sapien
tgtgggtgggatgttatgggtgggc

SEQ ID NO: 972242 - DNA, 25 bp, Homo sapien
acgacatgcaggttctgtaggtttg

SEQ ID NO: 972243 - DNA, 25 bp, Homo sapien
ctctgacgacatgcaggttctgtag

SEQ ID NO: 972244 - DNA, 25 bp, Homo sapien
ctgtcatacataggagactcctctc

SEQ ID NO: 972245 - DNA, 25 bp, Homo sapien
gactcctctctataccagatcttat

SEQ ID NO: 972246 - DNA, 25 bp, Homo sapien
tataccagatcttatcatcattcca

SEQ ID NO: 972247 - DNA, 25 bp, Homo sapien
cataggagactcctctctataccag

SEQ ID NO: 972248 - DNA, 25 bp, Homo sapien
cttctgcttcctcagggaccttcat

SEQ ID NO: 972249 - DNA, 25 bp, Homo sapien
atctccttctgcttcctcagggacc

SEQ ID NO: 972250 - DNA, 25 bp, Homo sapien
tccttctgcttcctcagggaccttc

SEQ ID NO: 972251 - DNA, 25 bp, Homo sapien
ttcatctccttctgcttcctcaggg

SEQ ID NO: 972252 - DNA, 25 bp, Homo sapien
taatggattatctcctagttctatc

SEQ ID NO: 972253 - DNA, 25 bp, Homo sapien
ctggcctgtttcgaaatgtaatgac

SEQ ID NO: 972254 - DNA, 25 bp, Homo sapien
gaccaaaatgctaactaatacaacc

SEQ ID NO: 972255 - DNA, 25 bp, Homo sapien
cctgtttcgaaatgtaatgaccaaa

SEQ ID NO: 972256 - DNA, 25 bp, Homo sapien
tgcatctctggcctgtttcgaaatg

SEQ ID NO: 972257 - DNA, 25 bp, Homo sapien
caccttggaatgaatcagtaccagg

SEQ ID NO: 972258 - DNA, 25 bp, Homo sapien
gccagtcaccttggaatgaatcagt

SEQ ID NO: 972259 - DNA, 25 bp, Homo sapien
tagccagtcaccttggaatgaatca

SEQ ID NO: 972260 - DNA, 25 bp, Homo sapien
cagtcaccttggaatgaatcagtac

SEQ ID NO: 972261 - DNA, 25 bp, Homo sapien
agagctataacaccatccagtgaca

SEQ ID NO: 972262 - DNA, 25 bp, Homo sapien
cagagctataacaccatccagtgac

SEQ ID NO: 972263 - DNA, 25 bp, Homo sapien
agctataacaccatccagtgacata

SEQ ID NO: 972264 - DNA, 25 bp, Homo sapien
accagagctataacaccatccagtg

SEQ ID NO: 972265 - DNA, 25 bp, Homo sapien
gcatcactgacacctttttctttgc

SEQ ID NO: 972266 - DNA, 25 bp, Homo sapien
gccttcccattcacctggtgaaggg

SEQ ID NO: 972267 - DNA, 25 bp, Homo sapien
ttgccttcccattcacctggtgaag

SEQ ID NO: 972268 - DNA, 25 bp, Homo sapien
tttgccttcccattcacctggtgaa

SEQ ID NO: 972269 - DNA, 25 bp, Homo sapien
taacgctgaagttgaccgtcagcat

SEQ ID NO: 972270 - DNA, 25 bp, Homo sapien
aactggctaacgctgaagttgaccg

SEQ ID NO: 972271 - DNA, 25 bp, Homo sapien
tggtaaactggctaacgctgaagtt

SEQ ID NO: 972272 - DNA, 25 bp, Homo sapien
ggctaacgctgaagttgaccgtcag

SEQ ID NO: 972273 - DNA, 25 bp, Homo sapien
tcagtggtcccgtgcttgaagggtt

SEQ ID NO: 972274 - DNA, 25 bp, Homo sapien
gaatggcggctgtcaaagagagaaa

SEQ ID NO: 972275 - DNA, 25 bp, Homo sapien
tgtttagaaactcctgaatggcggc

SEQ ID NO: 972276 - DNA, 25 bp, Homo sapien
ggagtcaaattttcacacacgccaa

SEQ ID NO: 972277 - DNA, 25 bp, Homo sapien
aagtctttgttgaaatctggatgag

SEQ ID NO: 972278 - DNA, 25 bp, Homo sapien
gagtgagagtctgtaaattcagtcc

SEQ ID NO: 972279 - DNA, 25 bp, Homo sapien
ttacataaattggatgtctctggga

SEQ ID NO: 972280 - DNA, 25 bp, Homo sapien
caaattgaacagcatatattgttag

SEQ ID NO: 972281 - DNA, 25 bp, Homo sapien
gataggccagaatcccctgagtact

SEQ ID NO: 972282 - DNA, 25 bp, Homo sapien
cacaccagaaggagacgataggcca

SEQ ID NO: 972283 - DNA, 25 bp, Homo sapien
tctaagagaattcgagccctggctg

SEQ ID NO: 972284 - DNA, 25 bp, Homo sapien
gaacaaccttatgtgactacagcaa

SEQ ID NO: 972285 - DNA, 25 bp, Homo sapien
caagctgagtgttcatgttccatgg

SEQ ID NO: 972286 - DNA, 25 bp, Homo sapien
aaataaactccttttagacctgcag

SEQ ID NO: 972287 - DNA, 25 bp, Homo sapien
tctaaagtgttcagatagttcagta

SEQ ID NO: 972288 - DNA, 25 bp, Homo sapien
catggtgggctgtgcaaataaactc

SEQ ID NO: 972289 - DNA, 25 bp, Homo sapien
tacaactgttgtatcaggaatcagg

SEQ ID NO: 972290 - DNA, 25 bp, Homo sapien
tcctgtgacacagtgcattatctgt

SEQ ID NO: 972291 - DNA, 25 bp, Homo sapien
tatagatacggtaagagccacattc

SEQ ID NO: 972292 - DNA, 25 bp, Homo sapien
tagaaaaacttctggtgtggccagg

SEQ ID NO: 972293 - DNA, 25 bp, Homo sapien
tttgacagtcgctcttctacttcag

SEQ ID NO: 972294 - DNA, 25 bp, Homo sapien
atattttcatcacgtcattaaaatc

SEQ ID NO: 972295 - DNA, 25 bp, Homo sapien
aatactaatcttcaaggtgctttct

SEQ ID NO: 972296 - DNA, 25 bp, Homo sapien
tctttcactaggcaatggttctgtc

SEQ ID NO: 972297 - DNA, 25 bp, Homo sapien
taaggcgggcctagttggttcatgt

SEQ ID NO: 972298 - DNA, 25 bp, Homo sapien
tgtcaattccaaagcaagaggatgg

SEQ ID NO: 972299 - DNA, 25 bp, Homo sapien
tggtagagacatccttgggctttga

SEQ ID NO: 972300 - DNA, 25 bp, Homo sapien
caagagtaggctattggcaagggct

SEQ ID NO: 972301 - DNA, 25 bp, Homo sapien
tgtggtcattatcaaggatgatcat

SEQ ID NO: 972302 - DNA, 25 bp, Homo sapien
tgattgtggtcattatcaaggatga

SEQ ID NO: 972303 - DNA, 25 bp, Homo sapien
ttgtggtcattatcaaggatgatca

SEQ ID NO: 972304 - DNA, 25 bp, Homo sapien
tggtgattgtggtcattatcaagga

SEQ ID NO: 972305 - DNA, 25 bp, Homo sapien
gaggaattcgttccaggcttctttc

SEQ ID NO: 972306 - DNA, 25 bp, Homo sapien
aattctgaggaattcgttccaggct

SEQ ID NO: 972307 - DNA, 25 bp, Homo sapien
ttctgaggaattcgttccaggcttc

SEQ ID NO: 972308 - DNA, 25 bp, Homo sapien
agaaattctgaggaattcgttccag

SEQ ID NO: 972309 - DNA, 25 bp, Homo sapien
ttgagtacaagctgaaattgtggag

SEQ ID NO: 972310 - DNA, 25 bp, Homo sapien
caggatatatgggatgttagaggca

SEQ ID NO: 972311 - DNA, 25 bp, Homo sapien
gagatgaggttatgccagcgaagaa

SEQ ID NO: 972312 - DNA, 25 bp, Homo sapien
cagcgaagaaccatggtgagagcaa

SEQ ID NO: 972313 - DNA, 25 bp, Homo sapien
caaagaatctctaaattgtcacatg

SEQ ID NO: 972314 - DNA, 25 bp, Homo sapien
aaaaacagcatacaagtcctttctg

SEQ ID NO: 972315 - DNA, 25 bp, Homo sapien
cacatgttttaatgattctcacaag

SEQ ID NO: 972316 - DNA, 25 bp, Homo sapien
taatgattcctatgtatcacactgg

SEQ ID NO: 972317 - DNA, 25 bp, Homo sapien
cacaggctacacagtgggtatgaca

SEQ ID NO: 972318 - DNA, 25 bp, Homo sapien
tccctgatcagcttaagacaatgtg

SEQ ID NO: 972319 - DNA, 25 bp, Homo sapien
tcagtaaaagtcatacacaggctac

SEQ ID NO: 972320 - DNA, 25 bp, Homo sapien
tatgtgactcgtttgcatggatgcg

SEQ ID NO: 972321 - DNA, 25 bp, Homo sapien
gacatcatttggtctgtccccggct

SEQ ID NO: 972322 - DNA, 25 bp, Homo sapien
caggatttgtgtcaccccaatggag

SEQ ID NO: 972323 - DNA, 25 bp, Homo sapien
caaagattcttgacaggcttggttt

SEQ ID NO: 972324 - DNA, 25 bp, Homo sapien
ccaatggagattcccagaaacctca

SEQ ID NO: 972325 - DNA, 25 bp, Homo sapien
cgaaagttacacacatgaatagggc

SEQ ID NO: 972326 - DNA, 25 bp, Homo sapien
caggaggttaccaacgacagttaga

SEQ ID NO: 972327 - DNA, 25 bp, Homo sapien
tcactggttctaggcatctaaggaa

SEQ ID NO: 972328 - DNA, 25 bp, Homo sapien
tgaacttgaagctcgactagggaac

SEQ ID NO: 972329 - DNA, 25 bp, Homo sapien
tccttttcacctgagctgtcagaaa

SEQ ID NO: 972330 - DNA, 25 bp, Homo sapien
ctccttttcacctgagctgtcagaa

SEQ ID NO: 972331 - DNA, 25 bp, Homo sapien
ccttttcacctgagctgtcagaaag

SEQ ID NO: 972332 - DNA, 25 bp, Homo sapien
acacatgcaccacagcgtccagcta

SEQ ID NO: 972333 - DNA, 25 bp, Homo sapien
actgtaaccggctccttatcttgtc

SEQ ID NO: 972334 - DNA, 25 bp, Homo sapien
ggcgtgaatcactgtaaccggctcc

SEQ ID NO: 972335 - DNA, 25 bp, Homo sapien
ttcaccgcctaggttcacctcccag

SEQ ID NO: 972336 - DNA, 25 bp, Homo sapien
tgggcctgtttggaacatcctggga

SEQ ID NO: 972337 - DNA, 25 bp, Homo sapien
gggcctgtttggaacatcctgggaa

SEQ ID NO: 972338 - DNA, 25 bp, Homo sapien
gcctgtttggaacatcctgggaatt

SEQ ID NO: 972339 - DNA, 25 bp, Homo sapien
ggcctgtttggaacatcctgggaat

SEQ ID NO: 972340 - DNA, 25 bp, Homo sapien
gaaatatactactccacagcactta

SEQ ID NO: 972341 - DNA, 25 bp, Homo sapien
cagtgaaatatactactccacagca

SEQ ID NO: 972342 - DNA, 25 bp, Homo sapien
gtgaaatatactactccacagcact

SEQ ID NO: 972343 - DNA, 25 bp, Homo sapien
aatatactactccacagcacttaaa

SEQ ID NO: 972344 - DNA, 25 bp, Homo sapien
gcagtgctacatggcggttaggtaa

SEQ ID NO: 972345 - DNA, 25 bp, Homo sapien
catatccaggacaaagtaagtgagc

SEQ ID NO: 972346 - DNA, 25 bp, Homo sapien
gctttgcggcctagcactaagataa

SEQ ID NO: 972347 - DNA, 25 bp, Homo sapien
cagaaaataacgagctctgggcagc

SEQ ID NO: 972348 - DNA, 25 bp, Homo sapien
aattccaagcatgagtaagccaccg

SEQ ID NO: 972349 - DNA, 25 bp, Homo sapien
ggtaatccataatttgtcatcctgg

SEQ ID NO: 972350 - DNA, 25 bp, Homo sapien
gctttcaaagtgaccatatctgacc

SEQ ID NO: 972351 - DNA, 25 bp, Homo sapien
gaccatatctgaccattgtactgga

SEQ ID NO: 972352 - DNA, 25 bp, Homo sapien
tgtttccttattgtgaccactatca

SEQ ID NO: 972353 - DNA, 25 bp, Homo sapien
tatcactgacagattttatctagag

SEQ ID NO: 972354 - DNA, 25 bp, Homo sapien
tcaaagttcaagctactcaccataa

SEQ ID NO: 972355 - DNA, 25 bp, Homo sapien
tatgccttcaacaaggttcagggaa

SEQ ID NO: 972356 - DNA, 25 bp, Homo sapien
gaagactacatcagcaccagaaatg

SEQ ID NO: 972357 - DNA, 25 bp, Homo sapien
tcaaaacagtctcgaagcacaatag

SEQ ID NO: 972358 - DNA, 25 bp, Homo sapien
taaattggagtgtgcagagtagcca

SEQ ID NO: 972359 - DNA, 25 bp, Homo sapien
ttagtgccgttgtacattggaagca

SEQ ID NO: 972360 - DNA, 25 bp, Homo sapien
ttcatatgtccaaacgccacaagcc

SEQ ID NO: 972361 - DNA, 25 bp, Homo sapien
catatgtccaaacgccacaagccag

SEQ ID NO: 972362 - DNA, 25 bp, Homo sapien
tgttcatatgtccaaacgccacaag

SEQ ID NO: 972363 - DNA, 25 bp, Homo sapien
ttcctgttcatatgtccaaacgcca

SEQ ID NO: 972364 - DNA, 25 bp, Homo sapien
aaatgacaagcaaacttccaaagta

SEQ ID NO: 972365 - DNA, 25 bp, Homo sapien
gaaaatgacaagcaaacttccaaag

SEQ ID NO: 972366 - DNA, 25 bp, Homo sapien
cagaaaatgacaagcaaacttccaa

SEQ ID NO: 972367 - DNA, 25 bp, Homo sapien
acagaaaatgacaagcaaacttcca

SEQ ID NO: 972368 - DNA, 25 bp, Homo sapien
caatatcctaacatccccacaatga

SEQ ID NO: 972369 - DNA, 25 bp, Homo sapien
ggaaagtaagtcaaaatgactgctt

SEQ ID NO: 972370 - DNA, 25 bp, Homo sapien
aacagcaaacagcaatcatgaccgg

SEQ ID NO: 972371 - DNA, 25 bp, Homo sapien
tccccacaatgataaggaaacagca

SEQ ID NO: 972372 - DNA, 25 bp, Homo sapien
agaacattatttaggtagtccctca

SEQ ID NO: 972373 - DNA, 25 bp, Homo sapien
ttatttaggtagtccctcatccaag

SEQ ID NO: 972374 - DNA, 25 bp, Homo sapien
gtgagaacattatttaggtagtccc

SEQ ID NO: 972375 - DNA, 25 bp, Homo sapien
cattatttaggtagtccctcatcca

SEQ ID NO: 972376 - DNA, 25 bp, Homo sapien
ttacttgctacagctttagctttaa

SEQ ID NO: 972377 - DNA, 25 bp, Homo sapien
cttgctacagctttagctttaaatg

SEQ ID NO: 972378 - DNA, 25 bp, Homo sapien
tacttgctacagctttagctttaaa

SEQ ID NO: 972379 - DNA, 25 bp, Homo sapien
cattacttgctacagctttagcttt

SEQ ID NO: 972380 - DNA, 25 bp, Homo sapien
tttcatttccaagaggagtgatatt

SEQ ID NO: 972381 - DNA, 25 bp, Homo sapien
ttcatttccaagaggagtgatattt

SEQ ID NO: 972382 - DNA, 25 bp, Homo sapien
tcatttccaagaggagtgatatttt

SEQ ID NO: 972383 - DNA, 25 bp, Homo sapien
aatttcatttccaagaggagtgata

SEQ ID NO: 972384 - DNA, 25 bp, Homo sapien
gaaggacgttcaaccaggccatctt

SEQ ID NO: 972385 - DNA, 25 bp, Homo sapien
tcctcactcacaaaggaaggacgtt

SEQ ID NO: 972386 - DNA, 25 bp, Homo sapien
gccaccattggactatctgatcttt

SEQ ID NO: 972387 - DNA, 25 bp, Homo sapien
tcagtaagggtcaagtgaaagacac

SEQ ID NO: 972388 - DNA, 25 bp, Homo sapien
agcaggcagcgcagacacttcacgg

SEQ ID NO: 972389 - DNA, 25 bp, Homo sapien
gcgcagacacttcacggaatcttct

SEQ ID NO: 972390 - DNA, 25 bp, Homo sapien
ccaaaagagcagattgagggcgtag

SEQ ID NO: 972391 - DNA, 25 bp, Homo sapien
cacttcacggaatcttctctggcca

SEQ ID NO: 972392 - DNA, 25 bp, Homo sapien
tgagccccgtaagggagaagcccca

SEQ ID NO: 972393 - DNA, 25 bp, Homo sapien
taagggagaagccccatcctttcac

SEQ ID NO: 972394 - DNA, 25 bp, Homo sapien
agggagaagccccatcctttcacca

SEQ ID NO: 972395 - DNA, 25 bp, Homo sapien
gtaagggagaagccccatcctttca

SEQ ID NO: 972396 - DNA, 25 bp, Homo sapien
actcccaagggcaaaacggcagcga

SEQ ID NO: 972397 - DNA, 25 bp, Homo sapien
ctactcccaagggcaaaacggcagc

SEQ ID NO: 972398 - DNA, 25 bp, Homo sapien
ctcccaagggcaaaacggcagcgat

SEQ ID NO: 972399 - DNA, 25 bp, Homo sapien
tactcccaagggcaaaacggcagcg

SEQ ID NO: 972400 - DNA, 25 bp, Homo sapien
gcattcgagacatcgcctcatcaaa

SEQ ID NO: 972401 - DNA, 25 bp, Homo sapien
gggagagagaacacgggacatctca

SEQ ID NO: 972402 - DNA, 25 bp, Homo sapien
ccgaggcccagtgcattcgagacat

SEQ ID NO: 972403 - DNA, 25 bp, Homo sapien
agaacacgggacatctcaccatcac

SEQ ID NO: 972404 - DNA, 25 bp, Homo sapien
cgctgggcccggtgccccacgcccg

SEQ ID NO: 972405 - DNA, 25 bp, Homo sapien
gcgctgggcccggtgccccacgccc

SEQ ID NO: 972406 - DNA, 25 bp, Homo sapien
gctgggcccggtgccccacgcccgc

SEQ ID NO: 972407 - DNA, 25 bp, Homo sapien
ccggagggctgcattggcttcagct

SEQ ID NO: 972408 - DNA, 25 bp, Homo sapien
cagctggagacgcttctttctcttc

SEQ ID NO: 972409 - DNA, 25 bp, Homo sapien
ctcatcggggcagggaacttcttcg

SEQ ID NO: 972410 - DNA, 25 bp, Homo sapien
gcagggaacttcttcgcggagagcc

SEQ ID NO: 972411 - DNA, 25 bp, Homo sapien
tcctctccgagtccggacgaggcag

SEQ ID NO: 972412 - DNA, 25 bp, Homo sapien
gcagcagttgctggaaagtctctgc

SEQ ID NO: 972413 - DNA, 25 bp, Homo sapien
aaagtctctgctaagccacctccca

SEQ ID NO: 972414 - DNA, 25 bp, Homo sapien
gtccctcccaagtcctctccgagtc

SEQ ID NO: 972415 - DNA, 25 bp, Homo sapien
agcgagagtccccaaagggacgctt

SEQ ID NO: 972416 - DNA, 25 bp, Homo sapien
gagagtccccaaagggacgcttcac

SEQ ID NO: 972417 - DNA, 25 bp, Homo sapien
aggatagggtccagaagataatgcc

SEQ ID NO: 972418 - DNA, 25 bp, Homo sapien
taggaacttgggagaagtccgtgca

SEQ ID NO: 972419 - DNA, 25 bp, Homo sapien
gagatgagctggttctcactttggc

SEQ ID NO: 972420 - DNA, 25 bp, Homo sapien
cagcttgggctgcaaggctgaccat

SEQ ID NO: 972421 - DNA, 25 bp, Homo sapien
tcactttggcttaaaaaatggcagc

SEQ ID NO: 972422 - DNA, 25 bp, Homo sapien
attctgccgaaatggagatgagctg

SEQ ID NO: 972423 - DNA, 25 bp, Homo sapien
tcagaagtgcttctacccacaatgg

SEQ ID NO: 972424 - DNA, 25 bp, Homo sapien
tcaactttccatgcttctattgcag

SEQ ID NO: 972425 - DNA, 25 bp, Homo sapien
gactgctgttttacgtctctgtgat

SEQ ID NO: 972426 - DNA, 25 bp, Homo sapien
caatggagtcaggatgagactgctg

SEQ ID NO: 972427 - DNA, 25 bp, Homo sapien
ctgacactgttatgcaatgaccttc

SEQ ID NO: 972428 - DNA, 25 bp, Homo sapien
tcctcttagtggcagtctcaagaac

SEQ ID NO: 972429 - DNA, 25 bp, Homo sapien
agaacttgcagatggttaaaatcac

SEQ ID NO: 972430 - DNA, 25 bp, Homo sapien
tcaagaacttgcagatggttaaaat

SEQ ID NO: 972431 - DNA, 25 bp, Homo sapien
ttagtggcagtctcaagaacttgca

SEQ ID NO: 972432 - DNA, 25 bp, Homo sapien
ctggaattgcatttttggcccccaa

SEQ ID NO: 972433 - DNA, 25 bp, Homo sapien
ttttctcaccaccaataggcctgcc

SEQ ID NO: 972434 - DNA, 25 bp, Homo sapien
cttttgcagaatctctacaagccag

SEQ ID NO: 972435 - DNA, 25 bp, Homo sapien
gagattttctcaccaccaataggcc

SEQ ID NO: 972436 - DNA, 25 bp, Homo sapien
actaacagcagatcttttgcagaat

SEQ ID NO: 972437 - DNA, 25 bp, Homo sapien
tacaattagggctgagacaaaagat

SEQ ID NO: 972438 - DNA, 25 bp, Homo sapien
gataggaacttctatgagactttcc

SEQ ID NO: 972439 - DNA, 25 bp, Homo sapien
ggcccttcatgcgttcctaatcctg

SEQ ID NO: 972440 - DNA, 25 bp, Homo sapien
cagaaaggttcagttgcatacaaga

SEQ ID NO: 972441 - DNA, 25 bp, Homo sapien
tggtgctaacaacctgggctctttt

SEQ ID NO: 972442 - DNA, 25 bp, Homo sapien
tcatgtagagccatggaaaatgtct

SEQ ID NO: 972443 - DNA, 25 bp, Homo sapien
cataaaagacactgcctaaagatag

SEQ ID NO: 972444 - DNA, 25 bp, Homo sapien
aaatgtcattggtgagcaggacaca

SEQ ID NO: 972445 - DNA, 25 bp, Homo sapien
taaggaataatcaggcctgatggcc

SEQ ID NO: 972446 - DNA, 25 bp, Homo sapien
taaacaccttgctcgtggtatgggt

SEQ ID NO: 972447 - DNA, 25 bp, Homo sapien
gaatgatgccttaacctgcatctcc

SEQ ID NO: 972448 - DNA, 25 bp, Homo sapien
caaactcgatgaaatgcatgagccg

SEQ ID NO: 972449 - DNA, 25 bp, Homo sapien
gcatgagccgtagtggaataaacac

SEQ ID NO: 972450 - DNA, 25 bp, Homo sapien
gctctcggtacgatgaggcctgcag

SEQ ID NO: 972451 - DNA, 25 bp, Homo sapien
tcatgaagggaccatcaaggaagag

SEQ ID NO: 972452 - DNA, 25 bp, Homo sapien
gaaaacaggccaaagtggcaaacca

SEQ ID NO: 972453 - DNA, 25 bp, Homo sapien
tgcaaaagtggaagcgaagctgaaa

SEQ ID NO: 972454 - DNA, 25 bp, Homo sapien
gtttgctgagaatgaaggttgcagc

SEQ ID NO: 972455 - DNA, 25 bp, Homo sapien
gctgagaatgaaggttgcagcttca

SEQ ID NO: 972456 - DNA, 25 bp, Homo sapien
tgagaatgaaggttgcagcttcatt

SEQ ID NO: 972457 - DNA, 25 bp, Homo sapien
gaatgaaggttgcagcttcattcat

SEQ ID NO: 972458 - DNA, 25 bp, Homo sapien
ccgaaatcagaccagattgagcact

SEQ ID NO: 972459 - DNA, 25 bp, Homo sapien
taacttccgaaatcagaccagattg

SEQ ID NO: 972460 - DNA, 25 bp, Homo sapien
aaatcagaccagattgagcactttc

SEQ ID NO: 972461 - DNA, 25 bp, Homo sapien
tgcttaacttccgaaatcagaccag

SEQ ID NO: 972462 - DNA, 25 bp, Homo sapien
tgttacagctatattcaccgtttac

SEQ ID NO: 972463 - DNA, 25 bp, Homo sapien
tgggctccatgtggcatcggtcctg

SEQ ID NO: 972464 - DNA, 25 bp, Homo sapien
caccgtttactccacttctgctgga

SEQ ID NO: 972465 - DNA, 25 bp, Homo sapien
tcagggacagagattcatgcagtac

SEQ ID NO: 972466 - DNA, 25 bp, Homo sapien
taaagtaaagtgagttgggctgcca

SEQ ID NO: 972467 - DNA, 25 bp, Homo sapien
tcaaggtaagctctcggttgaagct

SEQ ID NO: 972468 - DNA, 25 bp, Homo sapien
gacgggcacagtttggaatccacca

SEQ ID NO: 972469 - DNA, 25 bp, Homo sapien
tatgtgttggtgacgtccttaaccc

SEQ ID NO: 972470 - DNA, 25 bp, Homo sapien
tataggacaatctaaaaaagatatt

SEQ ID NO: 972471 - DNA, 25 bp, Homo sapien
ttttttctattgcgaaatataggac

SEQ ID NO: 972472 - DNA, 25 bp, Homo sapien
ttttctattgcgaaatataggacaa

SEQ ID NO: 972473 - DNA, 25 bp, Homo sapien
ttctattgcgaaatataggacaatc

SEQ ID NO: 972474 - DNA, 25 bp, Homo sapien
gtcatatacatgtaacgtgaaatgt

SEQ ID NO: 972475 - DNA, 25 bp, Homo sapien
atacatgtaacgtgaaatgtatcat

SEQ ID NO: 972476 - DNA, 25 bp, Homo sapien
tgtaacgtgaaatgtatcataatcc

SEQ ID NO: 972477 - DNA, 25 bp, Homo sapien
catgtaacgtgaaatgtatcataat

SEQ ID NO: 972478 - DNA, 25 bp, Homo sapien
gtctggtgaggttcttcgtgctgca

SEQ ID NO: 972479 - DNA, 25 bp, Homo sapien
ttaaatccccaaagcctatgcaggc

SEQ ID NO: 972480 - DNA, 25 bp, Homo sapien
tagattttggcctaatgaaccccat

SEQ ID NO: 972481 - DNA, 25 bp, Homo sapien
acgcaaagggcagcaaaagggtcta

SEQ ID NO: 972482 - DNA, 25 bp, Homo sapien
taaaactctgataaaagaggtcaca

SEQ ID NO: 972483 - DNA, 25 bp, Homo sapien
gaaaacccagctataatccatgcat

SEQ ID NO: 972484 - DNA, 25 bp, Homo sapien
cactttcacttaagatgccacaaac

SEQ ID NO: 972485 - DNA, 25 bp, Homo sapien
tgcagacatcacactacaggacttc

SEQ ID NO: 972486 - DNA, 25 bp, Homo sapien
gttccaatgtcacactgaactttgg

SEQ ID NO: 972487 - DNA, 25 bp, Homo sapien
gtccaccatcaataattgaccaaag

SEQ ID NO: 972488 - DNA, 25 bp, Homo sapien
taggaggatctttgacatctaacac

SEQ ID NO: 972489 - DNA, 25 bp, Homo sapien
taacacctcaccctgcatatcagta

SEQ ID NO: 972490 - DNA, 25 bp, Homo sapien
cagacctagacacggttcttgagtt

SEQ ID NO: 972491 - DNA, 25 bp, Homo sapien
ctatcggcatccagacctagacacg

SEQ ID NO: 972492 - DNA, 25 bp, Homo sapien
tccagacctagacacggttcttgag

SEQ ID NO: 972493 - DNA, 25 bp, Homo sapien
ggcatccagacctagacacggttct

SEQ ID NO: 972494 - DNA, 25 bp, Homo sapien
ttcctcttggctcttaacatagtct

SEQ ID NO: 972495 - DNA, 25 bp, Homo sapien
cctcttggctcttaacatagtctag

SEQ ID NO: 972496 - DNA, 25 bp, Homo sapien
tcttggctcttaacatagtctagct

SEQ ID NO: 972497 - DNA, 25 bp, Homo sapien
cttggctcttaacatagtctagctc

SEQ ID NO: 972498 - DNA, 25 bp, Homo sapien
ctgcttagtaacagggtctgaggaa

SEQ ID NO: 972499 - DNA, 25 bp, Homo sapien
ggtctgaggaatggccttgtactgc

SEQ ID NO: 972500 - DNA, 25 bp, Homo sapien
taacagggtctgaggaatggccttg

SEQ ID NO: 972501 - DNA, 25 bp, Homo sapien
tgaggaatggccttgtactgccaga

SEQ ID NO: 972502 - DNA, 25 bp, Homo sapien
tggtaagaggccaattcctccaaac

SEQ ID NO: 972503 - DNA, 25 bp, Homo sapien
aagccaatgaagtctaaccctagaa

SEQ ID NO: 972504 - DNA, 25 bp, Homo sapien
ccaatgaagtctaaccctagaactg

SEQ ID NO: 972505 - DNA, 25 bp, Homo sapien
aactggtaagaggccaattcctcca

SEQ ID NO: 972506 - DNA, 25 bp, Homo sapien
gaacgcttcgtgaatttgttgcatg

SEQ ID NO: 972507 - DNA, 25 bp, Homo sapien
ggaacgcttcgtgaatttgttgcat

SEQ ID NO: 972508 - DNA, 25 bp, Homo sapien
ggagagcaggaaggaattttgctat

SEQ ID NO: 972509 - DNA, 25 bp, Homo sapien
tcagaaataatttagctgctttggg

SEQ ID NO: 972510 - DNA, 25 bp, Homo sapien
aatttagctgctttgggatgtggag

SEQ ID NO: 972511 - DNA, 25 bp, Homo sapien
ggaattttgctattggctgctggaa

SEQ ID NO: 972512 - DNA, 25 bp, Homo sapien
caagtttccagttcgtagagctttg

SEQ ID NO: 972513 - DNA, 25 bp, Homo sapien
aatgttgatcaatgtttgcttctcc

SEQ ID NO: 972514 - DNA, 25 bp, Homo sapien
catttggttgccattactggactga

SEQ ID NO: 972515 - DNA, 25 bp, Homo sapien
taatgggcacaaagtcaatctggaa

SEQ ID NO: 972516 - DNA, 25 bp, Homo sapien
caaagttttggccacccaaagaatg

SEQ ID NO: 972517 - DNA, 25 bp, Homo sapien
gaagatcaaagaactctgctggttt

SEQ ID NO: 972518 - DNA, 25 bp, Homo sapien
ggctgaagatcaaagaactctgctg

SEQ ID NO: 972519 - DNA, 25 bp, Homo sapien
tgcctctgctggaattagcgctgtc

SEQ ID NO: 972520 - DNA, 25 bp, Homo sapien
gtggcaaacatctgttgttgtttgg

SEQ ID NO: 972521 - DNA, 25 bp, Homo sapien
acatctgttgttgtttggtgtcacc

SEQ ID NO: 972522 - DNA, 25 bp, Homo sapien
tgcttaacaggtggcaaacatctgt

SEQ ID NO: 972523 - DNA, 25 bp, Homo sapien
cttaacaggtggcaaacatctgttg

SEQ ID NO: 972524 - DNA, 25 bp, Homo sapien
taggagcttgccacgtcaactgaca

SEQ ID NO: 972525 - DNA, 25 bp, Homo sapien
tttctcagcacaaattggtaggagc

SEQ ID NO: 972526 - DNA, 25 bp, Homo sapien
tcaactgacagttggcagttgagag

SEQ ID NO: 972527 - DNA, 25 bp, Homo sapien
tatgctgacccgattccatgctgtt

SEQ ID NO: 972528 - DNA, 25 bp, Homo sapien
tcaggttcttgggatagccctcttc

SEQ ID NO: 972529 - DNA, 25 bp, Homo sapien
gagagaaagagttttagtccctgac

SEQ ID NO: 972530 - DNA, 25 bp, Homo sapien
aaggtgtcagtatggtcaggttctt

SEQ ID NO: 972531 - DNA, 25 bp, Homo sapien
tggaggaaacataaactttcagccc

SEQ ID NO: 972532 - DNA, 25 bp, Homo sapien
aagctctccagtaaacaggcattac

SEQ ID NO: 972533 - DNA, 25 bp, Homo sapien
atgtgaaagctctccagtaaacagg

SEQ ID NO: 972534 - DNA, 25 bp, Homo sapien
gtgaaagctctccagtaaacaggca

SEQ ID NO: 972535 - DNA, 25 bp, Homo sapien
tctccagtaaacaggcattacctgg

SEQ ID NO: 972536 - DNA, 25 bp, Homo sapien
agccttaaaaatgtagctaattcct

SEQ ID NO: 972537 - DNA, 25 bp, Homo sapien
tcaccggaataacatttccaagcct

SEQ ID NO: 972538 - DNA, 25 bp, Homo sapien
caaacatctttcaccggaataacat

SEQ ID NO: 972539 - DNA, 25 bp, Homo sapien
catttccaagccttaaaaatgtagc

SEQ ID NO: 972540 - DNA, 25 bp, Homo sapien
ggagggatgcttgtcaaatacagtg

SEQ ID NO: 972541 - DNA, 25 bp, Homo sapien
tgaagtactgagcttcttgaagtcg

SEQ ID NO: 972542 - DNA, 25 bp, Homo sapien
tcttccaatggaagcatccctggga

SEQ ID NO: 972543 - DNA, 25 bp, Homo sapien
tgatcatggacttgttatgctgcct

SEQ ID NO: 972544 - DNA, 25 bp, Homo sapien
actgcctaataaaggcaatggtaag

SEQ ID NO: 972545 - DNA, 25 bp, Homo sapien
caatggtaagaggcaatgattcatc

SEQ ID NO: 972546 - DNA, 25 bp, Homo sapien
aggcaatggtaagaggcaatgattc

SEQ ID NO: 972547 - DNA, 25 bp, Homo sapien
ggcaatggtaagaggcaatgattca

SEQ ID NO: 972548 - DNA, 25 bp, Homo sapien
tatgcatcgataagcccataagcac

SEQ ID NO: 972549 - DNA, 25 bp, Homo sapien
taaaaaatatgcatcgataagccca

SEQ ID NO: 972550 - DNA, 25 bp, Homo sapien
cattacaatacacttattctgggac

SEQ ID NO: 972551 - DNA, 25 bp, Homo sapien
gggacagcatcggattacaaataaa

SEQ ID NO: 972552 - DNA, 25 bp, Homo sapien
ccaagttaggcagtataataaatgc

SEQ ID NO: 972553 - DNA, 25 bp, Homo sapien
aaagggctttttccgccatctagat

SEQ ID NO: 972554 - DNA, 25 bp, Homo sapien
gagcactgtttcatgtctaaaaccg

SEQ ID NO: 972555 - DNA, 25 bp, Homo sapien
tacaagattgaactgagacaaaagg

SEQ ID NO: 972556 - DNA, 25 bp, Homo sapien
cacaaagcaaaaccaagagtattta

SEQ ID NO: 972557 - DNA, 25 bp, Homo sapien
tgatttagcatataagcaccaaaaa

SEQ ID NO: 972558 - DNA, 25 bp, Homo sapien
ttagcatataagcaccaaaaatccc

SEQ ID NO: 972559 - DNA, 25 bp, Homo sapien
tttagcatataagcaccaaaaatcc

SEQ ID NO: 972560 - DNA, 25 bp, Homo sapien
gatttagcatataagcaccaaaaat

SEQ ID NO: 972561 - DNA, 25 bp, Homo sapien
ttaggttcgaaatttaagtgctgcc

SEQ ID NO: 972562 - DNA, 25 bp, Homo sapien
aagaggtacatcaggagagtcggac

SEQ ID NO: 972563 - DNA, 25 bp, Homo sapien
gacttagctgtcctgaatgacctaa

SEQ ID NO: 972564 - DNA, 25 bp, Homo sapien
tattgtgatattaaagcatgcctcc

SEQ ID NO: 972565 - DNA, 25 bp, Homo sapien
tacttttagggaaatgtgcggagac

SEQ ID NO: 972566 - DNA, 25 bp, Homo sapien
agtgcgctttcttcaattctctcca

SEQ ID NO: 972567 - DNA, 25 bp, Homo sapien
taccatagcagtctaaacattgtac

SEQ ID NO: 972568 - DNA, 25 bp, Homo sapien
tatagctctcccattaagagtgaaa

SEQ ID NO: 972569 - DNA, 25 bp, Homo sapien
tcttgcttctgggggatgcatcctt

SEQ ID NO: 972570 - DNA, 25 bp, Homo sapien
cttgcttctgggggatgcatccttc

SEQ ID NO: 972571 - DNA, 25 bp, Homo sapien
tgctccccaaatcagcaatgagccg

SEQ ID NO: 972572 - DNA, 25 bp, Homo sapien
ttcccaccacagaagacccagttgt

SEQ ID NO: 972573 - DNA, 25 bp, Homo sapien
gctttttgtcttaatgcccttccca

SEQ ID NO: 972574 - DNA, 25 bp, Homo sapien
gattagtaatagatgtgctccccaa

SEQ ID NO: 972575 - DNA, 25 bp, Homo sapien
ctaatggtcaatgattttctctcct

SEQ ID NO: 972576 - DNA, 25 bp, Homo sapien
ggtcaatgattttctctcctttatc

SEQ ID NO: 972577 - DNA, 25 bp, Homo sapien
gtcaatgattttctctcctttatct

SEQ ID NO: 972578 - DNA, 25 bp, Homo sapien
atggtcaatgattttctctccttta

SEQ ID NO: 972579 - DNA, 25 bp, Homo sapien
aaagacagctctaacaggtcactta

SEQ ID NO: 972580 - DNA, 25 bp, Homo sapien
catatttggcattgagtcctatata

SEQ ID NO: 972581 - DNA, 25 bp, Homo sapien
tgagtcctatatactgcgcaaaaga

SEQ ID NO: 972582 - DNA, 25 bp, Homo sapien
tatatactgcgcaaaagacagctct

SEQ ID NO: 972583 - DNA, 25 bp, Homo sapien
cttatggaagtctacacttgcatca

SEQ ID NO: 972584 - DNA, 25 bp, Homo sapien
gaagtctacacttgcatcatcagca

SEQ ID NO: 972585 - DNA, 25 bp, Homo sapien
gcactagcgatgagttttgctgctg

SEQ ID NO: 972586 - DNA, 25 bp, Homo sapien
gcatcatcagcactagcgatgagtt

SEQ ID NO: 972587 - DNA, 25 bp, Homo sapien
tttattccacatagggcactctgag

SEQ ID NO: 972588 - DNA, 25 bp, Homo sapien
gacgacccagcctagactttaaaga

SEQ ID NO: 972589 - DNA, 25 bp, Homo sapien
cggtatcaggttttgctagaagaca

SEQ ID NO: 972590 - DNA, 25 bp, Homo sapien
ccatattacctcagggcgttgaaga

SEQ ID NO: 972591 - DNA, 25 bp, Homo sapien
gtcagaatcaagaccaagtgggcct

SEQ ID NO: 972592 - DNA, 25 bp, Homo sapien
taacttgaccaaaaactcacgagcc

SEQ ID NO: 972593 - DNA, 25 bp, Homo sapien
tgtaccttgtactggccagaccaca

SEQ ID NO: 972594 - DNA, 25 bp, Homo sapien
gaaacatggtagctagcatctgcat

SEQ ID NO: 972595 - DNA, 25 bp, Homo sapien
ttagacacctgccaagataaaaggg

SEQ ID NO: 972596 - DNA, 25 bp, Homo sapien
taatgggcaccaaaaaatagcagtt

SEQ ID NO: 972597 - DNA, 25 bp, Homo sapien
gagcagggacattcagtgtacgcac

SEQ ID NO: 972598 - DNA, 25 bp, Homo sapien
gagaaactaggatcagagacgacga

SEQ ID NO: 972599 - DNA, 25 bp, Homo sapien
tggttgctccatcatcgtatgttcc

SEQ ID NO: 972600 - DNA, 25 bp, Homo sapien
tccatcatcgtatgttcccattaaa

SEQ ID NO: 972601 - DNA, 25 bp, Homo sapien
ttgtatggccttcagaaactcaata

SEQ ID NO: 972602 - DNA, 25 bp, Homo sapien
cttgtatggccttcagaaactcaat

SEQ ID NO: 972603 - DNA, 25 bp, Homo sapien
gtatctgtaaagcaataatttccaa

SEQ ID NO: 972604 - DNA, 25 bp, Homo sapien
aaaacatgaagtatctgtaaagcaa

SEQ ID NO: 972605 - DNA, 25 bp, Homo sapien
taagcatcacgataatctctgaaag

SEQ ID NO: 972606 - DNA, 25 bp, Homo sapien
taacataatcccactatcaacttac

SEQ ID NO: 972607 - DNA, 25 bp, Homo sapien
attcctgatttatcctgtgtctttc

SEQ ID NO: 972608 - DNA, 25 bp, Homo sapien
ttcctgatttatcctgtgtctttcg

SEQ ID NO: 972609 - DNA, 25 bp, Homo sapien
ggtccatgcataagcttaaggaggc

SEQ ID NO: 972610 - DNA, 25 bp, Homo sapien
tttcctaactagaagaatgctgcta

SEQ ID NO: 972611 - DNA, 25 bp, Homo sapien
tatgttaggtgatcactaaaagcca

SEQ ID NO: 972612 - DNA, 25 bp, Homo sapien
tacaatgtctgggttccttatagct

SEQ ID NO: 972613 - DNA, 25 bp, Homo sapien
gtgattaagtcagtgccagcaaaag

SEQ ID NO: 972614 - DNA, 25 bp, Homo sapien
taaatacagctggacatttagtgaa

SEQ ID NO: 972615 - DNA, 25 bp, Homo sapien
gaactaacgcaaatagcatcatcat

SEQ ID NO: 972616 - DNA, 25 bp, Homo sapien
ggttgtcctgtagaaaacaagatga

SEQ ID NO: 972617 - DNA, 25 bp, Homo sapien
tttagtgtctaatacttctcctgtt

SEQ ID NO: 972618 - DNA, 25 bp, Homo sapien
tatttagtgtctaatacttctcctg

SEQ ID NO: 972619 - DNA, 25 bp, Homo sapien
atttagtgtctaatacttctcctgt

SEQ ID NO: 972620 - DNA, 25 bp, Homo sapien
attattcttaacaccactcattaaa

SEQ ID NO: 972621 - DNA, 25 bp, Homo sapien
catttgccaaggcaacattgatccc

SEQ ID NO: 972622 - DNA, 25 bp, Homo sapien
cattgatccctcttccaacattatt

SEQ ID NO: 972623 - DNA, 25 bp, Homo sapien
gatccctcttccaacattattctta

SEQ ID NO: 972624 - DNA, 25 bp, Homo sapien
catattttcaattgttcagtgctgc

SEQ ID NO: 972625 - DNA, 25 bp, Homo sapien
acatattttcaattgttcagtgctg

SEQ ID NO: 972626 - DNA, 25 bp, Homo sapien
ttttgagatcccacacttatatctg

SEQ ID NO: 972627 - DNA, 25 bp, Homo sapien
gctgctccacttgccattttaaaag

SEQ ID NO: 972628 - DNA, 25 bp, Homo sapien
cttctcagggcaagcttttgagatc

SEQ ID NO: 972629 - DNA, 25 bp, Homo sapien
attttgggtcccaccacgttggctg

SEQ ID NO: 972630 - DNA, 25 bp, Homo sapien
tgcagctgtgtccaatgctgatctt

SEQ ID NO: 972631 - DNA, 25 bp, Homo sapien
gcagctgtgtccaatgctgatcttg

SEQ ID NO: 972632 - DNA, 25 bp, Homo sapien
cgtgcagctgtgtccaatgctgatc

SEQ ID NO: 972633 - DNA, 25 bp, Homo sapien
aacgtgcagctgtgtccaatgctga

SEQ ID NO: 972634 - DNA, 25 bp, Homo sapien
taaaatgtcagtaaaaacactgcca

SEQ ID NO: 972635 - DNA, 25 bp, Homo sapien
caaatagatttcctaaacttgcatc

SEQ ID NO: 972636 - DNA, 25 bp, Homo sapien
tagatttcctaaacttgcatccatt

SEQ ID NO: 972637 - DNA, 25 bp, Homo sapien
aatagatttcctaaacttgcatcca

SEQ ID NO: 972638 - DNA, 25 bp, Homo sapien
ctaaaaggcagaagtatttcagcat

SEQ ID NO: 972639 - DNA, 25 bp, Homo sapien
ctgaaacctaaatactcaaatgagc

SEQ ID NO: 972640 - DNA, 25 bp, Homo sapien
atatttgcatcatacttaccagctg

SEQ ID NO: 972641 - DNA, 25 bp, Homo sapien
tgtgatttgccaactacctaaaaac

SEQ ID NO: 972642 - DNA, 25 bp, Homo sapien
aaatttatgtgatactgactaaatg

SEQ ID NO: 972643 - DNA, 25 bp, Homo sapien
gtttttcagtttatggcacttttca

SEQ ID NO: 972644 - DNA, 25 bp, Homo sapien
tcagtttatggcacttttcattaat

SEQ ID NO: 972645 - DNA, 25 bp, Homo sapien
tttcagtttatggcacttttcatta

SEQ ID NO: 972646 - DNA, 25 bp, Homo sapien
cagtttatggcacttttcattaata

SEQ ID NO: 972647 - DNA, 25 bp, Homo sapien
aaaagcaaatatcattagctctaga

SEQ ID NO: 972648 - DNA, 25 bp, Homo sapien
gcaaatatcattagctctagagcaa

SEQ ID NO: 972649 - DNA, 25 bp, Homo sapien
caaatatcattagctctagagcaaa

SEQ ID NO: 972650 - DNA, 25 bp, Homo sapien
aagcaaatatcattagctctagagc

SEQ ID NO: 972651 - DNA, 25 bp, Homo sapien
tgaacagcttccacgtaatagaaaa

SEQ ID NO: 972652 - DNA, 25 bp, Homo sapien
tgcatgggtgttttcctcctaagaa

SEQ ID NO: 972653 - DNA, 25 bp, Homo sapien
tctatttcaactacctagccacagg

SEQ ID NO: 972654 - DNA, 25 bp, Homo sapien
tattcactggactaggcaggtgggc

SEQ ID NO: 972655 - DNA, 25 bp, Homo sapien
attagttgacaatgcttaaggcagc

SEQ ID NO: 972656 - DNA, 25 bp, Homo sapien
caaagttcccattggtaattcagag

SEQ ID NO: 972657 - DNA, 25 bp, Homo sapien
aaacagaagccccttacaatgagga

SEQ ID NO: 972658 - DNA, 25 bp, Homo sapien
gagaggtcctcaggttgagaactgc

SEQ ID NO: 972659 - DNA, 25 bp, Homo sapien
aattcaatagagatctgctggtact

SEQ ID NO: 972660 - DNA, 25 bp, Homo sapien
gaaaacgtaactgcaaattggccac

SEQ ID NO: 972661 - DNA, 25 bp, Homo sapien
cagcattgacctttactctcgggag

SEQ ID NO: 972662 - DNA, 25 bp, Homo sapien
tgactaatagtaacggttcccaaga

SEQ ID NO: 972663 - DNA, 25 bp, Homo sapien
gctcagtcctgccggaggccgacgg

SEQ ID NO: 972664 - DNA, 25 bp, Homo sapien
agtcctgccggaggccgacgggagc

SEQ ID NO: 972665 - DNA, 25 bp, Homo sapien
ctcgcgcctccgcttcctctcggac

SEQ ID NO: 972666 - DNA, 25 bp, Homo sapien
tcgcgcctccgcttcctctcggact

SEQ ID NO: 972667 - DNA, 25 bp, Homo sapien
ctgaacttgccacgtgggagctgcc

SEQ ID NO: 972668 - DNA, 25 bp, Homo sapien
gcacaatctgaacttgccacgtggg

SEQ ID NO: 972669 - DNA, 25 bp, Homo sapien
ggccaggcgctgcacaatctgaact

SEQ ID NO: 972670 - DNA, 25 bp, Homo sapien
ccggccaggcgctgcacaatctgaa

SEQ ID NO: 972671 - DNA, 25 bp, Homo sapien
cttccaccaaacattccactctccc

SEQ ID NO: 972672 - DNA, 25 bp, Homo sapien
ctgctctttgcatgtggtgtaaaga

SEQ ID NO: 972673 - DNA, 25 bp, Homo sapien
aactccccaaatgctgctctttgca

SEQ ID NO: 972674 - DNA, 25 bp, Homo sapien
ttgcatgtggtgtaaagaagctgat

SEQ ID NO: 972675 - DNA, 25 bp, Homo sapien
ttggcctctggcatactcgaacttc

SEQ ID NO: 972676 - DNA, 25 bp, Homo sapien
cgacccttgcgaggacctgagagca

SEQ ID NO: 972677 - DNA, 25 bp, Homo sapien
cttggcctctggcatactcgaactt

SEQ ID NO: 972678 - DNA, 25 bp, Homo sapien
ctctcgacccttgcgaggacctgag

SEQ ID NO: 972679 - DNA, 25 bp, Homo sapien
gttcttgccccccaccctgaagatg

SEQ ID NO: 972680 - DNA, 25 bp, Homo sapien
cagctggtcgaaagtgaggttcttg

SEQ ID NO: 972681 - DNA, 25 bp, Homo sapien
tcttgccccccaccctgaagatgtg

SEQ ID NO: 972682 - DNA, 25 bp, Homo sapien
tggtcgaaagtgaggttcttgcccc

SEQ ID NO: 972683 - DNA, 25 bp, Homo sapien
ctgcgggcccggctggtcacgccca

SEQ ID NO: 972684 - DNA, 25 bp, Homo sapien
gggcccggctggtcacgcccagtgc

SEQ ID NO: 972685 - DNA, 25 bp, Homo sapien
ggcccggctggtcacgcccagtgca

SEQ ID NO: 972686 - DNA, 25 bp, Homo sapien
gcgggcccggctggtcacgcccagt

SEQ ID NO: 972687 - DNA, 25 bp, Homo sapien
gaacccacacgtcatctgttatggt

SEQ ID NO: 972688 - DNA, 25 bp, Homo sapien
tgttatggttcccacaaccacggcc

SEQ ID NO: 972689 - DNA, 25 bp, Homo sapien
ccacacgtcatctgttatggttccc

SEQ ID NO: 972690 - DNA, 25 bp, Homo sapien
tcctgaacccacacgtcatctgtta

SEQ ID NO: 972691 - DNA, 25 bp, Homo sapien
ttcgggatcatccgggaaagggaca

SEQ ID NO: 972692 - DNA, 25 bp, Homo sapien
aggtggctggttggtgcactcataa

SEQ ID NO: 972693 - DNA, 25 bp, Homo sapien
gcactcataaacaacctcttcagca

SEQ ID NO: 972694 - DNA, 25 bp, Homo sapien
acagaggtggctggttggtgcactc

SEQ ID NO: 972695 - DNA, 25 bp, Homo sapien
tccaatgccacctgacaagggaggg

SEQ ID NO: 972696 - DNA, 25 bp, Homo sapien
tagcccattgtgtaagccgttcttc

SEQ ID NO: 972697 - DNA, 25 bp, Homo sapien
tcttcttgagtgtaacctggcctag

SEQ ID NO: 972698 - DNA, 25 bp, Homo sapien
aattaagggtggcttctggctaaca

SEQ ID NO: 972699 - DNA, 25 bp, Homo sapien
ggatgagctcaacaacccctttgat

SEQ ID NO: 972700 - DNA, 25 bp, Homo sapien
gacgtgccgtaacaaatgatcacag

SEQ ID NO: 972701 - DNA, 25 bp, Homo sapien
cacctgttgattgcatctaagagcc

SEQ ID NO: 972702 - DNA, 25 bp, Homo sapien
tacattagtttgctagacgtgccgt

SEQ ID NO: 972703 - DNA, 25 bp, Homo sapien
tttccccagtcaagtcagctttgag

SEQ ID NO: 972704 - DNA, 25 bp, Homo sapien
catctgctacgtactgagtgaccac

SEQ ID NO: 972705 - DNA, 25 bp, Homo sapien
acctggtaggaagaggacaaccaca

SEQ ID NO: 972706 - DNA, 25 bp, Homo sapien
gccagttcctgtgtattagggcctt

SEQ ID NO: 972707 - DNA, 25 bp, Homo sapien
ggccttctatcaccaggtgatatct

SEQ ID NO: 972708 - DNA, 25 bp, Homo sapien
tagggccttctatcaccaggtgata

SEQ ID NO: 972709 - DNA, 25 bp, Homo sapien
ataaatcaagattccttgcaaacaa

SEQ ID NO: 972710 - DNA, 25 bp, Homo sapien
aataaatcaagattccttgcaaaca

SEQ ID NO: 972711 - DNA, 25 bp, Homo sapien
catctttttctcgtattttgaataa

SEQ ID NO: 972712 - DNA, 25 bp, Homo sapien
ttttctcgtattttgaataaatcaa

SEQ ID NO: 972713 - DNA, 25 bp, Homo sapien
cattctccgttatcccatccttttt

SEQ ID NO: 972714 - DNA, 25 bp, Homo sapien
gaatggctcatcttctttgtaggca

SEQ ID NO: 972715 - DNA, 25 bp, Homo sapien
tgaatggctcatcttctttgtaggc

SEQ ID NO: 972716 - DNA, 25 bp, Homo sapien
ctcttctcattctccgttatcccat

SEQ ID NO: 972717 - DNA, 25 bp, Homo sapien
tggttccttggacaatcctctgcct

SEQ ID NO: 972718 - DNA, 25 bp, Homo sapien
ggttccttggacaatcctctgcctt

SEQ ID NO: 972719 - DNA, 25 bp, Homo sapien
gtttctgtctgatggtttctgccat

SEQ ID NO: 972720 - DNA, 25 bp, Homo sapien
ctttgctagctttgactgcgtgaaa

SEQ ID NO: 972721 - DNA, 25 bp, Homo sapien
aggtcaagtgggggacaagtgagag

SEQ ID NO: 972722 - DNA, 25 bp, Homo sapien
tctttgctagctttgactgcgtgaa

SEQ ID NO: 972723 - DNA, 25 bp, Homo sapien
aaggtcaagtgggggacaagtgaga

SEQ ID NO: 972724 - DNA, 25 bp, Homo sapien
ctctgtcctcctccgggctgtctgt

SEQ ID NO: 972725 - DNA, 25 bp, Homo sapien
tgtgtaggtctgtctctgtcctcct

SEQ ID NO: 972726 - DNA, 25 bp, Homo sapien
ctccgggctgtctgtgagtttcagt

SEQ ID NO: 972727 - DNA, 25 bp, Homo sapien
tgagtttcagttctacccttctacc

SEQ ID NO: 972728 - DNA, 25 bp, Homo sapien
gactgatttatctgcacaactccag

SEQ ID NO: 972729 - DNA, 25 bp, Homo sapien
ccaggttatgcagcctccatgagca

SEQ ID NO: 972730 - DNA, 25 bp, Homo sapien
tgagccatctcatagcatctgttgg

SEQ ID NO: 972731 - DNA, 25 bp, Homo sapien
tttccttgggaaccacactcatcct

SEQ ID NO: 972732 - DNA, 25 bp, Homo sapien
gctctccttcgctctcccattctct

SEQ ID NO: 972733 - DNA, 25 bp, Homo sapien
tagtgctgctgctctatgaccaaag

SEQ ID NO: 972734 - DNA, 25 bp, Homo sapien
ttaagtaacagccgagcccaggtag

SEQ ID NO: 972735 - DNA, 25 bp, Homo sapien
aagaatccttgctctccttcgctct

SEQ ID NO: 972736 - DNA, 25 bp, Homo sapien
tgctgctacacccttctgtgtgcaa

SEQ ID NO: 972737 - DNA, 25 bp, Homo sapien
ttatccatcctattatctgctgctg

SEQ ID NO: 972738 - DNA, 25 bp, Homo sapien
tataacatgtatatgctcttgctgc

SEQ ID NO: 972739 - DNA, 25 bp, Homo sapien
ttccttggttattgattatccatcc

SEQ ID NO: 972740 - DNA, 25 bp, Homo sapien
gaaaaggccataagattgtcccaag

SEQ ID NO: 972741 - DNA, 25 bp, Homo sapien
cccttaacgagctctggatatctgg

SEQ ID NO: 972742 - DNA, 25 bp, Homo sapien
taggacaagtatcagccttccatgc

SEQ ID NO: 972743 - DNA, 25 bp, Homo sapien
tttttagccagtgaatgagtaggac

SEQ ID NO: 972744 - DNA, 25 bp, Homo sapien
tgggttattccaatgtaaaagagta

SEQ ID NO: 972745 - DNA, 25 bp, Homo sapien
catgtggatgtacacttgttccagc

SEQ ID NO: 972746 - DNA, 25 bp, Homo sapien
ttaggaagggtgtaaagtctgtgtc

SEQ ID NO: 972747 - DNA, 25 bp, Homo sapien
tttgtaattgctaacttcttgatgg

SEQ ID NO: 972748 - DNA, 25 bp, Homo sapien
taatgccttctacatggagtgtcca

SEQ ID NO: 972749 - DNA, 25 bp, Homo sapien
caaggcactgcaatctactggagaa

SEQ ID NO: 972750 - DNA, 25 bp, Homo sapien
tactggagaagatcctaaacgcaca

SEQ ID NO: 972751 - DNA, 25 bp, Homo sapien
gacttgcaggcttggctttccctaa

SEQ ID NO: 972752 - DNA, 25 bp, Homo sapien
ctagggtccatagagcttccacctt

SEQ ID NO: 972753 - DNA, 25 bp, Homo sapien
tttctgatatgtccaatcaaccaca

SEQ ID NO: 972754 - DNA, 25 bp, Homo sapien
gcttccaccttaggcttaatttctg

SEQ ID NO: 972755 - DNA, 25 bp, Homo sapien
caatcaaccacatatggttgctcca

SEQ ID NO: 972756 - DNA, 25 bp, Homo sapien
cagccctgcttactactatccgtat

SEQ ID NO: 972757 - DNA, 25 bp, Homo sapien
ccatcactgctctagtcatggactc

SEQ ID NO: 972758 - DNA, 25 bp, Homo sapien
ctcttctaaagtaaaggctggacca

SEQ ID NO: 972759 - DNA, 25 bp, Homo sapien
aacctggtcaagttccttgattcta

SEQ ID NO: 972760 - DNA, 25 bp, Homo sapien
tcagattatagaacctgagaatgtg

SEQ ID NO: 972761 - DNA, 25 bp, Homo sapien
tgtgaggatatagaatagctactgc

SEQ ID NO: 972762 - DNA, 25 bp, Homo sapien
tctaaacagcatccagtcaggctat

SEQ ID NO: 972763 - DNA, 25 bp, Homo sapien
gtcaggctatatttgtgatgatcct

SEQ ID NO: 972764 - DNA, 25 bp, Homo sapien
attgaacgtgtcaggccttcttgcc

SEQ ID NO: 972765 - DNA, 25 bp, Homo sapien
tgaaccttgcacactacttggcagg

SEQ ID NO: 972766 - DNA, 25 bp, Homo sapien
caggaggttagagcacattgaacgt

SEQ ID NO: 972767 - DNA, 25 bp, Homo sapien
tcagttgaatgagagcttctccaag

SEQ ID NO: 972768 - DNA, 25 bp, Homo sapien
taaacgggatccagttacatgtcag

SEQ ID NO: 972769 - DNA, 25 bp, Homo sapien
agtatccaacttcaaccatggctaa

SEQ ID NO: 972770 - DNA, 25 bp, Homo sapien
cagttacatgtcaggtcactgcctc

SEQ ID NO: 972771 - DNA, 25 bp, Homo sapien
tcaaccatggctaaacgggatccag

SEQ ID NO: 972772 - DNA, 25 bp, Homo sapien
aagcccagggcatgataaagtcagg

SEQ ID NO: 972773 - DNA, 25 bp, Homo sapien
agcccagggcatgataaagtcagga

SEQ ID NO: 972774 - DNA, 25 bp, Homo sapien
agactttatagactttgtgaacttg

SEQ ID NO: 972775 - DNA, 25 bp, Homo sapien
cacattttctttatagtctttatag

SEQ ID NO: 972776 - DNA, 25 bp, Homo sapien
tcaagacacatctcctgttggcttc

SEQ ID NO: 972777 - DNA, 25 bp, Homo sapien
tcctgttggcttctcatccaccttt

SEQ ID NO: 972778 - DNA, 25 bp, Homo sapien
aactctgaagcccatcattagcaga

SEQ ID NO: 972779 - DNA, 25 bp, Homo sapien
tccaaactctgaagcccatcattag

SEQ ID NO: 972780 - DNA, 25 bp, Homo sapien
cagcaaattttcctgttttcttcgc

SEQ ID NO: 972781 - DNA, 25 bp, Homo sapien
gcaaattttcctgttttcttcgcat

SEQ ID NO: 972782 - DNA, 25 bp, Homo sapien
agcaaattttcctgttttcttcgca

SEQ ID NO: 972783 - DNA, 25 bp, Homo sapien
tttccttgcttgacaactttttcaa

SEQ ID NO: 972784 - DNA, 25 bp, Homo sapien
tccttgcttgacaactttttcaaaa

SEQ ID NO: 972785 - DNA, 25 bp, Homo sapien
tttcaaaattataaagcaaatgagc

SEQ ID NO: 972786 - DNA, 25 bp, Homo sapien
tcaaaattataaagcaaatgagcat

SEQ ID NO: 972787 - DNA, 25 bp, Homo sapien
ttctggtaaggattttcttcctagc

SEQ ID NO: 972788 - DNA, 25 bp, Homo sapien
tctggtaaggattttcttcctagct

SEQ ID NO: 972789 - DNA, 25 bp, Homo sapien
taaagcacagtataagtgtgaggat

SEQ ID NO: 972790 - DNA, 25 bp, Homo sapien
cagtataagtgtgaggatccatctt

SEQ ID NO: 972791 - DNA, 25 bp, Homo sapien
cacagtataagtgtgaggatccatc

SEQ ID NO: 972792 - DNA, 25 bp, Homo sapien
aagcacagtataagtgtgaggatcc

SEQ ID NO: 972793 - DNA, 25 bp, Homo sapien
gatatctacgaatatgtggaccaag

SEQ ID NO: 972794 - DNA, 25 bp, Homo sapien
tgctgatagttccagtcaaggctac

SEQ ID NO: 972795 - DNA, 25 bp, Homo sapien
tcaaggctacccatgtctgccaagg

SEQ ID NO: 972796 - DNA, 25 bp, Homo sapien
cacaaatacctgatgtttcagggcc

SEQ ID NO: 972797 - DNA, 25 bp, Homo sapien
ggtgtcactcttgagaaccagtccg

SEQ ID NO: 972798 - DNA, 25 bp, Homo sapien
catgcagttgatgtagttgagggac

SEQ ID NO: 972799 - DNA, 25 bp, Homo sapien
aactgcgttcagtcaaggatttttt

SEQ ID NO: 972800 - DNA, 25 bp, Homo sapien
tgagggacgggatcaatccaacttt

SEQ ID NO: 972801 - DNA, 25 bp, Homo sapien
tactgtgacatctcatgtaaattct

SEQ ID NO: 972802 - DNA, 25 bp, Homo sapien
aattcttgagtctggtgtctgaggt

SEQ ID NO: 972803 - DNA, 25 bp, Homo sapien
gtctgaggtccttcatcaatggggt

SEQ ID NO: 972804 - DNA, 25 bp, Homo sapien
tcatcaatggggtccacaacctcca

SEQ ID NO: 972805 - DNA, 25 bp, Homo sapien
cattgcagctggtgattgctgaaaa

SEQ ID NO: 972806 - DNA, 25 bp, Homo sapien
catagaaacctgcataaaattggcc

SEQ ID NO: 972807 - DNA, 25 bp, Homo sapien
tgatgatctcagagtcgcctgttcc

SEQ ID NO: 972808 - DNA, 25 bp, Homo sapien
aaaatgatgatctcagagtcgcctg

SEQ ID NO: 972809 - DNA, 25 bp, Homo sapien
aagctccctgcccatagactctcct

SEQ ID NO: 972810 - DNA, 25 bp, Homo sapien
tgcccatagactctccttgactcat

SEQ ID NO: 972811 - DNA, 25 bp, Homo sapien
tccctgcccatagactctccttgac

SEQ ID NO: 972812 - DNA, 25 bp, Homo sapien
ccatagactctccttgactcatcag

SEQ ID NO: 972813 - DNA, 25 bp, Homo sapien
aaagaaacctaagatgacacaaata

SEQ ID NO: 972814 - DNA, 25 bp, Homo sapien
aaaaacattccatgttcattgataa

SEQ ID NO: 972815 - DNA, 25 bp, Homo sapien
gtgatagaatgagaccctaactcaa

SEQ ID NO: 972816 - DNA, 25 bp, Homo sapien
aaagaaagaaacctaagatgacaca

SEQ ID NO: 972817 - DNA, 25 bp, Homo sapien
ggaagacagacttgctgaatgctga

SEQ ID NO: 972818 - DNA, 25 bp, Homo sapien
cattggtgggatctcttctcttaca

SEQ ID NO: 972819 - DNA, 25 bp, Homo sapien
gagctgaatgttccgttgtttgcca

SEQ ID NO: 972820 - DNA, 25 bp, Homo sapien
aaccttacaaggcataaagtgctca

SEQ ID NO: 972821 - DNA, 25 bp, Homo sapien
tctttcatcagctagataatatctg

SEQ ID NO: 972822 - DNA, 25 bp, Homo sapien
ggacagtatgatattcaacctttca

SEQ ID NO: 972823 - DNA, 25 bp, Homo sapien
tgctattactatgttgcttctacca

SEQ ID NO: 972824 - DNA, 25 bp, Homo sapien
tgacagaagttagagcagacaactg

SEQ ID NO: 972825 - DNA, 25 bp, Homo sapien
cgttgttccagtgtctccgatatca

SEQ ID NO: 972826 - DNA, 25 bp, Homo sapien
tccgatatcacttcttgtgtcagta

SEQ ID NO: 972827 - DNA, 25 bp, Homo sapien
actgctgcagattctaattgcattc

SEQ ID NO: 972828 - DNA, 25 bp, Homo sapien
ggaatgaggtatttagcttcatgca

SEQ ID NO: 972829 - DNA, 25 bp, Homo sapien
tatagcttctcctttactcctgaga

SEQ ID NO: 972830 - DNA, 25 bp, Homo sapien
tcctactctgcaaaggcatgtgaaa

SEQ ID NO: 972831 - DNA, 25 bp, Homo sapien
gctattttaaattagtgccaccatc

SEQ ID NO: 972832 - DNA, 25 bp, Homo sapien
cctggtctgagacacttggatcatt

SEQ ID NO: 972833 - DNA, 25 bp, Homo sapien
tagataagacccattcgattcaagg

SEQ ID NO: 972834 - DNA, 25 bp, Homo sapien
gattcaaggatctcaactgcaactc

SEQ ID NO: 972835 - DNA, 25 bp, Homo sapien
tcactcccagattaatgttgtggca

SEQ ID NO: 972836 - DNA, 25 bp, Homo sapien
cgaacttgtctgcttggtaacacca

SEQ ID NO: 972837 - DNA, 25 bp, Homo sapien
catttctagacactgtcccctctct

SEQ ID NO: 972838 - DNA, 25 bp, Homo sapien
cacctccataagtgagtgtacagga

SEQ ID NO: 972839 - DNA, 25 bp, Homo sapien
ataagtgagtgtacaggattccacc

SEQ ID NO: 972840 - DNA, 25 bp, Homo sapien
catccacctccataagtgagtgtac

SEQ ID NO: 972841 - DNA, 25 bp, Homo sapien
gaattggcctctatcctgaatccca

SEQ ID NO: 972842 - DNA, 25 bp, Homo sapien
catgactactccctccaggtggctt

SEQ ID NO: 972843 - DNA, 25 bp, Homo sapien
aggtggcttttgtgccttcccaggg

SEQ ID NO: 972844 - DNA, 25 bp, Homo sapien
tcattcagtctcacagaattggcct

SEQ ID NO: 972845 - DNA, 25 bp, Homo sapien
agccatcaatccccatcataattct

SEQ ID NO: 972846 - DNA, 25 bp, Homo sapien
gcagccatcaatccccatcataatt

SEQ ID NO: 972847 - DNA, 25 bp, Homo sapien
ataattcttgtaaaagttgtagcat

SEQ ID NO: 972848 - DNA, 25 bp, Homo sapien
attcttgtaaaagttgtagcatttc

SEQ ID NO: 972849 - DNA, 25 bp, Homo sapien
caggaccaccgccgtgttgaaagtc

SEQ ID NO: 972850 - DNA, 25 bp, Homo sapien
tgggaggaggcacttgtgtggttcg

SEQ ID NO: 972851 - DNA, 25 bp, Homo sapien
tgtggttcggtctggcaggaccacc

SEQ ID NO: 972852 - DNA, 25 bp, Homo sapien
tgcccagcacggcagtttcgttggg

SEQ ID NO: 972853 - DNA, 25 bp, Homo sapien
gggtccgaggcacgctcccagcgga

SEQ ID NO: 972854 - DNA, 25 bp, Homo sapien
gaggcacgctcccagcggagcggtc

SEQ ID NO: 972855 - DNA, 25 bp, Homo sapien
ccccgggtccgaggcacgctcccag

SEQ ID NO: 972856 - DNA, 25 bp, Homo sapien
acgctcccagcggagcggtcctgcg

SEQ ID NO: 972857 - DNA, 25 bp, Homo sapien
cggagcgctcagaccgcggccgccg

SEQ ID NO: 972858 - DNA, 25 bp, Homo sapien
ctgaggcttcgctgctctcggagcg

SEQ ID NO: 972859 - DNA, 25 bp, Homo sapien
aagaggcaaagtcccgcacgccgga

SEQ ID NO: 972860 - DNA, 25 bp, Homo sapien
ccgccgcagccggcgaaagaggcaa

SEQ ID NO: 972861 - DNA, 25 bp, Homo sapien
gcgaggggccgcagaccgtctggaa

SEQ ID NO: 972862 - DNA, 25 bp, Homo sapien
gaggggccgcagaccgtctggaaat

SEQ ID NO: 972863 - DNA, 25 bp, Homo sapien
cgaggggccgcagaccgtctggaaa

SEQ ID NO: 972864 - DNA, 25 bp, Homo sapien
ggcgaggggccgcagaccgtctgga

SEQ ID NO: 972865 - DNA, 25 bp, Homo sapien
gacaaaggtaaactcttggtgccaa

SEQ ID NO: 972866 - DNA, 25 bp, Homo sapien
gagccttaatttttggtggtagcag

SEQ ID NO: 972867 - DNA, 25 bp, Homo sapien
tagcagctgctattttgcgacaaag

SEQ ID NO: 972868 - DNA, 25 bp, Homo sapien
ccaagaatgtttaggatgcatatga

SEQ ID NO: 972869 - DNA, 25 bp, Homo sapien
ctcacattgcgtgtctgttgtttcc

SEQ ID NO: 972870 - DNA, 25 bp, Homo sapien
cagcactcacattgcgtgtctgttg

SEQ ID NO: 972871 - DNA, 25 bp, Homo sapien
cactcacattgcgtgtctgttgttt

SEQ ID NO: 972872 - DNA, 25 bp, Homo sapien
agcactcacattgcgtgtctgttgt

SEQ ID NO: 972873 - DNA, 25 bp, Homo sapien
gcttgcccttgagtgtctgaacata

SEQ ID NO: 972874 - DNA, 25 bp, Homo sapien
caatcacggaagaaatggcttgccc

SEQ ID NO: 972875 - DNA, 25 bp, Homo sapien
tttatcaaattagtggcaatcacgg

SEQ ID NO: 972876 - DNA, 25 bp, Homo sapien
ggcttgaggaaattggacttgacca

SEQ ID NO: 972877 - DNA, 25 bp, Homo sapien
tatcacagaccctaacaagagcatg

SEQ ID NO: 972878 - DNA, 25 bp, Homo sapien
catggttacccctggagagtgagtc

SEQ ID NO: 972879 - DNA, 25 bp, Homo sapien
tcacctgtcaaaatgtagggcctct

SEQ ID NO: 972880 - DNA, 25 bp, Homo sapien
tagttggacaagaaccgtagcttcg

SEQ ID NO: 972881 - DNA, 25 bp, Homo sapien
cattgctggtagcatctagtagaag

SEQ ID NO: 972882 - DNA, 25 bp, Homo sapien
tctgggctttgtgtaggacgcattg

SEQ ID NO: 972883 - DNA, 25 bp, Homo sapien
tagtagaagcttcaatgggatgggc

SEQ ID NO: 972884 - DNA, 25 bp, Homo sapien
tgggatgggcaagtcctagcagctc

SEQ ID NO: 972885 - DNA, 25 bp, Homo sapien
ttgctttcatacactgtccctgtcc

SEQ ID NO: 972886 - DNA, 25 bp, Homo sapien
gcaggccagagcacatcccttgctt

SEQ ID NO: 972887 - DNA, 25 bp, Homo sapien
ggccagagcacatcccttgctttca

SEQ ID NO: 972888 - DNA, 25 bp, Homo sapien
gcacatcccttgctttcatacactg

SEQ ID NO: 972889 - DNA, 25 bp, Homo sapien
gattgcctgatgcattggtgaccaa

SEQ ID NO: 972890 - DNA, 25 bp, Homo sapien
gtccagattgcctgatgcattggtg

SEQ ID NO: 972891 - DNA, 25 bp, Homo sapien
aatgggattccggtcccaacagatg

SEQ ID NO: 972892 - DNA, 25 bp, Homo sapien
tggtgaccaattaatgggattccgg

SEQ ID NO: 972893 - DNA, 25 bp, Homo sapien
tatgtcaaagtcaggaaatctttcc

SEQ ID NO: 972894 - DNA, 25 bp, Homo sapien
acataagaactaatttgttttccat

SEQ ID NO: 972895 - DNA, 25 bp, Homo sapien
gcttttgcaccaaggtggccatgta

SEQ ID NO: 972896 - DNA, 25 bp, Homo sapien
caccaaggtggccatgtatgtcaaa

SEQ ID NO: 972897 - DNA, 25 bp, Homo sapien
aatccagatttggagacatttatta

SEQ ID NO: 972898 - DNA, 25 bp, Homo sapien
tccagatttggagacatttattagt

SEQ ID NO: 972899 - DNA, 25 bp, Homo sapien
ggtgtttcacacatcaatccagatt

SEQ ID NO: 972900 - DNA, 25 bp, Homo sapien
tgtttcacacatcaatccagatttg

SEQ ID NO: 972901 - DNA, 25 bp, Homo sapien
ttctgtgcctggtctccatttctgc

SEQ ID NO: 972902 - DNA, 25 bp, Homo sapien
ttgccagtatcatcttttccctttt

SEQ ID NO: 972903 - DNA, 25 bp, Homo sapien
tgtgcctggtctccatttctgcagg

SEQ ID NO: 972904 - DNA, 25 bp, Homo sapien
gtgcctggtctccatttctgcaggg

SEQ ID NO: 972905 - DNA, 25 bp, Homo sapien
ttcactttggctgtatctcctttcg

SEQ ID NO: 972906 - DNA, 25 bp, Homo sapien
cttcactttggctgtatctcctttc

SEQ ID NO: 972907 - DNA, 25 bp, Homo sapien
taatgatgagttgttccaaacggcc

SEQ ID NO: 972908 - DNA, 25 bp, Homo sapien
caatttggagattaaccaggcccat

SEQ ID NO: 972909 - DNA, 25 bp, Homo sapien
catactgtctctcaagcatctggtg

SEQ ID NO: 972910 - DNA, 25 bp, Homo sapien
tgcttagtgcaaactcagagccagc

SEQ ID NO: 972911 - DNA, 25 bp, Homo sapien
atattgctgcccaaggcccactgaa

SEQ ID NO: 972912 - DNA, 25 bp, Homo sapien
tcttcagggctacaacagaccaaaa

SEQ ID NO: 972913 - DNA, 25 bp, Homo sapien
ttctggagaatgatatgggaacata

SEQ ID NO: 972914 - DNA, 25 bp, Homo sapien
tgataacaaacctcgtggagaaagg

SEQ ID NO: 972915 - DNA, 25 bp, Homo sapien
tctacatgggttcctgggctaacag

SEQ ID NO: 972916 - DNA, 25 bp, Homo sapien
tttccgtaaagaggcagacccaatg

SEQ ID NO: 972917 - DNA, 25 bp, Homo sapien
atgtccagtgccaaacggtttcgcc

SEQ ID NO: 972918 - DNA, 25 bp, Homo sapien
tcatagcagggcataggaccagttg

SEQ ID NO: 972919 - DNA, 25 bp, Homo sapien
gccctagtgtctccatggaccaaat

SEQ ID NO: 972920 - DNA, 25 bp, Homo sapien
gagaataacaccttaccaaacattg

SEQ ID NO: 972921 - DNA, 25 bp, Homo sapien
gacgtagttcattagctggtcttac

SEQ ID NO: 972922 - DNA, 25 bp, Homo sapien
caatttatagaggttaggaattcca

SEQ ID NO: 972923 - DNA, 25 bp, Homo sapien
cctgccccaagtctgtaacaacgaa

SEQ ID NO: 972924 - DNA, 25 bp, Homo sapien
taccttacacttgtgaatcctcaag

SEQ ID NO: 972925 - DNA, 25 bp, Homo sapien
aaaagcctacagtcaatgaaatcac

SEQ ID NO: 972926 - DNA, 25 bp, Homo sapien
gcttttattgatgcacaaatagacc

SEQ ID NO: 972927 - DNA, 25 bp, Homo sapien
tgcccctgggagttgctattctctc

SEQ ID NO: 972928 - DNA, 25 bp, Homo sapien
agtatgaacaatccatgcccctggg

SEQ ID NO: 972929 - DNA, 25 bp, Homo sapien
aactaaacagaaccaccgtggcagc

SEQ ID NO: 972930 - DNA, 25 bp, Homo sapien
tgcacaattttcaccagattcatag

SEQ ID NO: 972931 - DNA, 25 bp, Homo sapien
gccaccaagcttgaccattgttgaa

SEQ ID NO: 972932 - DNA, 25 bp, Homo sapien
tatcacgtgggtatccaccaacagt

SEQ ID NO: 972933 - DNA, 25 bp, Homo sapien
ggattgcagtgacccagttatagct

SEQ ID NO: 972934 - DNA, 25 bp, Homo sapien
taaccatgggttcttcatagatgcc

SEQ ID NO: 972935 - DNA, 25 bp, Homo sapien
taatgccttctgctttaattcgctc

SEQ ID NO: 972936 - DNA, 25 bp, Homo sapien
ggtccatagatctcctttgaaaagg

SEQ ID NO: 972937 - DNA, 25 bp, Homo sapien
cattaggcctttggctccaatttca

SEQ ID NO: 972938 - DNA, 25 bp, Homo sapien
aattcgctccaatattggtccatag

SEQ ID NO: 972939 - DNA, 25 bp, Homo sapien
taccatttcaaaggttgtgtcagag

SEQ ID NO: 972940 - DNA, 25 bp, Homo sapien
tgaattcttggaggcctaggcattt

SEQ ID NO: 972941 - DNA, 25 bp, Homo sapien
agattgaaagcacagccggacctag

SEQ ID NO: 972942 - DNA, 25 bp, Homo sapien
ccggacctagggatattgtcagaac

SEQ ID NO: 972943 - DNA, 25 bp, Homo sapien
caagatcaatcgttttatgttctaa

SEQ ID NO: 972944 - DNA, 25 bp, Homo sapien
tgccatggcggtgggtaaccccacg

SEQ ID NO: 972945 - DNA, 25 bp, Homo sapien
aaccccacggttttagccatggctg

SEQ ID NO: 972946 - DNA, 25 bp, Homo sapien
gatgtccccataagccacaagatca

SEQ ID NO: 972947 - DNA, 25 bp, Homo sapien
catgaccaaatgcttggagagggca

SEQ ID NO: 972948 - DNA, 25 bp, Homo sapien
ttgttcatccccaagtaagcccaac

SEQ ID NO: 972949 - DNA, 25 bp, Homo sapien
caaatgcttggagagggcatccaga

SEQ ID NO: 972950 - DNA, 25 bp, Homo sapien
ggactctgcctgaggaacttgttca

SEQ ID NO: 972951 - DNA, 25 bp, Homo sapien
cacaggagatggctgcattagttca

SEQ ID NO: 972952 - DNA, 25 bp, Homo sapien
cattaggtataccagcaggatgcca

SEQ ID NO: 972953 - DNA, 25 bp, Homo sapien
gatgccacagcggtcatatgaaaga

SEQ ID NO: 972954 - DNA, 25 bp, Homo sapien
taccccactatgcttgggaactgag

SEQ ID NO: 972955 - DNA, 25 bp, Homo sapien
ggtgaaatcccaactaggtcacaga

SEQ ID NO: 972956 - DNA, 25 bp, Homo sapien
taagaacagcttccttcaacacatc

SEQ ID NO: 972957 - DNA, 25 bp, Homo sapien
tattgtctcctcctagtttcttaag

SEQ ID NO: 972958 - DNA, 25 bp, Homo sapien
cccaactaggtcacagaggagttgt

SEQ ID NO: 972959 - DNA, 25 bp, Homo sapien
agggttggcctcaggtctaaaggca

SEQ ID NO: 972960 - DNA, 25 bp, Homo sapien
gaagcgcttctctgtttataagacc

SEQ ID NO: 972961 - DNA, 25 bp, Homo sapien
ggtctaaaggcaggaagcgcttctc

SEQ ID NO: 972962 - DNA, 25 bp, Homo sapien
gcgcttctctgtttataagacctaa

SEQ ID NO: 972963 - DNA, 25 bp, Homo sapien
aatccattattcagcattccaatcc

SEQ ID NO: 972964 - DNA, 25 bp, Homo sapien
caacattattcaacattccaatcca

SEQ ID NO: 972965 - DNA, 25 bp, Homo sapien
ttagggaggataccataggaaggta

SEQ ID NO: 972966 - DNA, 25 bp, Homo sapien
ggaaggtattcaacattattcaaca

SEQ ID NO: 972967 - DNA, 25 bp, Homo sapien
aaaaatccatggacgtaacggcatc

SEQ ID NO: 972968 - DNA, 25 bp, Homo sapien
ggagatgcctcctgcaacattcaca

SEQ ID NO: 972969 - DNA, 25 bp, Homo sapien
catatttcgtactgtctctgttagg

SEQ ID NO: 972970 - DNA, 25 bp, Homo sapien
ccccgcaacaaagtgtgagcagaag

SEQ ID NO: 972971 - DNA, 25 bp, Homo sapien
ctggaagcccaccacagtaggaaat

SEQ ID NO: 972972 - DNA, 25 bp, Homo sapien
tccatcgagcagataggtggcagac

SEQ ID NO: 972973 - DNA, 25 bp, Homo sapien
ggcagactgcattacattcatcaaa

SEQ ID NO: 972974 - DNA, 25 bp, Homo sapien
actggactccagctaaatttatatc

SEQ ID NO: 972975 - DNA, 25 bp, Homo sapien
tattgtttccattgctaacatgtga

SEQ ID NO: 972976 - DNA, 25 bp, Homo sapien
cagaccagggtccaatcccaattca

SEQ ID NO: 972977 - DNA, 25 bp, Homo sapien
taacatgtgatccagaccagggtcc

SEQ ID NO: 972978 - DNA, 25 bp, Homo sapien
tcccaattcaccaatgattgtgatg

SEQ ID NO: 972979 - DNA, 25 bp, Homo sapien
ttttagtgctggtgtgatgtagctt

SEQ ID NO: 972980 - DNA, 25 bp, Homo sapien
tttagtgctggtgtgatgtagcttg

SEQ ID NO: 972981 - DNA, 25 bp, Homo sapien
ccacaagagggtgcaatacataagg

SEQ ID NO: 972982 - DNA, 25 bp, Homo sapien
cacaagagggtgcaatacataaggc

SEQ ID NO: 972983 - DNA, 25 bp, Homo sapien
caagagggtgcaatacataaggcaa

SEQ ID NO: 972984 - DNA, 25 bp, Homo sapien
aagagggtgcaatacataaggcaac

SEQ ID NO: 972985 - DNA, 25 bp, Homo sapien
agccaggatagtgtttacccttaga

SEQ ID NO: 972986 - DNA, 25 bp, Homo sapien
ccttctggacccatacttcaattaa

SEQ ID NO: 972987 - DNA, 25 bp, Homo sapien
tctggggaattactgatactcttgt

SEQ ID NO: 972988 - DNA, 25 bp, Homo sapien
aaattcattgagctatatacttatg

SEQ ID NO: 972989 - DNA, 25 bp, Homo sapien
ttttgccaccaagaagcccagcttc

SEQ ID NO: 972990 - DNA, 25 bp, Homo sapien
tctcttcttgtttacaaatgtccat

SEQ ID NO: 972991 - DNA, 25 bp, Homo sapien
gatgacaagatcctgttttgccacc

SEQ ID NO: 972992 - DNA, 25 bp, Homo sapien
ctgatgacaagatcctgttttgcca

SEQ ID NO: 972993 - DNA, 25 bp, Homo sapien
tatatttcttgcctaactgttcaat

SEQ ID NO: 972994 - DNA, 25 bp, Homo sapien
tcttgcctaactgttcaatttgatt

SEQ ID NO: 972995 - DNA, 25 bp, Homo sapien
atttcttgcctaactgttcaatttg

SEQ ID NO: 972996 - DNA, 25 bp, Homo sapien
ttgcctaactgttcaatttgattct

SEQ ID NO: 972997 - DNA, 25 bp, Homo sapien
gatatgtcagagtaaaatatatttt

SEQ ID NO: 972998 - DNA, 25 bp, Homo sapien
aacaaagtagtcttctaaaatgtag

SEQ ID NO: 972999 - DNA, 25 bp, Homo sapien
gaagtcaacacgctataaaatacat

SEQ ID NO: 973000 - DNA, 25 bp, Homo sapien
ctaaaatgtagaagtcaacacgcta

SEQ ID NO: 973001 - DNA, 25 bp, Homo sapien
tgccatctcttgataaatattctaa

SEQ ID NO: 973002 - DNA, 25 bp, Homo sapien
tattctaatacaggctcagatatgt

SEQ ID NO: 973003 - DNA, 25 bp, Homo sapien
caggctcagatatgtagccagatcc

SEQ ID NO: 973004 - DNA, 25 bp, Homo sapien
tctcctggtgcccattgaaagtgac

SEQ ID NO: 973005 - DNA, 25 bp, Homo sapien
gacacataagagagaagatatcatc

SEQ ID NO: 973006 - DNA, 25 bp, Homo sapien
tatgacacataagagagaagatatc

SEQ ID NO: 973007 - DNA, 25 bp, Homo sapien
aatcggagccaagtaaacctgctgc

SEQ ID NO: 973008 - DNA, 25 bp, Homo sapien
agggcagcaagttctagcaatcgga

SEQ ID NO: 973009 - DNA, 25 bp, Homo sapien
tcatgttagacatgtcactagtttc

SEQ ID NO: 973010 - DNA, 25 bp, Homo sapien
ctagtttcagtagtgtaaaagacca

SEQ ID NO: 973011 - DNA, 25 bp, Homo sapien
tgtaaaagaccatcggatgatgaga

SEQ ID NO: 973012 - DNA, 25 bp, Homo sapien
aagaccatcggatgatgagaaccaa

SEQ ID NO: 973013 - DNA, 25 bp, Homo sapien
tgtaagaaactctcctacagggtta

SEQ ID NO: 973014 - DNA, 25 bp, Homo sapien
tatggaaaagcctaactatagtacg

SEQ ID NO: 973015 - DNA, 25 bp, Homo sapien
tacagggttatagagctagcttctc

SEQ ID NO: 973016 - DNA, 25 bp, Homo sapien
ctatagtacgcttgatctgggcaga

SEQ ID NO: 973017 - DNA, 25 bp, Homo sapien
taaacacagatcaagggcaattggc

SEQ ID NO: 973018 - DNA, 25 bp, Homo sapien
gatacttcagtacatgggttccttt

SEQ ID NO: 973019 - DNA, 25 bp, Homo sapien
aacacagatcaagggcaattggctg

SEQ ID NO: 973020 - DNA, 25 bp, Homo sapien
ttccaactctggtttctcctgatac

SEQ ID NO: 973021 - DNA, 25 bp, Homo sapien
tactttcatcaattgtttattcaca

SEQ ID NO: 973022 - DNA, 25 bp, Homo sapien
gcaccacagaaaggctagtgtgctc

SEQ ID NO: 973023 - DNA, 25 bp, Homo sapien
tgtaaccacgaattcacttccctga

SEQ ID NO: 973024 - DNA, 25 bp, Homo sapien
caactctcttaatttgtaaccacga

SEQ ID NO: 973025 - DNA, 25 bp, Homo sapien
gatcatgtatcaaaagctagagaaa

SEQ ID NO: 973026 - DNA, 25 bp, Homo sapien
cgaggcatgatcatgtatcaaaagc

SEQ ID NO: 973027 - DNA, 25 bp, Homo sapien
gaaaataaccgaggcatgatcatgt

SEQ ID NO: 973028 - DNA, 25 bp, Homo sapien
tttgagaaaataaccgaggcatgat

SEQ ID NO: 973029 - DNA, 25 bp, Homo sapien
cccggagtgtctggatatatttata

SEQ ID NO: 973030 - DNA, 25 bp, Homo sapien
atgtaccgttggatgtaatcactgc

SEQ ID NO: 973031 - DNA, 25 bp, Homo sapien
tttatatttatcaggtaatgtaccg

SEQ ID NO: 973032 - DNA, 25 bp, Homo sapien
gctctcccggagtgtctggatatat

SEQ ID NO: 973033 - DNA, 25 bp, Homo sapien
tttcaagaggctgtgtcgcgtctga

SEQ ID NO: 973034 - DNA, 25 bp, Homo sapien
ctttcaagaggctgtgtcgcgtctg

SEQ ID NO: 973035 - DNA, 25 bp, Homo sapien
tcaagaggctgtgtcgcgtctgata

SEQ ID NO: 973036 - DNA, 25 bp, Homo sapien
aagaggctgtgtcgcgtctgataat

SEQ ID NO: 973037 - DNA, 25 bp, Homo sapien
actccagcctgggcaacagggcgag

SEQ ID NO: 973038 - DNA, 25 bp, Homo sapien
gttgcagtgagccgcaattgcatca

SEQ ID NO: 973039 - DNA, 25 bp, Homo sapien
ttgcagtgagccgcaattgcatcac

SEQ ID NO: 973040 - DNA, 25 bp, Homo sapien
ccagcctgggcaacagggcgagaat

SEQ ID NO: 973041 - DNA, 25 bp, Homo sapien
tgccggcaaattgtcaatggaacac

SEQ ID NO: 973042 - DNA, 25 bp, Homo sapien
aatggaacacatcaggatccccgag

SEQ ID NO: 973043 - DNA, 25 bp, Homo sapien
cataagggtaaagcatgtctccaaa

SEQ ID NO: 973044 - DNA, 25 bp, Homo sapien
gcttcaattgggagctgtgccggca

SEQ ID NO: 973045 - DNA, 25 bp, Homo sapien
tgtcatgaataatatgctggtctgc

SEQ ID NO: 973046 - DNA, 25 bp, Homo sapien
ctatagaccctcctgtgtcagctga

SEQ ID NO: 973047 - DNA, 25 bp, Homo sapien
gggatgctctattgttgtacactca

SEQ ID NO: 973048 - DNA, 25 bp, Homo sapien
gctggtctgcatcatacatgcaaaa

SEQ ID NO: 973049 - DNA, 25 bp, Homo sapien
tacttagatgagaggatgaaattct

SEQ ID NO: 973050 - DNA, 25 bp, Homo sapien
catcaatacttagatgagaggatga

SEQ ID NO: 973051 - DNA, 25 bp, Homo sapien
caatacttagatgagaggatgaaat

SEQ ID NO: 973052 - DNA, 25 bp, Homo sapien
aataacatcaatacttagatgagag

SEQ ID NO: 973053 - DNA, 25 bp, Homo sapien
aggcgaggagtgttttgttcccagt

SEQ ID NO: 973054 - DNA, 25 bp, Homo sapien
taattaagcaagttgtatagggtgc

SEQ ID NO: 973055 - DNA, 25 bp, Homo sapien
gagactctgagcatcttggcgggtt

SEQ ID NO: 973056 - DNA, 25 bp, Homo sapien
aacttgcccggagccaggagactct

SEQ ID NO: 973057 - DNA, 25 bp, Homo sapien
tgtagcgctccggatgtttgtcata

SEQ ID NO: 973058 - DNA, 25 bp, Homo sapien
caccgtcccatacacttttctgagg

SEQ ID NO: 973059 - DNA, 25 bp, Homo sapien
gatgatgatgacgacttaacaccgt

SEQ ID NO: 973060 - DNA, 25 bp, Homo sapien
tcagtattaaaacgacttatgtagc

SEQ ID NO: 973061 - DNA, 25 bp, Homo sapien
gctccacatattcacaaggtagctc

SEQ ID NO: 973062 - DNA, 25 bp, Homo sapien
gggctccacatattcacaaggtagc

SEQ ID NO: 973063 - DNA, 25 bp, Homo sapien
tggggctccacatattcacaaggta

SEQ ID NO: 973064 - DNA, 25 bp, Homo sapien
catggggctccacatattcacaagg

SEQ ID NO: 973065 - DNA, 25 bp, Homo sapien
taaaaaatggttatcgtgaggtcac

SEQ ID NO: 973066 - DNA, 25 bp, Homo sapien
ccatttattttagatccattgcaga

SEQ ID NO: 973067 - DNA, 25 bp, Homo sapien
tacaatgacaagtttctataggaga

SEQ ID NO: 973068 - DNA, 25 bp, Homo sapien
tgaggtcactttcaaactcgtggac

SEQ ID NO: 973069 - DNA, 25 bp, Homo sapien
tgtgaacacaaatgttaagggtcct

SEQ ID NO: 973070 - DNA, 25 bp, Homo sapien
ttgcacagcctgactgctattcctg

SEQ ID NO: 973071 - DNA, 25 bp, Homo sapien
taagggtcctattgacttaggcatc

SEQ ID NO: 973072 - DNA, 25 bp, Homo sapien
tagccagcatcacggacagcttgca

SEQ ID NO: 973073 - DNA, 25 bp, Homo sapien
taaaaggtgtgtgatgtcccaaagc

SEQ ID NO: 973074 - DNA, 25 bp, Homo sapien
ccaaagcaaggagccttaaacccat

SEQ ID NO: 973075 - DNA, 25 bp, Homo sapien
gagccttaaacccattccatgtaaa

SEQ ID NO: 973076 - DNA, 25 bp, Homo sapien
aaggtgtgtgatgtcccaaagcaag

SEQ ID NO: 973077 - DNA, 25 bp, Homo sapien
tccccttgccgcagaaaagagaaaa

SEQ ID NO: 973078 - DNA, 25 bp, Homo sapien
cagttattccccaagccaatttagg

SEQ ID NO: 973079 - DNA, 25 bp, Homo sapien
aaactcacagttattccccaagcca

SEQ ID NO: 973080 - DNA, 25 bp, Homo sapien
tgggtgatgtaagccctggcatact

SEQ ID NO: 973081 - DNA, 25 bp, Homo sapien
tgccactacccgtactcctctatga

SEQ ID NO: 973082 - DNA, 25 bp, Homo sapien
tgtccaaatgccactacccgtactc

SEQ ID NO: 973083 - DNA, 25 bp, Homo sapien
cgtactcctctatgatccaccattt

SEQ ID NO: 973084 - DNA, 25 bp, Homo sapien
tcctctatgatccaccattttctca

SEQ ID NO: 973085 - DNA, 25 bp, Homo sapien
aaataacactctctttcaacctggg

SEQ ID NO: 973086 - DNA, 25 bp, Homo sapien
tgctaacagaagctaccatcaggta

SEQ ID NO: 973087 - DNA, 25 bp, Homo sapien
aatatttagaaaacgccaggtagca

SEQ ID NO: 973088 - DNA, 25 bp, Homo sapien
gagacgaatctctgtgacctagatc

SEQ ID NO: 973089 - DNA, 25 bp, Homo sapien
gcataagtcttcctggacattaatt

SEQ ID NO: 973090 - DNA, 25 bp, Homo sapien
tcatccaacaagcccatattggcct

SEQ ID NO: 973091 - DNA, 25 bp, Homo sapien
cctaaaattagacaagcttcagaaa

SEQ ID NO: 973092 - DNA, 25 bp, Homo sapien
aaaaatgcataagtcttcctggaca

SEQ ID NO: 973093 - DNA, 25 bp, Homo sapien
aatggcccgccgattcgaaggctgt

SEQ ID NO: 973094 - DNA, 25 bp, Homo sapien
gaaggctgtatcaagaccttgtatc

SEQ ID NO: 973095 - DNA, 25 bp, Homo sapien
tatcccagattggtgatgcctttga

SEQ ID NO: 973096 - DNA, 25 bp, Homo sapien
cttatcatgaatggcccgccgattc

SEQ ID NO: 973097 - DNA, 25 bp, Homo sapien
gcctgcccagtccagtcctatgtac

SEQ ID NO: 973098 - DNA, 25 bp, Homo sapien
tgtaaagacaatgtaaagagcagag

SEQ ID NO: 973099 - DNA, 25 bp, Homo sapien
gtaaagacaatgtaaagagcagagc

SEQ ID NO: 973100 - DNA, 25 bp, Homo sapien
gtgtgacaccatccaataactgcta

SEQ ID NO: 973101 - DNA, 25 bp, Homo sapien
agtatagagcaacgtgtgtgacacc

SEQ ID NO: 973102 - DNA, 25 bp, Homo sapien
ctctgtcaatgctaaaatgcagtgg

SEQ ID NO: 973103 - DNA, 25 bp, Homo sapien
tcagtgtgccctagtgtcagtcagt

SEQ ID NO: 973104 - DNA, 25 bp, Homo sapien
ccaaatattagagtcaaagtgggac

SEQ ID NO: 973105 - DNA, 25 bp, Homo sapien
aatagtgaggcccatagaaataggg

SEQ ID NO: 973106 - DNA, 25 bp, Homo sapien
cagtaagtctgttctcgttggtata

SEQ ID NO: 973107 - DNA, 25 bp, Homo sapien
gcagtaatccaatccctgcccatgt

SEQ ID NO: 973108 - DNA, 25 bp, Homo sapien
cagtcaagtcatgtagccctagatt

SEQ ID NO: 973109 - DNA, 25 bp, Homo sapien
taaaccaaagttctgatcacgccat

SEQ ID NO: 973110 - DNA, 25 bp, Homo sapien
ccaaggtctgttaaacgactagtga

SEQ ID NO: 973111 - DNA, 25 bp, Homo sapien
tacagtattggaaagccgcagcttc

SEQ ID NO: 973112 - DNA, 25 bp, Homo sapien
cgccgtccacaaattaacaagccgt

SEQ ID NO: 973113 - DNA, 25 bp, Homo sapien
agcacgccgtccacaaattaacaag

SEQ ID NO: 973114 - DNA, 25 bp, Homo sapien
tctaagcacgccgtccacaaattaa

SEQ ID NO: 973115 - DNA, 25 bp, Homo sapien
cgtccacaaattaacaagccgttgt

SEQ ID NO: 973116 - DNA, 25 bp, Homo sapien
atcagttctttattccccagccaca

SEQ ID NO: 973117 - DNA, 25 bp, Homo sapien
cctcagcttcatcagttctttattc

SEQ ID NO: 973118 - DNA, 25 bp, Homo sapien
tcagcttcatcagttctttattccc

SEQ ID NO: 973119 - DNA, 25 bp, Homo sapien
agcttcatcagttctttattcccca

SEQ ID NO: 973120 - DNA, 25 bp, Homo sapien
aagaaaagaaatccgaattgcaatc

SEQ ID NO: 973121 - DNA, 25 bp, Homo sapien
gaaatccgaattgcaatccctcgcc

SEQ ID NO: 973122 - DNA, 25 bp, Homo sapien
gaaaagaaatccgaattgcaatccc

SEQ ID NO: 973123 - DNA, 25 bp, Homo sapien
aagaaatccgaattgcaatccctcg

SEQ ID NO: 973124 - DNA, 25 bp, Homo sapien
tagaaatgctggagctgcgctgacc

SEQ ID NO: 973125 - DNA, 25 bp, Homo sapien
ctctccctccattcctcgcagggag

SEQ ID NO: 973126 - DNA, 25 bp, Homo sapien
cagtgaaactctctgcgtttccgct

SEQ ID NO: 973127 - DNA, 25 bp, Homo sapien
gggaggcccgaatgctcgccgcctt

SEQ ID NO: 973128 - DNA, 25 bp, Homo sapien
cgggcccctcccagcgacagcccga

SEQ ID NO: 973129 - DNA, 25 bp, Homo sapien
cgagcccggcccgctatctccaccg

SEQ ID NO: 973130 - DNA, 25 bp, Homo sapien
ccctcccagcgacagcccgagcccg

SEQ ID NO: 973131 - DNA, 25 bp, Homo sapien
cggccggggtcgcctcgcggcgccg

SEQ ID NO: 973132 - DNA, 25 bp, Homo sapien
gctcagctctccgcggggacctctc

SEQ ID NO: 973133 - DNA, 25 bp, Homo sapien
ccgcgcgtctgctcagctctccgcg

SEQ ID NO: 973134 - DNA, 25 bp, Homo sapien
tgctcagctctccgcggggacctct

SEQ ID NO: 973135 - DNA, 25 bp, Homo sapien
gcgcgtctgctcagctctccgcggg

SEQ ID NO: 973136 - DNA, 25 bp, Homo sapien
ctcgtccgctctggggcgccgactt

SEQ ID NO: 973137 - DNA, 25 bp, Homo sapien
ccccgccgcctcgaatcttccgagt

SEQ ID NO: 973138 - DNA, 25 bp, Homo sapien
gcctcgaatcttccgagtcgctgca

SEQ ID NO: 973139 - DNA, 25 bp, Homo sapien
gtccgctctggggcgccgacttgtc

SEQ ID NO: 973140 - DNA, 25 bp, Homo sapien
tagaaaccctactgaatttggcaac

SEQ ID NO: 973141 - DNA, 25 bp, Homo sapien
gatgatccagcaacaggactgatgg

SEQ ID NO: 973142 - DNA, 25 bp, Homo sapien
taatagagatcagaaggagcaggca

SEQ ID NO: 973143 - DNA, 25 bp, Homo sapien
gcttccagtgcggtctacaaggaca

SEQ ID NO: 973144 - DNA, 25 bp, Homo sapien
ggacacaactccttcgtgcaaagtc

SEQ ID NO: 973145 - DNA, 25 bp, Homo sapien
agaagcaggacacaactccttcgtg

SEQ ID NO: 973146 - DNA, 25 bp, Homo sapien
gcaggacacaactccttcgtgcaaa

SEQ ID NO: 973147 - DNA, 25 bp, Homo sapien
cacaactccttcgtgcaaagtctga

SEQ ID NO: 973148 - DNA, 25 bp, Homo sapien
cataggtcactagcagggggcacgt

SEQ ID NO: 973149 - DNA, 25 bp, Homo sapien
tcataggtcactagcagggggcacg

SEQ ID NO: 973150 - DNA, 25 bp, Homo sapien
attcataggtcactagcagggggca

SEQ ID NO: 973151 - DNA, 25 bp, Homo sapien
aggtcactagcagggggcacgtcat

SEQ ID NO: 973152 - DNA, 25 bp, Homo sapien
caggtgaccctgttctgcaccacga

SEQ ID NO: 973153 - DNA, 25 bp, Homo sapien
ggttctctgccccaactacaattag

SEQ ID NO: 973154 - DNA, 25 bp, Homo sapien
cactggtctaatggaacaaattgca

SEQ ID NO: 973155 - DNA, 25 bp, Homo sapien
gaaaccgctgcagaccaaattgcat

SEQ ID NO: 973156 - DNA, 25 bp, Homo sapien
gctccagtcataagatttcaggttg

SEQ ID NO: 973157 - DNA, 25 bp, Homo sapien
gaatacctaaagcttactgcaacca

SEQ ID NO: 973158 - DNA, 25 bp, Homo sapien
gattacaattctaaagtgctgactg

SEQ ID NO: 973159 - DNA, 25 bp, Homo sapien
tacatgagtcacagcaaattctagg

SEQ ID NO: 973160 - DNA, 25 bp, Homo sapien
ggtaataagccttcaagatgcagtt

SEQ ID NO: 973161 - DNA, 25 bp, Homo sapien
ctgagagttcactctgatgtttcat

SEQ ID NO: 973162 - DNA, 25 bp, Homo sapien
ccttggtgagttttctagtcttgcc

SEQ ID NO: 973163 - DNA, 25 bp, Homo sapien
tcatatcagtatggccgtcacttga

SEQ ID NO: 973164 - DNA, 25 bp, Homo sapien
gctggctgattgtgcatcataacca

SEQ ID NO: 973165 - DNA, 25 bp, Homo sapien
aaattaagtgcacaagagaaggagg

SEQ ID NO: 973166 - DNA, 25 bp, Homo sapien
ggaaaaccagaagagtataatacaa

SEQ ID NO: 973167 - DNA, 25 bp, Homo sapien
caagataagaaccttgtgagactac

SEQ ID NO: 973168 - DNA, 25 bp, Homo sapien
tgtttttctcacattgcagacccaa

SEQ ID NO: 973169 - DNA, 25 bp, Homo sapien
tcttcaaacatgcacagtacaggtc

SEQ ID NO: 973170 - DNA, 25 bp, Homo sapien
ggtgtcataactggtcttgctgcta

SEQ ID NO: 973171 - DNA, 25 bp, Homo sapien
gcagacccaatccactagcagagct

SEQ ID NO: 973172 - DNA, 25 bp, Homo sapien
tgataccaggtgcaacaaagaggtc

SEQ ID NO: 973173 - DNA, 25 bp, Homo sapien
ggacaatcaccattaaagggagaga

SEQ ID NO: 973174 - DNA, 25 bp, Homo sapien
tatattttggttacctacatacctg

SEQ ID NO: 973175 - DNA, 25 bp, Homo sapien
taaggtatgacccacacggtatctg

SEQ ID NO: 973176 - DNA, 25 bp, Homo sapien
ttgggcataaagaaatctcctgcgg

SEQ ID NO: 973177 - DNA, 25 bp, Homo sapien
caacagcctgatggtttggagagac

SEQ ID NO: 973178 - DNA, 25 bp, Homo sapien
tctcctgcggtattgaaaacacatc

SEQ ID NO: 973179 - DNA, 25 bp, Homo sapien
taaaggaccaagctgctgggcataa

SEQ ID NO: 973180 - DNA, 25 bp, Homo sapien
ccagttttgtggttttctcatcagc

SEQ ID NO: 973181 - DNA, 25 bp, Homo sapien
cagttttgtggttttctcatcagca

SEQ ID NO: 973182 - DNA, 25 bp, Homo sapien
tggagtgaaggagcggggatttagt

SEQ ID NO: 973183 - DNA, 25 bp, Homo sapien
ggagtgaaggagcggggatttagta

SEQ ID NO: 973184 - DNA, 25 bp, Homo sapien
gagtgaaggagcggggatttagtaa

SEQ ID NO: 973185 - DNA, 25 bp, Homo sapien
caggttgacggtgcactggttaccg

SEQ ID NO: 973186 - DNA, 25 bp, Homo sapien
tgttagtgtgaagcaggttgacggt

SEQ ID NO: 973187 - DNA, 25 bp, Homo sapien
accgcttcccccctttgcatcttgg

SEQ ID NO: 973188 - DNA, 25 bp, Homo sapien
gacggtgcactggttaccgcttccc

SEQ ID NO: 973189 - DNA, 25 bp, Homo sapien
ctgatgttgagagcctctattacct

SEQ ID NO: 973190 - DNA, 25 bp, Homo sapien
ttctgatgttgagagcctctattac

SEQ ID NO: 973191 - DNA, 25 bp, Homo sapien
gactcattctgatgttgagagcctc

SEQ ID NO: 973192 - DNA, 25 bp, Homo sapien
tcattctgatgttgagagcctctat

SEQ ID NO: 973193 - DNA, 25 bp, Homo sapien
agctggtgaggacgcgctacggtgg

SEQ ID NO: 973194 - DNA, 25 bp, Homo sapien
tacggtgggtgcagaaaggagatcc

SEQ ID NO: 973195 - DNA, 25 bp, Homo sapien
tggactctgtagaacctgggcccgc

SEQ ID NO: 973196 - DNA, 25 bp, Homo sapien
ctgggcccgcggtgtggaccgatgg

SEQ ID NO: 973197 - DNA, 25 bp, Homo sapien
aatgtggaatgtacccctatgggcg

SEQ ID NO: 973198 - DNA, 25 bp, Homo sapien
attaaaatgatgcagcattcccggg

SEQ ID NO: 973199 - DNA, 25 bp, Homo sapien
gaactcggaccaggagctctagtct

SEQ ID NO: 973200 - DNA, 25 bp, Homo sapien
tgagaccggagaatcaacacaatgg

SEQ ID NO: 973201 - DNA, 25 bp, Homo sapien
cagcgtgggggcacggctgaggctg

SEQ ID NO: 973202 - DNA, 25 bp, Homo sapien
tcagcgtgggggcacggctgaggct

SEQ ID NO: 973203 - DNA, 25 bp, Homo sapien
cctcagcgtgggggcacggctgagg

SEQ ID NO: 973204 - DNA, 25 bp, Homo sapien
ctcagcgtgggggcacggctgaggc

SEQ ID NO: 973205 - DNA, 25 bp, Homo sapien
ctgctgtcgtgcagcttgcggacat

SEQ ID NO: 973206 - DNA, 25 bp, Homo sapien
acatgcttcttgaggtcaaagttcc

SEQ ID NO: 973207 - DNA, 25 bp, Homo sapien
cagtgcctggttcgccagctggcgt

SEQ ID NO: 973208 - DNA, 25 bp, Homo sapien
agttcctgcagaaacccttgccgca

SEQ ID NO: 973209 - DNA, 25 bp, Homo sapien
gcagatattgcacttgaactgcttc

SEQ ID NO: 973210 - DNA, 25 bp, Homo sapien
gatattgcacttgaactgcttctcc

SEQ ID NO: 973211 - DNA, 25 bp, Homo sapien
agatattgcacttgaactgcttctc

SEQ ID NO: 973212 - DNA, 25 bp, Homo sapien
cagatattgcacttgaactgcttct

SEQ ID NO: 973213 - DNA, 25 bp, Homo sapien
acacacaaatgacaggaatatggtt

SEQ ID NO: 973214 - DNA, 25 bp, Homo sapien
aacacacaaatgacaggaatatggt

SEQ ID NO: 973215 - DNA, 25 bp, Homo sapien
gaaacacacaaatgacaggaatatg

SEQ ID NO: 973216 - DNA, 25 bp, Homo sapien
ctgaaacacacaaatgacaggaata

SEQ ID NO: 973217 - DNA, 25 bp, Homo sapien
ttcacacacaaacggtttgtagccc

SEQ ID NO: 973218 - DNA, 25 bp, Homo sapien
tagcccgcgtgtattcgggtatgag

SEQ ID NO: 973219 - DNA, 25 bp, Homo sapien
ttgatgaaaccctttgccacagaat

SEQ ID NO: 973220 - DNA, 25 bp, Homo sapien
tcgggtatgagtgtttaaagtggaa

SEQ ID NO: 973221 - DNA, 25 bp, Homo sapien
gcgtgtgaatgatcttgtgcctgca

SEQ ID NO: 973222 - DNA, 25 bp, Homo sapien
tttgcaaacgaagggtctggctcct

SEQ ID NO: 973223 - DNA, 25 bp, Homo sapien
cctgcacagggtgcttgcttgcctg

SEQ ID NO: 973224 - DNA, 25 bp, Homo sapien
gaaaccttttccgcacactttgcaa

SEQ ID NO: 973225 - DNA, 25 bp, Homo sapien
ttaagttatagtgcgcattaaagac

SEQ ID NO: 973226 - DNA, 25 bp, Homo sapien
cgggttaagttatagtgcgcattaa

SEQ ID NO: 973227 - DNA, 25 bp, Homo sapien
gtgacgggttaagttatagtgcgca

SEQ ID NO: 973228 - DNA, 25 bp, Homo sapien
gacgggttaagttatagtgcgcatt

SEQ ID NO: 973229 - DNA, 25 bp, Homo sapien
tctttgaaagctactccagaagggt

SEQ ID NO: 973230 - DNA, 25 bp, Homo sapien
gctgaaatccgaggttttgaacgcg

SEQ ID NO: 973231 - DNA, 25 bp, Homo sapien
tggcattaggagagcctcggctgaa

SEQ ID NO: 973232 - DNA, 25 bp, Homo sapien
gattttttccgacagaagctgggcg

SEQ ID NO: 973233 - DNA, 25 bp, Homo sapien
aggccaccgggtggatgttcacgcc

SEQ ID NO: 973234 - DNA, 25 bp, Homo sapien
cgtcacctcggttcaggtagcacaa

SEQ ID NO: 973235 - DNA, 25 bp, Homo sapien
gagtggttgaccacacgcggcctta

SEQ ID NO: 973236 - DNA, 25 bp, Homo sapien
caaggcgcccatggcgtggaatgaa

SEQ ID NO: 973237 - DNA, 25 bp, Homo sapien
tcgcgggccaggtcgcccttgagac

SEQ ID NO: 973238 - DNA, 25 bp, Homo sapien
cccttgagactcagtgcgcagttga

SEQ ID NO: 973239 - DNA, 25 bp, Homo sapien
tcagtgcgcagttgagcaggtcgct

SEQ ID NO: 973240 - DNA, 25 bp, Homo sapien
agcggcagcgcgtcgcgggccaggt

SEQ ID NO: 973241 - DNA, 25 bp, Homo sapien
ctgaatgcgggagccgagggcaccg

SEQ ID NO: 973242 - DNA, 25 bp, Homo sapien
cgcgggcgccgccggggcctccaga

SEQ ID NO: 973243 - DNA, 25 bp, Homo sapien
ccgcgggcgccgccggggcctccag

SEQ ID NO: 973244 - DNA, 25 bp, Homo sapien
gcgggcgccgccggggcctccagac

SEQ ID NO: 973245 - DNA, 25 bp, Homo sapien
gccttccgcggctcggagcccgtca

SEQ ID NO: 973246 - DNA, 25 bp, Homo sapien
ccttccgcggctcggagcccgtcac

SEQ ID NO: 973247 - DNA, 25 bp, Homo sapien
tggccttccgcggctcggagcccgt

SEQ ID NO: 973248 - DNA, 25 bp, Homo sapien
ggccttccgcggctcggagcccgtc

SEQ ID NO: 973249 - DNA, 25 bp, Homo sapien
tgccttggggctcgtgtcgtaggcc

SEQ ID NO: 973250 - DNA, 25 bp, Homo sapien
gggctcgtgtcgtaggccacaggca

SEQ ID NO: 973251 - DNA, 25 bp, Homo sapien
cacaggcacgaaggggatcatgcag

SEQ ID NO: 973252 - DNA, 25 bp, Homo sapien
cgtgtcgtaggccacaggcacgaag

SEQ ID NO: 973253 - DNA, 25 bp, Homo sapien
ggtgcgcgccatgattcgttcaatg

SEQ ID NO: 973254 - DNA, 25 bp, Homo sapien
ccaagggtttggacgtgctcatcat

SEQ ID NO: 973255 - DNA, 25 bp, Homo sapien
gatgcagagagtgcttgggttcccc

SEQ ID NO: 973256 - DNA, 25 bp, Homo sapien
cattttggtagtcgcgttgtggcag

SEQ ID NO: 973257 - DNA, 25 bp, Homo sapien
gctgggttgcgccgtccgttgcctt

SEQ ID NO: 973258 - DNA, 25 bp, Homo sapien
tgagtcgccagcgtccgtcagccgg

SEQ ID NO: 973259 - DNA, 25 bp, Homo sapien
gttgcgccgtccgttgccttgttcc

SEQ ID NO: 973260 - DNA, 25 bp, Homo sapien
tcagccggggctgggttgcgccgtc

SEQ ID NO: 973261 - DNA, 25 bp, Homo sapien
cggagagggggacgggcaccatcac

SEQ ID NO: 973262 - DNA, 25 bp, Homo sapien
agagggggacgggcaccatcaccac

SEQ ID NO: 973263 - DNA, 25 bp, Homo sapien
tgcggagagggggacgggcaccatc

SEQ ID NO: 973264 - DNA, 25 bp, Homo sapien
gagagggggacgggcaccatcacca

SEQ ID NO: 973265 - DNA, 25 bp, Homo sapien
gttcttggcgcaccaatgactcggg

SEQ ID NO: 973266 - DNA, 25 bp, Homo sapien
gcccatcgcagagttcttggcgcac

SEQ ID NO: 973267 - DNA, 25 bp, Homo sapien
tgtcaataacgcagccaagatctcg

SEQ ID NO: 973268 - DNA, 25 bp, Homo sapien
tagaaagtgttgtgtcaataacgca

SEQ ID NO: 973269 - DNA, 25 bp, Homo sapien
gctgcggctccgactgtgcgggctc

SEQ ID NO: 973270 - DNA, 25 bp, Homo sapien
cgcccaggcaagagcgtccaggagc

SEQ ID NO: 973271 - DNA, 25 bp, Homo sapien
cgcggtggagcgtgtggaggtttcc

SEQ ID NO: 973272 - DNA, 25 bp, Homo sapien
agccggcgatcacgcagagctgaac

SEQ ID NO: 973273 - DNA, 25 bp, Homo sapien
tggtcagcgctggaaattttctttc

SEQ ID NO: 973274 - DNA, 25 bp, Homo sapien
agaggcgccacatccccgagaggcg

SEQ ID NO: 973275 - DNA, 25 bp, Homo sapien
ccgagaggcgcttcgtagttgtcct

SEQ ID NO: 973276 - DNA, 25 bp, Homo sapien
accgggcgcagacactcagtattgg

SEQ ID NO: 973277 - DNA, 25 bp, Homo sapien
cccagcagcgaaaaatccccctcct

SEQ ID NO: 973278 - DNA, 25 bp, Homo sapien
cagcagcgaaaaatccccctcctgc

SEQ ID NO: 973279 - DNA, 25 bp, Homo sapien
cttcccagcagcgaaaaatccccct

SEQ ID NO: 973280 - DNA, 25 bp, Homo sapien
tcctgctgcactcctccgccaccgg

SEQ ID NO: 973281 - DNA, 25 bp, Homo sapien
agagcaacagtctgctttctctttg

SEQ ID NO: 973282 - DNA, 25 bp, Homo sapien
caagagcaacagtctgctttctctt

SEQ ID NO: 973283 - DNA, 25 bp, Homo sapien
aagagcaacagtctgctttctcttt

SEQ ID NO: 973284 - DNA, 25 bp, Homo sapien
ccgatggccactccggcccgggagt

SEQ ID NO: 973285 - DNA, 25 bp, Homo sapien
acccgctggccttggccgtctcagc

SEQ ID NO: 973286 - DNA, 25 bp, Homo sapien
attatcgccacggccttggcgcccc

SEQ ID NO: 973287 - DNA, 25 bp, Homo sapien
gccgacccgctggccttggccgtct

SEQ ID NO: 973288 - DNA, 25 bp, Homo sapien
tggaaacaacgcgaagctttaagcg

SEQ ID NO: 973289 - DNA, 25 bp, Homo sapien
ggcccctgccttctcgttgggtcga

SEQ ID NO: 973290 - DNA, 25 bp, Homo sapien
ttgacgctggcagctcgcaaacagc

SEQ ID NO: 973291 - DNA, 25 bp, Homo sapien
gcagtcccacacagaggaaaaggct

SEQ ID NO: 973292 - DNA, 25 bp, Homo sapien
tgtggacgcgactccatctgtagca

SEQ ID NO: 973293 - DNA, 25 bp, Homo sapien
tgggtcgcggctcttcctcgaaggt

SEQ ID NO: 973294 - DNA, 25 bp, Homo sapien
aaaaggaggcgcattagcgacttcg

SEQ ID NO: 973295 - DNA, 25 bp, Homo sapien
tcgaaggttactgcgagcgggactt

SEQ ID NO: 973296 - DNA, 25 bp, Homo sapien
gcgggctggcgggatcagaaggacg

SEQ ID NO: 973297 - DNA, 25 bp, Homo sapien
ggttcctgtgaactccgggcttgct

SEQ ID NO: 973298 - DNA, 25 bp, Homo sapien
taaaagcgaccaagctcttgcccta

SEQ ID NO: 973299 - DNA, 25 bp, Homo sapien
tcagaaggacgggtccgagctcggg

SEQ ID NO: 973300 - DNA, 25 bp, Homo sapien
cgccggtagctgcaggctgagggcg

SEQ ID NO: 973301 - DNA, 25 bp, Homo sapien
gcggcgccaggccaggctggactgt

SEQ ID NO: 973302 - DNA, 25 bp, Homo sapien
caggccaggctggactgtgaccctg

SEQ ID NO: 973303 - DNA, 25 bp, Homo sapien
agctgcaggctgagggcggcgccag

SEQ ID NO: 973304 - DNA, 25 bp, Homo sapien
agcaatgtgtcgtggaacagcaagc

SEQ ID NO: 973305 - DNA, 25 bp, Homo sapien
ggagggagaacattcccaaactgcc

SEQ ID NO: 973306 - DNA, 25 bp, Homo sapien
ggtgggtaattactaagtacagagc

SEQ ID NO: 973307 - DNA, 25 bp, Homo sapien
tagtatttggtgtgtgaatagagaa

SEQ ID NO: 973308 - DNA, 25 bp, Homo sapien
caaacctcttttactgcatttgctc

SEQ ID NO: 973309 - DNA, 25 bp, Homo sapien
ttactgcatttgctctatataagtc

SEQ ID NO: 973310 - DNA, 25 bp, Homo sapien
gcatttgctctatataagtctaata

SEQ ID NO: 973311 - DNA, 25 bp, Homo sapien
ctgcaaacctcttttactgcatttg

SEQ ID NO: 973312 - DNA, 25 bp, Homo sapien
tattgcctgcaagctgttatactgg

SEQ ID NO: 973313 - DNA, 25 bp, Homo sapien
taagtacaaaacgaacctggcacat

SEQ ID NO: 973314 - DNA, 25 bp, Homo sapien
tatcttgacggaagcacacttgcta

SEQ ID NO: 973315 - DNA, 25 bp, Homo sapien
catgttctgatcacaagcagagcca

SEQ ID NO: 973316 - DNA, 25 bp, Homo sapien
aaaaacaatgtcgatcaaggtcttc

SEQ ID NO: 973317 - DNA, 25 bp, Homo sapien
caatgtcgatcaaggtcttccttcc

SEQ ID NO: 973318 - DNA, 25 bp, Homo sapien
ataaaaaacaatgtcgatcaaggtc

SEQ ID NO: 973319 - DNA, 25 bp, Homo sapien
aacaatgtcgatcaaggtcttcctt

SEQ ID NO: 973320 - DNA, 25 bp, Homo sapien
tgtctttcatagtaatgccctgaag

SEQ ID NO: 973321 - DNA, 25 bp, Homo sapien
agaggctgtggcctcctctactgtt

SEQ ID NO: 973322 - DNA, 25 bp, Homo sapien
tgcaatcgaaagtccctgtaggttt

SEQ ID NO: 973323 - DNA, 25 bp, Homo sapien
tctactgttaaacgtctgtgcacag

SEQ ID NO: 973324 - DNA, 25 bp, Homo sapien
ggctgtccatgccaatcatcttctt

SEQ ID NO: 973325 - DNA, 25 bp, Homo sapien
tgtggctgtccatgccaatcatctt

SEQ ID NO: 973326 - DNA, 25 bp, Homo sapien
catgtggctgtccatgccaatcatc

SEQ ID NO: 973327 - DNA, 25 bp, Homo sapien
tcatgtggctgtccatgccaatcat

SEQ ID NO: 973328 - DNA, 25 bp, Homo sapien
tcagctggtaaatatggagttggag

SEQ ID NO: 973329 - DNA, 25 bp, Homo sapien
cttcacaatcttgatgagcgtcttc

SEQ ID NO: 973330 - DNA, 25 bp, Homo sapien
gagttggaggtctaatctatcagtc

SEQ ID NO: 973331 - DNA, 25 bp, Homo sapien
tcttgatgagcgtcttcagctggta

SEQ ID NO: 973332 - DNA, 25 bp, Homo sapien
cattatcaagattgaatttttgtaa

SEQ ID NO: 973333 - DNA, 25 bp, Homo sapien
agaaacattatcaagattgaatttt

SEQ ID NO: 973334 - DNA, 25 bp, Homo sapien
ttatcaagattgaatttttgtaaga

SEQ ID NO: 973335 - DNA, 25 bp, Homo sapien
aaacattatcaagattgaatttttg

SEQ ID NO: 973336 - DNA, 25 bp, Homo sapien
tactggttactctgttagactgcac

SEQ ID NO: 973337 - DNA, 25 bp, Homo sapien
tacgaagcctaacataacatactgg

SEQ ID NO: 973338 - DNA, 25 bp, Homo sapien
tattttggctcctaagtcaaagcat

SEQ ID NO: 973339 - DNA, 25 bp, Homo sapien
agtcaaagcattttcaagacacact

SEQ ID NO: 973340 - DNA, 25 bp, Homo sapien
caggagttgccactgactatggaaa

SEQ ID NO: 973341 - DNA, 25 bp, Homo sapien
tattgagaagcgcagcacttgtgca

SEQ ID NO: 973342 - DNA, 25 bp, Homo sapien
gctcagaaggtggtattgacaatga

SEQ ID NO: 973343 - DNA, 25 bp, Homo sapien
gaagatctttagagcaagcaacaag

SEQ ID NO: 973344 - DNA, 25 bp, Homo sapien
tataaacgcttgcagttcatcagct

SEQ ID NO: 973345 - DNA, 25 bp, Homo sapien
ctgaaccccctcagtggacctttag

SEQ ID NO: 973346 - DNA, 25 bp, Homo sapien
cagggctataaacgcttgcagttca

SEQ ID NO: 973347 - DNA, 25 bp, Homo sapien
taaacgcttgcagttcatcagcttt

SEQ ID NO: 973348 - DNA, 25 bp, Homo sapien
taaagttgtttctccgcagagctgg

SEQ ID NO: 973349 - DNA, 25 bp, Homo sapien
tgtgtcagcactgctacaggccctg

SEQ ID NO: 973350 - DNA, 25 bp, Homo sapien
ggctggcattgatccccaactgtgt

SEQ ID NO: 973351 - DNA, 25 bp, Homo sapien
gaaaagagatttagcaacataccgt

SEQ ID NO: 973352 - DNA, 25 bp, Homo sapien
gagccagctggatggatgataattt

SEQ ID NO: 973353 - DNA, 25 bp, Homo sapien
tgcagggcatcaaagcttttagaaa

SEQ ID NO: 973354 - DNA, 25 bp, Homo sapien
atttttctacccctgcagggcatca

SEQ ID NO: 973355 - DNA, 25 bp, Homo sapien
ccagctggatggatgataatttttc

SEQ ID NO: 973356 - DNA, 25 bp, Homo sapien
agtgaacactgacacgagagaccac

SEQ ID NO: 973357 - DNA, 25 bp, Homo sapien
ttgaccacccaaactgacagtgaac

SEQ ID NO: 973358 - DNA, 25 bp, Homo sapien
agaccacggcagagaggatgacgta

SEQ ID NO: 973359 - DNA, 25 bp, Homo sapien
actgacacgagagaccacggcagag

SEQ ID NO: 973360 - DNA, 25 bp, Homo sapien
ttgctgttacgaaaacatttgccgt

SEQ ID NO: 973361 - DNA, 25 bp, Homo sapien
tgtcaccatgaagcccgtgaattgc

SEQ ID NO: 973362 - DNA, 25 bp, Homo sapien
tgccacagctgaagtgtcaccatga

SEQ ID NO: 973363 - DNA, 25 bp, Homo sapien
catttgccgtaacttgcataattaa

SEQ ID NO: 973364 - DNA, 25 bp, Homo sapien
tatatacatttcctcattgaccttt

SEQ ID NO: 973365 - DNA, 25 bp, Homo sapien
tgaccttttctcgaagaatatcttg

SEQ ID NO: 973366 - DNA, 25 bp, Homo sapien
ggttttgccgaacaaacataatata

SEQ ID NO: 973367 - DNA, 25 bp, Homo sapien
cataatataggtgtctgccagatcc

SEQ ID NO: 973368 - DNA, 25 bp, Homo sapien
tatgggcgttcaaggaatacaaact

SEQ ID NO: 973369 - DNA, 25 bp, Homo sapien
gggtgcctccctcaactactatggg

SEQ ID NO: 973370 - DNA, 25 bp, Homo sapien
gaactagtttcctatgtacagccga

SEQ ID NO: 973371 - DNA, 25 bp, Homo sapien
tactagtaagggatagatgcctgca

SEQ ID NO: 973372 - DNA, 25 bp, Homo sapien
tatcactaggtagatctgctaccaa

SEQ ID NO: 973373 - DNA, 25 bp, Homo sapien
aatgataggtaggtagaactgatgc

SEQ ID NO: 973374 - DNA, 25 bp, Homo sapien
gatagatccatcgacctaatgatag

SEQ ID NO: 973375 - DNA, 25 bp, Homo sapien
aataagccagttagccttgcatcat

SEQ ID NO: 973376 - DNA, 25 bp, Homo sapien
gacaaactataactacacattctga

SEQ ID NO: 973377 - DNA, 25 bp, Homo sapien
taagtactctatgtattaaatgcca

SEQ ID NO: 973378 - DNA, 25 bp, Homo sapien
tcaacagctgtggattcagattagt

SEQ ID NO: 973379 - DNA, 25 bp, Homo sapien
gaatattgtattctagagagctata

SEQ ID NO: 973380 - DNA, 25 bp, Homo sapien
tcaagagtggaagtgtaatatcctg

SEQ ID NO: 973381 - DNA, 25 bp, Homo sapien
taaatgaaatacctgtgtctggcca

SEQ ID NO: 973382 - DNA, 25 bp, Homo sapien
tcctgcgttatgattatctgcttgc

SEQ ID NO: 973383 - DNA, 25 bp, Homo sapien
tcataacctagaaaagcttgccttg

SEQ ID NO: 973384 - DNA, 25 bp, Homo sapien
tatatgtttaggtagttttgactcc

SEQ ID NO: 973385 - DNA, 25 bp, Homo sapien
gaatcctaccttaatgctatgaagg

SEQ ID NO: 973386 - DNA, 25 bp, Homo sapien
tccaaactgggagtagacaattctg

SEQ ID NO: 973387 - DNA, 25 bp, Homo sapien
taggtacatttgattcaatcccaca

SEQ ID NO: 973388 - DNA, 25 bp, Homo sapien
gctaatgtgtacactacctatgagc

SEQ ID NO: 973389 - DNA, 25 bp, Homo sapien
tacggttagatcactaacatcccag

SEQ ID NO: 973390 - DNA, 25 bp, Homo sapien
tgagatctatgggtttacaatgcct

SEQ ID NO: 973391 - DNA, 25 bp, Homo sapien
ccccatttgggactatgaggatcaa

SEQ ID NO: 973392 - DNA, 25 bp, Homo sapien
tctaggtgaatatgcccctgtgggc

SEQ ID NO: 973393 - DNA, 25 bp, Homo sapien
tccactcctagacgagtgaggctct

SEQ ID NO: 973394 - DNA, 25 bp, Homo sapien
ggtgtgcatccctctctctaggtga

SEQ ID NO: 973395 - DNA, 25 bp, Homo sapien
taatctggtcctggtgtgcatccct

SEQ ID NO: 973396 - DNA, 25 bp, Homo sapien
gaacatcaacatattttgcagctgc

SEQ ID NO: 973397 - DNA, 25 bp, Homo sapien
acatcaacatattttgcagctgctt

SEQ ID NO: 973398 - DNA, 25 bp, Homo sapien
caacatattttgcagctgctttcac

SEQ ID NO: 973399 - DNA, 25 bp, Homo sapien
tggaacatcaacatattttgcagct

SEQ ID NO: 973400 - DNA, 25 bp, Homo sapien
aaaagaaagtgccttcatcatacct

SEQ ID NO: 973401 - DNA, 25 bp, Homo sapien
tcatcataccttgacagcttagaca

SEQ ID NO: 973402 - DNA, 25 bp, Homo sapien
tgacagcttagacaacacgccttcc

SEQ ID NO: 973403 - DNA, 25 bp, Homo sapien
gacaacacgccttccaacactgaaa

SEQ ID NO: 973404 - DNA, 25 bp, Homo sapien
gcttcccaaagcttacgtagcagtt

SEQ ID NO: 973405 - DNA, 25 bp, Homo sapien
cagtttgaccaccttacttctcagg

SEQ ID NO: 973406 - DNA, 25 bp, Homo sapien
catttaccaggcagttctaattggc

SEQ ID NO: 973407 - DNA, 25 bp, Homo sapien
taattggcacatataaggatcatcc

SEQ ID NO: 973408 - DNA, 25 bp, Homo sapien
tcccaaagggaaaatgctgacaagg

SEQ ID NO: 973409 - DNA, 25 bp, Homo sapien
gacacagcttattggtctctggtga

SEQ ID NO: 973410 - DNA, 25 bp, Homo sapien
gatcttaagaatgacatactgccct

SEQ ID NO: 973411 - DNA, 25 bp, Homo sapien
ggtgaccagagaactcgctgtgagt

SEQ ID NO: 973412 - DNA, 25 bp, Homo sapien
tccacccacaaaattgcgaattgct

SEQ ID NO: 973413 - DNA, 25 bp, Homo sapien
tcacatgtagaagttaatttagcac

SEQ ID NO: 973414 - DNA, 25 bp, Homo sapien
aaaattgcgaattgctcacatgtag

SEQ ID NO: 973415 - DNA, 25 bp, Homo sapien
gcctgttaggatttcttaccaatca

SEQ ID NO: 973416 - DNA, 25 bp, Homo sapien
tactctagggttatgtcagaccagg

SEQ ID NO: 973417 - DNA, 25 bp, Homo sapien
gacagcggcaattgctatggttact

SEQ ID NO: 973418 - DNA, 25 bp, Homo sapien
tctcatttgccacgaggacagcggc

SEQ ID NO: 973419 - DNA, 25 bp, Homo sapien
tgatgtagtttgcaaggacccagaa

SEQ ID NO: 973420 - DNA, 25 bp, Homo sapien
tctgttctcctgagggtgtcgggtt

SEQ ID NO: 973421 - DNA, 25 bp, Homo sapien
taaagtctgcctgggtaattactga

SEQ ID NO: 973422 - DNA, 25 bp, Homo sapien
gaaactcttggaagtgactggtaga

SEQ ID NO: 973423 - DNA, 25 bp, Homo sapien
tacagctcagggagtatataaacac

SEQ ID NO: 973424 - DNA, 25 bp, Homo sapien
tgtagttcagaagcctaacaaaggc

SEQ ID NO: 973425 - DNA, 25 bp, Homo sapien
aacatagcatctctctaaccctgct

SEQ ID NO: 973426 - DNA, 25 bp, Homo sapien
attatggtatagttctgtagttcag

SEQ ID NO: 973427 - DNA, 25 bp, Homo sapien
atggttcatggtctctatcctccat

SEQ ID NO: 973428 - DNA, 25 bp, Homo sapien
ctcctgtgtgatgtgcttgagcaga

SEQ ID NO: 973429 - DNA, 25 bp, Homo sapien
taggatgacgagattttacaatggg

SEQ ID NO: 973430 - DNA, 25 bp, Homo sapien
cttgagcagattctataaagacagg

SEQ ID NO: 973431 - DNA, 25 bp, Homo sapien
tacaatggggtgatcagtactgcca

SEQ ID NO: 973432 - DNA, 25 bp, Homo sapien
ttttacactgttgtcgatcagatca

SEQ ID NO: 973433 - DNA, 25 bp, Homo sapien
tacactgttgtcgatcagatcatct

SEQ ID NO: 973434 - DNA, 25 bp, Homo sapien
tcttttacactgttgtcgatcagat

SEQ ID NO: 973435 - DNA, 25 bp, Homo sapien
cactgttgtcgatcagatcatctat

SEQ ID NO: 973436 - DNA, 25 bp, Homo sapien
tgccactcttgtttcacgtccttct

SEQ ID NO: 973437 - DNA, 25 bp, Homo sapien
ctccagatcagtgtattcagcaaga

SEQ ID NO: 973438 - DNA, 25 bp, Homo sapien
aaattaaatgccacgtgatacacct

SEQ ID NO: 973439 - DNA, 25 bp, Homo sapien
cagatcagtgtattcagcaagagga

SEQ ID NO: 973440 - DNA, 25 bp, Homo sapien
ggttctgagggctgatgaatgccta

SEQ ID NO: 973441 - DNA, 25 bp, Homo sapien
tgaatgcctacagcccaggtagtca

SEQ ID NO: 973442 - DNA, 25 bp, Homo sapien
ggtggctttgtgatctcgacatctg

SEQ ID NO: 973443 - DNA, 25 bp, Homo sapien
tcatcctcaactaatgggaccatgg

SEQ ID NO: 973444 - DNA, 25 bp, Homo sapien
gctttttggcatcgactaatacatt

SEQ ID NO: 973445 - DNA, 25 bp, Homo sapien
acggaagctggaatgcgcaagtcag

SEQ ID NO: 973446 - DNA, 25 bp, Homo sapien
tgtagcttgagttcaaatgcagttc

SEQ ID NO: 973447 - DNA, 25 bp, Homo sapien
agtcagttgttttgcttgccttttg

SEQ ID NO: 973448 - DNA, 25 bp, Homo sapien
catttgcagtgcatcaagcttccaa

SEQ ID NO: 973449 - DNA, 25 bp, Homo sapien
tggtgggcaaattcctgttctggcc

SEQ ID NO: 973450 - DNA, 25 bp, Homo sapien
cacaggcctctagcatatcactggc

SEQ ID NO: 973451 - DNA, 25 bp, Homo sapien
aaaggtcttctgatgttgctgagcc

SEQ ID NO: 973452 - DNA, 25 bp, Homo sapien
cgtaatattcagtgcctcaaatgca

SEQ ID NO: 973453 - DNA, 25 bp, Homo sapien
gcactgaacactcccgtagcacttt

SEQ ID NO: 973454 - DNA, 25 bp, Homo sapien
tacagcttggtagattagaggaact

SEQ ID NO: 973455 - DNA, 25 bp, Homo sapien
tctctagggaccaatcatagcaaag

SEQ ID NO: 973456 - DNA, 25 bp, Homo sapien
ggaagattaagaggcagacttggaa

SEQ ID NO: 973457 - DNA, 25 bp, Homo sapien
tggaacttttggaagagctacattg

SEQ ID NO: 973458 - DNA, 25 bp, Homo sapien
taaagaaggcatccacgaagcagta

SEQ ID NO: 973459 - DNA, 25 bp, Homo sapien
gctacattgggaagactgttggcga

SEQ ID NO: 973460 - DNA, 25 bp, Homo sapien
aattgactgggcgatggaagactcc

SEQ ID NO: 973461 - DNA, 25 bp, Homo sapien
cacatagcggacaaccaagggtaca

SEQ ID NO: 973462 - DNA, 25 bp, Homo sapien
tccatgagatccacatagcggacaa

SEQ ID NO: 973463 - DNA, 25 bp, Homo sapien
caagggtacaaagatttcttgcaag

SEQ ID NO: 973464 - DNA, 25 bp, Homo sapien
gcctctagtgcagtgtccatatcca

SEQ ID NO: 973465 - DNA, 25 bp, Homo sapien
tcccaggagtcttgcggttgagcct

SEQ ID NO: 973466 - DNA, 25 bp, Homo sapien
tattaagcagttggaaaagaggaaa

SEQ ID NO: 973467 - DNA, 25 bp, Homo sapien
tcagccaataaatcaggccaccagg

SEQ ID NO: 973468 - DNA, 25 bp, Homo sapien
gctttatactacagtgaaaacaggt

SEQ ID NO: 973469 - DNA, 25 bp, Homo sapien
tactacagtgaaaacaggtcatcac

SEQ ID NO: 973470 - DNA, 25 bp, Homo sapien
tatactacagtgaaaacaggtcatc

SEQ ID NO: 973471 - DNA, 25 bp, Homo sapien
tatagctttatactacagtgaaaac

SEQ ID NO: 973472 - DNA, 25 bp, Homo sapien
taagacttctatgcagagctctgcc

SEQ ID NO: 973473 - DNA, 25 bp, Homo sapien
ttcattctgctgtaagacttctatg

SEQ ID NO: 973474 - DNA, 25 bp, Homo sapien
gctctgccagatgaagaatctcttc

SEQ ID NO: 973475 - DNA, 25 bp, Homo sapien
gctgtaagacttctatgcagagctc

SEQ ID NO: 973476 - DNA, 25 bp, Homo sapien
aaggttctttctgcagtaagctgaa

SEQ ID NO: 973477 - DNA, 25 bp, Homo sapien
atctctctggagaacaagtttctat

SEQ ID NO: 973478 - DNA, 25 bp, Homo sapien
aatgaactaaaatgggggcacgcta

SEQ ID NO: 973479 - DNA, 25 bp, Homo sapien
taactcagatactagacaaacttgg

SEQ ID NO: 973480 - DNA, 25 bp, Homo sapien
taaataagcccatctttcaaataac

SEQ ID NO: 973481 - DNA, 25 bp, Homo sapien
gcaaaagatctcatgtccaggcaag

SEQ ID NO: 973482 - DNA, 25 bp, Homo sapien
taagcctaggtaccaagtctatgca

SEQ ID NO: 973483 - DNA, 25 bp, Homo sapien
tcaaagacagtaggcagtctgggcc

SEQ ID NO: 973484 - DNA, 25 bp, Homo sapien
tccaggcaagtcctaaggcgcagtc

SEQ ID NO: 973485 - DNA, 25 bp, Homo sapien
gttaatgtaactgccatctataacc

SEQ ID NO: 973486 - DNA, 25 bp, Homo sapien
atgtaactgccatctataacctctg

SEQ ID NO: 973487 - DNA, 25 bp, Homo sapien
tgatccagcattagtgcttccccca

SEQ ID NO: 973488 - DNA, 25 bp, Homo sapien
gccatctataacctctggcttctct

SEQ ID NO: 973489 - DNA, 25 bp, Homo sapien
tcagccctcaataatcaacaagttt

SEQ ID NO: 973490 - DNA, 25 bp, Homo sapien
aaaaaagcacagttctctcaagaga

SEQ ID NO: 973491 - DNA, 25 bp, Homo sapien
tgcatcagtacattgcaagcaatta

SEQ ID NO: 973492 - DNA, 25 bp, Homo sapien
tcttttttgagtgatactgcagaac

SEQ ID NO: 973493 - DNA, 25 bp, Homo sapien
ctcttctgctggtatgggagtggca

SEQ ID NO: 973494 - DNA, 25 bp, Homo sapien
gctttctcgagacattttctgacca

SEQ ID NO: 973495 - DNA, 25 bp, Homo sapien
tttggcatattctgtgagtctagtg

SEQ ID NO: 973496 - DNA, 25 bp, Homo sapien
aattgatcaaggcagctttctcgag

SEQ ID NO: 973497 - DNA, 25 bp, Homo sapien
ggcaaatgcaaaaagggagatgcca

SEQ ID NO: 973498 - DNA, 25 bp, Homo sapien
agtacaggtaaagggctggcaaatg

SEQ ID NO: 973499 - DNA, 25 bp, Homo sapien
gatgccaacctcgatttcctgctgc

SEQ ID NO: 973500 - DNA, 25 bp, Homo sapien
ggagatgccaacctcgatttcctgc

SEQ ID NO: 973501 - DNA, 25 bp, Homo sapien
agtgtagcttttagagcaccttcag

SEQ ID NO: 973502 - DNA, 25 bp, Homo sapien
aagtgtagcttttagagcaccttca

SEQ ID NO: 973503 - DNA, 25 bp, Homo sapien
aaagtgtagcttttagagcaccttc

SEQ ID NO: 973504 - DNA, 25 bp, Homo sapien
ttgtttcaggaactgcacatattta

SEQ ID NO: 973505 - DNA, 25 bp, Homo sapien
taatcaagttaactcatggcctgca

SEQ ID NO: 973506 - DNA, 25 bp, Homo sapien
tacggaagagaagtatgtagccttc

SEQ ID NO: 973507 - DNA, 25 bp, Homo sapien
cagaaatcctttatgtcagttccag

SEQ ID NO: 973508 - DNA, 25 bp, Homo sapien
tttttgagcaaggaatggtgctagg

SEQ ID NO: 973509 - DNA, 25 bp, Homo sapien
catgtgggttacaagtgacaagaca

SEQ ID NO: 973510 - DNA, 25 bp, Homo sapien
gacaataaatgctcaaagacttcag

SEQ ID NO: 973511 - DNA, 25 bp, Homo sapien
tgacaagacaatactacagacaata

SEQ ID NO: 973512 - DNA, 25 bp, Homo sapien
ctggtaatacagagagcaggaggaa

SEQ ID NO: 973513 - DNA, 25 bp, Homo sapien
tacagagagcaggaggaacagtcac

SEQ ID NO: 973514 - DNA, 25 bp, Homo sapien
agagagcaggaggaacagtcaccag

SEQ ID NO: 973515 - DNA, 25 bp, Homo sapien
tggtaatacagagagcaggaggaac

SEQ ID NO: 973516 - DNA, 25 bp, Homo sapien
gggaagagagtctctcttttatctc

SEQ ID NO: 973517 - DNA, 25 bp, Homo sapien
gaagagagtctctcttttatctcct

SEQ ID NO: 973518 - DNA, 25 bp, Homo sapien
aagggaagagagtctctcttttatc

SEQ ID NO: 973519 - DNA, 25 bp, Homo sapien
ggaagagagtctctcttttatctcc

SEQ ID NO: 973520 - DNA, 25 bp, Homo sapien
ctgaaacagtcccaattccatcagg

SEQ ID NO: 973521 - DNA, 25 bp, Homo sapien
cgttggtcataaccccacagatcaa

SEQ ID NO: 973522 - DNA, 25 bp, Homo sapien
gaaaggctaacgatgtgaacatgca

SEQ ID NO: 973523 - DNA, 25 bp, Homo sapien
ggtaaatcaccactcacgttggtca

SEQ ID NO: 973524 - DNA, 25 bp, Homo sapien
gaccaacctgtgtgacataatgaga

SEQ ID NO: 973525 - DNA, 25 bp, Homo sapien
ttgaggaccactggtttaaaagatg

SEQ ID NO: 973526 - DNA, 25 bp, Homo sapien
gtttaaaagatgagatactggtaaa

SEQ ID NO: 973527 - DNA, 25 bp, Homo sapien
tatgaaaccggtcgctggtgccaaa

SEQ ID NO: 973528 - DNA, 25 bp, Homo sapien
tctatgaaaccggtcgctggtgcca

SEQ ID NO: 973529 - DNA, 25 bp, Homo sapien
taagaagatccaacttaagacccaa

SEQ ID NO: 973530 - DNA, 25 bp, Homo sapien
acctaactattgacgagaagaaggc

SEQ ID NO: 973531 - DNA, 25 bp, Homo sapien
taaaaatgataagaagatccaactt

SEQ ID NO: 973532 - DNA, 25 bp, Homo sapien
aactttgtcctatacctaactattg

SEQ ID NO: 973533 - DNA, 25 bp, Homo sapien
gggttctaggctcctgcttttcgct

SEQ ID NO: 973534 - DNA, 25 bp, Homo sapien
ggttctaggctcctgcttttcgctg

SEQ ID NO: 973535 - DNA, 25 bp, Homo sapien
ctggatgacggggttctaggctcct

SEQ ID NO: 973536 - DNA, 25 bp, Homo sapien
tctaggctcctgcttttcgctgtct

SEQ ID NO: 973537 - DNA, 25 bp, Homo sapien
aattgaagtcttctaagatgagttt

SEQ ID NO: 973538 - DNA, 25 bp, Homo sapien
taattgaagtcttctaagatgagtt

SEQ ID NO: 973539 - DNA, 25 bp, Homo sapien
ttaattgaagtcttctaagatgagt

SEQ ID NO: 973540 - DNA, 25 bp, Homo sapien
tactgggtgataatcgcaaagcaca

SEQ ID NO: 973541 - DNA, 25 bp, Homo sapien
ttactgggtgataatcgcaaagcac

SEQ ID NO: 973542 - DNA, 25 bp, Homo sapien
ctgggtgataatcgcaaagcacatt

SEQ ID NO: 973543 - DNA, 25 bp, Homo sapien
ggtgataatcgcaaagcacattttt

SEQ ID NO: 973544 - DNA, 25 bp, Homo sapien
tcactttgtatttgcaagtaaaaat

SEQ ID NO: 973545 - DNA, 25 bp, Homo sapien
atttcactttgtatttgcaagtaaa

SEQ ID NO: 973546 - DNA, 25 bp, Homo sapien
ttcactttgtatttgcaagtaaaaa

SEQ ID NO: 973547 - DNA, 25 bp, Homo sapien
cactttgtatttgcaagtaaaaata

SEQ ID NO: 973548 - DNA, 25 bp, Homo sapien
tctaacacaaagacttggccagggc

SEQ ID NO: 973549 - DNA, 25 bp, Homo sapien
tctcacaccataacgggcacagtac

SEQ ID NO: 973550 - DNA, 25 bp, Homo sapien
catcagttctgcaaggtagcagaga

SEQ ID NO: 973551 - DNA, 25 bp, Homo sapien
cagggtagggtcaatgacagcacca

SEQ ID NO: 973552 - DNA, 25 bp, Homo sapien
ttcctgaacgcacttttaggcctta

SEQ ID NO: 973553 - DNA, 25 bp, Homo sapien
tctatactacgatttgctttcctga

SEQ ID NO: 973554 - DNA, 25 bp, Homo sapien
tacgatttgctttcctgaacgcact

SEQ ID NO: 973555 - DNA, 25 bp, Homo sapien
tctttctatactacgatttgctttc

SEQ ID NO: 973556 - DNA, 25 bp, Homo sapien
cagagtctccgagcctactctggct

SEQ ID NO: 973557 - DNA, 25 bp, Homo sapien
gattaaggatgctcaccttgtacat

SEQ ID NO: 973558 - DNA, 25 bp, Homo sapien
acgtggctgcgccagagtctccgag

SEQ ID NO: 973559 - DNA, 25 bp, Homo sapien
gcgccagagtctccgagcctactct

SEQ ID NO: 973560 - DNA, 25 bp, Homo sapien
aaaaggaaggcatgatcaagcttgc

SEQ ID NO: 973561 - DNA, 25 bp, Homo sapien
gcctctggagtattctaaaaaggaa

SEQ ID NO: 973562 - DNA, 25 bp, Homo sapien
tgatccaaagtctgcctctggagta

SEQ ID NO: 973563 - DNA, 25 bp, Homo sapien
aggaaggcatgatcaagcttgcagg

SEQ ID NO: 973564 - DNA, 25 bp, Homo sapien
ggaatacaagtcagttgttgttaac

SEQ ID NO: 973565 - DNA, 25 bp, Homo sapien
tagcctgatcaattctgccttgaca

SEQ ID NO: 973566 - DNA, 25 bp, Homo sapien
tagttataacaagtaaattcagttc

SEQ ID NO: 973567 - DNA, 25 bp, Homo sapien
tttaaaactttactagcagcctgga

SEQ ID NO: 973568 - DNA, 25 bp, Homo sapien
aagcagttctcctacttcaagcctc

SEQ ID NO: 973569 - DNA, 25 bp, Homo sapien
tcaagcagttctcctacttcaagcc

SEQ ID NO: 973570 - DNA, 25 bp, Homo sapien
ccaagtgctgggactacagccacgt

SEQ ID NO: 973571 - DNA, 25 bp, Homo sapien
ctacagccacgtaccaccatgctca

SEQ ID NO: 973572 - DNA, 25 bp, Homo sapien
gaggacacagactacatggacttca

SEQ ID NO: 973573 - DNA, 25 bp, Homo sapien
tgacagaagtcatgcctaagcccat

SEQ ID NO: 973574 - DNA, 25 bp, Homo sapien
tggagttgatccaaggaggacacag

SEQ ID NO: 973575 - DNA, 25 bp, Homo sapien
tccatggtgacgagcagtgcatacc

SEQ ID NO: 973576 - DNA, 25 bp, Homo sapien
taggatgcccagaaatgatactgaa

SEQ ID NO: 973577 - DNA, 25 bp, Homo sapien
gatgcccagaaatgatactgaaggg

SEQ ID NO: 973578 - DNA, 25 bp, Homo sapien
gcccagaaatgatactgaagggtat

SEQ ID NO: 973579 - DNA, 25 bp, Homo sapien
ttaggatgcccagaaatgatactga

SEQ ID NO: 973580 - DNA, 25 bp, Homo sapien
tcaagaataaaaagccacaagttga

SEQ ID NO: 973581 - DNA, 25 bp, Homo sapien
caagaataaaaagccacaagttgag

SEQ ID NO: 973582 - DNA, 25 bp, Homo sapien
ttgaacccataatattctgtcctgt

SEQ ID NO: 973583 - DNA, 25 bp, Homo sapien
ggccctatacatggcttgaacccat

SEQ ID NO: 973584 - DNA, 25 bp, Homo sapien
caggaactggtttatatgattgacc

SEQ ID NO: 973585 - DNA, 25 bp, Homo sapien
ttctgggtttgaattgcaggaactg

SEQ ID NO: 973586 - DNA, 25 bp, Homo sapien
tctctataactgcacatagcaaagg

SEQ ID NO: 973587 - DNA, 25 bp, Homo sapien
tatagccttcaagctgcattaattc

SEQ ID NO: 973588 - DNA, 25 bp, Homo sapien
gggatcggtataatccacagtatag

SEQ ID NO: 973589 - DNA, 25 bp, Homo sapien
tgcacatagcaaaggtatattggct

SEQ ID NO: 973590 - DNA, 25 bp, Homo sapien
tctctgtctgttacctgggcttggt

SEQ ID NO: 973591 - DNA, 25 bp, Homo sapien
gcagcctccacctttggtgatccag

SEQ ID NO: 973592 - DNA, 25 bp, Homo sapien
cagcctccacctttggtgatccagt

SEQ ID NO: 973593 - DNA, 25 bp, Homo sapien
tctgtctgttacctgggcttggtta

SEQ ID NO: 973594 - DNA, 25 bp, Homo sapien
tgacttggggattgaactctcttca

SEQ ID NO: 973595 - DNA, 25 bp, Homo sapien
gattgaactctcttcaaaccacatg

SEQ ID NO: 973596 - DNA, 25 bp, Homo sapien
tggggattgaactctcttcaaacca

SEQ ID NO: 973597 - DNA, 25 bp, Homo sapien
gattgacttggggattgaactctct

SEQ ID NO: 973598 - DNA, 25 bp, Homo sapien
ttctaagtgcaaagggagtccctgg

SEQ ID NO: 973599 - DNA, 25 bp, Homo sapien
ctattcaaagaggaagcttgaggcc

SEQ ID NO: 973600 - DNA, 25 bp, Homo sapien
gaagtcaagacgtggctcagtgaca

SEQ ID NO: 973601 - DNA, 25 bp, Homo sapien
gcttgaggccagaatatttaggacc

SEQ ID NO: 973602 - DNA, 25 bp, Homo sapien
ggagttaccaggctatcatgggaca

SEQ ID NO: 973603 - DNA, 25 bp, Homo sapien
tgaaaaatagatgacccacaacccc

SEQ ID NO: 973604 - DNA, 25 bp, Homo sapien
ggatggctgtacgtactcactggaa

SEQ ID NO: 973605 - DNA, 25 bp, Homo sapien
tgcaccaatgtcagaaacgaaatgt

SEQ ID NO: 973606 - DNA, 25 bp, Homo sapien
aaccttctgtccaagggcatacaga

SEQ ID NO: 973607 - DNA, 25 bp, Homo sapien
ttccatcttttccaaaccttctgtc

SEQ ID NO: 973608 - DNA, 25 bp, Homo sapien
caaaccttctgtccaagggcataca

SEQ ID NO: 973609 - DNA, 25 bp, Homo sapien
tccaaaccttctgtccaagggcata

SEQ ID NO: 973610 - DNA, 25 bp, Homo sapien
cagatttctaactctcactaatatg

SEQ ID NO: 973611 - DNA, 25 bp, Homo sapien
cactgaaaaaagtatacccatccct

SEQ ID NO: 973612 - DNA, 25 bp, Homo sapien
aagaggcataaaaacacatttggag

SEQ ID NO: 973613 - DNA, 25 bp, Homo sapien
gactcatacattcataggcatacaa

SEQ ID NO: 973614 - DNA, 25 bp, Homo sapien
tggaatcatttcacagactcataca

SEQ ID NO: 973615 - DNA, 25 bp, Homo sapien
gttgcatgatagaaatcaggtgttc

SEQ ID NO: 973616 - DNA, 25 bp, Homo sapien
caggtgttcaattacaaataatggg

SEQ ID NO: 973617 - DNA, 25 bp, Homo sapien
cataaaagacagatccagtgcagat

SEQ ID NO: 973618 - DNA, 25 bp, Homo sapien
tatgagagaacgtccaagatttcca

SEQ ID NO: 973619 - DNA, 25 bp, Homo sapien
cctgcaataatatcacattaaagtt

SEQ ID NO: 973620 - DNA, 25 bp, Homo sapien
ctgaattcctgactagccagttcct

SEQ ID NO: 973621 - DNA, 25 bp, Homo sapien
cctgactagccagttcctataggcc

SEQ ID NO: 973622 - DNA, 25 bp, Homo sapien
acttatcactatcataattatttgc

SEQ ID NO: 973623 - DNA, 25 bp, Homo sapien
tcaagttccaatatcgtggtagctc

SEQ ID NO: 973624 - DNA, 25 bp, Homo sapien
gccctggtgccctgtatcaatatga

SEQ ID NO: 973625 - DNA, 25 bp, Homo sapien
ttagaaggtatcagtgccctggtgc

SEQ ID NO: 973626 - DNA, 25 bp, Homo sapien
gatgagtaatactaacacaatcaag

SEQ ID NO: 973627 - DNA, 25 bp, Homo sapien
tgcttcatatgtgctggtttatcca

SEQ ID NO: 973628 - DNA, 25 bp, Homo sapien
ggtttatccattcgcactgccagtt

SEQ ID NO: 973629 - DNA, 25 bp, Homo sapien
tggctattttttggaactaccattc

SEQ ID NO: 973630 - DNA, 25 bp, Homo sapien
tttttaagtcagaatcctggctatt

SEQ ID NO: 973631 - DNA, 25 bp, Homo sapien
ctattagaagttgggtataatatca

SEQ ID NO: 973632 - DNA, 25 bp, Homo sapien
tattagaagttgggtataatatcac

SEQ ID NO: 973633 - DNA, 25 bp, Homo sapien
tcctgtccctgttccgttactgtat

SEQ ID NO: 973634 - DNA, 25 bp, Homo sapien
cctgttccgttactgtatattggat

SEQ ID NO: 973635 - DNA, 25 bp, Homo sapien
gtccctgttccgttactgtatattg

SEQ ID NO: 973636 - DNA, 25 bp, Homo sapien
ctcctgtccctgttccgttactgta

SEQ ID NO: 973637 - DNA, 25 bp, Homo sapien
ggactcagttcatgtttagagattg

SEQ ID NO: 973638 - DNA, 25 bp, Homo sapien
ctttaaatgtcttgtcagcatggca

SEQ ID NO: 973639 - DNA, 25 bp, Homo sapien
tataaaagcttactaaggatccttc

SEQ ID NO: 973640 - DNA, 25 bp, Homo sapien
gtttctcttaacctttccgtatgca

SEQ ID NO: 973641 - DNA, 25 bp, Homo sapien
aaggtaatttatagattcaatgcca

SEQ ID NO: 973642 - DNA, 25 bp, Homo sapien
tccccatcaagctaccaatgacttt

SEQ ID NO: 973643 - DNA, 25 bp, Homo sapien
taccgtgaaaatggccataatgccc

SEQ ID NO: 973644 - DNA, 25 bp, Homo sapien
atcaataccgtgaaaatggccataa

SEQ ID NO: 973645 - DNA, 25 bp, Homo sapien
tggtgaaatctccttgagtccccca

SEQ ID NO: 973646 - DNA, 25 bp, Homo sapien
gaagagtttcactttgaccacaggc

SEQ ID NO: 973647 - DNA, 25 bp, Homo sapien
cacaggccgaggatgggtggtggtg

SEQ ID NO: 973648 - DNA, 25 bp, Homo sapien
ttccagggccagaactccagtgctt

SEQ ID NO: 973649 - DNA, 25 bp, Homo sapien
taataatatactgcatgcaatacag

SEQ ID NO: 973650 - DNA, 25 bp, Homo sapien
tctaaattgaattacacagagttta

SEQ ID NO: 973651 - DNA, 25 bp, Homo sapien
taggccatgaggataacattcatcc

SEQ ID NO: 973652 - DNA, 25 bp, Homo sapien
cagtgaggacaatgaatagaatggc

SEQ ID NO: 973653 - DNA, 25 bp, Homo sapien
tctggtcaagcagtgaaacctggta

SEQ ID NO: 973654 - DNA, 25 bp, Homo sapien
tagcactgcggtccactgtacagaa

SEQ ID NO: 973655 - DNA, 25 bp, Homo sapien
tacccacatgttactcagggaaggg

SEQ ID NO: 973656 - DNA, 25 bp, Homo sapien
ggtaatcttcacaggccagacagtc

SEQ ID NO: 973657 - DNA, 25 bp, Homo sapien
taatcttcaaatgcttttaataaaa

SEQ ID NO: 973658 - DNA, 25 bp, Homo sapien
tcttcaaatgcttttaataaaacag

SEQ ID NO: 973659 - DNA, 25 bp, Homo sapien
ttcaaatgcttttaataaaacagca

SEQ ID NO: 973660 - DNA, 25 bp, Homo sapien
ttaatcttcaaatgcttttaataaa

SEQ ID NO: 973661 - DNA, 25 bp, Homo sapien
gaggcttcggcctggtctgtctgaa

SEQ ID NO: 973662 - DNA, 25 bp, Homo sapien
aacaattcgattgggagcaactgac

SEQ ID NO: 973663 - DNA, 25 bp, Homo sapien
cttccattgtacagtaaacaattcg

SEQ ID NO: 973664 - DNA, 25 bp, Homo sapien
gattgggagcaactgacttcaggcc

SEQ ID NO: 973665 - DNA, 25 bp, Homo sapien
cgtcacttaacacgattttactttg

SEQ ID NO: 973666 - DNA, 25 bp, Homo sapien
gtgtcctataaacatgcactgcacc

SEQ ID NO: 973667 - DNA, 25 bp, Homo sapien
cacaggtcctgtgactagaggcata

SEQ ID NO: 973668 - DNA, 25 bp, Homo sapien
tactttgttgctggacacataactc

SEQ ID NO: 973669 - DNA, 25 bp, Homo sapien
taccacgtcggactttgacagctga

SEQ ID NO: 973670 - DNA, 25 bp, Homo sapien
taaggtgaatgacagtaccacgtcg

SEQ ID NO: 973671 - DNA, 25 bp, Homo sapien
tcctatgtccaaaaatgcagagttc

SEQ ID NO: 973672 - DNA, 25 bp, Homo sapien
caaattcactgaagaccgcaactct

SEQ ID NO: 973673 - DNA, 25 bp, Homo sapien
atcttttgctataaatttggggaat

SEQ ID NO: 973674 - DNA, 25 bp, Homo sapien
atccatcaaatattggaagtttttg

SEQ ID NO: 973675 - DNA, 25 bp, Homo sapien
tatccatcaaatattggaagttttt

SEQ ID NO: 973676 - DNA, 25 bp, Homo sapien
ctatccatcaaatattggaagtttt

SEQ ID NO: 973677 - DNA, 25 bp, Homo sapien
tcttctagatctggcagtttgagaa

SEQ ID NO: 973678 - DNA, 25 bp, Homo sapien
ctagatctggcagtttgagaaactc

SEQ ID NO: 973679 - DNA, 25 bp, Homo sapien
tctggcagtttgagaaactcatgca

SEQ ID NO: 973680 - DNA, 25 bp, Homo sapien
aaactcttctagatctggcagtttg

SEQ ID NO: 973681 - DNA, 25 bp, Homo sapien
ctgccaattgcagccggccatcaag

SEQ ID NO: 973682 - DNA, 25 bp, Homo sapien
tttatctgccaattgcagccggcca

SEQ ID NO: 973683 - DNA, 25 bp, Homo sapien
agccggccatcaagttcccttctga

SEQ ID NO: 973684 - DNA, 25 bp, Homo sapien
tatctgccaattgcagccggccatc

SEQ ID NO: 973685 - DNA, 25 bp, Homo sapien
gctcttgggctgttttacggaattc

SEQ ID NO: 973686 - DNA, 25 bp, Homo sapien
tacggaattccttgaataccttgga

SEQ ID NO: 973687 - DNA, 25 bp, Homo sapien
tgatgagctttgttgctacccagat

SEQ ID NO: 973688 - DNA, 25 bp, Homo sapien
caatctggttaagaactactgctga

SEQ ID NO: 973689 - DNA, 25 bp, Homo sapien
gagtcacccaattcaccatcgaagt

SEQ ID NO: 973690 - DNA, 25 bp, Homo sapien
gctctgcccaagttaggagcagggt

SEQ ID NO: 973691 - DNA, 25 bp, Homo sapien
ggtgaagttgaatcctgcccagtta

SEQ ID NO: 973692 - DNA, 25 bp, Homo sapien
cagtattctgagagggagggcgtcc

SEQ ID NO: 973693 - DNA, 25 bp, Homo sapien
gccatggcacctcaaccaggctgtt

SEQ ID NO: 973694 - DNA, 25 bp, Homo sapien
cacggacttgagtgttgcctctgca

SEQ ID NO: 973695 - DNA, 25 bp, Homo sapien
tgcaaaaactctgggtagctctctg

SEQ ID NO: 973696 - DNA, 25 bp, Homo sapien
gatgatccacttagagagtccatgt

SEQ ID NO: 973697 - DNA, 25 bp, Homo sapien
ggaaaagcatacttccaagcaacat

SEQ ID NO: 973698 - DNA, 25 bp, Homo sapien
gaaactggaaaagcatacttccaag

SEQ ID NO: 973699 - DNA, 25 bp, Homo sapien
tttgtgaaactggaaaagcatactt

SEQ ID NO: 973700 - DNA, 25 bp, Homo sapien
ggccactggtgtcattttgtgaaac

SEQ ID NO: 973701 - DNA, 25 bp, Homo sapien
ttctagcctcttggataattgcatt

SEQ ID NO: 973702 - DNA, 25 bp, Homo sapien
gcctcttggataattgcattatcta

SEQ ID NO: 973703 - DNA, 25 bp, Homo sapien
tcttggataattgcattatctacac

SEQ ID NO: 973704 - DNA, 25 bp, Homo sapien
tagcctcttggataattgcattatc

SEQ ID NO: 973705 - DNA, 25 bp, Homo sapien
tgaaaggttcttggactccaatatc

SEQ ID NO: 973706 - DNA, 25 bp, Homo sapien
aggttcttggactccaatatcccct

SEQ ID NO: 973707 - DNA, 25 bp, Homo sapien
ggttcttggactccaatatcccctc

SEQ ID NO: 973708 - DNA, 25 bp, Homo sapien
gaaaggttcttggactccaatatcc

SEQ ID NO: 973709 - DNA, 25 bp, Homo sapien
tcctgaagctctggaacaaaggata

SEQ ID NO: 973710 - DNA, 25 bp, Homo sapien
ctgaagctctggaacaaaggatatt

SEQ ID NO: 973711 - DNA, 25 bp, Homo sapien
gaagctctggaacaaaggatattac

SEQ ID NO: 973712 - DNA, 25 bp, Homo sapien
ctaatcctgaagctctggaacaaag

SEQ ID NO: 973713 - DNA, 25 bp, Homo sapien
cttgagttgccagagattgcctggc

SEQ ID NO: 973714 - DNA, 25 bp, Homo sapien
cagaacagccctcgatcctgagctt

SEQ ID NO: 973715 - DNA, 25 bp, Homo sapien
gactcttaagcaagcaacatctttg

SEQ ID NO: 973716 - DNA, 25 bp, Homo sapien
gatggccatcgatgtcatgtggcag

SEQ ID NO: 973717 - DNA, 25 bp, Homo sapien
tcctctttttatttcgttgagcagt

SEQ ID NO: 973718 - DNA, 25 bp, Homo sapien
tgtcctctttttatttcgttgagca

SEQ ID NO: 973719 - DNA, 25 bp, Homo sapien
ttgtgtcctctttttatttcgttga

SEQ ID NO: 973720 - DNA, 25 bp, Homo sapien
caattgtgaataggagttcatttgt

SEQ ID NO: 973721 - DNA, 25 bp, Homo sapien
ggccctttgtggtgtggacgagtgg

SEQ ID NO: 973722 - DNA, 25 bp, Homo sapien
cctttgtggtgtggacgagtgggga

SEQ ID NO: 973723 - DNA, 25 bp, Homo sapien
ctttgtggtgtggacgagtggggag

SEQ ID NO: 973724 - DNA, 25 bp, Homo sapien
gccctttgtggtgtggacgagtggg

SEQ ID NO: 973725 - DNA, 25 bp, Homo sapien
tctatttggctgtttgcacaagtcc

SEQ ID NO: 973726 - DNA, 25 bp, Homo sapien
ggccactcggtcactctttagaaaa

SEQ ID NO: 973727 - DNA, 25 bp, Homo sapien
gacactgcacttagggccattctat

SEQ ID NO: 973728 - DNA, 25 bp, Homo sapien
tgcattataaaggagctggtgttcc

SEQ ID NO: 973729 - DNA, 25 bp, Homo sapien
cacatgtgttcagagtgaaaggaca

SEQ ID NO: 973730 - DNA, 25 bp, Homo sapien
tccttatgaatgtgattcgtgctct

SEQ ID NO: 973731 - DNA, 25 bp, Homo sapien
aatcctttagagtgatgtccttatg

SEQ ID NO: 973732 - DNA, 25 bp, Homo sapien
tgattcgtgctcttatacacagact

SEQ ID NO: 973733 - DNA, 25 bp, Homo sapien
atggtgcccagccatgagcccagga

SEQ ID NO: 973734 - DNA, 25 bp, Homo sapien
tctcgctactgcacagcagtgaaac

SEQ ID NO: 973735 - DNA, 25 bp, Homo sapien
gctactgcacagcagtgaaaccctg

SEQ ID NO: 973736 - DNA, 25 bp, Homo sapien
gagctatgatctcgctactgcacag

SEQ ID NO: 973737 - DNA, 25 bp, Homo sapien
ctgggagaatagagacagaatactg

SEQ ID NO: 973738 - DNA, 25 bp, Homo sapien
tgggagaatagagacagaatactgg

SEQ ID NO: 973739 - DNA, 25 bp, Homo sapien
ggagaatagagacagaatactgggc

SEQ ID NO: 973740 - DNA, 25 bp, Homo sapien
gagaatagagacagaatactgggcc

SEQ ID NO: 973741 - DNA, 25 bp, Homo sapien
ctttgtcttgctgacttcaataatg

SEQ ID NO: 973742 - DNA, 25 bp, Homo sapien
tgtcttgctgacttcaataatgaag

SEQ ID NO: 973743 - DNA, 25 bp, Homo sapien
cgcagtgttacagctctacaaggca

SEQ ID NO: 973744 - DNA, 25 bp, Homo sapien
gcagtgttacagctctacaaggcat

SEQ ID NO: 973745 - DNA, 25 bp, Homo sapien
cctattaagggaatgtagcaacacc

SEQ ID NO: 973746 - DNA, 25 bp, Homo sapien
tagcactcccaatgcctttagctgg

SEQ ID NO: 973747 - DNA, 25 bp, Homo sapien
caagaatgaggataccaataatgcc

SEQ ID NO: 973748 - DNA, 25 bp, Homo sapien
gcctgctaagcattcttgggtgaca

SEQ ID NO: 973749 - DNA, 25 bp, Homo sapien
taggccttggatacacaggttatat

SEQ ID NO: 973750 - DNA, 25 bp, Homo sapien
tatacataagttttgggtacatagg

SEQ ID NO: 973751 - DNA, 25 bp, Homo sapien
tacataagctttggtacataggctc

SEQ ID NO: 973752 - DNA, 25 bp, Homo sapien
ggtttgatatataggcttggcacac

SEQ ID NO: 973753 - DNA, 25 bp, Homo sapien
tcagtattaggacctgatttcacat

SEQ ID NO: 973754 - DNA, 25 bp, Homo sapien
caggtttaatacacttcctcaaaag

SEQ ID NO: 973755 - DNA, 25 bp, Homo sapien
gatttcacatacaggtttaatacac

SEQ ID NO: 973756 - DNA, 25 bp, Homo sapien
tattaggacctgatttcacatacag

SEQ ID NO: 973757 - DNA, 25 bp, Homo sapien
ctgagaagtagggttctcctccaca

SEQ ID NO: 973758 - DNA, 25 bp, Homo sapien
tgagaagtagggttctcctccacat

SEQ ID NO: 973759 - DNA, 25 bp, Homo sapien
catcttccactactgaatgaggctg

SEQ ID NO: 973760 - DNA, 25 bp, Homo sapien
gagaagtagggttctcctccacatg

SEQ ID NO: 973761 - DNA, 25 bp, Homo sapien
tagcgttcaaagcaaattacgcagc

SEQ ID NO: 973762 - DNA, 25 bp, Homo sapien
gaagatctgttgttaatcgctgcca

SEQ ID NO: 973763 - DNA, 25 bp, Homo sapien
cactaggtgataaggtttcaggcag

SEQ ID NO: 973764 - DNA, 25 bp, Homo sapien
gagaccaaatagtgattcatccaga

SEQ ID NO: 973765 - DNA, 25 bp, Homo sapien
caggtctctgagtactttgatcggc

SEQ ID NO: 973766 - DNA, 25 bp, Homo sapien
tcaataagtgcaagccaggtctctg

SEQ ID NO: 973767 - DNA, 25 bp, Homo sapien
tatagatgatcactccactggctcc

SEQ ID NO: 973768 - DNA, 25 bp, Homo sapien
tctgtgtgaaggtacaacctccccg

SEQ ID NO: 973769 - DNA, 25 bp, Homo sapien
gctctgcaacagttctgactaacaa

SEQ ID NO: 973770 - DNA, 25 bp, Homo sapien
gcaacagttctgactaacaagccaa

SEQ ID NO: 973771 - DNA, 25 bp, Homo sapien
cagttctgactaacaagccaaagaa

SEQ ID NO: 973772 - DNA, 25 bp, Homo sapien
acaacacttgctctgcaacagttct

SEQ ID NO: 973773 - DNA, 25 bp, Homo sapien
aagtgccaaccttgagtagatgcat

SEQ ID NO: 973774 - DNA, 25 bp, Homo sapien
ccaagtgccaaccttgagtagatgc

SEQ ID NO: 973775 - DNA, 25 bp, Homo sapien
caagtgccaaccttgagtagatgca

SEQ ID NO: 973776 - DNA, 25 bp, Homo sapien
cagttgcacatctgttgacaattaa

SEQ ID NO: 973777 - DNA, 25 bp, Homo sapien
tctcttctccgagtgacttaagaac

SEQ ID NO: 973778 - DNA, 25 bp, Homo sapien
taagaaccaacctaacagttgcaca

SEQ ID NO: 973779 - DNA, 25 bp, Homo sapien
agatgtcttactagagagaggtgaa

SEQ ID NO: 973780 - DNA, 25 bp, Homo sapien
tacatcttcagaaaattctccagat

SEQ ID NO: 973781 - DNA, 25 bp, Homo sapien
tatttggaaagatctggttacatct

SEQ ID NO: 973782 - DNA, 25 bp, Homo sapien
aatttcacccttgttcatacttggg

SEQ ID NO: 973783 - DNA, 25 bp, Homo sapien
taagacaatttatctaatctttgta

SEQ ID NO: 973784 - DNA, 25 bp, Homo sapien
tttgagaactcgcagttgaagctgg

SEQ ID NO: 973785 - DNA, 25 bp, Homo sapien
tcaggatgtcacacttgcacatggg

SEQ ID NO: 973786 - DNA, 25 bp, Homo sapien
gggtcaatgcatgccttatggaaaa

SEQ ID NO: 973787 - DNA, 25 bp, Homo sapien
catgggacatgtcctatgggctaaa

SEQ ID NO: 973788 - DNA, 25 bp, Homo sapien
ggcactctaggtgtaagtctccaga

SEQ ID NO: 973789 - DNA, 25 bp, Homo sapien
gtctccagacgcaatctaagtaaaa

SEQ ID NO: 973790 - DNA, 25 bp, Homo sapien
ctggtgaaagaattgggcactctag

SEQ ID NO: 973791 - DNA, 25 bp, Homo sapien
ggcagccaggaaggtaaatagatac

SEQ ID NO: 973792 - DNA, 25 bp, Homo sapien
gaatcgagtgcaaaatttccatgcc

SEQ ID NO: 973793 - DNA, 25 bp, Homo sapien
caatgatgactgtcacatagactcc

SEQ ID NO: 973794 - DNA, 25 bp, Homo sapien
gcatgtgcattctccccacttcaat

SEQ ID NO: 973795 - DNA, 25 bp, Homo sapien
tttcaggttgcttatcatcaccgcg

SEQ ID NO: 973796 - DNA, 25 bp, Homo sapien
tttactgcccgtaccttgatagttg

SEQ ID NO: 973797 - DNA, 25 bp, Homo sapien
gagtctgcctgtttgggcctgctga

SEQ ID NO: 973798 - DNA, 25 bp, Homo sapien
tgtaaaagtacagcctccacgttcg

SEQ ID NO: 973799 - DNA, 25 bp, Homo sapien
ttcgatgagggccagccatgagtct

SEQ ID NO: 973800 - DNA, 25 bp, Homo sapien
agctgtccaaatggcttttccgttt

SEQ ID NO: 973801 - DNA, 25 bp, Homo sapien
atggcttttccgtttgagtcaggaa

SEQ ID NO: 973802 - DNA, 25 bp, Homo sapien
gctaagtagtagaaagatactaagc

SEQ ID NO: 973803 - DNA, 25 bp, Homo sapien
tgagtcaggaaagctaagtagtaga

SEQ ID NO: 973804 - DNA, 25 bp, Homo sapien
tgcgtcgaaggggtaattctaagga

SEQ ID NO: 973805 - DNA, 25 bp, Homo sapien
gaaggggtaattctaaggaagctca

SEQ ID NO: 973806 - DNA, 25 bp, Homo sapien
ctatgcgtcgaaggggtaattctaa

SEQ ID NO: 973807 - DNA, 25 bp, Homo sapien
aaggggtaattctaaggaagctcat

SEQ ID NO: 973808 - DNA, 25 bp, Homo sapien
caacatcagttgtagaagaacataa

SEQ ID NO: 973809 - DNA, 25 bp, Homo sapien
agatagcttgttggcggcagattac

SEQ ID NO: 973810 - DNA, 25 bp, Homo sapien
gaacataaagaagatagcttgttgg

SEQ ID NO: 973811 - DNA, 25 bp, Homo sapien
tgttggcggcagattactaaagcac

SEQ ID NO: 973812 - DNA, 25 bp, Homo sapien
ctgggccagttgccagttttcatgc

SEQ ID NO: 973813 - DNA, 25 bp, Homo sapien
gggccagttgccagttttcatgcat

SEQ ID NO: 973814 - DNA, 25 bp, Homo sapien
tgggccagttgccagttttcatgca

SEQ ID NO: 973815 - DNA, 25 bp, Homo sapien
aaaagagcctgcattgccaagacaa

SEQ ID NO: 973816 - DNA, 25 bp, Homo sapien
accacacatctacaacagtctgatc

SEQ ID NO: 973817 - DNA, 25 bp, Homo sapien
aataccacacatctacaacagtctg

SEQ ID NO: 973818 - DNA, 25 bp, Homo sapien
aaagagcctgcattgccaagacaat

SEQ ID NO: 973819 - DNA, 25 bp, Homo sapien
cagagggttaagcatcttcttagtg

SEQ ID NO: 973820 - DNA, 25 bp, Homo sapien
aataatcacatcataacagagggtt

SEQ ID NO: 973821 - DNA, 25 bp, Homo sapien
tgtgtctttcatcctaagagaacag

SEQ ID NO: 973822 - DNA, 25 bp, Homo sapien
tgaacatgtaaatgggacataggac

SEQ ID NO: 973823 - DNA, 25 bp, Homo sapien
gagataaaaatgagtactgttcccc

SEQ ID NO: 973824 - DNA, 25 bp, Homo sapien
gaagctctagcatccatattttgta

SEQ ID NO: 973825 - DNA, 25 bp, Homo sapien
ctgaaagcagctagtaagcaactgt

SEQ ID NO: 973826 - DNA, 25 bp, Homo sapien
gaatttgtcccattataaagcagga

SEQ ID NO: 973827 - DNA, 25 bp, Homo sapien
cactgtaaatcacattgtcatttgt

SEQ ID NO: 973828 - DNA, 25 bp, Homo sapien
gaagaatagcttggaaagtaacaaa

SEQ ID NO: 973829 - DNA, 25 bp, Homo sapien
ggaagaatagcttggaaagtaacaa

SEQ ID NO: 973830 - DNA, 25 bp, Homo sapien
aagaatagcttggaaagtaacaaat

SEQ ID NO: 973831 - DNA, 25 bp, Homo sapien
cagtaactgcaactgttgtttgtta

SEQ ID NO: 973832 - DNA, 25 bp, Homo sapien
gttgcaaaatgcttcgtcagctaca

SEQ ID NO: 973833 - DNA, 25 bp, Homo sapien
cctggaaccgttctttcagtaactg

SEQ ID NO: 973834 - DNA, 25 bp, Homo sapien
ctcataataactccgaactgcgttg

SEQ ID NO: 973835 - DNA, 25 bp, Homo sapien
cctgggtctagcttccataattaat

SEQ ID NO: 973836 - DNA, 25 bp, Homo sapien
tccataattaatacagagggtgaat

SEQ ID NO: 973837 - DNA, 25 bp, Homo sapien
tagcttccataattaatacagaggg

SEQ ID NO: 973838 - DNA, 25 bp, Homo sapien
gacatgaaatgtgacttatcaatca

SEQ ID NO: 973839 - DNA, 25 bp, Homo sapien
tggaagctgtgtgacatcctagcaa

SEQ ID NO: 973840 - DNA, 25 bp, Homo sapien
caaagtggcagaaaacttgtgggtc

SEQ ID NO: 973841 - DNA, 25 bp, Homo sapien
ctagcaagtaaaggtggtcacagtc

SEQ ID NO: 973842 - DNA, 25 bp, Homo sapien
agctgtgtgacatcctagcaagtaa

SEQ ID NO: 973843 - DNA, 25 bp, Homo sapien
ttcttcaacgcagatgccaaccttc

SEQ ID NO: 973844 - DNA, 25 bp, Homo sapien
gcagatgccaaccttcaatatatcc

SEQ ID NO: 973845 - DNA, 25 bp, Homo sapien
caacgcagatgccaaccttcaatat

SEQ ID NO: 973846 - DNA, 25 bp, Homo sapien
atgcagatttcttcaacgcagatgc

SEQ ID NO: 973847 - DNA, 25 bp, Homo sapien
ctttaaaaccgtatcagacaaagag

SEQ ID NO: 973848 - DNA, 25 bp, Homo sapien
tatcagacaaagaggattctgactt

SEQ ID NO: 973849 - DNA, 25 bp, Homo sapien
gtgatctttaaaaccgtatcagaca

SEQ ID NO: 973850 - DNA, 25 bp, Homo sapien
accgtatcagacaaagaggattctg

SEQ ID NO: 973851 - DNA, 25 bp, Homo sapien
gagggctttaaggaacatggcccag

SEQ ID NO: 973852 - DNA, 25 bp, Homo sapien
gctttaaggaacatggcccagcttc

SEQ ID NO: 973853 - DNA, 25 bp, Homo sapien
ttatccagagggctttaaggaacat

SEQ ID NO: 973854 - DNA, 25 bp, Homo sapien
ccagagggctttaaggaacatggcc

SEQ ID NO: 973855 - DNA, 25 bp, Homo sapien
tcaggatctaaaggtgcctgcatta

SEQ ID NO: 973856 - DNA, 25 bp, Homo sapien
cagatgtggacagcaaccatgccac

SEQ ID NO: 973857 - DNA, 25 bp, Homo sapien
tgcattatagatggcggcacccaca

SEQ ID NO: 973858 - DNA, 25 bp, Homo sapien
gggcactcaagcaggttccagacaa

SEQ ID NO: 973859 - DNA, 25 bp, Homo sapien
gactgtctggtgttcctctatttgc

SEQ ID NO: 973860 - DNA, 25 bp, Homo sapien
ttctgactgtctggtgttcctctat

SEQ ID NO: 973861 - DNA, 25 bp, Homo sapien
tctgactgtctggtgttcctctatt

SEQ ID NO: 973862 - DNA, 25 bp, Homo sapien
tcacatcacacttgttctgactgtc

SEQ ID NO: 973863 - DNA, 25 bp, Homo sapien
tgctgatcacaagaggaagcagtac

SEQ ID NO: 973864 - DNA, 25 bp, Homo sapien
tgttggatgctgatcacaagaggaa

SEQ ID NO: 973865 - DNA, 25 bp, Homo sapien
cttggctcctgttggatgctgatca

SEQ ID NO: 973866 - DNA, 25 bp, Homo sapien
gctcctgttggatgctgatcacaag

SEQ ID NO: 973867 - DNA, 25 bp, Homo sapien
tgacctctgtaactcttggtcccag

SEQ ID NO: 973868 - DNA, 25 bp, Homo sapien
gatgctcagagtccttatgtcctca

SEQ ID NO: 973869 - DNA, 25 bp, Homo sapien
tcctcggcttgggtgcactgattac

SEQ ID NO: 973870 - DNA, 25 bp, Homo sapien
tcttggtcccagaatttaagatgct

SEQ ID NO: 973871 - DNA, 25 bp, Homo sapien
taaagcaaatggaacgtagagcaca

SEQ ID NO: 973872 - DNA, 25 bp, Homo sapien
ggtaatcgctggtcagtctcactca

SEQ ID NO: 973873 - DNA, 25 bp, Homo sapien
taaggtaggcaagcacatacaggtc

SEQ ID NO: 973874 - DNA, 25 bp, Homo sapien
ggtatcacaatgactgacacatgag

SEQ ID NO: 973875 - DNA, 25 bp, Homo sapien
agtgcctgaatccctccatgtgtcc

SEQ ID NO: 973876 - DNA, 25 bp, Homo sapien
cccacagacccttggtaagttcata

SEQ ID NO: 973877 - DNA, 25 bp, Homo sapien
aagttcatagccagcccaactctgg

SEQ ID NO: 973878 - DNA, 25 bp, Homo sapien
cagtgaacatgtcaccatggccctc

SEQ ID NO: 973879 - DNA, 25 bp, Homo sapien
aggctctgtatccccttgttaccaa

SEQ ID NO: 973880 - DNA, 25 bp, Homo sapien
ccattcaaaactactgtcactcgta

SEQ ID NO: 973881 - DNA, 25 bp, Homo sapien
tagtagagcacaataaaagacagtg

SEQ ID NO: 973882 - DNA, 25 bp, Homo sapien
tctctttgctaaaacgttactgtga

SEQ ID NO: 973883 - DNA, 25 bp, Homo sapien
taagtaaacgcctggaaatgcatgg

SEQ ID NO: 973884 - DNA, 25 bp, Homo sapien
caagaaatgctaggtcagggtggac

SEQ ID NO: 973885 - DNA, 25 bp, Homo sapien
atagctttactggatacaacacctg

SEQ ID NO: 973886 - DNA, 25 bp, Homo sapien
gaatgtatcctaccactgtgctgtc

SEQ ID NO: 973887 - DNA, 25 bp, Homo sapien
tcacggagacaagtttagcctattg

SEQ ID NO: 973888 - DNA, 25 bp, Homo sapien
gcagtaatgttgtctggctttacca

SEQ ID NO: 973889 - DNA, 25 bp, Homo sapien
ggcagtaatgttgtctggctttacc

SEQ ID NO: 973890 - DNA, 25 bp, Homo sapien
tggcagtaatgttgtctggctttac

SEQ ID NO: 973891 - DNA, 25 bp, Homo sapien
aaggaactttcaggtacagagaaca

SEQ ID NO: 973892 - DNA, 25 bp, Homo sapien
agttaatggttgagcaaaggcaaag

SEQ ID NO: 973893 - DNA, 25 bp, Homo sapien
ctggcagttccacgaacagcaaaga

SEQ ID NO: 973894 - DNA, 25 bp, Homo sapien
tcattgagttaatggttgagcaaag

SEQ ID NO: 973895 - DNA, 25 bp, Homo sapien
taaggaaaatgaccgtcaagtaggc

SEQ ID NO: 973896 - DNA, 25 bp, Homo sapien
ggcaattaatattgtcagcaagaaa

SEQ ID NO: 973897 - DNA, 25 bp, Homo sapien
gaaatgcagggccataatgtctata

SEQ ID NO: 973898 - DNA, 25 bp, Homo sapien
gaccgtcaagtaggcaattaatatt

SEQ ID NO: 973899 - DNA, 25 bp, Homo sapien
gaagtatcagcagtctctggcttgt

SEQ ID NO: 973900 - DNA, 25 bp, Homo sapien
cacagttgtgttattgacccacatt

SEQ ID NO: 973901 - DNA, 25 bp, Homo sapien
gacccacattctctatagacaatca

SEQ ID NO: 973902 - DNA, 25 bp, Homo sapien
cctggtcctatttcgcatggtagaa

SEQ ID NO: 973903 - DNA, 25 bp, Homo sapien
tctcccattcccttggtcctcttta

SEQ ID NO: 973904 - DNA, 25 bp, Homo sapien
tatagctattggacaggaccagaca

SEQ ID NO: 973905 - DNA, 25 bp, Homo sapien
gacaaaagccatcactatcaacaga

SEQ ID NO: 973906 - DNA, 25 bp, Homo sapien
ggaaactcagactcaaaggtgtatt

SEQ ID NO: 973907 - DNA, 25 bp, Homo sapien
ggaaacctagtaatctgatctgtca

SEQ ID NO: 973908 - DNA, 25 bp, Homo sapien
tggactatcatcagatctgctggaa

SEQ ID NO: 973909 - DNA, 25 bp, Homo sapien
gaatcaccctatctccctaagagta

SEQ ID NO: 973910 - DNA, 25 bp, Homo sapien
tcaacactgctaacttgtctctggg

SEQ ID NO: 973911 - DNA, 25 bp, Homo sapien
tgtggtctcaggataccctgtggaa

SEQ ID NO: 973912 - DNA, 25 bp, Homo sapien
taatgcaagacttcaagtaagtttt

SEQ ID NO: 973913 - DNA, 25 bp, Homo sapien
ttagataatctaactgtataatgca

SEQ ID NO: 973914 - DNA, 25 bp, Homo sapien
agttttggcattacttattagcttg

SEQ ID NO: 973915 - DNA, 25 bp, Homo sapien
gcattacttattagcttgtgcatca

SEQ ID NO: 973916 - DNA, 25 bp, Homo sapien
gctgcatgccttctcggtgtttgga

SEQ ID NO: 973917 - DNA, 25 bp, Homo sapien
caaacactttacaaagctgcatgcc

SEQ ID NO: 973918 - DNA, 25 bp, Homo sapien
tacaaagctgcatgccttctcggtg

SEQ ID NO: 973919 - DNA, 25 bp, Homo sapien
catgccttctcggtgtttggatttg

SEQ ID NO: 973920 - DNA, 25 bp, Homo sapien
ctaggtggacaggaatgcaccagtg

SEQ ID NO: 973921 - DNA, 25 bp, Homo sapien
aacactcattcagaccctcggcaaa

SEQ ID NO: 973922 - DNA, 25 bp, Homo sapien
tagctacaacactcattcagaccct

SEQ ID NO: 973923 - DNA, 25 bp, Homo sapien
cagctctagcaatatcacgccaggc

SEQ ID NO: 973924 - DNA, 25 bp, Homo sapien
cgttgaaggggtacgcgatgcacct

SEQ ID NO: 973925 - DNA, 25 bp, Homo sapien
gcgatgcacctcacgacgaagacgt

SEQ ID NO: 973926 - DNA, 25 bp, Homo sapien
agacgtagagctgcaggcggatcct

SEQ ID NO: 973927 - DNA, 25 bp, Homo sapien
tcacgacgaagacgtagagctgcag

SEQ ID NO: 973928 - DNA, 25 bp, Homo sapien
gctcgggctcacagatctggccgcg

SEQ ID NO: 973929 - DNA, 25 bp, Homo sapien
gggctcgggctcacagatctggccg

SEQ ID NO: 973930 - DNA, 25 bp, Homo sapien
aggggctcgggctcacagatctggc

SEQ ID NO: 973931 - DNA, 25 bp, Homo sapien
cagaggggctcgggctcacagatct

SEQ ID NO: 973932 - DNA, 25 bp, Homo sapien
ggagctcgctgcgagctgccggctg

SEQ ID NO: 973933 - DNA, 25 bp, Homo sapien
gaggagctcgctgcgagctgccggc

SEQ ID NO: 973934 - DNA, 25 bp, Homo sapien
tggaggagctcgctgcgagctgccg

SEQ ID NO: 973935 - DNA, 25 bp, Homo sapien
gctggaggagctcgctgcgagctgc

SEQ ID NO: 973936 - DNA, 25 bp, Homo sapien
gtccgactcctcttcgctggaagac

SEQ ID NO: 973937 - DNA, 25 bp, Homo sapien
tcttccagcccctcgtccgactcct

SEQ ID NO: 973938 - DNA, 25 bp, Homo sapien
ctcttccagcccctcgtccgactcc

SEQ ID NO: 973939 - DNA, 25 bp, Homo sapien
ctcgtccgactcctcttcgctggaa

SEQ ID NO: 973940 - DNA, 25 bp, Homo sapien
ggtgctcggggatccccgccgctcg

SEQ ID NO: 973941 - DNA, 25 bp, Homo sapien
gctcggcccgcggtccccaagcgcc

SEQ ID NO: 973942 - DNA, 25 bp, Homo sapien
gatccccgccgctcggcccgcggtc

SEQ ID NO: 973943 - DNA, 25 bp, Homo sapien
tcggcccgcggtccccaagcgcctc

SEQ ID NO: 973944 - DNA, 25 bp, Homo sapien
gcagaacgaaaggaaaactggccag

SEQ ID NO: 973945 - DNA, 25 bp, Homo sapien
cagcggccgcagaacgaaaggaaaa

SEQ ID NO: 973946 - DNA, 25 bp, Homo sapien
ggctttccggacacgtcgagttaga

SEQ ID NO: 973947 - DNA, 25 bp, Homo sapien
cggacacgtcgagttagattcagga

SEQ ID NO: 973948 - DNA, 25 bp, Homo sapien
ggcgcctcaggaattgctccgccag

SEQ ID NO: 973949 - DNA, 25 bp, Homo sapien
gggagccgccgggactgaataggcg

SEQ ID NO: 973950 - DNA, 25 bp, Homo sapien
ctgaataggcggagttagcgttggg

SEQ ID NO: 973951 - DNA, 25 bp, Homo sapien
gagcttgggcgcctcaggaattgct

SEQ ID NO: 973952 - DNA, 25 bp, Homo sapien
catctccccaacccgaatcggctgc

SEQ ID NO: 973953 - DNA, 25 bp, Homo sapien
gggagcggccgagacatctccccaa

SEQ ID NO: 973954 - DNA, 25 bp, Homo sapien
tccctagcaagaggttagggggagc

SEQ ID NO: 973955 - DNA, 25 bp, Homo sapien
agcaagaggttagggggagcggccg

SEQ ID NO: 973956 - DNA, 25 bp, Homo sapien
tgtcttcctgcaactggatggtccc

SEQ ID NO: 973957 - DNA, 25 bp, Homo sapien
gcttgtcttcctgcaactggatggt

SEQ ID NO: 973958 - DNA, 25 bp, Homo sapien
tgagcttgtcttcctgcaactggat

SEQ ID NO: 973959 - DNA, 25 bp, Homo sapien
gagcttgtcttcctgcaactggatg

SEQ ID NO: 973960 - DNA, 25 bp, Homo sapien
cccgtcttcccagcgaacaggtggg

SEQ ID NO: 973961 - DNA, 25 bp, Homo sapien
cgtcttcccagcgaacaggtgggca

SEQ ID NO: 973962 - DNA, 25 bp, Homo sapien
ccccgtcttcccagcgaacaggtgg

SEQ ID NO: 973963 - DNA, 25 bp, Homo sapien
ccgtcttcccagcgaacaggtgggc

SEQ ID NO: 973964 - DNA, 25 bp, Homo sapien
cattatcacttagtttcaaacacac

SEQ ID NO: 973965 - DNA, 25 bp, Homo sapien
tcctgttaggcttccacatagtgaa

SEQ ID NO: 973966 - DNA, 25 bp, Homo sapien
gggctccgcaaactacatttccact

SEQ ID NO: 973967 - DNA, 25 bp, Homo sapien
atcatacgtgcttgtttttaagcca

SEQ ID NO: 973968 - DNA, 25 bp, Homo sapien
gagcacattgacttcaccaataaaa

SEQ ID NO: 973969 - DNA, 25 bp, Homo sapien
cacattgacttcaccaataaaatta

SEQ ID NO: 973970 - DNA, 25 bp, Homo sapien
tgacttcaccaataaaattaggtgt

SEQ ID NO: 973971 - DNA, 25 bp, Homo sapien
cattgacttcaccaataaaattagg

SEQ ID NO: 973972 - DNA, 25 bp, Homo sapien
gacagtgttttaggtcatacctaac

SEQ ID NO: 973973 - DNA, 25 bp, Homo sapien
agctgacagtgttttaggtcatacc

SEQ ID NO: 973974 - DNA, 25 bp, Homo sapien
tgttttaggtcatacctaacagatt

SEQ ID NO: 973975 - DNA, 25 bp, Homo sapien
aggtcatacctaacagatttttcac

SEQ ID NO: 973976 - DNA, 25 bp, Homo sapien
cacttggttcttggctttccctact

SEQ ID NO: 973977 - DNA, 25 bp, Homo sapien
gggcagcagaaattctctaaagtaa

SEQ ID NO: 973978 - DNA, 25 bp, Homo sapien
actctaacatttccagggcagcaga

SEQ ID NO: 973979 - DNA, 25 bp, Homo sapien
tctctaaagtaaatgtggtcattag

SEQ ID NO: 973980 - DNA, 25 bp, Homo sapien
catctttcatgcttaacttttctta

SEQ ID NO: 973981 - DNA, 25 bp, Homo sapien
cccagcatctttcatgcttaacttt

SEQ ID NO: 973982 - DNA, 25 bp, Homo sapien
cagcatctttcatgcttaacttttc

SEQ ID NO: 973983 - DNA, 25 bp, Homo sapien
gcatctttcatgcttaacttttctt

SEQ ID NO: 973984 - DNA, 25 bp, Homo sapien
gagaagcttgcttataagcagcttc

SEQ ID NO: 973985 - DNA, 25 bp, Homo sapien
tggagaagcttgcttataagcagct

SEQ ID NO: 973986 - DNA, 25 bp, Homo sapien
gcagcttctccaaatcctatatgct

SEQ ID NO: 973987 - DNA, 25 bp, Homo sapien
catcttctcattcttgcttattgga

SEQ ID NO: 973988 - DNA, 25 bp, Homo sapien
aatgtgccatattcatgggcatatt

SEQ ID NO: 973989 - DNA, 25 bp, Homo sapien
tgtgccatattcatgggcatatttc

SEQ ID NO: 973990 - DNA, 25 bp, Homo sapien
tgcaatgtgccatattcatgggcat

SEQ ID NO: 973991 - DNA, 25 bp, Homo sapien
gcaatgtgccatattcatgggcata

SEQ ID NO: 973992 - DNA, 25 bp, Homo sapien
tcttctgtggaagtcttacgtttac

SEQ ID NO: 973993 - DNA, 25 bp, Homo sapien
atcttctgtggaagtcttacgttta

SEQ ID NO: 973994 - DNA, 25 bp, Homo sapien
ttacgtttaccttctgtgacctgct

SEQ ID NO: 973995 - DNA, 25 bp, Homo sapien
gaagtcttacgtttaccttctgtga

SEQ ID NO: 973996 - DNA, 25 bp, Homo sapien
gtgatgtgctactgctgaaatggcc

SEQ ID NO: 973997 - DNA, 25 bp, Homo sapien
ggcctgtaaatgtgatgctaagaaa

SEQ ID NO: 973998 - DNA, 25 bp, Homo sapien
ctgcaagaatacagtgatgtgctac

SEQ ID NO: 973999 - DNA, 25 bp, Homo sapien
gaaaagtgcaggcataagagtgctt

SEQ ID NO: 974000 - DNA, 25 bp, Homo sapien
agatctgcgtgcaacccgtgcagca

SEQ ID NO: 974001 - DNA, 25 bp, Homo sapien
tgcgtgcaacccgtgcagcacatca

SEQ ID NO: 974002 - DNA, 25 bp, Homo sapien
gatctgcgtgcaacccgtgcagcac

SEQ ID NO: 974003 - DNA, 25 bp, Homo sapien
tctgcgtgcaacccgtgcagcacat

SEQ ID NO: 974004 - DNA, 25 bp, Homo sapien
tacacaacaagcaggaaggagagtc

SEQ ID NO: 974005 - DNA, 25 bp, Homo sapien
ctgcaatacacaacaagcaggaagg

SEQ ID NO: 974006 - DNA, 25 bp, Homo sapien
aatacacaacaagcaggaaggagag

SEQ ID NO: 974007 - DNA, 25 bp, Homo sapien
caatacacaacaagcaggaaggaga

SEQ ID NO: 974008 - DNA, 25 bp, Homo sapien
tctgtccaggactttaggatcaaca

SEQ ID NO: 974009 - DNA, 25 bp, Homo sapien
tttaggatcaacatctcttcaggct

SEQ ID NO: 974010 - DNA, 25 bp, Homo sapien
ctgtccaggactttaggatcaacat

SEQ ID NO: 974011 - DNA, 25 bp, Homo sapien
atctgtccaggactttaggatcaac

SEQ ID NO: 974012 - DNA, 25 bp, Homo sapien
gactgactgcgtcgttctcagacaa

SEQ ID NO: 974013 - DNA, 25 bp, Homo sapien
gtgactgactgcgtcgttctcagac

SEQ ID NO: 974014 - DNA, 25 bp, Homo sapien
ctgcgtcgttctcagacaatgcctg

SEQ ID NO: 974015 - DNA, 25 bp, Homo sapien
tgactgcgtcgttctcagacaatgc

SEQ ID NO: 974016 - DNA, 25 bp, Homo sapien
ttattctctctgatgttttggcata

SEQ ID NO: 974017 - DNA, 25 bp, Homo sapien
tattctctctgatgttttggcatat

SEQ ID NO: 974018 - DNA, 25 bp, Homo sapien
ctcgtattatctgctgcttgggaag

SEQ ID NO: 974019 - DNA, 25 bp, Homo sapien
caggaaacagattggtagagaatgc

SEQ ID NO: 974020 - DNA, 25 bp, Homo sapien
tctttgtctccttctcgtattatct

SEQ ID NO: 974021 - DNA, 25 bp, Homo sapien
gggagggtagttgatatttgatttc

SEQ ID NO: 974022 - DNA, 25 bp, Homo sapien
tagtcaatggtaatcattgcaggct

SEQ ID NO: 974023 - DNA, 25 bp, Homo sapien
agtcaatggtaatcattgcaggctt

SEQ ID NO: 974024 - DNA, 25 bp, Homo sapien
ctagtcaatggtaatcattgcaggc

SEQ ID NO: 974025 - DNA, 25 bp, Homo sapien
cgcatcttgttgtagatgctcctta

SEQ ID NO: 974026 - DNA, 25 bp, Homo sapien
gggctgtgttcgtcacgcatcttgt

SEQ ID NO: 974027 - DNA, 25 bp, Homo sapien
gcatacagatgtttgatttgaatct

SEQ ID NO: 974028 - DNA, 25 bp, Homo sapien
ctctggcaagagcatacagatgttt

SEQ ID NO: 974029 - DNA, 25 bp, Homo sapien
cacctcagtacttgggttgtttggt

SEQ ID NO: 974030 - DNA, 25 bp, Homo sapien
ctcagtacttgggttgtttggtgtt

SEQ ID NO: 974031 - DNA, 25 bp, Homo sapien
tacttgggttgtttggtgtttgcaa

SEQ ID NO: 974032 - DNA, 25 bp, Homo sapien
cttgggttgtttggtgtttgcaaca

SEQ ID NO: 974033 - DNA, 25 bp, Homo sapien
ctcatatccaattaacggcttcttc

SEQ ID NO: 974034 - DNA, 25 bp, Homo sapien
tcttctcctatcttaggcgtggtgt

SEQ ID NO: 974035 - DNA, 25 bp, Homo sapien
catatccaattaacggcttcttctc

SEQ ID NO: 974036 - DNA, 25 bp, Homo sapien
tctcctatcttaggcgtggtgtaga

SEQ ID NO: 974037 - DNA, 25 bp, Homo sapien
tagaaagtaagaggtaaacacaata

SEQ ID NO: 974038 - DNA, 25 bp, Homo sapien
cctataatggtgatgagtatggtta

SEQ ID NO: 974039 - DNA, 25 bp, Homo sapien
tcagcatcagtgaagtggaatgcat

SEQ ID NO: 974040 - DNA, 25 bp, Homo sapien
tagaatccttttcaacgtagggctg

SEQ ID NO: 974041 - DNA, 25 bp, Homo sapien
cagtgaagcgcgctttcatgcttgg

SEQ ID NO: 974042 - DNA, 25 bp, Homo sapien
tatctgcttggtcagtgatgccatg

SEQ ID NO: 974043 - DNA, 25 bp, Homo sapien
tcatgcttggattgcagtgaccagt

SEQ ID NO: 974044 - DNA, 25 bp, Homo sapien
taaccaatgcaactgtatgagcctg

SEQ ID NO: 974045 - DNA, 25 bp, Homo sapien
cagtagaacacggtaagcaagctgt

SEQ ID NO: 974046 - DNA, 25 bp, Homo sapien
gaatgtaattcccaatagctgaagg

SEQ ID NO: 974047 - DNA, 25 bp, Homo sapien
gaagagaccttgatgcagtagaaca

SEQ ID NO: 974048 - DNA, 25 bp, Homo sapien
cccaggtgattgttaagttgcaaag

SEQ ID NO: 974049 - DNA, 25 bp, Homo sapien
ggactcaagcacatagatgatcatg

SEQ ID NO: 974050 - DNA, 25 bp, Homo sapien
caggctgatgagaatcatgtccaca

SEQ ID NO: 974051 - DNA, 25 bp, Homo sapien
gcactgcaacaattaggctgctctg

SEQ ID NO: 974052 - DNA, 25 bp, Homo sapien
ctgtagacagaagcgagagatgccc

SEQ ID NO: 974053 - DNA, 25 bp, Homo sapien
ctccaaagtgtcttcctggacaaag

SEQ ID NO: 974054 - DNA, 25 bp, Homo sapien
cttcctggacaaagactctgaatct

SEQ ID NO: 974055 - DNA, 25 bp, Homo sapien
tcttctactccaaagtgtcttcctg

SEQ ID NO: 974056 - DNA, 25 bp, Homo sapien
cctggacaaagactctgaatctctg

SEQ ID NO: 974057 - DNA, 25 bp, Homo sapien
gaatagatgtgggcagcaactctga

SEQ ID NO: 974058 - DNA, 25 bp, Homo sapien
aatagatgtgggcagcaactctgaa

SEQ ID NO: 974059 - DNA, 25 bp, Homo sapien
atagatgtgggcagcaactctgaat

SEQ ID NO: 974060 - DNA, 25 bp, Homo sapien
cttcaggtgtgaagacttgcatccc

SEQ ID NO: 974061 - DNA, 25 bp, Homo sapien
accaggtaatcctttaagatcttcg

SEQ ID NO: 974062 - DNA, 25 bp, Homo sapien
cagaaccttcaggtgtgaagacttg

SEQ ID NO: 974063 - DNA, 25 bp, Homo sapien
ttactgccaaatattcagaaccttc

SEQ ID NO: 974064 - DNA, 25 bp, Homo sapien
agtgctggccttcaattttctcatc

SEQ ID NO: 974065 - DNA, 25 bp, Homo sapien
tgctggccttcaattttctcatccc

SEQ ID NO: 974066 - DNA, 25 bp, Homo sapien
ctggccttcaattttctcatcccca

SEQ ID NO: 974067 - DNA, 25 bp, Homo sapien
gtgctggccttcaattttctcatcc

SEQ ID NO: 974068 - DNA, 25 bp, Homo sapien
tatttctaaggaaactattacatcc

SEQ ID NO: 974069 - DNA, 25 bp, Homo sapien
catccatggtatttctaaggaaact

SEQ ID NO: 974070 - DNA, 25 bp, Homo sapien
agatctgcacatccatggtatttct

SEQ ID NO: 974071 - DNA, 25 bp, Homo sapien
tttcttcttctcattaagacaaaaa

SEQ ID NO: 974072 - DNA, 25 bp, Homo sapien
ccttaacaccctctcattactcttc

SEQ ID NO: 974073 - DNA, 25 bp, Homo sapien
tcttccttaacaccctctcattact

SEQ ID NO: 974074 - DNA, 25 bp, Homo sapien
tatcttccttaacaccctctcatta

SEQ ID NO: 974075 - DNA, 25 bp, Homo sapien
ttccttaacaccctctcattactct

SEQ ID NO: 974076 - DNA, 25 bp, Homo sapien
tttatgaattgttttgcatgaggcc

SEQ ID NO: 974077 - DNA, 25 bp, Homo sapien
tatgaattgttttgcatgaggcctt

SEQ ID NO: 974078 - DNA, 25 bp, Homo sapien
ccttttatgacaatagaagagggaa

SEQ ID NO: 974079 - DNA, 25 bp, Homo sapien
atgaggccttttatgacaatagaag

SEQ ID NO: 974080 - DNA, 25 bp, Homo sapien
tgaattcagtaaagaaatacaacca

SEQ ID NO: 974081 - DNA, 25 bp, Homo sapien
cagtaaagaaatacaaccatgtgca

SEQ ID NO: 974082 - DNA, 25 bp, Homo sapien
aaagaaatacaaccatgtgcatata

SEQ ID NO: 974083 - DNA, 25 bp, Homo sapien
gtaaagaaatacaaccatgtgcata

SEQ ID NO: 974084 - DNA, 25 bp, Homo sapien
gagtatgctcagatgacaggtggta

SEQ ID NO: 974085 - DNA, 25 bp, Homo sapien
aggtggtacagttggagagtcccct

SEQ ID NO: 974086 - DNA, 25 bp, Homo sapien
cagttggagagtccccttatcactc

SEQ ID NO: 974087 - DNA, 25 bp, Homo sapien
ggctgatggtcatgggctggagtat

SEQ ID NO: 974088 - DNA, 25 bp, Homo sapien
agttatctgtggacttttaattaat

SEQ ID NO: 974089 - DNA, 25 bp, Homo sapien
agctctgaatattcacttttttcaa

SEQ ID NO: 974090 - DNA, 25 bp, Homo sapien
aaacttttagcttttcaccattgag

SEQ ID NO: 974091 - DNA, 25 bp, Homo sapien
gaactcacatatactgttgattgga

SEQ ID NO: 974092 - DNA, 25 bp, Homo sapien
catatgtaaggtctacagcacttgg

SEQ ID NO: 974093 - DNA, 25 bp, Homo sapien
aaggtctacagcacttggatgaaca

SEQ ID NO: 974094 - DNA, 25 bp, Homo sapien
tcactcactaggagcttcatatgta

SEQ ID NO: 974095 - DNA, 25 bp, Homo sapien
gagcttcatatgtaaggtctacagc

SEQ ID NO: 974096 - DNA, 25 bp, Homo sapien
ttccagaaattaccgcaagatagtc

SEQ ID NO: 974097 - DNA, 25 bp, Homo sapien
tcttgatgaaggcacatagatgctc

SEQ ID NO: 974098 - DNA, 25 bp, Homo sapien
taacagcaggtttcgggtattcaca

SEQ ID NO: 974099 - DNA, 25 bp, Homo sapien
taacagctggaaagtgccaacgaag

SEQ ID NO: 974100 - DNA, 25 bp, Homo sapien
tggtctcattactcatagcaggagc

SEQ ID NO: 974101 - DNA, 25 bp, Homo sapien
caatccaagtacatatgccaagcat

SEQ ID NO: 974102 - DNA, 25 bp, Homo sapien
ccacgaagggtaagtgtagaggtca

SEQ ID NO: 974103 - DNA, 25 bp, Homo sapien
cacgaagggtaagtgtagaggtcaa

SEQ ID NO: 974104 - DNA, 25 bp, Homo sapien
tacatatgccaagcataaccacagc

SEQ ID NO: 974105 - DNA, 25 bp, Homo sapien
caattttgtgattagtcatgcacac

SEQ ID NO: 974106 - DNA, 25 bp, Homo sapien
tcaagacatggcacacaccaagatg

SEQ ID NO: 974107 - DNA, 25 bp, Homo sapien
gaccgtaagttttaatggcatgttc

SEQ ID NO: 974108 - DNA, 25 bp, Homo sapien
tatgctgtcgtgtggagcatgttca

SEQ ID NO: 974109 - DNA, 25 bp, Homo sapien
cacagagtagaaggtatcagaatat

SEQ ID NO: 974110 - DNA, 25 bp, Homo sapien
cattgggtggatttgctactggtag

SEQ ID NO: 974111 - DNA, 25 bp, Homo sapien
tcagaatataaagagggttcacatg

SEQ ID NO: 974112 - DNA, 25 bp, Homo sapien
tcagatgaccatatgaaaagacaat

SEQ ID NO: 974113 - DNA, 25 bp, Homo sapien
ggcccatttagaccaaaagagattc

SEQ ID NO: 974114 - DNA, 25 bp, Homo sapien
aggaggcccatttagaccaaaagag

SEQ ID NO: 974115 - DNA, 25 bp, Homo sapien
gaggcccatttagaccaaaagagat

SEQ ID NO: 974116 - DNA, 25 bp, Homo sapien
gcccatttagaccaaaagagattcc

SEQ ID NO: 974117 - DNA, 25 bp, Homo sapien
gagtactgctcttaatgaagagtaa

SEQ ID NO: 974118 - DNA, 25 bp, Homo sapien
agagtactgctcttaatgaagagta

SEQ ID NO: 974119 - DNA, 25 bp, Homo sapien
gattgctggctacctcagttaaaga

SEQ ID NO: 974120 - DNA, 25 bp, Homo sapien
cagttaaagatgtcaccatcaaaga

SEQ ID NO: 974121 - DNA, 25 bp, Homo sapien
tcagaattattagccatgctggtaa

SEQ ID NO: 974122 - DNA, 25 bp, Homo sapien
agaaagagtgtaatggtagctggat

SEQ ID NO: 974123 - DNA, 25 bp, Homo sapien
cagggcaaaccctccaccaacaaga

SEQ ID NO: 974124 - DNA, 25 bp, Homo sapien
gcaaaccctccaccaacaagaatgg

SEQ ID NO: 974125 - DNA, 25 bp, Homo sapien
ggcaaaccctccaccaacaagaatg

SEQ ID NO: 974126 - DNA, 25 bp, Homo sapien
tttccaagtaatcagtggagagtaa

SEQ ID NO: 974127 - DNA, 25 bp, Homo sapien
tggaattctttccaagtaatcagtg

SEQ ID NO: 974128 - DNA, 25 bp, Homo sapien
tctttccaagtaatcagtggagagt

SEQ ID NO: 974129 - DNA, 25 bp, Homo sapien
aattctttccaagtaatcagtggag

SEQ ID NO: 974130 - DNA, 25 bp, Homo sapien
tatggctatgtgaggtttatttagc

SEQ ID NO: 974131 - DNA, 25 bp, Homo sapien
gcatttattaccaaggtatcataat

SEQ ID NO: 974132 - DNA, 25 bp, Homo sapien
taccaaggtatcataatgaagcagt

SEQ ID NO: 974133 - DNA, 25 bp, Homo sapien
cagctgtgatcctaggatatggcta

SEQ ID NO: 974134 - DNA, 25 bp, Homo sapien
tgaatctgtagcaaaaccagggtac

SEQ ID NO: 974135 - DNA, 25 bp, Homo sapien
cagtgtcttagctgggataagaaag

SEQ ID NO: 974136 - DNA, 25 bp, Homo sapien
tctcctgtaggtgtagttttagtca

SEQ ID NO: 974137 - DNA, 25 bp, Homo sapien
gccctataagtaaagcaacagttga

SEQ ID NO: 974138 - DNA, 25 bp, Homo sapien
cagagccattataatgaagaggacc

SEQ ID NO: 974139 - DNA, 25 bp, Homo sapien
tgaaaaaagtgcagaccaaccagga

SEQ ID NO: 974140 - DNA, 25 bp, Homo sapien
gggtctcgactaaaccatagcagag

SEQ ID NO: 974141 - DNA, 25 bp, Homo sapien
aggaccaaggtcacaatttcttgat

SEQ ID NO: 974142 - DNA, 25 bp, Homo sapien
cttattggcccaagcttttggtatt

SEQ ID NO: 974143 - DNA, 25 bp, Homo sapien
ggcccaagcttttggtattcttgct

SEQ ID NO: 974144 - DNA, 25 bp, Homo sapien
ttggcccaagcttttggtattcttg

SEQ ID NO: 974145 - DNA, 25 bp, Homo sapien
tattggcccaagcttttggtattct

SEQ ID NO: 974146 - DNA, 25 bp, Homo sapien
tcagcacaagctttttgttggactg

SEQ ID NO: 974147 - DNA, 25 bp, Homo sapien
gcacaagctttttgttggactgttt

SEQ ID NO: 974148 - DNA, 25 bp, Homo sapien
ctcagcacaagctttttgttggact

SEQ ID NO: 974149 - DNA, 25 bp, Homo sapien
cagcacaagctttttgttggactgt

SEQ ID NO: 974150 - DNA, 25 bp, Homo sapien
catcttctcactactaataaaacca

SEQ ID NO: 974151 - DNA, 25 bp, Homo sapien
ttttaatcatcagtaccatcttctc

SEQ ID NO: 974152 - DNA, 25 bp, Homo sapien
tctttttaatcatcagtaccatctt

SEQ ID NO: 974153 - DNA, 25 bp, Homo sapien
taatcatcagtaccatcttctcact

SEQ ID NO: 974154 - DNA, 25 bp, Homo sapien
agatccaggataagagtagaatgat

SEQ ID NO: 974155 - DNA, 25 bp, Homo sapien
tccaggataagagtagaatgataag

SEQ ID NO: 974156 - DNA, 25 bp, Homo sapien
aggataagagtagaatgataagggc

SEQ ID NO: 974157 - DNA, 25 bp, Homo sapien
ccaggataagagtagaatgataagg

SEQ ID NO: 974158 - DNA, 25 bp, Homo sapien
catgatccaaagttgaggcaacgac

SEQ ID NO: 974159 - DNA, 25 bp, Homo sapien
gaggcaacgacagtcaggatagcgt

SEQ ID NO: 974160 - DNA, 25 bp, Homo sapien
gaaggaaaacgtaaaccatgatcca

SEQ ID NO: 974161 - DNA, 25 bp, Homo sapien
agttgaggcaacgacagtcaggata

SEQ ID NO: 974162 - DNA, 25 bp, Homo sapien
agttcttggctttaatgagtattaa

SEQ ID NO: 974163 - DNA, 25 bp, Homo sapien
tcccatataagcaagagtggatgtg

SEQ ID NO: 974164 - DNA, 25 bp, Homo sapien
catctttaaggaagtgcttgtggaa

SEQ ID NO: 974165 - DNA, 25 bp, Homo sapien
gaaaaaacccagtgcagttcttggc

SEQ ID NO: 974166 - DNA, 25 bp, Homo sapien
gcaacaagagtggaaactgtgtgat

SEQ ID NO: 974167 - DNA, 25 bp, Homo sapien
ggtagacagagttccaagatatgcc

SEQ ID NO: 974168 - DNA, 25 bp, Homo sapien
taagttagtaacgtgacatgatcta

SEQ ID NO: 974169 - DNA, 25 bp, Homo sapien
cctggtgtacatgccttgtacgatc

SEQ ID NO: 974170 - DNA, 25 bp, Homo sapien
ttaattctcagtataaaggaaggtc

SEQ ID NO: 974171 - DNA, 25 bp, Homo sapien
tctcagtataaaggaaggtctgtag

SEQ ID NO: 974172 - DNA, 25 bp, Homo sapien
tcagtataaaggaaggtctgtagat

SEQ ID NO: 974173 - DNA, 25 bp, Homo sapien
aggaaggtctgtagatctatagatg

SEQ ID NO: 974174 - DNA, 25 bp, Homo sapien
tactctgcaaagatcaagttggtgg

SEQ ID NO: 974175 - DNA, 25 bp, Homo sapien
caccaatggtagaagagtaggcaat

SEQ ID NO: 974176 - DNA, 25 bp, Homo sapien
gtaggcaatgcacaaacacgtaagt

SEQ ID NO: 974177 - DNA, 25 bp, Homo sapien
ggaggtaccagtgattgttgtcagt

SEQ ID NO: 974178 - DNA, 25 bp, Homo sapien
tggggaaatactccaactttctcca

SEQ ID NO: 974179 - DNA, 25 bp, Homo sapien
gactcttcccttctttcgactgtga

SEQ ID NO: 974180 - DNA, 25 bp, Homo sapien
cttgttaagtaggagactcttccct

SEQ ID NO: 974181 - DNA, 25 bp, Homo sapien
tcgactgtgatggtacaagtggcag

SEQ ID NO: 974182 - DNA, 25 bp, Homo sapien
aagcagactgtctctcagccttctc

SEQ ID NO: 974183 - DNA, 25 bp, Homo sapien
gcagactgtctctcagccttctcat

SEQ ID NO: 974184 - DNA, 25 bp, Homo sapien
agcagactgtctctcagccttctca

SEQ ID NO: 974185 - DNA, 25 bp, Homo sapien
agtgcttgtgttcgctgggctgaac

SEQ ID NO: 974186 - DNA, 25 bp, Homo sapien
tgcttgtgttcgctgggctgaacac

SEQ ID NO: 974187 - DNA, 25 bp, Homo sapien
cgagtgcttgtgttcgctgggctga

SEQ ID NO: 974188 - DNA, 25 bp, Homo sapien
cttgtgttcgctgggctgaacacag

SEQ ID NO: 974189 - DNA, 25 bp, Homo sapien
tccaggaaagtaatagaataatttc

SEQ ID NO: 974190 - DNA, 25 bp, Homo sapien
taatttctaagtacatatgccttcc

SEQ ID NO: 974191 - DNA, 25 bp, Homo sapien
cacacactactaaatttgacatgga

SEQ ID NO: 974192 - DNA, 25 bp, Homo sapien
tagctgcgatacagaatggacagag

SEQ ID NO: 974193 - DNA, 25 bp, Homo sapien
gctagatgaagtagatatacattct

SEQ ID NO: 974194 - DNA, 25 bp, Homo sapien
cctacctacttcaagaagaaagcat

SEQ ID NO: 974195 - DNA, 25 bp, Homo sapien
cattcttccatataatcagtgttaa

SEQ ID NO: 974196 - DNA, 25 bp, Homo sapien
gaacaatcccaaagccagcaaaaga

SEQ ID NO: 974197 - DNA, 25 bp, Homo sapien
cctggacaaacccatacaataattt

SEQ ID NO: 974198 - DNA, 25 bp, Homo sapien
ccataaaatcaactctaaactcctt

SEQ ID NO: 974199 - DNA, 25 bp, Homo sapien
tttgcattggatgaagagatattta

SEQ ID NO: 974200 - DNA, 25 bp, Homo sapien
cacaacagctcatctctagcatctg

SEQ ID NO: 974201 - DNA, 25 bp, Homo sapien
tatctagaatggctacaactcctcc

SEQ ID NO: 974202 - DNA, 25 bp, Homo sapien
tgtatttgacagaagcaactcatga

SEQ ID NO: 974203 - DNA, 25 bp, Homo sapien
caggtcttgagatatattgctccca

SEQ ID NO: 974204 - DNA, 25 bp, Homo sapien
tatgggatagtttacagagatctcc

SEQ ID NO: 974205 - DNA, 25 bp, Homo sapien
ccaactccaccttgcttgaaatttt

SEQ ID NO: 974206 - DNA, 25 bp, Homo sapien
cttttccaactccaccttgcttgaa

SEQ ID NO: 974207 - DNA, 25 bp, Homo sapien
tttccaactccaccttgcttgaaat

SEQ ID NO: 974208 - DNA, 25 bp, Homo sapien
tgaaattttccctgtatcattattg

SEQ ID NO: 974209 - DNA, 25 bp, Homo sapien
cctctcatttatttcatgtccatta

SEQ ID NO: 974210 - DNA, 25 bp, Homo sapien
ctcatttatttcatgtccattaaca

SEQ ID NO: 974211 - DNA, 25 bp, Homo sapien
catttatttcatgtccattaacact

SEQ ID NO: 974212 - DNA, 25 bp, Homo sapien
tttatttcatgtccattaacacttt

SEQ ID NO: 974213 - DNA, 25 bp, Homo sapien
actacagcctccgcaatgggcatca

SEQ ID NO: 974214 - DNA, 25 bp, Homo sapien
taagtcatctgagtggcctcgacct

SEQ ID NO: 974215 - DNA, 25 bp, Homo sapien
tcaatttctagtccgtggttggttg

SEQ ID NO: 974216 - DNA, 25 bp, Homo sapien
gatccgttgaagtaagtcatctgag

SEQ ID NO: 974217 - DNA, 25 bp, Homo sapien
ggcagtgctgctcatgaaccccagc

SEQ ID NO: 974218 - DNA, 25 bp, Homo sapien
tgctgctcatgaaccccagcgtcag

SEQ ID NO: 974219 - DNA, 25 bp, Homo sapien
cagtgctgctcatgaaccccagcgt

SEQ ID NO: 974220 - DNA, 25 bp, Homo sapien
aggcagtgctgctcatgaaccccag

SEQ ID NO: 974221 - DNA, 25 bp, Homo sapien
aatccttgaaataagcagatgccac

SEQ ID NO: 974222 - DNA, 25 bp, Homo sapien
gataactccaattagcagtaagtga

SEQ ID NO: 974223 - DNA, 25 bp, Homo sapien
catcaccattttcagagcaattctc

SEQ ID NO: 974224 - DNA, 25 bp, Homo sapien
catgcaggatttacaccaaccatca

SEQ ID NO: 974225 - DNA, 25 bp, Homo sapien
catgggtaacattaaactaggtagc

SEQ ID NO: 974226 - DNA, 25 bp, Homo sapien
tgagccaaaatgtggcgaccacaaa

SEQ ID NO: 974227 - DNA, 25 bp, Homo sapien
ctgttaccgacagaggcaatgcttc

SEQ ID NO: 974228 - DNA, 25 bp, Homo sapien
cgaccacaaagagtgtgtaggcaca

SEQ ID NO: 974229 - DNA, 25 bp, Homo sapien
catgactgacatcacatgctatttg

SEQ ID NO: 974230 - DNA, 25 bp, Homo sapien
catggtgctttgaagtatctatgca

SEQ ID NO: 974231 - DNA, 25 bp, Homo sapien
gcatagtggaatgactaagtctagc

SEQ ID NO: 974232 - DNA, 25 bp, Homo sapien
tctctttaaccctgacacctgatct

SEQ ID NO: 974233 - DNA, 25 bp, Homo sapien
cagcacctgagatgcattgttttca

SEQ ID NO: 974234 - DNA, 25 bp, Homo sapien
gaaaagcaattgatggcccactaaa

SEQ ID NO: 974235 - DNA, 25 bp, Homo sapien
gagtttgttcaacgtgcagcatcct

SEQ ID NO: 974236 - DNA, 25 bp, Homo sapien
cacaagtatctcaggtgaatctggg

SEQ ID NO: 974237 - DNA, 25 bp, Homo sapien
attgcacctggtgggagacaaccca

SEQ ID NO: 974238 - DNA, 25 bp, Homo sapien
tagctcacatgaattcccttcagag

SEQ ID NO: 974239 - DNA, 25 bp, Homo sapien
tccagctttgcaggtaggataggcc

SEQ ID NO: 974240 - DNA, 25 bp, Homo sapien
ggtaggataggccttgacagtgtcc

SEQ ID NO: 974241 - DNA, 25 bp, Homo sapien
cgataaaccagaatgtaactgaaga

SEQ ID NO: 974242 - DNA, 25 bp, Homo sapien
tcggcgataaaccagaatgtaactg

SEQ ID NO: 974243 - DNA, 25 bp, Homo sapien
aaccacgaagagaaatcggcgataa

SEQ ID NO: 974244 - DNA, 25 bp, Homo sapien
gagaaatcggcgataaaccagaatg

SEQ ID NO: 974245 - DNA, 25 bp, Homo sapien
agaaaaatcactgcggctgtggcct

SEQ ID NO: 974246 - DNA, 25 bp, Homo sapien
cagcagtcacatgcggtgacacctg

SEQ ID NO: 974247 - DNA, 25 bp, Homo sapien
tgtgcccgatatcttcccatccatg

SEQ ID NO: 974248 - DNA, 25 bp, Homo sapien
tgggcataattagcacatgtgggca

SEQ ID NO: 974249 - DNA, 25 bp, Homo sapien
gcaactgtgttaggaaagtcagaga

SEQ ID NO: 974250 - DNA, 25 bp, Homo sapien
ctatggactgaagggaagactgaga

SEQ ID NO: 974251 - DNA, 25 bp, Homo sapien
cttgtgctagaattatatttgtcag

SEQ ID NO: 974252 - DNA, 25 bp, Homo sapien
aaagataaaggctttctatggactg

SEQ ID NO: 974253 - DNA, 25 bp, Homo sapien
gtgattcaaaggtgtcttggcacat

SEQ ID NO: 974254 - DNA, 25 bp, Homo sapien
tgtgattcaaaggtgtcttggcaca

SEQ ID NO: 974255 - DNA, 25 bp, Homo sapien
taataaagctaaaaacatccttctg

SEQ ID NO: 974256 - DNA, 25 bp, Homo sapien
ctgagcttgtaataaagctaaaaac

SEQ ID NO: 974257 - DNA, 25 bp, Homo sapien
tgaggatctgagcttgtaataaagc

SEQ ID NO: 974258 - DNA, 25 bp, Homo sapien
agcactggcgaagactgaggatctg

SEQ ID NO: 974259 - DNA, 25 bp, Homo sapien
atgggctgacagcatcatcatcatg

SEQ ID NO: 974260 - DNA, 25 bp, Homo sapien
catgggctgacagcatcatcatcat

SEQ ID NO: 974261 - DNA, 25 bp, Homo sapien
tcatgggctgacagcatcatcatca

SEQ ID NO: 974262 - DNA, 25 bp, Homo sapien
aatgaaatgaatacgctgtaggagc

SEQ ID NO: 974263 - DNA, 25 bp, Homo sapien
tgattgtggcattaaacttagcagc

SEQ ID NO: 974264 - DNA, 25 bp, Homo sapien
caccccagcaaatgatagctcttgg

SEQ ID NO: 974265 - DNA, 25 bp, Homo sapien
gggaatcagtcttacaccacagcaa

SEQ ID NO: 974266 - DNA, 25 bp, Homo sapien
ctgagaagagtctgtatagaacttg

SEQ ID NO: 974267 - DNA, 25 bp, Homo sapien
aatcagttctgagaagagtctgtat

SEQ ID NO: 974268 - DNA, 25 bp, Homo sapien
ttctgagaagagtctgtatagaact

SEQ ID NO: 974269 - DNA, 25 bp, Homo sapien
cagttctgagaagagtctgtataga

SEQ ID NO: 974270 - DNA, 25 bp, Homo sapien
tttcctcaagcacaaccaagaacca

SEQ ID NO: 974271 - DNA, 25 bp, Homo sapien
tcctcaagcacaaccaagaaccaca

SEQ ID NO: 974272 - DNA, 25 bp, Homo sapien
ttcctcaagcacaaccaagaaccac

SEQ ID NO: 974273 - DNA, 25 bp, Homo sapien
ttttcctcaagcacaaccaagaacc

SEQ ID NO: 974274 - DNA, 25 bp, Homo sapien
ccactgaagtacaataataatggta

SEQ ID NO: 974275 - DNA, 25 bp, Homo sapien
gattgctgatgctcaggagaaacgg

SEQ ID NO: 974276 - DNA, 25 bp, Homo sapien
gctgcctgccatcctctgaactggg

SEQ ID NO: 974277 - DNA, 25 bp, Homo sapien
gagaaacggtgtagaggatgtcttt

SEQ ID NO: 974278 - DNA, 25 bp, Homo sapien
cattttgcctctgctcaatagcgag

SEQ ID NO: 974279 - DNA, 25 bp, Homo sapien
gagacaactgcagctatagttagca

SEQ ID NO: 974280 - DNA, 25 bp, Homo sapien
tttgtcatgtgaacacacttaaggg

SEQ ID NO: 974281 - DNA, 25 bp, Homo sapien
gttctcccagttgtaagacattagc

SEQ ID NO: 974282 - DNA, 25 bp, Homo sapien
ctctcgtactggtttttgagctgca

SEQ ID NO: 974283 - DNA, 25 bp, Homo sapien
aaagctctcgtactggtttttgagc

SEQ ID NO: 974284 - DNA, 25 bp, Homo sapien
acaaagctctcgtactggtttttga

SEQ ID NO: 974285 - DNA, 25 bp, Homo sapien
cgtactggtttttgagctgcaagtc

SEQ ID NO: 974286 - DNA, 25 bp, Homo sapien
tcttattagccaaagatccaaaagt

SEQ ID NO: 974287 - DNA, 25 bp, Homo sapien
tattagccaaagatccaaaagtctc

SEQ ID NO: 974288 - DNA, 25 bp, Homo sapien
tctgggagttggtggccacataagc

SEQ ID NO: 974289 - DNA, 25 bp, Homo sapien
ggtggccacataagcaacttctttg

SEQ ID NO: 974290 - DNA, 25 bp, Homo sapien
tgaacattgattcaacccagaaaat

SEQ ID NO: 974291 - DNA, 25 bp, Homo sapien
gaaaggcagcaacgatgaacattga

SEQ ID NO: 974292 - DNA, 25 bp, Homo sapien
aattttgtgtcaaggccaagtcagg

SEQ ID NO: 974293 - DNA, 25 bp, Homo sapien
tctgcattgatcaacaatgccttcc

SEQ ID NO: 974294 - DNA, 25 bp, Homo sapien
ctgttattccgtcacagagggagga

SEQ ID NO: 974295 - DNA, 25 bp, Homo sapien
tgaaagctcttatccaccaggaaga

SEQ ID NO: 974296 - DNA, 25 bp, Homo sapien
caagagcaattacagccagagtgat

SEQ ID NO: 974297 - DNA, 25 bp, Homo sapien
tacagctgcagggatcagtgcttct

SEQ ID NO: 974298 - DNA, 25 bp, Homo sapien
cccacatagatccagtgttcataga

SEQ ID NO: 974299 - DNA, 25 bp, Homo sapien
ccagtgttcatagagtttgctgctt

SEQ ID NO: 974300 - DNA, 25 bp, Homo sapien
catagagtttgctgctttgaatttt

SEQ ID NO: 974301 - DNA, 25 bp, Homo sapien
tagatccagtgttcatagagtttgc

SEQ ID NO: 974302 - DNA, 25 bp, Homo sapien
tatgtagagaattgcagccactgac

SEQ ID NO: 974303 - DNA, 25 bp, Homo sapien
ggattaccactcaaccagagccgtg

SEQ ID NO: 974304 - DNA, 25 bp, Homo sapien
aattcagagacagtcatggtgcaag

SEQ ID NO: 974305 - DNA, 25 bp, Homo sapien
catgtgtaagccgaaagaggaaaag

SEQ ID NO: 974306 - DNA, 25 bp, Homo sapien
gataactaaacttgataactggata

SEQ ID NO: 974307 - DNA, 25 bp, Homo sapien
aactggataactaaacttgagagaa

SEQ ID NO: 974308 - DNA, 25 bp, Homo sapien
tcattaattgctgattggaattagg

SEQ ID NO: 974309 - DNA, 25 bp, Homo sapien
tgctgattggaattaggagaaaaat

SEQ ID NO: 974310 - DNA, 25 bp, Homo sapien
atttgattatagatgttcactttta

SEQ ID NO: 974311 - DNA, 25 bp, Homo sapien
ttgattatagatgttcacttttaat

SEQ ID NO: 974312 - DNA, 25 bp, Homo sapien
ctatttagccctccagatctactct

SEQ ID NO: 974313 - DNA, 25 bp, Homo sapien
ttctatttagccctccagatctact

SEQ ID NO: 974314 - DNA, 25 bp, Homo sapien
tttggccagcgggaaacccaagcag

SEQ ID NO: 974315 - DNA, 25 bp, Homo sapien
tggccgttccctttacagctggtca

SEQ ID NO: 974316 - DNA, 25 bp, Homo sapien
cccaagcaggacattggagaaagga

SEQ ID NO: 974317 - DNA, 25 bp, Homo sapien
atgagattcccctatgcctggccgt

SEQ ID NO: 974318 - DNA, 25 bp, Homo sapien
tagcctgtctgatactagccctggg

SEQ ID NO: 974319 - DNA, 25 bp, Homo sapien
taagctatttcgagtgtgccatcca

SEQ ID NO: 974320 - DNA, 25 bp, Homo sapien
ttatagtttcaccattgcccacagg

SEQ ID NO: 974321 - DNA, 25 bp, Homo sapien
tatgtggtcaaggtcactcctttgg

SEQ ID NO: 974322 - DNA, 25 bp, Homo sapien
gcaaagattcaaatgcctatactaa

SEQ ID NO: 974323 - DNA, 25 bp, Homo sapien
gagcactttataatgtttcctcccc

SEQ ID NO: 974324 - DNA, 25 bp, Homo sapien
aaggtgaaagcagacgataaactgc

SEQ ID NO: 974325 - DNA, 25 bp, Homo sapien
tccacatactgattagcttcctata

SEQ ID NO: 974326 - DNA, 25 bp, Homo sapien
ccatttccatactctgtgacctctg

SEQ ID NO: 974327 - DNA, 25 bp, Homo sapien
gccgatcatcaaacaaatactcctg

SEQ ID NO: 974328 - DNA, 25 bp, Homo sapien
gcatttcaatttagcaccaacttcc

SEQ ID NO: 974329 - DNA, 25 bp, Homo sapien
tgtattaccctattagcagtgaaca

SEQ ID NO: 974330 - DNA, 25 bp, Homo sapien
ggtgttgtgtctgagtgatacttcc

SEQ ID NO: 974331 - DNA, 25 bp, Homo sapien
tctgggattctataatcttaggtgt

SEQ ID NO: 974332 - DNA, 25 bp, Homo sapien
taatgaggaggcctctgggattcta

SEQ ID NO: 974333 - DNA, 25 bp, Homo sapien
ctgagtgatacttccatctgatctc

SEQ ID NO: 974334 - DNA, 25 bp, Homo sapien
aaaaatagttcttagccaggatatg

SEQ ID NO: 974335 - DNA, 25 bp, Homo sapien
tgtgaataaatgagcgttcatatcc

SEQ ID NO: 974336 - DNA, 25 bp, Homo sapien
aaatagttcttagccaggatatgtt

SEQ ID NO: 974337 - DNA, 25 bp, Homo sapien
tgtgtttgatcttgtgaataaatga

SEQ ID NO: 974338 - DNA, 25 bp, Homo sapien
ggacgcccagatgttctctgtcagg

SEQ ID NO: 974339 - DNA, 25 bp, Homo sapien
tacttgttagcttgagatgagcagc

SEQ ID NO: 974340 - DNA, 25 bp, Homo sapien
gaccatgaccagatcactgagattg

SEQ ID NO: 974341 - DNA, 25 bp, Homo sapien
tgagattgtcgcaagcactgaggac

SEQ ID NO: 974342 - DNA, 25 bp, Homo sapien
ggttccaatttcagtatatgggctg

SEQ ID NO: 974343 - DNA, 25 bp, Homo sapien
ctctatatggttccaatttcagtat

SEQ ID NO: 974344 - DNA, 25 bp, Homo sapien
tctctatatggttccaatttcagta

SEQ ID NO: 974345 - DNA, 25 bp, Homo sapien
atatggttccaatttcagtatatgg

SEQ ID NO: 974346 - DNA, 25 bp, Homo sapien
aaaatgattctcgtttttgagcctc

SEQ ID NO: 974347 - DNA, 25 bp, Homo sapien
gaaggttaatgcagttacgacaccg

SEQ ID NO: 974348 - DNA, 25 bp, Homo sapien
cataatcagcttctgtatagtagag

SEQ ID NO: 974349 - DNA, 25 bp, Homo sapien
tacgacaccggtatatgcggcgtga

SEQ ID NO: 974350 - DNA, 25 bp, Homo sapien
taaaatttcaatgggtcttgaggga

SEQ ID NO: 974351 - DNA, 25 bp, Homo sapien
cctctactctgcgttacttttccta

SEQ ID NO: 974352 - DNA, 25 bp, Homo sapien
tgcgttacttttcctaaacactcca

SEQ ID NO: 974353 - DNA, 25 bp, Homo sapien
tactctgcgttacttttcctaaaca

SEQ ID NO: 974354 - DNA, 25 bp, Homo sapien
cttcccctctactctgcgttacttt

SEQ ID NO: 974355 - DNA, 25 bp, Homo sapien
gcctcctaggcattaaattagcaaa

SEQ ID NO: 974356 - DNA, 25 bp, Homo sapien
ggagcatttactataatgccatgga

SEQ ID NO: 974357 - DNA, 25 bp, Homo sapien
tcatgaaaacacgttagcacacgtc

SEQ ID NO: 974358 - DNA, 25 bp, Homo sapien
ttagcaaatatatcagtcaacctca

SEQ ID NO: 974359 - DNA, 25 bp, Homo sapien
gagtgtcgcaattctttttctgagt

SEQ ID NO: 974360 - DNA, 25 bp, Homo sapien
tcaaggttatgatgtttgactcctc

SEQ ID NO: 974361 - DNA, 25 bp, Homo sapien
aacttcaggattaaacagaggtgtt

SEQ ID NO: 974362 - DNA, 25 bp, Homo sapien
gatataatgaaaaaagagtgtcgca

SEQ ID NO: 974363 - DNA, 25 bp, Homo sapien
aacctatatttctatgctatactga

SEQ ID NO: 974364 - DNA, 25 bp, Homo sapien
tacattaaatattgagcttacatta

SEQ ID NO: 974365 - DNA, 25 bp, Homo sapien
tgccaagtgtcttattaacttgaga

SEQ ID NO: 974366 - DNA, 25 bp, Homo sapien
actgaacgaacatctgccaagtgtc

SEQ ID NO: 974367 - DNA, 25 bp, Homo sapien
tgttgtggcagtataaagacccagg

SEQ ID NO: 974368 - DNA, 25 bp, Homo sapien
taatggatctactgggccacccagc

SEQ ID NO: 974369 - DNA, 25 bp, Homo sapien
tccgacaattccctgtgctgaagag

SEQ ID NO: 974370 - DNA, 25 bp, Homo sapien
aattaaatcaagtcctggcccaggt

SEQ ID NO: 974371 - DNA, 25 bp, Homo sapien
ttaagagttaacagcacatccagcc

SEQ ID NO: 974372 - DNA, 25 bp, Homo sapien
gtttaagagttaacagcacatccag

SEQ ID NO: 974373 - DNA, 25 bp, Homo sapien
tttcagcataatgcacttatagata

SEQ ID NO: 974374 - DNA, 25 bp, Homo sapien
cttatagatattttgcagctctctg

SEQ ID NO: 974375 - DNA, 25 bp, Homo sapien
cattaggggttctccatatttttgg

SEQ ID NO: 974376 - DNA, 25 bp, Homo sapien
ttgttttgccattaggggttctcca

SEQ ID NO: 974377 - DNA, 25 bp, Homo sapien
gggttctccatatttttggagctga

SEQ ID NO: 974378 - DNA, 25 bp, Homo sapien
ttctccatatttttggagctgaaca

SEQ ID NO: 974379 - DNA, 25 bp, Homo sapien
ttccatttagctgccaacaaaagag

SEQ ID NO: 974380 - DNA, 25 bp, Homo sapien
aaattccatttagctgccaacaaaa

SEQ ID NO: 974381 - DNA, 25 bp, Homo sapien
atttagctgccaacaaaagagacag

SEQ ID NO: 974382 - DNA, 25 bp, Homo sapien
aaataggagcataataaattccatt

SEQ ID NO: 974383 - DNA, 25 bp, Homo sapien
tgatttgccatataagcaatgtatc

SEQ ID NO: 974384 - DNA, 25 bp, Homo sapien
ttgccatataagcaatgtatctatg

SEQ ID NO: 974385 - DNA, 25 bp, Homo sapien
ctatgtctcccaatggaagcaatta

SEQ ID NO: 974386 - DNA, 25 bp, Homo sapien
gatttgccatataagcaatgtatct

SEQ ID NO: 974387 - DNA, 25 bp, Homo sapien
aatacgtgtaagttcttcttgccgc

SEQ ID NO: 974388 - DNA, 25 bp, Homo sapien
gctccagtaaaagattggttaatac

SEQ ID NO: 974389 - DNA, 25 bp, Homo sapien
ccagtaaaagattggttaatacgtg

SEQ ID NO: 974390 - DNA, 25 bp, Homo sapien
agattggttaatacgtgtaagttct

SEQ ID NO: 974391 - DNA, 25 bp, Homo sapien
caaaatttcagcaagggaaacttgg

SEQ ID NO: 974392 - DNA, 25 bp, Homo sapien
caaactacatttttaccacagaaca

SEQ ID NO: 974393 - DNA, 25 bp, Homo sapien
tgtgaaaatgcgtaggatgcaacca

SEQ ID NO: 974394 - DNA, 25 bp, Homo sapien
aattgtcatacatcaagctccgaac

SEQ ID NO: 974395 - DNA, 25 bp, Homo sapien
cagaataaattctgtccttgcactt

SEQ ID NO: 974396 - DNA, 25 bp, Homo sapien
aagcaggatgctcgtggattcctcc

SEQ ID NO: 974397 - DNA, 25 bp, Homo sapien
tgtggttttcaattcgcagaataaa

SEQ ID NO: 974398 - DNA, 25 bp, Homo sapien
tccccatagacagtaggcttctctt

SEQ ID NO: 974399 - DNA, 25 bp, Homo sapien
gtattaagtaactcttctgctccag

SEQ ID NO: 974400 - DNA, 25 bp, Homo sapien
taagtaactcttctgctccagttat

SEQ ID NO: 974401 - DNA, 25 bp, Homo sapien
tcagatatctggtgtattaagtaac

SEQ ID NO: 974402 - DNA, 25 bp, Homo sapien
tctggtgtattaagtaactcttctg

SEQ ID NO: 974403 - DNA, 25 bp, Homo sapien
taggattatgcctccggtgatagtc

SEQ ID NO: 974404 - DNA, 25 bp, Homo sapien
gcctccggtgatagtccaattttat

SEQ ID NO: 974405 - DNA, 25 bp, Homo sapien
tcatttgttttaggattatgcctcc

SEQ ID NO: 974406 - DNA, 25 bp, Homo sapien
tctaatgcattataaagaaattcaa

SEQ ID NO: 974407 - DNA, 25 bp, Homo sapien
taaattctctacgaagattttagca

SEQ ID NO: 974408 - DNA, 25 bp, Homo sapien
ttttagcatgccattgcctgtagta

SEQ ID NO: 974409 - DNA, 25 bp, Homo sapien
cattgcctgtagtaagtctgtatca

SEQ ID NO: 974410 - DNA, 25 bp, Homo sapien
tctctacgaagattttagcatgcca

SEQ ID NO: 974411 - DNA, 25 bp, Homo sapien
gatttaaggccaagggacagcagtg

SEQ ID NO: 974412 - DNA, 25 bp, Homo sapien
tctaaaggtcttgggctgaatagcc

SEQ ID NO: 974413 - DNA, 25 bp, Homo sapien
gaataacaggcactaatcaggtcag

SEQ ID NO: 974414 - DNA, 25 bp, Homo sapien
gagacacactcggaacaactggctt

SEQ ID NO: 974415 - DNA, 25 bp, Homo sapien
atgttagtcatctgtgtggatgttg

SEQ ID NO: 974416 - DNA, 25 bp, Homo sapien
gatacatatacaccaatgttagtca

SEQ ID NO: 974417 - DNA, 25 bp, Homo sapien
cagtttatcagtcatatttgataca

SEQ ID NO: 974418 - DNA, 25 bp, Homo sapien
ctttcctggtgttaccagtttatca

SEQ ID NO: 974419 - DNA, 25 bp, Homo sapien
gagaaatttgagagagtcatacagt

SEQ ID NO: 974420 - DNA, 25 bp, Homo sapien
ttaaatcagtatcccctatatatat

SEQ ID NO: 974421 - DNA, 25 bp, Homo sapien
taattgccatataattacttaagag

SEQ ID NO: 974422 - DNA, 25 bp, Homo sapien
tctacatatgtgagttcattttctt

SEQ ID NO: 974423 - DNA, 25 bp, Homo sapien
tatgtctgaatccaccaagaaatgg

SEQ ID NO: 974424 - DNA, 25 bp, Homo sapien
agatttgacaatctcaacaggtacc

SEQ ID NO: 974425 - DNA, 25 bp, Homo sapien
gcgtatccctacaaaatatactgag

SEQ ID NO: 974426 - DNA, 25 bp, Homo sapien
gttccagcattgtgatactctactc

SEQ ID NO: 974427 - DNA, 25 bp, Homo sapien
gaaagctcaaccaagaagggactca

SEQ ID NO: 974428 - DNA, 25 bp, Homo sapien
ccaagattcaatgaaagctcaacca

SEQ ID NO: 974429 - DNA, 25 bp, Homo sapien
ctcaaccaagaagggactcaaaaat

SEQ ID NO: 974430 - DNA, 25 bp, Homo sapien
acaccaagattcaatgaaagctcaa

SEQ ID NO: 974431 - DNA, 25 bp, Homo sapien
cagtgacagttatgatttgagagac

SEQ ID NO: 974432 - DNA, 25 bp, Homo sapien
gagagacatcagttaatccatctat

SEQ ID NO: 974433 - DNA, 25 bp, Homo sapien
cacttgtacaatttcctgtggctta

SEQ ID NO: 974434 - DNA, 25 bp, Homo sapien
ggcttaactccatgttgtactagag

SEQ ID NO: 974435 - DNA, 25 bp, Homo sapien
tatttaagaatggtatcaaccttaa

SEQ ID NO: 974436 - DNA, 25 bp, Homo sapien
ctgagtatcttatctgcagtacaga

SEQ ID NO: 974437 - DNA, 25 bp, Homo sapien
gtgggatacctaataagtgtgaaaa

SEQ ID NO: 974438 - DNA, 25 bp, Homo sapien
agtacagaatgtgggatacctaata

SEQ ID NO: 974439 - DNA, 25 bp, Homo sapien
tccaggcttgaaaagctttggtcac

SEQ ID NO: 974440 - DNA, 25 bp, Homo sapien
tgatctgactcttgaggctcttctg

SEQ ID NO: 974441 - DNA, 25 bp, Homo sapien
aaactatcatcatttggcctctgca

SEQ ID NO: 974442 - DNA, 25 bp, Homo sapien
gcatggctctcactgaattgttcta

SEQ ID NO: 974443 - DNA, 25 bp, Homo sapien
tgggatcaggatagttatctccatc

SEQ ID NO: 974444 - DNA, 25 bp, Homo sapien
ctgcctgattctaaactgcttgtct

SEQ ID NO: 974445 - DNA, 25 bp, Homo sapien
tcttgaagcgaatgccttaaaaagt

SEQ ID NO: 974446 - DNA, 25 bp, Homo sapien
cggtctgcccataaattttgcaatc

SEQ ID NO: 974447 - DNA, 25 bp, Homo sapien
agaaggtgtgggaggatgattttcc

SEQ ID NO: 974448 - DNA, 25 bp, Homo sapien
gaaggtgtgggaggatgattttccc

SEQ ID NO: 974449 - DNA, 25 bp, Homo sapien
aggtgtgggaggatgattttcccct

SEQ ID NO: 974450 - DNA, 25 bp, Homo sapien
agcaaggtgcgggacggcgtgaggg

SEQ ID NO: 974451 - DNA, 25 bp, Homo sapien
acacattgggcgctccgcccaaggg

SEQ ID NO: 974452 - DNA, 25 bp, Homo sapien
gagggaccacacattgggcgctccg

SEQ ID NO: 974453 - DNA, 25 bp, Homo sapien
gggacggcgtgagggaccacacatt

SEQ ID NO: 974454 - DNA, 25 bp, Homo sapien
ggaaggcgccgccagtgaccggctg

SEQ ID NO: 974455 - DNA, 25 bp, Homo sapien
cggaggccggcagttgctcggagct

SEQ ID NO: 974456 - DNA, 25 bp, Homo sapien
tccggcgggtcaggaggtgacggga

SEQ ID NO: 974457 - DNA, 25 bp, Homo sapien
tagcgtccggtaggtctgcgcagac

SEQ ID NO: 974458 - DNA, 25 bp, Homo sapien
ctgccgccgccgatagccccacaag

SEQ ID NO: 974459 - DNA, 25 bp, Homo sapien
ccgccgatagccccacaaggcgaca

SEQ ID NO: 974460 - DNA, 25 bp, Homo sapien
cgccgatagccccacaaggcgacat

SEQ ID NO: 974461 - DNA, 25 bp, Homo sapien
ccgccgccgatagccccacaaggcg

SEQ ID NO: 974462 - DNA, 25 bp, Homo sapien
tattctcgtcgaagtgctttcccag

SEQ ID NO: 974463 - DNA, 25 bp, Homo sapien
gccgcgttctcagctgttggtcgta

SEQ ID NO: 974464 - DNA, 25 bp, Homo sapien
tttcccaggctcctaagacgcagct

SEQ ID NO: 974465 - DNA, 25 bp, Homo sapien
tggtcgtatcctagcaacggccctg

SEQ ID NO: 974466 - DNA, 25 bp, Homo sapien
tctggaaggaggatcgcggtaggga

SEQ ID NO: 974467 - DNA, 25 bp, Homo sapien
aggagcgcggcaggaaataagggaa

SEQ ID NO: 974468 - DNA, 25 bp, Homo sapien
gagagaagaggagtagccagaggcg

SEQ ID NO: 974469 - DNA, 25 bp, Homo sapien
gctgcaaaggaggaacgcgataggg

SEQ ID NO: 974470 - DNA, 25 bp, Homo sapien
cgacttcgtatttctcatgaaacat

SEQ ID NO: 974471 - DNA, 25 bp, Homo sapien
tgataaatctatgcattttctcagg

SEQ ID NO: 974472 - DNA, 25 bp, Homo sapien
aacatctacctttattcatctcagc

SEQ ID NO: 974473 - DNA, 25 bp, Homo sapien
tctcaggatttattccaccaaacga

SEQ ID NO: 974474 - DNA, 25 bp, Homo sapien
tagcataggctacaatctcactgaa

SEQ ID NO: 974475 - DNA, 25 bp, Homo sapien
tgtgggtctatgagcactccttgcc

SEQ ID NO: 974476 - DNA, 25 bp, Homo sapien
ttttaatgggaagactgcactcagc

SEQ ID NO: 974477 - DNA, 25 bp, Homo sapien
tatgttgatggtgccacactcagcc

SEQ ID NO: 974478 - DNA, 25 bp, Homo sapien
atttagtattcatgttacagctcta

SEQ ID NO: 974479 - DNA, 25 bp, Homo sapien
tattcatgttacagctctatgaggg

SEQ ID NO: 974480 - DNA, 25 bp, Homo sapien
agtattcatgttacagctctatgag

SEQ ID NO: 974481 - DNA, 25 bp, Homo sapien
ttagtattcatgttacagctctatg

SEQ ID NO: 974482 - DNA, 25 bp, Homo sapien
aagagtatagtactatctatgaagg

SEQ ID NO: 974483 - DNA, 25 bp, Homo sapien
tgaaggaaagagataccacgttaaa

SEQ ID NO: 974484 - DNA, 25 bp, Homo sapien
gcaaatgtgcgcatgcgcgtgcaca

SEQ ID NO: 974485 - DNA, 25 bp, Homo sapien
tctgagcaaatgtgcgcatgcgcgt

SEQ ID NO: 974486 - DNA, 25 bp, Homo sapien
ccaataacctgtatgcaatgggaaa

SEQ ID NO: 974487 - DNA, 25 bp, Homo sapien
aaatttctccaataacctgtatgca

SEQ ID NO: 974488 - DNA, 25 bp, Homo sapien
tctccaataacctgtatgcaatggg

SEQ ID NO: 974489 - DNA, 25 bp, Homo sapien
tttctccaataacctgtatgcaatg

SEQ ID NO: 974490 - DNA, 25 bp, Homo sapien
caacttgtgtgagtactttataaat

SEQ ID NO: 974491 - DNA, 25 bp, Homo sapien
cccatgaacacaccaaagtcactta

SEQ ID NO: 974492 - DNA, 25 bp, Homo sapien
tcagtttcccatgaacacaccaaag

SEQ ID NO: 974493 - DNA, 25 bp, Homo sapien
tatttaattacatcagtttcccatg

SEQ ID NO: 974494 - DNA, 25 bp, Homo sapien
tgaacacaccaaagtcacttaataa

SEQ ID NO: 974495 - DNA, 25 bp, Homo sapien
taatggctcccatagtttccattcc

SEQ ID NO: 974496 - DNA, 25 bp, Homo sapien
actaatggctcccatagtttccatt

SEQ ID NO: 974497 - DNA, 25 bp, Homo sapien
cactaatggctcccatagtttccat

SEQ ID NO: 974498 - DNA, 25 bp, Homo sapien
atggctcccatagtttccattccct

SEQ ID NO: 974499 - DNA, 25 bp, Homo sapien
gaatcagccctatctcaggaacctg

SEQ ID NO: 974500 - DNA, 25 bp, Homo sapien
gcggcaagttcccataacactgtat

SEQ ID NO: 974501 - DNA, 25 bp, Homo sapien
cagcggtcccaaaagtcaatctatg

SEQ ID NO: 974502 - DNA, 25 bp, Homo sapien
gtatctagtaccacagccaacctga

SEQ ID NO: 974503 - DNA, 25 bp, Homo sapien
gaatcacctcttctaattgaccgcc

SEQ ID NO: 974504 - DNA, 25 bp, Homo sapien
taattgaccgccttgaagttggtct

SEQ ID NO: 974505 - DNA, 25 bp, Homo sapien
cctcttctaattgaccgccttgaag

SEQ ID NO: 974506 - DNA, 25 bp, Homo sapien
aagaatcacctcttctaattgaccg

SEQ ID NO: 974507 - DNA, 25 bp, Homo sapien
gaagcatactaactgaatgtttcaa

SEQ ID NO: 974508 - DNA, 25 bp, Homo sapien
agaagcatactaactgaatgtttca

SEQ ID NO: 974509 - DNA, 25 bp, Homo sapien
aattacacttctaggcataatgcca

SEQ ID NO: 974510 - DNA, 25 bp, Homo sapien
tctagtaaactgagctttttgagcc

SEQ ID NO: 974511 - DNA, 25 bp, Homo sapien
caatataggtgattctcttaaccac

SEQ ID NO: 974512 - DNA, 25 bp, Homo sapien
ccacagtattaagcacaagccagag

SEQ ID NO: 974513 - DNA, 25 bp, Homo sapien
ccaaacaacgtaaaggcattccagg

SEQ ID NO: 974514 - DNA, 25 bp, Homo sapien
cacagaagaagtgatgatttatgaa

SEQ ID NO: 974515 - DNA, 25 bp, Homo sapien
tatgaagaaaaagtaagaactacca

SEQ ID NO: 974516 - DNA, 25 bp, Homo sapien
taccaaacaacgtaaaggcattcca

SEQ ID NO: 974517 - DNA, 25 bp, Homo sapien
tcatgcagataaaggtagctaagca

SEQ ID NO: 974518 - DNA, 25 bp, Homo sapien
gaaggccttctataccatgttttta

SEQ ID NO: 974519 - DNA, 25 bp, Homo sapien
tgccagcagtttggtactgcttaag

SEQ ID NO: 974520 - DNA, 25 bp, Homo sapien
gattcaactaagaatggattcaacc

SEQ ID NO: 974521 - DNA, 25 bp, Homo sapien
tctttgtgtacaatattcttagcct

SEQ ID NO: 974522 - DNA, 25 bp, Homo sapien
gctttaaccatagccagcttctcat

SEQ ID NO: 974523 - DNA, 25 bp, Homo sapien
cgctttaaccatagccagcttctca

SEQ ID NO: 974524 - DNA, 25 bp, Homo sapien
cctcaagaacatcaagaatctttgt

SEQ ID NO: 974525 - DNA, 25 bp, Homo sapien
tttcaaagtgaggtccgaagcactg

SEQ ID NO: 974526 - DNA, 25 bp, Homo sapien
atttttcaaagtgaggtccgaagca

SEQ ID NO: 974527 - DNA, 25 bp, Homo sapien
gtgaggtccgaagcactgcaaattt

SEQ ID NO: 974528 - DNA, 25 bp, Homo sapien
aaagtgaggtccgaagcactgcaaa

SEQ ID NO: 974529 - DNA, 25 bp, Homo sapien
gactaactctagtagcctggctgga

SEQ ID NO: 974530 - DNA, 25 bp, Homo sapien
atcaacgaagtaggtggacagcgcc

SEQ ID NO: 974531 - DNA, 25 bp, Homo sapien
cattcgggctttattctgtggacaa

SEQ ID NO: 974532 - DNA, 25 bp, Homo sapien
tatgtaatccaacgcacctaagcag

SEQ ID NO: 974533 - DNA, 25 bp, Homo sapien
gagtattgcacacagccaatcccac

SEQ ID NO: 974534 - DNA, 25 bp, Homo sapien
gtattgcacacagccaatcccacaa

SEQ ID NO: 974535 - DNA, 25 bp, Homo sapien
ctcgtgaggagtattgcacacagcc

SEQ ID NO: 974536 - DNA, 25 bp, Homo sapien
attgcacacagccaatcccacaagg

SEQ ID NO: 974537 - DNA, 25 bp, Homo sapien
aacaaaacacgattcatgctgttta

SEQ ID NO: 974538 - DNA, 25 bp, Homo sapien
tttactacggtttccatacatccag

SEQ ID NO: 974539 - DNA, 25 bp, Homo sapien
ctacggtttccatacatccagcacg

SEQ ID NO: 974540 - DNA, 25 bp, Homo sapien
ttcatgctgtttactacggtttcca

SEQ ID NO: 974541 - DNA, 25 bp, Homo sapien
caacacccgcgggaagtagggctat

SEQ ID NO: 974542 - DNA, 25 bp, Homo sapien
tagggctatcggactgagtctaccc

SEQ ID NO: 974543 - DNA, 25 bp, Homo sapien
gagcccgcgacagtaggggtcaaca

SEQ ID NO: 974544 - DNA, 25 bp, Homo sapien
atgcagaacgagtccccgaaaagca

SEQ ID NO: 974545 - DNA, 25 bp, Homo sapien
ggtgacgcacaaccctttgggaaca

SEQ ID NO: 974546 - DNA, 25 bp, Homo sapien
gacagcgccaacgactcggtgacgc

SEQ ID NO: 974547 - DNA, 25 bp, Homo sapien
gacctgctcaatcgaccaccgaggt

SEQ ID NO: 974548 - DNA, 25 bp, Homo sapien
caaccctttgggaacaattctcaga

SEQ ID NO: 974549 - DNA, 25 bp, Homo sapien
cctggaaacagcttagctccacccc

SEQ ID NO: 974550 - DNA, 25 bp, Homo sapien
gctccaccccttcaggatcgccaaa

SEQ ID NO: 974551 - DNA, 25 bp, Homo sapien
ccaccccttcaggatcgccaaagga

SEQ ID NO: 974552 - DNA, 25 bp, Homo sapien
caccctggaaacagcttagctccac

SEQ ID NO: 974553 - DNA, 25 bp, Homo sapien
gcagttctctaagggttctaaacag

SEQ ID NO: 974554 - DNA, 25 bp, Homo sapien
tcatttcattaatcaccctgtgaaa

SEQ ID NO: 974555 - DNA, 25 bp, Homo sapien
gaaatatcataataatatgtcccag

SEQ ID NO: 974556 - DNA, 25 bp, Homo sapien
cataataatatgtcccaggaaggcc

SEQ ID NO: 974557 - DNA, 25 bp, Homo sapien
ccaggaaggccaatcaaacaatttt

SEQ ID NO: 974558 - DNA, 25 bp, Homo sapien
gttttacagtgattttacagtgatt

SEQ ID NO: 974559 - DNA, 25 bp, Homo sapien
tacagtgattgtagaatttcttttt

SEQ ID NO: 974560 - DNA, 25 bp, Homo sapien
ttacagtgattttacagtgattgta

SEQ ID NO: 974561 - DNA, 25 bp, Homo sapien
tttacagtgattgtagaatttcttt

SEQ ID NO: 974562 - DNA, 25 bp, Homo sapien
tgtgctgatctgtgagggctttctc

SEQ ID NO: 974563 - DNA, 25 bp, Homo sapien
tataagagctgtgaccctagcaatc

SEQ ID NO: 974564 - DNA, 25 bp, Homo sapien
gataccacggttctagtcctcaagc

SEQ ID NO: 974565 - DNA, 25 bp, Homo sapien
taaatgctcatcgtaagtggaatct

SEQ ID NO: 974566 - DNA, 25 bp, Homo sapien
agaagacttgtaccaccaccttgct

SEQ ID NO: 974567 - DNA, 25 bp, Homo sapien
tgagccaaattagatccaagaagac

SEQ ID NO: 974568 - DNA, 25 bp, Homo sapien
tccaagaagacttgtaccaccacct

SEQ ID NO: 974569 - DNA, 25 bp, Homo sapien
tctctgagccaaattagatccaaga

SEQ ID NO: 974570 - DNA, 25 bp, Homo sapien
tagatgaaaatctccatctatattg

SEQ ID NO: 974571 - DNA, 25 bp, Homo sapien
ccatctatattgtaatggtaaaata

SEQ ID NO: 974572 - DNA, 25 bp, Homo sapien
ctgcaccagccatgaattctggggc

SEQ ID NO: 974573 - DNA, 25 bp, Homo sapien
caccagccatgaattctggggcaga

SEQ ID NO: 974574 - DNA, 25 bp, Homo sapien
tcattcttcccaaagggatcttttc

SEQ ID NO: 974575 - DNA, 25 bp, Homo sapien
tgcgagtttgggtgtgttctatgtc

SEQ ID NO: 974576 - DNA, 25 bp, Homo sapien
gcttttgctacatcttgcgagtttg

SEQ ID NO: 974577 - DNA, 25 bp, Homo sapien
gctacatcttgcgagtttgggtgtg

SEQ ID NO: 974578 - DNA, 25 bp, Homo sapien
catcttgcgagtttgggtgtgttct

SEQ ID NO: 974579 - DNA, 25 bp, Homo sapien
tgttctctggttgatcccttcaaca

SEQ ID NO: 974580 - DNA, 25 bp, Homo sapien
ctggttgatcccttcaacatggcac

SEQ ID NO: 974581 - DNA, 25 bp, Homo sapien
tctctggttgatcccttcaacatgg

SEQ ID NO: 974582 - DNA, 25 bp, Homo sapien
tcatttgttctctggttgatccctt

SEQ ID NO: 974583 - DNA, 25 bp, Homo sapien
agggtgggtagattgctcgaactca

SEQ ID NO: 974584 - DNA, 25 bp, Homo sapien
ccaacactttgaagggtgggtagat

SEQ ID NO: 974585 - DNA, 25 bp, Homo sapien
actttgaagggtgggtagattgctc

SEQ ID NO: 974586 - DNA, 25 bp, Homo sapien
aagggtgggtagattgctcgaactc

SEQ ID NO: 974587 - DNA, 25 bp, Homo sapien
ctcctccacagccttcttaggtctc

SEQ ID NO: 974588 - DNA, 25 bp, Homo sapien
ttctcctccacagccttcttaggtc

SEQ ID NO: 974589 - DNA, 25 bp, Homo sapien
cctccacagccttcttaggtctcat

SEQ ID NO: 974590 - DNA, 25 bp, Homo sapien
cttctcctccacagccttcttaggt

SEQ ID NO: 974591 - DNA, 25 bp, Homo sapien
gcctgtgacatcagtgctgttggag

SEQ ID NO: 974592 - DNA, 25 bp, Homo sapien
gagtaatgtcaacaacgtggattct

SEQ ID NO: 974593 - DNA, 25 bp, Homo sapien
gttcagtgctaatagatttggctca

SEQ ID NO: 974594 - DNA, 25 bp, Homo sapien
ctttgcttggctacatggcaactaa

SEQ ID NO: 974595 - DNA, 25 bp, Homo sapien
gcagctgaattggcaggtcctttgt

SEQ ID NO: 974596 - DNA, 25 bp, Homo sapien
aattgtgcgttaattccaagtggtt

SEQ ID NO: 974597 - DNA, 25 bp, Homo sapien
tgtgcgttaattccaagtggtttgg

SEQ ID NO: 974598 - DNA, 25 bp, Homo sapien
ttaaattgtgcgttaattccaagtg

SEQ ID NO: 974599 - DNA, 25 bp, Homo sapien
taattttagatacacagaagcacac

SEQ ID NO: 974600 - DNA, 25 bp, Homo sapien
tcttaatttaaccaccaactggata

SEQ ID NO: 974601 - DNA, 25 bp, Homo sapien
ggtaatactttaccgtgtgccagag

SEQ ID NO: 974602 - DNA, 25 bp, Homo sapien
gaccgcttatgtttcagttgtacaa

SEQ ID NO: 974603 - DNA, 25 bp, Homo sapien
tgggttaccttaatcagcacctttg

SEQ ID NO: 974604 - DNA, 25 bp, Homo sapien
gcttaaggcctacaacagagcagta

SEQ ID NO: 974605 - DNA, 25 bp, Homo sapien
catgaagttaatatcctggaggtgc

SEQ ID NO: 974606 - DNA, 25 bp, Homo sapien
tgttgtggaacccatgccaagtctt

SEQ ID NO: 974607 - DNA, 25 bp, Homo sapien
tgtcttcatgagttagcttggaagg

SEQ ID NO: 974608 - DNA, 25 bp, Homo sapien
gaagggatttcctaccatttgcatt

SEQ ID NO: 974609 - DNA, 25 bp, Homo sapien
cagtcatttattggttaagaatgtc

SEQ ID NO: 974610 - DNA, 25 bp, Homo sapien
gaagatggcccatttatgcagttat

SEQ ID NO: 974611 - DNA, 25 bp, Homo sapien
cagttgggcaattcagagagaggca

SEQ ID NO: 974612 - DNA, 25 bp, Homo sapien
tctaggccataaactctacgagtga

SEQ ID NO: 974613 - DNA, 25 bp, Homo sapien
ggatggcttgcctgctcccaaatga

SEQ ID NO: 974614 - DNA, 25 bp, Homo sapien
cagtacaggcccagactttgagtct

SEQ ID NO: 974615 - DNA, 25 bp, Homo sapien
tagaccagccctgtgtcaagcgatg

SEQ ID NO: 974616 - DNA, 25 bp, Homo sapien
gacatggtgtcgactctgatcaaac

SEQ ID NO: 974617 - DNA, 25 bp, Homo sapien
tcaagctgtgaaaaagggctcctat

SEQ ID NO: 974618 - DNA, 25 bp, Homo sapien
tcaagcgatggtcagcaatgcatga

SEQ ID NO: 974619 - DNA, 25 bp, Homo sapien
gaggatttgagtcatccaacaatga

SEQ ID NO: 974620 - DNA, 25 bp, Homo sapien
gttcaagcaaacactagatgatcac

SEQ ID NO: 974621 - DNA, 25 bp, Homo sapien
tagtttgcatgtatcgagcccaggt

SEQ ID NO: 974622 - DNA, 25 bp, Homo sapien
taccttactacagagatcttcccag

SEQ ID NO: 974623 - DNA, 25 bp, Homo sapien
gatggaggacccaatcttaggacca

SEQ ID NO: 974624 - DNA, 25 bp, Homo sapien
gctgaggctgggataccattttgaa

SEQ ID NO: 974625 - DNA, 25 bp, Homo sapien
cccaggaccaagaatgagcatgacg

SEQ ID NO: 974626 - DNA, 25 bp, Homo sapien
tgctgaaggagaacacgacgctgct

SEQ ID NO: 974627 - DNA, 25 bp, Homo sapien
cccagagaaaaagctcattaccaga

SEQ ID NO: 974628 - DNA, 25 bp, Homo sapien
cagagaaaaagctcattaccagaaa

SEQ ID NO: 974629 - DNA, 25 bp, Homo sapien
ctccactcccagagaaaaagctcat

SEQ ID NO: 974630 - DNA, 25 bp, Homo sapien
actcccagagaaaaagctcattacc

SEQ ID NO: 974631 - DNA, 25 bp, Homo sapien
ctttctaaaggactgcaagcaataa

SEQ ID NO: 974632 - DNA, 25 bp, Homo sapien
aatattacattctcacccaaaaagg

SEQ ID NO: 974633 - DNA, 25 bp, Homo sapien
tttgggtcctaagcatttgcctttc

SEQ ID NO: 974634 - DNA, 25 bp, Homo sapien
gatgtgttggtaactccgagttgta

SEQ ID NO: 974635 - DNA, 25 bp, Homo sapien
gggattactcaaacataccagttac

SEQ ID NO: 974636 - DNA, 25 bp, Homo sapien
gggatcagggatgagcaaaccagat

SEQ ID NO: 974637 - DNA, 25 bp, Homo sapien
agtggctgctggtttagttgcatga

SEQ ID NO: 974638 - DNA, 25 bp, Homo sapien
aatcagagtgtgacagcatttttct

SEQ ID NO: 974639 - DNA, 25 bp, Homo sapien
tgatgaccaaatgctcgggcaatgt

SEQ ID NO: 974640 - DNA, 25 bp, Homo sapien
gcaatgtagggtgactgccgccaat

SEQ ID NO: 974641 - DNA, 25 bp, Homo sapien
tacaatcacatgcatcagagtcaga

SEQ ID NO: 974642 - DNA, 25 bp, Homo sapien
tgccgccaatgagccaaaatacaat

SEQ ID NO: 974643 - DNA, 25 bp, Homo sapien
ggctttcagacaacgcacaggtata

SEQ ID NO: 974644 - DNA, 25 bp, Homo sapien
tgcaaaggctaccagacgaccattt

SEQ ID NO: 974645 - DNA, 25 bp, Homo sapien
ctttgaactcgaagaatgggtactc

SEQ ID NO: 974646 - DNA, 25 bp, Homo sapien
tttagctggagaatatacggaaggc

SEQ ID NO: 974647 - DNA, 25 bp, Homo sapien
gcctgtcaagatctgccaatacgag

SEQ ID NO: 974648 - DNA, 25 bp, Homo sapien
aaatcaatgcatgttcggttccgtg

SEQ ID NO: 974649 - DNA, 25 bp, Homo sapien
caaatcaagtgagcatcctggtgta

SEQ ID NO: 974650 - DNA, 25 bp, Homo sapien
aagaactctgacattgggaccacca

SEQ ID NO: 974651 - DNA, 25 bp, Homo sapien
tcatcatcctcaaaatcttcttcat

SEQ ID NO: 974652 - DNA, 25 bp, Homo sapien
cttcatcatcttcatcttcatcttc

SEQ ID NO: 974653 - DNA, 25 bp, Homo sapien
tcagtcttcccactcatcatcatcc

SEQ ID NO: 974654 - DNA, 25 bp, Homo sapien
tcatcatcttcatcttcatcttcat

SEQ ID NO: 974655 - DNA, 25 bp, Homo sapien
tcttaaagtcctcctgtggctacca

SEQ ID NO: 974656 - DNA, 25 bp, Homo sapien
ggctaccactgctatttgaatgaaa

SEQ ID NO: 974657 - DNA, 25 bp, Homo sapien
ttcataaactacttcctcagagagg

SEQ ID NO: 974658 - DNA, 25 bp, Homo sapien
tcttccccataatcagtaacggcct

SEQ ID NO: 974659 - DNA, 25 bp, Homo sapien
cagattttgctagacatgcttcaca

SEQ ID NO: 974660 - DNA, 25 bp, Homo sapien
taatttcatcatcaggtactaccac

SEQ ID NO: 974661 - DNA, 25 bp, Homo sapien
tttgaagaagtactggagctctagt

SEQ ID NO: 974662 - DNA, 25 bp, Homo sapien
catggtcagctctaaattgttacag

SEQ ID NO: 974663 - DNA, 25 bp, Homo sapien
ctatgtgctaggcaatctgcaggtt

SEQ ID NO: 974664 - DNA, 25 bp, Homo sapien
tctagcacatcatgttggagaagct

SEQ ID NO: 974665 - DNA, 25 bp, Homo sapien
tgctcaaggatcttaagacatggac

SEQ ID NO: 974666 - DNA, 25 bp, Homo sapien
aatggagggtaggtacaaatatgcc

SEQ ID NO: 974667 - DNA, 25 bp, Homo sapien
acttccattaatgcacccacaattc

SEQ ID NO: 974668 - DNA, 25 bp, Homo sapien
tcacttccattaatgcacccacaat

SEQ ID NO: 974669 - DNA, 25 bp, Homo sapien
ctttgctccttttctgcatcacttc

SEQ ID NO: 974670 - DNA, 25 bp, Homo sapien
gctccttttctgcatcacttccatt

SEQ ID NO: 974671 - DNA, 25 bp, Homo sapien
ggtgtagactcttggccatcagcca

SEQ ID NO: 974672 - DNA, 25 bp, Homo sapien
tggtgtagactcttggccatcagcc

SEQ ID NO: 974673 - DNA, 25 bp, Homo sapien
ggtggtgtagactcttggccatcag

SEQ ID NO: 974674 - DNA, 25 bp, Homo sapien
gttggtggtgtagactcttggccat

SEQ ID NO: 974675 - DNA, 25 bp, Homo sapien
ccaaggtaaaagctgggctgtggtc

SEQ ID NO: 974676 - DNA, 25 bp, Homo sapien
aatcaccttattatagctaaatgag

SEQ ID NO: 974677 - DNA, 25 bp, Homo sapien
gagttacgggaatgagaatgacaca

SEQ ID NO: 974678 - DNA, 25 bp, Homo sapien
gaatgacacaggaactagcagagat

SEQ ID NO: 974679 - DNA, 25 bp, Homo sapien
tcttcaactgctcttgacaggcctt

SEQ ID NO: 974680 - DNA, 25 bp, Homo sapien
ctgctcttgacaggcctttagtctg

SEQ ID NO: 974681 - DNA, 25 bp, Homo sapien
aactgctcttgacaggcctttagtc

SEQ ID NO: 974682 - DNA, 25 bp, Homo sapien
tcaactgctcttgacaggcctttag

SEQ ID NO: 974683 - DNA, 25 bp, Homo sapien
tacatgtaaagaaaagagctagata

SEQ ID NO: 974684 - DNA, 25 bp, Homo sapien
cagagtcttcttagatctatgctaa

SEQ ID NO: 974685 - DNA, 25 bp, Homo sapien
gaaagagaacagagatgactgttca

SEQ ID NO: 974686 - DNA, 25 bp, Homo sapien
tgactgttcataggtttaagtgtca

SEQ ID NO: 974687 - DNA, 25 bp, Homo sapien
ttatagggttaagaatgaattagca

SEQ ID NO: 974688 - DNA, 25 bp, Homo sapien
tttatagggttaagaatgaattagc

SEQ ID NO: 974689 - DNA, 25 bp, Homo sapien
atttatagggttaagaatgaattag

SEQ ID NO: 974690 - DNA, 25 bp, Homo sapien
gacactggccgactgttctgctcca

SEQ ID NO: 974691 - DNA, 25 bp, Homo sapien
gattttagttggataccctgtcgta

SEQ ID NO: 974692 - DNA, 25 bp, Homo sapien
tctcgtccagagcaggacactggcc

SEQ ID NO: 974693 - DNA, 25 bp, Homo sapien
taccctgtcgtatctggtctaacag

SEQ ID NO: 974694 - DNA, 25 bp, Homo sapien
gggactgctacacttggcctggaag

SEQ ID NO: 974695 - DNA, 25 bp, Homo sapien
tacatcctatttggcggtggtggag

SEQ ID NO: 974696 - DNA, 25 bp, Homo sapien
gagggactgctacacttggcctgga

SEQ ID NO: 974697 - DNA, 25 bp, Homo sapien
aggagggtacatcctatttggcggt

SEQ ID NO: 974698 - DNA, 25 bp, Homo sapien
aggaggacctgagttgtgtggaggg

SEQ ID NO: 974699 - DNA, 25 bp, Homo sapien
gaggaggacctgagttgtgtggagg

SEQ ID NO: 974700 - DNA, 25 bp, Homo sapien
ggaggaggacctgagttgtgtggag

SEQ ID NO: 974701 - DNA, 25 bp, Homo sapien
ctgtctttaagttgtgcctctgaga

SEQ ID NO: 974702 - DNA, 25 bp, Homo sapien
tcaacacctcctgttttttcaataa

SEQ ID NO: 974703 - DNA, 25 bp, Homo sapien
tgagattccacacatatcgaaaaga

SEQ ID NO: 974704 - DNA, 25 bp, Homo sapien
cctccgcagttcatttttaacagct

SEQ ID NO: 974705 - DNA, 25 bp, Homo sapien
ctgtatttggatcccaaccaacatg

SEQ ID NO: 974706 - DNA, 25 bp, Homo sapien
aaagcctgtatttggatcccaacca

SEQ ID NO: 974707 - DNA, 25 bp, Homo sapien
tggatcccaaccaacatgtccaatg

SEQ ID NO: 974708 - DNA, 25 bp, Homo sapien
atttggatcccaaccaacatgtcca

SEQ ID NO: 974709 - DNA, 25 bp, Homo sapien
gaaattgcttggtgttcctatatct

SEQ ID NO: 974710 - DNA, 25 bp, Homo sapien
ctatatctgccttggttaatctctt

SEQ ID NO: 974711 - DNA, 25 bp, Homo sapien
tggaaattgcttggtgttcctatat

SEQ ID NO: 974712 - DNA, 25 bp, Homo sapien
tcctatatctgccttggttaatctc

SEQ ID NO: 974713 - DNA, 25 bp, Homo sapien
ccagaactggcatccttaagtcaaa

SEQ ID NO: 974714 - DNA, 25 bp, Homo sapien
gcatacaccttgactatcagaagta

SEQ ID NO: 974715 - DNA, 25 bp, Homo sapien
taatagcctcatatccaacacattg

SEQ ID NO: 974716 - DNA, 25 bp, Homo sapien
taaagaatatgaacttccagctaga

SEQ ID NO: 974717 - DNA, 25 bp, Homo sapien
taagtgcaaggcagggtagacctat

SEQ ID NO: 974718 - DNA, 25 bp, Homo sapien
tagccctcaacgaaaaccctgggca

SEQ ID NO: 974719 - DNA, 25 bp, Homo sapien
taaactgtttgtgctaacaatgcag

SEQ ID NO: 974720 - DNA, 25 bp, Homo sapien
cctgggcaccaagtctcaagctttt

SEQ ID NO: 974721 - DNA, 25 bp, Homo sapien
ctttgtcgacggcccaaaaggtctg

SEQ ID NO: 974722 - DNA, 25 bp, Homo sapien
ttgtcgacggcccaaaaggtctgta

SEQ ID NO: 974723 - DNA, 25 bp, Homo sapien
tacaaagttattgtatagctcttgt

SEQ ID NO: 974724 - DNA, 25 bp, Homo sapien
gttattgtatagctcttgttcccac

SEQ ID NO: 974725 - DNA, 25 bp, Homo sapien
aagttattgtatagctcttgttccc

SEQ ID NO: 974726 - DNA, 25 bp, Homo sapien
tatatacaaagttattgtatagctc

SEQ ID NO: 974727 - DNA, 25 bp, Homo sapien
gcacttctttgaccacatacagttc

SEQ ID NO: 974728 - DNA, 25 bp, Homo sapien
gaccacatacagttccgatctgctg

SEQ ID NO: 974729 - DNA, 25 bp, Homo sapien
gttccgatctgctgcatataactgc

SEQ ID NO: 974730 - DNA, 25 bp, Homo sapien
tacagttccgatctgctgcatataa

SEQ ID NO: 974731 - DNA, 25 bp, Homo sapien
accacagcaccttgtaaagcctttt

SEQ ID NO: 974732 - DNA, 25 bp, Homo sapien
ctgaaaatgacataccacagcacct

SEQ ID NO: 974733 - DNA, 25 bp, Homo sapien
ctggcagtctgaaaatgacatacca

SEQ ID NO: 974734 - DNA, 25 bp, Homo sapien
tgacataccacagcaccttgtaaag

SEQ ID NO: 974735 - DNA, 25 bp, Homo sapien
gaaagtaaaggattgctggtgcatg

SEQ ID NO: 974736 - DNA, 25 bp, Homo sapien
tatgccagctaaatgatcctccaag

SEQ ID NO: 974737 - DNA, 25 bp, Homo sapien
tgggtattcctgaatgctagagcca

SEQ ID NO: 974738 - DNA, 25 bp, Homo sapien
ggatgaatttcccaatcagctgcta

SEQ ID NO: 974739 - DNA, 25 bp, Homo sapien
gagttcccatagtgcctaggaacct

SEQ ID NO: 974740 - DNA, 25 bp, Homo sapien
ggcctatccattgagttcccatagt

SEQ ID NO: 974741 - DNA, 25 bp, Homo sapien
cattgagttcccatagtgcctagga

SEQ ID NO: 974742 - DNA, 25 bp, Homo sapien
gacaaaggcctatccattgagttcc

SEQ ID NO: 974743 - DNA, 25 bp, Homo sapien
gaaagtcctagggataatctcatgc

SEQ ID NO: 974744 - DNA, 25 bp, Homo sapien
ctgacatgtacaatcaaggtgggca

SEQ ID NO: 974745 - DNA, 25 bp, Homo sapien
taaggtcaccactagccacaatggc

SEQ ID NO: 974746 - DNA, 25 bp, Homo sapien
cacaaaatgtctggctaacctagag

SEQ ID NO: 974747 - DNA, 25 bp, Homo sapien
gaactgttattacctttagcctcca

SEQ ID NO: 974748 - DNA, 25 bp, Homo sapien
tcccatgtagggtttgcttcaccaa

SEQ ID NO: 974749 - DNA, 25 bp, Homo sapien
catttgccggattgaactgagaggg

SEQ ID NO: 974750 - DNA, 25 bp, Homo sapien
tgttcaccctctaaagacaagggcc

SEQ ID NO: 974751 - DNA, 25 bp, Homo sapien
gaaagaataccattagtcatcaagg

SEQ ID NO: 974752 - DNA, 25 bp, Homo sapien
ccactaaatctatgggcaaaagacc

SEQ ID NO: 974753 - DNA, 25 bp, Homo sapien
caataagcactgaaagggtgaaaga

SEQ ID NO: 974754 - DNA, 25 bp, Homo sapien
caaaagacctgaagtgctacacaaa

SEQ ID NO: 974755 - DNA, 25 bp, Homo sapien
catataaagtgctcctccaagtcac

SEQ ID NO: 974756 - DNA, 25 bp, Homo sapien
gacaagaagaggcaattcacagaag

SEQ ID NO: 974757 - DNA, 25 bp, Homo sapien
cattagctagactgttccctctgta

SEQ ID NO: 974758 - DNA, 25 bp, Homo sapien
gaatagcactttagcacttggccaa

SEQ ID NO: 974759 - DNA, 25 bp, Homo sapien
catgtaacacctatcatatcactaa

SEQ ID NO: 974760 - DNA, 25 bp, Homo sapien
catccagaattaggattctagatgg

SEQ ID NO: 974761 - DNA, 25 bp, Homo sapien
gctaagagttggtaattctactact

SEQ ID NO: 974762 - DNA, 25 bp, Homo sapien
caaatgaatccccacagtaacctca

SEQ ID NO: 974763 - DNA, 25 bp, Homo sapien
taacaggaaatctaaactgagcact

SEQ ID NO: 974764 - DNA, 25 bp, Homo sapien
tcctcttcaattagcagccagggag

SEQ ID NO: 974765 - DNA, 25 bp, Homo sapien
tttacaaatctagacatgaaggctg

SEQ ID NO: 974766 - DNA, 25 bp, Homo sapien
tgagactagttaagaaatgtccctg

SEQ ID NO: 974767 - DNA, 25 bp, Homo sapien
gcaataagaaacgcagaatgagctc

SEQ ID NO: 974768 - DNA, 25 bp, Homo sapien
agcaataagaaacgcagaatgagct

SEQ ID NO: 974769 - DNA, 25 bp, Homo sapien
aagcaataagaaacgcagaatgagc

SEQ ID NO: 974770 - DNA, 25 bp, Homo sapien
caagcaataagaaacgcagaatgag

SEQ ID NO: 974771 - DNA, 25 bp, Homo sapien
tacaggtaagcacagaacaattagt

SEQ ID NO: 974772 - DNA, 25 bp, Homo sapien
tgtgtctggtatgtagaacacagca

SEQ ID NO: 974773 - DNA, 25 bp, Homo sapien
tgagcatatgcaaacattagtggtg

SEQ ID NO: 974774 - DNA, 25 bp, Homo sapien
tctgcctaaagttaatgtgtctggt

SEQ ID NO: 974775 - DNA, 25 bp, Homo sapien
ttattctccagcagctcgggaaggc

SEQ ID NO: 974776 - DNA, 25 bp, Homo sapien
ttctccagcagctcgggaaggcggc

SEQ ID NO: 974777 - DNA, 25 bp, Homo sapien
tcgggaaggcggcgcccgaccgcca

SEQ ID NO: 974778 - DNA, 25 bp, Homo sapien
agcagctcgggaaggcggcgcccga

SEQ ID NO: 974779 - DNA, 25 bp, Homo sapien
gaaagtgaagagggactcgttctcc

SEQ ID NO: 974780 - DNA, 25 bp, Homo sapien
cacacatttcttgccgaggaaagtg

SEQ ID NO: 974781 - DNA, 25 bp, Homo sapien
gaagagggactcgttctcctgcggg

SEQ ID NO: 974782 - DNA, 25 bp, Homo sapien
acatttcttgccgaggaaagtgaag

SEQ ID NO: 974783 - DNA, 25 bp, Homo sapien
ccacgttggtgaccctccgcggcgg

SEQ ID NO: 974784 - DNA, 25 bp, Homo sapien
gcggctgctgctggacggagctcat

SEQ ID NO: 974785 - DNA, 25 bp, Homo sapien
gcggcggctgctgctggacggagct

SEQ ID NO: 974786 - DNA, 25 bp, Homo sapien
cccacgttggtgaccctccgcggcg

SEQ ID NO: 974787 - DNA, 25 bp, Homo sapien
gtctcctccggcgagtgggcgagag

SEQ ID NO: 974788 - DNA, 25 bp, Homo sapien
gcgagtgggcgagagctcgttcccc

SEQ ID NO: 974789 - DNA, 25 bp, Homo sapien
cctccggcgagtgggcgagagctcg

SEQ ID NO: 974790 - DNA, 25 bp, Homo sapien
cggcgagtgggcgagagctcgttcc

SEQ ID NO: 974791 - DNA, 25 bp, Homo sapien
tcgagggaagcaggcgctgacggcg

SEQ ID NO: 974792 - DNA, 25 bp, Homo sapien
ggaggacgaggtcgagggaagcagg

SEQ ID NO: 974793 - DNA, 25 bp, Homo sapien
agaggcgccacatctcgcagctcct

SEQ ID NO: 974794 - DNA, 25 bp, Homo sapien
gcgctgacggcgagccaccttcgcg

SEQ ID NO: 974795 - DNA, 25 bp, Homo sapien
tcgttgtcctcgcactccggcgact

SEQ ID NO: 974796 - DNA, 25 bp, Homo sapien
ccggcgactgcgctaaactcccaac

SEQ ID NO: 974797 - DNA, 25 bp, Homo sapien
cgcccggccaggctagggccggatg

SEQ ID NO: 974798 - DNA, 25 bp, Homo sapien
ctagggccggatggtcgttgtcctc

SEQ ID NO: 974799 - DNA, 25 bp, Homo sapien
cggcggcggccgcacaatccaacat

SEQ ID NO: 974800 - DNA, 25 bp, Homo sapien
ggagcgcgccggaaacgcgcggctg

SEQ ID NO: 974801 - DNA, 25 bp, Homo sapien
gagaccacaggacggagggcgcggg

SEQ ID NO: 974802 - DNA, 25 bp, Homo sapien
gcgagaccacaggacggagggcgcg

SEQ ID NO: 974803 - DNA, 25 bp, Homo sapien
gcgcgccggaaacgcgcggctgcgg

SEQ ID NO: 974804 - DNA, 25 bp, Homo sapien
cctctggcgtctcggctcgtcggtt

SEQ ID NO: 974805 - DNA, 25 bp, Homo sapien
gaacccagctactgctgcttgaaga

SEQ ID NO: 974806 - DNA, 25 bp, Homo sapien
cgcggagctaagtggaatcccggtt

SEQ ID NO: 974807 - DNA, 25 bp, Homo sapien
gggcgcaggcttccaacttcgtact

SEQ ID NO: 974808 - DNA, 25 bp, Homo sapien
gaggcctgcgatctgaagactgaaa

SEQ ID NO: 974809 - DNA, 25 bp, Homo sapien
tgggcggacgtacacctttgcgaag

SEQ ID NO: 974810 - DNA, 25 bp, Homo sapien
tcttatttctcaagcgctgcagcgt

SEQ ID NO: 974811 - DNA, 25 bp, Homo sapien
tttgcgaagcgtcagtgaggaccca

SEQ ID NO: 974812 - DNA, 25 bp, Homo sapien
tcctcgccggcttcgataggagccg

SEQ ID NO: 974813 - DNA, 25 bp, Homo sapien
tctcaaactttgtcccaaacttcag

SEQ ID NO: 974814 - DNA, 25 bp, Homo sapien
tgtgctcctcgccggcttcgatagg

SEQ ID NO: 974815 - DNA, 25 bp, Homo sapien
tcgccggcttcgataggagccgcag

SEQ ID NO: 974816 - DNA, 25 bp, Homo sapien
gctctcagttccattgagagatagc

SEQ ID NO: 974817 - DNA, 25 bp, Homo sapien
ctctcagttccattgagagatagca

SEQ ID NO: 974818 - DNA, 25 bp, Homo sapien
aagattcttcaagtcgccaccagag

SEQ ID NO: 974819 - DNA, 25 bp, Homo sapien
ctcgggctgcgcaggagccccaagg

SEQ ID NO: 974820 - DNA, 25 bp, Homo sapien
agccccaaggcggtgcggaagctca

SEQ ID NO: 974821 - DNA, 25 bp, Homo sapien
ttcagtgtcgaaagggacctgagca

SEQ ID NO: 974822 - DNA, 25 bp, Homo sapien
tgacatgtaaggccctttaatatct

SEQ ID NO: 974823 - DNA, 25 bp, Homo sapien
catgacatgtaaggccctttaatat

SEQ ID NO: 974824 - DNA, 25 bp, Homo sapien
atgacatgtaaggccctttaatatc

SEQ ID NO: 974825 - DNA, 25 bp, Homo sapien
ggaagatcttttgccagctaccagc

SEQ ID NO: 974826 - DNA, 25 bp, Homo sapien
aaagtcatcctctgtagccaggtaa

SEQ ID NO: 974827 - DNA, 25 bp, Homo sapien
ttctcccaccttcattggaagatct

SEQ ID NO: 974828 - DNA, 25 bp, Homo sapien
tatggacactcttgatccataacaa

SEQ ID NO: 974829 - DNA, 25 bp, Homo sapien
ctagaaatcaatgcaacgatgggcg

SEQ ID NO: 974830 - DNA, 25 bp, Homo sapien
caggaagtctgaggaagctttatgc

SEQ ID NO: 974831 - DNA, 25 bp, Homo sapien
ggataagcctaagaagagcgtgatt

SEQ ID NO: 974832 - DNA, 25 bp, Homo sapien
catttgggaactggtaggataagcc

SEQ ID NO: 974833 - DNA, 25 bp, Homo sapien
gagaagttgcttaatacaactagaa

SEQ ID NO: 974834 - DNA, 25 bp, Homo sapien
aactcttgagatattgataatctag

SEQ ID NO: 974835 - DNA, 25 bp, Homo sapien
gaaaatgtgacataagcctcacact

SEQ ID NO: 974836 - DNA, 25 bp, Homo sapien
catttttcaccagttgagaagttgc

SEQ ID NO: 974837 - DNA, 25 bp, Homo sapien
ttattttggaatattcttactgttg

SEQ ID NO: 974838 - DNA, 25 bp, Homo sapien
cacagctgctgacacagagtccttg

SEQ ID NO: 974839 - DNA, 25 bp, Homo sapien
tcacttaatgaccagccaaaggaaa

SEQ ID NO: 974840 - DNA, 25 bp, Homo sapien
acagaagtttagaggcttcacagct

SEQ ID NO: 974841 - DNA, 25 bp, Homo sapien
tcctccatgctcaactcagccctag

SEQ ID NO: 974842 - DNA, 25 bp, Homo sapien
tcaagcccatgtggcctgtttgaag

SEQ ID NO: 974843 - DNA, 25 bp, Homo sapien
aactcagccctagcagccttctcca

SEQ ID NO: 974844 - DNA, 25 bp, Homo sapien
gcctgtttgaaggtaggctgccctg

SEQ ID NO: 974845 - DNA, 25 bp, Homo sapien
ttaatgcgtctgaatcccaaacagt

SEQ ID NO: 974846 - DNA, 25 bp, Homo sapien
ccttaatgcgtctgaatcccaaaca

SEQ ID NO: 974847 - DNA, 25 bp, Homo sapien
aatgcgtctgaatcccaaacagttt

SEQ ID NO: 974848 - DNA, 25 bp, Homo sapien
cttccttaatgcgtctgaatcccaa

SEQ ID NO: 974849 - DNA, 25 bp, Homo sapien
aggaggaggggcaattgcagtgaca

SEQ ID NO: 974850 - DNA, 25 bp, Homo sapien
ctaagagttcagtgtgtgtttattg

SEQ ID NO: 974851 - DNA, 25 bp, Homo sapien
ggcaattgcagtgacagcaaacttc

SEQ ID NO: 974852 - DNA, 25 bp, Homo sapien
gaggggcaattgcagtgacagcaaa

SEQ ID NO: 974853 - DNA, 25 bp, Homo sapien
tcttcggcactcaacatagtacatg

SEQ ID NO: 974854 - DNA, 25 bp, Homo sapien
taaatattggctcagtggccaggag

SEQ ID NO: 974855 - DNA, 25 bp, Homo sapien
ttctttataaatgggtcttcggcac

SEQ ID NO: 974856 - DNA, 25 bp, Homo sapien
cagttggtttgttgtgtgcccatcc

SEQ ID NO: 974857 - DNA, 25 bp, Homo sapien
caacagtagttgagcatggtttctt

SEQ ID NO: 974858 - DNA, 25 bp, Homo sapien
tgggtgagctggcccaaaacttcct

SEQ ID NO: 974859 - DNA, 25 bp, Homo sapien
ttcaacagtagttgagcatggtttc

SEQ ID NO: 974860 - DNA, 25 bp, Homo sapien
tttgccatgcactggagacggcctc

SEQ ID NO: 974861 - DNA, 25 bp, Homo sapien
ccatacaaggacttgtaacctccag

SEQ ID NO: 974862 - DNA, 25 bp, Homo sapien
ctgttcccatacaaggacttgtaac

SEQ ID NO: 974863 - DNA, 25 bp, Homo sapien
tcccatacaaggacttgtaacctcc

SEQ ID NO: 974864 - DNA, 25 bp, Homo sapien
atacaaggacttgtaacctccagaa

SEQ ID NO: 974865 - DNA, 25 bp, Homo sapien
gcatcaaccatcacttcaacacaga

SEQ ID NO: 974866 - DNA, 25 bp, Homo sapien
aaaattcctaactgcctgcagcaga

SEQ ID NO: 974867 - DNA, 25 bp, Homo sapien
taaatgtaggtgattctcaaaattc

SEQ ID NO: 974868 - DNA, 25 bp, Homo sapien
tctccatgtgaagatatgtacaccc

SEQ ID NO: 974869 - DNA, 25 bp, Homo sapien
tctggtaacaccgttttccattgct

SEQ ID NO: 974870 - DNA, 25 bp, Homo sapien
cttctggtaacaccgttttccattg

SEQ ID NO: 974871 - DNA, 25 bp, Homo sapien
tggtaacaccgttttccattgctca

SEQ ID NO: 974872 - DNA, 25 bp, Homo sapien
ggtaacaccgttttccattgctcag

SEQ ID NO: 974873 - DNA, 25 bp, Homo sapien
tggatcgagcttgatttatctgttg

SEQ ID NO: 974874 - DNA, 25 bp, Homo sapien
gcagctggatcgagcttgatttatc

SEQ ID NO: 974875 - DNA, 25 bp, Homo sapien
gaggagcctgttccgcctgggggaa

SEQ ID NO: 974876 - DNA, 25 bp, Homo sapien
gactgcagctggatcgagcttgatt

SEQ ID NO: 974877 - DNA, 25 bp, Homo sapien
tgctggcatggatcacagtctgacc

SEQ ID NO: 974878 - DNA, 25 bp, Homo sapien
gctcctgggtagcaatgcagtgtca

SEQ ID NO: 974879 - DNA, 25 bp, Homo sapien
tatgtcacacatggttcatcgtgca

SEQ ID NO: 974880 - DNA, 25 bp, Homo sapien
taactgggccagatcggtagtcctg

SEQ ID NO: 974881 - DNA, 25 bp, Homo sapien
cgggatctctttcagatgggcacta

SEQ ID NO: 974882 - DNA, 25 bp, Homo sapien
tcacacaggttgagggcactttctg

SEQ ID NO: 974883 - DNA, 25 bp, Homo sapien
ttagagagagcatggcgctactgac

SEQ ID NO: 974884 - DNA, 25 bp, Homo sapien
gatgaacctgttctccgggatctct

SEQ ID NO: 974885 - DNA, 25 bp, Homo sapien
gcatccattcgtgggaatccagtga

SEQ ID NO: 974886 - DNA, 25 bp, Homo sapien
ggccctcggctatgtaaggtaaaca

SEQ ID NO: 974887 - DNA, 25 bp, Homo sapien
ttcacttgtgtgctagacggaggca

SEQ ID NO: 974888 - DNA, 25 bp, Homo sapien
gatataatttcacttggccctcggc

SEQ ID NO: 974889 - DNA, 25 bp, Homo sapien
gaagaagatctcatccagaaagccg

SEQ ID NO: 974890 - DNA, 25 bp, Homo sapien
tagttagctggtacgtactgcaccc

SEQ ID NO: 974891 - DNA, 25 bp, Homo sapien
tacataaagaaggaccagagcgacg

SEQ ID NO: 974892 - DNA, 25 bp, Homo sapien
gaagtagagcttttccaccacgaaa

SEQ ID NO: 974893 - DNA, 25 bp, Homo sapien
gccgggctccggccgcagtagggac

SEQ ID NO: 974894 - DNA, 25 bp, Homo sapien
tcgccgccgggctccggccgcagta

SEQ ID NO: 974895 - DNA, 25 bp, Homo sapien
gcgccgggagggacggggagcgcgc

SEQ ID NO: 974896 - DNA, 25 bp, Homo sapien
gccgccgggctccggccgcagtagg

SEQ ID NO: 974897 - DNA, 25 bp, Homo sapien
cttctccagggcgaaatgggtgagc

SEQ ID NO: 974898 - DNA, 25 bp, Homo sapien
gggtgatcccgtgcatcccgtagaa

SEQ ID NO: 974899 - DNA, 25 bp, Homo sapien
aggagaagcctagcatccgcaggtc

SEQ ID NO: 974900 - DNA, 25 bp, Homo sapien
tcccgtagaagtagaggcgcatcca

SEQ ID NO: 974901 - DNA, 25 bp, Homo sapien
ggctcggaggctgtccgaacgcccg

SEQ ID NO: 974902 - DNA, 25 bp, Homo sapien
gggctcggaggctgtccgaacgccc

SEQ ID NO: 974903 - DNA, 25 bp, Homo sapien
cggcagcgggggctgatgcactcag

SEQ ID NO: 974904 - DNA, 25 bp, Homo sapien
gggcgcgcagggagctccgtcccgg

SEQ ID NO: 974905 - DNA, 25 bp, Homo sapien
cggctagcggaatccccccgccgtg

SEQ ID NO: 974906 - DNA, 25 bp, Homo sapien
ttccagtcccgggcgaggtgccgcc

SEQ ID NO: 974907 - DNA, 25 bp, Homo sapien
ctgcgcggcctaacgggcaccgcgg

SEQ ID NO: 974908 - DNA, 25 bp, Homo sapien
tgcgcggcctaacgggcaccgcggc

SEQ ID NO: 974909 - DNA, 25 bp, Homo sapien
gcggcctaacgggcaccgcggccca

SEQ ID NO: 974910 - DNA, 25 bp, Homo sapien
cctgcgcggcctaacgggcaccgcg

SEQ ID NO: 974911 - DNA, 25 bp, Homo sapien
gaaatgcagaagcttgtggaagccc

SEQ ID NO: 974912 - DNA, 25 bp, Homo sapien
ctgtgaggggaaatgcagaagcttg

SEQ ID NO: 974913 - DNA, 25 bp, Homo sapien
gccccatcccctccgctgcttagcc

SEQ ID NO: 974914 - DNA, 25 bp, Homo sapien
ttgtggaagccccatcccctccgct

SEQ ID NO: 974915 - DNA, 25 bp, Homo sapien
ctatttttcatcaggaaacattgct

SEQ ID NO: 974916 - DNA, 25 bp, Homo sapien
cattgcttccgttgagggttgtttc

SEQ ID NO: 974917 - DNA, 25 bp, Homo sapien
gaaacattgcttccgttgagggttg

SEQ ID NO: 974918 - DNA, 25 bp, Homo sapien
caggaaacattgcttccgttgaggg

SEQ ID NO: 974919 - DNA, 25 bp, Homo sapien
ttccagtctgaatcccaccctttta

SEQ ID NO: 974920 - DNA, 25 bp, Homo sapien
atagccaacttgcttgttctggaag

SEQ ID NO: 974921 - DNA, 25 bp, Homo sapien
tttattcttatagccaacttgcttg

SEQ ID NO: 974922 - DNA, 25 bp, Homo sapien
tcttatagccaacttgcttgttctg

SEQ ID NO: 974923 - DNA, 25 bp, Homo sapien
ctctgtgacgctacttttagattcc

SEQ ID NO: 974924 - DNA, 25 bp, Homo sapien
caagttcatctggtcctttggttga

SEQ ID NO: 974925 - DNA, 25 bp, Homo sapien
catgcttgctaatgcaatctctgtg

SEQ ID NO: 974926 - DNA, 25 bp, Homo sapien
ctttggttgaagttttcatgcttgc

SEQ ID NO: 974927 - DNA, 25 bp, Homo sapien
gattccatacctccagcttaagctc

SEQ ID NO: 974928 - DNA, 25 bp, Homo sapien
tgcttgattccatacctccagctta

SEQ ID NO: 974929 - DNA, 25 bp, Homo sapien
tcttgcttgattccatacctccagc

SEQ ID NO: 974930 - DNA, 25 bp, Homo sapien
ttgattccatacctccagcttaagc

SEQ ID NO: 974931 - DNA, 25 bp, Homo sapien
tctccagaagttgggctgatatcac

SEQ ID NO: 974932 - DNA, 25 bp, Homo sapien
gaataagggcatgtcaccatcctgg

SEQ ID NO: 974933 - DNA, 25 bp, Homo sapien
caaaggatgcaaatcaggaaaacca

SEQ ID NO: 974934 - DNA, 25 bp, Homo sapien
acatgaatgctctctggcacggaaa

SEQ ID NO: 974935 - DNA, 25 bp, Homo sapien
tcttctgacgacaactacagccttg

SEQ ID NO: 974936 - DNA, 25 bp, Homo sapien
gaaacctgtcacgtgctaaactgaa

SEQ ID NO: 974937 - DNA, 25 bp, Homo sapien
ctaaactgaacagggatgacagagg

SEQ ID NO: 974938 - DNA, 25 bp, Homo sapien
tacagccttggacgtgttggcctgc

SEQ ID NO: 974939 - DNA, 25 bp, Homo sapien
gtcctttcttctaactcattctcca

SEQ ID NO: 974940 - DNA, 25 bp, Homo sapien
tgtctgtcctttcttctaactcatt

SEQ ID NO: 974941 - DNA, 25 bp, Homo sapien
tctgtcctttcttctaactcattct

SEQ ID NO: 974942 - DNA, 25 bp, Homo sapien
cttacagttcagtaatttctgtctg

SEQ ID NO: 974943 - DNA, 25 bp, Homo sapien
tacagaccataacagccccaacatc

SEQ ID NO: 974944 - DNA, 25 bp, Homo sapien
ctggagtccgctcattgttacagac

SEQ ID NO: 974945 - DNA, 25 bp, Homo sapien
ggagtccgctcattgttacagacca

SEQ ID NO: 974946 - DNA, 25 bp, Homo sapien
gtccgctcattgttacagaccataa

SEQ ID NO: 974947 - DNA, 25 bp, Homo sapien
ttttccacagcactacagtattcct

SEQ ID NO: 974948 - DNA, 25 bp, Homo sapien
ctgcttgggcataaactgagagttt

SEQ ID NO: 974949 - DNA, 25 bp, Homo sapien
atcagcatgaaccttatcagaaagc

SEQ ID NO: 974950 - DNA, 25 bp, Homo sapien
ataatcagcatgaaccttatcagaa

SEQ ID NO: 974951 - DNA, 25 bp, Homo sapien
tctgggccacagtacactatttcat

SEQ ID NO: 974952 - DNA, 25 bp, Homo sapien
gaaagctgtttcgggttctgggcca

SEQ ID NO: 974953 - DNA, 25 bp, Homo sapien
caagtattagggagttgtactgtac

SEQ ID NO: 974954 - DNA, 25 bp, Homo sapien
cagtacactatttcatgcttgtgag

SEQ ID NO: 974955 - DNA, 25 bp, Homo sapien
agcctggctgctgggttaataatga

SEQ ID NO: 974956 - DNA, 25 bp, Homo sapien
cgagtaggaggtcttgtagcctggc

SEQ ID NO: 974957 - DNA, 25 bp, Homo sapien
tttggtacttcttgatttccacacc

SEQ ID NO: 974958 - DNA, 25 bp, Homo sapien
tcttgatttccacaccttgggtggc

SEQ ID NO: 974959 - DNA, 25 bp, Homo sapien
gtgcattgcctggctccacattgct

SEQ ID NO: 974960 - DNA, 25 bp, Homo sapien
agctgcagattgtgcattgcctggc

SEQ ID NO: 974961 - DNA, 25 bp, Homo sapien
gtccaagctgcagattgtgcattgc

SEQ ID NO: 974962 - DNA, 25 bp, Homo sapien
caagctgcagattgtgcattgcctg

SEQ ID NO: 974963 - DNA, 25 bp, Homo sapien
ctgtcccgttgctgcacatttccaa

SEQ ID NO: 974964 - DNA, 25 bp, Homo sapien
accacagccttctgtcccgttgctg

SEQ ID NO: 974965 - DNA, 25 bp, Homo sapien
gccttctgtcccgttgctgcacatt

SEQ ID NO: 974966 - DNA, 25 bp, Homo sapien
cacagccttctgtcccgttgctgca

SEQ ID NO: 974967 - DNA, 25 bp, Homo sapien
agggttactgctcttccatatacca

SEQ ID NO: 974968 - DNA, 25 bp, Homo sapien
gggttactgctcttccatataccat

SEQ ID NO: 974969 - DNA, 25 bp, Homo sapien
tttagggtagtaaagccattctgcc

SEQ ID NO: 974970 - DNA, 25 bp, Homo sapien
cattctgcctgatagtggtggtacg

SEQ ID NO: 974971 - DNA, 25 bp, Homo sapien
aaggtggccttgtgtctagagtagc

SEQ ID NO: 974972 - DNA, 25 bp, Homo sapien
tcttgctcggcaacacatagtgtag

SEQ ID NO: 974973 - DNA, 25 bp, Homo sapien
tcttgtcagagagggtcatcttaga

SEQ ID NO: 974974 - DNA, 25 bp, Homo sapien
taggctaaaccacgggcttttgatg

SEQ ID NO: 974975 - DNA, 25 bp, Homo sapien
tgtttcctggaatatcgtgaactac

SEQ ID NO: 974976 - DNA, 25 bp, Homo sapien
catcttagaaagattgggaccatag

SEQ ID NO: 974977 - DNA, 25 bp, Homo sapien
ttacaaaacgagtggtatcattcag

SEQ ID NO: 974978 - DNA, 25 bp, Homo sapien
tgtagaacatcatttgaacatgacc

SEQ ID NO: 974979 - DNA, 25 bp, Homo sapien
gctgtgtaataaatgccctaaaact

SEQ ID NO: 974980 - DNA, 25 bp, Homo sapien
caagggacattttatggcctgtgta

SEQ ID NO: 974981 - DNA, 25 bp, Homo sapien
aaactgagcatagcttagtgcggtc

SEQ ID NO: 974982 - DNA, 25 bp, Homo sapien
gacgattgcttgtctcagttgcttg

SEQ ID NO: 974983 - DNA, 25 bp, Homo sapien
caattctgagattgcaggatcattc

SEQ ID NO: 974984 - DNA, 25 bp, Homo sapien
tagtgcggtcttccagttcagggac

SEQ ID NO: 974985 - DNA, 25 bp, Homo sapien
ctgacattggaataatgcagaacac

SEQ ID NO: 974986 - DNA, 25 bp, Homo sapien
gctgaagagctcgagatttatcatc

SEQ ID NO: 974987 - DNA, 25 bp, Homo sapien
taatgcagaacacttgattcaggtc

SEQ ID NO: 974988 - DNA, 25 bp, Homo sapien
gagctcgagatttatcatccaagga

SEQ ID NO: 974989 - DNA, 25 bp, Homo sapien
tgagcactggaaacctggtgagttc

SEQ ID NO: 974990 - DNA, 25 bp, Homo sapien
tgcttctcagccagttgagtcacgg

SEQ ID NO: 974991 - DNA, 25 bp, Homo sapien
tcttctgagacagagaatgttccat

SEQ ID NO: 974992 - DNA, 25 bp, Homo sapien
tgagtcacgggcaaaatgagtttta

SEQ ID NO: 974993 - DNA, 25 bp, Homo sapien
atccaggaagagaacaaaaagttgt

SEQ ID NO: 974994 - DNA, 25 bp, Homo sapien
cccaacatccaggaagagaacaaaa

SEQ ID NO: 974995 - DNA, 25 bp, Homo sapien
acatccaggaagagaacaaaaagtt

SEQ ID NO: 974996 - DNA, 25 bp, Homo sapien
caacatccaggaagagaacaaaaag

SEQ ID NO: 974997 - DNA, 25 bp, Homo sapien
tccaaatttcaggtttatgcctgtg

SEQ ID NO: 974998 - DNA, 25 bp, Homo sapien
cattccaaatttcaggtttatgcct

SEQ ID NO: 974999 - DNA, 25 bp, Homo sapien
ttccaaatttcaggtttatgcctgt

SEQ ID NO: 975000 - DNA, 25 bp, Homo sapien
acagctgcaagcattccaaatttca

SEQ ID NO: 975001 - DNA, 25 bp, Homo sapien
gaaggtaaagatctcattacacatt

SEQ ID NO: 975002 - DNA, 25 bp, Homo sapien
aaggtaaagatctcattacacatta

SEQ ID NO: 975003 - DNA, 25 bp, Homo sapien
tctgcattatttgatgaagccatca

SEQ ID NO: 975004 - DNA, 25 bp, Homo sapien
attttgacccacttgtaattgtttg

SEQ ID NO: 975005 - DNA, 25 bp, Homo sapien
ggaccttcagaatgtgtcacctttc

SEQ ID NO: 975006 - DNA, 25 bp, Homo sapien
tgtcacctttccaatcttacctggg

SEQ ID NO: 975007 - DNA, 25 bp, Homo sapien
gctggagtaggaagggctatcatat

SEQ ID NO: 975008 - DNA, 25 bp, Homo sapien
gcatgctttacatagggaccttcag

SEQ ID NO: 975009 - DNA, 25 bp, Homo sapien
tacttgacagtgaattccttgtgga

SEQ ID NO: 975010 - DNA, 25 bp, Homo sapien
tttaagacatggcaagtagtggaat

SEQ ID NO: 975011 - DNA, 25 bp, Homo sapien
gcaagtagtggaataattatgtgct

SEQ ID NO: 975012 - DNA, 25 bp, Homo sapien
agttgcacagtttctagcatgtctt

SEQ ID NO: 975013 - DNA, 25 bp, Homo sapien
gatgctggttgccacatatgtttaa

SEQ ID NO: 975014 - DNA, 25 bp, Homo sapien
acggtgccaatagtttgcttgatgc

SEQ ID NO: 975015 - DNA, 25 bp, Homo sapien
aatgtgacacggagataccaacgct

SEQ ID NO: 975016 - DNA, 25 bp, Homo sapien
cacggagataccaacgctgttggaa

SEQ ID NO: 975017 - DNA, 25 bp, Homo sapien
gggtcagtgttagcccatggccacc

SEQ ID NO: 975018 - DNA, 25 bp, Homo sapien
ccaccattacccctggaaacagagc

SEQ ID NO: 975019 - DNA, 25 bp, Homo sapien
gctttaggtcttccaggactctgtt

SEQ ID NO: 975020 - DNA, 25 bp, Homo sapien
cctggaaacagagcttgctttaggt

SEQ ID NO: 975021 - DNA, 25 bp, Homo sapien
tttcctggtatcatcctgcagaagt

SEQ ID NO: 975022 - DNA, 25 bp, Homo sapien
ttcctggtatcatcctgcagaagtt

SEQ ID NO: 975023 - DNA, 25 bp, Homo sapien
tgtttcggttccataatgaaaggtc

SEQ ID NO: 975024 - DNA, 25 bp, Homo sapien
aggtgtttcctaccgtctgggtctg

SEQ ID NO: 975025 - DNA, 25 bp, Homo sapien
ggtcttggaatcacaggttgatgta

SEQ ID NO: 975026 - DNA, 25 bp, Homo sapien
taatagtgcatatcattcccatcac

SEQ ID NO: 975027 - DNA, 25 bp, Homo sapien
ttttgcattcaaataggcccagtct

SEQ ID NO: 975028 - DNA, 25 bp, Homo sapien
gccagatttgagctaggcacgccaa

SEQ ID NO: 975029 - DNA, 25 bp, Homo sapien
cagtctcaagaagatgtacgccaga

SEQ ID NO: 975030 - DNA, 25 bp, Homo sapien
agctaggcacgccaatgttattttt

SEQ ID NO: 975031 - DNA, 25 bp, Homo sapien
caaacatctgggttgtgggctccca

SEQ ID NO: 975032 - DNA, 25 bp, Homo sapien
ggagacagtgagcatcaaacatctg

SEQ ID NO: 975033 - DNA, 25 bp, Homo sapien
tacacttccatgagattatccagaa

SEQ ID NO: 975034 - DNA, 25 bp, Homo sapien
actggaatctgcaatagtaacaaag

SEQ ID NO: 975035 - DNA, 25 bp, Homo sapien
gattatttgcttgggtacaccatcc

SEQ ID NO: 975036 - DNA, 25 bp, Homo sapien
tggaaatggagacagtacaatctat

SEQ ID NO: 975037 - DNA, 25 bp, Homo sapien
tggtacatctcacttgtcaagctgg

SEQ ID NO: 975038 - DNA, 25 bp, Homo sapien
caaggattccatgatgaggtggtac

SEQ ID NO: 975039 - DNA, 25 bp, Homo sapien
taaatactggctaaataatgcatcg

SEQ ID NO: 975040 - DNA, 25 bp, Homo sapien
taagagcagctctcaatcagcgact

SEQ ID NO: 975041 - DNA, 25 bp, Homo sapien
taactatctggcactttcggtggga

SEQ ID NO: 975042 - DNA, 25 bp, Homo sapien
aagcattgtagtctgcagagtggcc

SEQ ID NO: 975043 - DNA, 25 bp, Homo sapien
aagagagagtcaggacatgtgttac

SEQ ID NO: 975044 - DNA, 25 bp, Homo sapien
catgtgttacttcgtcaatctcttg

SEQ ID NO: 975045 - DNA, 25 bp, Homo sapien
tcatcaacatagaaagcccgcaggg

SEQ ID NO: 975046 - DNA, 25 bp, Homo sapien
cccgcagggataaagagagagtcag

SEQ ID NO: 975047 - DNA, 25 bp, Homo sapien
tctgtcctacttcaggttcactcat

SEQ ID NO: 975048 - DNA, 25 bp, Homo sapien
tatgtttctgtcctacttcaggttc

SEQ ID NO: 975049 - DNA, 25 bp, Homo sapien
tgtttctgtcctacttcaggttcac

SEQ ID NO: 975050 - DNA, 25 bp, Homo sapien
tacccctatgtttctgtcctacttc

SEQ ID NO: 975051 - DNA, 25 bp, Homo sapien
tgcataatcctcaaagggtcaaacc

SEQ ID NO: 975052 - DNA, 25 bp, Homo sapien
tcatctagagaaccacttgcatcaa

SEQ ID NO: 975053 - DNA, 25 bp, Homo sapien
aaaccctccgagatcgtcatctaga

SEQ ID NO: 975054 - DNA, 25 bp, Homo sapien
cacttgcatcaaaattatctgctgc

SEQ ID NO: 975055 - DNA, 25 bp, Homo sapien
ttcatccaaaaccagtgtatctctt

SEQ ID NO: 975056 - DNA, 25 bp, Homo sapien
aaaagaaattcatccaaaaccagtg

SEQ ID NO: 975057 - DNA, 25 bp, Homo sapien
gtttgattgatttcccctctgccac

SEQ ID NO: 975058 - DNA, 25 bp, Homo sapien
aaattcatccaaaaccagtgtatct

SEQ ID NO: 975059 - DNA, 25 bp, Homo sapien
tcaatttacactaatggcgacagtc

SEQ ID NO: 975060 - DNA, 25 bp, Homo sapien
tcagaaggccctggcgcaggaatct

SEQ ID NO: 975061 - DNA, 25 bp, Homo sapien
gcgacagtcttaaatttgccacatc

SEQ ID NO: 975062 - DNA, 25 bp, Homo sapien
taggattggctgcataagaatcacc

SEQ ID NO: 975063 - DNA, 25 bp, Homo sapien
acaactccatcaaaaagtaggcaaa

SEQ ID NO: 975064 - DNA, 25 bp, Homo sapien
aatttttgcaacctactcgtctgac

SEQ ID NO: 975065 - DNA, 25 bp, Homo sapien
aaacaactccatcaaaaagtaggca

SEQ ID NO: 975066 - DNA, 25 bp, Homo sapien
aaaatttttgcaacctactcgtctg

SEQ ID NO: 975067 - DNA, 25 bp, Homo sapien
ggaggcagaggattgcatcaattcc

SEQ ID NO: 975068 - DNA, 25 bp, Homo sapien
taccgtaagcagatatgttgttcag

SEQ ID NO: 975069 - DNA, 25 bp, Homo sapien
caaaactatatacaatgctcctgtg

SEQ ID NO: 975070 - DNA, 25 bp, Homo sapien
tcctgcattccctgaagaatcatta

SEQ ID NO: 975071 - DNA, 25 bp, Homo sapien
gattttgcatctggacttagtgggc

SEQ ID NO: 975072 - DNA, 25 bp, Homo sapien
gatgtctaccagattctaacccaga

SEQ ID NO: 975073 - DNA, 25 bp, Homo sapien
tctgaagttcagagctactacggtc

SEQ ID NO: 975074 - DNA, 25 bp, Homo sapien
gattatctggcaaccagtggcatgt

SEQ ID NO: 975075 - DNA, 25 bp, Homo sapien
cataggaaaatgacagggcttattg

SEQ ID NO: 975076 - DNA, 25 bp, Homo sapien
aggaaaatgacagggcttattgttc

SEQ ID NO: 975077 - DNA, 25 bp, Homo sapien
taggaaaatgacagggcttattgtt

SEQ ID NO: 975078 - DNA, 25 bp, Homo sapien
ataggaaaatgacagggcttattgt

SEQ ID NO: 975079 - DNA, 25 bp, Homo sapien
tgctgaacctcacttagggtgaaaa

SEQ ID NO: 975080 - DNA, 25 bp, Homo sapien
aagagttttgactttatgctgaaaa

SEQ ID NO: 975081 - DNA, 25 bp, Homo sapien
gagatcaggaaaggcgttagcaatt

SEQ ID NO: 975082 - DNA, 25 bp, Homo sapien
gggtgaaaagcgtcaggagaagaaa

SEQ ID NO: 975083 - DNA, 25 bp, Homo sapien
tatgctagatgtactggaataggat

SEQ ID NO: 975084 - DNA, 25 bp, Homo sapien
tgtactggaataggatatggcagga

SEQ ID NO: 975085 - DNA, 25 bp, Homo sapien
cccagggagcagataggaaggcggt

SEQ ID NO: 975086 - DNA, 25 bp, Homo sapien
gataatcccgatgagaaatgaggag

SEQ ID NO: 975087 - DNA, 25 bp, Homo sapien
ggtgaattcaaaagcccctatggga

SEQ ID NO: 975088 - DNA, 25 bp, Homo sapien
caaaagatagcctgccaaagcttca

SEQ ID NO: 975089 - DNA, 25 bp, Homo sapien
gatccttgggtatacgagaacctgt

SEQ ID NO: 975090 - DNA, 25 bp, Homo sapien
atacgagaacctgtctgccaccttg

SEQ ID NO: 975091 - DNA, 25 bp, Homo sapien
gacatgaaactgtaatattaccaga

SEQ ID NO: 975092 - DNA, 25 bp, Homo sapien
aaagcagttttcatcaaaacagcat

SEQ ID NO: 975093 - DNA, 25 bp, Homo sapien
gtatgacatgaaactgtaatattac

SEQ ID NO: 975094 - DNA, 25 bp, Homo sapien
taaatgtatgacatgaaactgtaat

SEQ ID NO: 975095 - DNA, 25 bp, Homo sapien
tattctcacattcagccggtagtgc

SEQ ID NO: 975096 - DNA, 25 bp, Homo sapien
tagtccaacgttcaattgagtctgc

SEQ ID NO: 975097 - DNA, 25 bp, Homo sapien
tgtgctctcgaatgcagccaaattc

SEQ ID NO: 975098 - DNA, 25 bp, Homo sapien
tttggccacagccttcgggttcaag

SEQ ID NO: 975099 - DNA, 25 bp, Homo sapien
caatgacgatctcacttgtggccac

SEQ ID NO: 975100 - DNA, 25 bp, Homo sapien
tccgtgtcttacacaggcattcagc

SEQ ID NO: 975101 - DNA, 25 bp, Homo sapien
gctccagtgaagctcagtaatacag

SEQ ID NO: 975102 - DNA, 25 bp, Homo sapien
tctccataaacaagcctgtaggtgt

SEQ ID NO: 975103 - DNA, 25 bp, Homo sapien
ggtaacagggaattgcagcacgaga

SEQ ID NO: 975104 - DNA, 25 bp, Homo sapien
aacagggaattgcagcacgagaaac

SEQ ID NO: 975105 - DNA, 25 bp, Homo sapien
tggtaacagggaattgcagcacgag

SEQ ID NO: 975106 - DNA, 25 bp, Homo sapien
cttggtaacagggaattgcagcacg

SEQ ID NO: 975107 - DNA, 25 bp, Homo sapien
acatccaacgtactctgctagtgaa

SEQ ID NO: 975108 - DNA, 25 bp, Homo sapien
cagatggaaatgctacgtacgatac

SEQ ID NO: 975109 - DNA, 25 bp, Homo sapien
ccctccagtggtgtgttactcagaa

SEQ ID NO: 975110 - DNA, 25 bp, Homo sapien
tgtgtgctaacaggagtgaatttac

SEQ ID NO: 975111 - DNA, 25 bp, Homo sapien
gcagagctgggatactatttctcca

SEQ ID NO: 975112 - DNA, 25 bp, Homo sapien
cctattattagatggccttggtgca

SEQ ID NO: 975113 - DNA, 25 bp, Homo sapien
caagttgatcttcctattgcagagc

SEQ ID NO: 975114 - DNA, 25 bp, Homo sapien
gctttttcatgatcagactgtcccc

SEQ ID NO: 975115 - DNA, 25 bp, Homo sapien
tatgccgagtagaacagaaatcaac

SEQ ID NO: 975116 - DNA, 25 bp, Homo sapien
tgtcactaggtcatggtctctgcca

SEQ ID NO: 975117 - DNA, 25 bp, Homo sapien
cagagtgctttacgtaggattcaca

SEQ ID NO: 975118 - DNA, 25 bp, Homo sapien
ccacctgagttagacatgtgtccca

SEQ ID NO: 975119 - DNA, 25 bp, Homo sapien
aaggcaattagaagatttattgaat

SEQ ID NO: 975120 - DNA, 25 bp, Homo sapien
taaggcaattagaagatttattgaa

SEQ ID NO: 975121 - DNA, 25 bp, Homo sapien
ttaaggcaattagaagatttattga

SEQ ID NO: 975122 - DNA, 25 bp, Homo sapien
tttaaggcaattagaagatttattg

SEQ ID NO: 975123 - DNA, 25 bp, Homo sapien
tccaagtacaaatcatctcacaata

SEQ ID NO: 975124 - DNA, 25 bp, Homo sapien
tacaacatactttcaatcacaactc

SEQ ID NO: 975125 - DNA, 25 bp, Homo sapien
taatctaaaactattggccttctca

SEQ ID NO: 975126 - DNA, 25 bp, Homo sapien
aaataacctacaaaatcacattgct

SEQ ID NO: 975127 - DNA, 25 bp, Homo sapien
tttcacgggatatgaaaatcaaaca

SEQ ID NO: 975128 - DNA, 25 bp, Homo sapien
aatctgacccaaccaagtactgtcc

SEQ ID NO: 975129 - DNA, 25 bp, Homo sapien
ataaatctgacccaaccaagtactg

SEQ ID NO: 975130 - DNA, 25 bp, Homo sapien
aactttcacgggatatgaaaatcaa

SEQ ID NO: 975131 - DNA, 25 bp, Homo sapien
tcacggcgtatggtactgaaaggcg

SEQ ID NO: 975132 - DNA, 25 bp, Homo sapien
ggattttcctcgcagtcactagaga

SEQ ID NO: 975133 - DNA, 25 bp, Homo sapien
tcagctggcggagaacaacttctgg

SEQ ID NO: 975134 - DNA, 25 bp, Homo sapien
tacatctgtacgttggtggcagcac

SEQ ID NO: 975135 - DNA, 25 bp, Homo sapien
taaggtgaaagtggtgactcccaga

SEQ ID NO: 975136 - DNA, 25 bp, Homo sapien
gagcacataaggtgaaagtggtgac

SEQ ID NO: 975137 - DNA, 25 bp, Homo sapien
cacagagcacataaggtgaaagtgg

SEQ ID NO: 975138 - DNA, 25 bp, Homo sapien
cacataaggtgaaagtggtgactcc

SEQ ID NO: 975139 - DNA, 25 bp, Homo sapien
tgtgggggaacatagaagacattta

SEQ ID NO: 975140 - DNA, 25 bp, Homo sapien
tgtcccccgaaagatcaaagcacta

SEQ ID NO: 975141 - DNA, 25 bp, Homo sapien
cccccgaaagatcaaagcactagga

SEQ ID NO: 975142 - DNA, 25 bp, Homo sapien
ctgtgggggaacatagaagacattt

SEQ ID NO: 975143 - DNA, 25 bp, Homo sapien
gagggtcatggagtgcagaacattt

SEQ ID NO: 975144 - DNA, 25 bp, Homo sapien
acacactgtagtggtttgagggtca

SEQ ID NO: 975145 - DNA, 25 bp, Homo sapien
tccataaagatcagctagtccaatc

SEQ ID NO: 975146 - DNA, 25 bp, Homo sapien
taactgggctcaggacgtcagctga

SEQ ID NO: 975147 - DNA, 25 bp, Homo sapien
cactaggagatctagataaggagtc

SEQ ID NO: 975148 - DNA, 25 bp, Homo sapien
tctagataaggagtcagggtagtgc

SEQ ID NO: 975149 - DNA, 25 bp, Homo sapien
gagtcagggtagtgcagaaattccc

SEQ ID NO: 975150 - DNA, 25 bp, Homo sapien
tctgccactaggagatctagataag

SEQ ID NO: 975151 - DNA, 25 bp, Homo sapien
gagcactatgcttggtatcgagaaa

SEQ ID NO: 975152 - DNA, 25 bp, Homo sapien
taactgggagcctgaacttacatgg

SEQ ID NO: 975153 - DNA, 25 bp, Homo sapien
taaagacatctaagaacggctggcc

SEQ ID NO: 975154 - DNA, 25 bp, Homo sapien
gactaaatgattggagggctcctcc

SEQ ID NO: 975155 - DNA, 25 bp, Homo sapien
taatgaaaggtaatggcaaatgcat

SEQ ID NO: 975156 - DNA, 25 bp, Homo sapien
ctaactccaggagttacaaagtctt

SEQ ID NO: 975157 - DNA, 25 bp, Homo sapien
ctccaggagttacaaagtctttaat

SEQ ID NO: 975158 - DNA, 25 bp, Homo sapien
caggagttacaaagtctttaatgaa

SEQ ID NO: 975159 - DNA, 25 bp, Homo sapien
tccagaagggtcacaagagcaacag

SEQ ID NO: 975160 - DNA, 25 bp, Homo sapien
gacagctactttataccccgatgag

SEQ ID NO: 975161 - DNA, 25 bp, Homo sapien
cagctagcgcttgggatgcagttgc

SEQ ID NO: 975162 - DNA, 25 bp, Homo sapien
cctgcatggaaatgatacgggtcct

SEQ ID NO: 975163 - DNA, 25 bp, Homo sapien
tcttgatgcgaattggcttatcaga

SEQ ID NO: 975164 - DNA, 25 bp, Homo sapien
tcagatgcttttccgatataaaaag

SEQ ID NO: 975165 - DNA, 25 bp, Homo sapien
gaagacaatagtaaagataggccct

SEQ ID NO: 975166 - DNA, 25 bp, Homo sapien
gataggccctgaagatgggaattga

SEQ ID NO: 975167 - DNA, 25 bp, Homo sapien
gagtctaaagtatcgcccttgtcca

SEQ ID NO: 975168 - DNA, 25 bp, Homo sapien
gaaagtccattcatcgtgctcccct

SEQ ID NO: 975169 - DNA, 25 bp, Homo sapien
tgtgcttgagagattaatccaattc

SEQ ID NO: 975170 - DNA, 25 bp, Homo sapien
tttcctcgactccacaatggagtct

SEQ ID NO: 975171 - DNA, 25 bp, Homo sapien
ttgattctgacttccattaaataat

SEQ ID NO: 975172 - DNA, 25 bp, Homo sapien
tgattctgacttccattaaataatg

SEQ ID NO: 975173 - DNA, 25 bp, Homo sapien
cttgattctgacttccattaaataa

SEQ ID NO: 975174 - DNA, 25 bp, Homo sapien
tcccgaaaacagataaagccactag

SEQ ID NO: 975175 - DNA, 25 bp, Homo sapien
ctagataggtgcatccagcagcagt

SEQ ID NO: 975176 - DNA, 25 bp, Homo sapien
agataggtgcatccagcagcagttc

SEQ ID NO: 975177 - DNA, 25 bp, Homo sapien
aaagccactagcttgagagcccctg

SEQ ID NO: 975178 - DNA, 25 bp, Homo sapien
acatgaccgcgtaggctccatagga

SEQ ID NO: 975179 - DNA, 25 bp, Homo sapien
aggttgccaatgatgccggtcccga

SEQ ID NO: 975180 - DNA, 25 bp, Homo sapien
tcagctcgtggaagatgaccagcgg

SEQ ID NO: 975181 - DNA, 25 bp, Homo sapien
cataggactcctgggtcagcgggta

SEQ ID NO: 975182 - DNA, 25 bp, Homo sapien
acaagtttcgtttctggacgcaggg

SEQ ID NO: 975183 - DNA, 25 bp, Homo sapien
ggcgctggatcactgtaggtgcaca

SEQ ID NO: 975184 - DNA, 25 bp, Homo sapien
cagtaaaaaagatcgctggctccgg

SEQ ID NO: 975185 - DNA, 25 bp, Homo sapien
tcgggctcgcagaacgtctcttgca

SEQ ID NO: 975186 - DNA, 25 bp, Homo sapien
gtagcagaagcagtagccgcgacat

SEQ ID NO: 975187 - DNA, 25 bp, Homo sapien
acatgcgggcgagaagcgcgcccgg

SEQ ID NO: 975188 - DNA, 25 bp, Homo sapien
gcagaagcagtagccgcgacatgcg

SEQ ID NO: 975189 - DNA, 25 bp, Homo sapien
tagccgcgacatgcgggcgagaagc

SEQ ID NO: 975190 - DNA, 25 bp, Homo sapien
tagttaggatcgacacctgctgccg

SEQ ID NO: 975191 - DNA, 25 bp, Homo sapien
gatccagttgcaagccgaggtctct

SEQ ID NO: 975192 - DNA, 25 bp, Homo sapien
ccagctcgctggaaacacgttgcaa

SEQ ID NO: 975193 - DNA, 25 bp, Homo sapien
tcagccaagttgagtcccagcaagg

SEQ ID NO: 975194 - DNA, 25 bp, Homo sapien
cccctccaatctgttgcggctgatg

SEQ ID NO: 975195 - DNA, 25 bp, Homo sapien
tgttgcggctgatgcgcatgcccag

SEQ ID NO: 975196 - DNA, 25 bp, Homo sapien
tgggaacgggaatatgagagcggtc

SEQ ID NO: 975197 - DNA, 25 bp, Homo sapien
gctgatgcgcatgcccaggtctcag

SEQ ID NO: 975198 - DNA, 25 bp, Homo sapien
gaaagctcaggatgcaccattacct

SEQ ID NO: 975199 - DNA, 25 bp, Homo sapien
aaaattactcgaacagcactcccag

SEQ ID NO: 975200 - DNA, 25 bp, Homo sapien
tcgtaccacccagagcatagtgagg

SEQ ID NO: 975201 - DNA, 25 bp, Homo sapien
gagttgggaagcatcctaccatggg

SEQ ID NO: 975202 - DNA, 25 bp, Homo sapien
agacctgccatagctgatctgtcag

SEQ ID NO: 975203 - DNA, 25 bp, Homo sapien
ccctgcaggagagataaagcctctg

SEQ ID NO: 975204 - DNA, 25 bp, Homo sapien
gacagcatttgctcatgagccttcc

SEQ ID NO: 975205 - DNA, 25 bp, Homo sapien
acaatgcatggttgctaatgacagc

SEQ ID NO: 975206 - DNA, 25 bp, Homo sapien
ttcaccgcacaaaagaacttgagag

SEQ ID NO: 975207 - DNA, 25 bp, Homo sapien
gattcttgacttcaccgcacaaaag

SEQ ID NO: 975208 - DNA, 25 bp, Homo sapien
tgctggtgagcaggtacggattctt

SEQ ID NO: 975209 - DNA, 25 bp, Homo sapien
gagcaggtacggattcttgacttca

SEQ ID NO: 975210 - DNA, 25 bp, Homo sapien
caagacttgaactcacatcctttga

SEQ ID NO: 975211 - DNA, 25 bp, Homo sapien
ctgatagaatttgaagagccaagac

SEQ ID NO: 975212 - DNA, 25 bp, Homo sapien
gaactcacatcctttgattccaata

SEQ ID NO: 975213 - DNA, 25 bp, Homo sapien
gatagaatttgaagagccaagactt

SEQ ID NO: 975214 - DNA, 25 bp, Homo sapien
gagccttggtacaaaccctttctgc

SEQ ID NO: 975215 - DNA, 25 bp, Homo sapien
tcaagttggatacccagcgtggtcc

SEQ ID NO: 975216 - DNA, 25 bp, Homo sapien
gcgtggtcctcctactgaaacaaga

SEQ ID NO: 975217 - DNA, 25 bp, Homo sapien
caagagtgccagctataccaacaga

SEQ ID NO: 975218 - DNA, 25 bp, Homo sapien
caggctatcttcacccaacttgtta

SEQ ID NO: 975219 - DNA, 25 bp, Homo sapien
tgacagtgtactgaacgatgcaggc

SEQ ID NO: 975220 - DNA, 25 bp, Homo sapien
tgaatattggtagaaaggttgacag

SEQ ID NO: 975221 - DNA, 25 bp, Homo sapien
tggcttgtagctgaatattggtaga

SEQ ID NO: 975222 - DNA, 25 bp, Homo sapien
agagtctgaagtatgtctcctaaat

SEQ ID NO: 975223 - DNA, 25 bp, Homo sapien
agtctgaagtatgtctcctaaataa

SEQ ID NO: 975224 - DNA, 25 bp, Homo sapien
ttcagagtctgaagtatgtctccta

SEQ ID NO: 975225 - DNA, 25 bp, Homo sapien
ctttcagagtctgaagtatgtctcc

SEQ ID NO: 975226 - DNA, 25 bp, Homo sapien
tagcacttaagccatctgcggatgg

SEQ ID NO: 975227 - DNA, 25 bp, Homo sapien
tggactccaaacaagagcctgtgtg

SEQ ID NO: 975228 - DNA, 25 bp, Homo sapien
gaacagaaaaatggcggaaaggcac

SEQ ID NO: 975229 - DNA, 25 bp, Homo sapien
tactctcaagcctagaaacccacgg

SEQ ID NO: 975230 - DNA, 25 bp, Homo sapien
gcctgcttagtgagtttagataccc

SEQ ID NO: 975231 - DNA, 25 bp, Homo sapien
tcctggaatgggtagggttgacact

SEQ ID NO: 975232 - DNA, 25 bp, Homo sapien
gagaagacaggtcatcatgcccaga

SEQ ID NO: 975233 - DNA, 25 bp, Homo sapien
gatacccattccaagtaccagagag

SEQ ID NO: 975234 - DNA, 25 bp, Homo sapien
taagaagagacatggcctatcatca

SEQ ID NO: 975235 - DNA, 25 bp, Homo sapien
tcatgaagattcataggaagagttt

SEQ ID NO: 975236 - DNA, 25 bp, Homo sapien
gaacatatggcacctttggacctct

SEQ ID NO: 975237 - DNA, 25 bp, Homo sapien
acgtggagatcttgcaggctcacag

SEQ ID NO: 975238 - DNA, 25 bp, Homo sapien
gaaacacacctgttcaactgtaggg

SEQ ID NO: 975239 - DNA, 25 bp, Homo sapien
tatcctgagcacatcatcaacacgg

SEQ ID NO: 975240 - DNA, 25 bp, Homo sapien
catttttcagctcaacttagggcaa

SEQ ID NO: 975241 - DNA, 25 bp, Homo sapien
cagtacctgggatgtagacagccct

SEQ ID NO: 975242 - DNA, 25 bp, Homo sapien
gagactattagaaaaggataatatt

SEQ ID NO: 975243 - DNA, 25 bp, Homo sapien
agttaacatctcattcaattagttg

SEQ ID NO: 975244 - DNA, 25 bp, Homo sapien
aatagcggcatattttacatgagac

SEQ ID NO: 975245 - DNA, 25 bp, Homo sapien
gtaagttgtaatagcggcatatttt

SEQ ID NO: 975246 - DNA, 25 bp, Homo sapien
tcagcagtacttgtttaagcaggtc

SEQ ID NO: 975247 - DNA, 25 bp, Homo sapien
cttaaagtacactgtagcttgatca

SEQ ID NO: 975248 - DNA, 25 bp, Homo sapien
gatcagacacttatctcagcagtac

SEQ ID NO: 975249 - DNA, 25 bp, Homo sapien
gttgaggtgaaatagagaaatctct

SEQ ID NO: 975250 - DNA, 25 bp, Homo sapien
gaaggtgagtggcaacattttatgt

SEQ ID NO: 975251 - DNA, 25 bp, Homo sapien
aagaagctcaaacagggaaggtgag

SEQ ID NO: 975252 - DNA, 25 bp, Homo sapien
caacattgctgatacaaaactcagg

SEQ ID NO: 975253 - DNA, 25 bp, Homo sapien
cttgcacccagtaaaagccaagaga

SEQ ID NO: 975254 - DNA, 25 bp, Homo sapien
ccatttgtgacattgtatgacttga

SEQ ID NO: 975255 - DNA, 25 bp, Homo sapien
gaagcattccaaccacggatatgca

SEQ ID NO: 975256 - DNA, 25 bp, Homo sapien
aaatctgatagcaaatttgattatc

SEQ ID NO: 975257 - DNA, 25 bp, Homo sapien
cattgtatgacttgatgaagcattc

SEQ ID NO: 975258 - DNA, 25 bp, Homo sapien
gagtaatcactcactacttagtaaa

SEQ ID NO: 975259 - DNA, 25 bp, Homo sapien
tcatcaaaggttgatcatagagtaa

SEQ ID NO: 975260 - DNA, 25 bp, Homo sapien
taaaagtccacagagtacatatatg

SEQ ID NO: 975261 - DNA, 25 bp, Homo sapien
taactattttatccctgccactctc

SEQ ID NO: 975262 - DNA, 25 bp, Homo sapien
atatccatgatcatatccacacttt

SEQ ID NO: 975263 - DNA, 25 bp, Homo sapien
catatccatgatcatatccacactt

SEQ ID NO: 975264 - DNA, 25 bp, Homo sapien
gaaggtcatcatccatcagaacttc

SEQ ID NO: 975265 - DNA, 25 bp, Homo sapien
aggtcatcatccatcagaacttctg

SEQ ID NO: 975266 - DNA, 25 bp, Homo sapien
ccatcatcaagtgtaaaggtcataa

SEQ ID NO: 975267 - DNA, 25 bp, Homo sapien
catgagataggcttctagtactcct

SEQ ID NO: 975268 - DNA, 25 bp, Homo sapien
ggtcataacaaacacatattggagg

SEQ ID NO: 975269 - DNA, 25 bp, Homo sapien
tattggaggggtacaatacccagtg

SEQ ID NO: 975270 - DNA, 25 bp, Homo sapien
gattttgtatggatctcaaactaga

SEQ ID NO: 975271 - DNA, 25 bp, Homo sapien
gaagaaggaatccacgatgttttat

SEQ ID NO: 975272 - DNA, 25 bp, Homo sapien
tatcaaccagggaatttagattttg

SEQ ID NO: 975273 - DNA, 25 bp, Homo sapien
tatggatctcaaactagaacactgt

SEQ ID NO: 975274 - DNA, 25 bp, Homo sapien
cgagagtttgcaaatttcactgagt

SEQ ID NO: 975275 - DNA, 25 bp, Homo sapien
tggtgctgaaaggtccaaaagttcc

SEQ ID NO: 975276 - DNA, 25 bp, Homo sapien
tacactattaaacttgttcgagagt

SEQ ID NO: 975277 - DNA, 25 bp, Homo sapien
tcttcgtggccagatctcacaggaa

SEQ ID NO: 975278 - DNA, 25 bp, Homo sapien
gacaatcagcttagcattgacaaaa

SEQ ID NO: 975279 - DNA, 25 bp, Homo sapien
aaaggagtattctaacaaaacagtg

SEQ ID NO: 975280 - DNA, 25 bp, Homo sapien
tactttatatgtactaggttgtctg

SEQ ID NO: 975281 - DNA, 25 bp, Homo sapien
gataaatttatgaacgtgtgcttat

SEQ ID NO: 975282 - DNA, 25 bp, Homo sapien
gggttttagttgcaccatcctgaaa

SEQ ID NO: 975283 - DNA, 25 bp, Homo sapien
caaaatgaactgctacttttcgtcc

SEQ ID NO: 975284 - DNA, 25 bp, Homo sapien
ttatatccaaatcgccctcatgtgg

SEQ ID NO: 975285 - DNA, 25 bp, Homo sapien
tagacattcatttgaaagcgggaga

SEQ ID NO: 975286 - DNA, 25 bp, Homo sapien
gaaatagtcttctgggcttatatga

SEQ ID NO: 975287 - DNA, 25 bp, Homo sapien
atttagggcaatgaagtttaacaga

SEQ ID NO: 975288 - DNA, 25 bp, Homo sapien
aaatagtcttctgggcttatatgac

SEQ ID NO: 975289 - DNA, 25 bp, Homo sapien
gcaaatgacatttagggcaatgaag

SEQ ID NO: 975290 - DNA, 25 bp, Homo sapien
aatggcacatagtggtgtcctctcc

SEQ ID NO: 975291 - DNA, 25 bp, Homo sapien
tccaaatactgatgatctgtaagta

SEQ ID NO: 975292 - DNA, 25 bp, Homo sapien
ctcaattttgctcggatgcggtatt

SEQ ID NO: 975293 - DNA, 25 bp, Homo sapien
ttgtttcaaaatggcacatagtggt

SEQ ID NO: 975294 - DNA, 25 bp, Homo sapien
gcaccaggtgtgcttatggcaactg

SEQ ID NO: 975295 - DNA, 25 bp, Homo sapien
ttatcatcatcaacatgggctcatg

SEQ ID NO: 975296 - DNA, 25 bp, Homo sapien
gttctatcctaagccatttgacgag

SEQ ID NO: 975297 - DNA, 25 bp, Homo sapien
gagatagggtacatatgaacacaca

SEQ ID NO: 975298 - DNA, 25 bp, Homo sapien
gacatctttctacctcgtataatga

SEQ ID NO: 975299 - DNA, 25 bp, Homo sapien
gttgacatctttctacctcgtataa

SEQ ID NO: 975300 - DNA, 25 bp, Homo sapien
ctttctacctcgtataatgatactg

SEQ ID NO: 975301 - DNA, 25 bp, Homo sapien
cctcgtataatgatactgatccaga

SEQ ID NO: 975302 - DNA, 25 bp, Homo sapien
caatggagcgttgctgagagaaact

SEQ ID NO: 975303 - DNA, 25 bp, Homo sapien
cataatccttcgaaaatagcagagg

SEQ ID NO: 975304 - DNA, 25 bp, Homo sapien
taagacaacacggtactggcatcag

SEQ ID NO: 975305 - DNA, 25 bp, Homo sapien
taaataaatggtgagatatgccaca

SEQ ID NO: 975306 - DNA, 25 bp, Homo sapien
tgtcaatgttaaagattatccttac

SEQ ID NO: 975307 - DNA, 25 bp, Homo sapien
taaactgtcaatgttaaagattatc

SEQ ID NO: 975308 - DNA, 25 bp, Homo sapien
gaactaaactgtcaatgttaaagat

SEQ ID NO: 975309 - DNA, 25 bp, Homo sapien
aactgtcaatgttaaagattatcct

SEQ ID NO: 975310 - DNA, 25 bp, Homo sapien
gataacatctgaatgctgattggct

SEQ ID NO: 975311 - DNA, 25 bp, Homo sapien
tctgaatgctgattggctgtcaaat

SEQ ID NO: 975312 - DNA, 25 bp, Homo sapien
ttggaaagctgtcgtcaggttctga

SEQ ID NO: 975313 - DNA, 25 bp, Homo sapien
ggttctgattgacagataacatctg

SEQ ID NO: 975314 - DNA, 25 bp, Homo sapien
taactggtacctccatgaagatgaa

SEQ ID NO: 975315 - DNA, 25 bp, Homo sapien
gagttactttctggcaagaccctga

SEQ ID NO: 975316 - DNA, 25 bp, Homo sapien
ttttcagttgatccacatcagagtt

SEQ ID NO: 975317 - DNA, 25 bp, Homo sapien
ccgaccgtaactggtacctccatga

SEQ ID NO: 975318 - DNA, 25 bp, Homo sapien
ggtatgaaggctatagattctaaga

SEQ ID NO: 975319 - DNA, 25 bp, Homo sapien
gaagtttggtatgaaggctatagat

SEQ ID NO: 975320 - DNA, 25 bp, Homo sapien
aggctatagattctaagaaagcttc

SEQ ID NO: 975321 - DNA, 25 bp, Homo sapien
gctatagattctaagaaagcttcca

SEQ ID NO: 975322 - DNA, 25 bp, Homo sapien
cactccttgagttcaaacgtaagag

SEQ ID NO: 975323 - DNA, 25 bp, Homo sapien
tgcctgtaccaccacagtgtgaaac

SEQ ID NO: 975324 - DNA, 25 bp, Homo sapien
aaacggaattcaagccctctatttg

SEQ ID NO: 975325 - DNA, 25 bp, Homo sapien
aaaacttctgcatttgtgcctgtac

SEQ ID NO: 975326 - DNA, 25 bp, Homo sapien
gactgtatcacctatacatgtaacc

SEQ ID NO: 975327 - DNA, 25 bp, Homo sapien
aatttctagactgtatcacctatac

SEQ ID NO: 975328 - DNA, 25 bp, Homo sapien
tctagactgtatcacctatacatgt

SEQ ID NO: 975329 - DNA, 25 bp, Homo sapien
cacctatacatgtaaccatatataa

SEQ ID NO: 975330 - DNA, 25 bp, Homo sapien
caaggtcttgtattaagactctcca

SEQ ID NO: 975331 - DNA, 25 bp, Homo sapien
aagatggaaatggtgtcctggtgcc

SEQ ID NO: 975332 - DNA, 25 bp, Homo sapien
catgaacatggttatcgtagactaa

SEQ ID NO: 975333 - DNA, 25 bp, Homo sapien
tgtcagattttgtagccgatggatg

SEQ ID NO: 975334 - DNA, 25 bp, Homo sapien
tttgcccaagagctgacaagtcagg

SEQ ID NO: 975335 - DNA, 25 bp, Homo sapien
tactgcattggctgaacatcacaca

SEQ ID NO: 975336 - DNA, 25 bp, Homo sapien
tcaaacgtcaaagatgcaaagccag

SEQ ID NO: 975337 - DNA, 25 bp, Homo sapien
tagaagaaatgatgctccgtccact

SEQ ID NO: 975338 - DNA, 25 bp, Homo sapien
agagcaggcaagttagttttacatt

SEQ ID NO: 975339 - DNA, 25 bp, Homo sapien
gcctgtgaaagcgaacaatatctcc

SEQ ID NO: 975340 - DNA, 25 bp, Homo sapien
ggaagggcttcatagtttccactaa

SEQ ID NO: 975341 - DNA, 25 bp, Homo sapien
ggtccacaatagttacaactgagca

SEQ ID NO: 975342 - DNA, 25 bp, Homo sapien
gaacttcacaacaccatagacattg

SEQ ID NO: 975343 - DNA, 25 bp, Homo sapien
catagacattgacaattgtaccacc

SEQ ID NO: 975344 - DNA, 25 bp, Homo sapien
cagttcctttgcttagatatggggg

SEQ ID NO: 975345 - DNA, 25 bp, Homo sapien
gatatgggggcttaaagaacttcac

SEQ ID NO: 975346 - DNA, 25 bp, Homo sapien
ttaagttgattcaggggtgtatata

SEQ ID NO: 975347 - DNA, 25 bp, Homo sapien
taagttgattcaggggtgtatatat

SEQ ID NO: 975348 - DNA, 25 bp, Homo sapien
agttgattcaggggtgtatatatat

SEQ ID NO: 975349 - DNA, 25 bp, Homo sapien
cttaagttgattcaggggtgtatat

SEQ ID NO: 975350 - DNA, 25 bp, Homo sapien
gaaaaatctcttaaagatttgacat

SEQ ID NO: 975351 - DNA, 25 bp, Homo sapien
aatctcttaaagatttgacataaac

SEQ ID NO: 975352 - DNA, 25 bp, Homo sapien
tgattctgtagaaaaatctcttaaa

SEQ ID NO: 975353 - DNA, 25 bp, Homo sapien
gattctgtagaaaaatctcttaaag

SEQ ID NO: 975354 - DNA, 25 bp, Homo sapien
accatctctgcttgtagatgaagaa

SEQ ID NO: 975355 - DNA, 25 bp, Homo sapien
ccatctctgcttgtagatgaagaag

SEQ ID NO: 975356 - DNA, 25 bp, Homo sapien
tcaaaaatatgcaaggtttaccatc

SEQ ID NO: 975357 - DNA, 25 bp, Homo sapien
tatgcaaggtttaccatctctgctt

SEQ ID NO: 975358 - DNA, 25 bp, Homo sapien
taaatctagccactgcaatggtgtc

SEQ ID NO: 975359 - DNA, 25 bp, Homo sapien
aataaatctagccactgcaatggtg

SEQ ID NO: 975360 - DNA, 25 bp, Homo sapien
aaaaacaataaatctagccactgca

SEQ ID NO: 975361 - DNA, 25 bp, Homo sapien
aacaataaatctagccactgcaatg

SEQ ID NO: 975362 - DNA, 25 bp, Homo sapien
ctacaatatagccacagatgacaat

SEQ ID NO: 975363 - DNA, 25 bp, Homo sapien
tatagccacagatgacaataacgtc

SEQ ID NO: 975364 - DNA, 25 bp, Homo sapien
cagatgacaataacgtcccacttca

SEQ ID NO: 975365 - DNA, 25 bp, Homo sapien
gccacagatgacaataacgtcccac

SEQ ID NO: 975366 - DNA, 25 bp, Homo sapien
agtagaaaaacaggaagtcaaattg

SEQ ID NO: 975367 - DNA, 25 bp, Homo sapien
tattcaagtagaaaaacaggaagtc

SEQ ID NO: 975368 - DNA, 25 bp, Homo sapien
aaaaccccatcggtctcagctcaaa

SEQ ID NO: 975369 - DNA, 25 bp, Homo sapien
aaccccatcggtctcagctcaaaat

SEQ ID NO: 975370 - DNA, 25 bp, Homo sapien
cgataagttaaagaagagataagtg

SEQ ID NO: 975371 - DNA, 25 bp, Homo sapien
gctgttttatttccacgataagtta

SEQ ID NO: 975372 - DNA, 25 bp, Homo sapien
taattcaagtggcatatcagttctg

SEQ ID NO: 975373 - DNA, 25 bp, Homo sapien
tggctgtagggatccgaaatctact

SEQ ID NO: 975374 - DNA, 25 bp, Homo sapien
gctataattgtaacctggctgtagg

SEQ ID NO: 975375 - DNA, 25 bp, Homo sapien
tatgtaatttactcagcggctgaac

SEQ ID NO: 975376 - DNA, 25 bp, Homo sapien
tgagattaacttctgcatcgtaggc

SEQ ID NO: 975377 - DNA, 25 bp, Homo sapien
tcgtaggctcaaccttatttcacag

SEQ ID NO: 975378 - DNA, 25 bp, Homo sapien
cctcttgacggggacactcactagt

SEQ ID NO: 975379 - DNA, 25 bp, Homo sapien
cactagtgtcgatatctaattttaa

SEQ ID NO: 975380 - DNA, 25 bp, Homo sapien
gatctaaactaattcaatcccgggc

SEQ ID NO: 975381 - DNA, 25 bp, Homo sapien
gggacttggacttaactcctgtctg

SEQ ID NO: 975382 - DNA, 25 bp, Homo sapien
tgctgaacacagcaggctcgagata

SEQ ID NO: 975383 - DNA, 25 bp, Homo sapien
gtctggcacccactcaaatgaacac

SEQ ID NO: 975384 - DNA, 25 bp, Homo sapien
ctctagaaagaaccctaggaagagt

SEQ ID NO: 975385 - DNA, 25 bp, Homo sapien
actctagaaagaaccctaggaagag

SEQ ID NO: 975386 - DNA, 25 bp, Homo sapien
tactctagaaagaaccctaggaaga

SEQ ID NO: 975387 - DNA, 25 bp, Homo sapien
gacttcaccaaactccctatcagta

SEQ ID NO: 975388 - DNA, 25 bp, Homo sapien
ccctatcagtacacatccaatcagg

SEQ ID NO: 975389 - DNA, 25 bp, Homo sapien
ttattatgaagagtcattatgtgac

SEQ ID NO: 975390 - DNA, 25 bp, Homo sapien
gagtaactctatccaccatttcttt

SEQ ID NO: 975391 - DNA, 25 bp, Homo sapien
ttctttgcggaagcaccatggcgac

SEQ ID NO: 975392 - DNA, 25 bp, Homo sapien
gttctgtgtgtttgacagcaatgcc

SEQ ID NO: 975393 - DNA, 25 bp, Homo sapien
ttggctaaatcaactgcacgcctga

SEQ ID NO: 975394 - DNA, 25 bp, Homo sapien
caccccacttgcactttggctaaat

SEQ ID NO: 975395 - DNA, 25 bp, Homo sapien
tctctccaactagactacagatctt

SEQ ID NO: 975396 - DNA, 25 bp, Homo sapien
acagatctttcgaatcagagaacca

SEQ ID NO: 975397 - DNA, 25 bp, Homo sapien
aatcagagaaccatacttattcatc

SEQ ID NO: 975398 - DNA, 25 bp, Homo sapien
catacttattcatctctggattctc

SEQ ID NO: 975399 - DNA, 25 bp, Homo sapien
aagaattgaggtttgatgggaacag

SEQ ID NO: 975400 - DNA, 25 bp, Homo sapien
ttgaggtttgatgggaacagtatct

SEQ ID NO: 975401 - DNA, 25 bp, Homo sapien
ggtttgatgggaacagtatctgtga

SEQ ID NO: 975402 - DNA, 25 bp, Homo sapien
tgggaacagtatctgtgatgttcat

SEQ ID NO: 975403 - DNA, 25 bp, Homo sapien
gatgttgacatcttataaccaggcc

SEQ ID NO: 975404 - DNA, 25 bp, Homo sapien
tattgtctgacactcatccctgcag

SEQ ID NO: 975405 - DNA, 25 bp, Homo sapien
ggatttcgcacactgtcctcttggt

SEQ ID NO: 975406 - DNA, 25 bp, Homo sapien
taaccaggccagatagatgcagttt

SEQ ID NO: 975407 - DNA, 25 bp, Homo sapien
cgtccaagtctctatatttgcaggg

SEQ ID NO: 975408 - DNA, 25 bp, Homo sapien
gactgaacatgcttgacctaaaaac

SEQ ID NO: 975409 - DNA, 25 bp, Homo sapien
agttgattcccagagtagcctgcca

SEQ ID NO: 975410 - DNA, 25 bp, Homo sapien
cagacatagatagcatgaagcctaa

SEQ ID NO: 975411 - DNA, 25 bp, Homo sapien
tgaggtccgggattcaagttccaac

SEQ ID NO: 975412 - DNA, 25 bp, Homo sapien
tctccagttctgtatcaggtagcgg

SEQ ID NO: 975413 - DNA, 25 bp, Homo sapien
cataaaatagttcctgggatctgct

SEQ ID NO: 975414 - DNA, 25 bp, Homo sapien
caagtattgtgccatgacttacaca

SEQ ID NO: 975415 - DNA, 25 bp, Homo sapien
ctcaggtatctgatggtgttctttg

SEQ ID NO: 975416 - DNA, 25 bp, Homo sapien
taaaatccagtgagattcaacaaat

SEQ ID NO: 975417 - DNA, 25 bp, Homo sapien
aagctagacctcaggtatctgatgg

SEQ ID NO: 975418 - DNA, 25 bp, Homo sapien
ttgtcaagttacacacttctgaatg

SEQ ID NO: 975419 - DNA, 25 bp, Homo sapien
aagtgagttgagagccttctttgca

SEQ ID NO: 975420 - DNA, 25 bp, Homo sapien
tgagttgagagccttctttgcagcc

SEQ ID NO: 975421 - DNA, 25 bp, Homo sapien
atttaaaagtgagttgagagccttc

SEQ ID NO: 975422 - DNA, 25 bp, Homo sapien
ctggagatttaaaagtgagttgaga

SEQ ID NO: 975423 - DNA, 25 bp, Homo sapien
catgatgtacttcactaaagccaag

SEQ ID NO: 975424 - DNA, 25 bp, Homo sapien
gaaaattgactattgacacctggct

SEQ ID NO: 975425 - DNA, 25 bp, Homo sapien
tcctgtaacaagacggccagtttgt

SEQ ID NO: 975426 - DNA, 25 bp, Homo sapien
aattgctaggtccaagattgttgtc

SEQ ID NO: 975427 - DNA, 25 bp, Homo sapien
catcagggactagaatgtaaacaaa

SEQ ID NO: 975428 - DNA, 25 bp, Homo sapien
tctcatcagggactagaatgtaaac

SEQ ID NO: 975429 - DNA, 25 bp, Homo sapien
cagggactagaatgtaaacaaatag

SEQ ID NO: 975430 - DNA, 25 bp, Homo sapien
tgtctcatcagggactagaatgtaa

SEQ ID NO: 975431 - DNA, 25 bp, Homo sapien
aacatcacattggtgcaaggtgact

SEQ ID NO: 975432 - DNA, 25 bp, Homo sapien
ccaacatcacattggtgcaaggtga

SEQ ID NO: 975433 - DNA, 25 bp, Homo sapien
caacatcacattggtgcaaggtgac

SEQ ID NO: 975434 - DNA, 25 bp, Homo sapien
tccaacatcacattggtgcaaggtg

SEQ ID NO: 975435 - DNA, 25 bp, Homo sapien
ggatagttgtcccactttcatgtca

SEQ ID NO: 975436 - DNA, 25 bp, Homo sapien
tatgtccatgattgggagtcatccc

SEQ ID NO: 975437 - DNA, 25 bp, Homo sapien
agctgtaaagcacccttagaattgg

SEQ ID NO: 975438 - DNA, 25 bp, Homo sapien
catccaatgccatccaagggtgttg

SEQ ID NO: 975439 - DNA, 25 bp, Homo sapien
tttgtgccaagatggagaacctggc

SEQ ID NO: 975440 - DNA, 25 bp, Homo sapien
aatttgtgtatgcagcctttttgtg

SEQ ID NO: 975441 - DNA, 25 bp, Homo sapien
ggtccacttagaggcaactctttac

SEQ ID NO: 975442 - DNA, 25 bp, Homo sapien
atatgtacctataaaaaggtccact

SEQ ID NO: 975443 - DNA, 25 bp, Homo sapien
ggcactctagcagagacacagttac

SEQ ID NO: 975444 - DNA, 25 bp, Homo sapien
ttacccagaaaaagatgcgcatgtc

SEQ ID NO: 975445 - DNA, 25 bp, Homo sapien
tatgtgcgtgcccagaggcactcta

SEQ ID NO: 975446 - DNA, 25 bp, Homo sapien
aaagatgcgcatgtcttctttatga

SEQ ID NO: 975447 - DNA, 25 bp, Homo sapien
tagaattttcaggatcgtatatcat

SEQ ID NO: 975448 - DNA, 25 bp, Homo sapien
cactctgttgtgctgttgaatacta

SEQ ID NO: 975449 - DNA, 25 bp, Homo sapien
cagaacctgggaaaatgcctgacac

SEQ ID NO: 975450 - DNA, 25 bp, Homo sapien
tatttctgggttacatgagagatat

SEQ ID NO: 975451 - DNA, 25 bp, Homo sapien
tactctcgatgtctgatgttgtctc

SEQ ID NO: 975452 - DNA, 25 bp, Homo sapien
ttcttccagccgtatctcaatagtt

SEQ ID NO: 975453 - DNA, 25 bp, Homo sapien
cagccgtatctcaatagttggtgca

SEQ ID NO: 975454 - DNA, 25 bp, Homo sapien
cgtatctcaatagttggtgcatccc

SEQ ID NO: 975455 - DNA, 25 bp, Homo sapien
tatctcaatagttggtgcatcccat

SEQ ID NO: 975456 - DNA, 25 bp, Homo sapien
cctgattaccagaaccaaaatgtct

SEQ ID NO: 975457 - DNA, 25 bp, Homo sapien
ctgattaccagaaccaaaatgtctc

SEQ ID NO: 975458 - DNA, 25 bp, Homo sapien
tgattaccagaaccaaaatgtctct

SEQ ID NO: 975459 - DNA, 25 bp, Homo sapien
ccctgattaccagaaccaaaatgtc

SEQ ID NO: 975460 - DNA, 25 bp, Homo sapien
cacacggatacggtatgggtcatcc

SEQ ID NO: 975461 - DNA, 25 bp, Homo sapien
gcacacggatacggtatgggtcatc

SEQ ID NO: 975462 - DNA, 25 bp, Homo sapien
ttgtgcctcatatcaatgcgcacat

SEQ ID NO: 975463 - DNA, 25 bp, Homo sapien
ttgttgtgcctcatatcaatgcgca

SEQ ID NO: 975464 - DNA, 25 bp, Homo sapien
actttgttgtgcctcatatcaatgc

SEQ ID NO: 975465 - DNA, 25 bp, Homo sapien
ctactttgttgtgcctcatatcaat

SEQ ID NO: 975466 - DNA, 25 bp, Homo sapien
ggcaaattgcggaatctctgagttc

SEQ ID NO: 975467 - DNA, 25 bp, Homo sapien
gcaaattgcggaatctctgagttcc

SEQ ID NO: 975468 - DNA, 25 bp, Homo sapien
gacacacttgggaatattgatggtg

SEQ ID NO: 975469 - DNA, 25 bp, Homo sapien
tccatggacacacttgggaatattg

SEQ ID NO: 975470 - DNA, 25 bp, Homo sapien
ggacacacttgggaatattgatggt

SEQ ID NO: 975471 - DNA, 25 bp, Homo sapien
catggacacacttgggaatattgat

SEQ ID NO: 975472 - DNA, 25 bp, Homo sapien
ctatgtgtagcgagtggcatagaag

SEQ ID NO: 975473 - DNA, 25 bp, Homo sapien
tatgtgtagcgagtggcatagaagc

SEQ ID NO: 975474 - DNA, 25 bp, Homo sapien
gaagtcttaacagctcgggcgatgt

SEQ ID NO: 975475 - DNA, 25 bp, Homo sapien
tgcctaaccaggaaagtgaagtctt

SEQ ID NO: 975476 - DNA, 25 bp, Homo sapien
tagcattgcagatacctagacttga

SEQ ID NO: 975477 - DNA, 25 bp, Homo sapien
gaaaactgtattatttggcaatcgt

SEQ ID NO: 975478 - DNA, 25 bp, Homo sapien
ttcactacctcacagcccaattcgt

SEQ ID NO: 975479 - DNA, 25 bp, Homo sapien
agcctggctgacatgaacagtgctt

SEQ ID NO: 975480 - DNA, 25 bp, Homo sapien
tggctgacatgaacagtgcttcact

SEQ ID NO: 975481 - DNA, 25 bp, Homo sapien
agtgcttcactacctcacagcccaa

SEQ ID NO: 975482 - DNA, 25 bp, Homo sapien
gaccacagtatgtgatgatcaaggg

SEQ ID NO: 975483 - DNA, 25 bp, Homo sapien
tggggagccagcctgaggcatgtga

SEQ ID NO: 975484 - DNA, 25 bp, Homo sapien
tctctggaccacagtatgtgatgat

SEQ ID NO: 975485 - DNA, 25 bp, Homo sapien
gtcctgatgcctccattatagtggt

SEQ ID NO: 975486 - DNA, 25 bp, Homo sapien
tgaatagatttgtgtttgtgctata

SEQ ID NO: 975487 - DNA, 25 bp, Homo sapien
aatagatttgtgtttgtgctataaa

SEQ ID NO: 975488 - DNA, 25 bp, Homo sapien
catgaatagatttgtgtttgtgcta

SEQ ID NO: 975489 - DNA, 25 bp, Homo sapien
ttctgggatgtttttgaattaccaa

SEQ ID NO: 975490 - DNA, 25 bp, Homo sapien
tcatagtattctgcaatctctacca

SEQ ID NO: 975491 - DNA, 25 bp, Homo sapien
caagtgacgggatgctaactccagt

SEQ ID NO: 975492 - DNA, 25 bp, Homo sapien
tacttgatcaaccaattgtacttct

SEQ ID NO: 975493 - DNA, 25 bp, Homo sapien
taactccagttcttgccacataaag

SEQ ID NO: 975494 - DNA, 25 bp, Homo sapien
cagaaaacattgtggaagctcttta

SEQ ID NO: 975495 - DNA, 25 bp, Homo sapien
tgcagaaaacattgtggaagctctt

SEQ ID NO: 975496 - DNA, 25 bp, Homo sapien
tggaagctctttaagtttctcaaaa

SEQ ID NO: 975497 - DNA, 25 bp, Homo sapien
cattgtggaagctctttaagtttct

SEQ ID NO: 975498 - DNA, 25 bp, Homo sapien
cctggcagggccactttgctgcggc

SEQ ID NO: 975499 - DNA, 25 bp, Homo sapien
atggcccgccgggaccagatggcct

SEQ ID NO: 975500 - DNA, 25 bp, Homo sapien
gggtgtccgcctcttccttgtattc

SEQ ID NO: 975501 - DNA, 25 bp, Homo sapien
ccgggaccagatggcctgagactgc

SEQ ID NO: 975502 - DNA, 25 bp, Homo sapien
tgcaggcacggcagttcatcaacac

SEQ ID NO: 975503 - DNA, 25 bp, Homo sapien
tctttgcaaaactaagtggacagtc

SEQ ID NO: 975504 - DNA, 25 bp, Homo sapien
taaaagtttagcatgatcctgcagg

SEQ ID NO: 975505 - DNA, 25 bp, Homo sapien
tattgttgatgtcctcactctgctc

SEQ ID NO: 975506 - DNA, 25 bp, Homo sapien
aaatctgttgtagacatacatttat

SEQ ID NO: 975507 - DNA, 25 bp, Homo sapien
atgcaaatctgttgtagacatacat

SEQ ID NO: 975508 - DNA, 25 bp, Homo sapien
gcaaatctgttgtagacatacattt

SEQ ID NO: 975509 - DNA, 25 bp, Homo sapien
tgcaaatctgttgtagacatacatt

SEQ ID NO: 975510 - DNA, 25 bp, Homo sapien
tttggcagggtgttgactaatgatc

SEQ ID NO: 975511 - DNA, 25 bp, Homo sapien
catctccctgatctgctgtgcgcag

SEQ ID NO: 975512 - DNA, 25 bp, Homo sapien
agttctccactttgtcgtattttca

SEQ ID NO: 975513 - DNA, 25 bp, Homo sapien
tatgtctctgtatgtcatctccctg

SEQ ID NO: 975514 - DNA, 25 bp, Homo sapien
ctctgccaaggaatatgtctctgta

SEQ ID NO: 975515 - DNA, 25 bp, Homo sapien
ctgaggatgactgctcctgaatatg

SEQ ID NO: 975516 - DNA, 25 bp, Homo sapien
tgaggatgactgctcctgaatatgt

SEQ ID NO: 975517 - DNA, 25 bp, Homo sapien
aggagttagccaggttcaaggaagt

SEQ ID NO: 975518 - DNA, 25 bp, Homo sapien
tccttctctttcgtacacaaacaca

SEQ ID NO: 975519 - DNA, 25 bp, Homo sapien
caaacacatcgaatcttacagaaga

SEQ ID NO: 975520 - DNA, 25 bp, Homo sapien
ttcaaggaagtggatcgattgaaga

SEQ ID NO: 975521 - DNA, 25 bp, Homo sapien
ttctaatctaagagtcacacaccaa

SEQ ID NO: 975522 - DNA, 25 bp, Homo sapien
aatctaagagtcacacaccaagata

SEQ ID NO: 975523 - DNA, 25 bp, Homo sapien
tctaatctaagagtcacacaccaag

SEQ ID NO: 975524 - DNA, 25 bp, Homo sapien
gagtcacacaccaagatatttccat

SEQ ID NO: 975525 - DNA, 25 bp, Homo sapien
tctcctgagaagacagcaggtagta

SEQ ID NO: 975526 - DNA, 25 bp, Homo sapien
tcttggctctcctgagaagacagca

SEQ ID NO: 975527 - DNA, 25 bp, Homo sapien
tcctgagaagacagcaggtagtaca

SEQ ID NO: 975528 - DNA, 25 bp, Homo sapien
gctctcctgagaagacagcaggtag

SEQ ID NO: 975529 - DNA, 25 bp, Homo sapien
tgtaaaaacactatgtgaagataat

SEQ ID NO: 975530 - DNA, 25 bp, Homo sapien
aaacactcgtgctttgctcatccgg

SEQ ID NO: 975531 - DNA, 25 bp, Homo sapien
gattgcacgggcattcttacgcgca

SEQ ID NO: 975532 - DNA, 25 bp, Homo sapien
ttgctcatccggtcagcagagctct

SEQ ID NO: 975533 - DNA, 25 bp, Homo sapien
ttcttacgcgcaaacactcgtgctt

SEQ ID NO: 975534 - DNA, 25 bp, Homo sapien
ggaggtgtagtgacaaaagagagat

SEQ ID NO: 975535 - DNA, 25 bp, Homo sapien
ctgaggaggtgtagtgacaaaagag

SEQ ID NO: 975536 - DNA, 25 bp, Homo sapien
gaggaggtgtagtgacaaaagagag

SEQ ID NO: 975537 - DNA, 25 bp, Homo sapien
tgaggaggtgtagtgacaaaagaga

SEQ ID NO: 975538 - DNA, 25 bp, Homo sapien
tccacttgggcgaacattagaaagc

SEQ ID NO: 975539 - DNA, 25 bp, Homo sapien
agccctcttgaagccatgcaatgtc

SEQ ID NO: 975540 - DNA, 25 bp, Homo sapien
ggtgatggatgctttaggcctaaat

SEQ ID NO: 975541 - DNA, 25 bp, Homo sapien
tttataactgtgacaaggaactcca

SEQ ID NO: 975542 - DNA, 25 bp, Homo sapien
tcatcacagtgatatgaatcgctgc

SEQ ID NO: 975543 - DNA, 25 bp, Homo sapien
ttttcatagcatggctgcattttgc

SEQ ID NO: 975544 - DNA, 25 bp, Homo sapien
tgacatggttactactcttcaccca

SEQ ID NO: 975545 - DNA, 25 bp, Homo sapien
tactacaatgctgtaggtcatcaca

SEQ ID NO: 975546 - DNA, 25 bp, Homo sapien
tccttctctgacatatccagattct

SEQ ID NO: 975547 - DNA, 25 bp, Homo sapien
ccttctctgacatatccagattctg

SEQ ID NO: 975548 - DNA, 25 bp, Homo sapien
catcaaacggcacctcacagtcaaa

SEQ ID NO: 975549 - DNA, 25 bp, Homo sapien
caaacggcacctcacagtcaaattt

SEQ ID NO: 975550 - DNA, 25 bp, Homo sapien
cacactgggttaatggtgtcttcct

SEQ ID NO: 975551 - DNA, 25 bp, Homo sapien
ttgccaaaacacactgggttaatgg

SEQ ID NO: 975552 - DNA, 25 bp, Homo sapien
ccaatgttttcagatttagggagca

SEQ ID NO: 975553 - DNA, 25 bp, Homo sapien
tctttagaattatctacaccaatgt

SEQ ID NO: 975554 - DNA, 25 bp, Homo sapien
ttcccctgacccacaatactgttct

SEQ ID NO: 975555 - DNA, 25 bp, Homo sapien
gacagggtgaagtgacagtatttca

SEQ ID NO: 975556 - DNA, 25 bp, Homo sapien
cttgccatattccatttattgcacc

SEQ ID NO: 975557 - DNA, 25 bp, Homo sapien
cagtatttcaggaacgcgagttcat

SEQ ID NO: 975558 - DNA, 25 bp, Homo sapien
catcttgctaagagaactgcatgac

SEQ ID NO: 975559 - DNA, 25 bp, Homo sapien
ggcagtcattattccaacttagtag

SEQ ID NO: 975560 - DNA, 25 bp, Homo sapien
ggttggattttgtaagcaccactat

SEQ ID NO: 975561 - DNA, 25 bp, Homo sapien
cagcatggtactgaggcaacttcaa

SEQ ID NO: 975562 - DNA, 25 bp, Homo sapien
tcaataggagaagcagcatattcca

SEQ ID NO: 975563 - DNA, 25 bp, Homo sapien
gaagccatagtcgacattattagaa

SEQ ID NO: 975564 - DNA, 25 bp, Homo sapien
cacataacccaaggctatgtcatcc

SEQ ID NO: 975565 - DNA, 25 bp, Homo sapien
gcagcatattccatgaccgaggaag

SEQ ID NO: 975566 - DNA, 25 bp, Homo sapien
caggtctggactaatctggctggac

SEQ ID NO: 975567 - DNA, 25 bp, Homo sapien
gttcttcaggtctggactaatctgg

SEQ ID NO: 975568 - DNA, 25 bp, Homo sapien
ttcttcaggtctggactaatctggc

SEQ ID NO: 975569 - DNA, 25 bp, Homo sapien
agttcttcaggtctggactaatctg

SEQ ID NO: 975570 - DNA, 25 bp, Homo sapien
cttttctcgaattgattttcgtctt

SEQ ID NO: 975571 - DNA, 25 bp, Homo sapien
ttttcgtctttccatgcctatgcaa

SEQ ID NO: 975572 - DNA, 25 bp, Homo sapien
tctcgaattgattttcgtctttcca

SEQ ID NO: 975573 - DNA, 25 bp, Homo sapien
ttcgtctttccatgcctatgcaagt

SEQ ID NO: 975574 - DNA, 25 bp, Homo sapien
ggagtagccatgaacacttcacatg

SEQ ID NO: 975575 - DNA, 25 bp, Homo sapien
tactctactgtgactggagtagcca

SEQ ID NO: 975576 - DNA, 25 bp, Homo sapien
catgtgctctccataggtggaccca

SEQ ID NO: 975577 - DNA, 25 bp, Homo sapien
acttcacatgtgctctccataggtg

SEQ ID NO: 975578 - DNA, 25 bp, Homo sapien
cttggaatttcccaccataccacat

SEQ ID NO: 975579 - DNA, 25 bp, Homo sapien
ttttctatctttgaatgatgccatg

SEQ ID NO: 975580 - DNA, 25 bp, Homo sapien
gagtcttggaatttcccaccatacc

SEQ ID NO: 975581 - DNA, 25 bp, Homo sapien
gccatggtctactcaggtttgtgat

SEQ ID NO: 975582 - DNA, 25 bp, Homo sapien
aatatggtaatgtatctggtaatag

SEQ ID NO: 975583 - DNA, 25 bp, Homo sapien
taatatggtaatgtatctggtaata

SEQ ID NO: 975584 - DNA, 25 bp, Homo sapien
ttaatatggtaatgtatctggtaat

SEQ ID NO: 975585 - DNA, 25 bp, Homo sapien
tatggtaatgtatctggtaatagag

SEQ ID NO: 975586 - DNA, 25 bp, Homo sapien
actcattgcatgtcatagtaattac

SEQ ID NO: 975587 - DNA, 25 bp, Homo sapien
tcaactcattgcatgtcatagtaat

SEQ ID NO: 975588 - DNA, 25 bp, Homo sapien
tgtcatagtaattacagagttgttc

SEQ ID NO: 975589 - DNA, 25 bp, Homo sapien
caactcattgcatgtcatagtaatt

SEQ ID NO: 975590 - DNA, 25 bp, Homo sapien
aggctgtaagttctcttaaaggaat

SEQ ID NO: 975591 - DNA, 25 bp, Homo sapien
tcaaaaggctgtaagttctcttaaa

SEQ ID NO: 975592 - DNA, 25 bp, Homo sapien
caaaaggctgtaagttctcttaaag

SEQ ID NO: 975593 - DNA, 25 bp, Homo sapien
ctgggctattgagttcttctgtgag

SEQ ID NO: 975594 - DNA, 25 bp, Homo sapien
gggctattgagttcttctgtgagtt

SEQ ID NO: 975595 - DNA, 25 bp, Homo sapien
tctctgggctattgagttcttctgt

SEQ ID NO: 975596 - DNA, 25 bp, Homo sapien
tctgggctattgagttcttctgtga

SEQ ID NO: 975597 - DNA, 25 bp, Homo sapien
ccagtgtgtatgcagaatctattaa

SEQ ID NO: 975598 - DNA, 25 bp, Homo sapien
ctattaagtacttgacactctcgac

SEQ ID NO: 975599 - DNA, 25 bp, Homo sapien
gattttggcattgtctgaagtctga

SEQ ID NO: 975600 - DNA, 25 bp, Homo sapien
cgactttcattgtatgattttggca

SEQ ID NO: 975601 - DNA, 25 bp, Homo sapien
tttttgcatgtctatagtgcagaaa

SEQ ID NO: 975602 - DNA, 25 bp, Homo sapien
tatagtgcagaaatagctcagaagt

SEQ ID NO: 975603 - DNA, 25 bp, Homo sapien
tcatagcactagtaatcaagcaatg

SEQ ID NO: 975604 - DNA, 25 bp, Homo sapien
tcagaagtacatatcatagcactag

SEQ ID NO: 975605 - DNA, 25 bp, Homo sapien
tttcttgacataattgggcagagta

SEQ ID NO: 975606 - DNA, 25 bp, Homo sapien
taggcagaggcatatttctgactgg

SEQ ID NO: 975607 - DNA, 25 bp, Homo sapien
cttgacataattgggcagagtaggc

SEQ ID NO: 975608 - DNA, 25 bp, Homo sapien
catttcttgacataattgggcagag

SEQ ID NO: 975609 - DNA, 25 bp, Homo sapien
tcagcgggacaatcgcccttctaaa

SEQ ID NO: 975610 - DNA, 25 bp, Homo sapien
atttctaagtacgtggttctcagcg

SEQ ID NO: 975611 - DNA, 25 bp, Homo sapien
taaatccagatgcttcaaaaactat

SEQ ID NO: 975612 - DNA, 25 bp, Homo sapien
ggacaatcgcccttctaaatccaga

SEQ ID NO: 975613 - DNA, 25 bp, Homo sapien
tgtcctcttccacggcatctattac

SEQ ID NO: 975614 - DNA, 25 bp, Homo sapien
gtgctccttcactgaacctatgcac

SEQ ID NO: 975615 - DNA, 25 bp, Homo sapien
tgaacctatgcaccgtcttctggta

SEQ ID NO: 975616 - DNA, 25 bp, Homo sapien
cgtcttctggtatcagcattttcct

SEQ ID NO: 975617 - DNA, 25 bp, Homo sapien
tttgcagtgtccagatgtgtacagg

SEQ ID NO: 975618 - DNA, 25 bp, Homo sapien
tgtgtacaggacaataggaatgttc

SEQ ID NO: 975619 - DNA, 25 bp, Homo sapien
taacaatatctatggaaggttcaag

SEQ ID NO: 975620 - DNA, 25 bp, Homo sapien
gcttttctcttaggcatgtaatcac

SEQ ID NO: 975621 - DNA, 25 bp, Homo sapien
actcagtagtctcttcgctcttttc

SEQ ID NO: 975622 - DNA, 25 bp, Homo sapien
tagccactcagtagtctcttcgctc

SEQ ID NO: 975623 - DNA, 25 bp, Homo sapien
tggtagccactcagtagtctcttcg

SEQ ID NO: 975624 - DNA, 25 bp, Homo sapien
gccactcagtagtctcttcgctctt

SEQ ID NO: 975625 - DNA, 25 bp, Homo sapien
ctgtaaacctccacatttgcctggt

SEQ ID NO: 975626 - DNA, 25 bp, Homo sapien
ctggtgacagaaaaatcttaatcgt

SEQ ID NO: 975627 - DNA, 25 bp, Homo sapien
gacagaaaaatcttaatcgtcaaga

SEQ ID NO: 975628 - DNA, 25 bp, Homo sapien
aatcgtcaagattttcctatgaata

SEQ ID NO: 975629 - DNA, 25 bp, Homo sapien
tctttcttccttctgtctgcttctt

SEQ ID NO: 975630 - DNA, 25 bp, Homo sapien
tgtcttttagcttctgtctgcttct

SEQ ID NO: 975631 - DNA, 25 bp, Homo sapien
ctgtcttttagcttctgtctgcttc

SEQ ID NO: 975632 - DNA, 25 bp, Homo sapien
cttccttctgtctgcttctttctcc

SEQ ID NO: 975633 - DNA, 25 bp, Homo sapien
ggagtaagacaacgctatgacagct

SEQ ID NO: 975634 - DNA, 25 bp, Homo sapien
cattaagtcccattattgcaaacac

SEQ ID NO: 975635 - DNA, 25 bp, Homo sapien
tgcaaacacaatcaactgcctggag

SEQ ID NO: 975636 - DNA, 25 bp, Homo sapien
gtatgctggtccattaagtcccatt

SEQ ID NO: 975637 - DNA, 25 bp, Homo sapien
ttgttttgctccttaaaaacaatca

SEQ ID NO: 975638 - DNA, 25 bp, Homo sapien
tgttttgctccttaaaaacaatcat

SEQ ID NO: 975639 - DNA, 25 bp, Homo sapien
gaggattagtctggtcggcatccag

SEQ ID NO: 975640 - DNA, 25 bp, Homo sapien
tggcctgtttaatcatatgctgaac

SEQ ID NO: 975641 - DNA, 25 bp, Homo sapien
gctgaaccctttctagttccagagg

SEQ ID NO: 975642 - DNA, 25 bp, Homo sapien
catcattagaaaatttggcctgttt

SEQ ID NO: 975643 - DNA, 25 bp, Homo sapien
gttacattaggttgagaatactgac

SEQ ID NO: 975644 - DNA, 25 bp, Homo sapien
tacccaatgagatcagttgttacat

SEQ ID NO: 975645 - DNA, 25 bp, Homo sapien
gctagctctctaacactcttcagtg

SEQ ID NO: 975646 - DNA, 25 bp, Homo sapien
gacttaaagcagcaaccggtaaatg

SEQ ID NO: 975647 - DNA, 25 bp, Homo sapien
tcttgggttccgccaatagaagaca

SEQ ID NO: 975648 - DNA, 25 bp, Homo sapien
gggttccgccaatagaagacatcca

SEQ ID NO: 975649 - DNA, 25 bp, Homo sapien
tgggttccgccaatagaagacatcc

SEQ ID NO: 975650 - DNA, 25 bp, Homo sapien
ttgggttccgccaatagaagacatc

SEQ ID NO: 975651 - DNA, 25 bp, Homo sapien
cctctccccatcttcgattaagatg

SEQ ID NO: 975652 - DNA, 25 bp, Homo sapien
tctccccatcttcgattaagatggc

SEQ ID NO: 975653 - DNA, 25 bp, Homo sapien
tccccatcttcgattaagatggctt

SEQ ID NO: 975654 - DNA, 25 bp, Homo sapien
cccatcttcgattaagatggcttct

SEQ ID NO: 975655 - DNA, 25 bp, Homo sapien
ctaatgggacatagtcgattggcaa

SEQ ID NO: 975656 - DNA, 25 bp, Homo sapien
tgataatgcttactttacaacctga

SEQ ID NO: 975657 - DNA, 25 bp, Homo sapien
catcatttgtctttcccgttttctg

SEQ ID NO: 975658 - DNA, 25 bp, Homo sapien
tggcaagtaacctgataatgcttac

SEQ ID NO: 975659 - DNA, 25 bp, Homo sapien
gcaaaacattcctttattattagaa

SEQ ID NO: 975660 - DNA, 25 bp, Homo sapien
tgcaaaacattcctttattattaga

SEQ ID NO: 975661 - DNA, 25 bp, Homo sapien
tttgcaaaacattcctttattatta

SEQ ID NO: 975662 - DNA, 25 bp, Homo sapien
catttgcaaaacattcctttattat

SEQ ID NO: 975663 - DNA, 25 bp, Homo sapien
aacccagggcttcaatctggtcagc

SEQ ID NO: 975664 - DNA, 25 bp, Homo sapien
cagccattacaagaaacagactcat

SEQ ID NO: 975665 - DNA, 25 bp, Homo sapien
caagttaaacaatgtgggacaggaa

SEQ ID NO: 975666 - DNA, 25 bp, Homo sapien
caggaacgggagttctcacaatcac

SEQ ID NO: 975667 - DNA, 25 bp, Homo sapien
tttattgatacttttggctcatggc

SEQ ID NO: 975668 - DNA, 25 bp, Homo sapien
aatactttagcttgacactcattgg

SEQ ID NO: 975669 - DNA, 25 bp, Homo sapien
gatttgattgattgtagtctacgga

SEQ ID NO: 975670 - DNA, 25 bp, Homo sapien
ccaggagtgaatttttgcggtctca

SEQ ID NO: 975671 - DNA, 25 bp, Homo sapien
gctgtaactgatatatgttgtcttg

SEQ ID NO: 975672 - DNA, 25 bp, Homo sapien
tgtaactgatatatgttgtcttggt

SEQ ID NO: 975673 - DNA, 25 bp, Homo sapien
tcagattgaatgattgctgtaactg

SEQ ID NO: 975674 - DNA, 25 bp, Homo sapien
aactgatatatgttgtcttggtaga

SEQ ID NO: 975675 - DNA, 25 bp, Homo sapien
atgctttgtaaaagagattttgtga

SEQ ID NO: 975676 - DNA, 25 bp, Homo sapien
gatggtgtcacggtatgtgagtacc

SEQ ID NO: 975677 - DNA, 25 bp, Homo sapien
gaaacatgtagcacaatccccaaga

SEQ ID NO: 975678 - DNA, 25 bp, Homo sapien
gagtaccatcatgcccctggaaaca

SEQ ID NO: 975679 - DNA, 25 bp, Homo sapien
gtagaacagccgctcatcttgagac

SEQ ID NO: 975680 - DNA, 25 bp, Homo sapien
agtgctcccgctcttgaccatcgga

SEQ ID NO: 975681 - DNA, 25 bp, Homo sapien
gaagtgctcccgctcttgaccatcg

SEQ ID NO: 975682 - DNA, 25 bp, Homo sapien
tgctcccgctcttgaccatcggaaa

SEQ ID NO: 975683 - DNA, 25 bp, Homo sapien
ttaggaagtgctcccgctcttgacc

SEQ ID NO: 975684 - DNA, 25 bp, Homo sapien
gaagcacttaaactcatggagacag

SEQ ID NO: 975685 - DNA, 25 bp, Homo sapien
tagagcatgcccagagatactgaag

SEQ ID NO: 975686 - DNA, 25 bp, Homo sapien
gaagctcctcttgcgtttttgaaca

SEQ ID NO: 975687 - DNA, 25 bp, Homo sapien
taaaccttgggcatatagagcatgc

SEQ ID NO: 975688 - DNA, 25 bp, Homo sapien
agagctctttctggaaggtttttct

SEQ ID NO: 975689 - DNA, 25 bp, Homo sapien
gagagctctttctggaaggtttttc

SEQ ID NO: 975690 - DNA, 25 bp, Homo sapien
agagagagctctttctggaaggttt

SEQ ID NO: 975691 - DNA, 25 bp, Homo sapien
gagagagctctttctggaaggtttt

SEQ ID NO: 975692 - DNA, 25 bp, Homo sapien
ggtacagtccttttcagaattagtg

SEQ ID NO: 975693 - DNA, 25 bp, Homo sapien
aatatagtggcagagacaatttttc

SEQ ID NO: 975694 - DNA, 25 bp, Homo sapien
tttcattgtgtattaggtagggtac

SEQ ID NO: 975695 - DNA, 25 bp, Homo sapien
tagtgatgcaagtgcatggcaaata

SEQ ID NO: 975696 - DNA, 25 bp, Homo sapien
acagctggttaccccaatgatggag

SEQ ID NO: 975697 - DNA, 25 bp, Homo sapien
agctggttaccccaatgatggagca

SEQ ID NO: 975698 - DNA, 25 bp, Homo sapien
gtaacagctggttaccccaatgatg

SEQ ID NO: 975699 - DNA, 25 bp, Homo sapien
taacagctggttaccccaatgatgg

SEQ ID NO: 975700 - DNA, 25 bp, Homo sapien
tccttggcagaggtgatagacaatc

SEQ ID NO: 975701 - DNA, 25 bp, Homo sapien
gcctctccaagtccattaaattatt

SEQ ID NO: 975702 - DNA, 25 bp, Homo sapien
tgaatattgcctggaaagcctctcc

SEQ ID NO: 975703 - DNA, 25 bp, Homo sapien
tcacaagtcgacacatgatatatgc

SEQ ID NO: 975704 - DNA, 25 bp, Homo sapien
tctgccctgtgctttaccaatatat

SEQ ID NO: 975705 - DNA, 25 bp, Homo sapien
tccgcaagtaattttctcgtggcaa

SEQ ID NO: 975706 - DNA, 25 bp, Homo sapien
ttcttgtggcaatctaaagaggctc

SEQ ID NO: 975707 - DNA, 25 bp, Homo sapien
tcgtggcaatatgctttcttgtggc

SEQ ID NO: 975708 - DNA, 25 bp, Homo sapien
ctcaatgaagccttccaaatcacct

SEQ ID NO: 975709 - DNA, 25 bp, Homo sapien
ctctgtcctcacataattcccattt

SEQ ID NO: 975710 - DNA, 25 bp, Homo sapien
ttctctttcagtgccttataggtac

SEQ ID NO: 975711 - DNA, 25 bp, Homo sapien
tttcagtgccttataggtacagaag

SEQ ID NO: 975712 - DNA, 25 bp, Homo sapien
tcctcacataattcccatttttcag

SEQ ID NO: 975713 - DNA, 25 bp, Homo sapien
actaatgaacttgggcgctgtgaca

SEQ ID NO: 975714 - DNA, 25 bp, Homo sapien
gacccgtcggaaggagcatatgatt

SEQ ID NO: 975715 - DNA, 25 bp, Homo sapien
tagtgtccgctgctctccatagtca

SEQ ID NO: 975716 - DNA, 25 bp, Homo sapien
gaaacacatgccaagtcctaggaag

SEQ ID NO: 975717 - DNA, 25 bp, Homo sapien
ttcctctcccctggcttacacggca

SEQ ID NO: 975718 - DNA, 25 bp, Homo sapien
cctctcccctggcttacacggcagg

SEQ ID NO: 975719 - DNA, 25 bp, Homo sapien
tcctctcccctggcttacacggcag

SEQ ID NO: 975720 - DNA, 25 bp, Homo sapien
gacagacgccgggtgagtatgttct

SEQ ID NO: 975721 - DNA, 25 bp, Homo sapien
cgccgggtgagtatgttctctatga

SEQ ID NO: 975722 - DNA, 25 bp, Homo sapien
cgggtgagtatgttctctatgagcc

SEQ ID NO: 975723 - DNA, 25 bp, Homo sapien
ctgcagacagacgccgggtgagtat

SEQ ID NO: 975724 - DNA, 25 bp, Homo sapien
tcctcattgctgaccaatgtgacat

SEQ ID NO: 975725 - DNA, 25 bp, Homo sapien
ctcctcattgctgaccaatgtgaca

SEQ ID NO: 975726 - DNA, 25 bp, Homo sapien
gtctctgtacatttttctcgcacac

SEQ ID NO: 975727 - DNA, 25 bp, Homo sapien
tgtctctgtacatttttctcgcaca

SEQ ID NO: 975728 - DNA, 25 bp, Homo sapien
ttagtaaaacaaccacaagtggcga

SEQ ID NO: 975729 - DNA, 25 bp, Homo sapien
tcacttttgtgacaatcttcctttc

SEQ ID NO: 975730 - DNA, 25 bp, Homo sapien
ggcgatcgtaagaaatttctggaaa

SEQ ID NO: 975731 - DNA, 25 bp, Homo sapien
ccatcttgccaggatccatcttcac

SEQ ID NO: 975732 - DNA, 25 bp, Homo sapien
tgaatagcagcatcagtaattgtgt

SEQ ID NO: 975733 - DNA, 25 bp, Homo sapien
gcagcatcagtaattgtgtcaacag

SEQ ID NO: 975734 - DNA, 25 bp, Homo sapien
atcactctccagtcctgaatagcag

SEQ ID NO: 975735 - DNA, 25 bp, Homo sapien
tccatttgcaactggatatattttc

SEQ ID NO: 975736 - DNA, 25 bp, Homo sapien
gacaggctccatgtatccacatgtt

SEQ ID NO: 975737 - DNA, 25 bp, Homo sapien
tgtttgttcccccaagacatactga

SEQ ID NO: 975738 - DNA, 25 bp, Homo sapien
catgacaggctccatgtatccacat

SEQ ID NO: 975739 - DNA, 25 bp, Homo sapien
tgttcccccaagacatactgaactt

SEQ ID NO: 975740 - DNA, 25 bp, Homo sapien
tttatatagcatatgacaactgcgg

SEQ ID NO: 975741 - DNA, 25 bp, Homo sapien
gcagtctcaaggacaatgtaatggc

SEQ ID NO: 975742 - DNA, 25 bp, Homo sapien
caaagatgttgggtcagcagtctca

SEQ ID NO: 975743 - DNA, 25 bp, Homo sapien
tgcggtctcctctgattcccttcag

SEQ ID NO: 975744 - DNA, 25 bp, Homo sapien
gaatcatactcagtcccgtaaagaa

SEQ ID NO: 975745 - DNA, 25 bp, Homo sapien
tccccacaatgttctctgataagat

SEQ ID NO: 975746 - DNA, 25 bp, Homo sapien
tcagaatcatactcagtcccgtaaa

SEQ ID NO: 975747 - DNA, 25 bp, Homo sapien
tgataagatggtcctctgttctggg

SEQ ID NO: 975748 - DNA, 25 bp, Homo sapien
agcctgagacacctgatgaagttcc

SEQ ID NO: 975749 - DNA, 25 bp, Homo sapien
atccccacgtgctaaccccactggg

SEQ ID NO: 975750 - DNA, 25 bp, Homo sapien
tgaagttcctcctccgtactgccat

SEQ ID NO: 975751 - DNA, 25 bp, Homo sapien
tgccatccccacgtgctaaccccac

SEQ ID NO: 975752 - DNA, 25 bp, Homo sapien
tcacatggccacttgtggaaactgc

SEQ ID NO: 975753 - DNA, 25 bp, Homo sapien
tggaaactgcagaattaatggacac

SEQ ID NO: 975754 - DNA, 25 bp, Homo sapien
aatggacactggacctgaagagtgc

SEQ ID NO: 975755 - DNA, 25 bp, Homo sapien
gcagaattaatggacactggacctg

SEQ ID NO: 975756 - DNA, 25 bp, Homo sapien
ggaagatatcataacgtccaggagc

SEQ ID NO: 975757 - DNA, 25 bp, Homo sapien
ggagcatctccgttttcattaaaag

SEQ ID NO: 975758 - DNA, 25 bp, Homo sapien
tttcattaaaagtgacaggagtgcc

SEQ ID NO: 975759 - DNA, 25 bp, Homo sapien
tcataacgtccaggagcatctccgt

SEQ ID NO: 975760 - DNA, 25 bp, Homo sapien
catttacgaaatggctgtgagaaga

SEQ ID NO: 975761 - DNA, 25 bp, Homo sapien
taatttggagacttcatttgccagt

SEQ ID NO: 975762 - DNA, 25 bp, Homo sapien
caaaggagggagatccacttaagag

SEQ ID NO: 975763 - DNA, 25 bp, Homo sapien
gatcatagactcacttttagaagct

SEQ ID NO: 975764 - DNA, 25 bp, Homo sapien
tagactagtgttcttgattcaaaga

SEQ ID NO: 975765 - DNA, 25 bp, Homo sapien
ccactgagtgttatatttgtgtgaa

SEQ ID NO: 975766 - DNA, 25 bp, Homo sapien
tcatccataaaaaagccactgagtg

SEQ ID NO: 975767 - DNA, 25 bp, Homo sapien
gaataccgtggagtaatctgattct

SEQ ID NO: 975768 - DNA, 25 bp, Homo sapien
gagctttggaattctgaaggagagg

SEQ ID NO: 975769 - DNA, 25 bp, Homo sapien
tgagcatgaaggactgtatggagtt

SEQ ID NO: 975770 - DNA, 25 bp, Homo sapien
catgaaggactgtatggagttcttt

SEQ ID NO: 975771 - DNA, 25 bp, Homo sapien
ctcaatggcaagtttagggtaggat

SEQ ID NO: 975772 - DNA, 25 bp, Homo sapien
gagcacagtagcctgtcagttccca

SEQ ID NO: 975773 - DNA, 25 bp, Homo sapien
tcacagttgatctcagctgcaggcc

SEQ ID NO: 975774 - DNA, 25 bp, Homo sapien
taccaagcacttacagtacactggg

SEQ ID NO: 975775 - DNA, 25 bp, Homo sapien
ggtgggctgccttgtattgcaaaca

SEQ ID NO: 975776 - DNA, 25 bp, Homo sapien
ggccagggtagagacatctggatcc

SEQ ID NO: 975777 - DNA, 25 bp, Homo sapien
agacatctggatccctcttcggcaa

SEQ ID NO: 975778 - DNA, 25 bp, Homo sapien
aagagttggccagggtagagacatc

SEQ ID NO: 975779 - DNA, 25 bp, Homo sapien
taaaaagagttggccagggtagaga

SEQ ID NO: 975780 - DNA, 25 bp, Homo sapien
caaattcacgaacacttcctcaggc

SEQ ID NO: 975781 - DNA, 25 bp, Homo sapien
ctgcaaattcacgaacacttcctca

SEQ ID NO: 975782 - DNA, 25 bp, Homo sapien
gaagaactggacgacttctgtctac

SEQ ID NO: 975783 - DNA, 25 bp, Homo sapien
caggaagaactggacgacttctgtc

SEQ ID NO: 975784 - DNA, 25 bp, Homo sapien
tatttcatgactgtaagcaagagga

SEQ ID NO: 975785 - DNA, 25 bp, Homo sapien
tttcatgactgtaagcaagaggaaa

SEQ ID NO: 975786 - DNA, 25 bp, Homo sapien
aagaggaaagtatgatgatagaagt

SEQ ID NO: 975787 - DNA, 25 bp, Homo sapien
ctatttcatgactgtaagcaagagg

SEQ ID NO: 975788 - DNA, 25 bp, Homo sapien
gacttttctctgattgagttgcgtg

SEQ ID NO: 975789 - DNA, 25 bp, Homo sapien
attgagttgcgtgtgatcaaagggc

SEQ ID NO: 975790 - DNA, 25 bp, Homo sapien
gctacaaggacttttctctgattga

SEQ ID NO: 975791 - DNA, 25 bp, Homo sapien
gtgatcaaagggcaacagtttaact

SEQ ID NO: 975792 - DNA, 25 bp, Homo sapien
aaagaatagctaaaccctggaaatg

SEQ ID NO: 975793 - DNA, 25 bp, Homo sapien
aaaccctggaaatggagatcctctg

SEQ ID NO: 975794 - DNA, 25 bp, Homo sapien
gctaaaccctggaaatggagatcct

SEQ ID NO: 975795 - DNA, 25 bp, Homo sapien
agctaaaccctggaaatggagatcc

SEQ ID NO: 975796 - DNA, 25 bp, Homo sapien
tttttgtaccaactgtctgatgagc

SEQ ID NO: 975797 - DNA, 25 bp, Homo sapien
tcttcctccacaccgataacgtggt

SEQ ID NO: 975798 - DNA, 25 bp, Homo sapien
agtgctctggctacttcaccttctg

SEQ ID NO: 975799 - DNA, 25 bp, Homo sapien
ctggttacaatgtgagaaagattaa

SEQ ID NO: 975800 - DNA, 25 bp, Homo sapien
aattccatctaatgggtcaattttt

SEQ ID NO: 975801 - DNA, 25 bp, Homo sapien
gagagtaccttttgtagctcactga

SEQ ID NO: 975802 - DNA, 25 bp, Homo sapien
agagtaccttttgtagctcactgat

SEQ ID NO: 975803 - DNA, 25 bp, Homo sapien
gaatgaacatgaatacataagtcaa

SEQ ID NO: 975804 - DNA, 25 bp, Homo sapien
tgtacttttatttgaacagctttgt

SEQ ID NO: 975805 - DNA, 25 bp, Homo sapien
gatggtgtacttttatttgaacagc

SEQ ID NO: 975806 - DNA, 25 bp, Homo sapien
ctttagtagttttgatggtgtactt

SEQ ID NO: 975807 - DNA, 25 bp, Homo sapien
ctaatcctgtgttttccactctgcc

SEQ ID NO: 975808 - DNA, 25 bp, Homo sapien
gtgttttccactctgcctgggtatc

SEQ ID NO: 975809 - DNA, 25 bp, Homo sapien
ctgtgttttccactctgcctgggta

SEQ ID NO: 975810 - DNA, 25 bp, Homo sapien
gttttccactctgcctgggtatctt

SEQ ID NO: 975811 - DNA, 25 bp, Homo sapien
tgcatattgtgcagggcgtaagcca

SEQ ID NO: 975812 - DNA, 25 bp, Homo sapien
caaaggccaatgtatccagggcaga

SEQ ID NO: 975813 - DNA, 25 bp, Homo sapien
tacagcccgaatataaccaagtagc

SEQ ID NO: 975814 - DNA, 25 bp, Homo sapien
tggtactcattcgtggacaaaggcc

SEQ ID NO: 975815 - DNA, 25 bp, Homo sapien
caactggtaacacttagacaaaagc

SEQ ID NO: 975816 - DNA, 25 bp, Homo sapien
acaactggtaacacttagacaaaag

SEQ ID NO: 975817 - DNA, 25 bp, Homo sapien
aactggtaacacttagacaaaagca

SEQ ID NO: 975818 - DNA, 25 bp, Homo sapien
gtgcttttagatgctcttggttggt

SEQ ID NO: 975819 - DNA, 25 bp, Homo sapien
ctgtgcttttagatgctcttggttg

SEQ ID NO: 975820 - DNA, 25 bp, Homo sapien
ctctgtgcttttagatgctcttggt

SEQ ID NO: 975821 - DNA, 25 bp, Homo sapien
tgtgcttttagatgctcttggttgg

SEQ ID NO: 975822 - DNA, 25 bp, Homo sapien
tcgcaatctgtctgggagagtttct

SEQ ID NO: 975823 - DNA, 25 bp, Homo sapien
taaagcaggtcgcaatctgtctggg

SEQ ID NO: 975824 - DNA, 25 bp, Homo sapien
ccagtggctgattaaagcaggtcgc

SEQ ID NO: 975825 - DNA, 25 bp, Homo sapien
taggtatagtgccagtggctgatta

SEQ ID NO: 975826 - DNA, 25 bp, Homo sapien
tccgtaaagtgtggatgcagacagt

SEQ ID NO: 975827 - DNA, 25 bp, Homo sapien
acagtaatgcctggtgactgggtcg

SEQ ID NO: 975828 - DNA, 25 bp, Homo sapien
gggcagcagcgatgctccgtaaagt

SEQ ID NO: 975829 - DNA, 25 bp, Homo sapien
tccaaacaagtgaaggtgaatgagg

SEQ ID NO: 975830 - DNA, 25 bp, Homo sapien
cattgtcttatatgaggcagctttc

SEQ ID NO: 975831 - DNA, 25 bp, Homo sapien
ctgccaacttgaggtagtgactcac

SEQ ID NO: 975832 - DNA, 25 bp, Homo sapien
tgaggtagtgactcacactctgggt

SEQ ID NO: 975833 - DNA, 25 bp, Homo sapien
ctacattgtcttatatgaggcagct

SEQ ID NO: 975834 - DNA, 25 bp, Homo sapien
taaacttctcatacgtccaagagtg

SEQ ID NO: 975835 - DNA, 25 bp, Homo sapien
ttggctcttgcctagtagcgggcct

SEQ ID NO: 975836 - DNA, 25 bp, Homo sapien
tctgagataatgacagggatgggcc

SEQ ID NO: 975837 - DNA, 25 bp, Homo sapien
tttgaaatagggctgagctgtctcc

SEQ ID NO: 975838 - DNA, 25 bp, Homo sapien
ctctaagttgggtttacttagctca

SEQ ID NO: 975839 - DNA, 25 bp, Homo sapien
ctaagttgggtttacttagctcatt

SEQ ID NO: 975840 - DNA, 25 bp, Homo sapien
ccagtttgctccctctaagttgggt

SEQ ID NO: 975841 - DNA, 25 bp, Homo sapien
cagtttgctccctctaagttgggtt

SEQ ID NO: 975842 - DNA, 25 bp, Homo sapien
tttcagagcgactagttgcagaggg

SEQ ID NO: 975843 - DNA, 25 bp, Homo sapien
ctttcagagcgactagttgcagagg

SEQ ID NO: 975844 - DNA, 25 bp, Homo sapien
cctttcagagcgactagttgcagag

SEQ ID NO: 975845 - DNA, 25 bp, Homo sapien
tcagagcgactagttgcagagggaa

SEQ ID NO: 975846 - DNA, 25 bp, Homo sapien
atattttcttcccatccatgaggat

SEQ ID NO: 975847 - DNA, 25 bp, Homo sapien
tcatgatattttcttcccatccatg

SEQ ID NO: 975848 - DNA, 25 bp, Homo sapien
tattttcttcccatccatgaggatg

SEQ ID NO: 975849 - DNA, 25 bp, Homo sapien
cattttcatgatattttcttcccat

SEQ ID NO: 975850 - DNA, 25 bp, Homo sapien
tgggtcttcatagcatcctgcaaaa

SEQ ID NO: 975851 - DNA, 25 bp, Homo sapien
aagctgggctgtgattgttctggca

SEQ ID NO: 975852 - DNA, 25 bp, Homo sapien
tgaacacccaccagctgaagctggg

SEQ ID NO: 975853 - DNA, 25 bp, Homo sapien
catttttaaccattgacgaagcttc

SEQ ID NO: 975854 - DNA, 25 bp, Homo sapien
gggctttgtgtcagtcttaggaatg

SEQ ID NO: 975855 - DNA, 25 bp, Homo sapien
taggaatgatgcagactggtcccac

SEQ ID NO: 975856 - DNA, 25 bp, Homo sapien
tgtgtcagtcttaggaatgatgcag

SEQ ID NO: 975857 - DNA, 25 bp, Homo sapien
gatgcagactggtcccacaaagaaa

SEQ ID NO: 975858 - DNA, 25 bp, Homo sapien
tgaggctgctatttggttcactgac

SEQ ID NO: 975859 - DNA, 25 bp, Homo sapien
aaataaactgacaggtcttccaggg

SEQ ID NO: 975860 - DNA, 25 bp, Homo sapien
ccagggagctaattattgaggctgc

SEQ ID NO: 975861 - DNA, 25 bp, Homo sapien
caggattgcttgtttgtgggaagaa

SEQ ID NO: 975862 - DNA, 25 bp, Homo sapien
gtgcatttctttatatgactgttcc

SEQ ID NO: 975863 - DNA, 25 bp, Homo sapien
ttttcccatgtgatcctaacttgca

SEQ ID NO: 975864 - DNA, 25 bp, Homo sapien
catttcttcgattattggcaagagt

SEQ ID NO: 975865 - DNA, 25 bp, Homo sapien
accacacatttcttcgattattggc

SEQ ID NO: 975866 - DNA, 25 bp, Homo sapien
catcaattgatgctcgtttgggcaa

SEQ ID NO: 975867 - DNA, 25 bp, Homo sapien
gggcaaaattgtcacagccccttct

SEQ ID NO: 975868 - DNA, 25 bp, Homo sapien
tttggatccccaactatctgagcca

SEQ ID NO: 975869 - DNA, 25 bp, Homo sapien
aggtgctattttggatccccaacta

SEQ ID NO: 975870 - DNA, 25 bp, Homo sapien
tcctcattggcaaacataatcactg

SEQ ID NO: 975871 - DNA, 25 bp, Homo sapien
tctccaggtcttggttcacgtggga

SEQ ID NO: 975872 - DNA, 25 bp, Homo sapien
cgagcattaggtgtttctagcaggc

SEQ ID NO: 975873 - DNA, 25 bp, Homo sapien
tggcaaacataatcactgctcgagc

SEQ ID NO: 975874 - DNA, 25 bp, Homo sapien
tgcactccacggaagaaaaatggat

SEQ ID NO: 975875 - DNA, 25 bp, Homo sapien
gagtggcccataggaatatgtctca

SEQ ID NO: 975876 - DNA, 25 bp, Homo sapien
tatttcttcgatctttgagtggccc

SEQ ID NO: 975877 - DNA, 25 bp, Homo sapien
tgacgatcgctgatacagagggcag

SEQ ID NO: 975878 - DNA, 25 bp, Homo sapien
ccaaactttccaattgtttctgttg

SEQ ID NO: 975879 - DNA, 25 bp, Homo sapien
tttccaattgtttctgttgatgcat

SEQ ID NO: 975880 - DNA, 25 bp, Homo sapien
cctccaaactttccaattgtttctg

SEQ ID NO: 975881 - DNA, 25 bp, Homo sapien
aactttccaattgtttctgttgatg

SEQ ID NO: 975882 - DNA, 25 bp, Homo sapien
caatagggggaatggtctcacactg

SEQ ID NO: 975883 - DNA, 25 bp, Homo sapien
gaatgaagagactccttgctcctcg

SEQ ID NO: 975884 - DNA, 25 bp, Homo sapien
atctagactccttgctgaatgaaga

SEQ ID NO: 975885 - DNA, 25 bp, Homo sapien
tgctcctcgtcatttacacaagaga

SEQ ID NO: 975886 - DNA, 25 bp, Homo sapien
gcattcctctgaccaccaacaatgg

SEQ ID NO: 975887 - DNA, 25 bp, Homo sapien
ttcctctgaccaccaacaatggaaa

SEQ ID NO: 975888 - DNA, 25 bp, Homo sapien
gaaaacaggatcaaacatatccaaa

SEQ ID NO: 975889 - DNA, 25 bp, Homo sapien
aacaatggaaaacaggatcaaacat

SEQ ID NO: 975890 - DNA, 25 bp, Homo sapien
ttgacgtgtccaacagagagggacc

SEQ ID NO: 975891 - DNA, 25 bp, Homo sapien
tatttgagggtgttccataggctca

SEQ ID NO: 975892 - DNA, 25 bp, Homo sapien
tccaacagaaagcacgaatttgacg

SEQ ID NO: 975893 - DNA, 25 bp, Homo sapien
tccttaataagagagcctgacaact

SEQ ID NO: 975894 - DNA, 25 bp, Homo sapien
gcaacacctattttccacataagaa

SEQ ID NO: 975895 - DNA, 25 bp, Homo sapien
gagggattcttcgtgtgcctcctca

SEQ ID NO: 975896 - DNA, 25 bp, Homo sapien
tgttgtatccaactgacttattagc

SEQ ID NO: 975897 - DNA, 25 bp, Homo sapien
tattagcatacaccttgctgcaagg

SEQ ID NO: 975898 - DNA, 25 bp, Homo sapien
tgaattcaccctgctctcatctttc

SEQ ID NO: 975899 - DNA, 25 bp, Homo sapien
gaggttgcacttgggggtagtgctc

SEQ ID NO: 975900 - DNA, 25 bp, Homo sapien
ctttctgtgatctctcacattcaca

SEQ ID NO: 975901 - DNA, 25 bp, Homo sapien
gttgcacttgggggtagtgctccct

SEQ ID NO: 975902 - DNA, 25 bp, Homo sapien
gaccaagaaatctgcccaggtgagg

SEQ ID NO: 975903 - DNA, 25 bp, Homo sapien
tgtgcctggcgaataaaaggtgttc

SEQ ID NO: 975904 - DNA, 25 bp, Homo sapien
cttggatagaaaggatgtccccgac

SEQ ID NO: 975905 - DNA, 25 bp, Homo sapien
gatgcctacaagtggagctgctcta

SEQ ID NO: 975906 - DNA, 25 bp, Homo sapien
ctctttcttaaagctacgagctgtc

SEQ ID NO: 975907 - DNA, 25 bp, Homo sapien
tcttaaagctacgagctgtctaata

SEQ ID NO: 975908 - DNA, 25 bp, Homo sapien
tttcttaaagctacgagctgtctaa

SEQ ID NO: 975909 - DNA, 25 bp, Homo sapien
ttaaagctacgagctgtctaatatg

SEQ ID NO: 975910 - DNA, 25 bp, Homo sapien
acttttgcagagagccgatgacgtt

SEQ ID NO: 975911 - DNA, 25 bp, Homo sapien
tgacgttctaattgtaacatttccc

SEQ ID NO: 975912 - DNA, 25 bp, Homo sapien
caacttttgcagagagccgatgacg

SEQ ID NO: 975913 - DNA, 25 bp, Homo sapien
gagccgatgacgttctaattgtaac

SEQ ID NO: 975914 - DNA, 25 bp, Homo sapien
atgccaacgggctttctaaagtagg

SEQ ID NO: 975915 - DNA, 25 bp, Homo sapien
aatgccaacgggctttctaaagtag

SEQ ID NO: 975916 - DNA, 25 bp, Homo sapien
tgccaacgggctttctaaagtaggc

SEQ ID NO: 975917 - DNA, 25 bp, Homo sapien
catgtgagggccctgttgcccttca

SEQ ID NO: 975918 - DNA, 25 bp, Homo sapien
gtggccaagagttctcacatgagaa

SEQ ID NO: 975919 - DNA, 25 bp, Homo sapien
caagaggagcatcataaactaccat

SEQ ID NO: 975920 - DNA, 25 bp, Homo sapien
ggccctgttgcccttcatctttgtt

SEQ ID NO: 975921 - DNA, 25 bp, Homo sapien
cttccaaatcgtctagctagtccaa

SEQ ID NO: 975922 - DNA, 25 bp, Homo sapien
gctagtccaaatatctgggtctgca

SEQ ID NO: 975923 - DNA, 25 bp, Homo sapien
tgggtctgcaaacggcattttctga

SEQ ID NO: 975924 - DNA, 25 bp, Homo sapien
tctgcaaacggcattttctgagtcc

SEQ ID NO: 975925 - DNA, 25 bp, Homo sapien
tatgctggccaatattaggctttac

SEQ ID NO: 975926 - DNA, 25 bp, Homo sapien
aatgaattgaattgtatgctggcca

SEQ ID NO: 975927 - DNA, 25 bp, Homo sapien
gccaatattaggctttacaattgtt

SEQ ID NO: 975928 - DNA, 25 bp, Homo sapien
aaagatggtttgatatgcttagtct

SEQ ID NO: 975929 - DNA, 25 bp, Homo sapien
tggtaaacaacttgacatagtatag

SEQ ID NO: 975930 - DNA, 25 bp, Homo sapien
gacatagtatagcaaaacattcatg

SEQ ID NO: 975931 - DNA, 25 bp, Homo sapien
gaaggcagccctgaatcccaaacag

SEQ ID NO: 975932 - DNA, 25 bp, Homo sapien
gcagccctgaatcccaaacagggat

SEQ ID NO: 975933 - DNA, 25 bp, Homo sapien
ttcctggtccctctttccactcctc

SEQ ID NO: 975934 - DNA, 25 bp, Homo sapien
ctcccctggcagcctttcctggtcc

SEQ ID NO: 975935 - DNA, 25 bp, Homo sapien
tggcagcctttcctggtccctcttt

SEQ ID NO: 975936 - DNA, 25 bp, Homo sapien
tcctggtccctctttccactcctcc

SEQ ID NO: 975937 - DNA, 25 bp, Homo sapien
tttgtttgcagagggacacaaccag

SEQ ID NO: 975938 - DNA, 25 bp, Homo sapien
taccaggagacaatgagggctgact

SEQ ID NO: 975939 - DNA, 25 bp, Homo sapien
gaccacatgctaagggtagaagcac

SEQ ID NO: 975940 - DNA, 25 bp, Homo sapien
gatccctggacctgctaccaggaga

SEQ ID NO: 975941 - DNA, 25 bp, Homo sapien
gagaacaaactataccgctctttgc

SEQ ID NO: 975942 - DNA, 25 bp, Homo sapien
tccatattcacatgggctgataatc

SEQ ID NO: 975943 - DNA, 25 bp, Homo sapien
aaggaagagaacaaactataccgct

SEQ ID NO: 975944 - DNA, 25 bp, Homo sapien
aaactataccgctctttgccttctt

SEQ ID NO: 975945 - DNA, 25 bp, Homo sapien
ggccaagcctgaagatcttgagaag

SEQ ID NO: 975946 - DNA, 25 bp, Homo sapien
gtgtttctgtcccatcactaactta

SEQ ID NO: 975947 - DNA, 25 bp, Homo sapien
cactaacttacccactcatactggt

SEQ ID NO: 975948 - DNA, 25 bp, Homo sapien
actcatactggtggtgtcagtgcag

SEQ ID NO: 975949 - DNA, 25 bp, Homo sapien
atgtgccctccggttgcggcactgg

SEQ ID NO: 975950 - DNA, 25 bp, Homo sapien
aactgaaacctgtccctaattctga

SEQ ID NO: 975951 - DNA, 25 bp, Homo sapien
ctaattctgattcccggctctcctt

SEQ ID NO: 975952 - DNA, 25 bp, Homo sapien
cggttgcggcactggcatgccccag

SEQ ID NO: 975953 - DNA, 25 bp, Homo sapien
acagtgcagctacagtgctaatgaa

SEQ ID NO: 975954 - DNA, 25 bp, Homo sapien
tcagattatcttctagacagtgcag

SEQ ID NO: 975955 - DNA, 25 bp, Homo sapien
ctcagattatcttctagacagtgca

SEQ ID NO: 975956 - DNA, 25 bp, Homo sapien
cagctacagtgctaatgaaagatgt

SEQ ID NO: 975957 - DNA, 25 bp, Homo sapien
ctgtgaggtggcatgcgtgactctc

SEQ ID NO: 975958 - DNA, 25 bp, Homo sapien
gccatgtggcagtatgttcaggtcc

SEQ ID NO: 975959 - DNA, 25 bp, Homo sapien
ggcatgcgtgactctcttgccatgt

SEQ ID NO: 975960 - DNA, 25 bp, Homo sapien
catgcacggattccaggctgtgagg

SEQ ID NO: 975961 - DNA, 25 bp, Homo sapien
tctgatctgtgctccataagcctga

SEQ ID NO: 975962 - DNA, 25 bp, Homo sapien
tccataagcctgaatggaattcttc

SEQ ID NO: 975963 - DNA, 25 bp, Homo sapien
ccataagcctgaatggaattcttca

SEQ ID NO: 975964 - DNA, 25 bp, Homo sapien
tagcccagaagtgggtggatggcat

SEQ ID NO: 975965 - DNA, 25 bp, Homo sapien
cccagaagtgggtggatggcattga

SEQ ID NO: 975966 - DNA, 25 bp, Homo sapien
agaagtgggtggatggcattgagaa

SEQ ID NO: 975967 - DNA, 25 bp, Homo sapien
ttagcccagaagtgggtggatggca

SEQ ID NO: 975968 - DNA, 25 bp, Homo sapien
atattaattaacaatccatccctcc

SEQ ID NO: 975969 - DNA, 25 bp, Homo sapien
ccatggcatactccagtgtggtact

SEQ ID NO: 975970 - DNA, 25 bp, Homo sapien
aatatattccatggcatactccagt

SEQ ID NO: 975971 - DNA, 25 bp, Homo sapien
aaatgagggatgattttgatattta

SEQ ID NO: 975972 - DNA, 25 bp, Homo sapien
aatcaattagcccaatctgtccaac

SEQ ID NO: 975973 - DNA, 25 bp, Homo sapien
gcaggtgtgaacagttgtccaatta

SEQ ID NO: 975974 - DNA, 25 bp, Homo sapien
gtccaacaagaccaggcctttcata

SEQ ID NO: 975975 - DNA, 25 bp, Homo sapien
gaacagttgtccaattaaatcaatt

SEQ ID NO: 975976 - DNA, 25 bp, Homo sapien
gaaaagcttgcagtcatctgcaagt

SEQ ID NO: 975977 - DNA, 25 bp, Homo sapien
tatggttaagcccaaatcattccca

SEQ ID NO: 975978 - DNA, 25 bp, Homo sapien
cctacttcaataacatcagactttt

SEQ ID NO: 975979 - DNA, 25 bp, Homo sapien
caagtgaacatcctacttcaataac

SEQ ID NO: 975980 - DNA, 25 bp, Homo sapien
taattccatcccagtgctgtcacga

SEQ ID NO: 975981 - DNA, 25 bp, Homo sapien
cttggtaggagtcaggcggaaccac

SEQ ID NO: 975982 - DNA, 25 bp, Homo sapien
caatctccctcgagatctgggtgaa

SEQ ID NO: 975983 - DNA, 25 bp, Homo sapien
tagttcccctcagaagccagtgtcg

SEQ ID NO: 975984 - DNA, 25 bp, Homo sapien
gcaagagtaggaggcacaggttcaa

SEQ ID NO: 975985 - DNA, 25 bp, Homo sapien
gtgaactttaagtcttccgtgcagg

SEQ ID NO: 975986 - DNA, 25 bp, Homo sapien
tcgaacgcagttcttagcagatagt

SEQ ID NO: 975987 - DNA, 25 bp, Homo sapien
tcaagctgaattatctcgaacgcag

SEQ ID NO: 975988 - DNA, 25 bp, Homo sapien
tcacctgcagcactcatacatatca

SEQ ID NO: 975989 - DNA, 25 bp, Homo sapien
tttttgtttcacctgcagcactcat

SEQ ID NO: 975990 - DNA, 25 bp, Homo sapien
gtttcacctgcagcactcatacata

SEQ ID NO: 975991 - DNA, 25 bp, Homo sapien
gcagcactcatacatatcaccacaa

SEQ ID NO: 975992 - DNA, 25 bp, Homo sapien
gatggatgactaccccaagtttgca

SEQ ID NO: 975993 - DNA, 25 bp, Homo sapien
gagttcccatagttgattcagagca

SEQ ID NO: 975994 - DNA, 25 bp, Homo sapien
agaagtcaatgtccagcactggccc

SEQ ID NO: 975995 - DNA, 25 bp, Homo sapien
tggttagcaacagcggccatcagga

SEQ ID NO: 975996 - DNA, 25 bp, Homo sapien
ggttggcagttgttacccatgagcc

SEQ ID NO: 975997 - DNA, 25 bp, Homo sapien
ggtcgaggttggcagttgttaccca

SEQ ID NO: 975998 - DNA, 25 bp, Homo sapien
tcgaggttggcagttgttacccatg

SEQ ID NO: 975999 - DNA, 25 bp, Homo sapien
gaggttggcagttgttacccatgag

SEQ ID NO: 976000 - DNA, 25 bp, Homo sapien
ggcaaatattcgatttagactggca

SEQ ID NO: 976001 - DNA, 25 bp, Homo sapien
ccccaagcatgtcagcactagaaca

SEQ ID NO: 976002 - DNA, 25 bp, Homo sapien
tgtgcaatcactgctgtggttcaat

SEQ ID NO: 976003 - DNA, 25 bp, Homo sapien
tctgccagccaatagtacatgattt

SEQ ID NO: 976004 - DNA, 25 bp, Homo sapien
agaaggcccagcaaacaactgaaca

SEQ ID NO: 976005 - DNA, 25 bp, Homo sapien
aaggcccagcaaacaactgaacaat

SEQ ID NO: 976006 - DNA, 25 bp, Homo sapien
gaaggcccagcaaacaactgaacaa

SEQ ID NO: 976007 - DNA, 25 bp, Homo sapien
cccaactcagaatttgtgactgtct

SEQ ID NO: 976008 - DNA, 25 bp, Homo sapien
gtcccaactcagaatttgtgactgt

SEQ ID NO: 976009 - DNA, 25 bp, Homo sapien
cagtcccaactcagaatttgtgact

SEQ ID NO: 976010 - DNA, 25 bp, Homo sapien
actcagaatttgtgactgtctgcat

SEQ ID NO: 976011 - DNA, 25 bp, Homo sapien
aatagggaaactgctatctgtcctt

SEQ ID NO: 976012 - DNA, 25 bp, Homo sapien
ttagtgttgaaaatagggaaactgc

SEQ ID NO: 976013 - DNA, 25 bp, Homo sapien
gtatgagatggctgcccagtcacct

SEQ ID NO: 976014 - DNA, 25 bp, Homo sapien
cagctgaggagaggtacaagtgagg

SEQ ID NO: 976015 - DNA, 25 bp, Homo sapien
tcaaggtaggtcactggtacacagg

SEQ ID NO: 976016 - DNA, 25 bp, Homo sapien
acgtgaggagcacgggtggtgagta

SEQ ID NO: 976017 - DNA, 25 bp, Homo sapien
gacaaagactaggatctggctctgg

SEQ ID NO: 976018 - DNA, 25 bp, Homo sapien
ggctcttcctctatatgactgatac

SEQ ID NO: 976019 - DNA, 25 bp, Homo sapien
atgacaaagactaggatctggctct

SEQ ID NO: 976020 - DNA, 25 bp, Homo sapien
tctggctcttcctctatatgactga

SEQ ID NO: 976021 - DNA, 25 bp, Homo sapien
aaaaaactcaggaatccaatggttg

SEQ ID NO: 976022 - DNA, 25 bp, Homo sapien
cagacatttgggtgaagacatgaca

SEQ ID NO: 976023 - DNA, 25 bp, Homo sapien
cgtccactctcttgtcagtggagac

SEQ ID NO: 976024 - DNA, 25 bp, Homo sapien
caggaatccaatggttgtccagaca

SEQ ID NO: 976025 - DNA, 25 bp, Homo sapien
cagggcggcctgtgtaagggtgtaa

SEQ ID NO: 976026 - DNA, 25 bp, Homo sapien
ggcggcctgtgtaagggtgtaagga

SEQ ID NO: 976027 - DNA, 25 bp, Homo sapien
agggcggcctgtgtaagggtgtaag

SEQ ID NO: 976028 - DNA, 25 bp, Homo sapien
gcggcctgtgtaagggtgtaaggag

SEQ ID NO: 976029 - DNA, 25 bp, Homo sapien
tcaaacgtacacaagatgtacgtaa

SEQ ID NO: 976030 - DNA, 25 bp, Homo sapien
taactgaacagggattattggagga

SEQ ID NO: 976031 - DNA, 25 bp, Homo sapien
gatgtacgtaatgtcctgtccattt

SEQ ID NO: 976032 - DNA, 25 bp, Homo sapien
tattggaggatatagtgaaaagaag

SEQ ID NO: 976033 - DNA, 25 bp, Homo sapien
aatcttcaagtggacattctcttca

SEQ ID NO: 976034 - DNA, 25 bp, Homo sapien
ttcaagtggacattctcttcattca

SEQ ID NO: 976035 - DNA, 25 bp, Homo sapien
cttcattcagtgcaattatagtaac

SEQ ID NO: 976036 - DNA, 25 bp, Homo sapien
ttaatcttcaagtggacattctctt

SEQ ID NO: 976037 - DNA, 25 bp, Homo sapien
tcacacagatttatgggcagaacca

SEQ ID NO: 976038 - DNA, 25 bp, Homo sapien
aaattgcttgtgtactaccagccta

SEQ ID NO: 976039 - DNA, 25 bp, Homo sapien
acacagatttatgggcagaaccaca

SEQ ID NO: 976040 - DNA, 25 bp, Homo sapien
actaccagcctattttgcctgttaa

SEQ ID NO: 976041 - DNA, 25 bp, Homo sapien
caagaggacaaatttctcataactg

SEQ ID NO: 976042 - DNA, 25 bp, Homo sapien
agaggacaaatttctcataactgac

SEQ ID NO: 976043 - DNA, 25 bp, Homo sapien
aagaggacaaatttctcataactga

SEQ ID NO: 976044 - DNA, 25 bp, Homo sapien
tgacaagcttcgtttttctagggtg

SEQ ID NO: 976045 - DNA, 25 bp, Homo sapien
atctctgctgtaatatgatgaagaa

SEQ ID NO: 976046 - DNA, 25 bp, Homo sapien
gggctggtaccgcattaaattgatt

SEQ ID NO: 976047 - DNA, 25 bp, Homo sapien
gaagaggcccaatctgttgtttatt

SEQ ID NO: 976048 - DNA, 25 bp, Homo sapien
tagcaaaacgtatttgaaatgcaaa

SEQ ID NO: 976049 - DNA, 25 bp, Homo sapien
ctcctctgggtgataatacatgtac

SEQ ID NO: 976050 - DNA, 25 bp, Homo sapien
cagtgccgtttctttagcaaaacgt

SEQ ID NO: 976051 - DNA, 25 bp, Homo sapien
gataatacatgtacacccagtgccg

SEQ ID NO: 976052 - DNA, 25 bp, Homo sapien
caggagctagaggatgacgctgaca

SEQ ID NO: 976053 - DNA, 25 bp, Homo sapien
ccatttgttggtttgcggaaagaca

SEQ ID NO: 976054 - DNA, 25 bp, Homo sapien
tacccactcgtttcaatagccttcg

SEQ ID NO: 976055 - DNA, 25 bp, Homo sapien
gctgacagcggtcacacaggcagta

SEQ ID NO: 976056 - DNA, 25 bp, Homo sapien
gaggccactggaagggtccagggta

SEQ ID NO: 976057 - DNA, 25 bp, Homo sapien
tgacataagagtcagcatctccacc

SEQ ID NO: 976058 - DNA, 25 bp, Homo sapien
gttcgccactctctaccgctctgca

SEQ ID NO: 976059 - DNA, 25 bp, Homo sapien
atctccaccactgttcgccactctc

SEQ ID NO: 976060 - DNA, 25 bp, Homo sapien
cacccaggctccatgtattcccttg

SEQ ID NO: 976061 - DNA, 25 bp, Homo sapien
tgaggtacagtcacaccagtccagc

SEQ ID NO: 976062 - DNA, 25 bp, Homo sapien
ccagtccagcaatgtgctttgcgat

SEQ ID NO: 976063 - DNA, 25 bp, Homo sapien
atgatcagctcttgtgggtgaggta

SEQ ID NO: 976064 - DNA, 25 bp, Homo sapien
gcaatgtgctttgcgattccttgcc

SEQ ID NO: 976065 - DNA, 25 bp, Homo sapien
tccagtctaaattccacaccttcag

SEQ ID NO: 976066 - DNA, 25 bp, Homo sapien
tcactgctccagtctaaattccaca

SEQ ID NO: 976067 - DNA, 25 bp, Homo sapien
catgacttgccaccgccctcactgc

SEQ ID NO: 976068 - DNA, 25 bp, Homo sapien
ggagtgaaccagggggatcccagca

SEQ ID NO: 976069 - DNA, 25 bp, Homo sapien
atggctcaatgagagcttctggacc

SEQ ID NO: 976070 - DNA, 25 bp, Homo sapien
agaaaagctggaagttactggcagg

SEQ ID NO: 976071 - DNA, 25 bp, Homo sapien
aaaagctggaagttactggcaggca

SEQ ID NO: 976072 - DNA, 25 bp, Homo sapien
aagaaaagctggaagttactggcag

SEQ ID NO: 976073 - DNA, 25 bp, Homo sapien
gaaaagctggaagttactggcaggc

SEQ ID NO: 976074 - DNA, 25 bp, Homo sapien
ggttgcccgtagctcaagactggtt

SEQ ID NO: 976075 - DNA, 25 bp, Homo sapien
gaagaacacaccctgctatgattga

SEQ ID NO: 976076 - DNA, 25 bp, Homo sapien
ttatcacttaggaccaggttgcccg

SEQ ID NO: 976077 - DNA, 25 bp, Homo sapien
tccaagcaagtatactggtccaggc

SEQ ID NO: 976078 - DNA, 25 bp, Homo sapien
ccagcccatgatataacaaagagaa

SEQ ID NO: 976079 - DNA, 25 bp, Homo sapien
cccagcccatgatataacaaagaga

SEQ ID NO: 976080 - DNA, 25 bp, Homo sapien
agcccatgatataacaaagagaagg

SEQ ID NO: 976081 - DNA, 25 bp, Homo sapien
ccccagcccatgatataacaaagag

SEQ ID NO: 976082 - DNA, 25 bp, Homo sapien
tgtgctccgcccaagagtcatggtg

SEQ ID NO: 976083 - DNA, 25 bp, Homo sapien
gatgtcttcggtattcacttcagga

SEQ ID NO: 976084 - DNA, 25 bp, Homo sapien
taaaaacctgcagtctctagggtga

SEQ ID NO: 976085 - DNA, 25 bp, Homo sapien
gaagacacctgtgttaaaaccgctg

SEQ ID NO: 976086 - DNA, 25 bp, Homo sapien
tgcaacatatgggtaatagatcacc

SEQ ID NO: 976087 - DNA, 25 bp, Homo sapien
ctattgtagttataataagcctgac

SEQ ID NO: 976088 - DNA, 25 bp, Homo sapien
gagcagtctgaattaataaggttct

SEQ ID NO: 976089 - DNA, 25 bp, Homo sapien
ataaggttctgctctattgtagtta

SEQ ID NO: 976090 - DNA, 25 bp, Homo sapien
tctttcacaatggtcagaaagacaa

SEQ ID NO: 976091 - DNA, 25 bp, Homo sapien
ttcacaatggtcagaaagacaatgc

SEQ ID NO: 976092 - DNA, 25 bp, Homo sapien
tgttctttcacaatggtcagaaaga

SEQ ID NO: 976093 - DNA, 25 bp, Homo sapien
tcattgttctttcacaatggtcaga

SEQ ID NO: 976094 - DNA, 25 bp, Homo sapien
tgctccaaagcataggtgtccctag

SEQ ID NO: 976095 - DNA, 25 bp, Homo sapien
aaacaagggcaagaggctgatcgct

SEQ ID NO: 976096 - DNA, 25 bp, Homo sapien
gaatgggcatactcctggctgtgag

SEQ ID NO: 976097 - DNA, 25 bp, Homo sapien
taatgcctgcacgaatgttagagac

SEQ ID NO: 976098 - DNA, 25 bp, Homo sapien
ggtggtattgcaatccaagacccaa

SEQ ID NO: 976099 - DNA, 25 bp, Homo sapien
ggtattgcaatccaagacccaaagt

SEQ ID NO: 976100 - DNA, 25 bp, Homo sapien
tattgcaatccaagacccaaagttt

SEQ ID NO: 976101 - DNA, 25 bp, Homo sapien
tgcaatccaagacccaaagtttatt

SEQ ID NO: 976102 - DNA, 25 bp, Homo sapien
agaagaaagggcaccacctgaggct

SEQ ID NO: 976103 - DNA, 25 bp, Homo sapien
cacctgaggctgcaccttctggagg

SEQ ID NO: 976104 - DNA, 25 bp, Homo sapien
ccacctgaggctgcaccttctggag

SEQ ID NO: 976105 - DNA, 25 bp, Homo sapien
cacagaagaaagggcaccacctgag

SEQ ID NO: 976106 - DNA, 25 bp, Homo sapien
gtgaatttccatcagacccctaagg

SEQ ID NO: 976107 - DNA, 25 bp, Homo sapien
tataagatcaacttgcctggaatgg

SEQ ID NO: 976108 - DNA, 25 bp, Homo sapien
cttgatttgaatgtcacagtgaatt

SEQ ID NO: 976109 - DNA, 25 bp, Homo sapien
tgaggtcaacaattcatgtccttga

SEQ ID NO: 976110 - DNA, 25 bp, Homo sapien
taacagggcagaactagctagcaca

SEQ ID NO: 976111 - DNA, 25 bp, Homo sapien
actttcgaacggtgcataacagggc

SEQ ID NO: 976112 - DNA, 25 bp, Homo sapien
tattcaatcgcggtagtagcccaga

SEQ ID NO: 976113 - DNA, 25 bp, Homo sapien
tacatcgtgccctgaagacaatgga

SEQ ID NO: 976114 - DNA, 25 bp, Homo sapien
gagcgcgtgtcagacgaagggaatt

SEQ ID NO: 976115 - DNA, 25 bp, Homo sapien
atttcatttgcaccaagggagcgcg

SEQ ID NO: 976116 - DNA, 25 bp, Homo sapien
gcggttttgcgcaactgggtgactc

SEQ ID NO: 976117 - DNA, 25 bp, Homo sapien
gtgactcgcgtgtccctccgcattt

SEQ ID NO: 976118 - DNA, 25 bp, Homo sapien
gctcaagggatatccgagctttctg

SEQ ID NO: 976119 - DNA, 25 bp, Homo sapien
caactgtacgaagctcaagggatat

SEQ ID NO: 976120 - DNA, 25 bp, Homo sapien
ctcaagggatatccgagctttctgg

SEQ ID NO: 976121 - DNA, 25 bp, Homo sapien
tacgaagctcaagggatatccgagc

SEQ ID NO: 976122 - DNA, 25 bp, Homo sapien
gaactccggcgtttctcgaaagcca

SEQ ID NO: 976123 - DNA, 25 bp, Homo sapien
tagatcctggttagacatccatcca

SEQ ID NO: 976124 - DNA, 25 bp, Homo sapien
tcggagaacgcaaactcgaggcaga

SEQ ID NO: 976125 - DNA, 25 bp, Homo sapien
caagctcgccgtgctaactcggaga

SEQ ID NO: 976126 - DNA, 25 bp, Homo sapien
cgatccgaggcagagcgctttaaaa

SEQ ID NO: 976127 - DNA, 25 bp, Homo sapien
gaaatccctcctgttaggttcgcga

SEQ ID NO: 976128 - DNA, 25 bp, Homo sapien
aagtccggattccaccagggcaggt

SEQ ID NO: 976129 - DNA, 25 bp, Homo sapien
cgaaggtacctcgtcatctcggcgg

SEQ ID NO: 976130 - DNA, 25 bp, Homo sapien
tggctgtccgctgaaaggttttaga

SEQ ID NO: 976131 - DNA, 25 bp, Homo sapien
ctggctgtccgctgaaaggttttag

SEQ ID NO: 976132 - DNA, 25 bp, Homo sapien
tccaacaagcagggcgttttgggga

SEQ ID NO: 976133 - DNA, 25 bp, Homo sapien
ctgtccgctgaaaggttttagagaa

SEQ ID NO: 976134 - DNA, 25 bp, Homo sapien
tcggagccgctttctgctgccgggc

SEQ ID NO: 976135 - DNA, 25 bp, Homo sapien
ctcggagccgctttctgctgccggg

SEQ ID NO: 976136 - DNA, 25 bp, Homo sapien
tcctcggagccgctttctgctgccg

SEQ ID NO: 976137 - DNA, 25 bp, Homo sapien
gagccgctttctgctgccgggcggc

SEQ ID NO: 976138 - DNA, 25 bp, Homo sapien
agggcgcggtgaggaagcccgccgg

SEQ ID NO: 976139 - DNA, 25 bp, Homo sapien
agcccgccgggggcccgcagctcca

SEQ ID NO: 976140 - DNA, 25 bp, Homo sapien
gcccgccgggggcccgcagctccat

SEQ ID NO: 976141 - DNA, 25 bp, Homo sapien
tagcaggcgccaagtctcttccatg

SEQ ID NO: 976142 - DNA, 25 bp, Homo sapien
gctgagctggcctagcaggcgccaa

SEQ ID NO: 976143 - DNA, 25 bp, Homo sapien
ttccatgtgaataacaaatactccc

SEQ ID NO: 976144 - DNA, 25 bp, Homo sapien
accggcggccgcgattggtctgcgc

SEQ ID NO: 976145 - DNA, 25 bp, Homo sapien
atttcggtgtcacccagcggccctg

SEQ ID NO: 976146 - DNA, 25 bp, Homo sapien
gcctctggatttcggtgtcacccag

SEQ ID NO: 976147 - DNA, 25 bp, Homo sapien
ggagcctctggatttcggtgtcacc

SEQ ID NO: 976148 - DNA, 25 bp, Homo sapien
tggatttcggtgtcacccagcggcc

SEQ ID NO: 976149 - DNA, 25 bp, Homo sapien
acacatcgtcttcagggtaggctag

SEQ ID NO: 976150 - DNA, 25 bp, Homo sapien
cacacatcgtcttcagggtaggcta

SEQ ID NO: 976151 - DNA, 25 bp, Homo sapien
tcgttgcctggcatgagccaagagg

SEQ ID NO: 976152 - DNA, 25 bp, Homo sapien
agctgcagggccagttgggtcgttg

SEQ ID NO: 976153 - DNA, 25 bp, Homo sapien
agctcttgtgcaggcatttagaagg

SEQ ID NO: 976154 - DNA, 25 bp, Homo sapien
ttagctcttgtgcaggcatttagaa

SEQ ID NO: 976155 - DNA, 25 bp, Homo sapien
ctcttgtgcaggcatttagaaggaa

SEQ ID NO: 976156 - DNA, 25 bp, Homo sapien
cttgtgcaggcatttagaaggaacc

SEQ ID NO: 976157 - DNA, 25 bp, Homo sapien
tatccaaaaggcactctattaacat

SEQ ID NO: 976158 - DNA, 25 bp, Homo sapien
gcttaacagatcctttaactattaa

SEQ ID NO: 976159 - DNA, 25 bp, Homo sapien
gtttgctgttccaagtgcctctatg

SEQ ID NO: 976160 - DNA, 25 bp, Homo sapien
cctctatgataagcttaacagatcc

SEQ ID NO: 976161 - DNA, 25 bp, Homo sapien
tgccagtgctcatcaaggtgccctg

SEQ ID NO: 976162 - DNA, 25 bp, Homo sapien
ctaaactgcgtgagggccgcaaggc

SEQ ID NO: 976163 - DNA, 25 bp, Homo sapien
catgttcagtgaggagatggctcaa

SEQ ID NO: 976164 - DNA, 25 bp, Homo sapien
cagcctctgggttaggtgctgctga

SEQ ID NO: 976165 - DNA, 25 bp, Homo sapien
caggaatagcctggatcttccagga

SEQ ID NO: 976166 - DNA, 25 bp, Homo sapien
ccctgctggcttgatgttgccatga

SEQ ID NO: 976167 - DNA, 25 bp, Homo sapien
gactgtccaatcagtaaccaccctg

SEQ ID NO: 976168 - DNA, 25 bp, Homo sapien
gggctgcagttctcaaacaagggca

SEQ ID NO: 976169 - DNA, 25 bp, Homo sapien
gtcaatagtctctatctccatagca

SEQ ID NO: 976170 - DNA, 25 bp, Homo sapien
tctgttggtgtgcttgggtccacca

SEQ ID NO: 976171 - DNA, 25 bp, Homo sapien
ctctgttggtgtgcttgggtccacc

SEQ ID NO: 976172 - DNA, 25 bp, Homo sapien
tgatctttggtcaatagtctctatc

SEQ ID NO: 976173 - DNA, 25 bp, Homo sapien
acaagacccgatggtatacttttca

SEQ ID NO: 976174 - DNA, 25 bp, Homo sapien
atcacaagaatagaatgcaggaaat

SEQ ID NO: 976175 - DNA, 25 bp, Homo sapien
ctatttgaggtcatatatcatttga

SEQ ID NO: 976176 - DNA, 25 bp, Homo sapien
gccaaaccatgccaatgccccatgt

SEQ ID NO: 976177 - DNA, 25 bp, Homo sapien
ctactctagggcttcacatttatgg

SEQ ID NO: 976178 - DNA, 25 bp, Homo sapien
tgtgagacttagcacaacggacgcc

SEQ ID NO: 976179 - DNA, 25 bp, Homo sapien
tggtcacgtcccaaggcttgatagg

SEQ ID NO: 976180 - DNA, 25 bp, Homo sapien
gcactttacctttgtccctagatgg

SEQ ID NO: 976181 - DNA, 25 bp, Homo sapien
ggcttatacagaacttcagctgaga

SEQ ID NO: 976182 - DNA, 25 bp, Homo sapien
atagaactaaggatttgcagcctgg

SEQ ID NO: 976183 - DNA, 25 bp, Homo sapien
aagatgctgcaaccattctgtatcc

SEQ ID NO: 976184 - DNA, 25 bp, Homo sapien
tctgtatccactggtgcatagaact

SEQ ID NO: 976185 - DNA, 25 bp, Homo sapien
ccactggtgcatagaactaaggatt

SEQ ID NO: 976186 - DNA, 25 bp, Homo sapien
tactcaagtgctggttccttaaaaa

SEQ ID NO: 976187 - DNA, 25 bp, Homo sapien
gacctgtatttcagtctaagagcta

SEQ ID NO: 976188 - DNA, 25 bp, Homo sapien
ctcccttaaagagattgaggcctaa

SEQ ID NO: 976189 - DNA, 25 bp, Homo sapien
gctgtgcccaaaggcaaagttatag

SEQ ID NO: 976190 - DNA, 25 bp, Homo sapien
gcaaacccagcagtgtatgccttgg

SEQ ID NO: 976191 - DNA, 25 bp, Homo sapien
taaggcacgtggtcctctagagggc

SEQ ID NO: 976192 - DNA, 25 bp, Homo sapien
gaaactagtttgtcgatgccaggat

SEQ ID NO: 976193 - DNA, 25 bp, Homo sapien
tgtcagtcacttccgctccgtggag

SEQ ID NO: 976194 - DNA, 25 bp, Homo sapien
cggacggctggtcggcccgtggaga

SEQ ID NO: 976195 - DNA, 25 bp, Homo sapien
tggtcggcccgtggagacggccgcg

SEQ ID NO: 976196 - DNA, 25 bp, Homo sapien
aggggtctgcggacggctggtcggc

SEQ ID NO: 976197 - DNA, 25 bp, Homo sapien
gtctgcggacggctggtcggcccgt

SEQ ID NO: 976198 - DNA, 25 bp, Homo sapien
agcgagggcgaggtcccgccggcgg

SEQ ID NO: 976199 - DNA, 25 bp, Homo sapien
cggagcgagggcgaggtcccgccgg

SEQ ID NO: 976200 - DNA, 25 bp, Homo sapien
cggtgcggagcgagggcgaggtccc

SEQ ID NO: 976201 - DNA, 25 bp, Homo sapien
ggtgcggagcgagggcgaggtcccg

SEQ ID NO: 976202 - DNA, 25 bp, Homo sapien
gctgcgggacgacggcttcgcgagg

SEQ ID NO: 976203 - DNA, 25 bp, Homo sapien
gctggcagcggcctgacgcgtggtg

SEQ ID NO: 976204 - DNA, 25 bp, Homo sapien
cggcctgacgcgtggtgacggcgcc

SEQ ID NO: 976205 - DNA, 25 bp, Homo sapien
gcggagcttggcgcggcagctggca

SEQ ID NO: 976206 - DNA, 25 bp, Homo sapien
cttcggcccgcacgggtggcagcgg

SEQ ID NO: 976207 - DNA, 25 bp, Homo sapien
tcggcccgcacgggtggcagcggtc

SEQ ID NO: 976208 - DNA, 25 bp, Homo sapien
gatatgcgggttagaaaccaaggaa

SEQ ID NO: 976209 - DNA, 25 bp, Homo sapien
aaccaaggaaagagcgccgacgcct

SEQ ID NO: 976210 - DNA, 25 bp, Homo sapien
cggtgccactttcgcccaacagggt

SEQ ID NO: 976211 - DNA, 25 bp, Homo sapien
cgcaagagctgcagacccacgggca

SEQ ID NO: 976212 - DNA, 25 bp, Homo sapien
acccacgggcagtgcggtgccactt

SEQ ID NO: 976213 - DNA, 25 bp, Homo sapien
acgggcagtgcggtgccactttcgc

SEQ ID NO: 976214 - DNA, 25 bp, Homo sapien
aatttgccaggttaaggtggcctgc

SEQ ID NO: 976215 - DNA, 25 bp, Homo sapien
tcctccagaaacatgcgcagaagtg

SEQ ID NO: 976216 - DNA, 25 bp, Homo sapien
gccattgtcgtgtcaaagcttcgca

SEQ ID NO: 976217 - DNA, 25 bp, Homo sapien
taccttcagattactcagatgcggg

SEQ ID NO: 976218 - DNA, 25 bp, Homo sapien
caccgaggcacaatgacgtgcagca

SEQ ID NO: 976219 - DNA, 25 bp, Homo sapien
cctgtttcttggcaacaccttttgg

SEQ ID NO: 976220 - DNA, 25 bp, Homo sapien
acagctgctgatatggaaagcaccg

SEQ ID NO: 976221 - DNA, 25 bp, Homo sapien
acaatgacgtgcagcaatcctttcc

SEQ ID NO: 976222 - DNA, 25 bp, Homo sapien
attcatttgcatgctgaagagaaat

SEQ ID NO: 976223 - DNA, 25 bp, Homo sapien
catttgcatgctgaagagaaatatg

SEQ ID NO: 976224 - DNA, 25 bp, Homo sapien
cattcatttgcatgctgaagagaaa

SEQ ID NO: 976225 - DNA, 25 bp, Homo sapien
ttcatttgcatgctgaagagaaata

SEQ ID NO: 976226 - DNA, 25 bp, Homo sapien
tctcaagacctagaccaaagccagt

SEQ ID NO: 976227 - DNA, 25 bp, Homo sapien
ttacaagcaccagaaagagctgtgg

SEQ ID NO: 976228 - DNA, 25 bp, Homo sapien
gctttccctgactactgcagcctga

SEQ ID NO: 976229 - DNA, 25 bp, Homo sapien
tcatttgacagaagtagggccttaa

SEQ ID NO: 976230 - DNA, 25 bp, Homo sapien
ccagatggatggagagaagactgac

SEQ ID NO: 976231 - DNA, 25 bp, Homo sapien
tctaaggattcagatgttgctacca

SEQ ID NO: 976232 - DNA, 25 bp, Homo sapien
tgaaatcctacatttacccatggac

SEQ ID NO: 976233 - DNA, 25 bp, Homo sapien
gggtgatcaactgactcatctgaat

SEQ ID NO: 976234 - DNA, 25 bp, Homo sapien
caagatgacttggactcaaaaccag

SEQ ID NO: 976235 - DNA, 25 bp, Homo sapien
gcaagatcacatacagtcaaaggca

SEQ ID NO: 976236 - DNA, 25 bp, Homo sapien
ccaacagattcacatgacaggtggg

SEQ ID NO: 976237 - DNA, 25 bp, Homo sapien
ggcattgtcctaattagctcatgga

SEQ ID NO: 976238 - DNA, 25 bp, Homo sapien
aatcccgggctctacaattttcaga

SEQ ID NO: 976239 - DNA, 25 bp, Homo sapien
gacttcttcatcagctacacatttg

SEQ ID NO: 976240 - DNA, 25 bp, Homo sapien
gagatagctggcttctattcctgac

SEQ ID NO: 976241 - DNA, 25 bp, Homo sapien
catctgtgtgaaggacaatgtatac

SEQ ID NO: 976242 - DNA, 25 bp, Homo sapien
tggtaatcccttcaaagtctatggc

SEQ ID NO: 976243 - DNA, 25 bp, Homo sapien
cacctgctcaactagaatgcctgaa

SEQ ID NO: 976244 - DNA, 25 bp, Homo sapien
gacttctaaatctctagcccctggg

SEQ ID NO: 976245 - DNA, 25 bp, Homo sapien
agcatcagagctagccaaatacctg

SEQ ID NO: 976246 - DNA, 25 bp, Homo sapien
gaaatctgaagaatactcatggaat

SEQ ID NO: 976247 - DNA, 25 bp, Homo sapien
tgaaataagtcaatgtaagacagtg

SEQ ID NO: 976248 - DNA, 25 bp, Homo sapien
cacgaagcaggagcttacttgttta

SEQ ID NO: 976249 - DNA, 25 bp, Homo sapien
tgactcagtgcctcgcacgaagcag

SEQ ID NO: 976250 - DNA, 25 bp, Homo sapien
taggacaccatctacacatcagcag

SEQ ID NO: 976251 - DNA, 25 bp, Homo sapien
tacaaaggcttgcattactcaagag

SEQ ID NO: 976252 - DNA, 25 bp, Homo sapien
cctgtttgcctgcatacctaggaca

SEQ ID NO: 976253 - DNA, 25 bp, Homo sapien
tcctgtcatgtatcatagccccagc

SEQ ID NO: 976254 - DNA, 25 bp, Homo sapien
tatctgatggtcattggaaaaaacg

SEQ ID NO: 976255 - DNA, 25 bp, Homo sapien
tttatctgatggtcattggaaaaaa

SEQ ID NO: 976256 - DNA, 25 bp, Homo sapien
tctgatggtcattggaaaaaacgaa

SEQ ID NO: 976257 - DNA, 25 bp, Homo sapien
tgatggtcattggaaaaaacgaagg

SEQ ID NO: 976258 - DNA, 25 bp, Homo sapien
cactcaggacacaaggacggaaaca

SEQ ID NO: 976259 - DNA, 25 bp, Homo sapien
tatataggagcttggacactaccac

SEQ ID NO: 976260 - DNA, 25 bp, Homo sapien
ggacattccaagctgaggccttaga

SEQ ID NO: 976261 - DNA, 25 bp, Homo sapien
tactaactgccacaacaggagaggg

SEQ ID NO: 976262 - DNA, 25 bp, Homo sapien
ggattataccactatgtacttcatc

SEQ ID NO: 976263 - DNA, 25 bp, Homo sapien
cagtcaactaggattataccactat

SEQ ID NO: 976264 - DNA, 25 bp, Homo sapien
ctaggattataccactatgtacttc

SEQ ID NO: 976265 - DNA, 25 bp, Homo sapien
caactaggattataccactatgtac

SEQ ID NO: 976266 - DNA, 25 bp, Homo sapien
tgagaagctacatagtgaaggccct

SEQ ID NO: 976267 - DNA, 25 bp, Homo sapien
tgattagaaaggttccacagtgccc

SEQ ID NO: 976268 - DNA, 25 bp, Homo sapien
gatacaattattccaagccccagtg

SEQ ID NO: 976269 - DNA, 25 bp, Homo sapien
gaagatatttctaacaacagcacgg

SEQ ID NO: 976270 - DNA, 25 bp, Homo sapien
tgacccaggtatacgtgaccatgaa

SEQ ID NO: 976271 - DNA, 25 bp, Homo sapien
tgcaatactgagactggcccaaaat

SEQ ID NO: 976272 - DNA, 25 bp, Homo sapien
tatacgtgaccatgaatgtgtggaa

SEQ ID NO: 976273 - DNA, 25 bp, Homo sapien
aaaatgacccaggtatacgtgacca

SEQ ID NO: 976274 - DNA, 25 bp, Homo sapien
taaaacagggtagtatgagagcaca

SEQ ID NO: 976275 - DNA, 25 bp, Homo sapien
tccagtgaagtagacaggcaagggt

SEQ ID NO: 976276 - DNA, 25 bp, Homo sapien
tgaatgcgtacgatgcactaggaac

SEQ ID NO: 976277 - DNA, 25 bp, Homo sapien
cactaggaactagcttgggcttcgg

SEQ ID NO: 976278 - DNA, 25 bp, Homo sapien
taattctgctgagtggacgcaaaca

SEQ ID NO: 976279 - DNA, 25 bp, Homo sapien
tacaaaattatcaagagagtccctg

SEQ ID NO: 976280 - DNA, 25 bp, Homo sapien
taataagcctcccaaatttggtgtg

SEQ ID NO: 976281 - DNA, 25 bp, Homo sapien
catgaaaatgtgctaggcaccgtac

SEQ ID NO: 976282 - DNA, 25 bp, Homo sapien
caaaaaacactttagctatcttggt

SEQ ID NO: 976283 - DNA, 25 bp, Homo sapien
aaaacactttagctatcttggtact

SEQ ID NO: 976284 - DNA, 25 bp, Homo sapien
ctttagctatcttggtactaatgat

SEQ ID NO: 976285 - DNA, 25 bp, Homo sapien
gctatcttggtactaatgatttcta

SEQ ID NO: 976286 - DNA, 25 bp, Homo sapien
taagtttcaaccaatgcacctttgc

SEQ ID NO: 976287 - DNA, 25 bp, Homo sapien
ttcaatatgtgggaaagtaaatctg

SEQ ID NO: 976288 - DNA, 25 bp, Homo sapien
taatgtgcaactaatgaagatggct

SEQ ID NO: 976289 - DNA, 25 bp, Homo sapien
tagctgctcatagtcactgaataag

SEQ ID NO: 976290 - DNA, 25 bp, Homo sapien
tgtagaaactgtcgaccaaatgcac

SEQ ID NO: 976291 - DNA, 25 bp, Homo sapien
tgcacaaggtcaagggtggatagct

SEQ ID NO: 976292 - DNA, 25 bp, Homo sapien
taggcagtgccttagaaacaagtgg

SEQ ID NO: 976293 - DNA, 25 bp, Homo sapien
aaagtatatagatggacagggtccc

SEQ ID NO: 976294 - DNA, 25 bp, Homo sapien
gaacctgaatctgaaactaatttaa

SEQ ID NO: 976295 - DNA, 25 bp, Homo sapien
cctcacagcactcaaactaatattt

SEQ ID NO: 976296 - DNA, 25 bp, Homo sapien
aaacgtgtgataatcaaaccacaac

SEQ ID NO: 976297 - DNA, 25 bp, Homo sapien
cttgcgaaaagtatagggagtctac

SEQ ID NO: 976298 - DNA, 25 bp, Homo sapien
ttgcctggaagcactatgttaaaag

SEQ ID NO: 976299 - DNA, 25 bp, Homo sapien
ggacctaaataagcattgtttccat

SEQ ID NO: 976300 - DNA, 25 bp, Homo sapien
gagaggggaagcatttgggacctaa

SEQ ID NO: 976301 - DNA, 25 bp, Homo sapien
cctggaagcactatgttaaaagtaa

SEQ ID NO: 976302 - DNA, 25 bp, Homo sapien
gcagcattttatttagccgtcacag

SEQ ID NO: 976303 - DNA, 25 bp, Homo sapien
caactacattgcattgtcctgtgga

SEQ ID NO: 976304 - DNA, 25 bp, Homo sapien
caagccactggaataaaggtcactg

SEQ ID NO: 976305 - DNA, 25 bp, Homo sapien
tcttgcagttcccattgccatgaga

SEQ ID NO: 976306 - DNA, 25 bp, Homo sapien
gtatcacatcacgtttccgacgagt

SEQ ID NO: 976307 - DNA, 25 bp, Homo sapien
tactaggagagttagaagtgccatc

SEQ ID NO: 976308 - DNA, 25 bp, Homo sapien
tgcagccgacggactagttgattta

SEQ ID NO: 976309 - DNA, 25 bp, Homo sapien
tccgacgagtttcataagtgcaaag

SEQ ID NO: 976310 - DNA, 25 bp, Homo sapien
ggaagggggtgaagattctacagaa

SEQ ID NO: 976311 - DNA, 25 bp, Homo sapien
gagaatgggtaatggaagggggtga

SEQ ID NO: 976312 - DNA, 25 bp, Homo sapien
aagggggtgaagattctacagaatc

SEQ ID NO: 976313 - DNA, 25 bp, Homo sapien
atggaagggggtgaagattctacag

SEQ ID NO: 976314 - DNA, 25 bp, Homo sapien
gaacattcttactgcgtcctttaga

SEQ ID NO: 976315 - DNA, 25 bp, Homo sapien
tacttttcgaatgtgacggcgaaca

SEQ ID NO: 976316 - DNA, 25 bp, Homo sapien
cacacttggatatatggcttctagg

SEQ ID NO: 976317 - DNA, 25 bp, Homo sapien
ggcgaacacctcgtctagaattgaa

SEQ ID NO: 976318 - DNA, 25 bp, Homo sapien
atcctctgaagagactgcggcataa

SEQ ID NO: 976319 - DNA, 25 bp, Homo sapien
agacttggtgggcagtagaattttt

SEQ ID NO: 976320 - DNA, 25 bp, Homo sapien
cctctgaagagactgcggcataact

SEQ ID NO: 976321 - DNA, 25 bp, Homo sapien
tctgaagagactgcggcataactta

SEQ ID NO: 976322 - DNA, 25 bp, Homo sapien
tcaaaaatagtgtccacatctttta

SEQ ID NO: 976323 - DNA, 25 bp, Homo sapien
gacatggtcatccagacagcaacat

SEQ ID NO: 976324 - DNA, 25 bp, Homo sapien
caacataaagttcctccacagctct

SEQ ID NO: 976325 - DNA, 25 bp, Homo sapien
tcctccacagctcttgatgctgaga

SEQ ID NO: 976326 - DNA, 25 bp, Homo sapien
cagacagcaacataaagttcctcca

SEQ ID NO: 976327 - DNA, 25 bp, Homo sapien
aatgctatagtaaactgacatagta

SEQ ID NO: 976328 - DNA, 25 bp, Homo sapien
tccatggtatgagaaagaaccaaaa

SEQ ID NO: 976329 - DNA, 25 bp, Homo sapien
aaactgacatagtataacttcatta

SEQ ID NO: 976330 - DNA, 25 bp, Homo sapien
aaatgctatagtaaactgacatagt

SEQ ID NO: 976331 - DNA, 25 bp, Homo sapien
taccagatttggatgtctgtagtgg

SEQ ID NO: 976332 - DNA, 25 bp, Homo sapien
taacaaaggaggatctccaggttcc

SEQ ID NO: 976333 - DNA, 25 bp, Homo sapien
atgtctgtagtggttgctgtaacaa

SEQ ID NO: 976334 - DNA, 25 bp, Homo sapien
tgctgtaacaaaggaggatctccag

SEQ ID NO: 976335 - DNA, 25 bp, Homo sapien
ctacatggaagacaaacacccaccc

SEQ ID NO: 976336 - DNA, 25 bp, Homo sapien
gacagtatttgtcccttaaaggcat

SEQ ID NO: 976337 - DNA, 25 bp, Homo sapien
tgacagtatttgtcccttaaaggca

SEQ ID NO: 976338 - DNA, 25 bp, Homo sapien
tttcagtggactcgacctactttgc

SEQ ID NO: 976339 - DNA, 25 bp, Homo sapien
gtggactcgacctactttgctttca

SEQ ID NO: 976340 - DNA, 25 bp, Homo sapien
taagaagctcttcattgcggcgtgg

SEQ ID NO: 976341 - DNA, 25 bp, Homo sapien
tcactgtaagaagctcttcattgcg

SEQ ID NO: 976342 - DNA, 25 bp, Homo sapien
cgggccccacctggcgcagcctccg

SEQ ID NO: 976343 - DNA, 25 bp, Homo sapien
gggccccacctggcgcagcctccgc

SEQ ID NO: 976344 - DNA, 25 bp, Homo sapien
ccacctggcgcagcctccgctgacc

SEQ ID NO: 976345 - DNA, 25 bp, Homo sapien
aaggagccggaaccggagcgggcag

SEQ ID NO: 976346 - DNA, 25 bp, Homo sapien
gcgctgacgcggaagcgccacagct

SEQ ID NO: 976347 - DNA, 25 bp, Homo sapien
cgctgtgtggctaggcgggaggcgc

SEQ ID NO: 976348 - DNA, 25 bp, Homo sapien
ggcagttgacaggaggaaccgcccg

SEQ ID NO: 976349 - DNA, 25 bp, Homo sapien
aagcagagactctccggcagcgaca

SEQ ID NO: 976350 - DNA, 25 bp, Homo sapien
tctccggcagcgacagggagcgact

SEQ ID NO: 976351 - DNA, 25 bp, Homo sapien
gagagcccgagctaccgccgcggag

SEQ ID NO: 976352 - DNA, 25 bp, Homo sapien
gcgacagggagcgactgactgaccc

SEQ ID NO: 976353 - DNA, 25 bp, Homo sapien
gtggggggagtgtggccggcacgcc

SEQ ID NO: 976354 - DNA, 25 bp, Homo sapien
gggagtgtggccggcacgcccggga

SEQ ID NO: 976355 - DNA, 25 bp, Homo sapien
agtgtggccggcacgcccgggagcg

SEQ ID NO: 976356 - DNA, 25 bp, Homo sapien
tggggggagtgtggccggcacgccc

SEQ ID NO: 976357 - DNA, 25 bp, Homo sapien
gtatagacaaaagttcaccgtgaaa

SEQ ID NO: 976358 - DNA, 25 bp, Homo sapien
tgctcttgtatagacaaaagttcac

SEQ ID NO: 976359 - DNA, 25 bp, Homo sapien
aagttcaccgtgaaatgactcacca

SEQ ID NO: 976360 - DNA, 25 bp, Homo sapien
ccgtgaaatgactcaccaaaacaga

SEQ ID NO: 976361 - DNA, 25 bp, Homo sapien
caagtaaaattgtatcccgtgttca

SEQ ID NO: 976362 - DNA, 25 bp, Homo sapien
taatattaaaatgcccacgccacac

SEQ ID NO: 976363 - DNA, 25 bp, Homo sapien
ccatggaggtgaactatctccacat

SEQ ID NO: 976364 - DNA, 25 bp, Homo sapien
tcctcactcaagtagaacccagtgt

SEQ ID NO: 976365 - DNA, 25 bp, Homo sapien
tgaataagtgggtgaacagtcttta

SEQ ID NO: 976366 - DNA, 25 bp, Homo sapien
taagtgggtgaacagtctttatgta

SEQ ID NO: 976367 - DNA, 25 bp, Homo sapien
gtgaacagtctttatgtatatatcc

SEQ ID NO: 976368 - DNA, 25 bp, Homo sapien
agtgggtgaacagtctttatgtata

SEQ ID NO: 976369 - DNA, 25 bp, Homo sapien
tctcccagtgaaatagcagttgccc

SEQ ID NO: 976370 - DNA, 25 bp, Homo sapien
tgcacgagggtgtagcaataaccaa

SEQ ID NO: 976371 - DNA, 25 bp, Homo sapien
cactgttgtacacagcgaacctggt

SEQ ID NO: 976372 - DNA, 25 bp, Homo sapien
tgcaactgtgtgctctgcacgaggg

SEQ ID NO: 976373 - DNA, 25 bp, Homo sapien
ggtgctcatcgattctacgctgagg

SEQ ID NO: 976374 - DNA, 25 bp, Homo sapien
tttgactgggtggcaagttcagcag

SEQ ID NO: 976375 - DNA, 25 bp, Homo sapien
tcaccaggggtgctcatcgattcta

SEQ ID NO: 976376 - DNA, 25 bp, Homo sapien
gattctacgctgagggtctctccag

SEQ ID NO: 976377 - DNA, 25 bp, Homo sapien
tggacctggaatagggacaccaaac

SEQ ID NO: 976378 - DNA, 25 bp, Homo sapien
ctatggacctggaatagggacacca

SEQ ID NO: 976379 - DNA, 25 bp, Homo sapien
atggacctggaatagggacaccaaa

SEQ ID NO: 976380 - DNA, 25 bp, Homo sapien
tatggacctggaatagggacaccaa

SEQ ID NO: 976381 - DNA, 25 bp, Homo sapien
cctcggttctagggctagttcccat

SEQ ID NO: 976382 - DNA, 25 bp, Homo sapien
tcggttctagggctagttcccattc

SEQ ID NO: 976383 - DNA, 25 bp, Homo sapien
ctcggttctagggctagttcccatt

SEQ ID NO: 976384 - DNA, 25 bp, Homo sapien
ctaggattcaggtcgaattccgcga

SEQ ID NO: 976385 - DNA, 25 bp, Homo sapien
ttacaggaacgctgaccgggctgtc

SEQ ID NO: 976386 - DNA, 25 bp, Homo sapien
cgggctgtctgctggtcgcgtggtg

SEQ ID NO: 976387 - DNA, 25 bp, Homo sapien
gaattccgcgatgatccgcctgctg

SEQ ID NO: 976388 - DNA, 25 bp, Homo sapien
caacggctacttttgtgtgctgaga

SEQ ID NO: 976389 - DNA, 25 bp, Homo sapien
catgctgcaccgaagctgtaccctt

SEQ ID NO: 976390 - DNA, 25 bp, Homo sapien
ggtttgcagcgtctgtcaccactga

SEQ ID NO: 976391 - DNA, 25 bp, Homo sapien
gaacggctgcacaaaggtagggcta

SEQ ID NO: 976392 - DNA, 25 bp, Homo sapien
gctccagtcctctctatgctacaca

SEQ ID NO: 976393 - DNA, 25 bp, Homo sapien
ggcctttggccgcttgtttcagaca

SEQ ID NO: 976394 - DNA, 25 bp, Homo sapien
gcctttggccgcttgtttcagacat

SEQ ID NO: 976395 - DNA, 25 bp, Homo sapien
aaaacctggtaatatcttgccccat

SEQ ID NO: 976396 - DNA, 25 bp, Homo sapien
tatggtgtcctagatcagtagttcc

SEQ ID NO: 976397 - DNA, 25 bp, Homo sapien
taaatcgagatccactgtcctagag

SEQ ID NO: 976398 - DNA, 25 bp, Homo sapien
gtagttccccaagtatgtccccaga

SEQ ID NO: 976399 - DNA, 25 bp, Homo sapien
tcagaaatgtcaagttctcaggccc

SEQ ID NO: 976400 - DNA, 25 bp, Homo sapien
tctgcataaggaatagaactgccaa

SEQ ID NO: 976401 - DNA, 25 bp, Homo sapien
gagtaaggggcatgaatcctattcc

SEQ ID NO: 976402 - DNA, 25 bp, Homo sapien
tccttgtctggggtcagagtcagtt

SEQ ID NO: 976403 - DNA, 25 bp, Homo sapien
catgtgggaacgcccttaagagtaa

SEQ ID NO: 976404 - DNA, 25 bp, Homo sapien
tatatctaatgctaaatgacgagtc

SEQ ID NO: 976405 - DNA, 25 bp, Homo sapien
cacattgtgcacatgtaccctaaaa

SEQ ID NO: 976406 - DNA, 25 bp, Homo sapien
ggtgcagcacaccagcatggcacat

SEQ ID NO: 976407 - DNA, 25 bp, Homo sapien
gtatacatatgtaactaacctgcac

SEQ ID NO: 976408 - DNA, 25 bp, Homo sapien
gggctgaaatgcatttctccctgga

SEQ ID NO: 976409 - DNA, 25 bp, Homo sapien
catgaactggaattagagatattgg

SEQ ID NO: 976410 - DNA, 25 bp, Homo sapien
catcccagagttcttgcaatagaag

SEQ ID NO: 976411 - DNA, 25 bp, Homo sapien
tctctgtgtgctcttctcactgcct

SEQ ID NO: 976412 - DNA, 25 bp, Homo sapien
gtagtagcttcacaaaacaaggttg

SEQ ID NO: 976413 - DNA, 25 bp, Homo sapien
tttaacaacagccagggcatgatac

SEQ ID NO: 976414 - DNA, 25 bp, Homo sapien
gtaaatggctcaacatgacaccagg

SEQ ID NO: 976415 - DNA, 25 bp, Homo sapien
gcttgaattctaggtaacagacagg

SEQ ID NO: 976416 - DNA, 25 bp, Homo sapien
ggaaatccctaagatcaagctggtg

SEQ ID NO: 976417 - DNA, 25 bp, Homo sapien
gacccctctctgtaagaagctagga

SEQ ID NO: 976418 - DNA, 25 bp, Homo sapien
tctacttatgccaagacccactggg

SEQ ID NO: 976419 - DNA, 25 bp, Homo sapien
gactttcagtatctctagggcctaa

SEQ ID NO: 976420 - DNA, 25 bp, Homo sapien
ggatgatgtgtcagctgggtcccca

SEQ ID NO: 976421 - DNA, 25 bp, Homo sapien
tccttctcggtgagcacagctaggg

SEQ ID NO: 976422 - DNA, 25 bp, Homo sapien
gatgtgatctccacctccttgcggg

SEQ ID NO: 976423 - DNA, 25 bp, Homo sapien
aaagtgggctcattggccgctgcaa

SEQ ID NO: 976424 - DNA, 25 bp, Homo sapien
aaaaatgcatccacaaaagccccac

SEQ ID NO: 976425 - DNA, 25 bp, Homo sapien
aaaatgcatccacaaaagccccaca

SEQ ID NO: 976426 - DNA, 25 bp, Homo sapien
caaaaatgcatccacaaaagcccca

SEQ ID NO: 976427 - DNA, 25 bp, Homo sapien
aagttcttgcagccggggatctggc

SEQ ID NO: 976428 - DNA, 25 bp, Homo sapien
catttcctgctgtaactgagcctgg

SEQ ID NO: 976429 - DNA, 25 bp, Homo sapien
gaaatggctcttaaggcgggcagcc

SEQ ID NO: 976430 - DNA, 25 bp, Homo sapien
tgctgtaactgagcctggaaatggc

SEQ ID NO: 976431 - DNA, 25 bp, Homo sapien
catgctgctgcgtgataagccgggc

SEQ ID NO: 976432 - DNA, 25 bp, Homo sapien
caactggcctcttcggactttggag

SEQ ID NO: 976433 - DNA, 25 bp, Homo sapien
tatcctcgctgtgagtggagcaccg

SEQ ID NO: 976434 - DNA, 25 bp, Homo sapien
tatccaagctagtggcggtcccagt

SEQ ID NO: 976435 - DNA, 25 bp, Homo sapien
gggtctgaacggattgccccacgtc

SEQ ID NO: 976436 - DNA, 25 bp, Homo sapien
ggagggtctgaacggattgccccac

SEQ ID NO: 976437 - DNA, 25 bp, Homo sapien
gtctgaacggattgccccacgtcag

SEQ ID NO: 976438 - DNA, 25 bp, Homo sapien
agggtctgaacggattgccccacgt

SEQ ID NO: 976439 - DNA, 25 bp, Homo sapien
taaagaaacagcgagcgggctgtcc

SEQ ID NO: 976440 - DNA, 25 bp, Homo sapien
tatcccggacctaatgcggaacggc

SEQ ID NO: 976441 - DNA, 25 bp, Homo sapien
cagagggttacgctgagctcggtcc

SEQ ID NO: 976442 - DNA, 25 bp, Homo sapien
gacactggcaccagaggtgcgcact

SEQ ID NO: 976443 - DNA, 25 bp, Homo sapien
catccaacgatttgggagctcagga

SEQ ID NO: 976444 - DNA, 25 bp, Homo sapien
tgaacgacgcatccaacgatttggg

SEQ ID NO: 976445 - DNA, 25 bp, Homo sapien
caacgatttgggagctcaggaccca

SEQ ID NO: 976446 - DNA, 25 bp, Homo sapien
caaacacccaggtgaacgacgcatc

SEQ ID NO: 976447 - DNA, 25 bp, Homo sapien
gggtctctagtttgtgccatgactc

SEQ ID NO: 976448 - DNA, 25 bp, Homo sapien
ccccagcttggacttctctttagaa

SEQ ID NO: 976449 - DNA, 25 bp, Homo sapien
cctgtagagcttctatagagttctg

SEQ ID NO: 976450 - DNA, 25 bp, Homo sapien
gatttagccctcataacatgtcttt

SEQ ID NO: 976451 - DNA, 25 bp, Homo sapien
gggctacagcacttacgcagccgca

SEQ ID NO: 976452 - DNA, 25 bp, Homo sapien
agctggggctacagcacttacgcag

SEQ ID NO: 976453 - DNA, 25 bp, Homo sapien
gcccgtgagcgagctgactgacaag

SEQ ID NO: 976454 - DNA, 25 bp, Homo sapien
aacgccatgcccgtgagcgagctga

SEQ ID NO: 976455 - DNA, 25 bp, Homo sapien
tggactggctgtcccacgagctgtc

SEQ ID NO: 976456 - DNA, 25 bp, Homo sapien
cacccaaggcacaggtctgtacgat

SEQ ID NO: 976457 - DNA, 25 bp, Homo sapien
ctgtcaaagcgctaaccagccaggg

SEQ ID NO: 976458 - DNA, 25 bp, Homo sapien
tctgtacgatggtctggactggctg

SEQ ID NO: 976459 - DNA, 25 bp, Homo sapien
aatgtggcactggatcttgagtaat

SEQ ID NO: 976460 - DNA, 25 bp, Homo sapien
gtttgtacacggtgttgtctgtagc

SEQ ID NO: 976461 - DNA, 25 bp, Homo sapien
cttcgggtggtgctataatgtggca

SEQ ID NO: 976462 - DNA, 25 bp, Homo sapien
aatttgctgtggtttgtacacggtg

SEQ ID NO: 976463 - DNA, 25 bp, Homo sapien
agcctttgctgaagattacaggatc

SEQ ID NO: 976464 - DNA, 25 bp, Homo sapien
tagttccatgaaccacgtaattgtt

SEQ ID NO: 976465 - DNA, 25 bp, Homo sapien
tctcgtagctacttagagccgttct

SEQ ID NO: 976466 - DNA, 25 bp, Homo sapien
tcttgggctggaaatactgtagggt

SEQ ID NO: 976467 - DNA, 25 bp, Homo sapien
tcagaagatcgagaccacggtgaaa

SEQ ID NO: 976468 - DNA, 25 bp, Homo sapien
gaagatcgagaccacggtgaaaccc

SEQ ID NO: 976469 - DNA, 25 bp, Homo sapien
ggtcagaagatcgagaccacggtga

SEQ ID NO: 976470 - DNA, 25 bp, Homo sapien
cagaagatcgagaccacggtgaaac

SEQ ID NO: 976471 - DNA, 25 bp, Homo sapien
tcagcctactttggtgcccaaaggg

SEQ ID NO: 976472 - DNA, 25 bp, Homo sapien
tcagctcagcctactttggtgccca

SEQ ID NO: 976473 - DNA, 25 bp, Homo sapien
gaagttccggatcctggtctcagct

SEQ ID NO: 976474 - DNA, 25 bp, Homo sapien
ctaaattcacaggttgaagttccgg

SEQ ID NO: 976475 - DNA, 25 bp, Homo sapien
caccagttttctgagtggccaagct

SEQ ID NO: 976476 - DNA, 25 bp, Homo sapien
cactgcaactgcgaagagtttgggc

SEQ ID NO: 976477 - DNA, 25 bp, Homo sapien
aaagcaaacccatgctggcaccagt

SEQ ID NO: 976478 - DNA, 25 bp, Homo sapien
ctttgaggcatgcaagaatacagtc

SEQ ID NO: 976479 - DNA, 25 bp, Homo sapien
cttttctactctaggcttttgttca

SEQ ID NO: 976480 - DNA, 25 bp, Homo sapien
ccacctctcaatttattccgcaagg

SEQ ID NO: 976481 - DNA, 25 bp, Homo sapien
atttattccgcaaggtgaagcctca

SEQ ID NO: 976482 - DNA, 25 bp, Homo sapien
tttgttcacagaccctattgcccca

SEQ ID NO: 976483 - DNA, 25 bp, Homo sapien
gtgattatgtaagacaagtttcttg

SEQ ID NO: 976484 - DNA, 25 bp, Homo sapien
cataattttcttagattaagaagtt

SEQ ID NO: 976485 - DNA, 25 bp, Homo sapien
taggaataaaatgccatgatataat

SEQ ID NO: 976486 - DNA, 25 bp, Homo sapien
tgttttttggggatgcatgctggaa

SEQ ID NO: 976487 - DNA, 25 bp, Homo sapien
tgatggacaacagaactactgctaa

SEQ ID NO: 976488 - DNA, 25 bp, Homo sapien
gagtaggtaaattgatgcattgaca

SEQ ID NO: 976489 - DNA, 25 bp, Homo sapien
tgtattgcctacatacatgcataga

SEQ ID NO: 976490 - DNA, 25 bp, Homo sapien
tgttgaatattagagtgggcatagg

SEQ ID NO: 976491 - DNA, 25 bp, Homo sapien
gtgttgctttaccagcccctccaat

SEQ ID NO: 976492 - DNA, 25 bp, Homo sapien
ccagcccctccaatcaggtgatgcg

SEQ ID NO: 976493 - DNA, 25 bp, Homo sapien
gcccctccaatcaggtgatgcgcca

SEQ ID NO: 976494 - DNA, 25 bp, Homo sapien
gtgggtgttgctttaccagcccctc

SEQ ID NO: 976495 - DNA, 25 bp, Homo sapien
gcaggatggtattagatcttctcta

SEQ ID NO: 976496 - DNA, 25 bp, Homo sapien
tgtatgggcaggacggtaaggacaa

SEQ ID NO: 976497 - DNA, 25 bp, Homo sapien
aaggacaatgggcaggatggtatta

SEQ ID NO: 976498 - DNA, 25 bp, Homo sapien
ttagatcttctctatgccatctcct

SEQ ID NO: 976499 - DNA, 25 bp, Homo sapien
gccatacagtagtgggcagccaggc

SEQ ID NO: 976500 - DNA, 25 bp, Homo sapien
tccaagccatacagtagtgggcagc

SEQ ID NO: 976501 - DNA, 25 bp, Homo sapien
cagggaattcggctgtgggggcaag

SEQ ID NO: 976502 - DNA, 25 bp, Homo sapien
gagagccactaagactggccaggtg

SEQ ID NO: 976503 - DNA, 25 bp, Homo sapien
gtctccgtaattttgtggaccatgc

SEQ ID NO: 976504 - DNA, 25 bp, Homo sapien
ctgtcagtgataccatagactcagg

SEQ ID NO: 976505 - DNA, 25 bp, Homo sapien
gagattcctttgatgacccccaatg

SEQ ID NO: 976506 - DNA, 25 bp, Homo sapien
tgatgacccccaatggagatccatg

SEQ ID NO: 976507 - DNA, 25 bp, Homo sapien
acagctgatagcaggagggacccag

SEQ ID NO: 976508 - DNA, 25 bp, Homo sapien
ccagcagggcttgagacaggcttta

SEQ ID NO: 976509 - DNA, 25 bp, Homo sapien
caggctttaggtggggtgtcactca

SEQ ID NO: 976510 - DNA, 25 bp, Homo sapien
cccagcagggcttgagacaggcttt

SEQ ID NO: 976511 - DNA, 25 bp, Homo sapien
ctgtgcagagatgattcctggggca

SEQ ID NO: 976512 - DNA, 25 bp, Homo sapien
gtgcagagatgattcctggggcaac

SEQ ID NO: 976513 - DNA, 25 bp, Homo sapien
attcctggggcaacccttggtacag

SEQ ID NO: 976514 - DNA, 25 bp, Homo sapien
gggcaacccttggtacagtcagccc

SEQ ID NO: 976515 - DNA, 25 bp, Homo sapien
acttgagcttctcttgccgacgcca

SEQ ID NO: 976516 - DNA, 25 bp, Homo sapien
gccgacgccatttggctcttctgtt

SEQ ID NO: 976517 - DNA, 25 bp, Homo sapien
tgagcttctcttgccgacgccattt

SEQ ID NO: 976518 - DNA, 25 bp, Homo sapien
ttctcttgccgacgccatttggctc

SEQ ID NO: 976519 - DNA, 25 bp, Homo sapien
tccttgtggtttgtacagtgttgca

SEQ ID NO: 976520 - DNA, 25 bp, Homo sapien
tcctccttgtggtttgtacagtgtt

SEQ ID NO: 976521 - DNA, 25 bp, Homo sapien
tctccacctcattggaacccaaagc

SEQ ID NO: 976522 - DNA, 25 bp, Homo sapien
ccttgtggtttgtacagtgttgcag

SEQ ID NO: 976523 - DNA, 25 bp, Homo sapien
cgggccactgaatcaggatactgcc

SEQ ID NO: 976524 - DNA, 25 bp, Homo sapien
agctttccacgggccactgaatcag

SEQ ID NO: 976525 - DNA, 25 bp, Homo sapien
tccacgggccactgaatcaggatac

SEQ ID NO: 976526 - DNA, 25 bp, Homo sapien
ggtggcagtagccagctttccacgg

SEQ ID NO: 976527 - DNA, 25 bp, Homo sapien
agaagatagtccgattccggtggcc

SEQ ID NO: 976528 - DNA, 25 bp, Homo sapien
gcttggggagaagatagtccgattc

SEQ ID NO: 976529 - DNA, 25 bp, Homo sapien
gatagtccgattccggtggccggtc

SEQ ID NO: 976530 - DNA, 25 bp, Homo sapien
aagatagtccgattccggtggccgg

SEQ ID NO: 976531 - DNA, 25 bp, Homo sapien
ctggtgacctgagccgtgtgcacgg

SEQ ID NO: 976532 - DNA, 25 bp, Homo sapien
gcaggactcggttgatggaggagac

SEQ ID NO: 976533 - DNA, 25 bp, Homo sapien
tgagccgtgtgcacggtagtccctg

SEQ ID NO: 976534 - DNA, 25 bp, Homo sapien
gcacggtagtccctggtcctcctgt

SEQ ID NO: 976535 - DNA, 25 bp, Homo sapien
aagcccttcagcacaaagctggcgt

SEQ ID NO: 976536 - DNA, 25 bp, Homo sapien
cagcacaaagctggcgttggatttc

SEQ ID NO: 976537 - DNA, 25 bp, Homo sapien
gagtcttgtcctgggtgcaaagccc

SEQ ID NO: 976538 - DNA, 25 bp, Homo sapien
actgggagtcttgtcctgggtgcaa

SEQ ID NO: 976539 - DNA, 25 bp, Homo sapien
tgtagccagccgtggcttgcttccc

SEQ ID NO: 976540 - DNA, 25 bp, Homo sapien
ctttggctccaagacacctgtgcgg

SEQ ID NO: 976541 - DNA, 25 bp, Homo sapien
tagtaacgccctaggatcttgctca

SEQ ID NO: 976542 - DNA, 25 bp, Homo sapien
ctgggcaattcgagccaccacaggg

SEQ ID NO: 976543 - DNA, 25 bp, Homo sapien
aggctcttgccttcagaggagccct

SEQ ID NO: 976544 - DNA, 25 bp, Homo sapien
aggatctcccaggaagtgacccaag

SEQ ID NO: 976545 - DNA, 25 bp, Homo sapien
tccgagaggatctcccaggaagtga

SEQ ID NO: 976546 - DNA, 25 bp, Homo sapien
cccttttcaacctccgagaggatct

SEQ ID NO: 976547 - DNA, 25 bp, Homo sapien
taaggatccgtgagatgtcacaggg

SEQ ID NO: 976548 - DNA, 25 bp, Homo sapien
gtcacagggccgcattccactgact

SEQ ID NO: 976549 - DNA, 25 bp, Homo sapien
gactgctagccgcacaatctgctgc

SEQ ID NO: 976550 - DNA, 25 bp, Homo sapien
atctgctgccgggtatccagaggca

SEQ ID NO: 976551 - DNA, 25 bp, Homo sapien
tgtggagagggtcactcaggcccct

SEQ ID NO: 976552 - DNA, 25 bp, Homo sapien
gagagggtcactcaggcccctccag

SEQ ID NO: 976553 - DNA, 25 bp, Homo sapien
ccaggctgtcaacgcaagctgcttt

SEQ ID NO: 976554 - DNA, 25 bp, Homo sapien
tcccaccaccgagtgcatcctctcc

SEQ ID NO: 976555 - DNA, 25 bp, Homo sapien
gctgaccctcctcagaaggatgaga

SEQ ID NO: 976556 - DNA, 25 bp, Homo sapien
ctcagaaggatgagactccagctgg

SEQ ID NO: 976557 - DNA, 25 bp, Homo sapien
agggaagttccttctaggagctcct

SEQ ID NO: 976558 - DNA, 25 bp, Homo sapien
gaagggaagttccttctaggagctc

SEQ ID NO: 976559 - DNA, 25 bp, Homo sapien
ttcagtcctgccagggggtccagag

SEQ ID NO: 976560 - DNA, 25 bp, Homo sapien
tgatgatctggtcttggtaacagcc

SEQ ID NO: 976561 - DNA, 25 bp, Homo sapien
agagcccgtgctcaagagcagaggg

SEQ ID NO: 976562 - DNA, 25 bp, Homo sapien
gggtccagagctatagagagcccgt

SEQ ID NO: 976563 - DNA, 25 bp, Homo sapien
ggatggaactgaaaagataggctct

SEQ ID NO: 976564 - DNA, 25 bp, Homo sapien
cctgactttctttacggatggaact

SEQ ID NO: 976565 - DNA, 25 bp, Homo sapien
gagagcctcagcagtgtgacaggaa

SEQ ID NO: 976566 - DNA, 25 bp, Homo sapien
gctctggaacccaacatggttagat

SEQ ID NO: 976567 - DNA, 25 bp, Homo sapien
catggggtcaacaccactttctaca

SEQ ID NO: 976568 - DNA, 25 bp, Homo sapien
tcagtttagattcatcctctttccc

SEQ ID NO: 976569 - DNA, 25 bp, Homo sapien
cttggtggtgcttttagatttcagt

SEQ ID NO: 976570 - DNA, 25 bp, Homo sapien
caagcacttatttgggggctgctcc

SEQ ID NO: 976571 - DNA, 25 bp, Homo sapien
cagcatttggcctctagcatttgac

SEQ ID NO: 976572 - DNA, 25 bp, Homo sapien
gggcagcatttggcctctagcattt

SEQ ID NO: 976573 - DNA, 25 bp, Homo sapien
gcagcatttggcctctagcatttga

SEQ ID NO: 976574 - DNA, 25 bp, Homo sapien
agcactgggtatgcatgccagcaag

SEQ ID NO: 976575 - DNA, 25 bp, Homo sapien
tccgtaggaggaacatagagaattg

SEQ ID NO: 976576 - DNA, 25 bp, Homo sapien
aagtttccgtaggaggaacatagag

SEQ ID NO: 976577 - DNA, 25 bp, Homo sapien
ttgccacagtgacttgaagcaatga

SEQ ID NO: 976578 - DNA, 25 bp, Homo sapien
cgtaggaggaacatagagaattgcc

SEQ ID NO: 976579 - DNA, 25 bp, Homo sapien
ggacgatgcccacccagtccagagg

SEQ ID NO: 976580 - DNA, 25 bp, Homo sapien
agctgacagcagttgtcctagtggg

SEQ ID NO: 976581 - DNA, 25 bp, Homo sapien
tcttcattgctctggtccctaagct

SEQ ID NO: 976582 - DNA, 25 bp, Homo sapien
tccctaagctctgacagctgacagc

SEQ ID NO: 976583 - DNA, 25 bp, Homo sapien
tggaacgcctcacaagtgctagacc

SEQ ID NO: 976584 - DNA, 25 bp, Homo sapien
ttttccctaacgtcacgggagcagc

SEQ ID NO: 976585 - DNA, 25 bp, Homo sapien
cagctgggaagagaccgaagaacga

SEQ ID NO: 976586 - DNA, 25 bp, Homo sapien
gagcgtgaagcgagccttttcccta

SEQ ID NO: 976587 - DNA, 25 bp, Homo sapien
tagccaaggtaaaatgtcggaagtc

SEQ ID NO: 976588 - DNA, 25 bp, Homo sapien
ggtaggaggttccacaaagctctga

SEQ ID NO: 976589 - DNA, 25 bp, Homo sapien
acggagattcctccaggactctgcc

SEQ ID NO: 976590 - DNA, 25 bp, Homo sapien
tcaaagcccacatcggtaggaggtt

SEQ ID NO: 976591 - DNA, 25 bp, Homo sapien
taggtgggtatacaagtgtgcgccc

SEQ ID NO: 976592 - DNA, 25 bp, Homo sapien
ctaggtgggtatacaagtgtgcgcc

SEQ ID NO: 976593 - DNA, 25 bp, Homo sapien
gcggagggcggtggcgctctggcac

SEQ ID NO: 976594 - DNA, 25 bp, Homo sapien
gggcggagggcggtggcgctctggc

SEQ ID NO: 976595 - DNA, 25 bp, Homo sapien
ctaattgggcggagggcggtggcgc

SEQ ID NO: 976596 - DNA, 25 bp, Homo sapien
ttgggcggagggcggtggcgctctg

SEQ ID NO: 976597 - DNA, 25 bp, Homo sapien
cggcggcggagatcgcgtctctttc

SEQ ID NO: 976598 - DNA, 25 bp, Homo sapien
ggcggagatcgcgtctctttcgctc

SEQ ID NO: 976599 - DNA, 25 bp, Homo sapien
gatcgcgtctctttcgctccgtgtc

SEQ ID NO: 976600 - DNA, 25 bp, Homo sapien
gtggcggcggcggagatcgcgtctc

SEQ ID NO: 976601 - DNA, 25 bp, Homo sapien
ctgctcctgtgagcgcccggcgagt

SEQ ID NO: 976602 - DNA, 25 bp, Homo sapien
tgcccctcgcctcgactccctttca

SEQ ID NO: 976603 - DNA, 25 bp, Homo sapien
tccgtcccgtccaccgtccgcagct

SEQ ID NO: 976604 - DNA, 25 bp, Homo sapien
gactccctttcaccaacaccgacac

SEQ ID NO: 976605 - DNA, 25 bp, Homo sapien
attgacacctccagtccggccagcc

SEQ ID NO: 976606 - DNA, 25 bp, Homo sapien
gccagccgctccactcgttgccttt

SEQ ID NO: 976607 - DNA, 25 bp, Homo sapien
tccagtccggccagccgctccactc

SEQ ID NO: 976608 - DNA, 25 bp, Homo sapien
gctccactcgttgcctttgcatctc

SEQ ID NO: 976609 - DNA, 25 bp, Homo sapien
gccttcgggcgggagtcaggcattg

SEQ ID NO: 976610 - DNA, 25 bp, Homo sapien
agtcaggcattgactccaccttccg

SEQ ID NO: 976611 - DNA, 25 bp, Homo sapien
catcaagatggtgagaacgggcccc

SEQ ID NO: 976612 - DNA, 25 bp, Homo sapien
gcgggagtcaggcattgactccacc

SEQ ID NO: 976613 - DNA, 25 bp, Homo sapien
cagagcgttcaggtggatgtcatcc

SEQ ID NO: 976614 - DNA, 25 bp, Homo sapien
catccagtgttagtaattgaataat

SEQ ID NO: 976615 - DNA, 25 bp, Homo sapien
ctggaattccttcagagcgttcagg

SEQ ID NO: 976616 - DNA, 25 bp, Homo sapien
aattggtatttctatactcaacttg

SEQ ID NO: 976617 - DNA, 25 bp, Homo sapien
tattatgatttgatattttgtacag

SEQ ID NO: 976618 - DNA, 25 bp, Homo sapien
ttatgatttgatattttgtacagta

SEQ ID NO: 976619 - DNA, 25 bp, Homo sapien
tatgatttgatattttgtacagtac

SEQ ID NO: 976620 - DNA, 25 bp, Homo sapien
ttattatgatttgatattttgtaca

SEQ ID NO: 976621 - DNA, 25 bp, Homo sapien
ggctagtaacgcagtagctgctgtc

SEQ ID NO: 976622 - DNA, 25 bp, Homo sapien
gttattatggctagtaacgcagtag

SEQ ID NO: 976623 - DNA, 25 bp, Homo sapien
cagccattgttattatggctagtaa

SEQ ID NO: 976624 - DNA, 25 bp, Homo sapien
tatggctagtaacgcagtagctgct

SEQ ID NO: 976625 - DNA, 25 bp, Homo sapien
ctcatttggattccccatttccatg

SEQ ID NO: 976626 - DNA, 25 bp, Homo sapien
ccctcatttggattccccatttcca

SEQ ID NO: 976627 - DNA, 25 bp, Homo sapien
tcccctcatttggattccccatttc

SEQ ID NO: 976628 - DNA, 25 bp, Homo sapien
ctcccctcatttggattccccattt

SEQ ID NO: 976629 - DNA, 25 bp, Homo sapien
ctctttaatgcaactccaacttgcc

SEQ ID NO: 976630 - DNA, 25 bp, Homo sapien
cctctttaatgcaactccaacttgc

SEQ ID NO: 976631 - DNA, 25 bp, Homo sapien
gatgattgttatggtcctcctgaga

SEQ ID NO: 976632 - DNA, 25 bp, Homo sapien
ttttggcacagttggctcgggagca

SEQ ID NO: 976633 - DNA, 25 bp, Homo sapien
caagtgtatccagagccagtgagtc

SEQ ID NO: 976634 - DNA, 25 bp, Homo sapien
cgtatatgtaaactgcggcccgatt

SEQ ID NO: 976635 - DNA, 25 bp, Homo sapien
aggtttatacttatagccgcttctg

SEQ ID NO: 976636 - DNA, 25 bp, Homo sapien
gtttatacttatagccgcttctggg

SEQ ID NO: 976637 - DNA, 25 bp, Homo sapien
gaaggtttatacttatagccgcttc

SEQ ID NO: 976638 - DNA, 25 bp, Homo sapien
ttgaaggtttatacttatagccgct

SEQ ID NO: 976639 - DNA, 25 bp, Homo sapien
tgtaagtgttccaaatgtgtttaag

SEQ ID NO: 976640 - DNA, 25 bp, Homo sapien
cctaaggtaggttaggccaagctgt

SEQ ID NO: 976641 - DNA, 25 bp, Homo sapien
ttgcccaattgtagacttatgtaag

SEQ ID NO: 976642 - DNA, 25 bp, Homo sapien
tatgtaagtgttccaaatgtgttta

SEQ ID NO: 976643 - DNA, 25 bp, Homo sapien
gagactgtttgggtacacgtccgct

SEQ ID NO: 976644 - DNA, 25 bp, Homo sapien
cacgtccgcttagagggtagagaga

SEQ ID NO: 976645 - DNA, 25 bp, Homo sapien
tattcattacagtgccaaagtagag

SEQ ID NO: 976646 - DNA, 25 bp, Homo sapien
aagagagcgaggcttttatcatgac

SEQ ID NO: 976647 - DNA, 25 bp, Homo sapien
taaggaagcagttttgactctccca

SEQ ID NO: 976648 - DNA, 25 bp, Homo sapien
tatctttcagtgatcatggtgtccc

SEQ ID NO: 976649 - DNA, 25 bp, Homo sapien
tcttaatgcagtagaggactgggaa

SEQ ID NO: 976650 - DNA, 25 bp, Homo sapien
tttgaacagttctgaagctgaggag

SEQ ID NO: 976651 - DNA, 25 bp, Homo sapien
gcacttctggctggcagattcgccc

SEQ ID NO: 976652 - DNA, 25 bp, Homo sapien
gcagattcgcccttgctaagtctgt

SEQ ID NO: 976653 - DNA, 25 bp, Homo sapien
tcttattgccagcataaacagttgc

SEQ ID NO: 976654 - DNA, 25 bp, Homo sapien
gagtggagagacatcctatgcacaa

SEQ ID NO: 976655 - DNA, 25 bp, Homo sapien
tccacaaagaatggcccatgggaat

SEQ ID NO: 976656 - DNA, 25 bp, Homo sapien
tcttgtgtgaaagtgctccacaaag

SEQ ID NO: 976657 - DNA, 25 bp, Homo sapien
agtgctccacaaagaatggcccatg

SEQ ID NO: 976658 - DNA, 25 bp, Homo sapien
caaagaatggcccatgggaatgttt

SEQ ID NO: 976659 - DNA, 25 bp, Homo sapien
cagctgactgctcgcgggagcatta

SEQ ID NO: 976660 - DNA, 25 bp, Homo sapien
tggctgtccaaatagcatggactgg

SEQ ID NO: 976661 - DNA, 25 bp, Homo sapien
tggactggtctgcagccggagctct

SEQ ID NO: 976662 - DNA, 25 bp, Homo sapien
tcttagtgaggatgaggcacgacgc

SEQ ID NO: 976663 - DNA, 25 bp, Homo sapien
gaatcccaagtagcatccaagtgta

SEQ ID NO: 976664 - DNA, 25 bp, Homo sapien
gtgtgcagctgttgcctgaatccca

SEQ ID NO: 976665 - DNA, 25 bp, Homo sapien
caagtgtaaggctggcacgcttgcc

SEQ ID NO: 976666 - DNA, 25 bp, Homo sapien
gctctgtgaatatctgatcgatggg

SEQ ID NO: 976667 - DNA, 25 bp, Homo sapien
gaccggctccctgtaggataatgaa

SEQ ID NO: 976668 - DNA, 25 bp, Homo sapien
gatgtggtgactccgtttgaaagcg

SEQ ID NO: 976669 - DNA, 25 bp, Homo sapien
caaatgatggtctaatttgatgtgg

SEQ ID NO: 976670 - DNA, 25 bp, Homo sapien
gaaagcggaagctgccggtttcaga

SEQ ID NO: 976671 - DNA, 25 bp, Homo sapien
ggaaggaactccatgctcattaagt

SEQ ID NO: 976672 - DNA, 25 bp, Homo sapien
tctgccctaggctgccatctttagt

SEQ ID NO: 976673 - DNA, 25 bp, Homo sapien
ttcatggtccttaactctggaagga

SEQ ID NO: 976674 - DNA, 25 bp, Homo sapien
ggtgttgctgtattgcagatgctgc

SEQ ID NO: 976675 - DNA, 25 bp, Homo sapien
caacagtgactggtgaagtcgatcg

SEQ ID NO: 976676 - DNA, 25 bp, Homo sapien
tcgatcgaggtaaattgctcccatt

SEQ ID NO: 976677 - DNA, 25 bp, Homo sapien
tctaatgggcccctgggaaatgtct

SEQ ID NO: 976678 - DNA, 25 bp, Homo sapien
ttagctaaattgcaacagtgactgg

SEQ ID NO: 976679 - DNA, 25 bp, Homo sapien
ttgtatgtaatttaggctgagttcc

SEQ ID NO: 976680 - DNA, 25 bp, Homo sapien
gtatgtaatttaggctgagttcctc

SEQ ID NO: 976681 - DNA, 25 bp, Homo sapien
tccaggctctggtgcctgcgttttg

SEQ ID NO: 976682 - DNA, 25 bp, Homo sapien
tctggtgcctgcgttttgtggtttg

SEQ ID NO: 976683 - DNA, 25 bp, Homo sapien
tgccaattgccttctgatcattatt

SEQ ID NO: 976684 - DNA, 25 bp, Homo sapien
ggctgtgtgcctctgccaattgcct

SEQ ID NO: 976685 - DNA, 25 bp, Homo sapien
gctgtgtgcctctgccaattgcctt

SEQ ID NO: 976686 - DNA, 25 bp, Homo sapien
aattgccttctgatcattattcacc

SEQ ID NO: 976687 - DNA, 25 bp, Homo sapien
cttccatctagagtttcaaaaccat

SEQ ID NO: 976688 - DNA, 25 bp, Homo sapien
gagtttcaaaaccataactggtcat

SEQ ID NO: 976689 - DNA, 25 bp, Homo sapien
ctagagtttcaaaaccataactggt

SEQ ID NO: 976690 - DNA, 25 bp, Homo sapien
ttccatctagagtttcaaaaccata

SEQ ID NO: 976691 - DNA, 25 bp, Homo sapien
ttgtgttaccaattgttgaatcttg

SEQ ID NO: 976692 - DNA, 25 bp, Homo sapien
ttactttgtgttaccaattgttgaa

SEQ ID NO: 976693 - DNA, 25 bp, Homo sapien
gagcatttctcggtcatcacatatt

SEQ ID NO: 976694 - DNA, 25 bp, Homo sapien
cttgtgagcatttctcggtcatcac

SEQ ID NO: 976695 - DNA, 25 bp, Homo sapien
tggcttggtgcctgtactttaagta

SEQ ID NO: 976696 - DNA, 25 bp, Homo sapien
tgggagggtttgtggcacatccctg

SEQ ID NO: 976697 - DNA, 25 bp, Homo sapien
tgtgctggatgggtttcatctggct

SEQ ID NO: 976698 - DNA, 25 bp, Homo sapien
tagccggggtatgaacagtaagaaa

SEQ ID NO: 976699 - DNA, 25 bp, Homo sapien
tagacctgcttttgtctttgaaggc

SEQ ID NO: 976700 - DNA, 25 bp, Homo sapien
agacctgcttttgtctttgaaggct

SEQ ID NO: 976701 - DNA, 25 bp, Homo sapien
tttagacctgcttttgtctttgaag

SEQ ID NO: 976702 - DNA, 25 bp, Homo sapien
acctttagacctgcttttgtctttg

SEQ ID NO: 976703 - DNA, 25 bp, Homo sapien
taatcatatgctgtgcactggagat

SEQ ID NO: 976704 - DNA, 25 bp, Homo sapien
ttgttctcctactggcaagctgcca

SEQ ID NO: 976705 - DNA, 25 bp, Homo sapien
cactggagataacgggtcaggctct

SEQ ID NO: 976706 - DNA, 25 bp, Homo sapien
tctttaaggacatgaggccgcctaa

SEQ ID NO: 976707 - DNA, 25 bp, Homo sapien
gactcttggccgaacctcttgtttc

SEQ ID NO: 976708 - DNA, 25 bp, Homo sapien
ttagcttgtatctggccacttgact

SEQ ID NO: 976709 - DNA, 25 bp, Homo sapien
ttgtatctggccacttgactcttgg

SEQ ID NO: 976710 - DNA, 25 bp, Homo sapien
tgactcttggccgaacctcttgttt

SEQ ID NO: 976711 - DNA, 25 bp, Homo sapien
tcctccgataatatttttgtgaccc

SEQ ID NO: 976712 - DNA, 25 bp, Homo sapien
cctggttccccatgtaaagtctggt

SEQ ID NO: 976713 - DNA, 25 bp, Homo sapien
ttctgttgtagtagttcccaggtct

SEQ ID NO: 976714 - DNA, 25 bp, Homo sapien
aaagtctggtgttctttgtcctccg

SEQ ID NO: 976715 - DNA, 25 bp, Homo sapien
aaattgactgaaaaatggcctccaa

SEQ ID NO: 976716 - DNA, 25 bp, Homo sapien
gaaattgactgaaaaatggcctcca

SEQ ID NO: 976717 - DNA, 25 bp, Homo sapien
gcttccggcagtaaacaccatcagg

SEQ ID NO: 976718 - DNA, 25 bp, Homo sapien
ttccggcagtaaacaccatcaggaa

SEQ ID NO: 976719 - DNA, 25 bp, Homo sapien
agcttccggcagtaaacaccatcag

SEQ ID NO: 976720 - DNA, 25 bp, Homo sapien
cttccggcagtaaacaccatcagga

SEQ ID NO: 976721 - DNA, 25 bp, Homo sapien
caggtctgcatctggtcgctggtga

SEQ ID NO: 976722 - DNA, 25 bp, Homo sapien
agaccatctcctggcaactctgctt

SEQ ID NO: 976723 - DNA, 25 bp, Homo sapien
cttcgctcacccaggtctgcatctg

SEQ ID NO: 976724 - DNA, 25 bp, Homo sapien
gggttctcccacttatattcccaca

SEQ ID NO: 976725 - DNA, 25 bp, Homo sapien
ctagggagtgtgggggtgtgggatt

SEQ ID NO: 976726 - DNA, 25 bp, Homo sapien
gggagtgtgggggtgtgggattgtg

SEQ ID NO: 976727 - DNA, 25 bp, Homo sapien
tagggagtgtgggggtgtgggattg

SEQ ID NO: 976728 - DNA, 25 bp, Homo sapien
ggagtgtgggggtgtgggattgtgg

SEQ ID NO: 976729 - DNA, 25 bp, Homo sapien
tgttccctcgtttcctggtacatgc

SEQ ID NO: 976730 - DNA, 25 bp, Homo sapien
ctcgtttcctggtacatgccaaggt

SEQ ID NO: 976731 - DNA, 25 bp, Homo sapien
cgcatggccaactgttccctcgttt

SEQ ID NO: 976732 - DNA, 25 bp, Homo sapien
ccaattcggagagccggtccgggca

SEQ ID NO: 976733 - DNA, 25 bp, Homo sapien
gggtcacccaggccccttgctgctc

SEQ ID NO: 976734 - DNA, 25 bp, Homo sapien
tgggtcacccaggccccttgctgct

SEQ ID NO: 976735 - DNA, 25 bp, Homo sapien
ggtcacccaggccccttgctgctcc

SEQ ID NO: 976736 - DNA, 25 bp, Homo sapien
aggagctccaaaagtccctccaaga

SEQ ID NO: 976737 - DNA, 25 bp, Homo sapien
ttgatttcactacctaagaggtctt

SEQ ID NO: 976738 - DNA, 25 bp, Homo sapien
cattctgaccactcaagaaacagct

SEQ ID NO: 976739 - DNA, 25 bp, Homo sapien
tctgaccactcaagaaacagctcat

SEQ ID NO: 976740 - DNA, 25 bp, Homo sapien
gcagtaatctcctatggtccttagt

SEQ ID NO: 976741 - DNA, 25 bp, Homo sapien
ccttagtatattgtcaagctcattc

SEQ ID NO: 976742 - DNA, 25 bp, Homo sapien
gtgtttcctagtttagaagaaagca

SEQ ID NO: 976743 - DNA, 25 bp, Homo sapien
tgtttcctagtttagaagaaagcat

SEQ ID NO: 976744 - DNA, 25 bp, Homo sapien
tgaattctactgcttccatgtatat

SEQ ID NO: 976745 - DNA, 25 bp, Homo sapien
ttagttgttgaattctactgcttcc

SEQ ID NO: 976746 - DNA, 25 bp, Homo sapien
tgttgaattctactgcttccatgta

SEQ ID NO: 976747 - DNA, 25 bp, Homo sapien
tactgcttccatgtatatttctatc

SEQ ID NO: 976748 - DNA, 25 bp, Homo sapien
gaagccaaatctgtctcaagtctga

SEQ ID NO: 976749 - DNA, 25 bp, Homo sapien
gaaagaacatggatgttagacatct

SEQ ID NO: 976750 - DNA, 25 bp, Homo sapien
gacatcttagtctgaacttgtaggg

SEQ ID NO: 976751 - DNA, 25 bp, Homo sapien
ggtcaggttcctgcttgaaagaaca

SEQ ID NO: 976752 - DNA, 25 bp, Homo sapien
ggacttagctagaggagctctccct

SEQ ID NO: 976753 - DNA, 25 bp, Homo sapien
cacagtgggctttctaagttccata

SEQ ID NO: 976754 - DNA, 25 bp, Homo sapien
agttccatatgtttgtagcagtgac

SEQ ID NO: 976755 - DNA, 25 bp, Homo sapien
gaaggaaatgctcttggtcttccac

SEQ ID NO: 976756 - DNA, 25 bp, Homo sapien
gctggcctgcacactagcctgcctt

SEQ ID NO: 976757 - DNA, 25 bp, Homo sapien
gacactggtagtctttgctgtcttt

SEQ ID NO: 976758 - DNA, 25 bp, Homo sapien
taggctatgttctgccccactgttt

SEQ ID NO: 976759 - DNA, 25 bp, Homo sapien
ctgctgagaggagtaggctatgttc

SEQ ID NO: 976760 - DNA, 25 bp, Homo sapien
ggcaaagcttgagaatcgccttggt

SEQ ID NO: 976761 - DNA, 25 bp, Homo sapien
ggttgctgaccactaccaggatccc

SEQ ID NO: 976762 - DNA, 25 bp, Homo sapien
aatcccaaagggtgagtggcaaagc

SEQ ID NO: 976763 - DNA, 25 bp, Homo sapien
tctagtcttttactggtagcttgca

SEQ ID NO: 976764 - DNA, 25 bp, Homo sapien
ggcttgagcccccacacccagcccg

SEQ ID NO: 976765 - DNA, 25 bp, Homo sapien
ttgagcccccacacccagcccgatt

SEQ ID NO: 976766 - DNA, 25 bp, Homo sapien
agggacagggtttcgcatattggcc

SEQ ID NO: 976767 - DNA, 25 bp, Homo sapien
tagggacagggtttcgcatattggc

SEQ ID NO: 976768 - DNA, 25 bp, Homo sapien
gaatgtttagggtctctttggctgc

SEQ ID NO: 976769 - DNA, 25 bp, Homo sapien
ttagagctcccaataggctgtgtcc

SEQ ID NO: 976770 - DNA, 25 bp, Homo sapien
caggaattgctctaagctctgagaa

SEQ ID NO: 976771 - DNA, 25 bp, Homo sapien
ctttggctgcatagatccgtttgat

SEQ ID NO: 976772 - DNA, 25 bp, Homo sapien
cttgttcaatttaagtgagatgtat

SEQ ID NO: 976773 - DNA, 25 bp, Homo sapien
ccttgttcaatttaagtgagatgta

SEQ ID NO: 976774 - DNA, 25 bp, Homo sapien
ccatcacagtgttaagtctgtgtgt

SEQ ID NO: 976775 - DNA, 25 bp, Homo sapien
tttccatcacagtgttaagtctgtg

SEQ ID NO: 976776 - DNA, 25 bp, Homo sapien
ctagtctctggtatttgatggcaca

SEQ ID NO: 976777 - DNA, 25 bp, Homo sapien
catatgattctaatgttcctttcag

SEQ ID NO: 976778 - DNA, 25 bp, Homo sapien
tctagtctctggtatttgatggcac

SEQ ID NO: 976779 - DNA, 25 bp, Homo sapien
caaatgctctctgagtgtatttgtt

SEQ ID NO: 976780 - DNA, 25 bp, Homo sapien
ggagctgctcttcgtctcagtgctg

SEQ ID NO: 976781 - DNA, 25 bp, Homo sapien
gcgtcatagtttcagtcctggcact

SEQ ID NO: 976782 - DNA, 25 bp, Homo sapien
cacttaagtgtccaatgtgggcagc

SEQ ID NO: 976783 - DNA, 25 bp, Homo sapien
gggccactgaccacagaatgcactt

SEQ ID NO: 976784 - DNA, 25 bp, Homo sapien
ttagtctgcggctggtggagaagtt

SEQ ID NO: 976785 - DNA, 25 bp, Homo sapien
cctgagcttgtacatctgctagtga

SEQ ID NO: 976786 - DNA, 25 bp, Homo sapien
tatttaaatccactggttagtctgc

SEQ ID NO: 976787 - DNA, 25 bp, Homo sapien
tggagaagttcccatttccctgccc

SEQ ID NO: 976788 - DNA, 25 bp, Homo sapien
tttaaattggaacatggtgtctgtc

SEQ ID NO: 976789 - DNA, 25 bp, Homo sapien
ttaaattggaacatggtgtctgtct

SEQ ID NO: 976790 - DNA, 25 bp, Homo sapien
cagctatctgaagtgctttttgaaa

SEQ ID NO: 976791 - DNA, 25 bp, Homo sapien
gctatctgaagtgctttttgaaata

SEQ ID NO: 976792 - DNA, 25 bp, Homo sapien
agctatctgaagtgctttttgaaat

SEQ ID NO: 976793 - DNA, 25 bp, Homo sapien
gaaattcattccctcatcttgttct

SEQ ID NO: 976794 - DNA, 25 bp, Homo sapien
aaattcattccctcatcttgttctg

SEQ ID NO: 976795 - DNA, 25 bp, Homo sapien
ctctttggaggttgatactgttcct

SEQ ID NO: 976796 - DNA, 25 bp, Homo sapien
gaggttgatactgttcctccttgca

SEQ ID NO: 976797 - DNA, 25 bp, Homo sapien
tgttcctccttgcagatctccaatc

SEQ ID NO: 976798 - DNA, 25 bp, Homo sapien
gatactgttcctccttgcagatctc

SEQ ID NO: 976799 - DNA, 25 bp, Homo sapien
ctccccgccgccaccacagtcccca

SEQ ID NO: 976800 - DNA, 25 bp, Homo sapien
atcagatagttgtaggtaagcggcg

SEQ ID NO: 976801 - DNA, 25 bp, Homo sapien
gatagttgtaggtaagcggcgttat

SEQ ID NO: 976802 - DNA, 25 bp, Homo sapien
ttgtaggtaagcggcgttatttctg

SEQ ID NO: 976803 - DNA, 25 bp, Homo sapien
cagatagttgtaggtaagcggcgtt

SEQ ID NO: 976804 - DNA, 25 bp, Homo sapien
cctttcaaaagcaggtcctgagtga

SEQ ID NO: 976805 - DNA, 25 bp, Homo sapien
tcaaaagcaggtcctgagtgaccta

SEQ ID NO: 976806 - DNA, 25 bp, Homo sapien
gatcctttcaaaagcaggtcctgag

SEQ ID NO: 976807 - DNA, 25 bp, Homo sapien
ttgatcctttcaaaagcaggtcctg

SEQ ID NO: 976808 - DNA, 25 bp, Homo sapien
ttatctccatccacgcaaggtgaat

SEQ ID NO: 976809 - DNA, 25 bp, Homo sapien
tatctccatccacgcaaggtgaatt

SEQ ID NO: 976810 - DNA, 25 bp, Homo sapien
gattcgttcatgctccttctttgat

SEQ ID NO: 976811 - DNA, 25 bp, Homo sapien
tcttgagttgtattgctgaagagca

SEQ ID NO: 976812 - DNA, 25 bp, Homo sapien
cctaggatggttgactgagaaagaa

SEQ ID NO: 976813 - DNA, 25 bp, Homo sapien
gctggtgtctccctaggatggttga

SEQ ID NO: 976814 - DNA, 25 bp, Homo sapien
ctgggtcttgagttgtattgctgaa

SEQ ID NO: 976815 - DNA, 25 bp, Homo sapien
tctccgtaatcagtcctcgccactc

SEQ ID NO: 976816 - DNA, 25 bp, Homo sapien
tcctcctctccgtaatcagtcctcg

SEQ ID NO: 976817 - DNA, 25 bp, Homo sapien
gtaatcagtcctcgccactccctcc

SEQ ID NO: 976818 - DNA, 25 bp, Homo sapien
ttactcctcctctccgtaatcagtc

SEQ ID NO: 976819 - DNA, 25 bp, Homo sapien
gagcacactggagcagctttcctct

SEQ ID NO: 976820 - DNA, 25 bp, Homo sapien
tccttcttttgtgcggagcacactg

SEQ ID NO: 976821 - DNA, 25 bp, Homo sapien
tgtccttcttttgtgcggagcacac

SEQ ID NO: 976822 - DNA, 25 bp, Homo sapien
tcttttgtgcggagcacactggagc

SEQ ID NO: 976823 - DNA, 25 bp, Homo sapien
ggtgctttggtgcactgttgccaca

SEQ ID NO: 976824 - DNA, 25 bp, Homo sapien
tgacagttgaaatcctggtgctttg

SEQ ID NO: 976825 - DNA, 25 bp, Homo sapien
ccagatgcgggtctgttgggtacct

SEQ ID NO: 976826 - DNA, 25 bp, Homo sapien
taaaaagcttccgttgagtgcactg

SEQ ID NO: 976827 - DNA, 25 bp, Homo sapien
acaggtctgagaagcaatggcatga

SEQ ID NO: 976828 - DNA, 25 bp, Homo sapien
tgtctatatattgttggcgctgaag

SEQ ID NO: 976829 - DNA, 25 bp, Homo sapien
tctcagcctttatacggagtttaag

SEQ ID NO: 976830 - DNA, 25 bp, Homo sapien
gaatttttgaaatcggcctggacaa

SEQ ID NO: 976831 - DNA, 25 bp, Homo sapien
cctagctggtaactaacttcatgag

SEQ ID NO: 976832 - DNA, 25 bp, Homo sapien
aaataatctttcctagctggtaact

SEQ ID NO: 976833 - DNA, 25 bp, Homo sapien
caatagtagagtaaaataatctttc

SEQ ID NO: 976834 - DNA, 25 bp, Homo sapien
taacttcatgagcacaaagtgtttt

SEQ ID NO: 976835 - DNA, 25 bp, Homo sapien
gaaaaactcctgtcttaatagcgat

SEQ ID NO: 976836 - DNA, 25 bp, Homo sapien
ctgttcacagagctaatggtaagac

SEQ ID NO: 976837 - DNA, 25 bp, Homo sapien
tgaaggtcccacattgactaagagt

SEQ ID NO: 976838 - DNA, 25 bp, Homo sapien
gttcaggacaccaaaatgcacagta

SEQ ID NO: 976839 - DNA, 25 bp, Homo sapien
tattcgggttgtccacccatggcag

SEQ ID NO: 976840 - DNA, 25 bp, Homo sapien
gagaggatttggcacttaacggaaa

SEQ ID NO: 976841 - DNA, 25 bp, Homo sapien
ggatcctcgctactactaccagttg

SEQ ID NO: 976842 - DNA, 25 bp, Homo sapien
agtcaccgcgctgctttggctgagg

SEQ ID NO: 976843 - DNA, 25 bp, Homo sapien
cttttcagcttaacatatgccttcc

SEQ ID NO: 976844 - DNA, 25 bp, Homo sapien
gatgcagtcgaattctttttaatgg

SEQ ID NO: 976845 - DNA, 25 bp, Homo sapien
ttttcagcttaacatatgccttcct

SEQ ID NO: 976846 - DNA, 25 bp, Homo sapien
gcagagagggctagagctccttctt

SEQ ID NO: 976847 - DNA, 25 bp, Homo sapien
gggctggtctcgtggcctgcctggc

SEQ ID NO: 976848 - DNA, 25 bp, Homo sapien
agagagggctagagctccttcttca

SEQ ID NO: 976849 - DNA, 25 bp, Homo sapien
gagtgaggggctggtctcgtggcct

SEQ ID NO: 976850 - DNA, 25 bp, Homo sapien
cagaccccagatgatgcactaagag

SEQ ID NO: 976851 - DNA, 25 bp, Homo sapien
taggagaactgttggcctgggaccc

SEQ ID NO: 976852 - DNA, 25 bp, Homo sapien
gactggctaactgtgatatcaactg

SEQ ID NO: 976853 - DNA, 25 bp, Homo sapien
tgtgtgacctgaagagggacctctg

SEQ ID NO: 976854 - DNA, 25 bp, Homo sapien
agtaaggtatagctagagattgccc

SEQ ID NO: 976855 - DNA, 25 bp, Homo sapien
tctatattttctgggcatgtcagcc

SEQ ID NO: 976856 - DNA, 25 bp, Homo sapien
cttgtatcaagcgaagtagccctgt

SEQ ID NO: 976857 - DNA, 25 bp, Homo sapien
tagccctgttggagcattgccagca

SEQ ID NO: 976858 - DNA, 25 bp, Homo sapien
tgtgcttctgcctatgagcggcccc

SEQ ID NO: 976859 - DNA, 25 bp, Homo sapien
taattgtgcttctgcctatgagcgg

SEQ ID NO: 976860 - DNA, 25 bp, Homo sapien
ggtgcaatgacagctttgatacagg

SEQ ID NO: 976861 - DNA, 25 bp, Homo sapien
gatacagggcataattttctcagga

SEQ ID NO: 976862 - DNA, 25 bp, Homo sapien
gccatacccagggatgtctgccact

SEQ ID NO: 976863 - DNA, 25 bp, Homo sapien
ggctggctgttcttgcacttgagcg

SEQ ID NO: 976864 - DNA, 25 bp, Homo sapien
ttgattcacagtagtgcagatggcc

SEQ ID NO: 976865 - DNA, 25 bp, Homo sapien
cacttgagcggcttgtttgcctgga

SEQ ID NO: 976866 - DNA, 25 bp, Homo sapien
ggaaatgaatctggctgaggaacat

SEQ ID NO: 976867 - DNA, 25 bp, Homo sapien
caagccactgtaccataaagggtct

SEQ ID NO: 976868 - DNA, 25 bp, Homo sapien
tccgtggcccacatatttgaagagg

SEQ ID NO: 976869 - DNA, 25 bp, Homo sapien
aggaacattaccctgccgctctggc

SEQ ID NO: 976870 - DNA, 25 bp, Homo sapien
gaaattgccgctccttaatggatgg

SEQ ID NO: 976871 - DNA, 25 bp, Homo sapien
aaactcatttgcctgaagcccctgc

SEQ ID NO: 976872 - DNA, 25 bp, Homo sapien
agaaatccttgcctgaaagcactgt

SEQ ID NO: 976873 - DNA, 25 bp, Homo sapien
tgtgtaatgatagcagcacctctga

SEQ ID NO: 976874 - DNA, 25 bp, Homo sapien
tctgttcccaagagaggatttgaga

SEQ ID NO: 976875 - DNA, 25 bp, Homo sapien
gaggaagaggggacaatttcctagc

SEQ ID NO: 976876 - DNA, 25 bp, Homo sapien
cccagtttcagggtagacccctgag

SEQ ID NO: 976877 - DNA, 25 bp, Homo sapien
tgagggtccccttgcttacacaaca

SEQ ID NO: 976878 - DNA, 25 bp, Homo sapien
tataacttataaccactgtggctgg

SEQ ID NO: 976879 - DNA, 25 bp, Homo sapien
cagaaattaagtcttcttgcaatgg

SEQ ID NO: 976880 - DNA, 25 bp, Homo sapien
aaacaggctgttagtatctgaggcc

SEQ ID NO: 976881 - DNA, 25 bp, Homo sapien
ggatgccattgtcagttcacacagg

SEQ ID NO: 976882 - DNA, 25 bp, Homo sapien
tattcctggactaaatcagtgcctt

SEQ ID NO: 976883 - DNA, 25 bp, Homo sapien
atcagagcacaaggcaaggttttcc

SEQ ID NO: 976884 - DNA, 25 bp, Homo sapien
ggcttatagatactattgtctctga

SEQ ID NO: 976885 - DNA, 25 bp, Homo sapien
tttttcacagtgatcgggcttatag

SEQ ID NO: 976886 - DNA, 25 bp, Homo sapien
ctatagtgctggtgtagggatcaga

SEQ ID NO: 976887 - DNA, 25 bp, Homo sapien
tatatggtgtggagcactaagtgtg

SEQ ID NO: 976888 - DNA, 25 bp, Homo sapien
gtgtttgtgtgtattgtcaaataac

SEQ ID NO: 976889 - DNA, 25 bp, Homo sapien
ctttggacatatacaatgttcaaga

SEQ ID NO: 976890 - DNA, 25 bp, Homo sapien
aataactgttatctagcatttgcta

SEQ ID NO: 976891 - DNA, 25 bp, Homo sapien
ttagagggcagtatagccagttcta

SEQ ID NO: 976892 - DNA, 25 bp, Homo sapien
ggcagtatagccagttctaaagaga

SEQ ID NO: 976893 - DNA, 25 bp, Homo sapien
gagggcagtatagccagttctaaag

SEQ ID NO: 976894 - DNA, 25 bp, Homo sapien
tagagggcagtatagccagttctaa

SEQ ID NO: 976895 - DNA, 25 bp, Homo sapien
gaaaagctgtcccaagtgcctgcta

SEQ ID NO: 976896 - DNA, 25 bp, Homo sapien
ggtactcacgggatgcctctctgaa

SEQ ID NO: 976897 - DNA, 25 bp, Homo sapien
tcacggctgcatttttggtactcac

SEQ ID NO: 976898 - DNA, 25 bp, Homo sapien
cctgctacagaggaggatataccat

SEQ ID NO: 976899 - DNA, 25 bp, Homo sapien
gtccttctcccacagattgaagctg

SEQ ID NO: 976900 - DNA, 25 bp, Homo sapien
tgtccataggactctttcccgagat

SEQ ID NO: 976901 - DNA, 25 bp, Homo sapien
gcagctctgaggatacttaaatcta

SEQ ID NO: 976902 - DNA, 25 bp, Homo sapien
tctaggatcctagtcttagtctccc

SEQ ID NO: 976903 - DNA, 25 bp, Homo sapien
agttactgcataattccctgtctgc

SEQ ID NO: 976904 - DNA, 25 bp, Homo sapien
tgcaaagttactgcataattccctg

SEQ ID NO: 976905 - DNA, 25 bp, Homo sapien
tcattgcaaagttactgcataattc

SEQ ID NO: 976906 - DNA, 25 bp, Homo sapien
ttactgcataattccctgtctgctc

SEQ ID NO: 976907 - DNA, 25 bp, Homo sapien
ttattaaatagaaatgattggctca

SEQ ID NO: 976908 - DNA, 25 bp, Homo sapien
ttgtctttcccccatcatacctgta

SEQ ID NO: 976909 - DNA, 25 bp, Homo sapien
taacatttgtctttcccccatcata

SEQ ID NO: 976910 - DNA, 25 bp, Homo sapien
cataagaatctataggttcagggtc

SEQ ID NO: 976911 - DNA, 25 bp, Homo sapien
cattagactgagagctacgccagct

SEQ ID NO: 976912 - DNA, 25 bp, Homo sapien
cagctctcggcttaagaaagatgtc

SEQ ID NO: 976913 - DNA, 25 bp, Homo sapien
catgtgtgtccagtgcacagacccc

SEQ ID NO: 976914 - DNA, 25 bp, Homo sapien
ggttaagcccaactgcaggaatctg

SEQ ID NO: 976915 - DNA, 25 bp, Homo sapien
tcaaccttataccagaaatcccttc

SEQ ID NO: 976916 - DNA, 25 bp, Homo sapien
aacttgtggcttgtaccccacaacg

SEQ ID NO: 976917 - DNA, 25 bp, Homo sapien
tattttatctcagcaatttcaacct

SEQ ID NO: 976918 - DNA, 25 bp, Homo sapien
tctggcagcatagcaagttaacttg

SEQ ID NO: 976919 - DNA, 25 bp, Homo sapien
tgttgtagttaatatggtcatgaat

SEQ ID NO: 976920 - DNA, 25 bp, Homo sapien
tatataaggttcagagatagtggtg

SEQ ID NO: 976921 - DNA, 25 bp, Homo sapien
ccttggtatgggtctgaattatata

SEQ ID NO: 976922 - DNA, 25 bp, Homo sapien
tgaattgtgggcagcactactgccc

SEQ ID NO: 976923 - DNA, 25 bp, Homo sapien
ctgatacaccggacggagctgctgt

SEQ ID NO: 976924 - DNA, 25 bp, Homo sapien
ttgctgctgggatgtcttcgtccac

SEQ ID NO: 976925 - DNA, 25 bp, Homo sapien
tacaccggacggagctgctgttgct

SEQ ID NO: 976926 - DNA, 25 bp, Homo sapien
ctgctgcggatgttgctgctgggat

SEQ ID NO: 976927 - DNA, 25 bp, Homo sapien
ctggattatctcaacagtccgggcg

SEQ ID NO: 976928 - DNA, 25 bp, Homo sapien
attatctcaacagtccgggcggctg

SEQ ID NO: 976929 - DNA, 25 bp, Homo sapien
ggattatctcaacagtccgggcggc

SEQ ID NO: 976930 - DNA, 25 bp, Homo sapien
ttatctcaacagtccgggcggctgt

SEQ ID NO: 976931 - DNA, 25 bp, Homo sapien
tgcttgggcacacgggtagtctgaa

SEQ ID NO: 976932 - DNA, 25 bp, Homo sapien
tagaagacaatcaacatggcggcag

SEQ ID NO: 976933 - DNA, 25 bp, Homo sapien
tgggcagcaaccacttcacggagga

SEQ ID NO: 976934 - DNA, 25 bp, Homo sapien
gtatatactctcgaagccaccaggc

SEQ ID NO: 976935 - DNA, 25 bp, Homo sapien
ggcctgatctcagggaagtggttcc

SEQ ID NO: 976936 - DNA, 25 bp, Homo sapien
agggaagtggttccctgacatctcc

SEQ ID NO: 976937 - DNA, 25 bp, Homo sapien
gatctcagggaagtggttccctgac

SEQ ID NO: 976938 - DNA, 25 bp, Homo sapien
ctcagggaagtggttccctgacatc

SEQ ID NO: 976939 - DNA, 25 bp, Homo sapien
gaatccacacttgcgccgtgaggta

SEQ ID NO: 976940 - DNA, 25 bp, Homo sapien
tcaaaggccccgctagggatgactg

SEQ ID NO: 976941 - DNA, 25 bp, Homo sapien
gccagttgtcgaacagctccagggt

SEQ ID NO: 976942 - DNA, 25 bp, Homo sapien
ggtgcacagttacctgccacaagag

SEQ ID NO: 976943 - DNA, 25 bp, Homo sapien
ccctaccccggcttaagtgagctag

SEQ ID NO: 976944 - DNA, 25 bp, Homo sapien
catcgcctgggattttggctcggaa

SEQ ID NO: 976945 - DNA, 25 bp, Homo sapien
acgttcataattcaccatcgcctgg

SEQ ID NO: 976946 - DNA, 25 bp, Homo sapien
tttggctcggaaaggagaaccagcc

SEQ ID NO: 976947 - DNA, 25 bp, Homo sapien
ggcaggaaagcactggcgtggtgtc

SEQ ID NO: 976948 - DNA, 25 bp, Homo sapien
gcaggaaagcactggcgtggtgtcc

SEQ ID NO: 976949 - DNA, 25 bp, Homo sapien
gaaggcaggaaagcactggcgtggt

SEQ ID NO: 976950 - DNA, 25 bp, Homo sapien
aaggcaggaaagcactggcgtggtg

SEQ ID NO: 976951 - DNA, 25 bp, Homo sapien
tgctcttatgtattagcgccgctcc

SEQ ID NO: 976952 - DNA, 25 bp, Homo sapien
tctgggagaagattagcgtgatgca

SEQ ID NO: 976953 - DNA, 25 bp, Homo sapien
cagaacgtgaatgtactgctgacgc

SEQ ID NO: 976954 - DNA, 25 bp, Homo sapien
ctgctgacgcatactgttctgggag

SEQ ID NO: 976955 - DNA, 25 bp, Homo sapien
ttcaaattgaaaagagaggttcagc

SEQ ID NO: 976956 - DNA, 25 bp, Homo sapien
tgaaaatacactggcccattccagg

SEQ ID NO: 976957 - DNA, 25 bp, Homo sapien
gcagcgttgataggtacttggtact

SEQ ID NO: 976958 - DNA, 25 bp, Homo sapien
gccacagtcacttacatgttcaaat

SEQ ID NO: 976959 - DNA, 25 bp, Homo sapien
gcctgaaatagggaacaccaggaca

SEQ ID NO: 976960 - DNA, 25 bp, Homo sapien
aggacagtaagatcaaatgctttga

SEQ ID NO: 976961 - DNA, 25 bp, Homo sapien
ggacagtaagatcaaatgctttgaa

SEQ ID NO: 976962 - DNA, 25 bp, Homo sapien
gaaatagggaacaccaggacagtaa

SEQ ID NO: 976963 - DNA, 25 bp, Homo sapien
gctccacgtttttagaggcaactct

SEQ ID NO: 976964 - DNA, 25 bp, Homo sapien
cctggatgctgcgttccttttttat

SEQ ID NO: 976965 - DNA, 25 bp, Homo sapien
tatcaagcctccaatctgctcttgc

SEQ ID NO: 976966 - DNA, 25 bp, Homo sapien
gcttcttcaggagttagatctatca

SEQ ID NO: 976967 - DNA, 25 bp, Homo sapien
ggtgaacaagaccattctcattaag

SEQ ID NO: 976968 - DNA, 25 bp, Homo sapien
ttaggtgaacaagaccattctcatt

SEQ ID NO: 976969 - DNA, 25 bp, Homo sapien
ttgcttaggtgaacaagaccattct

SEQ ID NO: 976970 - DNA, 25 bp, Homo sapien
gcttaggtgaacaagaccattctca

SEQ ID NO: 976971 - DNA, 25 bp, Homo sapien
agctcttctgctctacatcaaggag

SEQ ID NO: 976972 - DNA, 25 bp, Homo sapien
agcagtccctatggcctccatcctg

SEQ ID NO: 976973 - DNA, 25 bp, Homo sapien
gtcagttcttattagacagctcttc

SEQ ID NO: 976974 - DNA, 25 bp, Homo sapien
tccatcctgtcagttcttattagac

SEQ ID NO: 976975 - DNA, 25 bp, Homo sapien
ttttagcatgtggatggtttttctg

SEQ ID NO: 976976 - DNA, 25 bp, Homo sapien
tttagcatgtggatggtttttctgt

SEQ ID NO: 976977 - DNA, 25 bp, Homo sapien
ttagcatgtggatggtttttctgtt

SEQ ID NO: 976978 - DNA, 25 bp, Homo sapien
tagcatgtggatggtttttctgttt

SEQ ID NO: 976979 - DNA, 25 bp, Homo sapien
tccaagaagataggcagagctgccg

SEQ ID NO: 976980 - DNA, 25 bp, Homo sapien
agcagggctaagtcagtcctcctga

SEQ ID NO: 976981 - DNA, 25 bp, Homo sapien
acttatttgacagaaccattgttaa

SEQ ID NO: 976982 - DNA, 25 bp, Homo sapien
gacagaaccattgttaatccaagaa

SEQ ID NO: 976983 - DNA, 25 bp, Homo sapien
gagctcttttctgtgtcgtctccat

SEQ ID NO: 976984 - DNA, 25 bp, Homo sapien
ttgaccgtagactccaccaaatcca

SEQ ID NO: 976985 - DNA, 25 bp, Homo sapien
gcccatgcgagtggcagtagcttca

SEQ ID NO: 976986 - DNA, 25 bp, Homo sapien
ggcagtagcttcacttgcttgagtg

SEQ ID NO: 976987 - DNA, 25 bp, Homo sapien
ggacagtgtcaccaaatccttccca

SEQ ID NO: 976988 - DNA, 25 bp, Homo sapien
gacagtgtcaccaaatccttcccat

SEQ ID NO: 976989 - DNA, 25 bp, Homo sapien
aaggaggtaattattctgcactgcc

SEQ ID NO: 976990 - DNA, 25 bp, Homo sapien
ccaggtaatggaattcactcgggat

SEQ ID NO: 976991 - DNA, 25 bp, Homo sapien
agcagtgtgtttttagagggatcct

SEQ ID NO: 976992 - DNA, 25 bp, Homo sapien
tgcactgcctaaacagcatctgaga

SEQ ID NO: 976993 - DNA, 25 bp, Homo sapien
tggaatgccagtcttgtgtcccacc

SEQ ID NO: 976994 - DNA, 25 bp, Homo sapien
tgtgccctgaaaatcattccctcgg

SEQ ID NO: 976995 - DNA, 25 bp, Homo sapien
tgaacacaactcgtccgtcaaggga

SEQ ID NO: 976996 - DNA, 25 bp, Homo sapien
ttgtccaaagcctggcccgatgggc

SEQ ID NO: 976997 - DNA, 25 bp, Homo sapien
cactgatcgccgctaaggccactgt

SEQ ID NO: 976998 - DNA, 25 bp, Homo sapien
gccgctaaggccactgtcagtaagt

SEQ ID NO: 976999 - DNA, 25 bp, Homo sapien
taagtcatcggcagtaccctgggtc

SEQ ID NO: 977000 - DNA, 25 bp, Homo sapien
tgtcagtaagtcatcggcagtaccc

SEQ ID NO: 977001 - DNA, 25 bp, Homo sapien
aggcagagaacagagatcggcatct

SEQ ID NO: 977002 - DNA, 25 bp, Homo sapien
ggttcaaagtctccagtaattttca

SEQ ID NO: 977003 - DNA, 25 bp, Homo sapien
acatagattgttctgcatagcagat

SEQ ID NO: 977004 - DNA, 25 bp, Homo sapien
tgcacggaggttggcattagcaatg

SEQ ID NO: 977005 - DNA, 25 bp, Homo sapien
tagcagatatgaatgccttgcacgg

SEQ ID NO: 977006 - DNA, 25 bp, Homo sapien
agggatctaaaggagcccctgtagc

SEQ ID NO: 977007 - DNA, 25 bp, Homo sapien
gagcccctgtagcttcaaagttaga

SEQ ID NO: 977008 - DNA, 25 bp, Homo sapien
cccaccacagggatctaaaggagcc

SEQ ID NO: 977009 - DNA, 25 bp, Homo sapien
gcttcaaagttagagcccctctctg

SEQ ID NO: 977010 - DNA, 25 bp, Homo sapien
ttctgttcatggcgtctgggctgtg

SEQ ID NO: 977011 - DNA, 25 bp, Homo sapien
ccttctgttcatggcgtctgggctg

SEQ ID NO: 977012 - DNA, 25 bp, Homo sapien
ccaagtgcaaaacagccccttctgt

SEQ ID NO: 977013 - DNA, 25 bp, Homo sapien
aagtgcaaaacagccccttctgttc

SEQ ID NO: 977014 - DNA, 25 bp, Homo sapien
gagttcttgaaataggccttctcca

SEQ ID NO: 977015 - DNA, 25 bp, Homo sapien
ggatggtcctctcaccttcgaggag

SEQ ID NO: 977016 - DNA, 25 bp, Homo sapien
cacaagcatgcttgtcgtggcaggg

SEQ ID NO: 977017 - DNA, 25 bp, Homo sapien
gcagctgagggatggtcctctcacc

SEQ ID NO: 977018 - DNA, 25 bp, Homo sapien
ccaggggtgattcctgtgctactca

SEQ ID NO: 977019 - DNA, 25 bp, Homo sapien
caggggtgattcctgtgctactcat

SEQ ID NO: 977020 - DNA, 25 bp, Homo sapien
cccaggggtgattcctgtgctactc

SEQ ID NO: 977021 - DNA, 25 bp, Homo sapien
gcccaggggtgattcctgtgctact

SEQ ID NO: 977022 - DNA, 25 bp, Homo sapien
aggtccagcgtcgagctgctctcct

SEQ ID NO: 977023 - DNA, 25 bp, Homo sapien
ggccaggtccagcgtcgagctgctc

SEQ ID NO: 977024 - DNA, 25 bp, Homo sapien
cacccaccgctttggccctgtgatg

SEQ ID NO: 977025 - DNA, 25 bp, Homo sapien
cagcacccaccgctttggccctgtg

SEQ ID NO: 977026 - DNA, 25 bp, Homo sapien
ggatttcctgcttgtgacagctgaa

SEQ ID NO: 977027 - DNA, 25 bp, Homo sapien
tcctgcttgtgacagctgaacttaa

SEQ ID NO: 977028 - DNA, 25 bp, Homo sapien
tttcctgcttgtgacagctgaactt

SEQ ID NO: 977029 - DNA, 25 bp, Homo sapien
gatttcctgcttgtgacagctgaac

SEQ ID NO: 977030 - DNA, 25 bp, Homo sapien
taagagttggctgaaccctgataag

SEQ ID NO: 977031 - DNA, 25 bp, Homo sapien
acaactctcagtgctagggcctgcc

SEQ ID NO: 977032 - DNA, 25 bp, Homo sapien
ggagcagcactagcagagctttgta

SEQ ID NO: 977033 - DNA, 25 bp, Homo sapien
gcaaatcccagtctgctcgtcaagg

SEQ ID NO: 977034 - DNA, 25 bp, Homo sapien
aatgtttgtgcctgtagctaaccaa

SEQ ID NO: 977035 - DNA, 25 bp, Homo sapien
tcaagagacagtggttacaagatcc

SEQ ID NO: 977036 - DNA, 25 bp, Homo sapien
gtagctaaccaaggaaaggtaatgc

SEQ ID NO: 977037 - DNA, 25 bp, Homo sapien
cctgttagcatcaggatgcaggaat

SEQ ID NO: 977038 - DNA, 25 bp, Homo sapien
ctccacttccttggcaggaggtaac

SEQ ID NO: 977039 - DNA, 25 bp, Homo sapien
agtgaagaggccgatagggctctcc

SEQ ID NO: 977040 - DNA, 25 bp, Homo sapien
tgtgccctgtggatgcctcctcagt

SEQ ID NO: 977041 - DNA, 25 bp, Homo sapien
ctccctgctgagtgtaattcctccc

SEQ ID NO: 977042 - DNA, 25 bp, Homo sapien
atcacctgccaagagaaggacctgg

SEQ ID NO: 977043 - DNA, 25 bp, Homo sapien
gactccagccagtggattctctgtc

SEQ ID NO: 977044 - DNA, 25 bp, Homo sapien
gtcctcatcacctgccaagagaagg

SEQ ID NO: 977045 - DNA, 25 bp, Homo sapien
ggagccttgcaagcagcaatgttaa

SEQ ID NO: 977046 - DNA, 25 bp, Homo sapien
tgtatttaaagcttttgaggcccaa

SEQ ID NO: 977047 - DNA, 25 bp, Homo sapien
tgttcacatcttcgctctggccagc

SEQ ID NO: 977048 - DNA, 25 bp, Homo sapien
gggagtaatcctaacacccaggctg

SEQ ID NO: 977049 - DNA, 25 bp, Homo sapien
tctggccagcccattctgtatttaa

SEQ ID NO: 977050 - DNA, 25 bp, Homo sapien
tccactgacggcattacctgtgtgc

SEQ ID NO: 977051 - DNA, 25 bp, Homo sapien
aacttggtggcacgtctttctgaca

SEQ ID NO: 977052 - DNA, 25 bp, Homo sapien
tcagaatcctcaggctgcgtgtagc

SEQ ID NO: 977053 - DNA, 25 bp, Homo sapien
tgtctgacttgataagctctcccca

SEQ ID NO: 977054 - DNA, 25 bp, Homo sapien
cacagttgccttggttacatctgca

SEQ ID NO: 977055 - DNA, 25 bp, Homo sapien
cttcacagttgccttggttacatct

SEQ ID NO: 977056 - DNA, 25 bp, Homo sapien
cagttgccttggttacatctgcacc

SEQ ID NO: 977057 - DNA, 25 bp, Homo sapien
acatctgcacccaaggataaaccct

SEQ ID NO: 977058 - DNA, 25 bp, Homo sapien
tcccatgtaacatgcttgggcctca

SEQ ID NO: 977059 - DNA, 25 bp, Homo sapien
tggcgagtatcttgtcatccttccc

SEQ ID NO: 977060 - DNA, 25 bp, Homo sapien
catgggtcctggctggcgagtatct

SEQ ID NO: 977061 - DNA, 25 bp, Homo sapien
catgtaacatgcttgggcctcattt

SEQ ID NO: 977062 - DNA, 25 bp, Homo sapien
ccgaggtgggactccgatccggcaa

SEQ ID NO: 977063 - DNA, 25 bp, Homo sapien
caaggtcgcaaaccgaggtgggact

SEQ ID NO: 977064 - DNA, 25 bp, Homo sapien
gtgggactccgatccggcaaccacg

SEQ ID NO: 977065 - DNA, 25 bp, Homo sapien
cctggtccaaggtcgcaaaccgagg

SEQ ID NO: 977066 - DNA, 25 bp, Homo sapien
accgccgtgcactctgagacactgt

SEQ ID NO: 977067 - DNA, 25 bp, Homo sapien
tctgagacactgtccactagctttg

SEQ ID NO: 977068 - DNA, 25 bp, Homo sapien
ctagtgcagacctgggaatcaggac

SEQ ID NO: 977069 - DNA, 25 bp, Homo sapien
agtgggagagacacccgcaaagcac

SEQ ID NO: 977070 - DNA, 25 bp, Homo sapien
tttgcagcagtgagctatcctgact

SEQ ID NO: 977071 - DNA, 25 bp, Homo sapien
taagtgatgacggagtctctggaag

SEQ ID NO: 977072 - DNA, 25 bp, Homo sapien
tatcctgactgggtgggtaaccaag

SEQ ID NO: 977073 - DNA, 25 bp, Homo sapien
agtaagggcttctatggctgtctgc

SEQ ID NO: 977074 - DNA, 25 bp, Homo sapien
gcagcaggccttatcttccccagca

SEQ ID NO: 977075 - DNA, 25 bp, Homo sapien
tcttcacaccatccatcctgcaggc

SEQ ID NO: 977076 - DNA, 25 bp, Homo sapien
ggtagaacaagccatgggtccagga

SEQ ID NO: 977077 - DNA, 25 bp, Homo sapien
tccccaaggtagaacaagccatggg

SEQ ID NO: 977078 - DNA, 25 bp, Homo sapien
tgtcattggcttcttccccaaggta

SEQ ID NO: 977079 - DNA, 25 bp, Homo sapien
ccagcttctgtcattggcttcttcc

SEQ ID NO: 977080 - DNA, 25 bp, Homo sapien
gctccctcgcccctgccagtgcctc

SEQ ID NO: 977081 - DNA, 25 bp, Homo sapien
cctcgcccctgccagtgcctctcca

SEQ ID NO: 977082 - DNA, 25 bp, Homo sapien
ctccctcgcccctgccagtgcctct

SEQ ID NO: 977083 - DNA, 25 bp, Homo sapien
cgcccctgccagtgcctctccatac

SEQ ID NO: 977084 - DNA, 25 bp, Homo sapien
ctgccagtgcctctccataatgctc

SEQ ID NO: 977085 - DNA, 25 bp, Homo sapien
atcccctgccagtgcctctccataa

SEQ ID NO: 977086 - DNA, 25 bp, Homo sapien
agtgcctctccataatgctccctca

SEQ ID NO: 977087 - DNA, 25 bp, Homo sapien
catcccctgccagcgctccctcatc

SEQ ID NO: 977088 - DNA, 25 bp, Homo sapien
tcacccctgccagcacctctccata

SEQ ID NO: 977089 - DNA, 25 bp, Homo sapien
ccctgccaatgcctctccatactgc

SEQ ID NO: 977090 - DNA, 25 bp, Homo sapien
tgccaatgcctctccatactgctcc

SEQ ID NO: 977091 - DNA, 25 bp, Homo sapien
tgccagcacctctccatactgctcc

SEQ ID NO: 977092 - DNA, 25 bp, Homo sapien
ctgccagcgcctctccatactgctc

SEQ ID NO: 977093 - DNA, 25 bp, Homo sapien
gcgcctctccatactgctccctcgt

SEQ ID NO: 977094 - DNA, 25 bp, Homo sapien
tgccagcgcctctccatactgctcc

SEQ ID NO: 977095 - DNA, 25 bp, Homo sapien
agcgcctctccatactgctccctcg

SEQ ID NO: 977096 - DNA, 25 bp, Homo sapien
cttgtggacccacttccaggaccac

SEQ ID NO: 977097 - DNA, 25 bp, Homo sapien
gggtcttgtggacccacttccagga

SEQ ID NO: 977098 - DNA, 25 bp, Homo sapien
tgtggacccacttccaggaccacca

SEQ ID NO: 977099 - DNA, 25 bp, Homo sapien
gtcttgtggacccacttccaggacc

SEQ ID NO: 977100 - DNA, 25 bp, Homo sapien
caagagtcttgaagtgtccacagtc

SEQ ID NO: 977101 - DNA, 25 bp, Homo sapien
ggacaagagtcttgaagtgtccaca

SEQ ID NO: 977102 - DNA, 25 bp, Homo sapien
gagatggacaagagtcttgaagtgt

SEQ ID NO: 977103 - DNA, 25 bp, Homo sapien
agagtcttgaagtgtccacagtcac

SEQ ID NO: 977104 - DNA, 25 bp, Homo sapien
tagtcattctaaccacattcccagg

SEQ ID NO: 977105 - DNA, 25 bp, Homo sapien
tagcccgagggacataggaaatagc

SEQ ID NO: 977106 - DNA, 25 bp, Homo sapien
tcatagcatcgtgtactgacaggac

SEQ ID NO: 977107 - DNA, 25 bp, Homo sapien
ggtggcatagactccgccttctgga

SEQ ID NO: 977108 - DNA, 25 bp, Homo sapien
aggctcctgtcacgcctgacagctg

SEQ ID NO: 977109 - DNA, 25 bp, Homo sapien
ccagcatggccttgcgaaggcaagg

SEQ ID NO: 977110 - DNA, 25 bp, Homo sapien
ctcctgtcacgcctgacagctgtgg

SEQ ID NO: 977111 - DNA, 25 bp, Homo sapien
cacccagcatggccttgcgaaggca

SEQ ID NO: 977112 - DNA, 25 bp, Homo sapien
ggtgcacgacgttcccatgacctgt

SEQ ID NO: 977113 - DNA, 25 bp, Homo sapien
tgggtgcacgacgttcccatgacct

SEQ ID NO: 977114 - DNA, 25 bp, Homo sapien
tcctgggtgcacgacgttcccatga

SEQ ID NO: 977115 - DNA, 25 bp, Homo sapien
tgactcctgggtgcacgacgttccc

SEQ ID NO: 977116 - DNA, 25 bp, Homo sapien
gaaccgaatattcttaaaccatctg

SEQ ID NO: 977117 - DNA, 25 bp, Homo sapien
gcttctgtaagtagcttctgtcatg

SEQ ID NO: 977118 - DNA, 25 bp, Homo sapien
gtttactatgcatgtttcaccagct

SEQ ID NO: 977119 - DNA, 25 bp, Homo sapien
tgccggtgatactcttgtttcattc

SEQ ID NO: 977120 - DNA, 25 bp, Homo sapien
ggtgtttgacccagacttcatcttc

SEQ ID NO: 977121 - DNA, 25 bp, Homo sapien
aggtgtttgacccagacttcatctt

SEQ ID NO: 977122 - DNA, 25 bp, Homo sapien
ctgcacacagtacatggagacactg

SEQ ID NO: 977123 - DNA, 25 bp, Homo sapien
gcacacagtacatggagacactggg

SEQ ID NO: 977124 - DNA, 25 bp, Homo sapien
ttattgtgcagcgtttctggctgca

SEQ ID NO: 977125 - DNA, 25 bp, Homo sapien
attgtgcagcgtttctggctgcaga

SEQ ID NO: 977126 - DNA, 25 bp, Homo sapien
cacaggcagccggaggcttaagctg

SEQ ID NO: 977127 - DNA, 25 bp, Homo sapien
gagagcacaggcagccggaggctta

SEQ ID NO: 977128 - DNA, 25 bp, Homo sapien
tgcttccaccatgaagccgctggta

SEQ ID NO: 977129 - DNA, 25 bp, Homo sapien
ggcatgaccgcgctactggcaatcc

SEQ ID NO: 977130 - DNA, 25 bp, Homo sapien
taaggaggtgcaaccctgattggca

SEQ ID NO: 977131 - DNA, 25 bp, Homo sapien
tacggtgaggcatgaccgcgctact

SEQ ID NO: 977132 - DNA, 25 bp, Homo sapien
ccaactgaggttgttgaatgactga

SEQ ID NO: 977133 - DNA, 25 bp, Homo sapien
attgagagaggaacaatttcagcat

SEQ ID NO: 977134 - DNA, 25 bp, Homo sapien
gcataagtgacattgggccaactga

SEQ ID NO: 977135 - DNA, 25 bp, Homo sapien
ggccaactgaggttgttgaatgact

SEQ ID NO: 977136 - DNA, 25 bp, Homo sapien
gcaaagaaggggtcagatggagggt

SEQ ID NO: 977137 - DNA, 25 bp, Homo sapien
ggcaaagaaggggtcagatggaggg

SEQ ID NO: 977138 - DNA, 25 bp, Homo sapien
agaggcaaagaaggggtcagatgga

SEQ ID NO: 977139 - DNA, 25 bp, Homo sapien
ctgccagacaagagaggcaaagaag

SEQ ID NO: 977140 - DNA, 25 bp, Homo sapien
tcccaagagggtatctcactcggcc

SEQ ID NO: 977141 - DNA, 25 bp, Homo sapien
caagagggtatctcactcggccatc

SEQ ID NO: 977142 - DNA, 25 bp, Homo sapien
agggtatctcactcggccatctgcc

SEQ ID NO: 977143 - DNA, 25 bp, Homo sapien
ccaaatcccaagagggtatctcact

SEQ ID NO: 977144 - DNA, 25 bp, Homo sapien
caggtctccacgtctgtgctgataa

SEQ ID NO: 977145 - DNA, 25 bp, Homo sapien
gattccttggctgggccaatttcca

SEQ ID NO: 977146 - DNA, 25 bp, Homo sapien
cactgcagtcgaggtcattgccagg

SEQ ID NO: 977147 - DNA, 25 bp, Homo sapien
gccattgattccttggctgggccaa

SEQ ID NO: 977148 - DNA, 25 bp, Homo sapien
agccttgagagccattccccatgat

SEQ ID NO: 977149 - DNA, 25 bp, Homo sapien
gccttgagagccattccccatgatc

SEQ ID NO: 977150 - DNA, 25 bp, Homo sapien
ccttgagagccattccccatgatcc

SEQ ID NO: 977151 - DNA, 25 bp, Homo sapien
aagccttgagagccattccccatga

SEQ ID NO: 977152 - DNA, 25 bp, Homo sapien
ttttggcggctgcatggacttcgac

SEQ ID NO: 977153 - DNA, 25 bp, Homo sapien
cattaatgtcagttgtgcccaggac

SEQ ID NO: 977154 - DNA, 25 bp, Homo sapien
gaatcagcattagacctgggttttg

SEQ ID NO: 977155 - DNA, 25 bp, Homo sapien
gaggcctgcacggaggaatcagcat

SEQ ID NO: 977156 - DNA, 25 bp, Homo sapien
tcatcatctctgtggtcagcaagga

SEQ ID NO: 977157 - DNA, 25 bp, Homo sapien
caaaggccaataggagaatacctgg

SEQ ID NO: 977158 - DNA, 25 bp, Homo sapien
cacgaaggtcagtgcgtggttgcct

SEQ ID NO: 977159 - DNA, 25 bp, Homo sapien
tgggtttgtttgtccacgaaggtca

SEQ ID NO: 977160 - DNA, 25 bp, Homo sapien
gagccagcaggtcgggactcgctga

SEQ ID NO: 977161 - DNA, 25 bp, Homo sapien
acgcacaggtacgcgctggtcctcg

SEQ ID NO: 977162 - DNA, 25 bp, Homo sapien
gggagacacgcacagtcgctcccgt

SEQ ID NO: 977163 - DNA, 25 bp, Homo sapien
acactcctctcgtgtcctggctcca

SEQ ID NO: 977164 - DNA, 25 bp, Homo sapien
ggtgtcgccccgctctttctgggcg

SEQ ID NO: 977165 - DNA, 25 bp, Homo sapien
ccttcctggtctcgggctagaactg

SEQ ID NO: 977166 - DNA, 25 bp, Homo sapien
tttctgggcgtaggagcgggctgcc

SEQ ID NO: 977167 - DNA, 25 bp, Homo sapien
ctagaactggggcttcccatcggcc

SEQ ID NO: 977168 - DNA, 25 bp, Homo sapien
gtccacggggtgtgtatgcgcccac

SEQ ID NO: 977169 - DNA, 25 bp, Homo sapien
gtctgtgccataggcgtgggaacac

SEQ ID NO: 977170 - DNA, 25 bp, Homo sapien
ataggcgtgggaacacctcgtgcac

SEQ ID NO: 977171 - DNA, 25 bp, Homo sapien
cgcccacggaagtcctctgtgcatg

SEQ ID NO: 977172 - DNA, 25 bp, Homo sapien
cggcggctgcacacttcttagtgct

SEQ ID NO: 977173 - DNA, 25 bp, Homo sapien
cttccggcggctgcacacttcttag

SEQ ID NO: 977174 - DNA, 25 bp, Homo sapien
tccggcggctgcacacttcttagtg

SEQ ID NO: 977175 - DNA, 25 bp, Homo sapien
ggcggctgcacacttcttagtgctc

SEQ ID NO: 977176 - DNA, 25 bp, Homo sapien
gagaaggaggagagcaacgaggcac

SEQ ID NO: 977177 - DNA, 25 bp, Homo sapien
agagaacagaaccatcacctggact

SEQ ID NO: 977178 - DNA, 25 bp, Homo sapien
ggaggagagcaacgaggcaccaggg

SEQ ID NO: 977179 - DNA, 25 bp, Homo sapien
ggaagagaacagaaccatcacctgg

SEQ ID NO: 977180 - DNA, 25 bp, Homo sapien
caacaggacgtgtgtgctaatgtgg

SEQ ID NO: 977181 - DNA, 25 bp, Homo sapien
tatgtaacggattccatgctctgcc

SEQ ID NO: 977182 - DNA, 25 bp, Homo sapien
cagttacaaaacgtctgtgctgctg

SEQ ID NO: 977183 - DNA, 25 bp, Homo sapien
tgctgggacatcatgttgggacaac

SEQ ID NO: 977184 - DNA, 25 bp, Homo sapien
aggacctagaacctgagcccttgct

SEQ ID NO: 977185 - DNA, 25 bp, Homo sapien
gctcggcccagacgatgccatcatt

SEQ ID NO: 977186 - DNA, 25 bp, Homo sapien
ggaaggtgtccaaccctgaaggtgc

SEQ ID NO: 977187 - DNA, 25 bp, Homo sapien
gcagttagggcatcgatgagagagt

SEQ ID NO: 977188 - DNA, 25 bp, Homo sapien
cttgcatggggattgggcaaaaaac

SEQ ID NO: 977189 - DNA, 25 bp, Homo sapien
ttgcatggggattgggcaaaaaaca

SEQ ID NO: 977190 - DNA, 25 bp, Homo sapien
tcagatgctggttggggtccctcac

SEQ ID NO: 977191 - DNA, 25 bp, Homo sapien
gccctgtgcgatctcagatgctggt

SEQ ID NO: 977192 - DNA, 25 bp, Homo sapien
ctcagatgctggttggggtccctca

SEQ ID NO: 977193 - DNA, 25 bp, Homo sapien
agggtgtctgcgccccgccaccacg

SEQ ID NO: 977194 - DNA, 25 bp, Homo sapien
tgcgccccgccaccacgaatcaata

SEQ ID NO: 977195 - DNA, 25 bp, Homo sapien
gccccgccaccacgaatcaatattg

SEQ ID NO: 977196 - DNA, 25 bp, Homo sapien
caccacgaatcaatattgtccctgt

SEQ ID NO: 977197 - DNA, 25 bp, Homo sapien
gaaagctggctgtgggcaattctcc

SEQ ID NO: 977198 - DNA, 25 bp, Homo sapien
ccaggagcagccagcgcggaaagct

SEQ ID NO: 977199 - DNA, 25 bp, Homo sapien
agttagggactggagttccaagaga

SEQ ID NO: 977200 - DNA, 25 bp, Homo sapien
tccaagagatttcatgggaaccatg

SEQ ID NO: 977201 - DNA, 25 bp, Homo sapien
gacaagtccgtgttgtgtcatgttg

SEQ ID NO: 977202 - DNA, 25 bp, Homo sapien
ctgagagtaacccaggccaacccat

SEQ ID NO: 977203 - DNA, 25 bp, Homo sapien
tccatgggcaagaaagggttttctc

SEQ ID NO: 977204 - DNA, 25 bp, Homo sapien
tctctagcaggtcccgatggctcct

SEQ ID NO: 977205 - DNA, 25 bp, Homo sapien
gatgtctgtccccaaggtctcaacc

SEQ ID NO: 977206 - DNA, 25 bp, Homo sapien
gagcccacacttgcaagttcaaaga

SEQ ID NO: 977207 - DNA, 25 bp, Homo sapien
taatcaggctaagttggcctggccc

SEQ ID NO: 977208 - DNA, 25 bp, Homo sapien
cagctcatttgagacagccaggagc

SEQ ID NO: 977209 - DNA, 25 bp, Homo sapien
gtggaaccaaggaagcaccacggct

SEQ ID NO: 977210 - DNA, 25 bp, Homo sapien
gccagaccatccaaatgaagcccag

SEQ ID NO: 977211 - DNA, 25 bp, Homo sapien
gggccagaccatccaaatgaagccc

SEQ ID NO: 977212 - DNA, 25 bp, Homo sapien
tgtggaaccaaggaagcaccacggc

SEQ ID NO: 977213 - DNA, 25 bp, Homo sapien
tgttgtccaccactgacaatgagac

SEQ ID NO: 977214 - DNA, 25 bp, Homo sapien
gttgttgtagattcccagtccctcc

SEQ ID NO: 977215 - DNA, 25 bp, Homo sapien
gtcaggaatgaccacacggacatcc

SEQ ID NO: 977216 - DNA, 25 bp, Homo sapien
acaatgagacggatgaccaggctcc

SEQ ID NO: 977217 - DNA, 25 bp, Homo sapien
tgcgtgtgcagctcaagggtggcat

SEQ ID NO: 977218 - DNA, 25 bp, Homo sapien
atgcgtgtgcagctcaagggtggca

SEQ ID NO: 977219 - DNA, 25 bp, Homo sapien
tgctgccagcatgcgggtgggaatg

SEQ ID NO: 977220 - DNA, 25 bp, Homo sapien
cacctgctgccagcatgcgggtggg

SEQ ID NO: 977221 - DNA, 25 bp, Homo sapien
gtctttcttggcaggccacagggcc

SEQ ID NO: 977222 - DNA, 25 bp, Homo sapien
cgcaagttgtgatcgggccgctata

SEQ ID NO: 977223 - DNA, 25 bp, Homo sapien
atggagccccgtaggaatcgcagcg

SEQ ID NO: 977224 - DNA, 25 bp, Homo sapien
gccagcggttgcaaggtaaggcccc

SEQ ID NO: 977225 - DNA, 25 bp, Homo sapien
ggactatgatagctttgtaccgagt

SEQ ID NO: 977226 - DNA, 25 bp, Homo sapien
gactatgatagctttgtaccgagtt

SEQ ID NO: 977227 - DNA, 25 bp, Homo sapien
caggaccttgcagaaccagccaggt

SEQ ID NO: 977228 - DNA, 25 bp, Homo sapien
caggtccctgggagactgtcagacc

SEQ ID NO: 977229 - DNA, 25 bp, Homo sapien
caccaacctggtggcattcgcagag

SEQ ID NO: 977230 - DNA, 25 bp, Homo sapien
aattgccttgggcacatccccaaag

SEQ ID NO: 977231 - DNA, 25 bp, Homo sapien
gagaggggctgtgtaaggccaatgc

SEQ ID NO: 977232 - DNA, 25 bp, Homo sapien
tggaggcttctagcaacgtgagtgc

SEQ ID NO: 977233 - DNA, 25 bp, Homo sapien
acgtgagtgctcctgttctaatgcc

SEQ ID NO: 977234 - DNA, 25 bp, Homo sapien
tcatattaggattgtctgcagaacc

SEQ ID NO: 977235 - DNA, 25 bp, Homo sapien
ctgcagaaccagatatggaggcttc

SEQ ID NO: 977236 - DNA, 25 bp, Homo sapien
gaaggccacactgatcatttctctc

SEQ ID NO: 977237 - DNA, 25 bp, Homo sapien
caagaaggccacactgatcatttct

SEQ ID NO: 977238 - DNA, 25 bp, Homo sapien
agaaggccacactgatcatttctct

SEQ ID NO: 977239 - DNA, 25 bp, Homo sapien
gttgcaatgaattcctgcccgtcag

SEQ ID NO: 977240 - DNA, 25 bp, Homo sapien
cagggaagttgcaatgaattcctgc

SEQ ID NO: 977241 - DNA, 25 bp, Homo sapien
gagccagggaagttgcaatgaattc

SEQ ID NO: 977242 - DNA, 25 bp, Homo sapien
cctccccgtccattccaggaaatgg

SEQ ID NO: 977243 - DNA, 25 bp, Homo sapien
ccgcttagatgccaccaggggcgtg

SEQ ID NO: 977244 - DNA, 25 bp, Homo sapien
gtggccgccacggaacctgggtcaa

SEQ ID NO: 977245 - DNA, 25 bp, Homo sapien
gctccaggaaggtagagtccttgtg

SEQ ID NO: 977246 - DNA, 25 bp, Homo sapien
cacggaacctgggtcaatgtcccac

SEQ ID NO: 977247 - DNA, 25 bp, Homo sapien
tgcctcgttgcttagcagacagcat

SEQ ID NO: 977248 - DNA, 25 bp, Homo sapien
gtgacagccaatgtgcctcgttgct

SEQ ID NO: 977249 - DNA, 25 bp, Homo sapien
tttgcacttattccacgtgtgacag

SEQ ID NO: 977250 - DNA, 25 bp, Homo sapien
tccccaccggggtaggagtctggca

SEQ ID NO: 977251 - DNA, 25 bp, Homo sapien
accgtctttcctgctcagtttgtta

SEQ ID NO: 977252 - DNA, 25 bp, Homo sapien
ccgtctttcctgctcagtttgttag

SEQ ID NO: 977253 - DNA, 25 bp, Homo sapien
gtctttcctgctcagtttgttagct

SEQ ID NO: 977254 - DNA, 25 bp, Homo sapien
gttaccgtctttcctgctcagtttg

SEQ ID NO: 977255 - DNA, 25 bp, Homo sapien
tcaagacccagacgaggaagaacac

SEQ ID NO: 977256 - DNA, 25 bp, Homo sapien
gaagaacacgaaaagcggagattaa

SEQ ID NO: 977257 - DNA, 25 bp, Homo sapien
ccagacgaggaagaacacgaaaagc

SEQ ID NO: 977258 - DNA, 25 bp, Homo sapien
ttcatcaagacccagacgaggaaga

SEQ ID NO: 977259 - DNA, 25 bp, Homo sapien
gaaatgtccagttcagcctggcccg

SEQ ID NO: 977260 - DNA, 25 bp, Homo sapien
caaaatgttgagaattgctaaagct

SEQ ID NO: 977261 - DNA, 25 bp, Homo sapien
agaatatgacgtggagctgagctgt

SEQ ID NO: 977262 - DNA, 25 bp, Homo sapien
taagtgacagatacatgggagtcca

SEQ ID NO: 977263 - DNA, 25 bp, Homo sapien
ttgttacaaagttcatcagggctca

SEQ ID NO: 977264 - DNA, 25 bp, Homo sapien
ggctcacccacaagcaggtctggga

SEQ ID NO: 977265 - DNA, 25 bp, Homo sapien
tttggtacacaaactacatagctcc

SEQ ID NO: 977266 - DNA, 25 bp, Homo sapien
caatagccaaggctagagcccagcc

SEQ ID NO: 977267 - DNA, 25 bp, Homo sapien
caagaggtttggacagcatcgtgga

SEQ ID NO: 977268 - DNA, 25 bp, Homo sapien
taatcttcttggttcgtgaggacat

SEQ ID NO: 977269 - DNA, 25 bp, Homo sapien
aatcgggattaatctgagcactgcc

SEQ ID NO: 977270 - DNA, 25 bp, Homo sapien
gagctggcaggctaactgtgtatgc

SEQ ID NO: 977271 - DNA, 25 bp, Homo sapien
tcgcggctcttcacgcggctgaaag

SEQ ID NO: 977272 - DNA, 25 bp, Homo sapien
cttggtcaaggctttccacgccggg

SEQ ID NO: 977273 - DNA, 25 bp, Homo sapien
gttgcaaaaagcaaggtccggggca

SEQ ID NO: 977274 - DNA, 25 bp, Homo sapien
agaggcagtgtgttcccgctctgcc

SEQ ID NO: 977275 - DNA, 25 bp, Homo sapien
gggagtcggaatctctctcacaagg

SEQ ID NO: 977276 - DNA, 25 bp, Homo sapien
agctgctcgggtgccttttcttttt

SEQ ID NO: 977277 - DNA, 25 bp, Homo sapien
cgagtcctctggaaaccgctgagct

SEQ ID NO: 977278 - DNA, 25 bp, Homo sapien
tctcacaaggagtcgagtcggagga

SEQ ID NO: 977279 - DNA, 25 bp, Homo sapien
ctgtgcccctttctgacccggtccg

SEQ ID NO: 977280 - DNA, 25 bp, Homo sapien
tgacatgacacaattatagaggtgg

SEQ ID NO: 977281 - DNA, 25 bp, Homo sapien
caatgttcggcatcttgactgtatc

SEQ ID NO: 977282 - DNA, 25 bp, Homo sapien
atacatgcaccagcttggatgaatc

SEQ ID NO: 977283 - DNA, 25 bp, Homo sapien
cattcaaaagaggtttcatactgta

SEQ ID NO: 977284 - DNA, 25 bp, Homo sapien
tacgttcagcagtgcacatatagtc

SEQ ID NO: 977285 - DNA, 25 bp, Homo sapien
tctacgttcagcagtgcacatatag

SEQ ID NO: 977286 - DNA, 25 bp, Homo sapien
cgttcagcagtgcacatatagtctt

SEQ ID NO: 977287 - DNA, 25 bp, Homo sapien
gtctacgttcagcagtgcacatata

SEQ ID NO: 977288 - DNA, 25 bp, Homo sapien
ctcccccaagggatgcaattatttt

SEQ ID NO: 977289 - DNA, 25 bp, Homo sapien
ggctctttttgcctgaccctacagg

SEQ ID NO: 977290 - DNA, 25 bp, Homo sapien
tctcctacttgcacacccatttata

SEQ ID NO: 977291 - DNA, 25 bp, Homo sapien
agacctcccccaagggatgcaatta

SEQ ID NO: 977292 - DNA, 25 bp, Homo sapien
gtgagaatacttataccacaagaat

SEQ ID NO: 977293 - DNA, 25 bp, Homo sapien
tgtgagaatacttataccacaagaa

SEQ ID NO: 977294 - DNA, 25 bp, Homo sapien
tgagaatacttataccacaagaatg

SEQ ID NO: 977295 - DNA, 25 bp, Homo sapien
tgagtctggcctcatattcagattc

SEQ ID NO: 977296 - DNA, 25 bp, Homo sapien
aggagaccacagttggacagggcca

SEQ ID NO: 977297 - DNA, 25 bp, Homo sapien
gttgccggatgctgctgcaggccca

SEQ ID NO: 977298 - DNA, 25 bp, Homo sapien
caagagctgaactaggagcagcagg

SEQ ID NO: 977299 - DNA, 25 bp, Homo sapien
ctggcattagcaaacgccattggct

SEQ ID NO: 977300 - DNA, 25 bp, Homo sapien
aggtgcacagcatggccgctggcat

SEQ ID NO: 977301 - DNA, 25 bp, Homo sapien
gtgggtggcccctccaggtgcacag

SEQ ID NO: 977302 - DNA, 25 bp, Homo sapien
gctgcagtcaggtgcatggctgaat

SEQ ID NO: 977303 - DNA, 25 bp, Homo sapien
ctaatctgctagagtggaggctgca

SEQ ID NO: 977304 - DNA, 25 bp, Homo sapien
ctaatgtgtcaggtttgaggctgtt

SEQ ID NO: 977305 - DNA, 25 bp, Homo sapien
tttgaggctgtttgggggcatcatt

SEQ ID NO: 977306 - DNA, 25 bp, Homo sapien
aaactaatgtgtcaggtttgaggct

SEQ ID NO: 977307 - DNA, 25 bp, Homo sapien
ttgaggctgtttgggggcatcattt

SEQ ID NO: 977308 - DNA, 25 bp, Homo sapien
ctgtcggccccgctgtcagctgggg

SEQ ID NO: 977309 - DNA, 25 bp, Homo sapien
caggattttccaaggcccctttgca

SEQ ID NO: 977310 - DNA, 25 bp, Homo sapien
gattttccaaggcccctttgcacac

SEQ ID NO: 977311 - DNA, 25 bp, Homo sapien
ggattttccaaggcccctttgcaca

SEQ ID NO: 977312 - DNA, 25 bp, Homo sapien
tctccttcagccaaattccctaaat

SEQ ID NO: 977313 - DNA, 25 bp, Homo sapien
tgtggcactttctgtcgctcacaaa

SEQ ID NO: 977314 - DNA, 25 bp, Homo sapien
gcctagtctaggtacttcatacaag

SEQ ID NO: 977315 - DNA, 25 bp, Homo sapien
tctgagtatatactgaagagtgaaa

SEQ ID NO: 977316 - DNA, 25 bp, Homo sapien
cagcctctggtaacgtctgtggcac

SEQ ID NO: 977317 - DNA, 25 bp, Homo sapien
tgcggttcacgaaaaaccactgttc

SEQ ID NO: 977318 - DNA, 25 bp, Homo sapien
tcccaggattctggcgtgtgttccc

SEQ ID NO: 977319 - DNA, 25 bp, Homo sapien
tgaggacatgtagccttcccaggat

SEQ ID NO: 977320 - DNA, 25 bp, Homo sapien
tagggcctgcttaaatggcacagcc

SEQ ID NO: 977321 - DNA, 25 bp, Homo sapien
catatcctggtatccctgcagaggc

SEQ ID NO: 977322 - DNA, 25 bp, Homo sapien
agcctctcttgcctgtccgtcagca

SEQ ID NO: 977323 - DNA, 25 bp, Homo sapien
aggagagctgggctcattcgttctg

SEQ ID NO: 977324 - DNA, 25 bp, Homo sapien
tccagtggctggtcgccagttgcac

SEQ ID NO: 977325 - DNA, 25 bp, Homo sapien
agttgcacccacacgcggctggctg

SEQ ID NO: 977326 - DNA, 25 bp, Homo sapien
gctgggctcattcgttctggcagct

SEQ ID NO: 977327 - DNA, 25 bp, Homo sapien
tcaaattttgggcagttttactatg

SEQ ID NO: 977328 - DNA, 25 bp, Homo sapien
aaaacgtttcaacattcaaagaatg

SEQ ID NO: 977329 - DNA, 25 bp, Homo sapien
caccaagcccagctggaagttttta

SEQ ID NO: 977330 - DNA, 25 bp, Homo sapien
aacgtttcaacattcaaagaatgtg

SEQ ID NO: 977331 - DNA, 25 bp, Homo sapien
gctccaggtgtcgtttaagggctcc

SEQ ID NO: 977332 - DNA, 25 bp, Homo sapien
tccaactaaaagtatctttccatcc

SEQ ID NO: 977333 - DNA, 25 bp, Homo sapien
gctgctccaggtgtcgtttaagggc

SEQ ID NO: 977334 - DNA, 25 bp, Homo sapien
caggtgtcgtttaagggctccaaat

SEQ ID NO: 977335 - DNA, 25 bp, Homo sapien
ataaatttcattgataaaaatgatg

SEQ ID NO: 977336 - DNA, 25 bp, Homo sapien
gtttgcaattcaaccatgatatgac

SEQ ID NO: 977337 - DNA, 25 bp, Homo sapien
tctgattcaacaaagcagtcactca

SEQ ID NO: 977338 - DNA, 25 bp, Homo sapien
gatatgggctgttactcagtgaaaa

SEQ ID NO: 977339 - DNA, 25 bp, Homo sapien
catgatatgacacaaccagactaca

SEQ ID NO: 977340 - DNA, 25 bp, Homo sapien
ggagctggcactggcacgaaacctc

SEQ ID NO: 977341 - DNA, 25 bp, Homo sapien
accccattgacaggcttggagtctt

SEQ ID NO: 977342 - DNA, 25 bp, Homo sapien
aagtttccaccccattgacaggctt

SEQ ID NO: 977343 - DNA, 25 bp, Homo sapien
ttccaccccattgacaggcttggag

SEQ ID NO: 977344 - DNA, 25 bp, Homo sapien
tttcaagtggacactgctggcctgg

SEQ ID NO: 977345 - DNA, 25 bp, Homo sapien
aagaggtgttcttcgctttgtggca

SEQ ID NO: 977346 - DNA, 25 bp, Homo sapien
agggccacttgccaacccagggagg

SEQ ID NO: 977347 - DNA, 25 bp, Homo sapien
tccatcttgctggtttggtgaggga

SEQ ID NO: 977348 - DNA, 25 bp, Homo sapien
ctggataatttcatgttctctggca

SEQ ID NO: 977349 - DNA, 25 bp, Homo sapien
tacaggcctgctttactcctcagaa

SEQ ID NO: 977350 - DNA, 25 bp, Homo sapien
tattagaaagttgcgcatcacggcc

SEQ ID NO: 977351 - DNA, 25 bp, Homo sapien
tgatggccactgtggtaccagagga

SEQ ID NO: 977352 - DNA, 25 bp, Homo sapien
gagggtaccaatcagcgagtgtgcc

SEQ ID NO: 977353 - DNA, 25 bp, Homo sapien
gagttgctagtggaccaaggcccag

SEQ ID NO: 977354 - DNA, 25 bp, Homo sapien
ggctcatgatctacttgggaaggca

SEQ ID NO: 977355 - DNA, 25 bp, Homo sapien
cacggagatgttgggccttgagcca

SEQ ID NO: 977356 - DNA, 25 bp, Homo sapien
tcagaattagttcccagtctgtgcc

SEQ ID NO: 977357 - DNA, 25 bp, Homo sapien
tgtggcagtgaagtctcacatctga

SEQ ID NO: 977358 - DNA, 25 bp, Homo sapien
tctgggcagcatggacaagtttaag

SEQ ID NO: 977359 - DNA, 25 bp, Homo sapien
gaaactgtgggatgacactgtggca

SEQ ID NO: 977360 - DNA, 25 bp, Homo sapien
tgccaaagtaatcagactataccag

SEQ ID NO: 977361 - DNA, 25 bp, Homo sapien
tcatgtacagccaatgaccagttca

SEQ ID NO: 977362 - DNA, 25 bp, Homo sapien
aaaactcatgtacagccaatgacca

SEQ ID NO: 977363 - DNA, 25 bp, Homo sapien
aactcatgtacagccaatgaccagt

SEQ ID NO: 977364 - DNA, 25 bp, Homo sapien
tgtctggtcaccaagtaagccatca

SEQ ID NO: 977365 - DNA, 25 bp, Homo sapien
gccatcacagactctgcaaataatc

SEQ ID NO: 977366 - DNA, 25 bp, Homo sapien
accaagtaagccatcacagactctg

SEQ ID NO: 977367 - DNA, 25 bp, Homo sapien
cccatgtctggtcaccaagtaagcc

SEQ ID NO: 977368 - DNA, 25 bp, Homo sapien
caaatagcccatggtaaggtgttcc

SEQ ID NO: 977369 - DNA, 25 bp, Homo sapien
gaaatctggaaatctcgacttggcc

SEQ ID NO: 977370 - DNA, 25 bp, Homo sapien
taaaggttgtatctctaagccaggc

SEQ ID NO: 977371 - DNA, 25 bp, Homo sapien
cataggtatgagactctgtgcccca

SEQ ID NO: 977372 - DNA, 25 bp, Homo sapien
ctgactggcaggttatagctattgt

SEQ ID NO: 977373 - DNA, 25 bp, Homo sapien
gctattgtgacactcttaataaagt

SEQ ID NO: 977374 - DNA, 25 bp, Homo sapien
tggcaggttatagctattgtgacac

SEQ ID NO: 977375 - DNA, 25 bp, Homo sapien
gtgacactcttaataaagtccctta

SEQ ID NO: 977376 - DNA, 25 bp, Homo sapien
gccaggctaccgtaagaacatttga

SEQ ID NO: 977377 - DNA, 25 bp, Homo sapien
gaacttggagataaatcacctgtcc

SEQ ID NO: 977378 - DNA, 25 bp, Homo sapien
tgacagcccaagtcatgtctcgagg

SEQ ID NO: 977379 - DNA, 25 bp, Homo sapien
tgagaaagacatgttgccaggctac

SEQ ID NO: 977380 - DNA, 25 bp, Homo sapien
gaaatgcaggtcatcgctaaccagg

SEQ ID NO: 977381 - DNA, 25 bp, Homo sapien
agggaacggatacaaaggctctgag

SEQ ID NO: 977382 - DNA, 25 bp, Homo sapien
taaccaggctagtgtctttaggcca

SEQ ID NO: 977383 - DNA, 25 bp, Homo sapien
taaagacaagcagaggtgatagggc

SEQ ID NO: 977384 - DNA, 25 bp, Homo sapien
ggagcccaggagtgtcaccagaaag

SEQ ID NO: 977385 - DNA, 25 bp, Homo sapien
ggaccaaagttcagatgtacacagt

SEQ ID NO: 977386 - DNA, 25 bp, Homo sapien
tggctaacgaaccacacatcaaagg

SEQ ID NO: 977387 - DNA, 25 bp, Homo sapien
tctttccctcagtgagagacacggg

SEQ ID NO: 977388 - DNA, 25 bp, Homo sapien
catttgctcctctttgcaagaggtg

SEQ ID NO: 977389 - DNA, 25 bp, Homo sapien
gaaggtcccaataatttctgcttat

SEQ ID NO: 977390 - DNA, 25 bp, Homo sapien
tttctgcttatattgttcgaccagc

SEQ ID NO: 977391 - DNA, 25 bp, Homo sapien
cagctggttgaagcgggtttccgtc

SEQ ID NO: 977392 - DNA, 25 bp, Homo sapien
catgccataccaaagctgtatgtcc

SEQ ID NO: 977393 - DNA, 25 bp, Homo sapien
ccataccaaagctgtatgtcctgca

SEQ ID NO: 977394 - DNA, 25 bp, Homo sapien
tacgacctggcagaaccatgccata

SEQ ID NO: 977395 - DNA, 25 bp, Homo sapien
ggtacaaacatggctacgacctggc

SEQ ID NO: 977396 - DNA, 25 bp, Homo sapien
ggctttttgggatggacgggcttca

SEQ ID NO: 977397 - DNA, 25 bp, Homo sapien
ttgggatggacgggcttcactttgc

SEQ ID NO: 977398 - DNA, 25 bp, Homo sapien
ctttttgggatggacgggcttcact

SEQ ID NO: 977399 - DNA, 25 bp, Homo sapien
tgctcggacgataattgctgcttct

SEQ ID NO: 977400 - DNA, 25 bp, Homo sapien
ctccacttcagccttggtctggaac

SEQ ID NO: 977401 - DNA, 25 bp, Homo sapien
tccatgaggtagagcccgcctttct

SEQ ID NO: 977402 - DNA, 25 bp, Homo sapien
gcctcggtgtgaggggagcgccagg

SEQ ID NO: 977403 - DNA, 25 bp, Homo sapien
gaggggagcgccaggacctttcttc

SEQ ID NO: 977404 - DNA, 25 bp, Homo sapien
cttgctttgttcctctgtgtggtgt

SEQ ID NO: 977405 - DNA, 25 bp, Homo sapien
cttctgaggctcaccagttgcaggc

SEQ ID NO: 977406 - DNA, 25 bp, Homo sapien
gtggtgttgagctgccttctgttgc

SEQ ID NO: 977407 - DNA, 25 bp, Homo sapien
gctggtcttttgcaggctctggttg

SEQ ID NO: 977408 - DNA, 25 bp, Homo sapien
caagccctgccacagtaacagatgg

SEQ ID NO: 977409 - DNA, 25 bp, Homo sapien
caaaattcaaaagtcagtaggtggg

SEQ ID NO: 977410 - DNA, 25 bp, Homo sapien
aatacatgtagatcacaagccctgc

SEQ ID NO: 977411 - DNA, 25 bp, Homo sapien
cagaaataagggagagtgcatgccc

SEQ ID NO: 977412 - DNA, 25 bp, Homo sapien
aaatatggaccatttaatttctgta

SEQ ID NO: 977413 - DNA, 25 bp, Homo sapien
aatatggaccatttaatttctgtac

SEQ ID NO: 977414 - DNA, 25 bp, Homo sapien
aaaaatatggaccatttaatttctg

SEQ ID NO: 977415 - DNA, 25 bp, Homo sapien
aaaatatggaccatttaatttctgt

SEQ ID NO: 977416 - DNA, 25 bp, Homo sapien
aagttttcttcgatcttctaaagag

SEQ ID NO: 977417 - DNA, 25 bp, Homo sapien
gctgcgctggatccttaattccttc

SEQ ID NO: 977418 - DNA, 25 bp, Homo sapien
tcttcgatcttctaaagagaactcc

SEQ ID NO: 977419 - DNA, 25 bp, Homo sapien
aagctgcgctggatccttaattcct

SEQ ID NO: 977420 - DNA, 25 bp, Homo sapien
gcatgctcgtgctcttggaactccg

SEQ ID NO: 977421 - DNA, 25 bp, Homo sapien
cctttgaggtctcgcatcactctac

SEQ ID NO: 977422 - DNA, 25 bp, Homo sapien
ggactgacccttcatgttcccatga

SEQ ID NO: 977423 - DNA, 25 bp, Homo sapien
ccgcaaaggcgtagcccagggactg

SEQ ID NO: 977424 - DNA, 25 bp, Homo sapien
cctggttcgggagacaaagatattc

SEQ ID NO: 977425 - DNA, 25 bp, Homo sapien
tctccactagtagcactcagcagca

SEQ ID NO: 977426 - DNA, 25 bp, Homo sapien
ttgagtttctgatgcttcagcagct

SEQ ID NO: 977427 - DNA, 25 bp, Homo sapien
gtttgtcatctacagcctttgggag

SEQ ID NO: 977428 - DNA, 25 bp, Homo sapien
tgcagccttcgtcccagcacgaatc

SEQ ID NO: 977429 - DNA, 25 bp, Homo sapien
tctgcagccttcgtcccagcacgaa

SEQ ID NO: 977430 - DNA, 25 bp, Homo sapien
gcagccttcgtcccagcacgaatca

SEQ ID NO: 977431 - DNA, 25 bp, Homo sapien
cctctgcagccttcgtcccagcacg

SEQ ID NO: 977432 - DNA, 25 bp, Homo sapien
ttcgtcgtctgaagctttgcagcct

SEQ ID NO: 977433 - DNA, 25 bp, Homo sapien
cgccaagtcaaccttgagctgccgg

SEQ ID NO: 977434 - DNA, 25 bp, Homo sapien
ttctcgggccagatagagattccgg

SEQ ID NO: 977435 - DNA, 25 bp, Homo sapien
gtgccagtcggcttcttcaccttcg

SEQ ID NO: 977436 - DNA, 25 bp, Homo sapien
aaaggccacatgtgtatttcaggca

SEQ ID NO: 977437 - DNA, 25 bp, Homo sapien
tagtcccaaagtagacccaaactga

SEQ ID NO: 977438 - DNA, 25 bp, Homo sapien
gaagccaagccctacgacgtttcag

SEQ ID NO: 977439 - DNA, 25 bp, Homo sapien
tacaaatggatcactgggcctcaca

SEQ ID NO: 977440 - DNA, 25 bp, Homo sapien
gagtcatgaactgggcaaatgcaca

SEQ ID NO: 977441 - DNA, 25 bp, Homo sapien
gctagaaggcatttctgagctgctt

SEQ ID NO: 977442 - DNA, 25 bp, Homo sapien
tctgagctgcttcttgagtcatgaa

SEQ ID NO: 977443 - DNA, 25 bp, Homo sapien
cattctctggagaagcagctagaag

SEQ ID NO: 977444 - DNA, 25 bp, Homo sapien
gagttctccaaactgttggagaagc

SEQ ID NO: 977445 - DNA, 25 bp, Homo sapien
caatgcggacatatttgagttctcc

SEQ ID NO: 977446 - DNA, 25 bp, Homo sapien
ctctgtgtctggatgcaagacaatg

SEQ ID NO: 977447 - DNA, 25 bp, Homo sapien
ttggagaagctccccaagttcttct

SEQ ID NO: 977448 - DNA, 25 bp, Homo sapien
ttcacatcagagggtaatttcctct

SEQ ID NO: 977449 - DNA, 25 bp, Homo sapien
attcacatcagagggtaatttcctc

SEQ ID NO: 977450 - DNA, 25 bp, Homo sapien
tttgatagaacaccttagagtccta

SEQ ID NO: 977451 - DNA, 25 bp, Homo sapien
ttaaaaagagatctaagcagaactg

SEQ ID NO: 977452 - DNA, 25 bp, Homo sapien
tgctcatttccgtaacttcagtaac

SEQ ID NO: 977453 - DNA, 25 bp, Homo sapien
aaatttgatagaacaccttagagtc

SEQ ID NO: 977454 - DNA, 25 bp, Homo sapien
tatcgctttcctctaggtcactgtc

SEQ ID NO: 977455 - DNA, 25 bp, Homo sapien
tcaatactatcgctttcctctaggt

SEQ ID NO: 977456 - DNA, 25 bp, Homo sapien
cctcttgctcctcagtgctggtatc

SEQ ID NO: 977457 - DNA, 25 bp, Homo sapien
tgctggtatcactctgagccagttc

SEQ ID NO: 977458 - DNA, 25 bp, Homo sapien
tgcaatggcacagatcagaactaag

SEQ ID NO: 977459 - DNA, 25 bp, Homo sapien
ctgcaatggcacagatcagaactaa

SEQ ID NO: 977460 - DNA, 25 bp, Homo sapien
caatggcacagatcagaactaagga

SEQ ID NO: 977461 - DNA, 25 bp, Homo sapien
tggcacagatcagaactaaggaggt

SEQ ID NO: 977462 - DNA, 25 bp, Homo sapien
tgacagagggcctattcaatttcat

SEQ ID NO: 977463 - DNA, 25 bp, Homo sapien
ctgacagagggcctattcaatttca

SEQ ID NO: 977464 - DNA, 25 bp, Homo sapien
ttcattacacatgtcaattctgcaa

SEQ ID NO: 977465 - DNA, 25 bp, Homo sapien
caattctgcaatgatgcaggcagaa

SEQ ID NO: 977466 - DNA, 25 bp, Homo sapien
ctgctgtctcagaacaggatgagct

SEQ ID NO: 977467 - DNA, 25 bp, Homo sapien
gctgtctcagaacaggatgagctgc

SEQ ID NO: 977468 - DNA, 25 bp, Homo sapien
tgctgtctcagaacaggatgagctg

SEQ ID NO: 977469 - DNA, 25 bp, Homo sapien
caggcttggtcacctttgattctat

SEQ ID NO: 977470 - DNA, 25 bp, Homo sapien
tgatgtttagattcatggctctttt

SEQ ID NO: 977471 - DNA, 25 bp, Homo sapien
gtttagattcatggctcttttcctc

SEQ ID NO: 977472 - DNA, 25 bp, Homo sapien
ggtcacctttgattctatattctct

SEQ ID NO: 977473 - DNA, 25 bp, Homo sapien
cattcgtacatcatagccagcaaaa

SEQ ID NO: 977474 - DNA, 25 bp, Homo sapien
ttcgtacatcatagccagcaaaatg

SEQ ID NO: 977475 - DNA, 25 bp, Homo sapien
tcgtacatcatagccagcaaaatgc

SEQ ID NO: 977476 - DNA, 25 bp, Homo sapien
tacatcatagccagcaaaatgctca

SEQ ID NO: 977477 - DNA, 25 bp, Homo sapien
tatttatcctttgccacggcccaat

SEQ ID NO: 977478 - DNA, 25 bp, Homo sapien
tatatttatcctttgccacggccca

SEQ ID NO: 977479 - DNA, 25 bp, Homo sapien
ttatatttatcctttgccacggccc

SEQ ID NO: 977480 - DNA, 25 bp, Homo sapien
ttatcctttgccacggcccaatcca

SEQ ID NO: 977481 - DNA, 25 bp, Homo sapien
ttctaggaggtttttgaactgaaca

SEQ ID NO: 977482 - DNA, 25 bp, Homo sapien
tctaggaggtttttgaactgaacaa

SEQ ID NO: 977483 - DNA, 25 bp, Homo sapien
gagagctttacctgcttctaggagg

SEQ ID NO: 977484 - DNA, 25 bp, Homo sapien
atgcctttgagagctttacctgctt

SEQ ID NO: 977485 - DNA, 25 bp, Homo sapien
tgtgcaaatgcacaaagaaagaagt

SEQ ID NO: 977486 - DNA, 25 bp, Homo sapien
agtgagaggcagcaggaggtagcca

SEQ ID NO: 977487 - DNA, 25 bp, Homo sapien
ctgtgtgcaaatgcacaaagaaaga

SEQ ID NO: 977488 - DNA, 25 bp, Homo sapien
agaggcagcaggaggtagccagaat

SEQ ID NO: 977489 - DNA, 25 bp, Homo sapien
ggacagctccaaattgagcaaatac

SEQ ID NO: 977490 - DNA, 25 bp, Homo sapien
cagctccaaattgagcaaatactgt

SEQ ID NO: 977491 - DNA, 25 bp, Homo sapien
caggacagctccaaattgagcaaat

SEQ ID NO: 977492 - DNA, 25 bp, Homo sapien
ctccaaattgagcaaatactgtctt

SEQ ID NO: 977493 - DNA, 25 bp, Homo sapien
cacagacgtctgagaactttttcta

SEQ ID NO: 977494 - DNA, 25 bp, Homo sapien
cattttactttgtacctaagaggca

SEQ ID NO: 977495 - DNA, 25 bp, Homo sapien
tgatactaggacatcaaatgtttct

SEQ ID NO: 977496 - DNA, 25 bp, Homo sapien
cacaatcacagcaaattaacataaa

SEQ ID NO: 977497 - DNA, 25 bp, Homo sapien
acacttagtgcccttattacacagg

SEQ ID NO: 977498 - DNA, 25 bp, Homo sapien
acttagtgcccttattacacaggcc

SEQ ID NO: 977499 - DNA, 25 bp, Homo sapien
gcagcttcacacttagtgcccttat

SEQ ID NO: 977500 - DNA, 25 bp, Homo sapien
ggaaagcagcttcacacttagtgcc

SEQ ID NO: 977501 - DNA, 25 bp, Homo sapien
tccgaataattaatctggctttctt

SEQ ID NO: 977502 - DNA, 25 bp, Homo sapien
tagccttcggctccttctttgggca

SEQ ID NO: 977503 - DNA, 25 bp, Homo sapien
cttaaagctcaggttccgaataatt

SEQ ID NO: 977504 - DNA, 25 bp, Homo sapien
tttcttatctgccactttggctttt

SEQ ID NO: 977505 - DNA, 25 bp, Homo sapien
tagccaaagcctcgacatgccttac

SEQ ID NO: 977506 - DNA, 25 bp, Homo sapien
tcttggcaacagtcacgttgatctt

SEQ ID NO: 977507 - DNA, 25 bp, Homo sapien
tgaaaaagtgacatagccaaagcct

SEQ ID NO: 977508 - DNA, 25 bp, Homo sapien
ttttttcttggcaacagtcacgttg

SEQ ID NO: 977509 - DNA, 25 bp, Homo sapien
aggacacatagttcatatgctctgc

SEQ ID NO: 977510 - DNA, 25 bp, Homo sapien
aaggacacatagttcatatgctctg

SEQ ID NO: 977511 - DNA, 25 bp, Homo sapien
gacacaggacactgatctacataaa

SEQ ID NO: 977512 - DNA, 25 bp, Homo sapien
tgacacaggacactgatctacataa

SEQ ID NO: 977513 - DNA, 25 bp, Homo sapien
gagcacaagaaaattcatagccctt

SEQ ID NO: 977514 - DNA, 25 bp, Homo sapien
tgagcacaagaaaattcatagccct

SEQ ID NO: 977515 - DNA, 25 bp, Homo sapien
atcagtacaaccaaaagtaaagcag

SEQ ID NO: 977516 - DNA, 25 bp, Homo sapien
gatcagtacaaccaaaagtaaagca

SEQ ID NO: 977517 - DNA, 25 bp, Homo sapien
tttttcagtcaccacgaagcactgc

SEQ ID NO: 977518 - DNA, 25 bp, Homo sapien
ccacaaataaggtcaggccggccat

SEQ ID NO: 977519 - DNA, 25 bp, Homo sapien
gggaggcggcccacaaataaggtca

SEQ ID NO: 977520 - DNA, 25 bp, Homo sapien
accggccccacctgactgaacagtt

SEQ ID NO: 977521 - DNA, 25 bp, Homo sapien
cccaaagcgcgtgaggacgcgagca

SEQ ID NO: 977522 - DNA, 25 bp, Homo sapien
tggtaggacaaccaagctcacacgc

SEQ ID NO: 977523 - DNA, 25 bp, Homo sapien
gcacgcgagccgaaacgctggcttt

SEQ ID NO: 977524 - DNA, 25 bp, Homo sapien
gacgcgagcaaactaggccggcgca

SEQ ID NO: 977525 - DNA, 25 bp, Homo sapien
catatcgcagggtagcaaggtggcc

SEQ ID NO: 977526 - DNA, 25 bp, Homo sapien
tgggacccctgccaacctagatttg

SEQ ID NO: 977527 - DNA, 25 bp, Homo sapien
tgattcccaatcgatagagcctggc

SEQ ID NO: 977528 - DNA, 25 bp, Homo sapien
tgaatgccaaggaaaatgggacccc

SEQ ID NO: 977529 - DNA, 25 bp, Homo sapien
tgtcggcaggcgtccaggaactgct

SEQ ID NO: 977530 - DNA, 25 bp, Homo sapien
cacgctcagctcgtcgatctgtcgg

SEQ ID NO: 977531 - DNA, 25 bp, Homo sapien
tcagctcgtcgatctgtcggcaggc

SEQ ID NO: 977532 - DNA, 25 bp, Homo sapien
tcgtcgatctgtcggcaggcgtcca

SEQ ID NO: 977533 - DNA, 25 bp, Homo sapien
cgcgagagggtggggacagggcctg

SEQ ID NO: 977534 - DNA, 25 bp, Homo sapien
gagagggtggggacagggcctggta

SEQ ID NO: 977535 - DNA, 25 bp, Homo sapien
agagggtggggacagggcctggtag

SEQ ID NO: 977536 - DNA, 25 bp, Homo sapien
cgagagggtggggacagggcctggt

SEQ ID NO: 977537 - DNA, 25 bp, Homo sapien
acacagcagcatggacgagctgtcc

SEQ ID NO: 977538 - DNA, 25 bp, Homo sapien
aacgagccagatgagacgctgctgc

SEQ ID NO: 977539 - DNA, 25 bp, Homo sapien
gactgaggacgcagaccagagggca

SEQ ID NO: 977540 - DNA, 25 bp, Homo sapien
tgtcccgcgagagtccgcagaacga

SEQ ID NO: 977541 - DNA, 25 bp, Homo sapien
cgagcccaggcagagcgtcctcgaa

SEQ ID NO: 977542 - DNA, 25 bp, Homo sapien
ccaggcagagcgtcctcgaaggcag

SEQ ID NO: 977543 - DNA, 25 bp, Homo sapien
cagcgaggcggtgcggtagagtccg

SEQ ID NO: 977544 - DNA, 25 bp, Homo sapien
gtgcggtagagtccgagcccaggca

SEQ ID NO: 977545 - DNA, 25 bp, Homo sapien
agggcctcctcgatgctgcgtcgca

SEQ ID NO: 977546 - DNA, 25 bp, Homo sapien
ggcctcgctgcagagggcctcctcg

SEQ ID NO: 977547 - DNA, 25 bp, Homo sapien
gccaggcgcaagcagggcctcgctg

SEQ ID NO: 977548 - DNA, 25 bp, Homo sapien
gctgcagagggcctcctcgatgctg

SEQ ID NO: 977549 - DNA, 25 bp, Homo sapien
gcggcggcacgcgaggactgcagag

SEQ ID NO: 977550 - DNA, 25 bp, Homo sapien
gcagagcgccgggtagaggcccagc

SEQ ID NO: 977551 - DNA, 25 bp, Homo sapien
ggcaacctccgccctggagtaggag

SEQ ID NO: 977552 - DNA, 25 bp, Homo sapien
gcgtccccgcgagcgatggcgctcc

SEQ ID NO: 977553 - DNA, 25 bp, Homo sapien
tccaggccggattggccgccgtagc

SEQ ID NO: 977554 - DNA, 25 bp, Homo sapien
ggcccttccaggccggattggccgc

SEQ ID NO: 977555 - DNA, 25 bp, Homo sapien
cttccaggccggattggccgccgta

SEQ ID NO: 977556 - DNA, 25 bp, Homo sapien
cccttccaggccggattggccgccg

SEQ ID NO: 977557 - DNA, 25 bp, Homo sapien
cagcccgaaggtgcccgccaccggg

SEQ ID NO: 977558 - DNA, 25 bp, Homo sapien
ctcagcagcccgaaggtgcccgcca

SEQ ID NO: 977559 - DNA, 25 bp, Homo sapien
tgcccataggcgtcgtagaagagcg

SEQ ID NO: 977560 - DNA, 25 bp, Homo sapien
ggcagtcgatccctgtgcccatagg

SEQ ID NO: 977561 - DNA, 25 bp, Homo sapien
ccagcaaggcaaccaggccgaagag

SEQ ID NO: 977562 - DNA, 25 bp, Homo sapien
ggtgtggcgcccttgaagcccgacc

SEQ ID NO: 977563 - DNA, 25 bp, Homo sapien
cccagtcggcctccagggtcaggaa

SEQ ID NO: 977564 - DNA, 25 bp, Homo sapien
aggcaattctcccacgctgcaggac

SEQ ID NO: 977565 - DNA, 25 bp, Homo sapien
gaggctgcccctcgcgttcaggcaa

SEQ ID NO: 977566 - DNA, 25 bp, Homo sapien
tctggctgccccgaagggttcccga

SEQ ID NO: 977567 - DNA, 25 bp, Homo sapien
tgggccagagatggggactgtgggg

SEQ ID NO: 977568 - DNA, 25 bp, Homo sapien
ctgggccagagatggggactgtggg

SEQ ID NO: 977569 - DNA, 25 bp, Homo sapien
ataaaagggtcccagaacactgatg

SEQ ID NO: 977570 - DNA, 25 bp, Homo sapien
tctcagaccattcatatatatctcc

SEQ ID NO: 977571 - DNA, 25 bp, Homo sapien
tacatctgtctacatcctgctctgc

SEQ ID NO: 977572 - DNA, 25 bp, Homo sapien
tatatctccacggtgatgatgaaga

SEQ ID NO: 977573 - DNA, 25 bp, Homo sapien
tgttgcaatcgaggcaaaacttagg

SEQ ID NO: 977574 - DNA, 25 bp, Homo sapien
caatcgaggcaaaacttagggaagc

SEQ ID NO: 977575 - DNA, 25 bp, Homo sapien
atgatgttgttgcaatcgaggcaaa

SEQ ID NO: 977576 - DNA, 25 bp, Homo sapien
gaggcaaaacttagggaagcagctg

SEQ ID NO: 977577 - DNA, 25 bp, Homo sapien
cagggacagagtggtaccaaggaac

SEQ ID NO: 977578 - DNA, 25 bp, Homo sapien
gcagggacagagtggtaccaaggaa

SEQ ID NO: 977579 - DNA, 25 bp, Homo sapien
gcttgtggatgtagtttcacctggg

SEQ ID NO: 977580 - DNA, 25 bp, Homo sapien
gggctcaggccggagaagttccgga

SEQ ID NO: 977581 - DNA, 25 bp, Homo sapien
cagagaacccgaaactccagaggca

SEQ ID NO: 977582 - DNA, 25 bp, Homo sapien
aggcagagcttgtggatgtagtttc

SEQ ID NO: 977583 - DNA, 25 bp, Homo sapien
cagcaggtccccgaagatggaattt

SEQ ID NO: 977584 - DNA, 25 bp, Homo sapien
gctttgagccaccttcggtggagcc

SEQ ID NO: 977585 - DNA, 25 bp, Homo sapien
atttgaagttaagtcccaggttgag

SEQ ID NO: 977586 - DNA, 25 bp, Homo sapien
tgagagacagcatagaggcctcact

SEQ ID NO: 977587 - DNA, 25 bp, Homo sapien
ttggtgggcagggactcagttgttc

SEQ ID NO: 977588 - DNA, 25 bp, Homo sapien
gtgggcagggactcagttgttcagc

SEQ ID NO: 977589 - DNA, 25 bp, Homo sapien
tgggcagggactcagttgttcagca

SEQ ID NO: 977590 - DNA, 25 bp, Homo sapien
tggtgggcagggactcagttgttca

SEQ ID NO: 977591 - DNA, 25 bp, Homo sapien
gcttcgtggtatctcaccgcttctc

SEQ ID NO: 977592 - DNA, 25 bp, Homo sapien
gcccagctgggcaacgcttcgtggt

SEQ ID NO: 977593 - DNA, 25 bp, Homo sapien
ctgggcaacgcttcgtggtatctca

SEQ ID NO: 977594 - DNA, 25 bp, Homo sapien
ctcgccgagcctccgaaaaggggcg

SEQ ID NO: 977595 - DNA, 25 bp, Homo sapien
gcccagcgccccgactgaagatccg

SEQ ID NO: 977596 - DNA, 25 bp, Homo sapien
tcgcctagtccagagaccgcagcct

SEQ ID NO: 977597 - DNA, 25 bp, Homo sapien
ccgactgaagatccggacctccagc

SEQ ID NO: 977598 - DNA, 25 bp, Homo sapien
ccggcggcccctcgcctagtccaga

SEQ ID NO: 977599 - DNA, 25 bp, Homo sapien
ctccgcactccgcactccgcgctcc

SEQ ID NO: 977600 - DNA, 25 bp, Homo sapien
cgcctcctggctccgagcctcgctc

SEQ ID NO: 977601 - DNA, 25 bp, Homo sapien
ggcgccgcctcctggctccgagcct

SEQ ID NO: 977602 - DNA, 25 bp, Homo sapien
tccgagcctcgctccccggcgaagc

SEQ ID NO: 977603 - DNA, 25 bp, Homo sapien
tccacgcgcgctcattcacccagcg

SEQ ID NO: 977604 - DNA, 25 bp, Homo sapien
cagcgctgtcaatcagccgcggcgg

SEQ ID NO: 977605 - DNA, 25 bp, Homo sapien
cggccacctcggtgccgggcgcctc

SEQ ID NO: 977606 - DNA, 25 bp, Homo sapien
ggagccgcggccacctcggtgccgg

SEQ ID NO: 977607 - DNA, 25 bp, Homo sapien
atgacgcaactgtgatcccaagtgt

SEQ ID NO: 977608 - DNA, 25 bp, Homo sapien
tatttaatacacaatgacgcaactg

SEQ ID NO: 977609 - DNA, 25 bp, Homo sapien
taatacacaatgacgcaactgtgat

SEQ ID NO: 977610 - DNA, 25 bp, Homo sapien
tccaagtatttaatacacaatgacg

SEQ ID NO: 977611 - DNA, 25 bp, Homo sapien
gctgcagcaagaaagacctgaggca

SEQ ID NO: 977612 - DNA, 25 bp, Homo sapien
gagaacccgtagtgcaaatctgtgg

SEQ ID NO: 977613 - DNA, 25 bp, Homo sapien
taaagccttcgactgcagctgagga

SEQ ID NO: 977614 - DNA, 25 bp, Homo sapien
cctggaaaggagctggagaacccgt

SEQ ID NO: 977615 - DNA, 25 bp, Homo sapien
tggggacaaggcaagagggggaaca

SEQ ID NO: 977616 - DNA, 25 bp, Homo sapien
ggacaaggcaagagggggaacaaga

SEQ ID NO: 977617 - DNA, 25 bp, Homo sapien
ctgtggggacaaggcaagaggggga

SEQ ID NO: 977618 - DNA, 25 bp, Homo sapien
gacaaggcaagagggggaacaagag

SEQ ID NO: 977619 - DNA, 25 bp, Homo sapien
gccatggacaccaccctcaatctgg

SEQ ID NO: 977620 - DNA, 25 bp, Homo sapien
tcaatctgggccgacatggtccgct

SEQ ID NO: 977621 - DNA, 25 bp, Homo sapien
aatctgggccgacatggtccgcttc

SEQ ID NO: 977622 - DNA, 25 bp, Homo sapien
cctcaatctgggccgacatggtccg

SEQ ID NO: 977623 - DNA, 25 bp, Homo sapien
ccgtgttggatgcctgctatgaggt

SEQ ID NO: 977624 - DNA, 25 bp, Homo sapien
gccgtgttggatgcctgctatgagg

SEQ ID NO: 977625 - DNA, 25 bp, Homo sapien
agccgtgttggatgcctgctatgag

SEQ ID NO: 977626 - DNA, 25 bp, Homo sapien
cgtgttggatgcctgctatgaggta

SEQ ID NO: 977627 - DNA, 25 bp, Homo sapien
caggggcctccgtagtggcggccag

SEQ ID NO: 977628 - DNA, 25 bp, Homo sapien
gcgccgggcatactcagccaccttg

SEQ ID NO: 977629 - DNA, 25 bp, Homo sapien
agggccttgaccacgtgtcccacgg

SEQ ID NO: 977630 - DNA, 25 bp, Homo sapien
agcgccgggcatactcagccacctt

SEQ ID NO: 977631 - DNA, 25 bp, Homo sapien
acgtgtcccacggtctggatgccgc

SEQ ID NO: 977632 - DNA, 25 bp, Homo sapien
agcccatgcccacgcgcagcccgtc

SEQ ID NO: 977633 - DNA, 25 bp, Homo sapien
cgcagcccgtccacaccagcatcaa

SEQ ID NO: 977634 - DNA, 25 bp, Homo sapien
gagccgcagcccatgcccacgcgca

SEQ ID NO: 977635 - DNA, 25 bp, Homo sapien
accagcatcaatcaggttcttggcc

SEQ ID NO: 977636 - DNA, 25 bp, Homo sapien
gcgatctgatacaccgaattccctt

SEQ ID NO: 977637 - DNA, 25 bp, Homo sapien
catggcgatctgatacaccgaattc

SEQ ID NO: 977638 - DNA, 25 bp, Homo sapien
ggcgatctgatacaccgaattccct

SEQ ID NO: 977639 - DNA, 25 bp, Homo sapien
accatggcgatctgatacaccgaat

SEQ ID NO: 977640 - DNA, 25 bp, Homo sapien
gaaaggttaaccacaactaatgcag

SEQ ID NO: 977641 - DNA, 25 bp, Homo sapien
caggcggttctcagtaaacgtgagc

SEQ ID NO: 977642 - DNA, 25 bp, Homo sapien
tgttgagagggtgccagtgaccttc

SEQ ID NO: 977643 - DNA, 25 bp, Homo sapien
caacttatgagccaagaaggccctc

SEQ ID NO: 977644 - DNA, 25 bp, Homo sapien
cacagagcagctgcttctgggaatc

SEQ ID NO: 977645 - DNA, 25 bp, Homo sapien
accagctcatcgcaatcattgacga

SEQ ID NO: 977646 - DNA, 25 bp, Homo sapien
tcttcttcaggtcggtgcgggcgat

SEQ ID NO: 977647 - DNA, 25 bp, Homo sapien
aagactatgacgtcgacgcccgcct

SEQ ID NO: 977648 - DNA, 25 bp, Homo sapien
aaatagaagccaaagttgtggcagg

SEQ ID NO: 977649 - DNA, 25 bp, Homo sapien
agaagccaaagttgtggcagggcat

SEQ ID NO: 977650 - DNA, 25 bp, Homo sapien
atagaagccaaagttgtggcagggc

SEQ ID NO: 977651 - DNA, 25 bp, Homo sapien
agccaaagttgtggcagggcatggt

SEQ ID NO: 977652 - DNA, 25 bp, Homo sapien
ccaccaccagttcaatccttggcgt

SEQ ID NO: 977653 - DNA, 25 bp, Homo sapien
caccagttcaatccttggcgtcatc

SEQ ID NO: 977654 - DNA, 25 bp, Homo sapien
tggagccaccaccagttcaatcctt

SEQ ID NO: 977655 - DNA, 25 bp, Homo sapien
ggagccaccaccagttcaatccttg

SEQ ID NO: 977656 - DNA, 25 bp, Homo sapien
ctggtccctggtcacaggcaccagt

SEQ ID NO: 977657 - DNA, 25 bp, Homo sapien
tgagagagaaggagccaggcctccc

SEQ ID NO: 977658 - DNA, 25 bp, Homo sapien
cctctggtccctggtcacaggcacc

SEQ ID NO: 977659 - DNA, 25 bp, Homo sapien
ctgcaggttggcaggtgagagagaa

SEQ ID NO: 977660 - DNA, 25 bp, Homo sapien
agcacatcgcccacagtgtgcgagg

SEQ ID NO: 977661 - DNA, 25 bp, Homo sapien
tccagcacatcgcccacagtgtgcg

SEQ ID NO: 977662 - DNA, 25 bp, Homo sapien
ccatggtgcccgtctcagtgatggg

SEQ ID NO: 977663 - DNA, 25 bp, Homo sapien
cagcaccacagggtccgtgatgaag

SEQ ID NO: 977664 - DNA, 25 bp, Homo sapien
tgtggtgaatgaaaccaatacctcc

SEQ ID NO: 977665 - DNA, 25 bp, Homo sapien
gaatgaaaccaatacctcccatcag

SEQ ID NO: 977666 - DNA, 25 bp, Homo sapien
gtgcagttgtggtgaatgaaaccaa

SEQ ID NO: 977667 - DNA, 25 bp, Homo sapien
cgttggcctggaactctggggtgca

SEQ ID NO: 977668 - DNA, 25 bp, Homo sapien
tgtgccctggagtccccatgcaggt

SEQ ID NO: 977669 - DNA, 25 bp, Homo sapien
tgtgtgccctggagtccccatgcag

SEQ ID NO: 977670 - DNA, 25 bp, Homo sapien
catggcaatggccatgtcagcctct

SEQ ID NO: 977671 - DNA, 25 bp, Homo sapien
ggcaatggccatgtcagcctctgtc

SEQ ID NO: 977672 - DNA, 25 bp, Homo sapien
agcctctgtcacagtgtccatgggg

SEQ ID NO: 977673 - DNA, 25 bp, Homo sapien
aggagatcagtggcgtcttcagcgt

SEQ ID NO: 977674 - DNA, 25 bp, Homo sapien
acctcatcagctatgaagtctatga

SEQ ID NO: 977675 - DNA, 25 bp, Homo sapien
cacctcatcagctatgaagtctatg

SEQ ID NO: 977676 - DNA, 25 bp, Homo sapien
cctcatcagctatgaagtctatgaa

SEQ ID NO: 977677 - DNA, 25 bp, Homo sapien
tcatcagctatgaagtctatgaatc

SEQ ID NO: 977678 - DNA, 25 bp, Homo sapien
acacagggctcggaacagcatggag

SEQ ID NO: 977679 - DNA, 25 bp, Homo sapien
acaggacagtccgcatgccccggtg

SEQ ID NO: 977680 - DNA, 25 bp, Homo sapien
caacacagtatgaacatgacccagc

SEQ ID NO: 977681 - DNA, 25 bp, Homo sapien
gctgagtcacacagggctcggaaca

SEQ ID NO: 977682 - DNA, 25 bp, Homo sapien
cataatgcccacatctccagttccc

SEQ ID NO: 977683 - DNA, 25 bp, Homo sapien
agcggctgcttaagcttggctccgg

SEQ ID NO: 977684 - DNA, 25 bp, Homo sapien
gaccctctgccctcgtggtgaggct

SEQ ID NO: 977685 - DNA, 25 bp, Homo sapien
cagcggctgggaaaagtctccccat

SEQ ID NO: 977686 - DNA, 25 bp, Homo sapien
gcacgtagccggtgccgccgctgat

SEQ ID NO: 977687 - DNA, 25 bp, Homo sapien
tgctgcgcggtgagcccatcctcgg

SEQ ID NO: 977688 - DNA, 25 bp, Homo sapien
gtaggtgaggccgtcggcgctggcg

SEQ ID NO: 977689 - DNA, 25 bp, Homo sapien
cgccgctgatcaggtagtccgccat

SEQ ID NO: 977690 - DNA, 25 bp, Homo sapien
gagaccccgcgacccgacataaaca

SEQ ID NO: 977691 - DNA, 25 bp, Homo sapien
ccgcgacccgacataaacacccgcg

SEQ ID NO: 977692 - DNA, 25 bp, Homo sapien
gcgagaccccgcgacccgacataaa

SEQ ID NO: 977693 - DNA, 25 bp, Homo sapien
gacccgacataaacacccgcgcggc

SEQ ID NO: 977694 - DNA, 25 bp, Homo sapien
tatctccggctgagaaaatggtgtt

SEQ ID NO: 977695 - DNA, 25 bp, Homo sapien
ccctatctccggctgagaaaatggt

SEQ ID NO: 977696 - DNA, 25 bp, Homo sapien
tttaatctcagagagcggtttgtta

SEQ ID NO: 977697 - DNA, 25 bp, Homo sapien
tcagagagcggtttgttatttggga

SEQ ID NO: 977698 - DNA, 25 bp, Homo sapien
tacacaggctccctgagcccaagtg

SEQ ID NO: 977699 - DNA, 25 bp, Homo sapien
ctagccctgcgaaggcgatccatct

SEQ ID NO: 977700 - DNA, 25 bp, Homo sapien
caacacctgccagtaagaccactga

SEQ ID NO: 977701 - DNA, 25 bp, Homo sapien
gcgaaggcgatccatctggacacca

SEQ ID NO: 977702 - DNA, 25 bp, Homo sapien
cctgccagtaagaccactgaagata

SEQ ID NO: 977703 - DNA, 25 bp, Homo sapien
caagtcagtcggacaggactccagc

SEQ ID NO: 977704 - DNA, 25 bp, Homo sapien
taaggaggggtaagccaagtcagtc

SEQ ID NO: 977705 - DNA, 25 bp, Homo sapien
cagcaagcactgtttgaaccccagg

SEQ ID NO: 977706 - DNA, 25 bp, Homo sapien
tccagcaagcactgtttgaacccca

SEQ ID NO: 977707 - DNA, 25 bp, Homo sapien
gggtgtcgtcgggtgtgtagcgagg

SEQ ID NO: 977708 - DNA, 25 bp, Homo sapien
tcgtcgggtgtgtagcgaggtccaa

SEQ ID NO: 977709 - DNA, 25 bp, Homo sapien
tgtcgtcgggtgtgtagcgaggtcc

SEQ ID NO: 977710 - DNA, 25 bp, Homo sapien
cgggtgtgtagcgaggtccaatcta

SEQ ID NO: 977711 - DNA, 25 bp, Homo sapien
gcgctgtaccgctgcgccgccgtct

SEQ ID NO: 977712 - DNA, 25 bp, Homo sapien
ggctcgtagccggcctgcagcagtc

SEQ ID NO: 977713 - DNA, 25 bp, Homo sapien
gccgtctcgtgtcccgggtgttgcc

SEQ ID NO: 977714 - DNA, 25 bp, Homo sapien
agcagtcgggcgctgtaccgctgcg

SEQ ID NO: 977715 - DNA, 25 bp, Homo sapien
ctgcagcggtggtggagtgagtggc

SEQ ID NO: 977716 - DNA, 25 bp, Homo sapien
tgcagcggtggtggagtgagtggcc

SEQ ID NO: 977717 - DNA, 25 bp, Homo sapien
ggtggtggagtgagtggcccctcca

SEQ ID NO: 977718 - DNA, 25 bp, Homo sapien
agcggtggtggagtgagtggcccct

SEQ ID NO: 977719 - DNA, 25 bp, Homo sapien
cggaggccgcagctcagggcgggcg

SEQ ID NO: 977720 - DNA, 25 bp, Homo sapien
gccgcagctcagggcgggcgggagc

SEQ ID NO: 977721 - DNA, 25 bp, Homo sapien
cgggcgggagcctggaggctcccgg

SEQ ID NO: 977722 - DNA, 25 bp, Homo sapien
aggccgcagctcagggcgggcggga

SEQ ID NO: 977723 - DNA, 25 bp, Homo sapien
gcagcccggtcgagtcccgaggagg

SEQ ID NO: 977724 - DNA, 25 bp, Homo sapien
agcgcagcccggtcgagtcccgagg

SEQ ID NO: 977725 - DNA, 25 bp, Homo sapien
gcgcagcccggtcgagtcccgagga

SEQ ID NO: 977726 - DNA, 25 bp, Homo sapien
cgcagcccggtcgagtcccgaggag

SEQ ID NO: 977727 - DNA, 25 bp, Homo sapien
aatccgggagtcgactgggctccgc

SEQ ID NO: 977728 - DNA, 25 bp, Homo sapien
ccggcgctgctacgcagatgcctag

SEQ ID NO: 977729 - DNA, 25 bp, Homo sapien
gatgcctagactcggttcgtctctc

SEQ ID NO: 977730 - DNA, 25 bp, Homo sapien
ccagattcagcgagggtacatcggg

SEQ ID NO: 977731 - DNA, 25 bp, Homo sapien
cctgccgtccggaccttccagtgtc

SEQ ID NO: 977732 - DNA, 25 bp, Homo sapien
tccctgccgtccggaccttccagtg

SEQ ID NO: 977733 - DNA, 25 bp, Homo sapien
tgccgtccggaccttccagtgtctc

SEQ ID NO: 977734 - DNA, 25 bp, Homo sapien
cttccctgccgtccggaccttccag

SEQ ID NO: 977735 - DNA, 25 bp, Homo sapien
gtcactgtgaatggagatgccagca

SEQ ID NO: 977736 - DNA, 25 bp, Homo sapien
aagccacggaacagcttctggccgg

SEQ ID NO: 977737 - DNA, 25 bp, Homo sapien
agatgccagcaagcgtgggagagtg

SEQ ID NO: 977738 - DNA, 25 bp, Homo sapien
tctggccggtgaggcacagtcactg

SEQ ID NO: 977739 - DNA, 25 bp, Homo sapien
gctgaaactgcagatgtgtgccacc

SEQ ID NO: 977740 - DNA, 25 bp, Homo sapien
gtagctgaaactgcagatgtgtgcc

SEQ ID NO: 977741 - DNA, 25 bp, Homo sapien
tagctgaaactgcagatgtgtgcca

SEQ ID NO: 977742 - DNA, 25 bp, Homo sapien
caagtagctgaaactgcagatgtgt

SEQ ID NO: 977743 - DNA, 25 bp, Homo sapien
tttaaaactagaacatttgtcacat

SEQ ID NO: 977744 - DNA, 25 bp, Homo sapien
cacaggtcgtcttctggaggtggtg

SEQ ID NO: 977745 - DNA, 25 bp, Homo sapien
ccaaacgatgagattcccttcatca

SEQ ID NO: 977746 - DNA, 25 bp, Homo sapien
caaacgatgagattcccttcatcat

SEQ ID NO: 977747 - DNA, 25 bp, Homo sapien
aacgatgagattcccttcatcatct

SEQ ID NO: 977748 - DNA, 25 bp, Homo sapien
ggcttcccctaaagctccatgtagg

SEQ ID NO: 977749 - DNA, 25 bp, Homo sapien
caaacagactggaagataaggcact

SEQ ID NO: 977750 - DNA, 25 bp, Homo sapien
ttactatgcgtcagacaccatgttc

SEQ ID NO: 977751 - DNA, 25 bp, Homo sapien
catgagggtaactgattgaagggtc

SEQ ID NO: 977752 - DNA, 25 bp, Homo sapien
cacatccttcttcacctggtggcag

SEQ ID NO: 977753 - DNA, 25 bp, Homo sapien
acatccttcttcacctggtggcagc

SEQ ID NO: 977754 - DNA, 25 bp, Homo sapien
tcaaagcgctgtaacactaacacat

SEQ ID NO: 977755 - DNA, 25 bp, Homo sapien
tggcctggcagaacgatcagatgtc

SEQ ID NO: 977756 - DNA, 25 bp, Homo sapien
aaaggaattgctgcatggcctggca

SEQ ID NO: 977757 - DNA, 25 bp, Homo sapien
ttcgtaagtacaataacaaggtctc

SEQ ID NO: 977758 - DNA, 25 bp, Homo sapien
tctccacaatttggcaatttgcttc

SEQ ID NO: 977759 - DNA, 25 bp, Homo sapien
tttctccacaatttggcaatttgct

SEQ ID NO: 977760 - DNA, 25 bp, Homo sapien
aatttgcttcactctagtagtccaa

SEQ ID NO: 977761 - DNA, 25 bp, Homo sapien
cacaatttggcaatttgcttcactc

SEQ ID NO: 977762 - DNA, 25 bp, Homo sapien
ccagctcctgaccacgagtgatctg

SEQ ID NO: 977763 - DNA, 25 bp, Homo sapien
agggagtcttgctcactcagtgctc

SEQ ID NO: 977764 - DNA, 25 bp, Homo sapien
gccgggattgcagagggagtcttgc

SEQ ID NO: 977765 - DNA, 25 bp, Homo sapien
tgctgagtgcctgggattgcaggcg

SEQ ID NO: 977766 - DNA, 25 bp, Homo sapien
tcccggctgccatcctgtctaggaa

SEQ ID NO: 977767 - DNA, 25 bp, Homo sapien
cgtcagggaactgaggagcgcctct

SEQ ID NO: 977768 - DNA, 25 bp, Homo sapien
aggagcgtctctacccggccaccac

SEQ ID NO: 977769 - DNA, 25 bp, Homo sapien
agtggggagccccactgcccggctg

SEQ ID NO: 977770 - DNA, 25 bp, Homo sapien
taaggaaaacgtgacatttcaacac

SEQ ID NO: 977771 - DNA, 25 bp, Homo sapien
tagagctatgtggagaattttaact

SEQ ID NO: 977772 - DNA, 25 bp, Homo sapien
tcaacaaatagtgcactgagtaggc

SEQ ID NO: 977773 - DNA, 25 bp, Homo sapien
tattaagatattaacagacagaccc

SEQ ID NO: 977774 - DNA, 25 bp, Homo sapien
tcccaggctgaagcgcaatggcacg

SEQ ID NO: 977775 - DNA, 25 bp, Homo sapien
gctcactgcaacgtctgtctcttgg

SEQ ID NO: 977776 - DNA, 25 bp, Homo sapien
cggctcactgcaacgtctgtctctt

SEQ ID NO: 977777 - DNA, 25 bp, Homo sapien
tcactgcaacgtctgtctcttgggt

SEQ ID NO: 977778 - DNA, 25 bp, Homo sapien
aaagtttgtgctgttagtttaatag

SEQ ID NO: 977779 - DNA, 25 bp, Homo sapien
acattgtgacttactcccgttgagc

SEQ ID NO: 977780 - DNA, 25 bp, Homo sapien
ttttctgacattgtgacttactccc

SEQ ID NO: 977781 - DNA, 25 bp, Homo sapien
tgctgttagtttaatagggttggga

SEQ ID NO: 977782 - DNA, 25 bp, Homo sapien
tagttccatggaattttaagcactg

SEQ ID NO: 977783 - DNA, 25 bp, Homo sapien
cctctaacctatgtctaaagaatta

SEQ ID NO: 977784 - DNA, 25 bp, Homo sapien
catggaattttaagcactgttcccc

SEQ ID NO: 977785 - DNA, 25 bp, Homo sapien
gcactgttccccctctaacctatgt

SEQ ID NO: 977786 - DNA, 25 bp, Homo sapien
gcataacgtttcatcctcagaatcg

SEQ ID NO: 977787 - DNA, 25 bp, Homo sapien
gattaaaaagacgagccttctcctg

SEQ ID NO: 977788 - DNA, 25 bp, Homo sapien
gactctgtaagggactttgcataac

SEQ ID NO: 977789 - DNA, 25 bp, Homo sapien
tcagaatcgctaatgatgggcagag

SEQ ID NO: 977790 - DNA, 25 bp, Homo sapien
tgaacacggttaacactgaagaaac

SEQ ID NO: 977791 - DNA, 25 bp, Homo sapien
tgctgtttgggtgaacacggtgcgg

SEQ ID NO: 977792 - DNA, 25 bp, Homo sapien
gaagtgaaacagcacatcaatgtga

SEQ ID NO: 977793 - DNA, 25 bp, Homo sapien
ccagaggccgaaggctctgagatgc

SEQ ID NO: 977794 - DNA, 25 bp, Homo sapien
gaagtgaaccccagaagagtagcaa

SEQ ID NO: 977795 - DNA, 25 bp, Homo sapien
tacgtgccaaggtcagagatcagtc

SEQ ID NO: 977796 - DNA, 25 bp, Homo sapien
tgctctaggttgcagggtcgcacct

SEQ ID NO: 977797 - DNA, 25 bp, Homo sapien
ttatggagcccaatcaagagctgga

SEQ ID NO: 977798 - DNA, 25 bp, Homo sapien
acacaccacaccacaaattgtccac

SEQ ID NO: 977799 - DNA, 25 bp, Homo sapien
tattcccttggttccaggtctcctc

SEQ ID NO: 977800 - DNA, 25 bp, Homo sapien
ggtgtgtttgcgtacaggctgtggg

SEQ ID NO: 977801 - DNA, 25 bp, Homo sapien
caccacaaattgtccacttacaagc

SEQ ID NO: 977802 - DNA, 25 bp, Homo sapien
cagaatctcactgacacgcaggctg

SEQ ID NO: 977803 - DNA, 25 bp, Homo sapien
cagatattgtttgtggctacttccc

SEQ ID NO: 977804 - DNA, 25 bp, Homo sapien
ggaccacgagcatatggcaacatgt

SEQ ID NO: 977805 - DNA, 25 bp, Homo sapien
ccagcagagttggtagttacgacag

SEQ ID NO: 977806 - DNA, 25 bp, Homo sapien
agttctgtcaccatagatgccccac

SEQ ID NO: 977807 - DNA, 25 bp, Homo sapien
tgggcgatagagtcaaacaacaaca

SEQ ID NO: 977808 - DNA, 25 bp, Homo sapien
acccagttctgtcaccatagatgcc

SEQ ID NO: 977809 - DNA, 25 bp, Homo sapien
tcctgggcgatagagtcaaacaaca

SEQ ID NO: 977810 - DNA, 25 bp, Homo sapien
catccgcggaaaattataaggtggg

SEQ ID NO: 977811 - DNA, 25 bp, Homo sapien
aaagcaaagcgccatcctgtgtcgt

SEQ ID NO: 977812 - DNA, 25 bp, Homo sapien
atctgatcaaggcagcatccgcgga

SEQ ID NO: 977813 - DNA, 25 bp, Homo sapien
cagaagaacgaagaaataagggcag

SEQ ID NO: 977814 - DNA, 25 bp, Homo sapien
tcatcggaggttgaaatggaacctc

SEQ ID NO: 977815 - DNA, 25 bp, Homo sapien
tccatcttggcacttaccctcagac

SEQ ID NO: 977816 - DNA, 25 bp, Homo sapien
ggccgtgtttttcatcggaggttga

SEQ ID NO: 977817 - DNA, 25 bp, Homo sapien
tcattcctcaggagatactctgtga

SEQ ID NO: 977818 - DNA, 25 bp, Homo sapien
ctgggcccagctcggtgtcggctcc

SEQ ID NO: 977819 - DNA, 25 bp, Homo sapien
agctcggtgtcggctccggaccgca

SEQ ID NO: 977820 - DNA, 25 bp, Homo sapien
ggcccagctcggtgtcggctccgga

SEQ ID NO: 977821 - DNA, 25 bp, Homo sapien
tcggtgtcggctccggaccgcagct

SEQ ID NO: 977822 - DNA, 25 bp, Homo sapien
ttaactaaagtccattgttcacagt

SEQ ID NO: 977823 - DNA, 25 bp, Homo sapien
tagaaaattgagcagctaatgcaga

SEQ ID NO: 977824 - DNA, 25 bp, Homo sapien
atagaaaattgagcagctaatacag

SEQ ID NO: 977825 - DNA, 25 bp, Homo sapien
tgttcacagttgtctactggcttcc

SEQ ID NO: 977826 - DNA, 25 bp, Homo sapien
tcctctcaggccttattaataaggg

SEQ ID NO: 977827 - DNA, 25 bp, Homo sapien
gaaaatggctgtagtcttgcagtcc

SEQ ID NO: 977828 - DNA, 25 bp, Homo sapien
catctgttgctggaccctcgggtta

SEQ ID NO: 977829 - DNA, 25 bp, Homo sapien
taataagggacagctagaaaatagt

SEQ ID NO: 977830 - DNA, 25 bp, Homo sapien
cagtcccttttaagcagccaatttg

SEQ ID NO: 977831 - DNA, 25 bp, Homo sapien
agtcccttttaagcagccaatttgg

SEQ ID NO: 977832 - DNA, 25 bp, Homo sapien
tcagtcccttttaagcagccaattt

SEQ ID NO: 977833 - DNA, 25 bp, Homo sapien
cacgtccacgaccaaatccgcctct

SEQ ID NO: 977834 - DNA, 25 bp, Homo sapien
tcaatgcaaaagaatcctctccagt

SEQ ID NO: 977835 - DNA, 25 bp, Homo sapien
aatgcaaaagaatcctctccagttt

SEQ ID NO: 977836 - DNA, 25 bp, Homo sapien
accacgtccacgaccaaatccgcct

SEQ ID NO: 977837 - DNA, 25 bp, Homo sapien
gtagcacagcactcctcacatacag

SEQ ID NO: 977838 - DNA, 25 bp, Homo sapien
caggtagcacagcactcctcacata

SEQ ID NO: 977839 - DNA, 25 bp, Homo sapien
accaggtagcacagcactcctcaca

SEQ ID NO: 977840 - DNA, 25 bp, Homo sapien
ggtagcacagcactcctcacataca

SEQ ID NO: 977841 - DNA, 25 bp, Homo sapien
ccagtctctggacggctacggggta

SEQ ID NO: 977842 - DNA, 25 bp, Homo sapien
gcaaagtgttccttcacgtagcctc

SEQ ID NO: 977843 - DNA, 25 bp, Homo sapien
ttaggccaaggtctgccagtctctg

SEQ ID NO: 977844 - DNA, 25 bp, Homo sapien
cggctacggggtagggtggcaggca

SEQ ID NO: 977845 - DNA, 25 bp, Homo sapien
tcataaatggcaatccggttcttct

SEQ ID NO: 977846 - DNA, 25 bp, Homo sapien
atggcaatccggttcttcttaggcg

SEQ ID NO: 977847 - DNA, 25 bp, Homo sapien
cataaatggcaatccggttcttctt

SEQ ID NO: 977848 - DNA, 25 bp, Homo sapien
caatccggttcttcttaggcgtcaa

SEQ ID NO: 977849 - DNA, 25 bp, Homo sapien
gctatcctcttaggattaaaattta

SEQ ID NO: 977850 - DNA, 25 bp, Homo sapien
ttcagttttgctatcctcttaggat

SEQ ID NO: 977851 - DNA, 25 bp, Homo sapien
gaggtaagaagctatgttcatggca

SEQ ID NO: 977852 - DNA, 25 bp, Homo sapien
ggagtagaggtaagaagctatgttc

SEQ ID NO: 977853 - DNA, 25 bp, Homo sapien
tacgtacggttatgatgtggccctc

SEQ ID NO: 977854 - DNA, 25 bp, Homo sapien
gagtagctaggtgctactatgcctg

SEQ ID NO: 977855 - DNA, 25 bp, Homo sapien
gcatagttgccatcagtaaaggaca

SEQ ID NO: 977856 - DNA, 25 bp, Homo sapien
tgctcccctttgagttgtgtgctct

SEQ ID NO: 977857 - DNA, 25 bp, Homo sapien
tctaagtgtaagtctgtagccacct

SEQ ID NO: 977858 - DNA, 25 bp, Homo sapien
tactttgtactttgcagatctctcc

SEQ ID NO: 977859 - DNA, 25 bp, Homo sapien
tatgtggatggtttgattctagacc

SEQ ID NO: 977860 - DNA, 25 bp, Homo sapien
taaagtagaagtagtgtaacagcag

SEQ ID NO: 977861 - DNA, 25 bp, Homo sapien
cggtaagcattcacctggagaaatt

SEQ ID NO: 977862 - DNA, 25 bp, Homo sapien
gcattcacctggagaaatttgacac

SEQ ID NO: 977863 - DNA, 25 bp, Homo sapien
aagcattcacctggagaaatttgac

SEQ ID NO: 977864 - DNA, 25 bp, Homo sapien
gtaagcattcacctggagaaatttg

SEQ ID NO: 977865 - DNA, 25 bp, Homo sapien
tgtgtcagaccatccttggccatag

SEQ ID NO: 977866 - DNA, 25 bp, Homo sapien
gaatttctcggtgttgtctatcact

SEQ ID NO: 977867 - DNA, 25 bp, Homo sapien
tagatccaatttgggcaggttgagg

SEQ ID NO: 977868 - DNA, 25 bp, Homo sapien
taactgttgaagaggcctgtatctc

SEQ ID NO: 977869 - DNA, 25 bp, Homo sapien
ccttttgttgcacattacttttgtg

SEQ ID NO: 977870 - DNA, 25 bp, Homo sapien
tcttgtgtaaaagacattcagtgta

SEQ ID NO: 977871 - DNA, 25 bp, Homo sapien
aattagttaattgcccatcttccga

SEQ ID NO: 977872 - DNA, 25 bp, Homo sapien
tttcattggtgtgttataagtttaa

SEQ ID NO: 977873 - DNA, 25 bp, Homo sapien
tccagccatcatctatgtaagttaa

SEQ ID NO: 977874 - DNA, 25 bp, Homo sapien
ggcattctcacagcaagttactggt

SEQ ID NO: 977875 - DNA, 25 bp, Homo sapien
aaaatagagtctccgagttccagcc

SEQ ID NO: 977876 - DNA, 25 bp, Homo sapien
tgtcaaagcctgaacccacaatggg

SEQ ID NO: 977877 - DNA, 25 bp, Homo sapien
cctatgtgcagaggatttccaagtt

SEQ ID NO: 977878 - DNA, 25 bp, Homo sapien
ttccaagtttatgcgtccagcccag

SEQ ID NO: 977879 - DNA, 25 bp, Homo sapien
ggcctgtgtcagttgcctccagtca

SEQ ID NO: 977880 - DNA, 25 bp, Homo sapien
tcttaatctcatctagttcctttgt

SEQ ID NO: 977881 - DNA, 25 bp, Homo sapien
tctctgtagtccaacctcacaatag

SEQ ID NO: 977882 - DNA, 25 bp, Homo sapien
ctctgtagtccaacctcacaataga

SEQ ID NO: 977883 - DNA, 25 bp, Homo sapien
gtctctgtagtccaacctcacaata

SEQ ID NO: 977884 - DNA, 25 bp, Homo sapien
ctacctaatcggttttgttaatgag

SEQ ID NO: 977885 - DNA, 25 bp, Homo sapien
tacctaatcggttttgttaatgaga

SEQ ID NO: 977886 - DNA, 25 bp, Homo sapien
gggtgtcgtattggctaaatctcat

SEQ ID NO: 977887 - DNA, 25 bp, Homo sapien
atgggtgtcgtattggctaaatctc

SEQ ID NO: 977888 - DNA, 25 bp, Homo sapien
tgtaacataggacatgagcaattgg

SEQ ID NO: 977889 - DNA, 25 bp, Homo sapien
tcctatgtaattgtgctgtgtaaca

SEQ ID NO: 977890 - DNA, 25 bp, Homo sapien
taattacatgggctctcctagatac

SEQ ID NO: 977891 - DNA, 25 bp, Homo sapien
ttggccaccacagtattttatgcca

SEQ ID NO: 977892 - DNA, 25 bp, Homo sapien
tgtcatgtcacgacatactgccgct

SEQ ID NO: 977893 - DNA, 25 bp, Homo sapien
gtatgtcatgtcacgacatactgcc

SEQ ID NO: 977894 - DNA, 25 bp, Homo sapien
tcatgtcacgacatactgccgctgc

SEQ ID NO: 977895 - DNA, 25 bp, Homo sapien
gtcacgacatactgccgctgcacga

SEQ ID NO: 977896 - DNA, 25 bp, Homo sapien
ctattcaacatgtagaatgctttcc

SEQ ID NO: 977897 - DNA, 25 bp, Homo sapien
tctgcattttccttacttttattgt

SEQ ID NO: 977898 - DNA, 25 bp, Homo sapien
cttttattgtcagaaactccagaaa

SEQ ID NO: 977899 - DNA, 25 bp, Homo sapien
tcaacatgtagaatgctttcctaat

SEQ ID NO: 977900 - DNA, 25 bp, Homo sapien
aacagcggggtctgcagacaccctt

SEQ ID NO: 977901 - DNA, 25 bp, Homo sapien
ctgggactgttcagtcactgggaga

SEQ ID NO: 977902 - DNA, 25 bp, Homo sapien
agagcttggttgcagaaacttcggg

SEQ ID NO: 977903 - DNA, 25 bp, Homo sapien
acagctgggccatgcgggaggcaga

SEQ ID NO: 977904 - DNA, 25 bp, Homo sapien
aagctcattcctcacaacggccttt

SEQ ID NO: 977905 - DNA, 25 bp, Homo sapien
gccacttcggcaggtccagctactg

SEQ ID NO: 977906 - DNA, 25 bp, Homo sapien
gccaagctcattcctcacaacggcc

SEQ ID NO: 977907 - DNA, 25 bp, Homo sapien
tggccttggcctcacagtggactct

SEQ ID NO: 977908 - DNA, 25 bp, Homo sapien
atatcgcccatgatcaacgtgttct

SEQ ID NO: 977909 - DNA, 25 bp, Homo sapien
aacaggtttaatgacggtcatggca

SEQ ID NO: 977910 - DNA, 25 bp, Homo sapien
tttaatgacggtcatggcaactttt

SEQ ID NO: 977911 - DNA, 25 bp, Homo sapien
acaatgaaaaatatcgcccatgatc

SEQ ID NO: 977912 - DNA, 25 bp, Homo sapien
aaaagtatagctcaagttgggagtg

SEQ ID NO: 977913 - DNA, 25 bp, Homo sapien
aagtatagctcaagttgggagtgca

SEQ ID NO: 977914 - DNA, 25 bp, Homo sapien
agtatagctcaagttgggagtgcag

SEQ ID NO: 977915 - DNA, 25 bp, Homo sapien
tatagctcaagttgggagtgcagag

SEQ ID NO: 977916 - DNA, 25 bp, Homo sapien
gtgtgcatagtgggcctggagggcg

SEQ ID NO: 977917 - DNA, 25 bp, Homo sapien
agatgtgtgcatagtgggcctggag

SEQ ID NO: 977918 - DNA, 25 bp, Homo sapien
gaagatgtgtgcatagtgggcctgg

SEQ ID NO: 977919 - DNA, 25 bp, Homo sapien
ggggaagatgtgtgcatagtgggcc

SEQ ID NO: 977920 - DNA, 25 bp, Homo sapien
gggccggcactggtccagggcacgt

SEQ ID NO: 977921 - DNA, 25 bp, Homo sapien
ctgagcctgtccttggcttctccac

SEQ ID NO: 977922 - DNA, 25 bp, Homo sapien
tctccggttccctgagcctgtcctt

SEQ ID NO: 977923 - DNA, 25 bp, Homo sapien
tccggttccctgagcctgtccttgg

SEQ ID NO: 977924 - DNA, 25 bp, Homo sapien
tgtgggatccatgtccgtggggttc

SEQ ID NO: 977925 - DNA, 25 bp, Homo sapien
gtcctccagtgtgggatccatgtcc

SEQ ID NO: 977926 - DNA, 25 bp, Homo sapien
tgggatccatgtccgtggggttccc

SEQ ID NO: 977927 - DNA, 25 bp, Homo sapien
tccagtgtgggatccatgtccgtgg

SEQ ID NO: 977928 - DNA, 25 bp, Homo sapien
tgggagggaccctgatgactgagga

SEQ ID NO: 977929 - DNA, 25 bp, Homo sapien
accctgatgactgaggagcctggta

SEQ ID NO: 977930 - DNA, 25 bp, Homo sapien
gttgggagggaccctgatgactgag

SEQ ID NO: 977931 - DNA, 25 bp, Homo sapien
cctgatgactgaggagcctggtagc

SEQ ID NO: 977932 - DNA, 25 bp, Homo sapien
gggccgtagggggcccgctctgctg

SEQ ID NO: 977933 - DNA, 25 bp, Homo sapien
tagggggcccgctctgctgccttga

SEQ ID NO: 977934 - DNA, 25 bp, Homo sapien
gccgtagggggcccgctctgctgcc

SEQ ID NO: 977935 - DNA, 25 bp, Homo sapien
cgtagggggcccgctctgctgcctt

SEQ ID NO: 977936 - DNA, 25 bp, Homo sapien
gacaaggtgggaccatagactttgc

SEQ ID NO: 977937 - DNA, 25 bp, Homo sapien
caaggtgggaccatagactttgcca

SEQ ID NO: 977938 - DNA, 25 bp, Homo sapien
aaggtgggaccatagactttgccaa

SEQ ID NO: 977939 - DNA, 25 bp, Homo sapien
aggacaaggtgggaccatagacttt

SEQ ID NO: 977940 - DNA, 25 bp, Homo sapien
gctcaggatccagcaaggggcggca

SEQ ID NO: 977941 - DNA, 25 bp, Homo sapien
agttgtccccactctcagtcggtca

SEQ ID NO: 977942 - DNA, 25 bp, Homo sapien
gaatgacaggtgcaaataccttccc

SEQ ID NO: 977943 - DNA, 25 bp, Homo sapien
tggctcctccccagagttgtcccca

SEQ ID NO: 977944 - DNA, 25 bp, Homo sapien
gatcggtgtcagtggtgctaaagcc

SEQ ID NO: 977945 - DNA, 25 bp, Homo sapien
tgagatcggtgtcagtggtgctaaa

SEQ ID NO: 977946 - DNA, 25 bp, Homo sapien
ccttgaacttgagatcggtgtcagt

SEQ ID NO: 977947 - DNA, 25 bp, Homo sapien
cagtggtgctaaagccatcatcagc

SEQ ID NO: 977948 - DNA, 25 bp, Homo sapien
ctcgtcacttgctatgtcctcactg

SEQ ID NO: 977949 - DNA, 25 bp, Homo sapien
ttgctatgtcctcactggccatgtg

SEQ ID NO: 977950 - DNA, 25 bp, Homo sapien
gtgtgctcctcgtcacttgctatgt

SEQ ID NO: 977951 - DNA, 25 bp, Homo sapien
tcacttgctatgtcctcactggcca

SEQ ID NO: 977952 - DNA, 25 bp, Homo sapien
ctgggaatgagcagctcaggtgggc

SEQ ID NO: 977953 - DNA, 25 bp, Homo sapien
cccacgagcccttgttacactcctg

SEQ ID NO: 977954 - DNA, 25 bp, Homo sapien
gcagtgcccgtctctgatattctcc

SEQ ID NO: 977955 - DNA, 25 bp, Homo sapien
ctctgatattctccgctcccacgag

SEQ ID NO: 977956 - DNA, 25 bp, Homo sapien
ggtcgtggtatttctgcgtctcatt

SEQ ID NO: 977957 - DNA, 25 bp, Homo sapien
ccaggtcgtggtatttctgcgtctc

SEQ ID NO: 977958 - DNA, 25 bp, Homo sapien
caggtcgtggtatttctgcgtctca

SEQ ID NO: 977959 - DNA, 25 bp, Homo sapien
ggccaggtcgtggtatttctgcgtc

SEQ ID NO: 977960 - DNA, 25 bp, Homo sapien
accgccactcatgggccaccggatg

SEQ ID NO: 977961 - DNA, 25 bp, Homo sapien
tgctgaagatcatgaccgccactca

SEQ ID NO: 977962 - DNA, 25 bp, Homo sapien
ccaccggatgtggtccttgtcccat

SEQ ID NO: 977963 - DNA, 25 bp, Homo sapien
cttgtcccatttgttggggctgcat

SEQ ID NO: 977964 - DNA, 25 bp, Homo sapien
tggagaggaaagcatcatcatggtc

SEQ ID NO: 977965 - DNA, 25 bp, Homo sapien
atggtcattctctgtctcactgtcc

SEQ ID NO: 977966 - DNA, 25 bp, Homo sapien
gacatcatctggctggtagaggcaa

SEQ ID NO: 977967 - DNA, 25 bp, Homo sapien
gcaactgggtgtcaggagacatgat

SEQ ID NO: 977968 - DNA, 25 bp, Homo sapien
ctggcaggttgctggacctcacata

SEQ ID NO: 977969 - DNA, 25 bp, Homo sapien
cagctgctgacttggcaggttcttt

SEQ ID NO: 977970 - DNA, 25 bp, Homo sapien
tgctgacttggcaggttctttgctc

SEQ ID NO: 977971 - DNA, 25 bp, Homo sapien
tggcaggttgctggacctcacatag

SEQ ID NO: 977972 - DNA, 25 bp, Homo sapien
gaggggtcaggaaggggacagagta

SEQ ID NO: 977973 - DNA, 25 bp, Homo sapien
cagggaggggtcaggaaggggacag

SEQ ID NO: 977974 - DNA, 25 bp, Homo sapien
ctgcagggaggggtcaggaagggga

SEQ ID NO: 977975 - DNA, 25 bp, Homo sapien
tgcagggaggggtcaggaaggggac

SEQ ID NO: 977976 - DNA, 25 bp, Homo sapien
tggaggcctcgctggacgcagacat

SEQ ID NO: 977977 - DNA, 25 bp, Homo sapien
caggagaacacagccacagagcaag

SEQ ID NO: 977978 - DNA, 25 bp, Homo sapien
cagagcaaggttccacgttcctcca

SEQ ID NO: 977979 - DNA, 25 bp, Homo sapien
gcaaggttccacgttcctccacaca

SEQ ID NO: 977980 - DNA, 25 bp, Homo sapien
aggattctccacaaggctgctcatg

SEQ ID NO: 977981 - DNA, 25 bp, Homo sapien
actaccaagatgaaagctgcagtgc

SEQ ID NO: 977982 - DNA, 25 bp, Homo sapien
taaaatttagctgtgaggattctcc

SEQ ID NO: 977983 - DNA, 25 bp, Homo sapien
tgaaagggagagtattcacacacgc

SEQ ID NO: 977984 - DNA, 25 bp, Homo sapien
ggccttgaagtcctgacttcagata

SEQ ID NO: 977985 - DNA, 25 bp, Homo sapien
tttaaaaagaggagctcccctgcat

SEQ ID NO: 977986 - DNA, 25 bp, Homo sapien
aggagctcccctgcatgagatctca

SEQ ID NO: 977987 - DNA, 25 bp, Homo sapien
ccttgaagtcctgacttcagataat

SEQ ID NO: 977988 - DNA, 25 bp, Homo sapien
gccatctgccatgatgtgaggcttc

SEQ ID NO: 977989 - DNA, 25 bp, Homo sapien
ttgccatctgccatgatgtgaggct

SEQ ID NO: 977990 - DNA, 25 bp, Homo sapien
ctccttgccatctgccatgatgtga

SEQ ID NO: 977991 - DNA, 25 bp, Homo sapien
ccttgccatctgccatgatgtgagg

SEQ ID NO: 977992 - DNA, 25 bp, Homo sapien
aaaacagtgtagtaccagagtgtga

SEQ ID NO: 977993 - DNA, 25 bp, Homo sapien
gaaattggcctattatagttaagac

SEQ ID NO: 977994 - DNA, 25 bp, Homo sapien
gaatctcaatgaggcttaaactgac

SEQ ID NO: 977995 - DNA, 25 bp, Homo sapien
cattatttccttcaaactaacctgg

SEQ ID NO: 977996 - DNA, 25 bp, Homo sapien
tcaacagttggagcaagaagattgc

SEQ ID NO: 977997 - DNA, 25 bp, Homo sapien
aatgagcgtcatctacatgtccaca

SEQ ID NO: 977998 - DNA, 25 bp, Homo sapien
gaatctcaacatggtgcccaggcca

SEQ ID NO: 977999 - DNA, 25 bp, Homo sapien
tctgatcagaccactcttagagcca

SEQ ID NO: 978000 - DNA, 25 bp, Homo sapien
agccaataagatataagctgcttct

SEQ ID NO: 978001 - DNA, 25 bp, Homo sapien
taagccaataagatataagctgctt

SEQ ID NO: 978002 - DNA, 25 bp, Homo sapien
gccaataagatataagctgcttctg

SEQ ID NO: 978003 - DNA, 25 bp, Homo sapien
ataagccaataagatataagctgct

SEQ ID NO: 978004 - DNA, 25 bp, Homo sapien
agaaaggaggtagttgctgctagac

SEQ ID NO: 978005 - DNA, 25 bp, Homo sapien
ggaggtagttgctgctagacaccat

SEQ ID NO: 978006 - DNA, 25 bp, Homo sapien
aaggaggtagttgctgctagacacc

SEQ ID NO: 978007 - DNA, 25 bp, Homo sapien
cagcagaaaggaggtagttgctgct

SEQ ID NO: 978008 - DNA, 25 bp, Homo sapien
tgaccttgctctaggcaaaggcccc

SEQ ID NO: 978009 - DNA, 25 bp, Homo sapien
aaaacaatagggtcactgttgaaca

SEQ ID NO: 978010 - DNA, 25 bp, Homo sapien
cacactgaccttgctctaggcaaag

SEQ ID NO: 978011 - DNA, 25 bp, Homo sapien
acaatagggtcactgttgaacacca

SEQ ID NO: 978012 - DNA, 25 bp, Homo sapien
aattttcatacatccaactgggaag

SEQ ID NO: 978013 - DNA, 25 bp, Homo sapien
ccagccagaagtgccaattttcata

SEQ ID NO: 978014 - DNA, 25 bp, Homo sapien
agtgatctgatgttggattcttttt

SEQ ID NO: 978015 - DNA, 25 bp, Homo sapien
aactgggaagtgatctgatgttgga

SEQ ID NO: 978016 - DNA, 25 bp, Homo sapien
tgtgtttgaattccgaccaatggga

SEQ ID NO: 978017 - DNA, 25 bp, Homo sapien
tcccacgggttgctaattgtccatc

SEQ ID NO: 978018 - DNA, 25 bp, Homo sapien
tcccttgtatctgggtgtggccctg

SEQ ID NO: 978019 - DNA, 25 bp, Homo sapien
taggtgggctcatggccacccagtg

SEQ ID NO: 978020 - DNA, 25 bp, Homo sapien
caaaccctgcatggaatgtggtcac

SEQ ID NO: 978021 - DNA, 25 bp, Homo sapien
tcaatcaactcgagcaatcagcctg

SEQ ID NO: 978022 - DNA, 25 bp, Homo sapien
caccctaggaggagctatagcttcg

SEQ ID NO: 978023 - DNA, 25 bp, Homo sapien
gactcactcgtttgtgccactggga

SEQ ID NO: 978024 - DNA, 25 bp, Homo sapien
ccaagggtcactgacactcctttga

SEQ ID NO: 978025 - DNA, 25 bp, Homo sapien
tgggacttccttagtccagccttag

SEQ ID NO: 978026 - DNA, 25 bp, Homo sapien
agttgtaaacctttcacgttgacag

SEQ ID NO: 978027 - DNA, 25 bp, Homo sapien
tcttgctgaatagtccatttgggac

SEQ ID NO: 978028 - DNA, 25 bp, Homo sapien
actagcaggatagtctaagaagccc

SEQ ID NO: 978029 - DNA, 25 bp, Homo sapien
taattccgccctggtggtcttgtgg

SEQ ID NO: 978030 - DNA, 25 bp, Homo sapien
cttgtgggaatgaagataactagca

SEQ ID NO: 978031 - DNA, 25 bp, Homo sapien
gatggagctaaaagatacactggtg

SEQ ID NO: 978032 - DNA, 25 bp, Homo sapien
cacgcccatccagacactagtattt

SEQ ID NO: 978033 - DNA, 25 bp, Homo sapien
tgatggccagaggtacattcttatg

SEQ ID NO: 978034 - DNA, 25 bp, Homo sapien
tatcttggagctttttacactctag

SEQ ID NO: 978035 - DNA, 25 bp, Homo sapien
tacactctagtttcaaaatggttga

SEQ ID NO: 978036 - DNA, 25 bp, Homo sapien
ctgagactgttactacaaacttttt

SEQ ID NO: 978037 - DNA, 25 bp, Homo sapien
tgaaaaggcgtaatgaaaaccatcc

SEQ ID NO: 978038 - DNA, 25 bp, Homo sapien
aattgtttgcgctactgagactgtt

SEQ ID NO: 978039 - DNA, 25 bp, Homo sapien
gcttctgaggaacaactctaattag

SEQ ID NO: 978040 - DNA, 25 bp, Homo sapien
cacagtcatgttgaggtgggctccc

SEQ ID NO: 978041 - DNA, 25 bp, Homo sapien
tagtcttgcctgtcaaaaagtccaa

SEQ ID NO: 978042 - DNA, 25 bp, Homo sapien
cgtattccacgtttttagccctcag

SEQ ID NO: 978043 - DNA, 25 bp, Homo sapien
tacattcagttgctataggtccagc

SEQ ID NO: 978044 - DNA, 25 bp, Homo sapien
cgtataactggagagacctgctgct

SEQ ID NO: 978045 - DNA, 25 bp, Homo sapien
tctgcaatgcgaacaggtacctatc

SEQ ID NO: 978046 - DNA, 25 bp, Homo sapien
cagcagcaagcattatacggtcatc

SEQ ID NO: 978047 - DNA, 25 bp, Homo sapien
cctgaggctggtgaacagtagctac

SEQ ID NO: 978048 - DNA, 25 bp, Homo sapien
ggctgttcctgccaaagctgtagca

SEQ ID NO: 978049 - DNA, 25 bp, Homo sapien
gcagttatccaaaagttctttcaaa

SEQ ID NO: 978050 - DNA, 25 bp, Homo sapien
tataaaggtttagccaaatgcaacg

SEQ ID NO: 978051 - DNA, 25 bp, Homo sapien
ctcgagagaattaaactattaactt

SEQ ID NO: 978052 - DNA, 25 bp, Homo sapien
ggttgccttgtatgtagaaatcagt

SEQ ID NO: 978053 - DNA, 25 bp, Homo sapien
tctccaagtgctgtgaatggtgcca

SEQ ID NO: 978054 - DNA, 25 bp, Homo sapien
catctcagaatggatccccagcagg

SEQ ID NO: 978055 - DNA, 25 bp, Homo sapien
ggaaagtatccatacactgaaaact

SEQ ID NO: 978056 - DNA, 25 bp, Homo sapien
tttctgacggagacaatagaaactt

SEQ ID NO: 978057 - DNA, 25 bp, Homo sapien
tagctttgtaggcaagaaggcaata

SEQ ID NO: 978058 - DNA, 25 bp, Homo sapien
ggcaagaaggcaatagtaagaaaat

SEQ ID NO: 978059 - DNA, 25 bp, Homo sapien
ggtttctgacggagacaatagaaac

SEQ ID NO: 978060 - DNA, 25 bp, Homo sapien
agctgttgcaaacaggccaatattg

SEQ ID NO: 978061 - DNA, 25 bp, Homo sapien
tagctgttgcaaacaggccaatatt

SEQ ID NO: 978062 - DNA, 25 bp, Homo sapien
ctagctgttgcaaacaggccaatat

SEQ ID NO: 978063 - DNA, 25 bp, Homo sapien
gtcggattcatctgtcatggccttc

SEQ ID NO: 978064 - DNA, 25 bp, Homo sapien
gccaacttgggtagacgagacagta

SEQ ID NO: 978065 - DNA, 25 bp, Homo sapien
gtagacgagacagtagaaacttctg

SEQ ID NO: 978066 - DNA, 25 bp, Homo sapien
ctgcatgtgtcggattcatctgtca

SEQ ID NO: 978067 - DNA, 25 bp, Homo sapien
gcaggtgctcccagctggaaaggac

SEQ ID NO: 978068 - DNA, 25 bp, Homo sapien
gaggcccctccattactagcaggtg

SEQ ID NO: 978069 - DNA, 25 bp, Homo sapien
taatcctaaactggtcaagtctgag

SEQ ID NO: 978070 - DNA, 25 bp, Homo sapien
ttgtacccagaatgcccttaggtgg

SEQ ID NO: 978071 - DNA, 25 bp, Homo sapien
tacggttgttgaccatgtacatggc

SEQ ID NO: 978072 - DNA, 25 bp, Homo sapien
gatgggattgtagatgcaagcactc

SEQ ID NO: 978073 - DNA, 25 bp, Homo sapien
cgtagggcacgtagcagacacagaa

SEQ ID NO: 978074 - DNA, 25 bp, Homo sapien
aagtccagcccatggttacggttgt

SEQ ID NO: 978075 - DNA, 25 bp, Homo sapien
tggtgcccacggtgtaccagtcagg

SEQ ID NO: 978076 - DNA, 25 bp, Homo sapien
gactcgctgcggtatttggtgccca

SEQ ID NO: 978077 - DNA, 25 bp, Homo sapien
tgaagaggaaccacgtataggactc

SEQ ID NO: 978078 - DNA, 25 bp, Homo sapien
gagaggcacaatgaagcagaagatg

SEQ ID NO: 978079 - DNA, 25 bp, Homo sapien
ggaccaccgtcagtgcatgcttgga

SEQ ID NO: 978080 - DNA, 25 bp, Homo sapien
acaatgtagcgctcaaaggccagga

SEQ ID NO: 978081 - DNA, 25 bp, Homo sapien
ggatggagacgccaataccaatggt

SEQ ID NO: 978082 - DNA, 25 bp, Homo sapien
gccgaagggcttacagatgacaatg

SEQ ID NO: 978083 - DNA, 25 bp, Homo sapien
caactttttgtagcgcagtgtggcc

SEQ ID NO: 978084 - DNA, 25 bp, Homo sapien
caaacatggcgaccgaagacgaagt

SEQ ID NO: 978085 - DNA, 25 bp, Homo sapien
gaagtatccgttacagctggcgacg

SEQ ID NO: 978086 - DNA, 25 bp, Homo sapien
gacagtgcccatgaaagctgcctgg

SEQ ID NO: 978087 - DNA, 25 bp, Homo sapien
tgccccacacccccctctgagtcct

SEQ ID NO: 978088 - DNA, 25 bp, Homo sapien
ggatgccccacacccccctctgagt

SEQ ID NO: 978089 - DNA, 25 bp, Homo sapien
cacacccccctctgagtcctcttat

SEQ ID NO: 978090 - DNA, 25 bp, Homo sapien
cccacacccccctctgagtcctctt

SEQ ID NO: 978091 - DNA, 25 bp, Homo sapien
tgcctcctgagagacaaaacccttc

SEQ ID NO: 978092 - DNA, 25 bp, Homo sapien
tgtgtggccgcatatatatatggcc

SEQ ID NO: 978093 - DNA, 25 bp, Homo sapien
gacttacaaatgctcagaacccaat

SEQ ID NO: 978094 - DNA, 25 bp, Homo sapien
gaacccaatataatacaatcaagtg

SEQ ID NO: 978095 - DNA, 25 bp, Homo sapien
taccttccttatgtcgggagtgttc

SEQ ID NO: 978096 - DNA, 25 bp, Homo sapien
gctgtggaaccacctcacaatgacc

SEQ ID NO: 978097 - DNA, 25 bp, Homo sapien
tcatttacgtagtagcctttgttac

SEQ ID NO: 978098 - DNA, 25 bp, Homo sapien
agtcctttcatttacgtagtagcct

SEQ ID NO: 978099 - DNA, 25 bp, Homo sapien
ggatccatgcgtttatgtctcacat

SEQ ID NO: 978100 - DNA, 25 bp, Homo sapien
tatctgttggatccatgcgtttatg

SEQ ID NO: 978101 - DNA, 25 bp, Homo sapien
ccatgcgtttatgtctcacatctcc

SEQ ID NO: 978102 - DNA, 25 bp, Homo sapien
cttcattatctgttggatccatgcg

SEQ ID NO: 978103 - DNA, 25 bp, Homo sapien
gtctaacagcgtcaggtccaaagcg

SEQ ID NO: 978104 - DNA, 25 bp, Homo sapien
tgaacgaatgaatgcccgcgaagga

SEQ ID NO: 978105 - DNA, 25 bp, Homo sapien
taagctcatcgcagtgatcggagac

SEQ ID NO: 978106 - DNA, 25 bp, Homo sapien
gctgttaatgcgcatgtcccggaat

SEQ ID NO: 978107 - DNA, 25 bp, Homo sapien
caggcgtgagccatcacagctggcc

SEQ ID NO: 978108 - DNA, 25 bp, Homo sapien
cgtgagccatcacagctggccttca

SEQ ID NO: 978109 - DNA, 25 bp, Homo sapien
ggcgtgagccatcacagctggcctt

SEQ ID NO: 978110 - DNA, 25 bp, Homo sapien
gagccatcacagctggccttcagta

SEQ ID NO: 978111 - DNA, 25 bp, Homo sapien
gatggctgctgtatcctggcatcca

SEQ ID NO: 978112 - DNA, 25 bp, Homo sapien
gatgttgctgcacgtcccattgctg

SEQ ID NO: 978113 - DNA, 25 bp, Homo sapien
tgacggattcctagggctgtgcaga

SEQ ID NO: 978114 - DNA, 25 bp, Homo sapien
tctcctagggagctcaagttgctgg

SEQ ID NO: 978115 - DNA, 25 bp, Homo sapien
aggcacgggatcctcagcaccaggg

SEQ ID NO: 978116 - DNA, 25 bp, Homo sapien
taatcatccctttgaggactcagca

SEQ ID NO: 978117 - DNA, 25 bp, Homo sapien
ctgggaagggcgagcactacttcgc

SEQ ID NO: 978118 - DNA, 25 bp, Homo sapien
tccgtaaccctcatcactttaatca

SEQ ID NO: 978119 - DNA, 25 bp, Homo sapien
gctccgtcctctcccgatgcatttg

SEQ ID NO: 978120 - DNA, 25 bp, Homo sapien
cgtcctctcccgatgcatttgctcc

SEQ ID NO: 978121 - DNA, 25 bp, Homo sapien
tcctctcccgatgcatttgctccag

SEQ ID NO: 978122 - DNA, 25 bp, Homo sapien
tccgtcctctcccgatgcatttgct

SEQ ID NO: 978123 - DNA, 25 bp, Homo sapien
ggtgcggagcgctgagcgtccgcgg

SEQ ID NO: 978124 - DNA, 25 bp, Homo sapien
gcggtgcggagcgctgagcgtccgc

SEQ ID NO: 978125 - DNA, 25 bp, Homo sapien
cggtgcggagcgctgagcgtccgcg

SEQ ID NO: 978126 - DNA, 25 bp, Homo sapien
ctgtggcgggagttgagccggactg

SEQ ID NO: 978127 - DNA, 25 bp, Homo sapien
agttgagccggactgggcgggagcc

SEQ ID NO: 978128 - DNA, 25 bp, Homo sapien
ttcctggcgatgtggaggcgttcca

SEQ ID NO: 978129 - DNA, 25 bp, Homo sapien
gcggttcctggcgatgtggaggcgt

SEQ ID NO: 978130 - DNA, 25 bp, Homo sapien
agagccgtcacctgctgcgccgcgc

SEQ ID NO: 978131 - DNA, 25 bp, Homo sapien
ggtgctgaggggcgccggccacgcg

SEQ ID NO: 978132 - DNA, 25 bp, Homo sapien
ctgcgccgcgcttaagcccgcaggc

SEQ ID NO: 978133 - DNA, 25 bp, Homo sapien
cgcaggcgccttggcggtgctgagg

SEQ ID NO: 978134 - DNA, 25 bp, Homo sapien
cggagggcacccggaagccaagcct

SEQ ID NO: 978135 - DNA, 25 bp, Homo sapien
ggagggcacccggaagccaagcctg

SEQ ID NO: 978136 - DNA, 25 bp, Homo sapien
gacctttgtggctcgcctttgatca

SEQ ID NO: 978137 - DNA, 25 bp, Homo sapien
tccttctccggaggtttgggctctc

SEQ ID NO: 978138 - DNA, 25 bp, Homo sapien
ggtcgctggcatctcggctccggct

SEQ ID NO: 978139 - DNA, 25 bp, Homo sapien
tctgcgtcagcgtggtagtccttct

SEQ ID NO: 978140 - DNA, 25 bp, Homo sapien
agtggcctctccgggagccacctcc

SEQ ID NO: 978141 - DNA, 25 bp, Homo sapien
caggcttgtgagatattgccttccc

SEQ ID NO: 978142 - DNA, 25 bp, Homo sapien
ggcctctccgggagccacctcccag

SEQ ID NO: 978143 - DNA, 25 bp, Homo sapien
tattgccttcccaagaccgcagcat

SEQ ID NO: 978144 - DNA, 25 bp, Homo sapien
ggcacttaggactaaattctcttcg

SEQ ID NO: 978145 - DNA, 25 bp, Homo sapien
ctttccctggcacttaggactaaat

SEQ ID NO: 978146 - DNA, 25 bp, Homo sapien
gactctggggactcgcctttccctg

SEQ ID NO: 978147 - DNA, 25 bp, Homo sapien
ttaggactaaattctcttcgactcc

SEQ ID NO: 978148 - DNA, 25 bp, Homo sapien
ttgatctcgccccaggaggcctcgg

SEQ ID NO: 978149 - DNA, 25 bp, Homo sapien
ctgaggagcatctttgatctcgccc

SEQ ID NO: 978150 - DNA, 25 bp, Homo sapien
tgaggagcatctttgatctcgcccc

SEQ ID NO: 978151 - DNA, 25 bp, Homo sapien
gaggagcatctttgatctcgcccca

SEQ ID NO: 978152 - DNA, 25 bp, Homo sapien
ctgatcctgagggtcctcctctcag

SEQ ID NO: 978153 - DNA, 25 bp, Homo sapien
tccgctttctgatcctgagggtcct

SEQ ID NO: 978154 - DNA, 25 bp, Homo sapien
tcaggggtgtccatccttggtggtc

SEQ ID NO: 978155 - DNA, 25 bp, Homo sapien
gctgaggggtctccgctttctgatc

SEQ ID NO: 978156 - DNA, 25 bp, Homo sapien
caggggtcccgggagtgagctttct

SEQ ID NO: 978157 - DNA, 25 bp, Homo sapien
tagtggggttgagctcttgtaagga

SEQ ID NO: 978158 - DNA, 25 bp, Homo sapien
tcctggtagtggggttgagctcttg

SEQ ID NO: 978159 - DNA, 25 bp, Homo sapien
ctggtagtggggttgagctcttgta

SEQ ID NO: 978160 - DNA, 25 bp, Homo sapien
ggtagtggggttgagctcttgtaag

SEQ ID NO: 978161 - DNA, 25 bp, Homo sapien
ccctcctggctgtctgatgacgtac

SEQ ID NO: 978162 - DNA, 25 bp, Homo sapien
tgccctcctggctgtctgatgacgt

SEQ ID NO: 978163 - DNA, 25 bp, Homo sapien
gccctcctggctgtctgatgacgta

SEQ ID NO: 978164 - DNA, 25 bp, Homo sapien
agatctggggctgatgagaggtctc

SEQ ID NO: 978165 - DNA, 25 bp, Homo sapien
gggctgatgagaggtctccggcctg

SEQ ID NO: 978166 - DNA, 25 bp, Homo sapien
tctggggctgatgagaggtctccgg

SEQ ID NO: 978167 - DNA, 25 bp, Homo sapien
gcaccactcccggtttcacccagat

SEQ ID NO: 978168 - DNA, 25 bp, Homo sapien
ggttctggctcagggagtccctgtc

SEQ ID NO: 978169 - DNA, 25 bp, Homo sapien
tggggtagaggatgcagcctagaat

SEQ ID NO: 978170 - DNA, 25 bp, Homo sapien
ggggtagaggatgcagcctagaatt

SEQ ID NO: 978171 - DNA, 25 bp, Homo sapien
ctggggtagaggatgcagcctagaa

SEQ ID NO: 978172 - DNA, 25 bp, Homo sapien
tttctagctgaggaaaggtaaactc

SEQ ID NO: 978173 - DNA, 25 bp, Homo sapien
ttctagctgaggaaaggtaaactca

SEQ ID NO: 978174 - DNA, 25 bp, Homo sapien
ggcatatgctgtcacacctggataa

SEQ ID NO: 978175 - DNA, 25 bp, Homo sapien
gggattacaggtacaggcatatgct

SEQ ID NO: 978176 - DNA, 25 bp, Homo sapien
tgtgctaccacctggctgacagcac

SEQ ID NO: 978177 - DNA, 25 bp, Homo sapien
gtgctaccacctggctgacagcact

SEQ ID NO: 978178 - DNA, 25 bp, Homo sapien
agctccacaccagtcagcagttcca

SEQ ID NO: 978179 - DNA, 25 bp, Homo sapien
gtcagcagttccaagtcccacagga

SEQ ID NO: 978180 - DNA, 25 bp, Homo sapien
tccacaccagtcagcagttccaagt

SEQ ID NO: 978181 - DNA, 25 bp, Homo sapien
cagtcagcagttccaagtcccacag

SEQ ID NO: 978182 - DNA, 25 bp, Homo sapien
tctgcagcagtacagggggcagctc

SEQ ID NO: 978183 - DNA, 25 bp, Homo sapien
tgggcccgccggctccactccatct

SEQ ID NO: 978184 - DNA, 25 bp, Homo sapien
cgccggctccactccatctgcagca

SEQ ID NO: 978185 - DNA, 25 bp, Homo sapien
tgcagcagtacagggggcagctcca

SEQ ID NO: 978186 - DNA, 25 bp, Homo sapien
tgggggatacccgcggccctcttgc

SEQ ID NO: 978187 - DNA, 25 bp, Homo sapien
ctgggggatacccgcggccctcttg

SEQ ID NO: 978188 - DNA, 25 bp, Homo sapien
gagatactggtacaaagccaaggcc

SEQ ID NO: 978189 - DNA, 25 bp, Homo sapien
gcttgcggggcaccagaagagatac

SEQ ID NO: 978190 - DNA, 25 bp, Homo sapien
gggcaccagaagagatactggtaca

SEQ ID NO: 978191 - DNA, 25 bp, Homo sapien
accagaagagatactggtacaaagc

SEQ ID NO: 978192 - DNA, 25 bp, Homo sapien
tctccatagccctaaccagggtggg

SEQ ID NO: 978193 - DNA, 25 bp, Homo sapien
gatgaacccttatcaggcactgtcc

SEQ ID NO: 978194 - DNA, 25 bp, Homo sapien
tactgctggtgactcaacatggcgg

SEQ ID NO: 978195 - DNA, 25 bp, Homo sapien
ggaactgctcgccaaggggagactc

SEQ ID NO: 978196 - DNA, 25 bp, Homo sapien
caagtggctggtctccagtgagcag

SEQ ID NO: 978197 - DNA, 25 bp, Homo sapien
ggggctgggccgagcaccaagtggc

SEQ ID NO: 978198 - DNA, 25 bp, Homo sapien
agcaccaagtggctggtctccagtg

SEQ ID NO: 978199 - DNA, 25 bp, Homo sapien
ggccgagcaccaagtggctggtctc

SEQ ID NO: 978200 - DNA, 25 bp, Homo sapien
gcctcgggtgggatgcagtgggcct

SEQ ID NO: 978201 - DNA, 25 bp, Homo sapien
ttgggggcaggcctcgggtgggatg

SEQ ID NO: 978202 - DNA, 25 bp, Homo sapien
tcgggtgggatgcagtgggcctcat

SEQ ID NO: 978203 - DNA, 25 bp, Homo sapien
ggcaggcctcgggtgggatgcagtg

SEQ ID NO: 978204 - DNA, 25 bp, Homo sapien
tggcagccgggcacgcagggcctca

SEQ ID NO: 978205 - DNA, 25 bp, Homo sapien
gggcactggcagccgggcacgcagg

SEQ ID NO: 978206 - DNA, 25 bp, Homo sapien
cagggcactggcagccgggcacgca

SEQ ID NO: 978207 - DNA, 25 bp, Homo sapien
actggcagccgggcacgcagggcct

SEQ ID NO: 978208 - DNA, 25 bp, Homo sapien
aagccacgctccagggggcagccta

SEQ ID NO: 978209 - DNA, 25 bp, Homo sapien
cccagggggatatgctgattgaagc

SEQ ID NO: 978210 - DNA, 25 bp, Homo sapien
cagggtgggccgcactcatcaaaca

SEQ ID NO: 978211 - DNA, 25 bp, Homo sapien
gggccgcactcatcaaacacgaagc

SEQ ID NO: 978212 - DNA, 25 bp, Homo sapien
ccccaacctgcagcgggcatcaccc

SEQ ID NO: 978213 - DNA, 25 bp, Homo sapien
ccctgcgagactcgccatacccggc

SEQ ID NO: 978214 - DNA, 25 bp, Homo sapien
gagactcgccatacccggcctggtc

SEQ ID NO: 978215 - DNA, 25 bp, Homo sapien
tgccctgagccctccgggctgccct

SEQ ID NO: 978216 - DNA, 25 bp, Homo sapien
cacagcatggcagcgactgaatggg

SEQ ID NO: 978217 - DNA, 25 bp, Homo sapien
tcacgcctggcacggtaacctgctg

SEQ ID NO: 978218 - DNA, 25 bp, Homo sapien
acaggtcatacacacaggcggcaaa

SEQ ID NO: 978219 - DNA, 25 bp, Homo sapien
cggtaacctgctgcccggcacggat

SEQ ID NO: 978220 - DNA, 25 bp, Homo sapien
ccctgcagatcgtcctgggcaaagc

SEQ ID NO: 978221 - DNA, 25 bp, Homo sapien
aacgcagcctccgagggcaggagca

SEQ ID NO: 978222 - DNA, 25 bp, Homo sapien
tggtaggagccaggtacgctcacct

SEQ ID NO: 978223 - DNA, 25 bp, Homo sapien
cctgggcaaagccattgaagttccc

SEQ ID NO: 978224 - DNA, 25 bp, Homo sapien
gaagcccagggtccatcatggcccc

SEQ ID NO: 978225 - DNA, 25 bp, Homo sapien
cagccctgggcaaagacagatgaca

SEQ ID NO: 978226 - DNA, 25 bp, Homo sapien
caaagcacaattagggtccggatta

SEQ ID NO: 978227 - DNA, 25 bp, Homo sapien
tagaaatcgggctcagaactcagaa

SEQ ID NO: 978228 - DNA, 25 bp, Homo sapien
gaggctccccttggaagaaacacca

SEQ ID NO: 978229 - DNA, 25 bp, Homo sapien
ttggctaggaggtagctggcatccc

SEQ ID NO: 978230 - DNA, 25 bp, Homo sapien
ttttggctaggaggtagctggcatc

SEQ ID NO: 978231 - DNA, 25 bp, Homo sapien
tgccttttttggctaggaggtagct

SEQ ID NO: 978232 - DNA, 25 bp, Homo sapien
cttttttggctaggaggtagctggc

SEQ ID NO: 978233 - DNA, 25 bp, Homo sapien
cccctctacagatacagaggcctaa

SEQ ID NO: 978234 - DNA, 25 bp, Homo sapien
gatacagaggcctaaacaggactga

SEQ ID NO: 978235 - DNA, 25 bp, Homo sapien
tctacagatacagaggcctaaacag

SEQ ID NO: 978236 - DNA, 25 bp, Homo sapien
gaggcctaaacaggactgaagctcc

SEQ ID NO: 978237 - DNA, 25 bp, Homo sapien
ggctgggcgtgcaggatcacagtgt

SEQ ID NO: 978238 - DNA, 25 bp, Homo sapien
aagggcaaggccaccgggtgcccat

SEQ ID NO: 978239 - DNA, 25 bp, Homo sapien
ggcgtgcaggatcacagtgtgtcct

SEQ ID NO: 978240 - DNA, 25 bp, Homo sapien
agggcaaggccaccgggtgcccatc

SEQ ID NO: 978241 - DNA, 25 bp, Homo sapien
cttcctccactcctcggctttgctc

SEQ ID NO: 978242 - DNA, 25 bp, Homo sapien
cggccccggtcatcattggtcacgt

SEQ ID NO: 978243 - DNA, 25 bp, Homo sapien
ccccggtcatcattggtcacgtgca

SEQ ID NO: 978244 - DNA, 25 bp, Homo sapien
ccggtcatcattggtcacgtgcaca

SEQ ID NO: 978245 - DNA, 25 bp, Homo sapien
gctccggccccggtcatcattggtc

SEQ ID NO: 978246 - DNA, 25 bp, Homo sapien
taatgggggtctccgaaggccatgc

SEQ ID NO: 978247 - DNA, 25 bp, Homo sapien
atagctgcaactgccctggaagtgc

SEQ ID NO: 978248 - DNA, 25 bp, Homo sapien
ttggccagcacatagctgcaactgc

SEQ ID NO: 978249 - DNA, 25 bp, Homo sapien
tgaagtccccgctgtggcagtcctt

SEQ ID NO: 978250 - DNA, 25 bp, Homo sapien
cacggtgcccgccatgcaggagcag

SEQ ID NO: 978251 - DNA, 25 bp, Homo sapien
agagcggtgagcagcgctggctctg

SEQ ID NO: 978252 - DNA, 25 bp, Homo sapien
gggccacacgagagcggtgagcagc

SEQ ID NO: 978253 - DNA, 25 bp, Homo sapien
acagtccagcgctctccagaggcca

SEQ ID NO: 978254 - DNA, 25 bp, Homo sapien
tggcactcctcgaggtggcactcca

SEQ ID NO: 978255 - DNA, 25 bp, Homo sapien
ctggggcaccttcgcccagccatgg

SEQ ID NO: 978256 - DNA, 25 bp, Homo sapien
ctggcactcctcgaggtggcactcc

SEQ ID NO: 978257 - DNA, 25 bp, Homo sapien
ggcaccttcgcccagccatgggggc

SEQ ID NO: 978258 - DNA, 25 bp, Homo sapien
atgccccggtgcagggatgcccctg

SEQ ID NO: 978259 - DNA, 25 bp, Homo sapien
gggaatgaaatccagccttcggctc

SEQ ID NO: 978260 - DNA, 25 bp, Homo sapien
cattgttctggggttttctgcaggg

SEQ ID NO: 978261 - DNA, 25 bp, Homo sapien
cagggatgcccctgacccttaaaga

SEQ ID NO: 978262 - DNA, 25 bp, Homo sapien
atctgccactctccggccctcggcc

SEQ ID NO: 978263 - DNA, 25 bp, Homo sapien
atggcaggtgcaggcgatgcacgca

SEQ ID NO: 978264 - DNA, 25 bp, Homo sapien
tccatctgccactctccggccctcg

SEQ ID NO: 978265 - DNA, 25 bp, Homo sapien
gatgcacgcattgctggggtcccgc

SEQ ID NO: 978266 - DNA, 25 bp, Homo sapien
ccagggggagtgtggcgctctgaga

SEQ ID NO: 978267 - DNA, 25 bp, Homo sapien
agggggagtgtggcgctctgagagg

SEQ ID NO: 978268 - DNA, 25 bp, Homo sapien
cccagggggagtgtggcgctctgag

SEQ ID NO: 978269 - DNA, 25 bp, Homo sapien
cagggggagtgtggcgctctgagag

SEQ ID NO: 978270 - DNA, 25 bp, Homo sapien
ctggtggatgcagagccatgtcagg

SEQ ID NO: 978271 - DNA, 25 bp, Homo sapien
tggtggatgcagagccatgtcaggt

SEQ ID NO: 978272 - DNA, 25 bp, Homo sapien
ggtggatgcagagccatgtcaggtc

SEQ ID NO: 978273 - DNA, 25 bp, Homo sapien
aagtgggcaaatgtcagggcgaatg

SEQ ID NO: 978274 - DNA, 25 bp, Homo sapien
aaatgtcagggcgaatggagagccc

SEQ ID NO: 978275 - DNA, 25 bp, Homo sapien
aatgtcagggcgaatggagagccct

SEQ ID NO: 978276 - DNA, 25 bp, Homo sapien
gggcaaatgtcagggcgaatggaga

SEQ ID NO: 978277 - DNA, 25 bp, Homo sapien
aggccctctgaacagttactcaagg

SEQ ID NO: 978278 - DNA, 25 bp, Homo sapien
actggcacgtgtagcaggggtctgg

SEQ ID NO: 978279 - DNA, 25 bp, Homo sapien
ggggctagctcagatcccagcaggc

SEQ ID NO: 978280 - DNA, 25 bp, Homo sapien
caggccctctgaacagttactcaag

SEQ ID NO: 978281 - DNA, 25 bp, Homo sapien
acactgccgccggtgacagcgaagg

SEQ ID NO: 978282 - DNA, 25 bp, Homo sapien
gggacactgccgccggtgacagcga

SEQ ID NO: 978283 - DNA, 25 bp, Homo sapien
ggctgggacactgccgccggtgaca

SEQ ID NO: 978284 - DNA, 25 bp, Homo sapien
ctgggacactgccgccggtgacagc

SEQ ID NO: 978285 - DNA, 25 bp, Homo sapien
tctccccaggctcgtacttccggcc

SEQ ID NO: 978286 - DNA, 25 bp, Homo sapien
cccaggctcgtacttccggccctca

SEQ ID NO: 978287 - DNA, 25 bp, Homo sapien
gctctccccaggctcgtacttccgg

SEQ ID NO: 978288 - DNA, 25 bp, Homo sapien
caggctcgtacttccggccctcatg

SEQ ID NO: 978289 - DNA, 25 bp, Homo sapien
ggctgggcgcaagagctgatgcact

SEQ ID NO: 978290 - DNA, 25 bp, Homo sapien
ggggcacccatctactgccttcggg

SEQ ID NO: 978291 - DNA, 25 bp, Homo sapien
cactggatgcgtgcacaggtgacga

SEQ ID NO: 978292 - DNA, 25 bp, Homo sapien
ggtgacgacgccctcgtgacacaca

SEQ ID NO: 978293 - DNA, 25 bp, Homo sapien
gtgtatgcaagggccagttgttggg

SEQ ID NO: 978294 - DNA, 25 bp, Homo sapien
tatgcaagggccagttgttggggca

SEQ ID NO: 978295 - DNA, 25 bp, Homo sapien
gggtgtatgcaagggccagttgttg

SEQ ID NO: 978296 - DNA, 25 bp, Homo sapien
gtatgcaagggccagttgttggggc

SEQ ID NO: 978297 - DNA, 25 bp, Homo sapien
agctcccccgctcggtgacctggag

SEQ ID NO: 978298 - DNA, 25 bp, Homo sapien
ggcagcagctcccccgctcggtgac

SEQ ID NO: 978299 - DNA, 25 bp, Homo sapien
agcagctcccccgctcggtgacctg

SEQ ID NO: 978300 - DNA, 25 bp, Homo sapien
tcccccgctcggtgacctggagctt

SEQ ID NO: 978301 - DNA, 25 bp, Homo sapien
tgacagcgacaccactcacagctgc

SEQ ID NO: 978302 - DNA, 25 bp, Homo sapien
tgtggcaaacagggcagaagcaggg

SEQ ID NO: 978303 - DNA, 25 bp, Homo sapien
tggcaaacagggcagaagcaggggc

SEQ ID NO: 978304 - DNA, 25 bp, Homo sapien
gtggcaaacagggcagaagcagggg

SEQ ID NO: 978305 - DNA, 25 bp, Homo sapien
gacatggcttcttctggcagcgcat

SEQ ID NO: 978306 - DNA, 25 bp, Homo sapien
atggcttcttctggcagcgcatgga

SEQ ID NO: 978307 - DNA, 25 bp, Homo sapien
ggcttcttctggcagcgcatggaac

SEQ ID NO: 978308 - DNA, 25 bp, Homo sapien
cttcttctggcagcgcatggaacct

SEQ ID NO: 978309 - DNA, 25 bp, Homo sapien
aggaagggtctctccggaggcagta

SEQ ID NO: 978310 - DNA, 25 bp, Homo sapien
gtagtgacgccatggtagcggcatc

SEQ ID NO: 978311 - DNA, 25 bp, Homo sapien
gaggcagtagtgacgccatggtagc

SEQ ID NO: 978312 - DNA, 25 bp, Homo sapien
gggtctctccggaggcagtagtgac

SEQ ID NO: 978313 - DNA, 25 bp, Homo sapien
gggtggctgcagcccggaggctcac

SEQ ID NO: 978314 - DNA, 25 bp, Homo sapien
gaagcctccaagacaggtacacagg

SEQ ID NO: 978315 - DNA, 25 bp, Homo sapien
tggttactcaggtaggactccccca

SEQ ID NO: 978316 - DNA, 25 bp, Homo sapien
ggccgcaggtcacgaagcctccaag

SEQ ID NO: 978317 - DNA, 25 bp, Homo sapien
ggtctgggaactcctggttactcag

SEQ ID NO: 978318 - DNA, 25 bp, Homo sapien
tacaagagccaaatttaggcccaga

SEQ ID NO: 978319 - DNA, 25 bp, Homo sapien
caaaatggccaagatcgcacaagag

SEQ ID NO: 978320 - DNA, 25 bp, Homo sapien
gtaagggcaagtggccaaaatggcc

SEQ ID NO: 978321 - DNA, 25 bp, Homo sapien
tatggtaatgtggtcctggcaagtc

SEQ ID NO: 978322 - DNA, 25 bp, Homo sapien
tcccaaattgtcggggtcacaggct

SEQ ID NO: 978323 - DNA, 25 bp, Homo sapien
aactacaagaggcaccacgaccagc

SEQ ID NO: 978324 - DNA, 25 bp, Homo sapien
ggaactacaagaggcaccacgacca

SEQ ID NO: 978325 - DNA, 25 bp, Homo sapien
tgtcggggtcacaggcttcagctag

SEQ ID NO: 978326 - DNA, 25 bp, Homo sapien
caccctagggcagtaaagattattc

SEQ ID NO: 978327 - DNA, 25 bp, Homo sapien
tagatccaccctagggcagtaaaga

SEQ ID NO: 978328 - DNA, 25 bp, Homo sapien
atattttagatccaccctagggcag

SEQ ID NO: 978329 - DNA, 25 bp, Homo sapien
agtaaagattattctgacccagccc

SEQ ID NO: 978330 - DNA, 25 bp, Homo sapien
atgggaagcgctccccgctggcaaa

SEQ ID NO: 978331 - DNA, 25 bp, Homo sapien
cagcagtgggcgatgggaagcgctc

SEQ ID NO: 978332 - DNA, 25 bp, Homo sapien
gggcacatgccttgggctcgcagct

SEQ ID NO: 978333 - DNA, 25 bp, Homo sapien
atgccttgggctcgcagctcacgct

SEQ ID NO: 978334 - DNA, 25 bp, Homo sapien
tcgtggggttgaggggcgtggagga

SEQ ID NO: 978335 - DNA, 25 bp, Homo sapien
cgtgagggcggggaggccgtgggct

SEQ ID NO: 978336 - DNA, 25 bp, Homo sapien
cggggaggccgtgggctccgtggag

SEQ ID NO: 978337 - DNA, 25 bp, Homo sapien
tgagggcggggaggccgtgggctcc

SEQ ID NO: 978338 - DNA, 25 bp, Homo sapien
gcggggaggccgtgggctccgtgga

SEQ ID NO: 978339 - DNA, 25 bp, Homo sapien
ctgaggtccgtggaggatgggtgtc

SEQ ID NO: 978340 - DNA, 25 bp, Homo sapien
tgaggtccgtggaggatgggtgtcg

SEQ ID NO: 978341 - DNA, 25 bp, Homo sapien
gaggtccgtggaggatgggtgtcgt

SEQ ID NO: 978342 - DNA, 25 bp, Homo sapien
ggtccgtggaggatgggtgtcgtgg

SEQ ID NO: 978343 - DNA, 25 bp, Homo sapien
gcagcggcggcagggatcgccgggc

SEQ ID NO: 978344 - DNA, 25 bp, Homo sapien
cctggcgcgggtgcgcgcagggcgc

SEQ ID NO: 978345 - DNA, 25 bp, Homo sapien
agcaaggcccctggcgcgggtgcgc

SEQ ID NO: 978346 - DNA, 25 bp, Homo sapien
agccgctggcaggacacggagccgt

SEQ ID NO: 978347 - DNA, 25 bp, Homo sapien
ctggtggcgggcgtgggccgcgccg

SEQ ID NO: 978348 - DNA, 25 bp, Homo sapien
cgccgggccgtgggcagccggcggg

SEQ ID NO: 978349 - DNA, 25 bp, Homo sapien
ccgcgccgggccgtgggcagccggc

SEQ ID NO: 978350 - DNA, 25 bp, Homo sapien
tggtggcgggcgtgggccgcgccgg

SEQ ID NO: 978351 - DNA, 25 bp, Homo sapien
tctggacagggcagcggcacgcagc

SEQ ID NO: 978352 - DNA, 25 bp, Homo sapien
actgcgggcagcactctcccggcag

SEQ ID NO: 978353 - DNA, 25 bp, Homo sapien
tgcgggcagcactctcccggcagca

SEQ ID NO: 978354 - DNA, 25 bp, Homo sapien
ctgcgggcagcactctcccggcagc

SEQ ID NO: 978355 - DNA, 25 bp, Homo sapien
gtactctttcccgccaaaggcacag

SEQ ID NO: 978356 - DNA, 25 bp, Homo sapien
ggaagtccgctccgctggggtactc

SEQ ID NO: 978357 - DNA, 25 bp, Homo sapien
gtccgctccgctggggtactctttc

SEQ ID NO: 978358 - DNA, 25 bp, Homo sapien
cagacagcgacacagacggcagggg

SEQ ID NO: 978359 - DNA, 25 bp, Homo sapien
ctgcagtcgttcgggcagcaggtcc

SEQ ID NO: 978360 - DNA, 25 bp, Homo sapien
ggctggcagtgggcatggccttcct

SEQ ID NO: 978361 - DNA, 25 bp, Homo sapien
ggtgggagaagctctcgccgtccac

SEQ ID NO: 978362 - DNA, 25 bp, Homo sapien
tcctggcatcggcactcctggcagg

SEQ ID NO: 978363 - DNA, 25 bp, Homo sapien
cagagccgccacacaagtgcccact

SEQ ID NO: 978364 - DNA, 25 bp, Homo sapien
aggtatgagggcaaagcctgacagt

SEQ ID NO: 978365 - DNA, 25 bp, Homo sapien
gccgccacacaagtgcccacttgga

SEQ ID NO: 978366 - DNA, 25 bp, Homo sapien
ggtatgagggcaaagcctgacagtc

SEQ ID NO: 978367 - DNA, 25 bp, Homo sapien
tagcgtggtggggcggggggcagta

SEQ ID NO: 978368 - DNA, 25 bp, Homo sapien
ctagcgtggtggggcggggggcagt

SEQ ID NO: 978369 - DNA, 25 bp, Homo sapien
cctagcgtggtggggcggggggcag

SEQ ID NO: 978370 - DNA, 25 bp, Homo sapien
agcgtggtggggcggggggcagtag

SEQ ID NO: 978371 - DNA, 25 bp, Homo sapien
ggcctggcacaggtcgtgggagggc

SEQ ID NO: 978372 - DNA, 25 bp, Homo sapien
gcctggcacaggtcgtgggagggca

SEQ ID NO: 978373 - DNA, 25 bp, Homo sapien
tggcacaggtcgtgggagggcagtc

SEQ ID NO: 978374 - DNA, 25 bp, Homo sapien
ggcacaggtcgtgggagggcagtca

SEQ ID NO: 978375 - DNA, 25 bp, Homo sapien
tgcccattggcatacacttggctgt

SEQ ID NO: 978376 - DNA, 25 bp, Homo sapien
tggctgtggtaggtgcagctgtcac

SEQ ID NO: 978377 - DNA, 25 bp, Homo sapien
gcaagggctgtctgcatccgtgaag

SEQ ID NO: 978378 - DNA, 25 bp, Homo sapien
ggctgtctgcatccgtgaagttctg

SEQ ID NO: 978379 - DNA, 25 bp, Homo sapien
ctgggtggggcaggctggtcagggt

SEQ ID NO: 978380 - DNA, 25 bp, Homo sapien
ggtggggcaggctggtcagggtgag

SEQ ID NO: 978381 - DNA, 25 bp, Homo sapien
gggtggggcaggctggtcagggtga

SEQ ID NO: 978382 - DNA, 25 bp, Homo sapien
tgggtggggcaggctggtcagggtg

SEQ ID NO: 978383 - DNA, 25 bp, Homo sapien
cagggggctgggtggggtgctggca

SEQ ID NO: 978384 - DNA, 25 bp, Homo sapien
cccgcacttgggtaccccatcttga

SEQ ID NO: 978385 - DNA, 25 bp, Homo sapien
catcttgacagacgcaggcggtgca

SEQ ID NO: 978386 - DNA, 25 bp, Homo sapien
tcccactggactccctcagcaaact

SEQ ID NO: 978387 - DNA, 25 bp, Homo sapien
agagcacagccccgcacttgggtac

SEQ ID NO: 978388 - DNA, 25 bp, Homo sapien
gctcctcacaggagacctcgccagc

SEQ ID NO: 978389 - DNA, 25 bp, Homo sapien
ctgctcctcacaggagacctcgcca

SEQ ID NO: 978390 - DNA, 25 bp, Homo sapien
ggcacagggggtgactgggcactcc

SEQ ID NO: 978391 - DNA, 25 bp, Homo sapien
agggggtgactgggcactcctgctc

SEQ ID NO: 978392 - DNA, 25 bp, Homo sapien
ctggcaggagcagcggacacagagg

SEQ ID NO: 978393 - DNA, 25 bp, Homo sapien
agaggccccgctcttggagtctgaa

SEQ ID NO: 978394 - DNA, 25 bp, Homo sapien
cccgctcttggagtctgaaggtctc

SEQ ID NO: 978395 - DNA, 25 bp, Homo sapien
gagcagcggacacagaggccccgct

SEQ ID NO: 978396 - DNA, 25 bp, Homo sapien
ggctctgatactggtgtcctggtac

SEQ ID NO: 978397 - DNA, 25 bp, Homo sapien
ctggctctgatactggtgtcctggt

SEQ ID NO: 978398 - DNA, 25 bp, Homo sapien
tggctctgatactggtgtcctggta

SEQ ID NO: 978399 - DNA, 25 bp, Homo sapien
ctggatgggatgacaggggcgtggg

SEQ ID NO: 978400 - DNA, 25 bp, Homo sapien
tggatgggatgacaggggcgtgggg

SEQ ID NO: 978401 - DNA, 25 bp, Homo sapien
ggcagaggctcacactggacactcc

SEQ ID NO: 978402 - DNA, 25 bp, Homo sapien
cagggcagaggctcacactggacac

SEQ ID NO: 978403 - DNA, 25 bp, Homo sapien
agaggctcacactggacactcccat

SEQ ID NO: 978404 - DNA, 25 bp, Homo sapien
gaggctcacactggacactcccatt

SEQ ID NO: 978405 - DNA, 25 bp, Homo sapien
tggtcagcacgccagaggcaggccc

SEQ ID NO: 978406 - DNA, 25 bp, Homo sapien
agaggcaggccccggagccaggccc

SEQ ID NO: 978407 - DNA, 25 bp, Homo sapien
ctggtcagcacgccagaggcaggcc

SEQ ID NO: 978408 - DNA, 25 bp, Homo sapien
ggcaggccccggagccaggccctcc

SEQ ID NO: 978409 - DNA, 25 bp, Homo sapien
tgctcccgcccgtttaggaaacagc

SEQ ID NO: 978410 - DNA, 25 bp, Homo sapien
ggcagtgcgagcaggggtcccctga

SEQ ID NO: 978411 - DNA, 25 bp, Homo sapien
cacagcggcagtgcgagcaggggtc

SEQ ID NO: 978412 - DNA, 25 bp, Homo sapien
aggctccccgctgcggtgctcccgc

SEQ ID NO: 978413 - DNA, 25 bp, Homo sapien
ggcacattctcgctggcggcactgg

SEQ ID NO: 978414 - DNA, 25 bp, Homo sapien
gggccgggctgggtatggacacagg

SEQ ID NO: 978415 - DNA, 25 bp, Homo sapien
tctcgctggcggcactggatgtgac

SEQ ID NO: 978416 - DNA, 25 bp, Homo sapien
gctggcggcactggatgtgaccctc

SEQ ID NO: 978417 - DNA, 25 bp, Homo sapien
aatggccctcgccatgccgatgctt

SEQ ID NO: 978418 - DNA, 25 bp, Homo sapien
gccatgccgatgctttctgattaag

SEQ ID NO: 978419 - DNA, 25 bp, Homo sapien
gagttatgaatggccctcgccatgc

SEQ ID NO: 978420 - DNA, 25 bp, Homo sapien
ctttctgattaagcacctctgtacc

SEQ ID NO: 978421 - DNA, 25 bp, Homo sapien
caccggcagattcggcaggggtccc

SEQ ID NO: 978422 - DNA, 25 bp, Homo sapien
caggcaccggcagattcggcagggg

SEQ ID NO: 978423 - DNA, 25 bp, Homo sapien
cggcagattcggcaggggtccccag

SEQ ID NO: 978424 - DNA, 25 bp, Homo sapien
ggcaccggcagattcggcaggggtc

SEQ ID NO: 978425 - DNA, 25 bp, Homo sapien
ggccatgttcccagtgagagccacc

SEQ ID NO: 978426 - DNA, 25 bp, Homo sapien
atgttcccagtgagagccaccttct

SEQ ID NO: 978427 - DNA, 25 bp, Homo sapien
gccatgttcccagtgagagccacct

SEQ ID NO: 978428 - DNA, 25 bp, Homo sapien
cttggccatgttcccagtgagagcc

SEQ ID NO: 978429 - DNA, 25 bp, Homo sapien
ctctcccgagccaagactagatggg

SEQ ID NO: 978430 - DNA, 25 bp, Homo sapien
ctggtcttccgtggacagagcatag

SEQ ID NO: 978431 - DNA, 25 bp, Homo sapien
ggtcagatctctgcctagattcccc

SEQ ID NO: 978432 - DNA, 25 bp, Homo sapien
aggcctcagttccttagcccgccct

SEQ ID NO: 978433 - DNA, 25 bp, Homo sapien
tcagggccacgcctgtgcttgattt

SEQ ID NO: 978434 - DNA, 25 bp, Homo sapien
cttcaccaagctaacttttctttat

SEQ ID NO: 978435 - DNA, 25 bp, Homo sapien
ggctggattcggtctccttcctctg

SEQ ID NO: 978436 - DNA, 25 bp, Homo sapien
agctgcctccaggacgctttccctc

SEQ ID NO: 978437 - DNA, 25 bp, Homo sapien
gggcaggggctaggcgggcacttca

SEQ ID NO: 978438 - DNA, 25 bp, Homo sapien
taggcgggcacttcagggccatgca

SEQ ID NO: 978439 - DNA, 25 bp, Homo sapien
tcagggccatgcagcgaactcggct

SEQ ID NO: 978440 - DNA, 25 bp, Homo sapien
gggccatgcagcgaactcggctcct

SEQ ID NO: 978441 - DNA, 25 bp, Homo sapien
caggcaggtgcactgtagacaaggg

SEQ ID NO: 978442 - DNA, 25 bp, Homo sapien
taaagctgcccctcataatcacagc

SEQ ID NO: 978443 - DNA, 25 bp, Homo sapien
gaaggtgaccccctcctcataaagc

SEQ ID NO: 978444 - DNA, 25 bp, Homo sapien
tgcactgtagacaagggttggagct

SEQ ID NO: 978445 - DNA, 25 bp, Homo sapien
cagttgagctctgaacacgagggcc

SEQ ID NO: 978446 - DNA, 25 bp, Homo sapien
gtgcagctctccaagcagttgagct

SEQ ID NO: 978447 - DNA, 25 bp, Homo sapien
tccaagcagttgagctctgaacacg

SEQ ID NO: 978448 - DNA, 25 bp, Homo sapien
gctctgaacacgagggcccctggca

SEQ ID NO: 978449 - DNA, 25 bp, Homo sapien
tctggttgcaagtgatggtaccttc

SEQ ID NO: 978450 - DNA, 25 bp, Homo sapien
tccccgttgccgtaggtctggccat

SEQ ID NO: 978451 - DNA, 25 bp, Homo sapien
ccgttgccgtaggtctggccatttt

SEQ ID NO: 978452 - DNA, 25 bp, Homo sapien
cccgttgccgtaggtctggccattt

SEQ ID NO: 978453 - DNA, 25 bp, Homo sapien
gttgccgtaggtctggccattttgg

SEQ ID NO: 978454 - DNA, 25 bp, Homo sapien
gccacagtgagcggccccatcctgg

SEQ ID NO: 978455 - DNA, 25 bp, Homo sapien
agacgcaggctgtgcaggcgtcagg

SEQ ID NO: 978456 - DNA, 25 bp, Homo sapien
aggctcccagcgtgccccctcgggc

SEQ ID NO: 978457 - DNA, 25 bp, Homo sapien
caggcgtcaggctcccagcgtgccc

SEQ ID NO: 978458 - DNA, 25 bp, Homo sapien
tcaccctcgtctgcaggtccttatt

SEQ ID NO: 978459 - DNA, 25 bp, Homo sapien
cctcaccctcgtctgcaggtcctta

SEQ ID NO: 978460 - DNA, 25 bp, Homo sapien
tgcctcaccctcgtctgcaggtcct

SEQ ID NO: 978461 - DNA, 25 bp, Homo sapien
ctcaccctcgtctgcaggtccttat

SEQ ID NO: 978462 - DNA, 25 bp, Homo sapien
ggaatgggcagttgtctgctgccca

SEQ ID NO: 978463 - DNA, 25 bp, Homo sapien
gaatgggcagttgtctgctgcccag

SEQ ID NO: 978464 - DNA, 25 bp, Homo sapien
aatgggcagttgtctgctgcccagg

SEQ ID NO: 978465 - DNA, 25 bp, Homo sapien
ccacagacatgcgccaggtggagct

SEQ ID NO: 978466 - DNA, 25 bp, Homo sapien
aggccacagacatgcgccaggtgga

SEQ ID NO: 978467 - DNA, 25 bp, Homo sapien
ggaaggccacagacatgcgccaggt

SEQ ID NO: 978468 - DNA, 25 bp, Homo sapien
aaggccacagacatgcgccaggtgg

SEQ ID NO: 978469 - DNA, 25 bp, Homo sapien
aagaggcagacataggtccctcctc

SEQ ID NO: 978470 - DNA, 25 bp, Homo sapien
tctggcctggggttaggggcggcca

SEQ ID NO: 978471 - DNA, 25 bp, Homo sapien
gaagaggcagacataggtccctcct

SEQ ID NO: 978472 - DNA, 25 bp, Homo sapien
ggggaagaggcagacataggtccct

SEQ ID NO: 978473 - DNA, 25 bp, Homo sapien
gtgcaggagaagggacagcgcagcg

SEQ ID NO: 978474 - DNA, 25 bp, Homo sapien
tgcaggagaagggacagcgcagcgg

SEQ ID NO: 978475 - DNA, 25 bp, Homo sapien
gccagggcccccgaggtgcaggaga

SEQ ID NO: 978476 - DNA, 25 bp, Homo sapien
agggcccccgaggtgcaggagaagg

SEQ ID NO: 978477 - DNA, 25 bp, Homo sapien
tcgctcggctcgccgtctgtcgtcg

SEQ ID NO: 978478 - DNA, 25 bp, Homo sapien
cggctcgccgtctgtcgtcgcggct

SEQ ID NO: 978479 - DNA, 25 bp, Homo sapien
gccgtctgtcgtcgcggctcagcag

SEQ ID NO: 978480 - DNA, 25 bp, Homo sapien
gctcggctcgccgtctgtcgtcgcg

SEQ ID NO: 978481 - DNA, 25 bp, Homo sapien
aggctggggaggcacttttgggact

SEQ ID NO: 978482 - DNA, 25 bp, Homo sapien
gtatgtaatgtgtgtttggctggag

SEQ ID NO: 978483 - DNA, 25 bp, Homo sapien
gaggcacttttgggactcaagggac

SEQ ID NO: 978484 - DNA, 25 bp, Homo sapien
taatgtgtgtttggctggaggtggg

SEQ ID NO: 978485 - DNA, 25 bp, Homo sapien
cttgactttgaaggggcttccaggg

SEQ ID NO: 978486 - DNA, 25 bp, Homo sapien
tgaaggggcttccagggacactttc

SEQ ID NO: 978487 - DNA, 25 bp, Homo sapien
gggcttccagggacactttcgtcac

SEQ ID NO: 978488 - DNA, 25 bp, Homo sapien
ctttgaaggggcttccagggacact

SEQ ID NO: 978489 - DNA, 25 bp, Homo sapien
acgataaggatgtagtccctttctc

SEQ ID NO: 978490 - DNA, 25 bp, Homo sapien
tgacgataaggatgtagtccctttc

SEQ ID NO: 978491 - DNA, 25 bp, Homo sapien
ttgacgataaggatgtagtcccttt

SEQ ID NO: 978492 - DNA, 25 bp, Homo sapien
gacgataaggatgtagtccctttct

SEQ ID NO: 978493 - DNA, 25 bp, Homo sapien
cagtccacggtgaaggagttcttct

SEQ ID NO: 978494 - DNA, 25 bp, Homo sapien
tttgctgcagtccacggtgaaggag

SEQ ID NO: 978495 - DNA, 25 bp, Homo sapien
cacggtgaaggagttcttctggccc

SEQ ID NO: 978496 - DNA, 25 bp, Homo sapien
gaaggagttcttctggcccacgaag

SEQ ID NO: 978497 - DNA, 25 bp, Homo sapien
gggacagcccagggccccgagtcac

SEQ ID NO: 978498 - DNA, 25 bp, Homo sapien
cagtctccaccagaaccgtggatgt

SEQ ID NO: 978499 - DNA, 25 bp, Homo sapien
gaaccgtggatgtttcgtgaaggct

SEQ ID NO: 978500 - DNA, 25 bp, Homo sapien
aaggctgtggcctccggacagcctc

SEQ ID NO: 978501 - DNA, 25 bp, Homo sapien
ccccggcttgaggaggacttggtca

SEQ ID NO: 978502 - DNA, 25 bp, Homo sapien
gccatgggagtgtcagtgaccacgt

SEQ ID NO: 978503 - DNA, 25 bp, Homo sapien
ccatgggagtgtcagtgaccacgtg

SEQ ID NO: 978504 - DNA, 25 bp, Homo sapien
gacaaggtccccgagcaggcgttca

SEQ ID NO: 978505 - DNA, 25 bp, Homo sapien
ccccgagcaggcgttcagggcgttc

SEQ ID NO: 978506 - DNA, 25 bp, Homo sapien
agcaggcgttcagggcgttcacatg

SEQ ID NO: 978507 - DNA, 25 bp, Homo sapien
gcgttcagggcgttcacatgatctc

SEQ ID NO: 978508 - DNA, 25 bp, Homo sapien
ccagggacgctcctcggctgctaga

SEQ ID NO: 978509 - DNA, 25 bp, Homo sapien
agggacgctcctcggctgctagagc

SEQ ID NO: 978510 - DNA, 25 bp, Homo sapien
acgctcctcggctgctagagcagca

SEQ ID NO: 978511 - DNA, 25 bp, Homo sapien
gctagagcagcaccccggtcctcgc

SEQ ID NO: 978512 - DNA, 25 bp, Homo sapien
tttcctccacgttcagcctcttcat

SEQ ID NO: 978513 - DNA, 25 bp, Homo sapien
ttttcctccacgttcagcctcttca

SEQ ID NO: 978514 - DNA, 25 bp, Homo sapien
tgggttcttctgcaccgcgccggcc

SEQ ID NO: 978515 - DNA, 25 bp, Homo sapien
cgtggctgcgcccttgagcactggt

SEQ ID NO: 978516 - DNA, 25 bp, Homo sapien
gggaccactcgaggaggctggcact

SEQ ID NO: 978517 - DNA, 25 bp, Homo sapien
ggcggggccgagctgactctgcccg

SEQ ID NO: 978518 - DNA, 25 bp, Homo sapien
gagggagcattgggccaggcccagg

SEQ ID NO: 978519 - DNA, 25 bp, Homo sapien
tggagggagcattgggccaggccca

SEQ ID NO: 978520 - DNA, 25 bp, Homo sapien
ctggagggagcattgggccaggccc

SEQ ID NO: 978521 - DNA, 25 bp, Homo sapien
gggagcattgggccaggcccagggc

SEQ ID NO: 978522 - DNA, 25 bp, Homo sapien
gccagacagatagcgcggtggccta

SEQ ID NO: 978523 - DNA, 25 bp, Homo sapien
taaggagacgccagacagatagcgc

SEQ ID NO: 978524 - DNA, 25 bp, Homo sapien
tggcctagacgaccactgggcttct

SEQ ID NO: 978525 - DNA, 25 bp, Homo sapien
tagcgcggtggcctagacgaccact

SEQ ID NO: 978526 - DNA, 25 bp, Homo sapien
cccagctctgaagggtccgcaggtc

SEQ ID NO: 978527 - DNA, 25 bp, Homo sapien
ccatgctatcgttgagctctggcac

SEQ ID NO: 978528 - DNA, 25 bp, Homo sapien
ccagtccatgctatcgttgagctct

SEQ ID NO: 978529 - DNA, 25 bp, Homo sapien
tgaagggtccgcaggtcttccccag

SEQ ID NO: 978530 - DNA, 25 bp, Homo sapien
cctttgggttgcactcttcacagta

SEQ ID NO: 978531 - DNA, 25 bp, Homo sapien
acctttgggttgcactcttcacagt

SEQ ID NO: 978532 - DNA, 25 bp, Homo sapien
tcttccctctgctacggcatccagg

SEQ ID NO: 978533 - DNA, 25 bp, Homo sapien
gtggcttctcggcacactgagaaat

SEQ ID NO: 978534 - DNA, 25 bp, Homo sapien
gcttctcggcacactgagaaattca

SEQ ID NO: 978535 - DNA, 25 bp, Homo sapien
aggcttatctcctcgggcgccagcc

SEQ ID NO: 978536 - DNA, 25 bp, Homo sapien
aggcgggaggattacttaaattcag

SEQ ID NO: 978537 - DNA, 25 bp, Homo sapien
aaagaaaaaattcaatatattcaca

SEQ ID NO: 978538 - DNA, 25 bp, Homo sapien
gcgggaggattacttaaattcagga

SEQ ID NO: 978539 - DNA, 25 bp, Homo sapien
gaaaaaattcaatatattcacagag

SEQ ID NO: 978540 - DNA, 25 bp, Homo sapien
aatatgtggtctttcgtgtccgact

SEQ ID NO: 978541 - DNA, 25 bp, Homo sapien
caaggctcgcctaagttgtagcatg

SEQ ID NO: 978542 - DNA, 25 bp, Homo sapien
tgaacattgtatttaaacaggatca

SEQ ID NO: 978543 - DNA, 25 bp, Homo sapien
tttcgtgtccgacttctttcatgta

SEQ ID NO: 978544 - DNA, 25 bp, Homo sapien
caccaggccctgtttcggatgccaa

SEQ ID NO: 978545 - DNA, 25 bp, Homo sapien
cagcttgcgaccattggcactggga

SEQ ID NO: 978546 - DNA, 25 bp, Homo sapien
tcagggcagtgcatgtaaatcatcc

SEQ ID NO: 978547 - DNA, 25 bp, Homo sapien
aaaagggtgggctagcattgcagct

SEQ ID NO: 978548 - DNA, 25 bp, Homo sapien
taggtgagctgatcctgaacagttc

SEQ ID NO: 978549 - DNA, 25 bp, Homo sapien
ttttcagtggctaaggagggctgca

SEQ ID NO: 978550 - DNA, 25 bp, Homo sapien
tgacctgcccacatggacgggagat

SEQ ID NO: 978551 - DNA, 25 bp, Homo sapien
ggtaatgtgctgatccctggaatct

SEQ ID NO: 978552 - DNA, 25 bp, Homo sapien
ttctgtgtacacgtgcgcactggcg

SEQ ID NO: 978553 - DNA, 25 bp, Homo sapien
gcaggtcccgagcatcaccaatgtg

SEQ ID NO: 978554 - DNA, 25 bp, Homo sapien
caatgtgaccacgatagaaagcaga

SEQ ID NO: 978555 - DNA, 25 bp, Homo sapien
tagaaagttcaccaggaaaccagct

SEQ ID NO: 978556 - DNA, 25 bp, Homo sapien
ttgtgggttcaagggagctactgct

SEQ ID NO: 978557 - DNA, 25 bp, Homo sapien
gtacctcattctgaagtctgccaat

SEQ ID NO: 978558 - DNA, 25 bp, Homo sapien
agtaaaatcaaccttaaggcagagg

SEQ ID NO: 978559 - DNA, 25 bp, Homo sapien
taagacagtcaataactgcaccaga

SEQ ID NO: 978560 - DNA, 25 bp, Homo sapien
cagtgtgcttccaatgctgagtgtg

SEQ ID NO: 978561 - DNA, 25 bp, Homo sapien
aatgagacaccgtctgcagtgtgct

SEQ ID NO: 978562 - DNA, 25 bp, Homo sapien
acaccgtctgcagtgtgcttccaat

SEQ ID NO: 978563 - DNA, 25 bp, Homo sapien
ccgtctgcagtgtgcttccaatgct

SEQ ID NO: 978564 - DNA, 25 bp, Homo sapien
tgtccatgagcaaccttatgaggtg

SEQ ID NO: 978565 - DNA, 25 bp, Homo sapien
gaaactaccagtgagtgctacagat

SEQ ID NO: 978566 - DNA, 25 bp, Homo sapien
cagggaagctttgcctcagtctgct

SEQ ID NO: 978567 - DNA, 25 bp, Homo sapien
gattcatcaagaattgcctcctggg

SEQ ID NO: 978568 - DNA, 25 bp, Homo sapien
tgaggttgttttcgccaaagtggcc

SEQ ID NO: 978569 - DNA, 25 bp, Homo sapien
aagacactgacaattactggctgcc

SEQ ID NO: 978570 - DNA, 25 bp, Homo sapien
gacagtccggacaaaagctgggaac

SEQ ID NO: 978571 - DNA, 25 bp, Homo sapien
tataagactggtcccatgataggca

SEQ ID NO: 978572 - DNA, 25 bp, Homo sapien
ggtgacaggcacagtgcaggagtgt

SEQ ID NO: 978573 - DNA, 25 bp, Homo sapien
gacaggcacagtgcaggagtgtgag

SEQ ID NO: 978574 - DNA, 25 bp, Homo sapien
tgggtgacaggcacagtgcaggagt

SEQ ID NO: 978575 - DNA, 25 bp, Homo sapien
ctgggtgacaggcacagtgcaggag

SEQ ID NO: 978576 - DNA, 25 bp, Homo sapien
cgaaacaacctggtgaagtctcgca

SEQ ID NO: 978577 - DNA, 25 bp, Homo sapien
ctatcgaaacaacctggtgaagtct

SEQ ID NO: 978578 - DNA, 25 bp, Homo sapien
acaacctggtgaagtctcgcaaggc

SEQ ID NO: 978579 - DNA, 25 bp, Homo sapien
caacctggtgaagtctcgcaaggcc

SEQ ID NO: 978580 - DNA, 25 bp, Homo sapien
tccatcgtctcctgagcgatcctgg

SEQ ID NO: 978581 - DNA, 25 bp, Homo sapien
gaaagacagaatatgctgaaaaaca

SEQ ID NO: 978582 - DNA, 25 bp, Homo sapien
gagaaccgtcccaactctgctagga

SEQ ID NO: 978583 - DNA, 25 bp, Homo sapien
ggtccttgactgaggagaaagacag

SEQ ID NO: 978584 - DNA, 25 bp, Homo sapien
tatactccatgacgtttgcacaaca

SEQ ID NO: 978585 - DNA, 25 bp, Homo sapien
tcgagccccataagattactagagg

SEQ ID NO: 978586 - DNA, 25 bp, Homo sapien
taggctacactatatagaccaggtg

SEQ ID NO: 978587 - DNA, 25 bp, Homo sapien
gaaactctgatgacttgactaggga

SEQ ID NO: 978588 - DNA, 25 bp, Homo sapien
gaacagggagcccattaataaattc

SEQ ID NO: 978589 - DNA, 25 bp, Homo sapien
agtgaacattgcaggcctcatattc

SEQ ID NO: 978590 - DNA, 25 bp, Homo sapien
caaaacagataaactaggcgacaac

SEQ ID NO: 978591 - DNA, 25 bp, Homo sapien
cctaggcggaaaacttcatgacatg

SEQ ID NO: 978592 - DNA, 25 bp, Homo sapien
ttaaggaattttctaaccatcgaca

SEQ ID NO: 978593 - DNA, 25 bp, Homo sapien
taaggaattttctaaccatcgacaa

SEQ ID NO: 978594 - DNA, 25 bp, Homo sapien
gtgtcactgtgacggctcccacggt

SEQ ID NO: 978595 - DNA, 25 bp, Homo sapien
tgcatgatctcccagagcacttcag

SEQ ID NO: 978596 - DNA, 25 bp, Homo sapien
tatagggggggaggcaaaagcagca

SEQ ID NO: 978597 - DNA, 25 bp, Homo sapien
gctggctgacaagctgctgtccaag

SEQ ID NO: 978598 - DNA, 25 bp, Homo sapien
tcagccacatctggtagggtatagg

SEQ ID NO: 978599 - DNA, 25 bp, Homo sapien
atgaccacttggctccgcagcaagg

SEQ ID NO: 978600 - DNA, 25 bp, Homo sapien
aaacctcatgacactacaattggca

SEQ ID NO: 978601 - DNA, 25 bp, Homo sapien
cctgtatgaatgaggtctcgtagaa

SEQ ID NO: 978602 - DNA, 25 bp, Homo sapien
gaccacttggctccgcagcaaggtg

SEQ ID NO: 978603 - DNA, 25 bp, Homo sapien
aaaggatgctaagcttctcaaagag

SEQ ID NO: 978604 - DNA, 25 bp, Homo sapien
gatgatctagtcaagtgttttgcca

SEQ ID NO: 978605 - DNA, 25 bp, Homo sapien
caagaataaaacaaccaagggtcag

SEQ ID NO: 978606 - DNA, 25 bp, Homo sapien
tgaaacatgaaatcgcaacagcacg

SEQ ID NO: 978607 - DNA, 25 bp, Homo sapien
ctggtggctagccggaacaggtcat

SEQ ID NO: 978608 - DNA, 25 bp, Homo sapien
ctagccggaacaggtcatctacagt

SEQ ID NO: 978609 - DNA, 25 bp, Homo sapien
tggctagccggaacaggtcatctac

SEQ ID NO: 978610 - DNA, 25 bp, Homo sapien
ggtggctagccggaacaggtcatct

SEQ ID NO: 978611 - DNA, 25 bp, Homo sapien
ctggagcatgtctagcagtccctgc

SEQ ID NO: 978612 - DNA, 25 bp, Homo sapien
tcatccacaaggatactgccaaggt

SEQ ID NO: 978613 - DNA, 25 bp, Homo sapien
aggaagcaggaatgctgatgtacgt

SEQ ID NO: 978614 - DNA, 25 bp, Homo sapien
aggatactgccaaggtacaggaagc

SEQ ID NO: 978615 - DNA, 25 bp, Homo sapien
aataggatatatagccacagttggg

SEQ ID NO: 978616 - DNA, 25 bp, Homo sapien
catccagtacgtaaaagttgctctc

SEQ ID NO: 978617 - DNA, 25 bp, Homo sapien
tagaagctatcagggaactcatgga

SEQ ID NO: 978618 - DNA, 25 bp, Homo sapien
cactattttgtgaaacacagggctc

SEQ ID NO: 978619 - DNA, 25 bp, Homo sapien
tagagtctcggataaaactggccat

SEQ ID NO: 978620 - DNA, 25 bp, Homo sapien
tctacaatccgattatcagctcggt

SEQ ID NO: 978621 - DNA, 25 bp, Homo sapien
ggcacctgcaacaacgctctacaat

SEQ ID NO: 978622 - DNA, 25 bp, Homo sapien
tacacagcgaacagcaaagcgcagg

SEQ ID NO: 978623 - DNA, 25 bp, Homo sapien
tgactttctgacacggatgagtctg

SEQ ID NO: 978624 - DNA, 25 bp, Homo sapien
tgtatgactttctgacacggatgag

SEQ ID NO: 978625 - DNA, 25 bp, Homo sapien
tctgacacggatgagtctgtccatt

SEQ ID NO: 978626 - DNA, 25 bp, Homo sapien
ttcctgtatgactttctgacacgga

SEQ ID NO: 978627 - DNA, 25 bp, Homo sapien
aacacaaagacctaccaggaatgaa

SEQ ID NO: 978628 - DNA, 25 bp, Homo sapien
taacacaaagacctaccaggaatga

SEQ ID NO: 978629 - DNA, 25 bp, Homo sapien
ttaacacaaagacctaccaggaatg

SEQ ID NO: 978630 - DNA, 25 bp, Homo sapien
taaatatcactgcaaggcgatctaa

SEQ ID NO: 978631 - DNA, 25 bp, Homo sapien
tcactgcaaggcgatctaagaacac

SEQ ID NO: 978632 - DNA, 25 bp, Homo sapien
ggcgatctaagaacactgtgggatc

SEQ ID NO: 978633 - DNA, 25 bp, Homo sapien
tgcaaggcgatctaagaacactgtg

SEQ ID NO: 978634 - DNA, 25 bp, Homo sapien
gccattgctgggctcttgagacaac

SEQ ID NO: 978635 - DNA, 25 bp, Homo sapien
tatgccattgctgggctcttgagac

SEQ ID NO: 978636 - DNA, 25 bp, Homo sapien
gatatgccattgctgggctcttgag

SEQ ID NO: 978637 - DNA, 25 bp, Homo sapien
tgaggatatgccattgctgggctct

SEQ ID NO: 978638 - DNA, 25 bp, Homo sapien
acacccggctgatcaaagactcctt

SEQ ID NO: 978639 - DNA, 25 bp, Homo sapien
ttaagtcacatctatagcccatcaa

SEQ ID NO: 978640 - DNA, 25 bp, Homo sapien
gtcacatctatagcccatcaatctt

SEQ ID NO: 978641 - DNA, 25 bp, Homo sapien
tcaaagactcctttaccaaattata

SEQ ID NO: 978642 - DNA, 25 bp, Homo sapien
tttttcaatgccataacctgaacag

SEQ ID NO: 978643 - DNA, 25 bp, Homo sapien
gacattcggtaatcttatccaaagg

SEQ ID NO: 978644 - DNA, 25 bp, Homo sapien
taatcgggctaggacaagtgctgtc

SEQ ID NO: 978645 - DNA, 25 bp, Homo sapien
cctgaacagaacatagttcactaag

SEQ ID NO: 978646 - DNA, 25 bp, Homo sapien
tttcatcaaatagcccaacacaggg

SEQ ID NO: 978647 - DNA, 25 bp, Homo sapien
agacagagcaaatgttatgaatggc

SEQ ID NO: 978648 - DNA, 25 bp, Homo sapien
gaatcgagggagcgggcaatctcca

SEQ ID NO: 978649 - DNA, 25 bp, Homo sapien
agccatgtgatctcggcagacagag

SEQ ID NO: 978650 - DNA, 25 bp, Homo sapien
cagccgtatgtacggtctccgggag

SEQ ID NO: 978651 - DNA, 25 bp, Homo sapien
gaggcggacaactccttctaggact

SEQ ID NO: 978652 - DNA, 25 bp, Homo sapien
gaactgaggatttcgatcaacgact

SEQ ID NO: 978653 - DNA, 25 bp, Homo sapien
caattcaatgctggtgtatcgcaca

SEQ ID NO: 978654 - DNA, 25 bp, Homo sapien
ggcggtaagtactcacagttactga

SEQ ID NO: 978655 - DNA, 25 bp, Homo sapien
tacaggcggtaagtactcacagtta

SEQ ID NO: 978656 - DNA, 25 bp, Homo sapien
aagtactcacagttactgatttcag

SEQ ID NO: 978657 - DNA, 25 bp, Homo sapien
tgagtacaggcggtaagtactcaca

SEQ ID NO: 978658 - DNA, 25 bp, Homo sapien
caaataacaggctgtgatgacacac

SEQ ID NO: 978659 - DNA, 25 bp, Homo sapien
gtgatgacacacagcattgctaaag

SEQ ID NO: 978660 - DNA, 25 bp, Homo sapien
ctggccaaataacaggctgtgatga

SEQ ID NO: 978661 - DNA, 25 bp, Homo sapien
cacagcattgctaaagggcttcttt

SEQ ID NO: 978662 - DNA, 25 bp, Homo sapien
tcccagggtgggttgccttctttca

SEQ ID NO: 978663 - DNA, 25 bp, Homo sapien
tgctatagcagccatgataaagaga

SEQ ID NO: 978664 - DNA, 25 bp, Homo sapien
catgataaagagaaccgcttctgtc

SEQ ID NO: 978665 - DNA, 25 bp, Homo sapien
ccagggtgggttgccttctttcaga

SEQ ID NO: 978666 - DNA, 25 bp, Homo sapien
ggtacacctagcagaatactcagag

SEQ ID NO: 978667 - DNA, 25 bp, Homo sapien
aataacagacactgctaggaaaggc

SEQ ID NO: 978668 - DNA, 25 bp, Homo sapien
tacttgtctgcatcaacactggtag

SEQ ID NO: 978669 - DNA, 25 bp, Homo sapien
cactggtagtactgactgaattcct

SEQ ID NO: 978670 - DNA, 25 bp, Homo sapien
tgagcaaaacactccatagacccta

SEQ ID NO: 978671 - DNA, 25 bp, Homo sapien
aaatcaagtcctttaccaggtctga

SEQ ID NO: 978672 - DNA, 25 bp, Homo sapien
tcatgcgaaactccccaaagtcatc

SEQ ID NO: 978673 - DNA, 25 bp, Homo sapien
ccaggtctgataccctcatgcgaaa

SEQ ID NO: 978674 - DNA, 25 bp, Homo sapien
ccagccaggtttattatctatcttc

SEQ ID NO: 978675 - DNA, 25 bp, Homo sapien
aattaagatttgaagaggtagagaa

SEQ ID NO: 978676 - DNA, 25 bp, Homo sapien
aattcctgggctctaacgattcatc

SEQ ID NO: 978677 - DNA, 25 bp, Homo sapien
caagttggcactgacaagaggaaga

SEQ ID NO: 978678 - DNA, 25 bp, Homo sapien
tcgagccaaggcgtgaagcagcctc

SEQ ID NO: 978679 - DNA, 25 bp, Homo sapien
tgtacaaatgttcccccagtcggta

SEQ ID NO: 978680 - DNA, 25 bp, Homo sapien
gatgccatgaataacttcatcgtta

SEQ ID NO: 978681 - DNA, 25 bp, Homo sapien
agcagcctctgaatgtaagctttga

SEQ ID NO: 978682 - DNA, 25 bp, Homo sapien
tagcagatttactattatctcccca

SEQ ID NO: 978683 - DNA, 25 bp, Homo sapien
ttaaataatatgagtggagccagtt

SEQ ID NO: 978684 - DNA, 25 bp, Homo sapien
tttagtcctgaggtaatgcctccaa

SEQ ID NO: 978685 - DNA, 25 bp, Homo sapien
tgtcttcccacgttaggcccaaatc

SEQ ID NO: 978686 - DNA, 25 bp, Homo sapien
agtggtgtaatcatggctcactgca

SEQ ID NO: 978687 - DNA, 25 bp, Homo sapien
ttaaattttctgtagagacaaggtc

SEQ ID NO: 978688 - DNA, 25 bp, Homo sapien
cagggtcttgctctgccatctaggc

SEQ ID NO: 978689 - DNA, 25 bp, Homo sapien
tgctctgccatctaggctggagtac

SEQ ID NO: 978690 - DNA, 25 bp, Homo sapien
gtgaaaatacggcagtaattcagaa

SEQ ID NO: 978691 - DNA, 25 bp, Homo sapien
caagaccttggcctggagtacaaac

SEQ ID NO: 978692 - DNA, 25 bp, Homo sapien
agctccagagttcgaaggtccccaa

SEQ ID NO: 978693 - DNA, 25 bp, Homo sapien
aaagtttcacatagttcagtgaaaa

SEQ ID NO: 978694 - DNA, 25 bp, Homo sapien
tagagagctgagcatacacagtccg

SEQ ID NO: 978695 - DNA, 25 bp, Homo sapien
tgtctaaatcttcacgtgccacggc

SEQ ID NO: 978696 - DNA, 25 bp, Homo sapien
cactccctgaaaaagttgcatggct

SEQ ID NO: 978697 - DNA, 25 bp, Homo sapien
tatgataggcagtctccaatgtcag

SEQ ID NO: 978698 - DNA, 25 bp, Homo sapien
aacctcaaaaaggagtgctagtaat

SEQ ID NO: 978699 - DNA, 25 bp, Homo sapien
tgaagttactgtccaaaactcccaa

SEQ ID NO: 978700 - DNA, 25 bp, Homo sapien
agtaatttattgttagccatgaagt

SEQ ID NO: 978701 - DNA, 25 bp, Homo sapien
caaacagcgaaaaaccttcataagc

SEQ ID NO: 978702 - DNA, 25 bp, Homo sapien
tttctcatctgttcctgctttttct

SEQ ID NO: 978703 - DNA, 25 bp, Homo sapien
catctgttcctgctttttctacaca

SEQ ID NO: 978704 - DNA, 25 bp, Homo sapien
tctcatctgttcctgctttttctac

SEQ ID NO: 978705 - DNA, 25 bp, Homo sapien
tcatctgttcctgctttttctacac

SEQ ID NO: 978706 - DNA, 25 bp, Homo sapien
atacaacttatctacttaatccccg

SEQ ID NO: 978707 - DNA, 25 bp, Homo sapien
ccccagtgttagaggagggttctgg

SEQ ID NO: 978708 - DNA, 25 bp, Homo sapien
cttatctacttaatccccgaaatgg

SEQ ID NO: 978709 - DNA, 25 bp, Homo sapien
acttatctacttaatccccgaaatg

SEQ ID NO: 978710 - DNA, 25 bp, Homo sapien
cagcatagccaggacttaaacttaa

SEQ ID NO: 978711 - DNA, 25 bp, Homo sapien
gaagtctggcttcaaagtctatgat

SEQ ID NO: 978712 - DNA, 25 bp, Homo sapien
tttaatccccacaatatgaaacaga

SEQ ID NO: 978713 - DNA, 25 bp, Homo sapien
gtaactcgcccaatatggcacaggt

SEQ ID NO: 978714 - DNA, 25 bp, Homo sapien
gatatagacttctgagacatctgtc

SEQ ID NO: 978715 - DNA, 25 bp, Homo sapien
taaagccacaagaggcacagagtaa

SEQ ID NO: 978716 - DNA, 25 bp, Homo sapien
tcactatctaaagccacaagaggca

SEQ ID NO: 978717 - DNA, 25 bp, Homo sapien
tatgtctaggatatagacttctgag

SEQ ID NO: 978718 - DNA, 25 bp, Homo sapien
tgtactagagtagaaggccaaatct

SEQ ID NO: 978719 - DNA, 25 bp, Homo sapien
cttctataatttctgtgcgccgatt

SEQ ID NO: 978720 - DNA, 25 bp, Homo sapien
gattagctccaattcgtaaggaacg

SEQ ID NO: 978721 - DNA, 25 bp, Homo sapien
caatagagatactactgtactagag

SEQ ID NO: 978722 - DNA, 25 bp, Homo sapien
caggaaggcatctgtagggcaagat

SEQ ID NO: 978723 - DNA, 25 bp, Homo sapien
gcaagatctgctattgctaaagcca

SEQ ID NO: 978724 - DNA, 25 bp, Homo sapien
tctgtagggcaagatctgctattgc

SEQ ID NO: 978725 - DNA, 25 bp, Homo sapien
aaggcatctgtagggcaagatctgc

SEQ ID NO: 978726 - DNA, 25 bp, Homo sapien
ctgcgttacaataacaggtgacaag

SEQ ID NO: 978727 - DNA, 25 bp, Homo sapien
tcaagttctggatatgggttagcaa

SEQ ID NO: 978728 - DNA, 25 bp, Homo sapien
caatgagtcccgtaaagaggcatga

SEQ ID NO: 978729 - DNA, 25 bp, Homo sapien
cgttacaataacaggtgacaagtct

SEQ ID NO: 978730 - DNA, 25 bp, Homo sapien
ggtctgtgcagcaaaatagcatgac

SEQ ID NO: 978731 - DNA, 25 bp, Homo sapien
ctgtaacaactggtctgagatctcc

SEQ ID NO: 978732 - DNA, 25 bp, Homo sapien
cacatcctgccggatctgtaacaac

SEQ ID NO: 978733 - DNA, 25 bp, Homo sapien
tctgtgcagcaaaatagcatgactc

SEQ ID NO: 978734 - DNA, 25 bp, Homo sapien
tgggtgagagtgagaccctaaaaaa

SEQ ID NO: 978735 - DNA, 25 bp, Homo sapien
gcctgggtgagagtgagaccctaaa

SEQ ID NO: 978736 - DNA, 25 bp, Homo sapien
gagacaggaaaatagcttgaactca

SEQ ID NO: 978737 - DNA, 25 bp, Homo sapien
tgagacaggaaaatagcttgaactc

SEQ ID NO: 978738 - DNA, 25 bp, Homo sapien
cctgtgtggttttagtctcagtaaa

SEQ ID NO: 978739 - DNA, 25 bp, Homo sapien
aggcaaacaacagggtgtctactgg

SEQ ID NO: 978740 - DNA, 25 bp, Homo sapien
ggacctaagaacagagaaacaccaa

SEQ ID NO: 978741 - DNA, 25 bp, Homo sapien
cagtgacatctgtaagacctgtgtg

SEQ ID NO: 978742 - DNA, 25 bp, Homo sapien
ggccatctgcatatagtaattcact

SEQ ID NO: 978743 - DNA, 25 bp, Homo sapien
gtggtggttaaaaggccatctgcat

SEQ ID NO: 978744 - DNA, 25 bp, Homo sapien
catatagtaattcactaagctacac

SEQ ID NO: 978745 - DNA, 25 bp, Homo sapien
gtaattcactaagctacacatctgc

SEQ ID NO: 978746 - DNA, 25 bp, Homo sapien
cagaaaagattcactaagaccaggc

SEQ ID NO: 978747 - DNA, 25 bp, Homo sapien
tcaactttggttataacagaccatc

SEQ ID NO: 978748 - DNA, 25 bp, Homo sapien
catgacatttatcgggtgtttcaac

SEQ ID NO: 978749 - DNA, 25 bp, Homo sapien
ggcacgaacaatcacacctggcctg

SEQ ID NO: 978750 - DNA, 25 bp, Homo sapien
cgggcagaagtaaggcactgacagg

SEQ ID NO: 978751 - DNA, 25 bp, Homo sapien
cagaagtaaggcactgacaggcaca

SEQ ID NO: 978752 - DNA, 25 bp, Homo sapien
ggcagaagtaaggcactgacaggca

SEQ ID NO: 978753 - DNA, 25 bp, Homo sapien
tggcgggcagaagtaaggcactgac

SEQ ID NO: 978754 - DNA, 25 bp, Homo sapien
gtgtcagcttccatgtaggaagtag

SEQ ID NO: 978755 - DNA, 25 bp, Homo sapien
gcttccatgtaggaagtagctgtac

SEQ ID NO: 978756 - DNA, 25 bp, Homo sapien
tcagcttccatgtaggaagtagctg

SEQ ID NO: 978757 - DNA, 25 bp, Homo sapien
atattgatgtcactggtgtcagctt

SEQ ID NO: 978758 - DNA, 25 bp, Homo sapien
tgtctttgacacgggagttgagttt

SEQ ID NO: 978759 - DNA, 25 bp, Homo sapien
actgcttaatactggcagttgcttt

SEQ ID NO: 978760 - DNA, 25 bp, Homo sapien
caatcctgagaccttcatgcaggca

SEQ ID NO: 978761 - DNA, 25 bp, Homo sapien
gtaactgcttaatactggcagttgc

SEQ ID NO: 978762 - DNA, 25 bp, Homo sapien
tattcatccagtatatgggaagaac

SEQ ID NO: 978763 - DNA, 25 bp, Homo sapien
agaacatgtgatggccttgatcaga

SEQ ID NO: 978764 - DNA, 25 bp, Homo sapien
tgatcagattgttgagcactgtgat

SEQ ID NO: 978765 - DNA, 25 bp, Homo sapien
atgggaagaacatgtgatggccttg

SEQ ID NO: 978766 - DNA, 25 bp, Homo sapien
cacgcctggcttttcaacagcatat

SEQ ID NO: 978767 - DNA, 25 bp, Homo sapien
agtgggatttatacctggaatacaa

SEQ ID NO: 978768 - DNA, 25 bp, Homo sapien
tgcccagatgggtttcgagctcctg

SEQ ID NO: 978769 - DNA, 25 bp, Homo sapien
catattgaagggattatacatcatc

SEQ ID NO: 978770 - DNA, 25 bp, Homo sapien
cccttgaaggatcctagattagaga

SEQ ID NO: 978771 - DNA, 25 bp, Homo sapien
gcaccaccgtacctgtcttggattt

SEQ ID NO: 978772 - DNA, 25 bp, Homo sapien
tcttgacatggttgcccagtctggc

SEQ ID NO: 978773 - DNA, 25 bp, Homo sapien
caggtaactagagacataacaacca

SEQ ID NO: 978774 - DNA, 25 bp, Homo sapien
gcattcgacaccaagaacccaattt

SEQ ID NO: 978775 - DNA, 25 bp, Homo sapien
tctaaaatgaaagcattcgacacca

SEQ ID NO: 978776 - DNA, 25 bp, Homo sapien
aacttaaatgcccaacaacagtgga

SEQ ID NO: 978777 - DNA, 25 bp, Homo sapien
gaaagaattctaaagccaatgaaac

SEQ ID NO: 978778 - DNA, 25 bp, Homo sapien
taggactttctagccacagatgcca

SEQ ID NO: 978779 - DNA, 25 bp, Homo sapien
caggtgctacccactgaaatccagg

SEQ ID NO: 978780 - DNA, 25 bp, Homo sapien
ctgaaaggaccatctcaactgaagc

SEQ ID NO: 978781 - DNA, 25 bp, Homo sapien
gaaatccaggcttggactaagctcc

SEQ ID NO: 978782 - DNA, 25 bp, Homo sapien
actgagtcgcttaagtaattggccc

SEQ ID NO: 978783 - DNA, 25 bp, Homo sapien
taattggccctatgaagagatggtc

SEQ ID NO: 978784 - DNA, 25 bp, Homo sapien
tacaggacaggctactaagattcct

SEQ ID NO: 978785 - DNA, 25 bp, Homo sapien
gtgataaaccaaacatgacaatgcc

SEQ ID NO: 978786 - DNA, 25 bp, Homo sapien
ttagtgaccacttaaagagagcctt

SEQ ID NO: 978787 - DNA, 25 bp, Homo sapien
taaaacacgcttttgttccagtaga

SEQ ID NO: 978788 - DNA, 25 bp, Homo sapien
cagtagacaaaatcttccggaaaga

SEQ ID NO: 978789 - DNA, 25 bp, Homo sapien
acattacttttggttacaaatgcca

SEQ ID NO: 978790 - DNA, 25 bp, Homo sapien
cttttggctgaagagaagcaggtaa

SEQ ID NO: 978791 - DNA, 25 bp, Homo sapien
tttggctgaagagaagcaggtaagc

SEQ ID NO: 978792 - DNA, 25 bp, Homo sapien
tcacttttggctgaagagaagcagg

SEQ ID NO: 978793 - DNA, 25 bp, Homo sapien
cacttttggctgaagagaagcaggt

SEQ ID NO: 978794 - DNA, 25 bp, Homo sapien
gaaactagctatgtcccttcggctg

SEQ ID NO: 978795 - DNA, 25 bp, Homo sapien
tgttttctgctccaataggctgacc

SEQ ID NO: 978796 - DNA, 25 bp, Homo sapien
cagattatcctgtcaagtgtgccat

SEQ ID NO: 978797 - DNA, 25 bp, Homo sapien
gaaagtcaccattcctctcaaggca

SEQ ID NO: 978798 - DNA, 25 bp, Homo sapien
gcacacacagttttatatggaataa

SEQ ID NO: 978799 - DNA, 25 bp, Homo sapien
cacagttttatatggaataatcaaa

SEQ ID NO: 978800 - DNA, 25 bp, Homo sapien
gcagcagtgatacccatcttataaa

SEQ ID NO: 978801 - DNA, 25 bp, Homo sapien
aagcagcagtgatacccatcttata

SEQ ID NO: 978802 - DNA, 25 bp, Homo sapien
tgccacaatcgaagagtataagacc

SEQ ID NO: 978803 - DNA, 25 bp, Homo sapien
gcaaagatgtagcttcgcagcccca

SEQ ID NO: 978804 - DNA, 25 bp, Homo sapien
gccagttcgcgaccgatcaggtgcg

SEQ ID NO: 978805 - DNA, 25 bp, Homo sapien
tagtttcccaaaagcggcaaagatg

SEQ ID NO: 978806 - DNA, 25 bp, Homo sapien
gcactgcctggtacacgagctgcaa

SEQ ID NO: 978807 - DNA, 25 bp, Homo sapien
ggcgcgctcctttccgctgggatct

SEQ ID NO: 978808 - DNA, 25 bp, Homo sapien
ggtcgtggtaaagcgcctgcactgc

SEQ ID NO: 978809 - DNA, 25 bp, Homo sapien
caagccaaaaagaggcgcgctcctt

SEQ ID NO: 978810 - DNA, 25 bp, Homo sapien
cctctttggccgttaccagggcaga

SEQ ID NO: 978811 - DNA, 25 bp, Homo sapien
gattcttctccggaggattcctcgg

SEQ ID NO: 978812 - DNA, 25 bp, Homo sapien
gaaggctctccgtggaagttgcccc

SEQ ID NO: 978813 - DNA, 25 bp, Homo sapien
ttaggtcgtattcaggttcctggcc

SEQ ID NO: 978814 - DNA, 25 bp, Homo sapien
actgcgtataacgagttggcccggc

SEQ ID NO: 978815 - DNA, 25 bp, Homo sapien
tgtgcctgccgacaccaaggtgatt

SEQ ID NO: 978816 - DNA, 25 bp, Homo sapien
caaggtgatttgtgctctcgccact

SEQ ID NO: 978817 - DNA, 25 bp, Homo sapien
aaacccgttttaggcgctgacactg

SEQ ID NO: 978818 - DNA, 25 bp, Homo sapien
actcagaaggcgtgtctttggggag

SEQ ID NO: 978819 - DNA, 25 bp, Homo sapien
ctcagaaggcgtgtctttggggagt

SEQ ID NO: 978820 - DNA, 25 bp, Homo sapien
tcagaaggcgtgtctttggggagtc

SEQ ID NO: 978821 - DNA, 25 bp, Homo sapien
gcactcagaaggcgtgtctttgggg

SEQ ID NO: 978822 - DNA, 25 bp, Homo sapien
taactggccaatagtaatgatcatg

SEQ ID NO: 978823 - DNA, 25 bp, Homo sapien
gggtccctgtacatccctgtcatca

SEQ ID NO: 978824 - DNA, 25 bp, Homo sapien
taaagagggcaatagtggtccacag

SEQ ID NO: 978825 - DNA, 25 bp, Homo sapien
gataccaaatagaggaatctggcag

SEQ ID NO: 978826 - DNA, 25 bp, Homo sapien
tgatgacttgcagaaatttgatcac

SEQ ID NO: 978827 - DNA, 25 bp, Homo sapien
tttccagcaggatgacacagaaggg

SEQ ID NO: 978828 - DNA, 25 bp, Homo sapien
ctaaatttccagcaggatgacacag

SEQ ID NO: 978829 - DNA, 25 bp, Homo sapien
gacacagaagggcttgatgacttgc

SEQ ID NO: 978830 - DNA, 25 bp, Homo sapien
tgggattcccggcagagtttacaca

SEQ ID NO: 978831 - DNA, 25 bp, Homo sapien
gccacaggctgtcgaaatccaaaac

SEQ ID NO: 978832 - DNA, 25 bp, Homo sapien
cacagattccctgctaaggccacag

SEQ ID NO: 978833 - DNA, 25 bp, Homo sapien
cagagctgcttgcaaggaatcccac

SEQ ID NO: 978834 - DNA, 25 bp, Homo sapien
gttccatttctggccgctctgaaca

SEQ ID NO: 978835 - DNA, 25 bp, Homo sapien
ttccatttctggccgctctgaacac

SEQ ID NO: 978836 - DNA, 25 bp, Homo sapien
ggagtttctagtgctgatggtgatg

SEQ ID NO: 978837 - DNA, 25 bp, Homo sapien
ttgactttaaccttgtgcacctgga

SEQ ID NO: 978838 - DNA, 25 bp, Homo sapien
aaggaagagatcatatatgaaagtg

SEQ ID NO: 978839 - DNA, 25 bp, Homo sapien
ggctatagttaggtaactaagaata

SEQ ID NO: 978840 - DNA, 25 bp, Homo sapien
gacttggctatagttaggtaactaa

SEQ ID NO: 978841 - DNA, 25 bp, Homo sapien
taaaggaagagatcatatatgaaag

SEQ ID NO: 978842 - DNA, 25 bp, Homo sapien
ttctgaaggctacagcttccatatc

SEQ ID NO: 978843 - DNA, 25 bp, Homo sapien
tctgaaggctacagcttccatatct

SEQ ID NO: 978844 - DNA, 25 bp, Homo sapien
caggcaggtgatcacgtctgactta

SEQ ID NO: 978845 - DNA, 25 bp, Homo sapien
caggtgatcacgtctgacttagata

SEQ ID NO: 978846 - DNA, 25 bp, Homo sapien
tgatcacgtctgacttagatatagc

SEQ ID NO: 978847 - DNA, 25 bp, Homo sapien
tcacgtctgacttagatatagcaaa

SEQ ID NO: 978848 - DNA, 25 bp, Homo sapien
tgccttggataaacctcatcggcta

SEQ ID NO: 978849 - DNA, 25 bp, Homo sapien
ccttggataaacctcatcggctaca

SEQ ID NO: 978850 - DNA, 25 bp, Homo sapien
tggataaacctcatcggctacaata

SEQ ID NO: 978851 - DNA, 25 bp, Homo sapien
catgccttggataaacctcatcggc

SEQ ID NO: 978852 - DNA, 25 bp, Homo sapien
tctggtccctttctctggtcctgtt

SEQ ID NO: 978853 - DNA, 25 bp, Homo sapien
tacttgatggattctggtccctttc

SEQ ID NO: 978854 - DNA, 25 bp, Homo sapien
ttacttgatggattctggtcccttt

SEQ ID NO: 978855 - DNA, 25 bp, Homo sapien
gattctggtccctttctctggtcct

SEQ ID NO: 978856 - DNA, 25 bp, Homo sapien
cctggggcttgagggtgaggagcag

SEQ ID NO: 978857 - DNA, 25 bp, Homo sapien
gatgtcctggggcttgagggtgagg

SEQ ID NO: 978858 - DNA, 25 bp, Homo sapien
gtcctggggcttgagggtgaggagc

SEQ ID NO: 978859 - DNA, 25 bp, Homo sapien
ttaagcttgggccatgatgtcctgg

SEQ ID NO: 978860 - DNA, 25 bp, Homo sapien
tctcccttcttcttaatgccgccaa

SEQ ID NO: 978861 - DNA, 25 bp, Homo sapien
ctatcaagtccgccctttctccctt

SEQ ID NO: 978862 - DNA, 25 bp, Homo sapien
tttctcccttcttcttaatgccgcc

SEQ ID NO: 978863 - DNA, 25 bp, Homo sapien
cccttcttcttaatgccgccaaaga

SEQ ID NO: 978864 - DNA, 25 bp, Homo sapien
aaatactctatcagtgtgtcctctc

SEQ ID NO: 978865 - DNA, 25 bp, Homo sapien
atactctatcagtgtgtcctctccc

SEQ ID NO: 978866 - DNA, 25 bp, Homo sapien
ctaattctttggattctccaaatac

SEQ ID NO: 978867 - DNA, 25 bp, Homo sapien
tccaaatactctatcagtgtgtcct

SEQ ID NO: 978868 - DNA, 25 bp, Homo sapien
ctgtgtagcagaatccaatggcacc

SEQ ID NO: 978869 - DNA, 25 bp, Homo sapien
ttctgaacacaaatattcgtgcttt

SEQ ID NO: 978870 - DNA, 25 bp, Homo sapien
acttctgaacacaaatattcgtgct

SEQ ID NO: 978871 - DNA, 25 bp, Homo sapien
cttctgaacacaaatattcgtgctt

SEQ ID NO: 978872 - DNA, 25 bp, Homo sapien
agtgctacccatttaagcatttgaa

SEQ ID NO: 978873 - DNA, 25 bp, Homo sapien
tgggtatccctcctagaaatctttg

SEQ ID NO: 978874 - DNA, 25 bp, Homo sapien
cttgaatggagggtgtacagaatca

SEQ ID NO: 978875 - DNA, 25 bp, Homo sapien
gagtggtcgagtctcagacacatga

SEQ ID NO: 978876 - DNA, 25 bp, Homo sapien
aaagaggccaagaggattcccgagg

SEQ ID NO: 978877 - DNA, 25 bp, Homo sapien
ggcaaacctggtggacctgcagaag

SEQ ID NO: 978878 - DNA, 25 bp, Homo sapien
tactgtgacagggagatcagcatct

SEQ ID NO: 978879 - DNA, 25 bp, Homo sapien
ggttgcagggcacacattactcggt

SEQ ID NO: 978880 - DNA, 25 bp, Homo sapien
gagttttctgggctgacggcacttt

SEQ ID NO: 978881 - DNA, 25 bp, Homo sapien
cgcactgccgagttttctgggctga

SEQ ID NO: 978882 - DNA, 25 bp, Homo sapien
ttttctgggctgacggcactttggg

SEQ ID NO: 978883 - DNA, 25 bp, Homo sapien
gcgggagccgcactgccgagttttc

SEQ ID NO: 978884 - DNA, 25 bp, Homo sapien
ccgtgcagatattggggtggtgcct

SEQ ID NO: 978885 - DNA, 25 bp, Homo sapien
acagctccgtgcagatattggggtg

SEQ ID NO: 978886 - DNA, 25 bp, Homo sapien
gctccgtgcagatattggggtggtg

SEQ ID NO: 978887 - DNA, 25 bp, Homo sapien
gacagctccgtgcagatattggggt

SEQ ID NO: 978888 - DNA, 25 bp, Homo sapien
ggactgagccatacatgcccttgaa

SEQ ID NO: 978889 - DNA, 25 bp, Homo sapien
tagatcctaacgtgccagtgagacc

SEQ ID NO: 978890 - DNA, 25 bp, Homo sapien
gaagaagcaaactccagatgggcag

SEQ ID NO: 978891 - DNA, 25 bp, Homo sapien
gcattgtgccagagtgataccctta

SEQ ID NO: 978892 - DNA, 25 bp, Homo sapien
gccggtgcacttgtgtgatgaacac

SEQ ID NO: 978893 - DNA, 25 bp, Homo sapien
cagcatgcgtggaattagtggtccc

SEQ ID NO: 978894 - DNA, 25 bp, Homo sapien
tgatgaacaccctgagtaacctact

SEQ ID NO: 978895 - DNA, 25 bp, Homo sapien
agccacatgtgttgaactagtccag

SEQ ID NO: 978896 - DNA, 25 bp, Homo sapien
tccacaggagagactggttcggctc

SEQ ID NO: 978897 - DNA, 25 bp, Homo sapien
cctttgtctaagtagggccagggca

SEQ ID NO: 978898 - DNA, 25 bp, Homo sapien
ggcagtctcagtccaaaagtgttga

SEQ ID NO: 978899 - DNA, 25 bp, Homo sapien
ttcagttcagtttcagcggtgccaa

SEQ ID NO: 978900 - DNA, 25 bp, Homo sapien
cgccgcgcacagtcaagaaggtact

SEQ ID NO: 978901 - DNA, 25 bp, Homo sapien
cgaggcgccgcgcacagtcaagaag

SEQ ID NO: 978902 - DNA, 25 bp, Homo sapien
agccccgacggcaccgtcaccgagg

SEQ ID NO: 978903 - DNA, 25 bp, Homo sapien
cgcgcacagtcaagaaggtactggg

SEQ ID NO: 978904 - DNA, 25 bp, Homo sapien
tacagcaacacgatgctgtgccctt

SEQ ID NO: 978905 - DNA, 25 bp, Homo sapien
aaatcgtcagagttgtctggtttcc

SEQ ID NO: 978906 - DNA, 25 bp, Homo sapien
tggccatacagcaacacgatgctgt

SEQ ID NO: 978907 - DNA, 25 bp, Homo sapien
gtggccaaccgtggccatacagcaa

SEQ ID NO: 978908 - DNA, 25 bp, Homo sapien
tagtatgaaactcctctgggaagaa

SEQ ID NO: 978909 - DNA, 25 bp, Homo sapien
gcaacaaagagacgggaagtgtgca

SEQ ID NO: 978910 - DNA, 25 bp, Homo sapien
tgctgggagtacctagatctgagtc

SEQ ID NO: 978911 - DNA, 25 bp, Homo sapien
tagcgtcatgattaaggtatagcgg

SEQ ID NO: 978912 - DNA, 25 bp, Homo sapien
ttggccgtgttttaaactaaatgca

SEQ ID NO: 978913 - DNA, 25 bp, Homo sapien
tcaccatacatttaccaatactgag

SEQ ID NO: 978914 - DNA, 25 bp, Homo sapien
gctaacgatacacgaaacaactctt

SEQ ID NO: 978915 - DNA, 25 bp, Homo sapien
tcccaaagaggcataaaacacagtg

SEQ ID NO: 978916 - DNA, 25 bp, Homo sapien
ctcttagtttacatgtagaagaaac

SEQ ID NO: 978917 - DNA, 25 bp, Homo sapien
gaaacttgtgattgaagactgtgcc

SEQ ID NO: 978918 - DNA, 25 bp, Homo sapien
ctactgatttagtgtttacggtgaa

SEQ ID NO: 978919 - DNA, 25 bp, Homo sapien
aaaattagcatcctgatactactga

SEQ ID NO: 978920 - DNA, 25 bp, Homo sapien
caagatggctgatgttagttccttc

SEQ ID NO: 978921 - DNA, 25 bp, Homo sapien
tttgtcctgggtgatagttacgtgg

SEQ ID NO: 978922 - DNA, 25 bp, Homo sapien
tgttgtagcgtgttttcaagatggc

SEQ ID NO: 978923 - DNA, 25 bp, Homo sapien
gcataagatcatggctgaataacaa

SEQ ID NO: 978924 - DNA, 25 bp, Homo sapien
gatcttggcagtaggccattggaac

SEQ ID NO: 978925 - DNA, 25 bp, Homo sapien
gattaaggttttctgagggatgtgc

SEQ ID NO: 978926 - DNA, 25 bp, Homo sapien
aatttgattaggcaagctggtttca

SEQ ID NO: 978927 - DNA, 25 bp, Homo sapien
tctgtgaagccagagcaatctggtt

SEQ ID NO: 978928 - DNA, 25 bp, Homo sapien
tgttacagacttctactcatctcag

SEQ ID NO: 978929 - DNA, 25 bp, Homo sapien
tacaacccaccttggatctgggaca

SEQ ID NO: 978930 - DNA, 25 bp, Homo sapien
acctccttggtgacttaataacatc

SEQ ID NO: 978931 - DNA, 25 bp, Homo sapien
tcccattttagatagttgtgacatc

SEQ ID NO: 978932 - DNA, 25 bp, Homo sapien
acgtctggccttatcacagttttta

SEQ ID NO: 978933 - DNA, 25 bp, Homo sapien
cacgtctggccttatcacagttttt

SEQ ID NO: 978934 - DNA, 25 bp, Homo sapien
attttctaccagtctgtttggcaca

SEQ ID NO: 978935 - DNA, 25 bp, Homo sapien
aatattttctaccagtctgtttggc

SEQ ID NO: 978936 - DNA, 25 bp, Homo sapien
ttcagatggtccagttcatccttaa

SEQ ID NO: 978937 - DNA, 25 bp, Homo sapien
ctaaatattctccttcagatggtcc

SEQ ID NO: 978938 - DNA, 25 bp, Homo sapien
aatattctccttcagatggtccagt

SEQ ID NO: 978939 - DNA, 25 bp, Homo sapien
ctccttcagatggtccagttcatcc

SEQ ID NO: 978940 - DNA, 25 bp, Homo sapien
ttgctgccgtctatgtatttggtga

SEQ ID NO: 978941 - DNA, 25 bp, Homo sapien
gctgccgtctatgtatttggtgatg

SEQ ID NO: 978942 - DNA, 25 bp, Homo sapien
tctttgctgccgtctatgtatttgg

SEQ ID NO: 978943 - DNA, 25 bp, Homo sapien
tttttctttgctgccgtctatgtat

SEQ ID NO: 978944 - DNA, 25 bp, Homo sapien
taaactggtgacatgctctgcgtac

SEQ ID NO: 978945 - DNA, 25 bp, Homo sapien
cactgtgttatcagactttcggatc

SEQ ID NO: 978946 - DNA, 25 bp, Homo sapien
gcctggcctaccttataaattttga

SEQ ID NO: 978947 - DNA, 25 bp, Homo sapien
gtttgtgtcacatataggccctgtc

SEQ ID NO: 978948 - DNA, 25 bp, Homo sapien
gtctcgcagcacctcttaaagcagt

SEQ ID NO: 978949 - DNA, 25 bp, Homo sapien
tggtgtttccgcataggcataagga

SEQ ID NO: 978950 - DNA, 25 bp, Homo sapien
ggtgaaaaggaaatcgccattggca

SEQ ID NO: 978951 - DNA, 25 bp, Homo sapien
cacataaagtacttcggctgcatgc

SEQ ID NO: 978952 - DNA, 25 bp, Homo sapien
tgagaacagctttagctagaggtgc

SEQ ID NO: 978953 - DNA, 25 bp, Homo sapien
actgagggccctaaatgcaaattcc

SEQ ID NO: 978954 - DNA, 25 bp, Homo sapien
caaactgaaccctgacctaagtgga

SEQ ID NO: 978955 - DNA, 25 bp, Homo sapien
taagtggagctctaattagccgggt

SEQ ID NO: 978956 - DNA, 25 bp, Homo sapien
tagaattttgggacctattccagac

SEQ ID NO: 978957 - DNA, 25 bp, Homo sapien
taagggaatgtagagcaccaaggct

SEQ ID NO: 978958 - DNA, 25 bp, Homo sapien
aaagtgttgtcccagccatattgtc

SEQ ID NO: 978959 - DNA, 25 bp, Homo sapien
taggcagagaccaagtcatgaaagg

SEQ ID NO: 978960 - DNA, 25 bp, Homo sapien
tatgataaggagattgaagaagggt

SEQ ID NO: 978961 - DNA, 25 bp, Homo sapien
ggtaattaggtgatttgccaaagtc

SEQ ID NO: 978962 - DNA, 25 bp, Homo sapien
cagttctaaccttccacagttcact

SEQ ID NO: 978963 - DNA, 25 bp, Homo sapien
tggaaatagtgttagaactggaagg

SEQ ID NO: 978964 - DNA, 25 bp, Homo sapien
ttcacaagtgcctcacacacaggga

SEQ ID NO: 978965 - DNA, 25 bp, Homo sapien
gaagtccaactattgctgcagaaag

SEQ ID NO: 978966 - DNA, 25 bp, Homo sapien
tgaatctcactagggttgggtctgc

SEQ ID NO: 978967 - DNA, 25 bp, Homo sapien
tggtatccgcacctccagtgacgtg

SEQ ID NO: 978968 - DNA, 25 bp, Homo sapien
gctgctggtgtgatgtatgggttgt

SEQ ID NO: 978969 - DNA, 25 bp, Homo sapien
gattagttcctaggtactaggtcac

SEQ ID NO: 978970 - DNA, 25 bp, Homo sapien
gaaaggtgtgagagttgcctggcca

SEQ ID NO: 978971 - DNA, 25 bp, Homo sapien
ccactgtttcttaattatccacgaa

SEQ ID NO: 978972 - DNA, 25 bp, Homo sapien
gactttcaaggttacgttccatcaa

SEQ ID NO: 978973 - DNA, 25 bp, Homo sapien
tgaagaaccccaatctcaagaactg

SEQ ID NO: 978974 - DNA, 25 bp, Homo sapien
taagccgggatgaagcctgaagaac

SEQ ID NO: 978975 - DNA, 25 bp, Homo sapien
caagaactgacgaggtagactttca

SEQ ID NO: 978976 - DNA, 25 bp, Homo sapien
ttatcattaaaggtagagtcacttg

SEQ ID NO: 978977 - DNA, 25 bp, Homo sapien
cctgctttcattctggtgtactgta

SEQ ID NO: 978978 - DNA, 25 bp, Homo sapien
tctgcccatcaaggaaccatctttt

SEQ ID NO: 978979 - DNA, 25 bp, Homo sapien
gagtcacttgtcagacctttgatca

SEQ ID NO: 978980 - DNA, 25 bp, Homo sapien
ttcattgtatatcaacaaaggcttc

SEQ ID NO: 978981 - DNA, 25 bp, Homo sapien
gactgctataaccttgtgatttgag

SEQ ID NO: 978982 - DNA, 25 bp, Homo sapien
aaaggacattcctcagtgcttctgc

SEQ ID NO: 978983 - DNA, 25 bp, Homo sapien
attcctccagcagtggactgctata

SEQ ID NO: 978984 - DNA, 25 bp, Homo sapien
tgcaggaggtacattctgcttgact

SEQ ID NO: 978985 - DNA, 25 bp, Homo sapien
gtgcaagtgaagcatcagtaatctc

SEQ ID NO: 978986 - DNA, 25 bp, Homo sapien
tggattccagcttagagtgcaagtg

SEQ ID NO: 978987 - DNA, 25 bp, Homo sapien
tattccattccagcgctctggcatg

SEQ ID NO: 978988 - DNA, 25 bp, Homo sapien
gctcttgggatcactgctaagccca

SEQ ID NO: 978989 - DNA, 25 bp, Homo sapien
tcatcaagctttagctctaggcgtg

SEQ ID NO: 978990 - DNA, 25 bp, Homo sapien
tgatcatttgttcccggctcttggg

SEQ ID NO: 978991 - DNA, 25 bp, Homo sapien
taggcgtgttggtttccgtctcagc

SEQ ID NO: 978992 - DNA, 25 bp, Homo sapien
gatcttaaatgtgtacgtcattcat

SEQ ID NO: 978993 - DNA, 25 bp, Homo sapien
taaatgtgtacgtcattcattaaac

SEQ ID NO: 978994 - DNA, 25 bp, Homo sapien
agggccaaacccagtgaactattag

SEQ ID NO: 978995 - DNA, 25 bp, Homo sapien
agtcaacactaagggccaaacccag

SEQ ID NO: 978996 - DNA, 25 bp, Homo sapien
gattgagcttcagcattgccaggta

SEQ ID NO: 978997 - DNA, 25 bp, Homo sapien
tagctggcagaacaacctaccaaag

SEQ ID NO: 978998 - DNA, 25 bp, Homo sapien
ccaggtaaggaccagctgatgtact

SEQ ID NO: 978999 - DNA, 25 bp, Homo sapien
taaagggaagtattcatgtcatgcc

SEQ ID NO: 979000 - DNA, 25 bp, Homo sapien
gggcatttgtaaagggactgaacta

SEQ ID NO: 979001 - DNA, 25 bp, Homo sapien
gatgacttgtttctagctgccctag

SEQ ID NO: 979002 - DNA, 25 bp, Homo sapien
ttctcagatacttcagggcatttgt

SEQ ID NO: 979003 - DNA, 25 bp, Homo sapien
gacaaaagcaagtaccatgggtgtt

SEQ ID NO: 979004 - DNA, 25 bp, Homo sapien
ttaagaagaaagaaccacaagcctc

SEQ ID NO: 979005 - DNA, 25 bp, Homo sapien
ggctccagtctgtgaggatacataa

SEQ ID NO: 979006 - DNA, 25 bp, Homo sapien
tcagatgacctctctgtagggacac

SEQ ID NO: 979007 - DNA, 25 bp, Homo sapien
gccttgctgtagtgaagagacccac

SEQ ID NO: 979008 - DNA, 25 bp, Homo sapien
ggaataacacttctaaagatcacca

SEQ ID NO: 979009 - DNA, 25 bp, Homo sapien
tgcttcgcttttctctaaacagatc

SEQ ID NO: 979010 - DNA, 25 bp, Homo sapien
tacttgcccatatgagcacggctcc

SEQ ID NO: 979011 - DNA, 25 bp, Homo sapien
cagcaaattatatgtggacaggttc

SEQ ID NO: 979012 - DNA, 25 bp, Homo sapien
ctatagcatattagtgcagtaggct

SEQ ID NO: 979013 - DNA, 25 bp, Homo sapien
aagtagctatgcctatggtcatagg

SEQ ID NO: 979014 - DNA, 25 bp, Homo sapien
tgttgcttacgcttgagtggcacac

SEQ ID NO: 979015 - DNA, 25 bp, Homo sapien
tggtcataggcatgccctaccatgc

SEQ ID NO: 979016 - DNA, 25 bp, Homo sapien
ctcctagtacagaacgaaatggagt

SEQ ID NO: 979017 - DNA, 25 bp, Homo sapien
ttctcctagtacagaacgaaatgga

SEQ ID NO: 979018 - DNA, 25 bp, Homo sapien
atttctcctagtacagaacgaaatg

SEQ ID NO: 979019 - DNA, 25 bp, Homo sapien
tttctcctagtacagaacgaaatgg

SEQ ID NO: 979020 - DNA, 25 bp, Homo sapien
cctccacctcccagggtgctgggat

SEQ ID NO: 979021 - DNA, 25 bp, Homo sapien
ctccacctcccagggtgctgggatt

SEQ ID NO: 979022 - DNA, 25 bp, Homo sapien
acaggtgtgagccaccatgcccagc

SEQ ID NO: 979023 - DNA, 25 bp, Homo sapien
attacaggtgtgagccaccatgccc

SEQ ID NO: 979024 - DNA, 25 bp, Homo sapien
gtaaattaatctacagtcaggctag

SEQ ID NO: 979025 - DNA, 25 bp, Homo sapien
ggagctataccaaaatctaacaagt

SEQ ID NO: 979026 - DNA, 25 bp, Homo sapien
tacttgacagtatccaaaggagcta

SEQ ID NO: 979027 - DNA, 25 bp, Homo sapien
gcttatttactctgcccctcgtcaa

SEQ ID NO: 979028 - DNA, 25 bp, Homo sapien
cagacttgctgggactagctttcag

SEQ ID NO: 979029 - DNA, 25 bp, Homo sapien
taaggtaaccaggttgaatcttcca

SEQ ID NO: 979030 - DNA, 25 bp, Homo sapien
ggagaaactgaagcactaaggataa

SEQ ID NO: 979031 - DNA, 25 bp, Homo sapien
tagctttcaggtattgacagccagc

SEQ ID NO: 979032 - DNA, 25 bp, Homo sapien
tgcggactgtcatcgtatttgccaa

SEQ ID NO: 979033 - DNA, 25 bp, Homo sapien
gcccacgccttgaccttggagttga

SEQ ID NO: 979034 - DNA, 25 bp, Homo sapien
tatttgccaaaaacgcttcacaagg

SEQ ID NO: 979035 - DNA, 25 bp, Homo sapien
taaacagcagtgtccacccaatagg

SEQ ID NO: 979036 - DNA, 25 bp, Homo sapien
gtaggctccacggacggacaaggaa

SEQ ID NO: 979037 - DNA, 25 bp, Homo sapien
gccggtaagttgacctcagccctct

SEQ ID NO: 979038 - DNA, 25 bp, Homo sapien
tctctgtctccccagtgccggtaag

SEQ ID NO: 979039 - DNA, 25 bp, Homo sapien
acggtgcccagtcagaggcatctgc

SEQ ID NO: 979040 - DNA, 25 bp, Homo sapien
ttgggcggccaccatggctcctgca

SEQ ID NO: 979041 - DNA, 25 bp, Homo sapien
accatggctcctgcagccagtccac

SEQ ID NO: 979042 - DNA, 25 bp, Homo sapien
tgcagccagtccacccagaatgtct

SEQ ID NO: 979043 - DNA, 25 bp, Homo sapien
cagtccacccagaatgtctccagct

SEQ ID NO: 979044 - DNA, 25 bp, Homo sapien
ctgggctcgatttctgctgcaactt

SEQ ID NO: 979045 - DNA, 25 bp, Homo sapien
cctcattgacgtgggcttcgtgggt

SEQ ID NO: 979046 - DNA, 25 bp, Homo sapien
tgatgggtcgcctctttcagggcag

SEQ ID NO: 979047 - DNA, 25 bp, Homo sapien
acttcatggccctcattgacgtggg

SEQ ID NO: 979048 - DNA, 25 bp, Homo sapien
gagtaactttcctttgatgaaatct

SEQ ID NO: 979049 - DNA, 25 bp, Homo sapien
gtaactttcctttgatgaaatctgc

SEQ ID NO: 979050 - DNA, 25 bp, Homo sapien
gtgcctggcctagagtaactttcct

SEQ ID NO: 979051 - DNA, 25 bp, Homo sapien
tgtccagctaaatgtttgtatgttt

SEQ ID NO: 979052 - DNA, 25 bp, Homo sapien
gattagtttagactttcacgcctgg

SEQ ID NO: 979053 - DNA, 25 bp, Homo sapien
gattatgttatttcccagcttagca

SEQ ID NO: 979054 - DNA, 25 bp, Homo sapien
gattgccacaatagcctcctgtttg

SEQ ID NO: 979055 - DNA, 25 bp, Homo sapien
tctgaactcttaagtcacaccgaag

SEQ ID NO: 979056 - DNA, 25 bp, Homo sapien
ttctttatcgcctttgttggcgttc

SEQ ID NO: 979057 - DNA, 25 bp, Homo sapien
ctttatcgcctttgttggcgttctt

SEQ ID NO: 979058 - DNA, 25 bp, Homo sapien
tttatcgcctttgttggcgttcttc

SEQ ID NO: 979059 - DNA, 25 bp, Homo sapien
tctttatcgcctttgttggcgttct

SEQ ID NO: 979060 - DNA, 25 bp, Homo sapien
tactggcctgagaccctgataatgg

SEQ ID NO: 979061 - DNA, 25 bp, Homo sapien
gcatcacgggaatctaatctgtagg

SEQ ID NO: 979062 - DNA, 25 bp, Homo sapien
ggagacccttgtggaaacagcatct

SEQ ID NO: 979063 - DNA, 25 bp, Homo sapien
tgttctcctgcaaaggtaagcccag

SEQ ID NO: 979064 - DNA, 25 bp, Homo sapien
caagattctggataccaactgggtc

SEQ ID NO: 979065 - DNA, 25 bp, Homo sapien
ggttcctaggcaaacaagccaagat

SEQ ID NO: 979066 - DNA, 25 bp, Homo sapien
gggtcccaggactcaaaacaatcag

SEQ ID NO: 979067 - DNA, 25 bp, Homo sapien
ggagggagtctcctgacgacactaa

SEQ ID NO: 979068 - DNA, 25 bp, Homo sapien
gagatgccactcgtctgatcagcaa

SEQ ID NO: 979069 - DNA, 25 bp, Homo sapien
caatatctggcacagcacgagacac

SEQ ID NO: 979070 - DNA, 25 bp, Homo sapien
gacacctagaaatgttcgccgaacg

SEQ ID NO: 979071 - DNA, 25 bp, Homo sapien
catccagttgcttttgaggttccgg

SEQ ID NO: 979072 - DNA, 25 bp, Homo sapien
agctggagccctcgccgcgagccct

SEQ ID NO: 979073 - DNA, 25 bp, Homo sapien
cgcggcggcggggtaagctggagcc

SEQ ID NO: 979074 - DNA, 25 bp, Homo sapien
ctctgaagcgctccgtgcacgcgac

SEQ ID NO: 979075 - DNA, 25 bp, Homo sapien
tgaagcgctccgtgcacgcgacgcg

SEQ ID NO: 979076 - DNA, 25 bp, Homo sapien
aaatccattttgtagccagatggta

SEQ ID NO: 979077 - DNA, 25 bp, Homo sapien
caccacaatgattgctttcattctg

SEQ ID NO: 979078 - DNA, 25 bp, Homo sapien
tgtagccagatggtatggtattttc

SEQ ID NO: 979079 - DNA, 25 bp, Homo sapien
ggtattttccatccgagaatacaga

SEQ ID NO: 979080 - DNA, 25 bp, Homo sapien
ggatggtcttgattttccgaccttg

SEQ ID NO: 979081 - DNA, 25 bp, Homo sapien
cgaccttgtgatccacccgccttgg

SEQ ID NO: 979082 - DNA, 25 bp, Homo sapien
cacacctggctaattttttggtatt

SEQ ID NO: 979083 - DNA, 25 bp, Homo sapien
tgggacgtcgggtgcctgccaccac

SEQ ID NO: 979084 - DNA, 25 bp, Homo sapien
tgtcaagtgtgagatgtgtatccat

SEQ ID NO: 979085 - DNA, 25 bp, Homo sapien
tgcttctgtcaagtgtgagatgtgt

SEQ ID NO: 979086 - DNA, 25 bp, Homo sapien
gcttctgtcaagtgtgagatgtgta

SEQ ID NO: 979087 - DNA, 25 bp, Homo sapien
tctgtcaagtgtgagatgtgtatcc

SEQ ID NO: 979088 - DNA, 25 bp, Homo sapien
tgaatgcaacagaagcgctttatgc

SEQ ID NO: 979089 - DNA, 25 bp, Homo sapien
gagacagccatttctgaatgcagca

SEQ ID NO: 979090 - DNA, 25 bp, Homo sapien
cggcccgcacacacgctttttgaga

SEQ ID NO: 979091 - DNA, 25 bp, Homo sapien
gcagaaagctgaatgcaacacttct

SEQ ID NO: 979092 - DNA, 25 bp, Homo sapien
catttatcttgttagattatgctca

SEQ ID NO: 979093 - DNA, 25 bp, Homo sapien
ggtgtttggggaatttgatcaatgt

SEQ ID NO: 979094 - DNA, 25 bp, Homo sapien
tgctcactaagccattggggtgttt

SEQ ID NO: 979095 - DNA, 25 bp, Homo sapien
tttggggaatttgatcaatgtatct

SEQ ID NO: 979096 - DNA, 25 bp, Homo sapien
cgatagatacgtatggctaaacata

SEQ ID NO: 979097 - DNA, 25 bp, Homo sapien
cttttctcaatagctgattctagtt

SEQ ID NO: 979098 - DNA, 25 bp, Homo sapien
ttcgaaaactatccctctgctgctg

SEQ ID NO: 979099 - DNA, 25 bp, Homo sapien
tagtttgtgttgcttcgatagatac

SEQ ID NO: 979100 - DNA, 25 bp, Homo sapien
cagaccagtcaataagacagggctt

SEQ ID NO: 979101 - DNA, 25 bp, Homo sapien
cagggtgtttggagtgcttgaatca

SEQ ID NO: 979102 - DNA, 25 bp, Homo sapien
acagggcttaacaggagagtaatcc

SEQ ID NO: 979103 - DNA, 25 bp, Homo sapien
taagtaaaatgacccacagaccagt

SEQ ID NO: 979104 - DNA, 25 bp, Homo sapien
ttttgaggttctgtacaggattctg

SEQ ID NO: 979105 - DNA, 25 bp, Homo sapien
attttgaggttctgtacaggattct

SEQ ID NO: 979106 - DNA, 25 bp, Homo sapien
tttgaggttctgtacaggattctgc

SEQ ID NO: 979107 - DNA, 25 bp, Homo sapien
tattctaccttctgatacctgtact

SEQ ID NO: 979108 - DNA, 25 bp, Homo sapien
ttagaattgccagtcataggttttc

SEQ ID NO: 979109 - DNA, 25 bp, Homo sapien
cactaccacacgcagctggtttttg

SEQ ID NO: 979110 - DNA, 25 bp, Homo sapien
tgaatagcagagattcctaggtctg

SEQ ID NO: 979111 - DNA, 25 bp, Homo sapien
taggagtacctgataagaattcagt

SEQ ID NO: 979112 - DNA, 25 bp, Homo sapien
tttctttccatgtctgatatcatca

SEQ ID NO: 979113 - DNA, 25 bp, Homo sapien
tttgaaagagaattatcctaggtca

SEQ ID NO: 979114 - DNA, 25 bp, Homo sapien
agagaattatcctaggtcaaatgga

SEQ ID NO: 979115 - DNA, 25 bp, Homo sapien
tccatgtctgatatcatcactcata

SEQ ID NO: 979116 - DNA, 25 bp, Homo sapien
tattgctggttgacggtcttgcctc

SEQ ID NO: 979117 - DNA, 25 bp, Homo sapien
gaacgatttctctgtaacgtggtgc

SEQ ID NO: 979118 - DNA, 25 bp, Homo sapien
caaattttgccctatcgattgactc

SEQ ID NO: 979119 - DNA, 25 bp, Homo sapien
tgggcctgaccactaaaacacttaa

SEQ ID NO: 979120 - DNA, 25 bp, Homo sapien
gagtctgagtgcactgactcacacc

SEQ ID NO: 979121 - DNA, 25 bp, Homo sapien
gaagtgagtctgagtgcactgactc

SEQ ID NO: 979122 - DNA, 25 bp, Homo sapien
ctaacttaagagaagtgagtctgag

SEQ ID NO: 979123 - DNA, 25 bp, Homo sapien
tttggtagaaagagctaacttaaga

SEQ ID NO: 979124 - DNA, 25 bp, Homo sapien
cgggaatgggcttagcagctcttaa

SEQ ID NO: 979125 - DNA, 25 bp, Homo sapien
acagagcaagatccgagagtgagag

SEQ ID NO: 979126 - DNA, 25 bp, Homo sapien
cagagatttgtctgatggaggacca

SEQ ID NO: 979127 - DNA, 25 bp, Homo sapien
cactaaagaatgagtggcggcatta

SEQ ID NO: 979128 - DNA, 25 bp, Homo sapien
cttaaggagcacataggtaggcggt

SEQ ID NO: 979129 - DNA, 25 bp, Homo sapien
gtttaccttaaatatgggcaggctg

SEQ ID NO: 979130 - DNA, 25 bp, Homo sapien
gcaaagaacaattgcagtgagataa

SEQ ID NO: 979131 - DNA, 25 bp, Homo sapien
gaattgcataactcattttaggtgc

SEQ ID NO: 979132 - DNA, 25 bp, Homo sapien
aagatgagattattgtaaattgtaa

SEQ ID NO: 979133 - DNA, 25 bp, Homo sapien
agagtgtgttcaggatgtacaggag

SEQ ID NO: 979134 - DNA, 25 bp, Homo sapien
tacaggagtggcaggatgtcatctt

SEQ ID NO: 979135 - DNA, 25 bp, Homo sapien
tcaggatgtacaggagtggcaggat

SEQ ID NO: 979136 - DNA, 25 bp, Homo sapien
catatttgctggtaggatcacaacc

SEQ ID NO: 979137 - DNA, 25 bp, Homo sapien
gcagccgtcggagcacttactggag

SEQ ID NO: 979138 - DNA, 25 bp, Homo sapien
tcagtagaaagacccaaggaaggca

SEQ ID NO: 979139 - DNA, 25 bp, Homo sapien
catgcctaggaatattctgggagcc

SEQ ID NO: 979140 - DNA, 25 bp, Homo sapien
ggatttagccaattacatgccccta

SEQ ID NO: 979141 - DNA, 25 bp, Homo sapien
gcttcctgttatatgtagcctcacg

SEQ ID NO: 979142 - DNA, 25 bp, Homo sapien
gatgccggtgcctctctggttggta

SEQ ID NO: 979143 - DNA, 25 bp, Homo sapien
cacgaaggacctttggatttagcca

SEQ ID NO: 979144 - DNA, 25 bp, Homo sapien
tttgcggtcatgagtgtggcctttt

SEQ ID NO: 979145 - DNA, 25 bp, Homo sapien
tgcacatagtttgcggtcatgagtg

SEQ ID NO: 979146 - DNA, 25 bp, Homo sapien
ttctgcacatagtttgcggtcatga

SEQ ID NO: 979147 - DNA, 25 bp, Homo sapien
catagtttgcggtcatgagtgtggc

SEQ ID NO: 979148 - DNA, 25 bp, Homo sapien
atgtcccactgttccaactctttaa

SEQ ID NO: 979149 - DNA, 25 bp, Homo sapien
gagggatgatgccaatcctccacat

SEQ ID NO: 979150 - DNA, 25 bp, Homo sapien
tgcatgtcccactgttccaactctt

SEQ ID NO: 979151 - DNA, 25 bp, Homo sapien
aaatgagagggatgatgccaatcct

SEQ ID NO: 979152 - DNA, 25 bp, Homo sapien
taaagagcaaatgtgcagaacccaa

SEQ ID NO: 979153 - DNA, 25 bp, Homo sapien
agagcaaatgtgcagaacccaacag

SEQ ID NO: 979154 - DNA, 25 bp, Homo sapien
gcttcctctttgtgcgatgctcttt

SEQ ID NO: 979155 - DNA, 25 bp, Homo sapien
agcaaatgtgcagaacccaacagca

SEQ ID NO: 979156 - DNA, 25 bp, Homo sapien
caagtggatcctgactgacaaagcc

SEQ ID NO: 979157 - DNA, 25 bp, Homo sapien
gaagcagctggaggatagagtcact

SEQ ID NO: 979158 - DNA, 25 bp, Homo sapien
cctgcttggatggtgggattcctct

SEQ ID NO: 979159 - DNA, 25 bp, Homo sapien
gcctctttatggcagatcgtgcagg

SEQ ID NO: 979160 - DNA, 25 bp, Homo sapien
tcctttctaatcatggtcccggttc

SEQ ID NO: 979161 - DNA, 25 bp, Homo sapien
cccatttgggccagtatttctttga

SEQ ID NO: 979162 - DNA, 25 bp, Homo sapien
tcctctcctttctaatcatggtccc

SEQ ID NO: 979163 - DNA, 25 bp, Homo sapien
tctcctttctaatcatggtcccggt

SEQ ID NO: 979164 - DNA, 25 bp, Homo sapien
aaaagccaaattgtggcaggacttc

SEQ ID NO: 979165 - DNA, 25 bp, Homo sapien
agctaagcttggttgggcccggtca

SEQ ID NO: 979166 - DNA, 25 bp, Homo sapien
cttcagaagggactcctggaggccc

SEQ ID NO: 979167 - DNA, 25 bp, Homo sapien
tgttccttgatgcaacctcgtggcc

SEQ ID NO: 979168 - DNA, 25 bp, Homo sapien
cctgaacgcccctgatcttgtgtga

SEQ ID NO: 979169 - DNA, 25 bp, Homo sapien
ttgagaagttgccaagacgaagaaa

SEQ ID NO: 979170 - DNA, 25 bp, Homo sapien
tatcgtcattgtgaagttgtccagg

SEQ ID NO: 979171 - DNA, 25 bp, Homo sapien
ggattctgtgttgtttcccattctg

SEQ ID NO: 979172 - DNA, 25 bp, Homo sapien
tacatataaatagtcctagttctac

SEQ ID NO: 979173 - DNA, 25 bp, Homo sapien
tgaggattcaaagaccaacggaagc

SEQ ID NO: 979174 - DNA, 25 bp, Homo sapien
caacggaagcaggtcacatttgtca

SEQ ID NO: 979175 - DNA, 25 bp, Homo sapien
gatgaaggtgcccttttagctctgg

SEQ ID NO: 979176 - DNA, 25 bp, Homo sapien
tattttcatgatcccaaaaagcagg

SEQ ID NO: 979177 - DNA, 25 bp, Homo sapien
cagttactcgaagaaacaaagcact

SEQ ID NO: 979178 - DNA, 25 bp, Homo sapien
caaggaatggcgtgtgactttttcc

SEQ ID NO: 979179 - DNA, 25 bp, Homo sapien
gggatggatgatcagagccacaact

SEQ ID NO: 979180 - DNA, 25 bp, Homo sapien
gacgggtatggtgaactggccatct

SEQ ID NO: 979181 - DNA, 25 bp, Homo sapien
gttgaaactggcagttttagcatct

SEQ ID NO: 979182 - DNA, 25 bp, Homo sapien
agttgaaactggcagttttagcatc

SEQ ID NO: 979183 - DNA, 25 bp, Homo sapien
aaagttgaaactggcagttttagca

SEQ ID NO: 979184 - DNA, 25 bp, Homo sapien
caggaaaagttgaaactggcagttt

SEQ ID NO: 979185 - DNA, 25 bp, Homo sapien
caggaggaacaaatccatgaagtgg

SEQ ID NO: 979186 - DNA, 25 bp, Homo sapien
gctggaggcatagaggtccagccca

SEQ ID NO: 979187 - DNA, 25 bp, Homo sapien
catgaagtggaatgctggaggcata

SEQ ID NO: 979188 - DNA, 25 bp, Homo sapien
gttctgaggcgtcaggaggaacaaa

SEQ ID NO: 979189 - DNA, 25 bp, Homo sapien
ctgccactacccagcagtccgggac

SEQ ID NO: 979190 - DNA, 25 bp, Homo sapien
ttcctcgcggagaacagcaggtcca

SEQ ID NO: 979191 - DNA, 25 bp, Homo sapien
gcatggccggcccttccctcgctgg

SEQ ID NO: 979192 - DNA, 25 bp, Homo sapien
cccctccttcctcgcggagaacagc

SEQ ID NO: 979193 - DNA, 25 bp, Homo sapien
gcccttccctcgctggctgtgcaca

SEQ ID NO: 979194 - DNA, 25 bp, Homo sapien
gtgccggctgagtcctcgccccata

SEQ ID NO: 979195 - DNA, 25 bp, Homo sapien
cctcgccccatagttggcaagtcta

SEQ ID NO: 979196 - DNA, 25 bp, Homo sapien
agtctagaaccaccggatcctgtta

SEQ ID NO: 979197 - DNA, 25 bp, Homo sapien
aagtctagaaccaccggatcctgtt

SEQ ID NO: 979198 - DNA, 25 bp, Homo sapien
accagtgtgagttctaccattgcca

SEQ ID NO: 979199 - DNA, 25 bp, Homo sapien
caaaaacggggggaggcaagcagct

SEQ ID NO: 979200 - DNA, 25 bp, Homo sapien
cagtgtgagttctaccattgccaaa

SEQ ID NO: 979201 - DNA, 25 bp, Homo sapien
tgagttctaccattgccaaaaacgg

SEQ ID NO: 979202 - DNA, 25 bp, Homo sapien
cccccaggagctggggaggcctcgg

SEQ ID NO: 979203 - DNA, 25 bp, Homo sapien
cccaggagctggggaggcctcggtc

SEQ ID NO: 979204 - DNA, 25 bp, Homo sapien
aggagctggggaggcctcggtctgt

SEQ ID NO: 979205 - DNA, 25 bp, Homo sapien
ccaggagctggggaggcctcggtct

SEQ ID NO: 979206 - DNA, 25 bp, Homo sapien
ggcgatcaatggtgccggatcgcat

SEQ ID NO: 979207 - DNA, 25 bp, Homo sapien
ggctgcaggcgatcaatggtgccgg

SEQ ID NO: 979208 - DNA, 25 bp, Homo sapien
tgtggccgcaccagccgggctccat

SEQ ID NO: 979209 - DNA, 25 bp, Homo sapien
tgcaggcgatcaatggtgccggatc

SEQ ID NO: 979210 - DNA, 25 bp, Homo sapien
ttcgacccgcctgaggctgggcaga

SEQ ID NO: 979211 - DNA, 25 bp, Homo sapien
gctgggcagaggctgggataatggc

SEQ ID NO: 979212 - DNA, 25 bp, Homo sapien
aggctgggcagaggctgggataatg

SEQ ID NO: 979213 - DNA, 25 bp, Homo sapien
tgaggctgggcagaggctgggataa

SEQ ID NO: 979214 - DNA, 25 bp, Homo sapien
tggccccaggcagtgtaaggcgatc

SEQ ID NO: 979215 - DNA, 25 bp, Homo sapien
cccaggcagtgtaaggcgatctggc

SEQ ID NO: 979216 - DNA, 25 bp, Homo sapien
ccaggcagtgtaaggcgatctggct

SEQ ID NO: 979217 - DNA, 25 bp, Homo sapien
gccccaggcagtgtaaggcgatctg

SEQ ID NO: 979218 - DNA, 25 bp, Homo sapien
aaatgtgctagtgccaaaatcggcc

SEQ ID NO: 979219 - DNA, 25 bp, Homo sapien
tattggcactgcacatgattgctca

SEQ ID NO: 979220 - DNA, 25 bp, Homo sapien
cacatgattgctcagagcggagaga

SEQ ID NO: 979221 - DNA, 25 bp, Homo sapien
tgctcagagcggagagacacaagca

SEQ ID NO: 979222 - DNA, 25 bp, Homo sapien
tcggtaattcactgactgagactgt

SEQ ID NO: 979223 - DNA, 25 bp, Homo sapien
ggcccttcggtaattcactgactga

SEQ ID NO: 979224 - DNA, 25 bp, Homo sapien
aattcactgactgagactgttcaca

SEQ ID NO: 979225 - DNA, 25 bp, Homo sapien
ctgtttatggcccttcggtaattca

SEQ ID NO: 979226 - DNA, 25 bp, Homo sapien
cgaaggctcggcctcggatcagaga

SEQ ID NO: 979227 - DNA, 25 bp, Homo sapien
tcaggccacgatgaggccactagga

SEQ ID NO: 979228 - DNA, 25 bp, Homo sapien
taggacagatttctccgaaggctcg

SEQ ID NO: 979229 - DNA, 25 bp, Homo sapien
actcggtgcccatcggtcgggctca

SEQ ID NO: 979230 - DNA, 25 bp, Homo sapien
gggtgacaggtagagggtgatgcgc

SEQ ID NO: 979231 - DNA, 25 bp, Homo sapien
gtgacaggtagagggtgatgcgcac

SEQ ID NO: 979232 - DNA, 25 bp, Homo sapien
tgggtgacaggtagagggtgatgcg

SEQ ID NO: 979233 - DNA, 25 bp, Homo sapien
ggtgacaggtagagggtgatgcgca

SEQ ID NO: 979234 - DNA, 25 bp, Homo sapien
tcgcaggattttcgccctcaggagc

SEQ ID NO: 979235 - DNA, 25 bp, Homo sapien
gagaatccgccacctggctcgcagg

SEQ ID NO: 979236 - DNA, 25 bp, Homo sapien
ccgtagagctgagtgacccggcccg

SEQ ID NO: 979237 - DNA, 25 bp, Homo sapien
cctcaggagctttgcgaagacgggc

SEQ ID NO: 979238 - DNA, 25 bp, Homo sapien
aagccgtccagccgccgatcttggg

SEQ ID NO: 979239 - DNA, 25 bp, Homo sapien
aggcgccagaggcaagccgtccagc

SEQ ID NO: 979240 - DNA, 25 bp, Homo sapien
cgtccagccgccgatcttggggaag

SEQ ID NO: 979241 - DNA, 25 bp, Homo sapien
cggtgaggcgccagaggcaagccgt

SEQ ID NO: 979242 - DNA, 25 bp, Homo sapien
cacgggaggtctgagagccgctttc

SEQ ID NO: 979243 - DNA, 25 bp, Homo sapien
tgagtggccgcgaagtggaggcaca

SEQ ID NO: 979244 - DNA, 25 bp, Homo sapien
gggttcccgggatgagtggccgcga

SEQ ID NO: 979245 - DNA, 25 bp, Homo sapien
aacggtgtctcattcgcgtgcgccg

SEQ ID NO: 979246 - DNA, 25 bp, Homo sapien
ctccgcgcggagtccacaccagaga

SEQ ID NO: 979247 - DNA, 25 bp, Homo sapien
ccaggctgggcgcacagccgcctct

SEQ ID NO: 979248 - DNA, 25 bp, Homo sapien
tccaggctgggcgcacagccgcctc

SEQ ID NO: 979249 - DNA, 25 bp, Homo sapien
cagctccgcgcggagtccacaccag

SEQ ID NO: 979250 - DNA, 25 bp, Homo sapien
cccatgtcagctctggcgcctctac

SEQ ID NO: 979251 - DNA, 25 bp, Homo sapien
cgcctctaccgaactccctgttttg

SEQ ID NO: 979252 - DNA, 25 bp, Homo sapien
ctgagccgcccctctcgtcgtcacc

SEQ ID NO: 979253 - DNA, 25 bp, Homo sapien
tcctttcccgacagatcagcggggg

SEQ ID NO: 979254 - DNA, 25 bp, Homo sapien
agagaccacgcccatagagtgagcc

SEQ ID NO: 979255 - DNA, 25 bp, Homo sapien
tcagagaccacgcccatagagtgag

SEQ ID NO: 979256 - DNA, 25 bp, Homo sapien
cagagaccacgcccatagagtgagc

SEQ ID NO: 979257 - DNA, 25 bp, Homo sapien
gggctcactgcagtgagcgagactc

SEQ ID NO: 979258 - DNA, 25 bp, Homo sapien
ggaagccctcttcagccctgcccat

SEQ ID NO: 979259 - DNA, 25 bp, Homo sapien
cgagactcgcgaggggaagccctct

SEQ ID NO: 979260 - DNA, 25 bp, Homo sapien
tcactgcagtgagcgagactcgcga

SEQ ID NO: 979261 - DNA, 25 bp, Homo sapien
caaagaaatgcagttcgttgcgccc

SEQ ID NO: 979262 - DNA, 25 bp, Homo sapien
caacgggaggcctaacataaagcat

SEQ ID NO: 979263 - DNA, 25 bp, Homo sapien
ggagcttccagcactaacagaggag

SEQ ID NO: 979264 - DNA, 25 bp, Homo sapien
tccatgcggcaattacaggagcttc

SEQ ID NO: 979265 - DNA, 25 bp, Homo sapien
tagttaatactacccttccagcaag

SEQ ID NO: 979266 - DNA, 25 bp, Homo sapien
tgctaggtaagagtgaagtacacca

SEQ ID NO: 979267 - DNA, 25 bp, Homo sapien
caggtaagcaagttagacagtgcca

SEQ ID NO: 979268 - DNA, 25 bp, Homo sapien
cacagatgctagatggataactcag

SEQ ID NO: 979269 - DNA, 25 bp, Homo sapien
tgagtcgacatttgattagcaggca

SEQ ID NO: 979270 - DNA, 25 bp, Homo sapien
gacttaaaccttgtggaatacagca

SEQ ID NO: 979271 - DNA, 25 bp, Homo sapien
tcccagtgggatgctcaaaaatcgt

SEQ ID NO: 979272 - DNA, 25 bp, Homo sapien
gatttcctcttaacatacgcaggag

SEQ ID NO: 979273 - DNA, 25 bp, Homo sapien
cctggtagtgtgaagggcagcaact

SEQ ID NO: 979274 - DNA, 25 bp, Homo sapien
gggctttgcagtcaccacgtgggtc

SEQ ID NO: 979275 - DNA, 25 bp, Homo sapien
cacgtgggtcgtcttctcaagtcta

SEQ ID NO: 979276 - DNA, 25 bp, Homo sapien
ctcttaagttcagggtagcggtctc

SEQ ID NO: 979277 - DNA, 25 bp, Homo sapien
ttcttacatggctggctccgatgcc

SEQ ID NO: 979278 - DNA, 25 bp, Homo sapien
cagagcggctatttccttcgacagt

SEQ ID NO: 979279 - DNA, 25 bp, Homo sapien
tcgacagttcagtagcacacaggct

SEQ ID NO: 979280 - DNA, 25 bp, Homo sapien
ccacagaagacatagggccacctag

SEQ ID NO: 979281 - DNA, 25 bp, Homo sapien
gaaatcaagatctaaagggtgatat

SEQ ID NO: 979282 - DNA, 25 bp, Homo sapien
accaagaaatcaagatctaaagggt

SEQ ID NO: 979283 - DNA, 25 bp, Homo sapien
cctcaggttgagaaatgaccaagaa

SEQ ID NO: 979284 - DNA, 25 bp, Homo sapien
tcaagatctaaagggtgatatataa

SEQ ID NO: 979285 - DNA, 25 bp, Homo sapien
tcatcttcggaaaagtcagacatag

SEQ ID NO: 979286 - DNA, 25 bp, Homo sapien
tcagacatagagctctccgatgagc

SEQ ID NO: 979287 - DNA, 25 bp, Homo sapien
tccgtggcgtatttctggatgtact

SEQ ID NO: 979288 - DNA, 25 bp, Homo sapien
gatgagctgtccccggtaccctctt

SEQ ID NO: 979289 - DNA, 25 bp, Homo sapien
ggcaaggctgcggaggttcaaactt

SEQ ID NO: 979290 - DNA, 25 bp, Homo sapien
caaggctgcggaggttcaaacttac

SEQ ID NO: 979291 - DNA, 25 bp, Homo sapien
gcgaccccaaaaagctggcaaggct

SEQ ID NO: 979292 - DNA, 25 bp, Homo sapien
ctttggcgaccccaaaaagctggca

SEQ ID NO: 979293 - DNA, 25 bp, Homo sapien
cttgaacaccaggggggacaaagat

SEQ ID NO: 979294 - DNA, 25 bp, Homo sapien
accaggggggacaaagatgacagta

SEQ ID NO: 979295 - DNA, 25 bp, Homo sapien
caggggggacaaagatgacagtaat

SEQ ID NO: 979296 - DNA, 25 bp, Homo sapien
gggggacaaagatgacagtaatcat

SEQ ID NO: 979297 - DNA, 25 bp, Homo sapien
ggagaatcccatagggagacttctt

SEQ ID NO: 979298 - DNA, 25 bp, Homo sapien
taaggagaatcccatagggagactt

SEQ ID NO: 979299 - DNA, 25 bp, Homo sapien
aaggagaatcccatagggagacttc

SEQ ID NO: 979300 - DNA, 25 bp, Homo sapien
gaatcccatagggagacttctttgg

SEQ ID NO: 979301 - DNA, 25 bp, Homo sapien
aaaaccatcgctcaatctgctcagg

SEQ ID NO: 979302 - DNA, 25 bp, Homo sapien
tacataattacggtcagtccaggtc

SEQ ID NO: 979303 - DNA, 25 bp, Homo sapien
taagctgctatacggagacaccact

SEQ ID NO: 979304 - DNA, 25 bp, Homo sapien
tggaaccctaggctgaataagactg

SEQ ID NO: 979305 - DNA, 25 bp, Homo sapien
tcctcctatagagttgcggggactc

SEQ ID NO: 979306 - DNA, 25 bp, Homo sapien
cctcctatagagttgcggggactca

SEQ ID NO: 979307 - DNA, 25 bp, Homo sapien
ttcctcctatagagttgcggggact

SEQ ID NO: 979308 - DNA, 25 bp, Homo sapien
tttcctcctatagagttgcggggac

SEQ ID NO: 979309 - DNA, 25 bp, Homo sapien
cgtcaccattgagaggatctatggg

SEQ ID NO: 979310 - DNA, 25 bp, Homo sapien
ctgcttgtattcttctggtcggtgg

SEQ ID NO: 979311 - DNA, 25 bp, Homo sapien
ggaggtacatggctgcagcgtcacc

SEQ ID NO: 979312 - DNA, 25 bp, Homo sapien
tattcttctggtcggtggaggtaca

SEQ ID NO: 979313 - DNA, 25 bp, Homo sapien
ggaaggactcaaatatattggtaag

SEQ ID NO: 979314 - DNA, 25 bp, Homo sapien
caggaaggactcaaatatattggta

SEQ ID NO: 979315 - DNA, 25 bp, Homo sapien
ctgaggcaggaaggactcaaatata

SEQ ID NO: 979316 - DNA, 25 bp, Homo sapien
ggcaggaaggactcaaatatattgg

SEQ ID NO: 979317 - DNA, 25 bp, Homo sapien
catgggaaatgcaagttcacctaaa

SEQ ID NO: 979318 - DNA, 25 bp, Homo sapien
gatatacctgacattcactttgaag

SEQ ID NO: 979319 - DNA, 25 bp, Homo sapien
gcattcagtagtcaagctgcttacc

SEQ ID NO: 979320 - DNA, 25 bp, Homo sapien
acgagtgtgctctattacatgtgac

SEQ ID NO: 979321 - DNA, 25 bp, Homo sapien
gatgatatctacacacagttagcaa

SEQ ID NO: 979322 - DNA, 25 bp, Homo sapien
cctgtttctggagacaatgctgaag

SEQ ID NO: 979323 - DNA, 25 bp, Homo sapien
taactcctttcttgccaggcataca

SEQ ID NO: 979324 - DNA, 25 bp, Homo sapien
ccagcgttttagaaaagcaggccct

SEQ ID NO: 979325 - DNA, 25 bp, Homo sapien
cttctactacctgtcccccagaagc

SEQ ID NO: 979326 - DNA, 25 bp, Homo sapien
atcccctttctccttctactacctg

SEQ ID NO: 979327 - DNA, 25 bp, Homo sapien
ttctccttctactacctgtccccca

SEQ ID NO: 979328 - DNA, 25 bp, Homo sapien
ctacctgtcccccagaagcccaaca

SEQ ID NO: 979329 - DNA, 25 bp, Homo sapien
agatctctttcccctgaacttttgg

SEQ ID NO: 979330 - DNA, 25 bp, Homo sapien
ctctttcccctgaacttttggtcat

SEQ ID NO: 979331 - DNA, 25 bp, Homo sapien
atagatctctttcccctgaactttt

SEQ ID NO: 979332 - DNA, 25 bp, Homo sapien
tctctttcccctgaacttttggtca

SEQ ID NO: 979333 - DNA, 25 bp, Homo sapien
cagagggccctaaaagatgacagac

SEQ ID NO: 979334 - DNA, 25 bp, Homo sapien
caatcggataggcaggcagaattca

SEQ ID NO: 979335 - DNA, 25 bp, Homo sapien
tataaagagtcctacactgcacaca

SEQ ID NO: 979336 - DNA, 25 bp, Homo sapien
gattttcctcaagggtgtattagac

SEQ ID NO: 979337 - DNA, 25 bp, Homo sapien
caatgctgcacctagtttactgaag

SEQ ID NO: 979338 - DNA, 25 bp, Homo sapien
tcttaatgaagagggccatgcaggc

SEQ ID NO: 979339 - DNA, 25 bp, Homo sapien
tacaattacttgactgagagggtct

SEQ ID NO: 979340 - DNA, 25 bp, Homo sapien
cacctccgaaaagaagtgggatgct

SEQ ID NO: 979341 - DNA, 25 bp, Homo sapien
tggttacggagctagctaagcactg

SEQ ID NO: 979342 - DNA, 25 bp, Homo sapien
tgaagcgcaaatccacaactgagca

SEQ ID NO: 979343 - DNA, 25 bp, Homo sapien
gctgtctttcagagccataccctgg

SEQ ID NO: 979344 - DNA, 25 bp, Homo sapien
ggctcatgtcccacgatccaaaaag

SEQ ID NO: 979345 - DNA, 25 bp, Homo sapien
tcatcgaatctacagcagaggaaag

SEQ ID NO: 979346 - DNA, 25 bp, Homo sapien
gaacttccgatacatgcaacacgga

SEQ ID NO: 979347 - DNA, 25 bp, Homo sapien
gcaatgagtcaactggcttaccaga

SEQ ID NO: 979348 - DNA, 25 bp, Homo sapien
gaactaaccttcaatgccagaggct

SEQ ID NO: 979349 - DNA, 25 bp, Homo sapien
ttgaacggcacaatcaggtggaggc

SEQ ID NO: 979350 - DNA, 25 bp, Homo sapien
tgggaaaggaaactgctctgaggaa

SEQ ID NO: 979351 - DNA, 25 bp, Homo sapien
caagttcaacaagaagcagccatcc

SEQ ID NO: 979352 - DNA, 25 bp, Homo sapien
tatatatacaactgggtgctgtgct

SEQ ID NO: 979353 - DNA, 25 bp, Homo sapien
tttaaacttccacagctaaactgat

SEQ ID NO: 979354 - DNA, 25 bp, Homo sapien
aaaaatattccatggccaaactcac

SEQ ID NO: 979355 - DNA, 25 bp, Homo sapien
gatgatcccctaaaacctcttacta

SEQ ID NO: 979356 - DNA, 25 bp, Homo sapien
tcttactatatcattgctctctcat

SEQ ID NO: 979357 - DNA, 25 bp, Homo sapien
gattaattacatctagacacacagt

SEQ ID NO: 979358 - DNA, 25 bp, Homo sapien
ttaattacatctagacacacagttc

SEQ ID NO: 979359 - DNA, 25 bp, Homo sapien
tgattaattacatctagacacacag

SEQ ID NO: 979360 - DNA, 25 bp, Homo sapien
aattacatctagacacacagttcct

SEQ ID NO: 979361 - DNA, 25 bp, Homo sapien
gttgggatggaaaattttattcatg

SEQ ID NO: 979362 - DNA, 25 bp, Homo sapien
tgggatggaaaattttattcatgaa

SEQ ID NO: 979363 - DNA, 25 bp, Homo sapien
ggatggaaaattttattcatgaatc

SEQ ID NO: 979364 - DNA, 25 bp, Homo sapien
gcttcatcaatgttgggatggaaaa

SEQ ID NO: 979365 - DNA, 25 bp, Homo sapien
gctgcactgtgcacggaacatgaat

SEQ ID NO: 979366 - DNA, 25 bp, Homo sapien
gtctactcattcagggaaacccagt

SEQ ID NO: 979367 - DNA, 25 bp, Homo sapien
cacttactggtatcacttggctgca

SEQ ID NO: 979368 - DNA, 25 bp, Homo sapien
gcaaactgggagaaatgcagcttct

SEQ ID NO: 979369 - DNA, 25 bp, Homo sapien
cagttcactattcttgaggaggtca

SEQ ID NO: 979370 - DNA, 25 bp, Homo sapien
taaagcagagatccattgtcaaagg

SEQ ID NO: 979371 - DNA, 25 bp, Homo sapien
tcagcacctacaccgcaggcattgt

SEQ ID NO: 979372 - DNA, 25 bp, Homo sapien
caagtgaggcgctacagagattgtc

SEQ ID NO: 979373 - DNA, 25 bp, Homo sapien
aaaatgactttatctggccaggcac

SEQ ID NO: 979374 - DNA, 25 bp, Homo sapien
cagggtcatgataggaaaagggaac

SEQ ID NO: 979375 - DNA, 25 bp, Homo sapien
gtaattgtttcagttagggcacagg

SEQ ID NO: 979376 - DNA, 25 bp, Homo sapien
gtataggaaaactgtactgaaccaa

SEQ ID NO: 979377 - DNA, 25 bp, Homo sapien
tccagtgcccctgctaagtacagaa

SEQ ID NO: 979378 - DNA, 25 bp, Homo sapien
caaagtactaaacagggacatgggt

SEQ ID NO: 979379 - DNA, 25 bp, Homo sapien
tctctgaaagactaaggtgcctccc

SEQ ID NO: 979380 - DNA, 25 bp, Homo sapien
catctgagcactagtacagagggca

SEQ ID NO: 979381 - DNA, 25 bp, Homo sapien
gacatttgttcttagacaagctgtg

SEQ ID NO: 979382 - DNA, 25 bp, Homo sapien
aaagccatttacattctggataatg

SEQ ID NO: 979383 - DNA, 25 bp, Homo sapien
tgttcttagacaagctgtgggcagt

SEQ ID NO: 979384 - DNA, 25 bp, Homo sapien
cttgacatttgttcttagacaagct

SEQ ID NO: 979385 - DNA, 25 bp, Homo sapien
tctctgtcctgcgtcttttagcaga

SEQ ID NO: 979386 - DNA, 25 bp, Homo sapien
ccttctctgtcctgcgtcttttagc

SEQ ID NO: 979387 - DNA, 25 bp, Homo sapien
ctgtcctgcgtcttttagcagaagg

SEQ ID NO: 979388 - DNA, 25 bp, Homo sapien
tagcagaagggaattaggtaattta

SEQ ID NO: 979389 - DNA, 25 bp, Homo sapien
cactccaatactcaactgctctaga

SEQ ID NO: 979390 - DNA, 25 bp, Homo sapien
gggtctatacagagttgcacacact

SEQ ID NO: 979391 - DNA, 25 bp, Homo sapien
gctaagtcatgctgaaaaactggtt

SEQ ID NO: 979392 - DNA, 25 bp, Homo sapien
taacaaatctcatgacccataggct

SEQ ID NO: 979393 - DNA, 25 bp, Homo sapien
tcttcttgggtgaggaaccaggcaa

SEQ ID NO: 979394 - DNA, 25 bp, Homo sapien
tctggtaatatagagtctgaggaat

SEQ ID NO: 979395 - DNA, 25 bp, Homo sapien
aggaaccaggcaaggagctcactct

SEQ ID NO: 979396 - DNA, 25 bp, Homo sapien
tcaggagatctaaactcaacaaggg

SEQ ID NO: 979397 - DNA, 25 bp, Homo sapien
catacagcctgctcctagtagaggg

SEQ ID NO: 979398 - DNA, 25 bp, Homo sapien
aagttctatggcagcacgagcttgc

SEQ ID NO: 979399 - DNA, 25 bp, Homo sapien
gcgctcggcctcacatcaagttcta

SEQ ID NO: 979400 - DNA, 25 bp, Homo sapien
tatcatcaaattgcaacccagaggc

SEQ ID NO: 979401 - DNA, 25 bp, Homo sapien
ggttcctaggctgctcttaaagtta

SEQ ID NO: 979402 - DNA, 25 bp, Homo sapien
gcttaggcttatcaaaagtatcccc

SEQ ID NO: 979403 - DNA, 25 bp, Homo sapien
gtataaatgatgacagggttcctag

SEQ ID NO: 979404 - DNA, 25 bp, Homo sapien
caagatctttagtggctataagccc

SEQ ID NO: 979405 - DNA, 25 bp, Homo sapien
acttagctactttatcaccgactgg

SEQ ID NO: 979406 - DNA, 25 bp, Homo sapien
aaacacgtgggttaggcaggtcctg

SEQ ID NO: 979407 - DNA, 25 bp, Homo sapien
gaaagttgcgcgtaaagacagtatc

SEQ ID NO: 979408 - DNA, 25 bp, Homo sapien
gcctgatggctttctagagcaaaag

SEQ ID NO: 979409 - DNA, 25 bp, Homo sapien
gccattaagtacacgtagtatttta

SEQ ID NO: 979410 - DNA, 25 bp, Homo sapien
tcacacctctcctaaaaaacaatgg

SEQ ID NO: 979411 - DNA, 25 bp, Homo sapien
ttctaaattgaggtgctgactcaca

SEQ ID NO: 979412 - DNA, 25 bp, Homo sapien
atgccattaagtacacgtagtattt

SEQ ID NO: 979413 - DNA, 25 bp, Homo sapien
cagtaaagatcttctgtagccttcg

SEQ ID NO: 979414 - DNA, 25 bp, Homo sapien
caggatgccaggtaccccgagtttt

SEQ ID NO: 979415 - DNA, 25 bp, Homo sapien
tagccttcgtcatgtccagcaggat

SEQ ID NO: 979416 - DNA, 25 bp, Homo sapien
tttaatacactggtcatatcaaaca

SEQ ID NO: 979417 - DNA, 25 bp, Homo sapien
tgcaatcatgtaactactgacagcc

SEQ ID NO: 979418 - DNA, 25 bp, Homo sapien
taagttcataacctcccaaggtgtc

SEQ ID NO: 979419 - DNA, 25 bp, Homo sapien
tagaacaaagtacatagacactgca

SEQ ID NO: 979420 - DNA, 25 bp, Homo sapien
ggagagtgtcccaaagataagcata

SEQ ID NO: 979421 - DNA, 25 bp, Homo sapien
tatttcagctaaatctactttccaa

SEQ ID NO: 979422 - DNA, 25 bp, Homo sapien
caagaacagcttgtacaaatatttc

SEQ ID NO: 979423 - DNA, 25 bp, Homo sapien
tagaggaaacaagaacagcttgtac

SEQ ID NO: 979424 - DNA, 25 bp, Homo sapien
tacacatttgtaggcattatcaagt

SEQ ID NO: 979425 - DNA, 25 bp, Homo sapien
ctctggcaattctgaacatgaggct

SEQ ID NO: 979426 - DNA, 25 bp, Homo sapien
gaactctggcaattctgaacatgag

SEQ ID NO: 979427 - DNA, 25 bp, Homo sapien
tctggcaattctgaacatgaggctt

SEQ ID NO: 979428 - DNA, 25 bp, Homo sapien
ttgaactctggcaattctgaacatg

SEQ ID NO: 979429 - DNA, 25 bp, Homo sapien
tcaggtaggtccactctaactttcc

SEQ ID NO: 979430 - DNA, 25 bp, Homo sapien
tatttatcaggtaggtccactctaa

SEQ ID NO: 979431 - DNA, 25 bp, Homo sapien
tgaaagggtatttatcaggtaggtc

SEQ ID NO: 979432 - DNA, 25 bp, Homo sapien
taactttccatactccgccttcata

SEQ ID NO: 979433 - DNA, 25 bp, Homo sapien
tccataaaacttcactacaaattca

SEQ ID NO: 979434 - DNA, 25 bp, Homo sapien
tcctcccaggatcgtaacctcatgt

SEQ ID NO: 979435 - DNA, 25 bp, Homo sapien
gtggtccataaaacttcactacaaa

SEQ ID NO: 979436 - DNA, 25 bp, Homo sapien
cgtaacctcatgtttactctcgatg

SEQ ID NO: 979437 - DNA, 25 bp, Homo sapien
aggaaattacacaggctttacagta

SEQ ID NO: 979438 - DNA, 25 bp, Homo sapien
ggaaattacacaggctttacagtat

SEQ ID NO: 979439 - DNA, 25 bp, Homo sapien
aaaggaaattacacaggctttacag

SEQ ID NO: 979440 - DNA, 25 bp, Homo sapien
taaaggaaattacacaggctttaca

SEQ ID NO: 979441 - DNA, 25 bp, Homo sapien
tacttccccctagctgggcctacag

SEQ ID NO: 979442 - DNA, 25 bp, Homo sapien
ctctacttccccctagctgggccta

SEQ ID NO: 979443 - DNA, 25 bp, Homo sapien
cacctctacttccccctagctgggc

SEQ ID NO: 979444 - DNA, 25 bp, Homo sapien
ttccccctagctgggcctacagcag

SEQ ID NO: 979445 - DNA, 25 bp, Homo sapien
agagagagagaacttctcttaaaaa

SEQ ID NO: 979446 - DNA, 25 bp, Homo sapien
ggcctaaggcaggaagattgtttga

SEQ ID NO: 979447 - DNA, 25 bp, Homo sapien
cctgagagagagagaacttctctta

SEQ ID NO: 979448 - DNA, 25 bp, Homo sapien
tgagagagagagaacttctcttaaa

SEQ ID NO: 979449 - DNA, 25 bp, Homo sapien
gatgcgataaaacgaggttccttcc

SEQ ID NO: 979450 - DNA, 25 bp, Homo sapien
taaaattacgagttgtccttgtgga

SEQ ID NO: 979451 - DNA, 25 bp, Homo sapien
cggagtagtgcagaagattaaacga

SEQ ID NO: 979452 - DNA, 25 bp, Homo sapien
gctatgaatgacactgatctactgc

SEQ ID NO: 979453 - DNA, 25 bp, Homo sapien
gtattttataaagaagatcctccaa

SEQ ID NO: 979454 - DNA, 25 bp, Homo sapien
tgtattttataaagaagatcctcca

SEQ ID NO: 979455 - DNA, 25 bp, Homo sapien
gtgtattttataaagaagatcctcc

SEQ ID NO: 979456 - DNA, 25 bp, Homo sapien
gagatgagtcacactaggaaagctg

SEQ ID NO: 979457 - DNA, 25 bp, Homo sapien
ggcagaagcaagtcgtgtggatttc

SEQ ID NO: 979458 - DNA, 25 bp, Homo sapien
caagtcgtgtggatttctgtgttca

SEQ ID NO: 979459 - DNA, 25 bp, Homo sapien
tgtgttcagacccacctgcttccta

SEQ ID NO: 979460 - DNA, 25 bp, Homo sapien
gagacgaaaccattgcgcacatgag

SEQ ID NO: 979461 - DNA, 25 bp, Homo sapien
ggcggaagacctagacctgcaaatt

SEQ ID NO: 979462 - DNA, 25 bp, Homo sapien
tacctaatcacaggaggctggcaag

SEQ ID NO: 979463 - DNA, 25 bp, Homo sapien
caaacaatgagctgtgcatctgaca

SEQ ID NO: 979464 - DNA, 25 bp, Homo sapien
agtggaacttctattcaaagggctg

SEQ ID NO: 979465 - DNA, 25 bp, Homo sapien
tgcccatgcatctagggaggatatg

SEQ ID NO: 979466 - DNA, 25 bp, Homo sapien
aaacatcccagtacatgtctgttgg

SEQ ID NO: 979467 - DNA, 25 bp, Homo sapien
ttctgtaaatacctctgcccatgca

SEQ ID NO: 979468 - DNA, 25 bp, Homo sapien
actgataggcagtagactggctgga

SEQ ID NO: 979469 - DNA, 25 bp, Homo sapien
aggtaagtactgataggcagtagac

SEQ ID NO: 979470 - DNA, 25 bp, Homo sapien
aaggtgaccaacagcgagactgcac

SEQ ID NO: 979471 - DNA, 25 bp, Homo sapien
gcgagactgcacagcgccacaggga

SEQ ID NO: 979472 - DNA, 25 bp, Homo sapien
tagcctcggctacgtgtcagtggat

SEQ ID NO: 979473 - DNA, 25 bp, Homo sapien
gaaattcgacttccaagagggcaag

SEQ ID NO: 979474 - DNA, 25 bp, Homo sapien
gatggcccctcagagttcaactcga

SEQ ID NO: 979475 - DNA, 25 bp, Homo sapien
gagacctttccgatcacctgaagta

SEQ ID NO: 979476 - DNA, 25 bp, Homo sapien
agttggaagagctgcttaaaggttt

SEQ ID NO: 979477 - DNA, 25 bp, Homo sapien
gttggaagagctgcttaaaggttta

SEQ ID NO: 979478 - DNA, 25 bp, Homo sapien
tgcgtagaactcagaatgtaacttc

SEQ ID NO: 979479 - DNA, 25 bp, Homo sapien
aaaagttcttaagtccattgcgtag

SEQ ID NO: 979480 - DNA, 25 bp, Homo sapien
cacaggagaaagatcataaagaact

SEQ ID NO: 979481 - DNA, 25 bp, Homo sapien
gattatccccaacaaagactgcctg

SEQ ID NO: 979482 - DNA, 25 bp, Homo sapien
aggagagtgacattccccgccccac

SEQ ID NO: 979483 - DNA, 25 bp, Homo sapien
agccacaagcaaacagctgattata

SEQ ID NO: 979484 - DNA, 25 bp, Homo sapien
cttgaaagaggtgggagttggagcc

SEQ ID NO: 979485 - DNA, 25 bp, Homo sapien
gcagcttgaaagaggtgggagttgg

SEQ ID NO: 979486 - DNA, 25 bp, Homo sapien
ggagccacaagcaaacagctgatta

SEQ ID NO: 979487 - DNA, 25 bp, Homo sapien
tgtatgtttcattcgagcccctcaa

SEQ ID NO: 979488 - DNA, 25 bp, Homo sapien
taaagagcctttaactgggtgcagt

SEQ ID NO: 979489 - DNA, 25 bp, Homo sapien
actgagcctcagaagggtaaagagc

SEQ ID NO: 979490 - DNA, 25 bp, Homo sapien
gaacacccgccatgtctagatgcca

SEQ ID NO: 979491 - DNA, 25 bp, Homo sapien
cttttcgtcaaatgacttcagcttt

SEQ ID NO: 979492 - DNA, 25 bp, Homo sapien
ccattaaacagatccgattcaaggg

SEQ ID NO: 979493 - DNA, 25 bp, Homo sapien
ccaggactttaacatcctaaacaca

SEQ ID NO: 979494 - DNA, 25 bp, Homo sapien
agtttaaccggcattataaccagct

SEQ ID NO: 979495 - DNA, 25 bp, Homo sapien
ctgccaaggtgttaacatgcattac

SEQ ID NO: 979496 - DNA, 25 bp, Homo sapien
tgccaaggtgttaacatgcattaca

SEQ ID NO: 979497 - DNA, 25 bp, Homo sapien
gccaaggtgttaacatgcattacat

SEQ ID NO: 979498 - DNA, 25 bp, Homo sapien
actgccaaggtgttaacatgcatta

SEQ ID NO: 979499 - DNA, 25 bp, Homo sapien
gcttttattagacactggcaggcct

SEQ ID NO: 979500 - DNA, 25 bp, Homo sapien
gttggtcaggctcaagtgcccggcc

SEQ ID NO: 979501 - DNA, 25 bp, Homo sapien
tggcaggcctcaaactttcatgtct

SEQ ID NO: 979502 - DNA, 25 bp, Homo sapien
gcacgcacatacagttgattaacag

SEQ ID NO: 979503 - DNA, 25 bp, Homo sapien
cagtaacttatttacaacctgattc

SEQ ID NO: 979504 - DNA, 25 bp, Homo sapien
tgccctcttgctcatctatctcctg

SEQ ID NO: 979505 - DNA, 25 bp, Homo sapien
taatcaagataacctaccaaccgcc

SEQ ID NO: 979506 - DNA, 25 bp, Homo sapien
agtacatatgtacttaacagtaact

SEQ ID NO: 979507 - DNA, 25 bp, Homo sapien
tagagaaatgggcagcaatcaaggc

SEQ ID NO: 979508 - DNA, 25 bp, Homo sapien
actactttaatgcaggagctcgtgg

SEQ ID NO: 979509 - DNA, 25 bp, Homo sapien
caatcaaggcattcaaaggtctacc

SEQ ID NO: 979510 - DNA, 25 bp, Homo sapien
cagcatgacaaacaacacaggtata

SEQ ID NO: 979511 - DNA, 25 bp, Homo sapien
gaagcatcatctgcgaacttcttag

SEQ ID NO: 979512 - DNA, 25 bp, Homo sapien
actccaggagtggtatgcagtaacc

SEQ ID NO: 979513 - DNA, 25 bp, Homo sapien
cacatacagtatgatcaacaggttg

SEQ ID NO: 979514 - DNA, 25 bp, Homo sapien
taaggccaacagttcttaaacagtg

SEQ ID NO: 979515 - DNA, 25 bp, Homo sapien
gggaactgtctaccctttgaacaca

SEQ ID NO: 979516 - DNA, 25 bp, Homo sapien
tacacacagcaatgacctaacacag

SEQ ID NO: 979517 - DNA, 25 bp, Homo sapien
tactcaaaaaggcactacacacagc

SEQ ID NO: 979518 - DNA, 25 bp, Homo sapien
tgaagaccataaagctgtgccaact

SEQ ID NO: 979519 - DNA, 25 bp, Homo sapien
ttaaagtggcatgccctgggccagg

SEQ ID NO: 979520 - DNA, 25 bp, Homo sapien
caggccgttttaatgtaagacaccg

SEQ ID NO: 979521 - DNA, 25 bp, Homo sapien
tgaaaccctaaagcagacaccaacg

SEQ ID NO: 979522 - DNA, 25 bp, Homo sapien
tggtaacctagtcagacctcggtct

SEQ ID NO: 979523 - DNA, 25 bp, Homo sapien
ttgtatataaacacactctcttgtc

SEQ ID NO: 979524 - DNA, 25 bp, Homo sapien
cacttgttcctgtaacaccactcag

SEQ ID NO: 979525 - DNA, 25 bp, Homo sapien
ccctcgaaaacacacttgttcctgt

SEQ ID NO: 979526 - DNA, 25 bp, Homo sapien
tatataaacacactctcttgtcaca

SEQ ID NO: 979527 - DNA, 25 bp, Homo sapien
gcctgcggccttttgcctgcatacg

SEQ ID NO: 979528 - DNA, 25 bp, Homo sapien
ccatcagctgtttggtagctcctcc

SEQ ID NO: 979529 - DNA, 25 bp, Homo sapien
taacagggcggccaatgagcgctga

SEQ ID NO: 979530 - DNA, 25 bp, Homo sapien
gcctgcatacgcttttccaaaacaa

SEQ ID NO: 979531 - DNA, 25 bp, Homo sapien
ggttcacagatgaaaggatcaccag

SEQ ID NO: 979532 - DNA, 25 bp, Homo sapien
ctggttcacagatgaaaggatcacc

SEQ ID NO: 979533 - DNA, 25 bp, Homo sapien
gttcacagatgaaaggatcaccagg

SEQ ID NO: 979534 - DNA, 25 bp, Homo sapien
ttcacagatgaaaggatcaccaggg

SEQ ID NO: 979535 - DNA, 25 bp, Homo sapien
ccaacaaggaaacccgtgtaatctg

SEQ ID NO: 979536 - DNA, 25 bp, Homo sapien
gtgagacgagtaacccccaccaaca

SEQ ID NO: 979537 - DNA, 25 bp, Homo sapien
aggaaacccgtgtaatctgagctgt

SEQ ID NO: 979538 - DNA, 25 bp, Homo sapien
cgtgtaatctgagctgtttgttcct

SEQ ID NO: 979539 - DNA, 25 bp, Homo sapien
ccagctctcagacaatctaaataat

SEQ ID NO: 979540 - DNA, 25 bp, Homo sapien
aatcacgctttaaggtcaccagagc

SEQ ID NO: 979541 - DNA, 25 bp, Homo sapien
aataatcagctggttggaggtggaa

SEQ ID NO: 979542 - DNA, 25 bp, Homo sapien
ctttagggcaaatcacgctttaagg

SEQ ID NO: 979543 - DNA, 25 bp, Homo sapien
atttagccaaacaacttgagttata

SEQ ID NO: 979544 - DNA, 25 bp, Homo sapien
gaatttagccaaacaacttgagtta

SEQ ID NO: 979545 - DNA, 25 bp, Homo sapien
ttagccaaacaacttgagttatata

SEQ ID NO: 979546 - DNA, 25 bp, Homo sapien
aatttagccaaacaacttgagttat

SEQ ID NO: 979547 - DNA, 25 bp, Homo sapien
gagagaaaccctgaaaatgggctcg

SEQ ID NO: 979548 - DNA, 25 bp, Homo sapien
tctcaagaaacggagaaaggcttcc

SEQ ID NO: 979549 - DNA, 25 bp, Homo sapien
aaaaggcgagctgaaaaggctctcg

SEQ ID NO: 979550 - DNA, 25 bp, Homo sapien
gcgactggtcgtgcaaaaagaaaaa

SEQ ID NO: 979551 - DNA, 25 bp, Homo sapien
ccgcctcttgcccggactgggagat

SEQ ID NO: 979552 - DNA, 25 bp, Homo sapien
gcttgaccacgtccgtgtccatccg

SEQ ID NO: 979553 - DNA, 25 bp, Homo sapien
acgtccgtgtccatccgcctcttgc

SEQ ID NO: 979554 - DNA, 25 bp, Homo sapien
tcttgcccggactgggagatgacat

SEQ ID NO: 979555 - DNA, 25 bp, Homo sapien
cgcgccggctcctcggtggaggtgg

SEQ ID NO: 979556 - DNA, 25 bp, Homo sapien
gcgctcctctgcgccgcgcgacgct

SEQ ID NO: 979557 - DNA, 25 bp, Homo sapien
gcacgggggaacaccgggcactgtc

SEQ ID NO: 979558 - DNA, 25 bp, Homo sapien
ctcggcccgtctgtcacgggcccgg

SEQ ID NO: 979559 - DNA, 25 bp, Homo sapien
cagcctccactataagcggacgact

SEQ ID NO: 979560 - DNA, 25 bp, Homo sapien
taagcggacgactcctgctcagtcg

SEQ ID NO: 979561 - DNA, 25 bp, Homo sapien
ctagcagcctccactataagcggac

SEQ ID NO: 979562 - DNA, 25 bp, Homo sapien
ccactataagcggacgactcctgct

SEQ ID NO: 979563 - DNA, 25 bp, Homo sapien
caaagaaatctgtaatcaagagttg

SEQ ID NO: 979564 - DNA, 25 bp, Homo sapien
tgtaaacactgcactcagaccagcc

SEQ ID NO: 979565 - DNA, 25 bp, Homo sapien
gaaatctgtaatcaagagttgtaaa

SEQ ID NO: 979566 - DNA, 25 bp, Homo sapien
aagaaatctgtaatcaagagttgta

SEQ ID NO: 979567 - DNA, 25 bp, Homo sapien
gtgcttcccgcgtagtgagggcagt

SEQ ID NO: 979568 - DNA, 25 bp, Homo sapien
ctcagtcttgcagtgcttcccgcgt

SEQ ID NO: 979569 - DNA, 25 bp, Homo sapien
gggcagtgccggctgcatccttctg

SEQ ID NO: 979570 - DNA, 25 bp, Homo sapien
gcagtgccggctgcatccttctgtg

SEQ ID NO: 979571 - DNA, 25 bp, Homo sapien
gccagaaagggaactgcctctgagt

SEQ ID NO: 979572 - DNA, 25 bp, Homo sapien
aagggaactgcctctgagtcttgta

SEQ ID NO: 979573 - DNA, 25 bp, Homo sapien
cagaaagggaactgcctctgagtct

SEQ ID NO: 979574 - DNA, 25 bp, Homo sapien
aaagggaactgcctctgagtcttgt

SEQ ID NO: 979575 - DNA, 25 bp, Homo sapien
aaggtggtcgccattatacttcccg

SEQ ID NO: 979576 - DNA, 25 bp, Homo sapien
ttctcctaggagttatgactgccct

SEQ ID NO: 979577 - DNA, 25 bp, Homo sapien
tgaagtgcagtgaaacgctctcggc

SEQ ID NO: 979578 - DNA, 25 bp, Homo sapien
tgactgccctgtaatgagattgtgt

SEQ ID NO: 979579 - DNA, 25 bp, Homo sapien
gctgaaatgggtggtcaggtcctta

SEQ ID NO: 979580 - DNA, 25 bp, Homo sapien
ctgctccacattgaagatgctgaaa

SEQ ID NO: 979581 - DNA, 25 bp, Homo sapien
gaagagtcctcagaacactgctcca

SEQ ID NO: 979582 - DNA, 25 bp, Homo sapien
ggtccttagtcttccttctagtctg

SEQ ID NO: 979583 - DNA, 25 bp, Homo sapien
cagaaccatgcttgctgcccttacc

SEQ ID NO: 979584 - DNA, 25 bp, Homo sapien
acagaaccatgcttgctgcccttac

SEQ ID NO: 979585 - DNA, 25 bp, Homo sapien
acactcctttaacagaaccatgctt

SEQ ID NO: 979586 - DNA, 25 bp, Homo sapien
tgtcagctgaccgaaaggaactcag

SEQ ID NO: 979587 - DNA, 25 bp, Homo sapien
ccagaacaggaaaaacttagtgtca

SEQ ID NO: 979588 - DNA, 25 bp, Homo sapien
aaaggaaacgggtctctctcagcca

SEQ ID NO: 979589 - DNA, 25 bp, Homo sapien
gggctccttatgattaacccagaac

SEQ ID NO: 979590 - DNA, 25 bp, Homo sapien
cagcatgagcacagagattcccact

SEQ ID NO: 979591 - DNA, 25 bp, Homo sapien
gagattcccactgccgaaatattcg

SEQ ID NO: 979592 - DNA, 25 bp, Homo sapien
ccactgccgaaatattcggaatact

SEQ ID NO: 979593 - DNA, 25 bp, Homo sapien
gaaatattcggaatactttccttga

SEQ ID NO: 979594 - DNA, 25 bp, Homo sapien
tagtgattacgttcttttatagaga

SEQ ID NO: 979595 - DNA, 25 bp, Homo sapien
tattagtgattacgttcttttatag

SEQ ID NO: 979596 - DNA, 25 bp, Homo sapien
agcttattattagtgattacgttct

SEQ ID NO: 979597 - DNA, 25 bp, Homo sapien
gcttattattagtgattacgttctt

SEQ ID NO: 979598 - DNA, 25 bp, Homo sapien
aacagagttgaatgacccctatgag

SEQ ID NO: 979599 - DNA, 25 bp, Homo sapien
gaagagcaagtattccacgcagaaa

SEQ ID NO: 979600 - DNA, 25 bp, Homo sapien
taataataggaagaatcgcagtgcc

SEQ ID NO: 979601 - DNA, 25 bp, Homo sapien
tacttaatgtgatgcctagctgagg

SEQ ID NO: 979602 - DNA, 25 bp, Homo sapien
tatagttccctccagtggaatcctg

SEQ ID NO: 979603 - DNA, 25 bp, Homo sapien
gaatccagggccaattatgaggcca

SEQ ID NO: 979604 - DNA, 25 bp, Homo sapien
aagctttctagcttcgtcacagcag

SEQ ID NO: 979605 - DNA, 25 bp, Homo sapien
cagcagctgtcagaaggttaagaca

SEQ ID NO: 979606 - DNA, 25 bp, Homo sapien
ttatagactacgatcagaaattgtt

SEQ ID NO: 979607 - DNA, 25 bp, Homo sapien
atagactacgatcagaaattgttac

SEQ ID NO: 979608 - DNA, 25 bp, Homo sapien
tatagactacgatcagaaattgtta

SEQ ID NO: 979609 - DNA, 25 bp, Homo sapien
cgtactccttttctacttggagtca

SEQ ID NO: 979610 - DNA, 25 bp, Homo sapien
tactccttttctacttggagtcact

SEQ ID NO: 979611 - DNA, 25 bp, Homo sapien
ccttttctacttggagtcactttat

SEQ ID NO: 979612 - DNA, 25 bp, Homo sapien
ctccttttctacttggagtcacttt

SEQ ID NO: 979613 - DNA, 25 bp, Homo sapien
ctacagaaagacgaaccggttctat

SEQ ID NO: 979614 - DNA, 25 bp, Homo sapien
aagacgaaccggttctatgcctaat

SEQ ID NO: 979615 - DNA, 25 bp, Homo sapien
cagaaagacgaaccggttctatgcc

SEQ ID NO: 979616 - DNA, 25 bp, Homo sapien
gacgaaccggttctatgcctaatcc

SEQ ID NO: 979617 - DNA, 25 bp, Homo sapien
caagtgtgatattcacccaagggca

SEQ ID NO: 979618 - DNA, 25 bp, Homo sapien
catggagtccgtttcagctggctgg

SEQ ID NO: 979619 - DNA, 25 bp, Homo sapien
tttgtgcgccaagaggatggtcagc

SEQ ID NO: 979620 - DNA, 25 bp, Homo sapien
caagggcaccagtctctatgctgag

SEQ ID NO: 979621 - DNA, 25 bp, Homo sapien
tcgcttggctttccgcagagggcta

SEQ ID NO: 979622 - DNA, 25 bp, Homo sapien
ccatgcttcgggtcactgggcgagt

SEQ ID NO: 979623 - DNA, 25 bp, Homo sapien
acaatgggaccagggctcttttcag

SEQ ID NO: 979624 - DNA, 25 bp, Homo sapien
tctggctcaggacggtcaacaggac

SEQ ID NO: 979625 - DNA, 25 bp, Homo sapien
taagcgctctggtcgcccctcaagg

SEQ ID NO: 979626 - DNA, 25 bp, Homo sapien
ctggctccgggtcatcatcctccga

SEQ ID NO: 979627 - DNA, 25 bp, Homo sapien
ttcaggcaccagaggtaagcgctct

SEQ ID NO: 979628 - DNA, 25 bp, Homo sapien
ccgaggagattcaggcaccagaggt

SEQ ID NO: 979629 - DNA, 25 bp, Homo sapien
caggccaaaggatgcatccaggtca

SEQ ID NO: 979630 - DNA, 25 bp, Homo sapien
catgttatcagggagagctgcatgg

SEQ ID NO: 979631 - DNA, 25 bp, Homo sapien
catacattgcgaacatgttatcagg

SEQ ID NO: 979632 - DNA, 25 bp, Homo sapien
accttcctcatacattgcgaacatg

SEQ ID NO: 979633 - DNA, 25 bp, Homo sapien
ttatcagggagagctgcatggattc

SEQ ID NO: 979634 - DNA, 25 bp, Homo sapien
gcaagtgtaggagaagactgatctt

SEQ ID NO: 979635 - DNA, 25 bp, Homo sapien
cagagagaatacaggcagtgacgtg

SEQ ID NO: 979636 - DNA, 25 bp, Homo sapien
gacgtggacttggatgtctgagcct

SEQ ID NO: 979637 - DNA, 25 bp, Homo sapien
tcatcagttcggtgatcaagttcat

SEQ ID NO: 979638 - DNA, 25 bp, Homo sapien
tccaggggcaacatcccaaatcggt

SEQ ID NO: 979639 - DNA, 25 bp, Homo sapien
gaaaacgatctaggaattcactaac

SEQ ID NO: 979640 - DNA, 25 bp, Homo sapien
cctccggccttagggaaggaagctg

SEQ ID NO: 979641 - DNA, 25 bp, Homo sapien
gtgacaaaggctttgaaaacgatct

SEQ ID NO: 979642 - DNA, 25 bp, Homo sapien
gggctgtaatgatactactgagacc

SEQ ID NO: 979643 - DNA, 25 bp, Homo sapien
aattgatgagctatttgatggtgtc

SEQ ID NO: 979644 - DNA, 25 bp, Homo sapien
gatggtgtcaggaaattattgtttt

SEQ ID NO: 979645 - DNA, 25 bp, Homo sapien
tagccaacctagaaacccctgtctc

SEQ ID NO: 979646 - DNA, 25 bp, Homo sapien
tgtgagctaagaatgaaaaaaatgg

SEQ ID NO: 979647 - DNA, 25 bp, Homo sapien
tgagctaagaatgaaaaaaatggca

SEQ ID NO: 979648 - DNA, 25 bp, Homo sapien
gtgagctaagaatgaaaaaaatggc

SEQ ID NO: 979649 - DNA, 25 bp, Homo sapien
gagctaagaatgaaaaaaatggcat

SEQ ID NO: 979650 - DNA, 25 bp, Homo sapien
ctgagattacaggcgtaagtcacca

SEQ ID NO: 979651 - DNA, 25 bp, Homo sapien
gagattacaggcgtaagtcaccacg

SEQ ID NO: 979652 - DNA, 25 bp, Homo sapien
gctgatctttaactcttggcctcag

SEQ ID NO: 979653 - DNA, 25 bp, Homo sapien
gattacaggcgtaagtcaccacgcc

SEQ ID NO: 979654 - DNA, 25 bp, Homo sapien
gatgttttaactcttgtttccatct

SEQ ID NO: 979655 - DNA, 25 bp, Homo sapien
gtagccttgaaaaccgacatcccag

SEQ ID NO: 979656 - DNA, 25 bp, Homo sapien
ccttgaaaaccgacatcccagcggg

SEQ ID NO: 979657 - DNA, 25 bp, Homo sapien
agcccattttgtgatgttttaactc

SEQ ID NO: 979658 - DNA, 25 bp, Homo sapien
cccactgaagacatcctacacagat

SEQ ID NO: 979659 - DNA, 25 bp, Homo sapien
tagaagattttcagatgcccttcct

SEQ ID NO: 979660 - DNA, 25 bp, Homo sapien
aacatgaatttgaggccaggtacag

SEQ ID NO: 979661 - DNA, 25 bp, Homo sapien
catcctacacagattgagacaagaa

SEQ ID NO: 979662 - DNA, 25 bp, Homo sapien
gagccagccctgtgaaactattaca

SEQ ID NO: 979663 - DNA, 25 bp, Homo sapien
aacttagccaggtggtagcggcatg

SEQ ID NO: 979664 - DNA, 25 bp, Homo sapien
aaaaatctcgtagcttctcatcaca

SEQ ID NO: 979665 - DNA, 25 bp, Homo sapien
ggtttggccactgtctacactttag

SEQ ID NO: 979666 - DNA, 25 bp, Homo sapien
aaagaaccaaaccaagggatcatat

SEQ ID NO: 979667 - DNA, 25 bp, Homo sapien
accaaaccaagggatcatataattg

SEQ ID NO: 979668 - DNA, 25 bp, Homo sapien
taaagtgaaataactgagtgttctt

SEQ ID NO: 979669 - DNA, 25 bp, Homo sapien
tgaaaggttatatctaagatccatg

SEQ ID NO: 979670 - DNA, 25 bp, Homo sapien
cagtagttcctgattcaagggagag

SEQ ID NO: 979671 - DNA, 25 bp, Homo sapien
gattatggttgggagcaactgtgcc

SEQ ID NO: 979672 - DNA, 25 bp, Homo sapien
tagacaggaaataggaggttggacc

SEQ ID NO: 979673 - DNA, 25 bp, Homo sapien
gcagcctgtggctgtaatgacaccc

SEQ ID NO: 979674 - DNA, 25 bp, Homo sapien
tgttagtactccctctacaggaaac

SEQ ID NO: 979675 - DNA, 25 bp, Homo sapien
cattattgctgttagtactccctct

SEQ ID NO: 979676 - DNA, 25 bp, Homo sapien
cacttggggtcctgtgagtcttctt

SEQ ID NO: 979677 - DNA, 25 bp, Homo sapien
tgtttaacttccaccattattgctg

SEQ ID NO: 979678 - DNA, 25 bp, Homo sapien
ttcagctcagcacatcgttgcttat

SEQ ID NO: 979679 - DNA, 25 bp, Homo sapien
ttcttcagctcagcacatcgttgct

SEQ ID NO: 979680 - DNA, 25 bp, Homo sapien
agaaacagaacttctcatgggcagt

SEQ ID NO: 979681 - DNA, 25 bp, Homo sapien
agaacttctcatgggcagtacacaa

SEQ ID NO: 979682 - DNA, 25 bp, Homo sapien
cacataaacagcaacaccttaaaaa

SEQ ID NO: 979683 - DNA, 25 bp, Homo sapien
tccacataaacagcaacaccttaaa

SEQ ID NO: 979684 - DNA, 25 bp, Homo sapien
ccacataaacagcaacaccttaaaa

SEQ ID NO: 979685 - DNA, 25 bp, Homo sapien
tgtcaaagtcaaaagctggttgtaa

SEQ ID NO: 979686 - DNA, 25 bp, Homo sapien
gcacagacgagtggagacagctcaa

SEQ ID NO: 979687 - DNA, 25 bp, Homo sapien
tgagcatatcacattccactgtgac

SEQ ID NO: 979688 - DNA, 25 bp, Homo sapien
cagagaaaagcttgacagctagagc

SEQ ID NO: 979689 - DNA, 25 bp, Homo sapien
gcttgacagctagagcacttgagca

SEQ ID NO: 979690 - DNA, 25 bp, Homo sapien
aagataagccgagaacaacttgttc

SEQ ID NO: 979691 - DNA, 25 bp, Homo sapien
ggttatgggacatgtcaaaaggcca

SEQ ID NO: 979692 - DNA, 25 bp, Homo sapien
gtggcatcccactagctatgagttc

SEQ ID NO: 979693 - DNA, 25 bp, Homo sapien
ctgactaaataaggaacaactggag

SEQ ID NO: 979694 - DNA, 25 bp, Homo sapien
tcttttgagacaattttcctagttg

SEQ ID NO: 979695 - DNA, 25 bp, Homo sapien
caaccttaattgcagtctgtgagag

SEQ ID NO: 979696 - DNA, 25 bp, Homo sapien
cagtgccctgaccaaccttaattgc

SEQ ID NO: 979697 - DNA, 25 bp, Homo sapien
gacaattttcctagttgagccttga

SEQ ID NO: 979698 - DNA, 25 bp, Homo sapien
agcatcacagtaagtggtgtaatac

SEQ ID NO: 979699 - DNA, 25 bp, Homo sapien
agaaaaggttagataacctcaactg

SEQ ID NO: 979700 - DNA, 25 bp, Homo sapien
cctcaactgtccctctgagtgataa

SEQ ID NO: 979701 - DNA, 25 bp, Homo sapien
taggatgctgactttcctatataat

SEQ ID NO: 979702 - DNA, 25 bp, Homo sapien
tctagaagcaggcagaaagtgcaat

SEQ ID NO: 979703 - DNA, 25 bp, Homo sapien
tagaagcaggcagaaagtgcaattc

SEQ ID NO: 979704 - DNA, 25 bp, Homo sapien
gaagcaggcagaaagtgcaattcac

SEQ ID NO: 979705 - DNA, 25 bp, Homo sapien
aattctagaagcaggcagaaagtgc

SEQ ID NO: 979706 - DNA, 25 bp, Homo sapien
tctttgcttgtagattccaatgaag

SEQ ID NO: 979707 - DNA, 25 bp, Homo sapien
tccaatgaaggttgttccgcttggg

SEQ ID NO: 979708 - DNA, 25 bp, Homo sapien
tttccactctgctaaagaaggcttc

SEQ ID NO: 979709 - DNA, 25 bp, Homo sapien
ccgcttggggtgatccattaactga

SEQ ID NO: 979710 - DNA, 25 bp, Homo sapien
ctgggatgtggcagacgtgtccttc

SEQ ID NO: 979711 - DNA, 25 bp, Homo sapien
tcatagagagcctcaagcgggtgtg

SEQ ID NO: 979712 - DNA, 25 bp, Homo sapien
atagagagcctcaagcgggtgtggt

SEQ ID NO: 979713 - DNA, 25 bp, Homo sapien
ttcatagagagcctcaagcgggtgt

SEQ ID NO: 979714 - DNA, 25 bp, Homo sapien
catagagagcctcaagcgggtgtgg

SEQ ID NO: 979715 - DNA, 25 bp, Homo sapien
taactacattccaatctaactggtt

SEQ ID NO: 979716 - DNA, 25 bp, Homo sapien
agagttaataagcttctccagagag

SEQ ID NO: 979717 - DNA, 25 bp, Homo sapien
gagccaaaggggtccacggcacaaa

SEQ ID NO: 979718 - DNA, 25 bp, Homo sapien
taaaaagcattgttactgcgtaact

SEQ ID NO: 979719 - DNA, 25 bp, Homo sapien
taatgtccgatgacaaaatttcggc

SEQ ID NO: 979720 - DNA, 25 bp, Homo sapien
gatgacaaaatttcggctgcggttg

SEQ ID NO: 979721 - DNA, 25 bp, Homo sapien
caaaatttcggctgcggttgggaat

SEQ ID NO: 979722 - DNA, 25 bp, Homo sapien
ccaaaaataatgtccgatgacaaaa

SEQ ID NO: 979723 - DNA, 25 bp, Homo sapien
tcaaacatagtaaccagagtttctt

SEQ ID NO: 979724 - DNA, 25 bp, Homo sapien
cactgcccgagtcgccgaccgaggg

SEQ ID NO: 979725 - DNA, 25 bp, Homo sapien
gggaagatcaaagccgatcaaacat

SEQ ID NO: 979726 - DNA, 25 bp, Homo sapien
gccttcttcaatcttccaacgccgg

SEQ ID NO: 979727 - DNA, 25 bp, Homo sapien
tccctcttccggggcaatcccctca

SEQ ID NO: 979728 - DNA, 25 bp, Homo sapien
ccctcttccggggcaatcccctcat

SEQ ID NO: 979729 - DNA, 25 bp, Homo sapien
tcaacccctacggcaaacgcttgtc

SEQ ID NO: 979730 - DNA, 25 bp, Homo sapien
ctacggcaaacgcttgtccctcaca

SEQ ID NO: 979731 - DNA, 25 bp, Homo sapien
gagcgaactactgcaccccaattct

SEQ ID NO: 979732 - DNA, 25 bp, Homo sapien
tcccttctggggagcgaactactgc

SEQ ID NO: 979733 - DNA, 25 bp, Homo sapien
gttgcttccccgagagtttgaaggc

SEQ ID NO: 979734 - DNA, 25 bp, Homo sapien
tccccgagagtttgaaggctccgga

SEQ ID NO: 979735 - DNA, 25 bp, Homo sapien
ttggtccgctgccgagttgcttccc

SEQ ID NO: 979736 - DNA, 25 bp, Homo sapien
gctgccgagttgcttccccgagagt

SEQ ID NO: 979737 - DNA, 25 bp, Homo sapien
aggcactggccgtccccgggagtct

SEQ ID NO: 979738 - DNA, 25 bp, Homo sapien
gacactcggtcttcgattggcccgc

SEQ ID NO: 979739 - DNA, 25 bp, Homo sapien
ggagtctttccgcaggcgcggcctc

SEQ ID NO: 979740 - DNA, 25 bp, Homo sapien
ttcctgaatcctaaccaagactgag

SEQ ID NO: 979741 - DNA, 25 bp, Homo sapien
taagtcattggtctctggtgggacc

SEQ ID NO: 979742 - DNA, 25 bp, Homo sapien
aagaaaacgactgaccattggctgc

SEQ ID NO: 979743 - DNA, 25 bp, Homo sapien
cattggctgcctttcaccaaggcgg

SEQ ID NO: 979744 - DNA, 25 bp, Homo sapien
ccaggaaggaggctccgctggttcc

SEQ ID NO: 979745 - DNA, 25 bp, Homo sapien
ttcaaccacgtgatggcagtggaag

SEQ ID NO: 979746 - DNA, 25 bp, Homo sapien
tcaaccacgtgatggcagtggaagc

SEQ ID NO: 979747 - DNA, 25 bp, Homo sapien
tatacctaatgactctattccttgg

SEQ ID NO: 979748 - DNA, 25 bp, Homo sapien
tgtacttagttcctacagtttgagg

SEQ ID NO: 979749 - DNA, 25 bp, Homo sapien
gaattagctaaccaagtcctgctcc

SEQ ID NO: 979750 - DNA, 25 bp, Homo sapien
ggttcaaaaacagggtctatattca

SEQ ID NO: 979751 - DNA, 25 bp, Homo sapien
gtggttttgaacactctgtatcatt

SEQ ID NO: 979752 - DNA, 25 bp, Homo sapien
cactttcaatggttctatagtcttc

SEQ ID NO: 979753 - DNA, 25 bp, Homo sapien
tattgggcaagcttgtagaacacat

SEQ ID NO: 979754 - DNA, 25 bp, Homo sapien
taaagtaagcagtccttgtcttcct

SEQ ID NO: 979755 - DNA, 25 bp, Homo sapien
ccttgtccgaaacttcttagaatca

SEQ ID NO: 979756 - DNA, 25 bp, Homo sapien
aaattgaaaaagactgctgggcatg

SEQ ID NO: 979757 - DNA, 25 bp, Homo sapien
tttcaagataggcacattcacatcg

SEQ ID NO: 979758 - DNA, 25 bp, Homo sapien
gaaaaacaatctctggctatagtta

SEQ ID NO: 979759 - DNA, 25 bp, Homo sapien
agggtggagaatggctggaacccgg

SEQ ID NO: 979760 - DNA, 25 bp, Homo sapien
gtggcccgtaccgtagtcccagcta

SEQ ID NO: 979761 - DNA, 25 bp, Homo sapien
ggtggagaatggctggaacccggga

SEQ ID NO: 979762 - DNA, 25 bp, Homo sapien
ctgagggtggagaatggctggaacc

SEQ ID NO: 979763 - DNA, 25 bp, Homo sapien
aatggctgattggtgcagtcaaaac

SEQ ID NO: 979764 - DNA, 25 bp, Homo sapien
ggttcatggcacctcaaaacagtta

SEQ ID NO: 979765 - DNA, 25 bp, Homo sapien
caattcggctaactgttgaaagagg

SEQ ID NO: 979766 - DNA, 25 bp, Homo sapien
catagtggcctgtacatatagtccc

SEQ ID NO: 979767 - DNA, 25 bp, Homo sapien
tagtaattggatacaaggtcttggg

SEQ ID NO: 979768 - DNA, 25 bp, Homo sapien
ctcgggctgtggtctttggctatca

SEQ ID NO: 979769 - DNA, 25 bp, Homo sapien
catcctctgggcttgttaacttggc

SEQ ID NO: 979770 - DNA, 25 bp, Homo sapien
ccgtctgctttaatgtgcatggtgc

SEQ ID NO: 979771 - DNA, 25 bp, Homo sapien
taggaaagtttatgcctgctgcttc

SEQ ID NO: 979772 - DNA, 25 bp, Homo sapien
gtatacctataaccagcactcggaa

SEQ ID NO: 979773 - DNA, 25 bp, Homo sapien
tgaggtactcccagccgtcttacta

SEQ ID NO: 979774 - DNA, 25 bp, Homo sapien
gtcatcaggcgtttcggtataccta

SEQ ID NO: 979775 - DNA, 25 bp, Homo sapien
tcattagattcagccaaaagcgacc

SEQ ID NO: 979776 - DNA, 25 bp, Homo sapien
tctctagtccggtgttacgaacaga

SEQ ID NO: 979777 - DNA, 25 bp, Homo sapien
cacacagcttggcatgtaggaaagg

SEQ ID NO: 979778 - DNA, 25 bp, Homo sapien
tctaggacttccgtgtgcgttgcca

SEQ ID NO: 979779 - DNA, 25 bp, Homo sapien
gggccctgcttagtcagtgtacagg

SEQ ID NO: 979780 - DNA, 25 bp, Homo sapien
taagggccctgcttagtcagtgtac

SEQ ID NO: 979781 - DNA, 25 bp, Homo sapien
ctgcttagtcagtgtacagggtgga

SEQ ID NO: 979782 - DNA, 25 bp, Homo sapien
ttttaagggccctgcttagtcagtg

SEQ ID NO: 979783 - DNA, 25 bp, Homo sapien
cacctgccaatgacgaatttcatgg

SEQ ID NO: 979784 - DNA, 25 bp, Homo sapien
gcacctgccaatgacgaatttcatg

SEQ ID NO: 979785 - DNA, 25 bp, Homo sapien
gccaatgacgaatttcatggaagaa

SEQ ID NO: 979786 - DNA, 25 bp, Homo sapien
cctgccaatgacgaatttcatggaa

SEQ ID NO: 979787 - DNA, 25 bp, Homo sapien
cctgttaaatagtgtggacgtcctt

SEQ ID NO: 979788 - DNA, 25 bp, Homo sapien
tcctacagggtatgcttgggccata

SEQ ID NO: 979789 - DNA, 25 bp, Homo sapien
tgcatgccatatgatcaggacagct

SEQ ID NO: 979790 - DNA, 25 bp, Homo sapien
gcctagctttgctcttcctacaggg

SEQ ID NO: 979791 - DNA, 25 bp, Homo sapien
tcagcaagggagcaactgtcgggca

SEQ ID NO: 979792 - DNA, 25 bp, Homo sapien
agacatcagcaagggagcaactgtc

SEQ ID NO: 979793 - DNA, 25 bp, Homo sapien
aagggagcaactgtcgggcagccca

SEQ ID NO: 979794 - DNA, 25 bp, Homo sapien
cacaaagacatcagcaagggagcaa

SEQ ID NO: 979795 - DNA, 25 bp, Homo sapien
tggatgctgttactgccaccaggcc

SEQ ID NO: 979796 - DNA, 25 bp, Homo sapien
taagagtccttccacatcgaccagg

SEQ ID NO: 979797 - DNA, 25 bp, Homo sapien
tggcataacacactcctggtgaagc

SEQ ID NO: 979798 - DNA, 25 bp, Homo sapien
catgaggactggaaacgtctctgcc

SEQ ID NO: 979799 - DNA, 25 bp, Homo sapien
accagcaacaacaggtttcaaagtc

SEQ ID NO: 979800 - DNA, 25 bp, Homo sapien
ccttctctcagacaggcagccctga

SEQ ID NO: 979801 - DNA, 25 bp, Homo sapien
gctgtgtgtaaccagcaacaacagg

SEQ ID NO: 979802 - DNA, 25 bp, Homo sapien
tgttcctcgctgtgtgtaaccagca

SEQ ID NO: 979803 - DNA, 25 bp, Homo sapien
ttcacctgataaattcaggacagct

SEQ ID NO: 979804 - DNA, 25 bp, Homo sapien
ctgattcacctgataaattcaggac

SEQ ID NO: 979805 - DNA, 25 bp, Homo sapien
tttcctgattcacctgataaattca

SEQ ID NO: 979806 - DNA, 25 bp, Homo sapien
gcctctttcctgattcacctgataa

SEQ ID NO: 979807 - DNA, 25 bp, Homo sapien
cttttggcgaaaaactgccattaag

SEQ ID NO: 979808 - DNA, 25 bp, Homo sapien
gatctctggtaatctgcccaaattg

SEQ ID NO: 979809 - DNA, 25 bp, Homo sapien
tgatctctggtaatctgcccaaatt

SEQ ID NO: 979810 - DNA, 25 bp, Homo sapien
tctctggtaatctgcccaaattggc

SEQ ID NO: 979811 - DNA, 25 bp, Homo sapien
tctggtaatctgcccaaattggcct

SEQ ID NO: 979812 - DNA, 25 bp, Homo sapien
ttcccagggtgctcttctcaccctt

SEQ ID NO: 979813 - DNA, 25 bp, Homo sapien
ctcgctgccgttacagggggctttt

SEQ ID NO: 979814 - DNA, 25 bp, Homo sapien
gccctcgctgccgttacagggggct

SEQ ID NO: 979815 - DNA, 25 bp, Homo sapien
caggctgtctcctcaacaccatctc

SEQ ID NO: 979816 - DNA, 25 bp, Homo sapien
ccttgtgaagacgtttgatcctgca

SEQ ID NO: 979817 - DNA, 25 bp, Homo sapien
cttcctacagggagtattgcctctg

SEQ ID NO: 979818 - DNA, 25 bp, Homo sapien
aaattggactcagcttgtgggtgga

SEQ ID NO: 979819 - DNA, 25 bp, Homo sapien
ggtttctgtaggaccgtgcacttca

SEQ ID NO: 979820 - DNA, 25 bp, Homo sapien
caggaactcccacgggctcttagag

SEQ ID NO: 979821 - DNA, 25 bp, Homo sapien
cacttccgcctgcagttgggcatgg

SEQ ID NO: 979822 - DNA, 25 bp, Homo sapien
aggttgtcgccatttcacttccgcc

SEQ ID NO: 979823 - DNA, 25 bp, Homo sapien
tcttagagtctctccaggttgtcgc

SEQ ID NO: 979824 - DNA, 25 bp, Homo sapien
tttggagacaaactgcgtccctgcc

SEQ ID NO: 979825 - DNA, 25 bp, Homo sapien
ttttgcagacggagaacacggatgc

SEQ ID NO: 979826 - DNA, 25 bp, Homo sapien
gcaaacctaagtgaccaccacaggg

SEQ ID NO: 979827 - DNA, 25 bp, Homo sapien
tcagcccgttttcgcctttggagac

SEQ ID NO: 979828 - DNA, 25 bp, Homo sapien
atgggggcagccgcggagaggctgg

SEQ ID NO: 979829 - DNA, 25 bp, Homo sapien
catgggggcagccgcggagaggctg

SEQ ID NO: 979830 - DNA, 25 bp, Homo sapien
gccagttcctgaacagccacgggga

SEQ ID NO: 979831 - DNA, 25 bp, Homo sapien
ctgcctggtccaggcgcacaacggc

SEQ ID NO: 979832 - DNA, 25 bp, Homo sapien
cctgaacagccacggggaccggtag

SEQ ID NO: 979833 - DNA, 25 bp, Homo sapien
ctggtccaggcgcacaacggcagcg

SEQ ID NO: 979834 - DNA, 25 bp, Homo sapien
gcctgccgtcttctcacgggtccca

SEQ ID NO: 979835 - DNA, 25 bp, Homo sapien
tgccgtcttctcacgggtcccaggc

SEQ ID NO: 979836 - DNA, 25 bp, Homo sapien
cctcggcctgccgtcttctcacggg

SEQ ID NO: 979837 - DNA, 25 bp, Homo sapien
agctccagggaggcgccggcctcgg

SEQ ID NO: 979838 - DNA, 25 bp, Homo sapien
ggcacccaggcactatgggctgagg

SEQ ID NO: 979839 - DNA, 25 bp, Homo sapien
tggccgcttggcaaacacctcacag

SEQ ID NO: 979840 - DNA, 25 bp, Homo sapien
agtccaccgatcaagggctgtgggc

SEQ ID NO: 979841 - DNA, 25 bp, Homo sapien
acagttgcgtttcttttgcccacaa

SEQ ID NO: 979842 - DNA, 25 bp, Homo sapien
gccgctcaaatgcaacccgtttaaa

SEQ ID NO: 979843 - DNA, 25 bp, Homo sapien
tgtggatgttccaaagccgctcaaa

SEQ ID NO: 979844 - DNA, 25 bp, Homo sapien
gcagagaccttactgaggaccggaa

SEQ ID NO: 979845 - DNA, 25 bp, Homo sapien
ccttaaggttcagactagcatttcc

SEQ ID NO: 979846 - DNA, 25 bp, Homo sapien
cctcaggctgtaccgtggatgacac

SEQ ID NO: 979847 - DNA, 25 bp, Homo sapien
cctttcttcggaggtggagctcatt

SEQ ID NO: 979848 - DNA, 25 bp, Homo sapien
tggcagcttaggttcagatttccgt

SEQ ID NO: 979849 - DNA, 25 bp, Homo sapien
tgagatggaagccacgtaacacctt

SEQ ID NO: 979850 - DNA, 25 bp, Homo sapien
tcccaggtcaatgcagttcagtgtg

SEQ ID NO: 979851 - DNA, 25 bp, Homo sapien
tacccagtgagatatggcagtgtca

SEQ ID NO: 979852 - DNA, 25 bp, Homo sapien
gaggtgccgcctctgtagaatccat

SEQ ID NO: 979853 - DNA, 25 bp, Homo sapien
aatctcatccacagtagtgcctggg

SEQ ID NO: 979854 - DNA, 25 bp, Homo sapien
ccttgaagacttttgacctcatcca

SEQ ID NO: 979855 - DNA, 25 bp, Homo sapien
agagcccagccgtgtgctgcttatc

SEQ ID NO: 979856 - DNA, 25 bp, Homo sapien
tcatccacggtctagggacagctgt

SEQ ID NO: 979857 - DNA, 25 bp, Homo sapien
gacagctgtgactaaagccacccag

SEQ ID NO: 979858 - DNA, 25 bp, Homo sapien
tccttcttaggtctagccacaaaag

SEQ ID NO: 979859 - DNA, 25 bp, Homo sapien
tctagccacaaaaggaaagccagtg

SEQ ID NO: 979860 - DNA, 25 bp, Homo sapien
tgctgttgtacataagtgcagtgcc

SEQ ID NO: 979861 - DNA, 25 bp, Homo sapien
ttgtgctgttgtacataagtgcagt

SEQ ID NO: 979862 - DNA, 25 bp, Homo sapien
tgtgaacgcagttccagacacggag

SEQ ID NO: 979863 - DNA, 25 bp, Homo sapien
tatccaagcggaaatgtctgacagg

SEQ ID NO: 979864 - DNA, 25 bp, Homo sapien
tagagagaacccagcaagcagtgag

SEQ ID NO: 979865 - DNA, 25 bp, Homo sapien
gatggaaatcaacactacagctcag

SEQ ID NO: 979866 - DNA, 25 bp, Homo sapien
catgctgcgtgtctttactgttaaa

SEQ ID NO: 979867 - DNA, 25 bp, Homo sapien
catttgatcagagatattagtaggc

SEQ ID NO: 979868 - DNA, 25 bp, Homo sapien
gaaagccacacaacgtaacatttgt

SEQ ID NO: 979869 - DNA, 25 bp, Homo sapien
tagaagattagtggatctgatccca

SEQ ID NO: 979870 - DNA, 25 bp, Homo sapien
gagggaatgacaaaacgggatgcac

SEQ ID NO: 979871 - DNA, 25 bp, Homo sapien
gaagctcctttcctttggacatcaa

SEQ ID NO: 979872 - DNA, 25 bp, Homo sapien
tttggcctaacttgcagaatgctgg

SEQ ID NO: 979873 - DNA, 25 bp, Homo sapien
tacataagatgatggaagcagtctc

SEQ ID NO: 979874 - DNA, 25 bp, Homo sapien
actccagtctgcgttgacagagacc

SEQ ID NO: 979875 - DNA, 25 bp, Homo sapien
taaatctaaagagtctgtaacatac

SEQ ID NO: 979876 - DNA, 25 bp, Homo sapien
caatgtctcgatatagaagatacgg

SEQ ID NO: 979877 - DNA, 25 bp, Homo sapien
ttttggtacaagaatcaggtagatg

SEQ ID NO: 979878 - DNA, 25 bp, Homo sapien
gctcagagatgtttagtttcgactt

SEQ ID NO: 979879 - DNA, 25 bp, Homo sapien
ttcgacttctggttcagtgaaatag

SEQ ID NO: 979880 - DNA, 25 bp, Homo sapien
gatgtttagtttcgacttctggttc

SEQ ID NO: 979881 - DNA, 25 bp, Homo sapien
tcagtgaaatagtctaaatgtcaga

SEQ ID NO: 979882 - DNA, 25 bp, Homo sapien
cgccaaagatccacaatatattcac

SEQ ID NO: 979883 - DNA, 25 bp, Homo sapien
gccaaagatccacaatatattcaca

SEQ ID NO: 979884 - DNA, 25 bp, Homo sapien
tcgccaaagatccacaatatattca

SEQ ID NO: 979885 - DNA, 25 bp, Homo sapien
ccaaagatccacaatatattcacac

SEQ ID NO: 979886 - DNA, 25 bp, Homo sapien
tacttagtatggcagagctggaccc

SEQ ID NO: 979887 - DNA, 25 bp, Homo sapien
tgcccaaaatagcagaggtagtctg

SEQ ID NO: 979888 - DNA, 25 bp, Homo sapien
taccaatgggttccgaggagttagc

SEQ ID NO: 979889 - DNA, 25 bp, Homo sapien
gatattatggaacaggtaccgactc

SEQ ID NO: 979890 - DNA, 25 bp, Homo sapien
gtctttatgatgtagagaaacatca

SEQ ID NO: 979891 - DNA, 25 bp, Homo sapien
tgactctttggtctttatgatgtag

SEQ ID NO: 979892 - DNA, 25 bp, Homo sapien
tctttggtctttatgatgtagagaa

SEQ ID NO: 979893 - DNA, 25 bp, Homo sapien
atgtatgaaacatattatttctgcc

SEQ ID NO: 979894 - DNA, 25 bp, Homo sapien
taacagcatcttctctatatagaaa

SEQ ID NO: 979895 - DNA, 25 bp, Homo sapien
tcacccaagacattctgtaacagca

SEQ ID NO: 979896 - DNA, 25 bp, Homo sapien
ctgtaacagcatcttctctatatag

SEQ ID NO: 979897 - DNA, 25 bp, Homo sapien
cacccaagacattctgtaacagcat

SEQ ID NO: 979898 - DNA, 25 bp, Homo sapien
gcaggttgtatacatgacgctggta

SEQ ID NO: 979899 - DNA, 25 bp, Homo sapien
ctttggcaggttgtatacatgacgc

SEQ ID NO: 979900 - DNA, 25 bp, Homo sapien
gttgtatacatgacgctggtagatg

SEQ ID NO: 979901 - DNA, 25 bp, Homo sapien
cgctggtagatgagctcataatggg

SEQ ID NO: 979902 - DNA, 25 bp, Homo sapien
tttccgtcgggatacttcggatgtg

SEQ ID NO: 979903 - DNA, 25 bp, Homo sapien
tctggaatcaaggtaggtgcaaaat

SEQ ID NO: 979904 - DNA, 25 bp, Homo sapien
caaggtaggtgcaaaatacatgcat

SEQ ID NO: 979905 - DNA, 25 bp, Homo sapien
tcggatgtggaggtaatctggaatc

SEQ ID NO: 979906 - DNA, 25 bp, Homo sapien
aaacacatagttcaggtagcacacc

SEQ ID NO: 979907 - DNA, 25 bp, Homo sapien
catggatgtagaaccctttagaaac

SEQ ID NO: 979908 - DNA, 25 bp, Homo sapien
gtagcacacctattcttttaactga

SEQ ID NO: 979909 - DNA, 25 bp, Homo sapien
tcttaaatcataaaggaattcagtg

SEQ ID NO: 979910 - DNA, 25 bp, Homo sapien
ggttgggtgaacatgctgatactat

SEQ ID NO: 979911 - DNA, 25 bp, Homo sapien
gaaagaaagcaatgcgcatcacact

SEQ ID NO: 979912 - DNA, 25 bp, Homo sapien
caaacttttaggtccactataggag

SEQ ID NO: 979913 - DNA, 25 bp, Homo sapien
aaaaatatctaggtaggaggaggct

SEQ ID NO: 979914 - DNA, 25 bp, Homo sapien
ctgtgtcagtcaatcaacagtaaat

SEQ ID NO: 979915 - DNA, 25 bp, Homo sapien
cctgtgtcagtcaatcaacagtaaa

SEQ ID NO: 979916 - DNA, 25 bp, Homo sapien
ccctgtgtcagtcaatcaacagtaa

SEQ ID NO: 979917 - DNA, 25 bp, Homo sapien
accctgtgtcagtcaatcaacagta

SEQ ID NO: 979918 - DNA, 25 bp, Homo sapien
gaatcggtgggcaggtctgtatccc

SEQ ID NO: 979919 - DNA, 25 bp, Homo sapien
ccacctctgttccatcgaaatgagc

SEQ ID NO: 979920 - DNA, 25 bp, Homo sapien
ctttcgtcctttgaagtcgccacct

SEQ ID NO: 979921 - DNA, 25 bp, Homo sapien
tgagctcatacaacctccctgagat

SEQ ID NO: 979922 - DNA, 25 bp, Homo sapien
ctgtggcaacaaggtgaaattttta

SEQ ID NO: 979923 - DNA, 25 bp, Homo sapien
tgtggcaacaaggtgaaatttttaa

SEQ ID NO: 979924 - DNA, 25 bp, Homo sapien
aatgagaggcgctttaaccagggca

SEQ ID NO: 979925 - DNA, 25 bp, Homo sapien
taaggtctagatactgaacgattgt

SEQ ID NO: 979926 - DNA, 25 bp, Homo sapien
gaacgattgtgttcaaagtcggaat

SEQ ID NO: 979927 - DNA, 25 bp, Homo sapien
gatcctttcaaacaagtattcctga

SEQ ID NO: 979928 - DNA, 25 bp, Homo sapien
aatttgcacgatctacattacctag

SEQ ID NO: 979929 - DNA, 25 bp, Homo sapien
ccaacgctggactccccaagtgttg

SEQ ID NO: 979930 - DNA, 25 bp, Homo sapien
cccagtgcccagaatagtattaaca

SEQ ID NO: 979931 - DNA, 25 bp, Homo sapien
cacctggaacagactaggcactcaa

SEQ ID NO: 979932 - DNA, 25 bp, Homo sapien
tgtagctctggacaacccattcgtc

SEQ ID NO: 979933 - DNA, 25 bp, Homo sapien
gcactaatattgtctcattgatcca

SEQ ID NO: 979934 - DNA, 25 bp, Homo sapien
cattcgtctcatctgtgtgctgaca

SEQ ID NO: 979935 - DNA, 25 bp, Homo sapien
tgtgctgacagactcaatctcttga

SEQ ID NO: 979936 - DNA, 25 bp, Homo sapien
gaaataaggtacagattttggatac

SEQ ID NO: 979937 - DNA, 25 bp, Homo sapien
gccactggagtgtaaattaactaac

SEQ ID NO: 979938 - DNA, 25 bp, Homo sapien
ttggatacataattcccaagtagct

SEQ ID NO: 979939 - DNA, 25 bp, Homo sapien
tagctacccgaaatcaagagatggt

SEQ ID NO: 979940 - DNA, 25 bp, Homo sapien
aaatttagctgtccatgaatccata

SEQ ID NO: 979941 - DNA, 25 bp, Homo sapien
gaatccatatgatcaagaagttgtc

SEQ ID NO: 979942 - DNA, 25 bp, Homo sapien
catatgatcaagaagttgtctattc

SEQ ID NO: 979943 - DNA, 25 bp, Homo sapien
ttctaaatttagctgtccatgaatc

SEQ ID NO: 979944 - DNA, 25 bp, Homo sapien
tacaggcaagctgatactgaaactt

SEQ ID NO: 979945 - DNA, 25 bp, Homo sapien
cgactatagttccagaaagtaggac

SEQ ID NO: 979946 - DNA, 25 bp, Homo sapien
gctgagatcggcttcatctttgtta

SEQ ID NO: 979947 - DNA, 25 bp, Homo sapien
tcttctgcggcttgtttagagctga

SEQ ID NO: 979948 - DNA, 25 bp, Homo sapien
tggaagacaatcaacgggagctttt

SEQ ID NO: 979949 - DNA, 25 bp, Homo sapien
tgatcacatagtagacctaaaagca

SEQ ID NO: 979950 - DNA, 25 bp, Homo sapien
tatagagccccaaatttagagactc

SEQ ID NO: 979951 - DNA, 25 bp, Homo sapien
gggagcttttggcacactttcttaa

SEQ ID NO: 979952 - DNA, 25 bp, Homo sapien
agaacggtagcgagatctcaatcca

SEQ ID NO: 979953 - DNA, 25 bp, Homo sapien
ctttgtcagtaggtgagttgtagac

SEQ ID NO: 979954 - DNA, 25 bp, Homo sapien
tgtagacggtaggtgaagaacggta

SEQ ID NO: 979955 - DNA, 25 bp, Homo sapien
gtatccaaagttcgtaggtcggtca

SEQ ID NO: 979956 - DNA, 25 bp, Homo sapien
gaggagaggggctaaagctcgccaa

SEQ ID NO: 979957 - DNA, 25 bp, Homo sapien
acagtggtagggtacggagaaggag

SEQ ID NO: 979958 - DNA, 25 bp, Homo sapien
cagtggtagggtacggagaaggagg

SEQ ID NO: 979959 - DNA, 25 bp, Homo sapien
taatcctgtgctcaagagggttaca

SEQ ID NO: 979960 - DNA, 25 bp, Homo sapien
cagaaaccaaactagcagggacctt

SEQ ID NO: 979961 - DNA, 25 bp, Homo sapien
gacaggctcagtgccatatgaagag

SEQ ID NO: 979962 - DNA, 25 bp, Homo sapien
gcagggcaaagtggctgtccgtaaa

SEQ ID NO: 979963 - DNA, 25 bp, Homo sapien
ccttgttgtactctcctaactttga

SEQ ID NO: 979964 - DNA, 25 bp, Homo sapien
tgtaccatacacctatcattttttc

SEQ ID NO: 979965 - DNA, 25 bp, Homo sapien
cccaactttagataaccactaatct

SEQ ID NO: 979966 - DNA, 25 bp, Homo sapien
cacaattcactcatgtaaagtgcac

SEQ ID NO: 979967 - DNA, 25 bp, Homo sapien
gacattgataatgctaaagtcttcc

SEQ ID NO: 979968 - DNA, 25 bp, Homo sapien
tttcttccatcaacttaaaatgacc

SEQ ID NO: 979969 - DNA, 25 bp, Homo sapien
caatagtattcttatggaggttgtc

SEQ ID NO: 979970 - DNA, 25 bp, Homo sapien
tatacagggattgtgaatctaacta

SEQ ID NO: 979971 - DNA, 25 bp, Homo sapien
cgctgcgcccagccgtcacctttac

SEQ ID NO: 979972 - DNA, 25 bp, Homo sapien
gctgcgcccagccgtcacctttact

SEQ ID NO: 979973 - DNA, 25 bp, Homo sapien
ctgcgcccagccgtcacctttactt

SEQ ID NO: 979974 - DNA, 25 bp, Homo sapien
tgcgcccagccgtcacctttacttt

SEQ ID NO: 979975 - DNA, 25 bp, Homo sapien
acttgatggtcaacagtgtggtaaa

SEQ ID NO: 979976 - DNA, 25 bp, Homo sapien
gatacagacccaaaagacaagcgag

SEQ ID NO: 979977 - DNA, 25 bp, Homo sapien
gcgagtaaagcacgagaacttcctg

SEQ ID NO: 979978 - DNA, 25 bp, Homo sapien
cctgatttagctatgcggctttgaa

SEQ ID NO: 979979 - DNA, 25 bp, Homo sapien
ggaaagcgtccatattcaagaatca

SEQ ID NO: 979980 - DNA, 25 bp, Homo sapien
ggttcctactattccatggaaagcg

SEQ ID NO: 979981 - DNA, 25 bp, Homo sapien
gcttagaagacactccaacatgata

SEQ ID NO: 979982 - DNA, 25 bp, Homo sapien
cagctgaaagatcgtagatggtgca

SEQ ID NO: 979983 - DNA, 25 bp, Homo sapien
cactgacgggcgagtaggtcactcc

SEQ ID NO: 979984 - DNA, 25 bp, Homo sapien
cttattataaccactgacgggcgag

SEQ ID NO: 979985 - DNA, 25 bp, Homo sapien
gagtaggtcactccagggctataag

SEQ ID NO: 979986 - DNA, 25 bp, Homo sapien
gctataagaaccactgccacctgag

SEQ ID NO: 979987 - DNA, 25 bp, Homo sapien
gaagggctataactcaacacactct

SEQ ID NO: 979988 - DNA, 25 bp, Homo sapien
gccagatcatgtggaggcgtagtct

SEQ ID NO: 979989 - DNA, 25 bp, Homo sapien
tactgggcgaacgagaagggctata

SEQ ID NO: 979990 - DNA, 25 bp, Homo sapien
agctgagggctgtaaccagtcatac

SEQ ID NO: 979991 - DNA, 25 bp, Homo sapien
tgttggtgccacagtatatttgaaa

SEQ ID NO: 979992 - DNA, 25 bp, Homo sapien
agtgtttgctgtccaggactaacaa

SEQ ID NO: 979993 - DNA, 25 bp, Homo sapien
cagctgttttcaaccctaaaagtgt

SEQ ID NO: 979994 - DNA, 25 bp, Homo sapien
caggactaacaaccagacttgttgg

SEQ ID NO: 979995 - DNA, 25 bp, Homo sapien
ctgaagagagatgcaagggcaagct

SEQ ID NO: 979996 - DNA, 25 bp, Homo sapien
tgtcacattgtagtatgaactaatc

SEQ ID NO: 979997 - DNA, 25 bp, Homo sapien
caatataccagaggggccagtatgt

SEQ ID NO: 979998 - DNA, 25 bp, Homo sapien
ccagaggggccagtatgtcacattg

SEQ ID NO: 979999 - DNA, 25 bp, Homo sapien
gggccagtatgtcacattgtagtat

SEQ ID NO: 980000 - DNA, 25 bp, Homo sapien
cattccagccatagatacatttagg

SEQ ID NO: 980001 - DNA, 25 bp, Homo sapien
agggaagcactagggtgtgcctccc

SEQ ID NO: 980002 - DNA, 25 bp, Homo sapien
agtatatatcattccagccatagat

SEQ ID NO: 980003 - DNA, 25 bp, Homo sapien
gagtccccaggctaagaccactttc

SEQ ID NO: 980004 - DNA, 25 bp, Homo sapien
aacaaaaagcacaggaattaaccag

SEQ ID NO: 980005 - DNA, 25 bp, Homo sapien
ctatgaaaaaacaaaaagcacagga

SEQ ID NO: 980006 - DNA, 25 bp, Homo sapien
atgaaaaaacaaaaagcacaggaat

SEQ ID NO: 980007 - DNA, 25 bp, Homo sapien
tatgaaaaaacaaaaagcacaggaa

SEQ ID NO: 980008 - DNA, 25 bp, Homo sapien
cttgttccagcgacaagcagtcgta

SEQ ID NO: 980009 - DNA, 25 bp, Homo sapien
gagcaatagctttcgcgccactcag

SEQ ID NO: 980010 - DNA, 25 bp, Homo sapien
gcagtcgtatcccacagaggacaga

SEQ ID NO: 980011 - DNA, 25 bp, Homo sapien
tagagaggcggaacgcctagccaca

SEQ ID NO: 980012 - DNA, 25 bp, Homo sapien
acccgcgtagattccaagacaggaa

SEQ ID NO: 980013 - DNA, 25 bp, Homo sapien
aacccgcgtagattccaagacagga

SEQ ID NO: 980014 - DNA, 25 bp, Homo sapien
gcacaaacacgaccccgaaaacgca

SEQ ID NO: 980015 - DNA, 25 bp, Homo sapien
cccgcgtagattccaagacaggaag

SEQ ID NO: 980016 - DNA, 25 bp, Homo sapien
gtcctctggccggaaaacgcaggct

SEQ ID NO: 980017 - DNA, 25 bp, Homo sapien
tctggccggaaaacgcaggctcgcg

SEQ ID NO: 980018 - DNA, 25 bp, Homo sapien
ggaaaacgcaggctcgcgccactct

SEQ ID NO: 980019 - DNA, 25 bp, Homo sapien
ccggaaaacgcaggctcgcgccact

SEQ ID NO: 980020 - DNA, 25 bp, Homo sapien
gaataacatctgacaagtttccaag

SEQ ID NO: 980021 - DNA, 25 bp, Homo sapien
tgccgaagacttgcatgatgtgttt

SEQ ID NO: 980022 - DNA, 25 bp, Homo sapien
tccttgtaacaatatgccgaagact

SEQ ID NO: 980023 - DNA, 25 bp, Homo sapien
aacagggtttccttgtaacaatatg

SEQ ID NO: 980024 - DNA, 25 bp, Homo sapien
atggtatcaggaaaccctcatcata

SEQ ID NO: 980025 - DNA, 25 bp, Homo sapien
tcaggaaaccctcatcataaagata

SEQ ID NO: 980026 - DNA, 25 bp, Homo sapien
ccctcatcataaagatatgcatctt

SEQ ID NO: 980027 - DNA, 25 bp, Homo sapien
tgcatcttttaaggggatggacccc

SEQ ID NO: 980028 - DNA, 25 bp, Homo sapien
atgtcctccagtgctatttgtacaa

SEQ ID NO: 980029 - DNA, 25 bp, Homo sapien
gctgatgtcctccagtgctatttgt

SEQ ID NO: 980030 - DNA, 25 bp, Homo sapien
ggctgatgtcctccagtgctatttg

SEQ ID NO: 980031 - DNA, 25 bp, Homo sapien
tgatgtcctccagtgctatttgtac

SEQ ID NO: 980032 - DNA, 25 bp, Homo sapien
taggtgtttggttcagaagttgttc

SEQ ID NO: 980033 - DNA, 25 bp, Homo sapien
aggagctgtgctacagtaggtgttt

SEQ ID NO: 980034 - DNA, 25 bp, Homo sapien
tgccccaggtcagtatgcagctctg

SEQ ID NO: 980035 - DNA, 25 bp, Homo sapien
tgggtgagatatttcctgggcagct

SEQ ID NO: 980036 - DNA, 25 bp, Homo sapien
gctccattctgtcttacatcggtcc

SEQ ID NO: 980037 - DNA, 25 bp, Homo sapien
cattctgtcttacatcggtcccttt

SEQ ID NO: 980038 - DNA, 25 bp, Homo sapien
tttttttcaatggtgcttgccgagg

SEQ ID NO: 980039 - DNA, 25 bp, Homo sapien
catcggtccctttttttcaatggtg

SEQ ID NO: 980040 - DNA, 25 bp, Homo sapien
cagtccctccctgtgtttggtggtg

SEQ ID NO: 980041 - DNA, 25 bp, Homo sapien
ggcacagaagcttgtataccctttt

SEQ ID NO: 980042 - DNA, 25 bp, Homo sapien
ggtgtggtgatgattcccagtctca

SEQ ID NO: 980043 - DNA, 25 bp, Homo sapien
tttattttagtgtgcatggcacagg

SEQ ID NO: 980044 - DNA, 25 bp, Homo sapien
tgtgcgctaaaagggaatactcacc

SEQ ID NO: 980045 - DNA, 25 bp, Homo sapien
tacatgtgcagaacagcgttaatag

SEQ ID NO: 980046 - DNA, 25 bp, Homo sapien
aagagtaggtagactttcagcaggg

SEQ ID NO: 980047 - DNA, 25 bp, Homo sapien
caatgcagcactacagagcccttaa

SEQ ID NO: 980048 - DNA, 25 bp, Homo sapien
tgtatttccttaggtgaattatcca

SEQ ID NO: 980049 - DNA, 25 bp, Homo sapien
gagagcctgggctttattatcagat

SEQ ID NO: 980050 - DNA, 25 bp, Homo sapien
gatggacctgggtttagattgcagc

SEQ ID NO: 980051 - DNA, 25 bp, Homo sapien
tgggctttattatcagatggacctg

SEQ ID NO: 980052 - DNA, 25 bp, Homo sapien
catctgtcctaatgggcttacctcc

SEQ ID NO: 980053 - DNA, 25 bp, Homo sapien
gatctaggcctcatcttacaggtcc

SEQ ID NO: 980054 - DNA, 25 bp, Homo sapien
cactgtaggtactgtgcccaggaag

SEQ ID NO: 980055 - DNA, 25 bp, Homo sapien
caaagtagaagatcactttccttca

SEQ ID NO: 980056 - DNA, 25 bp, Homo sapien
tacatcgtggcatgtaaccggtgag

SEQ ID NO: 980057 - DNA, 25 bp, Homo sapien
cagtgtccatgttgattaaactagg

SEQ ID NO: 980058 - DNA, 25 bp, Homo sapien
caaaagcttgatagtctcagtgtcc

SEQ ID NO: 980059 - DNA, 25 bp, Homo sapien
tctggtcctgggtctaattcttagc

SEQ ID NO: 980060 - DNA, 25 bp, Homo sapien
aagtaaagcttcaggtatattgggg

SEQ ID NO: 980061 - DNA, 25 bp, Homo sapien
agcttcaggtatattgggggcatcc

SEQ ID NO: 980062 - DNA, 25 bp, Homo sapien
taaagcttcaggtatattgggggca

SEQ ID NO: 980063 - DNA, 25 bp, Homo sapien
ttcaggtatattgggggcatccagg

SEQ ID NO: 980064 - DNA, 25 bp, Homo sapien
ttcctgaaagcgcctgcttggcata

SEQ ID NO: 980065 - DNA, 25 bp, Homo sapien
ctgcttggcatattcctgaaaggtg

SEQ ID NO: 980066 - DNA, 25 bp, Homo sapien
catattcctgaaaggtgggataagc

SEQ ID NO: 980067 - DNA, 25 bp, Homo sapien
cttggcatattcctgaaaggtggga

SEQ ID NO: 980068 - DNA, 25 bp, Homo sapien
ctggacttacgatgataaaactgtg

SEQ ID NO: 980069 - DNA, 25 bp, Homo sapien
cttacgatgataaaactgtggaaca

SEQ ID NO: 980070 - DNA, 25 bp, Homo sapien
tggacttacgatgataaaactgtgg

SEQ ID NO: 980071 - DNA, 25 bp, Homo sapien
gacttacgatgataaaactgtggaa

SEQ ID NO: 980072 - DNA, 25 bp, Homo sapien
cttcatgtctagcagaaaacccact

SEQ ID NO: 980073 - DNA, 25 bp, Homo sapien
actgcggtgaccttcatgtctagca

SEQ ID NO: 980074 - DNA, 25 bp, Homo sapien
cccaaactataaagggaactgtgtg

SEQ ID NO: 980075 - DNA, 25 bp, Homo sapien
agaactctaataatgactgcggtga

SEQ ID NO: 980076 - DNA, 25 bp, Homo sapien
caggcggacactcctggtcttcagc

SEQ ID NO: 980077 - DNA, 25 bp, Homo sapien
aaatgaatttcacagggtgagtggc

SEQ ID NO: 980078 - DNA, 25 bp, Homo sapien
tgctggtgcctgatcaaggcggaga

SEQ ID NO: 980079 - DNA, 25 bp, Homo sapien
tcccactttcatgctccggggctgg

SEQ ID NO: 980080 - DNA, 25 bp, Homo sapien
aagttctagtattacacgccaggcc

SEQ ID NO: 980081 - DNA, 25 bp, Homo sapien
acagtgctccacagtagagaagagg

SEQ ID NO: 980082 - DNA, 25 bp, Homo sapien
tggatgtactttgagcctctccaag

SEQ ID NO: 980083 - DNA, 25 bp, Homo sapien
tgggtgtcgttctccttcgaatgac

SEQ ID NO: 980084 - DNA, 25 bp, Homo sapien
tcctgaggtccctgcaaagagcaca

SEQ ID NO: 980085 - DNA, 25 bp, Homo sapien
ttatcccaaacctgccctcctgagg

SEQ ID NO: 980086 - DNA, 25 bp, Homo sapien
acatttagctccttgtcctgccccc

SEQ ID NO: 980087 - DNA, 25 bp, Homo sapien
tgaggtccctgcaaagagcacagac

SEQ ID NO: 980088 - DNA, 25 bp, Homo sapien
gagctgctacatgacccatcagggc

SEQ ID NO: 980089 - DNA, 25 bp, Homo sapien
ccacgtagcatggaggttggataca

SEQ ID NO: 980090 - DNA, 25 bp, Homo sapien
tgggaaatcacacgtggctccactt

SEQ ID NO: 980091 - DNA, 25 bp, Homo sapien
gaaacggcttagcttggcaaacctg

SEQ ID NO: 980092 - DNA, 25 bp, Homo sapien
tgccacaggactggagttgctactg

SEQ ID NO: 980093 - DNA, 25 bp, Homo sapien
gatccttggagaccctttgccttgt

SEQ ID NO: 980094 - DNA, 25 bp, Homo sapien
tacatgcctggcaaaagtctaagca

SEQ ID NO: 980095 - DNA, 25 bp, Homo sapien
gagccctggagtcaccccaaagtta

SEQ ID NO: 980096 - DNA, 25 bp, Homo sapien
tttgcccctggccagctagtgcagc

SEQ ID NO: 980097 - DNA, 25 bp, Homo sapien
gcaactgtaattgcctcgcatggag

SEQ ID NO: 980098 - DNA, 25 bp, Homo sapien
cagctggaaaacatcgcaactgtaa

SEQ ID NO: 980099 - DNA, 25 bp, Homo sapien
cctcgcatggagttggtgctcaaaa

SEQ ID NO: 980100 - DNA, 25 bp, Homo sapien
ctttctgtgcgtgggccgcaaaggc

SEQ ID NO: 980101 - DNA, 25 bp, Homo sapien
cgctctgcgcatctgttgctgtttg

SEQ ID NO: 980102 - DNA, 25 bp, Homo sapien
cattcatcaagtggagcaggtgcag

SEQ ID NO: 980103 - DNA, 25 bp, Homo sapien
ttagctcaaaccagaactaatggcc

SEQ ID NO: 980104 - DNA, 25 bp, Homo sapien
gcagtaacaaatatccatcccaatc

SEQ ID NO: 980105 - DNA, 25 bp, Homo sapien
cagaactgcagggtatggtgcggct

SEQ ID NO: 980106 - DNA, 25 bp, Homo sapien
gcagtcctctgacatattagattag

SEQ ID NO: 980107 - DNA, 25 bp, Homo sapien
gaacaggtgactctccttggcggct

SEQ ID NO: 980108 - DNA, 25 bp, Homo sapien
gaacacagggtcagagctagtcaga

SEQ ID NO: 980109 - DNA, 25 bp, Homo sapien
caggagcacattttggaggttacca

SEQ ID NO: 980110 - DNA, 25 bp, Homo sapien
gatgcttatgtacccttacggccga

SEQ ID NO: 980111 - DNA, 25 bp, Homo sapien
ggttcctaagcctagtagcctgcag

SEQ ID NO: 980112 - DNA, 25 bp, Homo sapien
taaaggggcactcgtgagatactaa

SEQ ID NO: 980113 - DNA, 25 bp, Homo sapien
cactcgtgagatactaagaagactc

SEQ ID NO: 980114 - DNA, 25 bp, Homo sapien
ctaagagagttaaaggggcactcgt

SEQ ID NO: 980115 - DNA, 25 bp, Homo sapien
gagatactaagaagactccttcccc

SEQ ID NO: 980116 - DNA, 25 bp, Homo sapien
ccttctgggaaatgatgggactggc

SEQ ID NO: 980117 - DNA, 25 bp, Homo sapien
gactggcaggctgtactatgcagca

SEQ ID NO: 980118 - DNA, 25 bp, Homo sapien
cagggctgtttgctctgccctcagg

SEQ ID NO: 980119 - DNA, 25 bp, Homo sapien
ggcagataacccctagaaacaggaa

SEQ ID NO: 980120 - DNA, 25 bp, Homo sapien
gaggaacttgttctcacagccagct

SEQ ID NO: 980121 - DNA, 25 bp, Homo sapien
tcacagccagcttggccagatctct

SEQ ID NO: 980122 - DNA, 25 bp, Homo sapien
tctgcaggatcagggatgaggaact

SEQ ID NO: 980123 - DNA, 25 bp, Homo sapien
gggatgaggaacttgttctcacagc

SEQ ID NO: 980124 - DNA, 25 bp, Homo sapien
tattgctgtcactttgttgacgttc

SEQ ID NO: 980125 - DNA, 25 bp, Homo sapien
cctgggttctgctgataccccttct

SEQ ID NO: 980126 - DNA, 25 bp, Homo sapien
caggcatgttgggacacgggccggc

SEQ ID NO: 980127 - DNA, 25 bp, Homo sapien
gataccccttctgtagcagacttct

SEQ ID NO: 980128 - DNA, 25 bp, Homo sapien
gagaactccagcctgcttggttgac

SEQ ID NO: 980129 - DNA, 25 bp, Homo sapien
ggatgtccttagagtgggaatccat

SEQ ID NO: 980130 - DNA, 25 bp, Homo sapien
gcaaaaaatgtccttctgtggaggg

SEQ ID NO: 980131 - DNA, 25 bp, Homo sapien
tccctgagcttctaggatgtcctta

SEQ ID NO: 980132 - DNA, 25 bp, Homo sapien
ttctgctgaacttgtagcatcgaat

SEQ ID NO: 980133 - DNA, 25 bp, Homo sapien
gctgaacttgtagcatcgaattcat

SEQ ID NO: 980134 - DNA, 25 bp, Homo sapien
tctgccatgatgctgcccactttct

SEQ ID NO: 980135 - DNA, 25 bp, Homo sapien
cccaaattcctctgccatgatgctg

SEQ ID NO: 980136 - DNA, 25 bp, Homo sapien
taatcagcttttataacgggcaggg

SEQ ID NO: 980137 - DNA, 25 bp, Homo sapien
caacacgacaccattaagggctgtg

SEQ ID NO: 980138 - DNA, 25 bp, Homo sapien
tgaagggagctatttcgaacacagt

SEQ ID NO: 980139 - DNA, 25 bp, Homo sapien
caaaatattgagtctggatcccatc

SEQ ID NO: 980140 - DNA, 25 bp, Homo sapien
cactccaagatacagctggaagcag

SEQ ID NO: 980141 - DNA, 25 bp, Homo sapien
catcttgcccggaacgctgcagttt

SEQ ID NO: 980142 - DNA, 25 bp, Homo sapien
tctgctccggtataatgtttcatca

SEQ ID NO: 980143 - DNA, 25 bp, Homo sapien
gaaaaattcacactccaagatacag

SEQ ID NO: 980144 - DNA, 25 bp, Homo sapien
ttaagtggtactttgcaaggtgtcc

SEQ ID NO: 980145 - DNA, 25 bp, Homo sapien
atatcaatatggtttactgaatgaa

SEQ ID NO: 980146 - DNA, 25 bp, Homo sapien
gaatggctagacctatcaggaaaac

SEQ ID NO: 980147 - DNA, 25 bp, Homo sapien
agacaaaataacctcggaagccctg

SEQ ID NO: 980148 - DNA, 25 bp, Homo sapien
cagttcctgaatttccatcgccttt

SEQ ID NO: 980149 - DNA, 25 bp, Homo sapien
caggcaagcggaggaaagttttcaa

SEQ ID NO: 980150 - DNA, 25 bp, Homo sapien
acagcagacacaggcggtggaaatg

SEQ ID NO: 980151 - DNA, 25 bp, Homo sapien
catcgccttttgtgcaggcaagcgg

SEQ ID NO: 980152 - DNA, 25 bp, Homo sapien
caatatgatcgtgctggtcctggct

SEQ ID NO: 980153 - DNA, 25 bp, Homo sapien
cttattaagggccactgtcacaggg

SEQ ID NO: 980154 - DNA, 25 bp, Homo sapien
gtggctgaaagaacaccctctggag

SEQ ID NO: 980155 - DNA, 25 bp, Homo sapien
tagtcaacccctgagacgctggtag

SEQ ID NO: 980156 - DNA, 25 bp, Homo sapien
gctgaaaatcttgtccatgctaggg

SEQ ID NO: 980157 - DNA, 25 bp, Homo sapien
caaagttgtctgacgatgggaacgc

SEQ ID NO: 980158 - DNA, 25 bp, Homo sapien
ctttcaaaatagaatccggcaggga

SEQ ID NO: 980159 - DNA, 25 bp, Homo sapien
gtgagtgcacaccaattctaacagg

SEQ ID NO: 980160 - DNA, 25 bp, Homo sapien
tgtcagccctgacaaaggacttcgg

SEQ ID NO: 980161 - DNA, 25 bp, Homo sapien
tgatatactgaccacaagtgagggc

SEQ ID NO: 980162 - DNA, 25 bp, Homo sapien
taaggcaaatcttaccccgtagcag

SEQ ID NO: 980163 - DNA, 25 bp, Homo sapien
gaagctgggcaatgggcgtcataac

SEQ ID NO: 980164 - DNA, 25 bp, Homo sapien
ctcctccccggtgtgaagacaccca

SEQ ID NO: 980165 - DNA, 25 bp, Homo sapien
tttcccatgagaggccctcctcccc

SEQ ID NO: 980166 - DNA, 25 bp, Homo sapien
cagggctttcccatgagaggccctc

SEQ ID NO: 980167 - DNA, 25 bp, Homo sapien
gggctttcccatgagaggccctcct

SEQ ID NO: 980168 - DNA, 25 bp, Homo sapien
caggcggctggaacctaaggctcat

SEQ ID NO: 980169 - DNA, 25 bp, Homo sapien
cttccatactcaaaacagggcctgc

SEQ ID NO: 980170 - DNA, 25 bp, Homo sapien
ggctcatctgcacccttggaaacag

SEQ ID NO: 980171 - DNA, 25 bp, Homo sapien
cagtgagtacacaggcactggcttc

SEQ ID NO: 980172 - DNA, 25 bp, Homo sapien
ctagagcctgtcacacctctggttt

SEQ ID NO: 980173 - DNA, 25 bp, Homo sapien
tcaaaatccttcctgaggtggcctc

SEQ ID NO: 980174 - DNA, 25 bp, Homo sapien
catacatatgtcatggtctttcctc

SEQ ID NO: 980175 - DNA, 25 bp, Homo sapien
gagacccaacaagctggaccttatt

SEQ ID NO: 980176 - DNA, 25 bp, Homo sapien
acatttatttgcctaagtgagacaa

SEQ ID NO: 980177 - DNA, 25 bp, Homo sapien
ggaagaacatttatttgcctaagtg

SEQ ID NO: 980178 - DNA, 25 bp, Homo sapien
aagaggaagaacatttatttgccta

SEQ ID NO: 980179 - DNA, 25 bp, Homo sapien
tatttgcctaagtgagacaaagtct

SEQ ID NO: 980180 - DNA, 25 bp, Homo sapien
ttccagggtttgccttgcaggtgac

SEQ ID NO: 980181 - DNA, 25 bp, Homo sapien
ctgagggagcgggggtttgagtggc

SEQ ID NO: 980182 - DNA, 25 bp, Homo sapien
gtttgagtggctggcggggccgcca

SEQ ID NO: 980183 - DNA, 25 bp, Homo sapien
tccagggtttgccttgcaggtgacc

SEQ ID NO: 980184 - DNA, 25 bp, Homo sapien
tggcagattctgagcgcttcgggca

SEQ ID NO: 980185 - DNA, 25 bp, Homo sapien
agattctgagcgcttcgggcaccag

SEQ ID NO: 980186 - DNA, 25 bp, Homo sapien
ttctgagcgcttcgggcaccaggca

SEQ ID NO: 980187 - DNA, 25 bp, Homo sapien
ggcagattctgagcgcttcgggcac

SEQ ID NO: 980188 - DNA, 25 bp, Homo sapien
tctcttccggaggagttagcttggt

SEQ ID NO: 980189 - DNA, 25 bp, Homo sapien
cttggactctcttccggaggagtta

SEQ ID NO: 980190 - DNA, 25 bp, Homo sapien
ccggaggagttagcttggttcagtc

SEQ ID NO: 980191 - DNA, 25 bp, Homo sapien
gactctcttccggaggagttagctt

SEQ ID NO: 980192 - DNA, 25 bp, Homo sapien
gaaggtctgatgcttaactcctcaa

SEQ ID NO: 980193 - DNA, 25 bp, Homo sapien
gatggcctactcctcatccttgaga

SEQ ID NO: 980194 - DNA, 25 bp, Homo sapien
tgattccagggacaatctgccaagt

SEQ ID NO: 980195 - DNA, 25 bp, Homo sapien
gaagtctctacatttttgcctgggc

SEQ ID NO: 980196 - DNA, 25 bp, Homo sapien
ccttccgggaatttctgagctaaga

SEQ ID NO: 980197 - DNA, 25 bp, Homo sapien
ctccatttattctcagctggtaggg

SEQ ID NO: 980198 - DNA, 25 bp, Homo sapien
gaaccagtaatcagtccttccggga

SEQ ID NO: 980199 - DNA, 25 bp, Homo sapien
ggctggatcgtttccgggcagaccc

SEQ ID NO: 980200 - DNA, 25 bp, Homo sapien
gaaatccttttgctcgagtcttcag

SEQ ID NO: 980201 - DNA, 25 bp, Homo sapien
gttgaggccaacacaaggacatgaa

SEQ ID NO: 980202 - DNA, 25 bp, Homo sapien
taatctctggtcatcaagttgaggc

SEQ ID NO: 980203 - DNA, 25 bp, Homo sapien
cagcattagggctttgtgacagagc

SEQ ID NO: 980204 - DNA, 25 bp, Homo sapien
gtttcacataactcctgactccttt

SEQ ID NO: 980205 - DNA, 25 bp, Homo sapien
ttctgagcaccaagagagaaaaggg

SEQ ID NO: 980206 - DNA, 25 bp, Homo sapien
gtgggactgaaggatgatcagcctt

SEQ ID NO: 980207 - DNA, 25 bp, Homo sapien
tttgaagtcccaagcagagtatcac

SEQ ID NO: 980208 - DNA, 25 bp, Homo sapien
ggttttcaaatccacgctcgcacat

SEQ ID NO: 980209 - DNA, 25 bp, Homo sapien
aggttttcaaatccacgctcgcaca

SEQ ID NO: 980210 - DNA, 25 bp, Homo sapien
gaggttttcaaatccacgctcgcac

SEQ ID NO: 980211 - DNA, 25 bp, Homo sapien
tcatcgtcatacagaatgatgatct

SEQ ID NO: 980212 - DNA, 25 bp, Homo sapien
ctttcatcatcgtcatacagaatga

SEQ ID NO: 980213 - DNA, 25 bp, Homo sapien
tggccagcctttcatcatcgtcata

SEQ ID NO: 980214 - DNA, 25 bp, Homo sapien
cgtcatacagaatgatgatcttgcc

SEQ ID NO: 980215 - DNA, 25 bp, Homo sapien
taaaaggtcaggtccacctgtctga

SEQ ID NO: 980216 - DNA, 25 bp, Homo sapien
acctgtctgagttcccgggaacgat

SEQ ID NO: 980217 - DNA, 25 bp, Homo sapien
agatgagttaaggttccaaggcact

SEQ ID NO: 980218 - DNA, 25 bp, Homo sapien
tgatgtcccaagactacgagaaacc

SEQ ID NO: 980219 - DNA, 25 bp, Homo sapien
ccacacaagctggtattcgtttctt

SEQ ID NO: 980220 - DNA, 25 bp, Homo sapien
caagctggtattcgtttcttttgca

SEQ ID NO: 980221 - DNA, 25 bp, Homo sapien
gctggtattcgtttcttttgcaaac

SEQ ID NO: 980222 - DNA, 25 bp, Homo sapien
cacaagctggtattcgtttcttttg

SEQ ID NO: 980223 - DNA, 25 bp, Homo sapien
cactgaagcctatttatgacagtaa

SEQ ID NO: 980224 - DNA, 25 bp, Homo sapien
gactttacatcctttagctctctta

SEQ ID NO: 980225 - DNA, 25 bp, Homo sapien
tctatgcctaatgtgtccactgaag

SEQ ID NO: 980226 - DNA, 25 bp, Homo sapien
taaaagacagcactagttccggact

SEQ ID NO: 980227 - DNA, 25 bp, Homo sapien
cattgttctagacagagttgcaatt

SEQ ID NO: 980228 - DNA, 25 bp, Homo sapien
ttgaataagggttcattgttctaga

SEQ ID NO: 980229 - DNA, 25 bp, Homo sapien
tcatttgaataagggttcattgttc

SEQ ID NO: 980230 - DNA, 25 bp, Homo sapien
cagagttgcaattgggtaactgtaa

SEQ ID NO: 980231 - DNA, 25 bp, Homo sapien
tctatcacgcacatctagcagcagg

SEQ ID NO: 980232 - DNA, 25 bp, Homo sapien
actgctggtaagaatctctatcacg

SEQ ID NO: 980233 - DNA, 25 bp, Homo sapien
cagttccccaacaccactgatgaca

SEQ ID NO: 980234 - DNA, 25 bp, Homo sapien
caggataaggtttgtctttggtatg

SEQ ID NO: 980235 - DNA, 25 bp, Homo sapien
aagagttgagcggctggagtcccct

SEQ ID NO: 980236 - DNA, 25 bp, Homo sapien
tgtttatgaactgctcagggctcgg

SEQ ID NO: 980237 - DNA, 25 bp, Homo sapien
tgctcagggctcggcgactgctcac

SEQ ID NO: 980238 - DNA, 25 bp, Homo sapien
ccctgctcctgcgttgtttatgaac

SEQ ID NO: 980239 - DNA, 25 bp, Homo sapien
catcagggtctgaagctgcagaatc

SEQ ID NO: 980240 - DNA, 25 bp, Homo sapien
tcagcatcagggtctgaagctgcag

SEQ ID NO: 980241 - DNA, 25 bp, Homo sapien
tcagggtctgaagctgcagaatcat

SEQ ID NO: 980242 - DNA, 25 bp, Homo sapien
gggtctgaagctgcagaatcattgt

SEQ ID NO: 980243 - DNA, 25 bp, Homo sapien
tgggggtgaggcactgggcgtgagg

SEQ ID NO: 980244 - DNA, 25 bp, Homo sapien
ggggtgaggcactgggcgtgaggca

SEQ ID NO: 980245 - DNA, 25 bp, Homo sapien
ttatgggggtgaggcactgggcgtg

SEQ ID NO: 980246 - DNA, 25 bp, Homo sapien
gattatgggggtgaggcactgggcg

SEQ ID NO: 980247 - DNA, 25 bp, Homo sapien
cagagagggaagcaacttggatgat

SEQ ID NO: 980248 - DNA, 25 bp, Homo sapien
cacttccagtgtttgatcagagagg

SEQ ID NO: 980249 - DNA, 25 bp, Homo sapien
cctttgaatctcctcagctgtcact

SEQ ID NO: 980250 - DNA, 25 bp, Homo sapien
agctgtcacttccagtgtttgatca

SEQ ID NO: 980251 - DNA, 25 bp, Homo sapien
tcccatagctgaacgacatacaaag

SEQ ID NO: 980252 - DNA, 25 bp, Homo sapien
taatcttcccatagctgaacgacat

SEQ ID NO: 980253 - DNA, 25 bp, Homo sapien
tagctgaacgacatacaaagaatca

SEQ ID NO: 980254 - DNA, 25 bp, Homo sapien
tcttcccatagctgaacgacataca

SEQ ID NO: 980255 - DNA, 25 bp, Homo sapien
cagctgggcaaaagttgtaactttt

SEQ ID NO: 980256 - DNA, 25 bp, Homo sapien
tagaaggacagccgtcagtaggact

SEQ ID NO: 980257 - DNA, 25 bp, Homo sapien
tttagaaggacagccgtcagtagga

SEQ ID NO: 980258 - DNA, 25 bp, Homo sapien
gaaggacagccgtcagtaggacttt

SEQ ID NO: 980259 - DNA, 25 bp, Homo sapien
aaggacagccgtcagtaggactttt

SEQ ID NO: 980260 - DNA, 25 bp, Homo sapien
tttcttaatctcttcgagcttctca

SEQ ID NO: 980261 - DNA, 25 bp, Homo sapien
ttcttaatctcttcgagcttctcag

SEQ ID NO: 980262 - DNA, 25 bp, Homo sapien
gagatgtgaccagatcttcagagca

SEQ ID NO: 980263 - DNA, 25 bp, Homo sapien
aactgcaattgacccgagatgtgac

SEQ ID NO: 980264 - DNA, 25 bp, Homo sapien
tagaagaggcccaaatatcaccaag

SEQ ID NO: 980265 - DNA, 25 bp, Homo sapien
cctggtcaatacaatggcggaagaa

SEQ ID NO: 980266 - DNA, 25 bp, Homo sapien
gaggaagaaacaacccgactatagc

SEQ ID NO: 980267 - DNA, 25 bp, Homo sapien
caatttggtctgagtttctgcacac

SEQ ID NO: 980268 - DNA, 25 bp, Homo sapien
caaggactatttatgggcacgtaca

SEQ ID NO: 980269 - DNA, 25 bp, Homo sapien
tactcgtaagagctcactcagcagg

SEQ ID NO: 980270 - DNA, 25 bp, Homo sapien
gatttataaggcacgaactcagttg

SEQ ID NO: 980271 - DNA, 25 bp, Homo sapien
tatactgagccaataagaaaagcaa

SEQ ID NO: 980272 - DNA, 25 bp, Homo sapien
tttgtgcagcagtaatctaaagtag

SEQ ID NO: 980273 - DNA, 25 bp, Homo sapien
tagatgagatttataaggcacgaac

SEQ ID NO: 980274 - DNA, 25 bp, Homo sapien
tgaacaaaacgcagccagggatttc

SEQ ID NO: 980275 - DNA, 25 bp, Homo sapien
aaagtgtcccttaatcagcctgcag

SEQ ID NO: 980276 - DNA, 25 bp, Homo sapien
ccctgcggtggtgactgaacaaaac

SEQ ID NO: 980277 - DNA, 25 bp, Homo sapien
aaagactgagtggagaaagcctaca

SEQ ID NO: 980278 - DNA, 25 bp, Homo sapien
tcatggcacagtctggcagtgctgg

SEQ ID NO: 980279 - DNA, 25 bp, Homo sapien
agtgctggggagctggtaagataca

SEQ ID NO: 980280 - DNA, 25 bp, Homo sapien
gagctggtaagatacacacaggcac

SEQ ID NO: 980281 - DNA, 25 bp, Homo sapien
tcagaagcataatccattcatggca

SEQ ID NO: 980282 - DNA, 25 bp, Homo sapien
tgagggtttttgtggcagaagaaac

SEQ ID NO: 980283 - DNA, 25 bp, Homo sapien
tagagatgaaagagctgagggtttt

SEQ ID NO: 980284 - DNA, 25 bp, Homo sapien
gcttgggggaaatacaggaacagta

SEQ ID NO: 980285 - DNA, 25 bp, Homo sapien
ttcagaagggtggatcacagttgca

SEQ ID NO: 980286 - DNA, 25 bp, Homo sapien
aggataaatatctgtacggcatgga

SEQ ID NO: 980287 - DNA, 25 bp, Homo sapien
gaaatgtctgaatgacgggtaccaa

SEQ ID NO: 980288 - DNA, 25 bp, Homo sapien
gggaaattcggtattgctaaaggca

SEQ ID NO: 980289 - DNA, 25 bp, Homo sapien
gaataaatcacaaaatccccgtgcc

SEQ ID NO: 980290 - DNA, 25 bp, Homo sapien
gggttctgtggtatccttttcatca

SEQ ID NO: 980291 - DNA, 25 bp, Homo sapien
cagtgtccagtcttgatttgatatg

SEQ ID NO: 980292 - DNA, 25 bp, Homo sapien
cttgggttctgtggtatccttttca

SEQ ID NO: 980293 - DNA, 25 bp, Homo sapien
cagtcttgatttgatatgctggtat

SEQ ID NO: 980294 - DNA, 25 bp, Homo sapien
ggcctgcaggtatgaaagtcctttc

SEQ ID NO: 980295 - DNA, 25 bp, Homo sapien
aagtcctttcttcaataacaggtag

SEQ ID NO: 980296 - DNA, 25 bp, Homo sapien
tggcctgcaggtatgaaagtccttt

SEQ ID NO: 980297 - DNA, 25 bp, Homo sapien
cctgcaggtatgaaagtcctttctt

SEQ ID NO: 980298 - DNA, 25 bp, Homo sapien
catgctggtgccacgtgggcagcac

SEQ ID NO: 980299 - DNA, 25 bp, Homo sapien
caaaggagattgttcatccactggg

SEQ ID NO: 980300 - DNA, 25 bp, Homo sapien
gacctgagcaacatgtagtgtgcat

SEQ ID NO: 980301 - DNA, 25 bp, Homo sapien
tggaagaatggacactggagctatg

SEQ ID NO: 980302 - DNA, 25 bp, Homo sapien
caaaggtttggtcagcttactcctg

SEQ ID NO: 980303 - DNA, 25 bp, Homo sapien
caacacgtgccattagtgtgcagcg

SEQ ID NO: 980304 - DNA, 25 bp, Homo sapien
tctagcacctactgcaccgtggaag

SEQ ID NO: 980305 - DNA, 25 bp, Homo sapien
tccgagactgtaagccatttgaggg

SEQ ID NO: 980306 - DNA, 25 bp, Homo sapien
tcagggttcccaatgtgcctccgga

SEQ ID NO: 980307 - DNA, 25 bp, Homo sapien
ggttcccaatgtgcctccggaggga

SEQ ID NO: 980308 - DNA, 25 bp, Homo sapien
agggttcccaatgtgcctccggagg

SEQ ID NO: 980309 - DNA, 25 bp, Homo sapien
tcccaatgtgcctccggagggacat

SEQ ID NO: 980310 - DNA, 25 bp, Homo sapien
tcaatggttgccaagggcaacgcgg

SEQ ID NO: 980311 - DNA, 25 bp, Homo sapien
tactctctcatctcagggtcgcaga

SEQ ID NO: 980312 - DNA, 25 bp, Homo sapien
ggttctagcctcacgggttgcctct

SEQ ID NO: 980313 - DNA, 25 bp, Homo sapien
gtcgcagaagggcaagacgccgctc

SEQ ID NO: 980314 - DNA, 25 bp, Homo sapien
cacaggctgtgttactttctgatga

SEQ ID NO: 980315 - DNA, 25 bp, Homo sapien
tttctgatgaaacgaggaaattggc

SEQ ID NO: 980316 - DNA, 25 bp, Homo sapien
tctgatgaaacgaggaaattggcat

SEQ ID NO: 980317 - DNA, 25 bp, Homo sapien
ctgatgaaacgaggaaattggcatc

SEQ ID NO: 980318 - DNA, 25 bp, Homo sapien
tttccaacaggagagaatgcgctga

SEQ ID NO: 980319 - DNA, 25 bp, Homo sapien
tcatgctcacaaacagcctcctgat

SEQ ID NO: 980320 - DNA, 25 bp, Homo sapien
atccaattccctccctttgttctga

SEQ ID NO: 980321 - DNA, 25 bp, Homo sapien
gaatgcgctgaccagtcaacatgaa

SEQ ID NO: 980322 - DNA, 25 bp, Homo sapien
ccagctcttgctaggactgccagca

SEQ ID NO: 980323 - DNA, 25 bp, Homo sapien
tccagctcttgctaggactgccagc

SEQ ID NO: 980324 - DNA, 25 bp, Homo sapien
agtgttgatgggcaggaccttcccg

SEQ ID NO: 980325 - DNA, 25 bp, Homo sapien
taaagggctttggacccacagtcag

SEQ ID NO: 980326 - DNA, 25 bp, Homo sapien
caggtataaacccatcttgctttgg

SEQ ID NO: 980327 - DNA, 25 bp, Homo sapien
gctgaggacaaagtatgaggagtca

SEQ ID NO: 980328 - DNA, 25 bp, Homo sapien
tgtcaaggactcaggcataagtgga

SEQ ID NO: 980329 - DNA, 25 bp, Homo sapien
gatggccagcctctaccctgttgag

SEQ ID NO: 980330 - DNA, 25 bp, Homo sapien
caacgttttggtagtgctgtggcta

SEQ ID NO: 980331 - DNA, 25 bp, Homo sapien
gataatttctgttggtcctaaggcc

SEQ ID NO: 980332 - DNA, 25 bp, Homo sapien
ttacatactgtaaactcacccatac

SEQ ID NO: 980333 - DNA, 25 bp, Homo sapien
ttgcctattatggacagtgcatgta

SEQ ID NO: 980334 - DNA, 25 bp, Homo sapien
gaagccacatatacattagtacccc

SEQ ID NO: 980335 - DNA, 25 bp, Homo sapien
tttacaaggttgtggcaccatctcc

SEQ ID NO: 980336 - DNA, 25 bp, Homo sapien
tgtgatagtcttccaggtgtctgca

SEQ ID NO: 980337 - DNA, 25 bp, Homo sapien
tccatttatctttggtaagagcagc

SEQ ID NO: 980338 - DNA, 25 bp, Homo sapien
gtaagagcagccacatgacaatccc

SEQ ID NO: 980339 - DNA, 25 bp, Homo sapien
caatttgtggtactgagttctctgg

SEQ ID NO: 980340 - DNA, 25 bp, Homo sapien
tgtggaccaaggaatgcatctctct

SEQ ID NO: 980341 - DNA, 25 bp, Homo sapien
cagaggacactgatatgtggaccaa

SEQ ID NO: 980342 - DNA, 25 bp, Homo sapien
gctcttcttagctcttgggtcgcat

SEQ ID NO: 980343 - DNA, 25 bp, Homo sapien
ttggcaaggaaggagtggcatcttt

SEQ ID NO: 980344 - DNA, 25 bp, Homo sapien
tggagtctgaacatcctcgttggac

SEQ ID NO: 980345 - DNA, 25 bp, Homo sapien
ctcctggagtctgaacatcctcgtt

SEQ ID NO: 980346 - DNA, 25 bp, Homo sapien
gagtctgaacatcctcgttggactt

SEQ ID NO: 980347 - DNA, 25 bp, Homo sapien
tgtttctcctctactagagagggac

SEQ ID NO: 980348 - DNA, 25 bp, Homo sapien
gtcgaagccacggcctgccatttca

SEQ ID NO: 980349 - DNA, 25 bp, Homo sapien
tatccaatgccggaggctattgtcg

SEQ ID NO: 980350 - DNA, 25 bp, Homo sapien
cacggcctgccatttcatacccttt

SEQ ID NO: 980351 - DNA, 25 bp, Homo sapien
gccggaggctattgtcgaagccacg

SEQ ID NO: 980352 - DNA, 25 bp, Homo sapien
tgtgcgcggacctggcgacgctcta

SEQ ID NO: 980353 - DNA, 25 bp, Homo sapien
gccgcgtattcgtggccgggtcctc

SEQ ID NO: 980354 - DNA, 25 bp, Homo sapien
gggcgatgggcttgtgcgcggacct

SEQ ID NO: 980355 - DNA, 25 bp, Homo sapien
tctagccccgagccgcgtattcgtg

SEQ ID NO: 980356 - DNA, 25 bp, Homo sapien
tggagtcctgtaggcaaggtcttac

SEQ ID NO: 980357 - DNA, 25 bp, Homo sapien
ccggttctccgaaacatggagtcct

SEQ ID NO: 980358 - DNA, 25 bp, Homo sapien
tctccgaaacatggagtcctgtagg

SEQ ID NO: 980359 - DNA, 25 bp, Homo sapien
gcgcaaccggttctccgaaacatgg

SEQ ID NO: 980360 - DNA, 25 bp, Homo sapien
ctgaatcaggtaagaggcgggcggg

SEQ ID NO: 980361 - DNA, 25 bp, Homo sapien
caggagtgggactagccctccttgg

SEQ ID NO: 980362 - DNA, 25 bp, Homo sapien
tggctcgtgtgcgtgggccacacca

SEQ ID NO: 980363 - DNA, 25 bp, Homo sapien
ctcgcagcccgctccaggagtggga

SEQ ID NO: 980364 - DNA, 25 bp, Homo sapien
cacctcggggtcgtagagaacacaa

SEQ ID NO: 980365 - DNA, 25 bp, Homo sapien
cttgacccccgcgacagagtttagt

SEQ ID NO: 980366 - DNA, 25 bp, Homo sapien
aaaagtcacacaaccctcgccgagg

SEQ ID NO: 980367 - DNA, 25 bp, Homo sapien
tagtcattccgttagctggctccac

SEQ ID NO: 980368 - DNA, 25 bp, Homo sapien
gggcgtggctgttccgggtcggagc

SEQ ID NO: 980369 - DNA, 25 bp, Homo sapien
aggttggaaaggtcgcaggcacacg

SEQ ID NO: 980370 - DNA, 25 bp, Homo sapien
cacacgggtgtgaccgagtggtaga

SEQ ID NO: 980371 - DNA, 25 bp, Homo sapien
ctgcaggtgtcggtccaggtccagg

SEQ ID NO: 980372 - DNA, 25 bp, Homo sapien
agtttaggggtgcccactaatactg

SEQ ID NO: 980373 - DNA, 25 bp, Homo sapien
tggtgaagaagtaccagctgtggga

SEQ ID NO: 980374 - DNA, 25 bp, Homo sapien
gatagtttaggggtgcccactaata

SEQ ID NO: 980375 - DNA, 25 bp, Homo sapien
taggggtgcccactaatactgtcac

SEQ ID NO: 980376 - DNA, 25 bp, Homo sapien
tcaatttgccttgccctcagtacaa

SEQ ID NO: 980377 - DNA, 25 bp, Homo sapien
cgcccggccacattggttaatttgg

SEQ ID NO: 980378 - DNA, 25 bp, Homo sapien
tcccctcagtagaggatcaccctgg

SEQ ID NO: 980379 - DNA, 25 bp, Homo sapien
catgttgtaccaagggttctgggct

SEQ ID NO: 980380 - DNA, 25 bp, Homo sapien
tatcctgcacttgtcatattatggg

SEQ ID NO: 980381 - DNA, 25 bp, Homo sapien
caaaaccccttcgttaacatgtgct

SEQ ID NO: 980382 - DNA, 25 bp, Homo sapien
tcagtctgcagtcacagtagccttt

SEQ ID NO: 980383 - DNA, 25 bp, Homo sapien
tgaaagtggcagtcccggttgtgtc

SEQ ID NO: 980384 - DNA, 25 bp, Homo sapien
actcctcggccagacatcaataatg

SEQ ID NO: 980385 - DNA, 25 bp, Homo sapien
tgtactcagggttcttccaaacagg

SEQ ID NO: 980386 - DNA, 25 bp, Homo sapien
tcccgagtgccagacttggaattcc

SEQ ID NO: 980387 - DNA, 25 bp, Homo sapien
tctgcctaagatctgggttccatgc

SEQ ID NO: 980388 - DNA, 25 bp, Homo sapien
tctgatgataggcttataggcggta

SEQ ID NO: 980389 - DNA, 25 bp, Homo sapien
ggttggatgccccgcggtccagcac

SEQ ID NO: 980390 - DNA, 25 bp, Homo sapien
ttataggcggtagtttcctcagtgt

SEQ ID NO: 980391 - DNA, 25 bp, Homo sapien
gataggcttataggcggtagtttcc

SEQ ID NO: 980392 - DNA, 25 bp, Homo sapien
cagagttgcagagccgcggagggcc

SEQ ID NO: 980393 - DNA, 25 bp, Homo sapien
ccgggccgtgcgcagccgaagggag

SEQ ID NO: 980394 - DNA, 25 bp, Homo sapien
tgcagagttgcagagccgcggaggg

SEQ ID NO: 980395 - DNA, 25 bp, Homo sapien
gtgcgcagccgaagggaggcctgca

SEQ ID NO: 980396 - DNA, 25 bp, Homo sapien
gggctttgctctcctaattgtgccc

SEQ ID NO: 980397 - DNA, 25 bp, Homo sapien
aagggggctttgctctcctaattgt

SEQ ID NO: 980398 - DNA, 25 bp, Homo sapien
tttgctctcctaattgtgcccactg

SEQ ID NO: 980399 - DNA, 25 bp, Homo sapien
gctttgctctcctaattgtgcccac

SEQ ID NO: 980400 - DNA, 25 bp, Homo sapien
cacgtcgcgctgctgtaaaggaaac

SEQ ID NO: 980401 - DNA, 25 bp, Homo sapien
agaaaccggactttgtgcaactttg

SEQ ID NO: 980402 - DNA, 25 bp, Homo sapien
tgtaaaggaaacctgccccgcgcag

SEQ ID NO: 980403 - DNA, 25 bp, Homo sapien
tggctggagcgggagaaaccggact

SEQ ID NO: 980404 - DNA, 25 bp, Homo sapien
actcctaactgatggcagtgccaag

SEQ ID NO: 980405 - DNA, 25 bp, Homo sapien
tgtacctcattctgcttaaagccga

SEQ ID NO: 980406 - DNA, 25 bp, Homo sapien
gatagcaagttctagtggaggacct

SEQ ID NO: 980407 - DNA, 25 bp, Homo sapien
gacttaactgtatgagattccccaa

SEQ ID NO: 980408 - DNA, 25 bp, Homo sapien
cagaaggctgtttggattactaatc

SEQ ID NO: 980409 - DNA, 25 bp, Homo sapien
cacacatagtgattagtgctcagga

SEQ ID NO: 980410 - DNA, 25 bp, Homo sapien
ccaaatggttgtctgtaggaggaga

SEQ ID NO: 980411 - DNA, 25 bp, Homo sapien
cattacatgctgaattgctcggaca

SEQ ID NO: 980412 - DNA, 25 bp, Homo sapien
tactgttattagctgggaagaccaa

SEQ ID NO: 980413 - DNA, 25 bp, Homo sapien
tctttaagcaacacagagctgagtc

SEQ ID NO: 980414 - DNA, 25 bp, Homo sapien
cattaaggaccaatagcatctgtgc

SEQ ID NO: 980415 - DNA, 25 bp, Homo sapien
tcgaatgacgttatgggcacatgcc

SEQ ID NO: 980416 - DNA, 25 bp, Homo sapien
gattttcaagatcacccaaagctgc

SEQ ID NO: 980417 - DNA, 25 bp, Homo sapien
tgccaggagctttcaggtacacatt

SEQ ID NO: 980418 - DNA, 25 bp, Homo sapien
ccaaagctgcactatcgtcccaaag

SEQ ID NO: 980419 - DNA, 25 bp, Homo sapien
gaagttaagcagctggagtatagga

SEQ ID NO: 980420 - DNA, 25 bp, Homo sapien
taaaagcccactgaccatgtagtgt

SEQ ID NO: 980421 - DNA, 25 bp, Homo sapien
caaaagtctgattctgggaaactga

SEQ ID NO: 980422 - DNA, 25 bp, Homo sapien
gacatttgcttgatctgctggctca

SEQ ID NO: 980423 - DNA, 25 bp, Homo sapien
gaaactgatgccactagcctaaaag

SEQ ID NO: 980424 - DNA, 25 bp, Homo sapien
agataacatctacaggtgttctctc

SEQ ID NO: 980425 - DNA, 25 bp, Homo sapien
taagataacatctacaggtgttctc

SEQ ID NO: 980426 - DNA, 25 bp, Homo sapien
ctaagataacatctacaggtgttct

SEQ ID NO: 980427 - DNA, 25 bp, Homo sapien
gataacatctacaggtgttctctct

SEQ ID NO: 980428 - DNA, 25 bp, Homo sapien
accaataaatcatagccacctctga

SEQ ID NO: 980429 - DNA, 25 bp, Homo sapien
ccaataaatcatagccacctctgaa

SEQ ID NO: 980430 - DNA, 25 bp, Homo sapien
caccaataaatcatagccacctctg

SEQ ID NO: 980431 - DNA, 25 bp, Homo sapien
tgaaatttatcatgctatccctgca

SEQ ID NO: 980432 - DNA, 25 bp, Homo sapien
aaacaagcactggataatgaaattt

SEQ ID NO: 980433 - DNA, 25 bp, Homo sapien
ttatcatgctatccctgcatctcct

SEQ ID NO: 980434 - DNA, 25 bp, Homo sapien
gtggaaactgaatcctaaacaaaca

SEQ ID NO: 980435 - DNA, 25 bp, Homo sapien
tagagcgaatgggaattcttgttct

SEQ ID NO: 980436 - DNA, 25 bp, Homo sapien
ctttatcggacctctcacatggctg

SEQ ID NO: 980437 - DNA, 25 bp, Homo sapien
gttctcaggtactttatcggacctc

SEQ ID NO: 980438 - DNA, 25 bp, Homo sapien
ctgccagatagagcgaatgggaatt

SEQ ID NO: 980439 - DNA, 25 bp, Homo sapien
gcaatatactgatagcaaaatgggt

SEQ ID NO: 980440 - DNA, 25 bp, Homo sapien
gttatactgttatcaggcaatatac

SEQ ID NO: 980441 - DNA, 25 bp, Homo sapien
tgttatcaggcaatatactgatagc

SEQ ID NO: 980442 - DNA, 25 bp, Homo sapien
tcaggcaatatactgatagcaaaat

SEQ ID NO: 980443 - DNA, 25 bp, Homo sapien
cagacacagtcacttcgagatcttc

SEQ ID NO: 980444 - DNA, 25 bp, Homo sapien
agcagcagcaaagttaggcttcagt

SEQ ID NO: 980445 - DNA, 25 bp, Homo sapien
agacacagtcacttcgagatcttcc

SEQ ID NO: 980446 - DNA, 25 bp, Homo sapien
gcagcaaagttaggcttcagtactt

SEQ ID NO: 980447 - DNA, 25 bp, Homo sapien
tcctccggagcctagagaaaactct

SEQ ID NO: 980448 - DNA, 25 bp, Homo sapien
tgagttctgggcacacggtaccctc

SEQ ID NO: 980449 - DNA, 25 bp, Homo sapien
gaactagtcaatatggtcctccgga

SEQ ID NO: 980450 - DNA, 25 bp, Homo sapien
tacagagtagtcatgttgcacccac

SEQ ID NO: 980451 - DNA, 25 bp, Homo sapien
tcacagtcccggactgtaaacttca

SEQ ID NO: 980452 - DNA, 25 bp, Homo sapien
gtcacagtcccggactgtaaacttc

SEQ ID NO: 980453 - DNA, 25 bp, Homo sapien
caaacctgcatcagtggggagtgca

SEQ ID NO: 980454 - DNA, 25 bp, Homo sapien
ctgttgtctggggtagtggttctca

SEQ ID NO: 980455 - DNA, 25 bp, Homo sapien
ttccatctgtactcagcactgtgtt

SEQ ID NO: 980456 - DNA, 25 bp, Homo sapien
ggagtgcaagggagacgtttccatc

SEQ ID NO: 980457 - DNA, 25 bp, Homo sapien
gcagtctcacaaagcatgaatgtaa

SEQ ID NO: 980458 - DNA, 25 bp, Homo sapien
aaggcagtctcacaaagcatgaatg

SEQ ID NO: 980459 - DNA, 25 bp, Homo sapien
caggaaggcagtctcacaaagcatg

SEQ ID NO: 980460 - DNA, 25 bp, Homo sapien
gcgggtcaggaaggcagtctcacaa

SEQ ID NO: 980461 - DNA, 25 bp, Homo sapien
aatgattttccaacaggctctggtg

SEQ ID NO: 980462 - DNA, 25 bp, Homo sapien
tgattttccaacaggctctggtgag

SEQ ID NO: 980463 - DNA, 25 bp, Homo sapien
cttgtatttcaaatgattttccaac

SEQ ID NO: 980464 - DNA, 25 bp, Homo sapien
ttcaaatgattttccaacaggctct

SEQ ID NO: 980465 - DNA, 25 bp, Homo sapien
tggatctgtacaggctaactgcagc

SEQ ID NO: 980466 - DNA, 25 bp, Homo sapien
catagtgtgtaggacatcgaggaaa

SEQ ID NO: 980467 - DNA, 25 bp, Homo sapien
gggagaccatgacaaagtaagagac

SEQ ID NO: 980468 - DNA, 25 bp, Homo sapien
tgcagcagtctatgcaggtctggac

SEQ ID NO: 980469 - DNA, 25 bp, Homo sapien
gtctgtgggaatgctgtacaaatgg

SEQ ID NO: 980470 - DNA, 25 bp, Homo sapien
ctggaaaatcgtgttgagtctgtgg

SEQ ID NO: 980471 - DNA, 25 bp, Homo sapien
agtctgtgggaatgctgtacaaatg

SEQ ID NO: 980472 - DNA, 25 bp, Homo sapien
tctgtgggaatgctgtacaaatggt

SEQ ID NO: 980473 - DNA, 25 bp, Homo sapien
ttcagaaagggaaggaggaatggta

SEQ ID NO: 980474 - DNA, 25 bp, Homo sapien
ctaggacaaattcagaaagggaagg

SEQ ID NO: 980475 - DNA, 25 bp, Homo sapien
aggacaaattcagaaagggaaggag

SEQ ID NO: 980476 - DNA, 25 bp, Homo sapien
aattcagaaagggaaggaggaatgg

SEQ ID NO: 980477 - DNA, 25 bp, Homo sapien
taaggaatgacacacatcaacagga

SEQ ID NO: 980478 - DNA, 25 bp, Homo sapien
cctcagatgaaaaggagttggtcac

SEQ ID NO: 980479 - DNA, 25 bp, Homo sapien
ggaaagcaacattagagttgtcctc

SEQ ID NO: 980480 - DNA, 25 bp, Homo sapien
ccaaaagtcataagagagtatgaaa

SEQ ID NO: 980481 - DNA, 25 bp, Homo sapien
cttaaagcttttgagggaatggcta

SEQ ID NO: 980482 - DNA, 25 bp, Homo sapien
taaaggacttgcttgataggaaagt

SEQ ID NO: 980483 - DNA, 25 bp, Homo sapien
gaggcagcagcagactagctcttaa

SEQ ID NO: 980484 - DNA, 25 bp, Homo sapien
aaaagctatagatgggccgggtgca

SEQ ID NO: 980485 - DNA, 25 bp, Homo sapien
tcggatcagcatgcagtaagcaaac

SEQ ID NO: 980486 - DNA, 25 bp, Homo sapien
tgatacaggactcccaatgcatggt

SEQ ID NO: 980487 - DNA, 25 bp, Homo sapien
taagcgactggcaattcggatcagc

SEQ ID NO: 980488 - DNA, 25 bp, Homo sapien
gcaagtcgatcattctttctaaggt

SEQ ID NO: 980489 - DNA, 25 bp, Homo sapien
ttcttgggcttcattgatccagcgc

SEQ ID NO: 980490 - DNA, 25 bp, Homo sapien
ctggaccataatattatcacttgat

SEQ ID NO: 980491 - DNA, 25 bp, Homo sapien
ttcattgatccagcgcttaaccaca

SEQ ID NO: 980492 - DNA, 25 bp, Homo sapien
gcgcttaaccacatcatagcttatc

SEQ ID NO: 980493 - DNA, 25 bp, Homo sapien
gaactggatacactggaaactttat

SEQ ID NO: 980494 - DNA, 25 bp, Homo sapien
cagtgctgaactggatacactggaa

SEQ ID NO: 980495 - DNA, 25 bp, Homo sapien
gataccagtgctgaactggatacac

SEQ ID NO: 980496 - DNA, 25 bp, Homo sapien
ggaagataccagtgctgaactggat

SEQ ID NO: 980497 - DNA, 25 bp, Homo sapien
ggccgggcctcggtatacatcttct

SEQ ID NO: 980498 - DNA, 25 bp, Homo sapien
gcctcggtatacatcttcttttcca

SEQ ID NO: 980499 - DNA, 25 bp, Homo sapien
gagagctctgatggccgggcctcgg

SEQ ID NO: 980500 - DNA, 25 bp, Homo sapien
tgatggccgggcctcggtatacatc

SEQ ID NO: 980501 - DNA, 25 bp, Homo sapien
ctgaagtaaggcagtaacaatgcca

SEQ ID NO: 980502 - DNA, 25 bp, Homo sapien
cagtaacaatgccagtgagctgagc

SEQ ID NO: 980503 - DNA, 25 bp, Homo sapien
taaggcagtaacaatgccagtgagc

SEQ ID NO: 980504 - DNA, 25 bp, Homo sapien
gagctgagccccaaaagacttgctc

SEQ ID NO: 980505 - DNA, 25 bp, Homo sapien
gagagagcgctcctgaacgaaatcg

SEQ ID NO: 980506 - DNA, 25 bp, Homo sapien
gcctggctaatgaatactcttagtc

SEQ ID NO: 980507 - DNA, 25 bp, Homo sapien
tcggccagaagtccctctcatgttt

SEQ ID NO: 980508 - DNA, 25 bp, Homo sapien
tactcttagtctataagagagagcg

SEQ ID NO: 980509 - DNA, 25 bp, Homo sapien
tgcccaggcttttctattgtgctta

SEQ ID NO: 980510 - DNA, 25 bp, Homo sapien
aaatccgtttcctatagtaaatgct

SEQ ID NO: 980511 - DNA, 25 bp, Homo sapien
caggcttttctattgtgcttaaatc

SEQ ID NO: 980512 - DNA, 25 bp, Homo sapien
cccaggcttttctattgtgcttaaa

SEQ ID NO: 980513 - DNA, 25 bp, Homo sapien
aaactgtgctcaggccagagagatg

SEQ ID NO: 980514 - DNA, 25 bp, Homo sapien
ggaagttttgagacgtggcatcact

SEQ ID NO: 980515 - DNA, 25 bp, Homo sapien
tatagttccctgattcagtctgccc

SEQ ID NO: 980516 - DNA, 25 bp, Homo sapien
aaagttggcttgcaaactgggcagg

SEQ ID NO: 980517 - DNA, 25 bp, Homo sapien
tgaaaccgggacgtaacttctcaca

SEQ ID NO: 980518 - DNA, 25 bp, Homo sapien
cagactttcactgggtgggtgccat

SEQ ID NO: 980519 - DNA, 25 bp, Homo sapien
tccccagagtacttcctaatgtgag

SEQ ID NO: 980520 - DNA, 25 bp, Homo sapien
tgggtgccatcacataagggtatgc

SEQ ID NO: 980521 - DNA, 25 bp, Homo sapien
agaaaggctcttgttcatccagctt

SEQ ID NO: 980522 - DNA, 25 bp, Homo sapien
tccagctttggcaaagagatattac

SEQ ID NO: 980523 - DNA, 25 bp, Homo sapien
gctgtgtgagaaaggctcttgttca

SEQ ID NO: 980524 - DNA, 25 bp, Homo sapien
aggctcttgttcatccagctttggc

SEQ ID NO: 980525 - DNA, 25 bp, Homo sapien
aatactccttcacgacgcaatggga

SEQ ID NO: 980526 - DNA, 25 bp, Homo sapien
cacaaaatactccttcacgacgcaa

SEQ ID NO: 980527 - DNA, 25 bp, Homo sapien
acagttgccttctactacattgtta

SEQ ID NO: 980528 - DNA, 25 bp, Homo sapien
cagttgccttctactacattgttag

SEQ ID NO: 980529 - DNA, 25 bp, Homo sapien
tcaggtatagacatctgccctccag

SEQ ID NO: 980530 - DNA, 25 bp, Homo sapien
ggtatagacatctgccctccaggac

SEQ ID NO: 980531 - DNA, 25 bp, Homo sapien
ccctccaggaccgactccatgggct

SEQ ID NO: 980532 - DNA, 25 bp, Homo sapien
gacatctgccctccaggaccgactc

SEQ ID NO: 980533 - DNA, 25 bp, Homo sapien
gagcccatgggcgaagatgatgtct

SEQ ID NO: 980534 - DNA, 25 bp, Homo sapien
ggaccactgcctcgagactgccaaa

SEQ ID NO: 980535 - DNA, 25 bp, Homo sapien
actgcctcgagactgccaaaatcca

SEQ ID NO: 980536 - DNA, 25 bp, Homo sapien
gatgtctttctccaaccggaccact

SEQ ID NO: 980537 - DNA, 25 bp, Homo sapien
tccaggggctcaatcacctcaatca

SEQ ID NO: 980538 - DNA, 25 bp, Homo sapien
gctccaggggctcaatcacctcaat

SEQ ID NO: 980539 - DNA, 25 bp, Homo sapien
ccaggggctcaatcacctcaatcat

SEQ ID NO: 980540 - DNA, 25 bp, Homo sapien
ctccaggggctcaatcacctcaatc

SEQ ID NO: 980541 - DNA, 25 bp, Homo sapien
aagaaacatgggtgctctttagaga

SEQ ID NO: 980542 - DNA, 25 bp, Homo sapien
tccctcaagcatctccaaaaactgt

SEQ ID NO: 980543 - DNA, 25 bp, Homo sapien
tctaaggtggatgcctacggacact

SEQ ID NO: 980544 - DNA, 25 bp, Homo sapien
tgtttttgacaggtccacttttgct

SEQ ID NO: 980545 - DNA, 25 bp, Homo sapien
ggcttcatggttaacattgtctcat

SEQ ID NO: 980546 - DNA, 25 bp, Homo sapien
gtgtccatacattggctattgctgc

SEQ ID NO: 980547 - DNA, 25 bp, Homo sapien
tgatttctttgggtcactattgcca

SEQ ID NO: 980548 - DNA, 25 bp, Homo sapien
ggctgaaccaaatgaggtgtccata

SEQ ID NO: 980549 - DNA, 25 bp, Homo sapien
tcattctacattcctatctacagtg

SEQ ID NO: 980550 - DNA, 25 bp, Homo sapien
tcacagggcaggtatataattaact

SEQ ID NO: 980551 - DNA, 25 bp, Homo sapien
tcataacacacatttcccacaaact

SEQ ID NO: 980552 - DNA, 25 bp, Homo sapien
ttctacggtggttgtatcattctac

SEQ ID NO: 980553 - DNA, 25 bp, Homo sapien
tcatcctagattttgaccatttaca

SEQ ID NO: 980554 - DNA, 25 bp, Homo sapien
catcctagattttgaccatttacat

SEQ ID NO: 980555 - DNA, 25 bp, Homo sapien
atcctagattttgaccatttacata

SEQ ID NO: 980556 - DNA, 25 bp, Homo sapien
tcctagattttgaccatttacatac

SEQ ID NO: 980557 - DNA, 25 bp, Homo sapien
tcacatcctcagagatggtagccat

SEQ ID NO: 980558 - DNA, 25 bp, Homo sapien
tttctttgatggtaaggtagcacat

SEQ ID NO: 980559 - DNA, 25 bp, Homo sapien
ctttgatggtaaggtagcacattct

SEQ ID NO: 980560 - DNA, 25 bp, Homo sapien
gagatggtagccatttctttgatgg

SEQ ID NO: 980561 - DNA, 25 bp, Homo sapien
gcttctgtagcttccgttgttccaa

SEQ ID NO: 980562 - DNA, 25 bp, Homo sapien
atcgcgtcattgcaaagaaggcttc

SEQ ID NO: 980563 - DNA, 25 bp, Homo sapien
aaacaatcgcgtcattgcaaagaag

SEQ ID NO: 980564 - DNA, 25 bp, Homo sapien
aaggcttctgtagcttccgttgttc

SEQ ID NO: 980565 - DNA, 25 bp, Homo sapien
cttggattgattggagtttcattga

SEQ ID NO: 980566 - DNA, 25 bp, Homo sapien
tcttggattgattggagtttcattg

SEQ ID NO: 980567 - DNA, 25 bp, Homo sapien
ctgtaaaacagcactcttctccaga

SEQ ID NO: 980568 - DNA, 25 bp, Homo sapien
gtaaaacagcactcttctccagatg

SEQ ID NO: 980569 - DNA, 25 bp, Homo sapien
aaacagcactcttctccagatgctg

SEQ ID NO: 980570 - DNA, 25 bp, Homo sapien
tcctgtaaaacagcactcttctcca

SEQ ID NO: 980571 - DNA, 25 bp, Homo sapien
ttctttttgaggatgcttggcatct

SEQ ID NO: 980572 - DNA, 25 bp, Homo sapien
actgtgggagatgctaccaaacact

SEQ ID NO: 980573 - DNA, 25 bp, Homo sapien
attcaacgagctgtgtcccacggga

SEQ ID NO: 980574 - DNA, 25 bp, Homo sapien
gacgggcatcaagacgcaggtcact

SEQ ID NO: 980575 - DNA, 25 bp, Homo sapien
tgctcccactaggggtccgacccta

SEQ ID NO: 980576 - DNA, 25 bp, Homo sapien
cactaggggtccgaccctaccagca

SEQ ID NO: 980577 - DNA, 25 bp, Homo sapien
cacacaccctgtgccgtcgacccca

SEQ ID NO: 980578 - DNA, 25 bp, Homo sapien
cggagacgcgcgcacgccctcggcc

SEQ ID NO: 980579 - DNA, 25 bp, Homo sapien
ctggacgcggagacgcgcgcacgcc

SEQ ID NO: 980580 - DNA, 25 bp, Homo sapien
ggagacgcgcgcacgccctcggccc

SEQ ID NO: 980581 - DNA, 25 bp, Homo sapien
acgcggagacgcgcgcacgccctcg

SEQ ID NO: 980582 - DNA, 25 bp, Homo sapien
caggcgccgcagccggcgagcggaa

SEQ ID NO: 980583 - DNA, 25 bp, Homo sapien
cgccgcagccggcgagcggaagagg

SEQ ID NO: 980584 - DNA, 25 bp, Homo sapien
agacccaccgcaaccgtcccaggcg

SEQ ID NO: 980585 - DNA, 25 bp, Homo sapien
agcgcccagacccaccgcaaccgtc

SEQ ID NO: 980586 - DNA, 25 bp, Homo sapien
tcccggcttgcgacccgggagccca

SEQ ID NO: 980587 - DNA, 25 bp, Homo sapien
gccgcgccttcactcggggccaagg

SEQ ID NO: 980588 - DNA, 25 bp, Homo sapien
ctctcacgccggttgggccgccgcg

SEQ ID NO: 980589 - DNA, 25 bp, Homo sapien
tcttgcggcccgccggagacttcgg

SEQ ID NO: 980590 - DNA, 25 bp, Homo sapien
tatttgggtggcgacttctgcggac

SEQ ID NO: 980591 - DNA, 25 bp, Homo sapien
tcagtctcaagagagcgaggcggga

SEQ ID NO: 980592 - DNA, 25 bp, Homo sapien
gtggcgacttctgcggacccctcag

SEQ ID NO: 980593 - DNA, 25 bp, Homo sapien
gttttatttgggtggcgacttctgc

SEQ ID NO: 980594 - DNA, 25 bp, Homo sapien
ggcctttttgataatccactgcggg

SEQ ID NO: 980595 - DNA, 25 bp, Homo sapien
aaattggcctttcactcgctgactt

SEQ ID NO: 980596 - DNA, 25 bp, Homo sapien
tgtcttccaagagcgatgcgagtgt

SEQ ID NO: 980597 - DNA, 25 bp, Homo sapien
cccgaatcactttggaaattggcct

SEQ ID NO: 980598 - DNA, 25 bp, Homo sapien
gaggatttaaacagggtccagagct

SEQ ID NO: 980599 - DNA, 25 bp, Homo sapien
gatatagcttagtaaacactgctag

SEQ ID NO: 980600 - DNA, 25 bp, Homo sapien
catgctatagggaaaaatagtctcc

SEQ ID NO: 980601 - DNA, 25 bp, Homo sapien
aatctcagtccagtaagcctttgct

SEQ ID NO: 980602 - DNA, 25 bp, Homo sapien
ttctgtgtcctcaaagcgtagactt

SEQ ID NO: 980603 - DNA, 25 bp, Homo sapien
catatctctctcatggactggagca

SEQ ID NO: 980604 - DNA, 25 bp, Homo sapien
gctcttgaaatcattgtcagtggaa

SEQ ID NO: 980605 - DNA, 25 bp, Homo sapien
tgaatacttcccttcgctcttgaaa

SEQ ID NO: 980606 - DNA, 25 bp, Homo sapien
tgttctcgcttggatgtgggatcat

SEQ ID NO: 980607 - DNA, 25 bp, Homo sapien
gcagccagaggttctcagtgggttt

SEQ ID NO: 980608 - DNA, 25 bp, Homo sapien
gggaagattggtttcagcttagatc

SEQ ID NO: 980609 - DNA, 25 bp, Homo sapien
cagtgggtttgtgctgatgatgact

SEQ ID NO: 980610 - DNA, 25 bp, Homo sapien
ggttttgtctcttccacaactacta

SEQ ID NO: 980611 - DNA, 25 bp, Homo sapien
acaactactaatgcacctttcttca

SEQ ID NO: 980612 - DNA, 25 bp, Homo sapien
ggtcttcagtatctctcaccttgac

SEQ ID NO: 980613 - DNA, 25 bp, Homo sapien
gctaatgatttagttcaggtcttca

SEQ ID NO: 980614 - DNA, 25 bp, Homo sapien
gggttgttggtcataatcagtaacg

SEQ ID NO: 980615 - DNA, 25 bp, Homo sapien
tcagtaacgtcttatcctggtcata

SEQ ID NO: 980616 - DNA, 25 bp, Homo sapien
cttgagcagtaactccttggaaaaa

SEQ ID NO: 980617 - DNA, 25 bp, Homo sapien
tctccttgtcttgctgggtgattga

SEQ ID NO: 980618 - DNA, 25 bp, Homo sapien
caggttaacaaatcggttggctgat

SEQ ID NO: 980619 - DNA, 25 bp, Homo sapien
aaatcggttggctgatacttagcct

SEQ ID NO: 980620 - DNA, 25 bp, Homo sapien
aacaaatcggttggctgatacttag

SEQ ID NO: 980621 - DNA, 25 bp, Homo sapien
gccaagagcaggttaacaaatcggt

SEQ ID NO: 980622 - DNA, 25 bp, Homo sapien
ctggcatcataacctagaggcagct

SEQ ID NO: 980623 - DNA, 25 bp, Homo sapien
tggcatcataacctagaggcagctc

SEQ ID NO: 980624 - DNA, 25 bp, Homo sapien
ggcatcataacctagaggcagctct

SEQ ID NO: 980625 - DNA, 25 bp, Homo sapien
tctctagaacaaattttgattgccc

SEQ ID NO: 980626 - DNA, 25 bp, Homo sapien
ttgattgcccgactgcatcagaaat

SEQ ID NO: 980627 - DNA, 25 bp, Homo sapien
tgtaatgccgaaggttctctagaac

SEQ ID NO: 980628 - DNA, 25 bp, Homo sapien
caaatttggatggactgtgtaatgc

SEQ ID NO: 980629 - DNA, 25 bp, Homo sapien
ctttgctattgacaaccattccttt

SEQ ID NO: 980630 - DNA, 25 bp, Homo sapien
tttgctattgacaaccattcctttc

SEQ ID NO: 980631 - DNA, 25 bp, Homo sapien
tgctattgacaaccattcctttctc

SEQ ID NO: 980632 - DNA, 25 bp, Homo sapien
ttgctattgacaaccattcctttct

SEQ ID NO: 980633 - DNA, 25 bp, Homo sapien
gattggccaatgattagccaatgaa

SEQ ID NO: 980634 - DNA, 25 bp, Homo sapien
ttttgccagtgattggccaatgatt

SEQ ID NO: 980635 - DNA, 25 bp, Homo sapien
ccacatggaaattgccctgtttttg

SEQ ID NO: 980636 - DNA, 25 bp, Homo sapien
ttccacatggaaattgccctgtttt

SEQ ID NO: 980637 - DNA, 25 bp, Homo sapien
tgactgctagttggccaacccaagg

SEQ ID NO: 980638 - DNA, 25 bp, Homo sapien
cacagtgtgtactcatgccccattc

SEQ ID NO: 980639 - DNA, 25 bp, Homo sapien
caaggcaggtattcacccaaggcca

SEQ ID NO: 980640 - DNA, 25 bp, Homo sapien
tctaaatagtccacgttctgcaggg

SEQ ID NO: 980641 - DNA, 25 bp, Homo sapien
aattgggcagtataagtcttgggtt

SEQ ID NO: 980642 - DNA, 25 bp, Homo sapien
tgagctgtcaaattgggcagtataa

SEQ ID NO: 980643 - DNA, 25 bp, Homo sapien
tcttgggttgctagtctgcaggcca

SEQ ID NO: 980644 - DNA, 25 bp, Homo sapien
agaatgtaaaaacctggtgtacact

SEQ ID NO: 980645 - DNA, 25 bp, Homo sapien
gaaatcatagtttggtgaagaaggc

SEQ ID NO: 980646 - DNA, 25 bp, Homo sapien
tggcatgggaactttccattttgaa

SEQ ID NO: 980647 - DNA, 25 bp, Homo sapien
aagtctttggcatgggaactttcca

SEQ ID NO: 980648 - DNA, 25 bp, Homo sapien
ctttaagaacatcacgaaatcatag

SEQ ID NO: 980649 - DNA, 25 bp, Homo sapien
ctggaggagacagagggaatttgtg

SEQ ID NO: 980650 - DNA, 25 bp, Homo sapien
caaactctagactatagtcactggg

SEQ ID NO: 980651 - DNA, 25 bp, Homo sapien
gcgggtcttgtctgcctcttaagct

SEQ ID NO: 980652 - DNA, 25 bp, Homo sapien
agctgtgagtcccttaaaagtggaa

SEQ ID NO: 980653 - DNA, 25 bp, Homo sapien
tcacttttcttatgtgcgggtcttg

SEQ ID NO: 980654 - DNA, 25 bp, Homo sapien
actttccacattcagatggagactt

SEQ ID NO: 980655 - DNA, 25 bp, Homo sapien
ggagacttcacaccccaggtaacag

SEQ ID NO: 980656 - DNA, 25 bp, Homo sapien
cattcagatggagacttcacacccc

SEQ ID NO: 980657 - DNA, 25 bp, Homo sapien
tacataactttccacattcagatgg

SEQ ID NO: 980658 - DNA, 25 bp, Homo sapien
ctactatacctagccactcttcctt

SEQ ID NO: 980659 - DNA, 25 bp, Homo sapien
gctactatacctagccactcttcct

SEQ ID NO: 980660 - DNA, 25 bp, Homo sapien
gagctactatacctagccactcttc

SEQ ID NO: 980661 - DNA, 25 bp, Homo sapien
tgagctactatacctagccactctt

SEQ ID NO: 980662 - DNA, 25 bp, Homo sapien
tgtccattattgatgacccaatcac

SEQ ID NO: 980663 - DNA, 25 bp, Homo sapien
tgctttcaacgtggccctgacatgt

SEQ ID NO: 980664 - DNA, 25 bp, Homo sapien
cacttgttaccacgatagcaatgta

SEQ ID NO: 980665 - DNA, 25 bp, Homo sapien
cctccgctctgtgctttcaacgtgg

SEQ ID NO: 980666 - DNA, 25 bp, Homo sapien
gccttgttgcgaagcctttttcctg

SEQ ID NO: 980667 - DNA, 25 bp, Homo sapien
gtcattctgttatgctttagccttg

SEQ ID NO: 980668 - DNA, 25 bp, Homo sapien
gcttttggaagcatagacaacctgg

SEQ ID NO: 980669 - DNA, 25 bp, Homo sapien
tgtctactgacacgcagctcaatgt

SEQ ID NO: 980670 - DNA, 25 bp, Homo sapien
tgctgcctatattcagcgttaggcc

SEQ ID NO: 980671 - DNA, 25 bp, Homo sapien
tgaacttctcgttgacccctctagc

SEQ ID NO: 980672 - DNA, 25 bp, Homo sapien
cgttaggccagtagcaagggtatcc

SEQ ID NO: 980673 - DNA, 25 bp, Homo sapien
gggtatccagtgaacttctcgttga

SEQ ID NO: 980674 - DNA, 25 bp, Homo sapien
tgttctgtggccacgatatggcaga

SEQ ID NO: 980675 - DNA, 25 bp, Homo sapien
tgagtaagatgcctagagctggccc

SEQ ID NO: 980676 - DNA, 25 bp, Homo sapien
tggccacgatatggcagaataagag

SEQ ID NO: 980677 - DNA, 25 bp, Homo sapien
ctttcttcctgctttaaacatgagt

SEQ ID NO: 980678 - DNA, 25 bp, Homo sapien
tgtcattaacaggagtgggagcttc

SEQ ID NO: 980679 - DNA, 25 bp, Homo sapien
ctgtcattaacaggagtgggagctt

SEQ ID NO: 980680 - DNA, 25 bp, Homo sapien
tatgagcggtcttgtttcgggcccc

SEQ ID NO: 980681 - DNA, 25 bp, Homo sapien
tagggtcctatgagattacagcatc

SEQ ID NO: 980682 - DNA, 25 bp, Homo sapien
gaaagagtcacttagcaggccagac

SEQ ID NO: 980683 - DNA, 25 bp, Homo sapien
caagcgcagggttccaaatcatgca

SEQ ID NO: 980684 - DNA, 25 bp, Homo sapien
tgggatccctatttaaaagatgcta

SEQ ID NO: 980685 - DNA, 25 bp, Homo sapien
gggcataagcctcccatcaacctgg

SEQ ID NO: 980686 - DNA, 25 bp, Homo sapien
catcaacctgggatccctatttaaa

SEQ ID NO: 980687 - DNA, 25 bp, Homo sapien
gggattggagggcataagcctccca

SEQ ID NO: 980688 - DNA, 25 bp, Homo sapien
acaccagagtcctttgagactggga

SEQ ID NO: 980689 - DNA, 25 bp, Homo sapien
ggagctcctcaggcatctgagaatt

SEQ ID NO: 980690 - DNA, 25 bp, Homo sapien
cctctccaaggtccgcctggtggat

SEQ ID NO: 980691 - DNA, 25 bp, Homo sapien
catcccagtcctggacatttccaag

SEQ ID NO: 980692 - DNA, 25 bp, Homo sapien
ctctggagagtacgggagttcatcc

SEQ ID NO: 980693 - DNA, 25 bp, Homo sapien
gggagaatcttcagtactctggaga

SEQ ID NO: 980694 - DNA, 25 bp, Homo sapien
ccccacttttaggatgatatacacg

SEQ ID NO: 980695 - DNA, 25 bp, Homo sapien
gatatacacgttgcaagaattcccg

SEQ ID NO: 980696 - DNA, 25 bp, Homo sapien
cagaggaaccagtctgtgccttggt

SEQ ID NO: 980697 - DNA, 25 bp, Homo sapien
ggaaccagtctgtgccttggtgtaa

SEQ ID NO: 980698 - DNA, 25 bp, Homo sapien
gagcagaggaaccagtctgtgcctt

SEQ ID NO: 980699 - DNA, 25 bp, Homo sapien
agagcagaggaaccagtctgtgcct

SEQ ID NO: 980700 - DNA, 25 bp, Homo sapien
ggggatcatccttgagggtaagact

SEQ ID NO: 980701 - DNA, 25 bp, Homo sapien
gatcatccttgagggtaagactgac

SEQ ID NO: 980702 - DNA, 25 bp, Homo sapien
tgggggatcatccttgagggtaaga

SEQ ID NO: 980703 - DNA, 25 bp, Homo sapien
tcatccttgagggtaagactgacag

SEQ ID NO: 980704 - DNA, 25 bp, Homo sapien
aggcaggtggtgaagctgggcgccg

SEQ ID NO: 980705 - DNA, 25 bp, Homo sapien
caggtggtgaagctgggcgccgggc

SEQ ID NO: 980706 - DNA, 25 bp, Homo sapien
ggtggtgaagctgggcgccgggccg

SEQ ID NO: 980707 - DNA, 25 bp, Homo sapien
cggagccggaggcggagctttccac

SEQ ID NO: 980708 - DNA, 25 bp, Homo sapien
cgatcatatctggatgataggttgg

SEQ ID NO: 980709 - DNA, 25 bp, Homo sapien
cgcagtcgagccagtcgcaggagaa

SEQ ID NO: 980710 - DNA, 25 bp, Homo sapien
gacgtccccggtactcgatcatatc

SEQ ID NO: 980711 - DNA, 25 bp, Homo sapien
cggaacgcgtaaacttcttgtcgca

SEQ ID NO: 980712 - DNA, 25 bp, Homo sapien
cttgaggtgcgacgacttgtaatag

SEQ ID NO: 980713 - DNA, 25 bp, Homo sapien
gcgacgacttgtaataggctttggt

SEQ ID NO: 980714 - DNA, 25 bp, Homo sapien
cgacttgtaataggctttggtgcag

SEQ ID NO: 980715 - DNA, 25 bp, Homo sapien
aataggctttggtgcagcccgggaa

SEQ ID NO: 980716 - DNA, 25 bp, Homo sapien
gcaggtgtgacagacctcctccggg

SEQ ID NO: 980717 - DNA, 25 bp, Homo sapien
cagcaggtgtgacagacctcctccg

SEQ ID NO: 980718 - DNA, 25 bp, Homo sapien
gcagcaggtgtgacagacctcctcc

SEQ ID NO: 980719 - DNA, 25 bp, Homo sapien
agcaggtgtgacagacctcctccgg

SEQ ID NO: 980720 - DNA, 25 bp, Homo sapien
aggcgcgcttgggacggcgggcgca

SEQ ID NO: 980721 - DNA, 25 bp, Homo sapien
aggcgggagccagctcggagcacgg

SEQ ID NO: 980722 - DNA, 25 bp, Homo sapien
aggagctctcgggagcgcagaccgc

SEQ ID NO: 980723 - DNA, 25 bp, Homo sapien
cgcggcgccggaggcgggagccagc

SEQ ID NO: 980724 - DNA, 25 bp, Homo sapien
ctggacggagcacgggatcgggtcg

SEQ ID NO: 980725 - DNA, 25 bp, Homo sapien
ctcgccagagctgccgcgcaagtcc

SEQ ID NO: 980726 - DNA, 25 bp, Homo sapien
tcgggtcggagaagccggacgaggc

SEQ ID NO: 980727 - DNA, 25 bp, Homo sapien
cggacgaggcgcgtggagcttcccc

SEQ ID NO: 980728 - DNA, 25 bp, Homo sapien
cccgatggccccggacccggcagag

SEQ ID NO: 980729 - DNA, 25 bp, Homo sapien
gagcggactccggatgcgccgcacc

SEQ ID NO: 980730 - DNA, 25 bp, Homo sapien
gatggccccggacccggcagagcgg

SEQ ID NO: 980731 - DNA, 25 bp, Homo sapien
cagagcggactccggatgcgccgca

SEQ ID NO: 980732 - DNA, 25 bp, Homo sapien
ggcgcccgcggacatggacaccagg

SEQ ID NO: 980733 - DNA, 25 bp, Homo sapien
gcgggcggcggtgaaccacggcgcc

SEQ ID NO: 980734 - DNA, 25 bp, Homo sapien
actcggcggcgaagtagtccaggca

SEQ ID NO: 980735 - DNA, 25 bp, Homo sapien
cggcgcccgcggacatggacaccag

SEQ ID NO: 980736 - DNA, 25 bp, Homo sapien
cgcggccccccggctaagtcatgtt

SEQ ID NO: 980737 - DNA, 25 bp, Homo sapien
tattctgccttccagaataaaggcg

SEQ ID NO: 980738 - DNA, 25 bp, Homo sapien
gcccttggaatgtctggctggactc

SEQ ID NO: 980739 - DNA, 25 bp, Homo sapien
ccttccagaataaaggcgagcaggg

SEQ ID NO: 980740 - DNA, 25 bp, Homo sapien
ctgccaaataagtgagtggactggg

SEQ ID NO: 980741 - DNA, 25 bp, Homo sapien
gggctggtaaggtgtcctgtcaact

SEQ ID NO: 980742 - DNA, 25 bp, Homo sapien
catcgttttgcctgtccaatagccc

SEQ ID NO: 980743 - DNA, 25 bp, Homo sapien
gggatgtggcagacatcgttttgcc

SEQ ID NO: 980744 - DNA, 25 bp, Homo sapien
catagaaccccagtcagctttggga

SEQ ID NO: 980745 - DNA, 25 bp, Homo sapien
gacctgggaagttgcactctgagtc

SEQ ID NO: 980746 - DNA, 25 bp, Homo sapien
aagttgcactctgagtctggagtgg

SEQ ID NO: 980747 - DNA, 25 bp, Homo sapien
ctagggcaaggacctgggaagttgc

SEQ ID NO: 980748 - DNA, 25 bp, Homo sapien
gcaaggacctgggaagttgcactct

SEQ ID NO: 980749 - DNA, 25 bp, Homo sapien
ccagctgggtcgccagcaccacatt

SEQ ID NO: 980750 - DNA, 25 bp, Homo sapien
ctgcagaccagctgggtcgccagca

SEQ ID NO: 980751 - DNA, 25 bp, Homo sapien
cagaccagctgggtcgccagcacca

SEQ ID NO: 980752 - DNA, 25 bp, Homo sapien
gaccagctgggtcgccagcaccaca

SEQ ID NO: 980753 - DNA, 25 bp, Homo sapien
taaatcctgccgttctgaagttagc

SEQ ID NO: 980754 - DNA, 25 bp, Homo sapien
tttccaataaatcctgccgttctga

SEQ ID NO: 980755 - DNA, 25 bp, Homo sapien
tctgaagttagctccagtagccttg

SEQ ID NO: 980756 - DNA, 25 bp, Homo sapien
tgccgttctgaagttagctccagta

SEQ ID NO: 980757 - DNA, 25 bp, Homo sapien
tccctcatgggcctcagtcacctca

SEQ ID NO: 980758 - DNA, 25 bp, Homo sapien
ctcagtcacctcatatgtggtcccc

SEQ ID NO: 980759 - DNA, 25 bp, Homo sapien
tgggcctcagtcacctcatatgtgg

SEQ ID NO: 980760 - DNA, 25 bp, Homo sapien
cttccctcatgggcctcagtcacct

SEQ ID NO: 980761 - DNA, 25 bp, Homo sapien
gagcagcgtgactctctctctgtac

SEQ ID NO: 980762 - DNA, 25 bp, Homo sapien
tctctctgtactgtctcctttccag

SEQ ID NO: 980763 - DNA, 25 bp, Homo sapien
ctgcagagcagcgtgactctctctc

SEQ ID NO: 980764 - DNA, 25 bp, Homo sapien
tctctctctgtactgtctcctttcc

SEQ ID NO: 980765 - DNA, 25 bp, Homo sapien
ctactacagcatctattaagaaagg

SEQ ID NO: 980766 - DNA, 25 bp, Homo sapien
aaagatatcttttggctggacgtgg

SEQ ID NO: 980767 - DNA, 25 bp, Homo sapien
tcttttttactagacaggcagttta

SEQ ID NO: 980768 - DNA, 25 bp, Homo sapien
ctaagacgcagtgccgcccaagaaa

SEQ ID NO: 980769 - DNA, 25 bp, Homo sapien
ttagtgattccagacttcattctct

SEQ ID NO: 980770 - DNA, 25 bp, Homo sapien
tcccagggtataacactattagtga

SEQ ID NO: 980771 - DNA, 25 bp, Homo sapien
gttgcatgagggaacttacattccc

SEQ ID NO: 980772 - DNA, 25 bp, Homo sapien
cctaggtgggaatgatttatcttac

SEQ ID NO: 980773 - DNA, 25 bp, Homo sapien
ttcagtaagcactgacgggtcactt

SEQ ID NO: 980774 - DNA, 25 bp, Homo sapien
aagcactgacgggtcacttccaatg

SEQ ID NO: 980775 - DNA, 25 bp, Homo sapien
gacgggtcacttccaatgttccagg

SEQ ID NO: 980776 - DNA, 25 bp, Homo sapien
cactgacgggtcacttccaatgttc

SEQ ID NO: 980777 - DNA, 25 bp, Homo sapien
tccacaggaatcgtagagacaaggg

SEQ ID NO: 980778 - DNA, 25 bp, Homo sapien
tggaaacttccagtattatcagccc

SEQ ID NO: 980779 - DNA, 25 bp, Homo sapien
cagtgcaggtactaactgtacatgc

SEQ ID NO: 980780 - DNA, 25 bp, Homo sapien
gtttatttcagtagtaaagtccaca

SEQ ID NO: 980781 - DNA, 25 bp, Homo sapien
agtgagactatgactatctggggga

SEQ ID NO: 980782 - DNA, 25 bp, Homo sapien
gagtgagactatgactatctggggg

SEQ ID NO: 980783 - DNA, 25 bp, Homo sapien
gagggagtgagactatgactatctg

SEQ ID NO: 980784 - DNA, 25 bp, Homo sapien
gggagtgagactatgactatctggg

SEQ ID NO: 980785 - DNA, 25 bp, Homo sapien
tacccagggagccaattcatttagc

SEQ ID NO: 980786 - DNA, 25 bp, Homo sapien
tgttcaatgaggcagtatatccagc

SEQ ID NO: 980787 - DNA, 25 bp, Homo sapien
caataagggtgtgtgtctagcacca

SEQ ID NO: 980788 - DNA, 25 bp, Homo sapien
aaaattacatcaaccgtgctaggag

SEQ ID NO: 980789 - DNA, 25 bp, Homo sapien
taaatatgtagacacttgggtactg

SEQ ID NO: 980790 - DNA, 25 bp, Homo sapien
tcactttcaccgagaggtcatctga

SEQ ID NO: 980791 - DNA, 25 bp, Homo sapien
tgcatacgtttgaaaagggaagctt

SEQ ID NO: 980792 - DNA, 25 bp, Homo sapien
tgatctcaaatatagtaagggcatc

SEQ ID NO: 980793 - DNA, 25 bp, Homo sapien
atcatcctggatcacattctccaga

SEQ ID NO: 980794 - DNA, 25 bp, Homo sapien
catcctggatcacattctccagaaa

SEQ ID NO: 980795 - DNA, 25 bp, Homo sapien
atcctggatcacattctccagaaac

SEQ ID NO: 980796 - DNA, 25 bp, Homo sapien
agaaatgctcttgacaccatcacac

SEQ ID NO: 980797 - DNA, 25 bp, Homo sapien
gggtcatgtggacgaagcctgcttc

SEQ ID NO: 980798 - DNA, 25 bp, Homo sapien
ttccacatgcggctcctctccgtgt

SEQ ID NO: 980799 - DNA, 25 bp, Homo sapien
ttcagcttcagaatgtgctgtcagc

SEQ ID NO: 980800 - DNA, 25 bp, Homo sapien
tgtcagcacggtctctaatcctcag

SEQ ID NO: 980801 - DNA, 25 bp, Homo sapien
ttcagcccactgctaggtaactcac

SEQ ID NO: 980802 - DNA, 25 bp, Homo sapien
attcagcccactgctaggtaactca

SEQ ID NO: 980803 - DNA, 25 bp, Homo sapien
gaagctcactcctgtgtgtcgggca

SEQ ID NO: 980804 - DNA, 25 bp, Homo sapien
aagctcactcctgtgtgtcgggcac

SEQ ID NO: 980805 - DNA, 25 bp, Homo sapien
cgtgttccacgatcgcttgtgctga

SEQ ID NO: 980806 - DNA, 25 bp, Homo sapien
ggtggacgtgttccacgatcgcttg

SEQ ID NO: 980807 - DNA, 25 bp, Homo sapien
tccacgatcgcttgtgctgaatcca

SEQ ID NO: 980808 - DNA, 25 bp, Homo sapien
ttctgggtggacgtgttccacgatc

SEQ ID NO: 980809 - DNA, 25 bp, Homo sapien
gaaacagtgggagcacgtgtacctc

SEQ ID NO: 980810 - DNA, 25 bp, Homo sapien
ggttcagcttgtacctgtgtttctg

SEQ ID NO: 980811 - DNA, 25 bp, Homo sapien
tctcccattactagacgctttgata

SEQ ID NO: 980812 - DNA, 25 bp, Homo sapien
tactgagtgatatttgaactggttc

SEQ ID NO: 980813 - DNA, 25 bp, Homo sapien
cttggtggtactgaaacaggaaaag

SEQ ID NO: 980814 - DNA, 25 bp, Homo sapien
tcacagttgaaactcagtgaagtgt

SEQ ID NO: 980815 - DNA, 25 bp, Homo sapien
ccatgcgctctcctgaagatacctt

SEQ ID NO: 980816 - DNA, 25 bp, Homo sapien
tggggtcagattgcacagctgtctt

SEQ ID NO: 980817 - DNA, 25 bp, Homo sapien
gatatctggcaacagtgctggagca

SEQ ID NO: 980818 - DNA, 25 bp, Homo sapien
ctcagtttcaacagagtctgactct

SEQ ID NO: 980819 - DNA, 25 bp, Homo sapien
tctgcttcagtcgtgtcttcggcat

SEQ ID NO: 980820 - DNA, 25 bp, Homo sapien
cagtgactcagcgataacgtgaagt

SEQ ID NO: 980821 - DNA, 25 bp, Homo sapien
ggccattttactaataccttctatc

SEQ ID NO: 980822 - DNA, 25 bp, Homo sapien
tgctttccatacatcgctggctgct

SEQ ID NO: 980823 - DNA, 25 bp, Homo sapien
tctagcatttgtagatgttctgctg

SEQ ID NO: 980824 - DNA, 25 bp, Homo sapien
gtgaactcaattgaatggcaaaagg

SEQ ID NO: 980825 - DNA, 25 bp, Homo sapien
ttcagttggtcgaggatcttgttat

SEQ ID NO: 980826 - DNA, 25 bp, Homo sapien
gttcattcagttggtcgaggatctt

SEQ ID NO: 980827 - DNA, 25 bp, Homo sapien
agttggtcgaggatcttgttatgac

SEQ ID NO: 980828 - DNA, 25 bp, Homo sapien
tgttcattcagttggtcgaggatct

SEQ ID NO: 980829 - DNA, 25 bp, Homo sapien
cagggcataatgtgccccacagctt

SEQ ID NO: 980830 - DNA, 25 bp, Homo sapien
gaactcctgtaggtgttgcatcgtc

SEQ ID NO: 980831 - DNA, 25 bp, Homo sapien
agctttccctatctctaaaccgtgg

SEQ ID NO: 980832 - DNA, 25 bp, Homo sapien
gtaggtgttgcatcgtctcttcagc

SEQ ID NO: 980833 - DNA, 25 bp, Homo sapien
tctcgtggaattcactggctgccag

SEQ ID NO: 980834 - DNA, 25 bp, Homo sapien
gcagtgctcgaggtcatcgttaaaa

SEQ ID NO: 980835 - DNA, 25 bp, Homo sapien
cactatgggtgtaaccgtaaggcct

SEQ ID NO: 980836 - DNA, 25 bp, Homo sapien
tggtaacatcctctcgcagtgctcg

SEQ ID NO: 980837 - DNA, 25 bp, Homo sapien
agaatcggacatacataattatatg

SEQ ID NO: 980838 - DNA, 25 bp, Homo sapien
gtatgcagataggtatgtgtataaa

SEQ ID NO: 980839 - DNA, 25 bp, Homo sapien
agttaggtatatgaaacatcagtcc

SEQ ID NO: 980840 - DNA, 25 bp, Homo sapien
caagcaagagcacagagttaggtat

SEQ ID NO: 980841 - DNA, 25 bp, Homo sapien
tgcagagataggtatgactccacat

SEQ ID NO: 980842 - DNA, 25 bp, Homo sapien
cttgaaatgcagagataggtatgac

SEQ ID NO: 980843 - DNA, 25 bp, Homo sapien
aatgcagagataggtatgactccac

SEQ ID NO: 980844 - DNA, 25 bp, Homo sapien
gaaatgcagagataggtatgactcc

SEQ ID NO: 980845 - DNA, 25 bp, Homo sapien
aagtagctaggattagagcacccac

SEQ ID NO: 980846 - DNA, 25 bp, Homo sapien
agctaggattagagcacccaccacc

SEQ ID NO: 980847 - DNA, 25 bp, Homo sapien
cccaagtagctaggattagagcacc

SEQ ID NO: 980848 - DNA, 25 bp, Homo sapien
acctcctgggttcaagcaattctcc

SEQ ID NO: 980849 - DNA, 25 bp, Homo sapien
tgagaatgctgtccattaaacagga

SEQ ID NO: 980850 - DNA, 25 bp, Homo sapien
taggacatgcattagattccacagc

SEQ ID NO: 980851 - DNA, 25 bp, Homo sapien
gatatggaagtaggacatgcattag

SEQ ID NO: 980852 - DNA, 25 bp, Homo sapien
aaggaggagatttggatatggaagt

SEQ ID NO: 980853 - DNA, 25 bp, Homo sapien
gctgcagttgagaaatgcagagatc

SEQ ID NO: 980854 - DNA, 25 bp, Homo sapien
tcaggtccctcagtccagtatctgc

SEQ ID NO: 980855 - DNA, 25 bp, Homo sapien
gacagttttctggactcaggtccct

SEQ ID NO: 980856 - DNA, 25 bp, Homo sapien
tctcacagctgatcctgaagtggtc

SEQ ID NO: 980857 - DNA, 25 bp, Homo sapien
taagccagtatcctgagctgagaaa

SEQ ID NO: 980858 - DNA, 25 bp, Homo sapien
ggtggcacttgcgatcagtttagct

SEQ ID NO: 980859 - DNA, 25 bp, Homo sapien
ttttagcagcatggaagggtggcac

SEQ ID NO: 980860 - DNA, 25 bp, Homo sapien
tcagtgcctagagagtacctggagc

SEQ ID NO: 980861 - DNA, 25 bp, Homo sapien
cagcttgctcccttctaaggcagca

SEQ ID NO: 980862 - DNA, 25 bp, Homo sapien
cagggttggccattcggtgcaaggc

SEQ ID NO: 980863 - DNA, 25 bp, Homo sapien
gcatctattgtttccgtacagtggg

SEQ ID NO: 980864 - DNA, 25 bp, Homo sapien
tattgtttccgtacagtgggcaggg

SEQ ID NO: 980865 - DNA, 25 bp, Homo sapien
tggtcacctgcaagctcgttgagag

SEQ ID NO: 980866 - DNA, 25 bp, Homo sapien
tcgttgagagaggacccacgaaggc

SEQ ID NO: 980867 - DNA, 25 bp, Homo sapien
aaggccactcgtgactctcagcagg

SEQ ID NO: 980868 - DNA, 25 bp, Homo sapien
ttttggctggcgcagtggtcacctg

SEQ ID NO: 980869 - DNA, 25 bp, Homo sapien
ttccagagtatgtgtacgagagaga

SEQ ID NO: 980870 - DNA, 25 bp, Homo sapien
ggctttccagagtatgtgtacgaga

SEQ ID NO: 980871 - DNA, 25 bp, Homo sapien
gagtatgtgtacgagagagagaaga

SEQ ID NO: 980872 - DNA, 25 bp, Homo sapien
ctggctttccagagtatgtgtacga

SEQ ID NO: 980873 - DNA, 25 bp, Homo sapien
gccccaacggtcaccaatacatttc

SEQ ID NO: 980874 - DNA, 25 bp, Homo sapien
gttcttgtccatggccccaacggtc

SEQ ID NO: 980875 - DNA, 25 bp, Homo sapien
caacggtcaccaatacatttcctct

SEQ ID NO: 980876 - DNA, 25 bp, Homo sapien
cggtcaccaatacatttcctctcag

SEQ ID NO: 980877 - DNA, 25 bp, Homo sapien
cgatttcagatggtgctagaaaatt

SEQ ID NO: 980878 - DNA, 25 bp, Homo sapien
ccgatttcagatggtgctagaaaat

SEQ ID NO: 980879 - DNA, 25 bp, Homo sapien
gatttcagatggtgctagaaaatta

SEQ ID NO: 980880 - DNA, 25 bp, Homo sapien
gagggcccaaatcttactaaatcca

SEQ ID NO: 980881 - DNA, 25 bp, Homo sapien
ctaaatccagcatacattgggctct

SEQ ID NO: 980882 - DNA, 25 bp, Homo sapien
ggctctttaacccaggcacaatgga

SEQ ID NO: 980883 - DNA, 25 bp, Homo sapien
cacaatggaatgagtctgtactatc

SEQ ID NO: 980884 - DNA, 25 bp, Homo sapien
aactttcgatcacagttggatccgc

SEQ ID NO: 980885 - DNA, 25 bp, Homo sapien
tcagctacatgtgaggcaggttctc

SEQ ID NO: 980886 - DNA, 25 bp, Homo sapien
gactgccatttgtgatatatgccac

SEQ ID NO: 980887 - DNA, 25 bp, Homo sapien
ttggatccgccagtgcagagacctg

SEQ ID NO: 980888 - DNA, 25 bp, Homo sapien
ctatttaaatctaaaccaccatatg

SEQ ID NO: 980889 - DNA, 25 bp, Homo sapien
tttaaatctaaaccaccatatgaaa

SEQ ID NO: 980890 - DNA, 25 bp, Homo sapien
ggtgctagacaatcactatttaaat

SEQ ID NO: 980891 - DNA, 25 bp, Homo sapien
aatggtgctagacaatcactattta

SEQ ID NO: 980892 - DNA, 25 bp, Homo sapien
cagcttcatcatttagaggcaaggg

SEQ ID NO: 980893 - DNA, 25 bp, Homo sapien
taagttgcccagacaaaggttcagc

SEQ ID NO: 980894 - DNA, 25 bp, Homo sapien
gaaacctagctgtgagttactcagt

SEQ ID NO: 980895 - DNA, 25 bp, Homo sapien
tcagtggtctaaacagagctttggc

SEQ ID NO: 980896 - DNA, 25 bp, Homo sapien
taaggagatcccagcacaaactcat

SEQ ID NO: 980897 - DNA, 25 bp, Homo sapien
cctcatgggcttggccagttatctt

SEQ ID NO: 980898 - DNA, 25 bp, Homo sapien
tatcttttcataaggagatcccagc

SEQ ID NO: 980899 - DNA, 25 bp, Homo sapien
cttgggtctgattagcataacattc

SEQ ID NO: 980900 - DNA, 25 bp, Homo sapien
ccaggatacactagggctgaatttc

SEQ ID NO: 980901 - DNA, 25 bp, Homo sapien
cagggcatgcataggagaacagagt

SEQ ID NO: 980902 - DNA, 25 bp, Homo sapien
ccccatggctcactagtaaagagat

SEQ ID NO: 980903 - DNA, 25 bp, Homo sapien
gactggctacccagttaacggcaaa

SEQ ID NO: 980904 - DNA, 25 bp, Homo sapien
tgaacaagttaacacaggatctggc

SEQ ID NO: 980905 - DNA, 25 bp, Homo sapien
tattcaggccggactatgggtgcaa

SEQ ID NO: 980906 - DNA, 25 bp, Homo sapien
ggcctgcggatttcacaaggagaac

SEQ ID NO: 980907 - DNA, 25 bp, Homo sapien
tgcaactggtactgccctgacgagg

SEQ ID NO: 980908 - DNA, 25 bp, Homo sapien
gggactcaaactccaacatgcctga

SEQ ID NO: 980909 - DNA, 25 bp, Homo sapien
ttttggaacacttaacgcatggcag

SEQ ID NO: 980910 - DNA, 25 bp, Homo sapien
gaaagggtacatgacttcacttcct

SEQ ID NO: 980911 - DNA, 25 bp, Homo sapien
cactaacatggttggtggtggcatc

SEQ ID NO: 980912 - DNA, 25 bp, Homo sapien
ttagcacaatttggcttgcactgaa

SEQ ID NO: 980913 - DNA, 25 bp, Homo sapien
agcacaatttggcttgcactgaatg

SEQ ID NO: 980914 - DNA, 25 bp, Homo sapien
gcacaatttggcttgcactgaatgg

SEQ ID NO: 980915 - DNA, 25 bp, Homo sapien
attagcacaatttggcttgcactga

SEQ ID NO: 980916 - DNA, 25 bp, Homo sapien
ttccaggcacagaaatcctcaggag

SEQ ID NO: 980917 - DNA, 25 bp, Homo sapien
caaggacggtctgtgacggcttcag

SEQ ID NO: 980918 - DNA, 25 bp, Homo sapien
tgtgacggcttcagaatcaggtgga

SEQ ID NO: 980919 - DNA, 25 bp, Homo sapien
tcgtgctgtagcagtacaggctgca

SEQ ID NO: 980920 - DNA, 25 bp, Homo sapien
ccggtctgcaaggacggtctgtgac

SEQ ID NO: 980921 - DNA, 25 bp, Homo sapien
tatagcagcccttggcagttccagt

SEQ ID NO: 980922 - DNA, 25 bp, Homo sapien
agtttgtcccttctatagcagccct

SEQ ID NO: 980923 - DNA, 25 bp, Homo sapien
tgcattttcagcttcccaggatacc

SEQ ID NO: 980924 - DNA, 25 bp, Homo sapien
tctcaattgtgaagacctgagcttg

SEQ ID NO: 980925 - DNA, 25 bp, Homo sapien
tactgagccccagcatatttgagtg

SEQ ID NO: 980926 - DNA, 25 bp, Homo sapien
gctttgggatcatacagacccggat

SEQ ID NO: 980927 - DNA, 25 bp, Homo sapien
caagtgagctcccatttcaaggcac

SEQ ID NO: 980928 - DNA, 25 bp, Homo sapien
aactgggaatagaaagacgggcagc

SEQ ID NO: 980929 - DNA, 25 bp, Homo sapien
ccagaagatctatacagtcgagttg

SEQ ID NO: 980930 - DNA, 25 bp, Homo sapien
accaagggatgtcccaacaggaagt

SEQ ID NO: 980931 - DNA, 25 bp, Homo sapien
catcagtaaatcaaggctgcgggtg

SEQ ID NO: 980932 - DNA, 25 bp, Homo sapien
tcgagttgttaaaaactggtgtgaa

SEQ ID NO: 980933 - DNA, 25 bp, Homo sapien
tgtgtttttaactcatcggtgcctg

SEQ ID NO: 980934 - DNA, 25 bp, Homo sapien
gcgggaactcacttactggatgtct

SEQ ID NO: 980935 - DNA, 25 bp, Homo sapien
tcataagcccatgcgtggaaactgg

SEQ ID NO: 980936 - DNA, 25 bp, Homo sapien
gcaagataaacagacccgtgcccag

SEQ ID NO: 980937 - DNA, 25 bp, Homo sapien
tggtgacagcatcgttagccatgtg

SEQ ID NO: 980938 - DNA, 25 bp, Homo sapien
ccatgttcagaaagcaagagacacg

SEQ ID NO: 980939 - DNA, 25 bp, Homo sapien
caagagacacggtgttattttctcc

SEQ ID NO: 980940 - DNA, 25 bp, Homo sapien
gaactaactgggcacataatgggta

SEQ ID NO: 980941 - DNA, 25 bp, Homo sapien
tctgagcaggtcaagggcagtgcca

SEQ ID NO: 980942 - DNA, 25 bp, Homo sapien
tttacagagggaaagatcctgcacc

SEQ ID NO: 980943 - DNA, 25 bp, Homo sapien
ctctcaaagggaaaagacggccctg

SEQ ID NO: 980944 - DNA, 25 bp, Homo sapien
tcctgatcagccgaaatgactgggt

SEQ ID NO: 980945 - DNA, 25 bp, Homo sapien
gaagcaggccttatcacgaagggct

SEQ ID NO: 980946 - DNA, 25 bp, Homo sapien
caaacaacagagtgcattctctcca

SEQ ID NO: 980947 - DNA, 25 bp, Homo sapien
cacgaagggctttgtaggacaggcc

SEQ ID NO: 980948 - DNA, 25 bp, Homo sapien
caggccgagtgtgtacgacgtttga

SEQ ID NO: 980949 - DNA, 25 bp, Homo sapien
ccacgtgggcagagccactaaaaaa

SEQ ID NO: 980950 - DNA, 25 bp, Homo sapien
gcttgccccataaacacgcttttct

SEQ ID NO: 980951 - DNA, 25 bp, Homo sapien
ttccaccacggggacaggagctctc

SEQ ID NO: 980952 - DNA, 25 bp, Homo sapien
gctctctgagcttgccccataaaca

SEQ ID NO: 980953 - DNA, 25 bp, Homo sapien
gggtggcggccgagccctctgacaa

SEQ ID NO: 980954 - DNA, 25 bp, Homo sapien
ggctgtttcagggtggcggccgagc

SEQ ID NO: 980955 - DNA, 25 bp, Homo sapien
tcagagagctctgggctgtttcagg

SEQ ID NO: 980956 - DNA, 25 bp, Homo sapien
tctgggctgtttcagggtggcggcc

SEQ ID NO: 980957 - DNA, 25 bp, Homo sapien
gaagcggttcgatgaagggcattac

SEQ ID NO: 980958 - DNA, 25 bp, Homo sapien
tgcgaagagacggagacaatacagg

SEQ ID NO: 980959 - DNA, 25 bp, Homo sapien
gcgaagagacggagacaatacaggc

SEQ ID NO: 980960 - DNA, 25 bp, Homo sapien
gatgaagcggttcgatgaagggcat

SEQ ID NO: 980961 - DNA, 25 bp, Homo sapien
agctcgggccccatgactcagtctg

SEQ ID NO: 980962 - DNA, 25 bp, Homo sapien
cctcaacgagaaccaactggagaac

SEQ ID NO: 980963 - DNA, 25 bp, Homo sapien
agaaccaactcgtggagagctcggg

SEQ ID NO: 980964 - DNA, 25 bp, Homo sapien
tctgacctgacgctggcgaatgctg

SEQ ID NO: 980965 - DNA, 25 bp, Homo sapien
tgaacaccggaacttcaaggcgtgc

SEQ ID NO: 980966 - DNA, 25 bp, Homo sapien
tgtgaacccgctcctctgaggaaag

SEQ ID NO: 980967 - DNA, 25 bp, Homo sapien
tgggcaccgacaagtattagaacgt

SEQ ID NO: 980968 - DNA, 25 bp, Homo sapien
ccacctgatcaaaggagaagggact

SEQ ID NO: 980969 - DNA, 25 bp, Homo sapien
gattacagactaggatatagcaacc

SEQ ID NO: 980970 - DNA, 25 bp, Homo sapien
gattggtgataacgattcaacccca

SEQ ID NO: 980971 - DNA, 25 bp, Homo sapien
tcagactggcacttcgggaaaactt

SEQ ID NO: 980972 - DNA, 25 bp, Homo sapien
cccagagatccagctaactgttggc

SEQ ID NO: 980973 - DNA, 25 bp, Homo sapien
tgggcacctgaaaactgacaactgg

SEQ ID NO: 980974 - DNA, 25 bp, Homo sapien
ggacgggtctctcctgaatacctgg

SEQ ID NO: 980975 - DNA, 25 bp, Homo sapien
gcatattgtcatgctcctgggcacc

SEQ ID NO: 980976 - DNA, 25 bp, Homo sapien
tgtcaagtcctgttacggtccctcg

SEQ ID NO: 980977 - DNA, 25 bp, Homo sapien
aaaccataatacttgctggtatagc

SEQ ID NO: 980978 - DNA, 25 bp, Homo sapien
tggagcaaggacctttaacagcatc

SEQ ID NO: 980979 - DNA, 25 bp, Homo sapien
tttgacctcttgagttcctctgatc

SEQ ID NO: 980980 - DNA, 25 bp, Homo sapien
tcctctgatctctgaatgttctgga

SEQ ID NO: 980981 - DNA, 25 bp, Homo sapien
cactcacacaacgaagatccgactt

SEQ ID NO: 980982 - DNA, 25 bp, Homo sapien
tgacgtactttacctgaagccccac

SEQ ID NO: 980983 - DNA, 25 bp, Homo sapien
gatccgacttatccaatttgctgac

SEQ ID NO: 980984 - DNA, 25 bp, Homo sapien
ccaatttgctgacgtactttacctg

SEQ ID NO: 980985 - DNA, 25 bp, Homo sapien
ctacccacaagaaaaggaaagcagc

SEQ ID NO: 980986 - DNA, 25 bp, Homo sapien
caagaaaaggaaagcagccggcccg

SEQ ID NO: 980987 - DNA, 25 bp, Homo sapien
acccacaagaaaaggaaagcagccg

SEQ ID NO: 980988 - DNA, 25 bp, Homo sapien
cacaagaaaaggaaagcagccggcc

SEQ ID NO: 980989 - DNA, 25 bp, Homo sapien
gaatttagaatcgaggtgacaccgg

SEQ ID NO: 980990 - DNA, 25 bp, Homo sapien
tgacaccggaccacagagtgagtct

SEQ ID NO: 980991 - DNA, 25 bp, Homo sapien
cacgggtgccttctcatgcctttta

SEQ ID NO: 980992 - DNA, 25 bp, Homo sapien
taaggtagctcgtcagccgtaaggc

SEQ ID NO: 980993 - DNA, 25 bp, Homo sapien
gacggtggcaaaagtcttctttcaa

SEQ ID NO: 980994 - DNA, 25 bp, Homo sapien
ttgcaaatgtgacctgacggtggca

SEQ ID NO: 980995 - DNA, 25 bp, Homo sapien
cacgacgatggcctcttgcaaatgt

SEQ ID NO: 980996 - DNA, 25 bp, Homo sapien
gctaagggttccctggcagaccacg

SEQ ID NO: 980997 - DNA, 25 bp, Homo sapien
gaggtaacagaagttacacaggaaa

SEQ ID NO: 980998 - DNA, 25 bp, Homo sapien
aaatataaaggttctcatgagaaca

SEQ ID NO: 980999 - DNA, 25 bp, Homo sapien
cacatcttacttctaatttggtgag

SEQ ID NO: 981000 - DNA, 25 bp, Homo sapien
gataaaataacttactccactacat

SEQ ID NO: 981001 - DNA, 25 bp, Homo sapien
caggatcctgggtggaaatcttcag

SEQ ID NO: 981002 - DNA, 25 bp, Homo sapien
tctgttaacaagcactgccgagtct

SEQ ID NO: 981003 - DNA, 25 bp, Homo sapien
tatccacatggtgcaactgcccact

SEQ ID NO: 981004 - DNA, 25 bp, Homo sapien
aaaaattagaagagtgatcccctgc

SEQ ID NO: 981005 - DNA, 25 bp, Homo sapien
cagaaattgctgtcatacatactca

SEQ ID NO: 981006 - DNA, 25 bp, Homo sapien
tccctagacaaagcaccatttaggt

SEQ ID NO: 981007 - DNA, 25 bp, Homo sapien
ccatttaggtgttagaagcaagaac

SEQ ID NO: 981008 - DNA, 25 bp, Homo sapien
aactgcctttatgtcaatatgctgc

SEQ ID NO: 981009 - DNA, 25 bp, Homo sapien
cgggcgtacagaggatccccaagcg

SEQ ID NO: 981010 - DNA, 25 bp, Homo sapien
cagtgaacgggcgtacagaggatcc

SEQ ID NO: 981011 - DNA, 25 bp, Homo sapien
gtgaacgggcgtacagaggatcccc

SEQ ID NO: 981012 - DNA, 25 bp, Homo sapien
aggatccccaagcgcaggacttgtc

SEQ ID NO: 981013 - DNA, 25 bp, Homo sapien
gcccctggataaaagtgctgccaat

SEQ ID NO: 981014 - DNA, 25 bp, Homo sapien
gaagcagaggattggattccatcag

SEQ ID NO: 981015 - DNA, 25 bp, Homo sapien
gctcatcttatttgcaggcacacag

SEQ ID NO: 981016 - DNA, 25 bp, Homo sapien
gagcccaccgggttctgaattagac

SEQ ID NO: 981017 - DNA, 25 bp, Homo sapien
aagagcttgctagccgtcatttaaa

SEQ ID NO: 981018 - DNA, 25 bp, Homo sapien
cctgcagttccatactctgtatcat

SEQ ID NO: 981019 - DNA, 25 bp, Homo sapien
tccatgactcaagacgaccaacact

SEQ ID NO: 981020 - DNA, 25 bp, Homo sapien
gaccaacactgggttaccaataatc

SEQ ID NO: 981021 - DNA, 25 bp, Homo sapien
tatagatacagagaggtctgccgtg

SEQ ID NO: 981022 - DNA, 25 bp, Homo sapien
catttcttgtagttagcgacctctg

SEQ ID NO: 981023 - DNA, 25 bp, Homo sapien
tgccgtgacagttcagtaggagact

SEQ ID NO: 981024 - DNA, 25 bp, Homo sapien
tctgcttaggaaatcaccagctcct

SEQ ID NO: 981025 - DNA, 25 bp, Homo sapien
taatcctctgcgatggggccagtct

SEQ ID NO: 981026 - DNA, 25 bp, Homo sapien
actcagttgctggtgagtaaccagc

SEQ ID NO: 981027 - DNA, 25 bp, Homo sapien
gggctgcggtagcattctccacctg

SEQ ID NO: 981028 - DNA, 25 bp, Homo sapien
tgcagatccgtctgggcgggctgcg

SEQ ID NO: 981029 - DNA, 25 bp, Homo sapien
ccaacttggggcctccatgtgcctg

SEQ ID NO: 981030 - DNA, 25 bp, Homo sapien
tgagattagtagacgttttgctgaa

SEQ ID NO: 981031 - DNA, 25 bp, Homo sapien
tttctgagattagtagacgttttgc

SEQ ID NO: 981032 - DNA, 25 bp, Homo sapien
aacttggggcctccatgtgcctgca

SEQ ID NO: 981033 - DNA, 25 bp, Homo sapien
gccacatggtggttatgaatgcatc

SEQ ID NO: 981034 - DNA, 25 bp, Homo sapien
ctggaaggaacttgactcggtggca

SEQ ID NO: 981035 - DNA, 25 bp, Homo sapien
tcagagatcctgttttccgtcaggg

SEQ ID NO: 981036 - DNA, 25 bp, Homo sapien
tgcagatcatggctataggagtcac

SEQ ID NO: 981037 - DNA, 25 bp, Homo sapien
caaagcaatggttcacaggttcaca

SEQ ID NO: 981038 - DNA, 25 bp, Homo sapien
tgctatttacactaaagtttggcct

SEQ ID NO: 981039 - DNA, 25 bp, Homo sapien
cgttgggtcacatcaaaacacttga

SEQ ID NO: 981040 - DNA, 25 bp, Homo sapien
tagcctagctatttactcttaaagg

SEQ ID NO: 981041 - DNA, 25 bp, Homo sapien
taaatgcttaggctttggcgtgtcg

SEQ ID NO: 981042 - DNA, 25 bp, Homo sapien
cacactgatctagggaactcgctct

SEQ ID NO: 981043 - DNA, 25 bp, Homo sapien
aaacagggcccagcaaagtctgtct

SEQ ID NO: 981044 - DNA, 25 bp, Homo sapien
ggagatacgccaacaaatccagttt

SEQ ID NO: 981045 - DNA, 25 bp, Homo sapien
gaaacccaagaaggtatgtcctcag

SEQ ID NO: 981046 - DNA, 25 bp, Homo sapien
gatccttcctgacatataccggtgt

SEQ ID NO: 981047 - DNA, 25 bp, Homo sapien
taaaaggcacccctgtatcacgatc

SEQ ID NO: 981048 - DNA, 25 bp, Homo sapien
tccatcaaatgttcagagaagggct

SEQ ID NO: 981049 - DNA, 25 bp, Homo sapien
ggcaaacgcagtggccatctgggta

SEQ ID NO: 981050 - DNA, 25 bp, Homo sapien
cctagaacctcgtagaaatgatggt

SEQ ID NO: 981051 - DNA, 25 bp, Homo sapien
tagaaggtgccaaatatcattggga

SEQ ID NO: 981052 - DNA, 25 bp, Homo sapien
tacacacgtcttcacttcaaggcaa

SEQ ID NO: 981053 - DNA, 25 bp, Homo sapien
tattcactcaacatgtcttataacc

SEQ ID NO: 981054 - DNA, 25 bp, Homo sapien
tcactcaacatgtcttataaccaca

SEQ ID NO: 981055 - DNA, 25 bp, Homo sapien
agaaccagttctcaagcaactcttc

SEQ ID NO: 981056 - DNA, 25 bp, Homo sapien
cagttctcaagcaactcttctcatt

SEQ ID NO: 981057 - DNA, 25 bp, Homo sapien
caaagcaacctaggcatgatgtgcc

SEQ ID NO: 981058 - DNA, 25 bp, Homo sapien
aactcagatgttctagaaggaagca

SEQ ID NO: 981059 - DNA, 25 bp, Homo sapien
cacagactatgactatgctctcaga

SEQ ID NO: 981060 - DNA, 25 bp, Homo sapien
taaaatcaacacagcgtaagactgc

SEQ ID NO: 981061 - DNA, 25 bp, Homo sapien
tggtcactcccaaacataaactgcc

SEQ ID NO: 981062 - DNA, 25 bp, Homo sapien
actgccctagtttgaagcttcccaa

SEQ ID NO: 981063 - DNA, 25 bp, Homo sapien
tatagaagaaggcataaaccttggc

SEQ ID NO: 981064 - DNA, 25 bp, Homo sapien
tgacagactagtacaaagaaggccg

SEQ ID NO: 981065 - DNA, 25 bp, Homo sapien
ttagctctgccagaaatcatcagca

SEQ ID NO: 981066 - DNA, 25 bp, Homo sapien
ccagaaatcatcagcatctacttgc

SEQ ID NO: 981067 - DNA, 25 bp, Homo sapien
gaaatcatcagcatctacttgcaca

SEQ ID NO: 981068 - DNA, 25 bp, Homo sapien
aaatcatcagcatctacttgcacaa

SEQ ID NO: 981069 - DNA, 25 bp, Homo sapien
ccgaatactgcctaattttgatgta

SEQ ID NO: 981070 - DNA, 25 bp, Homo sapien
taagcttatataatggcactgaatc

SEQ ID NO: 981071 - DNA, 25 bp, Homo sapien
ggcagatggaggctaaacaccgaat

SEQ ID NO: 981072 - DNA, 25 bp, Homo sapien
ggcactgaatcattggcttccagtt

SEQ ID NO: 981073 - DNA, 25 bp, Homo sapien
gtgaaggacacacctctcttgttgg

SEQ ID NO: 981074 - DNA, 25 bp, Homo sapien
tattggagaccataatcgaggcaag

SEQ ID NO: 981075 - DNA, 25 bp, Homo sapien
ttcacaggtgaattccaagcgtctc

SEQ ID NO: 981076 - DNA, 25 bp, Homo sapien
tatctgggtactgtggcctcgccaa

SEQ ID NO: 981077 - DNA, 25 bp, Homo sapien
agcagctctaaaaggcttcccagct

SEQ ID NO: 981078 - DNA, 25 bp, Homo sapien
gcagctctaaaaggcttcccagctc

SEQ ID NO: 981079 - DNA, 25 bp, Homo sapien
cagctctaaaaggcttcccagctct

SEQ ID NO: 981080 - DNA, 25 bp, Homo sapien
gaaattatccacaagggagtcacct

SEQ ID NO: 981081 - DNA, 25 bp, Homo sapien
tcaggagaagcacccagtagatggt

SEQ ID NO: 981082 - DNA, 25 bp, Homo sapien
tccttgaagggtagcatcgtgtccc

SEQ ID NO: 981083 - DNA, 25 bp, Homo sapien
tccagatgcaagaaagcttcacgtt

SEQ ID NO: 981084 - DNA, 25 bp, Homo sapien
actgactgagaattatagaatttca

SEQ ID NO: 981085 - DNA, 25 bp, Homo sapien
gaaataaatcccagtctgttcatcc

SEQ ID NO: 981086 - DNA, 25 bp, Homo sapien
tttcagggctttcatgtccaaaatt

SEQ ID NO: 981087 - DNA, 25 bp, Homo sapien
taaatcatgtacacaacaattctca

SEQ ID NO: 981088 - DNA, 25 bp, Homo sapien
ggatagccagtcaagtacctagctg

SEQ ID NO: 981089 - DNA, 25 bp, Homo sapien
tcttggctctaacagcacacgtgta

SEQ ID NO: 981090 - DNA, 25 bp, Homo sapien
ggacagagatttcccaccgctgtgg

SEQ ID NO: 981091 - DNA, 25 bp, Homo sapien
gaaatgtagtagctggctcagtcca

SEQ ID NO: 981092 - DNA, 25 bp, Homo sapien
cgcggacatgcggactcctcgtggg

SEQ ID NO: 981093 - DNA, 25 bp, Homo sapien
cccacgaggagtccgcatgtccgcg

SEQ ID NO: 981094 - DNA, 25 bp, Homo sapien
gctactattcattctgagatagaca

SEQ ID NO: 981095 - DNA, 25 bp, Homo sapien
gagatagacagatcatcaatgacct

SEQ ID NO: 981096 - DNA, 25 bp, Homo sapien
tgggtcactgactagggagaaagct

SEQ ID NO: 981097 - DNA, 25 bp, Homo sapien
ggagaaagctgactataaaaaagag

SEQ ID NO: 981098 - DNA, 25 bp, Homo sapien
cagtcctatcagcaccactttgaga

SEQ ID NO: 981099 - DNA, 25 bp, Homo sapien
tgaaatacagctacctccagtccta

SEQ ID NO: 981100 - DNA, 25 bp, Homo sapien
caaggtattgctgttcaagttgaca

SEQ ID NO: 981101 - DNA, 25 bp, Homo sapien
agacatagaagtaacacccctggtt

SEQ ID NO: 981102 - DNA, 25 bp, Homo sapien
caaagaagaaagttgctcagattta

SEQ ID NO: 981103 - DNA, 25 bp, Homo sapien
tatagtgcgtaggttcctggagcac

SEQ ID NO: 981104 - DNA, 25 bp, Homo sapien
tatatatagtgcgtaggttcctgga

SEQ ID NO: 981105 - DNA, 25 bp, Homo sapien
gatttatccagacctcacataagtt

SEQ ID NO: 981106 - DNA, 25 bp, Homo sapien
cttatgtgttccgtaagttatgcca

SEQ ID NO: 981107 - DNA, 25 bp, Homo sapien
aatgttaaggccatagaagctttca

SEQ ID NO: 981108 - DNA, 25 bp, Homo sapien
tctaagcttgtattaggtcatcatt

SEQ ID NO: 981109 - DNA, 25 bp, Homo sapien
aagctttcaccttagctatctaagc

SEQ ID NO: 981110 - DNA, 25 bp, Homo sapien
gctttgtttctcaatgcaattcttg

SEQ ID NO: 981111 - DNA, 25 bp, Homo sapien
gaaattcagaagatttggcctgtgg

SEQ ID NO: 981112 - DNA, 25 bp, Homo sapien
ttctaataggtgtaatgggctgata

SEQ ID NO: 981113 - DNA, 25 bp, Homo sapien
tggcgccagtgacaggaatcagttc

SEQ ID NO: 981114 - DNA, 25 bp, Homo sapien
taggtgagtgaactgaaaccagacc

SEQ ID NO: 981115 - DNA, 25 bp, Homo sapien
taaatgaatcttgggtccgggctca

SEQ ID NO: 981116 - DNA, 25 bp, Homo sapien
gattcatggcaaacctagctcagcc

SEQ ID NO: 981117 - DNA, 25 bp, Homo sapien
gaaaagtcaaacagtcaggatccag

SEQ ID NO: 981118 - DNA, 25 bp, Homo sapien
gaggagacagggcaagttccagcct

SEQ ID NO: 981119 - DNA, 25 bp, Homo sapien
tctgagatggttccagtccctcttc

SEQ ID NO: 981120 - DNA, 25 bp, Homo sapien
ctcgttccttccactggtactcaca

SEQ ID NO: 981121 - DNA, 25 bp, Homo sapien
gttccagcctgaggggcatggcttc

SEQ ID NO: 981122 - DNA, 25 bp, Homo sapien
cctaagtagtgaagtcagaccagat

SEQ ID NO: 981123 - DNA, 25 bp, Homo sapien
ttgaggatggcaacccgaaggtagt

SEQ ID NO: 981124 - DNA, 25 bp, Homo sapien
tcacagcaagctttattgaccacca

SEQ ID NO: 981125 - DNA, 25 bp, Homo sapien
ccaccattataggtcagatagggct

SEQ ID NO: 981126 - DNA, 25 bp, Homo sapien
caaaaccgtgactatgctgagcagg

SEQ ID NO: 981127 - DNA, 25 bp, Homo sapien
caaatgcatctgacgaacgtggccc

SEQ ID NO: 981128 - DNA, 25 bp, Homo sapien
taagtaggtttcagtgctcgcagga

SEQ ID NO: 981129 - DNA, 25 bp, Homo sapien
gaatccacttggtcaccggtgcaaa

SEQ ID NO: 981130 - DNA, 25 bp, Homo sapien
tgacaaagggacagtgccaccatgt

SEQ ID NO: 981131 - DNA, 25 bp, Homo sapien
tagacaataccttacctagaatgtg

SEQ ID NO: 981132 - DNA, 25 bp, Homo sapien
cagtactgtcaacagtttgtaatgg

SEQ ID NO: 981133 - DNA, 25 bp, Homo sapien
taatggcatatgtggactatgttca

SEQ ID NO: 981134 - DNA, 25 bp, Homo sapien
cctcctatctgggtaatttgcatac

SEQ ID NO: 981135 - DNA, 25 bp, Homo sapien
gaggtacacgtgaaatcttccctgg

SEQ ID NO: 981136 - DNA, 25 bp, Homo sapien
tccttaaacgctgaggcacggattg

SEQ ID NO: 981137 - DNA, 25 bp, Homo sapien
gcacggattggttcattggttcaaa

SEQ ID NO: 981138 - DNA, 25 bp, Homo sapien
caggatacggaggttgcagtcagtt

SEQ ID NO: 981139 - DNA, 25 bp, Homo sapien
gagatcacaccactgcattccagtc

SEQ ID NO: 981140 - DNA, 25 bp, Homo sapien
gtggctgcagcaggagagttgcttg

SEQ ID NO: 981141 - DNA, 25 bp, Homo sapien
tctgggcaacagagtgagactccat

SEQ ID NO: 981142 - DNA, 25 bp, Homo sapien
gccaaagcccaggagtcactcaaga

SEQ ID NO: 981143 - DNA, 25 bp, Homo sapien
gaggagttactgctgagccaaagcc

SEQ ID NO: 981144 - DNA, 25 bp, Homo sapien
aggagttactgctgagccaaagccc

SEQ ID NO: 981145 - DNA, 25 bp, Homo sapien
tcgtttttctgtagccttctcccca

SEQ ID NO: 981146 - DNA, 25 bp, Homo sapien
aatgcgtgtggaagtctgatttgcc

SEQ ID NO: 981147 - DNA, 25 bp, Homo sapien
aatgaaggcaatgcgtgtggaagtc

SEQ ID NO: 981148 - DNA, 25 bp, Homo sapien
cagggcaggcgtcttatatcctaat

SEQ ID NO: 981149 - DNA, 25 bp, Homo sapien
gtacttgagggcaaatatgaatatt

SEQ ID NO: 981150 - DNA, 25 bp, Homo sapien
tgaatattacactaacagatgctac

SEQ ID NO: 981151 - DNA, 25 bp, Homo sapien
tatgaatattacactaacagatgct

SEQ ID NO: 981152 - DNA, 25 bp, Homo sapien
gctacagctggaaagcgaaaaatat

SEQ ID NO: 981153 - DNA, 25 bp, Homo sapien
tctttgtctccaatatgcataatgt

SEQ ID NO: 981154 - DNA, 25 bp, Homo sapien
gtttcaggatgattacgcatggtgg

SEQ ID NO: 981155 - DNA, 25 bp, Homo sapien
ttggacatcaccaacaactatcaac

SEQ ID NO: 981156 - DNA, 25 bp, Homo sapien
catctgttctccattctaacccgtt

SEQ ID NO: 981157 - DNA, 25 bp, Homo sapien
cagagtgaagcagctatcctgggtc

SEQ ID NO: 981158 - DNA, 25 bp, Homo sapien
tatccaagcaagtgtcagaagcatg

SEQ ID NO: 981159 - DNA, 25 bp, Homo sapien
tgggaccactaacctgaatcaggga

SEQ ID NO: 981160 - DNA, 25 bp, Homo sapien
ggaaggtcccaatgttctgtaatca

SEQ ID NO: 981161 - DNA, 25 bp, Homo sapien
tcgagggcaacctgaccaacaagga

SEQ ID NO: 981162 - DNA, 25 bp, Homo sapien
ttcgagggcaacctgaccaacaagg

SEQ ID NO: 981163 - DNA, 25 bp, Homo sapien
gttcgagggcaacctgaccaacaag

SEQ ID NO: 981164 - DNA, 25 bp, Homo sapien
tggttcttgacaacagtcaaactgg

SEQ ID NO: 981165 - DNA, 25 bp, Homo sapien
tcaaactgtagggtaatccattagt

SEQ ID NO: 981166 - DNA, 25 bp, Homo sapien
actggtctaacgcaatgtttttcaa

SEQ ID NO: 981167 - DNA, 25 bp, Homo sapien
tccagtgcactgaaagcagcgtttt

SEQ ID NO: 981168 - DNA, 25 bp, Homo sapien
gtgaagggcacgtgctagctcacac

SEQ ID NO: 981169 - DNA, 25 bp, Homo sapien
cagctgcctcgtctgtaaattgaaa

SEQ ID NO: 981170 - DNA, 25 bp, Homo sapien
taatagctctatggccttgtggaat

SEQ ID NO: 981171 - DNA, 25 bp, Homo sapien
ccctcaatctagcagagtggaaaaa

SEQ ID NO: 981172 - DNA, 25 bp, Homo sapien
cacaacaggccccggggtgcaatgt

SEQ ID NO: 981173 - DNA, 25 bp, Homo sapien
acaacaggccccggggtgcaatgtt

SEQ ID NO: 981174 - DNA, 25 bp, Homo sapien
ccggggtgcaatgttccccttcctg

SEQ ID NO: 981175 - DNA, 25 bp, Homo sapien
caacaggccccggggtgcaatgttc

SEQ ID NO: 981176 - DNA, 25 bp, Homo sapien
aggcagccgccactgtgtccggcta

SEQ ID NO: 981177 - DNA, 25 bp, Homo sapien
tgtgcctggctggattaatgattta

SEQ ID NO: 981178 - DNA, 25 bp, Homo sapien
tgcctggctggattaatgatttaaa

SEQ ID NO: 981179 - DNA, 25 bp, Homo sapien
gccgccactgtgtccggctatttta

SEQ ID NO: 981180 - DNA, 25 bp, Homo sapien
tacactattctatcgctgaggacta

SEQ ID NO: 981181 - DNA, 25 bp, Homo sapien
tattttccgggtaatgccatccctg

SEQ ID NO: 981182 - DNA, 25 bp, Homo sapien
tgtacattctcaaagctgttggctg

SEQ ID NO: 981183 - DNA, 25 bp, Homo sapien
taaacaaggcgctgtaaattgcaag

SEQ ID NO: 981184 - DNA, 25 bp, Homo sapien
gagctcggcccataaagaataaagt

SEQ ID NO: 981185 - DNA, 25 bp, Homo sapien
tgactagcaggttaagaaatccact

SEQ ID NO: 981186 - DNA, 25 bp, Homo sapien
gagaagggcaagaaaccatgcgtcc

SEQ ID NO: 981187 - DNA, 25 bp, Homo sapien
tgtcaaaggacaaccgactgactag

SEQ ID NO: 981188 - DNA, 25 bp, Homo sapien
gaggccacgtcagaacttaccaatg

SEQ ID NO: 981189 - DNA, 25 bp, Homo sapien
gatgttcgcacttgccttaggagga

SEQ ID NO: 981190 - DNA, 25 bp, Homo sapien
ggtgtcagtaggtctcagcaatgcc

SEQ ID NO: 981191 - DNA, 25 bp, Homo sapien
gacaacagactatacagaggccacg

SEQ ID NO: 981192 - DNA, 25 bp, Homo sapien
ctgcttcactaaaagtatctccgtt

SEQ ID NO: 981193 - DNA, 25 bp, Homo sapien
tctgcttcactaaaagtatctccgt

SEQ ID NO: 981194 - DNA, 25 bp, Homo sapien
ttctgcttcactaaaagtatctccg

SEQ ID NO: 981195 - DNA, 25 bp, Homo sapien
catcacatggtctgtgcctacaacg

SEQ ID NO: 981196 - DNA, 25 bp, Homo sapien
gcctacaacgcttttcatttctggg

SEQ ID NO: 981197 - DNA, 25 bp, Homo sapien
acaaaatacacttctcgggacacag

SEQ ID NO: 981198 - DNA, 25 bp, Homo sapien
tgtaaacatgccaagccggatgcca

SEQ ID NO: 981199 - DNA, 25 bp, Homo sapien
aaataagatgtctggcggctactct

SEQ ID NO: 981200 - DNA, 25 bp, Homo sapien
gcagtaagaagtggcctgtgttcca

SEQ ID NO: 981201 - DNA, 25 bp, Homo sapien
tcatgtatcacccaaccaggatggc

SEQ ID NO: 981202 - DNA, 25 bp, Homo sapien
aggctgtttgtacatagggtctaat

SEQ ID NO: 981203 - DNA, 25 bp, Homo sapien
tcacctagatattgagccccacaag

SEQ ID NO: 981204 - DNA, 25 bp, Homo sapien
tgagcagaatcacggatttttcaga

SEQ ID NO: 981205 - DNA, 25 bp, Homo sapien
tctgcagttctgaactctttacagt

SEQ ID NO: 981206 - DNA, 25 bp, Homo sapien
taatttttaacagtagtcactgaat

SEQ ID NO: 981207 - DNA, 25 bp, Homo sapien
gtactggcagtaagtcaggcaacca

SEQ ID NO: 981208 - DNA, 25 bp, Homo sapien
catacctcggtttttagtggacaat

SEQ ID NO: 981209 - DNA, 25 bp, Homo sapien
ctaggtgtcctcgttcagatgaagt

SEQ ID NO: 981210 - DNA, 25 bp, Homo sapien
gttacgctggtgaacaatgctggcc

SEQ ID NO: 981211 - DNA, 25 bp, Homo sapien
tccatctccactcattcaagcttta

SEQ ID NO: 981212 - DNA, 25 bp, Homo sapien
ccatctccactcattcaagctttac

SEQ ID NO: 981213 - DNA, 25 bp, Homo sapien
cttgcctagcgcaatctctgggaga

SEQ ID NO: 981214 - DNA, 25 bp, Homo sapien
ttcccataaaccataccttgcctag

SEQ ID NO: 981215 - DNA, 25 bp, Homo sapien
taaaccataccttgcctagcgcaat

SEQ ID NO: 981216 - DNA, 25 bp, Homo sapien
tgctttctgcacaactgccaccttt

SEQ ID NO: 981217 - DNA, 25 bp, Homo sapien
caggccatagtgcaggggagtgatc

SEQ ID NO: 981218 - DNA, 25 bp, Homo sapien
ctcactgcagcttttaactcccgag

SEQ ID NO: 981219 - DNA, 25 bp, Homo sapien
catagtgcaggggagtgatctcggc

SEQ ID NO: 981220 - DNA, 25 bp, Homo sapien
ggccatagtgcaggggagtgatctc

SEQ ID NO: 981221 - DNA, 25 bp, Homo sapien
taagaaatgtgctagagagaaccag

SEQ ID NO: 981222 - DNA, 25 bp, Homo sapien
tcagctctgagtctaaaggaaaacg

SEQ ID NO: 981223 - DNA, 25 bp, Homo sapien
ggcaaacttaactgttacaataaca

SEQ ID NO: 981224 - DNA, 25 bp, Homo sapien
ggaaccatctacctgcaaggcagca

SEQ ID NO: 981225 - DNA, 25 bp, Homo sapien
tctggagccgaaattgaacagcagc

SEQ ID NO: 981226 - DNA, 25 bp, Homo sapien
gaaaagcatcagaacttcaagtggg

SEQ ID NO: 981227 - DNA, 25 bp, Homo sapien
gaaatttcacgatgtcctccctggg

SEQ ID NO: 981228 - DNA, 25 bp, Homo sapien
gatgtaactgaaccaagtgcggcac

SEQ ID NO: 981229 - DNA, 25 bp, Homo sapien
ttttcctccttcggctgtaagtcac

SEQ ID NO: 981230 - DNA, 25 bp, Homo sapien
ttcctccttcggctgtaagtcactt

SEQ ID NO: 981231 - DNA, 25 bp, Homo sapien
tttttcctccttcggctgtaagtca

SEQ ID NO: 981232 - DNA, 25 bp, Homo sapien
tttcctccttcggctgtaagtcact

SEQ ID NO: 981233 - DNA, 25 bp, Homo sapien
taggaaacctccagaccgaatgatg

SEQ ID NO: 981234 - DNA, 25 bp, Homo sapien
tgaagtaggctcatctggcggccct

SEQ ID NO: 981235 - DNA, 25 bp, Homo sapien
gagtacactcagcagaaggcctttg

SEQ ID NO: 981236 - DNA, 25 bp, Homo sapien
caacagccaagtgcaggagtcaacc

SEQ ID NO: 981237 - DNA, 25 bp, Homo sapien
gactccatctcgaaggaaaagaagg

SEQ ID NO: 981238 - DNA, 25 bp, Homo sapien
cctagctactgggtaggcaggagaa

SEQ ID NO: 981239 - DNA, 25 bp, Homo sapien
aagatcaggctgctgcactccagtg

SEQ ID NO: 981240 - DNA, 25 bp, Homo sapien
atcctagctactgggtaggcaggag

SEQ ID NO: 981241 - DNA, 25 bp, Homo sapien
attaatacagtatcagtcaaaatta

SEQ ID NO: 981242 - DNA, 25 bp, Homo sapien
aattaatacagtatcagtcaaaatt

SEQ ID NO: 981243 - DNA, 25 bp, Homo sapien
gacaaactaccagacactaagacac

SEQ ID NO: 981244 - DNA, 25 bp, Homo sapien
tctatatagttaatgcatgacctca

SEQ ID NO: 981245 - DNA, 25 bp, Homo sapien
gcaaaacacaaagagtagcgatgat

SEQ ID NO: 981246 - DNA, 25 bp, Homo sapien
caaaggagggtttttcatggagcag

SEQ ID NO: 981247 - DNA, 25 bp, Homo sapien
tttgtcaagtttcacacatcgtggg

SEQ ID NO: 981248 - DNA, 25 bp, Homo sapien
cacataactgagatacaactggatt

SEQ ID NO: 981249 - DNA, 25 bp, Homo sapien
aattactggatttcaagtgaccgaa

SEQ ID NO: 981250 - DNA, 25 bp, Homo sapien
gccaatttcgctctgtttgttgaga

SEQ ID NO: 981251 - DNA, 25 bp, Homo sapien
tgtgtgttatggacccacttgtaac

SEQ ID NO: 981252 - DNA, 25 bp, Homo sapien
tatattcgtgatcattaacaaaaca

SEQ ID NO: 981253 - DNA, 25 bp, Homo sapien
aataatgggcataaattttcctaag

SEQ ID NO: 981254 - DNA, 25 bp, Homo sapien
caaaacagcgaagtgaataatgggc

SEQ ID NO: 981255 - DNA, 25 bp, Homo sapien
ttcttttatccttgcaggtgggtgt

SEQ ID NO: 981256 - DNA, 25 bp, Homo sapien
tcttttatccttgcaggtgggtgtg

SEQ ID NO: 981257 - DNA, 25 bp, Homo sapien
ctgaaacatatgagtgttccacaaa

SEQ ID NO: 981258 - DNA, 25 bp, Homo sapien
gaaacatatgagtgttccacaaatt

SEQ ID NO: 981259 - DNA, 25 bp, Homo sapien
cacaaatttttgttgaataagggat

SEQ ID NO: 981260 - DNA, 25 bp, Homo sapien
catatgagtgttccacaaatttttg

SEQ ID NO: 981261 - DNA, 25 bp, Homo sapien
catattgtagtatgtacccgtggca

SEQ ID NO: 981262 - DNA, 25 bp, Homo sapien
gaatttgaaattttgagtggccacc

SEQ ID NO: 981263 - DNA, 25 bp, Homo sapien
gagctctggcatagccccatgtcag

SEQ ID NO: 981264 - DNA, 25 bp, Homo sapien
tggaacagtctgcatggaaggtagc

SEQ ID NO: 981265 - DNA, 25 bp, Homo sapien
ttcattagaaagatcatgttgcttc

SEQ ID NO: 981266 - DNA, 25 bp, Homo sapien
actggaagccaaaacccatacaata

SEQ ID NO: 981267 - DNA, 25 bp, Homo sapien
catacaataaccactgctcacactg

SEQ ID NO: 981268 - DNA, 25 bp, Homo sapien
tggaagccaaaacccatacaataac

SEQ ID NO: 981269 - DNA, 25 bp, Homo sapien
tgtatttaagtcctatgtttcttga

SEQ ID NO: 981270 - DNA, 25 bp, Homo sapien
tgtttcttgaatgctaaagtgttat

SEQ ID NO: 981271 - DNA, 25 bp, Homo sapien
tcatcggggattaatttattccaga

SEQ ID NO: 981272 - DNA, 25 bp, Homo sapien
ttaactcttttctatcatcggggat

SEQ ID NO: 981273 - DNA, 25 bp, Homo sapien
gatcagcaaggcagagaaactccag

SEQ ID NO: 981274 - DNA, 25 bp, Homo sapien
ccaactcttctaactcgtaaaagca

SEQ ID NO: 981275 - DNA, 25 bp, Homo sapien
aaattggcaggtctgagctcagatc

SEQ ID NO: 981276 - DNA, 25 bp, Homo sapien
gttacagggtgttatcaattatctc

SEQ ID NO: 981277 - DNA, 25 bp, Homo sapien
ccaggggccacactactcctctctg

SEQ ID NO: 981278 - DNA, 25 bp, Homo sapien
tccaggggccacactactcctctct

SEQ ID NO: 981279 - DNA, 25 bp, Homo sapien
ggctggtcatccacttaaacagttc

SEQ ID NO: 981280 - DNA, 25 bp, Homo sapien
tccaacagtttgatactaacctggg

SEQ ID NO: 981281 - DNA, 25 bp, Homo sapien
gaggtaagtaccattgttatcccca

SEQ ID NO: 981282 - DNA, 25 bp, Homo sapien
taaacagttcataggctggccatgg

SEQ ID NO: 981283 - DNA, 25 bp, Homo sapien
tggatgactacaatagcctgggagc

SEQ ID NO: 981284 - DNA, 25 bp, Homo sapien
ttttaatgccagagcgacccaggac

SEQ ID NO: 981285 - DNA, 25 bp, Homo sapien
taatccacatgaactgcgctcctgg

SEQ ID NO: 981286 - DNA, 25 bp, Homo sapien
tgctcaagcttagttccaggaaacg

SEQ ID NO: 981287 - DNA, 25 bp, Homo sapien
tcttcgtggttagaggtgacagaca

SEQ ID NO: 981288 - DNA, 25 bp, Homo sapien
ctattggtcaacaagggctccgggc

SEQ ID NO: 981289 - DNA, 25 bp, Homo sapien
ggtgcacttccaagcaggtagtaat

SEQ ID NO: 981290 - DNA, 25 bp, Homo sapien
tgattttactcctgggtccacgtgg

SEQ ID NO: 981291 - DNA, 25 bp, Homo sapien
ccaaaacacttaaatgaaccactga

SEQ ID NO: 981292 - DNA, 25 bp, Homo sapien
aacacttaaatgaaccactgatggg

SEQ ID NO: 981293 - DNA, 25 bp, Homo sapien
tgaaccactgatggggcttgtcaaa

SEQ ID NO: 981294 - DNA, 25 bp, Homo sapien
ctgtataccaaaacacttaaatgaa

SEQ ID NO: 981295 - DNA, 25 bp, Homo sapien
tgccacactgatggaccaccatggt

SEQ ID NO: 981296 - DNA, 25 bp, Homo sapien
tacacggatgagacttggctcctcc

SEQ ID NO: 981297 - DNA, 25 bp, Homo sapien
aagcacgtccactacaaggcttggg

SEQ ID NO: 981298 - DNA, 25 bp, Homo sapien
tattacacgtggagctacacggatg

SEQ ID NO: 981299 - DNA, 25 bp, Homo sapien
cacaaacagacacgaataacacagg

SEQ ID NO: 981300 - DNA, 25 bp, Homo sapien
aacaacacagtgatctctggagaca

SEQ ID NO: 981301 - DNA, 25 bp, Homo sapien
cccacaaggtttgaagtgagactca

SEQ ID NO: 981302 - DNA, 25 bp, Homo sapien
tggaagcttctaggacccacaaggt

SEQ ID NO: 981303 - DNA, 25 bp, Homo sapien
tacctaatggcagtactgacacagt

SEQ ID NO: 981304 - DNA, 25 bp, Homo sapien
gatcttaaatgcttactgaccagga

SEQ ID NO: 981305 - DNA, 25 bp, Homo sapien
ccaatgcagttaaaagaatccctga

SEQ ID NO: 981306 - DNA, 25 bp, Homo sapien
gagtggtgaatggtataccagcccc

SEQ ID NO: 981307 - DNA, 25 bp, Homo sapien
cattgccctcaatccaagagctgag

SEQ ID NO: 981308 - DNA, 25 bp, Homo sapien
ttctctctaatgcaacagatccagc

SEQ ID NO: 981309 - DNA, 25 bp, Homo sapien
tactcagtcattgaaacctcaacca

SEQ ID NO: 981310 - DNA, 25 bp, Homo sapien
ctctgcgaattctgcaacatctgaa

SEQ ID NO: 981311 - DNA, 25 bp, Homo sapien
gcaacatctgaagctcttgatcact

SEQ ID NO: 981312 - DNA, 25 bp, Homo sapien
tatttcactgacctcacacgacatg

SEQ ID NO: 981313 - DNA, 25 bp, Homo sapien
acagaaacaccatctgagccagtta

SEQ ID NO: 981314 - DNA, 25 bp, Homo sapien
cacacgacatgtgaaactctgcctc

SEQ ID NO: 981315 - DNA, 25 bp, Homo sapien
tttatctttgggtacagaaacacca

SEQ ID NO: 981316 - DNA, 25 bp, Homo sapien
cacctgggaatcctgatcaaacggt

SEQ ID NO: 981317 - DNA, 25 bp, Homo sapien
caaacggtgcggagttcctctcttc

SEQ ID NO: 981318 - DNA, 25 bp, Homo sapien
aaccgtcactgctggaatgttaact

SEQ ID NO: 981319 - DNA, 25 bp, Homo sapien
tgcctgacaggaatgtaaccgtcac

SEQ ID NO: 981320 - DNA, 25 bp, Homo sapien
cgcaggaaaaaacgacaataaacag

SEQ ID NO: 981321 - DNA, 25 bp, Homo sapien
aactgagtgagtaaagaacgcagga

SEQ ID NO: 981322 - DNA, 25 bp, Homo sapien
cacaactggcttgctgatatgccag

SEQ ID NO: 981323 - DNA, 25 bp, Homo sapien
gacagattccagacgtattcaggtt

SEQ ID NO: 981324 - DNA, 25 bp, Homo sapien
tggcagagacaaactccaagaaagc

SEQ ID NO: 981325 - DNA, 25 bp, Homo sapien
acacctggccgtgcgagaaacagaa

SEQ ID NO: 981326 - DNA, 25 bp, Homo sapien
gcagacactgccacttaagcactag

SEQ ID NO: 981327 - DNA, 25 bp, Homo sapien
ttggccaaccgcaagtcagcatggg

SEQ ID NO: 981328 - DNA, 25 bp, Homo sapien
caggaatgactgtgccctgacgtac

SEQ ID NO: 981329 - DNA, 25 bp, Homo sapien
tttagaaactacagagccaccactg

SEQ ID NO: 981330 - DNA, 25 bp, Homo sapien
gacgtactcatccatgccccgatgg

SEQ ID NO: 981331 - DNA, 25 bp, Homo sapien
gggatgtccaagttaacgctgtcac

SEQ ID NO: 981332 - DNA, 25 bp, Homo sapien
caacagcaggaattgacgaacacgt

SEQ ID NO: 981333 - DNA, 25 bp, Homo sapien
taaggactaaaggactaggaattgc

SEQ ID NO: 981334 - DNA, 25 bp, Homo sapien
gattgacctcgctacaaaaatgaca

SEQ ID NO: 981335 - DNA, 25 bp, Homo sapien
ggtttggtttcaagggcaacagcag

SEQ ID NO: 981336 - DNA, 25 bp, Homo sapien
gaagaagttatcatgggccaggtgc

SEQ ID NO: 981337 - DNA, 25 bp, Homo sapien
gccacactagaggtaatatcttcag

SEQ ID NO: 981338 - DNA, 25 bp, Homo sapien
tctaacatagttcagcgcatgattt

SEQ ID NO: 981339 - DNA, 25 bp, Homo sapien
agcttgtaacttgggtgctaggatt

SEQ ID NO: 981340 - DNA, 25 bp, Homo sapien
aagttttgtcttggggtgctttcag

SEQ ID NO: 981341 - DNA, 25 bp, Homo sapien
cccttcctatttctttgataatgtg

SEQ ID NO: 981342 - DNA, 25 bp, Homo sapien
tttgccccttcctatttctttgata

SEQ ID NO: 981343 - DNA, 25 bp, Homo sapien
cgtccaatcggccagtgaaggatga

SEQ ID NO: 981344 - DNA, 25 bp, Homo sapien
cataaacaagctggccctcaggcaa

SEQ ID NO: 981345 - DNA, 25 bp, Homo sapien
taaagtactcttgtggttgctcatg

SEQ ID NO: 981346 - DNA, 25 bp, Homo sapien
tctggaaaaggtcgcctacaggcct

SEQ ID NO: 981347 - DNA, 25 bp, Homo sapien
cacttcaaattacggagatcccctc

SEQ ID NO: 981348 - DNA, 25 bp, Homo sapien
tttcagctccggcgcttccgcagac

SEQ ID NO: 981349 - DNA, 25 bp, Homo sapien
tgccatggcactccccggcgaccgg

SEQ ID NO: 981350 - DNA, 25 bp, Homo sapien
ttccgcagacccctcacgtggctgc

SEQ ID NO: 981351 - DNA, 25 bp, Homo sapien
ctgccgcctccctgccatggcactc

SEQ ID NO: 981352 - DNA, 25 bp, Homo sapien
gacgttaacaccgagggaggactga

SEQ ID NO: 981353 - DNA, 25 bp, Homo sapien
gcagcgggctgcgagctggagcaga

SEQ ID NO: 981354 - DNA, 25 bp, Homo sapien
gctgcgagctggagcagacgttaac

SEQ ID NO: 981355 - DNA, 25 bp, Homo sapien
tggagcagacgttaacaccgaggga

SEQ ID NO: 981356 - DNA, 25 bp, Homo sapien
taaagcttttaagctccccacgtca

SEQ ID NO: 981357 - DNA, 25 bp, Homo sapien
cagctctacctttgcgctggcttta

SEQ ID NO: 981358 - DNA, 25 bp, Homo sapien
tacctttgcgctggctttaaagctt

SEQ ID NO: 981359 - DNA, 25 bp, Homo sapien
catcctaccccatgcaacagactta

SEQ ID NO: 981360 - DNA, 25 bp, Homo sapien
cccacacacctgctaggtaactcgc

SEQ ID NO: 981361 - DNA, 25 bp, Homo sapien
accccacacacctgctaggtaactc

SEQ ID NO: 981362 - DNA, 25 bp, Homo sapien
caccccacacacctgctaggtaact

SEQ ID NO: 981363 - DNA, 25 bp, Homo sapien
ccccacacacctgctaggtaactcg

SEQ ID NO: 981364 - DNA, 25 bp, Homo sapien
tagagtgcaccaaggcatcctgcgt

SEQ ID NO: 981365 - DNA, 25 bp, Homo sapien
ggatctcgaaatggaaacagtcccc

SEQ ID NO: 981366 - DNA, 25 bp, Homo sapien
gattccagtggagaaccgagacacc

SEQ ID NO: 981367 - DNA, 25 bp, Homo sapien
ccagaggcccgagttccagggagtt

SEQ ID NO: 981368 - DNA, 25 bp, Homo sapien
caagccgggttcccgcgacagccct

SEQ ID NO: 981369 - DNA, 25 bp, Homo sapien
cacaagccgggttcccgcgacagcc

SEQ ID NO: 981370 - DNA, 25 bp, Homo sapien
tcacaagccgggttcccgcgacagc

SEQ ID NO: 981371 - DNA, 25 bp, Homo sapien
gggaaattgactagccagccgatca

SEQ ID NO: 981372 - DNA, 25 bp, Homo sapien
cgggctgagcgagggtgggcgcacg

SEQ ID NO: 981373 - DNA, 25 bp, Homo sapien
cagcggaggggacgccttcttcacg

SEQ ID NO: 981374 - DNA, 25 bp, Homo sapien
gccttccgaacgtcctggccaggaa

SEQ ID NO: 981375 - DNA, 25 bp, Homo sapien
ctgagatcgcaaaggagagcaaaat

SEQ ID NO: 981376 - DNA, 25 bp, Homo sapien
aaattcccatcccaaagtcctgcgg

SEQ ID NO: 981377 - DNA, 25 bp, Homo sapien
gcaaaggagagcaaaattcccatcc

SEQ ID NO: 981378 - DNA, 25 bp, Homo sapien
gagagcaaaattcccatcccaaagt

SEQ ID NO: 981379 - DNA, 25 bp, Homo sapien
cgggcgcgacgcgaggtgaaaatga

SEQ ID NO: 981380 - DNA, 25 bp, Homo sapien
gatttgtagagcgtattcttgagaa

SEQ ID NO: 981381 - DNA, 25 bp, Homo sapien
cagggctgaacgcacgctgctttag

SEQ ID NO: 981382 - DNA, 25 bp, Homo sapien
ggtgaaaatgatgcgcacgtagatt

SEQ ID NO: 981383 - DNA, 25 bp, Homo sapien
ctgggctgccggctaaaagttgtcc

SEQ ID NO: 981384 - DNA, 25 bp, Homo sapien
aggctgctgcgtgcactcggctgca

SEQ ID NO: 981385 - DNA, 25 bp, Homo sapien
tccatcatgtgacaccagagaggcc

SEQ ID NO: 981386 - DNA, 25 bp, Homo sapien
cacttgtttttgtagccgtgggctc

SEQ ID NO: 981387 - DNA, 25 bp, Homo sapien
ggcggcggccgcagcggcgtccgta

SEQ ID NO: 981388 - DNA, 25 bp, Homo sapien
agcaacaacagcagcaggactggcg

SEQ ID NO: 981389 - DNA, 25 bp, Homo sapien
aacaacagcagcaggactggcggcg

SEQ ID NO: 981390 - DNA, 25 bp, Homo sapien
gcggcggccgcagcggcgtccgtac

SEQ ID NO: 981391 - DNA, 25 bp, Homo sapien
cccgatcggggagccacagcatccg

SEQ ID NO: 981392 - DNA, 25 bp, Homo sapien
gagcccctcgaagcatcccggaggg

SEQ ID NO: 981393 - DNA, 25 bp, Homo sapien
tggcgctgcaggagccccgatcggg

SEQ ID NO: 981394 - DNA, 25 bp, Homo sapien
gccgtggtgtctgtgcgtgcgtgga

SEQ ID NO: 981395 - DNA, 25 bp, Homo sapien
ctttcctacagtcaccaaacccacg

SEQ ID NO: 981396 - DNA, 25 bp, Homo sapien
aagccgaacagaaggagcgtcctca

SEQ ID NO: 981397 - DNA, 25 bp, Homo sapien
aacagaaggagcgtcctcaaatcct

SEQ ID NO: 981398 - DNA, 25 bp, Homo sapien
acataggaagccgaacagaaggagc

SEQ ID NO: 981399 - DNA, 25 bp, Homo sapien
tggatttgtccctctgcgagttcag

SEQ ID NO: 981400 - DNA, 25 bp, Homo sapien
taaaatgacatttcgtggctcctac

SEQ ID NO: 981401 - DNA, 25 bp, Homo sapien
cgagttcagtcagatcgctgggaaa

SEQ ID NO: 981402 - DNA, 25 bp, Homo sapien
tttccccggagagcaatgagttttc

SEQ ID NO: 981403 - DNA, 25 bp, Homo sapien
ctatattagggctttgttgctgaca

SEQ ID NO: 981404 - DNA, 25 bp, Homo sapien
gcagtttttctcttccgcagctata

SEQ ID NO: 981405 - DNA, 25 bp, Homo sapien
tccagtaactgttgatgatgcttgc

SEQ ID NO: 981406 - DNA, 25 bp, Homo sapien
ttgtttgtgtcaggaagtgaggtac

SEQ ID NO: 981407 - DNA, 25 bp, Homo sapien
ctctctttacctgaaatgtcctggc

SEQ ID NO: 981408 - DNA, 25 bp, Homo sapien
tctctttacctgaaatgtcctggcc

SEQ ID NO: 981409 - DNA, 25 bp, Homo sapien
ctctttacctgaaatgtcctggccc

SEQ ID NO: 981410 - DNA, 25 bp, Homo sapien
tgagcctcattttgttcgcgtgccc

SEQ ID NO: 981411 - DNA, 25 bp, Homo sapien
cccagcgttcctccggctcggcctg

SEQ ID NO: 981412 - DNA, 25 bp, Homo sapien
gcctggtcagcttgagcctcatttt

SEQ ID NO: 981413 - DNA, 25 bp, Homo sapien
tccggctcggcctggtcagcttgag

SEQ ID NO: 981414 - DNA, 25 bp, Homo sapien
agctcctccagagccgcccgggagc

SEQ ID NO: 981415 - DNA, 25 bp, Homo sapien
gatcctccggtagcgaagggctaga

SEQ ID NO: 981416 - DNA, 25 bp, Homo sapien
ggctagaggcaaacaccgagctcct

SEQ ID NO: 981417 - DNA, 25 bp, Homo sapien
tccccgcggggcagatggtaagtgg

SEQ ID NO: 981418 - DNA, 25 bp, Homo sapien
agggagcgcgcaggggggtaaggtg

SEQ ID NO: 981419 - DNA, 25 bp, Homo sapien
ccaggccgtaataaggatgtccagc

SEQ ID NO: 981420 - DNA, 25 bp, Homo sapien
gatgtccagccaaacgcagcaataa

SEQ ID NO: 981421 - DNA, 25 bp, Homo sapien
tgagagggacccaggccgtaataag

SEQ ID NO: 981422 - DNA, 25 bp, Homo sapien
tactattggagtgacgccccgaagt

SEQ ID NO: 981423 - DNA, 25 bp, Homo sapien
caaactgcccatcccgcttctctcc

SEQ ID NO: 981424 - DNA, 25 bp, Homo sapien
tatataagaaggactaaagggcaag

SEQ ID NO: 981425 - DNA, 25 bp, Homo sapien
tgaccacgccacctgaagtgtcctt

SEQ ID NO: 981426 - DNA, 25 bp, Homo sapien
catggtctgcaagcttaaggctgca

SEQ ID NO: 981427 - DNA, 25 bp, Homo sapien
tgatggcacctgtgataaagtccag

SEQ ID NO: 981428 - DNA, 25 bp, Homo sapien
tttaagaagaaatcagagtactccc

SEQ ID NO: 981429 - DNA, 25 bp, Homo sapien
taggtataggcataaggcagtcttg

SEQ ID NO: 981430 - DNA, 25 bp, Homo sapien
tacatatgcactcccttgtaatgga

SEQ ID NO: 981431 - DNA, 25 bp, Homo sapien
ggacgtttatattctctgagcctca

SEQ ID NO: 981432 - DNA, 25 bp, Homo sapien
taggattttgagagattattttcaa

SEQ ID NO: 981433 - DNA, 25 bp, Homo sapien
tgtggggttcctgagaataagcctt

SEQ ID NO: 981434 - DNA, 25 bp, Homo sapien
cagggacttgggtgtaggattttga

SEQ ID NO: 981435 - DNA, 25 bp, Homo sapien
ttcctgagaataagcctttcaggct

SEQ ID NO: 981436 - DNA, 25 bp, Homo sapien
tggggagtgagcagcaccaagtctg

SEQ ID NO: 981437 - DNA, 25 bp, Homo sapien
ctttttggggagtgagcagcaccaa

SEQ ID NO: 981438 - DNA, 25 bp, Homo sapien
tttggggagtgagcagcaccaagtc

SEQ ID NO: 981439 - DNA, 25 bp, Homo sapien
tttttggggagtgagcagcaccaag

SEQ ID NO: 981440 - DNA, 25 bp, Homo sapien
atgactgaggacaatacatttccct

SEQ ID NO: 981441 - DNA, 25 bp, Homo sapien
tgactgaggacaatacatttccctt

SEQ ID NO: 981442 - DNA, 25 bp, Homo sapien
tatttgaggaattgtggatatcaga

SEQ ID NO: 981443 - DNA, 25 bp, Homo sapien
atatcagaaatttcatgggaaggtc

SEQ ID NO: 981444 - DNA, 25 bp, Homo sapien
cactaaggcctatgtgcacctcatt

SEQ ID NO: 981445 - DNA, 25 bp, Homo sapien
ggaatacagggataggatggcagga

SEQ ID NO: 981446 - DNA, 25 bp, Homo sapien
ccagggccaaccttcagcattgctt

SEQ ID NO: 981447 - DNA, 25 bp, Homo sapien
cccagggccaaccttcagcattgct

SEQ ID NO: 981448 - DNA, 25 bp, Homo sapien
cagcattgcttgcagttatagtcat

SEQ ID NO: 981449 - DNA, 25 bp, Homo sapien
caaggtgactacactcctctcttct

SEQ ID NO: 981450 - DNA, 25 bp, Homo sapien
agctgtttgttccagactccaaggt

SEQ ID NO: 981451 - DNA, 25 bp, Homo sapien
tctggattttgctcctagagaggcc

SEQ ID NO: 981452 - DNA, 25 bp, Homo sapien
cctgcttggatagctgcctggccag

SEQ ID NO: 981453 - DNA, 25 bp, Homo sapien
tcaaagtttgaggtctatccggcag

SEQ ID NO: 981454 - DNA, 25 bp, Homo sapien
tagcagacaaatggacaaccactgg

SEQ ID NO: 981455 - DNA, 25 bp, Homo sapien
gctacacacggcacgaagatttaca

SEQ ID NO: 981456 - DNA, 25 bp, Homo sapien
aatcccaaatggcagattgagggcc

SEQ ID NO: 981457 - DNA, 25 bp, Homo sapien
aaggaggcttgtgtagttcctgcat

SEQ ID NO: 981458 - DNA, 25 bp, Homo sapien
catgtggatacaaggaggcttgtgt

SEQ ID NO: 981459 - DNA, 25 bp, Homo sapien
tcatgtggatacaaggaggcttgtg

SEQ ID NO: 981460 - DNA, 25 bp, Homo sapien
gatacaaggaggcttgtgtagttcc

SEQ ID NO: 981461 - DNA, 25 bp, Homo sapien
cctgcagccttttggctggtttaaa

SEQ ID NO: 981462 - DNA, 25 bp, Homo sapien
ctgcagccttttggctggtttaaat

SEQ ID NO: 981463 - DNA, 25 bp, Homo sapien
gaatcccgtccactgtggccacctg

SEQ ID NO: 981464 - DNA, 25 bp, Homo sapien
aatcccgtccactgtggccacctgc

SEQ ID NO: 981465 - DNA, 25 bp, Homo sapien
ctgtccctgcccgaggaatcccgtc

SEQ ID NO: 981466 - DNA, 25 bp, Homo sapien
gggcaacaatcctccgcaagctctt

SEQ ID NO: 981467 - DNA, 25 bp, Homo sapien
tggaaacgggcgttttgccatggaa

SEQ ID NO: 981468 - DNA, 25 bp, Homo sapien
gggaagtgggcaacaatcctccgca

SEQ ID NO: 981469 - DNA, 25 bp, Homo sapien
actgtgcctggaaacgggcgttttg

SEQ ID NO: 981470 - DNA, 25 bp, Homo sapien
cccatgggtggttgagatagtgaca

SEQ ID NO: 981471 - DNA, 25 bp, Homo sapien
aatgagcgtcaggaatgatgttgcc

SEQ ID NO: 981472 - DNA, 25 bp, Homo sapien
gatgttgccaaacaagcacagattg

SEQ ID NO: 981473 - DNA, 25 bp, Homo sapien
cattggacttcgaaaacttagtgca

SEQ ID NO: 981474 - DNA, 25 bp, Homo sapien
ccactgaggatcgaaggtagaagga

SEQ ID NO: 981475 - DNA, 25 bp, Homo sapien
ctgaggatcgaaggtagaaggaact

SEQ ID NO: 981476 - DNA, 25 bp, Homo sapien
cactgaggatcgaaggtagaaggaa

SEQ ID NO: 981477 - DNA, 25 bp, Homo sapien
actgaggatcgaaggtagaaggaac

SEQ ID NO: 981478 - DNA, 25 bp, Homo sapien
ggccaatggaaacagcgagtcgttg

SEQ ID NO: 981479 - DNA, 25 bp, Homo sapien
cttcagcaggtttactccatagtgt

SEQ ID NO: 981480 - DNA, 25 bp, Homo sapien
gccaatggaaacagcgagtcgttgt

SEQ ID NO: 981481 - DNA, 25 bp, Homo sapien
tcttcagcaggtttactccatagtg

SEQ ID NO: 981482 - DNA, 25 bp, Homo sapien
gaagaataattggaaacatggtgcc

SEQ ID NO: 981483 - DNA, 25 bp, Homo sapien
ctgaaatgaagaataattggaaaca

SEQ ID NO: 981484 - DNA, 25 bp, Homo sapien
ttggaaacatggtgcctgtttcttt

SEQ ID NO: 981485 - DNA, 25 bp, Homo sapien
ataattggaaacatggtgcctgttt

SEQ ID NO: 981486 - DNA, 25 bp, Homo sapien
tccatttaacattcttttggtgctc

SEQ ID NO: 981487 - DNA, 25 bp, Homo sapien
aattcatccatttaacattcttttg

SEQ ID NO: 981488 - DNA, 25 bp, Homo sapien
ctgcaaataacaattcatccattta

SEQ ID NO: 981489 - DNA, 25 bp, Homo sapien
tcatccatttaacattcttttggtg

SEQ ID NO: 981490 - DNA, 25 bp, Homo sapien
tttcaggcctagagccagtcagggt

SEQ ID NO: 981491 - DNA, 25 bp, Homo sapien
ctttcaggcctagagccagtcaggg

SEQ ID NO: 981492 - DNA, 25 bp, Homo sapien
ttatactcagacttcgtggagctgc

SEQ ID NO: 981493 - DNA, 25 bp, Homo sapien
tgcctttatactcagacttcgtgga

SEQ ID NO: 981494 - DNA, 25 bp, Homo sapien
gtgcctttatactcagacttcgtgg

SEQ ID NO: 981495 - DNA, 25 bp, Homo sapien
cctttatactcagacttcgtggagc

SEQ ID NO: 981496 - DNA, 25 bp, Homo sapien
gcagggggatgtcacctctcctgcc

SEQ ID NO: 981497 - DNA, 25 bp, Homo sapien
gagcagggggatgtcacctctcctg

SEQ ID NO: 981498 - DNA, 25 bp, Homo sapien
aagtaggataagctgctgataggtg

SEQ ID NO: 981499 - DNA, 25 bp, Homo sapien
gtcaagtaggataagctgctgatag

SEQ ID NO: 981500 - DNA, 25 bp, Homo sapien
tcttagagaagcagatgaccccggc

SEQ ID NO: 981501 - DNA, 25 bp, Homo sapien
gcagccctcgatgctgcaattggaa

SEQ ID NO: 981502 - DNA, 25 bp, Homo sapien
agaagcagatgaccccggctgagca

SEQ ID NO: 981503 - DNA, 25 bp, Homo sapien
acagcagccctcgatgctgcaattg

SEQ ID NO: 981504 - DNA, 25 bp, Homo sapien
aatttagtttctggcgcagaaatgt

SEQ ID NO: 981505 - DNA, 25 bp, Homo sapien
ggagtcctccactgtcgtcagccct

SEQ ID NO: 981506 - DNA, 25 bp, Homo sapien
ctgtcgtcagccctgtacaaggcac

SEQ ID NO: 981507 - DNA, 25 bp, Homo sapien
tccactgtcgtcagccctgtacaag

SEQ ID NO: 981508 - DNA, 25 bp, Homo sapien
cagagggtcaccttgggattgcaaa

SEQ ID NO: 981509 - DNA, 25 bp, Homo sapien
cacggtttcaatgtaccatggccta

SEQ ID NO: 981510 - DNA, 25 bp, Homo sapien
catggcctaccagatgtactaaagg

SEQ ID NO: 981511 - DNA, 25 bp, Homo sapien
caggcattttggagcatgtggatca

SEQ ID NO: 981512 - DNA, 25 bp, Homo sapien
ggccaaatgaagcttttagcacact

SEQ ID NO: 981513 - DNA, 25 bp, Homo sapien
actataaacccaattgctcctattt

SEQ ID NO: 981514 - DNA, 25 bp, Homo sapien
ccagggaactataagtaggccaaat

SEQ ID NO: 981515 - DNA, 25 bp, Homo sapien
gcaactataaacccaattgctccta

SEQ ID NO: 981516 - DNA, 25 bp, Homo sapien
tttttcatcctgtgcctcctcacga

SEQ ID NO: 981517 - DNA, 25 bp, Homo sapien
caatgatagggctgtgcctttttca

SEQ ID NO: 981518 - DNA, 25 bp, Homo sapien
gtgcctcctcacgaaaataactcaa

SEQ ID NO: 981519 - DNA, 25 bp, Homo sapien
tgtgagttcctccaatgatagggct

SEQ ID NO: 981520 - DNA, 25 bp, Homo sapien
gacagtacagacatggagcctggaa

SEQ ID NO: 981521 - DNA, 25 bp, Homo sapien
gagttgcaacacttggtgacagtac

SEQ ID NO: 981522 - DNA, 25 bp, Homo sapien
acagtatgcgtgatggacaggttga

SEQ ID NO: 981523 - DNA, 25 bp, Homo sapien
cttgtgttctgtaaccctggcttgg

SEQ ID NO: 981524 - DNA, 25 bp, Homo sapien
ggggtttgaattgagggatgcccat

SEQ ID NO: 981525 - DNA, 25 bp, Homo sapien
tgcggggtttgaattgagggatgcc

SEQ ID NO: 981526 - DNA, 25 bp, Homo sapien
cggggtttgaattgagggatgccca

SEQ ID NO: 981527 - DNA, 25 bp, Homo sapien
ctgcggggtttgaattgagggatgc

SEQ ID NO: 981528 - DNA, 25 bp, Homo sapien
ggacattggcttccttactctggaa

SEQ ID NO: 981529 - DNA, 25 bp, Homo sapien
gcaaactggtctggagacaagccca

SEQ ID NO: 981530 - DNA, 25 bp, Homo sapien
ggtactctgctaatcctctgaacct

SEQ ID NO: 981531 - DNA, 25 bp, Homo sapien
gaagaccgtagccatagctcggaac

SEQ ID NO: 981532 - DNA, 25 bp, Homo sapien
tattggcaactggagtaggatcctt

SEQ ID NO: 981533 - DNA, 25 bp, Homo sapien
taggatcctttgtcgagttgggtat

SEQ ID NO: 981534 - DNA, 25 bp, Homo sapien
agttgggtatttcctctgacgtcac

SEQ ID NO: 981535 - DNA, 25 bp, Homo sapien
actctcaaggctccccggtgggtct

SEQ ID NO: 981536 - DNA, 25 bp, Homo sapien
ttgctcctccctaaccaaggaactg

SEQ ID NO: 981537 - DNA, 25 bp, Homo sapien
gcttttgagttctgtgctaggaaat

SEQ ID NO: 981538 - DNA, 25 bp, Homo sapien
tagggctttcagagccgtgacagcc

SEQ ID NO: 981539 - DNA, 25 bp, Homo sapien
caaggaactgagaaacgccattagg

SEQ ID NO: 981540 - DNA, 25 bp, Homo sapien
tgttttggtcaaggatttgattgga

SEQ ID NO: 981541 - DNA, 25 bp, Homo sapien
gaattccccatttcatgctcagact

SEQ ID NO: 981542 - DNA, 25 bp, Homo sapien
tctatggtcgacctcaaatctacca

SEQ ID NO: 981543 - DNA, 25 bp, Homo sapien
ttcttcacaaccttctatggtcgac

SEQ ID NO: 981544 - DNA, 25 bp, Homo sapien
gctgtccccacaaagtgacagctgc

SEQ ID NO: 981545 - DNA, 25 bp, Homo sapien
tggctggaattgaccgctgtcccca

SEQ ID NO: 981546 - DNA, 25 bp, Homo sapien
tactcttaaacacaaggcccgatga

SEQ ID NO: 981547 - DNA, 25 bp, Homo sapien
gtgaaagtttataaccacaatcagc

SEQ ID NO: 981548 - DNA, 25 bp, Homo sapien
taatctgagcaagctgctttgcttc

SEQ ID NO: 981549 - DNA, 25 bp, Homo sapien
taggacaatcttgctaatctgagca

SEQ ID NO: 981550 - DNA, 25 bp, Homo sapien
ggaatcttggattctaggacaatct

SEQ ID NO: 981551 - DNA, 25 bp, Homo sapien
tatctattaaattctgagtttggaa

SEQ ID NO: 981552 - DNA, 25 bp, Homo sapien
gatgccacttccaccgctcctaaat

SEQ ID NO: 981553 - DNA, 25 bp, Homo sapien
caattataccttctaagttgttgac

SEQ ID NO: 981554 - DNA, 25 bp, Homo sapien
cccctcaaatacaattataccttct

SEQ ID NO: 981555 - DNA, 25 bp, Homo sapien
cctaaatgtccaatcaaaactgccc

SEQ ID NO: 981556 - DNA, 25 bp, Homo sapien
tctgtgtaaaccctttactggtagc

SEQ ID NO: 981557 - DNA, 25 bp, Homo sapien
ctcatttctggagaagagatgtgtt

SEQ ID NO: 981558 - DNA, 25 bp, Homo sapien
tagcaagggaactcaatctgaagca

SEQ ID NO: 981559 - DNA, 25 bp, Homo sapien
caggttcaccgtgaaaagttggttg

SEQ ID NO: 981560 - DNA, 25 bp, Homo sapien
ctcttacaatgattccaaatcttgg

SEQ ID NO: 981561 - DNA, 25 bp, Homo sapien
cttacaatgattccaaatcttggac

SEQ ID NO: 981562 - DNA, 25 bp, Homo sapien
cctcttacaatgattccaaatcttg

SEQ ID NO: 981563 - DNA, 25 bp, Homo sapien
tcttacaatgattccaaatcttgga

SEQ ID NO: 981564 - DNA, 25 bp, Homo sapien
gaggccagcagtccaagttgcaatg

SEQ ID NO: 981565 - DNA, 25 bp, Homo sapien
ttggcaatgtagcactcacagctgg

SEQ ID NO: 981566 - DNA, 25 bp, Homo sapien
gacccatttgttgaagtgccctcca

SEQ ID NO: 981567 - DNA, 25 bp, Homo sapien
tctccctggtgactaacaaaattgg

SEQ ID NO: 981568 - DNA, 25 bp, Homo sapien
taagtgtggtattgactagactcca

SEQ ID NO: 981569 - DNA, 25 bp, Homo sapien
aaatttcaatggtttgaccccatgc

SEQ ID NO: 981570 - DNA, 25 bp, Homo sapien
tgggtttcacacgagaactagtttg

SEQ ID NO: 981571 - DNA, 25 bp, Homo sapien
gatggttattcactgttctcccaag

SEQ ID NO: 981572 - DNA, 25 bp, Homo sapien
catctggcttgagcctattttggaa

SEQ ID NO: 981573 - DNA, 25 bp, Homo sapien
ccatgggcggctgtcctttctgtaa

SEQ ID NO: 981574 - DNA, 25 bp, Homo sapien
gaaagtagcagtggtttgagctcct

SEQ ID NO: 981575 - DNA, 25 bp, Homo sapien
tggaaactctgccaggtcccttggc

SEQ ID NO: 981576 - DNA, 25 bp, Homo sapien
tcacacgggcacctagtaagggagg

SEQ ID NO: 981577 - DNA, 25 bp, Homo sapien
ggaattgggcctgtgcaacagctcc

SEQ ID NO: 981578 - DNA, 25 bp, Homo sapien
aacagctcctccgttcatgaacagc

SEQ ID NO: 981579 - DNA, 25 bp, Homo sapien
aaggccagcaggtcacacgggcacc

SEQ ID NO: 981580 - DNA, 25 bp, Homo sapien
tgtgctatacatgtagtaactggca

SEQ ID NO: 981581 - DNA, 25 bp, Homo sapien
gttggatgaaactcagccaaaggcc

SEQ ID NO: 981582 - DNA, 25 bp, Homo sapien
ggccagaggttctcgacctttgtgc

SEQ ID NO: 981583 - DNA, 25 bp, Homo sapien
tgaactaaacattcagttggatgaa

SEQ ID NO: 981584 - DNA, 25 bp, Homo sapien
gaattattgccagctcctgaactcc

SEQ ID NO: 981585 - DNA, 25 bp, Homo sapien
ggaaaacggatgaattctgtctgat

SEQ ID NO: 981586 - DNA, 25 bp, Homo sapien
ctccaactaagctctgcaaaccaag

SEQ ID NO: 981587 - DNA, 25 bp, Homo sapien
taaagaggaattattgccagctcct

SEQ ID NO: 981588 - DNA, 25 bp, Homo sapien
atacctgaagccagcctcagtgttc

SEQ ID NO: 981589 - DNA, 25 bp, Homo sapien
tcttgaaagggaactacgtagacaa

SEQ ID NO: 981590 - DNA, 25 bp, Homo sapien
caaaatctgagtgtcaaggtatccc

SEQ ID NO: 981591 - DNA, 25 bp, Homo sapien
tgtgtgtaggacaggattgccgtct

SEQ ID NO: 981592 - DNA, 25 bp, Homo sapien
tcattgccagaaaggctcatgccca

SEQ ID NO: 981593 - DNA, 25 bp, Homo sapien
tacttagtccaatgatatgatctcc

SEQ ID NO: 981594 - DNA, 25 bp, Homo sapien
cttgtcagggtcctattctatgaat

SEQ ID NO: 981595 - DNA, 25 bp, Homo sapien
acttgtcagggtcctattctatgaa

SEQ ID NO: 981596 - DNA, 25 bp, Homo sapien
agttgttacttagtccaatgatatg

SEQ ID NO: 981597 - DNA, 25 bp, Homo sapien
tattaatcctaaggctaatttcatt

SEQ ID NO: 981598 - DNA, 25 bp, Homo sapien
attttacttttgcatcagtatatta

SEQ ID NO: 981599 - DNA, 25 bp, Homo sapien
atcctaaggctaatttcattaaatc

SEQ ID NO: 981600 - DNA, 25 bp, Homo sapien
tattattaatcctaaggctaatttc

SEQ ID NO: 981601 - DNA, 25 bp, Homo sapien
tcattttgaccaaagtcccctctta

SEQ ID NO: 981602 - DNA, 25 bp, Homo sapien
tatgctctctatgtaaatttctggc

SEQ ID NO: 981603 - DNA, 25 bp, Homo sapien
caagaaagccctgttattctgaaac

SEQ ID NO: 981604 - DNA, 25 bp, Homo sapien
tacttaggacaaagatttactatcc

SEQ ID NO: 981605 - DNA, 25 bp, Homo sapien
aattttagccacattgaaactgctg

SEQ ID NO: 981606 - DNA, 25 bp, Homo sapien
taaagtttatctgttccacatggct

SEQ ID NO: 981607 - DNA, 25 bp, Homo sapien
gaaactgctggtgaactgaggtaag

SEQ ID NO: 981608 - DNA, 25 bp, Homo sapien
cacatggctgaagctcgtactgagt

SEQ ID NO: 981609 - DNA, 25 bp, Homo sapien
ttgcaagccggagatcaggagagtc

SEQ ID NO: 981610 - DNA, 25 bp, Homo sapien
cattacattgaccaggccggactca

SEQ ID NO: 981611 - DNA, 25 bp, Homo sapien
gagagtccttcgtgagcctacacca

SEQ ID NO: 981612 - DNA, 25 bp, Homo sapien
ggcattgcttcaccacggaagtgca

SEQ ID NO: 981613 - DNA, 25 bp, Homo sapien
gaatccaaagcaggcagtttaagca

SEQ ID NO: 981614 - DNA, 25 bp, Homo sapien
tttaaagggtactgtctcacagtgg

SEQ ID NO: 981615 - DNA, 25 bp, Homo sapien
ttatcttgtcttagatctgatctca

SEQ ID NO: 981616 - DNA, 25 bp, Homo sapien
tcacagtgggtcaataaatcagtgt

SEQ ID NO: 981617 - DNA, 25 bp, Homo sapien
gcctaagagatgtatggaagccaag

SEQ ID NO: 981618 - DNA, 25 bp, Homo sapien
aaccatcacatctcgtaagaactcc

SEQ ID NO: 981619 - DNA, 25 bp, Homo sapien
gcagaaagggatgagttcagatcac

SEQ ID NO: 981620 - DNA, 25 bp, Homo sapien
tcacagtgtcattcactagacctgg

SEQ ID NO: 981621 - DNA, 25 bp, Homo sapien
tggcagcagagtcctcaaggatgag

SEQ ID NO: 981622 - DNA, 25 bp, Homo sapien
tcattccaggttagatgggtctact

SEQ ID NO: 981623 - DNA, 25 bp, Homo sapien
cattgttgcctatgatcattccagg

SEQ ID NO: 981624 - DNA, 25 bp, Homo sapien
ggtctactttcccagatactacaag

SEQ ID NO: 981625 - DNA, 25 bp, Homo sapien
caagagtaggaggtccaaattccgg

SEQ ID NO: 981626 - DNA, 25 bp, Homo sapien
cttcaacccaagagtaggaggtcca

SEQ ID NO: 981627 - DNA, 25 bp, Homo sapien
caaattccggagaactcatctgaaa

SEQ ID NO: 981628 - DNA, 25 bp, Homo sapien
ggaggtccaaattccggagaactca

SEQ ID NO: 981629 - DNA, 25 bp, Homo sapien
cacactggtaccaagcgctgctttc

SEQ ID NO: 981630 - DNA, 25 bp, Homo sapien
ttggggggagtcactgtgaatcctg

SEQ ID NO: 981631 - DNA, 25 bp, Homo sapien
ggggggagtcactgtgaatcctgct

SEQ ID NO: 981632 - DNA, 25 bp, Homo sapien
tcacactggtaccaagcgctgcttt

SEQ ID NO: 981633 - DNA, 25 bp, Homo sapien
gctttcaggagtccaacctcttaga

SEQ ID NO: 981634 - DNA, 25 bp, Homo sapien
gcgacatactctttggtaactgcag

SEQ ID NO: 981635 - DNA, 25 bp, Homo sapien
gacaataagcgacatactctttggt

SEQ ID NO: 981636 - DNA, 25 bp, Homo sapien
ttttccactcttcaggtgaagatga

SEQ ID NO: 981637 - DNA, 25 bp, Homo sapien
tcaggtctgtgggtgaacgtcattc

SEQ ID NO: 981638 - DNA, 25 bp, Homo sapien
taggatgcggctcacaagaaatgtt

SEQ ID NO: 981639 - DNA, 25 bp, Homo sapien
gagaacgttatctagagctgccaga

SEQ ID NO: 981640 - DNA, 25 bp, Homo sapien
aaaaatgatgacacgcagcttccca

SEQ ID NO: 981641 - DNA, 25 bp, Homo sapien
tgagataggacattggcccggcgct

SEQ ID NO: 981642 - DNA, 25 bp, Homo sapien
cgagcgacgtgggaaaccctgagat

SEQ ID NO: 981643 - DNA, 25 bp, Homo sapien
gcctggaaagcgcttacacctcaga

SEQ ID NO: 981644 - DNA, 25 bp, Homo sapien
tcagccgtcaaggagcgagcgacgt

SEQ ID NO: 981645 - DNA, 25 bp, Homo sapien
tacgcgctacacaagtggagctcct

SEQ ID NO: 981646 - DNA, 25 bp, Homo sapien
ggcttctcccctacgcgctacacaa

SEQ ID NO: 981647 - DNA, 25 bp, Homo sapien
tcccctacgcgctacacaagtggag

SEQ ID NO: 981648 - DNA, 25 bp, Homo sapien
cctacgcgctacacaagtggagctc

SEQ ID NO: 981649 - DNA, 25 bp, Homo sapien
cattggcctccatcagttttttaga

SEQ ID NO: 981650 - DNA, 25 bp, Homo sapien
tttcagtagaagtatcaaaattgga

SEQ ID NO: 981651 - DNA, 25 bp, Homo sapien
cctaggtggtgccatatactttgta

SEQ ID NO: 981652 - DNA, 25 bp, Homo sapien
caaaattggatttctctcatcttac

SEQ ID NO: 981653 - DNA, 25 bp, Homo sapien
gatctgtgtcacttggacctcctgc

SEQ ID NO: 981654 - DNA, 25 bp, Homo sapien
ggctccaggccgcatttgtgaattt

SEQ ID NO: 981655 - DNA, 25 bp, Homo sapien
tgtgaatcttatctctcctggaggg

SEQ ID NO: 981656 - DNA, 25 bp, Homo sapien
gatagaccagtgcagtttttgagct

SEQ ID NO: 981657 - DNA, 25 bp, Homo sapien
gattacatgtatcccttaatgctgt

SEQ ID NO: 981658 - DNA, 25 bp, Homo sapien
gagcaactatcctccccaggtaaga

SEQ ID NO: 981659 - DNA, 25 bp, Homo sapien
ttatctcataggcaaatgcagtgtg

SEQ ID NO: 981660 - DNA, 25 bp, Homo sapien
cactcaattgatactagttatctgg

SEQ ID NO: 981661 - DNA, 25 bp, Homo sapien
gctcaggcctgttgtctggtgcata

SEQ ID NO: 981662 - DNA, 25 bp, Homo sapien
tggctcaggcctgttgtctggtgca

SEQ ID NO: 981663 - DNA, 25 bp, Homo sapien
cataaggaggcgaggctaggcgttc

SEQ ID NO: 981664 - DNA, 25 bp, Homo sapien
aggcgaggctaggcgttcgaggcta

SEQ ID NO: 981665 - DNA, 25 bp, Homo sapien
gacaatgtgccgtttattctcctag

SEQ ID NO: 981666 - DNA, 25 bp, Homo sapien
ttaactcctatttgccttggtgctg

SEQ ID NO: 981667 - DNA, 25 bp, Homo sapien
caaagccaactctttcaaggtatct

SEQ ID NO: 981668 - DNA, 25 bp, Homo sapien
catacatctgagagcttgacaatgt

SEQ ID NO: 981669 - DNA, 25 bp, Homo sapien
gactgtctcgtgactgtagttgcaa

SEQ ID NO: 981670 - DNA, 25 bp, Homo sapien
tgatggtcagggtccttacccctac

SEQ ID NO: 981671 - DNA, 25 bp, Homo sapien
gcaacaaagcgcaaccctgtcaaaa

SEQ ID NO: 981672 - DNA, 25 bp, Homo sapien
gcagtggcgcaaaggcctagatatt

SEQ ID NO: 981673 - DNA, 25 bp, Homo sapien
tagaagttttctctagtaaaattga

SEQ ID NO: 981674 - DNA, 25 bp, Homo sapien
gaatgccacatttcatgacatgact

SEQ ID NO: 981675 - DNA, 25 bp, Homo sapien
catgactctgtctttactcaccaaa

SEQ ID NO: 981676 - DNA, 25 bp, Homo sapien
caagcttgagataagtggtagtaga

SEQ ID NO: 981677 - DNA, 25 bp, Homo sapien
gaaacatgccctggaactcaatagg

SEQ ID NO: 981678 - DNA, 25 bp, Homo sapien
tagtgaggcaacttctgtggattcc

SEQ ID NO: 981679 - DNA, 25 bp, Homo sapien
tctctagttgtgactgggtaatcca

SEQ ID NO: 981680 - DNA, 25 bp, Homo sapien
gtctaacaactttcatgccttggca

SEQ ID NO: 981681 - DNA, 25 bp, Homo sapien
ttaagtactcttgaatttcagcttc

SEQ ID NO: 981682 - DNA, 25 bp, Homo sapien
gcacttgtttttcggcatgattata

SEQ ID NO: 981683 - DNA, 25 bp, Homo sapien
gcaatagaatttgtggtaaacaagt

SEQ ID NO: 981684 - DNA, 25 bp, Homo sapien
gttcagctactgatacacaaccaaa

SEQ ID NO: 981685 - DNA, 25 bp, Homo sapien
cataataggtcaggcattctaggca

SEQ ID NO: 981686 - DNA, 25 bp, Homo sapien
taacagttgtgtatcgattccccat

SEQ ID NO: 981687 - DNA, 25 bp, Homo sapien
tctaggcagaggagctgtatcagca

SEQ ID NO: 981688 - DNA, 25 bp, Homo sapien
gaattgaataagtactgggccgggc

SEQ ID NO: 981689 - DNA, 25 bp, Homo sapien
cagtgcttagactgtatactttcag

SEQ ID NO: 981690 - DNA, 25 bp, Homo sapien
agtacatatgatgttgctgggagtc

SEQ ID NO: 981691 - DNA, 25 bp, Homo sapien
gaacgtaagagaaagaactaagcca

SEQ ID NO: 981692 - DNA, 25 bp, Homo sapien
tacttctacatactcagaacgtaag

SEQ ID NO: 981693 - DNA, 25 bp, Homo sapien
tcacacctatgctcaaagaactcag

SEQ ID NO: 981694 - DNA, 25 bp, Homo sapien
aagtgccagtccttctgctagacgc

SEQ ID NO: 981695 - DNA, 25 bp, Homo sapien
cactgtaactgaagagtcactggac

SEQ ID NO: 981696 - DNA, 25 bp, Homo sapien
tcctaaaggcaacctggtagacctc

SEQ ID NO: 981697 - DNA, 25 bp, Homo sapien
caaatgactaactcttaggccagtc

SEQ ID NO: 981698 - DNA, 25 bp, Homo sapien
tctagtggtgcagagagaaatgcca

SEQ ID NO: 981699 - DNA, 25 bp, Homo sapien
cacaaaaatgaaagggtagtcctag

SEQ ID NO: 981700 - DNA, 25 bp, Homo sapien
tcatctgacggtagcttctgtagcc

SEQ ID NO: 981701 - DNA, 25 bp, Homo sapien
tattaaacttcaggaacgagctaga

SEQ ID NO: 981702 - DNA, 25 bp, Homo sapien
taccaaaaggcctcaaagctcatgc

SEQ ID NO: 981703 - DNA, 25 bp, Homo sapien
atgagatgctgggaagaagactacc

SEQ ID NO: 981704 - DNA, 25 bp, Homo sapien
gatcttaaactaggtgagcagcttc

SEQ ID NO: 981705 - DNA, 25 bp, Homo sapien
tcagatgaacaagtaccggccatgc

SEQ ID NO: 981706 - DNA, 25 bp, Homo sapien
tgatacgctttcgaagggcctttgg

SEQ ID NO: 981707 - DNA, 25 bp, Homo sapien
tgagcattgccgttttctagacaga

SEQ ID NO: 981708 - DNA, 25 bp, Homo sapien
gcttggccctaaacacagatgagag

SEQ ID NO: 981709 - DNA, 25 bp, Homo sapien
tgaagtttaccccttccgatgaaga

SEQ ID NO: 981710 - DNA, 25 bp, Homo sapien
gaactctggcattaacgtgatactg

SEQ ID NO: 981711 - DNA, 25 bp, Homo sapien
cagtgattccttccttaaaccgcta

SEQ ID NO: 981712 - DNA, 25 bp, Homo sapien
tggataataccacactaggagatga

SEQ ID NO: 981713 - DNA, 25 bp, Homo sapien
gaccaacaccaaagagtcatctgtg

SEQ ID NO: 981714 - DNA, 25 bp, Homo sapien
gacctgagggatcagctagtgaccg

SEQ ID NO: 981715 - DNA, 25 bp, Homo sapien
tagtgaccgtgacaaaagctatgct

SEQ ID NO: 981716 - DNA, 25 bp, Homo sapien
catgctgtgtttgcagcagacctga

SEQ ID NO: 981717 - DNA, 25 bp, Homo sapien
tcattctggcaccttcgagtagcaa

SEQ ID NO: 981718 - DNA, 25 bp, Homo sapien
cagtgcagggtaggttaacatggtc

SEQ ID NO: 981719 - DNA, 25 bp, Homo sapien
tattccttctgaggcgcacagtctg

SEQ ID NO: 981720 - DNA, 25 bp, Homo sapien
gctagctttccttatcaagcgggaa

SEQ ID NO: 981721 - DNA, 25 bp, Homo sapien
catcatacttgtggtttctggcctc

SEQ ID NO: 981722 - DNA, 25 bp, Homo sapien
gcctagactaacacagtttggacga

SEQ ID NO: 981723 - DNA, 25 bp, Homo sapien
tccttggacagagcgatggagagtc

SEQ ID NO: 981724 - DNA, 25 bp, Homo sapien
catttagaacccagtaaaggtggca

SEQ ID NO: 981725 - DNA, 25 bp, Homo sapien
gaataacctgtgctaatcccagagg

SEQ ID NO: 981726 - DNA, 25 bp, Homo sapien
gagcctgactcttaagaccctggag

SEQ ID NO: 981727 - DNA, 25 bp, Homo sapien
taaaaagtaagccatcccgagtgga

SEQ ID NO: 981728 - DNA, 25 bp, Homo sapien
tgtgacccaggatcagcaaaggagg

SEQ ID NO: 981729 - DNA, 25 bp, Homo sapien
ccaggtcgtccttggtcaggttgtc

SEQ ID NO: 981730 - DNA, 25 bp, Homo sapien
gtccagagggacgatccagctgtcc

SEQ ID NO: 981731 - DNA, 25 bp, Homo sapien
cagctccccgttgaggctgaccacc

SEQ ID NO: 981732 - DNA, 25 bp, Homo sapien
cccagctccccgttgaggctgacca

SEQ ID NO: 981733 - DNA, 25 bp, Homo sapien
gtcccctagcttcatgtcactgacc

SEQ ID NO: 981734 - DNA, 25 bp, Homo sapien
agagggccgccacgaggagcaggaa

SEQ ID NO: 981735 - DNA, 25 bp, Homo sapien
tggcagcagccatagagggccgcca

SEQ ID NO: 981736 - DNA, 25 bp, Homo sapien
atgctgaagcggtcctcggcctcct

SEQ ID NO: 981737 - DNA, 25 bp, Homo sapien
tacatgcaggcacatgacggggttc

SEQ ID NO: 981738 - DNA, 25 bp, Homo sapien
agtctgctagggtccgtgccgccgc

SEQ ID NO: 981739 - DNA, 25 bp, Homo sapien
gtgccgccgccctcttctacatgca

SEQ ID NO: 981740 - DNA, 25 bp, Homo sapien
actgtagagcccctccgcttgcagt

SEQ ID NO: 981741 - DNA, 25 bp, Homo sapien
ctcccacaaggggcttcggagccac

SEQ ID NO: 981742 - DNA, 25 bp, Homo sapien
tcccacaaggggcttcggagccact

SEQ ID NO: 981743 - DNA, 25 bp, Homo sapien
cggagccactctgtccccacacttg

SEQ ID NO: 981744 - DNA, 25 bp, Homo sapien
tctgtccccacacttggggggccgc

SEQ ID NO: 981745 - DNA, 25 bp, Homo sapien
gccgctcgtacacatccttggcagg

SEQ ID NO: 981746 - DNA, 25 bp, Homo sapien
ttcagccgctcgtacacatccttgg

SEQ ID NO: 981747 - DNA, 25 bp, Homo sapien
ccttcagccgctcgtacacatcctt

SEQ ID NO: 981748 - DNA, 25 bp, Homo sapien
atttgtccttcagccgctcgtacac

SEQ ID NO: 981749 - DNA, 25 bp, Homo sapien
tcctgagtgtctctcgggtgacctg

SEQ ID NO: 981750 - DNA, 25 bp, Homo sapien
ccaagagagggacgcaccgtatctc

SEQ ID NO: 981751 - DNA, 25 bp, Homo sapien
agagggagacgatgcccaatggccc

SEQ ID NO: 981752 - DNA, 25 bp, Homo sapien
tgtggcttgacagttcttagggaac

SEQ ID NO: 981753 - DNA, 25 bp, Homo sapien
tggaacagatgccagccgtatgccg

SEQ ID NO: 981754 - DNA, 25 bp, Homo sapien
tatgccgcacttatcttgggccggg

SEQ ID NO: 981755 - DNA, 25 bp, Homo sapien
gatcaatttctcatccgaagcgccc

SEQ ID NO: 981756 - DNA, 25 bp, Homo sapien
gaaggtggctttgactgctcggcat

SEQ ID NO: 981757 - DNA, 25 bp, Homo sapien
ggtggctgcaaaaaaccggcactga

SEQ ID NO: 981758 - DNA, 25 bp, Homo sapien
tgaaatacatgtgcccttgccctag

SEQ ID NO: 981759 - DNA, 25 bp, Homo sapien
gaacaggtgggatcttgaagctacc

SEQ ID NO: 981760 - DNA, 25 bp, Homo sapien
aacaaagattgtggctgacgtggct

SEQ ID NO: 981761 - DNA, 25 bp, Homo sapien
tgtgaggttcaggacgagctgcttc

SEQ ID NO: 981762 - DNA, 25 bp, Homo sapien
tcaggacgagctgcttctcactctg

SEQ ID NO: 981763 - DNA, 25 bp, Homo sapien
tgaggttcaggacgagctgcttctc

SEQ ID NO: 981764 - DNA, 25 bp, Homo sapien
ggacgagctgcttctcactctgtgt

SEQ ID NO: 981765 - DNA, 25 bp, Homo sapien
ggtttgggctaatagtcatggaatc

SEQ ID NO: 981766 - DNA, 25 bp, Homo sapien
gctaatagtcatggaatctttgaca

SEQ ID NO: 981767 - DNA, 25 bp, Homo sapien
gagattaaggtttgggctaatagtc

SEQ ID NO: 981768 - DNA, 25 bp, Homo sapien
ttaaggtttgggctaatagtcatgg

SEQ ID NO: 981769 - DNA, 25 bp, Homo sapien
gccaggaccaggctaaccagggaga

SEQ ID NO: 981770 - DNA, 25 bp, Homo sapien
tggaggcatggctggacccattcca

SEQ ID NO: 981771 - DNA, 25 bp, Homo sapien
gctgcgtggcttgagggcagctcaa

SEQ ID NO: 981772 - DNA, 25 bp, Homo sapien
taggaaagagttcacggcaagctgg

SEQ ID NO: 981773 - DNA, 25 bp, Homo sapien
ccgagtctgggttctcctacttgcc

SEQ ID NO: 981774 - DNA, 25 bp, Homo sapien
acccgagtctgggttctcctacttg

SEQ ID NO: 981775 - DNA, 25 bp, Homo sapien
ctacccgagtctgggttctcctact

SEQ ID NO: 981776 - DNA, 25 bp, Homo sapien
gagtctgggttctcctacttgcccc

SEQ ID NO: 981777 - DNA, 25 bp, Homo sapien
gttctttgcgagataaccgatgacg

SEQ ID NO: 981778 - DNA, 25 bp, Homo sapien
gtctctggcagggtaggtgttctca

SEQ ID NO: 981779 - DNA, 25 bp, Homo sapien
ctcaatgccgttgccgggctcgtgg

SEQ ID NO: 981780 - DNA, 25 bp, Homo sapien
tggcatctgactggaggtctgttga

SEQ ID NO: 981781 - DNA, 25 bp, Homo sapien
gcctggctgacatggtgaaacactg

SEQ ID NO: 981782 - DNA, 25 bp, Homo sapien
gaccagcctggctgacatggtgaaa

SEQ ID NO: 981783 - DNA, 25 bp, Homo sapien
cagcctggctgacatggtgaaacac

SEQ ID NO: 981784 - DNA, 25 bp, Homo sapien
accagcctggctgacatggtgaaac

SEQ ID NO: 981785 - DNA, 25 bp, Homo sapien
taagatggtcatgtcccgagcttgt

SEQ ID NO: 981786 - DNA, 25 bp, Homo sapien
aaggtgtagccagggatagccacag

SEQ ID NO: 981787 - DNA, 25 bp, Homo sapien
catccccgggcttgtgaaggtgtag

SEQ ID NO: 981788 - DNA, 25 bp, Homo sapien
gccacagtgcttgaactgcttgaaa

SEQ ID NO: 981789 - DNA, 25 bp, Homo sapien
ttgaccgaggccaagatttcgttgg

SEQ ID NO: 981790 - DNA, 25 bp, Homo sapien
cagggttgtagtccccggtgagtca

SEQ ID NO: 981791 - DNA, 25 bp, Homo sapien
gcctcctctagccacggtagtgttg

SEQ ID NO: 981792 - DNA, 25 bp, Homo sapien
caccaagggtggtcgccttgaccga

SEQ ID NO: 981793 - DNA, 25 bp, Homo sapien
ctggagtcggtgctgttttgttaga

SEQ ID NO: 981794 - DNA, 25 bp, Homo sapien
gctgttttgttagatgagtccgtag

SEQ ID NO: 981795 - DNA, 25 bp, Homo sapien
tagatgagtccgtagtagtctgggt

SEQ ID NO: 981796 - DNA, 25 bp, Homo sapien
tcggtgctgttttgttagatgagtc

SEQ ID NO: 981797 - DNA, 25 bp, Homo sapien
tcactctcgccaaccagtgtcggct

SEQ ID NO: 981798 - DNA, 25 bp, Homo sapien
gacagcatgggaaggccatcgagga

SEQ ID NO: 981799 - DNA, 25 bp, Homo sapien
catgtgctcaggtgaaccttggccc

SEQ ID NO: 981800 - DNA, 25 bp, Homo sapien
gaggaactgactcgcctcactctcg

SEQ ID NO: 981801 - DNA, 25 bp, Homo sapien
tttctccctgcagggagggcactgt

SEQ ID NO: 981802 - DNA, 25 bp, Homo sapien
tgtaagaagccctggttcacaccac

SEQ ID NO: 981803 - DNA, 25 bp, Homo sapien
gggcagccttcgcttgggtgcattt

SEQ ID NO: 981804 - DNA, 25 bp, Homo sapien
tctagcgtggagatgtcccagcgat

SEQ ID NO: 981805 - DNA, 25 bp, Homo sapien
ggtctgcccagacccatgtggctct

SEQ ID NO: 981806 - DNA, 25 bp, Homo sapien
caggtctgcccagacccatgtggct

SEQ ID NO: 981807 - DNA, 25 bp, Homo sapien
gtctgcccagacccatgtggctctt

SEQ ID NO: 981808 - DNA, 25 bp, Homo sapien
ctgcccagacccatgtggctcttcc

SEQ ID NO: 981809 - DNA, 25 bp, Homo sapien
gatgaggagctgagcctgaaccttc

SEQ ID NO: 981810 - DNA, 25 bp, Homo sapien
ctgtggtcaagagaagacccagatg

SEQ ID NO: 981811 - DNA, 25 bp, Homo sapien
gtcaagagaagacccagatgaggag

SEQ ID NO: 981812 - DNA, 25 bp, Homo sapien
cagatgaggagctgagcctgaacct

SEQ ID NO: 981813 - DNA, 25 bp, Homo sapien
catcacgatgggtgtggaccaagat

SEQ ID NO: 981814 - DNA, 25 bp, Homo sapien
tgcctccttcccttgtccatcacga

SEQ ID NO: 981815 - DNA, 25 bp, Homo sapien
aatgaagctcaatcacttctgcctc

SEQ ID NO: 981816 - DNA, 25 bp, Homo sapien
atgaagctcaatcacttctgcctcc

SEQ ID NO: 981817 - DNA, 25 bp, Homo sapien
cctgtctggagcctggtgttttcat

SEQ ID NO: 981818 - DNA, 25 bp, Homo sapien
ttctactgtgctcagtcaggaggtt

SEQ ID NO: 981819 - DNA, 25 bp, Homo sapien
tcatccttcagtgccgctgccccat

SEQ ID NO: 981820 - DNA, 25 bp, Homo sapien
tgctcacagtaggttctactgtgct

SEQ ID NO: 981821 - DNA, 25 bp, Homo sapien
caggggcagaagtgctctgcgggga

SEQ ID NO: 981822 - DNA, 25 bp, Homo sapien
gcaggggcagaagtgctctgcgggg

SEQ ID NO: 981823 - DNA, 25 bp, Homo sapien
gggcagaagtgctctgcggggagcc

SEQ ID NO: 981824 - DNA, 25 bp, Homo sapien
ggggcagaagtgctctgcggggagc

SEQ ID NO: 981825 - DNA, 25 bp, Homo sapien
ctttgtacgtggtgtcaggctttgt

SEQ ID NO: 981826 - DNA, 25 bp, Homo sapien
catgccgagcccctggagctttgta

SEQ ID NO: 981827 - DNA, 25 bp, Homo sapien
acaagagaggcgtccccatgccgag

SEQ ID NO: 981828 - DNA, 25 bp, Homo sapien
gttgctaacaagagaggcgtcccca

SEQ ID NO: 981829 - DNA, 25 bp, Homo sapien
tgtgtatgggtttctcagtggcctc

SEQ ID NO: 981830 - DNA, 25 bp, Homo sapien
ggagcacgttgtctttcccacgcca

SEQ ID NO: 981831 - DNA, 25 bp, Homo sapien
tgcagccgtgaaaataaccagatgt

SEQ ID NO: 981832 - DNA, 25 bp, Homo sapien
ccaaagcgcccggacatttggcaca

SEQ ID NO: 981833 - DNA, 25 bp, Homo sapien
aatgatctgcttccgtctggtggac

SEQ ID NO: 981834 - DNA, 25 bp, Homo sapien
gctctccaaatttctatcctctttg

SEQ ID NO: 981835 - DNA, 25 bp, Homo sapien
tttgtgttctgtcctggcgagaatt

SEQ ID NO: 981836 - DNA, 25 bp, Homo sapien
cactgaaggttaaggcagcaagttc

SEQ ID NO: 981837 - DNA, 25 bp, Homo sapien
cacacgatccgaatttctttggtgg

SEQ ID NO: 981838 - DNA, 25 bp, Homo sapien
gacagtggagcctgtatcttttgga

SEQ ID NO: 981839 - DNA, 25 bp, Homo sapien
tcccacagagcacacgatccgaatt

SEQ ID NO: 981840 - DNA, 25 bp, Homo sapien
acagtggagcctgtatcttttggac

SEQ ID NO: 981841 - DNA, 25 bp, Homo sapien
cacccctcttggttgttggacaggg

SEQ ID NO: 981842 - DNA, 25 bp, Homo sapien
ccaggtgctgcacccctcttggttg

SEQ ID NO: 981843 - DNA, 25 bp, Homo sapien
tccaggtgctgcacccctcttggtt

SEQ ID NO: 981844 - DNA, 25 bp, Homo sapien
ctgcacccctcttggttgttggaca

SEQ ID NO: 981845 - DNA, 25 bp, Homo sapien
gtccccagaagccaaatgcatgaga

SEQ ID NO: 981846 - DNA, 25 bp, Homo sapien
aggaatccgtggtgtcactgcctgt

SEQ ID NO: 981847 - DNA, 25 bp, Homo sapien
catcagtcccatgatgccagcagtc

SEQ ID NO: 981848 - DNA, 25 bp, Homo sapien
agctgggttccctctgcatatgcag

SEQ ID NO: 981849 - DNA, 25 bp, Homo sapien
gaaagatcaacatcgtgtcactgcc

SEQ ID NO: 981850 - DNA, 25 bp, Homo sapien
tgttggactgtagctccatgcacct

SEQ ID NO: 981851 - DNA, 25 bp, Homo sapien
ggagagctggccatagaaagatcaa

SEQ ID NO: 981852 - DNA, 25 bp, Homo sapien
cacttttcggccttgtgaggaaata

SEQ ID NO: 981853 - DNA, 25 bp, Homo sapien
cgtcccttctactctgatcagggtc

SEQ ID NO: 981854 - DNA, 25 bp, Homo sapien
ttaactgccgtcccttctactctga

SEQ ID NO: 981855 - DNA, 25 bp, Homo sapien
taactgccgtcccttctactctgat

SEQ ID NO: 981856 - DNA, 25 bp, Homo sapien
tgccgtcccttctactctgatcagg

SEQ ID NO: 981857 - DNA, 25 bp, Homo sapien
ggttaagaaatcagacagcgtagac

SEQ ID NO: 981858 - DNA, 25 bp, Homo sapien
cagacagcgtagaccccaggtcagt

SEQ ID NO: 981859 - DNA, 25 bp, Homo sapien
gtagaccccaggtcagtccacacat

SEQ ID NO: 981860 - DNA, 25 bp, Homo sapien
caggtcagtccacacatccctaggg

SEQ ID NO: 981861 - DNA, 25 bp, Homo sapien
cctgagtggaggcacatacatagcc

SEQ ID NO: 981862 - DNA, 25 bp, Homo sapien
cctcggaagtgtgaggtggcttatt

SEQ ID NO: 981863 - DNA, 25 bp, Homo sapien
ggccagatagcaagcctctctcagc

SEQ ID NO: 981864 - DNA, 25 bp, Homo sapien
catgacaattggtggacgaggtgcc

SEQ ID NO: 981865 - DNA, 25 bp, Homo sapien
aagccggttcccctcagttctacag

SEQ ID NO: 981866 - DNA, 25 bp, Homo sapien
tctacagtccagagtatcccaagcg

SEQ ID NO: 981867 - DNA, 25 bp, Homo sapien
gtgataagtatgttgttggcccctc

SEQ ID NO: 981868 - DNA, 25 bp, Homo sapien
gctctagctgctggagaacaagccc

SEQ ID NO: 981869 - DNA, 25 bp, Homo sapien
tccaacccttaaggtgaatgctttc

SEQ ID NO: 981870 - DNA, 25 bp, Homo sapien
ggtctgatgaattgtccaaccctta

SEQ ID NO: 981871 - DNA, 25 bp, Homo sapien
gctttctttgctgtaggctgcataa

SEQ ID NO: 981872 - DNA, 25 bp, Homo sapien
ggttatcaaaccaaaaagcactgaa

SEQ ID NO: 981873 - DNA, 25 bp, Homo sapien
ggccaagttacttgctggttagagc

SEQ ID NO: 981874 - DNA, 25 bp, Homo sapien
ttagagcaggcactgggttatggtc

SEQ ID NO: 981875 - DNA, 25 bp, Homo sapien
catacagtgctcagataggccaagt

SEQ ID NO: 981876 - DNA, 25 bp, Homo sapien
gacatggtttctggcagtgcccagg

SEQ ID NO: 981877 - DNA, 25 bp, Homo sapien
tcagcttccttaagctcagaagcac

SEQ ID NO: 981878 - DNA, 25 bp, Homo sapien
cagcccaacgcccttctgggtggtt

SEQ ID NO: 981879 - DNA, 25 bp, Homo sapien
ttccttaagctcagaagcactaggg

SEQ ID NO: 981880 - DNA, 25 bp, Homo sapien
tcagaagcactagggactaacccct

SEQ ID NO: 981881 - DNA, 25 bp, Homo sapien
agcgcctgcccactaccaaaggttt

SEQ ID NO: 981882 - DNA, 25 bp, Homo sapien
taaggagccaccatactctcgtgtc

SEQ ID NO: 981883 - DNA, 25 bp, Homo sapien
accctgcatgtcgtgtggctcttca

SEQ ID NO: 981884 - DNA, 25 bp, Homo sapien
gaccttccctttctagtcaggctgg

SEQ ID NO: 981885 - DNA, 25 bp, Homo sapien
tgagtttgcagccatcgcctgtccc

SEQ ID NO: 981886 - DNA, 25 bp, Homo sapien
gggctgagctgactctggctgttcc

SEQ ID NO: 981887 - DNA, 25 bp, Homo sapien
ttctggttgagtttgcagccatcgc

SEQ ID NO: 981888 - DNA, 25 bp, Homo sapien
agctgactctggctgttccctaggg

SEQ ID NO: 981889 - DNA, 25 bp, Homo sapien
ggcttgtcacctgcttcagggactt

SEQ ID NO: 981890 - DNA, 25 bp, Homo sapien
aacgggtaagtacatcgcccgcgtg

SEQ ID NO: 981891 - DNA, 25 bp, Homo sapien
tcaaggagttgagcctgcacacatt

SEQ ID NO: 981892 - DNA, 25 bp, Homo sapien
tgcacacattacttagaaaaaacct

SEQ ID NO: 981893 - DNA, 25 bp, Homo sapien
agcagcgccgagagcgccagcgcgc

SEQ ID NO: 981894 - DNA, 25 bp, Homo sapien
cagcgccgagagcgccagcgcgcag

SEQ ID NO: 981895 - DNA, 25 bp, Homo sapien
gcagcgccgagagcgccagcgcgca

SEQ ID NO: 981896 - DNA, 25 bp, Homo sapien
cggcggcgttgacaacagtagcagc

SEQ ID NO: 981897 - DNA, 25 bp, Homo sapien
gagtcgcgctgcggcggctcttcct

SEQ ID NO: 981898 - DNA, 25 bp, Homo sapien
ggtgccggcggaggatccgcgcgtc

SEQ ID NO: 981899 - DNA, 25 bp, Homo sapien
gcgtccgggcggtaggagcgtgggc

SEQ ID NO: 981900 - DNA, 25 bp, Homo sapien
gtgtcgtcgcctctgggccgggagc

SEQ ID NO: 981901 - DNA, 25 bp, Homo sapien
gcggccccactggcggctgcggcta

SEQ ID NO: 981902 - DNA, 25 bp, Homo sapien
cggccccactggcggctgcggctac

SEQ ID NO: 981903 - DNA, 25 bp, Homo sapien
tgcggccccactggcggctgcggct

SEQ ID NO: 981904 - DNA, 25 bp, Homo sapien
ctgcggccccactggcggctgcggc

SEQ ID NO: 981905 - DNA, 25 bp, Homo sapien
cgtgagcccctcaagtcggctgcaa

SEQ ID NO: 981906 - DNA, 25 bp, Homo sapien
caagtcggctgcaagcaggcgatgc

SEQ ID NO: 981907 - DNA, 25 bp, Homo sapien
ttttctccaggatctagccgcgtcc

SEQ ID NO: 981908 - DNA, 25 bp, Homo sapien
gggttgctaatctggagtctatctg

SEQ ID NO: 981909 - DNA, 25 bp, Homo sapien
ggttccgtggcagccggcctcaagc

SEQ ID NO: 981910 - DNA, 25 bp, Homo sapien
ctggggttccgtggcagccggcctc

SEQ ID NO: 981911 - DNA, 25 bp, Homo sapien
ccgtggcagccggcctcaagcttgg

SEQ ID NO: 981912 - DNA, 25 bp, Homo sapien
tggcagccggcctcaagcttgggaa

SEQ ID NO: 981913 - DNA, 25 bp, Homo sapien
tgctcttcagcaggcgtttttcttt

SEQ ID NO: 981914 - DNA, 25 bp, Homo sapien
aagagcaggtcatgccctggcgcag

SEQ ID NO: 981915 - DNA, 25 bp, Homo sapien
ttcttttggacgctcttcgccgtgg

SEQ ID NO: 981916 - DNA, 25 bp, Homo sapien
ccgtgggttggaagagcaggtcatg

SEQ ID NO: 981917 - DNA, 25 bp, Homo sapien
ttcacacccttggcagtgcctgact

SEQ ID NO: 981918 - DNA, 25 bp, Homo sapien
cttcacacccttggcagtgcctgac

SEQ ID NO: 981919 - DNA, 25 bp, Homo sapien
gtctcctctccttccttcccttcac

SEQ ID NO: 981920 - DNA, 25 bp, Homo sapien
cgtctcctctccttccttcccttca

SEQ ID NO: 981921 - DNA, 25 bp, Homo sapien
ggactcgaagtcagatgggatttca

SEQ ID NO: 981922 - DNA, 25 bp, Homo sapien
acctgcccaaactccctaattctgg

SEQ ID NO: 981923 - DNA, 25 bp, Homo sapien
gatgggatttcatcccgcacctgcc

SEQ ID NO: 981924 - DNA, 25 bp, Homo sapien
ctgccaccagagaagtggactcgaa

SEQ ID NO: 981925 - DNA, 25 bp, Homo sapien
ctctgaagcattgttcttccccatg

SEQ ID NO: 981926 - DNA, 25 bp, Homo sapien
cagctggggttgtaagatcggcctc

SEQ ID NO: 981927 - DNA, 25 bp, Homo sapien
tagcagtggaggttcccatgacttc

SEQ ID NO: 981928 - DNA, 25 bp, Homo sapien
gacagttgcacactcaaagtgcaca

SEQ ID NO: 981929 - DNA, 25 bp, Homo sapien
acccttctatcatctgatgactgaa

SEQ ID NO: 981930 - DNA, 25 bp, Homo sapien
accacctcttacaggaaggatcaaa

SEQ ID NO: 981931 - DNA, 25 bp, Homo sapien
cagcaaccacctcttacaggaagga

SEQ ID NO: 981932 - DNA, 25 bp, Homo sapien
ccttctatcatctgatgactgaaga

SEQ ID NO: 981933 - DNA, 25 bp, Homo sapien
tccttgtgagcagagaccgggtctg

SEQ ID NO: 981934 - DNA, 25 bp, Homo sapien
tctgggactttggaacggatctgtg

SEQ ID NO: 981935 - DNA, 25 bp, Homo sapien
cataatttatatgctccctgagatc

SEQ ID NO: 981936 - DNA, 25 bp, Homo sapien
tggcttgtccccagaattgagggcc

SEQ ID NO: 981937 - DNA, 25 bp, Homo sapien
ctccactcaaggatagctctgtctt

SEQ ID NO: 981938 - DNA, 25 bp, Homo sapien
ctcgtagaaggaggtgaccacccct

SEQ ID NO: 981939 - DNA, 25 bp, Homo sapien
ttcagacgccgagattggtgcctcc

SEQ ID NO: 981940 - DNA, 25 bp, Homo sapien
ctctgtctttacctcgtagaaggag

SEQ ID NO: 981941 - DNA, 25 bp, Homo sapien
tcttccatcttgctaaatgtattcc

SEQ ID NO: 981942 - DNA, 25 bp, Homo sapien
gaatcttccatcttgctaaatgtat

SEQ ID NO: 981943 - DNA, 25 bp, Homo sapien
atgtaatgaatcttccatcttgcta

SEQ ID NO: 981944 - DNA, 25 bp, Homo sapien
aatgaatcttccatcttgctaaatg

SEQ ID NO: 981945 - DNA, 25 bp, Homo sapien
tagttgagatgaagtgtcaccgtgt

SEQ ID NO: 981946 - DNA, 25 bp, Homo sapien
ttttagttgagatgaagtgtcaccg

SEQ ID NO: 981947 - DNA, 25 bp, Homo sapien
ccgcgcccagctcctttctttcttt

SEQ ID NO: 981948 - DNA, 25 bp, Homo sapien
gttgagatgaagtgtcaccgtgtta

SEQ ID NO: 981949 - DNA, 25 bp, Homo sapien
ggatgattttaaggacttcaatatt

SEQ ID NO: 981950 - DNA, 25 bp, Homo sapien
tgggtacggtaatccacatgttgcc

SEQ ID NO: 981951 - DNA, 25 bp, Homo sapien
caatcagcacattacacaagataag

SEQ ID NO: 981952 - DNA, 25 bp, Homo sapien
tctcgcactcagtcaatcagcacat

SEQ ID NO: 981953 - DNA, 25 bp, Homo sapien
ctttgggcccggcttggacagttgc

SEQ ID NO: 981954 - DNA, 25 bp, Homo sapien
ctccacaggcgccgtggatgggaat

SEQ ID NO: 981955 - DNA, 25 bp, Homo sapien
ccgtggatgggaatggcgactttct

SEQ ID NO: 981956 - DNA, 25 bp, Homo sapien
atggcgactttcttctttgggcccg

SEQ ID NO: 981957 - DNA, 25 bp, Homo sapien
gccccatttaacagtccatagaaga

SEQ ID NO: 981958 - DNA, 25 bp, Homo sapien
aagttttggagagatagtttcctca

SEQ ID NO: 981959 - DNA, 25 bp, Homo sapien
tctccggctggtgtttcccactggc

SEQ ID NO: 981960 - DNA, 25 bp, Homo sapien
agccggcggaacatgtgtcttggtc

SEQ ID NO: 981961 - DNA, 25 bp, Homo sapien
ttcccgcatgggcagctgatgtgga

SEQ ID NO: 981962 - DNA, 25 bp, Homo sapien
ttctggtaccatacaggctctcctt

SEQ ID NO: 981963 - DNA, 25 bp, Homo sapien
tggagagtgaaatgggcaagaccca

SEQ ID NO: 981964 - DNA, 25 bp, Homo sapien
tcaactcaggttcccgcatgggcag

SEQ ID NO: 981965 - DNA, 25 bp, Homo sapien
cttccacctctgctggtttatcctg

SEQ ID NO: 981966 - DNA, 25 bp, Homo sapien
catcctgccaagtcgtcttgtagga

SEQ ID NO: 981967 - DNA, 25 bp, Homo sapien
tgttgggtcttgcatcctgccaagt

SEQ ID NO: 981968 - DNA, 25 bp, Homo sapien
gctggtttatcctgtggagtccagc

SEQ ID NO: 981969 - DNA, 25 bp, Homo sapien
tcagcataggggcttcacggaaagc

SEQ ID NO: 981970 - DNA, 25 bp, Homo sapien
cagctgcggtttgcaaatgtcaggg

SEQ ID NO: 981971 - DNA, 25 bp, Homo sapien
cattttctcaacttgggcccgggag

SEQ ID NO: 981972 - DNA, 25 bp, Homo sapien
gtcagggctcagtgcagatcgggct

SEQ ID NO: 981973 - DNA, 25 bp, Homo sapien
caatgacgtgatcgcaggaatatgc

SEQ ID NO: 981974 - DNA, 25 bp, Homo sapien
atggaacaatgacgtgatcgcagga

SEQ ID NO: 981975 - DNA, 25 bp, Homo sapien
gaacaatgacgtgatcgcaggaata

SEQ ID NO: 981976 - DNA, 25 bp, Homo sapien
acgtgatcgcaggaatatgcccggg

SEQ ID NO: 981977 - DNA, 25 bp, Homo sapien
gacaccatcactgtgtcctgcagct

SEQ ID NO: 981978 - DNA, 25 bp, Homo sapien
cggagacaccatcactgtgtcctgc

SEQ ID NO: 981979 - DNA, 25 bp, Homo sapien
aagcgccacggagacaccatcactg

SEQ ID NO: 981980 - DNA, 25 bp, Homo sapien
gagacaccatcactgtgtcctgcag

SEQ ID NO: 981981 - DNA, 25 bp, Homo sapien
tgaggcacccggagatgaggcttcc

SEQ ID NO: 981982 - DNA, 25 bp, Homo sapien
tgcctggcagatccagatctactgg

SEQ ID NO: 981983 - DNA, 25 bp, Homo sapien
ccagcatggactgcgggagcactgt

SEQ ID NO: 981984 - DNA, 25 bp, Homo sapien
gagcactaatgctggcaaggagcct

SEQ ID NO: 981985 - DNA, 25 bp, Homo sapien
agacatccatccaacagatgctcat

SEQ ID NO: 981986 - DNA, 25 bp, Homo sapien
gagacatccatccaacagatgctca

SEQ ID NO: 981987 - DNA, 25 bp, Homo sapien
tgggtgcttctatcccagcctggtg

SEQ ID NO: 981988 - DNA, 25 bp, Homo sapien
tgctgaatgtagcagtgggcccctt

SEQ ID NO: 981989 - DNA, 25 bp, Homo sapien
caccacgggcttggctttagcacca

SEQ ID NO: 981990 - DNA, 25 bp, Homo sapien
agccctcccgtagaagacagctcag

SEQ ID NO: 981991 - DNA, 25 bp, Homo sapien
tcatttcctgtggctgacaaattcc

SEQ ID NO: 981992 - DNA, 25 bp, Homo sapien
tttcctgtggctgacaaattccaaa

SEQ ID NO: 981993 - DNA, 25 bp, Homo sapien
acaaattccaaaggaggctccagga

SEQ ID NO: 981994 - DNA, 25 bp, Homo sapien
caaattccaaaggaggctccaggac

SEQ ID NO: 981995 - DNA, 25 bp, Homo sapien
cagttcctgccctggggcttcgtgc

SEQ ID NO: 981996 - DNA, 25 bp, Homo sapien
ccagcaggagatgctccagccagag

SEQ ID NO: 981997 - DNA, 25 bp, Homo sapien
agagccagctcagggctccagcatc

SEQ ID NO: 981998 - DNA, 25 bp, Homo sapien
tgccctggggcttcgtgccagcagc

SEQ ID NO: 981999 - DNA, 25 bp, Homo sapien
taatgtgatcgtgaactaccagaag

SEQ ID NO: 982000 - DNA, 25 bp, Homo sapien
gagtacgtgggaaatgcgctccccg

SEQ ID NO: 982001 - DNA, 25 bp, Homo sapien
gatgacgatcgccaaggagtacgtg

SEQ ID NO: 982002 - DNA, 25 bp, Homo sapien
ccagaagggaagatgacgatcgcca

SEQ ID NO: 982003 - DNA, 25 bp, Homo sapien
agcaagaggaagggctgcgaggaag

SEQ ID NO: 982004 - DNA, 25 bp, Homo sapien
aagcaagaggaagggctgcgaggaa

SEQ ID NO: 982005 - DNA, 25 bp, Homo sapien
gcaagaggaagggctgcgaggaagg

SEQ ID NO: 982006 - DNA, 25 bp, Homo sapien
agacccaagagttggggcccatgga

SEQ ID NO: 982007 - DNA, 25 bp, Homo sapien
gtggcaacatcagcatggtccagaa

SEQ ID NO: 982008 - DNA, 25 bp, Homo sapien
agcatggtccagaaggatacatgga

SEQ ID NO: 982009 - DNA, 25 bp, Homo sapien
ggtgtgagtgtgtggcaacatcagc

SEQ ID NO: 982010 - DNA, 25 bp, Homo sapien
ttgtgtcctccaaggtggacaacca

SEQ ID NO: 982011 - DNA, 25 bp, Homo sapien
tggccctcttggtaccaggacttgt

SEQ ID NO: 982012 - DNA, 25 bp, Homo sapien
gttgccattggaatgaacatgtgag

SEQ ID NO: 982013 - DNA, 25 bp, Homo sapien
gccattggaatgaacatgtgagcgc

SEQ ID NO: 982014 - DNA, 25 bp, Homo sapien
atggccacatctgcgtaggtctggg

SEQ ID NO: 982015 - DNA, 25 bp, Homo sapien
gctgactgggataccctgctgtggg

SEQ ID NO: 982016 - DNA, 25 bp, Homo sapien
gtttggggtcctggatgaacctgct

SEQ ID NO: 982017 - DNA, 25 bp, Homo sapien
ggtttggggtcctggatgaacctgc

SEQ ID NO: 982018 - DNA, 25 bp, Homo sapien
tgctgactgggataccctgctgtgg

SEQ ID NO: 982019 - DNA, 25 bp, Homo sapien
agagccgtgagagcaggtaccacca

SEQ ID NO: 982020 - DNA, 25 bp, Homo sapien
gtggaataacacaatggccctttta

SEQ ID NO: 982021 - DNA, 25 bp, Homo sapien
cttaattgactgctgcggagagagc

SEQ ID NO: 982022 - DNA, 25 bp, Homo sapien
agcaccagagccgtgagagcaggta

SEQ ID NO: 982023 - DNA, 25 bp, Homo sapien
acagagccacatgcctgagtgaggg

SEQ ID NO: 982024 - DNA, 25 bp, Homo sapien
agggctcagaagcttagtggccatt

SEQ ID NO: 982025 - DNA, 25 bp, Homo sapien
aggccacagagccacatgcctgagt

SEQ ID NO: 982026 - DNA, 25 bp, Homo sapien
gggctcagaagcttagtggccattt

SEQ ID NO: 982027 - DNA, 25 bp, Homo sapien
aaatgccatgatccaggatggattt

SEQ ID NO: 982028 - DNA, 25 bp, Homo sapien
tttaaatgccatgatccaggatgga

SEQ ID NO: 982029 - DNA, 25 bp, Homo sapien
tatttaaatgccatgatccaggatg

SEQ ID NO: 982030 - DNA, 25 bp, Homo sapien
ttaaatgccatgatccaggatggat

SEQ ID NO: 982031 - DNA, 25 bp, Homo sapien
tcctccagcatatctgttccaactt

SEQ ID NO: 982032 - DNA, 25 bp, Homo sapien
tgcacatagtcctcaaaagcagtga

SEQ ID NO: 982033 - DNA, 25 bp, Homo sapien
ccatggactgcacatagtcctcaaa

SEQ ID NO: 982034 - DNA, 25 bp, Homo sapien
atagtcctcaaaagcagtgatctgc

SEQ ID NO: 982035 - DNA, 25 bp, Homo sapien
tgaagtttcttaattccgtatccca

SEQ ID NO: 982036 - DNA, 25 bp, Homo sapien
tcttaattccgtatcccactggaac

SEQ ID NO: 982037 - DNA, 25 bp, Homo sapien
atcccactggaactagtttagatga

SEQ ID NO: 982038 - DNA, 25 bp, Homo sapien
ccactggaactagtttagatgagcc

SEQ ID NO: 982039 - DNA, 25 bp, Homo sapien
ttctgacacactcctctaatttcgc

SEQ ID NO: 982040 - DNA, 25 bp, Homo sapien
gtgcaagatgttcttcccttagcct

SEQ ID NO: 982041 - DNA, 25 bp, Homo sapien
gcttctgacacactcctctaatttc

SEQ ID NO: 982042 - DNA, 25 bp, Homo sapien
gaatgcttctgacacactcctctaa

SEQ ID NO: 982043 - DNA, 25 bp, Homo sapien
tcctcataatcggatccaaagagat

SEQ ID NO: 982044 - DNA, 25 bp, Homo sapien
tcataatcggatccaaagagatcaa

SEQ ID NO: 982045 - DNA, 25 bp, Homo sapien
actttcctcctcataatcggatcca

SEQ ID NO: 982046 - DNA, 25 bp, Homo sapien
cataatcggatccaaagagatcaat

SEQ ID NO: 982047 - DNA, 25 bp, Homo sapien
gccggacacggcttcaaatactgcc

SEQ ID NO: 982048 - DNA, 25 bp, Homo sapien
tcggcaggtggtgggccggacacgg

SEQ ID NO: 982049 - DNA, 25 bp, Homo sapien
agggcatgacacaagtcggcaggtg

SEQ ID NO: 982050 - DNA, 25 bp, Homo sapien
gtggtgggccggacacggcttcaaa

SEQ ID NO: 982051 - DNA, 25 bp, Homo sapien
cccttgatgtagctcttgtccgcca

SEQ ID NO: 982052 - DNA, 25 bp, Homo sapien
cttgatgtagctcttgtccgccagg

SEQ ID NO: 982053 - DNA, 25 bp, Homo sapien
tgtccgccaggtaatcgttgagcac

SEQ ID NO: 982054 - DNA, 25 bp, Homo sapien
cttgtccgccaggtaatcgttgagc

SEQ ID NO: 982055 - DNA, 25 bp, Homo sapien
ctggaggccggtggggcttttcagg

SEQ ID NO: 982056 - DNA, 25 bp, Homo sapien
cggctgtatccgagagctggggagc

SEQ ID NO: 982057 - DNA, 25 bp, Homo sapien
gtgtcggctgtatccgagagctggg

SEQ ID NO: 982058 - DNA, 25 bp, Homo sapien
ggtgtcggctgtatccgagagctgg

SEQ ID NO: 982059 - DNA, 25 bp, Homo sapien
tgtatccgagagctggggagcagca

SEQ ID NO: 982060 - DNA, 25 bp, Homo sapien
attccagttggcctttgagttgcta

SEQ ID NO: 982061 - DNA, 25 bp, Homo sapien
tttgagttgctacttgttatcctgg

SEQ ID NO: 982062 - DNA, 25 bp, Homo sapien
atcactggattccagttggcctttg

SEQ ID NO: 982063 - DNA, 25 bp, Homo sapien
ttgttatcctgggtctcaggcaaga

SEQ ID NO: 982064 - DNA, 25 bp, Homo sapien
gctaagtcaaccaacttctgggcca

SEQ ID NO: 982065 - DNA, 25 bp, Homo sapien
cagttcgcagaaagacacagacaga

SEQ ID NO: 982066 - DNA, 25 bp, Homo sapien
tggcacctgggtagatcagttcgca

SEQ ID NO: 982067 - DNA, 25 bp, Homo sapien
tcttgcttggctggcgtaggtcttg

SEQ ID NO: 982068 - DNA, 25 bp, Homo sapien
ggtcctgtcgtacaggcagtaggtt

SEQ ID NO: 982069 - DNA, 25 bp, Homo sapien
tccaagcctaaattagccttgctct

SEQ ID NO: 982070 - DNA, 25 bp, Homo sapien
gtggctctgggtcacgttccaagcc

SEQ ID NO: 982071 - DNA, 25 bp, Homo sapien
acaggtcctgtcgtacaggcagtag

SEQ ID NO: 982072 - DNA, 25 bp, Homo sapien
tggggtctggctcctatgtggcaag

SEQ ID NO: 982073 - DNA, 25 bp, Homo sapien
ggtctggctcctatgtggcaagggt

SEQ ID NO: 982074 - DNA, 25 bp, Homo sapien
tggctcctatgtggcaagggtgggt

SEQ ID NO: 982075 - DNA, 25 bp, Homo sapien
tctggctcctatgtggcaagggtgg

SEQ ID NO: 982076 - DNA, 25 bp, Homo sapien
tgccggggtgctgggctgtctggct

SEQ ID NO: 982077 - DNA, 25 bp, Homo sapien
gccggggtgctgggctgtctggctt

SEQ ID NO: 982078 - DNA, 25 bp, Homo sapien
aagagagttgtctggggacaccagc

SEQ ID NO: 982079 - DNA, 25 bp, Homo sapien
tcagtgccagttgtaaagagagttg

SEQ ID NO: 982080 - DNA, 25 bp, Homo sapien
gaggaaacccactggttccatatga

SEQ ID NO: 982081 - DNA, 25 bp, Homo sapien
ggaggaaacccactggttccatatg

SEQ ID NO: 982082 - DNA, 25 bp, Homo sapien
actggtttcataagtttcagctcct

SEQ ID NO: 982083 - DNA, 25 bp, Homo sapien
tccctgtgccgacttactgagcctt

SEQ ID NO: 982084 - DNA, 25 bp, Homo sapien
tttgaatgaacggtataaaggtatc

SEQ ID NO: 982085 - DNA, 25 bp, Homo sapien
catgtgtggtgtttcataacttcct

SEQ ID NO: 982086 - DNA, 25 bp, Homo sapien
tatatggagatttgacatgtgtggt

SEQ ID NO: 982087 - DNA, 25 bp, Homo sapien
catctaagtgttgccactcagatgg

SEQ ID NO: 982088 - DNA, 25 bp, Homo sapien
gtttcatctaagtgttgccactcag

SEQ ID NO: 982089 - DNA, 25 bp, Homo sapien
tttcatctaagtgttgccactcaga

SEQ ID NO: 982090 - DNA, 25 bp, Homo sapien
tctaagtgttgccactcagatgggt

SEQ ID NO: 982091 - DNA, 25 bp, Homo sapien
gcagggcaccagttacgcagaagga

SEQ ID NO: 982092 - DNA, 25 bp, Homo sapien
gttacgcagaaggagctggacgcta

SEQ ID NO: 982093 - DNA, 25 bp, Homo sapien
agcatcaggggcagggcaccagtta

SEQ ID NO: 982094 - DNA, 25 bp, Homo sapien
caccagttacgcagaaggagctgga

SEQ ID NO: 982095 - DNA, 25 bp, Homo sapien
tccatttgggttatgcaggatgcac

SEQ ID NO: 982096 - DNA, 25 bp, Homo sapien
attccatttgggttatgcaggatgc

SEQ ID NO: 982097 - DNA, 25 bp, Homo sapien
aacagagattgaagaggctctggaa

SEQ ID NO: 982098 - DNA, 25 bp, Homo sapien
ttccatttgggttatgcaggatgca

SEQ ID NO: 982099 - DNA, 25 bp, Homo sapien
tctcagacctctgcttatctctact

SEQ ID NO: 982100 - DNA, 25 bp, Homo sapien
cagacctctgcttatctctacttaa

SEQ ID NO: 982101 - DNA, 25 bp, Homo sapien
ctcagacctctgcttatctctactt

SEQ ID NO: 982102 - DNA, 25 bp, Homo sapien
tcagacctctgcttatctctactta

SEQ ID NO: 982103 - DNA, 25 bp, Homo sapien
ctgcctttcagggtcgtctggaaga

SEQ ID NO: 982104 - DNA, 25 bp, Homo sapien
tttcagggtcgtctggaagagctgt

SEQ ID NO: 982105 - DNA, 25 bp, Homo sapien
tgtgatgttcagtgaacatgaacgt

SEQ ID NO: 982106 - DNA, 25 bp, Homo sapien
gatgttcagtgaacatgaacgtgct

SEQ ID NO: 982107 - DNA, 25 bp, Homo sapien
cttcaggctggcttgcgagctccca

SEQ ID NO: 982108 - DNA, 25 bp, Homo sapien
tcttcaggctggcttgcgagctccc

SEQ ID NO: 982109 - DNA, 25 bp, Homo sapien
aggctggcttgcgagctcccatctc

SEQ ID NO: 982110 - DNA, 25 bp, Homo sapien
ctggcttgcgagctcccatctctca

SEQ ID NO: 982111 - DNA, 25 bp, Homo sapien
tcttgaccttgcatggaccagaggg

SEQ ID NO: 982112 - DNA, 25 bp, Homo sapien
caaactgggagttattctggccgca

SEQ ID NO: 982113 - DNA, 25 bp, Homo sapien
ttaatgacttgtgccgcgtgtgcgc

SEQ ID NO: 982114 - DNA, 25 bp, Homo sapien
tgtcttgtcatcagcccgcggtgtt

SEQ ID NO: 982115 - DNA, 25 bp, Homo sapien
ctgagaagtactccatgctgcagaa

SEQ ID NO: 982116 - DNA, 25 bp, Homo sapien
gaagtactccatgctgcagaagatc

SEQ ID NO: 982117 - DNA, 25 bp, Homo sapien
gagaagtactccatgctgcagaaga

SEQ ID NO: 982118 - DNA, 25 bp, Homo sapien
tgagaagtactccatgctgcagaag

SEQ ID NO: 982119 - DNA, 25 bp, Homo sapien
tgtcaatatgtattacgtctctaga

SEQ ID NO: 982120 - DNA, 25 bp, Homo sapien
tcaatatgtattacgtctctagaaa

SEQ ID NO: 982121 - DNA, 25 bp, Homo sapien
ttgtcaatatgtattacgtctctag

SEQ ID NO: 982122 - DNA, 25 bp, Homo sapien
gtcaatatgtattacgtctctagaa

SEQ ID NO: 982123 - DNA, 25 bp, Homo sapien
tcactccacaattatttggcctgtc

SEQ ID NO: 982124 - DNA, 25 bp, Homo sapien
ttgtgatttttctggatctttgagg

SEQ ID NO: 982125 - DNA, 25 bp, Homo sapien
ctttgaggtggacgtcacatttggg

SEQ ID NO: 982126 - DNA, 25 bp, Homo sapien
tctggatctttgaggtggacgtcac

SEQ ID NO: 982127 - DNA, 25 bp, Homo sapien
gtgatttcaaattcaccaatgtgac

SEQ ID NO: 982128 - DNA, 25 bp, Homo sapien
caccaatgtgaccatgcttcaccat

SEQ ID NO: 982129 - DNA, 25 bp, Homo sapien
gtgataatcagtgatttcaaattca

SEQ ID NO: 982130 - DNA, 25 bp, Homo sapien
attcaccaatgtgaccatgcttcac

SEQ ID NO: 982131 - DNA, 25 bp, Homo sapien
ctttggagcatggcctaataagaac

SEQ ID NO: 982132 - DNA, 25 bp, Homo sapien
cacagttagaaaccggacagtgact

SEQ ID NO: 982133 - DNA, 25 bp, Homo sapien
cagttagaaaccggacagtgacttt

SEQ ID NO: 982134 - DNA, 25 bp, Homo sapien
cagtgactttggagcatggcctaat

SEQ ID NO: 982135 - DNA, 25 bp, Homo sapien
catttgcttcatcagcattgttgat

SEQ ID NO: 982136 - DNA, 25 bp, Homo sapien
gccatttgcttcatcagcattgttg

SEQ ID NO: 982137 - DNA, 25 bp, Homo sapien
agcatcaacgaggacatttatgcac

SEQ ID NO: 982138 - DNA, 25 bp, Homo sapien
ctgccatttgcttcatcagcattgt

SEQ ID NO: 982139 - DNA, 25 bp, Homo sapien
ggtgttgactgcacactctccttgg

SEQ ID NO: 982140 - DNA, 25 bp, Homo sapien
tctttatgggatggtgttgactgca

SEQ ID NO: 982141 - DNA, 25 bp, Homo sapien
tgactgcacactctccttgggcaat

SEQ ID NO: 982142 - DNA, 25 bp, Homo sapien
ctttatgggatggtgttgactgcac

SEQ ID NO: 982143 - DNA, 25 bp, Homo sapien
ttgaagctgcttcttgggggctgga

SEQ ID NO: 982144 - DNA, 25 bp, Homo sapien
cttttgaaggtggcagcctacacat

SEQ ID NO: 982145 - DNA, 25 bp, Homo sapien
cttgaagctgcttcttgggggctgg

SEQ ID NO: 982146 - DNA, 25 bp, Homo sapien
gccaggagccacagcttttgaaggt

SEQ ID NO: 982147 - DNA, 25 bp, Homo sapien
gctgttgactttcccgttaccagtg

SEQ ID NO: 982148 - DNA, 25 bp, Homo sapien
tgactttcccgttaccagtgaaagc

SEQ ID NO: 982149 - DNA, 25 bp, Homo sapien
ggccagaggctgttgactttcccgt

SEQ ID NO: 982150 - DNA, 25 bp, Homo sapien
ttcccgttaccagtgaaagctagca

SEQ ID NO: 982151 - DNA, 25 bp, Homo sapien
ccagcataggatatagccttaccca

SEQ ID NO: 982152 - DNA, 25 bp, Homo sapien
gcaggtaggtaagggcttctcttca

SEQ ID NO: 982153 - DNA, 25 bp, Homo sapien
ttcccatcgattggcaggaaagcag

SEQ ID NO: 982154 - DNA, 25 bp, Homo sapien
gcaaagtcacacgaggacgcaggta

SEQ ID NO: 982155 - DNA, 25 bp, Homo sapien
agatgttgcacccattcgtatcctc

SEQ ID NO: 982156 - DNA, 25 bp, Homo sapien
gatagcctgacagcatctctagggc

SEQ ID NO: 982157 - DNA, 25 bp, Homo sapien
ttaatgctgaatctccatccagagg

SEQ ID NO: 982158 - DNA, 25 bp, Homo sapien
tagattcagcgtttggatgcttgac

SEQ ID NO: 982159 - DNA, 25 bp, Homo sapien
cttgcatccgttcagggctccactc

SEQ ID NO: 982160 - DNA, 25 bp, Homo sapien
atcttgcatccgttcagggctccac

SEQ ID NO: 982161 - DNA, 25 bp, Homo sapien
aatcttgcatccgttcagggctcca

SEQ ID NO: 982162 - DNA, 25 bp, Homo sapien
tcaatcttgcatccgttcagggctc

SEQ ID NO: 982163 - DNA, 25 bp, Homo sapien
tctctacaaaaggttctgttggagc

SEQ ID NO: 982164 - DNA, 25 bp, Homo sapien
ttgactttgattctgggaagcttct

SEQ ID NO: 982165 - DNA, 25 bp, Homo sapien
tctgttggagccccttcacttgact

SEQ ID NO: 982166 - DNA, 25 bp, Homo sapien
gttctgttggagccccttcacttga

SEQ ID NO: 982167 - DNA, 25 bp, Homo sapien
ctgtccactagcttcaccgacggcc

SEQ ID NO: 982168 - DNA, 25 bp, Homo sapien
accccaaagatttacaagcatagac

SEQ ID NO: 982169 - DNA, 25 bp, Homo sapien
caagcatagactttagtcccttggt

SEQ ID NO: 982170 - DNA, 25 bp, Homo sapien
atgtccagcctgtccactagcttca

SEQ ID NO: 982171 - DNA, 25 bp, Homo sapien
gggagccagtaggagggtcatggtg

SEQ ID NO: 982172 - DNA, 25 bp, Homo sapien
agggtcatggtgactaaggtaactg

SEQ ID NO: 982173 - DNA, 25 bp, Homo sapien
gagggtcatggtgactaaggtaact

SEQ ID NO: 982174 - DNA, 25 bp, Homo sapien
ccagtaggagggtcatggtgactaa

SEQ ID NO: 982175 - DNA, 25 bp, Homo sapien
tgcatttgaatcacaagcaggataa

SEQ ID NO: 982176 - DNA, 25 bp, Homo sapien
gcctgcacatgaactgggcggcagt

SEQ ID NO: 982177 - DNA, 25 bp, Homo sapien
ctgcacatgaactgggcggcagtga

SEQ ID NO: 982178 - DNA, 25 bp, Homo sapien
attcctgtagccctgaggtgcctgg

SEQ ID NO: 982179 - DNA, 25 bp, Homo sapien
acaatttgaagcttccctgggtcag

SEQ ID NO: 982180 - DNA, 25 bp, Homo sapien
tccctgggtcagagactgatgtgat

SEQ ID NO: 982181 - DNA, 25 bp, Homo sapien
gactgatgtgattttcaatgggctg

SEQ ID NO: 982182 - DNA, 25 bp, Homo sapien
aatgggctgacatcaaagcagctcc

SEQ ID NO: 982183 - DNA, 25 bp, Homo sapien
ctgagcataacgggatgtcaggtcc

SEQ ID NO: 982184 - DNA, 25 bp, Homo sapien
tgagcataacgggatgtcaggtccc

SEQ ID NO: 982185 - DNA, 25 bp, Homo sapien
ggttattaacagcttctccaggaga

SEQ ID NO: 982186 - DNA, 25 bp, Homo sapien
agtttacttcggctggtggatcact

SEQ ID NO: 982187 - DNA, 25 bp, Homo sapien
ggacccacgtgataggttattaaca

SEQ ID NO: 982188 - DNA, 25 bp, Homo sapien
tccaggagacacagtttttagcagc

SEQ ID NO: 982189 - DNA, 25 bp, Homo sapien
tttctgctgggcaattactgtgtcc

SEQ ID NO: 982190 - DNA, 25 bp, Homo sapien
tcatttagtgcctttgccccggcgc

SEQ ID NO: 982191 - DNA, 25 bp, Homo sapien
tccctaatatctgcacccgtgtttt

SEQ ID NO: 982192 - DNA, 25 bp, Homo sapien
ttaaatctccggctctgtttggaaa

SEQ ID NO: 982193 - DNA, 25 bp, Homo sapien
taggatccttctgggatgtacattg

SEQ ID NO: 982194 - DNA, 25 bp, Homo sapien
gaagccaggtagacccatgggagta

SEQ ID NO: 982195 - DNA, 25 bp, Homo sapien
gcctagctttcaccaagacccatgt

SEQ ID NO: 982196 - DNA, 25 bp, Homo sapien
gatgtacattggaccagggaagatt

SEQ ID NO: 982197 - DNA, 25 bp, Homo sapien
tatgttagtacaacacagtcaattt

SEQ ID NO: 982198 - DNA, 25 bp, Homo sapien
cagttaatcagagaatatgttagta

SEQ ID NO: 982199 - DNA, 25 bp, Homo sapien
tggatacccagatgcagtagccctg

SEQ ID NO: 982200 - DNA, 25 bp, Homo sapien
gtagccctgcgtggacccagaggga

SEQ ID NO: 982201 - DNA, 25 bp, Homo sapien
agagaaagaaataggagccctgtgg

SEQ ID NO: 982202 - DNA, 25 bp, Homo sapien
aagaaataggagccctgtggctgac

SEQ ID NO: 982203 - DNA, 25 bp, Homo sapien
gaaagaaataggagccctgtggctg

SEQ ID NO: 982204 - DNA, 25 bp, Homo sapien
gagaaagaaataggagccctgtggc

SEQ ID NO: 982205 - DNA, 25 bp, Homo sapien
ggtgtctgtatgtctgatgcaggat

SEQ ID NO: 982206 - DNA, 25 bp, Homo sapien
atattggtatggacaggcgatgaga

SEQ ID NO: 982207 - DNA, 25 bp, Homo sapien
ctcgtctgtgcaaggtgatcctcgc

SEQ ID NO: 982208 - DNA, 25 bp, Homo sapien
cctcgctagtgcagcagtcagtatg

SEQ ID NO: 982209 - DNA, 25 bp, Homo sapien
ttcagtcctggcgtgatgctggaga

SEQ ID NO: 982210 - DNA, 25 bp, Homo sapien
cagtggttcagtcctggcgtgatgc

SEQ ID NO: 982211 - DNA, 25 bp, Homo sapien
tgcccatttctcgttctaaggttgg

SEQ ID NO: 982212 - DNA, 25 bp, Homo sapien
gtgagattggcttgcccatttctcg

SEQ ID NO: 982213 - DNA, 25 bp, Homo sapien
aagggctgcctgaatgcgagtatgt

SEQ ID NO: 982214 - DNA, 25 bp, Homo sapien
aatgcgagtatgtacgtgcttgcac

SEQ ID NO: 982215 - DNA, 25 bp, Homo sapien
tatgtacgtgcttgcacatgattgt

SEQ ID NO: 982216 - DNA, 25 bp, Homo sapien
cagtctgatgatggaagggctgcct

SEQ ID NO: 982217 - DNA, 25 bp, Homo sapien
tgttgttggctctggtagttgtagc

SEQ ID NO: 982218 - DNA, 25 bp, Homo sapien
gctctggtagttgtagctctcctct

SEQ ID NO: 982219 - DNA, 25 bp, Homo sapien
tctggtagttgtagctctcctctcc

SEQ ID NO: 982220 - DNA, 25 bp, Homo sapien
ttggctctggtagttgtagctctcc

SEQ ID NO: 982221 - DNA, 25 bp, Homo sapien
gagcaagtgtatgttctgtaacgta

SEQ ID NO: 982222 - DNA, 25 bp, Homo sapien
gtaacgtatttcactagcaagcatg

SEQ ID NO: 982223 - DNA, 25 bp, Homo sapien
tttttattagagcaagtgtatgttc

SEQ ID NO: 982224 - DNA, 25 bp, Homo sapien
caagcatgaaagaggaggtctctct

SEQ ID NO: 982225 - DNA, 25 bp, Homo sapien
aatatgccaccacagtgggggcaaa

SEQ ID NO: 982226 - DNA, 25 bp, Homo sapien
atatgccaccacagtgggggcaaat

SEQ ID NO: 982227 - DNA, 25 bp, Homo sapien
tgccaccacagtgggggcaaatcac

SEQ ID NO: 982228 - DNA, 25 bp, Homo sapien
atgccaccacagtgggggcaaatca

SEQ ID NO: 982229 - DNA, 25 bp, Homo sapien
cagcagccggatggccttcatcata

SEQ ID NO: 982230 - DNA, 25 bp, Homo sapien
gaccttgtagcactcgtgtgtcaca

SEQ ID NO: 982231 - DNA, 25 bp, Homo sapien
cgttcgtatgttcttcagaccgggc

SEQ ID NO: 982232 - DNA, 25 bp, Homo sapien
cacataggaggtacccctaggagag

SEQ ID NO: 982233 - DNA, 25 bp, Homo sapien
caaacaagcaaagtatcggtatttg

SEQ ID NO: 982234 - DNA, 25 bp, Homo sapien
acaagcaaagtatcggtatttgtcc

SEQ ID NO: 982235 - DNA, 25 bp, Homo sapien
aacaagcaaagtatcggtatttgtc

SEQ ID NO: 982236 - DNA, 25 bp, Homo sapien
aaacaagcaaagtatcggtatttgt

SEQ ID NO: 982237 - DNA, 25 bp, Homo sapien
caggcagccggcgtggagaacgcca

SEQ ID NO: 982238 - DNA, 25 bp, Homo sapien
ggtggcacagcacccacttttaaag

SEQ ID NO: 982239 - DNA, 25 bp, Homo sapien
tgtggatgcaacacaactcgaggtg

SEQ ID NO: 982240 - DNA, 25 bp, Homo sapien
ttaaagcctcaacaccttctgctga

SEQ ID NO: 982241 - DNA, 25 bp, Homo sapien
gccattcgtgatgcatttaaagatt

SEQ ID NO: 982242 - DNA, 25 bp, Homo sapien
ctgggcctttgatgcaacttaatgg

SEQ ID NO: 982243 - DNA, 25 bp, Homo sapien
ggcctttgatgcaacttaatggagt

SEQ ID NO: 982244 - DNA, 25 bp, Homo sapien
tcctcactgttgtagttaaagccat

SEQ ID NO: 982245 - DNA, 25 bp, Homo sapien
taagacactgatcctggaccaggct

SEQ ID NO: 982246 - DNA, 25 bp, Homo sapien
tggcaacaaagcatcggccaggtgt

SEQ ID NO: 982247 - DNA, 25 bp, Homo sapien
agtccttgtcagtgagtggcaacaa

SEQ ID NO: 982248 - DNA, 25 bp, Homo sapien
ggaacactcagagactcctccagag

SEQ ID NO: 982249 - DNA, 25 bp, Homo sapien
ccgtgtggaaatatccagcactctc

SEQ ID NO: 982250 - DNA, 25 bp, Homo sapien
tctgagaccggggaccacaggtggc

SEQ ID NO: 982251 - DNA, 25 bp, Homo sapien
ctaatgagcagaaggaacaggcctg

SEQ ID NO: 982252 - DNA, 25 bp, Homo sapien
cttgctcttgccgtgtggaaatatc

SEQ ID NO: 982253 - DNA, 25 bp, Homo sapien
aaagtacttttgcatctacagtttc

SEQ ID NO: 982254 - DNA, 25 bp, Homo sapien
gcatctacagtttcaatatcatata

SEQ ID NO: 982255 - DNA, 25 bp, Homo sapien
tttgcatctacagtttcaatatcat

SEQ ID NO: 982256 - DNA, 25 bp, Homo sapien
cttttgcatctacagtttcaatatc

SEQ ID NO: 982257 - DNA, 25 bp, Homo sapien
tgtggccgatgactcttcttcttgg

SEQ ID NO: 982258 - DNA, 25 bp, Homo sapien
cttggcccttttatctctaaataag

SEQ ID NO: 982259 - DNA, 25 bp, Homo sapien
tagggccctgatagccgaaagtccc

SEQ ID NO: 982260 - DNA, 25 bp, Homo sapien
gctgcccttgtttggcattagggcc

SEQ ID NO: 982261 - DNA, 25 bp, Homo sapien
tacttggagccagcgtcatctccag

SEQ ID NO: 982262 - DNA, 25 bp, Homo sapien
gagccaggaagaacagagcgcttct

SEQ ID NO: 982263 - DNA, 25 bp, Homo sapien
gccttgcctgggaacctgatcctca

SEQ ID NO: 982264 - DNA, 25 bp, Homo sapien
gctgtctatagttaagagccaggaa

SEQ ID NO: 982265 - DNA, 25 bp, Homo sapien
tacgtagtccaaggaaactctggcc

SEQ ID NO: 982266 - DNA, 25 bp, Homo sapien
tgatgatgctggtctgataggctgc

SEQ ID NO: 982267 - DNA, 25 bp, Homo sapien
tctggcccaccagacagaagtcctg

SEQ ID NO: 982268 - DNA, 25 bp, Homo sapien
tctttgggtagttcctgagtgcccc

SEQ ID NO: 982269 - DNA, 25 bp, Homo sapien
gaaagacaaatccattcgtcttccc

SEQ ID NO: 982270 - DNA, 25 bp, Homo sapien
gctctgggtaatgatatttaacgga

SEQ ID NO: 982271 - DNA, 25 bp, Homo sapien
ggctctgggtaatgatatttaacgg

SEQ ID NO: 982272 - DNA, 25 bp, Homo sapien
gacaaatccattcgtcttcccggca

SEQ ID NO: 982273 - DNA, 25 bp, Homo sapien
tcacacaggcctaatggtgatggct

SEQ ID NO: 982274 - DNA, 25 bp, Homo sapien
caggcctaatggtgatggctgacta

SEQ ID NO: 982275 - DNA, 25 bp, Homo sapien
tttcacacaggcctaatggtgatgg

SEQ ID NO: 982276 - DNA, 25 bp, Homo sapien
cacaggcctaatggtgatggctgac

SEQ ID NO: 982277 - DNA, 25 bp, Homo sapien
cataatgaactcttcacataccgat

SEQ ID NO: 982278 - DNA, 25 bp, Homo sapien
tgtgttctcatagcgttaaccataa

SEQ ID NO: 982279 - DNA, 25 bp, Homo sapien
gacataaacaccttctaatccacta

SEQ ID NO: 982280 - DNA, 25 bp, Homo sapien
taccgatgtcagtttaatatgctgc

SEQ ID NO: 982281 - DNA, 25 bp, Homo sapien
tgccatcaggggacattggctacag

SEQ ID NO: 982282 - DNA, 25 bp, Homo sapien
tgtgctactggcattggcttcttcc

SEQ ID NO: 982283 - DNA, 25 bp, Homo sapien
tactggcattggcttcttccatggc

SEQ ID NO: 982284 - DNA, 25 bp, Homo sapien
ttgtctgtgctactggcattggctt

SEQ ID NO: 982285 - DNA, 25 bp, Homo sapien
cctgatttgcttggtggtctaaagt

SEQ ID NO: 982286 - DNA, 25 bp, Homo sapien
tcatacgaccaaatctgtgagctgc

SEQ ID NO: 982287 - DNA, 25 bp, Homo sapien
tcttgctggtgaccaacccaatttt

SEQ ID NO: 982288 - DNA, 25 bp, Homo sapien
atttttccctagtcacaatccctga

SEQ ID NO: 982289 - DNA, 25 bp, Homo sapien
gatgcagccttgttggttaccctca

SEQ ID NO: 982290 - DNA, 25 bp, Homo sapien
tctgtccgagatgcatggccatggt

SEQ ID NO: 982291 - DNA, 25 bp, Homo sapien
gccatggtgatccagaatgtcgcag

SEQ ID NO: 982292 - DNA, 25 bp, Homo sapien
tttcaggagtctgttagatgcagcc

SEQ ID NO: 982293 - DNA, 25 bp, Homo sapien
gaaagcacagaggaagattgccgtt

SEQ ID NO: 982294 - DNA, 25 bp, Homo sapien
cacagaggaagattgccgttcacac

SEQ ID NO: 982295 - DNA, 25 bp, Homo sapien
agcacagaggaagattgccgttcac

SEQ ID NO: 982296 - DNA, 25 bp, Homo sapien
aaagcacagaggaagattgccgttc

SEQ ID NO: 982297 - DNA, 25 bp, Homo sapien
cccatagcttttcggggaattccag

SEQ ID NO: 982298 - DNA, 25 bp, Homo sapien
ccaagtcagcgtggcttcccgtctg

SEQ ID NO: 982299 - DNA, 25 bp, Homo sapien
gaatctggcaaacctcgctccaagt

SEQ ID NO: 982300 - DNA, 25 bp, Homo sapien
gaaggtgtgattggaatctggcaaa

SEQ ID NO: 982301 - DNA, 25 bp, Homo sapien
ggtggttgtggcttaacaatggaag

SEQ ID NO: 982302 - DNA, 25 bp, Homo sapien
ctcgggtgcataaagtcctccggga

SEQ ID NO: 982303 - DNA, 25 bp, Homo sapien
cgggcactcgggtgcataaagtcct

SEQ ID NO: 982304 - DNA, 25 bp, Homo sapien
agcaggtgaaacttccgggcactcg

SEQ ID NO: 982305 - DNA, 25 bp, Homo sapien
gtgccagtctgagctgcgttcaaat

SEQ ID NO: 982306 - DNA, 25 bp, Homo sapien
gttccctttgtgtcttcaagcggtg

SEQ ID NO: 982307 - DNA, 25 bp, Homo sapien
tctgagctgcgttcaaatgaaggat

SEQ ID NO: 982308 - DNA, 25 bp, Homo sapien
ttgtgtcttcaagcggtgataaggt

SEQ ID NO: 982309 - DNA, 25 bp, Homo sapien
ttctgaaccccaatgccgtgcaaag

SEQ ID NO: 982310 - DNA, 25 bp, Homo sapien
gctggtggtagcttttcaggatcct

SEQ ID NO: 982311 - DNA, 25 bp, Homo sapien
tattcgggtcacatctggtagcctc

SEQ ID NO: 982312 - DNA, 25 bp, Homo sapien
gcctcagctgcaattgacttttggc

SEQ ID NO: 982313 - DNA, 25 bp, Homo sapien
tcttgagatctcaccatcccacaag

SEQ ID NO: 982314 - DNA, 25 bp, Homo sapien
ttgagatctcaccatcccacaagat

SEQ ID NO: 982315 - DNA, 25 bp, Homo sapien
gtttcttgagatctcaccatcccac

SEQ ID NO: 982316 - DNA, 25 bp, Homo sapien
gagatctcaccatcccacaagataa

SEQ ID NO: 982317 - DNA, 25 bp, Homo sapien
tctaaatatttaactggcagatcaa

SEQ ID NO: 982318 - DNA, 25 bp, Homo sapien
taaggcggatgagcatgtctaaata

SEQ ID NO: 982319 - DNA, 25 bp, Homo sapien
tgtctaaatatttaactggcagatc

SEQ ID NO: 982320 - DNA, 25 bp, Homo sapien
aagtcaagcagtgttttacaactaa

SEQ ID NO: 982321 - DNA, 25 bp, Homo sapien
catcagagtaatgaacgtcactgct

SEQ ID NO: 982322 - DNA, 25 bp, Homo sapien
ggtgaacatcagagtaatgaacgtc

SEQ ID NO: 982323 - DNA, 25 bp, Homo sapien
gcctggtgaacatcagagtaatgaa

SEQ ID NO: 982324 - DNA, 25 bp, Homo sapien
gtaatgaacgtcactgctgtgctgc

SEQ ID NO: 982325 - DNA, 25 bp, Homo sapien
taagcacttttagcttccaggcctg

SEQ ID NO: 982326 - DNA, 25 bp, Homo sapien
atgtaagcacttttagcttccaggc

SEQ ID NO: 982327 - DNA, 25 bp, Homo sapien
attccttccccatgtaagcactttt

SEQ ID NO: 982328 - DNA, 25 bp, Homo sapien
gcacttttagcttccaggcctgaat

SEQ ID NO: 982329 - DNA, 25 bp, Homo sapien
ctgcgtgactaatttgccagcaggg

SEQ ID NO: 982330 - DNA, 25 bp, Homo sapien
gttcagcatcatctgcggctcctgt

SEQ ID NO: 982331 - DNA, 25 bp, Homo sapien
tgccagcagggcctaattgaagttc

SEQ ID NO: 982332 - DNA, 25 bp, Homo sapien
catctgcggctcctgtaaagtcttt

SEQ ID NO: 982333 - DNA, 25 bp, Homo sapien
tagccgccaaccagaagggagcaga

SEQ ID NO: 982334 - DNA, 25 bp, Homo sapien
catgttctgcgggagtagccgccaa

SEQ ID NO: 982335 - DNA, 25 bp, Homo sapien
gatgggtttctgacagaattgcttg

SEQ ID NO: 982336 - DNA, 25 bp, Homo sapien
gaagctcagtgtgcgaaagggatgg

SEQ ID NO: 982337 - DNA, 25 bp, Homo sapien
tgttctggaacagagtagatcctct

SEQ ID NO: 982338 - DNA, 25 bp, Homo sapien
tctctctgggtcttcgggagccact

SEQ ID NO: 982339 - DNA, 25 bp, Homo sapien
taggagtccaaatggaagacggccc

SEQ ID NO: 982340 - DNA, 25 bp, Homo sapien
cacaccttataggaaggaaagctct

SEQ ID NO: 982341 - DNA, 25 bp, Homo sapien
caggaatgtccaagaggtggctacc

SEQ ID NO: 982342 - DNA, 25 bp, Homo sapien
gggactgtgtcagacaaaggccagc

SEQ ID NO: 982343 - DNA, 25 bp, Homo sapien
caggttcctcaagcacgggtgtatg

SEQ ID NO: 982344 - DNA, 25 bp, Homo sapien
aacacacccggtttccagtgctcgg

SEQ ID NO: 982345 - DNA, 25 bp, Homo sapien
cacagagctgcaaggaaggataact

SEQ ID NO: 982346 - DNA, 25 bp, Homo sapien
cctttatgcgttgagaaacccttgg

SEQ ID NO: 982347 - DNA, 25 bp, Homo sapien
aattctttggcctagcactgagact

SEQ ID NO: 982348 - DNA, 25 bp, Homo sapien
ttcagcttcttacgtgggccccagt

SEQ ID NO: 982349 - DNA, 25 bp, Homo sapien
tcggtgcacaccgaaacccctgatt

SEQ ID NO: 982350 - DNA, 25 bp, Homo sapien
gaatacagcgtctcctgatgcatag

SEQ ID NO: 982351 - DNA, 25 bp, Homo sapien
tctgaagcaggtaggtcaggatcat

SEQ ID NO: 982352 - DNA, 25 bp, Homo sapien
agctccttagcccatgttcggtgca

SEQ ID NO: 982353 - DNA, 25 bp, Homo sapien
aggaagcgtttacaggcagagctgt

SEQ ID NO: 982354 - DNA, 25 bp, Homo sapien
gaagcgtttacaggcagagctgtgt

SEQ ID NO: 982355 - DNA, 25 bp, Homo sapien
ggcagagctgtgtccgttcacagtg

SEQ ID NO: 982356 - DNA, 25 bp, Homo sapien
ggaagcgtttacaggcagagctgtg

SEQ ID NO: 982357 - DNA, 25 bp, Homo sapien
ccccttctgtctatgtgattgactc

SEQ ID NO: 982358 - DNA, 25 bp, Homo sapien
tttccccttctgtctatgtgattga

SEQ ID NO: 982359 - DNA, 25 bp, Homo sapien
ccttctgtctatgtgattgactctg

SEQ ID NO: 982360 - DNA, 25 bp, Homo sapien
tctgtctatgtgattgactctgaga

SEQ ID NO: 982361 - DNA, 25 bp, Homo sapien
aagttccatccaagggtgccctgga

SEQ ID NO: 982362 - DNA, 25 bp, Homo sapien
ttctgatctcctctggaggtttgga

SEQ ID NO: 982363 - DNA, 25 bp, Homo sapien
catacttcacatcgtactgcttgag

SEQ ID NO: 982364 - DNA, 25 bp, Homo sapien
cttgggtaccaaggcactcaaatgg

SEQ ID NO: 982365 - DNA, 25 bp, Homo sapien
gagtctgtggctcctagatacagcc

SEQ ID NO: 982366 - DNA, 25 bp, Homo sapien
tggcaatgatataccagctggcagc

SEQ ID NO: 982367 - DNA, 25 bp, Homo sapien
ggaaatgcctgcacatcccattgtg

SEQ ID NO: 982368 - DNA, 25 bp, Homo sapien
gaagtactggtccaagacacaaggc

SEQ ID NO: 982369 - DNA, 25 bp, Homo sapien
agatgatccatgtgatgtttctaga

SEQ ID NO: 982370 - DNA, 25 bp, Homo sapien
gatgatccatgtgatgtttctagat

SEQ ID NO: 982371 - DNA, 25 bp, Homo sapien
aagatgatccatgtgatgtttctag

SEQ ID NO: 982372 - DNA, 25 bp, Homo sapien
ctaagatgatccatgtgatgtttct

SEQ ID NO: 982373 - DNA, 25 bp, Homo sapien
aagactcagggcaagtttggcacca

SEQ ID NO: 982374 - DNA, 25 bp, Homo sapien
ctggttgatccctgaagggtggctg

SEQ ID NO: 982375 - DNA, 25 bp, Homo sapien
gttgatccctgaagggtggctgtgc

SEQ ID NO: 982376 - DNA, 25 bp, Homo sapien
actcagggcaagtttggcaccacct

SEQ ID NO: 982377 - DNA, 25 bp, Homo sapien
ttccaaagggccaatgactaactcc

SEQ ID NO: 982378 - DNA, 25 bp, Homo sapien
tccctttccaaagggccaatgacta

SEQ ID NO: 982379 - DNA, 25 bp, Homo sapien
gccagtggctaggatggacagctca

SEQ ID NO: 982380 - DNA, 25 bp, Homo sapien
ggctaggatggacagctcaagtgac

SEQ ID NO: 982381 - DNA, 25 bp, Homo sapien
gaatgcccttatgctacctgtctag

SEQ ID NO: 982382 - DNA, 25 bp, Homo sapien
gcttcaccagtggtcccaataatgt

SEQ ID NO: 982383 - DNA, 25 bp, Homo sapien
gtcagttaatctacagtccacagtc

SEQ ID NO: 982384 - DNA, 25 bp, Homo sapien
tctgaaccccttgagagtaacttcc

SEQ ID NO: 982385 - DNA, 25 bp, Homo sapien
gaagacatcagcttcaatcccttgg

SEQ ID NO: 982386 - DNA, 25 bp, Homo sapien
tgtccctgggtttggacttgtctga

SEQ ID NO: 982387 - DNA, 25 bp, Homo sapien
tctgctgggttaggactgttgcgcc

SEQ ID NO: 982388 - DNA, 25 bp, Homo sapien
gagtacaggccagtcaatttgcata

SEQ ID NO: 982389 - DNA, 25 bp, Homo sapien
gaaatgcggaagaaatacaacccac

SEQ ID NO: 982390 - DNA, 25 bp, Homo sapien
tattttgggcactccattgcgttag

SEQ ID NO: 982391 - DNA, 25 bp, Homo sapien
cagccaaaggcctccttgtttttct

SEQ ID NO: 982392 - DNA, 25 bp, Homo sapien
ccaggtcttttgtggctagactttc

SEQ ID NO: 982393 - DNA, 25 bp, Homo sapien
gtagttgccggtgcaaggccttgaa

SEQ ID NO: 982394 - DNA, 25 bp, Homo sapien
gttcccatcaattttggtgcaggta

SEQ ID NO: 982395 - DNA, 25 bp, Homo sapien
gtgcaggtaactggtagttgccggt

SEQ ID NO: 982396 - DNA, 25 bp, Homo sapien
tgttcccatcaattttggtgcaggt

SEQ ID NO: 982397 - DNA, 25 bp, Homo sapien
cttctatcttcacaggcgtgaatgg

SEQ ID NO: 982398 - DNA, 25 bp, Homo sapien
tcttcacaggcgtgaatggattcat

SEQ ID NO: 982399 - DNA, 25 bp, Homo sapien
ctgggggccacttgattctttctga

SEQ ID NO: 982400 - DNA, 25 bp, Homo sapien
catctactttctctgcctgggggcc

SEQ ID NO: 982401 - DNA, 25 bp, Homo sapien
tacagtgggcaaatgcatgtgctgc

SEQ ID NO: 982402 - DNA, 25 bp, Homo sapien
agtgggcaaatgcatgtgctgctcc

SEQ ID NO: 982403 - DNA, 25 bp, Homo sapien
ctgctccttccctgaagattgtcat

SEQ ID NO: 982404 - DNA, 25 bp, Homo sapien
gttacagtgggcaaatgcatgtgct

SEQ ID NO: 982405 - DNA, 25 bp, Homo sapien
caggtgtagggcattcccatgcttc

SEQ ID NO: 982406 - DNA, 25 bp, Homo sapien
tggaaccattagaatccctgggacc

SEQ ID NO: 982407 - DNA, 25 bp, Homo sapien
gaagcaggaataacagcaggtgtag

SEQ ID NO: 982408 - DNA, 25 bp, Homo sapien
ggaacacctcttcaactcatccagg

SEQ ID NO: 982409 - DNA, 25 bp, Homo sapien
agctggattctgtagtgggcttgga

SEQ ID NO: 982410 - DNA, 25 bp, Homo sapien
tggattctgtagtgggcttggagga

SEQ ID NO: 982411 - DNA, 25 bp, Homo sapien
tctgtagtgggcttggaggatccat

SEQ ID NO: 982412 - DNA, 25 bp, Homo sapien
cataattgaaagcttcagctggatt

SEQ ID NO: 982413 - DNA, 25 bp, Homo sapien
gtaatttggcaacaggcaagcccac

SEQ ID NO: 982414 - DNA, 25 bp, Homo sapien
gggtaatttggcaacaggcaagccc

SEQ ID NO: 982415 - DNA, 25 bp, Homo sapien
agggtaatttggcaacaggcaagcc

SEQ ID NO: 982416 - DNA, 25 bp, Homo sapien
ggtaatttggcaacaggcaagccca

SEQ ID NO: 982417 - DNA, 25 bp, Homo sapien
ctctagagtggtttctctctggctg

SEQ ID NO: 982418 - DNA, 25 bp, Homo sapien
gcctctgtgggcctctagagtggtt

SEQ ID NO: 982419 - DNA, 25 bp, Homo sapien
tgtgggcctctagagtggtttctct

SEQ ID NO: 982420 - DNA, 25 bp, Homo sapien
ggcctctagagtggtttctctctgg

SEQ ID NO: 982421 - DNA, 25 bp, Homo sapien
ggaatgcaggtttagtgagatgctc

SEQ ID NO: 982422 - DNA, 25 bp, Homo sapien
gaatcctctaggtggactgggctga

SEQ ID NO: 982423 - DNA, 25 bp, Homo sapien
agcatgatattgctggacgctgagc

SEQ ID NO: 982424 - DNA, 25 bp, Homo sapien
ctcagctcaggtggcatgaagggca

SEQ ID NO: 982425 - DNA, 25 bp, Homo sapien
gagcctagccccgtgcgatttgtct

SEQ ID NO: 982426 - DNA, 25 bp, Homo sapien
tggctcgcagagatgcagcacttgc

SEQ ID NO: 982427 - DNA, 25 bp, Homo sapien
tgattgaaaggacgggagagaactc

SEQ ID NO: 982428 - DNA, 25 bp, Homo sapien
tctgcaaaggccttctcgggagagc

SEQ ID NO: 982429 - DNA, 25 bp, Homo sapien
cttgataactaggttccttccaata

SEQ ID NO: 982430 - DNA, 25 bp, Homo sapien
actaggttccttccaatacagggct

SEQ ID NO: 982431 - DNA, 25 bp, Homo sapien
tccaatacagggctctgttcggcat

SEQ ID NO: 982432 - DNA, 25 bp, Homo sapien
ggttccttccaatacagggctctgt

SEQ ID NO: 982433 - DNA, 25 bp, Homo sapien
gaaaggctttctacagtcccatgag

SEQ ID NO: 982434 - DNA, 25 bp, Homo sapien
tcccatgagggaacgactggttaat

SEQ ID NO: 982435 - DNA, 25 bp, Homo sapien
catatgggtcaacctagtacagcca

SEQ ID NO: 982436 - DNA, 25 bp, Homo sapien
cagactaatttgtggaagcttggtc

SEQ ID NO: 982437 - DNA, 25 bp, Homo sapien
tctggctgctaagttcgtgcccacc

SEQ ID NO: 982438 - DNA, 25 bp, Homo sapien
ggctgctaagttcgtgcccaccagg

SEQ ID NO: 982439 - DNA, 25 bp, Homo sapien
ctctggctgctaagttcgtgcccac

SEQ ID NO: 982440 - DNA, 25 bp, Homo sapien
tggctgctaagttcgtgcccaccag

SEQ ID NO: 982441 - DNA, 25 bp, Homo sapien
gcatcaccaactcttggtgaagtgg

SEQ ID NO: 982442 - DNA, 25 bp, Homo sapien
aggagagaacggcttttctgttcca

SEQ ID NO: 982443 - DNA, 25 bp, Homo sapien
tttgtctgcatcaccaactcttggt

SEQ ID NO: 982444 - DNA, 25 bp, Homo sapien
agaaggagagaacggcttttctgtt

SEQ ID NO: 982445 - DNA, 25 bp, Homo sapien
cccagggtatactcctgagagcaga

SEQ ID NO: 982446 - DNA, 25 bp, Homo sapien
gggtatactcctgagagcagagccc

SEQ ID NO: 982447 - DNA, 25 bp, Homo sapien
cagggtatactcctgagagcagagc

SEQ ID NO: 982448 - DNA, 25 bp, Homo sapien
agggtatactcctgagagcagagcc

SEQ ID NO: 982449 - DNA, 25 bp, Homo sapien
cattaggggccacttggtgttaaga

SEQ ID NO: 982450 - DNA, 25 bp, Homo sapien
atcctgtttggatgggtggcctcga

SEQ ID NO: 982451 - DNA, 25 bp, Homo sapien
gggtggcctcgagtcttcattaggg

SEQ ID NO: 982452 - DNA, 25 bp, Homo sapien
tccttcctgagtgacaactgacagc

SEQ ID NO: 982453 - DNA, 25 bp, Homo sapien
agtcaatatcaatttctctgcccca

SEQ ID NO: 982454 - DNA, 25 bp, Homo sapien
agaagctcgacctgcaaggccagct

SEQ ID NO: 982455 - DNA, 25 bp, Homo sapien
ctgtctatcgagcaaacttttaatg

SEQ ID NO: 982456 - DNA, 25 bp, Homo sapien
ccactcaagggccatgaactgtcta

SEQ ID NO: 982457 - DNA, 25 bp, Homo sapien
tgctgcttctttccgggacactcct

SEQ ID NO: 982458 - DNA, 25 bp, Homo sapien
tggccatacccctgaccctggattg

SEQ ID NO: 982459 - DNA, 25 bp, Homo sapien
ccctggattgagcagatctctaacc

SEQ ID NO: 982460 - DNA, 25 bp, Homo sapien
gagcagatctctaacctggctgctg

SEQ ID NO: 982461 - DNA, 25 bp, Homo sapien
ctttgatcagtgttctccattccct

SEQ ID NO: 982462 - DNA, 25 bp, Homo sapien
tcaatcttctctccggactttctgg

SEQ ID NO: 982463 - DNA, 25 bp, Homo sapien
tctcccttatcccaccttgttagtg

SEQ ID NO: 982464 - DNA, 25 bp, Homo sapien
tctcaatcttctctccggactttct

SEQ ID NO: 982465 - DNA, 25 bp, Homo sapien
ccaccttgttagtgagcttctgggc

SEQ ID NO: 982466 - DNA, 25 bp, Homo sapien
gctgggctcaggaccttgcagtcta

SEQ ID NO: 982467 - DNA, 25 bp, Homo sapien
ggcagacaacggtgaccaaaactgg

SEQ ID NO: 982468 - DNA, 25 bp, Homo sapien
cactcttaagttattgggcattcca

SEQ ID NO: 982469 - DNA, 25 bp, Homo sapien
gacactggctattcccactgacacg

SEQ ID NO: 982470 - DNA, 25 bp, Homo sapien
agccttggagacctgcggctgtagc

SEQ ID NO: 982471 - DNA, 25 bp, Homo sapien
agacctgcggctgtagcatgctctg

SEQ ID NO: 982472 - DNA, 25 bp, Homo sapien
ggagacctgcggctgtagcatgctc

SEQ ID NO: 982473 - DNA, 25 bp, Homo sapien
ccttggagacctgcggctgtagcat

SEQ ID NO: 982474 - DNA, 25 bp, Homo sapien
cttgacaccaaagaatgaggagctc

SEQ ID NO: 982475 - DNA, 25 bp, Homo sapien
cctggagctggaattgtgactggat

SEQ ID NO: 982476 - DNA, 25 bp, Homo sapien
tcagcatccataatgcccctggagc

SEQ ID NO: 982477 - DNA, 25 bp, Homo sapien
gtggaggacgggactctcagcatcc

SEQ ID NO: 982478 - DNA, 25 bp, Homo sapien
tacttgcattggggtaggttttaca

SEQ ID NO: 982479 - DNA, 25 bp, Homo sapien
tgggtgaaggaatttacttgcattg

SEQ ID NO: 982480 - DNA, 25 bp, Homo sapien
cttgcattggggtaggttttacatc

SEQ ID NO: 982481 - DNA, 25 bp, Homo sapien
ggtgaaggaatttacttgcattggg

SEQ ID NO: 982482 - DNA, 25 bp, Homo sapien
tcgacccaggtggacgaaagagctc

SEQ ID NO: 982483 - DNA, 25 bp, Homo sapien
ggaaccccggagcagtagatttgtg

SEQ ID NO: 982484 - DNA, 25 bp, Homo sapien
tagatttgtggaggtcgacccaggt

SEQ ID NO: 982485 - DNA, 25 bp, Homo sapien
aaagagctcggcacaccgtgtgtcc

SEQ ID NO: 982486 - DNA, 25 bp, Homo sapien
gagtgttcccttgcaagaccccatc

SEQ ID NO: 982487 - DNA, 25 bp, Homo sapien
agagtgttcccttgcaagaccccat

SEQ ID NO: 982488 - DNA, 25 bp, Homo sapien
aagaccccatctgtcgtaaacacca

SEQ ID NO: 982489 - DNA, 25 bp, Homo sapien
agcagagtgttcccttgcaagaccc

SEQ ID NO: 982490 - DNA, 25 bp, Homo sapien
gggtccctaatgctgcaggatgctc

SEQ ID NO: 982491 - DNA, 25 bp, Homo sapien
atgtgggtccctaatgctgcaggat

SEQ ID NO: 982492 - DNA, 25 bp, Homo sapien
tgggtccctaatgctgcaggatgct

SEQ ID NO: 982493 - DNA, 25 bp, Homo sapien
tgtgggtccctaatgctgcaggatg

SEQ ID NO: 982494 - DNA, 25 bp, Homo sapien
acaaaccgaggcttggtcaccctga

SEQ ID NO: 982495 - DNA, 25 bp, Homo sapien
tcgcagaaaggccacagtacagaag

SEQ ID NO: 982496 - DNA, 25 bp, Homo sapien
aaatttcctgctagagaatccctga

SEQ ID NO: 982497 - DNA, 25 bp, Homo sapien
tatttctacttcaacgaggcacctc

SEQ ID NO: 982498 - DNA, 25 bp, Homo sapien
ctccgagtaaggtggcagactggtg

SEQ ID NO: 982499 - DNA, 25 bp, Homo sapien
agtaaggtggcagactggtgacccc

SEQ ID NO: 982500 - DNA, 25 bp, Homo sapien
tccgagtaaggtggcagactggtga

SEQ ID NO: 982501 - DNA, 25 bp, Homo sapien
cgagtaaggtggcagactggtgacc

SEQ ID NO: 982502 - DNA, 25 bp, Homo sapien
ctggcgctctttccggtagtcactg

SEQ ID NO: 982503 - DNA, 25 bp, Homo sapien
tggcgctctttccggtagtcactgg

SEQ ID NO: 982504 - DNA, 25 bp, Homo sapien
gctctttccggtagtcactggcttg

SEQ ID NO: 982505 - DNA, 25 bp, Homo sapien
gcgctctttccggtagtcactggct

SEQ ID NO: 982506 - DNA, 25 bp, Homo sapien
ttaagtgtgtactggctggtcccca

SEQ ID NO: 982507 - DNA, 25 bp, Homo sapien
ggattggactcttgctgctcctcat

SEQ ID NO: 982508 - DNA, 25 bp, Homo sapien
aaagagagggaataatgttcttggc

SEQ ID NO: 982509 - DNA, 25 bp, Homo sapien
tcttggctggtgagatattgggatt

SEQ ID NO: 982510 - DNA, 25 bp, Homo sapien
tactgcctacagaccatttcattac

SEQ ID NO: 982511 - DNA, 25 bp, Homo sapien
tggaattccaacctgggggaggcat

SEQ ID NO: 982512 - DNA, 25 bp, Homo sapien
cagtgagtggaattccaacctgggg

SEQ ID NO: 982513 - DNA, 25 bp, Homo sapien
gcatttctgcaggaggttgtctttc

SEQ ID NO: 982514 - DNA, 25 bp, Homo sapien
tatcatccataaatgcagatgcatt

SEQ ID NO: 982515 - DNA, 25 bp, Homo sapien
gagaaactactgttatcatccataa

SEQ ID NO: 982516 - DNA, 25 bp, Homo sapien
cattttcagtgtgaagttgaactcg

SEQ ID NO: 982517 - DNA, 25 bp, Homo sapien
cacataatataggtctttgggtttc

SEQ ID NO: 982518 - DNA, 25 bp, Homo sapien
aggaagacctctgaagaggtttttg

SEQ ID NO: 982519 - DNA, 25 bp, Homo sapien
tcaaggaagacctctgaagaggttt

SEQ ID NO: 982520 - DNA, 25 bp, Homo sapien
caaggaagacctctgaagaggtttt

SEQ ID NO: 982521 - DNA, 25 bp, Homo sapien
tctcaccaatgtcttctgtagcagg

SEQ ID NO: 982522 - DNA, 25 bp, Homo sapien
tggagcacccaacaagcagtgaatg

SEQ ID NO: 982523 - DNA, 25 bp, Homo sapien
tcaccaatgtcttctgtagcaggca

SEQ ID NO: 982524 - DNA, 25 bp, Homo sapien
gtgaacttggagcacccaacaagca

SEQ ID NO: 982525 - DNA, 25 bp, Homo sapien
gtggatgattgttggatgagtatat

SEQ ID NO: 982526 - DNA, 25 bp, Homo sapien
gattgttggatgagtatatttccaa

SEQ ID NO: 982527 - DNA, 25 bp, Homo sapien
tccagaggcatttgacagggttctg

SEQ ID NO: 982528 - DNA, 25 bp, Homo sapien
cttgtccagaggcatttgacagggt

SEQ ID NO: 982529 - DNA, 25 bp, Homo sapien
ctttgagctccttcttgtgtcttcc

SEQ ID NO: 982530 - DNA, 25 bp, Homo sapien
gagctccttcttgtgtcttccctgt

SEQ ID NO: 982531 - DNA, 25 bp, Homo sapien
ccaaagtcccctccaattgtatttg

SEQ ID NO: 982532 - DNA, 25 bp, Homo sapien
aagtcccctccaattgtatttggtg

SEQ ID NO: 982533 - DNA, 25 bp, Homo sapien
gtgcttcagtttccaaattatcctt

SEQ ID NO: 982534 - DNA, 25 bp, Homo sapien
ctgtggtgcttcagtttccaaatta

SEQ ID NO: 982535 - DNA, 25 bp, Homo sapien
tcagtttccaaattatccttcccag

SEQ ID NO: 982536 - DNA, 25 bp, Homo sapien
tccaaattatccttcccagatttcc

SEQ ID NO: 982537 - DNA, 25 bp, Homo sapien
gccatgtgttcccttggcccatatg

SEQ ID NO: 982538 - DNA, 25 bp, Homo sapien
ggctgaaaccaccaaccctgttgct

SEQ ID NO: 982539 - DNA, 25 bp, Homo sapien
cctgttgcttagcagttcatctgct

SEQ ID NO: 982540 - DNA, 25 bp, Homo sapien
tggcccatatgctgacaagcatcct

SEQ ID NO: 982541 - DNA, 25 bp, Homo sapien
agccagaattctcaggtcatcgccc

SEQ ID NO: 982542 - DNA, 25 bp, Homo sapien
aattctcaggtcatcgccctcagca

SEQ ID NO: 982543 - DNA, 25 bp, Homo sapien
cagaattctcaggtcatcgccctca

SEQ ID NO: 982544 - DNA, 25 bp, Homo sapien
gaaggcattcgaggctgtggggctt

SEQ ID NO: 982545 - DNA, 25 bp, Homo sapien
caaatgaaagcggttctggaaggtc

SEQ ID NO: 982546 - DNA, 25 bp, Homo sapien
aaggtcgttgggaacagtgaattgt

SEQ ID NO: 982547 - DNA, 25 bp, Homo sapien
tcaggactggatgttactttccaaa

SEQ ID NO: 982548 - DNA, 25 bp, Homo sapien
tcgttgggaacagtgaattgtgatt

SEQ ID NO: 982549 - DNA, 25 bp, Homo sapien
tcttaattggcccatccaagagccc

SEQ ID NO: 982550 - DNA, 25 bp, Homo sapien
tgtcccacaccatcttctgggtctg

SEQ ID NO: 982551 - DNA, 25 bp, Homo sapien
tgccatgctatctccatcttgttcc

SEQ ID NO: 982552 - DNA, 25 bp, Homo sapien
cacaccatcttctgggtctgctctc

SEQ ID NO: 982553 - DNA, 25 bp, Homo sapien
agctcagcagggctagaagttccta

SEQ ID NO: 982554 - DNA, 25 bp, Homo sapien
ggggcagggttctcctaacagctca

SEQ ID NO: 982555 - DNA, 25 bp, Homo sapien
tcagcagggctagaagttcctaatt

SEQ ID NO: 982556 - DNA, 25 bp, Homo sapien
aggggcagggttctcctaacagctc

SEQ ID NO: 982557 - DNA, 25 bp, Homo sapien
tgtgctgtggacaatctcctcgggc

SEQ ID NO: 982558 - DNA, 25 bp, Homo sapien
gatttaaaccaaggccatgtagtgc

SEQ ID NO: 982559 - DNA, 25 bp, Homo sapien
cacattgagtgagcagcagaagtga

SEQ ID NO: 982560 - DNA, 25 bp, Homo sapien
catgtagtgcctgaatctgtgtgcc

SEQ ID NO: 982561 - DNA, 25 bp, Homo sapien
ctcattctgcgggacattgcatgtg

SEQ ID NO: 982562 - DNA, 25 bp, Homo sapien
gcctgccatgcaggagttttccttc

SEQ ID NO: 982563 - DNA, 25 bp, Homo sapien
tgcgggacattgcatgtgtcaggat

SEQ ID NO: 982564 - DNA, 25 bp, Homo sapien
caggatgcacaccacatccgtgctg

SEQ ID NO: 982565 - DNA, 25 bp, Homo sapien
aattccgtgtaagtgcagtgtctga

SEQ ID NO: 982566 - DNA, 25 bp, Homo sapien
taacaaaaccagcatcacgccagtc

SEQ ID NO: 982567 - DNA, 25 bp, Homo sapien
gaaagatgaattgaacggcagagtc

SEQ ID NO: 982568 - DNA, 25 bp, Homo sapien
acttggctgccacgcgttgtttcca

SEQ ID NO: 982569 - DNA, 25 bp, Homo sapien
gggccatccgtcctttcctagatca

SEQ ID NO: 982570 - DNA, 25 bp, Homo sapien
tgcgcagactcctctcaaaactgtc

SEQ ID NO: 982571 - DNA, 25 bp, Homo sapien
tccacaccgtactgcccaggcttct

SEQ ID NO: 982572 - DNA, 25 bp, Homo sapien
tgggggcatctctttggactcctct

SEQ ID NO: 982573 - DNA, 25 bp, Homo sapien
tgcctcctgtgttccttggaaggca

SEQ ID NO: 982574 - DNA, 25 bp, Homo sapien
aacagttttgtaccagctctttgga

SEQ ID NO: 982575 - DNA, 25 bp, Homo sapien
agccccagaaacagttttgtaccag

SEQ ID NO: 982576 - DNA, 25 bp, Homo sapien
ctctgggcttggtccattcaagccc

SEQ ID NO: 982577 - DNA, 25 bp, Homo sapien
tggagctcatggctagagccctgct

SEQ ID NO: 982578 - DNA, 25 bp, Homo sapien
gggagcacacagctgacaagcttta

SEQ ID NO: 982579 - DNA, 25 bp, Homo sapien
tctttacagagagggaagtactcct

SEQ ID NO: 982580 - DNA, 25 bp, Homo sapien
tagtaggacggttaaagctcaaatc

SEQ ID NO: 982581 - DNA, 25 bp, Homo sapien
ggaatctggaactcttagtaaagca

SEQ ID NO: 982582 - DNA, 25 bp, Homo sapien
aacaagagcttcgagcacacctgtc

SEQ ID NO: 982583 - DNA, 25 bp, Homo sapien
cagtcactgagctctgatgtcgtgc

SEQ ID NO: 982584 - DNA, 25 bp, Homo sapien
gtggcggcagctgttaccaacgcag

SEQ ID NO: 982585 - DNA, 25 bp, Homo sapien
gatgtcgtgcatccccttggcatct

SEQ ID NO: 982586 - DNA, 25 bp, Homo sapien
tctggcttcccatgattgtctttgc

SEQ ID NO: 982587 - DNA, 25 bp, Homo sapien
gcttcccatgattgtctttgctcct

SEQ ID NO: 982588 - DNA, 25 bp, Homo sapien
aggtggttcgtgacctctccaagaa

SEQ ID NO: 982589 - DNA, 25 bp, Homo sapien
ctctgcctcacaagtcctgcaggtg

SEQ ID NO: 982590 - DNA, 25 bp, Homo sapien
cctccttgacaggtgctggctccat

SEQ ID NO: 982591 - DNA, 25 bp, Homo sapien
aggagaaagaagttctagtctcttc

SEQ ID NO: 982592 - DNA, 25 bp, Homo sapien
tctcttgctgggaaaagtcctctcc

SEQ ID NO: 982593 - DNA, 25 bp, Homo sapien
ctgctcgttgctggaaagaggagaa

SEQ ID NO: 982594 - DNA, 25 bp, Homo sapien
tgccacacacttcacccacccgagg

SEQ ID NO: 982595 - DNA, 25 bp, Homo sapien
ccacacacttcacccacccgagggc

SEQ ID NO: 982596 - DNA, 25 bp, Homo sapien
acacttcacccacccgagggcctct

SEQ ID NO: 982597 - DNA, 25 bp, Homo sapien
acacacttcacccacccgagggcct

SEQ ID NO: 982598 - DNA, 25 bp, Homo sapien
ctgcagctggtcatacctgttagct

SEQ ID NO: 982599 - DNA, 25 bp, Homo sapien
agggagccgtgctgggcaaagcaga

SEQ ID NO: 982600 - DNA, 25 bp, Homo sapien
gccggtagctgcacctggaggaagg

SEQ ID NO: 982601 - DNA, 25 bp, Homo sapien
aagcagaggccggtagctgcacctg

SEQ ID NO: 982602 - DNA, 25 bp, Homo sapien
cagggaaatgcccattccactcttc

SEQ ID NO: 982603 - DNA, 25 bp, Homo sapien
taggaagcagggaaatgcccattcc

SEQ ID NO: 982604 - DNA, 25 bp, Homo sapien
aataataaggctccttctgttttct

SEQ ID NO: 982605 - DNA, 25 bp, Homo sapien
cagggcataggaagcagggaaatgc

SEQ ID NO: 982606 - DNA, 25 bp, Homo sapien
gcatcctcaactgccaactgctgta

SEQ ID NO: 982607 - DNA, 25 bp, Homo sapien
aagttgctggtgcatcctcaactgc

SEQ ID NO: 982608 - DNA, 25 bp, Homo sapien
ctcaccactctatcttgtgaagctg

SEQ ID NO: 982609 - DNA, 25 bp, Homo sapien
ttgtgtgtgcgggactcctagcctc

SEQ ID NO: 982610 - DNA, 25 bp, Homo sapien
ggctgagcatcggttctcaatcttt

SEQ ID NO: 982611 - DNA, 25 bp, Homo sapien
gcagcgggcaatgggaaggccttgc

SEQ ID NO: 982612 - DNA, 25 bp, Homo sapien
cttgctggttctgtgagtcacgcta

SEQ ID NO: 982613 - DNA, 25 bp, Homo sapien
tcattcctagactcggccatctgca

SEQ ID NO: 982614 - DNA, 25 bp, Homo sapien
atgatgtggtttcccccaagaagcc

SEQ ID NO: 982615 - DNA, 25 bp, Homo sapien
gtttgatgtgtttgcccatgatgtg

SEQ ID NO: 982616 - DNA, 25 bp, Homo sapien
catgatgtggtttcccccaagaagc

SEQ ID NO: 982617 - DNA, 25 bp, Homo sapien
atgtgtttgcccatgatgtggtttc

SEQ ID NO: 982618 - DNA, 25 bp, Homo sapien
tttctggagcagggtaccttctgtc

SEQ ID NO: 982619 - DNA, 25 bp, Homo sapien
ctttctggagcagggtaccttctgt

SEQ ID NO: 982620 - DNA, 25 bp, Homo sapien
caaatctcggcttctctgaagagac

SEQ ID NO: 982621 - DNA, 25 bp, Homo sapien
tcatgaactgtcttgtagcatttct

SEQ ID NO: 982622 - DNA, 25 bp, Homo sapien
tgccaccatcaaagtgcagccaagt

SEQ ID NO: 982623 - DNA, 25 bp, Homo sapien
tcctatggcaatgatacttttcctg

SEQ ID NO: 982624 - DNA, 25 bp, Homo sapien
tctgggcgccagcaatgagaggctg

SEQ ID NO: 982625 - DNA, 25 bp, Homo sapien
tccggggagcatgaagagggagtcc

SEQ ID NO: 982626 - DNA, 25 bp, Homo sapien
gagggagtccgaggcgatgtttttg

SEQ ID NO: 982627 - DNA, 25 bp, Homo sapien
gggaaggccaatctgggcgccagca

SEQ ID NO: 982628 - DNA, 25 bp, Homo sapien
aaggcttgtgtgagcgtcacattcc

SEQ ID NO: 982629 - DNA, 25 bp, Homo sapien
gcgtcacattccacggggtgctgtg

SEQ ID NO: 982630 - DNA, 25 bp, Homo sapien
ttgtgtgagcgtcacattccacggg

SEQ ID NO: 982631 - DNA, 25 bp, Homo sapien
gcttgtgtgagcgtcacattccacg

SEQ ID NO: 982632 - DNA, 25 bp, Homo sapien
tgtattgtagacttccttgcactcg

SEQ ID NO: 982633 - DNA, 25 bp, Homo sapien
gaatgaagggttttaaaggatcaca

SEQ ID NO: 982634 - DNA, 25 bp, Homo sapien
aaggatcacatattgtattgtagac

SEQ ID NO: 982635 - DNA, 25 bp, Homo sapien
agacttccttgcactcggccgcata

SEQ ID NO: 982636 - DNA, 25 bp, Homo sapien
tgcacgtggagcctgatagtgtctg

SEQ ID NO: 982637 - DNA, 25 bp, Homo sapien
gaggaataaacagcccacggcaaac

SEQ ID NO: 982638 - DNA, 25 bp, Homo sapien
tccaactcacttgcaaacttagaag

SEQ ID NO: 982639 - DNA, 25 bp, Homo sapien
gaaaccactcagcttttccaactca

SEQ ID NO: 982640 - DNA, 25 bp, Homo sapien
tctaggcatcacaagaagctgtcgt

SEQ ID NO: 982641 - DNA, 25 bp, Homo sapien
cgtttatggcttcgaagggagctgc

SEQ ID NO: 982642 - DNA, 25 bp, Homo sapien
gaatcagccagcatccttctaggca

SEQ ID NO: 982643 - DNA, 25 bp, Homo sapien
gcatcttagagggatcatcaagcct

SEQ ID NO: 982644 - DNA, 25 bp, Homo sapien
gaatatggtgtgtatcccctgagga

SEQ ID NO: 982645 - DNA, 25 bp, Homo sapien
agaatatggtgtgtatcccctgagg

SEQ ID NO: 982646 - DNA, 25 bp, Homo sapien
tgagaatatggtgtgtatcccctga

SEQ ID NO: 982647 - DNA, 25 bp, Homo sapien
gagaatatggtgtgtatcccctgag

SEQ ID NO: 982648 - DNA, 25 bp, Homo sapien
tctggctcagcgtccacggtaggag

SEQ ID NO: 982649 - DNA, 25 bp, Homo sapien
tggctcagcgtccacggtaggagtt

SEQ ID NO: 982650 - DNA, 25 bp, Homo sapien
ctggctcagcgtccacggtaggagt

SEQ ID NO: 982651 - DNA, 25 bp, Homo sapien
cttgaggccagggagttcggtttgc

SEQ ID NO: 982652 - DNA, 25 bp, Homo sapien
gctgccccgtccattcccacagtca

SEQ ID NO: 982653 - DNA, 25 bp, Homo sapien
ggccagggagttcggtttgccctca

SEQ ID NO: 982654 - DNA, 25 bp, Homo sapien
gggagttcggtttgccctcacagct

SEQ ID NO: 982655 - DNA, 25 bp, Homo sapien
cttgcaaccgagaagagagtcttaa

SEQ ID NO: 982656 - DNA, 25 bp, Homo sapien
tctccctggcttgaagtgttgccac

SEQ ID NO: 982657 - DNA, 25 bp, Homo sapien
ctcgggatggctgccttgcaaccga

SEQ ID NO: 982658 - DNA, 25 bp, Homo sapien
tccctggcttgaagtgttgccacct

SEQ ID NO: 982659 - DNA, 25 bp, Homo sapien
taggtttcctgtcaagagcatgcca

SEQ ID NO: 982660 - DNA, 25 bp, Homo sapien
gacttaacatccatagcagggctcc

SEQ ID NO: 982661 - DNA, 25 bp, Homo sapien
cattgtctgttgtggtaccctggag

SEQ ID NO: 982662 - DNA, 25 bp, Homo sapien
tcaacaagctaactagaacgtcggg

SEQ ID NO: 982663 - DNA, 25 bp, Homo sapien
ctctggaaacagtggtaaggattct

SEQ ID NO: 982664 - DNA, 25 bp, Homo sapien
atggggacccatagggccttggcta

SEQ ID NO: 982665 - DNA, 25 bp, Homo sapien
tcttcttgcagtggaggtcatttgg

SEQ ID NO: 982666 - DNA, 25 bp, Homo sapien
tgggcccatcacagcatcgttcacg

SEQ ID NO: 982667 - DNA, 25 bp, Homo sapien
acttaccaggctgcgggtgcacaag

SEQ ID NO: 982668 - DNA, 25 bp, Homo sapien
caagtggataaatcgccctgggaca

SEQ ID NO: 982669 - DNA, 25 bp, Homo sapien
cagaagccagacatgcaacgggaga

SEQ ID NO: 982670 - DNA, 25 bp, Homo sapien
ggacagtctgcctcaaactttggga

SEQ ID NO: 982671 - DNA, 25 bp, Homo sapien
gcaaaaatattgtagtgaccgaggt

SEQ ID NO: 982672 - DNA, 25 bp, Homo sapien
tagaaaagtcaagcttctccacctg

SEQ ID NO: 982673 - DNA, 25 bp, Homo sapien
tctgcgatgtcacatgatgccctgt

SEQ ID NO: 982674 - DNA, 25 bp, Homo sapien
tcagcagaaccgtgataagtctttt

SEQ ID NO: 982675 - DNA, 25 bp, Homo sapien
tgttcttaaaagtaccggatgctcc

SEQ ID NO: 982676 - DNA, 25 bp, Homo sapien
catagcaatggcaccggattctgca

SEQ ID NO: 982677 - DNA, 25 bp, Homo sapien
gcttccagggtagatgcaactctct

SEQ ID NO: 982678 - DNA, 25 bp, Homo sapien
cctgcttaggatgggagactgcacc

SEQ ID NO: 982679 - DNA, 25 bp, Homo sapien
gatcagaccactggctgaaccactg

SEQ ID NO: 982680 - DNA, 25 bp, Homo sapien
agcgatcagaccactggctgaacca

SEQ ID NO: 982681 - DNA, 25 bp, Homo sapien
tgcaaagcgatcagaccactggctg

SEQ ID NO: 982682 - DNA, 25 bp, Homo sapien
caaagcgatcagaccactggctgaa

SEQ ID NO: 982683 - DNA, 25 bp, Homo sapien
tccaatcgtgttggcagagcaactg

SEQ ID NO: 982684 - DNA, 25 bp, Homo sapien
gatgctgctgatgccagtcggaact

SEQ ID NO: 982685 - DNA, 25 bp, Homo sapien
taatctagactgaggcacggcttgg

SEQ ID NO: 982686 - DNA, 25 bp, Homo sapien
ccattcttggactaactgagggtca

SEQ ID NO: 982687 - DNA, 25 bp, Homo sapien
tgtctaagctcatgagggttatgac

SEQ ID NO: 982688 - DNA, 25 bp, Homo sapien
gctgtctaagctcatgagggttatg

SEQ ID NO: 982689 - DNA, 25 bp, Homo sapien
tcagctgtctaagctcatgagggtt

SEQ ID NO: 982690 - DNA, 25 bp, Homo sapien
cagctgtctaagctcatgagggtta

SEQ ID NO: 982691 - DNA, 25 bp, Homo sapien
cacactggtcatcgtggtccagagg

SEQ ID NO: 982692 - DNA, 25 bp, Homo sapien
actggtcatcgtggtccagaggtcc

SEQ ID NO: 982693 - DNA, 25 bp, Homo sapien
tttgtaggccagtttctgcttccca

SEQ ID NO: 982694 - DNA, 25 bp, Homo sapien
ttgttctagtttgtaggccagtttc

SEQ ID NO: 982695 - DNA, 25 bp, Homo sapien
tcataccatacaatgccataccaca

SEQ ID NO: 982696 - DNA, 25 bp, Homo sapien
ccataccacatagccggcccatagg

SEQ ID NO: 982697 - DNA, 25 bp, Homo sapien
tacaatgccataccacatagccggc

SEQ ID NO: 982698 - DNA, 25 bp, Homo sapien
catagccggcccataggagtgagga

SEQ ID NO: 982699 - DNA, 25 bp, Homo sapien
tgctcagccaggtatgcgttcatgt

SEQ ID NO: 982700 - DNA, 25 bp, Homo sapien
gaagatctctgagagtgcactcatg

SEQ ID NO: 982701 - DNA, 25 bp, Homo sapien
gcatcttccctatgtctgagtaata

SEQ ID NO: 982702 - DNA, 25 bp, Homo sapien
tcctcgctgtatttgcccacatagg

SEQ ID NO: 982703 - DNA, 25 bp, Homo sapien
tgggtccgaaccaggaagagccctc

SEQ ID NO: 982704 - DNA, 25 bp, Homo sapien
gccaagacaggagaggaaccgagag

SEQ ID NO: 982705 - DNA, 25 bp, Homo sapien
gagggtcccaactcgggcatcctct

SEQ ID NO: 982706 - DNA, 25 bp, Homo sapien
ctgggttgctgggtccgaaccagga

SEQ ID NO: 982707 - DNA, 25 bp, Homo sapien
cagagaggtctagactgtcttgagt

SEQ ID NO: 982708 - DNA, 25 bp, Homo sapien
gaggtctagactgtcttgagtttct

SEQ ID NO: 982709 - DNA, 25 bp, Homo sapien
gtcttgagtttctctaacgcccctc

SEQ ID NO: 982710 - DNA, 25 bp, Homo sapien
cacacagagaggtctagactgtctt

SEQ ID NO: 982711 - DNA, 25 bp, Homo sapien
ggctcttccgagcggttgctcttct

SEQ ID NO: 982712 - DNA, 25 bp, Homo sapien
tcctccagcagggcccgaaggctct

SEQ ID NO: 982713 - DNA, 25 bp, Homo sapien
ctcttccgagcggttgctcttctct

SEQ ID NO: 982714 - DNA, 25 bp, Homo sapien
agcagggcccgaaggctcttccgag

SEQ ID NO: 982715 - DNA, 25 bp, Homo sapien
ctgttttgctgaactggtagcattt

SEQ ID NO: 982716 - DNA, 25 bp, Homo sapien
gttttgctgaactggtagcattttg

SEQ ID NO: 982717 - DNA, 25 bp, Homo sapien
tgttttgctgaactggtagcatttt

SEQ ID NO: 982718 - DNA, 25 bp, Homo sapien
agcttccaccagacaggtatactct

SEQ ID NO: 982719 - DNA, 25 bp, Homo sapien
agccagccacgcaactctggtaact

SEQ ID NO: 982720 - DNA, 25 bp, Homo sapien
cttccaccagacaggtatactctgt

SEQ ID NO: 982721 - DNA, 25 bp, Homo sapien
ccaccagacaggtatactctgtcac

SEQ ID NO: 982722 - DNA, 25 bp, Homo sapien
gctgttcttatggatgtcaaacaca

SEQ ID NO: 982723 - DNA, 25 bp, Homo sapien
tcttgatcatgttgacccaaaacct

SEQ ID NO: 982724 - DNA, 25 bp, Homo sapien
gcgggttcttgatcatgttgaccca

SEQ ID NO: 982725 - DNA, 25 bp, Homo sapien
atcatgttgacccaaaacctcaggg

SEQ ID NO: 982726 - DNA, 25 bp, Homo sapien
gcgggtcatgaatgccatgtttatc

SEQ ID NO: 982727 - DNA, 25 bp, Homo sapien
cggacgtgcgggtcatgaatgccat

SEQ ID NO: 982728 - DNA, 25 bp, Homo sapien
tatggcggacgtgcgggtcatgaat

SEQ ID NO: 982729 - DNA, 25 bp, Homo sapien
attgctcttccaggtatggcggacg

SEQ ID NO: 982730 - DNA, 25 bp, Homo sapien
ggcttttaaaacctgcctcacagac

SEQ ID NO: 982731 - DNA, 25 bp, Homo sapien
gtccagacacagctcgactcacgta

SEQ ID NO: 982732 - DNA, 25 bp, Homo sapien
cacgtagttctgaggatggctttta

SEQ ID NO: 982733 - DNA, 25 bp, Homo sapien
tggagaggcaggatacgtccagaca

SEQ ID NO: 982734 - DNA, 25 bp, Homo sapien
cgtgctcgtggttcttcactaggtg

SEQ ID NO: 982735 - DNA, 25 bp, Homo sapien
gggctgcccgtgtaccggatcatgt

SEQ ID NO: 982736 - DNA, 25 bp, Homo sapien
caggagtgatcataggtgtccgtga

SEQ ID NO: 982737 - DNA, 25 bp, Homo sapien
cttagtggccaggagtcgggtcagg

SEQ ID NO: 982738 - DNA, 25 bp, Homo sapien
cactgcgttataggctgtcacctgc

SEQ ID NO: 982739 - DNA, 25 bp, Homo sapien
tggagttgttcactgcgttataggc

SEQ ID NO: 982740 - DNA, 25 bp, Homo sapien
atatttacttgctgaggtcctggag

SEQ ID NO: 982741 - DNA, 25 bp, Homo sapien
gacggtggagttgttcactgcgtta

SEQ ID NO: 982742 - DNA, 25 bp, Homo sapien
aatgccaccacggaaccatctggca

SEQ ID NO: 982743 - DNA, 25 bp, Homo sapien
taatgccaccacggaaccatctggc

SEQ ID NO: 982744 - DNA, 25 bp, Homo sapien
ctaatgccaccacggaaccatctgg

SEQ ID NO: 982745 - DNA, 25 bp, Homo sapien
atgccaccacggaaccatctggcac

SEQ ID NO: 982746 - DNA, 25 bp, Homo sapien
gcaagggacttgtagttggctagct

SEQ ID NO: 982747 - DNA, 25 bp, Homo sapien
ggacttgtagttggctagctcctcc

SEQ ID NO: 982748 - DNA, 25 bp, Homo sapien
agggcaatgatttccagggcaaggg

SEQ ID NO: 982749 - DNA, 25 bp, Homo sapien
ggcaatgatttccagggcaagggac

SEQ ID NO: 982750 - DNA, 25 bp, Homo sapien
cttgccccacttccttgtcgccact

SEQ ID NO: 982751 - DNA, 25 bp, Homo sapien
gttcagtcgcttccaatcattctca

SEQ ID NO: 982752 - DNA, 25 bp, Homo sapien
atcctgcaagatcatccttgcccca

SEQ ID NO: 982753 - DNA, 25 bp, Homo sapien
cgcttccaatcattctcaatcttgg

SEQ ID NO: 982754 - DNA, 25 bp, Homo sapien
gcaaagaatgctgggctcgttcaga

SEQ ID NO: 982755 - DNA, 25 bp, Homo sapien
caacgtgtgttccagccaagaagcc

SEQ ID NO: 982756 - DNA, 25 bp, Homo sapien
gacgtttggtttccaggcagcccag

SEQ ID NO: 982757 - DNA, 25 bp, Homo sapien
tctcatggacatataccagaaagga

SEQ ID NO: 982758 - DNA, 25 bp, Homo sapien
ggatcacaagaagcctacccagctg

SEQ ID NO: 982759 - DNA, 25 bp, Homo sapien
acttagtcctgatgaaagagagccc

SEQ ID NO: 982760 - DNA, 25 bp, Homo sapien
agagagcccagactgacgggcagct

SEQ ID NO: 982761 - DNA, 25 bp, Homo sapien
agcctacccagctgaacccagaatg

SEQ ID NO: 982762 - DNA, 25 bp, Homo sapien
tgctccgtaggaggtgaccacatta

SEQ ID NO: 982763 - DNA, 25 bp, Homo sapien
agcatcctcccgtgaaggctgagcc

SEQ ID NO: 982764 - DNA, 25 bp, Homo sapien
caatgtcgtagctcagccaatggcc

SEQ ID NO: 982765 - DNA, 25 bp, Homo sapien
gagcctcttgggcattttttgcctg

SEQ ID NO: 982766 - DNA, 25 bp, Homo sapien
aaaatcgacctgcacagtccacgca

SEQ ID NO: 982767 - DNA, 25 bp, Homo sapien
agagccagcaaaatcgacctgcaca

SEQ ID NO: 982768 - DNA, 25 bp, Homo sapien
aatcgacctgcacagtccacgcagg

SEQ ID NO: 982769 - DNA, 25 bp, Homo sapien
cagcaaaatcgacctgcacagtcca

SEQ ID NO: 982770 - DNA, 25 bp, Homo sapien
caactcctcccgctgtggtcgctgt

SEQ ID NO: 982771 - DNA, 25 bp, Homo sapien
tgtggtcgctgtccttccccagctt

SEQ ID NO: 982772 - DNA, 25 bp, Homo sapien
cctgcccagatacctgtgggtggaa

SEQ ID NO: 982773 - DNA, 25 bp, Homo sapien
ttgtggggacagcctcacgtgtagc

SEQ ID NO: 982774 - DNA, 25 bp, Homo sapien
aacccattaaggagtattccactca

SEQ ID NO: 982775 - DNA, 25 bp, Homo sapien
gatgaaacaaaggaacagtgggtgc

SEQ ID NO: 982776 - DNA, 25 bp, Homo sapien
cccctgctatatggcccacagatga

SEQ ID NO: 982777 - DNA, 25 bp, Homo sapien
gcattaaggaccctgcaaagctgaa

SEQ ID NO: 982778 - DNA, 25 bp, Homo sapien
tgtcacagttgaggatctttactgg

SEQ ID NO: 982779 - DNA, 25 bp, Homo sapien
tggtgtcacagttgaggatctttac

SEQ ID NO: 982780 - DNA, 25 bp, Homo sapien
gatggtgtcacagttgaggatcttt

SEQ ID NO: 982781 - DNA, 25 bp, Homo sapien
gctttgggccggtgggagcaaggca

SEQ ID NO: 982782 - DNA, 25 bp, Homo sapien
tggccctgaatagggcccctgtgtt

SEQ ID NO: 982783 - DNA, 25 bp, Homo sapien
ctgagattctttcgtggccctgaat

SEQ ID NO: 982784 - DNA, 25 bp, Homo sapien
gaggcgactgcatagttcagggcct

SEQ ID NO: 982785 - DNA, 25 bp, Homo sapien
tctttcgtggccctgaatagggccc

SEQ ID NO: 982786 - DNA, 25 bp, Homo sapien
ggtttgcagagccagacagcagtct

SEQ ID NO: 982787 - DNA, 25 bp, Homo sapien
tgagggcacaagatccaaggcagag

SEQ ID NO: 982788 - DNA, 25 bp, Homo sapien
ctaggggtactgatgccaagtggcc

SEQ ID NO: 982789 - DNA, 25 bp, Homo sapien
agtgggatctttctacatcgacggc

SEQ ID NO: 982790 - DNA, 25 bp, Homo sapien
caccttggccttgcgttatacagct

SEQ ID NO: 982791 - DNA, 25 bp, Homo sapien
ttgaacttagagcagaaggcagtgg

SEQ ID NO: 982792 - DNA, 25 bp, Homo sapien
cttgcaccactaggccaccttggcc

SEQ ID NO: 982793 - DNA, 25 bp, Homo sapien
tgcgttatacagcttgggtcacagt

SEQ ID NO: 982794 - DNA, 25 bp, Homo sapien
gcgttgactctaagctgggaggaca

SEQ ID NO: 982795 - DNA, 25 bp, Homo sapien
ctaagctgggaggacagaagagttc

SEQ ID NO: 982796 - DNA, 25 bp, Homo sapien
tgtaaagcgttgactctaagctggg

SEQ ID NO: 982797 - DNA, 25 bp, Homo sapien
cttctgtaaagcgttgactctaagc

SEQ ID NO: 982798 - DNA, 25 bp, Homo sapien
ggctgaagtgtcactcaaatgtgtc

SEQ ID NO: 982799 - DNA, 25 bp, Homo sapien
ctgggtcaagggctttgaccctata

SEQ ID NO: 982800 - DNA, 25 bp, Homo sapien
gctttgaccctataactggtgtggt

SEQ ID NO: 982801 - DNA, 25 bp, Homo sapien
caaatgtgtctgagctactggtccc

SEQ ID NO: 982802 - DNA, 25 bp, Homo sapien
tgcttgatggcacagaacagggaga

SEQ ID NO: 982803 - DNA, 25 bp, Homo sapien
ggaaagtaaaccaattggtcagcat

SEQ ID NO: 982804 - DNA, 25 bp, Homo sapien
agtaaaccaattggtcagcatcttc

SEQ ID NO: 982805 - DNA, 25 bp, Homo sapien
gaggaaagtaaaccaattggtcagc

SEQ ID NO: 982806 - DNA, 25 bp, Homo sapien
cttgaggaacttgtagaggaggaaa

SEQ ID NO: 982807 - DNA, 25 bp, Homo sapien
gcagtcaccgagggaaccaacggaa

SEQ ID NO: 982808 - DNA, 25 bp, Homo sapien
agcagtcaccgagggaaccaacgga

SEQ ID NO: 982809 - DNA, 25 bp, Homo sapien
tgaagtaaacacttctgaaagccaa

SEQ ID NO: 982810 - DNA, 25 bp, Homo sapien
tgctggctcttatatgcagcagact

SEQ ID NO: 982811 - DNA, 25 bp, Homo sapien
atctatctgctggaccaagtgggag

SEQ ID NO: 982812 - DNA, 25 bp, Homo sapien
cttatatgcagcagacttttgcagc

SEQ ID NO: 982813 - DNA, 25 bp, Homo sapien
agtgaggccacgttgccacggtcgc

SEQ ID NO: 982814 - DNA, 25 bp, Homo sapien
cgcatggagaagctacgctgggact

SEQ ID NO: 982815 - DNA, 25 bp, Homo sapien
cacggtcatgatgagtgaggccacg

SEQ ID NO: 982816 - DNA, 25 bp, Homo sapien
cagcacatcagtggcgtactccagc

SEQ ID NO: 982817 - DNA, 25 bp, Homo sapien
gccatctccagggaccatgatgtaa

SEQ ID NO: 982818 - DNA, 25 bp, Homo sapien
ccatctccagggaccatgatgtaaa

SEQ ID NO: 982819 - DNA, 25 bp, Homo sapien
tgccatctccagggaccatgatgta

SEQ ID NO: 982820 - DNA, 25 bp, Homo sapien
ttgaaacctccaactagcccgtcat

SEQ ID NO: 982821 - DNA, 25 bp, Homo sapien
tctggaagctgtaggaaacgtgtgt

SEQ ID NO: 982822 - DNA, 25 bp, Homo sapien
gtcatcagtagctcctatgggtctg

SEQ ID NO: 982823 - DNA, 25 bp, Homo sapien
gcacagaagggctgtcattgaaacc

SEQ ID NO: 982824 - DNA, 25 bp, Homo sapien
gagggcagtcaccagaaggtttagc

SEQ ID NO: 982825 - DNA, 25 bp, Homo sapien
tctgaaagccaactcggatgtctct

SEQ ID NO: 982826 - DNA, 25 bp, Homo sapien
cagctcagactggccggctaaggga

SEQ ID NO: 982827 - DNA, 25 bp, Homo sapien
ccaactcggatgtctctctaaagcc

SEQ ID NO: 982828 - DNA, 25 bp, Homo sapien
tagtgcatcagggtggtgttttggg

SEQ ID NO: 982829 - DNA, 25 bp, Homo sapien
ctggactgctttccagggatccctt

SEQ ID NO: 982830 - DNA, 25 bp, Homo sapien
gactgctttccagggatccctttcc

SEQ ID NO: 982831 - DNA, 25 bp, Homo sapien
ccaagagtttcccagacatctagtg

SEQ ID NO: 982832 - DNA, 25 bp, Homo sapien
aggtaagcaggaaccccagtggctg

SEQ ID NO: 982833 - DNA, 25 bp, Homo sapien
aacactggtttggattaatcaatgg

SEQ ID NO: 982834 - DNA, 25 bp, Homo sapien
tccttcttcacacttccagaggtaa

SEQ ID NO: 982835 - DNA, 25 bp, Homo sapien
cactggtttggattaatcaatggct

SEQ ID NO: 982836 - DNA, 25 bp, Homo sapien
cctggtaatttgaagcaaacgaagg

SEQ ID NO: 982837 - DNA, 25 bp, Homo sapien
ctccagggccctaagagaatcctgg

SEQ ID NO: 982838 - DNA, 25 bp, Homo sapien
ggtaatttgaagcaaacgaaggtga

SEQ ID NO: 982839 - DNA, 25 bp, Homo sapien
ccctaagagaatcctggtaatttga

SEQ ID NO: 982840 - DNA, 25 bp, Homo sapien
gaacagcacccgcatggtgtaagtt

SEQ ID NO: 982841 - DNA, 25 bp, Homo sapien
ccgcatggtgtaagttctatagtcc

SEQ ID NO: 982842 - DNA, 25 bp, Homo sapien
tatagtccaggaacggaatcccggc

SEQ ID NO: 982843 - DNA, 25 bp, Homo sapien
tgtaagttctatagtccaggaacgg

SEQ ID NO: 982844 - DNA, 25 bp, Homo sapien
ggcacgaagagaagcctgtgagatg

SEQ ID NO: 982845 - DNA, 25 bp, Homo sapien
tggcacgaagagaagcctgtgagat

SEQ ID NO: 982846 - DNA, 25 bp, Homo sapien
ctggcacgaagagaagcctgtgaga

SEQ ID NO: 982847 - DNA, 25 bp, Homo sapien
gcacgaagagaagcctgtgagatgg

SEQ ID NO: 982848 - DNA, 25 bp, Homo sapien
tgcttggccaggagagactccccat

SEQ ID NO: 982849 - DNA, 25 bp, Homo sapien
gaagggctttggtttgcaaaatatg

SEQ ID NO: 982850 - DNA, 25 bp, Homo sapien
tggctgaggctgtccacagatctgt

SEQ ID NO: 982851 - DNA, 25 bp, Homo sapien
cccatctgaagatgaagggctttgg

SEQ ID NO: 982852 - DNA, 25 bp, Homo sapien
tatatatcagaagcttaggcccatg

SEQ ID NO: 982853 - DNA, 25 bp, Homo sapien
taacagtcccacaaggcggatgctg

SEQ ID NO: 982854 - DNA, 25 bp, Homo sapien
tccccatcaaaaagagccgtggctg

SEQ ID NO: 982855 - DNA, 25 bp, Homo sapien
aaggagaccccttggcttgggccag

SEQ ID NO: 982856 - DNA, 25 bp, Homo sapien
tagagtgcaaaacccactcaaccag

SEQ ID NO: 982857 - DNA, 25 bp, Homo sapien
tccaggtatggaggctgctctagtg

SEQ ID NO: 982858 - DNA, 25 bp, Homo sapien
gaaatgcgtcatgttaagacacccc

SEQ ID NO: 982859 - DNA, 25 bp, Homo sapien
cagacctcccctcgagtagagtgca

SEQ ID NO: 982860 - DNA, 25 bp, Homo sapien
agacacatatacagcctccagcact

SEQ ID NO: 982861 - DNA, 25 bp, Homo sapien
ctgggacacaggcatagggactata

SEQ ID NO: 982862 - DNA, 25 bp, Homo sapien
atacacatatacaggcgcgcgcgca

SEQ ID NO: 982863 - DNA, 25 bp, Homo sapien
gattctaatcactacaccttcaagg

SEQ ID NO: 982864 - DNA, 25 bp, Homo sapien
cagcgtgaggtcactttcgcgggac

SEQ ID NO: 982865 - DNA, 25 bp, Homo sapien
ttcgcgggacttgcgtttataggca

SEQ ID NO: 982866 - DNA, 25 bp, Homo sapien
atgaaaatgatgaggaggccgccag

SEQ ID NO: 982867 - DNA, 25 bp, Homo sapien
tttataggcaatgagcacggccacg

SEQ ID NO: 982868 - DNA, 25 bp, Homo sapien
tcactttgtgcctgccgatgaggtt

SEQ ID NO: 982869 - DNA, 25 bp, Homo sapien
tgtagttcagcttcacgttgccccc

SEQ ID NO: 982870 - DNA, 25 bp, Homo sapien
cagagcagctggacatctgacacgg

SEQ ID NO: 982871 - DNA, 25 bp, Homo sapien
gacacggtcacggtgcacggcttct

SEQ ID NO: 982872 - DNA, 25 bp, Homo sapien
ctcaaacaccgggttgggatagtag

SEQ ID NO: 982873 - DNA, 25 bp, Homo sapien
catctcagtagcgttcagaacctca

SEQ ID NO: 982874 - DNA, 25 bp, Homo sapien
gggcgcctgacaggtcatctcagta

SEQ ID NO: 982875 - DNA, 25 bp, Homo sapien
tcgggcctctcggtcaggtctgact

SEQ ID NO: 982876 - DNA, 25 bp, Homo sapien
gccacagagtggagtctatgcagta

SEQ ID NO: 982877 - DNA, 25 bp, Homo sapien
gaataggctctatagcttgcaccca

SEQ ID NO: 982878 - DNA, 25 bp, Homo sapien
cacaattgggcactcaaggaatagg

SEQ ID NO: 982879 - DNA, 25 bp, Homo sapien
tagtgggcctccctggatgtcatcg

SEQ ID NO: 982880 - DNA, 25 bp, Homo sapien
cagctccggttttgcccatagtggg

SEQ ID NO: 982881 - DNA, 25 bp, Homo sapien
gggcagcctccatgaaccccatcag

SEQ ID NO: 982882 - DNA, 25 bp, Homo sapien
gaagcaacgtgttgcatgggcagcc

SEQ ID NO: 982883 - DNA, 25 bp, Homo sapien
ccatgaaccccatcagccctacact

SEQ ID NO: 982884 - DNA, 25 bp, Homo sapien
gcaacgtgttgcatgggcagcctcc

SEQ ID NO: 982885 - DNA, 25 bp, Homo sapien
atctgggggttctgtatgaggtcca

SEQ ID NO: 982886 - DNA, 25 bp, Homo sapien
ccctccatgcttggcacggatctgg

SEQ ID NO: 982887 - DNA, 25 bp, Homo sapien
cccatacggcgatgggtgtgtttcc

SEQ ID NO: 982888 - DNA, 25 bp, Homo sapien
ctgtatgaggtccaggtgggtcccc

SEQ ID NO: 982889 - DNA, 25 bp, Homo sapien
gaaagaaggagatgtgtaaatgata

SEQ ID NO: 982890 - DNA, 25 bp, Homo sapien
aaggagatgtgtaaatgataagttc

SEQ ID NO: 982891 - DNA, 25 bp, Homo sapien
taaatgataagttcaggaagagcaa

SEQ ID NO: 982892 - DNA, 25 bp, Homo sapien
gatgtgtaaatgataagttcaggaa

SEQ ID NO: 982893 - DNA, 25 bp, Homo sapien
ccccagggcaatcgttctataattt

SEQ ID NO: 982894 - DNA, 25 bp, Homo sapien
cgaaatgcttttggactcgggtctc

SEQ ID NO: 982895 - DNA, 25 bp, Homo sapien
gcaaatgtgaatgcaagtgcgaaat

SEQ ID NO: 982896 - DNA, 25 bp, Homo sapien
tcttggaggcttcgatcaggctgag

SEQ ID NO: 982897 - DNA, 25 bp, Homo sapien
ttcaaaagaaacctggatgccagtg

SEQ ID NO: 982898 - DNA, 25 bp, Homo sapien
tgcctatccttagggcagctgagaa

SEQ ID NO: 982899 - DNA, 25 bp, Homo sapien
tactgtagtggactgtgtcctccag

SEQ ID NO: 982900 - DNA, 25 bp, Homo sapien
cctaggagcttcatcttgtgtaacc

SEQ ID NO: 982901 - DNA, 25 bp, Homo sapien
ccctcctagtgggagcatgatgcag

SEQ ID NO: 982902 - DNA, 25 bp, Homo sapien
catgatgcaggaatggcagctgagt

SEQ ID NO: 982903 - DNA, 25 bp, Homo sapien
ctccctcctagtgggagcatgatgc

SEQ ID NO: 982904 - DNA, 25 bp, Homo sapien
tgagtgccagttagggtgacacctc

SEQ ID NO: 982905 - DNA, 25 bp, Homo sapien
gtcttccacatactgaaagaccagg

SEQ ID NO: 982906 - DNA, 25 bp, Homo sapien
ggtcctggtggatcttggccctgtc

SEQ ID NO: 982907 - DNA, 25 bp, Homo sapien
ttctggctcaatccgcacgatggtg

SEQ ID NO: 982908 - DNA, 25 bp, Homo sapien
gcagacaatgtaggatggagatcgc

SEQ ID NO: 982909 - DNA, 25 bp, Homo sapien
gcttcagatctgagagagtcagtgt

SEQ ID NO: 982910 - DNA, 25 bp, Homo sapien
ttccaaacatcaccaccacgttgct

SEQ ID NO: 982911 - DNA, 25 bp, Homo sapien
caccacgttgcttccggcattcagg

SEQ ID NO: 982912 - DNA, 25 bp, Homo sapien
tcacttgggtccctccggacatggg

SEQ ID NO: 982913 - DNA, 25 bp, Homo sapien
tgcaagctgcctggtagatgagaag

SEQ ID NO: 982914 - DNA, 25 bp, Homo sapien
ggtagatgagaaggccatgagggct

SEQ ID NO: 982915 - DNA, 25 bp, Homo sapien
agaaggccatgagggctcggagact

SEQ ID NO: 982916 - DNA, 25 bp, Homo sapien
ctgcctggtagatgagaaggccatg

SEQ ID NO: 982917 - DNA, 25 bp, Homo sapien
gaaagtgtgatagatgggggttctg

SEQ ID NO: 982918 - DNA, 25 bp, Homo sapien
tgtcccttctcaaccccctgcggag

SEQ ID NO: 982919 - DNA, 25 bp, Homo sapien
ctggaaagtgtgatagatgggggtt

SEQ ID NO: 982920 - DNA, 25 bp, Homo sapien
agtgtgatagatgggggttctgtcc

SEQ ID NO: 982921 - DNA, 25 bp, Homo sapien
tggatatccacagctcaggcctctg

SEQ ID NO: 982922 - DNA, 25 bp, Homo sapien
tgggtcccgagcacaactttgacga

SEQ ID NO: 982923 - DNA, 25 bp, Homo sapien
ctttgacgaataaggaggatatggc

SEQ ID NO: 982924 - DNA, 25 bp, Homo sapien
cattcgcagactgaggactgggtcc

SEQ ID NO: 982925 - DNA, 25 bp, Homo sapien
acacagccacgcagatctccacgaa

SEQ ID NO: 982926 - DNA, 25 bp, Homo sapien
atagagctgtgaggaccgggccatg

SEQ ID NO: 982927 - DNA, 25 bp, Homo sapien
tgaattcaggccgacacacagccac

SEQ ID NO: 982928 - DNA, 25 bp, Homo sapien
cacgcagatctccacgaagcctgca

SEQ ID NO: 982929 - DNA, 25 bp, Homo sapien
gatgtaaccatccactaaagggctg

SEQ ID NO: 982930 - DNA, 25 bp, Homo sapien
gatagtgaccttggtgcccccttcc

SEQ ID NO: 982931 - DNA, 25 bp, Homo sapien
gcgatgtcgcgaaattccaggccca

SEQ ID NO: 982932 - DNA, 25 bp, Homo sapien
taaagggctgcactccacgccagca

SEQ ID NO: 982933 - DNA, 25 bp, Homo sapien
agtggcttgaagtcaccaagggcac

SEQ ID NO: 982934 - DNA, 25 bp, Homo sapien
gagtccctgagtggcttgaagtcac

SEQ ID NO: 982935 - DNA, 25 bp, Homo sapien
gtccctgagtggcttgaagtcacca

SEQ ID NO: 982936 - DNA, 25 bp, Homo sapien
ctgagtggcttgaagtcaccaaggg

SEQ ID NO: 982937 - DNA, 25 bp, Homo sapien
aatcctgaccagcatccgcagtggt

SEQ ID NO: 982938 - DNA, 25 bp, Homo sapien
gcttcataatcctgaccagcatccg

SEQ ID NO: 982939 - DNA, 25 bp, Homo sapien
cagcatccgcagtggtaaagaggta

SEQ ID NO: 982940 - DNA, 25 bp, Homo sapien
cgcagtggtaaagaggtattgagca

SEQ ID NO: 982941 - DNA, 25 bp, Homo sapien
acagcccgcagctctcacgcatggc

SEQ ID NO: 982942 - DNA, 25 bp, Homo sapien
tggcaccagccacatgcgaagtctg

SEQ ID NO: 982943 - DNA, 25 bp, Homo sapien
tgcacttgcttttggcaccagacag

SEQ ID NO: 982944 - DNA, 25 bp, Homo sapien
cacgcatggctccacacttgtagag

SEQ ID NO: 982945 - DNA, 25 bp, Homo sapien
ccacgggcaggttgttgatctccat

SEQ ID NO: 982946 - DNA, 25 bp, Homo sapien
agtgcccattccacacgactgtcaa

SEQ ID NO: 982947 - DNA, 25 bp, Homo sapien
cgactgtcaactccacgggcaggtt

SEQ ID NO: 982948 - DNA, 25 bp, Homo sapien
tctgagctgggttgtcaatgttgaa

SEQ ID NO: 982949 - DNA, 25 bp, Homo sapien
ttttgtgcgtgttgaggaaacgact

SEQ ID NO: 982950 - DNA, 25 bp, Homo sapien
gcagttttgtgcgtgttgaggaaac

SEQ ID NO: 982951 - DNA, 25 bp, Homo sapien
gaagcaggtaggcagttttgtgcgt

SEQ ID NO: 982952 - DNA, 25 bp, Homo sapien
ttgtgcgtgttgaggaaacgactgc

SEQ ID NO: 982953 - DNA, 25 bp, Homo sapien
gggcctggtttggcagtgggcaggg

SEQ ID NO: 982954 - DNA, 25 bp, Homo sapien
ctggggcctggtttggcagtgggca

SEQ ID NO: 982955 - DNA, 25 bp, Homo sapien
tggggcctggtttggcagtgggcag

SEQ ID NO: 982956 - DNA, 25 bp, Homo sapien
ggggcctggtttggcagtgggcagg

SEQ ID NO: 982957 - DNA, 25 bp, Homo sapien
ccaggatcttgtccactcgcagcag

SEQ ID NO: 982958 - DNA, 25 bp, Homo sapien
tcgctgctcgctgccctgaatgttg

SEQ ID NO: 982959 - DNA, 25 bp, Homo sapien
gttgaggatgcattcgtagccacgc

SEQ ID NO: 982960 - DNA, 25 bp, Homo sapien
gtgttctggcactgtacgctggagc

SEQ ID NO: 982961 - DNA, 25 bp, Homo sapien
tctgcccctggaatgtgagtcttga

SEQ ID NO: 982962 - DNA, 25 bp, Homo sapien
tagagactgcctctgcgggctaggc

SEQ ID NO: 982963 - DNA, 25 bp, Homo sapien
cacagaccatgtgagaagctccgca

SEQ ID NO: 982964 - DNA, 25 bp, Homo sapien
tgaaaaccttccctatgcaatctgg

SEQ ID NO: 982965 - DNA, 25 bp, Homo sapien
tctggggcatgccaagacagatggc

SEQ ID NO: 982966 - DNA, 25 bp, Homo sapien
tgttctttctgatggtgctttgtca

SEQ ID NO: 982967 - DNA, 25 bp, Homo sapien
tcatcaaaagcatgacgcacgtgtt

SEQ ID NO: 982968 - DNA, 25 bp, Homo sapien
catctgtggcactgtctggggcatg

SEQ ID NO: 982969 - DNA, 25 bp, Homo sapien
aatatctccctgtgccattgcgagt

SEQ ID NO: 982970 - DNA, 25 bp, Homo sapien
cagagcaaacatgagccaaatatct

SEQ ID NO: 982971 - DNA, 25 bp, Homo sapien
cagttaggcaactggcagctgtccc

SEQ ID NO: 982972 - DNA, 25 bp, Homo sapien
tgtgccattgcgagttacaccataa

SEQ ID NO: 982973 - DNA, 25 bp, Homo sapien
ttagtgtgatctatgacaggctggt

SEQ ID NO: 982974 - DNA, 25 bp, Homo sapien
ggttcatagagagagcaaagtaata

SEQ ID NO: 982975 - DNA, 25 bp, Homo sapien
cacagtgcccaatacaaaaatgtaa

SEQ ID NO: 982976 - DNA, 25 bp, Homo sapien
gctgttccccaagtttataatgtca

SEQ ID NO: 982977 - DNA, 25 bp, Homo sapien
tattctctggagtaggcaggctggt

SEQ ID NO: 982978 - DNA, 25 bp, Homo sapien
ttcctgagagcctccttggtgagct

SEQ ID NO: 982979 - DNA, 25 bp, Homo sapien
gccctccttgcaaagcctctctagt

SEQ ID NO: 982980 - DNA, 25 bp, Homo sapien
ggctggttgaacttcaagagaagag

SEQ ID NO: 982981 - DNA, 25 bp, Homo sapien
gggctgttatcataatgccatcatt

SEQ ID NO: 982982 - DNA, 25 bp, Homo sapien
gctctggcagctgatctgaaggccc

SEQ ID NO: 982983 - DNA, 25 bp, Homo sapien
caagttatttgcaggtttcagacca

SEQ ID NO: 982984 - DNA, 25 bp, Homo sapien
tccccagccttggtaggtcaaccag

SEQ ID NO: 982985 - DNA, 25 bp, Homo sapien
ggaggctcctcttctatacttaaaa

SEQ ID NO: 982986 - DNA, 25 bp, Homo sapien
tcagtttactcttgggcctctccgc

SEQ ID NO: 982987 - DNA, 25 bp, Homo sapien
ctggccacatggtcatgacacctgt

SEQ ID NO: 982988 - DNA, 25 bp, Homo sapien
gccacatggtcatgacacctgtgtg

SEQ ID NO: 982989 - DNA, 25 bp, Homo sapien
taaaggggtctgaaagatacacgca

SEQ ID NO: 982990 - DNA, 25 bp, Homo sapien
tgacacctgtgtggtgtgttaaagg

SEQ ID NO: 982991 - DNA, 25 bp, Homo sapien
gtctgtaacagaacctccagggctg

SEQ ID NO: 982992 - DNA, 25 bp, Homo sapien
cctttgtctgtaacagaacctccag

SEQ ID NO: 982993 - DNA, 25 bp, Homo sapien
gttggagtgacctggaatacacctt

SEQ ID NO: 982994 - DNA, 25 bp, Homo sapien
ctggtgtgtggaggatccttctggt

SEQ ID NO: 982995 - DNA, 25 bp, Homo sapien
gtcatgggtgcagacatgccggtat

SEQ ID NO: 982996 - DNA, 25 bp, Homo sapien
tatttacaccagtggcagcggtatg

SEQ ID NO: 982997 - DNA, 25 bp, Homo sapien
agcggtatggactctccacgcagga

SEQ ID NO: 982998 - DNA, 25 bp, Homo sapien
gacatgccggtatttacaccagtgg

SEQ ID NO: 982999 - DNA, 25 bp, Homo sapien
catacaggctatgcccttcacggta

SEQ ID NO: 983000 - DNA, 25 bp, Homo sapien
ttcacggtatagatgaccactgccc

SEQ ID NO: 983001 - DNA, 25 bp, Homo sapien
gctgctgtctcactacgatggctcc

SEQ ID NO: 983002 - DNA, 25 bp, Homo sapien
gctgacatctctcggacagtcctgg

SEQ ID NO: 983003 - DNA, 25 bp, Homo sapien
aatatttgtgtgacgcccttggaag

SEQ ID NO: 983004 - DNA, 25 bp, Homo sapien
gcttctcagctggtccggctacaga

SEQ ID NO: 983005 - DNA, 25 bp, Homo sapien
tgctcctgccacgtcagttggtaaa

SEQ ID NO: 983006 - DNA, 25 bp, Homo sapien
gatttccctgttgatagaggacact

SEQ ID NO: 983007 - DNA, 25 bp, Homo sapien
gttagaccacttgccccaatcctgg

SEQ ID NO: 983008 - DNA, 25 bp, Homo sapien
aattgagtggttagaccacttgccc

SEQ ID NO: 983009 - DNA, 25 bp, Homo sapien
gagctgagcatgcaattgagtggtt

SEQ ID NO: 983010 - DNA, 25 bp, Homo sapien
gagtggttagaccacttgccccaat

SEQ ID NO: 983011 - DNA, 25 bp, Homo sapien
ttctctgcccatggagcttgctctc

SEQ ID NO: 983012 - DNA, 25 bp, Homo sapien
gaattgagttagaaggattgatgtc

SEQ ID NO: 983013 - DNA, 25 bp, Homo sapien
gatgcaccaccccacaacagatggt

SEQ ID NO: 983014 - DNA, 25 bp, Homo sapien
gccccactccataagttctcatttt

SEQ ID NO: 983015 - DNA, 25 bp, Homo sapien
tgaagctgtacgacatggtggtccc

SEQ ID NO: 983016 - DNA, 25 bp, Homo sapien
tgctggcgaaggtcatgccggtctc

SEQ ID NO: 983017 - DNA, 25 bp, Homo sapien
gaattgtggacgctgcaattgtaga

SEQ ID NO: 983018 - DNA, 25 bp, Homo sapien
ggtctcctttgatttgagctgaagc

SEQ ID NO: 983019 - DNA, 25 bp, Homo sapien
ggtcctcaaaggtgcagttgacgcc

SEQ ID NO: 983020 - DNA, 25 bp, Homo sapien
cattctctgtgatgatccggggcac

SEQ ID NO: 983021 - DNA, 25 bp, Homo sapien
gttgacgccagctgacagctccggg

SEQ ID NO: 983022 - DNA, 25 bp, Homo sapien
tccttggctgcaggggagtagcact

SEQ ID NO: 983023 - DNA, 25 bp, Homo sapien
gatattgttgggatggaccgtcagc

SEQ ID NO: 983024 - DNA, 25 bp, Homo sapien
cgaggcaaacctgcggggctccttg

SEQ ID NO: 983025 - DNA, 25 bp, Homo sapien
gacacactgcttcatctccgaggca

SEQ ID NO: 983026 - DNA, 25 bp, Homo sapien
gcacgttgtactgagagacggagat

SEQ ID NO: 983027 - DNA, 25 bp, Homo sapien
cagactaagctggttcttctcgcca

SEQ ID NO: 983028 - DNA, 25 bp, Homo sapien
gtagagcctacggagctctacctcc

SEQ ID NO: 983029 - DNA, 25 bp, Homo sapien
cagaccccttgctgcagactaagct

SEQ ID NO: 983030 - DNA, 25 bp, Homo sapien
tgtgttgggacaaagacgcaccctg

SEQ ID NO: 983031 - DNA, 25 bp, Homo sapien
tcctctgcgaggactccattacctt

SEQ ID NO: 983032 - DNA, 25 bp, Homo sapien
cagctcctctgcgaggactccatta

SEQ ID NO: 983033 - DNA, 25 bp, Homo sapien
cgaggactccattaccttcagccat

SEQ ID NO: 983034 - DNA, 25 bp, Homo sapien
tctgcgaggactccattaccttcag

SEQ ID NO: 983035 - DNA, 25 bp, Homo sapien
agacttcccaacagtgggctggctc

SEQ ID NO: 983036 - DNA, 25 bp, Homo sapien
aagacttcccaacagtgggctggct

SEQ ID NO: 983037 - DNA, 25 bp, Homo sapien
gaagacttcccaacagtgggctggc

SEQ ID NO: 983038 - DNA, 25 bp, Homo sapien
ctgtgatagggcgaaggcagggtgg

SEQ ID NO: 983039 - DNA, 25 bp, Homo sapien
aggagatagctgtgatagggcgaag

SEQ ID NO: 983040 - DNA, 25 bp, Homo sapien
atagctgtgatagggcgaaggcagg

SEQ ID NO: 983041 - DNA, 25 bp, Homo sapien
aggcagggtgggcttgtacgctttc

SEQ ID NO: 983042 - DNA, 25 bp, Homo sapien
tcagaatgagtcagctcaggaacaa

SEQ ID NO: 983043 - DNA, 25 bp, Homo sapien
cagaatgagtcagctcaggaacaag

SEQ ID NO: 983044 - DNA, 25 bp, Homo sapien
ctcagggccacctcaatacttagca

SEQ ID NO: 983045 - DNA, 25 bp, Homo sapien
tacttagcattgctgaagctgtcat

SEQ ID NO: 983046 - DNA, 25 bp, Homo sapien
ccagggggctctccttggtcataac

SEQ ID NO: 983047 - DNA, 25 bp, Homo sapien
cagggggctctccttggtcataact

SEQ ID NO: 983048 - DNA, 25 bp, Homo sapien
tccttgagcaacgaggtgccagcag

SEQ ID NO: 983049 - DNA, 25 bp, Homo sapien
tgcttcaatgcgctggctccactgt

SEQ ID NO: 983050 - DNA, 25 bp, Homo sapien
cactgtggctccttgagcaacgagg

SEQ ID NO: 983051 - DNA, 25 bp, Homo sapien
caaggcatgtgaacttgagtccact

SEQ ID NO: 983052 - DNA, 25 bp, Homo sapien
cgtgcaggctgagggcccccttcat

SEQ ID NO: 983053 - DNA, 25 bp, Homo sapien
gctgagggcccccttcatgaactgc

SEQ ID NO: 983054 - DNA, 25 bp, Homo sapien
tgaactgcccagacttcaccttggc

SEQ ID NO: 983055 - DNA, 25 bp, Homo sapien
ggggcaggcgcccaaaattcatgtc

SEQ ID NO: 983056 - DNA, 25 bp, Homo sapien
aggaggcaggtatgatgttacagaa

SEQ ID NO: 983057 - DNA, 25 bp, Homo sapien
gacaggaggcaggtatgatgttaca

SEQ ID NO: 983058 - DNA, 25 bp, Homo sapien
cttgacaggaggcaggtatgatgtt

SEQ ID NO: 983059 - DNA, 25 bp, Homo sapien
caggtatgatgttacagaagggtaa

SEQ ID NO: 983060 - DNA, 25 bp, Homo sapien
gggttctcacagtctctctggtgcc

SEQ ID NO: 983061 - DNA, 25 bp, Homo sapien
gttcacagggctccgtgctctgtgg

SEQ ID NO: 983062 - DNA, 25 bp, Homo sapien
tctggtgccttctccaagccttgga

SEQ ID NO: 983063 - DNA, 25 bp, Homo sapien
gccttggagcccctctgttcacagg

SEQ ID NO: 983064 - DNA, 25 bp, Homo sapien
tgggcagagaccaaagctgacatgg

SEQ ID NO: 983065 - DNA, 25 bp, Homo sapien
gccactgggcatggagtgtcaggga

SEQ ID NO: 983066 - DNA, 25 bp, Homo sapien
cagagaccaaagctgacatggaaat

SEQ ID NO: 983067 - DNA, 25 bp, Homo sapien
ggcagagaccaaagctgacatggaa

SEQ ID NO: 983068 - DNA, 25 bp, Homo sapien
tgcagacccaaaccagaaaatcctt

SEQ ID NO: 983069 - DNA, 25 bp, Homo sapien
ggtgctacacacttcaactgcagac

SEQ ID NO: 983070 - DNA, 25 bp, Homo sapien
tgggagggtcctcaggtgctacaca

SEQ ID NO: 983071 - DNA, 25 bp, Homo sapien
gtagatgttaaggagatgtggaatc

SEQ ID NO: 983072 - DNA, 25 bp, Homo sapien
cttgtttatgatttcggggccagta

SEQ ID NO: 983073 - DNA, 25 bp, Homo sapien
aagggacagcatatatcttgtttat

SEQ ID NO: 983074 - DNA, 25 bp, Homo sapien
tgtttatgatttcggggccagtaag

SEQ ID NO: 983075 - DNA, 25 bp, Homo sapien
ctaaagggacagcatatatcttgtt

SEQ ID NO: 983076 - DNA, 25 bp, Homo sapien
aggcactcgccgcagctctgatact

SEQ ID NO: 983077 - DNA, 25 bp, Homo sapien
gccaaggcactcgccgcagctctga

SEQ ID NO: 983078 - DNA, 25 bp, Homo sapien
gcactcgccgcagctctgatactga

SEQ ID NO: 983079 - DNA, 25 bp, Homo sapien
caaggcactcgccgcagctctgata

SEQ ID NO: 983080 - DNA, 25 bp, Homo sapien
caaaactttatattagctttcacca

SEQ ID NO: 983081 - DNA, 25 bp, Homo sapien
ccacactcttttcatgactagaggc

SEQ ID NO: 983082 - DNA, 25 bp, Homo sapien
accagccgcctgctaatgtaaaatg

SEQ ID NO: 983083 - DNA, 25 bp, Homo sapien
tcttttcatgactagaggcttcctc

SEQ ID NO: 983084 - DNA, 25 bp, Homo sapien
gagagcaaagggtcccaaatcagat

SEQ ID NO: 983085 - DNA, 25 bp, Homo sapien
tggcctagcacagcaaggcaatgaa

SEQ ID NO: 983086 - DNA, 25 bp, Homo sapien
aaaacaatggcctagcacagcaagg

SEQ ID NO: 983087 - DNA, 25 bp, Homo sapien
cagattttaagtcatggccttggtc

SEQ ID NO: 983088 - DNA, 25 bp, Homo sapien
ctggtttctctgatatttcgaaaga

SEQ ID NO: 983089 - DNA, 25 bp, Homo sapien
tgttccacagatatagcatgcagtc

SEQ ID NO: 983090 - DNA, 25 bp, Homo sapien
tggaggaatttttacagcttctgag

SEQ ID NO: 983091 - DNA, 25 bp, Homo sapien
tctgatatttcgaaagatgctttcc

SEQ ID NO: 983092 - DNA, 25 bp, Homo sapien
tagcaaacggcagtagctgggaagc

SEQ ID NO: 983093 - DNA, 25 bp, Homo sapien
gagctctcagcgtgctttctgcaga

SEQ ID NO: 983094 - DNA, 25 bp, Homo sapien
tgccgacgccggaatcatcaacata

SEQ ID NO: 983095 - DNA, 25 bp, Homo sapien
tctgcagagcgtcgagaaatcaccc

SEQ ID NO: 983096 - DNA, 25 bp, Homo sapien
ggtgtggctgagttcaggggctgag

SEQ ID NO: 983097 - DNA, 25 bp, Homo sapien
acgggcagatcaccaagtagcagcc

SEQ ID NO: 983098 - DNA, 25 bp, Homo sapien
tacgggcagatcaccaagtagcagc

SEQ ID NO: 983099 - DNA, 25 bp, Homo sapien
ctacgggcagatcaccaagtagcag

SEQ ID NO: 983100 - DNA, 25 bp, Homo sapien
gaaagacaaagagggccctctggtg

SEQ ID NO: 983101 - DNA, 25 bp, Homo sapien
cattgcaggatcagggccaagcctg

SEQ ID NO: 983102 - DNA, 25 bp, Homo sapien
tctgggtcatcctggacacaggcaa

SEQ ID NO: 983103 - DNA, 25 bp, Homo sapien
tctactgaacttatatgagcttcca

SEQ ID NO: 983104 - DNA, 25 bp, Homo sapien
cagcctccagacacaattaaacatg

SEQ ID NO: 983105 - DNA, 25 bp, Homo sapien
tccagacacaattaaacatggggca

SEQ ID NO: 983106 - DNA, 25 bp, Homo sapien
ctccagacacaattaaacatggggc

SEQ ID NO: 983107 - DNA, 25 bp, Homo sapien
gcctccagacacaattaaacatggg

SEQ ID NO: 983108 - DNA, 25 bp, Homo sapien
aagcctgcttcggatgttgctggga

SEQ ID NO: 983109 - DNA, 25 bp, Homo sapien
tcagggcaggtagcatgccatacgt

SEQ ID NO: 983110 - DNA, 25 bp, Homo sapien
gccatacgtggaattcattttcgaa

SEQ ID NO: 983111 - DNA, 25 bp, Homo sapien
aaaacggatgtgacaattcagggca

SEQ ID NO: 983112 - DNA, 25 bp, Homo sapien
tgccaggtccctaacacaaggtgtc

SEQ ID NO: 983113 - DNA, 25 bp, Homo sapien
ggtcacgcagcctgtgaatggcagt

SEQ ID NO: 983114 - DNA, 25 bp, Homo sapien
gtgtctgtgaccaacggctgctcta

SEQ ID NO: 983115 - DNA, 25 bp, Homo sapien
taactctctcgtgatgagctgcagc

SEQ ID NO: 983116 - DNA, 25 bp, Homo sapien
cttcctgtcccctgtgatcagtgac

SEQ ID NO: 983117 - DNA, 25 bp, Homo sapien
gaagtgaaagtcctgtgttctcaat

SEQ ID NO: 983118 - DNA, 25 bp, Homo sapien
gcttagaccttttgtgatgcttgga

SEQ ID NO: 983119 - DNA, 25 bp, Homo sapien
cactcatgtgcacaattctgtagga

SEQ ID NO: 983120 - DNA, 25 bp, Homo sapien
tgtgggataaggtgtgcattcccaa

SEQ ID NO: 983121 - DNA, 25 bp, Homo sapien
agggctcggtacctgtgggataagg

SEQ ID NO: 983122 - DNA, 25 bp, Homo sapien
gggataaggtgtgcattcccaaggc

SEQ ID NO: 983123 - DNA, 25 bp, Homo sapien
ataaggtgtgcattcccaaggccct

SEQ ID NO: 983124 - DNA, 25 bp, Homo sapien
cctactcagccccttggtgaggagt

SEQ ID NO: 983125 - DNA, 25 bp, Homo sapien
gagtccttgtgcagtgaccaaccta

SEQ ID NO: 983126 - DNA, 25 bp, Homo sapien
tctgccctagtgcacaagacatggc

SEQ ID NO: 983127 - DNA, 25 bp, Homo sapien
tgaccaaatagatcaacctctcagg

SEQ ID NO: 983128 - DNA, 25 bp, Homo sapien
tattcatctccgtcattaggctgtg

SEQ ID NO: 983129 - DNA, 25 bp, Homo sapien
tgatggatcggagcccagatgctct

SEQ ID NO: 983130 - DNA, 25 bp, Homo sapien
tgtaacttgattttcagtggacccc

SEQ ID NO: 983131 - DNA, 25 bp, Homo sapien
gatgctctgaaacacattgtgctgg

SEQ ID NO: 983132 - DNA, 25 bp, Homo sapien
tctcacttcctttatggcatgtgac

SEQ ID NO: 983133 - DNA, 25 bp, Homo sapien
ctgagccttacatccaggcagcctg

SEQ ID NO: 983134 - DNA, 25 bp, Homo sapien
ggcatgtgacccctcgtaagcttcc

SEQ ID NO: 983135 - DNA, 25 bp, Homo sapien
cctcgtaagcttccagtgctttatg

SEQ ID NO: 983136 - DNA, 25 bp, Homo sapien
caaggctagttggagtgtggctggc

SEQ ID NO: 983137 - DNA, 25 bp, Homo sapien
gctggcgggagggtcatgggtctta

SEQ ID NO: 983138 - DNA, 25 bp, Homo sapien
catgggtcttatttacataggagca

SEQ ID NO: 983139 - DNA, 25 bp, Homo sapien
cataggagcagaggggatcacccca

SEQ ID NO: 983140 - DNA, 25 bp, Homo sapien
cccttcttccgtgtccgtgggacat

SEQ ID NO: 983141 - DNA, 25 bp, Homo sapien
ccccagtacttgtggcagctctgct

SEQ ID NO: 983142 - DNA, 25 bp, Homo sapien
tttgcagctgccccagtacttgtgg

SEQ ID NO: 983143 - DNA, 25 bp, Homo sapien
ctgccccagtacttgtggcagctct

SEQ ID NO: 983144 - DNA, 25 bp, Homo sapien
tcagatttgggtgtatgagagcaag

SEQ ID NO: 983145 - DNA, 25 bp, Homo sapien
gtcagatttgggtgtatgagagcaa

SEQ ID NO: 983146 - DNA, 25 bp, Homo sapien
ttagcaataattgccgtgcctggga

SEQ ID NO: 983147 - DNA, 25 bp, Homo sapien
gcaataattgccgtgcctgggactc

SEQ ID NO: 983148 - DNA, 25 bp, Homo sapien
gagagagctgccacatgtgaatttc

SEQ ID NO: 983149 - DNA, 25 bp, Homo sapien
ttcttttagcaataattgccgtgcc

SEQ ID NO: 983150 - DNA, 25 bp, Homo sapien
ttgttgaaagtggaagcattggaac

SEQ ID NO: 983151 - DNA, 25 bp, Homo sapien
aattgttgaaagtggaagcattgga

SEQ ID NO: 983152 - DNA, 25 bp, Homo sapien
cttcatggagcagatgtcatccact

SEQ ID NO: 983153 - DNA, 25 bp, Homo sapien
tggagcagatgtcatccactctgag

SEQ ID NO: 983154 - DNA, 25 bp, Homo sapien
tccacatcatagctcttcttctcta

SEQ ID NO: 983155 - DNA, 25 bp, Homo sapien
ctgctctacctccacatcatagctc

SEQ ID NO: 983156 - DNA, 25 bp, Homo sapien
acctccacatcatagctcttcttct

SEQ ID NO: 983157 - DNA, 25 bp, Homo sapien
cacatcatagctcttcttctctatt

SEQ ID NO: 983158 - DNA, 25 bp, Homo sapien
tgctataaagcaaggtggccctcgc

SEQ ID NO: 983159 - DNA, 25 bp, Homo sapien
tatcctgggcaatgcctatgggcag

SEQ ID NO: 983160 - DNA, 25 bp, Homo sapien
tactggtttacgctggaaggagcca

SEQ ID NO: 983161 - DNA, 25 bp, Homo sapien
tcaggcctgagtaatatgctataaa

SEQ ID NO: 983162 - DNA, 25 bp, Homo sapien
caaggacttgagcaccggcagctca

SEQ ID NO: 983163 - DNA, 25 bp, Homo sapien
cacaggcgtccgcatcctgctttat

SEQ ID NO: 983164 - DNA, 25 bp, Homo sapien
gagcaccggcagctcagaaggacag

SEQ ID NO: 983165 - DNA, 25 bp, Homo sapien
cctgctttatagcaaggacttgagc

SEQ ID NO: 983166 - DNA, 25 bp, Homo sapien
taatccttaccctgcatgtcgagag

SEQ ID NO: 983167 - DNA, 25 bp, Homo sapien
catttcacaggtgcacacggaggct

SEQ ID NO: 983168 - DNA, 25 bp, Homo sapien
aaagaagatactcgccttgtctggg

SEQ ID NO: 983169 - DNA, 25 bp, Homo sapien
agtgtacccggaacatggcatttgc

SEQ ID NO: 983170 - DNA, 25 bp, Homo sapien
gcacagtgggtcccagtatggctga

SEQ ID NO: 983171 - DNA, 25 bp, Homo sapien
gtatggctgaagtcgggagaacggg

SEQ ID NO: 983172 - DNA, 25 bp, Homo sapien
gggaatgagaccattcccaagccat

SEQ ID NO: 983173 - DNA, 25 bp, Homo sapien
gaacggggagtctgacaacaggaga

SEQ ID NO: 983174 - DNA, 25 bp, Homo sapien
gctcttggggagggcagagctcctg

SEQ ID NO: 983175 - DNA, 25 bp, Homo sapien
tcatcgagctcttggggagggcaga

SEQ ID NO: 983176 - DNA, 25 bp, Homo sapien
catcgagctcttggggagggcagag

SEQ ID NO: 983177 - DNA, 25 bp, Homo sapien
cttggggagggcagagctcctgtga

SEQ ID NO: 983178 - DNA, 25 bp, Homo sapien
cacaagccccgtgggtggcataatg

SEQ ID NO: 983179 - DNA, 25 bp, Homo sapien
ggtccaggcagaacaatccagactc

SEQ ID NO: 983180 - DNA, 25 bp, Homo sapien
agaacaatccagactctgtcagcag

SEQ ID NO: 983181 - DNA, 25 bp, Homo sapien
tgggtggcataatgtggaattcatc

SEQ ID NO: 983182 - DNA, 25 bp, Homo sapien
tattcatgggatagaggggcagctc

SEQ ID NO: 983183 - DNA, 25 bp, Homo sapien
gccactcagagctaacgcatacata

SEQ ID NO: 983184 - DNA, 25 bp, Homo sapien
ggcagaggtacagcagtgctgcacc

SEQ ID NO: 983185 - DNA, 25 bp, Homo sapien
gggcagctcccgagaatgacccatc

SEQ ID NO: 983186 - DNA, 25 bp, Homo sapien
ctgcaccgtctcatactggagggcg

SEQ ID NO: 983187 - DNA, 25 bp, Homo sapien
tctcatactggagggcgttgcccct

SEQ ID NO: 983188 - DNA, 25 bp, Homo sapien
agggcgttgcccctgggtccatcca

SEQ ID NO: 983189 - DNA, 25 bp, Homo sapien
acatgatgtagagttgctcgtggtc

SEQ ID NO: 983190 - DNA, 25 bp, Homo sapien
gtgagttcagatcctgcactgccca

SEQ ID NO: 983191 - DNA, 25 bp, Homo sapien
gctcatctggcctctggatgttggc

SEQ ID NO: 983192 - DNA, 25 bp, Homo sapien
tgatgctcatctggcctctggatgt

SEQ ID NO: 983193 - DNA, 25 bp, Homo sapien
atgatgctcatctggcctctggatg

SEQ ID NO: 983194 - DNA, 25 bp, Homo sapien
tctggcctctggatgttggccaagg

SEQ ID NO: 983195 - DNA, 25 bp, Homo sapien
aatgcccactgttccagagcctctc

SEQ ID NO: 983196 - DNA, 25 bp, Homo sapien
ttgaatgcccactgttccagagcct

SEQ ID NO: 983197 - DNA, 25 bp, Homo sapien
gaatgcccactgttccagagcctct

SEQ ID NO: 983198 - DNA, 25 bp, Homo sapien
tgaatgcccactgttccagagcctc

SEQ ID NO: 983199 - DNA, 25 bp, Homo sapien
agtgggcaccgccacctatctccat

SEQ ID NO: 983200 - DNA, 25 bp, Homo sapien
cactgccagacagactgctattgaa

SEQ ID NO: 983201 - DNA, 25 bp, Homo sapien
cctggcacggtgagtctccgcactg

SEQ ID NO: 983202 - DNA, 25 bp, Homo sapien
attgaaacatcagcagcgtggcctc

SEQ ID NO: 983203 - DNA, 25 bp, Homo sapien
agccctatatggctcccatcatcat

SEQ ID NO: 983204 - DNA, 25 bp, Homo sapien
tcccatcatcatcctgtctgcagga

SEQ ID NO: 983205 - DNA, 25 bp, Homo sapien
tctttctagcactaagggcacccgc

SEQ ID NO: 983206 - DNA, 25 bp, Homo sapien
tgtccttacaggaccaccaaacctc

SEQ ID NO: 983207 - DNA, 25 bp, Homo sapien
gctggtctttaacaagtgtggactc

SEQ ID NO: 983208 - DNA, 25 bp, Homo sapien
ccctgaagggagaaatcgaacccat

SEQ ID NO: 983209 - DNA, 25 bp, Homo sapien
gtgctgcgacagtcgggtgactcca

SEQ ID NO: 983210 - DNA, 25 bp, Homo sapien
ggtgactccagtcctgtgacgcctg

SEQ ID NO: 983211 - DNA, 25 bp, Homo sapien
catagaggtcctgggcaaggcgata

SEQ ID NO: 983212 - DNA, 25 bp, Homo sapien
tcaggactggtccaaccgtggaagg

SEQ ID NO: 983213 - DNA, 25 bp, Homo sapien
ggaagggaaggcatgtccacacgca

SEQ ID NO: 983214 - DNA, 25 bp, Homo sapien
ggaggagagccatccaaaggccctt

SEQ ID NO: 983215 - DNA, 25 bp, Homo sapien
tgcccttccttgacggctgtcagat

SEQ ID NO: 983216 - DNA, 25 bp, Homo sapien
agttccagccactgactatgtcgtt

SEQ ID NO: 983217 - DNA, 25 bp, Homo sapien
tatgtcgtttgttgccccaaatctc

SEQ ID NO: 983218 - DNA, 25 bp, Homo sapien
tttttctgccctccggttcctggca

SEQ ID NO: 983219 - DNA, 25 bp, Homo sapien
cccctcgcgcttacttgcatgccct

SEQ ID NO: 983220 - DNA, 25 bp, Homo sapien
tacttgcatgccctcacttccctct

SEQ ID NO: 983221 - DNA, 25 bp, Homo sapien
ctcacctggctctccgtccgccacc

SEQ ID NO: 983222 - DNA, 25 bp, Homo sapien
cagcactgtttttctccggctgcct

SEQ ID NO: 983223 - DNA, 25 bp, Homo sapien
gaaggcaaggatgtcaagcccagga

SEQ ID NO: 983224 - DNA, 25 bp, Homo sapien
tgtcaagcccaggatgtgtgtgaat

SEQ ID NO: 983225 - DNA, 25 bp, Homo sapien
gtgtgaatgtaagatctacagttac

SEQ ID NO: 983226 - DNA, 25 bp, Homo sapien
aaggcaaggatgtcaagcccaggat

SEQ ID NO: 983227 - DNA, 25 bp, Homo sapien
tcccagggagataccagtgacaacc

SEQ ID NO: 983228 - DNA, 25 bp, Homo sapien
gagcaactcccataaacagcagacg

SEQ ID NO: 983229 - DNA, 25 bp, Homo sapien
gccgtgtcggtgcacataagcagac

SEQ ID NO: 983230 - DNA, 25 bp, Homo sapien
tcttggatgctcattgcgctggctg

SEQ ID NO: 983231 - DNA, 25 bp, Homo sapien
gagccccgggggacacgtggacaca

SEQ ID NO: 983232 - DNA, 25 bp, Homo sapien
ctgcaggaggcagacagccaggcag

SEQ ID NO: 983233 - DNA, 25 bp, Homo sapien
agacagccaggcaggagggagcccc

SEQ ID NO: 983234 - DNA, 25 bp, Homo sapien
agccccgggggacacgtggacacat

SEQ ID NO: 983235 - DNA, 25 bp, Homo sapien
ctgccttcacctccgggctcctcat

SEQ ID NO: 983236 - DNA, 25 bp, Homo sapien
ctgtcccaagcactatggttgaaag

SEQ ID NO: 983237 - DNA, 25 bp, Homo sapien
caagcactatggttgaaagaggtga

SEQ ID NO: 983238 - DNA, 25 bp, Homo sapien
aggtgataggcagaaccagtgtgcc

SEQ ID NO: 983239 - DNA, 25 bp, Homo sapien
ttgaaagaggtgataggcagaacca

SEQ ID NO: 983240 - DNA, 25 bp, Homo sapien
ttcgggcactttcatgctaccagcg

SEQ ID NO: 983241 - DNA, 25 bp, Homo sapien
tgtaaccagattttccctgcagaga

SEQ ID NO: 983242 - DNA, 25 bp, Homo sapien
tggtttgagcacctttccagggatg

SEQ ID NO: 983243 - DNA, 25 bp, Homo sapien
cctgcagagaggcatgggcactatg

SEQ ID NO: 983244 - DNA, 25 bp, Homo sapien
tggtagccatccaacgccgaaagat

SEQ ID NO: 983245 - DNA, 25 bp, Homo sapien
catccaacgccgaaagatgggtcaa

SEQ ID NO: 983246 - DNA, 25 bp, Homo sapien
acgccgaaagatgggtcaaggacca

SEQ ID NO: 983247 - DNA, 25 bp, Homo sapien
ctgtaagacactggtagccatccaa

SEQ ID NO: 983248 - DNA, 25 bp, Homo sapien
tatctgtttggcaagttctgtttat

SEQ ID NO: 983249 - DNA, 25 bp, Homo sapien
tatttgggatgttgactttcctgaa

SEQ ID NO: 983250 - DNA, 25 bp, Homo sapien
gactttcctgaagctcgaggaaaac

SEQ ID NO: 983251 - DNA, 25 bp, Homo sapien
gatgttgactttcctgaagctcgag

SEQ ID NO: 983252 - DNA, 25 bp, Homo sapien
ccaggtgctcaaatgggaaagcctg

SEQ ID NO: 983253 - DNA, 25 bp, Homo sapien
ctgtttttctatccaggtgctcaaa

SEQ ID NO: 983254 - DNA, 25 bp, Homo sapien
cagtgggtctgtttttctatccagg

SEQ ID NO: 983255 - DNA, 25 bp, Homo sapien
aggtgctcaaatgggaaagcctgaa

SEQ ID NO: 983256 - DNA, 25 bp, Homo sapien
ctgcatccaccgctgttgtccacca

SEQ ID NO: 983257 - DNA, 25 bp, Homo sapien
catccaccgctgttgtccaccaaaa

SEQ ID NO: 983258 - DNA, 25 bp, Homo sapien
aggctacggcaggagtattatggac

SEQ ID NO: 983259 - DNA, 25 bp, Homo sapien
atccaccgctgttgtccaccaaaac

SEQ ID NO: 983260 - DNA, 25 bp, Homo sapien
ctgagctgaatgatgtttcgacaac

SEQ ID NO: 983261 - DNA, 25 bp, Homo sapien
gcaccctggatagcccctgtcttgt

SEQ ID NO: 983262 - DNA, 25 bp, Homo sapien
catgacaggtcttgcagtgacatct

SEQ ID NO: 983263 - DNA, 25 bp, Homo sapien
ttccacctcaagtctaccgagtgca

SEQ ID NO: 983264 - DNA, 25 bp, Homo sapien
ccactcgtctggtgtggtccctggg

SEQ ID NO: 983265 - DNA, 25 bp, Homo sapien
atcccctttgccactcgtctggtgt

SEQ ID NO: 983266 - DNA, 25 bp, Homo sapien
cagggtggaggagcaatagcttgaa

SEQ ID NO: 983267 - DNA, 25 bp, Homo sapien
caggctgtcttgctcagcagagcac

SEQ ID NO: 983268 - DNA, 25 bp, Homo sapien
gggatgccaagtacacctttcccca

SEQ ID NO: 983269 - DNA, 25 bp, Homo sapien
cagggatgccaagtacacctttccc

SEQ ID NO: 983270 - DNA, 25 bp, Homo sapien
ttccccagaggactcagtcttgcaa

SEQ ID NO: 983271 - DNA, 25 bp, Homo sapien
gactcagtcttgcaatgttctctcc

SEQ ID NO: 983272 - DNA, 25 bp, Homo sapien
accagaagaaattgtccctgtgact

SEQ ID NO: 983273 - DNA, 25 bp, Homo sapien
aaccagaagaaattgtccctgtgac

SEQ ID NO: 983274 - DNA, 25 bp, Homo sapien
tgctgcctacttgcaaatccctttg

SEQ ID NO: 983275 - DNA, 25 bp, Homo sapien
caccagcaccaactcagtagatagg

SEQ ID NO: 983276 - DNA, 25 bp, Homo sapien
gatttccttgtgcccctcagtggcc

SEQ ID NO: 983277 - DNA, 25 bp, Homo sapien
gtagataggttctgctgcctacttg

SEQ ID NO: 983278 - DNA, 25 bp, Homo sapien
gtaacgagtgaaatgcagagacctg

SEQ ID NO: 983279 - DNA, 25 bp, Homo sapien
ccaggggtaacgagtgaaatgcaga

SEQ ID NO: 983280 - DNA, 25 bp, Homo sapien
tgtgagcaggaaggtatggccaggg

SEQ ID NO: 983281 - DNA, 25 bp, Homo sapien
tatggccaggggtaacgagtgaaat

SEQ ID NO: 983282 - DNA, 25 bp, Homo sapien
tatgggaatgggtacattagcatcc

SEQ ID NO: 983283 - DNA, 25 bp, Homo sapien
tacaaaattccccatgattggagat

SEQ ID NO: 983284 - DNA, 25 bp, Homo sapien
caaagggtgattacaccaggcagtg

SEQ ID NO: 983285 - DNA, 25 bp, Homo sapien
cagtgtctcatgtccctcctcatgt

SEQ ID NO: 983286 - DNA, 25 bp, Homo sapien
cacgcaagggagaaccaggactagg

SEQ ID NO: 983287 - DNA, 25 bp, Homo sapien
caagggagaaccaggactaggttga

SEQ ID NO: 983288 - DNA, 25 bp, Homo sapien
gactaggttgatatgacctggcttt

SEQ ID NO: 983289 - DNA, 25 bp, Homo sapien
ggactaggttgatatgacctggctt

SEQ ID NO: 983290 - DNA, 25 bp, Homo sapien
cacacatttgggatgaatgcggagt

SEQ ID NO: 983291 - DNA, 25 bp, Homo sapien
agcagggtccagacaaagccaggtg

SEQ ID NO: 983292 - DNA, 25 bp, Homo sapien
gctgaggctttaatggagagcgcca

SEQ ID NO: 983293 - DNA, 25 bp, Homo sapien
cagttgcaaggaacacagtctggaa

SEQ ID NO: 983294 - DNA, 25 bp, Homo sapien
agagcacagccaattgcaggagtca

SEQ ID NO: 983295 - DNA, 25 bp, Homo sapien
aggagtcagaaagacgcattccagg

SEQ ID NO: 983296 - DNA, 25 bp, Homo sapien
caggagtcagaaagacgcattccag

SEQ ID NO: 983297 - DNA, 25 bp, Homo sapien
acagccaattgcaggagtcagaaag

SEQ ID NO: 983298 - DNA, 25 bp, Homo sapien
catgatgctgcagtacggtgggctc

SEQ ID NO: 983299 - DNA, 25 bp, Homo sapien
gaacctgtggcacaccctaaagaga

SEQ ID NO: 983300 - DNA, 25 bp, Homo sapien
ggaccagatgccaacagagcttttg

SEQ ID NO: 983301 - DNA, 25 bp, Homo sapien
aagtaaccagattagcaccagtcgc

SEQ ID NO: 983302 - DNA, 25 bp, Homo sapien
ctggagaacaggagttccagagtca

SEQ ID NO: 983303 - DNA, 25 bp, Homo sapien
gatcggggtcccgtctgtagctcaa

SEQ ID NO: 983304 - DNA, 25 bp, Homo sapien
ggtcccgtctgtagctcaagggtag

SEQ ID NO: 983305 - DNA, 25 bp, Homo sapien
ggtagggcagaggctggtaccaggc

SEQ ID NO: 983306 - DNA, 25 bp, Homo sapien
gactgcacttgggttcattaacacc

SEQ ID NO: 983307 - DNA, 25 bp, Homo sapien
aatgaccgctggtcaaacacgggcg

SEQ ID NO: 983308 - DNA, 25 bp, Homo sapien
ggcaggtggtactacattcgagtaa

SEQ ID NO: 983309 - DNA, 25 bp, Homo sapien
taaaccgtcgtctgaaatacccagc

SEQ ID NO: 983310 - DNA, 25 bp, Homo sapien
tgtcacttcgatccgacttccatag

SEQ ID NO: 983311 - DNA, 25 bp, Homo sapien
gactgtcacttcgatccgacttcca

SEQ ID NO: 983312 - DNA, 25 bp, Homo sapien
tgtgactgtcacttcgatccgactt

SEQ ID NO: 983313 - DNA, 25 bp, Homo sapien
gtgactgtcacttcgatccgacttc

SEQ ID NO: 983314 - DNA, 25 bp, Homo sapien
aaagtgcggacactgtttctcccaa

SEQ ID NO: 983315 - DNA, 25 bp, Homo sapien
tctctgaaaagtgcggacactgttt

SEQ ID NO: 983316 - DNA, 25 bp, Homo sapien
ctgccactccctgagtttcccaggt

SEQ ID NO: 983317 - DNA, 25 bp, Homo sapien
gtcctcacaatctttccagggctgc

SEQ ID NO: 983318 - DNA, 25 bp, Homo sapien
gacacccacaggagattctaaaggc

SEQ ID NO: 983319 - DNA, 25 bp, Homo sapien
ggcatcttattaccccacctcagga

SEQ ID NO: 983320 - DNA, 25 bp, Homo sapien
gggacagatgccgacctaatgagca

SEQ ID NO: 983321 - DNA, 25 bp, Homo sapien
tcatgatgcccctttgccaagtgtc

SEQ ID NO: 983322 - DNA, 25 bp, Homo sapien
ggagtgaagatggataaaacttttc

SEQ ID NO: 983323 - DNA, 25 bp, Homo sapien
ggatctttcaaacacctgaaccagc

SEQ ID NO: 983324 - DNA, 25 bp, Homo sapien
tagacgagtggatctttcaaacacc

SEQ ID NO: 983325 - DNA, 25 bp, Homo sapien
taataaactggctctatccctgtgc

SEQ ID NO: 983326 - DNA, 25 bp, Homo sapien
ttgccgacttttggtgtcctgtcct

SEQ ID NO: 983327 - DNA, 25 bp, Homo sapien
tggacccacttgccgacttttggtg

SEQ ID NO: 983328 - DNA, 25 bp, Homo sapien
gacccacttgccgacttttggtgtc

SEQ ID NO: 983329 - DNA, 25 bp, Homo sapien
cacttgccgacttttggtgtcctgt

SEQ ID NO: 983330 - DNA, 25 bp, Homo sapien
gaggtgtcggcttagcaggcctcct

SEQ ID NO: 983331 - DNA, 25 bp, Homo sapien
tgggtgacagctctcggtcctccca

SEQ ID NO: 983332 - DNA, 25 bp, Homo sapien
agagtcctggttactgccagccttg

SEQ ID NO: 983333 - DNA, 25 bp, Homo sapien
aatggagagtcctggttactgccag

SEQ ID NO: 983334 - DNA, 25 bp, Homo sapien
tgttgttcacctttaactctcccat

SEQ ID NO: 983335 - DNA, 25 bp, Homo sapien
gagagtgggtaagtaaactacaatg

SEQ ID NO: 983336 - DNA, 25 bp, Homo sapien
ttaatgatagctgcaggcggtggca

SEQ ID NO: 983337 - DNA, 25 bp, Homo sapien
taacataaaacatcgaaaggaaata

SEQ ID NO: 983338 - DNA, 25 bp, Homo sapien
gttagttgagttacaaggttcactg

SEQ ID NO: 983339 - DNA, 25 bp, Homo sapien
ggacttggatggtcttctagaagat

SEQ ID NO: 983340 - DNA, 25 bp, Homo sapien
gatgtccttgggattgaacatctgg

SEQ ID NO: 983341 - DNA, 25 bp, Homo sapien
ccttgggattgaacatctggagcca

SEQ ID NO: 983342 - DNA, 25 bp, Homo sapien
catccaaattaatggggtcgcgggc

SEQ ID NO: 983343 - DNA, 25 bp, Homo sapien
ccagggtactgcagtagatggcttg

SEQ ID NO: 983344 - DNA, 25 bp, Homo sapien
tactgcagtagatggcttggtggcc

SEQ ID NO: 983345 - DNA, 25 bp, Homo sapien
cttccagggtactgcagtagatggc

SEQ ID NO: 983346 - DNA, 25 bp, Homo sapien
actgcagtagatggcttggtggccc

SEQ ID NO: 983347 - DNA, 25 bp, Homo sapien
aattacatgggactgtatctctccc

SEQ ID NO: 983348 - DNA, 25 bp, Homo sapien
gatttttcactctttcaaggtggaa

SEQ ID NO: 983349 - DNA, 25 bp, Homo sapien
tgggactgtatctctcccctggact

SEQ ID NO: 983350 - DNA, 25 bp, Homo sapien
ggatttttcactctttcaaggtgga

SEQ ID NO: 983351 - DNA, 25 bp, Homo sapien
gctggctcgtcctccgggagatccc

SEQ ID NO: 983352 - DNA, 25 bp, Homo sapien
ctggctcgtcctccgggagatcccc

SEQ ID NO: 983353 - DNA, 25 bp, Homo sapien
cagtgacctccctaagatgtgtcac

SEQ ID NO: 983354 - DNA, 25 bp, Homo sapien
tcccccagtgacctccctaagatgt

SEQ ID NO: 983355 - DNA, 25 bp, Homo sapien
cctgggataaccacgatggctgaaa

SEQ ID NO: 983356 - DNA, 25 bp, Homo sapien
ttgagagaagctgactgtagttgcc

SEQ ID NO: 983357 - DNA, 25 bp, Homo sapien
gaattgagtcccttgggttgagaga

SEQ ID NO: 983358 - DNA, 25 bp, Homo sapien
aatgtaataaggaggaatttaggct

SEQ ID NO: 983359 - DNA, 25 bp, Homo sapien
ggctagcatccattctaggtggaaa

SEQ ID NO: 983360 - DNA, 25 bp, Homo sapien
agttccccttctgacggtgcaccca

SEQ ID NO: 983361 - DNA, 25 bp, Homo sapien
tggaaactccactggaagcccaaac

SEQ ID NO: 983362 - DNA, 25 bp, Homo sapien
gcccaaacctcagacgtgagcccca

SEQ ID NO: 983363 - DNA, 25 bp, Homo sapien
ttgctccatgtgtccaaacaactct

SEQ ID NO: 983364 - DNA, 25 bp, Homo sapien
ctaattaatgagttgctccatgtgt

SEQ ID NO: 983365 - DNA, 25 bp, Homo sapien
tgagttgctccatgtgtccaaacaa

SEQ ID NO: 983366 - DNA, 25 bp, Homo sapien
taatgagttgctccatgtgtccaaa

SEQ ID NO: 983367 - DNA, 25 bp, Homo sapien
tccccagactctgaacgggtatctt

SEQ ID NO: 983368 - DNA, 25 bp, Homo sapien
tgtgcaggttacatttccccagact

SEQ ID NO: 983369 - DNA, 25 bp, Homo sapien
gattctctgtgcaggttacatttcc

SEQ ID NO: 983370 - DNA, 25 bp, Homo sapien
accaatcagattgggctctggcacc

SEQ ID NO: 983371 - DNA, 25 bp, Homo sapien
gtatgttacgggcttggctctcacc

SEQ ID NO: 983372 - DNA, 25 bp, Homo sapien
ctgatgaagggtatgttacgggctt

SEQ ID NO: 983373 - DNA, 25 bp, Homo sapien
tgcgtaattgacaagaccatagctg

SEQ ID NO: 983374 - DNA, 25 bp, Homo sapien
cagcagccacttctgatgcgtaatt

SEQ ID NO: 983375 - DNA, 25 bp, Homo sapien
tgtcattgccattgttacgattgtg

SEQ ID NO: 983376 - DNA, 25 bp, Homo sapien
gtcattgccattgttacgattgtgg

SEQ ID NO: 983377 - DNA, 25 bp, Homo sapien
cagcatagagggcaattgcttttta

SEQ ID NO: 983378 - DNA, 25 bp, Homo sapien
tccttggaggcgattatgaggcagt

SEQ ID NO: 983379 - DNA, 25 bp, Homo sapien
cgattatgaggcagtgataaggatc

SEQ ID NO: 983380 - DNA, 25 bp, Homo sapien
atcttccttggaggcgattatgagg

SEQ ID NO: 983381 - DNA, 25 bp, Homo sapien
actggaacagagtctgcctccggac

SEQ ID NO: 983382 - DNA, 25 bp, Homo sapien
tctgaagatttcctcgatggggtct

SEQ ID NO: 983383 - DNA, 25 bp, Homo sapien
acagagtctgcctccggactcgctg

SEQ ID NO: 983384 - DNA, 25 bp, Homo sapien
agatttcctcgatggggtctttcct

SEQ ID NO: 983385 - DNA, 25 bp, Homo sapien
aaagtcccccagcatcaagacaggg

SEQ ID NO: 983386 - DNA, 25 bp, Homo sapien
ccaacatgtgacagatgtcacgatt

SEQ ID NO: 983387 - DNA, 25 bp, Homo sapien
gggctgtttattccaccatgtggct

SEQ ID NO: 983388 - DNA, 25 bp, Homo sapien
tattctgccaccaaagaggcaccct

SEQ ID NO: 983389 - DNA, 25 bp, Homo sapien
catccaccagtgagtaatggtttgg

SEQ ID NO: 983390 - DNA, 25 bp, Homo sapien
catgtaacctttttgctgcactgct

SEQ ID NO: 983391 - DNA, 25 bp, Homo sapien
catcagaggagagactgcggtaaac

SEQ ID NO: 983392 - DNA, 25 bp, Homo sapien
ttatcaaaccccaaaccatcagagg

SEQ ID NO: 983393 - DNA, 25 bp, Homo sapien
gctatttagacatctgattcctggg

SEQ ID NO: 983394 - DNA, 25 bp, Homo sapien
ctccccatcgcccaaaggaggagga

SEQ ID NO: 983395 - DNA, 25 bp, Homo sapien
caggattgagagatgtcccttggga

SEQ ID NO: 983396 - DNA, 25 bp, Homo sapien
caagggcctgcctggaattaatggg

SEQ ID NO: 983397 - DNA, 25 bp, Homo sapien
ggcattaacatgtgagttcttccca

SEQ ID NO: 983398 - DNA, 25 bp, Homo sapien
aggatggcattaacatgtgagttct

SEQ ID NO: 983399 - DNA, 25 bp, Homo sapien
agaggataaggctagatgatggcaa

SEQ ID NO: 983400 - DNA, 25 bp, Homo sapien
gaaacacttttcaggataaccagct

SEQ ID NO: 983401 - DNA, 25 bp, Homo sapien
tccaacacgtcttcacactattatg

SEQ ID NO: 983402 - DNA, 25 bp, Homo sapien
cattctgggtttttcccatcatcct

SEQ ID NO: 983403 - DNA, 25 bp, Homo sapien
gactcctgacaggtaaatcactagc

SEQ ID NO: 983404 - DNA, 25 bp, Homo sapien
tactcagaggtgatttccaacacgt

SEQ ID NO: 983405 - DNA, 25 bp, Homo sapien
tttgcgtgaggccaatccatcctct

SEQ ID NO: 983406 - DNA, 25 bp, Homo sapien
gcgtgaggccaatccatcctcttga

SEQ ID NO: 983407 - DNA, 25 bp, Homo sapien
ctctttgcgtgaggccaatccatcc

SEQ ID NO: 983408 - DNA, 25 bp, Homo sapien
gaggccaatccatcctcttgacagc

SEQ ID NO: 983409 - DNA, 25 bp, Homo sapien
cagaaagggctccttgtctggacat

SEQ ID NO: 983410 - DNA, 25 bp, Homo sapien
gaaatggcagaaagggctccttgtc

SEQ ID NO: 983411 - DNA, 25 bp, Homo sapien
tctgacagccagagatgaaatggca

SEQ ID NO: 983412 - DNA, 25 bp, Homo sapien
tgacagccagagatgaaatggcaga

SEQ ID NO: 983413 - DNA, 25 bp, Homo sapien
tctcctacccgccacattattgtca

SEQ ID NO: 983414 - DNA, 25 bp, Homo sapien
tcctacccgccacattattgtcacc

SEQ ID NO: 983415 - DNA, 25 bp, Homo sapien
cctacccgccacattattgtcacca

SEQ ID NO: 983416 - DNA, 25 bp, Homo sapien
catctcctacccgccacattattgt

SEQ ID NO: 983417 - DNA, 25 bp, Homo sapien
tgcacaacaaaaagttctttgcctt

SEQ ID NO: 983418 - DNA, 25 bp, Homo sapien
gtgcctctgcacaacaaaaagttct

SEQ ID NO: 983419 - DNA, 25 bp, Homo sapien
ggtgcctctgcacaacaaaaagttc

SEQ ID NO: 983420 - DNA, 25 bp, Homo sapien
acaggtgcctctgcacaacaaaaag

SEQ ID NO: 983421 - DNA, 25 bp, Homo sapien
cactccattccctgtctgcaattgt

SEQ ID NO: 983422 - DNA, 25 bp, Homo sapien
ttgtttccaatcagtttaggaaaca

SEQ ID NO: 983423 - DNA, 25 bp, Homo sapien
cattccctgtctgcaattgtttcca

SEQ ID NO: 983424 - DNA, 25 bp, Homo sapien
ctccattccctgtctgcaattgttt

SEQ ID NO: 983425 - DNA, 25 bp, Homo sapien
ttatccatcttggttggcatctctg

SEQ ID NO: 983426 - DNA, 25 bp, Homo sapien
tccatcttggttggcatctctgcca

SEQ ID NO: 983427 - DNA, 25 bp, Homo sapien
ccatcttggttggcatctctgccat

SEQ ID NO: 983428 - DNA, 25 bp, Homo sapien
tatccatcttggttggcatctctgc

SEQ ID NO: 983429 - DNA, 25 bp, Homo sapien
gacttatcacccttgcaagaaaagg

SEQ ID NO: 983430 - DNA, 25 bp, Homo sapien
tggctttaacaagaagctgcctggg

SEQ ID NO: 983431 - DNA, 25 bp, Homo sapien
aatttgcaaaccacaaagccaaaag

SEQ ID NO: 983432 - DNA, 25 bp, Homo sapien
tgaggggcatttcttggctttaaca

SEQ ID NO: 983433 - DNA, 25 bp, Homo sapien
gcagcctgaggctgtagaagtacca

SEQ ID NO: 983434 - DNA, 25 bp, Homo sapien
gcctgaggctgtagaagtaccaccc

SEQ ID NO: 983435 - DNA, 25 bp, Homo sapien
tgaggctgtagaagtaccaccctga

SEQ ID NO: 983436 - DNA, 25 bp, Homo sapien
ccttcagcatcctcgatggggccaa

SEQ ID NO: 983437 - DNA, 25 bp, Homo sapien
acatatgcctgcatgcagaccctgg

SEQ ID NO: 983438 - DNA, 25 bp, Homo sapien
gcccgcgcagtatgtttgctgagtg

SEQ ID NO: 983439 - DNA, 25 bp, Homo sapien
cttggagaatcctccgtttgcattc

SEQ ID NO: 983440 - DNA, 25 bp, Homo sapien
gagaatcctccgtttgcattctcca

SEQ ID NO: 983441 - DNA, 25 bp, Homo sapien
tctgttgggagcccgcgcagtatgt

SEQ ID NO: 983442 - DNA, 25 bp, Homo sapien
tgggcttcgaaattgtgcatcaagc

SEQ ID NO: 983443 - DNA, 25 bp, Homo sapien
tcgaaattgtgcatcaagcgtgcag

SEQ ID NO: 983444 - DNA, 25 bp, Homo sapien
ttctgggcttcgaaattgtgcatca

SEQ ID NO: 983445 - DNA, 25 bp, Homo sapien
cttcgaaattgtgcatcaagcgtgc

SEQ ID NO: 983446 - DNA, 25 bp, Homo sapien
gaaaagaatgatacaagcagagaag

SEQ ID NO: 983447 - DNA, 25 bp, Homo sapien
aaaagaatgatacaagcagagaagc

SEQ ID NO: 983448 - DNA, 25 bp, Homo sapien
tgaaaagaatgatacaagcagagaa

SEQ ID NO: 983449 - DNA, 25 bp, Homo sapien
gtgaaaagaatgatacaagcagaga

SEQ ID NO: 983450 - DNA, 25 bp, Homo sapien
gccaacactgaaccctgtctcccat

SEQ ID NO: 983451 - DNA, 25 bp, Homo sapien
ctgccaacactgaaccctgtctccc

SEQ ID NO: 983452 - DNA, 25 bp, Homo sapien
tctgccaacactgaaccctgtctcc

SEQ ID NO: 983453 - DNA, 25 bp, Homo sapien
tgccaacactgaaccctgtctccca

SEQ ID NO: 983454 - DNA, 25 bp, Homo sapien
tgtagggtaccatgaaaccaagctg

SEQ ID NO: 983455 - DNA, 25 bp, Homo sapien
gaaggtattatccagcacaggttag

SEQ ID NO: 983456 - DNA, 25 bp, Homo sapien
tattaagctttaatttccagagccc

SEQ ID NO: 983457 - DNA, 25 bp, Homo sapien
cagtattcttagagcacatgaggaa

SEQ ID NO: 983458 - DNA, 25 bp, Homo sapien
tgttactaggacacagtttgctgta

SEQ ID NO: 983459 - DNA, 25 bp, Homo sapien
tgctgtaataataccaattaacatt

SEQ ID NO: 983460 - DNA, 25 bp, Homo sapien
tgcaatgttactaggacacagtttg

SEQ ID NO: 983461 - DNA, 25 bp, Homo sapien
ggacacagtttgctgtaataatacc

SEQ ID NO: 983462 - DNA, 25 bp, Homo sapien
taggcattctatggcgcaagctcag

SEQ ID NO: 983463 - DNA, 25 bp, Homo sapien
gatttcacgattcagtctagacccc

SEQ ID NO: 983464 - DNA, 25 bp, Homo sapien
cctcagcaggactaaaggatgccag

SEQ ID NO: 983465 - DNA, 25 bp, Homo sapien
tcttcctaaggacgagtgtggcctg

SEQ ID NO: 983466 - DNA, 25 bp, Homo sapien
ggacccatccaaataacgaccatgt

SEQ ID NO: 983467 - DNA, 25 bp, Homo sapien
cttggtccttggattggagtgaagt

SEQ ID NO: 983468 - DNA, 25 bp, Homo sapien
ttggagtgaagtcacctaaggaccc

SEQ ID NO: 983469 - DNA, 25 bp, Homo sapien
gaagtcacctaaggacccatccaaa

SEQ ID NO: 983470 - DNA, 25 bp, Homo sapien
tccttgggtacatctggctgcactc

SEQ ID NO: 983471 - DNA, 25 bp, Homo sapien
tgcactcctcaatccatcctggtgt

SEQ ID NO: 983472 - DNA, 25 bp, Homo sapien
tggtgtgaccgagttggaataaacc

SEQ ID NO: 983473 - DNA, 25 bp, Homo sapien
cagctggctcactgggtggttcctt

SEQ ID NO: 983474 - DNA, 25 bp, Homo sapien
ggccttctagatcttgtttctaatc

SEQ ID NO: 983475 - DNA, 25 bp, Homo sapien
gccttctagatcttgtttctaatcc

SEQ ID NO: 983476 - DNA, 25 bp, Homo sapien
gctatggaacccaattccaggctgt

SEQ ID NO: 983477 - DNA, 25 bp, Homo sapien
tttagcaccgatgatctcatcttgc

SEQ ID NO: 983478 - DNA, 25 bp, Homo sapien
ctgctggggctatggaacccaattc

SEQ ID NO: 983479 - DNA, 25 bp, Homo sapien
tagcaccgatgatctcatcttgcag

SEQ ID NO: 983480 - DNA, 25 bp, Homo sapien
aatcacacatgaacccatggcagct

SEQ ID NO: 983481 - DNA, 25 bp, Homo sapien
tagttaaagtggattcaaatttcca

SEQ ID NO: 983482 - DNA, 25 bp, Homo sapien
aaagtggattcaaatttccagagta

SEQ ID NO: 983483 - DNA, 25 bp, Homo sapien
agttaaagtggattcaaatttccag

SEQ ID NO: 983484 - DNA, 25 bp, Homo sapien
ttaaagtggattcaaatttccagag

SEQ ID NO: 983485 - DNA, 25 bp, Homo sapien
ggctggactctctgatctgatattg

SEQ ID NO: 983486 - DNA, 25 bp, Homo sapien
tttaggaagcaacaaagcagaggct

SEQ ID NO: 983487 - DNA, 25 bp, Homo sapien
gctggactctctgatctgatattgc

SEQ ID NO: 983488 - DNA, 25 bp, Homo sapien
tacatttaggaagcaacaaagcaga

SEQ ID NO: 983489 - DNA, 25 bp, Homo sapien
ctgagaagcaatgttcgccccaggt

SEQ ID NO: 983490 - DNA, 25 bp, Homo sapien
gcaatgttcgccccaggtgggtctc

SEQ ID NO: 983491 - DNA, 25 bp, Homo sapien
agaagcaatgttcgccccaggtggg

SEQ ID NO: 983492 - DNA, 25 bp, Homo sapien
gattcccccttgtggacctgtgccg

SEQ ID NO: 983493 - DNA, 25 bp, Homo sapien
gctccacaacttgtcacggctgggc

SEQ ID NO: 983494 - DNA, 25 bp, Homo sapien
tccacaacttgtcacggctgggcct

SEQ ID NO: 983495 - DNA, 25 bp, Homo sapien
ctccacaacttgtcacggctgggcc

SEQ ID NO: 983496 - DNA, 25 bp, Homo sapien
cacaacttgtcacggctgggcctct

SEQ ID NO: 983497 - DNA, 25 bp, Homo sapien
ctttcaaatgtttatgcctcaccag

SEQ ID NO: 983498 - DNA, 25 bp, Homo sapien
cccaggtggctgaaacagaactgtt

SEQ ID NO: 983499 - DNA, 25 bp, Homo sapien
gaaattagatagaatatcccaggtg

SEQ ID NO: 983500 - DNA, 25 bp, Homo sapien
aaatgtttatgcctcaccagcccca

SEQ ID NO: 983501 - DNA, 25 bp, Homo sapien
tgcctcaggagggttgtctctgagc

SEQ ID NO: 983502 - DNA, 25 bp, Homo sapien
aactcatggtgctgcacttgacctc

SEQ ID NO: 983503 - DNA, 25 bp, Homo sapien
gggtgtcctgatcccaaactcatgg

SEQ ID NO: 983504 - DNA, 25 bp, Homo sapien
gtctctgagcgccttgctggcccag

SEQ ID NO: 983505 - DNA, 25 bp, Homo sapien
catcatggacaccattcttgcagag

SEQ ID NO: 983506 - DNA, 25 bp, Homo sapien
atcatggacaccattcttgcagagt

SEQ ID NO: 983507 - DNA, 25 bp, Homo sapien
ttccccagtgctcattgttttcttt

SEQ ID NO: 983508 - DNA, 25 bp, Homo sapien
catagaattactccacacacaagtt

SEQ ID NO: 983509 - DNA, 25 bp, Homo sapien
tttctttcccagtcattacccatag

SEQ ID NO: 983510 - DNA, 25 bp, Homo sapien
cacacacaagttcccaagtcacaaa

SEQ ID NO: 983511 - DNA, 25 bp, Homo sapien
tagaacaacactgcaaggctggtct

SEQ ID NO: 983512 - DNA, 25 bp, Homo sapien
ttagaacaacactgcaaggctggtc

SEQ ID NO: 983513 - DNA, 25 bp, Homo sapien
agaacaacactgcaaggctggtctg

SEQ ID NO: 983514 - DNA, 25 bp, Homo sapien
gggagcattcatgtccaggccacag

SEQ ID NO: 983515 - DNA, 25 bp, Homo sapien
acttttggtgcccacaaaggccaga

SEQ ID NO: 983516 - DNA, 25 bp, Homo sapien
ggaattccacgcaccatgtcggaca

SEQ ID NO: 983517 - DNA, 25 bp, Homo sapien
gatgacagacgtcatgcggtccctg

SEQ ID NO: 983518 - DNA, 25 bp, Homo sapien
gatgtggtctccgtatctatacaca

SEQ ID NO: 983519 - DNA, 25 bp, Homo sapien
cacaaagaggaatgtggtcttcgta

SEQ ID NO: 983520 - DNA, 25 bp, Homo sapien
tgctcaggcacaagagggatgtggt

SEQ ID NO: 983521 - DNA, 25 bp, Homo sapien
cgtatctatacagaagagggatgtg

SEQ ID NO: 983522 - DNA, 25 bp, Homo sapien
tattgcactcgtgcctgtaaatgtc

SEQ ID NO: 983523 - DNA, 25 bp, Homo sapien
gcctattgcactcgtgcctgtaaat

SEQ ID NO: 983524 - DNA, 25 bp, Homo sapien
taaagcctattgcactcgtgcctgt

SEQ ID NO: 983525 - DNA, 25 bp, Homo sapien
cataaagcctattgcactcgtgcct

SEQ ID NO: 983526 - DNA, 25 bp, Homo sapien
tgtccctccagagaaggtgacctgc

SEQ ID NO: 983527 - DNA, 25 bp, Homo sapien
tgaagcctctctgatggctcccctt

SEQ ID NO: 983528 - DNA, 25 bp, Homo sapien
gacctgctcagcatctgaagcctct

SEQ ID NO: 983529 - DNA, 25 bp, Homo sapien
cccagaagaggtgcgggcaggcact

SEQ ID NO: 983530 - DNA, 25 bp, Homo sapien
ggcctctcttgcgtggcctggtcca

SEQ ID NO: 983531 - DNA, 25 bp, Homo sapien
tacagagtagggacagtcagagcga

SEQ ID NO: 983532 - DNA, 25 bp, Homo sapien
tgtagagcagacatccactccaggc

SEQ ID NO: 983533 - DNA, 25 bp, Homo sapien
cctgagcaggccacgtgtagagcag

SEQ ID NO: 983534 - DNA, 25 bp, Homo sapien
gagtcctttgaccaagcaccgtcca

SEQ ID NO: 983535 - DNA, 25 bp, Homo sapien
caggtcttcatgattgctgaggtcc

SEQ ID NO: 983536 - DNA, 25 bp, Homo sapien
tgcagaacctcttgaagcaagaagc

SEQ ID NO: 983537 - DNA, 25 bp, Homo sapien
gccccaagtgataaaggtgccattg

SEQ ID NO: 983538 - DNA, 25 bp, Homo sapien
tctgcagagagattggcactctgaa

SEQ ID NO: 983539 - DNA, 25 bp, Homo sapien
gcactctgaaaagctctatcatctc

SEQ ID NO: 983540 - DNA, 25 bp, Homo sapien
gaaaagctctatcatctccatgaaa

SEQ ID NO: 983541 - DNA, 25 bp, Homo sapien
ggaaattgctcccactctgcagaga

SEQ ID NO: 983542 - DNA, 25 bp, Homo sapien
ggatggaagacaaaatcagatctgg

SEQ ID NO: 983543 - DNA, 25 bp, Homo sapien
gaagacaaaatcagatctggtcttc

SEQ ID NO: 983544 - DNA, 25 bp, Homo sapien
catctgagccccaggatggaagaca

SEQ ID NO: 983545 - DNA, 25 bp, Homo sapien
acaaaatcagatctggtcttcccat

SEQ ID NO: 983546 - DNA, 25 bp, Homo sapien
gacaggttcgtttatgtccacagca

SEQ ID NO: 983547 - DNA, 25 bp, Homo sapien
caagacttttccctctgtgcggtcc

SEQ ID NO: 983548 - DNA, 25 bp, Homo sapien
aggtcagcaggttctaccccaacgg

SEQ ID NO: 983549 - DNA, 25 bp, Homo sapien
ggagttttgcggatcccggctctga

SEQ ID NO: 983550 - DNA, 25 bp, Homo sapien
gtctcaggatgtggaaagggctaga

SEQ ID NO: 983551 - DNA, 25 bp, Homo sapien
agcgcgcagccctccctgtactcac

SEQ ID NO: 983552 - DNA, 25 bp, Homo sapien
ttctcatcctacactcccaaccatc

SEQ ID NO: 983553 - DNA, 25 bp, Homo sapien
tacacatcccatgggggctacaggc

SEQ ID NO: 983554 - DNA, 25 bp, Homo sapien
actcccaaccatcccagcgcgcagc

SEQ ID NO: 983555 - DNA, 25 bp, Homo sapien
ggatcttaatcatcgaggccacgaa

SEQ ID NO: 983556 - DNA, 25 bp, Homo sapien
cagggccgactcatccagggatttc

SEQ ID NO: 983557 - DNA, 25 bp, Homo sapien
tcatcatggaagacgtacgcgaaca

SEQ ID NO: 983558 - DNA, 25 bp, Homo sapien
gggatgtccttcaccttgagccagg

SEQ ID NO: 983559 - DNA, 25 bp, Homo sapien
ccaggttgctgtaggagacgatcac

SEQ ID NO: 983560 - DNA, 25 bp, Homo sapien
gacgatcactccaaagactgagccg

SEQ ID NO: 983561 - DNA, 25 bp, Homo sapien
tcatgcgtcaccaagaccttcaggt

SEQ ID NO: 983562 - DNA, 25 bp, Homo sapien
caggtgattgaaaccctcggcgggc

SEQ ID NO: 983563 - DNA, 25 bp, Homo sapien
gaatgtgacaaatgaccgctgcttc

SEQ ID NO: 983564 - DNA, 25 bp, Homo sapien
gacaaatgaccgctgcttctgggac

SEQ ID NO: 983565 - DNA, 25 bp, Homo sapien
aatgaccgctgcttctgggacagcg

SEQ ID NO: 983566 - DNA, 25 bp, Homo sapien
tcctcggaatgtgacaaatgaccgc

SEQ ID NO: 983567 - DNA, 25 bp, Homo sapien
tgggagagaaggcaggtccagttcc

SEQ ID NO: 983568 - DNA, 25 bp, Homo sapien
gcccaccatgaggaggtgggagaga

SEQ ID NO: 983569 - DNA, 25 bp, Homo sapien
ggagagaaggcaggtccagttccag

SEQ ID NO: 983570 - DNA, 25 bp, Homo sapien
agagaaggcaggtccagttccaggg

SEQ ID NO: 983571 - DNA, 25 bp, Homo sapien
tcaggcacagtcgtcccctcagagg

SEQ ID NO: 983572 - DNA, 25 bp, Homo sapien
aggcacagtcgtcccctcagagggc

SEQ ID NO: 983573 - DNA, 25 bp, Homo sapien
gcacagtcgtcccctcagagggcca

SEQ ID NO: 983574 - DNA, 25 bp, Homo sapien
ggccaggactcagcaatgcagtctc

SEQ ID NO: 983575 - DNA, 25 bp, Homo sapien
tgttgctagctatctcagaaatgag

SEQ ID NO: 983576 - DNA, 25 bp, Homo sapien
aatcatgcagctcgctacagtctgg

SEQ ID NO: 983577 - DNA, 25 bp, Homo sapien
cttgccccttgttgctagctatctc

SEQ ID NO: 983578 - DNA, 25 bp, Homo sapien
gagtgtcacattcatcaaaggaaag

SEQ ID NO: 983579 - DNA, 25 bp, Homo sapien
actgtgaaattgatgactggtggga

SEQ ID NO: 983580 - DNA, 25 bp, Homo sapien
gagatgggaactgtgaaattgatga

SEQ ID NO: 983581 - DNA, 25 bp, Homo sapien
tgagagatgggaactgtgaaattga

SEQ ID NO: 983582 - DNA, 25 bp, Homo sapien
tgggaactgtgaaattgatgactgg

SEQ ID NO: 983583 - DNA, 25 bp, Homo sapien
ggacaccatgggaagttgctaagct

SEQ ID NO: 983584 - DNA, 25 bp, Homo sapien
ctgctgccccaagacctgagtggac

SEQ ID NO: 983585 - DNA, 25 bp, Homo sapien
gctaagctgtagcaaagggagactt

SEQ ID NO: 983586 - DNA, 25 bp, Homo sapien
tcttcaaaggggacccaatggcctc

SEQ ID NO: 983587 - DNA, 25 bp, Homo sapien
tcttcactcgaggaagcccataatc

SEQ ID NO: 983588 - DNA, 25 bp, Homo sapien
cccataatcccaccaaacattggca

SEQ ID NO: 983589 - DNA, 25 bp, Homo sapien
ccacagagtcttcactcgaggaagc

SEQ ID NO: 983590 - DNA, 25 bp, Homo sapien
tggccccacagagtcttcactcgag

SEQ ID NO: 983591 - DNA, 25 bp, Homo sapien
tagatgtgtcctcaacaagccgacc

SEQ ID NO: 983592 - DNA, 25 bp, Homo sapien
tcaggtgcccatgactgtaaagtag

SEQ ID NO: 983593 - DNA, 25 bp, Homo sapien
gaaatcaacaccaggtcctaacttg

SEQ ID NO: 983594 - DNA, 25 bp, Homo sapien
caacttcacaaaaccgggcacagaa

SEQ ID NO: 983595 - DNA, 25 bp, Homo sapien
aggtgacaggaatacagaaaggagc

SEQ ID NO: 983596 - DNA, 25 bp, Homo sapien
ctttttcaggtgacaggaatacaga

SEQ ID NO: 983597 - DNA, 25 bp, Homo sapien
tcaggtgacaggaatacagaaagga

SEQ ID NO: 983598 - DNA, 25 bp, Homo sapien
tttcaggtgacaggaatacagaaag

SEQ ID NO: 983599 - DNA, 25 bp, Homo sapien
gataaagggtcagatccactgcaag

SEQ ID NO: 983600 - DNA, 25 bp, Homo sapien
aggcctttcagtagactcagcagct

SEQ ID NO: 983601 - DNA, 25 bp, Homo sapien
tcttctgaatccactctgtggatca

SEQ ID NO: 983602 - DNA, 25 bp, Homo sapien
actctgtggatcagttccacggaca

SEQ ID NO: 983603 - DNA, 25 bp, Homo sapien
atccaatctgaagagcatcttccaa

SEQ ID NO: 983604 - DNA, 25 bp, Homo sapien
gatccaatctgaagagcatcttcca

SEQ ID NO: 983605 - DNA, 25 bp, Homo sapien
aacagccctgagaggtaactgatag

SEQ ID NO: 983606 - DNA, 25 bp, Homo sapien
acagccctgagaggtaactgataga

SEQ ID NO: 983607 - DNA, 25 bp, Homo sapien
tcaagacatctgcatggaagcacca

SEQ ID NO: 983608 - DNA, 25 bp, Homo sapien
gcatggaagcaccagatatctgcag

SEQ ID NO: 983609 - DNA, 25 bp, Homo sapien
gatatctgcagaaaccaccttacaa

SEQ ID NO: 983610 - DNA, 25 bp, Homo sapien
ccttacaagggcaaggtgtccccag

SEQ ID NO: 983611 - DNA, 25 bp, Homo sapien
cgcagcagttggacacgaggcttct

SEQ ID NO: 983612 - DNA, 25 bp, Homo sapien
gcagcagttggacacgaggcttctc

SEQ ID NO: 983613 - DNA, 25 bp, Homo sapien
aggcgcagcagttggacacgaggct

SEQ ID NO: 983614 - DNA, 25 bp, Homo sapien
gcgcagcagttggacacgaggcttc

SEQ ID NO: 983615 - DNA, 25 bp, Homo sapien
ctgtccacgggtgcctgcccgtgag

SEQ ID NO: 983616 - DNA, 25 bp, Homo sapien
cctgatgcagagaccgagaatctgg

SEQ ID NO: 983617 - DNA, 25 bp, Homo sapien
gtgcctgcccgtgagtgttgtgtgt

SEQ ID NO: 983618 - DNA, 25 bp, Homo sapien
tgcagagaccgagaatctggctcca

SEQ ID NO: 983619 - DNA, 25 bp, Homo sapien
atagcccacacctcactgtcccacc

SEQ ID NO: 983620 - DNA, 25 bp, Homo sapien
ctcgatggcagccgccccatagccc

SEQ ID NO: 983621 - DNA, 25 bp, Homo sapien
cgccccatagcccacacctcactgt

SEQ ID NO: 983622 - DNA, 25 bp, Homo sapien
ccatagcccacacctcactgtccca

SEQ ID NO: 983623 - DNA, 25 bp, Homo sapien
taggctgatctaccagggctccaga

SEQ ID NO: 983624 - DNA, 25 bp, Homo sapien
aaacctgccagatataggctgatct

SEQ ID NO: 983625 - DNA, 25 bp, Homo sapien
tcaacaaatagaacgacgacctcag

SEQ ID NO: 983626 - DNA, 25 bp, Homo sapien
gacgacctcagtggtgcagaaggaa

SEQ ID NO: 983627 - DNA, 25 bp, Homo sapien
gaaatgtgtaccaggcttgcagaca

SEQ ID NO: 983628 - DNA, 25 bp, Homo sapien
agtcctggtgctcccgaagcggaga

SEQ ID NO: 983629 - DNA, 25 bp, Homo sapien
caagtcctccaagaaaaggatcaga

SEQ ID NO: 983630 - DNA, 25 bp, Homo sapien
agaaaaggatcagacaatcgctgtc

SEQ ID NO: 983631 - DNA, 25 bp, Homo sapien
tgccaggagtgaatgtaatcagtag

SEQ ID NO: 983632 - DNA, 25 bp, Homo sapien
gaggagaatgttggtactgttcaga

SEQ ID NO: 983633 - DNA, 25 bp, Homo sapien
taacaatcctggctgtcaaaaatgc

SEQ ID NO: 983634 - DNA, 25 bp, Homo sapien
cacaaaagcatgcacgattcacagg

SEQ ID NO: 983635 - DNA, 25 bp, Homo sapien
gcctgggtttagcaaagctcactct

SEQ ID NO: 983636 - DNA, 25 bp, Homo sapien
tgcctgctttcttagatcttctcat

SEQ ID NO: 983637 - DNA, 25 bp, Homo sapien
tctcatccgagcataaagccagcag

SEQ ID NO: 983638 - DNA, 25 bp, Homo sapien
gcaacttcatgcaattgggcctggg

SEQ ID NO: 983639 - DNA, 25 bp, Homo sapien
ccagagaagagggtagatccatcgt

SEQ ID NO: 983640 - DNA, 25 bp, Homo sapien
tattagcagctctgagatacccaga

SEQ ID NO: 983641 - DNA, 25 bp, Homo sapien
tgatgcccgggctagtcagaggccc

SEQ ID NO: 983642 - DNA, 25 bp, Homo sapien
ctaaagacattctttgggcctgaac

SEQ ID NO: 983643 - DNA, 25 bp, Homo sapien
accaatggcctgttctctgcagttc

SEQ ID NO: 983644 - DNA, 25 bp, Homo sapien
tctctagcactctgctcaaaccaat

SEQ ID NO: 983645 - DNA, 25 bp, Homo sapien
cactctgctcaaaccaatggcctgt

SEQ ID NO: 983646 - DNA, 25 bp, Homo sapien
gctcaaaccaatggcctgttctctg

SEQ ID NO: 983647 - DNA, 25 bp, Homo sapien
cttctcctactccttctcctcttca

SEQ ID NO: 983648 - DNA, 25 bp, Homo sapien
tctcctccttctcctactccttttc

SEQ ID NO: 983649 - DNA, 25 bp, Homo sapien
cttctcctactccttttcctcttca

SEQ ID NO: 983650 - DNA, 25 bp, Homo sapien
tctttctctgcctccttctccccct

SEQ ID NO: 983651 - DNA, 25 bp, Homo sapien
tctcctccttttcctcgtcctcctc

SEQ ID NO: 983652 - DNA, 25 bp, Homo sapien
ttcctccccattctttctcctcctc

SEQ ID NO: 983653 - DNA, 25 bp, Homo sapien
tctcctcctccttctcctccttttc

SEQ ID NO: 983654 - DNA, 25 bp, Homo sapien
ctcctccttctcctccttttcctcg

SEQ ID NO: 983655 - DNA, 25 bp, Homo sapien
gcattctcctttccgacctgccatc

SEQ ID NO: 983656 - DNA, 25 bp, Homo sapien
ctctggactcctgcactgaccatcc

SEQ ID NO: 983657 - DNA, 25 bp, Homo sapien
cctactactaccaggatggagatcc

SEQ ID NO: 983658 - DNA, 25 bp, Homo sapien
ttctttttctgcagtccccaattga

SEQ ID NO: 983659 - DNA, 25 bp, Homo sapien
caaatatggtccaagcagggaaaca

SEQ ID NO: 983660 - DNA, 25 bp, Homo sapien
caacacgacagtcttgcagcttcct

SEQ ID NO: 983661 - DNA, 25 bp, Homo sapien
gaagaatcaaatatggtccaagcag

SEQ ID NO: 983662 - DNA, 25 bp, Homo sapien
acatgacatccgcagacccagattc

SEQ ID NO: 983663 - DNA, 25 bp, Homo sapien
gtcttcagaaatcggattggcaccc

SEQ ID NO: 983664 - DNA, 25 bp, Homo sapien
aaagtcttcagaaatcggattggca

SEQ ID NO: 983665 - DNA, 25 bp, Homo sapien
agtcttcagaaatcggattggcacc

SEQ ID NO: 983666 - DNA, 25 bp, Homo sapien
cttcagaaatcggattggcacccat

SEQ ID NO: 983667 - DNA, 25 bp, Homo sapien
agaggtggaccccattgtcacacat

SEQ ID NO: 983668 - DNA, 25 bp, Homo sapien
ttcttttgcaaaccatgtgctgctg

SEQ ID NO: 983669 - DNA, 25 bp, Homo sapien
ggaggcacccactgttgctggagct

SEQ ID NO: 983670 - DNA, 25 bp, Homo sapien
ctgtacgcgtaggtgggatctgcct

SEQ ID NO: 983671 - DNA, 25 bp, Homo sapien
caaggtgggcgtaatgtccaacaaa

SEQ ID NO: 983672 - DNA, 25 bp, Homo sapien
ggagcgccgcattgacactgcagat

SEQ ID NO: 983673 - DNA, 25 bp, Homo sapien
cccgcgggctgaatgtccttgatgc

SEQ ID NO: 983674 - DNA, 25 bp, Homo sapien
cactgcagatggagcctatgccgct

SEQ ID NO: 983675 - DNA, 25 bp, Homo sapien
cccacccttgccgagacactcgccg

SEQ ID NO: 983676 - DNA, 25 bp, Homo sapien
ccttgccgagacactcgccgggcag

SEQ ID NO: 983677 - DNA, 25 bp, Homo sapien
ttgccgagacactcgccgggcagtg

SEQ ID NO: 983678 - DNA, 25 bp, Homo sapien
acccttgccgagacactcgccgggc

SEQ ID NO: 983679 - DNA, 25 bp, Homo sapien
cgggctgctcgcaaagtttgcaggg

SEQ ID NO: 983680 - DNA, 25 bp, Homo sapien
cgggcgggctgctcgcaaagtttgc

SEQ ID NO: 983681 - DNA, 25 bp, Homo sapien
gggcgggctgctcgcaaagtttgca

SEQ ID NO: 983682 - DNA, 25 bp, Homo sapien
cggagagctcggccgcgggccgagc

SEQ ID NO: 983683 - DNA, 25 bp, Homo sapien
ccagctgcgtggataggctgatccc

SEQ ID NO: 983684 - DNA, 25 bp, Homo sapien
ttcgtggcagcacactttgaaaacc

SEQ ID NO: 983685 - DNA, 25 bp, Homo sapien
tgatcccttgatgggaccctgctgg

SEQ ID NO: 983686 - DNA, 25 bp, Homo sapien
ttgaagtcccgcaacttcgtggcag

SEQ ID NO: 983687 - DNA, 25 bp, Homo sapien
gccatcgggaagtgttagtacaatt

SEQ ID NO: 983688 - DNA, 25 bp, Homo sapien
ctctctaatgccatcgggaagtgtt

SEQ ID NO: 983689 - DNA, 25 bp, Homo sapien
aatggattcttctctacccgtggaa

SEQ ID NO: 983690 - DNA, 25 bp, Homo sapien
ctgagaagtggaaagatctctctaa

SEQ ID NO: 983691 - DNA, 25 bp, Homo sapien
cacagggagcaattggctccacagc

SEQ ID NO: 983692 - DNA, 25 bp, Homo sapien
ccttctcactccacagggagcaatt

SEQ ID NO: 983693 - DNA, 25 bp, Homo sapien
tagacttggtcgtggcctgtgttcc

SEQ ID NO: 983694 - DNA, 25 bp, Homo sapien
caaacaatagacttggtcgtggcct

SEQ ID NO: 983695 - DNA, 25 bp, Homo sapien
gtcagaaggctttgtgtggatctga

SEQ ID NO: 983696 - DNA, 25 bp, Homo sapien
aaggtcagaaggctttgtgtggatc

SEQ ID NO: 983697 - DNA, 25 bp, Homo sapien
gtcatggacatttgcattcctgctg

SEQ ID NO: 983698 - DNA, 25 bp, Homo sapien
aggggtcatggacatttgcattcct

SEQ ID NO: 983699 - DNA, 25 bp, Homo sapien
tcaaggtttcagtccccatgttccc

SEQ ID NO: 983700 - DNA, 25 bp, Homo sapien
aaaacgctgggccacgctactagtg

SEQ ID NO: 983701 - DNA, 25 bp, Homo sapien
gctactagtgggcaagatctccatg

SEQ ID NO: 983702 - DNA, 25 bp, Homo sapien
aatactggtctgattgggctgtgtc

SEQ ID NO: 983703 - DNA, 25 bp, Homo sapien
cacaggcacgctggagtggcctgtt

SEQ ID NO: 983704 - DNA, 25 bp, Homo sapien
gggtgagtctgtgtcaataagatcc

SEQ ID NO: 983705 - DNA, 25 bp, Homo sapien
aggcacgctggagtggcctgtttcc

SEQ ID NO: 983706 - DNA, 25 bp, Homo sapien
taagatccgggttctcagcagaagg

SEQ ID NO: 983707 - DNA, 25 bp, Homo sapien
agaaccacttcctcacagacctggc

SEQ ID NO: 983708 - DNA, 25 bp, Homo sapien
gaagatacagctggggaccataccc

SEQ ID NO: 983709 - DNA, 25 bp, Homo sapien
gcagctgctcctgaaatgacatcat

SEQ ID NO: 983710 - DNA, 25 bp, Homo sapien
cctgtcctcaggtggcagctgctcc

SEQ ID NO: 983711 - DNA, 25 bp, Homo sapien
agtctctgccttgcggcctggctga

SEQ ID NO: 983712 - DNA, 25 bp, Homo sapien
tgcacttctgacaagacggaaaaga

SEQ ID NO: 983713 - DNA, 25 bp, Homo sapien
ccatgggcctttattacagtaacta

SEQ ID NO: 983714 - DNA, 25 bp, Homo sapien
tctcattagtgggccgccttccctg

SEQ ID NO: 983715 - DNA, 25 bp, Homo sapien
tgggctctgctccataagcgtttgg

SEQ ID NO: 983716 - DNA, 25 bp, Homo sapien
taagcggctgagaaaattgctggca

SEQ ID NO: 983717 - DNA, 25 bp, Homo sapien
gcaatttagtggcaggcgggctcct

SEQ ID NO: 983718 - DNA, 25 bp, Homo sapien
gacttgcacgcagctgatgttgatt

SEQ ID NO: 983719 - DNA, 25 bp, Homo sapien
cctcaaatgctagagccacaggaga

SEQ ID NO: 983720 - DNA, 25 bp, Homo sapien
agggcataaatcagtcctgtcctca

SEQ ID NO: 983721 - DNA, 25 bp, Homo sapien
cttgttgttccttaggatcaagaac

SEQ ID NO: 983722 - DNA, 25 bp, Homo sapien
tccatggggctcgacgaatactgag

SEQ ID NO: 983723 - DNA, 25 bp, Homo sapien
gctgaacctcttgcagctgcacttg

SEQ ID NO: 983724 - DNA, 25 bp, Homo sapien
gccaggatggaacagtgtctgcctt

SEQ ID NO: 983725 - DNA, 25 bp, Homo sapien
cagccaggatggaacagtgtctgcc

SEQ ID NO: 983726 - DNA, 25 bp, Homo sapien
agccaggatggaacagtgtctgcct

SEQ ID NO: 983727 - DNA, 25 bp, Homo sapien
aaggcttcatggcagattgcgacga

SEQ ID NO: 983728 - DNA, 25 bp, Homo sapien
cagagctcctaggtatgccaaggct

SEQ ID NO: 983729 - DNA, 25 bp, Homo sapien
gctgttccctccgactcactgaagt

SEQ ID NO: 983730 - DNA, 25 bp, Homo sapien
gggaagcagtccatctcgtcaagtg

SEQ ID NO: 983731 - DNA, 25 bp, Homo sapien
cactccaccttgctaccacatctca

SEQ ID NO: 983732 - DNA, 25 bp, Homo sapien
ctcagccctttgtcaatataaaggg

SEQ ID NO: 983733 - DNA, 25 bp, Homo sapien
acatctcagccctttgtcaatataa

SEQ ID NO: 983734 - DNA, 25 bp, Homo sapien
tctcagccctttgtcaatataaagg

SEQ ID NO: 983735 - DNA, 25 bp, Homo sapien
gtacttccaatatgtatggctcatg

SEQ ID NO: 983736 - DNA, 25 bp, Homo sapien
tgtttctaggtagtgtatttcctcc

SEQ ID NO: 983737 - DNA, 25 bp, Homo sapien
tgaattttcagtcggcaaagatgct

SEQ ID NO: 983738 - DNA, 25 bp, Homo sapien
gaagtttcattacatgttcttgatg

SEQ ID NO: 983739 - DNA, 25 bp, Homo sapien
tcataggcttgtgtcatcagcacca

SEQ ID NO: 983740 - DNA, 25 bp, Homo sapien
gaaaagtctaccatgtcctcaggtg

SEQ ID NO: 983741 - DNA, 25 bp, Homo sapien
tgatatttactcagtgctgccaaat

SEQ ID NO: 983742 - DNA, 25 bp, Homo sapien
gacagtgtctgtccgtgaagtgaaa

SEQ ID NO: 983743 - DNA, 25 bp, Homo sapien
tgaccctccagcaaacctagaggat

SEQ ID NO: 983744 - DNA, 25 bp, Homo sapien
accctccagcaaacctagaggatca

SEQ ID NO: 983745 - DNA, 25 bp, Homo sapien
catgaccctccagcaaacctagagg

SEQ ID NO: 983746 - DNA, 25 bp, Homo sapien
aacctagaggatcaagcagcgccat

SEQ ID NO: 983747 - DNA, 25 bp, Homo sapien
tgagctggctgctcgtcagacgcag

SEQ ID NO: 983748 - DNA, 25 bp, Homo sapien
tgccgaggacctccgtctatcactg

SEQ ID NO: 983749 - DNA, 25 bp, Homo sapien
tccatgagtggccaatggtgagcag

SEQ ID NO: 983750 - DNA, 25 bp, Homo sapien
aatagggacatgctcaatcaggcag

SEQ ID NO: 983751 - DNA, 25 bp, Homo sapien
tcctgtcttgaatgtgcaaaggtcc

SEQ ID NO: 983752 - DNA, 25 bp, Homo sapien
tctcctgtcttgaatgtgcaaaggt

SEQ ID NO: 983753 - DNA, 25 bp, Homo sapien
cctgtcttgaatgtgcaaaggtcca

SEQ ID NO: 983754 - DNA, 25 bp, Homo sapien
ctgtcttgaatgtgcaaaggtccag

SEQ ID NO: 983755 - DNA, 25 bp, Homo sapien
catcagaatgcggtgaccagcagca

SEQ ID NO: 983756 - DNA, 25 bp, Homo sapien
tttgattcttcaaagggcatcagaa

SEQ ID NO: 983757 - DNA, 25 bp, Homo sapien
caaagggcatcagaatgcggtgacc

SEQ ID NO: 983758 - DNA, 25 bp, Homo sapien
caaccagtctctcagcggggcttta

SEQ ID NO: 983759 - DNA, 25 bp, Homo sapien
gcctcattggagagcttttggtcac

SEQ ID NO: 983760 - DNA, 25 bp, Homo sapien
tggtcacaaattagaggcatgcttg

SEQ ID NO: 983761 - DNA, 25 bp, Homo sapien
caaattagaggcatgcttgggtcct

SEQ ID NO: 983762 - DNA, 25 bp, Homo sapien
ggtccttagacacgctgagttgact

SEQ ID NO: 983763 - DNA, 25 bp, Homo sapien
gacaatacccgcattcttttccaac

SEQ ID NO: 983764 - DNA, 25 bp, Homo sapien
tactggcagcgtgtgacaatacccg

SEQ ID NO: 983765 - DNA, 25 bp, Homo sapien
acatccccatttaccgcgtgatgaa

SEQ ID NO: 983766 - DNA, 25 bp, Homo sapien
taccgcgtgatgaattactggcagc

SEQ ID NO: 983767 - DNA, 25 bp, Homo sapien
ctttgccacctgtctcatggcatct

SEQ ID NO: 983768 - DNA, 25 bp, Homo sapien
ttacaccagtgttttcactgagaag

SEQ ID NO: 983769 - DNA, 25 bp, Homo sapien
acaccagtgttttcactgagaagga

SEQ ID NO: 983770 - DNA, 25 bp, Homo sapien
catctctctatggactggcatttgg

SEQ ID NO: 983771 - DNA, 25 bp, Homo sapien
ccaccacgacaagcacccccagcct

SEQ ID NO: 983772 - DNA, 25 bp, Homo sapien
caccacgacaagcacccccagcctt

SEQ ID NO: 983773 - DNA, 25 bp, Homo sapien
acccccagccttggctgctaggcat

SEQ ID NO: 983774 - DNA, 25 bp, Homo sapien
ctcccaccacgacaagcacccccag

SEQ ID NO: 983775 - DNA, 25 bp, Homo sapien
tctttttgcaacagaccccagaggt

SEQ ID NO: 983776 - DNA, 25 bp, Homo sapien
cccagaggtggtgtcatgaccctcc

SEQ ID NO: 983777 - DNA, 25 bp, Homo sapien
tcaggcatccgtgctctctctcctg

SEQ ID NO: 983778 - DNA, 25 bp, Homo sapien
gagacatacagggatagaggggcct

SEQ ID NO: 983779 - DNA, 25 bp, Homo sapien
gtttgaacacgtggtccaatctcct

SEQ ID NO: 983780 - DNA, 25 bp, Homo sapien
aatggcactgtcagccctgactcat

SEQ ID NO: 983781 - DNA, 25 bp, Homo sapien
cacatagcctttgtttgaacacgtg

SEQ ID NO: 983782 - DNA, 25 bp, Homo sapien
gactcacatagcctttgtttgaaca

SEQ ID NO: 983783 - DNA, 25 bp, Homo sapien
ggcagacagaatgcccataaacatt

SEQ ID NO: 983784 - DNA, 25 bp, Homo sapien
ggttcacaccctgtgccttgcatga

SEQ ID NO: 983785 - DNA, 25 bp, Homo sapien
actaccctggatagcttggaagcag

SEQ ID NO: 983786 - DNA, 25 bp, Homo sapien
tgcatgatatcagtaactaccctgg

SEQ ID NO: 983787 - DNA, 25 bp, Homo sapien
ccccactagcatacaagctttctat

SEQ ID NO: 983788 - DNA, 25 bp, Homo sapien
cccactagcatacaagctttctatt

SEQ ID NO: 983789 - DNA, 25 bp, Homo sapien
ctcccccactagcatacaagctttc

SEQ ID NO: 983790 - DNA, 25 bp, Homo sapien
cactagcatacaagctttctatttg

SEQ ID NO: 983791 - DNA, 25 bp, Homo sapien
taattggctttgagaacatgttgac

SEQ ID NO: 983792 - DNA, 25 bp, Homo sapien
aatttggaagcaacttgacattttc

SEQ ID NO: 983793 - DNA, 25 bp, Homo sapien
ccgggaccaccaggtcacttgcaaa

SEQ ID NO: 983794 - DNA, 25 bp, Homo sapien
agtatggttcattttgaatggtccc

SEQ ID NO: 983795 - DNA, 25 bp, Homo sapien
agcagttgaggccattccgaggatt

SEQ ID NO: 983796 - DNA, 25 bp, Homo sapien
tgtgtacaaataccctggcccaaca

SEQ ID NO: 983797 - DNA, 25 bp, Homo sapien
gcttgcattgacagctccgtggcag

SEQ ID NO: 983798 - DNA, 25 bp, Homo sapien
gagtggccgagagaatagaaatctt

SEQ ID NO: 983799 - DNA, 25 bp, Homo sapien
ttaagttgggccttgtagacagact

SEQ ID NO: 983800 - DNA, 25 bp, Homo sapien
ttgtagacagactgcgaggcacaga

SEQ ID NO: 983801 - DNA, 25 bp, Homo sapien
aagctgtttcttggccgcggcatgc

SEQ ID NO: 983802 - DNA, 25 bp, Homo sapien
ggcatgcttgcatgagctatatggg

SEQ ID NO: 983803 - DNA, 25 bp, Homo sapien
ccccagtagcaaaagggcccttctg

SEQ ID NO: 983804 - DNA, 25 bp, Homo sapien
cccagtagcaaaagggcccttctgc

SEQ ID NO: 983805 - DNA, 25 bp, Homo sapien
cctgggaagttcgatgggggaggca

SEQ ID NO: 983806 - DNA, 25 bp, Homo sapien
ttctccagcccagcattaccctggg

SEQ ID NO: 983807 - DNA, 25 bp, Homo sapien
agttttgccgtcactaaagctgcta

SEQ ID NO: 983808 - DNA, 25 bp, Homo sapien
gcaaagatttgcactgccagccaag

SEQ ID NO: 983809 - DNA, 25 bp, Homo sapien
gagtcaagaatagtcttggtgctag

SEQ ID NO: 983810 - DNA, 25 bp, Homo sapien
tggtgctagagggaccaagccagca

SEQ ID NO: 983811 - DNA, 25 bp, Homo sapien
cccagtgcgaatgggagtgggtccc

SEQ ID NO: 983812 - DNA, 25 bp, Homo sapien
cctcccagtgcgaatgggagtgggt

SEQ ID NO: 983813 - DNA, 25 bp, Homo sapien
tgcagtccgcctcccagtgcgaatg

SEQ ID NO: 983814 - DNA, 25 bp, Homo sapien
ccgcctcccagtgcgaatgggagtg

SEQ ID NO: 983815 - DNA, 25 bp, Homo sapien
ctaaagggctacaggggagcaggcc

SEQ ID NO: 983816 - DNA, 25 bp, Homo sapien
gctacaggggagcaggccccagagg

SEQ ID NO: 983817 - DNA, 25 bp, Homo sapien
gggctacaggggagcaggccccaga

SEQ ID NO: 983818 - DNA, 25 bp, Homo sapien
tacaggggagcaggccccagaggcc

SEQ ID NO: 983819 - DNA, 25 bp, Homo sapien
tcagcacaggaatagcaaccggctg

SEQ ID NO: 983820 - DNA, 25 bp, Homo sapien
gaaccaagggcaatcagctttgcct

SEQ ID NO: 983821 - DNA, 25 bp, Homo sapien
caggaatagcaaccggctgtggaca

SEQ ID NO: 983822 - DNA, 25 bp, Homo sapien
ctgtggacacccagtgcggaaccaa

SEQ ID NO: 983823 - DNA, 25 bp, Homo sapien
gcaaatacatcacttggcttcgata

SEQ ID NO: 983824 - DNA, 25 bp, Homo sapien
tggagcatggtggatgctcacagca

SEQ ID NO: 983825 - DNA, 25 bp, Homo sapien
ggcttcgataacctgcagctgattg

SEQ ID NO: 983826 - DNA, 25 bp, Homo sapien
taatcagtgaggatcggtgggcctc

SEQ ID NO: 983827 - DNA, 25 bp, Homo sapien
cacacttgagcaccccttgggcagt

SEQ ID NO: 983828 - DNA, 25 bp, Homo sapien
acacttgagcaccccttgggcagtc

SEQ ID NO: 983829 - DNA, 25 bp, Homo sapien
gaagagcatgtctgcgcacaggtgc

SEQ ID NO: 983830 - DNA, 25 bp, Homo sapien
gccgtggtctggtcatctttcctga

SEQ ID NO: 983831 - DNA, 25 bp, Homo sapien
tgtctgcgcacaggtgccgtggtct

SEQ ID NO: 983832 - DNA, 25 bp, Homo sapien
gtgccgtggtctggtcatctttcct

SEQ ID NO: 983833 - DNA, 25 bp, Homo sapien
gaaaatctttgtctactccacactc

SEQ ID NO: 983834 - DNA, 25 bp, Homo sapien
ttgaaaatctttgtctactccacac

SEQ ID NO: 983835 - DNA, 25 bp, Homo sapien
cttgaaaatctttgtctactccaca

SEQ ID NO: 983836 - DNA, 25 bp, Homo sapien
aatctttgtctactccacactctct

SEQ ID NO: 983837 - DNA, 25 bp, Homo sapien
cctctccttgctgcctccaccctcc

SEQ ID NO: 983838 - DNA, 25 bp, Homo sapien
atcctctccttgctgcctccaccct

SEQ ID NO: 983839 - DNA, 25 bp, Homo sapien
tctccttgctgcctccaccctcctc

SEQ ID NO: 983840 - DNA, 25 bp, Homo sapien
actctccatcctctccttgctgcct

SEQ ID NO: 983841 - DNA, 25 bp, Homo sapien
tggagcagcgccaagagtagtaccc

SEQ ID NO: 983842 - DNA, 25 bp, Homo sapien
gacgtaggctgttttccagtcagtg

SEQ ID NO: 983843 - DNA, 25 bp, Homo sapien
ggcatgcaggtgagacgcccagaac

SEQ ID NO: 983844 - DNA, 25 bp, Homo sapien
taccctgaatgctgcgggcatgcag

SEQ ID NO: 983845 - DNA, 25 bp, Homo sapien
cttctgtcaagccttgtgttaacat

SEQ ID NO: 983846 - DNA, 25 bp, Homo sapien
ttctgtcaagccttgtgttaacatc

SEQ ID NO: 983847 - DNA, 25 bp, Homo sapien
tctgtcaagccttgtgttaacatca

SEQ ID NO: 983848 - DNA, 25 bp, Homo sapien
taaagagcgctgagattctcttctt

SEQ ID NO: 983849 - DNA, 25 bp, Homo sapien
cttcagctgatgctgcggcttccca

SEQ ID NO: 983850 - DNA, 25 bp, Homo sapien
tgcggcttcccaaccggcttctaaa

SEQ ID NO: 983851 - DNA, 25 bp, Homo sapien
aaccggcttctaaagagcgctgaga

SEQ ID NO: 983852 - DNA, 25 bp, Homo sapien
acagatgatactaatttgggaggtg

SEQ ID NO: 983853 - DNA, 25 bp, Homo sapien
gggtaaacagggagcgatgaaattc

SEQ ID NO: 983854 - DNA, 25 bp, Homo sapien
aacagggagcgatgaaattcacaga

SEQ ID NO: 983855 - DNA, 25 bp, Homo sapien
gatgatactaatttgggaggtgcca

SEQ ID NO: 983856 - DNA, 25 bp, Homo sapien
catcatggcagcaaaagtcttcttt

SEQ ID NO: 983857 - DNA, 25 bp, Homo sapien
atcatggcagcaaaagtcttctttt

SEQ ID NO: 983858 - DNA, 25 bp, Homo sapien
actgatgtgaggctctacttagagt

SEQ ID NO: 983859 - DNA, 25 bp, Homo sapien
ggactgatgtgaggctctacttaga

SEQ ID NO: 983860 - DNA, 25 bp, Homo sapien
tctacttagagtgcctactccaggt

SEQ ID NO: 983861 - DNA, 25 bp, Homo sapien
gctctacttagagtgcctactccag

SEQ ID NO: 983862 - DNA, 25 bp, Homo sapien
ctgcacagagcccgatgcagagcct

SEQ ID NO: 983863 - DNA, 25 bp, Homo sapien
ggggcttatattctaaggacgtcat

SEQ ID NO: 983864 - DNA, 25 bp, Homo sapien
actgcacagagcccgatgcagagcc

SEQ ID NO: 983865 - DNA, 25 bp, Homo sapien
cactgcacagagcccgatgcagagc

SEQ ID NO: 983866 - DNA, 25 bp, Homo sapien
tatctgcattcatgagcagctccag

SEQ ID NO: 983867 - DNA, 25 bp, Homo sapien
cagctccaaagccaatgtaccagta

SEQ ID NO: 983868 - DNA, 25 bp, Homo sapien
tgactttgcatggagccccacccat

SEQ ID NO: 983869 - DNA, 25 bp, Homo sapien
tgaaagttccagaccgacagtcact

SEQ ID NO: 983870 - DNA, 25 bp, Homo sapien
gggcctgctgagtggttgcacctgg

SEQ ID NO: 983871 - DNA, 25 bp, Homo sapien
ggcctgctgagtggttgcacctggg

SEQ ID NO: 983872 - DNA, 25 bp, Homo sapien
ctggctgtgtctccccctctaccac

SEQ ID NO: 983873 - DNA, 25 bp, Homo sapien
acgcgcacacagcctggctgtgtct

SEQ ID NO: 983874 - DNA, 25 bp, Homo sapien
gcagaagcagtgcacgcgcacacag

SEQ ID NO: 983875 - DNA, 25 bp, Homo sapien
cttccggaggcagaagcagtgcacg

SEQ ID NO: 983876 - DNA, 25 bp, Homo sapien
ggacatctaactgagctggcaccat

SEQ ID NO: 983877 - DNA, 25 bp, Homo sapien
gactctagtagagcaagccttcgca

SEQ ID NO: 983878 - DNA, 25 bp, Homo sapien
cctaattagcagttccatggagtac

SEQ ID NO: 983879 - DNA, 25 bp, Homo sapien
gatagcaaaaaggatccagtccagg

SEQ ID NO: 983880 - DNA, 25 bp, Homo sapien
taacatgatcaaaacggaacctctg

SEQ ID NO: 983881 - DNA, 25 bp, Homo sapien
gttgctcaggcaaatcttcgggtcc

SEQ ID NO: 983882 - DNA, 25 bp, Homo sapien
gacatatatccaaaggcctgcatag

SEQ ID NO: 983883 - DNA, 25 bp, Homo sapien
ccatcttgacaacgaggacctgaaa

SEQ ID NO: 983884 - DNA, 25 bp, Homo sapien
ttaatgactgatccctgatcaaggc

SEQ ID NO: 983885 - DNA, 25 bp, Homo sapien
aggctttggcccttcaaactgctgc

SEQ ID NO: 983886 - DNA, 25 bp, Homo sapien
aaactgctgctgttcaaaacgtgaa

SEQ ID NO: 983887 - DNA, 25 bp, Homo sapien
tgctgccctcggatctatgttttct

SEQ ID NO: 983888 - DNA, 25 bp, Homo sapien
cttcttgattatcttcgtgctctct

SEQ ID NO: 983889 - DNA, 25 bp, Homo sapien
tcttgattatcttcgtgctctctga

SEQ ID NO: 983890 - DNA, 25 bp, Homo sapien
gattatcttcgtgctctctgaaagt

SEQ ID NO: 983891 - DNA, 25 bp, Homo sapien
ttatcttcgtgctctctgaaagtgg

SEQ ID NO: 983892 - DNA, 25 bp, Homo sapien
gatgtgggtcggggagagaagcagg

SEQ ID NO: 983893 - DNA, 25 bp, Homo sapien
ctgatgtgggtcggggagagaagca

SEQ ID NO: 983894 - DNA, 25 bp, Homo sapien
tgggtcggggagagaagcagggtga

SEQ ID NO: 983895 - DNA, 25 bp, Homo sapien
tgtgggtcggggagagaagcagggt

SEQ ID NO: 983896 - DNA, 25 bp, Homo sapien
actgaaacttctgctatggtttggg

SEQ ID NO: 983897 - DNA, 25 bp, Homo sapien
tgactgaaacttctgctatggtttg

SEQ ID NO: 983898 - DNA, 25 bp, Homo sapien
gaaacttctgctatggtttggggga

SEQ ID NO: 983899 - DNA, 25 bp, Homo sapien
tgaaacttctgctatggtttggggg

SEQ ID NO: 983900 - DNA, 25 bp, Homo sapien
agactcatcatctaactgcaggtcc

SEQ ID NO: 983901 - DNA, 25 bp, Homo sapien
acagactcatcatctaactgcaggt

SEQ ID NO: 983902 - DNA, 25 bp, Homo sapien
cagactcatcatctaactgcaggtc

SEQ ID NO: 983903 - DNA, 25 bp, Homo sapien
tgcccttggttgtcaggctccaggt

SEQ ID NO: 983904 - DNA, 25 bp, Homo sapien
gggttggtccttgcctctggtccca

SEQ ID NO: 983905 - DNA, 25 bp, Homo sapien
cctctggtcccagtttgcccttggt

SEQ ID NO: 983906 - DNA, 25 bp, Homo sapien
ttgcccttggttgtcaggctccagg

SEQ ID NO: 983907 - DNA, 25 bp, Homo sapien
tccccatgtgtgaccttcagactct

SEQ ID NO: 983908 - DNA, 25 bp, Homo sapien
ttaaaatgggccagtgccaagttgc

SEQ ID NO: 983909 - DNA, 25 bp, Homo sapien
cactgatagaagctccttctggcca

SEQ ID NO: 983910 - DNA, 25 bp, Homo sapien
gccaagttgcccctttcatcacggg

SEQ ID NO: 983911 - DNA, 25 bp, Homo sapien
ccgaaatgtaaggtggtgcaggttc

SEQ ID NO: 983912 - DNA, 25 bp, Homo sapien
ttctcgtccatttcaatgttgccca

SEQ ID NO: 983913 - DNA, 25 bp, Homo sapien
ttggttctcgtccatttcaatgttg

SEQ ID NO: 983914 - DNA, 25 bp, Homo sapien
gcaatcctaactactgccgaaatgt

SEQ ID NO: 983915 - DNA, 25 bp, Homo sapien
gcctacctacggcttatgggcccaa

SEQ ID NO: 983916 - DNA, 25 bp, Homo sapien
caatgatcggacacaagttatgccc

SEQ ID NO: 983917 - DNA, 25 bp, Homo sapien
gctttttcacacacagtggcccatt

SEQ ID NO: 983918 - DNA, 25 bp, Homo sapien
taatctgtatcctcttcgctagctc

SEQ ID NO: 983919 - DNA, 25 bp, Homo sapien
gacacagtgcatatactgggtggcc

SEQ ID NO: 983920 - DNA, 25 bp, Homo sapien
ttgacacagtgcatatactgggtgg

SEQ ID NO: 983921 - DNA, 25 bp, Homo sapien
tgacacagtgcatatactgggtggc

SEQ ID NO: 983922 - DNA, 25 bp, Homo sapien
tgtaaattccaaggactgtgactta

SEQ ID NO: 983923 - DNA, 25 bp, Homo sapien
gaatacaaatcggtgcaaagaaaac

SEQ ID NO: 983924 - DNA, 25 bp, Homo sapien
tgttacctcagctattagacatcgg

SEQ ID NO: 983925 - DNA, 25 bp, Homo sapien
tagacatcggaaccctacagaagtc

SEQ ID NO: 983926 - DNA, 25 bp, Homo sapien
gctgttaaacccagtgatcaggatt

SEQ ID NO: 983927 - DNA, 25 bp, Homo sapien
aaaagccgacacacaacacagtcag

SEQ ID NO: 983928 - DNA, 25 bp, Homo sapien
tgggatcaggtggtctcataaaacc

SEQ ID NO: 983929 - DNA, 25 bp, Homo sapien
actaaagctactaggcacattgcca

SEQ ID NO: 983930 - DNA, 25 bp, Homo sapien
gatgggagatgctcaacgctggcaa

SEQ ID NO: 983931 - DNA, 25 bp, Homo sapien
ggtgagtaagcccacgcatgagaaa

SEQ ID NO: 983932 - DNA, 25 bp, Homo sapien
tggcaagggatactccaggtcctct

SEQ ID NO: 983933 - DNA, 25 bp, Homo sapien
tgagtgtccagtacttccagcccaa

SEQ ID NO: 983934 - DNA, 25 bp, Homo sapien
taagggcactatctacagcagcgat

SEQ ID NO: 983935 - DNA, 25 bp, Homo sapien
tataggacccgatcagcacagactt

SEQ ID NO: 983936 - DNA, 25 bp, Homo sapien
tataacagccgaagagcgcaactgc

SEQ ID NO: 983937 - DNA, 25 bp, Homo sapien
aatctacgctgtcccaacatggtgg

SEQ ID NO: 983938 - DNA, 25 bp, Homo sapien
tcagcgtcttaacatgcattggccc

SEQ ID NO: 983939 - DNA, 25 bp, Homo sapien
caatagatttcccttcagaacccca

SEQ ID NO: 983940 - DNA, 25 bp, Homo sapien
tgtctccaatgcctcacagtcgatt

SEQ ID NO: 983941 - DNA, 25 bp, Homo sapien
caaatctggtctcacaacttctagg

SEQ ID NO: 983942 - DNA, 25 bp, Homo sapien
caatatgagctaggactgaagaccc

SEQ ID NO: 983943 - DNA, 25 bp, Homo sapien
caaataggaggattatggccagcaa

SEQ ID NO: 983944 - DNA, 25 bp, Homo sapien
ccagtatttaggagtgaggccatct

SEQ ID NO: 983945 - DNA, 25 bp, Homo sapien
aaagacttaagtactgctcaggatg

SEQ ID NO: 983946 - DNA, 25 bp, Homo sapien
cagtcacagtttcactggtgctcag

SEQ ID NO: 983947 - DNA, 25 bp, Homo sapien
gaagtaacgagttctcctactagga

SEQ ID NO: 983948 - DNA, 25 bp, Homo sapien
ttaccttttaggtccctgcaaatgc

SEQ ID NO: 983949 - DNA, 25 bp, Homo sapien
tcactggtgctcaggttgcctgaaa

SEQ ID NO: 983950 - DNA, 25 bp, Homo sapien
tgtccatgggataaactgagatgcc

SEQ ID NO: 983951 - DNA, 25 bp, Homo sapien
tgacaccttgggataactgaacatg

SEQ ID NO: 983952 - DNA, 25 bp, Homo sapien
cataaatgtgtccacgacgtggcaa

SEQ ID NO: 983953 - DNA, 25 bp, Homo sapien
taatgcaagcaaggtagtgacccac

SEQ ID NO: 983954 - DNA, 25 bp, Homo sapien
taaacggttcacacttgagaaggga

SEQ ID NO: 983955 - DNA, 25 bp, Homo sapien
gagagaggcatgctcccatcaagct

SEQ ID NO: 983956 - DNA, 25 bp, Homo sapien
caaaaggctgagtttatcgggagga

SEQ ID NO: 983957 - DNA, 25 bp, Homo sapien
tgagacaggtcctaacaaaaggctg

SEQ ID NO: 983958 - DNA, 25 bp, Homo sapien
tcagttgtgggtattaggattccgc

SEQ ID NO: 983959 - DNA, 25 bp, Homo sapien
tgcacctgtgattgagttagcccag

SEQ ID NO: 983960 - DNA, 25 bp, Homo sapien
ttgggactgatataggactgcagcc

SEQ ID NO: 983961 - DNA, 25 bp, Homo sapien
ggattccgctaactgctaacaaaaa

SEQ ID NO: 983962 - DNA, 25 bp, Homo sapien
tgagcaagtgactacagaacacgtt

SEQ ID NO: 983963 - DNA, 25 bp, Homo sapien
tgcattttgtctgagcataccattg

SEQ ID NO: 983964 - DNA, 25 bp, Homo sapien
tgtttgttcagtatacactaccaac

SEQ ID NO: 983965 - DNA, 25 bp, Homo sapien
cactaccaacctatcgttgtctaga

SEQ ID NO: 983966 - DNA, 25 bp, Homo sapien
gcctcggcctcttttaaagatccca

SEQ ID NO: 983967 - DNA, 25 bp, Homo sapien
tgcagtcgagctaatgatcccaatg

SEQ ID NO: 983968 - DNA, 25 bp, Homo sapien
aacacttggttgaatctttatgccc

SEQ ID NO: 983969 - DNA, 25 bp, Homo sapien
caatgagtataagccctctgagggc

SEQ ID NO: 983970 - DNA, 25 bp, Homo sapien
gagaagatccagcttatgccagtca

SEQ ID NO: 983971 - DNA, 25 bp, Homo sapien
ccaggatgtcttaaagatgaattct

SEQ ID NO: 983972 - DNA, 25 bp, Homo sapien
cttaaagatgaattctataccagca

SEQ ID NO: 983973 - DNA, 25 bp, Homo sapien
gatgtcttaaagatgaattctatac

SEQ ID NO: 983974 - DNA, 25 bp, Homo sapien
taaccaggatgtcttaaagatgaat

SEQ ID NO: 983975 - DNA, 25 bp, Homo sapien
cataactcctgcattagagaaggca

SEQ ID NO: 983976 - DNA, 25 bp, Homo sapien
gttataatgtaactgctggtaacat

SEQ ID NO: 983977 - DNA, 25 bp, Homo sapien
ctctagttataatgtaactgctggt

SEQ ID NO: 983978 - DNA, 25 bp, Homo sapien
agtcaacttgatcatttagaatttg

SEQ ID NO: 983979 - DNA, 25 bp, Homo sapien
ggttataagtagacatcaatacgtg

SEQ ID NO: 983980 - DNA, 25 bp, Homo sapien
cacacagcactaaagtaggttataa

SEQ ID NO: 983981 - DNA, 25 bp, Homo sapien
ggtatattagatccattcacacagc

SEQ ID NO: 983982 - DNA, 25 bp, Homo sapien
caatacgtgttagagaagatgttca

SEQ ID NO: 983983 - DNA, 25 bp, Homo sapien
tcaaggtgatgcttacaggtgctaa

SEQ ID NO: 983984 - DNA, 25 bp, Homo sapien
tcaagatagagctcctcaaggtgat

SEQ ID NO: 983985 - DNA, 25 bp, Homo sapien
gagttccggttcaggttcaagatag

SEQ ID NO: 983986 - DNA, 25 bp, Homo sapien
gtgctaagctggtcatacagatagg

SEQ ID NO: 983987 - DNA, 25 bp, Homo sapien
cctgctgacttgcaggaggtcagcc

SEQ ID NO: 983988 - DNA, 25 bp, Homo sapien
tgacttgcaggaggtcagccatcat

SEQ ID NO: 983989 - DNA, 25 bp, Homo sapien
agggccctgctgacttgcaggaggt

SEQ ID NO: 983990 - DNA, 25 bp, Homo sapien
gccctgctgacttgcaggaggtcag

SEQ ID NO: 983991 - DNA, 25 bp, Homo sapien
ggtcagagcccgatgcaatctttca

SEQ ID NO: 983992 - DNA, 25 bp, Homo sapien
taaccacgagaaaggcagataccca

SEQ ID NO: 983993 - DNA, 25 bp, Homo sapien
taatcaagggccaggtaaagtctat

SEQ ID NO: 983994 - DNA, 25 bp, Homo sapien
caaactatgatctgtgcaaaaagca

SEQ ID NO: 983995 - DNA, 25 bp, Homo sapien
tgatattgttcagtggtgactctgt

SEQ ID NO: 983996 - DNA, 25 bp, Homo sapien
ttctgatattgttcagtggtgactc

SEQ ID NO: 983997 - DNA, 25 bp, Homo sapien
gcagctttctgatattgttcagtgg

SEQ ID NO: 983998 - DNA, 25 bp, Homo sapien
tattgttcagtggtgactctgtaga

SEQ ID NO: 983999 - DNA, 25 bp, Homo sapien
ctatatgccgagaggttttaactcc

SEQ ID NO: 984000 - DNA, 25 bp, Homo sapien
gccatagacaggtcaccatttgaga

SEQ ID NO: 984001 - DNA, 25 bp, Homo sapien
gcacaaaggtgcatttctgacatga

SEQ ID NO: 984002 - DNA, 25 bp, Homo sapien
gattagatagcagactcagggtggc

SEQ ID NO: 984003 - DNA, 25 bp, Homo sapien
ctaggttccccttatgtccacatct

SEQ ID NO: 984004 - DNA, 25 bp, Homo sapien
tcttgaatactaaactgttgcagtg

SEQ ID NO: 984005 - DNA, 25 bp, Homo sapien
gaactacagacttaattcagctatt

SEQ ID NO: 984006 - DNA, 25 bp, Homo sapien
cgggcacatcctgaaaaggttggct

SEQ ID NO: 984007 - DNA, 25 bp, Homo sapien
atttcatgaaaaccccattatctcc

SEQ ID NO: 984008 - DNA, 25 bp, Homo sapien
ttcatgaaaaccccattatctcctg

SEQ ID NO: 984009 - DNA, 25 bp, Homo sapien
atgaaaaccccattatctcctgggt

SEQ ID NO: 984010 - DNA, 25 bp, Homo sapien
catgaaaaccccattatctcctggg

SEQ ID NO: 984011 - DNA, 25 bp, Homo sapien
tggacagagagctccaaacagctaa

SEQ ID NO: 984012 - DNA, 25 bp, Homo sapien
agtacacagagataaccaggttcag

SEQ ID NO: 984013 - DNA, 25 bp, Homo sapien
tacagtgtcaatgccatgggaggga

SEQ ID NO: 984014 - DNA, 25 bp, Homo sapien
tgaagagctaatatgggccaggcca

SEQ ID NO: 984015 - DNA, 25 bp, Homo sapien
gctggttgagtcttggactgtccaa

SEQ ID NO: 984016 - DNA, 25 bp, Homo sapien
cacaattctaacagggcaagagttg

SEQ ID NO: 984017 - DNA, 25 bp, Homo sapien
tggagattcttcctatacaagggaa

SEQ ID NO: 984018 - DNA, 25 bp, Homo sapien
caagagttgaaagcataggagagct

SEQ ID NO: 984019 - DNA, 25 bp, Homo sapien
catgaatagcctagtattgtgccag

SEQ ID NO: 984020 - DNA, 25 bp, Homo sapien
catatcccatcaaatcactctgagg

SEQ ID NO: 984021 - DNA, 25 bp, Homo sapien
gccaggtactggttatacaaagaaa

SEQ ID NO: 984022 - DNA, 25 bp, Homo sapien
ctaacacaacccctcaagcagatgg

SEQ ID NO: 984023 - DNA, 25 bp, Homo sapien
cagcaattataaaggtcaaagctta

SEQ ID NO: 984024 - DNA, 25 bp, Homo sapien
tgtgatgcctttgtggatatccaga

SEQ ID NO: 984025 - DNA, 25 bp, Homo sapien
tggctaacaagtcaatgaacctgtg

SEQ ID NO: 984026 - DNA, 25 bp, Homo sapien
aacaaaagcagatccacatgtcagc

SEQ ID NO: 984027 - DNA, 25 bp, Homo sapien
tgaagttgggcattctatttaggtt

SEQ ID NO: 984028 - DNA, 25 bp, Homo sapien
tgtacacaatgcatagtacccaggg

SEQ ID NO: 984029 - DNA, 25 bp, Homo sapien
tcactcaaaaccaggttttgggata

SEQ ID NO: 984030 - DNA, 25 bp, Homo sapien
cgggtgccaatggtggatgttttaa

SEQ ID NO: 984031 - DNA, 25 bp, Homo sapien
aacatggtgcaaagggcggcaatcc

SEQ ID NO: 984032 - DNA, 25 bp, Homo sapien
ggtactagcattattcagggcacag

SEQ ID NO: 984033 - DNA, 25 bp, Homo sapien
tcaaaattatttggccatggaaccc

SEQ ID NO: 984034 - DNA, 25 bp, Homo sapien
cctaggatgcaagctaagaaggact

SEQ ID NO: 984035 - DNA, 25 bp, Homo sapien
aattaagtgctgatcccatgatttg

SEQ ID NO: 984036 - DNA, 25 bp, Homo sapien
gcctacatggtaaatagagccccaa

SEQ ID NO: 984037 - DNA, 25 bp, Homo sapien
tacctggatgcacttttaacagctc

SEQ ID NO: 984038 - DNA, 25 bp, Homo sapien
taatacttcttgacagcctacatgg

SEQ ID NO: 984039 - DNA, 25 bp, Homo sapien
tcagtaaagtgtcgctgcttttgaa

SEQ ID NO: 984040 - DNA, 25 bp, Homo sapien
aaagtgtcgctgcttttgaaaactc

SEQ ID NO: 984041 - DNA, 25 bp, Homo sapien
tcctgcttctttagcactcggtctt

SEQ ID NO: 984042 - DNA, 25 bp, Homo sapien
ctccagtctagccagctgttctttg

SEQ ID NO: 984043 - DNA, 25 bp, Homo sapien
tctttgtagaatgcatcctgcttct

SEQ ID NO: 984044 - DNA, 25 bp, Homo sapien
ttagcactcggtctttctcttccag

SEQ ID NO: 984045 - DNA, 25 bp, Homo sapien
tcttcatagcacacacttttcggca

SEQ ID NO: 984046 - DNA, 25 bp, Homo sapien
tcccatgaatagtccaggctaaatc

SEQ ID NO: 984047 - DNA, 25 bp, Homo sapien
ttcccatgaatagtccaggctaaat

SEQ ID NO: 984048 - DNA, 25 bp, Homo sapien
cttcatagcacacacttttcggcat

SEQ ID NO: 984049 - DNA, 25 bp, Homo sapien
ccagaggcatttactaatcgagatg

SEQ ID NO: 984050 - DNA, 25 bp, Homo sapien
taaccgtccatttggatgggctgat

SEQ ID NO: 984051 - DNA, 25 bp, Homo sapien
actgcagagtggacaaaaggatatt

SEQ ID NO: 984052 - DNA, 25 bp, Homo sapien
tctaagatgcaattcctctccagag

SEQ ID NO: 984053 - DNA, 25 bp, Homo sapien
ccccatcggtttagtgtcttttgtg

SEQ ID NO: 984054 - DNA, 25 bp, Homo sapien
taacccttcttttatcatctgtccc

SEQ ID NO: 984055 - DNA, 25 bp, Homo sapien
gctctgctccccatcggtttagtgt

SEQ ID NO: 984056 - DNA, 25 bp, Homo sapien
cataacccttcttttatcatctgtc

SEQ ID NO: 984057 - DNA, 25 bp, Homo sapien
ccacatcctgcaacagggaggtcta

SEQ ID NO: 984058 - DNA, 25 bp, Homo sapien
tcctgcaacagggaggtctaccgat

SEQ ID NO: 984059 - DNA, 25 bp, Homo sapien
caacagggaggtctaccgattctga

SEQ ID NO: 984060 - DNA, 25 bp, Homo sapien
gaggtctaccgattctgaagccatg

SEQ ID NO: 984061 - DNA, 25 bp, Homo sapien
acaagtgtggagaatgaatgatagc

SEQ ID NO: 984062 - DNA, 25 bp, Homo sapien
tcatgtccaggatgaacaagtgtgg

SEQ ID NO: 984063 - DNA, 25 bp, Homo sapien
tgtggagaatgaatgatagcggaat

SEQ ID NO: 984064 - DNA, 25 bp, Homo sapien
tgtccaggatgaacaagtgtggaga

SEQ ID NO: 984065 - DNA, 25 bp, Homo sapien
tgtgtgcgcatgtggctcagtggga

SEQ ID NO: 984066 - DNA, 25 bp, Homo sapien
gattaccgaaacacaacaacttgga

SEQ ID NO: 984067 - DNA, 25 bp, Homo sapien
gacccaacgtgccttacatgacagg

SEQ ID NO: 984068 - DNA, 25 bp, Homo sapien
gaaatgacagataatcagattaccg

SEQ ID NO: 984069 - DNA, 25 bp, Homo sapien
aagagagcggcaaggatttcgagct

SEQ ID NO: 984070 - DNA, 25 bp, Homo sapien
cggcaaggatttcgagctatggtaa

SEQ ID NO: 984071 - DNA, 25 bp, Homo sapien
gtcatccactggaagagagcggcaa

SEQ ID NO: 984072 - DNA, 25 bp, Homo sapien
gctctcaaggtcatccactggaaga

SEQ ID NO: 984073 - DNA, 25 bp, Homo sapien
ggggtcagggacaggacaactggga

SEQ ID NO: 984074 - DNA, 25 bp, Homo sapien
ggtcagggacaggacaactgggaaa

SEQ ID NO: 984075 - DNA, 25 bp, Homo sapien
cagggacaggacaactgggaaacac

SEQ ID NO: 984076 - DNA, 25 bp, Homo sapien
tcagggacaggacaactgggaaaca

SEQ ID NO: 984077 - DNA, 25 bp, Homo sapien
cttgtatctttttttctttgctcat

SEQ ID NO: 984078 - DNA, 25 bp, Homo sapien
ctcttgtatctttttttctttgctc

SEQ ID NO: 984079 - DNA, 25 bp, Homo sapien
cagaaacttttttccactctcttgt

SEQ ID NO: 984080 - DNA, 25 bp, Homo sapien
actctcttgtatctttttttctttg

SEQ ID NO: 984081 - DNA, 25 bp, Homo sapien
tgccctaccacgacttgaaattgag

SEQ ID NO: 984082 - DNA, 25 bp, Homo sapien
catgatgccagagttcaaactgtgg

SEQ ID NO: 984083 - DNA, 25 bp, Homo sapien
taaaagggtctcactggttctggtc

SEQ ID NO: 984084 - DNA, 25 bp, Homo sapien
gatagagatctttaaaggactcccc

SEQ ID NO: 984085 - DNA, 25 bp, Homo sapien
atatgaaacataacttgtccttaac

SEQ ID NO: 984086 - DNA, 25 bp, Homo sapien
gaagggacctcaaacacagcaatat

SEQ ID NO: 984087 - DNA, 25 bp, Homo sapien
tgaacacagctacaagaatatcctg

SEQ ID NO: 984088 - DNA, 25 bp, Homo sapien
gaaggattcccataactctctctat

SEQ ID NO: 984089 - DNA, 25 bp, Homo sapien
attccatttagagctggctttgaag

SEQ ID NO: 984090 - DNA, 25 bp, Homo sapien
tggctttgaagggctcccagctgat

SEQ ID NO: 984091 - DNA, 25 bp, Homo sapien
gctttgaagggctcccagctgatct

SEQ ID NO: 984092 - DNA, 25 bp, Homo sapien
agctggctttgaagggctcccagct

SEQ ID NO: 984093 - DNA, 25 bp, Homo sapien
tatattaggctaaacacagtttggt

SEQ ID NO: 984094 - DNA, 25 bp, Homo sapien
aattaaactataaagccaagacctg

SEQ ID NO: 984095 - DNA, 25 bp, Homo sapien
gtgaatcactagcaattgttaagca

SEQ ID NO: 984096 - DNA, 25 bp, Homo sapien
tcaagaaaattggagttgctcaggc

SEQ ID NO: 984097 - DNA, 25 bp, Homo sapien
cacactgagcatgtatcctacccat

SEQ ID NO: 984098 - DNA, 25 bp, Homo sapien
tacccatccagacttttgacagaag

SEQ ID NO: 984099 - DNA, 25 bp, Homo sapien
tgatacagacaagaacacgggttga

SEQ ID NO: 984100 - DNA, 25 bp, Homo sapien
gagttcttaatgttgtcatatccac

SEQ ID NO: 984101 - DNA, 25 bp, Homo sapien
aaatgtaggcattgacactaggcac

SEQ ID NO: 984102 - DNA, 25 bp, Homo sapien
gaaaacacatatgagagtaagctga

SEQ ID NO: 984103 - DNA, 25 bp, Homo sapien
cttgaagctcaactaaaatgtaggc

SEQ ID NO: 984104 - DNA, 25 bp, Homo sapien
gagggcagagttacaaaagttcaga

SEQ ID NO: 984105 - DNA, 25 bp, Homo sapien
caattcatgtgaaatcgcagtcagt

SEQ ID NO: 984106 - DNA, 25 bp, Homo sapien
tcgaaacttcgataagggcagctat

SEQ ID NO: 984107 - DNA, 25 bp, Homo sapien
tatcaccttggaggctggtcaaaga

SEQ ID NO: 984108 - DNA, 25 bp, Homo sapien
caaggatcccacagtcagttgaaag

SEQ ID NO: 984109 - DNA, 25 bp, Homo sapien
tccgaaaactgacttagcgggattc

SEQ ID NO: 984110 - DNA, 25 bp, Homo sapien
ccaatgccagggtgataatatccag

SEQ ID NO: 984111 - DNA, 25 bp, Homo sapien
tacttgttaagacggcagagcagac

SEQ ID NO: 984112 - DNA, 25 bp, Homo sapien
cccatggcaataggtggaggaacta

SEQ ID NO: 984113 - DNA, 25 bp, Homo sapien
cagttggcacgtggtacaggagcta

SEQ ID NO: 984114 - DNA, 25 bp, Homo sapien
gacttacgaatcaaccaatgggcca

SEQ ID NO: 984115 - DNA, 25 bp, Homo sapien
ccagagttgttacaccagggcagag

SEQ ID NO: 984116 - DNA, 25 bp, Homo sapien
taatatagtccatcggcaacaggcc

SEQ ID NO: 984117 - DNA, 25 bp, Homo sapien
tgttgtgtcactctacgggaccagt

SEQ ID NO: 984118 - DNA, 25 bp, Homo sapien
tgttgcaatcagaattgacggaggc

SEQ ID NO: 984119 - DNA, 25 bp, Homo sapien
gacggaggctttttcacttcaacta

SEQ ID NO: 984120 - DNA, 25 bp, Homo sapien
ccagaatagagcttgaaaaacttgc

SEQ ID NO: 984121 - DNA, 25 bp, Homo sapien
gtgttcctgagagtcaaatatgtaa

SEQ ID NO: 984122 - DNA, 25 bp, Homo sapien
tgtgttcctgagagtcaaatatgta

SEQ ID NO: 984123 - DNA, 25 bp, Homo sapien
tgttcctgagagtcaaatatgtaac

SEQ ID NO: 984124 - DNA, 25 bp, Homo sapien
ctgtgttcctgagagtcaaatatgt

SEQ ID NO: 984125 - DNA, 25 bp, Homo sapien
tgacacttaacttcagactctgaag

SEQ ID NO: 984126 - DNA, 25 bp, Homo sapien
taaatatatgacgaaggacaatgca

SEQ ID NO: 984127 - DNA, 25 bp, Homo sapien
ctgcctaggatacagtaggtgttta

SEQ ID NO: 984128 - DNA, 25 bp, Homo sapien
gatctgactaatgttcttgcccaga

SEQ ID NO: 984129 - DNA, 25 bp, Homo sapien
cattatcagtagactgcctcttcca

SEQ ID NO: 984130 - DNA, 25 bp, Homo sapien
tctagtcagtcttcatcttctacag

SEQ ID NO: 984131 - DNA, 25 bp, Homo sapien
tcttctacagaggtgctttcctgat

SEQ ID NO: 984132 - DNA, 25 bp, Homo sapien
gctggcatcactcagtgctgagtag

SEQ ID NO: 984133 - DNA, 25 bp, Homo sapien
caaatcagaatgtacgaggccagtt

SEQ ID NO: 984134 - DNA, 25 bp, Homo sapien
tctataccacacaaccagaatctgt

SEQ ID NO: 984135 - DNA, 25 bp, Homo sapien
gaactgcccaataactaaatgtcac

SEQ ID NO: 984136 - DNA, 25 bp, Homo sapien
aagggactctctcaatcagctgtca

SEQ ID NO: 984137 - DNA, 25 bp, Homo sapien
ggtcatgggttggtctttcagagaa

SEQ ID NO: 984138 - DNA, 25 bp, Homo sapien
cgggaccccagatttgtcactgaag

SEQ ID NO: 984139 - DNA, 25 bp, Homo sapien
gaaactgattcattacgcatggact

SEQ ID NO: 984140 - DNA, 25 bp, Homo sapien
tagtgtttcccaattgcctagtgaa

SEQ ID NO: 984141 - DNA, 25 bp, Homo sapien
gtgagttcccaactgtgctccaatg

SEQ ID NO: 984142 - DNA, 25 bp, Homo sapien
aggttccgaggagtaacatctgggt

SEQ ID NO: 984143 - DNA, 25 bp, Homo sapien
tgaggactaaaggttccgaggagta

SEQ ID NO: 984144 - DNA, 25 bp, Homo sapien
caactgtgctccaatgaggactaaa

SEQ ID NO: 984145 - DNA, 25 bp, Homo sapien
tcaacactccaggtttcacccagag

SEQ ID NO: 984146 - DNA, 25 bp, Homo sapien
aaggccgaagtggaggctaagcagt

SEQ ID NO: 984147 - DNA, 25 bp, Homo sapien
gaagtggaggctaagcagtcaacac

SEQ ID NO: 984148 - DNA, 25 bp, Homo sapien
ggaggctaagcagtcaacactccag

SEQ ID NO: 984149 - DNA, 25 bp, Homo sapien
ctatcaaataacaataagaaattgc

SEQ ID NO: 984150 - DNA, 25 bp, Homo sapien
taacaataagaaattgcttaataaa

SEQ ID NO: 984151 - DNA, 25 bp, Homo sapien
caaataacaataagaaattgcttaa

SEQ ID NO: 984152 - DNA, 25 bp, Homo sapien
caataagaaattgcttaataaatta

SEQ ID NO: 984153 - DNA, 25 bp, Homo sapien
tgccttagcgcgttcctcctcgcta

SEQ ID NO: 984154 - DNA, 25 bp, Homo sapien
ttgccttagcgcgttcctcctcgct

SEQ ID NO: 984155 - DNA, 25 bp, Homo sapien
tgctttgccttagcgcgttcctcct

SEQ ID NO: 984156 - DNA, 25 bp, Homo sapien
aggtgctttgccttagcgcgttcct

SEQ ID NO: 984157 - DNA, 25 bp, Homo sapien
agccctctctcggtccagctctttg

SEQ ID NO: 984158 - DNA, 25 bp, Homo sapien
tggttaactgctcattggcagcagc

SEQ ID NO: 984159 - DNA, 25 bp, Homo sapien
agcagccctctctcggtccagctct

SEQ ID NO: 984160 - DNA, 25 bp, Homo sapien
ctctggttaactgctcattggcagc

SEQ ID NO: 984161 - DNA, 25 bp, Homo sapien
catcctgatactctggaattctcag

SEQ ID NO: 984162 - DNA, 25 bp, Homo sapien
tcagtagcctcatcacacaattaga

SEQ ID NO: 984163 - DNA, 25 bp, Homo sapien
tactataccatcatatccctgaagg

SEQ ID NO: 984164 - DNA, 25 bp, Homo sapien
gaaatctactttatacgtgtgaatg

SEQ ID NO: 984165 - DNA, 25 bp, Homo sapien
tctgaatttggatactgctcatttg

SEQ ID NO: 984166 - DNA, 25 bp, Homo sapien
ggccattcacaaatactcagattta

SEQ ID NO: 984167 - DNA, 25 bp, Homo sapien
gaatttggatactgctcatttggcc

SEQ ID NO: 984168 - DNA, 25 bp, Homo sapien
tttttctgaatttggatactgctca

SEQ ID NO: 984169 - DNA, 25 bp, Homo sapien
aagtatacgggaggaagtacaccag

SEQ ID NO: 984170 - DNA, 25 bp, Homo sapien
tcaagtgaggactgtatttaaccag

SEQ ID NO: 984171 - DNA, 25 bp, Homo sapien
gaaccaatcctccatgcatatcaag

SEQ ID NO: 984172 - DNA, 25 bp, Homo sapien
gcatctgagggttttggaatcctta

SEQ ID NO: 984173 - DNA, 25 bp, Homo sapien
cgtttttgccaggactcgaattttg

SEQ ID NO: 984174 - DNA, 25 bp, Homo sapien
ggacacgtttttgccaggactcgaa

SEQ ID NO: 984175 - DNA, 25 bp, Homo sapien
gccaggactcgaattttgaaattat

SEQ ID NO: 984176 - DNA, 25 bp, Homo sapien
tttcacaagggacacgtttttgcca

SEQ ID NO: 984177 - DNA, 25 bp, Homo sapien
gagaaacagcaactagtggcgagac

SEQ ID NO: 984178 - DNA, 25 bp, Homo sapien
gaaagtcaccttggcatacacagag

SEQ ID NO: 984179 - DNA, 25 bp, Homo sapien
tatgatgttagagaaagacaccgcc

SEQ ID NO: 984180 - DNA, 25 bp, Homo sapien
acagagaattgtgggcttgcagtcc

SEQ ID NO: 984181 - DNA, 25 bp, Homo sapien
gctttccagaaaggagcaatggctc

SEQ ID NO: 984182 - DNA, 25 bp, Homo sapien
ggaattacacatggcatagctttcc

SEQ ID NO: 984183 - DNA, 25 bp, Homo sapien
tacacatggcatagctttccagaaa

SEQ ID NO: 984184 - DNA, 25 bp, Homo sapien
ttagcacttttggaattacacatgg

SEQ ID NO: 984185 - DNA, 25 bp, Homo sapien
cagctgaagttttcatgaaggaggc

SEQ ID NO: 984186 - DNA, 25 bp, Homo sapien
gcacgcagggtatataccatatgag

SEQ ID NO: 984187 - DNA, 25 bp, Homo sapien
aagttgctgctaaaagactgcacac

SEQ ID NO: 984188 - DNA, 25 bp, Homo sapien
aatacaaaggctgtaccaccctctg

SEQ ID NO: 984189 - DNA, 25 bp, Homo sapien
tatatggtgaaggtcctatggccag

SEQ ID NO: 984190 - DNA, 25 bp, Homo sapien
gaaatatacagagacctttctggca

SEQ ID NO: 984191 - DNA, 25 bp, Homo sapien
gatctctcaagcaaaatagttgggc

SEQ ID NO: 984192 - DNA, 25 bp, Homo sapien
cactgcatgggaaactgtggaaata

SEQ ID NO: 984193 - DNA, 25 bp, Homo sapien
cttggcttgctccaatgccagctcc

SEQ ID NO: 984194 - DNA, 25 bp, Homo sapien
ttggcttgctccaatgccagctcct

SEQ ID NO: 984195 - DNA, 25 bp, Homo sapien
tcttggcttgctccaatgccagctc

SEQ ID NO: 984196 - DNA, 25 bp, Homo sapien
tgacattattcacaacatcccaaag

SEQ ID NO: 984197 - DNA, 25 bp, Homo sapien
tgatatgccatttcaaacccaccat

SEQ ID NO: 984198 - DNA, 25 bp, Homo sapien
tgaaaggtcacctgctacatccatt

SEQ ID NO: 984199 - DNA, 25 bp, Homo sapien
taagtgcctagcaactgatgaatgg

SEQ ID NO: 984200 - DNA, 25 bp, Homo sapien
agtcaaatggtatatgtaaaatcat

SEQ ID NO: 984201 - DNA, 25 bp, Homo sapien
tcctttaatgacccccatctccctg

SEQ ID NO: 984202 - DNA, 25 bp, Homo sapien
ctttaatgacccccatctccctgaa

SEQ ID NO: 984203 - DNA, 25 bp, Homo sapien
ttaatgacccccatctccctgaagg

SEQ ID NO: 984204 - DNA, 25 bp, Homo sapien
atgacccccatctccctgaagggca

SEQ ID NO: 984205 - DNA, 25 bp, Homo sapien
agatcttgccgtgattgaaggcttt

SEQ ID NO: 984206 - DNA, 25 bp, Homo sapien
tcttgccgtgattgaaggctttgcc

SEQ ID NO: 984207 - DNA, 25 bp, Homo sapien
tgaagatcttgccgtgattgaaggc

SEQ ID NO: 984208 - DNA, 25 bp, Homo sapien
cttgccgtgattgaaggctttgccc

SEQ ID NO: 984209 - DNA, 25 bp, Homo sapien
tggcctcggaagacccagactccag

SEQ ID NO: 984210 - DNA, 25 bp, Homo sapien
agccagcgcctgctcacattcatcc

SEQ ID NO: 984211 - DNA, 25 bp, Homo sapien
gcagccagcgcctgctcacattcat

SEQ ID NO: 984212 - DNA, 25 bp, Homo sapien
ttgggctcagcagccagcgcctgct

SEQ ID NO: 984213 - DNA, 25 bp, Homo sapien
ccagcgcctgctcacattcatccat

SEQ ID NO: 984214 - DNA, 25 bp, Homo sapien
tcctcctcaggagcaggggcagccg

SEQ ID NO: 984215 - DNA, 25 bp, Homo sapien
cctcctcaggagcaggggcagccgc

SEQ ID NO: 984216 - DNA, 25 bp, Homo sapien
ctcctcctcaggagcaggggcagcc

SEQ ID NO: 984217 - DNA, 25 bp, Homo sapien
tttctcctccttccgctcagcctgg

SEQ ID NO: 984218 - DNA, 25 bp, Homo sapien
cgtgaacccttctctttccgtggtg

SEQ ID NO: 984219 - DNA, 25 bp, Homo sapien
gcttctcttcccgtgaacccttctc

SEQ ID NO: 984220 - DNA, 25 bp, Homo sapien
cctttttaggctgggtctctgcaaa

SEQ ID NO: 984221 - DNA, 25 bp, Homo sapien
gcccggcggaaagaaggctctagaa

SEQ ID NO: 984222 - DNA, 25 bp, Homo sapien
cagcggttggtattgcgaaaggccc

SEQ ID NO: 984223 - DNA, 25 bp, Homo sapien
tattgcgaaaggcccggcggaaaga

SEQ ID NO: 984224 - DNA, 25 bp, Homo sapien
tcacacagtttcagttcccccaaga

SEQ ID NO: 984225 - DNA, 25 bp, Homo sapien
tcctcgtcttcaagtaagcatccag

SEQ ID NO: 984226 - DNA, 25 bp, Homo sapien
tgtgatgtcagccaatgtcactcgt

SEQ ID NO: 984227 - DNA, 25 bp, Homo sapien
aatgtcactcgttcgcccaccagaa

SEQ ID NO: 984228 - DNA, 25 bp, Homo sapien
ggtgcagacaactgtgatgtcagcc

SEQ ID NO: 984229 - DNA, 25 bp, Homo sapien
ggcactatatcggaatcagcaaagc

SEQ ID NO: 984230 - DNA, 25 bp, Homo sapien
ctggctgggggcactatatcggaat

SEQ ID NO: 984231 - DNA, 25 bp, Homo sapien
tgggggcactatatcggaatcagca

SEQ ID NO: 984232 - DNA, 25 bp, Homo sapien
ggctgggggcactatatcggaatca

SEQ ID NO: 984233 - DNA, 25 bp, Homo sapien
tcattgctcacatagtaggcaatgg

SEQ ID NO: 984234 - DNA, 25 bp, Homo sapien
tggcgttgctctcaaacacacagaa

SEQ ID NO: 984235 - DNA, 25 bp, Homo sapien
tgctgcctctggagtacttccccgc

SEQ ID NO: 984236 - DNA, 25 bp, Homo sapien
ctgcctctggagtacttccccgcag

SEQ ID NO: 984237 - DNA, 25 bp, Homo sapien
tctgagccccgctgtactgagcagc

SEQ ID NO: 984238 - DNA, 25 bp, Homo sapien
gtgcggagagcacgcggatctgagc

SEQ ID NO: 984239 - DNA, 25 bp, Homo sapien
ggaccttgccggcaggaaatttgcg

SEQ ID NO: 984240 - DNA, 25 bp, Homo sapien
tactgagcagcgatgagagccttga

SEQ ID NO: 984241 - DNA, 25 bp, Homo sapien
agtcttaaaagtgttatcaggtagg

SEQ ID NO: 984242 - DNA, 25 bp, Homo sapien
ggctggatccagtcttaaaagtgtt

SEQ ID NO: 984243 - DNA, 25 bp, Homo sapien
ggtgattccgcaaagaaaggctgga

SEQ ID NO: 984244 - DNA, 25 bp, Homo sapien
aaaggctggatccagtcttaaaagt

SEQ ID NO: 984245 - DNA, 25 bp, Homo sapien
tgaaaacctaagtgaagcgatgctc

SEQ ID NO: 984246 - DNA, 25 bp, Homo sapien
gaaactgtggttctctgcccatggc

SEQ ID NO: 984247 - DNA, 25 bp, Homo sapien
gaagatccccatgaacacgtcgatg

SEQ ID NO: 984248 - DNA, 25 bp, Homo sapien
cattcagtcgcagtcgaagagccct

SEQ ID NO: 984249 - DNA, 25 bp, Homo sapien
tgtttgtttgcttcgggtattcaat

SEQ ID NO: 984250 - DNA, 25 bp, Homo sapien
cacactgtagcatcaatggccaggg

SEQ ID NO: 984251 - DNA, 25 bp, Homo sapien
gcacaaacacggcacactgtagcat

SEQ ID NO: 984252 - DNA, 25 bp, Homo sapien
tggagcctagcagcacaaacacggc

SEQ ID NO: 984253 - DNA, 25 bp, Homo sapien
tatatggcagaagagcagtccactg

SEQ ID NO: 984254 - DNA, 25 bp, Homo sapien
gcaacgcacatactcactgcatgat

SEQ ID NO: 984255 - DNA, 25 bp, Homo sapien
catggcaaccctgctgagcggtaaa

SEQ ID NO: 984256 - DNA, 25 bp, Homo sapien
gaagttaatagtattctccagccct

SEQ ID NO: 984257 - DNA, 25 bp, Homo sapien
gattccttcattcgatcaatcacat

SEQ ID NO: 984258 - DNA, 25 bp, Homo sapien
gaggattccttcattcgatcaatca

SEQ ID NO: 984259 - DNA, 25 bp, Homo sapien
tccttcattcgatcaatcacatttt

SEQ ID NO: 984260 - DNA, 25 bp, Homo sapien
agaggattccttcattcgatcaatc

SEQ ID NO: 984261 - DNA, 25 bp, Homo sapien
tcaacaactgtatccttaggccctt

SEQ ID NO: 984262 - DNA, 25 bp, Homo sapien
taaacttgtaagcatgcaccaaagg

SEQ ID NO: 984263 - DNA, 25 bp, Homo sapien
tacggctgccttattgagactccac

SEQ ID NO: 984264 - DNA, 25 bp, Homo sapien
tattcccagtctgctcatagcgacg

SEQ ID NO: 984265 - DNA, 25 bp, Homo sapien
cacaccaatgtgctccacagagggg

SEQ ID NO: 984266 - DNA, 25 bp, Homo sapien
acagagggggaaaggccatgtgtca

SEQ ID NO: 984267 - DNA, 25 bp, Homo sapien
accaatgtgctccacagagggggaa

SEQ ID NO: 984268 - DNA, 25 bp, Homo sapien
cagagggggaaaggccatgtgtcat

SEQ ID NO: 984269 - DNA, 25 bp, Homo sapien
tggcaagagtcttaaaatctctgca

SEQ ID NO: 984270 - DNA, 25 bp, Homo sapien
ttttactccaaagagtactaactga

SEQ ID NO: 984271 - DNA, 25 bp, Homo sapien
caaagagtactaactgaaacacaat

SEQ ID NO: 984272 - DNA, 25 bp, Homo sapien
tactgaaagcctaatggcaagagtc

SEQ ID NO: 984273 - DNA, 25 bp, Homo sapien
ccaaaaactgagttcgacagtctga

SEQ ID NO: 984274 - DNA, 25 bp, Homo sapien
gaccaaaaactgagttcgacagtct

SEQ ID NO: 984275 - DNA, 25 bp, Homo sapien
caaaaactgagttcgacagtctgag

SEQ ID NO: 984276 - DNA, 25 bp, Homo sapien
acagaccaaaaactgagttcgacag

SEQ ID NO: 984277 - DNA, 25 bp, Homo sapien
tatgtatcaggtgcatgcaaagggc

SEQ ID NO: 984278 - DNA, 25 bp, Homo sapien
actaggttcaggcatcatacgtcca

SEQ ID NO: 984279 - DNA, 25 bp, Homo sapien
tagtgctggtatactgacaccctag

SEQ ID NO: 984280 - DNA, 25 bp, Homo sapien
aaaaagtgctctacaacgttggtca

SEQ ID NO: 984281 - DNA, 25 bp, Homo sapien
tttcacagacaagtacaccgaggta

SEQ ID NO: 984282 - DNA, 25 bp, Homo sapien
tcaaatacggtcctgcaacaaggga

SEQ ID NO: 984283 - DNA, 25 bp, Homo sapien
caagggagcagtacagttacgagta

SEQ ID NO: 984284 - DNA, 25 bp, Homo sapien
cagagggagagcactaaatgacaca

SEQ ID NO: 984285 - DNA, 25 bp, Homo sapien
caggctgagcgggtccggagaagat

SEQ ID NO: 984286 - DNA, 25 bp, Homo sapien
agtccaaccactggccctccgcccg

SEQ ID NO: 984287 - DNA, 25 bp, Homo sapien
ccgagtccaaccactggccctccgc

SEQ ID NO: 984288 - DNA, 25 bp, Homo sapien
cctccgcccgtccacgggcactcac

SEQ ID NO: 984289 - DNA, 25 bp, Homo sapien
cctcgaaggtgacccggcgggtgct

SEQ ID NO: 984290 - DNA, 25 bp, Homo sapien
attctcgtccgcctcgaaggtgacc

SEQ ID NO: 984291 - DNA, 25 bp, Homo sapien
tctcattctcgtccgcctcgaaggt

SEQ ID NO: 984292 - DNA, 25 bp, Homo sapien
atgttctcattctcgtccgcctcga

SEQ ID NO: 984293 - DNA, 25 bp, Homo sapien
agaaggcgccggtcctgagctcccg

SEQ ID NO: 984294 - DNA, 25 bp, Homo sapien
ttttcccgcacagcgggagcaaggc

SEQ ID NO: 984295 - DNA, 25 bp, Homo sapien
caaaaacgcctcaggttggtcggcg

SEQ ID NO: 984296 - DNA, 25 bp, Homo sapien
gaactgcccgcctctgttcggcgag

SEQ ID NO: 984297 - DNA, 25 bp, Homo sapien
tccaccacgtcaaatctttgcaatg

SEQ ID NO: 984298 - DNA, 25 bp, Homo sapien
tttccaccacgtcaaatctttgcaa

SEQ ID NO: 984299 - DNA, 25 bp, Homo sapien
ttttccaccacgtcaaatctttgca

SEQ ID NO: 984300 - DNA, 25 bp, Homo sapien
ccaccacgtcaaatctttgcaatga

SEQ ID NO: 984301 - DNA, 25 bp, Homo sapien
ccagtctttagggtagcatagggtg

SEQ ID NO: 984302 - DNA, 25 bp, Homo sapien
ctttagggtagcatagggtggtcat

SEQ ID NO: 984303 - DNA, 25 bp, Homo sapien
tcccagtctttagggtagcataggg

SEQ ID NO: 984304 - DNA, 25 bp, Homo sapien
attttcccagtctttagggtagcat

SEQ ID NO: 984305 - DNA, 25 bp, Homo sapien
cccagtcctctgaggaagagctctc

SEQ ID NO: 984306 - DNA, 25 bp, Homo sapien
caaaggctccttgggtagcccgtag

SEQ ID NO: 984307 - DNA, 25 bp, Homo sapien
cttgggtagcccgtagcccagtcct

SEQ ID NO: 984308 - DNA, 25 bp, Homo sapien
aagctgattccagcaatggaagaaa

SEQ ID NO: 984309 - DNA, 25 bp, Homo sapien
gctataaactgaatccttagcatgg

SEQ ID NO: 984310 - DNA, 25 bp, Homo sapien
actgaatccttagcatggaaaacaa

SEQ ID NO: 984311 - DNA, 25 bp, Homo sapien
gccagcccacgaatcacttttaatg

SEQ ID NO: 984312 - DNA, 25 bp, Homo sapien
accccttcccaagctgcatgctata

SEQ ID NO: 984313 - DNA, 25 bp, Homo sapien
tgtgtttgcctctttgtctgccggg

SEQ ID NO: 984314 - DNA, 25 bp, Homo sapien
tctgccgggaggtagagatgcatct

SEQ ID NO: 984315 - DNA, 25 bp, Homo sapien
tagtaccatactcgggactgtgctg

SEQ ID NO: 984316 - DNA, 25 bp, Homo sapien
tcagtaaacctcaggcagagatctg

SEQ ID NO: 984317 - DNA, 25 bp, Homo sapien
ctctgcaaggattcagtggagtggc

SEQ ID NO: 984318 - DNA, 25 bp, Homo sapien
ctgcaaggattcagtggagtggcac

SEQ ID NO: 984319 - DNA, 25 bp, Homo sapien
gcaaggattcagtggagtggcactg

SEQ ID NO: 984320 - DNA, 25 bp, Homo sapien
tctgcaaggattcagtggagtggca

SEQ ID NO: 984321 - DNA, 25 bp, Homo sapien
tttgatttggcactgctctgagacg

SEQ ID NO: 984322 - DNA, 25 bp, Homo sapien
gatttggcactgctctgagacggat

SEQ ID NO: 984323 - DNA, 25 bp, Homo sapien
gattgtgaatgtttctttgatttgg

SEQ ID NO: 984324 - DNA, 25 bp, Homo sapien
gtgaatgtttctttgatttggcact

SEQ ID NO: 984325 - DNA, 25 bp, Homo sapien
aattccctttactgctgtcttgtgt

SEQ ID NO: 984326 - DNA, 25 bp, Homo sapien
gaattccctttactgctgtcttgtg

SEQ ID NO: 984327 - DNA, 25 bp, Homo sapien
ctcatttgggaattccctttactgc

SEQ ID NO: 984328 - DNA, 25 bp, Homo sapien
tccctttactgctgtcttgtgttct

SEQ ID NO: 984329 - DNA, 25 bp, Homo sapien
gctccggattgaaaggggtcttgaa

SEQ ID NO: 984330 - DNA, 25 bp, Homo sapien
caggctgctccggattgaaaggggt

SEQ ID NO: 984331 - DNA, 25 bp, Homo sapien
tgctccggattgaaaggggtcttga

SEQ ID NO: 984332 - DNA, 25 bp, Homo sapien
gctgctccggattgaaaggggtctt

SEQ ID NO: 984333 - DNA, 25 bp, Homo sapien
tcaaaatgccgctgtatttcttcca

SEQ ID NO: 984334 - DNA, 25 bp, Homo sapien
gggccttttgcacctgaaatggctc

SEQ ID NO: 984335 - DNA, 25 bp, Homo sapien
gaaatggctcttcccggtagttcag

SEQ ID NO: 984336 - DNA, 25 bp, Homo sapien
ccagctcctgagatacagtatccaa

SEQ ID NO: 984337 - DNA, 25 bp, Homo sapien
gccagccaatgtggcattagcaaca

SEQ ID NO: 984338 - DNA, 25 bp, Homo sapien
aacaataccgctaaatgtcctagga

SEQ ID NO: 984339 - DNA, 25 bp, Homo sapien
gattccacaacatgccagcacacga

SEQ ID NO: 984340 - DNA, 25 bp, Homo sapien
gtaggatgacatgccaatagccacc

SEQ ID NO: 984341 - DNA, 25 bp, Homo sapien
actgtgtaccgattcagcaagaagg

SEQ ID NO: 984342 - DNA, 25 bp, Homo sapien
gcaagaaggtcttcccagggaagcc

SEQ ID NO: 984343 - DNA, 25 bp, Homo sapien
aaactgtgtaccgattcagcaagaa

SEQ ID NO: 984344 - DNA, 25 bp, Homo sapien
caataaactgtgtaccgattcagca

SEQ ID NO: 984345 - DNA, 25 bp, Homo sapien
tgagaggcatgctgctcattatgac

SEQ ID NO: 984346 - DNA, 25 bp, Homo sapien
tgccaagtgagaggcatgctgctca

SEQ ID NO: 984347 - DNA, 25 bp, Homo sapien
caagtgagaggcatgctgctcatta

SEQ ID NO: 984348 - DNA, 25 bp, Homo sapien
gcatgctgctcattatgacaagtca

SEQ ID NO: 984349 - DNA, 25 bp, Homo sapien
ggcccattcctgtacagaccctgtc

SEQ ID NO: 984350 - DNA, 25 bp, Homo sapien
tggcccattcctgtacagaccctgt

SEQ ID NO: 984351 - DNA, 25 bp, Homo sapien
cattcctgtacagaccctgtcccat

SEQ ID NO: 984352 - DNA, 25 bp, Homo sapien
cttctggagggcgtggtcctttctg

SEQ ID NO: 984353 - DNA, 25 bp, Homo sapien
gtcagaggcgcgtctggtagcatct

SEQ ID NO: 984354 - DNA, 25 bp, Homo sapien
cagtgagaattcttctggagggcgt

SEQ ID NO: 984355 - DNA, 25 bp, Homo sapien
ctggtagcatctttgagtgtccact

SEQ ID NO: 984356 - DNA, 25 bp, Homo sapien
taatctcttggactgaaaatgatga

SEQ ID NO: 984357 - DNA, 25 bp, Homo sapien
tggatttgtgggcaatcttggagat

SEQ ID NO: 984358 - DNA, 25 bp, Homo sapien
cacagaaggtattttggggctaaag

SEQ ID NO: 984359 - DNA, 25 bp, Homo sapien
gagcaaggtcttcactagcatcacc

SEQ ID NO: 984360 - DNA, 25 bp, Homo sapien
caaggtagttgagttaaaccaatct

SEQ ID NO: 984361 - DNA, 25 bp, Homo sapien
gttgagttaaaccaatctgagcttt

SEQ ID NO: 984362 - DNA, 25 bp, Homo sapien
cacattccaaggtagttgagttaaa

SEQ ID NO: 984363 - DNA, 25 bp, Homo sapien
ggtagttgagttaaaccaatctgag

SEQ ID NO: 984364 - DNA, 25 bp, Homo sapien
cagagcctgatggatttgtatagca

SEQ ID NO: 984365 - DNA, 25 bp, Homo sapien
ccagagcctgatggatttgtatagc

SEQ ID NO: 984366 - DNA, 25 bp, Homo sapien
ttccagagcctgatggatttgtata

SEQ ID NO: 984367 - DNA, 25 bp, Homo sapien
tccagagcctgatggatttgtatag

SEQ ID NO: 984368 - DNA, 25 bp, Homo sapien
ttctctgctttccttggattggcta

SEQ ID NO: 984369 - DNA, 25 bp, Homo sapien
ttggattggctaaattggtctgtac

SEQ ID NO: 984370 - DNA, 25 bp, Homo sapien
gctttccttggattggctaaattgg

SEQ ID NO: 984371 - DNA, 25 bp, Homo sapien
tccttggattggctaaattggtctg

SEQ ID NO: 984372 - DNA, 25 bp, Homo sapien
agagtcatccaagagtcctcttgaa

SEQ ID NO: 984373 - DNA, 25 bp, Homo sapien
caagagtcctcttgaagaggcctta

SEQ ID NO: 984374 - DNA, 25 bp, Homo sapien
tcatccaagagtcctcttgaagagg

SEQ ID NO: 984375 - DNA, 25 bp, Homo sapien
agtcctcttgaagaggccttaaaat

SEQ ID NO: 984376 - DNA, 25 bp, Homo sapien
caatattagtcagggaccaagacac

SEQ ID NO: 984377 - DNA, 25 bp, Homo sapien
agggaccaagacacagttagcccag

SEQ ID NO: 984378 - DNA, 25 bp, Homo sapien
aagacacagttagcccagatgaaat

SEQ ID NO: 984379 - DNA, 25 bp, Homo sapien
gacatgaggcatgtgttcccccagg

SEQ ID NO: 984380 - DNA, 25 bp, Homo sapien
agtagctggcagtattaaccactct

SEQ ID NO: 984381 - DNA, 25 bp, Homo sapien
ggcagtattaaccactctcttggca

SEQ ID NO: 984382 - DNA, 25 bp, Homo sapien
gctggcagtattaaccactctcttg

SEQ ID NO: 984383 - DNA, 25 bp, Homo sapien
tattaaccactctcttggcatgcat

SEQ ID NO: 984384 - DNA, 25 bp, Homo sapien
caggaacataggtaacaggtgtttc

SEQ ID NO: 984385 - DNA, 25 bp, Homo sapien
gaacataggtaacaggtgtttctgc

SEQ ID NO: 984386 - DNA, 25 bp, Homo sapien
aaacaggaacataggtaacaggtgt

SEQ ID NO: 984387 - DNA, 25 bp, Homo sapien
aaaacaggaacataggtaacaggtg

SEQ ID NO: 984388 - DNA, 25 bp, Homo sapien
tccgaagcttccctctcatttggag

SEQ ID NO: 984389 - DNA, 25 bp, Homo sapien
caattgatgggtcaacacggctggc

SEQ ID NO: 984390 - DNA, 25 bp, Homo sapien
gaagacagcacacattttaaggaca

SEQ ID NO: 984391 - DNA, 25 bp, Homo sapien
taaggacacagtagattgcaagcaa

SEQ ID NO: 984392 - DNA, 25 bp, Homo sapien
caatatcaacaacatggttgtggca

SEQ ID NO: 984393 - DNA, 25 bp, Homo sapien
gcccatgcccagttgcaaataacca

SEQ ID NO: 984394 - DNA, 25 bp, Homo sapien
tccagagacccatccacaattgagg

SEQ ID NO: 984395 - DNA, 25 bp, Homo sapien
tattaccgccacatggtcagatggc

SEQ ID NO: 984396 - DNA, 25 bp, Homo sapien
gatgcttctcatgtattcaggtgga

SEQ ID NO: 984397 - DNA, 25 bp, Homo sapien
ccaatcgcaaaatcagggatgcttc

SEQ ID NO: 984398 - DNA, 25 bp, Homo sapien
gactactgggcttgtgttcagcctt

SEQ ID NO: 984399 - DNA, 25 bp, Homo sapien
tattcaggtggacttctgtcttggc

SEQ ID NO: 984400 - DNA, 25 bp, Homo sapien
cggccgtgtatcaggacacaagtgc

SEQ ID NO: 984401 - DNA, 25 bp, Homo sapien
agttgtgagtatcacaaaagttgcc

SEQ ID NO: 984402 - DNA, 25 bp, Homo sapien
gccgtgtatcaggacacaagtgcct

SEQ ID NO: 984403 - DNA, 25 bp, Homo sapien
gttgcctagaaaccaaatcacaaga

SEQ ID NO: 984404 - DNA, 25 bp, Homo sapien
ccatatatcgagagtgctttttcat

SEQ ID NO: 984405 - DNA, 25 bp, Homo sapien
aagcagctgtgatacaatttagggc

SEQ ID NO: 984406 - DNA, 25 bp, Homo sapien
cattctgatactttccgttcccttc

SEQ ID NO: 984407 - DNA, 25 bp, Homo sapien
ctgtctaatggtgccagaagcagct

SEQ ID NO: 984408 - DNA, 25 bp, Homo sapien
attggttcccttctgtgtatatcaa

SEQ ID NO: 984409 - DNA, 25 bp, Homo sapien
aattggttcccttctgtgtatatca

SEQ ID NO: 984410 - DNA, 25 bp, Homo sapien
aaaattggttcccttctgtgtatat

SEQ ID NO: 984411 - DNA, 25 bp, Homo sapien
tggttcccttctgtgtatatcaatt

SEQ ID NO: 984412 - DNA, 25 bp, Homo sapien
acctaagtacattccctgcccaata

SEQ ID NO: 984413 - DNA, 25 bp, Homo sapien
tacctaagtacattccctgcccaat

SEQ ID NO: 984414 - DNA, 25 bp, Homo sapien
agtctgtatgctttcccctgccact

SEQ ID NO: 984415 - DNA, 25 bp, Homo sapien
gaagtctgtatgctttcccctgcca

SEQ ID NO: 984416 - DNA, 25 bp, Homo sapien
tctgtatgctttcccctgccacttg

SEQ ID NO: 984417 - DNA, 25 bp, Homo sapien
gtatgctttcccctgccacttgtga

SEQ ID NO: 984418 - DNA, 25 bp, Homo sapien
ctgtaatttgacgaagacactggcc

SEQ ID NO: 984419 - DNA, 25 bp, Homo sapien
tgtaatttgacgaagacactggccc

SEQ ID NO: 984420 - DNA, 25 bp, Homo sapien
gtaatttgacgaagacactggccct

SEQ ID NO: 984421 - DNA, 25 bp, Homo sapien
gatggcatctgtgaataagtcaacg

SEQ ID NO: 984422 - DNA, 25 bp, Homo sapien
catctgtgaataagtcaacggcttt

SEQ ID NO: 984423 - DNA, 25 bp, Homo sapien
tggcatctgtgaataagtcaacggc

SEQ ID NO: 984424 - DNA, 25 bp, Homo sapien
ggcatctgtgaataagtcaacggct

SEQ ID NO: 984425 - DNA, 25 bp, Homo sapien
tttgggtctccaatagcagccactt

SEQ ID NO: 984426 - DNA, 25 bp, Homo sapien
catcatttgggtctccaatagcagc

SEQ ID NO: 984427 - DNA, 25 bp, Homo sapien
tgatgtttcatatgcctttaagtct

SEQ ID NO: 984428 - DNA, 25 bp, Homo sapien
catttgggtctccaatagcagccac

SEQ ID NO: 984429 - DNA, 25 bp, Homo sapien
cctcagaagcgcatttcctcggtgt

SEQ ID NO: 984430 - DNA, 25 bp, Homo sapien
cacccactccctcagaagcgcattt

SEQ ID NO: 984431 - DNA, 25 bp, Homo sapien
cctcggtgtgcagaacgctcggatc

SEQ ID NO: 984432 - DNA, 25 bp, Homo sapien
tcctcggtgtgcagaacgctcggat

SEQ ID NO: 984433 - DNA, 25 bp, Homo sapien
catcttcacaaaggcctgaagctcg

SEQ ID NO: 984434 - DNA, 25 bp, Homo sapien
gctcgttcactttgcgggggtccat

SEQ ID NO: 984435 - DNA, 25 bp, Homo sapien
ctgaagctcgttcactttgcggggg

SEQ ID NO: 984436 - DNA, 25 bp, Homo sapien
acatcttcacaaaggcctgaagctc

SEQ ID NO: 984437 - DNA, 25 bp, Homo sapien
aagctggggggctgcagcccggttc

SEQ ID NO: 984438 - DNA, 25 bp, Homo sapien
gaggtggtgggcgaagctggggggc

SEQ ID NO: 984439 - DNA, 25 bp, Homo sapien
gaagctggggggctgcagcccggtt

SEQ ID NO: 984440 - DNA, 25 bp, Homo sapien
ggtagggaggtggtgggcgaagctg

SEQ ID NO: 984441 - DNA, 25 bp, Homo sapien
tttctcatttggtgtcaaggaagaa

SEQ ID NO: 984442 - DNA, 25 bp, Homo sapien
ttgccttttgataagggtgatgaaa

SEQ ID NO: 984443 - DNA, 25 bp, Homo sapien
tgccttttgataagggtgatgaaat

SEQ ID NO: 984444 - DNA, 25 bp, Homo sapien
gagcaggtctcccatatattagcaa

SEQ ID NO: 984445 - DNA, 25 bp, Homo sapien
tgaattaggtggaaaagctgccgca

SEQ ID NO: 984446 - DNA, 25 bp, Homo sapien
tagccttgagctacccacagatgtg

SEQ ID NO: 984447 - DNA, 25 bp, Homo sapien
ggtgctttatcttcctagctagaca

SEQ ID NO: 984448 - DNA, 25 bp, Homo sapien
agagaagagcgttcaggacatgtga

SEQ ID NO: 984449 - DNA, 25 bp, Homo sapien
catccctgattaaaaggaaggcctt

SEQ ID NO: 984450 - DNA, 25 bp, Homo sapien
ggaaggcctttcacgcattatgtag

SEQ ID NO: 984451 - DNA, 25 bp, Homo sapien
cgagttgtccgtcctgggagctcaa

SEQ ID NO: 984452 - DNA, 25 bp, Homo sapien
tggctgcagtaattatatgaattat

SEQ ID NO: 984453 - DNA, 25 bp, Homo sapien
taaacatgcagagtccatcttcacc

SEQ ID NO: 984454 - DNA, 25 bp, Homo sapien
tatgaattatttggatgattggaag

SEQ ID NO: 984455 - DNA, 25 bp, Homo sapien
ttcttcagctttaaacatgcagagt

SEQ ID NO: 984456 - DNA, 25 bp, Homo sapien
gaaagagagttataggtgaaaccta

SEQ ID NO: 984457 - DNA, 25 bp, Homo sapien
ctgcattggggaaagagagttatag

SEQ ID NO: 984458 - DNA, 25 bp, Homo sapien
gagttataggtgaaacctaggagat

SEQ ID NO: 984459 - DNA, 25 bp, Homo sapien
gagagttataggtgaaacctaggag

SEQ ID NO: 984460 - DNA, 25 bp, Homo sapien
tcagcttcgttatcactgttataac

SEQ ID NO: 984461 - DNA, 25 bp, Homo sapien
ataacacctttgactagttgctggg

SEQ ID NO: 984462 - DNA, 25 bp, Homo sapien
gatggcgaagaatatatattgacaa

SEQ ID NO: 984463 - DNA, 25 bp, Homo sapien
tggagtgatggcgaagaatatatat

SEQ ID NO: 984464 - DNA, 25 bp, Homo sapien
gcaggctgccaaagacacgattcag

SEQ ID NO: 984465 - DNA, 25 bp, Homo sapien
agaaatggctgcaggctgccaaaga

SEQ ID NO: 984466 - DNA, 25 bp, Homo sapien
aagacacgattcagaaagaagctcc

SEQ ID NO: 984467 - DNA, 25 bp, Homo sapien
tctgcctgcagatccgtccctttgt

SEQ ID NO: 984468 - DNA, 25 bp, Homo sapien
ccttgtacttcttgagtgatgatga

SEQ ID NO: 984469 - DNA, 25 bp, Homo sapien
ggccttgtacttcttgagtgatgat

SEQ ID NO: 984470 - DNA, 25 bp, Homo sapien
gccttgtacttcttgagtgatgatg

SEQ ID NO: 984471 - DNA, 25 bp, Homo sapien
ttgtacttcttgagtgatgatgagc

SEQ ID NO: 984472 - DNA, 25 bp, Homo sapien
gtcccatagttcttcttggtagaat

SEQ ID NO: 984473 - DNA, 25 bp, Homo sapien
tcttggtagaatctgtgatgattat

SEQ ID NO: 984474 - DNA, 25 bp, Homo sapien
gtttctgtcccatagttcttcttgg

SEQ ID NO: 984475 - DNA, 25 bp, Homo sapien
ctgtcccatagttcttcttggtaga

SEQ ID NO: 984476 - DNA, 25 bp, Homo sapien
catagatgaactacaccggcacctg

SEQ ID NO: 984477 - DNA, 25 bp, Homo sapien
gactagccgagttgtgcagcgtaac

SEQ ID NO: 984478 - DNA, 25 bp, Homo sapien
ggcacctgtacatcaaatcgactag

SEQ ID NO: 984479 - DNA, 25 bp, Homo sapien
ggactgagtgaccttcgactagagc

SEQ ID NO: 984480 - DNA, 25 bp, Homo sapien
gatgtgagctgagtcagtacaatga

SEQ ID NO: 984481 - DNA, 25 bp, Homo sapien
ggtccatgatgtgagctgagtcagt

SEQ ID NO: 984482 - DNA, 25 bp, Homo sapien
tgatgtgagctgagtcagtacaatg

SEQ ID NO: 984483 - DNA, 25 bp, Homo sapien
ccatgatgtgagctgagtcagtaca

SEQ ID NO: 984484 - DNA, 25 bp, Homo sapien
tcacagttgatgaagacactagaca

SEQ ID NO: 984485 - DNA, 25 bp, Homo sapien
tgcccatgctttgtcatcacagttg

SEQ ID NO: 984486 - DNA, 25 bp, Homo sapien
tcatgtgcccatgctttgtcatcac

SEQ ID NO: 984487 - DNA, 25 bp, Homo sapien
tgatttcaaattcgctcatgtgccc

SEQ ID NO: 984488 - DNA, 25 bp, Homo sapien
gcaaggtctaataagaaccaggtgt

SEQ ID NO: 984489 - DNA, 25 bp, Homo sapien
caaggtctaataagaaccaggtgtt

SEQ ID NO: 984490 - DNA, 25 bp, Homo sapien
caaacaggacatttatgcacaccat

SEQ ID NO: 984491 - DNA, 25 bp, Homo sapien
aagcagcaaacaggacatttatgca

SEQ ID NO: 984492 - DNA, 25 bp, Homo sapien
gcaaacaggacatttatgcacacca

SEQ ID NO: 984493 - DNA, 25 bp, Homo sapien
ctggaaagcagcaaacaggacattt

SEQ ID NO: 984494 - DNA, 25 bp, Homo sapien
ggcttgcctttgcagagggttcagc

SEQ ID NO: 984495 - DNA, 25 bp, Homo sapien
gcagccaaaatcttcattgcctttt

SEQ ID NO: 984496 - DNA, 25 bp, Homo sapien
aacgaaattgtaatgtttattatca

SEQ ID NO: 984497 - DNA, 25 bp, Homo sapien
gatgcctcgcaggtgccttcttgtg

SEQ ID NO: 984498 - DNA, 25 bp, Homo sapien
tgatttcagcttagagccaggttcg

SEQ ID NO: 984499 - DNA, 25 bp, Homo sapien
tgtgcgtgaccaaaaaagaaggtaa

SEQ ID NO: 984500 - DNA, 25 bp, Homo sapien
tgtgtttagtgcctaccatatggta

SEQ ID NO: 984501 - DNA, 25 bp, Homo sapien
gccaggttcgactatgctcttctaa

SEQ ID NO: 984502 - DNA, 25 bp, Homo sapien
gctggaactgtgtgcccattaaaca

SEQ ID NO: 984503 - DNA, 25 bp, Homo sapien
tatctggtctgtcatcgttgggaat

SEQ ID NO: 984504 - DNA, 25 bp, Homo sapien
tttctaagtagacagttcagtggtg

SEQ ID NO: 984505 - DNA, 25 bp, Homo sapien
gaagagggatagctcaatcaaaagg

SEQ ID NO: 984506 - DNA, 25 bp, Homo sapien
ttctactccttgaccttctaaggta

SEQ ID NO: 984507 - DNA, 25 bp, Homo sapien
gcttctactccttgaccttctaagg

SEQ ID NO: 984508 - DNA, 25 bp, Homo sapien
cttctactccttgaccttctaaggt

SEQ ID NO: 984509 - DNA, 25 bp, Homo sapien
cctgtggagcgcattaagtctttat

SEQ ID NO: 984510 - DNA, 25 bp, Homo sapien
ctggcctgtggagcgcattaagtct

SEQ ID NO: 984511 - DNA, 25 bp, Homo sapien
tgtggagcgcattaagtctttatta

SEQ ID NO: 984512 - DNA, 25 bp, Homo sapien
ggcctgtggagcgcattaagtcttt

SEQ ID NO: 984513 - DNA, 25 bp, Homo sapien
gcatgggccaaatccagcctgcttc

SEQ ID NO: 984514 - DNA, 25 bp, Homo sapien
caaatccagcctgcttctgtctgct

SEQ ID NO: 984515 - DNA, 25 bp, Homo sapien
gccaaatccagcctgcttctgtctg

SEQ ID NO: 984516 - DNA, 25 bp, Homo sapien
gggccaaatccagcctgcttctgtc

SEQ ID NO: 984517 - DNA, 25 bp, Homo sapien
ccagcgctcattggaactgtactcc

SEQ ID NO: 984518 - DNA, 25 bp, Homo sapien
tcattggaactgtactccggctcct

SEQ ID NO: 984519 - DNA, 25 bp, Homo sapien
ttggaactgtactccggctcctctc

SEQ ID NO: 984520 - DNA, 25 bp, Homo sapien
agcgctcattggaactgtactccgg

SEQ ID NO: 984521 - DNA, 25 bp, Homo sapien
gcggtttttcgtcatttataggtga

SEQ ID NO: 984522 - DNA, 25 bp, Homo sapien
tcatgatgatgccacattttgcctt

SEQ ID NO: 984523 - DNA, 25 bp, Homo sapien
tgatatggcagcagatttttgagca

SEQ ID NO: 984524 - DNA, 25 bp, Homo sapien
ataaaagccgagtccataagtgagc

SEQ ID NO: 984525 - DNA, 25 bp, Homo sapien
taagaatcttagttaccattaccat

SEQ ID NO: 984526 - DNA, 25 bp, Homo sapien
ttaaccaactagaagagttgccagg

SEQ ID NO: 984527 - DNA, 25 bp, Homo sapien
tagagataggtggaacatatagatt

SEQ ID NO: 984528 - DNA, 25 bp, Homo sapien
ctttccttctatcacccctttgagg

SEQ ID NO: 984529 - DNA, 25 bp, Homo sapien
ctttagagatcactaactcagagca

SEQ ID NO: 984530 - DNA, 25 bp, Homo sapien
attgaggaaaacgtttcagaacact

SEQ ID NO: 984531 - DNA, 25 bp, Homo sapien
taattgaggaaaacgtttcagaaca

SEQ ID NO: 984532 - DNA, 25 bp, Homo sapien
ttagtattccctcatgtctcctcca

SEQ ID NO: 984533 - DNA, 25 bp, Homo sapien
gtctcctccactatcagatatttga

SEQ ID NO: 984534 - DNA, 25 bp, Homo sapien
ggaccaaatgatgacagtttagtcc

SEQ ID NO: 984535 - DNA, 25 bp, Homo sapien
gggaccaaatgatgacagtttagtc

SEQ ID NO: 984536 - DNA, 25 bp, Homo sapien
tgacttctactgtacgagtagcaga

SEQ ID NO: 984537 - DNA, 25 bp, Homo sapien
gagtagcagagaatgttccttgcag

SEQ ID NO: 984538 - DNA, 25 bp, Homo sapien
ttagaatccaaggaaattgtggtac

SEQ ID NO: 984539 - DNA, 25 bp, Homo sapien
aaattgtggtacagctgacttctac

SEQ ID NO: 984540 - DNA, 25 bp, Homo sapien
taattttggtaaaattgcctgcagt

SEQ ID NO: 984541 - DNA, 25 bp, Homo sapien
tttggtaaaattgcctgcagtaagt

SEQ ID NO: 984542 - DNA, 25 bp, Homo sapien
aattgcctgcagtaagtatcatcat

SEQ ID NO: 984543 - DNA, 25 bp, Homo sapien
aaattgcctgcagtaagtatcatca

SEQ ID NO: 984544 - DNA, 25 bp, Homo sapien
ttgatcgtgtctgtttcagacaagc

SEQ ID NO: 984545 - DNA, 25 bp, Homo sapien
ctagctattgatcgtgtctgtttca

SEQ ID NO: 984546 - DNA, 25 bp, Homo sapien
agttgctcaactattgtggtataag

SEQ ID NO: 984547 - DNA, 25 bp, Homo sapien
gctcctcttgctaagttgctcaact

SEQ ID NO: 984548 - DNA, 25 bp, Homo sapien
tagttcttgaacactacaatggctt

SEQ ID NO: 984549 - DNA, 25 bp, Homo sapien
actcttcaggaagttgtcatagttc

SEQ ID NO: 984550 - DNA, 25 bp, Homo sapien
catagttcttgaacactacaatggc

SEQ ID NO: 984551 - DNA, 25 bp, Homo sapien
ttaactactgtttacactcttcagg

SEQ ID NO: 984552 - DNA, 25 bp, Homo sapien
ctatgtaaatacaacatccctgctg

SEQ ID NO: 984553 - DNA, 25 bp, Homo sapien
tgtaaatacaacatccctgctggtg

SEQ ID NO: 984554 - DNA, 25 bp, Homo sapien
tgctggtgcttattcctgagatggg

SEQ ID NO: 984555 - DNA, 25 bp, Homo sapien
tatgtaaatacaacatccctgctgg

SEQ ID NO: 984556 - DNA, 25 bp, Homo sapien
gtaaagtctcttgcgcagtacagaa

SEQ ID NO: 984557 - DNA, 25 bp, Homo sapien
agtctcttgcgcagtacagaatgtg

SEQ ID NO: 984558 - DNA, 25 bp, Homo sapien
aagtctcttgcgcagtacagaatgt

SEQ ID NO: 984559 - DNA, 25 bp, Homo sapien
ttggtaaagtctcttgcgcagtaca

SEQ ID NO: 984560 - DNA, 25 bp, Homo sapien
ggaaagcttggagtgtggcctttat

SEQ ID NO: 984561 - DNA, 25 bp, Homo sapien
aaagcttggagtgtggcctttattt

SEQ ID NO: 984562 - DNA, 25 bp, Homo sapien
gaaagcttggagtgtggcctttatt

SEQ ID NO: 984563 - DNA, 25 bp, Homo sapien
aagcttggagtgtggcctttatttt

SEQ ID NO: 984564 - DNA, 25 bp, Homo sapien
ggtctccagcatgatactagtttcc

SEQ ID NO: 984565 - DNA, 25 bp, Homo sapien
ttccagtgtgttggtagggtagacc

SEQ ID NO: 984566 - DNA, 25 bp, Homo sapien
ttggtagggtagacctgctcagccc

SEQ ID NO: 984567 - DNA, 25 bp, Homo sapien
cagcatgatactagtttccagtgtg

SEQ ID NO: 984568 - DNA, 25 bp, Homo sapien
gaagttggtgaccagagtagaacag

SEQ ID NO: 984569 - DNA, 25 bp, Homo sapien
caagaagggtcacaagccatctacc

SEQ ID NO: 984570 - DNA, 25 bp, Homo sapien
caggcatcaagaagggtcacaagcc

SEQ ID NO: 984571 - DNA, 25 bp, Homo sapien
gagtagaacagtgccacagcacagg

SEQ ID NO: 984572 - DNA, 25 bp, Homo sapien
cagtcaacctttagctctctgtgca

SEQ ID NO: 984573 - DNA, 25 bp, Homo sapien
agtcaacctttagctctctgtgcat

SEQ ID NO: 984574 - DNA, 25 bp, Homo sapien
gctccagtcaacctttagctctctg

SEQ ID NO: 984575 - DNA, 25 bp, Homo sapien
tccagtcaacctttagctctctgtg

SEQ ID NO: 984576 - DNA, 25 bp, Homo sapien
gctcctgccagtatggaatcaggta

SEQ ID NO: 984577 - DNA, 25 bp, Homo sapien
tggaatcaggtatcacagagcccag

SEQ ID NO: 984578 - DNA, 25 bp, Homo sapien
ctcctgccagtatggaatcaggtat

SEQ ID NO: 984579 - DNA, 25 bp, Homo sapien
atggaatcaggtatcacagagccca

SEQ ID NO: 984580 - DNA, 25 bp, Homo sapien
cagtctgttgatattacgtgagaag

SEQ ID NO: 984581 - DNA, 25 bp, Homo sapien
agtctgttgatattacgtgagaagg

SEQ ID NO: 984582 - DNA, 25 bp, Homo sapien
gtctgttgatattacgtgagaagga

SEQ ID NO: 984583 - DNA, 25 bp, Homo sapien
tctgtgttggtagctggcagtcact

SEQ ID NO: 984584 - DNA, 25 bp, Homo sapien
cttcataggatgctttcgttgctgc

SEQ ID NO: 984585 - DNA, 25 bp, Homo sapien
tcgttgctgcatgtataaggatcct

SEQ ID NO: 984586 - DNA, 25 bp, Homo sapien
gacttctgagctggatggtaacgta

SEQ ID NO: 984587 - DNA, 25 bp, Homo sapien
taaaggagccttagccaggaatatc

SEQ ID NO: 984588 - DNA, 25 bp, Homo sapien
gatccaaatacggttgtaaaggagc

SEQ ID NO: 984589 - DNA, 25 bp, Homo sapien
cataaatcaaggtctgcggcagctg

SEQ ID NO: 984590 - DNA, 25 bp, Homo sapien
ggccctgtcatggtatagccaaagt

SEQ ID NO: 984591 - DNA, 25 bp, Homo sapien
gtggaatacagagctggtcagcact

SEQ ID NO: 984592 - DNA, 25 bp, Homo sapien
cggaacatcggggagcaccacacag

SEQ ID NO: 984593 - DNA, 25 bp, Homo sapien
tggtcagcacttaattggtttacac

SEQ ID NO: 984594 - DNA, 25 bp, Homo sapien
cacacagaccagagtagaataatgt

SEQ ID NO: 984595 - DNA, 25 bp, Homo sapien
tgcaggttcgaatcgtcctcccatg

SEQ ID NO: 984596 - DNA, 25 bp, Homo sapien
tttctctgcaggttcgaatcgtcct

SEQ ID NO: 984597 - DNA, 25 bp, Homo sapien
gaatcgtcctcccatgccatcagta

SEQ ID NO: 984598 - DNA, 25 bp, Homo sapien
ccatgccatcagtatgagcgcctat

SEQ ID NO: 984599 - DNA, 25 bp, Homo sapien
gatacccatgtatagttaccaaaga

SEQ ID NO: 984600 - DNA, 25 bp, Homo sapien
taccaaagagttgtaagctgaagaa

SEQ ID NO: 984601 - DNA, 25 bp, Homo sapien
cttctgtgacaaaaagatgctgatc

SEQ ID NO: 984602 - DNA, 25 bp, Homo sapien
tgatgaacaggctatttgataccca

SEQ ID NO: 984603 - DNA, 25 bp, Homo sapien
catgtcgagagtcttgatgtagagg

SEQ ID NO: 984604 - DNA, 25 bp, Homo sapien
agaggagtacagactgtcattagac

SEQ ID NO: 984605 - DNA, 25 bp, Homo sapien
catgcaatgtgcatgtcgagagtct

SEQ ID NO: 984606 - DNA, 25 bp, Homo sapien
gaaagggttgtcatgcattctggaa

SEQ ID NO: 984607 - DNA, 25 bp, Homo sapien
tgacaggcagggatatcactatact

SEQ ID NO: 984608 - DNA, 25 bp, Homo sapien
ccttgtctgggaatcgaaccctggt

SEQ ID NO: 984609 - DNA, 25 bp, Homo sapien
ttgtctgggaatcgaaccctggtct

SEQ ID NO: 984610 - DNA, 25 bp, Homo sapien
caggcagggatatcactatactaat

SEQ ID NO: 984611 - DNA, 25 bp, Homo sapien
ctggatgaaaattggctgcagttta

SEQ ID NO: 984612 - DNA, 25 bp, Homo sapien
tctatcactggctggatgaaaattg

SEQ ID NO: 984613 - DNA, 25 bp, Homo sapien
agtatctatcactggctggatgaaa

SEQ ID NO: 984614 - DNA, 25 bp, Homo sapien
cactggctggatgaaaattggctgc

SEQ ID NO: 984615 - DNA, 25 bp, Homo sapien
tttccaggtccatagcaaagggagc

SEQ ID NO: 984616 - DNA, 25 bp, Homo sapien
aaacatttgcggaaataatttatag

SEQ ID NO: 984617 - DNA, 25 bp, Homo sapien
cttttcggcatccaataaacatttg

SEQ ID NO: 984618 - DNA, 25 bp, Homo sapien
tgatgattacatgcttttcggcatc

SEQ ID NO: 984619 - DNA, 25 bp, Homo sapien
catgtgccatgcaaatagggcatag

SEQ ID NO: 984620 - DNA, 25 bp, Homo sapien
tttcttgtctagcaatggttggccc

SEQ ID NO: 984621 - DNA, 25 bp, Homo sapien
tgttactaagtagcaacatgactgc

SEQ ID NO: 984622 - DNA, 25 bp, Homo sapien
aaggttgtaccgttgcagaatcaga

SEQ ID NO: 984623 - DNA, 25 bp, Homo sapien
aagtgttaagttataaactgcagcg

SEQ ID NO: 984624 - DNA, 25 bp, Homo sapien
ttttttcctatcaccactggctagt

SEQ ID NO: 984625 - DNA, 25 bp, Homo sapien
ccactggctagttctgaagtataaa

SEQ ID NO: 984626 - DNA, 25 bp, Homo sapien
ctgcagcgttataattcctcttctg

SEQ ID NO: 984627 - DNA, 25 bp, Homo sapien
tatctgtgtatctgcgaattgaacc

SEQ ID NO: 984628 - DNA, 25 bp, Homo sapien
tagaaaatttgtcacctagttgctc

SEQ ID NO: 984629 - DNA, 25 bp, Homo sapien
tgaaccattgctcaatggcagtgct

SEQ ID NO: 984630 - DNA, 25 bp, Homo sapien
tgtggtttcatcaatctgaatagaa

SEQ ID NO: 984631 - DNA, 25 bp, Homo sapien
ctctttgatgtgtgaacttgtccat

SEQ ID NO: 984632 - DNA, 25 bp, Homo sapien
gatatttttactttaggccattgtc

SEQ ID NO: 984633 - DNA, 25 bp, Homo sapien
tacagtcgaaaacatttagttaaga

SEQ ID NO: 984634 - DNA, 25 bp, Homo sapien
tgtagattagtcatcacatcacaaa

SEQ ID NO: 984635 - DNA, 25 bp, Homo sapien
gttggaagacatgtttgaaactgca

SEQ ID NO: 984636 - DNA, 25 bp, Homo sapien
taagacagttggaagacatgtttga

SEQ ID NO: 984637 - DNA, 25 bp, Homo sapien
gacagttggaagacatgtttgaaac

SEQ ID NO: 984638 - DNA, 25 bp, Homo sapien
aatattaagacagttggaagacatg

SEQ ID NO: 984639 - DNA, 25 bp, Homo sapien
ttattcacatgggagcaagcctgct

SEQ ID NO: 984640 - DNA, 25 bp, Homo sapien
taattaagggagctacaagtcaagg

SEQ ID NO: 984641 - DNA, 25 bp, Homo sapien
gatgaatcaccccatacttagtgga

SEQ ID NO: 984642 - DNA, 25 bp, Homo sapien
ctcaagcagtcttcacgtttgggct

SEQ ID NO: 984643 - DNA, 25 bp, Homo sapien
catgtacgagcccatttgaagggca

SEQ ID NO: 984644 - DNA, 25 bp, Homo sapien
cgagcccatttgaagggcatgggca

SEQ ID NO: 984645 - DNA, 25 bp, Homo sapien
caagtcaagttgactgctggcattt

SEQ ID NO: 984646 - DNA, 25 bp, Homo sapien
ggcatgggcaatacttcgtttctga

SEQ ID NO: 984647 - DNA, 25 bp, Homo sapien
ttcctttttgtacttgatcagacat

SEQ ID NO: 984648 - DNA, 25 bp, Homo sapien
gctgctagaagtgtgcttgtcactt

SEQ ID NO: 984649 - DNA, 25 bp, Homo sapien
cttgtcacttctcctctatagccgt

SEQ ID NO: 984650 - DNA, 25 bp, Homo sapien
cctcaaactgaagcatccatgggaa

SEQ ID NO: 984651 - DNA, 25 bp, Homo sapien
tagccgtcaaattctttgagatcct

SEQ ID NO: 984652 - DNA, 25 bp, Homo sapien
tctagtttcagtgtgtatgataaac

SEQ ID NO: 984653 - DNA, 25 bp, Homo sapien
ggtaccgcggtaaggatgggatcta

SEQ ID NO: 984654 - DNA, 25 bp, Homo sapien
aatagtaaagcaccaactttaatca

SEQ ID NO: 984655 - DNA, 25 bp, Homo sapien
aaatataccatgtcagattttggaa

SEQ ID NO: 984656 - DNA, 25 bp, Homo sapien
caaattgtcgtggaactgaaccttg

SEQ ID NO: 984657 - DNA, 25 bp, Homo sapien
ctgcaaattgtcgtggaactgaacc

SEQ ID NO: 984658 - DNA, 25 bp, Homo sapien
aattgtcgtggaactgaaccttgag

SEQ ID NO: 984659 - DNA, 25 bp, Homo sapien
ttactgcaaattgtcgtggaactga

SEQ ID NO: 984660 - DNA, 25 bp, Homo sapien
gttgacagattatatctgaaaaggg

SEQ ID NO: 984661 - DNA, 25 bp, Homo sapien
agggctttggtaattgctcgttctc

SEQ ID NO: 984662 - DNA, 25 bp, Homo sapien
gcaggaggactacatgtggttgaca

SEQ ID NO: 984663 - DNA, 25 bp, Homo sapien
tcttaaatgaacctctccttggtcc

SEQ ID NO: 984664 - DNA, 25 bp, Homo sapien
cttggttccaggatgggcactagtg

SEQ ID NO: 984665 - DNA, 25 bp, Homo sapien
tcatttccctgccaatatcatggtt

SEQ ID NO: 984666 - DNA, 25 bp, Homo sapien
tacatcataggtggtgggttccagc

SEQ ID NO: 984667 - DNA, 25 bp, Homo sapien
tcaaatagggtgagctttagttaca

SEQ ID NO: 984668 - DNA, 25 bp, Homo sapien
ctcccaggatccgagatggcgccat

SEQ ID NO: 984669 - DNA, 25 bp, Homo sapien
cattcttcggctatacagtggtcca

SEQ ID NO: 984670 - DNA, 25 bp, Homo sapien
tggtccaaaatggtggccgttgcag

SEQ ID NO: 984671 - DNA, 25 bp, Homo sapien
gccgttgcagctactgaatggagaa

SEQ ID NO: 984672 - DNA, 25 bp, Homo sapien
taaggtgtgaattgtggcctttgcc

SEQ ID NO: 984673 - DNA, 25 bp, Homo sapien
cagtggttgcacctgctgtatctta

SEQ ID NO: 984674 - DNA, 25 bp, Homo sapien
atcttaaggtgtgaattgtggcctt

SEQ ID NO: 984675 - DNA, 25 bp, Homo sapien
cagccacagtagcagtggttgcacc

SEQ ID NO: 984676 - DNA, 25 bp, Homo sapien
gggtcatatcctagaataacagcat

SEQ ID NO: 984677 - DNA, 25 bp, Homo sapien
ttttattaaaatctgcaggtagttc

SEQ ID NO: 984678 - DNA, 25 bp, Homo sapien
aggtagttcttgtactggcaatggc

SEQ ID NO: 984679 - DNA, 25 bp, Homo sapien
tttgattaagcagtgtagtagggtc

SEQ ID NO: 984680 - DNA, 25 bp, Homo sapien
tgttcttgatagacataactagatg

SEQ ID NO: 984681 - DNA, 25 bp, Homo sapien
ccttaatgtgtgcaatattcctttt

SEQ ID NO: 984682 - DNA, 25 bp, Homo sapien
ttaatgtgtgcaatattcctttttg

SEQ ID NO: 984683 - DNA, 25 bp, Homo sapien
ttcttgatagacataactagatgta

SEQ ID NO: 984684 - DNA, 25 bp, Homo sapien
gagacaggaaaacgtagagttctag

SEQ ID NO: 984685 - DNA, 25 bp, Homo sapien
tagccgctactagtcaggagagaca

SEQ ID NO: 984686 - DNA, 25 bp, Homo sapien
ggataagtatcatcatagccgctac

SEQ ID NO: 984687 - DNA, 25 bp, Homo sapien
cagttggaccactaaatgtgttttc

SEQ ID NO: 984688 - DNA, 25 bp, Homo sapien
gccaaatcactgtgagcctttgttt

SEQ ID NO: 984689 - DNA, 25 bp, Homo sapien
tgccaaatcactgtgagcctttgtt

SEQ ID NO: 984690 - DNA, 25 bp, Homo sapien
ccaaatcactgtgagcctttgtttc

SEQ ID NO: 984691 - DNA, 25 bp, Homo sapien
ttctgtgtcgcttcagcattgactt

SEQ ID NO: 984692 - DNA, 25 bp, Homo sapien
aatctctgattgtaagccttcctaa

SEQ ID NO: 984693 - DNA, 25 bp, Homo sapien
gatgattatcattggcagagtcaag

SEQ ID NO: 984694 - DNA, 25 bp, Homo sapien
cctaatatactgtgcagcttcagag

SEQ ID NO: 984695 - DNA, 25 bp, Homo sapien
tttgactctggattatcaaacagcc

SEQ ID NO: 984696 - DNA, 25 bp, Homo sapien
tcattaggctgtttgactctgataa

SEQ ID NO: 984697 - DNA, 25 bp, Homo sapien
gtttatctacagtcaaacagagagt

SEQ ID NO: 984698 - DNA, 25 bp, Homo sapien
gctcaaaggctcgaggactcttcca

SEQ ID NO: 984699 - DNA, 25 bp, Homo sapien
tggtgtaccccatcagagtgtttct

SEQ ID NO: 984700 - DNA, 25 bp, Homo sapien
tggaattgggttcaaggccatgctt

SEQ ID NO: 984701 - DNA, 25 bp, Homo sapien
cagaagcgctggtgtagttccaaca

SEQ ID NO: 984702 - DNA, 25 bp, Homo sapien
tcacaagagagtgctctcagaagcg

SEQ ID NO: 984703 - DNA, 25 bp, Homo sapien
cagattatgccagtatgaacttgtt

SEQ ID NO: 984704 - DNA, 25 bp, Homo sapien
tatgccagtatgaacttgtttctcc

SEQ ID NO: 984705 - DNA, 25 bp, Homo sapien
ttgtttctccattagctcttgcact

SEQ ID NO: 984706 - DNA, 25 bp, Homo sapien
tccattagctcttgcactttctcac

SEQ ID NO: 984707 - DNA, 25 bp, Homo sapien
gcccaaataaggaggtccacatctg

SEQ ID NO: 984708 - DNA, 25 bp, Homo sapien
ctgccgaatatcctctgtatggcca

SEQ ID NO: 984709 - DNA, 25 bp, Homo sapien
cctgtgcccaaataaggaggtccac

SEQ ID NO: 984710 - DNA, 25 bp, Homo sapien
gaatatcctctgtatggccaggctg

SEQ ID NO: 984711 - DNA, 25 bp, Homo sapien
tctttggggtaacgctgcagtttac

SEQ ID NO: 984712 - DNA, 25 bp, Homo sapien
catgattgcacctagcctgtgggct

SEQ ID NO: 984713 - DNA, 25 bp, Homo sapien
ttgcccatgccccaaaagtacatga

SEQ ID NO: 984714 - DNA, 25 bp, Homo sapien
gctaactgaaatcatgagattggct

SEQ ID NO: 984715 - DNA, 25 bp, Homo sapien
tgtggtatctcctctcaggtaaaat

SEQ ID NO: 984716 - DNA, 25 bp, Homo sapien
caaagcattagtcattgaccatcca

SEQ ID NO: 984717 - DNA, 25 bp, Homo sapien
ggtatctcctctcaggtaaaatgcc

SEQ ID NO: 984718 - DNA, 25 bp, Homo sapien
ggtaatagagacatagactgtgatg

SEQ ID NO: 984719 - DNA, 25 bp, Homo sapien
tgatctctataagccatggaaaaga

SEQ ID NO: 984720 - DNA, 25 bp, Homo sapien
caggagtatagcacaacgtgtcttg

SEQ ID NO: 984721 - DNA, 25 bp, Homo sapien
ccacattgtgtggaagacttcttga

SEQ ID NO: 984722 - DNA, 25 bp, Homo sapien
aaggtattacttcggccacattgtg

SEQ ID NO: 984723 - DNA, 25 bp, Homo sapien
ttccatggccgctgcttggcagtct

SEQ ID NO: 984724 - DNA, 25 bp, Homo sapien
gccgctgcttggcagtctcttgctg

SEQ ID NO: 984725 - DNA, 25 bp, Homo sapien
gctgcttggcagtctcttgctgcat

SEQ ID NO: 984726 - DNA, 25 bp, Homo sapien
cttccatggccgctgcttggcagtc

SEQ ID NO: 984727 - DNA, 25 bp, Homo sapien
ctttattgatgtaaagcattggaac

SEQ ID NO: 984728 - DNA, 25 bp, Homo sapien
gatgtaaagcattggaacttagcta

SEQ ID NO: 984729 - DNA, 25 bp, Homo sapien
ttattgccttagcaattctcttctt

SEQ ID NO: 984730 - DNA, 25 bp, Homo sapien
gggaaatctttattgatgtaaagca

SEQ ID NO: 984731 - DNA, 25 bp, Homo sapien
ttaggccttagtgggcctctctcct

SEQ ID NO: 984732 - DNA, 25 bp, Homo sapien
ttagtgggcctctctccttcatgct

SEQ ID NO: 984733 - DNA, 25 bp, Homo sapien
ccttagtgggcctctctccttcatg

SEQ ID NO: 984734 - DNA, 25 bp, Homo sapien
ggccttagtgggcctctctccttca

SEQ ID NO: 984735 - DNA, 25 bp, Homo sapien
cattcccgagttatggttccaagga

SEQ ID NO: 984736 - DNA, 25 bp, Homo sapien
tccaggggtcactggtataagaggc

SEQ ID NO: 984737 - DNA, 25 bp, Homo sapien
cccgagttatggttccaaggacctg

SEQ ID NO: 984738 - DNA, 25 bp, Homo sapien
tccaacattcccgagttatggttcc

SEQ ID NO: 984739 - DNA, 25 bp, Homo sapien
taccactaccagcacaccaatacag

SEQ ID NO: 984740 - DNA, 25 bp, Homo sapien
ccattaccactaccagcacaccaat

SEQ ID NO: 984741 - DNA, 25 bp, Homo sapien
taccagcacaccaatacagattttc

SEQ ID NO: 984742 - DNA, 25 bp, Homo sapien
cactaccagcacaccaatacagatt

SEQ ID NO: 984743 - DNA, 25 bp, Homo sapien
agccaaatcgagctgtctctggtgg

SEQ ID NO: 984744 - DNA, 25 bp, Homo sapien
taaggagccaaatcgagctgtctct

SEQ ID NO: 984745 - DNA, 25 bp, Homo sapien
gggtaaggagccaaatcgagctgtc

SEQ ID NO: 984746 - DNA, 25 bp, Homo sapien
aggagccaaatcgagctgtctctgg

SEQ ID NO: 984747 - DNA, 25 bp, Homo sapien
tgctctctgagctattacgttagca

SEQ ID NO: 984748 - DNA, 25 bp, Homo sapien
ctgagctattacgttagcatagagg

SEQ ID NO: 984749 - DNA, 25 bp, Homo sapien
tctctgagctattacgttagcatag

SEQ ID NO: 984750 - DNA, 25 bp, Homo sapien
gctattacgttagcatagaggtaaa

SEQ ID NO: 984751 - DNA, 25 bp, Homo sapien
tcagtcaaaatgactcaaatgccgc

SEQ ID NO: 984752 - DNA, 25 bp, Homo sapien
agtcaaaatgactcaaatgccgcac

SEQ ID NO: 984753 - DNA, 25 bp, Homo sapien
cagtcaaaatgactcaaatgccgca

SEQ ID NO: 984754 - DNA, 25 bp, Homo sapien
cattgttattttctcaagtaccgat

SEQ ID NO: 984755 - DNA, 25 bp, Homo sapien
tgttattttctcaagtaccgatacg

SEQ ID NO: 984756 - DNA, 25 bp, Homo sapien
ctgctcggtcccagagcacattgtt

SEQ ID NO: 984757 - DNA, 25 bp, Homo sapien
ttattttctcaagtaccgatacgtg

SEQ ID NO: 984758 - DNA, 25 bp, Homo sapien
tcaatgcatatgtttgattaaacag

SEQ ID NO: 984759 - DNA, 25 bp, Homo sapien
gatcaatgcatatgtttgattaaac

SEQ ID NO: 984760 - DNA, 25 bp, Homo sapien
aatgcatatgtttgattaaacagaa

SEQ ID NO: 984761 - DNA, 25 bp, Homo sapien
tgatcaatgcatatgtttgattaaa

SEQ ID NO: 984762 - DNA, 25 bp, Homo sapien
cctgggattctggcgaatcaaatgc

SEQ ID NO: 984763 - DNA, 25 bp, Homo sapien
tgggattctggcgaatcaaatgctt

SEQ ID NO: 984764 - DNA, 25 bp, Homo sapien
ctcctgggattctggcgaatcaaat

SEQ ID NO: 984765 - DNA, 25 bp, Homo sapien
gggattctggcgaatcaaatgcttc

SEQ ID NO: 984766 - DNA, 25 bp, Homo sapien
cagaaaggttctgatcagcagcttc

SEQ ID NO: 984767 - DNA, 25 bp, Homo sapien
caaaggacaacaagttatcactagg

SEQ ID NO: 984768 - DNA, 25 bp, Homo sapien
taattgcaaaggacaacaagttatc

SEQ ID NO: 984769 - DNA, 25 bp, Homo sapien
ctgtgtaattgcaaaggacaacaag

SEQ ID NO: 984770 - DNA, 25 bp, Homo sapien
gacaacaagttatcactaggctgtg

SEQ ID NO: 984771 - DNA, 25 bp, Homo sapien
ctgccaaggtggacattgatggagg

SEQ ID NO: 984772 - DNA, 25 bp, Homo sapien
tgccaaggtggacattgatggaggt

SEQ ID NO: 984773 - DNA, 25 bp, Homo sapien
gccaaggtggacattgatggaggtg

SEQ ID NO: 984774 - DNA, 25 bp, Homo sapien
aggtgggcaaatcacctgatgttgg

SEQ ID NO: 984775 - DNA, 25 bp, Homo sapien
cctgatgttgggagttcaagagtag

SEQ ID NO: 984776 - DNA, 25 bp, Homo sapien
cacctgatgttgggagttcaagagt

SEQ ID NO: 984777 - DNA, 25 bp, Homo sapien
gtgggcaaatcacctgatgttggga

SEQ ID NO: 984778 - DNA, 25 bp, Homo sapien
acggagaggtcaccttggatgtttc

SEQ ID NO: 984779 - DNA, 25 bp, Homo sapien
tgactaactgttgcatcctcttgct

SEQ ID NO: 984780 - DNA, 25 bp, Homo sapien
tctgactaactgttgcatcctcttg

SEQ ID NO: 984781 - DNA, 25 bp, Homo sapien
gctgctgaaagcctactgacggaga

SEQ ID NO: 984782 - DNA, 25 bp, Homo sapien
ggattccacaattaaggcattgctg

SEQ ID NO: 984783 - DNA, 25 bp, Homo sapien
gatgatgacgctgttgtcctcttca

SEQ ID NO: 984784 - DNA, 25 bp, Homo sapien
ccacaattaaggcattgctgggtct

SEQ ID NO: 984785 - DNA, 25 bp, Homo sapien
gacacagccccctatttgcttgttg

SEQ ID NO: 984786 - DNA, 25 bp, Homo sapien
tagtatgttgtagggtccagtccct

SEQ ID NO: 984787 - DNA, 25 bp, Homo sapien
cttcagtgcagccatcataacctcc

SEQ ID NO: 984788 - DNA, 25 bp, Homo sapien
gtagggtccagtcccttcagtgcag

SEQ ID NO: 984789 - DNA, 25 bp, Homo sapien
ggttagtatgttgtagggtccagtc

SEQ ID NO: 984790 - DNA, 25 bp, Homo sapien
gaaagtaacctcgaagtcgtcacac

SEQ ID NO: 984791 - DNA, 25 bp, Homo sapien
gagcacaacctccagatgccgtgga

SEQ ID NO: 984792 - DNA, 25 bp, Homo sapien
aatgctgcagctccggaaagtaacc

SEQ ID NO: 984793 - DNA, 25 bp, Homo sapien
tgcgggcctgcgtagtcaatgctgc

SEQ ID NO: 984794 - DNA, 25 bp, Homo sapien
caacttcagcacctgtcttgtctct

SEQ ID NO: 984795 - DNA, 25 bp, Homo sapien
cagcacctgtcttgtctctagtagc

SEQ ID NO: 984796 - DNA, 25 bp, Homo sapien
gccccatgccctttcccaattcaaa

SEQ ID NO: 984797 - DNA, 25 bp, Homo sapien
aagccccatgccctttcccaattca

SEQ ID NO: 984798 - DNA, 25 bp, Homo sapien
tagattagcaagctgttttaatata

SEQ ID NO: 984799 - DNA, 25 bp, Homo sapien
atgctgtccgaagtcaatttactgg

SEQ ID NO: 984800 - DNA, 25 bp, Homo sapien
accttgttcgtcttcagtaatcagc

SEQ ID NO: 984801 - DNA, 25 bp, Homo sapien
tctttcaagtcatctgtcttgcagt

SEQ ID NO: 984802 - DNA, 25 bp, Homo sapien
caatacttcttatattgaatgtagc

SEQ ID NO: 984803 - DNA, 25 bp, Homo sapien
aggctcacttcaaacacgcaaaccc

SEQ ID NO: 984804 - DNA, 25 bp, Homo sapien
ggctcacttcaaacacgcaaaccct

SEQ ID NO: 984805 - DNA, 25 bp, Homo sapien
gctcacttcaaacacgcaaaccctt

SEQ ID NO: 984806 - DNA, 25 bp, Homo sapien
atctgagtcatctccatgcacacca

SEQ ID NO: 984807 - DNA, 25 bp, Homo sapien
aagtttatctgagtcatctccatgc

SEQ ID NO: 984808 - DNA, 25 bp, Homo sapien
ttatctgagtcatctccatgcacac

SEQ ID NO: 984809 - DNA, 25 bp, Homo sapien
gtttatctgagtcatctccatgcac

SEQ ID NO: 984810 - DNA, 25 bp, Homo sapien
gatacttatttacttccccggcatg

SEQ ID NO: 984811 - DNA, 25 bp, Homo sapien
tccccggcatggtggattatccctg

SEQ ID NO: 984812 - DNA, 25 bp, Homo sapien
caatccagccctctattaccataag

SEQ ID NO: 984813 - DNA, 25 bp, Homo sapien
agtgagcctgcatcgcacgactaca

SEQ ID NO: 984814 - DNA, 25 bp, Homo sapien
ctttcccacgatgacaatataaaat

SEQ ID NO: 984815 - DNA, 25 bp, Homo sapien
gctcttaaaccaaagtctgtactgt

SEQ ID NO: 984816 - DNA, 25 bp, Homo sapien
tcttaaaccaaagtctgtactgtac

SEQ ID NO: 984817 - DNA, 25 bp, Homo sapien
taagaggctcttaaaccaaagtctg

SEQ ID NO: 984818 - DNA, 25 bp, Homo sapien
aaaccaaagtctgtactgtacatgt

SEQ ID NO: 984819 - DNA, 25 bp, Homo sapien
ttaaacatctgccaggtacacattt

SEQ ID NO: 984820 - DNA, 25 bp, Homo sapien
taaacatctgccaggtacacatttc

SEQ ID NO: 984821 - DNA, 25 bp, Homo sapien
tttagttggttttgatggtctctcc

SEQ ID NO: 984822 - DNA, 25 bp, Homo sapien
caatccacagttatagtattggtct

SEQ ID NO: 984823 - DNA, 25 bp, Homo sapien
tgagaaaggactcaagtcaatcttt

SEQ ID NO: 984824 - DNA, 25 bp, Homo sapien
cgtgttaagtgaatatgtttacctc

SEQ ID NO: 984825 - DNA, 25 bp, Homo sapien
cgtgtttctttgccagagactttgc

SEQ ID NO: 984826 - DNA, 25 bp, Homo sapien
tgctttccagtaaaacttggccttg

SEQ ID NO: 984827 - DNA, 25 bp, Homo sapien
tgccagtgagaggaatacgtgtttc

SEQ ID NO: 984828 - DNA, 25 bp, Homo sapien
ctttgccagagactttgctttccag

SEQ ID NO: 984829 - DNA, 25 bp, Homo sapien
cgtaactgaaatcggttgccaaaat

SEQ ID NO: 984830 - DNA, 25 bp, Homo sapien
aattagatactgtctgcagcaatca

SEQ ID NO: 984831 - DNA, 25 bp, Homo sapien
gcaatcataggctgtcatttctaat

SEQ ID NO: 984832 - DNA, 25 bp, Homo sapien
ttcccgtaactgaaatcggttgcca

SEQ ID NO: 984833 - DNA, 25 bp, Homo sapien
cattgtcagtgtggacacgagtcat

SEQ ID NO: 984834 - DNA, 25 bp, Homo sapien
atgatgggttgggatccattgtcag

SEQ ID NO: 984835 - DNA, 25 bp, Homo sapien
atgggttgggatccattgtcagtgt

SEQ ID NO: 984836 - DNA, 25 bp, Homo sapien
ccattgtcagtgtggacacgagtca

SEQ ID NO: 984837 - DNA, 25 bp, Homo sapien
ttgagtcagtgtcttgccctgttgc

SEQ ID NO: 984838 - DNA, 25 bp, Homo sapien
aagtagctggcaccacaagcgtgca

SEQ ID NO: 984839 - DNA, 25 bp, Homo sapien
caagtagctggcaccacaagcgtgc

SEQ ID NO: 984840 - DNA, 25 bp, Homo sapien
tttttttgagtcagtgtcttgccct

SEQ ID NO: 984841 - DNA, 25 bp, Homo sapien
tggctttagcacactcacgtttgtt

SEQ ID NO: 984842 - DNA, 25 bp, Homo sapien
tagcacactcacgtttgtttaaaga

SEQ ID NO: 984843 - DNA, 25 bp, Homo sapien
cgtttgtttaaagatgaagctgtac

SEQ ID NO: 984844 - DNA, 25 bp, Homo sapien
cactcacgtttgtttaaagatgaag

SEQ ID NO: 984845 - DNA, 25 bp, Homo sapien
tacctgtgtaaaagcataatttgaa

SEQ ID NO: 984846 - DNA, 25 bp, Homo sapien
attatacctgtgtaaaagcataatt

SEQ ID NO: 984847 - DNA, 25 bp, Homo sapien
taaaagcataatttgaaatctgact

SEQ ID NO: 984848 - DNA, 25 bp, Homo sapien
gtgtaaaagcataatttgaaatctg

SEQ ID NO: 984849 - DNA, 25 bp, Homo sapien
acaacaagccatatgagagccccac

SEQ ID NO: 984850 - DNA, 25 bp, Homo sapien
tgggcggtacactgcacctggaaat

SEQ ID NO: 984851 - DNA, 25 bp, Homo sapien
gaaaggagcctttttgcctgcgtgt

SEQ ID NO: 984852 - DNA, 25 bp, Homo sapien
tatttttatatcaactccggcagtc

SEQ ID NO: 984853 - DNA, 25 bp, Homo sapien
tcttactgatcgttgctgataaaaa

SEQ ID NO: 984854 - DNA, 25 bp, Homo sapien
gacagtcttactgatcgttgctgat

SEQ ID NO: 984855 - DNA, 25 bp, Homo sapien
tcagatctgacagtcttactgatcg

SEQ ID NO: 984856 - DNA, 25 bp, Homo sapien
gatctgacagtcttactgatcgttg

SEQ ID NO: 984857 - DNA, 25 bp, Homo sapien
ctatgttgtcaggagcttcacgccc

SEQ ID NO: 984858 - DNA, 25 bp, Homo sapien
tatgttgtcaggagcttcacgccct

SEQ ID NO: 984859 - DNA, 25 bp, Homo sapien
tgttgtcaggagcttcacgccctct

SEQ ID NO: 984860 - DNA, 25 bp, Homo sapien
tgtcaggagcttcacgccctctctt

SEQ ID NO: 984861 - DNA, 25 bp, Homo sapien
ttaatttcctacttgcagctggtgt

SEQ ID NO: 984862 - DNA, 25 bp, Homo sapien
gaatatgacaaccatctaaagacga

SEQ ID NO: 984863 - DNA, 25 bp, Homo sapien
gtactgctgtttgttaatggatgag

SEQ ID NO: 984864 - DNA, 25 bp, Homo sapien
aaagacgaattatctccttgcaaag

SEQ ID NO: 984865 - DNA, 25 bp, Homo sapien
ctttaaaagcaattccacatacatg

SEQ ID NO: 984866 - DNA, 25 bp, Homo sapien
aactttaaaagcaattccacataca

SEQ ID NO: 984867 - DNA, 25 bp, Homo sapien
tttaaaagcaattccacatacatgc

SEQ ID NO: 984868 - DNA, 25 bp, Homo sapien
taaaagcaattccacatacatgcat

SEQ ID NO: 984869 - DNA, 25 bp, Homo sapien
aacttgtcagcaaaattgattatta

SEQ ID NO: 984870 - DNA, 25 bp, Homo sapien
ctctgaggtgcacgcgtaactgagg

SEQ ID NO: 984871 - DNA, 25 bp, Homo sapien
actgaggctgaaacaatttgtaggg

SEQ ID NO: 984872 - DNA, 25 bp, Homo sapien
tgtgaaccaccaaagacaggtgagc

SEQ ID NO: 984873 - DNA, 25 bp, Homo sapien
accccagtgtgtctgccaagtcttc

SEQ ID NO: 984874 - DNA, 25 bp, Homo sapien
tgtgaactcttacttctccaggcca

SEQ ID NO: 984875 - DNA, 25 bp, Homo sapien
ctgccaagtcttcatcgagtaccat

SEQ ID NO: 984876 - DNA, 25 bp, Homo sapien
agtgtgtctgccaagtcttcatcga

SEQ ID NO: 984877 - DNA, 25 bp, Homo sapien
tcatatagcatcacagaggctctgc

SEQ ID NO: 984878 - DNA, 25 bp, Homo sapien
ggtatgcagaggtgttcgcagtcat

SEQ ID NO: 984879 - DNA, 25 bp, Homo sapien
gcactgagcacaaccattagaatta

SEQ ID NO: 984880 - DNA, 25 bp, Homo sapien
gacaaggtaaaccaactgaatagct

SEQ ID NO: 984881 - DNA, 25 bp, Homo sapien
tcaggaaatgcagccggggatttca

SEQ ID NO: 984882 - DNA, 25 bp, Homo sapien
caggaaatgcagccggggatttcac

SEQ ID NO: 984883 - DNA, 25 bp, Homo sapien
gtaagaagagaatcctgccttccct

SEQ ID NO: 984884 - DNA, 25 bp, Homo sapien
cttcctgctgcgaggaagcagctgt

SEQ ID NO: 984885 - DNA, 25 bp, Homo sapien
cagctgcctgagcatctttctgcca

SEQ ID NO: 984886 - DNA, 25 bp, Homo sapien
ctgccactgtaagaagagaatcctg

SEQ ID NO: 984887 - DNA, 25 bp, Homo sapien
ggtaaaggtaatcacacttgagtgt

SEQ ID NO: 984888 - DNA, 25 bp, Homo sapien
tgagtgtgattacactcaagtaatc

SEQ ID NO: 984889 - DNA, 25 bp, Homo sapien
tgattacactcaagtaatcttcttc

SEQ ID NO: 984890 - DNA, 25 bp, Homo sapien
ttaccaccaggtaaaggtaatcaca

SEQ ID NO: 984891 - DNA, 25 bp, Homo sapien
ccagatgttatccacatggcagtca

SEQ ID NO: 984892 - DNA, 25 bp, Homo sapien
agttgtccagatgttatccacatgg

SEQ ID NO: 984893 - DNA, 25 bp, Homo sapien
tccagatgttatccacatggcagtc

SEQ ID NO: 984894 - DNA, 25 bp, Homo sapien
tgtccagatgttatccacatggcag

SEQ ID NO: 984895 - DNA, 25 bp, Homo sapien
ctaaggagtcgcagtatcgattgta

SEQ ID NO: 984896 - DNA, 25 bp, Homo sapien
tgagaggcatctgcatcaggcggat

SEQ ID NO: 984897 - DNA, 25 bp, Homo sapien
ggcagatgggaactgtctgaactca

SEQ ID NO: 984898 - DNA, 25 bp, Homo sapien
tataaggattagcatatctggcaga

SEQ ID NO: 984899 - DNA, 25 bp, Homo sapien
tatgttccttcgctatcctccacgg

SEQ ID NO: 984900 - DNA, 25 bp, Homo sapien
cttatgttccttcgctatcctccac

SEQ ID NO: 984901 - DNA, 25 bp, Homo sapien
gttccttcgctatcctccacggccc

SEQ ID NO: 984902 - DNA, 25 bp, Homo sapien
tccttcgctatcctccacggcccca

SEQ ID NO: 984903 - DNA, 25 bp, Homo sapien
catcttcccagagagtgcttgaggc

SEQ ID NO: 984904 - DNA, 25 bp, Homo sapien
cctcatcttcccagagagtgcttga

SEQ ID NO: 984905 - DNA, 25 bp, Homo sapien
gccctcatcttcccagagagtgctt

SEQ ID NO: 984906 - DNA, 25 bp, Homo sapien
tcatcttcccagagagtgcttgagg

SEQ ID NO: 984907 - DNA, 25 bp, Homo sapien
tctgtgtatggtctgagttgacatc

SEQ ID NO: 984908 - DNA, 25 bp, Homo sapien
ctgtgtatggtctgagttgacatct

SEQ ID NO: 984909 - DNA, 25 bp, Homo sapien
ttctgtgtatggtctgagttgacat

SEQ ID NO: 984910 - DNA, 25 bp, Homo sapien
gtgtatggtctgagttgacatcttg

SEQ ID NO: 984911 - DNA, 25 bp, Homo sapien
aacacatagacttgttgactctttc

SEQ ID NO: 984912 - DNA, 25 bp, Homo sapien
catagacttgttgactctttcttcc

SEQ ID NO: 984913 - DNA, 25 bp, Homo sapien
cacatagacttgttgactctttctt

SEQ ID NO: 984914 - DNA, 25 bp, Homo sapien
acacatagacttgttgactctttct

SEQ ID NO: 984915 - DNA, 25 bp, Homo sapien
tttctccaccaatatccaggtcatg

SEQ ID NO: 984916 - DNA, 25 bp, Homo sapien
ggccacatcccgctcactgacatcc

SEQ ID NO: 984917 - DNA, 25 bp, Homo sapien
gagccacagggaagtaatcaataag

SEQ ID NO: 984918 - DNA, 25 bp, Homo sapien
ggaagtaatcaataaggccacatcc

SEQ ID NO: 984919 - DNA, 25 bp, Homo sapien
ccccgatccaatgctgttaatatgt

SEQ ID NO: 984920 - DNA, 25 bp, Homo sapien
gctttaatgtagcacacgttagcac

SEQ ID NO: 984921 - DNA, 25 bp, Homo sapien
acacttggagcagtcatctgcacct

SEQ ID NO: 984922 - DNA, 25 bp, Homo sapien
tgtgaaagagcagacaatgcaaggc

SEQ ID NO: 984923 - DNA, 25 bp, Homo sapien
ggagttacatcagaataaccctttg

SEQ ID NO: 984924 - DNA, 25 bp, Homo sapien
ctagttaccgtcttcttaggccaag

SEQ ID NO: 984925 - DNA, 25 bp, Homo sapien
gccctgctctagagaatggcgtgaa

SEQ ID NO: 984926 - DNA, 25 bp, Homo sapien
tttactcagcattcactagttaccg

SEQ ID NO: 984927 - DNA, 25 bp, Homo sapien
gactgggccacatcttgaaaactcg

SEQ ID NO: 984928 - DNA, 25 bp, Homo sapien
gctgcccatggttcataggtcatag

SEQ ID NO: 984929 - DNA, 25 bp, Homo sapien
cagtgatgcctcacaccctgaaggt

SEQ ID NO: 984930 - DNA, 25 bp, Homo sapien
cctgtttgtacaactttggtcttga

SEQ ID NO: 984931 - DNA, 25 bp, Homo sapien
ccaagggcctgactgggaagaagtt

SEQ ID NO: 984932 - DNA, 25 bp, Homo sapien
ctgtctggctccaagggcctgactg

SEQ ID NO: 984933 - DNA, 25 bp, Homo sapien
tgtctggctccaagggcctgactgg

SEQ ID NO: 984934 - DNA, 25 bp, Homo sapien
gctccaagggcctgactgggaagaa

SEQ ID NO: 984935 - DNA, 25 bp, Homo sapien
taggagacaactgtggaaaaacata

SEQ ID NO: 984936 - DNA, 25 bp, Homo sapien
ctgtaggagacaactgtggaaaaac

SEQ ID NO: 984937 - DNA, 25 bp, Homo sapien
gacaactgtggaaaaacatactgcc

SEQ ID NO: 984938 - DNA, 25 bp, Homo sapien
ggagacaactgtggaaaaacatact

SEQ ID NO: 984939 - DNA, 25 bp, Homo sapien
tcatggccgtgacccccagcattga

SEQ ID NO: 984940 - DNA, 25 bp, Homo sapien
gtgacccccagcattgattctgtac

SEQ ID NO: 984941 - DNA, 25 bp, Homo sapien
ttcatggccgtgacccccagcattg

SEQ ID NO: 984942 - DNA, 25 bp, Homo sapien
ggccgtgacccccagcattgattct

SEQ ID NO: 984943 - DNA, 25 bp, Homo sapien
gagagtgctcagactaattttcttg

SEQ ID NO: 984944 - DNA, 25 bp, Homo sapien
gagaacccggagtggtgacagtgat

SEQ ID NO: 984945 - DNA, 25 bp, Homo sapien
ccactccaggcggagaacccggagt

SEQ ID NO: 984946 - DNA, 25 bp, Homo sapien
gcagagccagggtgagactgagagt

SEQ ID NO: 984947 - DNA, 25 bp, Homo sapien
atttaattatcaccagctcaagttt

SEQ ID NO: 984948 - DNA, 25 bp, Homo sapien
actttgcaatagatactctagcagg

SEQ ID NO: 984949 - DNA, 25 bp, Homo sapien
tatcaccagctcaagttttctttca

SEQ ID NO: 984950 - DNA, 25 bp, Homo sapien
ttcctgctgactttgcaatagatac

SEQ ID NO: 984951 - DNA, 25 bp, Homo sapien
tgatactggtagtctgactcatcca

SEQ ID NO: 984952 - DNA, 25 bp, Homo sapien
cccaagtgatactggtagtctgact

SEQ ID NO: 984953 - DNA, 25 bp, Homo sapien
caagtgatactggtagtctgactca

SEQ ID NO: 984954 - DNA, 25 bp, Homo sapien
agccccaagtgatactggtagtctg

SEQ ID NO: 984955 - DNA, 25 bp, Homo sapien
tggggccaccattgcccactctcct

SEQ ID NO: 984956 - DNA, 25 bp, Homo sapien
ccagcaggaaccatttctggaccac

SEQ ID NO: 984957 - DNA, 25 bp, Homo sapien
tggaccacatttggggccaccattg

SEQ ID NO: 984958 - DNA, 25 bp, Homo sapien
tgtcctctcctgtaacctccagcag

SEQ ID NO: 984959 - DNA, 25 bp, Homo sapien
gctggcagtcagcagatacatggga

SEQ ID NO: 984960 - DNA, 25 bp, Homo sapien
cagtcagcagatacatgggatcttt

SEQ ID NO: 984961 - DNA, 25 bp, Homo sapien
catgggatctttgaaccctctagaa

SEQ ID NO: 984962 - DNA, 25 bp, Homo sapien
gggatctttgaaccctctagaatta

SEQ ID NO: 984963 - DNA, 25 bp, Homo sapien
ttaaagcctgctgtgatgttaatga

SEQ ID NO: 984964 - DNA, 25 bp, Homo sapien
caggctggatgtcgggcagctgaag

SEQ ID NO: 984965 - DNA, 25 bp, Homo sapien
tgttaatgaagaaccgccagtgggt

SEQ ID NO: 984966 - DNA, 25 bp, Homo sapien
gtgatgttaatgaagaaccgccagt

SEQ ID NO: 984967 - DNA, 25 bp, Homo sapien
cccacagttacgctccaagcctttc

SEQ ID NO: 984968 - DNA, 25 bp, Homo sapien
caagcctttctcttcagcccgatca

SEQ ID NO: 984969 - DNA, 25 bp, Homo sapien
ttcagcccgatcagtcctcactaac

SEQ ID NO: 984970 - DNA, 25 bp, Homo sapien
cacagttacgctccaagcctttctc

SEQ ID NO: 984971 - DNA, 25 bp, Homo sapien
ctatctgtactcagtgtggggccgc

SEQ ID NO: 984972 - DNA, 25 bp, Homo sapien
gggccgcatcgtcttgaggttatca

SEQ ID NO: 984973 - DNA, 25 bp, Homo sapien
tctgtactcagtgtggggccgcatc

SEQ ID NO: 984974 - DNA, 25 bp, Homo sapien
gaggttatcaggaattgaatttgca

SEQ ID NO: 984975 - DNA, 25 bp, Homo sapien
ccttgaaaagccaagtaagatagtc

SEQ ID NO: 984976 - DNA, 25 bp, Homo sapien
ttgaaaagccaagtaagatagtcat

SEQ ID NO: 984977 - DNA, 25 bp, Homo sapien
cttgaaaagccaagtaagatagtca

SEQ ID NO: 984978 - DNA, 25 bp, Homo sapien
ttctctggcgtaggtattttcaggc

SEQ ID NO: 984979 - DNA, 25 bp, Homo sapien
ctctttctctggcgtaggtattttc

SEQ ID NO: 984980 - DNA, 25 bp, Homo sapien
tctttctctggcgtaggtattttca

SEQ ID NO: 984981 - DNA, 25 bp, Homo sapien
tgctgacttagttaaggcttcttgc

SEQ ID NO: 984982 - DNA, 25 bp, Homo sapien
gctgacttagttaaggcttcttgct

SEQ ID NO: 984983 - DNA, 25 bp, Homo sapien
tgacttagttaaggcttcttgctct

SEQ ID NO: 984984 - DNA, 25 bp, Homo sapien
ctatgctgacttagttaaggcttct

SEQ ID NO: 984985 - DNA, 25 bp, Homo sapien
gcatttatatgcaactgggctgcct

SEQ ID NO: 984986 - DNA, 25 bp, Homo sapien
gcagatagatgctttgaatttgcct

SEQ ID NO: 984987 - DNA, 25 bp, Homo sapien
tgggtcatcacaaaggcagatagat

SEQ ID NO: 984988 - DNA, 25 bp, Homo sapien
taaatatgagttccaaatgggtcat

SEQ ID NO: 984989 - DNA, 25 bp, Homo sapien
gccattttcgtgtgatcaatttcag

SEQ ID NO: 984990 - DNA, 25 bp, Homo sapien
gggctttgcaggatgagctcccctg

SEQ ID NO: 984991 - DNA, 25 bp, Homo sapien
cacagtggtagaagtgcctgtaaac

SEQ ID NO: 984992 - DNA, 25 bp, Homo sapien
taaacaaggttcagctgcttgccag

SEQ ID NO: 984993 - DNA, 25 bp, Homo sapien
cagtgagaattctgcttctgctatg

SEQ ID NO: 984994 - DNA, 25 bp, Homo sapien
ggaagaatgttctacctgccttaat

SEQ ID NO: 984995 - DNA, 25 bp, Homo sapien
tgatcctaacatggaaaacctgctc

SEQ ID NO: 984996 - DNA, 25 bp, Homo sapien
gctgatgtcgaattccttgccttac

SEQ ID NO: 984997 - DNA, 25 bp, Homo sapien
gggccgcaggtagactagcacttga

SEQ ID NO: 984998 - DNA, 25 bp, Homo sapien
tggtacaattcaagataaaccccag

SEQ ID NO: 984999 - DNA, 25 bp, Homo sapien
aagataaaccccagatgtctgatga

SEQ ID NO: 985000 - DNA, 25 bp, Homo sapien
gatggtacaattcaagataaacccc

SEQ ID NO: 985001 - DNA, 25 bp, Homo sapien
gataaaccccagatgtctgatgagt

SEQ ID NO: 985002 - DNA, 25 bp, Homo sapien
tatgaagagctcagacgggatgaat

SEQ ID NO: 985003 - DNA, 25 bp, Homo sapien
ggctggaagccgatgtttgatattt

SEQ ID NO: 985004 - DNA, 25 bp, Homo sapien
cactaatgtcttgtagctgttctac

SEQ ID NO: 985005 - DNA, 25 bp, Homo sapien
caaaatctgaatacccactaatgtc

SEQ ID NO: 985006 - DNA, 25 bp, Homo sapien
caagctaactgtaccaactatggag

SEQ ID NO: 985007 - DNA, 25 bp, Homo sapien
ctttcttgccaacccgctgatgagg

SEQ ID NO: 985008 - DNA, 25 bp, Homo sapien
caaaagtgaggtagcaggctgcaca

SEQ ID NO: 985009 - DNA, 25 bp, Homo sapien
caatttaagtaggtaaggctcaggg

SEQ ID NO: 985010 - DNA, 25 bp, Homo sapien
ccaggggctggcgatacagaaatga

SEQ ID NO: 985011 - DNA, 25 bp, Homo sapien
ctatgccaggggctggcgatacaga

SEQ ID NO: 985012 - DNA, 25 bp, Homo sapien
gacactatgccaggggctggcgata

SEQ ID NO: 985013 - DNA, 25 bp, Homo sapien
agacactatgccaggggctggcgat

SEQ ID NO: 985014 - DNA, 25 bp, Homo sapien
tacactgtcaagttgttcagcaggc

SEQ ID NO: 985015 - DNA, 25 bp, Homo sapien
tctgtccgtttaggtcaatgccaac

SEQ ID NO: 985016 - DNA, 25 bp, Homo sapien
gcttggtacacactgaacacatttg

SEQ ID NO: 985017 - DNA, 25 bp, Homo sapien
aagaggtttactctgggtggcacag

SEQ ID NO: 985018 - DNA, 25 bp, Homo sapien
tctgagcaacgtgagaagtcccctc

SEQ ID NO: 985019 - DNA, 25 bp, Homo sapien
cactgcgggtagctcggcattaaca

SEQ ID NO: 985020 - DNA, 25 bp, Homo sapien
taatgggcccaagtactgtctgtga

SEQ ID NO: 985021 - DNA, 25 bp, Homo sapien
tagcaatgaagtcgcctctagggac

SEQ ID NO: 985022 - DNA, 25 bp, Homo sapien
ctcactttttgtggtccctaggttg

SEQ ID NO: 985023 - DNA, 25 bp, Homo sapien
ctctgtgtacattaaggtcccaatg

SEQ ID NO: 985024 - DNA, 25 bp, Homo sapien
aatgaagacaaacaaggtgcccagc

SEQ ID NO: 985025 - DNA, 25 bp, Homo sapien
tggtccctaggttgttccacacctc

SEQ ID NO: 985026 - DNA, 25 bp, Homo sapien
aatttgcgtagggtcacgacgagcg

SEQ ID NO: 985027 - DNA, 25 bp, Homo sapien
tgtggtgaggataaacacaccccgg

SEQ ID NO: 985028 - DNA, 25 bp, Homo sapien
tgagggaggcgcattctgtggtgag

SEQ ID NO: 985029 - DNA, 25 bp, Homo sapien
cgacgagcgtgacggtgagggaggc

SEQ ID NO: 985030 - DNA, 25 bp, Homo sapien
ttgggggatcagtgagagaaccttc

SEQ ID NO: 985031 - DNA, 25 bp, Homo sapien
tgggggatcagtgagagaaccttct

SEQ ID NO: 985032 - DNA, 25 bp, Homo sapien
cactggaaatatcttaggacaccaa

SEQ ID NO: 985033 - DNA, 25 bp, Homo sapien
gcagcagcttgtgatcactggaaat

SEQ ID NO: 985034 - DNA, 25 bp, Homo sapien
cctaagtagctggtaatttgaaatt

SEQ ID NO: 985035 - DNA, 25 bp, Homo sapien
atcacagatgatttatgctatacag

SEQ ID NO: 985036 - DNA, 25 bp, Homo sapien
ataaatccagcgaaaatcatattca

SEQ ID NO: 985037 - DNA, 25 bp, Homo sapien
cagaataaatccagcgaaaatcata

SEQ ID NO: 985038 - DNA, 25 bp, Homo sapien
aaatccagcgaaaatcatattcaag

SEQ ID NO: 985039 - DNA, 25 bp, Homo sapien
cgcagaataaatccagcgaaaatca

SEQ ID NO: 985040 - DNA, 25 bp, Homo sapien
gggtgacggcacagtccaaaggata

SEQ ID NO: 985041 - DNA, 25 bp, Homo sapien
tcctgtgccaaaagaacctgatgat

SEQ ID NO: 985042 - DNA, 25 bp, Homo sapien
taagggtgacggcacagtccaaagg

SEQ ID NO: 985043 - DNA, 25 bp, Homo sapien
acctgatgatgacataagggtgacg

SEQ ID NO: 985044 - DNA, 25 bp, Homo sapien
cagggtcactccgatgacgggaatt

SEQ ID NO: 985045 - DNA, 25 bp, Homo sapien
tgagtgatgatgttcatgaggaggt

SEQ ID NO: 985046 - DNA, 25 bp, Homo sapien
aggaggtagaaccacatgatgggca

SEQ ID NO: 985047 - DNA, 25 bp, Homo sapien
tccgatgacgggaatttcatataac

SEQ ID NO: 985048 - DNA, 25 bp, Homo sapien
gccatattgctttttcacagctgaa

SEQ ID NO: 985049 - DNA, 25 bp, Homo sapien
tacaagaggatatagccatattgct

SEQ ID NO: 985050 - DNA, 25 bp, Homo sapien
caagaggatatagccatattgcttt

SEQ ID NO: 985051 - DNA, 25 bp, Homo sapien
acaagaggatatagccatattgctt

SEQ ID NO: 985052 - DNA, 25 bp, Homo sapien
gagacattttcgaaaggaacacatg

SEQ ID NO: 985053 - DNA, 25 bp, Homo sapien
aaaaggccgaggtcaagtcaagagt

SEQ ID NO: 985054 - DNA, 25 bp, Homo sapien
gaaactgtcaggtaattctactgtc

SEQ ID NO: 985055 - DNA, 25 bp, Homo sapien
attctactgtctaaccccaaactca

SEQ ID NO: 985056 - DNA, 25 bp, Homo sapien
tgaatagaactgcatggtcataaat

SEQ ID NO: 985057 - DNA, 25 bp, Homo sapien
tattgaatagaactgcatggtcata

SEQ ID NO: 985058 - DNA, 25 bp, Homo sapien
tagaactgcatggtcataaatatca

SEQ ID NO: 985059 - DNA, 25 bp, Homo sapien
cagacttattgaatagaactgcatg

SEQ ID NO: 985060 - DNA, 25 bp, Homo sapien
caaatcgtttgtagagagtctcttg

SEQ ID NO: 985061 - DNA, 25 bp, Homo sapien
tccccatccttgctgacatcagaag

SEQ ID NO: 985062 - DNA, 25 bp, Homo sapien
ggaatatccccatccttgctgacat

SEQ ID NO: 985063 - DNA, 25 bp, Homo sapien
tagagagtctcttggaatatcccca

SEQ ID NO: 985064 - DNA, 25 bp, Homo sapien
tactgtaccctcagcagcaatgaga

SEQ ID NO: 985065 - DNA, 25 bp, Homo sapien
tcatcttgccagtatgataggccaa

SEQ ID NO: 985066 - DNA, 25 bp, Homo sapien
ggaacactgccatatggaacagcta

SEQ ID NO: 985067 - DNA, 25 bp, Homo sapien
gaaagcccttggaacgagtctcagc

SEQ ID NO: 985068 - DNA, 25 bp, Homo sapien
cagaggcaattagctttattataat

SEQ ID NO: 985069 - DNA, 25 bp, Homo sapien
gaggcaattagctttattataatta

SEQ ID NO: 985070 - DNA, 25 bp, Homo sapien
tgcagaggcaattagctttattata

SEQ ID NO: 985071 - DNA, 25 bp, Homo sapien
gctttattataattattgtacttgc

SEQ ID NO: 985072 - DNA, 25 bp, Homo sapien
gtaaccaccacacaaatgcctggaa

SEQ ID NO: 985073 - DNA, 25 bp, Homo sapien
ctagtaaccaccacacaaatgcctg

SEQ ID NO: 985074 - DNA, 25 bp, Homo sapien
ctggaatccatcattctcactcaag

SEQ ID NO: 985075 - DNA, 25 bp, Homo sapien
caaatgcctggaatccatcattctc

SEQ ID NO: 985076 - DNA, 25 bp, Homo sapien
acaccagggcaatggaggtatattt

SEQ ID NO: 985077 - DNA, 25 bp, Homo sapien
tcagctgcttcaggacattgcatga

SEQ ID NO: 985078 - DNA, 25 bp, Homo sapien
gcttcaggacattgcatgattgggc

SEQ ID NO: 985079 - DNA, 25 bp, Homo sapien
caggacattgcatgattgggcctca

SEQ ID NO: 985080 - DNA, 25 bp, Homo sapien
tgatcagctgcttcaggacattgca

SEQ ID NO: 985081 - DNA, 25 bp, Homo sapien
cttcaaaatgataattcctagaatc

SEQ ID NO: 985082 - DNA, 25 bp, Homo sapien
ttcaaaatgataattcctagaatca

SEQ ID NO: 985083 - DNA, 25 bp, Homo sapien
tcaaaatgataattcctagaatcat

SEQ ID NO: 985084 - DNA, 25 bp, Homo sapien
tcttcaaaatgataattcctagaat

SEQ ID NO: 985085 - DNA, 25 bp, Homo sapien
gcatagttgttcaccacgctcacgg

SEQ ID NO: 985086 - DNA, 25 bp, Homo sapien
cgctcacggtgaagaacatggtcac

SEQ ID NO: 985087 - DNA, 25 bp, Homo sapien
gagattcagggcatagttgttcacc

SEQ ID NO: 985088 - DNA, 25 bp, Homo sapien
catggcaatgttgagattcagggca

SEQ ID NO: 985089 - DNA, 25 bp, Homo sapien
aaatacctcctctatacacttgttt

SEQ ID NO: 985090 - DNA, 25 bp, Homo sapien
atacctcctctatacacttgtttgt

SEQ ID NO: 985091 - DNA, 25 bp, Homo sapien
acctcctctatacacttgtttgtac

SEQ ID NO: 985092 - DNA, 25 bp, Homo sapien
aatacctcctctatacacttgtttg

SEQ ID NO: 985093 - DNA, 25 bp, Homo sapien
tatactatcagcgactttacaaagt

SEQ ID NO: 985094 - DNA, 25 bp, Homo sapien
taactattccacattgcttgcctag

SEQ ID NO: 985095 - DNA, 25 bp, Homo sapien
ttgaagaggtgccatttacagagtt

SEQ ID NO: 985096 - DNA, 25 bp, Homo sapien
acagagtttgtcaaggtcttttagg

SEQ ID NO: 985097 - DNA, 25 bp, Homo sapien
aattgtgcaaatgtcacaatgttcc

SEQ ID NO: 985098 - DNA, 25 bp, Homo sapien
cttattgggatagctggtggcttcc

SEQ ID NO: 985099 - DNA, 25 bp, Homo sapien
aaattgtgcaaatgtcacaatgttc

SEQ ID NO: 985100 - DNA, 25 bp, Homo sapien
ttattgggatagctggtggcttcct

SEQ ID NO: 985101 - DNA, 25 bp, Homo sapien
gcaatgccaagatatacaagtcctt

SEQ ID NO: 985102 - DNA, 25 bp, Homo sapien
tgactccattctccattggtattag

SEQ ID NO: 985103 - DNA, 25 bp, Homo sapien
tatacaagtccttaaatatacccat

SEQ ID NO: 985104 - DNA, 25 bp, Homo sapien
ccattggtattagtattatacagca

SEQ ID NO: 985105 - DNA, 25 bp, Homo sapien
aataagacaatgcaggcatgagcca

SEQ ID NO: 985106 - DNA, 25 bp, Homo sapien
aaaataagacaatgcaggcatgagc

SEQ ID NO: 985107 - DNA, 25 bp, Homo sapien
ggcacaaaaataagacaatgcaggc

SEQ ID NO: 985108 - DNA, 25 bp, Homo sapien
caaaaataagacaatgcaggcatga

SEQ ID NO: 985109 - DNA, 25 bp, Homo sapien
ggcccaccgccaaggccgggcgcat

SEQ ID NO: 985110 - DNA, 25 bp, Homo sapien
ctgcagcagcctgcgaacaccaggc

SEQ ID NO: 985111 - DNA, 25 bp, Homo sapien
gagctctaggaagatcacgttactg

SEQ ID NO: 985112 - DNA, 25 bp, Homo sapien
ccaggagctctaggaagatcacgtt

SEQ ID NO: 985113 - DNA, 25 bp, Homo sapien
ggaagcaagcgcacagagtaagcgc

SEQ ID NO: 985114 - DNA, 25 bp, Homo sapien
cgcacagagtaagcgcccgcctgta

SEQ ID NO: 985115 - DNA, 25 bp, Homo sapien
cagggttggggaagcaagcgcacag

SEQ ID NO: 985116 - DNA, 25 bp, Homo sapien
agcaagcgcacagagtaagcgcccg

SEQ ID NO: 985117 - DNA, 25 bp, Homo sapien
tttacctcaggatgcgacgttcccg

SEQ ID NO: 985118 - DNA, 25 bp, Homo sapien
caagaagctgtagttcgcagtcagc

SEQ ID NO: 985119 - DNA, 25 bp, Homo sapien
gtcagcttcggtcccattcatccga

SEQ ID NO: 985120 - DNA, 25 bp, Homo sapien
ccggccagactacatgtcccaggat

SEQ ID NO: 985121 - DNA, 25 bp, Homo sapien
ccgctctaactctctgcagcttgag

SEQ ID NO: 985122 - DNA, 25 bp, Homo sapien
agaaacccaactgcgccattaagat

SEQ ID NO: 985123 - DNA, 25 bp, Homo sapien
gatccaagtttgtagctttagcgca

SEQ ID NO: 985124 - DNA, 25 bp, Homo sapien
tcttgtgttctgaatggagtcgtca

SEQ ID NO: 985125 - DNA, 25 bp, Homo sapien
ctagatttaaaagttactgctgttt

SEQ ID NO: 985126 - DNA, 25 bp, Homo sapien
agatttaaaagttactgctgttttg

SEQ ID NO: 985127 - DNA, 25 bp, Homo sapien
cattccatgggagacttagtgacaa

SEQ ID NO: 985128 - DNA, 25 bp, Homo sapien
ttattggcattccatgggagactta

SEQ ID NO: 985129 - DNA, 25 bp, Homo sapien
gggtcgtatgcatcatgaatatgaa

SEQ ID NO: 985130 - DNA, 25 bp, Homo sapien
gctgatggaagggtcgtatgcatca

SEQ ID NO: 985131 - DNA, 25 bp, Homo sapien
cacacagccaaggtttatgcaggag

SEQ ID NO: 985132 - DNA, 25 bp, Homo sapien
ggaggccctgtttgatgtacccaag

SEQ ID NO: 985133 - DNA, 25 bp, Homo sapien
aagtgtatccgatgaacacacagcc

SEQ ID NO: 985134 - DNA, 25 bp, Homo sapien
cacgctctgtccactttaaagtgta

SEQ ID NO: 985135 - DNA, 25 bp, Homo sapien
tctcacaagggccagacaaaccgat

SEQ ID NO: 985136 - DNA, 25 bp, Homo sapien
tgcgagccttttgtagactccacgg

SEQ ID NO: 985137 - DNA, 25 bp, Homo sapien
gacaaaccgatagtcatgcgagcct

SEQ ID NO: 985138 - DNA, 25 bp, Homo sapien
tagactccacgggaggtcttgggca

SEQ ID NO: 985139 - DNA, 25 bp, Homo sapien
tagatttaatatataccccgaggta

SEQ ID NO: 985140 - DNA, 25 bp, Homo sapien
ggtgcggtccatcacgacacagctt

SEQ ID NO: 985141 - DNA, 25 bp, Homo sapien
gcagtaaaaggacatcaggttctta

SEQ ID NO: 985142 - DNA, 25 bp, Homo sapien
tcaccccatcaataaagtcaggaca

SEQ ID NO: 985143 - DNA, 25 bp, Homo sapien
cttccaaaatggctgtgaggcaatc

SEQ ID NO: 985144 - DNA, 25 bp, Homo sapien
tgcttccaaaatggctgtgaggcaa

SEQ ID NO: 985145 - DNA, 25 bp, Homo sapien
ctgcttccaaaatggctgtgaggca

SEQ ID NO: 985146 - DNA, 25 bp, Homo sapien
tccaaaatggctgtgaggcaatctg

SEQ ID NO: 985147 - DNA, 25 bp, Homo sapien
gaaggcacttccctggtctaaggtc

SEQ ID NO: 985148 - DNA, 25 bp, Homo sapien
tcttcatgttggattgtggctgtgg

SEQ ID NO: 985149 - DNA, 25 bp, Homo sapien
ccatcttcatgttggattgtggctg

SEQ ID NO: 985150 - DNA, 25 bp, Homo sapien
tggtctaaggtctcttgaaccatct

SEQ ID NO: 985151 - DNA, 25 bp, Homo sapien
aaggacggtagcaccagatgttcca

SEQ ID NO: 985152 - DNA, 25 bp, Homo sapien
cactgtctgatttcgaaggacggta

SEQ ID NO: 985153 - DNA, 25 bp, Homo sapien
tctgatttcgaaggacggtagcacc

SEQ ID NO: 985154 - DNA, 25 bp, Homo sapien
tttcgaaggacggtagcaccagatg

SEQ ID NO: 985155 - DNA, 25 bp, Homo sapien
tgtgctagataaacatctgaagaca

SEQ ID NO: 985156 - DNA, 25 bp, Homo sapien
tccagaacgttctcggatctgatag

SEQ ID NO: 985157 - DNA, 25 bp, Homo sapien
tagctcaaccttaggaaagatgaca

SEQ ID NO: 985158 - DNA, 25 bp, Homo sapien
tacagaactgattcatatgtgctag

SEQ ID NO: 985159 - DNA, 25 bp, Homo sapien
agtagcctctgttgtgcccaaacag

SEQ ID NO: 985160 - DNA, 25 bp, Homo sapien
aacaaactctccaactgaaggcagc

SEQ ID NO: 985161 - DNA, 25 bp, Homo sapien
agtactacggcactggtgctcagcc

SEQ ID NO: 985162 - DNA, 25 bp, Homo sapien
caccttggacctggtactgagaaag

SEQ ID NO: 985163 - DNA, 25 bp, Homo sapien
tgaagcatggctgttctctggtgcc

SEQ ID NO: 985164 - DNA, 25 bp, Homo sapien
tgtagtcaattcctttgaagcatgg

SEQ ID NO: 985165 - DNA, 25 bp, Homo sapien
ctctggtgccaaggtttctaagaca

SEQ ID NO: 985166 - DNA, 25 bp, Homo sapien
ccaaggtttctaagacatagtcaaa

SEQ ID NO: 985167 - DNA, 25 bp, Homo sapien
tgtatcactgtctcgttaaaatgaa

SEQ ID NO: 985168 - DNA, 25 bp, Homo sapien
tcaaaatcactatactgtatcactg

SEQ ID NO: 985169 - DNA, 25 bp, Homo sapien
taatcccattttaatgaaatcaggg

SEQ ID NO: 985170 - DNA, 25 bp, Homo sapien
ttggtctttgagtttgtacttatgg

SEQ ID NO: 985171 - DNA, 25 bp, Homo sapien
tatgtgctgtataaccaagggaccg

SEQ ID NO: 985172 - DNA, 25 bp, Homo sapien
tgggtcagccactcgtgagctctgt

SEQ ID NO: 985173 - DNA, 25 bp, Homo sapien
tctgagaaggcctcgaaagagcctc

SEQ ID NO: 985174 - DNA, 25 bp, Homo sapien
taaagaagagttcgtatctccacgg

SEQ ID NO: 985175 - DNA, 25 bp, Homo sapien
gcaggcctggttagccattcattgg

SEQ ID NO: 985176 - DNA, 25 bp, Homo sapien
ctggttagccattcattgggtccca

SEQ ID NO: 985177 - DNA, 25 bp, Homo sapien
cattcattgggtcccaggggttgcc

SEQ ID NO: 985178 - DNA, 25 bp, Homo sapien
gttagccattcattgggtcccaggg

SEQ ID NO: 985179 - DNA, 25 bp, Homo sapien
cagggaccaggattctcgggtagct

SEQ ID NO: 985180 - DNA, 25 bp, Homo sapien
ttctcgggtagctctgaaaggtcta

SEQ ID NO: 985181 - DNA, 25 bp, Homo sapien
cgggtagctctgaaaggtctacttt

SEQ ID NO: 985182 - DNA, 25 bp, Homo sapien
caggattctcgggtagctctgaaag

SEQ ID NO: 985183 - DNA, 25 bp, Homo sapien
tgtgttcactttggatgctgatggc

SEQ ID NO: 985184 - DNA, 25 bp, Homo sapien
tgatctctgtggcaccatagtaaag

SEQ ID NO: 985185 - DNA, 25 bp, Homo sapien
cagaggcttttcagtcctagatgtc

SEQ ID NO: 985186 - DNA, 25 bp, Homo sapien
tattgagtccagttgttcacagagg

SEQ ID NO: 985187 - DNA, 25 bp, Homo sapien
tctcagcatagggtcaagtaaaggc

SEQ ID NO: 985188 - DNA, 25 bp, Homo sapien
gaaaccagccatagaagaagactcc

SEQ ID NO: 985189 - DNA, 25 bp, Homo sapien
gatcatctaagtaggccgaccgtgg

SEQ ID NO: 985190 - DNA, 25 bp, Homo sapien
tgattcaagcatagccacatgtggg

SEQ ID NO: 985191 - DNA, 25 bp, Homo sapien
gggaggaattactgacagtctacca

SEQ ID NO: 985192 - DNA, 25 bp, Homo sapien
acagggaggaattactgacagtcta

SEQ ID NO: 985193 - DNA, 25 bp, Homo sapien
gaggaattactgacagtctaccaaa

SEQ ID NO: 985194 - DNA, 25 bp, Homo sapien
cagggaggaattactgacagtctac

SEQ ID NO: 985195 - DNA, 25 bp, Homo sapien
acagtcactcagctatccaccactt

SEQ ID NO: 985196 - DNA, 25 bp, Homo sapien
agtcactcagctatccaccacttac

SEQ ID NO: 985197 - DNA, 25 bp, Homo sapien
tacagtcactcagctatccaccact

SEQ ID NO: 985198 - DNA, 25 bp, Homo sapien
cagtcactcagctatccaccactta

SEQ ID NO: 985199 - DNA, 25 bp, Homo sapien
ttccctctgttggactcacaggata

SEQ ID NO: 985200 - DNA, 25 bp, Homo sapien
aagccaagatcatcctctgggaggg

SEQ ID NO: 985201 - DNA, 25 bp, Homo sapien
gacaccccatgtacaaagccaagat

SEQ ID NO: 985202 - DNA, 25 bp, Homo sapien
tggtgctggtatccacatgcaggag

SEQ ID NO: 985203 - DNA, 25 bp, Homo sapien
gattacaggtaaatttcttattctc

SEQ ID NO: 985204 - DNA, 25 bp, Homo sapien
agtttcttgagcaaggattacaggt

SEQ ID NO: 985205 - DNA, 25 bp, Homo sapien
tgcaaaaggctggaacaatgtggcc

SEQ ID NO: 985206 - DNA, 25 bp, Homo sapien
aacaatgtggcctcagagcttcagt

SEQ ID NO: 985207 - DNA, 25 bp, Homo sapien
tataatggttgctagatctcccacc

SEQ ID NO: 985208 - DNA, 25 bp, Homo sapien
tctagagagactttagaaaccctct

SEQ ID NO: 985209 - DNA, 25 bp, Homo sapien
caagcacagcctcatatggaggaac

SEQ ID NO: 985210 - DNA, 25 bp, Homo sapien
ttcagtaagtggtggctattgtgac

SEQ ID NO: 985211 - DNA, 25 bp, Homo sapien
tatttcatctgtaataggaggagtt

SEQ ID NO: 985212 - DNA, 25 bp, Homo sapien
gtcagtgggacaacaggctactcca

SEQ ID NO: 985213 - DNA, 25 bp, Homo sapien
gtgaagcacatgatgaccgtcaggg

SEQ ID NO: 985214 - DNA, 25 bp, Homo sapien
ccgtcagggcgatgccagagagctt

SEQ ID NO: 985215 - DNA, 25 bp, Homo sapien
gaaggaatggtatcggtcattttcc

SEQ ID NO: 985216 - DNA, 25 bp, Homo sapien
tggtatcggtcattttccctggtct

SEQ ID NO: 985217 - DNA, 25 bp, Homo sapien
tgccccatgggtgtgtagcatccct

SEQ ID NO: 985218 - DNA, 25 bp, Homo sapien
tctcctgtaggaccccatgcagttg

SEQ ID NO: 985219 - DNA, 25 bp, Homo sapien
cctgagccaaggcacaggggatgta

SEQ ID NO: 985220 - DNA, 25 bp, Homo sapien
attgaggaagtacttgtggagtgcc

SEQ ID NO: 985221 - DNA, 25 bp, Homo sapien
ggaatggcaagtccacagtttgact

SEQ ID NO: 985222 - DNA, 25 bp, Homo sapien
aagtacttgtggagtgccaggcttg

SEQ ID NO: 985223 - DNA, 25 bp, Homo sapien
agtgataggtcatcaggcgttagat

SEQ ID NO: 985224 - DNA, 25 bp, Homo sapien
cagtgataggtcatcaggcgttaga

SEQ ID NO: 985225 - DNA, 25 bp, Homo sapien
gacagtgataggtcatcaggcgtta

SEQ ID NO: 985226 - DNA, 25 bp, Homo sapien
gagacagtgataggtcatcaggcgt

SEQ ID NO: 985227 - DNA, 25 bp, Homo sapien
tcttaatgcccaggtttaggcctgg

SEQ ID NO: 985228 - DNA, 25 bp, Homo sapien
ctcctgtacaacgaaggctgggacc

SEQ ID NO: 985229 - DNA, 25 bp, Homo sapien
aaagtcacaacctgctgatttgcgg

SEQ ID NO: 985230 - DNA, 25 bp, Homo sapien
gaaggccacgcaattcttaatgccc

SEQ ID NO: 985231 - DNA, 25 bp, Homo sapien
gacttttgccatgggccctaagcct

SEQ ID NO: 985232 - DNA, 25 bp, Homo sapien
tatctctgactctctaataccactg

SEQ ID NO: 985233 - DNA, 25 bp, Homo sapien
tgggtcccagctctctaacagtttg

SEQ ID NO: 985234 - DNA, 25 bp, Homo sapien
cactgaaattactcctggcttgcaa

SEQ ID NO: 985235 - DNA, 25 bp, Homo sapien
gaggtccagacatcaccagccttaa

SEQ ID NO: 985236 - DNA, 25 bp, Homo sapien
ggtttaccctaaagctgtggctcag

SEQ ID NO: 985237 - DNA, 25 bp, Homo sapien
tgtggaatcgaacatgggtttaccc

SEQ ID NO: 985238 - DNA, 25 bp, Homo sapien
tgtgcagccaggatgagacccacaa

SEQ ID NO: 985239 - DNA, 25 bp, Homo sapien
aagcactttttatttgaggcaaaga

SEQ ID NO: 985240 - DNA, 25 bp, Homo sapien
aaagcactttttatttgaggcaaag

SEQ ID NO: 985241 - DNA, 25 bp, Homo sapien
caagaaacacaggtataggtcactt

SEQ ID NO: 985242 - DNA, 25 bp, Homo sapien
tactgacagggctcttgagatccaa

SEQ ID NO: 985243 - DNA, 25 bp, Homo sapien
aaaggattccagttccaagcagtca

SEQ ID NO: 985244 - DNA, 25 bp, Homo sapien
tgtactttccccagcagggtagaaa

SEQ ID NO: 985245 - DNA, 25 bp, Homo sapien
tcatggaaggggtaatccttgtggg

SEQ ID NO: 985246 - DNA, 25 bp, Homo sapien
actcttcatggaaggggtaatcctt

SEQ ID NO: 985247 - DNA, 25 bp, Homo sapien
tcaaaactcttcatggaaggggtaa

SEQ ID NO: 985248 - DNA, 25 bp, Homo sapien
atggaaggggtaatccttgtgggag

SEQ ID NO: 985249 - DNA, 25 bp, Homo sapien
gacatcagcaggtcaggctcagtaa

SEQ ID NO: 985250 - DNA, 25 bp, Homo sapien
gcagctcacgcaaggccagagttat

SEQ ID NO: 985251 - DNA, 25 bp, Homo sapien
taactcagtctagctggcaggacca

SEQ ID NO: 985252 - DNA, 25 bp, Homo sapien
ggccaatggctgtgctaggaacata

SEQ ID NO: 985253 - DNA, 25 bp, Homo sapien
caggataatcgaacagaagtttcta

SEQ ID NO: 985254 - DNA, 25 bp, Homo sapien
cacgcaacaggataatcgaacagaa

SEQ ID NO: 985255 - DNA, 25 bp, Homo sapien
cgcaacaggataatcgaacagaagt

SEQ ID NO: 985256 - DNA, 25 bp, Homo sapien
cgccacgcaacaggataatcgaaca

SEQ ID NO: 985257 - DNA, 25 bp, Homo sapien
cagaggagcctaactgtaaagggag

SEQ ID NO: 985258 - DNA, 25 bp, Homo sapien
cagagctcagacaagaataagggta

SEQ ID NO: 985259 - DNA, 25 bp, Homo sapien
gccagagttattgtccaggacgcag

SEQ ID NO: 985260 - DNA, 25 bp, Homo sapien
tgtgacatgctctgtttgcggccta

SEQ ID NO: 985261 - DNA, 25 bp, Homo sapien
tcctggctgctcagttcaaagtcaa

SEQ ID NO: 985262 - DNA, 25 bp, Homo sapien
tcaacaaggcacagaccctccagtt

SEQ ID NO: 985263 - DNA, 25 bp, Homo sapien
cctgttgtagctgagtaaggtggtc

SEQ ID NO: 985264 - DNA, 25 bp, Homo sapien
ggctgctcagttcaaagtcaaagac

SEQ ID NO: 985265 - DNA, 25 bp, Homo sapien
catggctgtgctgcgctcggcacag

SEQ ID NO: 985266 - DNA, 25 bp, Homo sapien
ctggcagagccactttgctcagtga

SEQ ID NO: 985267 - DNA, 25 bp, Homo sapien
tggcagagccactttgctcagtgag

SEQ ID NO: 985268 - DNA, 25 bp, Homo sapien
ctgtgctgcgctcggcacagatctt

SEQ ID NO: 985269 - DNA, 25 bp, Homo sapien
taaagttctcagcaatgcgttctgg

SEQ ID NO: 985270 - DNA, 25 bp, Homo sapien
gacttggggatcaccaccaagttcc

SEQ ID NO: 985271 - DNA, 25 bp, Homo sapien
agttctcagcaatgcgttctggtgt

SEQ ID NO: 985272 - DNA, 25 bp, Homo sapien
cttaaagttctcagcaatgcgttct

SEQ ID NO: 985273 - DNA, 25 bp, Homo sapien
gccaggcactcgcacccatcatctc

SEQ ID NO: 985274 - DNA, 25 bp, Homo sapien
cagtgagtgtgtatacatgccaggc

SEQ ID NO: 985275 - DNA, 25 bp, Homo sapien
aggagacagtgagtgtgtatacatg

SEQ ID NO: 985276 - DNA, 25 bp, Homo sapien
ggcactcgcacccatcatctcagtc

SEQ ID NO: 985277 - DNA, 25 bp, Homo sapien
gaacattccctgcacggctaagagc

SEQ ID NO: 985278 - DNA, 25 bp, Homo sapien
gaaatgcacactaccactcaggaga

SEQ ID NO: 985279 - DNA, 25 bp, Homo sapien
tccaagatgtcaggtcacagctagc

SEQ ID NO: 985280 - DNA, 25 bp, Homo sapien
taggcgacgcattcaggtccagatc

SEQ ID NO: 985281 - DNA, 25 bp, Homo sapien
gagagaagggtcctcgggcttggcc

SEQ ID NO: 985282 - DNA, 25 bp, Homo sapien
ttttattgtgcttggctgcgatcgc

SEQ ID NO: 985283 - DNA, 25 bp, Homo sapien
tgcgatcgccttgatcctgggatcc

SEQ ID NO: 985284 - DNA, 25 bp, Homo sapien
gatcctgggatcctccaggagagaa

SEQ ID NO: 985285 - DNA, 25 bp, Homo sapien
gccgagggggctgtaggcggtcacc

SEQ ID NO: 985286 - DNA, 25 bp, Homo sapien
gtaggcggtcaccacgatgcctttg

SEQ ID NO: 985287 - DNA, 25 bp, Homo sapien
cctgagtgagatatgggtggcactc

SEQ ID NO: 985288 - DNA, 25 bp, Homo sapien
taacttctcctgagtgagatatggg

SEQ ID NO: 985289 - DNA, 25 bp, Homo sapien
aatgcaaaaacaagagctgatggga

SEQ ID NO: 985290 - DNA, 25 bp, Homo sapien
caaatgcaaaaacaagagctgatgg

SEQ ID NO: 985291 - DNA, 25 bp, Homo sapien
gcaaaaacaagagctgatgggagca

SEQ ID NO: 985292 - DNA, 25 bp, Homo sapien
ctgcaaatgcaaaaacaagagctga

SEQ ID NO: 985293 - DNA, 25 bp, Homo sapien
gttaactgcaggcttatacttcaag

SEQ ID NO: 985294 - DNA, 25 bp, Homo sapien
taactgcaggcttatacttcaagcc

SEQ ID NO: 985295 - DNA, 25 bp, Homo sapien
actgcaggcttatacttcaagccag

SEQ ID NO: 985296 - DNA, 25 bp, Homo sapien
aggcttatacttcaagccaggtttg

SEQ ID NO: 985297 - DNA, 25 bp, Homo sapien
agtcacgaaaacaaggtccaaccag

SEQ ID NO: 985298 - DNA, 25 bp, Homo sapien
cagattgcttctaagaagaagaggg

SEQ ID NO: 985299 - DNA, 25 bp, Homo sapien
gaaccagtcacgaaaacaaggtcca

SEQ ID NO: 985300 - DNA, 25 bp, Homo sapien
caggcagattgcttctaagaagaag

SEQ ID NO: 985301 - DNA, 25 bp, Homo sapien
accacattgcccgactcatccaatg

SEQ ID NO: 985302 - DNA, 25 bp, Homo sapien
tgggaaccacattgcccgactcatc

SEQ ID NO: 985303 - DNA, 25 bp, Homo sapien
ccacattgcccgactcatccaatgg

SEQ ID NO: 985304 - DNA, 25 bp, Homo sapien
cacattgcccgactcatccaatggg

SEQ ID NO: 985305 - DNA, 25 bp, Homo sapien
acaggttgcacctgagccccaaggg

SEQ ID NO: 985306 - DNA, 25 bp, Homo sapien
aggttgcacctgagccccaagggac

SEQ ID NO: 985307 - DNA, 25 bp, Homo sapien
acaccacaggttgcacctgagcccc

SEQ ID NO: 985308 - DNA, 25 bp, Homo sapien
ctggtctgcaccaggcatcccatac

SEQ ID NO: 985309 - DNA, 25 bp, Homo sapien
caggtcgctgagtgtcttctggcag

SEQ ID NO: 985310 - DNA, 25 bp, Homo sapien
tccagcttcaggtcgctgagtgtct

SEQ ID NO: 985311 - DNA, 25 bp, Homo sapien
ttcaggtcgctgagtgtcttctggc

SEQ ID NO: 985312 - DNA, 25 bp, Homo sapien
gcttcaggtcgctgagtgtcttctg

SEQ ID NO: 985313 - DNA, 25 bp, Homo sapien
ggatcctaactttccaaaggcaggc

SEQ ID NO: 985314 - DNA, 25 bp, Homo sapien
ggcatttccactgcgtactggatcc

SEQ ID NO: 985315 - DNA, 25 bp, Homo sapien
gatcctaactttccaaaggcaggca

SEQ ID NO: 985316 - DNA, 25 bp, Homo sapien
cactgcgtactggatcctaactttc

SEQ ID NO: 985317 - DNA, 25 bp, Homo sapien
cccgggaagaatcgcccatcagtga

SEQ ID NO: 985318 - DNA, 25 bp, Homo sapien
tatggccgtgggtgatacgtttccc

SEQ ID NO: 985319 - DNA, 25 bp, Homo sapien
acagatgatgggaccgagagcccct

SEQ ID NO: 985320 - DNA, 25 bp, Homo sapien
tcagcacgggactctaagcaatggg

SEQ ID NO: 985321 - DNA, 25 bp, Homo sapien
gtcgatgtggcggtacccgacgtca

SEQ ID NO: 985322 - DNA, 25 bp, Homo sapien
gtggcggtacccgacgtcaatggcc

SEQ ID NO: 985323 - DNA, 25 bp, Homo sapien
gatgtggcggtacccgacgtcaatg

SEQ ID NO: 985324 - DNA, 25 bp, Homo sapien
tggcggtacccgacgtcaatggcca

SEQ ID NO: 985325 - DNA, 25 bp, Homo sapien
aacgtgagccccgcagaatgcagag

SEQ ID NO: 985326 - DNA, 25 bp, Homo sapien
acgtgagccccgcagaatgcagagt

SEQ ID NO: 985327 - DNA, 25 bp, Homo sapien
tgactgaatgggtgtccatggccaa

SEQ ID NO: 985328 - DNA, 25 bp, Homo sapien
tgaccatctgagtaaccagaacagc

SEQ ID NO: 985329 - DNA, 25 bp, Homo sapien
gatggcccctcagaggtatcagcag

SEQ ID NO: 985330 - DNA, 25 bp, Homo sapien
tcaccaaatggttagtggctgacct

SEQ ID NO: 985331 - DNA, 25 bp, Homo sapien
cttccccactctgcacggttgaagg

SEQ ID NO: 985332 - DNA, 25 bp, Homo sapien
ctggcgacctcttatttgactggag

SEQ ID NO: 985333 - DNA, 25 bp, Homo sapien
gacctcttatttgactggaggacct

SEQ ID NO: 985334 - DNA, 25 bp, Homo sapien
ccactctgcacggttgaaggaacag

SEQ ID NO: 985335 - DNA, 25 bp, Homo sapien
cctgagtggtgtccgggcacaacca

SEQ ID NO: 985336 - DNA, 25 bp, Homo sapien
ggtgtccgggcacaaccaccactga

SEQ ID NO: 985337 - DNA, 25 bp, Homo sapien
gccctgagtggtgtccgggcacaac

SEQ ID NO: 985338 - DNA, 25 bp, Homo sapien
cacaggccctgagtggtgtccgggc

SEQ ID NO: 985339 - DNA, 25 bp, Homo sapien
aactgcccaggacacactgaacttt

SEQ ID NO: 985340 - DNA, 25 bp, Homo sapien
gaaagaacaactggggcccaggcag

SEQ ID NO: 985341 - DNA, 25 bp, Homo sapien
tttctccaggcttgatggcgccttg

SEQ ID NO: 985342 - DNA, 25 bp, Homo sapien
gcttgatggcgccttgattgatttt

SEQ ID NO: 985343 - DNA, 25 bp, Homo sapien
tccctctcgcgttgtgccgcttggg

SEQ ID NO: 985344 - DNA, 25 bp, Homo sapien
aaatgcggactggtgggccgcccat

SEQ ID NO: 985345 - DNA, 25 bp, Homo sapien
gaggtccaccggtctgtgaagccca

SEQ ID NO: 985346 - DNA, 25 bp, Homo sapien
gcgcccgctaggacccaaaatgcgg

SEQ ID NO: 985347 - DNA, 25 bp, Homo sapien
atcttggcgccgttgttgagcagga

SEQ ID NO: 985348 - DNA, 25 bp, Homo sapien
tgttgagcaggagacggcttgccat

SEQ ID NO: 985349 - DNA, 25 bp, Homo sapien
gcatcttggcgccgttgttgagcag

SEQ ID NO: 985350 - DNA, 25 bp, Homo sapien
cgttgttgagcaggagacggcttgc

SEQ ID NO: 985351 - DNA, 25 bp, Homo sapien
ccccgcccagtacggtgcggccttg

SEQ ID NO: 985352 - DNA, 25 bp, Homo sapien
gcccagtacggtgcggccttggccg

SEQ ID NO: 985353 - DNA, 25 bp, Homo sapien
cagtacggtgcggccttggccgcgg

SEQ ID NO: 985354 - DNA, 25 bp, Homo sapien
ccgcccagtacggtgcggccttggc

SEQ ID NO: 985355 - DNA, 25 bp, Homo sapien
gttggcgcgccgctgcgcgaaggag

SEQ ID NO: 985356 - DNA, 25 bp, Homo sapien
cgctgcgcgaaggagccttctgatt

SEQ ID NO: 985357 - DNA, 25 bp, Homo sapien
gcgccgctgcgcgaaggagccttct

SEQ ID NO: 985358 - DNA, 25 bp, Homo sapien
gcgcgaaggagccttctgattggtt

SEQ ID NO: 985359 - DNA, 25 bp, Homo sapien
caaccaaaggtcttaattcctatat

SEQ ID NO: 985360 - DNA, 25 bp, Homo sapien
aatactgtcagtagccaccctgctg

SEQ ID NO: 985361 - DNA, 25 bp, Homo sapien
tgcatatcccgcaagtgggctaata

SEQ ID NO: 985362 - DNA, 25 bp, Homo sapien
taagagggacggtgtgcatatcccg

SEQ ID NO: 985363 - DNA, 25 bp, Homo sapien
gagggacggtgtgcatatcccgcaa

SEQ ID NO: 985364 - DNA, 25 bp, Homo sapien
cggtgtgcatatcccgcaagtgggc

SEQ ID NO: 985365 - DNA, 25 bp, Homo sapien
catatgcctctccttcatgggataa

SEQ ID NO: 985366 - DNA, 25 bp, Homo sapien
tgctgatttgggatgcctgacctgc

SEQ ID NO: 985367 - DNA, 25 bp, Homo sapien
ttgctggagccccactgcatgggac

SEQ ID NO: 985368 - DNA, 25 bp, Homo sapien
agccccactgcatgggaccttggca

SEQ ID NO: 985369 - DNA, 25 bp, Homo sapien
gaggccctaatttcgcttccagcat

SEQ ID NO: 985370 - DNA, 25 bp, Homo sapien
cctatgggtgctcattccgttctct

SEQ ID NO: 985371 - DNA, 25 bp, Homo sapien
caggtcagtgccgtagattcctaca

SEQ ID NO: 985372 - DNA, 25 bp, Homo sapien
ggccttggcctctgttatctgtttc

SEQ ID NO: 985373 - DNA, 25 bp, Homo sapien
gctcattccgttctctgtggccttt

SEQ ID NO: 985374 - DNA, 25 bp, Homo sapien
cacctaaggccacacgaagtgcttc

SEQ ID NO: 985375 - DNA, 25 bp, Homo sapien
gaaggctgaaatcagcaggaatctt

SEQ ID NO: 985376 - DNA, 25 bp, Homo sapien
gcttccctcttgtgaaggctgaaat

SEQ ID NO: 985377 - DNA, 25 bp, Homo sapien
tcaggtctgcccacctaaggccaca

SEQ ID NO: 985378 - DNA, 25 bp, Homo sapien
ccttttataccctgctggtcataca

SEQ ID NO: 985379 - DNA, 25 bp, Homo sapien
ttcttgccatacaatcagccccagt

SEQ ID NO: 985380 - DNA, 25 bp, Homo sapien
ccctgctggtcatacagacatattc

SEQ ID NO: 985381 - DNA, 25 bp, Homo sapien
tacaatcagccccagtgccagactt

SEQ ID NO: 985382 - DNA, 25 bp, Homo sapien
gcaaatctttgcacacccttcttct

SEQ ID NO: 985383 - DNA, 25 bp, Homo sapien
cacttggaaggtaaatatgcaaatc

SEQ ID NO: 985384 - DNA, 25 bp, Homo sapien
gatgcccattgtgggcctgggcact

SEQ ID NO: 985385 - DNA, 25 bp, Homo sapien
caaccatggccacgtttgtggagct

SEQ ID NO: 985386 - DNA, 25 bp, Homo sapien
tgtggctgatttaggaggtttagca

SEQ ID NO: 985387 - DNA, 25 bp, Homo sapien
ggaggtttagcatgtgcctgccagt

SEQ ID NO: 985388 - DNA, 25 bp, Homo sapien
taactccaaggctagcatgcagccg

SEQ ID NO: 985389 - DNA, 25 bp, Homo sapien
tgagctagggctggtagaaaaggta

SEQ ID NO: 985390 - DNA, 25 bp, Homo sapien
caatattcattatcagacatacaag

SEQ ID NO: 985391 - DNA, 25 bp, Homo sapien
cattatcagacatacaagtcttcca

SEQ ID NO: 985392 - DNA, 25 bp, Homo sapien
gattcttccctttcaatattcatta

SEQ ID NO: 985393 - DNA, 25 bp, Homo sapien
ccctttcaatattcattatcagaca

SEQ ID NO: 985394 - DNA, 25 bp, Homo sapien
tcagagatgagatacaggatatcca

SEQ ID NO: 985395 - DNA, 25 bp, Homo sapien
gagggtggaatttctatcttctcca

SEQ ID NO: 985396 - DNA, 25 bp, Homo sapien
tacacctacccggaaagactctgta

SEQ ID NO: 985397 - DNA, 25 bp, Homo sapien
ttctccatccgactgggtacaccta

SEQ ID NO: 985398 - DNA, 25 bp, Homo sapien
tatctccactggacaaatctcctca

SEQ ID NO: 985399 - DNA, 25 bp, Homo sapien
gagaatggcttcaaataggcggctt

SEQ ID NO: 985400 - DNA, 25 bp, Homo sapien
ggacttgctgatctatacttttaga

SEQ ID NO: 985401 - DNA, 25 bp, Homo sapien
gtgatgattataactttggacttgc

SEQ ID NO: 985402 - DNA, 25 bp, Homo sapien
tctgaacttttagatcccttcctct

SEQ ID NO: 985403 - DNA, 25 bp, Homo sapien
tgaacttttagatcccttcctctgc

SEQ ID NO: 985404 - DNA, 25 bp, Homo sapien
gaacttttagatcccttcctctgcc

SEQ ID NO: 985405 - DNA, 25 bp, Homo sapien
ctgaacttttagatcccttcctctg

SEQ ID NO: 985406 - DNA, 25 bp, Homo sapien
cactatggcgctcaaggaaggaaat

SEQ ID NO: 985407 - DNA, 25 bp, Homo sapien
aaatgccatacaggagctttagcca

SEQ ID NO: 985408 - DNA, 25 bp, Homo sapien
gaaataaatgtctcatccatggcca

SEQ ID NO: 985409 - DNA, 25 bp, Homo sapien
tatgtgaaccggttttggagactgg

SEQ ID NO: 985410 - DNA, 25 bp, Homo sapien
tccttctaccacctaatttaagcat

SEQ ID NO: 985411 - DNA, 25 bp, Homo sapien
cttcttccatcccacaatatttgat

SEQ ID NO: 985412 - DNA, 25 bp, Homo sapien
ctccttctaccacctaatttaagca

SEQ ID NO: 985413 - DNA, 25 bp, Homo sapien
ttcttccatcccacaatatttgatt

SEQ ID NO: 985414 - DNA, 25 bp, Homo sapien
gccatgagtagggatctgcctggta

SEQ ID NO: 985415 - DNA, 25 bp, Homo sapien
gagctgggctcatatctaggttgtt

SEQ ID NO: 985416 - DNA, 25 bp, Homo sapien
tccgtcatgagtgggtgttgtccac

SEQ ID NO: 985417 - DNA, 25 bp, Homo sapien
ggctggaacatgcaacatgccctga

SEQ ID NO: 985418 - DNA, 25 bp, Homo sapien
taaacactgggtaaatcagctcctg

SEQ ID NO: 985419 - DNA, 25 bp, Homo sapien
tgctcagtatcacagggcatgggct

SEQ ID NO: 985420 - DNA, 25 bp, Homo sapien
ttaaatcacactggctacagcgttg

SEQ ID NO: 985421 - DNA, 25 bp, Homo sapien
tccttcaaagaagcatgcatggtcc

SEQ ID NO: 985422 - DNA, 25 bp, Homo sapien
tccacagctcaagttacagggtttg

SEQ ID NO: 985423 - DNA, 25 bp, Homo sapien
tcaagttacagggtttgtgtgcttc

SEQ ID NO: 985424 - DNA, 25 bp, Homo sapien
ttgcatgtctaactttccacagctc

SEQ ID NO: 985425 - DNA, 25 bp, Homo sapien
tgtgtgcttcttggtaacttaccaa

SEQ ID NO: 985426 - DNA, 25 bp, Homo sapien
accagatgatgttcgtagaattcca

SEQ ID NO: 985427 - DNA, 25 bp, Homo sapien
caagatcctagagttggattcttcc

SEQ ID NO: 985428 - DNA, 25 bp, Homo sapien
caaatatcagggtcaagaatgcaac

SEQ ID NO: 985429 - DNA, 25 bp, Homo sapien
tacttcaagatcctagagttggatt

SEQ ID NO: 985430 - DNA, 25 bp, Homo sapien
ggttcgtaacagtctcctgtggagc

SEQ ID NO: 985431 - DNA, 25 bp, Homo sapien
tcttgctggatctggcttgttcact

SEQ ID NO: 985432 - DNA, 25 bp, Homo sapien
cacttgtctgttcgcttcactggca

SEQ ID NO: 985433 - DNA, 25 bp, Homo sapien
tgtggagccctgtgatcgactcttg

SEQ ID NO: 985434 - DNA, 25 bp, Homo sapien
aagtcaataccagatggattgtgag

SEQ ID NO: 985435 - DNA, 25 bp, Homo sapien
ccttttttctgcgtgtgagttcaaa

SEQ ID NO: 985436 - DNA, 25 bp, Homo sapien
tttcctgcactgagaaatacctact

SEQ ID NO: 985437 - DNA, 25 bp, Homo sapien
tgagcacggacaggaatgctttcct

SEQ ID NO: 985438 - DNA, 25 bp, Homo sapien
cctcagtctggtcagactccgatgc

SEQ ID NO: 985439 - DNA, 25 bp, Homo sapien
tcagactccgatgcataaagctggg

SEQ ID NO: 985440 - DNA, 25 bp, Homo sapien
cgatgcataaagctgggaacctcac

SEQ ID NO: 985441 - DNA, 25 bp, Homo sapien
tctggtcagactccgatgcataaag

SEQ ID NO: 985442 - DNA, 25 bp, Homo sapien
ccaagcaccggcaatccaagacttc

SEQ ID NO: 985443 - DNA, 25 bp, Homo sapien
tgcaattgcaggctagtaaatttgg

SEQ ID NO: 985444 - DNA, 25 bp, Homo sapien
ttgcaggctagtaaatttggagcac

SEQ ID NO: 985445 - DNA, 25 bp, Homo sapien
ggctagtaaatttggagcacaggat

SEQ ID NO: 985446 - DNA, 25 bp, Homo sapien
ggcacaggtcccgtgagccttattc

SEQ ID NO: 985447 - DNA, 25 bp, Homo sapien
cagtcctgtttcagtatgtggcaca

SEQ ID NO: 985448 - DNA, 25 bp, Homo sapien
ggagctgatgggctttaggttcccc

SEQ ID NO: 985449 - DNA, 25 bp, Homo sapien
ccttattccgcgcttgggttgcaca

SEQ ID NO: 985450 - DNA, 25 bp, Homo sapien
tggtcgaggctgaatgaacagtgct

SEQ ID NO: 985451 - DNA, 25 bp, Homo sapien
cttggtcgaggctgaatgaacagtg

SEQ ID NO: 985452 - DNA, 25 bp, Homo sapien
tcgaggctgaatgaacagtgctgct

SEQ ID NO: 985453 - DNA, 25 bp, Homo sapien
agtgctgctgcagttgccgtaagca

SEQ ID NO: 985454 - DNA, 25 bp, Homo sapien
cctgggaacagccactctgccatat

SEQ ID NO: 985455 - DNA, 25 bp, Homo sapien
gggacccgcaagtggctctgggcct

SEQ ID NO: 985456 - DNA, 25 bp, Homo sapien
ggaacagccactctgccatatttgc

SEQ ID NO: 985457 - DNA, 25 bp, Homo sapien
gccactctgccatatttgctaaata

SEQ ID NO: 985458 - DNA, 25 bp, Homo sapien
ctccatcatggagtttgaggtatga

SEQ ID NO: 985459 - DNA, 25 bp, Homo sapien
gaggtatgaatcgacccaaaaccag

SEQ ID NO: 985460 - DNA, 25 bp, Homo sapien
gaaagttctctccatcatggagttt

SEQ ID NO: 985461 - DNA, 25 bp, Homo sapien
tgctgagaggagctacaagggctat

SEQ ID NO: 985462 - DNA, 25 bp, Homo sapien
cgttgaacaatcctctccccgattt

SEQ ID NO: 985463 - DNA, 25 bp, Homo sapien
cacagtaatcccgttgaacaatcct

SEQ ID NO: 985464 - DNA, 25 bp, Homo sapien
aagcacccacagtaatcccgttgaa

SEQ ID NO: 985465 - DNA, 25 bp, Homo sapien
ttcagagttggaaagcacccacagt

SEQ ID NO: 985466 - DNA, 25 bp, Homo sapien
tgagaggtccggtcccgcccaggct

SEQ ID NO: 985467 - DNA, 25 bp, Homo sapien
gagcccatgagaggtccggtcccgc

SEQ ID NO: 985468 - DNA, 25 bp, Homo sapien
tggagcccatgagaggtccggtccc

SEQ ID NO: 985469 - DNA, 25 bp, Homo sapien
catgagaggtccggtcccgcccagg

SEQ ID NO: 985470 - DNA, 25 bp, Homo sapien
tcaggaagcctttccccagggcaac

SEQ ID NO: 985471 - DNA, 25 bp, Homo sapien
aagcctttccccagggcaacactgg

SEQ ID NO: 985472 - DNA, 25 bp, Homo sapien
tccccagggcaacactgggttgtac

SEQ ID NO: 985473 - DNA, 25 bp, Homo sapien
ctttccccagggcaacactgggttg

SEQ ID NO: 985474 - DNA, 25 bp, Homo sapien
gggcatcccatagaggtacccgcat

SEQ ID NO: 985475 - DNA, 25 bp, Homo sapien
gttaaccgaaccagcagttgcaccc

SEQ ID NO: 985476 - DNA, 25 bp, Homo sapien
ccctctcgtgcttgaggattttcac

SEQ ID NO: 985477 - DNA, 25 bp, Homo sapien
gccaaggtcacgctccctgtgttgt

SEQ ID NO: 985478 - DNA, 25 bp, Homo sapien
tattgtagatagatcccatgctcct

SEQ ID NO: 985479 - DNA, 25 bp, Homo sapien
ttgtagatagatcccatgctccttc

SEQ ID NO: 985480 - DNA, 25 bp, Homo sapien
ccatattgtagatagatcccatgct

SEQ ID NO: 985481 - DNA, 25 bp, Homo sapien
gtagatagatcccatgctccttcac

SEQ ID NO: 985482 - DNA, 25 bp, Homo sapien
ctaactctgcccaccttgctctcat

SEQ ID NO: 985483 - DNA, 25 bp, Homo sapien
catcgagaagacctaactctgccca

SEQ ID NO: 985484 - DNA, 25 bp, Homo sapien
tcctcttcaagtttgtccacttctc

SEQ ID NO: 985485 - DNA, 25 bp, Homo sapien
gtccacttctccatcgagaagacct

SEQ ID NO: 985486 - DNA, 25 bp, Homo sapien
cttaggccactcctgtctgcctctc

SEQ ID NO: 985487 - DNA, 25 bp, Homo sapien
ttaggccactcctgtctgcctctct

SEQ ID NO: 985488 - DNA, 25 bp, Homo sapien
tcagccgtggcatcatggtactgtt

SEQ ID NO: 985489 - DNA, 25 bp, Homo sapien
cagccgtggcatcatggtactgttg

SEQ ID NO: 985490 - DNA, 25 bp, Homo sapien
ctcagccgtggcatcatggtactgt

SEQ ID NO: 985491 - DNA, 25 bp, Homo sapien
agccgtggcatcatggtactgttgg

SEQ ID NO: 985492 - DNA, 25 bp, Homo sapien
ctcctgaatggttgtgttgctgatg

SEQ ID NO: 985493 - DNA, 25 bp, Homo sapien
ccactcctgaatggttgtgttgctg

SEQ ID NO: 985494 - DNA, 25 bp, Homo sapien
cctgaatggttgtgttgctgatgaa

SEQ ID NO: 985495 - DNA, 25 bp, Homo sapien
gagaaccactcctgaatggttgtgt

SEQ ID NO: 985496 - DNA, 25 bp, Homo sapien
tggatatgaaaactggtgtttgaca

SEQ ID NO: 985497 - DNA, 25 bp, Homo sapien
ctggatatgaaaactggtgtttgac

SEQ ID NO: 985498 - DNA, 25 bp, Homo sapien
ggatatgaaaactggtgtttgacat

SEQ ID NO: 985499 - DNA, 25 bp, Homo sapien
gatatgaaaactggtgtttgacatt

SEQ ID NO: 985500 - DNA, 25 bp, Homo sapien
ctttcattgccaaagggtgttttgc

SEQ ID NO: 985501 - DNA, 25 bp, Homo sapien
ccttggccctggcttggttcttcca

SEQ ID NO: 985502 - DNA, 25 bp, Homo sapien
ggttcttccatgaagaagcatcttc

SEQ ID NO: 985503 - DNA, 25 bp, Homo sapien
ttaagtgcagttggcggaaacttgg

SEQ ID NO: 985504 - DNA, 25 bp, Homo sapien
ttctctggactctcatagaacttta

SEQ ID NO: 985505 - DNA, 25 bp, Homo sapien
ctctggactctcatagaactttact

SEQ ID NO: 985506 - DNA, 25 bp, Homo sapien
tctctggactctcatagaactttac

SEQ ID NO: 985507 - DNA, 25 bp, Homo sapien
catggctgggtaagcacgtgcagac

SEQ ID NO: 985508 - DNA, 25 bp, Homo sapien
caggcttccttgagcatgaacggga

SEQ ID NO: 985509 - DNA, 25 bp, Homo sapien
tgcagacgtgcagagccaaatggtc

SEQ ID NO: 985510 - DNA, 25 bp, Homo sapien
tcaggacttgccatcctggagtcca

SEQ ID NO: 985511 - DNA, 25 bp, Homo sapien
ggctggttttggcagcgtgcacgca

SEQ ID NO: 985512 - DNA, 25 bp, Homo sapien
gcagtttcagagctttttaggtctt

SEQ ID NO: 985513 - DNA, 25 bp, Homo sapien
tggcagcgtgcacgcagtttcagag

SEQ ID NO: 985514 - DNA, 25 bp, Homo sapien
ggttttggcagcgtgcacgcagttt

SEQ ID NO: 985515 - DNA, 25 bp, Homo sapien
ctagggaatgacaggcatctccaca

SEQ ID NO: 985516 - DNA, 25 bp, Homo sapien
tagggaatgacaggcatctccacag

SEQ ID NO: 985517 - DNA, 25 bp, Homo sapien
gcaggctgcatccaccttggctggg

SEQ ID NO: 985518 - DNA, 25 bp, Homo sapien
ccacaggcaggctgcatccaccttg

SEQ ID NO: 985519 - DNA, 25 bp, Homo sapien
aggccagtgttagcaagcctactgc

SEQ ID NO: 985520 - DNA, 25 bp, Homo sapien
gccagtgttagcaagcctactgcac

SEQ ID NO: 985521 - DNA, 25 bp, Homo sapien
agtgttagcaagcctactgcaccag

SEQ ID NO: 985522 - DNA, 25 bp, Homo sapien
cagtgttagcaagcctactgcacca

SEQ ID NO: 985523 - DNA, 25 bp, Homo sapien
cagtgaatactggtctatcccaatg

SEQ ID NO: 985524 - DNA, 25 bp, Homo sapien
gagccctgagccgtgtccagtgaat

SEQ ID NO: 985525 - DNA, 25 bp, Homo sapien
agtgatatcttctcgctcctggtta

SEQ ID NO: 985526 - DNA, 25 bp, Homo sapien
tagtatccctaatgatctcttcctt

SEQ ID NO: 985527 - DNA, 25 bp, Homo sapien
gctcagcgcacgtgtctgcctcttt

SEQ ID NO: 985528 - DNA, 25 bp, Homo sapien
ctagtgtgactcagctcagcgcacg

SEQ ID NO: 985529 - DNA, 25 bp, Homo sapien
tgactcagctcagcgcacgtgtctg

SEQ ID NO: 985530 - DNA, 25 bp, Homo sapien
catccctttccactagtgtgactca

SEQ ID NO: 985531 - DNA, 25 bp, Homo sapien
cagaggccatgcctgtctgccatga

SEQ ID NO: 985532 - DNA, 25 bp, Homo sapien
cctgtctgccatgatacatgcagga

SEQ ID NO: 985533 - DNA, 25 bp, Homo sapien
gccatgatacatgcaggacatagtc

SEQ ID NO: 985534 - DNA, 25 bp, Homo sapien
tgatacatgcaggacatagtccctg

SEQ ID NO: 985535 - DNA, 25 bp, Homo sapien
gaaagcatatgacccgaaagacaaa

SEQ ID NO: 985536 - DNA, 25 bp, Homo sapien
tatgtgtctaggctcgcacgggatg

SEQ ID NO: 985537 - DNA, 25 bp, Homo sapien
tactgttacggaggcatgttctgtg

SEQ ID NO: 985538 - DNA, 25 bp, Homo sapien
taccaaaggcctagcaatggctgcc

SEQ ID NO: 985539 - DNA, 25 bp, Homo sapien
tgctgctgccaatctgactagtcat

SEQ ID NO: 985540 - DNA, 25 bp, Homo sapien
cagagccatccccatggcatagttt

SEQ ID NO: 985541 - DNA, 25 bp, Homo sapien
ctttggtaggccctgtcagtttcac

SEQ ID NO: 985542 - DNA, 25 bp, Homo sapien
tcagtttcactggttctaggccatg

SEQ ID NO: 985543 - DNA, 25 bp, Homo sapien
ccccatttgcctttggtaggccctg

SEQ ID NO: 985544 - DNA, 25 bp, Homo sapien
tttaatgcttcagtgcagctggtcc

SEQ ID NO: 985545 - DNA, 25 bp, Homo sapien
ttgtttaatgcttcagtgcagctgg

SEQ ID NO: 985546 - DNA, 25 bp, Homo sapien
gtttaatgcttcagtgcagctggtc

SEQ ID NO: 985547 - DNA, 25 bp, Homo sapien
ttaatgcttcagtgcagctggtcca

SEQ ID NO: 985548 - DNA, 25 bp, Homo sapien
aatgacccaccattgcgccagagct

SEQ ID NO: 985549 - DNA, 25 bp, Homo sapien
taatcagaagcaggccccagagttt

SEQ ID NO: 985550 - DNA, 25 bp, Homo sapien
ggaagcactctcttaaggtcaacat

SEQ ID NO: 985551 - DNA, 25 bp, Homo sapien
tttttgtcacacttgccgtcagccc

SEQ ID NO: 985552 - DNA, 25 bp, Homo sapien
acgctaaaccagatccaaaatccca

SEQ ID NO: 985553 - DNA, 25 bp, Homo sapien
aatccaaattggccacgctaaacca

SEQ ID NO: 985554 - DNA, 25 bp, Homo sapien
cctctgcgagtgtttctgatttcac

SEQ ID NO: 985555 - DNA, 25 bp, Homo sapien
ctctttcctctgcgagtgtttctga

SEQ ID NO: 985556 - DNA, 25 bp, Homo sapien
agctgcccatgaccacaactgatgt

SEQ ID NO: 985557 - DNA, 25 bp, Homo sapien
gctgcccatgaccacaactgatgta

SEQ ID NO: 985558 - DNA, 25 bp, Homo sapien
ctgcccatgaccacaactgatgtat

SEQ ID NO: 985559 - DNA, 25 bp, Homo sapien
tcatggatcttatgatcaagttccc

SEQ ID NO: 985560 - DNA, 25 bp, Homo sapien
gatcttatgatcaagttcccacact

SEQ ID NO: 985561 - DNA, 25 bp, Homo sapien
tcttatgatcaagttcccacactcc

SEQ ID NO: 985562 - DNA, 25 bp, Homo sapien
tggatcttatgatcaagttcccaca

SEQ ID NO: 985563 - DNA, 25 bp, Homo sapien
cactaggcacttggaaatcagccca

SEQ ID NO: 985564 - DNA, 25 bp, Homo sapien
tgatagaagcataattgccctgtga

SEQ ID NO: 985565 - DNA, 25 bp, Homo sapien
taattgccctgtgaccaacccactt

SEQ ID NO: 985566 - DNA, 25 bp, Homo sapien
ttcttaacccatttgtgatgtcact

SEQ ID NO: 985567 - DNA, 25 bp, Homo sapien
tgtgtttgccgatgtccacagcttc

SEQ ID NO: 985568 - DNA, 25 bp, Homo sapien
caaaatggtcccctgtgcattgtta

SEQ ID NO: 985569 - DNA, 25 bp, Homo sapien
aaaggagactgatcagaggaattcc

SEQ ID NO: 985570 - DNA, 25 bp, Homo sapien
agaggaattccactggcccttccca

SEQ ID NO: 985571 - DNA, 25 bp, Homo sapien
caaccatgagggttctaatcttcat

SEQ ID NO: 985572 - DNA, 25 bp, Homo sapien
gcctcctcaaccatgagggttctaa

SEQ ID NO: 985573 - DNA, 25 bp, Homo sapien
cagctttgcctcctcaaccatgagg

SEQ ID NO: 985574 - DNA, 25 bp, Homo sapien
tttgcctcctcaaccatgagggttc

SEQ ID NO: 985575 - DNA, 25 bp, Homo sapien
gggaaacttatcaaacactgacgtc

SEQ ID NO: 985576 - DNA, 25 bp, Homo sapien
catgcctgtagccacgggaaactta

SEQ ID NO: 985577 - DNA, 25 bp, Homo sapien
tgacgtcagctactttcccatgaga

SEQ ID NO: 985578 - DNA, 25 bp, Homo sapien
gaaatttcataagaccgcaaacgac

SEQ ID NO: 985579 - DNA, 25 bp, Homo sapien
ccttggttctcctatagtaaatgtt

SEQ ID NO: 985580 - DNA, 25 bp, Homo sapien
acaccttggttctcctatagtaaat

SEQ ID NO: 985581 - DNA, 25 bp, Homo sapien
tggttctcctatagtaaatgttttc

SEQ ID NO: 985582 - DNA, 25 bp, Homo sapien
caccttggttctcctatagtaaatg

SEQ ID NO: 985583 - DNA, 25 bp, Homo sapien
tccggtctagactcagctttccctg

SEQ ID NO: 985584 - DNA, 25 bp, Homo sapien
ttactacctccggtctagactcagc

SEQ ID NO: 985585 - DNA, 25 bp, Homo sapien
actacctccggtctagactcagctt

SEQ ID NO: 985586 - DNA, 25 bp, Homo sapien
tacctccggtctagactcagctttc

SEQ ID NO: 985587 - DNA, 25 bp, Homo sapien
cgaggtaactgatgggagagaaaga

SEQ ID NO: 985588 - DNA, 25 bp, Homo sapien
ttaaacagggagtaagagctttagc

SEQ ID NO: 985589 - DNA, 25 bp, Homo sapien
actctctggcccttagaccctaaat

SEQ ID NO: 985590 - DNA, 25 bp, Homo sapien
ccgggcgtctatttgaagttgcgag

SEQ ID NO: 985591 - DNA, 25 bp, Homo sapien
tgggaggaaaacttctaccagaaca

SEQ ID NO: 985592 - DNA, 25 bp, Homo sapien
ttcaagaacccacttccacactttc

SEQ ID NO: 985593 - DNA, 25 bp, Homo sapien
gagtagccaggaaaaagatgcccat

SEQ ID NO: 985594 - DNA, 25 bp, Homo sapien
agctttcttcaagaacccacttcca

SEQ ID NO: 985595 - DNA, 25 bp, Homo sapien
cctctttgtgttcttggagtagcca

SEQ ID NO: 985596 - DNA, 25 bp, Homo sapien
ttaacgtggattccccgggtctgca

SEQ ID NO: 985597 - DNA, 25 bp, Homo sapien
gattccccgggtctgcatgaattct

SEQ ID NO: 985598 - DNA, 25 bp, Homo sapien
attccccgggtctgcatgaattctg

SEQ ID NO: 985599 - DNA, 25 bp, Homo sapien
gtggattccccgggtctgcatgaat

SEQ ID NO: 985600 - DNA, 25 bp, Homo sapien
cggcgggatgggctaaactaaccat

SEQ ID NO: 985601 - DNA, 25 bp, Homo sapien
gtcacggcgggatgggctaaactaa

SEQ ID NO: 985602 - DNA, 25 bp, Homo sapien
attcatttggccatacacgctactg

SEQ ID NO: 985603 - DNA, 25 bp, Homo sapien
tacacgctactgaaggtcacggcgg

SEQ ID NO: 985604 - DNA, 25 bp, Homo sapien
ctaggtaactgtcgagttgaagtcc

SEQ ID NO: 985605 - DNA, 25 bp, Homo sapien
caaagtataggtttttcagcaagag

SEQ ID NO: 985606 - DNA, 25 bp, Homo sapien
tgaggaactctaacatcagctgctg

SEQ ID NO: 985607 - DNA, 25 bp, Homo sapien
tagatattgtcagaagtagaaagct

SEQ ID NO: 985608 - DNA, 25 bp, Homo sapien
ccacgtatagtacagagctatagtg

SEQ ID NO: 985609 - DNA, 25 bp, Homo sapien
tggtttgaatcctcgaactgttgcc

SEQ ID NO: 985610 - DNA, 25 bp, Homo sapien
aagctggttgtcacaaagatcctcc

SEQ ID NO: 985611 - DNA, 25 bp, Homo sapien
catttcaagctggttgtcacaaaga

SEQ ID NO: 985612 - DNA, 25 bp, Homo sapien
cctgtagccaatgggtagccacgcg

SEQ ID NO: 985613 - DNA, 25 bp, Homo sapien
ggctcctaagagagatggtgagaaa

SEQ ID NO: 985614 - DNA, 25 bp, Homo sapien
tctaaagtggcaccggaagtttcta

SEQ ID NO: 985615 - DNA, 25 bp, Homo sapien
tttttccaggaatgcccatggcaac

SEQ ID NO: 985616 - DNA, 25 bp, Homo sapien
cagaacttctttggggcactcttgt

SEQ ID NO: 985617 - DNA, 25 bp, Homo sapien
gatccaatgaatcaatgtggcaatc

SEQ ID NO: 985618 - DNA, 25 bp, Homo sapien
ggcaatcactgataatagtcctctc

SEQ ID NO: 985619 - DNA, 25 bp, Homo sapien
ctaaggttatatgatccaatgaatc

SEQ ID NO: 985620 - DNA, 25 bp, Homo sapien
tgaagacgctggtgaagaaccactg

SEQ ID NO: 985621 - DNA, 25 bp, Homo sapien
cacaggacatgacagagcaatatag

SEQ ID NO: 985622 - DNA, 25 bp, Homo sapien
gaacacgttcaacgccatggcaggg

SEQ ID NO: 985623 - DNA, 25 bp, Homo sapien
gaaccactggaagactaggatgagg

SEQ ID NO: 985624 - DNA, 25 bp, Homo sapien
acacagcttcgtttctccataccag

SEQ ID NO: 985625 - DNA, 25 bp, Homo sapien
tatagaaacacagcttcgtttctcc

SEQ ID NO: 985626 - DNA, 25 bp, Homo sapien
ttttaatcagactagtgaggatccg

SEQ ID NO: 985627 - DNA, 25 bp, Homo sapien
gaggatccgtttccctatagaaaca

SEQ ID NO: 985628 - DNA, 25 bp, Homo sapien
tgttcatcttcactaactggcaggc

SEQ ID NO: 985629 - DNA, 25 bp, Homo sapien
tcatgaatgttatggtatgcctgcg

SEQ ID NO: 985630 - DNA, 25 bp, Homo sapien
ggttaggtacattggactggaagca

SEQ ID NO: 985631 - DNA, 25 bp, Homo sapien
ttgaaaaagactgagttcacacggc

SEQ ID NO: 985632 - DNA, 25 bp, Homo sapien
atacatttaaaatgccagctggcca

SEQ ID NO: 985633 - DNA, 25 bp, Homo sapien
aaataaaagcaataagtgggataat

SEQ ID NO: 985634 - DNA, 25 bp, Homo sapien
gcaataagtgggataattattgaat

SEQ ID NO: 985635 - DNA, 25 bp, Homo sapien
atttaaaatgccagctggccatgca

SEQ ID NO: 985636 - DNA, 25 bp, Homo sapien
taatctccctgcatcgagctctgat

SEQ ID NO: 985637 - DNA, 25 bp, Homo sapien
tccatcaattctccgtgaagtctgg

SEQ ID NO: 985638 - DNA, 25 bp, Homo sapien
ctggcatgggaagataaagctctct

SEQ ID NO: 985639 - DNA, 25 bp, Homo sapien
tgaagtctgggtattaaaccagccc

SEQ ID NO: 985640 - DNA, 25 bp, Homo sapien
gataggattagtgggacagccttgc

SEQ ID NO: 985641 - DNA, 25 bp, Homo sapien
agatcataacagggagatgtctcat

SEQ ID NO: 985642 - DNA, 25 bp, Homo sapien
tcagagcatagtagagaaagtagcc

SEQ ID NO: 985643 - DNA, 25 bp, Homo sapien
acagccttgctgacacagatcataa

SEQ ID NO: 985644 - DNA, 25 bp, Homo sapien
tactggacttgatcaaatttagtca

SEQ ID NO: 985645 - DNA, 25 bp, Homo sapien
gcgatgaaggtgatactggacttga

SEQ ID NO: 985646 - DNA, 25 bp, Homo sapien
caggcgatgaaggtgatactggact

SEQ ID NO: 985647 - DNA, 25 bp, Homo sapien
gaaggtgatactggacttgatcaaa

SEQ ID NO: 985648 - DNA, 25 bp, Homo sapien
agaattcaattgatccaaatggccc

SEQ ID NO: 985649 - DNA, 25 bp, Homo sapien
gacatattagttagccacaagaaga

SEQ ID NO: 985650 - DNA, 25 bp, Homo sapien
gggctaaacaactctaactggcatt

SEQ ID NO: 985651 - DNA, 25 bp, Homo sapien
taatttcatggaggcaatatcctga

SEQ ID NO: 985652 - DNA, 25 bp, Homo sapien
ggcagaaggagttcgacccaacaat

SEQ ID NO: 985653 - DNA, 25 bp, Homo sapien
agatgcaagtctgtcgctcccaagc

SEQ ID NO: 985654 - DNA, 25 bp, Homo sapien
tgatgaggccgcattcctggagcgc

SEQ ID NO: 985655 - DNA, 25 bp, Homo sapien
agacgccaaaaacgccttcaggagg

SEQ ID NO: 985656 - DNA, 25 bp, Homo sapien
tcatgctagatttcagtgagcgcaa

SEQ ID NO: 985657 - DNA, 25 bp, Homo sapien
attgagaccatgagcaaagtgcacc

SEQ ID NO: 985658 - DNA, 25 bp, Homo sapien
caatggcaggcacacgagaagatgt

SEQ ID NO: 985659 - DNA, 25 bp, Homo sapien
tacaagaggctcatgaacacagcta

SEQ ID NO: 985660 - DNA, 25 bp, Homo sapien
gaccaaacttgcagtagtagcgagg

SEQ ID NO: 985661 - DNA, 25 bp, Homo sapien
aaaagcacgtaaaacccagcctgag

SEQ ID NO: 985662 - DNA, 25 bp, Homo sapien
gccgagctgctcctgaggtattaaa

SEQ ID NO: 985663 - DNA, 25 bp, Homo sapien
taaaagtgatgttcgtgtcatgcgg

SEQ ID NO: 985664 - DNA, 25 bp, Homo sapien
aatatgaaagctaacacctgccctc

SEQ ID NO: 985665 - DNA, 25 bp, Homo sapien
cccacaaaaagctatgtaaattcag

SEQ ID NO: 985666 - DNA, 25 bp, Homo sapien
caatggaaatcaaggtaaaccctgg

SEQ ID NO: 985667 - DNA, 25 bp, Homo sapien
tcttgaaaagaaccatcgtgaatgc

SEQ ID NO: 985668 - DNA, 25 bp, Homo sapien
cactggttgctgtgccagatgtgcc

SEQ ID NO: 985669 - DNA, 25 bp, Homo sapien
tgggctggctacgtgattcctgtgc

SEQ ID NO: 985670 - DNA, 25 bp, Homo sapien
aactgattatcagacagacgagacc

SEQ ID NO: 985671 - DNA, 25 bp, Homo sapien
cctgcaatgtggatttccccgggct

SEQ ID NO: 985672 - DNA, 25 bp, Homo sapien
tcctgttttataagctgttctacct

SEQ ID NO: 985673 - DNA, 25 bp, Homo sapien
gttttataagctgttctacctgatg

SEQ ID NO: 985674 - DNA, 25 bp, Homo sapien
ttataagctgttctacctgatgaag

SEQ ID NO: 985675 - DNA, 25 bp, Homo sapien
ttcctgttttataagctgttctacc

SEQ ID NO: 985676 - DNA, 25 bp, Homo sapien
caatttcacaacaaatggtgtccca

SEQ ID NO: 985677 - DNA, 25 bp, Homo sapien
aagcgcaaaacctacaaagccggca

SEQ ID NO: 985678 - DNA, 25 bp, Homo sapien
tatgagaacaaacttcccagcacca

SEQ ID NO: 985679 - DNA, 25 bp, Homo sapien
atagagagaggcctatggttccagc

SEQ ID NO: 985680 - DNA, 25 bp, Homo sapien
cactgtgggaggaacattgacagca

SEQ ID NO: 985681 - DNA, 25 bp, Homo sapien
gcagatgtcagctggccatagacca

SEQ ID NO: 985682 - DNA, 25 bp, Homo sapien
gacttctcagaatggcagtcccagt

SEQ ID NO: 985683 - DNA, 25 bp, Homo sapien
tagcgcattgcaggtttgtcagcca

SEQ ID NO: 985684 - DNA, 25 bp, Homo sapien
ttagtagtgatagtagcctgaacca

SEQ ID NO: 985685 - DNA, 25 bp, Homo sapien
cacaataggtcataaggtctcttcc

SEQ ID NO: 985686 - DNA, 25 bp, Homo sapien
tatcatctcgaccaagctcaaagcc

SEQ ID NO: 985687 - DNA, 25 bp, Homo sapien
gcctgatgacctataagaagaaagt

SEQ ID NO: 985688 - DNA, 25 bp, Homo sapien
gttgaggagtcatgacagtactttg

SEQ ID NO: 985689 - DNA, 25 bp, Homo sapien
agtaaagtgagcaaaatccagtgtt

SEQ ID NO: 985690 - DNA, 25 bp, Homo sapien
aaatccagtgttgaggagtcatgac

SEQ ID NO: 985691 - DNA, 25 bp, Homo sapien
aacaaagactacctttggctaaatg

SEQ ID NO: 985692 - DNA, 25 bp, Homo sapien
tcttggcaaaatgttctagtatagc

SEQ ID NO: 985693 - DNA, 25 bp, Homo sapien
tagtatagctggatacatacagtgg

SEQ ID NO: 985694 - DNA, 25 bp, Homo sapien
cattgatacctgtagtaagttgaca

SEQ ID NO: 985695 - DNA, 25 bp, Homo sapien
gaaagagtcctccagtgtcttggca

SEQ ID NO: 985696 - DNA, 25 bp, Homo sapien
ttcttatctgcagtattcctccaga

SEQ ID NO: 985697 - DNA, 25 bp, Homo sapien
cagaagagctaaccagggcagggct

SEQ ID NO: 985698 - DNA, 25 bp, Homo sapien
ttcctccagaagagctaaccagggc

SEQ ID NO: 985699 - DNA, 25 bp, Homo sapien
tttcttatctgcagtattcctccag

SEQ ID NO: 985700 - DNA, 25 bp, Homo sapien
ttttcactgataatggatcgctcca

SEQ ID NO: 985701 - DNA, 25 bp, Homo sapien
caatattgatagtgagaggtatgtc

SEQ ID NO: 985702 - DNA, 25 bp, Homo sapien
gactagcatgttctgtgaatctgcc

SEQ ID NO: 985703 - DNA, 25 bp, Homo sapien
ctttacgaggtaaaactgcaagctg

SEQ ID NO: 985704 - DNA, 25 bp, Homo sapien
tctagcggctggataccgggttctc

SEQ ID NO: 985705 - DNA, 25 bp, Homo sapien
tcctctgaggcaacagccgaagtgc

SEQ ID NO: 985706 - DNA, 25 bp, Homo sapien
aacgccttggtactgtcgggacgcg

SEQ ID NO: 985707 - DNA, 25 bp, Homo sapien
taggtgatctccgaaggctgtccga

SEQ ID NO: 985708 - DNA, 25 bp, Homo sapien
tagccaggctggtctcaaacttctg

SEQ ID NO: 985709 - DNA, 25 bp, Homo sapien
tcaaacgattctgcctcagccaccc

SEQ ID NO: 985710 - DNA, 25 bp, Homo sapien
agccaggctggtctcaaacttctga

SEQ ID NO: 985711 - DNA, 25 bp, Homo sapien
caaacgattctgcctcagccacccg

SEQ ID NO: 985712 - DNA, 25 bp, Homo sapien
ccatgacatcctgtatatgcctgca

SEQ ID NO: 985713 - DNA, 25 bp, Homo sapien
tatgcctgcatggttgcccttgcca

SEQ ID NO: 985714 - DNA, 25 bp, Homo sapien
tctgtctgtactgagaacgccttga

SEQ ID NO: 985715 - DNA, 25 bp, Homo sapien
tagtctaggccagaatttctcaacc

SEQ ID NO: 985716 - DNA, 25 bp, Homo sapien
caatccgtgcacaggcatgacagaa

SEQ ID NO: 985717 - DNA, 25 bp, Homo sapien
caaacatatgttattgccaggtgga

SEQ ID NO: 985718 - DNA, 25 bp, Homo sapien
caggtggagatcttatggacactca

SEQ ID NO: 985719 - DNA, 25 bp, Homo sapien
cacttattgcagtgcctactaggag

SEQ ID NO: 985720 - DNA, 25 bp, Homo sapien
tcaaggcaaaagttcccatctgggt

SEQ ID NO: 985721 - DNA, 25 bp, Homo sapien
tagactgcctgtcttcagactgaaa

SEQ ID NO: 985722 - DNA, 25 bp, Homo sapien
gactgaaacaccaagatctatgtga

SEQ ID NO: 985723 - DNA, 25 bp, Homo sapien
attcaaaggcacaggatacggtgca

SEQ ID NO: 985724 - DNA, 25 bp, Homo sapien
tgttcttatcttggccaagagtcaa

SEQ ID NO: 985725 - DNA, 25 bp, Homo sapien
gggagtttcagacagtaaacagcac

SEQ ID NO: 985726 - DNA, 25 bp, Homo sapien
tcagtaaacaaactggccatgcggg

SEQ ID NO: 985727 - DNA, 25 bp, Homo sapien
attccccagaggtaaaaatagagct

SEQ ID NO: 985728 - DNA, 25 bp, Homo sapien
tagatccagttcttactcagcccat

SEQ ID NO: 985729 - DNA, 25 bp, Homo sapien
ggcatcagaggctatctcccaagag

SEQ ID NO: 985730 - DNA, 25 bp, Homo sapien
aaattgatactgtgtgtccaaggcc

SEQ ID NO: 985731 - DNA, 25 bp, Homo sapien
tgatattacataccaaggaggccgt

SEQ ID NO: 985732 - DNA, 25 bp, Homo sapien
atctgcagtattgtagtagatgtaa

SEQ ID NO: 985733 - DNA, 25 bp, Homo sapien
cagctgatttcaaagtaggctccag

SEQ ID NO: 985734 - DNA, 25 bp, Homo sapien
tgccatcagtcaacctagtagctct

SEQ ID NO: 985735 - DNA, 25 bp, Homo sapien
tctttcaatagagagctgttcatag

SEQ ID NO: 985736 - DNA, 25 bp, Homo sapien
gtagtacagtagtcttccaaacagg

SEQ ID NO: 985737 - DNA, 25 bp, Homo sapien
cctcttctatggtgggttggcgaaa

SEQ ID NO: 985738 - DNA, 25 bp, Homo sapien
ttcagtgggcaactactgaggtcca

SEQ ID NO: 985739 - DNA, 25 bp, Homo sapien
gaggtccaatttcaccttgcaggtt

SEQ ID NO: 985740 - DNA, 25 bp, Homo sapien
tggagcatttggttgccctgcaacc

SEQ ID NO: 985741 - DNA, 25 bp, Homo sapien
cattggctgtacaaaggctttttag

SEQ ID NO: 985742 - DNA, 25 bp, Homo sapien
ttttgacaagtatctattcagagcc

SEQ ID NO: 985743 - DNA, 25 bp, Homo sapien
attagtgatgtagggcatttttaaa

SEQ ID NO: 985744 - DNA, 25 bp, Homo sapien
tcccatcccattagatgtctcatca

SEQ ID NO: 985745 - DNA, 25 bp, Homo sapien
tcaaatcttaaaacgttcacatacc

SEQ ID NO: 985746 - DNA, 25 bp, Homo sapien
gcaacatcaattcttgccttccact

SEQ ID NO: 985747 - DNA, 25 bp, Homo sapien
tctgcctttatgcccctgagtcaaa

SEQ ID NO: 985748 - DNA, 25 bp, Homo sapien
tatgcccctgagtcaaatcttaaaa

SEQ ID NO: 985749 - DNA, 25 bp, Homo sapien
tatagttctatggaacactagtccc

SEQ ID NO: 985750 - DNA, 25 bp, Homo sapien
tgttaagcaacctttgactatcctt

SEQ ID NO: 985751 - DNA, 25 bp, Homo sapien
cactagtccctattcctcctatgta

SEQ ID NO: 985752 - DNA, 25 bp, Homo sapien
aggtaattagcatcacctcaaacag

SEQ ID NO: 985753 - DNA, 25 bp, Homo sapien
tgatagggagtgcattgaatgaaca

SEQ ID NO: 985754 - DNA, 25 bp, Homo sapien
gtgtattgatatctagctctcctgg

SEQ ID NO: 985755 - DNA, 25 bp, Homo sapien
tggtttgattactattgccttcatt

SEQ ID NO: 985756 - DNA, 25 bp, Homo sapien
tctgtctcattggtctacatatctg

SEQ ID NO: 985757 - DNA, 25 bp, Homo sapien
tttaatctcaatttcatatactctg

SEQ ID NO: 985758 - DNA, 25 bp, Homo sapien
tttcatatactctgttctgatcttt

SEQ ID NO: 985759 - DNA, 25 bp, Homo sapien
ttttctagttccttgtgttacataa

SEQ ID NO: 985760 - DNA, 25 bp, Homo sapien
aatctcaatttcatatactctgttc

SEQ ID NO: 985761 - DNA, 25 bp, Homo sapien
gtagtattccctagattatttcttg

SEQ ID NO: 985762 - DNA, 25 bp, Homo sapien
tttgcttgtctatgacagactttat

SEQ ID NO: 985763 - DNA, 25 bp, Homo sapien
tctatactgataaggtttaattctt

SEQ ID NO: 985764 - DNA, 25 bp, Homo sapien
ttccttccaaatgtagtattcccta

SEQ ID NO: 985765 - DNA, 25 bp, Homo sapien
caccaggttctcatagagccaagaa

SEQ ID NO: 985766 - DNA, 25 bp, Homo sapien
gaagttggccgtgttccttatacca

SEQ ID NO: 985767 - DNA, 25 bp, Homo sapien
taatgaaggcttcagccgggcaata

SEQ ID NO: 985768 - DNA, 25 bp, Homo sapien
aaatgtcagctaccttttgtgcaga

SEQ ID NO: 985769 - DNA, 25 bp, Homo sapien
aaagccaactcctggattaatcgat

SEQ ID NO: 985770 - DNA, 25 bp, Homo sapien
cctaactttctgatatgggcattta

SEQ ID NO: 985771 - DNA, 25 bp, Homo sapien
tctgccagctttgaaggaggtttgc

SEQ ID NO: 985772 - DNA, 25 bp, Homo sapien
tattgtgctgtgatctaggagtgtg

SEQ ID NO: 985773 - DNA, 25 bp, Homo sapien
tcatcattaccaaatggaatgccaa

SEQ ID NO: 985774 - DNA, 25 bp, Homo sapien
tcattaccaaatggaatgccaagca

SEQ ID NO: 985775 - DNA, 25 bp, Homo sapien
atcattaccaaatggaatgccaagc

SEQ ID NO: 985776 - DNA, 25 bp, Homo sapien
catcattaccaaatggaatgccaag

SEQ ID NO: 985777 - DNA, 25 bp, Homo sapien
gctgcatttgtaattatgtgacctc

SEQ ID NO: 985778 - DNA, 25 bp, Homo sapien
acaagggtagcacttccaaaagctg

SEQ ID NO: 985779 - DNA, 25 bp, Homo sapien
cttgatccacaagggtagcacttcc

SEQ ID NO: 985780 - DNA, 25 bp, Homo sapien
tccacaagggtagcacttccaaaag

SEQ ID NO: 985781 - DNA, 25 bp, Homo sapien
gcctaacacactaagctccctgggt

SEQ ID NO: 985782 - DNA, 25 bp, Homo sapien
tctgcctgctgtctaagccgtttga

SEQ ID NO: 985783 - DNA, 25 bp, Homo sapien
accccagagccgtgaagtttctcaa

SEQ ID NO: 985784 - DNA, 25 bp, Homo sapien
gctggaatctgcttaagcctacaga

SEQ ID NO: 985785 - DNA, 25 bp, Homo sapien
gttagagtagctgctaactagaata

SEQ ID NO: 985786 - DNA, 25 bp, Homo sapien
cacagaattggttggaggatgagac

SEQ ID NO: 985787 - DNA, 25 bp, Homo sapien
tcgcaatgtatctccagcaatggca

SEQ ID NO: 985788 - DNA, 25 bp, Homo sapien
tgataaaaggttagagtagctgcta

SEQ ID NO: 985789 - DNA, 25 bp, Homo sapien
caagcagccttgagtcataggtcaa

SEQ ID NO: 985790 - DNA, 25 bp, Homo sapien
tacagctgggtggaactatgaagat

SEQ ID NO: 985791 - DNA, 25 bp, Homo sapien
ggagagcccactgcactgttaaaag

SEQ ID NO: 985792 - DNA, 25 bp, Homo sapien
gcaagtatgtcaggcagaagagtca

SEQ ID NO: 985793 - DNA, 25 bp, Homo sapien
cagataatgtaaacttaatggtatc

SEQ ID NO: 985794 - DNA, 25 bp, Homo sapien
ctgtaatgtgtcatgacagtaaaag

SEQ ID NO: 985795 - DNA, 25 bp, Homo sapien
tcaagtacatgggagatacatttct

SEQ ID NO: 985796 - DNA, 25 bp, Homo sapien
gtgtcaagtttagttccagaatatc

SEQ ID NO: 985797 - DNA, 25 bp, Homo sapien
tcagagagctgtttactaggcacga

SEQ ID NO: 985798 - DNA, 25 bp, Homo sapien
ttctgaaaagtcatgggccactggc

SEQ ID NO: 985799 - DNA, 25 bp, Homo sapien
tactaggcacgactgcgaaggcaag

SEQ ID NO: 985800 - DNA, 25 bp, Homo sapien
cagctgatagtgacatcagtcagaa

SEQ ID NO: 985801 - DNA, 25 bp, Homo sapien
cctcgctcatgtctgtataatctac

SEQ ID NO: 985802 - DNA, 25 bp, Homo sapien
gatgatgaaagtaaggccagtataa

SEQ ID NO: 985803 - DNA, 25 bp, Homo sapien
gttcagtatctgtgaccctccctcg

SEQ ID NO: 985804 - DNA, 25 bp, Homo sapien
catcaacatgtgtagctctggcctc

SEQ ID NO: 985805 - DNA, 25 bp, Homo sapien
atctcaggtctgagactcagtccat

SEQ ID NO: 985806 - DNA, 25 bp, Homo sapien
tcaggtctgagactcagtccatgag

SEQ ID NO: 985807 - DNA, 25 bp, Homo sapien
agactcagtccatgagatatttttt

SEQ ID NO: 985808 - DNA, 25 bp, Homo sapien
gagactcagtccatgagatattttt

SEQ ID NO: 985809 - DNA, 25 bp, Homo sapien
agagcagacacattgacccagtttg

SEQ ID NO: 985810 - DNA, 25 bp, Homo sapien
ggccccaagccctctatatgtgagt

SEQ ID NO: 985811 - DNA, 25 bp, Homo sapien
gactagtgagtgacagaacgacgac

SEQ ID NO: 985812 - DNA, 25 bp, Homo sapien
catgaggaacgtgacaactgatgca

SEQ ID NO: 985813 - DNA, 25 bp, Homo sapien
attaaaaagtctaggcagggcatgg

SEQ ID NO: 985814 - DNA, 25 bp, Homo sapien
gtgggtaaaggacataaacagacat

SEQ ID NO: 985815 - DNA, 25 bp, Homo sapien
gaatgaccattattaaaaagtctag

SEQ ID NO: 985816 - DNA, 25 bp, Homo sapien
gtaaaggacataaacagacattttc

SEQ ID NO: 985817 - DNA, 25 bp, Homo sapien
ttcttgcagtcccagacatctcaaa

SEQ ID NO: 985818 - DNA, 25 bp, Homo sapien
tatttaagatgtctatctccttgat

SEQ ID NO: 985819 - DNA, 25 bp, Homo sapien
gacattttgaatatgccatggtgag

SEQ ID NO: 985820 - DNA, 25 bp, Homo sapien
gagcatatggtgtatttccttcaat

SEQ ID NO: 985821 - DNA, 25 bp, Homo sapien
ccatataagaagtgtgtttcacctc

SEQ ID NO: 985822 - DNA, 25 bp, Homo sapien
tctttgcgtctggtgtagcagttgc

SEQ ID NO: 985823 - DNA, 25 bp, Homo sapien
ttgactttgattttggatgcctgca

SEQ ID NO: 985824 - DNA, 25 bp, Homo sapien
tctatgacttcttcggcatagggtc

SEQ ID NO: 985825 - DNA, 25 bp, Homo sapien
gggtttccaaccaaagatccatatg

SEQ ID NO: 985826 - DNA, 25 bp, Homo sapien
tttagggaaagaagcgaggactgac

SEQ ID NO: 985827 - DNA, 25 bp, Homo sapien
tgctgtcctaagatgtgtaaccagg

SEQ ID NO: 985828 - DNA, 25 bp, Homo sapien
gttcaacagaaagcatggatgggcc

SEQ ID NO: 985829 - DNA, 25 bp, Homo sapien
tgatggcgagcctcataagagctgg

SEQ ID NO: 985830 - DNA, 25 bp, Homo sapien
aaggtggctgatgcaatctccccga

SEQ ID NO: 985831 - DNA, 25 bp, Homo sapien
tcaaaacaaaggctcctggcgtctg

SEQ ID NO: 985832 - DNA, 25 bp, Homo sapien
ttcaagttccaagtcgcaccagatg

SEQ ID NO: 985833 - DNA, 25 bp, Homo sapien
gagtgtttaaacaaaggcatcccca

SEQ ID NO: 985834 - DNA, 25 bp, Homo sapien
caatggaggaggtcaaaccttcttt

SEQ ID NO: 985835 - DNA, 25 bp, Homo sapien
tacaaaatatgttcccgtcggcaat

SEQ ID NO: 985836 - DNA, 25 bp, Homo sapien
ggttaaaactccttatcatcccaga

SEQ ID NO: 985837 - DNA, 25 bp, Homo sapien
taggtcctttgaatggagctgccct

SEQ ID NO: 985838 - DNA, 25 bp, Homo sapien
tatcatggccccagtaccttgtgcc

SEQ ID NO: 985839 - DNA, 25 bp, Homo sapien
catttttggcatacacctaggtcct

SEQ ID NO: 985840 - DNA, 25 bp, Homo sapien
tgccaaagaagtcgctggtcaatct

SEQ ID NO: 985841 - DNA, 25 bp, Homo sapien
taaaagagcgagcacctcagtgtct

SEQ ID NO: 985842 - DNA, 25 bp, Homo sapien
gacccagtaatgagttcccagagca

SEQ ID NO: 985843 - DNA, 25 bp, Homo sapien
gacggttgcgcacaaacaaacgctg

SEQ ID NO: 985844 - DNA, 25 bp, Homo sapien
gcccagcccgaagcacataagttga

SEQ ID NO: 985845 - DNA, 25 bp, Homo sapien
catacagagggagtcaaatgggatc

SEQ ID NO: 985846 - DNA, 25 bp, Homo sapien
taacacagacaattgggactccaga

SEQ ID NO: 985847 - DNA, 25 bp, Homo sapien
tgctttatagctagctgcccggaga

SEQ ID NO: 985848 - DNA, 25 bp, Homo sapien
gagatcatgcggactaaactgtagc

SEQ ID NO: 985849 - DNA, 25 bp, Homo sapien
gatctcccggacgtatttcagcaca

SEQ ID NO: 985850 - DNA, 25 bp, Homo sapien
ctagctgaaaaagatctcccggacg

SEQ ID NO: 985851 - DNA, 25 bp, Homo sapien
cggacgtatttcagcacatcctctt

SEQ ID NO: 985852 - DNA, 25 bp, Homo sapien
ctcagggctcctgctacaggcagag

SEQ ID NO: 985853 - DNA, 25 bp, Homo sapien
ggagccagtgcctgtttcccactgt

SEQ ID NO: 985854 - DNA, 25 bp, Homo sapien
tgtttcccactgtcctcttcctcac

SEQ ID NO: 985855 - DNA, 25 bp, Homo sapien
ctggagccagtgcctgtttcccact

SEQ ID NO: 985856 - DNA, 25 bp, Homo sapien
cctgtttcccactgtcctcttcctc

SEQ ID NO: 985857 - DNA, 25 bp, Homo sapien
tctgggttatcagcccccgccaggg

SEQ ID NO: 985858 - DNA, 25 bp, Homo sapien
cagaacttgtgtgaggcgacacgga

SEQ ID NO: 985859 - DNA, 25 bp, Homo sapien
cgcaggccttttcctgtttgcggct

SEQ ID NO: 985860 - DNA, 25 bp, Homo sapien
cggctgctcgcaggccttttcctgt

SEQ ID NO: 985861 - DNA, 25 bp, Homo sapien
caggattcccagagcaacatcaact

SEQ ID NO: 985862 - DNA, 25 bp, Homo sapien
catcaactatctcagcctcattcat

SEQ ID NO: 985863 - DNA, 25 bp, Homo sapien
gattcccagagcaacatcaactatc

SEQ ID NO: 985864 - DNA, 25 bp, Homo sapien
aacatcaactatctcagcctcattc

SEQ ID NO: 985865 - DNA, 25 bp, Homo sapien
agtacacagtccttgtcgcagggag

SEQ ID NO: 985866 - DNA, 25 bp, Homo sapien
gtacacagtccttgtcgcagggagt

SEQ ID NO: 985867 - DNA, 25 bp, Homo sapien
cagtacacagtccttgtcgcaggga

SEQ ID NO: 985868 - DNA, 25 bp, Homo sapien
gcagtacacagtccttgtcgcaggg

SEQ ID NO: 985869 - DNA, 25 bp, Homo sapien
cccctgccttcctaccacgcaggag

SEQ ID NO: 985870 - DNA, 25 bp, Homo sapien
tgccttcctaccacgcaggaggtac

SEQ ID NO: 985871 - DNA, 25 bp, Homo sapien
gactctcaagtctcataagggcaaa

SEQ ID NO: 985872 - DNA, 25 bp, Homo sapien
cagactctcaagtctcataagggca

SEQ ID NO: 985873 - DNA, 25 bp, Homo sapien
gagctttctgacacggacacaattt

SEQ ID NO: 985874 - DNA, 25 bp, Homo sapien
cctccaccaactgccctacaaggat

SEQ ID NO: 985875 - DNA, 25 bp, Homo sapien
tttctgacacggacacaatttcctc

SEQ ID NO: 985876 - DNA, 25 bp, Homo sapien
tgaggagctttctgacacggacaca

SEQ ID NO: 985877 - DNA, 25 bp, Homo sapien
gacctggcccaggtcatggaggccc

SEQ ID NO: 985878 - DNA, 25 bp, Homo sapien
cagactgaaacacccgcccatcttg

SEQ ID NO: 985879 - DNA, 25 bp, Homo sapien
tgaaacacccgcccatcttgctgtt

SEQ ID NO: 985880 - DNA, 25 bp, Homo sapien
cacccgcccatcttgctgttctgcc

SEQ ID NO: 985881 - DNA, 25 bp, Homo sapien
ccattctcatcctcttgggggcctt

SEQ ID NO: 985882 - DNA, 25 bp, Homo sapien
tgccacattctttgtagccacctgg

SEQ ID NO: 985883 - DNA, 25 bp, Homo sapien
tggtgccacattctttgtagccacc

SEQ ID NO: 985884 - DNA, 25 bp, Homo sapien
gtgccacattctttgtagccacctg

SEQ ID NO: 985885 - DNA, 25 bp, Homo sapien
gccacattctttgtagccacctggg

SEQ ID NO: 985886 - DNA, 25 bp, Homo sapien
cctcgttttagtctcggattgtaag

SEQ ID NO: 985887 - DNA, 25 bp, Homo sapien
ttagtctcggattgtaaggtttcca

SEQ ID NO: 985888 - DNA, 25 bp, Homo sapien
tcggattgtaaggtttccatctctg

SEQ ID NO: 985889 - DNA, 25 bp, Homo sapien
tctcggattgtaaggtttccatctc

SEQ ID NO: 985890 - DNA, 25 bp, Homo sapien
aagagtcagggcccaagcttaatga

SEQ ID NO: 985891 - DNA, 25 bp, Homo sapien
agagtcagggcccaagcttaatgac

SEQ ID NO: 985892 - DNA, 25 bp, Homo sapien
ggtaaatctcgttctctcgtcacac

SEQ ID NO: 985893 - DNA, 25 bp, Homo sapien
caggaaggtaaatctcgttctctcg

SEQ ID NO: 985894 - DNA, 25 bp, Homo sapien
attcaggaaggtaaatctcgttctc

SEQ ID NO: 985895 - DNA, 25 bp, Homo sapien
aaggtaaatctcgttctctcgtcac

SEQ ID NO: 985896 - DNA, 25 bp, Homo sapien
tgtcctcagtgggagttgatctttg

SEQ ID NO: 985897 - DNA, 25 bp, Homo sapien
gtcctcagtgggagttgatctttga

SEQ ID NO: 985898 - DNA, 25 bp, Homo sapien
ctcagtgggagttgatctttgattc

SEQ ID NO: 985899 - DNA, 25 bp, Homo sapien
tcctcagtgggagttgatctttgat

SEQ ID NO: 985900 - DNA, 25 bp, Homo sapien
gactcagacggccattcacaggcat

SEQ ID NO: 985901 - DNA, 25 bp, Homo sapien
ggtgaattcccatacctccagtcat

SEQ ID NO: 985902 - DNA, 25 bp, Homo sapien
caaagaacaataaagtccggtgaat

SEQ ID NO: 985903 - DNA, 25 bp, Homo sapien
cacagttactggtcggtgcagggca

SEQ ID NO: 985904 - DNA, 25 bp, Homo sapien
tggcctctccctcatctggccaact

SEQ ID NO: 985905 - DNA, 25 bp, Homo sapien
cttaatggcctctccctcatctggc

SEQ ID NO: 985906 - DNA, 25 bp, Homo sapien
aatggcctctccctcatctggccaa

SEQ ID NO: 985907 - DNA, 25 bp, Homo sapien
ctcttaatggcctctccctcatctg

SEQ ID NO: 985908 - DNA, 25 bp, Homo sapien
tctgtagattctgaagcccacgcca

SEQ ID NO: 985909 - DNA, 25 bp, Homo sapien
gcagcaacttccagaagccgggtct

SEQ ID NO: 985910 - DNA, 25 bp, Homo sapien
tcaagccagaagctcctgaagcgga

SEQ ID NO: 985911 - DNA, 25 bp, Homo sapien
aaatcagctggttggattcgcagcc

SEQ ID NO: 985912 - DNA, 25 bp, Homo sapien
ctctgcgggccggtacccgccgctg

SEQ ID NO: 985913 - DNA, 25 bp, Homo sapien
ggccccgcgggaacgcgatgtgctg

SEQ ID NO: 985914 - DNA, 25 bp, Homo sapien
gtgctgccagttcacagcccgccct

SEQ ID NO: 985915 - DNA, 25 bp, Homo sapien
gggaacgcgatgtgctgccagttca

SEQ ID NO: 985916 - DNA, 25 bp, Homo sapien
caacggctccttccgactggagcgg

SEQ ID NO: 985917 - DNA, 25 bp, Homo sapien
ttcttagcttccagagcggagccgg

SEQ ID NO: 985918 - DNA, 25 bp, Homo sapien
aagcggttgtgggacccacgcctca

SEQ ID NO: 985919 - DNA, 25 bp, Homo sapien
agccgggaggcaaattccaagcggt

SEQ ID NO: 985920 - DNA, 25 bp, Homo sapien
catgctggcagtgctaatgccgccg

SEQ ID NO: 985921 - DNA, 25 bp, Homo sapien
cgccaccggcttgaggagggtgaaa

SEQ ID NO: 985922 - DNA, 25 bp, Homo sapien
cggcctcgggacacttccggtcttg

SEQ ID NO: 985923 - DNA, 25 bp, Homo sapien
cggaactttaagccctgccgtctcg

SEQ ID NO: 985924 - DNA, 25 bp, Homo sapien
gtttctctctgaccatcggtgcatg

SEQ ID NO: 985925 - DNA, 25 bp, Homo sapien
aggcccaaaactggacctgggcctg

SEQ ID NO: 985926 - DNA, 25 bp, Homo sapien
gacattctatagaagaacattgtga

SEQ ID NO: 985927 - DNA, 25 bp, Homo sapien
agcgccaggcccaaaactggacctg

SEQ ID NO: 985928 - DNA, 25 bp, Homo sapien
catcccaaagcggatgtgtggtggt

SEQ ID NO: 985929 - DNA, 25 bp, Homo sapien
tctgccgagtaactagagtggcact

SEQ ID NO: 985930 - DNA, 25 bp, Homo sapien
catcataaagcgagaaaagcccctt

SEQ ID NO: 985931 - DNA, 25 bp, Homo sapien
cactacgtgtctctcatggcaggga

SEQ ID NO: 985932 - DNA, 25 bp, Homo sapien
ccagctcagtgataaggtcgcccct

SEQ ID NO: 985933 - DNA, 25 bp, Homo sapien
tcagctcagctacagatcggctcag

SEQ ID NO: 985934 - DNA, 25 bp, Homo sapien
tcacctagtgggaagatatgcctct

SEQ ID NO: 985935 - DNA, 25 bp, Homo sapien
ttatttgaggacgagcgctcacccg

SEQ ID NO: 985936 - DNA, 25 bp, Homo sapien
gcatatgtcacctactccacgtggg

SEQ ID NO: 985937 - DNA, 25 bp, Homo sapien
gcttagcccgtcttgggaaacagca

SEQ ID NO: 985938 - DNA, 25 bp, Homo sapien
tttcagataagaaacgcttagcccg

SEQ ID NO: 985939 - DNA, 25 bp, Homo sapien
aaagtgacacacatcctagaaagag

SEQ ID NO: 985940 - DNA, 25 bp, Homo sapien
cacagtccatggcagtgctccagtc

SEQ ID NO: 985941 - DNA, 25 bp, Homo sapien
tcttgccatccatggaggcggtgag

SEQ ID NO: 985942 - DNA, 25 bp, Homo sapien
agtgctccagtccacggtgaccaca

SEQ ID NO: 985943 - DNA, 25 bp, Homo sapien
tcagcttgatcttgccatccatgga

SEQ ID NO: 985944 - DNA, 25 bp, Homo sapien
tagccagcgatcctttgtcaaaggc

SEQ ID NO: 985945 - DNA, 25 bp, Homo sapien
tagtgcagaaacatggctctcctct

SEQ ID NO: 985946 - DNA, 25 bp, Homo sapien
cagcactagctagccagcgatcctt

SEQ ID NO: 985947 - DNA, 25 bp, Homo sapien
gggagccttcagttagtgcagaaac

SEQ ID NO: 985948 - DNA, 25 bp, Homo sapien
cagggaggaacccctgcccaccaca

SEQ ID NO: 985949 - DNA, 25 bp, Homo sapien
cccctgcccaccacaataccactac

SEQ ID NO: 985950 - DNA, 25 bp, Homo sapien
gaacccctgcccaccacaataccac

SEQ ID NO: 985951 - DNA, 25 bp, Homo sapien
tccagggaggaacccctgcccacca

SEQ ID NO: 985952 - DNA, 25 bp, Homo sapien
agtcaaaagcgaagagtcggcccct

SEQ ID NO: 985953 - DNA, 25 bp, Homo sapien
cgccgcctgtggcagaacatgtcag

SEQ ID NO: 985954 - DNA, 25 bp, Homo sapien
gacttgaacctgcttgtagccgctg

SEQ ID NO: 985955 - DNA, 25 bp, Homo sapien
gggaggctgtactcggataccttga

SEQ ID NO: 985956 - DNA, 25 bp, Homo sapien
cctggcctgaccctaggagaggaaa

SEQ ID NO: 985957 - DNA, 25 bp, Homo sapien
aaagggacagcaagtggctttgcct

SEQ ID NO: 985958 - DNA, 25 bp, Homo sapien
gccacagtgctgacatccttgaaaa

SEQ ID NO: 985959 - DNA, 25 bp, Homo sapien
ggtgagaggtctacaggtcctatct

SEQ ID NO: 985960 - DNA, 25 bp, Homo sapien
cgtcctcgccgatgctgtacacggt

SEQ ID NO: 985961 - DNA, 25 bp, Homo sapien
agctcatcgcgcactcatgctgctg

SEQ ID NO: 985962 - DNA, 25 bp, Homo sapien
tcatcatagctgaactccacagagt

SEQ ID NO: 985963 - DNA, 25 bp, Homo sapien
cagagtagacctccccgtagtgggc

SEQ ID NO: 985964 - DNA, 25 bp, Homo sapien
aggcaatgagacacggccactcaca

SEQ ID NO: 985965 - DNA, 25 bp, Homo sapien
gaggcaatgagacacggccactcac

SEQ ID NO: 985966 - DNA, 25 bp, Homo sapien
ggcaatgagacacggccactcacat

SEQ ID NO: 985967 - DNA, 25 bp, Homo sapien
caatgagacacggccactcacatcc

SEQ ID NO: 985968 - DNA, 25 bp, Homo sapien
tcaccctctactcaggctgacagct

SEQ ID NO: 985969 - DNA, 25 bp, Homo sapien
caggacccaatgagcgccataaagc

SEQ ID NO: 985970 - DNA, 25 bp, Homo sapien
aggacccaatgagcgccataaagct

SEQ ID NO: 985971 - DNA, 25 bp, Homo sapien
cctcaccctctactcaggctgacag

SEQ ID NO: 985972 - DNA, 25 bp, Homo sapien
aacagccggatgacgccatcagctg

SEQ ID NO: 985973 - DNA, 25 bp, Homo sapien
agcaggttcccgttgtgattgaagg

SEQ ID NO: 985974 - DNA, 25 bp, Homo sapien
tgatagcaatgggttctggatccag

SEQ ID NO: 985975 - DNA, 25 bp, Homo sapien
tgaaggctgtacagttgatagcaat

SEQ ID NO: 985976 - DNA, 25 bp, Homo sapien
acctgggaagtgaggctcggagctg

SEQ ID NO: 985977 - DNA, 25 bp, Homo sapien
ttcatggttttcgtgtcccacagca

SEQ ID NO: 985978 - DNA, 25 bp, Homo sapien
tgctgccgatgtctggtgctgagaa

SEQ ID NO: 985979 - DNA, 25 bp, Homo sapien
caggaacctggttcatgcccttgct

SEQ ID NO: 985980 - DNA, 25 bp, Homo sapien
acacatgggcctgggtcagaccctc

SEQ ID NO: 985981 - DNA, 25 bp, Homo sapien
tctgcctgcccacagagggagggtg

SEQ ID NO: 985982 - DNA, 25 bp, Homo sapien
gggtgcactttggtcctgaggctgg

SEQ ID NO: 985983 - DNA, 25 bp, Homo sapien
gggcctgggtcagaccctctgcctg

SEQ ID NO: 985984 - DNA, 25 bp, Homo sapien
gcattaggcttgggaaaggaccagc

SEQ ID NO: 985985 - DNA, 25 bp, Homo sapien
atggggcattaggcttgggaaagga

SEQ ID NO: 985986 - DNA, 25 bp, Homo sapien
gggcattaggcttgggaaaggacca

SEQ ID NO: 985987 - DNA, 25 bp, Homo sapien
cattaggcttgggaaaggaccagcc

SEQ ID NO: 985988 - DNA, 25 bp, Homo sapien
tgtcgttgatattgatttcacagag

SEQ ID NO: 985989 - DNA, 25 bp, Homo sapien
gtgtcatagagacgcactgttccca

SEQ ID NO: 985990 - DNA, 25 bp, Homo sapien
gcttccgtgtcatagagacgcactg

SEQ ID NO: 985991 - DNA, 25 bp, Homo sapien
tcttcttggcttccgtgtcatagag

SEQ ID NO: 985992 - DNA, 25 bp, Homo sapien
ctacaagtcctatctcaaatatcaa

SEQ ID NO: 985993 - DNA, 25 bp, Homo sapien
caataagacccatgggaaccacaaa

SEQ ID NO: 985994 - DNA, 25 bp, Homo sapien
cagagggaagaacactgtactattc

SEQ ID NO: 985995 - DNA, 25 bp, Homo sapien
ttcctggggacaataagacccatgg

SEQ ID NO: 985996 - DNA, 25 bp, Homo sapien
cagcggaagccacttcccgtggggc

SEQ ID NO: 985997 - DNA, 25 bp, Homo sapien
acgggagggcgcccactgaaactgc

SEQ ID NO: 985998 - DNA, 25 bp, Homo sapien
ctggcacgggagggcgcccactgaa

SEQ ID NO: 985999 - DNA, 25 bp, Homo sapien
cgggagggcgcccactgaaactgca

SEQ ID NO: 986000 - DNA, 25 bp, Homo sapien
gcacgggagggcgcccactgaaact

SEQ ID NO: 986001 - DNA, 25 bp, Homo sapien
tctacgtctaagctggcgactctcc

SEQ ID NO: 986002 - DNA, 25 bp, Homo sapien
tggcgactctcctcccagagcaatc

SEQ ID NO: 986003 - DNA, 25 bp, Homo sapien
tgtcccgtttggtggcccattccaa

SEQ ID NO: 986004 - DNA, 25 bp, Homo sapien
ggaccacactttgatgaccccatct

SEQ ID NO: 986005 - DNA, 25 bp, Homo sapien
tgcatgatggatgagtggtgttccc

SEQ ID NO: 986006 - DNA, 25 bp, Homo sapien
gatgagtggtgttccccgtactcct

SEQ ID NO: 986007 - DNA, 25 bp, Homo sapien
ccgaggatgcccgagtcagtggctc

SEQ ID NO: 986008 - DNA, 25 bp, Homo sapien
gcctgccgaggatgcccgagtcagt

SEQ ID NO: 986009 - DNA, 25 bp, Homo sapien
tgacctgcgagggtagtgctcagct

SEQ ID NO: 986010 - DNA, 25 bp, Homo sapien
ccacaccagggtgtacaccgcaggg

SEQ ID NO: 986011 - DNA, 25 bp, Homo sapien
gggtctaggcctaggctgcagcatt

SEQ ID NO: 986012 - DNA, 25 bp, Homo sapien
gggttctcggtaattacagagtgga

SEQ ID NO: 986013 - DNA, 25 bp, Homo sapien
gcagggcctgccctcctgacagccc

SEQ ID NO: 986014 - DNA, 25 bp, Homo sapien
gggctgtggcctctctgtgacacag

SEQ ID NO: 986015 - DNA, 25 bp, Homo sapien
ccctgctgaaggagagggggctgtg

SEQ ID NO: 986016 - DNA, 25 bp, Homo sapien
ggagactttgctccacacaggccct

SEQ ID NO: 986017 - DNA, 25 bp, Homo sapien
aggatgcgtggtgcaggccacacac

SEQ ID NO: 986018 - DNA, 25 bp, Homo sapien
tgccttgacaacaggccaggcggag

SEQ ID NO: 986019 - DNA, 25 bp, Homo sapien
agactgaaagagaagccaaatccct

SEQ ID NO: 986020 - DNA, 25 bp, Homo sapien
cacaccgcgctgagtattttacaga

SEQ ID NO: 986021 - DNA, 25 bp, Homo sapien
catcttgaatcctgaaatgccagaa

SEQ ID NO: 986022 - DNA, 25 bp, Homo sapien
gtgacttgggcaagagaatcagtaa

SEQ ID NO: 986023 - DNA, 25 bp, Homo sapien
ggcaaatagccccaattatgagata

SEQ ID NO: 986024 - DNA, 25 bp, Homo sapien
tgggtggcccccaagtgcatcttga

SEQ ID NO: 986025 - DNA, 25 bp, Homo sapien
agcagctgtaatgccacaaagagca

SEQ ID NO: 986026 - DNA, 25 bp, Homo sapien
gccatcagtcgggagtatctggcag

SEQ ID NO: 986027 - DNA, 25 bp, Homo sapien
actttgccatcagtcgggagtatct

SEQ ID NO: 986028 - DNA, 25 bp, Homo sapien
aagcagctgtaatgccacaaagagc

SEQ ID NO: 986029 - DNA, 25 bp, Homo sapien
cctcagtgcagcaatacaggcagct

SEQ ID NO: 986030 - DNA, 25 bp, Homo sapien
cctacttagggaaatgctgcatggg

SEQ ID NO: 986031 - DNA, 25 bp, Homo sapien
tgactgggtgaaaccgagggaacca

SEQ ID NO: 986032 - DNA, 25 bp, Homo sapien
gaaggatgagtatgcaaaggttccc

SEQ ID NO: 986033 - DNA, 25 bp, Homo sapien
tcagtagctgcatgagtgtccccag

SEQ ID NO: 986034 - DNA, 25 bp, Homo sapien
caggggtgttcaggacaaccccata

SEQ ID NO: 986035 - DNA, 25 bp, Homo sapien
agtagctgcatgagtgtccccaggg

SEQ ID NO: 986036 - DNA, 25 bp, Homo sapien
tgtccccaggggtgttcaggacaac

SEQ ID NO: 986037 - DNA, 25 bp, Homo sapien
gtggttgtggagaaaagctccttcc

SEQ ID NO: 986038 - DNA, 25 bp, Homo sapien
ccatccttggctccggacgtcgggt

SEQ ID NO: 986039 - DNA, 25 bp, Homo sapien
tgtgaccaaccggactccccagtgg

SEQ ID NO: 986040 - DNA, 25 bp, Homo sapien
gctgccggtgctgtgaccaaccgga

SEQ ID NO: 986041 - DNA, 25 bp, Homo sapien
tctcatcctgcagaaccatcacttt

SEQ ID NO: 986042 - DNA, 25 bp, Homo sapien
ttctcatcctgcagaaccatcactt

SEQ ID NO: 986043 - DNA, 25 bp, Homo sapien
atctagattctcatcctgcagaacc

SEQ ID NO: 986044 - DNA, 25 bp, Homo sapien
ctaatctagattctcatcctgcaga

SEQ ID NO: 986045 - DNA, 25 bp, Homo sapien
gactctttcttggccgagctctgag

SEQ ID NO: 986046 - DNA, 25 bp, Homo sapien
cctgagcaggcgacaaccttgaggg

SEQ ID NO: 986047 - DNA, 25 bp, Homo sapien
tttcttggccgagctctgaggttga

SEQ ID NO: 986048 - DNA, 25 bp, Homo sapien
gagggccctgagcaggcgacaacct

SEQ ID NO: 986049 - DNA, 25 bp, Homo sapien
aggacaggaagcccacacgaagtga

SEQ ID NO: 986050 - DNA, 25 bp, Homo sapien
ggaagcccacacgaagtgactggga

SEQ ID NO: 986051 - DNA, 25 bp, Homo sapien
gcccacacgaagtgactgggagagg

SEQ ID NO: 986052 - DNA, 25 bp, Homo sapien
aagcccacacgaagtgactgggaga

SEQ ID NO: 986053 - DNA, 25 bp, Homo sapien
caagaacatagacctcccgggctat

SEQ ID NO: 986054 - DNA, 25 bp, Homo sapien
taaggtggtattatccttggcatca

SEQ ID NO: 986055 - DNA, 25 bp, Homo sapien
ttacaagggtgaagtctgcggctct

SEQ ID NO: 986056 - DNA, 25 bp, Homo sapien
gatgacgttaagtgaccaggcctgg

SEQ ID NO: 986057 - DNA, 25 bp, Homo sapien
gaggaatgcatccaacctgtggtta

SEQ ID NO: 986058 - DNA, 25 bp, Homo sapien
aaagaactggcaccaccactagagc

SEQ ID NO: 986059 - DNA, 25 bp, Homo sapien
tttaaaccgtcagagaggtgcatgc

SEQ ID NO: 986060 - DNA, 25 bp, Homo sapien
tacttggctatgtggaggtctggaa

SEQ ID NO: 986061 - DNA, 25 bp, Homo sapien
ttcttcagtcggtggatttcagctt

SEQ ID NO: 986062 - DNA, 25 bp, Homo sapien
cccaggcggtccatgttggagacat

SEQ ID NO: 986063 - DNA, 25 bp, Homo sapien
ttggagacataaggaggcaatttgt

SEQ ID NO: 986064 - DNA, 25 bp, Homo sapien
tttgtgttggaccaaggcctcttcc

SEQ ID NO: 986065 - DNA, 25 bp, Homo sapien
cctctgcggaggaagatttctagac

SEQ ID NO: 986066 - DNA, 25 bp, Homo sapien
tccaagcccactggtctgagtgcca

SEQ ID NO: 986067 - DNA, 25 bp, Homo sapien
agtgccactcgcctcagcgtcaagg

SEQ ID NO: 986068 - DNA, 25 bp, Homo sapien
gatttctagacacatcgcatccaag

SEQ ID NO: 986069 - DNA, 25 bp, Homo sapien
tttctggtgactcatttccatctga

SEQ ID NO: 986070 - DNA, 25 bp, Homo sapien
actttctggtgactcatttccatct

SEQ ID NO: 986071 - DNA, 25 bp, Homo sapien
atccccaatactgactttctggtga

SEQ ID NO: 986072 - DNA, 25 bp, Homo sapien
ccccaatactgactttctggtgact

SEQ ID NO: 986073 - DNA, 25 bp, Homo sapien
ggttagtcctctgacactccgcatc

SEQ ID NO: 986074 - DNA, 25 bp, Homo sapien
ttcttcttgaacctggttagtcctc

SEQ ID NO: 986075 - DNA, 25 bp, Homo sapien
gcatcaaagttcaggatcacaggga

SEQ ID NO: 986076 - DNA, 25 bp, Homo sapien
tgacactccgcatcaaagttcagga

SEQ ID NO: 986077 - DNA, 25 bp, Homo sapien
cacaatgaaggtgtcagcccactgt

SEQ ID NO: 986078 - DNA, 25 bp, Homo sapien
ggaagttgtgcagggacacaatgaa

SEQ ID NO: 986079 - DNA, 25 bp, Homo sapien
gaagggcaggacaaaccaatccttc

SEQ ID NO: 986080 - DNA, 25 bp, Homo sapien
cactgtcgagaaaagtaggtagcaa

SEQ ID NO: 986081 - DNA, 25 bp, Homo sapien
gacaagataaaatcgaaacaggctg

SEQ ID NO: 986082 - DNA, 25 bp, Homo sapien
atatatcctccaagcggctgaagag

SEQ ID NO: 986083 - DNA, 25 bp, Homo sapien
gaagagccgacgctccaagtagctc

SEQ ID NO: 986084 - DNA, 25 bp, Homo sapien
tccaataatcccgaagggcagccaa

SEQ ID NO: 986085 - DNA, 25 bp, Homo sapien
cccggaccagctcgtcagtgcgctc

SEQ ID NO: 986086 - DNA, 25 bp, Homo sapien
tccagctgccgcagtgtgtgcgtga

SEQ ID NO: 986087 - DNA, 25 bp, Homo sapien
tccttgtccgccttgatctcggcgt

SEQ ID NO: 986088 - DNA, 25 bp, Homo sapien
cgtgaacccgcggaagagcaggtac

SEQ ID NO: 986089 - DNA, 25 bp, Homo sapien
cagcgctagcgtctttaggggtggt

SEQ ID NO: 986090 - DNA, 25 bp, Homo sapien
gcagcgctagcgtctttaggggtgg

SEQ ID NO: 986091 - DNA, 25 bp, Homo sapien
gcgctagcgtctttaggggtggtgc

SEQ ID NO: 986092 - DNA, 25 bp, Homo sapien
agcgctagcgtctttaggggtggtg

SEQ ID NO: 986093 - DNA, 25 bp, Homo sapien
tcttgactgtggttatagacgcaca

SEQ ID NO: 986094 - DNA, 25 bp, Homo sapien
aaaagggcaacacaaaggatccttg

SEQ ID NO: 986095 - DNA, 25 bp, Homo sapien
gacgcacaagcctaacatgataaat

SEQ ID NO: 986096 - DNA, 25 bp, Homo sapien
taccatacaacccagtaatgacact

SEQ ID NO: 986097 - DNA, 25 bp, Homo sapien
atggtgcatgctggtatgaattctc

SEQ ID NO: 986098 - DNA, 25 bp, Homo sapien
catggtgcatgctggtatgaattct

SEQ ID NO: 986099 - DNA, 25 bp, Homo sapien
ttccgacacatcattgtcgtcctcc

SEQ ID NO: 986100 - DNA, 25 bp, Homo sapien
caggcaagatggaggccacggctcc

SEQ ID NO: 986101 - DNA, 25 bp, Homo sapien
gcaggcaagatggaggccacggctc

SEQ ID NO: 986102 - DNA, 25 bp, Homo sapien
tattccaagcctcctaagaaaagct

SEQ ID NO: 986103 - DNA, 25 bp, Homo sapien
tgttgcacattattctttagagaaa

SEQ ID NO: 986104 - DNA, 25 bp, Homo sapien
aaaggaaccatggtacacccaggtg

SEQ ID NO: 986105 - DNA, 25 bp, Homo sapien
tctttcttggaggatacatatgaca

SEQ ID NO: 986106 - DNA, 25 bp, Homo sapien
gatctggtgcctaattcagtgggta

SEQ ID NO: 986107 - DNA, 25 bp, Homo sapien
tggtcctaggattgtgtcattgccc

SEQ ID NO: 986108 - DNA, 25 bp, Homo sapien
cctggggatgacactatctgtggca

SEQ ID NO: 986109 - DNA, 25 bp, Homo sapien
gcaaaggggaaacctgtatatcctc

SEQ ID NO: 986110 - DNA, 25 bp, Homo sapien
caatccttgggtgacagtcccctgg

SEQ ID NO: 986111 - DNA, 25 bp, Homo sapien
caataggctaaggtataacttgccc

SEQ ID NO: 986112 - DNA, 25 bp, Homo sapien
taaaaatagtcaagacacctgttca

SEQ ID NO: 986113 - DNA, 25 bp, Homo sapien
cacagtgaatccttatgtggagccc

SEQ ID NO: 986114 - DNA, 25 bp, Homo sapien
tgcttgaaactgcacacgccgaagt

SEQ ID NO: 986115 - DNA, 25 bp, Homo sapien
ggcattggtccaatgcaccccagga

SEQ ID NO: 986116 - DNA, 25 bp, Homo sapien
ccaacacagagggtcggaataaaca

SEQ ID NO: 986117 - DNA, 25 bp, Homo sapien
aataaacatccctgcatgtgtgtgc

SEQ ID NO: 986118 - DNA, 25 bp, Homo sapien
gagaaatgctcccatagcatatccc

SEQ ID NO: 986119 - DNA, 25 bp, Homo sapien
tatcccaaagccaggtcgtaagccc

SEQ ID NO: 986120 - DNA, 25 bp, Homo sapien
atgctcccatagcatatcccaaagc

SEQ ID NO: 986121 - DNA, 25 bp, Homo sapien
atatcccaaagccaggtcgtaagcc

SEQ ID NO: 986122 - DNA, 25 bp, Homo sapien
aggctatttgaaggttttattgaag

SEQ ID NO: 986123 - DNA, 25 bp, Homo sapien
aaggtcactcggcatgaaaggctat

SEQ ID NO: 986124 - DNA, 25 bp, Homo sapien
ggtcactcggcatgaaaggctattt

SEQ ID NO: 986125 - DNA, 25 bp, Homo sapien
ctcggcatgaaaggctatttgaagg

SEQ ID NO: 986126 - DNA, 25 bp, Homo sapien
ggtcagcagcatctgaacaacctgg

SEQ ID NO: 986127 - DNA, 25 bp, Homo sapien
ctggagtggagacaaaagcgacaca

SEQ ID NO: 986128 - DNA, 25 bp, Homo sapien
gagtggagacaaaagcgacacatcc

SEQ ID NO: 986129 - DNA, 25 bp, Homo sapien
aagcgacacatccatggggaccggg

SEQ ID NO: 986130 - DNA, 25 bp, Homo sapien
aaagcgacacatccatggggaccgg

SEQ ID NO: 986131 - DNA, 25 bp, Homo sapien
ctggagcatctcggggtttttgctc

SEQ ID NO: 986132 - DNA, 25 bp, Homo sapien
ggagcatctcggggtttttgctcac

SEQ ID NO: 986133 - DNA, 25 bp, Homo sapien
tggagcatctcggggtttttgctca

SEQ ID NO: 986134 - DNA, 25 bp, Homo sapien
cacagtagatggagaagccaaaggc

SEQ ID NO: 986135 - DNA, 25 bp, Homo sapien
gagcccacagtagatggagaagcca

SEQ ID NO: 986136 - DNA, 25 bp, Homo sapien
agtagatggagaagccaaaggcgaa

SEQ ID NO: 986137 - DNA, 25 bp, Homo sapien
ccacagtagatggagaagccaaagg

SEQ ID NO: 986138 - DNA, 25 bp, Homo sapien
ctgcagattggagatccccacggca

SEQ ID NO: 986139 - DNA, 25 bp, Homo sapien
attggagatccccacggcagtgatg

SEQ ID NO: 986140 - DNA, 25 bp, Homo sapien
cagattggagatccccacggcagtg

SEQ ID NO: 986141 - DNA, 25 bp, Homo sapien
gcagattggagatccccacggcagt

SEQ ID NO: 986142 - DNA, 25 bp, Homo sapien
tgcctccgatcacggggtggggatg

SEQ ID NO: 986143 - DNA, 25 bp, Homo sapien
ggggacatgcctccgatcacggggt

SEQ ID NO: 986144 - DNA, 25 bp, Homo sapien
ggacatgcctccgatcacggggtgg

SEQ ID NO: 986145 - DNA, 25 bp, Homo sapien
atgcctccgatcacggggtggggat

SEQ ID NO: 986146 - DNA, 25 bp, Homo sapien
cttcccaaatgcgcccatcaggagc

SEQ ID NO: 986147 - DNA, 25 bp, Homo sapien
cccaaatgcgcccatcaggagcagc

SEQ ID NO: 986148 - DNA, 25 bp, Homo sapien
ggagcagcacacggcccgcggtgac

SEQ ID NO: 986149 - DNA, 25 bp, Homo sapien
gagcagcacacggcccgcggtgaca

SEQ ID NO: 986150 - DNA, 25 bp, Homo sapien
gatgaaggtgtacgctgggcacacg

SEQ ID NO: 986151 - DNA, 25 bp, Homo sapien
ggaaaggatgaaggtgtacgctggg

SEQ ID NO: 986152 - DNA, 25 bp, Homo sapien
cacctcatcccataccactccctct

SEQ ID NO: 986153 - DNA, 25 bp, Homo sapien
tctgctcccaaacggggcttgggaa

SEQ ID NO: 986154 - DNA, 25 bp, Homo sapien
tactgctctgcagcctaggcgttgg

SEQ ID NO: 986155 - DNA, 25 bp, Homo sapien
cagtactgctctgcagcctaggcgt

SEQ ID NO: 986156 - DNA, 25 bp, Homo sapien
gaccagtactgctctgcagcctagg

SEQ ID NO: 986157 - DNA, 25 bp, Homo sapien
cagaccagtactgctctgcagccta

SEQ ID NO: 986158 - DNA, 25 bp, Homo sapien
gccagagctcatccttgcgaagacg

SEQ ID NO: 986159 - DNA, 25 bp, Homo sapien
tcatccttgcgaagacgcaacacga

SEQ ID NO: 986160 - DNA, 25 bp, Homo sapien
ttgcgaagacgcaacacgaagcaat

SEQ ID NO: 986161 - DNA, 25 bp, Homo sapien
tggagaaccaaatggccagagctca

SEQ ID NO: 986162 - DNA, 25 bp, Homo sapien
tctagaaagatccttgggtagccag

SEQ ID NO: 986163 - DNA, 25 bp, Homo sapien
gaatgtaagaggtcactgcacgtcc

SEQ ID NO: 986164 - DNA, 25 bp, Homo sapien
gagaaaatagaacccaccagtgagg

SEQ ID NO: 986165 - DNA, 25 bp, Homo sapien
caatgatgaagccatgggcccggaa

SEQ ID NO: 986166 - DNA, 25 bp, Homo sapien
cacaagagtttaccaatatccaggc

SEQ ID NO: 986167 - DNA, 25 bp, Homo sapien
ttctgggtgactctccaccaaagag

SEQ ID NO: 986168 - DNA, 25 bp, Homo sapien
tgaaagtctttgtaaaccacaagag

SEQ ID NO: 986169 - DNA, 25 bp, Homo sapien
caaagagaacgtacatggcactccc

SEQ ID NO: 986170 - DNA, 25 bp, Homo sapien
caacggccaaggagcagatgaaacc

SEQ ID NO: 986171 - DNA, 25 bp, Homo sapien
ggccactaggcagttagttggagca

SEQ ID NO: 986172 - DNA, 25 bp, Homo sapien
cagcatccggacacaggaagtgacc

SEQ ID NO: 986173 - DNA, 25 bp, Homo sapien
actggatcccggcattattgcctgc

SEQ ID NO: 986174 - DNA, 25 bp, Homo sapien
cagccgaaggggagaagtgctcagg

SEQ ID NO: 986175 - DNA, 25 bp, Homo sapien
ctgcagccgaaggggagaagtgctc

SEQ ID NO: 986176 - DNA, 25 bp, Homo sapien
agccgaaggggagaagtgctcagga

SEQ ID NO: 986177 - DNA, 25 bp, Homo sapien
gcagccgaaggggagaagtgctcag

SEQ ID NO: 986178 - DNA, 25 bp, Homo sapien
agctgaccatgctggcatccagatc

SEQ ID NO: 986179 - DNA, 25 bp, Homo sapien
tcagaagctgaccatgctggcatcc

SEQ ID NO: 986180 - DNA, 25 bp, Homo sapien
gaagctgaccatgctggcatccaga

SEQ ID NO: 986181 - DNA, 25 bp, Homo sapien
cagaagctgaccatgctggcatcca

SEQ ID NO: 986182 - DNA, 25 bp, Homo sapien
aagttggtgttcacctggctggcac

SEQ ID NO: 986183 - DNA, 25 bp, Homo sapien
ccacaaaagcaaacgtacctccctg

SEQ ID NO: 986184 - DNA, 25 bp, Homo sapien
cacaaaagcaaacgtacctccctgg

SEQ ID NO: 986185 - DNA, 25 bp, Homo sapien
agcaaacgtacctccctggggaatg

SEQ ID NO: 986186 - DNA, 25 bp, Homo sapien
aaagaaatatatagctggttgtgat

SEQ ID NO: 986187 - DNA, 25 bp, Homo sapien
gaaatatatagctggttgtgattag

SEQ ID NO: 986188 - DNA, 25 bp, Homo sapien
aatatatagctggttgtgattagtt

SEQ ID NO: 986189 - DNA, 25 bp, Homo sapien
aagaaatatatagctggttgtgatt

SEQ ID NO: 986190 - DNA, 25 bp, Homo sapien
catgcagatgctggagcaaagaaaa

SEQ ID NO: 986191 - DNA, 25 bp, Homo sapien
gatgaatggcaccgccatgaggccc

SEQ ID NO: 986192 - DNA, 25 bp, Homo sapien
ccaggatgaatggcaccgccatgag

SEQ ID NO: 986193 - DNA, 25 bp, Homo sapien
caggatgaatggcaccgccatgagg

SEQ ID NO: 986194 - DNA, 25 bp, Homo sapien
ccaagagaactggacctttaaccag

SEQ ID NO: 986195 - DNA, 25 bp, Homo sapien
gagaactggacctttaaccagccca

SEQ ID NO: 986196 - DNA, 25 bp, Homo sapien
caagagaactggacctttaaccagc

SEQ ID NO: 986197 - DNA, 25 bp, Homo sapien
agaactggacctttaaccagcccag

SEQ ID NO: 986198 - DNA, 25 bp, Homo sapien
agctgagcacgacatcactcctctg

SEQ ID NO: 986199 - DNA, 25 bp, Homo sapien
tccaagatgtcataggccaggcagc

SEQ ID NO: 986200 - DNA, 25 bp, Homo sapien
ctgccttggccataggttgggagct

SEQ ID NO: 986201 - DNA, 25 bp, Homo sapien
gaagatacagagataacatggcagg

SEQ ID NO: 986202 - DNA, 25 bp, Homo sapien
agtcctcctcacaacatgtttatca

SEQ ID NO: 986203 - DNA, 25 bp, Homo sapien
taatgggcggcttccttacccatcc

SEQ ID NO: 986204 - DNA, 25 bp, Homo sapien
cacggaccagtgtttccaactgcca

SEQ ID NO: 986205 - DNA, 25 bp, Homo sapien
gatggggccaactccaagatcagaa

SEQ ID NO: 986206 - DNA, 25 bp, Homo sapien
tgcctgtggcctttatctctggtgc

SEQ ID NO: 986207 - DNA, 25 bp, Homo sapien
ccataagctttcagggtcgggaagg

SEQ ID NO: 986208 - DNA, 25 bp, Homo sapien
aatggtgacttcgtcatctgggtgc

SEQ ID NO: 986209 - DNA, 25 bp, Homo sapien
tgcttttgcctagctgggccataag

SEQ ID NO: 986210 - DNA, 25 bp, Homo sapien
tagtgacggcggagttcatggcaac

SEQ ID NO: 986211 - DNA, 25 bp, Homo sapien
cacggctagtgacggcggagttcat

SEQ ID NO: 986212 - DNA, 25 bp, Homo sapien
gagtgctcacggctagtgacggcgg

SEQ ID NO: 986213 - DNA, 25 bp, Homo sapien
gcaactggggtcttcttctggcttc

SEQ ID NO: 986214 - DNA, 25 bp, Homo sapien
gtgcctgctcctctaaaacagactc

SEQ ID NO: 986215 - DNA, 25 bp, Homo sapien
ctcctctaaaacagactcccgctcc

SEQ ID NO: 986216 - DNA, 25 bp, Homo sapien
ctaaaacagactcccgctccagcct

SEQ ID NO: 986217 - DNA, 25 bp, Homo sapien
cctctaaaacagactcccgctccag

SEQ ID NO: 986218 - DNA, 25 bp, Homo sapien
tctgggattaaacatactacaagct

SEQ ID NO: 986219 - DNA, 25 bp, Homo sapien
gaacacagacattactctatggctg

SEQ ID NO: 986220 - DNA, 25 bp, Homo sapien
cttaacaggaacagtcataatgggc

SEQ ID NO: 986221 - DNA, 25 bp, Homo sapien
gtcttttactggacaagcagggccc

SEQ ID NO: 986222 - DNA, 25 bp, Homo sapien
cccataagtcggacagagtaaagtc

SEQ ID NO: 986223 - DNA, 25 bp, Homo sapien
tcagagtggaaggtcgggctcccat

SEQ ID NO: 986224 - DNA, 25 bp, Homo sapien
gctcttcctgtatactctgcttggg

SEQ ID NO: 986225 - DNA, 25 bp, Homo sapien
catgctggttcaccaaggctcagag

SEQ ID NO: 986226 - DNA, 25 bp, Homo sapien
acagctggatgttggtatgttccca

SEQ ID NO: 986227 - DNA, 25 bp, Homo sapien
taactgtgccccattcctaggtgag

SEQ ID NO: 986228 - DNA, 25 bp, Homo sapien
tgatgggtccagagagtcattgcca

SEQ ID NO: 986229 - DNA, 25 bp, Homo sapien
catccgaaggttttacccatgcagg

SEQ ID NO: 986230 - DNA, 25 bp, Homo sapien
ggacatatgtgaactgaagaatgtg

SEQ ID NO: 986231 - DNA, 25 bp, Homo sapien
gggtcctcaagcctgactcagagtt

SEQ ID NO: 986232 - DNA, 25 bp, Homo sapien
gatgatagacacctcagggacacct

SEQ ID NO: 986233 - DNA, 25 bp, Homo sapien
agggacacctgaggactgggactca

SEQ ID NO: 986234 - DNA, 25 bp, Homo sapien
cagaatggaggttcacaataaaagt

SEQ ID NO: 986235 - DNA, 25 bp, Homo sapien
cagcagaatggaggttcacaataaa

SEQ ID NO: 986236 - DNA, 25 bp, Homo sapien
aaagggaactcgcaaagccccagca

SEQ ID NO: 986237 - DNA, 25 bp, Homo sapien
tcgcaaagccccagcagaatggagg

SEQ ID NO: 986238 - DNA, 25 bp, Homo sapien
tctccataaaatggtccgtggaaaa

SEQ ID NO: 986239 - DNA, 25 bp, Homo sapien
ctttctccataaaatggtccgtgga

SEQ ID NO: 986240 - DNA, 25 bp, Homo sapien
tcaacagtccctttctccataaaat

SEQ ID NO: 986241 - DNA, 25 bp, Homo sapien
ctccataaaatggtccgtggaaaag

SEQ ID NO: 986242 - DNA, 25 bp, Homo sapien
gcaaagtagcttagcgctgaggaaa

SEQ ID NO: 986243 - DNA, 25 bp, Homo sapien
gtgccaaagatctcagagggaagta

SEQ ID NO: 986244 - DNA, 25 bp, Homo sapien
aaagctgctgcaacttgaaccacct

SEQ ID NO: 986245 - DNA, 25 bp, Homo sapien
agatctcagagggaagtaggtgcaa

SEQ ID NO: 986246 - DNA, 25 bp, Homo sapien
gcagctgctcgttctgtgtacatgc

SEQ ID NO: 986247 - DNA, 25 bp, Homo sapien
ttctgtgtacatgccctggcctcat

SEQ ID NO: 986248 - DNA, 25 bp, Homo sapien
tggcctcatggaaagccccaagggc

SEQ ID NO: 986249 - DNA, 25 bp, Homo sapien
cactgagcacgcactggcctgttct

SEQ ID NO: 986250 - DNA, 25 bp, Homo sapien
cacccagtggagaaacgtacaccag

SEQ ID NO: 986251 - DNA, 25 bp, Homo sapien
ggagaaacgtacaccagctcccttc

SEQ ID NO: 986252 - DNA, 25 bp, Homo sapien
tccacctagagacgggcacgggcct

SEQ ID NO: 986253 - DNA, 25 bp, Homo sapien
agctcccttccacctagagacgggc

SEQ ID NO: 986254 - DNA, 25 bp, Homo sapien
cttccagggctcggcttgggtcttg

SEQ ID NO: 986255 - DNA, 25 bp, Homo sapien
cggcttgggtcttgtccatggtgct

SEQ ID NO: 986256 - DNA, 25 bp, Homo sapien
cagggctcggcttgggtcttgtcca

SEQ ID NO: 986257 - DNA, 25 bp, Homo sapien
gctcggcttgggtcttgtccatggt

SEQ ID NO: 986258 - DNA, 25 bp, Homo sapien
ctgcctcaagggcacacaggtcagt

SEQ ID NO: 986259 - DNA, 25 bp, Homo sapien
tcaagggcacacaggtcagtccagg

SEQ ID NO: 986260 - DNA, 25 bp, Homo sapien
gggcacacaggtcagtccaggaaca

SEQ ID NO: 986261 - DNA, 25 bp, Homo sapien
tgcctcaagggcacacaggtcagtc

SEQ ID NO: 986262 - DNA, 25 bp, Homo sapien
gccgatatgtgtcatgttgggcctt

SEQ ID NO: 986263 - DNA, 25 bp, Homo sapien
tgcatcaagactggcagggccgata

SEQ ID NO: 986264 - DNA, 25 bp, Homo sapien
tccatgcctcccttcggcagcacag

SEQ ID NO: 986265 - DNA, 25 bp, Homo sapien
cataagccagaccaatgcatcaaga

SEQ ID NO: 986266 - DNA, 25 bp, Homo sapien
gcccccacagtgccatttatttctt

SEQ ID NO: 986267 - DNA, 25 bp, Homo sapien
tctgcccccacagtgccatttattt

SEQ ID NO: 986268 - DNA, 25 bp, Homo sapien
ctctctgcccccacagtgccattta

SEQ ID NO: 986269 - DNA, 25 bp, Homo sapien
tgcccccacagtgccatttatttct

SEQ ID NO: 986270 - DNA, 25 bp, Homo sapien
tggccgatagccaggctttcagcct

SEQ ID NO: 986271 - DNA, 25 bp, Homo sapien
ccccagttttgaatggtggcttcag

SEQ ID NO: 986272 - DNA, 25 bp, Homo sapien
gtatgggtcgtgcagaaactgagcc

SEQ ID NO: 986273 - DNA, 25 bp, Homo sapien
ccagaagcgcactgaactgagagtg

SEQ ID NO: 986274 - DNA, 25 bp, Homo sapien
cttgccagcaccctccaggtctcca

SEQ ID NO: 986275 - DNA, 25 bp, Homo sapien
tcttgccagcaccctccaggtctcc

SEQ ID NO: 986276 - DNA, 25 bp, Homo sapien
ttgccagcaccctccaggtctccat

SEQ ID NO: 986277 - DNA, 25 bp, Homo sapien
tccaagtcaaagacctcagtcatct

SEQ ID NO: 986278 - DNA, 25 bp, Homo sapien
tcaccttctcatacagacataagtc

SEQ ID NO: 986279 - DNA, 25 bp, Homo sapien
tccttcaccttctcatacagacata

SEQ ID NO: 986280 - DNA, 25 bp, Homo sapien
ctcttaaaccaacatgcacgtagtt

SEQ ID NO: 986281 - DNA, 25 bp, Homo sapien
taattcctcttctcagcaaaacttt

SEQ ID NO: 986282 - DNA, 25 bp, Homo sapien
tcctcaataggacatgcaaataatg

SEQ ID NO: 986283 - DNA, 25 bp, Homo sapien
caaatatttgtgagtggtctcctct

SEQ ID NO: 986284 - DNA, 25 bp, Homo sapien
gcccaaatgttccagatccctcgag

SEQ ID NO: 986285 - DNA, 25 bp, Homo sapien
cttcatactatgggccgtggtgagc

SEQ ID NO: 986286 - DNA, 25 bp, Homo sapien
gtgagcactctgataacttcgcccc

SEQ ID NO: 986287 - DNA, 25 bp, Homo sapien
tgggccgtggtgagcactctgataa

SEQ ID NO: 986288 - DNA, 25 bp, Homo sapien
tcccaaagcctcaactccatgattt

SEQ ID NO: 986289 - DNA, 25 bp, Homo sapien
tttctcctgtcttttcaatactgca

SEQ ID NO: 986290 - DNA, 25 bp, Homo sapien
gtcttttcaatactgcacaaacgtc

SEQ ID NO: 986291 - DNA, 25 bp, Homo sapien
gcgtcaggttataaccaggtttctg

SEQ ID NO: 986292 - DNA, 25 bp, Homo sapien
tagttttagcgtcaggttataacca

SEQ ID NO: 986293 - DNA, 25 bp, Homo sapien
tgaccctgtgatcgcattgcatctg

SEQ ID NO: 986294 - DNA, 25 bp, Homo sapien
gatggtgatcagatggccccagagc

SEQ ID NO: 986295 - DNA, 25 bp, Homo sapien
tctcagagtgccctcgtcaggtgaa

SEQ ID NO: 986296 - DNA, 25 bp, Homo sapien
cagagatttgctcccgatggtgatc

SEQ ID NO: 986297 - DNA, 25 bp, Homo sapien
gaaaacagagtgggacaaatcctgc

SEQ ID NO: 986298 - DNA, 25 bp, Homo sapien
aaaacagagtgggacaaatcctgca

SEQ ID NO: 986299 - DNA, 25 bp, Homo sapien
aaacagagtgggacaaatcctgcat

SEQ ID NO: 986300 - DNA, 25 bp, Homo sapien
aacagagtgggacaaatcctgcatt

SEQ ID NO: 986301 - DNA, 25 bp, Homo sapien
ctaatggcggtccagtgttgaactc

SEQ ID NO: 986302 - DNA, 25 bp, Homo sapien
agtgttgaactctgtagtaaatctg

SEQ ID NO: 986303 - DNA, 25 bp, Homo sapien
actgtttcctgaagacgctggaata

SEQ ID NO: 986304 - DNA, 25 bp, Homo sapien
gagggtagggattccaactggctct

SEQ ID NO: 986305 - DNA, 25 bp, Homo sapien
cctgaagggattttagccagtgtgg

SEQ ID NO: 986306 - DNA, 25 bp, Homo sapien
actggctctgtgcagcgggatctgt

SEQ ID NO: 986307 - DNA, 25 bp, Homo sapien
ttaatacacaactaggccgacaggt

SEQ ID NO: 986308 - DNA, 25 bp, Homo sapien
gacagggatgcgtaacaagacagcc

SEQ ID NO: 986309 - DNA, 25 bp, Homo sapien
ttaaaccagaagaagcaacctaggc

SEQ ID NO: 986310 - DNA, 25 bp, Homo sapien
tgagacttgcatgacccctgagaac

SEQ ID NO: 986311 - DNA, 25 bp, Homo sapien
ggcagtccaccaaagttgatgttaa

SEQ ID NO: 986312 - DNA, 25 bp, Homo sapien
gatgttaatgttgggtagaagtgcc

SEQ ID NO: 986313 - DNA, 25 bp, Homo sapien
tgttggacgttggtgcactgtggtt

SEQ ID NO: 986314 - DNA, 25 bp, Homo sapien
gtagaagtgcccttagcccgtcctg

SEQ ID NO: 986315 - DNA, 25 bp, Homo sapien
aaactctctacagaactgctgttgt

SEQ ID NO: 986316 - DNA, 25 bp, Homo sapien
gaggcatttagccagctgagctgat

SEQ ID NO: 986317 - DNA, 25 bp, Homo sapien
caagtctgcaaagtccaatatagga

SEQ ID NO: 986318 - DNA, 25 bp, Homo sapien
gattttgctcgtgagctcagagccc

SEQ ID NO: 986319 - DNA, 25 bp, Homo sapien
aaacttgctcaaggatcaggagagg

SEQ ID NO: 986320 - DNA, 25 bp, Homo sapien
tactttcaagatgcgacgtgtcaca

SEQ ID NO: 986321 - DNA, 25 bp, Homo sapien
gctggtcaaggtagcagaatccata

SEQ ID NO: 986322 - DNA, 25 bp, Homo sapien
ccatagtaagcggatcatgatgcac

SEQ ID NO: 986323 - DNA, 25 bp, Homo sapien
catgatgcactaaacaagctgacaa

SEQ ID NO: 986324 - DNA, 25 bp, Homo sapien
gatctgctgctaaaagggtaaagac

SEQ ID NO: 986325 - DNA, 25 bp, Homo sapien
tattgtgccgtcttggaattcctgc

SEQ ID NO: 986326 - DNA, 25 bp, Homo sapien
gcgcagggtaccaggacaaggcatc

SEQ ID NO: 986327 - DNA, 25 bp, Homo sapien
gccaccaaatcaggatattgtgccg

SEQ ID NO: 986328 - DNA, 25 bp, Homo sapien
ttccaccggccagcacttagggtct

SEQ ID NO: 986329 - DNA, 25 bp, Homo sapien
cttagggtctgaaccattcatctgg

SEQ ID NO: 986330 - DNA, 25 bp, Homo sapien
catgccgtgccatcgactgcagtta

SEQ ID NO: 986331 - DNA, 25 bp, Homo sapien
gaaaaatccagacacgctacatatg

SEQ ID NO: 986332 - DNA, 25 bp, Homo sapien
gataaacggcaaataagaaaacatc

SEQ ID NO: 986333 - DNA, 25 bp, Homo sapien
tattctagtatgagcaaagacctgt

SEQ ID NO: 986334 - DNA, 25 bp, Homo sapien
gaaaagcagctgatgtggaagaggg

SEQ ID NO: 986335 - DNA, 25 bp, Homo sapien
taattcttgcattctacatatagga

SEQ ID NO: 986336 - DNA, 25 bp, Homo sapien
tcacaggtgagagcacaaaaccact

SEQ ID NO: 986337 - DNA, 25 bp, Homo sapien
gcagactctggaagcaacatgctta

SEQ ID NO: 986338 - DNA, 25 bp, Homo sapien
aaaggcagggcaatgtagttccatg

SEQ ID NO: 986339 - DNA, 25 bp, Homo sapien
ggtcccatggttatagagagcagtg

SEQ ID NO: 986340 - DNA, 25 bp, Homo sapien
aaatgaatctgactaaatgcttcca

SEQ ID NO: 986341 - DNA, 25 bp, Homo sapien
gcatgtctactctgtaccattttct

SEQ ID NO: 986342 - DNA, 25 bp, Homo sapien
gcttccaaaagtccagattaacaca

SEQ ID NO: 986343 - DNA, 25 bp, Homo sapien
ttaatcacatagtcagtgggtgacg

SEQ ID NO: 986344 - DNA, 25 bp, Homo sapien
gacttgagagacctactgtaattaa

SEQ ID NO: 986345 - DNA, 25 bp, Homo sapien
gctgccagctggtggtcattttgaa

SEQ ID NO: 986346 - DNA, 25 bp, Homo sapien
gcccttgacttgagagacctactgt

SEQ ID NO: 986347 - DNA, 25 bp, Homo sapien
cattgtttgcaatgaattcacagtt

SEQ ID NO: 986348 - DNA, 25 bp, Homo sapien
gaagtgggcaccagtattacaacct

SEQ ID NO: 986349 - DNA, 25 bp, Homo sapien
tgaatagacataggtcaaggtcacc

SEQ ID NO: 986350 - DNA, 25 bp, Homo sapien
tagatgggtatcttagcagtgggac

SEQ ID NO: 986351 - DNA, 25 bp, Homo sapien
caaggtcaccaaaatgacatgagac

SEQ ID NO: 986352 - DNA, 25 bp, Homo sapien
tggattcaaccaacatcgaatagaa

SEQ ID NO: 986353 - DNA, 25 bp, Homo sapien
ccacacagttgactccaggtacctg

SEQ ID NO: 986354 - DNA, 25 bp, Homo sapien
tattattaactgactaggagaaaaa

SEQ ID NO: 986355 - DNA, 25 bp, Homo sapien
aaaaaccacacagttgactccaggt

SEQ ID NO: 986356 - DNA, 25 bp, Homo sapien
tatacggcctcccatatatgtgcag

SEQ ID NO: 986357 - DNA, 25 bp, Homo sapien
taagcatgcagttttcgtcagtctc

SEQ ID NO: 986358 - DNA, 25 bp, Homo sapien
cctagggatgacagtatacggtatc

SEQ ID NO: 986359 - DNA, 25 bp, Homo sapien
ttgcaatctgtggaaccaatcccct

SEQ ID NO: 986360 - DNA, 25 bp, Homo sapien
atattacctgtaataagggctcctc

SEQ ID NO: 986361 - DNA, 25 bp, Homo sapien
gaatgacctaatccaactatgtaag

SEQ ID NO: 986362 - DNA, 25 bp, Homo sapien
actatgtaagagcagatgctttccc

SEQ ID NO: 986363 - DNA, 25 bp, Homo sapien
catgtcctcctacgatgctttgagg

SEQ ID NO: 986364 - DNA, 25 bp, Homo sapien
ccatctgcggatgcatggaattgct

SEQ ID NO: 986365 - DNA, 25 bp, Homo sapien
cccatctgcggatgcatggaattgc

SEQ ID NO: 986366 - DNA, 25 bp, Homo sapien
tgcccatctgcggatgcatggaatt

SEQ ID NO: 986367 - DNA, 25 bp, Homo sapien
gcccatctgcggatgcatggaattg

SEQ ID NO: 986368 - DNA, 25 bp, Homo sapien
tctctctcacatagtttgacttcct

SEQ ID NO: 986369 - DNA, 25 bp, Homo sapien
tgacttcctacactcatgaaaagac

SEQ ID NO: 986370 - DNA, 25 bp, Homo sapien
cacatagtttgacttcctacactca

SEQ ID NO: 986371 - DNA, 25 bp, Homo sapien
tagtttgacttcctacactcatgaa

SEQ ID NO: 986372 - DNA, 25 bp, Homo sapien
gctcgtctcaggagcttatctcttc

SEQ ID NO: 986373 - DNA, 25 bp, Homo sapien
ccaacgacatctattatcctactga

SEQ ID NO: 986374 - DNA, 25 bp, Homo sapien
gacatctattatcctactgaatgag

SEQ ID NO: 986375 - DNA, 25 bp, Homo sapien
cacctctcttaagctataccacatg

SEQ ID NO: 986376 - DNA, 25 bp, Homo sapien
tctcaattggctctgtaaggtctgc

SEQ ID NO: 986377 - DNA, 25 bp, Homo sapien
ctctcaattggctctgtaaggtctg

SEQ ID NO: 986378 - DNA, 25 bp, Homo sapien
gaacctatagttctctaccactgac

SEQ ID NO: 986379 - DNA, 25 bp, Homo sapien
ctaaccggtcctaattgcaatcaaa

SEQ ID NO: 986380 - DNA, 25 bp, Homo sapien
aaccactactgtgctagtctaggcc

SEQ ID NO: 986381 - DNA, 25 bp, Homo sapien
gccaacttatttgcactggccagca

SEQ ID NO: 986382 - DNA, 25 bp, Homo sapien
cgtgggagtacctatggacctgtgc

SEQ ID NO: 986383 - DNA, 25 bp, Homo sapien
cttgtctttctgaggcaatgcctcc

SEQ ID NO: 986384 - DNA, 25 bp, Homo sapien
ggcagtcttgacagtgctcggaaca

SEQ ID NO: 986385 - DNA, 25 bp, Homo sapien
ctatggacctgtgccagagctctgg

SEQ ID NO: 986386 - DNA, 25 bp, Homo sapien
taattcccaggatgctaagagtaag

SEQ ID NO: 986387 - DNA, 25 bp, Homo sapien
gacatgagctcacacacacgtagaa

SEQ ID NO: 986388 - DNA, 25 bp, Homo sapien
gagtctggactgctatggtggttcc

SEQ ID NO: 986389 - DNA, 25 bp, Homo sapien
cactgtcggagcagttactgagaga

SEQ ID NO: 986390 - DNA, 25 bp, Homo sapien
tccacgctggctatgaatgagaaag

SEQ ID NO: 986391 - DNA, 25 bp, Homo sapien
taagcatcattacaaggagccagag

SEQ ID NO: 986392 - DNA, 25 bp, Homo sapien
ctaacactgaatgctggagaaggct

SEQ ID NO: 986393 - DNA, 25 bp, Homo sapien
tgtgtgtactctcaaaaatctgggc

SEQ ID NO: 986394 - DNA, 25 bp, Homo sapien
caacaactatgaggtaacacgctag

SEQ ID NO: 986395 - DNA, 25 bp, Homo sapien
caattctagctaatctcacctggga

SEQ ID NO: 986396 - DNA, 25 bp, Homo sapien
gaggcatttcctggtatactaggca

SEQ ID NO: 986397 - DNA, 25 bp, Homo sapien
cacgctagctgtaggcatgaggaac

SEQ ID NO: 986398 - DNA, 25 bp, Homo sapien
taatcctctcctctcagttctgttg

SEQ ID NO: 986399 - DNA, 25 bp, Homo sapien
ctaatcctctcctctcagttctgtt

SEQ ID NO: 986400 - DNA, 25 bp, Homo sapien
gaatgggaagaggttgacagtggca

SEQ ID NO: 986401 - DNA, 25 bp, Homo sapien
ggcatggtcgaaaccttcacctctt

SEQ ID NO: 986402 - DNA, 25 bp, Homo sapien
tcaggccacagtagtgtggagactt

SEQ ID NO: 986403 - DNA, 25 bp, Homo sapien
tgctgtccttgttgtaatgaatggg

SEQ ID NO: 986404 - DNA, 25 bp, Homo sapien
gtgccatgccatatctaacaaggga

SEQ ID NO: 986405 - DNA, 25 bp, Homo sapien
tctgaaaccttcaagggtagcagta

SEQ ID NO: 986406 - DNA, 25 bp, Homo sapien
tcccttggatatagaagatacttca

SEQ ID NO: 986407 - DNA, 25 bp, Homo sapien
ggtagcagtacaaaaccagaagtat

SEQ ID NO: 986408 - DNA, 25 bp, Homo sapien
gatattagtactctgttattcaaca

SEQ ID NO: 986409 - DNA, 25 bp, Homo sapien
ccatatgaaagtttggtaattatcc

SEQ ID NO: 986410 - DNA, 25 bp, Homo sapien
taaagctcaatattacaaggcatcc

SEQ ID NO: 986411 - DNA, 25 bp, Homo sapien
tccacccaacaacctgaaaatatga

SEQ ID NO: 986412 - DNA, 25 bp, Homo sapien
gctgtgtggttcaagtgcatgatgc

SEQ ID NO: 986413 - DNA, 25 bp, Homo sapien
gccatccaaggatagcgggctgcct

SEQ ID NO: 986414 - DNA, 25 bp, Homo sapien
gaatgaattataaaccgctcggtgc

SEQ ID NO: 986415 - DNA, 25 bp, Homo sapien
catgatgctattgcgtggaaaggcc

SEQ ID NO: 986416 - DNA, 25 bp, Homo sapien
gactgaaaaggtactattgagagaa

SEQ ID NO: 986417 - DNA, 25 bp, Homo sapien
ccagagcctggacctttggcggttg

SEQ ID NO: 986418 - DNA, 25 bp, Homo sapien
tggtcttgaacggacagttccttct

SEQ ID NO: 986419 - DNA, 25 bp, Homo sapien
aattggcatttgtagctgcagcagg

SEQ ID NO: 986420 - DNA, 25 bp, Homo sapien
ctgtagaggatgatactgggattgt

SEQ ID NO: 986421 - DNA, 25 bp, Homo sapien
gacatcgaagggatcaaaacccaag

SEQ ID NO: 986422 - DNA, 25 bp, Homo sapien
taaggcttttcgagtgacatcgaag

SEQ ID NO: 986423 - DNA, 25 bp, Homo sapien
aaagctgcttgccagtctgtagagg

SEQ ID NO: 986424 - DNA, 25 bp, Homo sapien
ttctggtgctgtaggccagtcactg

SEQ ID NO: 986425 - DNA, 25 bp, Homo sapien
tgtctgagaataacgactgtgactc

SEQ ID NO: 986426 - DNA, 25 bp, Homo sapien
ggaccgtgcactgtgattggatgaa

SEQ ID NO: 986427 - DNA, 25 bp, Homo sapien
gtgactctgttactgccccttcaaa

SEQ ID NO: 986428 - DNA, 25 bp, Homo sapien
gaaactgactgtaatggctagatta

SEQ ID NO: 986429 - DNA, 25 bp, Homo sapien
tctcattctgggattttactacagt

SEQ ID NO: 986430 - DNA, 25 bp, Homo sapien
ggtactgatataatactcctccttc

SEQ ID NO: 986431 - DNA, 25 bp, Homo sapien
tacttctctcactttaccaagaaaa

SEQ ID NO: 986432 - DNA, 25 bp, Homo sapien
gttccctatactgagagaatctgaa

SEQ ID NO: 986433 - DNA, 25 bp, Homo sapien
tgctgggaattatcaccgttcccta

SEQ ID NO: 986434 - DNA, 25 bp, Homo sapien
ggaattatcaccgttccctatactg

SEQ ID NO: 986435 - DNA, 25 bp, Homo sapien
tatcaccgttccctatactgagaga

SEQ ID NO: 986436 - DNA, 25 bp, Homo sapien
tacacactgaggctatatagtgcct

SEQ ID NO: 986437 - DNA, 25 bp, Homo sapien
taccatggtaaagtaaatcactgac

SEQ ID NO: 986438 - DNA, 25 bp, Homo sapien
tatagtgcctagtgctcctacgctg

SEQ ID NO: 986439 - DNA, 25 bp, Homo sapien
taaaatctctataagcactgcaaca

SEQ ID NO: 986440 - DNA, 25 bp, Homo sapien
caggattatggcaagagaccagtaa

SEQ ID NO: 986441 - DNA, 25 bp, Homo sapien
tatccgataatagctgctgaaaaat

SEQ ID NO: 986442 - DNA, 25 bp, Homo sapien
tatggcaagagaccagtaaatgtat

SEQ ID NO: 986443 - DNA, 25 bp, Homo sapien
tgttatctatccgataatagctgct

SEQ ID NO: 986444 - DNA, 25 bp, Homo sapien
cattatatgccaagagggtaactgc

SEQ ID NO: 986445 - DNA, 25 bp, Homo sapien
tatcttgagactacgaccaacaggt

SEQ ID NO: 986446 - DNA, 25 bp, Homo sapien
tgccaggtcccaatgttatcagata

SEQ ID NO: 986447 - DNA, 25 bp, Homo sapien
cactgagtctgcttaaggtctggta

SEQ ID NO: 986448 - DNA, 25 bp, Homo sapien
gaaaaggcatcaagactcctcaaag

SEQ ID NO: 986449 - DNA, 25 bp, Homo sapien
ggcacctggctgagattacatattt

SEQ ID NO: 986450 - DNA, 25 bp, Homo sapien
aatagctgagattacggatgtatgc

SEQ ID NO: 986451 - DNA, 25 bp, Homo sapien
tagtctaaattgaggcatctggtat

SEQ ID NO: 986452 - DNA, 25 bp, Homo sapien
tgtggtaaccttcaaaaacagcaag

SEQ ID NO: 986453 - DNA, 25 bp, Homo sapien
tcaaaatatggacatctactagcct

SEQ ID NO: 986454 - DNA, 25 bp, Homo sapien
gaccatattctacttaggtgggcca

SEQ ID NO: 986455 - DNA, 25 bp, Homo sapien
cattctagtaaacaagggcacacac

SEQ ID NO: 986456 - DNA, 25 bp, Homo sapien
taactatttttaggtcagttctctc

SEQ ID NO: 986457 - DNA, 25 bp, Homo sapien
tagaagtatcagcagaccagtgccc

SEQ ID NO: 986458 - DNA, 25 bp, Homo sapien
tgccctctacaccaatatttaattg

SEQ ID NO: 986459 - DNA, 25 bp, Homo sapien
tcctgaggcctattcataatctaac

SEQ ID NO: 986460 - DNA, 25 bp, Homo sapien
gtttcagccacaatatcaagtcata

SEQ ID NO: 986461 - DNA, 25 bp, Homo sapien
taaccatttacaccgagtgatctgc

SEQ ID NO: 986462 - DNA, 25 bp, Homo sapien
cacaattcttgtaactaggcctgct

SEQ ID NO: 986463 - DNA, 25 bp, Homo sapien
tatataccacacaggcctactgagg

SEQ ID NO: 986464 - DNA, 25 bp, Homo sapien
tcatcctagcaaatcagagggcaag

SEQ ID NO: 986465 - DNA, 25 bp, Homo sapien
gtaacaaaccaaggtactctgtgta

SEQ ID NO: 986466 - DNA, 25 bp, Homo sapien
ttcatcttccaacctacttactggg

SEQ ID NO: 986467 - DNA, 25 bp, Homo sapien
taacatacaatagcagaaggttggc

SEQ ID NO: 986468 - DNA, 25 bp, Homo sapien
caacaaggattttgcctgaaaaaga

SEQ ID NO: 986469 - DNA, 25 bp, Homo sapien
aacaaggattttgcctgaaaaagat

SEQ ID NO: 986470 - DNA, 25 bp, Homo sapien
cttgtcaacaaggattttgcctgaa

SEQ ID NO: 986471 - DNA, 25 bp, Homo sapien
tgtcaacaaggattttgcctgaaaa

SEQ ID NO: 986472 - DNA, 25 bp, Homo sapien
ttttatcaactgaacccgtagatag

SEQ ID NO: 986473 - DNA, 25 bp, Homo sapien
ctcttttgtgaagctggccgcctca

SEQ ID NO: 986474 - DNA, 25 bp, Homo sapien
atttcctcttttgtgaagctggccg

SEQ ID NO: 986475 - DNA, 25 bp, Homo sapien
tcctcttttgtgaagctggccgcct

SEQ ID NO: 986476 - DNA, 25 bp, Homo sapien
cttttgtgaagctggccgcctcatc

SEQ ID NO: 986477 - DNA, 25 bp, Homo sapien
gatacatgcagtcaggttttggaca

SEQ ID NO: 986478 - DNA, 25 bp, Homo sapien
agtattttgttgtacctagagatgc

SEQ ID NO: 986479 - DNA, 25 bp, Homo sapien
ccaattcatgaagatacatgcagtc

SEQ ID NO: 986480 - DNA, 25 bp, Homo sapien
ggttttggacactgcatattcttta

SEQ ID NO: 986481 - DNA, 25 bp, Homo sapien
aagactcaatgtgaactgacaacac

SEQ ID NO: 986482 - DNA, 25 bp, Homo sapien
caatgagaatctccatgtttagtgt

SEQ ID NO: 986483 - DNA, 25 bp, Homo sapien
gtaaaggaaaagaagactcaatgtg

SEQ ID NO: 986484 - DNA, 25 bp, Homo sapien
acaacacaatgagaatctccatgtt

SEQ ID NO: 986485 - DNA, 25 bp, Homo sapien
tatggctctgagagcgtcttctgac

SEQ ID NO: 986486 - DNA, 25 bp, Homo sapien
ttacataagcactggcacttggacc

SEQ ID NO: 986487 - DNA, 25 bp, Homo sapien
gaccggatataggttacataagcac

SEQ ID NO: 986488 - DNA, 25 bp, Homo sapien
gagcgtcttctgaccggatataggt

SEQ ID NO: 986489 - DNA, 25 bp, Homo sapien
ctgtgagcctgcatatgatgtgcta

SEQ ID NO: 986490 - DNA, 25 bp, Homo sapien
gcctgcatatgatgtgctattattg

SEQ ID NO: 986491 - DNA, 25 bp, Homo sapien
catatgatgtgctattattgatgac

SEQ ID NO: 986492 - DNA, 25 bp, Homo sapien
gatgtgctattattgatgacaactt

SEQ ID NO: 986493 - DNA, 25 bp, Homo sapien
tttttgtacgacacgtacactagcc

SEQ ID NO: 986494 - DNA, 25 bp, Homo sapien
ggtttataaactgctgggtcttctg

SEQ ID NO: 986495 - DNA, 25 bp, Homo sapien
cactagccaaatgtttgcgattttc

SEQ ID NO: 986496 - DNA, 25 bp, Homo sapien
tctgggtctgctaggcgctgagata

SEQ ID NO: 986497 - DNA, 25 bp, Homo sapien
taatgccaatgcttacaggacccag

SEQ ID NO: 986498 - DNA, 25 bp, Homo sapien
caaacggtgggctcaggataagaac

SEQ ID NO: 986499 - DNA, 25 bp, Homo sapien
gagcaaatccacactagtccttggg

SEQ ID NO: 986500 - DNA, 25 bp, Homo sapien
tacaaaccagaggatagtctcaggg

SEQ ID NO: 986501 - DNA, 25 bp, Homo sapien
aaggacagtcttttctgcaaacgat

SEQ ID NO: 986502 - DNA, 25 bp, Homo sapien
tttatgggcaattgactttcaggaa

SEQ ID NO: 986503 - DNA, 25 bp, Homo sapien
tcctcaaatgatctaactgtagagt

SEQ ID NO: 986504 - DNA, 25 bp, Homo sapien
ttgtcacgccaggtttcaaaactta

SEQ ID NO: 986505 - DNA, 25 bp, Homo sapien
caaagcccattttcatcagtgcgaa

SEQ ID NO: 986506 - DNA, 25 bp, Homo sapien
aatcggcaaatctggtagccacagg

SEQ ID NO: 986507 - DNA, 25 bp, Homo sapien
tcagtgcgaattcgatgccaacaaa

SEQ ID NO: 986508 - DNA, 25 bp, Homo sapien
cacagggtcttccttcgcatcagga

SEQ ID NO: 986509 - DNA, 25 bp, Homo sapien
cactgaaagctaaaatgtaggactt

SEQ ID NO: 986510 - DNA, 25 bp, Homo sapien
agcactgaaagctaaaatgtaggac

SEQ ID NO: 986511 - DNA, 25 bp, Homo sapien
gcactgaaagctaaaatgtaggact

SEQ ID NO: 986512 - DNA, 25 bp, Homo sapien
aaagtatcaataacaggaaactgag

SEQ ID NO: 986513 - DNA, 25 bp, Homo sapien
gaaattataaagtatcaataacagg

SEQ ID NO: 986514 - DNA, 25 bp, Homo sapien
gacagacttcatgattggatattcc

SEQ ID NO: 986515 - DNA, 25 bp, Homo sapien
agtattgacagacttcatgattgga

SEQ ID NO: 986516 - DNA, 25 bp, Homo sapien
cgaggaaacctcacaactgatcata

SEQ ID NO: 986517 - DNA, 25 bp, Homo sapien
agtgggatgcagtttaccaacctct

SEQ ID NO: 986518 - DNA, 25 bp, Homo sapien
tcatccgtcggtatcattggaggac

SEQ ID NO: 986519 - DNA, 25 bp, Homo sapien
ggatggaaactcacttacaccactg

SEQ ID NO: 986520 - DNA, 25 bp, Homo sapien
gagagttatcaaccgcatgtcacaa

SEQ ID NO: 986521 - DNA, 25 bp, Homo sapien
gataagaactgcgacagtccagaga

SEQ ID NO: 986522 - DNA, 25 bp, Homo sapien
taactgtgctggaacattagaacca

SEQ ID NO: 986523 - DNA, 25 bp, Homo sapien
tattctggtctactctaaaaggtcc

SEQ ID NO: 986524 - DNA, 25 bp, Homo sapien
agtgagacaccgtgccgagcctggt

SEQ ID NO: 986525 - DNA, 25 bp, Homo sapien
tgggcccaagctatgctcctcctca

SEQ ID NO: 986526 - DNA, 25 bp, Homo sapien
tggggtatcgtcacattggttaggc

SEQ ID NO: 986527 - DNA, 25 bp, Homo sapien
tagctaggacccacgggcacataac

SEQ ID NO: 986528 - DNA, 25 bp, Homo sapien
gttgtgacacatgcctaaaagtagc

SEQ ID NO: 986529 - DNA, 25 bp, Homo sapien
catgtctgcagaacccttacagtta

SEQ ID NO: 986530 - DNA, 25 bp, Homo sapien
cactattcggctggtggtgaagact

SEQ ID NO: 986531 - DNA, 25 bp, Homo sapien
tattgtcttttatcagctggtcgga

SEQ ID NO: 986532 - DNA, 25 bp, Homo sapien
gccatcctgtactccaaaggtgtta

SEQ ID NO: 986533 - DNA, 25 bp, Homo sapien
cctggtttaaggcagtgtaaagatc

SEQ ID NO: 986534 - DNA, 25 bp, Homo sapien
tatatttgagacatccaaattgcca

SEQ ID NO: 986535 - DNA, 25 bp, Homo sapien
tcaatttaaatgagctagagcctgg

SEQ ID NO: 986536 - DNA, 25 bp, Homo sapien
tacagtctcaccaaagcctattaga

SEQ ID NO: 986537 - DNA, 25 bp, Homo sapien
taaggttggtagaggcactttgaag

SEQ ID NO: 986538 - DNA, 25 bp, Homo sapien
tacagattaattgacatagagccag

SEQ ID NO: 986539 - DNA, 25 bp, Homo sapien
aagttgcaccaatcttacagtctca

SEQ ID NO: 986540 - DNA, 25 bp, Homo sapien
taagcaggtattatggactctttcg

SEQ ID NO: 986541 - DNA, 25 bp, Homo sapien
gactctttcgagtcggtaagaacaa

SEQ ID NO: 986542 - DNA, 25 bp, Homo sapien
gccacttttgttagtacattgatag

SEQ ID NO: 986543 - DNA, 25 bp, Homo sapien
tgcagtatccgtatgtttcccaggc

SEQ ID NO: 986544 - DNA, 25 bp, Homo sapien
aaagctaatagtggctgttagagtc

SEQ ID NO: 986545 - DNA, 25 bp, Homo sapien
aatgtgtgccagtagaatgagtcag

SEQ ID NO: 986546 - DNA, 25 bp, Homo sapien
caaaattctcccaagcaatgtagag

SEQ ID NO: 986547 - DNA, 25 bp, Homo sapien
caaaaatctctttcctcgtatgtaa

SEQ ID NO: 986548 - DNA, 25 bp, Homo sapien
tcctgtgctcagtagtcccatatgg

SEQ ID NO: 986549 - DNA, 25 bp, Homo sapien
tttttatgccaaccaatctccaagg

SEQ ID NO: 986550 - DNA, 25 bp, Homo sapien
gatcccactacatgagcctctctga

SEQ ID NO: 986551 - DNA, 25 bp, Homo sapien
tgggtaccatactggacaataaagg

SEQ ID NO: 986552 - DNA, 25 bp, Homo sapien
tcacatacgatttcttcgttacata

SEQ ID NO: 986553 - DNA, 25 bp, Homo sapien
ttcacaatttcacatacgatttctt

SEQ ID NO: 986554 - DNA, 25 bp, Homo sapien
tcttcgttacatattagtatcaatt

SEQ ID NO: 986555 - DNA, 25 bp, Homo sapien
agtactcaataaaaatatcgttcat

SEQ ID NO: 986556 - DNA, 25 bp, Homo sapien
caggatttctgaagggtttcgagta

SEQ ID NO: 986557 - DNA, 25 bp, Homo sapien
cacaggacactaatcttggcagagg

SEQ ID NO: 986558 - DNA, 25 bp, Homo sapien
taattcaaatagagcgaaaagtcct

SEQ ID NO: 986559 - DNA, 25 bp, Homo sapien
ttccatctgggagtatgagaaacag

SEQ ID NO: 986560 - DNA, 25 bp, Homo sapien
aaaattcacatgtaggactaggtcc

SEQ ID NO: 986561 - DNA, 25 bp, Homo sapien
gccagctttactttttggaagcaaa

SEQ ID NO: 986562 - DNA, 25 bp, Homo sapien
tatcaccaactttacggctaaagga

SEQ ID NO: 986563 - DNA, 25 bp, Homo sapien
gactaggtcctgtatgacagaaaaa

SEQ ID NO: 986564 - DNA, 25 bp, Homo sapien
gagtagtctcctaataaccgttctg

SEQ ID NO: 986565 - DNA, 25 bp, Homo sapien
tcaggccattattaaagtcatccag

SEQ ID NO: 986566 - DNA, 25 bp, Homo sapien
tacacataggaagcaggtaaggcct

SEQ ID NO: 986567 - DNA, 25 bp, Homo sapien
gaaacactggtagctattttctact

SEQ ID NO: 986568 - DNA, 25 bp, Homo sapien
tgctcttctaccttacaccatggga

SEQ ID NO: 986569 - DNA, 25 bp, Homo sapien
catgctagcccctatcaagtgtttg

SEQ ID NO: 986570 - DNA, 25 bp, Homo sapien
tatgctgcacactattgaacgagta

SEQ ID NO: 986571 - DNA, 25 bp, Homo sapien
tggtctaaatgtctcctccacaacg

SEQ ID NO: 986572 - DNA, 25 bp, Homo sapien
taacacaacagagcgaataagcgac

SEQ ID NO: 986573 - DNA, 25 bp, Homo sapien
taaatcagggcccacactaagtgtc

SEQ ID NO: 986574 - DNA, 25 bp, Homo sapien
ggtcctctccggagtagcctgaata

SEQ ID NO: 986575 - DNA, 25 bp, Homo sapien
tagtagcatgataaaaccggtccaa

SEQ ID NO: 986576 - DNA, 25 bp, Homo sapien
tcattcacttcccaacttcctttta

SEQ ID NO: 986577 - DNA, 25 bp, Homo sapien
gcttccctttttctggaagtgtata

SEQ ID NO: 986578 - DNA, 25 bp, Homo sapien
ttctggaagtgtatattgaaaggat

SEQ ID NO: 986579 - DNA, 25 bp, Homo sapien
cacttcattcacttcccaacttcct

SEQ ID NO: 986580 - DNA, 25 bp, Homo sapien
aaaacaagcagcaggacgagtgggc

SEQ ID NO: 986581 - DNA, 25 bp, Homo sapien
tacactgtgggctgattgcaagcac

SEQ ID NO: 986582 - DNA, 25 bp, Homo sapien
gaaggaaagactgcaaatcggaagc

SEQ ID NO: 986583 - DNA, 25 bp, Homo sapien
gaagcagctctagtgtggcagatac

SEQ ID NO: 986584 - DNA, 25 bp, Homo sapien
caagaaaccaccgaacgagcgtcgg

SEQ ID NO: 986585 - DNA, 25 bp, Homo sapien
gacctttacggctgagagagagact

SEQ ID NO: 986586 - DNA, 25 bp, Homo sapien
tgcttcagcgagtccgacctttacg

SEQ ID NO: 986587 - DNA, 25 bp, Homo sapien
tcagaaccgggcctgattgcttcag

SEQ ID NO: 986588 - DNA, 25 bp, Homo sapien
gtgggttccacagccagacgggcca

SEQ ID NO: 986589 - DNA, 25 bp, Homo sapien
gttccacagccagacgggccaccat

SEQ ID NO: 986590 - DNA, 25 bp, Homo sapien
gggttccacagccagacgggccacc

SEQ ID NO: 986591 - DNA, 25 bp, Homo sapien
tcagctttcggtgggttccacagcc

SEQ ID NO: 986592 - DNA, 25 bp, Homo sapien
ggaggttgcggtggccgctcccgca

SEQ ID NO: 986593 - DNA, 25 bp, Homo sapien
caggcgcacgctgatccggccagga

SEQ ID NO: 986594 - DNA, 25 bp, Homo sapien
ctgagtgggaggttgcggtggccgc

SEQ ID NO: 986595 - DNA, 25 bp, Homo sapien
tacattagggtaagactcctccggc

SEQ ID NO: 986596 - DNA, 25 bp, Homo sapien
gtggctgctggactgatgcctttct

SEQ ID NO: 986597 - DNA, 25 bp, Homo sapien
cttccttctctgcacgcgtgtgctg

SEQ ID NO: 986598 - DNA, 25 bp, Homo sapien
tcctttagtaaaaggagaatggcga

SEQ ID NO: 986599 - DNA, 25 bp, Homo sapien
gagaatggcgaatattgaaatagca

SEQ ID NO: 986600 - DNA, 25 bp, Homo sapien
tcaatgactctcagattttcgggct

SEQ ID NO: 986601 - DNA, 25 bp, Homo sapien
caatggccttgtagatagtggctcc

SEQ ID NO: 986602 - DNA, 25 bp, Homo sapien
cagtagcgttgtctgaataccttca

SEQ ID NO: 986603 - DNA, 25 bp, Homo sapien
gctattgtcacaaagaattactcct

SEQ ID NO: 986604 - DNA, 25 bp, Homo sapien
tccaagatatagaccctttgtcacc

SEQ ID NO: 986605 - DNA, 25 bp, Homo sapien
aataccttcattagtttcctcttgg

SEQ ID NO: 986606 - DNA, 25 bp, Homo sapien
ttatccttagttccttctcgctggc

SEQ ID NO: 986607 - DNA, 25 bp, Homo sapien
tcactctggagagactctacttgct

SEQ ID NO: 986608 - DNA, 25 bp, Homo sapien
tcagaggtccattcggtcaccatga

SEQ ID NO: 986609 - DNA, 25 bp, Homo sapien
gcaaacagacaaatgctgctcagag

SEQ ID NO: 986610 - DNA, 25 bp, Homo sapien
gagactctacttgctatggatccca

SEQ ID NO: 986611 - DNA, 25 bp, Homo sapien
tttcctgttttacgtcatgctccat

SEQ ID NO: 986612 - DNA, 25 bp, Homo sapien
tgatttcctgttttacgtcatgctc

SEQ ID NO: 986613 - DNA, 25 bp, Homo sapien
atttcctgttttacgtcatgctcca

SEQ ID NO: 986614 - DNA, 25 bp, Homo sapien
gatttcctgttttacgtcatgctcc

SEQ ID NO: 986615 - DNA, 25 bp, Homo sapien
taaattcgggtaagtgtggccagac

SEQ ID NO: 986616 - DNA, 25 bp, Homo sapien
gatgaacgtcggatcgaggacctcg

SEQ ID NO: 986617 - DNA, 25 bp, Homo sapien
tggagccttttgtacgcctgggacg

SEQ ID NO: 986618 - DNA, 25 bp, Homo sapien
caggatgcactacacgatgaacgtc

SEQ ID NO: 986619 - DNA, 25 bp, Homo sapien
cattggacatttggaaagagtgaca

SEQ ID NO: 986620 - DNA, 25 bp, Homo sapien
cctttaggcaaagaagacactctcc

SEQ ID NO: 986621 - DNA, 25 bp, Homo sapien
tgggcttgccagtcacctttaggca

SEQ ID NO: 986622 - DNA, 25 bp, Homo sapien
tgaggctaatggctcactggatgca

SEQ ID NO: 986623 - DNA, 25 bp, Homo sapien
ctggaagaaggagttaagcagcttg

SEQ ID NO: 986624 - DNA, 25 bp, Homo sapien
tgagtcaccaatgttggagcttgct

SEQ ID NO: 986625 - DNA, 25 bp, Homo sapien
ctgctgaatgagtcaccaatgttgg

SEQ ID NO: 986626 - DNA, 25 bp, Homo sapien
ttaagcagcttgacacctatgcccc

SEQ ID NO: 986627 - DNA, 25 bp, Homo sapien
ccagaactaagaaggcagataatgt

SEQ ID NO: 986628 - DNA, 25 bp, Homo sapien
ccttctaagagagagtcaactggct

SEQ ID NO: 986629 - DNA, 25 bp, Homo sapien
aacagcttttgcagggaattaatcc

SEQ ID NO: 986630 - DNA, 25 bp, Homo sapien
gtacagcattgccttgcacttctca

SEQ ID NO: 986631 - DNA, 25 bp, Homo sapien
gataaagttggttggagatttcaca

SEQ ID NO: 986632 - DNA, 25 bp, Homo sapien
atattcagataaagttggttggaga

SEQ ID NO: 986633 - DNA, 25 bp, Homo sapien
ggttggagatttcacacatgaccag

SEQ ID NO: 986634 - DNA, 25 bp, Homo sapien
taaagttggttggagatttcacaca

SEQ ID NO: 986635 - DNA, 25 bp, Homo sapien
tgtttggattgtgaagatgcagaag

SEQ ID NO: 986636 - DNA, 25 bp, Homo sapien
agtataagtcagaaactaatggctg

SEQ ID NO: 986637 - DNA, 25 bp, Homo sapien
gaagaatttgtacgtctggaagagg

SEQ ID NO: 986638 - DNA, 25 bp, Homo sapien
tcagaaactaatggctggatttgtg

SEQ ID NO: 986639 - DNA, 25 bp, Homo sapien
tggaatgcaatccacccaatcttgc

SEQ ID NO: 986640 - DNA, 25 bp, Homo sapien
ctacctgttgggctttgaattgaaa

SEQ ID NO: 986641 - DNA, 25 bp, Homo sapien
tcgtcatgaaacaagaatccacatc

SEQ ID NO: 986642 - DNA, 25 bp, Homo sapien
gaatcttctcattacctctctggaa

SEQ ID NO: 986643 - DNA, 25 bp, Homo sapien
cagtggcggtgcgagaatctcctca

SEQ ID NO: 986644 - DNA, 25 bp, Homo sapien
tgttaggttgccctcggacatgcct

SEQ ID NO: 986645 - DNA, 25 bp, Homo sapien
acatcttggagaaaggaacggaagg

SEQ ID NO: 986646 - DNA, 25 bp, Homo sapien
ggacatgccttcacgccattctaaa

SEQ ID NO: 986647 - DNA, 25 bp, Homo sapien
tattttcccagttgcagtatctacc

SEQ ID NO: 986648 - DNA, 25 bp, Homo sapien
gtcatatatcagttatgtgcatgct

SEQ ID NO: 986649 - DNA, 25 bp, Homo sapien
tctgatacatctggtcctactatga

SEQ ID NO: 986650 - DNA, 25 bp, Homo sapien
tactatgaggtacttgagaaccagc

SEQ ID NO: 986651 - DNA, 25 bp, Homo sapien
tctatgctgaaccagatgtcatggc

SEQ ID NO: 986652 - DNA, 25 bp, Homo sapien
tcaatagagctaagggtaacctctc

SEQ ID NO: 986653 - DNA, 25 bp, Homo sapien
agcggtcacatacccagaggctcct

SEQ ID NO: 986654 - DNA, 25 bp, Homo sapien
tacacctcttactggatgacatgcc

SEQ ID NO: 986655 - DNA, 25 bp, Homo sapien
tccttcactttgacactgctacaaa

SEQ ID NO: 986656 - DNA, 25 bp, Homo sapien
cttcactttgacactgctacaaaag

SEQ ID NO: 986657 - DNA, 25 bp, Homo sapien
ccttcactttgacactgctacaaaa

SEQ ID NO: 986658 - DNA, 25 bp, Homo sapien
ggtgaaggaggaatagaagatgaaa

SEQ ID NO: 986659 - DNA, 25 bp, Homo sapien
gacttcagtcaggagatccctgagc

SEQ ID NO: 986660 - DNA, 25 bp, Homo sapien
tgatcgggcccagattgaacaagtt

SEQ ID NO: 986661 - DNA, 25 bp, Homo sapien
gggacagacagtctgcaatgtcaag

SEQ ID NO: 986662 - DNA, 25 bp, Homo sapien
tctaaatattcttgactcgattgac

SEQ ID NO: 986663 - DNA, 25 bp, Homo sapien
cagggtatggcagccataggacaga

SEQ ID NO: 986664 - DNA, 25 bp, Homo sapien
tgtagctgaagtaaatgcccttcag

SEQ ID NO: 986665 - DNA, 25 bp, Homo sapien
gcccttcagggtatggcagccatag

SEQ ID NO: 986666 - DNA, 25 bp, Homo sapien
gaagtaaatgcccttcagggtatgg

SEQ ID NO: 986667 - DNA, 25 bp, Homo sapien
catgctctggagtcgtggaggcaac

SEQ ID NO: 986668 - DNA, 25 bp, Homo sapien
cctcattcaggcagaggatcgacaa

SEQ ID NO: 986669 - DNA, 25 bp, Homo sapien
aattatactgacagcttgtccccag

SEQ ID NO: 986670 - DNA, 25 bp, Homo sapien
tcttcatgcaaaacgtcatgctctg

SEQ ID NO: 986671 - DNA, 25 bp, Homo sapien
cctcctgaagagaacccattagtgg

SEQ ID NO: 986672 - DNA, 25 bp, Homo sapien
agcagaggcccattacgcttttatg

SEQ ID NO: 986673 - DNA, 25 bp, Homo sapien
caggccgtcctcactgaacagaagg

SEQ ID NO: 986674 - DNA, 25 bp, Homo sapien
gaagctgcgcaagagttaatgcctg

SEQ ID NO: 986675 - DNA, 25 bp, Homo sapien
tggtggattccaacgagtgaggact

SEQ ID NO: 986676 - DNA, 25 bp, Homo sapien
gattccaacgagtgaggactcactt

SEQ ID NO: 986677 - DNA, 25 bp, Homo sapien
gaggactcacttgtatggctctctg

SEQ ID NO: 986678 - DNA, 25 bp, Homo sapien
cgagtgaggactcacttgtatggct

SEQ ID NO: 986679 - DNA, 25 bp, Homo sapien
tacagattgcccagagacctgatga

SEQ ID NO: 986680 - DNA, 25 bp, Homo sapien
acttacagattgcccagagacctga

SEQ ID NO: 986681 - DNA, 25 bp, Homo sapien
cttacagattgcccagagacctgat

SEQ ID NO: 986682 - DNA, 25 bp, Homo sapien
ttacagattgcccagagacctgatg

SEQ ID NO: 986683 - DNA, 25 bp, Homo sapien
ccctcatggaagtggtctgtcgaga

SEQ ID NO: 986684 - DNA, 25 bp, Homo sapien
cattattgaaagttatggcgccgcc

SEQ ID NO: 986685 - DNA, 25 bp, Homo sapien
tctgtcgagatgcttgtgatggtca

SEQ ID NO: 986686 - DNA, 25 bp, Homo sapien
caaattacagcgagaaaacatagcc

SEQ ID NO: 986687 - DNA, 25 bp, Homo sapien
tacttgaaggtcctcgtagacagct

SEQ ID NO: 986688 - DNA, 25 bp, Homo sapien
tggccctggctctacttgatagaat

SEQ ID NO: 986689 - DNA, 25 bp, Homo sapien
gacagcttggtagaagatgaccgta

SEQ ID NO: 986690 - DNA, 25 bp, Homo sapien
gaattgtctccgtggataaacagca

SEQ ID NO: 986691 - DNA, 25 bp, Homo sapien
gatacagcagggtgcattagagctg

SEQ ID NO: 986692 - DNA, 25 bp, Homo sapien
ggtgattgtgagactagctcaatgc

SEQ ID NO: 986693 - DNA, 25 bp, Homo sapien
gactagctcaatgccaagtctatga

SEQ ID NO: 986694 - DNA, 25 bp, Homo sapien
aagtctatgacatgcgcccagaaac

SEQ ID NO: 986695 - DNA, 25 bp, Homo sapien
cccagtggatcgctaccgccagatt

SEQ ID NO: 986696 - DNA, 25 bp, Homo sapien
tagtatggcccagcacttgcaggca

SEQ ID NO: 986697 - DNA, 25 bp, Homo sapien
caggtcatcctcacatctagtatgg

SEQ ID NO: 986698 - DNA, 25 bp, Homo sapien
gagagaccctccaatgttcatccct

SEQ ID NO: 986699 - DNA, 25 bp, Homo sapien
tacaagcaattctgcgctgtcagga

SEQ ID NO: 986700 - DNA, 25 bp, Homo sapien
ggctctgctgacaggaattataagt

SEQ ID NO: 986701 - DNA, 25 bp, Homo sapien
tcacattctgataccatacaagcaa

SEQ ID NO: 986702 - DNA, 25 bp, Homo sapien
tgggtctttgcaggaattggctctg

SEQ ID NO: 986703 - DNA, 25 bp, Homo sapien
agattggctttgaatgcgcatgtac

SEQ ID NO: 986704 - DNA, 25 bp, Homo sapien
gcgcatgtaccggtgctgttattaa

SEQ ID NO: 986705 - DNA, 25 bp, Homo sapien
aagggtctctaatggagctacaggg

SEQ ID NO: 986706 - DNA, 25 bp, Homo sapien
caagaatatctgttcatgcacataa

SEQ ID NO: 986707 - DNA, 25 bp, Homo sapien
tactaagtcgctttggtggctctga

SEQ ID NO: 986708 - DNA, 25 bp, Homo sapien
gccagtgcttaggactactaagtcg

SEQ ID NO: 986709 - DNA, 25 bp, Homo sapien
gactgcgtcagtttaaatttcaaga

SEQ ID NO: 986710 - DNA, 25 bp, Homo sapien
tcaagacgataatgtggagggagat

SEQ ID NO: 986711 - DNA, 25 bp, Homo sapien
catgttacagagttcccctaccttc

SEQ ID NO: 986712 - DNA, 25 bp, Homo sapien
tgtgtgtctcttcactcctagcctt

SEQ ID NO: 986713 - DNA, 25 bp, Homo sapien
tcagaaacagttaatagagatggac

SEQ ID NO: 986714 - DNA, 25 bp, Homo sapien
atttgtgccaatgtaatggaatatt

SEQ ID NO: 986715 - DNA, 25 bp, Homo sapien
tcatcgacagagtgtcagcaagcta

SEQ ID NO: 986716 - DNA, 25 bp, Homo sapien
gtggttccatactggcgcctgcctg

SEQ ID NO: 986717 - DNA, 25 bp, Homo sapien
tatcatctacctgctgaaacagagt

SEQ ID NO: 986718 - DNA, 25 bp, Homo sapien
cgcctgcctggtttaggcattatca

SEQ ID NO: 986719 - DNA, 25 bp, Homo sapien
gtgatgcctgctggtgttgataaaa

SEQ ID NO: 986720 - DNA, 25 bp, Homo sapien
ccactgctcagaaatatgttctagc

SEQ ID NO: 986721 - DNA, 25 bp, Homo sapien
tgatcaacaatcgagctaaactgct

SEQ ID NO: 986722 - DNA, 25 bp, Homo sapien
tatgttctagcaagacggcgcttgg

SEQ ID NO: 986723 - DNA, 25 bp, Homo sapien
ggagtactacttgttacattgcatg

SEQ ID NO: 986724 - DNA, 25 bp, Homo sapien
ttatcatagagacctgcctatttat

SEQ ID NO: 986725 - DNA, 25 bp, Homo sapien
gcatgcccacggattctcaagattc

SEQ ID NO: 986726 - DNA, 25 bp, Homo sapien
tctttggcgccatctggagtactac

SEQ ID NO: 986727 - DNA, 25 bp, Homo sapien
tttagaagtgggctggctatagtga

SEQ ID NO: 986728 - DNA, 25 bp, Homo sapien
gaagtgggctggctatagtgagcca

SEQ ID NO: 986729 - DNA, 25 bp, Homo sapien
agtgagccaacatgatttagaccag

SEQ ID NO: 986730 - DNA, 25 bp, Homo sapien
tagtgagccaacatgatttagacca

SEQ ID NO: 986731 - DNA, 25 bp, Homo sapien
tcaaggaactgagagcccgtgctta

SEQ ID NO: 986732 - DNA, 25 bp, Homo sapien
tcaacgcttttggagaatcactaca

SEQ ID NO: 986733 - DNA, 25 bp, Homo sapien
tcttgtcagacgtatccgtggcctc

SEQ ID NO: 986734 - DNA, 25 bp, Homo sapien
ttcaggctgatgcaatcaacgcttt

SEQ ID NO: 986735 - DNA, 25 bp, Homo sapien
cagagatttcaatctgcggctgacg

SEQ ID NO: 986736 - DNA, 25 bp, Homo sapien
tgcggctgacgaatgggcccatcat

SEQ ID NO: 986737 - DNA, 25 bp, Homo sapien
cccgactactgctgctgcagtggct

SEQ ID NO: 986738 - DNA, 25 bp, Homo sapien
agtgagtgataatgatgacgtcggg

SEQ ID NO: 986739 - DNA, 25 bp, Homo sapien
ctggtgctaaaccggtatcccagtg

SEQ ID NO: 986740 - DNA, 25 bp, Homo sapien
gctaaaccggtatcccagtgtgggc

SEQ ID NO: 986741 - DNA, 25 bp, Homo sapien
cagtgtgggcctttccctgccccag

SEQ ID NO: 986742 - DNA, 25 bp, Homo sapien
ggtgctaaaccggtatcccagtgtg

SEQ ID NO: 986743 - DNA, 25 bp, Homo sapien
cacctggcctgataaagcacgccag

SEQ ID NO: 986744 - DNA, 25 bp, Homo sapien
gcttcagaaatttgtgtgtcgtctt

SEQ ID NO: 986745 - DNA, 25 bp, Homo sapien
cgtctttgcgcaggggccattctga

SEQ ID NO: 986746 - DNA, 25 bp, Homo sapien
tgcagtgcttcagaaatttgtgtgt

SEQ ID NO: 986747 - DNA, 25 bp, Homo sapien
gaaatttgtgtgtcgtctttgcgca

SEQ ID NO: 986748 - DNA, 25 bp, Homo sapien
gcttttgttttcgtctccagcctca

SEQ ID NO: 986749 - DNA, 25 bp, Homo sapien
gaactacccgacatttccaacatac

SEQ ID NO: 986750 - DNA, 25 bp, Homo sapien
ctcttcccataatccctttccaact

SEQ ID NO: 986751 - DNA, 25 bp, Homo sapien
tgagaactacccgacatttccaaca

SEQ ID NO: 986752 - DNA, 25 bp, Homo sapien
caaatgtatagtaaaatcagcagct

SEQ ID NO: 986753 - DNA, 25 bp, Homo sapien
tgttatatgatggataagtgaaaag

SEQ ID NO: 986754 - DNA, 25 bp, Homo sapien
tcctgcagtcagaaattccttgtat

SEQ ID NO: 986755 - DNA, 25 bp, Homo sapien
tgtcaaatgtataatcagcttgtat

SEQ ID NO: 986756 - DNA, 25 bp, Homo sapien
tgcatgtcacgggtttgtagcttat

SEQ ID NO: 986757 - DNA, 25 bp, Homo sapien
tcacgggtttgtagcttattctttc

SEQ ID NO: 986758 - DNA, 25 bp, Homo sapien
cagaaactcttgcattatctgtaga

SEQ ID NO: 986759 - DNA, 25 bp, Homo sapien
cgggtttgtagcttattctttcaga

SEQ ID NO: 986760 - DNA, 25 bp, Homo sapien
gttcactccctagatactatgctgg

SEQ ID NO: 986761 - DNA, 25 bp, Homo sapien
caagacttcaggattgatgctagaa

SEQ ID NO: 986762 - DNA, 25 bp, Homo sapien
catagagcatatgtacccatggtac

SEQ ID NO: 986763 - DNA, 25 bp, Homo sapien
tgtttttctgctgaggtctcccaca

SEQ ID NO: 986764 - DNA, 25 bp, Homo sapien
atttcaagagccatagacagctctt

SEQ ID NO: 986765 - DNA, 25 bp, Homo sapien
gaagcaagccagtctaatataataa

SEQ ID NO: 986766 - DNA, 25 bp, Homo sapien
gaacaaactacttattaaatccaga

SEQ ID NO: 986767 - DNA, 25 bp, Homo sapien
tgacagatgtgtttggacctttggc

SEQ ID NO: 986768 - DNA, 25 bp, Homo sapien
tatgggaatttggtgccaaggtaaa

SEQ ID NO: 986769 - DNA, 25 bp, Homo sapien
ctaatagaacaacaccagcctcttt

SEQ ID NO: 986770 - DNA, 25 bp, Homo sapien
ctttcctttgactaatagaacaaca

SEQ ID NO: 986771 - DNA, 25 bp, Homo sapien
tttctgaaagggaacactatatggg

SEQ ID NO: 986772 - DNA, 25 bp, Homo sapien
agaatgccttcttgtggagagaact

SEQ ID NO: 986773 - DNA, 25 bp, Homo sapien
tgccttcttgtggagagaacttagg

SEQ ID NO: 986774 - DNA, 25 bp, Homo sapien
tgtggagagaacttaggatagaagc

SEQ ID NO: 986775 - DNA, 25 bp, Homo sapien
acttaggatagaagcacttaagaga

SEQ ID NO: 986776 - DNA, 25 bp, Homo sapien
agggtgactaagacaggctttcttt

SEQ ID NO: 986777 - DNA, 25 bp, Homo sapien
caaggcttagcctccgaagggtgac

SEQ ID NO: 986778 - DNA, 25 bp, Homo sapien
gccttggtaggatgacttgggtatc

SEQ ID NO: 986779 - DNA, 25 bp, Homo sapien
aaaggagctgacattaggtttcgag

SEQ ID NO: 986780 - DNA, 25 bp, Homo sapien
ttcacttgaggtggcggaatcttct

SEQ ID NO: 986781 - DNA, 25 bp, Homo sapien
ggaggattcctgcagttcacttgag

SEQ ID NO: 986782 - DNA, 25 bp, Homo sapien
tactggcagctcctgtggttgggcc

SEQ ID NO: 986783 - DNA, 25 bp, Homo sapien
gaagacactaacagcgaagcatgtg

SEQ ID NO: 986784 - DNA, 25 bp, Homo sapien
tgaccctcgcccatgctgggtaagt

SEQ ID NO: 986785 - DNA, 25 bp, Homo sapien
taactccccaggtgttgatggccac

SEQ ID NO: 986786 - DNA, 25 bp, Homo sapien
tgatggccaccattactatcaccag

SEQ ID NO: 986787 - DNA, 25 bp, Homo sapien
aggtggaagaggctaactccccagg

SEQ ID NO: 986788 - DNA, 25 bp, Homo sapien
ccttgtggcccagattagttcccag

SEQ ID NO: 986789 - DNA, 25 bp, Homo sapien
tgctctagcattgccttgtagggtg

SEQ ID NO: 986790 - DNA, 25 bp, Homo sapien
gcattgccttgtagggtgcacagga

SEQ ID NO: 986791 - DNA, 25 bp, Homo sapien
gtggcccagattagttcccagttgc

SEQ ID NO: 986792 - DNA, 25 bp, Homo sapien
ttctgccttgacattgacacccaca

SEQ ID NO: 986793 - DNA, 25 bp, Homo sapien
ccatagctgaagacgatggcattag

SEQ ID NO: 986794 - DNA, 25 bp, Homo sapien
cattagggggattgcccacaggcag

SEQ ID NO: 986795 - DNA, 25 bp, Homo sapien
catggtgactgggatcagggtgtag

SEQ ID NO: 986796 - DNA, 25 bp, Homo sapien
cagtgcccatagctgaagacgatgg

SEQ ID NO: 986797 - DNA, 25 bp, Homo sapien
ggttgctgggttgctcacaaactca

SEQ ID NO: 986798 - DNA, 25 bp, Homo sapien
cacaaactcagtgacaatggacacg

SEQ ID NO: 986799 - DNA, 25 bp, Homo sapien
tggacacgaggatgcatgccagcag

SEQ ID NO: 986800 - DNA, 25 bp, Homo sapien
gatgcatgccagcagggtgacagcc

SEQ ID NO: 986801 - DNA, 25 bp, Homo sapien
gttcccaatccatgtagagaggcca

SEQ ID NO: 986802 - DNA, 25 bp, Homo sapien
caatccatgtagagaggccagagct

SEQ ID NO: 986803 - DNA, 25 bp, Homo sapien
cccaatccatgtagagaggccagag

SEQ ID NO: 986804 - DNA, 25 bp, Homo sapien
ctggttcccaatccatgtagagagg

SEQ ID NO: 986805 - DNA, 25 bp, Homo sapien
tccacgtgatgatgggctcggtccc

SEQ ID NO: 986806 - DNA, 25 bp, Homo sapien
gctcggtccccagtgagtgctcctg

SEQ ID NO: 986807 - DNA, 25 bp, Homo sapien
ttgctaccagaagccagagcatagc

SEQ ID NO: 986808 - DNA, 25 bp, Homo sapien
aaccagaatgacaatctcccagggc

SEQ ID NO: 986809 - DNA, 25 bp, Homo sapien
actgtggcatcagtacggtagcctt

SEQ ID NO: 986810 - DNA, 25 bp, Homo sapien
tgtggcatcagtacggtagcctttc

SEQ ID NO: 986811 - DNA, 25 bp, Homo sapien
gactgtggcatcagtacggtagcct

SEQ ID NO: 986812 - DNA, 25 bp, Homo sapien
ctgtggcatcagtacggtagccttt

SEQ ID NO: 986813 - DNA, 25 bp, Homo sapien
agccaggctcccgggtaaaccacag

SEQ ID NO: 986814 - DNA, 25 bp, Homo sapien
ttcaaagaaagaatcccagccaggg

SEQ ID NO: 986815 - DNA, 25 bp, Homo sapien
gaaaaatccagtcaccatttctggg

SEQ ID NO: 986816 - DNA, 25 bp, Homo sapien
ccacagtacggtcatcaggatgaag

SEQ ID NO: 986817 - DNA, 25 bp, Homo sapien
gagcaatgagaggtggcctggcttt

SEQ ID NO: 986818 - DNA, 25 bp, Homo sapien
ccatgccatggctataccctggact

SEQ ID NO: 986819 - DNA, 25 bp, Homo sapien
accccatgccatggctataccctgg

SEQ ID NO: 986820 - DNA, 25 bp, Homo sapien
cactgtggtggcgcgtctgagcaat

SEQ ID NO: 986821 - DNA, 25 bp, Homo sapien
tctctgacaactgttcccttttggt

SEQ ID NO: 986822 - DNA, 25 bp, Homo sapien
gctcagagagcaggtctctttaaaa

SEQ ID NO: 986823 - DNA, 25 bp, Homo sapien
tgctcagagagcaggtctctttaaa

SEQ ID NO: 986824 - DNA, 25 bp, Homo sapien
cttgctcagagagcaggtctcttta

SEQ ID NO: 986825 - DNA, 25 bp, Homo sapien
tttatctgccaagttatccggcctc

SEQ ID NO: 986826 - DNA, 25 bp, Homo sapien
gtctgtctctggtgtattggtgtga

SEQ ID NO: 986827 - DNA, 25 bp, Homo sapien
tcagggacttgtgcaagtgtattcg

SEQ ID NO: 986828 - DNA, 25 bp, Homo sapien
tgaagtgatgtctcagggacttgtg

SEQ ID NO: 986829 - DNA, 25 bp, Homo sapien
tccagaaccagctgaccaccagcat

SEQ ID NO: 986830 - DNA, 25 bp, Homo sapien
aagaggaaccaggtgccaaagttca

SEQ ID NO: 986831 - DNA, 25 bp, Homo sapien
tcaccacctctgcggctggatactg

SEQ ID NO: 986832 - DNA, 25 bp, Homo sapien
ggtgccaaagttcaccacctctgcg

SEQ ID NO: 986833 - DNA, 25 bp, Homo sapien
ccaatggtagcggagtaggatatgc

SEQ ID NO: 986834 - DNA, 25 bp, Homo sapien
ccgatgatggtggtcaggccgccaa

SEQ ID NO: 986835 - DNA, 25 bp, Homo sapien
agtaggatatgctcagggagaggca

SEQ ID NO: 986836 - DNA, 25 bp, Homo sapien
catctggtcatggtgggacctgtac

SEQ ID NO: 986837 - DNA, 25 bp, Homo sapien
ccttgggaagcagttcacagcgttt

SEQ ID NO: 986838 - DNA, 25 bp, Homo sapien
cagttcacagcgtttcatgtaggaa

SEQ ID NO: 986839 - DNA, 25 bp, Homo sapien
gaaacagagctagaaggggccgttc

SEQ ID NO: 986840 - DNA, 25 bp, Homo sapien
gggaagcagttcacagcgtttcatg

SEQ ID NO: 986841 - DNA, 25 bp, Homo sapien
ggtgatcgagggcacaccattcagg

SEQ ID NO: 986842 - DNA, 25 bp, Homo sapien
ttgccctggtgttggtttgcagttt

SEQ ID NO: 986843 - DNA, 25 bp, Homo sapien
cttgccctggtgttggtttgcagtt

SEQ ID NO: 986844 - DNA, 25 bp, Homo sapien
tgatggggttggtgatcgagggcac

SEQ ID NO: 986845 - DNA, 25 bp, Homo sapien
aagttcgagtaactgtgtgcaggta

SEQ ID NO: 986846 - DNA, 25 bp, Homo sapien
tgtacccagctgaagtccaatgttt

SEQ ID NO: 986847 - DNA, 25 bp, Homo sapien
gaaaagatgtataaccagatttggg

SEQ ID NO: 986848 - DNA, 25 bp, Homo sapien
aaataatcacaagcaagtccacagt

SEQ ID NO: 986849 - DNA, 25 bp, Homo sapien
gattttcaagtgattccaaagcaca

SEQ ID NO: 986850 - DNA, 25 bp, Homo sapien
aactctaaggtggatctgtagctgt

SEQ ID NO: 986851 - DNA, 25 bp, Homo sapien
tgtagctgttgaaaatctggttctg

SEQ ID NO: 986852 - DNA, 25 bp, Homo sapien
tgggtttccatgaagaagtgctgag

SEQ ID NO: 986853 - DNA, 25 bp, Homo sapien
tgtgcatcagagtggtgaggtctgc

SEQ ID NO: 986854 - DNA, 25 bp, Homo sapien
tgcatcagagtggtgaggtctgcgt

SEQ ID NO: 986855 - DNA, 25 bp, Homo sapien
cgttgtgcatcagagtggtgaggtc

SEQ ID NO: 986856 - DNA, 25 bp, Homo sapien
ctcgttgtgcatcagagtggtgagg

SEQ ID NO: 986857 - DNA, 25 bp, Homo sapien
cagtgtaactgacacactgagtgat

SEQ ID NO: 986858 - DNA, 25 bp, Homo sapien
tgaagacagagagcgtattgggcac

SEQ ID NO: 986859 - DNA, 25 bp, Homo sapien
ccagtttgtcttagttgcgaggaca

SEQ ID NO: 986860 - DNA, 25 bp, Homo sapien
tattgggcacacacatgcgggatgt

SEQ ID NO: 986861 - DNA, 25 bp, Homo sapien
aaccaggagagctacgggatttgcc

SEQ ID NO: 986862 - DNA, 25 bp, Homo sapien
aaataaagcgatttcctgatggcac

SEQ ID NO: 986863 - DNA, 25 bp, Homo sapien
gaaatccaatatgctatgattgaag

SEQ ID NO: 986864 - DNA, 25 bp, Homo sapien
gcctgggatatcatcaagggtgatg

SEQ ID NO: 986865 - DNA, 25 bp, Homo sapien
gagttccagagaaggttggctgttc

SEQ ID NO: 986866 - DNA, 25 bp, Homo sapien
ggttggctgttctttacatccagac

SEQ ID NO: 986867 - DNA, 25 bp, Homo sapien
ccagagaaggttggctgttctttac

SEQ ID NO: 986868 - DNA, 25 bp, Homo sapien
agatgagttccagagaaggttggct

SEQ ID NO: 986869 - DNA, 25 bp, Homo sapien
ccagaacagggagttcagggaagct

SEQ ID NO: 986870 - DNA, 25 bp, Homo sapien
aggaagagccagaacagggagttca

SEQ ID NO: 986871 - DNA, 25 bp, Homo sapien
ccttgagcatttgggggaaaagagc

SEQ ID NO: 986872 - DNA, 25 bp, Homo sapien
acagggagttcagggaagcttcaga

SEQ ID NO: 986873 - DNA, 25 bp, Homo sapien
gagcaaaggagagatgaactccagc

SEQ ID NO: 986874 - DNA, 25 bp, Homo sapien
gaggagcaaaggagagatgaactcc

SEQ ID NO: 986875 - DNA, 25 bp, Homo sapien
gcaaaggagagatgaactccagcaa

SEQ ID NO: 986876 - DNA, 25 bp, Homo sapien
aaaggagagatgaactccagcaaac

SEQ ID NO: 986877 - DNA, 25 bp, Homo sapien
tgggttcggcctcttcggtgttgga

SEQ ID NO: 986878 - DNA, 25 bp, Homo sapien
ggtgttggagttgcccgccacgagc

SEQ ID NO: 986879 - DNA, 25 bp, Homo sapien
ttggagttgcccgccacgagctgct

SEQ ID NO: 986880 - DNA, 25 bp, Homo sapien
tgatgggttcggcctcttcggtgtt

SEQ ID NO: 986881 - DNA, 25 bp, Homo sapien
catggacagcaacgtggtacagcac

SEQ ID NO: 986882 - DNA, 25 bp, Homo sapien
tggaggtgttggacagccacatgga

SEQ ID NO: 986883 - DNA, 25 bp, Homo sapien
ggtacagcacatgaagcagagcagc

SEQ ID NO: 986884 - DNA, 25 bp, Homo sapien
acagccacatggacagcaacgtggt

SEQ ID NO: 986885 - DNA, 25 bp, Homo sapien
tgctttgccgccaagtcaccataga

SEQ ID NO: 986886 - DNA, 25 bp, Homo sapien
catagatatcagtgacccaatagag

SEQ ID NO: 986887 - DNA, 25 bp, Homo sapien
agcaattctgtgagcgccacggcac

SEQ ID NO: 986888 - DNA, 25 bp, Homo sapien
aatactttgtttgccctcgcagcca

SEQ ID NO: 986889 - DNA, 25 bp, Homo sapien
ttctgtacctacacgggtaactgcc

SEQ ID NO: 986890 - DNA, 25 bp, Homo sapien
gactttgccaattctgtacctacac

SEQ ID NO: 986891 - DNA, 25 bp, Homo sapien
cagtacgtttatcatgtggactcca

SEQ ID NO: 986892 - DNA, 25 bp, Homo sapien
cattggctgacagcgacttgacttt

SEQ ID NO: 986893 - DNA, 25 bp, Homo sapien
cactgggagctagaaggatgcccta

SEQ ID NO: 986894 - DNA, 25 bp, Homo sapien
aaaacagctgaagtggacatcccgc

SEQ ID NO: 986895 - DNA, 25 bp, Homo sapien
tgatgggcccctatatgttgtaagc

SEQ ID NO: 986896 - DNA, 25 bp, Homo sapien
ccataggagtcagggcagcttacat

SEQ ID NO: 986897 - DNA, 25 bp, Homo sapien
gtgttcttgaagtactccgccgcca

SEQ ID NO: 986898 - DNA, 25 bp, Homo sapien
cgtggtgttcttgaagtactccgcc

SEQ ID NO: 986899 - DNA, 25 bp, Homo sapien
cagagcaatgcgcttatgcaggttc

SEQ ID NO: 986900 - DNA, 25 bp, Homo sapien
cttggctccggccatcaagaccatg

SEQ ID NO: 986901 - DNA, 25 bp, Homo sapien
ttgtctaccgaggagagaaacccac

SEQ ID NO: 986902 - DNA, 25 bp, Homo sapien
tggaggcggctttgtggcacaactg

SEQ ID NO: 986903 - DNA, 25 bp, Homo sapien
cccacagaagatgcgggaccgttgt

SEQ ID NO: 986904 - DNA, 25 bp, Homo sapien
tgggagatggtctttccaccagccc

SEQ ID NO: 986905 - DNA, 25 bp, Homo sapien
atgcccacgggcccgcatgcagagg

SEQ ID NO: 986906 - DNA, 25 bp, Homo sapien
cattagcttggtctcgaaaggctgc

SEQ ID NO: 986907 - DNA, 25 bp, Homo sapien
ggctgcaaggtctgtaggctcccac

SEQ ID NO: 986908 - DNA, 25 bp, Homo sapien
atgcagaggaccggtcagcctccat

SEQ ID NO: 986909 - DNA, 25 bp, Homo sapien
gacacccagtacacagcagtcacga

SEQ ID NO: 986910 - DNA, 25 bp, Homo sapien
cattggaccggaggactccgaagaa

SEQ ID NO: 986911 - DNA, 25 bp, Homo sapien
atcagcacgtaagcacacgaggcct

SEQ ID NO: 986912 - DNA, 25 bp, Homo sapien
acagcagtcacgatcagcacgtaag

SEQ ID NO: 986913 - DNA, 25 bp, Homo sapien
gtgacattatggctgctccttcggg

SEQ ID NO: 986914 - DNA, 25 bp, Homo sapien
actggcaggcgagcatggtgaatac

SEQ ID NO: 986915 - DNA, 25 bp, Homo sapien
taacgcgggtactaggatacagccc

SEQ ID NO: 986916 - DNA, 25 bp, Homo sapien
cactggtgtgtagccaggcagctcg

SEQ ID NO: 986917 - DNA, 25 bp, Homo sapien
tcgttttccacgcagtttgaccacc

SEQ ID NO: 986918 - DNA, 25 bp, Homo sapien
ccactccaacttcacgggaaggagg

SEQ ID NO: 986919 - DNA, 25 bp, Homo sapien
ttgaccaccccagtgatatcccact

SEQ ID NO: 986920 - DNA, 25 bp, Homo sapien
tgctcgttttccacgcagtttgacc

SEQ ID NO: 986921 - DNA, 25 bp, Homo sapien
cgtttgcatgggtgtcgctggcccc

SEQ ID NO: 986922 - DNA, 25 bp, Homo sapien
ggctctcagataaccagggtcccag

SEQ ID NO: 986923 - DNA, 25 bp, Homo sapien
cagaccacggattggctccacggtt

SEQ ID NO: 986924 - DNA, 25 bp, Homo sapien
ggtgaactcccgacaaacacaggtg

SEQ ID NO: 986925 - DNA, 25 bp, Homo sapien
ccggtgggcgcaggtcggtactcac

SEQ ID NO: 986926 - DNA, 25 bp, Homo sapien
cccggtgggcgcaggtcggtactca

SEQ ID NO: 986927 - DNA, 25 bp, Homo sapien
agcgggacgcagacgaccagcagca

SEQ ID NO: 986928 - DNA, 25 bp, Homo sapien
agcaggagcgggacgcagacgacca

SEQ ID NO: 986929 - DNA, 25 bp, Homo sapien
agcttccggactcggagcaggccct

SEQ ID NO: 986930 - DNA, 25 bp, Homo sapien
cagcagcttccggactcggagcagg

SEQ ID NO: 986931 - DNA, 25 bp, Homo sapien
cacctgggctcgctgttggtaagac

SEQ ID NO: 986932 - DNA, 25 bp, Homo sapien
gctgtttctacaagaggctgggctc

SEQ ID NO: 986933 - DNA, 25 bp, Homo sapien
gatgagcatcgttttgtgaccagca

SEQ ID NO: 986934 - DNA, 25 bp, Homo sapien
tcagagttgcatgcggacttcaggt

SEQ ID NO: 986935 - DNA, 25 bp, Homo sapien
caaagatcgtttgcctcagcaccga

SEQ ID NO: 986936 - DNA, 25 bp, Homo sapien
acacagagctttcgctgggagggcc

SEQ ID NO: 986937 - DNA, 25 bp, Homo sapien
tcctagggctggagtgatgaccatc

SEQ ID NO: 986938 - DNA, 25 bp, Homo sapien
ggaatataaagggtctaggccagca

SEQ ID NO: 986939 - DNA, 25 bp, Homo sapien
tacagcaagtgtacaataagaccag

SEQ ID NO: 986940 - DNA, 25 bp, Homo sapien
gatgccaacgatggaggaaacttag

SEQ ID NO: 986941 - DNA, 25 bp, Homo sapien
gaaatgtaagccagatcccgcttgt

SEQ ID NO: 986942 - DNA, 25 bp, Homo sapien
gattttagaccattggacctgcaga

SEQ ID NO: 986943 - DNA, 25 bp, Homo sapien
tactactgggagcagccatctacat

SEQ ID NO: 986944 - DNA, 25 bp, Homo sapien
tatcagggtattgcacagtgtctag

SEQ ID NO: 986945 - DNA, 25 bp, Homo sapien
tctacataacatggtggtcagggac

SEQ ID NO: 986946 - DNA, 25 bp, Homo sapien
tacaaactgtgaagataggctacca

SEQ ID NO: 986947 - DNA, 25 bp, Homo sapien
tagtttaaaaagatatcgagtcaat

SEQ ID NO: 986948 - DNA, 25 bp, Homo sapien
gggagactctttgtgcattagcttg

SEQ ID NO: 986949 - DNA, 25 bp, Homo sapien
ggcacgggcctacatgccaccttgt

SEQ ID NO: 986950 - DNA, 25 bp, Homo sapien
gccaccttgttcgttgggagactct

SEQ ID NO: 986951 - DNA, 25 bp, Homo sapien
tgtctcttctagctcattcctcact

SEQ ID NO: 986952 - DNA, 25 bp, Homo sapien
atgttcattcaacccagcaccctag

SEQ ID NO: 986953 - DNA, 25 bp, Homo sapien
gtcaagaagtatatccttggcaaat

SEQ ID NO: 986954 - DNA, 25 bp, Homo sapien
tcccttaggaccgaaggaatctgtc

SEQ ID NO: 986955 - DNA, 25 bp, Homo sapien
tcactcttgagtgtgtggccactgc

SEQ ID NO: 986956 - DNA, 25 bp, Homo sapien
cccatggaggcgtcttgaatgacca

SEQ ID NO: 986957 - DNA, 25 bp, Homo sapien
gcctgccataggcaaaccattctgc

SEQ ID NO: 986958 - DNA, 25 bp, Homo sapien
ctttctggattactgtgctggtccc

SEQ ID NO: 986959 - DNA, 25 bp, Homo sapien
gaggagcgcatcaagtcgtgcctca

SEQ ID NO: 986960 - DNA, 25 bp, Homo sapien
cctggaagaggctaacgagggactg

SEQ ID NO: 986961 - DNA, 25 bp, Homo sapien
ctgtgaggagcgcatcaagtcgtgc

SEQ ID NO: 986962 - DNA, 25 bp, Homo sapien
agcgcatcaagtcgtgcctcagggc

SEQ ID NO: 986963 - DNA, 25 bp, Homo sapien
gatgtccttctgatggccgtgggac

SEQ ID NO: 986964 - DNA, 25 bp, Homo sapien
acggtgcggaagtctgaggccttcc

SEQ ID NO: 986965 - DNA, 25 bp, Homo sapien
tcgtccttgatggagatctgcaggt

SEQ ID NO: 986966 - DNA, 25 bp, Homo sapien
tgatctcaagttcggccagcaggaa

SEQ ID NO: 986967 - DNA, 25 bp, Homo sapien
gtgagaaatgtggatgtgcaaaaat

SEQ ID NO: 986968 - DNA, 25 bp, Homo sapien
ctggtgagaaatgtggatgtgcaaa

SEQ ID NO: 986969 - DNA, 25 bp, Homo sapien
atgtgcaaaaatatgaagtgaggca

SEQ ID NO: 986970 - DNA, 25 bp, Homo sapien
gatgtgcaaaaatatgaagtgaggc

SEQ ID NO: 986971 - DNA, 25 bp, Homo sapien
caggactgggttcaatggcagtgat

SEQ ID NO: 986972 - DNA, 25 bp, Homo sapien
ggacctctttggccggtgggcggca

SEQ ID NO: 986973 - DNA, 25 bp, Homo sapien
tctgcaggactgggttcaatggcag

SEQ ID NO: 986974 - DNA, 25 bp, Homo sapien
cctctttggccggtgggcggcaggg

SEQ ID NO: 986975 - DNA, 25 bp, Homo sapien
ctcacatttctgtggctgctttgac

SEQ ID NO: 986976 - DNA, 25 bp, Homo sapien
tgctgcccctcacatttctgtggct

SEQ ID NO: 986977 - DNA, 25 bp, Homo sapien
ccctgcactggtccaccaggcccag

SEQ ID NO: 986978 - DNA, 25 bp, Homo sapien
cctgcactggtccaccaggcccagc

SEQ ID NO: 986979 - DNA, 25 bp, Homo sapien
tctagggcagacatctcagtggctc

SEQ ID NO: 986980 - DNA, 25 bp, Homo sapien
ctggagtgcagccagctctagggca

SEQ ID NO: 986981 - DNA, 25 bp, Homo sapien
gggtagggacggctgctggagtgca

SEQ ID NO: 986982 - DNA, 25 bp, Homo sapien
agtggctcggcagccacccagatct

SEQ ID NO: 986983 - DNA, 25 bp, Homo sapien
ctctgcccagagagtgggcattctt

SEQ ID NO: 986984 - DNA, 25 bp, Homo sapien
gagagtgggcattcttcagttctga

SEQ ID NO: 986985 - DNA, 25 bp, Homo sapien
agagtgggcattcttcagttctgaa

SEQ ID NO: 986986 - DNA, 25 bp, Homo sapien
tgcccagagagtgggcattcttcag

SEQ ID NO: 986987 - DNA, 25 bp, Homo sapien
ctttgagtcagtggattgtgaactc

SEQ ID NO: 986988 - DNA, 25 bp, Homo sapien
ggctttgagtcagtggattgtgaac

SEQ ID NO: 986989 - DNA, 25 bp, Homo sapien
ctcggtttggctggctttgagtcag

SEQ ID NO: 986990 - DNA, 25 bp, Homo sapien
ttgagtcagtggattgtgaactcac

SEQ ID NO: 986991 - DNA, 25 bp, Homo sapien
agaatgttgctgtagattcccctgt

SEQ ID NO: 986992 - DNA, 25 bp, Homo sapien
tagattcccctgttaagagccttaa

SEQ ID NO: 986993 - DNA, 25 bp, Homo sapien
ttccccaatgcggaaggacatggcc

SEQ ID NO: 986994 - DNA, 25 bp, Homo sapien
ggacatggcccggagaagttgctcc

SEQ ID NO: 986995 - DNA, 25 bp, Homo sapien
ccacctgtggcacatagaagcctca

SEQ ID NO: 986996 - DNA, 25 bp, Homo sapien
tagaagcctcagcattgtaatacaa

SEQ ID NO: 986997 - DNA, 25 bp, Homo sapien
cctgctccacctgtggcacatagaa

SEQ ID NO: 986998 - DNA, 25 bp, Homo sapien
gaagcctcagcattgtaatacaaca

SEQ ID NO: 986999 - DNA, 25 bp, Homo sapien
gtagctgcaggtatgcccgtgccgt

SEQ ID NO: 987000 - DNA, 25 bp, Homo sapien
ccttccttttgcagacgtgcagaaa

SEQ ID NO: 987001 - DNA, 25 bp, Homo sapien
tcaaaaggtgaaaaatcgaccctca

SEQ ID NO: 987002 - DNA, 25 bp, Homo sapien
agaaatgcctactctgcctcagaag

SEQ ID NO: 987003 - DNA, 25 bp, Homo sapien
tgagttccatgtgttggatgcaccc

SEQ ID NO: 987004 - DNA, 25 bp, Homo sapien
tctgtacttgagttccatgtgttgg

SEQ ID NO: 987005 - DNA, 25 bp, Homo sapien
ttcatttgacgctctctgggattgg

SEQ ID NO: 987006 - DNA, 25 bp, Homo sapien
gactctgtttttgagcacatctgga

SEQ ID NO: 987007 - DNA, 25 bp, Homo sapien
aagccccacaactcacattggtgat

SEQ ID NO: 987008 - DNA, 25 bp, Homo sapien
actgccatagacaccttaattcttt

SEQ ID NO: 987009 - DNA, 25 bp, Homo sapien
tccatagtcgttgtaatatactgcc

SEQ ID NO: 987010 - DNA, 25 bp, Homo sapien
cacaactcacattggtgatgctccc

SEQ ID NO: 987011 - DNA, 25 bp, Homo sapien
caaaggacctagcacggggtagcaa

SEQ ID NO: 987012 - DNA, 25 bp, Homo sapien
tctgcaaggattgcccaaaggacct

SEQ ID NO: 987013 - DNA, 25 bp, Homo sapien
taaatctgcaaggattgcccaaagg

SEQ ID NO: 987014 - DNA, 25 bp, Homo sapien
ttgtaaatctgcaaggattgcccaa

SEQ ID NO: 987015 - DNA, 25 bp, Homo sapien
cgatggacgtggcttgccaggccat

SEQ ID NO: 987016 - DNA, 25 bp, Homo sapien
actcttgtgagtgaggacgatggac

SEQ ID NO: 987017 - DNA, 25 bp, Homo sapien
ctgcagttgcccattgaatacttgt

SEQ ID NO: 987018 - DNA, 25 bp, Homo sapien
atacttgttgattgatgctgaagcc

SEQ ID NO: 987019 - DNA, 25 bp, Homo sapien
tcccagacttttcgaatctgtaggc

SEQ ID NO: 987020 - DNA, 25 bp, Homo sapien
tccagtcccagacttttcgaatctg

SEQ ID NO: 987021 - DNA, 25 bp, Homo sapien
cgaatctgtaggctcaaatctccaa

SEQ ID NO: 987022 - DNA, 25 bp, Homo sapien
gacttttcgaatctgtaggctcaaa

SEQ ID NO: 987023 - DNA, 25 bp, Homo sapien
aagcttgagagcgaggcgagtgctg

SEQ ID NO: 987024 - DNA, 25 bp, Homo sapien
tgctgggcattgctacgacttggtt

SEQ ID NO: 987025 - DNA, 25 bp, Homo sapien
gacttggtttctacagaggtttgct

SEQ ID NO: 987026 - DNA, 25 bp, Homo sapien
tgccctcggatataagctgctgttc

SEQ ID NO: 987027 - DNA, 25 bp, Homo sapien
tgcctggggaatggctcttgctctg

SEQ ID NO: 987028 - DNA, 25 bp, Homo sapien
tcttgctctgtaattggagggatct

SEQ ID NO: 987029 - DNA, 25 bp, Homo sapien
cttgctctgtaattggagggatctc

SEQ ID NO: 987030 - DNA, 25 bp, Homo sapien
gctgtggggatggcagatggcagaa

SEQ ID NO: 987031 - DNA, 25 bp, Homo sapien
gtggggatggcagatggcagaaatt

SEQ ID NO: 987032 - DNA, 25 bp, Homo sapien
ctgtggggatggcagatggcagaaa

SEQ ID NO: 987033 - DNA, 25 bp, Homo sapien
tgtggggatggcagatggcagaaat

SEQ ID NO: 987034 - DNA, 25 bp, Homo sapien
agtcacttgtggattggggtattcc

SEQ ID NO: 987035 - DNA, 25 bp, Homo sapien
gctggcgggcttgtgcccagagcca

SEQ ID NO: 987036 - DNA, 25 bp, Homo sapien
tgtgatttgcaataagaggctggcg

SEQ ID NO: 987037 - DNA, 25 bp, Homo sapien
gaatggatgtgaacatatgctgtga

SEQ ID NO: 987038 - DNA, 25 bp, Homo sapien
agagccagtgggtgcctggactggg

SEQ ID NO: 987039 - DNA, 25 bp, Homo sapien
caatagtacctaaaggtgggataca

SEQ ID NO: 987040 - DNA, 25 bp, Homo sapien
taatggtgcattaggccagctggag

SEQ ID NO: 987041 - DNA, 25 bp, Homo sapien
tacaggaatctgaatggcttgagta

SEQ ID NO: 987042 - DNA, 25 bp, Homo sapien
cagctggagagcagataaggtcttc

SEQ ID NO: 987043 - DNA, 25 bp, Homo sapien
aggacacgaagatactccagttgcc

SEQ ID NO: 987044 - DNA, 25 bp, Homo sapien
gagagcccaataacaccaaactcag

SEQ ID NO: 987045 - DNA, 25 bp, Homo sapien
cacgaagatactccagttgccatcc

SEQ ID NO: 987046 - DNA, 25 bp, Homo sapien
ccatccttgatgcatttctgccaag

SEQ ID NO: 987047 - DNA, 25 bp, Homo sapien
ccacagcagcattgaagaggcctct

SEQ ID NO: 987048 - DNA, 25 bp, Homo sapien
tttctggttacagcagcaccacagc

SEQ ID NO: 987049 - DNA, 25 bp, Homo sapien
gcttcccctggtctctgtagctgct

SEQ ID NO: 987050 - DNA, 25 bp, Homo sapien
gccggctggctcagaaaagctcttt

SEQ ID NO: 987051 - DNA, 25 bp, Homo sapien
tctggcaatgactaagggtgctgca

SEQ ID NO: 987052 - DNA, 25 bp, Homo sapien
tctctggcaatgactaagggtgctg

SEQ ID NO: 987053 - DNA, 25 bp, Homo sapien
ttaaactccagagcgagcctctgcc

SEQ ID NO: 987054 - DNA, 25 bp, Homo sapien
ctgctcttgggcaaccctgtgttaa

SEQ ID NO: 987055 - DNA, 25 bp, Homo sapien
ccccagacatgtcagcgccttttgg

SEQ ID NO: 987056 - DNA, 25 bp, Homo sapien
acatgtcagcgccttttggtcttcc

SEQ ID NO: 987057 - DNA, 25 bp, Homo sapien
ggagcccccagacatgtcagcgcct

SEQ ID NO: 987058 - DNA, 25 bp, Homo sapien
gcaggctgctggcaaccgttccaac

SEQ ID NO: 987059 - DNA, 25 bp, Homo sapien
ttggggccttaattagaagcagcag

SEQ ID NO: 987060 - DNA, 25 bp, Homo sapien
ggggccttaattagaagcagcagtg

SEQ ID NO: 987061 - DNA, 25 bp, Homo sapien
cttggggccttaattagaagcagca

SEQ ID NO: 987062 - DNA, 25 bp, Homo sapien
ggccttaattagaagcagcagtggc

SEQ ID NO: 987063 - DNA, 25 bp, Homo sapien
tatttgatgtgattgcacaaaagag

SEQ ID NO: 987064 - DNA, 25 bp, Homo sapien
ctatttgatgtgattgcacaaaaga

SEQ ID NO: 987065 - DNA, 25 bp, Homo sapien
tcaagggggtcttgcacctggactt

SEQ ID NO: 987066 - DNA, 25 bp, Homo sapien
ccttggttaacaggaacctcataag

SEQ ID NO: 987067 - DNA, 25 bp, Homo sapien
tctgacatatcaagggggtcttgca

SEQ ID NO: 987068 - DNA, 25 bp, Homo sapien
ctcataagaactgatgttttctgac

SEQ ID NO: 987069 - DNA, 25 bp, Homo sapien
cccaatagttggtggataagctgag

SEQ ID NO: 987070 - DNA, 25 bp, Homo sapien
tcagctttcgcttccttggcatgag

SEQ ID NO: 987071 - DNA, 25 bp, Homo sapien
gcatgagcagcgacaaacatggtgg

SEQ ID NO: 987072 - DNA, 25 bp, Homo sapien
gagacttgaggatgttccaacaccc

SEQ ID NO: 987073 - DNA, 25 bp, Homo sapien
ccaggccagagtcatgtggtaccat

SEQ ID NO: 987074 - DNA, 25 bp, Homo sapien
gccaggccagagtcatgtggtacca

SEQ ID NO: 987075 - DNA, 25 bp, Homo sapien
tggccaggccagagtcatgtggtac

SEQ ID NO: 987076 - DNA, 25 bp, Homo sapien
ctgtggccaggccagagtcatgtgg

SEQ ID NO: 987077 - DNA, 25 bp, Homo sapien
gtgaggagcaaagtactactagtgg

SEQ ID NO: 987078 - DNA, 25 bp, Homo sapien
gctattttataccacctaactggca

SEQ ID NO: 987079 - DNA, 25 bp, Homo sapien
cagacaataccaaaggtgaggagca

SEQ ID NO: 987080 - DNA, 25 bp, Homo sapien
aaagagcacatgatatgcaaataga

SEQ ID NO: 987081 - DNA, 25 bp, Homo sapien
ccttagctgcctttttcggagatga

SEQ ID NO: 987082 - DNA, 25 bp, Homo sapien
cactttgggcaagaggacccttagc

SEQ ID NO: 987083 - DNA, 25 bp, Homo sapien
tataaggtaggctgctggatgcact

SEQ ID NO: 987084 - DNA, 25 bp, Homo sapien
tgattggacctggatcaggacccca

SEQ ID NO: 987085 - DNA, 25 bp, Homo sapien
caaaatctaggacgtgatgtgagag

SEQ ID NO: 987086 - DNA, 25 bp, Homo sapien
tcaaaatctaggacgtgatgtgaga

SEQ ID NO: 987087 - DNA, 25 bp, Homo sapien
aatctaggacgtgatgtgagaggtg

SEQ ID NO: 987088 - DNA, 25 bp, Homo sapien
aaaatctaggacgtgatgtgagagg

SEQ ID NO: 987089 - DNA, 25 bp, Homo sapien
caatcagagcgaatgttaggaaacc

SEQ ID NO: 987090 - DNA, 25 bp, Homo sapien
gatcatgtgtcatgtgggctgcagc

SEQ ID NO: 987091 - DNA, 25 bp, Homo sapien
tcacatggagctctggtggctgtcc

SEQ ID NO: 987092 - DNA, 25 bp, Homo sapien
ccacgggaagattggcagggatcat

SEQ ID NO: 987093 - DNA, 25 bp, Homo sapien
gcctttgtatagtccttggtggcac

SEQ ID NO: 987094 - DNA, 25 bp, Homo sapien
gggatgacgggcctttgtatagtcc

SEQ ID NO: 987095 - DNA, 25 bp, Homo sapien
acacttgaagcacagtatctttccc

SEQ ID NO: 987096 - DNA, 25 bp, Homo sapien
cctttcacaggacgtaccatggctg

SEQ ID NO: 987097 - DNA, 25 bp, Homo sapien
gctgtctttatgtctatgggatgga

SEQ ID NO: 987098 - DNA, 25 bp, Homo sapien
tgggctgtctttatgtctatgggat

SEQ ID NO: 987099 - DNA, 25 bp, Homo sapien
cttgggctgtctttatgtctatggg

SEQ ID NO: 987100 - DNA, 25 bp, Homo sapien
ggctgtctttatgtctatgggatgg

SEQ ID NO: 987101 - DNA, 25 bp, Homo sapien
ctgtgactcccaggataaatggatc

SEQ ID NO: 987102 - DNA, 25 bp, Homo sapien
tggatctattttgggctcctgggct

SEQ ID NO: 987103 - DNA, 25 bp, Homo sapien
ccccatgctagagtcaaagtgttcc

SEQ ID NO: 987104 - DNA, 25 bp, Homo sapien
cttttgggcagactgagtagtgcac

SEQ ID NO: 987105 - DNA, 25 bp, Homo sapien
tagacaagacatcaattgatgcatt

SEQ ID NO: 987106 - DNA, 25 bp, Homo sapien
acaagacatcaattgatgcattggc

SEQ ID NO: 987107 - DNA, 25 bp, Homo sapien
tattagacaagacatcaattgatgc

SEQ ID NO: 987108 - DNA, 25 bp, Homo sapien
ctattagacaagacatcaattgatg

SEQ ID NO: 987109 - DNA, 25 bp, Homo sapien
aagtctttgcaggtagtctctgtcc

SEQ ID NO: 987110 - DNA, 25 bp, Homo sapien
ccccaagtctttgcaggtagtctct

SEQ ID NO: 987111 - DNA, 25 bp, Homo sapien
ggaccccaagtctttgcaggtagtc

SEQ ID NO: 987112 - DNA, 25 bp, Homo sapien
gggctgatgtagtcagggtcactgc

SEQ ID NO: 987113 - DNA, 25 bp, Homo sapien
agtcacagccgggggttgagtatgt

SEQ ID NO: 987114 - DNA, 25 bp, Homo sapien
aagtcccattcaccccagtcacagc

SEQ ID NO: 987115 - DNA, 25 bp, Homo sapien
cacagccgggggttgagtatgtttc

SEQ ID NO: 987116 - DNA, 25 bp, Homo sapien
ctgaagtcgccagaaagtcccattc

SEQ ID NO: 987117 - DNA, 25 bp, Homo sapien
ctttcttctgcttagggtgctcctc

SEQ ID NO: 987118 - DNA, 25 bp, Homo sapien
ttcttctgcttagggtgctcctcat

SEQ ID NO: 987119 - DNA, 25 bp, Homo sapien
tgcttagggtgctcctcatccttct

SEQ ID NO: 987120 - DNA, 25 bp, Homo sapien
ttctgcttagggtgctcctcatcct

SEQ ID NO: 987121 - DNA, 25 bp, Homo sapien
taggctgaaagatgtcctccgcgga

SEQ ID NO: 987122 - DNA, 25 bp, Homo sapien
tataacaatcgtggctggcaacagc

SEQ ID NO: 987123 - DNA, 25 bp, Homo sapien
tggcaacagcttaacacgctcaggg

SEQ ID NO: 987124 - DNA, 25 bp, Homo sapien
tctcataatgcaacgtttcaggaaa

SEQ ID NO: 987125 - DNA, 25 bp, Homo sapien
tgctctggcagtgtgcccgggagac

SEQ ID NO: 987126 - DNA, 25 bp, Homo sapien
gctctggcagtgtgcccgggagacc

SEQ ID NO: 987127 - DNA, 25 bp, Homo sapien
ttgtctgctgggttttccgctgatt

SEQ ID NO: 987128 - DNA, 25 bp, Homo sapien
tgtctgctgggttttccgctgattg

SEQ ID NO: 987129 - DNA, 25 bp, Homo sapien
tatcgtgctgttccccaagtccttt

SEQ ID NO: 987130 - DNA, 25 bp, Homo sapien
caagtcctttgctccgggtgattgc

SEQ ID NO: 987131 - DNA, 25 bp, Homo sapien
gacatttatcgtgctgttccccaag

SEQ ID NO: 987132 - DNA, 25 bp, Homo sapien
gctccgggtgattgcactccaggtt

SEQ ID NO: 987133 - DNA, 25 bp, Homo sapien
actagggttctacagaccatcctga

SEQ ID NO: 987134 - DNA, 25 bp, Homo sapien
catcctgaaggcattggggtccgga

SEQ ID NO: 987135 - DNA, 25 bp, Homo sapien
tctgacctataattctcctgtttgg

SEQ ID NO: 987136 - DNA, 25 bp, Homo sapien
gggtccggatcattgcatactgcaa

SEQ ID NO: 987137 - DNA, 25 bp, Homo sapien
tcatgtgttcttgccagttctcagg

SEQ ID NO: 987138 - DNA, 25 bp, Homo sapien
ggtttggactctcggttgttatatc

SEQ ID NO: 987139 - DNA, 25 bp, Homo sapien
tgttcttgccagttctcagggtctg

SEQ ID NO: 987140 - DNA, 25 bp, Homo sapien
catccccaaatctaaaccgtctggt

SEQ ID NO: 987141 - DNA, 25 bp, Homo sapien
gtctggaacggagcgagcctgccca

SEQ ID NO: 987142 - DNA, 25 bp, Homo sapien
tgtgatagctgatttctcatagagc

SEQ ID NO: 987143 - DNA, 25 bp, Homo sapien
tccttttgcgggtgcagaccactgg

SEQ ID NO: 987144 - DNA, 25 bp, Homo sapien
tagagctccccttcccaagataggc

SEQ ID NO: 987145 - DNA, 25 bp, Homo sapien
ggctggggagagccattagcatttg

SEQ ID NO: 987146 - DNA, 25 bp, Homo sapien
ccttgccgacagctcagctggcagc

SEQ ID NO: 987147 - DNA, 25 bp, Homo sapien
ggccactcatgacattggctgtgtg

SEQ ID NO: 987148 - DNA, 25 bp, Homo sapien
gtcccccttgccgacagctcagctg

SEQ ID NO: 987149 - DNA, 25 bp, Homo sapien
gaaggtgaagacctagtggatatga

SEQ ID NO: 987150 - DNA, 25 bp, Homo sapien
ggctccaagtctcttacctgccttg

SEQ ID NO: 987151 - DNA, 25 bp, Homo sapien
caggcaccaaggatcggtggcagca

SEQ ID NO: 987152 - DNA, 25 bp, Homo sapien
tcttggtggcccgaggctccaagtc

SEQ ID NO: 987153 - DNA, 25 bp, Homo sapien
agagtgtgataatgccgggagtatc

SEQ ID NO: 987154 - DNA, 25 bp, Homo sapien
aagccgtgcagacgttaccttccac

SEQ ID NO: 987155 - DNA, 25 bp, Homo sapien
tcaaacacagaagcatccggttccc

SEQ ID NO: 987156 - DNA, 25 bp, Homo sapien
tgccgggagtatctgacccagctgg

SEQ ID NO: 987157 - DNA, 25 bp, Homo sapien
ttgaggtgagggcagacatcccttt

SEQ ID NO: 987158 - DNA, 25 bp, Homo sapien
aggtgagggcagacatccctttcat

SEQ ID NO: 987159 - DNA, 25 bp, Homo sapien
agcttgaggtgagggcagacatccc

SEQ ID NO: 987160 - DNA, 25 bp, Homo sapien
cagcttgaggtgagggcagacatcc

SEQ ID NO: 987161 - DNA, 25 bp, Homo sapien
cagtttttctggtttgtccatcctc

SEQ ID NO: 987162 - DNA, 25 bp, Homo sapien
catccctgccatgattaattgcttg

SEQ ID NO: 987163 - DNA, 25 bp, Homo sapien
catgcagctgtttatgactaggttg

SEQ ID NO: 987164 - DNA, 25 bp, Homo sapien
ttgcttggctaaggagtcatgcagc

SEQ ID NO: 987165 - DNA, 25 bp, Homo sapien
taaagggacaatagagtggcttaga

SEQ ID NO: 987166 - DNA, 25 bp, Homo sapien
cttaaagggacaatagagtggctta

SEQ ID NO: 987167 - DNA, 25 bp, Homo sapien
ttaaagggacaatagagtggcttag

SEQ ID NO: 987168 - DNA, 25 bp, Homo sapien
tgccagaatagggggtgaaatttga

SEQ ID NO: 987169 - DNA, 25 bp, Homo sapien
ccagaatagggggtgaaatttgaag

SEQ ID NO: 987170 - DNA, 25 bp, Homo sapien
gccagaatagggggtgaaatttgaa

SEQ ID NO: 987171 - DNA, 25 bp, Homo sapien
gctgactgcgtgactgcgtttctgc

SEQ ID NO: 987172 - DNA, 25 bp, Homo sapien
cgtgactgcgtttctgctcttagaa

SEQ ID NO: 987173 - DNA, 25 bp, Homo sapien
gactgcgtgactgcgtttctgctct

SEQ ID NO: 987174 - DNA, 25 bp, Homo sapien
agaaggctgactgcgtgactgcgtt

SEQ ID NO: 987175 - DNA, 25 bp, Homo sapien
tcttcccgcagatcaagtgctgtct

SEQ ID NO: 987176 - DNA, 25 bp, Homo sapien
gatcaagtgctgtcttggtacctga

SEQ ID NO: 987177 - DNA, 25 bp, Homo sapien
tggtatcccatagacctgacttccc

SEQ ID NO: 987178 - DNA, 25 bp, Homo sapien
tctgtcctgtgtggtatcccataga

SEQ ID NO: 987179 - DNA, 25 bp, Homo sapien
cattagatgtgcaagagagaagtca

SEQ ID NO: 987180 - DNA, 25 bp, Homo sapien
caagtcctattgatgctacctccta

SEQ ID NO: 987181 - DNA, 25 bp, Homo sapien
aagcttctactaggtttccctggca

SEQ ID NO: 987182 - DNA, 25 bp, Homo sapien
caattactagctggataccaactcc

SEQ ID NO: 987183 - DNA, 25 bp, Homo sapien
cttataaacgtggacaagttgtatc

SEQ ID NO: 987184 - DNA, 25 bp, Homo sapien
ttcttataaacgtggacaagttgta

SEQ ID NO: 987185 - DNA, 25 bp, Homo sapien
ctttcttataaacgtggacaagttg

SEQ ID NO: 987186 - DNA, 25 bp, Homo sapien
taaacgtggacaagttgtatcttat

SEQ ID NO: 987187 - DNA, 25 bp, Homo sapien
agaaaattgcagaaggttagcactg

SEQ ID NO: 987188 - DNA, 25 bp, Homo sapien
aaaattgcagaaggttagcactgac

SEQ ID NO: 987189 - DNA, 25 bp, Homo sapien
tttaggatgaacatcagaaaattgc

SEQ ID NO: 987190 - DNA, 25 bp, Homo sapien
tatggggaaatttaggatgaacatc

SEQ ID NO: 987191 - DNA, 25 bp, Homo sapien
tgtcaggatgtctgacaactctccg

SEQ ID NO: 987192 - DNA, 25 bp, Homo sapien
aggagtgattcccatttgtcaggat

SEQ ID NO: 987193 - DNA, 25 bp, Homo sapien
acaccgagaataggagtgattccca

SEQ ID NO: 987194 - DNA, 25 bp, Homo sapien
tgtgtgaccaaacaccgagaatagg

SEQ ID NO: 987195 - DNA, 25 bp, Homo sapien
gacgctgtaagtttacatggtctgt

SEQ ID NO: 987196 - DNA, 25 bp, Homo sapien
tttacacgacaaatcatctgtctga

SEQ ID NO: 987197 - DNA, 25 bp, Homo sapien
tctgtctgaagtcggggcaaccaca

SEQ ID NO: 987198 - DNA, 25 bp, Homo sapien
tgacgctgtaagtttacatggtctg

SEQ ID NO: 987199 - DNA, 25 bp, Homo sapien
ccgacctcacgtggttctgaagatg

SEQ ID NO: 987200 - DNA, 25 bp, Homo sapien
gaaggttcatgtctgagcttgggaa

SEQ ID NO: 987201 - DNA, 25 bp, Homo sapien
caggaaaatcatagaccctcaccaa

SEQ ID NO: 987202 - DNA, 25 bp, Homo sapien
tcttgccatgtgcaactctctgagc

SEQ ID NO: 987203 - DNA, 25 bp, Homo sapien
cccctcatgatgacacttgggttta

SEQ ID NO: 987204 - DNA, 25 bp, Homo sapien
ccataaatgcatttattcctggtcc

SEQ ID NO: 987205 - DNA, 25 bp, Homo sapien
cttgggtttagccaaccaaacactg

SEQ ID NO: 987206 - DNA, 25 bp, Homo sapien
tttgatgattggcacccctcatgat

SEQ ID NO: 987207 - DNA, 25 bp, Homo sapien
tctagacttcagggctagggtgccc

SEQ ID NO: 987208 - DNA, 25 bp, Homo sapien
acttcagggctagggtgccccagcc

SEQ ID NO: 987209 - DNA, 25 bp, Homo sapien
tgcctgctggtggatgaggatgggc

SEQ ID NO: 987210 - DNA, 25 bp, Homo sapien
ccttgcctgctggtggatgaggatg

SEQ ID NO: 987211 - DNA, 25 bp, Homo sapien
cagtatcattgttggagtgagtcat

SEQ ID NO: 987212 - DNA, 25 bp, Homo sapien
gaatatactccgtgcaggattaata

SEQ ID NO: 987213 - DNA, 25 bp, Homo sapien
cagagaatatactccgtgcaggatt

SEQ ID NO: 987214 - DNA, 25 bp, Homo sapien
atatactccgtgcaggattaatatt

SEQ ID NO: 987215 - DNA, 25 bp, Homo sapien
agagaatatactccgtgcaggatta

SEQ ID NO: 987216 - DNA, 25 bp, Homo sapien
tggtttggttatcctcagagaggaa

SEQ ID NO: 987217 - DNA, 25 bp, Homo sapien
tgttctcctcagcaccatcaaaaac

SEQ ID NO: 987218 - DNA, 25 bp, Homo sapien
cagagaggaattccttgttctcctc

SEQ ID NO: 987219 - DNA, 25 bp, Homo sapien
ggtcatacaaccaaaacattctgca

SEQ ID NO: 987220 - DNA, 25 bp, Homo sapien
taagattgccaaacgcaggtgcagc

SEQ ID NO: 987221 - DNA, 25 bp, Homo sapien
tcccatgagggcagtccagttagag

SEQ ID NO: 987222 - DNA, 25 bp, Homo sapien
tctggagtagaacccatcagggtgg

SEQ ID NO: 987223 - DNA, 25 bp, Homo sapien
tctgaagtattagtaggtcgctgca

SEQ ID NO: 987224 - DNA, 25 bp, Homo sapien
gtgaccatgggctagtgtggacctc

SEQ ID NO: 987225 - DNA, 25 bp, Homo sapien
gtgtggacctcaagggagctgcttt

SEQ ID NO: 987226 - DNA, 25 bp, Homo sapien
ccatgggctagtgtggacctcaagg

SEQ ID NO: 987227 - DNA, 25 bp, Homo sapien
gcaattgttagcttctggggtgacc

SEQ ID NO: 987228 - DNA, 25 bp, Homo sapien
ttatgttttattttccctccactca

SEQ ID NO: 987229 - DNA, 25 bp, Homo sapien
tagagatgactacaaaaggaaggtg

SEQ ID NO: 987230 - DNA, 25 bp, Homo sapien
taactaaatgtttgagtcaatcaag

SEQ ID NO: 987231 - DNA, 25 bp, Homo sapien
caatcaagcttctggtatagttgta

SEQ ID NO: 987232 - DNA, 25 bp, Homo sapien
ctagaagtgggataagattaactaa

SEQ ID NO: 987233 - DNA, 25 bp, Homo sapien
tagtcttcctccattaccgcttaga

SEQ ID NO: 987234 - DNA, 25 bp, Homo sapien
gcattcggatgtacatgaactagga

SEQ ID NO: 987235 - DNA, 25 bp, Homo sapien
aaacccaactgcgtcaaaagtatga

SEQ ID NO: 987236 - DNA, 25 bp, Homo sapien
gaactaggatacttatgagaaaccc

SEQ ID NO: 987237 - DNA, 25 bp, Homo sapien
gaatgataggacaatgcactctctg

SEQ ID NO: 987238 - DNA, 25 bp, Homo sapien
aaaacaccctgttgcactacgttga

SEQ ID NO: 987239 - DNA, 25 bp, Homo sapien
gataatagattaaccctgctgtaga

SEQ ID NO: 987240 - DNA, 25 bp, Homo sapien
tgtaggagggcactctcaccagctt

SEQ ID NO: 987241 - DNA, 25 bp, Homo sapien
gcagcgctcttaactatgccaggaa

SEQ ID NO: 987242 - DNA, 25 bp, Homo sapien
ccaggaaatccccagtagagtgcat

SEQ ID NO: 987243 - DNA, 25 bp, Homo sapien
ttggtgcagtaagtaatcagcctcc

SEQ ID NO: 987244 - DNA, 25 bp, Homo sapien
tgctcagacagttagggctaccaaa

SEQ ID NO: 987245 - DNA, 25 bp, Homo sapien
ctttgattgcctggttgtcagtggc

SEQ ID NO: 987246 - DNA, 25 bp, Homo sapien
tcagtggcttcaaaggcggtcagtc

SEQ ID NO: 987247 - DNA, 25 bp, Homo sapien
gcttcaaaggcggtcagtccatctg

SEQ ID NO: 987248 - DNA, 25 bp, Homo sapien
tcaaaggcggtcagtccatctgggc

SEQ ID NO: 987249 - DNA, 25 bp, Homo sapien
ggactataagaaggttccctgcgat

SEQ ID NO: 987250 - DNA, 25 bp, Homo sapien
ggaacattttatctgcaacgcggca

SEQ ID NO: 987251 - DNA, 25 bp, Homo sapien
gactgctctgaacgcttaacttgga

SEQ ID NO: 987252 - DNA, 25 bp, Homo sapien
gctccatgggagcagtaattcacca

SEQ ID NO: 987253 - DNA, 25 bp, Homo sapien
gaaaaacgtaaagcatcaaagacat

SEQ ID NO: 987254 - DNA, 25 bp, Homo sapien
catcatgtcttgttactctgcttaa

SEQ ID NO: 987255 - DNA, 25 bp, Homo sapien
cccacagtacttgttactacctgaa

SEQ ID NO: 987256 - DNA, 25 bp, Homo sapien
tattggtatacctgtttactctgcc

SEQ ID NO: 987257 - DNA, 25 bp, Homo sapien
aggaaacatgaccctcatagacagc

SEQ ID NO: 987258 - DNA, 25 bp, Homo sapien
aacatgaccctcatagacagcagac

SEQ ID NO: 987259 - DNA, 25 bp, Homo sapien
acatgaccctcatagacagcagaca

SEQ ID NO: 987260 - DNA, 25 bp, Homo sapien
aaacatgaccctcatagacagcaga

SEQ ID NO: 987261 - DNA, 25 bp, Homo sapien
ccttccaccttctagtgtccggttg

SEQ ID NO: 987262 - DNA, 25 bp, Homo sapien
ctagtgtccggttgacatcttctcc

SEQ ID NO: 987263 - DNA, 25 bp, Homo sapien
ggatttcaagctgcccacaatctgc

SEQ ID NO: 987264 - DNA, 25 bp, Homo sapien
gaaattccaggatttcaagctgccc

SEQ ID NO: 987265 - DNA, 25 bp, Homo sapien
ttcgctatggaccagctgcaataca

SEQ ID NO: 987266 - DNA, 25 bp, Homo sapien
tcgctatggaccagctgcaatacat

SEQ ID NO: 987267 - DNA, 25 bp, Homo sapien
cttcgctatggaccagctgcaatac

SEQ ID NO: 987268 - DNA, 25 bp, Homo sapien
agatggcacaatagaaagaaagaag

SEQ ID NO: 987269 - DNA, 25 bp, Homo sapien
ggacgaaagtataacatcaacctgc

SEQ ID NO: 987270 - DNA, 25 bp, Homo sapien
gtaaggacgaaagtataacatcaac

SEQ ID NO: 987271 - DNA, 25 bp, Homo sapien
gacagatggcacaatagaaagaaag

SEQ ID NO: 987272 - DNA, 25 bp, Homo sapien
tgttaacgtcacaccaaatgaactt

SEQ ID NO: 987273 - DNA, 25 bp, Homo sapien
aatgttaacgtcacaccaaatgaac

SEQ ID NO: 987274 - DNA, 25 bp, Homo sapien
atgttaacgtcacaccaaatgaact

SEQ ID NO: 987275 - DNA, 25 bp, Homo sapien
aatgcatcaaactttcaatgataca

SEQ ID NO: 987276 - DNA, 25 bp, Homo sapien
tgttatgtattcttatcccacctat

SEQ ID NO: 987277 - DNA, 25 bp, Homo sapien
tcttctttggaaggtttagaagcaa

SEQ ID NO: 987278 - DNA, 25 bp, Homo sapien
tagaagcaattaattacacttagaa

SEQ ID NO: 987279 - DNA, 25 bp, Homo sapien
tcagtggctgacactgtaggtgctc

SEQ ID NO: 987280 - DNA, 25 bp, Homo sapien
taagattctaattcatggctccaca

SEQ ID NO: 987281 - DNA, 25 bp, Homo sapien
agtgaaaactgctaaccagccttct

SEQ ID NO: 987282 - DNA, 25 bp, Homo sapien
gaactcatacaaccatcttatctgc

SEQ ID NO: 987283 - DNA, 25 bp, Homo sapien
catgattttaatgtgtaaaattcct

SEQ ID NO: 987284 - DNA, 25 bp, Homo sapien
tgattttaatgtgtaaaattccttg

SEQ ID NO: 987285 - DNA, 25 bp, Homo sapien
aacatgattttaatgtgtaaaattc

SEQ ID NO: 987286 - DNA, 25 bp, Homo sapien
agaaacatgattttaatgtgtaaaa

SEQ ID NO: 987287 - DNA, 25 bp, Homo sapien
ttggccacatagtctttcacctcat

SEQ ID NO: 987288 - DNA, 25 bp, Homo sapien
tcatccaagtctccgtttttcaggg

SEQ ID NO: 987289 - DNA, 25 bp, Homo sapien
gggcccacatgaactccttgtcgca

SEQ ID NO: 987290 - DNA, 25 bp, Homo sapien
tttcagggcccacatgaactccttg

SEQ ID NO: 987291 - DNA, 25 bp, Homo sapien
agcagcaagcggatgccgccgggcg

SEQ ID NO: 987292 - DNA, 25 bp, Homo sapien
cagcagagaggttccgcctggccga

SEQ ID NO: 987293 - DNA, 25 bp, Homo sapien
gttggccgggcagaagatgaggagg

SEQ ID NO: 987294 - DNA, 25 bp, Homo sapien
aagagaaggagggttaggctgccag

SEQ ID NO: 987295 - DNA, 25 bp, Homo sapien
tacacaaccacttgaccaaaaaatc

SEQ ID NO: 987296 - DNA, 25 bp, Homo sapien
aaattgtgatagtcatcatttgaag

SEQ ID NO: 987297 - DNA, 25 bp, Homo sapien
aagcatcatgcaaaatcttgacacc

SEQ ID NO: 987298 - DNA, 25 bp, Homo sapien
aataataatgcaagagtgtccaatc

SEQ ID NO: 987299 - DNA, 25 bp, Homo sapien
ttatgtcacttatttctttatagct

SEQ ID NO: 987300 - DNA, 25 bp, Homo sapien
gctttccttatgtggcttattttcc

SEQ ID NO: 987301 - DNA, 25 bp, Homo sapien
agccaaaggattgtgattgttcttt

SEQ ID NO: 987302 - DNA, 25 bp, Homo sapien
tagctttccttatgtggcttatttt

SEQ ID NO: 987303 - DNA, 25 bp, Homo sapien
ctgagttccttagggtagctggcca

SEQ ID NO: 987304 - DNA, 25 bp, Homo sapien
gactgagttccttagggtagctggc

SEQ ID NO: 987305 - DNA, 25 bp, Homo sapien
aggaggactgagttccttagggtag

SEQ ID NO: 987306 - DNA, 25 bp, Homo sapien
cagtgatgtgcgcgctggaagaatc

SEQ ID NO: 987307 - DNA, 25 bp, Homo sapien
gactgctcaatttttatagctccct

SEQ ID NO: 987308 - DNA, 25 bp, Homo sapien
tctgtcctgttttgggtatcctgga

SEQ ID NO: 987309 - DNA, 25 bp, Homo sapien
gcatctgtatgtttcttacttctgt

SEQ ID NO: 987310 - DNA, 25 bp, Homo sapien
tccttgtcctcatttctacctcggg

SEQ ID NO: 987311 - DNA, 25 bp, Homo sapien
actgttctaggtttcttcagtgaat

SEQ ID NO: 987312 - DNA, 25 bp, Homo sapien
tcttcagtgaattcagtgttggcat

SEQ ID NO: 987313 - DNA, 25 bp, Homo sapien
tgttctaggtttcttcagtgaattc

SEQ ID NO: 987314 - DNA, 25 bp, Homo sapien
tttcttcagtgaattcagtgttggc

SEQ ID NO: 987315 - DNA, 25 bp, Homo sapien
aagagtcagcaaggaggaaagcctg

SEQ ID NO: 987316 - DNA, 25 bp, Homo sapien
gaaagagtcagcaaggaggaaagcc

SEQ ID NO: 987317 - DNA, 25 bp, Homo sapien
aaggaaagagtcagcaaggaggaaa

SEQ ID NO: 987318 - DNA, 25 bp, Homo sapien
ggaaagagtcagcaaggaggaaagc

SEQ ID NO: 987319 - DNA, 25 bp, Homo sapien
tgtgttggccagttttctcccattc

SEQ ID NO: 987320 - DNA, 25 bp, Homo sapien
tgttggccagttttctcccattcat

SEQ ID NO: 987321 - DNA, 25 bp, Homo sapien
tccttggttgtgttggccagttttc

SEQ ID NO: 987322 - DNA, 25 bp, Homo sapien
ttgtcatggtccttggttgtgttgg

SEQ ID NO: 987323 - DNA, 25 bp, Homo sapien
taatgacaatacatctttaaagttg

SEQ ID NO: 987324 - DNA, 25 bp, Homo sapien
taaagttgtagagcataccagtcat

SEQ ID NO: 987325 - DNA, 25 bp, Homo sapien
tgctcgccccgaggttaccctgatt

SEQ ID NO: 987326 - DNA, 25 bp, Homo sapien
ttccactttcccttaatgacaatac

SEQ ID NO: 987327 - DNA, 25 bp, Homo sapien
taattaatggcgctatttatgtgcc

SEQ ID NO: 987328 - DNA, 25 bp, Homo sapien
tccctaaggtcaacgctcaagggct

SEQ ID NO: 987329 - DNA, 25 bp, Homo sapien
cgggcaggcgatggaataattaatg

SEQ ID NO: 987330 - DNA, 25 bp, Homo sapien
ttaaaccatggtgtagccttctctg

SEQ ID NO: 987331 - DNA, 25 bp, Homo sapien
aggtgatagaacctctggatctgaa

SEQ ID NO: 987332 - DNA, 25 bp, Homo sapien
gaacctctggatctgaatactgtgt

SEQ ID NO: 987333 - DNA, 25 bp, Homo sapien
tagaacctctggatctgaatactgt

SEQ ID NO: 987334 - DNA, 25 bp, Homo sapien
gatagaacctctggatctgaatact

SEQ ID NO: 987335 - DNA, 25 bp, Homo sapien
cttgccaatccctttcctgtggata

SEQ ID NO: 987336 - DNA, 25 bp, Homo sapien
tgccaatccctttcctgtggatatt

SEQ ID NO: 987337 - DNA, 25 bp, Homo sapien
gccaatccctttcctgtggatatta

SEQ ID NO: 987338 - DNA, 25 bp, Homo sapien
ccaatccctttcctgtggatattat

SEQ ID NO: 987339 - DNA, 25 bp, Homo sapien
ggtattgttctgatacagtagtaac

SEQ ID NO: 987340 - DNA, 25 bp, Homo sapien
cttttggtattgttctgatacagta

SEQ ID NO: 987341 - DNA, 25 bp, Homo sapien
ttgttctgatacagtagtaactgac

SEQ ID NO: 987342 - DNA, 25 bp, Homo sapien
gttctgatacagtagtaactgactt

SEQ ID NO: 987343 - DNA, 25 bp, Homo sapien
cttttccataccattctactccagc

SEQ ID NO: 987344 - DNA, 25 bp, Homo sapien
tctactccagccaggttccagcttt

SEQ ID NO: 987345 - DNA, 25 bp, Homo sapien
tcttcttttccataccattctactc

SEQ ID NO: 987346 - DNA, 25 bp, Homo sapien
ttcttttccataccattctactcca

SEQ ID NO: 987347 - DNA, 25 bp, Homo sapien
tagcgcttgcaggtgagaggcaatt

SEQ ID NO: 987348 - DNA, 25 bp, Homo sapien
aagtactgggctgtccttggcgatg

SEQ ID NO: 987349 - DNA, 25 bp, Homo sapien
gcaggttgacttcctggcctttaag

SEQ ID NO: 987350 - DNA, 25 bp, Homo sapien
tcctggcctttaagtagcgcttgca

SEQ ID NO: 987351 - DNA, 25 bp, Homo sapien
atcagcctctctgaggccgacgtga

SEQ ID NO: 987352 - DNA, 25 bp, Homo sapien
gcaagtccattatcagcctctctga

SEQ ID NO: 987353 - DNA, 25 bp, Homo sapien
tgggcaagtccattatcagcctctc

SEQ ID NO: 987354 - DNA, 25 bp, Homo sapien
ctctgaggccgacgtgagcgctgac

SEQ ID NO: 987355 - DNA, 25 bp, Homo sapien
gcataggggtagctctcaggctggt

SEQ ID NO: 987356 - DNA, 25 bp, Homo sapien
tctcaggctggtaggacaacctttc

SEQ ID NO: 987357 - DNA, 25 bp, Homo sapien
ctctcaggctggtaggacaaccttt

SEQ ID NO: 987358 - DNA, 25 bp, Homo sapien
caggctggtaggacaacctttcagg

SEQ ID NO: 987359 - DNA, 25 bp, Homo sapien
gaggtgctttgaagatccactggac

SEQ ID NO: 987360 - DNA, 25 bp, Homo sapien
ccatgcacaggacccctccaagagc

SEQ ID NO: 987361 - DNA, 25 bp, Homo sapien
ccttgaggtgctttgaagatccact

SEQ ID NO: 987362 - DNA, 25 bp, Homo sapien
tgaagatccactggacaccacacct

SEQ ID NO: 987363 - DNA, 25 bp, Homo sapien
cagcgctcttgtgtggtggttgctt

SEQ ID NO: 987364 - DNA, 25 bp, Homo sapien
tcccccacagcgctcttgtgtggtg

SEQ ID NO: 987365 - DNA, 25 bp, Homo sapien
cacagcgctcttgtgtggtggttgc

SEQ ID NO: 987366 - DNA, 25 bp, Homo sapien
cccacagcgctcttgtgtggtggtt

SEQ ID NO: 987367 - DNA, 25 bp, Homo sapien
gcagagagatgtgcagaagaaaaag

SEQ ID NO: 987368 - DNA, 25 bp, Homo sapien
ctggttggcagagagatgtgcagaa

SEQ ID NO: 987369 - DNA, 25 bp, Homo sapien
ggcagagagatgtgcagaagaaaaa

SEQ ID NO: 987370 - DNA, 25 bp, Homo sapien
gttggcagagagatgtgcagaagaa

SEQ ID NO: 987371 - DNA, 25 bp, Homo sapien
ggattcagggtaggatgtttccaaa

SEQ ID NO: 987372 - DNA, 25 bp, Homo sapien
cagggtaggatgtttccaaaaatga

SEQ ID NO: 987373 - DNA, 25 bp, Homo sapien
ggagtgaatggaaggattcagggta

SEQ ID NO: 987374 - DNA, 25 bp, Homo sapien
gagtgaatggaaggattcagggtag

SEQ ID NO: 987375 - DNA, 25 bp, Homo sapien
gtgagtgcagtcctatctttgaatg

SEQ ID NO: 987376 - DNA, 25 bp, Homo sapien
ctgtgagtgcagtcctatctttgaa

SEQ ID NO: 987377 - DNA, 25 bp, Homo sapien
gagtgcagtcctatctttgaatgaa

SEQ ID NO: 987378 - DNA, 25 bp, Homo sapien
tgcagtcctatctttgaatgaaagc

SEQ ID NO: 987379 - DNA, 25 bp, Homo sapien
aaatactatagcactcaggctaacc

SEQ ID NO: 987380 - DNA, 25 bp, Homo sapien
caattcattgtaaatactatagcac

SEQ ID NO: 987381 - DNA, 25 bp, Homo sapien
tcaattcattgtaaatactatagca

SEQ ID NO: 987382 - DNA, 25 bp, Homo sapien
tgtcacctgtctgggattccgcaac

SEQ ID NO: 987383 - DNA, 25 bp, Homo sapien
tgtccccatgttattattttctgtg

SEQ ID NO: 987384 - DNA, 25 bp, Homo sapien
tttgtgtttgtcacctgtctgggat

SEQ ID NO: 987385 - DNA, 25 bp, Homo sapien
ggattccgcaaccatcccactgtat

SEQ ID NO: 987386 - DNA, 25 bp, Homo sapien
tcgtgcactgtgctttgttggataa

SEQ ID NO: 987387 - DNA, 25 bp, Homo sapien
gagtgacttttgtcgtgcactgtgc

SEQ ID NO: 987388 - DNA, 25 bp, Homo sapien
agtcctctgaatagagtgacttttg

SEQ ID NO: 987389 - DNA, 25 bp, Homo sapien
gaatagagtgacttttgtcgtgcac

SEQ ID NO: 987390 - DNA, 25 bp, Homo sapien
tctgtcttctctctgcgatatccgt

SEQ ID NO: 987391 - DNA, 25 bp, Homo sapien
cttcttttgatatccacattctgtc

SEQ ID NO: 987392 - DNA, 25 bp, Homo sapien
tcagaattcccctatcttaataaat

SEQ ID NO: 987393 - DNA, 25 bp, Homo sapien
tctctgcgatatccgttgccctata

SEQ ID NO: 987394 - DNA, 25 bp, Homo sapien
tgcttctgaggctgtaggtaatgcc

SEQ ID NO: 987395 - DNA, 25 bp, Homo sapien
ggtaatgccttcctagtttaagctc

SEQ ID NO: 987396 - DNA, 25 bp, Homo sapien
ggaattcttctcttgcggtcaccaa

SEQ ID NO: 987397 - DNA, 25 bp, Homo sapien
tgtctgcagccctaatgtgggtcat

SEQ ID NO: 987398 - DNA, 25 bp, Homo sapien
cttggttgtgttgctattgtcatca

SEQ ID NO: 987399 - DNA, 25 bp, Homo sapien
catcatgatgccatctgcagctcta

SEQ ID NO: 987400 - DNA, 25 bp, Homo sapien
aacttgactgatatagagctcttcc

SEQ ID NO: 987401 - DNA, 25 bp, Homo sapien
cctcaaagattcttggttgtgttgc

SEQ ID NO: 987402 - DNA, 25 bp, Homo sapien
gctgggtcaagtggtcccctggttc

SEQ ID NO: 987403 - DNA, 25 bp, Homo sapien
ttcttcctttgatgcgtgtcttgtt

SEQ ID NO: 987404 - DNA, 25 bp, Homo sapien
cctttgatgcgtgtcttgttatgtg

SEQ ID NO: 987405 - DNA, 25 bp, Homo sapien
gatgcgtgtcttgttatgtgactct

SEQ ID NO: 987406 - DNA, 25 bp, Homo sapien
ctctttaagctttggtaagagacaa

SEQ ID NO: 987407 - DNA, 25 bp, Homo sapien
tctttaagctttggtaagagacaaa

SEQ ID NO: 987408 - DNA, 25 bp, Homo sapien
aatgaattgttgatcgtagcaatta

SEQ ID NO: 987409 - DNA, 25 bp, Homo sapien
tgtcttaaaactctgttgtgaaggt

SEQ ID NO: 987410 - DNA, 25 bp, Homo sapien
aattgttgatcgtagcaattaacat

SEQ ID NO: 987411 - DNA, 25 bp, Homo sapien
cctggaatgaattgttgatcgtagc

SEQ ID NO: 987412 - DNA, 25 bp, Homo sapien
acaccaaggtagtaggagtagaggt

SEQ ID NO: 987413 - DNA, 25 bp, Homo sapien
gaacattcccatcataaaggccaca

SEQ ID NO: 987414 - DNA, 25 bp, Homo sapien
gagtagaggttgaacattcccatca

SEQ ID NO: 987415 - DNA, 25 bp, Homo sapien
ttacaccaaggtagtaggagtagag

SEQ ID NO: 987416 - DNA, 25 bp, Homo sapien
tcttattgcatttacgagctagtgg

SEQ ID NO: 987417 - DNA, 25 bp, Homo sapien
gagctcgttgatgagacacttcatg

SEQ ID NO: 987418 - DNA, 25 bp, Homo sapien
cactctggatcatgccttagacaca

SEQ ID NO: 987419 - DNA, 25 bp, Homo sapien
taaagtggaggctgactagtctctt

SEQ ID NO: 987420 - DNA, 25 bp, Homo sapien
gaatcatttctacccagggtctttg

SEQ ID NO: 987421 - DNA, 25 bp, Homo sapien
gcatgccagtcctttagatccagag

SEQ ID NO: 987422 - DNA, 25 bp, Homo sapien
caagtgcagttgatactccagaagt

SEQ ID NO: 987423 - DNA, 25 bp, Homo sapien
tagtctctacataatcacccaagtg

SEQ ID NO: 987424 - DNA, 25 bp, Homo sapien
cttctggaatcatagtgtaagttag

SEQ ID NO: 987425 - DNA, 25 bp, Homo sapien
ctggaacggttgtagttactgagtc

SEQ ID NO: 987426 - DNA, 25 bp, Homo sapien
catagtgtaagttagtgaaggttta

SEQ ID NO: 987427 - DNA, 25 bp, Homo sapien
tgggtgaacgggaagaactactgga

SEQ ID NO: 987428 - DNA, 25 bp, Homo sapien
gatggcctttgacttgcctctctcg

SEQ ID NO: 987429 - DNA, 25 bp, Homo sapien
tatacaaggcaagctctgtatcaac

SEQ ID NO: 987430 - DNA, 25 bp, Homo sapien
gtttatacaaggcaagctctgtatc

SEQ ID NO: 987431 - DNA, 25 bp, Homo sapien
tctctcgaagcagccaatgtttata

SEQ ID NO: 987432 - DNA, 25 bp, Homo sapien
tcttcaggacccttctgatcggtga

SEQ ID NO: 987433 - DNA, 25 bp, Homo sapien
ctcttcaggacccttctgatcggtg

SEQ ID NO: 987434 - DNA, 25 bp, Homo sapien
gtaggctctgtgccttcatcttcag

SEQ ID NO: 987435 - DNA, 25 bp, Homo sapien
ttcaggacccttctgatcggtgagt

SEQ ID NO: 987436 - DNA, 25 bp, Homo sapien
ttctgcaatttagtaatttgctgca

SEQ ID NO: 987437 - DNA, 25 bp, Homo sapien
gctgcatgtatagttggcaaaattt

SEQ ID NO: 987438 - DNA, 25 bp, Homo sapien
agtaatttgctgcatgtatagttgg

SEQ ID NO: 987439 - DNA, 25 bp, Homo sapien
atttaatttgtttatgatgattcct

SEQ ID NO: 987440 - DNA, 25 bp, Homo sapien
tcaactcactatctagaagattggg

SEQ ID NO: 987441 - DNA, 25 bp, Homo sapien
ctataggtggaaggtacaattgctg

SEQ ID NO: 987442 - DNA, 25 bp, Homo sapien
caagggactggaccacctttctcaa

SEQ ID NO: 987443 - DNA, 25 bp, Homo sapien
gattgggattggtttcatatacggt

SEQ ID NO: 987444 - DNA, 25 bp, Homo sapien
cctttacttgggaagctgctgtctc

SEQ ID NO: 987445 - DNA, 25 bp, Homo sapien
ttagacttgggttagcctgtgctta

SEQ ID NO: 987446 - DNA, 25 bp, Homo sapien
tcttggttcccaattctgcctttac

SEQ ID NO: 987447 - DNA, 25 bp, Homo sapien
cttggaactgatgcttttgactgtc

SEQ ID NO: 987448 - DNA, 25 bp, Homo sapien
tgtgtggcatttctttgtccatggt

SEQ ID NO: 987449 - DNA, 25 bp, Homo sapien
ttgtgtgtggcatttctttgtccat

SEQ ID NO: 987450 - DNA, 25 bp, Homo sapien
atgctgtctgttcctgatttatttt

SEQ ID NO: 987451 - DNA, 25 bp, Homo sapien
tgtggcatttctttgtccatggtct

SEQ ID NO: 987452 - DNA, 25 bp, Homo sapien
tggttcagcatctgcacagtcacgt

SEQ ID NO: 987453 - DNA, 25 bp, Homo sapien
cagcatctgcacagtcacgtcctcg

SEQ ID NO: 987454 - DNA, 25 bp, Homo sapien
ggttcagcatctgcacagtcacgtc

SEQ ID NO: 987455 - DNA, 25 bp, Homo sapien
ttcagcatctgcacagtcacgtcct

SEQ ID NO: 987456 - DNA, 25 bp, Homo sapien
gagactgctcttatgatttccagaa

SEQ ID NO: 987457 - DNA, 25 bp, Homo sapien
aaatggcctataccatgtgtcaagc

SEQ ID NO: 987458 - DNA, 25 bp, Homo sapien
caggaaactggatccgtagacagca

SEQ ID NO: 987459 - DNA, 25 bp, Homo sapien
tgtgtcaagcaagagggctgagtca

SEQ ID NO: 987460 - DNA, 25 bp, Homo sapien
cctgcatctggcttgcctgaagctc

SEQ ID NO: 987461 - DNA, 25 bp, Homo sapien
cccacaacaggtagtaactggtaat

SEQ ID NO: 987462 - DNA, 25 bp, Homo sapien
ggtctgatgtcacccagtcatcaag

SEQ ID NO: 987463 - DNA, 25 bp, Homo sapien
actggtaatgtgtctgaagcctgca

SEQ ID NO: 987464 - DNA, 25 bp, Homo sapien
tctcttcgactaatatattcttttg

SEQ ID NO: 987465 - DNA, 25 bp, Homo sapien
gccaaggaaatcctatatccaattg

SEQ ID NO: 987466 - DNA, 25 bp, Homo sapien
tcttttgggccaaggaaatcctata

SEQ ID NO: 987467 - DNA, 25 bp, Homo sapien
atatattcttttgggccaaggaaat

SEQ ID NO: 987468 - DNA, 25 bp, Homo sapien
tggactttcaaaccttcatggtaaa

SEQ ID NO: 987469 - DNA, 25 bp, Homo sapien
tttgccttgtgatttctgtggactt

SEQ ID NO: 987470 - DNA, 25 bp, Homo sapien
aaccttcatggtaaaccaaattcat

SEQ ID NO: 987471 - DNA, 25 bp, Homo sapien
ttctgtggactttcaaaccttcatg

SEQ ID NO: 987472 - DNA, 25 bp, Homo sapien
ggaaaccaggttacccatatgccgc

SEQ ID NO: 987473 - DNA, 25 bp, Homo sapien
gaccaaatcccacaacagtactgga

SEQ ID NO: 987474 - DNA, 25 bp, Homo sapien
tgggagacatttctacttattgcta

SEQ ID NO: 987475 - DNA, 25 bp, Homo sapien
ttgctatgagaatgaggaactgaga

SEQ ID NO: 987476 - DNA, 25 bp, Homo sapien
ctaataagacatcctttaaatcctg

SEQ ID NO: 987477 - DNA, 25 bp, Homo sapien
tgattggcaatgactgaatcttcct

SEQ ID NO: 987478 - DNA, 25 bp, Homo sapien
cctgagtcttcactgatttcttcat

SEQ ID NO: 987479 - DNA, 25 bp, Homo sapien
tccacagcctttattactatgtttt

SEQ ID NO: 987480 - DNA, 25 bp, Homo sapien
tggccaagttagccccacaaattct

SEQ ID NO: 987481 - DNA, 25 bp, Homo sapien
ggccaagttagccccacaaattctg

SEQ ID NO: 987482 - DNA, 25 bp, Homo sapien
ttggccaagttagccccacaaattc

SEQ ID NO: 987483 - DNA, 25 bp, Homo sapien
acaatccgttgtgtttgctgcccat

SEQ ID NO: 987484 - DNA, 25 bp, Homo sapien
tacaatccgttgtgtttgctgccca

SEQ ID NO: 987485 - DNA, 25 bp, Homo sapien
caatccgttgtgtttgctgcccatc

SEQ ID NO: 987486 - DNA, 25 bp, Homo sapien
ctacaatccgttgtgtttgctgccc

SEQ ID NO: 987487 - DNA, 25 bp, Homo sapien
ttggaaatgctaaccaggctaacag

SEQ ID NO: 987488 - DNA, 25 bp, Homo sapien
taaccaggctaacagttttgggcat

SEQ ID NO: 987489 - DNA, 25 bp, Homo sapien
gcctggtggggactgccttttggaa

SEQ ID NO: 987490 - DNA, 25 bp, Homo sapien
aaggtttggaaatgctaaccaggct

SEQ ID NO: 987491 - DNA, 25 bp, Homo sapien
tgtccatagagtctttctgagtttt

SEQ ID NO: 987492 - DNA, 25 bp, Homo sapien
ctgtccatagagtctttctgagttt

SEQ ID NO: 987493 - DNA, 25 bp, Homo sapien
tttggggtggtttcttgtgggctga

SEQ ID NO: 987494 - DNA, 25 bp, Homo sapien
tttcttgtgggctgagtttgaatct

SEQ ID NO: 987495 - DNA, 25 bp, Homo sapien
gaatctctgacagactctcgtgggc

SEQ ID NO: 987496 - DNA, 25 bp, Homo sapien
ggtggtttcttgtgggctgagtttg

SEQ ID NO: 987497 - DNA, 25 bp, Homo sapien
ctggatctctctccacacggttttt

SEQ ID NO: 987498 - DNA, 25 bp, Homo sapien
ctggaatgcctagaagacgtgggac

SEQ ID NO: 987499 - DNA, 25 bp, Homo sapien
cctagaagacgtgggacagctggat

SEQ ID NO: 987500 - DNA, 25 bp, Homo sapien
ggatctctctccacacggtttttca

SEQ ID NO: 987501 - DNA, 25 bp, Homo sapien
cagggaaagcataagtgagaatgca

SEQ ID NO: 987502 - DNA, 25 bp, Homo sapien
ttgcagggaaagcataagtgagaat

SEQ ID NO: 987503 - DNA, 25 bp, Homo sapien
ccacttgtgacgaatacagaaagga

SEQ ID NO: 987504 - DNA, 25 bp, Homo sapien
gtgagaatgcattaagccacttgtg

SEQ ID NO: 987505 - DNA, 25 bp, Homo sapien
gatgttgagctatttgcgagttgca

SEQ ID NO: 987506 - DNA, 25 bp, Homo sapien
agtcaagtgggcgaacactgtatga

SEQ ID NO: 987507 - DNA, 25 bp, Homo sapien
gcgagttgcaatttgtccttcagaa

SEQ ID NO: 987508 - DNA, 25 bp, Homo sapien
gcgaacactgtatgaatgcctgctg

SEQ ID NO: 987509 - DNA, 25 bp, Homo sapien
gcagtgatctcttgcaaagtcatgg

SEQ ID NO: 987510 - DNA, 25 bp, Homo sapien
tctcttgcaaagtcatggtatagcc

SEQ ID NO: 987511 - DNA, 25 bp, Homo sapien
aatgcagtgatctcttgcaaagtca

SEQ ID NO: 987512 - DNA, 25 bp, Homo sapien
gttaaaatgcagtgatctcttgcaa

SEQ ID NO: 987513 - DNA, 25 bp, Homo sapien
tgatcatatggtttatgatgcccct

SEQ ID NO: 987514 - DNA, 25 bp, Homo sapien
atgatgcccctgaaaacttttagtc

SEQ ID NO: 987515 - DNA, 25 bp, Homo sapien
ttatgatgcccctgaaaacttttag

SEQ ID NO: 987516 - DNA, 25 bp, Homo sapien
tgtgatcatatggtttatgatgccc

SEQ ID NO: 987517 - DNA, 25 bp, Homo sapien
ggaagaatcaaagcaccgtaggtgg

SEQ ID NO: 987518 - DNA, 25 bp, Homo sapien
cttttagactattcctgaaccagga

SEQ ID NO: 987519 - DNA, 25 bp, Homo sapien
catgagaaagagcttccgaaaaatc

SEQ ID NO: 987520 - DNA, 25 bp, Homo sapien
tgtgtatgtgtaaccaacaagggaa

SEQ ID NO: 987521 - DNA, 25 bp, Homo sapien
ggacaaaatgtctcacagccaaagc

SEQ ID NO: 987522 - DNA, 25 bp, Homo sapien
taacagaggccctagcatgtaggaa

SEQ ID NO: 987523 - DNA, 25 bp, Homo sapien
taagttagccatacatcagagcagg

SEQ ID NO: 987524 - DNA, 25 bp, Homo sapien
tagggacattataggagctacaggg

SEQ ID NO: 987525 - DNA, 25 bp, Homo sapien
caggcaggttttgaaagcatatcag

SEQ ID NO: 987526 - DNA, 25 bp, Homo sapien
cagactaattgctctaacatgtgag

SEQ ID NO: 987527 - DNA, 25 bp, Homo sapien
cattggtggtgttcaaatacaggct

SEQ ID NO: 987528 - DNA, 25 bp, Homo sapien
gatgtcactgaaagaactaggacca

SEQ ID NO: 987529 - DNA, 25 bp, Homo sapien
ggactttctgagttccttaaattca

SEQ ID NO: 987530 - DNA, 25 bp, Homo sapien
gatggctccttttacatttgaccag

SEQ ID NO: 987531 - DNA, 25 bp, Homo sapien
aggacagggtggttgaatgaaatca

SEQ ID NO: 987532 - DNA, 25 bp, Homo sapien
ttaaattcagctccagtgagaggac

SEQ ID NO: 987533 - DNA, 25 bp, Homo sapien
cctacgtggaaagaagatccataaa

SEQ ID NO: 987534 - DNA, 25 bp, Homo sapien
agtcatcttcctacgtggaaagaag

SEQ ID NO: 987535 - DNA, 25 bp, Homo sapien
agaagtcatcttcctacgtggaaag

SEQ ID NO: 987536 - DNA, 25 bp, Homo sapien
tcttcctacgtggaaagaagatcca

SEQ ID NO: 987537 - DNA, 25 bp, Homo sapien
tcagctgtgcaatcagcggccgact

SEQ ID NO: 987538 - DNA, 25 bp, Homo sapien
tctctggccaagttgggacactgtg

SEQ ID NO: 987539 - DNA, 25 bp, Homo sapien
ggctgactgacaggcagatttggtt

SEQ ID NO: 987540 - DNA, 25 bp, Homo sapien
tatttgttgcgtccttgtctgagtc

SEQ ID NO: 987541 - DNA, 25 bp, Homo sapien
tatcatttgcagagccaaaccactg

SEQ ID NO: 987542 - DNA, 25 bp, Homo sapien
tctggacacaggactaagcaagcat

SEQ ID NO: 987543 - DNA, 25 bp, Homo sapien
ccagggaagtgggagccttgactac

SEQ ID NO: 987544 - DNA, 25 bp, Homo sapien
cagtgggtgaaacctagagcattga

SEQ ID NO: 987545 - DNA, 25 bp, Homo sapien
gctcttgaaacataagggactcttg

SEQ ID NO: 987546 - DNA, 25 bp, Homo sapien
tactccatacgaaaatgaactctga

SEQ ID NO: 987547 - DNA, 25 bp, Homo sapien
ctctgaagacatagcatgatggcat

SEQ ID NO: 987548 - DNA, 25 bp, Homo sapien
cagtctaggtttctacacttggcta

SEQ ID NO: 987549 - DNA, 25 bp, Homo sapien
gtgagcatctccatcgaccataaag

SEQ ID NO: 987550 - DNA, 25 bp, Homo sapien
gactttttaagaccagtagtgccac

SEQ ID NO: 987551 - DNA, 25 bp, Homo sapien
tatatggccatgctcaaggtgagca

SEQ ID NO: 987552 - DNA, 25 bp, Homo sapien
tgtgacccaaatccaggcttaaggc

SEQ ID NO: 987553 - DNA, 25 bp, Homo sapien
taaacattatacacttgacccttgg

SEQ ID NO: 987554 - DNA, 25 bp, Homo sapien
tggctcattacctacccacagaagt

SEQ ID NO: 987555 - DNA, 25 bp, Homo sapien
tgcacgtatgcatataagtggatcc

SEQ ID NO: 987556 - DNA, 25 bp, Homo sapien
tggacaacatgaaggttagggactc

SEQ ID NO: 987557 - DNA, 25 bp, Homo sapien
tacagctaccaatttccatccttgg

SEQ ID NO: 987558 - DNA, 25 bp, Homo sapien
gtaaagcagatatagtcacatatac

SEQ ID NO: 987559 - DNA, 25 bp, Homo sapien
gatatagtcacatatacagctacca

SEQ ID NO: 987560 - DNA, 25 bp, Homo sapien
tacttagcaataagtaaagcagata

SEQ ID NO: 987561 - DNA, 25 bp, Homo sapien
tacagaagagagaatacaataagaa

SEQ ID NO: 987562 - DNA, 25 bp, Homo sapien
gcaatcggaaattctgtacagaaga

SEQ ID NO: 987563 - DNA, 25 bp, Homo sapien
gactccattaggacttctaatttca

SEQ ID NO: 987564 - DNA, 25 bp, Homo sapien
tatgcttagttcctaaattacttgc

SEQ ID NO: 987565 - DNA, 25 bp, Homo sapien
tcttattactaatgtagctggatca

SEQ ID NO: 987566 - DNA, 25 bp, Homo sapien
tagctggatcaagcacctggacttc

SEQ ID NO: 987567 - DNA, 25 bp, Homo sapien
tatatcttcatgattccagagctcc

SEQ ID NO: 987568 - DNA, 25 bp, Homo sapien
atatatatcttcatgattccagagc

SEQ ID NO: 987569 - DNA, 25 bp, Homo sapien
cttccaatcttcagcagccatggcc

SEQ ID NO: 987570 - DNA, 25 bp, Homo sapien
tcttccaatcttcagcagccatggc

SEQ ID NO: 987571 - DNA, 25 bp, Homo sapien
atcatcttccaatcttcagcagcca

SEQ ID NO: 987572 - DNA, 25 bp, Homo sapien
catcttccaatcttcagcagccatg

SEQ ID NO: 987573 - DNA, 25 bp, Homo sapien
ccacagtgaatttagtcgccatgtc

SEQ ID NO: 987574 - DNA, 25 bp, Homo sapien
ttcctgaggctcctggatactgtga

SEQ ID NO: 987575 - DNA, 25 bp, Homo sapien
gaatattcttaactgttggtttgtc

SEQ ID NO: 987576 - DNA, 25 bp, Homo sapien
acagctttgaagagttctggccaga

SEQ ID NO: 987577 - DNA, 25 bp, Homo sapien
tgcattggtcccaagttaccttctc

SEQ ID NO: 987578 - DNA, 25 bp, Homo sapien
ggttatcatacttggcggtctctga

SEQ ID NO: 987579 - DNA, 25 bp, Homo sapien
ttctctgggttatcatacttggcgg

SEQ ID NO: 987580 - DNA, 25 bp, Homo sapien
tgagattgcattggtcccaagttac

SEQ ID NO: 987581 - DNA, 25 bp, Homo sapien
tcatttgggcccaagtttgataaag

SEQ ID NO: 987582 - DNA, 25 bp, Homo sapien
catttgggcccaagtttgataaagg

SEQ ID NO: 987583 - DNA, 25 bp, Homo sapien
ttgacttcattaagacgttgtacct

SEQ ID NO: 987584 - DNA, 25 bp, Homo sapien
ttgtacctcatagcccaaatctcca

SEQ ID NO: 987585 - DNA, 25 bp, Homo sapien
gattgccctctgataggattttgac

SEQ ID NO: 987586 - DNA, 25 bp, Homo sapien
gccctctgataggattttgacttca

SEQ ID NO: 987587 - DNA, 25 bp, Homo sapien
cagagggttcgtttacaattagcat

SEQ ID NO: 987588 - DNA, 25 bp, Homo sapien
cacagtgatggcaatatgtacctcc

SEQ ID NO: 987589 - DNA, 25 bp, Homo sapien
tacactgagatacacattgctctgt

SEQ ID NO: 987590 - DNA, 25 bp, Homo sapien
gcccatttctgtagtgtaatcacaa

SEQ ID NO: 987591 - DNA, 25 bp, Homo sapien
gagttttcatacaggagctatcaga

SEQ ID NO: 987592 - DNA, 25 bp, Homo sapien
taatactaagctagtgggaaagtcc

SEQ ID NO: 987593 - DNA, 25 bp, Homo sapien
gatcttcctgttatagcactgacca

SEQ ID NO: 987594 - DNA, 25 bp, Homo sapien
cattgggtaccctgagagatcttcc

SEQ ID NO: 987595 - DNA, 25 bp, Homo sapien
taatccattacacagccagacagga

SEQ ID NO: 987596 - DNA, 25 bp, Homo sapien
gccccgagatgtgacttaaatttag

SEQ ID NO: 987597 - DNA, 25 bp, Homo sapien
tggtaaattgttagagccccgagat

SEQ ID NO: 987598 - DNA, 25 bp, Homo sapien
gctgctcgtctctatgctaatccat

SEQ ID NO: 987599 - DNA, 25 bp, Homo sapien
tcttatgaactcataccataagcag

SEQ ID NO: 987600 - DNA, 25 bp, Homo sapien
actcttatgaactcataccataagc

SEQ ID NO: 987601 - DNA, 25 bp, Homo sapien
gaactcataccataagcagccactt

SEQ ID NO: 987602 - DNA, 25 bp, Homo sapien
tatgaactcataccataagcagcca

SEQ ID NO: 987603 - DNA, 25 bp, Homo sapien
gactccatgctgttgagctgttcac

SEQ ID NO: 987604 - DNA, 25 bp, Homo sapien
aagcagcggacacttccaactccat

SEQ ID NO: 987605 - DNA, 25 bp, Homo sapien
catgctgttgagctgttcacaagca

SEQ ID NO: 987606 - DNA, 25 bp, Homo sapien
ctgttcacaagcagcggacacttcc

SEQ ID NO: 987607 - DNA, 25 bp, Homo sapien
gggcaatcacccactcaactttcat

SEQ ID NO: 987608 - DNA, 25 bp, Homo sapien
ggtctatgtctctggtgttctactt

SEQ ID NO: 987609 - DNA, 25 bp, Homo sapien
tatgtctctggtgttctacttttcc

SEQ ID NO: 987610 - DNA, 25 bp, Homo sapien
ttgtacaggtctatgtctctggtgt

SEQ ID NO: 987611 - DNA, 25 bp, Homo sapien
aagagtgcttcagctgccgcctaag

SEQ ID NO: 987612 - DNA, 25 bp, Homo sapien
tttaaaagaagagtgcttcagctgc

SEQ ID NO: 987613 - DNA, 25 bp, Homo sapien
aacttttaaaagaagagtgcttcag

SEQ ID NO: 987614 - DNA, 25 bp, Homo sapien
aaagaagagtgcttcagctgccgcc

SEQ ID NO: 987615 - DNA, 25 bp, Homo sapien
ccatgttgctccgagtcgtcgtctg

SEQ ID NO: 987616 - DNA, 25 bp, Homo sapien
ctccgagtcgtcgtctgctgctgca

SEQ ID NO: 987617 - DNA, 25 bp, Homo sapien
gttgctccgagtcgtcgtctgctgc

SEQ ID NO: 987618 - DNA, 25 bp, Homo sapien
cttcccctggatgcgcacggcctgg

SEQ ID NO: 987619 - DNA, 25 bp, Homo sapien
accttgtaggactgtacccctcctg

SEQ ID NO: 987620 - DNA, 25 bp, Homo sapien
cgtgactgcagtgatccctcccatg

SEQ ID NO: 987621 - DNA, 25 bp, Homo sapien
ttgtaggactgtacccctcctgcgc

SEQ ID NO: 987622 - DNA, 25 bp, Homo sapien
ggttgattgaccgtgactgcagtga

SEQ ID NO: 987623 - DNA, 25 bp, Homo sapien
gcagtagcagaagggaaactgccac

SEQ ID NO: 987624 - DNA, 25 bp, Homo sapien
tagcagaagggaaactgccacagat

SEQ ID NO: 987625 - DNA, 25 bp, Homo sapien
tccaaggtaatatcaatcacctctt

SEQ ID NO: 987626 - DNA, 25 bp, Homo sapien
cttccaaggtaatatcaatcacctc

SEQ ID NO: 987627 - DNA, 25 bp, Homo sapien
tcagggaagaataaccccagggcag

SEQ ID NO: 987628 - DNA, 25 bp, Homo sapien
tgtcagggaagaataaccccagggc

SEQ ID NO: 987629 - DNA, 25 bp, Homo sapien
ctgtcagggaagaataaccccaggg

SEQ ID NO: 987630 - DNA, 25 bp, Homo sapien
gaagaataaccccagggcaggctgc

SEQ ID NO: 987631 - DNA, 25 bp, Homo sapien
tatacaacagcaaagagccagtggc

SEQ ID NO: 987632 - DNA, 25 bp, Homo sapien
tagtaagtaggccaaacttgtgcca

SEQ ID NO: 987633 - DNA, 25 bp, Homo sapien
tatgcagcagtaggcaacagttaac

SEQ ID NO: 987634 - DNA, 25 bp, Homo sapien
tcttgggtacaactggagataagtc

SEQ ID NO: 987635 - DNA, 25 bp, Homo sapien
caaatatgtatctgtgctagtcaca

SEQ ID NO: 987636 - DNA, 25 bp, Homo sapien
ccagctgggcactatgattcacacc

SEQ ID NO: 987637 - DNA, 25 bp, Homo sapien
cttagtggctcattgcaaagaggcc

SEQ ID NO: 987638 - DNA, 25 bp, Homo sapien
tcacacaaagacactaggcggtgtc

SEQ ID NO: 987639 - DNA, 25 bp, Homo sapien
ggaatacataggtgagccagcccga

SEQ ID NO: 987640 - DNA, 25 bp, Homo sapien
taaaatatgacttgctagagagcct

SEQ ID NO: 987641 - DNA, 25 bp, Homo sapien
cactagagaaatgacacttggcgaa

SEQ ID NO: 987642 - DNA, 25 bp, Homo sapien
gaagctacttgcataagaccatgtg

SEQ ID NO: 987643 - DNA, 25 bp, Homo sapien
tttataacgcacttggcagatctgc

SEQ ID NO: 987644 - DNA, 25 bp, Homo sapien
tgtcctttcctaatgatatccggaa

SEQ ID NO: 987645 - DNA, 25 bp, Homo sapien
tgatatccggaaagaataacttggg

SEQ ID NO: 987646 - DNA, 25 bp, Homo sapien
gatgaaaagggatgattcgctgtcc

SEQ ID NO: 987647 - DNA, 25 bp, Homo sapien
gggccagagctggactggtggacta

SEQ ID NO: 987648 - DNA, 25 bp, Homo sapien
agagctggactggtggactatgaat

SEQ ID NO: 987649 - DNA, 25 bp, Homo sapien
cagagctggactggtggactatgaa

SEQ ID NO: 987650 - DNA, 25 bp, Homo sapien
gccagagctggactggtggactatg

SEQ ID NO: 987651 - DNA, 25 bp, Homo sapien
ccttagcttttagagatgtctgaaa

SEQ ID NO: 987652 - DNA, 25 bp, Homo sapien
cctcttctgggataggcaccaatat

SEQ ID NO: 987653 - DNA, 25 bp, Homo sapien
tgggataggcaccaatatcatgtga

SEQ ID NO: 987654 - DNA, 25 bp, Homo sapien
ggcaccaatatcatgtgaacaatgg

SEQ ID NO: 987655 - DNA, 25 bp, Homo sapien
tgccagagaacgacattgtattagg

SEQ ID NO: 987656 - DNA, 25 bp, Homo sapien
ggtctaatatgcaaagtaccctctg

SEQ ID NO: 987657 - DNA, 25 bp, Homo sapien
gtattaggaataagcaacagcgtcc

SEQ ID NO: 987658 - DNA, 25 bp, Homo sapien
cagcgtccttgttaaaagagccaga

SEQ ID NO: 987659 - DNA, 25 bp, Homo sapien
tcaaggagaatgtattcagatatgt

SEQ ID NO: 987660 - DNA, 25 bp, Homo sapien
catattttcaaggagaatgtattca

SEQ ID NO: 987661 - DNA, 25 bp, Homo sapien
tcaaggatgatggtgttctcgttca

SEQ ID NO: 987662 - DNA, 25 bp, Homo sapien
tacaccaggataattccaatactct

SEQ ID NO: 987663 - DNA, 25 bp, Homo sapien
ccaacataaggatgaggcaaggcca

SEQ ID NO: 987664 - DNA, 25 bp, Homo sapien
caaggccaagggtggtttgctaacg

SEQ ID NO: 987665 - DNA, 25 bp, Homo sapien
gaggagggacactcaacgcagtctt

SEQ ID NO: 987666 - DNA, 25 bp, Homo sapien
cggtaggctatcatttcagggagaa

SEQ ID NO: 987667 - DNA, 25 bp, Homo sapien
caaagatcagacgactgcagatgtg

SEQ ID NO: 987668 - DNA, 25 bp, Homo sapien
aaagatcagacgactgcagatgtgt

SEQ ID NO: 987669 - DNA, 25 bp, Homo sapien
aggcctatatccgtaatggtattgc

SEQ ID NO: 987670 - DNA, 25 bp, Homo sapien
tccccaggcctatatccgtaatggt

SEQ ID NO: 987671 - DNA, 25 bp, Homo sapien
tctcttaaacacattcggacttcaa

SEQ ID NO: 987672 - DNA, 25 bp, Homo sapien
ctctggggccacttacatattctct

SEQ ID NO: 987673 - DNA, 25 bp, Homo sapien
ctctctggggccacttacatattct

SEQ ID NO: 987674 - DNA, 25 bp, Homo sapien
ttctcttaaacacattcggacttca

SEQ ID NO: 987675 - DNA, 25 bp, Homo sapien
cagatcttggcatgcacaatcagca

SEQ ID NO: 987676 - DNA, 25 bp, Homo sapien
gccaccctgtgaagtaatctagact

SEQ ID NO: 987677 - DNA, 25 bp, Homo sapien
tctcatgggctctaaaagtttgttc

SEQ ID NO: 987678 - DNA, 25 bp, Homo sapien
caattgccgctgtggtctcatgggc

SEQ ID NO: 987679 - DNA, 25 bp, Homo sapien
ggtctcctcatcaacaaaagtgtga

SEQ ID NO: 987680 - DNA, 25 bp, Homo sapien
tggtctcctcatcaacaaaagtgtg

SEQ ID NO: 987681 - DNA, 25 bp, Homo sapien
gtctcctcatcaacaaaagtgtgaa

SEQ ID NO: 987682 - DNA, 25 bp, Homo sapien
cctggtctcctcatcaacaaaagtg

SEQ ID NO: 987683 - DNA, 25 bp, Homo sapien
cagctcctggaggatgagatgggag

SEQ ID NO: 987684 - DNA, 25 bp, Homo sapien
tgggcaacagagggacaccaacacc

SEQ ID NO: 987685 - DNA, 25 bp, Homo sapien
ctttagtcccagctcctggaggatg

SEQ ID NO: 987686 - DNA, 25 bp, Homo sapien
gtcccagctcctggaggatgagatg

SEQ ID NO: 987687 - DNA, 25 bp, Homo sapien
tgcttcactggcatagtggtagggc

SEQ ID NO: 987688 - DNA, 25 bp, Homo sapien
cttcactggcatagtggtagggctg

SEQ ID NO: 987689 - DNA, 25 bp, Homo sapien
ggcttgcttcactggcatagtggta

SEQ ID NO: 987690 - DNA, 25 bp, Homo sapien
cactggcatagtggtagggctgtaa

SEQ ID NO: 987691 - DNA, 25 bp, Homo sapien
catgtaggtccatgatccaatttga

SEQ ID NO: 987692 - DNA, 25 bp, Homo sapien
ggtcttgttgactaaagcttaagtc

SEQ ID NO: 987693 - DNA, 25 bp, Homo sapien
tttacgagtatccaattattctggc

SEQ ID NO: 987694 - DNA, 25 bp, Homo sapien
tttgcaccaataacacatggtcttg

SEQ ID NO: 987695 - DNA, 25 bp, Homo sapien
ttctagctgaaaatctgcatggtta

SEQ ID NO: 987696 - DNA, 25 bp, Homo sapien
gaaaaatagatctcatgactggtcc

SEQ ID NO: 987697 - DNA, 25 bp, Homo sapien
aagagtattgattggccagacgcag

SEQ ID NO: 987698 - DNA, 25 bp, Homo sapien
tctgaagtctcttggtagcaagtat

SEQ ID NO: 987699 - DNA, 25 bp, Homo sapien
tctaagatgccggactaagtactga

SEQ ID NO: 987700 - DNA, 25 bp, Homo sapien
catgggtgcataaggcagtcttacc

SEQ ID NO: 987701 - DNA, 25 bp, Homo sapien
tatggcaaaatgctgggaaccttgc

SEQ ID NO: 987702 - DNA, 25 bp, Homo sapien
gctgtaatcgcatgcaaggacacta

SEQ ID NO: 987703 - DNA, 25 bp, Homo sapien
tgactgtgccagcaagtcgctgtgc

SEQ ID NO: 987704 - DNA, 25 bp, Homo sapien
tgagaaagttctgactgtgccagca

SEQ ID NO: 987705 - DNA, 25 bp, Homo sapien
gggtccagagtgagaaagttctgac

SEQ ID NO: 987706 - DNA, 25 bp, Homo sapien
gaaagttctgactgtgccagcaagt

SEQ ID NO: 987707 - DNA, 25 bp, Homo sapien
tgcgttactatggatacatactacc

SEQ ID NO: 987708 - DNA, 25 bp, Homo sapien
gttactatggatacatactacctgt

SEQ ID NO: 987709 - DNA, 25 bp, Homo sapien
tatttgcgttactatggatacatac

SEQ ID NO: 987710 - DNA, 25 bp, Homo sapien
tttttatttgcgttactatggatac

SEQ ID NO: 987711 - DNA, 25 bp, Homo sapien
caatctcccactggcagcaagcaaa

SEQ ID NO: 987712 - DNA, 25 bp, Homo sapien
ggaaagaaccactgtaaagcactta

SEQ ID NO: 987713 - DNA, 25 bp, Homo sapien
tcagtgttcatacagggcagagaat

SEQ ID NO: 987714 - DNA, 25 bp, Homo sapien
caaatattgtgaacccagtgattgc

SEQ ID NO: 987715 - DNA, 25 bp, Homo sapien
ctcctttctcatcccgtgattcagc

SEQ ID NO: 987716 - DNA, 25 bp, Homo sapien
tttctcatcccgtgattcagctcca

SEQ ID NO: 987717 - DNA, 25 bp, Homo sapien
ctttctcatcccgtgattcagctcc

SEQ ID NO: 987718 - DNA, 25 bp, Homo sapien
aagatgtcactatcagcagcagaaa

SEQ ID NO: 987719 - DNA, 25 bp, Homo sapien
ctaggttgtaatttagaaggacatt

SEQ ID NO: 987720 - DNA, 25 bp, Homo sapien
tggctactaggttgtaatttagaag

SEQ ID NO: 987721 - DNA, 25 bp, Homo sapien
tactaggttgtaatttagaaggaca

SEQ ID NO: 987722 - DNA, 25 bp, Homo sapien
tcagggcatccttaacaagctgtgt

SEQ ID NO: 987723 - DNA, 25 bp, Homo sapien
ctgaagggcccctacatattgtttc

SEQ ID NO: 987724 - DNA, 25 bp, Homo sapien
tggcttcccgtggattctctctgaa

SEQ ID NO: 987725 - DNA, 25 bp, Homo sapien
cttgccaaactagagaatgcatctg

SEQ ID NO: 987726 - DNA, 25 bp, Homo sapien
tgcattgctattggatttctacagg

SEQ ID NO: 987727 - DNA, 25 bp, Homo sapien
gaaggcagacacctctacaggatca

SEQ ID NO: 987728 - DNA, 25 bp, Homo sapien
gacaatccttggaggtttcagcatt

SEQ ID NO: 987729 - DNA, 25 bp, Homo sapien
tcttgtcagcattgtgaaacagcct

SEQ ID NO: 987730 - DNA, 25 bp, Homo sapien
gaactgcatagcttagtttgctggg

SEQ ID NO: 987731 - DNA, 25 bp, Homo sapien
cctgagtgagtatgcgtgagcacat

SEQ ID NO: 987732 - DNA, 25 bp, Homo sapien
gccagtcaggcaacagtaaaggtat

SEQ ID NO: 987733 - DNA, 25 bp, Homo sapien
tgtgtcagacagaatccagaactgc

SEQ ID NO: 987734 - DNA, 25 bp, Homo sapien
ggctgacctcaacctccataatgaa

SEQ ID NO: 987735 - DNA, 25 bp, Homo sapien
catttataccctgtgagtgcctagc

SEQ ID NO: 987736 - DNA, 25 bp, Homo sapien
gcatgactcgcttaaccagaaacgt

SEQ ID NO: 987737 - DNA, 25 bp, Homo sapien
tcaaccgttgtcagctttttaatgc

SEQ ID NO: 987738 - DNA, 25 bp, Homo sapien
ctgataggttcagcgcaaggagccc

SEQ ID NO: 987739 - DNA, 25 bp, Homo sapien
caaggactgataggttcagcgcaag

SEQ ID NO: 987740 - DNA, 25 bp, Homo sapien
ttcagcgcaaggagcccaaaagcca

SEQ ID NO: 987741 - DNA, 25 bp, Homo sapien
gacatccaccacaacaaggactgat

SEQ ID NO: 987742 - DNA, 25 bp, Homo sapien
aagatcctcacttttgaccagctgg

SEQ ID NO: 987743 - DNA, 25 bp, Homo sapien
tgctctctggtcctcgcaagggctg

SEQ ID NO: 987744 - DNA, 25 bp, Homo sapien
ccataacggatgacgtacgggttca

SEQ ID NO: 987745 - DNA, 25 bp, Homo sapien
tctggtcagacggaacaactccaca

SEQ ID NO: 987746 - DNA, 25 bp, Homo sapien
catctgaggtaccgggttcatctca

SEQ ID NO: 987747 - DNA, 25 bp, Homo sapien
tttctgcatttccatctgaggtacc

SEQ ID NO: 987748 - DNA, 25 bp, Homo sapien
gaataggaacagctctggtccacag

SEQ ID NO: 987749 - DNA, 25 bp, Homo sapien
cgtgagcaacgcagaagacgggtga

SEQ ID NO: 987750 - DNA, 25 bp, Homo sapien
agacagtgggcgcaggtcagtgggt

SEQ ID NO: 987751 - DNA, 25 bp, Homo sapien
cagacagtgggcgcaggtcagtggg

SEQ ID NO: 987752 - DNA, 25 bp, Homo sapien
ctgagatcaaactgcaaggcggcag

SEQ ID NO: 987753 - DNA, 25 bp, Homo sapien
ctcgctgattgctagcacagcagtc

SEQ ID NO: 987754 - DNA, 25 bp, Homo sapien
gagatcaaactgcaaggcggcagcg

SEQ ID NO: 987755 - DNA, 25 bp, Homo sapien
tcggagggtcctacacccacagagt

SEQ ID NO: 987756 - DNA, 25 bp, Homo sapien
ggaatctggggtaggaataatcgta

SEQ ID NO: 987757 - DNA, 25 bp, Homo sapien
caaggaatctggggtaggaataatc

SEQ ID NO: 987758 - DNA, 25 bp, Homo sapien
aaggaatctggggtaggaataatcg

SEQ ID NO: 987759 - DNA, 25 bp, Homo sapien
aatctggggtaggaataatcgtaca

SEQ ID NO: 987760 - DNA, 25 bp, Homo sapien
aagcacaccaggttccattaaccat

SEQ ID NO: 987761 - DNA, 25 bp, Homo sapien
taagcacaccaggttccattaacca

SEQ ID NO: 987762 - DNA, 25 bp, Homo sapien
agcacaccaggttccattaaccatt

SEQ ID NO: 987763 - DNA, 25 bp, Homo sapien
gctaagcacaccaggttccattaac

SEQ ID NO: 987764 - DNA, 25 bp, Homo sapien
gtatgtagggttctccagactgcca

SEQ ID NO: 987765 - DNA, 25 bp, Homo sapien
tcaaattagttctccgacagtctcc

SEQ ID NO: 987766 - DNA, 25 bp, Homo sapien
cagactgccaaagcgggtcatggag

SEQ ID NO: 987767 - DNA, 25 bp, Homo sapien
gaactcatacgttacaattagcagt

SEQ ID NO: 987768 - DNA, 25 bp, Homo sapien
tccactttgtatgacattaggcccc

SEQ ID NO: 987769 - DNA, 25 bp, Homo sapien
caacttgtcagctctcgaaatcggc

SEQ ID NO: 987770 - DNA, 25 bp, Homo sapien
tgttattaagtcagatctcctcgga

SEQ ID NO: 987771 - DNA, 25 bp, Homo sapien
tggaggtatatggaagcaggacacc

SEQ ID NO: 987772 - DNA, 25 bp, Homo sapien
cacaaggtaaatctaggagtatatc

SEQ ID NO: 987773 - DNA, 25 bp, Homo sapien
aagaagtatcttcctgcaattcagt

SEQ ID NO: 987774 - DNA, 25 bp, Homo sapien
gtatatctggtattatactcagagg

SEQ ID NO: 987775 - DNA, 25 bp, Homo sapien
tattcaaagtttgtgctatcactca

SEQ ID NO: 987776 - DNA, 25 bp, Homo sapien
aatgatcaatgcttagtagtgctcc

SEQ ID NO: 987777 - DNA, 25 bp, Homo sapien
tagctaatgcttgagtatatctgac

SEQ ID NO: 987778 - DNA, 25 bp, Homo sapien
gattgctcataataccagtggttgc

SEQ ID NO: 987779 - DNA, 25 bp, Homo sapien
catgtgatactctccaatagctcag

SEQ ID NO: 987780 - DNA, 25 bp, Homo sapien
tggagccaatagatgttacagaatc

SEQ ID NO: 987781 - DNA, 25 bp, Homo sapien
tctaataacgtataacatggcttcc

SEQ ID NO: 987782 - DNA, 25 bp, Homo sapien
tcctcgctggatgcttagaataaca

SEQ ID NO: 987783 - DNA, 25 bp, Homo sapien
gacaggtgagtttctaagggtaaga

SEQ ID NO: 987784 - DNA, 25 bp, Homo sapien
gaacaagtgtgagggataccaactc

SEQ ID NO: 987785 - DNA, 25 bp, Homo sapien
ggataccaactctgagctgaataag

SEQ ID NO: 987786 - DNA, 25 bp, Homo sapien
gtgtgagggataccaactctgagct

SEQ ID NO: 987787 - DNA, 25 bp, Homo sapien
aattagaaagtctatcagagaacaa

SEQ ID NO: 987788 - DNA, 25 bp, Homo sapien
taactcattactgattcacgggctg

SEQ ID NO: 987789 - DNA, 25 bp, Homo sapien
taaggtcagcttgtaaaaggactac

SEQ ID NO: 987790 - DNA, 25 bp, Homo sapien
ggaactctgctgtcaaaaaatccac

SEQ ID NO: 987791 - DNA, 25 bp, Homo sapien
gggagaaatggatctgctcaacatt

SEQ ID NO: 987792 - DNA, 25 bp, Homo sapien
tgctccactaaaccctagactattg

SEQ ID NO: 987793 - DNA, 25 bp, Homo sapien
gaagttgtacagatagcctttggca

SEQ ID NO: 987794 - DNA, 25 bp, Homo sapien
tcctgatttggactgttgctagccc

SEQ ID NO: 987795 - DNA, 25 bp, Homo sapien
gcttagaggccaacagataacgaag

SEQ ID NO: 987796 - DNA, 25 bp, Homo sapien
gcatcaccttgatttattttcctag

SEQ ID NO: 987797 - DNA, 25 bp, Homo sapien
ttcctagtatttttttcctcagatg

SEQ ID NO: 987798 - DNA, 25 bp, Homo sapien
tttcctcagatggaaaaataatttc

SEQ ID NO: 987799 - DNA, 25 bp, Homo sapien
cagcatcaccttgatttattttcct

SEQ ID NO: 987800 - DNA, 25 bp, Homo sapien
aacattgaactaggacatgctctgc

SEQ ID NO: 987801 - DNA, 25 bp, Homo sapien
cattgaactaggacatgctctgctt

SEQ ID NO: 987802 - DNA, 25 bp, Homo sapien
ttgaactaggacatgctctgcttcc

SEQ ID NO: 987803 - DNA, 25 bp, Homo sapien
acattgaactaggacatgctctgct

SEQ ID NO: 987804 - DNA, 25 bp, Homo sapien
tataagcccctactggtactatagt

SEQ ID NO: 987805 - DNA, 25 bp, Homo sapien
cctttttatgttccacaggtgacat

SEQ ID NO: 987806 - DNA, 25 bp, Homo sapien
tgaatacaaagcctacggtacatat

SEQ ID NO: 987807 - DNA, 25 bp, Homo sapien
cataacatttaaattgctgcccaaa

SEQ ID NO: 987808 - DNA, 25 bp, Homo sapien
cagcatcttctcctgtttcttgcct

SEQ ID NO: 987809 - DNA, 25 bp, Homo sapien
cttctcctgtttcttgccttccttt

SEQ ID NO: 987810 - DNA, 25 bp, Homo sapien
atcttctcctgtttcttgccttcct

SEQ ID NO: 987811 - DNA, 25 bp, Homo sapien
taatccagcatcttctcctgtttct

SEQ ID NO: 987812 - DNA, 25 bp, Homo sapien
cagttgcatcagtagacgaatccat

SEQ ID NO: 987813 - DNA, 25 bp, Homo sapien
cacccaaacactcctctctaccatc

SEQ ID NO: 987814 - DNA, 25 bp, Homo sapien
cccaaacactcctctctaccatctt

SEQ ID NO: 987815 - DNA, 25 bp, Homo sapien
acccaaacactcctctctaccatct

SEQ ID NO: 987816 - DNA, 25 bp, Homo sapien
caccacagattcatcgacctctata

SEQ ID NO: 987817 - DNA, 25 bp, Homo sapien
accacagattcatcgacctctatac

SEQ ID NO: 987818 - DNA, 25 bp, Homo sapien
caagagagggctaggcggctttcca

SEQ ID NO: 987819 - DNA, 25 bp, Homo sapien
acacaagagagggctaggcggcttt

SEQ ID NO: 987820 - DNA, 25 bp, Homo sapien
acaagagagggctaggcggctttcc

SEQ ID NO: 987821 - DNA, 25 bp, Homo sapien
cacaagagagggctaggcggctttc

SEQ ID NO: 987822 - DNA, 25 bp, Homo sapien
gcactccagtgacaaataccagaag

SEQ ID NO: 987823 - DNA, 25 bp, Homo sapien
gacaggactgcctatagagccacag

SEQ ID NO: 987824 - DNA, 25 bp, Homo sapien
ggtccatccggcagggatgcttgtt

SEQ ID NO: 987825 - DNA, 25 bp, Homo sapien
caaataccagaagcctgctccatgg

SEQ ID NO: 987826 - DNA, 25 bp, Homo sapien
agcctgaaccctagactcaccacct

SEQ ID NO: 987827 - DNA, 25 bp, Homo sapien
aaccctagactcaccacctgcaggt

SEQ ID NO: 987828 - DNA, 25 bp, Homo sapien
tatggacaactccagcagtggccaa

SEQ ID NO: 987829 - DNA, 25 bp, Homo sapien
aagttggagataactatttctatgg

SEQ ID NO: 987830 - DNA, 25 bp, Homo sapien
tctgaatctctccttacaatttctc

SEQ ID NO: 987831 - DNA, 25 bp, Homo sapien
atctctccttacaatttctctggca

SEQ ID NO: 987832 - DNA, 25 bp, Homo sapien
cttacaatttctctggcagtatgaa

SEQ ID NO: 987833 - DNA, 25 bp, Homo sapien
catttttctgaatctctccttacaa

SEQ ID NO: 987834 - DNA, 25 bp, Homo sapien
taagagtgtggaatatatggtcatc

SEQ ID NO: 987835 - DNA, 25 bp, Homo sapien
aatatatggtcatcatacaactgtc

SEQ ID NO: 987836 - DNA, 25 bp, Homo sapien
gtgtggaatatatggtcatcataca

SEQ ID NO: 987837 - DNA, 25 bp, Homo sapien
ggaatatatggtcatcatacaactg

SEQ ID NO: 987838 - DNA, 25 bp, Homo sapien
ttatttgggttaggagactgtacca

SEQ ID NO: 987839 - DNA, 25 bp, Homo sapien
ggagactgtaccaatcccctcatct

SEQ ID NO: 987840 - DNA, 25 bp, Homo sapien
tgcagaggacttcaatttgcactca

SEQ ID NO: 987841 - DNA, 25 bp, Homo sapien
gacttcaatttgcactcacaggctg

SEQ ID NO: 987842 - DNA, 25 bp, Homo sapien
ccagatcttacctgagtccatcaat

SEQ ID NO: 987843 - DNA, 25 bp, Homo sapien
ttgtggtataatggcaaggacttac

SEQ ID NO: 987844 - DNA, 25 bp, Homo sapien
cagtgtaggggagtttttcagtcac

SEQ ID NO: 987845 - DNA, 25 bp, Homo sapien
tacctgagtccatcaatccattaaa

SEQ ID NO: 987846 - DNA, 25 bp, Homo sapien
acattctccccaggcctggaactgg

SEQ ID NO: 987847 - DNA, 25 bp, Homo sapien
tcttctggcattcggcattgtgcag

SEQ ID NO: 987848 - DNA, 25 bp, Homo sapien
cattgtgcagggctcgcttcagact

SEQ ID NO: 987849 - DNA, 25 bp, Homo sapien
ggtttgggcttggtcagtttgccac

SEQ ID NO: 987850 - DNA, 25 bp, Homo sapien
tccagtccgagtgccctcccgtgtg

SEQ ID NO: 987851 - DNA, 25 bp, Homo sapien
acagtctccactggtgggcacacac

SEQ ID NO: 987852 - DNA, 25 bp, Homo sapien
ttgcaggggatcttacatctctggg

SEQ ID NO: 987853 - DNA, 25 bp, Homo sapien
ggtttgcttgcactcagctccagtc

SEQ ID NO: 987854 - DNA, 25 bp, Homo sapien
tgctgctggtactgttgagcctgca

SEQ ID NO: 987855 - DNA, 25 bp, Homo sapien
tccacagctgccagtatgaaaatga

SEQ ID NO: 987856 - DNA, 25 bp, Homo sapien
cagctgcaaattttcgacgctgctg

SEQ ID NO: 987857 - DNA, 25 bp, Homo sapien
aaattttcgacgctgctgctggtac

SEQ ID NO: 987858 - DNA, 25 bp, Homo sapien
cagcaatgatactgctgtacacaag

SEQ ID NO: 987859 - DNA, 25 bp, Homo sapien
ttggtaatatcgacaactacagcca

SEQ ID NO: 987860 - DNA, 25 bp, Homo sapien
tgatactgctgtacacaagaccaat

SEQ ID NO: 987861 - DNA, 25 bp, Homo sapien
aactacagccatcttcaaaattcct

SEQ ID NO: 987862 - DNA, 25 bp, Homo sapien
actccaactgcgtctaaatggacag

SEQ ID NO: 987863 - DNA, 25 bp, Homo sapien
tccaactgcgtctaaatggacagga

SEQ ID NO: 987864 - DNA, 25 bp, Homo sapien
ccaactgcgtctaaatggacaggag

SEQ ID NO: 987865 - DNA, 25 bp, Homo sapien
ctccaactgcgtctaaatggacagg

SEQ ID NO: 987866 - DNA, 25 bp, Homo sapien
taaaggaatcaggtatattgtattt

SEQ ID NO: 987867 - DNA, 25 bp, Homo sapien
acacatctgggccatccgcaggtta

SEQ ID NO: 987868 - DNA, 25 bp, Homo sapien
tttaaaggaatcaggtatattgtat

SEQ ID NO: 987869 - DNA, 25 bp, Homo sapien
gattgaacacatctgggccatccgc

SEQ ID NO: 987870 - DNA, 25 bp, Homo sapien
gcagcctagcgtcttaaaatctgag

SEQ ID NO: 987871 - DNA, 25 bp, Homo sapien
acaggagacaccgagatagtgaagg

SEQ ID NO: 987872 - DNA, 25 bp, Homo sapien
taggcgctgggttacctgccttttg

SEQ ID NO: 987873 - DNA, 25 bp, Homo sapien
caacagttgccaggtcaggtcaggg

SEQ ID NO: 987874 - DNA, 25 bp, Homo sapien
ataatggtggaaacatggtatctaa

SEQ ID NO: 987875 - DNA, 25 bp, Homo sapien
taatggtggaaacatggtatctaac

SEQ ID NO: 987876 - DNA, 25 bp, Homo sapien
tctattgttgctctcttgatcaatt

SEQ ID NO: 987877 - DNA, 25 bp, Homo sapien
cgcagtttatccttacagtgagttc

SEQ ID NO: 987878 - DNA, 25 bp, Homo sapien
ttgattttgttcacgcagtttatcc

SEQ ID NO: 987879 - DNA, 25 bp, Homo sapien
ttcacgttctgttctcttcttactt

SEQ ID NO: 987880 - DNA, 25 bp, Homo sapien
ggaaatgagttaatcctgggagctg

SEQ ID NO: 987881 - DNA, 25 bp, Homo sapien
ctcaagtagaaggaccatgtaagca

SEQ ID NO: 987882 - DNA, 25 bp, Homo sapien
taacaagaaacagtggatggacctc

SEQ ID NO: 987883 - DNA, 25 bp, Homo sapien
caacatggctgaagtcgaagggaca

SEQ ID NO: 987884 - DNA, 25 bp, Homo sapien
aatacatttaaaggccactggtcta

SEQ ID NO: 987885 - DNA, 25 bp, Homo sapien
tcactactcactgacttccttgtaa

SEQ ID NO: 987886 - DNA, 25 bp, Homo sapien
tggtctacccaataccaaggtctat

SEQ ID NO: 987887 - DNA, 25 bp, Homo sapien
cttcactactcactgacttccttgt

SEQ ID NO: 987888 - DNA, 25 bp, Homo sapien
cagccatgatagtcagagcagccag

SEQ ID NO: 987889 - DNA, 25 bp, Homo sapien
caccttaggctttttggaggccatt

SEQ ID NO: 987890 - DNA, 25 bp, Homo sapien
tcatcatgtccaacagccatgatag

SEQ ID NO: 987891 - DNA, 25 bp, Homo sapien
gagcagccagcaccttaggcttttt

SEQ ID NO: 987892 - DNA, 25 bp, Homo sapien
tctgtaatttaggtcgtgtgctagg

SEQ ID NO: 987893 - DNA, 25 bp, Homo sapien
gctcctagtttctccgctgtctgta

SEQ ID NO: 987894 - DNA, 25 bp, Homo sapien
tccgctgtctgtaatttaggtcgtg

SEQ ID NO: 987895 - DNA, 25 bp, Homo sapien
agagctcctagtttctccgctgtct

SEQ ID NO: 987896 - DNA, 25 bp, Homo sapien
cattagagacctagtgacatcttcc

SEQ ID NO: 987897 - DNA, 25 bp, Homo sapien
ttagagacctagtgacatcttccaa

SEQ ID NO: 987898 - DNA, 25 bp, Homo sapien
tcattagagacctagtgacatcttc

SEQ ID NO: 987899 - DNA, 25 bp, Homo sapien
ttcattagagacctagtgacatctt

SEQ ID NO: 987900 - DNA, 25 bp, Homo sapien
tctaacaaggtcatttggacctcat

SEQ ID NO: 987901 - DNA, 25 bp, Homo sapien
tccttctaacaaggtcatttggacc

SEQ ID NO: 987902 - DNA, 25 bp, Homo sapien
cttctaacaaggtcatttggacctc

SEQ ID NO: 987903 - DNA, 25 bp, Homo sapien
ctttccttctaacaaggtcatttgg

SEQ ID NO: 987904 - DNA, 25 bp, Homo sapien
ctttattggaattagatcctttggc

SEQ ID NO: 987905 - DNA, 25 bp, Homo sapien
gaattagatcctttggcatcctcct

SEQ ID NO: 987906 - DNA, 25 bp, Homo sapien
gcatcctcctctaataacccaatgg

SEQ ID NO: 987907 - DNA, 25 bp, Homo sapien
tctaataacccaatggcattcagtc

SEQ ID NO: 987908 - DNA, 25 bp, Homo sapien
cagaataaaactaggattctgataa

SEQ ID NO: 987909 - DNA, 25 bp, Homo sapien
gtatgagaaaccgtcagtctttgcc

SEQ ID NO: 987910 - DNA, 25 bp, Homo sapien
taaagtatgagaaaccgtcagtctt

SEQ ID NO: 987911 - DNA, 25 bp, Homo sapien
gcagaataaaactaggattctgata

SEQ ID NO: 987912 - DNA, 25 bp, Homo sapien
aatcatcagatcttgctgaatctcc

SEQ ID NO: 987913 - DNA, 25 bp, Homo sapien
tcatcagatcttgctgaatctccat

SEQ ID NO: 987914 - DNA, 25 bp, Homo sapien
atcatcagatcttgctgaatctcca

SEQ ID NO: 987915 - DNA, 25 bp, Homo sapien
tacatcttcttaaaacaaaggcatg

SEQ ID NO: 987916 - DNA, 25 bp, Homo sapien
catcttcttaaaacaaaggcatgca

SEQ ID NO: 987917 - DNA, 25 bp, Homo sapien
tttacatcttcttaaaacaaaggca

SEQ ID NO: 987918 - DNA, 25 bp, Homo sapien
atcttcttaaaacaaaggcatgcac

SEQ ID NO: 987919 - DNA, 25 bp, Homo sapien
tccagggtgaaggtagaggacaagg

SEQ ID NO: 987920 - DNA, 25 bp, Homo sapien
acagcaagggaagttagggacgcca

SEQ ID NO: 987921 - DNA, 25 bp, Homo sapien
ggaagttagggacgccactgtccag

SEQ ID NO: 987922 - DNA, 25 bp, Homo sapien
ttagggacgccactgtccagggtga

SEQ ID NO: 987923 - DNA, 25 bp, Homo sapien
tgagcactgatgagggaaccatcat

SEQ ID NO: 987924 - DNA, 25 bp, Homo sapien
ctgagcactgatgagggaaccatca

SEQ ID NO: 987925 - DNA, 25 bp, Homo sapien
gaactcttcactagaacagcagata

SEQ ID NO: 987926 - DNA, 25 bp, Homo sapien
aggttctgcacccaagattcctcag

SEQ ID NO: 987927 - DNA, 25 bp, Homo sapien
gggaccagattgtccaactccaggt

SEQ ID NO: 987928 - DNA, 25 bp, Homo sapien
tattgctttgtcttgaaacactccc

SEQ ID NO: 987929 - DNA, 25 bp, Homo sapien
caaagcttctcaggctcttgagagg

SEQ ID NO: 987930 - DNA, 25 bp, Homo sapien
gggcctcacagcaactccaaagctt

SEQ ID NO: 987931 - DNA, 25 bp, Homo sapien
ctgcagtgcatcaggcccactccct

SEQ ID NO: 987932 - DNA, 25 bp, Homo sapien
agtgcatcaggcccactcccttggg

SEQ ID NO: 987933 - DNA, 25 bp, Homo sapien
tgtgtcttccctggggagactttta

SEQ ID NO: 987934 - DNA, 25 bp, Homo sapien
gctgtgtcttccctggggagacttt

SEQ ID NO: 987935 - DNA, 25 bp, Homo sapien
ctgggtgggaccaggcagctgtgtc

SEQ ID NO: 987936 - DNA, 25 bp, Homo sapien
ggtgggaccaggcagctgtgtcttc

SEQ ID NO: 987937 - DNA, 25 bp, Homo sapien
tggctcatttgaattccctggaaca

SEQ ID NO: 987938 - DNA, 25 bp, Homo sapien
tggctggctcatttgaattccctgg

SEQ ID NO: 987939 - DNA, 25 bp, Homo sapien
cttctggctggctcatttgaattcc

SEQ ID NO: 987940 - DNA, 25 bp, Homo sapien
gctggctcatttgaattccctggaa

SEQ ID NO: 987941 - DNA, 25 bp, Homo sapien
ctgtcgcacatcttacctcctcctc

SEQ ID NO: 987942 - DNA, 25 bp, Homo sapien
tcctgtcgcacatcttacctcctcc

SEQ ID NO: 987943 - DNA, 25 bp, Homo sapien
attcctgtcgcacatcttacctcct

SEQ ID NO: 987944 - DNA, 25 bp, Homo sapien
cattcctgtcgcacatcttacctcc

SEQ ID NO: 987945 - DNA, 25 bp, Homo sapien
cttcaagcaacttaggcaatctctg

SEQ ID NO: 987946 - DNA, 25 bp, Homo sapien
aagcaacttaggcaatctctgtgtg

SEQ ID NO: 987947 - DNA, 25 bp, Homo sapien
tcaagcaacttaggcaatctctgtg

SEQ ID NO: 987948 - DNA, 25 bp, Homo sapien
ttcaagcaacttaggcaatctctgt

SEQ ID NO: 987949 - DNA, 25 bp, Homo sapien
aagattcagtggcacatccagcagc

SEQ ID NO: 987950 - DNA, 25 bp, Homo sapien
gcttacagatgttgcgtcgtgacca

SEQ ID NO: 987951 - DNA, 25 bp, Homo sapien
tgacatttaccaccaacctatgagg

SEQ ID NO: 987952 - DNA, 25 bp, Homo sapien
gagatgctggttcctgactccaaac

SEQ ID NO: 987953 - DNA, 25 bp, Homo sapien
acatgctccgtatgttttcttccag

SEQ ID NO: 987954 - DNA, 25 bp, Homo sapien
cttatgggaagggataaggtcaaag

SEQ ID NO: 987955 - DNA, 25 bp, Homo sapien
gaagggataaggtcaaagagtctgc

SEQ ID NO: 987956 - DNA, 25 bp, Homo sapien
atcacatgctccgtatgttttcttc

SEQ ID NO: 987957 - DNA, 25 bp, Homo sapien
ccgccttctggacggatgactcact

SEQ ID NO: 987958 - DNA, 25 bp, Homo sapien
ctgagtccaggtacccggctcgctg

SEQ ID NO: 987959 - DNA, 25 bp, Homo sapien
ggcgaggttgctaccgctgagtcca

SEQ ID NO: 987960 - DNA, 25 bp, Homo sapien
gaaacgtcctctctggcgctcagtc

SEQ ID NO: 987961 - DNA, 25 bp, Homo sapien
ctggaaggcggggaacctgatcctg

SEQ ID NO: 987962 - DNA, 25 bp, Homo sapien
gaacctgatcctgcctttgactcaa

SEQ ID NO: 987963 - DNA, 25 bp, Homo sapien
ggaaggcggggaacctgatcctgcc

SEQ ID NO: 987964 - DNA, 25 bp, Homo sapien
gggaacctgatcctgcctttgactc

SEQ ID NO: 987965 - DNA, 25 bp, Homo sapien
tcacaaagagtgacagacgtctcaa

SEQ ID NO: 987966 - DNA, 25 bp, Homo sapien
tcttcagatgagtgcaaagccactt

SEQ ID NO: 987967 - DNA, 25 bp, Homo sapien
gagagcgctttgcactcgagagctg

SEQ ID NO: 987968 - DNA, 25 bp, Homo sapien
ccctgcggagcaagaaaacggattt

SEQ ID NO: 987969 - DNA, 25 bp, Homo sapien
tccttggtgcctttagcaacctatt

SEQ ID NO: 987970 - DNA, 25 bp, Homo sapien
aggctgggctttgcgtctctggaat

SEQ ID NO: 987971 - DNA, 25 bp, Homo sapien
gaggattcgtcaaagtagctcaaac

SEQ ID NO: 987972 - DNA, 25 bp, Homo sapien
gggctttgcgtctctggaattgtca

SEQ ID NO: 987973 - DNA, 25 bp, Homo sapien
gcctttgacacccaagaatttagag

SEQ ID NO: 987974 - DNA, 25 bp, Homo sapien
aatgtcccttggagaagttgactgg

SEQ ID NO: 987975 - DNA, 25 bp, Homo sapien
tttgatggcgtccttcccaaattgg

SEQ ID NO: 987976 - DNA, 25 bp, Homo sapien
tcagagatgcacttacacacctaca

SEQ ID NO: 987977 - DNA, 25 bp, Homo sapien
gccagacgtggctctacaaactcaa

SEQ ID NO: 987978 - DNA, 25 bp, Homo sapien
gattctgaactcctattgttaacag

SEQ ID NO: 987979 - DNA, 25 bp, Homo sapien
ttggtatcaaccaggaaggatgtct

SEQ ID NO: 987980 - DNA, 25 bp, Homo sapien
tgtttaagtgcctggccagtcagcc

SEQ ID NO: 987981 - DNA, 25 bp, Homo sapien
cagcatgtgctctgtcctcaaagag

SEQ ID NO: 987982 - DNA, 25 bp, Homo sapien
ttggggtacaagagctcagagtttg

SEQ ID NO: 987983 - DNA, 25 bp, Homo sapien
agatgttggatagctgagttggaaa

SEQ ID NO: 987984 - DNA, 25 bp, Homo sapien
gatgttggatagctgagttggaaat

SEQ ID NO: 987985 - DNA, 25 bp, Homo sapien
ctttctcttggggtacaagagctca

SEQ ID NO: 987986 - DNA, 25 bp, Homo sapien
gtgtccattcacattcagtttgtat

SEQ ID NO: 987987 - DNA, 25 bp, Homo sapien
tttcagtgtccattcacattcagtt

SEQ ID NO: 987988 - DNA, 25 bp, Homo sapien
tcagtgtccattcacattcagtttg

SEQ ID NO: 987989 - DNA, 25 bp, Homo sapien
acattcagtttgtattgaggctttc

SEQ ID NO: 987990 - DNA, 25 bp, Homo sapien
caggaagctttacaatcatgctgga

SEQ ID NO: 987991 - DNA, 25 bp, Homo sapien
gaagctttacaatcatgctggaagg

SEQ ID NO: 987992 - DNA, 25 bp, Homo sapien
aagaaaggcaacttcttcactaggt

SEQ ID NO: 987993 - DNA, 25 bp, Homo sapien
ggaagaaaggcaacttcttcactag

SEQ ID NO: 987994 - DNA, 25 bp, Homo sapien
gaatgatgttgtcattggcagacag

SEQ ID NO: 987995 - DNA, 25 bp, Homo sapien
ggaatgatgttgtcattggcagaca

SEQ ID NO: 987996 - DNA, 25 bp, Homo sapien
gtttgatgccatctcactggttcct

SEQ ID NO: 987997 - DNA, 25 bp, Homo sapien
tcttccattgcacccctctagtgaa

SEQ ID NO: 987998 - DNA, 25 bp, Homo sapien
gggactcccatgatgcaaattttgg

SEQ ID NO: 987999 - DNA, 25 bp, Homo sapien
tgctcagactggataacttccattg

SEQ ID NO: 988000 - DNA, 25 bp, Homo sapien
tcttctgtagcgtccaaatctgctc

SEQ ID NO: 988001 - DNA, 25 bp, Homo sapien
ccttttaggactctcattacttgta

SEQ ID NO: 988002 - DNA, 25 bp, Homo sapien
cagtggttttggctgattacagggt

SEQ ID NO: 988003 - DNA, 25 bp, Homo sapien
gaagttgtcccgcattctactaatg

SEQ ID NO: 988004 - DNA, 25 bp, Homo sapien
tctttttcagagattagttcagtct

SEQ ID NO: 988005 - DNA, 25 bp, Homo sapien
cattgaaaatctctgtagtgcaaca

SEQ ID NO: 988006 - DNA, 25 bp, Homo sapien
tgtagtgcaacacagtgatcaagat

SEQ ID NO: 988007 - DNA, 25 bp, Homo sapien
aagtaactgtaactagtcaatttct

SEQ ID NO: 988008 - DNA, 25 bp, Homo sapien
tgccacagctgctacttgtttatgg

SEQ ID NO: 988009 - DNA, 25 bp, Homo sapien
actttaatctttctactgccacagc

SEQ ID NO: 988010 - DNA, 25 bp, Homo sapien
cacagctgctacttgtttatggatt

SEQ ID NO: 988011 - DNA, 25 bp, Homo sapien
tttaatctttctactgccacagctg

SEQ ID NO: 988012 - DNA, 25 bp, Homo sapien
tgggatgtgatagggcagaatcaga

SEQ ID NO: 988013 - DNA, 25 bp, Homo sapien
atgtgactgcaactcttcatacaga

SEQ ID NO: 988014 - DNA, 25 bp, Homo sapien
gatgtagcctttgcgagtggaatac

SEQ ID NO: 988015 - DNA, 25 bp, Homo sapien
tacccacagccaagggtaccctgga

SEQ ID NO: 988016 - DNA, 25 bp, Homo sapien
catttggttgcatatagaaggtaca

SEQ ID NO: 988017 - DNA, 25 bp, Homo sapien
tctccagaagatcaggagatcagga

SEQ ID NO: 988018 - DNA, 25 bp, Homo sapien
tctcaatccaaccaatgatgggtgg

SEQ ID NO: 988019 - DNA, 25 bp, Homo sapien
gataaatctcaccaacacctataaa

SEQ ID NO: 988020 - DNA, 25 bp, Homo sapien
caatagagtcttggatgtcagggcc

SEQ ID NO: 988021 - DNA, 25 bp, Homo sapien
tcagaaattcgttaggcaaagggac

SEQ ID NO: 988022 - DNA, 25 bp, Homo sapien
cagcagccgtgattgtgtaccctca

SEQ ID NO: 988023 - DNA, 25 bp, Homo sapien
tagggtccaagtcgatctgacagac

SEQ ID NO: 988024 - DNA, 25 bp, Homo sapien
tagaaattggcccatagccacctgt

SEQ ID NO: 988025 - DNA, 25 bp, Homo sapien
taatatagcacgtcatagccgcact

SEQ ID NO: 988026 - DNA, 25 bp, Homo sapien
gctagataactgactgcttggccaa

SEQ ID NO: 988027 - DNA, 25 bp, Homo sapien
gctcaggagacgtcagatttcgcca

SEQ ID NO: 988028 - DNA, 25 bp, Homo sapien
ccgtggcaggtttagatgttacaat

SEQ ID NO: 988029 - DNA, 25 bp, Homo sapien
ccattcgatccgtggcaggtttaga

SEQ ID NO: 988030 - DNA, 25 bp, Homo sapien
ctgtaagtaccattcgatccgtggc

SEQ ID NO: 988031 - DNA, 25 bp, Homo sapien
tagatgttacaattctaactatctg

SEQ ID NO: 988032 - DNA, 25 bp, Homo sapien
tcctcagagatatagcacacaagtt

SEQ ID NO: 988033 - DNA, 25 bp, Homo sapien
gaagcatccttctgaatgatccagg

SEQ ID NO: 988034 - DNA, 25 bp, Homo sapien
ttctgcaaactagctgtgggcctct

SEQ ID NO: 988035 - DNA, 25 bp, Homo sapien
gatggctacacataggcagtacgga

SEQ ID NO: 988036 - DNA, 25 bp, Homo sapien
tttccaggtcctcatggccaatgac

SEQ ID NO: 988037 - DNA, 25 bp, Homo sapien
caaacagcagtttccaggtcctcat

SEQ ID NO: 988038 - DNA, 25 bp, Homo sapien
aaacagcagtttccaggtcctcatg

SEQ ID NO: 988039 - DNA, 25 bp, Homo sapien
cagtttccaggtcctcatggccaat

SEQ ID NO: 988040 - DNA, 25 bp, Homo sapien
taggtaagcagccaagtctgggtcc

SEQ ID NO: 988041 - DNA, 25 bp, Homo sapien
ctttctaggtaagcagccaagtctg

SEQ ID NO: 988042 - DNA, 25 bp, Homo sapien
agttctgacggctttctaggtaagc

SEQ ID NO: 988043 - DNA, 25 bp, Homo sapien
gacggctttctaggtaagcagccaa

SEQ ID NO: 988044 - DNA, 25 bp, Homo sapien
cagaagctggcacacagcccggttc

SEQ ID NO: 988045 - DNA, 25 bp, Homo sapien
cttggagtccgtctttctcagagat

SEQ ID NO: 988046 - DNA, 25 bp, Homo sapien
gcagccttgtgcagtgcagtctcac

SEQ ID NO: 988047 - DNA, 25 bp, Homo sapien
cacagcccggttccgctggcaggca

SEQ ID NO: 988048 - DNA, 25 bp, Homo sapien
gatcataatatctgactctagcccc

SEQ ID NO: 988049 - DNA, 25 bp, Homo sapien
ttccctgtaggctgctgagactttg

SEQ ID NO: 988050 - DNA, 25 bp, Homo sapien
tgagctagccatcaactgatcataa

SEQ ID NO: 988051 - DNA, 25 bp, Homo sapien
gctgatgtagggtgctcctcagcct

SEQ ID NO: 988052 - DNA, 25 bp, Homo sapien
ggttgatggccactcggcctgcagt

SEQ ID NO: 988053 - DNA, 25 bp, Homo sapien
cagggagcagtgtggagcgcctctg

SEQ ID NO: 988054 - DNA, 25 bp, Homo sapien
ggcactgggtgaaagaacagggagc

SEQ ID NO: 988055 - DNA, 25 bp, Homo sapien
cagcacgcagcccttggttgatggc

SEQ ID NO: 988056 - DNA, 25 bp, Homo sapien
actgtctgccatatccaataactcg

SEQ ID NO: 988057 - DNA, 25 bp, Homo sapien
tctgccatatccaataactcggaag

SEQ ID NO: 988058 - DNA, 25 bp, Homo sapien
ttcactgtctgccatatccaataac

SEQ ID NO: 988059 - DNA, 25 bp, Homo sapien
gccatatccaataactcggaaggtc

SEQ ID NO: 988060 - DNA, 25 bp, Homo sapien
gactatagatgcatccttaggaatg

SEQ ID NO: 988061 - DNA, 25 bp, Homo sapien
cttgggatggcgtcttatgaagcaa

SEQ ID NO: 988062 - DNA, 25 bp, Homo sapien
tgtcaagcagctttcgatcaagttt

SEQ ID NO: 988063 - DNA, 25 bp, Homo sapien
ctcattctcaaacgagttgcttggg

SEQ ID NO: 988064 - DNA, 25 bp, Homo sapien
gatgttatgggatttcataattctc

SEQ ID NO: 988065 - DNA, 25 bp, Homo sapien
cataacagagatgttatgggatttc

SEQ ID NO: 988066 - DNA, 25 bp, Homo sapien
atgaaagtcattggccaaggacaac

SEQ ID NO: 988067 - DNA, 25 bp, Homo sapien
gccaaggacaacataacagagatgt

SEQ ID NO: 988068 - DNA, 25 bp, Homo sapien
ttcccattagtctccctgacgctgc

SEQ ID NO: 988069 - DNA, 25 bp, Homo sapien
acgctgccagcagaccattccaaat

SEQ ID NO: 988070 - DNA, 25 bp, Homo sapien
tagtctccctgacgctgccagcaga

SEQ ID NO: 988071 - DNA, 25 bp, Homo sapien
tgacgctgccagcagaccattccaa

SEQ ID NO: 988072 - DNA, 25 bp, Homo sapien
gaagagaaatcagttgctgcttgtt

SEQ ID NO: 988073 - DNA, 25 bp, Homo sapien
taaaagagcccatagaagagaaatc

SEQ ID NO: 988074 - DNA, 25 bp, Homo sapien
gcttgttgtgtctgggagaataact

SEQ ID NO: 988075 - DNA, 25 bp, Homo sapien
ccccagcctgctttaaaagagccca

SEQ ID NO: 988076 - DNA, 25 bp, Homo sapien
gttcaggtgtcctcttgatggtggc

SEQ ID NO: 988077 - DNA, 25 bp, Homo sapien
ttcaggtgtcctcttgatggtggcg

SEQ ID NO: 988078 - DNA, 25 bp, Homo sapien
cctcttgatggtggcggcccacact

SEQ ID NO: 988079 - DNA, 25 bp, Homo sapien
gtgtcctcttgatggtggcggccca

SEQ ID NO: 988080 - DNA, 25 bp, Homo sapien
cagaggggagaggggctcaggagta

SEQ ID NO: 988081 - DNA, 25 bp, Homo sapien
ctgaccagagccaatgaagaagagg

SEQ ID NO: 988082 - DNA, 25 bp, Homo sapien
agcagaggggagaggggctcaggag

SEQ ID NO: 988083 - DNA, 25 bp, Homo sapien
gaggggagaggggctcaggagtaag

SEQ ID NO: 988084 - DNA, 25 bp, Homo sapien
ttctttgtcaggtcaggatattcca

SEQ ID NO: 988085 - DNA, 25 bp, Homo sapien
aaggctgatttctttgtcaggtcag

SEQ ID NO: 988086 - DNA, 25 bp, Homo sapien
gatttctttgtcaggtcaggatatt

SEQ ID NO: 988087 - DNA, 25 bp, Homo sapien
tttgtcaggtcaggatattccagag

SEQ ID NO: 988088 - DNA, 25 bp, Homo sapien
cccgttgccggttttagctgcgtag

SEQ ID NO: 988089 - DNA, 25 bp, Homo sapien
aaggagtgaacagtggtctggtccc

SEQ ID NO: 988090 - DNA, 25 bp, Homo sapien
gcagactgcctccatttttatagct

SEQ ID NO: 988091 - DNA, 25 bp, Homo sapien
tctggtccctgaattagcagactgc

SEQ ID NO: 988092 - DNA, 25 bp, Homo sapien
ttcataagatcaccagctattactg

SEQ ID NO: 988093 - DNA, 25 bp, Homo sapien
tcataagatcaccagctattactgc

SEQ ID NO: 988094 - DNA, 25 bp, Homo sapien
gccttccctttgaccaacgctgaag

SEQ ID NO: 988095 - DNA, 25 bp, Homo sapien
ccttccctttgaccaacgctgaagc

SEQ ID NO: 988096 - DNA, 25 bp, Homo sapien
tccaggagagaactgccatcttcct

SEQ ID NO: 988097 - DNA, 25 bp, Homo sapien
ctctcttaagtctgggctctcaaga

SEQ ID NO: 988098 - DNA, 25 bp, Homo sapien
atgtgctcagacatccatgtgcgga

SEQ ID NO: 988099 - DNA, 25 bp, Homo sapien
catccatgtgcggaaggaagagatg

SEQ ID NO: 988100 - DNA, 25 bp, Homo sapien
tctgggctctcaagagtctggatgt

SEQ ID NO: 988101 - DNA, 25 bp, Homo sapien
tcagaagcctgtaaatgtccagagc

SEQ ID NO: 988102 - DNA, 25 bp, Homo sapien
agagcagggcacaggtatctccaaa

SEQ ID NO: 988103 - DNA, 25 bp, Homo sapien
gaaacccaggcctgatgcaagtgac

SEQ ID NO: 988104 - DNA, 25 bp, Homo sapien
caaggtgtggcaacagaaactccat

SEQ ID NO: 988105 - DNA, 25 bp, Homo sapien
actgtcaaacaatactatggggtca

SEQ ID NO: 988106 - DNA, 25 bp, Homo sapien
caatatttccctggtaaggccaaag

SEQ ID NO: 988107 - DNA, 25 bp, Homo sapien
cattaggtagtaatacaaggtcctt

SEQ ID NO: 988108 - DNA, 25 bp, Homo sapien
gctcatctggttgtatagactgtca

SEQ ID NO: 988109 - DNA, 25 bp, Homo sapien
aagacacggaaattaatgagcattg

SEQ ID NO: 988110 - DNA, 25 bp, Homo sapien
agacacggaaattaatgagcattga

SEQ ID NO: 988111 - DNA, 25 bp, Homo sapien
caagacacggaaattaatgagcatt

SEQ ID NO: 988112 - DNA, 25 bp, Homo sapien
cctgagtgtgctggcacaggtagca

SEQ ID NO: 988113 - DNA, 25 bp, Homo sapien
gtgaagcagcggtaagcgcagcatt

SEQ ID NO: 988114 - DNA, 25 bp, Homo sapien
agtaagtgaagcagcggtaagcgca

SEQ ID NO: 988115 - DNA, 25 bp, Homo sapien
taagtgaagcagcggtaagcgcagc

SEQ ID NO: 988116 - DNA, 25 bp, Homo sapien
atgatcttctgaagagactggtgac

SEQ ID NO: 988117 - DNA, 25 bp, Homo sapien
cctggatagaacagcctcccatcat

SEQ ID NO: 988118 - DNA, 25 bp, Homo sapien
gtctttcctggatagaacagcctcc

SEQ ID NO: 988119 - DNA, 25 bp, Homo sapien
tttcctggatagaacagcctcccat

SEQ ID NO: 988120 - DNA, 25 bp, Homo sapien
tctttcctggatagaacagcctccc

SEQ ID NO: 988121 - DNA, 25 bp, Homo sapien
tgttacactcctacgtagtcccgaa

SEQ ID NO: 988122 - DNA, 25 bp, Homo sapien
tgaaaaccgatttcccagttgggca

SEQ ID NO: 988123 - DNA, 25 bp, Homo sapien
tccaggcacatttcaacggtctgca

SEQ ID NO: 988124 - DNA, 25 bp, Homo sapien
catgtaagaatgttcatgcctggtc

SEQ ID NO: 988125 - DNA, 25 bp, Homo sapien
tcttctgttttaccgtgaagtggtg

SEQ ID NO: 988126 - DNA, 25 bp, Homo sapien
tgttggtagacaagaatcttcattc

SEQ ID NO: 988127 - DNA, 25 bp, Homo sapien
ccgtgaagtggtgatgctacacaaa

SEQ ID NO: 988128 - DNA, 25 bp, Homo sapien
actgttggtagacaagaatcttcat

SEQ ID NO: 988129 - DNA, 25 bp, Homo sapien
tatctggattgaatatctaccctcg

SEQ ID NO: 988130 - DNA, 25 bp, Homo sapien
ctgcctagacacaattatctggatt

SEQ ID NO: 988131 - DNA, 25 bp, Homo sapien
tctaccctcggtgtggttcactaca

SEQ ID NO: 988132 - DNA, 25 bp, Homo sapien
tgtggttcactacactgtttcccct

SEQ ID NO: 988133 - DNA, 25 bp, Homo sapien
caaaggtatcgacactgctgtgaaa

SEQ ID NO: 988134 - DNA, 25 bp, Homo sapien
cattatttgattaagaccccaggta

SEQ ID NO: 988135 - DNA, 25 bp, Homo sapien
ggtgtgtgcctcgaaactttgccaa

SEQ ID NO: 988136 - DNA, 25 bp, Homo sapien
tgcgcatgagtgtatctgtcaccag

SEQ ID NO: 988137 - DNA, 25 bp, Homo sapien
tgcgtttccgcagggcaggattcca

SEQ ID NO: 988138 - DNA, 25 bp, Homo sapien
agatctgagtcctcataatagggag

SEQ ID NO: 988139 - DNA, 25 bp, Homo sapien
tagcacgcgggagtggctgagatct

SEQ ID NO: 988140 - DNA, 25 bp, Homo sapien
taatagggagctatcatccccagcc

SEQ ID NO: 988141 - DNA, 25 bp, Homo sapien
tccccgccggctgtgacaccaccat

SEQ ID NO: 988142 - DNA, 25 bp, Homo sapien
caccaggtcaggcatgcccggaggt

SEQ ID NO: 988143 - DNA, 25 bp, Homo sapien
caggtcaggcatgcccggaggtgtc

SEQ ID NO: 988144 - DNA, 25 bp, Homo sapien
accaccaggtcaggcatgcccggag

SEQ ID NO: 988145 - DNA, 25 bp, Homo sapien
attcgataaaagcgatcagcagaag

SEQ ID NO: 988146 - DNA, 25 bp, Homo sapien
tattcgataaaagcgatcagcagaa

SEQ ID NO: 988147 - DNA, 25 bp, Homo sapien
ctattcgataaaagcgatcagcaga

SEQ ID NO: 988148 - DNA, 25 bp, Homo sapien
ctaggaagcaccaccgaggagagag

SEQ ID NO: 988149 - DNA, 25 bp, Homo sapien
ggaagcaccaccgaggagagagcct

SEQ ID NO: 988150 - DNA, 25 bp, Homo sapien
aagcaccaccgaggagagagcctct

SEQ ID NO: 988151 - DNA, 25 bp, Homo sapien
taggaagcaccaccgaggagagagc

SEQ ID NO: 988152 - DNA, 25 bp, Homo sapien
aaccccgttacatagaggccagctg

SEQ ID NO: 988153 - DNA, 25 bp, Homo sapien
aatcctgagtcatccaaccccgtta

SEQ ID NO: 988154 - DNA, 25 bp, Homo sapien
ggccagctgtcacgatgtcaagtag

SEQ ID NO: 988155 - DNA, 25 bp, Homo sapien
gaagtgccagcagatacaatcctga

SEQ ID NO: 988156 - DNA, 25 bp, Homo sapien
aattcctcattagcttctccctgtg

SEQ ID NO: 988157 - DNA, 25 bp, Homo sapien
attccttcatgctcaaagtcccctg

SEQ ID NO: 988158 - DNA, 25 bp, Homo sapien
tccctgtgctctggccacgttagtt

SEQ ID NO: 988159 - DNA, 25 bp, Homo sapien
tatcactcttcttgcgccttccttg

SEQ ID NO: 988160 - DNA, 25 bp, Homo sapien
ctggtaatgaactctctgggagcca

SEQ ID NO: 988161 - DNA, 25 bp, Homo sapien
agccagaagaaactgactgtaggtc

SEQ ID NO: 988162 - DNA, 25 bp, Homo sapien
ggagccagaagaaactgactgtagg

SEQ ID NO: 988163 - DNA, 25 bp, Homo sapien
gtaatgaactctctgggagccagaa

SEQ ID NO: 988164 - DNA, 25 bp, Homo sapien
tgtaggcggtctatgtacatacggc

SEQ ID NO: 988165 - DNA, 25 bp, Homo sapien
cgcacaactagaatacccagaggta

SEQ ID NO: 988166 - DNA, 25 bp, Homo sapien
tgtacatacggcaagtctccaaatc

SEQ ID NO: 988167 - DNA, 25 bp, Homo sapien
aatcacagtctccacgcacaactag

SEQ ID NO: 988168 - DNA, 25 bp, Homo sapien
ctccaaatgactgcactagttcccc

SEQ ID NO: 988169 - DNA, 25 bp, Homo sapien
ccaaatgactgcactagttccccag

SEQ ID NO: 988170 - DNA, 25 bp, Homo sapien
atggttcttaaccagtctgaaatag

SEQ ID NO: 988171 - DNA, 25 bp, Homo sapien
ccagcaatggttcttaaccagtctg

SEQ ID NO: 988172 - DNA, 25 bp, Homo sapien
ggaccagaaccatcagactcagaaa

SEQ ID NO: 988173 - DNA, 25 bp, Homo sapien
taaacagggaggaaacatctccagg

SEQ ID NO: 988174 - DNA, 25 bp, Homo sapien
gtcagacacattctcgtgaacatac

SEQ ID NO: 988175 - DNA, 25 bp, Homo sapien
aaggctgtaaacagggaggaaacat

SEQ ID NO: 988176 - DNA, 25 bp, Homo sapien
ctccttttccgataggccagattca

SEQ ID NO: 988177 - DNA, 25 bp, Homo sapien
ggccagattcaggtgaacttataga

SEQ ID NO: 988178 - DNA, 25 bp, Homo sapien
gctgacagccttgctatataacctt

SEQ ID NO: 988179 - DNA, 25 bp, Homo sapien
tatagaccatgactcaagcttatca

SEQ ID NO: 988180 - DNA, 25 bp, Homo sapien
ctctgcgccatgagagccaagtgga

SEQ ID NO: 988181 - DNA, 25 bp, Homo sapien
tctgcgccatgagagccaagtggag

SEQ ID NO: 988182 - DNA, 25 bp, Homo sapien
agtggaggaagaagcgaatgcgcag

SEQ ID NO: 988183 - DNA, 25 bp, Homo sapien
agcgaatgcgcaggctgaagcgcaa

SEQ ID NO: 988184 - DNA, 25 bp, Homo sapien
cctctgatcgccgatcacctctgag

SEQ ID NO: 988185 - DNA, 25 bp, Homo sapien
tcgccctctgatcgccgatcacctc

SEQ ID NO: 988186 - DNA, 25 bp, Homo sapien
catcgccctctgatcgccgatcacc

SEQ ID NO: 988187 - DNA, 25 bp, Homo sapien
cttcatcgccctctgatcgccgatc

SEQ ID NO: 988188 - DNA, 25 bp, Homo sapien
tgtaacaaccatataataaatcacc

SEQ ID NO: 988189 - DNA, 25 bp, Homo sapien
tggccgagtgtaacaaccatataat

SEQ ID NO: 988190 - DNA, 25 bp, Homo sapien
gagtgtaacaaccatataataaatc

SEQ ID NO: 988191 - DNA, 25 bp, Homo sapien
ccgagtgtaacaaccatataataaa

SEQ ID NO: 988192 - DNA, 25 bp, Homo sapien
cagaggtttggggaattgctcctcc

SEQ ID NO: 988193 - DNA, 25 bp, Homo sapien
gaaattcagaggtttggggaattgc

SEQ ID NO: 988194 - DNA, 25 bp, Homo sapien
ggtttggggaattgctcctcctcca

SEQ ID NO: 988195 - DNA, 25 bp, Homo sapien
aattcagaggtttggggaattgctc

SEQ ID NO: 988196 - DNA, 25 bp, Homo sapien
ttgttcacccggatcctcagacgat

SEQ ID NO: 988197 - DNA, 25 bp, Homo sapien
ctcagacgatctgggacagactggg

SEQ ID NO: 988198 - DNA, 25 bp, Homo sapien
ccttgtcatagtggaatccttcata

SEQ ID NO: 988199 - DNA, 25 bp, Homo sapien
ccttcatagtcttgtaaactgattt

SEQ ID NO: 988200 - DNA, 25 bp, Homo sapien
tgcaaaacaagaaccgagtggtcag

SEQ ID NO: 988201 - DNA, 25 bp, Homo sapien
gagagcggaattggtagccatgcac

SEQ ID NO: 988202 - DNA, 25 bp, Homo sapien
cagatacaaatgagagagcggaatt

SEQ ID NO: 988203 - DNA, 25 bp, Homo sapien
gaaccgagtggtcagatacaaatga

SEQ ID NO: 988204 - DNA, 25 bp, Homo sapien
ctggagctccccaatttggggctta

SEQ ID NO: 988205 - DNA, 25 bp, Homo sapien
cccataaagtggctgctccctgtgc

SEQ ID NO: 988206 - DNA, 25 bp, Homo sapien
ctcaaaacccataaagtggctgctc

SEQ ID NO: 988207 - DNA, 25 bp, Homo sapien
tttctcaaaacccataaagtggctg

SEQ ID NO: 988208 - DNA, 25 bp, Homo sapien
aaaacccataaagtggctgctccct

SEQ ID NO: 988209 - DNA, 25 bp, Homo sapien
ctgaacctctggccacccactactc

SEQ ID NO: 988210 - DNA, 25 bp, Homo sapien
ctgattccaacccatgcactgttgt

SEQ ID NO: 988211 - DNA, 25 bp, Homo sapien
gaacctctggccacccactactcca

SEQ ID NO: 988212 - DNA, 25 bp, Homo sapien
gattccaacccatgcactgttgtct

SEQ ID NO: 988213 - DNA, 25 bp, Homo sapien
gtagatgttgccaatagcttctttt

SEQ ID NO: 988214 - DNA, 25 bp, Homo sapien
ttacacttaatcttgctattctctg

SEQ ID NO: 988215 - DNA, 25 bp, Homo sapien
atttacacttaatcttgctattctc

SEQ ID NO: 988216 - DNA, 25 bp, Homo sapien
caatttacacttaatcttgctattc

SEQ ID NO: 988217 - DNA, 25 bp, Homo sapien
ggagtataaaacttggacaaatatc

SEQ ID NO: 988218 - DNA, 25 bp, Homo sapien
aggagtataaaacttggacaaatat

SEQ ID NO: 988219 - DNA, 25 bp, Homo sapien
gtaacatgcattctcatagaagaat

SEQ ID NO: 988220 - DNA, 25 bp, Homo sapien
catagaggtaacatgcattctcata

SEQ ID NO: 988221 - DNA, 25 bp, Homo sapien
gacatagaggtaacatgcattctca

SEQ ID NO: 988222 - DNA, 25 bp, Homo sapien
ttagacatagaggtaacatgcattc

SEQ ID NO: 988223 - DNA, 25 bp, Homo sapien
ctggacaggttgacaattgcttgcc

SEQ ID NO: 988224 - DNA, 25 bp, Homo sapien
ggctctggaaagagatatagatggc

SEQ ID NO: 988225 - DNA, 25 bp, Homo sapien
aaggtcctcaatcctcagtggggag

SEQ ID NO: 988226 - DNA, 25 bp, Homo sapien
tcagtggggagctacatttggctct

SEQ ID NO: 988227 - DNA, 25 bp, Homo sapien
ttgagagtcctctaaacctgaccct

SEQ ID NO: 988228 - DNA, 25 bp, Homo sapien
tctgttcatcaatctacagttggtg

SEQ ID NO: 988229 - DNA, 25 bp, Homo sapien
ccaattcagcccatttagccaactg

SEQ ID NO: 988230 - DNA, 25 bp, Homo sapien
caccagcccaaggtttcttgtcgga

SEQ ID NO: 988231 - DNA, 25 bp, Homo sapien
ggagcagacactcgccgcaggtccg

SEQ ID NO: 988232 - DNA, 25 bp, Homo sapien
gggagcagacactcgccgcaggtcc

SEQ ID NO: 988233 - DNA, 25 bp, Homo sapien
gggggagcagacactcgccgcaggt

SEQ ID NO: 988234 - DNA, 25 bp, Homo sapien
ccggggggagcagacactcgccgca

SEQ ID NO: 988235 - DNA, 25 bp, Homo sapien
cagcagggaatgagcagcgaagaca

SEQ ID NO: 988236 - DNA, 25 bp, Homo sapien
tggacagacaaggaacaagccaggg

SEQ ID NO: 988237 - DNA, 25 bp, Homo sapien
aatgagcagcgaagacagagtcagc

SEQ ID NO: 988238 - DNA, 25 bp, Homo sapien
gtcagcgacagcgtggacagacaag

SEQ ID NO: 988239 - DNA, 25 bp, Homo sapien
tgagtaaaggcatggatgttctcct

SEQ ID NO: 988240 - DNA, 25 bp, Homo sapien
ttgagtaaaggcatggatgttctcc

SEQ ID NO: 988241 - DNA, 25 bp, Homo sapien
tcattgagtaaaggcatggatgttc

SEQ ID NO: 988242 - DNA, 25 bp, Homo sapien
attgagtaaaggcatggatgttctc

SEQ ID NO: 988243 - DNA, 25 bp, Homo sapien
gattcctcagggagatccgaatcat

SEQ ID NO: 988244 - DNA, 25 bp, Homo sapien
cgaatcatagctggggccaacctac

SEQ ID NO: 988245 - DNA, 25 bp, Homo sapien
cagggagatccgaatcatagctggg

SEQ ID NO: 988246 - DNA, 25 bp, Homo sapien
cctcagggagatccgaatcatagct

SEQ ID NO: 988247 - DNA, 25 bp, Homo sapien
tggatttgtaagttagaagcatgac

SEQ ID NO: 988248 - DNA, 25 bp, Homo sapien
ttctcgacactggtgtagcctctct

SEQ ID NO: 988249 - DNA, 25 bp, Homo sapien
gcatgacttctcgacactggtgtag

SEQ ID NO: 988250 - DNA, 25 bp, Homo sapien
tgtaagttagaagcatgacttctcg

SEQ ID NO: 988251 - DNA, 25 bp, Homo sapien
ttgtccagccactctaaactgctag

SEQ ID NO: 988252 - DNA, 25 bp, Homo sapien
ttctagtcactaccaaagtgagttt

SEQ ID NO: 988253 - DNA, 25 bp, Homo sapien
tggccttgtacctacaattctataa

SEQ ID NO: 988254 - DNA, 25 bp, Homo sapien
agaactgcatttgaaaaacctccct

SEQ ID NO: 988255 - DNA, 25 bp, Homo sapien
cgtgcaatggcttggtggtacaaaa

SEQ ID NO: 988256 - DNA, 25 bp, Homo sapien
caagggagagccgatgctgtgcttc

SEQ ID NO: 988257 - DNA, 25 bp, Homo sapien
gtgcttcacttgtcagctgcttgag

SEQ ID NO: 988258 - DNA, 25 bp, Homo sapien
gagagagagcacacgtgcaatggct

SEQ ID NO: 988259 - DNA, 25 bp, Homo sapien
gaggttcgaaatcatggtgatcacc

SEQ ID NO: 988260 - DNA, 25 bp, Homo sapien
taaatccaatgacttcaatataacc

SEQ ID NO: 988261 - DNA, 25 bp, Homo sapien
caatataaccatcatcatgacgctg

SEQ ID NO: 988262 - DNA, 25 bp, Homo sapien
caaagaggccatggtaaatccaatg

SEQ ID NO: 988263 - DNA, 25 bp, Homo sapien
ttggggtgagatctgttccatcaca

SEQ ID NO: 988264 - DNA, 25 bp, Homo sapien
agttcctgaatctttggggtgagat

SEQ ID NO: 988265 - DNA, 25 bp, Homo sapien
gggttttgaagtagtcacaagtcta

SEQ ID NO: 988266 - DNA, 25 bp, Homo sapien
tgaagtagtcacaagtctaaaaacc

SEQ ID NO: 988267 - DNA, 25 bp, Homo sapien
ggttttgaagtagtcacaagtctaa

SEQ ID NO: 988268 - DNA, 25 bp, Homo sapien
tagtcacaagtctaaaaacctatga

SEQ ID NO: 988269 - DNA, 25 bp, Homo sapien
tagaataagataaattcaagcattg

SEQ ID NO: 988270 - DNA, 25 bp, Homo sapien
caagcattgataaattcaaacattg

SEQ ID NO: 988271 - DNA, 25 bp, Homo sapien
aaattcaaacattgctatattctca

SEQ ID NO: 988272 - DNA, 25 bp, Homo sapien
tcatttacttatacgactatgtgca

SEQ ID NO: 988273 - DNA, 25 bp, Homo sapien
aacatgtttggatagatctctagaa

SEQ ID NO: 988274 - DNA, 25 bp, Homo sapien
aactttaacatgtttggatagatct

SEQ ID NO: 988275 - DNA, 25 bp, Homo sapien
ctttaacatgtttggatagatctct

SEQ ID NO: 988276 - DNA, 25 bp, Homo sapien
tctctagaacttctctgtaggaagt

SEQ ID NO: 988277 - DNA, 25 bp, Homo sapien
tgtgcgcaccctggtgaaaactacg

SEQ ID NO: 988278 - DNA, 25 bp, Homo sapien
tctaatccaaacgtcaatgtgcgca

SEQ ID NO: 988279 - DNA, 25 bp, Homo sapien
taacctcacgtatgcgtccatgaaa

SEQ ID NO: 988280 - DNA, 25 bp, Homo sapien
tactatgaacgtgcctgagaaacaa

SEQ ID NO: 988281 - DNA, 25 bp, Homo sapien
catagaacattttatttcgaaaacg

SEQ ID NO: 988282 - DNA, 25 bp, Homo sapien
gcatagaacattttatttcgaaaac

SEQ ID NO: 988283 - DNA, 25 bp, Homo sapien
cattttatttcgaaaacgactgttg

SEQ ID NO: 988284 - DNA, 25 bp, Homo sapien
ctctggattcatggaactccagtgt

SEQ ID NO: 988285 - DNA, 25 bp, Homo sapien
gtgacatgggcatcaaatccaaggc

SEQ ID NO: 988286 - DNA, 25 bp, Homo sapien
caaatccaaggctgaagtagttatt

SEQ ID NO: 988287 - DNA, 25 bp, Homo sapien
ctggattcatggaactccagtgtga

SEQ ID NO: 988288 - DNA, 25 bp, Homo sapien
tctgtttcactagaaggagaacttc

SEQ ID NO: 988289 - DNA, 25 bp, Homo sapien
ctgtttcactagaaggagaacttcc

SEQ ID NO: 988290 - DNA, 25 bp, Homo sapien
tgtttcactagaaggagaacttcct

SEQ ID NO: 988291 - DNA, 25 bp, Homo sapien
tcttgattcaaagcctatgtaatga

SEQ ID NO: 988292 - DNA, 25 bp, Homo sapien
taaggaatgaccccacatggaagct

SEQ ID NO: 988293 - DNA, 25 bp, Homo sapien
ttggtctctaatgaaagtaaggaat

SEQ ID NO: 988294 - DNA, 25 bp, Homo sapien
tgtaatgattcagagtccaagtgag

SEQ ID NO: 988295 - DNA, 25 bp, Homo sapien
cttgacacaggatcttagaaacagg

SEQ ID NO: 988296 - DNA, 25 bp, Homo sapien
caagttcttctggaggcaagtcggg

SEQ ID NO: 988297 - DNA, 25 bp, Homo sapien
tagaaacaggttcatcagtgtagcc

SEQ ID NO: 988298 - DNA, 25 bp, Homo sapien
gaggttccagcgatctagctgtaca

SEQ ID NO: 988299 - DNA, 25 bp, Homo sapien
tgaggaatcagagaacatatccatt

SEQ ID NO: 988300 - DNA, 25 bp, Homo sapien
ctgaggaatcagagaacatatccat

SEQ ID NO: 988301 - DNA, 25 bp, Homo sapien
gaggaatcagagaacatatccattg

SEQ ID NO: 988302 - DNA, 25 bp, Homo sapien
agagtggagaacagtgaagccaatg

SEQ ID NO: 988303 - DNA, 25 bp, Homo sapien
cagagtggagaacagtgaagccaat

SEQ ID NO: 988304 - DNA, 25 bp, Homo sapien
tccagagtggagaacagtgaagcca

SEQ ID NO: 988305 - DNA, 25 bp, Homo sapien
ccagagtggagaacagtgaagccaa

SEQ ID NO: 988306 - DNA, 25 bp, Homo sapien
ctgttagggagctacttaatccttg

SEQ ID NO: 988307 - DNA, 25 bp, Homo sapien
gaggaatggccctgttagggagcta

SEQ ID NO: 988308 - DNA, 25 bp, Homo sapien
ttagggagctacttaatccttgaag

SEQ ID NO: 988309 - DNA, 25 bp, Homo sapien
cactgaggaatggccctgttaggga

SEQ ID NO: 988310 - DNA, 25 bp, Homo sapien
cccagttgagagttcgagccaggtc

SEQ ID NO: 988311 - DNA, 25 bp, Homo sapien
gagccaggtcattcccagtccccag

SEQ ID NO: 988312 - DNA, 25 bp, Homo sapien
cctccccagttgagagttcgagcca

SEQ ID NO: 988313 - DNA, 25 bp, Homo sapien
gttgagagttcgagccaggtcattc

SEQ ID NO: 988314 - DNA, 25 bp, Homo sapien
taccgatgcctttctatgtgccatg

SEQ ID NO: 988315 - DNA, 25 bp, Homo sapien
gcctttctatgtgccatgcctgagc

SEQ ID NO: 988316 - DNA, 25 bp, Homo sapien
tatgtgccatgcctgagcaaagtcc

SEQ ID NO: 988317 - DNA, 25 bp, Homo sapien
gtgccaggcccataccgatgccttt

SEQ ID NO: 988318 - DNA, 25 bp, Homo sapien
aggatgtaaaacttgctcgtctacc

SEQ ID NO: 988319 - DNA, 25 bp, Homo sapien
gctcgtctaccaattatgtctaaaa

SEQ ID NO: 988320 - DNA, 25 bp, Homo sapien
gatgtaaaacttgctcgtctaccaa

SEQ ID NO: 988321 - DNA, 25 bp, Homo sapien
aaaacttgctcgtctaccaattatg

SEQ ID NO: 988322 - DNA, 25 bp, Homo sapien
ctaggaaaagcagggctgacagatt

SEQ ID NO: 988323 - DNA, 25 bp, Homo sapien
tgtttaccaagtgcattttgagcaa

SEQ ID NO: 988324 - DNA, 25 bp, Homo sapien
cgtttttagcattagttgtcactga

SEQ ID NO: 988325 - DNA, 25 bp, Homo sapien
tagttgtcactgaatgtttaccaag

SEQ ID NO: 988326 - DNA, 25 bp, Homo sapien
gctgccaccatctgtccgtttttag

SEQ ID NO: 988327 - DNA, 25 bp, Homo sapien
gaaggacactcacgtttggaaatca

SEQ ID NO: 988328 - DNA, 25 bp, Homo sapien
tgcaggccaaaaagcgaaggacact

SEQ ID NO: 988329 - DNA, 25 bp, Homo sapien
gagaacagatgcacgttgcgctgcc

SEQ ID NO: 988330 - DNA, 25 bp, Homo sapien
tagaatccacactgaaggtacactg

SEQ ID NO: 988331 - DNA, 25 bp, Homo sapien
ggccagaattcgcagatttggtact

SEQ ID NO: 988332 - DNA, 25 bp, Homo sapien
aattcgcagatttggtactttccta

SEQ ID NO: 988333 - DNA, 25 bp, Homo sapien
gcagatttggtactttcctatacaa

SEQ ID NO: 988334 - DNA, 25 bp, Homo sapien
ccaccacaggccagaattcgcagat

SEQ ID NO: 988335 - DNA, 25 bp, Homo sapien
agatcaaagacttgccgtggattca

SEQ ID NO: 988336 - DNA, 25 bp, Homo sapien
cttgccgtggattcaggtaccacat

SEQ ID NO: 988337 - DNA, 25 bp, Homo sapien
catcttttggcccttcctgagaaag

SEQ ID NO: 988338 - DNA, 25 bp, Homo sapien
ggcccttcctgagaaagatcaaaga

SEQ ID NO: 988339 - DNA, 25 bp, Homo sapien
aactctccagcactctcatagttat

SEQ ID NO: 988340 - DNA, 25 bp, Homo sapien
gctataatgccaaacataaaaactg

SEQ ID NO: 988341 - DNA, 25 bp, Homo sapien
aacaactctccagcactctcatagt

SEQ ID NO: 988342 - DNA, 25 bp, Homo sapien
tcatagttatcacatgctataatgc

SEQ ID NO: 988343 - DNA, 25 bp, Homo sapien
ggtggccctagtctgagaaagccga

SEQ ID NO: 988344 - DNA, 25 bp, Homo sapien
cccagatggtggtgtaaactcagct

SEQ ID NO: 988345 - DNA, 25 bp, Homo sapien
gccgattcccagatggtggtgtaaa

SEQ ID NO: 988346 - DNA, 25 bp, Homo sapien
tctgagaaagccgattcccagatgg

SEQ ID NO: 988347 - DNA, 25 bp, Homo sapien
ctccactcttgggattcacaaatac

SEQ ID NO: 988348 - DNA, 25 bp, Homo sapien
tccactcttgggattcacaaataca

SEQ ID NO: 988349 - DNA, 25 bp, Homo sapien
gcctccactcttgggattcacaaat

SEQ ID NO: 988350 - DNA, 25 bp, Homo sapien
actcttgggattcacaaatacaagc

SEQ ID NO: 988351 - DNA, 25 bp, Homo sapien
tcttcttcttccgatttgaagcctt

SEQ ID NO: 988352 - DNA, 25 bp, Homo sapien
ccatccctcttttactggcttttct

SEQ ID NO: 988353 - DNA, 25 bp, Homo sapien
ttccgatttgaagccttcagggagt

SEQ ID NO: 988354 - DNA, 25 bp, Homo sapien
tccatccctcttttactggcttttc

SEQ ID NO: 988355 - DNA, 25 bp, Homo sapien
tcccgcccaaccaagttcaagttca

SEQ ID NO: 988356 - DNA, 25 bp, Homo sapien
tctcccgcccaaccaggttcgtctc

SEQ ID NO: 988357 - DNA, 25 bp, Homo sapien
caaattctctgaggggctccagtct

SEQ ID NO: 988358 - DNA, 25 bp, Homo sapien
caagttcatctcctcgtatggagat

SEQ ID NO: 988359 - DNA, 25 bp, Homo sapien
tcaagaactaccatctgtcccaagg

SEQ ID NO: 988360 - DNA, 25 bp, Homo sapien
gagaagaacctgtcatagggatcag

SEQ ID NO: 988361 - DNA, 25 bp, Homo sapien
taacaaagtgttggcagcaagaaac

SEQ ID NO: 988362 - DNA, 25 bp, Homo sapien
gtaaagttgtcaaacagcctcaaga

SEQ ID NO: 988363 - DNA, 25 bp, Homo sapien
caaccatctctacacattggcatca

SEQ ID NO: 988364 - DNA, 25 bp, Homo sapien
aggctggcaggaacagtatgtattt

SEQ ID NO: 988365 - DNA, 25 bp, Homo sapien
tgtcaattaacaatgctctaaatgc

SEQ ID NO: 988366 - DNA, 25 bp, Homo sapien
tctcaaccatctctacacattggca

SEQ ID NO: 988367 - DNA, 25 bp, Homo sapien
tctgagtaagcttacagccctacgg

SEQ ID NO: 988368 - DNA, 25 bp, Homo sapien
tatatcaagggcagctaactcggtg

SEQ ID NO: 988369 - DNA, 25 bp, Homo sapien
taactcggtgataaaagcattcgct

SEQ ID NO: 988370 - DNA, 25 bp, Homo sapien
ggatcgcttatcctgcctgggtcag

SEQ ID NO: 988371 - DNA, 25 bp, Homo sapien
caaccaggcctatttgactaaatca

SEQ ID NO: 988372 - DNA, 25 bp, Homo sapien
caggatattattggtcgttgcacaa

SEQ ID NO: 988373 - DNA, 25 bp, Homo sapien
catgggttcccagtattttaagaag

SEQ ID NO: 988374 - DNA, 25 bp, Homo sapien
gaagctttagaattcaccaaaggaa

SEQ ID NO: 988375 - DNA, 25 bp, Homo sapien
cctgatccccatgaccgaaaatgct

SEQ ID NO: 988376 - DNA, 25 bp, Homo sapien
tccccatgaccgaaaatgctccgta

SEQ ID NO: 988377 - DNA, 25 bp, Homo sapien
catgaccgaaaatgctccgtactgc

SEQ ID NO: 988378 - DNA, 25 bp, Homo sapien
accgaaaatgctccgtactgcttca

SEQ ID NO: 988379 - DNA, 25 bp, Homo sapien
aggtttccctgaatactgaggtgga

SEQ ID NO: 988380 - DNA, 25 bp, Homo sapien
aatactgaggtggatactcacaagg

SEQ ID NO: 988381 - DNA, 25 bp, Homo sapien
tccctgaatactgaggtggatactc

SEQ ID NO: 988382 - DNA, 25 bp, Homo sapien
tgaatactgaggtggatactcacaa

SEQ ID NO: 988383 - DNA, 25 bp, Homo sapien
catttttctctgcactggcccagca

SEQ ID NO: 988384 - DNA, 25 bp, Homo sapien
tcatttttctctgcactggcccagc

SEQ ID NO: 988385 - DNA, 25 bp, Homo sapien
gcagcaccagagtcctggcagttac

SEQ ID NO: 988386 - DNA, 25 bp, Homo sapien
ccagcagcaccagagtcctggcagt

SEQ ID NO: 988387 - DNA, 25 bp, Homo sapien
gcagcatgaagcaggtcaccttatt

SEQ ID NO: 988388 - DNA, 25 bp, Homo sapien
ggtttcttcaccttaatgatccaag

SEQ ID NO: 988389 - DNA, 25 bp, Homo sapien
cagggagcagggttcttcaatgtga

SEQ ID NO: 988390 - DNA, 25 bp, Homo sapien
caagtgggcgggacaataacagcag

SEQ ID NO: 988391 - DNA, 25 bp, Homo sapien
cttcataccagaggagttctcaaca

SEQ ID NO: 988392 - DNA, 25 bp, Homo sapien
ccagaggagttctcaacaatacaga

SEQ ID NO: 988393 - DNA, 25 bp, Homo sapien
gaggagttctcaacaatacagaggt

SEQ ID NO: 988394 - DNA, 25 bp, Homo sapien
tcataccagaggagttctcaacaat

SEQ ID NO: 988395 - DNA, 25 bp, Homo sapien
gtggaaggagaacttttgctggaag

SEQ ID NO: 988396 - DNA, 25 bp, Homo sapien
ggaaggagaacttttgctggaagcc

SEQ ID NO: 988397 - DNA, 25 bp, Homo sapien
tggaaggagaacttttgctggaagc

SEQ ID NO: 988398 - DNA, 25 bp, Homo sapien
tggaggtaagtagaattgcaaaggc

SEQ ID NO: 988399 - DNA, 25 bp, Homo sapien
tgcaaaggccacattgagcaccaca

SEQ ID NO: 988400 - DNA, 25 bp, Homo sapien
tgacgtgaataaggccagaaggcca

SEQ ID NO: 988401 - DNA, 25 bp, Homo sapien
tcagttacagcgcacatttgccctc

SEQ ID NO: 988402 - DNA, 25 bp, Homo sapien
cttgtttaatcaactgtggatgtac

SEQ ID NO: 988403 - DNA, 25 bp, Homo sapien
gacttgtttaatcaactgtggatgt

SEQ ID NO: 988404 - DNA, 25 bp, Homo sapien
ctgacttgtttaatcaactgtggat

SEQ ID NO: 988405 - DNA, 25 bp, Homo sapien
tgtttaatcaactgtggatgtactt

SEQ ID NO: 988406 - DNA, 25 bp, Homo sapien
gcatccaaatatgaggtgcacattt

SEQ ID NO: 988407 - DNA, 25 bp, Homo sapien
tggcatccaaatatgaggtgcacat

SEQ ID NO: 988408 - DNA, 25 bp, Homo sapien
caaatatgaggtgcacatttaccat

SEQ ID NO: 988409 - DNA, 25 bp, Homo sapien
tccaaatatgaggtgcacatttacc

SEQ ID NO: 988410 - DNA, 25 bp, Homo sapien
gcaaaggggtcatttgcttgtgtac

SEQ ID NO: 988411 - DNA, 25 bp, Homo sapien
tgatcagggagcaaaggggtcattt

SEQ ID NO: 988412 - DNA, 25 bp, Homo sapien
ccatgtcccccatcatgatcaggga

SEQ ID NO: 988413 - DNA, 25 bp, Homo sapien
atcagggagcaaaggggtcatttgc

SEQ ID NO: 988414 - DNA, 25 bp, Homo sapien
gggttcacaagtaccagcaggccca

SEQ ID NO: 988415 - DNA, 25 bp, Homo sapien
caagtgggcgggaactactgaagaa

SEQ ID NO: 988416 - DNA, 25 bp, Homo sapien
tgaacaccatgacaggaagtgtcct

SEQ ID NO: 988417 - DNA, 25 bp, Homo sapien
ccagggtgaccagggcactgtattt

SEQ ID NO: 988418 - DNA, 25 bp, Homo sapien
aggatagtgaccacaccaaagaccc

SEQ ID NO: 988419 - DNA, 25 bp, Homo sapien
gccttactcggcttgcataactgaa

SEQ ID NO: 988420 - DNA, 25 bp, Homo sapien
tcttgatactcagccaaggagagaa

SEQ ID NO: 988421 - DNA, 25 bp, Homo sapien
tagaacagtggttgtccttgtcccc

SEQ ID NO: 988422 - DNA, 25 bp, Homo sapien
ggctttatggagcatcctggattcc

SEQ ID NO: 988423 - DNA, 25 bp, Homo sapien
gctttaagttgataaggggacattc

SEQ ID NO: 988424 - DNA, 25 bp, Homo sapien
tttcagattagtagagtacattgct

SEQ ID NO: 988425 - DNA, 25 bp, Homo sapien
gaaaggcccaagtcagtattttcca

SEQ ID NO: 988426 - DNA, 25 bp, Homo sapien
taaggggacattcctgaaaggccca

SEQ ID NO: 988427 - DNA, 25 bp, Homo sapien
cctcctgcgaggccatgaggtggct

SEQ ID NO: 988428 - DNA, 25 bp, Homo sapien
gagcctcctgcgaggccatgaggtg

SEQ ID NO: 988429 - DNA, 25 bp, Homo sapien
cctgcgaggccatgaggtggctggg

SEQ ID NO: 988430 - DNA, 25 bp, Homo sapien
ctcctgcgaggccatgaggtggctg

SEQ ID NO: 988431 - DNA, 25 bp, Homo sapien
gcacccagtgatgacgtacaaaatt

SEQ ID NO: 988432 - DNA, 25 bp, Homo sapien
tgtgcacccagtgatgacgtacaaa

SEQ ID NO: 988433 - DNA, 25 bp, Homo sapien
tgccgacgcctgtgcacccagtgat

SEQ ID NO: 988434 - DNA, 25 bp, Homo sapien
cgcctgtgcacccagtgatgacgta

SEQ ID NO: 988435 - DNA, 25 bp, Homo sapien
gaggcaccacagccctatcattctt

SEQ ID NO: 988436 - DNA, 25 bp, Homo sapien
ggcaccacagccctatcattcttct

SEQ ID NO: 988437 - DNA, 25 bp, Homo sapien
atggcccacaaccttcctattgctg

SEQ ID NO: 988438 - DNA, 25 bp, Homo sapien
gctttcctcaccctgcgcatggccc

SEQ ID NO: 988439 - DNA, 25 bp, Homo sapien
gcctccttctcgaaatgttggttta

SEQ ID NO: 988440 - DNA, 25 bp, Homo sapien
gagcctccttctcgaaatgttggtt

SEQ ID NO: 988441 - DNA, 25 bp, Homo sapien
ccttctcgaaatgttggtttacatc

SEQ ID NO: 988442 - DNA, 25 bp, Homo sapien
cgaaatgttggtttacatctgaaat

SEQ ID NO: 988443 - DNA, 25 bp, Homo sapien
tagtattatgacaattattcaaaga

SEQ ID NO: 988444 - DNA, 25 bp, Homo sapien
cttgagtttttttagtattatgaca

SEQ ID NO: 988445 - DNA, 25 bp, Homo sapien
tttttagtattatgacaattattca

SEQ ID NO: 988446 - DNA, 25 bp, Homo sapien
ttagtattatgacaattattcaaag

SEQ ID NO: 988447 - DNA, 25 bp, Homo sapien
ttcttttagatgtggaggtctccta

SEQ ID NO: 988448 - DNA, 25 bp, Homo sapien
tcggttagctactcgataaagtgaa

SEQ ID NO: 988449 - DNA, 25 bp, Homo sapien
ggcacattgacatttcggttagcta

SEQ ID NO: 988450 - DNA, 25 bp, Homo sapien
ataaaaggattcagcactgcttttc

SEQ ID NO: 988451 - DNA, 25 bp, Homo sapien
tcagctaggatcaactggtcatgtc

SEQ ID NO: 988452 - DNA, 25 bp, Homo sapien
tcattgccacaagatatcagctagg

SEQ ID NO: 988453 - DNA, 25 bp, Homo sapien
tgtcagtgaaactacatgaatgtca

SEQ ID NO: 988454 - DNA, 25 bp, Homo sapien
tacccatgacagctcaagaacatag

SEQ ID NO: 988455 - DNA, 25 bp, Homo sapien
ttctggaggcacaccaccaccggga

SEQ ID NO: 988456 - DNA, 25 bp, Homo sapien
tggactttgccgaatccactgattc

SEQ ID NO: 988457 - DNA, 25 bp, Homo sapien
ttccagcgtggctcgctcccttgca

SEQ ID NO: 988458 - DNA, 25 bp, Homo sapien
caacaggaggagcactgccccagca

SEQ ID NO: 988459 - DNA, 25 bp, Homo sapien
gtaaaccacacaagtcagatatatg

SEQ ID NO: 988460 - DNA, 25 bp, Homo sapien
cacaagtcagatatatgtgaacaac

SEQ ID NO: 988461 - DNA, 25 bp, Homo sapien
gacgtaaaccacacaagtcagatat

SEQ ID NO: 988462 - DNA, 25 bp, Homo sapien
taggaagacgtaaaccacacaagtc

SEQ ID NO: 988463 - DNA, 25 bp, Homo sapien
ccaagagtcaacgtaaaatgatatc

SEQ ID NO: 988464 - DNA, 25 bp, Homo sapien
tgatatcaaattacacttcagcaaa

SEQ ID NO: 988465 - DNA, 25 bp, Homo sapien
actggaaatttacaccgggcctctg

SEQ ID NO: 988466 - DNA, 25 bp, Homo sapien
gagagtgaacgacccttaaacattg

SEQ ID NO: 988467 - DNA, 25 bp, Homo sapien
gattttacagactgcacacttcctc

SEQ ID NO: 988468 - DNA, 25 bp, Homo sapien
caggcggtgtggacgacgattttac

SEQ ID NO: 988469 - DNA, 25 bp, Homo sapien
tgtggacgacgattttacagactgc

SEQ ID NO: 988470 - DNA, 25 bp, Homo sapien
gctgctcaatgcaggcggtgtggac

SEQ ID NO: 988471 - DNA, 25 bp, Homo sapien
acattatcagccaccaacaaagaac

SEQ ID NO: 988472 - DNA, 25 bp, Homo sapien
tacacattatcagccaccaacaaag

SEQ ID NO: 988473 - DNA, 25 bp, Homo sapien
ttacacattatcagccaccaacaaa

SEQ ID NO: 988474 - DNA, 25 bp, Homo sapien
cacattatcagccaccaacaaagaa

SEQ ID NO: 988475 - DNA, 25 bp, Homo sapien
actgcagtaccgctgccatgaaact

SEQ ID NO: 988476 - DNA, 25 bp, Homo sapien
cagtaccgctgccatgaaacttgta

SEQ ID NO: 988477 - DNA, 25 bp, Homo sapien
cgctgccatgaaacttgtagaagaa

SEQ ID NO: 988478 - DNA, 25 bp, Homo sapien
aaacactgcagtaccgctgccatga

SEQ ID NO: 988479 - DNA, 25 bp, Homo sapien
ctgcttgcagatgcttttatcactc

SEQ ID NO: 988480 - DNA, 25 bp, Homo sapien
tgcttgcagatgcttttatcactct

SEQ ID NO: 988481 - DNA, 25 bp, Homo sapien
gcttcgtgcttgacactacgctctg

SEQ ID NO: 988482 - DNA, 25 bp, Homo sapien
gccaataactcctgtcctagtctag

SEQ ID NO: 988483 - DNA, 25 bp, Homo sapien
ctgcattaagttctatggagttcca

SEQ ID NO: 988484 - DNA, 25 bp, Homo sapien
tgtcctagtctagcttcgtgcttga

SEQ ID NO: 988485 - DNA, 25 bp, Homo sapien
gatgctcttcgaacagcgtgttttg

SEQ ID NO: 988486 - DNA, 25 bp, Homo sapien
gacagtctcatgctctattatggtt

SEQ ID NO: 988487 - DNA, 25 bp, Homo sapien
cgagtaccgcaggaaaactcacttg

SEQ ID NO: 988488 - DNA, 25 bp, Homo sapien
tattatggttggaattgcctctcga

SEQ ID NO: 988489 - DNA, 25 bp, Homo sapien
tgtgcccctccatctagattactgg

SEQ ID NO: 988490 - DNA, 25 bp, Homo sapien
tcaacactgtacctccagttggtaa

SEQ ID NO: 988491 - DNA, 25 bp, Homo sapien
ccaggaggctagctgtgtaatatac

SEQ ID NO: 988492 - DNA, 25 bp, Homo sapien
aatgaggacatcatacccacagaga

SEQ ID NO: 988493 - DNA, 25 bp, Homo sapien
tgtaatatacacattacccacactg

SEQ ID NO: 988494 - DNA, 25 bp, Homo sapien
tacgtgtcagtgagcctatgtaact

SEQ ID NO: 988495 - DNA, 25 bp, Homo sapien
ctgtgtgcatacgtgtcagtgagcc

SEQ ID NO: 988496 - DNA, 25 bp, Homo sapien
tcagtgagcctatgtaactgcggta

SEQ ID NO: 988497 - DNA, 25 bp, Homo sapien
gcctatgtaactgcggtatctgcat

SEQ ID NO: 988498 - DNA, 25 bp, Homo sapien
ggtgttctccattcacggcattctc

SEQ ID NO: 988499 - DNA, 25 bp, Homo sapien
ggtctcccgagacgttggtctccag

SEQ ID NO: 988500 - DNA, 25 bp, Homo sapien
caaggtagcagaggtctcccgagac

SEQ ID NO: 988501 - DNA, 25 bp, Homo sapien
ccacaggtgttctccattcacggca

SEQ ID NO: 988502 - DNA, 25 bp, Homo sapien
gggaaaataggcttcacctcacagt

SEQ ID NO: 988503 - DNA, 25 bp, Homo sapien
caaagggtggacacctgttcaccaa

SEQ ID NO: 988504 - DNA, 25 bp, Homo sapien
ggatcattgccctctacatcaaagg

SEQ ID NO: 988505 - DNA, 25 bp, Homo sapien
cctaaagggagagcaacactgacca

SEQ ID NO: 988506 - DNA, 25 bp, Homo sapien
taggaaatacttgtgtcccttcaga

SEQ ID NO: 988507 - DNA, 25 bp, Homo sapien
ctttggcacataggctagtgtcaga

SEQ ID NO: 988508 - DNA, 25 bp, Homo sapien
ggactaagatcctaactccaggttc

SEQ ID NO: 988509 - DNA, 25 bp, Homo sapien
tagtgtcagaacacggcccttttgg

SEQ ID NO: 988510 - DNA, 25 bp, Homo sapien
agggttgtttggaacatcgtgaata

SEQ ID NO: 988511 - DNA, 25 bp, Homo sapien
ccaactctttcggttccttgataca

SEQ ID NO: 988512 - DNA, 25 bp, Homo sapien
catcgtgaatatcaaaccaactctt

SEQ ID NO: 988513 - DNA, 25 bp, Homo sapien
ttggaacatcgtgaatatcaaacca

SEQ ID NO: 988514 - DNA, 25 bp, Homo sapien
actccagtccaaagtcgctctgggc

SEQ ID NO: 988515 - DNA, 25 bp, Homo sapien
tccagtccaaagtcgctctgggctc

SEQ ID NO: 988516 - DNA, 25 bp, Homo sapien
ctccagtccaaagtcgctctgggct

SEQ ID NO: 988517 - DNA, 25 bp, Homo sapien
tggctcccgttttctatctatcctc

SEQ ID NO: 988518 - DNA, 25 bp, Homo sapien
gtttatgtggctcccgttttctatc

SEQ ID NO: 988519 - DNA, 25 bp, Homo sapien
cagtctgattgtaggtttatgtggc

SEQ ID NO: 988520 - DNA, 25 bp, Homo sapien
cagtttcagtctgattgtaggttta

SEQ ID NO: 988521 - DNA, 25 bp, Homo sapien
actgtcttattgtaattttgcgaca

SEQ ID NO: 988522 - DNA, 25 bp, Homo sapien
aactgtcttattgtaattttgcgac

SEQ ID NO: 988523 - DNA, 25 bp, Homo sapien
ctgtcttattgtaattttgcgacat

SEQ ID NO: 988524 - DNA, 25 bp, Homo sapien
cttactgatgcttacttcaagaaga

SEQ ID NO: 988525 - DNA, 25 bp, Homo sapien
tcaaccaaaatcgatatcagcaatg

SEQ ID NO: 988526 - DNA, 25 bp, Homo sapien
aaaaaacccttcagtcagcacgtga

SEQ ID NO: 988527 - DNA, 25 bp, Homo sapien
agaaaactgcgagccagcattaccc

SEQ ID NO: 988528 - DNA, 25 bp, Homo sapien
tatgttaaggatgccgttgttttca

SEQ ID NO: 988529 - DNA, 25 bp, Homo sapien
ttaaggatgccgttgttttcaagat

SEQ ID NO: 988530 - DNA, 25 bp, Homo sapien
tatattgtatgttaaggatgccgtt

SEQ ID NO: 988531 - DNA, 25 bp, Homo sapien
taaaatagttcttatatggatctat

SEQ ID NO: 988532 - DNA, 25 bp, Homo sapien
caataagtaaatcatgggcgtgaca

SEQ ID NO: 988533 - DNA, 25 bp, Homo sapien
tttaatcgagctcacattctggtgg

SEQ ID NO: 988534 - DNA, 25 bp, Homo sapien
tgctatgcataactcaaaaggtgga

SEQ ID NO: 988535 - DNA, 25 bp, Homo sapien
gacctcatcgaaagggtggcctctg

SEQ ID NO: 988536 - DNA, 25 bp, Homo sapien
tcatgccagcagttttacagatgcc

SEQ ID NO: 988537 - DNA, 25 bp, Homo sapien
gagggcatgcgaaaaacattaccca

SEQ ID NO: 988538 - DNA, 25 bp, Homo sapien
catgaatgtgcaacagtgggtgatc

SEQ ID NO: 988539 - DNA, 25 bp, Homo sapien
gagaatgacagtacctcatgggcac

SEQ ID NO: 988540 - DNA, 25 bp, Homo sapien
tatggccagatgtacacaagaatgc

SEQ ID NO: 988541 - DNA, 25 bp, Homo sapien
tatagtgtaccttcttccaaacagg

SEQ ID NO: 988542 - DNA, 25 bp, Homo sapien
gttgttcccaaactgatgactgcca

SEQ ID NO: 988543 - DNA, 25 bp, Homo sapien
gaacctcaaatttgctctgggcaga

SEQ ID NO: 988544 - DNA, 25 bp, Homo sapien
aagtcagagacaggtttggacccac

SEQ ID NO: 988545 - DNA, 25 bp, Homo sapien
caagtcagagacaggtttggaccca

SEQ ID NO: 988546 - DNA, 25 bp, Homo sapien
gtgcacccgtaagtcatttccaagt

SEQ ID NO: 988547 - DNA, 25 bp, Homo sapien
cacccgtaagtcatttccaagtcag

SEQ ID NO: 988548 - DNA, 25 bp, Homo sapien
tagccaatgttttactcaatgttac

SEQ ID NO: 988549 - DNA, 25 bp, Homo sapien
tgttacatcaagaaaggtactcagc

SEQ ID NO: 988550 - DNA, 25 bp, Homo sapien
ccactaaaattttatgcataatgga

SEQ ID NO: 988551 - DNA, 25 bp, Homo sapien
gaaagcctagatgtataaatagcca

SEQ ID NO: 988552 - DNA, 25 bp, Homo sapien
tgtcctccacctttccatgctcaaa

SEQ ID NO: 988553 - DNA, 25 bp, Homo sapien
tcctccacctttccatgctcaaaac

SEQ ID NO: 988554 - DNA, 25 bp, Homo sapien
tccacctttccatgctcaaaacccc

SEQ ID NO: 988555 - DNA, 25 bp, Homo sapien
cacctttccatgctcaaaaccccaa

SEQ ID NO: 988556 - DNA, 25 bp, Homo sapien
gactctgacacgggtattttgcacc

SEQ ID NO: 988557 - DNA, 25 bp, Homo sapien
actctgacacgggtattttgcacct

SEQ ID NO: 988558 - DNA, 25 bp, Homo sapien
caaaagagattcatccaaaccctac

SEQ ID NO: 988559 - DNA, 25 bp, Homo sapien
agagattcatccaaaccctactcat

SEQ ID NO: 988560 - DNA, 25 bp, Homo sapien
aaaagagattcatccaaaccctact

SEQ ID NO: 988561 - DNA, 25 bp, Homo sapien
ctgcaaaagagattcatccaaaccc

SEQ ID NO: 988562 - DNA, 25 bp, Homo sapien
ttcccttgcactcactgttggtgac

SEQ ID NO: 988563 - DNA, 25 bp, Homo sapien
ccttgcactcactgttggtgactat

SEQ ID NO: 988564 - DNA, 25 bp, Homo sapien
tggtgatttctctaacaaccaagag

SEQ ID NO: 988565 - DNA, 25 bp, Homo sapien
tactaatctttcctgcgggccctct

SEQ ID NO: 988566 - DNA, 25 bp, Homo sapien
tttggcagtgaaaccagaaggactc

SEQ ID NO: 988567 - DNA, 25 bp, Homo sapien
cactgtgtgcattcgtgtccgtaaa

SEQ ID NO: 988568 - DNA, 25 bp, Homo sapien
gaaataacgtcctggcacttacacg

SEQ ID NO: 988569 - DNA, 25 bp, Homo sapien
ggtacacaaaatgacgccactatgg

SEQ ID NO: 988570 - DNA, 25 bp, Homo sapien
ttcttctccacttaggatgatgaag

SEQ ID NO: 988571 - DNA, 25 bp, Homo sapien
tccacttaggatgatgaaggcataa

SEQ ID NO: 988572 - DNA, 25 bp, Homo sapien
gatgaaggcataagtcagtgtgacc

SEQ ID NO: 988573 - DNA, 25 bp, Homo sapien
ttctccacttaggatgatgaaggca

SEQ ID NO: 988574 - DNA, 25 bp, Homo sapien
agccctgaaacctggtgactctgag

SEQ ID NO: 988575 - DNA, 25 bp, Homo sapien
tggcctctgaaggggtattctgatc

SEQ ID NO: 988576 - DNA, 25 bp, Homo sapien
tctgaaggggtattctgatccccag

SEQ ID NO: 988577 - DNA, 25 bp, Homo sapien
ctgatccccaggaaaagctggagcc

SEQ ID NO: 988578 - DNA, 25 bp, Homo sapien
catccaggggtgtttttccttccag

SEQ ID NO: 988579 - DNA, 25 bp, Homo sapien
gagaccacctgatttgtagcgacac

SEQ ID NO: 988580 - DNA, 25 bp, Homo sapien
caaagagaccacctgatttgtagcg

SEQ ID NO: 988581 - DNA, 25 bp, Homo sapien
gaccacctgatttgtagcgacacat

SEQ ID NO: 988582 - DNA, 25 bp, Homo sapien
aagagaccacctgatttgtagcgac

SEQ ID NO: 988583 - DNA, 25 bp, Homo sapien
ggcccaccaggtaaagtaacagcta

SEQ ID NO: 988584 - DNA, 25 bp, Homo sapien
cttcctgaccctcttgtgttaaggt

SEQ ID NO: 988585 - DNA, 25 bp, Homo sapien
ctttcctcctgtgagcaacccttct

SEQ ID NO: 988586 - DNA, 25 bp, Homo sapien
ctcctgtgagcaacccttctcttct

SEQ ID NO: 988587 - DNA, 25 bp, Homo sapien
tctacctgagggtatgtggctatgc

SEQ ID NO: 988588 - DNA, 25 bp, Homo sapien
cctgtcttgtctacctgagggtatg

SEQ ID NO: 988589 - DNA, 25 bp, Homo sapien
cctgagggtatgtggctatgcaact

SEQ ID NO: 988590 - DNA, 25 bp, Homo sapien
cattcccctgtcttgtctacctgag

SEQ ID NO: 988591 - DNA, 25 bp, Homo sapien
tatagttttagcatccgtaatggga

SEQ ID NO: 988592 - DNA, 25 bp, Homo sapien
tacagtgaagtgaattaatggcttc

SEQ ID NO: 988593 - DNA, 25 bp, Homo sapien
gactacagaaatttaatggagagag

SEQ ID NO: 988594 - DNA, 25 bp, Homo sapien
ttttagtaccctaagctgcaaagct

SEQ ID NO: 988595 - DNA, 25 bp, Homo sapien
aagactgactctggatatgactgca

SEQ ID NO: 988596 - DNA, 25 bp, Homo sapien
tctgaggcgtggagcaatttctacc

SEQ ID NO: 988597 - DNA, 25 bp, Homo sapien
tatgactgcaataagctactgtgag

SEQ ID NO: 988598 - DNA, 25 bp, Homo sapien
tgtattcatgatccgaagactgact

SEQ ID NO: 988599 - DNA, 25 bp, Homo sapien
gctgcagctgtatatgggaaggtct

SEQ ID NO: 988600 - DNA, 25 bp, Homo sapien
taaaaggacccaaggcaatcagaag

SEQ ID NO: 988601 - DNA, 25 bp, Homo sapien
ggaagattctctacccctgctcaaa

SEQ ID NO: 988602 - DNA, 25 bp, Homo sapien
gagagatgctctggtaatgaacaaa

SEQ ID NO: 988603 - DNA, 25 bp, Homo sapien
ggagttggaaatgggatcggctttc

SEQ ID NO: 988604 - DNA, 25 bp, Homo sapien
aaatgggatcggctttcctgaatct

SEQ ID NO: 988605 - DNA, 25 bp, Homo sapien
tggaaatgggatcggctttcctgaa

SEQ ID NO: 988606 - DNA, 25 bp, Homo sapien
agttggaaatgggatcggctttcct

SEQ ID NO: 988607 - DNA, 25 bp, Homo sapien
aggatggagatcagtctcttttatg

SEQ ID NO: 988608 - DNA, 25 bp, Homo sapien
ctcttttatgatgtataagattcca

SEQ ID NO: 988609 - DNA, 25 bp, Homo sapien
tttatgatgtataagattccatatc

SEQ ID NO: 988610 - DNA, 25 bp, Homo sapien
ggagatcagtctcttttatgatgta

SEQ ID NO: 988611 - DNA, 25 bp, Homo sapien
gaggcactcctctcgataacaagct

SEQ ID NO: 988612 - DNA, 25 bp, Homo sapien
tcgataacaagcttggatgggcaca

SEQ ID NO: 988613 - DNA, 25 bp, Homo sapien
agggtacagaggcactcctctcgat

SEQ ID NO: 988614 - DNA, 25 bp, Homo sapien
gtgtttaacattgattctagctgac

SEQ ID NO: 988615 - DNA, 25 bp, Homo sapien
ctgcctgacaatcaccagtgctgat

SEQ ID NO: 988616 - DNA, 25 bp, Homo sapien
tgcctgacaatcaccagtgctgatt

SEQ ID NO: 988617 - DNA, 25 bp, Homo sapien
tgcagggaaggcataacaaggtcct

SEQ ID NO: 988618 - DNA, 25 bp, Homo sapien
gttggtttcccaagcagacgtgaca

SEQ ID NO: 988619 - DNA, 25 bp, Homo sapien
gaggagctacccctgaatggttgag

SEQ ID NO: 988620 - DNA, 25 bp, Homo sapien
gagcgaatggagaaagaatgcctac

SEQ ID NO: 988621 - DNA, 25 bp, Homo sapien
ccttctttagcgtctgtttggtaga

SEQ ID NO: 988622 - DNA, 25 bp, Homo sapien
catccttctttagcgtctgtttggt

SEQ ID NO: 988623 - DNA, 25 bp, Homo sapien
tgcccatccttctttagcgtctgtt

SEQ ID NO: 988624 - DNA, 25 bp, Homo sapien
cgtgcccatccttctttagcgtctg

SEQ ID NO: 988625 - DNA, 25 bp, Homo sapien
aagccacccggagagtaggatgacc

SEQ ID NO: 988626 - DNA, 25 bp, Homo sapien
taagagttaagaacagctcctctgc

SEQ ID NO: 988627 - DNA, 25 bp, Homo sapien
tagtacaggacatattgtgaaaccc

SEQ ID NO: 988628 - DNA, 25 bp, Homo sapien
tctcttcgaagggttgaatctctca

SEQ ID NO: 988629 - DNA, 25 bp, Homo sapien
cctataaatattccagaggtagaca

SEQ ID NO: 988630 - DNA, 25 bp, Homo sapien
tgccactggattactcaagacatct

SEQ ID NO: 988631 - DNA, 25 bp, Homo sapien
ccccgctagagaacaagtatagaaa

SEQ ID NO: 988632 - DNA, 25 bp, Homo sapien
taacttgaatcctgctgaaaacatg

SEQ ID NO: 988633 - DNA, 25 bp, Homo sapien
gatatttctagaacctgaattcctt

SEQ ID NO: 988634 - DNA, 25 bp, Homo sapien
tctagaacctgaattccttcccctg

SEQ ID NO: 988635 - DNA, 25 bp, Homo sapien
gaacctgaattccttcccctgaatc

SEQ ID NO: 988636 - DNA, 25 bp, Homo sapien
atcccccctccttcgtcctggagca

SEQ ID NO: 988637 - DNA, 25 bp, Homo sapien
agaattcagaaactcgtcttccata

SEQ ID NO: 988638 - DNA, 25 bp, Homo sapien
aagacaccatgtgccacccgagagg

SEQ ID NO: 988639 - DNA, 25 bp, Homo sapien
caccatgtgccacccgagaggaggg

SEQ ID NO: 988640 - DNA, 25 bp, Homo sapien
gtcttccatatgtgaagccaacatg

SEQ ID NO: 988641 - DNA, 25 bp, Homo sapien
caaagatgaagatgtaggcctgtgg

SEQ ID NO: 988642 - DNA, 25 bp, Homo sapien
ttagatagaagcttgtgcccaaagc

SEQ ID NO: 988643 - DNA, 25 bp, Homo sapien
agatgtcagctatggatgttcacgc

SEQ ID NO: 988644 - DNA, 25 bp, Homo sapien
agtttacgggcttaggtgacactcg

SEQ ID NO: 988645 - DNA, 25 bp, Homo sapien
tctccactagcagcagggtcaaaag

SEQ ID NO: 988646 - DNA, 25 bp, Homo sapien
aacctctcaaatagcttaagccagt

SEQ ID NO: 988647 - DNA, 25 bp, Homo sapien
tagcttaagccagtttttggaagag

SEQ ID NO: 988648 - DNA, 25 bp, Homo sapien
tggtcacaggcatttctccactagc

SEQ ID NO: 988649 - DNA, 25 bp, Homo sapien
gacaatcctttgagtccaagtccaa

SEQ ID NO: 988650 - DNA, 25 bp, Homo sapien
tcaagtcatacacttgccccaagat

SEQ ID NO: 988651 - DNA, 25 bp, Homo sapien
tgccagtggatatgaacaaattggc

SEQ ID NO: 988652 - DNA, 25 bp, Homo sapien
caagtccaagagagtctggtcgtcc

SEQ ID NO: 988653 - DNA, 25 bp, Homo sapien
cagctgctcctggaaaggggcattt

SEQ ID NO: 988654 - DNA, 25 bp, Homo sapien
taaagacaagcttcccagcatccca

SEQ ID NO: 988655 - DNA, 25 bp, Homo sapien
cccagctgctcctggaaaggggcat

SEQ ID NO: 988656 - DNA, 25 bp, Homo sapien
ggaaattaaagacaagcttcccagc

SEQ ID NO: 988657 - DNA, 25 bp, Homo sapien
agtattttctggagacttccaaatc

SEQ ID NO: 988658 - DNA, 25 bp, Homo sapien
ctgcccctgtgaaccgtgtgcggct

SEQ ID NO: 988659 - DNA, 25 bp, Homo sapien
ctgtttgttagcagtattttctgga

SEQ ID NO: 988660 - DNA, 25 bp, Homo sapien
tattttctggagacttccaaatcct

SEQ ID NO: 988661 - DNA, 25 bp, Homo sapien
agtgcatggattgcctttgctgcct

SEQ ID NO: 988662 - DNA, 25 bp, Homo sapien
tggaagtgcatggattgcctttgct

SEQ ID NO: 988663 - DNA, 25 bp, Homo sapien
aaagcttggaagtgcatggattgcc

SEQ ID NO: 988664 - DNA, 25 bp, Homo sapien
gcttggaagtgcatggattgccttt

SEQ ID NO: 988665 - DNA, 25 bp, Homo sapien
taactgatggaacatcccagaaggc

SEQ ID NO: 988666 - DNA, 25 bp, Homo sapien
ggcctggttcaaataactgatggaa

SEQ ID NO: 988667 - DNA, 25 bp, Homo sapien
tgctgtttggcctggttcaaataac

SEQ ID NO: 988668 - DNA, 25 bp, Homo sapien
ttaataaccatctacatcttttaaa

SEQ ID NO: 988669 - DNA, 25 bp, Homo sapien
gcttctttctgtgattgccagggca

SEQ ID NO: 988670 - DNA, 25 bp, Homo sapien
gtagcatctgcgaagcttctttctg

SEQ ID NO: 988671 - DNA, 25 bp, Homo sapien
gcgaagcttctttctgtgattgcca

SEQ ID NO: 988672 - DNA, 25 bp, Homo sapien
atccagggcaggtagcatctgcgaa

SEQ ID NO: 988673 - DNA, 25 bp, Homo sapien
cttcctgctctcagatgaccagctg

SEQ ID NO: 988674 - DNA, 25 bp, Homo sapien
tacctgattcctccgcacactgact

SEQ ID NO: 988675 - DNA, 25 bp, Homo sapien
gattgctgctacctgattcctccgc

SEQ ID NO: 988676 - DNA, 25 bp, Homo sapien
cctgctctcagatgaccagctggga

SEQ ID NO: 988677 - DNA, 25 bp, Homo sapien
accaaggagccgaccctcagctcct

SEQ ID NO: 988678 - DNA, 25 bp, Homo sapien
caccaaggagccgaccctcagctcc

SEQ ID NO: 988679 - DNA, 25 bp, Homo sapien
ccaaggagccgaccctcagctcctg

SEQ ID NO: 988680 - DNA, 25 bp, Homo sapien
ccaccaaggagccgaccctcagctc

SEQ ID NO: 988681 - DNA, 25 bp, Homo sapien
gcaggagtccagcaccaatggccgc

SEQ ID NO: 988682 - DNA, 25 bp, Homo sapien
aggagtccagcaccaatggccgcca

SEQ ID NO: 988683 - DNA, 25 bp, Homo sapien
ggagtccagcaccaatggccgccat

SEQ ID NO: 988684 - DNA, 25 bp, Homo sapien
tgcaggagtccagcaccaatggccg

SEQ ID NO: 988685 - DNA, 25 bp, Homo sapien
tagtgtcaacaactctccaaacctg

SEQ ID NO: 988686 - DNA, 25 bp, Homo sapien
tatgcttgcatatcacctcgacctt

SEQ ID NO: 988687 - DNA, 25 bp, Homo sapien
taagcagtagggttagtgtcaacaa

SEQ ID NO: 988688 - DNA, 25 bp, Homo sapien
cctcgacctttaacatcgataagca

SEQ ID NO: 988689 - DNA, 25 bp, Homo sapien
ccgcgggctcgtccagggcagcggc

SEQ ID NO: 988690 - DNA, 25 bp, Homo sapien
cctccagcgcttcgtccttctcctt

SEQ ID NO: 988691 - DNA, 25 bp, Homo sapien
tgcttccggaaagttaagttcctca

SEQ ID NO: 988692 - DNA, 25 bp, Homo sapien
ctgctgccgcccgtcgcccctttct

SEQ ID NO: 988693 - DNA, 25 bp, Homo sapien
cgggcaggtccgcgcgccgctggca

SEQ ID NO: 988694 - DNA, 25 bp, Homo sapien
ggcaggtccgcgcgccgctggcagg

SEQ ID NO: 988695 - DNA, 25 bp, Homo sapien
caggagcgcgggcaggtccgcgcgc

SEQ ID NO: 988696 - DNA, 25 bp, Homo sapien
agcgcgggcaggtccgcgcgccgct

SEQ ID NO: 988697 - DNA, 25 bp, Homo sapien
gcaccgcaccggggcattgtgggaa

SEQ ID NO: 988698 - DNA, 25 bp, Homo sapien
tgcaccgcaccggggcattgtggga

SEQ ID NO: 988699 - DNA, 25 bp, Homo sapien
cggctgcaccgcaccggggcattgt

SEQ ID NO: 988700 - DNA, 25 bp, Homo sapien
ggcctcttcctaaatcccgagcgaa

SEQ ID NO: 988701 - DNA, 25 bp, Homo sapien
aactctgcccggaggcgacgggctg

SEQ ID NO: 988702 - DNA, 25 bp, Homo sapien
gcccaagctgaacatgaactctgcc

SEQ ID NO: 988703 - DNA, 25 bp, Homo sapien
atcccgagcgaaagcccaagctgaa

SEQ ID NO: 988704 - DNA, 25 bp, Homo sapien
cctcattcgaactgctggtgtacca

SEQ ID NO: 988705 - DNA, 25 bp, Homo sapien
caaggtaccagtaattcagtgagga

SEQ ID NO: 988706 - DNA, 25 bp, Homo sapien
caaaaaggataaggttggcctcaga

SEQ ID NO: 988707 - DNA, 25 bp, Homo sapien
ggttacttatcaagagcaggcctga

SEQ ID NO: 988708 - DNA, 25 bp, Homo sapien
agctagctgattgctgaaggcaccc

SEQ ID NO: 988709 - DNA, 25 bp, Homo sapien
gctgctaagagttcctgccagatga

SEQ ID NO: 988710 - DNA, 25 bp, Homo sapien
tgtctcagggccttgactaaaaggc

SEQ ID NO: 988711 - DNA, 25 bp, Homo sapien
aaaaggtccactagctcagctagct

SEQ ID NO: 988712 - DNA, 25 bp, Homo sapien
gaaggaatcggctcagctagtccag

SEQ ID NO: 988713 - DNA, 25 bp, Homo sapien
gaaggctcgcagaaaacttggctag

SEQ ID NO: 988714 - DNA, 25 bp, Homo sapien
ttgcctggagtagaaaagcctgatc

SEQ ID NO: 988715 - DNA, 25 bp, Homo sapien
tacgcttttgctgggtctgaggaca

SEQ ID NO: 988716 - DNA, 25 bp, Homo sapien
cctgagaatatgaacgagagccctc

SEQ ID NO: 988717 - DNA, 25 bp, Homo sapien
tgcacttgcggcctgagaatatgaa

SEQ ID NO: 988718 - DNA, 25 bp, Homo sapien
aggcattgcacttgcggcctgagaa

SEQ ID NO: 988719 - DNA, 25 bp, Homo sapien
atatgaacgagagccctcgcctgcc

SEQ ID NO: 988720 - DNA, 25 bp, Homo sapien
tttggcactattggtggaaacaagc

SEQ ID NO: 988721 - DNA, 25 bp, Homo sapien
gaggacacgggtcagtgctttgcca

SEQ ID NO: 988722 - DNA, 25 bp, Homo sapien
agagccatctcgtctccaaagcggg

SEQ ID NO: 988723 - DNA, 25 bp, Homo sapien
cacctcacaggtgcacattaggcaa

SEQ ID NO: 988724 - DNA, 25 bp, Homo sapien
gtttcattcccctccagtttggcgc

SEQ ID NO: 988725 - DNA, 25 bp, Homo sapien
ttctgtcgagttctacaacttttag

SEQ ID NO: 988726 - DNA, 25 bp, Homo sapien
tcattcccctccagtttggcgctga

SEQ ID NO: 988727 - DNA, 25 bp, Homo sapien
tggtgttcactcttctgtcgagttc

SEQ ID NO: 988728 - DNA, 25 bp, Homo sapien
cattcactcgtgtggcttggaaggg

SEQ ID NO: 988729 - DNA, 25 bp, Homo sapien
tccccgctgatgcagcagacatagg

SEQ ID NO: 988730 - DNA, 25 bp, Homo sapien
gaaccaggcctatggagagtctcaa

SEQ ID NO: 988731 - DNA, 25 bp, Homo sapien
tctgctcagggcaactgttggccag

SEQ ID NO: 988732 - DNA, 25 bp, Homo sapien
ggaagatccacatccggcctggact

SEQ ID NO: 988733 - DNA, 25 bp, Homo sapien
ggctggtctcattcgagataatgaa

SEQ ID NO: 988734 - DNA, 25 bp, Homo sapien
gagcagggaggaacctctatcccag

SEQ ID NO: 988735 - DNA, 25 bp, Homo sapien
gggagaatgttcctcgtagatcagc

SEQ ID NO: 988736 - DNA, 25 bp, Homo sapien
tggcagaaggatagggcccgtagcc

SEQ ID NO: 988737 - DNA, 25 bp, Homo sapien
aatgcaacggcaaagcacagcacca

SEQ ID NO: 988738 - DNA, 25 bp, Homo sapien
gaagctgccgaatgcaacggcaaag

SEQ ID NO: 988739 - DNA, 25 bp, Homo sapien
tagccttgaaagaagctgccgaatg

SEQ ID NO: 988740 - DNA, 25 bp, Homo sapien
cagagtgcctcaccgaggaacagcc

SEQ ID NO: 988741 - DNA, 25 bp, Homo sapien
gaacagcctcagagtggagttcctc

SEQ ID NO: 988742 - DNA, 25 bp, Homo sapien
ccaggggcggtcactgtgctaccct

SEQ ID NO: 988743 - DNA, 25 bp, Homo sapien
acagcacagctttatacccagggac

SEQ ID NO: 988744 - DNA, 25 bp, Homo sapien
aggtgccagtctgcgtgccagctaa

SEQ ID NO: 988745 - DNA, 25 bp, Homo sapien
gttcgagaaaccttgcccatcacca

SEQ ID NO: 988746 - DNA, 25 bp, Homo sapien
cagctaacttgcaggttcgagaaac

SEQ ID NO: 988747 - DNA, 25 bp, Homo sapien
catcaccaaagtctgaagcttctgg

SEQ ID NO: 988748 - DNA, 25 bp, Homo sapien
tttttgatctctccatgtgacccaa

SEQ ID NO: 988749 - DNA, 25 bp, Homo sapien
gtgacccaagaaggccgccgtgcct

SEQ ID NO: 988750 - DNA, 25 bp, Homo sapien
ctgccaatgataacaacagccgtga

SEQ ID NO: 988751 - DNA, 25 bp, Homo sapien
ccaatgataacaacagccgtgaggg

SEQ ID NO: 988752 - DNA, 25 bp, Homo sapien
gcactgccctgagttagaggtaact

SEQ ID NO: 988753 - DNA, 25 bp, Homo sapien
tgaaagtcctgttcttgcactgccc

SEQ ID NO: 988754 - DNA, 25 bp, Homo sapien
cacacttgaaagtcctgttcttgca

SEQ ID NO: 988755 - DNA, 25 bp, Homo sapien
tgttcttgcactgccctgagttaga

SEQ ID NO: 988756 - DNA, 25 bp, Homo sapien
cagcaatgggagcttggatgacagc

SEQ ID NO: 988757 - DNA, 25 bp, Homo sapien
agcccccaccctacttgcatgaagg

SEQ ID NO: 988758 - DNA, 25 bp, Homo sapien
gcaatgggagcttggatgacagccc

SEQ ID NO: 988759 - DNA, 25 bp, Homo sapien
ctcgtaactgatatgttggtttgag

SEQ ID NO: 988760 - DNA, 25 bp, Homo sapien
cttccctgccacgccatgcatatga

SEQ ID NO: 988761 - DNA, 25 bp, Homo sapien
tccctgccacgccatgcatatgaaa

SEQ ID NO: 988762 - DNA, 25 bp, Homo sapien
ttgttctacttccatccagctgcct

SEQ ID NO: 988763 - DNA, 25 bp, Homo sapien
cctgccacgccatgcatatgaaaca

SEQ ID NO: 988764 - DNA, 25 bp, Homo sapien
tgatgtgagtaaagggtcccaacgt

SEQ ID NO: 988765 - DNA, 25 bp, Homo sapien
gcccaaacactggtcacctgcatgg

SEQ ID NO: 988766 - DNA, 25 bp, Homo sapien
ccaacgtcttcccttgcccagcacc

SEQ ID NO: 988767 - DNA, 25 bp, Homo sapien
ttgcccagcaccccaatcaccagct

SEQ ID NO: 988768 - DNA, 25 bp, Homo sapien
caatcctgtatcatttaggaaaagt

SEQ ID NO: 988769 - DNA, 25 bp, Homo sapien
agtcatagtccttgtcatgatcagc

SEQ ID NO: 988770 - DNA, 25 bp, Homo sapien
tgttgatcttattctcctccaagcc

SEQ ID NO: 988771 - DNA, 25 bp, Homo sapien
ggagaatcaggcttgttgatcttat

SEQ ID NO: 988772 - DNA, 25 bp, Homo sapien
agttctcagttgaacaagactccac

SEQ ID NO: 988773 - DNA, 25 bp, Homo sapien
gaagctccaagttctcagttgaaca

SEQ ID NO: 988774 - DNA, 25 bp, Homo sapien
tcttccgaagctccaagttctcagt

SEQ ID NO: 988775 - DNA, 25 bp, Homo sapien
caagttctcagttgaacaagactcc

SEQ ID NO: 988776 - DNA, 25 bp, Homo sapien
gcacacccatatttccctgtgcata

SEQ ID NO: 988777 - DNA, 25 bp, Homo sapien
ccctgtgcatactgcccgatgaacg

SEQ ID NO: 988778 - DNA, 25 bp, Homo sapien
gaacgcaacagtttgccagcaggct

SEQ ID NO: 988779 - DNA, 25 bp, Homo sapien
ccacagctgataaaccaccgggttt

SEQ ID NO: 988780 - DNA, 25 bp, Homo sapien
tttctccaggctgtccatgtattct

SEQ ID NO: 988781 - DNA, 25 bp, Homo sapien
caggctgtccatgtattctttcttc

SEQ ID NO: 988782 - DNA, 25 bp, Homo sapien
ctttctcctactttcctgagcagaa

SEQ ID NO: 988783 - DNA, 25 bp, Homo sapien
ttctcctactttcctgagcagaaat

SEQ ID NO: 988784 - DNA, 25 bp, Homo sapien
tttccagctctgtaagtaaaccagt

SEQ ID NO: 988785 - DNA, 25 bp, Homo sapien
agtaaaccagttaagatgggaggtg

SEQ ID NO: 988786 - DNA, 25 bp, Homo sapien
cctgcttacttctgcaagctgcttg

SEQ ID NO: 988787 - DNA, 25 bp, Homo sapien
gaggtggttagcgtagaagtcacca

SEQ ID NO: 988788 - DNA, 25 bp, Homo sapien
cgtgggcaccaaagaggtagatact

SEQ ID NO: 988789 - DNA, 25 bp, Homo sapien
gaggtagatactgatctgggagtct

SEQ ID NO: 988790 - DNA, 25 bp, Homo sapien
aatgtatcatcgtgggcaccaaaga

SEQ ID NO: 988791 - DNA, 25 bp, Homo sapien
caccaaagaggtagatactgatctg

SEQ ID NO: 988792 - DNA, 25 bp, Homo sapien
cttattcttgatcttcctccgaatt

SEQ ID NO: 988793 - DNA, 25 bp, Homo sapien
ttctcctctgattttgacaggggca

SEQ ID NO: 988794 - DNA, 25 bp, Homo sapien
tattcttgatcttcctccgaatttt

SEQ ID NO: 988795 - DNA, 25 bp, Homo sapien
tctgattttgacaggggcaatttgg

SEQ ID NO: 988796 - DNA, 25 bp, Homo sapien
aggaccagagggcctgatccctgca

SEQ ID NO: 988797 - DNA, 25 bp, Homo sapien
ggtgcaggcgtgggttgggactcag

SEQ ID NO: 988798 - DNA, 25 bp, Homo sapien
gggtgcaggcgtgggttgggactca

SEQ ID NO: 988799 - DNA, 25 bp, Homo sapien
tgggcggcaaatgcaggtggtccac

SEQ ID NO: 988800 - DNA, 25 bp, Homo sapien
ggcggcaaatgcaggtggtccactg

SEQ ID NO: 988801 - DNA, 25 bp, Homo sapien
gcggcaaatgcaggtggtccactgg

SEQ ID NO: 988802 - DNA, 25 bp, Homo sapien
gggtgggcggcaaatgcaggtggtc

SEQ ID NO: 988803 - DNA, 25 bp, Homo sapien
ggtaaacgcttcactcctggagccc

SEQ ID NO: 988804 - DNA, 25 bp, Homo sapien
caatggattcccctgtacagcagcc

SEQ ID NO: 988805 - DNA, 25 bp, Homo sapien
tccacgtgaatgaaagcactcttgg

SEQ ID NO: 988806 - DNA, 25 bp, Homo sapien
ggaatccaaccaggcttccacgtga

SEQ ID NO: 988807 - DNA, 25 bp, Homo sapien
gattcagaagccactatgggattca

SEQ ID NO: 988808 - DNA, 25 bp, Homo sapien
tatggtgatgacacttctgaaccac

SEQ ID NO: 988809 - DNA, 25 bp, Homo sapien
taactggtgttatacaaacgaaagc

SEQ ID NO: 988810 - DNA, 25 bp, Homo sapien
caggataatgaggaagggctgtcct

SEQ ID NO: 988811 - DNA, 25 bp, Homo sapien
ggtgacaactgtataagccaatttc

SEQ ID NO: 988812 - DNA, 25 bp, Homo sapien
caaatataccttttcggtgacaact

SEQ ID NO: 988813 - DNA, 25 bp, Homo sapien
gagaagtgctcatatgtaaacatcc

SEQ ID NO: 988814 - DNA, 25 bp, Homo sapien
gggccagccctgattacattgttac

SEQ ID NO: 988815 - DNA, 25 bp, Homo sapien
caggcggattgcctaaggctgagag

SEQ ID NO: 988816 - DNA, 25 bp, Homo sapien
ccgaagcaggcggattgcctaaggc

SEQ ID NO: 988817 - DNA, 25 bp, Homo sapien
cggattgcctaaggctgagagttca

SEQ ID NO: 988818 - DNA, 25 bp, Homo sapien
aagcaggcggattgcctaaggctga

SEQ ID NO: 988819 - DNA, 25 bp, Homo sapien
tctgtggtacaaactcatcccagct

SEQ ID NO: 988820 - DNA, 25 bp, Homo sapien
aacagagctatttcataaagccagc

SEQ ID NO: 988821 - DNA, 25 bp, Homo sapien
tctcgccatattccctctctgtaga

SEQ ID NO: 988822 - DNA, 25 bp, Homo sapien
tgtagacccagagaccatatccata

SEQ ID NO: 988823 - DNA, 25 bp, Homo sapien
catgaggctccagcttaattttagg

SEQ ID NO: 988824 - DNA, 25 bp, Homo sapien
gtttagaaactgatccacttcatga

SEQ ID NO: 988825 - DNA, 25 bp, Homo sapien
taatggtctggcacgaggaatcaac

SEQ ID NO: 988826 - DNA, 25 bp, Homo sapien
ggctccagcttaattttaggaataa

SEQ ID NO: 988827 - DNA, 25 bp, Homo sapien
aactctaaagttgaaagccaaatgc

SEQ ID NO: 988828 - DNA, 25 bp, Homo sapien
actctaaagttgaaagccaaatgct

SEQ ID NO: 988829 - DNA, 25 bp, Homo sapien
tctaaagttgaaagccaaatgctca

SEQ ID NO: 988830 - DNA, 25 bp, Homo sapien
ctctaaagttgaaagccaaatgctc

SEQ ID NO: 988831 - DNA, 25 bp, Homo sapien
taatccaacctgtttaaacagacga

SEQ ID NO: 988832 - DNA, 25 bp, Homo sapien
cagagtgacagacggaacgagtcct

SEQ ID NO: 988833 - DNA, 25 bp, Homo sapien
gggtggttcgtctgtaattggctct

SEQ ID NO: 988834 - DNA, 25 bp, Homo sapien
agacaggtaccatttctcactttcc

SEQ ID NO: 988835 - DNA, 25 bp, Homo sapien
gaagggaagtctgtagacaggtacc

SEQ ID NO: 988836 - DNA, 25 bp, Homo sapien
gatgaggaaaatgacacctgggcct

SEQ ID NO: 988837 - DNA, 25 bp, Homo sapien
atgaggaaaatgacacctgggccta

SEQ ID NO: 988838 - DNA, 25 bp, Homo sapien
tgaggaaaatgacacctgggcctag

SEQ ID NO: 988839 - DNA, 25 bp, Homo sapien
aattattgggtagaggttgtaattg

SEQ ID NO: 988840 - DNA, 25 bp, Homo sapien
acactattgtctttggatgaacaca

SEQ ID NO: 988841 - DNA, 25 bp, Homo sapien
tctttggatgaacacacagggacat

SEQ ID NO: 988842 - DNA, 25 bp, Homo sapien
ggcttaggatggtaattattgggta

SEQ ID NO: 988843 - DNA, 25 bp, Homo sapien
gcaaaaagatcagtagggccaccct

SEQ ID NO: 988844 - DNA, 25 bp, Homo sapien
taaaacttgaagctgagataccgag

SEQ ID NO: 988845 - DNA, 25 bp, Homo sapien
caaaggtcaaactcgactggcacat

SEQ ID NO: 988846 - DNA, 25 bp, Homo sapien
taaagtttagcagtccacagtttgg

SEQ ID NO: 988847 - DNA, 25 bp, Homo sapien
tgagaaaaacacatacgcagttggt

SEQ ID NO: 988848 - DNA, 25 bp, Homo sapien
gcgggtccactcacaagcagatttt

SEQ ID NO: 988849 - DNA, 25 bp, Homo sapien
gggcggaccgtacatccatttacta

SEQ ID NO: 988850 - DNA, 25 bp, Homo sapien
caacacgggttttgaaccatgcggg

SEQ ID NO: 988851 - DNA, 25 bp, Homo sapien
cagactactgtgttcattcccacct

SEQ ID NO: 988852 - DNA, 25 bp, Homo sapien
taaggtatctgtagtgaaccagcct

SEQ ID NO: 988853 - DNA, 25 bp, Homo sapien
cagctccataaatttaaggtatctg

SEQ ID NO: 988854 - DNA, 25 bp, Homo sapien
aggtatctgtagtgaaccagcctac

SEQ ID NO: 988855 - DNA, 25 bp, Homo sapien
caggaggaagatgattcttatccat

SEQ ID NO: 988856 - DNA, 25 bp, Homo sapien
tcaggaggaagatgattcttatcca

SEQ ID NO: 988857 - DNA, 25 bp, Homo sapien
ccagccatcccttgccactgaaagc

SEQ ID NO: 988858 - DNA, 25 bp, Homo sapien
ttgccactgaaagccctactaaatt

SEQ ID NO: 988859 - DNA, 25 bp, Homo sapien
taatcacagggagaaatggctgagc

SEQ ID NO: 988860 - DNA, 25 bp, Homo sapien
cctacatttctagggttggctcctg

SEQ ID NO: 988861 - DNA, 25 bp, Homo sapien
gccacatgaagttccttagctctag

SEQ ID NO: 988862 - DNA, 25 bp, Homo sapien
tgtttcagaagtctacaaagtcccc

SEQ ID NO: 988863 - DNA, 25 bp, Homo sapien
taatacacactccacaccctcaaga

SEQ ID NO: 988864 - DNA, 25 bp, Homo sapien
aatacacactccacaccctcaagag

SEQ ID NO: 988865 - DNA, 25 bp, Homo sapien
caccctcaagagctcagaaccaaag

SEQ ID NO: 988866 - DNA, 25 bp, Homo sapien
atataatacacactccacaccctca

SEQ ID NO: 988867 - DNA, 25 bp, Homo sapien
caggtcttcctcctcctctgagttt

SEQ ID NO: 988868 - DNA, 25 bp, Homo sapien
tccaggtcttcctcctcctctgagt

SEQ ID NO: 988869 - DNA, 25 bp, Homo sapien
ctaaggtccaggtcttcctcctcct

SEQ ID NO: 988870 - DNA, 25 bp, Homo sapien
ggtcttcctcctcctctgagtttac

SEQ ID NO: 988871 - DNA, 25 bp, Homo sapien
tgggcccgaggctcctcgcacaggg

SEQ ID NO: 988872 - DNA, 25 bp, Homo sapien
ctctgagaggaaaggatcattcagg

SEQ ID NO: 988873 - DNA, 25 bp, Homo sapien
ggagctgacccaagacgttctggga

SEQ ID NO: 988874 - DNA, 25 bp, Homo sapien
gctgacccaagacgttctgggaaaa

SEQ ID NO: 988875 - DNA, 25 bp, Homo sapien
actctccctccttgataggtctata

SEQ ID NO: 988876 - DNA, 25 bp, Homo sapien
tccctccttgataggtctatattca

SEQ ID NO: 988877 - DNA, 25 bp, Homo sapien
tctccctccttgataggtctatatt

SEQ ID NO: 988878 - DNA, 25 bp, Homo sapien
ccctccttgataggtctatattcat

SEQ ID NO: 988879 - DNA, 25 bp, Homo sapien
caaatatgcccaaggtaagaggaag

SEQ ID NO: 988880 - DNA, 25 bp, Homo sapien
tacaaagttcctacaagttcaaata

SEQ ID NO: 988881 - DNA, 25 bp, Homo sapien
catttccactcaacagtcctctccc

SEQ ID NO: 988882 - DNA, 25 bp, Homo sapien
gtcctctccctacaccactttacag

SEQ ID NO: 988883 - DNA, 25 bp, Homo sapien
agaccacactctgggcagcaaggag

SEQ ID NO: 988884 - DNA, 25 bp, Homo sapien
aatttcctggttgcctgatggtgac

SEQ ID NO: 988885 - DNA, 25 bp, Homo sapien
tctgactcacaggtctaagcaggcc

SEQ ID NO: 988886 - DNA, 25 bp, Homo sapien
gattgcttaagtagctccccaagga

SEQ ID NO: 988887 - DNA, 25 bp, Homo sapien
agcccagcaaattagctccagctgg

SEQ ID NO: 988888 - DNA, 25 bp, Homo sapien
gcagtggtgggctccaagactcagc

SEQ ID NO: 988889 - DNA, 25 bp, Homo sapien
gacaggtcaacatcccattgctggt

SEQ ID NO: 988890 - DNA, 25 bp, Homo sapien
actcagcccagcaaattagctccag

SEQ ID NO: 988891 - DNA, 25 bp, Homo sapien
aactgccctaagatcggaggtcacg

SEQ ID NO: 988892 - DNA, 25 bp, Homo sapien
taaaaaattacctcggctctgaagc

SEQ ID NO: 988893 - DNA, 25 bp, Homo sapien
taatgaactgccaaagtagcttgca

SEQ ID NO: 988894 - DNA, 25 bp, Homo sapien
ggctagatctcccaacagttataaa

SEQ ID NO: 988895 - DNA, 25 bp, Homo sapien
tattcaacagctaacacagacgtaa

SEQ ID NO: 988896 - DNA, 25 bp, Homo sapien
gacgtaaagcttgtcaacaccccaa

SEQ ID NO: 988897 - DNA, 25 bp, Homo sapien
caaaggtcactgtcaagatgactca

SEQ ID NO: 988898 - DNA, 25 bp, Homo sapien
gagagtgatcaactccaggccgagt

SEQ ID NO: 988899 - DNA, 25 bp, Homo sapien
tgcccagccagtttaagaatatttc

SEQ ID NO: 988900 - DNA, 25 bp, Homo sapien
taagaatatttcaatcacttagtaa

SEQ ID NO: 988901 - DNA, 25 bp, Homo sapien
agcctctaacgtagctggattacag

SEQ ID NO: 988902 - DNA, 25 bp, Homo sapien
cagcctctaacgtagctggattaca

SEQ ID NO: 988903 - DNA, 25 bp, Homo sapien
ctctctcttcaaagatgtgactaca

SEQ ID NO: 988904 - DNA, 25 bp, Homo sapien
tctccagcttacagaagaagtgttt

SEQ ID NO: 988905 - DNA, 25 bp, Homo sapien
ggttactttatagctgggtgcctca

SEQ ID NO: 988906 - DNA, 25 bp, Homo sapien
aaatgggtcttcttcgataagccgg

SEQ ID NO: 988907 - DNA, 25 bp, Homo sapien
gaatgtctggaaccaacagcatgtg

SEQ ID NO: 988908 - DNA, 25 bp, Homo sapien
gaaatgcaacatcagagctaccagg

SEQ ID NO: 988909 - DNA, 25 bp, Homo sapien
gagataagatcccaagccctgagtt

SEQ ID NO: 988910 - DNA, 25 bp, Homo sapien
tgagcaaagctctaggaaaaccggc

SEQ ID NO: 988911 - DNA, 25 bp, Homo sapien
tatatacccatgagtcccagccttg

SEQ ID NO: 988912 - DNA, 25 bp, Homo sapien
aaggaatccataagcactgttgact

SEQ ID NO: 988913 - DNA, 25 bp, Homo sapien
ctaacttaatactccctctgcatcc

SEQ ID NO: 988914 - DNA, 25 bp, Homo sapien
ctgcatccatcaaggaatccataag

SEQ ID NO: 988915 - DNA, 25 bp, Homo sapien
ctctgcatccatcaaggaatccata

SEQ ID NO: 988916 - DNA, 25 bp, Homo sapien
gtgagccgccaaataacagaccttt

SEQ ID NO: 988917 - DNA, 25 bp, Homo sapien
caggcttcaggcaggtgttgttaaa

SEQ ID NO: 988918 - DNA, 25 bp, Homo sapien
gttaaattgctccaaccaggcaaag

SEQ ID NO: 988919 - DNA, 25 bp, Homo sapien
gactctcacttagtatttttacaca

SEQ ID NO: 988920 - DNA, 25 bp, Homo sapien
agggactgagtcttgcatggctttt

SEQ ID NO: 988921 - DNA, 25 bp, Homo sapien
tggttgttctgtccgccctactagg

SEQ ID NO: 988922 - DNA, 25 bp, Homo sapien
gtcattattgttggccggctgcttt

SEQ ID NO: 988923 - DNA, 25 bp, Homo sapien
gggcggcccagtcattattgttggc

SEQ ID NO: 988924 - DNA, 25 bp, Homo sapien
ccagaagtgccaaaaagtgccactg

SEQ ID NO: 988925 - DNA, 25 bp, Homo sapien
ctgagaaagcacaatcgggcctttt

SEQ ID NO: 988926 - DNA, 25 bp, Homo sapien
ttttgattcccatccgcacactgcc

SEQ ID NO: 988927 - DNA, 25 bp, Homo sapien
agaagtgccaaaaagtgccactgag

SEQ ID NO: 988928 - DNA, 25 bp, Homo sapien
tgaaagatcaaaggtctcaaagtct

SEQ ID NO: 988929 - DNA, 25 bp, Homo sapien
catgaaagatcaaaggtctcaaagt

SEQ ID NO: 988930 - DNA, 25 bp, Homo sapien
gagtctgcgtttcatgaaagatcaa

SEQ ID NO: 988931 - DNA, 25 bp, Homo sapien
tgaaaggagtctgcgtttcatgaaa

SEQ ID NO: 988932 - DNA, 25 bp, Homo sapien
caaagacctactgcaattgccaaag

SEQ ID NO: 988933 - DNA, 25 bp, Homo sapien
caatatgtacatcaactgcttggga

SEQ ID NO: 988934 - DNA, 25 bp, Homo sapien
gaggttctctcgctcaacaatatgt

SEQ ID NO: 988935 - DNA, 25 bp, Homo sapien
acagccaaggctagacgcagttcag

SEQ ID NO: 988936 - DNA, 25 bp, Homo sapien
cagggctcggggatactaaagaaat

SEQ ID NO: 988937 - DNA, 25 bp, Homo sapien
tttgccagtggtgataagggctatg

SEQ ID NO: 988938 - DNA, 25 bp, Homo sapien
tgtgctgaccgcaaaatccctgctc

SEQ ID NO: 988939 - DNA, 25 bp, Homo sapien
catccattactttgacacaaagcac

SEQ ID NO: 988940 - DNA, 25 bp, Homo sapien
gacctcaggcccagctgaagggctt

SEQ ID NO: 988941 - DNA, 25 bp, Homo sapien
acctgttcctcatgtccctgacagg

SEQ ID NO: 988942 - DNA, 25 bp, Homo sapien
acacctgttcctcatgtccctgaca

SEQ ID NO: 988943 - DNA, 25 bp, Homo sapien
tcctcccacacctgttcctcatgtc

SEQ ID NO: 988944 - DNA, 25 bp, Homo sapien
agcaagggcagaacccagaatccag

SEQ ID NO: 988945 - DNA, 25 bp, Homo sapien
ggccatgacaggaacagagattcag

SEQ ID NO: 988946 - DNA, 25 bp, Homo sapien
ctttgcgggtcctgaaacctgggca

SEQ ID NO: 988947 - DNA, 25 bp, Homo sapien
gtcctgaaacctgggcattgccagc

SEQ ID NO: 988948 - DNA, 25 bp, Homo sapien
gatccacctgatacttccttagtgg

SEQ ID NO: 988949 - DNA, 25 bp, Homo sapien
cacttgaatattgttgatgcctctg

SEQ ID NO: 988950 - DNA, 25 bp, Homo sapien
gaagagtcagaagaataaagagagg

SEQ ID NO: 988951 - DNA, 25 bp, Homo sapien
actcattttcggcattcagtggatc

SEQ ID NO: 988952 - DNA, 25 bp, Homo sapien
agtcatgtggtgaatcccaacactc

SEQ ID NO: 988953 - DNA, 25 bp, Homo sapien
gtcatgtggtgaatcccaacactct

SEQ ID NO: 988954 - DNA, 25 bp, Homo sapien
gagtcatgtggtgaatcccaacact

SEQ ID NO: 988955 - DNA, 25 bp, Homo sapien
atcccaacactcttgaacaggttaa

SEQ ID NO: 988956 - DNA, 25 bp, Homo sapien
ctcgaattggaggaaggaccagcta

SEQ ID NO: 988957 - DNA, 25 bp, Homo sapien
ggtttaacacaattggccactgaga

SEQ ID NO: 988958 - DNA, 25 bp, Homo sapien
ccagctatgtgagaggtttccccag

SEQ ID NO: 988959 - DNA, 25 bp, Homo sapien
tttccccaggatgcaaacagacagg

SEQ ID NO: 988960 - DNA, 25 bp, Homo sapien
tgaccacgcacttgagaaaacctgg

SEQ ID NO: 988961 - DNA, 25 bp, Homo sapien
gactattggatttagcagccaggga

SEQ ID NO: 988962 - DNA, 25 bp, Homo sapien
cactgaagtttatagcagagcccag

SEQ ID NO: 988963 - DNA, 25 bp, Homo sapien
taagagggagcatctggcaaacatg

SEQ ID NO: 988964 - DNA, 25 bp, Homo sapien
taactcagggatcattcgagaagga

SEQ ID NO: 988965 - DNA, 25 bp, Homo sapien
tatcgccctaggttctccaagtgga

SEQ ID NO: 988966 - DNA, 25 bp, Homo sapien
aatgttgaaaggtgccacaagggtc

SEQ ID NO: 988967 - DNA, 25 bp, Homo sapien
tacttactgtatgagccgatctgaa

SEQ ID NO: 988968 - DNA, 25 bp, Homo sapien
tcatttcactgggtcattacaaggg

SEQ ID NO: 988969 - DNA, 25 bp, Homo sapien
cagcctgataggcaagtacttgcag

SEQ ID NO: 988970 - DNA, 25 bp, Homo sapien
gattttcaagatggtgacagcacag

SEQ ID NO: 988971 - DNA, 25 bp, Homo sapien
tacgtaatttgtgaaacccagtgca

SEQ ID NO: 988972 - DNA, 25 bp, Homo sapien
gctagagtaacaaacagctctgccc

SEQ ID NO: 988973 - DNA, 25 bp, Homo sapien
tacaggaatgagctgttcacaacag

SEQ ID NO: 988974 - DNA, 25 bp, Homo sapien
gactgaatgaataatcaggccatcc

SEQ ID NO: 988975 - DNA, 25 bp, Homo sapien
agctctgcccctggatatctaacag

SEQ ID NO: 988976 - DNA, 25 bp, Homo sapien
aaatgtaaggcctctactccctgaa

SEQ ID NO: 988977 - DNA, 25 bp, Homo sapien
aaataatcacacattcctgctttat

SEQ ID NO: 988978 - DNA, 25 bp, Homo sapien
aataatcacacattcctgctttatc

SEQ ID NO: 988979 - DNA, 25 bp, Homo sapien
gagccagtccaagcagttcttccca

SEQ ID NO: 988980 - DNA, 25 bp, Homo sapien
gtgaatgccacagtcacgggtagca

SEQ ID NO: 988981 - DNA, 25 bp, Homo sapien
gccagtccaagcagttcttcccaga

SEQ ID NO: 988982 - DNA, 25 bp, Homo sapien
agcatctcgcacctttccctgtgaa

SEQ ID NO: 988983 - DNA, 25 bp, Homo sapien
gcctgtgcgtaattcatcccaccag

SEQ ID NO: 988984 - DNA, 25 bp, Homo sapien
gctgaaagacaaccccctagctgtg

SEQ ID NO: 988985 - DNA, 25 bp, Homo sapien
tgtcacagcgaaagaatacttcaag

SEQ ID NO: 988986 - DNA, 25 bp, Homo sapien
cagctgctggatgagacactgtcac

SEQ ID NO: 988987 - DNA, 25 bp, Homo sapien
gtggtacatgagggcctcgccgtcc

SEQ ID NO: 988988 - DNA, 25 bp, Homo sapien
agcttgcggtcccactgcagcacgc

SEQ ID NO: 988989 - DNA, 25 bp, Homo sapien
gccgtccccgggctctgacagctcg

SEQ ID NO: 988990 - DNA, 25 bp, Homo sapien
cgggctctgacagctcgctcagctt

SEQ ID NO: 988991 - DNA, 25 bp, Homo sapien
ggcggtgcgggccgcgctgggccga

SEQ ID NO: 988992 - DNA, 25 bp, Homo sapien
ggtgcgggccgcgctgggccgagga

SEQ ID NO: 988993 - DNA, 25 bp, Homo sapien
gcggtgcgggccgcgctgggccgag

SEQ ID NO: 988994 - DNA, 25 bp, Homo sapien
tgcgggccgcgctgggccgaggatg

SEQ ID NO: 988995 - DNA, 25 bp, Homo sapien
tcggaccggcaaggttcctctctct

SEQ ID NO: 988996 - DNA, 25 bp, Homo sapien
ctctctccgcgtgtgcttgcgtgtg

SEQ ID NO: 988997 - DNA, 25 bp, Homo sapien
gctgcctcggaccggcaaggttcct

SEQ ID NO: 988998 - DNA, 25 bp, Homo sapien
aggttcctctctctccgcgtgtgct

SEQ ID NO: 988999 - DNA, 25 bp, Homo sapien
cagacacaaactttgagggacccca

SEQ ID NO: 989000 - DNA, 25 bp, Homo sapien
ggatgtgcatccaaaatgaaggcag

SEQ ID NO: 989001 - DNA, 25 bp, Homo sapien
caggaaaatcccttagccgcaagcc

SEQ ID NO: 989002 - DNA, 25 bp, Homo sapien
gccttgcctagcagacccaatcaga

SEQ ID NO: 989003 - DNA, 25 bp, Homo sapien
gggtgattatccagtatcttgagtc

SEQ ID NO: 989004 - DNA, 25 bp, Homo sapien
tccagtatcttgagtctcatttttc

SEQ ID NO: 989005 - DNA, 25 bp, Homo sapien
taaagatgtccagtcttctaaaact

SEQ ID NO: 989006 - DNA, 25 bp, Homo sapien
tccagtcttctaaaacttgcttctg

SEQ ID NO: 989007 - DNA, 25 bp, Homo sapien
tatgtcagtctcttatttgccaaca

SEQ ID NO: 989008 - DNA, 25 bp, Homo sapien
ggttacgttttacaagcctctgatg

SEQ ID NO: 989009 - DNA, 25 bp, Homo sapien
tctttgatggaataggccctaggac

SEQ ID NO: 989010 - DNA, 25 bp, Homo sapien
agttcaaaggacaaccatgcttagg

SEQ ID NO: 989011 - DNA, 25 bp, Homo sapien
atctcagtgctgcaagtcaccgcat

SEQ ID NO: 989012 - DNA, 25 bp, Homo sapien
gatctcagtgctgcaagtcaccgca

SEQ ID NO: 989013 - DNA, 25 bp, Homo sapien
tctcagtgctgcaagtcaccgcata

SEQ ID NO: 989014 - DNA, 25 bp, Homo sapien
cacttggaccccagactttgagtga

SEQ ID NO: 989015 - DNA, 25 bp, Homo sapien
cagactttgagtgagctaaggctac

SEQ ID NO: 989016 - DNA, 25 bp, Homo sapien
aattgttttacagacagttggtgac

SEQ ID NO: 989017 - DNA, 25 bp, Homo sapien
tataatcaatccaccaatgtactaa

SEQ ID NO: 989018 - DNA, 25 bp, Homo sapien
tacagtacatgcagaaaactaaatc

SEQ ID NO: 989019 - DNA, 25 bp, Homo sapien
gagacagggcgactgcttcagccca

SEQ ID NO: 989020 - DNA, 25 bp, Homo sapien
catttagagatattggaccatgatt

SEQ ID NO: 989021 - DNA, 25 bp, Homo sapien
tcaacacgcaggaggtctagtgaga

SEQ ID NO: 989022 - DNA, 25 bp, Homo sapien
gcagccagcgtcaagggaacagaaa

SEQ ID NO: 989023 - DNA, 25 bp, Homo sapien
tgctaatcagcagagggtgacactg

SEQ ID NO: 989024 - DNA, 25 bp, Homo sapien
aaatgcccatgtagtggattggaga

SEQ ID NO: 989025 - DNA, 25 bp, Homo sapien
gcctaagacatgattcaccactggg

SEQ ID NO: 989026 - DNA, 25 bp, Homo sapien
ggcgcgatcatcctgaatacccatt

SEQ ID NO: 989027 - DNA, 25 bp, Homo sapien
ccaagacggtgcaatgggtagtccc

SEQ ID NO: 989028 - DNA, 25 bp, Homo sapien
gatgaatactgactgcagggagttc

SEQ ID NO: 989029 - DNA, 25 bp, Homo sapien
aattgttttggcaggtggcgcgatc

SEQ ID NO: 989030 - DNA, 25 bp, Homo sapien
ccttaaagggcctgagtctcaacat

SEQ ID NO: 989031 - DNA, 25 bp, Homo sapien
ggatctctcttgcatccttaaaggg

SEQ ID NO: 989032 - DNA, 25 bp, Homo sapien
gaaaacttaactggatctctcttgc

SEQ ID NO: 989033 - DNA, 25 bp, Homo sapien
gaggaatgaaaacttaactggatct

SEQ ID NO: 989034 - DNA, 25 bp, Homo sapien
tggcttttcttcttaacttgggaga

SEQ ID NO: 989035 - DNA, 25 bp, Homo sapien
tcttgcctacattgattatagaacc

SEQ ID NO: 989036 - DNA, 25 bp, Homo sapien
tacgtgaaaaggcttgaaacaacca

SEQ ID NO: 989037 - DNA, 25 bp, Homo sapien
ggctgctgatccatacttacacatc

SEQ ID NO: 989038 - DNA, 25 bp, Homo sapien
ttagaattcagcaatagagatatat

SEQ ID NO: 989039 - DNA, 25 bp, Homo sapien
tgacctcaagacatatatttttgag

SEQ ID NO: 989040 - DNA, 25 bp, Homo sapien
tattacttataacactgacctctgg

SEQ ID NO: 989041 - DNA, 25 bp, Homo sapien
tggtctatactgattgttttcactg

SEQ ID NO: 989042 - DNA, 25 bp, Homo sapien
tgttcaatgacctcaagacatatat

SEQ ID NO: 989043 - DNA, 25 bp, Homo sapien
tgcgcactgcgcacagtatcctcat

SEQ ID NO: 989044 - DNA, 25 bp, Homo sapien
tctcggtcagaatttgtgggggccc

SEQ ID NO: 989045 - DNA, 25 bp, Homo sapien
cagcggtctcgggtttgcgcactgc

SEQ ID NO: 989046 - DNA, 25 bp, Homo sapien
tcacgacacgatggaagctgcggag

SEQ ID NO: 989047 - DNA, 25 bp, Homo sapien
ttggccttgacggaaacgggctctg

SEQ ID NO: 989048 - DNA, 25 bp, Homo sapien
tgacggaaacgggctctgcgtttgc

SEQ ID NO: 989049 - DNA, 25 bp, Homo sapien
ccttgacggaaacgggctctgcgtt

SEQ ID NO: 989050 - DNA, 25 bp, Homo sapien
gccttgacggaaacgggctctgcgt

SEQ ID NO: 989051 - DNA, 25 bp, Homo sapien
cttcgtgtgccctcaatgtggtcag

SEQ ID NO: 989052 - DNA, 25 bp, Homo sapien
aaatgaattccgtataatgggcgac

SEQ ID NO: 989053 - DNA, 25 bp, Homo sapien
gatcatggacaacgggcagccaatt

SEQ ID NO: 989054 - DNA, 25 bp, Homo sapien
tgggcgacaaaggagacctctgttc

SEQ ID NO: 989055 - DNA, 25 bp, Homo sapien
gagcccaatatctcccatgaatctt

SEQ ID NO: 989056 - DNA, 25 bp, Homo sapien
tctgggggagcccaatatctcccat

SEQ ID NO: 989057 - DNA, 25 bp, Homo sapien
ctttttctgggggagcccaatatct

SEQ ID NO: 989058 - DNA, 25 bp, Homo sapien
gggagcccaatatctcccatgaatc

SEQ ID NO: 989059 - DNA, 25 bp, Homo sapien
aagagcagcaacattgtggccgcca

SEQ ID NO: 989060 - DNA, 25 bp, Homo sapien
taggtaattgggatacagggaccat

SEQ ID NO: 989061 - DNA, 25 bp, Homo sapien
ctctgcggctgcagaatccagagcc

SEQ ID NO: 989062 - DNA, 25 bp, Homo sapien
gtggccgccaatgagaacaccatca

SEQ ID NO: 989063 - DNA, 25 bp, Homo sapien
aatattagtcatggagttttcacac

SEQ ID NO: 989064 - DNA, 25 bp, Homo sapien
catttactggtttcgtactaccaca

SEQ ID NO: 989065 - DNA, 25 bp, Homo sapien
taaaaactgtgaggctttgaatgga

SEQ ID NO: 989066 - DNA, 25 bp, Homo sapien
tgcaatatgcttgctctaacaggaa

SEQ ID NO: 989067 - DNA, 25 bp, Homo sapien
ttataaatgattgtccaccgttgat

SEQ ID NO: 989068 - DNA, 25 bp, Homo sapien
ccgttgattgacaagagcctgtgtc

SEQ ID NO: 989069 - DNA, 25 bp, Homo sapien
tagaggagggtcactgatgaaagca

SEQ ID NO: 989070 - DNA, 25 bp, Homo sapien
tgtccaccgttgattgacaagagcc

SEQ ID NO: 989071 - DNA, 25 bp, Homo sapien
taagaattatggttctagaaacata

SEQ ID NO: 989072 - DNA, 25 bp, Homo sapien
attaagaattatggttctagaaaca

SEQ ID NO: 989073 - DNA, 25 bp, Homo sapien
ttaagaattatggttctagaaacat

SEQ ID NO: 989074 - DNA, 25 bp, Homo sapien
ccttatgagcgtcagagacaggagg

SEQ ID NO: 989075 - DNA, 25 bp, Homo sapien
cagaaccttatgagcgtcagagaca

SEQ ID NO: 989076 - DNA, 25 bp, Homo sapien
tcccacagaaccttatgagcgtcag

SEQ ID NO: 989077 - DNA, 25 bp, Homo sapien
cacagaaccttatgagcgtcagaga

SEQ ID NO: 989078 - DNA, 25 bp, Homo sapien
ctccccttcttttgtgggcgggctg

SEQ ID NO: 989079 - DNA, 25 bp, Homo sapien
ttattgttaatccagctgcactggg

SEQ ID NO: 989080 - DNA, 25 bp, Homo sapien
cgggctgttattgttaatccagctg

SEQ ID NO: 989081 - DNA, 25 bp, Homo sapien
cactgggtaatgacgcccacctttt

SEQ ID NO: 989082 - DNA, 25 bp, Homo sapien
cctgggttgaggtgtatatggcata

SEQ ID NO: 989083 - DNA, 25 bp, Homo sapien
cataggttaattcagcctactcttt

SEQ ID NO: 989084 - DNA, 25 bp, Homo sapien
tctatttggttagggtaagaacaca

SEQ ID NO: 989085 - DNA, 25 bp, Homo sapien
ggtaagaacacatcctgtgctgagc

SEQ ID NO: 989086 - DNA, 25 bp, Homo sapien
acacatgttcaacatcttgatttaa

SEQ ID NO: 989087 - DNA, 25 bp, Homo sapien
cagtgtttttcccacacatgttcaa

SEQ ID NO: 989088 - DNA, 25 bp, Homo sapien
cccacacatgttcaacatcttgatt

SEQ ID NO: 989089 - DNA, 25 bp, Homo sapien
tcagtgtttttcccacacatgttca

SEQ ID NO: 989090 - DNA, 25 bp, Homo sapien
gtcagatggtgccacgggataaaat

SEQ ID NO: 989091 - DNA, 25 bp, Homo sapien
cagatggtgccacgggataaaatat

SEQ ID NO: 989092 - DNA, 25 bp, Homo sapien
ggccaaggtcaagaagcaggtaagt

SEQ ID NO: 989093 - DNA, 25 bp, Homo sapien
tggtgccacgggataaaatatgaca

SEQ ID NO: 989094 - DNA, 25 bp, Homo sapien
ttgcatgcaatttgcttagtgagct

SEQ ID NO: 989095 - DNA, 25 bp, Homo sapien
ggaacaggtacagtccggtgcgctc

SEQ ID NO: 989096 - DNA, 25 bp, Homo sapien
gagctcttgcatgcaatttgcttag

SEQ ID NO: 989097 - DNA, 25 bp, Homo sapien
gtacagtccggtgcgctctgagctc

SEQ ID NO: 989098 - DNA, 25 bp, Homo sapien
tctgtacgctagctcatccaggcag

SEQ ID NO: 989099 - DNA, 25 bp, Homo sapien
gcttgattctgtacgctagctcatc

SEQ ID NO: 989100 - DNA, 25 bp, Homo sapien
gattctgtacgctagctcatccagg

SEQ ID NO: 989101 - DNA, 25 bp, Homo sapien
atccgcttgattctgtacgctagct

SEQ ID NO: 989102 - DNA, 25 bp, Homo sapien
tagatttcttagggagctcgtaaaa

SEQ ID NO: 989103 - DNA, 25 bp, Homo sapien
aatgtgtgtcattgtacatcaatgg

SEQ ID NO: 989104 - DNA, 25 bp, Homo sapien
gagctcgtaaaaaggatttactgta

SEQ ID NO: 989105 - DNA, 25 bp, Homo sapien
tacaataaatgtgtgtcattgtaca

SEQ ID NO: 989106 - DNA, 25 bp, Homo sapien
atgggtggcccgatgagcctgcacc

SEQ ID NO: 989107 - DNA, 25 bp, Homo sapien
gacacccgcaggtagtccaatccat

SEQ ID NO: 989108 - DNA, 25 bp, Homo sapien
tctaccaccagacacccgcaggtag

SEQ ID NO: 989109 - DNA, 25 bp, Homo sapien
caggtagtccaatccatcttcaaca

SEQ ID NO: 989110 - DNA, 25 bp, Homo sapien
gccaatccacctacaggggcagcat

SEQ ID NO: 989111 - DNA, 25 bp, Homo sapien
ctgtgacgcgacaggcaggccaatc

SEQ ID NO: 989112 - DNA, 25 bp, Homo sapien
ggcaggccaatccacctacaggggc

SEQ ID NO: 989113 - DNA, 25 bp, Homo sapien
tgtgacgcgacaggcaggccaatcc

SEQ ID NO: 989114 - DNA, 25 bp, Homo sapien
cacatggtgttttagaattcatccc

SEQ ID NO: 989115 - DNA, 25 bp, Homo sapien
tacggctccacatggtgttttagaa

SEQ ID NO: 989116 - DNA, 25 bp, Homo sapien
gctccacatggtgttttagaattca

SEQ ID NO: 989117 - DNA, 25 bp, Homo sapien
tcatacggctccacatggtgtttta

SEQ ID NO: 989118 - DNA, 25 bp, Homo sapien
ggaacataattacttctgtctctcc

SEQ ID NO: 989119 - DNA, 25 bp, Homo sapien
gttggacacactaccaaaacctgga

SEQ ID NO: 989120 - DNA, 25 bp, Homo sapien
gagcctctgatctccttcatcagat

SEQ ID NO: 989121 - DNA, 25 bp, Homo sapien
cacatacttgctcatgtagaagtca

SEQ ID NO: 989122 - DNA, 25 bp, Homo sapien
cacgcacaggatagctttatgtaca

SEQ ID NO: 989123 - DNA, 25 bp, Homo sapien
atggacagccttggtacacgcacag

SEQ ID NO: 989124 - DNA, 25 bp, Homo sapien
aatgcggccatggacagccttggta

SEQ ID NO: 989125 - DNA, 25 bp, Homo sapien
atgtgtcagcaatgcggccatggac

SEQ ID NO: 989126 - DNA, 25 bp, Homo sapien
cagcagggaatgttacagcagcagc

SEQ ID NO: 989127 - DNA, 25 bp, Homo sapien
agacagccagtggagactaccatat

SEQ ID NO: 989128 - DNA, 25 bp, Homo sapien
aagagtgtatgttttgacttgagaa

SEQ ID NO: 989129 - DNA, 25 bp, Homo sapien
tgagcaacgagccagaagagtgtat

SEQ ID NO: 989130 - DNA, 25 bp, Homo sapien
tttatgtaccagcagccagaattgc

SEQ ID NO: 989131 - DNA, 25 bp, Homo sapien
tcttctgtttatgtaccagcagcca

SEQ ID NO: 989132 - DNA, 25 bp, Homo sapien
tctgtttatgtaccagcagccagaa

SEQ ID NO: 989133 - DNA, 25 bp, Homo sapien
atagtcttctgtttatgtaccagca

SEQ ID NO: 989134 - DNA, 25 bp, Homo sapien
catcatgaaactgctcctctttgga

SEQ ID NO: 989135 - DNA, 25 bp, Homo sapien
gggttcagcaccacatatttctgtc

SEQ ID NO: 989136 - DNA, 25 bp, Homo sapien
gaagaactatagagatgggaatcag

SEQ ID NO: 989137 - DNA, 25 bp, Homo sapien
ttataggcaagtcaatctgttggac

SEQ ID NO: 989138 - DNA, 25 bp, Homo sapien
ctggcaggatctgggtttgctgcaa

SEQ ID NO: 989139 - DNA, 25 bp, Homo sapien
gagacaatggtcttcgtatgttgcc

SEQ ID NO: 989140 - DNA, 25 bp, Homo sapien
tagagacaatggtcttcgtatgttg

SEQ ID NO: 989141 - DNA, 25 bp, Homo sapien
gacaatggtcttcgtatgttgccta

SEQ ID NO: 989142 - DNA, 25 bp, Homo sapien
agacaatggtcttcgtatgttgcct

SEQ ID NO: 989143 - DNA, 25 bp, Homo sapien
ttgcctgaataaagcctaatgtcaa

SEQ ID NO: 989144 - DNA, 25 bp, Homo sapien
gcctgaataaagcctaatgtcaata

SEQ ID NO: 989145 - DNA, 25 bp, Homo sapien
attgcctgaataaagcctaatgtca

SEQ ID NO: 989146 - DNA, 25 bp, Homo sapien
cattgcctgaataaagcctaatgtc

SEQ ID NO: 989147 - DNA, 25 bp, Homo sapien
tggtacagctaagtacgtacccaaa

SEQ ID NO: 989148 - DNA, 25 bp, Homo sapien
cttgtggtacagctaagtacgtacc

SEQ ID NO: 989149 - DNA, 25 bp, Homo sapien
tgtggtacagctaagtacgtaccca

SEQ ID NO: 989150 - DNA, 25 bp, Homo sapien
ttgtggtacagctaagtacgtaccc

SEQ ID NO: 989151 - DNA, 25 bp, Homo sapien
tataatgaacgtagtcacacaacaa

SEQ ID NO: 989152 - DNA, 25 bp, Homo sapien
gattataatgaacgtagtcacacaa

SEQ ID NO: 989153 - DNA, 25 bp, Homo sapien
agattataatgaacgtagtcacaca

SEQ ID NO: 989154 - DNA, 25 bp, Homo sapien
aatgaacgtagtcacacaacaagta

SEQ ID NO: 989155 - DNA, 25 bp, Homo sapien
tttgctgtctagtcatcctcgtggg

SEQ ID NO: 989156 - DNA, 25 bp, Homo sapien
tgctgtctagtcatcctcgtgggtc

SEQ ID NO: 989157 - DNA, 25 bp, Homo sapien
tgtctagtcatcctcgtgggtcttc

SEQ ID NO: 989158 - DNA, 25 bp, Homo sapien
tttttgctgtctagtcatcctcgtg

SEQ ID NO: 989159 - DNA, 25 bp, Homo sapien
ctcagcttcctcgtcgtcacctcca

SEQ ID NO: 989160 - DNA, 25 bp, Homo sapien
tcttcttcaccgtcaccttcttctt

SEQ ID NO: 989161 - DNA, 25 bp, Homo sapien
ctcttcttcaccgtcaccttcttct

SEQ ID NO: 989162 - DNA, 25 bp, Homo sapien
tcctcttcttcaccgtcaccttctt

SEQ ID NO: 989163 - DNA, 25 bp, Homo sapien
ttcttcaccgtcaccttcttcttcc

SEQ ID NO: 989164 - DNA, 25 bp, Homo sapien
ctccggtccctgttttcctcatgag

SEQ ID NO: 989165 - DNA, 25 bp, Homo sapien
tccctgttttcctcatgagcattcc

SEQ ID NO: 989166 - DNA, 25 bp, Homo sapien
ctgttttcctcatgagcattcccgt

SEQ ID NO: 989167 - DNA, 25 bp, Homo sapien
cttctcccgtaagtccttggtggtg

SEQ ID NO: 989168 - DNA, 25 bp, Homo sapien
gaacgaggccgagagtcggcagggc

SEQ ID NO: 989169 - DNA, 25 bp, Homo sapien
aggcggcccggctcaacctgttgga

SEQ ID NO: 989170 - DNA, 25 bp, Homo sapien
tgttggacacttgcgccgtgtgcca

SEQ ID NO: 989171 - DNA, 25 bp, Homo sapien
agaacatccagagccgggcgcccaa

SEQ ID NO: 989172 - DNA, 25 bp, Homo sapien
gcctggcctgtcagtctgttaaatt

SEQ ID NO: 989173 - DNA, 25 bp, Homo sapien
catgtattgcaggtattgactctgg

SEQ ID NO: 989174 - DNA, 25 bp, Homo sapien
gatttgtccattcagctaatacata

SEQ ID NO: 989175 - DNA, 25 bp, Homo sapien
gtttctacacaaaagtctgtcatgg

SEQ ID NO: 989176 - DNA, 25 bp, Homo sapien
catatgcctgaaaacctgatcatca

SEQ ID NO: 989177 - DNA, 25 bp, Homo sapien
gtcagatgggtagcgtggtagcatc

SEQ ID NO: 989178 - DNA, 25 bp, Homo sapien
gcacatcgtacacatatgcctgaaa

SEQ ID NO: 989179 - DNA, 25 bp, Homo sapien
tgaaggaggcacatcgtacacatat

SEQ ID NO: 989180 - DNA, 25 bp, Homo sapien
cagaagtctactttgtgatggcata

SEQ ID NO: 989181 - DNA, 25 bp, Homo sapien
tacttgagatactatggtagacagt

SEQ ID NO: 989182 - DNA, 25 bp, Homo sapien
gaatatatggtagcagtcagggact

SEQ ID NO: 989183 - DNA, 25 bp, Homo sapien
tgtttatgaattaccttggcctgtg

SEQ ID NO: 989184 - DNA, 25 bp, Homo sapien
ttccagttcaaacctgggcttcttc

SEQ ID NO: 989185 - DNA, 25 bp, Homo sapien
tgcttttccagcactgctaccttca

SEQ ID NO: 989186 - DNA, 25 bp, Homo sapien
tcatccccagttgcttttccagcac

SEQ ID NO: 989187 - DNA, 25 bp, Homo sapien
tttccagcactgctaccttcactgt

SEQ ID NO: 989188 - DNA, 25 bp, Homo sapien
cggaatcaatgtattgaccacatct

SEQ ID NO: 989189 - DNA, 25 bp, Homo sapien
tatccggaatcaatgtattgaccac

SEQ ID NO: 989190 - DNA, 25 bp, Homo sapien
cagtgctatccggaatcaatgtatt

SEQ ID NO: 989191 - DNA, 25 bp, Homo sapien
gctatccggaatcaatgtattgacc

SEQ ID NO: 989192 - DNA, 25 bp, Homo sapien
ccagcatcttcttctggatttggca

SEQ ID NO: 989193 - DNA, 25 bp, Homo sapien
ctgtcaggtcatgatttccagcatc

SEQ ID NO: 989194 - DNA, 25 bp, Homo sapien
gtcaggtcatgatttccagcatctt

SEQ ID NO: 989195 - DNA, 25 bp, Homo sapien
agcatcttcttctggatttggcaga

SEQ ID NO: 989196 - DNA, 25 bp, Homo sapien
tgaaacaagtaatcataagtagtag

SEQ ID NO: 989197 - DNA, 25 bp, Homo sapien
aacaagtaatcataagtagtagtct

SEQ ID NO: 989198 - DNA, 25 bp, Homo sapien
aagtaatcataagtagtagtcttga

SEQ ID NO: 989199 - DNA, 25 bp, Homo sapien
caaatgaaacaagtaatcataagta

SEQ ID NO: 989200 - DNA, 25 bp, Homo sapien
tctgcaagtcaacaaagactcactg

SEQ ID NO: 989201 - DNA, 25 bp, Homo sapien
tttgtcctggagtaagacccatgcc

SEQ ID NO: 989202 - DNA, 25 bp, Homo sapien
aatggatcaactacctttttggctc

SEQ ID NO: 989203 - DNA, 25 bp, Homo sapien
tcttggacatagcaggagctttcac

SEQ ID NO: 989204 - DNA, 25 bp, Homo sapien
catggtggtgcttgcaggactgtaa

SEQ ID NO: 989205 - DNA, 25 bp, Homo sapien
tatgactggcagctcagtaggcttg

SEQ ID NO: 989206 - DNA, 25 bp, Homo sapien
gagtaatgcattgcaccacagtatt

SEQ ID NO: 989207 - DNA, 25 bp, Homo sapien
agtattcatctgtaacgcaatggta

SEQ ID NO: 989208 - DNA, 25 bp, Homo sapien
tgaggttcccagcagtacagtagaa

SEQ ID NO: 989209 - DNA, 25 bp, Homo sapien
gttgcccagtttgcagccaagaatg

SEQ ID NO: 989210 - DNA, 25 bp, Homo sapien
gcagagagacacatcatagataact

SEQ ID NO: 989211 - DNA, 25 bp, Homo sapien
cagtttgcagccaagaatgtgcaga

SEQ ID NO: 989212 - DNA, 25 bp, Homo sapien
agaacttgatatgcctgattgggtg

SEQ ID NO: 989213 - DNA, 25 bp, Homo sapien
gagagaacttgatatgcctgattgg

SEQ ID NO: 989214 - DNA, 25 bp, Homo sapien
cagagagaacttgatatgcctgatt

SEQ ID NO: 989215 - DNA, 25 bp, Homo sapien
acttgatatgcctgattgggtgtgg

SEQ ID NO: 989216 - DNA, 25 bp, Homo sapien
aagttacccctttgcttcacttgct

SEQ ID NO: 989217 - DNA, 25 bp, Homo sapien
ggttgatttgtctcaaacctaatta

SEQ ID NO: 989218 - DNA, 25 bp, Homo sapien
gtttctataaggatccaacaaggcc

SEQ ID NO: 989219 - DNA, 25 bp, Homo sapien
caaatggatctgaatattataggtt

SEQ ID NO: 989220 - DNA, 25 bp, Homo sapien
gcaagacgtgtatcagagctcatca

SEQ ID NO: 989221 - DNA, 25 bp, Homo sapien
tgaggacaacgcagaagccaatggg

SEQ ID NO: 989222 - DNA, 25 bp, Homo sapien
ccaatgggttttgtgtagagtgtgt

SEQ ID NO: 989223 - DNA, 25 bp, Homo sapien
tcagacagaaagaggaagtatctcc

SEQ ID NO: 989224 - DNA, 25 bp, Homo sapien
gatacactaatcaccaaactgatgg

SEQ ID NO: 989225 - DNA, 25 bp, Homo sapien
catagatacactaatcaccaaactg

SEQ ID NO: 989226 - DNA, 25 bp, Homo sapien
gaatcagaaagtgatcatagataca

SEQ ID NO: 989227 - DNA, 25 bp, Homo sapien
ataccaatttatagaagaagctttt

SEQ ID NO: 989228 - DNA, 25 bp, Homo sapien
gaaaagctctactgcatcagttaga

SEQ ID NO: 989229 - DNA, 25 bp, Homo sapien
aaatcaaaagcaggtggaacaggat

SEQ ID NO: 989230 - DNA, 25 bp, Homo sapien
aaggaaaagctctactgcatcagtt

SEQ ID NO: 989231 - DNA, 25 bp, Homo sapien
ggaacaggatattaaagttgctata

SEQ ID NO: 989232 - DNA, 25 bp, Homo sapien
taaacaattggagcatgtcatgcat

SEQ ID NO: 989233 - DNA, 25 bp, Homo sapien
tgcaaaggaccatcgcatgaaactt

SEQ ID NO: 989234 - DNA, 25 bp, Homo sapien
gaaacttatgcaacaacaacaggaa

SEQ ID NO: 989235 - DNA, 25 bp, Homo sapien
aggaagtggctggactctctaaaca

SEQ ID NO: 989236 - DNA, 25 bp, Homo sapien
gagaccaccctgcgccacagggtga

SEQ ID NO: 989237 - DNA, 25 bp, Homo sapien
aatacttgaggccatgcacctataa

SEQ ID NO: 989238 - DNA, 25 bp, Homo sapien
taaataatacttgaggccatgcacc

SEQ ID NO: 989239 - DNA, 25 bp, Homo sapien
tgcacccagccgcataatgtatttc

SEQ ID NO: 989240 - DNA, 25 bp, Homo sapien
cacctccttcgtgcaaggtgtgatg

SEQ ID NO: 989241 - DNA, 25 bp, Homo sapien
cagtgaccaacaacaccatccaatt

SEQ ID NO: 989242 - DNA, 25 bp, Homo sapien
ccaatttcactgtgatcctagtttc

SEQ ID NO: 989243 - DNA, 25 bp, Homo sapien
tcactgtgatcctagtttctgggct

SEQ ID NO: 989244 - DNA, 25 bp, Homo sapien
taagcagaatcctgtcgtggaacag

SEQ ID NO: 989245 - DNA, 25 bp, Homo sapien
gagccagccacaaatgcctaagcag

SEQ ID NO: 989246 - DNA, 25 bp, Homo sapien
aattacggctccagcatatgcagca

SEQ ID NO: 989247 - DNA, 25 bp, Homo sapien
agttcccaacacagatcagcctagc

SEQ ID NO: 989248 - DNA, 25 bp, Homo sapien
caaccgcctccacgtttgataaact

SEQ ID NO: 989249 - DNA, 25 bp, Homo sapien
caaacccaatggaccagttcttcct

SEQ ID NO: 989250 - DNA, 25 bp, Homo sapien
gagatatccaccaaaccagaacata

SEQ ID NO: 989251 - DNA, 25 bp, Homo sapien
cataccacgacaagcaataaagcca

SEQ ID NO: 989252 - DNA, 25 bp, Homo sapien
taattttgtggcacttacgtagtct

SEQ ID NO: 989253 - DNA, 25 bp, Homo sapien
ttctaaaagtatgtacactctgtgt

SEQ ID NO: 989254 - DNA, 25 bp, Homo sapien
gctataaaatgcgtatcttgcagag

SEQ ID NO: 989255 - DNA, 25 bp, Homo sapien
gctatatcatcaccaaattctctta

SEQ ID NO: 989256 - DNA, 25 bp, Homo sapien
atcagcagtggacagggaaccccat

SEQ ID NO: 989257 - DNA, 25 bp, Homo sapien
tgatcgatttgagctcaccagtggg

SEQ ID NO: 989258 - DNA, 25 bp, Homo sapien
tccagccccacgattactagtgcag

SEQ ID NO: 989259 - DNA, 25 bp, Homo sapien
ccagtgggagggtcttataatcttc

SEQ ID NO: 989260 - DNA, 25 bp, Homo sapien
accctcaaacagaacggtccagtca

SEQ ID NO: 989261 - DNA, 25 bp, Homo sapien
agatactaatatagatcatggccag

SEQ ID NO: 989262 - DNA, 25 bp, Homo sapien
gactgttcaagtactattatgctgg

SEQ ID NO: 989263 - DNA, 25 bp, Homo sapien
caatattgtgaggaaagatactaat

SEQ ID NO: 989264 - DNA, 25 bp, Homo sapien
tcttccttgttccagtctacactac

SEQ ID NO: 989265 - DNA, 25 bp, Homo sapien
gggcagtagtccagaatccctcttt

SEQ ID NO: 989266 - DNA, 25 bp, Homo sapien
gccttaagtctgaacccattgatct

SEQ ID NO: 989267 - DNA, 25 bp, Homo sapien
agtctacactaccaccagagcatag

SEQ ID NO: 989268 - DNA, 25 bp, Homo sapien
tatagcttttagtggaactacccaa

SEQ ID NO: 989269 - DNA, 25 bp, Homo sapien
aatgtgccagacctacccggttcag

SEQ ID NO: 989270 - DNA, 25 bp, Homo sapien
ataagttcctctgaaagggactcgt

SEQ ID NO: 989271 - DNA, 25 bp, Homo sapien
caagcctcattgtttgcagtatagc

SEQ ID NO: 989272 - DNA, 25 bp, Homo sapien
ggatctcagctaagtcatccttaaa

SEQ ID NO: 989273 - DNA, 25 bp, Homo sapien
ttattaataagtacctgtgtgccca

SEQ ID NO: 989274 - DNA, 25 bp, Homo sapien
tttattaataagtacctgtgtgccc

SEQ ID NO: 989275 - DNA, 25 bp, Homo sapien
ctttgaccataaactctgggagatt

SEQ ID NO: 989276 - DNA, 25 bp, Homo sapien
gcgattcaggtaaccttgacctaaa

SEQ ID NO: 989277 - DNA, 25 bp, Homo sapien
gtacactccggtgtacatctttgac

SEQ ID NO: 989278 - DNA, 25 bp, Homo sapien
ccccaaaagttcagtgcgattcagg

SEQ ID NO: 989279 - DNA, 25 bp, Homo sapien
ttggattattctgcctcataccagc

SEQ ID NO: 989280 - DNA, 25 bp, Homo sapien
catctgaggcagtagtcttcgtctt

SEQ ID NO: 989281 - DNA, 25 bp, Homo sapien
gaggaccaaagatgccatgaagact

SEQ ID NO: 989282 - DNA, 25 bp, Homo sapien
gaatgttacttcagcagagttctaa

SEQ ID NO: 989283 - DNA, 25 bp, Homo sapien
actgagtctcaggggataggaaggc

SEQ ID NO: 989284 - DNA, 25 bp, Homo sapien
ttactgagtctcaggggataggaag

SEQ ID NO: 989285 - DNA, 25 bp, Homo sapien
tactgagtctcaggggataggaagg

SEQ ID NO: 989286 - DNA, 25 bp, Homo sapien
ttaatctttatcatgagaatcaaag

SEQ ID NO: 989287 - DNA, 25 bp, Homo sapien
taatctttatcatgagaatcaaaga

SEQ ID NO: 989288 - DNA, 25 bp, Homo sapien
tctttatcatgagaatcaaagattc

SEQ ID NO: 989289 - DNA, 25 bp, Homo sapien
ttatcatgagaatcaaagattcccc

SEQ ID NO: 989290 - DNA, 25 bp, Homo sapien
gatcaatatacagttacctacccca

SEQ ID NO: 989291 - DNA, 25 bp, Homo sapien
tctcatctggtagacatagctttgc

SEQ ID NO: 989292 - DNA, 25 bp, Homo sapien
aaaatgcaccgcagttctgaagata

SEQ ID NO: 989293 - DNA, 25 bp, Homo sapien
ccgagtagcatacagaagtaaaacc

SEQ ID NO: 989294 - DNA, 25 bp, Homo sapien
aagtggtagttgaaaagacttcaga

SEQ ID NO: 989295 - DNA, 25 bp, Homo sapien
aaagtggtagttgaaaagacttcag

SEQ ID NO: 989296 - DNA, 25 bp, Homo sapien
agtggtagttgaaaagacttcagag

SEQ ID NO: 989297 - DNA, 25 bp, Homo sapien
ttgctctgggcaaaagtggtagttg

SEQ ID NO: 989298 - DNA, 25 bp, Homo sapien
gagagtgaatgcagaaatggcgcat

SEQ ID NO: 989299 - DNA, 25 bp, Homo sapien
cccagtattgatgcactcataagaa

SEQ ID NO: 989300 - DNA, 25 bp, Homo sapien
ggcgcatacaacacagacagatgag

SEQ ID NO: 989301 - DNA, 25 bp, Homo sapien
cacagggcccccagtattgatgcac

SEQ ID NO: 989302 - DNA, 25 bp, Homo sapien
gaacaggaactggtattaacacgca

SEQ ID NO: 989303 - DNA, 25 bp, Homo sapien
ttaacacgcattggccaggtaagac

SEQ ID NO: 989304 - DNA, 25 bp, Homo sapien
ttcactaagatggtcctttgcagcc

SEQ ID NO: 989305 - DNA, 25 bp, Homo sapien
caggtaagacctctcttggcatcca

SEQ ID NO: 989306 - DNA, 25 bp, Homo sapien
tgtacacatgctttggcctggatct

SEQ ID NO: 989307 - DNA, 25 bp, Homo sapien
atgtgtcttgtctccggttatggag

SEQ ID NO: 989308 - DNA, 25 bp, Homo sapien
cagagtctctgaaaggattgctaat

SEQ ID NO: 989309 - DNA, 25 bp, Homo sapien
gttgtgtgacaccaaaactctttgg

SEQ ID NO: 989310 - DNA, 25 bp, Homo sapien
cattaatctcacaacgacagtaaag

SEQ ID NO: 989311 - DNA, 25 bp, Homo sapien
caacgacagtaaagtatgaagtggt

SEQ ID NO: 989312 - DNA, 25 bp, Homo sapien
agtggttaaccaacagcaaagctct

SEQ ID NO: 989313 - DNA, 25 bp, Homo sapien
tagttctccattaatctcacaacga

SEQ ID NO: 989314 - DNA, 25 bp, Homo sapien
tgaaagaagagtccgccttgaaaaa

SEQ ID NO: 989315 - DNA, 25 bp, Homo sapien
ccacgtgtctctgccctattgtaga

SEQ ID NO: 989316 - DNA, 25 bp, Homo sapien
tatggaaacaagtcaagtgtccacc

SEQ ID NO: 989317 - DNA, 25 bp, Homo sapien
aaactaataataagaagccaggcac

SEQ ID NO: 989318 - DNA, 25 bp, Homo sapien
ctgaagcctgaaaggctgaatgatt

SEQ ID NO: 989319 - DNA, 25 bp, Homo sapien
tctgaagcctgaaaggctgaatgat

SEQ ID NO: 989320 - DNA, 25 bp, Homo sapien
tgaagcctgaaaggctgaatgattt

SEQ ID NO: 989321 - DNA, 25 bp, Homo sapien
tcttctgaagcctgaaaggctgaat

SEQ ID NO: 989322 - DNA, 25 bp, Homo sapien
tctctcagactctctctctccctgc

SEQ ID NO: 989323 - DNA, 25 bp, Homo sapien
ctctcagactctctctctccctgca

SEQ ID NO: 989324 - DNA, 25 bp, Homo sapien
tctctccctgcagggtccttggctg

SEQ ID NO: 989325 - DNA, 25 bp, Homo sapien
ctctctctctccctgcagggtcctt

SEQ ID NO: 989326 - DNA, 25 bp, Homo sapien
ctgggatataaatggtgccaccatt

SEQ ID NO: 989327 - DNA, 25 bp, Homo sapien
caccattgcaccaatgcgacacagg

SEQ ID NO: 989328 - DNA, 25 bp, Homo sapien
tccccaaagcgcgcatcgtggtggg

SEQ ID NO: 989329 - DNA, 25 bp, Homo sapien
atgcgacacagggagccgctggttc

SEQ ID NO: 989330 - DNA, 25 bp, Homo sapien
ataataccccttcttatttgtagca

SEQ ID NO: 989331 - DNA, 25 bp, Homo sapien
tttgtagcaaaacttatactgaaca

SEQ ID NO: 989332 - DNA, 25 bp, Homo sapien
attgcaaaagaggattgattttttt

SEQ ID NO: 989333 - DNA, 25 bp, Homo sapien
tgatttttttgtacctgcctataaa

SEQ ID NO: 989334 - DNA, 25 bp, Homo sapien
agtttgcagctaccagagccctcag

SEQ ID NO: 989335 - DNA, 25 bp, Homo sapien
tgtagacggtgttgaagtttgcagc

SEQ ID NO: 989336 - DNA, 25 bp, Homo sapien
tgttgaagtttgcagctaccagagc

SEQ ID NO: 989337 - DNA, 25 bp, Homo sapien
ctcagctgtgtaaatgtagacggtg

SEQ ID NO: 989338 - DNA, 25 bp, Homo sapien
ggcagcatggaggaccacctccagt

SEQ ID NO: 989339 - DNA, 25 bp, Homo sapien
ctccagtggcccagcttcgagtgca

SEQ ID NO: 989340 - DNA, 25 bp, Homo sapien
tggaggaccacctccagtggcccag

SEQ ID NO: 989341 - DNA, 25 bp, Homo sapien
cccagcttcgagtgcactgtggatg

SEQ ID NO: 989342 - DNA, 25 bp, Homo sapien
ccgtcttcccaggaaattgatgccc

SEQ ID NO: 989343 - DNA, 25 bp, Homo sapien
gccgtgcatcccatggtaatagaaa

SEQ ID NO: 989344 - DNA, 25 bp, Homo sapien
ttgaggagaaggaagaataaagccg

SEQ ID NO: 989345 - DNA, 25 bp, Homo sapien
tagaaaggctcagccgtcttcccag

SEQ ID NO: 989346 - DNA, 25 bp, Homo sapien
ggtgcccagaatacttattatatca

SEQ ID NO: 989347 - DNA, 25 bp, Homo sapien
caggaatgataagcactggtgccca

SEQ ID NO: 989348 - DNA, 25 bp, Homo sapien
tacatatactttacccacgtgggtc

SEQ ID NO: 989349 - DNA, 25 bp, Homo sapien
tattccagccaaaatccagtcacgt

SEQ ID NO: 989350 - DNA, 25 bp, Homo sapien
tctcttgccaacaccaatccaaact

SEQ ID NO: 989351 - DNA, 25 bp, Homo sapien
gcactacttggcaacttattcagtt

SEQ ID NO: 989352 - DNA, 25 bp, Homo sapien
tgccaacaccaatccaaactggaga

SEQ ID NO: 989353 - DNA, 25 bp, Homo sapien
gatttttcagcactacttggcaact

SEQ ID NO: 989354 - DNA, 25 bp, Homo sapien
gatagtcagagggtgcaaacatgtg

SEQ ID NO: 989355 - DNA, 25 bp, Homo sapien
tttgaaccacagaccaagtcccgct

SEQ ID NO: 989356 - DNA, 25 bp, Homo sapien
gcaatttcaccgatggtgctgatga

SEQ ID NO: 989357 - DNA, 25 bp, Homo sapien
tgctgatgatcatggtccgatagtc

SEQ ID NO: 989358 - DNA, 25 bp, Homo sapien
atatttagcatccaataggtctgca

SEQ ID NO: 989359 - DNA, 25 bp, Homo sapien
taatgtggtccgtaaatatttagca

SEQ ID NO: 989360 - DNA, 25 bp, Homo sapien
catccaataggtctgcaaatcttcc

SEQ ID NO: 989361 - DNA, 25 bp, Homo sapien
cagatctgtaatgtggtccgtaaat

SEQ ID NO: 989362 - DNA, 25 bp, Homo sapien
tgaaccgggcagattcaggaataaa

SEQ ID NO: 989363 - DNA, 25 bp, Homo sapien
gaccgagcggttcatcttggcaacg

SEQ ID NO: 989364 - DNA, 25 bp, Homo sapien
cagcccgagtgttcccagtggagac

SEQ ID NO: 989365 - DNA, 25 bp, Homo sapien
ttggcaacgcgctccagagtggcca

SEQ ID NO: 989366 - DNA, 25 bp, Homo sapien
ggtccccctgttggttattctgaca

SEQ ID NO: 989367 - DNA, 25 bp, Homo sapien
cccctgttggttattctgacacttg

SEQ ID NO: 989368 - DNA, 25 bp, Homo sapien
gttggttattctgacacttgatttt

SEQ ID NO: 989369 - DNA, 25 bp, Homo sapien
cctgttggttattctgacacttgat

SEQ ID NO: 989370 - DNA, 25 bp, Homo sapien
ttcagccgaacccaggtatacttcc

SEQ ID NO: 989371 - DNA, 25 bp, Homo sapien
tgccacgaattcatagggagaagat

SEQ ID NO: 989372 - DNA, 25 bp, Homo sapien
aggctccccgccatggttctcacaa

SEQ ID NO: 989373 - DNA, 25 bp, Homo sapien
ggtgcttcagccgaacccaggtata

SEQ ID NO: 989374 - DNA, 25 bp, Homo sapien
aatatgcgcatcaattcccttgaca

SEQ ID NO: 989375 - DNA, 25 bp, Homo sapien
tgtactcaatatgcgcatcaattcc

SEQ ID NO: 989376 - DNA, 25 bp, Homo sapien
gcttagtgtactcaatatgcgcatc

SEQ ID NO: 989377 - DNA, 25 bp, Homo sapien
ctagagtgcttagtgtactcaatat

SEQ ID NO: 989378 - DNA, 25 bp, Homo sapien
agcatcatagactcctccagttctg

SEQ ID NO: 989379 - DNA, 25 bp, Homo sapien
tgccaacagcaagctgcgtagcatc

SEQ ID NO: 989380 - DNA, 25 bp, Homo sapien
cagcaagctgcgtagcatcatagac

SEQ ID NO: 989381 - DNA, 25 bp, Homo sapien
tgcgtagcatcatagactcctccag

SEQ ID NO: 989382 - DNA, 25 bp, Homo sapien
agtggagtcagcaaaaacaggacgg

SEQ ID NO: 989383 - DNA, 25 bp, Homo sapien
ggacggagccgtcagacaaaacttc

SEQ ID NO: 989384 - DNA, 25 bp, Homo sapien
tcagacaaaacttctaggaagaggg

SEQ ID NO: 989385 - DNA, 25 bp, Homo sapien
gtcagcaaaaacaggacggagccgt

SEQ ID NO: 989386 - DNA, 25 bp, Homo sapien
cgccacccgatggtggggatgatca

SEQ ID NO: 989387 - DNA, 25 bp, Homo sapien
atgagccagcgccacccgatggtgg

SEQ ID NO: 989388 - DNA, 25 bp, Homo sapien
aggcgacgcgaatgagccagcgcca

SEQ ID NO: 989389 - DNA, 25 bp, Homo sapien
gggatggaggcgacgcgaatgagcc

SEQ ID NO: 989390 - DNA, 25 bp, Homo sapien
tatcttcttttgggagccactttgt

SEQ ID NO: 989391 - DNA, 25 bp, Homo sapien
ctttggggaattatgaccatgaaaa

SEQ ID NO: 989392 - DNA, 25 bp, Homo sapien
aagttctttggggaattatgaccat

SEQ ID NO: 989393 - DNA, 25 bp, Homo sapien
gttctttggggaattatgaccatga

SEQ ID NO: 989394 - DNA, 25 bp, Homo sapien
tagaaaagtgtgatagagtgggact

SEQ ID NO: 989395 - DNA, 25 bp, Homo sapien
tgggacttgagtcatcagggacaat

SEQ ID NO: 989396 - DNA, 25 bp, Homo sapien
agccagtaacaaggctactgcagta

SEQ ID NO: 989397 - DNA, 25 bp, Homo sapien
cagggacaatattgctaaagaggca

SEQ ID NO: 989398 - DNA, 25 bp, Homo sapien
tatttcgtgggcaaaaattcagtct

SEQ ID NO: 989399 - DNA, 25 bp, Homo sapien
tagcctcggtatttcgtgggcaaaa

SEQ ID NO: 989400 - DNA, 25 bp, Homo sapien
ctgagacaagggtaacatatagcct

SEQ ID NO: 989401 - DNA, 25 bp, Homo sapien
taacatatagcctcggtatttcgtg

SEQ ID NO: 989402 - DNA, 25 bp, Homo sapien
cccacaggaacgagatgagcagaat

SEQ ID NO: 989403 - DNA, 25 bp, Homo sapien
caggaagacaaaccagatgtacgaa

SEQ ID NO: 989404 - DNA, 25 bp, Homo sapien
aaataggctccccacaggaacgaga

SEQ ID NO: 989405 - DNA, 25 bp, Homo sapien
gagcaaacgaggtcagcaaggagaa

SEQ ID NO: 989406 - DNA, 25 bp, Homo sapien
gaacacatgaatgggacctgcctca

SEQ ID NO: 989407 - DNA, 25 bp, Homo sapien
tgaaggcgattttcggtttccatcc

SEQ ID NO: 989408 - DNA, 25 bp, Homo sapien
gccattctactgtctggaagcccag

SEQ ID NO: 989409 - DNA, 25 bp, Homo sapien
gaagaagccctaacttctgaaggcg

SEQ ID NO: 989410 - DNA, 25 bp, Homo sapien
ggtggcaggtccctgaacttggaca

SEQ ID NO: 989411 - DNA, 25 bp, Homo sapien
catcaaaaggcaaaaacgtgtcctc

SEQ ID NO: 989412 - DNA, 25 bp, Homo sapien
ccattctttaaaactaccatgctgt

SEQ ID NO: 989413 - DNA, 25 bp, Homo sapien
ctgtgcccaccctcatgggtggcag

SEQ ID NO: 989414 - DNA, 25 bp, Homo sapien
gactgtatgacttccgagctgcaat

SEQ ID NO: 989415 - DNA, 25 bp, Homo sapien
tagctggcaaggttcagagcaacac

SEQ ID NO: 989416 - DNA, 25 bp, Homo sapien
caacggtgcaggactctttaaggaa

SEQ ID NO: 989417 - DNA, 25 bp, Homo sapien
ggtcttggccatccagcactagtca

SEQ ID NO: 989418 - DNA, 25 bp, Homo sapien
ggaggccaaagaggatactgaaaac

SEQ ID NO: 989419 - DNA, 25 bp, Homo sapien
tactgaaaaccatgtagccaaaaaa

SEQ ID NO: 989420 - DNA, 25 bp, Homo sapien
gccaaagaggatactgaaaaccatg

SEQ ID NO: 989421 - DNA, 25 bp, Homo sapien
atctgtcagccaggaggccaaagag

SEQ ID NO: 989422 - DNA, 25 bp, Homo sapien
tgccgcccgcttgttgctagaggac

SEQ ID NO: 989423 - DNA, 25 bp, Homo sapien
tggtgggagcctaacaaggcagatc

SEQ ID NO: 989424 - DNA, 25 bp, Homo sapien
tcactagaagtaggctggaaatacg

SEQ ID NO: 989425 - DNA, 25 bp, Homo sapien
gcttcggctccactctattcagatg

SEQ ID NO: 989426 - DNA, 25 bp, Homo sapien
ttcagctgcttagagagaagtcttc

SEQ ID NO: 989427 - DNA, 25 bp, Homo sapien
aatgagggagattgtgtacctgctg

SEQ ID NO: 989428 - DNA, 25 bp, Homo sapien
ctgagctgtgatggcctaatgaggg

SEQ ID NO: 989429 - DNA, 25 bp, Homo sapien
cttgggagagttcagctgcttagag

SEQ ID NO: 989430 - DNA, 25 bp, Homo sapien
taaatagcttctttagtgacccgat

SEQ ID NO: 989431 - DNA, 25 bp, Homo sapien
tcatgtggatagtaagcagttcaac

SEQ ID NO: 989432 - DNA, 25 bp, Homo sapien
ctatgactaacccatgacttaggga

SEQ ID NO: 989433 - DNA, 25 bp, Homo sapien
gacgaagacatcaaatgctgcaaac

SEQ ID NO: 989434 - DNA, 25 bp, Homo sapien
aggagacacaacagctatcaacatg

SEQ ID NO: 989435 - DNA, 25 bp, Homo sapien
ccattcacagcggatgacaggagac

SEQ ID NO: 989436 - DNA, 25 bp, Homo sapien
tcacagcggatgacaggagacacaa

SEQ ID NO: 989437 - DNA, 25 bp, Homo sapien
caacagctatcaacatgatctccat

SEQ ID NO: 989438 - DNA, 25 bp, Homo sapien
tgtctaagtgccagcttgtcatcac

SEQ ID NO: 989439 - DNA, 25 bp, Homo sapien
tctaagtgccagcttgtcatcactt

SEQ ID NO: 989440 - DNA, 25 bp, Homo sapien
catgtctaagtgccagcttgtcatc

SEQ ID NO: 989441 - DNA, 25 bp, Homo sapien
gtctaagtgccagcttgtcatcact

SEQ ID NO: 989442 - DNA, 25 bp, Homo sapien
ccagtcgaaagatttggtccctgca

SEQ ID NO: 989443 - DNA, 25 bp, Homo sapien
taaagcatcccatcgtaagaccagt

SEQ ID NO: 989444 - DNA, 25 bp, Homo sapien
ggtccctgcacccaaataagcagtt

SEQ ID NO: 989445 - DNA, 25 bp, Homo sapien
tctatggcctctgaataagggcctg

SEQ ID NO: 989446 - DNA, 25 bp, Homo sapien
gaagccgatagtctccactgcatct

SEQ ID NO: 989447 - DNA, 25 bp, Homo sapien
agggcaatgtggaaacgcccgaagc

SEQ ID NO: 989448 - DNA, 25 bp, Homo sapien
cccatgatcagaaagagggcaatgt

SEQ ID NO: 989449 - DNA, 25 bp, Homo sapien
catcttccacggtgaacgtctttgg

SEQ ID NO: 989450 - DNA, 25 bp, Homo sapien
aaaaggattcttaactctaagcagc

SEQ ID NO: 989451 - DNA, 25 bp, Homo sapien
gagctggagacttctatgataatct

SEQ ID NO: 989452 - DNA, 25 bp, Homo sapien
aaaaaggattcttaactctaagcag

SEQ ID NO: 989453 - DNA, 25 bp, Homo sapien
agcaggttgagctggagacttctat

SEQ ID NO: 989454 - DNA, 25 bp, Homo sapien
ggctcaatttccgaaggctgaggat

SEQ ID NO: 989455 - DNA, 25 bp, Homo sapien
tcaatttccgaaggctgaggatcgt

SEQ ID NO: 989456 - DNA, 25 bp, Homo sapien
tttaacctgtggctctgcggtcccc

SEQ ID NO: 989457 - DNA, 25 bp, Homo sapien
aatttccgaaggctgaggatcgtga

SEQ ID NO: 989458 - DNA, 25 bp, Homo sapien
gaaatgactaatgactttggtgccc

SEQ ID NO: 989459 - DNA, 25 bp, Homo sapien
gagtaacgggccagacctcttggtg

SEQ ID NO: 989460 - DNA, 25 bp, Homo sapien
tctgaacttgtcgaagcctccaaat

SEQ ID NO: 989461 - DNA, 25 bp, Homo sapien
tccagcataacgtgcattgacagta

SEQ ID NO: 989462 - DNA, 25 bp, Homo sapien
catttcacaggatttagcaaccaga

SEQ ID NO: 989463 - DNA, 25 bp, Homo sapien
tcacaggatttagcaaccagagagc

SEQ ID NO: 989464 - DNA, 25 bp, Homo sapien
cacaggatttagcaaccagagagcc

SEQ ID NO: 989465 - DNA, 25 bp, Homo sapien
tttcacaggatttagcaaccagaga

SEQ ID NO: 989466 - DNA, 25 bp, Homo sapien
ccttcccattgagcgccttgcaggg

SEQ ID NO: 989467 - DNA, 25 bp, Homo sapien
cacagtttcatgcttcaggtgagcc

SEQ ID NO: 989468 - DNA, 25 bp, Homo sapien
ggtgagccaagaacaaccttcccat

SEQ ID NO: 989469 - DNA, 25 bp, Homo sapien
ggttaagtcgtatcaaatccacagg

SEQ ID NO: 989470 - DNA, 25 bp, Homo sapien
tgccatccaggatgtgtttaaagga

SEQ ID NO: 989471 - DNA, 25 bp, Homo sapien
catccccgacatagaacttgttctg

SEQ ID NO: 989472 - DNA, 25 bp, Homo sapien
aaccatccccgacatagaacttgtt

SEQ ID NO: 989473 - DNA, 25 bp, Homo sapien
ggagaatggagaaaacttgtaacca

SEQ ID NO: 989474 - DNA, 25 bp, Homo sapien
cctcgcgtctgaaggccgctgttca

SEQ ID NO: 989475 - DNA, 25 bp, Homo sapien
cagcctcgcgtctgaaggccgctgt

SEQ ID NO: 989476 - DNA, 25 bp, Homo sapien
catcaccatagtccagagcacttca

SEQ ID NO: 989477 - DNA, 25 bp, Homo sapien
tgttcatcaccatagtccagagcac

SEQ ID NO: 989478 - DNA, 25 bp, Homo sapien
tggcttggtggacaaagacgtctcc

SEQ ID NO: 989479 - DNA, 25 bp, Homo sapien
gtgtggatggcttggtggacaaaga

SEQ ID NO: 989480 - DNA, 25 bp, Homo sapien
taggaggctgtgtttgaaatgcagc

SEQ ID NO: 989481 - DNA, 25 bp, Homo sapien
ggacaaagacgtctccaaagttgaa

SEQ ID NO: 989482 - DNA, 25 bp, Homo sapien
aagaaacaacctggattcagtgagg

SEQ ID NO: 989483 - DNA, 25 bp, Homo sapien
gaggcaggttactctggtagcatca

SEQ ID NO: 989484 - DNA, 25 bp, Homo sapien
tgaggagccatagaggcaggttact

SEQ ID NO: 989485 - DNA, 25 bp, Homo sapien
gattcagtgaggagccatagaggca

SEQ ID NO: 989486 - DNA, 25 bp, Homo sapien
acagatgtctgcggagggagacgtc

SEQ ID NO: 989487 - DNA, 25 bp, Homo sapien
cagatgtctgcggagggagacgtcc

SEQ ID NO: 989488 - DNA, 25 bp, Homo sapien
gggggtacagtcacgggtgtctgtg

SEQ ID NO: 989489 - DNA, 25 bp, Homo sapien
agatgtctgcggagggagacgtcca

SEQ ID NO: 989490 - DNA, 25 bp, Homo sapien
tctactgcctatgtccattctagaa

SEQ ID NO: 989491 - DNA, 25 bp, Homo sapien
tactgcctatgtccattctagaatt

SEQ ID NO: 989492 - DNA, 25 bp, Homo sapien
agctctactgcctatgtccattcta

SEQ ID NO: 989493 - DNA, 25 bp, Homo sapien
cctcaggggctctcgtcccagatac

SEQ ID NO: 989494 - DNA, 25 bp, Homo sapien
tccatggtcgtccagagccccgtgg

SEQ ID NO: 989495 - DNA, 25 bp, Homo sapien
accttcaatgttctcagtggcatct

SEQ ID NO: 989496 - DNA, 25 bp, Homo sapien
gggtatctgcagaagtcctctggcc

SEQ ID NO: 989497 - DNA, 25 bp, Homo sapien
tctggccagaacggctagaagggct

SEQ ID NO: 989498 - DNA, 25 bp, Homo sapien
catccacggcacagaaatcaaagcc

SEQ ID NO: 989499 - DNA, 25 bp, Homo sapien
ttaatcagaagcatccacggcacag

SEQ ID NO: 989500 - DNA, 25 bp, Homo sapien
agaataaacggcttaatcagaagca

SEQ ID NO: 989501 - DNA, 25 bp, Homo sapien
gaaatcaaagccataaccacaaaga

SEQ ID NO: 989502 - DNA, 25 bp, Homo sapien
tgctatggtcaaaagaaccagccag

SEQ ID NO: 989503 - DNA, 25 bp, Homo sapien
tcatagctgctatggtcaaaagaac

SEQ ID NO: 989504 - DNA, 25 bp, Homo sapien
gtttagaggagtgactcatagctgc

SEQ ID NO: 989505 - DNA, 25 bp, Homo sapien
tcggaaggctcggtcagggctgctg

SEQ ID NO: 989506 - DNA, 25 bp, Homo sapien
cactgtagttaaacagaaacatgtt

SEQ ID NO: 989507 - DNA, 25 bp, Homo sapien
tgcgttggaagagtcactgtagtta

SEQ ID NO: 989508 - DNA, 25 bp, Homo sapien
cagaaacatgttgatgaagtggatg

SEQ ID NO: 989509 - DNA, 25 bp, Homo sapien
tagaggggtgcgttggaagagtcac

SEQ ID NO: 989510 - DNA, 25 bp, Homo sapien
catctcagggataaattgcagaatg

SEQ ID NO: 989511 - DNA, 25 bp, Homo sapien
gatacatggacgtcaaagcagcacc

SEQ ID NO: 989512 - DNA, 25 bp, Homo sapien
catggacgtcaaagcagcaccattt

SEQ ID NO: 989513 - DNA, 25 bp, Homo sapien
ggcgtgctgagatacatggacgtca

SEQ ID NO: 989514 - DNA, 25 bp, Homo sapien
aaaaggctgaggatgacaccgaaaa

SEQ ID NO: 989515 - DNA, 25 bp, Homo sapien
tggacaattcccaggatcaccgaca

SEQ ID NO: 989516 - DNA, 25 bp, Homo sapien
accgacatcttcattttatacgagt

SEQ ID NO: 989517 - DNA, 25 bp, Homo sapien
cagaaatgtgagtttgtttgaagcc

SEQ ID NO: 989518 - DNA, 25 bp, Homo sapien
tgtagccaatctttgcaagcacgat

SEQ ID NO: 989519 - DNA, 25 bp, Homo sapien
tggggatcatgtgtacctgtcctgc

SEQ ID NO: 989520 - DNA, 25 bp, Homo sapien
tctcaagaagccgttcctgtagcca

SEQ ID NO: 989521 - DNA, 25 bp, Homo sapien
agcacgatgcgtaagacacagtccc

SEQ ID NO: 989522 - DNA, 25 bp, Homo sapien
gcactgggccaatagaaatgaacag

SEQ ID NO: 989523 - DNA, 25 bp, Homo sapien
tttggagcacaaggccgccacctgg

SEQ ID NO: 989524 - DNA, 25 bp, Homo sapien
gggccaatagaaatgaacagcttta

SEQ ID NO: 989525 - DNA, 25 bp, Homo sapien
atttggagcacaaggccgccacctg

SEQ ID NO: 989526 - DNA, 25 bp, Homo sapien
tgtgtcacaaaaacgtcagcagaag

SEQ ID NO: 989527 - DNA, 25 bp, Homo sapien
tgtaatatgcatactccccaggcaa

SEQ ID NO: 989528 - DNA, 25 bp, Homo sapien
taaccaccagggatatgattgatgg

SEQ ID NO: 989529 - DNA, 25 bp, Homo sapien
gcagggaacttaaacttgattagga

SEQ ID NO: 989530 - DNA, 25 bp, Homo sapien
cggatcaatcccaaacgggtatgga

SEQ ID NO: 989531 - DNA, 25 bp, Homo sapien
ggatcaatcccaaacgggtatggat

SEQ ID NO: 989532 - DNA, 25 bp, Homo sapien
gatcaatcccaaacgggtatggatt

SEQ ID NO: 989533 - DNA, 25 bp, Homo sapien
cagatatagactttcctccattaca

SEQ ID NO: 989534 - DNA, 25 bp, Homo sapien
gcagatatagactttcctccattac

SEQ ID NO: 989535 - DNA, 25 bp, Homo sapien
tgcagatatagactttcctccatta

SEQ ID NO: 989536 - DNA, 25 bp, Homo sapien
ctgcagatatagactttcctccatt

SEQ ID NO: 989537 - DNA, 25 bp, Homo sapien
tcacatatggctgagcattgctcca

SEQ ID NO: 989538 - DNA, 25 bp, Homo sapien
caagaccaaagagtcttgaattggg

SEQ ID NO: 989539 - DNA, 25 bp, Homo sapien
ttatactcctgacccttcacatatg

SEQ ID NO: 989540 - DNA, 25 bp, Homo sapien
taagagaacagcattcatacccatg

SEQ ID NO: 989541 - DNA, 25 bp, Homo sapien
gagccagtaagacccgtgaagtccc

SEQ ID NO: 989542 - DNA, 25 bp, Homo sapien
tctgtcccccatttatgacgttcac

SEQ ID NO: 989543 - DNA, 25 bp, Homo sapien
tggtgagccagtaagacccgtgaag

SEQ ID NO: 989544 - DNA, 25 bp, Homo sapien
tttatgacgttcaccacagattttg

SEQ ID NO: 989545 - DNA, 25 bp, Homo sapien
gggttggacactccaagaagagcca

SEQ ID NO: 989546 - DNA, 25 bp, Homo sapien
tcattgtagatcaaacccgtgtaga

SEQ ID NO: 989547 - DNA, 25 bp, Homo sapien
gccgtttctgaacatgggttggaca

SEQ ID NO: 989548 - DNA, 25 bp, Homo sapien
agatgttcaaggacttggagaagca

SEQ ID NO: 989549 - DNA, 25 bp, Homo sapien
agatagcgcccgtggaagaaggtgt

SEQ ID NO: 989550 - DNA, 25 bp, Homo sapien
gagagcaagcgtctctcattcagaa

SEQ ID NO: 989551 - DNA, 25 bp, Homo sapien
tccaaacatcacagcgaacaggaag

SEQ ID NO: 989552 - DNA, 25 bp, Homo sapien
tctgtcttctgggagagcaagcgtc

SEQ ID NO: 989553 - DNA, 25 bp, Homo sapien
gcagccaggagcatcacggttccat

SEQ ID NO: 989554 - DNA, 25 bp, Homo sapien
ggagacacacaacgcctgaggcctc

SEQ ID NO: 989555 - DNA, 25 bp, Homo sapien
tgcggaggggagacacacaacgcct

SEQ ID NO: 989556 - DNA, 25 bp, Homo sapien
ctgccacagctccacgatttgcatg

SEQ ID NO: 989557 - DNA, 25 bp, Homo sapien
aggggagacacacaacgcctgaggc

SEQ ID NO: 989558 - DNA, 25 bp, Homo sapien
gctgtgaatttattggtcctgttaa

SEQ ID NO: 989559 - DNA, 25 bp, Homo sapien
gacaccataggcatcaacaatattc

SEQ ID NO: 989560 - DNA, 25 bp, Homo sapien
tgggtttatctcccggtagctgccg

SEQ ID NO: 989561 - DNA, 25 bp, Homo sapien
tagctgccgacaccataggcatcaa

SEQ ID NO: 989562 - DNA, 25 bp, Homo sapien
gccctcttgatacgtgtggcatctg

SEQ ID NO: 989563 - DNA, 25 bp, Homo sapien
tgctgggtgacgtcgatgttgcaca

SEQ ID NO: 989564 - DNA, 25 bp, Homo sapien
gatgtggtagacagctttcatcttc

SEQ ID NO: 989565 - DNA, 25 bp, Homo sapien
cgggaaccagatctcggcgatgaca

SEQ ID NO: 989566 - DNA, 25 bp, Homo sapien
tctagcttatcgaacagtttcccaa

SEQ ID NO: 989567 - DNA, 25 bp, Homo sapien
caaccagaaaggcatagccagcatt

SEQ ID NO: 989568 - DNA, 25 bp, Homo sapien
aagacacagcttcgttccctctagc

SEQ ID NO: 989569 - DNA, 25 bp, Homo sapien
cagaaaggcatagccagcattccag

SEQ ID NO: 989570 - DNA, 25 bp, Homo sapien
cattgacgctctccaacatctctct

SEQ ID NO: 989571 - DNA, 25 bp, Homo sapien
tcacattgacgctctccaacatctc

SEQ ID NO: 989572 - DNA, 25 bp, Homo sapien
gcctcacattgacgctctccaacat

SEQ ID NO: 989573 - DNA, 25 bp, Homo sapien
ttccagcctcacattgacgctctcc

SEQ ID NO: 989574 - DNA, 25 bp, Homo sapien
ccaaaggaaacaggtgagttcttgc

SEQ ID NO: 989575 - DNA, 25 bp, Homo sapien
aggtgagttcttgctgcaaagcatt

SEQ ID NO: 989576 - DNA, 25 bp, Homo sapien
tccaaaggaaacaggtgagttcttg

SEQ ID NO: 989577 - DNA, 25 bp, Homo sapien
ggtgagttcttgctgcaaagcattc

SEQ ID NO: 989578 - DNA, 25 bp, Homo sapien
tagttagatggccagcctatcctag

SEQ ID NO: 989579 - DNA, 25 bp, Homo sapien
gatggccagcctatcctagaataac

SEQ ID NO: 989580 - DNA, 25 bp, Homo sapien
ttgctgactttagttagatggccag

SEQ ID NO: 989581 - DNA, 25 bp, Homo sapien
tatcctagaataactgcgtctttgg

SEQ ID NO: 989582 - DNA, 25 bp, Homo sapien
tccttggtaaaatatgatgaatatg

SEQ ID NO: 989583 - DNA, 25 bp, Homo sapien
aatatgatgaatatgttcttctgaa

SEQ ID NO: 989584 - DNA, 25 bp, Homo sapien
ctgagctgctctccttggtaaaata

SEQ ID NO: 989585 - DNA, 25 bp, Homo sapien
tatgatgaatatgttcttctgaatt

SEQ ID NO: 989586 - DNA, 25 bp, Homo sapien
cacagtaaccgctcaaaggaagcca

SEQ ID NO: 989587 - DNA, 25 bp, Homo sapien
gggcgtccatctcactgaacttcaa

SEQ ID NO: 989588 - DNA, 25 bp, Homo sapien
gtttcctcggcagattcgccacagt

SEQ ID NO: 989589 - DNA, 25 bp, Homo sapien
tgaacttcaagtacacgtttcctcg

SEQ ID NO: 989590 - DNA, 25 bp, Homo sapien
tctccctgttgatcacaccggctat

SEQ ID NO: 989591 - DNA, 25 bp, Homo sapien
cctctccctgttgatcacaccggct

SEQ ID NO: 989592 - DNA, 25 bp, Homo sapien
cctgttgatcacaccggctatgaac

SEQ ID NO: 989593 - DNA, 25 bp, Homo sapien
tccctgttgatcacaccggctatga

SEQ ID NO: 989594 - DNA, 25 bp, Homo sapien
agacattccttaaggcacagggatt

SEQ ID NO: 989595 - DNA, 25 bp, Homo sapien
gaagggaagacattccttaaggcac

SEQ ID NO: 989596 - DNA, 25 bp, Homo sapien
aggcacagggattgggatgcagaga

SEQ ID NO: 989597 - DNA, 25 bp, Homo sapien
ccttaaggcacagggattgggatgc

SEQ ID NO: 989598 - DNA, 25 bp, Homo sapien
tcagtaaagaaatcatcagctaaat

SEQ ID NO: 989599 - DNA, 25 bp, Homo sapien
cccaactttccggtcatatatgcag

SEQ ID NO: 989600 - DNA, 25 bp, Homo sapien
aaatcatcagctaaattggtttccg

SEQ ID NO: 989601 - DNA, 25 bp, Homo sapien
gcaggcactgctttcaactccagga

SEQ ID NO: 989602 - DNA, 25 bp, Homo sapien
gaagctttgtttcaaggcctgctgg

SEQ ID NO: 989603 - DNA, 25 bp, Homo sapien
ctccttccagtttttctagaacagt

SEQ ID NO: 989604 - DNA, 25 bp, Homo sapien
tgctggttctggttggcttcctgta

SEQ ID NO: 989605 - DNA, 25 bp, Homo sapien
agttctgtcagttctaggaagcttt

SEQ ID NO: 989606 - DNA, 25 bp, Homo sapien
agggtaatcatttcccgtgggagcg

SEQ ID NO: 989607 - DNA, 25 bp, Homo sapien
gggtcagtgggcttttctcgagcaa

SEQ ID NO: 989608 - DNA, 25 bp, Homo sapien
ctccagggtaatcatttcccgtggg

SEQ ID NO: 989609 - DNA, 25 bp, Homo sapien
aactgaactacaatctcattttgca

SEQ ID NO: 989610 - DNA, 25 bp, Homo sapien
gattcacaccttctgacttcattca

SEQ ID NO: 989611 - DNA, 25 bp, Homo sapien
tctgacttcattcacaaatttcctt

SEQ ID NO: 989612 - DNA, 25 bp, Homo sapien
aaatttcctttgaaagctgttcaca

SEQ ID NO: 989613 - DNA, 25 bp, Homo sapien
gaggattctctccagtgattcacac

SEQ ID NO: 989614 - DNA, 25 bp, Homo sapien
tgttgtgcaagagttatctactccc

SEQ ID NO: 989615 - DNA, 25 bp, Homo sapien
gttgtgcaagagttatctactccca

SEQ ID NO: 989616 - DNA, 25 bp, Homo sapien
ttgtgcaagagttatctactcccac

SEQ ID NO: 989617 - DNA, 25 bp, Homo sapien
ccttcctcttatctccaaagaactc

SEQ ID NO: 989618 - DNA, 25 bp, Homo sapien
tcctcttatctccaaagaactcagt

SEQ ID NO: 989619 - DNA, 25 bp, Homo sapien
ttcctcttatctccaaagaactcag

SEQ ID NO: 989620 - DNA, 25 bp, Homo sapien
ctcttatctccaaagaactcagtac

SEQ ID NO: 989621 - DNA, 25 bp, Homo sapien
atctcctcgcttcgaaacacagaca

SEQ ID NO: 989622 - DNA, 25 bp, Homo sapien
aacacatctcctcgcttcgaaacac

SEQ ID NO: 989623 - DNA, 25 bp, Homo sapien
gagaaacagttgtgacaaacacatc

SEQ ID NO: 989624 - DNA, 25 bp, Homo sapien
gccacacagcaatatgcagcttcca

SEQ ID NO: 989625 - DNA, 25 bp, Homo sapien
tggaaactcaatatcctcctctcca

SEQ ID NO: 989626 - DNA, 25 bp, Homo sapien
cctgggtttggaaactcaatatcct

SEQ ID NO: 989627 - DNA, 25 bp, Homo sapien
cccttcaggcccttcgcccaggctt

SEQ ID NO: 989628 - DNA, 25 bp, Homo sapien
aaactcaatatcctcctctccaccg

SEQ ID NO: 989629 - DNA, 25 bp, Homo sapien
gcagacggtggtttccccaacctga

SEQ ID NO: 989630 - DNA, 25 bp, Homo sapien
aggaggcagctctgttgtatcaaca

SEQ ID NO: 989631 - DNA, 25 bp, Homo sapien
gcagctctgttgtatcaacactggc

SEQ ID NO: 989632 - DNA, 25 bp, Homo sapien
ggtctggcagccctccgtgcttgct

SEQ ID NO: 989633 - DNA, 25 bp, Homo sapien
cttgctagcagtcctgggcggagca

SEQ ID NO: 989634 - DNA, 25 bp, Homo sapien
acgaccacctcattccttaggagaa

SEQ ID NO: 989635 - DNA, 25 bp, Homo sapien
agaagatcctcctccaccacggagc

SEQ ID NO: 989636 - DNA, 25 bp, Homo sapien
cacctcattccttaggagaagatcc

SEQ ID NO: 989637 - DNA, 25 bp, Homo sapien
tcattccttaggagaagatcctcct

SEQ ID NO: 989638 - DNA, 25 bp, Homo sapien
tcctgtcttcacttgccacgtcatg

SEQ ID NO: 989639 - DNA, 25 bp, Homo sapien
gtcttcacttgccacgtcatggagg

SEQ ID NO: 989640 - DNA, 25 bp, Homo sapien
ctgtcttcacttgccacgtcatgga

SEQ ID NO: 989641 - DNA, 25 bp, Homo sapien
cttcacttgccacgtcatggaggaa

SEQ ID NO: 989642 - DNA, 25 bp, Homo sapien
cggctcacctgcaccgggcactcag

SEQ ID NO: 989643 - DNA, 25 bp, Homo sapien
ccgctgccacccgggccaccctgat

SEQ ID NO: 989644 - DNA, 25 bp, Homo sapien
gcaggcactcggcacaactccgcag

SEQ ID NO: 989645 - DNA, 25 bp, Homo sapien
aactccgcaggaccggctcacctgc

SEQ ID NO: 989646 - DNA, 25 bp, Homo sapien
aactgttcagcccagcattcagctc

SEQ ID NO: 989647 - DNA, 25 bp, Homo sapien
caggagtaaggattccgactggtcc

SEQ ID NO: 989648 - DNA, 25 bp, Homo sapien
gaatcaaggatattcctccaagccc

SEQ ID NO: 989649 - DNA, 25 bp, Homo sapien
cgaatgcttgatctgcctggagcct

SEQ ID NO: 989650 - DNA, 25 bp, Homo sapien
cagttgttgtgaatgggccactcca

SEQ ID NO: 989651 - DNA, 25 bp, Homo sapien
agttgttgtgaatgggccactccat

SEQ ID NO: 989652 - DNA, 25 bp, Homo sapien
cttatgaggagttgataggttcacc

SEQ ID NO: 989653 - DNA, 25 bp, Homo sapien
acctggatagcagttaaagagagtc

SEQ ID NO: 989654 - DNA, 25 bp, Homo sapien
tcacagcgggacaccagccgtggca

SEQ ID NO: 989655 - DNA, 25 bp, Homo sapien
caggaaatgccttatgaggagttga

SEQ ID NO: 989656 - DNA, 25 bp, Homo sapien
tcaaaaactctacagcacattagaa

SEQ ID NO: 989657 - DNA, 25 bp, Homo sapien
cagtgcagctattgaaggatagaaa

SEQ ID NO: 989658 - DNA, 25 bp, Homo sapien
gtaaacatggaaaccaaatacttgc

SEQ ID NO: 989659 - DNA, 25 bp, Homo sapien
cataaaaccgacaaatagaagggag

SEQ ID NO: 989660 - DNA, 25 bp, Homo sapien
gcctcaatttgctctgcacatttcg

SEQ ID NO: 989661 - DNA, 25 bp, Homo sapien
gtttgaggaccagcaaaccatgatt

SEQ ID NO: 989662 - DNA, 25 bp, Homo sapien
cccatactgagatttcagtgcctgt

SEQ ID NO: 989663 - DNA, 25 bp, Homo sapien
gcacatttcgtacattaacgctcat

SEQ ID NO: 989664 - DNA, 25 bp, Homo sapien
caagtcctctggtgcttagagcaac

SEQ ID NO: 989665 - DNA, 25 bp, Homo sapien
caggaggaacagtacagcatatgcg

SEQ ID NO: 989666 - DNA, 25 bp, Homo sapien
tgtaatcagggactgcaagagactc

SEQ ID NO: 989667 - DNA, 25 bp, Homo sapien
tattcgtgatgctccaagtagccca

SEQ ID NO: 989668 - DNA, 25 bp, Homo sapien
gggagactcctatagcacagaaccg

SEQ ID NO: 989669 - DNA, 25 bp, Homo sapien
tgctccggaggtagaaatgaccacg

SEQ ID NO: 989670 - DNA, 25 bp, Homo sapien
tttagaaatgtgaagtgacccctga

SEQ ID NO: 989671 - DNA, 25 bp, Homo sapien
taagcaggctctagtactggcgctg

SEQ ID NO: 989672 - DNA, 25 bp, Homo sapien
gtgctttgcctcacagtccgcatgc

SEQ ID NO: 989673 - DNA, 25 bp, Homo sapien
tgctttgcctcacagtccgcatgcc

SEQ ID NO: 989674 - DNA, 25 bp, Homo sapien
cgtgctttgcctcacagtccgcatg

SEQ ID NO: 989675 - DNA, 25 bp, Homo sapien
ggcaaacacccactgcttaaaagtc

SEQ ID NO: 989676 - DNA, 25 bp, Homo sapien
gcaaacacccactgcttaaaagtca

SEQ ID NO: 989677 - DNA, 25 bp, Homo sapien
cggcaaacacccactgcttaaaagt

SEQ ID NO: 989678 - DNA, 25 bp, Homo sapien
gacagatagataacccactatgctc

SEQ ID NO: 989679 - DNA, 25 bp, Homo sapien
gataacccactatgctccacaaagg

SEQ ID NO: 989680 - DNA, 25 bp, Homo sapien
tatggcgtggccaaacggctgcttg

SEQ ID NO: 989681 - DNA, 25 bp, Homo sapien
tggagaaaaatgtgtaggtagcagt

SEQ ID NO: 989682 - DNA, 25 bp, Homo sapien
tgtagatcttcacagccctggtcgt

SEQ ID NO: 989683 - DNA, 25 bp, Homo sapien
atgactgcaaaagcatccttccagc

SEQ ID NO: 989684 - DNA, 25 bp, Homo sapien
ccctggtcgtttccttgctgcatga

SEQ ID NO: 989685 - DNA, 25 bp, Homo sapien
tgtccccatatcaaagcagatcaag

SEQ ID NO: 989686 - DNA, 25 bp, Homo sapien
tacaatctaggatgttggcacagca

SEQ ID NO: 989687 - DNA, 25 bp, Homo sapien
tgtagagtgcttccataaacggact

SEQ ID NO: 989688 - DNA, 25 bp, Homo sapien
gagcctctgaggatcgcctgataag

SEQ ID NO: 989689 - DNA, 25 bp, Homo sapien
caggttttgatcagtcagagcccca

SEQ ID NO: 989690 - DNA, 25 bp, Homo sapien
gagatgatcccctcttagcccaaag

SEQ ID NO: 989691 - DNA, 25 bp, Homo sapien
tgttcagacaattgccagcccagtg

SEQ ID NO: 989692 - DNA, 25 bp, Homo sapien
cagttaggacctcttgaaagccgca

SEQ ID NO: 989693 - DNA, 25 bp, Homo sapien
aaagcagcaggttcatcgtacacgt

SEQ ID NO: 989694 - DNA, 25 bp, Homo sapien
ggatacttggcaaatctgcgaggcg

SEQ ID NO: 989695 - DNA, 25 bp, Homo sapien
tttggtcttgcttccacaggaagcg

SEQ ID NO: 989696 - DNA, 25 bp, Homo sapien
gaagcggatacttggcaaatctgcg

SEQ ID NO: 989697 - DNA, 25 bp, Homo sapien
ccacaggaagcggatacttggcaaa

SEQ ID NO: 989698 - DNA, 25 bp, Homo sapien
tgggagagccggaggagctcctcgc

SEQ ID NO: 989699 - DNA, 25 bp, Homo sapien
gagccggaggagctcctcgcggatt

SEQ ID NO: 989700 - DNA, 25 bp, Homo sapien
tggaagttctgcacggtgctctgtt

SEQ ID NO: 989701 - DNA, 25 bp, Homo sapien
gttctgcacggtgctctgtttctgg

SEQ ID NO: 989702 - DNA, 25 bp, Homo sapien
ccaggctggaggtcttccgtggagc

SEQ ID NO: 989703 - DNA, 25 bp, Homo sapien
gagctggtggggtaacccagcccag

SEQ ID NO: 989704 - DNA, 25 bp, Homo sapien
ggagtggccaggctggaggtcttcc

SEQ ID NO: 989705 - DNA, 25 bp, Homo sapien
gctggaggtcttccgtggagctggt

SEQ ID NO: 989706 - DNA, 25 bp, Homo sapien
tagcggtgaagaagaatactcttga

SEQ ID NO: 989707 - DNA, 25 bp, Homo sapien
tgaagaagaatactcttgatgtccg

SEQ ID NO: 989708 - DNA, 25 bp, Homo sapien
ctgaaatagcggtgaagaagaatac

SEQ ID NO: 989709 - DNA, 25 bp, Homo sapien
aatactcttgatgtccgagcatgtg

SEQ ID NO: 989710 - DNA, 25 bp, Homo sapien
tggcaaacgtcactgtacttcctac

SEQ ID NO: 989711 - DNA, 25 bp, Homo sapien
aactcagccctctaacagggccctg

SEQ ID NO: 989712 - DNA, 25 bp, Homo sapien
gccctgctgcctatgctgcaggtga

SEQ ID NO: 989713 - DNA, 25 bp, Homo sapien
gccgaaacatcaaatgcaaactggc

SEQ ID NO: 989714 - DNA, 25 bp, Homo sapien
gaagaataagccgaaacatcaaatg

SEQ ID NO: 989715 - DNA, 25 bp, Homo sapien
ctccccgtacgaaggccagcctggc

SEQ ID NO: 989716 - DNA, 25 bp, Homo sapien
tcctccccgtacgaaggccagcctg

SEQ ID NO: 989717 - DNA, 25 bp, Homo sapien
tcgtcctccccgtacgaaggccagc

SEQ ID NO: 989718 - DNA, 25 bp, Homo sapien
cctccccgtacgaaggccagcctgg

SEQ ID NO: 989719 - DNA, 25 bp, Homo sapien
tctgcttggcgggatttccactggc

SEQ ID NO: 989720 - DNA, 25 bp, Homo sapien
gcttggcgggatttccactggctga

SEQ ID NO: 989721 - DNA, 25 bp, Homo sapien
ttggcgggatttccactggctgagc

SEQ ID NO: 989722 - DNA, 25 bp, Homo sapien
tgcctctgcttggcgggatttccac

SEQ ID NO: 989723 - DNA, 25 bp, Homo sapien
tccaaagtgctcagacctagatctt

SEQ ID NO: 989724 - DNA, 25 bp, Homo sapien
tacaagctgaaaaaagcaccttctt

SEQ ID NO: 989725 - DNA, 25 bp, Homo sapien
gtgccgtgaatttcacatgaagggc

SEQ ID NO: 989726 - DNA, 25 bp, Homo sapien
cctggaggaagcgtgccgtgaattt

SEQ ID NO: 989727 - DNA, 25 bp, Homo sapien
aatggaagctaaacagccacatata

SEQ ID NO: 989728 - DNA, 25 bp, Homo sapien
ggcaccagctctgtagactgcagca

SEQ ID NO: 989729 - DNA, 25 bp, Homo sapien
gacggcatctcctccgagtagatcc

SEQ ID NO: 989730 - DNA, 25 bp, Homo sapien
gctctgtagactgcagcaaaccggg

SEQ ID NO: 989731 - DNA, 25 bp, Homo sapien
tgtggtacccccgacaggccgaggc

SEQ ID NO: 989732 - DNA, 25 bp, Homo sapien
tacctttgctgcttttggatcacaa

SEQ ID NO: 989733 - DNA, 25 bp, Homo sapien
ctcgccagttttacctttgctgctt

SEQ ID NO: 989734 - DNA, 25 bp, Homo sapien
cgccagttttacctttgctgctttt

SEQ ID NO: 989735 - DNA, 25 bp, Homo sapien
cctttgctgcttttggatcacaaag

SEQ ID NO: 989736 - DNA, 25 bp, Homo sapien
cttcttctggaatccgcaggtgtcc

SEQ ID NO: 989737 - DNA, 25 bp, Homo sapien
taggtgcttcttctggaatccgcag

SEQ ID NO: 989738 - DNA, 25 bp, Homo sapien
ggctttgcctggcttcctaggtgct

SEQ ID NO: 989739 - DNA, 25 bp, Homo sapien
tgcctggcttcctaggtgcttcttc

SEQ ID NO: 989740 - DNA, 25 bp, Homo sapien
gagtcattccatagtcttcgtatct

SEQ ID NO: 989741 - DNA, 25 bp, Homo sapien
caatggacccgtcgggggagtcatt

SEQ ID NO: 989742 - DNA, 25 bp, Homo sapien
gggagtcattccatagtcttcgtat

SEQ ID NO: 989743 - DNA, 25 bp, Homo sapien
gcaatggacccgtcgggggagtcat

SEQ ID NO: 989744 - DNA, 25 bp, Homo sapien
catgtggaaccttgtggagttcccc

SEQ ID NO: 989745 - DNA, 25 bp, Homo sapien
ccatccccttggctgtcatgtggaa

SEQ ID NO: 989746 - DNA, 25 bp, Homo sapien
ccccttggctgtcatgtggaacctt

SEQ ID NO: 989747 - DNA, 25 bp, Homo sapien
tggctgtcatgtggaaccttgtgga

SEQ ID NO: 989748 - DNA, 25 bp, Homo sapien
tacaacctgattttatctgtgccca

SEQ ID NO: 989749 - DNA, 25 bp, Homo sapien
tattctcaatggatgatgactctgc

SEQ ID NO: 989750 - DNA, 25 bp, Homo sapien
cctgtgtccctaatctgtgttgtct

SEQ ID NO: 989751 - DNA, 25 bp, Homo sapien
tctgctctgaggataaaaaccatga

SEQ ID NO: 989752 - DNA, 25 bp, Homo sapien
gggcttcctctgactgactgcatga

SEQ ID NO: 989753 - DNA, 25 bp, Homo sapien
cagaaagcagatcatgggattctca

SEQ ID NO: 989754 - DNA, 25 bp, Homo sapien
tgggtttccggtttgcagaaagcag

SEQ ID NO: 989755 - DNA, 25 bp, Homo sapien
ttcagactggaaaccatcgctcagg

SEQ ID NO: 989756 - DNA, 25 bp, Homo sapien
actgcagggattgttggccgtctgg

SEQ ID NO: 989757 - DNA, 25 bp, Homo sapien
tctgggctgggctgtagaaggaccc

SEQ ID NO: 989758 - DNA, 25 bp, Homo sapien
ccactgggtggctcgcctctcttcc

SEQ ID NO: 989759 - DNA, 25 bp, Homo sapien
gggtgctgtttgcgggcaggccggg

SEQ ID NO: 989760 - DNA, 25 bp, Homo sapien
ggcaaaggcgtcgtccaggagggag

SEQ ID NO: 989761 - DNA, 25 bp, Homo sapien
caaaggcgtcgtccaggagggagtg

SEQ ID NO: 989762 - DNA, 25 bp, Homo sapien
gcaaaggcgtcgtccaggagggagt

SEQ ID NO: 989763 - DNA, 25 bp, Homo sapien
tctggcgtgcctcctcgatggacgg

SEQ ID NO: 989764 - DNA, 25 bp, Homo sapien
ggtctggcgtgcctcctcgatggac

SEQ ID NO: 989765 - DNA, 25 bp, Homo sapien
cgtgcctcctcgatggacggctggg

SEQ ID NO: 989766 - DNA, 25 bp, Homo sapien
tggcgtgcctcctcgatggacggct

SEQ ID NO: 989767 - DNA, 25 bp, Homo sapien
cccagttccaccgaggatggtgtct

SEQ ID NO: 989768 - DNA, 25 bp, Homo sapien
acctccccagttccaccgaggatgg

SEQ ID NO: 989769 - DNA, 25 bp, Homo sapien
gatggtgtctgcacatcggctggga

SEQ ID NO: 989770 - DNA, 25 bp, Homo sapien
cacatcggctgggaggtcaggatcc

SEQ ID NO: 989771 - DNA, 25 bp, Homo sapien
ggaagtgaacatttctactgaaagc

SEQ ID NO: 989772 - DNA, 25 bp, Homo sapien
gaagtgaacatttctactgaaagcc

SEQ ID NO: 989773 - DNA, 25 bp, Homo sapien
ctggaagtgaacatttctactgaaa

SEQ ID NO: 989774 - DNA, 25 bp, Homo sapien
aagtgaacatttctactgaaagccc

SEQ ID NO: 989775 - DNA, 25 bp, Homo sapien
ctccatgagcccaaacagcatggtg

SEQ ID NO: 989776 - DNA, 25 bp, Homo sapien
gctccatgagcccaaacagcatggt

SEQ ID NO: 989777 - DNA, 25 bp, Homo sapien
tccatgagcccaaacagcatggtga

SEQ ID NO: 989778 - DNA, 25 bp, Homo sapien
aggctccatgagcccaaacagcatg

SEQ ID NO: 989779 - DNA, 25 bp, Homo sapien
agcctggtcggcagtgtaccaccaa

SEQ ID NO: 989780 - DNA, 25 bp, Homo sapien
attttcttgaggagcagatgaggaa

SEQ ID NO: 989781 - DNA, 25 bp, Homo sapien
ttggaaggaacctgtgctcctttcc

SEQ ID NO: 989782 - DNA, 25 bp, Homo sapien
gctcctttccttgtgaggtggataa

SEQ ID NO: 989783 - DNA, 25 bp, Homo sapien
tccggtggctgcgtatgtgactcta

SEQ ID NO: 989784 - DNA, 25 bp, Homo sapien
agcgatgttcctggcggtgattccg

SEQ ID NO: 989785 - DNA, 25 bp, Homo sapien
tctccagaaacagaagcgatgttcc

SEQ ID NO: 989786 - DNA, 25 bp, Homo sapien
gaaacagaagcgatgttcctggcgg

SEQ ID NO: 989787 - DNA, 25 bp, Homo sapien
tggattcccaatggcccccgtgaat

SEQ ID NO: 989788 - DNA, 25 bp, Homo sapien
cttctataccgagagagatgatctg

SEQ ID NO: 989789 - DNA, 25 bp, Homo sapien
ttcagagaaggctaaacttctatac

SEQ ID NO: 989790 - DNA, 25 bp, Homo sapien
tgccaatctcattctcagtggccag

SEQ ID NO: 989791 - DNA, 25 bp, Homo sapien
gaaatggctggttgcataaggtcta

SEQ ID NO: 989792 - DNA, 25 bp, Homo sapien
tctgtgagtgcctccaggaggtgaa

SEQ ID NO: 989793 - DNA, 25 bp, Homo sapien
ggtctatctaaagcgatcacatcca

SEQ ID NO: 989794 - DNA, 25 bp, Homo sapien
cctggtatggagtttaggacgccct

SEQ ID NO: 989795 - DNA, 25 bp, Homo sapien
ccgagttccagaaactggagtcggt

SEQ ID NO: 989796 - DNA, 25 bp, Homo sapien
ccagaaactggagtcggtggcacgc

SEQ ID NO: 989797 - DNA, 25 bp, Homo sapien
agttccagaaactggagtcggtggc

SEQ ID NO: 989798 - DNA, 25 bp, Homo sapien
agaaactggagtcggtggcacgcac

SEQ ID NO: 989799 - DNA, 25 bp, Homo sapien
tgacctggtgtttccggcgaggctt

SEQ ID NO: 989800 - DNA, 25 bp, Homo sapien
gatgagccggtccttctcagcgtcg

SEQ ID NO: 989801 - DNA, 25 bp, Homo sapien
tcctgtaggtgccatcgctgtctgt

SEQ ID NO: 989802 - DNA, 25 bp, Homo sapien
gcgaggcttgggagaacgttttatc

SEQ ID NO: 989803 - DNA, 25 bp, Homo sapien
caggaaaaagagaaattatcttcgt

SEQ ID NO: 989804 - DNA, 25 bp, Homo sapien
gccaggaaaaagagaaattatcttc

SEQ ID NO: 989805 - DNA, 25 bp, Homo sapien
ctgccaggaaaaagagaaattatct

SEQ ID NO: 989806 - DNA, 25 bp, Homo sapien
tgccaggaaaaagagaaattatctt

SEQ ID NO: 989807 - DNA, 25 bp, Homo sapien
taggatgtgctacccctggaaacac

SEQ ID NO: 989808 - DNA, 25 bp, Homo sapien
gaagctcagagcatacctaaacaga

SEQ ID NO: 989809 - DNA, 25 bp, Homo sapien
tattaacccacatgaagcaacacag

SEQ ID NO: 989810 - DNA, 25 bp, Homo sapien
tataaacgccatgtacgagacagtc

SEQ ID NO: 989811 - DNA, 25 bp, Homo sapien
tctaccaccgggaactcgtagtgcc

SEQ ID NO: 989812 - DNA, 25 bp, Homo sapien
tcgatctcagacttgtgccgcagcg

SEQ ID NO: 989813 - DNA, 25 bp, Homo sapien
tcttgttgcgatggtgctcgatctc

SEQ ID NO: 989814 - DNA, 25 bp, Homo sapien
gctccttagtgtcgcccgaggacag

SEQ ID NO: 989815 - DNA, 25 bp, Homo sapien
cataagccaccgggcttagccgagt

SEQ ID NO: 989816 - DNA, 25 bp, Homo sapien
ataagccaccgggcttagccgagtt

SEQ ID NO: 989817 - DNA, 25 bp, Homo sapien
gattttattgctttccgccactcgg

SEQ ID NO: 989818 - DNA, 25 bp, Homo sapien
gctcatttcccgaactgggcagtgg

SEQ ID NO: 989819 - DNA, 25 bp, Homo sapien
cggctgcatggcgataagctggatc

SEQ ID NO: 989820 - DNA, 25 bp, Homo sapien
gggagatcctgtccacgtgctcgaa

SEQ ID NO: 989821 - DNA, 25 bp, Homo sapien
ctcccactgtagtcacggcccttgc

SEQ ID NO: 989822 - DNA, 25 bp, Homo sapien
ttgcttcaccctcgctgaactgttc

SEQ ID NO: 989823 - DNA, 25 bp, Homo sapien
actgtagtcacggcccttgcttcac

SEQ ID NO: 989824 - DNA, 25 bp, Homo sapien
ggcccttgcttcaccctcgctgaac

SEQ ID NO: 989825 - DNA, 25 bp, Homo sapien
gaggggatgcacaaaccctgggcca

SEQ ID NO: 989826 - DNA, 25 bp, Homo sapien
aggggatgcacaaaccctgggccac

SEQ ID NO: 989827 - DNA, 25 bp, Homo sapien
ggggatgcacaaaccctgggccact

SEQ ID NO: 989828 - DNA, 25 bp, Homo sapien
gggccacgctcatcttctttgttgc

SEQ ID NO: 989829 - DNA, 25 bp, Homo sapien
aggggccacgctcatcttctttgtt

SEQ ID NO: 989830 - DNA, 25 bp, Homo sapien
tttgttgcctttcaattttagtcta

SEQ ID NO: 989831 - DNA, 25 bp, Homo sapien
tatggaatgcttccccaatatgcat

SEQ ID NO: 989832 - DNA, 25 bp, Homo sapien
ccgtagagtcagcatctgagggaga

SEQ ID NO: 989833 - DNA, 25 bp, Homo sapien
ttatctcctgcgtccctctcgctgg

SEQ ID NO: 989834 - DNA, 25 bp, Homo sapien
tcttcactgaccgtagagtcagcat

SEQ ID NO: 989835 - DNA, 25 bp, Homo sapien
tcgttgacggctcccggcgtcttat

SEQ ID NO: 989836 - DNA, 25 bp, Homo sapien
ggcacgtctccattttccgagggcg

SEQ ID NO: 989837 - DNA, 25 bp, Homo sapien
gatgctgcttagcaaaatcgaagcc

SEQ ID NO: 989838 - DNA, 25 bp, Homo sapien
agtggcgctggctcatgaataatca

SEQ ID NO: 989839 - DNA, 25 bp, Homo sapien
ttattgtgctgacccagatgctgct

SEQ ID NO: 989840 - DNA, 25 bp, Homo sapien
gttaacccggaatccaaggctgatg

SEQ ID NO: 989841 - DNA, 25 bp, Homo sapien
gatgagaggagcacaacttctgacc

SEQ ID NO: 989842 - DNA, 25 bp, Homo sapien
tgtgctggcaattccacaactccaa

SEQ ID NO: 989843 - DNA, 25 bp, Homo sapien
acttctgacccaagactgtgctggc

SEQ ID NO: 989844 - DNA, 25 bp, Homo sapien
catccttatactcctggatgtctgc

SEQ ID NO: 989845 - DNA, 25 bp, Homo sapien
tctgctttcggatggctcgtccttc

SEQ ID NO: 989846 - DNA, 25 bp, Homo sapien
gatgtctgctttcggatggctcgtc

SEQ ID NO: 989847 - DNA, 25 bp, Homo sapien
cctggatgtctgctttcggatggct

SEQ ID NO: 989848 - DNA, 25 bp, Homo sapien
tccgagagtatggtgaggcgcatca

SEQ ID NO: 989849 - DNA, 25 bp, Homo sapien
tgtgccagcaaaacacgactgagct

SEQ ID NO: 989850 - DNA, 25 bp, Homo sapien
tatagggtgggttcctgtgccagca

SEQ ID NO: 989851 - DNA, 25 bp, Homo sapien
gactgagcttctgcaacactggcaa

SEQ ID NO: 989852 - DNA, 25 bp, Homo sapien
ccttttctgtaaacctgttgtcagg

SEQ ID NO: 989853 - DNA, 25 bp, Homo sapien
tgcaggaccttttctgtaaacctgt

SEQ ID NO: 989854 - DNA, 25 bp, Homo sapien
gatgtatgggcaggtctttgcagcc

SEQ ID NO: 989855 - DNA, 25 bp, Homo sapien
taaacctgttgtcaggatgtatggg

SEQ ID NO: 989856 - DNA, 25 bp, Homo sapien
ttttgaccccaagagacgctgtgct

SEQ ID NO: 989857 - DNA, 25 bp, Homo sapien
cttccatggcagtgtatacgttagg

SEQ ID NO: 989858 - DNA, 25 bp, Homo sapien
catttgatttacagccacatctggg

SEQ ID NO: 989859 - DNA, 25 bp, Homo sapien
gctctaagggctggaagttccatct

SEQ ID NO: 989860 - DNA, 25 bp, Homo sapien
tcaaattaggtgtgagtgaattaac

SEQ ID NO: 989861 - DNA, 25 bp, Homo sapien
caaaactgcttataggaacactggg

SEQ ID NO: 989862 - DNA, 25 bp, Homo sapien
cacaaaactgcttataggaacactg

SEQ ID NO: 989863 - DNA, 25 bp, Homo sapien
cctgccccacaaaactgcttatagg

SEQ ID NO: 989864 - DNA, 25 bp, Homo sapien
cccacaaaactgcttataggaacac

SEQ ID NO: 989865 - DNA, 25 bp, Homo sapien
caggctgaaagtctagcttgtctgt

SEQ ID NO: 989866 - DNA, 25 bp, Homo sapien
ttgctctgggattccggagacggcc

SEQ ID NO: 989867 - DNA, 25 bp, Homo sapien
gcggcatagtttccagtagaggatg

SEQ ID NO: 989868 - DNA, 25 bp, Homo sapien
actgggatgaccacgccaacaatga

SEQ ID NO: 989869 - DNA, 25 bp, Homo sapien
tacactgtggagtgacgtgaggata

SEQ ID NO: 989870 - DNA, 25 bp, Homo sapien
gacgtgaggataggtgggagagaaa

SEQ ID NO: 989871 - DNA, 25 bp, Homo sapien
ctctgtctacactgtggagtgacgt

SEQ ID NO: 989872 - DNA, 25 bp, Homo sapien
tgtctacactgtggagtgacgtgag

SEQ ID NO: 989873 - DNA, 25 bp, Homo sapien
taatcaggtccgaagacttgactgc

SEQ ID NO: 989874 - DNA, 25 bp, Homo sapien
gggcaatgacaccttgaattcggta

SEQ ID NO: 989875 - DNA, 25 bp, Homo sapien
acaaagtagatgagctgtaccggat

SEQ ID NO: 989876 - DNA, 25 bp, Homo sapien
ttcggtaacccaagatgatggctgc

SEQ ID NO: 989877 - DNA, 25 bp, Homo sapien
gccattggcaacatgcagctgctac

SEQ ID NO: 989878 - DNA, 25 bp, Homo sapien
tctacatttgccattggcaacatgc

SEQ ID NO: 989879 - DNA, 25 bp, Homo sapien
gctccgagctccttattttacatgt

SEQ ID NO: 989880 - DNA, 25 bp, Homo sapien
aaaaggatcagcgagggctccgagc

SEQ ID NO: 989881 - DNA, 25 bp, Homo sapien
ttctctgtccacacgtatgggtttg

SEQ ID NO: 989882 - DNA, 25 bp, Homo sapien
cacgtatgggtttgtaacactgccc

SEQ ID NO: 989883 - DNA, 25 bp, Homo sapien
tctgtccacacgtatgggtttgtaa

SEQ ID NO: 989884 - DNA, 25 bp, Homo sapien
gtccacacgtatgggtttgtaacac

SEQ ID NO: 989885 - DNA, 25 bp, Homo sapien
cagatcgtgtctaaagatccttaac

SEQ ID NO: 989886 - DNA, 25 bp, Homo sapien
tgttctttatgcttcgtcctgagaa

SEQ ID NO: 989887 - DNA, 25 bp, Homo sapien
gatccttaacaacacacgtccaaac

SEQ ID NO: 989888 - DNA, 25 bp, Homo sapien
gatcagcaatttcacgatttcactg

SEQ ID NO: 989889 - DNA, 25 bp, Homo sapien
tcccctcctcctttgatgtggagta

SEQ ID NO: 989890 - DNA, 25 bp, Homo sapien
tccttcccctcctcctttgatgtgg

SEQ ID NO: 989891 - DNA, 25 bp, Homo sapien
cttcccctcctcctttgatgtggag

SEQ ID NO: 989892 - DNA, 25 bp, Homo sapien
cccctcctcctttgatgtggagtac

SEQ ID NO: 989893 - DNA, 25 bp, Homo sapien
gcttgcgttccatctcggcttgaaa

SEQ ID NO: 989894 - DNA, 25 bp, Homo sapien
tccacatccgccttctggtggaaac

SEQ ID NO: 989895 - DNA, 25 bp, Homo sapien
tggtggaaacctcgctgagcagctg

SEQ ID NO: 989896 - DNA, 25 bp, Homo sapien
agttgcttctccatgacgcccagga

SEQ ID NO: 989897 - DNA, 25 bp, Homo sapien
tcagcaactgagataagttgagctg

SEQ ID NO: 989898 - DNA, 25 bp, Homo sapien
ggacttcagcaactgagataagttg

SEQ ID NO: 989899 - DNA, 25 bp, Homo sapien
actgagataagttgagctgtggata

SEQ ID NO: 989900 - DNA, 25 bp, Homo sapien
ctgacccaagaggacttcagcaact

SEQ ID NO: 989901 - DNA, 25 bp, Homo sapien
tatgggaaatctgtgaactctccga

SEQ ID NO: 989902 - DNA, 25 bp, Homo sapien
cactgtaacaaatgggccactgtgc

SEQ ID NO: 989903 - DNA, 25 bp, Homo sapien
ccaatgcaggttgatcactgtaaca

SEQ ID NO: 989904 - DNA, 25 bp, Homo sapien
caatgatgcaggatcaaccaatgca

SEQ ID NO: 989905 - DNA, 25 bp, Homo sapien
ccccagcatgtccaagagggctgta

SEQ ID NO: 989906 - DNA, 25 bp, Homo sapien
cagcatgtccaagagggctgtactc

SEQ ID NO: 989907 - DNA, 25 bp, Homo sapien
gcatgtccaagagggctgtactcac

SEQ ID NO: 989908 - DNA, 25 bp, Homo sapien
ctccccagcatgtccaagagggctg

SEQ ID NO: 989909 - DNA, 25 bp, Homo sapien
cgccgaggagtcacccttgaggaac

SEQ ID NO: 989910 - DNA, 25 bp, Homo sapien
tgcgatctgcagcactgggtatccc

SEQ ID NO: 989911 - DNA, 25 bp, Homo sapien
gacccattcaaaaatccctgtgtgc

SEQ ID NO: 989912 - DNA, 25 bp, Homo sapien
gatagaaactgaactccaccacact

SEQ ID NO: 989913 - DNA, 25 bp, Homo sapien
agaagccagtatccacactcggagg

SEQ ID NO: 989914 - DNA, 25 bp, Homo sapien
caccgtgaggttatacgttccctgg

SEQ ID NO: 989915 - DNA, 25 bp, Homo sapien
caaagagagctgtcattaggccttt

SEQ ID NO: 989916 - DNA, 25 bp, Homo sapien
cattaggcctttctcaatgcgctgg

SEQ ID NO: 989917 - DNA, 25 bp, Homo sapien
ctggactctggcacaaggaaagaag

SEQ ID NO: 989918 - DNA, 25 bp, Homo sapien
tggtcacggacaagcttactgttta

SEQ ID NO: 989919 - DNA, 25 bp, Homo sapien
gatattgccgtgtaaacgaaaggac

SEQ ID NO: 989920 - DNA, 25 bp, Homo sapien
gaaagaaggtttcacagacaggatt

SEQ ID NO: 989921 - DNA, 25 bp, Homo sapien
cgtctaatttaaacacgaatccaag

SEQ ID NO: 989922 - DNA, 25 bp, Homo sapien
tcacgaaggctgtcaccccagactg

SEQ ID NO: 989923 - DNA, 25 bp, Homo sapien
aatcacgaaggctgtcaccccagac

SEQ ID NO: 989924 - DNA, 25 bp, Homo sapien
taaacacgaatccaagtcctttcat

SEQ ID NO: 989925 - DNA, 25 bp, Homo sapien
ctttgattgctgtaatgatgtactc

SEQ ID NO: 989926 - DNA, 25 bp, Homo sapien
cttcagttccactgcacggttgaag

SEQ ID NO: 989927 - DNA, 25 bp, Homo sapien
ttgctgtaatgatgtactcctgcac

SEQ ID NO: 989928 - DNA, 25 bp, Homo sapien
aagtgaatcctcagtacttctttga

SEQ ID NO: 989929 - DNA, 25 bp, Homo sapien
acattcttccaaacccgtctctgat

SEQ ID NO: 989930 - DNA, 25 bp, Homo sapien
cctcccatcacaatgcctaatctcc

SEQ ID NO: 989931 - DNA, 25 bp, Homo sapien
catccccagatgacaattctacttt

SEQ ID NO: 989932 - DNA, 25 bp, Homo sapien
ttttgtgggaatccccaatttcaca

SEQ ID NO: 989933 - DNA, 25 bp, Homo sapien
ctgccatcaggatcctcgctcccac

SEQ ID NO: 989934 - DNA, 25 bp, Homo sapien
cagtagccagtgttggtgtgtcgac

SEQ ID NO: 989935 - DNA, 25 bp, Homo sapien
aacatatggcggcttggcagtagcc

SEQ ID NO: 989936 - DNA, 25 bp, Homo sapien
ggcatcggggactgtgatatcacaa

SEQ ID NO: 989937 - DNA, 25 bp, Homo sapien
actgttgcttcgagagtgaaggcag

SEQ ID NO: 989938 - DNA, 25 bp, Homo sapien
tgaatccgtcagtgaaaccgtagac

SEQ ID NO: 989939 - DNA, 25 bp, Homo sapien
gaaacaaacgaggatcctgatggca

SEQ ID NO: 989940 - DNA, 25 bp, Homo sapien
cgtctagagcactgatttggtcgtc

SEQ ID NO: 989941 - DNA, 25 bp, Homo sapien
caccggtgctggttgtgctcacttc

SEQ ID NO: 989942 - DNA, 25 bp, Homo sapien
tctctgacggcaagcgacggtgtgt

SEQ ID NO: 989943 - DNA, 25 bp, Homo sapien
caaggagaatgctggtgatgaccga

SEQ ID NO: 989944 - DNA, 25 bp, Homo sapien
ggcgtaaaaacactcgggtctctga

SEQ ID NO: 989945 - DNA, 25 bp, Homo sapien
ccagcagtaggatcaagtgacgccg

SEQ ID NO: 989946 - DNA, 25 bp, Homo sapien
tcctgccaggagttggaacgatgcc

SEQ ID NO: 989947 - DNA, 25 bp, Homo sapien
ccctggtgggctgactgtgatatac

SEQ ID NO: 989948 - DNA, 25 bp, Homo sapien
cctaacggctgtggcattaaagacc

SEQ ID NO: 989949 - DNA, 25 bp, Homo sapien
taaggccacttgtgcagcgctgtgc

SEQ ID NO: 989950 - DNA, 25 bp, Homo sapien
tcaccgtcagaagttaaacagctag

SEQ ID NO: 989951 - DNA, 25 bp, Homo sapien
gaaccgtaggatactggaaacagag

SEQ ID NO: 989952 - DNA, 25 bp, Homo sapien
taccatcaggacaatatctgcaaat

SEQ ID NO: 989953 - DNA, 25 bp, Homo sapien
cagctagctggaaacgagaaattga

SEQ ID NO: 989954 - DNA, 25 bp, Homo sapien
gacaggttttgttgtgtcagccagg

SEQ ID NO: 989955 - DNA, 25 bp, Homo sapien
tagttctcaggttgtcctaggcaga

SEQ ID NO: 989956 - DNA, 25 bp, Homo sapien
gcagatttttagtgccgttacaaaa

SEQ ID NO: 989957 - DNA, 25 bp, Homo sapien
cttaggttcacgcgacttgtgcctc

SEQ ID NO: 989958 - DNA, 25 bp, Homo sapien
gggccccagacttttcagaatggtc

SEQ ID NO: 989959 - DNA, 25 bp, Homo sapien
gacttttcagaatggtccatgagca

SEQ ID NO: 989960 - DNA, 25 bp, Homo sapien
gccccagacttttcagaatggtcca

SEQ ID NO: 989961 - DNA, 25 bp, Homo sapien
cagacttttcagaatggtccatgag

SEQ ID NO: 989962 - DNA, 25 bp, Homo sapien
gagagagaagaatcaccgaggagct

SEQ ID NO: 989963 - DNA, 25 bp, Homo sapien
agagagaagaatcaccgaggagctg

SEQ ID NO: 989964 - DNA, 25 bp, Homo sapien
accgaagacgaaaggaccagcgagg

SEQ ID NO: 989965 - DNA, 25 bp, Homo sapien
aaaagtaatgacaacaccgaagacg

SEQ ID NO: 989966 - DNA, 25 bp, Homo sapien
ccgaagggtgactcaaatgacatca

SEQ ID NO: 989967 - DNA, 25 bp, Homo sapien
tcaaaagggcgagagcactgctgat

SEQ ID NO: 989968 - DNA, 25 bp, Homo sapien
gaaagtgggctttgatcctccacaa

SEQ ID NO: 989969 - DNA, 25 bp, Homo sapien
aaagtgggctttgatcctccacaag

SEQ ID NO: 989970 - DNA, 25 bp, Homo sapien
gtgggctttgatcctccacaagaca

SEQ ID NO: 989971 - DNA, 25 bp, Homo sapien
aagtgggctttgatcctccacaaga

SEQ ID NO: 989972 - DNA, 25 bp, Homo sapien
tttccaggacactgaagtgcaggaa

SEQ ID NO: 989973 - DNA, 25 bp, Homo sapien
cctgcctcgcacaacttctgtgaga

SEQ ID NO: 989974 - DNA, 25 bp, Homo sapien
tcttcgctcactctgggtttggttt

SEQ ID NO: 989975 - DNA, 25 bp, Homo sapien
atgacccgctcagagccctgcctcg

SEQ ID NO: 989976 - DNA, 25 bp, Homo sapien
tgtttcctgggtggtgtcttaagcc

SEQ ID NO: 989977 - DNA, 25 bp, Homo sapien
gcttctgtttcctgggtggtgtctt

SEQ ID NO: 989978 - DNA, 25 bp, Homo sapien
tctgtttcctgggtggtgtcttaag

SEQ ID NO: 989979 - DNA, 25 bp, Homo sapien
tcctgggtggtgtcttaagccccat

SEQ ID NO: 989980 - DNA, 25 bp, Homo sapien
ggttagagcacttccactcaggaga

SEQ ID NO: 989981 - DNA, 25 bp, Homo sapien
tggacccagtatttgaacccggatc

SEQ ID NO: 989982 - DNA, 25 bp, Homo sapien
tgttcaagtcccacaactagcaggt

SEQ ID NO: 989983 - DNA, 25 bp, Homo sapien
tcattggtgaaaaacccgaggctcc

SEQ ID NO: 989984 - DNA, 25 bp, Homo sapien
gggcatggctaagtcgtactgtggg

SEQ ID NO: 989985 - DNA, 25 bp, Homo sapien
catggctaagtcgtactgtgggcca

SEQ ID NO: 989986 - DNA, 25 bp, Homo sapien
tggctaagtcgtactgtgggccatt

SEQ ID NO: 989987 - DNA, 25 bp, Homo sapien
gcatggctaagtcgtactgtgggcc

SEQ ID NO: 989988 - DNA, 25 bp, Homo sapien
gaagggtgcttgtgcaggaactgca

SEQ ID NO: 989989 - DNA, 25 bp, Homo sapien
gaagcttccagagaagggtgcttgt

SEQ ID NO: 989990 - DNA, 25 bp, Homo sapien
aagcttccagagaagggtgcttgtg

SEQ ID NO: 989991 - DNA, 25 bp, Homo sapien
ccagagaagggtgcttgtgcaggaa

SEQ ID NO: 989992 - DNA, 25 bp, Homo sapien
gagccgagggcccagcaataaggga

SEQ ID NO: 989993 - DNA, 25 bp, Homo sapien
aatcttggcccactatcttcttatt

SEQ ID NO: 989994 - DNA, 25 bp, Homo sapien
cctaaatcttggcccactatcttct

SEQ ID NO: 989995 - DNA, 25 bp, Homo sapien
tgagccgagggcccagcaataaggg

SEQ ID NO: 989996 - DNA, 25 bp, Homo sapien
caattttgtgcgtacatagttggta

SEQ ID NO: 989997 - DNA, 25 bp, Homo sapien
cattgtcgtgcaactgatagtctga

SEQ ID NO: 989998 - DNA, 25 bp, Homo sapien
ttcataagttacgatttagctcccc

SEQ ID NO: 989999 - DNA, 25 bp, Homo sapien
gtctccatggctttgactactctag

SEQ ID NO: 990000 - DNA, 25 bp, Homo sapien
gtgccctccacttcttagttcctag

SEQ ID NO: 990001 - DNA, 25 bp, Homo sapien
acttcttagttcctagtctatgagc

SEQ ID NO: 990002 - DNA, 25 bp, Homo sapien
gtctgtgcaagggtttgtacttcct

SEQ ID NO: 990003 - DNA, 25 bp, Homo sapien
tttcctgtccgggaatggtctgtgc

SEQ ID NO: 990004 - DNA, 25 bp, Homo sapien
ggttataattctcacaggtccaagg

SEQ ID NO: 990005 - DNA, 25 bp, Homo sapien
tgctcccacgagaaaggaggattcg

SEQ ID NO: 990006 - DNA, 25 bp, Homo sapien
tttccgcctcaaagtggtcaagtgc

SEQ ID NO: 990007 - DNA, 25 bp, Homo sapien
ggattcggagcagcgttcacggctt

SEQ ID NO: 990008 - DNA, 25 bp, Homo sapien
ttttaaagcacacctcgaatccacc

SEQ ID NO: 990009 - DNA, 25 bp, Homo sapien
actccattgtactaataatgccttg

SEQ ID NO: 990010 - DNA, 25 bp, Homo sapien
cttgtcccggtaatgcaatactctt

SEQ ID NO: 990011 - DNA, 25 bp, Homo sapien
aataatgccttgcagaagtaatacc

SEQ ID NO: 990012 - DNA, 25 bp, Homo sapien
gcagcgggcggaaggccgtcggccg

SEQ ID NO: 990013 - DNA, 25 bp, Homo sapien
ggcggaaggccgtcggccgctcggc

SEQ ID NO: 990014 - DNA, 25 bp, Homo sapien
ctccatggccgcgcctcggcgtcgg

SEQ ID NO: 990015 - DNA, 25 bp, Homo sapien
gcgggcggaaggccgtcggccgctc

SEQ ID NO: 990016 - DNA, 25 bp, Homo sapien
gccgcacgcccgccttgccgctccg

SEQ ID NO: 990017 - DNA, 25 bp, Homo sapien
cgcacgcccgccttgccgctccgcc

SEQ ID NO: 990018 - DNA, 25 bp, Homo sapien
ctccgcccccttcggagcctcggag

SEQ ID NO: 990019 - DNA, 25 bp, Homo sapien
cgctccgcccccttcggagcctcgg

SEQ ID NO: 990020 - DNA, 25 bp, Homo sapien
ggctgctgaagcgaatgggcgtgga

SEQ ID NO: 990021 - DNA, 25 bp, Homo sapien
gctgctgaagcgaatgggcgtggag

SEQ ID NO: 990022 - DNA, 25 bp, Homo sapien
cggctgctgaagcgaatgggcgtgg

SEQ ID NO: 990023 - DNA, 25 bp, Homo sapien
aactcatcgactctggctcaaactc

SEQ ID NO: 990024 - DNA, 25 bp, Homo sapien
gactgtgttctaaaactcatcgact

SEQ ID NO: 990025 - DNA, 25 bp, Homo sapien
aagaatgataacaatctaggtcttc

SEQ ID NO: 990026 - DNA, 25 bp, Homo sapien
gataacaatctaggtcttcttgctc

SEQ ID NO: 990027 - DNA, 25 bp, Homo sapien
gttctttgctaccaaggccaggagg

SEQ ID NO: 990028 - DNA, 25 bp, Homo sapien
aagtactgtggcatctgcgtatcca

SEQ ID NO: 990029 - DNA, 25 bp, Homo sapien
aatccctgccggctaaggtgctgaa

SEQ ID NO: 990030 - DNA, 25 bp, Homo sapien
aaggtgctgaactaacttaagtggg

SEQ ID NO: 990031 - DNA, 25 bp, Homo sapien
ctgtcagaattagagcagaatggcc

SEQ ID NO: 990032 - DNA, 25 bp, Homo sapien
tactgtgatgccaaagctgtcagaa

SEQ ID NO: 990033 - DNA, 25 bp, Homo sapien
taacttattcttgtgagttgcttcc

SEQ ID NO: 990034 - DNA, 25 bp, Homo sapien
cttaaaattgggtatggctatcagc

SEQ ID NO: 990035 - DNA, 25 bp, Homo sapien
agggctggaacaactatcttcatcc

SEQ ID NO: 990036 - DNA, 25 bp, Homo sapien
gggctggaacaactatcttcatcca

SEQ ID NO: 990037 - DNA, 25 bp, Homo sapien
ttcatccaagttgataggagaggca

SEQ ID NO: 990038 - DNA, 25 bp, Homo sapien
tcatccaagttgataggagaggcag

SEQ ID NO: 990039 - DNA, 25 bp, Homo sapien
gttctcaacggaagaagtgccagat

SEQ ID NO: 990040 - DNA, 25 bp, Homo sapien
tctcaacggaagaagtgccagattt

SEQ ID NO: 990041 - DNA, 25 bp, Homo sapien
ttctcaacggaagaagtgccagatt

SEQ ID NO: 990042 - DNA, 25 bp, Homo sapien
tcaacggaagaagtgccagattttg

SEQ ID NO: 990043 - DNA, 25 bp, Homo sapien
aactctgcttcaaaggaagtctgca

SEQ ID NO: 990044 - DNA, 25 bp, Homo sapien
caactctgcttcaaaggaagtctgc

SEQ ID NO: 990045 - DNA, 25 bp, Homo sapien
gaacatatactataaccaggtagag

SEQ ID NO: 990046 - DNA, 25 bp, Homo sapien
aagaacatatactataaccaggtag

SEQ ID NO: 990047 - DNA, 25 bp, Homo sapien
gtatagatgtacagcaaataggaaa

SEQ ID NO: 990048 - DNA, 25 bp, Homo sapien
tgtatagatgtacagcaaataggaa

SEQ ID NO: 990049 - DNA, 25 bp, Homo sapien
taatggagactaaatccctcgatgg

SEQ ID NO: 990050 - DNA, 25 bp, Homo sapien
aatagagattcccatgctgacagca

SEQ ID NO: 990051 - DNA, 25 bp, Homo sapien
tatatttagaaagagcaaacaggcc

SEQ ID NO: 990052 - DNA, 25 bp, Homo sapien
tgtagacaagtcaaactgaagcact

SEQ ID NO: 990053 - DNA, 25 bp, Homo sapien
aacctaaaaagattagctgagtatg

SEQ ID NO: 990054 - DNA, 25 bp, Homo sapien
atggtggcatgcacctatagtcccg

SEQ ID NO: 990055 - DNA, 25 bp, Homo sapien
aaacctaaaaagattagctgagtat

SEQ ID NO: 990056 - DNA, 25 bp, Homo sapien
agtatggtggcatgcacctatagtc

SEQ ID NO: 990057 - DNA, 25 bp, Homo sapien
taaaagagggaacatcaggctgagt

SEQ ID NO: 990058 - DNA, 25 bp, Homo sapien
gaagaaactctccaacactgggtaa

SEQ ID NO: 990059 - DNA, 25 bp, Homo sapien
ccctgcaggcgttttgagtttacaa

SEQ ID NO: 990060 - DNA, 25 bp, Homo sapien
tcccacgtggatacaagaggcaggc

SEQ ID NO: 990061 - DNA, 25 bp, Homo sapien
tatcatccaagcacagtattgctga

SEQ ID NO: 990062 - DNA, 25 bp, Homo sapien
aaaaagagtagacagagtgaggtag

SEQ ID NO: 990063 - DNA, 25 bp, Homo sapien
aggatggacctacaaaaattgaata

SEQ ID NO: 990064 - DNA, 25 bp, Homo sapien
tatatactctgtactactggctgag

SEQ ID NO: 990065 - DNA, 25 bp, Homo sapien
gcaaatgacagtatcctttagcatc

SEQ ID NO: 990066 - DNA, 25 bp, Homo sapien
aaagtactctaggattgccacaata

SEQ ID NO: 990067 - DNA, 25 bp, Homo sapien
aaacaatggtggaccacagaagtca

SEQ ID NO: 990068 - DNA, 25 bp, Homo sapien
gaagtcagcagagctccatctaccc

SEQ ID NO: 990069 - DNA, 25 bp, Homo sapien
agctggacaagcttcttcttagttc

SEQ ID NO: 990070 - DNA, 25 bp, Homo sapien
cagaaggcttgttttcagatcttcc

SEQ ID NO: 990071 - DNA, 25 bp, Homo sapien
ggtagatattattatgaccattaca

SEQ ID NO: 990072 - DNA, 25 bp, Homo sapien
attaaagctaaacagaaggcttgtt

SEQ ID NO: 990073 - DNA, 25 bp, Homo sapien
tgctcagtcgaaggtgatgaattat

SEQ ID NO: 990074 - DNA, 25 bp, Homo sapien
gcttcttggccgactgagcagggac

SEQ ID NO: 990075 - DNA, 25 bp, Homo sapien
cttcttggccgactgagcagggaca

SEQ ID NO: 990076 - DNA, 25 bp, Homo sapien
ccttgtgaatgctcagtcgaaggtg

SEQ ID NO: 990077 - DNA, 25 bp, Homo sapien
gtgaagcatcgcaaaaccatatcgc

SEQ ID NO: 990078 - DNA, 25 bp, Homo sapien
gcaaaaccatatcgctgatacttct

SEQ ID NO: 990079 - DNA, 25 bp, Homo sapien
gcatcgcaaaaccatatcgctgata

SEQ ID NO: 990080 - DNA, 25 bp, Homo sapien
ccatatcgctgatacttctctgtcc

SEQ ID NO: 990081 - DNA, 25 bp, Homo sapien
catggataagctgatgggaccgttt

SEQ ID NO: 990082 - DNA, 25 bp, Homo sapien
gcagcttcatatgcttgtaggtgga

SEQ ID NO: 990083 - DNA, 25 bp, Homo sapien
cccctttgttgtagagcaaacagac

SEQ ID NO: 990084 - DNA, 25 bp, Homo sapien
tagcagcttcaaagatgcagcatgg

SEQ ID NO: 990085 - DNA, 25 bp, Homo sapien
cactgggacaactaatataaactgg

SEQ ID NO: 990086 - DNA, 25 bp, Homo sapien
tgggtctctatctcaggctctgctt

SEQ ID NO: 990087 - DNA, 25 bp, Homo sapien
ctaatttatgatccagacgagggca

SEQ ID NO: 990088 - DNA, 25 bp, Homo sapien
gaaaccagtttcaacgggtggcaca

SEQ ID NO: 990089 - DNA, 25 bp, Homo sapien
caggacctgcatgttgacaggtgtg

SEQ ID NO: 990090 - DNA, 25 bp, Homo sapien
gcaggatccgaagctggttttcatt

SEQ ID NO: 990091 - DNA, 25 bp, Homo sapien
ttcattgagaccaaaaagtccatgg

SEQ ID NO: 990092 - DNA, 25 bp, Homo sapien
gggtcattctgcaaaagcaggatcc

SEQ ID NO: 990093 - DNA, 25 bp, Homo sapien
cagcagtcccggttggggcacttgc

SEQ ID NO: 990094 - DNA, 25 bp, Homo sapien
gcagctggtcgcaggcctggcactc

SEQ ID NO: 990095 - DNA, 25 bp, Homo sapien
cgcgctggtagcgggcgcagaggcg

SEQ ID NO: 990096 - DNA, 25 bp, Homo sapien
aggcctggcactcgccgcgctggta

SEQ ID NO: 990097 - DNA, 25 bp, Homo sapien
ctccaggcggaggtgccgccaccgc

SEQ ID NO: 990098 - DNA, 25 bp, Homo sapien
cgccgtgggcgcacagcaccttggt

SEQ ID NO: 990099 - DNA, 25 bp, Homo sapien
ggccgccgtgggcgcacagcacctt

SEQ ID NO: 990100 - DNA, 25 bp, Homo sapien
gcaggaaacgctcgggcccggcgcg

SEQ ID NO: 990101 - DNA, 25 bp, Homo sapien
ctgcagcaggaaacgctcgggcccg

SEQ ID NO: 990102 - DNA, 25 bp, Homo sapien
tcacaaaggactcgccaacaagaca

SEQ ID NO: 990103 - DNA, 25 bp, Homo sapien
ggatcccctggacgtggactcaggc

SEQ ID NO: 990104 - DNA, 25 bp, Homo sapien
acagcgttgatggagcgtctgctcc

SEQ ID NO: 990105 - DNA, 25 bp, Homo sapien
caagacaactggtagtgctagggag

SEQ ID NO: 990106 - DNA, 25 bp, Homo sapien
tttattggaaagtggctagtccgaa

SEQ ID NO: 990107 - DNA, 25 bp, Homo sapien
aaagtggctagtccgaattgagatg

SEQ ID NO: 990108 - DNA, 25 bp, Homo sapien
ggcctgctgagctttattggaaagt

SEQ ID NO: 990109 - DNA, 25 bp, Homo sapien
ttggaaagtggctagtccgaattga

SEQ ID NO: 990110 - DNA, 25 bp, Homo sapien
tattagacagttcaaattaagcttg

SEQ ID NO: 990111 - DNA, 25 bp, Homo sapien
ttcaaattaagcttgaagaacagga

SEQ ID NO: 990112 - DNA, 25 bp, Homo sapien
ttgaagaacaggaagcaatacaact

SEQ ID NO: 990113 - DNA, 25 bp, Homo sapien
gaacaggaagcaatacaactcaact

SEQ ID NO: 990114 - DNA, 25 bp, Homo sapien
cctgctggacatttaggtaggacct

SEQ ID NO: 990115 - DNA, 25 bp, Homo sapien
tgggttagtgccacacaacgaagaa

SEQ ID NO: 990116 - DNA, 25 bp, Homo sapien
gacctacagcttgtccgagagagta

SEQ ID NO: 990117 - DNA, 25 bp, Homo sapien
caaacagcgtagtcatgcctgagcg

SEQ ID NO: 990118 - DNA, 25 bp, Homo sapien
taaaactttaactcctgtctgcggc

SEQ ID NO: 990119 - DNA, 25 bp, Homo sapien
aaaaaatacaactgcctggcgctga

SEQ ID NO: 990120 - DNA, 25 bp, Homo sapien
ccagagtggcttgcgcagaagaaac

SEQ ID NO: 990121 - DNA, 25 bp, Homo sapien
ttggtccaagcacgtcaagggctct

SEQ ID NO: 990122 - DNA, 25 bp, Homo sapien
gacgtttttggcatcatacgggcaa

SEQ ID NO: 990123 - DNA, 25 bp, Homo sapien
gacaaaaacggagggattcgatctg

SEQ ID NO: 990124 - DNA, 25 bp, Homo sapien
aacttgggctacaaacataacgacg

SEQ ID NO: 990125 - DNA, 25 bp, Homo sapien
taatcacgcaggctttgtcttcagt

SEQ ID NO: 990126 - DNA, 25 bp, Homo sapien
aaacatgttaatgatgcaggcgaac

SEQ ID NO: 990127 - DNA, 25 bp, Homo sapien
caattcatgcaattcacccagtgtg

SEQ ID NO: 990128 - DNA, 25 bp, Homo sapien
tataaccctatagaaatgactgagg

SEQ ID NO: 990129 - DNA, 25 bp, Homo sapien
tatatacagtcagatgggtgtggac

SEQ ID NO: 990130 - DNA, 25 bp, Homo sapien
tcaggaagattgtctctatgtggca

SEQ ID NO: 990131 - DNA, 25 bp, Homo sapien
tcttgggtgctttgtgcgcctgaat

SEQ ID NO: 990132 - DNA, 25 bp, Homo sapien
gcttaggcatgagttaatccaacca

SEQ ID NO: 990133 - DNA, 25 bp, Homo sapien
tgaatatcctcgacgaccagagaat

SEQ ID NO: 990134 - DNA, 25 bp, Homo sapien
tcatataggcgtactcttgatggcc

SEQ ID NO: 990135 - DNA, 25 bp, Homo sapien
tcttttggggtcacaaactgcgtgc

SEQ ID NO: 990136 - DNA, 25 bp, Homo sapien
taagtgtgtacagcaagaattcaat

SEQ ID NO: 990137 - DNA, 25 bp, Homo sapien
ctccaccctcgtaacgttggaatgg

SEQ ID NO: 990138 - DNA, 25 bp, Homo sapien
taattccctcaaacattaagctaag

SEQ ID NO: 990139 - DNA, 25 bp, Homo sapien
cattaagctaagtgtgaagtgcagt

SEQ ID NO: 990140 - DNA, 25 bp, Homo sapien
aaagagttgcatgcatccaggagca

SEQ ID NO: 990141 - DNA, 25 bp, Homo sapien
gaagtgcagtttttagtaagcttgc

SEQ ID NO: 990142 - DNA, 25 bp, Homo sapien
tagattccacataggcacggcttgt

SEQ ID NO: 990143 - DNA, 25 bp, Homo sapien
tgtcaaaattattcgaacagataga

SEQ ID NO: 990144 - DNA, 25 bp, Homo sapien
cataggcacggcttgtcgcataaaa

SEQ ID NO: 990145 - DNA, 25 bp, Homo sapien
aacagatagattccacataggcacg

SEQ ID NO: 990146 - DNA, 25 bp, Homo sapien
tggatgtaggtgatggatctctgac

SEQ ID NO: 990147 - DNA, 25 bp, Homo sapien
tactctgacatattctggatgtagg

SEQ ID NO: 990148 - DNA, 25 bp, Homo sapien
tctggatgtaggtgatggatctctg

SEQ ID NO: 990149 - DNA, 25 bp, Homo sapien
gatgtaggtgatggatctctgacaa

SEQ ID NO: 990150 - DNA, 25 bp, Homo sapien
ctttctaacagcagataggatgagc

SEQ ID NO: 990151 - DNA, 25 bp, Homo sapien
gatgagctggcttagggttcccaca

SEQ ID NO: 990152 - DNA, 25 bp, Homo sapien
tcattcccgtaattaatcagagagg

SEQ ID NO: 990153 - DNA, 25 bp, Homo sapien
taatcagagaggcagcgggcctgtc

SEQ ID NO: 990154 - DNA, 25 bp, Homo sapien
ttttaacagactcatccaccaaaca

SEQ ID NO: 990155 - DNA, 25 bp, Homo sapien
taacagactcatccaccaaacatgt

SEQ ID NO: 990156 - DNA, 25 bp, Homo sapien
ctaacttttaacagactcatccacc

SEQ ID NO: 990157 - DNA, 25 bp, Homo sapien
gactcatccaccaaacatgtaaaac

SEQ ID NO: 990158 - DNA, 25 bp, Homo sapien
gacgaaaggtcgcagttaaagacac

SEQ ID NO: 990159 - DNA, 25 bp, Homo sapien
cactgacgaggtctttgctggctga

SEQ ID NO: 990160 - DNA, 25 bp, Homo sapien
tgaggataggaagcaaaagtcctcc

SEQ ID NO: 990161 - DNA, 25 bp, Homo sapien
tcctcctgaggacgaaaggtcgcag

SEQ ID NO: 990162 - DNA, 25 bp, Homo sapien
tgaacctactctgtgatctccatca

SEQ ID NO: 990163 - DNA, 25 bp, Homo sapien
agatcagatgaatagtatagtggaa

SEQ ID NO: 990164 - DNA, 25 bp, Homo sapien
ggaatgacctgaacctactctgtga

SEQ ID NO: 990165 - DNA, 25 bp, Homo sapien
tatagtggaatgatcagactggaat

SEQ ID NO: 990166 - DNA, 25 bp, Homo sapien
taggattataagcatcagccagcat

SEQ ID NO: 990167 - DNA, 25 bp, Homo sapien
agcatgccaggttaattttctacat

SEQ ID NO: 990168 - DNA, 25 bp, Homo sapien
gcatgccaggttaattttctacatt

SEQ ID NO: 990169 - DNA, 25 bp, Homo sapien
ttataagcatcagccagcatgccag

SEQ ID NO: 990170 - DNA, 25 bp, Homo sapien
ctgagcagttcacaaggagagttac

SEQ ID NO: 990171 - DNA, 25 bp, Homo sapien
gagcccagggcatgaacatctcaag

SEQ ID NO: 990172 - DNA, 25 bp, Homo sapien
taggtgtactgcatcaatccagctc

SEQ ID NO: 990173 - DNA, 25 bp, Homo sapien
tcacgagtgacttgatgagcccagg

SEQ ID NO: 990174 - DNA, 25 bp, Homo sapien
atccttttgagttttggaagctatg

SEQ ID NO: 990175 - DNA, 25 bp, Homo sapien
tttggaagctatgtttgtctgaatc

SEQ ID NO: 990176 - DNA, 25 bp, Homo sapien
gagttttggaagctatgtttgtctg

SEQ ID NO: 990177 - DNA, 25 bp, Homo sapien
gaagctatgtttgtctgaatcatcc

SEQ ID NO: 990178 - DNA, 25 bp, Homo sapien
tatacgaatagagaaaatcctttgg

SEQ ID NO: 990179 - DNA, 25 bp, Homo sapien
attttgcagaggctatttacacggc

SEQ ID NO: 990180 - DNA, 25 bp, Homo sapien
gcagtgagaatcaagatcagcccta

SEQ ID NO: 990181 - DNA, 25 bp, Homo sapien
tttacacggcaaatattcaagactg

SEQ ID NO: 990182 - DNA, 25 bp, Homo sapien
tccagccttagccttagttcttcct

SEQ ID NO: 990183 - DNA, 25 bp, Homo sapien
acaggcagaggctggtctataaaag

SEQ ID NO: 990184 - DNA, 25 bp, Homo sapien
tggtctataaaagtaagtgctgtcc

SEQ ID NO: 990185 - DNA, 25 bp, Homo sapien
gaggctggtctataaaagtaagtgc

SEQ ID NO: 990186 - DNA, 25 bp, Homo sapien
tagcctgagtgatggcgtgggaccc

SEQ ID NO: 990187 - DNA, 25 bp, Homo sapien
cagtcggcccacatgcatgcattgc

SEQ ID NO: 990188 - DNA, 25 bp, Homo sapien
tctaccacccaatagaagagatttt

SEQ ID NO: 990189 - DNA, 25 bp, Homo sapien
tgctgcaattatcatgcacattgat

SEQ ID NO: 990190 - DNA, 25 bp, Homo sapien
tttatgcctatagcttttctccccc

SEQ ID NO: 990191 - DNA, 25 bp, Homo sapien
cccttcttctagtgaattatttcct

SEQ ID NO: 990192 - DNA, 25 bp, Homo sapien
tctccccccttcttctagtgaatta

SEQ ID NO: 990193 - DNA, 25 bp, Homo sapien
ctagtgaattatttcctaagaaagg

SEQ ID NO: 990194 - DNA, 25 bp, Homo sapien
cctgcaagtcccgaaagggcaagca

SEQ ID NO: 990195 - DNA, 25 bp, Homo sapien
caaagcacctgcaagtcccgaaagg

SEQ ID NO: 990196 - DNA, 25 bp, Homo sapien
cccgaaagggcaagcacttgatcat

SEQ ID NO: 990197 - DNA, 25 bp, Homo sapien
gggtgcccaatgggatggtaccttc

SEQ ID NO: 990198 - DNA, 25 bp, Homo sapien
catagttccgtgagcccgcctgaaa

SEQ ID NO: 990199 - DNA, 25 bp, Homo sapien
tccgtgagcccgcctgaaatggcac

SEQ ID NO: 990200 - DNA, 25 bp, Homo sapien
agttccgtgagcccgcctgaaatgg

SEQ ID NO: 990201 - DNA, 25 bp, Homo sapien
atagttccgtgagcccgcctgaaat

SEQ ID NO: 990202 - DNA, 25 bp, Homo sapien
caggtatgaagagtcgacgtttgaa

SEQ ID NO: 990203 - DNA, 25 bp, Homo sapien
tagagagactccaggtatgaagagt

SEQ ID NO: 990204 - DNA, 25 bp, Homo sapien
tgaagagtcgacgtttgaatttttc

SEQ ID NO: 990205 - DNA, 25 bp, Homo sapien
gatagagagactccaggtatgaaga

SEQ ID NO: 990206 - DNA, 25 bp, Homo sapien
tcctcttccctagtggaaatgcctg

SEQ ID NO: 990207 - DNA, 25 bp, Homo sapien
cagaatgtacgtgtccaaggaaaac

SEQ ID NO: 990208 - DNA, 25 bp, Homo sapien
cctgctggttgtaagcggagggcaa

SEQ ID NO: 990209 - DNA, 25 bp, Homo sapien
tgctaatgacattccagactttcag

SEQ ID NO: 990210 - DNA, 25 bp, Homo sapien
ctaggaagaacatcttccacatgag

SEQ ID NO: 990211 - DNA, 25 bp, Homo sapien
attttgagactcagtgagtctctct

SEQ ID NO: 990212 - DNA, 25 bp, Homo sapien
ccagcctaggaagaacatcttccac

SEQ ID NO: 990213 - DNA, 25 bp, Homo sapien
gcctaggaagaacatcttccacatg

SEQ ID NO: 990214 - DNA, 25 bp, Homo sapien
gaacatccaacaaacctgtgtcaca

SEQ ID NO: 990215 - DNA, 25 bp, Homo sapien
tccacagttttcatgggaatccaga

SEQ ID NO: 990216 - DNA, 25 bp, Homo sapien
cacagactaaatgtcccagcgagaa

SEQ ID NO: 990217 - DNA, 25 bp, Homo sapien
gatgggtcttattagtatgagacag

SEQ ID NO: 990218 - DNA, 25 bp, Homo sapien
aatccatgtgccagattcattcttc

SEQ ID NO: 990219 - DNA, 25 bp, Homo sapien
tgtgccagattcattcttccaatac

SEQ ID NO: 990220 - DNA, 25 bp, Homo sapien
tccatactgaatccatgtgccagat

SEQ ID NO: 990221 - DNA, 25 bp, Homo sapien
tcttctccatactgaatccatgtgc

SEQ ID NO: 990222 - DNA, 25 bp, Homo sapien
aggagtggagaggcgtcggatggga

SEQ ID NO: 990223 - DNA, 25 bp, Homo sapien
aattggctggcttggtgacagaaga

SEQ ID NO: 990224 - DNA, 25 bp, Homo sapien
attggctggcttggtgacagaagaa

SEQ ID NO: 990225 - DNA, 25 bp, Homo sapien
agaggcgtcggatgggaaaggaatc

SEQ ID NO: 990226 - DNA, 25 bp, Homo sapien
ccgaaaattgattgtataacttcct

SEQ ID NO: 990227 - DNA, 25 bp, Homo sapien
gaaaattgattgtataacttcctac

SEQ ID NO: 990228 - DNA, 25 bp, Homo sapien
aattgattgtataacttcctacaga

SEQ ID NO: 990229 - DNA, 25 bp, Homo sapien
gattgtataacttcctacagaacag

SEQ ID NO: 990230 - DNA, 25 bp, Homo sapien
gataaatacggtcatatgggtatca

SEQ ID NO: 990231 - DNA, 25 bp, Homo sapien
catagataaatacggtcatatgggt

SEQ ID NO: 990232 - DNA, 25 bp, Homo sapien
gggtatcacccatttcagctcttcc

SEQ ID NO: 990233 - DNA, 25 bp, Homo sapien
aatacggtcatatgggtatcaccca

SEQ ID NO: 990234 - DNA, 25 bp, Homo sapien
tttgataatgttggactcttgaaag

SEQ ID NO: 990235 - DNA, 25 bp, Homo sapien
agcactaatgcttccctttgataat

SEQ ID NO: 990236 - DNA, 25 bp, Homo sapien
cctttgataatgttggactcttgaa

SEQ ID NO: 990237 - DNA, 25 bp, Homo sapien
tccctttgataatgttggactcttg

SEQ ID NO: 990238 - DNA, 25 bp, Homo sapien
ccgtccaggttttaccaataagcat

SEQ ID NO: 990239 - DNA, 25 bp, Homo sapien
catgtgctcaaagtccgtccaggtt

SEQ ID NO: 990240 - DNA, 25 bp, Homo sapien
ggttacagtagcctttctcgatcgt

SEQ ID NO: 990241 - DNA, 25 bp, Homo sapien
tcgatcgtctccatgtgctcaaagt

SEQ ID NO: 990242 - DNA, 25 bp, Homo sapien
ctgccaccggtaaggcagatggaag

SEQ ID NO: 990243 - DNA, 25 bp, Homo sapien
tggaagtggactttgctgcagctac

SEQ ID NO: 990244 - DNA, 25 bp, Homo sapien
tgccaccggtaaggcagatggaagt

SEQ ID NO: 990245 - DNA, 25 bp, Homo sapien
agatggaagtggactttgctgcagc

SEQ ID NO: 990246 - DNA, 25 bp, Homo sapien
ctttagccagtacccaatagtcagt

SEQ ID NO: 990247 - DNA, 25 bp, Homo sapien
gtatgaagccaaaatgctctccagc

SEQ ID NO: 990248 - DNA, 25 bp, Homo sapien
ttacttacttcacgcagttttccca

SEQ ID NO: 990249 - DNA, 25 bp, Homo sapien
gattctcttaacgaatctcactcca

SEQ ID NO: 990250 - DNA, 25 bp, Homo sapien
ccctagaagatgtggtacttgtgac

SEQ ID NO: 990251 - DNA, 25 bp, Homo sapien
ccttacacagatggtcaagacaaat

SEQ ID NO: 990252 - DNA, 25 bp, Homo sapien
cattaagcggacaacccttacacag

SEQ ID NO: 990253 - DNA, 25 bp, Homo sapien
gagtcatgatcatccaccctagaag

SEQ ID NO: 990254 - DNA, 25 bp, Homo sapien
tatgttttgcccatgagcatctaga

SEQ ID NO: 990255 - DNA, 25 bp, Homo sapien
tgtcttcactagtcaatctcctcac

SEQ ID NO: 990256 - DNA, 25 bp, Homo sapien
agcatctagacagcccctccataaa

SEQ ID NO: 990257 - DNA, 25 bp, Homo sapien
gtggcagtttattccctgtggttct

SEQ ID NO: 990258 - DNA, 25 bp, Homo sapien
ttgtgagctcgctggcagaggaaac

SEQ ID NO: 990259 - DNA, 25 bp, Homo sapien
ctctgttgcttgaggaaagggcagc

SEQ ID NO: 990260 - DNA, 25 bp, Homo sapien
tgaacaaatgtactagcccaaagtg

SEQ ID NO: 990261 - DNA, 25 bp, Homo sapien
cactacttgactagagccatttggt

SEQ ID NO: 990262 - DNA, 25 bp, Homo sapien
taacaagtgctactcttgggtcagc

SEQ ID NO: 990263 - DNA, 25 bp, Homo sapien
cacagcttcaggtgtttgcagagag

SEQ ID NO: 990264 - DNA, 25 bp, Homo sapien
tagtctgaggaaagcaagcctgtgc

SEQ ID NO: 990265 - DNA, 25 bp, Homo sapien
agtggcctggacatctcgggaagca

SEQ ID NO: 990266 - DNA, 25 bp, Homo sapien
tgttcctccaagatcagtagccttg

SEQ ID NO: 990267 - DNA, 25 bp, Homo sapien
ccaagatcagtagccttggacgagc

SEQ ID NO: 990268 - DNA, 25 bp, Homo sapien
tcctgactccccagatacgtgaact

SEQ ID NO: 990269 - DNA, 25 bp, Homo sapien
gaacttgcgggtgagatcgtccaca

SEQ ID NO: 990270 - DNA, 25 bp, Homo sapien
ttggctgccctgaaagaaccgatct

SEQ ID NO: 990271 - DNA, 25 bp, Homo sapien
cgctgaagcagacgcaagaaattct

SEQ ID NO: 990272 - DNA, 25 bp, Homo sapien
gatctgatctggactaggtgtgcag

SEQ ID NO: 990273 - DNA, 25 bp, Homo sapien
tatgccatgtttctacgatgtgaag

SEQ ID NO: 990274 - DNA, 25 bp, Homo sapien
ggttacaaatctgctgccgaccctc

SEQ ID NO: 990275 - DNA, 25 bp, Homo sapien
tcacagatgtggagtcttgaacacg

SEQ ID NO: 990276 - DNA, 25 bp, Homo sapien
cagttccctcgggtgaagtggtcac

SEQ ID NO: 990277 - DNA, 25 bp, Homo sapien
tccatcaggttatgggaccggaggc

SEQ ID NO: 990278 - DNA, 25 bp, Homo sapien
gcactgctaattcctctttgttcag

SEQ ID NO: 990279 - DNA, 25 bp, Homo sapien
cagagagttcgtgatttttcaggac

SEQ ID NO: 990280 - DNA, 25 bp, Homo sapien
gtccagagagttcgtgatttttcag

SEQ ID NO: 990281 - DNA, 25 bp, Homo sapien
gagcactgctaattcctctttgttc

SEQ ID NO: 990282 - DNA, 25 bp, Homo sapien
tggttttccttctcatttttcatct

SEQ ID NO: 990283 - DNA, 25 bp, Homo sapien
tttccttctcatttttcatctccat

SEQ ID NO: 990284 - DNA, 25 bp, Homo sapien
gttttccttctcatttttcatctcc

SEQ ID NO: 990285 - DNA, 25 bp, Homo sapien
ctgggggcctggttttccttctcat

SEQ ID NO: 990286 - DNA, 25 bp, Homo sapien
tattgacttggtacctaggatgcca

SEQ ID NO: 990287 - DNA, 25 bp, Homo sapien
atagaacccctaatctctgagaaag

SEQ ID NO: 990288 - DNA, 25 bp, Homo sapien
gaaagtgtggtttgacccctgcaaa

SEQ ID NO: 990289 - DNA, 25 bp, Homo sapien
aactcgaaagccacataaaactctg

SEQ ID NO: 990290 - DNA, 25 bp, Homo sapien
caagcccggccggaactccttatat

SEQ ID NO: 990291 - DNA, 25 bp, Homo sapien
tctgtatctagagtgttgtgatggt

SEQ ID NO: 990292 - DNA, 25 bp, Homo sapien
aaagtattgcctgggctgaaagggc

SEQ ID NO: 990293 - DNA, 25 bp, Homo sapien
gcacaagagaacctttagggctgat

SEQ ID NO: 990294 - DNA, 25 bp, Homo sapien
gaaacgatttcccttagatgacctc

SEQ ID NO: 990295 - DNA, 25 bp, Homo sapien
gggttccaccatctctggtgaaatt

SEQ ID NO: 990296 - DNA, 25 bp, Homo sapien
ggagtacatgctcaaaacattctct

SEQ ID NO: 990297 - DNA, 25 bp, Homo sapien
ggcatgcgggatcaaaatgttagga

SEQ ID NO: 990298 - DNA, 25 bp, Homo sapien
caactactaagatgccaagtaagac

SEQ ID NO: 990299 - DNA, 25 bp, Homo sapien
agggctagagatccagaatatataa

SEQ ID NO: 990300 - DNA, 25 bp, Homo sapien
taaaatgcgaataagaagcaactac

SEQ ID NO: 990301 - DNA, 25 bp, Homo sapien
taagacttaaaagggctagagatcc

SEQ ID NO: 990302 - DNA, 25 bp, Homo sapien
cttggcagcacgatttggtataaca

SEQ ID NO: 990303 - DNA, 25 bp, Homo sapien
tcctaatgatctaccctggaaaagc

SEQ ID NO: 990304 - DNA, 25 bp, Homo sapien
tcaaagccttccgactggcataagc

SEQ ID NO: 990305 - DNA, 25 bp, Homo sapien
caccaggaaacacttgcacgtaaat

SEQ ID NO: 990306 - DNA, 25 bp, Homo sapien
ggcagcctgcttgaaacagttaaca

SEQ ID NO: 990307 - DNA, 25 bp, Homo sapien
gcaaggtaaagacccttaggcagcc

SEQ ID NO: 990308 - DNA, 25 bp, Homo sapien
catcggcaaaaaccgcaaagcaagg

SEQ ID NO: 990309 - DNA, 25 bp, Homo sapien
tacaaacaggaaagaacccagagga

SEQ ID NO: 990310 - DNA, 25 bp, Homo sapien
cagggtctctggcagtacttgcgac

SEQ ID NO: 990311 - DNA, 25 bp, Homo sapien
tggtgatgaagcagcacacctccgg

SEQ ID NO: 990312 - DNA, 25 bp, Homo sapien
ggtctccaacaccacaaagcggtcg

SEQ ID NO: 990313 - DNA, 25 bp, Homo sapien
tcggactgcgaatagttgcaccggc

SEQ ID NO: 990314 - DNA, 25 bp, Homo sapien
tcaagaggctagatctcaccgaccg

SEQ ID NO: 990315 - DNA, 25 bp, Homo sapien
ggcaaatctgctggtgaccgcctgg

SEQ ID NO: 990316 - DNA, 25 bp, Homo sapien
tcctagtggcaggtttacagccggc

SEQ ID NO: 990317 - DNA, 25 bp, Homo sapien
aaagaaagagaacgcgcgggcaaat

SEQ ID NO: 990318 - DNA, 25 bp, Homo sapien
gatagttgttcatctggaacccaga

SEQ ID NO: 990319 - DNA, 25 bp, Homo sapien
ggaaaaagtaatcacggtattctgc

SEQ ID NO: 990320 - DNA, 25 bp, Homo sapien
gaacccagagcgctgagctagatag

SEQ ID NO: 990321 - DNA, 25 bp, Homo sapien
taaattgcccggagattcttgctgc

SEQ ID NO: 990322 - DNA, 25 bp, Homo sapien
tcgcagcaaatgttataccccataa

SEQ ID NO: 990323 - DNA, 25 bp, Homo sapien
tgtcaggcataagcttcaggacagg

SEQ ID NO: 990324 - DNA, 25 bp, Homo sapien
tgttataccccataaatgtaagagg

SEQ ID NO: 990325 - DNA, 25 bp, Homo sapien
gtaattgtcaggcataagcttcagg

SEQ ID NO: 990326 - DNA, 25 bp, Homo sapien
ccttcaaagccagcgaacactgtac

SEQ ID NO: 990327 - DNA, 25 bp, Homo sapien
tcccttcaaagccagcgaacactgt

SEQ ID NO: 990328 - DNA, 25 bp, Homo sapien
tttctcccttcaaagccagcgaaca

SEQ ID NO: 990329 - DNA, 25 bp, Homo sapien
gtttttctcccttcaaagccagcga

SEQ ID NO: 990330 - DNA, 25 bp, Homo sapien
actaatggttggctgactctctgtg

SEQ ID NO: 990331 - DNA, 25 bp, Homo sapien
acagcttggttatactggcggatgt

SEQ ID NO: 990332 - DNA, 25 bp, Homo sapien
gacaatctgctatgcacgggtgtct

SEQ ID NO: 990333 - DNA, 25 bp, Homo sapien
tggctggttcactaatggttggctg

SEQ ID NO: 990334 - DNA, 25 bp, Homo sapien
tggatggattcaacaaaggcaggct

SEQ ID NO: 990335 - DNA, 25 bp, Homo sapien
ctgtggcatggatggattcaacaaa

SEQ ID NO: 990336 - DNA, 25 bp, Homo sapien
tggattcaacaaaggcaggctggga

SEQ ID NO: 990337 - DNA, 25 bp, Homo sapien
tgtggcatggatggattcaacaaag

SEQ ID NO: 990338 - DNA, 25 bp, Homo sapien
ggatcgtattagtgtttatggcact

SEQ ID NO: 990339 - DNA, 25 bp, Homo sapien
tggatcgtattagtgtttatggcac

SEQ ID NO: 990340 - DNA, 25 bp, Homo sapien
ctggatcgtattagtgtttatggca

SEQ ID NO: 990341 - DNA, 25 bp, Homo sapien
tgatggtgacgaggcctctcattgg

SEQ ID NO: 990342 - DNA, 25 bp, Homo sapien
gagtgtaatcaaaggttattcttaa

SEQ ID NO: 990343 - DNA, 25 bp, Homo sapien
ggagagtgtaatcaaaggttattct

SEQ ID NO: 990344 - DNA, 25 bp, Homo sapien
gtaatcaaaggttattcttaatcca

SEQ ID NO: 990345 - DNA, 25 bp, Homo sapien
gcatgaaagtttcactaaccatttc

SEQ ID NO: 990346 - DNA, 25 bp, Homo sapien
ggcatgaaagtttcactaaccattt

SEQ ID NO: 990347 - DNA, 25 bp, Homo sapien
catgaaagtttcactaaccatttcc

SEQ ID NO: 990348 - DNA, 25 bp, Homo sapien
tggcatgaaagtttcactaaccatt

SEQ ID NO: 990349 - DNA, 25 bp, Homo sapien
tcatctttttcatcaatgaggaggc

SEQ ID NO: 990350 - DNA, 25 bp, Homo sapien
cttgccaattgatgctgtaatctac

SEQ ID NO: 990351 - DNA, 25 bp, Homo sapien
ttcttgccaattgatgctgtaatct

SEQ ID NO: 990352 - DNA, 25 bp, Homo sapien
cttcctgtgctgctcaggcgagcta

SEQ ID NO: 990353 - DNA, 25 bp, Homo sapien
ctgctcaggcgagctacagcttttc

SEQ ID NO: 990354 - DNA, 25 bp, Homo sapien
aagcacatgatcttcagttgcccac

SEQ ID NO: 990355 - DNA, 25 bp, Homo sapien
acagaaagtgtagtccagaggcctc

SEQ ID NO: 990356 - DNA, 25 bp, Homo sapien
gggtctgacggcagggcgtcccacg

SEQ ID NO: 990357 - DNA, 25 bp, Homo sapien
ggcctcctccactggcggcccgcgt

SEQ ID NO: 990358 - DNA, 25 bp, Homo sapien
tgacggcagggcgtcccacgggagc

SEQ ID NO: 990359 - DNA, 25 bp, Homo sapien
tcttaggaactagatgggtcccatc

SEQ ID NO: 990360 - DNA, 25 bp, Homo sapien
tacaggtctagaaagtgcagagcca

SEQ ID NO: 990361 - DNA, 25 bp, Homo sapien
gaagtcaggaaaatccccgtaggca

SEQ ID NO: 990362 - DNA, 25 bp, Homo sapien
gacagggagaactcgtctgcaggtt

SEQ ID NO: 990363 - DNA, 25 bp, Homo sapien
ttagggtcctggtcaaccgtggcca

SEQ ID NO: 990364 - DNA, 25 bp, Homo sapien
ccttggatccttggagattcttaga

SEQ ID NO: 990365 - DNA, 25 bp, Homo sapien
cgtggcctacagacagtccgtcatt

SEQ ID NO: 990366 - DNA, 25 bp, Homo sapien
tatataagggatacacgtggcctac

SEQ ID NO: 990367 - DNA, 25 bp, Homo sapien
gttgataaagttggaatcaacaaga

SEQ ID NO: 990368 - DNA, 25 bp, Homo sapien
catcacactcttgtttcttccggaa

SEQ ID NO: 990369 - DNA, 25 bp, Homo sapien
cctttagtatgttggaatctttctt

SEQ ID NO: 990370 - DNA, 25 bp, Homo sapien
gaatcaacaagaatgtggtaaggtg

SEQ ID NO: 990371 - DNA, 25 bp, Homo sapien
tgtacgcaggcctaaagatccaacg

SEQ ID NO: 990372 - DNA, 25 bp, Homo sapien
gatccaacggttcttgcctgggtct

SEQ ID NO: 990373 - DNA, 25 bp, Homo sapien
gcctgggtctgtgtccgaaataaat

SEQ ID NO: 990374 - DNA, 25 bp, Homo sapien
tagttggaggcaagccgagcatcca

SEQ ID NO: 990375 - DNA, 25 bp, Homo sapien
gatgtctcaaagagtagaggagcgt

SEQ ID NO: 990376 - DNA, 25 bp, Homo sapien
ttaacccatttattataggctagtg

SEQ ID NO: 990377 - DNA, 25 bp, Homo sapien
tattataggctagtgatgtctcaaa

SEQ ID NO: 990378 - DNA, 25 bp, Homo sapien
ccatttattataggctagtgatgtc

SEQ ID NO: 990379 - DNA, 25 bp, Homo sapien
ggttcctggatgaagacaccgttac

SEQ ID NO: 990380 - DNA, 25 bp, Homo sapien
ttcctggatgaagacaccgttactg

SEQ ID NO: 990381 - DNA, 25 bp, Homo sapien
tgtggttcctggatgaagacaccgt

SEQ ID NO: 990382 - DNA, 25 bp, Homo sapien
tcctggatgaagacaccgttactgt

SEQ ID NO: 990383 - DNA, 25 bp, Homo sapien
tatgggtatggtgcacatgctttca

SEQ ID NO: 990384 - DNA, 25 bp, Homo sapien
gagctgttccgcaaatcttaaggag

SEQ ID NO: 990385 - DNA, 25 bp, Homo sapien
gatgtagtaacagtccaacttgctg

SEQ ID NO: 990386 - DNA, 25 bp, Homo sapien
tgtgaactacgtccgagctcagaga

SEQ ID NO: 990387 - DNA, 25 bp, Homo sapien
cgccaatggctaggtcggtctcagt

SEQ ID NO: 990388 - DNA, 25 bp, Homo sapien
ccgggtgcgaatagtaaactgctcg

SEQ ID NO: 990389 - DNA, 25 bp, Homo sapien
ccagagtccgccttgaataatcagc

SEQ ID NO: 990390 - DNA, 25 bp, Homo sapien
ccttcaggatgtgaagggcgagccc

SEQ ID NO: 990391 - DNA, 25 bp, Homo sapien
ggcgaccctggcgatggcggtgaag

SEQ ID NO: 990392 - DNA, 25 bp, Homo sapien
ctggcgatggcggtgaagcccatca

SEQ ID NO: 990393 - DNA, 25 bp, Homo sapien
accctggcgatggcggtgaagccca

SEQ ID NO: 990394 - DNA, 25 bp, Homo sapien
gccgcggcgaccctggcgatggcgg

SEQ ID NO: 990395 - DNA, 25 bp, Homo sapien
gagggaagaaaagcgacagagagca

SEQ ID NO: 990396 - DNA, 25 bp, Homo sapien
gtggcgccggcggagacggctgagg

SEQ ID NO: 990397 - DNA, 25 bp, Homo sapien
gcgccggcggagacggctgagggtg

SEQ ID NO: 990398 - DNA, 25 bp, Homo sapien
agggaagaaaagcgacagagagcaa

SEQ ID NO: 990399 - DNA, 25 bp, Homo sapien
ttcattagcttgtcaccggtgcggc

SEQ ID NO: 990400 - DNA, 25 bp, Homo sapien
tggagctggtgcttaaggaccccac

SEQ ID NO: 990401 - DNA, 25 bp, Homo sapien
tgctgtgcggagaacaacgggtaca

SEQ ID NO: 990402 - DNA, 25 bp, Homo sapien
tgcgtggagttcagttacccggagc

SEQ ID NO: 990403 - DNA, 25 bp, Homo sapien
tgatgaacatcaggagaggcaagag

SEQ ID NO: 990404 - DNA, 25 bp, Homo sapien
agaagctcattcacacagaagaccc

SEQ ID NO: 990405 - DNA, 25 bp, Homo sapien
caagaggtggaaatgttggctaaga

SEQ ID NO: 990406 - DNA, 25 bp, Homo sapien
aggtggaaatgttggctaagaagtt

SEQ ID NO: 990407 - DNA, 25 bp, Homo sapien
gctttggctatgatgagacagatcc

SEQ ID NO: 990408 - DNA, 25 bp, Homo sapien
tccatttattgataactcagaggct

SEQ ID NO: 990409 - DNA, 25 bp, Homo sapien
gatcggctacaagatttaattgata

SEQ ID NO: 990410 - DNA, 25 bp, Homo sapien
taaacaccggaaggatcggctacaa

SEQ ID NO: 990411 - DNA, 25 bp, Homo sapien
tctgtcacaactacacaagtttgcc

SEQ ID NO: 990412 - DNA, 25 bp, Homo sapien
tagcatggctgcgttacaatgaaac

SEQ ID NO: 990413 - DNA, 25 bp, Homo sapien
tcttgggattctctagtagttgctc

SEQ ID NO: 990414 - DNA, 25 bp, Homo sapien
tggatttggccagtgcatctcatgg

SEQ ID NO: 990415 - DNA, 25 bp, Homo sapien
gaattgccctgtatacctggagatg

SEQ ID NO: 990416 - DNA, 25 bp, Homo sapien
tcctgagtcgctgggcttactacgc

SEQ ID NO: 990417 - DNA, 25 bp, Homo sapien
cactcccacgtgaagctgcttggaa

SEQ ID NO: 990418 - DNA, 25 bp, Homo sapien
taaaccttgagatctagcctttggg

SEQ ID NO: 990419 - DNA, 25 bp, Homo sapien
tatgatgaattagttcccgcttctc

SEQ ID NO: 990420 - DNA, 25 bp, Homo sapien
tggcactctacagtttcgccaagct

SEQ ID NO: 990421 - DNA, 25 bp, Homo sapien
cttttatatcaacactggcactcta

SEQ ID NO: 990422 - DNA, 25 bp, Homo sapien
gaagatgatattacagacaaccaaa

SEQ ID NO: 990423 - DNA, 25 bp, Homo sapien
gaggtgagagtgctcttgaacccca

SEQ ID NO: 990424 - DNA, 25 bp, Homo sapien
caaacgattgtaatgcacactgaca

SEQ ID NO: 990425 - DNA, 25 bp, Homo sapien
taactgaatcgaaaccggaggtgag

SEQ ID NO: 990426 - DNA, 25 bp, Homo sapien
cactgctgatgctggattgctaaca

SEQ ID NO: 990427 - DNA, 25 bp, Homo sapien
agaagcggaagcggaaagaggaagg

SEQ ID NO: 990428 - DNA, 25 bp, Homo sapien
aagtggtacctacactcccagaggg

SEQ ID NO: 990429 - DNA, 25 bp, Homo sapien
tctgagcagcggtgatccagacctt

SEQ ID NO: 990430 - DNA, 25 bp, Homo sapien
gacgtcccggacttaaatctgagca

SEQ ID NO: 990431 - DNA, 25 bp, Homo sapien
tacacttctcaggttatgcccaaag

SEQ ID NO: 990432 - DNA, 25 bp, Homo sapien
tctttacacaggatatgaataatat

SEQ ID NO: 990433 - DNA, 25 bp, Homo sapien
tttacacaggatatgaataatattc

SEQ ID NO: 990434 - DNA, 25 bp, Homo sapien
aaaaattctttacacaggatatgaa

SEQ ID NO: 990435 - DNA, 25 bp, Homo sapien
aattctttacacaggatatgaataa

SEQ ID NO: 990436 - DNA, 25 bp, Homo sapien
gaaacactagtaaaacgtctgaaga

SEQ ID NO: 990437 - DNA, 25 bp, Homo sapien
ccttgaagcttttgtgccatgcaat

SEQ ID NO: 990438 - DNA, 25 bp, Homo sapien
tgagttacagctacaagaactaggc

SEQ ID NO: 990439 - DNA, 25 bp, Homo sapien
gaagaagttacatctcaatgtccag

SEQ ID NO: 990440 - DNA, 25 bp, Homo sapien
gatgatcgtttaagagaacctctgc

SEQ ID NO: 990441 - DNA, 25 bp, Homo sapien
ggctcgtagtcaagctaagtgtgcc

SEQ ID NO: 990442 - DNA, 25 bp, Homo sapien
ggaggactgccaggctcgtagtcaa

SEQ ID NO: 990443 - DNA, 25 bp, Homo sapien
gcaatgtcatgcctgaacagctatt

SEQ ID NO: 990444 - DNA, 25 bp, Homo sapien
gaaattccactgggatgacactatc

SEQ ID NO: 990445 - DNA, 25 bp, Homo sapien
accaggaaaacgtgtcataggacca

SEQ ID NO: 990446 - DNA, 25 bp, Homo sapien
gaaaacgtgtcataggaccaagaaa

SEQ ID NO: 990447 - DNA, 25 bp, Homo sapien
gagaaaccaggaaaacgtgtcatag

SEQ ID NO: 990448 - DNA, 25 bp, Homo sapien
tcaaattgggatgctatgagttaga

SEQ ID NO: 990449 - DNA, 25 bp, Homo sapien
tcttaagtcttttatggagacagaa

SEQ ID NO: 990450 - DNA, 25 bp, Homo sapien
actttgttatgtaaccttgttgaga

SEQ ID NO: 990451 - DNA, 25 bp, Homo sapien
taagtcttttatggagacagaagtg

SEQ ID NO: 990452 - DNA, 25 bp, Homo sapien
gaaagccggagtgttcataatcatc

SEQ ID NO: 990453 - DNA, 25 bp, Homo sapien
cttctttgaaagctgagttgggagg

SEQ ID NO: 990454 - DNA, 25 bp, Homo sapien
cattttgaccattgactatttagac

SEQ ID NO: 990455 - DNA, 25 bp, Homo sapien
tgctccgtgagtaaatgcagactcc

SEQ ID NO: 990456 - DNA, 25 bp, Homo sapien
gtgattcctgcacctaaacccaaag

SEQ ID NO: 990457 - DNA, 25 bp, Homo sapien
aggtgattcctgcacctaaacccaa

SEQ ID NO: 990458 - DNA, 25 bp, Homo sapien
ggtgattcctgcacctaaacccaaa

SEQ ID NO: 990459 - DNA, 25 bp, Homo sapien
aaggtgattcctgcacctaaaccca

SEQ ID NO: 990460 - DNA, 25 bp, Homo sapien
gggaatatgcatacaccaattgtga

SEQ ID NO: 990461 - DNA, 25 bp, Homo sapien
tagcagaggtcagtaggcactataa

SEQ ID NO: 990462 - DNA, 25 bp, Homo sapien
gcttacactttggttgcccttggag

SEQ ID NO: 990463 - DNA, 25 bp, Homo sapien
cccttggaggcatttggcactttct

SEQ ID NO: 990464 - DNA, 25 bp, Homo sapien
gctgcaggacagggcatacaaagag

SEQ ID NO: 990465 - DNA, 25 bp, Homo sapien
aggacagggcatacaaagaggcaga

SEQ ID NO: 990466 - DNA, 25 bp, Homo sapien
gcaggacagggcatacaaagaggca

SEQ ID NO: 990467 - DNA, 25 bp, Homo sapien
tgcaggacagggcatacaaagaggc

SEQ ID NO: 990468 - DNA, 25 bp, Homo sapien
tcgacgactcactagatgaagacct

SEQ ID NO: 990469 - DNA, 25 bp, Homo sapien
gataagcatgccaaccacaaagcct

SEQ ID NO: 990470 - DNA, 25 bp, Homo sapien
ggccctccagttggctcaaggataa

SEQ ID NO: 990471 - DNA, 25 bp, Homo sapien
gctttagcggttatcaacaatggga

SEQ ID NO: 990472 - DNA, 25 bp, Homo sapien
gcaatgaatgtacctgccagcagag

SEQ ID NO: 990473 - DNA, 25 bp, Homo sapien
tcagggtcttcagtggtaacagcca

SEQ ID NO: 990474 - DNA, 25 bp, Homo sapien
tcatgctctgggaacatccgaggcc

SEQ ID NO: 990475 - DNA, 25 bp, Homo sapien
tgtcacagatctccacgcagggttt

SEQ ID NO: 990476 - DNA, 25 bp, Homo sapien
tggagtgacaaccacctcgggatct

SEQ ID NO: 990477 - DNA, 25 bp, Homo sapien
gctttggaacggacacagctggagt

SEQ ID NO: 990478 - DNA, 25 bp, Homo sapien
cacagcaggagcatcattattggct

SEQ ID NO: 990479 - DNA, 25 bp, Homo sapien
ggtggccttgttccagtgaccatgc

SEQ ID NO: 990480 - DNA, 25 bp, Homo sapien
gcctgcacacttacagcaagcattt

SEQ ID NO: 990481 - DNA, 25 bp, Homo sapien
ggagctcagcatgcagcaacgcttt

SEQ ID NO: 990482 - DNA, 25 bp, Homo sapien
caggaggagctcagcatgcagcaac

SEQ ID NO: 990483 - DNA, 25 bp, Homo sapien
taaagggtttacagccaggaggagc

SEQ ID NO: 990484 - DNA, 25 bp, Homo sapien
gacacaatgttcaggtttatagagc

SEQ ID NO: 990485 - DNA, 25 bp, Homo sapien
tacagatgctttcactggtgcaaag

SEQ ID NO: 990486 - DNA, 25 bp, Homo sapien
tatagagctgaatgggtgatcaaac

SEQ ID NO: 990487 - DNA, 25 bp, Homo sapien
cctgtgtccccatagaactgagaag

SEQ ID NO: 990488 - DNA, 25 bp, Homo sapien
agggttaccccaatattgtctagag

SEQ ID NO: 990489 - DNA, 25 bp, Homo sapien
tctttactatacctgcaaaattacc

SEQ ID NO: 990490 - DNA, 25 bp, Homo sapien
tactgttatacatagttaattggaa

SEQ ID NO: 990491 - DNA, 25 bp, Homo sapien
aaaaagaacttattctcagttgaca

SEQ ID NO: 990492 - DNA, 25 bp, Homo sapien
taatttccagctcaaatcggagcag

SEQ ID NO: 990493 - DNA, 25 bp, Homo sapien
tgaaccctgcactgagccgaggtat

SEQ ID NO: 990494 - DNA, 25 bp, Homo sapien
tgaatatactccttcagtgcaggga

SEQ ID NO: 990495 - DNA, 25 bp, Homo sapien
tagctaccaggaaatgacgcagaag

SEQ ID NO: 990496 - DNA, 25 bp, Homo sapien
tttttgatatgtgccccttgtttcg

SEQ ID NO: 990497 - DNA, 25 bp, Homo sapien
acttttttgatatgtgccccttgtt

SEQ ID NO: 990498 - DNA, 25 bp, Homo sapien
tgatatgtgccccttgtttcgcagg

SEQ ID NO: 990499 - DNA, 25 bp, Homo sapien
gtgccccttgtttcgcaggcattct

SEQ ID NO: 990500 - DNA, 25 bp, Homo sapien
atatagaacgctgcacaattttgtg

SEQ ID NO: 990501 - DNA, 25 bp, Homo sapien
tgcacaattttgtgtatcatctttg

SEQ ID NO: 990502 - DNA, 25 bp, Homo sapien
gcacaattttgtgtatcatctttgc

SEQ ID NO: 990503 - DNA, 25 bp, Homo sapien
aatatagaacgctgcacaattttgt

SEQ ID NO: 990504 - DNA, 25 bp, Homo sapien
ggccggaggaggcagtatgagaaag

SEQ ID NO: 990505 - DNA, 25 bp, Homo sapien
ggaggaggcagtatgagaaagagaa

SEQ ID NO: 990506 - DNA, 25 bp, Homo sapien
ccggaggaggcagtatgagaaagag

SEQ ID NO: 990507 - DNA, 25 bp, Homo sapien
gccggaggaggcagtatgagaaaga

SEQ ID NO: 990508 - DNA, 25 bp, Homo sapien
aaagaatagagctttaattgattca

SEQ ID NO: 990509 - DNA, 25 bp, Homo sapien
tatcaaaaagggctgtattagtcta

SEQ ID NO: 990510 - DNA, 25 bp, Homo sapien
actcactgtcgtgcgaatagcaagg

SEQ ID NO: 990511 - DNA, 25 bp, Homo sapien
tccacgaggcccctcccttgacatg

SEQ ID NO: 990512 - DNA, 25 bp, Homo sapien
tttttcccacgaactaggcacgcca

SEQ ID NO: 990513 - DNA, 25 bp, Homo sapien
gctgtttggcatgcagtacttttaa

SEQ ID NO: 990514 - DNA, 25 bp, Homo sapien
tcttaacttcaaatcctatcgccct

SEQ ID NO: 990515 - DNA, 25 bp, Homo sapien
ataaggcagggtatcaggctaagga

SEQ ID NO: 990516 - DNA, 25 bp, Homo sapien
gagactcagcggttggtcggctaac

SEQ ID NO: 990517 - DNA, 25 bp, Homo sapien
catgtcctttgtctgagccgcaggt

SEQ ID NO: 990518 - DNA, 25 bp, Homo sapien
caatgacgcagtgaagaaaagcccc

SEQ ID NO: 990519 - DNA, 25 bp, Homo sapien
gctaacgggcatcttcaatgacgca

SEQ ID NO: 990520 - DNA, 25 bp, Homo sapien
gccatgaacatggagaatatccttg

SEQ ID NO: 990521 - DNA, 25 bp, Homo sapien
aatttcatggcaagggtgagcgctc

SEQ ID NO: 990522 - DNA, 25 bp, Homo sapien
gcttggtgggtctcaagttgcccca

SEQ ID NO: 990523 - DNA, 25 bp, Homo sapien
gatgctgcattcataggagaattga

SEQ ID NO: 990524 - DNA, 25 bp, Homo sapien
tattcacaaaaataggccgtgggct

SEQ ID NO: 990525 - DNA, 25 bp, Homo sapien
ggcctgtggaccgtagcttgctgac

SEQ ID NO: 990526 - DNA, 25 bp, Homo sapien
tatttgagtgttgtaggccacacag

SEQ ID NO: 990527 - DNA, 25 bp, Homo sapien
tatgtaaatgaacgagcctggcagt

SEQ ID NO: 990528 - DNA, 25 bp, Homo sapien
gaaccagagtatcgcgagatccggg

SEQ ID NO: 990529 - DNA, 25 bp, Homo sapien
ccagagccgttagggtggaactcca

SEQ ID NO: 990530 - DNA, 25 bp, Homo sapien
gatccggcttgcacagtcagttaag

SEQ ID NO: 990531 - DNA, 25 bp, Homo sapien
aagttgacacttcccagccgaggag

SEQ ID NO: 990532 - DNA, 25 bp, Homo sapien
cccgggacggtaagtctctgccagg

SEQ ID NO: 990533 - DNA, 25 bp, Homo sapien
cacctcccgggacggtaagtctctg

SEQ ID NO: 990534 - DNA, 25 bp, Homo sapien
gcccagatgcgcgcgatgctggacc

SEQ ID NO: 990535 - DNA, 25 bp, Homo sapien
ccgccgccatgtcggcgcaggccca

SEQ ID NO: 990536 - DNA, 25 bp, Homo sapien
gaaaatcgtgccgatgcctggcata

SEQ ID NO: 990537 - DNA, 25 bp, Homo sapien
cactcttagtgtcctgtctgtgaag

SEQ ID NO: 990538 - DNA, 25 bp, Homo sapien
cacttcaagaaaggacattcctggg

SEQ ID NO: 990539 - DNA, 25 bp, Homo sapien
caatctgagggcagcatgatggtgc

SEQ ID NO: 990540 - DNA, 25 bp, Homo sapien
ggatactcatcctcatacccaggaa

SEQ ID NO: 990541 - DNA, 25 bp, Homo sapien
tatggttagggactgtttcgggcaa

SEQ ID NO: 990542 - DNA, 25 bp, Homo sapien
gcagagaccaccttcgaaagattaa

SEQ ID NO: 990543 - DNA, 25 bp, Homo sapien
taaaataggcaggaatggcagcctg

SEQ ID NO: 990544 - DNA, 25 bp, Homo sapien
gaatcaggtactcttcagtaacagg

SEQ ID NO: 990545 - DNA, 25 bp, Homo sapien
tttaggttctcatgcactagcagct

SEQ ID NO: 990546 - DNA, 25 bp, Homo sapien
gaaggcagggccaaaataggtcagt

SEQ ID NO: 990547 - DNA, 25 bp, Homo sapien
gatgggtagtaggaattcaatggcc

SEQ ID NO: 990548 - DNA, 25 bp, Homo sapien
cattaatatatcctcggccgggtgc

SEQ ID NO: 990549 - DNA, 25 bp, Homo sapien
aagctattactccaggttgtagtgc

SEQ ID NO: 990550 - DNA, 25 bp, Homo sapien
gccatttgccaaagccagatatggt

SEQ ID NO: 990551 - DNA, 25 bp, Homo sapien
cagatatggtttacttactgttccc

SEQ ID NO: 990552 - DNA, 25 bp, Homo sapien
tatggagcacccattcatttgcggt

SEQ ID NO: 990553 - DNA, 25 bp, Homo sapien
tgttaagcacaaatcagttactctg

SEQ ID NO: 990554 - DNA, 25 bp, Homo sapien
cacaaaaaagctcaccagggatact

SEQ ID NO: 990555 - DNA, 25 bp, Homo sapien
cagggatactgcctggtttgctata

SEQ ID NO: 990556 - DNA, 25 bp, Homo sapien
tataccctggttgcaaattagaatg

SEQ ID NO: 990557 - DNA, 25 bp, Homo sapien
tcgccaagccgtgagttatcgctaa

SEQ ID NO: 990558 - DNA, 25 bp, Homo sapien
gtagcaggcgtaaacactaaactga

SEQ ID NO: 990559 - DNA, 25 bp, Homo sapien
gattgaatcacatcctacacgaaag

SEQ ID NO: 990560 - DNA, 25 bp, Homo sapien
ccaaagtggagagtatcttggcttt

SEQ ID NO: 990561 - DNA, 25 bp, Homo sapien
gagtatcttggctttattggattta

SEQ ID NO: 990562 - DNA, 25 bp, Homo sapien
agagtatcttggctttattggattt

SEQ ID NO: 990563 - DNA, 25 bp, Homo sapien
tcccaaagtggagagtatcttggct

SEQ ID NO: 990564 - DNA, 25 bp, Homo sapien
gacaccgagttagggatctttcaaa

SEQ ID NO: 990565 - DNA, 25 bp, Homo sapien
tcaagttggtttaatggatgctgcc

SEQ ID NO: 990566 - DNA, 25 bp, Homo sapien
aagtttatcggaattctatgccagc

SEQ ID NO: 990567 - DNA, 25 bp, Homo sapien
cagacgactggctgatcattttggg

SEQ ID NO: 990568 - DNA, 25 bp, Homo sapien
tcacgtgaacgcaagaggagaactc

SEQ ID NO: 990569 - DNA, 25 bp, Homo sapien
gagagcatcgcagacatcgatctcg

SEQ ID NO: 990570 - DNA, 25 bp, Homo sapien
ggagaactcgatccaaatctcggga

SEQ ID NO: 990571 - DNA, 25 bp, Homo sapien
tcttgtctggtagatccaggtccag

SEQ ID NO: 990572 - DNA, 25 bp, Homo sapien
tagactggcataagactaccacatg

SEQ ID NO: 990573 - DNA, 25 bp, Homo sapien
gatccgagagtttagatgaggcaaa

SEQ ID NO: 990574 - DNA, 25 bp, Homo sapien
tttgaacaggtagaatcagctagga

SEQ ID NO: 990575 - DNA, 25 bp, Homo sapien
caaaaatggcttcaggtagtcggta

SEQ ID NO: 990576 - DNA, 25 bp, Homo sapien
tgctgtgggcatttcctctattctg

SEQ ID NO: 990577 - DNA, 25 bp, Homo sapien
tgtgcaaggcaccaaaggacataaa

SEQ ID NO: 990578 - DNA, 25 bp, Homo sapien
gcagggactcttttcgtaataagca

SEQ ID NO: 990579 - DNA, 25 bp, Homo sapien
gtcactagaactatttgctgtgggc

SEQ ID NO: 990580 - DNA, 25 bp, Homo sapien
ccagccacttcagggttgtttgtaa

SEQ ID NO: 990581 - DNA, 25 bp, Homo sapien
tgctgactatattccagccacttca

SEQ ID NO: 990582 - DNA, 25 bp, Homo sapien
tgagctgttcatgtgggccccttgc

SEQ ID NO: 990583 - DNA, 25 bp, Homo sapien
tgtttgtaatgaccgttatagagaa

SEQ ID NO: 990584 - DNA, 25 bp, Homo sapien
tcggagtaagatcaaaaggactagc

SEQ ID NO: 990585 - DNA, 25 bp, Homo sapien
gcataaagcgcaccatcactgtggg

SEQ ID NO: 990586 - DNA, 25 bp, Homo sapien
gatggtataggctgccccaacatga

SEQ ID NO: 990587 - DNA, 25 bp, Homo sapien
tatatcaatggttactgcagctgtg

SEQ ID NO: 990588 - DNA, 25 bp, Homo sapien
tcttacctgtgattattagacctaa

SEQ ID NO: 990589 - DNA, 25 bp, Homo sapien
aacaaagactttcttacctgtgatt

SEQ ID NO: 990590 - DNA, 25 bp, Homo sapien
gactttcttacctgtgattattaga

SEQ ID NO: 990591 - DNA, 25 bp, Homo sapien
tacctgtgattattagacctaaaac

SEQ ID NO: 990592 - DNA, 25 bp, Homo sapien
tcaaaatctgctctgatgctccttt

SEQ ID NO: 990593 - DNA, 25 bp, Homo sapien
gatctaagagatggggccagccaag

SEQ ID NO: 990594 - DNA, 25 bp, Homo sapien
agaattgggctgtcagtcaagcagg

SEQ ID NO: 990595 - DNA, 25 bp, Homo sapien
attgggctgtcagtcaagcagggat

SEQ ID NO: 990596 - DNA, 25 bp, Homo sapien
gaactaaggccccagctaggagcct

SEQ ID NO: 990597 - DNA, 25 bp, Homo sapien
ggtagcaagctagcactggacacag

SEQ ID NO: 990598 - DNA, 25 bp, Homo sapien
ggctggccctgtaaccaataaaatg

SEQ ID NO: 990599 - DNA, 25 bp, Homo sapien
gctatgaggaagtccaagcagccat

SEQ ID NO: 990600 - DNA, 25 bp, Homo sapien
tagattcctctactgcgtgctggga

SEQ ID NO: 990601 - DNA, 25 bp, Homo sapien
tggagtcagatagcaagtgggtttc

SEQ ID NO: 990602 - DNA, 25 bp, Homo sapien
aaagaatgcggcctttggagtcaga

SEQ ID NO: 990603 - DNA, 25 bp, Homo sapien
taaccgagggagtggattatcacaa

SEQ ID NO: 990604 - DNA, 25 bp, Homo sapien
tgtatactcataacctacagatgtg

SEQ ID NO: 990605 - DNA, 25 bp, Homo sapien
gcttcctgcccacataggatgtatt

SEQ ID NO: 990606 - DNA, 25 bp, Homo sapien
tgtattttgattggcgcctgcccca

SEQ ID NO: 990607 - DNA, 25 bp, Homo sapien
tctagctgggtaacactgagtacaa

SEQ ID NO: 990608 - DNA, 25 bp, Homo sapien
taatactaatgaaaaatacagtgtg

SEQ ID NO: 990609 - DNA, 25 bp, Homo sapien
ctaatgaaaaatacagtgtgagaaa

SEQ ID NO: 990610 - DNA, 25 bp, Homo sapien
ataataatactaatgaaaaatacag

SEQ ID NO: 990611 - DNA, 25 bp, Homo sapien
tactaatgaaaaatacagtgtgaga

SEQ ID NO: 990612 - DNA, 25 bp, Homo sapien
gaacaacggcagactcatttccatg

SEQ ID NO: 990613 - DNA, 25 bp, Homo sapien
catgaagacctggataactgggtcc

SEQ ID NO: 990614 - DNA, 25 bp, Homo sapien
tggaatccgctgtggttgttaaccc

SEQ ID NO: 990615 - DNA, 25 bp, Homo sapien
gactaatattggcactcaggcctga

SEQ ID NO: 990616 - DNA, 25 bp, Homo sapien
cagggccccacagttgatatccaga

SEQ ID NO: 990617 - DNA, 25 bp, Homo sapien
tgatatccagattgtcctcgccgtc

SEQ ID NO: 990618 - DNA, 25 bp, Homo sapien
cacagacccagggtcttggagtgct

SEQ ID NO: 990619 - DNA, 25 bp, Homo sapien
ttggcacagacccagggtcttggag

SEQ ID NO: 990620 - DNA, 25 bp, Homo sapien
tggggcctcgtcgatccagtgccag

SEQ ID NO: 990621 - DNA, 25 bp, Homo sapien
tcgtcgatccagtgccagccctggg

SEQ ID NO: 990622 - DNA, 25 bp, Homo sapien
ggagtggggcctcgtcgatccagtg

SEQ ID NO: 990623 - DNA, 25 bp, Homo sapien
agactgggtatctgcccaggaagtc

SEQ ID NO: 990624 - DNA, 25 bp, Homo sapien
tggacactggcgtggcttgcctggg

SEQ ID NO: 990625 - DNA, 25 bp, Homo sapien
ccttgaaagctggattggatgcctg

SEQ ID NO: 990626 - DNA, 25 bp, Homo sapien
gaaaagtaagctggtcactcccctg

SEQ ID NO: 990627 - DNA, 25 bp, Homo sapien
ccagctggccaatccagaaggatct

SEQ ID NO: 990628 - DNA, 25 bp, Homo sapien
ctaatggcttgcctccttgtcactt

SEQ ID NO: 990629 - DNA, 25 bp, Homo sapien
cctgtattagttggtgaacctggtg

SEQ ID NO: 990630 - DNA, 25 bp, Homo sapien
tgcgtgccaccactcatgtgctgcc

SEQ ID NO: 990631 - DNA, 25 bp, Homo sapien
tgccatgacgcccaatttagtagag

SEQ ID NO: 990632 - DNA, 25 bp, Homo sapien
tgggcagctgttccttggctggtgc

SEQ ID NO: 990633 - DNA, 25 bp, Homo sapien
tcttgaatcctaaagaccagagtgc

SEQ ID NO: 990634 - DNA, 25 bp, Homo sapien
tgagtggacggaacagagaatgtac

SEQ ID NO: 990635 - DNA, 25 bp, Homo sapien
ccttggctggtgcttcggggacaca

SEQ ID NO: 990636 - DNA, 25 bp, Homo sapien
tcatctgaggtgaacctgtctgatg

SEQ ID NO: 990637 - DNA, 25 bp, Homo sapien
ccccattggcaacaaggagttctaa

SEQ ID NO: 990638 - DNA, 25 bp, Homo sapien
tgtctgatgtgaggcccgttttact

SEQ ID NO: 990639 - DNA, 25 bp, Homo sapien
ttggcatttgctgtgctcaatctgt

SEQ ID NO: 990640 - DNA, 25 bp, Homo sapien
tctcaggacaaaatgctatgttcat

SEQ ID NO: 990641 - DNA, 25 bp, Homo sapien
gtctcaggacaaaatgctatgttca

SEQ ID NO: 990642 - DNA, 25 bp, Homo sapien
tgtctcaggacaaaatgctatgttc

SEQ ID NO: 990643 - DNA, 25 bp, Homo sapien
ctgtctcaggacaaaatgctatgtt

SEQ ID NO: 990644 - DNA, 25 bp, Homo sapien
taagcgatgggattccataagtaag

SEQ ID NO: 990645 - DNA, 25 bp, Homo sapien
tgggattccataagtaagtaatggg

SEQ ID NO: 990646 - DNA, 25 bp, Homo sapien
gtaagtaatgggatgaactatgtcc

SEQ ID NO: 990647 - DNA, 25 bp, Homo sapien
cagtcttaagcgatgggattccata

SEQ ID NO: 990648 - DNA, 25 bp, Homo sapien
gatacaaccagtctgagtcgtttgg

SEQ ID NO: 990649 - DNA, 25 bp, Homo sapien
tctgagtcgtttggtacaggagcct

SEQ ID NO: 990650 - DNA, 25 bp, Homo sapien
tttgcagatacaaccagtctgagtc

SEQ ID NO: 990651 - DNA, 25 bp, Homo sapien
gggtgctttctttgcacagcccatt

SEQ ID NO: 990652 - DNA, 25 bp, Homo sapien
ctcctcggacaacacccagcctggg

SEQ ID NO: 990653 - DNA, 25 bp, Homo sapien
tagcgtggtaggctgagcagaaagc

SEQ ID NO: 990654 - DNA, 25 bp, Homo sapien
gggagggtagcgtggtaggctgagc

SEQ ID NO: 990655 - DNA, 25 bp, Homo sapien
agtgctcctcggacaacacccagcc

SEQ ID NO: 990656 - DNA, 25 bp, Homo sapien
cccagtacagggacttcacgtacat

SEQ ID NO: 990657 - DNA, 25 bp, Homo sapien
aggccaggaccacaatgacaacccc

SEQ ID NO: 990658 - DNA, 25 bp, Homo sapien
ccatgaacgccagggcccagtacag

SEQ ID NO: 990659 - DNA, 25 bp, Homo sapien
acagccatgaacgccagggcccagt

SEQ ID NO: 990660 - DNA, 25 bp, Homo sapien
ttattgattgtaagcccgagaggcc

SEQ ID NO: 990661 - DNA, 25 bp, Homo sapien
cttagtcggtcagctgcccagcggt

SEQ ID NO: 990662 - DNA, 25 bp, Homo sapien
ttgtaagcccgagaggccagatcgg

SEQ ID NO: 990663 - DNA, 25 bp, Homo sapien
gatcgggatggccaactgggtccct

SEQ ID NO: 990664 - DNA, 25 bp, Homo sapien
ttcacgcgcacatctacctgcagct

SEQ ID NO: 990665 - DNA, 25 bp, Homo sapien
cttgaccaaggcagggcccggtgac

SEQ ID NO: 990666 - DNA, 25 bp, Homo sapien
ggcctgggcgatggcgtgctgctgc

SEQ ID NO: 990667 - DNA, 25 bp, Homo sapien
tcgggcaccggcaccttgaggaagc

SEQ ID NO: 990668 - DNA, 25 bp, Homo sapien
ggaccttcaggttgtcgcaccttcg

SEQ ID NO: 990669 - DNA, 25 bp, Homo sapien
ttgggctgctttcgggaccttcagg

SEQ ID NO: 990670 - DNA, 25 bp, Homo sapien
ctgctccagcgtggggaccaggctt

SEQ ID NO: 990671 - DNA, 25 bp, Homo sapien
gttgtcgcaccttcgcgggcacctg

SEQ ID NO: 990672 - DNA, 25 bp, Homo sapien
ggcgcagcctcccaagactcctcca

SEQ ID NO: 990673 - DNA, 25 bp, Homo sapien
gcgcagcctcccaagactcctccat

SEQ ID NO: 990674 - DNA, 25 bp, Homo sapien
gcccagtgcagaggagcttcgctct

SEQ ID NO: 990675 - DNA, 25 bp, Homo sapien
tccgtccggattggtccagccgcgt

SEQ ID NO: 990676 - DNA, 25 bp, Homo sapien
gcgtcgccgaagttgtcaggccacg

SEQ ID NO: 990677 - DNA, 25 bp, Homo sapien
cccggagacgctgaggagcgcacct

SEQ ID NO: 990678 - DNA, 25 bp, Homo sapien
gagaaaagcagaacaccagcggagg

SEQ ID NO: 990679 - DNA, 25 bp, Homo sapien
agcagaacaccagcggaggcttgtg

SEQ ID NO: 990680 - DNA, 25 bp, Homo sapien
agaacaccagcggaggcttgtggca

SEQ ID NO: 990681 - DNA, 25 bp, Homo sapien
gaggcttgtggcagggaacccggag

SEQ ID NO: 990682 - DNA, 25 bp, Homo sapien
aagagaagggatgagacaatgttga

SEQ ID NO: 990683 - DNA, 25 bp, Homo sapien
tactcgggtgcctgaaaatacaaaa

SEQ ID NO: 990684 - DNA, 25 bp, Homo sapien
gtgagggccaggcttcgatggagtc

SEQ ID NO: 990685 - DNA, 25 bp, Homo sapien
cacgtctgtcttggggtgagggcca

SEQ ID NO: 990686 - DNA, 25 bp, Homo sapien
tccacgtctgtcttggggtgagggc

SEQ ID NO: 990687 - DNA, 25 bp, Homo sapien
gggccaggcttcgatggagtctctc

SEQ ID NO: 990688 - DNA, 25 bp, Homo sapien
taatgtcctgaaaaaggatgctcac

SEQ ID NO: 990689 - DNA, 25 bp, Homo sapien
ttaatgtcctgaaaaaggatgctca

SEQ ID NO: 990690 - DNA, 25 bp, Homo sapien
taggatgtagatccccttgcccttt

SEQ ID NO: 990691 - DNA, 25 bp, Homo sapien
tgccctttatgtggcattgacagcc

SEQ ID NO: 990692 - DNA, 25 bp, Homo sapien
tagatgtagtctccgggcactggtc

SEQ ID NO: 990693 - DNA, 25 bp, Homo sapien
tcttcctgatgtagatgtagtctcc

SEQ ID NO: 990694 - DNA, 25 bp, Homo sapien
gaagccttctaaggtcagcgccact

SEQ ID NO: 990695 - DNA, 25 bp, Homo sapien
tgtgattgactgtcggaagccttct

SEQ ID NO: 990696 - DNA, 25 bp, Homo sapien
cactgccgatgcgttggtattacac

SEQ ID NO: 990697 - DNA, 25 bp, Homo sapien
cagactggtttgtacctggtaccaa

SEQ ID NO: 990698 - DNA, 25 bp, Homo sapien
ccaacagtccctctatcaaatatga

SEQ ID NO: 990699 - DNA, 25 bp, Homo sapien
gctgactacgaatctgtgaatgaat

SEQ ID NO: 990700 - DNA, 25 bp, Homo sapien
gaatgaatgcatggaaggcgtttgt

SEQ ID NO: 990701 - DNA, 25 bp, Homo sapien
gaaggcagaacttatgctgactacg

SEQ ID NO: 990702 - DNA, 25 bp, Homo sapien
tacggtgtgctgtagcggaagtttt

SEQ ID NO: 990703 - DNA, 25 bp, Homo sapien
tcggcaggctcaacaggctgataaa

SEQ ID NO: 990704 - DNA, 25 bp, Homo sapien
acacaggtgagtacggtgtgctgta

SEQ ID NO: 990705 - DNA, 25 bp, Homo sapien
aataattgtattggaagcattaggg

SEQ ID NO: 990706 - DNA, 25 bp, Homo sapien
cttccactgtttatatctgctttat

SEQ ID NO: 990707 - DNA, 25 bp, Homo sapien
ttcactgtagtaacccttcttcaag

SEQ ID NO: 990708 - DNA, 25 bp, Homo sapien
atatctgctttataacgttcactgt

SEQ ID NO: 990709 - DNA, 25 bp, Homo sapien
gctttataacgttcactgtagtaac

SEQ ID NO: 990710 - DNA, 25 bp, Homo sapien
ccctgggtgtgcagcaagatggcct

SEQ ID NO: 990711 - DNA, 25 bp, Homo sapien
acggagtgtctgatgacccggccct

SEQ ID NO: 990712 - DNA, 25 bp, Homo sapien
tgctcaagacctgcttccagcggag

SEQ ID NO: 990713 - DNA, 25 bp, Homo sapien
tgccctctgcaaggcgaagcggtgg

SEQ ID NO: 990714 - DNA, 25 bp, Homo sapien
gaacagaagacctggcgaagctgga

SEQ ID NO: 990715 - DNA, 25 bp, Homo sapien
ctggaggttattcgttttcagggct

SEQ ID NO: 990716 - DNA, 25 bp, Homo sapien
cagaatcactgagccattgcgaggg

SEQ ID NO: 990717 - DNA, 25 bp, Homo sapien
agcagaatcactgagccattgcgag

SEQ ID NO: 990718 - DNA, 25 bp, Homo sapien
tagttgagagcaccgagccatttcc

SEQ ID NO: 990719 - DNA, 25 bp, Homo sapien
taatttagaagcacacgacgtcatg

SEQ ID NO: 990720 - DNA, 25 bp, Homo sapien
gaaaagtactgctattccgagccca

SEQ ID NO: 990721 - DNA, 25 bp, Homo sapien
tattgccgatctcacagggctacgg

SEQ ID NO: 990722 - DNA, 25 bp, Homo sapien
cacagtattaactggcatcaagcct

SEQ ID NO: 990723 - DNA, 25 bp, Homo sapien
acacgttggtgtctgggcgggctga

SEQ ID NO: 990724 - DNA, 25 bp, Homo sapien
agatgaatgccgctttgctccaacc

SEQ ID NO: 990725 - DNA, 25 bp, Homo sapien
aaggctaacagtccaggagatgaat

SEQ ID NO: 990726 - DNA, 25 bp, Homo sapien
tgcggttcaccaggctccagttaaa

SEQ ID NO: 990727 - DNA, 25 bp, Homo sapien
gattcggccaggtatgcaattgggc

SEQ ID NO: 990728 - DNA, 25 bp, Homo sapien
taagtaaggactaggttggcatccc

SEQ ID NO: 990729 - DNA, 25 bp, Homo sapien
gcttgagagcttggtcctagtgaca

SEQ ID NO: 990730 - DNA, 25 bp, Homo sapien
cccaggtgcgccgatggcaaaagga

SEQ ID NO: 990731 - DNA, 25 bp, Homo sapien
gggggcaaatgtccctgcattgaag

SEQ ID NO: 990732 - DNA, 25 bp, Homo sapien
caaaaggatggattgtggggaagcg

SEQ ID NO: 990733 - DNA, 25 bp, Homo sapien
gccacgccccaggtgcgccgatggc

SEQ ID NO: 990734 - DNA, 25 bp, Homo sapien
ggtgctctccagtaaggcgaactga

SEQ ID NO: 990735 - DNA, 25 bp, Homo sapien
caagacttggaactcgggatgagac

SEQ ID NO: 990736 - DNA, 25 bp, Homo sapien
caggtgaaagagtaagtagcctcca

SEQ ID NO: 990737 - DNA, 25 bp, Homo sapien
catgttgtcagaagcccaatcaagg

SEQ ID NO: 990738 - DNA, 25 bp, Homo sapien
gtgtcctctgaagcgtttgctgccc

SEQ ID NO: 990739 - DNA, 25 bp, Homo sapien
gtcctctgaagcgtttgctgccctc

SEQ ID NO: 990740 - DNA, 25 bp, Homo sapien
tgtgtcctctgaagcgtttgctgcc

SEQ ID NO: 990741 - DNA, 25 bp, Homo sapien
cctctgaagcgtttgctgccctcac

SEQ ID NO: 990742 - DNA, 25 bp, Homo sapien
taaagacagtattgataatggcccg

SEQ ID NO: 990743 - DNA, 25 bp, Homo sapien
ataatggcccgagggaagggaatct

SEQ ID NO: 990744 - DNA, 25 bp, Homo sapien
cacttggcaagactgcccggctgtg

SEQ ID NO: 990745 - DNA, 25 bp, Homo sapien
tcctgctgtctcagagggctgcgct

SEQ ID NO: 990746 - DNA, 25 bp, Homo sapien
gcgtctgtcgctcggtaaggcacta

SEQ ID NO: 990747 - DNA, 25 bp, Homo sapien
tctactagggtgtctgtgacgaccg

SEQ ID NO: 990748 - DNA, 25 bp, Homo sapien
tactatgaagagagggaactcccca

SEQ ID NO: 990749 - DNA, 25 bp, Homo sapien
gctgttgaccctttcgagttctgga

SEQ ID NO: 990750 - DNA, 25 bp, Homo sapien
caaattgggctggatactgactcgg

SEQ ID NO: 990751 - DNA, 25 bp, Homo sapien
tgatgtaggcctgctgccttcggtg

SEQ ID NO: 990752 - DNA, 25 bp, Homo sapien
ctcccagtgcggtccgtggtgatgt

SEQ ID NO: 990753 - DNA, 25 bp, Homo sapien
ttgtgcgggaaggagtacggagcct

SEQ ID NO: 990754 - DNA, 25 bp, Homo sapien
ctgccggtaggtgatggctccagat

SEQ ID NO: 990755 - DNA, 25 bp, Homo sapien
tccctgaagagtgaccgctggtgga

SEQ ID NO: 990756 - DNA, 25 bp, Homo sapien
cgctggtggaggtcacgttgctgga

SEQ ID NO: 990757 - DNA, 25 bp, Homo sapien
ctccagatgagctccctgaagagtg

SEQ ID NO: 990758 - DNA, 25 bp, Homo sapien
tgtaggaggacgagtggtgactggt

SEQ ID NO: 990759 - DNA, 25 bp, Homo sapien
cttgtaggaggacgagtggtgactg

SEQ ID NO: 990760 - DNA, 25 bp, Homo sapien
taggaggacgagtggtgactggtgt

SEQ ID NO: 990761 - DNA, 25 bp, Homo sapien
gaggacgagtggtgactggtgttga

SEQ ID NO: 990762 - DNA, 25 bp, Homo sapien
gcgtgaataaggaggaggcatcaca

SEQ ID NO: 990763 - DNA, 25 bp, Homo sapien
taaaccagatgaagacgctgacagt

SEQ ID NO: 990764 - DNA, 25 bp, Homo sapien
cacagatcacgcagatgaggtggcg

SEQ ID NO: 990765 - DNA, 25 bp, Homo sapien
tgacagtcagggacagcccaagtcc

SEQ ID NO: 990766 - DNA, 25 bp, Homo sapien
tatttttggtagagacagagtttga

SEQ ID NO: 990767 - DNA, 25 bp, Homo sapien
tgacctcaagtgatttgcctgcctc

SEQ ID NO: 990768 - DNA, 25 bp, Homo sapien
caccgcgcccagctgctaatttttg

SEQ ID NO: 990769 - DNA, 25 bp, Homo sapien
ccatgttagccaggctggtcgtgaa

SEQ ID NO: 990770 - DNA, 25 bp, Homo sapien
gatgcctaattttgggagggctcca

SEQ ID NO: 990771 - DNA, 25 bp, Homo sapien
gggccctttggttactgctagagaa

SEQ ID NO: 990772 - DNA, 25 bp, Homo sapien
tgtcaaccagaatgctcgccctggc

SEQ ID NO: 990773 - DNA, 25 bp, Homo sapien
catttgcccgggtggaaaaagatgg

SEQ ID NO: 990774 - DNA, 25 bp, Homo sapien
cagtgcatgagcagagaaacacaca

SEQ ID NO: 990775 - DNA, 25 bp, Homo sapien
tattccagggcccaattttcaagac

SEQ ID NO: 990776 - DNA, 25 bp, Homo sapien
ttttcaagacaagccttcgcgggac

SEQ ID NO: 990777 - DNA, 25 bp, Homo sapien
ttccctagcaagactcggaggaggt

SEQ ID NO: 990778 - DNA, 25 bp, Homo sapien
cagagaggtattgattacaggatta

SEQ ID NO: 990779 - DNA, 25 bp, Homo sapien
cagtcactgggcactttctattgta

SEQ ID NO: 990780 - DNA, 25 bp, Homo sapien
aaatcctcggtaagggtcgcctgca

SEQ ID NO: 990781 - DNA, 25 bp, Homo sapien
aaaacgctgcttatacaatgtgctg

SEQ ID NO: 990782 - DNA, 25 bp, Homo sapien
cagcagaaaagcaggaaaaccactc

SEQ ID NO: 990783 - DNA, 25 bp, Homo sapien
agggagaggttcctgccctgtcctg

SEQ ID NO: 990784 - DNA, 25 bp, Homo sapien
caggaaaaccactctccagggagag

SEQ ID NO: 990785 - DNA, 25 bp, Homo sapien
cagggagaggttcctgccctgtcct

SEQ ID NO: 990786 - DNA, 25 bp, Homo sapien
gggggttccccgtgcagtgattctc

SEQ ID NO: 990787 - DNA, 25 bp, Homo sapien
gtgacacagctgatgacgttttttc

SEQ ID NO: 990788 - DNA, 25 bp, Homo sapien
cagcacgctgctgcacggagtaggg

SEQ ID NO: 990789 - DNA, 25 bp, Homo sapien
tccaccaatacttcgctggcctggg

SEQ ID NO: 990790 - DNA, 25 bp, Homo sapien
ttttaggcaaagttacaggactggc

SEQ ID NO: 990791 - DNA, 25 bp, Homo sapien
ggtttagtgacaccctcaatcaggt

SEQ ID NO: 990792 - DNA, 25 bp, Homo sapien
tcttacgagtggagctgctggccag

SEQ ID NO: 990793 - DNA, 25 bp, Homo sapien
tccctctgaaggtcatcggctgcct

SEQ ID NO: 990794 - DNA, 25 bp, Homo sapien
cctgagaggaggacacctcacaggt

SEQ ID NO: 990795 - DNA, 25 bp, Homo sapien
gaatgacaattgtctgccgctgccg

SEQ ID NO: 990796 - DNA, 25 bp, Homo sapien
cttgacacgcttggatcgctgtggg

SEQ ID NO: 990797 - DNA, 25 bp, Homo sapien
acccacaggtgaccgaggtgctgca

SEQ ID NO: 990798 - DNA, 25 bp, Homo sapien
tggttggctgctgccgcatcacgtg

SEQ ID NO: 990799 - DNA, 25 bp, Homo sapien
tgaccggtcaatagtgcaggctgct

SEQ ID NO: 990800 - DNA, 25 bp, Homo sapien
taatggcttccgtgagcatgcgtat

SEQ ID NO: 990801 - DNA, 25 bp, Homo sapien
tgctggaagggtcacatgaccggtc

SEQ ID NO: 990802 - DNA, 25 bp, Homo sapien
gaatcacggtggcatgctgcactga

SEQ ID NO: 990803 - DNA, 25 bp, Homo sapien
ctgcactgatgtgtgggtggccact

SEQ ID NO: 990804 - DNA, 25 bp, Homo sapien
tgggtggccactccagtcagttgct

SEQ ID NO: 990805 - DNA, 25 bp, Homo sapien
tgcctgccatggtctcgggaatcac

SEQ ID NO: 990806 - DNA, 25 bp, Homo sapien
tgctggcatcagacttactgggtgt

SEQ ID NO: 990807 - DNA, 25 bp, Homo sapien
tcagagcacctacatggatacagag

SEQ ID NO: 990808 - DNA, 25 bp, Homo sapien
catgaagggacaagaacagacaagg

SEQ ID NO: 990809 - DNA, 25 bp, Homo sapien
aattaacaactgtaaagtgccctgg

SEQ ID NO: 990810 - DNA, 25 bp, Homo sapien
ctgggcaagcagacctggttggatc

SEQ ID NO: 990811 - DNA, 25 bp, Homo sapien
caccgagtagccagcgtgcttagag

SEQ ID NO: 990812 - DNA, 25 bp, Homo sapien
tgcattttccattcgcaccgagtag

SEQ ID NO: 990813 - DNA, 25 bp, Homo sapien
gcttgagtgacgatgggaactgcat

SEQ ID NO: 990814 - DNA, 25 bp, Homo sapien
gaggagccctctagttcagtgatac

SEQ ID NO: 990815 - DNA, 25 bp, Homo sapien
ccacacagaggatatttcatgcgag

SEQ ID NO: 990816 - DNA, 25 bp, Homo sapien
aaagtaggacagatatgctcgcaga

SEQ ID NO: 990817 - DNA, 25 bp, Homo sapien
cacagtttacaccatgaggcttgca

SEQ ID NO: 990818 - DNA, 25 bp, Homo sapien
gggcacaaatctgggctgttcctgt

SEQ ID NO: 990819 - DNA, 25 bp, Homo sapien
gtcaggccgggcacaaatctgggct

SEQ ID NO: 990820 - DNA, 25 bp, Homo sapien
tgagagcttgctggaacgggtcagg

SEQ ID NO: 990821 - DNA, 25 bp, Homo sapien
ccggggggacacacgatgagagctt

SEQ ID NO: 990822 - DNA, 25 bp, Homo sapien
tagatgggtagtttagtatggagac

SEQ ID NO: 990823 - DNA, 25 bp, Homo sapien
tagagtgtagatgggtagtttagta

SEQ ID NO: 990824 - DNA, 25 bp, Homo sapien
tagtttagtatggagacttcgggat

SEQ ID NO: 990825 - DNA, 25 bp, Homo sapien
gaaatagtggcactggtagaggagg

SEQ ID NO: 990826 - DNA, 25 bp, Homo sapien
gcatgttgggagacacgaatctaaa

SEQ ID NO: 990827 - DNA, 25 bp, Homo sapien
tgggagacacgaatctaaatcaaat

SEQ ID NO: 990828 - DNA, 25 bp, Homo sapien
gtggcatgttgggagacacgaatct

SEQ ID NO: 990829 - DNA, 25 bp, Homo sapien
agggaggtggcatgttgggagacac

SEQ ID NO: 990830 - DNA, 25 bp, Homo sapien
gaattattgacccagcttccttgag

SEQ ID NO: 990831 - DNA, 25 bp, Homo sapien
tagtagacgttcaaatggttccaga

SEQ ID NO: 990832 - DNA, 25 bp, Homo sapien
tccacggaaatgttagagaagttgc

SEQ ID NO: 990833 - DNA, 25 bp, Homo sapien
tcagctgccttgagacttaacgggt

SEQ ID NO: 990834 - DNA, 25 bp, Homo sapien
gacaactgccttttgatgagcaacc

SEQ ID NO: 990835 - DNA, 25 bp, Homo sapien
agagtctttgcgacaccctttggag

SEQ ID NO: 990836 - DNA, 25 bp, Homo sapien
tggcccaagcatcacactaagttac

SEQ ID NO: 990837 - DNA, 25 bp, Homo sapien
gagactccacttgacatgacgcctg

SEQ ID NO: 990838 - DNA, 25 bp, Homo sapien
cagtttcttagacactagaggcagt

SEQ ID NO: 990839 - DNA, 25 bp, Homo sapien
taaatattgcctgggtgtcatccaa

SEQ ID NO: 990840 - DNA, 25 bp, Homo sapien
tctttaccaggcacatatcaggcat

SEQ ID NO: 990841 - DNA, 25 bp, Homo sapien
gcctgaactgggtgattccctgagt

SEQ ID NO: 990842 - DNA, 25 bp, Homo sapien
tgttaaaggtcatggtcaggttggt

SEQ ID NO: 990843 - DNA, 25 bp, Homo sapien
tggtcagctggttgttaaaggtcat

SEQ ID NO: 990844 - DNA, 25 bp, Homo sapien
catattcacccgacgcttgcagatc

SEQ ID NO: 990845 - DNA, 25 bp, Homo sapien
ttttgctctggttcaccgtgtcata

SEQ ID NO: 990846 - DNA, 25 bp, Homo sapien
cctggtacgaagcatcaggcaggac

SEQ ID NO: 990847 - DNA, 25 bp, Homo sapien
taaagtttgccgatccctggtacga

SEQ ID NO: 990848 - DNA, 25 bp, Homo sapien
ccaagaccttatggccgcaaaacct

SEQ ID NO: 990849 - DNA, 25 bp, Homo sapien
gttaccaagaccttatggccgcaaa

SEQ ID NO: 990850 - DNA, 25 bp, Homo sapien
caaagggatggttcagggtttcgat

SEQ ID NO: 990851 - DNA, 25 bp, Homo sapien
aatcgagtaagtgtgtcatggtgac

SEQ ID NO: 990852 - DNA, 25 bp, Homo sapien
tgtcagcatcaatggtcagcatctt

SEQ ID NO: 990853 - DNA, 25 bp, Homo sapien
aacaggtcaatgaactcccgccggt

SEQ ID NO: 990854 - DNA, 25 bp, Homo sapien
tttgccctgtaacttcctcctgatc

SEQ ID NO: 990855 - DNA, 25 bp, Homo sapien
ctggacgcaagtaaggacaggttac

SEQ ID NO: 990856 - DNA, 25 bp, Homo sapien
gaactctgcccctatgggaggcacc

SEQ ID NO: 990857 - DNA, 25 bp, Homo sapien
gctgggacctgcaaatatatctgaa

SEQ ID NO: 990858 - DNA, 25 bp, Homo sapien
tcatctaaacagttgaaaatgtact

SEQ ID NO: 990859 - DNA, 25 bp, Homo sapien
ggccatatcatctaaacagttgaaa

SEQ ID NO: 990860 - DNA, 25 bp, Homo sapien
catctaaacagttgaaaatgtactt

SEQ ID NO: 990861 - DNA, 25 bp, Homo sapien
ctgggccatatcatctaaacagttg

SEQ ID NO: 990862 - DNA, 25 bp, Homo sapien
ccttactacagtgggcgggagcttg

SEQ ID NO: 990863 - DNA, 25 bp, Homo sapien
tctttagggcccagttcaaatgctc

SEQ ID NO: 990864 - DNA, 25 bp, Homo sapien
cttgaccaggaacagggcccttact

SEQ ID NO: 990865 - DNA, 25 bp, Homo sapien
tgctgcaggcagaattaaatgctcc

SEQ ID NO: 990866 - DNA, 25 bp, Homo sapien
ttcagcaggcaaaccctgtgtttgt

SEQ ID NO: 990867 - DNA, 25 bp, Homo sapien
tgagtccgtgtcacggttgaaaaac

SEQ ID NO: 990868 - DNA, 25 bp, Homo sapien
tagttgtctttgtcccggcgcttaa

SEQ ID NO: 990869 - DNA, 25 bp, Homo sapien
caaaggatatggtgagtccgtgtca

SEQ ID NO: 990870 - DNA, 25 bp, Homo sapien
gctcctggatataacggccaaccca

SEQ ID NO: 990871 - DNA, 25 bp, Homo sapien
agctcctggatataacggccaaccc

SEQ ID NO: 990872 - DNA, 25 bp, Homo sapien
cctggatataacggccaacccagga

SEQ ID NO: 990873 - DNA, 25 bp, Homo sapien
tcctggatataacggccaacccagg

SEQ ID NO: 990874 - DNA, 25 bp, Homo sapien
aaaatggtaaaccaaggatgatctc

SEQ ID NO: 990875 - DNA, 25 bp, Homo sapien
aaatggtaaaccaaggatgatctca

SEQ ID NO: 990876 - DNA, 25 bp, Homo sapien
caaaatggtaaaccaaggatgatct

SEQ ID NO: 990877 - DNA, 25 bp, Homo sapien
cacaaaatggtaaaccaaggatgat

SEQ ID NO: 990878 - DNA, 25 bp, Homo sapien
ctacagagaaccacgtctactgact

SEQ ID NO: 990879 - DNA, 25 bp, Homo sapien
ccttcacacgccaatcagatgagct

SEQ ID NO: 990880 - DNA, 25 bp, Homo sapien
gaaccacgtctactgacttcattac

SEQ ID NO: 990881 - DNA, 25 bp, Homo sapien
tcattaccttcacacgccaatcaga

SEQ ID NO: 990882 - DNA, 25 bp, Homo sapien
taaaactgtatttcagatgggttgt

SEQ ID NO: 990883 - DNA, 25 bp, Homo sapien
tgtaaaactgtatttcagatgggtt

SEQ ID NO: 990884 - DNA, 25 bp, Homo sapien
aatgtaaaactgtatttcagatggg

SEQ ID NO: 990885 - DNA, 25 bp, Homo sapien
actgtatttcagatgggttgttaaa

SEQ ID NO: 990886 - DNA, 25 bp, Homo sapien
tctgccactgtgctcagatgaggct

SEQ ID NO: 990887 - DNA, 25 bp, Homo sapien
cctgtggatcaactgcagatgtggc

SEQ ID NO: 990888 - DNA, 25 bp, Homo sapien
tctgttgactgaagccgagggttga

SEQ ID NO: 990889 - DNA, 25 bp, Homo sapien
gaccagtgtcactaccagccaggtg

SEQ ID NO: 990890 - DNA, 25 bp, Homo sapien
gaatcgtcctgtcatgttgctccca

SEQ ID NO: 990891 - DNA, 25 bp, Homo sapien
gaccatttgttcataagggaccgac

SEQ ID NO: 990892 - DNA, 25 bp, Homo sapien
taaccaataagacagcgcagaaatg

SEQ ID NO: 990893 - DNA, 25 bp, Homo sapien
cagcccttaagatggcccctgagga

SEQ ID NO: 990894 - DNA, 25 bp, Homo sapien
tcactgcttttagctctatagcggg

SEQ ID NO: 990895 - DNA, 25 bp, Homo sapien
actgcttttagctctatagcggggg

SEQ ID NO: 990896 - DNA, 25 bp, Homo sapien
cactgcttttagctctatagcgggg

SEQ ID NO: 990897 - DNA, 25 bp, Homo sapien
tgcttttagctctatagcgggggca

SEQ ID NO: 990898 - DNA, 25 bp, Homo sapien
taggtaccaccgacttcagagttga

SEQ ID NO: 990899 - DNA, 25 bp, Homo sapien
tcattaacgaaggtacagaggcagg

SEQ ID NO: 990900 - DNA, 25 bp, Homo sapien
caagactctgctagagggtgatacc

SEQ ID NO: 990901 - DNA, 25 bp, Homo sapien
gaactctagtagacctcagcggact

SEQ ID NO: 990902 - DNA, 25 bp, Homo sapien
tgggaaggacaaagcgcaacatgga

SEQ ID NO: 990903 - DNA, 25 bp, Homo sapien
gacgctcacgagtccagccaaattc

SEQ ID NO: 990904 - DNA, 25 bp, Homo sapien
gcccttgccaacacacaatctagga

SEQ ID NO: 990905 - DNA, 25 bp, Homo sapien
gagtgcttaagaagaggcctgttca

SEQ ID NO: 990906 - DNA, 25 bp, Homo sapien
cactgtattggtcccaaatccccag

SEQ ID NO: 990907 - DNA, 25 bp, Homo sapien
ttcactgtattggtcccaaatcccc

SEQ ID NO: 990908 - DNA, 25 bp, Homo sapien
cccaggccttatctacgctgagctt

SEQ ID NO: 990909 - DNA, 25 bp, Homo sapien
gagcttatcagacttcaccttcagc

SEQ ID NO: 990910 - DNA, 25 bp, Homo sapien
tgtacttttagcaggaaagcactgt

SEQ ID NO: 990911 - DNA, 25 bp, Homo sapien
cactgtataaaggtaaggatttgtc

SEQ ID NO: 990912 - DNA, 25 bp, Homo sapien
tctacaagggacctcgccctcttta

SEQ ID NO: 990913 - DNA, 25 bp, Homo sapien
tccttagctaacatccagccagcgg

SEQ ID NO: 990914 - DNA, 25 bp, Homo sapien
tccctgttccaagatacactgggag

SEQ ID NO: 990915 - DNA, 25 bp, Homo sapien
ctcccagtgtatcttggaacaggga

SEQ ID NO: 990916 - DNA, 25 bp, Homo sapien
gcctagacctcctgcgcttaggtgg

SEQ ID NO: 990917 - DNA, 25 bp, Homo sapien
cagaagggcggacctgaaacaaagc

SEQ ID NO: 990918 - DNA, 25 bp, Homo sapien
cctagacctcctgcgcttaggtggt

SEQ ID NO: 990919 - DNA, 25 bp, Homo sapien
aaatccacattctggctgggtacag

SEQ ID NO: 990920 - DNA, 25 bp, Homo sapien
tatttccagctaccatgggttcagg

SEQ ID NO: 990921 - DNA, 25 bp, Homo sapien
ggctgccgtggtgtgtcctctgaaa

SEQ ID NO: 990922 - DNA, 25 bp, Homo sapien
catttgttaagaggcaccacagtac

SEQ ID NO: 990923 - DNA, 25 bp, Homo sapien
ctgaactgtttcattcgcaaaaaca

SEQ ID NO: 990924 - DNA, 25 bp, Homo sapien
cacggatggtatctggcaaatagag

SEQ ID NO: 990925 - DNA, 25 bp, Homo sapien
tctgttgagcatggttcttacacgg

SEQ ID NO: 990926 - DNA, 25 bp, Homo sapien
aaatgccacaggaaattcccaggtc

SEQ ID NO: 990927 - DNA, 25 bp, Homo sapien
ggcggagccgcattctctcgcataa

SEQ ID NO: 990928 - DNA, 25 bp, Homo sapien
tacaggagaccagcctgtctgggaa

SEQ ID NO: 990929 - DNA, 25 bp, Homo sapien
ttggctagcaacacataatgagagt

SEQ ID NO: 990930 - DNA, 25 bp, Homo sapien
caatgcctctgagcatacggccaaa

SEQ ID NO: 990931 - DNA, 25 bp, Homo sapien
gaggctgagggctgtcataggccat

SEQ ID NO: 990932 - DNA, 25 bp, Homo sapien
gccatctgtgtgaggactcccaggg

SEQ ID NO: 990933 - DNA, 25 bp, Homo sapien
tcataggccatctgtgtgaggactc

SEQ ID NO: 990934 - DNA, 25 bp, Homo sapien
tgcctctttttgtaacactaagtgg

SEQ ID NO: 990935 - DNA, 25 bp, Homo sapien
tggtattgattaggtaaaacggtga

SEQ ID NO: 990936 - DNA, 25 bp, Homo sapien
tgacttaaaggagagctcggtagtg

SEQ ID NO: 990937 - DNA, 25 bp, Homo sapien
aaattaaatgctaagccgtatggta

SEQ ID NO: 990938 - DNA, 25 bp, Homo sapien
gctaagccgtatggtattgattagg

SEQ ID NO: 990939 - DNA, 25 bp, Homo sapien
gaagagcgcaaatccatcctgggga

SEQ ID NO: 990940 - DNA, 25 bp, Homo sapien
gatgcgtgctgagcctgaaagagca

SEQ ID NO: 990941 - DNA, 25 bp, Homo sapien
atcctggggatgagatgcgtgctga

SEQ ID NO: 990942 - DNA, 25 bp, Homo sapien
tcagaagagcgcaaatccatcctgg

SEQ ID NO: 990943 - DNA, 25 bp, Homo sapien
gaagcagacaggctacgtgggaaag

SEQ ID NO: 990944 - DNA, 25 bp, Homo sapien
tctaaaacttttgcatttcaaactc

SEQ ID NO: 990945 - DNA, 25 bp, Homo sapien
atttcaaactcctggtagcgcttac

SEQ ID NO: 990946 - DNA, 25 bp, Homo sapien
aaaacttttgcatttcaaactcctg

SEQ ID NO: 990947 - DNA, 25 bp, Homo sapien
tatatttctaaaacttttgcatttc

SEQ ID NO: 990948 - DNA, 25 bp, Homo sapien
cacatatggactggaggttccatcc

SEQ ID NO: 990949 - DNA, 25 bp, Homo sapien
tggaacagccatctccggacctgtc

SEQ ID NO: 990950 - DNA, 25 bp, Homo sapien
cggacctgtcctggaagttcgcaca

SEQ ID NO: 990951 - DNA, 25 bp, Homo sapien
tgaagatgtaaaagaggtgccacat

SEQ ID NO: 990952 - DNA, 25 bp, Homo sapien
gcccggccaaaccatagtatttcta

SEQ ID NO: 990953 - DNA, 25 bp, Homo sapien
caaaccatagtatttctaatgtggg

SEQ ID NO: 990954 - DNA, 25 bp, Homo sapien
ccatagtatttctaatgtgggatgt

SEQ ID NO: 990955 - DNA, 25 bp, Homo sapien
gtatttctaatgtgggatgtgtgtg

SEQ ID NO: 990956 - DNA, 25 bp, Homo sapien
acagcccactgggatttttttgctg

SEQ ID NO: 990957 - DNA, 25 bp, Homo sapien
ccaggacatgaagagcacagcccac

SEQ ID NO: 990958 - DNA, 25 bp, Homo sapien
caggacatgaagagcacagcccact

SEQ ID NO: 990959 - DNA, 25 bp, Homo sapien
gcccactgggatttttttgctggtg

SEQ ID NO: 990960 - DNA, 25 bp, Homo sapien
aggagagcccgtcaaccacagctct

SEQ ID NO: 990961 - DNA, 25 bp, Homo sapien
tgataaagccactcttcaagctcta

SEQ ID NO: 990962 - DNA, 25 bp, Homo sapien
tctattttgggtacactttacactc

SEQ ID NO: 990963 - DNA, 25 bp, Homo sapien
tgagggagccggtaacacatctctc

SEQ ID NO: 990964 - DNA, 25 bp, Homo sapien
ttgataacagaagcatgctgccgtc

SEQ ID NO: 990965 - DNA, 25 bp, Homo sapien
aagcatgctgccgtccatcccaggt

SEQ ID NO: 990966 - DNA, 25 bp, Homo sapien
ctttttggcctgttttgataacaga

SEQ ID NO: 990967 - DNA, 25 bp, Homo sapien
tgctgccgtccatcccaggtcagag

SEQ ID NO: 990968 - DNA, 25 bp, Homo sapien
ggtcactcctgggttgatgaacaaa

SEQ ID NO: 990969 - DNA, 25 bp, Homo sapien
caaatgcgcctaatggtaaatctca

SEQ ID NO: 990970 - DNA, 25 bp, Homo sapien
cgtaatgactgtgcttgactgctcc

SEQ ID NO: 990971 - DNA, 25 bp, Homo sapien
tgactgctggagcaagcctagctgc

SEQ ID NO: 990972 - DNA, 25 bp, Homo sapien
cctggctctcacctcggagcctgga

SEQ ID NO: 990973 - DNA, 25 bp, Homo sapien
ctggctctcacctcggagcctggac

SEQ ID NO: 990974 - DNA, 25 bp, Homo sapien
ctcggagcctggacgtgacctgctt

SEQ ID NO: 990975 - DNA, 25 bp, Homo sapien
ggagcctggacgtgacctgcttcat

SEQ ID NO: 990976 - DNA, 25 bp, Homo sapien
caggcaatggcatgtcatacagctt

SEQ ID NO: 990977 - DNA, 25 bp, Homo sapien
aatggcattcataccattggcaggc

SEQ ID NO: 990978 - DNA, 25 bp, Homo sapien
tggcattcataccattggcaggcaa

SEQ ID NO: 990979 - DNA, 25 bp, Homo sapien
ggcaatggcattcataccattggca

SEQ ID NO: 990980 - DNA, 25 bp, Homo sapien
ctatagtcctaggtactctggatgc

SEQ ID NO: 990981 - DNA, 25 bp, Homo sapien
tgcatcgagccggtctatcagtacc

SEQ ID NO: 990982 - DNA, 25 bp, Homo sapien
tacttgtgtgccatgaattgcaccc

SEQ ID NO: 990983 - DNA, 25 bp, Homo sapien
tgtattccatctatgagctgttccc

SEQ ID NO: 990984 - DNA, 25 bp, Homo sapien
tacagagaactctttcgtgaaggga

SEQ ID NO: 990985 - DNA, 25 bp, Homo sapien
gaaggcccagaagatcactagcatt

SEQ ID NO: 990986 - DNA, 25 bp, Homo sapien
atcgaggtaagaccctccaaccagc

SEQ ID NO: 990987 - DNA, 25 bp, Homo sapien
tcagtcagcaacgattgacatcgag

SEQ ID NO: 990988 - DNA, 25 bp, Homo sapien
cagaagcagttgaagacagctagag

SEQ ID NO: 990989 - DNA, 25 bp, Homo sapien
tcagaagcagttgaagacagctaga

SEQ ID NO: 990990 - DNA, 25 bp, Homo sapien
agaagcagttgaagacagctagaga

SEQ ID NO: 990991 - DNA, 25 bp, Homo sapien
tgtttcaaaaaactctagacaagaa

SEQ ID NO: 990992 - DNA, 25 bp, Homo sapien
tatattttaatcactgattaccctt

SEQ ID NO: 990993 - DNA, 25 bp, Homo sapien
tttgaataatccagagtagaaacca

SEQ ID NO: 990994 - DNA, 25 bp, Homo sapien
tgggtcctggtaacagtcctacgtg

SEQ ID NO: 990995 - DNA, 25 bp, Homo sapien
cagaataccaacagccactgtggcc

SEQ ID NO: 990996 - DNA, 25 bp, Homo sapien
ccttgtctcacaccgtttctgtgtc

SEQ ID NO: 990997 - DNA, 25 bp, Homo sapien
tttccaagtccccaaggcgaggata

SEQ ID NO: 990998 - DNA, 25 bp, Homo sapien
gataacatatccttgtctcacaccg

SEQ ID NO: 990999 - DNA, 25 bp, Homo sapien
aaagcgtcttctttctgggacatgg

SEQ ID NO: 991000 - DNA, 25 bp, Homo sapien
tttcctataagaggcaaagccacca

SEQ ID NO: 991001 - DNA, 25 bp, Homo sapien
cttgataaacatggcctagagctgg

SEQ ID NO: 991002 - DNA, 25 bp, Homo sapien
tgggacatgggccttaacgatggac

SEQ ID NO: 991003 - DNA, 25 bp, Homo sapien
atccccgattttgcgacctgtctcc

SEQ ID NO: 991004 - DNA, 25 bp, Homo sapien
ggatccccgattttgcgacctgtct

SEQ ID NO: 991005 - DNA, 25 bp, Homo sapien
ccccgattttgcgacctgtctcctc

SEQ ID NO: 991006 - DNA, 25 bp, Homo sapien
cccgattttgcgacctgtctcctca

SEQ ID NO: 991007 - DNA, 25 bp, Homo sapien
cataggaaatgagcgggaaaggaat

SEQ ID NO: 991008 - DNA, 25 bp, Homo sapien
gacgagggagtggagagcaagtgga

SEQ ID NO: 991009 - DNA, 25 bp, Homo sapien
cagtagacccgtctgtccgcacggg

SEQ ID NO: 991010 - DNA, 25 bp, Homo sapien
tggagacctttctgcgcataggaaa

SEQ ID NO: 991011 - DNA, 25 bp, Homo sapien
cgcattaggttgtgtggtccgccga

SEQ ID NO: 991012 - DNA, 25 bp, Homo sapien
tctgaatcatgggtggatgctcctc

SEQ ID NO: 991013 - DNA, 25 bp, Homo sapien
tggaagcattcgtaggcccggacga

SEQ ID NO: 991014 - DNA, 25 bp, Homo sapien
catctcgaagaccaagcacgtgtgg

SEQ ID NO: 991015 - DNA, 25 bp, Homo sapien
tctcagtagatgacccaacttccac

SEQ ID NO: 991016 - DNA, 25 bp, Homo sapien
tgaggtcagccttactttcctcctt

SEQ ID NO: 991017 - DNA, 25 bp, Homo sapien
gtagatgacccaacttccactttgt

SEQ ID NO: 991018 - DNA, 25 bp, Homo sapien
cagaagcctgaggtcagccttactt

SEQ ID NO: 991019 - DNA, 25 bp, Homo sapien
gcacctgattggagccccacctcca

SEQ ID NO: 991020 - DNA, 25 bp, Homo sapien
cttcagctctgacttcctaggggca

SEQ ID NO: 991021 - DNA, 25 bp, Homo sapien
tcagctctgacttcctaggggcagt

SEQ ID NO: 991022 - DNA, 25 bp, Homo sapien
tctgctaacatccagcacctgattg

SEQ ID NO: 991023 - DNA, 25 bp, Homo sapien
gacctctggactagtcaaggctact

SEQ ID NO: 991024 - DNA, 25 bp, Homo sapien
cttgaaagagaaggcggattttact

SEQ ID NO: 991025 - DNA, 25 bp, Homo sapien
tactccttctaggtgacagaccagg

SEQ ID NO: 991026 - DNA, 25 bp, Homo sapien
gaaaaacagaggcttaatgcacatt

SEQ ID NO: 991027 - DNA, 25 bp, Homo sapien
taacaatcgcaaagtgacgctggcc

SEQ ID NO: 991028 - DNA, 25 bp, Homo sapien
tttagtcttaattcctgccagggca

SEQ ID NO: 991029 - DNA, 25 bp, Homo sapien
ttgttgggagccatcagaagccgag

SEQ ID NO: 991030 - DNA, 25 bp, Homo sapien
tgacgtccacagttaagaggccaca

SEQ ID NO: 991031 - DNA, 25 bp, Homo sapien
tggagtcagcgtggcaggtctttgg

SEQ ID NO: 991032 - DNA, 25 bp, Homo sapien
tagtgtgcagatacaatacaaagca

SEQ ID NO: 991033 - DNA, 25 bp, Homo sapien
tttaagattcataagccatccactg

SEQ ID NO: 991034 - DNA, 25 bp, Homo sapien
tacaggacctgggatagtgtgcaga

SEQ ID NO: 991035 - DNA, 25 bp, Homo sapien
atgaaggcgcatctgagaggcgata

SEQ ID NO: 991036 - DNA, 25 bp, Homo sapien
aaggcgcatctgagaggcgatagga

SEQ ID NO: 991037 - DNA, 25 bp, Homo sapien
ggcgcatctgagaggcgataggaac

SEQ ID NO: 991038 - DNA, 25 bp, Homo sapien
catgaaggcgcatctgagaggcgat

SEQ ID NO: 991039 - DNA, 25 bp, Homo sapien
tggcaggcaggtagcttgagatcct

SEQ ID NO: 991040 - DNA, 25 bp, Homo sapien
gctcaaccacagtttgacgcggtgg

SEQ ID NO: 991041 - DNA, 25 bp, Homo sapien
tccaattccgtgaacgttgatcagt

SEQ ID NO: 991042 - DNA, 25 bp, Homo sapien
gaatatgtcctaccagtgcacagcc

SEQ ID NO: 991043 - DNA, 25 bp, Homo sapien
gactggcaggattcgctcccccaag

SEQ ID NO: 991044 - DNA, 25 bp, Homo sapien
gagagactggcaggattcgctcccc

SEQ ID NO: 991045 - DNA, 25 bp, Homo sapien
ccagagagactggcaggattcgctc

SEQ ID NO: 991046 - DNA, 25 bp, Homo sapien
agactggcaggattcgctcccccaa

SEQ ID NO: 991047 - DNA, 25 bp, Homo sapien
tggtctgcatctggacgttcccacc

SEQ ID NO: 991048 - DNA, 25 bp, Homo sapien
caccttcctagcgttgggactagcg

SEQ ID NO: 991049 - DNA, 25 bp, Homo sapien
ctgggtacatcaagggccggcactt

SEQ ID NO: 991050 - DNA, 25 bp, Homo sapien
tgcaaagaaacatctcggtctgccc

SEQ ID NO: 991051 - DNA, 25 bp, Homo sapien
gctggacggtcactgtcatcataca

SEQ ID NO: 991052 - DNA, 25 bp, Homo sapien
catgaacagaaagctatccaccagc

SEQ ID NO: 991053 - DNA, 25 bp, Homo sapien
atcatacaaatcactgccaagctca

SEQ ID NO: 991054 - DNA, 25 bp, Homo sapien
catcagacgtgattgtcatgaacag

SEQ ID NO: 991055 - DNA, 25 bp, Homo sapien
ttcctaaagcctcaattgatgagct

SEQ ID NO: 991056 - DNA, 25 bp, Homo sapien
taaagcctcaattgatgagctagaa

SEQ ID NO: 991057 - DNA, 25 bp, Homo sapien
tcaattgatgagctagaatacagca

SEQ ID NO: 991058 - DNA, 25 bp, Homo sapien
gcctcaattgatgagctagaataca

SEQ ID NO: 991059 - DNA, 25 bp, Homo sapien
tgtccggccgtgcagagtctgtctc

SEQ ID NO: 991060 - DNA, 25 bp, Homo sapien
ggtttatcactactcaacgtgtctg

SEQ ID NO: 991061 - DNA, 25 bp, Homo sapien
ctctaataagatgccctctgtccgg

SEQ ID NO: 991062 - DNA, 25 bp, Homo sapien
ttctctaagagacaccagccatgca

SEQ ID NO: 991063 - DNA, 25 bp, Homo sapien
gaaactgaatgatatgagcctaacc

SEQ ID NO: 991064 - DNA, 25 bp, Homo sapien
gacccttcagccacgtaatgcatta

SEQ ID NO: 991065 - DNA, 25 bp, Homo sapien
gagcctaaccatacatcaaactggg

SEQ ID NO: 991066 - DNA, 25 bp, Homo sapien
caaactgggtgacatgctctctgag

SEQ ID NO: 991067 - DNA, 25 bp, Homo sapien
gcaaagctccactcggcattctgga

SEQ ID NO: 991068 - DNA, 25 bp, Homo sapien
tggcagtgcagcctagcaaagctcc

SEQ ID NO: 991069 - DNA, 25 bp, Homo sapien
gtgcagcctagcaaagctccactcg

SEQ ID NO: 991070 - DNA, 25 bp, Homo sapien
tccactcggcattctggagtgttct

SEQ ID NO: 991071 - DNA, 25 bp, Homo sapien
aacaggtatggctttagctgactca

SEQ ID NO: 991072 - DNA, 25 bp, Homo sapien
gtaaaacaggtatggctttagctga

SEQ ID NO: 991073 - DNA, 25 bp, Homo sapien
caggtatggctttagctgactcaga

SEQ ID NO: 991074 - DNA, 25 bp, Homo sapien
ggtatggctttagctgactcagaat

SEQ ID NO: 991075 - DNA, 25 bp, Homo sapien
gaatgaatgcgttaaagatgggccc

SEQ ID NO: 991076 - DNA, 25 bp, Homo sapien
cagggcggtgcacagcacaaagtca

SEQ ID NO: 991077 - DNA, 25 bp, Homo sapien
caatatggcctaagtcacagtgatc

SEQ ID NO: 991078 - DNA, 25 bp, Homo sapien
cgagtttgggcctttcaagttcaca

SEQ ID NO: 991079 - DNA, 25 bp, Homo sapien
gaaacaattccctctcgtgtcgtta

SEQ ID NO: 991080 - DNA, 25 bp, Homo sapien
aaatctctggcggttcagaacgctc

SEQ ID NO: 991081 - DNA, 25 bp, Homo sapien
ccattaatgtatctgggccttcacc

SEQ ID NO: 991082 - DNA, 25 bp, Homo sapien
tattccaacttggtgcagcagcacc

SEQ ID NO: 991083 - DNA, 25 bp, Homo sapien
tgcagttctttatctggcgtaagga

SEQ ID NO: 991084 - DNA, 25 bp, Homo sapien
catgttctattctgcgtggtggagt

SEQ ID NO: 991085 - DNA, 25 bp, Homo sapien
tgggttctcccgcatgttcacatgt

SEQ ID NO: 991086 - DNA, 25 bp, Homo sapien
gatgaacaatgaacgcccgacatgg

SEQ ID NO: 991087 - DNA, 25 bp, Homo sapien
tcagaatcaaagaggaaagcccctg

SEQ ID NO: 991088 - DNA, 25 bp, Homo sapien
cctctcatttgcgatttcatccaca

SEQ ID NO: 991089 - DNA, 25 bp, Homo sapien
gtcccctctcatttgcgatttcatc

SEQ ID NO: 991090 - DNA, 25 bp, Homo sapien
ctgtcccctctcatttgcgatttca

SEQ ID NO: 991091 - DNA, 25 bp, Homo sapien
tctcatttgcgatttcatccacaga

SEQ ID NO: 991092 - DNA, 25 bp, Homo sapien
cggggacgggaaagcggcgcgcgag

SEQ ID NO: 991093 - DNA, 25 bp, Homo sapien
tgtctccgctctcggcgcagccgag

SEQ ID NO: 991094 - DNA, 25 bp, Homo sapien
gcatcaccgcctcccgtggccggcg

SEQ ID NO: 991095 - DNA, 25 bp, Homo sapien
cagcctcagtcggaatctgccatct

SEQ ID NO: 991096 - DNA, 25 bp, Homo sapien
tcttgagcctgtgtctccgctctcg

SEQ ID NO: 991097 - DNA, 25 bp, Homo sapien
atgaatgaaggagtgggcgcgcgcc

SEQ ID NO: 991098 - DNA, 25 bp, Homo sapien
ctggcaaagtggctcgcccatctca

SEQ ID NO: 991099 - DNA, 25 bp, Homo sapien
gcgctcgcggaggtaggagtggaat

SEQ ID NO: 991100 - DNA, 25 bp, Homo sapien
atctcacagccggttggcgctcgcg

SEQ ID NO: 991101 - DNA, 25 bp, Homo sapien
tggtcgctgggttcctgccggagtc

SEQ ID NO: 991102 - DNA, 25 bp, Homo sapien
tgccgtgcacgccgcggaaatgcag

SEQ ID NO: 991103 - DNA, 25 bp, Homo sapien
gaggtcagaggcaccgaagccctgc

SEQ ID NO: 991104 - DNA, 25 bp, Homo sapien
tcgcgtctacactgtcccgagggcc

SEQ ID NO: 991105 - DNA, 25 bp, Homo sapien
tagtggtacatcacgacaccttcct

SEQ ID NO: 991106 - DNA, 25 bp, Homo sapien
cagccctgcccttttagagttgaag

SEQ ID NO: 991107 - DNA, 25 bp, Homo sapien
tattgaagcttaggaataggtctcg

SEQ ID NO: 991108 - DNA, 25 bp, Homo sapien
gactactgttgctaaaaggacctca

SEQ ID NO: 991109 - DNA, 25 bp, Homo sapien
tggactgctgcgctatttttttaac

SEQ ID NO: 991110 - DNA, 25 bp, Homo sapien
ctgattgttgacaacattggcttcc

SEQ ID NO: 991111 - DNA, 25 bp, Homo sapien
ttttaacagatgtccctgactccag

SEQ ID NO: 991112 - DNA, 25 bp, Homo sapien
gtctctccctcgtctttaattcaca

SEQ ID NO: 991113 - DNA, 25 bp, Homo sapien
tgtctcctttctcataaaggtgtgt

SEQ ID NO: 991114 - DNA, 25 bp, Homo sapien
tcatgtggcccaatgagataaaagg

SEQ ID NO: 991115 - DNA, 25 bp, Homo sapien
ccatgggaagaggtggtccatttcc

SEQ ID NO: 991116 - DNA, 25 bp, Homo sapien
aaggtaaaacttggagacttctgag

SEQ ID NO: 991117 - DNA, 25 bp, Homo sapien
ggatcccattacctacagctaacag

SEQ ID NO: 991118 - DNA, 25 bp, Homo sapien
cctttagcaaggatcccattaccta

SEQ ID NO: 991119 - DNA, 25 bp, Homo sapien
ttgagaggagagctgtctttatgaa

SEQ ID NO: 991120 - DNA, 25 bp, Homo sapien
cctacagctaacagcatcttagtca

SEQ ID NO: 991121 - DNA, 25 bp, Homo sapien
cagtgttgtgtgttcaactcggaaa

SEQ ID NO: 991122 - DNA, 25 bp, Homo sapien
ctcggaaagaacacagttgggtggc

SEQ ID NO: 991123 - DNA, 25 bp, Homo sapien
ggtttggccacagtgttagccattg

SEQ ID NO: 991124 - DNA, 25 bp, Homo sapien
tctgcttgcattggtcattgaggtc

SEQ ID NO: 991125 - DNA, 25 bp, Homo sapien
tctcccttcctcgagtcctccaaag

SEQ ID NO: 991126 - DNA, 25 bp, Homo sapien
cctgctgtgggcagatgatctctcc

SEQ ID NO: 991127 - DNA, 25 bp, Homo sapien
attgaatgtgccttccacttgctgg

SEQ ID NO: 991128 - DNA, 25 bp, Homo sapien
ggattcctgcctctggtctggccac

SEQ ID NO: 991129 - DNA, 25 bp, Homo sapien
aaatgaagcaccccactgtccagat

SEQ ID NO: 991130 - DNA, 25 bp, Homo sapien
ctgtccagatggtaccatctcttca

SEQ ID NO: 991131 - DNA, 25 bp, Homo sapien
gatggtaccatctcttcattacaga

SEQ ID NO: 991132 - DNA, 25 bp, Homo sapien
gaccgtttgtgtggcattgatgctg

SEQ ID NO: 991133 - DNA, 25 bp, Homo sapien
tcttccccgtgggacccacaatgag

SEQ ID NO: 991134 - DNA, 25 bp, Homo sapien
caggagatgtttcctcttccccgtg

SEQ ID NO: 991135 - DNA, 25 bp, Homo sapien
actgcaggagatgtttcctcttccc

SEQ ID NO: 991136 - DNA, 25 bp, Homo sapien
ccgtgggacccacaatgagtggcac

SEQ ID NO: 991137 - DNA, 25 bp, Homo sapien
tctagccagtccaaacccgagtctt

SEQ ID NO: 991138 - DNA, 25 bp, Homo sapien
ggtggccgtaatgaccacattgcca

SEQ ID NO: 991139 - DNA, 25 bp, Homo sapien
tgcaaattccactcttctagccagt

SEQ ID NO: 991140 - DNA, 25 bp, Homo sapien
gacgtcagaatcagccctttctgtc

SEQ ID NO: 991141 - DNA, 25 bp, Homo sapien
tcctgtttgtgtccgctctgtgccc

SEQ ID NO: 991142 - DNA, 25 bp, Homo sapien
gatctcctgtcctcctgtttgtgtc

SEQ ID NO: 991143 - DNA, 25 bp, Homo sapien
tcctgtcctcctgtttgtgtccgct

SEQ ID NO: 991144 - DNA, 25 bp, Homo sapien
ttttgccgatctcctgtcctcctgt

SEQ ID NO: 991145 - DNA, 25 bp, Homo sapien
tctctgtccactttagtcagataag

SEQ ID NO: 991146 - DNA, 25 bp, Homo sapien
tgagcctacggatctgccttcaaac

SEQ ID NO: 991147 - DNA, 25 bp, Homo sapien
aaagctagaacaaaggacccatata

SEQ ID NO: 991148 - DNA, 25 bp, Homo sapien
gtccactttagtcagataagctcaa

SEQ ID NO: 991149 - DNA, 25 bp, Homo sapien
aacactgaccccaatcgggatcttt

SEQ ID NO: 991150 - DNA, 25 bp, Homo sapien
cactgaccccaatcgggatctttgc

SEQ ID NO: 991151 - DNA, 25 bp, Homo sapien
caactaatggacttggtgggatggt

SEQ ID NO: 991152 - DNA, 25 bp, Homo sapien
cctcagacccagcaactaatggact

SEQ ID NO: 991153 - DNA, 25 bp, Homo sapien
cctggtagccttatatggacttgtt

SEQ ID NO: 991154 - DNA, 25 bp, Homo sapien
cactgaagggaagtacgcggtctat

SEQ ID NO: 991155 - DNA, 25 bp, Homo sapien
tctatgggaaccctggtagccttat

SEQ ID NO: 991156 - DNA, 25 bp, Homo sapien
ttttttggttgccggaataacatgc

SEQ ID NO: 991157 - DNA, 25 bp, Homo sapien
cattggtgcttcaattactaagagc

SEQ ID NO: 991158 - DNA, 25 bp, Homo sapien
agggggcagatgttcacactggtat

SEQ ID NO: 991159 - DNA, 25 bp, Homo sapien
taccagaaataggtgctgttgcaca

SEQ ID NO: 991160 - DNA, 25 bp, Homo sapien
gccacatctttcctggtttaccaga

SEQ ID NO: 991161 - DNA, 25 bp, Homo sapien
caagggcaggattggtccttcctca

SEQ ID NO: 991162 - DNA, 25 bp, Homo sapien
cacttctgttgagtaataggcacgc

SEQ ID NO: 991163 - DNA, 25 bp, Homo sapien
tctttgccgctatgggtatcatcat

SEQ ID NO: 991164 - DNA, 25 bp, Homo sapien
ccaaactgcgttagaagagatgatc

SEQ ID NO: 991165 - DNA, 25 bp, Homo sapien
tagttggttttcacgcagcttctct

SEQ ID NO: 991166 - DNA, 25 bp, Homo sapien
ttgcagcttttcgtagacctctggg

SEQ ID NO: 991167 - DNA, 25 bp, Homo sapien
ttaaagttctcctgtgttgccgacg

SEQ ID NO: 991168 - DNA, 25 bp, Homo sapien
gacctctgggtcagcgatcactttt

SEQ ID NO: 991169 - DNA, 25 bp, Homo sapien
ccttggtgttcttgtagccagcctg

SEQ ID NO: 991170 - DNA, 25 bp, Homo sapien
tgccgaattcagaagccccatacct

SEQ ID NO: 991171 - DNA, 25 bp, Homo sapien
ggtgttcttgtagccagcctgcatc

SEQ ID NO: 991172 - DNA, 25 bp, Homo sapien
agcctgcatcttggggagtctgccg

SEQ ID NO: 991173 - DNA, 25 bp, Homo sapien
tatattctcagtttagcagctccag

SEQ ID NO: 991174 - DNA, 25 bp, Homo sapien
tcaggcccttctagggaagtaagct

SEQ ID NO: 991175 - DNA, 25 bp, Homo sapien
gcaccatactagttaggacttcctg

SEQ ID NO: 991176 - DNA, 25 bp, Homo sapien
caatgaaggatccataccggcctgg

SEQ ID NO: 991177 - DNA, 25 bp, Homo sapien
gatgtcaaggttgagtggagtaatt

SEQ ID NO: 991178 - DNA, 25 bp, Homo sapien
ttgagtggagtaattggccactcac

SEQ ID NO: 991179 - DNA, 25 bp, Homo sapien
gacatttcaggatgtcaaggttgag

SEQ ID NO: 991180 - DNA, 25 bp, Homo sapien
caaggttgagtggagtaattggcca

SEQ ID NO: 991181 - DNA, 25 bp, Homo sapien
tgcagaagtttaactgcttctctgc

SEQ ID NO: 991182 - DNA, 25 bp, Homo sapien
tcaaagtcccctggaagccgtctgt

SEQ ID NO: 991183 - DNA, 25 bp, Homo sapien
catcacgtggcctctagagggatgt

SEQ ID NO: 991184 - DNA, 25 bp, Homo sapien
tcaggatggccgaaggaattgcaga

SEQ ID NO: 991185 - DNA, 25 bp, Homo sapien
gagtggcagtatggagtgccatctc

SEQ ID NO: 991186 - DNA, 25 bp, Homo sapien
aggtcctcatgagcaacacagaggt

SEQ ID NO: 991187 - DNA, 25 bp, Homo sapien
tggcagtatggagtgccatctctca

SEQ ID NO: 991188 - DNA, 25 bp, Homo sapien
aacacagaggtcacctctccaggca

SEQ ID NO: 991189 - DNA, 25 bp, Homo sapien
gaaccatcaatacccggcaccctgg

SEQ ID NO: 991190 - DNA, 25 bp, Homo sapien
tgggtggttttatcccgaaccatca

SEQ ID NO: 991191 - DNA, 25 bp, Homo sapien
ccaaagccatgtgatggacgtggtg

SEQ ID NO: 991192 - DNA, 25 bp, Homo sapien
tgcaggatgagtcactgtgaaacca

SEQ ID NO: 991193 - DNA, 25 bp, Homo sapien
ataggcaaattagtcactggaaacc

SEQ ID NO: 991194 - DNA, 25 bp, Homo sapien
taaagttataggcaaattagtcact

SEQ ID NO: 991195 - DNA, 25 bp, Homo sapien
gttataggcaaattagtcactggaa

SEQ ID NO: 991196 - DNA, 25 bp, Homo sapien
aagttataggcaaattagtcactgg

SEQ ID NO: 991197 - DNA, 25 bp, Homo sapien
attacgggtctacagctctgagcaa

SEQ ID NO: 991198 - DNA, 25 bp, Homo sapien
ttacgggtctacagctctgagcaag

SEQ ID NO: 991199 - DNA, 25 bp, Homo sapien
tacgggtctacagctctgagcaagg

SEQ ID NO: 991200 - DNA, 25 bp, Homo sapien
ccaggtgacagtcgcaatgggatgc

SEQ ID NO: 991201 - DNA, 25 bp, Homo sapien
gcaggatgggctgccccattggaat

SEQ ID NO: 991202 - DNA, 25 bp, Homo sapien
tttgctgtgcataggaaaccctcca

SEQ ID NO: 991203 - DNA, 25 bp, Homo sapien
cagtggtatggcgaaaggtctttgc

SEQ ID NO: 991204 - DNA, 25 bp, Homo sapien
gcattacatttaatcagtacaacac

SEQ ID NO: 991205 - DNA, 25 bp, Homo sapien
gcttcgtttccaacatggtagctaa

SEQ ID NO: 991206 - DNA, 25 bp, Homo sapien
aatcagtacaacacactgagcttcg

SEQ ID NO: 991207 - DNA, 25 bp, Homo sapien
caacatggtagctaagttttaattc

SEQ ID NO: 991208 - DNA, 25 bp, Homo sapien
ctttaaaagtactgagtgtcttgtg

SEQ ID NO: 991209 - DNA, 25 bp, Homo sapien
tttaaaagtactgagtgtcttgtga

SEQ ID NO: 991210 - DNA, 25 bp, Homo sapien
aaaagtactgagtgtcttgtgatgc

SEQ ID NO: 991211 - DNA, 25 bp, Homo sapien
taaaagtactgagtgtcttgtgatg

SEQ ID NO: 991212 - DNA, 25 bp, Homo sapien
ttgatctggctaaaccattctcttt

SEQ ID NO: 991213 - DNA, 25 bp, Homo sapien
ctgccacagcaggcactctgcttcg

SEQ ID NO: 991214 - DNA, 25 bp, Homo sapien
ctctgggattttccacgaattgcat

SEQ ID NO: 991215 - DNA, 25 bp, Homo sapien
tgggattttccacgaattgcatttc

SEQ ID NO: 991216 - DNA, 25 bp, Homo sapien
tctgggattttccacgaattgcatt

SEQ ID NO: 991217 - DNA, 25 bp, Homo sapien
gaagtcgtgggttttccgtgatcat

SEQ ID NO: 991218 - DNA, 25 bp, Homo sapien
catcagattatcaggaagtcgtggg

SEQ ID NO: 991219 - DNA, 25 bp, Homo sapien
aaaagtccctcatcagattatcagg

SEQ ID NO: 991220 - DNA, 25 bp, Homo sapien
gctttttagaaaagtccctcatcag

SEQ ID NO: 991221 - DNA, 25 bp, Homo sapien
cgctggttcgactaagacatggagg

SEQ ID NO: 991222 - DNA, 25 bp, Homo sapien
cattcctcaggtgtggagaagcgct

SEQ ID NO: 991223 - DNA, 25 bp, Homo sapien
gaagcgctagggtaggtctcagaca

SEQ ID NO: 991224 - DNA, 25 bp, Homo sapien
tcctgatagactggaagctccgaga

SEQ ID NO: 991225 - DNA, 25 bp, Homo sapien
tgtcacagccctgataacggtctga

SEQ ID NO: 991226 - DNA, 25 bp, Homo sapien
ttccaccgcgtagggttacagtgag

SEQ ID NO: 991227 - DNA, 25 bp, Homo sapien
gaccatgtgaccatattgctagggt

SEQ ID NO: 991228 - DNA, 25 bp, Homo sapien
taaatccatacgtagctcaccaagc

SEQ ID NO: 991229 - DNA, 25 bp, Homo sapien
tgtgacatgtgtggcacaagtattc

SEQ ID NO: 991230 - DNA, 25 bp, Homo sapien
ttgtgacatgtgtggcacaagtatt

SEQ ID NO: 991231 - DNA, 25 bp, Homo sapien
tctgtccctggtgccaataagcagc

SEQ ID NO: 991232 - DNA, 25 bp, Homo sapien
gggtttgcgcaatcacaggccaagc

SEQ ID NO: 991233 - DNA, 25 bp, Homo sapien
gactctgagaaaccgaatcactgca

SEQ ID NO: 991234 - DNA, 25 bp, Homo sapien
actcgaagggtgtccagtgtgctta

SEQ ID NO: 991235 - DNA, 25 bp, Homo sapien
gctatcatagaaggcgttgctccag

SEQ ID NO: 991236 - DNA, 25 bp, Homo sapien
acggacaaaggaggcattgcccctg

SEQ ID NO: 991237 - DNA, 25 bp, Homo sapien
ggacacactgttcacgcagctatca

SEQ ID NO: 991238 - DNA, 25 bp, Homo sapien
ccaggaacatcgtgtgggtctgcgt

SEQ ID NO: 991239 - DNA, 25 bp, Homo sapien
cacagacccgccagtcaaagttctg

SEQ ID NO: 991240 - DNA, 25 bp, Homo sapien
ccttgccgtaggaagtgccatgaac

SEQ ID NO: 991241 - DNA, 25 bp, Homo sapien
ctggtgccgtggaacagctgccgct

SEQ ID NO: 991242 - DNA, 25 bp, Homo sapien
agatggcgtccacaaaaatggcgct

SEQ ID NO: 991243 - DNA, 25 bp, Homo sapien
gctttgccaccactcatgaacggga

SEQ ID NO: 991244 - DNA, 25 bp, Homo sapien
catctctacaatgggatgtgctacc

SEQ ID NO: 991245 - DNA, 25 bp, Homo sapien
gaacgggaccaggtggtatgctcca

SEQ ID NO: 991246 - DNA, 25 bp, Homo sapien
caatgggatgtgctaccacactgcc

SEQ ID NO: 991247 - DNA, 25 bp, Homo sapien
agggccaggttctgtactcgctcaa

SEQ ID NO: 991248 - DNA, 25 bp, Homo sapien
gttaaagaggttccagaccttctga

SEQ ID NO: 991249 - DNA, 25 bp, Homo sapien
aaagtagaaaggcagcgtgcggtta

SEQ ID NO: 991250 - DNA, 25 bp, Homo sapien
gaccttctgatactcttccgaggaa

SEQ ID NO: 991251 - DNA, 25 bp, Homo sapien
agcttcttcagtgttgaggaatggc

SEQ ID NO: 991252 - DNA, 25 bp, Homo sapien
agccccaggcgcatgcgtcccctac

SEQ ID NO: 991253 - DNA, 25 bp, Homo sapien
gttgaggaatggcacagtctgttca

SEQ ID NO: 991254 - DNA, 25 bp, Homo sapien
ttctacagaacaccttcctgtccag

SEQ ID NO: 991255 - DNA, 25 bp, Homo sapien
gaggagtcccaatagtctgggatgc

SEQ ID NO: 991256 - DNA, 25 bp, Homo sapien
gcagaggagtcccaatagtctggga

SEQ ID NO: 991257 - DNA, 25 bp, Homo sapien
tagtctgggatgctcttcgggcctg

SEQ ID NO: 991258 - DNA, 25 bp, Homo sapien
tcccaatagtctgggatgctcttcg

SEQ ID NO: 991259 - DNA, 25 bp, Homo sapien
taggtggtctctgctagccaatatc

SEQ ID NO: 991260 - DNA, 25 bp, Homo sapien
cacgatattcacaacatgagagcac

SEQ ID NO: 991261 - DNA, 25 bp, Homo sapien
tacatggttaaaggagcacacacac

SEQ ID NO: 991262 - DNA, 25 bp, Homo sapien
agatctatttctcgcctgtgtccca

SEQ ID NO: 991263 - DNA, 25 bp, Homo sapien
tatgcatcacgaagcttctacccac

SEQ ID NO: 991264 - DNA, 25 bp, Homo sapien
gaatcatcgcagatcacaacaggca

SEQ ID NO: 991265 - DNA, 25 bp, Homo sapien
tcaagtctagactcgccttcagagt

SEQ ID NO: 991266 - DNA, 25 bp, Homo sapien
caaacggatgggttggcttcaagtc

SEQ ID NO: 991267 - DNA, 25 bp, Homo sapien
tgaggcaggttttctgtcaccactg

SEQ ID NO: 991268 - DNA, 25 bp, Homo sapien
gattacatcctaagtaccaagcccc

SEQ ID NO: 991269 - DNA, 25 bp, Homo sapien
tgtacaagccaacggtgcccgggtg

SEQ ID NO: 991270 - DNA, 25 bp, Homo sapien
tgtgggagcacttcgttgtacaagc

SEQ ID NO: 991271 - DNA, 25 bp, Homo sapien
gtttgcatggtcgtcacatcctggg

SEQ ID NO: 991272 - DNA, 25 bp, Homo sapien
caggtttgcatggtcgtcacatcct

SEQ ID NO: 991273 - DNA, 25 bp, Homo sapien
tctgcggcaaacctttttagttgtg

SEQ ID NO: 991274 - DNA, 25 bp, Homo sapien
catcctggggagacacgtatttggg

SEQ ID NO: 991275 - DNA, 25 bp, Homo sapien
catagaccaggtttttctgaacgaa

SEQ ID NO: 991276 - DNA, 25 bp, Homo sapien
atagaccaggtttttctgaacgaag

SEQ ID NO: 991277 - DNA, 25 bp, Homo sapien
aacataaccagtgaaaaaatataca

SEQ ID NO: 991278 - DNA, 25 bp, Homo sapien
cagtgaaaaaatatacatatacata

SEQ ID NO: 991279 - DNA, 25 bp, Homo sapien
acataaccagtgaaaaaatatacat

SEQ ID NO: 991280 - DNA, 25 bp, Homo sapien
aaccagtgaaaaaatatacatatac

SEQ ID NO: 991281 - DNA, 25 bp, Homo sapien
taactcgtagttgtgctttccggcc

SEQ ID NO: 991282 - DNA, 25 bp, Homo sapien
aaggtggctgcctggccgtcagacc

SEQ ID NO: 991283 - DNA, 25 bp, Homo sapien
gctactgctgacagtggtcacaggg

SEQ ID NO: 991284 - DNA, 25 bp, Homo sapien
gtcagaccccggtgtacagtaggcc

SEQ ID NO: 991285 - DNA, 25 bp, Homo sapien
cacatttcagaggtgctcctggtgg

SEQ ID NO: 991286 - DNA, 25 bp, Homo sapien
gacactttatgaaggcaagaaactg

SEQ ID NO: 991287 - DNA, 25 bp, Homo sapien
gaaactgcgtgatgaggaaaaacgc

SEQ ID NO: 991288 - DNA, 25 bp, Homo sapien
ggaaagccagacactttatgaaggc

SEQ ID NO: 991289 - DNA, 25 bp, Homo sapien
cccactagcacgtggcatatcaata

SEQ ID NO: 991290 - DNA, 25 bp, Homo sapien
aataacatccacacgcggttcatcc

SEQ ID NO: 991291 - DNA, 25 bp, Homo sapien
gcggttcatccccagacattctcaa

SEQ ID NO: 991292 - DNA, 25 bp, Homo sapien
gacattctcaaactgctcgccatga

SEQ ID NO: 991293 - DNA, 25 bp, Homo sapien
aagaaaggggcacgctccaggtgtt

SEQ ID NO: 991294 - DNA, 25 bp, Homo sapien
aaagaaaggggcacgctccaggtgt

SEQ ID NO: 991295 - DNA, 25 bp, Homo sapien
gaaaggggcacgctccaggtgttgg

SEQ ID NO: 991296 - DNA, 25 bp, Homo sapien
ctagttttgccataattctcccaaa

SEQ ID NO: 991297 - DNA, 25 bp, Homo sapien
aaggatgcccctggcaacaatatgg

SEQ ID NO: 991298 - DNA, 25 bp, Homo sapien
tgagccaacagatggaagctcttca

SEQ ID NO: 991299 - DNA, 25 bp, Homo sapien
tacagatcctcaggacaaaacattc

SEQ ID NO: 991300 - DNA, 25 bp, Homo sapien
gtaccaaatccagtcagtggtgagg

SEQ ID NO: 991301 - DNA, 25 bp, Homo sapien
acagaggaggccgtggagaggcggc

SEQ ID NO: 991302 - DNA, 25 bp, Homo sapien
gagcctgggtagcaccgtaagtcat

SEQ ID NO: 991303 - DNA, 25 bp, Homo sapien
caagaaccaaactcatcactccagt

SEQ ID NO: 991304 - DNA, 25 bp, Homo sapien
aaggtactggctgactcagagcaca

SEQ ID NO: 991305 - DNA, 25 bp, Homo sapien
ggcgttaaagttcagacaatgagag

SEQ ID NO: 991306 - DNA, 25 bp, Homo sapien
cgttaaagttcagacaatgagagtg

SEQ ID NO: 991307 - DNA, 25 bp, Homo sapien
ggtactggctgactcagagcacagg

SEQ ID NO: 991308 - DNA, 25 bp, Homo sapien
taaccttgtgacgtagaaactatta

SEQ ID NO: 991309 - DNA, 25 bp, Homo sapien
atctgagtgttttatgcatattaac

SEQ ID NO: 991310 - DNA, 25 bp, Homo sapien
gctagttgtgtattcccagcctcta

SEQ ID NO: 991311 - DNA, 25 bp, Homo sapien
ggtatgagctgctgcgctcgaccca

SEQ ID NO: 991312 - DNA, 25 bp, Homo sapien
ttctattttgggattgcaatatgcc

SEQ ID NO: 991313 - DNA, 25 bp, Homo sapien
tattttgggattgcaatatgcctct

SEQ ID NO: 991314 - DNA, 25 bp, Homo sapien
tttgggattgcaatatgcctcttca

SEQ ID NO: 991315 - DNA, 25 bp, Homo sapien
ggattgcaatatgcctcttcaataa

SEQ ID NO: 991316 - DNA, 25 bp, Homo sapien
tggaaatgaactctatggcacttat

SEQ ID NO: 991317 - DNA, 25 bp, Homo sapien
ttgccatcgatacggcaaatggaaa

SEQ ID NO: 991318 - DNA, 25 bp, Homo sapien
ccatttgcctctatccaagaattgc

SEQ ID NO: 991319 - DNA, 25 bp, Homo sapien
atttgcctctatccaagaattgcca

SEQ ID NO: 991320 - DNA, 25 bp, Homo sapien
tgggcagccagatcctcacttctct

SEQ ID NO: 991321 - DNA, 25 bp, Homo sapien
cacacaatggcccagacctatgggt

SEQ ID NO: 991322 - DNA, 25 bp, Homo sapien
ctatgggttccggtgagctgctccc

SEQ ID NO: 991323 - DNA, 25 bp, Homo sapien
ttctctcatcactccaagcacacgc

SEQ ID NO: 991324 - DNA, 25 bp, Homo sapien
gaactctctcaagcaggtgtgtaca

SEQ ID NO: 991325 - DNA, 25 bp, Homo sapien
taggtcaggaacctcttgaactctc

SEQ ID NO: 991326 - DNA, 25 bp, Homo sapien
gaaagacaaatagctatggtccaag

SEQ ID NO: 991327 - DNA, 25 bp, Homo sapien
ggtcacaaccaaccagttcctgttc

SEQ ID NO: 991328 - DNA, 25 bp, Homo sapien
tacaaacagatctgatcaccctcct

SEQ ID NO: 991329 - DNA, 25 bp, Homo sapien
agctacaacttttccggatatggta

SEQ ID NO: 991330 - DNA, 25 bp, Homo sapien
cctggctaagagtgtttggggacac

SEQ ID NO: 991331 - DNA, 25 bp, Homo sapien
gatatggtacaaacagatctgatca

SEQ ID NO: 991332 - DNA, 25 bp, Homo sapien
ctgcaaagaaacaccacaaagatat

SEQ ID NO: 991333 - DNA, 25 bp, Homo sapien
aagaaacaccacaaagatatgtcag

SEQ ID NO: 991334 - DNA, 25 bp, Homo sapien
caaagaaacaccacaaagatatgtc

SEQ ID NO: 991335 - DNA, 25 bp, Homo sapien
tgcaaagaaacaccacaaagatatg

SEQ ID NO: 991336 - DNA, 25 bp, Homo sapien
ggcagagctcttattcttgatgtca

SEQ ID NO: 991337 - DNA, 25 bp, Homo sapien
ttattcttgatgtcatgtgcatttc

SEQ ID NO: 991338 - DNA, 25 bp, Homo sapien
tgggggcagagctcttattcttgat

SEQ ID NO: 991339 - DNA, 25 bp, Homo sapien
gctcttattcttgatgtcatgtgca

SEQ ID NO: 991340 - DNA, 25 bp, Homo sapien
caggtctgagctcatacccaacttc

SEQ ID NO: 991341 - DNA, 25 bp, Homo sapien
tggcagatatggagcttgatgcact

SEQ ID NO: 991342 - DNA, 25 bp, Homo sapien
tacagctagtgccaaacttgcattc

SEQ ID NO: 991343 - DNA, 25 bp, Homo sapien
tgcattccccctgtaaaaaatactg

SEQ ID NO: 991344 - DNA, 25 bp, Homo sapien
ttcaggaaggtctcacacgacacca

SEQ ID NO: 991345 - DNA, 25 bp, Homo sapien
aggaaggtctcacacgacaccacct

SEQ ID NO: 991346 - DNA, 25 bp, Homo sapien
tgagaaaggggcttcacaagctgtg

SEQ ID NO: 991347 - DNA, 25 bp, Homo sapien
ggggcttcacaagctgtgattccat

SEQ ID NO: 991348 - DNA, 25 bp, Homo sapien
gctctgagggcttaaagcatcttag

SEQ ID NO: 991349 - DNA, 25 bp, Homo sapien
agttaaagaatcagccctagtcgca

SEQ ID NO: 991350 - DNA, 25 bp, Homo sapien
tacaattcaaagtcaaagaggctct

SEQ ID NO: 991351 - DNA, 25 bp, Homo sapien
agcatcttagagaaggccaaatacc

SEQ ID NO: 991352 - DNA, 25 bp, Homo sapien
tggtcaacgccatgagttctcagca

SEQ ID NO: 991353 - DNA, 25 bp, Homo sapien
gagttggcatagctcattatagctc

SEQ ID NO: 991354 - DNA, 25 bp, Homo sapien
caagctgtgactattcctacagttc

SEQ ID NO: 991355 - DNA, 25 bp, Homo sapien
cagcacactcaggttgtgttcggtt

SEQ ID NO: 991356 - DNA, 25 bp, Homo sapien
tctgcagcaggactgatgagctatt

SEQ ID NO: 991357 - DNA, 25 bp, Homo sapien
ctctgcagcaggactgatgagctat

SEQ ID NO: 991358 - DNA, 25 bp, Homo sapien
tgagtcagaaatggaaggttcaaga

SEQ ID NO: 991359 - DNA, 25 bp, Homo sapien
gaaatggaaggttcaagaaactcac

SEQ ID NO: 991360 - DNA, 25 bp, Homo sapien
cctaaagtgagtcagaaatggaagg

SEQ ID NO: 991361 - DNA, 25 bp, Homo sapien
tcagaaatggaaggttcaagaaact

SEQ ID NO: 991362 - DNA, 25 bp, Homo sapien
tgtgtaaaccacaaggaaaagagaa

SEQ ID NO: 991363 - DNA, 25 bp, Homo sapien
ctgtgtaaaccacaaggaaaagaga

SEQ ID NO: 991364 - DNA, 25 bp, Homo sapien
cttgcaggcgccgtagaccatgaac

SEQ ID NO: 991365 - DNA, 25 bp, Homo sapien
ccggctctcaggaacttgcaggcgc

SEQ ID NO: 991366 - DNA, 25 bp, Homo sapien
ggctctcaggaacttgcaggcgccg

SEQ ID NO: 991367 - DNA, 25 bp, Homo sapien
tcaggaacttgcaggcgccgtagac

SEQ ID NO: 991368 - DNA, 25 bp, Homo sapien
cgcagagccccacgcagcccggctt

SEQ ID NO: 991369 - DNA, 25 bp, Homo sapien
gctgcgcgcagagccccacgcagcc

SEQ ID NO: 991370 - DNA, 25 bp, Homo sapien
gcagaggtggagctgcgcgcagagc

SEQ ID NO: 991371 - DNA, 25 bp, Homo sapien
agccccacgcagcccggcttggagc

SEQ ID NO: 991372 - DNA, 25 bp, Homo sapien
ctggtgcgcgcgacacaggcgcagc

SEQ ID NO: 991373 - DNA, 25 bp, Homo sapien
gcgcgcgacacaggcgcagcggcga

SEQ ID NO: 991374 - DNA, 25 bp, Homo sapien
tggtgcgcgcgacacaggcgcagcg

SEQ ID NO: 991375 - DNA, 25 bp, Homo sapien
gtgcgcgcgacacaggcgcagcggc

SEQ ID NO: 991376 - DNA, 25 bp, Homo sapien
ggggccgcggctgcgccgcccgccc

SEQ ID NO: 991377 - DNA, 25 bp, Homo sapien
gccgcggctgcgccgcccgcccgca

SEQ ID NO: 991378 - DNA, 25 bp, Homo sapien
ccgcggctgcgccgcccgcccgcac

SEQ ID NO: 991379 - DNA, 25 bp, Homo sapien
ctccggggccgcggctgcgccgccc

SEQ ID NO: 991380 - DNA, 25 bp, Homo sapien
gtcggcgctcaagcccatccgcaag

SEQ ID NO: 991381 - DNA, 25 bp, Homo sapien
agcgcgtcggcgctcaagcccatcc

SEQ ID NO: 991382 - DNA, 25 bp, Homo sapien
gcgccgcagctcgggcaactccagg

SEQ ID NO: 991383 - DNA, 25 bp, Homo sapien
gcagctcgggcaactccagggcgcc

SEQ ID NO: 991384 - DNA, 25 bp, Homo sapien
tgggtgacctcaccgacgacgccgg

SEQ ID NO: 991385 - DNA, 25 bp, Homo sapien
ctgggtgacctcaccgacgacgccg

SEQ ID NO: 991386 - DNA, 25 bp, Homo sapien
gtgacctcaccgacgacgccggcct

SEQ ID NO: 991387 - DNA, 25 bp, Homo sapien
acctcaccgacgacgccggcctggg

SEQ ID NO: 991388 - DNA, 25 bp, Homo sapien
tccctggatgtttgagggaccagga

SEQ ID NO: 991389 - DNA, 25 bp, Homo sapien
gaaaaacagaacctgtgcgccctcg

SEQ ID NO: 991390 - DNA, 25 bp, Homo sapien
agctcttgagctcgggcgttcggcc

SEQ ID NO: 991391 - DNA, 25 bp, Homo sapien
ctcagcgcgccttcagtcagaggga

SEQ ID NO: 991392 - DNA, 25 bp, Homo sapien
taaaggttcctttcgcctcggtgca

SEQ ID NO: 991393 - DNA, 25 bp, Homo sapien
taaaagagcaaatccgtgagccgag

SEQ ID NO: 991394 - DNA, 25 bp, Homo sapien
gagcaatgcgagttgttagagccct

SEQ ID NO: 991395 - DNA, 25 bp, Homo sapien
gaaacagggacaactgacgggagct

SEQ ID NO: 991396 - DNA, 25 bp, Homo sapien
gggagtctattgtctgaacgatcac

SEQ ID NO: 991397 - DNA, 25 bp, Homo sapien
gacaagtggatcatatcttctcctg

SEQ ID NO: 991398 - DNA, 25 bp, Homo sapien
tagtatctcacattgtacagggctg

SEQ ID NO: 991399 - DNA, 25 bp, Homo sapien
cgctgaattcgtctcctagggctgc

SEQ ID NO: 991400 - DNA, 25 bp, Homo sapien
ctgggtgattgcagccgatgattga

SEQ ID NO: 991401 - DNA, 25 bp, Homo sapien
caccctccaacattattattcttga

SEQ ID NO: 991402 - DNA, 25 bp, Homo sapien
tcttgactgagtagcagacttcggg

SEQ ID NO: 991403 - DNA, 25 bp, Homo sapien
cagacttcggggaatcactgggtga

SEQ ID NO: 991404 - DNA, 25 bp, Homo sapien
gatgtaaagtgtgtggtgacccaga

SEQ ID NO: 991405 - DNA, 25 bp, Homo sapien
gacagacagcagtgtcgcagaaccg

SEQ ID NO: 991406 - DNA, 25 bp, Homo sapien
tcgcagaaccgtaggaagagacctg

SEQ ID NO: 991407 - DNA, 25 bp, Homo sapien
gaggcggcggaaccacagacagaca

SEQ ID NO: 991408 - DNA, 25 bp, Homo sapien
cgtgttcacactcgtcgcagtagct

SEQ ID NO: 991409 - DNA, 25 bp, Homo sapien
gaactcagatggcattcgatacagc

SEQ ID NO: 991410 - DNA, 25 bp, Homo sapien
ggatgccctgcctttagtctaatcg

SEQ ID NO: 991411 - DNA, 25 bp, Homo sapien
gattctgtccccttaggcagccgtg

SEQ ID NO: 991412 - DNA, 25 bp, Homo sapien
agggagcagcccgggtgggcaaggc

SEQ ID NO: 991413 - DNA, 25 bp, Homo sapien
aaggaggctgctgcgctgccccacg

SEQ ID NO: 991414 - DNA, 25 bp, Homo sapien
cagaagatagggcaggatgtggctt

SEQ ID NO: 991415 - DNA, 25 bp, Homo sapien
ggcaggatgtggcttcggtgtccag

SEQ ID NO: 991416 - DNA, 25 bp, Homo sapien
aaataaaagatagtaagggctcctg

SEQ ID NO: 991417 - DNA, 25 bp, Homo sapien
gaacctggaagtgtcattggccctc

SEQ ID NO: 991418 - DNA, 25 bp, Homo sapien
taagtgtgcatgctttggcgtccct

SEQ ID NO: 991419 - DNA, 25 bp, Homo sapien
cagtgatgtgtctcatgctgtctca

SEQ ID NO: 991420 - DNA, 25 bp, Homo sapien
ttttctttcaaggacgcattttata

SEQ ID NO: 991421 - DNA, 25 bp, Homo sapien
agcaaaaaatacactaagtgctaaa

SEQ ID NO: 991422 - DNA, 25 bp, Homo sapien
tttcaaggacgcattttatacaatt

SEQ ID NO: 991423 - DNA, 25 bp, Homo sapien
ttctttcaaggacgcattttataca

SEQ ID NO: 991424 - DNA, 25 bp, Homo sapien
tactgttaagcccaggtactcgcag

SEQ ID NO: 991425 - DNA, 25 bp, Homo sapien
gaacatcatctcatagggcaagccg

SEQ ID NO: 991426 - DNA, 25 bp, Homo sapien
gcagaacttcgacaaaagcccaggt

SEQ ID NO: 991427 - DNA, 25 bp, Homo sapien
taaagctgctctctttgggacccag

SEQ ID NO: 991428 - DNA, 25 bp, Homo sapien
ccttggatgttagcaaaagcgaagc

SEQ ID NO: 991429 - DNA, 25 bp, Homo sapien
aaattcaagccctgacaagagaccc

SEQ ID NO: 991430 - DNA, 25 bp, Homo sapien
tggagttcttacacattggctacga

SEQ ID NO: 991431 - DNA, 25 bp, Homo sapien
gagaagagtcttactgggtcatcac

SEQ ID NO: 991432 - DNA, 25 bp, Homo sapien
tcacacaaagaaacgtgcatggcca

SEQ ID NO: 991433 - DNA, 25 bp, Homo sapien
caaagaaacgtgcatggccatttct

SEQ ID NO: 991434 - DNA, 25 bp, Homo sapien
caagacgttgtttggctgttgccat

SEQ ID NO: 991435 - DNA, 25 bp, Homo sapien
tttctgttcaacttaaggatcttcc

SEQ ID NO: 991436 - DNA, 25 bp, Homo sapien
gactgccattacttatctggcacgc

SEQ ID NO: 991437 - DNA, 25 bp, Homo sapien
agtttcaccaactggcctttctggg

SEQ ID NO: 991438 - DNA, 25 bp, Homo sapien
gggcaccgagaaggaagtttcacca

SEQ ID NO: 991439 - DNA, 25 bp, Homo sapien
tggtggatttgatgccggtctcttg

SEQ ID NO: 991440 - DNA, 25 bp, Homo sapien
aagactatcgagtaaactttcaggg

SEQ ID NO: 991441 - DNA, 25 bp, Homo sapien
taactgagagggttataaccagcac

SEQ ID NO: 991442 - DNA, 25 bp, Homo sapien
ccagctacagtgaggcactataaaa

SEQ ID NO: 991443 - DNA, 25 bp, Homo sapien
cagactagatgtgaacagagtacac

SEQ ID NO: 991444 - DNA, 25 bp, Homo sapien
cctcaagtctggatcttcagtcttg

SEQ ID NO: 991445 - DNA, 25 bp, Homo sapien
ggaagtatcaaactgtttaatccag

SEQ ID NO: 991446 - DNA, 25 bp, Homo sapien
ctgaggatgaaatctggaagtatca

SEQ ID NO: 991447 - DNA, 25 bp, Homo sapien
agtcctcaagtctggatcttcagtc

SEQ ID NO: 991448 - DNA, 25 bp, Homo sapien
gtaattgtttgtgatcaaatagtta

SEQ ID NO: 991449 - DNA, 25 bp, Homo sapien
agttataaacaccatactcagacca

SEQ ID NO: 991450 - DNA, 25 bp, Homo sapien
gatcaaatagttataaacaccatac

SEQ ID NO: 991451 - DNA, 25 bp, Homo sapien
ttgtttgtgatcaaatagttataaa

SEQ ID NO: 991452 - DNA, 25 bp, Homo sapien
gggcaacataggtgagacctcgtct

SEQ ID NO: 991453 - DNA, 25 bp, Homo sapien
tttatcatagcgatacaactgccta

SEQ ID NO: 991454 - DNA, 25 bp, Homo sapien
tggtttatcatagcgatacaactgc

SEQ ID NO: 991455 - DNA, 25 bp, Homo sapien
tatcatagcgatacaactgcctaac

SEQ ID NO: 991456 - DNA, 25 bp, Homo sapien
ccactggtttatcatagcgatacaa

SEQ ID NO: 991457 - DNA, 25 bp, Homo sapien
tcttcctctgtgctcgtcgaggtag

SEQ ID NO: 991458 - DNA, 25 bp, Homo sapien
cctttgtaaacacgtggaatagtgc

SEQ ID NO: 991459 - DNA, 25 bp, Homo sapien
tgccatagacagcatgccctgaata

SEQ ID NO: 991460 - DNA, 25 bp, Homo sapien
tctgtgctcgtcgaggtaggacatt

SEQ ID NO: 991461 - DNA, 25 bp, Homo sapien
gattcctccttaaagttggatgtta

SEQ ID NO: 991462 - DNA, 25 bp, Homo sapien
ttctggctcttttgaaggaagttcc

SEQ ID NO: 991463 - DNA, 25 bp, Homo sapien
tcacctgaactttcagactcttcag

SEQ ID NO: 991464 - DNA, 25 bp, Homo sapien
ttgaaggaagttcctcatcacatta

SEQ ID NO: 991465 - DNA, 25 bp, Homo sapien
gggtccggagtcttctgactcagaa

SEQ ID NO: 991466 - DNA, 25 bp, Homo sapien
atcctgatgatctactcctgagttc

SEQ ID NO: 991467 - DNA, 25 bp, Homo sapien
gagttctgatttcacacgtgtaaaa

SEQ ID NO: 991468 - DNA, 25 bp, Homo sapien
tctgatttcacacgtgtaaaaaacc

SEQ ID NO: 991469 - DNA, 25 bp, Homo sapien
tgagattcttcatgttccactccct

SEQ ID NO: 991470 - DNA, 25 bp, Homo sapien
cattttcactatctgctgtataaag

SEQ ID NO: 991471 - DNA, 25 bp, Homo sapien
taaagactttgatctgcaaagggct

SEQ ID NO: 991472 - DNA, 25 bp, Homo sapien
cactccctctactcctgaactctct

SEQ ID NO: 991473 - DNA, 25 bp, Homo sapien
aattattcttccatttgtcagcagt

SEQ ID NO: 991474 - DNA, 25 bp, Homo sapien
aatcgtagatcattatctttcgctc

SEQ ID NO: 991475 - DNA, 25 bp, Homo sapien
tcaggtactgtggaggatggttgga

SEQ ID NO: 991476 - DNA, 25 bp, Homo sapien
catttgtcagcagtaatcgtagatc

SEQ ID NO: 991477 - DNA, 25 bp, Homo sapien
tggaatacagtataccaccacctcc

SEQ ID NO: 991478 - DNA, 25 bp, Homo sapien
cctcaggtagccctgttcgactgat

SEQ ID NO: 991479 - DNA, 25 bp, Homo sapien
cttggggatatgcagcagtatggca

SEQ ID NO: 991480 - DNA, 25 bp, Homo sapien
gactgatggaatacagtataccacc

SEQ ID NO: 991481 - DNA, 25 bp, Homo sapien
ctaaagccaaagtaagagtatggct

SEQ ID NO: 991482 - DNA, 25 bp, Homo sapien
taaagccaaagtaagagtatggctc

SEQ ID NO: 991483 - DNA, 25 bp, Homo sapien
aaagccaaagtaagagtatggctca

SEQ ID NO: 991484 - DNA, 25 bp, Homo sapien
tctgcaaaggcgctacactgatctc

SEQ ID NO: 991485 - DNA, 25 bp, Homo sapien
gctgactgctggctcaagtagaggc

SEQ ID NO: 991486 - DNA, 25 bp, Homo sapien
tcagctgtcggttcaaacctgagag

SEQ ID NO: 991487 - DNA, 25 bp, Homo sapien
tatggatgatgcagagctcactaca

SEQ ID NO: 991488 - DNA, 25 bp, Homo sapien
tcccatggacacatctctaatcttt

SEQ ID NO: 991489 - DNA, 25 bp, Homo sapien
gacacatctctaatcttttgaggac

SEQ ID NO: 991490 - DNA, 25 bp, Homo sapien
ctcttcccatggacacatctctaat

SEQ ID NO: 991491 - DNA, 25 bp, Homo sapien
catggacacatctctaatcttttga

SEQ ID NO: 991492 - DNA, 25 bp, Homo sapien
gggaagttgcttcatttgaggatcg

SEQ ID NO: 991493 - DNA, 25 bp, Homo sapien
tctaggttagaaggagttcggacat

SEQ ID NO: 991494 - DNA, 25 bp, Homo sapien
ctcatctttcttcgggaatggtatg

SEQ ID NO: 991495 - DNA, 25 bp, Homo sapien
gacattatgatctcgaagtttcctc

SEQ ID NO: 991496 - DNA, 25 bp, Homo sapien
ctattgctcgaattactttagaaag

SEQ ID NO: 991497 - DNA, 25 bp, Homo sapien
ctctattgctcgaattactttagaa

SEQ ID NO: 991498 - DNA, 25 bp, Homo sapien
tattgctcgaattactttagaaagt

SEQ ID NO: 991499 - DNA, 25 bp, Homo sapien
ttgctcgaattactttagaaagttc

SEQ ID NO: 991500 - DNA, 25 bp, Homo sapien
ctggaatttcaaaggcatgttcaga

SEQ ID NO: 991501 - DNA, 25 bp, Homo sapien
ggaatttcaaaggcatgttcagata

SEQ ID NO: 991502 - DNA, 25 bp, Homo sapien
aatttcaaaggcatgttcagataca

SEQ ID NO: 991503 - DNA, 25 bp, Homo sapien
tttcaaaggcatgttcagatacaag

SEQ ID NO: 991504 - DNA, 25 bp, Homo sapien
gctttcactccctgtactaggtaag

SEQ ID NO: 991505 - DNA, 25 bp, Homo sapien
ctccctgtactaggtaagtttgagg

SEQ ID NO: 991506 - DNA, 25 bp, Homo sapien
tcactccctgtactaggtaagtttg

SEQ ID NO: 991507 - DNA, 25 bp, Homo sapien
ctttcactccctgtactaggtaagt

SEQ ID NO: 991508 - DNA, 25 bp, Homo sapien
tacaaactgactagaaaagttagac

SEQ ID NO: 991509 - DNA, 25 bp, Homo sapien
aactattctcactagcacaagagga

SEQ ID NO: 991510 - DNA, 25 bp, Homo sapien
cagtctccaacttgagtgctcaaag

SEQ ID NO: 991511 - DNA, 25 bp, Homo sapien
acagaagcaagtgacatcagtctcc

SEQ ID NO: 991512 - DNA, 25 bp, Homo sapien
caggtggctatgagtgaatttacaa

SEQ ID NO: 991513 - DNA, 25 bp, Homo sapien
tgtatgcaggcttctagaggactag

SEQ ID NO: 991514 - DNA, 25 bp, Homo sapien
tctaacttgctaaaaaggttgctgg

SEQ ID NO: 991515 - DNA, 25 bp, Homo sapien
tattacctacgttgttctgatccag

SEQ ID NO: 991516 - DNA, 25 bp, Homo sapien
ccaacatatggcttcaaagaaaggg

SEQ ID NO: 991517 - DNA, 25 bp, Homo sapien
aaaccaacatatggcttcaaagaaa

SEQ ID NO: 991518 - DNA, 25 bp, Homo sapien
accaacatatggcttcaaagaaagg

SEQ ID NO: 991519 - DNA, 25 bp, Homo sapien
caacatatggcttcaaagaaaggga

SEQ ID NO: 991520 - DNA, 25 bp, Homo sapien
ccccaaaagccatacagtcctgaga

SEQ ID NO: 991521 - DNA, 25 bp, Homo sapien
tgtgcaggaagttccccccaaaagc

SEQ ID NO: 991522 - DNA, 25 bp, Homo sapien
gccatacagtcctgagaagtgagca

SEQ ID NO: 991523 - DNA, 25 bp, Homo sapien
gagctgcatgccaatgttaaggttg

SEQ ID NO: 991524 - DNA, 25 bp, Homo sapien
cagtgccccgaaaggactaagcaga

SEQ ID NO: 991525 - DNA, 25 bp, Homo sapien
tccatcgccctggtgtcatcctgaa

SEQ ID NO: 991526 - DNA, 25 bp, Homo sapien
gattttactctttgagaccagccaa

SEQ ID NO: 991527 - DNA, 25 bp, Homo sapien
cacactgggattgatgggacactcc

SEQ ID NO: 991528 - DNA, 25 bp, Homo sapien
gaattacattgcctacagcagtggt

SEQ ID NO: 991529 - DNA, 25 bp, Homo sapien
tggccatgacgtccagcaatctgtg

SEQ ID NO: 991530 - DNA, 25 bp, Homo sapien
tgtagtttggaagcttatcagtcac

SEQ ID NO: 991531 - DNA, 25 bp, Homo sapien
cacagaatccgaaccttggccatga

SEQ ID NO: 991532 - DNA, 25 bp, Homo sapien
cagatccctgtgaactttacagtca

SEQ ID NO: 991533 - DNA, 25 bp, Homo sapien
agtcattagggtcaccaaaaccagc

SEQ ID NO: 991534 - DNA, 25 bp, Homo sapien
acagttctcgaaaccactggtctgg

SEQ ID NO: 991535 - DNA, 25 bp, Homo sapien
agggacagatccctgtgaactttac

SEQ ID NO: 991536 - DNA, 25 bp, Homo sapien
taggaacaaataaggtatgtccctg

SEQ ID NO: 991537 - DNA, 25 bp, Homo sapien
ccaaagaacacctcactctgggtca

SEQ ID NO: 991538 - DNA, 25 bp, Homo sapien
gaactccaagattcataacgtgcca

SEQ ID NO: 991539 - DNA, 25 bp, Homo sapien
catttgtagcatttatccaccttat

SEQ ID NO: 991540 - DNA, 25 bp, Homo sapien
tacaagaaatgaatataccactgaa

SEQ ID NO: 991541 - DNA, 25 bp, Homo sapien
ctagggctatatgtttttgtcagtg

SEQ ID NO: 991542 - DNA, 25 bp, Homo sapien
aatttaaaagtcatggctcttccat

SEQ ID NO: 991543 - DNA, 25 bp, Homo sapien
tgagggcagaaagtaaatctaatat

SEQ ID NO: 991544 - DNA, 25 bp, Homo sapien
tccaccgaagtcaatgtggaaatct

SEQ ID NO: 991545 - DNA, 25 bp, Homo sapien
tgaagttccaccgaagtcaatgtgg

SEQ ID NO: 991546 - DNA, 25 bp, Homo sapien
gttccaccgaagtcaatgtggaaat

SEQ ID NO: 991547 - DNA, 25 bp, Homo sapien
gactgaagttccaccgaagtcaatg

SEQ ID NO: 991548 - DNA, 25 bp, Homo sapien
ggctatatcagggacctccaccaat

SEQ ID NO: 991549 - DNA, 25 bp, Homo sapien
ttggctatatcagggacctccacca

SEQ ID NO: 991550 - DNA, 25 bp, Homo sapien
tttggctatatcagggacctccacc

SEQ ID NO: 991551 - DNA, 25 bp, Homo sapien
tatatcagggacctccaccaattca

SEQ ID NO: 991552 - DNA, 25 bp, Homo sapien
acacacccacatcatgcaaattaaa

SEQ ID NO: 991553 - DNA, 25 bp, Homo sapien
tacacacacacccacatcatgcaaa

SEQ ID NO: 991554 - DNA, 25 bp, Homo sapien
acacacacacccacatcatgcaaat

SEQ ID NO: 991555 - DNA, 25 bp, Homo sapien
acacacacccacatcatgcaaatta

SEQ ID NO: 991556 - DNA, 25 bp, Homo sapien
tttctcatctattcccaaaccaaat

SEQ ID NO: 991557 - DNA, 25 bp, Homo sapien
tttttctcatctattcccaaaccaa

SEQ ID NO: 991558 - DNA, 25 bp, Homo sapien
tctcatctattcccaaaccaaataa

SEQ ID NO: 991559 - DNA, 25 bp, Homo sapien
tcatctattcccaaaccaaataatt

SEQ ID NO: 991560 - DNA, 25 bp, Homo sapien
aaattcaaggctgatcacatttaac

SEQ ID NO: 991561 - DNA, 25 bp, Homo sapien
tgtctgcctgcctcgccacatcaat

SEQ ID NO: 991562 - DNA, 25 bp, Homo sapien
tggtctgttaggattcatgaagtat

SEQ ID NO: 991563 - DNA, 25 bp, Homo sapien
aacataattgtgaagtgtcattttg

SEQ ID NO: 991564 - DNA, 25 bp, Homo sapien
tacataacgttccacatccatcaca

SEQ ID NO: 991565 - DNA, 25 bp, Homo sapien
gggaccataatagggacatcaaatc

SEQ ID NO: 991566 - DNA, 25 bp, Homo sapien
gagcctgagtcctagatcatctaat

SEQ ID NO: 991567 - DNA, 25 bp, Homo sapien
tctaattttgggaccataataggga

SEQ ID NO: 991568 - DNA, 25 bp, Homo sapien
gggggctagagaggaattctaaaga

SEQ ID NO: 991569 - DNA, 25 bp, Homo sapien
tcttttatcagagtaagtttccata

SEQ ID NO: 991570 - DNA, 25 bp, Homo sapien
cttttatcagagtaagtttccatac

SEQ ID NO: 991571 - DNA, 25 bp, Homo sapien
tgaaagttctagttccagcttgcac

SEQ ID NO: 991572 - DNA, 25 bp, Homo sapien
ctcgagagcgtaattccttaatgaa

SEQ ID NO: 991573 - DNA, 25 bp, Homo sapien
ggtttggaaccatcatcaatttctg

SEQ ID NO: 991574 - DNA, 25 bp, Homo sapien
tgggaagactcgagagcgtaattcc

SEQ ID NO: 991575 - DNA, 25 bp, Homo sapien
gcctaaaacctctatgattctggaa

SEQ ID NO: 991576 - DNA, 25 bp, Homo sapien
tagacagcagaatagttacatggat

SEQ ID NO: 991577 - DNA, 25 bp, Homo sapien
tgggtcctcatgtcgataagaagtc

SEQ ID NO: 991578 - DNA, 25 bp, Homo sapien
tgataaggcttataggtgcttgctg

SEQ ID NO: 991579 - DNA, 25 bp, Homo sapien
aaaactgcacagttgggacagtgat

SEQ ID NO: 991580 - DNA, 25 bp, Homo sapien
cagttgggacagtgatacaggtcaa

SEQ ID NO: 991581 - DNA, 25 bp, Homo sapien
gcatgatgttcttctactccaacac

SEQ ID NO: 991582 - DNA, 25 bp, Homo sapien
aacagcatgatgttcttctactcca

SEQ ID NO: 991583 - DNA, 25 bp, Homo sapien
actttccattgtcttaatcttctga

SEQ ID NO: 991584 - DNA, 25 bp, Homo sapien
cttctgaaattgttgcttagctggc

SEQ ID NO: 991585 - DNA, 25 bp, Homo sapien
ttcctcttgcttcagatactctccc

SEQ ID NO: 991586 - DNA, 25 bp, Homo sapien
tcctcttgcttcagatactctcccc

SEQ ID NO: 991587 - DNA, 25 bp, Homo sapien
ttcatgtagttcctaaatgtcccta

SEQ ID NO: 991588 - DNA, 25 bp, Homo sapien
tttctagggcctaatgaaacctaca

SEQ ID NO: 991589 - DNA, 25 bp, Homo sapien
tctccaatccagcagacagttttat

SEQ ID NO: 991590 - DNA, 25 bp, Homo sapien
tgacatttggaatgtcagtaaaaga

SEQ ID NO: 991591 - DNA, 25 bp, Homo sapien
ccaggaaaggtcaacagcaagcact

SEQ ID NO: 991592 - DNA, 25 bp, Homo sapien
caaaataggtgacgctgagttgcca

SEQ ID NO: 991593 - DNA, 25 bp, Homo sapien
cacatgttggatcccttcaaaagat

SEQ ID NO: 991594 - DNA, 25 bp, Homo sapien
tatttcgaaacatacaagtcagggc

SEQ ID NO: 991595 - DNA, 25 bp, Homo sapien
gatgccaagttaagtgatgctcact

SEQ ID NO: 991596 - DNA, 25 bp, Homo sapien
gaaggtaagcgaacaggatttggcc

SEQ ID NO: 991597 - DNA, 25 bp, Homo sapien
gattctgccctgaacaacacgaagg

SEQ ID NO: 991598 - DNA, 25 bp, Homo sapien
tggaaacagcaagtaggaacaacct

SEQ ID NO: 991599 - DNA, 25 bp, Homo sapien
gccattcatactgaggaccgtcctg

SEQ ID NO: 991600 - DNA, 25 bp, Homo sapien
aatcagcatatcactggcaacaggg

SEQ ID NO: 991601 - DNA, 25 bp, Homo sapien
caagaatggctagacctgatgggat

SEQ ID NO: 991602 - DNA, 25 bp, Homo sapien
cagctttatgggaaattgaaggcca

SEQ ID NO: 991603 - DNA, 25 bp, Homo sapien
ttctaaaaactaccagagccagtgg

SEQ ID NO: 991604 - DNA, 25 bp, Homo sapien
cttcaaagtagccaggtaagggtgt

SEQ ID NO: 991605 - DNA, 25 bp, Homo sapien
caagaagaccatggtgcctggcaac

SEQ ID NO: 991606 - DNA, 25 bp, Homo sapien
gaattgatactcactgaagcaggct

SEQ ID NO: 991607 - DNA, 25 bp, Homo sapien
tttttgtagacggaggctcgtcatg

SEQ ID NO: 991608 - DNA, 25 bp, Homo sapien
tttgtagacggaggctcgtcatgtt

SEQ ID NO: 991609 - DNA, 25 bp, Homo sapien
cacctggaggaatactgtcttaata

SEQ ID NO: 991610 - DNA, 25 bp, Homo sapien
actgcacctggaggaatactgtctt

SEQ ID NO: 991611 - DNA, 25 bp, Homo sapien
tctgcaagaataaccagaaacacac

SEQ ID NO: 991612 - DNA, 25 bp, Homo sapien
gacttacaccatactacaaaagcct

SEQ ID NO: 991613 - DNA, 25 bp, Homo sapien
gggacaggccttaccagacttacac

SEQ ID NO: 991614 - DNA, 25 bp, Homo sapien
aagaggtaatactattctcagagag

SEQ ID NO: 991615 - DNA, 25 bp, Homo sapien
aagtagtaaacaggtcaggcgcggt

SEQ ID NO: 991616 - DNA, 25 bp, Homo sapien
aaaagtagtaaacaggtcaggcgcg

SEQ ID NO: 991617 - DNA, 25 bp, Homo sapien
caataatttgtttagtatgtcaatc

SEQ ID NO: 991618 - DNA, 25 bp, Homo sapien
aatttgtttagtatgtcaatcatac

SEQ ID NO: 991619 - DNA, 25 bp, Homo sapien
aaccagtccttgcagatatcgcact

SEQ ID NO: 991620 - DNA, 25 bp, Homo sapien
cttgcagatatcgcactcgatcatg

SEQ ID NO: 991621 - DNA, 25 bp, Homo sapien
tcatgaagcggttcacgtcgtacgg

SEQ ID NO: 991622 - DNA, 25 bp, Homo sapien
agtccttgcagatatcgcactcgat

SEQ ID NO: 991623 - DNA, 25 bp, Homo sapien
tgccggcacacacagtacacgggcg

SEQ ID NO: 991624 - DNA, 25 bp, Homo sapien
tcgcgacgctgagagaatcgcccag

SEQ ID NO: 991625 - DNA, 25 bp, Homo sapien
agttcctgcggagtgctcaagggca

SEQ ID NO: 991626 - DNA, 25 bp, Homo sapien
ttatttcggagcgagagccgaggcc

SEQ ID NO: 991627 - DNA, 25 bp, Homo sapien
gagctgacacgccgagccggttgtg

SEQ ID NO: 991628 - DNA, 25 bp, Homo sapien
agctgacacgccgagccggttgtgc

SEQ ID NO: 991629 - DNA, 25 bp, Homo sapien
cacccgaattcccagcgagcagcaa

SEQ ID NO: 991630 - DNA, 25 bp, Homo sapien
gcagcaaggagaccagagcgtcgat

SEQ ID NO: 991631 - DNA, 25 bp, Homo sapien
tcgatggagccaccgttagttgcgg

SEQ ID NO: 991632 - DNA, 25 bp, Homo sapien
ctttccgagggaggaatgtgccgtg

SEQ ID NO: 991633 - DNA, 25 bp, Homo sapien
ctgtccccaagaggaattcatcact

SEQ ID NO: 991634 - DNA, 25 bp, Homo sapien
ctgggagggaccaaccttgaaatgg

SEQ ID NO: 991635 - DNA, 25 bp, Homo sapien
gaattcatcactgtcgtccgctggg

SEQ ID NO: 991636 - DNA, 25 bp, Homo sapien
actgtcgtccgctgggagggaccaa

SEQ ID NO: 991637 - DNA, 25 bp, Homo sapien
gctagggacatcactgagatggctc

SEQ ID NO: 991638 - DNA, 25 bp, Homo sapien
ggacagcgacagcaacccattcatt

SEQ ID NO: 991639 - DNA, 25 bp, Homo sapien
tctctaatcctttaccgctagggac

SEQ ID NO: 991640 - DNA, 25 bp, Homo sapien
cacgtgaggaggcacccctggtttc

SEQ ID NO: 991641 - DNA, 25 bp, Homo sapien
ctgcattgtcttcccctttgttgca

SEQ ID NO: 991642 - DNA, 25 bp, Homo sapien
gctcggccctttcactgcattgtct

SEQ ID NO: 991643 - DNA, 25 bp, Homo sapien
tttcactgcattgtcttcccctttg

SEQ ID NO: 991644 - DNA, 25 bp, Homo sapien
ctaatgtctgctcggccctttcact

SEQ ID NO: 991645 - DNA, 25 bp, Homo sapien
gtgctgctgatgacgcccaaatccc

SEQ ID NO: 991646 - DNA, 25 bp, Homo sapien
tcaaagcctctacttggtgctgctg

SEQ ID NO: 991647 - DNA, 25 bp, Homo sapien
tgatgacgcccaaatcccccacttc

SEQ ID NO: 991648 - DNA, 25 bp, Homo sapien
taccctcaaagcctctacttggtgc

SEQ ID NO: 991649 - DNA, 25 bp, Homo sapien
tatcattccaattttttagtgtatg

SEQ ID NO: 991650 - DNA, 25 bp, Homo sapien
ttagtgtatgtgctgtcaaagcaag

SEQ ID NO: 991651 - DNA, 25 bp, Homo sapien
atcattccaattttttagtgtatgt

SEQ ID NO: 991652 - DNA, 25 bp, Homo sapien
ctgtatcattccaattttttagtgt

SEQ ID NO: 991653 - DNA, 25 bp, Homo sapien
gaagaccgccgaagatcacgaaaag

SEQ ID NO: 991654 - DNA, 25 bp, Homo sapien
gccgaagatcacgaaaaggaggcca

SEQ ID NO: 991655 - DNA, 25 bp, Homo sapien
gaccgccgaagatcacgaaaaggag

SEQ ID NO: 991656 - DNA, 25 bp, Homo sapien
atgaagaccgccgaagatcacgaaa

SEQ ID NO: 991657 - DNA, 25 bp, Homo sapien
caaacagtgcaagacttttttctaa

SEQ ID NO: 991658 - DNA, 25 bp, Homo sapien
gctaatccgtaaacaatatttacca

SEQ ID NO: 991659 - DNA, 25 bp, Homo sapien
cccaaacagtgcaagacttttttct

SEQ ID NO: 991660 - DNA, 25 bp, Homo sapien
ccaaacagtgcaagacttttttcta

SEQ ID NO: 991661 - DNA, 25 bp, Homo sapien
agattaccttatccctagtaccagg

SEQ ID NO: 991662 - DNA, 25 bp, Homo sapien
cagttctagaggttcatttccggtc

SEQ ID NO: 991663 - DNA, 25 bp, Homo sapien
caggtcagtttagcaatggaacaca

SEQ ID NO: 991664 - DNA, 25 bp, Homo sapien
gccttctcagggcaagtcagttcta

SEQ ID NO: 991665 - DNA, 25 bp, Homo sapien
ccagaacccaagtctgagtcagcag

SEQ ID NO: 991666 - DNA, 25 bp, Homo sapien
gtcagcagagtcttggtaactttcc

SEQ ID NO: 991667 - DNA, 25 bp, Homo sapien
cttgaatatctgacgagggcctgcc

SEQ ID NO: 991668 - DNA, 25 bp, Homo sapien
tgaatatctgacgagggcctgcctt

SEQ ID NO: 991669 - DNA, 25 bp, Homo sapien
agagggaacacggccgcttgtcagc

SEQ ID NO: 991670 - DNA, 25 bp, Homo sapien
gtcactaaagcgctaccctgccttt

SEQ ID NO: 991671 - DNA, 25 bp, Homo sapien
tttcacactctagccccagagctgg

SEQ ID NO: 991672 - DNA, 25 bp, Homo sapien
ctggtgtctgagatcaacagccccc

SEQ ID NO: 991673 - DNA, 25 bp, Homo sapien
catggtgcccggtgacaacactggg

SEQ ID NO: 991674 - DNA, 25 bp, Homo sapien
gggaggaccctctgatgttacaaaa

SEQ ID NO: 991675 - DNA, 25 bp, Homo sapien
tcgagtctggaagccctagagaact

SEQ ID NO: 991676 - DNA, 25 bp, Homo sapien
aacactggggtcgagtctggaagcc

SEQ ID NO: 991677 - DNA, 25 bp, Homo sapien
agaggggaacaacaagagagcacag

SEQ ID NO: 991678 - DNA, 25 bp, Homo sapien
gggaacaacaagagagcacagctgc

SEQ ID NO: 991679 - DNA, 25 bp, Homo sapien
tgcctgtcccggaggccttcatgaa

SEQ ID NO: 991680 - DNA, 25 bp, Homo sapien
ccttcatgaaaccaaaggacttcac

SEQ ID NO: 991681 - DNA, 25 bp, Homo sapien
gaaacatccacctccaaacccagaa

SEQ ID NO: 991682 - DNA, 25 bp, Homo sapien
cacagtgaactgaaacatccacctc

SEQ ID NO: 991683 - DNA, 25 bp, Homo sapien
aaactgctggccactttcaaaagac

SEQ ID NO: 991684 - DNA, 25 bp, Homo sapien
cacctccaaacccagaaaactgctg

SEQ ID NO: 991685 - DNA, 25 bp, Homo sapien
ggccacgctgcagcctaaggcacct

SEQ ID NO: 991686 - DNA, 25 bp, Homo sapien
acgctgcagcctaaggcacctctgt

SEQ ID NO: 991687 - DNA, 25 bp, Homo sapien
ccacgctgcagcctaaggcacctct

SEQ ID NO: 991688 - DNA, 25 bp, Homo sapien
ggcacctctgtccacgttggaggag

SEQ ID NO: 991689 - DNA, 25 bp, Homo sapien
cttggactggcgtttgactccccac

SEQ ID NO: 991690 - DNA, 25 bp, Homo sapien
ttggactggcgtttgactccccaca

SEQ ID NO: 991691 - DNA, 25 bp, Homo sapien
agcacaccgaagaatgaaaatgtcc

SEQ ID NO: 991692 - DNA, 25 bp, Homo sapien
aaaatgtccctctgccgagagcaag

SEQ ID NO: 991693 - DNA, 25 bp, Homo sapien
gggcccaaacagcacaccgaagaat

SEQ ID NO: 991694 - DNA, 25 bp, Homo sapien
agctacatcactggcctccacgctg

SEQ ID NO: 991695 - DNA, 25 bp, Homo sapien
gggccctgggctgatctggcggtgg

SEQ ID NO: 991696 - DNA, 25 bp, Homo sapien
acaccctcaggccaactcgagaccc

SEQ ID NO: 991697 - DNA, 25 bp, Homo sapien
accctcaggccaactcgagacccgt

SEQ ID NO: 991698 - DNA, 25 bp, Homo sapien
cctcaggccaactcgagacccgtgg

SEQ ID NO: 991699 - DNA, 25 bp, Homo sapien
tcaggccaactcgagacccgtggtc

SEQ ID NO: 991700 - DNA, 25 bp, Homo sapien
ggctgcacccaagaagcttctacct

SEQ ID NO: 991701 - DNA, 25 bp, Homo sapien
ggctcggcctgcctaaaataggctg

SEQ ID NO: 991702 - DNA, 25 bp, Homo sapien
gcctaaaataggctgcacccaagaa

SEQ ID NO: 991703 - DNA, 25 bp, Homo sapien
aagaagcttctacctccactactgc

SEQ ID NO: 991704 - DNA, 25 bp, Homo sapien
gctgcagagctcattgtgcacttcc

SEQ ID NO: 991705 - DNA, 25 bp, Homo sapien
aaagctgcagagctcattgtgcact

SEQ ID NO: 991706 - DNA, 25 bp, Homo sapien
aagctgcagagctcattgtgcactt

SEQ ID NO: 991707 - DNA, 25 bp, Homo sapien
agctgcagagctcattgtgcacttc

SEQ ID NO: 991708 - DNA, 25 bp, Homo sapien
tgaaaggcttggacagacttaaccc

SEQ ID NO: 991709 - DNA, 25 bp, Homo sapien
ggacaaatgggtcagactcagtcct

SEQ ID NO: 991710 - DNA, 25 bp, Homo sapien
tccctgccctggacaaatgggtcag

SEQ ID NO: 991711 - DNA, 25 bp, Homo sapien
accctcgtctcatcacactgaaagg

SEQ ID NO: 991712 - DNA, 25 bp, Homo sapien
tgaggttccggggcttaagacttca

SEQ ID NO: 991713 - DNA, 25 bp, Homo sapien
aaaaaaaagatcagtcctattggat

SEQ ID NO: 991714 - DNA, 25 bp, Homo sapien
ccttatctctaaccacagtcacatt

SEQ ID NO: 991715 - DNA, 25 bp, Homo sapien
gaccttatctctaaccacagtcaca

SEQ ID NO: 991716 - DNA, 25 bp, Homo sapien
ccctggggcagctacaccccatggc

SEQ ID NO: 991717 - DNA, 25 bp, Homo sapien
ctggggcagctacaccccatggcac

SEQ ID NO: 991718 - DNA, 25 bp, Homo sapien
tggggcagctacaccccatggcaca

SEQ ID NO: 991719 - DNA, 25 bp, Homo sapien
cctggggcagctacaccccatggca

SEQ ID NO: 991720 - DNA, 25 bp, Homo sapien
cattcacgggcactgatttaggatc

SEQ ID NO: 991721 - DNA, 25 bp, Homo sapien
gacccaacaggacttcagttatagc

SEQ ID NO: 991722 - DNA, 25 bp, Homo sapien
caggtgggttcaacactggaccctt

SEQ ID NO: 991723 - DNA, 25 bp, Homo sapien
tattatgcctagcttgaatgcagtg

SEQ ID NO: 991724 - DNA, 25 bp, Homo sapien
cacatatgtagatgagttaatagta

SEQ ID NO: 991725 - DNA, 25 bp, Homo sapien
agacattagtggaacaagaggcaaa

SEQ ID NO: 991726 - DNA, 25 bp, Homo sapien
aaaaagacattagtggaacaagagg

SEQ ID NO: 991727 - DNA, 25 bp, Homo sapien
gaggcaaaattgtaacacatatgta

SEQ ID NO: 991728 - DNA, 25 bp, Homo sapien
tagtcggtctcatgattgtggctgg

SEQ ID NO: 991729 - DNA, 25 bp, Homo sapien
tctcattcagtagtagggtaacggg

SEQ ID NO: 991730 - DNA, 25 bp, Homo sapien
ctcttctagctgatcccttgtggat

SEQ ID NO: 991731 - DNA, 25 bp, Homo sapien
tagagaatacaaagctgcatatcat

SEQ ID NO: 991732 - DNA, 25 bp, Homo sapien
gcaaggctcctcatgccctcattat

SEQ ID NO: 991733 - DNA, 25 bp, Homo sapien
attatgcaatttgtgggtaacagcc

SEQ ID NO: 991734 - DNA, 25 bp, Homo sapien
agggaagcaaggctcctcatgccct

SEQ ID NO: 991735 - DNA, 25 bp, Homo sapien
tcctcatgccctcattatgcaattt

SEQ ID NO: 991736 - DNA, 25 bp, Homo sapien
ccacacgagagcacgggctggcttg

SEQ ID NO: 991737 - DNA, 25 bp, Homo sapien
ccacccagcggttggaaaatcacct

SEQ ID NO: 991738 - DNA, 25 bp, Homo sapien
aggctctggtcaccacccagcggtt

SEQ ID NO: 991739 - DNA, 25 bp, Homo sapien
tgtgagcaggtgaacgtcacagacc

SEQ ID NO: 991740 - DNA, 25 bp, Homo sapien
cttacacattttatactgctctctc

SEQ ID NO: 991741 - DNA, 25 bp, Homo sapien
gtacttacacattttatactgctct

SEQ ID NO: 991742 - DNA, 25 bp, Homo sapien
ttacacattttatactgctctctca

SEQ ID NO: 991743 - DNA, 25 bp, Homo sapien
tacttacacattttatactgctctc

SEQ ID NO: 991744 - DNA, 25 bp, Homo sapien
ttaactttgatgacttttgaaaaga

SEQ ID NO: 991745 - DNA, 25 bp, Homo sapien
taactttgatgacttttgaaaagaa

SEQ ID NO: 991746 - DNA, 25 bp, Homo sapien
ctttgatgacttttgaaaagaaatg

SEQ ID NO: 991747 - DNA, 25 bp, Homo sapien
tgatgacttttgaaaagaaatgcat

SEQ ID NO: 991748 - DNA, 25 bp, Homo sapien
ggcccttgtcaatctggataccaga

SEQ ID NO: 991749 - DNA, 25 bp, Homo sapien
tagagttgaagtctcacacagtcac

SEQ ID NO: 991750 - DNA, 25 bp, Homo sapien
tcatatcactgtaggtggacccagg

SEQ ID NO: 991751 - DNA, 25 bp, Homo sapien
gacccaggaacgtcaagataagttg

SEQ ID NO: 991752 - DNA, 25 bp, Homo sapien
gaagggaaaacaggaacgctctgaa

SEQ ID NO: 991753 - DNA, 25 bp, Homo sapien
ttgttactaaagctgcattctcccc

SEQ ID NO: 991754 - DNA, 25 bp, Homo sapien
gaagcagtacattcctgcacaccca

SEQ ID NO: 991755 - DNA, 25 bp, Homo sapien
agagccatggcttcctagacaagtc

SEQ ID NO: 991756 - DNA, 25 bp, Homo sapien
tgtcctggcacgctgctggtaagtg

SEQ ID NO: 991757 - DNA, 25 bp, Homo sapien
agggctgcaaggctaggagctccct

SEQ ID NO: 991758 - DNA, 25 bp, Homo sapien
tctgcagtgtcctggcacgctgctg

SEQ ID NO: 991759 - DNA, 25 bp, Homo sapien
ctgctggtaagtgacagacacaggc

SEQ ID NO: 991760 - DNA, 25 bp, Homo sapien
acttcacagctttcacttgagtgga

SEQ ID NO: 991761 - DNA, 25 bp, Homo sapien
agggaggaacaaggacacttcacag

SEQ ID NO: 991762 - DNA, 25 bp, Homo sapien
tgtgaaagtggcaaaagaggtaaaa

SEQ ID NO: 991763 - DNA, 25 bp, Homo sapien
ttcacttgagtggatccaagagaat

SEQ ID NO: 991764 - DNA, 25 bp, Homo sapien
gcagaagtaaagtgggacacccagc

SEQ ID NO: 991765 - DNA, 25 bp, Homo sapien
cagaagtaaagtgggacacccagcg

SEQ ID NO: 991766 - DNA, 25 bp, Homo sapien
gaagtaaagtgggacacccagcgag

SEQ ID NO: 991767 - DNA, 25 bp, Homo sapien
ctgcagaagtaaagtgggacaccca

SEQ ID NO: 991768 - DNA, 25 bp, Homo sapien
gagagtatacgttccattcacaaac

SEQ ID NO: 991769 - DNA, 25 bp, Homo sapien
tctcactgtcttgtgtcacaagccc

SEQ ID NO: 991770 - DNA, 25 bp, Homo sapien
gaagatgaggagagtatacgttcca

SEQ ID NO: 991771 - DNA, 25 bp, Homo sapien
caaaggtcatgcctgtatgcttcag

SEQ ID NO: 991772 - DNA, 25 bp, Homo sapien
ggattttgaggctgaactgtctcag

SEQ ID NO: 991773 - DNA, 25 bp, Homo sapien
tctcagtggacgatctccaggtcct

SEQ ID NO: 991774 - DNA, 25 bp, Homo sapien
tctgagactttagcacaggctgagt

SEQ ID NO: 991775 - DNA, 25 bp, Homo sapien
aggacccacgtcttctgagacttta

SEQ ID NO: 991776 - DNA, 25 bp, Homo sapien
caacggtataaaaatctccttctct

SEQ ID NO: 991777 - DNA, 25 bp, Homo sapien
caagaactgcttctttgggaaggaa

SEQ ID NO: 991778 - DNA, 25 bp, Homo sapien
tggctgtgccaagaccagatgcgtg

SEQ ID NO: 991779 - DNA, 25 bp, Homo sapien
cacgaccctgaagcattaaagaagc

SEQ ID NO: 991780 - DNA, 25 bp, Homo sapien
ttatccagaggctgtgccaatggcc

SEQ ID NO: 991781 - DNA, 25 bp, Homo sapien
caatggcctctcacggattgcagag

SEQ ID NO: 991782 - DNA, 25 bp, Homo sapien
cttcatggaggtgggcaatgaaggg

SEQ ID NO: 991783 - DNA, 25 bp, Homo sapien
gcttcatggaggtgggcaatgaagg

SEQ ID NO: 991784 - DNA, 25 bp, Homo sapien
agcttcatggaggtgggcaatgaag

SEQ ID NO: 991785 - DNA, 25 bp, Homo sapien
acgtagtccgagaacctgggcagcg

SEQ ID NO: 991786 - DNA, 25 bp, Homo sapien
ctgggcagcgccgacagtctgcggc

SEQ ID NO: 991787 - DNA, 25 bp, Homo sapien
ccattaattgcaggcgtgcagcgtc

SEQ ID NO: 991788 - DNA, 25 bp, Homo sapien
cccacgtagtccgagaacctgggca

SEQ ID NO: 991789 - DNA, 25 bp, Homo sapien
aaaggttcctcagatgagatggtgc

SEQ ID NO: 991790 - DNA, 25 bp, Homo sapien
aaggagagacggtagagaaggaagg

SEQ ID NO: 991791 - DNA, 25 bp, Homo sapien
gctggttgggaaaggttcctcagat

SEQ ID NO: 991792 - DNA, 25 bp, Homo sapien
cagatgagatggtgcttggccaagc

SEQ ID NO: 991793 - DNA, 25 bp, Homo sapien
tgactgtggcactctggttcctcgg

SEQ ID NO: 991794 - DNA, 25 bp, Homo sapien
gaatgctgactgtggcactctggtt

SEQ ID NO: 991795 - DNA, 25 bp, Homo sapien
aaaggacagaataagcaggagtagg

SEQ ID NO: 991796 - DNA, 25 bp, Homo sapien
tgctgactgtggcactctggttcct

SEQ ID NO: 991797 - DNA, 25 bp, Homo sapien
cagagggattctttgtccaaggcag

SEQ ID NO: 991798 - DNA, 25 bp, Homo sapien
caggcatgtagtgtgatctttccca

SEQ ID NO: 991799 - DNA, 25 bp, Homo sapien
aactagtatggaattcacagccctg

SEQ ID NO: 991800 - DNA, 25 bp, Homo sapien
caaatctgggatggagtgcttcggc

SEQ ID NO: 991801 - DNA, 25 bp, Homo sapien
ttgttctttctgtctcgcgggcacc

SEQ ID NO: 991802 - DNA, 25 bp, Homo sapien
caaattagggcagactcgaagcccc

SEQ ID NO: 991803 - DNA, 25 bp, Homo sapien
cccagcggtcctgatgtggctgaca

SEQ ID NO: 991804 - DNA, 25 bp, Homo sapien
tgagagacgcctgacaatccaagat

SEQ ID NO: 991805 - DNA, 25 bp, Homo sapien
tcactccctcaatatgtgagcctgt

SEQ ID NO: 991806 - DNA, 25 bp, Homo sapien
ccctcactattaatggcgagataaa

SEQ ID NO: 991807 - DNA, 25 bp, Homo sapien
ctattaatggcgagataaacacaat

SEQ ID NO: 991808 - DNA, 25 bp, Homo sapien
aatggcgagataaacacaattgtac

SEQ ID NO: 991809 - DNA, 25 bp, Homo sapien
gagataaacacaattgtacaacttg

SEQ ID NO: 991810 - DNA, 25 bp, Homo sapien
catgagaatgaaaaagtagaaaacc

SEQ ID NO: 991811 - DNA, 25 bp, Homo sapien
tgaaaaagtagaaaacccacatcca

SEQ ID NO: 991812 - DNA, 25 bp, Homo sapien
tgagaatgaaaaagtagaaaaccca

SEQ ID NO: 991813 - DNA, 25 bp, Homo sapien
tagcttgtcccggatcagagacact

SEQ ID NO: 991814 - DNA, 25 bp, Homo sapien
cctagcttgtcccggatcagagaca

SEQ ID NO: 991815 - DNA, 25 bp, Homo sapien
ttgtcccggatcagagacactaaat

SEQ ID NO: 991816 - DNA, 25 bp, Homo sapien
gcttgtcccggatcagagacactaa

SEQ ID NO: 991817 - DNA, 25 bp, Homo sapien
cctgctgtgattaatggcccattta

SEQ ID NO: 991818 - DNA, 25 bp, Homo sapien
gaagatgaacatccgcaagccactc

SEQ ID NO: 991819 - DNA, 25 bp, Homo sapien
agtactacctttgcatcctacagca

SEQ ID NO: 991820 - DNA, 25 bp, Homo sapien
tgctcacagtgttgcagtactacct

SEQ ID NO: 991821 - DNA, 25 bp, Homo sapien
tgtacaatccagtggtatcagttac

SEQ ID NO: 991822 - DNA, 25 bp, Homo sapien
aatccagtggtatcagttacattca

SEQ ID NO: 991823 - DNA, 25 bp, Homo sapien
aaatagaaactctgttcctattaag

SEQ ID NO: 991824 - DNA, 25 bp, Homo sapien
aatagaaactctgttcctattaaga

SEQ ID NO: 991825 - DNA, 25 bp, Homo sapien
tctggttccatgaactggcctatgc

SEQ ID NO: 991826 - DNA, 25 bp, Homo sapien
gttccatgaactggcctatgctaga

SEQ ID NO: 991827 - DNA, 25 bp, Homo sapien
ctttctggttccatgaactggccta

SEQ ID NO: 991828 - DNA, 25 bp, Homo sapien
ttctttctggttccatgaactggcc

SEQ ID NO: 991829 - DNA, 25 bp, Homo sapien
gcatttttcgattcccgctccaggg

SEQ ID NO: 991830 - DNA, 25 bp, Homo sapien
taccccataggtgaagacgtctgaa

SEQ ID NO: 991831 - DNA, 25 bp, Homo sapien
gtctaggacccaagttcacagtgag

SEQ ID NO: 991832 - DNA, 25 bp, Homo sapien
caacaaaatgctgcgctcaggaagc

SEQ ID NO: 991833 - DNA, 25 bp, Homo sapien
tgcagagtccatggccatgtctggc

SEQ ID NO: 991834 - DNA, 25 bp, Homo sapien
caggtggggataacaagaagcaccc

SEQ ID NO: 991835 - DNA, 25 bp, Homo sapien
gaacgtgtatgcagtagagtgtctg

SEQ ID NO: 991836 - DNA, 25 bp, Homo sapien
cccaccacggaataccaagttcagc

SEQ ID NO: 991837 - DNA, 25 bp, Homo sapien
taatcatattagaaggtccaccaat

SEQ ID NO: 991838 - DNA, 25 bp, Homo sapien
gacccaagtccgcagaaatagcaga

SEQ ID NO: 991839 - DNA, 25 bp, Homo sapien
tccccgaaccatccacaattcctgt

SEQ ID NO: 991840 - DNA, 25 bp, Homo sapien
tcctggcgacccaagtccgcagaaa

SEQ ID NO: 991841 - DNA, 25 bp, Homo sapien
tagtagttaacatccacgttcctga

SEQ ID NO: 991842 - DNA, 25 bp, Homo sapien
gaggaaaaagccactgcaatggagc

SEQ ID NO: 991843 - DNA, 25 bp, Homo sapien
gagcaggtgactctatctgccactg

SEQ ID NO: 991844 - DNA, 25 bp, Homo sapien
ggtcccactgctggaatcagttcca

SEQ ID NO: 991845 - DNA, 25 bp, Homo sapien
atcagaagggcattgatggacttat

SEQ ID NO: 991846 - DNA, 25 bp, Homo sapien
catcagaagggcattgatggactta

SEQ ID NO: 991847 - DNA, 25 bp, Homo sapien
tcagaagggcattgatggacttatc

SEQ ID NO: 991848 - DNA, 25 bp, Homo sapien
cagaagggcattgatggacttatca

SEQ ID NO: 991849 - DNA, 25 bp, Homo sapien
gactatacccgatgagggacccaac

SEQ ID NO: 991850 - DNA, 25 bp, Homo sapien
tcagggcaagaaccggcgctctctt

SEQ ID NO: 991851 - DNA, 25 bp, Homo sapien
ggcgctctcttctgtagtacatcag

SEQ ID NO: 991852 - DNA, 25 bp, Homo sapien
ttctgtagtacatcagagatgaagc

SEQ ID NO: 991853 - DNA, 25 bp, Homo sapien
cagtttagggaaaatggctgtagaa

SEQ ID NO: 991854 - DNA, 25 bp, Homo sapien
gagtttggctgtttactagtaggac

SEQ ID NO: 991855 - DNA, 25 bp, Homo sapien
tggaaaagatgtatcaccggcatac

SEQ ID NO: 991856 - DNA, 25 bp, Homo sapien
gatttcacaacccagtaaaagatca

SEQ ID NO: 991857 - DNA, 25 bp, Homo sapien
ccagccgaagttgttactcagataa

SEQ ID NO: 991858 - DNA, 25 bp, Homo sapien
tcaagcaggcgtaggccagtgagta

SEQ ID NO: 991859 - DNA, 25 bp, Homo sapien
tatgatccctccaacgtcgtaccaa

SEQ ID NO: 991860 - DNA, 25 bp, Homo sapien
aaatggacagcttgtcggcttccgc

SEQ ID NO: 991861 - DNA, 25 bp, Homo sapien
aagtccaggaagcatcacggccttt

SEQ ID NO: 991862 - DNA, 25 bp, Homo sapien
ttaaccataggcaaagaagtccagg

SEQ ID NO: 991863 - DNA, 25 bp, Homo sapien
ggacagcaaagggactacactacag

SEQ ID NO: 991864 - DNA, 25 bp, Homo sapien
cacggcctttactgggagcagccaa

SEQ ID NO: 991865 - DNA, 25 bp, Homo sapien
aagaagagagtctctctggcgagtc

SEQ ID NO: 991866 - DNA, 25 bp, Homo sapien
aaagaagagagtctctctggcgagt

SEQ ID NO: 991867 - DNA, 25 bp, Homo sapien
gaagcttatcgccttgacttgggca

SEQ ID NO: 991868 - DNA, 25 bp, Homo sapien
tttcttctgcctcaatacccgagag

SEQ ID NO: 991869 - DNA, 25 bp, Homo sapien
cttgggcaacagaactatcatcttg

SEQ ID NO: 991870 - DNA, 25 bp, Homo sapien
taattcggctcatattcgtcttcat

SEQ ID NO: 991871 - DNA, 25 bp, Homo sapien
acagaagcagcaacgaaggtccaga

SEQ ID NO: 991872 - DNA, 25 bp, Homo sapien
tgtcgacaggactcaaacggcagta

SEQ ID NO: 991873 - DNA, 25 bp, Homo sapien
tgcctaccacgtgtgaagggctctg

SEQ ID NO: 991874 - DNA, 25 bp, Homo sapien
gacagccactgtttatggagtgcct

SEQ ID NO: 991875 - DNA, 25 bp, Homo sapien
aaactgcacagacgccgtcaccaga

SEQ ID NO: 991876 - DNA, 25 bp, Homo sapien
gtccaaagaagataacgatcccacc

SEQ ID NO: 991877 - DNA, 25 bp, Homo sapien
agaagataacgatcccaccagcaaa

SEQ ID NO: 991878 - DNA, 25 bp, Homo sapien
cagacgccgtcaccagaaaggcata

SEQ ID NO: 991879 - DNA, 25 bp, Homo sapien
cttctgctaggggataatcaggaag

SEQ ID NO: 991880 - DNA, 25 bp, Homo sapien
tgctaggggataatcaggaagaaaa

SEQ ID NO: 991881 - DNA, 25 bp, Homo sapien
tgcacgactcaaggagagggcttct

SEQ ID NO: 991882 - DNA, 25 bp, Homo sapien
gagggcttctgctaggggataatca

SEQ ID NO: 991883 - DNA, 25 bp, Homo sapien
tgtttacaagccattcctacatgct

SEQ ID NO: 991884 - DNA, 25 bp, Homo sapien
tccctgctaagttccataagaacag

SEQ ID NO: 991885 - DNA, 25 bp, Homo sapien
tctatattctatagttccaagagca

SEQ ID NO: 991886 - DNA, 25 bp, Homo sapien
ccaagagcatatacagggagttaaa

SEQ ID NO: 991887 - DNA, 25 bp, Homo sapien
caccgaagcacaggcactccagaga

SEQ ID NO: 991888 - DNA, 25 bp, Homo sapien
aaaatgttgcccaccgaagcacagg

SEQ ID NO: 991889 - DNA, 25 bp, Homo sapien
gaagaagctaggcacgctcccaaaa

SEQ ID NO: 991890 - DNA, 25 bp, Homo sapien
gctaggcacgctcccaaaatgttgc

SEQ ID NO: 991891 - DNA, 25 bp, Homo sapien
tctgtgagcgcaccaaagacaaaca

SEQ ID NO: 991892 - DNA, 25 bp, Homo sapien
tcacaatccacaggcagcagtacag

SEQ ID NO: 991893 - DNA, 25 bp, Homo sapien
catttgttgtagaaacgcagccatt

SEQ ID NO: 991894 - DNA, 25 bp, Homo sapien
tgcccataacagcaaccacacaggg

SEQ ID NO: 991895 - DNA, 25 bp, Homo sapien
cctgtaagtcacgtggccagcatca

SEQ ID NO: 991896 - DNA, 25 bp, Homo sapien
tgcttcagagtagagaccacgtgaa

SEQ ID NO: 991897 - DNA, 25 bp, Homo sapien
gacactttcagtggacgccactcta

SEQ ID NO: 991898 - DNA, 25 bp, Homo sapien
cgtgaaggatacactcacacagcca

SEQ ID NO: 991899 - DNA, 25 bp, Homo sapien
tgtgcatgtggagggaacagcaacc

SEQ ID NO: 991900 - DNA, 25 bp, Homo sapien
tgctgtgaggacagaacgagcccag

SEQ ID NO: 991901 - DNA, 25 bp, Homo sapien
cacctttcccggagcagtgccaggt

SEQ ID NO: 991902 - DNA, 25 bp, Homo sapien
cagcaacctccagagggctgctgtg

SEQ ID NO: 991903 - DNA, 25 bp, Homo sapien
gcaaattcaaccgatccccaacgat

SEQ ID NO: 991904 - DNA, 25 bp, Homo sapien
aaagacagaacccatcgcaaattca

SEQ ID NO: 991905 - DNA, 25 bp, Homo sapien
catgccaaaagacagaacccatcgc

SEQ ID NO: 991906 - DNA, 25 bp, Homo sapien
caacgatgccactgatgaataggcc

SEQ ID NO: 991907 - DNA, 25 bp, Homo sapien
gctctaaataataacacagtatgaa

SEQ ID NO: 991908 - DNA, 25 bp, Homo sapien
ctctaaataataacacagtatgaaa

SEQ ID NO: 991909 - DNA, 25 bp, Homo sapien
agctctaaataataacacagtatga

SEQ ID NO: 991910 - DNA, 25 bp, Homo sapien
tccagtgtgccgaggaaaagagtcg

SEQ ID NO: 991911 - DNA, 25 bp, Homo sapien
ggaaaatggtatccagtgtgccgag

SEQ ID NO: 991912 - DNA, 25 bp, Homo sapien
ggaacaaatggttgctgctccagat

SEQ ID NO: 991913 - DNA, 25 bp, Homo sapien
aaagagtcgctttctctgcactggg

SEQ ID NO: 991914 - DNA, 25 bp, Homo sapien
agaaacatctttatttttaatccat

SEQ ID NO: 991915 - DNA, 25 bp, Homo sapien
agtgaataatgtgcccacgttgtaa

SEQ ID NO: 991916 - DNA, 25 bp, Homo sapien
tccagcttacgaactacgaaagaat

SEQ ID NO: 991917 - DNA, 25 bp, Homo sapien
gtcaagtgaataatgtgcccacgtt

SEQ ID NO: 991918 - DNA, 25 bp, Homo sapien
cacacacgtgtgtgaatactcaata

SEQ ID NO: 991919 - DNA, 25 bp, Homo sapien
gaactaatttctaagtggcctctgg

SEQ ID NO: 991920 - DNA, 25 bp, Homo sapien
ggacccatgattaagccctgctggg

SEQ ID NO: 991921 - DNA, 25 bp, Homo sapien
aaccgcagtgttccatccttgtgtg

SEQ ID NO: 991922 - DNA, 25 bp, Homo sapien
aagtgtgattccaaagcaccggaac

SEQ ID NO: 991923 - DNA, 25 bp, Homo sapien
aacacgtttatgtgggaatctgcca

SEQ ID NO: 991924 - DNA, 25 bp, Homo sapien
gaagttctttgcataaggcgagcag

SEQ ID NO: 991925 - DNA, 25 bp, Homo sapien
gatgacaggccaacttatgcatgaa

SEQ ID NO: 991926 - DNA, 25 bp, Homo sapien
tataacagaataagggctatccagg

SEQ ID NO: 991927 - DNA, 25 bp, Homo sapien
caatgtttgtcgatgtcagtgaacc

SEQ ID NO: 991928 - DNA, 25 bp, Homo sapien
ggaataaatgacagccacacgtact

SEQ ID NO: 991929 - DNA, 25 bp, Homo sapien
ttttgtaaaacacccagagctatgc

SEQ ID NO: 991930 - DNA, 25 bp, Homo sapien
taggcagtacaaccagaaatctagt

SEQ ID NO: 991931 - DNA, 25 bp, Homo sapien
tcgtgaagcatggagcaacgaataa

SEQ ID NO: 991932 - DNA, 25 bp, Homo sapien
cagagatactgactttgacattgct

SEQ ID NO: 991933 - DNA, 25 bp, Homo sapien
gctaaatgtttttcgtgaagcatgg

SEQ ID NO: 991934 - DNA, 25 bp, Homo sapien
ccacaggcagctcaactgacgtgtt

SEQ ID NO: 991935 - DNA, 25 bp, Homo sapien
taccacgcccagtgcacctgtcatc

SEQ ID NO: 991936 - DNA, 25 bp, Homo sapien
ttaggctactcaggctacaaaaatt

SEQ ID NO: 991937 - DNA, 25 bp, Homo sapien
catcttagctacttaggctactcag

SEQ ID NO: 991938 - DNA, 25 bp, Homo sapien
gggcactctaccacgcccagtgcac

SEQ ID NO: 991939 - DNA, 25 bp, Homo sapien
ggaacactacaacatgatgatggct

SEQ ID NO: 991940 - DNA, 25 bp, Homo sapien
gtgagcaggaacactacaacatgat

SEQ ID NO: 991941 - DNA, 25 bp, Homo sapien
ctacaacatgatgatggctgaactg

SEQ ID NO: 991942 - DNA, 25 bp, Homo sapien
gcaggaacactacaacatgatgatg

SEQ ID NO: 991943 - DNA, 25 bp, Homo sapien
cacctttgaccttaaggtttggatg

SEQ ID NO: 991944 - DNA, 25 bp, Homo sapien
aatatcataggaggacaatctagcc

SEQ ID NO: 991945 - DNA, 25 bp, Homo sapien
caatctagccatgttcatcaagagt

SEQ ID NO: 991946 - DNA, 25 bp, Homo sapien
cctgaactcccatatgctactgaaa

SEQ ID NO: 991947 - DNA, 25 bp, Homo sapien
agattgtgctcaatgcagctcaggg

SEQ ID NO: 991948 - DNA, 25 bp, Homo sapien
aggcagtgtcccacccaagcactaa

SEQ ID NO: 991949 - DNA, 25 bp, Homo sapien
tcagacaaggcaggccatgttcagg

SEQ ID NO: 991950 - DNA, 25 bp, Homo sapien
gtgtcccacccaagcactaaccaga

SEQ ID NO: 991951 - DNA, 25 bp, Homo sapien
accatacctagcttccaaagtcaga

SEQ ID NO: 991952 - DNA, 25 bp, Homo sapien
atctcccagacccacggccggagga

SEQ ID NO: 991953 - DNA, 25 bp, Homo sapien
tctgatcaagtcagaatctcccaga

SEQ ID NO: 991954 - DNA, 25 bp, Homo sapien
gtccgaacgacaagcccttttctga

SEQ ID NO: 991955 - DNA, 25 bp, Homo sapien
aggcgggcgaggagcacaaaagcct

SEQ ID NO: 991956 - DNA, 25 bp, Homo sapien
ccgagatccgcagtggtcgccgctc

SEQ ID NO: 991957 - DNA, 25 bp, Homo sapien
atccgcagtggtcgccgctctccag

SEQ ID NO: 991958 - DNA, 25 bp, Homo sapien
agatccgcagtggtcgccgctctcc

SEQ ID NO: 991959 - DNA, 25 bp, Homo sapien
gagatccgcagtggtcgccgctctc

SEQ ID NO: 991960 - DNA, 25 bp, Homo sapien
tgttctccaagtgctcagtgggtct

SEQ ID NO: 991961 - DNA, 25 bp, Homo sapien
tctccaagtgctcagtgggtctgag

SEQ ID NO: 991962 - DNA, 25 bp, Homo sapien
atgttctccaagtgctcagtgggtc

SEQ ID NO: 991963 - DNA, 25 bp, Homo sapien
caagtgctcagtgggtctgagtcag

SEQ ID NO: 991964 - DNA, 25 bp, Homo sapien
ccagaagaaagcgaaaacattacct

SEQ ID NO: 991965 - DNA, 25 bp, Homo sapien
agaagaaagcgaaaacattacctgc

SEQ ID NO: 991966 - DNA, 25 bp, Homo sapien
gaagaaagcgaaaacattacctgct

SEQ ID NO: 991967 - DNA, 25 bp, Homo sapien
cgccaaacccgacacctggggccag

SEQ ID NO: 991968 - DNA, 25 bp, Homo sapien
ttgacactagtgggacctccaatgg

SEQ ID NO: 991969 - DNA, 25 bp, Homo sapien
tgacactagtgggacctccaatggc

SEQ ID NO: 991970 - DNA, 25 bp, Homo sapien
gcgttcccttgatattgacggcaaa

SEQ ID NO: 991971 - DNA, 25 bp, Homo sapien
tgagacacagcagaacacgattgga

SEQ ID NO: 991972 - DNA, 25 bp, Homo sapien
tggagtggactttaccgtgcgttcc

SEQ ID NO: 991973 - DNA, 25 bp, Homo sapien
aagacgtgtgtggtgcagcatttca

SEQ ID NO: 991974 - DNA, 25 bp, Homo sapien
ctggattcatgagatagagaaatat

SEQ ID NO: 991975 - DNA, 25 bp, Homo sapien
atcacccaaagctactaccgcagtg

SEQ ID NO: 991976 - DNA, 25 bp, Homo sapien
atcgcctatgacctcacccggcggt

SEQ ID NO: 991977 - DNA, 25 bp, Homo sapien
gttcgagtccatccctcactggatt

SEQ ID NO: 991978 - DNA, 25 bp, Homo sapien
cactggctgagaagtacggcctcct

SEQ ID NO: 991979 - DNA, 25 bp, Homo sapien
gaagaagtcttcgtgctcatggcca

SEQ ID NO: 991980 - DNA, 25 bp, Homo sapien
acctctgggaaaagcggcacgtcct

SEQ ID NO: 991981 - DNA, 25 bp, Homo sapien
tctgccaaggagtcaaagaacatag

SEQ ID NO: 991982 - DNA, 25 bp, Homo sapien
agtgttgtactgccccttctgtaag

SEQ ID NO: 991983 - DNA, 25 bp, Homo sapien
ttctgtaagatatggccagagagca

SEQ ID NO: 991984 - DNA, 25 bp, Homo sapien
aatatcaagccagtgttgtactgcc

SEQ ID NO: 991985 - DNA, 25 bp, Homo sapien
ggtctgtcaccaatatagtggcctc

SEQ ID NO: 991986 - DNA, 25 bp, Homo sapien
tcctaggtctgtcaccaatatagtg

SEQ ID NO: 991987 - DNA, 25 bp, Homo sapien
ttctgccagtttcctaggtctgtca

SEQ ID NO: 991988 - DNA, 25 bp, Homo sapien
gtctctaccaggacaccttctacca

SEQ ID NO: 991989 - DNA, 25 bp, Homo sapien
gctgcggctgtgctggcgccgtgcc

SEQ ID NO: 991990 - DNA, 25 bp, Homo sapien
tgcggctgtgctggcgccgtgccca

SEQ ID NO: 991991 - DNA, 25 bp, Homo sapien
ctgtgctggcgccgtgcccagctca

SEQ ID NO: 991992 - DNA, 25 bp, Homo sapien
gtggctgcggctgtgctggcgccgt

SEQ ID NO: 991993 - DNA, 25 bp, Homo sapien
cgagccccttccacggagttgcttg

SEQ ID NO: 991994 - DNA, 25 bp, Homo sapien
tgaaatctccctgtatggtcccggg

SEQ ID NO: 991995 - DNA, 25 bp, Homo sapien
tcctgctgatgtgggcgctgaaatc

SEQ ID NO: 991996 - DNA, 25 bp, Homo sapien
tgcttgcctggaagaagttcctgct

SEQ ID NO: 991997 - DNA, 25 bp, Homo sapien
gggccctcgcggtgcccggcaagga

SEQ ID NO: 991998 - DNA, 25 bp, Homo sapien
gcggtgcccggcaaggacgcgctgt

SEQ ID NO: 991999 - DNA, 25 bp, Homo sapien
ggcaaggacgcgctgtgcgcctgcg

SEQ ID NO: 992000 - DNA, 25 bp, Homo sapien
aaggacgcgctgtgcgcctgcgtcc

SEQ ID NO: 992001 - DNA, 25 bp, Homo sapien
ttcaccacgatgagggtccgctcca

SEQ ID NO: 992002 - DNA, 25 bp, Homo sapien
cttcaccacgatgagggtccgctcc

SEQ ID NO: 992003 - DNA, 25 bp, Homo sapien
tcaccacgatgagggtccgctccag

SEQ ID NO: 992004 - DNA, 25 bp, Homo sapien
caccacgatgagggtccgctccagg

SEQ ID NO: 992005 - DNA, 25 bp, Homo sapien
tggggcccacaggccgcagcgaaac

SEQ ID NO: 992006 - DNA, 25 bp, Homo sapien
acaggccgcagcgaaacccgcagcg

SEQ ID NO: 992007 - DNA, 25 bp, Homo sapien
gcccacaggccgcagcgaaacccgc

SEQ ID NO: 992008 - DNA, 25 bp, Homo sapien
ggccgcagcgaaacccgcagcgcaa

SEQ ID NO: 992009 - DNA, 25 bp, Homo sapien
tccacgcttgctgctgtatcaggcc

SEQ ID NO: 992010 - DNA, 25 bp, Homo sapien
gctgctgtatcaggcctgaaggtca

SEQ ID NO: 992011 - DNA, 25 bp, Homo sapien
cgcttgctgctgtatcaggcctgaa

SEQ ID NO: 992012 - DNA, 25 bp, Homo sapien
gggtgatgctccacgcttgctgctg

SEQ ID NO: 992013 - DNA, 25 bp, Homo sapien
cattgagacgagtttctgaggattc

SEQ ID NO: 992014 - DNA, 25 bp, Homo sapien
agcaaggcaagcacagatcagcgcc

SEQ ID NO: 992015 - DNA, 25 bp, Homo sapien
ggaaggatgcagcaaggcaagcaca

SEQ ID NO: 992016 - DNA, 25 bp, Homo sapien
cccctgcaggtggttagcaaaactc

SEQ ID NO: 992017 - DNA, 25 bp, Homo sapien
agagacgatgacaaggagggcacac

SEQ ID NO: 992018 - DNA, 25 bp, Homo sapien
tccatgaaacagagacgatgacaag

SEQ ID NO: 992019 - DNA, 25 bp, Homo sapien
agggcacacggcacatgacgtgagt

SEQ ID NO: 992020 - DNA, 25 bp, Homo sapien
cgtgagttagccatgcagcaccaac

SEQ ID NO: 992021 - DNA, 25 bp, Homo sapien
gaagggaccaagtgggctagtttga

SEQ ID NO: 992022 - DNA, 25 bp, Homo sapien
accaagtgggctagtttgatgagca

SEQ ID NO: 992023 - DNA, 25 bp, Homo sapien
aagtgggctagtttgatgagcactt

SEQ ID NO: 992024 - DNA, 25 bp, Homo sapien
agtggaagggaccaagtgggctagt

SEQ ID NO: 992025 - DNA, 25 bp, Homo sapien
ttccagaattgctcaaggctctctc

SEQ ID NO: 992026 - DNA, 25 bp, Homo sapien
ctagctccagcactcccaacccatt

SEQ ID NO: 992027 - DNA, 25 bp, Homo sapien
cctagctccagcactcccaacccat

SEQ ID NO: 992028 - DNA, 25 bp, Homo sapien
ggagcatccccgagttattttcagg

SEQ ID NO: 992029 - DNA, 25 bp, Homo sapien
ttaagatctatctgccacacaaggc

SEQ ID NO: 992030 - DNA, 25 bp, Homo sapien
tcacaccatgtcagcccttgggagc

SEQ ID NO: 992031 - DNA, 25 bp, Homo sapien
tcaaagcagtagatggacaaaccag

SEQ ID NO: 992032 - DNA, 25 bp, Homo sapien
ctgggtaaaaattcttaggacagca

SEQ ID NO: 992033 - DNA, 25 bp, Homo sapien
attcttaggacagcacctggagttg

SEQ ID NO: 992034 - DNA, 25 bp, Homo sapien
aggtcagcagaccagttcacacgcc

SEQ ID NO: 992035 - DNA, 25 bp, Homo sapien
gggaaaacaacacactcctcaggga

SEQ ID NO: 992036 - DNA, 25 bp, Homo sapien
gttagttcgtcgtccccacctgcag

SEQ ID NO: 992037 - DNA, 25 bp, Homo sapien
cttcagagtctgttagttcgtcgtc

SEQ ID NO: 992038 - DNA, 25 bp, Homo sapien
catcttcagagtctgttagttcgtc

SEQ ID NO: 992039 - DNA, 25 bp, Homo sapien
aacctcttcttcatcgttgtcaaag

SEQ ID NO: 992040 - DNA, 25 bp, Homo sapien
gcactgtcgagcagtatcttctatc

SEQ ID NO: 992041 - DNA, 25 bp, Homo sapien
atagggatggcactgtcgagcagta

SEQ ID NO: 992042 - DNA, 25 bp, Homo sapien
aaaaacaaggccatgatagggatgg

SEQ ID NO: 992043 - DNA, 25 bp, Homo sapien
aaacaaggccatgatagggatggca

SEQ ID NO: 992044 - DNA, 25 bp, Homo sapien
tcctctctacggccatcagggtacg

SEQ ID NO: 992045 - DNA, 25 bp, Homo sapien
ctgtctctgtggctcctctctacgg

SEQ ID NO: 992046 - DNA, 25 bp, Homo sapien
gggtacgcatgcttgtaaaaacagt

SEQ ID NO: 992047 - DNA, 25 bp, Homo sapien
ccggtatctgcttgatgttcccact

SEQ ID NO: 992048 - DNA, 25 bp, Homo sapien
gaataaggtagaaccccactcatgg

SEQ ID NO: 992049 - DNA, 25 bp, Homo sapien
gcttacagccctccccaagatgtgt

SEQ ID NO: 992050 - DNA, 25 bp, Homo sapien
ccccaaggactgtgttatagcaaga

SEQ ID NO: 992051 - DNA, 25 bp, Homo sapien
gctcttcgcttgagaaaaggctgca

SEQ ID NO: 992052 - DNA, 25 bp, Homo sapien
cctccttgtatttcagaatgagttt

SEQ ID NO: 992053 - DNA, 25 bp, Homo sapien
acccagtactcacttggaatgacaa

SEQ ID NO: 992054 - DNA, 25 bp, Homo sapien
ttctcctccacccagtactcacttg

SEQ ID NO: 992055 - DNA, 25 bp, Homo sapien
tgtgatccggcattctgggcaggac

SEQ ID NO: 992056 - DNA, 25 bp, Homo sapien
aaagaagacatttcacacagactcc

SEQ ID NO: 992057 - DNA, 25 bp, Homo sapien
aacaaaagaagacatttcacacaga

SEQ ID NO: 992058 - DNA, 25 bp, Homo sapien
caaaagaagacatttcacacagact

SEQ ID NO: 992059 - DNA, 25 bp, Homo sapien
caaaaacaaaagaagacatttcaca

SEQ ID NO: 992060 - DNA, 25 bp, Homo sapien
cattcagagctagatcagtttgttc

SEQ ID NO: 992061 - DNA, 25 bp, Homo sapien
catctggttgaaagttggcacaagt

SEQ ID NO: 992062 - DNA, 25 bp, Homo sapien
tgttcactgagcctaaactggctaa

SEQ ID NO: 992063 - DNA, 25 bp, Homo sapien
catttaaatgcggtccatctggttg

SEQ ID NO: 992064 - DNA, 25 bp, Homo sapien
aggatcccgaagcggcgctcactgg

SEQ ID NO: 992065 - DNA, 25 bp, Homo sapien
gagaggatcccgaagcggcgctcac

SEQ ID NO: 992066 - DNA, 25 bp, Homo sapien
tgcgaatgcacttgagacagtaggt

SEQ ID NO: 992067 - DNA, 25 bp, Homo sapien
gttggagaggatcccgaagcggcgc

SEQ ID NO: 992068 - DNA, 25 bp, Homo sapien
ggcaaatgagagctccatgtccttc

SEQ ID NO: 992069 - DNA, 25 bp, Homo sapien
accatgtccttgctgcgctgcacgg

SEQ ID NO: 992070 - DNA, 25 bp, Homo sapien
gtccttgctgcgctgcacggcaaat

SEQ ID NO: 992071 - DNA, 25 bp, Homo sapien
cacggcaaatgagagctccatgtcc

SEQ ID NO: 992072 - DNA, 25 bp, Homo sapien
taaagcagagttcctatgtaaccca

SEQ ID NO: 992073 - DNA, 25 bp, Homo sapien
caaaggaccacattacaggattcca

SEQ ID NO: 992074 - DNA, 25 bp, Homo sapien
aactaagaacggctacacgcaacca

SEQ ID NO: 992075 - DNA, 25 bp, Homo sapien
cactcctaggtaacggaaaacatat

SEQ ID NO: 992076 - DNA, 25 bp, Homo sapien
catgtcacaagaatctccgtggaga

SEQ ID NO: 992077 - DNA, 25 bp, Homo sapien
gatacacacagttctccccgtatcg

SEQ ID NO: 992078 - DNA, 25 bp, Homo sapien
cagcccacacatgtcacaagaatct

SEQ ID NO: 992079 - DNA, 25 bp, Homo sapien
atacacacagttctccccgtatcgg

SEQ ID NO: 992080 - DNA, 25 bp, Homo sapien
gtctccacggcggtttgctctttct

SEQ ID NO: 992081 - DNA, 25 bp, Homo sapien
tctttgtctccacggcggtttgctc

SEQ ID NO: 992082 - DNA, 25 bp, Homo sapien
tgcttctttgtctccacggcggttt

SEQ ID NO: 992083 - DNA, 25 bp, Homo sapien
tctccacggcggtttgctctttctc

SEQ ID NO: 992084 - DNA, 25 bp, Homo sapien
aaatttccttcactctatctgtaaa

SEQ ID NO: 992085 - DNA, 25 bp, Homo sapien
tttccttcactctatctgtaaatct

SEQ ID NO: 992086 - DNA, 25 bp, Homo sapien
actgctatccagccctctaactctt

SEQ ID NO: 992087 - DNA, 25 bp, Homo sapien
aatttccttcactctatctgtaaat

SEQ ID NO: 992088 - DNA, 25 bp, Homo sapien
ttcaacaagtggtccaactatcgat

SEQ ID NO: 992089 - DNA, 25 bp, Homo sapien
acaagtggtccaactatcgatgaga

SEQ ID NO: 992090 - DNA, 25 bp, Homo sapien
tggtccaactatcgatgagagactt

SEQ ID NO: 992091 - DNA, 25 bp, Homo sapien
tacggccacagtagggttgcccagg

SEQ ID NO: 992092 - DNA, 25 bp, Homo sapien
tataccatgtgtgatgccaagactg

SEQ ID NO: 992093 - DNA, 25 bp, Homo sapien
cttttgagtaggaaggcaatagact

SEQ ID NO: 992094 - DNA, 25 bp, Homo sapien
tatttgtgagtgcagagagaagcct

SEQ ID NO: 992095 - DNA, 25 bp, Homo sapien
ggtccagagaccatacttttgagta

SEQ ID NO: 992096 - DNA, 25 bp, Homo sapien
tctgtgttataggtgcctatgttta

SEQ ID NO: 992097 - DNA, 25 bp, Homo sapien
aaggctctactccagcttatggcaa

SEQ ID NO: 992098 - DNA, 25 bp, Homo sapien
tcggcacaccgagttttattcagat

SEQ ID NO: 992099 - DNA, 25 bp, Homo sapien
ggtgcctatgtttatacgcaaaaat

SEQ ID NO: 992100 - DNA, 25 bp, Homo sapien
taggtctaatgggactctaaagctg

SEQ ID NO: 992101 - DNA, 25 bp, Homo sapien
ggtaaactacctcgccttgcagcaa

SEQ ID NO: 992102 - DNA, 25 bp, Homo sapien
ccaataaagactatgcgcggtggct

SEQ ID NO: 992103 - DNA, 25 bp, Homo sapien
caaaagtaagctgagtatcctgcta

SEQ ID NO: 992104 - DNA, 25 bp, Homo sapien
actgccatctcataagtgtctctga

SEQ ID NO: 992105 - DNA, 25 bp, Homo sapien
tccggaaccccagaaactgagataa

SEQ ID NO: 992106 - DNA, 25 bp, Homo sapien
taaggcactcacagaatccggaacc

SEQ ID NO: 992107 - DNA, 25 bp, Homo sapien
tgtctctgagatagaaccatccagc

SEQ ID NO: 992108 - DNA, 25 bp, Homo sapien
gagaggtcatgcgagtagcgacagt

SEQ ID NO: 992109 - DNA, 25 bp, Homo sapien
agaggtcatgcgagtagcgacagtt

SEQ ID NO: 992110 - DNA, 25 bp, Homo sapien
cttacaaaccccatgcataaaatac

SEQ ID NO: 992111 - DNA, 25 bp, Homo sapien
caacatggtgaaagcggtacctact

SEQ ID NO: 992112 - DNA, 25 bp, Homo sapien
aattgcttgaactcgcagtgggttg

SEQ ID NO: 992113 - DNA, 25 bp, Homo sapien
tggggggggcccagaggttgcagtg

SEQ ID NO: 992114 - DNA, 25 bp, Homo sapien
caggatcacgccactgagactccgt

SEQ ID NO: 992115 - DNA, 25 bp, Homo sapien
tgaaccaggatcacgccactgagac

SEQ ID NO: 992116 - DNA, 25 bp, Homo sapien
tatggacgtcacagcactcagataa

SEQ ID NO: 992117 - DNA, 25 bp, Homo sapien
ggtgaatcatggtagcgatagcaaa

SEQ ID NO: 992118 - DNA, 25 bp, Homo sapien
caagtaataaatttcactatggacg

SEQ ID NO: 992119 - DNA, 25 bp, Homo sapien
gaagacagctagatgtgatggtgaa

SEQ ID NO: 992120 - DNA, 25 bp, Homo sapien
ctcaaggtagcagatgcaatgagca

SEQ ID NO: 992121 - DNA, 25 bp, Homo sapien
caaggtaactcaaggtagcagatgc

SEQ ID NO: 992122 - DNA, 25 bp, Homo sapien
cactcaaggtaactcaaggtagcag

SEQ ID NO: 992123 - DNA, 25 bp, Homo sapien
ctcacacactcaaggtaactcaagg

SEQ ID NO: 992124 - DNA, 25 bp, Homo sapien
aagcagaggaatcttacaaagttcc

SEQ ID NO: 992125 - DNA, 25 bp, Homo sapien
aaatatacatgtggccgggcgtaat

SEQ ID NO: 992126 - DNA, 25 bp, Homo sapien
gatacacatgtgttctgttaagtac

SEQ ID NO: 992127 - DNA, 25 bp, Homo sapien
aagtgggtaattctaggtatatgac

SEQ ID NO: 992128 - DNA, 25 bp, Homo sapien
actcagtaactgagtatcctgttca

SEQ ID NO: 992129 - DNA, 25 bp, Homo sapien
ctgagtatcctgttcatgatactgg

SEQ ID NO: 992130 - DNA, 25 bp, Homo sapien
cagtaactgagtatcctgttcatga

SEQ ID NO: 992131 - DNA, 25 bp, Homo sapien
taactgagtatcctgttcatgatac

SEQ ID NO: 992132 - DNA, 25 bp, Homo sapien
gagagctcaaagtgaacgataagga

SEQ ID NO: 992133 - DNA, 25 bp, Homo sapien
ataaggatcatagaccgggtgcggt

SEQ ID NO: 992134 - DNA, 25 bp, Homo sapien
taaaatagggccctactcttctcag

SEQ ID NO: 992135 - DNA, 25 bp, Homo sapien
gaaagaaactgaggaactgaggaaa

SEQ ID NO: 992136 - DNA, 25 bp, Homo sapien
aagaaaagcttacagtcgctactga

SEQ ID NO: 992137 - DNA, 25 bp, Homo sapien
tttttacaaccatacacatccatac

SEQ ID NO: 992138 - DNA, 25 bp, Homo sapien
ttcgtctcgcatatcaaaccaaaac

SEQ ID NO: 992139 - DNA, 25 bp, Homo sapien
aatgccctcttctgcgtagagctag

SEQ ID NO: 992140 - DNA, 25 bp, Homo sapien
tccgggagcgaagagccctttcact

SEQ ID NO: 992141 - DNA, 25 bp, Homo sapien
tctctcttccgggagcgaagagccc

SEQ ID NO: 992142 - DNA, 25 bp, Homo sapien
ggaagatgcgtaaatttcaaaagag

SEQ ID NO: 992143 - DNA, 25 bp, Homo sapien
cctttcactcccttcggaagatgcg

SEQ ID NO: 992144 - DNA, 25 bp, Homo sapien
gccaacctcgacaaacatacaaaga

SEQ ID NO: 992145 - DNA, 25 bp, Homo sapien
gcttctaagacaaagctcagcaccg

SEQ ID NO: 992146 - DNA, 25 bp, Homo sapien
tgcagctcaaaaaaaccgcgggtgg

SEQ ID NO: 992147 - DNA, 25 bp, Homo sapien
gggagggtaataatctgcagctcaa

SEQ ID NO: 992148 - DNA, 25 bp, Homo sapien
ccgggagccaggcaagctcgctggg

SEQ ID NO: 992149 - DNA, 25 bp, Homo sapien
ttacaaacggatggcacggagagag

SEQ ID NO: 992150 - DNA, 25 bp, Homo sapien
tgtctaggcccggagaggatcgctg

SEQ ID NO: 992151 - DNA, 25 bp, Homo sapien
atcgctgggagaccggcctcaagtg

SEQ ID NO: 992152 - DNA, 25 bp, Homo sapien
gcggcgggggcatccttccagcggc

SEQ ID NO: 992153 - DNA, 25 bp, Homo sapien
gcagcggcgggggcatccttccagc

SEQ ID NO: 992154 - DNA, 25 bp, Homo sapien
cagcggcgggggcatccttccagcg

SEQ ID NO: 992155 - DNA, 25 bp, Homo sapien
agcggcgggggcatccttccagcgg

SEQ ID NO: 992156 - DNA, 25 bp, Homo sapien
ctcagggaagtgtaagcggcggtgc

SEQ ID NO: 992157 - DNA, 25 bp, Homo sapien
gcggacagcgctgagggctccgcgg

SEQ ID NO: 992158 - DNA, 25 bp, Homo sapien
ccgatgcgctcgcagccagctcagg

SEQ ID NO: 992159 - DNA, 25 bp, Homo sapien
gcagtaatcgcgcaccgccaggcct

SEQ ID NO: 992160 - DNA, 25 bp, Homo sapien
ttccgggagttgcagcctccgccat

SEQ ID NO: 992161 - DNA, 25 bp, Homo sapien
cgctcctgctcctgatgttgtggct

SEQ ID NO: 992162 - DNA, 25 bp, Homo sapien
tgttgttccgggagttgcagcctcc

SEQ ID NO: 992163 - DNA, 25 bp, Homo sapien
ggtgacctgtttagtccagccgccg

SEQ ID NO: 992164 - DNA, 25 bp, Homo sapien
ttccgggatcacatagttccggtcc

SEQ ID NO: 992165 - DNA, 25 bp, Homo sapien
aacttccgggatcacatagttccgg

SEQ ID NO: 992166 - DNA, 25 bp, Homo sapien
acttccgggatcacatagttccggt

SEQ ID NO: 992167 - DNA, 25 bp, Homo sapien
gaacttccgggatcacatagttccg

SEQ ID NO: 992168 - DNA, 25 bp, Homo sapien
gcacccgttcggtccccgcctgcta

SEQ ID NO: 992169 - DNA, 25 bp, Homo sapien
ggggagaggacggcgaggccaggcg

SEQ ID NO: 992170 - DNA, 25 bp, Homo sapien
gctacgcgtcgcgtatctgagcgct

SEQ ID NO: 992171 - DNA, 25 bp, Homo sapien
ggagaggacggcgaggccaggcgag

SEQ ID NO: 992172 - DNA, 25 bp, Homo sapien
gtaaaccactagcttgttgcacccg

SEQ ID NO: 992173 - DNA, 25 bp, Homo sapien
accactagcttgttgcacccgtgga

SEQ ID NO: 992174 - DNA, 25 bp, Homo sapien
gaggctgaagcccaaaagaaagatg

SEQ ID NO: 992175 - DNA, 25 bp, Homo sapien
aggctgaagcccaaaagaaagatga

SEQ ID NO: 992176 - DNA, 25 bp, Homo sapien
ttatcgccaactgatcgccaagacc

SEQ ID NO: 992177 - DNA, 25 bp, Homo sapien
actgatcgccaagaccacctctgag

SEQ ID NO: 992178 - DNA, 25 bp, Homo sapien
ctggaactttatcgccaactgatcg

SEQ ID NO: 992179 - DNA, 25 bp, Homo sapien
aactgatcgccaagaccacctctga

SEQ ID NO: 992180 - DNA, 25 bp, Homo sapien
cttggtaataaccaaaactgtccat

SEQ ID NO: 992181 - DNA, 25 bp, Homo sapien
ggtcctttgtcctggatctgtgaca

SEQ ID NO: 992182 - DNA, 25 bp, Homo sapien
gttggtcctttgtcctggatctgtg

SEQ ID NO: 992183 - DNA, 25 bp, Homo sapien
tggtcctttgtcctggatctgtgac

SEQ ID NO: 992184 - DNA, 25 bp, Homo sapien
tcctttgtcctggatctgtgacatt

SEQ ID NO: 992185 - DNA, 25 bp, Homo sapien
gagtatagcaaccatacaataaaac

SEQ ID NO: 992186 - DNA, 25 bp, Homo sapien
tatagcaaccatacaataaaacccc

SEQ ID NO: 992187 - DNA, 25 bp, Homo sapien
tagcaaccatacaataaaacccctc

SEQ ID NO: 992188 - DNA, 25 bp, Homo sapien
ggctgagtatagcaaccatacaata

SEQ ID NO: 992189 - DNA, 25 bp, Homo sapien
aagtatggaaatgtgctagggccac

SEQ ID NO: 992190 - DNA, 25 bp, Homo sapien
gcattctggattcggtagttagcta

SEQ ID NO: 992191 - DNA, 25 bp, Homo sapien
ggataatcccaggtgcatagtgtct

SEQ ID NO: 992192 - DNA, 25 bp, Homo sapien
tagttagctaacatagagctcagtg

SEQ ID NO: 992193 - DNA, 25 bp, Homo sapien
tcagtctgagggactgcagcagtgc

SEQ ID NO: 992194 - DNA, 25 bp, Homo sapien
tttgaggtgggacccgtgtgaggtg

SEQ ID NO: 992195 - DNA, 25 bp, Homo sapien
acagcctctactggggaaatcctca

SEQ ID NO: 992196 - DNA, 25 bp, Homo sapien
tgggcaagttggaaggccgtcagag

SEQ ID NO: 992197 - DNA, 25 bp, Homo sapien
tactggggaaatcctcatggctaaa

SEQ ID NO: 992198 - DNA, 25 bp, Homo sapien
tgacattggctcctcgagaaagcag

SEQ ID NO: 992199 - DNA, 25 bp, Homo sapien
tagcggtgacattggctcctcgaga

SEQ ID NO: 992200 - DNA, 25 bp, Homo sapien
cggtgacattggctcctcgagaaag

SEQ ID NO: 992201 - DNA, 25 bp, Homo sapien
cattggctcctcgagaaagcagcag

SEQ ID NO: 992202 - DNA, 25 bp, Homo sapien
gtctgtccagaggtcccgggaatcc

SEQ ID NO: 992203 - DNA, 25 bp, Homo sapien
ctgtccagaggtcccgggaatccag

SEQ ID NO: 992204 - DNA, 25 bp, Homo sapien
gtgtctgtccagaggtcccgggaat

SEQ ID NO: 992205 - DNA, 25 bp, Homo sapien
gaggtgtctgtccagaggtcccggg

SEQ ID NO: 992206 - DNA, 25 bp, Homo sapien
ctgtggctttacccttggctctcat

SEQ ID NO: 992207 - DNA, 25 bp, Homo sapien
gtggcaggccctcatttggccttcg

SEQ ID NO: 992208 - DNA, 25 bp, Homo sapien
ttcgtcctcggtgaacggcctccat

SEQ ID NO: 992209 - DNA, 25 bp, Homo sapien
agatatggggcatctgtggctttac

SEQ ID NO: 992210 - DNA, 25 bp, Homo sapien
gggcctgccgtgtaccgctttggat

SEQ ID NO: 992211 - DNA, 25 bp, Homo sapien
atgcaaggtatccagagcaatggga

SEQ ID NO: 992212 - DNA, 25 bp, Homo sapien
ggtctccggcttccactcatcttgt

SEQ ID NO: 992213 - DNA, 25 bp, Homo sapien
gcttttcaagcctatgcaaggtatc

SEQ ID NO: 992214 - DNA, 25 bp, Homo sapien
ttgttaccatcagccgcaaaaggtc

SEQ ID NO: 992215 - DNA, 25 bp, Homo sapien
ggacagctcttaggtcgccctgagg

SEQ ID NO: 992216 - DNA, 25 bp, Homo sapien
tcacctggtagtggccctgaggctt

SEQ ID NO: 992217 - DNA, 25 bp, Homo sapien
gaaaacgcaagctgcctctctggct

SEQ ID NO: 992218 - DNA, 25 bp, Homo sapien
acatccactattgcattaatgctgc

SEQ ID NO: 992219 - DNA, 25 bp, Homo sapien
ctattgcattaatgctgctctgggc

SEQ ID NO: 992220 - DNA, 25 bp, Homo sapien
gcagtgcacatccactattgcatta

SEQ ID NO: 992221 - DNA, 25 bp, Homo sapien
cactattgcattaatgctgctctgg

SEQ ID NO: 992222 - DNA, 25 bp, Homo sapien
gccgtgagcagtgtcgtaaacttga

SEQ ID NO: 992223 - DNA, 25 bp, Homo sapien
tgaagacccctagaacagtttactg

SEQ ID NO: 992224 - DNA, 25 bp, Homo sapien
tgtgcctctaaaagccagggactac

SEQ ID NO: 992225 - DNA, 25 bp, Homo sapien
gggtcaaagttgtggctatgtgttg

SEQ ID NO: 992226 - DNA, 25 bp, Homo sapien
atttgggaagagagacgtccatggc

SEQ ID NO: 992227 - DNA, 25 bp, Homo sapien
tttgggaagagagacgtccatggcc

SEQ ID NO: 992228 - DNA, 25 bp, Homo sapien
ttgggaagagagacgtccatggcct

SEQ ID NO: 992229 - DNA, 25 bp, Homo sapien
gggaagagagacgtccatggcctcg

SEQ ID NO: 992230 - DNA, 25 bp, Homo sapien
gtctgggaagccacatccgtctaca

SEQ ID NO: 992231 - DNA, 25 bp, Homo sapien
tgggaagccacatccgtctacagct

SEQ ID NO: 992232 - DNA, 25 bp, Homo sapien
tagcctccactctagggcaagggcc

SEQ ID NO: 992233 - DNA, 25 bp, Homo sapien
ggcccagcctttcactaggaggcct

SEQ ID NO: 992234 - DNA, 25 bp, Homo sapien
ccctgaacccgaggcaccggctccg

SEQ ID NO: 992235 - DNA, 25 bp, Homo sapien
cctgaacccgaggcaccggctccgc

SEQ ID NO: 992236 - DNA, 25 bp, Homo sapien
tccctgaacccgaggcaccggctcc

SEQ ID NO: 992237 - DNA, 25 bp, Homo sapien
gaacgtgtagggcaggacaggctcc

SEQ ID NO: 992238 - DNA, 25 bp, Homo sapien
gctccgaggagcacctcatttctgt

SEQ ID NO: 992239 - DNA, 25 bp, Homo sapien
agtcctcatgtgtcgtcagtcccgc

SEQ ID NO: 992240 - DNA, 25 bp, Homo sapien
ctgagcggccggatgggacgaacga

SEQ ID NO: 992241 - DNA, 25 bp, Homo sapien
cttggcataataaacagaaaaccca

SEQ ID NO: 992242 - DNA, 25 bp, Homo sapien
ttttaaagcatagggctgcactagg

SEQ ID NO: 992243 - DNA, 25 bp, Homo sapien
agttccgcaccgtgacaacctggga

SEQ ID NO: 992244 - DNA, 25 bp, Homo sapien
aacccatttgcatgtcggcgacacg

SEQ ID NO: 992245 - DNA, 25 bp, Homo sapien
tttcagaaaggccaccaggaactgt

SEQ ID NO: 992246 - DNA, 25 bp, Homo sapien
tattgacaccgctgtgctctccact

SEQ ID NO: 992247 - DNA, 25 bp, Homo sapien
tcccttcaggaacttattgacaccg

SEQ ID NO: 992248 - DNA, 25 bp, Homo sapien
tgtttccagatactcttgggctcgg

SEQ ID NO: 992249 - DNA, 25 bp, Homo sapien
tcttgggctcggacctcaaacagac

SEQ ID NO: 992250 - DNA, 25 bp, Homo sapien
tcgcccgacgtcaggaacaaagagt

SEQ ID NO: 992251 - DNA, 25 bp, Homo sapien
gaagaagcggacaaaggcttcagac

SEQ ID NO: 992252 - DNA, 25 bp, Homo sapien
ggaggagacagctttgcggaaggcc

SEQ ID NO: 992253 - DNA, 25 bp, Homo sapien
tagtgtcccacaatctccacgaaga

SEQ ID NO: 992254 - DNA, 25 bp, Homo sapien
ctgctcacaagccagctcgttcctc

SEQ ID NO: 992255 - DNA, 25 bp, Homo sapien
gtctaggggcccttcgtcctgctca

SEQ ID NO: 992256 - DNA, 25 bp, Homo sapien
gtgcctgccgtctaggggcccttcg

SEQ ID NO: 992257 - DNA, 25 bp, Homo sapien
ttcgtcctgctcacaagccagctcg

SEQ ID NO: 992258 - DNA, 25 bp, Homo sapien
tgttgacgaggtcaaccacaaggac

SEQ ID NO: 992259 - DNA, 25 bp, Homo sapien
ctgtctgaggaaccggctgttgacg

SEQ ID NO: 992260 - DNA, 25 bp, Homo sapien
ccggctgttgacgaggtcaaccaca

SEQ ID NO: 992261 - DNA, 25 bp, Homo sapien
aggaaccggctgttgacgaggtcaa

SEQ ID NO: 992262 - DNA, 25 bp, Homo sapien
tggtttcctgacattgccacggtag

SEQ ID NO: 992263 - DNA, 25 bp, Homo sapien
ccacaggtaatgaagagcagggctg

SEQ ID NO: 992264 - DNA, 25 bp, Homo sapien
ctgggatagggatggactcatagcc

SEQ ID NO: 992265 - DNA, 25 bp, Homo sapien
ggaggtgagccatttgtggtttcct

SEQ ID NO: 992266 - DNA, 25 bp, Homo sapien
tctcacgctgccttttagggtgtgg

SEQ ID NO: 992267 - DNA, 25 bp, Homo sapien
gagcttctcacgctgccttttaggg

SEQ ID NO: 992268 - DNA, 25 bp, Homo sapien
cacgctgccttttagggtgtgggct

SEQ ID NO: 992269 - DNA, 25 bp, Homo sapien
gcagagcttctcacgctgcctttta

SEQ ID NO: 992270 - DNA, 25 bp, Homo sapien
agcgccccgctctgttctccgcacc

SEQ ID NO: 992271 - DNA, 25 bp, Homo sapien
tctgagaaccgctccatgatgcctg

SEQ ID NO: 992272 - DNA, 25 bp, Homo sapien
actgctggctctgagaaccgctcca

SEQ ID NO: 992273 - DNA, 25 bp, Homo sapien
tggctctgagaaccgctccatgatg

SEQ ID NO: 992274 - DNA, 25 bp, Homo sapien
cagcccgatgaggaagggcgtcggc

SEQ ID NO: 992275 - DNA, 25 bp, Homo sapien
cacacgatgtcgaccatggcgggtg

SEQ ID NO: 992276 - DNA, 25 bp, Homo sapien
ctccctgagcagtggcagcgagctg

SEQ ID NO: 992277 - DNA, 25 bp, Homo sapien
tcgcgtggcagcacttggacaggat

SEQ ID NO: 992278 - DNA, 25 bp, Homo sapien
ctcagcgagggcccgaggaagcctc

SEQ ID NO: 992279 - DNA, 25 bp, Homo sapien
cagcgagggcccgaggaagcctcca

SEQ ID NO: 992280 - DNA, 25 bp, Homo sapien
gggagagaggccgactcagcgaggg

SEQ ID NO: 992281 - DNA, 25 bp, Homo sapien
agagaggccgactcagcgagggccc

SEQ ID NO: 992282 - DNA, 25 bp, Homo sapien
atgctttctattgaaacactgtagc

SEQ ID NO: 992283 - DNA, 25 bp, Homo sapien
tgctttctattgaaacactgtagct

SEQ ID NO: 992284 - DNA, 25 bp, Homo sapien
gcataccctgggtctgattgtaaga

SEQ ID NO: 992285 - DNA, 25 bp, Homo sapien
taagatgtgcttctcattgtgggct

SEQ ID NO: 992286 - DNA, 25 bp, Homo sapien
cttgaagccagtgatttggactaga

SEQ ID NO: 992287 - DNA, 25 bp, Homo sapien
tgatttggactagaagactgggagt

SEQ ID NO: 992288 - DNA, 25 bp, Homo sapien
aagactctgtcaaccatgctgagga

SEQ ID NO: 992289 - DNA, 25 bp, Homo sapien
tgctgaactaaatgtacttatctct

SEQ ID NO: 992290 - DNA, 25 bp, Homo sapien
tgaagtatcttatggatgccagagc

SEQ ID NO: 992291 - DNA, 25 bp, Homo sapien
tgaggactagctagacctctgaagt

SEQ ID NO: 992292 - DNA, 25 bp, Homo sapien
gaacaagccatcacaacagcattct

SEQ ID NO: 992293 - DNA, 25 bp, Homo sapien
gtatttatctgttgtcatgaccaca

SEQ ID NO: 992294 - DNA, 25 bp, Homo sapien
gacagagccactagaacactcaatg

SEQ ID NO: 992295 - DNA, 25 bp, Homo sapien
tcaggaaaatgaaggcgagggtgta

SEQ ID NO: 992296 - DNA, 25 bp, Homo sapien
gactcacagcgatgatgagagaata

SEQ ID NO: 992297 - DNA, 25 bp, Homo sapien
tgggagactcacagcgatgatgaga

SEQ ID NO: 992298 - DNA, 25 bp, Homo sapien
gagactcacagcgatgatgagagaa

SEQ ID NO: 992299 - DNA, 25 bp, Homo sapien
cacagcgatgatgagagaataaatt

SEQ ID NO: 992300 - DNA, 25 bp, Homo sapien
tgcccttcacccaaccctggagtct

SEQ ID NO: 992301 - DNA, 25 bp, Homo sapien
gactgctgagcacaaagcgggtcct

SEQ ID NO: 992302 - DNA, 25 bp, Homo sapien
tacatttctgtaaacggacagggcc

SEQ ID NO: 992303 - DNA, 25 bp, Homo sapien
gctttccctccgtcctctccaaagc

SEQ ID NO: 992304 - DNA, 25 bp, Homo sapien
catttgtaacaggaaaagcgagggc

SEQ ID NO: 992305 - DNA, 25 bp, Homo sapien
tgtctcagagctcttcgggcctttc

SEQ ID NO: 992306 - DNA, 25 bp, Homo sapien
tcaggtctgcatggaacccgtgtag

SEQ ID NO: 992307 - DNA, 25 bp, Homo sapien
agtcccggaaagtcagagccatgcg

SEQ ID NO: 992308 - DNA, 25 bp, Homo sapien
acccaatgacggtctttctcacact

SEQ ID NO: 992309 - DNA, 25 bp, Homo sapien
gcacaccattactgtaccatggcct

SEQ ID NO: 992310 - DNA, 25 bp, Homo sapien
ccaaggagggcaccacaattatcca

SEQ ID NO: 992311 - DNA, 25 bp, Homo sapien
atggcctggctctcgctccaaggag

SEQ ID NO: 992312 - DNA, 25 bp, Homo sapien
cagtgcctttcctatggactgcact

SEQ ID NO: 992313 - DNA, 25 bp, Homo sapien
agggtccactctcggccactggact

SEQ ID NO: 992314 - DNA, 25 bp, Homo sapien
ggggctggcccagcgtccaacctgt

SEQ ID NO: 992315 - DNA, 25 bp, Homo sapien
tggactgcactggtgactgtctcct

SEQ ID NO: 992316 - DNA, 25 bp, Homo sapien
ccgggagtacgatcacgctgacatt

SEQ ID NO: 992317 - DNA, 25 bp, Homo sapien
tgagctgacaaaagtgcaccgggag

SEQ ID NO: 992318 - DNA, 25 bp, Homo sapien
aagtgcaccgggagtacgatcacgc

SEQ ID NO: 992319 - DNA, 25 bp, Homo sapien
acgatcacgctgacatttaaaagtg

SEQ ID NO: 992320 - DNA, 25 bp, Homo sapien
tcacctgtccccatatctatgtagg

SEQ ID NO: 992321 - DNA, 25 bp, Homo sapien
tctatgtaggatggctccttttgcc

SEQ ID NO: 992322 - DNA, 25 bp, Homo sapien
tggcctactttacagtcctgaaggt

SEQ ID NO: 992323 - DNA, 25 bp, Homo sapien
tcctgaaggtgacagctaggcctca

SEQ ID NO: 992324 - DNA, 25 bp, Homo sapien
tccaagagcgactgtcattcaaacg

SEQ ID NO: 992325 - DNA, 25 bp, Homo sapien
caaacgctttagcagaagtagccaa

SEQ ID NO: 992326 - DNA, 25 bp, Homo sapien
ctagagggtccaagagcgactgtca

SEQ ID NO: 992327 - DNA, 25 bp, Homo sapien
gtcattcaaacgctttagcagaagt

SEQ ID NO: 992328 - DNA, 25 bp, Homo sapien
gaccaggtggcggacgctgagggag

SEQ ID NO: 992329 - DNA, 25 bp, Homo sapien
tccagcgggcggcacagttcgatca

SEQ ID NO: 992330 - DNA, 25 bp, Homo sapien
aaagtccacgtgctcgagccgggag

SEQ ID NO: 992331 - DNA, 25 bp, Homo sapien
cacagaccaggtggcggacgctgag

SEQ ID NO: 992332 - DNA, 25 bp, Homo sapien
tgaggtcctcatcaggggtgaccca

SEQ ID NO: 992333 - DNA, 25 bp, Homo sapien
gggtgtcgcagtcccagggctctga

SEQ ID NO: 992334 - DNA, 25 bp, Homo sapien
ggtgtcgcagtcccagggctctgag

SEQ ID NO: 992335 - DNA, 25 bp, Homo sapien
cattgggcagagtcctaggctggat

SEQ ID NO: 992336 - DNA, 25 bp, Homo sapien
atcatgcaaaggaacaccccagctg

SEQ ID NO: 992337 - DNA, 25 bp, Homo sapien
tcatgatgagtgatctgggccagct

SEQ ID NO: 992338 - DNA, 25 bp, Homo sapien
gccatagcatagttcttgggcttgc

SEQ ID NO: 992339 - DNA, 25 bp, Homo sapien
ttccatgacacttctcatgagtggc

SEQ ID NO: 992340 - DNA, 25 bp, Homo sapien
gtcttttttccacctcatccaagat

SEQ ID NO: 992341 - DNA, 25 bp, Homo sapien
gttcttgacaaggatggttttgccc

SEQ ID NO: 992342 - DNA, 25 bp, Homo sapien
gagatgcctcgtcttttttccacct

SEQ ID NO: 992343 - DNA, 25 bp, Homo sapien
attgaagagtctaaattaaaatgcc

SEQ ID NO: 992344 - DNA, 25 bp, Homo sapien
ctaaattaaaatgccgtttatgaag

SEQ ID NO: 992345 - DNA, 25 bp, Homo sapien
tctccacaatctaattgtaaattga

SEQ ID NO: 992346 - DNA, 25 bp, Homo sapien
actgtgctcagcaaattgtgtactt

SEQ ID NO: 992347 - DNA, 25 bp, Homo sapien
tggccacaacgtggaaacaacccaa

SEQ ID NO: 992348 - DNA, 25 bp, Homo sapien
tggataaataatcaatcaatggata

SEQ ID NO: 992349 - DNA, 25 bp, Homo sapien
tccagcaactctatttgtgggtgta

SEQ ID NO: 992350 - DNA, 25 bp, Homo sapien
tatgttcctagcagaataattcaca

SEQ ID NO: 992351 - DNA, 25 bp, Homo sapien
caaagcagtattgcatgttccacct

SEQ ID NO: 992352 - DNA, 25 bp, Homo sapien
acaaagcagtattgcatgttccacc

SEQ ID NO: 992353 - DNA, 25 bp, Homo sapien
aaagcagtattgcatgttccacctc

SEQ ID NO: 992354 - DNA, 25 bp, Homo sapien
aagcagtattgcatgttccacctcc

SEQ ID NO: 992355 - DNA, 25 bp, Homo sapien
caggcggctcacaatgcagtaaact

SEQ ID NO: 992356 - DNA, 25 bp, Homo sapien
tgaagcatcccaggcggctcacaat

SEQ ID NO: 992357 - DNA, 25 bp, Homo sapien
ttcaggaaggcgcttccctttgcct

SEQ ID NO: 992358 - DNA, 25 bp, Homo sapien
tcaggaaggcgcttccctttgcctc

SEQ ID NO: 992359 - DNA, 25 bp, Homo sapien
tcagggaatctcagtctcacgggac

SEQ ID NO: 992360 - DNA, 25 bp, Homo sapien
tctcctcctgtgcctcatcagggaa

SEQ ID NO: 992361 - DNA, 25 bp, Homo sapien
cctcatcagggaatctcagtctcac

SEQ ID NO: 992362 - DNA, 25 bp, Homo sapien
atctcagtctcacgggactgggaag

SEQ ID NO: 992363 - DNA, 25 bp, Homo sapien
taaccgaaccttctgctcccatctt

SEQ ID NO: 992364 - DNA, 25 bp, Homo sapien
cagtcttcggcagtaaccgaacctt

SEQ ID NO: 992365 - DNA, 25 bp, Homo sapien
gtaaccgaaccttctgctcccatct

SEQ ID NO: 992366 - DNA, 25 bp, Homo sapien
cagcagtcttcggcagtaaccgaac

SEQ ID NO: 992367 - DNA, 25 bp, Homo sapien
catgcctagctaagggctctcccat

SEQ ID NO: 992368 - DNA, 25 bp, Homo sapien
tcatctagggatgtgactcggtgag

SEQ ID NO: 992369 - DNA, 25 bp, Homo sapien
cagtgacatctgctcatctagggat

SEQ ID NO: 992370 - DNA, 25 bp, Homo sapien
tgccccattgtacaaaacacaactg

SEQ ID NO: 992371 - DNA, 25 bp, Homo sapien
ttggggctgcgaaggggagaagcca

SEQ ID NO: 992372 - DNA, 25 bp, Homo sapien
ttagtctttggggctgcgaagggga

SEQ ID NO: 992373 - DNA, 25 bp, Homo sapien
gtctttggggctgcgaaggggagaa

SEQ ID NO: 992374 - DNA, 25 bp, Homo sapien
tttggggctgcgaaggggagaagcc

SEQ ID NO: 992375 - DNA, 25 bp, Homo sapien
ggtgaactgctggacaggaacccaa

SEQ ID NO: 992376 - DNA, 25 bp, Homo sapien
aacagaactggggaatggccttcag

SEQ ID NO: 992377 - DNA, 25 bp, Homo sapien
ccttggcatcgggaaaacagaactg

SEQ ID NO: 992378 - DNA, 25 bp, Homo sapien
ctgctggacaggaacccaatccttg

SEQ ID NO: 992379 - DNA, 25 bp, Homo sapien
gaagagcttgcagctcagtcggctg

SEQ ID NO: 992380 - DNA, 25 bp, Homo sapien
tctcagcatgggaaattgaggcgga

SEQ ID NO: 992381 - DNA, 25 bp, Homo sapien
tccaactatagacctctgggagaag

SEQ ID NO: 992382 - DNA, 25 bp, Homo sapien
acatttgtgactgccgccttagcct

SEQ ID NO: 992383 - DNA, 25 bp, Homo sapien
tggtactcgatgagttcccgggcaa

SEQ ID NO: 992384 - DNA, 25 bp, Homo sapien
gtgagttctggcacgtaggcagccc

SEQ ID NO: 992385 - DNA, 25 bp, Homo sapien
cacaaagtactcgaagagctgcctc

SEQ ID NO: 992386 - DNA, 25 bp, Homo sapien
tgcttcagccgggacttcacgttga

SEQ ID NO: 992387 - DNA, 25 bp, Homo sapien
gatgtccacgccttgccaagcaagc

SEQ ID NO: 992388 - DNA, 25 bp, Homo sapien
gagtcctgcacagtagtggctctcc

SEQ ID NO: 992389 - DNA, 25 bp, Homo sapien
tctgtccctcatactaaggaggagg

SEQ ID NO: 992390 - DNA, 25 bp, Homo sapien
aagctccggcaggacgcttctgtcc

SEQ ID NO: 992391 - DNA, 25 bp, Homo sapien
ctgtgtcactgtcagactcactgtt

SEQ ID NO: 992392 - DNA, 25 bp, Homo sapien
tcactgtcagactcactgttctcat

SEQ ID NO: 992393 - DNA, 25 bp, Homo sapien
tgtcactgtcagactcactgttctc

SEQ ID NO: 992394 - DNA, 25 bp, Homo sapien
ctgtcagactcactgttctcatctg

SEQ ID NO: 992395 - DNA, 25 bp, Homo sapien
tttcctctccggacctcataaatgg

SEQ ID NO: 992396 - DNA, 25 bp, Homo sapien
aaatggcgttgattcgcaacaccag

SEQ ID NO: 992397 - DNA, 25 bp, Homo sapien
gacctcataaatggcgttgattcgc

SEQ ID NO: 992398 - DNA, 25 bp, Homo sapien
tctccggacctcataaatggcgttg

SEQ ID NO: 992399 - DNA, 25 bp, Homo sapien
cctcgatgtcactgcggcttgggaa

SEQ ID NO: 992400 - DNA, 25 bp, Homo sapien
tcatgatgcgatggctgctttccct

SEQ ID NO: 992401 - DNA, 25 bp, Homo sapien
gagacccatggggagacagcccatt

SEQ ID NO: 992402 - DNA, 25 bp, Homo sapien
ctgaggcctcgatgtcactgcggct

SEQ ID NO: 992403 - DNA, 25 bp, Homo sapien
gacgcagactctcgctccgtgtggt

SEQ ID NO: 992404 - DNA, 25 bp, Homo sapien
accacacggagcgagagtctgcgtc

SEQ ID NO: 992405 - DNA, 25 bp, Homo sapien
ccgtctcaggtcagagcatgatgga

SEQ ID NO: 992406 - DNA, 25 bp, Homo sapien
tgttgacaaggctgtctcagagcac

SEQ ID NO: 992407 - DNA, 25 bp, Homo sapien
cacaaaaatgatcaggacgaaggtc

SEQ ID NO: 992408 - DNA, 25 bp, Homo sapien
gacgaaggtccggatattccagcct

SEQ ID NO: 992409 - DNA, 25 bp, Homo sapien
gcatgaagcttgttgccaccattac

SEQ ID NO: 992410 - DNA, 25 bp, Homo sapien
gagcatgaagcttgttgccaccatt

SEQ ID NO: 992411 - DNA, 25 bp, Homo sapien
ctgagcatgaagcttgttgccacca

SEQ ID NO: 992412 - DNA, 25 bp, Homo sapien
tgagcatgaagcttgttgccaccat

SEQ ID NO: 992413 - DNA, 25 bp, Homo sapien
tcttcctgccgttctgtgggtctcc

SEQ ID NO: 992414 - DNA, 25 bp, Homo sapien
cagcttcctagtgtccagcagcttg

SEQ ID NO: 992415 - DNA, 25 bp, Homo sapien
ttcctgccgttctgtgggtctccaa

SEQ ID NO: 992416 - DNA, 25 bp, Homo sapien
tcagcttcctagtgtccagcagctt

SEQ ID NO: 992417 - DNA, 25 bp, Homo sapien
tctttcccaggcagcgaccatgtaa

SEQ ID NO: 992418 - DNA, 25 bp, Homo sapien
gcagcgaccatgtaactcgatgtcc

SEQ ID NO: 992419 - DNA, 25 bp, Homo sapien
gatgtcctcataagggttctccttc

SEQ ID NO: 992420 - DNA, 25 bp, Homo sapien
catgtaactcgatgtcctcataagg

SEQ ID NO: 992421 - DNA, 25 bp, Homo sapien
aagactgcagtaaatcttcaaactc

SEQ ID NO: 992422 - DNA, 25 bp, Homo sapien
gaatgtcttcatagacgttctcctc

SEQ ID NO: 992423 - DNA, 25 bp, Homo sapien
ccagcttagtctgcgcgtaccagtc

SEQ ID NO: 992424 - DNA, 25 bp, Homo sapien
aagtgcgtgtcagccccagcttagt

SEQ ID NO: 992425 - DNA, 25 bp, Homo sapien
gggcgttataacctatgtaatagcc

SEQ ID NO: 992426 - DNA, 25 bp, Homo sapien
gatgctagaatgagctggttgttcc

SEQ ID NO: 992427 - DNA, 25 bp, Homo sapien
ccaggtcctcaaatgatcgtttgat

SEQ ID NO: 992428 - DNA, 25 bp, Homo sapien
ggtgcttctgagtttcagagatgct

SEQ ID NO: 992429 - DNA, 25 bp, Homo sapien
cccatggctcgccatactcaggaag

SEQ ID NO: 992430 - DNA, 25 bp, Homo sapien
catggctcgccatactcaggaaggg

SEQ ID NO: 992431 - DNA, 25 bp, Homo sapien
atcaaggatgccacgcgctgacttc

SEQ ID NO: 992432 - DNA, 25 bp, Homo sapien
ctgggttagaaatcaaggatgccac

SEQ ID NO: 992433 - DNA, 25 bp, Homo sapien
tctgcctggccacaccggcacctac

SEQ ID NO: 992434 - DNA, 25 bp, Homo sapien
gagtcaggtggcgacactctgcctg

SEQ ID NO: 992435 - DNA, 25 bp, Homo sapien
agagagtcaggtggcgacactctgc

SEQ ID NO: 992436 - DNA, 25 bp, Homo sapien
tcaggtggcgacactctgcctggcc

SEQ ID NO: 992437 - DNA, 25 bp, Homo sapien
ggtccacagtcttctgttcacagag

SEQ ID NO: 992438 - DNA, 25 bp, Homo sapien
cggtccacagtcttctgttcacaga

SEQ ID NO: 992439 - DNA, 25 bp, Homo sapien
cccggtccacagtcttctgttcaca

SEQ ID NO: 992440 - DNA, 25 bp, Homo sapien
tgtctcccggtccacagtcttctgt

SEQ ID NO: 992441 - DNA, 25 bp, Homo sapien
gttttggcagagggttgatgaaggg

SEQ ID NO: 992442 - DNA, 25 bp, Homo sapien
gggttttggcagagggttgatgaag

SEQ ID NO: 992443 - DNA, 25 bp, Homo sapien
cggggttttggcagagggttgatga

SEQ ID NO: 992444 - DNA, 25 bp, Homo sapien
ccggggttttggcagagggttgatg

SEQ ID NO: 992445 - DNA, 25 bp, Homo sapien
cttctgcatgaacctttcctgtcct

SEQ ID NO: 992446 - DNA, 25 bp, Homo sapien
gttctcaaggctccggtcccagggc

SEQ ID NO: 992447 - DNA, 25 bp, Homo sapien
cagggccttctgcatgaacctttcc

SEQ ID NO: 992448 - DNA, 25 bp, Homo sapien
ccctccgagcccctatacacgttct

SEQ ID NO: 992449 - DNA, 25 bp, Homo sapien
caggttctcaggaagggtggaccct

SEQ ID NO: 992450 - DNA, 25 bp, Homo sapien
tccctggtaactggggatccagccc

SEQ ID NO: 992451 - DNA, 25 bp, Homo sapien
cttcagcacggagaggggatcgttc

SEQ ID NO: 992452 - DNA, 25 bp, Homo sapien
gcctgctcgagtttcttgacctgct

SEQ ID NO: 992453 - DNA, 25 bp, Homo sapien
ggatcgttctgaaagcgtagcttgc

SEQ ID NO: 992454 - DNA, 25 bp, Homo sapien
attccattcttagcctctgtgacct

SEQ ID NO: 992455 - DNA, 25 bp, Homo sapien
cgttctggctggcttaggtcttgcc

SEQ ID NO: 992456 - DNA, 25 bp, Homo sapien
tctgtgacctgagttctcaccccat

SEQ ID NO: 992457 - DNA, 25 bp, Homo sapien
gatccacttcccgttctggctggct

SEQ ID NO: 992458 - DNA, 25 bp, Homo sapien
gggttctgaacacctctgagctgct

SEQ ID NO: 992459 - DNA, 25 bp, Homo sapien
gataatcctcctgtccgtctgctct

SEQ ID NO: 992460 - DNA, 25 bp, Homo sapien
gatatcttgtcctttatgttgaggg

SEQ ID NO: 992461 - DNA, 25 bp, Homo sapien
ctgcagctgggtcactgatgatcat

SEQ ID NO: 992462 - DNA, 25 bp, Homo sapien
ggatgccttcgagggtctttctcag

SEQ ID NO: 992463 - DNA, 25 bp, Homo sapien
tccattcttgactctagcgtgaggt

SEQ ID NO: 992464 - DNA, 25 bp, Homo sapien
gactcctgatcagtctctaggaatg

SEQ ID NO: 992465 - DNA, 25 bp, Homo sapien
gggactccttctgaagcctgactcc

SEQ ID NO: 992466 - DNA, 25 bp, Homo sapien
tgctacccctgaacttgacaaattg

SEQ ID NO: 992467 - DNA, 25 bp, Homo sapien
tgtctgattcaagtgggcaaagcca

SEQ ID NO: 992468 - DNA, 25 bp, Homo sapien
gccacaatgattggatgcatctgaa

SEQ ID NO: 992469 - DNA, 25 bp, Homo sapien
caagtcatgaagtttgtgctacccc

SEQ ID NO: 992470 - DNA, 25 bp, Homo sapien
caatttgtagctcaggttttcagtc

SEQ ID NO: 992471 - DNA, 25 bp, Homo sapien
cagtaccgaggggagttccaggtca

SEQ ID NO: 992472 - DNA, 25 bp, Homo sapien
actgtcatcatgtcagtaccgaggg

SEQ ID NO: 992473 - DNA, 25 bp, Homo sapien
tcagccaatttgtagctcaggtttt

SEQ ID NO: 992474 - DNA, 25 bp, Homo sapien
tcatctgtctggtctaaggaacacc

SEQ ID NO: 992475 - DNA, 25 bp, Homo sapien
cataaataacaacgagacccagtgc

SEQ ID NO: 992476 - DNA, 25 bp, Homo sapien
gaagaaacagccagtcacgaggtca

SEQ ID NO: 992477 - DNA, 25 bp, Homo sapien
ggagatggtcttggcaaacccagga

SEQ ID NO: 992478 - DNA, 25 bp, Homo sapien
tcaggtcccaagggcagttctcaca

SEQ ID NO: 992479 - DNA, 25 bp, Homo sapien
gaggaccaagagaagcgggctatgc

SEQ ID NO: 992480 - DNA, 25 bp, Homo sapien
caggtcccaagggcagttctcacag

SEQ ID NO: 992481 - DNA, 25 bp, Homo sapien
aggcaagagcgcaccaccctgtccg

SEQ ID NO: 992482 - DNA, 25 bp, Homo sapien
actgaggcaagagcgcaccaccctg

SEQ ID NO: 992483 - DNA, 25 bp, Homo sapien
caagagcgcaccaccctgtccggct

SEQ ID NO: 992484 - DNA, 25 bp, Homo sapien
tgactgaggcaagagcgcaccaccc

SEQ ID NO: 992485 - DNA, 25 bp, Homo sapien
attatagagtggtggttgttacaca

SEQ ID NO: 992486 - DNA, 25 bp, Homo sapien
ggttgttacacaacacagtcagtat

SEQ ID NO: 992487 - DNA, 25 bp, Homo sapien
tgctttatgagagtcaattttatgg

SEQ ID NO: 992488 - DNA, 25 bp, Homo sapien
tctaaaattatagagtggtggttgt

SEQ ID NO: 992489 - DNA, 25 bp, Homo sapien
agtgcgtgcaccttttcctggaacc

SEQ ID NO: 992490 - DNA, 25 bp, Homo sapien
gaatctgacgcaggtgctaccagca

SEQ ID NO: 992491 - DNA, 25 bp, Homo sapien
catggccttcaatatcaaggctccc

SEQ ID NO: 992492 - DNA, 25 bp, Homo sapien
gagcatcttgggaatctgacgcagg

SEQ ID NO: 992493 - DNA, 25 bp, Homo sapien
aacaacttgatcagtattttcctga

SEQ ID NO: 992494 - DNA, 25 bp, Homo sapien
acaacttgatcagtattttcctgac

SEQ ID NO: 992495 - DNA, 25 bp, Homo sapien
aaacaacttgatcagtattttcctg

SEQ ID NO: 992496 - DNA, 25 bp, Homo sapien
aatgaagccgctgggaatctgtggc

SEQ ID NO: 992497 - DNA, 25 bp, Homo sapien
tgtctgacaaatgaagccgctggga

SEQ ID NO: 992498 - DNA, 25 bp, Homo sapien
accacactgtgtgacgtgccggatg

SEQ ID NO: 992499 - DNA, 25 bp, Homo sapien
ctgaccacactgtgtgacgtgccgg

SEQ ID NO: 992500 - DNA, 25 bp, Homo sapien
tagtggccatcttggataggaacac

SEQ ID NO: 992501 - DNA, 25 bp, Homo sapien
tgctcaataactgccagggtcacct

SEQ ID NO: 992502 - DNA, 25 bp, Homo sapien
cagtggcgtcagtcctccagagtta

SEQ ID NO: 992503 - DNA, 25 bp, Homo sapien
cagtgtgtagaaagactcagtggcg

SEQ ID NO: 992504 - DNA, 25 bp, Homo sapien
caatacaacctaaatgctacgtaaa

SEQ ID NO: 992505 - DNA, 25 bp, Homo sapien
acccaatacaacctaaatgctacgt

SEQ ID NO: 992506 - DNA, 25 bp, Homo sapien
cccaatacaacctaaatgctacgta

SEQ ID NO: 992507 - DNA, 25 bp, Homo sapien
ccaatacaacctaaatgctacgtaa

SEQ ID NO: 992508 - DNA, 25 bp, Homo sapien
caccagccactgaatgaaaagcaac

SEQ ID NO: 992509 - DNA, 25 bp, Homo sapien
gatgataccagaagcataatgacct

SEQ ID NO: 992510 - DNA, 25 bp, Homo sapien
gggtcaagcaacacacaaaccaagg

SEQ ID NO: 992511 - DNA, 25 bp, Homo sapien
tgttgccaagatgataccagaagca

SEQ ID NO: 992512 - DNA, 25 bp, Homo sapien
gcagggccatatgtgagtgaaaaac

SEQ ID NO: 992513 - DNA, 25 bp, Homo sapien
ctaacgccccggcagggccatatgt

SEQ ID NO: 992514 - DNA, 25 bp, Homo sapien
tgaaaaacatttacgagaggctgca

SEQ ID NO: 992515 - DNA, 25 bp, Homo sapien
caggaggaatgggatgatcgaatcc

SEQ ID NO: 992516 - DNA, 25 bp, Homo sapien
ttattcaagcacccagtctcctccc

SEQ ID NO: 992517 - DNA, 25 bp, Homo sapien
ttggttttgatctgacctcactgga

SEQ ID NO: 992518 - DNA, 25 bp, Homo sapien
tgcatgctgtgacaccgaggccctg

SEQ ID NO: 992519 - DNA, 25 bp, Homo sapien
atgcatgctgtgacaccgaggccct

SEQ ID NO: 992520 - DNA, 25 bp, Homo sapien
ttttgatctgacctcactggatagt

SEQ ID NO: 992521 - DNA, 25 bp, Homo sapien
ctgtgctacccgcagaatcctcttt

SEQ ID NO: 992522 - DNA, 25 bp, Homo sapien
cactgaacagcccacttgaatggaa

SEQ ID NO: 992523 - DNA, 25 bp, Homo sapien
tcacgttcgtttgcttgcttcctgg

SEQ ID NO: 992524 - DNA, 25 bp, Homo sapien
gaatgcacccgtaggtcacgttcgt

SEQ ID NO: 992525 - DNA, 25 bp, Homo sapien
caggcctggctcccagccagcacat

SEQ ID NO: 992526 - DNA, 25 bp, Homo sapien
agagagtttccaggcctggctccca

SEQ ID NO: 992527 - DNA, 25 bp, Homo sapien
tccaggcctggctcccagccagcac

SEQ ID NO: 992528 - DNA, 25 bp, Homo sapien
agcagagagtttccaggcctggctc

SEQ ID NO: 992529 - DNA, 25 bp, Homo sapien
gctcatgcctgtagtcccagcactt

SEQ ID NO: 992530 - DNA, 25 bp, Homo sapien
ttgagtccaggagtttgagaccagc

SEQ ID NO: 992531 - DNA, 25 bp, Homo sapien
aaaaaaattttggccaagtgcagtg

SEQ ID NO: 992532 - DNA, 25 bp, Homo sapien
tgcaaggccgaggcaggtggattgc

SEQ ID NO: 992533 - DNA, 25 bp, Homo sapien
tgtgtcactgtgtgtggttaatttc

SEQ ID NO: 992534 - DNA, 25 bp, Homo sapien
tgtgtgtcactgtgtgtggttaatt

SEQ ID NO: 992535 - DNA, 25 bp, Homo sapien
caggtgtgtgtcactgtgtgtggtt

SEQ ID NO: 992536 - DNA, 25 bp, Homo sapien
ggtgtgtgtcactgtgtgtggttaa

SEQ ID NO: 992537 - DNA, 25 bp, Homo sapien
cagaaggtccacattccttttgctt

SEQ ID NO: 992538 - DNA, 25 bp, Homo sapien
gttgtaatctgctaaatgcaggcca

SEQ ID NO: 992539 - DNA, 25 bp, Homo sapien
ccaaatgcgttatccaagtgttgta

SEQ ID NO: 992540 - DNA, 25 bp, Homo sapien
aatgcaggccactcagaaggtccac

SEQ ID NO: 992541 - DNA, 25 bp, Homo sapien
tgcagtgggtcgagattgcactacc

SEQ ID NO: 992542 - DNA, 25 bp, Homo sapien
ccgagggacccagcacggcgcaggg

SEQ ID NO: 992543 - DNA, 25 bp, Homo sapien
cgcgccccgagggacccagcacggc

SEQ ID NO: 992544 - DNA, 25 bp, Homo sapien
ccccgagggacccagcacggcgcag

SEQ ID NO: 992545 - DNA, 25 bp, Homo sapien
actcgcgccccgagggacccagcac

SEQ ID NO: 992546 - DNA, 25 bp, Homo sapien
ctctggggcgcatcttgggggctcc

SEQ ID NO: 992547 - DNA, 25 bp, Homo sapien
gctctggggcgcatcttgggggctc

SEQ ID NO: 992548 - DNA, 25 bp, Homo sapien
gggctctggggcgcatcttgggggc

SEQ ID NO: 992549 - DNA, 25 bp, Homo sapien
ctggggcgcatcttgggggctccgg

SEQ ID NO: 992550 - DNA, 25 bp, Homo sapien
tgacaggggtcccacatagggaccc

SEQ ID NO: 992551 - DNA, 25 bp, Homo sapien
tctgcccatgacaggggtcccacat

SEQ ID NO: 992552 - DNA, 25 bp, Homo sapien
cccatgacaggggtcccacataggg

SEQ ID NO: 992553 - DNA, 25 bp, Homo sapien
tccttcaccttgtggcccccccatg

SEQ ID NO: 992554 - DNA, 25 bp, Homo sapien
gttcctggcgctgacaactccaaca

SEQ ID NO: 992555 - DNA, 25 bp, Homo sapien
aacagtatattcgtcccctgtcctc

SEQ ID NO: 992556 - DNA, 25 bp, Homo sapien
tgacaactccaacagtatattcgtc

SEQ ID NO: 992557 - DNA, 25 bp, Homo sapien
tcttctcctgttcctggcgctgaca

SEQ ID NO: 992558 - DNA, 25 bp, Homo sapien
cttcgggtaggaggtcatgcctggc

SEQ ID NO: 992559 - DNA, 25 bp, Homo sapien
ttcgggtaggaggtcatgcctggcc

SEQ ID NO: 992560 - DNA, 25 bp, Homo sapien
tcgggtaggaggtcatgcctggcct

SEQ ID NO: 992561 - DNA, 25 bp, Homo sapien
tgcttcgggtaggaggtcatgcctg

SEQ ID NO: 992562 - DNA, 25 bp, Homo sapien
cagtcaggccagtgaatccaactct

SEQ ID NO: 992563 - DNA, 25 bp, Homo sapien
tccttttggacgatgtatttgaaca

SEQ ID NO: 992564 - DNA, 25 bp, Homo sapien
agaatacaggacagtcaggccagtg

SEQ ID NO: 992565 - DNA, 25 bp, Homo sapien
caggatgaaaggcacctacctcttg

SEQ ID NO: 992566 - DNA, 25 bp, Homo sapien
cgcccagccctcattaaagatttta

SEQ ID NO: 992567 - DNA, 25 bp, Homo sapien
gcgcccagccctcattaaagatttt

SEQ ID NO: 992568 - DNA, 25 bp, Homo sapien
gcccagccctcattaaagattttaa

SEQ ID NO: 992569 - DNA, 25 bp, Homo sapien
gagaaaggtgtctggagcaagccac

SEQ ID NO: 992570 - DNA, 25 bp, Homo sapien
ggagaaaggtgtctggagcaagcca

SEQ ID NO: 992571 - DNA, 25 bp, Homo sapien
cagagacacactggtttagagcctg

SEQ ID NO: 992572 - DNA, 25 bp, Homo sapien
gaggaacaaagacgttgaagctgca

SEQ ID NO: 992573 - DNA, 25 bp, Homo sapien
tgcagcaggtaagtgcagggcgttc

SEQ ID NO: 992574 - DNA, 25 bp, Homo sapien
caggtaagtgcagggcgttcccttc

SEQ ID NO: 992575 - DNA, 25 bp, Homo sapien
gtgctatggtctgaacgtgtccgcc

SEQ ID NO: 992576 - DNA, 25 bp, Homo sapien
gtgccctcatcaaagagtccccaga

SEQ ID NO: 992577 - DNA, 25 bp, Homo sapien
actctttccaccacggacacagtga

SEQ ID NO: 992578 - DNA, 25 bp, Homo sapien
tcctaacgcccaaagtgatggaagg

SEQ ID NO: 992579 - DNA, 25 bp, Homo sapien
catctgctgggtagcagtgttacac

SEQ ID NO: 992580 - DNA, 25 bp, Homo sapien
ttacacgcgagctgctaaacccggt

SEQ ID NO: 992581 - DNA, 25 bp, Homo sapien
cttgaactagtacttgccctgcatc

SEQ ID NO: 992582 - DNA, 25 bp, Homo sapien
cccttgaactagtacttgccctgca

SEQ ID NO: 992583 - DNA, 25 bp, Homo sapien
ggattcaagagctgaccaaggttag

SEQ ID NO: 992584 - DNA, 25 bp, Homo sapien
cataaggcaatgagggaaatggcca

SEQ ID NO: 992585 - DNA, 25 bp, Homo sapien
tggcaacagccctcatagagagaga

SEQ ID NO: 992586 - DNA, 25 bp, Homo sapien
tagagaaggatcaatgtgcacaatg

SEQ ID NO: 992587 - DNA, 25 bp, Homo sapien
tctcttgtgtaaaggcgctgattca

SEQ ID NO: 992588 - DNA, 25 bp, Homo sapien
cagagaaaatagcatcgattccaac

SEQ ID NO: 992589 - DNA, 25 bp, Homo sapien
tccccttgcggaagtctgacagaca

SEQ ID NO: 992590 - DNA, 25 bp, Homo sapien
gacagacatcatgtggttccatcac

SEQ ID NO: 992591 - DNA, 25 bp, Homo sapien
aggtctccttagcccggtcattctt

SEQ ID NO: 992592 - DNA, 25 bp, Homo sapien
gtcattcttgtcaatgctcacactt

SEQ ID NO: 992593 - DNA, 25 bp, Homo sapien
ggtctccttagcccggtcattcttg

SEQ ID NO: 992594 - DNA, 25 bp, Homo sapien
ccggtcattcttgtcaatgctcaca

SEQ ID NO: 992595 - DNA, 25 bp, Homo sapien
ccaaccacgggctttcttctcagag

SEQ ID NO: 992596 - DNA, 25 bp, Homo sapien
tgagcagaacggcttggccacttcc

SEQ ID NO: 992597 - DNA, 25 bp, Homo sapien
ttcacccgctagtccggaactacag

SEQ ID NO: 992598 - DNA, 25 bp, Homo sapien
tgatgaaagtggctgacataccggg

SEQ ID NO: 992599 - DNA, 25 bp, Homo sapien
cagtgcgcatcaggtacagtgtgga

SEQ ID NO: 992600 - DNA, 25 bp, Homo sapien
gcgtacgaacttagcctggcacaat

SEQ ID NO: 992601 - DNA, 25 bp, Homo sapien
gatgagcgactctgtgacgtcacgg

SEQ ID NO: 992602 - DNA, 25 bp, Homo sapien
gagaggtttcctgcagccgaaggac

SEQ ID NO: 992603 - DNA, 25 bp, Homo sapien
ggctggggatgggggcctcgccggc

SEQ ID NO: 992604 - DNA, 25 bp, Homo sapien
ggtggagtccgtcagtgagtgtggg

SEQ ID NO: 992605 - DNA, 25 bp, Homo sapien
tggagatggtggagtccgtcagtga

SEQ ID NO: 992606 - DNA, 25 bp, Homo sapien
gagatggtggagtccgtcagtgagt

SEQ ID NO: 992607 - DNA, 25 bp, Homo sapien
agcgcgggtccctgggacgctctca

SEQ ID NO: 992608 - DNA, 25 bp, Homo sapien
ctgtagcggacagcgcgggtccctg

SEQ ID NO: 992609 - DNA, 25 bp, Homo sapien
acagcgcgggtccctgggacgctct

SEQ ID NO: 992610 - DNA, 25 bp, Homo sapien
cggacagcgcgggtccctgggacgc

SEQ ID NO: 992611 - DNA, 25 bp, Homo sapien
gagagacttcgctgggcagatggga

SEQ ID NO: 992612 - DNA, 25 bp, Homo sapien
ctgtagtccgcgtgtctcctgaagc

SEQ ID NO: 992613 - DNA, 25 bp, Homo sapien
tcctgaagccgcgactcgaggagag

SEQ ID NO: 992614 - DNA, 25 bp, Homo sapien
aagaggccgcgtcccgaggcatgct

SEQ ID NO: 992615 - DNA, 25 bp, Homo sapien
ggctgagccagtcggcgccggcgcg

SEQ ID NO: 992616 - DNA, 25 bp, Homo sapien
ccctcgggagacgcacgcgtgaatg

SEQ ID NO: 992617 - DNA, 25 bp, Homo sapien
gcacgcgtgaatgcggagcgggctg

SEQ ID NO: 992618 - DNA, 25 bp, Homo sapien
atgcggagcgggctgagccagtcgg

SEQ ID NO: 992619 - DNA, 25 bp, Homo sapien
gagccattagcatatttaataggat

SEQ ID NO: 992620 - DNA, 25 bp, Homo sapien
gatttgcgagtcctctctcccatat

SEQ ID NO: 992621 - DNA, 25 bp, Homo sapien
tttaataggatttgcgagtcctctc

SEQ ID NO: 992622 - DNA, 25 bp, Homo sapien
taggatttgcgagtcctctctccca

SEQ ID NO: 992623 - DNA, 25 bp, Homo sapien
cattggtaggttaggtttcacactt

SEQ ID NO: 992624 - DNA, 25 bp, Homo sapien
attcttttaccttctgaactagcgg

SEQ ID NO: 992625 - DNA, 25 bp, Homo sapien
actagcggttcattggtaggttagg

SEQ ID NO: 992626 - DNA, 25 bp, Homo sapien
taccttctgaactagcggttcattg

SEQ ID NO: 992627 - DNA, 25 bp, Homo sapien
ctgtgtgtcggcacttcctgtgaaa

SEQ ID NO: 992628 - DNA, 25 bp, Homo sapien
agctgtgtgtcggcacttcctgtga

SEQ ID NO: 992629 - DNA, 25 bp, Homo sapien
gctgtgtgtcggcacttcctgtgaa

SEQ ID NO: 992630 - DNA, 25 bp, Homo sapien
gaaaagctgaagcaagtggaacagt

SEQ ID NO: 992631 - DNA, 25 bp, Homo sapien
ctgaagcaagtggaacagttgcacc

SEQ ID NO: 992632 - DNA, 25 bp, Homo sapien
ccggttttgtgtttactcacctgtg

SEQ ID NO: 992633 - DNA, 25 bp, Homo sapien
tcctgtccctcttgcaaggggtgct

SEQ ID NO: 992634 - DNA, 25 bp, Homo sapien
cgcatattcacatcaagtacataga

SEQ ID NO: 992635 - DNA, 25 bp, Homo sapien
tattcgcatattcacatcaagtaca

SEQ ID NO: 992636 - DNA, 25 bp, Homo sapien
tattatagcagtattcgcatattca

SEQ ID NO: 992637 - DNA, 25 bp, Homo sapien
gcagtattcgcatattcacatcaag

SEQ ID NO: 992638 - DNA, 25 bp, Homo sapien
gactccacgagaaccttttcaatgc

SEQ ID NO: 992639 - DNA, 25 bp, Homo sapien
tcaatgcttgagtggaactgaagtg

SEQ ID NO: 992640 - DNA, 25 bp, Homo sapien
tgtggacaattaaaaagtccccatc

SEQ ID NO: 992641 - DNA, 25 bp, Homo sapien
caggtatagagaggtctgtggacaa

SEQ ID NO: 992642 - DNA, 25 bp, Homo sapien
tgctggagaatgaactcggctggcc

SEQ ID NO: 992643 - DNA, 25 bp, Homo sapien
taaaggctagccacttacgttggtc

SEQ ID NO: 992644 - DNA, 25 bp, Homo sapien
tacatgagaaccagcggtcacggtg

SEQ ID NO: 992645 - DNA, 25 bp, Homo sapien
tggatacactggcttacattggctg

SEQ ID NO: 992646 - DNA, 25 bp, Homo sapien
catgtgcaatcaagtcccgggaaga

SEQ ID NO: 992647 - DNA, 25 bp, Homo sapien
tcagtgtctaggttggcagcagtac

SEQ ID NO: 992648 - DNA, 25 bp, Homo sapien
gaatctgctcgtctcaaggtgctgg

SEQ ID NO: 992649 - DNA, 25 bp, Homo sapien
tacaagatgatcagtgacgcagcca

SEQ ID NO: 992650 - DNA, 25 bp, Homo sapien
aaattgctctattctctgtctggga

SEQ ID NO: 992651 - DNA, 25 bp, Homo sapien
gattcctgataagggaggttttcca

SEQ ID NO: 992652 - DNA, 25 bp, Homo sapien
attgcccaaccttttgaagaccagg

SEQ ID NO: 992653 - DNA, 25 bp, Homo sapien
gcagggcctggagttacaatctgaa

SEQ ID NO: 992654 - DNA, 25 bp, Homo sapien
tttgtcattatgctaagactcctca

SEQ ID NO: 992655 - DNA, 25 bp, Homo sapien
taggaatcagttggaagaaacaatg

SEQ ID NO: 992656 - DNA, 25 bp, Homo sapien
gactcctcatatttaggtagagaaa

SEQ ID NO: 992657 - DNA, 25 bp, Homo sapien
tagtgtggatccagcaagtaccatt

SEQ ID NO: 992658 - DNA, 25 bp, Homo sapien
gttagatactgccacggcattttgt

SEQ ID NO: 992659 - DNA, 25 bp, Homo sapien
aagtagccgcataagtagttggtga

SEQ ID NO: 992660 - DNA, 25 bp, Homo sapien
gccctggacaaagtagccgcataag

SEQ ID NO: 992661 - DNA, 25 bp, Homo sapien
cacggcattttgtgccctggacaaa

SEQ ID NO: 992662 - DNA, 25 bp, Homo sapien
caaaaggtcagaattcagggtctct

SEQ ID NO: 992663 - DNA, 25 bp, Homo sapien
cctgggactgggcagacttgtatgc

SEQ ID NO: 992664 - DNA, 25 bp, Homo sapien
tggtgattgaaactgccccatcaga

SEQ ID NO: 992665 - DNA, 25 bp, Homo sapien
tagcctgcttggttagacagacccc

SEQ ID NO: 992666 - DNA, 25 bp, Homo sapien
tgtacgaacacaagacttaagaaat

SEQ ID NO: 992667 - DNA, 25 bp, Homo sapien
cagatgctgccatgatggtggctac

SEQ ID NO: 992668 - DNA, 25 bp, Homo sapien
gcagcagagaattctggttcctaaa

SEQ ID NO: 992669 - DNA, 25 bp, Homo sapien
catcagcttatgcattggaaatttt

SEQ ID NO: 992670 - DNA, 25 bp, Homo sapien
cccggccgccattatttttcatcta

SEQ ID NO: 992671 - DNA, 25 bp, Homo sapien
ccggccgccattatttttcatctac

SEQ ID NO: 992672 - DNA, 25 bp, Homo sapien
tccatagtttctacttgtaactaaa

SEQ ID NO: 992673 - DNA, 25 bp, Homo sapien
attttgtccatagtttctacttgta

SEQ ID NO: 992674 - DNA, 25 bp, Homo sapien
aaagaccctgtgattttagacacct

SEQ ID NO: 992675 - DNA, 25 bp, Homo sapien
gcagagaacaactgggaagactgaa

SEQ ID NO: 992676 - DNA, 25 bp, Homo sapien
tcttatccaaatcaatcactacttg

SEQ ID NO: 992677 - DNA, 25 bp, Homo sapien
taccctttactccagaatggagtat

SEQ ID NO: 992678 - DNA, 25 bp, Homo sapien
aataaaagacatccacattttccaa

SEQ ID NO: 992679 - DNA, 25 bp, Homo sapien
aagaaacttagtttattgcttcaag

SEQ ID NO: 992680 - DNA, 25 bp, Homo sapien
aattattaaattctactgacttcct

SEQ ID NO: 992681 - DNA, 25 bp, Homo sapien
acttagtttattgcttcaaggaaat

SEQ ID NO: 992682 - DNA, 25 bp, Homo sapien
ttccttttgttgctactctcctgaa

SEQ ID NO: 992683 - DNA, 25 bp, Homo sapien
tttattcaatttaacatataagcaa

SEQ ID NO: 992684 - DNA, 25 bp, Homo sapien
ttttgttgctactctcctgaactct

SEQ ID NO: 992685 - DNA, 25 bp, Homo sapien
ccttttgttgctactctcctgaact

SEQ ID NO: 992686 - DNA, 25 bp, Homo sapien
gccagcagctcaatagaggcgagaa

SEQ ID NO: 992687 - DNA, 25 bp, Homo sapien
gggccagcagctcaatagaggcgag

SEQ ID NO: 992688 - DNA, 25 bp, Homo sapien
ggccagcagctcaatagaggcgaga

SEQ ID NO: 992689 - DNA, 25 bp, Homo sapien
ccagcagctcaatagaggcgagaat

SEQ ID NO: 992690 - DNA, 25 bp, Homo sapien
ttagagtctatactttcttctgtac

SEQ ID NO: 992691 - DNA, 25 bp, Homo sapien
cactgttagagtctatactttcttc

SEQ ID NO: 992692 - DNA, 25 bp, Homo sapien
accactgttagagtctatactttct

SEQ ID NO: 992693 - DNA, 25 bp, Homo sapien
ggataaccactgttagagtctatac

SEQ ID NO: 992694 - DNA, 25 bp, Homo sapien
atggcttttggacagttactccgta

SEQ ID NO: 992695 - DNA, 25 bp, Homo sapien
ttggggaaagagtggtctctcatct

SEQ ID NO: 992696 - DNA, 25 bp, Homo sapien
tccgtaccttactgagatctggaga

SEQ ID NO: 992697 - DNA, 25 bp, Homo sapien
tggacagttactccgtaccttactg

SEQ ID NO: 992698 - DNA, 25 bp, Homo sapien
tctcatggagagtaagcccttgcca

SEQ ID NO: 992699 - DNA, 25 bp, Homo sapien
ctctcatggagagtaagcccttgcc

SEQ ID NO: 992700 - DNA, 25 bp, Homo sapien
cctctcatggagagtaagcccttgc

SEQ ID NO: 992701 - DNA, 25 bp, Homo sapien
tattatactcccatggaggacaaag

SEQ ID NO: 992702 - DNA, 25 bp, Homo sapien
gtttgaataaggtaactgtccagtc

SEQ ID NO: 992703 - DNA, 25 bp, Homo sapien
taaggtaactgtccagtcatcaatt

SEQ ID NO: 992704 - DNA, 25 bp, Homo sapien
taactgtccagtcatcaattcatac

SEQ ID NO: 992705 - DNA, 25 bp, Homo sapien
gtccagtcatcaattcatacagaac

SEQ ID NO: 992706 - DNA, 25 bp, Homo sapien
gaatagtactacaattatcctcctt

SEQ ID NO: 992707 - DNA, 25 bp, Homo sapien
aacaagtagatgttaacacagatca

SEQ ID NO: 992708 - DNA, 25 bp, Homo sapien
gtagattatatctgtggatgtttac

SEQ ID NO: 992709 - DNA, 25 bp, Homo sapien
cttttgtttaggtagattatatctg

SEQ ID NO: 992710 - DNA, 25 bp, Homo sapien
gatttcactgtagctagaccaaaat

SEQ ID NO: 992711 - DNA, 25 bp, Homo sapien
tcaaactgatgggacccactccatc

SEQ ID NO: 992712 - DNA, 25 bp, Homo sapien
catccacaaaatggatccagacaac

SEQ ID NO: 992713 - DNA, 25 bp, Homo sapien
gacccactccatcgagatttcactg

SEQ ID NO: 992714 - DNA, 25 bp, Homo sapien
ctctgtggatgattgacttggcgtg

SEQ ID NO: 992715 - DNA, 25 bp, Homo sapien
tctctgtggatgattgacttggcgt

SEQ ID NO: 992716 - DNA, 25 bp, Homo sapien
gtctctgtggatgattgacttggcg

SEQ ID NO: 992717 - DNA, 25 bp, Homo sapien
tgttaatttttatctcattgaataa

SEQ ID NO: 992718 - DNA, 25 bp, Homo sapien
tgaataattctctttctgtaatcct

SEQ ID NO: 992719 - DNA, 25 bp, Homo sapien
tatctcattgaataattctctttct

SEQ ID NO: 992720 - DNA, 25 bp, Homo sapien
cattgaataattctctttctgtaat

SEQ ID NO: 992721 - DNA, 25 bp, Homo sapien
acctggcttcttttgcgcagcaaaa

SEQ ID NO: 992722 - DNA, 25 bp, Homo sapien
tacatttttgcgattagtaacaccc

SEQ ID NO: 992723 - DNA, 25 bp, Homo sapien
tgagattcacgcactggctgcatgc

SEQ ID NO: 992724 - DNA, 25 bp, Homo sapien
taggcttgggaaaccattgataatg

SEQ ID NO: 992725 - DNA, 25 bp, Homo sapien
caaatagatgcaataaaaaaatgat

SEQ ID NO: 992726 - DNA, 25 bp, Homo sapien
aatcaaatagatgcaataaaaaaat

SEQ ID NO: 992727 - DNA, 25 bp, Homo sapien
cagaaatacaaactaccatcagaga

SEQ ID NO: 992728 - DNA, 25 bp, Homo sapien
aaaggggatatcaccaccaatccca

SEQ ID NO: 992729 - DNA, 25 bp, Homo sapien
caaagtttgtacttgattcctggag

SEQ ID NO: 992730 - DNA, 25 bp, Homo sapien
cactatgttacttgatctttgcttt

SEQ ID NO: 992731 - DNA, 25 bp, Homo sapien
tcctggagataatcactatgttact

SEQ ID NO: 992732 - DNA, 25 bp, Homo sapien
gagataatcactatgttacttgatc

SEQ ID NO: 992733 - DNA, 25 bp, Homo sapien
taaatattatactgaaattataagg

SEQ ID NO: 992734 - DNA, 25 bp, Homo sapien
aaatattatactgaaattataaggc

SEQ ID NO: 992735 - DNA, 25 bp, Homo sapien
aagagtaggatattcacatgtcgtg

SEQ ID NO: 992736 - DNA, 25 bp, Homo sapien
cacaccactgggtaacaatagccag

SEQ ID NO: 992737 - DNA, 25 bp, Homo sapien
cctgtgcagtctgtcgtgcaatatc

SEQ ID NO: 992738 - DNA, 25 bp, Homo sapien
gagatggtgatacaagctggagccc

SEQ ID NO: 992739 - DNA, 25 bp, Homo sapien
gtactcctacttcatttttgaaggc

SEQ ID NO: 992740 - DNA, 25 bp, Homo sapien
cttgtaactgctgaggtgtaggtgc

SEQ ID NO: 992741 - DNA, 25 bp, Homo sapien
ttttgaaggcttgtaactgctgagg

SEQ ID NO: 992742 - DNA, 25 bp, Homo sapien
gctgtcacattcaacattttcactg

SEQ ID NO: 992743 - DNA, 25 bp, Homo sapien
tttcccttgtagactgttccaaatg

SEQ ID NO: 992744 - DNA, 25 bp, Homo sapien
atgccactttcccttgtagactgtt

SEQ ID NO: 992745 - DNA, 25 bp, Homo sapien
ctttgtcccactgtaatctgcccat

SEQ ID NO: 992746 - DNA, 25 bp, Homo sapien
tccaaatgatccagatccaattctt

SEQ ID NO: 992747 - DNA, 25 bp, Homo sapien
ttcgattcctgtcttctgaggatga

SEQ ID NO: 992748 - DNA, 25 bp, Homo sapien
cgattcctgtcttctgaggatgaag

SEQ ID NO: 992749 - DNA, 25 bp, Homo sapien
cattcgattcctgtcttctgaggat

SEQ ID NO: 992750 - DNA, 25 bp, Homo sapien
gattcctgtcttctgaggatgaaga

SEQ ID NO: 992751 - DNA, 25 bp, Homo sapien
tctgtaaggctttcacgttagttag

SEQ ID NO: 992752 - DNA, 25 bp, Homo sapien
gctttcacgttagttagtgagccag

SEQ ID NO: 992753 - DNA, 25 bp, Homo sapien
ttcctttctcgctgaggtcctggag

SEQ ID NO: 992754 - DNA, 25 bp, Homo sapien
tagttagtgagccaggtaatgaggc

SEQ ID NO: 992755 - DNA, 25 bp, Homo sapien
tatttccgaagacagcgcatcagct

SEQ ID NO: 992756 - DNA, 25 bp, Homo sapien
tggtatttccgaagacagcgcatca

SEQ ID NO: 992757 - DNA, 25 bp, Homo sapien
aagacagcgcatcagctggttcaaa

SEQ ID NO: 992758 - DNA, 25 bp, Homo sapien
cactatttcactggggacagaatgt

SEQ ID NO: 992759 - DNA, 25 bp, Homo sapien
cacgaaatccttggtctctaatcaa

SEQ ID NO: 992760 - DNA, 25 bp, Homo sapien
tccatcaccacgaaatccttggtct

SEQ ID NO: 992761 - DNA, 25 bp, Homo sapien
tcaccacgaaatccttggtctctaa

SEQ ID NO: 992762 - DNA, 25 bp, Homo sapien
gaaatccttggtctctaatcaagtc

SEQ ID NO: 992763 - DNA, 25 bp, Homo sapien
agttctagcaatgctggatacttac

SEQ ID NO: 992764 - DNA, 25 bp, Homo sapien
ttttttagttctagcaatgctggat

SEQ ID NO: 992765 - DNA, 25 bp, Homo sapien
ttttagttctagcaatgctggatac

SEQ ID NO: 992766 - DNA, 25 bp, Homo sapien
tatttctgatctaagttataattat

SEQ ID NO: 992767 - DNA, 25 bp, Homo sapien
tattgacaggttctattgtgtttat

SEQ ID NO: 992768 - DNA, 25 bp, Homo sapien
cccaaattgatttcgatgatcttca

SEQ ID NO: 992769 - DNA, 25 bp, Homo sapien
ggatcggtctcgttgcccaaattga

SEQ ID NO: 992770 - DNA, 25 bp, Homo sapien
agctgatgaggatcggtctcgttgc

SEQ ID NO: 992771 - DNA, 25 bp, Homo sapien
cattaaaaacctagcagtaatgact

SEQ ID NO: 992772 - DNA, 25 bp, Homo sapien
aagataagattcagagtaacgatat

SEQ ID NO: 992773 - DNA, 25 bp, Homo sapien
taaagcattaaaaacctagcagtaa

SEQ ID NO: 992774 - DNA, 25 bp, Homo sapien
cagagtaacgatataaaggtaataa

SEQ ID NO: 992775 - DNA, 25 bp, Homo sapien
cggcccgctacaagctccacctcct

SEQ ID NO: 992776 - DNA, 25 bp, Homo sapien
tgacgtgatctcggcccgctacaag

SEQ ID NO: 992777 - DNA, 25 bp, Homo sapien
gggttcacgccatcctcctgactcc

SEQ ID NO: 992778 - DNA, 25 bp, Homo sapien
cacgccatcctcctgactcctgagt

SEQ ID NO: 992779 - DNA, 25 bp, Homo sapien
caagttagtaatctgcttaaagacc

SEQ ID NO: 992780 - DNA, 25 bp, Homo sapien
caaggtgtagactcaaaatgatctg

SEQ ID NO: 992781 - DNA, 25 bp, Homo sapien
taggcccgttcagattgtagtaatt

SEQ ID NO: 992782 - DNA, 25 bp, Homo sapien
caacaacatcctaggttggccttct

SEQ ID NO: 992783 - DNA, 25 bp, Homo sapien
cctgtggtattgggtggtgttcaaa

SEQ ID NO: 992784 - DNA, 25 bp, Homo sapien
gatgatccagatgttagggcagtct

SEQ ID NO: 992785 - DNA, 25 bp, Homo sapien
ttcaaagaacttggagacaaacagc

SEQ ID NO: 992786 - DNA, 25 bp, Homo sapien
tgctaaggacgcctcttcctgtggt

SEQ ID NO: 992787 - DNA, 25 bp, Homo sapien
gaacttctgtactacaacgctggtg

SEQ ID NO: 992788 - DNA, 25 bp, Homo sapien
gtggaacttctgtactacaacgctg

SEQ ID NO: 992789 - DNA, 25 bp, Homo sapien
aacttctgtactacaacgctggtga

SEQ ID NO: 992790 - DNA, 25 bp, Homo sapien
tggaacttctgtactacaacgctgg

SEQ ID NO: 992791 - DNA, 25 bp, Homo sapien
gagccaccgtgtgcagcttgtgtct

SEQ ID NO: 992792 - DNA, 25 bp, Homo sapien
aatagaagtttatagaataagcaca

SEQ ID NO: 992793 - DNA, 25 bp, Homo sapien
ccgtgtgcagcttgtgtcttcattt

SEQ ID NO: 992794 - DNA, 25 bp, Homo sapien
atgcgtctgcctaggcctcctcaag

SEQ ID NO: 992795 - DNA, 25 bp, Homo sapien
ttacatcctgatatataatacattc

SEQ ID NO: 992796 - DNA, 25 bp, Homo sapien
ccatttgtctctggatatacaagaa

SEQ ID NO: 992797 - DNA, 25 bp, Homo sapien
ctcggcctctcaagggattagaggc

SEQ ID NO: 992798 - DNA, 25 bp, Homo sapien
ctgttccattaagaatagaaagtta

SEQ ID NO: 992799 - DNA, 25 bp, Homo sapien
tatcagtgtcccaaccaattggttt

SEQ ID NO: 992800 - DNA, 25 bp, Homo sapien
atcagtgtcccaaccaattggtttc

SEQ ID NO: 992801 - DNA, 25 bp, Homo sapien
cagtgtcccaaccaattggtttctt

SEQ ID NO: 992802 - DNA, 25 bp, Homo sapien
atatcagtgtcccaaccaattggtt

SEQ ID NO: 992803 - DNA, 25 bp, Homo sapien
tgaaaaatgtagacacaagcctttc

SEQ ID NO: 992804 - DNA, 25 bp, Homo sapien
atgtagacacaagcctttcttggtt

SEQ ID NO: 992805 - DNA, 25 bp, Homo sapien
aaatgtagacacaagcctttcttgg

SEQ ID NO: 992806 - DNA, 25 bp, Homo sapien
aaaatgtagacacaagcctttcttg

SEQ ID NO: 992807 - DNA, 25 bp, Homo sapien
tcctcatatggcctacagtatttct

SEQ ID NO: 992808 - DNA, 25 bp, Homo sapien
gagggtcttggaacaatgttagaca

SEQ ID NO: 992809 - DNA, 25 bp, Homo sapien
gatcaaagtaacaaaccctacagtc

SEQ ID NO: 992810 - DNA, 25 bp, Homo sapien
cacactctgaatggttcaaaaattg

SEQ ID NO: 992811 - DNA, 25 bp, Homo sapien
ctctgggattagacctctcatcatc

SEQ ID NO: 992812 - DNA, 25 bp, Homo sapien
actctgggattagacctctcatcat

SEQ ID NO: 992813 - DNA, 25 bp, Homo sapien
cactctgggattagacctctcatca

SEQ ID NO: 992814 - DNA, 25 bp, Homo sapien
tacaaatctggagccctcaatggcc

SEQ ID NO: 992815 - DNA, 25 bp, Homo sapien
aatctgttatagaatgaagctaaca

SEQ ID NO: 992816 - DNA, 25 bp, Homo sapien
ttatagaatgaagctaacatacgaa

SEQ ID NO: 992817 - DNA, 25 bp, Homo sapien
cccacaggcaaatctgagttacttg

SEQ ID NO: 992818 - DNA, 25 bp, Homo sapien
gaaagcctcaaatgtgctctctgaa

SEQ ID NO: 992819 - DNA, 25 bp, Homo sapien
catagggtttgtggaatctgaagcc

SEQ ID NO: 992820 - DNA, 25 bp, Homo sapien
ggtattcttaacttttgggcatgca

SEQ ID NO: 992821 - DNA, 25 bp, Homo sapien
aagcccacgctgagttcactgaact

SEQ ID NO: 992822 - DNA, 25 bp, Homo sapien
gaatacagtttattaggcgccaaga

SEQ ID NO: 992823 - DNA, 25 bp, Homo sapien
tacagtttattaggcgccaagaatg

SEQ ID NO: 992824 - DNA, 25 bp, Homo sapien
gtttattaggcgccaagaatgtctt

SEQ ID NO: 992825 - DNA, 25 bp, Homo sapien
tttattaggcgccaagaatgtcttg

SEQ ID NO: 992826 - DNA, 25 bp, Homo sapien
tgagtaagtgaaagtgtttttacaa

SEQ ID NO: 992827 - DNA, 25 bp, Homo sapien
tgtttttacaaactgtaccaatatg

SEQ ID NO: 992828 - DNA, 25 bp, Homo sapien
atgagtaagtgaaagtgtttttaca

SEQ ID NO: 992829 - DNA, 25 bp, Homo sapien
ggtaccgtttcagacttttcatcag

SEQ ID NO: 992830 - DNA, 25 bp, Homo sapien
gaagcatcagtcagtattgccctat

SEQ ID NO: 992831 - DNA, 25 bp, Homo sapien
gagggaaggtctagcatttactcta

SEQ ID NO: 992832 - DNA, 25 bp, Homo sapien
gcttgattatagcataactagggca

SEQ ID NO: 992833 - DNA, 25 bp, Homo sapien
tgcctggctaatttttatactttta

SEQ ID NO: 992834 - DNA, 25 bp, Homo sapien
atgcctggctaatttttatactttt

SEQ ID NO: 992835 - DNA, 25 bp, Homo sapien
cttttaatagaaacaggatttcatc

SEQ ID NO: 992836 - DNA, 25 bp, Homo sapien
tacttttaatagaaacaggatttca

SEQ ID NO: 992837 - DNA, 25 bp, Homo sapien
tattcttgttatctccacttctttc

SEQ ID NO: 992838 - DNA, 25 bp, Homo sapien
gtgtctctagagcattcagttttat

SEQ ID NO: 992839 - DNA, 25 bp, Homo sapien
attcttgttatctccacttctttct

SEQ ID NO: 992840 - DNA, 25 bp, Homo sapien
ttttgtgtctctagagcattcagtt

SEQ ID NO: 992841 - DNA, 25 bp, Homo sapien
ctccaataaccccaattaacagatt

SEQ ID NO: 992842 - DNA, 25 bp, Homo sapien
tacaactactctaaacaatacatga

SEQ ID NO: 992843 - DNA, 25 bp, Homo sapien
gaaatagctaaatgagatacaacta

SEQ ID NO: 992844 - DNA, 25 bp, Homo sapien
gggaatatccccatccctccaataa

SEQ ID NO: 992845 - DNA, 25 bp, Homo sapien
caaagtgctggcaaaaaacaacaga

SEQ ID NO: 992846 - DNA, 25 bp, Homo sapien
aacaacagatgctggcaaagctgca

SEQ ID NO: 992847 - DNA, 25 bp, Homo sapien
cccaaagtgctggcaaaaaacaaca

SEQ ID NO: 992848 - DNA, 25 bp, Homo sapien
agagaaaagggaaggcttgtacact

SEQ ID NO: 992849 - DNA, 25 bp, Homo sapien
tcagatacatggcttacaaagatta

SEQ ID NO: 992850 - DNA, 25 bp, Homo sapien
caataaactaatacgttcattatag

SEQ ID NO: 992851 - DNA, 25 bp, Homo sapien
tattctacatgtccttgatcagata

SEQ ID NO: 992852 - DNA, 25 bp, Homo sapien
caaagattatcaatctgtggtttct

SEQ ID NO: 992853 - DNA, 25 bp, Homo sapien
tacttcagatttgtaccctctactg

SEQ ID NO: 992854 - DNA, 25 bp, Homo sapien
caggagaaccctctaaagcatcagg

SEQ ID NO: 992855 - DNA, 25 bp, Homo sapien
ccatctcaaaaaagcgtgggtttgc

SEQ ID NO: 992856 - DNA, 25 bp, Homo sapien
tacacatgtaaaaactctgagcgat

SEQ ID NO: 992857 - DNA, 25 bp, Homo sapien
tacagcaagtatccaggtcaatctc

SEQ ID NO: 992858 - DNA, 25 bp, Homo sapien
tcagtccctagatacccaaagtgtc

SEQ ID NO: 992859 - DNA, 25 bp, Homo sapien
tgttgacagtcagttgcccctatct

SEQ ID NO: 992860 - DNA, 25 bp, Homo sapien
taagatagtgacctcaactcctaga

SEQ ID NO: 992861 - DNA, 25 bp, Homo sapien
tggaaggtgatgctcctaaagagag

SEQ ID NO: 992862 - DNA, 25 bp, Homo sapien
gctggtcagaagtgtaagtcacaac

SEQ ID NO: 992863 - DNA, 25 bp, Homo sapien
caacctggaacttgggactagcatc

SEQ ID NO: 992864 - DNA, 25 bp, Homo sapien
tccttgatttatagccagctggtca

SEQ ID NO: 992865 - DNA, 25 bp, Homo sapien
tcacaaaattactaagttgagtgga

SEQ ID NO: 992866 - DNA, 25 bp, Homo sapien
cacaaaattactaagttgagtggaa

SEQ ID NO: 992867 - DNA, 25 bp, Homo sapien
tgactgtggttcaagtttggcagac

SEQ ID NO: 992868 - DNA, 25 bp, Homo sapien
aactagtgcttagacatgactgtgg

SEQ ID NO: 992869 - DNA, 25 bp, Homo sapien
gaagaatgagtcttacctgacacac

SEQ ID NO: 992870 - DNA, 25 bp, Homo sapien
cagggtacgctgttccaatggttaa

SEQ ID NO: 992871 - DNA, 25 bp, Homo sapien
taaggaatatagactttgccaccaa

SEQ ID NO: 992872 - DNA, 25 bp, Homo sapien
caacaactgatctgtctgaaaaata

SEQ ID NO: 992873 - DNA, 25 bp, Homo sapien
acatatttttcattcctgtatgaca

SEQ ID NO: 992874 - DNA, 25 bp, Homo sapien
tgcctctatttgcatgacctctgag

SEQ ID NO: 992875 - DNA, 25 bp, Homo sapien
gtagcactgaaaggctagaagagga

SEQ ID NO: 992876 - DNA, 25 bp, Homo sapien
tggggttgctccgtgccacatctgt

SEQ ID NO: 992877 - DNA, 25 bp, Homo sapien
tgctccgtgccacatctgtgggatt

SEQ ID NO: 992878 - DNA, 25 bp, Homo sapien
agcactgaaaggctagaagaggaag

SEQ ID NO: 992879 - DNA, 25 bp, Homo sapien
aagcagacttatattcaatccggac

SEQ ID NO: 992880 - DNA, 25 bp, Homo sapien
ccggactttgtcctgacattaacaa

SEQ ID NO: 992881 - DNA, 25 bp, Homo sapien
tattcaatccggactttgtcctgac

SEQ ID NO: 992882 - DNA, 25 bp, Homo sapien
ctttgtcctgacattaacaaaagag

SEQ ID NO: 992883 - DNA, 25 bp, Homo sapien
ttatgctccccaccaaatttgtcca

SEQ ID NO: 992884 - DNA, 25 bp, Homo sapien
gattatgctccccaccaaatttgtc

SEQ ID NO: 992885 - DNA, 25 bp, Homo sapien
tatgctccccaccaaatttgtccaa

SEQ ID NO: 992886 - DNA, 25 bp, Homo sapien
attatgctccccaccaaatttgtcc

SEQ ID NO: 992887 - DNA, 25 bp, Homo sapien
ctagattgtttgtggatctacaccc

SEQ ID NO: 992888 - DNA, 25 bp, Homo sapien
ctgaaatgtgcatgggcatgataaa

SEQ ID NO: 992889 - DNA, 25 bp, Homo sapien
aatgtgcatgggcatgataaacagt

SEQ ID NO: 992890 - DNA, 25 bp, Homo sapien
gtttgtggatctacacccacagcaa

SEQ ID NO: 992891 - DNA, 25 bp, Homo sapien
ggccactcagctagtaaattctaga

SEQ ID NO: 992892 - DNA, 25 bp, Homo sapien
tacggtgcgccaagaatgaatgcag

SEQ ID NO: 992893 - DNA, 25 bp, Homo sapien
ttttatagacgagcacattgtggca

SEQ ID NO: 992894 - DNA, 25 bp, Homo sapien
tagtgaagaatggattacggtgcgc

SEQ ID NO: 992895 - DNA, 25 bp, Homo sapien
gagcagtagtgcgatgttggttcac

SEQ ID NO: 992896 - DNA, 25 bp, Homo sapien
cagcaaacgcatttttaattgggaa

SEQ ID NO: 992897 - DNA, 25 bp, Homo sapien
gttggttcaccgcagactccgcgtc

SEQ ID NO: 992898 - DNA, 25 bp, Homo sapien
tgcactgccagacattgttgatgcc

SEQ ID NO: 992899 - DNA, 25 bp, Homo sapien
tcctgcgttttggtacaactcctgg

SEQ ID NO: 992900 - DNA, 25 bp, Homo sapien
catgacagcctgttaggactgtgcg

SEQ ID NO: 992901 - DNA, 25 bp, Homo sapien
caaaaccctgggacaccattccaga

SEQ ID NO: 992902 - DNA, 25 bp, Homo sapien
aataaacaactgaggcatgacagcc

SEQ ID NO: 992903 - DNA, 25 bp, Homo sapien
cctggactagtttactagaaccaag

SEQ ID NO: 992904 - DNA, 25 bp, Homo sapien
aacatgcctggactagtttactaga

SEQ ID NO: 992905 - DNA, 25 bp, Homo sapien
catgcctggactagtttactagaac

SEQ ID NO: 992906 - DNA, 25 bp, Homo sapien
tgtgcctttctatgagaacatgcct

SEQ ID NO: 992907 - DNA, 25 bp, Homo sapien
tgataaaagggagtcatcctcgact

SEQ ID NO: 992908 - DNA, 25 bp, Homo sapien
tatcccgggaggcacattaaccaga

SEQ ID NO: 992909 - DNA, 25 bp, Homo sapien
tcaaaggatgtaagagccaaaaatc

SEQ ID NO: 992910 - DNA, 25 bp, Homo sapien
taaaggtacagtcaataggatttgc

SEQ ID NO: 992911 - DNA, 25 bp, Homo sapien
gtctctagtgatatcacccttctga

SEQ ID NO: 992912 - DNA, 25 bp, Homo sapien
ttccaagtctctagtgatatcaccc

SEQ ID NO: 992913 - DNA, 25 bp, Homo sapien
gatatcacccttctgacttaggtta

SEQ ID NO: 992914 - DNA, 25 bp, Homo sapien
agtgatatcacccttctgacttagg

SEQ ID NO: 992915 - DNA, 25 bp, Homo sapien
gggtgcttggagggatacaaaatta

SEQ ID NO: 992916 - DNA, 25 bp, Homo sapien
tgggtgcttggagggatacaaaatt

SEQ ID NO: 992917 - DNA, 25 bp, Homo sapien
ggtgcttggagggatacaaaattaa

SEQ ID NO: 992918 - DNA, 25 bp, Homo sapien
ggtgggtcttgcatgttgcgcaatc

SEQ ID NO: 992919 - DNA, 25 bp, Homo sapien
tgcatgttgcgcaatctagtttcaa

SEQ ID NO: 992920 - DNA, 25 bp, Homo sapien
tgatactattatatcagcaaagaaa

SEQ ID NO: 992921 - DNA, 25 bp, Homo sapien
atttacaaatctctagcaagactga

SEQ ID NO: 992922 - DNA, 25 bp, Homo sapien
gctctaccttgtcttatcttactgg

SEQ ID NO: 992923 - DNA, 25 bp, Homo sapien
tagtcacaccatatgacaccacatg

SEQ ID NO: 992924 - DNA, 25 bp, Homo sapien
tcttactggatcctatttagtcaca

SEQ ID NO: 992925 - DNA, 25 bp, Homo sapien
taacattttaaccttgaaacatgga

SEQ ID NO: 992926 - DNA, 25 bp, Homo sapien
ggaatgtagtgcatgaccacagctc

SEQ ID NO: 992927 - DNA, 25 bp, Homo sapien
aggaccctagaaagcttttatctat

SEQ ID NO: 992928 - DNA, 25 bp, Homo sapien
tctatgtagtttatcgctatcagta

SEQ ID NO: 992929 - DNA, 25 bp, Homo sapien
gtcttgctatgttggatcttcctgc

SEQ ID NO: 992930 - DNA, 25 bp, Homo sapien
tataggctcctatactacaaagtgg

SEQ ID NO: 992931 - DNA, 25 bp, Homo sapien
ctgatgtacaggcaaggtcaaaacc

SEQ ID NO: 992932 - DNA, 25 bp, Homo sapien
gagagtaccacgcagagaaaatgag

SEQ ID NO: 992933 - DNA, 25 bp, Homo sapien
tacaacaccatgatccttggatgcg

SEQ ID NO: 992934 - DNA, 25 bp, Homo sapien
aaatcggtccatgggaatctggtag

SEQ ID NO: 992935 - DNA, 25 bp, Homo sapien
taagaagtagcccagaaatcggtcc

SEQ ID NO: 992936 - DNA, 25 bp, Homo sapien
gaagagactggcattaccaaaacca

SEQ ID NO: 992937 - DNA, 25 bp, Homo sapien
tctaatggtcacgtggaagagtgaa

SEQ ID NO: 992938 - DNA, 25 bp, Homo sapien
tcatacatattgatgcaggcaggag

SEQ ID NO: 992939 - DNA, 25 bp, Homo sapien
tgtctaaagcaatggctgactctca

SEQ ID NO: 992940 - DNA, 25 bp, Homo sapien
aatgatatctactgcactactgagg

SEQ ID NO: 992941 - DNA, 25 bp, Homo sapien
gaggtagtcactatcactcactttt

SEQ ID NO: 992942 - DNA, 25 bp, Homo sapien
caagactaaaatactgtggtttcca

SEQ ID NO: 992943 - DNA, 25 bp, Homo sapien
tagtaggtagcctctaaactggctc

SEQ ID NO: 992944 - DNA, 25 bp, Homo sapien
caaactccccttgaatgtaagctgg

SEQ ID NO: 992945 - DNA, 25 bp, Homo sapien
tgaggcctgctacatccacatgagg

SEQ ID NO: 992946 - DNA, 25 bp, Homo sapien
gaactgtgagagaaatgttatttca

SEQ ID NO: 992947 - DNA, 25 bp, Homo sapien
cagaaacatccaattaagccactct

SEQ ID NO: 992948 - DNA, 25 bp, Homo sapien
gctaagtcttcggtaattacacaac

SEQ ID NO: 992949 - DNA, 25 bp, Homo sapien
gtattgaatctttaacctacaagaa

SEQ ID NO: 992950 - DNA, 25 bp, Homo sapien
aagtgttcacttctggaatttctat

SEQ ID NO: 992951 - DNA, 25 bp, Homo sapien
acctcccagtttcacgccattctcc

SEQ ID NO: 992952 - DNA, 25 bp, Homo sapien
tctatttggttttttgcaaatctat

SEQ ID NO: 992953 - DNA, 25 bp, Homo sapien
taaagtgttcacttctggaatttct

SEQ ID NO: 992954 - DNA, 25 bp, Homo sapien
cccttaacctaacgatagagtcact

SEQ ID NO: 992955 - DNA, 25 bp, Homo sapien
acatggatatgggagtgtgtagaca

SEQ ID NO: 992956 - DNA, 25 bp, Homo sapien
ttcaaccttccctgcaatcacatgg

SEQ ID NO: 992957 - DNA, 25 bp, Homo sapien
tgtgtagacagttcagttgtttcac

SEQ ID NO: 992958 - DNA, 25 bp, Homo sapien
gagtactcctgataaagttctgaac

SEQ ID NO: 992959 - DNA, 25 bp, Homo sapien
gactgaagagtatttgcgtcaccaa

SEQ ID NO: 992960 - DNA, 25 bp, Homo sapien
aagtgacactgccatcaattacgtg

SEQ ID NO: 992961 - DNA, 25 bp, Homo sapien
gcagttacaactgcagactgaagag

SEQ ID NO: 992962 - DNA, 25 bp, Homo sapien
gaccagtccttgaggtaatcttgta

SEQ ID NO: 992963 - DNA, 25 bp, Homo sapien
agtccttgaggtaatcttgtaacac

SEQ ID NO: 992964 - DNA, 25 bp, Homo sapien
tgaggtaatcttgtaacacccaatt

SEQ ID NO: 992965 - DNA, 25 bp, Homo sapien
ccttgaggtaatcttgtaacaccca

SEQ ID NO: 992966 - DNA, 25 bp, Homo sapien
gaaacgttttactctctaatggctc

SEQ ID NO: 992967 - DNA, 25 bp, Homo sapien
aaataggcaaggcacattcccgaca

SEQ ID NO: 992968 - DNA, 25 bp, Homo sapien
ccttctcaagtgaggcctaccctga

SEQ ID NO: 992969 - DNA, 25 bp, Homo sapien
caccaatatggcctagataactgaa

SEQ ID NO: 992970 - DNA, 25 bp, Homo sapien
tttctactgttattaagaaagctta

SEQ ID NO: 992971 - DNA, 25 bp, Homo sapien
agtctttctactgttattaagaaag

SEQ ID NO: 992972 - DNA, 25 bp, Homo sapien
tacctctttcccatgaattgcttac

SEQ ID NO: 992973 - DNA, 25 bp, Homo sapien
gcttacctctttcccatgaattgct

SEQ ID NO: 992974 - DNA, 25 bp, Homo sapien
tcaaggattggtacatgggaactgc

SEQ ID NO: 992975 - DNA, 25 bp, Homo sapien
gggaactgctcaagacatgtgccaa

SEQ ID NO: 992976 - DNA, 25 bp, Homo sapien
gggtacagttccaaacaatctggcc

SEQ ID NO: 992977 - DNA, 25 bp, Homo sapien
tacttaaattcagctagcctagagg

SEQ ID NO: 992978 - DNA, 25 bp, Homo sapien
ctcctccggaatggcagggtccgca

SEQ ID NO: 992979 - DNA, 25 bp, Homo sapien
tcgggctccatgtccccgttgaaca

SEQ ID NO: 992980 - DNA, 25 bp, Homo sapien
gggctccatgtccccgttgaacaga

SEQ ID NO: 992981 - DNA, 25 bp, Homo sapien
cctccggaatggcagggtccgcagc

SEQ ID NO: 992982 - DNA, 25 bp, Homo sapien
gccaccaccgccaccgctcagcgcc

SEQ ID NO: 992983 - DNA, 25 bp, Homo sapien
tggcccggctccgcgccgccaccac

SEQ ID NO: 992984 - DNA, 25 bp, Homo sapien
accaccgccaccgctcagcgccgcc

SEQ ID NO: 992985 - DNA, 25 bp, Homo sapien
ctggcccggctccgcgccgccacca

SEQ ID NO: 992986 - DNA, 25 bp, Homo sapien
gggcccgagcggccgctgtcgggcg

SEQ ID NO: 992987 - DNA, 25 bp, Homo sapien
gcccgagcggccgctgtcgggcggg

SEQ ID NO: 992988 - DNA, 25 bp, Homo sapien
cccgagcggccgctgtcgggcgggg

SEQ ID NO: 992989 - DNA, 25 bp, Homo sapien
ggcccgagcggccgctgtcgggcgg

SEQ ID NO: 992990 - DNA, 25 bp, Homo sapien
tcagcctgttctgtaatgtgggatt

SEQ ID NO: 992991 - DNA, 25 bp, Homo sapien
gctccgccgtttccatggctccggt

SEQ ID NO: 992992 - DNA, 25 bp, Homo sapien
tgggatttactagaagagcagggct

SEQ ID NO: 992993 - DNA, 25 bp, Homo sapien
gcgctctcacactttgcctccgctc

SEQ ID NO: 992994 - DNA, 25 bp, Homo sapien
ggcctccactgcatgcataaataga

SEQ ID NO: 992995 - DNA, 25 bp, Homo sapien
catgcataaatagatacaagtcctt

SEQ ID NO: 992996 - DNA, 25 bp, Homo sapien
actgcatgcataaatagatacaagt

SEQ ID NO: 992997 - DNA, 25 bp, Homo sapien
tgcatgcataaatagatacaagtcc

SEQ ID NO: 992998 - DNA, 25 bp, Homo sapien
tgagctctacaattcccactttctg

SEQ ID NO: 992999 - DNA, 25 bp, Homo sapien
aaagcccttacctcctgatattgga

SEQ ID NO: 993000 - DNA, 25 bp, Homo sapien
ctacttactagatgtctgcacctga

SEQ ID NO: 993001 - DNA, 25 bp, Homo sapien
caacagaaatgatctctcagagttc

SEQ ID NO: 993002 - DNA, 25 bp, Homo sapien
tggcaatgtgcaaacaaatggctct

SEQ ID NO: 993003 - DNA, 25 bp, Homo sapien
agcccacaaagggtgctgtcagcat

SEQ ID NO: 993004 - DNA, 25 bp, Homo sapien
tctgcaagtatcagggggctacaac

SEQ ID NO: 993005 - DNA, 25 bp, Homo sapien
caaccttggcctgatagtgcggagc

SEQ ID NO: 993006 - DNA, 25 bp, Homo sapien
tatcttttcccactaccaactatca

SEQ ID NO: 993007 - DNA, 25 bp, Homo sapien
atcttttcccactaccaactatcac

SEQ ID NO: 993008 - DNA, 25 bp, Homo sapien
tttaaaaggtatcttagatccctga

SEQ ID NO: 993009 - DNA, 25 bp, Homo sapien
tccattgttctgttccaatttcaca

SEQ ID NO: 993010 - DNA, 25 bp, Homo sapien
cattgttctgttccaatttcacact

SEQ ID NO: 993011 - DNA, 25 bp, Homo sapien
taaaaggtatcttagatccctgagt

SEQ ID NO: 993012 - DNA, 25 bp, Homo sapien
taatggccactgccttgaggcattc

SEQ ID NO: 993013 - DNA, 25 bp, Homo sapien
caagaggacaacatccttaatctca

SEQ ID NO: 993014 - DNA, 25 bp, Homo sapien
ggtgttgcctctttgcctggcaaag

SEQ ID NO: 993015 - DNA, 25 bp, Homo sapien
cgtcaagaggacaacatccttaatc

SEQ ID NO: 993016 - DNA, 25 bp, Homo sapien
gaacgtcaagaggacaacatcctta

SEQ ID NO: 993017 - DNA, 25 bp, Homo sapien
gatgtaaagggagaagggccctcca

SEQ ID NO: 993018 - DNA, 25 bp, Homo sapien
ttgatgtaaagggagaagggccctc

SEQ ID NO: 993019 - DNA, 25 bp, Homo sapien
tgatgtaaagggagaagggccctcc

SEQ ID NO: 993020 - DNA, 25 bp, Homo sapien
agctggcctcctcacagtattttcg

SEQ ID NO: 993021 - DNA, 25 bp, Homo sapien
cgtagtataagtctgaaattttgtc

SEQ ID NO: 993022 - DNA, 25 bp, Homo sapien
taatttggtgagtagctttctaaat

SEQ ID NO: 993023 - DNA, 25 bp, Homo sapien
tcctcagatcttatcacaatgaata

SEQ ID NO: 993024 - DNA, 25 bp, Homo sapien
taataaggagcactaaggtgatctt

SEQ ID NO: 993025 - DNA, 25 bp, Homo sapien
attcatagaggaaacaatcttccaa

SEQ ID NO: 993026 - DNA, 25 bp, Homo sapien
aaggagcactaaggtgatcttcccc

SEQ ID NO: 993027 - DNA, 25 bp, Homo sapien
tccaaataataaggagcactaaggt

SEQ ID NO: 993028 - DNA, 25 bp, Homo sapien
tcagaattctctggacagtttcatt

SEQ ID NO: 993029 - DNA, 25 bp, Homo sapien
ttcagaattctctggacagtttcat

SEQ ID NO: 993030 - DNA, 25 bp, Homo sapien
catagcacatcgtgaatggaaggct

SEQ ID NO: 993031 - DNA, 25 bp, Homo sapien
tgtcatgcaagatcactaggagcgt

SEQ ID NO: 993032 - DNA, 25 bp, Homo sapien
catagggccaattctactggagcac

SEQ ID NO: 993033 - DNA, 25 bp, Homo sapien
tgtgacttggtcagtacgagcaact

SEQ ID NO: 993034 - DNA, 25 bp, Homo sapien
cttaaccgcagtcatatattgctta

SEQ ID NO: 993035 - DNA, 25 bp, Homo sapien
aaccgcagtcatatattgcttaaca

SEQ ID NO: 993036 - DNA, 25 bp, Homo sapien
taaccgcagtcatatattgcttaac

SEQ ID NO: 993037 - DNA, 25 bp, Homo sapien
ttaaccgcagtcatatattgcttaa

SEQ ID NO: 993038 - DNA, 25 bp, Homo sapien
gtatgttaatatctctaagatttac

SEQ ID NO: 993039 - DNA, 25 bp, Homo sapien
tgtatgttaatatctctaagattta

SEQ ID NO: 993040 - DNA, 25 bp, Homo sapien
cattcagttccacaggttgagatat

SEQ ID NO: 993041 - DNA, 25 bp, Homo sapien
ccacaggttgagatatgttacttaa

SEQ ID NO: 993042 - DNA, 25 bp, Homo sapien
tacactcgtcggaggaagcagaact

SEQ ID NO: 993043 - DNA, 25 bp, Homo sapien
ccaaagacttctgggatgacttgga

SEQ ID NO: 993044 - DNA, 25 bp, Homo sapien
catcatttgtagtgatcacattgcc

SEQ ID NO: 993045 - DNA, 25 bp, Homo sapien
tagtgccaactgatgcagtgctatc

SEQ ID NO: 993046 - DNA, 25 bp, Homo sapien
aactgatgcagtgctatctcctgct

SEQ ID NO: 993047 - DNA, 25 bp, Homo sapien
gagccagcaatagtgccaactgatg

SEQ ID NO: 993048 - DNA, 25 bp, Homo sapien
atgttgctgaaccagatctcagcct

SEQ ID NO: 993049 - DNA, 25 bp, Homo sapien
tgcttgtcatatccctgacaggcac

SEQ ID NO: 993050 - DNA, 25 bp, Homo sapien
ctgcttgtcatatccctgacaggca

SEQ ID NO: 993051 - DNA, 25 bp, Homo sapien
tgatgttgctgaaccagatctcagc

SEQ ID NO: 993052 - DNA, 25 bp, Homo sapien
gggtgccctgctccatggtccaaac

SEQ ID NO: 993053 - DNA, 25 bp, Homo sapien
gctggcagccctggtgggtgccctg

SEQ ID NO: 993054 - DNA, 25 bp, Homo sapien
agctggcagccctggtgggtgccct

SEQ ID NO: 993055 - DNA, 25 bp, Homo sapien
gccctgctccatggtccaaacaaca

SEQ ID NO: 993056 - DNA, 25 bp, Homo sapien
cactgatccccacaggttagaaagc

SEQ ID NO: 993057 - DNA, 25 bp, Homo sapien
gaaaattgcgctagtaagacacagc

SEQ ID NO: 993058 - DNA, 25 bp, Homo sapien
gagatacgtgtcaatgctgccacag

SEQ ID NO: 993059 - DNA, 25 bp, Homo sapien
actatgttatgctgaaatcgagggc

SEQ ID NO: 993060 - DNA, 25 bp, Homo sapien
tacttgttttccgactcaggtctgc

SEQ ID NO: 993061 - DNA, 25 bp, Homo sapien
cattggccaagaataacagtgcatc

SEQ ID NO: 993062 - DNA, 25 bp, Homo sapien
ctgtttctcagctcaacatcctggg

SEQ ID NO: 993063 - DNA, 25 bp, Homo sapien
tgaagctcttccatcggcaaaccaa

SEQ ID NO: 993064 - DNA, 25 bp, Homo sapien
taggccctagccataccatctggat

SEQ ID NO: 993065 - DNA, 25 bp, Homo sapien
taaacaggctataaaataggcccta

SEQ ID NO: 993066 - DNA, 25 bp, Homo sapien
ggacatgctaaagattcagaacaac

SEQ ID NO: 993067 - DNA, 25 bp, Homo sapien
gaatcattgagtgttacagagaaag

SEQ ID NO: 993068 - DNA, 25 bp, Homo sapien
taaacctcacattacacggccaagg

SEQ ID NO: 993069 - DNA, 25 bp, Homo sapien
taggtatttatttcattagagaatc

SEQ ID NO: 993070 - DNA, 25 bp, Homo sapien
tcaggtaaacctcacattacacggc

SEQ ID NO: 993071 - DNA, 25 bp, Homo sapien
tagagaatcaggtaaacctcacatt

SEQ ID NO: 993072 - DNA, 25 bp, Homo sapien
tagatttcaccaaggagatgactgt

SEQ ID NO: 993073 - DNA, 25 bp, Homo sapien
tcatttaggaagatgacattcctcc

SEQ ID NO: 993074 - DNA, 25 bp, Homo sapien
aagtctccctcttgagggaccaaca

SEQ ID NO: 993075 - DNA, 25 bp, Homo sapien
cattcctccaataggtggaaagaca

SEQ ID NO: 993076 - DNA, 25 bp, Homo sapien
ctttccacgaagcttctttagtcgt

SEQ ID NO: 993077 - DNA, 25 bp, Homo sapien
gaagcttctttagtcgtttttgctc

SEQ ID NO: 993078 - DNA, 25 bp, Homo sapien
gctcatccataaaatcctgatgctc

SEQ ID NO: 993079 - DNA, 25 bp, Homo sapien
tctttagtcgtttttgctcatccat

SEQ ID NO: 993080 - DNA, 25 bp, Homo sapien
agcacctactccctagacatacaca

SEQ ID NO: 993081 - DNA, 25 bp, Homo sapien
taaaggcaaactacagcttatctag

SEQ ID NO: 993082 - DNA, 25 bp, Homo sapien
catggtgttaagaacctgtgtgatt

SEQ ID NO: 993083 - DNA, 25 bp, Homo sapien
tatctagaccaaattaatatgtcaa

SEQ ID NO: 993084 - DNA, 25 bp, Homo sapien
taccttttgaactacctgggctcta

SEQ ID NO: 993085 - DNA, 25 bp, Homo sapien
tttcttcctcagtacttggaccagt

SEQ ID NO: 993086 - DNA, 25 bp, Homo sapien
aaaaaagtctctcataggtccctct

SEQ ID NO: 993087 - DNA, 25 bp, Homo sapien
catctgataacaagagcccactgcc

SEQ ID NO: 993088 - DNA, 25 bp, Homo sapien
aattagtaggcctggtgacttcacc

SEQ ID NO: 993089 - DNA, 25 bp, Homo sapien
catgagttcagcgtaagtgtggtga

SEQ ID NO: 993090 - DNA, 25 bp, Homo sapien
caagggcagttcactaaacagtttc

SEQ ID NO: 993091 - DNA, 25 bp, Homo sapien
aaatcggagcgtctgcatgagttca

SEQ ID NO: 993092 - DNA, 25 bp, Homo sapien
gagacgagacatgcggaaggcatat

SEQ ID NO: 993093 - DNA, 25 bp, Homo sapien
tgagacgagacatgcggaaggcata

SEQ ID NO: 993094 - DNA, 25 bp, Homo sapien
ctgagacgagacatgcggaaggcat

SEQ ID NO: 993095 - DNA, 25 bp, Homo sapien
agacgagacatgcggaaggcatatt

SEQ ID NO: 993096 - DNA, 25 bp, Homo sapien
tcttgagtggcaaggagttagagtt

SEQ ID NO: 993097 - DNA, 25 bp, Homo sapien
cttgagtggcaaggagttagagttc

SEQ ID NO: 993098 - DNA, 25 bp, Homo sapien
ttcttgagtggcaaggagttagagt

SEQ ID NO: 993099 - DNA, 25 bp, Homo sapien
tgattcacatgaaaccattctcggg

SEQ ID NO: 993100 - DNA, 25 bp, Homo sapien
gagcttttcttacaacgtgcatgtc

SEQ ID NO: 993101 - DNA, 25 bp, Homo sapien
caaaggcccacttgctaaacaggag

SEQ ID NO: 993102 - DNA, 25 bp, Homo sapien
tcacgaagaataacacgggagcttt

SEQ ID NO: 993103 - DNA, 25 bp, Homo sapien
ctttgatctttttgataggtctgat

SEQ ID NO: 993104 - DNA, 25 bp, Homo sapien
ctttttgataggtctgatgcattta

SEQ ID NO: 993105 - DNA, 25 bp, Homo sapien
ttttgataggtctgatgcatttaaa

SEQ ID NO: 993106 - DNA, 25 bp, Homo sapien
gatctttttgataggtctgatgcat

SEQ ID NO: 993107 - DNA, 25 bp, Homo sapien
tctgcgatgtgaagctaatatgcaa

SEQ ID NO: 993108 - DNA, 25 bp, Homo sapien
tatgcaaaattcacggcacagtgcc

SEQ ID NO: 993109 - DNA, 25 bp, Homo sapien
taataaccatcaggatccaaggaat

SEQ ID NO: 993110 - DNA, 25 bp, Homo sapien
tcgactacacgaggacagtcatact

SEQ ID NO: 993111 - DNA, 25 bp, Homo sapien
cgattattttacggagtcatagagg

SEQ ID NO: 993112 - DNA, 25 bp, Homo sapien
catagaggcatcaacggcactgaaa

SEQ ID NO: 993113 - DNA, 25 bp, Homo sapien
cacctgactcgatcatgcctgactg

SEQ ID NO: 993114 - DNA, 25 bp, Homo sapien
ctgtgatggaaactgtagtattgtc

SEQ ID NO: 993115 - DNA, 25 bp, Homo sapien
caaatatttttcttaaatatcacct

SEQ ID NO: 993116 - DNA, 25 bp, Homo sapien
gcaaatatttttcttaaatatcacc

SEQ ID NO: 993117 - DNA, 25 bp, Homo sapien
ttcgcaaatatttttcttaaatatc

SEQ ID NO: 993118 - DNA, 25 bp, Homo sapien
cgcaaatatttttcttaaatatcac

SEQ ID NO: 993119 - DNA, 25 bp, Homo sapien
gtggttacaaaattaatctgcagcc

SEQ ID NO: 993120 - DNA, 25 bp, Homo sapien
gttacaaaattaatctgcagcccac

SEQ ID NO: 993121 - DNA, 25 bp, Homo sapien
ggttacaaaattaatctgcagccca

SEQ ID NO: 993122 - DNA, 25 bp, Homo sapien
tggttacaaaattaatctgcagccc

SEQ ID NO: 993123 - DNA, 25 bp, Homo sapien
tacagtgccgaaggccgtgtgatga

SEQ ID NO: 993124 - DNA, 25 bp, Homo sapien
ctgttaaccaatatggaagagagta

SEQ ID NO: 993125 - DNA, 25 bp, Homo sapien
actgagccttctactgttaaccaat

SEQ ID NO: 993126 - DNA, 25 bp, Homo sapien
cacccaaagctacagtgccgaaggc

SEQ ID NO: 993127 - DNA, 25 bp, Homo sapien
gagaggaaattacggcagcggaaac

SEQ ID NO: 993128 - DNA, 25 bp, Homo sapien
attacggcagcggaaacgcgggtat

SEQ ID NO: 993129 - DNA, 25 bp, Homo sapien
aggaaattacggcagcggaaacgcg

SEQ ID NO: 993130 - DNA, 25 bp, Homo sapien
ctgagaggaaattacggcagcggaa

SEQ ID NO: 993131 - DNA, 25 bp, Homo sapien
gtagagaaacggaagcttggcagct

SEQ ID NO: 993132 - DNA, 25 bp, Homo sapien
ttggcagctagagcggagccctagt

SEQ ID NO: 993133 - DNA, 25 bp, Homo sapien
agctcgcgcaggcaactattacggg

SEQ ID NO: 993134 - DNA, 25 bp, Homo sapien
gtgaacgacccggagttactggctc

SEQ ID NO: 993135 - DNA, 25 bp, Homo sapien
ctgtgcggaggacccggggaggtgg

SEQ ID NO: 993136 - DNA, 25 bp, Homo sapien
agagttagaaaggtctggctctcct

SEQ ID NO: 993137 - DNA, 25 bp, Homo sapien
gagagttagaaaggtctggctctcc

SEQ ID NO: 993138 - DNA, 25 bp, Homo sapien
gggagagttagaaaggtctggctct

SEQ ID NO: 993139 - DNA, 25 bp, Homo sapien
ggagagttagaaaggtctggctctc

SEQ ID NO: 993140 - DNA, 25 bp, Homo sapien
aagcaatggcgatgcgtgtgccgtg

SEQ ID NO: 993141 - DNA, 25 bp, Homo sapien
tttctgaccgacttgcggcgccatc

SEQ ID NO: 993142 - DNA, 25 bp, Homo sapien
gtgtggtctttctgaccgacttgcg

SEQ ID NO: 993143 - DNA, 25 bp, Homo sapien
gcctccaaaagctctgaagcaatgg

SEQ ID NO: 993144 - DNA, 25 bp, Homo sapien
ctctgactctaaggagtcaccttcc

SEQ ID NO: 993145 - DNA, 25 bp, Homo sapien
gactctaaggagtcaccttcctttc

SEQ ID NO: 993146 - DNA, 25 bp, Homo sapien
tctgactctaaggagtcaccttcct

SEQ ID NO: 993147 - DNA, 25 bp, Homo sapien
ctgactctaaggagtcaccttcctt

SEQ ID NO: 993148 - DNA, 25 bp, Homo sapien
actgccccagctcggttctgatttg

SEQ ID NO: 993149 - DNA, 25 bp, Homo sapien
tgccccagctcggttctgatttgag

SEQ ID NO: 993150 - DNA, 25 bp, Homo sapien
cccagctcggttctgatttgagctc

SEQ ID NO: 993151 - DNA, 25 bp, Homo sapien
gctcggttctgatttgagctccacc

SEQ ID NO: 993152 - DNA, 25 bp, Homo sapien
cgtgtgcttttttacagcaggtgcc

SEQ ID NO: 993153 - DNA, 25 bp, Homo sapien
aagtcctgtgccatacgtgtgcttt

SEQ ID NO: 993154 - DNA, 25 bp, Homo sapien
tgtaaacttggcaaagtcacgtaaa

SEQ ID NO: 993155 - DNA, 25 bp, Homo sapien
tgcttttttacagcaggtgcccatc

SEQ ID NO: 993156 - DNA, 25 bp, Homo sapien
ttgactccatctcgacatcctaggg

SEQ ID NO: 993157 - DNA, 25 bp, Homo sapien
ccctgatttcgcgagtgaccttgta

SEQ ID NO: 993158 - DNA, 25 bp, Homo sapien
caggagaaactagatgggtggcaca

SEQ ID NO: 993159 - DNA, 25 bp, Homo sapien
cgaaatacaggactgctgaggacct

SEQ ID NO: 993160 - DNA, 25 bp, Homo sapien
ttaaatttctctcgtcttgagtcga

SEQ ID NO: 993161 - DNA, 25 bp, Homo sapien
tcagccaaatttcttctttctgttc

SEQ ID NO: 993162 - DNA, 25 bp, Homo sapien
gcttgcaaggtagcgcctgtggctt

SEQ ID NO: 993163 - DNA, 25 bp, Homo sapien
ggctggccggataactccgcagccg

SEQ ID NO: 993164 - DNA, 25 bp, Homo sapien
aggtggaaacgcctgtagcttgcaa

SEQ ID NO: 993165 - DNA, 25 bp, Homo sapien
gccgctctcagctcagtcctaggtg

SEQ ID NO: 993166 - DNA, 25 bp, Homo sapien
ggccgactccgcaataagcagtttt

SEQ ID NO: 993167 - DNA, 25 bp, Homo sapien
aataaccgtagtggatttgagagaa

SEQ ID NO: 993168 - DNA, 25 bp, Homo sapien
tcgcttggcccctttgaaggccgac

SEQ ID NO: 993169 - DNA, 25 bp, Homo sapien
cagcgacccaaaccggggatgcagg

SEQ ID NO: 993170 - DNA, 25 bp, Homo sapien
gtgttctcgtctgtgggttttagcc

SEQ ID NO: 993171 - DNA, 25 bp, Homo sapien
ttttagccaaggctgcagctacccg

SEQ ID NO: 993172 - DNA, 25 bp, Homo sapien
tgcgcgctcggtgttctcgtctgtg

SEQ ID NO: 993173 - DNA, 25 bp, Homo sapien
gttgcacggatgacatcactagctt

SEQ ID NO: 993174 - DNA, 25 bp, Homo sapien
acgccgaggccaggacgggattctc

SEQ ID NO: 993175 - DNA, 25 bp, Homo sapien
cgggagccggatcgtgggacgccga

SEQ ID NO: 993176 - DNA, 25 bp, Homo sapien
caggacgggattctctgcacgctgt

SEQ ID NO: 993177 - DNA, 25 bp, Homo sapien
cgctgtcgagtgagccggcatctcg

SEQ ID NO: 993178 - DNA, 25 bp, Homo sapien
gtgccaagggctcaggtgcctggag

SEQ ID NO: 993179 - DNA, 25 bp, Homo sapien
gagcagacggggtgccagagtgcca

SEQ ID NO: 993180 - DNA, 25 bp, Homo sapien
agagcagacggggtgccagagtgcc

SEQ ID NO: 993181 - DNA, 25 bp, Homo sapien
cagagtgccaagggctcaggtgcct

SEQ ID NO: 993182 - DNA, 25 bp, Homo sapien
cgccgtggcggcgtgacctgtccat

SEQ ID NO: 993183 - DNA, 25 bp, Homo sapien
tcccgggtgccagatgaagtgaggc

SEQ ID NO: 993184 - DNA, 25 bp, Homo sapien
cgctgggaagagctgcgtgacgctc

SEQ ID NO: 993185 - DNA, 25 bp, Homo sapien
cggtgcctgcggcattttctttgca

SEQ ID NO: 993186 - DNA, 25 bp, Homo sapien
cctcagagagacaggcgagttctgt

SEQ ID NO: 993187 - DNA, 25 bp, Homo sapien
catttagtttccggcccgagggcag

SEQ ID NO: 993188 - DNA, 25 bp, Homo sapien
acaggcgagttctgtcccgtcacca

SEQ ID NO: 993189 - DNA, 25 bp, Homo sapien
accgcagccgaggacacttggcatt

SEQ ID NO: 993190 - DNA, 25 bp, Homo sapien
gcgggagcctctccggatcagaact

SEQ ID NO: 993191 - DNA, 25 bp, Homo sapien
tgcggcggatcatgcccatggtgta

SEQ ID NO: 993192 - DNA, 25 bp, Homo sapien
gaaggttactgctctacactggcct

SEQ ID NO: 993193 - DNA, 25 bp, Homo sapien
gatcagaactttttaggccgcccgc

SEQ ID NO: 993194 - DNA, 25 bp, Homo sapien
agatcgccgccctcattcggaaagg

SEQ ID NO: 993195 - DNA, 25 bp, Homo sapien
cggcagtacaactccaccaacatgg

SEQ ID NO: 993196 - DNA, 25 bp, Homo sapien
gtcgaccccggcttcatttacaaca

SEQ ID NO: 993197 - DNA, 25 bp, Homo sapien
aatcgccggcagctgttcgccatga

SEQ ID NO: 993198 - DNA, 25 bp, Homo sapien
tggcagtctgactagaaaggttgac

SEQ ID NO: 993199 - DNA, 25 bp, Homo sapien
catggtttctggcggttccattcag

SEQ ID NO: 993200 - DNA, 25 bp, Homo sapien
ggaggggttggttgccatagtgaca

SEQ ID NO: 993201 - DNA, 25 bp, Homo sapien
atagtgacatgttcttccggtgaag

SEQ ID NO: 993202 - DNA, 25 bp, Homo sapien
tattgagatagatgacatgccagcc

SEQ ID NO: 993203 - DNA, 25 bp, Homo sapien
ggcaagcacccgcttaccatggctg

SEQ ID NO: 993204 - DNA, 25 bp, Homo sapien
gccagccttacaaatcttgagagag

SEQ ID NO: 993205 - DNA, 25 bp, Homo sapien
ggaaatggtgttccccatcgcccaa

SEQ ID NO: 993206 - DNA, 25 bp, Homo sapien
tctccctagtaagtgactgcaggca

SEQ ID NO: 993207 - DNA, 25 bp, Homo sapien
cccatttgttggcatccatgacaag

SEQ ID NO: 993208 - DNA, 25 bp, Homo sapien
tccatgtctccctagtaagtgactg

SEQ ID NO: 993209 - DNA, 25 bp, Homo sapien
caagtcttaaatcaggtccttttgt

SEQ ID NO: 993210 - DNA, 25 bp, Homo sapien
gtgcacctccttgcgtatacgccat

SEQ ID NO: 993211 - DNA, 25 bp, Homo sapien
gtatacatgatgtgcacctccttgc

SEQ ID NO: 993212 - DNA, 25 bp, Homo sapien
agaaacacatgcaaacatccatagt

SEQ ID NO: 993213 - DNA, 25 bp, Homo sapien
ccatagtcttgtatacatgatgtgc

SEQ ID NO: 993214 - DNA, 25 bp, Homo sapien
tcaggggtgttgaagcagaataact

SEQ ID NO: 993215 - DNA, 25 bp, Homo sapien
tgttttggtaaccacagggctggaa

SEQ ID NO: 993216 - DNA, 25 bp, Homo sapien
tcatgttttggtaaccacagggctg

SEQ ID NO: 993217 - DNA, 25 bp, Homo sapien
gaagagatgcccagatgcagccctg

SEQ ID NO: 993218 - DNA, 25 bp, Homo sapien
agagatgcccagatgcagccctgga

SEQ ID NO: 993219 - DNA, 25 bp, Homo sapien
cagtctcagccacgtctagggccat

SEQ ID NO: 993220 - DNA, 25 bp, Homo sapien
tcctggatcagtctcagccacgtct

SEQ ID NO: 993221 - DNA, 25 bp, Homo sapien
ggatcagtctcagccacgtctaggg

SEQ ID NO: 993222 - DNA, 25 bp, Homo sapien
ttctcctggatcagtctcagccacg

SEQ ID NO: 993223 - DNA, 25 bp, Homo sapien
aagcagattctctttggaaatgcca

SEQ ID NO: 993224 - DNA, 25 bp, Homo sapien
cagtgactgttgttcagtccaggtc

SEQ ID NO: 993225 - DNA, 25 bp, Homo sapien
gtgactgttgttcagtccaggtcat

SEQ ID NO: 993226 - DNA, 25 bp, Homo sapien
gaaatgccagtgactgttgttcagt

SEQ ID NO: 993227 - DNA, 25 bp, Homo sapien
gatggtaacgtaggcaaccaaccat

SEQ ID NO: 993228 - DNA, 25 bp, Homo sapien
ctggtatccataggagtggccaggt

SEQ ID NO: 993229 - DNA, 25 bp, Homo sapien
atgctgatggtaacgtaggcaacca

SEQ ID NO: 993230 - DNA, 25 bp, Homo sapien
catatcctacaaggccactactggc

SEQ ID NO: 993231 - DNA, 25 bp, Homo sapien
aaaattcttagcgaagttacagaga

SEQ ID NO: 993232 - DNA, 25 bp, Homo sapien
tagcgaagttacagagattttaaag

SEQ ID NO: 993233 - DNA, 25 bp, Homo sapien
agtattccattagttatacatgtat

SEQ ID NO: 993234 - DNA, 25 bp, Homo sapien
agtttatctgttacagtagctagta

SEQ ID NO: 993235 - DNA, 25 bp, Homo sapien
cactttctgaagtaacaactagata

SEQ ID NO: 993236 - DNA, 25 bp, Homo sapien
taataaatgctaacctgttcctggg

SEQ ID NO: 993237 - DNA, 25 bp, Homo sapien
ttaaactctctctgagataccagat

SEQ ID NO: 993238 - DNA, 25 bp, Homo sapien
gataccagatatctggagccttctt

SEQ ID NO: 993239 - DNA, 25 bp, Homo sapien
cactcagctgttctagttgaagcag

SEQ ID NO: 993240 - DNA, 25 bp, Homo sapien
gagccctgcgctctgtcccatctgt

SEQ ID NO: 993241 - DNA, 25 bp, Homo sapien
atcacacagcttgcacaccatcaga

SEQ ID NO: 993242 - DNA, 25 bp, Homo sapien
gcttgtttaacagtagagtccattt

SEQ ID NO: 993243 - DNA, 25 bp, Homo sapien
ctcctttcagcatagcatcgtactg

SEQ ID NO: 993244 - DNA, 25 bp, Homo sapien
tagcatcgtactggttgctgaggca

SEQ ID NO: 993245 - DNA, 25 bp, Homo sapien
agcatagcatcgtactggttgctga

SEQ ID NO: 993246 - DNA, 25 bp, Homo sapien
ttcagcatagcatcgtactggttgc

SEQ ID NO: 993247 - DNA, 25 bp, Homo sapien
caggcctagtgccaagactggtggt

SEQ ID NO: 993248 - DNA, 25 bp, Homo sapien
taatggactgggtgttcaggtggcc

SEQ ID NO: 993249 - DNA, 25 bp, Homo sapien
cactgtctgtcattgtgaagattct

SEQ ID NO: 993250 - DNA, 25 bp, Homo sapien
ttctctgaggtctgcgtggctttcc

SEQ ID NO: 993251 - DNA, 25 bp, Homo sapien
gcagtagatgtaggaaacaacagga

SEQ ID NO: 993252 - DNA, 25 bp, Homo sapien
aacaacaggaacaagagtgtcttct

SEQ ID NO: 993253 - DNA, 25 bp, Homo sapien
acaacaggaacaagagtgtcttctc

SEQ ID NO: 993254 - DNA, 25 bp, Homo sapien
ctgcagtagatgtaggaaacaacag

SEQ ID NO: 993255 - DNA, 25 bp, Homo sapien
tctcttccttcatccgatactctgc

SEQ ID NO: 993256 - DNA, 25 bp, Homo sapien
ccttcatccgatactctgcaccttg

SEQ ID NO: 993257 - DNA, 25 bp, Homo sapien
tattgaaatctgcaatgttaccctc

SEQ ID NO: 993258 - DNA, 25 bp, Homo sapien
tgcaatgttaccctcaaacctgacc

SEQ ID NO: 993259 - DNA, 25 bp, Homo sapien
ctgcttagtaagtggaaaaccactg

SEQ ID NO: 993260 - DNA, 25 bp, Homo sapien
tgcttagtaagtggaaaaccactgg

SEQ ID NO: 993261 - DNA, 25 bp, Homo sapien
tgagcaggcccaacgcgaaccacag

SEQ ID NO: 993262 - DNA, 25 bp, Homo sapien
gctgtgtgaattccagttcgctggc

SEQ ID NO: 993263 - DNA, 25 bp, Homo sapien
aggctgtgtgaattccagttcgctg

SEQ ID NO: 993264 - DNA, 25 bp, Homo sapien
gggcataagaggatctgatcccctt

SEQ ID NO: 993265 - DNA, 25 bp, Homo sapien
ggttaactcttgaaccatctggagg

SEQ ID NO: 993266 - DNA, 25 bp, Homo sapien
ggaggaactgaagtcagacattgtt

SEQ ID NO: 993267 - DNA, 25 bp, Homo sapien
cacgatgagtgtggtagggaggaac

SEQ ID NO: 993268 - DNA, 25 bp, Homo sapien
caggccacattctctaaaattagcc

SEQ ID NO: 993269 - DNA, 25 bp, Homo sapien
ctgcaggggctccaacttgggtggg

SEQ ID NO: 993270 - DNA, 25 bp, Homo sapien
ggctccaacttgggtggggaggatg

SEQ ID NO: 993271 - DNA, 25 bp, Homo sapien
aggctgcaggggctccaacttgggt

SEQ ID NO: 993272 - DNA, 25 bp, Homo sapien
caggctcagggtggctgaggctgca

SEQ ID NO: 993273 - DNA, 25 bp, Homo sapien
ctggtggaccctcggttgccccttg

SEQ ID NO: 993274 - DNA, 25 bp, Homo sapien
taggtccagattgtaggatgggctc

SEQ ID NO: 993275 - DNA, 25 bp, Homo sapien
tggatcctgtggtcagacggagtcc

SEQ ID NO: 993276 - DNA, 25 bp, Homo sapien
aattagcatcgggaggattgatggt

SEQ ID NO: 993277 - DNA, 25 bp, Homo sapien
ccctgactgggctggcaattagcat

SEQ ID NO: 993278 - DNA, 25 bp, Homo sapien
cctgtctctgtgactcgtagggaga

SEQ ID NO: 993279 - DNA, 25 bp, Homo sapien
cagtgagttgccctatgctgagagg

SEQ ID NO: 993280 - DNA, 25 bp, Homo sapien
caggattcacgggtgcagcctgaca

SEQ ID NO: 993281 - DNA, 25 bp, Homo sapien
tgacacgtgacgtcacagccattgg

SEQ ID NO: 993282 - DNA, 25 bp, Homo sapien
tctcagcagtttaacagctggcaca

SEQ ID NO: 993283 - DNA, 25 bp, Homo sapien
tgaagcttttggttctgagctgttg

SEQ ID NO: 993284 - DNA, 25 bp, Homo sapien
aatgaagcttttggttctgagctgt

SEQ ID NO: 993285 - DNA, 25 bp, Homo sapien
agtttaacagctggcacacaaaatg

SEQ ID NO: 993286 - DNA, 25 bp, Homo sapien
cttccagtggtgcttggcttccacg

SEQ ID NO: 993287 - DNA, 25 bp, Homo sapien
ttccagtggtgcttggcttccacgt

SEQ ID NO: 993288 - DNA, 25 bp, Homo sapien
ccttccagtggtgcttggcttccac

SEQ ID NO: 993289 - DNA, 25 bp, Homo sapien
gatggaaggggtatgtgtgctcagc

SEQ ID NO: 993290 - DNA, 25 bp, Homo sapien
ctgatggaaggggtatgtgtgctca

SEQ ID NO: 993291 - DNA, 25 bp, Homo sapien
atggaaggggtatgtgtgctcagcc

SEQ ID NO: 993292 - DNA, 25 bp, Homo sapien
ggaaggggtatgtgtgctcagccat

SEQ ID NO: 993293 - DNA, 25 bp, Homo sapien
cctgtgggtgacctcttgatgagtc

SEQ ID NO: 993294 - DNA, 25 bp, Homo sapien
gcctgcatgccgaaagaacaagcct

SEQ ID NO: 993295 - DNA, 25 bp, Homo sapien
ctgggatctgctgacaagtgtggat

SEQ ID NO: 993296 - DNA, 25 bp, Homo sapien
gagatgcggtctgacttcctgccag

SEQ ID NO: 993297 - DNA, 25 bp, Homo sapien
ctttcttccctcttctctttccagg

SEQ ID NO: 993298 - DNA, 25 bp, Homo sapien
ctcatctcctctttcttccctcttc

SEQ ID NO: 993299 - DNA, 25 bp, Homo sapien
ctctttcttccctcttctctttcca

SEQ ID NO: 993300 - DNA, 25 bp, Homo sapien
ctcctctttcttccctcttctcttt

SEQ ID NO: 993301 - DNA, 25 bp, Homo sapien
gtctcgaagagcttctgtctgacaa

SEQ ID NO: 993302 - DNA, 25 bp, Homo sapien
tcgaagagcttctgtctgacaagat

SEQ ID NO: 993303 - DNA, 25 bp, Homo sapien
caagattgggatgagagtggccagg

SEQ ID NO: 993304 - DNA, 25 bp, Homo sapien
ctgtctcgaagagcttctgtctgac

SEQ ID NO: 993305 - DNA, 25 bp, Homo sapien
ctatggtggatgacgaggtggtgag

SEQ ID NO: 993306 - DNA, 25 bp, Homo sapien
atggtggatgacgaggtggtgagtg

SEQ ID NO: 993307 - DNA, 25 bp, Homo sapien
ggtggatgacgaggtggtgagtggt

SEQ ID NO: 993308 - DNA, 25 bp, Homo sapien
tatggtggatgacgaggtggtgagt

SEQ ID NO: 993309 - DNA, 25 bp, Homo sapien
tttactctgagccacggggctgcag

SEQ ID NO: 993310 - DNA, 25 bp, Homo sapien
ttactctgagccacggggctgcaga

SEQ ID NO: 993311 - DNA, 25 bp, Homo sapien
cagaaaggctcgacgggaaggctct

SEQ ID NO: 993312 - DNA, 25 bp, Homo sapien
ctgcagaaaggctcgacgggaaggc

SEQ ID NO: 993313 - DNA, 25 bp, Homo sapien
accgtcctttgaccccctgtctgct

SEQ ID NO: 993314 - DNA, 25 bp, Homo sapien
gctcatgttttacatccctcagctg

SEQ ID NO: 993315 - DNA, 25 bp, Homo sapien
catgttttacatccctcagctgtcc

SEQ ID NO: 993316 - DNA, 25 bp, Homo sapien
cttgttccgctcatgttttacatcc

SEQ ID NO: 993317 - DNA, 25 bp, Homo sapien
gcatgcgatacaccctgggctttgc

SEQ ID NO: 993318 - DNA, 25 bp, Homo sapien
tgctggcatgcgatacaccctgggc

SEQ ID NO: 993319 - DNA, 25 bp, Homo sapien
atgcgatacaccctgggctttgctg

SEQ ID NO: 993320 - DNA, 25 bp, Homo sapien
tggcatgcgatacaccctgggcttt

SEQ ID NO: 993321 - DNA, 25 bp, Homo sapien
caatgcatagttaggaaagaatctc

SEQ ID NO: 993322 - DNA, 25 bp, Homo sapien
aatgcatagttaggaaagaatctca

SEQ ID NO: 993323 - DNA, 25 bp, Homo sapien
tgacaggctctgcaaagaatcatcc

SEQ ID NO: 993324 - DNA, 25 bp, Homo sapien
gacaggctctgcaaagaatcatcca

SEQ ID NO: 993325 - DNA, 25 bp, Homo sapien
caggctctgcaaagaatcatccaca

SEQ ID NO: 993326 - DNA, 25 bp, Homo sapien
aggctctgcaaagaatcatccacat

SEQ ID NO: 993327 - DNA, 25 bp, Homo sapien
agcagcacaggatgccacagaggag

SEQ ID NO: 993328 - DNA, 25 bp, Homo sapien
tagcatctacaaggagcaggctcgg

SEQ ID NO: 993329 - DNA, 25 bp, Homo sapien
ggctcggtttcagagcctcttgaga

SEQ ID NO: 993330 - DNA, 25 bp, Homo sapien
agtggtgctgtgtctagcatctaca

SEQ ID NO: 993331 - DNA, 25 bp, Homo sapien
tgagaaaagtgagtaggtacttgaa

SEQ ID NO: 993332 - DNA, 25 bp, Homo sapien
gatcgtgtaacgaatggtgcaactg

SEQ ID NO: 993333 - DNA, 25 bp, Homo sapien
tttggggtctgagtctatataccac

SEQ ID NO: 993334 - DNA, 25 bp, Homo sapien
tctatgatggatcgtgtaacgaatg

SEQ ID NO: 993335 - DNA, 25 bp, Homo sapien
ggcttttgagatcttctttctcctg

SEQ ID NO: 993336 - DNA, 25 bp, Homo sapien
catggtgatccctgcactgaatggc

SEQ ID NO: 993337 - DNA, 25 bp, Homo sapien
atggtgatccctgcactgaatggcc

SEQ ID NO: 993338 - DNA, 25 bp, Homo sapien
ccatggtgatccctgcactgaatgg

SEQ ID NO: 993339 - DNA, 25 bp, Homo sapien
gtttgccggcttttagcagtagttc

SEQ ID NO: 993340 - DNA, 25 bp, Homo sapien
aaattacacagtttaactttgctag

SEQ ID NO: 993341 - DNA, 25 bp, Homo sapien
tggttataattttccgtggcctcca

SEQ ID NO: 993342 - DNA, 25 bp, Homo sapien
agcagtagttctttctggttataat

SEQ ID NO: 993343 - DNA, 25 bp, Homo sapien
tgaggttgaggggaaagcctttcta

SEQ ID NO: 993344 - DNA, 25 bp, Homo sapien
cagagcaccatatgaagggtgaggt

SEQ ID NO: 993345 - DNA, 25 bp, Homo sapien
cagggagtgggatttaagtggttag

SEQ ID NO: 993346 - DNA, 25 bp, Homo sapien
ggatttaagtggttagggacagagc

SEQ ID NO: 993347 - DNA, 25 bp, Homo sapien
ctttcagtgccccatgctcccaaac

SEQ ID NO: 993348 - DNA, 25 bp, Homo sapien
tcccaaaccacctccatcacgtctt

SEQ ID NO: 993349 - DNA, 25 bp, Homo sapien
gtgccccatgctcccaaaccacctc

SEQ ID NO: 993350 - DNA, 25 bp, Homo sapien
ccatgctcccaaaccacctccatca

SEQ ID NO: 993351 - DNA, 25 bp, Homo sapien
tcttggaaactcgtccctgcacttg

SEQ ID NO: 993352 - DNA, 25 bp, Homo sapien
ttcaaccagtgatgcttcttggaaa

SEQ ID NO: 993353 - DNA, 25 bp, Homo sapien
gaaactcgtccctgcacttggtggg

SEQ ID NO: 993354 - DNA, 25 bp, Homo sapien
aggtcagccttcaaccagtgatgct

SEQ ID NO: 993355 - DNA, 25 bp, Homo sapien
tgggccatatggcatgggtggccaa

SEQ ID NO: 993356 - DNA, 25 bp, Homo sapien
gatcagcctcgttcaacatcttgtg

SEQ ID NO: 993357 - DNA, 25 bp, Homo sapien
cttgagagaggatttgatcagcctc

SEQ ID NO: 993358 - DNA, 25 bp, Homo sapien
gaggatttgatcagcctcgttcaac

SEQ ID NO: 993359 - DNA, 25 bp, Homo sapien
ggccacatggcctgatgctgaatta

SEQ ID NO: 993360 - DNA, 25 bp, Homo sapien
ggcccaaaccgaggaggtcacagtg

SEQ ID NO: 993361 - DNA, 25 bp, Homo sapien
tgagaaaccctgaaaagagccagcg

SEQ ID NO: 993362 - DNA, 25 bp, Homo sapien
tgagctagaaggtgtccctgaatcc

SEQ ID NO: 993363 - DNA, 25 bp, Homo sapien
tgctgggccctgtgtagctgtgcgt

SEQ ID NO: 993364 - DNA, 25 bp, Homo sapien
cctgtgtagctgtgcgtgtggaacc

SEQ ID NO: 993365 - DNA, 25 bp, Homo sapien
tggtctcgaccaagaaccaccaggg

SEQ ID NO: 993366 - DNA, 25 bp, Homo sapien
agaaactggatggtctcgaccaaga

SEQ ID NO: 993367 - DNA, 25 bp, Homo sapien
cagggctcagagtctgaggttcaga

SEQ ID NO: 993368 - DNA, 25 bp, Homo sapien
agagaggggaattggccatccccac

SEQ ID NO: 993369 - DNA, 25 bp, Homo sapien
gttcagagaggggaattggccatcc

SEQ ID NO: 993370 - DNA, 25 bp, Homo sapien
tgaagggcagggctcagagtctgag

SEQ ID NO: 993371 - DNA, 25 bp, Homo sapien
tagataaggaccgtcagggtgtgga

SEQ ID NO: 993372 - DNA, 25 bp, Homo sapien
gttagataaggaccgtcagggtgtg

SEQ ID NO: 993373 - DNA, 25 bp, Homo sapien
agaggttagataaggaccgtcaggg

SEQ ID NO: 993374 - DNA, 25 bp, Homo sapien
ataaggaccgtcagggtgtggaggg

SEQ ID NO: 993375 - DNA, 25 bp, Homo sapien
tgtctgccatcaggtcccaaagcca

SEQ ID NO: 993376 - DNA, 25 bp, Homo sapien
agctggccagcagagtgtctgccat

SEQ ID NO: 993377 - DNA, 25 bp, Homo sapien
aagccacacccagaggtggcagcgg

SEQ ID NO: 993378 - DNA, 25 bp, Homo sapien
tgcaattctggtgactcatgaacaa

SEQ ID NO: 993379 - DNA, 25 bp, Homo sapien
tcaggctggaaaatacatgagcgaa

SEQ ID NO: 993380 - DNA, 25 bp, Homo sapien
gaaaatacatgagcgaagtggggaa

SEQ ID NO: 993381 - DNA, 25 bp, Homo sapien
cccaagaagtctgtttcaggctgga

SEQ ID NO: 993382 - DNA, 25 bp, Homo sapien
gaaaaagcagccaaaaacacgcagg

SEQ ID NO: 993383 - DNA, 25 bp, Homo sapien
ctgggttagtaaggccagactctgc

SEQ ID NO: 993384 - DNA, 25 bp, Homo sapien
ggaagcctcttttgtgaaacagggc

SEQ ID NO: 993385 - DNA, 25 bp, Homo sapien
ggcacagatgaaggcctggaagcct

SEQ ID NO: 993386 - DNA, 25 bp, Homo sapien
gagataatacgggagcctctggcat

SEQ ID NO: 993387 - DNA, 25 bp, Homo sapien
tttttagccagagggcaggtgagca

SEQ ID NO: 993388 - DNA, 25 bp, Homo sapien
tcacaaagccgcctaatgggctgtt

SEQ ID NO: 993389 - DNA, 25 bp, Homo sapien
gatatgtgaaaaggtctcgggcact

SEQ ID NO: 993390 - DNA, 25 bp, Homo sapien
tgaagttgaggccaccttttggtga

SEQ ID NO: 993391 - DNA, 25 bp, Homo sapien
cagggattctgaggagtatggacaa

SEQ ID NO: 993392 - DNA, 25 bp, Homo sapien
acccactctttaaaggatcgtagtg

SEQ ID NO: 993393 - DNA, 25 bp, Homo sapien
agttgcccttgcataagtgttttag

SEQ ID NO: 993394 - DNA, 25 bp, Homo sapien
cgtagtgactgtctttatctccagg

SEQ ID NO: 993395 - DNA, 25 bp, Homo sapien
tcgtcatcattgttggcctcatcat

SEQ ID NO: 993396 - DNA, 25 bp, Homo sapien
ccaatgggtgaatgaagatagcagt

SEQ ID NO: 993397 - DNA, 25 bp, Homo sapien
tggaaatggaatgctgtctccatgc

SEQ ID NO: 993398 - DNA, 25 bp, Homo sapien
attcgctcggcatccatcctggtgg

SEQ ID NO: 993399 - DNA, 25 bp, Homo sapien
tgtcaccgaatgctactctggcagc

SEQ ID NO: 993400 - DNA, 25 bp, Homo sapien
tcagggagacggaaacctaacagta

SEQ ID NO: 993401 - DNA, 25 bp, Homo sapien
ccatccccagttccatggagcaggg

SEQ ID NO: 993402 - DNA, 25 bp, Homo sapien
tcaataggcaaattacaggctgggc

SEQ ID NO: 993403 - DNA, 25 bp, Homo sapien
gccagaaagctttccctggctccat

SEQ ID NO: 993404 - DNA, 25 bp, Homo sapien
tttctgtagctttcttctcctgcca

SEQ ID NO: 993405 - DNA, 25 bp, Homo sapien
gctttcttctcctgccagaaagctt

SEQ ID NO: 993406 - DNA, 25 bp, Homo sapien
tcctgccagaaagctttccctggct

SEQ ID NO: 993407 - DNA, 25 bp, Homo sapien
taaaataataacaaccaccaccatc

SEQ ID NO: 993408 - DNA, 25 bp, Homo sapien
ccaccatcaccatcagatactttat

SEQ ID NO: 993409 - DNA, 25 bp, Homo sapien
tcaccatcagatactttattttgaa

SEQ ID NO: 993410 - DNA, 25 bp, Homo sapien
tattttgaaagtaaggacagggctg

SEQ ID NO: 993411 - DNA, 25 bp, Homo sapien
taggctgcaaaagtagaatattctt

SEQ ID NO: 993412 - DNA, 25 bp, Homo sapien
aaagaagactattccagattggtat

SEQ ID NO: 993413 - DNA, 25 bp, Homo sapien
taagcttctgctacagtgtttactg

SEQ ID NO: 993414 - DNA, 25 bp, Homo sapien
tgtacaacacaccagattgaatttg

SEQ ID NO: 993415 - DNA, 25 bp, Homo sapien
atggcagccatcagaagtaggaaga

SEQ ID NO: 993416 - DNA, 25 bp, Homo sapien
ctgctctatggggttatggcagcca

SEQ ID NO: 993417 - DNA, 25 bp, Homo sapien
gccatcagaagtaggaagaagcctc

SEQ ID NO: 993418 - DNA, 25 bp, Homo sapien
tctatggggttatggcagccatcag

SEQ ID NO: 993419 - DNA, 25 bp, Homo sapien
ccaaggatgtgagatgctgatgaag

SEQ ID NO: 993420 - DNA, 25 bp, Homo sapien
aaccaaggatgtgagatgctgatga

SEQ ID NO: 993421 - DNA, 25 bp, Homo sapien
taaccaaggatgtgagatgctgatg

SEQ ID NO: 993422 - DNA, 25 bp, Homo sapien
ttaaccaaggatgtgagatgctgat

SEQ ID NO: 993423 - DNA, 25 bp, Homo sapien
catgggcccagatctattttgcaga

SEQ ID NO: 993424 - DNA, 25 bp, Homo sapien
tgcagaacattctcgttctcattgc

SEQ ID NO: 993425 - DNA, 25 bp, Homo sapien
ctcgttctcattgccagccatgcag

SEQ ID NO: 993426 - DNA, 25 bp, Homo sapien
ggcccatgggcccagatctattttg

SEQ ID NO: 993427 - DNA, 25 bp, Homo sapien
gtatccaccactgaatacccctgtg

SEQ ID NO: 993428 - DNA, 25 bp, Homo sapien
taattcaagtccgtgtggaccattt

SEQ ID NO: 993429 - DNA, 25 bp, Homo sapien
tcaagacccaaacatgtatccacca

SEQ ID NO: 993430 - DNA, 25 bp, Homo sapien
tttttgcttgacctgtcaagaccca

SEQ ID NO: 993431 - DNA, 25 bp, Homo sapien
tagagctggtagaagaggcaaaacc

SEQ ID NO: 993432 - DNA, 25 bp, Homo sapien
catgacggtccagtattcatagcct

SEQ ID NO: 993433 - DNA, 25 bp, Homo sapien
tattcatagccttccactagagctg

SEQ ID NO: 993434 - DNA, 25 bp, Homo sapien
gccctcatgacggtccagtattcat

SEQ ID NO: 993435 - DNA, 25 bp, Homo sapien
aggaaagccaaatattaggcgtaag

SEQ ID NO: 993436 - DNA, 25 bp, Homo sapien
gaacagtcattgacgacaatgcaat

SEQ ID NO: 993437 - DNA, 25 bp, Homo sapien
aatattaggcgtaagtgactgatac

SEQ ID NO: 993438 - DNA, 25 bp, Homo sapien
tcagcctgaacagtcattgacgaca

SEQ ID NO: 993439 - DNA, 25 bp, Homo sapien
tctccatgtcccaagcattgtagca

SEQ ID NO: 993440 - DNA, 25 bp, Homo sapien
tagcaagtactctcagtcatctctg

SEQ ID NO: 993441 - DNA, 25 bp, Homo sapien
tgtcccaagcattgtagcaagtact

SEQ ID NO: 993442 - DNA, 25 bp, Homo sapien
gcattgtagcaagtactctcagtca

SEQ ID NO: 993443 - DNA, 25 bp, Homo sapien
tccacagacaagaggaccctaagtc

SEQ ID NO: 993444 - DNA, 25 bp, Homo sapien
gacaagaggaccctaagtcttccca

SEQ ID NO: 993445 - DNA, 25 bp, Homo sapien
ctgcatagaggatgtgtgaccctga

SEQ ID NO: 993446 - DNA, 25 bp, Homo sapien
ctggacagactgcatagaggatgtg

SEQ ID NO: 993447 - DNA, 25 bp, Homo sapien
tcctcatctgttgcagcttcagttt

SEQ ID NO: 993448 - DNA, 25 bp, Homo sapien
tcatctgttgcagcttcagtttttc

SEQ ID NO: 993449 - DNA, 25 bp, Homo sapien
agtttttcctgctggctccttagct

SEQ ID NO: 993450 - DNA, 25 bp, Homo sapien
ttattcctcatctgttgcagcttca

SEQ ID NO: 993451 - DNA, 25 bp, Homo sapien
gacagtcccgctgccctatcatttg

SEQ ID NO: 993452 - DNA, 25 bp, Homo sapien
tcctgatgctttgaaactatgagct

SEQ ID NO: 993453 - DNA, 25 bp, Homo sapien
gcggttgtccgaagagccgttccca

SEQ ID NO: 993454 - DNA, 25 bp, Homo sapien
ttcccacacaggcagcgaataccag

SEQ ID NO: 993455 - DNA, 25 bp, Homo sapien
cagtagcaagaaccctgtgccgatt

SEQ ID NO: 993456 - DNA, 25 bp, Homo sapien
cctgtgccgattgtagggtttattg

SEQ ID NO: 993457 - DNA, 25 bp, Homo sapien
tgtagagacaacaaacgccttttgg

SEQ ID NO: 993458 - DNA, 25 bp, Homo sapien
ctcttttggagtgcagaaattttca

SEQ ID NO: 993459 - DNA, 25 bp, Homo sapien
ttccaggtagtcacctgtttccagc

SEQ ID NO: 993460 - DNA, 25 bp, Homo sapien
cttccaggtagtcacctgtttccag

SEQ ID NO: 993461 - DNA, 25 bp, Homo sapien
tccaggtagtcacctgtttccagct

SEQ ID NO: 993462 - DNA, 25 bp, Homo sapien
tgttaagacccctgacttgtgcctt

SEQ ID NO: 993463 - DNA, 25 bp, Homo sapien
tcatttagaatgatatacttggctg

SEQ ID NO: 993464 - DNA, 25 bp, Homo sapien
ttcactaggagtatggtctttggca

SEQ ID NO: 993465 - DNA, 25 bp, Homo sapien
tggaattggaagtactaaggagctt

SEQ ID NO: 993466 - DNA, 25 bp, Homo sapien
ttcagctgtgctacatcctggtgga

SEQ ID NO: 993467 - DNA, 25 bp, Homo sapien
ttgtagaagcccctgccttttccgc

SEQ ID NO: 993468 - DNA, 25 bp, Homo sapien
atagagaatctcttgtagaagcccc

SEQ ID NO: 993469 - DNA, 25 bp, Homo sapien
ggaatgcaccctcgccatgtgcaca

SEQ ID NO: 993470 - DNA, 25 bp, Homo sapien
cctgggagcctacttgaaatatgac

SEQ ID NO: 993471 - DNA, 25 bp, Homo sapien
gagacatcaggcaaacatgggccct

SEQ ID NO: 993472 - DNA, 25 bp, Homo sapien
tctgcttgcataggtaattttgctg

SEQ ID NO: 993473 - DNA, 25 bp, Homo sapien
taccactagatagagaagctgcttg

SEQ ID NO: 993474 - DNA, 25 bp, Homo sapien
tcccaatgctaatggtgtctggttt

SEQ ID NO: 993475 - DNA, 25 bp, Homo sapien
ctcccaatgctaatggtgtctggtt

SEQ ID NO: 993476 - DNA, 25 bp, Homo sapien
acattgaacatatttcacacaaaaa

SEQ ID NO: 993477 - DNA, 25 bp, Homo sapien
catttgttcgtggagccatcaggag

SEQ ID NO: 993478 - DNA, 25 bp, Homo sapien
ggtcaatcccatgacctcggtgtct

SEQ ID NO: 993479 - DNA, 25 bp, Homo sapien
gtgtctgttgccaccgttgcctgcc

SEQ ID NO: 993480 - DNA, 25 bp, Homo sapien
tccctctaggatgtactttgtcttg

SEQ ID NO: 993481 - DNA, 25 bp, Homo sapien
cagtgggatggcaactggccccatt

SEQ ID NO: 993482 - DNA, 25 bp, Homo sapien
gcattgaatccagtgggatggcaac

SEQ ID NO: 993483 - DNA, 25 bp, Homo sapien
tgggatggcaactggccccattagc

SEQ ID NO: 993484 - DNA, 25 bp, Homo sapien
aatccagtgggatggcaactggccc

SEQ ID NO: 993485 - DNA, 25 bp, Homo sapien
tctctctgatgaaacaatggaggag

SEQ ID NO: 993486 - DNA, 25 bp, Homo sapien
tctccgcgagcttggatcccttctt

SEQ ID NO: 993487 - DNA, 25 bp, Homo sapien
gaacctttgtttctcctctccgcga

SEQ ID NO: 993488 - DNA, 25 bp, Homo sapien
tggtccactagaaaaagagttcagg

SEQ ID NO: 993489 - DNA, 25 bp, Homo sapien
ggtacaaggccaaataccatgtttg

SEQ ID NO: 993490 - DNA, 25 bp, Homo sapien
tcttcaatcatgtgaccgtgtagct

SEQ ID NO: 993491 - DNA, 25 bp, Homo sapien
ctgtgggattggaaatgtgtctagc

SEQ ID NO: 993492 - DNA, 25 bp, Homo sapien
ggaattatcgcctgtgttagcagga

SEQ ID NO: 993493 - DNA, 25 bp, Homo sapien
gagacctcaatcaccctaatggcca

SEQ ID NO: 993494 - DNA, 25 bp, Homo sapien
atctttcctattcagcaatccttgc

SEQ ID NO: 993495 - DNA, 25 bp, Homo sapien
ccatcaatggctcttgtgtctctcc

SEQ ID NO: 993496 - DNA, 25 bp, Homo sapien
tgctcctctggccataggtcaatgt

SEQ ID NO: 993497 - DNA, 25 bp, Homo sapien
ggatccaagcttgaatatgagatat

SEQ ID NO: 993498 - DNA, 25 bp, Homo sapien
gccagcgtatattttgtggagctcc

SEQ ID NO: 993499 - DNA, 25 bp, Homo sapien
atattttgtggagctcctcgttctg

SEQ ID NO: 993500 - DNA, 25 bp, Homo sapien
ttactgccagcgtatattttgtgga

SEQ ID NO: 993501 - DNA, 25 bp, Homo sapien
gcgtatattttgtggagctcctcgt

SEQ ID NO: 993502 - DNA, 25 bp, Homo sapien
gagaaggtgtaacaagcctggactt

SEQ ID NO: 993503 - DNA, 25 bp, Homo sapien
gctcaagcctactgcactgacaggg

SEQ ID NO: 993504 - DNA, 25 bp, Homo sapien
tgaccccatcagcatgatgctcaag

SEQ ID NO: 993505 - DNA, 25 bp, Homo sapien
tagggattgggcttatggtctgacc

SEQ ID NO: 993506 - DNA, 25 bp, Homo sapien
tagatgactttgattagtcatggaa

SEQ ID NO: 993507 - DNA, 25 bp, Homo sapien
gatgactttgattagtcatggaaga

SEQ ID NO: 993508 - DNA, 25 bp, Homo sapien
tgactttgattagtcatggaagaca

SEQ ID NO: 993509 - DNA, 25 bp, Homo sapien
ctttgattagtcatggaagacagcc

SEQ ID NO: 993510 - DNA, 25 bp, Homo sapien
ccagtgagtgaggagatgacctcct

SEQ ID NO: 993511 - DNA, 25 bp, Homo sapien
gacctcctggttgtgactgtccatc

SEQ ID NO: 993512 - DNA, 25 bp, Homo sapien
ccttcacatctgtcattcgaagtca

SEQ ID NO: 993513 - DNA, 25 bp, Homo sapien
tgtcattcgaagtcagtctaactga

SEQ ID NO: 993514 - DNA, 25 bp, Homo sapien
atttggaaaacggttctcaatccag

SEQ ID NO: 993515 - DNA, 25 bp, Homo sapien
gatttggaaaacggttctcaatcca

SEQ ID NO: 993516 - DNA, 25 bp, Homo sapien
tgaagaagacttattgatctgtggc

SEQ ID NO: 993517 - DNA, 25 bp, Homo sapien
attgatctgtggcaagctgccaggc

SEQ ID NO: 993518 - DNA, 25 bp, Homo sapien
tcccagagggcgctctggaaatgac

SEQ ID NO: 993519 - DNA, 25 bp, Homo sapien
cgctctggaaatgacgctgctttag

SEQ ID NO: 993520 - DNA, 25 bp, Homo sapien
ggttctggacaattggacaggcacc

SEQ ID NO: 993521 - DNA, 25 bp, Homo sapien
accagatctctcctcatagtcttgg

SEQ ID NO: 993522 - DNA, 25 bp, Homo sapien
cattagcgcaatttgatgggatctt

SEQ ID NO: 993523 - DNA, 25 bp, Homo sapien
tctgttgggtcaggttggcattcca

SEQ ID NO: 993524 - DNA, 25 bp, Homo sapien
atgtgttcatagcaaagatctgtgg

SEQ ID NO: 993525 - DNA, 25 bp, Homo sapien
tccaggtgagaaattcgggtgatgt

SEQ ID NO: 993526 - DNA, 25 bp, Homo sapien
gatggctatagcgaagttccctggg

SEQ ID NO: 993527 - DNA, 25 bp, Homo sapien
aggttgcgatggctatagcgaagtt

SEQ ID NO: 993528 - DNA, 25 bp, Homo sapien
gatggcccttccaagggatggtgtc

SEQ ID NO: 993529 - DNA, 25 bp, Homo sapien
cccttccaagggatggtgtctgcag

SEQ ID NO: 993530 - DNA, 25 bp, Homo sapien
cagaaaccagtcgttgatgctgtaa

SEQ ID NO: 993531 - DNA, 25 bp, Homo sapien
cccatcttcaaggatatgtggcctt

SEQ ID NO: 993532 - DNA, 25 bp, Homo sapien
tcgttgatgctgtaagtgtagggac

SEQ ID NO: 993533 - DNA, 25 bp, Homo sapien
tagggacaggcagtggagagcacct

SEQ ID NO: 993534 - DNA, 25 bp, Homo sapien
tcagaggaatccgattgtggccata

SEQ ID NO: 993535 - DNA, 25 bp, Homo sapien
gaatccgattgtggccataccacca

SEQ ID NO: 993536 - DNA, 25 bp, Homo sapien
tgtggccataccaccacctgttggt

SEQ ID NO: 993537 - DNA, 25 bp, Homo sapien
ggtaacacagtcttcatttcaggaa

SEQ ID NO: 993538 - DNA, 25 bp, Homo sapien
ttcacaacaaatccacacacaaata

SEQ ID NO: 993539 - DNA, 25 bp, Homo sapien
tccacacacaaatatagatgtgcat

SEQ ID NO: 993540 - DNA, 25 bp, Homo sapien
cacacacaaatatagatgtgcatct

SEQ ID NO: 993541 - DNA, 25 bp, Homo sapien
cacacaaatatagatgtgcatcttc

SEQ ID NO: 993542 - DNA, 25 bp, Homo sapien
ttgaccccgtttggagttatctgca

SEQ ID NO: 993543 - DNA, 25 bp, Homo sapien
gctggagagagggatgcaaactgct

SEQ ID NO: 993544 - DNA, 25 bp, Homo sapien
ccagagctgtttttgaccccgtttg

SEQ ID NO: 993545 - DNA, 25 bp, Homo sapien
aactgcttgccggttgttgtttcta

SEQ ID NO: 993546 - DNA, 25 bp, Homo sapien
ggttgcgtagccctttggttgataa

SEQ ID NO: 993547 - DNA, 25 bp, Homo sapien
tgttaggtggttgcgtagccctttg

SEQ ID NO: 993548 - DNA, 25 bp, Homo sapien
gcgtagccctttggttgataaagaa

SEQ ID NO: 993549 - DNA, 25 bp, Homo sapien
ctgttaggtggttgcgtagcccttt

SEQ ID NO: 993550 - DNA, 25 bp, Homo sapien
cctagtcctgggattctgattatga

SEQ ID NO: 993551 - DNA, 25 bp, Homo sapien
tcctgggattctgattatgaatttc

SEQ ID NO: 993552 - DNA, 25 bp, Homo sapien
ttcctagccagattatgagtttcca

SEQ ID NO: 993553 - DNA, 25 bp, Homo sapien
tatgaatttcctagccagattatga

SEQ ID NO: 993554 - DNA, 25 bp, Homo sapien
ggatgtgtaccccaagtccccatgc

SEQ ID NO: 993555 - DNA, 25 bp, Homo sapien
ccatgccctcgctgcaggccttgct

SEQ ID NO: 993556 - DNA, 25 bp, Homo sapien
gctccccaaacccatcacctacttg

SEQ ID NO: 993557 - DNA, 25 bp, Homo sapien
gggacaaggatgtgtaccccaagtc

SEQ ID NO: 993558 - DNA, 25 bp, Homo sapien
tatttgttcactccctttagttcca

SEQ ID NO: 993559 - DNA, 25 bp, Homo sapien
tggtttcgtggttcctatttgttca

SEQ ID NO: 993560 - DNA, 25 bp, Homo sapien
tcctgggacattgcactgagtttct

SEQ ID NO: 993561 - DNA, 25 bp, Homo sapien
gagccattgttacttgcaccacctc

SEQ ID NO: 993562 - DNA, 25 bp, Homo sapien
ctcctcaggactccagtgtcttctg

SEQ ID NO: 993563 - DNA, 25 bp, Homo sapien
ccctttctgtgaactgattttgaat

SEQ ID NO: 993564 - DNA, 25 bp, Homo sapien
tttctcccctttctgtgaactgatt

SEQ ID NO: 993565 - DNA, 25 bp, Homo sapien
tcccctttctgtgaactgattttga

SEQ ID NO: 993566 - DNA, 25 bp, Homo sapien
tgtacgtactcttgtacagacagtt

SEQ ID NO: 993567 - DNA, 25 bp, Homo sapien
tactcttgtacagacagttcatagt

SEQ ID NO: 993568 - DNA, 25 bp, Homo sapien
catagttactaaccaggtgaccagc

SEQ ID NO: 993569 - DNA, 25 bp, Homo sapien
tacgtactcttgtacagacagttca

SEQ ID NO: 993570 - DNA, 25 bp, Homo sapien
tcaaacactggcttgggaatgtcct

SEQ ID NO: 993571 - DNA, 25 bp, Homo sapien
tatcagaagcaagtatcacagggcc

SEQ ID NO: 993572 - DNA, 25 bp, Homo sapien
gaaaaggtcaaaagcattaagccag

SEQ ID NO: 993573 - DNA, 25 bp, Homo sapien
caaagagaacattaatcactgggcc

SEQ ID NO: 993574 - DNA, 25 bp, Homo sapien
cctggaatctggacatccatgacta

SEQ ID NO: 993575 - DNA, 25 bp, Homo sapien
ccatgactaattgggaaagcatctg

SEQ ID NO: 993576 - DNA, 25 bp, Homo sapien
tctggacatccatgactaattggga

SEQ ID NO: 993577 - DNA, 25 bp, Homo sapien
actctgtgggggcatttggtgcttt

SEQ ID NO: 993578 - DNA, 25 bp, Homo sapien
ctgtttactggatccctggagacca

SEQ ID NO: 993579 - DNA, 25 bp, Homo sapien
ctggagaccaaagagcctgctgatg

SEQ ID NO: 993580 - DNA, 25 bp, Homo sapien
tgctgatgggatcctttgacacact

SEQ ID NO: 993581 - DNA, 25 bp, Homo sapien
ccaaagagcctgctgatgggatcct

SEQ ID NO: 993582 - DNA, 25 bp, Homo sapien
gagtggctatgaagagaaagcttag

SEQ ID NO: 993583 - DNA, 25 bp, Homo sapien
ttaaagagtggctatgaagagaaag

SEQ ID NO: 993584 - DNA, 25 bp, Homo sapien
ctatgaagagaaagcttagatccac

SEQ ID NO: 993585 - DNA, 25 bp, Homo sapien
aaagagtggctatgaagagaaagct

SEQ ID NO: 993586 - DNA, 25 bp, Homo sapien
ttctgatgtgaagtccgggactgta

SEQ ID NO: 993587 - DNA, 25 bp, Homo sapien
tgggtcaccaaggtaagcgtgtttc

SEQ ID NO: 993588 - DNA, 25 bp, Homo sapien
atttaaacgggattccaccagcagg

SEQ ID NO: 993589 - DNA, 25 bp, Homo sapien
cgggactgtaaacgcccaggagcag

SEQ ID NO: 993590 - DNA, 25 bp, Homo sapien
tttgccaacctgcagatctgttcca

SEQ ID NO: 993591 - DNA, 25 bp, Homo sapien
ctttgccaacctgcagatctgttcc

SEQ ID NO: 993592 - DNA, 25 bp, Homo sapien
ttgccaacctgcagatctgttccag

SEQ ID NO: 993593 - DNA, 25 bp, Homo sapien
tgccaacctgcagatctgttccagg

SEQ ID NO: 993594 - DNA, 25 bp, Homo sapien
tatgttgaaagaataaccgttaaca

SEQ ID NO: 993595 - DNA, 25 bp, Homo sapien
gatggtctgctctaggggcattctc

SEQ ID NO: 993596 - DNA, 25 bp, Homo sapien
tatacataatatggccctgccataa

SEQ ID NO: 993597 - DNA, 25 bp, Homo sapien
gcattctcacgggtagaatgtcttt

SEQ ID NO: 993598 - DNA, 25 bp, Homo sapien
gaaacttcggcagtattccctggac

SEQ ID NO: 993599 - DNA, 25 bp, Homo sapien
gaccctttgtagtagaatgcctcca

SEQ ID NO: 993600 - DNA, 25 bp, Homo sapien
cattctatacaaagggttgtttggg

SEQ ID NO: 993601 - DNA, 25 bp, Homo sapien
tctctcctgggtgatgaccctttgt

SEQ ID NO: 993602 - DNA, 25 bp, Homo sapien
gtggtcatcctgtcggccactcccc

SEQ ID NO: 993603 - DNA, 25 bp, Homo sapien
tcctcgccttggtggtcatcctgtc

SEQ ID NO: 993604 - DNA, 25 bp, Homo sapien
cttggtggtcatcctgtcggccact

SEQ ID NO: 993605 - DNA, 25 bp, Homo sapien
cctcgccttggtggtcatcctgtcg

SEQ ID NO: 993606 - DNA, 25 bp, Homo sapien
tgtcttcctgggtgtgaggttgtga

SEQ ID NO: 993607 - DNA, 25 bp, Homo sapien
tcatcagcagattctggggtgtgtg

SEQ ID NO: 993608 - DNA, 25 bp, Homo sapien
gccaagccgcacaccctttgagctt

SEQ ID NO: 993609 - DNA, 25 bp, Homo sapien
gaccgcagatgacattatacgacat

SEQ ID NO: 993610 - DNA, 25 bp, Homo sapien
tttgaaactgggtcatatccaggcc

SEQ ID NO: 993611 - DNA, 25 bp, Homo sapien
tggactctggagtggtctgtctagt

SEQ ID NO: 993612 - DNA, 25 bp, Homo sapien
ttgccacaatgagtaagtcacatgt

SEQ ID NO: 993613 - DNA, 25 bp, Homo sapien
tctgtctagtagattggttttgaaa

SEQ ID NO: 993614 - DNA, 25 bp, Homo sapien
tgtcacgaggcagcaccaagctgtc

SEQ ID NO: 993615 - DNA, 25 bp, Homo sapien
tgagccaataataacacactagtgc

SEQ ID NO: 993616 - DNA, 25 bp, Homo sapien
gcaccaactatgcagctgtcacgag

SEQ ID NO: 993617 - DNA, 25 bp, Homo sapien
ggaggccccgatgttcccatgatct

SEQ ID NO: 993618 - DNA, 25 bp, Homo sapien
atgattccacagagtttggtaaggg

SEQ ID NO: 993619 - DNA, 25 bp, Homo sapien
tttttcctcagtgaatcagtggcaa

SEQ ID NO: 993620 - DNA, 25 bp, Homo sapien
gtgttgagaatgattccacagagtt

SEQ ID NO: 993621 - DNA, 25 bp, Homo sapien
cagtgaatcagtggcaagctctgtc

SEQ ID NO: 993622 - DNA, 25 bp, Homo sapien
gactggaaagaatgcgtcacctccg

SEQ ID NO: 993623 - DNA, 25 bp, Homo sapien
tgcgtcacctccgtgacagcttctt

SEQ ID NO: 993624 - DNA, 25 bp, Homo sapien
tggtcttggtgcttgtctacagaga

SEQ ID NO: 993625 - DNA, 25 bp, Homo sapien
gcttgtctacagagatttagtgtca

SEQ ID NO: 993626 - DNA, 25 bp, Homo sapien
ggggacaatagctctccaagacatt

SEQ ID NO: 993627 - DNA, 25 bp, Homo sapien
tatggggacaatagctctccaagac

SEQ ID NO: 993628 - DNA, 25 bp, Homo sapien
tgtatggggacaatagctctccaag

SEQ ID NO: 993629 - DNA, 25 bp, Homo sapien
tctgtatggggacaatagctctcca

SEQ ID NO: 993630 - DNA, 25 bp, Homo sapien
tgtccctgacttgggtaacactgga

SEQ ID NO: 993631 - DNA, 25 bp, Homo sapien
taacactggagtctattgctagcgt

SEQ ID NO: 993632 - DNA, 25 bp, Homo sapien
cttgggtaacactggagtctattgc

SEQ ID NO: 993633 - DNA, 25 bp, Homo sapien
ctattgctagcgtaagcactgtggg

SEQ ID NO: 993634 - DNA, 25 bp, Homo sapien
ggcagtggttcatgcagccggccat

SEQ ID NO: 993635 - DNA, 25 bp, Homo sapien
ctggccttcctacaggctctccgga

SEQ ID NO: 993636 - DNA, 25 bp, Homo sapien
aggctctccggagaggtcagcgggg

SEQ ID NO: 993637 - DNA, 25 bp, Homo sapien
ggccttcctacaggctctccggaga

SEQ ID NO: 993638 - DNA, 25 bp, Homo sapien
gacatggaccttatttgattttgac

SEQ ID NO: 993639 - DNA, 25 bp, Homo sapien
tatttgattttgactgtggggccag

SEQ ID NO: 993640 - DNA, 25 bp, Homo sapien
catggaccttatttgattttgactg

SEQ ID NO: 993641 - DNA, 25 bp, Homo sapien
cttgacatggaccttatttgatttt

SEQ ID NO: 993642 - DNA, 25 bp, Homo sapien
aagagccaatgttcgtacccagcag

SEQ ID NO: 993643 - DNA, 25 bp, Homo sapien
aaatggctttgccagcgacgtgcag

SEQ ID NO: 993644 - DNA, 25 bp, Homo sapien
catgttatgaaaagcgttggtccgc

SEQ ID NO: 993645 - DNA, 25 bp, Homo sapien
tctttcagagtatttagcaggcagc

SEQ ID NO: 993646 - DNA, 25 bp, Homo sapien
ggtcagccgataacatttggaaatt

SEQ ID NO: 993647 - DNA, 25 bp, Homo sapien
tgcagagttccaaaagttgggtcaa

SEQ ID NO: 993648 - DNA, 25 bp, Homo sapien
ttctgagggctaagggtcatgctga

SEQ ID NO: 993649 - DNA, 25 bp, Homo sapien
taaaaggatatagttggtcagccga

SEQ ID NO: 993650 - DNA, 25 bp, Homo sapien
tgcacttcactctgacagacagtgg

SEQ ID NO: 993651 - DNA, 25 bp, Homo sapien
taaaacctaggcctttggtgtgcac

SEQ ID NO: 993652 - DNA, 25 bp, Homo sapien
tctgcaagagggaagaagaccaata

SEQ ID NO: 993653 - DNA, 25 bp, Homo sapien
ttttaccgcctgtccatagagatgg

SEQ ID NO: 993654 - DNA, 25 bp, Homo sapien
gacacaccagtgagtccgtcctatt

SEQ ID NO: 993655 - DNA, 25 bp, Homo sapien
cacggaaggccctgactctttttct

SEQ ID NO: 993656 - DNA, 25 bp, Homo sapien
ctattcatagacatcggaggtgctg

SEQ ID NO: 993657 - DNA, 25 bp, Homo sapien
tccaaatcctacaagcacggaaggc

SEQ ID NO: 993658 - DNA, 25 bp, Homo sapien
tcattagtgagcaccttattcaagc

SEQ ID NO: 993659 - DNA, 25 bp, Homo sapien
ccttattcaagcaggcttcgatagc

SEQ ID NO: 993660 - DNA, 25 bp, Homo sapien
gagcaccttattcaagcaggcttcg

SEQ ID NO: 993661 - DNA, 25 bp, Homo sapien
ttgttctggattttcacatatctgc

SEQ ID NO: 993662 - DNA, 25 bp, Homo sapien
tggctctccctctcttgtacaggac

SEQ ID NO: 993663 - DNA, 25 bp, Homo sapien
tgttaaccctattacttctggctcc

SEQ ID NO: 993664 - DNA, 25 bp, Homo sapien
tggtgttattgctctccgggccctc

SEQ ID NO: 993665 - DNA, 25 bp, Homo sapien
ctttgcaggaattggtgttgcacca

SEQ ID NO: 993666 - DNA, 25 bp, Homo sapien
tgctgttggcttagcagcgagaaag

SEQ ID NO: 993667 - DNA, 25 bp, Homo sapien
tggcttagcagcgagaaaggggcca

SEQ ID NO: 993668 - DNA, 25 bp, Homo sapien
ggcttagcagcgagaaaggggccat

SEQ ID NO: 993669 - DNA, 25 bp, Homo sapien
ttctgctgttggcttagcagcgaga

SEQ ID NO: 993670 - DNA, 25 bp, Homo sapien
tgctttagcctccagctgttttggt

SEQ ID NO: 993671 - DNA, 25 bp, Homo sapien
gttcaaacagcctctatagccacag

SEQ ID NO: 993672 - DNA, 25 bp, Homo sapien
cccagggttcaaacagcctctatag

SEQ ID NO: 993673 - DNA, 25 bp, Homo sapien
tggtcctcggaggataggcagcacc

SEQ ID NO: 993674 - DNA, 25 bp, Homo sapien
actttgctgtgcccttcaattcccg

SEQ ID NO: 993675 - DNA, 25 bp, Homo sapien
gtgaatgaatgtccggctctcaggg

SEQ ID NO: 993676 - DNA, 25 bp, Homo sapien
taagggcttgattaattcgtgaatg

SEQ ID NO: 993677 - DNA, 25 bp, Homo sapien
aacaccctcctgctttgtaacccag

SEQ ID NO: 993678 - DNA, 25 bp, Homo sapien
gtcatcatcattatttgtgcaaggt

SEQ ID NO: 993679 - DNA, 25 bp, Homo sapien
aaaaaaatcccagtcatcatcatta

SEQ ID NO: 993680 - DNA, 25 bp, Homo sapien
cccagtcatcatcattatttgtgca

SEQ ID NO: 993681 - DNA, 25 bp, Homo sapien
cagtcatcatcattatttgtgcaag

SEQ ID NO: 993682 - DNA, 25 bp, Homo sapien
ctcagagttagggtttcctccttgt

SEQ ID NO: 993683 - DNA, 25 bp, Homo sapien
ggggattattcttaggccagtccca

SEQ ID NO: 993684 - DNA, 25 bp, Homo sapien
cctcagagttagggtttcctccttg

SEQ ID NO: 993685 - DNA, 25 bp, Homo sapien
ccagggggattattcttaggccagt

SEQ ID NO: 993686 - DNA, 25 bp, Homo sapien
ttgagaaaagattgtccaggcaggc

SEQ ID NO: 993687 - DNA, 25 bp, Homo sapien
gaggcaggataaatagctttgctcc

SEQ ID NO: 993688 - DNA, 25 bp, Homo sapien
tcaggcacttccctttgacagagag

SEQ ID NO: 993689 - DNA, 25 bp, Homo sapien
gagggacgcccaaggatcctccagg

SEQ ID NO: 993690 - DNA, 25 bp, Homo sapien
ctttggctggatcatcggcgtgctg

SEQ ID NO: 993691 - DNA, 25 bp, Homo sapien
tgcgcagaatgacggctggcttcat

SEQ ID NO: 993692 - DNA, 25 bp, Homo sapien
gctgctgactgttgctcgcctgctt

SEQ ID NO: 993693 - DNA, 25 bp, Homo sapien
gaccgaggccttatgcagtacgtgg

SEQ ID NO: 993694 - DNA, 25 bp, Homo sapien
acacccaactcaggtcccttctgtg

SEQ ID NO: 993695 - DNA, 25 bp, Homo sapien
aacacccaactcaggtcccttctgt

SEQ ID NO: 993696 - DNA, 25 bp, Homo sapien
cacggacagacaagcaaggtgggcc

SEQ ID NO: 993697 - DNA, 25 bp, Homo sapien
gggtccgttgcttccataccacgga

SEQ ID NO: 993698 - DNA, 25 bp, Homo sapien
tccataccacggacagacaagcaag

SEQ ID NO: 993699 - DNA, 25 bp, Homo sapien
tctctggggtggaaatcactaaact

SEQ ID NO: 993700 - DNA, 25 bp, Homo sapien
tacctctggagtggttgtcgagaag

SEQ ID NO: 993701 - DNA, 25 bp, Homo sapien
ctctacctctggagtggttgtcgag

SEQ ID NO: 993702 - DNA, 25 bp, Homo sapien
ttgtcgagaagggactgattcctcc

SEQ ID NO: 993703 - DNA, 25 bp, Homo sapien
ggactgattcctccaatagcccttt

SEQ ID NO: 993704 - DNA, 25 bp, Homo sapien
actgcagatgatgcacccctgcaaa

SEQ ID NO: 993705 - DNA, 25 bp, Homo sapien
gaagcctggcaagcctgaacaattc

SEQ ID NO: 993706 - DNA, 25 bp, Homo sapien
ggcaatctctctgaatctcactgca

SEQ ID NO: 993707 - DNA, 25 bp, Homo sapien
attcagcagtctgtacaatacaggg

SEQ ID NO: 993708 - DNA, 25 bp, Homo sapien
cccgagaggaaagtagagctaaaag

SEQ ID NO: 993709 - DNA, 25 bp, Homo sapien
cagaagggtgcggaagatgagtcaa

SEQ ID NO: 993710 - DNA, 25 bp, Homo sapien
taattctcattcctcgaataaaccc

SEQ ID NO: 993711 - DNA, 25 bp, Homo sapien
gccaggtagagacccattcccaagg

SEQ ID NO: 993712 - DNA, 25 bp, Homo sapien
gaagaggacattcctgatgggctga

SEQ ID NO: 993713 - DNA, 25 bp, Homo sapien
gagaagaggacattcctgatgggct

SEQ ID NO: 993714 - DNA, 25 bp, Homo sapien
tcctttgggccctcttctgaccacc

SEQ ID NO: 993715 - DNA, 25 bp, Homo sapien
aggacattcctgatgggctgaagtc

SEQ ID NO: 993716 - DNA, 25 bp, Homo sapien
cagattttaccaactcagcctgagt

SEQ ID NO: 993717 - DNA, 25 bp, Homo sapien
tggataatgataagccctcttcttc

SEQ ID NO: 993718 - DNA, 25 bp, Homo sapien
tgtgtacaggttgtgataggcttcc

SEQ ID NO: 993719 - DNA, 25 bp, Homo sapien
tctcaccagctagttgatgaatcat

SEQ ID NO: 993720 - DNA, 25 bp, Homo sapien
gtaaactcttagatctaggagataa

SEQ ID NO: 993721 - DNA, 25 bp, Homo sapien
cccactggaggctgtaaactcttag

SEQ ID NO: 993722 - DNA, 25 bp, Homo sapien
tcatgtacccccactggaggctgta

SEQ ID NO: 993723 - DNA, 25 bp, Homo sapien
aatgtcatcatgtacccccactgga

SEQ ID NO: 993724 - DNA, 25 bp, Homo sapien
gcagttgctccccagagtagcattt

SEQ ID NO: 993725 - DNA, 25 bp, Homo sapien
gaagggtcctgagtaagcacttcct

SEQ ID NO: 993726 - DNA, 25 bp, Homo sapien
tggttctgacaaagcccacagaatg

SEQ ID NO: 993727 - DNA, 25 bp, Homo sapien
tccaagttccatgcttctggttctg

SEQ ID NO: 993728 - DNA, 25 bp, Homo sapien
cattcattattatggctcttcaaaa

SEQ ID NO: 993729 - DNA, 25 bp, Homo sapien
attcattattatggctcttcaaaat

SEQ ID NO: 993730 - DNA, 25 bp, Homo sapien
ttcattattatggctcttcaaaata

SEQ ID NO: 993731 - DNA, 25 bp, Homo sapien
aagatgtcttgggagattcaggact

SEQ ID NO: 993732 - DNA, 25 bp, Homo sapien
gaggatgagaatttcagactccagt

SEQ ID NO: 993733 - DNA, 25 bp, Homo sapien
cttgggagattcaggactaggatta

SEQ ID NO: 993734 - DNA, 25 bp, Homo sapien
gaacataatgggtaatttcaaagac

SEQ ID NO: 993735 - DNA, 25 bp, Homo sapien
tctagcttcagtgtagagtcttcca

SEQ ID NO: 993736 - DNA, 25 bp, Homo sapien
taatgaaaccctttgaacacgctgc

SEQ ID NO: 993737 - DNA, 25 bp, Homo sapien
catttgctcagtccttgggatggct

SEQ ID NO: 993738 - DNA, 25 bp, Homo sapien
tcagaagtttgtaaaggctctagct

SEQ ID NO: 993739 - DNA, 25 bp, Homo sapien
cctctctccacatagcaacaagaga

SEQ ID NO: 993740 - DNA, 25 bp, Homo sapien
ccctgatacacagccacgtgggtgt

SEQ ID NO: 993741 - DNA, 25 bp, Homo sapien
tgccttgcagcgacctgtagggctc

SEQ ID NO: 993742 - DNA, 25 bp, Homo sapien
attggggatccgcagacaccgttcc

SEQ ID NO: 993743 - DNA, 25 bp, Homo sapien
ggattcactgatgtcgtcactacaa

SEQ ID NO: 993744 - DNA, 25 bp, Homo sapien
tggcacttctaacattagcgacgca

SEQ ID NO: 993745 - DNA, 25 bp, Homo sapien
tattggccccagagtagaaagcggg

SEQ ID NO: 993746 - DNA, 25 bp, Homo sapien
tagcgacgcattccagggatccaag

SEQ ID NO: 993747 - DNA, 25 bp, Homo sapien
caccagccaccactcctactgtcat

SEQ ID NO: 993748 - DNA, 25 bp, Homo sapien
tcgccggactttgtgttgcctcatc

SEQ ID NO: 993749 - DNA, 25 bp, Homo sapien
ccatcagttcttgacttttggcttc

SEQ ID NO: 993750 - DNA, 25 bp, Homo sapien
gcaaacaccaccacttgcgaccgcg

SEQ ID NO: 993751 - DNA, 25 bp, Homo sapien
ttgcgaccgcgtcttgatccccatc

SEQ ID NO: 993752 - DNA, 25 bp, Homo sapien
ctggcgaggatggggtggtgaaggg

SEQ ID NO: 993753 - DNA, 25 bp, Homo sapien
gatggggtggtgaagggacagtgga

SEQ ID NO: 993754 - DNA, 25 bp, Homo sapien
ggcgaggatggggtggtgaagggac

SEQ ID NO: 993755 - DNA, 25 bp, Homo sapien
gaggatggggtggtgaagggacagt

SEQ ID NO: 993756 - DNA, 25 bp, Homo sapien
cactccctgggcagactggagcctt

SEQ ID NO: 993757 - DNA, 25 bp, Homo sapien
ccagctgccttacacccagtgaaac

SEQ ID NO: 993758 - DNA, 25 bp, Homo sapien
ctgccttacacccagtgaaacaaga

SEQ ID NO: 993759 - DNA, 25 bp, Homo sapien
agctgccttacacccagtgaaacaa

SEQ ID NO: 993760 - DNA, 25 bp, Homo sapien
tgcacagcagtagttcgaagaagct

SEQ ID NO: 993761 - DNA, 25 bp, Homo sapien
caagtttaggatgagaccaagtctc

SEQ ID NO: 993762 - DNA, 25 bp, Homo sapien
tcaagtgtccttgtgagggtgagac

SEQ ID NO: 993763 - DNA, 25 bp, Homo sapien
tagatagagcccagctggtaacggg

SEQ ID NO: 993764 - DNA, 25 bp, Homo sapien
taccagtgcgtctgtgttgtgagcg

SEQ ID NO: 993765 - DNA, 25 bp, Homo sapien
gaccaggtgttgctccttaaggaac

SEQ ID NO: 993766 - DNA, 25 bp, Homo sapien
tagaccctctccgtctgtaccagtg

SEQ ID NO: 993767 - DNA, 25 bp, Homo sapien
gttgtgagcgtgacgaagcctttcc

SEQ ID NO: 993768 - DNA, 25 bp, Homo sapien
tgtaaaaatgtacaaataaaagtga

SEQ ID NO: 993769 - DNA, 25 bp, Homo sapien
ctgtaaaaatgtacaaataaaagtg

SEQ ID NO: 993770 - DNA, 25 bp, Homo sapien
tgtactgcaggattctaacaatgcc

SEQ ID NO: 993771 - DNA, 25 bp, Homo sapien
gcccttggaggcagcaattcctgtg

SEQ ID NO: 993772 - DNA, 25 bp, Homo sapien
caggaaaggcgattcaaaccagatc

SEQ ID NO: 993773 - DNA, 25 bp, Homo sapien
cagacaaggagtggtgtgtactgca

SEQ ID NO: 993774 - DNA, 25 bp, Homo sapien
cctgaggccgtatggcgctgcttct

SEQ ID NO: 993775 - DNA, 25 bp, Homo sapien
ctactgccctgaggccgtatggcgc

SEQ ID NO: 993776 - DNA, 25 bp, Homo sapien
ctgctactgccctgaggccgtatgg

SEQ ID NO: 993777 - DNA, 25 bp, Homo sapien
tgccctgaggccgtatggcgctgct

SEQ ID NO: 993778 - DNA, 25 bp, Homo sapien
tcagaatcccacatgggtgcgccat

SEQ ID NO: 993779 - DNA, 25 bp, Homo sapien
ctggtgtcagaatcccacatgggtg

SEQ ID NO: 993780 - DNA, 25 bp, Homo sapien
tggtgtcagaatcccacatgggtgc

SEQ ID NO: 993781 - DNA, 25 bp, Homo sapien
tgtcagaatcccacatgggtgcgcc

SEQ ID NO: 993782 - DNA, 25 bp, Homo sapien
gaaagcccggaccatgtgaccaagt

SEQ ID NO: 993783 - DNA, 25 bp, Homo sapien
ttcctgagaaagcccggaccatgtg

SEQ ID NO: 993784 - DNA, 25 bp, Homo sapien
aagcccggaccatgtgaccaagtag

SEQ ID NO: 993785 - DNA, 25 bp, Homo sapien
tcctgagaaagcccggaccatgtga

SEQ ID NO: 993786 - DNA, 25 bp, Homo sapien
taggaaccacgtagatatggaccgc

SEQ ID NO: 993787 - DNA, 25 bp, Homo sapien
cgctaaaggcgagtttccgtaacag

SEQ ID NO: 993788 - DNA, 25 bp, Homo sapien
tatggaccgctaaaggcgagtttcc

SEQ ID NO: 993789 - DNA, 25 bp, Homo sapien
cgtagatatggaccgctaaaggcga

SEQ ID NO: 993790 - DNA, 25 bp, Homo sapien
tctgcttgttccttccaccttcgtt

SEQ ID NO: 993791 - DNA, 25 bp, Homo sapien
ctgaaaagaggtgggaacgacagaa

SEQ ID NO: 993792 - DNA, 25 bp, Homo sapien
aagaggtgggaacgacagaaatgaa

SEQ ID NO: 993793 - DNA, 25 bp, Homo sapien
cttccaccttcgtttcatttttgtg

SEQ ID NO: 993794 - DNA, 25 bp, Homo sapien
aagaagcagactcttggcctgtgat

SEQ ID NO: 993795 - DNA, 25 bp, Homo sapien
ggtggtacatgtctccccagaatcc

SEQ ID NO: 993796 - DNA, 25 bp, Homo sapien
gttgccaaggtaattgtgaatctcc

SEQ ID NO: 993797 - DNA, 25 bp, Homo sapien
tgcaggttgtctgtgtgacatctcc

SEQ ID NO: 993798 - DNA, 25 bp, Homo sapien
tggcatccctagcagctggagccca

SEQ ID NO: 993799 - DNA, 25 bp, Homo sapien
acatggcatccctagcagctggagc

SEQ ID NO: 993800 - DNA, 25 bp, Homo sapien
atggcatccctagcagctggagccc

SEQ ID NO: 993801 - DNA, 25 bp, Homo sapien
catggcatccctagcagctggagcc

SEQ ID NO: 993802 - DNA, 25 bp, Homo sapien
tgcagtccaggaagatcttctcaat

SEQ ID NO: 993803 - DNA, 25 bp, Homo sapien
gtccaggaagatcttctcaattctg

SEQ ID NO: 993804 - DNA, 25 bp, Homo sapien
cagtccaggaagatcttctcaattc

SEQ ID NO: 993805 - DNA, 25 bp, Homo sapien
ctgcagtccaggaagatcttctcaa

SEQ ID NO: 993806 - DNA, 25 bp, Homo sapien
tccccttatagttgggacacagtgt

SEQ ID NO: 993807 - DNA, 25 bp, Homo sapien
ctggtatgtgatccatataaggatc

SEQ ID NO: 993808 - DNA, 25 bp, Homo sapien
tgtcagtggcctgtgagaacctggt

SEQ ID NO: 993809 - DNA, 25 bp, Homo sapien
ggcccccagtgtcagtcactggaga

SEQ ID NO: 993810 - DNA, 25 bp, Homo sapien
caggatagcagcttgagttatgatc

SEQ ID NO: 993811 - DNA, 25 bp, Homo sapien
ccagttgcctcctggtttggcaccg

SEQ ID NO: 993812 - DNA, 25 bp, Homo sapien
tgtggccttcacctctaattctggc

SEQ ID NO: 993813 - DNA, 25 bp, Homo sapien
ctgaacagggactataggaataaga

SEQ ID NO: 993814 - DNA, 25 bp, Homo sapien
tgacctggaaggtctccttcttcta

SEQ ID NO: 993815 - DNA, 25 bp, Homo sapien
catcttgtgacaactagcttggcct

SEQ ID NO: 993816 - DNA, 25 bp, Homo sapien
gacctggaaggtctccttcttctaa

SEQ ID NO: 993817 - DNA, 25 bp, Homo sapien
ccttggcatcttgtgacaactagct

SEQ ID NO: 993818 - DNA, 25 bp, Homo sapien
ctgttctgagttggtctgtccacct

SEQ ID NO: 993819 - DNA, 25 bp, Homo sapien
tgctcttgatccgaacccttcccat

SEQ ID NO: 993820 - DNA, 25 bp, Homo sapien
ctgtgctcttgatccgaacccttcc

SEQ ID NO: 993821 - DNA, 25 bp, Homo sapien
ttctgttctgagttggtctgtccac

SEQ ID NO: 993822 - DNA, 25 bp, Homo sapien
catggattgactacactttgaggtc

SEQ ID NO: 993823 - DNA, 25 bp, Homo sapien
tgggttatcaaattgcagaatcagc

SEQ ID NO: 993824 - DNA, 25 bp, Homo sapien
tttatccttttgattcaccaggagc

SEQ ID NO: 993825 - DNA, 25 bp, Homo sapien
caccaggagcaatcacacattgtag

SEQ ID NO: 993826 - DNA, 25 bp, Homo sapien
aaactgttagtggtagagatgggct

SEQ ID NO: 993827 - DNA, 25 bp, Homo sapien
ggggataaactgttagtggtagaga

SEQ ID NO: 993828 - DNA, 25 bp, Homo sapien
tagtggtagagatgggctagatgct

SEQ ID NO: 993829 - DNA, 25 bp, Homo sapien
tggtagagatgggctagatgctcac

SEQ ID NO: 993830 - DNA, 25 bp, Homo sapien
ggatcctggatacataagtcaccac

SEQ ID NO: 993831 - DNA, 25 bp, Homo sapien
caatgtgattgagttctacccaggt

SEQ ID NO: 993832 - DNA, 25 bp, Homo sapien
tagggagactatattccacagcctc

SEQ ID NO: 993833 - DNA, 25 bp, Homo sapien
tatgccacttgtagatatacccaaa

SEQ ID NO: 993834 - DNA, 25 bp, Homo sapien
aagcagaacatgacccagaagcatc

SEQ ID NO: 993835 - DNA, 25 bp, Homo sapien
tgacttccagcagcgggcttgcatg

SEQ ID NO: 993836 - DNA, 25 bp, Homo sapien
tgtgagatccattcaagctggagct

SEQ ID NO: 993837 - DNA, 25 bp, Homo sapien
gcacatttgcttgtacggctcaacg

SEQ ID NO: 993838 - DNA, 25 bp, Homo sapien
accttcctgaggctggccagaacat

SEQ ID NO: 993839 - DNA, 25 bp, Homo sapien
tcatccaccttcctgaggctggcca

SEQ ID NO: 993840 - DNA, 25 bp, Homo sapien
cttcctgaggctggccagaacatac

SEQ ID NO: 993841 - DNA, 25 bp, Homo sapien
ccaccttcctgaggctggccagaac

SEQ ID NO: 993842 - DNA, 25 bp, Homo sapien
gccctggtcattatatggacattcc

SEQ ID NO: 993843 - DNA, 25 bp, Homo sapien
ccaaaatgtgtctttccggattaca

SEQ ID NO: 993844 - DNA, 25 bp, Homo sapien
cattgcatccgctttgccctggtca

SEQ ID NO: 993845 - DNA, 25 bp, Homo sapien
gacagccaccacataagaatcacag

SEQ ID NO: 993846 - DNA, 25 bp, Homo sapien
tttcccctgcttgcaagtgtttaga

SEQ ID NO: 993847 - DNA, 25 bp, Homo sapien
ggcctccagaagtcacttgatttct

SEQ ID NO: 993848 - DNA, 25 bp, Homo sapien
gaccaatctgtgaactcagggcaat

SEQ ID NO: 993849 - DNA, 25 bp, Homo sapien
cagaatagtcactggagagtgtagg

SEQ ID NO: 993850 - DNA, 25 bp, Homo sapien
ttgaggtgttcttggattgggcaca

SEQ ID NO: 993851 - DNA, 25 bp, Homo sapien
tcatattgaggtgttcttggattgg

SEQ ID NO: 993852 - DNA, 25 bp, Homo sapien
catactgtggaacgtcctccaggaa

SEQ ID NO: 993853 - DNA, 25 bp, Homo sapien
acagctggtcatactgtggaacgtc

SEQ ID NO: 993854 - DNA, 25 bp, Homo sapien
aaaaatttctgggtgttatactgag

SEQ ID NO: 993855 - DNA, 25 bp, Homo sapien
tctgtcagacactcaaagctattat

SEQ ID NO: 993856 - DNA, 25 bp, Homo sapien
ttctcatcagctgtatttaatctcc

SEQ ID NO: 993857 - DNA, 25 bp, Homo sapien
ttggcctggtatgggagcattcccc

SEQ ID NO: 993858 - DNA, 25 bp, Homo sapien
ttggcaggcttcccatcaaatattg

SEQ ID NO: 993859 - DNA, 25 bp, Homo sapien
ggcaggcttcccatcaaatattgtt

SEQ ID NO: 993860 - DNA, 25 bp, Homo sapien
cttggcaggcttcccatcaaatatt

SEQ ID NO: 993861 - DNA, 25 bp, Homo sapien
tggcaggcttcccatcaaatattgt

SEQ ID NO: 993862 - DNA, 25 bp, Homo sapien
gaagagtgagccaataaacgaggga

SEQ ID NO: 993863 - DNA, 25 bp, Homo sapien
agagtgagccaataaacgagggaac

SEQ ID NO: 993864 - DNA, 25 bp, Homo sapien
tgagccaataaacgagggaacgccg

SEQ ID NO: 993865 - DNA, 25 bp, Homo sapien
agtgagccaataaacgagggaacgc

SEQ ID NO: 993866 - DNA, 25 bp, Homo sapien
cagcggtttcccttgaacgagccgg

SEQ ID NO: 993867 - DNA, 25 bp, Homo sapien
gtccctgagcatccgagccggttcc

SEQ ID NO: 993868 - DNA, 25 bp, Homo sapien
gcggcggcagcggtttcccttgaac

SEQ ID NO: 993869 - DNA, 25 bp, Homo sapien
cggcggaacccgagggcggcggcag

SEQ ID NO: 993870 - DNA, 25 bp, Homo sapien
aacaaaggcaagacaactggaagta

SEQ ID NO: 993871 - DNA, 25 bp, Homo sapien
tgaatttgttcctccatcccctgtt

SEQ ID NO: 993872 - DNA, 25 bp, Homo sapien
ttcctccatcccctgttactatcct

SEQ ID NO: 993873 - DNA, 25 bp, Homo sapien
gttcctccatcccctgttactatcc

SEQ ID NO: 993874 - DNA, 25 bp, Homo sapien
ctccatcccctgttactatcctcat

SEQ ID NO: 993875 - DNA, 25 bp, Homo sapien
cccattagtggtacccagagctttg

SEQ ID NO: 993876 - DNA, 25 bp, Homo sapien
tacagtctggacttcagcataaaca

SEQ ID NO: 993877 - DNA, 25 bp, Homo sapien
ggtcagagaaggatgcccattagtg

SEQ ID NO: 993878 - DNA, 25 bp, Homo sapien
gcataaacatagcagccagtcagag

SEQ ID NO: 993879 - DNA, 25 bp, Homo sapien
aaatggagattctgtcggccgaaaa

SEQ ID NO: 993880 - DNA, 25 bp, Homo sapien
tgtcggccgaaaagatcaagcattc

SEQ ID NO: 993881 - DNA, 25 bp, Homo sapien
attctgtcggccgaaaagatcaagc

SEQ ID NO: 993882 - DNA, 25 bp, Homo sapien
gccgaaaagatcaagcattcttcct

SEQ ID NO: 993883 - DNA, 25 bp, Homo sapien
tcctcctgctggatcagctgtcttt

SEQ ID NO: 993884 - DNA, 25 bp, Homo sapien
ttcctcctgctggatcagctgtctt

SEQ ID NO: 993885 - DNA, 25 bp, Homo sapien
aaggcagagctggtcactattttcc

SEQ ID NO: 993886 - DNA, 25 bp, Homo sapien
gcagagctggtcactattttcccat

SEQ ID NO: 993887 - DNA, 25 bp, Homo sapien
tcagaaaggcagagctggtcactat

SEQ ID NO: 993888 - DNA, 25 bp, Homo sapien
gagctggtcactattttcccattat

SEQ ID NO: 993889 - DNA, 25 bp, Homo sapien
gctccatgggcaaccatgggcacag

SEQ ID NO: 993890 - DNA, 25 bp, Homo sapien
tgctccatgggcaaccatgggcaca

SEQ ID NO: 993891 - DNA, 25 bp, Homo sapien
ttctaatccagagccttctaatttc

SEQ ID NO: 993892 - DNA, 25 bp, Homo sapien
ttttctaatccagagccttctaatt

SEQ ID NO: 993893 - DNA, 25 bp, Homo sapien
cattttctaatccagagccttctaa

SEQ ID NO: 993894 - DNA, 25 bp, Homo sapien
taatccagagccttctaatttcttt

SEQ ID NO: 993895 - DNA, 25 bp, Homo sapien
atgccaaatcctcatacaaagaata

SEQ ID NO: 993896 - DNA, 25 bp, Homo sapien
ggtgattatcacattggagaaacat

SEQ ID NO: 993897 - DNA, 25 bp, Homo sapien
tacaaagaataaccttcagtttctc

SEQ ID NO: 993898 - DNA, 25 bp, Homo sapien
gaaacatccccgctcatctgtgctt

SEQ ID NO: 993899 - DNA, 25 bp, Homo sapien
aaaaatgatctaaggtgctacccca

SEQ ID NO: 993900 - DNA, 25 bp, Homo sapien
tacagaagcatagagggcttgtgca

SEQ ID NO: 993901 - DNA, 25 bp, Homo sapien
tgcagaaaaaatccacagggcgagt

SEQ ID NO: 993902 - DNA, 25 bp, Homo sapien
gaggagcctgttgccttttggagac

SEQ ID NO: 993903 - DNA, 25 bp, Homo sapien
gcaccacgaattgtgcccacatata

SEQ ID NO: 993904 - DNA, 25 bp, Homo sapien
gacctctttgttatacaggcatacc

SEQ ID NO: 993905 - DNA, 25 bp, Homo sapien
taagtgttcacataaagaagacgca

SEQ ID NO: 993906 - DNA, 25 bp, Homo sapien
taattaaatgtgtgcgttgactgct

SEQ ID NO: 993907 - DNA, 25 bp, Homo sapien
tatgagttccttaagacatggcagg

SEQ ID NO: 993908 - DNA, 25 bp, Homo sapien
gaattaggatgtttccagaaccagc

SEQ ID NO: 993909 - DNA, 25 bp, Homo sapien
agcactgtgcccatcgtagtaggca

SEQ ID NO: 993910 - DNA, 25 bp, Homo sapien
tataaccatgttgttcaaatcccaa

SEQ ID NO: 993911 - DNA, 25 bp, Homo sapien
gtgagacctccaactccagtaggcc

SEQ ID NO: 993912 - DNA, 25 bp, Homo sapien
gcagggggctcttttagcattgaca

SEQ ID NO: 993913 - DNA, 25 bp, Homo sapien
cagtaggccactgatgtgtttgagc

SEQ ID NO: 993914 - DNA, 25 bp, Homo sapien
cagtgaggagtatgaagcgatgcct

SEQ ID NO: 993915 - DNA, 25 bp, Homo sapien
tattttggtgtgacggttggccctc

SEQ ID NO: 993916 - DNA, 25 bp, Homo sapien
tgagaccacactttaggccaccggt

SEQ ID NO: 993917 - DNA, 25 bp, Homo sapien
aatggtttgcatgagagccacctgg

SEQ ID NO: 993918 - DNA, 25 bp, Homo sapien
tcccaacagtgtcgtcagagggtcc

SEQ ID NO: 993919 - DNA, 25 bp, Homo sapien
aggaccagtgcagaatctggctttc

SEQ ID NO: 993920 - DNA, 25 bp, Homo sapien
gcatttagcatatcgtggttctgta

SEQ ID NO: 993921 - DNA, 25 bp, Homo sapien
tggttctgtaacaatatcaaggacc

SEQ ID NO: 993922 - DNA, 25 bp, Homo sapien
ttttctgataggctaccagtgtgtg

SEQ ID NO: 993923 - DNA, 25 bp, Homo sapien
aatctgcattgggaagtcggccacc

SEQ ID NO: 993924 - DNA, 25 bp, Homo sapien
catggaagacgtttaatagtgcaac

SEQ ID NO: 993925 - DNA, 25 bp, Homo sapien
ttagggaaggatatggaagccactt

SEQ ID NO: 993926 - DNA, 25 bp, Homo sapien
tagtgcaactaaaagagagtcagct

SEQ ID NO: 993927 - DNA, 25 bp, Homo sapien
aaccgtagttgctttctattaagat

SEQ ID NO: 993928 - DNA, 25 bp, Homo sapien
gtgccagtgcttcacatatgtaact

SEQ ID NO: 993929 - DNA, 25 bp, Homo sapien
gtgcttcacatatgtaactgatgca

SEQ ID NO: 993930 - DNA, 25 bp, Homo sapien
cgaaagtttttgagtgccaccatga

SEQ ID NO: 993931 - DNA, 25 bp, Homo sapien
gctctgctcatggagtaggccacca

SEQ ID NO: 993932 - DNA, 25 bp, Homo sapien
tggcttctagaaggacaggtagcag

SEQ ID NO: 993933 - DNA, 25 bp, Homo sapien
ggagaaagtttgtccagaccgtggc

SEQ ID NO: 993934 - DNA, 25 bp, Homo sapien
tgtaagtgaagtcaggttcagcccc

SEQ ID NO: 993935 - DNA, 25 bp, Homo sapien
ctggagaagggattgcagcacgcac

SEQ ID NO: 993936 - DNA, 25 bp, Homo sapien
tggagaagggattgcagcacgcacg

SEQ ID NO: 993937 - DNA, 25 bp, Homo sapien
tcaacctctctgcacacaacttggt

SEQ ID NO: 993938 - DNA, 25 bp, Homo sapien
aatatagttatatcaacctctctgc

SEQ ID NO: 993939 - DNA, 25 bp, Homo sapien
acaacttggttcagatatatacaga

SEQ ID NO: 993940 - DNA, 25 bp, Homo sapien
ctgtaaatatagttatatcaacctc

SEQ ID NO: 993941 - DNA, 25 bp, Homo sapien
ccatgacttgggagtaaacggagcc

SEQ ID NO: 993942 - DNA, 25 bp, Homo sapien
tgggcacaccagtattcagggcaaa

SEQ ID NO: 993943 - DNA, 25 bp, Homo sapien
tacatttaaggcgacagggaggcta

SEQ ID NO: 993944 - DNA, 25 bp, Homo sapien
tttgcatggataccaacgagcccca

SEQ ID NO: 993945 - DNA, 25 bp, Homo sapien
tgacttattcaggaacaacagggca

SEQ ID NO: 993946 - DNA, 25 bp, Homo sapien
tagagaactggtagcaaaggatcct

SEQ ID NO: 993947 - DNA, 25 bp, Homo sapien
gactggcagaaaagcaggtccacat

SEQ ID NO: 993948 - DNA, 25 bp, Homo sapien
aggaggccggtggtcatcataatgc

SEQ ID NO: 993949 - DNA, 25 bp, Homo sapien
tagcccaggcaagacatactctgag

SEQ ID NO: 993950 - DNA, 25 bp, Homo sapien
gaatctggcatagagcaaggcttcg

SEQ ID NO: 993951 - DNA, 25 bp, Homo sapien
caaggcttcgaaaggtgatttccga

SEQ ID NO: 993952 - DNA, 25 bp, Homo sapien
tcatgttggggagcagaatctggca

SEQ ID NO: 993953 - DNA, 25 bp, Homo sapien
taatttgcttgcaagctccaaggcc

SEQ ID NO: 993954 - DNA, 25 bp, Homo sapien
ggctgctgacatcccacgtgaagtg

SEQ ID NO: 993955 - DNA, 25 bp, Homo sapien
tcacagacatggatgcactgacggc

SEQ ID NO: 993956 - DNA, 25 bp, Homo sapien
tggttgacaaacacgtaagctgccc

SEQ ID NO: 993957 - DNA, 25 bp, Homo sapien
caaagtctgaaatatccggttgttt

SEQ ID NO: 993958 - DNA, 25 bp, Homo sapien
catgacatcaatgccataggcctcc

SEQ ID NO: 993959 - DNA, 25 bp, Homo sapien
atgccccgggcatgctctgctgtca

SEQ ID NO: 993960 - DNA, 25 bp, Homo sapien
cagagttttgtcttgactggcagac

SEQ ID NO: 993961 - DNA, 25 bp, Homo sapien
gaagtgacctgggtttaaacacagc

SEQ ID NO: 993962 - DNA, 25 bp, Homo sapien
cagtggcacatgtcatacctggatg

SEQ ID NO: 993963 - DNA, 25 bp, Homo sapien
caaagtgcctggtgcctgaagcggc

SEQ ID NO: 993964 - DNA, 25 bp, Homo sapien
tcaggaatttcagacacagtggcac

SEQ ID NO: 993965 - DNA, 25 bp, Homo sapien
tcctcttcacaagggttgtagtctt

SEQ ID NO: 993966 - DNA, 25 bp, Homo sapien
cttcacaagggttgtagtcttcttc

SEQ ID NO: 993967 - DNA, 25 bp, Homo sapien
cacaagggttgtagtcttcttctac

SEQ ID NO: 993968 - DNA, 25 bp, Homo sapien
ttcctgggagtacaacagcatctgc

SEQ ID NO: 993969 - DNA, 25 bp, Homo sapien
aagatcaccgtgagactctggtgca

SEQ ID NO: 993970 - DNA, 25 bp, Homo sapien
ctgttgggaagatcaccgtgagact

SEQ ID NO: 993971 - DNA, 25 bp, Homo sapien
tggtgcaggtaccaggaccgcagtc

SEQ ID NO: 993972 - DNA, 25 bp, Homo sapien
caggtaccaggaccgcagtcacagg

SEQ ID NO: 993973 - DNA, 25 bp, Homo sapien
cgtagacgtcatacagctcccgctt

SEQ ID NO: 993974 - DNA, 25 bp, Homo sapien
cacattctggttatccacgtagacg

SEQ ID NO: 993975 - DNA, 25 bp, Homo sapien
cactgttgatcttcagcagcggctg

SEQ ID NO: 993976 - DNA, 25 bp, Homo sapien
caggtggtcgtggtgtgtcttcaca

SEQ ID NO: 993977 - DNA, 25 bp, Homo sapien
gcagtgaaacgttggccaagcagca

SEQ ID NO: 993978 - DNA, 25 bp, Homo sapien
aaaggtttggactcaggaatggtgc

SEQ ID NO: 993979 - DNA, 25 bp, Homo sapien
cacgttcacgtagaagaaaggtttg

SEQ ID NO: 993980 - DNA, 25 bp, Homo sapien
caggctctcgatgtcagccacgttc

SEQ ID NO: 993981 - DNA, 25 bp, Homo sapien
gaaaatatcaaaatgcgctttcgaa

SEQ ID NO: 993982 - DNA, 25 bp, Homo sapien
tttataaactgagacatgcagccag

SEQ ID NO: 993983 - DNA, 25 bp, Homo sapien
tatagcacaccacgcccacaggtgg

SEQ ID NO: 993984 - DNA, 25 bp, Homo sapien
aatgcgctttcgaagtaaggcaaat

SEQ ID NO: 993985 - DNA, 25 bp, Homo sapien
ttgatgtctccagtgcgtaccttca

SEQ ID NO: 993986 - DNA, 25 bp, Homo sapien
tgatgtctccagtgcgtaccttcat

SEQ ID NO: 993987 - DNA, 25 bp, Homo sapien
gcacatgcaacagaaattcctcctg

SEQ ID NO: 993988 - DNA, 25 bp, Homo sapien
ctgcacatgcaacagaaattcctcc

SEQ ID NO: 993989 - DNA, 25 bp, Homo sapien
tccatacatgacaagtattgtatca

SEQ ID NO: 993990 - DNA, 25 bp, Homo sapien
aaaactgacagatatattacattat

SEQ ID NO: 993991 - DNA, 25 bp, Homo sapien
agcttttctttatacgtgtgttcat

SEQ ID NO: 993992 - DNA, 25 bp, Homo sapien
ccatgacaagtattattatatcata

SEQ ID NO: 993993 - DNA, 25 bp, Homo sapien
caagctcacatagtggagagaccca

SEQ ID NO: 993994 - DNA, 25 bp, Homo sapien
gatcttagaggtggatacctcccca

SEQ ID NO: 993995 - DNA, 25 bp, Homo sapien
tctggttaagccatgctgggattcc

SEQ ID NO: 993996 - DNA, 25 bp, Homo sapien
tacatggtctctttacccggtaagc

SEQ ID NO: 993997 - DNA, 25 bp, Homo sapien
ctttttgtcctcatagaaggcagcc

SEQ ID NO: 993998 - DNA, 25 bp, Homo sapien
tctcagggtacatgtatcggtggat

SEQ ID NO: 993999 - DNA, 25 bp, Homo sapien
cctttttgtcctcatagaaggcagc

SEQ ID NO: 994000 - DNA, 25 bp, Homo sapien
tacatgtatcggtggatggaaggca

SEQ ID NO: 994001 - DNA, 25 bp, Homo sapien
tacccctcacgtgtgaaatgcatga

SEQ ID NO: 994002 - DNA, 25 bp, Homo sapien
tatagaaggcatatgacacagctga

SEQ ID NO: 994003 - DNA, 25 bp, Homo sapien
tactactgggcatgcaaatggcaca

SEQ ID NO: 994004 - DNA, 25 bp, Homo sapien
caacgttgaggtgaaacaggcattc

SEQ ID NO: 994005 - DNA, 25 bp, Homo sapien
gatttttcactttatgtgagtggta

SEQ ID NO: 994006 - DNA, 25 bp, Homo sapien
aatgaactgtgattactgagattat

SEQ ID NO: 994007 - DNA, 25 bp, Homo sapien
ttatttggatggatatgggaactgg

SEQ ID NO: 994008 - DNA, 25 bp, Homo sapien
tgtgagtggtagtctgccatactct

SEQ ID NO: 994009 - DNA, 25 bp, Homo sapien
tgtgtgttgactgccccttgtatgc

SEQ ID NO: 994010 - DNA, 25 bp, Homo sapien
cttcaataacttgggagaccctgtg

SEQ ID NO: 994011 - DNA, 25 bp, Homo sapien
caacaatttgggaccccacagggct

SEQ ID NO: 994012 - DNA, 25 bp, Homo sapien
ccagtttagtattcttgggcagaca

SEQ ID NO: 994013 - DNA, 25 bp, Homo sapien
tgtagagttggaatcttgctttgtt

SEQ ID NO: 994014 - DNA, 25 bp, Homo sapien
ttttgtagagttggaatcttgcttt

SEQ ID NO: 994015 - DNA, 25 bp, Homo sapien
ttgtttttgtagagttggaatcttg

SEQ ID NO: 994016 - DNA, 25 bp, Homo sapien
tgtttttgtagagttggaatcttgc

SEQ ID NO: 994017 - DNA, 25 bp, Homo sapien
tcgtgccatatgcaccagctggtgg

SEQ ID NO: 994018 - DNA, 25 bp, Homo sapien
cacgcaaatgctgtctccgagggct

SEQ ID NO: 994019 - DNA, 25 bp, Homo sapien
tggctgaaacgaaaggacaccaccc

SEQ ID NO: 994020 - DNA, 25 bp, Homo sapien
tccctgcacatgtacggaagccacg

SEQ ID NO: 994021 - DNA, 25 bp, Homo sapien
cacagacttcatccgcgcgccacgt

SEQ ID NO: 994022 - DNA, 25 bp, Homo sapien
catgtagcggtaaagcagtgtgtag

SEQ ID NO: 994023 - DNA, 25 bp, Homo sapien
ccaagaagtgcatgtagcggtaaag

SEQ ID NO: 994024 - DNA, 25 bp, Homo sapien
tctccacgggcatgttggcaaagca

SEQ ID NO: 994025 - DNA, 25 bp, Homo sapien
agattggattttatgggacccactg

SEQ ID NO: 994026 - DNA, 25 bp, Homo sapien
actggccatagacttgaactcaaca

SEQ ID NO: 994027 - DNA, 25 bp, Homo sapien
gattggattttatgggacccactgg

SEQ ID NO: 994028 - DNA, 25 bp, Homo sapien
gccatagacttgaactcaacacctt

SEQ ID NO: 994029 - DNA, 25 bp, Homo sapien
cacacgccacacattacggggttca

SEQ ID NO: 994030 - DNA, 25 bp, Homo sapien
cacattacggggttcagctagctca

SEQ ID NO: 994031 - DNA, 25 bp, Homo sapien
tcagctagctcaaatttagcttctt

SEQ ID NO: 994032 - DNA, 25 bp, Homo sapien
gggttcagctagctcaaatttagct

SEQ ID NO: 994033 - DNA, 25 bp, Homo sapien
gcacccaacttcgagacttatataa

SEQ ID NO: 994034 - DNA, 25 bp, Homo sapien
aaattggaagacgaacaatgcaccc

SEQ ID NO: 994035 - DNA, 25 bp, Homo sapien
caaagcaatgaaactagacacctac

SEQ ID NO: 994036 - DNA, 25 bp, Homo sapien
tattcaatatggaaagtagctagcc

SEQ ID NO: 994037 - DNA, 25 bp, Homo sapien
gaggcagatgcaaagatgtccagac

SEQ ID NO: 994038 - DNA, 25 bp, Homo sapien
tctcttataaagaaacagtctaatg

SEQ ID NO: 994039 - DNA, 25 bp, Homo sapien
taaaactctaaacgcagcagtgtaa

SEQ ID NO: 994040 - DNA, 25 bp, Homo sapien
cattgtatgttcaaagcttcatcgg

SEQ ID NO: 994041 - DNA, 25 bp, Homo sapien
cacccagcttgcagagttagcatct

SEQ ID NO: 994042 - DNA, 25 bp, Homo sapien
cagctttgtggcccagatgatcagc

SEQ ID NO: 994043 - DNA, 25 bp, Homo sapien
ccagcttgcagagttagcatctggg

SEQ ID NO: 994044 - DNA, 25 bp, Homo sapien
acccagcttgcagagttagcatctg

SEQ ID NO: 994045 - DNA, 25 bp, Homo sapien
tcagctgccataccagattcccctt

SEQ ID NO: 994046 - DNA, 25 bp, Homo sapien
cagctgccataccagattccccttc

SEQ ID NO: 994047 - DNA, 25 bp, Homo sapien
tattttcccgcacgaacaggcactc

SEQ ID NO: 994048 - DNA, 25 bp, Homo sapien
agccaatattttcccgcacgaacag

SEQ ID NO: 994049 - DNA, 25 bp, Homo sapien
aatattttcccgcacgaacaggcac

SEQ ID NO: 994050 - DNA, 25 bp, Homo sapien
aagcagccaatattttcccgcacga

SEQ ID NO: 994051 - DNA, 25 bp, Homo sapien
tgacaccacgactcctgcgatgaca

SEQ ID NO: 994052 - DNA, 25 bp, Homo sapien
tctcagagtcagaagtccctagctg

SEQ ID NO: 994053 - DNA, 25 bp, Homo sapien
tgggcgcgcagggtcgttcttccac

SEQ ID NO: 994054 - DNA, 25 bp, Homo sapien
tccttaagccctgacaccacgactc

SEQ ID NO: 994055 - DNA, 25 bp, Homo sapien
tcgaaggtgaccacgaacacggcca

SEQ ID NO: 994056 - DNA, 25 bp, Homo sapien
ggtcgaaggtgaccacgaacacggc

SEQ ID NO: 994057 - DNA, 25 bp, Homo sapien
cgagcgggggtcgaaggtgaccacg

SEQ ID NO: 994058 - DNA, 25 bp, Homo sapien
gagcgggggtcgaaggtgaccacga

SEQ ID NO: 994059 - DNA, 25 bp, Homo sapien
cggctcctcgggctcccgcctccgg

SEQ ID NO: 994060 - DNA, 25 bp, Homo sapien
gctgcggggcctgcggcagggagac

SEQ ID NO: 994061 - DNA, 25 bp, Homo sapien
agcacctccggggcggccggctcct

SEQ ID NO: 994062 - DNA, 25 bp, Homo sapien
ccagcctcccgcctgcggctgcggg

SEQ ID NO: 994063 - DNA, 25 bp, Homo sapien
agcggcgccgcgtctccctgctcca

SEQ ID NO: 994064 - DNA, 25 bp, Homo sapien
gcggcgccgcgtctccctgctccac

SEQ ID NO: 994065 - DNA, 25 bp, Homo sapien
ttcgggaaccgcgagcctattcgga

SEQ ID NO: 994066 - DNA, 25 bp, Homo sapien
ggctacccaggtgtttgcaatatac

SEQ ID NO: 994067 - DNA, 25 bp, Homo sapien
taaagtccgctggtcctgtggaccg

SEQ ID NO: 994068 - DNA, 25 bp, Homo sapien
tgcggccggaacgttcatccttgcg

SEQ ID NO: 994069 - DNA, 25 bp, Homo sapien
tagggactccgggaatgaccacagc

SEQ ID NO: 994070 - DNA, 25 bp, Homo sapien
tctaatcttagggactccgggaatg

SEQ ID NO: 994071 - DNA, 25 bp, Homo sapien
gactccgggaatgaccacagcccaa

SEQ ID NO: 994072 - DNA, 25 bp, Homo sapien
atcttagggactccgggaatgacca

SEQ ID NO: 994073 - DNA, 25 bp, Homo sapien
tttgaacatttccatgagaaaaagt

SEQ ID NO: 994074 - DNA, 25 bp, Homo sapien
catttccatgagaaaaagttaaaca

SEQ ID NO: 994075 - DNA, 25 bp, Homo sapien
atgtttgaacatttccatgagaaaa

SEQ ID NO: 994076 - DNA, 25 bp, Homo sapien
gtttgaacatttccatgagaaaaag

SEQ ID NO: 994077 - DNA, 25 bp, Homo sapien
gattcatcgcagctgacaagtggct

SEQ ID NO: 994078 - DNA, 25 bp, Homo sapien
gaattctgttgtgccggcagtgcca

SEQ ID NO: 994079 - DNA, 25 bp, Homo sapien
ccatgagatacaattttatgagcac

SEQ ID NO: 994080 - DNA, 25 bp, Homo sapien
gcctccaggctttatttacttagcc

SEQ ID NO: 994081 - DNA, 25 bp, Homo sapien
ggagacccctagtttcaatggattc

SEQ ID NO: 994082 - DNA, 25 bp, Homo sapien
ggagtcaggagcactggagacccct

SEQ ID NO: 994083 - DNA, 25 bp, Homo sapien
cctggtcagtgttgccgctgctgat

SEQ ID NO: 994084 - DNA, 25 bp, Homo sapien
tgctgatggatttgtccagggagca

SEQ ID NO: 994085 - DNA, 25 bp, Homo sapien
cagcagtgagtcgtagatgattcct

SEQ ID NO: 994086 - DNA, 25 bp, Homo sapien
tacaatgttaaagctggcaggacct

SEQ ID NO: 994087 - DNA, 25 bp, Homo sapien
agagtccctggccaattgtctggag

SEQ ID NO: 994088 - DNA, 25 bp, Homo sapien
cacaatggttttcaatagggcagac

SEQ ID NO: 994089 - DNA, 25 bp, Homo sapien
gggacagcttgattgtataatagtt

SEQ ID NO: 994090 - DNA, 25 bp, Homo sapien
agggacagcttgattgtataatagt

SEQ ID NO: 994091 - DNA, 25 bp, Homo sapien
catgatatccaaatgataccaggat

SEQ ID NO: 994092 - DNA, 25 bp, Homo sapien
ggctgtacagtaagcatattgcctg

SEQ ID NO: 994093 - DNA, 25 bp, Homo sapien
atccaaacatcccaataataccagg

SEQ ID NO: 994094 - DNA, 25 bp, Homo sapien
aagtgagaactggttcattaccatg

SEQ ID NO: 994095 - DNA, 25 bp, Homo sapien
tattaatcccttcactccagagtcc

SEQ ID NO: 994096 - DNA, 25 bp, Homo sapien
tccagaggccctaagcatttgaagc

SEQ ID NO: 994097 - DNA, 25 bp, Homo sapien
catgctgagccggttggtgatttct

SEQ ID NO: 994098 - DNA, 25 bp, Homo sapien
cctgctcccctcaaggatgagatga

SEQ ID NO: 994099 - DNA, 25 bp, Homo sapien
tctgtctcataggaattcggctttg

SEQ ID NO: 994100 - DNA, 25 bp, Homo sapien
catgaagtttatgctcacgcagtgc

SEQ ID NO: 994101 - DNA, 25 bp, Homo sapien
tctgccattgctagtaaagcctcat

SEQ ID NO: 994102 - DNA, 25 bp, Homo sapien
ggtacgttactattcctcatgggca

SEQ ID NO: 994103 - DNA, 25 bp, Homo sapien
cacaagatgcaaagtgaatcctctg

SEQ ID NO: 994104 - DNA, 25 bp, Homo sapien
tttgtcacaagatgcaaagtgaatc

SEQ ID NO: 994105 - DNA, 25 bp, Homo sapien
gcaaagtgaatcctctggagtcata

SEQ ID NO: 994106 - DNA, 25 bp, Homo sapien
gtgaatcctctggagtcatagaaga

SEQ ID NO: 994107 - DNA, 25 bp, Homo sapien
tgatccaacctgatgccgaacagag

SEQ ID NO: 994108 - DNA, 25 bp, Homo sapien
tcctcttggtcctatatcatcagaa

SEQ ID NO: 994109 - DNA, 25 bp, Homo sapien
gatttttcccaatagtgaagcttct

SEQ ID NO: 994110 - DNA, 25 bp, Homo sapien
tatatcatcagaacatgatccaacc

SEQ ID NO: 994111 - DNA, 25 bp, Homo sapien
tttttcccagcgtggggctcatcga

SEQ ID NO: 994112 - DNA, 25 bp, Homo sapien
atgatcacgaaggtggtttttccca

SEQ ID NO: 994113 - DNA, 25 bp, Homo sapien
gggctcatcgattgcactccggatg

SEQ ID NO: 994114 - DNA, 25 bp, Homo sapien
catcgattgcactccggatgtgctg

SEQ ID NO: 994115 - DNA, 25 bp, Homo sapien
aaggcatggcaattctctcaaaaca

SEQ ID NO: 994116 - DNA, 25 bp, Homo sapien
tattacatccatcttggcataaata

SEQ ID NO: 994117 - DNA, 25 bp, Homo sapien
cagatttgaacacattactgatcag

SEQ ID NO: 994118 - DNA, 25 bp, Homo sapien
caaaacaagcaaagcagatttgaac

SEQ ID NO: 994119 - DNA, 25 bp, Homo sapien
tctgcggtattcagtacagccccat

SEQ ID NO: 994120 - DNA, 25 bp, Homo sapien
gtgttcgtacagcaacaaaatcgcc

SEQ ID NO: 994121 - DNA, 25 bp, Homo sapien
gcctaatgacgcaatcctcagacct

SEQ ID NO: 994122 - DNA, 25 bp, Homo sapien
caccatctaggtcgtcaaagtacat

SEQ ID NO: 994123 - DNA, 25 bp, Homo sapien
ttggcggcgttgatccatccgcccg

SEQ ID NO: 994124 - DNA, 25 bp, Homo sapien
ggcggcgttgatccatccgcccgcg

SEQ ID NO: 994125 - DNA, 25 bp, Homo sapien
acttggcggcgttgatccatccgcc

SEQ ID NO: 994126 - DNA, 25 bp, Homo sapien
cacttggcggcgttgatccatccgc

SEQ ID NO: 994127 - DNA, 25 bp, Homo sapien
ttataggtgcgtgccacaccacctg

SEQ ID NO: 994128 - DNA, 25 bp, Homo sapien
acaacaggtgtacaccatcatgcct

SEQ ID NO: 994129 - DNA, 25 bp, Homo sapien
ccttagcctccccaaatactggaat

SEQ ID NO: 994130 - DNA, 25 bp, Homo sapien
tgtgcccagccaagaagtttttaat

SEQ ID NO: 994131 - DNA, 25 bp, Homo sapien
ccgggtctagtaatgcgtgtctgta

SEQ ID NO: 994132 - DNA, 25 bp, Homo sapien
aaaagtagccgggtctagtaatgcg

SEQ ID NO: 994133 - DNA, 25 bp, Homo sapien
ccaggaggcagtgtttgtagcgaat

SEQ ID NO: 994134 - DNA, 25 bp, Homo sapien
gtttgtagcgaattgagatcacacc

SEQ ID NO: 994135 - DNA, 25 bp, Homo sapien
caggtgatgccacaggagctgtagt

SEQ ID NO: 994136 - DNA, 25 bp, Homo sapien
gatgccacaggagctgtagttctgt

SEQ ID NO: 994137 - DNA, 25 bp, Homo sapien
ccacaggagctgtagttctgttctt

SEQ ID NO: 994138 - DNA, 25 bp, Homo sapien
ggagctgtagttctgttctttctct

SEQ ID NO: 994139 - DNA, 25 bp, Homo sapien
ggagaccagtgctggcacgggtcct

SEQ ID NO: 994140 - DNA, 25 bp, Homo sapien
agtgctggcacgggtcctccgtatg

SEQ ID NO: 994141 - DNA, 25 bp, Homo sapien
ccagtgctggcacgggtcctccgta

SEQ ID NO: 994142 - DNA, 25 bp, Homo sapien
gaccagtgctggcacgggtcctccg

SEQ ID NO: 994143 - DNA, 25 bp, Homo sapien
gaccttacaagcattctcatcggta

SEQ ID NO: 994144 - DNA, 25 bp, Homo sapien
cactatgaccttacaagcattctca

SEQ ID NO: 994145 - DNA, 25 bp, Homo sapien
cattctcatcggtaattgacttttg

SEQ ID NO: 994146 - DNA, 25 bp, Homo sapien
tacaagcattctcatcggtaattga

SEQ ID NO: 994147 - DNA, 25 bp, Homo sapien
gacacttaagttcggctggcagcca

SEQ ID NO: 994148 - DNA, 25 bp, Homo sapien
ttggcattgccgtgacagagactct

SEQ ID NO: 994149 - DNA, 25 bp, Homo sapien
gaacattcctggctgtccatactga

SEQ ID NO: 994150 - DNA, 25 bp, Homo sapien
tctaccggctgatattgtggatact

SEQ ID NO: 994151 - DNA, 25 bp, Homo sapien
cttgggaatctctcattgacttgtc

SEQ ID NO: 994152 - DNA, 25 bp, Homo sapien
ctgtagacgtacttgggaatctctc

SEQ ID NO: 994153 - DNA, 25 bp, Homo sapien
gacgtacttgggaatctctcattga

SEQ ID NO: 994154 - DNA, 25 bp, Homo sapien
tacttgggaatctctcattgacttg

SEQ ID NO: 994155 - DNA, 25 bp, Homo sapien
ttttataccgataattgtggtaata

SEQ ID NO: 994156 - DNA, 25 bp, Homo sapien
aatgaggactgatcacacgaaaagg

SEQ ID NO: 994157 - DNA, 25 bp, Homo sapien
tgctttgatactgggatatggctcg

SEQ ID NO: 994158 - DNA, 25 bp, Homo sapien
tatggctcggggttttataccgata

SEQ ID NO: 994159 - DNA, 25 bp, Homo sapien
tgaaggtccttggtcttatgtaacc

SEQ ID NO: 994160 - DNA, 25 bp, Homo sapien
ctttgaaggtccttggtcttatgta

SEQ ID NO: 994161 - DNA, 25 bp, Homo sapien
ttgaaggtccttggtcttatgtaac

SEQ ID NO: 994162 - DNA, 25 bp, Homo sapien
ggctttgaaggtccttggtcttatg

SEQ ID NO: 994163 - DNA, 25 bp, Homo sapien
tctcagccgcctactataatggata

SEQ ID NO: 994164 - DNA, 25 bp, Homo sapien
taggcctgttcggatgagaaatcgg

SEQ ID NO: 994165 - DNA, 25 bp, Homo sapien
ccactgtccggaggccaggttattg

SEQ ID NO: 994166 - DNA, 25 bp, Homo sapien
gacagggttgtgcttatactcaggt

SEQ ID NO: 994167 - DNA, 25 bp, Homo sapien
tttttggagtgtgggcccgatagca

SEQ ID NO: 994168 - DNA, 25 bp, Homo sapien
tgtgggcccgatagcatatatagct

SEQ ID NO: 994169 - DNA, 25 bp, Homo sapien
gagtgtgggcccgatagcatatata

SEQ ID NO: 994170 - DNA, 25 bp, Homo sapien
gatagcatatatagctgaccttagt

SEQ ID NO: 994171 - DNA, 25 bp, Homo sapien
aataacaggattttaacttctattg

SEQ ID NO: 994172 - DNA, 25 bp, Homo sapien
aaagtaattattttgtcagacatat

SEQ ID NO: 994173 - DNA, 25 bp, Homo sapien
ataacaggattttaacttctattgt

SEQ ID NO: 994174 - DNA, 25 bp, Homo sapien
cttctattgtttactctatcaaagt

SEQ ID NO: 994175 - DNA, 25 bp, Homo sapien
taaatgagccacttatcagtaggac

SEQ ID NO: 994176 - DNA, 25 bp, Homo sapien
tctgggccacagctcgtaatgcatc

SEQ ID NO: 994177 - DNA, 25 bp, Homo sapien
agtccgcaggcacctacaatgttag

SEQ ID NO: 994178 - DNA, 25 bp, Homo sapien
cctcatatgaaattgtctgggccac

SEQ ID NO: 994179 - DNA, 25 bp, Homo sapien
gaagaagaggagttgaacctccagt

SEQ ID NO: 994180 - DNA, 25 bp, Homo sapien
gaagaggagttgaacctccagttat

SEQ ID NO: 994181 - DNA, 25 bp, Homo sapien
gaggagttgaacctccagttataaa

SEQ ID NO: 994182 - DNA, 25 bp, Homo sapien
agaagaggagttgaacctccagtta

SEQ ID NO: 994183 - DNA, 25 bp, Homo sapien
gatagaaaccaacccacattactcc

SEQ ID NO: 994184 - DNA, 25 bp, Homo sapien
tagcatcatctacggggtgagggca

SEQ ID NO: 994185 - DNA, 25 bp, Homo sapien
ctcttgttcttttgtagtaggagaa

SEQ ID NO: 994186 - DNA, 25 bp, Homo sapien
tgagggcactttatgaagtgggccc

SEQ ID NO: 994187 - DNA, 25 bp, Homo sapien
ggtgtgtgacttcactgaggaccag

SEQ ID NO: 994188 - DNA, 25 bp, Homo sapien
tcaaggtgtgtgacttcactgagga

SEQ ID NO: 994189 - DNA, 25 bp, Homo sapien
caaggtgtgtgacttcactgaggac

SEQ ID NO: 994190 - DNA, 25 bp, Homo sapien
aaggtgtgtgacttcactgaggacc

SEQ ID NO: 994191 - DNA, 25 bp, Homo sapien
taagatcctgtatagtcagtgtggg

SEQ ID NO: 994192 - DNA, 25 bp, Homo sapien
gtcctgggtcagaaccccaccgatg

SEQ ID NO: 994193 - DNA, 25 bp, Homo sapien
cccaccgatgctgaggtgatgcaag

SEQ ID NO: 994194 - DNA, 25 bp, Homo sapien
gaattcaaggaggttttctagctgt

SEQ ID NO: 994195 - DNA, 25 bp, Homo sapien
ggctctgatatccaccagctatggg

SEQ ID NO: 994196 - DNA, 25 bp, Homo sapien
gccacaagtgagagcttcaagccct

SEQ ID NO: 994197 - DNA, 25 bp, Homo sapien
tgtagactcccatataacactgagg

SEQ ID NO: 994198 - DNA, 25 bp, Homo sapien
gataacgaatgtaatcccggacagt

SEQ ID NO: 994199 - DNA, 25 bp, Homo sapien
gggaaaattatctgcttgtatagtc

SEQ ID NO: 994200 - DNA, 25 bp, Homo sapien
gcagagccagtggaatgcagaggga

SEQ ID NO: 994201 - DNA, 25 bp, Homo sapien
tgcttgtatagtccatggcagagcc

SEQ ID NO: 994202 - DNA, 25 bp, Homo sapien
aattatctgcttgtatagtccatgg

SEQ ID NO: 994203 - DNA, 25 bp, Homo sapien
acatatttgtaaacattggtgtaga

SEQ ID NO: 994204 - DNA, 25 bp, Homo sapien
ccccacctcgattccctggagcttg

SEQ ID NO: 994205 - DNA, 25 bp, Homo sapien
cagatgacagtagcaacggccacct

SEQ ID NO: 994206 - DNA, 25 bp, Homo sapien
attggtgtagatgccgacgtcccct

SEQ ID NO: 994207 - DNA, 25 bp, Homo sapien
aatgaaagctgaatatagagataag

SEQ ID NO: 994208 - DNA, 25 bp, Homo sapien
ttaaccgggcatatgcaagtaaatg

SEQ ID NO: 994209 - DNA, 25 bp, Homo sapien
ccgggcatatgcaagtaaatgaaag

SEQ ID NO: 994210 - DNA, 25 bp, Homo sapien
gggcatatgcaagtaaatgaaagct

SEQ ID NO: 994211 - DNA, 25 bp, Homo sapien
cacacataaggaattcctgtggctt

SEQ ID NO: 994212 - DNA, 25 bp, Homo sapien
tttggcattctcgatcagacatcac

SEQ ID NO: 994213 - DNA, 25 bp, Homo sapien
ccaaaaattcggctgaatactttca

SEQ ID NO: 994214 - DNA, 25 bp, Homo sapien
ggcattctcgatcagacatcacggg

SEQ ID NO: 994215 - DNA, 25 bp, Homo sapien
tgtctctgccaatcaggaatggctg

SEQ ID NO: 994216 - DNA, 25 bp, Homo sapien
ctggactttgggattgagcatggca

SEQ ID NO: 994217 - DNA, 25 bp, Homo sapien
gcatggcaggcttagccagcttgat

SEQ ID NO: 994218 - DNA, 25 bp, Homo sapien
ctgagagtagacagacagtgcctgg

SEQ ID NO: 994219 - DNA, 25 bp, Homo sapien
tgactgtagttccagtagcggacga

SEQ ID NO: 994220 - DNA, 25 bp, Homo sapien
aacaatgtccattttggtggagacc

SEQ ID NO: 994221 - DNA, 25 bp, Homo sapien
ggttccctagctgatgcactaacag

SEQ ID NO: 994222 - DNA, 25 bp, Homo sapien
caaaccctggtggtatggaactatt

SEQ ID NO: 994223 - DNA, 25 bp, Homo sapien
cctgcagttttgtcacagagtggct

SEQ ID NO: 994224 - DNA, 25 bp, Homo sapien
gtttgatgaggacgcccacacaggg

SEQ ID NO: 994225 - DNA, 25 bp, Homo sapien
cccagctgggtttgatgaggacgcc

SEQ ID NO: 994226 - DNA, 25 bp, Homo sapien
ggttgaagtgagacttgaggtacac

SEQ ID NO: 994227 - DNA, 25 bp, Homo sapien
tgaggtacaccaaatagggagcagg

SEQ ID NO: 994228 - DNA, 25 bp, Homo sapien
gatgagtcagcaaagaaaaatgtcc

SEQ ID NO: 994229 - DNA, 25 bp, Homo sapien
ctgaacagatgagtcagcaaagaaa

SEQ ID NO: 994230 - DNA, 25 bp, Homo sapien
aacagatgagtcagcaaagaaaaat

SEQ ID NO: 994231 - DNA, 25 bp, Homo sapien
cagatgagtcagcaaagaaaaatgt

SEQ ID NO: 994232 - DNA, 25 bp, Homo sapien
cagcgaggacacccaaatagaagac

SEQ ID NO: 994233 - DNA, 25 bp, Homo sapien
gcgaggacacccaaatagaagacat

SEQ ID NO: 994234 - DNA, 25 bp, Homo sapien
agcgaggacacccaaatagaagaca

SEQ ID NO: 994235 - DNA, 25 bp, Homo sapien
gagtgtggagcggttggcttagttg

SEQ ID NO: 994236 - DNA, 25 bp, Homo sapien
gttggcttagttgtcttctcaggaa

SEQ ID NO: 994237 - DNA, 25 bp, Homo sapien
agcggttggcttagttgtcttctca

SEQ ID NO: 994238 - DNA, 25 bp, Homo sapien
tggagcggttggcttagttgtcttc

SEQ ID NO: 994239 - DNA, 25 bp, Homo sapien
ccagggctatgagggacaatattct

SEQ ID NO: 994240 - DNA, 25 bp, Homo sapien
ggctatgagggacaatattctttac

SEQ ID NO: 994241 - DNA, 25 bp, Homo sapien
agaccagggctatgagggacaatat

SEQ ID NO: 994242 - DNA, 25 bp, Homo sapien
tttctgagaccagggctatgaggga

SEQ ID NO: 994243 - DNA, 25 bp, Homo sapien
ttagctcagggagtaagtgtcctga

SEQ ID NO: 994244 - DNA, 25 bp, Homo sapien
tgaggtttgctctgaacctcctaat

SEQ ID NO: 994245 - DNA, 25 bp, Homo sapien
cttagctcagggagtaagtgtcctg

SEQ ID NO: 994246 - DNA, 25 bp, Homo sapien
tagctcagggagtaagtgtcctgag

SEQ ID NO: 994247 - DNA, 25 bp, Homo sapien
tctggcagctgttcagaactgtgaa

SEQ ID NO: 994248 - DNA, 25 bp, Homo sapien
cagtgggtggctatagggtgggtca

SEQ ID NO: 994249 - DNA, 25 bp, Homo sapien
gatgttctggcagctgttcagaact

SEQ ID NO: 994250 - DNA, 25 bp, Homo sapien
tatagggtgggtcatagcaaaggca

SEQ ID NO: 994251 - DNA, 25 bp, Homo sapien
caagatggcgagactttgtatctac

SEQ ID NO: 994252 - DNA, 25 bp, Homo sapien
gtctggacaagatggcgagactttg

SEQ ID NO: 994253 - DNA, 25 bp, Homo sapien
tagctggaatatcatacacaaactc

SEQ ID NO: 994254 - DNA, 25 bp, Homo sapien
cagacttggtgagagaataaggccc

SEQ ID NO: 994255 - DNA, 25 bp, Homo sapien
gaagtacgccgtatcctttttgtga

SEQ ID NO: 994256 - DNA, 25 bp, Homo sapien
tcttcttgtacgcagtgacagtgat

SEQ ID NO: 994257 - DNA, 25 bp, Homo sapien
cctggctcccaagaagtacgccgta

SEQ ID NO: 994258 - DNA, 25 bp, Homo sapien
cttcttgtacgcagtgacagtgatg

SEQ ID NO: 994259 - DNA, 25 bp, Homo sapien
aagcttctgtatgaggacagtatcc

SEQ ID NO: 994260 - DNA, 25 bp, Homo sapien
ccaggctgcttctccggaggtgagt

SEQ ID NO: 994261 - DNA, 25 bp, Homo sapien
gaagtagacagtaggagagcatcat

SEQ ID NO: 994262 - DNA, 25 bp, Homo sapien
cactaggtgagcgagagatagcctg

SEQ ID NO: 994263 - DNA, 25 bp, Homo sapien
tcattggccagacgacctgtatgga

SEQ ID NO: 994264 - DNA, 25 bp, Homo sapien
cattgggctccttttagaacctgca

SEQ ID NO: 994265 - DNA, 25 bp, Homo sapien
taggctgggcccacatttgaggtca

SEQ ID NO: 994266 - DNA, 25 bp, Homo sapien
gaaatgctcagtactacagaagcgg

SEQ ID NO: 994267 - DNA, 25 bp, Homo sapien
ggtagctgatgtcacatgatgcagc

SEQ ID NO: 994268 - DNA, 25 bp, Homo sapien
ctttgttaggccaatggtcgcacag

SEQ ID NO: 994269 - DNA, 25 bp, Homo sapien
aatggtcgcacagttgaaattctga

SEQ ID NO: 994270 - DNA, 25 bp, Homo sapien
acagatcctgcggtagctgatgtca

SEQ ID NO: 994271 - DNA, 25 bp, Homo sapien
tggtcttttgaagcaaaccaagatc

SEQ ID NO: 994272 - DNA, 25 bp, Homo sapien
cagagtcaagtgtcagcgtttgagc

SEQ ID NO: 994273 - DNA, 25 bp, Homo sapien
ctcagggaatagatgggttggaaga

SEQ ID NO: 994274 - DNA, 25 bp, Homo sapien
cgtttgagctattccagggtgaacc

SEQ ID NO: 994275 - DNA, 25 bp, Homo sapien
caccttttctcttcacgatggtaaa

SEQ ID NO: 994276 - DNA, 25 bp, Homo sapien
tcttcacgatggtaaattaagccaa

SEQ ID NO: 994277 - DNA, 25 bp, Homo sapien
ttgccattgaacacagagttgttga

SEQ ID NO: 994278 - DNA, 25 bp, Homo sapien
ttgttgatccaacgccaccttttct

SEQ ID NO: 994279 - DNA, 25 bp, Homo sapien
ttgtcacacttgcttcttcccgttg

SEQ ID NO: 994280 - DNA, 25 bp, Homo sapien
ggccaggttagtagtgatgaccttt

SEQ ID NO: 994281 - DNA, 25 bp, Homo sapien
tcttaagacattttcccttgctacc

SEQ ID NO: 994282 - DNA, 25 bp, Homo sapien
aaacttaatgggtgtggcagacttg

SEQ ID NO: 994283 - DNA, 25 bp, Homo sapien
agtttctctggcgtgttgacaattg

SEQ ID NO: 994284 - DNA, 25 bp, Homo sapien
tcctttgcaaaagtccctgctttca

SEQ ID NO: 994285 - DNA, 25 bp, Homo sapien
gacaattgccaatgtggatcctttt

SEQ ID NO: 994286 - DNA, 25 bp, Homo sapien
tcagaagtggataagaaaaaacatc

SEQ ID NO: 994287 - DNA, 25 bp, Homo sapien
ggaagaaattccacccagtctagtc

SEQ ID NO: 994288 - DNA, 25 bp, Homo sapien
tactggtttgggttatgaatcctgc

SEQ ID NO: 994289 - DNA, 25 bp, Homo sapien
gaatcctgcaactaagtcatgaaac

SEQ ID NO: 994290 - DNA, 25 bp, Homo sapien
tccaagaaaggagagtacgagttta

SEQ ID NO: 994291 - DNA, 25 bp, Homo sapien
tgtggtaatgaagccgttgggactt

SEQ ID NO: 994292 - DNA, 25 bp, Homo sapien
taatgaagccgttgggacttgggga

SEQ ID NO: 994293 - DNA, 25 bp, Homo sapien
cttgtggtaatgaagccgttgggac

SEQ ID NO: 994294 - DNA, 25 bp, Homo sapien
tccttgtggtaatgaagccgttggg

SEQ ID NO: 994295 - DNA, 25 bp, Homo sapien
ctggtggtggtgaaaccatcgttac

SEQ ID NO: 994296 - DNA, 25 bp, Homo sapien
tggtggtggtgaaaccatcgttact

SEQ ID NO: 994297 - DNA, 25 bp, Homo sapien
cctggtggtggtgaaaccatcgtta

SEQ ID NO: 994298 - DNA, 25 bp, Homo sapien
cacaataagcccagagatgatcatg

SEQ ID NO: 994299 - DNA, 25 bp, Homo sapien
tccaacaactttaagcactaccaca

SEQ ID NO: 994300 - DNA, 25 bp, Homo sapien
aagtagaaataaggtcattccaaca

SEQ ID NO: 994301 - DNA, 25 bp, Homo sapien
tagaaataaggtcattccaacaact

SEQ ID NO: 994302 - DNA, 25 bp, Homo sapien
tggtggcctaatgcttggtgtggca

SEQ ID NO: 994303 - DNA, 25 bp, Homo sapien
cccgtctcctgagaatatgctcctt

SEQ ID NO: 994304 - DNA, 25 bp, Homo sapien
caagcaacgttcttccttcttcaca

SEQ ID NO: 994305 - DNA, 25 bp, Homo sapien
tggaaggctaggcttgcttgcagat

SEQ ID NO: 994306 - DNA, 25 bp, Homo sapien
tacagtgactccttaaatgaattgg

SEQ ID NO: 994307 - DNA, 25 bp, Homo sapien
tgcacttggcttctatttcgtacag

SEQ ID NO: 994308 - DNA, 25 bp, Homo sapien
ttgggaatcccattgcagagaacag

SEQ ID NO: 994309 - DNA, 25 bp, Homo sapien
gagacaggctgatttagagcttgca

SEQ ID NO: 994310 - DNA, 25 bp, Homo sapien
ccgggaatctgccttgtggtcggct

SEQ ID NO: 994311 - DNA, 25 bp, Homo sapien
tcagcacagtgtccgggaatctgcc

SEQ ID NO: 994312 - DNA, 25 bp, Homo sapien
cagtgtccgggaatctgccttgtgg

SEQ ID NO: 994313 - DNA, 25 bp, Homo sapien
aatctgccttgtggtcggctcttac

SEQ ID NO: 994314 - DNA, 25 bp, Homo sapien
agggctttaatgtgggcctccaggc

SEQ ID NO: 994315 - DNA, 25 bp, Homo sapien
gaaggcagcacaggatgatatcaca

SEQ ID NO: 994316 - DNA, 25 bp, Homo sapien
ttgtcgcgccacagaatcagtaggg

SEQ ID NO: 994317 - DNA, 25 bp, Homo sapien
tgagatcaggatggctgcatgccca

SEQ ID NO: 994318 - DNA, 25 bp, Homo sapien
ccagttgagccttgtattgttattc

SEQ ID NO: 994319 - DNA, 25 bp, Homo sapien
gagcatctgggagatcttcctggag

SEQ ID NO: 994320 - DNA, 25 bp, Homo sapien
accagaaacaataggaaaggaggca

SEQ ID NO: 994321 - DNA, 25 bp, Homo sapien
gtgaggtctgctaaaaaagcaccaa

SEQ ID NO: 994322 - DNA, 25 bp, Homo sapien
catgcaggaaaagccggctgatgct

SEQ ID NO: 994323 - DNA, 25 bp, Homo sapien
tcaggaacagcagtccatgcaggaa

SEQ ID NO: 994324 - DNA, 25 bp, Homo sapien
cacagtgcggatgcgagttagagtc

SEQ ID NO: 994325 - DNA, 25 bp, Homo sapien
taagctggatagcactcaggaacag

SEQ ID NO: 994326 - DNA, 25 bp, Homo sapien
gacatgttctgtggttatgaaagtc

SEQ ID NO: 994327 - DNA, 25 bp, Homo sapien
gggttaattcttgggaggctgcaaa

SEQ ID NO: 994328 - DNA, 25 bp, Homo sapien
catgtctagttgaattatattctca

SEQ ID NO: 994329 - DNA, 25 bp, Homo sapien
attatattctcacaataatgacggg

SEQ ID NO: 994330 - DNA, 25 bp, Homo sapien
gccaggctgaatcgtgcagtgtccc

SEQ ID NO: 994331 - DNA, 25 bp, Homo sapien
cctctggggctaaagcgattgtccc

SEQ ID NO: 994332 - DNA, 25 bp, Homo sapien
tgaaacagggatttactctgttggc

SEQ ID NO: 994333 - DNA, 25 bp, Homo sapien
gaatcgtgcagtgtcccaatcatgg

SEQ ID NO: 994334 - DNA, 25 bp, Homo sapien
tctcctttagagacaagaccctgtg

SEQ ID NO: 994335 - DNA, 25 bp, Homo sapien
gtcctgcagaccagatacaccctgt

SEQ ID NO: 994336 - DNA, 25 bp, Homo sapien
taccttgatgcaaaaggcccacacg

SEQ ID NO: 994337 - DNA, 25 bp, Homo sapien
gcgtcactgttgtgcggcctctgct

SEQ ID NO: 994338 - DNA, 25 bp, Homo sapien
cttatttctaatgtatacaaccaca

SEQ ID NO: 994339 - DNA, 25 bp, Homo sapien
tatttttgcagtagtgtgctttgaa

SEQ ID NO: 994340 - DNA, 25 bp, Homo sapien
tttctaatgtatacaaccacatttc

SEQ ID NO: 994341 - DNA, 25 bp, Homo sapien
tgtgctttgaaatgtgtaaatctta

SEQ ID NO: 994342 - DNA, 25 bp, Homo sapien
tctcaatgggacagaaacatgactc

SEQ ID NO: 994343 - DNA, 25 bp, Homo sapien
gaggctcggcatataactaacatga

SEQ ID NO: 994344 - DNA, 25 bp, Homo sapien
gaaaaatcataccatagaggctcgg

SEQ ID NO: 994345 - DNA, 25 bp, Homo sapien
cagtccccagctttgtaggttcaga

SEQ ID NO: 994346 - DNA, 25 bp, Homo sapien
tgtacagttgtatagccactaccac

SEQ ID NO: 994347 - DNA, 25 bp, Homo sapien
ggtgtgtggcacaacacccactaat

SEQ ID NO: 994348 - DNA, 25 bp, Homo sapien
tatagtcagcctgcggattcatcca

SEQ ID NO: 994349 - DNA, 25 bp, Homo sapien
ccatagagtagattcctggaagtga

SEQ ID NO: 994350 - DNA, 25 bp, Homo sapien
tgcggtgtgaagagaactaagagcc

SEQ ID NO: 994351 - DNA, 25 bp, Homo sapien
agagggtaggagctgcggtgtgaag

SEQ ID NO: 994352 - DNA, 25 bp, Homo sapien
aagagaactaagagccccttcaaat

SEQ ID NO: 994353 - DNA, 25 bp, Homo sapien
gccccttcaaatatatgggaatcta

SEQ ID NO: 994354 - DNA, 25 bp, Homo sapien
agggaggtggttgttggaagcttga

SEQ ID NO: 994355 - DNA, 25 bp, Homo sapien
gctgtgaatcagagatgtagggagg

SEQ ID NO: 994356 - DNA, 25 bp, Homo sapien
aatcagagatgtagggaggtggttg

SEQ ID NO: 994357 - DNA, 25 bp, Homo sapien
tagggaggtggttgttggaagcttg

SEQ ID NO: 994358 - DNA, 25 bp, Homo sapien
taatatgtcctcgtgattgcactga

SEQ ID NO: 994359 - DNA, 25 bp, Homo sapien
aataacacaggcacgatgttgagcc

SEQ ID NO: 994360 - DNA, 25 bp, Homo sapien
tacttgagggttacctaatatgtcc

SEQ ID NO: 994361 - DNA, 25 bp, Homo sapien
gttgagcccatctcagtgctcccta

SEQ ID NO: 994362 - DNA, 25 bp, Homo sapien
tcccctagctcgtgggccacgtaga

SEQ ID NO: 994363 - DNA, 25 bp, Homo sapien
ggcacatctcattaatggtgctggg

SEQ ID NO: 994364 - DNA, 25 bp, Homo sapien
ccatgcagctggagatgttattttg

SEQ ID NO: 994365 - DNA, 25 bp, Homo sapien
taatgtcagggtaccccatgcagct

SEQ ID NO: 994366 - DNA, 25 bp, Homo sapien
gagaaatccctgttcctatcttaga

SEQ ID NO: 994367 - DNA, 25 bp, Homo sapien
tattggcagataatgtgagaaatcc

SEQ ID NO: 994368 - DNA, 25 bp, Homo sapien
aaagccatgagtgggctctccactg

SEQ ID NO: 994369 - DNA, 25 bp, Homo sapien
aagccccgtgtggatgtgtgatgcc

SEQ ID NO: 994370 - DNA, 25 bp, Homo sapien
aaatgtcatggagtcacggtccagt

SEQ ID NO: 994371 - DNA, 25 bp, Homo sapien
ggtagtgacattctaccagcaattc

SEQ ID NO: 994372 - DNA, 25 bp, Homo sapien
gacattctaccagcaattcatctcc

SEQ ID NO: 994373 - DNA, 25 bp, Homo sapien
ggtccagtgtctggtagtgacattc

SEQ ID NO: 994374 - DNA, 25 bp, Homo sapien
gagggcaaatctcgagtctcctgca

SEQ ID NO: 994375 - DNA, 25 bp, Homo sapien
ttgaagtcataggaatcgtctttac

SEQ ID NO: 994376 - DNA, 25 bp, Homo sapien
tctagagggcaaatctcgagtctcc

SEQ ID NO: 994377 - DNA, 25 bp, Homo sapien
tctccactctagagggcaaatctcg

SEQ ID NO: 994378 - DNA, 25 bp, Homo sapien
tgtgcagcaggtagccatacacctg

SEQ ID NO: 994379 - DNA, 25 bp, Homo sapien
catacacctgtatgtcaggcatagg

SEQ ID NO: 994380 - DNA, 25 bp, Homo sapien
cgtccagccaagtgggtgtgcagca

SEQ ID NO: 994381 - DNA, 25 bp, Homo sapien
cttgcagagcccgtccagccaagtg

SEQ ID NO: 994382 - DNA, 25 bp, Homo sapien
cgaatccccgaggaatcatacacac

SEQ ID NO: 994383 - DNA, 25 bp, Homo sapien
agctgagaagtgtagtacacgcgaa

SEQ ID NO: 994384 - DNA, 25 bp, Homo sapien
tgaagaagcccagctggaggacatc

SEQ ID NO: 994385 - DNA, 25 bp, Homo sapien
ggacatccgtgtcgtatttgcacag

SEQ ID NO: 994386 - DNA, 25 bp, Homo sapien
gacagccgagcccacgatgacctgt

SEQ ID NO: 994387 - DNA, 25 bp, Homo sapien
tgtggtagaccaacttaggctcaaa

SEQ ID NO: 994388 - DNA, 25 bp, Homo sapien
caccaggatgtgatgcaccgttgtc

SEQ ID NO: 994389 - DNA, 25 bp, Homo sapien
gtcggccccatagcagtcgctgatg

SEQ ID NO: 994390 - DNA, 25 bp, Homo sapien
gcaggcatacgtggtgtcatcctct

SEQ ID NO: 994391 - DNA, 25 bp, Homo sapien
aaaggtgcaggcatacgtggtgtca

SEQ ID NO: 994392 - DNA, 25 bp, Homo sapien
ctcgctcacaatagggagaggaaga

SEQ ID NO: 994393 - DNA, 25 bp, Homo sapien
aaatgtgatgcttctcgctcacaat

SEQ ID NO: 994394 - DNA, 25 bp, Homo sapien
gacgacttgtagcagaaagatggac

SEQ ID NO: 994395 - DNA, 25 bp, Homo sapien
gacatccagatcgtcagggtggacg

SEQ ID NO: 994396 - DNA, 25 bp, Homo sapien
tggacttgacaaaagtacgctcccg

SEQ ID NO: 994397 - DNA, 25 bp, Homo sapien
ttagtgatctccaagtcatggatga

SEQ ID NO: 994398 - DNA, 25 bp, Homo sapien
tatccaggtcatgagggtcgcagga

SEQ ID NO: 994399 - DNA, 25 bp, Homo sapien
agacagcatcttccgtcaggcccag

SEQ ID NO: 994400 - DNA, 25 bp, Homo sapien
agggtcgcaggagcggaagggcctg

SEQ ID NO: 994401 - DNA, 25 bp, Homo sapien
gtagacagcatcttccgtcaggccc

SEQ ID NO: 994402 - DNA, 25 bp, Homo sapien
ggtcaagaagtaagaactaggagct

SEQ ID NO: 994403 - DNA, 25 bp, Homo sapien
aagtaagaactaggagcttcaaatg

SEQ ID NO: 994404 - DNA, 25 bp, Homo sapien
tgaaggtcaagaagtaagaactagg

SEQ ID NO: 994405 - DNA, 25 bp, Homo sapien
aagaactaggagcttcaaatgtcat

SEQ ID NO: 994406 - DNA, 25 bp, Homo sapien
tccttggaagcaagtcaccctcaca

SEQ ID NO: 994407 - DNA, 25 bp, Homo sapien
tcatccttggaagcaagtcaccctc

SEQ ID NO: 994408 - DNA, 25 bp, Homo sapien
ttggaagcaagtcaccctcacactt

SEQ ID NO: 994409 - DNA, 25 bp, Homo sapien
tggaagcaagtcaccctcacactta

SEQ ID NO: 994410 - DNA, 25 bp, Homo sapien
gatcacttcccacgttggtgtagcg

SEQ ID NO: 994411 - DNA, 25 bp, Homo sapien
tagcgatttgtgacaccgaagccca

SEQ ID NO: 994412 - DNA, 25 bp, Homo sapien
gatctaggaacctggaatagcgcag

SEQ ID NO: 994413 - DNA, 25 bp, Homo sapien
cagcctcaaggtcaaagtcccaacg

SEQ ID NO: 994414 - DNA, 25 bp, Homo sapien
tatttaattctaaaggtgaacgatg

SEQ ID NO: 994415 - DNA, 25 bp, Homo sapien
gtgtcatatggtccacaactgccac

SEQ ID NO: 994416 - DNA, 25 bp, Homo sapien
caagctgtgtcatatggtccacaac

SEQ ID NO: 994417 - DNA, 25 bp, Homo sapien
taaaggtgaacgatggggacaagct

SEQ ID NO: 994418 - DNA, 25 bp, Homo sapien
cagttattttggattacattttcaa

SEQ ID NO: 994419 - DNA, 25 bp, Homo sapien
tcagttattttggattacattttca

SEQ ID NO: 994420 - DNA, 25 bp, Homo sapien
agttattttggattacattttcaat

SEQ ID NO: 994421 - DNA, 25 bp, Homo sapien
cacatccatccgcaaaagacaggat

SEQ ID NO: 994422 - DNA, 25 bp, Homo sapien
cccattgcagattgccggggcagca

SEQ ID NO: 994423 - DNA, 25 bp, Homo sapien
gacaggattccttgaagcatcccat

SEQ ID NO: 994424 - DNA, 25 bp, Homo sapien
tggcatagatgccaacatcggctct

SEQ ID NO: 994425 - DNA, 25 bp, Homo sapien
gattacagagatgttcacagtttgc

SEQ ID NO: 994426 - DNA, 25 bp, Homo sapien
cgtgatgttgtaggttttataggca

SEQ ID NO: 994427 - DNA, 25 bp, Homo sapien
cacagtttgcagtgaatcgggctct

SEQ ID NO: 994428 - DNA, 25 bp, Homo sapien
tataggcatcgcgacactgaggctt

SEQ ID NO: 994429 - DNA, 25 bp, Homo sapien
atatcacacacattgtagctccagg

SEQ ID NO: 994430 - DNA, 25 bp, Homo sapien
gatatcacacacattgtagctccag

SEQ ID NO: 994431 - DNA, 25 bp, Homo sapien
tcacacacattgtagctccaggtag

SEQ ID NO: 994432 - DNA, 25 bp, Homo sapien
tatcacacacattgtagctccaggt

SEQ ID NO: 994433 - DNA, 25 bp, Homo sapien
cacttgcagatgcttttcattagag

SEQ ID NO: 994434 - DNA, 25 bp, Homo sapien
gggcaggttggctaatttcacatag

SEQ ID NO: 994435 - DNA, 25 bp, Homo sapien
tttcagagatagtttggtagggcag

SEQ ID NO: 994436 - DNA, 25 bp, Homo sapien
tcttctcatagccaatcacttgcag

SEQ ID NO: 994437 - DNA, 25 bp, Homo sapien
ggagctgactgtgtaatctggatta

SEQ ID NO: 994438 - DNA, 25 bp, Homo sapien
gctgtgatcacccaaagcgggtgga

SEQ ID NO: 994439 - DNA, 25 bp, Homo sapien
caaatagaccaagtaagggggagtg

SEQ ID NO: 994440 - DNA, 25 bp, Homo sapien
tggatcaggactccagcgcagggca

SEQ ID NO: 994441 - DNA, 25 bp, Homo sapien
gggcccagaggaggataaacttcat

SEQ ID NO: 994442 - DNA, 25 bp, Homo sapien
aagagggcccagaggaggataaact

SEQ ID NO: 994443 - DNA, 25 bp, Homo sapien
agtcagattcaagagggcccagagg

SEQ ID NO: 994444 - DNA, 25 bp, Homo sapien
gagggcccagaggaggataaacttc

SEQ ID NO: 994445 - DNA, 25 bp, Homo sapien
gatgatgttgaaagcccagtttagc

SEQ ID NO: 994446 - DNA, 25 bp, Homo sapien
gaatagagtcaagtgattggtcccc

SEQ ID NO: 994447 - DNA, 25 bp, Homo sapien
tggaactcagagttctgccctctgt

SEQ ID NO: 994448 - DNA, 25 bp, Homo sapien
tagaaatggtgtccattattcagag

SEQ ID NO: 994449 - DNA, 25 bp, Homo sapien
agagtgtagcgtcatctgtcagaga

SEQ ID NO: 994450 - DNA, 25 bp, Homo sapien
ttgaagttcatgatatctctacaga

SEQ ID NO: 994451 - DNA, 25 bp, Homo sapien
ctctacagacgcctcctgtctggtc

SEQ ID NO: 994452 - DNA, 25 bp, Homo sapien
tatctctacagacgcctcctgtctg

SEQ ID NO: 994453 - DNA, 25 bp, Homo sapien
gatatctctacagacgcctcctgtc

SEQ ID NO: 994454 - DNA, 25 bp, Homo sapien
cttcctagggtgacacttccttctg

SEQ ID NO: 994455 - DNA, 25 bp, Homo sapien
cacttcctagggtgacacttccttc

SEQ ID NO: 994456 - DNA, 25 bp, Homo sapien
atccttcacttcctagggtgacact

SEQ ID NO: 994457 - DNA, 25 bp, Homo sapien
tgaagaatccttcacttcctagggt

SEQ ID NO: 994458 - DNA, 25 bp, Homo sapien
tgcaacctcccattgcagatggctg

SEQ ID NO: 994459 - DNA, 25 bp, Homo sapien
tccatgcaacctcccattgcagatg

SEQ ID NO: 994460 - DNA, 25 bp, Homo sapien
caacctcccattgcagatggctggg

SEQ ID NO: 994461 - DNA, 25 bp, Homo sapien
agattccatgcaacctcccattgca

SEQ ID NO: 994462 - DNA, 25 bp, Homo sapien
gtctatcctgacagtcacggaatgg

SEQ ID NO: 994463 - DNA, 25 bp, Homo sapien
gagaatattggttgatccatgtcag

SEQ ID NO: 994464 - DNA, 25 bp, Homo sapien
catgtcaggatgtcaggatcactga

SEQ ID NO: 994465 - DNA, 25 bp, Homo sapien
tagagggtgtcctacacaaatgatg

SEQ ID NO: 994466 - DNA, 25 bp, Homo sapien
caagtggtggtatcctcatcctcaa

SEQ ID NO: 994467 - DNA, 25 bp, Homo sapien
tagcactctgtgcagggaaccagct

SEQ ID NO: 994468 - DNA, 25 bp, Homo sapien
tagacagactcctgctgagaccgga

SEQ ID NO: 994469 - DNA, 25 bp, Homo sapien
tgtgtgcttacaacatgggctgcca

SEQ ID NO: 994470 - DNA, 25 bp, Homo sapien
ataaagcaggattcattaaatggaa

SEQ ID NO: 994471 - DNA, 25 bp, Homo sapien
ttggaataaagcaggattcattaaa

SEQ ID NO: 994472 - DNA, 25 bp, Homo sapien
gttggaataaagcaggattcattaa

SEQ ID NO: 994473 - DNA, 25 bp, Homo sapien
gcaggtgttgatagcttgatcatca

SEQ ID NO: 994474 - DNA, 25 bp, Homo sapien
catcgttcaaggattttgcatcaaa

SEQ ID NO: 994475 - DNA, 25 bp, Homo sapien
tcagggtaggtcacaatcgatgaat

SEQ ID NO: 994476 - DNA, 25 bp, Homo sapien
tgatgctaggttgagaaactcccag

SEQ ID NO: 994477 - DNA, 25 bp, Homo sapien
gtgaatgagagaccccacgcagggt

SEQ ID NO: 994478 - DNA, 25 bp, Homo sapien
tcaaggtgaatgagagaccccacgc

SEQ ID NO: 994479 - DNA, 25 bp, Homo sapien
cagtcaaggtgaatgagagacccca

SEQ ID NO: 994480 - DNA, 25 bp, Homo sapien
caatacccagtcaaggtgaatgaga

SEQ ID NO: 994481 - DNA, 25 bp, Homo sapien
taaaattatatgtcagctcctgatt

SEQ ID NO: 994482 - DNA, 25 bp, Homo sapien
tgaagatagaccatgtaaggaatag

SEQ ID NO: 994483 - DNA, 25 bp, Homo sapien
ttagagtctttagccagagcagctc

SEQ ID NO: 994484 - DNA, 25 bp, Homo sapien
tgtcagctcctgattatctttagag

SEQ ID NO: 994485 - DNA, 25 bp, Homo sapien
tgatcaagctgtaaactgtcccaat

SEQ ID NO: 994486 - DNA, 25 bp, Homo sapien
tagtccaagtgtccttgccaagaac

SEQ ID NO: 994487 - DNA, 25 bp, Homo sapien
caagagagcgacgatgagaaaaccc

SEQ ID NO: 994488 - DNA, 25 bp, Homo sapien
gagaaaacccttcgtggcagacaga

SEQ ID NO: 994489 - DNA, 25 bp, Homo sapien
aatatatacggcattgctgggagcc

SEQ ID NO: 994490 - DNA, 25 bp, Homo sapien
gtggcacagaccaagccgaggtcct

SEQ ID NO: 994491 - DNA, 25 bp, Homo sapien
cagatgagaggagagcagtcttcac

SEQ ID NO: 994492 - DNA, 25 bp, Homo sapien
tcacatgagtccttatcaagaccca

SEQ ID NO: 994493 - DNA, 25 bp, Homo sapien
cggagtctgttaacctataacctgg

SEQ ID NO: 994494 - DNA, 25 bp, Homo sapien
agtccacggagtctgttaacctata

SEQ ID NO: 994495 - DNA, 25 bp, Homo sapien
tccacggagtctgttaacctataac

SEQ ID NO: 994496 - DNA, 25 bp, Homo sapien
cacggagtctgttaacctataacct

SEQ ID NO: 994497 - DNA, 25 bp, Homo sapien
aatagtttggccctatgtccacctt

SEQ ID NO: 994498 - DNA, 25 bp, Homo sapien
tgaaaagacgtggtacaagacagta

SEQ ID NO: 994499 - DNA, 25 bp, Homo sapien
tgtccaccttcttaacagctagttt

SEQ ID NO: 994500 - DNA, 25 bp, Homo sapien
aagttaatcaatgccgacagggacc

SEQ ID NO: 994501 - DNA, 25 bp, Homo sapien
gagacaatgccctggagttctccgt

SEQ ID NO: 994502 - DNA, 25 bp, Homo sapien
tggcagcaatggtctgctgaatcca

SEQ ID NO: 994503 - DNA, 25 bp, Homo sapien
ttctgaggacaaccatagccccagg

SEQ ID NO: 994504 - DNA, 25 bp, Homo sapien
gctgaatccatttcacgtagttgca

SEQ ID NO: 994505 - DNA, 25 bp, Homo sapien
tgcggcaagcagtgttagagagaat

SEQ ID NO: 994506 - DNA, 25 bp, Homo sapien
tgcaggagatcagggtagttggccg

SEQ ID NO: 994507 - DNA, 25 bp, Homo sapien
cccagacatatcatgtttgtagtaa

SEQ ID NO: 994508 - DNA, 25 bp, Homo sapien
gagaatgggagccttcagacactgc

SEQ ID NO: 994509 - DNA, 25 bp, Homo sapien
agatgaggcactgagtaccagccgc

SEQ ID NO: 994510 - DNA, 25 bp, Homo sapien
atgaggcactgagtaccagccgctg

SEQ ID NO: 994511 - DNA, 25 bp, Homo sapien
gtaccagccgctgcacaggatcttg

SEQ ID NO: 994512 - DNA, 25 bp, Homo sapien
agagatgaggcactgagtaccagcc

SEQ ID NO: 994513 - DNA, 25 bp, Homo sapien
tgttcattgccttcatagaccttaa

SEQ ID NO: 994514 - DNA, 25 bp, Homo sapien
ttgatggtggcgactgagctcagct

SEQ ID NO: 994515 - DNA, 25 bp, Homo sapien
ttatcaatggtggctgagttatact

SEQ ID NO: 994516 - DNA, 25 bp, Homo sapien
aatgttgtattctccaagatgcaca

SEQ ID NO: 994517 - DNA, 25 bp, Homo sapien
acttatagcagtgagccgtggacac

SEQ ID NO: 994518 - DNA, 25 bp, Homo sapien
gacttatagcagtgagccgtggaca

SEQ ID NO: 994519 - DNA, 25 bp, Homo sapien
gcattcgtctgacaggtgtagcccc

SEQ ID NO: 994520 - DNA, 25 bp, Homo sapien
ccatttgttattgatgagggagcca

SEQ ID NO: 994521 - DNA, 25 bp, Homo sapien
tcccatttgttattgatgagggagc

SEQ ID NO: 994522 - DNA, 25 bp, Homo sapien
ggacagcattcgtctgacaggtgta

SEQ ID NO: 994523 - DNA, 25 bp, Homo sapien
tggaaataggatgacacttttcttc

SEQ ID NO: 994524 - DNA, 25 bp, Homo sapien
tcttccacagccatttataccaacg

SEQ ID NO: 994525 - DNA, 25 bp, Homo sapien
tgaaggtcttcgtggttgctcactt

SEQ ID NO: 994526 - DNA, 25 bp, Homo sapien
tataccaacggacttgtcttgacat

SEQ ID NO: 994527 - DNA, 25 bp, Homo sapien
ctttacttcggcgtttcaaatgcct

SEQ ID NO: 994528 - DNA, 25 bp, Homo sapien
ttacttcggcgtttcaaatgccttc

SEQ ID NO: 994529 - DNA, 25 bp, Homo sapien
tcacagcaggtaataagagaacaag

SEQ ID NO: 994530 - DNA, 25 bp, Homo sapien
tatcagccgtggaatctgttgtacc

SEQ ID NO: 994531 - DNA, 25 bp, Homo sapien
gactttgtactcagggttaccttgc

SEQ ID NO: 994532 - DNA, 25 bp, Homo sapien
tcaggtggctctatcactgcctcac

SEQ ID NO: 994533 - DNA, 25 bp, Homo sapien
gcaggctgctctgctgtgcggttct

SEQ ID NO: 994534 - DNA, 25 bp, Homo sapien
ctgctctgctgtgcggttctctgtc

SEQ ID NO: 994535 - DNA, 25 bp, Homo sapien
caggctgctctgctgtgcggttctc

SEQ ID NO: 994536 - DNA, 25 bp, Homo sapien
ggctgctctgctgtgcggttctctg

SEQ ID NO: 994537 - DNA, 25 bp, Homo sapien
tgtctacagctatgagaaactctct

SEQ ID NO: 994538 - DNA, 25 bp, Homo sapien
ccacggagggctcgggtgaacattt

SEQ ID NO: 994539 - DNA, 25 bp, Homo sapien
caagagccccgaagaagcttcagaa

SEQ ID NO: 994540 - DNA, 25 bp, Homo sapien
gcagaaagctaagaagccaccggag

SEQ ID NO: 994541 - DNA, 25 bp, Homo sapien
tccatgaatactccctcagtagggt

SEQ ID NO: 994542 - DNA, 25 bp, Homo sapien
catcttggaagaggtactggtcatt

SEQ ID NO: 994543 - DNA, 25 bp, Homo sapien
gatcatatctcactggcacattggc

SEQ ID NO: 994544 - DNA, 25 bp, Homo sapien
gagagtgaggtatgcagaaaatcca

SEQ ID NO: 994545 - DNA, 25 bp, Homo sapien
aggctgctctgttgggtgctgcttt

SEQ ID NO: 994546 - DNA, 25 bp, Homo sapien
gggtgctgctttgtctcctgggagc

SEQ ID NO: 994547 - DNA, 25 bp, Homo sapien
ggtgctgctttgtctcctgggagca

SEQ ID NO: 994548 - DNA, 25 bp, Homo sapien
ctccaggctgctctgttgggtgctg

SEQ ID NO: 994549 - DNA, 25 bp, Homo sapien
gagtgtatcctggtaccaacagacc

SEQ ID NO: 994550 - DNA, 25 bp, Homo sapien
gagctgctcccctatctctgggcat

SEQ ID NO: 994551 - DNA, 25 bp, Homo sapien
ggtcgattctcagggcgccagttct

SEQ ID NO: 994552 - DNA, 25 bp, Homo sapien
caggacagggccttcagttcctctt

SEQ ID NO: 994553 - DNA, 25 bp, Homo sapien
ggcctgcagaaagagtacctggaaa

SEQ ID NO: 994554 - DNA, 25 bp, Homo sapien
ggactgtacccgaagaattgggtga

SEQ ID NO: 994555 - DNA, 25 bp, Homo sapien
tttcaatgggtgaacaaggcaggag

SEQ ID NO: 994556 - DNA, 25 bp, Homo sapien
ctttcaatgggtgaacaaggcagga

SEQ ID NO: 994557 - DNA, 25 bp, Homo sapien
catcgggctcctgtgctgtgtggcc

SEQ ID NO: 994558 - DNA, 25 bp, Homo sapien
gcatcgggctcctgtgctgtgtggc

SEQ ID NO: 994559 - DNA, 25 bp, Homo sapien
atgagcatcgggctcctgtgctgtg

SEQ ID NO: 994560 - DNA, 25 bp, Homo sapien
gagcatcgggctcctgtgctgtgtg

SEQ ID NO: 994561 - DNA, 25 bp, Homo sapien
aatgtctccagattaaacaaacggg

SEQ ID NO: 994562 - DNA, 25 bp, Homo sapien
ctgagggtaccactgacaaaggaga

SEQ ID NO: 994563 - DNA, 25 bp, Homo sapien
aagccacagcgctgcatggccgtct

SEQ ID NO: 994564 - DNA, 25 bp, Homo sapien
caaacgggagttctcgctcaggctg

SEQ ID NO: 994565 - DNA, 25 bp, Homo sapien
caggctgctctgctgtgcggttctc

SEQ ID NO: 994566 - DNA, 25 bp, Homo sapien
ggctgctctgctgtgcggttctctg

SEQ ID NO: 994567 - DNA, 25 bp, Homo sapien
gcaggctgctctgctgtgcggttct

SEQ ID NO: 994568 - DNA, 25 bp, Homo sapien
ctgctctgctgtgcggttctctgtc

SEQ ID NO: 994569 - DNA, 25 bp, Homo sapien
gagctcatgtttgtctacaacttta

SEQ ID NO: 994570 - DNA, 25 bp, Homo sapien
atgagcctcgggctcctgtgctgtg

SEQ ID NO: 994571 - DNA, 25 bp, Homo sapien
cctgtgctgtggggccttttctctc

SEQ ID NO: 994572 - DNA, 25 bp, Homo sapien
ctcctgtgctgtggggccttttctc

SEQ ID NO: 994573 - DNA, 25 bp, Homo sapien
tggggccttttctctcctgtgggca

SEQ ID NO: 994574 - DNA, 25 bp, Homo sapien
caaaattccgggtcctgaagacagg

SEQ ID NO: 994575 - DNA, 25 bp, Homo sapien
tacaactgccaaaggagaggtccct

SEQ ID NO: 994576 - DNA, 25 bp, Homo sapien
cacagattcagcgatgcccttggtc

SEQ ID NO: 994577 - DNA, 25 bp, Homo sapien
catgtactggtatcgacaagaccca

SEQ ID NO: 994578 - DNA, 25 bp, Homo sapien
ttccagaaacccatgcatagagttg

SEQ ID NO: 994579 - DNA, 25 bp, Homo sapien
gatcagagatccctttccagaaacc

SEQ ID NO: 994580 - DNA, 25 bp, Homo sapien
tttcccacaacaactctacacagat

SEQ ID NO: 994581 - DNA, 25 bp, Homo sapien
catagagttgtgttattttggaacc

SEQ ID NO: 994582 - DNA, 25 bp, Homo sapien
gggccataatgctatgtattggtat

SEQ ID NO: 994583 - DNA, 25 bp, Homo sapien
tctgaagacaatgtttatctacagt

SEQ ID NO: 994584 - DNA, 25 bp, Homo sapien
tccaaaatacctggtcacacagatg

SEQ ID NO: 994585 - DNA, 25 bp, Homo sapien
aatgaaacagttccaaatcgcttct

SEQ ID NO: 994586 - DNA, 25 bp, Homo sapien
caggctgctctgctgtgcggttctc

SEQ ID NO: 994587 - DNA, 25 bp, Homo sapien
gcaggctgctctgctgtgcggttct

SEQ ID NO: 994588 - DNA, 25 bp, Homo sapien
ctgctctgctgtgcggttctctgtc

SEQ ID NO: 994589 - DNA, 25 bp, Homo sapien
ggctgctctgctgtgcggttctctg

SEQ ID NO: 994590 - DNA, 25 bp, Homo sapien
tacagtcttgaagaacgggttgaaa

SEQ ID NO: 994591 - DNA, 25 bp, Homo sapien
tctacagtcttgaagaacgggttga

SEQ ID NO: 994592 - DNA, 25 bp, Homo sapien
tgtctacagtcttgaagaacgggtt

SEQ ID NO: 994593 - DNA, 25 bp, Homo sapien
gtttgtctacagtcttgaagaacgg

SEQ ID NO: 994594 - DNA, 25 bp, Homo sapien
cagctctcacttattccttcaccta

SEQ ID NO: 994595 - DNA, 25 bp, Homo sapien
gagtcaccgctttcctgtgcagaaa

SEQ ID NO: 994596 - DNA, 25 bp, Homo sapien
gtatctctgcgccagcagccaagac

SEQ ID NO: 994597 - DNA, 25 bp, Homo sapien
aagacacagccttgcagagtcaccg

SEQ ID NO: 994598 - DNA, 25 bp, Homo sapien
gtgctgtggggtcttttctctcctg

SEQ ID NO: 994599 - DNA, 25 bp, Homo sapien
atgagcctcgggctcctgtgctgtg

SEQ ID NO: 994600 - DNA, 25 bp, Homo sapien
tggggtcttttctctcctgtgggca

SEQ ID NO: 994601 - DNA, 25 bp, Homo sapien
ctgtggggtcttttctctcctgtgg

SEQ ID NO: 994602 - DNA, 25 bp, Homo sapien
catgtactggtatcgacaagaccca

SEQ ID NO: 994603 - DNA, 25 bp, Homo sapien
caaaattccgggtcctgaagacagg

SEQ ID NO: 994604 - DNA, 25 bp, Homo sapien
cacagattcagcgatgcccttggtc

SEQ ID NO: 994605 - DNA, 25 bp, Homo sapien
tacaactgccaaaggagaggtccct

SEQ ID NO: 994606 - DNA, 25 bp, Homo sapien
ttccagaaacccatgcatagagttg

SEQ ID NO: 994607 - DNA, 25 bp, Homo sapien
tttcccacaacaactctacacagat

SEQ ID NO: 994608 - DNA, 25 bp, Homo sapien
gatcagagatccctttccagaaacc

SEQ ID NO: 994609 - DNA, 25 bp, Homo sapien
catagagttgtgttattttggaacc

SEQ ID NO: 994610 - DNA, 25 bp, Homo sapien
ccctgaggtctttaacttgagaaga

SEQ ID NO: 994611 - DNA, 25 bp, Homo sapien
tacatattgcaatatagtgtttgtt

SEQ ID NO: 994612 - DNA, 25 bp, Homo sapien
gaggtctttaacttgagaagatgga

SEQ ID NO: 994613 - DNA, 25 bp, Homo sapien
tattttacatattgcaatatagtgt

SEQ ID NO: 994614 - DNA, 25 bp, Homo sapien
cttgtaagtgacagatcattgggtc

SEQ ID NO: 994615 - DNA, 25 bp, Homo sapien
catgctcagaagcatgtgccaataa

SEQ ID NO: 994616 - DNA, 25 bp, Homo sapien
ggcaatgtggcagtttccatacata

SEQ ID NO: 994617 - DNA, 25 bp, Homo sapien
ggctgaggcgttcccaattccactg

SEQ ID NO: 994618 - DNA, 25 bp, Homo sapien
ctctgctgggcagccctgtgcctcc

SEQ ID NO: 994619 - DNA, 25 bp, Homo sapien
atgggcaccaggctcctctgctggg

SEQ ID NO: 994620 - DNA, 25 bp, Homo sapien
tgggcagccctgtgcctcctggggg

SEQ ID NO: 994621 - DNA, 25 bp, Homo sapien
tgctgggcagccctgtgcctcctgg

SEQ ID NO: 994622 - DNA, 25 bp, Homo sapien
tcaggtcatactgccctttactggt

SEQ ID NO: 994623 - DNA, 25 bp, Homo sapien
ccagtaacaaggtcacagagaaggg

SEQ ID NO: 994624 - DNA, 25 bp, Homo sapien
cctttactggtaccgacaaagcctg

SEQ ID NO: 994625 - DNA, 25 bp, Homo sapien
ggtgtgatccaatttcaggtcatac

SEQ ID NO: 994626 - DNA, 25 bp, Homo sapien
tctgaacaaggctggcggaaacaag

SEQ ID NO: 994627 - DNA, 25 bp, Homo sapien
tccgtgtacagcagtctcagaccag

SEQ ID NO: 994628 - DNA, 25 bp, Homo sapien
tcagggcgccagttccatgactgtt

SEQ ID NO: 994629 - DNA, 25 bp, Homo sapien
caaggccaggaggatatgctcagag

SEQ ID NO: 994630 - DNA, 25 bp, Homo sapien
tgctgtgtggccttttgtctcctgg

SEQ ID NO: 994631 - DNA, 25 bp, Homo sapien
atgggcttcaggctcctctgctgtg

SEQ ID NO: 994632 - DNA, 25 bp, Homo sapien
ggcttcaggctcctctgctgtgtgg

SEQ ID NO: 994633 - DNA, 25 bp, Homo sapien
tgtgtggccttttgtctcctgggag

SEQ ID NO: 994634 - DNA, 25 bp, Homo sapien
gacttgcactctgaactaaacctga

SEQ ID NO: 994635 - DNA, 25 bp, Homo sapien
gattctccgcacaacagttccctga

SEQ ID NO: 994636 - DNA, 25 bp, Homo sapien
agtgacgctgagatgctcccctagg

SEQ ID NO: 994637 - DNA, 25 bp, Homo sapien
gatcacagcaactggacagcgagtg

SEQ ID NO: 994638 - DNA, 25 bp, Homo sapien
atgagcaccaggcttctctgctgga

SEQ ID NO: 994639 - DNA, 25 bp, Homo sapien
agcaccaggcttctctgctggatgg

SEQ ID NO: 994640 - DNA, 25 bp, Homo sapien
caccaggcttctctgctggatggcc

SEQ ID NO: 994641 - DNA, 25 bp, Homo sapien
aggcttctctgctggatggccctct

SEQ ID NO: 994642 - DNA, 25 bp, Homo sapien
tctcctgtgcacaaaactccagggc

SEQ ID NO: 994643 - DNA, 25 bp, Homo sapien
gctaccctttactggtaccggcaga

SEQ ID NO: 994644 - DNA, 25 bp, Homo sapien
gcagcttagccacagcgttgcagag

SEQ ID NO: 994645 - DNA, 25 bp, Homo sapien
ggtgtgatcctatttctggccatgc

SEQ ID NO: 994646 - DNA, 25 bp, Homo sapien
atgcgaaccaatttcaggccacaat

SEQ ID NO: 994647 - DNA, 25 bp, Homo sapien
tatccagtcacccaggcacaaagtg

SEQ ID NO: 994648 - DNA, 25 bp, Homo sapien
gagatgggacaatcagtaactctga

SEQ ID NO: 994649 - DNA, 25 bp, Homo sapien
taactctgagatgcgaaccaatttc

SEQ ID NO: 994650 - DNA, 25 bp, Homo sapien
tttgccatccgcattagcaagctga

SEQ ID NO: 994651 - DNA, 25 bp, Homo sapien
atttgccatccgcattagcaagctg

SEQ ID NO: 994652 - DNA, 25 bp, Homo sapien
tatttgccatccgcattagcaagct

SEQ ID NO: 994653 - DNA, 25 bp, Homo sapien
ggcaccaggctcttcttctatgtgg

SEQ ID NO: 994654 - DNA, 25 bp, Homo sapien
tgatgtgtcaccagacttggagcca

SEQ ID NO: 994655 - DNA, 25 bp, Homo sapien
gaagtccccgatggctatgttgtct

SEQ ID NO: 994656 - DNA, 25 bp, Homo sapien
catgggctgaggctgatctattact

SEQ ID NO: 994657 - DNA, 25 bp, Homo sapien
tctggtatcgacaagacctgggaca

SEQ ID NO: 994658 - DNA, 25 bp, Homo sapien
tctgctgggcggccctctgtctcct

SEQ ID NO: 994659 - DNA, 25 bp, Homo sapien
aggctcctctgctgggcggccctct

SEQ ID NO: 994660 - DNA, 25 bp, Homo sapien
tgctgggcggccctctgtctcctgg

SEQ ID NO: 994661 - DNA, 25 bp, Homo sapien
tcctctgctgggcggccctctgtct

SEQ ID NO: 994662 - DNA, 25 bp, Homo sapien
gacagggcccaaagcttctgattca

SEQ ID NO: 994663 - DNA, 25 bp, Homo sapien
taacggtgtagtggatgattcacag

SEQ ID NO: 994664 - DNA, 25 bp, Homo sapien
catgctaccctttactggtaccagc

SEQ ID NO: 994665 - DNA, 25 bp, Homo sapien
tttttggtgcaatcctatatctggc

SEQ ID NO: 994666 - DNA, 25 bp, Homo sapien
caagtattaatacaaaaacatcctg

SEQ ID NO: 994667 - DNA, 25 bp, Homo sapien
tgcatacaccagtgcaacagtaact

SEQ ID NO: 994668 - DNA, 25 bp, Homo sapien
actcaagaaagtgtcctcatgctcc

SEQ ID NO: 994669 - DNA, 25 bp, Homo sapien
gtgtcctcatgctcctttccaatca

SEQ ID NO: 994670 - DNA, 25 bp, Homo sapien
attgggaggtgggacagctatgact

SEQ ID NO: 994671 - DNA, 25 bp, Homo sapien
tactgactcatagtgtagatgtgtg

SEQ ID NO: 994672 - DNA, 25 bp, Homo sapien
tgactcatagtgtagatgtgtgtgc

SEQ ID NO: 994673 - DNA, 25 bp, Homo sapien
ggaaatactgactcatagtgtagat

SEQ ID NO: 994674 - DNA, 25 bp, Homo sapien
tctgtgcatgggaaactctgccctg

SEQ ID NO: 994675 - DNA, 25 bp, Homo sapien
tctcagctggacgacggaatgtact

SEQ ID NO: 994676 - DNA, 25 bp, Homo sapien
tcagtggaagatataggtggcctcg

SEQ ID NO: 994677 - DNA, 25 bp, Homo sapien
taccatgatgtgagtggatgcagcc

SEQ ID NO: 994678 - DNA, 25 bp, Homo sapien
tgtgcagcctttcctctcctgtggg

SEQ ID NO: 994679 - DNA, 25 bp, Homo sapien
tgagcatcagcctcctgtgctgtgc

SEQ ID NO: 994680 - DNA, 25 bp, Homo sapien
gtgctgtgcagcctttcctctcctg

SEQ ID NO: 994681 - DNA, 25 bp, Homo sapien
gcatcagcctcctgtgctgtgcagc

SEQ ID NO: 994682 - DNA, 25 bp, Homo sapien
aatgctggtgtcactcagaccccaa

SEQ ID NO: 994683 - DNA, 25 bp, Homo sapien
gtgccagcagttactccacagcgct

SEQ ID NO: 994684 - DNA, 25 bp, Homo sapien
tacatgtactggtatcgacaagacc

SEQ ID NO: 994685 - DNA, 25 bp, Homo sapien
cacagaggatttcccgctcaggctg

SEQ ID NO: 994686 - DNA, 25 bp, Homo sapien
ctgggtgctgctttgtctcctggga

SEQ ID NO: 994687 - DNA, 25 bp, Homo sapien
ggtgctgctttgtctcctgggagca

SEQ ID NO: 994688 - DNA, 25 bp, Homo sapien
tctgctgggtgctgctttgtctcct

SEQ ID NO: 994689 - DNA, 25 bp, Homo sapien
tgctgggtgctgctttgtctcctgg

SEQ ID NO: 994690 - DNA, 25 bp, Homo sapien
cgagaggacagcaagtgactctgag

SEQ ID NO: 994691 - DNA, 25 bp, Homo sapien
gttccctaactatagctctgagctg

SEQ ID NO: 994692 - DNA, 25 bp, Homo sapien
cacacacctgatcaaaacgagagga

SEQ ID NO: 994693 - DNA, 25 bp, Homo sapien
ccagtggacgctggagtcacccaaa

SEQ ID NO: 994694 - DNA, 25 bp, Homo sapien
cctcgggctcctgtgctgtgtggcc

SEQ ID NO: 994695 - DNA, 25 bp, Homo sapien
tgagcctcgggctcctgtgctgtgt

SEQ ID NO: 994696 - DNA, 25 bp, Homo sapien
atgagcctcgggctcctgtgctgtg

SEQ ID NO: 994697 - DNA, 25 bp, Homo sapien
agcctcgggctcctgtgctgtgtgg

SEQ ID NO: 994698 - DNA, 25 bp, Homo sapien
aaggggctgaggctgatttactact

SEQ ID NO: 994699 - DNA, 25 bp, Homo sapien
tgatttactactcagttgctgctgc

SEQ ID NO: 994700 - DNA, 25 bp, Homo sapien
atcggtatcgacaagacccaggcaa

SEQ ID NO: 994701 - DNA, 25 bp, Homo sapien
ggtatcgacaagacccaggcaaggg

SEQ ID NO: 994702 - DNA, 25 bp, Homo sapien
ggcactgctttgtctcctgggagca

SEQ ID NO: 994703 - DNA, 25 bp, Homo sapien
tgggcactgctttgtctcctgggag

SEQ ID NO: 994704 - DNA, 25 bp, Homo sapien
ctctgctgggcactgctttgtctcc

SEQ ID NO: 994705 - DNA, 25 bp, Homo sapien
gctgggcactgctttgtctcctggg

SEQ ID NO: 994706 - DNA, 25 bp, Homo sapien
gatgctctcctaagtctgggcatga

SEQ ID NO: 994707 - DNA, 25 bp, Homo sapien
gagatgctctcctaagtctgggcat

SEQ ID NO: 994708 - DNA, 25 bp, Homo sapien
atgctctcctaagtctgggcatgac

SEQ ID NO: 994709 - DNA, 25 bp, Homo sapien
agatgctctcctaagtctgggcatg

SEQ ID NO: 994710 - DNA, 25 bp, Homo sapien
tctgctgggtgctgctttgtcccct

SEQ ID NO: 994711 - DNA, 25 bp, Homo sapien
ggtgctgctttgtcccctaggagaa

SEQ ID NO: 994712 - DNA, 25 bp, Homo sapien
tgggccccgggctcctctgctgggt

SEQ ID NO: 994713 - DNA, 25 bp, Homo sapien
atgggccccgggctcctctgctggg

SEQ ID NO: 994714 - DNA, 25 bp, Homo sapien
caggtttcactccttcaagggaagc

SEQ ID NO: 994715 - DNA, 25 bp, Homo sapien
ctgatcaaaacgagaggacagcacg

SEQ ID NO: 994716 - DNA, 25 bp, Homo sapien
gaatgtgaacgccttgttgctaggg

SEQ ID NO: 994717 - DNA, 25 bp, Homo sapien
gaaggcatgtcttgtgtcctactga

SEQ ID NO: 994718 - DNA, 25 bp, Homo sapien
tctggatgcattaaatgggaacctc

SEQ ID NO: 994719 - DNA, 25 bp, Homo sapien
gttccaggtgccagtgaccagtctt

SEQ ID NO: 994720 - DNA, 25 bp, Homo sapien
taaagaagagatattgaaaggccct

SEQ ID NO: 994721 - DNA, 25 bp, Homo sapien
tattgtcagtaccaacagcggttcc

SEQ ID NO: 994722 - DNA, 25 bp, Homo sapien
gttttatagatgagtctagatgagg

SEQ ID NO: 994723 - DNA, 25 bp, Homo sapien
cctcataaagcattaaggggaatgt

SEQ ID NO: 994724 - DNA, 25 bp, Homo sapien
tgaggttagagtctaggaaagttaa

SEQ ID NO: 994725 - DNA, 25 bp, Homo sapien
agtctaggaaagttaatgaatggcc

SEQ ID NO: 994726 - DNA, 25 bp, Homo sapien
gcatcgggctcctgtgctgtgtggc

SEQ ID NO: 994727 - DNA, 25 bp, Homo sapien
catcgggctcctgtgctgtgtggcc

SEQ ID NO: 994728 - DNA, 25 bp, Homo sapien
gagcatcgggctcctgtgctgtgtg

SEQ ID NO: 994729 - DNA, 25 bp, Homo sapien
atgagcatcgggctcctgtgctgtg

SEQ ID NO: 994730 - DNA, 25 bp, Homo sapien
cttctgtgccagcagttattccaca

SEQ ID NO: 994731 - DNA, 25 bp, Homo sapien
gatacttgtcctggtatcgacaaga

SEQ ID NO: 994732 - DNA, 25 bp, Homo sapien
gaaccatggatacttgtcctggtat

SEQ ID NO: 994733 - DNA, 25 bp, Homo sapien
aagtggccaggacagtatgagtctc

SEQ ID NO: 994734 - DNA, 25 bp, Homo sapien
agagatccgcttcaagaattccatc

SEQ ID NO: 994735 - DNA, 25 bp, Homo sapien
atcagagatccgcttcaagaattcc

SEQ ID NO: 994736 - DNA, 25 bp, Homo sapien
caaatctagacagatcagagatccg

SEQ ID NO: 994737 - DNA, 25 bp, Homo sapien
aaatctagacagatcagagatccgc

SEQ ID NO: 994738 - DNA, 25 bp, Homo sapien
gcagcagagagttattggccccaca

SEQ ID NO: 994739 - DNA, 25 bp, Homo sapien
agttattggccccacatatttgcga

SEQ ID NO: 994740 - DNA, 25 bp, Homo sapien
ggccccacatatttgcgagttagac

SEQ ID NO: 994741 - DNA, 25 bp, Homo sapien
tttgcgagttagactggagatggct

SEQ ID NO: 994742 - DNA, 25 bp, Homo sapien
tctggggcagaatcaccaaggctca

SEQ ID NO: 994743 - DNA, 25 bp, Homo sapien
gcagaatcaccaaggctcatcctcg

SEQ ID NO: 994744 - DNA, 25 bp, Homo sapien
gcggagtgtggccactctccatctc

SEQ ID NO: 994745 - DNA, 25 bp, Homo sapien
agtgtggccactctccatctcagtc

SEQ ID NO: 994746 - DNA, 25 bp, Homo sapien
gcactgtggtccactgggatctaaa

SEQ ID NO: 994747 - DNA, 25 bp, Homo sapien
ccactgggatctaaagggctctggg

SEQ ID NO: 994748 - DNA, 25 bp, Homo sapien
gtccactgggatctaaagggctctg

SEQ ID NO: 994749 - DNA, 25 bp, Homo sapien
gtggtccactgggatctaaagggct

SEQ ID NO: 994750 - DNA, 25 bp, Homo sapien
tgggaggagcagactagcaaaagcc

SEQ ID NO: 994751 - DNA, 25 bp, Homo sapien
caaaagcctagactcctgaaaacag

SEQ ID NO: 994752 - DNA, 25 bp, Homo sapien
gaaatactcatagtgtagacacgtg

SEQ ID NO: 994753 - DNA, 25 bp, Homo sapien
aggaggccctcatcagttatggacc

SEQ ID NO: 994754 - DNA, 25 bp, Homo sapien
cttctgggcactgctttgtctcctc

SEQ ID NO: 994755 - DNA, 25 bp, Homo sapien
tgggcactgctttgtctcctcggaa

SEQ ID NO: 994756 - DNA, 25 bp, Homo sapien
ctgggcactgctttgtctcctcgga

SEQ ID NO: 994757 - DNA, 25 bp, Homo sapien
ggcactgctttgtctcctcggaaca

SEQ ID NO: 994758 - DNA, 25 bp, Homo sapien
cccagtgtcctccactttaccttgg

SEQ ID NO: 994759 - DNA, 25 bp, Homo sapien
cactttaccttggggaggacctctg

SEQ ID NO: 994760 - DNA, 25 bp, Homo sapien
cagtgtcctccactttaccttgggg

SEQ ID NO: 994761 - DNA, 25 bp, Homo sapien
ccagtgtcctccactttaccttggg

SEQ ID NO: 994762 - DNA, 25 bp, Homo sapien
tggagtcacacaaagtcccacacac

SEQ ID NO: 994763 - DNA, 25 bp, Homo sapien
ctggagtcacacaaagtcccacaca

SEQ ID NO: 994764 - DNA, 25 bp, Homo sapien
gcgactctgagatgctctcctatct

SEQ ID NO: 994765 - DNA, 25 bp, Homo sapien
tctctgggcacaccagtgtgtactg

SEQ ID NO: 994766 - DNA, 25 bp, Homo sapien
cgagaggacagcaagcgactctgag

SEQ ID NO: 994767 - DNA, 25 bp, Homo sapien
gtgtactggtaccaacaggccctgg

SEQ ID NO: 994768 - DNA, 25 bp, Homo sapien
ttcaggtcgccagttccctaattat

SEQ ID NO: 994769 - DNA, 25 bp, Homo sapien
ctttggtatgacgagggtgaagaga

SEQ ID NO: 994770 - DNA, 25 bp, Homo sapien
gaatgtgaacgccttggagctggag

SEQ ID NO: 994771 - DNA, 25 bp, Homo sapien
tatgacgagggtgaagagagaaaca

SEQ ID NO: 994772 - DNA, 25 bp, Homo sapien
tcctctgctggatggccctgtgtct

SEQ ID NO: 994773 - DNA, 25 bp, Homo sapien
gcctcctctgctggatggccctgtg

SEQ ID NO: 994774 - DNA, 25 bp, Homo sapien
cctcctctgctggatggccctgtgt

SEQ ID NO: 994775 - DNA, 25 bp, Homo sapien
ctctgctggatggccctgtgtctcc

SEQ ID NO: 994776 - DNA, 25 bp, Homo sapien
caccttggagatccagcgcacagag

SEQ ID NO: 994777 - DNA, 25 bp, Homo sapien
caaccgcctttattggtaccgacag

SEQ ID NO: 994778 - DNA, 25 bp, Homo sapien
tctctgcagagaggcctaagggatc

SEQ ID NO: 994779 - DNA, 25 bp, Homo sapien
cacgcagatactggagtctcccaga

SEQ ID NO: 994780 - DNA, 25 bp, Homo sapien
cttagtcctgacctgcctgactctg

SEQ ID NO: 994781 - DNA, 25 bp, Homo sapien
tgcttagtcctgacctgcctgactc

SEQ ID NO: 994782 - DNA, 25 bp, Homo sapien
gcttagtcctgacctgcctgactct

SEQ ID NO: 994783 - DNA, 25 bp, Homo sapien
cacagaccctggagaattactggct

SEQ ID NO: 994784 - DNA, 25 bp, Homo sapien
tgcagagcgataaaggaagcatccc

SEQ ID NO: 994785 - DNA, 25 bp, Homo sapien
cgattctcagctcaacagttcagtg

SEQ ID NO: 994786 - DNA, 25 bp, Homo sapien
gaactgaacatgagctccttggagc

SEQ ID NO: 994787 - DNA, 25 bp, Homo sapien
cttctatgtggccctttgtctcctg

SEQ ID NO: 994788 - DNA, 25 bp, Homo sapien
tctatgtggccctttgtctcctgtg

SEQ ID NO: 994789 - DNA, 25 bp, Homo sapien
ctatgtggccctttgtctcctgtgg

SEQ ID NO: 994790 - DNA, 25 bp, Homo sapien
ttctatgtggccctttgtctcctgt

SEQ ID NO: 994791 - DNA, 25 bp, Homo sapien
ctcatatggtgttaaagatactgac

SEQ ID NO: 994792 - DNA, 25 bp, Homo sapien
tagatcaaagacagaggatttcctc

SEQ ID NO: 994793 - DNA, 25 bp, Homo sapien
ggagaagtctcagatggctatagtg

SEQ ID NO: 994794 - DNA, 25 bp, Homo sapien
tgagaaccaccgctatatgtactgg

SEQ ID NO: 994795 - DNA, 25 bp, Homo sapien
gctgggtggccttctgtctcctggt

SEQ ID NO: 994796 - DNA, 25 bp, Homo sapien
atgggtaccaggctcctctgctggg

SEQ ID NO: 994797 - DNA, 25 bp, Homo sapien
ggtggccttctgtctcctggtggaa

SEQ ID NO: 994798 - DNA, 25 bp, Homo sapien
tcctctgctgggtggccttctgtct

SEQ ID NO: 994799 - DNA, 25 bp, Homo sapien
ctcatagaagctggagtggttcagt

SEQ ID NO: 994800 - DNA, 25 bp, Homo sapien
gggcccggagcttctgattcgatat

SEQ ID NO: 994801 - DNA, 25 bp, Homo sapien
aagcagtagacgattcacagttgcc

SEQ ID NO: 994802 - DNA, 25 bp, Homo sapien
aataccctttactggtacctgcaga

SEQ ID NO: 994803 - DNA, 25 bp, Homo sapien
tccagggagcctctgcaagtgtgca

SEQ ID NO: 994804 - DNA, 25 bp, Homo sapien
tagaagcaccaagctaccagtgaga

SEQ ID NO: 994805 - DNA, 25 bp, Homo sapien
tgtctaactcctaactcactgaggg

SEQ ID NO: 994806 - DNA, 25 bp, Homo sapien
cagatggatatagttggcaggctcc

SEQ ID NO: 994807 - DNA, 25 bp, Homo sapien
ctgtgtgtccctttgcatcctggta

SEQ ID NO: 994808 - DNA, 25 bp, Homo sapien
tgtgtccctttgcatcctggtagcg

SEQ ID NO: 994809 - DNA, 25 bp, Homo sapien
gactcctggaccttctgctgtgtgt

SEQ ID NO: 994810 - DNA, 25 bp, Homo sapien
ctggaccttctgctgtgtgtccctt

SEQ ID NO: 994811 - DNA, 25 bp, Homo sapien
tattctgacgcccaattctgtcttc

SEQ ID NO: 994812 - DNA, 25 bp, Homo sapien
tcttcagaatatttgccatcatcag

SEQ ID NO: 994813 - DNA, 25 bp, Homo sapien
tccttattctgacgcccaattctgt

SEQ ID NO: 994814 - DNA, 25 bp, Homo sapien
tattttccttattctgacgcccaat

SEQ ID NO: 994815 - DNA, 25 bp, Homo sapien
taaaccaatttcaggccacaactcc

SEQ ID NO: 994816 - DNA, 25 bp, Homo sapien
gtaaaccaatttcaggccacaactc

SEQ ID NO: 994817 - DNA, 25 bp, Homo sapien
ccaatttcaggccacaactcccttt

SEQ ID NO: 994818 - DNA, 25 bp, Homo sapien
accaatttcaggccacaactccctt

SEQ ID NO: 994819 - DNA, 25 bp, Homo sapien
tgtgtccctttgcatcctggtagca

SEQ ID NO: 994820 - DNA, 25 bp, Homo sapien
ctggaccctctgctgtgtgtccctt

SEQ ID NO: 994821 - DNA, 25 bp, Homo sapien
gctgtgtgtccctttgcatcctggt

SEQ ID NO: 994822 - DNA, 25 bp, Homo sapien
tgtgtgtccctttgcatcctggtag

SEQ ID NO: 994823 - DNA, 25 bp, Homo sapien
ccaatttcaggacacgactaccttt

SEQ ID NO: 994824 - DNA, 25 bp, Homo sapien
caggacacgactaccttttctggta

SEQ ID NO: 994825 - DNA, 25 bp, Homo sapien
ctgagatgtaaaccaatttcaggac

SEQ ID NO: 994826 - DNA, 25 bp, Homo sapien
tctgagatgtaaaccaatttcagga

SEQ ID NO: 994827 - DNA, 25 bp, Homo sapien
ttaagtctttcagacagtaagaaga

SEQ ID NO: 994828 - DNA, 25 bp, Homo sapien
tggcactcagggagaggaatgaaac

SEQ ID NO: 994829 - DNA, 25 bp, Homo sapien
tcagggtctacaagatggccaatta

SEQ ID NO: 994830 - DNA, 25 bp, Homo sapien
agtaagaagataactattcagggtc

SEQ ID NO: 994831 - DNA, 25 bp, Homo sapien
aaagagcctgaatagaaatagacaa

SEQ ID NO: 994832 - DNA, 25 bp, Homo sapien
tagaggaatcatgctaccagacttc

SEQ ID NO: 994833 - DNA, 25 bp, Homo sapien
aaagctagaggaatcatgctaccag

SEQ ID NO: 994834 - DNA, 25 bp, Homo sapien
agagcctgaatagaaatagacaaga

SEQ ID NO: 994835 - DNA, 25 bp, Homo sapien
aaggatcaagggcattttatagtca

SEQ ID NO: 994836 - DNA, 25 bp, Homo sapien
tattcattgacaagcaatgcctgtg

SEQ ID NO: 994837 - DNA, 25 bp, Homo sapien
cattgaaatattgtcaaggtctatc

SEQ ID NO: 994838 - DNA, 25 bp, Homo sapien
tagaatgagagagaactatatggct

SEQ ID NO: 994839 - DNA, 25 bp, Homo sapien
tgggtcctctgctatgtgaccctgt

SEQ ID NO: 994840 - DNA, 25 bp, Homo sapien
ctatgtgaccctgtgtctcctggga

SEQ ID NO: 994841 - DNA, 25 bp, Homo sapien
tgtgaccctgtgtctcctgggagca

SEQ ID NO: 994842 - DNA, 25 bp, Homo sapien
gctgggtcctctgctatgtgaccct

SEQ ID NO: 994843 - DNA, 25 bp, Homo sapien
tgtatctctgcgccagcagtcaatc

SEQ ID NO: 994844 - DNA, 25 bp, Homo sapien
gtatctctgcgccagcagtcaatcc

SEQ ID NO: 994845 - DNA, 25 bp, Homo sapien
gaataattccctggttcccctgctg

SEQ ID NO: 994846 - DNA, 25 bp, Homo sapien
gattcttttaggagccagtgaggcc

SEQ ID NO: 994847 - DNA, 25 bp, Homo sapien
ggagcttggaagtgccccttgtttc

SEQ ID NO: 994848 - DNA, 25 bp, Homo sapien
aaaattccctgtccccagtatgagg

SEQ ID NO: 994849 - DNA, 25 bp, Homo sapien
tattataggcaaagcattcaatctc

SEQ ID NO: 994850 - DNA, 25 bp, Homo sapien
gactgtactgtctgacatctccagt

SEQ ID NO: 994851 - DNA, 25 bp, Homo sapien
ttagtcaggatgagagagttcaatc

SEQ ID NO: 994852 - DNA, 25 bp, Homo sapien
tgcaatttcttatctgactgtactg

SEQ ID NO: 994853 - DNA, 25 bp, Homo sapien
ctcaatgagccatcagggtgggccg

SEQ ID NO: 994854 - DNA, 25 bp, Homo sapien
cagtggggagctactcccttggtga

SEQ ID NO: 994855 - DNA, 25 bp, Homo sapien
taagccacagaggtacaccacatcc

SEQ ID NO: 994856 - DNA, 25 bp, Homo sapien
ccttggtgaatctcctcactgccac

SEQ ID NO: 994857 - DNA, 25 bp, Homo sapien
gtgcctggacgctcctgtgctgagc

SEQ ID NO: 994858 - DNA, 25 bp, Homo sapien
tgctgagccaggctaagtgtgaagc

SEQ ID NO: 994859 - DNA, 25 bp, Homo sapien
ctggacgctcctgtgctgagccagg

SEQ ID NO: 994860 - DNA, 25 bp, Homo sapien
gcagtgcctggacgctcctgtgctg

SEQ ID NO: 994861 - DNA, 25 bp, Homo sapien
ctacaccaaggtctacaactatgtg

SEQ ID NO: 994862 - DNA, 25 bp, Homo sapien
tggagtctacaccaaggtctacaac

SEQ ID NO: 994863 - DNA, 25 bp, Homo sapien
gtctacaccaaggtctacaactatg

SEQ ID NO: 994864 - DNA, 25 bp, Homo sapien
gagtctacaccaaggtctacaacta

SEQ ID NO: 994865 - DNA, 25 bp, Homo sapien
gatctacacgctgggcttgattttc

SEQ ID NO: 994866 - DNA, 25 bp, Homo sapien
cacgctgggcttgattttcgtcttc

SEQ ID NO: 994867 - DNA, 25 bp, Homo sapien
cccagatctacacgctgggcttgat

SEQ ID NO: 994868 - DNA, 25 bp, Homo sapien
atcaagcccagatctacacgctggg

SEQ ID NO: 994869 - DNA, 25 bp, Homo sapien
ctcctggcaattctgagagggccca

SEQ ID NO: 994870 - DNA, 25 bp, Homo sapien
cgttggctggcttgaacccactgga

SEQ ID NO: 994871 - DNA, 25 bp, Homo sapien
tggcaccgaagatccaaggaagctt

SEQ ID NO: 994872 - DNA, 25 bp, Homo sapien
ggctgtagctcatccaagcttggca

SEQ ID NO: 994873 - DNA, 25 bp, Homo sapien
gtttggggcacaaatgttcttacca

SEQ ID NO: 994874 - DNA, 25 bp, Homo sapien
ctagcagttacagtgtctactgttc

SEQ ID NO: 994875 - DNA, 25 bp, Homo sapien
tcttccctctagcagttacagtgtc

SEQ ID NO: 994876 - DNA, 25 bp, Homo sapien
tcaggcagtgagaatagtgcccaat

SEQ ID NO: 994877 - DNA, 25 bp, Homo sapien
ctgaaccagtttgtagccaccagag

SEQ ID NO: 994878 - DNA, 25 bp, Homo sapien
tgaaccagtttgtagccaccagagc

SEQ ID NO: 994879 - DNA, 25 bp, Homo sapien
aaggggcccctcaagcatgcattca

SEQ ID NO: 994880 - DNA, 25 bp, Homo sapien
accagagcctgctgcgaaggggccc

SEQ ID NO: 994881 - DNA, 25 bp, Homo sapien
ccctgtggtctgcaacggacagctc

SEQ ID NO: 994882 - DNA, 25 bp, Homo sapien
ctgcaacggacagctccaaggagtt

SEQ ID NO: 994883 - DNA, 25 bp, Homo sapien
tgtggtctgcaacggacagctccaa

SEQ ID NO: 994884 - DNA, 25 bp, Homo sapien
tctgcaacggacagctccaaggagt

SEQ ID NO: 994885 - DNA, 25 bp, Homo sapien
ccatatgaatcccacagttaacacc

SEQ ID NO: 994886 - DNA, 25 bp, Homo sapien
gacgccatatgaatcccacagttaa

SEQ ID NO: 994887 - DNA, 25 bp, Homo sapien
gggtaggacgccatatgaatcccac

SEQ ID NO: 994888 - DNA, 25 bp, Homo sapien
gcctttggggtaggacgccatatga

SEQ ID NO: 994889 - DNA, 25 bp, Homo sapien
tgggagctggtaacaagggccagga

SEQ ID NO: 994890 - DNA, 25 bp, Homo sapien
gctgtagctcatccaagcttgtcac

SEQ ID NO: 994891 - DNA, 25 bp, Homo sapien
ggggctgtagctcatccaagcttgt

SEQ ID NO: 994892 - DNA, 25 bp, Homo sapien
cctgggagctggtaacaagggccag

SEQ ID NO: 994893 - DNA, 25 bp, Homo sapien
actcaggaactgagcacagtaccca

SEQ ID NO: 994894 - DNA, 25 bp, Homo sapien
gaggtttggggcacaaatgatctcc

SEQ ID NO: 994895 - DNA, 25 bp, Homo sapien
gcacaaatgatctcctcactcagga

SEQ ID NO: 994896 - DNA, 25 bp, Homo sapien
cctcactcaggaactgagcacagta

SEQ ID NO: 994897 - DNA, 25 bp, Homo sapien
aattctggctaccacttctgcggtg

SEQ ID NO: 994898 - DNA, 25 bp, Homo sapien
ccaggtgtccttgaattctggctac

SEQ ID NO: 994899 - DNA, 25 bp, Homo sapien
tgaattctggctaccacttctgcgg

SEQ ID NO: 994900 - DNA, 25 bp, Homo sapien
cttgaattctggctaccacttctgc

SEQ ID NO: 994901 - DNA, 25 bp, Homo sapien
acctgccgtcatcaattcccgcgtg

SEQ ID NO: 994902 - DNA, 25 bp, Homo sapien
catcctgctgatcaagctctcctca

SEQ ID NO: 994903 - DNA, 25 bp, Homo sapien
cccaaatacaacagccggactctgg

SEQ ID NO: 994904 - DNA, 25 bp, Homo sapien
accgagtccctcatctccggctggg

SEQ ID NO: 994905 - DNA, 25 bp, Homo sapien
taccaacaacatgttctgtgtgggc

SEQ ID NO: 994906 - DNA, 25 bp, Homo sapien
gagtgtgaagcctcctaccctggaa

SEQ ID NO: 994907 - DNA, 25 bp, Homo sapien
cagacgagctgcagtgcctggatgc

SEQ ID NO: 994908 - DNA, 25 bp, Homo sapien
gcttcctcgagggaggcaaggattc

SEQ ID NO: 994909 - DNA, 25 bp, Homo sapien
tggtctccaatggagagctccaagg

SEQ ID NO: 994910 - DNA, 25 bp, Homo sapien
gtgcagatgcccagactctcaagct

SEQ ID NO: 994911 - DNA, 25 bp, Homo sapien
gcttgctccttgcatggctggcagg

SEQ ID NO: 994912 - DNA, 25 bp, Homo sapien
gggccatccagagcatcactgatga

SEQ ID NO: 994913 - DNA, 25 bp, Homo sapien
gccatcgtcatgttggccccagttg

SEQ ID NO: 994914 - DNA, 25 bp, Homo sapien
cagcagctgctccatatattctaaa

SEQ ID NO: 994915 - DNA, 25 bp, Homo sapien
cagctgctccatatattctaaatcc

SEQ ID NO: 994916 - DNA, 25 bp, Homo sapien
tgctcagagttgtaatcattcagca

SEQ ID NO: 994917 - DNA, 25 bp, Homo sapien
catgctcagagttgtaatcattcag

SEQ ID NO: 994918 - DNA, 25 bp, Homo sapien
cacgctggcatgcttggcaagacct

SEQ ID NO: 994919 - DNA, 25 bp, Homo sapien
tgtacccagagcaaacatatgcaag

SEQ ID NO: 994920 - DNA, 25 bp, Homo sapien
cactgctgcctttgactacacaggg

SEQ ID NO: 994921 - DNA, 25 bp, Homo sapien
tgcttggagatgatcgtgctggccc

SEQ ID NO: 994922 - DNA, 25 bp, Homo sapien
aactatggctacaccttcggttcgg

SEQ ID NO: 994923 - DNA, 25 bp, Homo sapien
actatggctacaccttcggttcggg

SEQ ID NO: 994924 - DNA, 25 bp, Homo sapien
taactatggctacaccttcggttcg

SEQ ID NO: 994925 - DNA, 25 bp, Homo sapien
gctaactatggctacaccttcggtt

SEQ ID NO: 994926 - DNA, 25 bp, Homo sapien
gactcggcttccaaggaataagaag

SEQ ID NO: 994927 - DNA, 25 bp, Homo sapien
cggcttccaaggaataagaaggcca

SEQ ID NO: 994928 - DNA, 25 bp, Homo sapien
catctccctgtccagactcggcttc

SEQ ID NO: 994929 - DNA, 25 bp, Homo sapien
gcttccaaggaataagaaggccaag

SEQ ID NO: 994930 - DNA, 25 bp, Homo sapien
aaggtctagcctgcaatatcgccca

SEQ ID NO: 994931 - DNA, 25 bp, Homo sapien
catataactaggaaacggcaaggtc

SEQ ID NO: 994932 - DNA, 25 bp, Homo sapien
tggtggcctcatgcaagatccaggt

SEQ ID NO: 994933 - DNA, 25 bp, Homo sapien
aatgagcagttcttcgggccaggga

SEQ ID NO: 994934 - DNA, 25 bp, Homo sapien
ggcgccgggacccggctctcagtgc

SEQ ID NO: 994935 - DNA, 25 bp, Homo sapien
cgccgggacccggctctcagtgctg

SEQ ID NO: 994936 - DNA, 25 bp, Homo sapien
gccgggacccggctctcagtgctgg

SEQ ID NO: 994937 - DNA, 25 bp, Homo sapien
gcgccgggacccggctctcagtgct

SEQ ID NO: 994938 - DNA, 25 bp, Homo sapien
tctcctacttacatgaatacttctc

SEQ ID NO: 994939 - DNA, 25 bp, Homo sapien
caagtacgaaataggctaaaccaat

SEQ ID NO: 994940 - DNA, 25 bp, Homo sapien
tcatctcctacttacatgaatactt

SEQ ID NO: 994941 - DNA, 25 bp, Homo sapien
ttccctgaagattgagctcccaacc

SEQ ID NO: 994942 - DNA, 25 bp, Homo sapien
tatctgggtgatcctagagcagctt

SEQ ID NO: 994943 - DNA, 25 bp, Homo sapien
gatacaacaccaagatgtcagcggg

SEQ ID NO: 994944 - DNA, 25 bp, Homo sapien
caaagaccaggaaaggatgtgctca

SEQ ID NO: 994945 - DNA, 25 bp, Homo sapien
catggtcttaggatttagggcccac

SEQ ID NO: 994946 - DNA, 25 bp, Homo sapien
ccagtccctaagtgaaggcccctgg

SEQ ID NO: 994947 - DNA, 25 bp, Homo sapien
ccctggggagtatggttagggctca

SEQ ID NO: 994948 - DNA, 25 bp, Homo sapien
tggggtttttgcacagatgtctgcc

SEQ ID NO: 994949 - DNA, 25 bp, Homo sapien
ggagtatggttagggctcaggagag

SEQ ID NO: 994950 - DNA, 25 bp, Homo sapien
ccacagtgcactccagagagagcgg

SEQ ID NO: 994951 - DNA, 25 bp, Homo sapien
tcagagctgatctggccaataccaa

SEQ ID NO: 994952 - DNA, 25 bp, Homo sapien
ctgcctgcagcctgtcggtaccagt

SEQ ID NO: 994953 - DNA, 25 bp, Homo sapien
caataccaacggagtagaagagcag

SEQ ID NO: 994954 - DNA, 25 bp, Homo sapien
gcaccagggtcgctggccattgatg

SEQ ID NO: 994955 - DNA, 25 bp, Homo sapien
accagggtcgctggccattgatgaa

SEQ ID NO: 994956 - DNA, 25 bp, Homo sapien
ctgcaccagggtcgctggccattga

SEQ ID NO: 994957 - DNA, 25 bp, Homo sapien
ccattgatgaatagtctgagatctg

SEQ ID NO: 994958 - DNA, 25 bp, Homo sapien
aagaaagtgcccaggagaagggcaa

SEQ ID NO: 994959 - DNA, 25 bp, Homo sapien
aaagtgcccaggagaagggcaagga

SEQ ID NO: 994960 - DNA, 25 bp, Homo sapien
gaaagtgcccaggagaagggcaagg

SEQ ID NO: 994961 - DNA, 25 bp, Homo sapien
agaaagtgcccaggagaagggcaag

SEQ ID NO: 994962 - DNA, 25 bp, Homo sapien
ctgagtaggagccccactgttttag

SEQ ID NO: 994963 - DNA, 25 bp, Homo sapien
agctgagtaggagccccactgtttt

SEQ ID NO: 994964 - DNA, 25 bp, Homo sapien
gctgagtaggagccccactgtttta

SEQ ID NO: 994965 - DNA, 25 bp, Homo sapien
tgagtaggagccccactgttttagt

SEQ ID NO: 994966 - DNA, 25 bp, Homo sapien
gaaaacgactttattgaagatggag

SEQ ID NO: 994967 - DNA, 25 bp, Homo sapien
tccgaaaacgactttattgaagatg

SEQ ID NO: 994968 - DNA, 25 bp, Homo sapien
cgaaaacgactttattgaagatgga

SEQ ID NO: 994969 - DNA, 25 bp, Homo sapien
ccgaaaacgactttattgaagatgg

SEQ ID NO: 994970 - DNA, 25 bp, Homo sapien
gcaggccacaggagagttcctcacg

SEQ ID NO: 994971 - DNA, 25 bp, Homo sapien
ctgtcggaagggtgatgagcaggcc

SEQ ID NO: 994972 - DNA, 25 bp, Homo sapien
cagagctgaaggagtaatgcaggcc

SEQ ID NO: 994973 - DNA, 25 bp, Homo sapien
gcccaagcaggctggcctgttttta

SEQ ID NO: 994974 - DNA, 25 bp, Homo sapien
ttccaggaagcgaagtgagaacacg

SEQ ID NO: 994975 - DNA, 25 bp, Homo sapien
tggcgttcatgctactcctctttct

SEQ ID NO: 994976 - DNA, 25 bp, Homo sapien
tccttggcgttcatgctactcctct

SEQ ID NO: 994977 - DNA, 25 bp, Homo sapien
tgttttgtttgatgcacccaggaaa

SEQ ID NO: 994978 - DNA, 25 bp, Homo sapien
gaggtacttcgagacactgagggca

SEQ ID NO: 994979 - DNA, 25 bp, Homo sapien
aattggcactgctgcgggaggtact

SEQ ID NO: 994980 - DNA, 25 bp, Homo sapien
tcagggtcccttgccgaagcctttc

SEQ ID NO: 994981 - DNA, 25 bp, Homo sapien
tgttgattatcccacgcaggtctct

SEQ ID NO: 994982 - DNA, 25 bp, Homo sapien
aaggcctgtgcgtagcgttggatcc

SEQ ID NO: 994983 - DNA, 25 bp, Homo sapien
tgtgcgtagcgttggatccgctgcc

SEQ ID NO: 994984 - DNA, 25 bp, Homo sapien
cgttggatccgctgccggttgagat

SEQ ID NO: 994985 - DNA, 25 bp, Homo sapien
gctgccggttgagatcttgcctgtc

SEQ ID NO: 994986 - DNA, 25 bp, Homo sapien
tagagcctagggagcacacaggcct

SEQ ID NO: 994987 - DNA, 25 bp, Homo sapien
ccttggcagctaggcctcagaaagc

SEQ ID NO: 994988 - DNA, 25 bp, Homo sapien
tcaccagctcaatcaacaagcatag

SEQ ID NO: 994989 - DNA, 25 bp, Homo sapien
ggaagtctgagctccaaacgggacc

SEQ ID NO: 994990 - DNA, 25 bp, Homo sapien
agcgaggcagcttccgctccagcat

SEQ ID NO: 994991 - DNA, 25 bp, Homo sapien
caggcagcgaggcagcttccgctcc

SEQ ID NO: 994992 - DNA, 25 bp, Homo sapien
ggcagcgaggcagcttccgctccag

SEQ ID NO: 994993 - DNA, 25 bp, Homo sapien
cacaggcagcgaggcagcttccgct

SEQ ID NO: 994994 - DNA, 25 bp, Homo sapien
tagtcgtagaagtggcctagctcct

SEQ ID NO: 994995 - DNA, 25 bp, Homo sapien
tccacgttgtagttggctgggccat

SEQ ID NO: 994996 - DNA, 25 bp, Homo sapien
tgatgctgtacatgaagggcaggtc

SEQ ID NO: 994997 - DNA, 25 bp, Homo sapien
catcgatgatggtaaggaacagctc

SEQ ID NO: 994998 - DNA, 25 bp, Homo sapien
tacggtccctagttttgtatgagcc

SEQ ID NO: 994999 - DNA, 25 bp, Homo sapien
cgggctctgcgtgcatgtccatcct

SEQ ID NO: 995000 - DNA, 25 bp, Homo sapien
catctcaatatcaccagctctgcag

SEQ ID NO: 995001 - DNA, 25 bp, Homo sapien
ccatggcaaccatgcagacgaccag

SEQ ID NO: 995002 - DNA, 25 bp, Homo sapien
cccatcctctgataccataggtctc

SEQ ID NO: 995003 - DNA, 25 bp, Homo sapien
ccatcctctgataccataggtctcc

SEQ ID NO: 995004 - DNA, 25 bp, Homo sapien
agagccagtgccccctagacttcct

SEQ ID NO: 995005 - DNA, 25 bp, Homo sapien
tgatctctgcattactcctcctccc

SEQ ID NO: 995006 - DNA, 25 bp, Homo sapien
agcagaatcgcatcaggtcgccaaa

SEQ ID NO: 995007 - DNA, 25 bp, Homo sapien
cagccagcagaatcgcatcaggtcg

SEQ ID NO: 995008 - DNA, 25 bp, Homo sapien
cagaatcgcatcaggtcgccaaaaa

SEQ ID NO: 995009 - DNA, 25 bp, Homo sapien
atcgcatcaggtcgccaaaaatcat

SEQ ID NO: 995010 - DNA, 25 bp, Homo sapien
ttgcaccagcccagcacgagtgcaa

SEQ ID NO: 995011 - DNA, 25 bp, Homo sapien
aggacatgggtaccacctccccgct

SEQ ID NO: 995012 - DNA, 25 bp, Homo sapien
agcatctggaatcctcgggcgaagt

SEQ ID NO: 995013 - DNA, 25 bp, Homo sapien
cgaagtacatgacgttgcaccagcc

SEQ ID NO: 995014 - DNA, 25 bp, Homo sapien
ggttcttgagaggtcaggaatccaa

SEQ ID NO: 995015 - DNA, 25 bp, Homo sapien
gaatccaaggagtggaactggagcc

SEQ ID NO: 995016 - DNA, 25 bp, Homo sapien
ggctctggagctaaggttcttgaga

SEQ ID NO: 995017 - DNA, 25 bp, Homo sapien
tacacacagcactagagagggggct

SEQ ID NO: 995018 - DNA, 25 bp, Homo sapien
aatgggcccccaaggatggtctgtc

SEQ ID NO: 995019 - DNA, 25 bp, Homo sapien
cccccaaggatggtctgtccaaaga

SEQ ID NO: 995020 - DNA, 25 bp, Homo sapien
tctgtccaaagaagcgagtgacccc

SEQ ID NO: 995021 - DNA, 25 bp, Homo sapien
cgagtgacccccattctgaagatgt

SEQ ID NO: 995022 - DNA, 25 bp, Homo sapien
agctccccgaccagccggatatcgt

SEQ ID NO: 995023 - DNA, 25 bp, Homo sapien
gatgatagccccaatgacagtcacc

SEQ ID NO: 995024 - DNA, 25 bp, Homo sapien
ggatgatgatagccccaatgacagt

SEQ ID NO: 995025 - DNA, 25 bp, Homo sapien
gaccagccggatatcgtccttaggg

SEQ ID NO: 995026 - DNA, 25 bp, Homo sapien
ctcgtgcggttattggtcctgggct

SEQ ID NO: 995027 - DNA, 25 bp, Homo sapien
cggtagatgcagcacatggtgaagc

SEQ ID NO: 995028 - DNA, 25 bp, Homo sapien
catgcagaagtacggccgcccgtac

SEQ ID NO: 995029 - DNA, 25 bp, Homo sapien
tctgctgtaagagggtgttgtcccg

SEQ ID NO: 995030 - DNA, 25 bp, Homo sapien
aggtggctcagagaccctgacaccc

SEQ ID NO: 995031 - DNA, 25 bp, Homo sapien
agccacagcctgctgtcatgagcca

SEQ ID NO: 995032 - DNA, 25 bp, Homo sapien
cacagcctgctgtcatgagccatac

SEQ ID NO: 995033 - DNA, 25 bp, Homo sapien
acagaaagagaacaggtggctcaga

SEQ ID NO: 995034 - DNA, 25 bp, Homo sapien
catagagagtcgaggtcagtggtcc

SEQ ID NO: 995035 - DNA, 25 bp, Homo sapien
tgctcatcccctgaggagtcgatct

SEQ ID NO: 995036 - DNA, 25 bp, Homo sapien
gagtcgatctctgtgaggtcataga

SEQ ID NO: 995037 - DNA, 25 bp, Homo sapien
tggtgatgataagttccagcaggga

SEQ ID NO: 995038 - DNA, 25 bp, Homo sapien
tcccatgactccctccagagtttgg

SEQ ID NO: 995039 - DNA, 25 bp, Homo sapien
gaacccacattcacagtgacattca

SEQ ID NO: 995040 - DNA, 25 bp, Homo sapien
gtgacattcataggttcctcatcct

SEQ ID NO: 995041 - DNA, 25 bp, Homo sapien
tttgatgacagcctttagagggcag

SEQ ID NO: 995042 - DNA, 25 bp, Homo sapien
cagggatcgcgttcacctctgtttc

SEQ ID NO: 995043 - DNA, 25 bp, Homo sapien
agcatgggatctagactctgtaacc

SEQ ID NO: 995044 - DNA, 25 bp, Homo sapien
tctgagttgagaatgggatctaagc

SEQ ID NO: 995045 - DNA, 25 bp, Homo sapien
cattagaaagacacctcagggatgg

SEQ ID NO: 995046 - DNA, 25 bp, Homo sapien
ggtgagaccctggtgattgggcacg

SEQ ID NO: 995047 - DNA, 25 bp, Homo sapien
tctgtcgtaggacagcaacaggttg

SEQ ID NO: 995048 - DNA, 25 bp, Homo sapien
tgagaccctggtgattgggcacgag

SEQ ID NO: 995049 - DNA, 25 bp, Homo sapien
gtgagaccctggtgattgggcacga

SEQ ID NO: 995050 - DNA, 25 bp, Homo sapien
cagctccatgctcaatgagcagccg

SEQ ID NO: 995051 - DNA, 25 bp, Homo sapien
catgctcaatgagcagccgcacgat

SEQ ID NO: 995052 - DNA, 25 bp, Homo sapien
tgctcaatgagcagccgcacgatct

SEQ ID NO: 995053 - DNA, 25 bp, Homo sapien
tccatgctcaatgagcagccgcacg

SEQ ID NO: 995054 - DNA, 25 bp, Homo sapien
aattggcctctagtctaattaagcc

SEQ ID NO: 995055 - DNA, 25 bp, Homo sapien
cccacatctcagctcagggcttgag

SEQ ID NO: 995056 - DNA, 25 bp, Homo sapien
acagatacggctgaagacaggatcc

SEQ ID NO: 995057 - DNA, 25 bp, Homo sapien
ctatggtaggagagtgcaggatggc

SEQ ID NO: 995058 - DNA, 25 bp, Homo sapien
cctgcgggcaagcagggctcgcacc

SEQ ID NO: 995059 - DNA, 25 bp, Homo sapien
ccctgcgggcaagcagggctcgcac

SEQ ID NO: 995060 - DNA, 25 bp, Homo sapien
actggccctgcgggcaagcagggct

SEQ ID NO: 995061 - DNA, 25 bp, Homo sapien
tcacaacagcgatgtgcagtgcagt

SEQ ID NO: 995062 - DNA, 25 bp, Homo sapien
acagcgatgtgcagtgcagtctgac

SEQ ID NO: 995063 - DNA, 25 bp, Homo sapien
cacaacagcgatgtgcagtgcagtc

SEQ ID NO: 995064 - DNA, 25 bp, Homo sapien
caacagcgatgtgcagtgcagtctg

SEQ ID NO: 995065 - DNA, 25 bp, Homo sapien
tatccatcacagagactgacttgaa

SEQ ID NO: 995066 - DNA, 25 bp, Homo sapien
agctctcgggtgttcaggattccca

SEQ ID NO: 995067 - DNA, 25 bp, Homo sapien
cagctgtcagtcacgggtctgtccc

SEQ ID NO: 995068 - DNA, 25 bp, Homo sapien
ttctctaggcccctggcatttcagg

SEQ ID NO: 995069 - DNA, 25 bp, Homo sapien
ctgctatgtgtagcgctgtttcccc

SEQ ID NO: 995070 - DNA, 25 bp, Homo sapien
gttgtcatagagggctgctatgtgt

SEQ ID NO: 995071 - DNA, 25 bp, Homo sapien
atagagctcagatgtcatgggctca

SEQ ID NO: 995072 - DNA, 25 bp, Homo sapien
ctcagatgtcatgggctcaaagacc

SEQ ID NO: 995073 - DNA, 25 bp, Homo sapien
catttacagagaggtgggttatatg

SEQ ID NO: 995074 - DNA, 25 bp, Homo sapien
tttacagagaggtgggttatatggc

SEQ ID NO: 995075 - DNA, 25 bp, Homo sapien
ttacagagaggtgggttatatggct

SEQ ID NO: 995076 - DNA, 25 bp, Homo sapien
tacagagaggtgggttatatggctt

SEQ ID NO: 995077 - DNA, 25 bp, Homo sapien
gacagcggattggagacgatagatt

SEQ ID NO: 995078 - DNA, 25 bp, Homo sapien
gcggattggagacgatagattcaga

SEQ ID NO: 995079 - DNA, 25 bp, Homo sapien
tgtgggacagcggattggagacgat

SEQ ID NO: 995080 - DNA, 25 bp, Homo sapien
gaggccccatgtgtggggctcacct

SEQ ID NO: 995081 - DNA, 25 bp, Homo sapien
gcaccttgcaatcctcatacttgag

SEQ ID NO: 995082 - DNA, 25 bp, Homo sapien
tctctggtgcaccttgcaatcctca

SEQ ID NO: 995083 - DNA, 25 bp, Homo sapien
atcctcatacttgagcaacttgttc

SEQ ID NO: 995084 - DNA, 25 bp, Homo sapien
tctttggcagctagaaggagaggag

SEQ ID NO: 995085 - DNA, 25 bp, Homo sapien
ggtcctgtttgaccctcaccaggtg

SEQ ID NO: 995086 - DNA, 25 bp, Homo sapien
ccttgttttgcatggaccgaggggt

SEQ ID NO: 995087 - DNA, 25 bp, Homo sapien
tgccctccaggataagccttgtttt

SEQ ID NO: 995088 - DNA, 25 bp, Homo sapien
ccctggagtggtcctgtttgaccct

SEQ ID NO: 995089 - DNA, 25 bp, Homo sapien
tccttgcatgcaaaaaccggtggcg

SEQ ID NO: 995090 - DNA, 25 bp, Homo sapien
tggcggacccttccacctagtgaat

SEQ ID NO: 995091 - DNA, 25 bp, Homo sapien
tactactttgtttcggctattggcc

SEQ ID NO: 995092 - DNA, 25 bp, Homo sapien
aactatggccaacaatgacagatgc

SEQ ID NO: 995093 - DNA, 25 bp, Homo sapien
taacaacaatgccattctgttgccc

SEQ ID NO: 995094 - DNA, 25 bp, Homo sapien
caacaatgccattctgttgccccaa

SEQ ID NO: 995095 - DNA, 25 bp, Homo sapien
aacaatgccattctgttgccccaag

SEQ ID NO: 995096 - DNA, 25 bp, Homo sapien
acaacaatgccattctgttgcccca

SEQ ID NO: 995097 - DNA, 25 bp, Homo sapien
gctgcagcaggttctgctcatctcg

SEQ ID NO: 995098 - DNA, 25 bp, Homo sapien
caggttctgctcatctcggctctgg

SEQ ID NO: 995099 - DNA, 25 bp, Homo sapien
aggttctgctcatctcggctctggg

SEQ ID NO: 995100 - DNA, 25 bp, Homo sapien
cagcaggttctgctcatctcggctc

SEQ ID NO: 995101 - DNA, 25 bp, Homo sapien
tctgcagaacttgctccataggcag

SEQ ID NO: 995102 - DNA, 25 bp, Homo sapien
atctgcagaacttgctccataggca

SEQ ID NO: 995103 - DNA, 25 bp, Homo sapien
cgaggccagaccctgacgggactca

SEQ ID NO: 995104 - DNA, 25 bp, Homo sapien
gaccctgacgggactcagccttggg

SEQ ID NO: 995105 - DNA, 25 bp, Homo sapien
cagaccctgacgggactcagccttg

SEQ ID NO: 995106 - DNA, 25 bp, Homo sapien
ggccgaggccagaccctgacgggac

SEQ ID NO: 995107 - DNA, 25 bp, Homo sapien
cccagccagtttggagagggctgtg

SEQ ID NO: 995108 - DNA, 25 bp, Homo sapien
gagtttgttacacttggcagagcca

SEQ ID NO: 995109 - DNA, 25 bp, Homo sapien
cctgccttcctgacgagttccttgg

SEQ ID NO: 995110 - DNA, 25 bp, Homo sapien
tccctgtagaggtcccgtctcctgt

SEQ ID NO: 995111 - DNA, 25 bp, Homo sapien
tcaaagacctatttagcttcaaaga

SEQ ID NO: 995112 - DNA, 25 bp, Homo sapien
gcaatgaggccttcgttacgctggg

SEQ ID NO: 995113 - DNA, 25 bp, Homo sapien
tgaaccccaagacctttgtgcccat

SEQ ID NO: 995114 - DNA, 25 bp, Homo sapien
ccagtggtttgtcgcttcaaagacc

SEQ ID NO: 995115 - DNA, 25 bp, Homo sapien
tgagtgcatggcctgacctcttttc

SEQ ID NO: 995116 - DNA, 25 bp, Homo sapien
tgacttctgagtgagtcgctcttcc

SEQ ID NO: 995117 - DNA, 25 bp, Homo sapien
tatccataatgatgagtgcatggcc

SEQ ID NO: 995118 - DNA, 25 bp, Homo sapien
tgccctcgtggtggcctctgaccaa

SEQ ID NO: 995119 - DNA, 25 bp, Homo sapien
actggaggtatctgactgtcgcgct

SEQ ID NO: 995120 - DNA, 25 bp, Homo sapien
tacgctgctgcggtgcctgactgga

SEQ ID NO: 995121 - DNA, 25 bp, Homo sapien
gactgtcgcgctggctctgcagttc

SEQ ID NO: 995122 - DNA, 25 bp, Homo sapien
ggcgcggtacgctgctgcggtgcct

SEQ ID NO: 995123 - DNA, 25 bp, Homo sapien
gcaagatctgggggcaagatccaag

SEQ ID NO: 995124 - DNA, 25 bp, Homo sapien
aggagcttcacactccacacgcttc

SEQ ID NO: 995125 - DNA, 25 bp, Homo sapien
agcctccgcgcccaaggagcttcac

SEQ ID NO: 995126 - DNA, 25 bp, Homo sapien
ctcccagtccttggccccacggagc

SEQ ID NO: 995127 - DNA, 25 bp, Homo sapien
agctcctgaaccatggtgattcttg

SEQ ID NO: 995128 - DNA, 25 bp, Homo sapien
tggtccaagtagctctggctgaaga

SEQ ID NO: 995129 - DNA, 25 bp, Homo sapien
gacaggattctgtggtccaagtagc

SEQ ID NO: 995130 - DNA, 25 bp, Homo sapien
ccatggtgattcttggagctctgga

SEQ ID NO: 995131 - DNA, 25 bp, Homo sapien
ttgcccctcaggttcaccaagttca

SEQ ID NO: 995132 - DNA, 25 bp, Homo sapien
gaacctgggattgcctccttcttgc

SEQ ID NO: 995133 - DNA, 25 bp, Homo sapien
cagaggccatggaacctgggattgc

SEQ ID NO: 995134 - DNA, 25 bp, Homo sapien
tgcccctcaggttcaccaagttcac

SEQ ID NO: 995135 - DNA, 25 bp, Homo sapien
gaacccagcaccttgtcaataacat

SEQ ID NO: 995136 - DNA, 25 bp, Homo sapien
cagcaccttgtcaataacatacttt

SEQ ID NO: 995137 - DNA, 25 bp, Homo sapien
cccagcaccttgtcaataacatact

SEQ ID NO: 995138 - DNA, 25 bp, Homo sapien
cagaacccagcaccttgtcaataac

SEQ ID NO: 995139 - DNA, 25 bp, Homo sapien
gcacccggctgagaacaacattttc

SEQ ID NO: 995140 - DNA, 25 bp, Homo sapien
ctgcacccggctgagaacaacattt

SEQ ID NO: 995141 - DNA, 25 bp, Homo sapien
tgcacccggctgagaacaacatttt

SEQ ID NO: 995142 - DNA, 25 bp, Homo sapien
cactgcacccggctgagaacaacat

SEQ ID NO: 995143 - DNA, 25 bp, Homo sapien
gaagtcctgtatagaagccttgcag

SEQ ID NO: 995144 - DNA, 25 bp, Homo sapien
cctgaggcagaacgagcagtggata

SEQ ID NO: 995145 - DNA, 25 bp, Homo sapien
gaacgagcagtggatatttcttcta

SEQ ID NO: 995146 - DNA, 25 bp, Homo sapien
tctgaagtcctgtatagaagccttg

SEQ ID NO: 995147 - DNA, 25 bp, Homo sapien
caggacagctgcgatatgtggcaca

SEQ ID NO: 995148 - DNA, 25 bp, Homo sapien
taaaacatccaggtagagcggtcca

SEQ ID NO: 995149 - DNA, 25 bp, Homo sapien
gaagtggcgcacaattaaccgtaat

SEQ ID NO: 995150 - DNA, 25 bp, Homo sapien
tcagtatcacggagaaggcagggtc

SEQ ID NO: 995151 - DNA, 25 bp, Homo sapien
cacagatgggagtttagctttgcac

SEQ ID NO: 995152 - DNA, 25 bp, Homo sapien
tatttgctgacagagctaccaggga

SEQ ID NO: 995153 - DNA, 25 bp, Homo sapien
gaagttgaagatacacacgtgagag

SEQ ID NO: 995154 - DNA, 25 bp, Homo sapien
acacagggtgtgaaaagacagagtg

SEQ ID NO: 995155 - DNA, 25 bp, Homo sapien
gaaagcagattcttattgagctcat

SEQ ID NO: 995156 - DNA, 25 bp, Homo sapien
tagtcttctattagctcagttcatg

SEQ ID NO: 995157 - DNA, 25 bp, Homo sapien
gctcacaagagcatattttactcaa

SEQ ID NO: 995158 - DNA, 25 bp, Homo sapien
gaaaagaatcaccaatgtttcagac

SEQ ID NO: 995159 - DNA, 25 bp, Homo sapien
gagcagttttacataccctgccacc

SEQ ID NO: 995160 - DNA, 25 bp, Homo sapien
acattgtgcgatccctcactgctgg

SEQ ID NO: 995161 - DNA, 25 bp, Homo sapien
tttgttatcccagaccacagtcctt

SEQ ID NO: 995162 - DNA, 25 bp, Homo sapien
gtgtatctgaattaactgtctgtgg

SEQ ID NO: 995163 - DNA, 25 bp, Homo sapien
tgcaaacacttcagactgtgagcct

SEQ ID NO: 995164 - DNA, 25 bp, Homo sapien
tgcctccaggcacaaggatgattag

SEQ ID NO: 995165 - DNA, 25 bp, Homo sapien
gatggctatgtcaggagaacaagca

SEQ ID NO: 995166 - DNA, 25 bp, Homo sapien
tataggcctaatttaccatacattc

SEQ ID NO: 995167 - DNA, 25 bp, Homo sapien
gcaagagcccagaaaatacgtgaga

SEQ ID NO: 995168 - DNA, 25 bp, Homo sapien
aatattggttatcagggaccagggc

SEQ ID NO: 995169 - DNA, 25 bp, Homo sapien
gatgtgaagtgtgaggcatgaccct

SEQ ID NO: 995170 - DNA, 25 bp, Homo sapien
tgagatgggtgacttgcaagagccc

SEQ ID NO: 995171 - DNA, 25 bp, Homo sapien
catagcgaagcactcgcagaggatt

SEQ ID NO: 995172 - DNA, 25 bp, Homo sapien
cccagagggctgtttctcagatgga

SEQ ID NO: 995173 - DNA, 25 bp, Homo sapien
tgccccagggtgttttgacgaagga

SEQ ID NO: 995174 - DNA, 25 bp, Homo sapien
tcagtccaagattcaagtgccccag

SEQ ID NO: 995175 - DNA, 25 bp, Homo sapien
agcgaggcagcttccgctccagcat

SEQ ID NO: 995176 - DNA, 25 bp, Homo sapien
caggcagcgaggcagcttccgctcc

SEQ ID NO: 995177 - DNA, 25 bp, Homo sapien
cacaggcagcgaggcagcttccgct

SEQ ID NO: 995178 - DNA, 25 bp, Homo sapien
ggcagcgaggcagcttccgctccag

SEQ ID NO: 995179 - DNA, 25 bp, Homo sapien
gagccatgaggttcaaagaggcact

SEQ ID NO: 995180 - DNA, 25 bp, Homo sapien
agccatgaggttcaaagaggcactg

SEQ ID NO: 995181 - DNA, 25 bp, Homo sapien
tagtcatagaattgccccagactgg

SEQ ID NO: 995182 - DNA, 25 bp, Homo sapien
caagtccacgtcgtagttggcaggt

SEQ ID NO: 995183 - DNA, 25 bp, Homo sapien
tggcgaaggcgaagttgacaatgct

SEQ ID NO: 995184 - DNA, 25 bp, Homo sapien
ggcaggtgcatcaataacagtgaga

SEQ ID NO: 995185 - DNA, 25 bp, Homo sapien
gagttatcacaataagcatggacat

SEQ ID NO: 995186 - DNA, 25 bp, Homo sapien
gataatggagttatcacaataagca

SEQ ID NO: 995187 - DNA, 25 bp, Homo sapien
gagatgggataatggagttatcaca

SEQ ID NO: 995188 - DNA, 25 bp, Homo sapien
ggaagaggacatggagatgggataa

SEQ ID NO: 995189 - DNA, 25 bp, Homo sapien
gacagcgctggactgcttgaaagcc

SEQ ID NO: 995190 - DNA, 25 bp, Homo sapien
cgtaagggaacttcaggacagcgct

SEQ ID NO: 995191 - DNA, 25 bp, Homo sapien
gagctgaagcacattctgagagcag

SEQ ID NO: 995192 - DNA, 25 bp, Homo sapien
tgaaccaacataggaaacggattcc

SEQ ID NO: 995193 - DNA, 25 bp, Homo sapien
agtagaggagtgtatggtgccttac

SEQ ID NO: 995194 - DNA, 25 bp, Homo sapien
tctagtagaggagtgtatggtgcct

SEQ ID NO: 995195 - DNA, 25 bp, Homo sapien
atctgctgatctagtagaggagtgt

SEQ ID NO: 995196 - DNA, 25 bp, Homo sapien
ctgatctagtagaggagtgtatggt

SEQ ID NO: 995197 - DNA, 25 bp, Homo sapien
ccagcagaaacgcattaggtctcca

SEQ ID NO: 995198 - DNA, 25 bp, Homo sapien
gcagaaacgcattaggtctccaaaa

SEQ ID NO: 995199 - DNA, 25 bp, Homo sapien
gaaacgcattaggtctccaaaaatc

SEQ ID NO: 995200 - DNA, 25 bp, Homo sapien
cagccagcagaaacgcattaggtct

SEQ ID NO: 995201 - DNA, 25 bp, Homo sapien
agcatctggaatcctcgagtgaaat

SEQ ID NO: 995202 - DNA, 25 bp, Homo sapien
cgagtgaaatacatgacactgcacc

SEQ ID NO: 995203 - DNA, 25 bp, Homo sapien
tcctcgagtgaaatacatgacactg

SEQ ID NO: 995204 - DNA, 25 bp, Homo sapien
ggaatcctcgagtgaaatacatgac

SEQ ID NO: 995205 - DNA, 25 bp, Homo sapien
tccaaaatagcgagaggcaccaacc

SEQ ID NO: 995206 - DNA, 25 bp, Homo sapien
cccaagaatcgtctttccaaaatag

SEQ ID NO: 995207 - DNA, 25 bp, Homo sapien
ggcaccaaccctgaagatgtctgga

SEQ ID NO: 995208 - DNA, 25 bp, Homo sapien
gaatcgtctttccaaaatagcgaga

SEQ ID NO: 995209 - DNA, 25 bp, Homo sapien
ctctaggagcaggatgatcacagcc

SEQ ID NO: 995210 - DNA, 25 bp, Homo sapien
acagccccaacgatgctcaccagct

SEQ ID NO: 995211 - DNA, 25 bp, Homo sapien
ccaccagcctgatgatatcttcacg

SEQ ID NO: 995212 - DNA, 25 bp, Homo sapien
tatcttcacgtgtctcataggcctc

SEQ ID NO: 995213 - DNA, 25 bp, Homo sapien
gactgacctagagtagctgcctcca

SEQ ID NO: 995214 - DNA, 25 bp, Homo sapien
ggctgtgaagatcagggtgccccta

SEQ ID NO: 995215 - DNA, 25 bp, Homo sapien
tacacataagttggcgaggatggct

SEQ ID NO: 995216 - DNA, 25 bp, Homo sapien
aatgtgaaacccctctaatgctggg

SEQ ID NO: 995217 - DNA, 25 bp, Homo sapien
tctacctgggtgtttaggagcctac

SEQ ID NO: 995218 - DNA, 25 bp, Homo sapien
agagcgtggcatcgtccctgagtag

SEQ ID NO: 995219 - DNA, 25 bp, Homo sapien
catgggcccatatagacagcacaca

SEQ ID NO: 995220 - DNA, 25 bp, Homo sapien
tgtgctcattaaaccccatctgtgg

SEQ ID NO: 995221 - DNA, 25 bp, Homo sapien
tgcggttgccaccacgaaacttaag

SEQ ID NO: 995222 - DNA, 25 bp, Homo sapien
tcatgtagagcaggtacaaggcagc

SEQ ID NO: 995223 - DNA, 25 bp, Homo sapien
cacgtggtaaagcagatcatgtaga

SEQ ID NO: 995224 - DNA, 25 bp, Homo sapien
tgtctcgagaatgagtgcggttgcc

SEQ ID NO: 995225 - DNA, 25 bp, Homo sapien
ctggcatggaagtagagtgaaactt

SEQ ID NO: 995226 - DNA, 25 bp, Homo sapien
tgaccaacacagaaggatgttgttt

SEQ ID NO: 995227 - DNA, 25 bp, Homo sapien
cttggggtgaccaacacagaaggat

SEQ ID NO: 995228 - DNA, 25 bp, Homo sapien
gggtgaccaacacagaaggatgttg

SEQ ID NO: 995229 - DNA, 25 bp, Homo sapien
gatctctgtgaggtcgtagagaatg

SEQ ID NO: 995230 - DNA, 25 bp, Homo sapien
gaatggaggtcaggggtccatacgt

SEQ ID NO: 995231 - DNA, 25 bp, Homo sapien
tgaggtcgtagagaatggaggtcag

SEQ ID NO: 995232 - DNA, 25 bp, Homo sapien
aggagtcgatctctgtgaggtcgta

SEQ ID NO: 995233 - DNA, 25 bp, Homo sapien
accctggtgattgggcacaaggtcc

SEQ ID NO: 995234 - DNA, 25 bp, Homo sapien
tgagaccctggtgattgggcacaag

SEQ ID NO: 995235 - DNA, 25 bp, Homo sapien
agaccctggtgattgggcacaaggt

SEQ ID NO: 995236 - DNA, 25 bp, Homo sapien
ggtgagaccctggtgattgggcaca

SEQ ID NO: 995237 - DNA, 25 bp, Homo sapien
cagctccatgctcaatgagcagccg

SEQ ID NO: 995238 - DNA, 25 bp, Homo sapien
tgctcaatgagcagccgcacgatct

SEQ ID NO: 995239 - DNA, 25 bp, Homo sapien
tccatgctcaatgagcagccgcacg

SEQ ID NO: 995240 - DNA, 25 bp, Homo sapien
catgctcaatgagcagccgcacgat

SEQ ID NO: 995241 - DNA, 25 bp, Homo sapien
ccctgcgggtgagcagggcacgcac

SEQ ID NO: 995242 - DNA, 25 bp, Homo sapien
gcacgcaccaggttcacattctggt

SEQ ID NO: 995243 - DNA, 25 bp, Homo sapien
cagggcacgcaccaggttcacattc

SEQ ID NO: 995244 - DNA, 25 bp, Homo sapien
gggcacgcaccaggttcacattctg

SEQ ID NO: 995245 - DNA, 25 bp, Homo sapien
ggctgctatgtgcagcgccgtctcc

SEQ ID NO: 995246 - DNA, 25 bp, Homo sapien
gcaaaagcctcacatgtggtgggct

SEQ ID NO: 995247 - DNA, 25 bp, Homo sapien
tggtgggctcaaagaccagctctgg

SEQ ID NO: 995248 - DNA, 25 bp, Homo sapien
tgtcatagagggctgctatgtgcag

SEQ ID NO: 995249 - DNA, 25 bp, Homo sapien
tctttgtcgaacgtcacaggtgcag

SEQ ID NO: 995250 - DNA, 25 bp, Homo sapien
gttgcctaagaacagacaggtcatt

SEQ ID NO: 995251 - DNA, 25 bp, Homo sapien
ttccttggatgctcgaagcagtgga

SEQ ID NO: 995252 - DNA, 25 bp, Homo sapien
gcagtccagtagaagttgcctaaga

SEQ ID NO: 995253 - DNA, 25 bp, Homo sapien
tcacccagggaatcagtcccaggga

SEQ ID NO: 995254 - DNA, 25 bp, Homo sapien
tgaccagcctagagtggtcagggct

SEQ ID NO: 995255 - DNA, 25 bp, Homo sapien
gcctttgtgaggagtcagttccctg

SEQ ID NO: 995256 - DNA, 25 bp, Homo sapien
tacctgttaaggcagtgctcctagg

SEQ ID NO: 995257 - DNA, 25 bp, Homo sapien
tccaggtgctggtcccagtcttgtt

SEQ ID NO: 995258 - DNA, 25 bp, Homo sapien
ccaggtgctggtcccagtcttgttc

SEQ ID NO: 995259 - DNA, 25 bp, Homo sapien
aaaggagggcagaagtttctggagt

SEQ ID NO: 995260 - DNA, 25 bp, Homo sapien
gcagaagtttctggagttggctccc

SEQ ID NO: 995261 - DNA, 25 bp, Homo sapien
accagaaaggagggcagaagtttct

SEQ ID NO: 995262 - DNA, 25 bp, Homo sapien
tctggagttggctcccgggcccttc

SEQ ID NO: 995263 - DNA, 25 bp, Homo sapien
gaaatgtggcgaaagaaacaggtct

SEQ ID NO: 995264 - DNA, 25 bp, Homo sapien
gatgacagcaactgagcaagagatg

SEQ ID NO: 995265 - DNA, 25 bp, Homo sapien
cactggcagattatagaaatgtggc

SEQ ID NO: 995266 - DNA, 25 bp, Homo sapien
gacttgtgtatgcagcatgcagctt

SEQ ID NO: 995267 - DNA, 25 bp, Homo sapien
atgaccgtgaccggccagcttcctg

SEQ ID NO: 995268 - DNA, 25 bp, Homo sapien
gtcctcatgaccgtgaccggccagc

SEQ ID NO: 995269 - DNA, 25 bp, Homo sapien
agcgtcgccgagcaggctctggtac

SEQ ID NO: 995270 - DNA, 25 bp, Homo sapien
cagcttcctggagcgtcgccgagca

SEQ ID NO: 995271 - DNA, 25 bp, Homo sapien
agagagatctgctcccaagattgag

SEQ ID NO: 995272 - DNA, 25 bp, Homo sapien
gcttcttgggaatcttttggctgta

SEQ ID NO: 995273 - DNA, 25 bp, Homo sapien
aggatacgctgggactctccctctg

SEQ ID NO: 995274 - DNA, 25 bp, Homo sapien
tgagagaccagcgtgaggatacgct

SEQ ID NO: 995275 - DNA, 25 bp, Homo sapien
tctagtgagccggaatgaagttcag

SEQ ID NO: 995276 - DNA, 25 bp, Homo sapien
cattcttgtgcctcgccattggaac

SEQ ID NO: 995277 - DNA, 25 bp, Homo sapien
tgctggctgtgctccattcttgtgc

SEQ ID NO: 995278 - DNA, 25 bp, Homo sapien
cattggaacgctctagtgagccgga

SEQ ID NO: 995279 - DNA, 25 bp, Homo sapien
cctctccaggttcggagtttcatct

SEQ ID NO: 995280 - DNA, 25 bp, Homo sapien
agtgctaactgactgcctctccagg

SEQ ID NO: 995281 - DNA, 25 bp, Homo sapien
ccaggttcggagtttcatctcccag

SEQ ID NO: 995282 - DNA, 25 bp, Homo sapien
cagttgccatcagtgctaactgact

SEQ ID NO: 995283 - DNA, 25 bp, Homo sapien
tgctgtggcatctttggtaaccaag

SEQ ID NO: 995284 - DNA, 25 bp, Homo sapien
ccagggaggtgttggtcgatatttc

SEQ ID NO: 995285 - DNA, 25 bp, Homo sapien
tgattccatggatgtgaccagggag

SEQ ID NO: 995286 - DNA, 25 bp, Homo sapien
caagtgccagcttttatttttggaa

SEQ ID NO: 995287 - DNA, 25 bp, Homo sapien
agcaccacgtgcacagcggaaatac

SEQ ID NO: 995288 - DNA, 25 bp, Homo sapien
ggttcaagagagcaccacgtgcaca

SEQ ID NO: 995289 - DNA, 25 bp, Homo sapien
ggggttcaagagagcaccacgtgca

SEQ ID NO: 995290 - DNA, 25 bp, Homo sapien
agagcaccacgtgcacagcggaaat

SEQ ID NO: 995291 - DNA, 25 bp, Homo sapien
cccgtggactcggaggtgtggaggg

SEQ ID NO: 995292 - DNA, 25 bp, Homo sapien
ctgtgagtgtcgtgagagtcctggg

SEQ ID NO: 995293 - DNA, 25 bp, Homo sapien
agggctgtgagtgtcgtgagagtcc

SEQ ID NO: 995294 - DNA, 25 bp, Homo sapien
gggtgctgctgaggggcccgtggac

SEQ ID NO: 995295 - DNA, 25 bp, Homo sapien
ggagggtccacaggacaaagctgac

SEQ ID NO: 995296 - DNA, 25 bp, Homo sapien
ggcctgggctgtgtaatgataccat

SEQ ID NO: 995297 - DNA, 25 bp, Homo sapien
acaggacaaagctgacccggtgaca

SEQ ID NO: 995298 - DNA, 25 bp, Homo sapien
taatctggcaataggagtccaggag

SEQ ID NO: 995299 - DNA, 25 bp, Homo sapien
cctggaggaacttgggaatagagtt

SEQ ID NO: 995300 - DNA, 25 bp, Homo sapien
ttaggtagaagaacctgtagtcatc

SEQ ID NO: 995301 - DNA, 25 bp, Homo sapien
tgacataaagcaagctgtggcggga

SEQ ID NO: 995302 - DNA, 25 bp, Homo sapien
tccatgagcttcagtaataaggcgt

SEQ ID NO: 995303 - DNA, 25 bp, Homo sapien
ggcatagcttcgaaagaagatctgc

SEQ ID NO: 995304 - DNA, 25 bp, Homo sapien
gcatagcttcgaaagaagatctgct

SEQ ID NO: 995305 - DNA, 25 bp, Homo sapien
tgggcatagcttcgaaagaagatct

SEQ ID NO: 995306 - DNA, 25 bp, Homo sapien
ctgggcatagcttcgaaagaagatc

SEQ ID NO: 995307 - DNA, 25 bp, Homo sapien
tgccgtaacagcctcttgctgtatg

SEQ ID NO: 995308 - DNA, 25 bp, Homo sapien
gacagtctccccatggtgccgtaac

SEQ ID NO: 995309 - DNA, 25 bp, Homo sapien
cccatggtgccgtaacagcctcttg

SEQ ID NO: 995310 - DNA, 25 bp, Homo sapien
agtctccccatggtgccgtaacagc

SEQ ID NO: 995311 - DNA, 25 bp, Homo sapien
gagccagaagaaagagtacttccca

SEQ ID NO: 995312 - DNA, 25 bp, Homo sapien
atggcccttgctcactggttctgca

SEQ ID NO: 995313 - DNA, 25 bp, Homo sapien
ggccatttgaaagtccctccacaca

SEQ ID NO: 995314 - DNA, 25 bp, Homo sapien
tgcactgactagttgatctgagcca

SEQ ID NO: 995315 - DNA, 25 bp, Homo sapien
agcgcgatggctagccccccaacgt

SEQ ID NO: 995316 - DNA, 25 bp, Homo sapien
cccaacgtctgcagcattctctaag

SEQ ID NO: 995317 - DNA, 25 bp, Homo sapien
cgtctgcagcattctctaagaatgt

SEQ ID NO: 995318 - DNA, 25 bp, Homo sapien
ctctaagaatgtgagggagtcattg

SEQ ID NO: 995319 - DNA, 25 bp, Homo sapien
cctggagggcatggttgtcacaggc

SEQ ID NO: 995320 - DNA, 25 bp, Homo sapien
gcataatggcgcttcaggcacaggt

SEQ ID NO: 995321 - DNA, 25 bp, Homo sapien
gggcatggttgtcacaggcgaggca

SEQ ID NO: 995322 - DNA, 25 bp, Homo sapien
ctaggtaatggaaaggcagcataat

SEQ ID NO: 995323 - DNA, 25 bp, Homo sapien
aacatagggttggtgctgcctaggt

SEQ ID NO: 995324 - DNA, 25 bp, Homo sapien
tgctgcctaggtgaggatgtgggtg

SEQ ID NO: 995325 - DNA, 25 bp, Homo sapien
gaacatacagcaagagaacataggg

SEQ ID NO: 995326 - DNA, 25 bp, Homo sapien
tgaaaatgggacaagagaacataca

SEQ ID NO: 995327 - DNA, 25 bp, Homo sapien
ctggtagaagatgtgcaacagctcg

SEQ ID NO: 995328 - DNA, 25 bp, Homo sapien
agctcgtgggccatgatgctgccag

SEQ ID NO: 995329 - DNA, 25 bp, Homo sapien
gccagcagcgccaaagttcacggct

SEQ ID NO: 995330 - DNA, 25 bp, Homo sapien
gatgctgccagcagcgccaaagttc

SEQ ID NO: 995331 - DNA, 25 bp, Homo sapien
gtccagctggaaagactaccacatg

SEQ ID NO: 995332 - DNA, 25 bp, Homo sapien
taccgaatagtaagcattgacgtcc

SEQ ID NO: 995333 - DNA, 25 bp, Homo sapien
atagtaagcattgacgtcccaaggg

SEQ ID NO: 995334 - DNA, 25 bp, Homo sapien
taccacatggtcagataccgaatag

SEQ ID NO: 995335 - DNA, 25 bp, Homo sapien
tggacaattctagctcggagggacc

SEQ ID NO: 995336 - DNA, 25 bp, Homo sapien
accggacacagctcaggacagactg

SEQ ID NO: 995337 - DNA, 25 bp, Homo sapien
tgcaagaagctctggacaattctag

SEQ ID NO: 995338 - DNA, 25 bp, Homo sapien
tgcaggaagctcgatccaagctgta

SEQ ID NO: 995339 - DNA, 25 bp, Homo sapien
cgttgtattcttgtcgggccagctc

SEQ ID NO: 995340 - DNA, 25 bp, Homo sapien
ttgtattcttgtcgggccagctctg

SEQ ID NO: 995341 - DNA, 25 bp, Homo sapien
ccatctccacctgcagttgagcaac

SEQ ID NO: 995342 - DNA, 25 bp, Homo sapien
atcgttgtattcttgtcgggccagc

SEQ ID NO: 995343 - DNA, 25 bp, Homo sapien
cttccctacttagcatgtgcctggg

SEQ ID NO: 995344 - DNA, 25 bp, Homo sapien
tgccagtgtgagtatacagcccagt

SEQ ID NO: 995345 - DNA, 25 bp, Homo sapien
gcatttgcttccaatccccatctcg

SEQ ID NO: 995346 - DNA, 25 bp, Homo sapien
catctcgcttgttccaatactccat

SEQ ID NO: 995347 - DNA, 25 bp, Homo sapien
ggtctcctcattcatccagggaagg

SEQ ID NO: 995348 - DNA, 25 bp, Homo sapien
tgtcctgggccatgttctgggtctc

SEQ ID NO: 995349 - DNA, 25 bp, Homo sapien
gggcatcccggatcgcagtgaataa

SEQ ID NO: 995350 - DNA, 25 bp, Homo sapien
tctgaggcgagtgatgagggcatcc

SEQ ID NO: 995351 - DNA, 25 bp, Homo sapien
gctgctgctagaggagcagctcaac

SEQ ID NO: 995352 - DNA, 25 bp, Homo sapien
gcccacagcttctgacccttggaaa

SEQ ID NO: 995353 - DNA, 25 bp, Homo sapien
ggagcagctcaactaaagcaactaa

SEQ ID NO: 995354 - DNA, 25 bp, Homo sapien
cagcttctgacccttggaaaagggc

SEQ ID NO: 995355 - DNA, 25 bp, Homo sapien
agttaatagaagagggaaggctgct

SEQ ID NO: 995356 - DNA, 25 bp, Homo sapien
agggaaggctgctttgggtaggaag

SEQ ID NO: 995357 - DNA, 25 bp, Homo sapien
gggtggagggatgtgggctgggaag

SEQ ID NO: 995358 - DNA, 25 bp, Homo sapien
cactgagaaagtcaaagttaataga

SEQ ID NO: 995359 - DNA, 25 bp, Homo sapien
agcacttcgggtgctcgggccaaag

SEQ ID NO: 995360 - DNA, 25 bp, Homo sapien
gctcgaagaacgtgcctgtctcctc

SEQ ID NO: 995361 - DNA, 25 bp, Homo sapien
aagccgccagcgtgggctcgaagaa

SEQ ID NO: 995362 - DNA, 25 bp, Homo sapien
gccaaaggcctcacgaacaaacaaa

SEQ ID NO: 995363 - DNA, 25 bp, Homo sapien
ggagtctcatctggctgaatcaaaa

SEQ ID NO: 995364 - DNA, 25 bp, Homo sapien
caagttaacttgacctccagtgaca

SEQ ID NO: 995365 - DNA, 25 bp, Homo sapien
caagtgcctggagaagtacctgaag

SEQ ID NO: 995366 - DNA, 25 bp, Homo sapien
tctaaggcactaccccactctgttg

SEQ ID NO: 995367 - DNA, 25 bp, Homo sapien
tcagaagtcggtaattaatggccac

SEQ ID NO: 995368 - DNA, 25 bp, Homo sapien
caaatgatccaaagctggaagacct

SEQ ID NO: 995369 - DNA, 25 bp, Homo sapien
tcatatcaaggccaaactctaggtg

SEQ ID NO: 995370 - DNA, 25 bp, Homo sapien
tctcaaacacctggagcatgctcca

SEQ ID NO: 995371 - DNA, 25 bp, Homo sapien
aactttgtctgtccaacttgcctgc

SEQ ID NO: 995372 - DNA, 25 bp, Homo sapien
gagtatctgggcaaatacacccgct

SEQ ID NO: 995373 - DNA, 25 bp, Homo sapien
gatgccgacatttacccctcaaaag

SEQ ID NO: 995374 - DNA, 25 bp, Homo sapien
tatttgagctcaaacacccagcaag

SEQ ID NO: 995375 - DNA, 25 bp, Homo sapien
tctgcgtgcctcctggaattgactg

SEQ ID NO: 995376 - DNA, 25 bp, Homo sapien
ggttgctctgtcagttcccgcagtt

SEQ ID NO: 995377 - DNA, 25 bp, Homo sapien
tcccgcagtttctggctgagctttc

SEQ ID NO: 995378 - DNA, 25 bp, Homo sapien
gtttctggctgagctttctgcgtgc

SEQ ID NO: 995379 - DNA, 25 bp, Homo sapien
caccaccagccctaagatcatgtgg

SEQ ID NO: 995380 - DNA, 25 bp, Homo sapien
ccaccagccctaagatcatgtggct

SEQ ID NO: 995381 - DNA, 25 bp, Homo sapien
accaccagccctaagatcatgtggc

SEQ ID NO: 995382 - DNA, 25 bp, Homo sapien
ccccaagatctacggtgctcaggct

SEQ ID NO: 995383 - DNA, 25 bp, Homo sapien
caagatctacggtgctcaggctctc

SEQ ID NO: 995384 - DNA, 25 bp, Homo sapien
tgcccccaagatctacggtgctcag

SEQ ID NO: 995385 - DNA, 25 bp, Homo sapien
tcctttgcccccaagatctacggtg

SEQ ID NO: 995386 - DNA, 25 bp, Homo sapien
cagggacatcggtgtgaatgtcgct

SEQ ID NO: 995387 - DNA, 25 bp, Homo sapien
tattccacgtcatggaccacgaggg

SEQ ID NO: 995388 - DNA, 25 bp, Homo sapien
ccaccagttgtgacatgtttttcaa

SEQ ID NO: 995389 - DNA, 25 bp, Homo sapien
acaaccagtcgatggcgggggccat

SEQ ID NO: 995390 - DNA, 25 bp, Homo sapien
tcttctggcccccagttccaggcac

SEQ ID NO: 995391 - DNA, 25 bp, Homo sapien
gtcttctggcccccagttccaggca

SEQ ID NO: 995392 - DNA, 25 bp, Homo sapien
agtcttctggcccccagttccaggc

SEQ ID NO: 995393 - DNA, 25 bp, Homo sapien
tcaggtaagtcaggtattcccgaaa

SEQ ID NO: 995394 - DNA, 25 bp, Homo sapien
tcccagcaaggttcccagctgattc

SEQ ID NO: 995395 - DNA, 25 bp, Homo sapien
tagtgaccatctggaagagcttgcc

SEQ ID NO: 995396 - DNA, 25 bp, Homo sapien
gaacagccgtgaagtgatggagatt

SEQ ID NO: 995397 - DNA, 25 bp, Homo sapien
atcttctgttcttgatcttgcttga

SEQ ID NO: 995398 - DNA, 25 bp, Homo sapien
ttctgttcttgatcttgcttgaggg

SEQ ID NO: 995399 - DNA, 25 bp, Homo sapien
gcttgaggggaacatcaaactctgg

SEQ ID NO: 995400 - DNA, 25 bp, Homo sapien
aggggaacatcaaactctggctggt

SEQ ID NO: 995401 - DNA, 25 bp, Homo sapien
ttttaacccaagagactatccaggc

SEQ ID NO: 995402 - DNA, 25 bp, Homo sapien
gcctgcattgttgggtggagctctc

SEQ ID NO: 995403 - DNA, 25 bp, Homo sapien
tattcttgcaacaggtagctccatc

SEQ ID NO: 995404 - DNA, 25 bp, Homo sapien
tagtctggccctgatgaacccttgt

SEQ ID NO: 995405 - DNA, 25 bp, Homo sapien
tgtttcaaggctggcttagctcacc

SEQ ID NO: 995406 - DNA, 25 bp, Homo sapien
tcctcaattaaatagatcagcctcc

SEQ ID NO: 995407 - DNA, 25 bp, Homo sapien
gcccctaaaggccacatcagttaaa

SEQ ID NO: 995408 - DNA, 25 bp, Homo sapien
tgactccacgaaggaatcacaccat

SEQ ID NO: 995409 - DNA, 25 bp, Homo sapien
gaagtgtgtaggggtcagatcacaa

SEQ ID NO: 995410 - DNA, 25 bp, Homo sapien
agaaggaatgtacgggagataaggc

SEQ ID NO: 995411 - DNA, 25 bp, Homo sapien
agggagagaaggaatgtacgggaga

SEQ ID NO: 995412 - DNA, 25 bp, Homo sapien
tggagaagtgtgtaggggtcagatc

SEQ ID NO: 995413 - DNA, 25 bp, Homo sapien
caggatgaggtcctaggtaggctct

SEQ ID NO: 995414 - DNA, 25 bp, Homo sapien
catcagaagtctcagcgttcggtta

SEQ ID NO: 995415 - DNA, 25 bp, Homo sapien
atttaccagagatgcgccagcctcc

SEQ ID NO: 995416 - DNA, 25 bp, Homo sapien
agggaaatggccatactgactcatc

SEQ ID NO: 995417 - DNA, 25 bp, Homo sapien
ccatgcaggagttgtagaactggaa

SEQ ID NO: 995418 - DNA, 25 bp, Homo sapien
cttcaatggcaagtgtatccatgca

SEQ ID NO: 995419 - DNA, 25 bp, Homo sapien
caagtgtatccatgcaggagttgta

SEQ ID NO: 995420 - DNA, 25 bp, Homo sapien
tctgaggggaccagtccctgcagct

SEQ ID NO: 995421 - DNA, 25 bp, Homo sapien
tggcaagctcctgaaaagaattatt

SEQ ID NO: 995422 - DNA, 25 bp, Homo sapien
cagtattctccgaagtcggtttttg

SEQ ID NO: 995423 - DNA, 25 bp, Homo sapien
ctttggcccttccacaggcaaagct

SEQ ID NO: 995424 - DNA, 25 bp, Homo sapien
tcccggagatccaaacacacagatg

SEQ ID NO: 995425 - DNA, 25 bp, Homo sapien
atcaggatagctgtcagcacccgcc

SEQ ID NO: 995426 - DNA, 25 bp, Homo sapien
cccttccacgggcagcctctcttct

SEQ ID NO: 995427 - DNA, 25 bp, Homo sapien
aaacaaaggagcaggcccaaaatca

SEQ ID NO: 995428 - DNA, 25 bp, Homo sapien
gcccaaaatcaggatagctgtcagc

SEQ ID NO: 995429 - DNA, 25 bp, Homo sapien
cttggctccagagagttcccattcc

SEQ ID NO: 995430 - DNA, 25 bp, Homo sapien
tcggctcttcctcactttggtcccc

SEQ ID NO: 995431 - DNA, 25 bp, Homo sapien
ttccacctgcctggctgcgttccct

SEQ ID NO: 995432 - DNA, 25 bp, Homo sapien
ctcttggctccagagagttcccatt

SEQ ID NO: 995433 - DNA, 25 bp, Homo sapien
gccattttgataccctcgctgcctg

SEQ ID NO: 995434 - DNA, 25 bp, Homo sapien
tcggagcagtgttcccagatgggct

SEQ ID NO: 995435 - DNA, 25 bp, Homo sapien
gaacgaacctgtcccctgaatgtgc

SEQ ID NO: 995436 - DNA, 25 bp, Homo sapien
cacacatatttttatctcggagcag

SEQ ID NO: 995437 - DNA, 25 bp, Homo sapien
ggctccagaatccttcctggttcca

SEQ ID NO: 995438 - DNA, 25 bp, Homo sapien
ctgtctatcttctgtggctccagaa

SEQ ID NO: 995439 - DNA, 25 bp, Homo sapien
ctccagaatccttcctggttccact

SEQ ID NO: 995440 - DNA, 25 bp, Homo sapien
gtggctccagaatccttcctggttc

SEQ ID NO: 995441 - DNA, 25 bp, Homo sapien
tctgggtggagcctgcttatcagtg

SEQ ID NO: 995442 - DNA, 25 bp, Homo sapien
tgctctttcgccttgtccccagaca

SEQ ID NO: 995443 - DNA, 25 bp, Homo sapien
ctgcttatcagtggggggcacccag

SEQ ID NO: 995444 - DNA, 25 bp, Homo sapien
ctaggagctgattcggaggactggg

SEQ ID NO: 995445 - DNA, 25 bp, Homo sapien
tgtggtctgagagaggcaagcacat

SEQ ID NO: 995446 - DNA, 25 bp, Homo sapien
ctgtggtctgagagaggcaagcaca

SEQ ID NO: 995447 - DNA, 25 bp, Homo sapien
cggaaggtaaactgaaatgtggcat

SEQ ID NO: 995448 - DNA, 25 bp, Homo sapien
gagaagagtgttatcgcaggacagt

SEQ ID NO: 995449 - DNA, 25 bp, Homo sapien
tattaccacccaaatacaggtactg

SEQ ID NO: 995450 - DNA, 25 bp, Homo sapien
gcagcgtttcatcccatctcggagg

SEQ ID NO: 995451 - DNA, 25 bp, Homo sapien
cccacaggaaaagttgagcgataca

SEQ ID NO: 995452 - DNA, 25 bp, Homo sapien
caggaaaagttgagcgatacatgta

SEQ ID NO: 995453 - DNA, 25 bp, Homo sapien
aagttgagcgatacatgtagagaaa

SEQ ID NO: 995454 - DNA, 25 bp, Homo sapien
cactccaagtaatgcaaactccatg

SEQ ID NO: 995455 - DNA, 25 bp, Homo sapien
caatcacaatgatgaccgtgtttcc

SEQ ID NO: 995456 - DNA, 25 bp, Homo sapien
tcacaatgatgaccgtgtttcccat

SEQ ID NO: 995457 - DNA, 25 bp, Homo sapien
aatcacaatgatgaccgtgtttccc

SEQ ID NO: 995458 - DNA, 25 bp, Homo sapien
atcacaatgatgaccgtgtttccca

SEQ ID NO: 995459 - DNA, 25 bp, Homo sapien
aatgtggtgtagtccttgggaccca

SEQ ID NO: 995460 - DNA, 25 bp, Homo sapien
tggcactagagtggttgtccatcat

SEQ ID NO: 995461 - DNA, 25 bp, Homo sapien
gcctagaaggtggaattcagtggca

SEQ ID NO: 995462 - DNA, 25 bp, Homo sapien
cagggaagcctagaaggtggaattc

SEQ ID NO: 995463 - DNA, 25 bp, Homo sapien
aagttgctgcaatccccactcatgg

SEQ ID NO: 995464 - DNA, 25 bp, Homo sapien
tgtcctgctagtgctgagccatgca

SEQ ID NO: 995465 - DNA, 25 bp, Homo sapien
tgttctctagggctccgctgaggct

SEQ ID NO: 995466 - DNA, 25 bp, Homo sapien
ctcatggcgaagaagggaaatgtcc

SEQ ID NO: 995467 - DNA, 25 bp, Homo sapien
tggctgtggacagactgcttctcta

SEQ ID NO: 995468 - DNA, 25 bp, Homo sapien
tggcaaagtggctgtggacagactg

SEQ ID NO: 995469 - DNA, 25 bp, Homo sapien
caaagtggctgtggacagactgctt

SEQ ID NO: 995470 - DNA, 25 bp, Homo sapien
agtggctgtggacagactgcttctc

SEQ ID NO: 995471 - DNA, 25 bp, Homo sapien
caaatatgctccatagtggggagac

SEQ ID NO: 995472 - DNA, 25 bp, Homo sapien
tggttttatagcgtatggtaacatc

SEQ ID NO: 995473 - DNA, 25 bp, Homo sapien
gtaacatcggtcttcatcaaatatg

SEQ ID NO: 995474 - DNA, 25 bp, Homo sapien
cgtatggtaacatcggtcttcatca

SEQ ID NO: 995475 - DNA, 25 bp, Homo sapien
agctccctgctagcaactggctcct

SEQ ID NO: 995476 - DNA, 25 bp, Homo sapien
ctgagctccctgctagcaactggct

SEQ ID NO: 995477 - DNA, 25 bp, Homo sapien
ctccctgctagcaactggctccttt

SEQ ID NO: 995478 - DNA, 25 bp, Homo sapien
ctgctagcaactggctcctttcttc

SEQ ID NO: 995479 - DNA, 25 bp, Homo sapien
tgcagcaagcggtgttcccgacccg

SEQ ID NO: 995480 - DNA, 25 bp, Homo sapien
cgctttagcgggtaagggaaacatg

SEQ ID NO: 995481 - DNA, 25 bp, Homo sapien
gaaattgcagaaccgacagcaggat

SEQ ID NO: 995482 - DNA, 25 bp, Homo sapien
tcctatagagtatgagagctcggaa

SEQ ID NO: 995483 - DNA, 25 bp, Homo sapien
aggtgctctctagccctgtcaaggg

SEQ ID NO: 995484 - DNA, 25 bp, Homo sapien
tactcctcgtgacttgtcaggtgct

SEQ ID NO: 995485 - DNA, 25 bp, Homo sapien
aaacttgcatgaagatgagggacca

SEQ ID NO: 995486 - DNA, 25 bp, Homo sapien
acctgcagcaagtctactcctcgtg

SEQ ID NO: 995487 - DNA, 25 bp, Homo sapien
tccaaggaagatccttttagtcaca

SEQ ID NO: 995488 - DNA, 25 bp, Homo sapien
catggccaccgccttgttgaggtat

SEQ ID NO: 995489 - DNA, 25 bp, Homo sapien
ggaaaggggttaccattgcagtcac

SEQ ID NO: 995490 - DNA, 25 bp, Homo sapien
agtcaccatggccaccgccttgttg

SEQ ID NO: 995491 - DNA, 25 bp, Homo sapien
caccgccttgttgaggtatgtggag

SEQ ID NO: 995492 - DNA, 25 bp, Homo sapien
ggacaggaagaggtccatgcgctca

SEQ ID NO: 995493 - DNA, 25 bp, Homo sapien
tagtggccgatgatgttagggccac

SEQ ID NO: 995494 - DNA, 25 bp, Homo sapien
gaagaggtccatgcgctcaatgtgg

SEQ ID NO: 995495 - DNA, 25 bp, Homo sapien
taggagaggatgataagcagcatgg

SEQ ID NO: 995496 - DNA, 25 bp, Homo sapien
caatggagaggaaaccaaccaccca

SEQ ID NO: 995497 - DNA, 25 bp, Homo sapien
gacaatggagaggaaaccaaccacc

SEQ ID NO: 995498 - DNA, 25 bp, Homo sapien
aaagactgggttaggcatttggcca

SEQ ID NO: 995499 - DNA, 25 bp, Homo sapien
cgggaatcaaggcaaatgaagctga

SEQ ID NO: 995500 - DNA, 25 bp, Homo sapien
cttgtgagtggatagcaggtctgcc

SEQ ID NO: 995501 - DNA, 25 bp, Homo sapien
cctatgtaccacagtggaggtgacc

SEQ ID NO: 995502 - DNA, 25 bp, Homo sapien
cacatatatcaacaggatcagagca

SEQ ID NO: 995503 - DNA, 25 bp, Homo sapien
cagcacatatatcaacaggatcaga

SEQ ID NO: 995504 - DNA, 25 bp, Homo sapien
tatcaacaggatcagagcaaacagc

SEQ ID NO: 995505 - DNA, 25 bp, Homo sapien
tatatcaacaggatcagagcaaaca

SEQ ID NO: 995506 - DNA, 25 bp, Homo sapien
tggagataagaaaatccaaggagct

SEQ ID NO: 995507 - DNA, 25 bp, Homo sapien
aactcatggagataagaaaatccaa

SEQ ID NO: 995508 - DNA, 25 bp, Homo sapien
ctcatggagataagaaaatccaagg

SEQ ID NO: 995509 - DNA, 25 bp, Homo sapien
agataagaaaatccaaggagctcct

SEQ ID NO: 995510 - DNA, 25 bp, Homo sapien
tcaccctggttctttgtggcagtaa

SEQ ID NO: 995511 - DNA, 25 bp, Homo sapien
ggttctttgtggcagtaatttccat

SEQ ID NO: 995512 - DNA, 25 bp, Homo sapien
agagggggtagcagtactgtcaccc

SEQ ID NO: 995513 - DNA, 25 bp, Homo sapien
ggtagcagtactgtcaccctggttc

SEQ ID NO: 995514 - DNA, 25 bp, Homo sapien
tgtctaccacacagagtatgtcctc

SEQ ID NO: 995515 - DNA, 25 bp, Homo sapien
ccatgtacaattgacagagaggaac

SEQ ID NO: 995516 - DNA, 25 bp, Homo sapien
gggtgccaggaaaaaccaatgacat

SEQ ID NO: 995517 - DNA, 25 bp, Homo sapien
tgtttagccaacctgtcatcaaatc

SEQ ID NO: 995518 - DNA, 25 bp, Homo sapien
taaaagactatgcattgggtacggg

SEQ ID NO: 995519 - DNA, 25 bp, Homo sapien
tgtgagtcagcctataaagcaactg

SEQ ID NO: 995520 - DNA, 25 bp, Homo sapien
gacctgccaggtgatatggccaaaa

SEQ ID NO: 995521 - DNA, 25 bp, Homo sapien
ccctgggacttactagagacgatgc

SEQ ID NO: 995522 - DNA, 25 bp, Homo sapien
tcacggtaactatgtccccttttgc

SEQ ID NO: 995523 - DNA, 25 bp, Homo sapien
ttttgtctattttgcgattgcagcc

SEQ ID NO: 995524 - DNA, 25 bp, Homo sapien
tttgctctttcggaattgtggtcac

SEQ ID NO: 995525 - DNA, 25 bp, Homo sapien
ctgtgggccaaaacctccaggttgt

SEQ ID NO: 995526 - DNA, 25 bp, Homo sapien
tacctctcaagtaatctactttgaa

SEQ ID NO: 995527 - DNA, 25 bp, Homo sapien
tttattctcaggttcgctagcttac

SEQ ID NO: 995528 - DNA, 25 bp, Homo sapien
gcttaccttgctaggaactagggag

SEQ ID NO: 995529 - DNA, 25 bp, Homo sapien
ccaaaattggatgaattgggacatt

SEQ ID NO: 995530 - DNA, 25 bp, Homo sapien
gaattactggattgataccctggct

SEQ ID NO: 995531 - DNA, 25 bp, Homo sapien
ccttttcctcaaactgaggtggaga

SEQ ID NO: 995532 - DNA, 25 bp, Homo sapien
tgagatcaatgtggtcggtctggct

SEQ ID NO: 995533 - DNA, 25 bp, Homo sapien
tgttctgcatcaacatctgcactgt

SEQ ID NO: 995534 - DNA, 25 bp, Homo sapien
atgggggccatcaaagctatcagct

SEQ ID NO: 995535 - DNA, 25 bp, Homo sapien
tctgtttatctacctgtccaacatg

SEQ ID NO: 995536 - DNA, 25 bp, Homo sapien
tatctacctgtccaacatgtttgac

SEQ ID NO: 995537 - DNA, 25 bp, Homo sapien
aagctatcagctactttctcattct

SEQ ID NO: 995538 - DNA, 25 bp, Homo sapien
tccctcacctagacctctcttttct

SEQ ID NO: 995539 - DNA, 25 bp, Homo sapien
ccctcacctagacctctcttttctc

SEQ ID NO: 995540 - DNA, 25 bp, Homo sapien
ccccagaactgcctataagatgtga

SEQ ID NO: 995541 - DNA, 25 bp, Homo sapien
gccggcatttgtagctgacattgaa

SEQ ID NO: 995542 - DNA, 25 bp, Homo sapien
caggccttgggaatgcaaatcagag

SEQ ID NO: 995543 - DNA, 25 bp, Homo sapien
tctattctaagtgctcaggtcccct

SEQ ID NO: 995544 - DNA, 25 bp, Homo sapien
tataaattcagaggggtccatatgc

SEQ ID NO: 995545 - DNA, 25 bp, Homo sapien
ggaacattatggtagaagtttattc

SEQ ID NO: 995546 - DNA, 25 bp, Homo sapien
gagtctcagtgtccattgcttccat

SEQ ID NO: 995547 - DNA, 25 bp, Homo sapien
cataatgttagggtttaggcttcta

SEQ ID NO: 995548 - DNA, 25 bp, Homo sapien
tgcctgaagccctacaaggagatcc

SEQ ID NO: 995549 - DNA, 25 bp, Homo sapien
gaacgctgtgttcgggacatcttca

SEQ ID NO: 995550 - DNA, 25 bp, Homo sapien
actgctttgtggatgcctttgcggg

SEQ ID NO: 995551 - DNA, 25 bp, Homo sapien
cctctgtgtcatgagcagactgcca

SEQ ID NO: 995552 - DNA, 25 bp, Homo sapien
taaaaactgggactatggagacttc

SEQ ID NO: 995553 - DNA, 25 bp, Homo sapien
catccttgggagtggcttcatcacg

SEQ ID NO: 995554 - DNA, 25 bp, Homo sapien
tttaaaagatagcatgcctgagccc

SEQ ID NO: 995555 - DNA, 25 bp, Homo sapien
gactatgagcaacaagacctttcgg

SEQ ID NO: 995556 - DNA, 25 bp, Homo sapien
tctgtattttagagccgcaggcata

SEQ ID NO: 995557 - DNA, 25 bp, Homo sapien
atcaaacagggtgttatttccccag

SEQ ID NO: 995558 - DNA, 25 bp, Homo sapien
cagatagtgtgatgctttcagttat

SEQ ID NO: 995559 - DNA, 25 bp, Homo sapien
tgccaaaaatcagttgactctaaat

SEQ ID NO: 995560 - DNA, 25 bp, Homo sapien
gctgcaataaatcgttaagggatac

SEQ ID NO: 995561 - DNA, 25 bp, Homo sapien
ggataatctactactctaatggtgg

SEQ ID NO: 995562 - DNA, 25 bp, Homo sapien
tataaaactcaatgggcatattcag

SEQ ID NO: 995563 - DNA, 25 bp, Homo sapien
tagtcctgcctagtaatcatgcagg

SEQ ID NO: 995564 - DNA, 25 bp, Homo sapien
accatgtgtggctaacttccttttt

SEQ ID NO: 995565 - DNA, 25 bp, Homo sapien
tgtgtggctaacttcctttttgctt

SEQ ID NO: 995566 - DNA, 25 bp, Homo sapien
catgtgtggctaacttcctttttgc

SEQ ID NO: 995567 - DNA, 25 bp, Homo sapien
tgtggctaacttcctttttgcttaa

SEQ ID NO: 995568 - DNA, 25 bp, Homo sapien
tggtgtgacctcgacccactgtacc

SEQ ID NO: 995569 - DNA, 25 bp, Homo sapien
tcgacccactgtaccctttgcctcc

SEQ ID NO: 995570 - DNA, 25 bp, Homo sapien
gtgtgacctcgacccactgtaccct

SEQ ID NO: 995571 - DNA, 25 bp, Homo sapien
gacctcgacccactgtaccctttgc

SEQ ID NO: 995572 - DNA, 25 bp, Homo sapien
cattgcagtacaactgtgcatcttg

SEQ ID NO: 995573 - DNA, 25 bp, Homo sapien
gatgcatatttcctggctctaccca

SEQ ID NO: 995574 - DNA, 25 bp, Homo sapien
tctctggaggaactagataatttct

SEQ ID NO: 995575 - DNA, 25 bp, Homo sapien
tgaatccagtggctgactttaatct

SEQ ID NO: 995576 - DNA, 25 bp, Homo sapien
gtgtgtttaaacattcgcctgttga

SEQ ID NO: 995577 - DNA, 25 bp, Homo sapien
tctatagtatggatgtaacatagtg

SEQ ID NO: 995578 - DNA, 25 bp, Homo sapien
cagtttcaggttcttacaaataaag

SEQ ID NO: 995579 - DNA, 25 bp, Homo sapien
taaacattcgcctgttgaaggacac

SEQ ID NO: 995580 - DNA, 25 bp, Homo sapien
gagacttaagctacaaaggtccgcc

SEQ ID NO: 995581 - DNA, 25 bp, Homo sapien
gagaatcttcaatatcccaccagtg

SEQ ID NO: 995582 - DNA, 25 bp, Homo sapien
tgagaatgtatgaacgggcacagcc

SEQ ID NO: 995583 - DNA, 25 bp, Homo sapien
tgtctgctggtcaccctctgaagga

SEQ ID NO: 995584 - DNA, 25 bp, Homo sapien
catagagagaatttcggaactggag

SEQ ID NO: 995585 - DNA, 25 bp, Homo sapien
tggtttcctggctattccacacact

SEQ ID NO: 995586 - DNA, 25 bp, Homo sapien
agtcaaagctcctgggctggtttcc

SEQ ID NO: 995587 - DNA, 25 bp, Homo sapien
acacactccaagacatagagagaat

SEQ ID NO: 995588 - DNA, 25 bp, Homo sapien
gggactctacagatgatttatttga

SEQ ID NO: 995589 - DNA, 25 bp, Homo sapien
actctacagatgatttatttgagat

SEQ ID NO: 995590 - DNA, 25 bp, Homo sapien
ggactctacagatgatttatttgag

SEQ ID NO: 995591 - DNA, 25 bp, Homo sapien
tctacagatgatttatttgagattg

SEQ ID NO: 995592 - DNA, 25 bp, Homo sapien
tctcctggtccggtttctggaatgg

SEQ ID NO: 995593 - DNA, 25 bp, Homo sapien
tctcacattgggtggcttcttcttg

SEQ ID NO: 995594 - DNA, 25 bp, Homo sapien
tttgctgggcataaagacggacatc

SEQ ID NO: 995595 - DNA, 25 bp, Homo sapien
gcttcggtcccagctccaatcaatg

SEQ ID NO: 995596 - DNA, 25 bp, Homo sapien
ttccctcagggacaatgaagccttt

SEQ ID NO: 995597 - DNA, 25 bp, Homo sapien
tgccagtctatgaagaggccgtggt

SEQ ID NO: 995598 - DNA, 25 bp, Homo sapien
taagaggaatacaccttgggcccat

SEQ ID NO: 995599 - DNA, 25 bp, Homo sapien
ccctcaggcaatgcacggtgagtta

SEQ ID NO: 995600 - DNA, 25 bp, Homo sapien
gaggaacaacctagccatccagagg

SEQ ID NO: 995601 - DNA, 25 bp, Homo sapien
tggaacagaggcgaatggcctcaga

SEQ ID NO: 995602 - DNA, 25 bp, Homo sapien
gtccaggagagccaaactggaacag

SEQ ID NO: 995603 - DNA, 25 bp, Homo sapien
gctccaatcaaccttcggcttcggg

SEQ ID NO: 995604 - DNA, 25 bp, Homo sapien
tgttagaacccttaggcttgacagc

SEQ ID NO: 995605 - DNA, 25 bp, Homo sapien
taacctctgagtggcggctattgct

SEQ ID NO: 995606 - DNA, 25 bp, Homo sapien
gataatgtgcacgagggcacactgc

SEQ ID NO: 995607 - DNA, 25 bp, Homo sapien
caacacaaggtaataggaagccaag

SEQ ID NO: 995608 - DNA, 25 bp, Homo sapien
gaactttctggcgaggagactccct

SEQ ID NO: 995609 - DNA, 25 bp, Homo sapien
tccgtgaagttatcgccataggccg

SEQ ID NO: 995610 - DNA, 25 bp, Homo sapien
tgaaaacagtggagtcagtgacccc

SEQ ID NO: 995611 - DNA, 25 bp, Homo sapien
tgaatcatccatatgtagccccggg

SEQ ID NO: 995612 - DNA, 25 bp, Homo sapien
cagtgtccagaagcggcctgtgcgt

SEQ ID NO: 995613 - DNA, 25 bp, Homo sapien
gacactcttggctcgtttgggctca

SEQ ID NO: 995614 - DNA, 25 bp, Homo sapien
aaacatgactagagacgcaccttgc

SEQ ID NO: 995615 - DNA, 25 bp, Homo sapien
ttgttactgaaatgagcctcgtggg

SEQ ID NO: 995616 - DNA, 25 bp, Homo sapien
gagcagtctacttctgtgtctgtca

SEQ ID NO: 995617 - DNA, 25 bp, Homo sapien
tcaagtcttgacaattcccgggccc

SEQ ID NO: 995618 - DNA, 25 bp, Homo sapien
ttatgagaactggttcttgccttcc

SEQ ID NO: 995619 - DNA, 25 bp, Homo sapien
ccgagtggtctcctctcagcttcta

SEQ ID NO: 995620 - DNA, 25 bp, Homo sapien
tttcttgaatctctccatacacagg

SEQ ID NO: 995621 - DNA, 25 bp, Homo sapien
tgataacccttattcaggcccaaat

SEQ ID NO: 995622 - DNA, 25 bp, Homo sapien
tgtccaccatctgaacctttattca

SEQ ID NO: 995623 - DNA, 25 bp, Homo sapien
ggaggccaatgcatctgccaacctc

SEQ ID NO: 995624 - DNA, 25 bp, Homo sapien
catggagatgaacttgacagacaga

SEQ ID NO: 995625 - DNA, 25 bp, Homo sapien
ggatatatgttttttcgatatcaac

SEQ ID NO: 995626 - DNA, 25 bp, Homo sapien
tcgatatcaacagaaaacgtgttgg

SEQ ID NO: 995627 - DNA, 25 bp, Homo sapien
ttcccgaagacagtgttgccaccag

SEQ ID NO: 995628 - DNA, 25 bp, Homo sapien
gatgatcttcccgaagacagtgttg

SEQ ID NO: 995629 - DNA, 25 bp, Homo sapien
gcctgcgatccacagacgaggagga

SEQ ID NO: 995630 - DNA, 25 bp, Homo sapien
agcctgcgatccacagacgaggagg

SEQ ID NO: 995631 - DNA, 25 bp, Homo sapien
cagcctgcgatccacagacgaggag

SEQ ID NO: 995632 - DNA, 25 bp, Homo sapien
catgcccttgtgtacataatctcta

SEQ ID NO: 995633 - DNA, 25 bp, Homo sapien
gcctggcgtgggaatgtgacattaa

SEQ ID NO: 995634 - DNA, 25 bp, Homo sapien
gaaaacatgctaagactggccagaa

SEQ ID NO: 995635 - DNA, 25 bp, Homo sapien
caagataccctcttcaacacaagga

SEQ ID NO: 995636 - DNA, 25 bp, Homo sapien
tatgaacttgatggcgggacaggac

SEQ ID NO: 995637 - DNA, 25 bp, Homo sapien
gacatggagtcagcacacgttagca

SEQ ID NO: 995638 - DNA, 25 bp, Homo sapien
tacaggcagcattcggttaggtgac

SEQ ID NO: 995639 - DNA, 25 bp, Homo sapien
gaagagtcctaagatggtcccaggc

SEQ ID NO: 995640 - DNA, 25 bp, Homo sapien
acccgaactctgcctgtgccaaggg

SEQ ID NO: 995641 - DNA, 25 bp, Homo sapien
ctacccgaactctgcctgtgccaag

SEQ ID NO: 995642 - DNA, 25 bp, Homo sapien
gtgccaagggctggggaggggctac

SEQ ID NO: 995643 - DNA, 25 bp, Homo sapien
ccgaactctgcctgtgccaagggct

SEQ ID NO: 995644 - DNA, 25 bp, Homo sapien
ggaaggaagaatccgctgattttcc

SEQ ID NO: 995645 - DNA, 25 bp, Homo sapien
caccagcatggatgccaagtgtggg

SEQ ID NO: 995646 - DNA, 25 bp, Homo sapien
cctgtgctctcacggtagtgctggg

SEQ ID NO: 995647 - DNA, 25 bp, Homo sapien
gggcaagcttgtgcctcaccataca

SEQ ID NO: 995648 - DNA, 25 bp, Homo sapien
agaaagtgccgagtgcccaccctgg

SEQ ID NO: 995649 - DNA, 25 bp, Homo sapien
tcaaccctgagtgcccaagaagtta

SEQ ID NO: 995650 - DNA, 25 bp, Homo sapien
tgagggagtgacagcaccggactcc

SEQ ID NO: 995651 - DNA, 25 bp, Homo sapien
aagagaaaagtgtaaacagcttcag

SEQ ID NO: 995652 - DNA, 25 bp, Homo sapien
catcctgcgttggtgtatccaagat

SEQ ID NO: 995653 - DNA, 25 bp, Homo sapien
gcatcctgcgttggtgtatccaaga

SEQ ID NO: 995654 - DNA, 25 bp, Homo sapien
cctgcgttggtgtatccaagatggg

SEQ ID NO: 995655 - DNA, 25 bp, Homo sapien
ctgcatcctgcgttggtgtatccaa

SEQ ID NO: 995656 - DNA, 25 bp, Homo sapien
tccgggcaggccttgatagaaagaa

SEQ ID NO: 995657 - DNA, 25 bp, Homo sapien
catggacgtgcccttcaggcagcct

SEQ ID NO: 995658 - DNA, 25 bp, Homo sapien
tgtttgttcttagtctcctcagtga

SEQ ID NO: 995659 - DNA, 25 bp, Homo sapien
atagaaagaaccacatccgtgcccc

SEQ ID NO: 995660 - DNA, 25 bp, Homo sapien
cctgtgggtttctagagtgtaagcc

SEQ ID NO: 995661 - DNA, 25 bp, Homo sapien
ggttccccaatgttgtctgcccagt

SEQ ID NO: 995662 - DNA, 25 bp, Homo sapien
tctagttgcccaggtctcagttccc

SEQ ID NO: 995663 - DNA, 25 bp, Homo sapien
aggctttgtcggcacagacccagaa

SEQ ID NO: 995664 - DNA, 25 bp, Homo sapien
ccatggccctcaggtgggagtggaa

SEQ ID NO: 995665 - DNA, 25 bp, Homo sapien
gggagggagggtatgggtcacagcc

SEQ ID NO: 995666 - DNA, 25 bp, Homo sapien
ggtcacagccatggccctcaggtgg

SEQ ID NO: 995667 - DNA, 25 bp, Homo sapien
gggtatgggtcacagccatggccct

SEQ ID NO: 995668 - DNA, 25 bp, Homo sapien
ctagttgttggcctcgccttcctcc

SEQ ID NO: 995669 - DNA, 25 bp, Homo sapien
gccttcctcctcatcaaaggactgc

SEQ ID NO: 995670 - DNA, 25 bp, Homo sapien
ttcctcctcatcaaaggactgcaca

SEQ ID NO: 995671 - DNA, 25 bp, Homo sapien
tagttgttggcctcgccttcctcct

SEQ ID NO: 995672 - DNA, 25 bp, Homo sapien
gaggatgtgacgtcagacaccttcc

SEQ ID NO: 995673 - DNA, 25 bp, Homo sapien
ttgtgagtcatcaaatgcaggccca

SEQ ID NO: 995674 - DNA, 25 bp, Homo sapien
gagcggtagacatctcagggtcttc

SEQ ID NO: 995675 - DNA, 25 bp, Homo sapien
gacaccttccggctgagagcggtag

SEQ ID NO: 995676 - DNA, 25 bp, Homo sapien
gggactgatcgctggcttcccaggc

SEQ ID NO: 995677 - DNA, 25 bp, Homo sapien
atgagggactgatcgctggcttccc

SEQ ID NO: 995678 - DNA, 25 bp, Homo sapien
ctgtggccggagaggcaatgaggga

SEQ ID NO: 995679 - DNA, 25 bp, Homo sapien
aatgagggactgatcgctggcttcc

SEQ ID NO: 995680 - DNA, 25 bp, Homo sapien
tgggacacgtaagagtgaggccatc

SEQ ID NO: 995681 - DNA, 25 bp, Homo sapien
ggacacgtaagagtgaggccatcca

SEQ ID NO: 995682 - DNA, 25 bp, Homo sapien
acacgtaagagtgaggccatccatc

SEQ ID NO: 995683 - DNA, 25 bp, Homo sapien
acgtaagagtgaggccatccatcca

SEQ ID NO: 995684 - DNA, 25 bp, Homo sapien
tgtagttgcagcccaatggctcctg

SEQ ID NO: 995685 - DNA, 25 bp, Homo sapien
gggtggagttcacactcatgtcctc

SEQ ID NO: 995686 - DNA, 25 bp, Homo sapien
catgagtgtggcctcagagatagca

SEQ ID NO: 995687 - DNA, 25 bp, Homo sapien
ccatcagttcctggtagttgtcact

SEQ ID NO: 995688 - DNA, 25 bp, Homo sapien
acatggtccttcatgctccgtgaga

SEQ ID NO: 995689 - DNA, 25 bp, Homo sapien
catcgctgaggtcggagtaggcatc

SEQ ID NO: 995690 - DNA, 25 bp, Homo sapien
tagaaaacgtgcctccttctcgcca

SEQ ID NO: 995691 - DNA, 25 bp, Homo sapien
tgcgcacggactcatggctgtgttg

SEQ ID NO: 995692 - DNA, 25 bp, Homo sapien
ctcccctaaggactccatagatggg

SEQ ID NO: 995693 - DNA, 25 bp, Homo sapien
ggccaggctcccctaaggactccat

SEQ ID NO: 995694 - DNA, 25 bp, Homo sapien
gaatatcacacaatacccataacca

SEQ ID NO: 995695 - DNA, 25 bp, Homo sapien
tatcacacaatacccataaccagac

SEQ ID NO: 995696 - DNA, 25 bp, Homo sapien
gtttcgcttaagcttcggaagaatg

SEQ ID NO: 995697 - DNA, 25 bp, Homo sapien
ccataggcgttagagtttcgcttaa

SEQ ID NO: 995698 - DNA, 25 bp, Homo sapien
aatgccataggcgttagagtttcgc

SEQ ID NO: 995699 - DNA, 25 bp, Homo sapien
gcgttagagtttcgcttaagcttcg

SEQ ID NO: 995700 - DNA, 25 bp, Homo sapien
caggaaaaagcattcgagctagggc

SEQ ID NO: 995701 - DNA, 25 bp, Homo sapien
gggcagatgataagaaaagctacta

SEQ ID NO: 995702 - DNA, 25 bp, Homo sapien
cgtgctttatacatggaggaggttc

SEQ ID NO: 995703 - DNA, 25 bp, Homo sapien
gaaggtacgggcgtgctttatacat

SEQ ID NO: 995704 - DNA, 25 bp, Homo sapien
gcacaggttgagaacgtgagtgctc

SEQ ID NO: 995705 - DNA, 25 bp, Homo sapien
cccagtgctctggaaaactggggca

SEQ ID NO: 995706 - DNA, 25 bp, Homo sapien
gagtcccaaggagggatatatcccc

SEQ ID NO: 995707 - DNA, 25 bp, Homo sapien
ttgagaacgtgagtgctcacagtgc

SEQ ID NO: 995708 - DNA, 25 bp, Homo sapien
gaggatggggaggtctgggggcagc

SEQ ID NO: 995709 - DNA, 25 bp, Homo sapien
gggaggtctgggggcagctgcactc

SEQ ID NO: 995710 - DNA, 25 bp, Homo sapien
gaggtctgggggcagctgcactcac

SEQ ID NO: 995711 - DNA, 25 bp, Homo sapien
tggggaggtctgggggcagctgcac

SEQ ID NO: 995712 - DNA, 25 bp, Homo sapien
cgtcccaggagaaatcagttcgagt

SEQ ID NO: 995713 - DNA, 25 bp, Homo sapien
gccgtcccaggagaaatcagttcga

SEQ ID NO: 995714 - DNA, 25 bp, Homo sapien
cccaggagaaatcagttcgagtttg

SEQ ID NO: 995715 - DNA, 25 bp, Homo sapien
tgccgtcccaggagaaatcagttcg

SEQ ID NO: 995716 - DNA, 25 bp, Homo sapien
tctccatgtggactgcttggcatgt

SEQ ID NO: 995717 - DNA, 25 bp, Homo sapien
gctttcctgaggttgatgccgctaa

SEQ ID NO: 995718 - DNA, 25 bp, Homo sapien
aggaaagggaatgggcatcccagtc

SEQ ID NO: 995719 - DNA, 25 bp, Homo sapien
cagtcactcgcaggaatgcaaggaa

SEQ ID NO: 995720 - DNA, 25 bp, Homo sapien
ctgctcccgtgcagtgagctggtgc

SEQ ID NO: 995721 - DNA, 25 bp, Homo sapien
ctcccgtgcagtgagctggtgctgt

SEQ ID NO: 995722 - DNA, 25 bp, Homo sapien
ctcagtcgatggccgatggaggctg

SEQ ID NO: 995723 - DNA, 25 bp, Homo sapien
gccgatggaggctgctcccgtgcag

SEQ ID NO: 995724 - DNA, 25 bp, Homo sapien
gttgatttgatcgacatccttcagg

SEQ ID NO: 995725 - DNA, 25 bp, Homo sapien
tgatttgatcgacatccttcaggcc

SEQ ID NO: 995726 - DNA, 25 bp, Homo sapien
atttgatcgacatccttcaggccct

SEQ ID NO: 995727 - DNA, 25 bp, Homo sapien
gatttgatcgacatccttcaggccc

SEQ ID NO: 995728 - DNA, 25 bp, Homo sapien
tgtgcagccgaggcgacaccctggg

SEQ ID NO: 995729 - DNA, 25 bp, Homo sapien
gccagaaggttagccgccggccctc

SEQ ID NO: 995730 - DNA, 25 bp, Homo sapien
ccctgtgcagccgaggcgacaccct

SEQ ID NO: 995731 - DNA, 25 bp, Homo sapien
cagaaggttagccgccggccctcac

SEQ ID NO: 995732 - DNA, 25 bp, Homo sapien
taaagggactattcaagcagcagat

SEQ ID NO: 995733 - DNA, 25 bp, Homo sapien
gagacaagtagtaatgctgagccca

SEQ ID NO: 995734 - DNA, 25 bp, Homo sapien
tatccatggaaataaaccgggtctc

SEQ ID NO: 995735 - DNA, 25 bp, Homo sapien
gctcaacccagaatagtgcactcag

SEQ ID NO: 995736 - DNA, 25 bp, Homo sapien
acaaagcgaatcggaggaggcagga

SEQ ID NO: 995737 - DNA, 25 bp, Homo sapien
gaacaaagcgaatcggaggaggcag

SEQ ID NO: 995738 - DNA, 25 bp, Homo sapien
gtgaacaaagcgaatcggaggaggc

SEQ ID NO: 995739 - DNA, 25 bp, Homo sapien
caaagcgaatcggaggaggcaggaa

SEQ ID NO: 995740 - DNA, 25 bp, Homo sapien
cacagtccgggagccgatgcagccc

SEQ ID NO: 995741 - DNA, 25 bp, Homo sapien
ccacagtccgggagccgatgcagcc

SEQ ID NO: 995742 - DNA, 25 bp, Homo sapien
gctccgggggccgcagagccgggcc

SEQ ID NO: 995743 - DNA, 25 bp, Homo sapien
cgggggccgcagagccgggccctca

SEQ ID NO: 995744 - DNA, 25 bp, Homo sapien
ggctccgggggccgcagagccgggc

SEQ ID NO: 995745 - DNA, 25 bp, Homo sapien
gggggccgcagagccgggccctcac

SEQ ID NO: 995746 - DNA, 25 bp, Homo sapien
cagccgctctgcagcgccgcggctg

SEQ ID NO: 995747 - DNA, 25 bp, Homo sapien
gcgccgcggctgtctccgctcggct

SEQ ID NO: 995748 - DNA, 25 bp, Homo sapien
gcagcgccgcggctgtctccgctcg

SEQ ID NO: 995749 - DNA, 25 bp, Homo sapien
gggggagcaccgggagccgcgccgc

SEQ ID NO: 995750 - DNA, 25 bp, Homo sapien
atgtgcagatagttgacctccaggc

SEQ ID NO: 995751 - DNA, 25 bp, Homo sapien
tctttgcaagtgaatcgtgtagtcc

SEQ ID NO: 995752 - DNA, 25 bp, Homo sapien
cacacaggaacgtgattggacacag

SEQ ID NO: 995753 - DNA, 25 bp, Homo sapien
cgagtgcgctattttgtccatccaa

SEQ ID NO: 995754 - DNA, 25 bp, Homo sapien
ggcaggatgccaggaccaaggaggc

SEQ ID NO: 995755 - DNA, 25 bp, Homo sapien
gcagggcatagagtctgggcaacca

SEQ ID NO: 995756 - DNA, 25 bp, Homo sapien
aggcagggcatagagtctgggcaac

SEQ ID NO: 995757 - DNA, 25 bp, Homo sapien
aggcaggatgccaggaccaaggagg

SEQ ID NO: 995758 - DNA, 25 bp, Homo sapien
ggaacaactttgctggaaccaggga

SEQ ID NO: 995759 - DNA, 25 bp, Homo sapien
cagggagctagctgaatggcacgac

SEQ ID NO: 995760 - DNA, 25 bp, Homo sapien
ggtacaaaggcctgtctactggctt

SEQ ID NO: 995761 - DNA, 25 bp, Homo sapien
ggtagcatctcacgcttgggtacaa

SEQ ID NO: 995762 - DNA, 25 bp, Homo sapien
cttatgtagattctggttccctggt

SEQ ID NO: 995763 - DNA, 25 bp, Homo sapien
tgccttatgtagattctggttccct

SEQ ID NO: 995764 - DNA, 25 bp, Homo sapien
cctggatgccttatgtagattctgg

SEQ ID NO: 995765 - DNA, 25 bp, Homo sapien
tgctccctggatgccttatgtagat

SEQ ID NO: 995766 - DNA, 25 bp, Homo sapien
taaagtagatggattaaccgtgacg

SEQ ID NO: 995767 - DNA, 25 bp, Homo sapien
gtagatggattaaccgtgacgttta

SEQ ID NO: 995768 - DNA, 25 bp, Homo sapien
aagtagatggattaaccgtgacgtt

SEQ ID NO: 995769 - DNA, 25 bp, Homo sapien
ataaagtagatggattaaccgtgac

SEQ ID NO: 995770 - DNA, 25 bp, Homo sapien
tcagtgtgaacaagacgaaggcctc

SEQ ID NO: 995771 - DNA, 25 bp, Homo sapien
tgaagaggcgtcagtttgggcatca

SEQ ID NO: 995772 - DNA, 25 bp, Homo sapien
agtttagatcctgcctttacctggg

SEQ ID NO: 995773 - DNA, 25 bp, Homo sapien
ccttgccagtagagtgtagccggat

SEQ ID NO: 995774 - DNA, 25 bp, Homo sapien
gagagaaaatgaagcgcctacgggt

SEQ ID NO: 995775 - DNA, 25 bp, Homo sapien
ggccatgactccttagtttggagaa

SEQ ID NO: 995776 - DNA, 25 bp, Homo sapien
gcgcctacgggtgcatactggacta

SEQ ID NO: 995777 - DNA, 25 bp, Homo sapien
tagcgggcgaaaggccatgactcct

SEQ ID NO: 995778 - DNA, 25 bp, Homo sapien
gatgcgaattcctagaagccttaag

SEQ ID NO: 995779 - DNA, 25 bp, Homo sapien
tctcgcaaccgatctgctggctggg

SEQ ID NO: 995780 - DNA, 25 bp, Homo sapien
tgcccagcgttggaagttcgtatcc

SEQ ID NO: 995781 - DNA, 25 bp, Homo sapien
tgaagggccgtaaaagacgagcagc

SEQ ID NO: 995782 - DNA, 25 bp, Homo sapien
gggctgcgtggctacctcggcggca

SEQ ID NO: 995783 - DNA, 25 bp, Homo sapien
tggagcccagctccatacgttcggc

SEQ ID NO: 995784 - DNA, 25 bp, Homo sapien
gggacggtgagtcagatctcgggca

SEQ ID NO: 995785 - DNA, 25 bp, Homo sapien
cgggtaacggcaggcccgagaggag

SEQ ID NO: 995786 - DNA, 25 bp, Homo sapien
ttttccgaagtgtaacgggagctgc

SEQ ID NO: 995787 - DNA, 25 bp, Homo sapien
ctcatcgtggagctcgtggctggga

SEQ ID NO: 995788 - DNA, 25 bp, Homo sapien
tgacctggtactcccagggcgccct

SEQ ID NO: 995789 - DNA, 25 bp, Homo sapien
gaatgtggggcacgaatcttcccct

SEQ ID NO: 995790 - DNA, 25 bp, Homo sapien
cagcgtggataggaaggacgatgag

SEQ ID NO: 995791 - DNA, 25 bp, Homo sapien
gggcaggctgcttcggtccctggag

SEQ ID NO: 995792 - DNA, 25 bp, Homo sapien
aggacagagtggttgcagcgtggat

SEQ ID NO: 995793 - DNA, 25 bp, Homo sapien
tggagggtgagtgttgtgggagagc

SEQ ID NO: 995794 - DNA, 25 bp, Homo sapien
gaggtgaggtcacggtgcgagcaaa

SEQ ID NO: 995795 - DNA, 25 bp, Homo sapien
cgagcaaagggacgaagcaggtggg

SEQ ID NO: 995796 - DNA, 25 bp, Homo sapien
gagaggtctggaacggctgctgtgg

SEQ ID NO: 995797 - DNA, 25 bp, Homo sapien
atggagaggtctggaacggctgctg

SEQ ID NO: 995798 - DNA, 25 bp, Homo sapien
gggtggcctttggaccttctctgag

SEQ ID NO: 995799 - DNA, 25 bp, Homo sapien
tactggcagcgctgtccttaacatc

SEQ ID NO: 995800 - DNA, 25 bp, Homo sapien
cagggttactggcagcgctgtcctt

SEQ ID NO: 995801 - DNA, 25 bp, Homo sapien
tggcagcgctgtccttaacatccac

SEQ ID NO: 995802 - DNA, 25 bp, Homo sapien
gtgttgtatcctcacgctgacaggg

SEQ ID NO: 995803 - DNA, 25 bp, Homo sapien
gctgctgtgtgcgtggcctccgtcc

SEQ ID NO: 995804 - DNA, 25 bp, Homo sapien
ggtgcttcagtgacccgagctgctg

SEQ ID NO: 995805 - DNA, 25 bp, Homo sapien
ctctgtggagttgatgcgtggccct

SEQ ID NO: 995806 - DNA, 25 bp, Homo sapien
agcaagcaccttgggagcagctcta

SEQ ID NO: 995807 - DNA, 25 bp, Homo sapien
gaggcagatgacaatggctgcttcc

SEQ ID NO: 995808 - DNA, 25 bp, Homo sapien
tgtggctggaaaaagcgatgacacc

SEQ ID NO: 995809 - DNA, 25 bp, Homo sapien
gaagcccctgtcgattgaggcagat

SEQ ID NO: 995810 - DNA, 25 bp, Homo sapien
caacatggtctagggatgcaggatc

SEQ ID NO: 995811 - DNA, 25 bp, Homo sapien
agttattgttttgatgtctagcccc

SEQ ID NO: 995812 - DNA, 25 bp, Homo sapien
gctgggagaccctccaggacattcc

SEQ ID NO: 995813 - DNA, 25 bp, Homo sapien
ctttgtactctgcttgcggagggct

SEQ ID NO: 995814 - DNA, 25 bp, Homo sapien
ggagtgaccatgagcgaccttggcc

SEQ ID NO: 995815 - DNA, 25 bp, Homo sapien
cagggttctcctgaaagtgggcaga

SEQ ID NO: 995816 - DNA, 25 bp, Homo sapien
gaagcagcaccgatagcctagtctg

SEQ ID NO: 995817 - DNA, 25 bp, Homo sapien
gctccttgcaccctgattgggcatg

SEQ ID NO: 995818 - DNA, 25 bp, Homo sapien
gaatactgcaaagaatgcgcttctg

SEQ ID NO: 995819 - DNA, 25 bp, Homo sapien
ccctgaatactgcaaagaatgcgct

SEQ ID NO: 995820 - DNA, 25 bp, Homo sapien
aaagaatgcgcttctggtgcccggg

SEQ ID NO: 995821 - DNA, 25 bp, Homo sapien
ttgaatccctgaatactgcaaagaa

SEQ ID NO: 995822 - DNA, 25 bp, Homo sapien
tggactcgagccactcagagacggt

SEQ ID NO: 995823 - DNA, 25 bp, Homo sapien
ccagcccagccgagtggaagtgcag

SEQ ID NO: 995824 - DNA, 25 bp, Homo sapien
aagtgcaggatgtagcgtttcatgc

SEQ ID NO: 995825 - DNA, 25 bp, Homo sapien
cagagacggttcgatatgggatccc

SEQ ID NO: 995826 - DNA, 25 bp, Homo sapien
gcatgtcagtcacagcgggtacatg

SEQ ID NO: 995827 - DNA, 25 bp, Homo sapien
gtgggacatgggcatgtcagtcaca

SEQ ID NO: 995828 - DNA, 25 bp, Homo sapien
gtacatgggctgatctggttggcct

SEQ ID NO: 995829 - DNA, 25 bp, Homo sapien
tcacagcgggtacatgggctgatct

SEQ ID NO: 995830 - DNA, 25 bp, Homo sapien
tggccggcgggcacggtcatatgcc

SEQ ID NO: 995831 - DNA, 25 bp, Homo sapien
catgagctcatacagaggggcaggg

SEQ ID NO: 995832 - DNA, 25 bp, Homo sapien
caaagttggcaatggtccgcaggga

SEQ ID NO: 995833 - DNA, 25 bp, Homo sapien
ggtacccatcctcaatgctcttcat

SEQ ID NO: 995834 - DNA, 25 bp, Homo sapien
cgctggctgtggtgaagatccgatg

SEQ ID NO: 995835 - DNA, 25 bp, Homo sapien
cttcaggggctgtccaacggatagg

SEQ ID NO: 995836 - DNA, 25 bp, Homo sapien
tgaagatccgatgggcaatggcttc

SEQ ID NO: 995837 - DNA, 25 bp, Homo sapien
ctccccataaggcttgtccccaaag

SEQ ID NO: 995838 - DNA, 25 bp, Homo sapien
caggaggcgagtcaggccaaagtca

SEQ ID NO: 995839 - DNA, 25 bp, Homo sapien
tgattactgaggtagttcatgccag

SEQ ID NO: 995840 - DNA, 25 bp, Homo sapien
caggtcccggtggacataattgtga

SEQ ID NO: 995841 - DNA, 25 bp, Homo sapien
tgccagatgctatgccctgcagcat

SEQ ID NO: 995842 - DNA, 25 bp, Homo sapien
agggctccattctccataaattctg

SEQ ID NO: 995843 - DNA, 25 bp, Homo sapien
agctgagggagaccactcatcgtac

SEQ ID NO: 995844 - DNA, 25 bp, Homo sapien
ccccagctgagggagaccactcatc

SEQ ID NO: 995845 - DNA, 25 bp, Homo sapien
ccagctgagggagaccactcatcgt

SEQ ID NO: 995846 - DNA, 25 bp, Homo sapien
gcatttcccgcccccagctgaggga

SEQ ID NO: 995847 - DNA, 25 bp, Homo sapien
tctcgaaggaagttccaccactggc

SEQ ID NO: 995848 - DNA, 25 bp, Homo sapien
cccatgatagttgcctctcgaagga

SEQ ID NO: 995849 - DNA, 25 bp, Homo sapien
gctttgtgacgacgccttccagatg

SEQ ID NO: 995850 - DNA, 25 bp, Homo sapien
tatgcgggtggctaaactggcccat

SEQ ID NO: 995851 - DNA, 25 bp, Homo sapien
gtgtcttttaaggtcttaatggcca

SEQ ID NO: 995852 - DNA, 25 bp, Homo sapien
agcctcagggtccctcgatacactt

SEQ ID NO: 995853 - DNA, 25 bp, Homo sapien
ctggggatgtgtcttttaaggtctt

SEQ ID NO: 995854 - DNA, 25 bp, Homo sapien
ccctcgatacacttccccaaactct

SEQ ID NO: 995855 - DNA, 25 bp, Homo sapien
aatcagaagcgtggagtgcccttcc

SEQ ID NO: 995856 - DNA, 25 bp, Homo sapien
ttcttggctcacaataggcgctcgg

SEQ ID NO: 995857 - DNA, 25 bp, Homo sapien
tggcccgatgcactgcagggctcct

SEQ ID NO: 995858 - DNA, 25 bp, Homo sapien
agaaaacaggctgtggcccgatgca

SEQ ID NO: 995859 - DNA, 25 bp, Homo sapien
gggcctgctgcggtgcacagcagga

SEQ ID NO: 995860 - DNA, 25 bp, Homo sapien
tgtgctgccccacatggcggggggc

SEQ ID NO: 995861 - DNA, 25 bp, Homo sapien
tgctgcggtgcacagcaggactcac

SEQ ID NO: 995862 - DNA, 25 bp, Homo sapien
gccccacatggcggggggcctgctg

SEQ ID NO: 995863 - DNA, 25 bp, Homo sapien
gtgtccaccatcagccacgctggat

SEQ ID NO: 995864 - DNA, 25 bp, Homo sapien
tctcctatgacagtgtccaccatca

SEQ ID NO: 995865 - DNA, 25 bp, Homo sapien
ctggatcaagctcccgggtaaagtc

SEQ ID NO: 995866 - DNA, 25 bp, Homo sapien
tatgcctggaggtccacataaggct

SEQ ID NO: 995867 - DNA, 25 bp, Homo sapien
catgaggttggggagtaccaacatc

SEQ ID NO: 995868 - DNA, 25 bp, Homo sapien
tgtttcccaaggtgactcctgtttg

SEQ ID NO: 995869 - DNA, 25 bp, Homo sapien
caacatcagggctcaggagtatggg

SEQ ID NO: 995870 - DNA, 25 bp, Homo sapien
agaagggccagcagcggaccacaca

SEQ ID NO: 995871 - DNA, 25 bp, Homo sapien
tccatttagcaactaggcctttctt

SEQ ID NO: 995872 - DNA, 25 bp, Homo sapien
gggagaaagtctccatttagcaact

SEQ ID NO: 995873 - DNA, 25 bp, Homo sapien
tgggagaaagtctccatttagcaac

SEQ ID NO: 995874 - DNA, 25 bp, Homo sapien
ggtgggagaaagtctccatttagca

SEQ ID NO: 995875 - DNA, 25 bp, Homo sapien
gtggcgcggtcacgctgcctctgct

SEQ ID NO: 995876 - DNA, 25 bp, Homo sapien
tcggtggcgcggtcacgctgcctct

SEQ ID NO: 995877 - DNA, 25 bp, Homo sapien
ccacatcggtggcgcggtcacgctg

SEQ ID NO: 995878 - DNA, 25 bp, Homo sapien
acatcggtggcgcggtcacgctgcc

SEQ ID NO: 995879 - DNA, 25 bp, Homo sapien
tgaatcttccccagaaacgggctgg

SEQ ID NO: 995880 - DNA, 25 bp, Homo sapien
ggtccgagggactctggctgaatct

SEQ ID NO: 995881 - DNA, 25 bp, Homo sapien
gggactctggctgaatcttccccag

SEQ ID NO: 995882 - DNA, 25 bp, Homo sapien
gctgggagtgcaggatgggttttga

SEQ ID NO: 995883 - DNA, 25 bp, Homo sapien
tggtggttggggagggggcaggagc

SEQ ID NO: 995884 - DNA, 25 bp, Homo sapien
ggttggggagggggcaggagctggc

SEQ ID NO: 995885 - DNA, 25 bp, Homo sapien
gtggttggggagggggcaggagctg

SEQ ID NO: 995886 - DNA, 25 bp, Homo sapien
ttggggagggggcaggagctggcac

SEQ ID NO: 995887 - DNA, 25 bp, Homo sapien
gaaaacgagaatcccaagcagcaag

SEQ ID NO: 995888 - DNA, 25 bp, Homo sapien
gatgacggctacaatctctcctcca

SEQ ID NO: 995889 - DNA, 25 bp, Homo sapien
agcagcagcccaaagatgacggcta

SEQ ID NO: 995890 - DNA, 25 bp, Homo sapien
gaccggaaaacgagaatcccaagca

SEQ ID NO: 995891 - DNA, 25 bp, Homo sapien
tctgacgatgtatgtggtgtcaggc

SEQ ID NO: 995892 - DNA, 25 bp, Homo sapien
gctggtccgaaactcatgatcaggg

SEQ ID NO: 995893 - DNA, 25 bp, Homo sapien
gaaccatctggtaccgttcttcatc

SEQ ID NO: 995894 - DNA, 25 bp, Homo sapien
ccagtggggtcagcattcggactct

SEQ ID NO: 995895 - DNA, 25 bp, Homo sapien
ggtcagctctagttgcctcggttct

SEQ ID NO: 995896 - DNA, 25 bp, Homo sapien
ctggttcagcacgtgcagctcatag

SEQ ID NO: 995897 - DNA, 25 bp, Homo sapien
ataggtcaggttcgccccagggctt

SEQ ID NO: 995898 - DNA, 25 bp, Homo sapien
gcccaggtcagctctagttgcctcg

SEQ ID NO: 995899 - DNA, 25 bp, Homo sapien
cataaggttcaaggccattgacatg

SEQ ID NO: 995900 - DNA, 25 bp, Homo sapien
attttgggcttccacattaaaggtg

SEQ ID NO: 995901 - DNA, 25 bp, Homo sapien
tgtagttggcataaggttcaaggcc

SEQ ID NO: 995902 - DNA, 25 bp, Homo sapien
ccacattaaaggtgtagttggcata

SEQ ID NO: 995903 - DNA, 25 bp, Homo sapien
cacactgtatctgacatcctggcgt

SEQ ID NO: 995904 - DNA, 25 bp, Homo sapien
gttcccaacgcagggagagctgagt

SEQ ID NO: 995905 - DNA, 25 bp, Homo sapien
ggaacacctcacactgtatctgaca

SEQ ID NO: 995906 - DNA, 25 bp, Homo sapien
tcccaacgcagggagagctgagtcc

SEQ ID NO: 995907 - DNA, 25 bp, Homo sapien
tgaggcagagaagctcaggtttcgg

SEQ ID NO: 995908 - DNA, 25 bp, Homo sapien
gaggcagagaagctcaggtttcggg

SEQ ID NO: 995909 - DNA, 25 bp, Homo sapien
ctccccgggagctctgtaatggccg

SEQ ID NO: 995910 - DNA, 25 bp, Homo sapien
catgtccatccggtaggagccgcta

SEQ ID NO: 995911 - DNA, 25 bp, Homo sapien
cgctctcacaggtacagatggtggc

SEQ ID NO: 995912 - DNA, 25 bp, Homo sapien
ggtgtgtccatgtccatccggtagg

SEQ ID NO: 995913 - DNA, 25 bp, Homo sapien
gccacacaggcacccgggttgtgga

SEQ ID NO: 995914 - DNA, 25 bp, Homo sapien
cttcacggagccagacacaaggtct

SEQ ID NO: 995915 - DNA, 25 bp, Homo sapien
agcgctggtagaagacccggacaga

SEQ ID NO: 995916 - DNA, 25 bp, Homo sapien
gctcacagtggcaccgtcctacagg

SEQ ID NO: 995917 - DNA, 25 bp, Homo sapien
tctggtctgcagccaccgtggttac

SEQ ID NO: 995918 - DNA, 25 bp, Homo sapien
ctctggtctgcagccaccgtggtta

SEQ ID NO: 995919 - DNA, 25 bp, Homo sapien
aaggggagcaatggcaaagtcctgc

SEQ ID NO: 995920 - DNA, 25 bp, Homo sapien
gggaagaaaggggagcaatggcaaa

SEQ ID NO: 995921 - DNA, 25 bp, Homo sapien
ggggagcaatggcaaagtcctgctt

SEQ ID NO: 995922 - DNA, 25 bp, Homo sapien
agaaaggggagcaatggcaaagtcc

SEQ ID NO: 995923 - DNA, 25 bp, Homo sapien
tatgactaggcaacaaaagctggag

SEQ ID NO: 995924 - DNA, 25 bp, Homo sapien
gatgtgctggagagtactagcctgc

SEQ ID NO: 995925 - DNA, 25 bp, Homo sapien
gaattgtcttgctacatgactccag

SEQ ID NO: 995926 - DNA, 25 bp, Homo sapien
gaacatcgtgggtatcaataggaaa

SEQ ID NO: 995927 - DNA, 25 bp, Homo sapien
gatcttcccacatcggtttcccaaa

SEQ ID NO: 995928 - DNA, 25 bp, Homo sapien
gcacccaataaggagccaccaggga

SEQ ID NO: 995929 - DNA, 25 bp, Homo sapien
ccaggacccagatggcatggaggga

SEQ ID NO: 995930 - DNA, 25 bp, Homo sapien
gccttcaagcgccaaattcttttca

SEQ ID NO: 995931 - DNA, 25 bp, Homo sapien
gggaaactcttgcagtcccgcacgg

SEQ ID NO: 995932 - DNA, 25 bp, Homo sapien
caattggagcgaagccagtggtcag

SEQ ID NO: 995933 - DNA, 25 bp, Homo sapien
gagctgaatgcccacatcctggtca

SEQ ID NO: 995934 - DNA, 25 bp, Homo sapien
tccccgcggtagatccaattggagc

SEQ ID NO: 995935 - DNA, 25 bp, Homo sapien
tcaggagttttccaagatccttccc

SEQ ID NO: 995936 - DNA, 25 bp, Homo sapien
caggagttttccaagatccttccct

SEQ ID NO: 995937 - DNA, 25 bp, Homo sapien
ttttgggggatccagcagccagccc

SEQ ID NO: 995938 - DNA, 25 bp, Homo sapien
tttgggggatccagcagccagccca

SEQ ID NO: 995939 - DNA, 25 bp, Homo sapien
atcttttgggggatccagcagccag

SEQ ID NO: 995940 - DNA, 25 bp, Homo sapien
cttttgggggatccagcagccagcc

SEQ ID NO: 995941 - DNA, 25 bp, Homo sapien
actgtccgaagcctgctttggcctg

SEQ ID NO: 995942 - DNA, 25 bp, Homo sapien
cctggccagtgatcagagccgtgaa

SEQ ID NO: 995943 - DNA, 25 bp, Homo sapien
ccagtgatcagagccgtgaagtggg

SEQ ID NO: 995944 - DNA, 25 bp, Homo sapien
tggccagtgatcagagccgtgaagt

SEQ ID NO: 995945 - DNA, 25 bp, Homo sapien
aagaccaaagatgggcctggccagt

SEQ ID NO: 995946 - DNA, 25 bp, Homo sapien
gagcagccgcttggggttaaagacc

SEQ ID NO: 995947 - DNA, 25 bp, Homo sapien
tcgggcacagcgagagagctggcga

SEQ ID NO: 995948 - DNA, 25 bp, Homo sapien
ctggccagtcgatagcctggcggtc

SEQ ID NO: 995949 - DNA, 25 bp, Homo sapien
gcagcaccagccctagccccagggg

SEQ ID NO: 995950 - DNA, 25 bp, Homo sapien
agccctagccccaggggccagcgcc

SEQ ID NO: 995951 - DNA, 25 bp, Homo sapien
gcagcagcaccagccctagccccag

SEQ ID NO: 995952 - DNA, 25 bp, Homo sapien
ccgggggcagcggggcgcagagcag

SEQ ID NO: 995953 - DNA, 25 bp, Homo sapien
ggatggcagcgccaggttgcaaggg

SEQ ID NO: 995954 - DNA, 25 bp, Homo sapien
ttgcaagggactaggagagccgggc

SEQ ID NO: 995955 - DNA, 25 bp, Homo sapien
gacagtggcccggatggcagcgcca

SEQ ID NO: 995956 - DNA, 25 bp, Homo sapien
gcagcgccaggttgcaagggactag

SEQ ID NO: 995957 - DNA, 25 bp, Homo sapien
gaattacactcctatattcctcttt

SEQ ID NO: 995958 - DNA, 25 bp, Homo sapien
gggaggcttagatgaccacaatgca

SEQ ID NO: 995959 - DNA, 25 bp, Homo sapien
ggtaagagtcatatcttcaccctct

SEQ ID NO: 995960 - DNA, 25 bp, Homo sapien
caaggtggggtacaacctgcagtga

SEQ ID NO: 995961 - DNA, 25 bp, Homo sapien
tggtggattctgcacgtctttaatc

SEQ ID NO: 995962 - DNA, 25 bp, Homo sapien
tctggtggattctgcacgtctttaa

SEQ ID NO: 995963 - DNA, 25 bp, Homo sapien
ggtggattctgcacgtctttaatca

SEQ ID NO: 995964 - DNA, 25 bp, Homo sapien
cttctggtggattctgcacgtcttt

SEQ ID NO: 995965 - DNA, 25 bp, Homo sapien
tgggcaaatcacctagctgttttga

SEQ ID NO: 995966 - DNA, 25 bp, Homo sapien
atatgagaaagtgtacaagcaaaag

SEQ ID NO: 995967 - DNA, 25 bp, Homo sapien
tagctgttttgagactccgcttcct

SEQ ID NO: 995968 - DNA, 25 bp, Homo sapien
ggtcatagtatatgagaaaagtaca

SEQ ID NO: 995969 - DNA, 25 bp, Homo sapien
cacctctgtgggagggggatgcacc

SEQ ID NO: 995970 - DNA, 25 bp, Homo sapien
ggggatgcaccatgtgaaagaggta

SEQ ID NO: 995971 - DNA, 25 bp, Homo sapien
ggatgcaccatgtgaaagaggtaag

SEQ ID NO: 995972 - DNA, 25 bp, Homo sapien
atgcaccatgtgaaagaggtaagcc

SEQ ID NO: 995973 - DNA, 25 bp, Homo sapien
tggagactgacaggcagggaaccag

SEQ ID NO: 995974 - DNA, 25 bp, Homo sapien
tttagagacaatggtgacgaattag

SEQ ID NO: 995975 - DNA, 25 bp, Homo sapien
tgaaagtaggggtgctggaaataaa

SEQ ID NO: 995976 - DNA, 25 bp, Homo sapien
ttgtttggccgatgggagactttga

SEQ ID NO: 995977 - DNA, 25 bp, Homo sapien
ttacacgtgaccgcaacagggcgtg

SEQ ID NO: 995978 - DNA, 25 bp, Homo sapien
cgtgaccgcaacagggcgtgtgtac

SEQ ID NO: 995979 - DNA, 25 bp, Homo sapien
cacgtgaccgcaacagggcgtgtgt

SEQ ID NO: 995980 - DNA, 25 bp, Homo sapien
tacacgtgaccgcaacagggcgtgt

SEQ ID NO: 995981 - DNA, 25 bp, Homo sapien
ccggccaaaggattttgagacgagc

SEQ ID NO: 995982 - DNA, 25 bp, Homo sapien
catgcagaagccactcattgctgtt

SEQ ID NO: 995983 - DNA, 25 bp, Homo sapien
catggcctcagctcgcttcttgatg

SEQ ID NO: 995984 - DNA, 25 bp, Homo sapien
atgaatctgggctccggccaaagga

SEQ ID NO: 995985 - DNA, 25 bp, Homo sapien
tttcctcagttgaacctgtcctcat

SEQ ID NO: 995986 - DNA, 25 bp, Homo sapien
taggcattctttcctcagttgaacc

SEQ ID NO: 995987 - DNA, 25 bp, Homo sapien
tctttcctcagttgaacctgtcctc

SEQ ID NO: 995988 - DNA, 25 bp, Homo sapien
attctttcctcagttgaacctgtcc

SEQ ID NO: 995989 - DNA, 25 bp, Homo sapien
ggtaaggtgccggatgctgtccaca

SEQ ID NO: 995990 - DNA, 25 bp, Homo sapien
gagacttagcagaacctccctggag

SEQ ID NO: 995991 - DNA, 25 bp, Homo sapien
tatgaatccagggacaagggcttct

SEQ ID NO: 995992 - DNA, 25 bp, Homo sapien
tggattcttggtcacaatgctgggc

SEQ ID NO: 995993 - DNA, 25 bp, Homo sapien
tcttggcctcgtctctccacttcag

SEQ ID NO: 995994 - DNA, 25 bp, Homo sapien
tactttatgaactagcatggtttcg

SEQ ID NO: 995995 - DNA, 25 bp, Homo sapien
tgcagcaaccggtagtaacccagct

SEQ ID NO: 995996 - DNA, 25 bp, Homo sapien
tcttttgccgtgacttgaaatttgt

SEQ ID NO: 995997 - DNA, 25 bp, Homo sapien
tggtttcgattccagtttccctgga

SEQ ID NO: 995998 - DNA, 25 bp, Homo sapien
tatgtctttgctcgttgttttccta

SEQ ID NO: 995999 - DNA, 25 bp, Homo sapien
ctaggtccagcaggatagtctggac

SEQ ID NO: 996000 - DNA, 25 bp, Homo sapien
tctatgtcatgacaactcttgtaaa

SEQ ID NO: 996001 - DNA, 25 bp, Homo sapien
taggtccagcaggatagtctggaca

SEQ ID NO: 996002 - DNA, 25 bp, Homo sapien
cttatggcatattcttcctctccac

SEQ ID NO: 996003 - DNA, 25 bp, Homo sapien
ggcatattcttcctctccacgtctg

SEQ ID NO: 996004 - DNA, 25 bp, Homo sapien
tggcatattcttcctctccacgtct

SEQ ID NO: 996005 - DNA, 25 bp, Homo sapien
tatggcatattcttcctctccacgt

SEQ ID NO: 996006 - DNA, 25 bp, Homo sapien
cctatgggacatccgcttgtgagac

SEQ ID NO: 996007 - DNA, 25 bp, Homo sapien
gttcccaggatactagagcaatgct

SEQ ID NO: 996008 - DNA, 25 bp, Homo sapien
gcagctgtagcaaaatgaccctgtt

SEQ ID NO: 996009 - DNA, 25 bp, Homo sapien
ggctgtgtcgcaatgtacctgtatc

SEQ ID NO: 996010 - DNA, 25 bp, Homo sapien
aaatatgcgaaattcaagattcacg

SEQ ID NO: 996011 - DNA, 25 bp, Homo sapien
gaaattcaagattcacgtcaagcat

SEQ ID NO: 996012 - DNA, 25 bp, Homo sapien
gccttgctaaatatgcgaaattcaa

SEQ ID NO: 996013 - DNA, 25 bp, Homo sapien
ttgccttgctaaatatgcgaaattc

SEQ ID NO: 996014 - DNA, 25 bp, Homo sapien
tggtcagtgccgtctccatagcaga

SEQ ID NO: 996015 - DNA, 25 bp, Homo sapien
gggtcgcaaacagccacgtagcggt

SEQ ID NO: 996016 - DNA, 25 bp, Homo sapien
tgcaggacggcaactacaatgaggg

SEQ ID NO: 996017 - DNA, 25 bp, Homo sapien
gcatgtaggtaaagagggccatccc

SEQ ID NO: 996018 - DNA, 25 bp, Homo sapien
tgcggccagcaacaaaaactcggtc

SEQ ID NO: 996019 - DNA, 25 bp, Homo sapien
cagcaacaaaaactcggtccctccg

SEQ ID NO: 996020 - DNA, 25 bp, Homo sapien
gccagcaacaaaaactcggtccctc

SEQ ID NO: 996021 - DNA, 25 bp, Homo sapien
gcggccagcaacaaaaactcggtcc

SEQ ID NO: 996022 - DNA, 25 bp, Homo sapien
tgggtcccacatcgggcaaaggaga

SEQ ID NO: 996023 - DNA, 25 bp, Homo sapien
tcccacatcgggcaaaggagatggt

SEQ ID NO: 996024 - DNA, 25 bp, Homo sapien
gggtcccacatcgggcaaaggagat

SEQ ID NO: 996025 - DNA, 25 bp, Homo sapien
ggtcccacatcgggcaaaggagatg

SEQ ID NO: 996026 - DNA, 25 bp, Homo sapien
tggtgcagtgcaccagcatctgagg

SEQ ID NO: 996027 - DNA, 25 bp, Homo sapien
ctttctttgctggtgcagtgcacca

SEQ ID NO: 996028 - DNA, 25 bp, Homo sapien
tgcagtgcaccagcatctgagggac

SEQ ID NO: 996029 - DNA, 25 bp, Homo sapien
tttctttgctggtgcagtgcaccag

SEQ ID NO: 996030 - DNA, 25 bp, Homo sapien
taggcagccccaaataagataaaga

SEQ ID NO: 996031 - DNA, 25 bp, Homo sapien
cagatcaggagcaggatgagcccat

SEQ ID NO: 996032 - DNA, 25 bp, Homo sapien
aaatacatgggcaggtggagtctca

SEQ ID NO: 996033 - DNA, 25 bp, Homo sapien
agtctcacgtccagccagatcagga

SEQ ID NO: 996034 - DNA, 25 bp, Homo sapien
atgttgtcccttcccagttgggaca

SEQ ID NO: 996035 - DNA, 25 bp, Homo sapien
ttatgttgtcccttcccagttggga

SEQ ID NO: 996036 - DNA, 25 bp, Homo sapien
ccaggttatgttgtcccttcccagt

SEQ ID NO: 996037 - DNA, 25 bp, Homo sapien
aggttatgttgtcccttcccagttg

SEQ ID NO: 996038 - DNA, 25 bp, Homo sapien
caaggctgagtgctcacttcatgca

SEQ ID NO: 996039 - DNA, 25 bp, Homo sapien
gagcctccaactacaaccagtgaga

SEQ ID NO: 996040 - DNA, 25 bp, Homo sapien
ggtcacgggaggaattcaaagagcc

SEQ ID NO: 996041 - DNA, 25 bp, Homo sapien
tttcagaatttaggcatccccagag

SEQ ID NO: 996042 - DNA, 25 bp, Homo sapien
cctaatactgatctcccggttcttg

SEQ ID NO: 996043 - DNA, 25 bp, Homo sapien
actgatctcccggttcttggccatc

SEQ ID NO: 996044 - DNA, 25 bp, Homo sapien
ttctttatcagctttcctaatactg

SEQ ID NO: 996045 - DNA, 25 bp, Homo sapien
tggccatcttccacaaagttttaat

SEQ ID NO: 996046 - DNA, 25 bp, Homo sapien
ggaagatttgtcattgtaatgacaa

SEQ ID NO: 996047 - DNA, 25 bp, Homo sapien
tcattgtaatgacaatggactaggg

SEQ ID NO: 996048 - DNA, 25 bp, Homo sapien
caatggactagggaactgttgttta

SEQ ID NO: 996049 - DNA, 25 bp, Homo sapien
tgtaatgacaatggactagggaact

SEQ ID NO: 996050 - DNA, 25 bp, Homo sapien
gctcttcccctttgggcaagacctg

SEQ ID NO: 996051 - DNA, 25 bp, Homo sapien
gcaagacctgaagaatcttgggttt

SEQ ID NO: 996052 - DNA, 25 bp, Homo sapien
agaatcttgggtttatctttgctgc

SEQ ID NO: 996053 - DNA, 25 bp, Homo sapien
ctcttcccctttgggcaagacctga

SEQ ID NO: 996054 - DNA, 25 bp, Homo sapien
agggcttctgggcataagacaaaac

SEQ ID NO: 996055 - DNA, 25 bp, Homo sapien
tccttatcaacagggcttctgggca

SEQ ID NO: 996056 - DNA, 25 bp, Homo sapien
tctgggcataagacaaaacctgata

SEQ ID NO: 996057 - DNA, 25 bp, Homo sapien
ttccttatcaacagggcttctgggc

SEQ ID NO: 996058 - DNA, 25 bp, Homo sapien
tggctttgtcaaggcttggtggcca

SEQ ID NO: 996059 - DNA, 25 bp, Homo sapien
gtttatgtggatccaacctgtgtca

SEQ ID NO: 996060 - DNA, 25 bp, Homo sapien
tctttgcttattcacgtggcaggtt

SEQ ID NO: 996061 - DNA, 25 bp, Homo sapien
tgcagctggacaaccactcgaatct

SEQ ID NO: 996062 - DNA, 25 bp, Homo sapien
ggcatgttctttggttgagctccca

SEQ ID NO: 996063 - DNA, 25 bp, Homo sapien
cccattcgagacaaacaggaacttg

SEQ ID NO: 996064 - DNA, 25 bp, Homo sapien
tccaccaagctgatcccctctggca

SEQ ID NO: 996065 - DNA, 25 bp, Homo sapien
tctgtagctctcagtgatatggcca

SEQ ID NO: 996066 - DNA, 25 bp, Homo sapien
ggatgactggcagcccacgccaaag

SEQ ID NO: 996067 - DNA, 25 bp, Homo sapien
caaaggccaagagatgtgaaggtag

SEQ ID NO: 996068 - DNA, 25 bp, Homo sapien
acctgaggaagaggtcacaagccca

SEQ ID NO: 996069 - DNA, 25 bp, Homo sapien
aagagctgaatggaacaggatgact

SEQ ID NO: 996070 - DNA, 25 bp, Homo sapien
gctcgcgcagatccccgcctggagc

SEQ ID NO: 996071 - DNA, 25 bp, Homo sapien
tcgcgcagatccccgcctggagctt

SEQ ID NO: 996072 - DNA, 25 bp, Homo sapien
gagctcgcgcagatccccgcctgga

SEQ ID NO: 996073 - DNA, 25 bp, Homo sapien
tcagagctcgcgcagatccccgcct

SEQ ID NO: 996074 - DNA, 25 bp, Homo sapien
cctgggccgcacgtacatgaaggtg

SEQ ID NO: 996075 - DNA, 25 bp, Homo sapien
cagcggcgtgacgttggtgtagacc

SEQ ID NO: 996076 - DNA, 25 bp, Homo sapien
tcagggcggcggtgatctcgcggtt

SEQ ID NO: 996077 - DNA, 25 bp, Homo sapien
cgcagccgtagtgcaggaaggtgac

SEQ ID NO: 996078 - DNA, 25 bp, Homo sapien
gtggaagatggccaccgtgagcccc

SEQ ID NO: 996079 - DNA, 25 bp, Homo sapien
tagctccgcgtgcaggccaggtgca

SEQ ID NO: 996080 - DNA, 25 bp, Homo sapien
cagaggcagctcgtcggcgtagctc

SEQ ID NO: 996081 - DNA, 25 bp, Homo sapien
gcagcgccgtgatgtcgcagaagaa

SEQ ID NO: 996082 - DNA, 25 bp, Homo sapien
cactcggccccgcccagagccacaa

SEQ ID NO: 996083 - DNA, 25 bp, Homo sapien
gccagcaggaagcactcggccccgc

SEQ ID NO: 996084 - DNA, 25 bp, Homo sapien
ccagcaggaagcactcggccccgcc

SEQ ID NO: 996085 - DNA, 25 bp, Homo sapien
cggccccgcccagagccacaaacat

SEQ ID NO: 996086 - DNA, 25 bp, Homo sapien
agcgtgtagcacagctcgatggctg

SEQ ID NO: 996087 - DNA, 25 bp, Homo sapien
gcgtgtagcacagctcgatggctga

SEQ ID NO: 996088 - DNA, 25 bp, Homo sapien
cagcgtgtagcacagctcgatggct

SEQ ID NO: 996089 - DNA, 25 bp, Homo sapien
cgtgtagcacagctcgatggctgac

SEQ ID NO: 996090 - DNA, 25 bp, Homo sapien
tgcgggaattcggagaagccttgaa

SEQ ID NO: 996091 - DNA, 25 bp, Homo sapien
gaagagcacgggtctcaggtgcggg

SEQ ID NO: 996092 - DNA, 25 bp, Homo sapien
ggcttggcatcgaggccacggccac

SEQ ID NO: 996093 - DNA, 25 bp, Homo sapien
ctgccggcttggcatcgaggccacg

SEQ ID NO: 996094 - DNA, 25 bp, Homo sapien
agggcagagcttgtcgggtacgcat

SEQ ID NO: 996095 - DNA, 25 bp, Homo sapien
catttgtcaccagactgtagattga

SEQ ID NO: 996096 - DNA, 25 bp, Homo sapien
gactggtgggatgcctgtttctaga

SEQ ID NO: 996097 - DNA, 25 bp, Homo sapien
acgaatctgatgactatctatgaac

SEQ ID NO: 996098 - DNA, 25 bp, Homo sapien
actccagctgagaagaggttggtta

SEQ ID NO: 996099 - DNA, 25 bp, Homo sapien
tgagtagaacctcataggggtacag

SEQ ID NO: 996100 - DNA, 25 bp, Homo sapien
ggaaaagcacttgggccatcatcat

SEQ ID NO: 996101 - DNA, 25 bp, Homo sapien
gggaaaagcacttgggccatcatca

SEQ ID NO: 996102 - DNA, 25 bp, Homo sapien
acctcataggggtacagagctgatg

SEQ ID NO: 996103 - DNA, 25 bp, Homo sapien
cctactaggagagatatgaaaagac

SEQ ID NO: 996104 - DNA, 25 bp, Homo sapien
tttgagatgcccaaggactagacct

SEQ ID NO: 996105 - DNA, 25 bp, Homo sapien
ttgaatgtctgtaataggtagccac

SEQ ID NO: 996106 - DNA, 25 bp, Homo sapien
tgtagtactacatagagtgcctcaa

SEQ ID NO: 996107 - DNA, 25 bp, Homo sapien
ctttccgttcaagaatctttttgca

SEQ ID NO: 996108 - DNA, 25 bp, Homo sapien
aagatttggctttccgttcaagaat

SEQ ID NO: 996109 - DNA, 25 bp, Homo sapien
ccgttcaagaatctttttgcagtct

SEQ ID NO: 996110 - DNA, 25 bp, Homo sapien
tccgttcaagaatctttttgcagtc

SEQ ID NO: 996111 - DNA, 25 bp, Homo sapien
tgctgcacctgtgcaatgtaggtga

SEQ ID NO: 996112 - DNA, 25 bp, Homo sapien
gctgcacctgtgcaatgtaggtgac

SEQ ID NO: 996113 - DNA, 25 bp, Homo sapien
ttctgagaatgtgggaaagtgcatt

SEQ ID NO: 996114 - DNA, 25 bp, Homo sapien
gccttttgtggtacttgcttcgatc

SEQ ID NO: 996115 - DNA, 25 bp, Homo sapien
caaagagaggaagacctaatatttc

SEQ ID NO: 996116 - DNA, 25 bp, Homo sapien
aagggattgaactccactttggcca

SEQ ID NO: 996117 - DNA, 25 bp, Homo sapien
tggtgatggccacaaaagggaagag

SEQ ID NO: 996118 - DNA, 25 bp, Homo sapien
ttggtgatggccacaaaagggaaga

SEQ ID NO: 996119 - DNA, 25 bp, Homo sapien
ctttggtgatggccacaaaagggaa

SEQ ID NO: 996120 - DNA, 25 bp, Homo sapien
tttggtgatggccacaaaagggaag

SEQ ID NO: 996121 - DNA, 25 bp, Homo sapien
ttccccctgatggccgatcctctgc

SEQ ID NO: 996122 - DNA, 25 bp, Homo sapien
agaacgacagcagtctgcagtctgc

SEQ ID NO: 996123 - DNA, 25 bp, Homo sapien
agtctgcattcttccccctgatggc

SEQ ID NO: 996124 - DNA, 25 bp, Homo sapien
aacgacagcagtctgcagtctgcat

SEQ ID NO: 996125 - DNA, 25 bp, Homo sapien
ttcacactcacctttaatccgcaga

SEQ ID NO: 996126 - DNA, 25 bp, Homo sapien
tctgcttgagcggaggacagctgat

SEQ ID NO: 996127 - DNA, 25 bp, Homo sapien
ctgcttgagcggaggacagctgata

SEQ ID NO: 996128 - DNA, 25 bp, Homo sapien
tttatgcacagatgttacttgaagt

SEQ ID NO: 996129 - DNA, 25 bp, Homo sapien
ttatgcacagatgttacttgaagtt

SEQ ID NO: 996130 - DNA, 25 bp, Homo sapien
ctttatgcacagatgttacttgaag

SEQ ID NO: 996131 - DNA, 25 bp, Homo sapien
tgccatcccgcacggactttctaat

SEQ ID NO: 996132 - DNA, 25 bp, Homo sapien
aatactgccatcccgcacggacttt

SEQ ID NO: 996133 - DNA, 25 bp, Homo sapien
tcccgcacggactttctaatttcaa

SEQ ID NO: 996134 - DNA, 25 bp, Homo sapien
ccatcccgcacggactttctaattt

SEQ ID NO: 996135 - DNA, 25 bp, Homo sapien
ggagcaattagctgttcctcagatg

SEQ ID NO: 996136 - DNA, 25 bp, Homo sapien
gactctgggtcattactggcatcat

SEQ ID NO: 996137 - DNA, 25 bp, Homo sapien
cagtttggcctatgagaagttcacc

SEQ ID NO: 996138 - DNA, 25 bp, Homo sapien
tcatttcacactcgggagcagcaaa

SEQ ID NO: 996139 - DNA, 25 bp, Homo sapien
aatacttagtacctcagctgttgcc

SEQ ID NO: 996140 - DNA, 25 bp, Homo sapien
ttaccaatacttagtacctcagctg

SEQ ID NO: 996141 - DNA, 25 bp, Homo sapien
ccaatacttagtacctcagctgttg

SEQ ID NO: 996142 - DNA, 25 bp, Homo sapien
ttttaccaatacttagtacctcagc

SEQ ID NO: 996143 - DNA, 25 bp, Homo sapien
ttagttcggtccactgtcattcggc

SEQ ID NO: 996144 - DNA, 25 bp, Homo sapien
tttataggattagttcggtccactg

SEQ ID NO: 996145 - DNA, 25 bp, Homo sapien
cattcggctaaaatgccttgtatct

SEQ ID NO: 996146 - DNA, 25 bp, Homo sapien
tcggtccactgtcattcggctaaaa

SEQ ID NO: 996147 - DNA, 25 bp, Homo sapien
aaatcacaaatagctgaagccaaaa

SEQ ID NO: 996148 - DNA, 25 bp, Homo sapien
tacagtctctagaagatgagtcaaa

SEQ ID NO: 996149 - DNA, 25 bp, Homo sapien
tctagaagatgagtcaaaatccctc

SEQ ID NO: 996150 - DNA, 25 bp, Homo sapien
agtatacagtctctagaagatgagt

SEQ ID NO: 996151 - DNA, 25 bp, Homo sapien
taaccccaaagagacttgcgcacct

SEQ ID NO: 996152 - DNA, 25 bp, Homo sapien
tatttcagtgaagtgcctgactccc

SEQ ID NO: 996153 - DNA, 25 bp, Homo sapien
tatatttttagcagtacatcccggg

SEQ ID NO: 996154 - DNA, 25 bp, Homo sapien
ccgtgtctaaaagcctccactggaa

SEQ ID NO: 996155 - DNA, 25 bp, Homo sapien
tctagagtgacagccaaaagggtat

SEQ ID NO: 996156 - DNA, 25 bp, Homo sapien
gatgagagcatactgtctcgggctt

SEQ ID NO: 996157 - DNA, 25 bp, Homo sapien
gggtatctcaccctagagtgacagc

SEQ ID NO: 996158 - DNA, 25 bp, Homo sapien
gaatgtgcattcagtgccatagata

SEQ ID NO: 996159 - DNA, 25 bp, Homo sapien
tatctaggtccacttgatgtgtcca

SEQ ID NO: 996160 - DNA, 25 bp, Homo sapien
acaaagcctactgctgatctcacca

SEQ ID NO: 996161 - DNA, 25 bp, Homo sapien
tgagtaagcttaccatctagtgggt

SEQ ID NO: 996162 - DNA, 25 bp, Homo sapien
gatgtgtccaggctcatgatatctc

SEQ ID NO: 996163 - DNA, 25 bp, Homo sapien
tcatactcactaccaggttaccagg

SEQ ID NO: 996164 - DNA, 25 bp, Homo sapien
gatttaccctcacaaatgggagtag

SEQ ID NO: 996165 - DNA, 25 bp, Homo sapien
tagctctgctcagttgctgctcctc

SEQ ID NO: 996166 - DNA, 25 bp, Homo sapien
tggaggcaaggcaccagactggttc

SEQ ID NO: 996167 - DNA, 25 bp, Homo sapien
tcacaggtttagagagaagacccct

SEQ ID NO: 996168 - DNA, 25 bp, Homo sapien
taaagtctgagatagtgcccaaagg

SEQ ID NO: 996169 - DNA, 25 bp, Homo sapien
ttcttcctgaacagaccccgtaggc

SEQ ID NO: 996170 - DNA, 25 bp, Homo sapien
tatttccatgaatcgcttagtgaca

SEQ ID NO: 996171 - DNA, 25 bp, Homo sapien
gacaataatagtcgctggtcccata

SEQ ID NO: 996172 - DNA, 25 bp, Homo sapien
gattgaccacaagggacagactgaa

SEQ ID NO: 996173 - DNA, 25 bp, Homo sapien
gatagttccgtacagatcccctaga

SEQ ID NO: 996174 - DNA, 25 bp, Homo sapien
ggatttagactcactctctgtagga

SEQ ID NO: 996175 - DNA, 25 bp, Homo sapien
tcttaaggcagctgtagacacctgt

SEQ ID NO: 996176 - DNA, 25 bp, Homo sapien
ccttggcgccaaggattccagagca

SEQ ID NO: 996177 - DNA, 25 bp, Homo sapien
actacatttgatcaccagcctggag

SEQ ID NO: 996178 - DNA, 25 bp, Homo sapien
tgagccaaactcacctatcgggaga

SEQ ID NO: 996179 - DNA, 25 bp, Homo sapien
caatagtagtactttaccatgagga

SEQ ID NO: 996180 - DNA, 25 bp, Homo sapien
cacacaaaagataccgagccagctt

SEQ ID NO: 996181 - DNA, 25 bp, Homo sapien
gctcccaaatggcaggtactttctg

SEQ ID NO: 996182 - DNA, 25 bp, Homo sapien
gttgttaggttccattcctcaggca

SEQ ID NO: 996183 - DNA, 25 bp, Homo sapien
caggtactcacatactcgagaggct

SEQ ID NO: 996184 - DNA, 25 bp, Homo sapien
tgtcctcaacacagtcctgtagagt

SEQ ID NO: 996185 - DNA, 25 bp, Homo sapien
gttacaagcaccacatacctttgtg

SEQ ID NO: 996186 - DNA, 25 bp, Homo sapien
ctgtagagtaggaaagtctttgtcc

SEQ ID NO: 996187 - DNA, 25 bp, Homo sapien
gaagggctggaaaatcctcgggcat

SEQ ID NO: 996188 - DNA, 25 bp, Homo sapien
tacggaataccctgtgtccatggag

SEQ ID NO: 996189 - DNA, 25 bp, Homo sapien
tccatggagacttcagggcagacaa

SEQ ID NO: 996190 - DNA, 25 bp, Homo sapien
gcttaggtcctgctagaagaaccca

SEQ ID NO: 996191 - DNA, 25 bp, Homo sapien
agacttctgtctgggccgccagctt

SEQ ID NO: 996192 - DNA, 25 bp, Homo sapien
caggccggtgttacaaaagctcctg

SEQ ID NO: 996193 - DNA, 25 bp, Homo sapien
ccaccaggccggtgttacaaaagct

SEQ ID NO: 996194 - DNA, 25 bp, Homo sapien
taggcaaagtaaccaactaacatca

SEQ ID NO: 996195 - DNA, 25 bp, Homo sapien
gcaggagacgtgttaatcttgtctg

SEQ ID NO: 996196 - DNA, 25 bp, Homo sapien
tatatgcaggagacgtgttaatctt

SEQ ID NO: 996197 - DNA, 25 bp, Homo sapien
tctatatgcaggagacgtgttaatc

SEQ ID NO: 996198 - DNA, 25 bp, Homo sapien
ctatatgcaggagacgtgttaatct

SEQ ID NO: 996199 - DNA, 25 bp, Homo sapien
tcagtagcattaaaggcggaatcaa

SEQ ID NO: 996200 - DNA, 25 bp, Homo sapien
cagtagcattaaaggcggaatcaat

SEQ ID NO: 996201 - DNA, 25 bp, Homo sapien
ttcagtagcattaaaggcggaatca

SEQ ID NO: 996202 - DNA, 25 bp, Homo sapien
agtagcattaaaggcggaatcaatc

SEQ ID NO: 996203 - DNA, 25 bp, Homo sapien
gatgaacgctgacccaatggtgcgg

SEQ ID NO: 996204 - DNA, 25 bp, Homo sapien
aacgctgacccaatggtgcgggacc

SEQ ID NO: 996205 - DNA, 25 bp, Homo sapien
tgaacgctgacccaatggtgcggga

SEQ ID NO: 996206 - DNA, 25 bp, Homo sapien
tgagaaacaaactacttcctgagag

SEQ ID NO: 996207 - DNA, 25 bp, Homo sapien
cagccaactgaacaccccatgtttt

SEQ ID NO: 996208 - DNA, 25 bp, Homo sapien
gcatagaagactacgtacatccact

SEQ ID NO: 996209 - DNA, 25 bp, Homo sapien
ttcacctctacagatgggagcagcc

SEQ ID NO: 996210 - DNA, 25 bp, Homo sapien
cagattaagaaatagaatgttgcca

SEQ ID NO: 996211 - DNA, 25 bp, Homo sapien
tctcctaccaccagatggaacacta

SEQ ID NO: 996212 - DNA, 25 bp, Homo sapien
cctatgtgcacaaacttaaactaca

SEQ ID NO: 996213 - DNA, 25 bp, Homo sapien
ttgaagtcctccatatgttcctcca

SEQ ID NO: 996214 - DNA, 25 bp, Homo sapien
cactgatgcaaactgcccagctgtg

SEQ ID NO: 996215 - DNA, 25 bp, Homo sapien
cctgtggtgaggagagctgacaata

SEQ ID NO: 996216 - DNA, 25 bp, Homo sapien
tacctgccatggctgtactgcaatg

SEQ ID NO: 996217 - DNA, 25 bp, Homo sapien
tatactctgtcagtagactaaaggg

SEQ ID NO: 996218 - DNA, 25 bp, Homo sapien
tacaagcatgggataggaaaactct

SEQ ID NO: 996219 - DNA, 25 bp, Homo sapien
ccagaggaaaagacccaaggcgaat

SEQ ID NO: 996220 - DNA, 25 bp, Homo sapien
gcatgttgaccagttcaagctcacc

SEQ ID NO: 996221 - DNA, 25 bp, Homo sapien
cattagtaatgcttctttcccagga

SEQ ID NO: 996222 - DNA, 25 bp, Homo sapien
gttttaaagagcaagctgactgcct

SEQ ID NO: 996223 - DNA, 25 bp, Homo sapien
caaaagcactagtaccaaagtccct

SEQ ID NO: 996224 - DNA, 25 bp, Homo sapien
tttgaggcactctatgtagtactac

SEQ ID NO: 996225 - DNA, 25 bp, Homo sapien
acaattaagcttggtgcatccatca

SEQ ID NO: 996226 - DNA, 25 bp, Homo sapien
gagctaggtctctttcgctttatct

SEQ ID NO: 996227 - DNA, 25 bp, Homo sapien
gaaggtaagtaaatggagctaggtc

SEQ ID NO: 996228 - DNA, 25 bp, Homo sapien
ggagtaacttccatcaagagaaggt

SEQ ID NO: 996229 - DNA, 25 bp, Homo sapien
caggcctctgagcaaaaacaaccaa

SEQ ID NO: 996230 - DNA, 25 bp, Homo sapien
caaatatttgtctctcagtgacctc

SEQ ID NO: 996231 - DNA, 25 bp, Homo sapien
cagtgacctcaccttctttaacttt

SEQ ID NO: 996232 - DNA, 25 bp, Homo sapien
tttgctcagcggaaaaatggagacc

SEQ ID NO: 996233 - DNA, 25 bp, Homo sapien
caatgctgtacatgtgcgaagtggg

SEQ ID NO: 996234 - DNA, 25 bp, Homo sapien
tttggcttatttagagcatggtatc

SEQ ID NO: 996235 - DNA, 25 bp, Homo sapien
cttatttagagcatggtatcctgga

SEQ ID NO: 996236 - DNA, 25 bp, Homo sapien
tagagcatggtatcctggaatctaa

SEQ ID NO: 996237 - DNA, 25 bp, Homo sapien
tggtatcctggaatctaattttaaa

SEQ ID NO: 996238 - DNA, 25 bp, Homo sapien
ttgtcaggcaacaatgattgctggg

SEQ ID NO: 996239 - DNA, 25 bp, Homo sapien
gctgggtgagtaccgggctctacct

SEQ ID NO: 996240 - DNA, 25 bp, Homo sapien
caacaatgattgctgggtgagtacc

SEQ ID NO: 996241 - DNA, 25 bp, Homo sapien
ctctgtgacttttgtcaggcaacaa

SEQ ID NO: 996242 - DNA, 25 bp, Homo sapien
tacggaataccctgtgtccatggag

SEQ ID NO: 996243 - DNA, 25 bp, Homo sapien
tccatggagacttcagggcagacaa

SEQ ID NO: 996244 - DNA, 25 bp, Homo sapien
gaagggctggaaaatcctcgggcat

SEQ ID NO: 996245 - DNA, 25 bp, Homo sapien
gcttaggtcctgctagaagaaccca

SEQ ID NO: 996246 - DNA, 25 bp, Homo sapien
tgaaggaccccgagcctgtgctccg

SEQ ID NO: 996247 - DNA, 25 bp, Homo sapien
ggccctgaaggaccccgagcctgtg

SEQ ID NO: 996248 - DNA, 25 bp, Homo sapien
tgtgctccgcctctgggatgagatg

SEQ ID NO: 996249 - DNA, 25 bp, Homo sapien
cctgagaggattgtggctgatgtgc

SEQ ID NO: 996250 - DNA, 25 bp, Homo sapien
gaggaatgagccaacaagattgcat

SEQ ID NO: 996251 - DNA, 25 bp, Homo sapien
tatatttaagaacgcacatgtcacg

SEQ ID NO: 996252 - DNA, 25 bp, Homo sapien
gcacatacccaggatgaaggtaacg

SEQ ID NO: 996253 - DNA, 25 bp, Homo sapien
acaggccttcgggtgggagccattc

SEQ ID NO: 996254 - DNA, 25 bp, Homo sapien
gactcacatggcaaatgtcatagag

SEQ ID NO: 996255 - DNA, 25 bp, Homo sapien
catggcaaatgtcatagagttcagg

SEQ ID NO: 996256 - DNA, 25 bp, Homo sapien
attttcagactcacatggcaaatgt

SEQ ID NO: 996257 - DNA, 25 bp, Homo sapien
caaatgtcatagagttcaggtatca

SEQ ID NO: 996258 - DNA, 25 bp, Homo sapien
tccagaggcatgagactggagctgg

SEQ ID NO: 996259 - DNA, 25 bp, Homo sapien
ccagaggcatgagactggagctggt

SEQ ID NO: 996260 - DNA, 25 bp, Homo sapien
caggtatatcttgtgcaaaggaagc

SEQ ID NO: 996261 - DNA, 25 bp, Homo sapien
caaaggaagctttacaggatgcaaa

SEQ ID NO: 996262 - DNA, 25 bp, Homo sapien
tacatctgggtacatggttttcgac

SEQ ID NO: 996263 - DNA, 25 bp, Homo sapien
gtctttgacggaacctacatctggg

SEQ ID NO: 996264 - DNA, 25 bp, Homo sapien
catgtgttacttcagagctggaagt

SEQ ID NO: 996265 - DNA, 25 bp, Homo sapien
atgtgttacttcagagctggaagtg

SEQ ID NO: 996266 - DNA, 25 bp, Homo sapien
tgtgttacttcagagctggaagtgc

SEQ ID NO: 996267 - DNA, 25 bp, Homo sapien
gcatgtgttacttcagagctggaag

SEQ ID NO: 996268 - DNA, 25 bp, Homo sapien
gagactctcaaggagttggttccct

SEQ ID NO: 996269 - DNA, 25 bp, Homo sapien
ggttccctctggctctattgttggc

SEQ ID NO: 996270 - DNA, 25 bp, Homo sapien
tctggctctattgttggctgaggct

SEQ ID NO: 996271 - DNA, 25 bp, Homo sapien
ccccagccctatattccatagtagg

SEQ ID NO: 996272 - DNA, 25 bp, Homo sapien
caacttagccccagagacacattac

SEQ ID NO: 996273 - DNA, 25 bp, Homo sapien
tattttcctggctatacatatattg

SEQ ID NO: 996274 - DNA, 25 bp, Homo sapien
taattatagagtattcggaaaggac

SEQ ID NO: 996275 - DNA, 25 bp, Homo sapien
tatttgaagatgaaaccaattacca

SEQ ID NO: 996276 - DNA, 25 bp, Homo sapien
gcttgctttcctgcaactagatagc

SEQ ID NO: 996277 - DNA, 25 bp, Homo sapien
gctttcctgcaactagatagcccca

SEQ ID NO: 996278 - DNA, 25 bp, Homo sapien
ttgctttcctgcaactagatagccc

SEQ ID NO: 996279 - DNA, 25 bp, Homo sapien
agcttgctttcctgcaactagatag

SEQ ID NO: 996280 - DNA, 25 bp, Homo sapien
gatttcttcagagacgccagtgccc

SEQ ID NO: 996281 - DNA, 25 bp, Homo sapien
gatctcctggtagttaggtctggaa

SEQ ID NO: 996282 - DNA, 25 bp, Homo sapien
acaggtcctggtaccaaaaggctag

SEQ ID NO: 996283 - DNA, 25 bp, Homo sapien
tactgatttaactaggctggccgtt

SEQ ID NO: 996284 - DNA, 25 bp, Homo sapien
caaactgagtggaaaatcacctgta

SEQ ID NO: 996285 - DNA, 25 bp, Homo sapien
tcacctgtattgcaatggaagcttg

SEQ ID NO: 996286 - DNA, 25 bp, Homo sapien
tctattcagctttggccacaggagg

SEQ ID NO: 996287 - DNA, 25 bp, Homo sapien
gatttgtggtggttccaaactgagt

SEQ ID NO: 996288 - DNA, 25 bp, Homo sapien
catggagtgggatcttgggcacctt

SEQ ID NO: 996289 - DNA, 25 bp, Homo sapien
gcattgatacagtaaacccctaggg

SEQ ID NO: 996290 - DNA, 25 bp, Homo sapien
ggtctctgtccccataggtgtcagt

SEQ ID NO: 996291 - DNA, 25 bp, Homo sapien
gggaacctggagagcaccttgtcag

SEQ ID NO: 996292 - DNA, 25 bp, Homo sapien
tgtgcctaacactgagactatttgt

SEQ ID NO: 996293 - DNA, 25 bp, Homo sapien
tacagccatgggaagattgtttttg

SEQ ID NO: 996294 - DNA, 25 bp, Homo sapien
ccatgggaagattgtttttgaagat

SEQ ID NO: 996295 - DNA, 25 bp, Homo sapien
atttgtccctttaagcagcccctct

SEQ ID NO: 996296 - DNA, 25 bp, Homo sapien
tctgacgagcccactgtaagggact

SEQ ID NO: 996297 - DNA, 25 bp, Homo sapien
gattcacagaagagtgccccgtggc

SEQ ID NO: 996298 - DNA, 25 bp, Homo sapien
tgacactagggtgagcttcgcccag

SEQ ID NO: 996299 - DNA, 25 bp, Homo sapien
caaggcagccctgaagtagcggtga

SEQ ID NO: 996300 - DNA, 25 bp, Homo sapien
tctacaagaactctaacaagaaccg

SEQ ID NO: 996301 - DNA, 25 bp, Homo sapien
caatatggttttagtccccaggatg

SEQ ID NO: 996302 - DNA, 25 bp, Homo sapien
tatgcagtcaaccacctcatttggt

SEQ ID NO: 996303 - DNA, 25 bp, Homo sapien
caagaaccgttacatttcgtccact

SEQ ID NO: 996304 - DNA, 25 bp, Homo sapien
tttcttaatactgctcgcgggaaag

SEQ ID NO: 996305 - DNA, 25 bp, Homo sapien
cctcttcccttcctatccgccacct

SEQ ID NO: 996306 - DNA, 25 bp, Homo sapien
ttttcttaatactgctcgcgggaaa

SEQ ID NO: 996307 - DNA, 25 bp, Homo sapien
gacaagcgacgtctttcacttctgg

SEQ ID NO: 996308 - DNA, 25 bp, Homo sapien
tccggaagcctgagctcaagatcgt

SEQ ID NO: 996309 - DNA, 25 bp, Homo sapien
agccgagagagatccggaagcctga

SEQ ID NO: 996310 - DNA, 25 bp, Homo sapien
atcgtgctagctacctcccagaaga

SEQ ID NO: 996311 - DNA, 25 bp, Homo sapien
caagttcaaataggagggagaaacg

SEQ ID NO: 996312 - DNA, 25 bp, Homo sapien
tgacccagcattccgcaacgaaatg

SEQ ID NO: 996313 - DNA, 25 bp, Homo sapien
caaagacctagacctaagaagggag

SEQ ID NO: 996314 - DNA, 25 bp, Homo sapien
tgagacaaactgcaaatagcaccag

SEQ ID NO: 996315 - DNA, 25 bp, Homo sapien
tgacggacaggctctgcagtggcgc

SEQ ID NO: 996316 - DNA, 25 bp, Homo sapien
tagggactgacggacaggctctgca

SEQ ID NO: 996317 - DNA, 25 bp, Homo sapien
gactgacggacaggctctgcagtgg

SEQ ID NO: 996318 - DNA, 25 bp, Homo sapien
cctagggactgacggacaggctctg

SEQ ID NO: 996319 - DNA, 25 bp, Homo sapien
cccggagggatgctttggcctgcat

SEQ ID NO: 996320 - DNA, 25 bp, Homo sapien
cctaccaggtgagcgaccccgcctt

SEQ ID NO: 996321 - DNA, 25 bp, Homo sapien
gtgctgcgggctctcggggcgccta

SEQ ID NO: 996322 - DNA, 25 bp, Homo sapien
gccttcccggagggatgctttggcc

SEQ ID NO: 996323 - DNA, 25 bp, Homo sapien
gagcaacaagctcatagtgccagtt

SEQ ID NO: 996324 - DNA, 25 bp, Homo sapien
tatgtcatccaaaacaaagtctccc

SEQ ID NO: 996325 - DNA, 25 bp, Homo sapien
taaaggtcactctaacattacggac

SEQ ID NO: 996326 - DNA, 25 bp, Homo sapien
tttccctagctgcaatgaacaacag

SEQ ID NO: 996327 - DNA, 25 bp, Homo sapien
gagagggctcaatcttacaactgga

SEQ ID NO: 996328 - DNA, 25 bp, Homo sapien
tagacaagcttttcaggtgcgcaag

SEQ ID NO: 996329 - DNA, 25 bp, Homo sapien
tattgggccctctcaatctggagac

SEQ ID NO: 996330 - DNA, 25 bp, Homo sapien
taaatacttcttactgggagcctag

SEQ ID NO: 996331 - DNA, 25 bp, Homo sapien
caagagctatctgggtctcacggta

SEQ ID NO: 996332 - DNA, 25 bp, Homo sapien
tacaactcgtaggtgaaagaaccag

SEQ ID NO: 996333 - DNA, 25 bp, Homo sapien
gatttgaacacagggaagctacttg

SEQ ID NO: 996334 - DNA, 25 bp, Homo sapien
gagagctaaccctacctagttctgg

SEQ ID NO: 996335 - DNA, 25 bp, Homo sapien
agcagacgaacaagatgcagaaaca

SEQ ID NO: 996336 - DNA, 25 bp, Homo sapien
ctgaaagcagacgaacaagatgcag

SEQ ID NO: 996337 - DNA, 25 bp, Homo sapien
ctgggctatgacctatgatggtgaa

SEQ ID NO: 996338 - DNA, 25 bp, Homo sapien
gctatgacctatgatggtgaatcca

SEQ ID NO: 996339 - DNA, 25 bp, Homo sapien
gcagaggtagaggagtgaatcccca

SEQ ID NO: 996340 - DNA, 25 bp, Homo sapien
gcaatgaactaagaggacaaggcca

SEQ ID NO: 996341 - DNA, 25 bp, Homo sapien
tagaggagtgaatccccacctctgc

SEQ ID NO: 996342 - DNA, 25 bp, Homo sapien
gtcggtaataaggtatagggcaatg

SEQ ID NO: 996343 - DNA, 25 bp, Homo sapien
tgcacttggtgggagaacatcttga

SEQ ID NO: 996344 - DNA, 25 bp, Homo sapien
atctgtgtgaggaggtacaatttca

SEQ ID NO: 996345 - DNA, 25 bp, Homo sapien
gaggaggtacaatttcataatattt

SEQ ID NO: 996346 - DNA, 25 bp, Homo sapien
caggcctcaaagaacggagccaggt

SEQ ID NO: 996347 - DNA, 25 bp, Homo sapien
ctgtgggcaagttggtctggttcct

SEQ ID NO: 996348 - DNA, 25 bp, Homo sapien
gtcaacattttctgtgggcaagttg

SEQ ID NO: 996349 - DNA, 25 bp, Homo sapien
attttctgtgggcaagttggtctgg

SEQ ID NO: 996350 - DNA, 25 bp, Homo sapien
aacattttctgtgggcaagttggtc

SEQ ID NO: 996351 - DNA, 25 bp, Homo sapien
aagagacggatgaatggctcccaac

SEQ ID NO: 996352 - DNA, 25 bp, Homo sapien
acggatgaatggctcccaaccaaag

SEQ ID NO: 996353 - DNA, 25 bp, Homo sapien
gagacggatgaatggctcccaacca

SEQ ID NO: 996354 - DNA, 25 bp, Homo sapien
ggatgaatggctcccaaccaaaggc

SEQ ID NO: 996355 - DNA, 25 bp, Homo sapien
cattaaacaactggtcaaaggcaag

SEQ ID NO: 996356 - DNA, 25 bp, Homo sapien
cagggagggaactaggcattaaaca

SEQ ID NO: 996357 - DNA, 25 bp, Homo sapien
ggaactgatccaggcattgcaggga

SEQ ID NO: 996358 - DNA, 25 bp, Homo sapien
aatgaataagagagcctccagcagg

SEQ ID NO: 996359 - DNA, 25 bp, Homo sapien
gactcttggattgcctacataatgg

SEQ ID NO: 996360 - DNA, 25 bp, Homo sapien
ttgcctacataatgggggctctgag

SEQ ID NO: 996361 - DNA, 25 bp, Homo sapien
tcagtgaggactcttggattgccta

SEQ ID NO: 996362 - DNA, 25 bp, Homo sapien
ggctctgaggcacggccaaggcata

SEQ ID NO: 996363 - DNA, 25 bp, Homo sapien
gcaatattggcacggcttcgaggaa

SEQ ID NO: 996364 - DNA, 25 bp, Homo sapien
cacattgggacccttgctcaggtag

SEQ ID NO: 996365 - DNA, 25 bp, Homo sapien
gaggaatgcccaagaccgtctcatg

SEQ ID NO: 996366 - DNA, 25 bp, Homo sapien
gtaaatacgtttccagtgcggtcca

SEQ ID NO: 996367 - DNA, 25 bp, Homo sapien
gagggaagagagagttagggtcctc

SEQ ID NO: 996368 - DNA, 25 bp, Homo sapien
aagagagagttagggtcctccccat

SEQ ID NO: 996369 - DNA, 25 bp, Homo sapien
ctggaaaatgcagaaggagggaaga

SEQ ID NO: 996370 - DNA, 25 bp, Homo sapien
ggaaaatgcagaaggagggaagaga

SEQ ID NO: 996371 - DNA, 25 bp, Homo sapien
agcatgcacagagggtttgcttgga

SEQ ID NO: 996372 - DNA, 25 bp, Homo sapien
cagagggtttgcttggagcacccac

SEQ ID NO: 996373 - DNA, 25 bp, Homo sapien
cacagagggtttgcttggagcaccc

SEQ ID NO: 996374 - DNA, 25 bp, Homo sapien
tgcacagagggtttgcttggagcac

SEQ ID NO: 996375 - DNA, 25 bp, Homo sapien
gtcggcaacaatcctctgaggcagg

SEQ ID NO: 996376 - DNA, 25 bp, Homo sapien
cactgagatctgcacgtcggcaaca

SEQ ID NO: 996377 - DNA, 25 bp, Homo sapien
aagatttgcggtcggcacggtcaga

SEQ ID NO: 996378 - DNA, 25 bp, Homo sapien
agaatgatgttgtccgtggccagct

SEQ ID NO: 996379 - DNA, 25 bp, Homo sapien
ctaggaagagagaccatggagcttg

SEQ ID NO: 996380 - DNA, 25 bp, Homo sapien
tacgagtgggcctcggaaaagcttg

SEQ ID NO: 996381 - DNA, 25 bp, Homo sapien
cacaattatatagaggagtccaccc

SEQ ID NO: 996382 - DNA, 25 bp, Homo sapien
caagcagcaccggttaattacgagt

SEQ ID NO: 996383 - DNA, 25 bp, Homo sapien
ccccagaggcacgtgatcgattttg

SEQ ID NO: 996384 - DNA, 25 bp, Homo sapien
ccaggtatgtagagcccagtactca

SEQ ID NO: 996385 - DNA, 25 bp, Homo sapien
gagacttctataatttgccttccag

SEQ ID NO: 996386 - DNA, 25 bp, Homo sapien
cagtactcatccagcaatatctggt

SEQ ID NO: 996387 - DNA, 25 bp, Homo sapien
gacttctataatttgccttccaggt

SEQ ID NO: 996388 - DNA, 25 bp, Homo sapien
gactaacagagagaggtcgcttcca

SEQ ID NO: 996389 - DNA, 25 bp, Homo sapien
ttctctcgggttgctactggaagcc

SEQ ID NO: 996390 - DNA, 25 bp, Homo sapien
tcactggtcagattgggctcgatgc

SEQ ID NO: 996391 - DNA, 25 bp, Homo sapien
cacagacatgtaggcagggatctct

SEQ ID NO: 996392 - DNA, 25 bp, Homo sapien
taatatgtttaataaaccctggcta

SEQ ID NO: 996393 - DNA, 25 bp, Homo sapien
tttgaactcctttgcagaagcccaa

SEQ ID NO: 996394 - DNA, 25 bp, Homo sapien
gactaactattctggttgatcttcc

SEQ ID NO: 996395 - DNA, 25 bp, Homo sapien
tgggctaaaatgatacgagtcatct

SEQ ID NO: 996396 - DNA, 25 bp, Homo sapien
tggattaactatgccaactgttggg

SEQ ID NO: 996397 - DNA, 25 bp, Homo sapien
acctctctaggctttggctcatggg

SEQ ID NO: 996398 - DNA, 25 bp, Homo sapien
gacactgggaccatagccaccatta

SEQ ID NO: 996399 - DNA, 25 bp, Homo sapien
tgttagccttggagcaacctgaaga

SEQ ID NO: 996400 - DNA, 25 bp, Homo sapien
cagagccctcgaggattttggccaa

SEQ ID NO: 996401 - DNA, 25 bp, Homo sapien
ccactgcgttcaggagaaagggcgt

SEQ ID NO: 996402 - DNA, 25 bp, Homo sapien
tgtcacaccattcataagggcctcg

SEQ ID NO: 996403 - DNA, 25 bp, Homo sapien
acatggaacagcatcttcgggtaca

SEQ ID NO: 996404 - DNA, 25 bp, Homo sapien
ctggttttccctttgagagatgcgt

SEQ ID NO: 996405 - DNA, 25 bp, Homo sapien
cccatatcccgtatggtagtgtgat

SEQ ID NO: 996406 - DNA, 25 bp, Homo sapien
gcgccatggctcgtaaacctggttt

SEQ ID NO: 996407 - DNA, 25 bp, Homo sapien
tgcaccacccatatcccgtatggta

SEQ ID NO: 996408 - DNA, 25 bp, Homo sapien
ccagcagaaatacggacacaaaggg

SEQ ID NO: 996409 - DNA, 25 bp, Homo sapien
gcgggacccaagcgcagaggaaaat

SEQ ID NO: 996410 - DNA, 25 bp, Homo sapien
gggattctctgtccccgatgatttc

SEQ ID NO: 996411 - DNA, 25 bp, Homo sapien
tggagaggaggagcaatgcggcagg

SEQ ID NO: 996412 - DNA, 25 bp, Homo sapien
caccctgcgatttccacgggggcag

SEQ ID NO: 996413 - DNA, 25 bp, Homo sapien
taccagtgactgggcgaccgagccg

SEQ ID NO: 996414 - DNA, 25 bp, Homo sapien
caggtcaccctgcgatttccacggg

SEQ ID NO: 996415 - DNA, 25 bp, Homo sapien
cgaccgagccgggatttgggagcgg

SEQ ID NO: 996416 - DNA, 25 bp, Homo sapien
gctccgcggcaggttttatgtaaag

SEQ ID NO: 996417 - DNA, 25 bp, Homo sapien
ccatgtagataggtgagctccgcgg

SEQ ID NO: 996418 - DNA, 25 bp, Homo sapien
gaatcaatgtctggtatacggtaag

SEQ ID NO: 996419 - DNA, 25 bp, Homo sapien
gagctacactttaccaacggtgtga

SEQ ID NO: 996420 - DNA, 25 bp, Homo sapien
ggactacagatgtgcgcgccatcat

SEQ ID NO: 996421 - DNA, 25 bp, Homo sapien
tcctgcttccgctcccaaagtactg

SEQ ID NO: 996422 - DNA, 25 bp, Homo sapien
cgccatcatgcccagggagtttttg

SEQ ID NO: 996423 - DNA, 25 bp, Homo sapien
ctacagatgtgcgcgccatcatgcc

SEQ ID NO: 996424 - DNA, 25 bp, Homo sapien
actcttgggccaggtagtgactaga

SEQ ID NO: 996425 - DNA, 25 bp, Homo sapien
gaggaacacaaaggcgacttctggg

SEQ ID NO: 996426 - DNA, 25 bp, Homo sapien
tcactgaaggacacgtactggaatc

SEQ ID NO: 996427 - DNA, 25 bp, Homo sapien
tctatcagctgggtaccatcaacag

SEQ ID NO: 996428 - DNA, 25 bp, Homo sapien
taaatgggctagtcctaacaaagcc

SEQ ID NO: 996429 - DNA, 25 bp, Homo sapien
gaaaatccctgacatatgaagaagc

SEQ ID NO: 996430 - DNA, 25 bp, Homo sapien
agcaatggagtttatgccccaacaa

SEQ ID NO: 996431 - DNA, 25 bp, Homo sapien
tcagttgacacataagaaaatccct

SEQ ID NO: 996432 - DNA, 25 bp, Homo sapien
gatagcaaaatctcgtaagtacatt

SEQ ID NO: 996433 - DNA, 25 bp, Homo sapien
cttcttccagagactagtaaatgaa

SEQ ID NO: 996434 - DNA, 25 bp, Homo sapien
gacattattgcagtcccaaaagaca

SEQ ID NO: 996435 - DNA, 25 bp, Homo sapien
tacacccagcataactttgatagca

SEQ ID NO: 996436 - DNA, 25 bp, Homo sapien
gatatttgcaaatcgctgatacaag

SEQ ID NO: 996437 - DNA, 25 bp, Homo sapien
gatgggaacataaatcgatacagct

SEQ ID NO: 996438 - DNA, 25 bp, Homo sapien
gtgcaggtgcatcacaaaatatggt

SEQ ID NO: 996439 - DNA, 25 bp, Homo sapien
gatacctatatccatttcacgtggc

SEQ ID NO: 996440 - DNA, 25 bp, Homo sapien
ttggaccaatatatcatgacagagg

SEQ ID NO: 996441 - DNA, 25 bp, Homo sapien
gaagaatctcatcgacctaaaactg

SEQ ID NO: 996442 - DNA, 25 bp, Homo sapien
tatgtgaagatcaagattggaccaa

SEQ ID NO: 996443 - DNA, 25 bp, Homo sapien
actctacgcacattataactcaggg

SEQ ID NO: 996444 - DNA, 25 bp, Homo sapien
gaccctacgcctagccttgagatga

SEQ ID NO: 996445 - DNA, 25 bp, Homo sapien
gcaggctttaaagtggccccgataa

SEQ ID NO: 996446 - DNA, 25 bp, Homo sapien
gctatatactctagggaagctccca

SEQ ID NO: 996447 - DNA, 25 bp, Homo sapien
tgttgatacagcttgtgagagaccc

SEQ ID NO: 996448 - DNA, 25 bp, Homo sapien
ttgggccaaactagcggccagctct

SEQ ID NO: 996449 - DNA, 25 bp, Homo sapien
cttcttccgttgcaggttgggccaa

SEQ ID NO: 996450 - DNA, 25 bp, Homo sapien
tgtttaccagggaactgtatcaccc

SEQ ID NO: 996451 - DNA, 25 bp, Homo sapien
ttggctggtcagctagacagacaca

SEQ ID NO: 996452 - DNA, 25 bp, Homo sapien
cctcgagggttcctgctagctcaga

SEQ ID NO: 996453 - DNA, 25 bp, Homo sapien
taacggagacaagctagcctagaag

SEQ ID NO: 996454 - DNA, 25 bp, Homo sapien
cccagctggcgagatcaaatcgcct

SEQ ID NO: 996455 - DNA, 25 bp, Homo sapien
ctagaagaatgcaagcccccagctg

SEQ ID NO: 996456 - DNA, 25 bp, Homo sapien
gcctcggtcaccgcgggcctctcct

SEQ ID NO: 996457 - DNA, 25 bp, Homo sapien
tcggtcaccgcgggcctctcctggt

SEQ ID NO: 996458 - DNA, 25 bp, Homo sapien
cctggtccagagtctacgctgaacc

SEQ ID NO: 996459 - DNA, 25 bp, Homo sapien
tggtccagagtctacgctgaacccc

SEQ ID NO: 996460 - DNA, 25 bp, Homo sapien
cgggctcgaaactacaggacttgga

SEQ ID NO: 996461 - DNA, 25 bp, Homo sapien
cagtagcaacctgctaggagcggga

SEQ ID NO: 996462 - DNA, 25 bp, Homo sapien
gctgttccctgcagcgcgggttcgg

SEQ ID NO: 996463 - DNA, 25 bp, Homo sapien
ttggaaagtcttaggcggagactgc

SEQ ID NO: 996464 - DNA, 25 bp, Homo sapien
attgataggtatgacttactactac

SEQ ID NO: 996465 - DNA, 25 bp, Homo sapien
gataggtatgacttactactaccat

SEQ ID NO: 996466 - DNA, 25 bp, Homo sapien
tgacttactactaccatttgttaat

SEQ ID NO: 996467 - DNA, 25 bp, Homo sapien
gtatgacttactactaccatttgtt

SEQ ID NO: 996468 - DNA, 25 bp, Homo sapien
gacgcgctcaaccacaatttttctt

SEQ ID NO: 996469 - DNA, 25 bp, Homo sapien
aggggtgagccgacgcgctcaacca

SEQ ID NO: 996470 - DNA, 25 bp, Homo sapien
tgagccgacgcgctcaaccacaatt

SEQ ID NO: 996471 - DNA, 25 bp, Homo sapien
gccgacgcgctcaaccacaattttt

SEQ ID NO: 996472 - DNA, 25 bp, Homo sapien
ctcttcaatgacgtacactttgtct

SEQ ID NO: 996473 - DNA, 25 bp, Homo sapien
tttctcttcaatgacgtacactttg

SEQ ID NO: 996474 - DNA, 25 bp, Homo sapien
tctcttcaatgacgtacactttgtc

SEQ ID NO: 996475 - DNA, 25 bp, Homo sapien
ttctcttcaatgacgtacactttgt

SEQ ID NO: 996476 - DNA, 25 bp, Homo sapien
gatatttgcatctaccacctcttag

SEQ ID NO: 996477 - DNA, 25 bp, Homo sapien
ttagacaatagctgactttcatggg

SEQ ID NO: 996478 - DNA, 25 bp, Homo sapien
gacctcttgtatgcagttttttctc

SEQ ID NO: 996479 - DNA, 25 bp, Homo sapien
ttggatggccccaaagacctcttgt

SEQ ID NO: 996480 - DNA, 25 bp, Homo sapien
cttcttcttcttcgaagaacaccaa

SEQ ID NO: 996481 - DNA, 25 bp, Homo sapien
tcttcttcttcgaagaacaccaaaa

SEQ ID NO: 996482 - DNA, 25 bp, Homo sapien
tcttcttcgaagaacaccaaaacat

SEQ ID NO: 996483 - DNA, 25 bp, Homo sapien
ttcttcttcgaagaacaccaaaaca

SEQ ID NO: 996484 - DNA, 25 bp, Homo sapien
ggccctctcctcgtggtgccctttg

SEQ ID NO: 996485 - DNA, 25 bp, Homo sapien
gccctctcctcgtggtgccctttga

SEQ ID NO: 996486 - DNA, 25 bp, Homo sapien
ctctcctcgtggtgccctttgagat

SEQ ID NO: 996487 - DNA, 25 bp, Homo sapien
ctcctcgtggtgccctttgagatgt

SEQ ID NO: 996488 - DNA, 25 bp, Homo sapien
gagggttcagcacctgattccaaag

SEQ ID NO: 996489 - DNA, 25 bp, Homo sapien
agggttcagcacctgattccaaagg

SEQ ID NO: 996490 - DNA, 25 bp, Homo sapien
cagagggttcagcacctgattccaa

SEQ ID NO: 996491 - DNA, 25 bp, Homo sapien
agagggttcagcacctgattccaaa

SEQ ID NO: 996492 - DNA, 25 bp, Homo sapien
caaagaagaactccaccacacagag

SEQ ID NO: 996493 - DNA, 25 bp, Homo sapien
agagtgaccctaccaggatgaacat

SEQ ID NO: 996494 - DNA, 25 bp, Homo sapien
aatggcgttgccaaagaagaactcc

SEQ ID NO: 996495 - DNA, 25 bp, Homo sapien
gcgttgccaaagaagaactccacca

SEQ ID NO: 996496 - DNA, 25 bp, Homo sapien
ccacctggttgagccaggtgtcagc

SEQ ID NO: 996497 - DNA, 25 bp, Homo sapien
atgaccacctggttgagccaggtgt

SEQ ID NO: 996498 - DNA, 25 bp, Homo sapien
gaccacctggttgagccaggtgtca

SEQ ID NO: 996499 - DNA, 25 bp, Homo sapien
accacctggttgagccaggtgtcag

SEQ ID NO: 996500 - DNA, 25 bp, Homo sapien
ggttgatttcatgagcccactgaag

SEQ ID NO: 996501 - DNA, 25 bp, Homo sapien
taaatggaccagagccaggaggaag

SEQ ID NO: 996502 - DNA, 25 bp, Homo sapien
ctaaatggaccagagccaggaggaa

SEQ ID NO: 996503 - DNA, 25 bp, Homo sapien
aaaaaagcacatggtgcttttctag

SEQ ID NO: 996504 - DNA, 25 bp, Homo sapien
ggtgcttttctagttcgcaagatcc

SEQ ID NO: 996505 - DNA, 25 bp, Homo sapien
aaaaagcacatggtgcttttctagt

SEQ ID NO: 996506 - DNA, 25 bp, Homo sapien
tgcttttctagttcgcaagatccac

SEQ ID NO: 996507 - DNA, 25 bp, Homo sapien
cagatgagttccaaggctattccaa

SEQ ID NO: 996508 - DNA, 25 bp, Homo sapien
tccagacagatgagttccaaggcta

SEQ ID NO: 996509 - DNA, 25 bp, Homo sapien
agaagtatgagagtgtgcagactgt

SEQ ID NO: 996510 - DNA, 25 bp, Homo sapien
ggaagaagtatgagagtgtgcagac

SEQ ID NO: 996511 - DNA, 25 bp, Homo sapien
tgaattctgtgaccattgattggtg

SEQ ID NO: 996512 - DNA, 25 bp, Homo sapien
gatgaattctgtgaccattgattgg

SEQ ID NO: 996513 - DNA, 25 bp, Homo sapien
caggatgaattctgtgaccattgat

SEQ ID NO: 996514 - DNA, 25 bp, Homo sapien
ggatgaattctgtgaccattgattg

SEQ ID NO: 996515 - DNA, 25 bp, Homo sapien
gttgtgtcaccagacaagatcccct

SEQ ID NO: 996516 - DNA, 25 bp, Homo sapien
tctgctaactgcctagtcctgcaca

SEQ ID NO: 996517 - DNA, 25 bp, Homo sapien
attctcagaagcgttgtgtcaccag

SEQ ID NO: 996518 - DNA, 25 bp, Homo sapien
ctcagttgttctggatacaggcacc

SEQ ID NO: 996519 - DNA, 25 bp, Homo sapien
ggaagagaagcacatcaccttaata

SEQ ID NO: 996520 - DNA, 25 bp, Homo sapien
tcccaagcagatagaaatgcatgca

SEQ ID NO: 996521 - DNA, 25 bp, Homo sapien
gtgtttacatcatccacagctgggc

SEQ ID NO: 996522 - DNA, 25 bp, Homo sapien
tgggcctctaaagcttagaacagtg

SEQ ID NO: 996523 - DNA, 25 bp, Homo sapien
tgatgaggccatccgtcctgttcat

SEQ ID NO: 996524 - DNA, 25 bp, Homo sapien
gcccagactttagtgttatgtcaca

SEQ ID NO: 996525 - DNA, 25 bp, Homo sapien
tgacctctcagtgtagagcacatga

SEQ ID NO: 996526 - DNA, 25 bp, Homo sapien
catgaactgaaagctataatctgtc

SEQ ID NO: 996527 - DNA, 25 bp, Homo sapien
tcaatggttacctgactgtgcagtg

SEQ ID NO: 996528 - DNA, 25 bp, Homo sapien
aagcttatcctagatggagcaggag

SEQ ID NO: 996529 - DNA, 25 bp, Homo sapien
tcataatccatgcatgtagtgtggg

SEQ ID NO: 996530 - DNA, 25 bp, Homo sapien
gaaaaaggtgttcccacatgaagct

SEQ ID NO: 996531 - DNA, 25 bp, Homo sapien
tagtgtgggttaatggtactgacca

SEQ ID NO: 996532 - DNA, 25 bp, Homo sapien
gaaaaaattcttggcaggtgtatta

SEQ ID NO: 996533 - DNA, 25 bp, Homo sapien
caccaaatagcttgtgtcagattca

SEQ ID NO: 996534 - DNA, 25 bp, Homo sapien
tacaatctggccaaaatatagaaaa

SEQ ID NO: 996535 - DNA, 25 bp, Homo sapien
tagaaagaaggttgtatagctttac

SEQ ID NO: 996536 - DNA, 25 bp, Homo sapien
tgaattttaccaatacagggcaggc

SEQ ID NO: 996537 - DNA, 25 bp, Homo sapien
ttcttgtatgctgtgtacaagaaac

SEQ ID NO: 996538 - DNA, 25 bp, Homo sapien
gggcaggccaaattaacaggatgaa

SEQ ID NO: 996539 - DNA, 25 bp, Homo sapien
tttaccaatacagggcaggccaaat

SEQ ID NO: 996540 - DNA, 25 bp, Homo sapien
aacttggtgcaacgctttctggact

SEQ ID NO: 996541 - DNA, 25 bp, Homo sapien
gaagcacgaagtttggaggcaacct

SEQ ID NO: 996542 - DNA, 25 bp, Homo sapien
cagctttgagaaggcggcagcagaa

SEQ ID NO: 996543 - DNA, 25 bp, Homo sapien
tcggctttacgtgggaagagagcaa

SEQ ID NO: 996544 - DNA, 25 bp, Homo sapien
aaagatcagccgtgccactgaaggg

SEQ ID NO: 996545 - DNA, 25 bp, Homo sapien
tgtagtccctcaccattgggtcggc

SEQ ID NO: 996546 - DNA, 25 bp, Homo sapien
tcggccttcatctgaaacgagagct

SEQ ID NO: 996547 - DNA, 25 bp, Homo sapien
catgataattggttggcagctcgga

SEQ ID NO: 996548 - DNA, 25 bp, Homo sapien
aacatgaaactgtgacatatcaaag

SEQ ID NO: 996549 - DNA, 25 bp, Homo sapien
aactggataaacatgaaactgtgac

SEQ ID NO: 996550 - DNA, 25 bp, Homo sapien
tggataaacatgaaactgtgacata

SEQ ID NO: 996551 - DNA, 25 bp, Homo sapien
acattgaactggataaacatgaaac

SEQ ID NO: 996552 - DNA, 25 bp, Homo sapien
tgatagaagtttttccttgtcaggt

SEQ ID NO: 996553 - DNA, 25 bp, Homo sapien
tactgatagaagtttttccttgtca

SEQ ID NO: 996554 - DNA, 25 bp, Homo sapien
ctgatagaagtttttccttgtcagg

SEQ ID NO: 996555 - DNA, 25 bp, Homo sapien
actgatagaagtttttccttgtcag

SEQ ID NO: 996556 - DNA, 25 bp, Homo sapien
aaggtttgactcttttcgtcctgag

SEQ ID NO: 996557 - DNA, 25 bp, Homo sapien
gaaggcccatgatgctcattctcct

SEQ ID NO: 996558 - DNA, 25 bp, Homo sapien
tatcagagcgggcattgaaggccca

SEQ ID NO: 996559 - DNA, 25 bp, Homo sapien
ctctggctctttcgcctcctgcccg

SEQ ID NO: 996560 - DNA, 25 bp, Homo sapien
ttccttgggaaaagagggcatcgtc

SEQ ID NO: 996561 - DNA, 25 bp, Homo sapien
caatgtcaaagaagtaagtcctggc

SEQ ID NO: 996562 - DNA, 25 bp, Homo sapien
ccagtgttccggagtgtcacaggcc

SEQ ID NO: 996563 - DNA, 25 bp, Homo sapien
aaggctttcctgattgggctccaca

SEQ ID NO: 996564 - DNA, 25 bp, Homo sapien
cttcaagccccaaggcagagacctg

SEQ ID NO: 996565 - DNA, 25 bp, Homo sapien
catcttcttgagcttcaagccccaa

SEQ ID NO: 996566 - DNA, 25 bp, Homo sapien
ccacttataggatgggtcctcatct

SEQ ID NO: 996567 - DNA, 25 bp, Homo sapien
cacttataggatgggtcctcatctt

SEQ ID NO: 996568 - DNA, 25 bp, Homo sapien
aatagtggcctatactcagtgttta

SEQ ID NO: 996569 - DNA, 25 bp, Homo sapien
gagttaccctctattgcaaccaata

SEQ ID NO: 996570 - DNA, 25 bp, Homo sapien
gaactatgacttgctgaattatcca

SEQ ID NO: 996571 - DNA, 25 bp, Homo sapien
tatccatacttagcctaatagtggc

SEQ ID NO: 996572 - DNA, 25 bp, Homo sapien
ctaccttgcaggcactataagtgat

SEQ ID NO: 996573 - DNA, 25 bp, Homo sapien
gcaggcactataagtgatcggctcc

SEQ ID NO: 996574 - DNA, 25 bp, Homo sapien
cactataagtgatcggctcctgctt

SEQ ID NO: 996575 - DNA, 25 bp, Homo sapien
cttgcaggcactataagtgatcggc

SEQ ID NO: 996576 - DNA, 25 bp, Homo sapien
cctgtctacactagagctgttggtc

SEQ ID NO: 996577 - DNA, 25 bp, Homo sapien
tgtctacactagagctgttggtcac

SEQ ID NO: 996578 - DNA, 25 bp, Homo sapien
gcccctgtctacactagagctgttg

SEQ ID NO: 996579 - DNA, 25 bp, Homo sapien
gtgagtgacccagcccctgtctaca

SEQ ID NO: 996580 - DNA, 25 bp, Homo sapien
cattcctgtccataccacatagcga

SEQ ID NO: 996581 - DNA, 25 bp, Homo sapien
tccagacaccacaaatgacgtattc

SEQ ID NO: 996582 - DNA, 25 bp, Homo sapien
agtaatgctgctcccgttgaaccca

SEQ ID NO: 996583 - DNA, 25 bp, Homo sapien
gttgaacccaagaccctacgagtga

SEQ ID NO: 996584 - DNA, 25 bp, Homo sapien
ctccggtagtcttgccggaaggcaa

SEQ ID NO: 996585 - DNA, 25 bp, Homo sapien
acaagagtcctggccagagttcact

SEQ ID NO: 996586 - DNA, 25 bp, Homo sapien
gagggcaaatctgtctttggaaccc

SEQ ID NO: 996587 - DNA, 25 bp, Homo sapien
gacgtagtatcacaactggctctcc

SEQ ID NO: 996588 - DNA, 25 bp, Homo sapien
gaaagagccctgattattggcccgg

SEQ ID NO: 996589 - DNA, 25 bp, Homo sapien
aaagagccctgattattggcccggg

SEQ ID NO: 996590 - DNA, 25 bp, Homo sapien
tcggtgtcacatgctgcttcggccc

SEQ ID NO: 996591 - DNA, 25 bp, Homo sapien
ctggtcggtgtcacatgctgcttcg

SEQ ID NO: 996592 - DNA, 25 bp, Homo sapien
ggtcggtgtcacatgctgcttcggc

SEQ ID NO: 996593 - DNA, 25 bp, Homo sapien
gtgtcacatgctgcttcggccccag

SEQ ID NO: 996594 - DNA, 25 bp, Homo sapien
gggcccctccgcgcgcgagccccat

SEQ ID NO: 996595 - DNA, 25 bp, Homo sapien
ggaggggcagggcccctccgcgcgc

SEQ ID NO: 996596 - DNA, 25 bp, Homo sapien
gcagggcccctccgcgcgcgagccc

SEQ ID NO: 996597 - DNA, 25 bp, Homo sapien
gggcagggcccctccgcgcgcgagc

SEQ ID NO: 996598 - DNA, 25 bp, Homo sapien
agaatgccaaaagtctctcgagtgt

SEQ ID NO: 996599 - DNA, 25 bp, Homo sapien
gaatgccaaaagtctctcgagtgtg

SEQ ID NO: 996600 - DNA, 25 bp, Homo sapien
aagaatgccaaaagtctctcgagtg

SEQ ID NO: 996601 - DNA, 25 bp, Homo sapien
aatgccaaaagtctctcgagtgtgc

SEQ ID NO: 996602 - DNA, 25 bp, Homo sapien
aaagccattcactactccaggggtt

SEQ ID NO: 996603 - DNA, 25 bp, Homo sapien
cccaaagccattcactactccaggg

SEQ ID NO: 996604 - DNA, 25 bp, Homo sapien
caaagccattcactactccaggggt

SEQ ID NO: 996605 - DNA, 25 bp, Homo sapien
tccccaaagccattcactactccag

SEQ ID NO: 996606 - DNA, 25 bp, Homo sapien
tttaaagagttgattagcaaagttg

SEQ ID NO: 996607 - DNA, 25 bp, Homo sapien
ggtcgataaatggtatagtaaatat

SEQ ID NO: 996608 - DNA, 25 bp, Homo sapien
gggtcgataaatggtatagtaaata

SEQ ID NO: 996609 - DNA, 25 bp, Homo sapien
tcagtgaagggagataagggtggga

SEQ ID NO: 996610 - DNA, 25 bp, Homo sapien
cagtgaagggagataagggtgggac

SEQ ID NO: 996611 - DNA, 25 bp, Homo sapien
gggtgcttttgagccaggatgagcc

SEQ ID NO: 996612 - DNA, 25 bp, Homo sapien
ggtgcttttgagccaggatgagcca

SEQ ID NO: 996613 - DNA, 25 bp, Homo sapien
gggcagggcatattcacttcttttg

SEQ ID NO: 996614 - DNA, 25 bp, Homo sapien
ggcctagaggaggtgtcctttcaga

SEQ ID NO: 996615 - DNA, 25 bp, Homo sapien
gttgggaggtctcagaattttgtct

SEQ ID NO: 996616 - DNA, 25 bp, Homo sapien
tgccggtcggctcttcctgaattcc

SEQ ID NO: 996617 - DNA, 25 bp, Homo sapien
gttgatgttagtgccggtcggctct

SEQ ID NO: 996618 - DNA, 25 bp, Homo sapien
cagtcctacaggtcggcagttggca

SEQ ID NO: 996619 - DNA, 25 bp, Homo sapien
tctgctggctgcgaaaacatgagag

SEQ ID NO: 996620 - DNA, 25 bp, Homo sapien
caggcggcaaggaaactgactacaa

SEQ ID NO: 996621 - DNA, 25 bp, Homo sapien
tgcaggtgccaatctcaggcggcaa

SEQ ID NO: 996622 - DNA, 25 bp, Homo sapien
tagaaaaaagaccttttgctgctcc

SEQ ID NO: 996623 - DNA, 25 bp, Homo sapien
atgatgatggcactgccaaagaaga

SEQ ID NO: 996624 - DNA, 25 bp, Homo sapien
ctgctcctcaggatggcgggacttg

SEQ ID NO: 996625 - DNA, 25 bp, Homo sapien
gacctctccgttcctcaggctgtaa

SEQ ID NO: 996626 - DNA, 25 bp, Homo sapien
caggtcatgatgacggagtatcgga

SEQ ID NO: 996627 - DNA, 25 bp, Homo sapien
atggccgccaggatgtgcgagtagg

SEQ ID NO: 996628 - DNA, 25 bp, Homo sapien
ggatgagaaccacatgggccagagc

SEQ ID NO: 996629 - DNA, 25 bp, Homo sapien
ggagacattcgctgtgtccaaaact

SEQ ID NO: 996630 - DNA, 25 bp, Homo sapien
aagatcacttaggaccagattgtca

SEQ ID NO: 996631 - DNA, 25 bp, Homo sapien
gatcacttaggaccagattgtcaaa

SEQ ID NO: 996632 - DNA, 25 bp, Homo sapien
aaaaagatcacttaggaccagattg

SEQ ID NO: 996633 - DNA, 25 bp, Homo sapien
aaagatcacttaggaccagattgtc

SEQ ID NO: 996634 - DNA, 25 bp, Homo sapien
taacttacttaaacatagcccaata

SEQ ID NO: 996635 - DNA, 25 bp, Homo sapien
catagcccaatattgaataataatg

SEQ ID NO: 996636 - DNA, 25 bp, Homo sapien
taatgtaagtgatacaaaatgatat

SEQ ID NO: 996637 - DNA, 25 bp, Homo sapien
aggagtcatggtttattttgtgtgc

SEQ ID NO: 996638 - DNA, 25 bp, Homo sapien
tctcatcaattggtaaggcactgct

SEQ ID NO: 996639 - DNA, 25 bp, Homo sapien
cggtcttctcgttcagtgttgtctg

SEQ ID NO: 996640 - DNA, 25 bp, Homo sapien
ccccagagtcctcacggccatgcat

SEQ ID NO: 996641 - DNA, 25 bp, Homo sapien
taacactgcattgtcggtcttctcg

SEQ ID NO: 996642 - DNA, 25 bp, Homo sapien
gaagacttgcccttctgtcagtaaa

SEQ ID NO: 996643 - DNA, 25 bp, Homo sapien
caagagtccacgtgacaactgaggc

SEQ ID NO: 996644 - DNA, 25 bp, Homo sapien
tagaaacccaatgaatgcaacacat

SEQ ID NO: 996645 - DNA, 25 bp, Homo sapien
ggcacgtcttaccatggcacagcag

SEQ ID NO: 996646 - DNA, 25 bp, Homo sapien
ttagcatcgggttgaaagaactgta

SEQ ID NO: 996647 - DNA, 25 bp, Homo sapien
gacctctacattcctcaggttgtaa

SEQ ID NO: 996648 - DNA, 25 bp, Homo sapien
aatcagggggtttagcatcgggttg

SEQ ID NO: 996649 - DNA, 25 bp, Homo sapien
cttgacctctacattcctcaggttg

SEQ ID NO: 996650 - DNA, 25 bp, Homo sapien
ctgctcctcaggatggcgggactta

SEQ ID NO: 996651 - DNA, 25 bp, Homo sapien
gctcctcaggatggcgggacttagg

SEQ ID NO: 996652 - DNA, 25 bp, Homo sapien
tgctgctcctcaggatggcgggact

SEQ ID NO: 996653 - DNA, 25 bp, Homo sapien
ctgctgctcctcaggatggcgggac

SEQ ID NO: 996654 - DNA, 25 bp, Homo sapien
ttcacgaggcccacaaaagggcagt

SEQ ID NO: 996655 - DNA, 25 bp, Homo sapien
aaagggcagtcttaggatgaggctc

SEQ ID NO: 996656 - DNA, 25 bp, Homo sapien
tcacatggaccatagccaggaggga

SEQ ID NO: 996657 - DNA, 25 bp, Homo sapien
atggccagagtgatgcagactttcc

SEQ ID NO: 996658 - DNA, 25 bp, Homo sapien
ttcagtatgtgcaaaactcaaaaag

SEQ ID NO: 996659 - DNA, 25 bp, Homo sapien
gcaccaacaggaggcattcagtatg

SEQ ID NO: 996660 - DNA, 25 bp, Homo sapien
cagcaccaacaggaggcattcagta

SEQ ID NO: 996661 - DNA, 25 bp, Homo sapien
ccaacaggaggcattcagtatgtgc

SEQ ID NO: 996662 - DNA, 25 bp, Homo sapien
tgggcttggctggatgcaggaggtt

SEQ ID NO: 996663 - DNA, 25 bp, Homo sapien
ctatgtcatgcagccagcaaaggag

SEQ ID NO: 996664 - DNA, 25 bp, Homo sapien
aaaggagatgggcttggctggatgc

SEQ ID NO: 996665 - DNA, 25 bp, Homo sapien
gcttggctggatgcaggaggttcac

SEQ ID NO: 996666 - DNA, 25 bp, Homo sapien
aggcataggcgatgttgacgacggc

SEQ ID NO: 996667 - DNA, 25 bp, Homo sapien
caggcataggcgatgttgacgacgg

SEQ ID NO: 996668 - DNA, 25 bp, Homo sapien
gcaggcataggcgatgttgacgacg

SEQ ID NO: 996669 - DNA, 25 bp, Homo sapien
aaaaacaagcagctgtgtgacacgc

SEQ ID NO: 996670 - DNA, 25 bp, Homo sapien
caaaaaacaagcagctgtgtgacac

SEQ ID NO: 996671 - DNA, 25 bp, Homo sapien
aaaacaagcagctgtgtgacacgct

SEQ ID NO: 996672 - DNA, 25 bp, Homo sapien
aacaaaaaacaagcagctgtgtgac

SEQ ID NO: 996673 - DNA, 25 bp, Homo sapien
ccactgcgggtgctttgatgaaatc

SEQ ID NO: 996674 - DNA, 25 bp, Homo sapien
caatctagaggtgagaaacacgaca

SEQ ID NO: 996675 - DNA, 25 bp, Homo sapien
ttcagtgagcccaagtgtagtcggt

SEQ ID NO: 996676 - DNA, 25 bp, Homo sapien
tttcccgaggatataagagacagac

SEQ ID NO: 996677 - DNA, 25 bp, Homo sapien
gctgcaccaggatcctagccatctg

SEQ ID NO: 996678 - DNA, 25 bp, Homo sapien
gatagatggtttgggtaaatagccc

SEQ ID NO: 996679 - DNA, 25 bp, Homo sapien
caggtgaccaatatggagtgtagtc

SEQ ID NO: 996680 - DNA, 25 bp, Homo sapien
cagactctgggtcaaggaaacctca

SEQ ID NO: 996681 - DNA, 25 bp, Homo sapien
tttgactgtgaaagatgtattcaaa

SEQ ID NO: 996682 - DNA, 25 bp, Homo sapien
ttttaagctcataaggcatagaaaa

SEQ ID NO: 996683 - DNA, 25 bp, Homo sapien
ttgactgtgaaagatgtattcaaac

SEQ ID NO: 996684 - DNA, 25 bp, Homo sapien
atttgactgtgaaagatgtattcaa

SEQ ID NO: 996685 - DNA, 25 bp, Homo sapien
ctcatagtctgagtattctttcaga

SEQ ID NO: 996686 - DNA, 25 bp, Homo sapien
tagtcctgtttgattcagccttgat

SEQ ID NO: 996687 - DNA, 25 bp, Homo sapien
ttctttcagaacagtagtcctgttt

SEQ ID NO: 996688 - DNA, 25 bp, Homo sapien
catagtctgagtattctttcagaac

SEQ ID NO: 996689 - DNA, 25 bp, Homo sapien
caaatgtacctttcaggcatagaga

SEQ ID NO: 996690 - DNA, 25 bp, Homo sapien
ggattttgctctaccttgacacacg

SEQ ID NO: 996691 - DNA, 25 bp, Homo sapien
tgtgtcaagaacaacgggaagattc

SEQ ID NO: 996692 - DNA, 25 bp, Homo sapien
ttcaggagaatttcatccctaatga

SEQ ID NO: 996693 - DNA, 25 bp, Homo sapien
tagttatgagccaagactttgcaaa

SEQ ID NO: 996694 - DNA, 25 bp, Homo sapien
caataatctgctagaggttgataac

SEQ ID NO: 996695 - DNA, 25 bp, Homo sapien
tatcgtggaccatgaagaactgagt

SEQ ID NO: 996696 - DNA, 25 bp, Homo sapien
tgtcagtttcatgtaacgaccgtct

SEQ ID NO: 996697 - DNA, 25 bp, Homo sapien
ggttctgagcttgtgaagatttcat

SEQ ID NO: 996698 - DNA, 25 bp, Homo sapien
gaggaacacagtgtagcaagttgat

SEQ ID NO: 996699 - DNA, 25 bp, Homo sapien
tggttctgagcttgtgaagatttca

SEQ ID NO: 996700 - DNA, 25 bp, Homo sapien
actggaggaacacagtgtagcaagt

SEQ ID NO: 996701 - DNA, 25 bp, Homo sapien
tatactttcctttggctgcgaaaat

SEQ ID NO: 996702 - DNA, 25 bp, Homo sapien
gaaacatatatagccaagtcctaaa

SEQ ID NO: 996703 - DNA, 25 bp, Homo sapien
tcacatagatatttctccaccaaag

SEQ ID NO: 996704 - DNA, 25 bp, Homo sapien
cccctggaaccattgatatataata

SEQ ID NO: 996705 - DNA, 25 bp, Homo sapien
caccgcaaggtttctgggagtttct

SEQ ID NO: 996706 - DNA, 25 bp, Homo sapien
tgggctcagtctggttggcagttca

SEQ ID NO: 996707 - DNA, 25 bp, Homo sapien
aggtgttattctctgatgggctcag

SEQ ID NO: 996708 - DNA, 25 bp, Homo sapien
tagctcccacattcggactcaagga

SEQ ID NO: 996709 - DNA, 25 bp, Homo sapien
gagcacacctctgagacaaccattc

SEQ ID NO: 996710 - DNA, 25 bp, Homo sapien
ggaagaaaacgcaagctcaaggtca

SEQ ID NO: 996711 - DNA, 25 bp, Homo sapien
cagagcacacctctgagacaaccat

SEQ ID NO: 996712 - DNA, 25 bp, Homo sapien
gagacaaccattcccatcccggaat

SEQ ID NO: 996713 - DNA, 25 bp, Homo sapien
ttccccaatctccagatggttcaag

SEQ ID NO: 996714 - DNA, 25 bp, Homo sapien
gttccccaatctccagatggttcaa

SEQ ID NO: 996715 - DNA, 25 bp, Homo sapien
caatgaataagctcctggtgtgaac

SEQ ID NO: 996716 - DNA, 25 bp, Homo sapien
caagggaccctctaaggttagagag

SEQ ID NO: 996717 - DNA, 25 bp, Homo sapien
cagacaagggtgtccaaaatgtccc

SEQ ID NO: 996718 - DNA, 25 bp, Homo sapien
aatctgggttccttgtgtggcaaca

SEQ ID NO: 996719 - DNA, 25 bp, Homo sapien
aatggagagattttgagttcagctc

SEQ ID NO: 996720 - DNA, 25 bp, Homo sapien
aaacaccggtgcaaatccactgttg

SEQ ID NO: 996721 - DNA, 25 bp, Homo sapien
tttctaggacacaaaacaccggtgc

SEQ ID NO: 996722 - DNA, 25 bp, Homo sapien
tggagagattttgagttcagctcct

SEQ ID NO: 996723 - DNA, 25 bp, Homo sapien
tacagactgatcgaggcataatgct

SEQ ID NO: 996724 - DNA, 25 bp, Homo sapien
gaattgtgatccctagacagaggca

SEQ ID NO: 996725 - DNA, 25 bp, Homo sapien
taaaggtagggcaggagatagctcc

SEQ ID NO: 996726 - DNA, 25 bp, Homo sapien
gggtccctcacggtctgtatccaaa

SEQ ID NO: 996727 - DNA, 25 bp, Homo sapien
gactacagataaggggattgagcat

SEQ ID NO: 996728 - DNA, 25 bp, Homo sapien
cttctgagttcctaagactacagat

SEQ ID NO: 996729 - DNA, 25 bp, Homo sapien
acttctgagttcctaagactacaga

SEQ ID NO: 996730 - DNA, 25 bp, Homo sapien
cctaagactacagataaggggattg

SEQ ID NO: 996731 - DNA, 25 bp, Homo sapien
aaggctttcctctgaacttcccttg

SEQ ID NO: 996732 - DNA, 25 bp, Homo sapien
aaagagtccaatcacacagaggtgg

SEQ ID NO: 996733 - DNA, 25 bp, Homo sapien
tcctctgaacttcccttgattggat

SEQ ID NO: 996734 - DNA, 25 bp, Homo sapien
taatggctgtgccataaaagagtcc

SEQ ID NO: 996735 - DNA, 25 bp, Homo sapien
gaggatgcacatatatgaaactaca

SEQ ID NO: 996736 - DNA, 25 bp, Homo sapien
tatgaaactacaattgtggacaagg

SEQ ID NO: 996737 - DNA, 25 bp, Homo sapien
ctacaattgtggacaagggtcccac

SEQ ID NO: 996738 - DNA, 25 bp, Homo sapien
atagcacagaggatgcacatatatg

SEQ ID NO: 996739 - DNA, 25 bp, Homo sapien
agcccagaaattgctccggccaaga

SEQ ID NO: 996740 - DNA, 25 bp, Homo sapien
tccaggaagtcaccgcgagggtgat

SEQ ID NO: 996741 - DNA, 25 bp, Homo sapien
ggtcatgatggccaaatatcggagg

SEQ ID NO: 996742 - DNA, 25 bp, Homo sapien
ccggccaagaccatgttctcattga

SEQ ID NO: 996743 - DNA, 25 bp, Homo sapien
ttttccttggtcgtattattcagag

SEQ ID NO: 996744 - DNA, 25 bp, Homo sapien
gccaaatacaccagtggtcattcac

SEQ ID NO: 996745 - DNA, 25 bp, Homo sapien
aaaatttggctcaggcctttcaggg

SEQ ID NO: 996746 - DNA, 25 bp, Homo sapien
gggcgggctatactaaggttcgaca

SEQ ID NO: 996747 - DNA, 25 bp, Homo sapien
tgttattaagtcatcacctccacag

SEQ ID NO: 996748 - DNA, 25 bp, Homo sapien
gatgactgctgtgtaagaacctaga

SEQ ID NO: 996749 - DNA, 25 bp, Homo sapien
taaagtgtgacggtaaaagcaaaca

SEQ ID NO: 996750 - DNA, 25 bp, Homo sapien
tatttgaccagaactcacaaaggca

SEQ ID NO: 996751 - DNA, 25 bp, Homo sapien
tagagacatgaagaacccaaccact

SEQ ID NO: 996752 - DNA, 25 bp, Homo sapien
gaaaataggcttcacttgcaccagc

SEQ ID NO: 996753 - DNA, 25 bp, Homo sapien
gtaatatcctgggaccacgtggcta

SEQ ID NO: 996754 - DNA, 25 bp, Homo sapien
aacacttgggagatgcaaagatcca

SEQ ID NO: 996755 - DNA, 25 bp, Homo sapien
catcagtgatatagggatctgggcc

SEQ ID NO: 996756 - DNA, 25 bp, Homo sapien
aaagtgcccttgcattaggcctggc

SEQ ID NO: 996757 - DNA, 25 bp, Homo sapien
ttatgtggacgtgcttatgctgccc

SEQ ID NO: 996758 - DNA, 25 bp, Homo sapien
tatcagctggttggaaggacctagg

SEQ ID NO: 996759 - DNA, 25 bp, Homo sapien
ttgttgtggcgagttttagggccta

SEQ ID NO: 996760 - DNA, 25 bp, Homo sapien
tctctaagagtggattagttcacca

SEQ ID NO: 996761 - DNA, 25 bp, Homo sapien
tctgctctggatgattactatctct

SEQ ID NO: 996762 - DNA, 25 bp, Homo sapien
ctatcttgccatgtgtttcgtcagc

SEQ ID NO: 996763 - DNA, 25 bp, Homo sapien
ggaatcaatcctgaagggaactcgc

SEQ ID NO: 996764 - DNA, 25 bp, Homo sapien
tagcccgtcgttcttcactcatttt

SEQ ID NO: 996765 - DNA, 25 bp, Homo sapien
gcccgtcgttcttcactcattttaa

SEQ ID NO: 996766 - DNA, 25 bp, Homo sapien
atgcgcacgtgacaaccaaccggag

SEQ ID NO: 996767 - DNA, 25 bp, Homo sapien
ggtcaccgcagtaacactggccaca

SEQ ID NO: 996768 - DNA, 25 bp, Homo sapien
ttgggtctggaacccgaatgcgcac

SEQ ID NO: 996769 - DNA, 25 bp, Homo sapien
cacaacaagcggtggagaacacgca

SEQ ID NO: 996770 - DNA, 25 bp, Homo sapien
tatcacagtcaattggtatcatctt

SEQ ID NO: 996771 - DNA, 25 bp, Homo sapien
tccagtctgagtgaagtatagcaac

SEQ ID NO: 996772 - DNA, 25 bp, Homo sapien
tagaataacactagacaatgctatg

SEQ ID NO: 996773 - DNA, 25 bp, Homo sapien
atgatgccctatctgttaactccaa

SEQ ID NO: 996774 - DNA, 25 bp, Homo sapien
cttagaacatatgcctcactcctgg

SEQ ID NO: 996775 - DNA, 25 bp, Homo sapien
ctttccaggaagttttcagtccctg

SEQ ID NO: 996776 - DNA, 25 bp, Homo sapien
gagaatttttagagtcccaactgag

SEQ ID NO: 996777 - DNA, 25 bp, Homo sapien
ctcttcttagccaactgtcacatag

SEQ ID NO: 996778 - DNA, 25 bp, Homo sapien
aggagtcacagaaggaccaaaatgg

SEQ ID NO: 996779 - DNA, 25 bp, Homo sapien
ggagtcacagaaggaccaaaatggc

SEQ ID NO: 996780 - DNA, 25 bp, Homo sapien
ctaaggagtcacagaaggaccaaaa

SEQ ID NO: 996781 - DNA, 25 bp, Homo sapien
taaggagtcacagaaggaccaaaat

SEQ ID NO: 996782 - DNA, 25 bp, Homo sapien
catggatgatcattagtgtggttta

SEQ ID NO: 996783 - DNA, 25 bp, Homo sapien
gaatgtaaagtatgtcttaccagta

SEQ ID NO: 996784 - DNA, 25 bp, Homo sapien
tttatgctttgagaaaataagtctg

SEQ ID NO: 996785 - DNA, 25 bp, Homo sapien
tggtgaaagagactcagtctggaat

SEQ ID NO: 996786 - DNA, 25 bp, Homo sapien
tgtaacactccagaaggtccaactc

SEQ ID NO: 996787 - DNA, 25 bp, Homo sapien
ccaactcctctcttggcatggccaa

SEQ ID NO: 996788 - DNA, 25 bp, Homo sapien
tgagatccaccgaagcttttcactt

SEQ ID NO: 996789 - DNA, 25 bp, Homo sapien
ggctgagatccaccgaagcttttca

SEQ ID NO: 996790 - DNA, 25 bp, Homo sapien
cagctacaggcttttacatgttcat

SEQ ID NO: 996791 - DNA, 25 bp, Homo sapien
ggtactattaatactctcaaaaatg

SEQ ID NO: 996792 - DNA, 25 bp, Homo sapien
aacagctacaggcttttacatgttc

SEQ ID NO: 996793 - DNA, 25 bp, Homo sapien
aataacagctacaggcttttacatg

SEQ ID NO: 996794 - DNA, 25 bp, Homo sapien
ccagtccagaatgggctaaatgagg

SEQ ID NO: 996795 - DNA, 25 bp, Homo sapien
tagaagggtttctgcctcaggcatg

SEQ ID NO: 996796 - DNA, 25 bp, Homo sapien
gaatttctctatggtggtccccagt

SEQ ID NO: 996797 - DNA, 25 bp, Homo sapien
taaaatagatgctaagcctcggtgg

SEQ ID NO: 996798 - DNA, 25 bp, Homo sapien
ctcacttcttttctcggctgcccat

SEQ ID NO: 996799 - DNA, 25 bp, Homo sapien
tcacttcttttctcggctgcccatc

SEQ ID NO: 996800 - DNA, 25 bp, Homo sapien
ttcttttctcggctgcccatcttcc

SEQ ID NO: 996801 - DNA, 25 bp, Homo sapien
cttttctcggctgcccatcttcccc

SEQ ID NO: 996802 - DNA, 25 bp, Homo sapien
tctccgtgcggaagaggaactcggc

SEQ ID NO: 996803 - DNA, 25 bp, Homo sapien
tgccgcagaaagagtcggaacaggt

SEQ ID NO: 996804 - DNA, 25 bp, Homo sapien
gcgccctgagtgttctgccgcagaa

SEQ ID NO: 996805 - DNA, 25 bp, Homo sapien
gtcaaataccaggaatcggctaccc

SEQ ID NO: 996806 - DNA, 25 bp, Homo sapien
cacctagtgcagtggatacattacc

SEQ ID NO: 996807 - DNA, 25 bp, Homo sapien
tcagggatttgtcctagtctggcaa

SEQ ID NO: 996808 - DNA, 25 bp, Homo sapien
agatggtcctaacttgctcccaaga

SEQ ID NO: 996809 - DNA, 25 bp, Homo sapien
tagaatagcaggttgaggccagtcc

SEQ ID NO: 996810 - DNA, 25 bp, Homo sapien
gctctatgggttaagccattgagaa

SEQ ID NO: 996811 - DNA, 25 bp, Homo sapien
gggctctatgggttaagccattgag

SEQ ID NO: 996812 - DNA, 25 bp, Homo sapien
ggttaagccattgagaagggctctt

SEQ ID NO: 996813 - DNA, 25 bp, Homo sapien
tatgggttaagccattgagaagggc

SEQ ID NO: 996814 - DNA, 25 bp, Homo sapien
catccccttcccctcttgtgccctg

SEQ ID NO: 996815 - DNA, 25 bp, Homo sapien
ctctctccctttcagacccccctct

SEQ ID NO: 996816 - DNA, 25 bp, Homo sapien
cctggcctgccactccagtcactga

SEQ ID NO: 996817 - DNA, 25 bp, Homo sapien
tctctctccctttcagacccccctc

SEQ ID NO: 996818 - DNA, 25 bp, Homo sapien
caggtggactggacgcgtgttcagc

SEQ ID NO: 996819 - DNA, 25 bp, Homo sapien
ccacttttcaccagccagcgtgact

SEQ ID NO: 996820 - DNA, 25 bp, Homo sapien
ctcggggccgagacagcagcagaca

SEQ ID NO: 996821 - DNA, 25 bp, Homo sapien
gttcagcttccttcgtagccctggg

SEQ ID NO: 996822 - DNA, 25 bp, Homo sapien
ctcaaactcaatcttctggctcagg

SEQ ID NO: 996823 - DNA, 25 bp, Homo sapien
gtcgcatactctggacattgttatt

SEQ ID NO: 996824 - DNA, 25 bp, Homo sapien
tcctctgtccgtcgcatactctgga

SEQ ID NO: 996825 - DNA, 25 bp, Homo sapien
tgtccgtcgcatactctggacattg

SEQ ID NO: 996826 - DNA, 25 bp, Homo sapien
tgctccagggcgtggtgtgccttcg

SEQ ID NO: 996827 - DNA, 25 bp, Homo sapien
ggtgtgccttcgtggcctctgcctc

SEQ ID NO: 996828 - DNA, 25 bp, Homo sapien
cagggcgtggtgtgccttcgtggcc

SEQ ID NO: 996829 - DNA, 25 bp, Homo sapien
ctcctccgaggagccaggctgtgtt

SEQ ID NO: 996830 - DNA, 25 bp, Homo sapien
cagaaaggacttgagggaaaggcgc

SEQ ID NO: 996831 - DNA, 25 bp, Homo sapien
gatgcgttggaagggcagaatcaga

SEQ ID NO: 996832 - DNA, 25 bp, Homo sapien
ctggagcagcagtttgaggcgggtg

SEQ ID NO: 996833 - DNA, 25 bp, Homo sapien
ctggcagacggggtcgctctccagc

SEQ ID NO: 996834 - DNA, 25 bp, Homo sapien
gactacgtcacatacttggaaggag

SEQ ID NO: 996835 - DNA, 25 bp, Homo sapien
tgttctcaaagttctcttccaggtc

SEQ ID NO: 996836 - DNA, 25 bp, Homo sapien
gtgacataaggcaggtagacccggc

SEQ ID NO: 996837 - DNA, 25 bp, Homo sapien
ttcctgataggtctggttggtgaca

SEQ ID NO: 996838 - DNA, 25 bp, Homo sapien
accatcgggaatcatggaagaaact

SEQ ID NO: 996839 - DNA, 25 bp, Homo sapien
cttcttcctataaccatcgggaatc

SEQ ID NO: 996840 - DNA, 25 bp, Homo sapien
tataaccatcgggaatcatggaaga

SEQ ID NO: 996841 - DNA, 25 bp, Homo sapien
tcctataaccatcgggaatcatgga

SEQ ID NO: 996842 - DNA, 25 bp, Homo sapien
agtgtggcccggagtgaagttgaaa

SEQ ID NO: 996843 - DNA, 25 bp, Homo sapien
cctggttggaaagtgtggcccggag

SEQ ID NO: 996844 - DNA, 25 bp, Homo sapien
ctgtaaacgagagaagagccattgg

SEQ ID NO: 996845 - DNA, 25 bp, Homo sapien
gaaatgatccacagctatgtttaga

SEQ ID NO: 996846 - DNA, 25 bp, Homo sapien
aggtaggaggcctctgacacaatca

SEQ ID NO: 996847 - DNA, 25 bp, Homo sapien
ggtaggaggcctctgacacaatcag

SEQ ID NO: 996848 - DNA, 25 bp, Homo sapien
caggtaggaggcctctgacacaatc

SEQ ID NO: 996849 - DNA, 25 bp, Homo sapien
tagtgtagcctgaaaccctggttga

SEQ ID NO: 996850 - DNA, 25 bp, Homo sapien
tgggagtaacaatcaagcagggact

SEQ ID NO: 996851 - DNA, 25 bp, Homo sapien
tgttagattgatggaccacaggaca

SEQ ID NO: 996852 - DNA, 25 bp, Homo sapien
aaagagccccggaatgtgccttggc

SEQ ID NO: 996853 - DNA, 25 bp, Homo sapien
gcaggtacgactcggaggagaccag

SEQ ID NO: 996854 - DNA, 25 bp, Homo sapien
ggatctccttattcaggacaacatc

SEQ ID NO: 996855 - DNA, 25 bp, Homo sapien
ctatactcctggtaaagcagctggg

SEQ ID NO: 996856 - DNA, 25 bp, Homo sapien
tgttgcgcaccacggggatttcctg

SEQ ID NO: 996857 - DNA, 25 bp, Homo sapien
agttgatgagtttggagcagcgtct

SEQ ID NO: 996858 - DNA, 25 bp, Homo sapien
gagcagcgtcttgaaaagcctccca

SEQ ID NO: 996859 - DNA, 25 bp, Homo sapien
tttggagcagcgtcttgaaaagcct

SEQ ID NO: 996860 - DNA, 25 bp, Homo sapien
gatgagtttggagcagcgtcttgaa

SEQ ID NO: 996861 - DNA, 25 bp, Homo sapien
ttctccacggctggacctcttgaat

SEQ ID NO: 996862 - DNA, 25 bp, Homo sapien
gtttctccacggctggacctcttga

SEQ ID NO: 996863 - DNA, 25 bp, Homo sapien
aacaacagtgtctgagggtcccgga

SEQ ID NO: 996864 - DNA, 25 bp, Homo sapien
aaacaacagtgtctgagggtcccgg

SEQ ID NO: 996865 - DNA, 25 bp, Homo sapien
agatcagtaccagtgacgtcccgag

SEQ ID NO: 996866 - DNA, 25 bp, Homo sapien
cagagagcgtgaaagagatcagtac

SEQ ID NO: 996867 - DNA, 25 bp, Homo sapien
aagaaagtggcaaagcagagagcgt

SEQ ID NO: 996868 - DNA, 25 bp, Homo sapien
aactgagatttcagagggatagaga

SEQ ID NO: 996869 - DNA, 25 bp, Homo sapien
ctgagtcccgcctgtggggccagct

SEQ ID NO: 996870 - DNA, 25 bp, Homo sapien
gtgcttgttggccccctcactagga

SEQ ID NO: 996871 - DNA, 25 bp, Homo sapien
gagccctcaggcaagatggaaggtc

SEQ ID NO: 996872 - DNA, 25 bp, Homo sapien
aagatggaaggtctgcgcaggccct

SEQ ID NO: 996873 - DNA, 25 bp, Homo sapien
tctgagtgggagtaggaaagcaaca

SEQ ID NO: 996874 - DNA, 25 bp, Homo sapien
tatgctgcttcagcgtgggaaccac

SEQ ID NO: 996875 - DNA, 25 bp, Homo sapien
tgaaacggtgctgtagtccctacca

SEQ ID NO: 996876 - DNA, 25 bp, Homo sapien
gagacccctgcttcatccttagagg

SEQ ID NO: 996877 - DNA, 25 bp, Homo sapien
aaggtttgactcttttcgtcctgag

SEQ ID NO: 996878 - DNA, 25 bp, Homo sapien
gaaggcccatgatgctcattctcct

SEQ ID NO: 996879 - DNA, 25 bp, Homo sapien
tatcagagcgggcattgaaggccca

SEQ ID NO: 996880 - DNA, 25 bp, Homo sapien
ctctggctctttcgcctcctgcccg

SEQ ID NO: 996881 - DNA, 25 bp, Homo sapien
ttccttgggaaaagagggcatcgtc

SEQ ID NO: 996882 - DNA, 25 bp, Homo sapien
caatgtcaaagaagtaagtcctggc

SEQ ID NO: 996883 - DNA, 25 bp, Homo sapien
aaggctttcctgattgggctccaca

SEQ ID NO: 996884 - DNA, 25 bp, Homo sapien
ccagtgttccggagtgtcacaggcc

SEQ ID NO: 996885 - DNA, 25 bp, Homo sapien
caactgagctttgatagcggcattc

SEQ ID NO: 996886 - DNA, 25 bp, Homo sapien
ccaaagaagaccttatggatcttca

SEQ ID NO: 996887 - DNA, 25 bp, Homo sapien
attctgccaatattccctacaatcg

SEQ ID NO: 996888 - DNA, 25 bp, Homo sapien
cctacaatcgacatgttgttaattc

SEQ ID NO: 996889 - DNA, 25 bp, Homo sapien
gaactatgacttgctgaattatcca

SEQ ID NO: 996890 - DNA, 25 bp, Homo sapien
gagttaccctctattgcaaccaata

SEQ ID NO: 996891 - DNA, 25 bp, Homo sapien
aatagtggcctatactcagtgttta

SEQ ID NO: 996892 - DNA, 25 bp, Homo sapien
tatccatacttagcctaatagtggc

SEQ ID NO: 996893 - DNA, 25 bp, Homo sapien
gcccctgtctacactagagctgttg

SEQ ID NO: 996894 - DNA, 25 bp, Homo sapien
gtgagtgacccagcccctgtctaca

SEQ ID NO: 996895 - DNA, 25 bp, Homo sapien
tgtctacactagagctgttggtcac

SEQ ID NO: 996896 - DNA, 25 bp, Homo sapien
cctgtctacactagagctgttggtc

SEQ ID NO: 996897 - DNA, 25 bp, Homo sapien
tccagacaccacaaatgacgtattc

SEQ ID NO: 996898 - DNA, 25 bp, Homo sapien
cattcctgtccataccacatagcga

SEQ ID NO: 996899 - DNA, 25 bp, Homo sapien
gttgaacccaagaccctacgagtga

SEQ ID NO: 996900 - DNA, 25 bp, Homo sapien
agtaatgctgctcccgttgaaccca

SEQ ID NO: 996901 - DNA, 25 bp, Homo sapien
acaagagtcctggccagagttcact

SEQ ID NO: 996902 - DNA, 25 bp, Homo sapien
ctccggtagtcttgccggaaggcaa

SEQ ID NO: 996903 - DNA, 25 bp, Homo sapien
gagggcaaatctgtctttggaaccc

SEQ ID NO: 996904 - DNA, 25 bp, Homo sapien
gacgtagtatcacaactggctctcc

SEQ ID NO: 996905 - DNA, 25 bp, Homo sapien
gggcagggcccctccgcgcgcgagc

SEQ ID NO: 996906 - DNA, 25 bp, Homo sapien
ggaggggcagggcccctccgcgcgc

SEQ ID NO: 996907 - DNA, 25 bp, Homo sapien
gcagggcccctccgcgcgcgagccc

SEQ ID NO: 996908 - DNA, 25 bp, Homo sapien
gggcccctccgcgcgcgagccccat

SEQ ID NO: 996909 - DNA, 25 bp, Homo sapien
gaatgccaaaagtctctcgagtgtg

SEQ ID NO: 996910 - DNA, 25 bp, Homo sapien
agaatgccaaaagtctctcgagtgt

SEQ ID NO: 996911 - DNA, 25 bp, Homo sapien
aagaatgccaaaagtctctcgagtg

SEQ ID NO: 996912 - DNA, 25 bp, Homo sapien
aatgccaaaagtctctcgagtgtgc

SEQ ID NO: 996913 - DNA, 25 bp, Homo sapien
aaagccattcactactccaggggtt

SEQ ID NO: 996914 - DNA, 25 bp, Homo sapien
tccccaaagccattcactactccag

SEQ ID NO: 996915 - DNA, 25 bp, Homo sapien
caaagccattcactactccaggggt

SEQ ID NO: 996916 - DNA, 25 bp, Homo sapien
cccaaagccattcactactccaggg

SEQ ID NO: 996917 - DNA, 25 bp, Homo sapien
tctcatctgttgctgttagaaagga

SEQ ID NO: 996918 - DNA, 25 bp, Homo sapien
aaggtaacttgatcacctatcaata

SEQ ID NO: 996919 - DNA, 25 bp, Homo sapien
gagtctggtcctcacattttagatt

SEQ ID NO: 996920 - DNA, 25 bp, Homo sapien
tcaggaactgcatcatacaacccaa

SEQ ID NO: 996921 - DNA, 25 bp, Homo sapien
ttagagattttactagctagggcta

SEQ ID NO: 996922 - DNA, 25 bp, Homo sapien
gctagggctatttacccaaaccatc

SEQ ID NO: 996923 - DNA, 25 bp, Homo sapien
cagactgtagacatagaatcaccag

SEQ ID NO: 996924 - DNA, 25 bp, Homo sapien
ccagatggctaggatcctggtgcag

SEQ ID NO: 996925 - DNA, 25 bp, Homo sapien
gactacactccatattggtcacctg

SEQ ID NO: 996926 - DNA, 25 bp, Homo sapien
tacaaccgactacacttgggctcac

SEQ ID NO: 996927 - DNA, 25 bp, Homo sapien
gatttcatcaaagcacccgcagtgg

SEQ ID NO: 996928 - DNA, 25 bp, Homo sapien
tgtcattaaggatgcattgccaaat

SEQ ID NO: 996929 - DNA, 25 bp, Homo sapien
aattcatcaattcagcacaccacca

SEQ ID NO: 996930 - DNA, 25 bp, Homo sapien
tgctgccatttgtcaagtgccaaat

SEQ ID NO: 996931 - DNA, 25 bp, Homo sapien
tactgctaattcattgatgctgcca

SEQ ID NO: 996932 - DNA, 25 bp, Homo sapien
tatgaaggacttgaattaacagcaa

SEQ ID NO: 996933 - DNA, 25 bp, Homo sapien
tggccgtcgtcaacatcgcctatgc

SEQ ID NO: 996934 - DNA, 25 bp, Homo sapien
ctgatgtcctacgatcggtacgtgg

SEQ ID NO: 996935 - DNA, 25 bp, Homo sapien
accctctccgatatttcatcatcat

SEQ ID NO: 996936 - DNA, 25 bp, Homo sapien
tgacatagacctttctctttttgag

SEQ ID NO: 996937 - DNA, 25 bp, Homo sapien
taagactgcccttttgtgggcctcg

SEQ ID NO: 996938 - DNA, 25 bp, Homo sapien
caaccaggtggtcatctttgcagcc

SEQ ID NO: 996939 - DNA, 25 bp, Homo sapien
catgtgagcctcatcctaagactgc

SEQ ID NO: 996940 - DNA, 25 bp, Homo sapien
gcctgcatgttcatcctggtgggac

SEQ ID NO: 996941 - DNA, 25 bp, Homo sapien
gaaagtcattcctaagaggtgtgac

SEQ ID NO: 996942 - DNA, 25 bp, Homo sapien
cacctctgcgtagtgggactcttct

SEQ ID NO: 996943 - DNA, 25 bp, Homo sapien
tttggcagcgccatcgtcatgtaca

SEQ ID NO: 996944 - DNA, 25 bp, Homo sapien
cccctgatttacaacctgaggaatg

SEQ ID NO: 996945 - DNA, 25 bp, Homo sapien
attgggtttctatgagatgtggttt

SEQ ID NO: 996946 - DNA, 25 bp, Homo sapien
tgggtttctatgagatgtggtttta

SEQ ID NO: 996947 - DNA, 25 bp, Homo sapien
tttctatgagatgtggttttatcag

SEQ ID NO: 996948 - DNA, 25 bp, Homo sapien
ttgggtttctatgagatgtggtttt

SEQ ID NO: 996949 - DNA, 25 bp, Homo sapien
atcaaggtgtcagcatctgcagagg

SEQ ID NO: 996950 - DNA, 25 bp, Homo sapien
tgtcagcatctgcagagggccttct

SEQ ID NO: 996951 - DNA, 25 bp, Homo sapien
aaggtgtcagcatctgcagagggcc

SEQ ID NO: 996952 - DNA, 25 bp, Homo sapien
atatcaaggtgtcagcatctgcaga

SEQ ID NO: 996953 - DNA, 25 bp, Homo sapien
tactcactgcatgaccttagagaag

SEQ ID NO: 996954 - DNA, 25 bp, Homo sapien
gagaagtcacttaattcctctgcac

SEQ ID NO: 996955 - DNA, 25 bp, Homo sapien
ttagaaactgtacgccaagaaatgg

SEQ ID NO: 996956 - DNA, 25 bp, Homo sapien
ttcacaaaattatgggttcctctcc

SEQ ID NO: 996957 - DNA, 25 bp, Homo sapien
gagctgcaatgaaaatagctcatca

SEQ ID NO: 996958 - DNA, 25 bp, Homo sapien
tacattaagtagtcaacagaagttg

SEQ ID NO: 996959 - DNA, 25 bp, Homo sapien
gctatacataaattcgtacacctgt

SEQ ID NO: 996960 - DNA, 25 bp, Homo sapien
gcagggaaatctcctagctatacat

SEQ ID NO: 996961 - DNA, 25 bp, Homo sapien
tttgaccagcaaatatctccaccct

SEQ ID NO: 996962 - DNA, 25 bp, Homo sapien
ggagaggtagtagcttctagggaaa

SEQ ID NO: 996963 - DNA, 25 bp, Homo sapien
gtgggctctgaatccagcactcttc

SEQ ID NO: 996964 - DNA, 25 bp, Homo sapien
ctccagggagaggtagtagcttcta

SEQ ID NO: 996965 - DNA, 25 bp, Homo sapien
tcacttggaaccagctaacttttca

SEQ ID NO: 996966 - DNA, 25 bp, Homo sapien
tggaaccagctaacttttcagggtc

SEQ ID NO: 996967 - DNA, 25 bp, Homo sapien
gagggtcacttggaaccagctaact

SEQ ID NO: 996968 - DNA, 25 bp, Homo sapien
ttggagggtcacttggaaccagcta

SEQ ID NO: 996969 - DNA, 25 bp, Homo sapien
tcctcccaccctttaccctgtgata

SEQ ID NO: 996970 - DNA, 25 bp, Homo sapien
acataggtaaacaaacttgtgtctt

SEQ ID NO: 996971 - DNA, 25 bp, Homo sapien
ctttaccctgtgataggccccagta

SEQ ID NO: 996972 - DNA, 25 bp, Homo sapien
cataggtaaacaaacttgtgtcttg

SEQ ID NO: 996973 - DNA, 25 bp, Homo sapien
tgtagcacatccattagttccttct

SEQ ID NO: 996974 - DNA, 25 bp, Homo sapien
aaatcagtaactgtgcatcaatcag

SEQ ID NO: 996975 - DNA, 25 bp, Homo sapien
tcaggaacccaaacaatcacaatgt

SEQ ID NO: 996976 - DNA, 25 bp, Homo sapien
taactgccaaatcaccaattatcgg

SEQ ID NO: 996977 - DNA, 25 bp, Homo sapien
gctctatgtatcctatcactggtga

SEQ ID NO: 996978 - DNA, 25 bp, Homo sapien
tttggacacagcgaatgtctcctgc

SEQ ID NO: 996979 - DNA, 25 bp, Homo sapien
gacgcagacctttctctgtttgagt

SEQ ID NO: 996980 - DNA, 25 bp, Homo sapien
tccgtcatcatgacctggagagtct

SEQ ID NO: 996981 - DNA, 25 bp, Homo sapien
tagactcatacccaaacaatctggc

SEQ ID NO: 996982 - DNA, 25 bp, Homo sapien
taagcacatgctcttcacttagagg

SEQ ID NO: 996983 - DNA, 25 bp, Homo sapien
tttacttaaccaggacaatgtggga

SEQ ID NO: 996984 - DNA, 25 bp, Homo sapien
cacttagaggaagttagtaccacca

SEQ ID NO: 996985 - DNA, 25 bp, Homo sapien
gctctcatgttttcgcagccagcag

SEQ ID NO: 996986 - DNA, 25 bp, Homo sapien
gacatttggaatgctgtctcactgg

SEQ ID NO: 996987 - DNA, 25 bp, Homo sapien
ccttgccgcctgagattggcacctg

SEQ ID NO: 996988 - DNA, 25 bp, Homo sapien
tggaccagggattgccaactgccga

SEQ ID NO: 996989 - DNA, 25 bp, Homo sapien
tccccacagtcttaatagatttcgg

SEQ ID NO: 996990 - DNA, 25 bp, Homo sapien
taggcaagtggatacttccccacag

SEQ ID NO: 996991 - DNA, 25 bp, Homo sapien
ggatactttctagcatcgctaagca

SEQ ID NO: 996992 - DNA, 25 bp, Homo sapien
tatttacagtagaacaagtgacaga

SEQ ID NO: 996993 - DNA, 25 bp, Homo sapien
tcgagtcctagatacctgaagaggg

SEQ ID NO: 996994 - DNA, 25 bp, Homo sapien
gtccactaagttccaccaatacagg

SEQ ID NO: 996995 - DNA, 25 bp, Homo sapien
tgtgactagcaggtaataagtgtcc

SEQ ID NO: 996996 - DNA, 25 bp, Homo sapien
taaaccttgtcacttctgaaacctg

SEQ ID NO: 996997 - DNA, 25 bp, Homo sapien
gattaccttgatatacagtgagcag

SEQ ID NO: 996998 - DNA, 25 bp, Homo sapien
tgactgcctcccttgattgaataat

SEQ ID NO: 996999 - DNA, 25 bp, Homo sapien
tcccatctcagggttagtttgatgc

SEQ ID NO: 997000 - DNA, 25 bp, Homo sapien
tcagaggttaaagggtaatgactgc

SEQ ID NO: 997001 - DNA, 25 bp, Homo sapien
agaatcacagtgggaggcaaaaggt

SEQ ID NO: 997002 - DNA, 25 bp, Homo sapien
cctcagaatcacagtgggaggcaaa

SEQ ID NO: 997003 - DNA, 25 bp, Homo sapien
ctcagaatcacagtgggaggcaaaa

SEQ ID NO: 997004 - DNA, 25 bp, Homo sapien
atcacagtgggaggcaaaaggtact

SEQ ID NO: 997005 - DNA, 25 bp, Homo sapien
atatggcagcggcaagagacaatga

SEQ ID NO: 997006 - DNA, 25 bp, Homo sapien
cttatatggcagcggcaagagacaa

SEQ ID NO: 997007 - DNA, 25 bp, Homo sapien
gagaaacaaaagcagaaactcctga

SEQ ID NO: 997008 - DNA, 25 bp, Homo sapien
caagagacaatgagagagaaacaaa

SEQ ID NO: 997009 - DNA, 25 bp, Homo sapien
accttattgtccatagcagtatccg

SEQ ID NO: 997010 - DNA, 25 bp, Homo sapien
ttcagctccctgtaacttatgcaaa

SEQ ID NO: 997011 - DNA, 25 bp, Homo sapien
ccatagcagtatccgcatttttgtc

SEQ ID NO: 997012 - DNA, 25 bp, Homo sapien
ttttcctcctagtcttcagggtctg

SEQ ID NO: 997013 - DNA, 25 bp, Homo sapien
gagaagtaaaggtgcaaacccctga

SEQ ID NO: 997014 - DNA, 25 bp, Homo sapien
gaattcatcattgaatcaatcattg

SEQ ID NO: 997015 - DNA, 25 bp, Homo sapien
attgaaaagaattagcagaggactg

SEQ ID NO: 997016 - DNA, 25 bp, Homo sapien
agaattagcagaggactgataaata

SEQ ID NO: 997017 - DNA, 25 bp, Homo sapien
ctgtcatgtaacactttagtgttct

SEQ ID NO: 997018 - DNA, 25 bp, Homo sapien
tagtttgtatagagctgacttagta

SEQ ID NO: 997019 - DNA, 25 bp, Homo sapien
aacactttagtgttctatatttgca

SEQ ID NO: 997020 - DNA, 25 bp, Homo sapien
ccttccattagtttgtatagagctg

SEQ ID NO: 997021 - DNA, 25 bp, Homo sapien
tgctgccattatttgctacctgttt

SEQ ID NO: 997022 - DNA, 25 bp, Homo sapien
cctcaatcagattgagagcttcttg

SEQ ID NO: 997023 - DNA, 25 bp, Homo sapien
atgctctgctgccattatttgctac

SEQ ID NO: 997024 - DNA, 25 bp, Homo sapien
tgtctttgtatatctggtttctaag

SEQ ID NO: 997025 - DNA, 25 bp, Homo sapien
tccaagactaacagaacacaacgtt

SEQ ID NO: 997026 - DNA, 25 bp, Homo sapien
ccaagactaacagaacacaacgttt

SEQ ID NO: 997027 - DNA, 25 bp, Homo sapien
caagactaacagaacacaacgtttc

SEQ ID NO: 997028 - DNA, 25 bp, Homo sapien
gaaacaaacacgcagggagatttcg

SEQ ID NO: 997029 - DNA, 25 bp, Homo sapien
tccagagtcaggctccggtgaagct

SEQ ID NO: 997030 - DNA, 25 bp, Homo sapien
cggtgaagctccgaagaaacaaaca

SEQ ID NO: 997031 - DNA, 25 bp, Homo sapien
atttcggaggcgtccgaggacaccg

SEQ ID NO: 997032 - DNA, 25 bp, Homo sapien
ctggggccgaagcagcatgtgacac

SEQ ID NO: 997033 - DNA, 25 bp, Homo sapien
gcagcatgtgacaccgaccaggtgg

SEQ ID NO: 997034 - DNA, 25 bp, Homo sapien
gcgccgggacctggaggggacgctg

SEQ ID NO: 997035 - DNA, 25 bp, Homo sapien
cgaagcagcatgtgacaccgaccag

SEQ ID NO: 997036 - DNA, 25 bp, Homo sapien
atcaacagagtctttcacttccacc

SEQ ID NO: 997037 - DNA, 25 bp, Homo sapien
tcagcaacatgacaaacttcctatg

SEQ ID NO: 997038 - DNA, 25 bp, Homo sapien
agcaggagtaagagcgaagtgtccc

SEQ ID NO: 997039 - DNA, 25 bp, Homo sapien
gtaagagcgaagtgtcccctggcat

SEQ ID NO: 997040 - DNA, 25 bp, Homo sapien
gaatactggtatctgtgagcacatg

SEQ ID NO: 997041 - DNA, 25 bp, Homo sapien
caaaccagtcctctattgaccagaa

SEQ ID NO: 997042 - DNA, 25 bp, Homo sapien
gaggcagaaacccttctatgcccca

SEQ ID NO: 997043 - DNA, 25 bp, Homo sapien
ttgaccagaaatccatagtgttgag

SEQ ID NO: 997044 - DNA, 25 bp, Homo sapien
cctctccacgcaaaaccagagcaaa

SEQ ID NO: 997045 - DNA, 25 bp, Homo sapien
gctagagcttcctgtaagaagcgca

SEQ ID NO: 997046 - DNA, 25 bp, Homo sapien
ctaagcagagtgcctggaccattgt

SEQ ID NO: 997047 - DNA, 25 bp, Homo sapien
cagagcaaaagctagagcttcctgt

SEQ ID NO: 997048 - DNA, 25 bp, Homo sapien
cagaccacattcaaagtaggcttca

SEQ ID NO: 997049 - DNA, 25 bp, Homo sapien
tggaccaagaatatgaaccagctgc

SEQ ID NO: 997050 - DNA, 25 bp, Homo sapien
tagagacaccatttgtagggtatcc

SEQ ID NO: 997051 - DNA, 25 bp, Homo sapien
gaaaagaggcatacagggtggcaaa

SEQ ID NO: 997052 - DNA, 25 bp, Homo sapien
tatcaacaagacgagcctacacagg

SEQ ID NO: 997053 - DNA, 25 bp, Homo sapien
gactagtttactgcttacggtggac

SEQ ID NO: 997054 - DNA, 25 bp, Homo sapien
ccttgctgagtaagggcccagtccc

SEQ ID NO: 997055 - DNA, 25 bp, Homo sapien
caacattcagaagtaacacaggcca

SEQ ID NO: 997056 - DNA, 25 bp, Homo sapien
cccagagcttgtgggcagaacggac

SEQ ID NO: 997057 - DNA, 25 bp, Homo sapien
cagggagttggaaatagatcaggaa

SEQ ID NO: 997058 - DNA, 25 bp, Homo sapien
tagatcaggaaagtagccatcccct

SEQ ID NO: 997059 - DNA, 25 bp, Homo sapien
ggcagctctggcaaacaggggtcac

SEQ ID NO: 997060 - DNA, 25 bp, Homo sapien
ccagcaggtggttgcatcaggatct

SEQ ID NO: 997061 - DNA, 25 bp, Homo sapien
tcccagcaggtggttgcatcaggat

SEQ ID NO: 997062 - DNA, 25 bp, Homo sapien
cccagcaggtggttgcatcaggatc

SEQ ID NO: 997063 - DNA, 25 bp, Homo sapien
tgggcaatagccctgcgatgtgccc

SEQ ID NO: 997064 - DNA, 25 bp, Homo sapien
tcttcgggcggtggaagcgtcagtg

SEQ ID NO: 997065 - DNA, 25 bp, Homo sapien
ggaaacataaagagagagtcttcgg

SEQ ID NO: 997066 - DNA, 25 bp, Homo sapien
gaggcacctgggcaatagccctgcg

SEQ ID NO: 997067 - DNA, 25 bp, Homo sapien
gctctgttggtaatcctggggctcc

SEQ ID NO: 997068 - DNA, 25 bp, Homo sapien
ctccaaatatgaacaggggggtggc

SEQ ID NO: 997069 - DNA, 25 bp, Homo sapien
gaggtagggcaacttgggctgaggg

SEQ ID NO: 997070 - DNA, 25 bp, Homo sapien
ggagaactggaagggtcctggctgg

SEQ ID NO: 997071 - DNA, 25 bp, Homo sapien
ctgccagcaacatccatcagcagtg

SEQ ID NO: 997072 - DNA, 25 bp, Homo sapien
gggccgtccttgtggctgctgtcac

SEQ ID NO: 997073 - DNA, 25 bp, Homo sapien
aagatcggcccttcgcacaggtggg

SEQ ID NO: 997074 - DNA, 25 bp, Homo sapien
gggaaaggaagatcggcccttcgca

SEQ ID NO: 997075 - DNA, 25 bp, Homo sapien
cctctgagcaccctcactgggttgg

SEQ ID NO: 997076 - DNA, 25 bp, Homo sapien
tctgagcaccctcactgggttgggt

SEQ ID NO: 997077 - DNA, 25 bp, Homo sapien
accaccctctgagcaccctcactgg

SEQ ID NO: 997078 - DNA, 25 bp, Homo sapien
ggggccaaagtctggtcagaagtca

SEQ ID NO: 997079 - DNA, 25 bp, Homo sapien
aaagggtcaggctttggctccatgg

SEQ ID NO: 997080 - DNA, 25 bp, Homo sapien
gggaaagggtcaggctttggctcca

SEQ ID NO: 997081 - DNA, 25 bp, Homo sapien
gcacagcaggtaggatctcagctgc

SEQ ID NO: 997082 - DNA, 25 bp, Homo sapien
tggaaaggtatccagaggggactcc

SEQ ID NO: 997083 - DNA, 25 bp, Homo sapien
ctccatttttcgccacttggcccgg

SEQ ID NO: 997084 - DNA, 25 bp, Homo sapien
ttctccatttttcgccacttggccc

SEQ ID NO: 997085 - DNA, 25 bp, Homo sapien
tttctccatttttcgccacttggcc

SEQ ID NO: 997086 - DNA, 25 bp, Homo sapien
gtttctccatttttcgccacttggc

SEQ ID NO: 997087 - DNA, 25 bp, Homo sapien
attcgagtgtttcaatggtgggccc

SEQ ID NO: 997088 - DNA, 25 bp, Homo sapien
tctgcaattcgagtgtttcaatggt

SEQ ID NO: 997089 - DNA, 25 bp, Homo sapien
caggctaccgctgagcgctcactct

SEQ ID NO: 997090 - DNA, 25 bp, Homo sapien
tgagcgctcactctgcaattcgagt

SEQ ID NO: 997091 - DNA, 25 bp, Homo sapien
tagtggtcttcttggaatatcttct

SEQ ID NO: 997092 - DNA, 25 bp, Homo sapien
tcaggatagtggtcttcttggaata

SEQ ID NO: 997093 - DNA, 25 bp, Homo sapien
caccgtctgggcaatctctcggcgt

SEQ ID NO: 997094 - DNA, 25 bp, Homo sapien
tcggcgtttatcactgtcaggatag

SEQ ID NO: 997095 - DNA, 25 bp, Homo sapien
tgagcggtatagggttcgtgtcttt

SEQ ID NO: 997096 - DNA, 25 bp, Homo sapien
ctgttttggttgctctgcgccaatg

SEQ ID NO: 997097 - DNA, 25 bp, Homo sapien
gttttggttgctctgcgccaatgta

SEQ ID NO: 997098 - DNA, 25 bp, Homo sapien
tgcttgtggtctctgttttggttgc

SEQ ID NO: 997099 - DNA, 25 bp, Homo sapien
tccgggggcccctgcttgtggtctc

SEQ ID NO: 997100 - DNA, 25 bp, Homo sapien
tctccagagactgctggcggcttct

SEQ ID NO: 997101 - DNA, 25 bp, Homo sapien
cactctgagtgtcctgagcatgagg

SEQ ID NO: 997102 - DNA, 25 bp, Homo sapien
gacccatggcattaggctttttctg

SEQ ID NO: 997103 - DNA, 25 bp, Homo sapien
cctggagcgggctagagttctgtct

SEQ ID NO: 997104 - DNA, 25 bp, Homo sapien
caggtatctctaagggatcatgttg

SEQ ID NO: 997105 - DNA, 25 bp, Homo sapien
gactgttcaggtatctctaagggat

SEQ ID NO: 997106 - DNA, 25 bp, Homo sapien
atgagtttgagggactgttcaggta

SEQ ID NO: 997107 - DNA, 25 bp, Homo sapien
tgagggactgttcaggtatctctaa

SEQ ID NO: 997108 - DNA, 25 bp, Homo sapien
gtccctggcagggattctctgtggg

SEQ ID NO: 997109 - DNA, 25 bp, Homo sapien
cctggcagggattctctgtgggttc

SEQ ID NO: 997110 - DNA, 25 bp, Homo sapien
tggcagggattctctgtgggttcca

SEQ ID NO: 997111 - DNA, 25 bp, Homo sapien
tccctggcagggattctctgtgggt

SEQ ID NO: 997112 - DNA, 25 bp, Homo sapien
tccgtagatccggtacagtccacac

SEQ ID NO: 997113 - DNA, 25 bp, Homo sapien
ccctgccagggacggtgtggttact

SEQ ID NO: 997114 - DNA, 25 bp, Homo sapien
ccacagactccgtagatccggtaca

SEQ ID NO: 997115 - DNA, 25 bp, Homo sapien
acaaaggctgcaccggatgatgaag

SEQ ID NO: 997116 - DNA, 25 bp, Homo sapien
tcacagtcccgcttaaaacctgaca

SEQ ID NO: 997117 - DNA, 25 bp, Homo sapien
tgccaggatgaacggcaagctctga

SEQ ID NO: 997118 - DNA, 25 bp, Homo sapien
cctgactgccaggatgaacggcaag

SEQ ID NO: 997119 - DNA, 25 bp, Homo sapien
aaacctgacagtgacccctgactgc

SEQ ID NO: 997120 - DNA, 25 bp, Homo sapien
tccaaagcagagagagcgaagggaa

SEQ ID NO: 997121 - DNA, 25 bp, Homo sapien
ccaaagcagagagagcgaagggaag

SEQ ID NO: 997122 - DNA, 25 bp, Homo sapien
gtccaaagcagagagagcgaaggga

SEQ ID NO: 997123 - DNA, 25 bp, Homo sapien
ggcaaatggccagatgattggataa

SEQ ID NO: 997124 - DNA, 25 bp, Homo sapien
gcccgggcaaatggccagatgattg

SEQ ID NO: 997125 - DNA, 25 bp, Homo sapien
cgggcaaatggccagatgattggat

SEQ ID NO: 997126 - DNA, 25 bp, Homo sapien
agagcccgggcaaatggccagatga

SEQ ID NO: 997127 - DNA, 25 bp, Homo sapien
caactgccaaagtatctgcccaggg

SEQ ID NO: 997128 - DNA, 25 bp, Homo sapien
acagggaaaaagtgaatggtcccag

SEQ ID NO: 997129 - DNA, 25 bp, Homo sapien
tgggagagacactggcaactgccaa

SEQ ID NO: 997130 - DNA, 25 bp, Homo sapien
aaaaagtgaatggtcccagagactg

SEQ ID NO: 997131 - DNA, 25 bp, Homo sapien
ggtgatgttagtgtcaaaaggagag

SEQ ID NO: 997132 - DNA, 25 bp, Homo sapien
gtgatgttagtgtcaaaaggagagc

SEQ ID NO: 997133 - DNA, 25 bp, Homo sapien
tgatgttagtgtcaaaaggagagcc

SEQ ID NO: 997134 - DNA, 25 bp, Homo sapien
gtcatggccagcaggttcctctatc

SEQ ID NO: 997135 - DNA, 25 bp, Homo sapien
tgttctaattgtttgggatggtagg

SEQ ID NO: 997136 - DNA, 25 bp, Homo sapien
aagtgttctaattgtttgggatggt

SEQ ID NO: 997137 - DNA, 25 bp, Homo sapien
agtgttctaattgtttgggatggta

SEQ ID NO: 997138 - DNA, 25 bp, Homo sapien
gatggtagggtaaatctggtttctg

SEQ ID NO: 997139 - DNA, 25 bp, Homo sapien
cttaattcatagtcttcattaaaat

SEQ ID NO: 997140 - DNA, 25 bp, Homo sapien
ctgtttattataagattctgaatgc

SEQ ID NO: 997141 - DNA, 25 bp, Homo sapien
tctgaatgcttggtgttggaaataa

SEQ ID NO: 997142 - DNA, 25 bp, Homo sapien
gattctattgtaacttcagtacact

SEQ ID NO: 997143 - DNA, 25 bp, Homo sapien
cagaagcactccatggcttccacaa

SEQ ID NO: 997144 - DNA, 25 bp, Homo sapien
tcttgccattcctagaacagaagca

SEQ ID NO: 997145 - DNA, 25 bp, Homo sapien
ttgccattcctagaacagaagcact

SEQ ID NO: 997146 - DNA, 25 bp, Homo sapien
ggtcttgccattcctagaacagaag

SEQ ID NO: 997147 - DNA, 25 bp, Homo sapien
caggacccataggcctcaggatgag

SEQ ID NO: 997148 - DNA, 25 bp, Homo sapien
aggacccataggcctcaggatgagg

SEQ ID NO: 997149 - DNA, 25 bp, Homo sapien
aagatgccaggacccataggcctca

SEQ ID NO: 997150 - DNA, 25 bp, Homo sapien
tgtgaaagcaagaacccttataacc

SEQ ID NO: 997151 - DNA, 25 bp, Homo sapien
tgaaagcaagaacccttataaccaa

SEQ ID NO: 997152 - DNA, 25 bp, Homo sapien
ctgtgaaagcaagaacccttataac

SEQ ID NO: 997153 - DNA, 25 bp, Homo sapien
gtgaaagcaagaacccttataacca

SEQ ID NO: 997154 - DNA, 25 bp, Homo sapien
ttatcttgtagaatgaccagtataa

SEQ ID NO: 997155 - DNA, 25 bp, Homo sapien
tcttgtagaatgaccagtataacaa

SEQ ID NO: 997156 - DNA, 25 bp, Homo sapien
gaatgaccagtataacaatatgttg

SEQ ID NO: 997157 - DNA, 25 bp, Homo sapien
tgtagaatgaccagtataacaatat

SEQ ID NO: 997158 - DNA, 25 bp, Homo sapien
ggaacatcactgtccaccttgtctt

SEQ ID NO: 997159 - DNA, 25 bp, Homo sapien
catgaagagtcccatcacttctgtc

SEQ ID NO: 997160 - DNA, 25 bp, Homo sapien
gtttaatgggcctagtcaggtcagg

SEQ ID NO: 997161 - DNA, 25 bp, Homo sapien
tgtcttcctccaatgatgaaggccc

SEQ ID NO: 997162 - DNA, 25 bp, Homo sapien
tacttagagaacagtccatggatct

SEQ ID NO: 997163 - DNA, 25 bp, Homo sapien
caaagtccttgctttcggtggtaga

SEQ ID NO: 997164 - DNA, 25 bp, Homo sapien
tttttcaagttatctgcagggatgg

SEQ ID NO: 997165 - DNA, 25 bp, Homo sapien
ctttcggtggtagaatgaaatactt

SEQ ID NO: 997166 - DNA, 25 bp, Homo sapien
agctgttttctgcacgctctgagcc

SEQ ID NO: 997167 - DNA, 25 bp, Homo sapien
agagctgttttctgcacgctctgag

SEQ ID NO: 997168 - DNA, 25 bp, Homo sapien
gagctgttttctgcacgctctgagc

SEQ ID NO: 997169 - DNA, 25 bp, Homo sapien
ctgttttctgcacgctctgagcctc

SEQ ID NO: 997170 - DNA, 25 bp, Homo sapien
ctgtatgaatgccccagtctgtgtc

SEQ ID NO: 997171 - DNA, 25 bp, Homo sapien
gtatgaatgccccagtctgtgtcca

SEQ ID NO: 997172 - DNA, 25 bp, Homo sapien
tgaatgccccagtctgtgtccaccg

SEQ ID NO: 997173 - DNA, 25 bp, Homo sapien
tatgaatgccccagtctgtgtccac

SEQ ID NO: 997174 - DNA, 25 bp, Homo sapien
tccttaaatgccacaatcacgcggg

SEQ ID NO: 997175 - DNA, 25 bp, Homo sapien
cattttcagggcacacagaacatgc

SEQ ID NO: 997176 - DNA, 25 bp, Homo sapien
aaaagtgccgaaaatgccacagtca

SEQ ID NO: 997177 - DNA, 25 bp, Homo sapien
tacagacaacctgagtctcacactg

SEQ ID NO: 997178 - DNA, 25 bp, Homo sapien
ttcagtgtgggaaagaacctcagac

SEQ ID NO: 997179 - DNA, 25 bp, Homo sapien
tgatgatgatgcagactgttacccc

SEQ ID NO: 997180 - DNA, 25 bp, Homo sapien
gagtagggctccacgaatcatcatt

SEQ ID NO: 997181 - DNA, 25 bp, Homo sapien
cagaggtagcccttgttgttagaca

SEQ ID NO: 997182 - DNA, 25 bp, Homo sapien
cactaacatctttaaacccagtggg

SEQ ID NO: 997183 - DNA, 25 bp, Homo sapien
tgggcttcccctagagaggtttaga

SEQ ID NO: 997184 - DNA, 25 bp, Homo sapien
gcacacttatggatgccagtcaaca

SEQ ID NO: 997185 - DNA, 25 bp, Homo sapien
gcaaacccaggtgaatcgttcttgt

SEQ ID NO: 997186 - DNA, 25 bp, Homo sapien
tactgaccaatgttccaaaagcaag

SEQ ID NO: 997187 - DNA, 25 bp, Homo sapien
cccgtcgtaggtattggaagtactg

SEQ ID NO: 997188 - DNA, 25 bp, Homo sapien
catggtccagaggagtgggtggtca

SEQ ID NO: 997189 - DNA, 25 bp, Homo sapien
agtcacaacaccagacccgtcgtag

SEQ ID NO: 997190 - DNA, 25 bp, Homo sapien
tggctgaattatagaaaatctgact

SEQ ID NO: 997191 - DNA, 25 bp, Homo sapien
tgtccaacactttagctggctgaat

SEQ ID NO: 997192 - DNA, 25 bp, Homo sapien
taccctagaggatttgtccaacact

SEQ ID NO: 997193 - DNA, 25 bp, Homo sapien
ctcttcgtttctaccctagaggatt

SEQ ID NO: 997194 - DNA, 25 bp, Homo sapien
ctgctgcctgtgtccctacgcggtg

SEQ ID NO: 997195 - DNA, 25 bp, Homo sapien
agccagaccaactggtccactcagg

SEQ ID NO: 997196 - DNA, 25 bp, Homo sapien
taagattctggctcaatcttgatca

SEQ ID NO: 997197 - DNA, 25 bp, Homo sapien
attcccgctcctctcacaaaggcat

SEQ ID NO: 997198 - DNA, 25 bp, Homo sapien
ctgccactctagctcctccagatct

SEQ ID NO: 997199 - DNA, 25 bp, Homo sapien
ctgttacagtgagtacctgccactc

SEQ ID NO: 997200 - DNA, 25 bp, Homo sapien
gtgagtacctgccactctagctcct

SEQ ID NO: 997201 - DNA, 25 bp, Homo sapien
tacagtgagtacctgccactctagc

SEQ ID NO: 997202 - DNA, 25 bp, Homo sapien
tgtggtccaatcaatattgggtgga

SEQ ID NO: 997203 - DNA, 25 bp, Homo sapien
gtccaatcaatattgggtggaaccc

SEQ ID NO: 997204 - DNA, 25 bp, Homo sapien
atcaatattgggtggaaccctcttg

SEQ ID NO: 997205 - DNA, 25 bp, Homo sapien
ctactcattgtggtccaatcaatat

SEQ ID NO: 997206 - DNA, 25 bp, Homo sapien
tttaggccaccagcaaactccctgt

SEQ ID NO: 997207 - DNA, 25 bp, Homo sapien
gagagtccagtgcaaccggtaggaa

SEQ ID NO: 997208 - DNA, 25 bp, Homo sapien
gccagactaatcctcaggcctggag

SEQ ID NO: 997209 - DNA, 25 bp, Homo sapien
catttttacatcagtggccagacta

SEQ ID NO: 997210 - DNA, 25 bp, Homo sapien
tcaagatactttctcgaagtcaaag

SEQ ID NO: 997211 - DNA, 25 bp, Homo sapien
cccggtttattcctctgtcaggagc

SEQ ID NO: 997212 - DNA, 25 bp, Homo sapien
aaggtataggctttctttgtcaaga

SEQ ID NO: 997213 - DNA, 25 bp, Homo sapien
gcacctggtacaagtttaaagcata

SEQ ID NO: 997214 - DNA, 25 bp, Homo sapien
ttttatgaacattatctttacagac

SEQ ID NO: 997215 - DNA, 25 bp, Homo sapien
gaacattatctttacagactttaaa

SEQ ID NO: 997216 - DNA, 25 bp, Homo sapien
cagactttaaaatgctttgaccatg

SEQ ID NO: 997217 - DNA, 25 bp, Homo sapien
ttgaccatgggtatgttataaaact

SEQ ID NO: 997218 - DNA, 25 bp, Homo sapien
tggcagttttctccgcatgtcccca

SEQ ID NO: 997219 - DNA, 25 bp, Homo sapien
taaatatacatgtggtactgtgagt

SEQ ID NO: 997220 - DNA, 25 bp, Homo sapien
ctgtgagttctggattgtaatggtc

SEQ ID NO: 997221 - DNA, 25 bp, Homo sapien
tccccagggaaactcataaacagat

SEQ ID NO: 997222 - DNA, 25 bp, Homo sapien
gagcagaaatatcagcaggaaggtg

SEQ ID NO: 997223 - DNA, 25 bp, Homo sapien
tgctggagtctgaaggcagtttgct

SEQ ID NO: 997224 - DNA, 25 bp, Homo sapien
tagcgagagcatattggcaggtaga

SEQ ID NO: 997225 - DNA, 25 bp, Homo sapien
tgggaacaatttgggaggtgctgga

SEQ ID NO: 997226 - DNA, 25 bp, Homo sapien
tcatcttgagccagagcaagagctg

SEQ ID NO: 997227 - DNA, 25 bp, Homo sapien
tgagccagagcaagagctgctggaa

SEQ ID NO: 997228 - DNA, 25 bp, Homo sapien
atcttgagccagagcaagagctgct

SEQ ID NO: 997229 - DNA, 25 bp, Homo sapien
gccagagcaagagctgctggaagtc

SEQ ID NO: 997230 - DNA, 25 bp, Homo sapien
ggtcgcccaggccaaggcaatagct

SEQ ID NO: 997231 - DNA, 25 bp, Homo sapien
caggccaaggcaatagctactgcca

SEQ ID NO: 997232 - DNA, 25 bp, Homo sapien
ggctgtactgagctcttgcagctga

SEQ ID NO: 997233 - DNA, 25 bp, Homo sapien
aggctgtactgagctcttgcagctg

SEQ ID NO: 997234 - DNA, 25 bp, Homo sapien
gctactctctcttgccttttgtctg

SEQ ID NO: 997235 - DNA, 25 bp, Homo sapien
ctctcttgccttttgtctgagtcag

SEQ ID NO: 997236 - DNA, 25 bp, Homo sapien
ggctactctctcttgccttttgtct

SEQ ID NO: 997237 - DNA, 25 bp, Homo sapien
tcttgccttttgtctgagtcagtta

SEQ ID NO: 997238 - DNA, 25 bp, Homo sapien
tggtaaagactcttgccacctatca

SEQ ID NO: 997239 - DNA, 25 bp, Homo sapien
gactcttgccacctatcagttctgt

SEQ ID NO: 997240 - DNA, 25 bp, Homo sapien
aaagactcttgccacctatcagttc

SEQ ID NO: 997241 - DNA, 25 bp, Homo sapien
gtaaagactcttgccacctatcagt

SEQ ID NO: 997242 - DNA, 25 bp, Homo sapien
tctactttcaaaggtggagctaaac

SEQ ID NO: 997243 - DNA, 25 bp, Homo sapien
tcatctctcatttcgttgtctctac

SEQ ID NO: 997244 - DNA, 25 bp, Homo sapien
atttcgttgtctctactttcaaagg

SEQ ID NO: 997245 - DNA, 25 bp, Homo sapien
gctaaacacacttttctcgaagggc

SEQ ID NO: 997246 - DNA, 25 bp, Homo sapien
ctggatctctggagtttcctggtcc

SEQ ID NO: 997247 - DNA, 25 bp, Homo sapien
ctctggagtttcctggtccttttga

SEQ ID NO: 997248 - DNA, 25 bp, Homo sapien
ctggagtttcctggtccttttgatc

SEQ ID NO: 997249 - DNA, 25 bp, Homo sapien
atctctggagtttcctggtcctttt

SEQ ID NO: 997250 - DNA, 25 bp, Homo sapien
gacgttaaagggagaacacattctg

SEQ ID NO: 997251 - DNA, 25 bp, Homo sapien
gaaatggcccttgtagatgagtaac

SEQ ID NO: 997252 - DNA, 25 bp, Homo sapien
tagttggcatgtaccatggcagcag

SEQ ID NO: 997253 - DNA, 25 bp, Homo sapien
tggtactgcacccacctatagggaa

SEQ ID NO: 997254 - DNA, 25 bp, Homo sapien
cagatgtgattaagtctgattaatc

SEQ ID NO: 997255 - DNA, 25 bp, Homo sapien
tcttgggacgggattatccttggct

SEQ ID NO: 997256 - DNA, 25 bp, Homo sapien
caggtggtcctagtgtagtcacaag

SEQ ID NO: 997257 - DNA, 25 bp, Homo sapien
taatctgattagtcttgggacggga

SEQ ID NO: 997258 - DNA, 25 bp, Homo sapien
tctttgctcagtgctcctttgtctt

SEQ ID NO: 997259 - DNA, 25 bp, Homo sapien
ttgctgccagccctgaaaagtgtga

SEQ ID NO: 997260 - DNA, 25 bp, Homo sapien
tagtgccaacggtcctctttgctca

SEQ ID NO: 997261 - DNA, 25 bp, Homo sapien
tgatcgctcctagatccagcaggaa

SEQ ID NO: 997262 - DNA, 25 bp, Homo sapien
agtgtctacatgcaacctgtgcttt

SEQ ID NO: 997263 - DNA, 25 bp, Homo sapien
tgtctacatgcaacctgtgctttcc

SEQ ID NO: 997264 - DNA, 25 bp, Homo sapien
gcatacaaggctgtccaacaggaat

SEQ ID NO: 997265 - DNA, 25 bp, Homo sapien
ccacttgaggcctgtggttgtaacc

SEQ ID NO: 997266 - DNA, 25 bp, Homo sapien
tgttgttagagtgcgacttctccat

SEQ ID NO: 997267 - DNA, 25 bp, Homo sapien
catctgataacggtgtttctgacaa

SEQ ID NO: 997268 - DNA, 25 bp, Homo sapien
gagacctgttgttagagtgcgactt

SEQ ID NO: 997269 - DNA, 25 bp, Homo sapien
tctgtacttctgcatctgataacgg

SEQ ID NO: 997270 - DNA, 25 bp, Homo sapien
tgcccagccgacattaagatatctt

SEQ ID NO: 997271 - DNA, 25 bp, Homo sapien
taaataagagcatacctcttttact

SEQ ID NO: 997272 - DNA, 25 bp, Homo sapien
gcatgaacgacggtgcccagccgac

SEQ ID NO: 997273 - DNA, 25 bp, Homo sapien
catacagaagctctagtttttagta

SEQ ID NO: 997274 - DNA, 25 bp, Homo sapien
cactaagcttagtagtttccatata

SEQ ID NO: 997275 - DNA, 25 bp, Homo sapien
tccatataacaactcttgaccttct

SEQ ID NO: 997276 - DNA, 25 bp, Homo sapien
acattaagattcctagaaagcactg

SEQ ID NO: 997277 - DNA, 25 bp, Homo sapien
gaggagctgggagtattacgtacac

SEQ ID NO: 997278 - DNA, 25 bp, Homo sapien
actcacagttcgaagacccaagcag

SEQ ID NO: 997279 - DNA, 25 bp, Homo sapien
cccaagcagggccaatgttttcttc

SEQ ID NO: 997280 - DNA, 25 bp, Homo sapien
tggccacaagaaagcgcacatgttc

SEQ ID NO: 997281 - DNA, 25 bp, Homo sapien
ctttgtgaaggaaagggctcacatt

SEQ ID NO: 997282 - DNA, 25 bp, Homo sapien
cacagatgccataatctggtcaaaa

SEQ ID NO: 997283 - DNA, 25 bp, Homo sapien
gcaggtagatcagcgattcctcttg

SEQ ID NO: 997284 - DNA, 25 bp, Homo sapien
gagtgatgtgagtcgcttggaacaa

SEQ ID NO: 997285 - DNA, 25 bp, Homo sapien
tctggtcaaaacgcccagcaaggcc

SEQ ID NO: 997286 - DNA, 25 bp, Homo sapien
cctttgaggtacactggcacaggca

SEQ ID NO: 997287 - DNA, 25 bp, Homo sapien
tcataaaagtattacgatgcctcgg

SEQ ID NO: 997288 - DNA, 25 bp, Homo sapien
aaggtagtgaaacttgtcataaaag

SEQ ID NO: 997289 - DNA, 25 bp, Homo sapien
cctcggttacacagctgatgttgga

SEQ ID NO: 997290 - DNA, 25 bp, Homo sapien
ttagagaagaactccacaagtgccc

SEQ ID NO: 997291 - DNA, 25 bp, Homo sapien
gtttttcctgcaacccaatgagtca

SEQ ID NO: 997292 - DNA, 25 bp, Homo sapien
caacttatatccatgtaggagggca

SEQ ID NO: 997293 - DNA, 25 bp, Homo sapien
tgaaagcaggctgtactgagacacc

SEQ ID NO: 997294 - DNA, 25 bp, Homo sapien
tttttcttctatcttcttttggagc

SEQ ID NO: 997295 - DNA, 25 bp, Homo sapien
tttcttctatcttcttttggagcat

SEQ ID NO: 997296 - DNA, 25 bp, Homo sapien
tctttttcttctatcttcttttgga

SEQ ID NO: 997297 - DNA, 25 bp, Homo sapien
agtctttttcttctatcttcttttg

SEQ ID NO: 997298 - DNA, 25 bp, Homo sapien
cagtgtggtcttgatcaggagttga

SEQ ID NO: 997299 - DNA, 25 bp, Homo sapien
gtcttgatcaggagttgaaatgagc

SEQ ID NO: 997300 - DNA, 25 bp, Homo sapien
caggagttgaaatgagctcacatcc

SEQ ID NO: 997301 - DNA, 25 bp, Homo sapien
ttaaggcacttagtaaagtcagtgt

SEQ ID NO: 997302 - DNA, 25 bp, Homo sapien
tcacagaatccatatagaaagccat

SEQ ID NO: 997303 - DNA, 25 bp, Homo sapien
ttcacagaatccatatagaaagcca

SEQ ID NO: 997304 - DNA, 25 bp, Homo sapien
cgaaggaagaatcccatgagtcaga

SEQ ID NO: 997305 - DNA, 25 bp, Homo sapien
aaggaagaatcccatgagtcagacg

SEQ ID NO: 997306 - DNA, 25 bp, Homo sapien
ggcgaaggaagaatcccatgagtca

SEQ ID NO: 997307 - DNA, 25 bp, Homo sapien
ttaggcgaaggaagaatcccatgag

SEQ ID NO: 997308 - DNA, 25 bp, Homo sapien
aatttctaacagtccagtttgtcat

SEQ ID NO: 997309 - DNA, 25 bp, Homo sapien
gaaaattttacaatgcattgttatc

SEQ ID NO: 997310 - DNA, 25 bp, Homo sapien
gccacaggcaaaaaagaaaatcaag

SEQ ID NO: 997311 - DNA, 25 bp, Homo sapien
tgagaccgttcttccatcactgatc

SEQ ID NO: 997312 - DNA, 25 bp, Homo sapien
gttcttccatcactgatcaagagtg

SEQ ID NO: 997313 - DNA, 25 bp, Homo sapien
tatcaacgatgttagcatcactcga

SEQ ID NO: 997314 - DNA, 25 bp, Homo sapien
tttagggccatctcctagcctttta

SEQ ID NO: 997315 - DNA, 25 bp, Homo sapien
aatttagggccatctcctagccttt

SEQ ID NO: 997316 - DNA, 25 bp, Homo sapien
ttagggccatctcctagccttttac

SEQ ID NO: 997317 - DNA, 25 bp, Homo sapien
atttagggccatctcctagcctttt

SEQ ID NO: 997318 - DNA, 25 bp, Homo sapien
cgatcttttccttcagctcagcaaa

SEQ ID NO: 997319 - DNA, 25 bp, Homo sapien
atcgatcttttccttcagctcagca

SEQ ID NO: 997320 - DNA, 25 bp, Homo sapien
gaacagcgatcgatcttttccttca

SEQ ID NO: 997321 - DNA, 25 bp, Homo sapien
cagaacagcgatcgatcttttcctt

SEQ ID NO: 997322 - DNA, 25 bp, Homo sapien
tccagtacaggggaataggcagcac

SEQ ID NO: 997323 - DNA, 25 bp, Homo sapien
cagtacaggggaataggcagcactg

SEQ ID NO: 997324 - DNA, 25 bp, Homo sapien
aatccagtacaggggaataggcagc

SEQ ID NO: 997325 - DNA, 25 bp, Homo sapien
tacaggggaataggcagcactgatt

SEQ ID NO: 997326 - DNA, 25 bp, Homo sapien
ctgcttccattggtgagtcattttt

SEQ ID NO: 997327 - DNA, 25 bp, Homo sapien
cagctgcttccattggtgagtcatt

SEQ ID NO: 997328 - DNA, 25 bp, Homo sapien
gccagctgcttccattggtgagtca

SEQ ID NO: 997329 - DNA, 25 bp, Homo sapien
gctgcttccattggtgagtcatttt

SEQ ID NO: 997330 - DNA, 25 bp, Homo sapien
gccttgatgaacatccttgagagac

SEQ ID NO: 997331 - DNA, 25 bp, Homo sapien
gcaatgttgccttgatgaacatcct

SEQ ID NO: 997332 - DNA, 25 bp, Homo sapien
tgttgccttgatgaacatccttgag

SEQ ID NO: 997333 - DNA, 25 bp, Homo sapien
cttgatgaacatccttgagagacac

SEQ ID NO: 997334 - DNA, 25 bp, Homo sapien
gactttacttcagttctaacggtga

SEQ ID NO: 997335 - DNA, 25 bp, Homo sapien
atccagaacctcaaacagcgtggtt

SEQ ID NO: 997336 - DNA, 25 bp, Homo sapien
aggatgcaatccagaacctcaaaca

SEQ ID NO: 997337 - DNA, 25 bp, Homo sapien
tacttcagttctaacggtgactgga

SEQ ID NO: 997338 - DNA, 25 bp, Homo sapien
tgcgacatcaatgatagtcatatag

SEQ ID NO: 997339 - DNA, 25 bp, Homo sapien
ctgcgacatcaatgatagtcatata

SEQ ID NO: 997340 - DNA, 25 bp, Homo sapien
aggcacaacttgaatgagtcctttc

SEQ ID NO: 997341 - DNA, 25 bp, Homo sapien
caggcacaacttgaatgagtccttt

SEQ ID NO: 997342 - DNA, 25 bp, Homo sapien
tgacgataatgttgacgtgagtctt

SEQ ID NO: 997343 - DNA, 25 bp, Homo sapien
cgataatgttgacgtgagtcttttc

SEQ ID NO: 997344 - DNA, 25 bp, Homo sapien
aatgacgataatgttgacgtgagtc

SEQ ID NO: 997345 - DNA, 25 bp, Homo sapien
tccaatgacgataatgttgacgtga

SEQ ID NO: 997346 - DNA, 25 bp, Homo sapien
ggtagttttcatgacacctgtgttc

SEQ ID NO: 997347 - DNA, 25 bp, Homo sapien
ttttcatgacacctgtgttctggtg

SEQ ID NO: 997348 - DNA, 25 bp, Homo sapien
gcttttaggggtagttttcatgaca

SEQ ID NO: 997349 - DNA, 25 bp, Homo sapien
taggggtagttttcatgacacctgt

SEQ ID NO: 997350 - DNA, 25 bp, Homo sapien
agtagcatagtattctctgacttca

SEQ ID NO: 997351 - DNA, 25 bp, Homo sapien
cttagtagcatagtattctctgact

SEQ ID NO: 997352 - DNA, 25 bp, Homo sapien
caaagtctccattgatgaattcagg

SEQ ID NO: 997353 - DNA, 25 bp, Homo sapien
tgacttcaggcctaatagaatcaaa

SEQ ID NO: 997354 - DNA, 25 bp, Homo sapien
tcaagccgcagcaagagggcaatgc

SEQ ID NO: 997355 - DNA, 25 bp, Homo sapien
aggtgcacagtcatcaagccgcagc

SEQ ID NO: 997356 - DNA, 25 bp, Homo sapien
aatgcaaagttgctccacagcacaa

SEQ ID NO: 997357 - DNA, 25 bp, Homo sapien
tttcgaaaatcctggcccttgtctg

SEQ ID NO: 997358 - DNA, 25 bp, Homo sapien
ttcgtggtttgtttttatgaatgga

SEQ ID NO: 997359 - DNA, 25 bp, Homo sapien
tttttatgaatggagaagtggggaa

SEQ ID NO: 997360 - DNA, 25 bp, Homo sapien
gtttgtttttatgaatggagaagtg

SEQ ID NO: 997361 - DNA, 25 bp, Homo sapien
ttgtttttatgaatggagaagtggg

SEQ ID NO: 997362 - DNA, 25 bp, Homo sapien
aatgatcactctgtattccttgatt

SEQ ID NO: 997363 - DNA, 25 bp, Homo sapien
caaatgatcactctgtattccttga

SEQ ID NO: 997364 - DNA, 25 bp, Homo sapien
cacaaatgatcactctgtattcctt

SEQ ID NO: 997365 - DNA, 25 bp, Homo sapien
acaaatgatcactctgtattccttg

SEQ ID NO: 997366 - DNA, 25 bp, Homo sapien
ttccgataaaagagttgccaagacc

SEQ ID NO: 997367 - DNA, 25 bp, Homo sapien
gcctcgaggagagtttcaagttgga

SEQ ID NO: 997368 - DNA, 25 bp, Homo sapien
gacccttggaagctccacagtaatg

SEQ ID NO: 997369 - DNA, 25 bp, Homo sapien
cagtaatgggtgtctttcggtgtcc

SEQ ID NO: 997370 - DNA, 25 bp, Homo sapien
tgtagagttagagttacaacagtca

SEQ ID NO: 997371 - DNA, 25 bp, Homo sapien
agtcatcctcttcacacttgattaa

SEQ ID NO: 997372 - DNA, 25 bp, Homo sapien
gggcacaaatagttgtagagttaga

SEQ ID NO: 997373 - DNA, 25 bp, Homo sapien
gttacaacagtcatcctcttcacac

SEQ ID NO: 997374 - DNA, 25 bp, Homo sapien
tatctgaagtaactggcctagaccc

SEQ ID NO: 997375 - DNA, 25 bp, Homo sapien
catgagagaatacttggcaccagat

SEQ ID NO: 997376 - DNA, 25 bp, Homo sapien
tatttgccagcaagcaggctacagg

SEQ ID NO: 997377 - DNA, 25 bp, Homo sapien
tacaggcccaatacataagcttggc

SEQ ID NO: 997378 - DNA, 25 bp, Homo sapien
cacattgtccatgtcaggtcttgga

SEQ ID NO: 997379 - DNA, 25 bp, Homo sapien
tcaggtcttggaggatactgtcaga

SEQ ID NO: 997380 - DNA, 25 bp, Homo sapien
tcttggaggatactgtcagaggaat

SEQ ID NO: 997381 - DNA, 25 bp, Homo sapien
ttgagcgctttttcacacattgtcc

SEQ ID NO: 997382 - DNA, 25 bp, Homo sapien
gatatcatataagcggttggcacct

SEQ ID NO: 997383 - DNA, 25 bp, Homo sapien
gttggcacctccatcggcacaggct

SEQ ID NO: 997384 - DNA, 25 bp, Homo sapien
atataagcggttggcacctccatcg

SEQ ID NO: 997385 - DNA, 25 bp, Homo sapien
tccttcggtgatatcatataagcgg

SEQ ID NO: 997386 - DNA, 25 bp, Homo sapien
cttcaaatagaaagaacaaaatcat

SEQ ID NO: 997387 - DNA, 25 bp, Homo sapien
ctgttgacactgctggtactaaaaa

SEQ ID NO: 997388 - DNA, 25 bp, Homo sapien
tgacactgctggtactaaaaacaat

SEQ ID NO: 997389 - DNA, 25 bp, Homo sapien
gttgacactgctggtactaaaaaca

SEQ ID NO: 997390 - DNA, 25 bp, Homo sapien
cactgctggtactaaaaacaattct

SEQ ID NO: 997391 - DNA, 25 bp, Homo sapien
actgtaagctccattcacagtcagt

SEQ ID NO: 997392 - DNA, 25 bp, Homo sapien
tactgtaagctccattcacagtcag

SEQ ID NO: 997393 - DNA, 25 bp, Homo sapien
ctgtaagctccattcacagtcagtg

SEQ ID NO: 997394 - DNA, 25 bp, Homo sapien
ttgtgttacaatcacctacagtatt

SEQ ID NO: 997395 - DNA, 25 bp, Homo sapien
tacagtaacatgccgtataagtttg

SEQ ID NO: 997396 - DNA, 25 bp, Homo sapien
cagtaacatgccgtataagtttgta

SEQ ID NO: 997397 - DNA, 25 bp, Homo sapien
agtacagtaacatgccgtataagtt

SEQ ID NO: 997398 - DNA, 25 bp, Homo sapien
agatgatgcgttgttctgagtcaga

SEQ ID NO: 997399 - DNA, 25 bp, Homo sapien
gatatgcatattcagactctacttg

SEQ ID NO: 997400 - DNA, 25 bp, Homo sapien
gaaaacatttcaccaatcatgagag

SEQ ID NO: 997401 - DNA, 25 bp, Homo sapien
agtcagagccttggaatcacatgcc

SEQ ID NO: 997402 - DNA, 25 bp, Homo sapien
ccaccacgcctagcactatccttac

SEQ ID NO: 997403 - DNA, 25 bp, Homo sapien
gccaccacgcctagcactatcctta

SEQ ID NO: 997404 - DNA, 25 bp, Homo sapien
tttcctgtgccagaaaatctaaagc

SEQ ID NO: 997405 - DNA, 25 bp, Homo sapien
ctttttttcctgtgccagaaaatct

SEQ ID NO: 997406 - DNA, 25 bp, Homo sapien
tttttcctgtgccagaaaatctaaa

SEQ ID NO: 997407 - DNA, 25 bp, Homo sapien
tcctgtgccagaaaatctaaagctt

SEQ ID NO: 997408 - DNA, 25 bp, Homo sapien
aaagcaaacgatgttgtagtcaagc

SEQ ID NO: 997409 - DNA, 25 bp, Homo sapien
caaacgatgttgtagtcaagcagta

SEQ ID NO: 997410 - DNA, 25 bp, Homo sapien
aacgatgttgtagtcaagcagtaca

SEQ ID NO: 997411 - DNA, 25 bp, Homo sapien
agcaaacgatgttgtagtcaagcag

SEQ ID NO: 997412 - DNA, 25 bp, Homo sapien
cagtgtttgaaagagggcattttcc

SEQ ID NO: 997413 - DNA, 25 bp, Homo sapien
gataaaaggagatgaatcactaatg

SEQ ID NO: 997414 - DNA, 25 bp, Homo sapien
ttttgtgaaacactaacagtgtttg

SEQ ID NO: 997415 - DNA, 25 bp, Homo sapien
tgataaaaggagatgaatcactaat

SEQ ID NO: 997416 - DNA, 25 bp, Homo sapien
aaaaatcacatatcaggcaaggcgc

SEQ ID NO: 997417 - DNA, 25 bp, Homo sapien
gatgtggtgctattctctaaatgtc

SEQ ID NO: 997418 - DNA, 25 bp, Homo sapien
acaaatcccactaggattgcagcag

SEQ ID NO: 997419 - DNA, 25 bp, Homo sapien
accaagctatacaccaatgtgtaca

SEQ ID NO: 997420 - DNA, 25 bp, Homo sapien
tctgcaacccataaagagtggtagt

SEQ ID NO: 997421 - DNA, 25 bp, Homo sapien
tttttagaggcaaggctatcaagct

SEQ ID NO: 997422 - DNA, 25 bp, Homo sapien
tgacaagcgtgatttagatggcagc

SEQ ID NO: 997423 - DNA, 25 bp, Homo sapien
tatggtggtcgtaactctgcaaccc

SEQ ID NO: 997424 - DNA, 25 bp, Homo sapien
atatatggtaaaaattaccaaaatg

SEQ ID NO: 997425 - DNA, 25 bp, Homo sapien
tatatggtaaaaattaccaaaatgc

SEQ ID NO: 997426 - DNA, 25 bp, Homo sapien
atggtaaaaattaccaaaatgctga

SEQ ID NO: 997427 - DNA, 25 bp, Homo sapien
tatggtaaaaattaccaaaatgctg

SEQ ID NO: 997428 - DNA, 25 bp, Homo sapien
tgaagcctggtgtaacaaatgtccc

SEQ ID NO: 997429 - DNA, 25 bp, Homo sapien
tttcagcaacgcctagtttttaatg

SEQ ID NO: 997430 - DNA, 25 bp, Homo sapien
tgttcagtacttcacacttccggta

SEQ ID NO: 997431 - DNA, 25 bp, Homo sapien
taacatgactattctcttgagcagc

SEQ ID NO: 997432 - DNA, 25 bp, Homo sapien
cacttattggtgaatctaacagttt

SEQ ID NO: 997433 - DNA, 25 bp, Homo sapien
tccctttgtattaattatgcaacaa

SEQ ID NO: 997434 - DNA, 25 bp, Homo sapien
gtaaaccataggaacaacattaggc

SEQ ID NO: 997435 - DNA, 25 bp, Homo sapien
tcctgaagaaacattttggatagct

SEQ ID NO: 997436 - DNA, 25 bp, Homo sapien
tacaagagtgatgtttttgaaaacc

SEQ ID NO: 997437 - DNA, 25 bp, Homo sapien
atgtatttcccaactacaagagtga

SEQ ID NO: 997438 - DNA, 25 bp, Homo sapien
ctacaagagtgatgtttttgaaaac

SEQ ID NO: 997439 - DNA, 25 bp, Homo sapien
gtatttcccaactacaagagtgatg

SEQ ID NO: 997440 - DNA, 25 bp, Homo sapien
atcagccctcaaggctgatgtgatt

SEQ ID NO: 997441 - DNA, 25 bp, Homo sapien
aaaatcacatcagccctcaaggctg

SEQ ID NO: 997442 - DNA, 25 bp, Homo sapien
cagccctcaaggctgatgtgatttt

SEQ ID NO: 997443 - DNA, 25 bp, Homo sapien
tcacatcagccctcaaggctgatgt

SEQ ID NO: 997444 - DNA, 25 bp, Homo sapien
gtcactccaagccagaacacgtctg

SEQ ID NO: 997445 - DNA, 25 bp, Homo sapien
taaaagtccttgttagcatcatggc

SEQ ID NO: 997446 - DNA, 25 bp, Homo sapien
gaacacgtctgcaagggaaactgaa

SEQ ID NO: 997447 - DNA, 25 bp, Homo sapien
tataaaagtccttgttagcatcatg

SEQ ID NO: 997448 - DNA, 25 bp, Homo sapien
tttcagccaactcctgacgtgtgtg

SEQ ID NO: 997449 - DNA, 25 bp, Homo sapien
tattatcagcgatggcatttttgcc

SEQ ID NO: 997450 - DNA, 25 bp, Homo sapien
tgtgtgcatccacgcagatctctgc

SEQ ID NO: 997451 - DNA, 25 bp, Homo sapien
tctgctcaatccctaaagtcccttt

SEQ ID NO: 997452 - DNA, 25 bp, Homo sapien
aggaaagggtcctgtctcgttgtct

SEQ ID NO: 997453 - DNA, 25 bp, Homo sapien
gattgtaaatcctgctaaggaaagg

SEQ ID NO: 997454 - DNA, 25 bp, Homo sapien
ctgctagctcctcagctcatggagc

SEQ ID NO: 997455 - DNA, 25 bp, Homo sapien
tgtaatcccggcaatctgctagctc

SEQ ID NO: 997456 - DNA, 25 bp, Homo sapien
gctatggcatacaaccaccacttgg

SEQ ID NO: 997457 - DNA, 25 bp, Homo sapien
gttcatgttacagagctatggcata

SEQ ID NO: 997458 - DNA, 25 bp, Homo sapien
acagagctatggcatacaaccacca

SEQ ID NO: 997459 - DNA, 25 bp, Homo sapien
tgttacagagctatggcatacaacc

SEQ ID NO: 997460 - DNA, 25 bp, Homo sapien
gcctgttcacgaatgagagatggta

SEQ ID NO: 997461 - DNA, 25 bp, Homo sapien
cttggtaagcctgttcacgaatgag

SEQ ID NO: 997462 - DNA, 25 bp, Homo sapien
aagtaaagggataattcaggctgac

SEQ ID NO: 997463 - DNA, 25 bp, Homo sapien
cctcggttggcagcatagcatgact

SEQ ID NO: 997464 - DNA, 25 bp, Homo sapien
ctttgttccaaagatgacgaaaata

SEQ ID NO: 997465 - DNA, 25 bp, Homo sapien
gacgaaaatagttgtccaaaggctg

SEQ ID NO: 997466 - DNA, 25 bp, Homo sapien
ccaaaggctgattaagaattacaag

SEQ ID NO: 997467 - DNA, 25 bp, Homo sapien
attacaaggcagtacttcaaattcc

SEQ ID NO: 997468 - DNA, 25 bp, Homo sapien
aggttagccatattcttgttgccaa

SEQ ID NO: 997469 - DNA, 25 bp, Homo sapien
cacactgacatctctggattgctgg

SEQ ID NO: 997470 - DNA, 25 bp, Homo sapien
ttctcactataaccaaatgaatgaa

SEQ ID NO: 997471 - DNA, 25 bp, Homo sapien
gagttcaaagctgctccatcaactg

SEQ ID NO: 997472 - DNA, 25 bp, Homo sapien
ggaaactttcacattctagggcaga

SEQ ID NO: 997473 - DNA, 25 bp, Homo sapien
cctgtttgataaagggaatctctcc

SEQ ID NO: 997474 - DNA, 25 bp, Homo sapien
ggctagtgatcatcccagagggtta

SEQ ID NO: 997475 - DNA, 25 bp, Homo sapien
tctctgccaggtgagtattaaacac

SEQ ID NO: 997476 - DNA, 25 bp, Homo sapien
aaaaatgcatcacggtcaggcaacg

SEQ ID NO: 997477 - DNA, 25 bp, Homo sapien
tgaccgtccttaatgcctgcaatgt

SEQ ID NO: 997478 - DNA, 25 bp, Homo sapien
taggaaatcagggacagaacccagg

SEQ ID NO: 997479 - DNA, 25 bp, Homo sapien
caggctggaagtcacgctggctcta

SEQ ID NO: 997480 - DNA, 25 bp, Homo sapien
ctccaacggggtaaaggcatgctcc

SEQ ID NO: 997481 - DNA, 25 bp, Homo sapien
cagtggaaagcaggggctccaacgg

SEQ ID NO: 997482 - DNA, 25 bp, Homo sapien
ccaacggggtaaaggcatgctccat

SEQ ID NO: 997483 - DNA, 25 bp, Homo sapien
ggctccaacggggtaaaggcatgct

SEQ ID NO: 997484 - DNA, 25 bp, Homo sapien
aaaaagtgaagttagactctcagtt

SEQ ID NO: 997485 - DNA, 25 bp, Homo sapien
aagtgaagttagactctcagtttta

SEQ ID NO: 997486 - DNA, 25 bp, Homo sapien
aaaaaagtgaagttagactctcagt

SEQ ID NO: 997487 - DNA, 25 bp, Homo sapien
aaaagtgaagttagactctcagttt

SEQ ID NO: 997488 - DNA, 25 bp, Homo sapien
ttaaacatcgcgcagaaccaacagc

SEQ ID NO: 997489 - DNA, 25 bp, Homo sapien
gaaccaacagcacgggagccgcctg

SEQ ID NO: 997490 - DNA, 25 bp, Homo sapien
gcctgaacctggcactcggcagcgg

SEQ ID NO: 997491 - DNA, 25 bp, Homo sapien
agccgcctgaacctggcactcggca

SEQ ID NO: 997492 - DNA, 25 bp, Homo sapien
ccacggctcgcctacagcaccgccg

SEQ ID NO: 997493 - DNA, 25 bp, Homo sapien
ccgcgcgggccgctatgaggtccga

SEQ ID NO: 997494 - DNA, 25 bp, Homo sapien
ctatgaggtccgaggggttgcccct

SEQ ID NO: 997495 - DNA, 25 bp, Homo sapien
gacccgccacggctcgcctacagca

SEQ ID NO: 997496 - DNA, 25 bp, Homo sapien
agatcgcaggctgcgggagctacgg

SEQ ID NO: 997497 - DNA, 25 bp, Homo sapien
gagctacggcgatcgaccgctcggc

SEQ ID NO: 997498 - DNA, 25 bp, Homo sapien
ctgaggagccttggcgcgcggtcct

SEQ ID NO: 997499 - DNA, 25 bp, Homo sapien
gcgcggtcctcgctcgcaggtttta

SEQ ID NO: 997500 - DNA, 25 bp, Homo sapien
caaggcttcgttttctgggctggtt

SEQ ID NO: 997501 - DNA, 25 bp, Homo sapien
tcaagtctccaaggcttcgttttct

SEQ ID NO: 997502 - DNA, 25 bp, Homo sapien
agctgtagtactgctgccgggccct

SEQ ID NO: 997503 - DNA, 25 bp, Homo sapien
tgggctggttctgctagctgtagta

SEQ ID NO: 997504 - DNA, 25 bp, Homo sapien
tcagagtgtcttggcagtgtgattt

SEQ ID NO: 997505 - DNA, 25 bp, Homo sapien
gcatagaaacggcatctcactctgc

SEQ ID NO: 997506 - DNA, 25 bp, Homo sapien
tgtttttagcatagaaacggcatct

SEQ ID NO: 997507 - DNA, 25 bp, Homo sapien
agcagaacaccctaggccctaatgt

SEQ ID NO: 997508 - DNA, 25 bp, Homo sapien
tgcagccattggtacacccttgagt

SEQ ID NO: 997509 - DNA, 25 bp, Homo sapien
agggagtgcagccattggtacaccc

SEQ ID NO: 997510 - DNA, 25 bp, Homo sapien
gccattggtacacccttgagtgaaa

SEQ ID NO: 997511 - DNA, 25 bp, Homo sapien
tacacccttgagtgaaaacaagtcc

SEQ ID NO: 997512 - DNA, 25 bp, Homo sapien
aaataatcgatgacatttggccaga

SEQ ID NO: 997513 - DNA, 25 bp, Homo sapien
aatctgttcaagagtggtgccatcc

SEQ ID NO: 997514 - DNA, 25 bp, Homo sapien
tacctggaagacttggatagttctg

SEQ ID NO: 997515 - DNA, 25 bp, Homo sapien
gatagttctggatatccaataactg

SEQ ID NO: 997516 - DNA, 25 bp, Homo sapien
accccatcgccccaggtcactgaag

SEQ ID NO: 997517 - DNA, 25 bp, Homo sapien
caccccatcgccccaggtcactgaa

SEQ ID NO: 997518 - DNA, 25 bp, Homo sapien
ccctctgtcaccccatcgccccagg

SEQ ID NO: 997519 - DNA, 25 bp, Homo sapien
cctctgtcaccccatcgccccaggt

SEQ ID NO: 997520 - DNA, 25 bp, Homo sapien
tcgctgcactacttctggtctcatc

SEQ ID NO: 997521 - DNA, 25 bp, Homo sapien
ttcgctgcactacttctggtctcat

SEQ ID NO: 997522 - DNA, 25 bp, Homo sapien
cttcgctgcactacttctggtctca

SEQ ID NO: 997523 - DNA, 25 bp, Homo sapien
cgctgcactacttctggtctcatct

SEQ ID NO: 997524 - DNA, 25 bp, Homo sapien
tcaaactttgccacagttggttttg

SEQ ID NO: 997525 - DNA, 25 bp, Homo sapien
caaactttgccacagttggttttga

SEQ ID NO: 997526 - DNA, 25 bp, Homo sapien
catcttttggtgtcctgtacaaatc

SEQ ID NO: 997527 - DNA, 25 bp, Homo sapien
gataaattgcggtagcatcttttgg

SEQ ID NO: 997528 - DNA, 25 bp, Homo sapien
cggtagcatcttttggtgtcctgta

SEQ ID NO: 997529 - DNA, 25 bp, Homo sapien
caagattgctgataaattgcggtag

SEQ ID NO: 997530 - DNA, 25 bp, Homo sapien
gccattgtttggtgttgctccttca

SEQ ID NO: 997531 - DNA, 25 bp, Homo sapien
tgtagatgtcctcacacttgtaggg

SEQ ID NO: 997532 - DNA, 25 bp, Homo sapien
catatgaaatgagccttccttgctc

SEQ ID NO: 997533 - DNA, 25 bp, Homo sapien
tataggagctgcagaaacttgtaga

SEQ ID NO: 997534 - DNA, 25 bp, Homo sapien
gctcatctgtgggagactctgcttg

SEQ ID NO: 997535 - DNA, 25 bp, Homo sapien
caaagaatgggcctgcttgagtcca

SEQ ID NO: 997536 - DNA, 25 bp, Homo sapien
ggagaatccttttgaccagtcacat

SEQ ID NO: 997537 - DNA, 25 bp, Homo sapien
tgggttcccaacactccagcactat

SEQ ID NO: 997538 - DNA, 25 bp, Homo sapien
ctgctggggcttgccaattaaagcc

SEQ ID NO: 997539 - DNA, 25 bp, Homo sapien
gctggggcttgccaattaaagccca

SEQ ID NO: 997540 - DNA, 25 bp, Homo sapien
agctgctggggcttgccaattaaag

SEQ ID NO: 997541 - DNA, 25 bp, Homo sapien
ctggggcttgccaattaaagcccac

SEQ ID NO: 997542 - DNA, 25 bp, Homo sapien
agtaaactcttgtagcctgttgaat

SEQ ID NO: 997543 - DNA, 25 bp, Homo sapien
aaactcttgtagcctgttgaatcat

SEQ ID NO: 997544 - DNA, 25 bp, Homo sapien
gtaaactcttgtagcctgttgaatc

SEQ ID NO: 997545 - DNA, 25 bp, Homo sapien
taaactcttgtagcctgttgaatca

SEQ ID NO: 997546 - DNA, 25 bp, Homo sapien
ccctggcactcccaggttctgtagt

SEQ ID NO: 997547 - DNA, 25 bp, Homo sapien
gctcttgtctgctaagctcactcag

SEQ ID NO: 997548 - DNA, 25 bp, Homo sapien
gtagtctgggagagcatcctctgca

SEQ ID NO: 997549 - DNA, 25 bp, Homo sapien
gcagctcttgtctgctaagctcact

SEQ ID NO: 997550 - DNA, 25 bp, Homo sapien
acaggctccccacagcacttaccac

SEQ ID NO: 997551 - DNA, 25 bp, Homo sapien
cacataccaccccggggttctgaag

SEQ ID NO: 997552 - DNA, 25 bp, Homo sapien
caagagggcttagtattttggaata

SEQ ID NO: 997553 - DNA, 25 bp, Homo sapien
ctcgctggacaagagggcttagtat

SEQ ID NO: 997554 - DNA, 25 bp, Homo sapien
cgctggacaagagggcttagtattt

SEQ ID NO: 997555 - DNA, 25 bp, Homo sapien
tggacaagagggcttagtattttgg

SEQ ID NO: 997556 - DNA, 25 bp, Homo sapien
tatgtgatactgtgttagaattagg

SEQ ID NO: 997557 - DNA, 25 bp, Homo sapien
ttccctggtaacctgcagtttcagg

SEQ ID NO: 997558 - DNA, 25 bp, Homo sapien
tggtaacctgcagtttcaggaattg

SEQ ID NO: 997559 - DNA, 25 bp, Homo sapien
gaattaggcagattctctttccctg

SEQ ID NO: 997560 - DNA, 25 bp, Homo sapien
tggaggctccctcatcacctaggtc

SEQ ID NO: 997561 - DNA, 25 bp, Homo sapien
catcacgcagccaaaattgtatgca

SEQ ID NO: 997562 - DNA, 25 bp, Homo sapien
gatggtgctcccatgcagcatggag

SEQ ID NO: 997563 - DNA, 25 bp, Homo sapien
cagaaggtgagtccttattctgttc

SEQ ID NO: 997564 - DNA, 25 bp, Homo sapien
gaaggaatgattcgggctttagcaa

SEQ ID NO: 997565 - DNA, 25 bp, Homo sapien
ttctgattacagtgcctctggtggc

SEQ ID NO: 997566 - DNA, 25 bp, Homo sapien
tgtctccgagtaagttgtcacctgt

SEQ ID NO: 997567 - DNA, 25 bp, Homo sapien
taaatgacacttgttctgcagttcc

SEQ ID NO: 997568 - DNA, 25 bp, Homo sapien
ggcatatgggctaaaaatatccact

SEQ ID NO: 997569 - DNA, 25 bp, Homo sapien
cggcatatgggctaaaaatatccac

SEQ ID NO: 997570 - DNA, 25 bp, Homo sapien
catatgggctaaaaatatccactct

SEQ ID NO: 997571 - DNA, 25 bp, Homo sapien
tatgggctaaaaatatccactcttt

SEQ ID NO: 997572 - DNA, 25 bp, Homo sapien
cgtttggcaactcttattgcttcca

SEQ ID NO: 997573 - DNA, 25 bp, Homo sapien
tctttttgcctctgcgtttggcaac

SEQ ID NO: 997574 - DNA, 25 bp, Homo sapien
ggttcacaccctagttctgcctttc

SEQ ID NO: 997575 - DNA, 25 bp, Homo sapien
tgctgctcatgttgccagggacaag

SEQ ID NO: 997576 - DNA, 25 bp, Homo sapien
taatcggtacacttttctatgaaga

SEQ ID NO: 997577 - DNA, 25 bp, Homo sapien
gacgacctgttccactatcacctgg

SEQ ID NO: 997578 - DNA, 25 bp, Homo sapien
gagggggtcagctgatgcttattcc

SEQ ID NO: 997579 - DNA, 25 bp, Homo sapien
cttgaataagagtgtgaacactgga

SEQ ID NO: 997580 - DNA, 25 bp, Homo sapien
gatgcaaaagtatatcttggaaact

SEQ ID NO: 997581 - DNA, 25 bp, Homo sapien
tgaagatgcaaaagtatatcttgga

SEQ ID NO: 997582 - DNA, 25 bp, Homo sapien
tctctaattcattcaactctcctgc

SEQ ID NO: 997583 - DNA, 25 bp, Homo sapien
tcaactctcctgctattccagctgg

SEQ ID NO: 997584 - DNA, 25 bp, Homo sapien
tgcctagcaaagttgtcaatgccat

SEQ ID NO: 997585 - DNA, 25 bp, Homo sapien
cctggcatttgagaaaccagtgagg

SEQ ID NO: 997586 - DNA, 25 bp, Homo sapien
tttggtttcaagatatagctgacct

SEQ ID NO: 997587 - DNA, 25 bp, Homo sapien
tccagtgctcattgggtgctcccct

SEQ ID NO: 997588 - DNA, 25 bp, Homo sapien
ctctttcccatccatattgttgttc

SEQ ID NO: 997589 - DNA, 25 bp, Homo sapien
tctttcccatccatattgttgttca

SEQ ID NO: 997590 - DNA, 25 bp, Homo sapien
gatctgctgagctttgaagtgattt

SEQ ID NO: 997591 - DNA, 25 bp, Homo sapien
caagtatgggaaggtaccaattccg

SEQ ID NO: 997592 - DNA, 25 bp, Homo sapien
tattttcaccggtacatttgaagtc

SEQ ID NO: 997593 - DNA, 25 bp, Homo sapien
caagtgccactgcagcgtaacactc

SEQ ID NO: 997594 - DNA, 25 bp, Homo sapien
gttgacgaaagtgaacaatctggca

SEQ ID NO: 997595 - DNA, 25 bp, Homo sapien
ttcgatccttcagtgacagtagttc

SEQ ID NO: 997596 - DNA, 25 bp, Homo sapien
ggcaaaaatccattcgatccttcag

SEQ ID NO: 997597 - DNA, 25 bp, Homo sapien
aaagtgaacaatctggcaaaaatcc

SEQ ID NO: 997598 - DNA, 25 bp, Homo sapien
ctttattctgcctcatagagaagat

SEQ ID NO: 997599 - DNA, 25 bp, Homo sapien
tattctgcctcatagagaagataat

SEQ ID NO: 997600 - DNA, 25 bp, Homo sapien
aaatggatggctgttttctttattc

SEQ ID NO: 997601 - DNA, 25 bp, Homo sapien
cctccttctgcaaaatggatggctg

SEQ ID NO: 997602 - DNA, 25 bp, Homo sapien
ccacccttgcaggttagttcattta

SEQ ID NO: 997603 - DNA, 25 bp, Homo sapien
gcatgatctgtcgaagcaattttct

SEQ ID NO: 997604 - DNA, 25 bp, Homo sapien
ttttgccataaccacccttgcaggt

SEQ ID NO: 997605 - DNA, 25 bp, Homo sapien
aagcatgatctgtcgaagcaatttt

SEQ ID NO: 997606 - DNA, 25 bp, Homo sapien
gtaaattgaagccttgttgatcttc

SEQ ID NO: 997607 - DNA, 25 bp, Homo sapien
tcttcacacaggttccattgaagac

SEQ ID NO: 997608 - DNA, 25 bp, Homo sapien
aaattgaagccttgttgatcttcac

SEQ ID NO: 997609 - DNA, 25 bp, Homo sapien
gcatgtaaattgaagccttgttgat

SEQ ID NO: 997610 - DNA, 25 bp, Homo sapien
ctttgggctcacaccattgatacct

SEQ ID NO: 997611 - DNA, 25 bp, Homo sapien
cacaccattgatacctctgatcttg

SEQ ID NO: 997612 - DNA, 25 bp, Homo sapien
ttgggctcacaccattgatacctct

SEQ ID NO: 997613 - DNA, 25 bp, Homo sapien
ctcacaccattgatacctctgatct

SEQ ID NO: 997614 - DNA, 25 bp, Homo sapien
aaaggccaatttggcttctgcaggt

SEQ ID NO: 997615 - DNA, 25 bp, Homo sapien
tggcttctgcaggtacatagaaatt

SEQ ID NO: 997616 - DNA, 25 bp, Homo sapien
agaaattgccagcttttcttgccat

SEQ ID NO: 997617 - DNA, 25 bp, Homo sapien
cttctgcaggtacatagaaattgcc

SEQ ID NO: 997618 - DNA, 25 bp, Homo sapien
ccttgtaatagtgcttctctttttc

SEQ ID NO: 997619 - DNA, 25 bp, Homo sapien
tattccttgtaatagtgcttctctt

SEQ ID NO: 997620 - DNA, 25 bp, Homo sapien
atattccttgtaatagtgcttctct

SEQ ID NO: 997621 - DNA, 25 bp, Homo sapien
tgtaatagtgcttctctttttcata

SEQ ID NO: 997622 - DNA, 25 bp, Homo sapien
ctttcaaagcatcttttgggcaaac

SEQ ID NO: 997623 - DNA, 25 bp, Homo sapien
cttcagctctgtgaaattcctttgc

SEQ ID NO: 997624 - DNA, 25 bp, Homo sapien
aggcgcttgatcttcagctctgtga

SEQ ID NO: 997625 - DNA, 25 bp, Homo sapien
tcagctctgtgaaattcctttgctt

SEQ ID NO: 997626 - DNA, 25 bp, Homo sapien
tttctcaggcgcttgatcttcagct

SEQ ID NO: 997627 - DNA, 25 bp, Homo sapien
tcttcttctcttctacaccctccat

SEQ ID NO: 997628 - DNA, 25 bp, Homo sapien
tcacagcagaaacctccttcttctt

SEQ ID NO: 997629 - DNA, 25 bp, Homo sapien
ttcttcttctcttctacaccctcca

SEQ ID NO: 997630 - DNA, 25 bp, Homo sapien
ctgtcacagcagaaacctccttctt

SEQ ID NO: 997631 - DNA, 25 bp, Homo sapien
gtccttccaacttccacacttcggc

SEQ ID NO: 997632 - DNA, 25 bp, Homo sapien
aacttccacacttcggcgtctggca

SEQ ID NO: 997633 - DNA, 25 bp, Homo sapien
tgctgcatcagcttcgcttccagcc

SEQ ID NO: 997634 - DNA, 25 bp, Homo sapien
gcttccagccgcgacacagctgctg

SEQ ID NO: 997635 - DNA, 25 bp, Homo sapien
acagtgggttcaatagcatttagag

SEQ ID NO: 997636 - DNA, 25 bp, Homo sapien
cgagccctgataaaatgattgggaa

SEQ ID NO: 997637 - DNA, 25 bp, Homo sapien
ttctgcttcattatgcgagccctga

SEQ ID NO: 997638 - DNA, 25 bp, Homo sapien
attgggaaggattataggtatgtac

SEQ ID NO: 997639 - DNA, 25 bp, Homo sapien
tcctttcggcattccagaagcagtt

SEQ ID NO: 997640 - DNA, 25 bp, Homo sapien
agccttccgtggcattcctttcggc

SEQ ID NO: 997641 - DNA, 25 bp, Homo sapien
ccgtggcattcctttcggcattcca

SEQ ID NO: 997642 - DNA, 25 bp, Homo sapien
cattcctttcggcattccagaagca

SEQ ID NO: 997643 - DNA, 25 bp, Homo sapien
tattacgtcgcataaaacaggaaac

SEQ ID NO: 997644 - DNA, 25 bp, Homo sapien
ttgtagtcgtgtaaagcaaaagact

SEQ ID NO: 997645 - DNA, 25 bp, Homo sapien
gtaggatgcctttgtagtcgtgtaa

SEQ ID NO: 997646 - DNA, 25 bp, Homo sapien
aaaaccagacttctgactattcttg

SEQ ID NO: 997647 - DNA, 25 bp, Homo sapien
tatcctttactctggtgaatggcac

SEQ ID NO: 997648 - DNA, 25 bp, Homo sapien
cactgttttcataaccagtttgaga

SEQ ID NO: 997649 - DNA, 25 bp, Homo sapien
caccagggtccacgcagttgaccaa

SEQ ID NO: 997650 - DNA, 25 bp, Homo sapien
tactcttgggagatataagtggctc

SEQ ID NO: 997651 - DNA, 25 bp, Homo sapien
tgtaaattcatgtgagaaccgctga

SEQ ID NO: 997652 - DNA, 25 bp, Homo sapien
cctacatctctgagataaagtttga

SEQ ID NO: 997653 - DNA, 25 bp, Homo sapien
tatctgcggtatatgaacttcctac

SEQ ID NO: 997654 - DNA, 25 bp, Homo sapien
tcaggtcttgtaagtctaccagaag

SEQ ID NO: 997655 - DNA, 25 bp, Homo sapien
gcctgagtgggtaagctccagcagc

SEQ ID NO: 997656 - DNA, 25 bp, Homo sapien
cagggagcctgagtgggtaagctcc

SEQ ID NO: 997657 - DNA, 25 bp, Homo sapien
gagcctgagtgggtaagctccagca

SEQ ID NO: 997658 - DNA, 25 bp, Homo sapien
caagcagggagcctgagtgggtaag

SEQ ID NO: 997659 - DNA, 25 bp, Homo sapien
gctgtgggggaccagcgactcagat

SEQ ID NO: 997660 - DNA, 25 bp, Homo sapien
cattaccatgaacatctaccaggat

SEQ ID NO: 997661 - DNA, 25 bp, Homo sapien
gatgagaggagggatattcagaaac

SEQ ID NO: 997662 - DNA, 25 bp, Homo sapien
gaccagcgactcagatgagtgtgcc

SEQ ID NO: 997663 - DNA, 25 bp, Homo sapien
aaatacttgatctgggttccagcat

SEQ ID NO: 997664 - DNA, 25 bp, Homo sapien
atacttgatctgggttccagcattg

SEQ ID NO: 997665 - DNA, 25 bp, Homo sapien
aatacttgatctgggttccagcatt

SEQ ID NO: 997666 - DNA, 25 bp, Homo sapien
aaaatacttgatctgggttccagca

SEQ ID NO: 997667 - DNA, 25 bp, Homo sapien
actgctggatcaggcagaataaatc

SEQ ID NO: 997668 - DNA, 25 bp, Homo sapien
tctttggccatctaatctcggctgg

SEQ ID NO: 997669 - DNA, 25 bp, Homo sapien
tgtttgcttgcgtgcactgctggat

SEQ ID NO: 997670 - DNA, 25 bp, Homo sapien
caggcaggacgctgtcacaagttca

SEQ ID NO: 997671 - DNA, 25 bp, Homo sapien
gcttccaacctgaaatgggatgtgt

SEQ ID NO: 997672 - DNA, 25 bp, Homo sapien
ggctttcattgacttgatgtgattc

SEQ ID NO: 997673 - DNA, 25 bp, Homo sapien
ttgcttccaacctgaaatgggatgt

SEQ ID NO: 997674 - DNA, 25 bp, Homo sapien
taaaagaacacgtctgcagtcacct

SEQ ID NO: 997675 - DNA, 25 bp, Homo sapien
gatgtcagaggtcctctggcaatgc

SEQ ID NO: 997676 - DNA, 25 bp, Homo sapien
aatatggaattgaacttactccatt

SEQ ID NO: 997677 - DNA, 25 bp, Homo sapien
gaattgaacttactccatttagaaa

SEQ ID NO: 997678 - DNA, 25 bp, Homo sapien
gttgtaaaaagccacattctcgttg

SEQ ID NO: 997679 - DNA, 25 bp, Homo sapien
ttccatacatctggctccttgtatt

SEQ ID NO: 997680 - DNA, 25 bp, Homo sapien
tttgtgcctatcttggaaggtctca

SEQ ID NO: 997681 - DNA, 25 bp, Homo sapien
ttgtgcctatcttggaaggtctcag

SEQ ID NO: 997682 - DNA, 25 bp, Homo sapien
tcatgagaacaccaaggatgactga

SEQ ID NO: 997683 - DNA, 25 bp, Homo sapien
catgagaacaccaaggatgactgag

SEQ ID NO: 997684 - DNA, 25 bp, Homo sapien
tcagtaccacttttccatcatgaga

SEQ ID NO: 997685 - DNA, 25 bp, Homo sapien
ccatcatgagaacaccaaggatgac

SEQ ID NO: 997686 - DNA, 25 bp, Homo sapien
tcagatggcccaacatgcaaaacta

SEQ ID NO: 997687 - DNA, 25 bp, Homo sapien
aaacacagctcagagagaacattgg

SEQ ID NO: 997688 - DNA, 25 bp, Homo sapien
tgaaacacagctcagagagaacatt

SEQ ID NO: 997689 - DNA, 25 bp, Homo sapien
gaaacacagctcagagagaacattg

SEQ ID NO: 997690 - DNA, 25 bp, Homo sapien
tcattctctttaggttatgagtctt

SEQ ID NO: 997691 - DNA, 25 bp, Homo sapien
gtaagtgagtgggccactgcttaag

SEQ ID NO: 997692 - DNA, 25 bp, Homo sapien
ggcgtttcaccctttttactgctgc

SEQ ID NO: 997693 - DNA, 25 bp, Homo sapien
tcaggatcatgactgggtaagtgag

SEQ ID NO: 997694 - DNA, 25 bp, Homo sapien
ctgccagtccaaattaagtcagccc

SEQ ID NO: 997695 - DNA, 25 bp, Homo sapien
cagtccaaattaagtcagcccccct

SEQ ID NO: 997696 - DNA, 25 bp, Homo sapien
gccagtccaaattaagtcagccccc

SEQ ID NO: 997697 - DNA, 25 bp, Homo sapien
gcctctgttgttcataaccagccat

SEQ ID NO: 997698 - DNA, 25 bp, Homo sapien
taaagcaccagtaaagtacattttc

SEQ ID NO: 997699 - DNA, 25 bp, Homo sapien
tctgttttaaagtggaaatcactac

SEQ ID NO: 997700 - DNA, 25 bp, Homo sapien
agtacattttctggcaacagcattt

SEQ ID NO: 997701 - DNA, 25 bp, Homo sapien
attttctggcaacagcattttctgt

SEQ ID NO: 997702 - DNA, 25 bp, Homo sapien
tgctgcagcatgtgcgatggcatcc

SEQ ID NO: 997703 - DNA, 25 bp, Homo sapien
agcatgtgcgatggcatcctgtggc

SEQ ID NO: 997704 - DNA, 25 bp, Homo sapien
ctttgctgcagcatgtgcgatggca

SEQ ID NO: 997705 - DNA, 25 bp, Homo sapien
tgatgcctttgctgcagcatgtgcg

SEQ ID NO: 997706 - DNA, 25 bp, Homo sapien
tgttagatgtcccaagttcaaaagc

SEQ ID NO: 997707 - DNA, 25 bp, Homo sapien
acaggattcccctccaatgtgtaga

SEQ ID NO: 997708 - DNA, 25 bp, Homo sapien
tacatggctcaagagaatggcccaa

SEQ ID NO: 997709 - DNA, 25 bp, Homo sapien
tgttgagggttacatgagactgctt

SEQ ID NO: 997710 - DNA, 25 bp, Homo sapien
aaaccagtggttcctgatactattg

SEQ ID NO: 997711 - DNA, 25 bp, Homo sapien
catctcctcggccaggataaaagcc

SEQ ID NO: 997712 - DNA, 25 bp, Homo sapien
aagccgtttgcatataaaccagtgg

SEQ ID NO: 997713 - DNA, 25 bp, Homo sapien
gccaggataaaagccgtttgcatat

SEQ ID NO: 997714 - DNA, 25 bp, Homo sapien
attggaaagaccaggagacagggca

SEQ ID NO: 997715 - DNA, 25 bp, Homo sapien
aattggaaagaccaggagacagggc

SEQ ID NO: 997716 - DNA, 25 bp, Homo sapien
ggaaaattggaaagaccaggagaca

SEQ ID NO: 997717 - DNA, 25 bp, Homo sapien
aaaattggaaagaccaggagacagg

SEQ ID NO: 997718 - DNA, 25 bp, Homo sapien
ttcagcagaggtttgctgtcattta

SEQ ID NO: 997719 - DNA, 25 bp, Homo sapien
ttcattcagcagaggtttgctgtca

SEQ ID NO: 997720 - DNA, 25 bp, Homo sapien
ctttcattcagcagaggtttgctgt

SEQ ID NO: 997721 - DNA, 25 bp, Homo sapien
cattcagcagaggtttgctgtcatt

SEQ ID NO: 997722 - DNA, 25 bp, Homo sapien
agctaatgactccttactgaatgcc

SEQ ID NO: 997723 - DNA, 25 bp, Homo sapien
caacatgatgcagcggtgacaaggg

SEQ ID NO: 997724 - DNA, 25 bp, Homo sapien
ctaatgactccttactgaatgcctg

SEQ ID NO: 997725 - DNA, 25 bp, Homo sapien
ctgacaacatgatgcagcggtgaca

SEQ ID NO: 997726 - DNA, 25 bp, Homo sapien
cgcaatgaacggaagacagcaagtg

SEQ ID NO: 997727 - DNA, 25 bp, Homo sapien
agacagcaagtgtgcagccagtgaa

SEQ ID NO: 997728 - DNA, 25 bp, Homo sapien
tgaatgcgagttctagctttcaatg

SEQ ID NO: 997729 - DNA, 25 bp, Homo sapien
aagcctgaatgcgagttctagcttt

SEQ ID NO: 997730 - DNA, 25 bp, Homo sapien
aataaaactctggcccctgacgtag

SEQ ID NO: 997731 - DNA, 25 bp, Homo sapien
ctaagaatatccaggtggcagttaa

SEQ ID NO: 997732 - DNA, 25 bp, Homo sapien
ccctgacgtaggattcaggtaccat

SEQ ID NO: 997733 - DNA, 25 bp, Homo sapien
tctggcccctgacgtaggattcagg

SEQ ID NO: 997734 - DNA, 25 bp, Homo sapien
cagccagttcttgatgactctgtct

SEQ ID NO: 997735 - DNA, 25 bp, Homo sapien
tcatggtacatttactgtgaactga

SEQ ID NO: 997736 - DNA, 25 bp, Homo sapien
gccagttcttgatgactctgtctac

SEQ ID NO: 997737 - DNA, 25 bp, Homo sapien
ggtacatttactgtgaactgaattt

SEQ ID NO: 997738 - DNA, 25 bp, Homo sapien
cagaaatatactgcccaagactgtg

SEQ ID NO: 997739 - DNA, 25 bp, Homo sapien
gctattcacccttggactatgtggg

SEQ ID NO: 997740 - DNA, 25 bp, Homo sapien
ccaggcatggaatggctgagactca

SEQ ID NO: 997741 - DNA, 25 bp, Homo sapien
tatgaccacttctagtatatgaggg

SEQ ID NO: 997742 - DNA, 25 bp, Homo sapien
ttgaatgaagggggcatatttttgc

SEQ ID NO: 997743 - DNA, 25 bp, Homo sapien
tttactttgttgaatgaagggggca

SEQ ID NO: 997744 - DNA, 25 bp, Homo sapien
gaatgaagggggcatatttttgcat

SEQ ID NO: 997745 - DNA, 25 bp, Homo sapien
tgttgaatgaagggggcatattttt

SEQ ID NO: 997746 - DNA, 25 bp, Homo sapien
taattatcttcctttatgctaaaaa

SEQ ID NO: 997747 - DNA, 25 bp, Homo sapien
ttcttgggtcttgtgtcaacaataa

SEQ ID NO: 997748 - DNA, 25 bp, Homo sapien
ggtcttgtgtcaacaataatctttc

SEQ ID NO: 997749 - DNA, 25 bp, Homo sapien
tctttctagcctgcaggtagttata

SEQ ID NO: 997750 - DNA, 25 bp, Homo sapien
cagatgtctttgtagatgctgtctg

SEQ ID NO: 997751 - DNA, 25 bp, Homo sapien
tcagatgtctttgtagatgctgtct

SEQ ID NO: 997752 - DNA, 25 bp, Homo sapien
tcaaattagcacaggacaatcacca

SEQ ID NO: 997753 - DNA, 25 bp, Homo sapien
gcccgtgattatcagctgaaaaact

SEQ ID NO: 997754 - DNA, 25 bp, Homo sapien
gaattaaggcccgtgattatcagct

SEQ ID NO: 997755 - DNA, 25 bp, Homo sapien
caatcaccagaattaaggcccgtga

SEQ ID NO: 997756 - DNA, 25 bp, Homo sapien
atttatgatgatgtggggtacggcc

SEQ ID NO: 997757 - DNA, 25 bp, Homo sapien
cagtctctctattcctgctcgatat

SEQ ID NO: 997758 - DNA, 25 bp, Homo sapien
tctattcctgctcgatatcttgccg

SEQ ID NO: 997759 - DNA, 25 bp, Homo sapien
acggccgctatctcctgtttcttca

SEQ ID NO: 997760 - DNA, 25 bp, Homo sapien
gcagcaccgtttcacctgacaagga

SEQ ID NO: 997761 - DNA, 25 bp, Homo sapien
gaaggttctgccttaggctcactga

SEQ ID NO: 997762 - DNA, 25 bp, Homo sapien
gtcactccatgtttagcagcaccgt

SEQ ID NO: 997763 - DNA, 25 bp, Homo sapien
tgagaactgcctactactgttgtca

SEQ ID NO: 997764 - DNA, 25 bp, Homo sapien
ccatagaaagttaggtcactaaaca

SEQ ID NO: 997765 - DNA, 25 bp, Homo sapien
tcctggtagtactctgacaactccc

SEQ ID NO: 997766 - DNA, 25 bp, Homo sapien
tcccattccattagactctgaagca

SEQ ID NO: 997767 - DNA, 25 bp, Homo sapien
tcaggctactccatagaaagttagg

SEQ ID NO: 997768 - DNA, 25 bp, Homo sapien
tttatggtaagaatttcaacatcac

SEQ ID NO: 997769 - DNA, 25 bp, Homo sapien
gaaatggagtgatgtaaaagcccca

SEQ ID NO: 997770 - DNA, 25 bp, Homo sapien
tttgcctcaggctgcacgtcaacat

SEQ ID NO: 997771 - DNA, 25 bp, Homo sapien
tcaacatttatctgtttgtaagtgg

SEQ ID NO: 997772 - DNA, 25 bp, Homo sapien
aagtgcccccaaacaaggctttgag

SEQ ID NO: 997773 - DNA, 25 bp, Homo sapien
cccaaacaaggctttgaggagagtt

SEQ ID NO: 997774 - DNA, 25 bp, Homo sapien
taaaagtgctgttctgattgttaac

SEQ ID NO: 997775 - DNA, 25 bp, Homo sapien
tgattgttaacggaacccaaagtgc

SEQ ID NO: 997776 - DNA, 25 bp, Homo sapien
tttacatggtatttatgtaaatcca

SEQ ID NO: 997777 - DNA, 25 bp, Homo sapien
taaagtttataacaatctatcataa

SEQ ID NO: 997778 - DNA, 25 bp, Homo sapien
ataattgaagctcttgggagtggag

SEQ ID NO: 997779 - DNA, 25 bp, Homo sapien
ttatgtaaatccagggctccccaga

SEQ ID NO: 997780 - DNA, 25 bp, Homo sapien
tctaccaaattgatgaatgctccca

SEQ ID NO: 997781 - DNA, 25 bp, Homo sapien
aaatatgttccacctgactgagtca

SEQ ID NO: 997782 - DNA, 25 bp, Homo sapien
tgttatctaccaaattgatgaatgc

SEQ ID NO: 997783 - DNA, 25 bp, Homo sapien
gaatgctcccataaaatatgttcca

SEQ ID NO: 997784 - DNA, 25 bp, Homo sapien
cataagtaccttctttcaggtgaag

SEQ ID NO: 997785 - DNA, 25 bp, Homo sapien
ttcttgaggatgcttcattgatgcc

SEQ ID NO: 997786 - DNA, 25 bp, Homo sapien
ggatgcttcattgatgccaactgat

SEQ ID NO: 997787 - DNA, 25 bp, Homo sapien
tgatgccaactgatcataagtacct

SEQ ID NO: 997788 - DNA, 25 bp, Homo sapien
catcccaaagagctaaggttgtcct

SEQ ID NO: 997789 - DNA, 25 bp, Homo sapien
ggttgtcctcctgctctgaaattgc

SEQ ID NO: 997790 - DNA, 25 bp, Homo sapien
ccttcgtcccatctgctttggattc

SEQ ID NO: 997791 - DNA, 25 bp, Homo sapien
tcttttttccttcgtcccatctgct

SEQ ID NO: 997792 - DNA, 25 bp, Homo sapien
cccacctcttcataatatgcattta

SEQ ID NO: 997793 - DNA, 25 bp, Homo sapien
gcatttaaatatttttcatggaggt

SEQ ID NO: 997794 - DNA, 25 bp, Homo sapien
ccacctcttcataatatgcatttaa

SEQ ID NO: 997795 - DNA, 25 bp, Homo sapien
ttaaatatttttcatggaggttcat

SEQ ID NO: 997796 - DNA, 25 bp, Homo sapien
gctttcccagggtgaattgcaggca

SEQ ID NO: 997797 - DNA, 25 bp, Homo sapien
agactttagccggtcttcaccatgg

SEQ ID NO: 997798 - DNA, 25 bp, Homo sapien
aaaaggcttggccatttccatccag

SEQ ID NO: 997799 - DNA, 25 bp, Homo sapien
tactttagagctcccctttggacaa

SEQ ID NO: 997800 - DNA, 25 bp, Homo sapien
tttgttccacataaaatcaatcact

SEQ ID NO: 997801 - DNA, 25 bp, Homo sapien
ccaccacctttatcagatgtcaaaa

SEQ ID NO: 997802 - DNA, 25 bp, Homo sapien
tgatcccttccagtctctaccttct

SEQ ID NO: 997803 - DNA, 25 bp, Homo sapien
ctaccaccacctttatcagatgtca

SEQ ID NO: 997804 - DNA, 25 bp, Homo sapien
agtagggctactgctgcatatggca

SEQ ID NO: 997805 - DNA, 25 bp, Homo sapien
ttatcagggaatataaccaggattt

SEQ ID NO: 997806 - DNA, 25 bp, Homo sapien
taattagccctgaatgcagaaagaa

SEQ ID NO: 997807 - DNA, 25 bp, Homo sapien
acaatgggtattcttggtactccct

SEQ ID NO: 997808 - DNA, 25 bp, Homo sapien
ttcacgcaagtcctgcaagtgactg

SEQ ID NO: 997809 - DNA, 25 bp, Homo sapien
taccagagcacagttttcacgcaag

SEQ ID NO: 997810 - DNA, 25 bp, Homo sapien
tacaagctccctcagtgtgatgtta

SEQ ID NO: 997811 - DNA, 25 bp, Homo sapien
atttcccaattagcctgacttccag

SEQ ID NO: 997812 - DNA, 25 bp, Homo sapien
tgtcatggtcagctgtggcatctct

SEQ ID NO: 997813 - DNA, 25 bp, Homo sapien
ttcacgtcctgtcctagcatctgct

SEQ ID NO: 997814 - DNA, 25 bp, Homo sapien
tggtgcaaatccaggctctggttca

SEQ ID NO: 997815 - DNA, 25 bp, Homo sapien
caaatccaggctctggttcacgtcc

SEQ ID NO: 997816 - DNA, 25 bp, Homo sapien
agattggaatatattattgttatcc

SEQ ID NO: 997817 - DNA, 25 bp, Homo sapien
ttattgttatcctgtccatggtatt

SEQ ID NO: 997818 - DNA, 25 bp, Homo sapien
attgttatcctgtccatggtatttg

SEQ ID NO: 997819 - DNA, 25 bp, Homo sapien
atatattattgttatcctgtccatg

SEQ ID NO: 997820 - DNA, 25 bp, Homo sapien
agatgattggactcatagtctgttt

SEQ ID NO: 997821 - DNA, 25 bp, Homo sapien
cagcatagataaaaccaagcattag

SEQ ID NO: 997822 - DNA, 25 bp, Homo sapien
ttacaaagatgattggactcatagt

SEQ ID NO: 997823 - DNA, 25 bp, Homo sapien
gcatagataaaaccaagcattagtt

SEQ ID NO: 997824 - DNA, 25 bp, Homo sapien
tctgcgctcctggttcagtggtttg

SEQ ID NO: 997825 - DNA, 25 bp, Homo sapien
gagtttaacctgtttctctgcgctc

SEQ ID NO: 997826 - DNA, 25 bp, Homo sapien
tagttccttataacatgactgtcac

SEQ ID NO: 997827 - DNA, 25 bp, Homo sapien
tattcctcgattgataaagtgtgta

SEQ ID NO: 997828 - DNA, 25 bp, Homo sapien
gaatgaaataactcccttgcttcca

SEQ ID NO: 997829 - DNA, 25 bp, Homo sapien
gctctaagtctattaagtgactcag

SEQ ID NO: 997830 - DNA, 25 bp, Homo sapien
aagtgggttagacagtatagttctc

SEQ ID NO: 997831 - DNA, 25 bp, Homo sapien
tgaaaacttatgttgggacttgact

SEQ ID NO: 997832 - DNA, 25 bp, Homo sapien
tcaggcactattgcggcatgataat

SEQ ID NO: 997833 - DNA, 25 bp, Homo sapien
agatcaggcactattgcggcatgat

SEQ ID NO: 997834 - DNA, 25 bp, Homo sapien
ggcactattgcggcatgataatcat

SEQ ID NO: 997835 - DNA, 25 bp, Homo sapien
gcactattgcggcatgataatcatc

SEQ ID NO: 997836 - DNA, 25 bp, Homo sapien
caatatgaacagttagcctgctcca

SEQ ID NO: 997837 - DNA, 25 bp, Homo sapien
gaacagttagcctgctccagagatc

SEQ ID NO: 997838 - DNA, 25 bp, Homo sapien
tctgattactagtatgaccctcatg

SEQ ID NO: 997839 - DNA, 25 bp, Homo sapien
gatccccaaagtcccggatattctg

SEQ ID NO: 997840 - DNA, 25 bp, Homo sapien
gctgatatttgattttagctatgag

SEQ ID NO: 997841 - DNA, 25 bp, Homo sapien
ctgatatttgattttagctatgagt

SEQ ID NO: 997842 - DNA, 25 bp, Homo sapien
tctaaaaccatgaaagccccaggct

SEQ ID NO: 997843 - DNA, 25 bp, Homo sapien
ctgttttcctgctcgaatgttgcct

SEQ ID NO: 997844 - DNA, 25 bp, Homo sapien
accgtggcccaaaaggagaacatgc

SEQ ID NO: 997845 - DNA, 25 bp, Homo sapien
cctcaagcctggaaccgtggcccaa

SEQ ID NO: 997846 - DNA, 25 bp, Homo sapien
ttagggttgacttggtgatacaggc

SEQ ID NO: 997847 - DNA, 25 bp, Homo sapien
gcttagggttgacttggtgatacag

SEQ ID NO: 997848 - DNA, 25 bp, Homo sapien
ggcttagggttgacttggtgataca

SEQ ID NO: 997849 - DNA, 25 bp, Homo sapien
cctgtggttctaatttggagacttt

SEQ ID NO: 997850 - DNA, 25 bp, Homo sapien
ttcctgtggttctaatttggagact

SEQ ID NO: 997851 - DNA, 25 bp, Homo sapien
caggatccctgttctcatacaatcc

SEQ ID NO: 997852 - DNA, 25 bp, Homo sapien
tacaatcccaagtcagttttccatt

SEQ ID NO: 997853 - DNA, 25 bp, Homo sapien
gggacaatttttcctatacatctgc

SEQ ID NO: 997854 - DNA, 25 bp, Homo sapien
tgcaaagactctaggggattcatta

SEQ ID NO: 997855 - DNA, 25 bp, Homo sapien
gtcatggtgttttggtgcaaagact

SEQ ID NO: 997856 - DNA, 25 bp, Homo sapien
tgtgtgaatctgaattggaagggac

SEQ ID NO: 997857 - DNA, 25 bp, Homo sapien
cattttgtgagagctgccagtacag

SEQ ID NO: 997858 - DNA, 25 bp, Homo sapien
ggactgatatcgtgaacattttgtg

SEQ ID NO: 997859 - DNA, 25 bp, Homo sapien
tcgtgaacattttgtgagagctgcc

SEQ ID NO: 997860 - DNA, 25 bp, Homo sapien
gagctgccagtacagaagcaccagc

SEQ ID NO: 997861 - DNA, 25 bp, Homo sapien
caggttcttcggatgtttgtgtaac

SEQ ID NO: 997862 - DNA, 25 bp, Homo sapien
ttcctgatctcaggttcttcggatg

SEQ ID NO: 997863 - DNA, 25 bp, Homo sapien
cattcccatgagttattcctgatct

SEQ ID NO: 997864 - DNA, 25 bp, Homo sapien
tgtgtaactatgtctgcagtcctat

SEQ ID NO: 997865 - DNA, 25 bp, Homo sapien
taaatgactttgatgcctgattttc

SEQ ID NO: 997866 - DNA, 25 bp, Homo sapien
tgatgcctgattttcagcaagcctt

SEQ ID NO: 997867 - DNA, 25 bp, Homo sapien
aaaatattgcttccagggggcagat

SEQ ID NO: 997868 - DNA, 25 bp, Homo sapien
ttcagcaagcctttgaatttctctg

SEQ ID NO: 997869 - DNA, 25 bp, Homo sapien
ctttcaggctccttctttactgatt

SEQ ID NO: 997870 - DNA, 25 bp, Homo sapien
caggctccttctttactgattgcat

SEQ ID NO: 997871 - DNA, 25 bp, Homo sapien
ttcaggctccttctttactgattgc

SEQ ID NO: 997872 - DNA, 25 bp, Homo sapien
tcactttcaggctccttctttactg

SEQ ID NO: 997873 - DNA, 25 bp, Homo sapien
agatgaatcttcacaagttcagaaa

SEQ ID NO: 997874 - DNA, 25 bp, Homo sapien
gcaagatgaatcttcacaagttcag

SEQ ID NO: 997875 - DNA, 25 bp, Homo sapien
ggaaagcaagatgaatcttcacaag

SEQ ID NO: 997876 - DNA, 25 bp, Homo sapien
gaaagaggaaatcttctgagatttc

SEQ ID NO: 997877 - DNA, 25 bp, Homo sapien
tcttccatttgagcaatgccactgt

SEQ ID NO: 997878 - DNA, 25 bp, Homo sapien
gaatcttccatttgagcaatgccac

SEQ ID NO: 997879 - DNA, 25 bp, Homo sapien
tctggtttcctgctggcggaagttc

SEQ ID NO: 997880 - DNA, 25 bp, Homo sapien
tggtttcctgctggcggaagttctc

SEQ ID NO: 997881 - DNA, 25 bp, Homo sapien
gcctttttcttccatcgtcactgcc

SEQ ID NO: 997882 - DNA, 25 bp, Homo sapien
cagttaacatttaagccgcccgtgg

SEQ ID NO: 997883 - DNA, 25 bp, Homo sapien
tcaggagccgcaagtgtggatacaa

SEQ ID NO: 997884 - DNA, 25 bp, Homo sapien
ccgcccgtggatgacagagctaaaa

SEQ ID NO: 997885 - DNA, 25 bp, Homo sapien
tggatgccgcactaccattcaggag

SEQ ID NO: 997886 - DNA, 25 bp, Homo sapien
tgaagtctcagttgaaacaagtccc

SEQ ID NO: 997887 - DNA, 25 bp, Homo sapien
ttggtaatccgtggcatgcaatggc

SEQ ID NO: 997888 - DNA, 25 bp, Homo sapien
gaccagtgtagtagtagcaatgacc

SEQ ID NO: 997889 - DNA, 25 bp, Homo sapien
caagagcctgctgcactagaccagt

SEQ ID NO: 997890 - DNA, 25 bp, Homo sapien
ctttaatgatcatgcttatttcaag

SEQ ID NO: 997891 - DNA, 25 bp, Homo sapien
tctttaatgatcatgcttatttcaa

SEQ ID NO: 997892 - DNA, 25 bp, Homo sapien
tctcctcaccgtagagcatgcagaa

SEQ ID NO: 997893 - DNA, 25 bp, Homo sapien
aacagcaagattcctccatgtgacc

SEQ ID NO: 997894 - DNA, 25 bp, Homo sapien
gaaacagcaagattcctccatgtga

SEQ ID NO: 997895 - DNA, 25 bp, Homo sapien
tcctcaccgtagagcatgcagaaac

SEQ ID NO: 997896 - DNA, 25 bp, Homo sapien
ctggggcagatcagcctgagaatag

SEQ ID NO: 997897 - DNA, 25 bp, Homo sapien
tcagcctgagaataggtgttgctca

SEQ ID NO: 997898 - DNA, 25 bp, Homo sapien
gaataggtgttgctcagagctgtga

SEQ ID NO: 997899 - DNA, 25 bp, Homo sapien
ggcagatcagcctgagaataggtgt

SEQ ID NO: 997900 - DNA, 25 bp, Homo sapien
tgatgtgtatgacaacagaagctgt

SEQ ID NO: 997901 - DNA, 25 bp, Homo sapien
tagaataacagccttagagattgtc

SEQ ID NO: 997902 - DNA, 25 bp, Homo sapien
aacaaatgggtgattaactgatgtg

SEQ ID NO: 997903 - DNA, 25 bp, Homo sapien
cgtttggccttctatagtactaaca

SEQ ID NO: 997904 - DNA, 25 bp, Homo sapien
agcactcctgaacaagaaattgatt

SEQ ID NO: 997905 - DNA, 25 bp, Homo sapien
aatcagtgagaatttaggatcagag

SEQ ID NO: 997906 - DNA, 25 bp, Homo sapien
tataggagtcaaaaaggctattaac

SEQ ID NO: 997907 - DNA, 25 bp, Homo sapien
taggatcagagtgtctataggagtc

SEQ ID NO: 997908 - DNA, 25 bp, Homo sapien
ctatttttttttcaagatacagtct

SEQ ID NO: 997909 - DNA, 25 bp, Homo sapien
tatttttttttcaagatacagtctg

SEQ ID NO: 997910 - DNA, 25 bp, Homo sapien
atttttttttcaagatacagtctgg

SEQ ID NO: 997911 - DNA, 25 bp, Homo sapien
tttttttttcaagatacagtctggc

SEQ ID NO: 997912 - DNA, 25 bp, Homo sapien
ccaaaaagtcagatacagcaattgt

SEQ ID NO: 997913 - DNA, 25 bp, Homo sapien
aagtcagatacagcaattgttttgg

SEQ ID NO: 997914 - DNA, 25 bp, Homo sapien
cagatacagcaattgttttggaaat

SEQ ID NO: 997915 - DNA, 25 bp, Homo sapien
acaccaaaaagtcagatacagcaat

SEQ ID NO: 997916 - DNA, 25 bp, Homo sapien
aaccagtgagttagtccaaagtaag

SEQ ID NO: 997917 - DNA, 25 bp, Homo sapien
taatattccattggcaagagcaagc

SEQ ID NO: 997918 - DNA, 25 bp, Homo sapien
gatgccagatcccaaaagtttaggc

SEQ ID NO: 997919 - DNA, 25 bp, Homo sapien
cataacaataacagcgatgccagat

SEQ ID NO: 997920 - DNA, 25 bp, Homo sapien
gcccatcctttctcgccctacttca

SEQ ID NO: 997921 - DNA, 25 bp, Homo sapien
tttctcgccctacttcaagctttcc

SEQ ID NO: 997922 - DNA, 25 bp, Homo sapien
tccccactgattcgttttctccaca

SEQ ID NO: 997923 - DNA, 25 bp, Homo sapien
tcaagctttcctccccactgattcg

SEQ ID NO: 997924 - DNA, 25 bp, Homo sapien
tcatagattcagtagaggcacctcc

SEQ ID NO: 997925 - DNA, 25 bp, Homo sapien
taggatctgctcccgccaacattcg

SEQ ID NO: 997926 - DNA, 25 bp, Homo sapien
ggagtctctctcttcgtctgtgtat

SEQ ID NO: 997927 - DNA, 25 bp, Homo sapien
tccttctgcacattagtaccgctag

SEQ ID NO: 997928 - DNA, 25 bp, Homo sapien
aatgggcctaacattcaggccatac

SEQ ID NO: 997929 - DNA, 25 bp, Homo sapien
atgggcctaacattcaggccataca

SEQ ID NO: 997930 - DNA, 25 bp, Homo sapien
aacaatgggcctaacattcaggcca

SEQ ID NO: 997931 - DNA, 25 bp, Homo sapien
ctaaacaatgggcctaacattcagg

SEQ ID NO: 997932 - DNA, 25 bp, Homo sapien
tcaggttgtagcctgctcggaacct

SEQ ID NO: 997933 - DNA, 25 bp, Homo sapien
aggttgtagcctgctcggaacctgg

SEQ ID NO: 997934 - DNA, 25 bp, Homo sapien
ttgtagcctgctcggaacctggggt

SEQ ID NO: 997935 - DNA, 25 bp, Homo sapien
ggttgtagcctgctcggaacctggg

SEQ ID NO: 997936 - DNA, 25 bp, Homo sapien
taaaaagtctcccttgtaatagtca

SEQ ID NO: 997937 - DNA, 25 bp, Homo sapien
tgatcacgggcttcactgacgttct

SEQ ID NO: 997938 - DNA, 25 bp, Homo sapien
tcctccaagagttctgccatgcagg

SEQ ID NO: 997939 - DNA, 25 bp, Homo sapien
cattctgaccacgttcttgcggtca

SEQ ID NO: 997940 - DNA, 25 bp, Homo sapien
tccagttctgctatgaataccgctt

SEQ ID NO: 997941 - DNA, 25 bp, Homo sapien
ggtaccatataaattggataccatt

SEQ ID NO: 997942 - DNA, 25 bp, Homo sapien
tttgctgtaagacaacgcaagctgg

SEQ ID NO: 997943 - DNA, 25 bp, Homo sapien
ggaaatccctcaggtaccatataaa

SEQ ID NO: 997944 - DNA, 25 bp, Homo sapien
gtgtgtactcttctcttcaatgccc

SEQ ID NO: 997945 - DNA, 25 bp, Homo sapien
agtgtgtactcttctcttcaatgcc

SEQ ID NO: 997946 - DNA, 25 bp, Homo sapien
tcagtgtgtactcttctcttcaatg

SEQ ID NO: 997947 - DNA, 25 bp, Homo sapien
tgtactcttctcttcaatgccctta

SEQ ID NO: 997948 - DNA, 25 bp, Homo sapien
ccatttgtggaattcgtggaaatta

SEQ ID NO: 997949 - DNA, 25 bp, Homo sapien
acttttcagataattgcaacgtact

SEQ ID NO: 997950 - DNA, 25 bp, Homo sapien
ttgcaacgtactgtgattcctccat

SEQ ID NO: 997951 - DNA, 25 bp, Homo sapien
atgtgccttttcgagagtttctttt

SEQ ID NO: 997952 - DNA, 25 bp, Homo sapien
aagaatcattctatgtaaattcacc

SEQ ID NO: 997953 - DNA, 25 bp, Homo sapien
cattctatgtaaattcacctcgtac

SEQ ID NO: 997954 - DNA, 25 bp, Homo sapien
cctcgtactgatccatgtgtgtgtt

SEQ ID NO: 997955 - DNA, 25 bp, Homo sapien
taaattcacctcgtactgatccatg

SEQ ID NO: 997956 - DNA, 25 bp, Homo sapien
tgcctgtcggacgcctgactgtggt

SEQ ID NO: 997957 - DNA, 25 bp, Homo sapien
gcctgtcggacgcctgactgtggtt

SEQ ID NO: 997958 - DNA, 25 bp, Homo sapien
ccactcggaagacctgcctgtcgga

SEQ ID NO: 997959 - DNA, 25 bp, Homo sapien
actcggaagacctgcctgtcggacg

SEQ ID NO: 997960 - DNA, 25 bp, Homo sapien
gcggcggcgtctcctgctctccgcg

SEQ ID NO: 997961 - DNA, 25 bp, Homo sapien
cccacatacacaagctctccatgtg

SEQ ID NO: 997962 - DNA, 25 bp, Homo sapien
gagatgcttcctcgcgcggcgcagc

SEQ ID NO: 997963 - DNA, 25 bp, Homo sapien
gcgcagcgctgaggccgtgcgtgcg

SEQ ID NO: 997964 - DNA, 25 bp, Homo sapien
ttgaatttcctcccccggcgttgca

SEQ ID NO: 997965 - DNA, 25 bp, Homo sapien
cctcctttgccttcttggtttgaat

SEQ ID NO: 997966 - DNA, 25 bp, Homo sapien
ggcacacagtgcaagaggcaatacc

SEQ ID NO: 997967 - DNA, 25 bp, Homo sapien
ccccggcgttgcactggcacacagt

SEQ ID NO: 997968 - DNA, 25 bp, Homo sapien
ggagaacgaaggctgagactcccct

SEQ ID NO: 997969 - DNA, 25 bp, Homo sapien
tcgcgtatttgaggacagcccatct

SEQ ID NO: 997970 - DNA, 25 bp, Homo sapien
aaccctacggagagtcggactgcat

SEQ ID NO: 997971 - DNA, 25 bp, Homo sapien
tgcatctccgcagcgagctcttgga

SEQ ID NO: 997972 - DNA, 25 bp, Homo sapien
cagtgcggcattgatgtttggcacc

SEQ ID NO: 997973 - DNA, 25 bp, Homo sapien
ggagcagtttcagtgcggcattgat

SEQ ID NO: 997974 - DNA, 25 bp, Homo sapien
aactccgaagtgcatcgcagtgctg

SEQ ID NO: 997975 - DNA, 25 bp, Homo sapien
ggcaccagggtatcaactccgaagt

SEQ ID NO: 997976 - DNA, 25 bp, Homo sapien
cagtagacaaactcgaaacccagcg

SEQ ID NO: 997977 - DNA, 25 bp, Homo sapien
gcagtagacaaactcgaaacccagc

SEQ ID NO: 997978 - DNA, 25 bp, Homo sapien
agtagacaaactcgaaacccagcgt

SEQ ID NO: 997979 - DNA, 25 bp, Homo sapien
gagactgatgtagatggcagcttct

SEQ ID NO: 997980 - DNA, 25 bp, Homo sapien
tgatcggttggcaagagcttggcta

SEQ ID NO: 997981 - DNA, 25 bp, Homo sapien
tctggaaagttgttcctggtcttgg

SEQ ID NO: 997982 - DNA, 25 bp, Homo sapien
cttcttaggagttgtttgtgcaggg

SEQ ID NO: 997983 - DNA, 25 bp, Homo sapien
gctgaacgatagataaaagtaggct

SEQ ID NO: 997984 - DNA, 25 bp, Homo sapien
ctaatagtgatagcgcgaagagcct

SEQ ID NO: 997985 - DNA, 25 bp, Homo sapien
aaagtaggctttgcctctgcactaa

SEQ ID NO: 997986 - DNA, 25 bp, Homo sapien
gagccttatggtgttcggttcttcc

SEQ ID NO: 997987 - DNA, 25 bp, Homo sapien
cagagatgcttagaataccgtttct

SEQ ID NO: 997988 - DNA, 25 bp, Homo sapien
gatgcttagaataccgtttctttat

SEQ ID NO: 997989 - DNA, 25 bp, Homo sapien
agtgctatccgtggtattattttac

SEQ ID NO: 997990 - DNA, 25 bp, Homo sapien
ccagtgctatccgtggtattatttt

SEQ ID NO: 997991 - DNA, 25 bp, Homo sapien
ctagtacattcacaaccttcttcat

SEQ ID NO: 997992 - DNA, 25 bp, Homo sapien
acattcacaaccttcttcatctgca

SEQ ID NO: 997993 - DNA, 25 bp, Homo sapien
tagtacattcacaaccttcttcatc

SEQ ID NO: 997994 - DNA, 25 bp, Homo sapien
gtacattcacaaccttcttcatctg

SEQ ID NO: 997995 - DNA, 25 bp, Homo sapien
tggaaatgtgaatcatagaaaatgg

SEQ ID NO: 997996 - DNA, 25 bp, Homo sapien
tcaaaattactaaacctgtgttgtc

SEQ ID NO: 997997 - DNA, 25 bp, Homo sapien
ggcatacgcactgtcaaaattacta

SEQ ID NO: 997998 - DNA, 25 bp, Homo sapien
aaatggcaggcaatagaggtgtgac

SEQ ID NO: 997999 - DNA, 25 bp, Homo sapien
ccctgcagtgatgcctactaaaaac

SEQ ID NO: 998000 - DNA, 25 bp, Homo sapien
tcaaagttggccagtctagcgaagc

SEQ ID NO: 998001 - DNA, 25 bp, Homo sapien
agtacacacttctgaaccatttcaa

SEQ ID NO: 998002 - DNA, 25 bp, Homo sapien
tttgcaacttagtacacacttctga

SEQ ID NO: 998003 - DNA, 25 bp, Homo sapien
taaatatgtggcgttatttctgcag

SEQ ID NO: 998004 - DNA, 25 bp, Homo sapien
aatatgtggcgttatttctgcaggc

SEQ ID NO: 998005 - DNA, 25 bp, Homo sapien
tgtaaatatgtggcgttatttctgc

SEQ ID NO: 998006 - DNA, 25 bp, Homo sapien
aaatatgtggcgttatttctgcagg

SEQ ID NO: 998007 - DNA, 25 bp, Homo sapien
cgatatgtaaatagcccccaattat

SEQ ID NO: 998008 - DNA, 25 bp, Homo sapien
gatatgtaaatagcccccaattata

SEQ ID NO: 998009 - DNA, 25 bp, Homo sapien
tatgtaaatagcccccaattatatt

SEQ ID NO: 998010 - DNA, 25 bp, Homo sapien
gtaaatagcccccaattatattgtg

SEQ ID NO: 998011 - DNA, 25 bp, Homo sapien
gggcctgcttcgaagtgtcaaaata

SEQ ID NO: 998012 - DNA, 25 bp, Homo sapien
tagcagtgccattgttcgtggtgaa

SEQ ID NO: 998013 - DNA, 25 bp, Homo sapien
accaagttgtgtgatttgagattaa

SEQ ID NO: 998014 - DNA, 25 bp, Homo sapien
gaatgttttagcaccaagttgtgtg

SEQ ID NO: 998015 - DNA, 25 bp, Homo sapien
cttgtcctcatagggtttcgtgtat

SEQ ID NO: 998016 - DNA, 25 bp, Homo sapien
cttggtacttgtcctcatagggttt

SEQ ID NO: 998017 - DNA, 25 bp, Homo sapien
tcctcatagggtttcgtgtatttca

SEQ ID NO: 998018 - DNA, 25 bp, Homo sapien
ctcatagggtttcgtgtatttcaca

SEQ ID NO: 998019 - DNA, 25 bp, Homo sapien
gcagttaacccttcattggtcccaa

SEQ ID NO: 998020 - DNA, 25 bp, Homo sapien
cagccatgggattcattagctgcag

SEQ ID NO: 998021 - DNA, 25 bp, Homo sapien
tgagaagatacctggaactttcatg

SEQ ID NO: 998022 - DNA, 25 bp, Homo sapien
ttgatgagaagatacctggaacttt

SEQ ID NO: 998023 - DNA, 25 bp, Homo sapien
taatgtatcataccgagagaggtgt

SEQ ID NO: 998024 - DNA, 25 bp, Homo sapien
tattgcgtaatagatgtgtcagtgc

SEQ ID NO: 998025 - DNA, 25 bp, Homo sapien
tctcaacttgtttggcaattgctga

SEQ ID NO: 998026 - DNA, 25 bp, Homo sapien
catgcatgggtatttggtgtaggta

SEQ ID NO: 998027 - DNA, 25 bp, Homo sapien
cctaattgggagtctggtgtgtccc

SEQ ID NO: 998028 - DNA, 25 bp, Homo sapien
gacgtagcattcaccaatggtccag

SEQ ID NO: 998029 - DNA, 25 bp, Homo sapien
tatctaacaggcacagaacattcag

SEQ ID NO: 998030 - DNA, 25 bp, Homo sapien
aaaaatacatccagatcgcagagtg

SEQ ID NO: 998031 - DNA, 25 bp, Homo sapien
tatggccagcttcacagtctctgtg

SEQ ID NO: 998032 - DNA, 25 bp, Homo sapien
agcttcacagtctctgtgacccttc

SEQ ID NO: 998033 - DNA, 25 bp, Homo sapien
ttcaacctgtcccatgacttctgct

SEQ ID NO: 998034 - DNA, 25 bp, Homo sapien
tgacccttcaacctgtcccatgact

SEQ ID NO: 998035 - DNA, 25 bp, Homo sapien
ggtgtctactgatggcatcactatg

SEQ ID NO: 998036 - DNA, 25 bp, Homo sapien
tgccttcacccatatgattctcata

SEQ ID NO: 998037 - DNA, 25 bp, Homo sapien
actgccttcacccatatgattctca

SEQ ID NO: 998038 - DNA, 25 bp, Homo sapien
ctgatggcatcactatgctcactgc

SEQ ID NO: 998039 - DNA, 25 bp, Homo sapien
tagccagtatccagcaaggcctgct

SEQ ID NO: 998040 - DNA, 25 bp, Homo sapien
ctagccagtatccagcaaggcctgc

SEQ ID NO: 998041 - DNA, 25 bp, Homo sapien
gataaccatatttgacgcccttaaa

SEQ ID NO: 998042 - DNA, 25 bp, Homo sapien
tctaaaattaggagtcattgtattc

SEQ ID NO: 998043 - DNA, 25 bp, Homo sapien
gatgaggttatgtgtaggtatctct

SEQ ID NO: 998044 - DNA, 25 bp, Homo sapien
ctggtgccatagaaagtgtggatga

SEQ ID NO: 998045 - DNA, 25 bp, Homo sapien
aattctaagtcctgaaaattgccta

SEQ ID NO: 998046 - DNA, 25 bp, Homo sapien
ttgtgcagcctcttggcaggtcatc

SEQ ID NO: 998047 - DNA, 25 bp, Homo sapien
gaagtgaccgtcaattcctggaaac

SEQ ID NO: 998048 - DNA, 25 bp, Homo sapien
cagaagtgaccgtcaattcctggaa

SEQ ID NO: 998049 - DNA, 25 bp, Homo sapien
tttcagaagtgaccgtcaattcctg

SEQ ID NO: 998050 - DNA, 25 bp, Homo sapien
aacatttcagaagtgaccgtcaatt

SEQ ID NO: 998051 - DNA, 25 bp, Homo sapien
gattgaagtagtagtcatttcatac

SEQ ID NO: 998052 - DNA, 25 bp, Homo sapien
ccatgttttgagctaattccagaat

SEQ ID NO: 998053 - DNA, 25 bp, Homo sapien
gtagtagtcatttcatactttgtgt

SEQ ID NO: 998054 - DNA, 25 bp, Homo sapien
ctaattccagaatgttgtcagtcat

SEQ ID NO: 998055 - DNA, 25 bp, Homo sapien
tttgctgtaattatatcgtacattg

SEQ ID NO: 998056 - DNA, 25 bp, Homo sapien
tcattgggattctacaatgggtttg

SEQ ID NO: 998057 - DNA, 25 bp, Homo sapien
cattgggattctacaatgggtttgc

SEQ ID NO: 998058 - DNA, 25 bp, Homo sapien
tatcgtacattgatgttaactctca

SEQ ID NO: 998059 - DNA, 25 bp, Homo sapien
ggtgctctcgggctgccatatgtgt

SEQ ID NO: 998060 - DNA, 25 bp, Homo sapien
tgatttgttttaacggtgctctcgg

SEQ ID NO: 998061 - DNA, 25 bp, Homo sapien
ttttgctggactttcagaacgtgtg

SEQ ID NO: 998062 - DNA, 25 bp, Homo sapien
tcctgttttaacttcggagcgagtc

SEQ ID NO: 998063 - DNA, 25 bp, Homo sapien
tggatctcagatccctcttgtttaa

SEQ ID NO: 998064 - DNA, 25 bp, Homo sapien
gatccctcttgtttaatttgcctga

SEQ ID NO: 998065 - DNA, 25 bp, Homo sapien
tcagatccctcttgtttaatttgcc

SEQ ID NO: 998066 - DNA, 25 bp, Homo sapien
tgtgtggatctcagatccctcttgt

SEQ ID NO: 998067 - DNA, 25 bp, Homo sapien
agcaggctactgaattaccttttga

SEQ ID NO: 998068 - DNA, 25 bp, Homo sapien
cccttggattgagaatatggcaaat

SEQ ID NO: 998069 - DNA, 25 bp, Homo sapien
gcactacctcctaacagaccccttg

SEQ ID NO: 998070 - DNA, 25 bp, Homo sapien
aaagcaggctactgaattacctttt

SEQ ID NO: 998071 - DNA, 25 bp, Homo sapien
ttttgctccagaataaagcgacata

SEQ ID NO: 998072 - DNA, 25 bp, Homo sapien
gaataaagcgacatagctctaagtc

SEQ ID NO: 998073 - DNA, 25 bp, Homo sapien
catagctctaagtcaggacatacca

SEQ ID NO: 998074 - DNA, 25 bp, Homo sapien
gcgacatagctctaagtcaggacat

SEQ ID NO: 998075 - DNA, 25 bp, Homo sapien
tttctattcttgcaccccttccatg

SEQ ID NO: 998076 - DNA, 25 bp, Homo sapien
accccttccatgcaggcaaaatgtt

SEQ ID NO: 998077 - DNA, 25 bp, Homo sapien
tccatgcaggcaaaatgttatacag

SEQ ID NO: 998078 - DNA, 25 bp, Homo sapien
ttttctattcttgcaccccttccat

SEQ ID NO: 998079 - DNA, 25 bp, Homo sapien
tctgagagctactggagaatctctt

SEQ ID NO: 998080 - DNA, 25 bp, Homo sapien
tgtgccctcactataagaaggagcc

SEQ ID NO: 998081 - DNA, 25 bp, Homo sapien
tctggagaaaggtctaatagaagca

SEQ ID NO: 998082 - DNA, 25 bp, Homo sapien
ttctcttaagaaggagccctcctct

SEQ ID NO: 998083 - DNA, 25 bp, Homo sapien
cttcggaaattctaagaagcctgca

SEQ ID NO: 998084 - DNA, 25 bp, Homo sapien
gagactaaacaaaaatctgtgggcc

SEQ ID NO: 998085 - DNA, 25 bp, Homo sapien
tgggcctttacagctagttcagaga

SEQ ID NO: 998086 - DNA, 25 bp, Homo sapien
tattaacggccctgcgagactaaac

SEQ ID NO: 998087 - DNA, 25 bp, Homo sapien
ctgttagtcctaaatcttgtctgca

SEQ ID NO: 998088 - DNA, 25 bp, Homo sapien
atttcactgttagtcctaaatcttg

SEQ ID NO: 998089 - DNA, 25 bp, Homo sapien
taaagatttcactgttagtcctaaa

SEQ ID NO: 998090 - DNA, 25 bp, Homo sapien
aataaagatttcactgttagtccta

SEQ ID NO: 998091 - DNA, 25 bp, Homo sapien
cagaattctgttagcctgtgtaagc

SEQ ID NO: 998092 - DNA, 25 bp, Homo sapien
taagctttaggtccactgtttctct

SEQ ID NO: 998093 - DNA, 25 bp, Homo sapien
gtttctctacctgatacaatctgaa

SEQ ID NO: 998094 - DNA, 25 bp, Homo sapien
aataaagtacacctcagtaccagaa

SEQ ID NO: 998095 - DNA, 25 bp, Homo sapien
tgaaagcaaatcttctgggctgctc

SEQ ID NO: 998096 - DNA, 25 bp, Homo sapien
agtcagaggggatatgggaaattaa

SEQ ID NO: 998097 - DNA, 25 bp, Homo sapien
catcagagtcagaggggatatggga

SEQ ID NO: 998098 - DNA, 25 bp, Homo sapien
gaaagcaaatcttctgggctgctca

SEQ ID NO: 998099 - DNA, 25 bp, Homo sapien
tcagcaccagtcctgtcagagaagg

SEQ ID NO: 998100 - DNA, 25 bp, Homo sapien
tctaatatgaggctggattgaatcc

SEQ ID NO: 998101 - DNA, 25 bp, Homo sapien
taaaaccacacactgagcttcagca

SEQ ID NO: 998102 - DNA, 25 bp, Homo sapien
tagtgggtgccttttgctgtttgcg

SEQ ID NO: 998103 - DNA, 25 bp, Homo sapien
catctgcggtcaaattccaattcca

SEQ ID NO: 998104 - DNA, 25 bp, Homo sapien
ttccaattccagagataaggtcaag

SEQ ID NO: 998105 - DNA, 25 bp, Homo sapien
caattccagagataaggtcaaggag

SEQ ID NO: 998106 - DNA, 25 bp, Homo sapien
ctaaaggtgcatctgcggtcaaatt

SEQ ID NO: 998107 - DNA, 25 bp, Homo sapien
ctcctttgcctcctccaactctgtt

SEQ ID NO: 998108 - DNA, 25 bp, Homo sapien
caaagaagcctcctttgcctcctcc

SEQ ID NO: 998109 - DNA, 25 bp, Homo sapien
tttgcctcctccaactctgtttgac

SEQ ID NO: 998110 - DNA, 25 bp, Homo sapien
cctttgcctcctccaactctgtttg

SEQ ID NO: 998111 - DNA, 25 bp, Homo sapien
tcagatggcttagacagatgggcca

SEQ ID NO: 998112 - DNA, 25 bp, Homo sapien
cactgattcgatattgagctttggc

SEQ ID NO: 998113 - DNA, 25 bp, Homo sapien
gctgtaatgtaaaagagtgtcactg

SEQ ID NO: 998114 - DNA, 25 bp, Homo sapien
agatgggccatacaagactctgggc

SEQ ID NO: 998115 - DNA, 25 bp, Homo sapien
catagcgaaccaacaatttcctcag

SEQ ID NO: 998116 - DNA, 25 bp, Homo sapien
atttcctcagtctgaactgttccat

SEQ ID NO: 998117 - DNA, 25 bp, Homo sapien
caatttcctcagtctgaactgttcc

SEQ ID NO: 998118 - DNA, 25 bp, Homo sapien
tagcgaaccaacaatttcctcagtc

SEQ ID NO: 998119 - DNA, 25 bp, Homo sapien
tggcacattataaccaggagctccc

SEQ ID NO: 998120 - DNA, 25 bp, Homo sapien
caaatagtgcagacatgtgatcagc

SEQ ID NO: 998121 - DNA, 25 bp, Homo sapien
accacattacacacagctcctgaga

SEQ ID NO: 998122 - DNA, 25 bp, Homo sapien
ctgggtcagtttgcctctcgtttgc

SEQ ID NO: 998123 - DNA, 25 bp, Homo sapien
aatttatgtcatagatttgcatgct

SEQ ID NO: 998124 - DNA, 25 bp, Homo sapien
tttgcatgctaagtacctctctggt

SEQ ID NO: 998125 - DNA, 25 bp, Homo sapien
tgactagagaatgagatgtagcagc

SEQ ID NO: 998126 - DNA, 25 bp, Homo sapien
caatctttgttgcatgccatttgta

SEQ ID NO: 998127 - DNA, 25 bp, Homo sapien
gctggattgaccatttggtcccatt

SEQ ID NO: 998128 - DNA, 25 bp, Homo sapien
tggattgaccatttggtcccatttt

SEQ ID NO: 998129 - DNA, 25 bp, Homo sapien
cagctggattgaccatttggtccca

SEQ ID NO: 998130 - DNA, 25 bp, Homo sapien
gacagctggattgaccatttggtcc

SEQ ID NO: 998131 - DNA, 25 bp, Homo sapien
caggtccacaccttctaattcagaa

SEQ ID NO: 998132 - DNA, 25 bp, Homo sapien
ttcagaacgcgatttcagtgactct

SEQ ID NO: 998133 - DNA, 25 bp, Homo sapien
cagtgactcttgagctgtgatgctc

SEQ ID NO: 998134 - DNA, 25 bp, Homo sapien
tagaaaagctcgaggagacaaatct

SEQ ID NO: 998135 - DNA, 25 bp, Homo sapien
tctctgggtttttgccagttcccaa

SEQ ID NO: 998136 - DNA, 25 bp, Homo sapien
cagttcccaaaatctctacctgaga

SEQ ID NO: 998137 - DNA, 25 bp, Homo sapien
tctctacctgagaagaaggcatgga

SEQ ID NO: 998138 - DNA, 25 bp, Homo sapien
tcttgaatctcgcattcctctctgg

SEQ ID NO: 998139 - DNA, 25 bp, Homo sapien
tcagcatcgcctctcatctcttctg

SEQ ID NO: 998140 - DNA, 25 bp, Homo sapien
ctctcttttcttcgctcctgggtct

SEQ ID NO: 998141 - DNA, 25 bp, Homo sapien
gtctctcttttcttcgctcctgggt

SEQ ID NO: 998142 - DNA, 25 bp, Homo sapien
cagcatcgcctctcatctcttctgc

SEQ ID NO: 998143 - DNA, 25 bp, Homo sapien
tgttccgtggatttagccttcagga

SEQ ID NO: 998144 - DNA, 25 bp, Homo sapien
tatttccaaagattcgttcatactc

SEQ ID NO: 998145 - DNA, 25 bp, Homo sapien
cattagtacttgaggcttgaggact

SEQ ID NO: 998146 - DNA, 25 bp, Homo sapien
actgaggaggtgagtgtaagcacta

SEQ ID NO: 998147 - DNA, 25 bp, Homo sapien
tatatggctacgcagtttatcctga

SEQ ID NO: 998148 - DNA, 25 bp, Homo sapien
cctgaatgtgggctctttgagatcc

SEQ ID NO: 998149 - DNA, 25 bp, Homo sapien
tttatcctgatgtagttgcacacct

SEQ ID NO: 998150 - DNA, 25 bp, Homo sapien
ccagcctgtatataacaatagccag

SEQ ID NO: 998151 - DNA, 25 bp, Homo sapien
gagactgctcgggctcctctctcag

SEQ ID NO: 998152 - DNA, 25 bp, Homo sapien
ttcccagggctaagtacccgtatgc

SEQ ID NO: 998153 - DNA, 25 bp, Homo sapien
tcactgatgtatccttgtatctgcc

SEQ ID NO: 998154 - DNA, 25 bp, Homo sapien
ggaccagatgttgggacataagtac

SEQ ID NO: 998155 - DNA, 25 bp, Homo sapien
cataagtactagtttggaacaaaca

SEQ ID NO: 998156 - DNA, 25 bp, Homo sapien
tttgtcccatggatgctgactcctt

SEQ ID NO: 998157 - DNA, 25 bp, Homo sapien
ttgtcccatggatgctgactccttc

SEQ ID NO: 998158 - DNA, 25 bp, Homo sapien
tcatgagagttgtccgtgatctagc

SEQ ID NO: 998159 - DNA, 25 bp, Homo sapien
tgtccgtgatctagcatctctgaag

SEQ ID NO: 998160 - DNA, 25 bp, Homo sapien
gcatctctgaaggaacgtctacagg

SEQ ID NO: 998161 - DNA, 25 bp, Homo sapien
catctctgaaggaacgtctacaggc

SEQ ID NO: 998162 - DNA, 25 bp, Homo sapien
agttaatgcccaaggtgcccataga

SEQ ID NO: 998163 - DNA, 25 bp, Homo sapien
tcagttaatgcccaaggtgcccata

SEQ ID NO: 998164 - DNA, 25 bp, Homo sapien
taatgcccaaggtgcccatagacaa

SEQ ID NO: 998165 - DNA, 25 bp, Homo sapien
atgcccaaggtgcccatagacaatt

SEQ ID NO: 998166 - DNA, 25 bp, Homo sapien
cctttagttttgaatggaggctgca

SEQ ID NO: 998167 - DNA, 25 bp, Homo sapien
ctacctttagttttgaatggaggct

SEQ ID NO: 998168 - DNA, 25 bp, Homo sapien
acctttagttttgaatggaggctgc

SEQ ID NO: 998169 - DNA, 25 bp, Homo sapien
ctttagttttgaatggaggctgcag

SEQ ID NO: 998170 - DNA, 25 bp, Homo sapien
tgtagctcatttggtatatctccca

SEQ ID NO: 998171 - DNA, 25 bp, Homo sapien
tacatcagttaatactcttgcaacg

SEQ ID NO: 998172 - DNA, 25 bp, Homo sapien
tcctaacctgaaactgccagccagt

SEQ ID NO: 998173 - DNA, 25 bp, Homo sapien
gttcttgttaatcagtcctcaccag

SEQ ID NO: 998174 - DNA, 25 bp, Homo sapien
ccccagatgtgccttgattgaggat

SEQ ID NO: 998175 - DNA, 25 bp, Homo sapien
aaaagtgtgaatgctctgttgaatg

SEQ ID NO: 998176 - DNA, 25 bp, Homo sapien
gattgaggatggcaaaaaagtgtga

SEQ ID NO: 998177 - DNA, 25 bp, Homo sapien
aatgctctgttgaatgggacctcac

SEQ ID NO: 998178 - DNA, 25 bp, Homo sapien
cccatgcgacgtgaagaaaacatac

SEQ ID NO: 998179 - DNA, 25 bp, Homo sapien
tgtaacccatgcgacgtgaagaaaa

SEQ ID NO: 998180 - DNA, 25 bp, Homo sapien
tgatatgtgtctccaagtgtatttg

SEQ ID NO: 998181 - DNA, 25 bp, Homo sapien
gtatttgtaacccatgcgacgtgaa

SEQ ID NO: 998182 - DNA, 25 bp, Homo sapien
catgtgctgatgtccatgtggaaac

SEQ ID NO: 998183 - DNA, 25 bp, Homo sapien
gatcaagtctcctaagcctaaatgg

SEQ ID NO: 998184 - DNA, 25 bp, Homo sapien
tcaggcggtgatgactttctcaaaa

SEQ ID NO: 998185 - DNA, 25 bp, Homo sapien
tcaaaagcccacaatacgcgtggac

SEQ ID NO: 998186 - DNA, 25 bp, Homo sapien
tatcaagatcaaagacgaaatccat

SEQ ID NO: 998187 - DNA, 25 bp, Homo sapien
atatcaagatcaaagacgaaatcca

SEQ ID NO: 998188 - DNA, 25 bp, Homo sapien
catatcaagatcaaagacgaaatcc

SEQ ID NO: 998189 - DNA, 25 bp, Homo sapien
tacttgcagtagataaagttgccgt

SEQ ID NO: 998190 - DNA, 25 bp, Homo sapien
gttgccgtatttgatgtttccatgt

SEQ ID NO: 998191 - DNA, 25 bp, Homo sapien
cagtagataaagttgccgtatttga

SEQ ID NO: 998192 - DNA, 25 bp, Homo sapien
taatgagatacttgcagtagataaa

SEQ ID NO: 998193 - DNA, 25 bp, Homo sapien
atgggtgagagacatcggggatcat

SEQ ID NO: 998194 - DNA, 25 bp, Homo sapien
aaatgggtgagagacatcggggatc

SEQ ID NO: 998195 - DNA, 25 bp, Homo sapien
gaaatgggtgagagacatcggggat

SEQ ID NO: 998196 - DNA, 25 bp, Homo sapien
aatgggtgagagacatcggggatca

SEQ ID NO: 998197 - DNA, 25 bp, Homo sapien
tttgaggccttccatagcagcttcc

SEQ ID NO: 998198 - DNA, 25 bp, Homo sapien
gctttcaactgtatccccttgggat

SEQ ID NO: 998199 - DNA, 25 bp, Homo sapien
ggcagctgcggcactactggttgta

SEQ ID NO: 998200 - DNA, 25 bp, Homo sapien
tgccaagaggtgttgctttgaggcc

SEQ ID NO: 998201 - DNA, 25 bp, Homo sapien
cagtaataggtatctctgttgatgt

SEQ ID NO: 998202 - DNA, 25 bp, Homo sapien
taggtatctctgttgatgtatccac

SEQ ID NO: 998203 - DNA, 25 bp, Homo sapien
ctaacagtaataggtatctctgttg

SEQ ID NO: 998204 - DNA, 25 bp, Homo sapien
aataggtatctctgttgatgtatcc

SEQ ID NO: 998205 - DNA, 25 bp, Homo sapien
tgtgcactgcacagagtctccgagg

SEQ ID NO: 998206 - DNA, 25 bp, Homo sapien
taaggcagcgtaagagccagcaaga

SEQ ID NO: 998207 - DNA, 25 bp, Homo sapien
agggtaccgaccacagacagctgcc

SEQ ID NO: 998208 - DNA, 25 bp, Homo sapien
tattcactgtaaactcggtgtgcag

SEQ ID NO: 998209 - DNA, 25 bp, Homo sapien
aaagggattggcttccagtacagtt

SEQ ID NO: 998210 - DNA, 25 bp, Homo sapien
ttagccctgagggatattgctctat

SEQ ID NO: 998211 - DNA, 25 bp, Homo sapien
cagtacagttaattccacatggaag

SEQ ID NO: 998212 - DNA, 25 bp, Homo sapien
tagtaaatctcccttgccttggtga

SEQ ID NO: 998213 - DNA, 25 bp, Homo sapien
gatcttgccttacaacatcttgggc

SEQ ID NO: 998214 - DNA, 25 bp, Homo sapien
tggtgatcttgccttacaacatctt

SEQ ID NO: 998215 - DNA, 25 bp, Homo sapien
tgccttacaacatcttgggcccaga

SEQ ID NO: 998216 - DNA, 25 bp, Homo sapien
ccagagatattgctgagattcttgt

SEQ ID NO: 998217 - DNA, 25 bp, Homo sapien
ctgatacaagtgctgatcaagttgg

SEQ ID NO: 998218 - DNA, 25 bp, Homo sapien
tgatcaagttggtaaactcccaggt

SEQ ID NO: 998219 - DNA, 25 bp, Homo sapien
caagtgctgatcaagttggtaaact

SEQ ID NO: 998220 - DNA, 25 bp, Homo sapien
caagttggtaaactcccaggtcaga

SEQ ID NO: 998221 - DNA, 25 bp, Homo sapien
tatatggttcatgttgaaccagccc

SEQ ID NO: 998222 - DNA, 25 bp, Homo sapien
gtccgttagtgaccagattccagtg

SEQ ID NO: 998223 - DNA, 25 bp, Homo sapien
tgcatatatggttcatgttgaacca

SEQ ID NO: 998224 - DNA, 25 bp, Homo sapien
ctagaccagtccgttagtgaccaga

SEQ ID NO: 998225 - DNA, 25 bp, Homo sapien
taaggatgagtttttggcggcatcc

SEQ ID NO: 998226 - DNA, 25 bp, Homo sapien
ttaaggatgagtttttggcggcatc

SEQ ID NO: 998227 - DNA, 25 bp, Homo sapien
aaggatgagtttttggcggcatcca

SEQ ID NO: 998228 - DNA, 25 bp, Homo sapien
gcatcttattctgatgatcaggtgg

SEQ ID NO: 998229 - DNA, 25 bp, Homo sapien
agtgagcattatcggtatttgcacc

SEQ ID NO: 998230 - DNA, 25 bp, Homo sapien
cttattctgatgatcaggtggtatt

SEQ ID NO: 998231 - DNA, 25 bp, Homo sapien
ctgtagtgagcattatcggtatttg

SEQ ID NO: 998232 - DNA, 25 bp, Homo sapien
ctctttggcaatttcgaatagccat

SEQ ID NO: 998233 - DNA, 25 bp, Homo sapien
tcgcctcagacactaaaccataaaa

SEQ ID NO: 998234 - DNA, 25 bp, Homo sapien
tggacattcttaggtgaggtacagc

SEQ ID NO: 998235 - DNA, 25 bp, Homo sapien
gtagtcaatcgcctcagacactaaa

SEQ ID NO: 998236 - DNA, 25 bp, Homo sapien
cgatgacacatcgtagagaagagga

SEQ ID NO: 998237 - DNA, 25 bp, Homo sapien
tattcatcagaattcttcttaaaag

SEQ ID NO: 998238 - DNA, 25 bp, Homo sapien
tactgggtgtattacaaggacctct

SEQ ID NO: 998239 - DNA, 25 bp, Homo sapien
ggacctcttggttaagctgcatggg

SEQ ID NO: 998240 - DNA, 25 bp, Homo sapien
tgtaagaggcttttgtctgttccac

SEQ ID NO: 998241 - DNA, 25 bp, Homo sapien
cccgtatgctccaggaattgttagt

SEQ ID NO: 998242 - DNA, 25 bp, Homo sapien
tgcctttgttctcatccaggtgcca

SEQ ID NO: 998243 - DNA, 25 bp, Homo sapien
gagtgctgccttccggagtcctcct

SEQ ID NO: 998244 - DNA, 25 bp, Homo sapien
gatataagaagcagggagtgctgcc

SEQ ID NO: 998245 - DNA, 25 bp, Homo sapien
gaagatctccttagggctagaaggt

SEQ ID NO: 998246 - DNA, 25 bp, Homo sapien
ctctaagtggagtggcaaaatgtac

SEQ ID NO: 998247 - DNA, 25 bp, Homo sapien
cacactggagatcaattgtctgaag

SEQ ID NO: 998248 - DNA, 25 bp, Homo sapien
tctttggtgaattagcctgatgcct

SEQ ID NO: 998249 - DNA, 25 bp, Homo sapien
aattggctccctcgctgtttgacag

SEQ ID NO: 998250 - DNA, 25 bp, Homo sapien
tgtttgacagcaacctttagggctc

SEQ ID NO: 998251 - DNA, 25 bp, Homo sapien
gctacagcatctcagtccaaattgg

SEQ ID NO: 998252 - DNA, 25 bp, Homo sapien
ccagaaaatctgagcatgatatcct

SEQ ID NO: 998253 - DNA, 25 bp, Homo sapien
tcttgatcccaacagttagaagcaa

SEQ ID NO: 998254 - DNA, 25 bp, Homo sapien
ttgatcccaacagttagaagcaatc

SEQ ID NO: 998255 - DNA, 25 bp, Homo sapien
cttcttgatcccaacagttagaagc

SEQ ID NO: 998256 - DNA, 25 bp, Homo sapien
gatcccaacagttagaagcaatcat

SEQ ID NO: 998257 - DNA, 25 bp, Homo sapien
catgaaccatatatccattgtagca

SEQ ID NO: 998258 - DNA, 25 bp, Homo sapien
accatatatccattgtagcaatgat

SEQ ID NO: 998259 - DNA, 25 bp, Homo sapien
tgaaccatatatccattgtagcaat

SEQ ID NO: 998260 - DNA, 25 bp, Homo sapien
gaaccatatatccattgtagcaatg

SEQ ID NO: 998261 - DNA, 25 bp, Homo sapien
ccaattatagcggtaacattacttg

SEQ ID NO: 998262 - DNA, 25 bp, Homo sapien
gacttcaattgatgggacttttaca

SEQ ID NO: 998263 - DNA, 25 bp, Homo sapien
tagaacatgttatgtgtcagaaacc

SEQ ID NO: 998264 - DNA, 25 bp, Homo sapien
gaagcacttctaaaatgtagcggat

SEQ ID NO: 998265 - DNA, 25 bp, Homo sapien
tattccaaaatataagatgagttca

SEQ ID NO: 998266 - DNA, 25 bp, Homo sapien
tataagatgagttcacaaaccagct

SEQ ID NO: 998267 - DNA, 25 bp, Homo sapien
agtgtcagggcaaaggcaactttaa

SEQ ID NO: 998268 - DNA, 25 bp, Homo sapien
gaagaactcacgaggaagtgtcagg

SEQ ID NO: 998269 - DNA, 25 bp, Homo sapien
acaaatccaagtccacggtccaggg

SEQ ID NO: 998270 - DNA, 25 bp, Homo sapien
ttagttagctctgcgtgcaggcagg

SEQ ID NO: 998271 - DNA, 25 bp, Homo sapien
cataaatgtgcatccacaaatccaa

SEQ ID NO: 998272 - DNA, 25 bp, Homo sapien
caggcaggccaccataaatgtgcat

SEQ ID NO: 998273 - DNA, 25 bp, Homo sapien
cataaaggggaacaacacctactgg

SEQ ID NO: 998274 - DNA, 25 bp, Homo sapien
taatacctgggcaatgaaatctgta

SEQ ID NO: 998275 - DNA, 25 bp, Homo sapien
tacctgggcaatgaaatctgtacaa

SEQ ID NO: 998276 - DNA, 25 bp, Homo sapien
gggtcctttcagagagtggacggtg

SEQ ID NO: 998277 - DNA, 25 bp, Homo sapien
tccatgctagtgctgatacgagaaa

SEQ ID NO: 998278 - DNA, 25 bp, Homo sapien
aattgtagttctacagcaccacaat

SEQ ID NO: 998279 - DNA, 25 bp, Homo sapien
gcaccacaatccatgctagtgctga

SEQ ID NO: 998280 - DNA, 25 bp, Homo sapien
tgtagttctacagcaccacaatcca

SEQ ID NO: 998281 - DNA, 25 bp, Homo sapien
ctctattctttctgcatcaaataat

SEQ ID NO: 998282 - DNA, 25 bp, Homo sapien
ctgcatcaaataatgaatagctcat

SEQ ID NO: 998283 - DNA, 25 bp, Homo sapien
tgtttatattgttgctatgtatctc

SEQ ID NO: 998284 - DNA, 25 bp, Homo sapien
atattgttgctatgtatctctattc

SEQ ID NO: 998285 - DNA, 25 bp, Homo sapien
cactgttgctagaacgtatttgttc

SEQ ID NO: 998286 - DNA, 25 bp, Homo sapien
tgattgctttactagactctgagaa

SEQ ID NO: 998287 - DNA, 25 bp, Homo sapien
tctattctgtcacagtcctttgtgc

SEQ ID NO: 998288 - DNA, 25 bp, Homo sapien
actgcttacatttccactgttacca

SEQ ID NO: 998289 - DNA, 25 bp, Homo sapien
actatttgcctttgagtagaccaac

SEQ ID NO: 998290 - DNA, 25 bp, Homo sapien
ctatttgcctttgagtagaccaacc

SEQ ID NO: 998291 - DNA, 25 bp, Homo sapien
aactatttgcctttgagtagaccaa

SEQ ID NO: 998292 - DNA, 25 bp, Homo sapien
agtaacggtatctttctccaagaag

SEQ ID NO: 998293 - DNA, 25 bp, Homo sapien
tattgtgatattgactctgttgcct

SEQ ID NO: 998294 - DNA, 25 bp, Homo sapien
ctttattgtgatattgactctgttg

SEQ ID NO: 998295 - DNA, 25 bp, Homo sapien
attgtgatattgactctgttgcctg

SEQ ID NO: 998296 - DNA, 25 bp, Homo sapien
ttattgtgatattgactctgttgcc

SEQ ID NO: 998297 - DNA, 25 bp, Homo sapien
aaactgtccttaccccttcaggcag

SEQ ID NO: 998298 - DNA, 25 bp, Homo sapien
tcgccacttcaaaggatagtatgcg

SEQ ID NO: 998299 - DNA, 25 bp, Homo sapien
gcgattatcccattgcttatagcta

SEQ ID NO: 998300 - DNA, 25 bp, Homo sapien
aattcagattactgggagacaaagg

SEQ ID NO: 998301 - DNA, 25 bp, Homo sapien
tccttctgtttgataagttcttttg

SEQ ID NO: 998302 - DNA, 25 bp, Homo sapien
cacatttctgaccatcattagttat

SEQ ID NO: 998303 - DNA, 25 bp, Homo sapien
gaccatcattagttattgcattaac

SEQ ID NO: 998304 - DNA, 25 bp, Homo sapien
tgagtgtcccgatgttgtgtgcccc

SEQ ID NO: 998305 - DNA, 25 bp, Homo sapien
gctcctgagtgtcccgatgttgtgt

SEQ ID NO: 998306 - DNA, 25 bp, Homo sapien
aaatcgttgttgagtgtctctctcc

SEQ ID NO: 998307 - DNA, 25 bp, Homo sapien
tttcgaaatcgttgttgagtgtctc

SEQ ID NO: 998308 - DNA, 25 bp, Homo sapien
cttgtctctggactcccccatgtgg

SEQ ID NO: 998309 - DNA, 25 bp, Homo sapien
caatcgttatttcgaaatcgttgtt

SEQ ID NO: 998310 - DNA, 25 bp, Homo sapien
cctgctgattttgtcggctctgagg

SEQ ID NO: 998311 - DNA, 25 bp, Homo sapien
atgcctaactaagttccagtactga

SEQ ID NO: 998312 - DNA, 25 bp, Homo sapien
tgcctaactaagttccagtactgag

SEQ ID NO: 998313 - DNA, 25 bp, Homo sapien
tgctgattttgtcggctctgaggca

SEQ ID NO: 998314 - DNA, 25 bp, Homo sapien
tctcattttcaaaggtcatgaggtt

SEQ ID NO: 998315 - DNA, 25 bp, Homo sapien
tggatttaggttacctgaggctaaa

SEQ ID NO: 998316 - DNA, 25 bp, Homo sapien
tgaggctaaataactccaagtaaat

SEQ ID NO: 998317 - DNA, 25 bp, Homo sapien
catgaggtttcttgggacaatttct

SEQ ID NO: 998318 - DNA, 25 bp, Homo sapien
taattgtaagtgtcagctgaaagac

SEQ ID NO: 998319 - DNA, 25 bp, Homo sapien
ttaattgtaagtgtcagctgaaaga

SEQ ID NO: 998320 - DNA, 25 bp, Homo sapien
cattctgcttctgtggcattatcac

SEQ ID NO: 998321 - DNA, 25 bp, Homo sapien
catgggatcgtcaccaaatctattc

SEQ ID NO: 998322 - DNA, 25 bp, Homo sapien
tcatgggatcgtcaccaaatctatt

SEQ ID NO: 998323 - DNA, 25 bp, Homo sapien
atgggatcgtcaccaaatctattct

SEQ ID NO: 998324 - DNA, 25 bp, Homo sapien
ccttctgtgaatcaggtcggatttc

SEQ ID NO: 998325 - DNA, 25 bp, Homo sapien
gaaggtcatattcttgctgctggct

SEQ ID NO: 998326 - DNA, 25 bp, Homo sapien
ccaggttgaagatgagagcagacac

SEQ ID NO: 998327 - DNA, 25 bp, Homo sapien
tggcttgtatttgctgccaagtccc

SEQ ID NO: 998328 - DNA, 25 bp, Homo sapien
tatattcgtcgtctagatagtgacc

SEQ ID NO: 998329 - DNA, 25 bp, Homo sapien
aagcacaaatatattcgtcgtctag

SEQ ID NO: 998330 - DNA, 25 bp, Homo sapien
caaatatattcgtcgtctagatagt

SEQ ID NO: 998331 - DNA, 25 bp, Homo sapien
cgtcgtctagatagtgaccatagta

SEQ ID NO: 998332 - DNA, 25 bp, Homo sapien
aagcatgtatagcttctcatcatca

SEQ ID NO: 998333 - DNA, 25 bp, Homo sapien
ctaatcaagcatgtatagcttctca

SEQ ID NO: 998334 - DNA, 25 bp, Homo sapien
aatcaagcatgtatagcttctcatc

SEQ ID NO: 998335 - DNA, 25 bp, Homo sapien
tcaagcatgtatagcttctcatcat

SEQ ID NO: 998336 - DNA, 25 bp, Homo sapien
tattcatctgttctagcttccggtc

SEQ ID NO: 998337 - DNA, 25 bp, Homo sapien
ctattcatctgttctagcttccggt

SEQ ID NO: 998338 - DNA, 25 bp, Homo sapien
gactcagagaactgggaatctgtcc

SEQ ID NO: 998339 - DNA, 25 bp, Homo sapien
cctgagactcagagaactgggaatc

SEQ ID NO: 998340 - DNA, 25 bp, Homo sapien
agaactgggaatctgtcctcttagg

SEQ ID NO: 998341 - DNA, 25 bp, Homo sapien
gagaactgggaatctgtcctcttag

SEQ ID NO: 998342 - DNA, 25 bp, Homo sapien
tcatgtggcaatttatcattgacca

SEQ ID NO: 998343 - DNA, 25 bp, Homo sapien
catcatgtggcaatttatcattgac

SEQ ID NO: 998344 - DNA, 25 bp, Homo sapien
catgtggcaatttatcattgaccat

SEQ ID NO: 998345 - DNA, 25 bp, Homo sapien
atcatgtggcaatttatcattgacc

SEQ ID NO: 998346 - DNA, 25 bp, Homo sapien
tgttctatagtatgtttcagaaact

SEQ ID NO: 998347 - DNA, 25 bp, Homo sapien
tcttgttctatagtatgtttcagaa

SEQ ID NO: 998348 - DNA, 25 bp, Homo sapien
ataggagttcgttttgaattcttct

SEQ ID NO: 998349 - DNA, 25 bp, Homo sapien
actcacaataggagttcgttttgaa

SEQ ID NO: 998350 - DNA, 25 bp, Homo sapien
tctcctttagcacggcactgccatg

SEQ ID NO: 998351 - DNA, 25 bp, Homo sapien
tatgttctaatgtaaacttgtgtga

SEQ ID NO: 998352 - DNA, 25 bp, Homo sapien
tggaagcatctcctttagcacggca

SEQ ID NO: 998353 - DNA, 25 bp, Homo sapien
tctaatgtaaacttgtgtgacttag

SEQ ID NO: 998354 - DNA, 25 bp, Homo sapien
cgttgcctggtaaacctctatggtc

SEQ ID NO: 998355 - DNA, 25 bp, Homo sapien
ttcaaagctgctaatttagacaaat

SEQ ID NO: 998356 - DNA, 25 bp, Homo sapien
ctctatggtcctgaggttttgactc

SEQ ID NO: 998357 - DNA, 25 bp, Homo sapien
cctctcgtctgatttctccacgttg

SEQ ID NO: 998358 - DNA, 25 bp, Homo sapien
aacatttctccctgttcaaggtcca

SEQ ID NO: 998359 - DNA, 25 bp, Homo sapien
cctgatccaggactcttaacatttc

SEQ ID NO: 998360 - DNA, 25 bp, Homo sapien
ctgttcaaggtccattatgtggtgc

SEQ ID NO: 998361 - DNA, 25 bp, Homo sapien
gatccaggactcttaacatttctcc

SEQ ID NO: 998362 - DNA, 25 bp, Homo sapien
cgcagtaaacggtcactagtcagta

SEQ ID NO: 998363 - DNA, 25 bp, Homo sapien
cggtcactagtcagtaggttgataa

SEQ ID NO: 998364 - DNA, 25 bp, Homo sapien
taaacggtcactagtcagtaggttg

SEQ ID NO: 998365 - DNA, 25 bp, Homo sapien
tagtcagtaggttgataattcgcat

SEQ ID NO: 998366 - DNA, 25 bp, Homo sapien
taaagtccgttgtgtcattctatgc

SEQ ID NO: 998367 - DNA, 25 bp, Homo sapien
cctaaagtccgttgtgtcattctat

SEQ ID NO: 998368 - DNA, 25 bp, Homo sapien
ccctaaagtccgttgtgtcattcta

SEQ ID NO: 998369 - DNA, 25 bp, Homo sapien
aagtccgttgtgtcattctatgcct

SEQ ID NO: 998370 - DNA, 25 bp, Homo sapien
tttgtactgcacaatcgcctcactg

SEQ ID NO: 998371 - DNA, 25 bp, Homo sapien
caaagtaggaattgagctctgctcc

SEQ ID NO: 998372 - DNA, 25 bp, Homo sapien
tctgcatctgttgtgaacttgctcc

SEQ ID NO: 998373 - DNA, 25 bp, Homo sapien
ggcagtgacagcaatactcaaagta

SEQ ID NO: 998374 - DNA, 25 bp, Homo sapien
tgtgctcctgtatttagcatgacag

SEQ ID NO: 998375 - DNA, 25 bp, Homo sapien
gcatgacaggaaatctcaaacggca

SEQ ID NO: 998376 - DNA, 25 bp, Homo sapien
tcaaacggcaaagaattacatggat

SEQ ID NO: 998377 - DNA, 25 bp, Homo sapien
tcttctgagttcaagccggatgtgc

SEQ ID NO: 998378 - DNA, 25 bp, Homo sapien
tcttcaatgtgtgctctattcctca

SEQ ID NO: 998379 - DNA, 25 bp, Homo sapien
ttatcttcaatgtgtgctctattcc

SEQ ID NO: 998380 - DNA, 25 bp, Homo sapien
cttcaatgtgtgctctattcctcat

SEQ ID NO: 998381 - DNA, 25 bp, Homo sapien
tatcttcaatgtgtgctctattcct

SEQ ID NO: 998382 - DNA, 25 bp, Homo sapien
tcaattgggaatgtgttgatggtcc

SEQ ID NO: 998383 - DNA, 25 bp, Homo sapien
ttttcctgcagtcttgggaacttga

SEQ ID NO: 998384 - DNA, 25 bp, Homo sapien
tcttgggaacttgaatcaattggga

SEQ ID NO: 998385 - DNA, 25 bp, Homo sapien
tcctcctccacgattcagtgattct

SEQ ID NO: 998386 - DNA, 25 bp, Homo sapien
tctacttgccaaatccgggatgaga

SEQ ID NO: 998387 - DNA, 25 bp, Homo sapien
acttgccaaatccgggatgagaaca

SEQ ID NO: 998388 - DNA, 25 bp, Homo sapien
tacttgccaaatccgggatgagaac

SEQ ID NO: 998389 - DNA, 25 bp, Homo sapien
ctctacttgccaaatccgggatgag

SEQ ID NO: 998390 - DNA, 25 bp, Homo sapien
cctctcgattcgcattcggttgttc

SEQ ID NO: 998391 - DNA, 25 bp, Homo sapien
tcgattcgcattcggttgttctctt

SEQ ID NO: 998392 - DNA, 25 bp, Homo sapien
ctaatcctctcgattcgcattcggt

SEQ ID NO: 998393 - DNA, 25 bp, Homo sapien
aatcctctcgattcgcattcggttg

SEQ ID NO: 998394 - DNA, 25 bp, Homo sapien
caaatttcactataggacctgccag

SEQ ID NO: 998395 - DNA, 25 bp, Homo sapien
cgcacccggccgagattcattaatc

SEQ ID NO: 998396 - DNA, 25 bp, Homo sapien
ccaacagctatgaagaaggtgcaat

SEQ ID NO: 998397 - DNA, 25 bp, Homo sapien
ccaacgagtggacagtgggatgcct

SEQ ID NO: 998398 - DNA, 25 bp, Homo sapien
tcagtttcatcttgtgccgttggcc

SEQ ID NO: 998399 - DNA, 25 bp, Homo sapien
tgtgccgttggccattcataccttc

SEQ ID NO: 998400 - DNA, 25 bp, Homo sapien
catcttgtgccgttggccattcata

SEQ ID NO: 998401 - DNA, 25 bp, Homo sapien
gccgttggccattcataccttcctg

SEQ ID NO: 998402 - DNA, 25 bp, Homo sapien
tctgttcaagcaggaaatacaatgg

SEQ ID NO: 998403 - DNA, 25 bp, Homo sapien
gactgcagtttagaatggtccttga

SEQ ID NO: 998404 - DNA, 25 bp, Homo sapien
aatgagacgatttgtatgctggtgc

SEQ ID NO: 998405 - DNA, 25 bp, Homo sapien
tagctaatagttttttggatccgaa

SEQ ID NO: 998406 - DNA, 25 bp, Homo sapien
cctatatgatggaagtgtcagggtg

SEQ ID NO: 998407 - DNA, 25 bp, Homo sapien
ctcaggaattagttgacccactgac

SEQ ID NO: 998408 - DNA, 25 bp, Homo sapien
gaacagctagcagtctctgccgtgc

SEQ ID NO: 998409 - DNA, 25 bp, Homo sapien
cttcctcgcccctagacaaatggag

SEQ ID NO: 998410 - DNA, 25 bp, Homo sapien
gctttgggagccatttgggagccat

SEQ ID NO: 998411 - DNA, 25 bp, Homo sapien
gatgctttgggagccatttgggagc

SEQ ID NO: 998412 - DNA, 25 bp, Homo sapien
tgctttgggagccatttgggagcca

SEQ ID NO: 998413 - DNA, 25 bp, Homo sapien
ctgatgctttgggagccatttggga

SEQ ID NO: 998414 - DNA, 25 bp, Homo sapien
ggtcaagatggccacaccctttcag

SEQ ID NO: 998415 - DNA, 25 bp, Homo sapien
catgtttcatccaagtagcggcaag

SEQ ID NO: 998416 - DNA, 25 bp, Homo sapien
cttggatagttcaggactggctccc

SEQ ID NO: 998417 - DNA, 25 bp, Homo sapien
gttcttctcaggaatcggcggcctt

SEQ ID NO: 998418 - DNA, 25 bp, Homo sapien
tcttcatgtctcatcgttttattag

SEQ ID NO: 998419 - DNA, 25 bp, Homo sapien
catcgttttattagcgtgtttcttc

SEQ ID NO: 998420 - DNA, 25 bp, Homo sapien
attcttcacagctgatcattgtata

SEQ ID NO: 998421 - DNA, 25 bp, Homo sapien
tcttcacagctgatcattgtatatt

SEQ ID NO: 998422 - DNA, 25 bp, Homo sapien
gctttctcatgacccaagaagtatg

SEQ ID NO: 998423 - DNA, 25 bp, Homo sapien
tggagtctcttagattcctcgtccc

SEQ ID NO: 998424 - DNA, 25 bp, Homo sapien
tgaacgccccatcggatgatcatgg

SEQ ID NO: 998425 - DNA, 25 bp, Homo sapien
gaatcaatagcatcatgaacgcccc

SEQ ID NO: 998426 - DNA, 25 bp, Homo sapien
ctccatgtgaatagggacagcccct

SEQ ID NO: 998427 - DNA, 25 bp, Homo sapien
catgtgaatagggacagcccctttt

SEQ ID NO: 998428 - DNA, 25 bp, Homo sapien
tgtgaatagggacagccccttttat

SEQ ID NO: 998429 - DNA, 25 bp, Homo sapien
tgaatagggacagccccttttatcc

SEQ ID NO: 998430 - DNA, 25 bp, Homo sapien
gggaccttgaacatggcggcagcaa

SEQ ID NO: 998431 - DNA, 25 bp, Homo sapien
ggggaccttgaacatggcggcagca

SEQ ID NO: 998432 - DNA, 25 bp, Homo sapien
aggggaccttgaacatggcggcagc

SEQ ID NO: 998433 - DNA, 25 bp, Homo sapien
aattctggctttgcgtaactgttgc

SEQ ID NO: 998434 - DNA, 25 bp, Homo sapien
ctttaatgacataggtatcttctga

SEQ ID NO: 998435 - DNA, 25 bp, Homo sapien
cacaggagttatctttccaatgcaa

SEQ ID NO: 998436 - DNA, 25 bp, Homo sapien
gaacatcagctcgtttgaggctggg

SEQ ID NO: 998437 - DNA, 25 bp, Homo sapien
ctagggaggtttacagcaaatcgaa

SEQ ID NO: 998438 - DNA, 25 bp, Homo sapien
ggattcaaggaagccacaagaaatg

SEQ ID NO: 998439 - DNA, 25 bp, Homo sapien
tgtgtgtggcctgaatgtatggtct

SEQ ID NO: 998440 - DNA, 25 bp, Homo sapien
gcagtctctgagcaaatccgatttg

SEQ ID NO: 998441 - DNA, 25 bp, Homo sapien
gggtcattgtcacacatcatctgca

SEQ ID NO: 998442 - DNA, 25 bp, Homo sapien
taccgatgtgcattccagtcatggc

SEQ ID NO: 998443 - DNA, 25 bp, Homo sapien
catagcagtgaacagtgaatgtgac

SEQ ID NO: 998444 - DNA, 25 bp, Homo sapien
gcttgagggctggatataccgatgt

SEQ ID NO: 998445 - DNA, 25 bp, Homo sapien
gattgtgatataatgcttgggttga

SEQ ID NO: 998446 - DNA, 25 bp, Homo sapien
taactgaaccgatctcagaagacag

SEQ ID NO: 998447 - DNA, 25 bp, Homo sapien
aaatgttaactgaaccgatctcaga

SEQ ID NO: 998448 - DNA, 25 bp, Homo sapien
tattgtcactttcctggtgtaagcc

SEQ ID NO: 998449 - DNA, 25 bp, Homo sapien
tggtcatactcagtgtcgtttggca

SEQ ID NO: 998450 - DNA, 25 bp, Homo sapien
ggtcatactcagtgtcgtttggcat

SEQ ID NO: 998451 - DNA, 25 bp, Homo sapien
tcaatcttttaactcaactgtttca

SEQ ID NO: 998452 - DNA, 25 bp, Homo sapien
caatcttttaactcaactgtttcaa

SEQ ID NO: 998453 - DNA, 25 bp, Homo sapien
actcaactgtttcaaaactcctttg

SEQ ID NO: 998454 - DNA, 25 bp, Homo sapien
ctcaactgtttcaaaactcctttgg

SEQ ID NO: 998455 - DNA, 25 bp, Homo sapien
gatgggtggtccacttggtaaagct

SEQ ID NO: 998456 - DNA, 25 bp, Homo sapien
ttgttatctccatgtaagccacaat

SEQ ID NO: 998457 - DNA, 25 bp, Homo sapien
agttgagcagatgggtggtccactt

SEQ ID NO: 998458 - DNA, 25 bp, Homo sapien
gtccacttggtaaagctttgttatc

SEQ ID NO: 998459 - DNA, 25 bp, Homo sapien
ttgttcttatttctggcttcaatat

SEQ ID NO: 998460 - DNA, 25 bp, Homo sapien
tcaatatccattgttaagtcttgcc

SEQ ID NO: 998461 - DNA, 25 bp, Homo sapien
tatttctggcttcaatatccattgt

SEQ ID NO: 998462 - DNA, 25 bp, Homo sapien
tggcttcaatatccattgttaagtc

SEQ ID NO: 998463 - DNA, 25 bp, Homo sapien
gacctgtcctcttccagcacgcacc

SEQ ID NO: 998464 - DNA, 25 bp, Homo sapien
ctgtcctcttccagcacgcaccctt

SEQ ID NO: 998465 - DNA, 25 bp, Homo sapien
acctgtcctcttccagcacgcaccc

SEQ ID NO: 998466 - DNA, 25 bp, Homo sapien
gtcctcttccagcacgcacccttcc

SEQ ID NO: 998467 - DNA, 25 bp, Homo sapien
gacttcgcagggttcttttgctaaa

SEQ ID NO: 998468 - DNA, 25 bp, Homo sapien
caaggatgatgagatactgagaacg

SEQ ID NO: 998469 - DNA, 25 bp, Homo sapien
agaacgatcagctctcaagggcggg

SEQ ID NO: 998470 - DNA, 25 bp, Homo sapien
gagatactgagaacgatcagctctc

SEQ ID NO: 998471 - DNA, 25 bp, Homo sapien
ttgtaaagaagatgtagtgatgtta

SEQ ID NO: 998472 - DNA, 25 bp, Homo sapien
tgttagcagtaagagtgaaattggc

SEQ ID NO: 998473 - DNA, 25 bp, Homo sapien
gaagatgtagtgatgttagcagtaa

SEQ ID NO: 998474 - DNA, 25 bp, Homo sapien
tagtgatgttagcagtaagagtgaa

SEQ ID NO: 998475 - DNA, 25 bp, Homo sapien
tatagtctagcttagcagacttccc

SEQ ID NO: 998476 - DNA, 25 bp, Homo sapien
gcttagcagacttcccactggtttc

SEQ ID NO: 998477 - DNA, 25 bp, Homo sapien
cctggacacgagtcttgttttatag

SEQ ID NO: 998478 - DNA, 25 bp, Homo sapien
tgttttatagtctagcttagcagac

SEQ ID NO: 998479 - DNA, 25 bp, Homo sapien
tgcctgtgcatatcatactgtaaag

SEQ ID NO: 998480 - DNA, 25 bp, Homo sapien
catctctaggtgaagcttgttggct

SEQ ID NO: 998481 - DNA, 25 bp, Homo sapien
tgtgacatagcatatcccttgttct

SEQ ID NO: 998482 - DNA, 25 bp, Homo sapien
catagtctaggttatcaatgcctgt

SEQ ID NO: 998483 - DNA, 25 bp, Homo sapien
ctctccccacaagtactaaagtagt

SEQ ID NO: 998484 - DNA, 25 bp, Homo sapien
cctctccccacaagtactaaagtag

SEQ ID NO: 998485 - DNA, 25 bp, Homo sapien
ataccttctttacatcgaggatcaa

SEQ ID NO: 998486 - DNA, 25 bp, Homo sapien
accttctttacatcgaggatcaatt

SEQ ID NO: 998487 - DNA, 25 bp, Homo sapien
tttacatcgaggatcaattttaagt

SEQ ID NO: 998488 - DNA, 25 bp, Homo sapien
ttacatcgaggatcaattttaagtt

SEQ ID NO: 998489 - DNA, 25 bp, Homo sapien
acaaggccagtcatcccaaagggtg

SEQ ID NO: 998490 - DNA, 25 bp, Homo sapien
tacctgaagctaggtggacagcaca

SEQ ID NO: 998491 - DNA, 25 bp, Homo sapien
ttacagcacctgatgggaaagccca

SEQ ID NO: 998492 - DNA, 25 bp, Homo sapien
gatcaactttcactaggctaggtag

SEQ ID NO: 998493 - DNA, 25 bp, Homo sapien
agcagctgctgtgggagtaagttca

SEQ ID NO: 998494 - DNA, 25 bp, Homo sapien
tattggcagctctagtagagaagcc

SEQ ID NO: 998495 - DNA, 25 bp, Homo sapien
catggcatttccaactctcagagca

SEQ ID NO: 998496 - DNA, 25 bp, Homo sapien
tgtagctcctgacatgagtccccag

SEQ ID NO: 998497 - DNA, 25 bp, Homo sapien
catctaattggtcaccaagttcagc

SEQ ID NO: 998498 - DNA, 25 bp, Homo sapien
gtcctttagcaacccagccactgaa

SEQ ID NO: 998499 - DNA, 25 bp, Homo sapien
ggtcctttagcaacccagccactga

SEQ ID NO: 998500 - DNA, 25 bp, Homo sapien
agtaatctagccacatctaattggt

SEQ ID NO: 998501 - DNA, 25 bp, Homo sapien
tcaccaggacagaggacatagtcaa

SEQ ID NO: 998502 - DNA, 25 bp, Homo sapien
gacaggcaagatgctgacctcttag

SEQ ID NO: 998503 - DNA, 25 bp, Homo sapien
ggtagaccactaggatgaagaagca

SEQ ID NO: 998504 - DNA, 25 bp, Homo sapien
tacctgcggtgtatcatccttggag

SEQ ID NO: 998505 - DNA, 25 bp, Homo sapien
tgagaacatatgtctgtcaaaggcc

SEQ ID NO: 998506 - DNA, 25 bp, Homo sapien
tcatggtactcgcttcatgctctgt

SEQ ID NO: 998507 - DNA, 25 bp, Homo sapien
catatttaacttccgtggaggagga

SEQ ID NO: 998508 - DNA, 25 bp, Homo sapien
catgctctgtccattaggtaaatga

SEQ ID NO: 998509 - DNA, 25 bp, Homo sapien
agatggcttcctctaagtttctgag

SEQ ID NO: 998510 - DNA, 25 bp, Homo sapien
cttgtctggataagttctgtctgtt

SEQ ID NO: 998511 - DNA, 25 bp, Homo sapien
ttcctggagacagctgaagaatttc

SEQ ID NO: 998512 - DNA, 25 bp, Homo sapien
cttgggccccctgtatcagggcatc

SEQ ID NO: 998513 - DNA, 25 bp, Homo sapien
agcttgggccccctgtatcagggca

SEQ ID NO: 998514 - DNA, 25 bp, Homo sapien
tcccgtggcttgacctaatttacta

SEQ ID NO: 998515 - DNA, 25 bp, Homo sapien
catatgtcggttccaaatcagcagc

SEQ ID NO: 998516 - DNA, 25 bp, Homo sapien
agccttctgtctgcactttcctatt

SEQ ID NO: 998517 - DNA, 25 bp, Homo sapien
gcagttcccataaattgaattcccg

SEQ ID NO: 998518 - DNA, 25 bp, Homo sapien
taacagaactcttaaggatcctagg

SEQ ID NO: 998519 - DNA, 25 bp, Homo sapien
tactcctttgtccatgggcaataga

SEQ ID NO: 998520 - DNA, 25 bp, Homo sapien
tctgggcagtaactctcaatgggct

SEQ ID NO: 998521 - DNA, 25 bp, Homo sapien
gagggctcttgcctaaccaggtgca

SEQ ID NO: 998522 - DNA, 25 bp, Homo sapien
ttctctggtgacttatccgtcttta

SEQ ID NO: 998523 - DNA, 25 bp, Homo sapien
tctggtgacttatccgtctttatca

SEQ ID NO: 998524 - DNA, 25 bp, Homo sapien
gacttatccgtctttatcagtttca

SEQ ID NO: 998525 - DNA, 25 bp, Homo sapien
ggtgacttatccgtctttatcagtt

SEQ ID NO: 998526 - DNA, 25 bp, Homo sapien
gaagaaagggtggttggacagccaa

SEQ ID NO: 998527 - DNA, 25 bp, Homo sapien
atccaaatatctgaccagcaaacca

SEQ ID NO: 998528 - DNA, 25 bp, Homo sapien
tgaccagcaaaccaagcaattcctt

SEQ ID NO: 998529 - DNA, 25 bp, Homo sapien
aaaatacttgctatcagtttgcccc

SEQ ID NO: 998530 - DNA, 25 bp, Homo sapien
catttccagatgtcactggtcccaa

SEQ ID NO: 998531 - DNA, 25 bp, Homo sapien
agcatttccagatgtcactggtccc

SEQ ID NO: 998532 - DNA, 25 bp, Homo sapien
gcatttccagatgtcactggtccca

SEQ ID NO: 998533 - DNA, 25 bp, Homo sapien
atttccagatgtcactggtcccaaa

SEQ ID NO: 998534 - DNA, 25 bp, Homo sapien
tatccgaaatctcccaaatagcaaa

SEQ ID NO: 998535 - DNA, 25 bp, Homo sapien
ggaaaacacacctgtatccgaaatc

SEQ ID NO: 998536 - DNA, 25 bp, Homo sapien
gatgtccactatgattgcatcgtag

SEQ ID NO: 998537 - DNA, 25 bp, Homo sapien
gattgcatcgtagttacactcctgg

SEQ ID NO: 998538 - DNA, 25 bp, Homo sapien
catgcctgtgcttataaaaaatgac

SEQ ID NO: 998539 - DNA, 25 bp, Homo sapien
cagaaagccccgaagtgcctgtttc

SEQ ID NO: 998540 - DNA, 25 bp, Homo sapien
gcctgtttctgtatattcctcctgt

SEQ ID NO: 998541 - DNA, 25 bp, Homo sapien
caggtacatctttaagcctaatcac

SEQ ID NO: 998542 - DNA, 25 bp, Homo sapien
aactactttcattgctactgtcagc

SEQ ID NO: 998543 - DNA, 25 bp, Homo sapien
tgaagttgtcttacagaacacctgt

SEQ ID NO: 998544 - DNA, 25 bp, Homo sapien
ctgtcagcaagtgaatgattcactt

SEQ ID NO: 998545 - DNA, 25 bp, Homo sapien
aataagaggcatgaaactactttca

SEQ ID NO: 998546 - DNA, 25 bp, Homo sapien
gcagcctccggtatctattggtgaa

SEQ ID NO: 998547 - DNA, 25 bp, Homo sapien
tggctaccgagggattagacattgc

SEQ ID NO: 998548 - DNA, 25 bp, Homo sapien
ttatgaaagtgacggaaaggagtcc

SEQ ID NO: 998549 - DNA, 25 bp, Homo sapien
tattggtgaactgctaaaggctact

SEQ ID NO: 998550 - DNA, 25 bp, Homo sapien
tgctcttcacaaccacaaaaactag

SEQ ID NO: 998551 - DNA, 25 bp, Homo sapien
cagattcataagatagtacagccag

SEQ ID NO: 998552 - DNA, 25 bp, Homo sapien
tgctataagtatatgcagctctgag

SEQ ID NO: 998553 - DNA, 25 bp, Homo sapien
tccaaacttcgtgagagacacatat

SEQ ID NO: 998554 - DNA, 25 bp, Homo sapien
gaatattgctagaagtggtcacttc

SEQ ID NO: 998555 - DNA, 25 bp, Homo sapien
ttgacctattatcaagagtgagtga

SEQ ID NO: 998556 - DNA, 25 bp, Homo sapien
tattttgatccagtggatcttgacc

SEQ ID NO: 998557 - DNA, 25 bp, Homo sapien
caagagtgagtgaatattgctagaa

SEQ ID NO: 998558 - DNA, 25 bp, Homo sapien
ctgatggtgctccgggactttattt

SEQ ID NO: 998559 - DNA, 25 bp, Homo sapien
atggtgctccgggactttatttttg

SEQ ID NO: 998560 - DNA, 25 bp, Homo sapien
tgatggtgctccgggactttatttt

SEQ ID NO: 998561 - DNA, 25 bp, Homo sapien
tattctctctccatgcggcatgggc

SEQ ID NO: 998562 - DNA, 25 bp, Homo sapien
cttattctctctccatgcggcatgg

SEQ ID NO: 998563 - DNA, 25 bp, Homo sapien
ttctctctccatgcggcatgggcac

SEQ ID NO: 998564 - DNA, 25 bp, Homo sapien
tgccctttcctgcgggtaacccaca

SEQ ID NO: 998565 - DNA, 25 bp, Homo sapien
ttcctggagcagactccacccccat

SEQ ID NO: 998566 - DNA, 25 bp, Homo sapien
gttcctggagcagactccaccccca

SEQ ID NO: 998567 - DNA, 25 bp, Homo sapien
agttcctggagcagactccaccccc

SEQ ID NO: 998568 - DNA, 25 bp, Homo sapien
gaggaagacattaggatgaggcatc

SEQ ID NO: 998569 - DNA, 25 bp, Homo sapien
ccaacatgagggactgaagcaaaag

SEQ ID NO: 998570 - DNA, 25 bp, Homo sapien
tgagagtagctccaacatgagggac

SEQ ID NO: 998571 - DNA, 25 bp, Homo sapien
tctgatgtggccacagtctggcgct

SEQ ID NO: 998572 - DNA, 25 bp, Homo sapien
aatagttggtcgaggatggttctcc

SEQ ID NO: 998573 - DNA, 25 bp, Homo sapien
caaagagggtggaattgtgctgttg

SEQ ID NO: 998574 - DNA, 25 bp, Homo sapien
gatcagctgccctcacatgagcgat

SEQ ID NO: 998575 - DNA, 25 bp, Homo sapien
gcattttcttggcgagaaatagtcg

SEQ ID NO: 998576 - DNA, 25 bp, Homo sapien
attgactttgcaagctgaagactgt

SEQ ID NO: 998577 - DNA, 25 bp, Homo sapien
aattgactttgcaagctgaagactg

SEQ ID NO: 998578 - DNA, 25 bp, Homo sapien
tttgcaagctgaagactgttttcaa

SEQ ID NO: 998579 - DNA, 25 bp, Homo sapien
actttgcaagctgaagactgttttc

SEQ ID NO: 998580 - DNA, 25 bp, Homo sapien
agcaaactctgcatgtgtgctcagg

SEQ ID NO: 998581 - DNA, 25 bp, Homo sapien
gctgtggtgtactctctacctaaaa

SEQ ID NO: 998582 - DNA, 25 bp, Homo sapien
cctaaaagagtacgcagcataatgg

SEQ ID NO: 998583 - DNA, 25 bp, Homo sapien
tcacatattattcaagcgaccaggt

SEQ ID NO: 998584 - DNA, 25 bp, Homo sapien
ctggtactcgaattgcctggtagca

SEQ ID NO: 998585 - DNA, 25 bp, Homo sapien
agcagtcagcagttgtgaagcccat

SEQ ID NO: 998586 - DNA, 25 bp, Homo sapien
tggtagcagtcagcagttgtgaagc

SEQ ID NO: 998587 - DNA, 25 bp, Homo sapien
tactcgaattgcctggtagcagtca

SEQ ID NO: 998588 - DNA, 25 bp, Homo sapien
ctctgtgcagtgaatagggactgaa

SEQ ID NO: 998589 - DNA, 25 bp, Homo sapien
gaagcaattctccttattgagagga

SEQ ID NO: 998590 - DNA, 25 bp, Homo sapien
gacaaggcaataaggcaatgcctcg

SEQ ID NO: 998591 - DNA, 25 bp, Homo sapien
taatacccacgagcatacataggcc

SEQ ID NO: 998592 - DNA, 25 bp, Homo sapien
ctaatgctctcgtctccctggcagg

SEQ ID NO: 998593 - DNA, 25 bp, Homo sapien
ctgttcgtggagtgttttagtttgc

SEQ ID NO: 998594 - DNA, 25 bp, Homo sapien
gaatggatgtctaatgctctcgtct

SEQ ID NO: 998595 - DNA, 25 bp, Homo sapien
actctgcgaatggatgtctaatgct

SEQ ID NO: 998596 - DNA, 25 bp, Homo sapien
ttaggccttgctaatatatcggtat

SEQ ID NO: 998597 - DNA, 25 bp, Homo sapien
gtccaggatagcaggactttttgac

SEQ ID NO: 998598 - DNA, 25 bp, Homo sapien
ccttgctaatatatcggtatgggac

SEQ ID NO: 998599 - DNA, 25 bp, Homo sapien
aatatatcggtatgggacaatctcc

SEQ ID NO: 998600 - DNA, 25 bp, Homo sapien
ccaagttccaggttctgtgcttggt

SEQ ID NO: 998601 - DNA, 25 bp, Homo sapien
ctttgtcaagccaagttccaggttc

SEQ ID NO: 998602 - DNA, 25 bp, Homo sapien
gtcaagccaagttccaggttctgtg

SEQ ID NO: 998603 - DNA, 25 bp, Homo sapien
caagttccaggttctgtgcttggtg

SEQ ID NO: 998604 - DNA, 25 bp, Homo sapien
gcatcctcaatatgcctgcataatg

SEQ ID NO: 998605 - DNA, 25 bp, Homo sapien
ttcagcatcctcaatatgcctgcat

SEQ ID NO: 998606 - DNA, 25 bp, Homo sapien
cagcatcctcaatatgcctgcataa

SEQ ID NO: 998607 - DNA, 25 bp, Homo sapien
catcctcaatatgcctgcataatgc

SEQ ID NO: 998608 - DNA, 25 bp, Homo sapien
acattgacctgggatgtgatcaact

SEQ ID NO: 998609 - DNA, 25 bp, Homo sapien
atgtgatcaactcgagaaccacatc

SEQ ID NO: 998610 - DNA, 25 bp, Homo sapien
gatcaactcgagaaccacatcactg

SEQ ID NO: 998611 - DNA, 25 bp, Homo sapien
gtaacacattgacctgggatgtgat

SEQ ID NO: 998612 - DNA, 25 bp, Homo sapien
gcaatacctggctctttatggcccg

SEQ ID NO: 998613 - DNA, 25 bp, Homo sapien
cagaggcagagtataattcatgtgg

SEQ ID NO: 998614 - DNA, 25 bp, Homo sapien
cagaaatggagcatgcacaaccagg

SEQ ID NO: 998615 - DNA, 25 bp, Homo sapien
caggtctgcatatccgagagtggtc

SEQ ID NO: 998616 - DNA, 25 bp, Homo sapien
tgatgagtcgaaagtagcctgtatg

SEQ ID NO: 998617 - DNA, 25 bp, Homo sapien
tcctccccgtacagtcttcataggt

SEQ ID NO: 998618 - DNA, 25 bp, Homo sapien
gtagcctgtatgtctctgaattctg

SEQ ID NO: 998619 - DNA, 25 bp, Homo sapien
aagagtttggtgatgagtcgaaagt

SEQ ID NO: 998620 - DNA, 25 bp, Homo sapien
caggctcgatctcccaggttcatgc

SEQ ID NO: 998621 - DNA, 25 bp, Homo sapien
gcaggctcgatctcccaggttcatg

SEQ ID NO: 998622 - DNA, 25 bp, Homo sapien
tgcaggctcgatctcccaggttcat

SEQ ID NO: 998623 - DNA, 25 bp, Homo sapien
actgcaggctcgatctcccaggttc

SEQ ID NO: 998624 - DNA, 25 bp, Homo sapien
ctcaaagctgtgtgaattgtcctca

SEQ ID NO: 998625 - DNA, 25 bp, Homo sapien
tcaaagctgtgtgaattgtcctcat

SEQ ID NO: 998626 - DNA, 25 bp, Homo sapien
attctcaaagctgtgtgaattgtcc

SEQ ID NO: 998627 - DNA, 25 bp, Homo sapien
tctcaaagctgtgtgaattgtcctc

SEQ ID NO: 998628 - DNA, 25 bp, Homo sapien
tgtgtcaggatccagctgattcttg

SEQ ID NO: 998629 - DNA, 25 bp, Homo sapien
gtgtcaggatccagctgattcttgg

SEQ ID NO: 998630 - DNA, 25 bp, Homo sapien
tgtcaggatccagctgattcttggt

SEQ ID NO: 998631 - DNA, 25 bp, Homo sapien
taaatgtagaaggaagtgccgccat

SEQ ID NO: 998632 - DNA, 25 bp, Homo sapien
ttttgtaccacattctgctcaataa

SEQ ID NO: 998633 - DNA, 25 bp, Homo sapien
accacattctgctcaataaatgtag

SEQ ID NO: 998634 - DNA, 25 bp, Homo sapien
gtaccacattctgctcaataaatgt

SEQ ID NO: 998635 - DNA, 25 bp, Homo sapien
cagaagtgacgttcacagggctggc

SEQ ID NO: 998636 - DNA, 25 bp, Homo sapien
tcagaaccattgtcacccatcattg

SEQ ID NO: 998637 - DNA, 25 bp, Homo sapien
gaaaagcttctgtccatatgggtta

SEQ ID NO: 998638 - DNA, 25 bp, Homo sapien
ggacccggtgaagatgactagcata

SEQ ID NO: 998639 - DNA, 25 bp, Homo sapien
gacgaggccaggctatgtcccctgt

SEQ ID NO: 998640 - DNA, 25 bp, Homo sapien
gctatgtcccctgtccctttacaaa

SEQ ID NO: 998641 - DNA, 25 bp, Homo sapien
aaaacctcagccttacactcagcat

SEQ ID NO: 998642 - DNA, 25 bp, Homo sapien
ggagatcaaccacaaggacgaggcc

SEQ ID NO: 998643 - DNA, 25 bp, Homo sapien
ctagatcctttttctgactgagagg

SEQ ID NO: 998644 - DNA, 25 bp, Homo sapien
ctcctgagcacctgccctactgctg

SEQ ID NO: 998645 - DNA, 25 bp, Homo sapien
gagggccatcataaccagggtccca

SEQ ID NO: 998646 - DNA, 25 bp, Homo sapien
gactgagagggccatcataaccagg

SEQ ID NO: 998647 - DNA, 25 bp, Homo sapien
catttgaagatacaactgccttctt

SEQ ID NO: 998648 - DNA, 25 bp, Homo sapien
aactgccttcttggtaataattcct

SEQ ID NO: 998649 - DNA, 25 bp, Homo sapien
gatacaactgccttcttggtaataa

SEQ ID NO: 998650 - DNA, 25 bp, Homo sapien
tgaagatacaactgccttcttggta

SEQ ID NO: 998651 - DNA, 25 bp, Homo sapien
gtactccatcacgtctatgggccat

SEQ ID NO: 998652 - DNA, 25 bp, Homo sapien
cacgctgcccttgagtactccatca

SEQ ID NO: 998653 - DNA, 25 bp, Homo sapien
tgcaagcaggtccattcaccaacgt

SEQ ID NO: 998654 - DNA, 25 bp, Homo sapien
aagcaggtccattcaccaacgtcca

SEQ ID NO: 998655 - DNA, 25 bp, Homo sapien
acttcagccctaacctctcaggctc

SEQ ID NO: 998656 - DNA, 25 bp, Homo sapien
tcacttcagccctaacctctcaggc

SEQ ID NO: 998657 - DNA, 25 bp, Homo sapien
cagctcacttcagccctaacctctc

SEQ ID NO: 998658 - DNA, 25 bp, Homo sapien
gctcacttcagccctaacctctcag

SEQ ID NO: 998659 - DNA, 25 bp, Homo sapien
ccatggcatacctccagtggcatca

SEQ ID NO: 998660 - DNA, 25 bp, Homo sapien
tagttatcagacaccagcgtgaacc

SEQ ID NO: 998661 - DNA, 25 bp, Homo sapien
gagggaaactgaccttggatgaaac

SEQ ID NO: 998662 - DNA, 25 bp, Homo sapien
cagtctccacatagataacagggaa

SEQ ID NO: 998663 - DNA, 25 bp, Homo sapien
cagccagtctccccatcgatgtggt

SEQ ID NO: 998664 - DNA, 25 bp, Homo sapien
gaaatagccgaaagtccagaggtga

SEQ ID NO: 998665 - DNA, 25 bp, Homo sapien
tcaccaagggaggatcaggaacaga

SEQ ID NO: 998666 - DNA, 25 bp, Homo sapien
ttttcaattgcaaatggccctaggc

SEQ ID NO: 998667 - DNA, 25 bp, Homo sapien
cacagggttacggtctcaccaaggg

SEQ ID NO: 998668 - DNA, 25 bp, Homo sapien
ccttgctcgtggtaagatcagagac

SEQ ID NO: 998669 - DNA, 25 bp, Homo sapien
gatcagagactgatcggagaacgct

SEQ ID NO: 998670 - DNA, 25 bp, Homo sapien
agagaagacgtaaggacgccttgct

SEQ ID NO: 998671 - DNA, 25 bp, Homo sapien
gaaggctttctggatatcctcgtca

SEQ ID NO: 998672 - DNA, 25 bp, Homo sapien
cagcaaacactggtggcatcaaaat

SEQ ID NO: 998673 - DNA, 25 bp, Homo sapien
tcaaaatagccaatcatgctgatgg

SEQ ID NO: 998674 - DNA, 25 bp, Homo sapien
aacactggtggcatcaaaatagcca

SEQ ID NO: 998675 - DNA, 25 bp, Homo sapien
tagccaatcatgctgatggctgcca

SEQ ID NO: 998676 - DNA, 25 bp, Homo sapien
tcaaagtgaagcattgaggaggacc

SEQ ID NO: 998677 - DNA, 25 bp, Homo sapien
ggtagaaggcttctgcgtcaaagtg

SEQ ID NO: 998678 - DNA, 25 bp, Homo sapien
cagggggtccgtagaacagcaagaa

SEQ ID NO: 998679 - DNA, 25 bp, Homo sapien
caagaagatgagcctgttggtggta

SEQ ID NO: 998680 - DNA, 25 bp, Homo sapien
tgtggacgttgctgcatcccaacca

SEQ ID NO: 998681 - DNA, 25 bp, Homo sapien
cctggcagcatccagtttcttgtgg

SEQ ID NO: 998682 - DNA, 25 bp, Homo sapien
gagccaggtttgcaacgggctcgca

SEQ ID NO: 998683 - DNA, 25 bp, Homo sapien
cgggctcgcagtggctttctcatcc

SEQ ID NO: 998684 - DNA, 25 bp, Homo sapien
ctagtttgatctgagttgtgtctga

SEQ ID NO: 998685 - DNA, 25 bp, Homo sapien
agtctagtttgatctgagttgtgtc

SEQ ID NO: 998686 - DNA, 25 bp, Homo sapien
cagagagtctagtttgatctgagtt

SEQ ID NO: 998687 - DNA, 25 bp, Homo sapien
ttttatcagagagtctagtttgatc

SEQ ID NO: 998688 - DNA, 25 bp, Homo sapien
tttgggttcgaggaggctgttttca

SEQ ID NO: 998689 - DNA, 25 bp, Homo sapien
gttctgaagtctgacccggccagtg

SEQ ID NO: 998690 - DNA, 25 bp, Homo sapien
ctgccggccgacaaaggacggtcct

SEQ ID NO: 998691 - DNA, 25 bp, Homo sapien
gtttgatcccgagagcggtggactc

SEQ ID NO: 998692 - DNA, 25 bp, Homo sapien
cctttcagtggtgcggggtttgatc

SEQ ID NO: 998693 - DNA, 25 bp, Homo sapien
ccagctcttgaagaatatcataggt

SEQ ID NO: 998694 - DNA, 25 bp, Homo sapien
cgaggtgacagcgtgggcacagcca

SEQ ID NO: 998695 - DNA, 25 bp, Homo sapien
aagaatatcataggtgatgaatgct

SEQ ID NO: 998696 - DNA, 25 bp, Homo sapien
ctcttgaagaatatcataggtgatg

SEQ ID NO: 998697 - DNA, 25 bp, Homo sapien
tattagagggataccaggcaacaga

SEQ ID NO: 998698 - DNA, 25 bp, Homo sapien
gcagtcatatatttcgtggtttcat

SEQ ID NO: 998699 - DNA, 25 bp, Homo sapien
cgtggtttcattaaatcggccttgg

SEQ ID NO: 998700 - DNA, 25 bp, Homo sapien
cttggtagacaagctgttctttcaa

SEQ ID NO: 998701 - DNA, 25 bp, Homo sapien
tggatgagcaggtttaaggaattgt

SEQ ID NO: 998702 - DNA, 25 bp, Homo sapien
gatgagcaggtttaaggaattgtat

SEQ ID NO: 998703 - DNA, 25 bp, Homo sapien
ggatgagcaggtttaaggaattgta

SEQ ID NO: 998704 - DNA, 25 bp, Homo sapien
atgagcaggtttaaggaattgtatc

SEQ ID NO: 998705 - DNA, 25 bp, Homo sapien
tataaaagatagacgtgaaaccagc

SEQ ID NO: 998706 - DNA, 25 bp, Homo sapien
cagccaatgtgaatgtgccgccaaa

SEQ ID NO: 998707 - DNA, 25 bp, Homo sapien
gccgccaaattggacctggttatat

SEQ ID NO: 998708 - DNA, 25 bp, Homo sapien
tagacgtgaaaccagccaatgtgaa

SEQ ID NO: 998709 - DNA, 25 bp, Homo sapien
cggcagcctgctccaaggtcaacag

SEQ ID NO: 998710 - DNA, 25 bp, Homo sapien
ttgctcaagatcctagagacagccc
